(19) United States
(12) Patent Application Publication
(10) Pub. No.: US 2008/0066201 A1
(43) Pub. Date: Mar. 13, 2008

(54) Nucleic acid molecules and other molecules associated with plants

(76) Inventors: Mark S. Abad, Webster Groves, MO (US); Thomas J. La Rosa, Maryland Heights, MO (US)

Correspondence Address: ARNOLD & PORTER, LLP, 555 TWELFTH STREET, N.W., ATTN: IP DOCKETING, WASHINGTON, DC, 20004, US

(21) Appl. No.: 11/978,194

(22) Filed: Oct. 29, 2007

Related U.S. Application Data
(63) Continuation of application No. 11/239,610, filed on Sep. 30, 2005.
Application No. 11/239,610 is a division of application No. 09/565,240, filed on May 8, 2000, now abandoned.

(51) Int. Cl. A01H 1/00; A01H 5/00; C07H 21/00; C07K 2/00; C12N 5/04

(52) U.S. Cl. 800/278; 435/419; 530/300; 536/23.1; 536/23.6; 800/295; 800/312; 800/314; 800/320.1; 800/320.3

(57) ABSTRACT

Expressed Sequence Tags (ESTs) isolated from soybean are disclosed. The ESTs provide a unique molecular tool for the targeting and isolation of novel genes for plant protection and improvement. The disclosed ESTs have utility in the development of new strategies for understanding critical plant developmental and metabolic pathways. The disclosed ESTs have particular utility in isolating genes and promoters, identifying and mapping the genes involved in developmental and metabolic pathways, and determining gene function. Sequence homology analyses using the ESTs provided in the present invention, will result in more efficient gene screening for desirable agronomic traits. An expanding database of these select pieces of the plant genomics puzzle will quickly expand the knowledge necessary for subsequent functional validation, a key limitation in current plant biotechnology efforts.

### INCORPORATION OF SEQUENCE LISTING

[0001] This application contains a sequence listing in Computer Readable Form (CRF), on CD-ROM. The sequence listing in Computer Readable Form (CRF) contains one file called “15793C Crctd Seq List.txt” which is 33,238,861 bytes in size (measured in MS-DOS) and was created on Mar. 6, 2006.

### FIELD OF THE INVENTION

[0002] The present invention is in the field of plant biochemistry. More specifically the invention relates to nucleic acid molecules that encode proteins and fragments of proteins produced in plant cells, in particular, soybean plants. The invention also relates to proteins and fragments of proteins so encoded and antibodies capable of binding the proteins. The invention also relates to methods of using the nucleic acid molecules, proteins and fragments of proteins.

### BACKGROUND OF THE INVENTION

I. Expressed Sequence Tag Nucleic Acid Molecules

[0003] Expressed sequence tags, or ESTs, are short sequences of randomly selected clones from a cDNA (or complementary DNA) library which are representative of the cDNA inserts of these randomly selected clones. McCombie, et al., Nature Genetics, 1:124-130 (1992); Kurata, et al., Nature Genetics, 8: 365-372 (1994); Okubo, et al., Nature Genetics, 2: 173-179 (1992), all of which references are incorporated herein in their entirety.

[0004] Using conventional methodologies, cDNA libraries can be constructed from the mRNA (messenger RNA) of a given tissue or organism using poly dT primers and reverse transcriptase (Efstratiadis, et al., Cell 7:279-288 (1976), the entirety of which is herein incorporated by reference; Higuchi, et al., Proc. Natl. Acad. Sci. (U.S.A.) 73:3146-3150 (1976), the entirety of which is herein incorporated by reference; Maniatis, et al., Cell 8:163 (1976) the entirety of which is herein incorporated by reference; Land, et al., Nucleic Acids Res. 9:2251-2266 (1981), the entirety of which is herein incorporated by reference; Okayama, et al., Mol. Cell. Biol. 2:161-170 (1982), the entirety of which is herein incorporated by reference; Gubler, et al., Gene 25:263 (1983), the entirety of which is herein incorporated by reference).

[0005] Several methods may be employed to obtain full-length cDNA constructs. For example, terminal transferase can be used to add homopolymeric tails of dC residues to the free 3′ hydroxyl groups (Land, et al., Nucleic Acids Res. 9:2251-2266 (1981), the entirety of which is herein incorporated by reference). This tail can then be hybridized by a poly dG oligo which can act as a primer for the synthesis of full length second strand cDNA. Okayama and Berg, report a method for obtaining full length cDNA constructs. This method has been simplified by using synthetic primer-adapters that have both homopolymeric tails for priming the synthesis of the first and second strands and restriction sites for cloning into plasmids (Coleclough, et al., Gene 34:305-314 (1985), the entirety of which is herein incorporated by reference) and bacteriophage vectors (Krawinkel, et al., Nucleic Acids Res. 14:1913 (1986), the entirety of which is herein incorporated by reference; and Han, et al., Nucleic Acids Res. 15:6304 (1987), the entirety of which is herein incorporated by reference).

[0006] These strategies have been coupled with additional strategies for isolating rare mRNA populations. For example, a typical mammalian cell contains between 10,000 and 30,000 different mRNA sequences. Davidson, Gene Activity in Early Development, 2nd ed., Academic Press, New York (1976). The number of clones required to achieve a given probability that a low-abundance mRNA will be present in a cDNA library is N=(ln(1−P))/(ln(1−1/n)) where N is the number of clones required, P is the probability desired, and 1/n is the fractional proportion of the total mRNA that is represented by a single rare mRNA. (Sambrook, et al., Molecular Cloning: A Laboratory Manual, 2nd ed., Cold Spring Harbor Laboratory Press (1989), the entirety of which is herein incorporated by reference.).

[0007] A method to enrich preparations of mRNA for sequences of interest is to fractionate by size. One such method is to fractionate by electrophoresis through an agarose gel (Pennica, et al., Nature 301:214-221 (1983), the entirety of which is herein incorporated by reference). Another such method employs sucrose gradient centrifugation in the presence of an agent, such as methylmercuric hydroxide, that denatures secondary structure in RNA (Schweinfest, et al., Proc. Natl. Acad. Sci. (U.S.A.) 79:4997-5000 (1982), the entirety of which is herein incorporated by reference).

[0008] A frequently adopted method is to construct equalized or normalized cDNA libraries (Ko, Nucleic Acids Res. 18:5705-5711 (1990), the entirety of which is herein incorporated by reference; Patanjali, S. R et al., Proc. Natl. Acad. Sci. (U.S.A.) 88:1943-1947 (1991), the entirety of which is herein incorporated by reference). Typically, the cDNA population is normalized by subtractive hybridization. Schmid, et al., J. Neurochem. 48:307-312 (1987) the entirety of which is herein incorporated by reference; Fargnoli, et al., Anal. Biochem. 187:364-373 (1990) the entirety of which is herein incorporated by reference; Travis, et al., Proc. Natl. Acad. Sci (U.S.A.) 85:1696-1700 (1988) the entirety of which is herein incorporated by reference; Kato, Eur. J. Neurosci. 2:704 (1990); and Schweinfest, et al., Genet. Anal. Tech. Appl. 7:64 (1990), the entirety of which is herein incorporated by reference). Subtraction represents another method for reducing the population of certain sequences in the cDNA library. Swaroop, et al., Nucleic Acids Res. 19:1954 (1991), the entirety of which is herein incorporated by reference).

[0009] ESTs can be sequenced by a number of methods. Two basic methods may be used for DNA sequencing, the chain termination method of Sanger et al., Proc. Natl. Acad. Sci. (U.S.A.) 74: 5463-5467 (1977), the entirety of which is herein incorporated by reference and the chemical degradation method of Maxam and Gilbert, Proc. Nat. Acad. Sci. (U.S.A.) 74: 560-564 (1977), the entirety of which is herein incorporated by reference. Automation and advances in technology such as the replacement of radioisotopes with fluorescence-based sequencing have reduced the effort required to sequence DNA (Craxton, Methods, 2: 20-26 (1991), the entirety of which is herein incorporated by reference; Ju et al., Proc. Natl. Acad. Sci. (U.S.A.) 92: 4347-4351 (1995), the entirety of which is herein incorporated by reference; Tabor and Richardson, Proc. Natl. Acad. Sci. (U.S.A.) 92: 6339-6343 (1995), the entirety of which is herein incorporated by reference). Automated sequencers are available from, for example, Pharmacia Biotech, Inc., Piscataway, N.J. (Pharmacia ALF), LI-COR, Inc., Lincoln, Nebr. (LI-COR 4,000) and Millipore, Bedford, Mass. (Millipore BaseStation).

[0010] In addition, advances in capillary gel electrophoresis have also reduced the effort required to sequence DNA and such advances provide a rapid high resolution approach for sequencing DNA samples (Swerdlow and Gesteland, Nucleic Acids Res. 18:1415-1419 (1990); Smith, Nature 349:812-813 (1991); Luckey et al., Methods Enzymol. 218:154-172 (1993); Lu et al., J. Chromatog. A. 680:497-501 (1994); Carson et al., Anal. Chem. 65:3219-3226 (1993); Huang et al., Anal. Chem. 64:2149-2154 (1992); Kheterpal et al., Electrophoresis 17:1852-1859 (1996); Quesada and Zhang, Electrophoresis 17:1841-1851 (1996); Baba, Yakugaku Zasshi 117:265-281 (1997), all of which are herein incorporated by reference in their entirety).

[0011] ESTs longer than 150 bases have been found to be useful for similarity searches and mapping. (Adams, et al., Science 252:1651-1656 (1991), herein incorporated by reference.) EST sequences normally range from 150-450 bases. This is the length of sequence information that is routinely and reliably generated using single run sequence data. Typically, only single run sequence data is obtained from the cDNA library, Adams, et al., Science 252:1651-1656 (1991). Automated single run sequencing typically results in an approximately 2-3% error or base ambiguity rate. (Boguski, et al., Nature Genetics, 4:332-333 (1993), the entirety of which is herein incorporated by reference).

[0012] EST databases have been constructed or partially constructed from, for example, C. elegans (McCombrie, et al., Nature Genetics 1:124-131 (1992), human liver cell line HepG2 (Okubo, et al., Nature Genetics 2:173-179 (1992)), human brain RNA (Adams, et al., Science 252:1651-1656 (1991); Adams, et al., Nature 355:632-635 (1992)), Arabidopsis, (Newman, et al., Plant Physiol. 106:1241-1255 (1994)); and rice (Kurata, et al., Nature Genetics 8:365-372 (1994).

II. Sequence Comparisons

[0013] A characteristic feature of a protein or DNA sequence is that it can be compared with other known protein or DNA sequences. Sequence comparisons can be undertaken by determining the similarity of the test or query sequence with sequences in publicly available or propriety databases (“similarity analysis”) or by searching for certain motifs (“intrinsic sequence analysis”) (e.g. cis elements) (Coulson, Trends in Biotechnology, 12: 76-80 (1994), the entirety of which is herein incorporated by reference; Birren, et al., Genome Analysis, 1: 543-559 (1997), the entirety of which is herein incorporated by reference).

[0014] Similarity analysis includes database search and alignment Examples of public databases include the DNA Database of Japan (DDBJ) (http://www.ddbj.nig.ac.jp/); Genebank (http://www.ncbi.nlm.nih.gov/web/Genbank/Index.htlm); and the European Molecular Biology Laboratory Nucleic Acid Sequence Database (EMBL) (http://www.ebi.ac.uk/ebi_docs/embl_db.html). A number of different search algorithms have been developed, one example of which are the suite of programs referred to as BLAST programs. There are five implementations of BLAST, three designed for nucleotide sequences queries (BLASTN, BLASTX, and TBLASTX) and two designed for protein sequence queries (BLASTP and TBLASTN) (Coulson, Trends in Biotechnology, 12: 76-80 (1994); Birren, et al., Genome Analysis, 1: 543-559 (1997)).

[0015] BLASTN takes a nucleotide sequence (the query sequence) and its reverse complement and searches them against a nucleotide sequence database. BLASTN was designed for speed, not maximum sensitivity, and may not find distantly related coding sequences. BLASTX takes a nucleotide sequence, translates it in three forward reading frames and three reverse complement reading frames, and then compares the six translations against a protein sequence database. BLASTX is useful for sensitive analysis of preliminary (single-pass) sequence data and is tolerant of sequencing errors (Gish and States, Nature Genetics, 3: 266-272 (1993), the entirety of which is herein incorporated by reference). BLASTN and BLASTX may be used in concert for analyzing EST data (Coulson, Trends in Biotechnology, 12: 76-80 (1994); Birren, et al., Genome Analysis, 1: 543-559 (1997).

[0016] Given a coding nucleotide sequence and the protein it encodes, it is often preferable to use the protein as the query sequence to search a database because of the greatly increased sensitivity to detect more subtle relationships. This is due to the larger alphabet of proteins (20 amino acids) compared with the alphabet of nucleic acid sequences (4 bases), where it is far easier to obtain a match by chance. In addition, with nucleotide alignments, only a match (positive score) or a mismatch (negative score) is obtained, but with proteins, the presence of conservative amino acid substitutions can be taken into account. Here, a mismatch may yield a positive score if the non-identical residue has physical/chemical properties similar to the one it replaced. Various scoring matrices are used to supply the substitution scores of all possible amino acid pairs. A general purpose scoring system is the BLOSUM62 matrix (Henikoff and Henikoff, Proteins, 17: 49-61 (1993), the entirety of which is herein incorporated by reference), which is currently the default choice for BLAST programs. BLOSUM62 is tailored for alignments of moderately diverged sequences and thus may not yield the best results under all conditions. Altschul, J. Mol. Biol. 36: 290-300 (1993), the entirety of which is herein incorporated by reference, uses a combination of three matrices to cover all contingencies. This may improve sensitivity, but at the expense of slower searches. In practice, a single BLOSUM62 matrix is often used but others (PAM40 and PAM250) may be attempted when additional analysis is necessary. Low PAM matrices are directed at detecting very strong but localized sequence similarities, whereas high PAM matrices are directed at detecting long but weak alignments between very distantly related sequences.

[0017] Homologues in other organisms are available that can be used for comparative sequence analysis. Multiple alignments are performed to study similarities and differences in a group of related sequences. CLUSTAL W is a multiple sequence alignment package available that performs progressive multiple sequence alignments based on the method of Feng and Doolittle, J. Mol. Evol. 25: 351-360 (1987), the entirety of which is herein incorporated by reference. Each pair of sequences is aligned and the distance between each pair is calculated; from this distance matrix, a guide tree is calculated, and all of the sequences are progressively aligned based on this tree. A feature of the program is its sensitivity to the effect of gaps on the alignment; gap penalties are varied to encourage the insertion of gaps in probable loop regions instead of in the middle of structured regions. Users can specify gap penalties, choose between a number of scoring matrices, or supply their own scoring matrix for both the pairwise alignments and the multiple alignments. CLUSTAL W for UNIX and VMS systems is available at: ftp.ebi.ac.uk. Another program is MACAW (Schuler et al., Proteins, Struct. Func. Genet, 9:180-190 (1991), the entirety of which is herein incorporated by reference, for which both Macintosh and Microsoft Windows versions are available. MACAW uses a graphical interface, provides a choice of several alignment algorithms, and is available by anonymous ftp at: ncbi.nlm.nih.gov (directory/pub/macaw).

[0018] Sequence motifs are derived from multiple alignments and can be used to examine individual sequences or an entire database for subtle patterns. With motifs, it is sometimes possible to detect distant relationships that may not be demonstrable based on comparisons of primary sequences alone. Currently, the largest collection of sequence motifs in the world is PROSITE (Bairoch and Bucher, Nucleic Acid Research, 22: 3583-3589 (1994), the entirety of which is herein incorporated by reference.) PROSITE may be accessed via either the ExPASy server on the World Wide Web or anonymous ftp site. Many commercial sequence analysis packages also provide search programs that use PROSITE data.

[0019] A resource for searching protein motifs is the BLOCKS E-mail server developed by S. Henikoff, Trends Biochem Sci., 18:267-268 (1993), the entirety of which is herein incorporated by reference; Henikoff and Henikoff, Nucleic Acid Research, 19:6565-6572 (1991), the entirety of which is herein incorporated by reference; Henikoff and Henikoff, Proteins, 17: 49-61 (1993). BLOCKS searches a protein or nucleotide sequence against a database of protein motifs or “blocks.” Blocks are defined as short, ungapped multiple alignments that represent highly conserved protein patterns. The blocks themselves are derived from entries in PROSITE as well as other sources. Either a protein or nucleotide query can be submitted to the BLOCKS server, if a nucleotide sequence is submitted, the sequence is translated in all six reading frames and motifs are sought in these conceptual translations. Once the search is completed, the server will return a ranked list of significant matches, along with an alignment of the query sequence to the matched BLOCKS entries.

[0020] Conserved protein domains can be represented by two-dimensional matrices, which measure either the frequency or probability of the occurrences of each amino acid residue and deletions or insertions in each position of the domain. This type of model, when used to search against protein databases, is sensitive and usually yields more accurate results than simple motif searches. Two popular implementations of this approach are profile searches (such as GCG program ProfileSearch) and Hidden Markov Models (HMMs) (Krough et al., J. Mol. Biol. 235:1501-1531 (1994); Eddy, Current Opinion in Structural Biology 6:361-365 (1996), both of which are herein incorporated by reference in their entirety). In both cases, a large number of common protein domains have been converted into profiles, as present in the PROSITE library, or HHM models, as in the Pfam protein domain library (Sonnhammer et al., Proteins 28:405-420 (1997), the entirety of which is herein incorporated by reference). Pfam contains more than 500 HMM models for enzymes, transcription factors, signal transduction molecules, and structural proteins. Protein databases can be queried with these profiles or HMM models, which will identify proteins containing the domain of interest. For example, HMMSW or HMMFS, two programs in a public domain package called HMMER (Sonnhammer et al., Proteins 28:405-420 (1997)) can be used.

[0021] PROSITE and BLOCKS represent collected families of protein motifs. Thus, searching these databases entails submitting a single sequence to determine whether or not that sequence is similar to the members of an established family. Programs working in the opposite direction compare a collection of sequences with individual entries in the protein databases. An example of such a program is the Motif Search Tool, or MoST (Tatusov et al. Proc. Natl. Acad. Sci. 91: 12091-12095 (1994), the entirety of which is herein incorporated by reference.) On the basis of an aligned set of input sequences, a weight matrix is calculated by using one of four methods (selected by the user); a weight matrix is simply a representation, position by position in an alignment, of how likely a particular amino acid will appear. The calculated weight matrix is then used to search the databases. To increase sensitivity, newly found sequences are added to the original data set, the weight matrix is recalculated, and the search is performed again. This procedure continues until no new sequences are found.

### SUMMARY OF THE INVENTION

[0022] The present invention provides a substantially purified nucleic acid molecule that encodes a soybean protein or fragment thereof comprising a nucleic acid sequence selected from the group consisting of SEQ ID NO: 1 through SEQ ID NO: 54005.

[0023] The present invention also provides one or more substantially purified nucleic acid molecules comprising a nucleic acid sequence selected from the group consisting of SEQ ID NO: 1 through SEQ ID NO: 54005 or complements thereof.

[0024] The present invention also provides a substantially purified soybean protein or fragment thereof, wherein said soybean protein is encoded by a nucleic acid molecule that comprises a nucleic acid sequence selected from the group consisting of SEQ ID NO: 1 through SEQ ID NO: 54005.

[0025] The present invention further provides a substantially purified protein, peptide, or fragment thereof encoded by a nucleic acid sequence which specifically hybridizes to a nucleic acid molecule comprising a nucleic acid sequence selected from the group consisting of a complement of SEQ ID NO: 1 through SEQ ID NO:54005.

[0026] The present invention further provides a substantially purified antibody capable of specifically binding to a protein or fragment thereof encoded by a nucleic acid sequence which specifically hybridizes to a nucleic acid molecule having a nucleic acid sequence selected from the group consisting of a complement of SEQ ID NO: 1 through SEQ ID NO: 54005.

[0027] The present invention also provides a transformed plant transformed to contain a nucleic acid molecule which comprises: (A) an exogeneous promoter region which functions in plant cells to cause the production of an mRNA molecule; which is linked to (B) a structural nucleic acid molecule, wherein said structural nucleic acid molecule comprises a nucleic acid molecule that encodes a protein, peptide, or fragment thereof which hybridizes to a nucleic acid sequence selected from the group consisting of a complement of SEQ ID NO: 1 through SEQ ID NO: 54005 expressed in an effective amount to produce a desirable agronomic effect; which is linked to (C) a 3′ non-translated sequence that functions in plant cells to cause the termination of transcription and the addition of polyadenylated ribonucleotides to the 3′ end of the mRNA sequence.

[0028] The present invention also provides a transformed plant cell containing a nucleic acid molecule whose non-transcribed strand encodes a protein or fragment thereof, wherein the transcribed strand of said nucleic acid is complementary to a nucleic acid molecule that encodes a protein or fragment thereof. The present invention also provides bacterial, viral, microbial, and plant cells comprising a nucleic acid molecule of the present invention.

[0029] The present invention also provides a method of producing a plant containing one or more proteins encoded by sequences comprising SEQ ID NO: 1 or complement thereof through SEQ ID NO: 54005 or complements thereof, expressed in a sufficient amount and/or fashion to produce a desirable agronomic effect.

[0030] In accomplishing the foregoing, there is provided, in accordance with one aspect of the present invention, methods of producing genetically transformed plants, comprising the steps of:
[0031] (a) inserting into the genome of a plant cell a recombinant, double-stranded DNA molecule comprising
   [0032] (i) a promoter which functions in plant cells to cause the production of an RNA sequence,
   [0033] (ii) a structural DNA sequence that causes the production of an RNA sequence which encodes a desired protein.
   [0034] (iii) a 3′ non-translated DNA sequence which functions in plant cells to cause the addition of polyadenylated nucleotides to the 3′ end of RNA sequence; where the promoter is homologous or heterologous with respect to the coding sequence and adapted to cause sufficient expression of a protein in desired plant tissues to enhance the agronomic utility of a plant transformed with said gene.
[0035] (b) obtaining a transformed plant cell with said nucleic acid molecule that encodes one or more proteins, wherein said nucleic acid molecule is transcribed and results in expression of said protein(s); and
[0036] (c) regenerating from the transformed plant cell a genetically transformed plant

[0037] The present invention also encompasses differentiated plants, seeds, and progeny comprising said transformed plant cells and which exhibit novel properties of agronomic significance.

[0038] The present invention also provides a method of producing a plant containing reduced levels of a protein comprising: (A) transforming a plant cell with a nucleic acid molecule that encodes a protein, wherein said nucleic acid molecule is transcribed and results in co-suppression of endogenous protein synthesis activity, and (B) regenerating plants and producing subsequent progeny from the transformed plant.

[0039] The present invention also provides a method of determining an association between a polymorphism and a plant trait comprising: (A) hybridizing a nucleic acid molecule specific for a polymorphism to genetic material of a plant, wherein said nucleic acid molecule comprising a nucleic acid sequence selected from the group consisting of SEQ ID NO: 1 through SEQ ID NO: 54005 or complements thereof; and (B) calculating the degree of association between the polymorphism and the plant trait.

[0040] The present invention also provides a method of isolating a genetic region, or nucleic acid that encodes a protein or fragment thereof comprising: (A) incubating under conditions permitting nucleic acid hybridization: a marker nucleic acid molecule, preferably an EST, with a complementary nucleic acid molecule obtained from a plant cell or plant tissue; (B) permitting hybridization between said marker nucleic acid molecule, preferably an EST, and said complementary nucleic acid molecule obtained from said plant cell or plant tissue; and (C) isolating said complementary nucleic acid molecule.

[0041] The present invention also provides a method for determining a level or pattern in a plant cell of a protein in a plant comprising: (A) incubating, under conditions permitting nucleic acid hybridization, a marker nucleic acid molecule, the marker nucleic acid molecule selected from the group of marker nucleic acid molecules which specifically hybridize to a nucleic acid molecule having the nucleic acid sequence selected from the group consisting of SEQ ID NO: 1 through SEQ ID NO: 54005 or complements thereof or fragments of either, with a complementary nucleic acid molecule obtained from the plant cell or plant tissue, wherein nucleic acid hybridization between the marker nucleic acid molecule and the complementary nucleic acid molecule obtained from the plant cell or plant tissue permits the detection of an mRNA for the enzyme; (B) permitting hybridization between the marker nucleic acid molecule and the complementary nucleic acid molecule obtained from the plant cell or plant tissue; and (C) detecting the level or pattern of the complementary nucleic acid, wherein the detection of the complementary nucleic acid is predictive of the level or pattern of the protein.

[0042] The present invention also provides a method for determining the level or pattern of a protein in a plant cell or plant tissue comprising: (A) incubating under conditions permitting nucleic acid hybridization: a marker nucleic acid molecule, the marker nucleic acid molecule comprising a nucleotide sequence selected from the group consisting of SEQ ID NO: 1 through SEQ ID NO: 54005 or complements thereof, with a complementary nucleic acid molecule obtained from a plant cell or plant tissue, wherein nucleic acid hybridization between the marker nucleic acid molecule, and the complementary nucleic acid molecule obtained from the plant cell or plant tissue permits the detection of said protein; (B) permitting hybridization between the marker nucleic acid molecule and the complementary nucleic acid molecule obtained from the plant cell or plant tissue; and (C) detecting the level or pattern of the complementary nucleic acid, wherein the detection of said complementary nucleic acid is predictive of the level or pattern of the protein synthesis.

[0043] The present invention also provides a method for determining a level or pattern of a protein in a plant cell or plant tissue which comprises assaying the concentration of a molecule, whose concentration is dependent upon the expression of a gene, the gene having a nucleic acid sequence which specifically hybridizes to a protein marker nucleic acid molecule, the molecule being present in a plant cell or plant tissue, in comparison to the concentration of that molecule present in a plant cell or plant tissue with a known level or pattern of said protein, wherein an assayed concentration of the molecule is compared to the assayed concentration of the molecule in a plant cell or plant tissue with a known level or pattern of said protein.

[0044] The present invention also provides a method of determining a mutation in a plant whose presence is predictive of a mutation affecting a level or pattern of a protein comprising the steps: (A) incubating, under conditions permitting nucleic acid hybridization, a marker nucleic acid, the marker nucleic acid selected from the group of marker nucleic acid molecules which specifically hybridize to a nucleic acid molecule consisting of the nucleic acid sequence selected from the group consisting of SEQ ID NO: 1 through SEQ ID NO: 54005 or complements thereof or fragments of either and a complementary nucleic acid molecule obtained from the plant, wherein nucleic acid hybridization between the marker nucleic acid molecule and the complementary nucleic acid molecule obtained from the plant permits the detection of a polymorphism whose presence is predictive of a mutation affecting the level or pattern of the protein in the plant; (B) permitting hybridization between the marker nucleic acid molecule and the complementary nucleic acid molecule obtained from the plant; and (C) detecting the presence of the polymorphism, wherein the detection of the polymorphism is predictive of the mutation.

[0045] The present invention also provides a method for determining a mutation in a plant whose presence is predictive of a mutation affecting the level or pattern of protein synthesis comprising the steps: (A) incubating under conditions permitting nucleic acid hybridization: a marker nucleic acid molecule, the marker nucleic acid molecule comprising a nucleic acid molecule that is linked to gene, the gene having a nucleic acid sequence which specifically hybridizes to a sequence selected from the group consisting of SEQ ID NO: 1 through SEQ ID NO: 54005 and complements thereof, and a complementary nucleic acid molecule obtained from a plant tissue or plant cell of the plant, wherein nucleic acid hybridization between the marker nucleic acid molecule and the complementary nucleic acid molecule obtained from the plant permits the detection of a polymorphism whose presence is predictive of a mutation affecting said level or pattern of a protein synthesis in the plant; (B) permitting hybridization between said marker nucleic acid molecule and said complementary nucleic acid molecule obtained from said plant; and; (C) detecting the presence of the polymorphism, wherein the detection of the polymorphism is predictive of the mutation.

[0046] The present invention also provides a method for reducing expression of a protein in a plant cell, the method comprising: growing a transformed plant cell containing a nucleic acid molecule whose non-transcribed strand encodes a protein or fragment thereof, wherein the transcribed strand of said nucleic acid is complementary to a nucleic acid molecule that encodes the protein in said plant cell, and whereby the strand that is complementary to the nucleic acid molecule that encodes the protein reduces or depresses expression of the protein.

[0047] The present invention provides soybean nucleic acid molecules for use as molecular tags to isolate genetic regions (i.e. promoters and flanking sequences), isolate genes, map genes, and determine gene function. The present invention further provides soybean nucleic acid molecules for use in determining if genes are members of a particular gene family.

[0048] The present invention also provides a method of obtaining full length genes using soybean ESTs or complements thereof or fragments of either.

[0049] The present invention also provides a method of isolating promoters and flanking sequences using soybean ESTs or complements thereof or fragments of either.

[0050] The present invention also provides soybean ESTs or complements thereof or fragments of either for use in marker-assisted breeding programs.

[0051] The present invention also provides a method of identifying tissues comprising hybridizing nucleic acids from the tissue with soybean ESTs or complements thereof or fragments of either.

[0052] The present invention also provides a method for production of antibodies targeted against the proteins, peptides, or fragments produced by the disclosed or complements thereof or fragments of either.

[0053] The present invention also provides a method for the transformation and regeneration of plants comprising sequences hybridizable to the disclosed ESTs or complements thereof or fragments of either.

[0054] The present invention also provides a method of modifying plant protein expression by inserting in a chimeric gene sense or antisense constructs of the soybean ESTs.

### DETAILED DESCRIPTION OF THE INVENTION

Agents

[0055] (a) Nucleic Acid Molecules

[0056] Agents of the present invention include nucleic acid molecules and more specifically EST nucleic acid molecules or nucleic acid fragment molecules thereof. Fragment EST nucleic acid molecules may encode significant portion(s) of, or indeed most of, the EST nucleic acid molecule. Alternatively, the fragments may comprise smaller oligonucleotides (having from about 15 to about 250 nucleotide residues, and more preferably, about 15 to about 30 nucleotide residues).

[0057] A subset of the nucleic acid molecules of the present invention includes nucleic acid molecules that are marker molecules. Another subset of the nucleic acid molecules of the present invention include nucleic acid molecules that encode a protein or fragment thereof. Another subset of the nucleic acid molecules of the present invention are EST molecules.

[0058] The term “substantially purified”, as used herein, refers to a molecule separated from substantially all other molecules normally associated with it in its native state. More preferably a substantially purified molecule is the predominant species present in a preparation. A substantially purified molecule may be greater than 60% free, preferably 75% free, more preferably 90% free, and most preferably 95% free from the other molecules (exclusive of solvent) present in the natural mixture. The term “substantially purified” is not intended to encompass molecules present in their native state.

[0059] The agents of the present invention will preferably be “biologically active” with respect to either a structural attribute, such as the capacity of a nucleic acid to hybridize to another nucleic acid molecule, or the ability of a protein to be bound by antibody (or to compete with another molecule for such binding). Alternatively, such an attribute may be catalytic, and thus involve the capacity of the agent to mediate a chemical reaction or response.

[0060] The agents of the present invention may also be recombinant. As used herein, the term recombinant means any agent (e.g. DNA, peptide etc.), that is, or results, however indirect, from human manipulation of a nucleic acid molecule.

[0061] It is understood that the agents of the present invention may be labeled with reagents that facilitate detection of the agent (e.g. fluorescent labels (Prober, et al., Science 238:336-340 (1987); Albarella et al., EP 144914, chemical labels (Sheldon et al., U.S. Pat. No. 4,582,789; Albarella et al., U.S. Pat. No. 4,563,417, modified bases (Miyoshi et al., EP 119448, all of which are hereby incorporated by reference in their entirety).

[0062] It is further understood, that the present invention provides bacterial, viral, microbial, and plant cells comprising the agents of the present invention.

[0063] Nucleic acid molecules or fragment thereof of the present invention are capable of specifically hybridizing to other nucleic acid molecules under certain circumstances. As used herein, two nucleic acid molecules are said to be capable of specifically hybridizing to one another if the two molecules are capable of forming an anti-parallel, double-stranded nucleic acid structure. A nucleic acid molecule is said to be the “complement” of another nucleic acid molecule if they exhibit complete complementarity. As used herein, molecules are said to exhibit “complete complementarity” when every nucleotide of one of the molecules is complementary to a nucleotide of the other. Two molecules are said to be “minimally complementary” if they can hybridize to one another with sufficient stability to permit them to remain annealed to one another under at least conventional “low-stringency” conditions. Similarly, the molecules are said to be “complementary” if they can hybridize to one another with sufficient stability to permit them to remain annealed to one another under conventional “high-stringency” conditions. Conventional stringency conditions are described by Sambrook, et al., In: Molecular Cloning, A Laboratory Manual, 2nd Edition, Cold Spring Harbor Press, Cold Spring Harbor, N.Y. (1989), and by Haymes, et al. In: Nucleic Acid Hybridization, A Practical Approach, IRL Press, Washington, D.C. (1985), the entirety of which is herein incorporated by reference. Departures from complete complementarity are therefore permissible, as long as such departures do not completely preclude the capacity of the molecules to form a double-stranded structure. Thus, in order for an nucleic acid molecule or fragment of the present invention to serve as a primer or probe it need only be sufficiently complementary in sequence to be able to form a stable double-stranded structure under the particular solvent and salt concentrations employed.

[0064] Appropriate stringency conditions which promote DNA hybridization are, for example, 6.0× sodium chloride/sodium citrate (SSC) at about 45° C., followed by a wash of 2.0×SSC at 50° C., are known to those skilled in the art or can be found in Current Protocols in Molecular Biology, John Wiley & Sons, N.Y. (1989), 6.3.1-6.3.6. For example, the salt concentration in the wash step can be selected from a low stringency of about 2.0×SSC at 50° C. to a high stringency of about 0.2×SSC at 50° C. In addition, the temperature in the wash step can be increased from low stringency conditions at room temperature, about 22° C., to high stringency conditions at about 65° C. Both temperature and salt may be varied, or either the temperature or the salt concentration may be held constant while the other variable is changed.

[0065] In a preferred embodiment, a nucleic acid of the present invention will specifically hybridize to one or more of the nucleic acid molecules set forth in SEQ ID NO: 1 through SEQ ID NO: 54005 or complements thereof under moderately stringent conditions, for example, at about 2.0×SSC and about 65° C.

[0066] In a particularly preferred embodiment, a nucleic acid of the present invention will include those nucleic acid molecules that specifically hybridize to one or more of the nucleic acid molecules set forth in SEQ ID NO: 1 through SEQ ID NO: 54005 or complements thereof under high stringency conditions.

[0067] In one aspect of the present invention, the nucleic acid molecules of the present invention have one or more of the nucleic acid sequences set forth in SEQ ID NO: 1 through SEQ ID NO: 54005 or complements thereof. In another aspect of the present invention, one or more of the nucleic acid molecules of the present invention share between 100% and 90% sequence identity with one or more of the nucleic acid sequences set forth in SEQ ID NO: 1 through SEQ ID NO: 54005 or complements thereof. In a further aspect of the present invention, one or more of the nucleic acid molecules of the present invention share between 100% and 95% sequence identity with one or more of the nucleic acid sequences set forth in SEQ ID NO: 1 through SEQ ID NO: 54005 or complements thereof. In a more preferred aspect of the present invention, one or more of the nucleic acid molecules of the present invention share between 100% and 98% sequence identity with one or more of the nucleic acid sequences set forth in SEQ ID NO: 1 through SEQ ID NO: 54005 or complements thereof. In an even more preferred aspect of the present invention, one or more of the nucleic acid molecules of the present invention share between 100% and 99% sequence identity with one or more of the sequences set forth in SEQ ID NO: 1 through SEQ ID NO: 54005 or complements thereof. In a further, even more preferred aspect of the present invention, one or more of the nucleic acid molecules of the present invention exhibit 100% sequence identity with one or more nucleic acid molecules present within the cDNA libraries LIB3072, LIB3073, LIB3074, LIB3087, LIB3092, LIB3094, LIB3106, LIB3108, LIB3138, LIB3139, and LIB3167. (Monsanto Company, St Louis, Mo., United States of America).

[0068] In a preferred embodiment of the present invention, a soybean protein or fragment thereof of the present invention is a homologue of another plant protein. In another preferred embodiment of the present invention, a soybean protein or fragment thereof of the present invention is a homologue of a fungal protein. In another preferred embodiment of the present invention, a soybean protein or fragment thereof of the present invention is a homologue of mammalian protein. In another preferred embodiment of the present invention, a soybean protein or fragment thereof of the present invention is a homologue of a bacterial protein. In another preferred embodiment of the present invention, a soybean protein or fragment thereof of the present invention is a homologue of a maize protein.

[0069] In a preferred embodiment of the present invention, the nucleic molecule of the present invention encodes a soybean protein or fragment thereof where a soybean protein or fragment thereof exhibits a BLAST probability score of greater than IE-12, preferably a BLAST probability score of between about IE-30 and about IE-12, even more preferably a BLAST probability score of greater than IE-30 with its homologue.

[0070] In another preferred embodiment of the present invention, the nucleic acid molecule encoding a soybean protein or fragment thereof exhibits a % identity with its homologue of between about 25% and about 40%, more preferably of between about 40 and about 70%, even more preferably of between about 70% and about 90% and even more preferably between about 90% and 99%. In another preferred embodiment, of the present invention, a soybean protein or fragment thereof exhibits a % identity with its homologue of 100%.

[0071] In a preferred embodiment of the present invention, the nucleic molecule of the present invention encodes a soybean protein or fragment thereof where the soybean protein exhibits a BLAST score of greater than 120, preferably a BLAST score of between about 1450 and about 120, even more preferably a BLAST score of greater than 1450 with its homologue.

[0072] Nucleic acid molecules of the present invention also include non-soybean homologues. Preferred non-homologues are selected from the group consisting of alfalfa, Arabidopsis, barley, Brassica, broccoli, cabbage, citrus, cotton, garlic, oat, oilseed rape, onion, canola, flax, an ornamental plant, maize, pea, peanut, pepper, potato, rice, rye, sorghum, strawberry, sugarcane, sugarbeet, tomato, wheat, poplar, pine, fir, eucalyptus, apple, lettuce, lentils, grape, banana, tea, turf grasses, sunflower, oil palm and Phaseolus.

[0073] The degeneracy of the genetic code, which allows different nucleic acid sequences to code for the same protein or peptide, is known in the literature. (U.S. Pat. No. 4,757,006, the entirety of which is herein incorporated by reference).

[0074] In an aspect of the present invention, one or more of the nucleic acid molecules of the present invention differ in nucleic acid sequence from those encoding a soybean protein or fragment thereof in SEQ ID NO: 1 through SEQ ID NO: 54005 due to the degeneracy in the genetic code in that they encode the same protein but differ in nucleic acid sequence.

[0075] In another further aspect of the present invention one or more of the nucleic acid molecules of the present invention differ in nucleic acid sequence from those encoding a soybean protein or fragment thereof in SEQ ID NO: 1 through SEQ ID NO: 54005 due to fact that the different nucleic acid sequences encode a protein having one or more conservative amino acid residues. It is understood that codons capable of coding for such conservative substitutions are known in the art.

[0076] It is well known in the art that one or more amino acids in a native sequence can be substituted with another amino acid(s), the charge and polarity of which are similar to that of the native amino acid, i.e., a conservative amino acid substitution, resulting in a silent change. Conserved substitutes for an amino acid within the native polypeptide sequence can be selected from other members of the class to which the naturally occurring amino acid belongs. Amino acids can be divided into the following four groups: (1) acidic amino acids, (2) basic amino acids, (3) neutral polar amino acids, and (4) neutral nonpolar amino acids. Representative amino acids within these various groups include, but are not limited to, (1) acidic (negatively charged) amino acids such as aspartic acid and glutamic acid; (2) basic (positively charged) amino acids such as arginine, histidine, and lysine; (3) neutral polar amino acids such as glycine, serine, threonine, cysteine, cystine, tyrosine, asparagine, and glutamine; and (4) neutral nonpolar (hydrophobic) amino acids such as alanine, leucine, isoleucine, valine, proline, phenylalanine, tryptophan, and methionine.

[0077] Conservative amino acid changes within the native polypeptides sequence can be made by substituting one amino acid within one of these groups with another amino acid within the same group. Biologically functional equivalents of the proteins or fragments thereof of the present invention can have 10 or fewer conservative amino acid changes, more preferably seven or fewer conservative amino acid changes, and most preferably five or fewer conservative amino acid changes. The encoding nucleotide sequence will thus have corresponding base substitutions, permitting it to encode biologically functional equivalent forms of the proteins or fragments of the present invention.

[0078] It is understood that certain amino acids may be substituted for other amino acids in a protein structure without appreciable loss of interactive binding capacity with structures such as, for example, antigent-binding regions of antibodies or binding sites on substrate molecules. Because it is the interactive capacity and nature of a protein that defines that protein's biological functional activity, certain amino acid sequence substitutions can be made in a protein sequence and, of course, its underlying DNA coding sequence and, nevertheless, obtain a protein with like properties. It is thus contemplated by the inventors that various changes may be made in the peptide sequences of the proteins or fragments of the present invention, or corresponding DNA sequences that encode said peptides, without appreciable loss of their biological utility or activity. It is understood that codons capable of coding for such amino acid changes are known in the art.

[0079] In making such changes, the hydropathic index of amino acids may be considered. The importance of the hydropathic amino acid index in conferring interactive biological function on a protein is generally understood in the art (Kyte and Doolittle, J. Mol. Biol. 157, 105-132 (1982), herein incorporated by reference in its entirety). It is accepted that the relative hydropathic character of the amino acid contributes to the secondary structure of the resultant protein, which in turn defines the interaction of the protein with other molecules, for example, enzymes, substrates, receptors, DNA, antibodies, antigens, and the like.

[0080] Each amino acid has been assigned a hydropathic index on the basis of its hydrophobicity and charge characteristics (Kyte and Doolittle, 1982); these are isoleucine (+4.5), valine (+4.2), leucine (+3.8), phenylalanine (+2.8), cysteine/cystine (+2.5), methionine (+1.9), alanine (+1.8), glycine (−0.4), threonine (−0.7), serine (−0.8), tryptophan (−0.9), tyrosine (−1.3), proline (−1.6), histidine (−3.2), glutamate (−3.5), glutamine (−3.5), aspartate (−3.5), asparagine (−3.5), lysine (−3.9), and arginine (4.5).

[0081] In making such changes, the substitution of amino acids whose hydropathic indices are within ±2 is preferred, those which are within ±1 are particularly preferred, and those within ±0.5 are even more particularly preferred.

[0082] It is also understood in the art that the substitution of like amino acids can be made effectively on the basis of hydrophilicity. U.S. Pat. No. 4,554,101, incorporated herein by reference in its entirety, states that the greatest local average hydrophilicity of a protein, as govern by the hydrophilicity of its adjacent amino acids, correlates with a biological property of the protein.

[0083] As detailed in U.S. Pat. No. 4,554,101, the following hydrophilicity values have been assigned to amino acid residues: arginine (+3.0), lysine (+3.0), aspartate (+3.0±1), glutamate (+3.0±1), serine (+0.3), asparagine (+0.2), glutamine (+0.2), glycine (0), threonine (−0.4), proline (−0.5±1), alanine (−0.5), histidine (−0.5), cysteine (−1.0), methionine (−1.3), valine (−1.5), leucine (−1.8), isoleucine (−1.8), tyrosine (−2.3), phenylalanine (−2.5), and tryptophan (−3.4).

[0084] In making such changes, the substitution of amino acids whose hydrophilicity values are within ±2 is preferred, those which are within ±1 are particularly preferred, and those within ±0.5 are even more particularly preferred.

[0085] In a further aspect of the present invention, one or more of the nucleic acid molecules of the present invention differ in nucleic acid sequence from those encoding a soybean protein or fragment thereof set forth in SEQ ID NO: 1 through SEQ ID NO: 54005 or fragment thereof due to the fact that one or more codons encoding an amino acid has been substituted for a codon that encodes a nonessential substitution of the amino acid originally encoded.

[0086] One aspect of the present invention concerns markers that include nucleic acid molecules SEQ ID NO: 1 through SEQ ID NO: 54005 or complements thereof or fragments of either that can act as markers or other nucleic acid molecules of the present invention that can act as markers. Genetic markers of the present invention include “dominant” or “codominant” markers “Codominant markers” reveal the presence of two or more alleles (two per diploid individual) at a locus. “Dominant markers” reveal the presence of only a single allele per locus. The presence of the dominant marker phenotype (e.g., a band of DNA) is an indication that one allele is present in either the homozygous or heterozygous condition. The absence of the dominant marker phenotype (e.g. absence of a DNA band) is merely evidence that “some other” undefined allele is present. In the case of populations where individuals are predominantly homozygous and loci are predominately dimorphic, dominant and codominant markers can be equally valuable. As populations become more heterozygous and multi-allelic, codominant markers often become more informative of the genotype than dominant markers. Marker molecules can be, for example, capable of detecting polymorphisms such as single nucleotide polymorphisms (SNPs).

[0087] SNPs are single base changes in genomic DNA sequence. They occur at greater frequency and are spaced with a greater uniformity throughout a genome than other reported forms of polymorphism. The greater frequency and uniformity of SNPs means that there is greater probability that such a polymorphism will be found near or in a genetic locus of interest than would be the case for other polymorphisms. SNPs are located in protein-coding regions and noncoding regions of a genome. Some of these SNPs may result in defective or variant protein expression (e.g., as a results of mutations or defective splicing). Analysis (genotyping) of characterized SNPs can require only a plus/minus assay rather than a lengthy measurement, permitting easier automation.

[0088] SNPs can be characterized using any of a variety of methods. Such methods include the direct or indirect sequencing of the site, the use of restriction enzymes (Botstein et al., Am. J. Hum. Genet. 32:314-331 (1980), the entirety of which is herein incorporated reference; Konieczny and Ausubel, Plant J. 4:403-410 (1993), the entirety of which is herein incorporated by reference), enzymatic and chemical mismatch assays (Myers et al., Nature 313:495-498 (1985), the entirety of which is herein incorporated by reference), allele-specific PCR (Newton et al., Nucl. Acids Res. 17:2503-2516 (1989), the entirety of which is herein incorporated by reference; Wu et al., Proc. Natl. Acad. Sci. (U.S.A.) 86:2757-2760 (1989), the entirety of which is herein incorporated by reference), ligase chain reaction (Barany, Proc. Natl. Acad. Sci. (U.S.A.) 88:189-193 (1991), the entirety of which is herein incorporated by reference), single-strand conformation polymorphism analysis (Labrune et al., Am. J. Hum. Genet. 48: 1115-1120 (1991), the entirety of which is herein incorporated by reference), primer-directed nucleotide incorporation assays (Kuppuswami et al., Proc. Natl. Acad. Sci. USA 88:1143-1147 (1991), the entirety of which is herein incorporated by reference), dideoxy fingerprinting (Sarkar et al., Genomics 13:441-443 (1992), the entirety of which is herein incorporated by reference), solid-phase ELISA-based oligonucleotide ligation assays (Nikliforov et al., Nucl. Acids Res. 22:4167-4175 (1994), the entirety of which is herein incorporated by reference), oligonucleotide fluorescence-quenching assays (Livak et al., PCR Methods Appl. 4:357-362 (1995), the entirety of which is herein incorporated by reference), 5′-nuclease allele-specific hybridization TaqMan assay (Livak et al., Nature Genet. 9:341-342 (1995), the entirety of which is herein incorporated by reference), template-directed dye-terminator incorporation (TDI) assay (Chen and Kwok, Nucl. Acids Res. 25:347-353 (1997), the entirety of which is herein incorporated by reference), allele-specific molecular beacon assay (Tyagi et al., Nature Biotech 16: 49-53 (1998), the entirety of which is herein incorporated by reference), PinPoint assay (Haff and Smirnov, Genome Res. 7: 378-388 (1997), the entirety of which is herein incorporated by reference) and dCAPS analysis (Neff et al., Plant J. 14:387-392 (1998), the entirety of which is herein incorporated by reference).

[0089] Additional markers, such as AFLP markers, RFLP markers and RAPD markers, can be utilized (Walton, Seed World 22-29 (July, 1993), the entirety of which is herein incorporated by reference; Burow and Blake, Molecular Dissection of Complex Traits, 13-29, Paterson (ed.), CRC Press, New York (1988), the entirety of which is herein incorporated by reference). DNA markers can be developed from nucleic acid molecules using restriction endonucleases, the PCR and/or DNA sequence information. RFLP markers result from single base changes or insertions/deletions. These codominant markers are highly abundant in plant genomes, have a medium level of polymorphism and are developed by a combination of restriction endonuclease digestion and Southern blotting hybridization. CAPS are similarly developed from restriction nuclease digestion but only of specific PCR products. These markers are also codominant, have a medium level of polymorphism and are highly abundant in the genome. The CAPS result from single base changes and insertions/deletions.

[0090] Another marker type, RAPDs, are developed from DNA amplification with random primers and result from single base changes and insertions/deletions in plant genomes. They are dominant markers with a medium level of polymorphisms and are highly abundant AFLP markers require using the PCR on a subset of restriction fragments from extended adapter primers. These markers are both dominant and codominant are highly abundant in genomes and exhibit a medium level of polymorphism.

[0091] SSRs require DNA sequence information. These codominant markers result from repeat length changes, are highly polymorphic and do not exhibit as high a degree of abundance in the genome as CAPS, AFLPs and RAPDs, SNPs also require DNA sequence information. These codominant markers result from single base substitutions. They are highly abundant and exhibit a medium of polymorphism (Rafalski et al., In: Nonmammalian Genomic Analysis, Birren and Lai (ed.), Academic Press, San Diego, Calif., pp. 75-134 (1996), the entirety of which is herein incorporated by reference). It is understood that a nucleic acid molecule of the present invention may be used as a marker.

[0092] A PCR probe is a nucleic acid molecule capable of initiating a polymerase activity while in a double-stranded structure with another nucleic acid. Various methods for determining the structure of PCR probes and PCR techniques exist in the art. Computer generated searches using programs such as Primer3 (www-genome.wi.mit.edu/cgi-bin/primer/primer3.cgi), STSPipeline (www-genome.wi.mit.edulcgi-bin/www-STS Pipeline), or GeneUp (Pesole et al., BioTechniques 25:112-123 (1998) the entirety of which is herein incorporated by reference), for example, can be used to identify potential PCR primers.

[0093] It is understood that a fragment of one or more of the nucleic acid molecules of the present invention may be a probe and specifically a PCR probe.

[0094] (b) Protein and Peptide Molecules

[0095] A class of agents comprises one or more of the protein or peptide molecules encoded by SEQ ID NO: 1 through SEQ ID NO: 54005 or one or more of the protein or fragment thereof or peptide molecules encoded by other nucleic acid agents of the present invention. As used herein, the term “protein molecule” or “peptide molecule” includes any molecule that comprises five or more amino acids. It is well know in the art that proteins may undergo modification, including post-translational modifications, such as, but not limited to, disulfide bond formation, glycosylation, phosphorylation, or oligomerization. Thus, as used herein, the term “protein molecule” or “peptide molecule” includes any protein molecule that is modified by any biological or non-biological process. The terms “amino acid” and “amino acids” refer to all naturally occurring L-amino acids. This definition is meant to include norleucine, ornithine, homocysteine, and homoserine.

[0096] One or more of the protein or fragment of peptide molecules may be produced via chemical synthesis, or more preferably, by expression in a suitable bacterial or eukaryotic host. Suitable methods for expression are described by Sambrook, et al., (In: Molecular Cloning, A Laboratory Manual, 2nd Edition, Cold Spring Harbor Press, Cold Spring 25, Harbor, N.Y. (1989)), or similar texts.

[0097] A “protein fragment” is a peptide or polypeptide molecule whose amino acid sequence comprises a subset of the amino acid sequence of that protein A protein or fragment thereof that comprises one or more additional peptide regions not derived from that protein is a “fusion” protein. Such molecules may be derivatized to contain carbohydrate or other moieties (such as keyhole limpet hemocyanin, etc.). Fusion protein or peptide molecule of the present invention are preferably produced via recombinant means.

[0098] Another class of agents comprise protein or peptide molecules encoded by SEQ ID NO: 1 through SEQ ID NO: 54005 or complements thereof or, fragments or fusions thereof in which non-essential, or not relevant, amino acid residues have been added, replaced, or deleted. An example of such a homologue is the homologue protein of all non-soybean plant species, including but not limited to alfalfa, Arabidopsis, barley, Brassica, broccoli, cabbage, citrus, cotton, garlic, oat, oilseed rape, onion, canola, flax, maize, an ornamental plant, pea, peanut, pepper, potato, rice, rye, sorghum, strawberry, sugarcane, sugarbeet, tomato, wheat, poplar, pine, fir, eucalyptus, apple, lettuce, peas, lentils, grape, banana, tea, turf grasses, etc. Particularly preferred non-soybean plants to utilize for the isolation of homologues would include alfalfa, Arabidopsis, barley, cotton, corn, oat, oilseed rape, rice, corn, canola, ornamentals, sugarcane, sugarbeet, tomato, potato, wheat, and turf grasses. Such a homologue can be obtained by any of a variety of methods. Most preferably, as indicated above, one or more of the disclosed sequences (SEQ ID NO: 1 through SEQ ID NO: 54005 or complements thereof) will be used to define a pair of primers that may be used to isolate the homologue-encoding nucleic acid molecules from any desired species. Such molecules can be expressed to yield homologues by recombinant means.

[0099] (c) Antibodies

[0100] One aspect of the present invention concerns antibodies, single-chain antigen binding molecules, or other proteins that specifically bind to one or more of the protein or peptide molecules of the present invention and their homologues, fusions or fragments. Such antibodies may be used to quantitatively or qualitatively detect the protein or peptide molecules of the present invention. As used herein, an antibody or peptide is said to “specifically bind” to a protein or peptide molecule of the present invention if such binding is not competitively inhibited by the presence of non-related molecules.

[0101] Nucleic acid molecules that encode all or part of the protein of the present invention can be expressed, via recombinant means, to yield protein or peptides that can in turn be used to elicit antibodies that are capable of binding the expressed protein or peptide. Such antibodies may be used in immunoassays for that protein. Such protein-encoding molecules, or their fragments may be a “fusion” molecule (i.e., a part of a larger nucleic acid molecule) such that, upon expression, a fusion protein is produced. It is understood that any of the nucleic acid molecules of the present invention may be expressed, via recombinant means, to yield proteins or peptides encoded by these nucleic acid molecules.

[0102] The antibodies that specifically bind proteins and protein fragments of the present invention may be polyclonal or monoclonal, and may comprise intact immunoglobulins, or antigen binding portions of immunoglobulins (such as (F(ab′), F(ab′)₂ fragments, or single-chain immunoglobulins producible, for example, via recombinant means). It is understood that practitioners are familiar with the standard resource materials which describe specific conditions and procedures for the construction, manipulation and isolation of antibodies (see, for example, Harlow and Lane, In Antibodies: A Laboratory Manual, Cold Spring Harbor Press, Cold Spring Harbor, N.Y. (1988), the entirety of which is herein incorporated by reference).

[0103] Murine monoclonal antibodies are particularly preferred. BALB/c mice are preferred for this purpose, however, equivalent strains may also be used. The animals are preferably immunized with approximately 25 μg of purified protein (or fragment thereof) that has been emulsified a suitable adjuvant (such as TiterMax adjuvant (Vaxcel, Norcross, Ga.)). Immunization is preferably conducted at two intramuscular sites, one intraperitoneal site, and one subcutaneous site at the base of the tail. An additional i.v. injection of approximately 25 μg of antigen is preferably given in normal saline three weeks later. After approximately 11 days following the second injection, the mice may be bled and the blood screened for the presence of anti-protein or peptide antibodies. Preferably, a direct binding Enzyme-Linked Immunoassay (ELISA) is employed for this purpose.

[0104] More preferably, the mouse having the highest antibody titer is given a third i.v. injection of approximately 25 μg of the same protein or fragment. The splenic leukocytes from this animal may be recovered 3 days later, and are then permitted to fuse, most preferably, using polyethylene glycol, with cells of a suitable myeloma cell line (such as, for example, the P3X63Ag8.653 myeloma cell line). Hybridoma cells are selected by culturing the cells under “HAT” (hypoxanthine-aminopterin-thymine) selection for about one week. The resulting clones may then be screened for their capacity to produce monoclonal antibodies (“mAbs), preferably by direct ELISA.

[0105] In one embodiment, anti-protein or peptide monoclonal antibodies are isolated using a fusion of a protein, protein fragment, or peptide of the present invention, or conjugate of a protein, protein fragment, or peptide of the present invention, as immunogens. Thus, for example, a group of mice can be immunized using a fusion protein emulsified in Freund's complete adjuvant (e.g. approximately 50 μg of antigen per immunization). At three week intervals, an identical amount of antigen is emulsified in Freund's incomplete adjuvant and used to immunize the animals. Ten days following the third immunization, serum samples are taken and evaluated for the presence of antibody. If antibody titers are too low, a fourth booster can be employed. Polysera capable of binding the protein or peptide can also be obtained using this method.

[0106] In a preferred procedure for obtaining monoclonal antibodies, the spleens of the above-described immunized mice are removed, disrupted, and immune splenocytes are isolated over a ficoll gradient. The isolated splenocytes are fused, using polyethylene glycol with BALB/c-derived HGPRT (hypoxanthine guanine phosphoribosyl transferase) deficient P3x63xAg8.653 plasmacytoma cells. The fused cells are plated into 96-well microtiter plates and screened for hybridoma fusion cells by their capacity to grow in culture medium supplemented with hypothanthine, aminopterin and thymidine for approximately 2-3 weeks.

[0107] Hybridoma cells that arise from such incubation are preferably screened for their capacity to produce an immunoglobulin that binds to a protein of interest. An indirect ELISA may be used for this purpose. In brief, the supernatants of hybridomas are incubated in microtiter wells that contain immobilized protein. After washing, the titer of bound immunoglobulin can be determined using, for example, a goat anti-mouse antibody conjugated to horseradish peroxidase. After additional washing, the amount of immobilized enzyme is determined (for example through the use of a chromogenic substrate). Such screening is performed as quickly as possible after the identification of the hybridoma in order to ensure that a desired clone is not overgrown by non-secreting neighbors. Desirably, the fusion plates are screened several times since the rates of hybridoma growth vary. In a preferred sub-embodiment, a different antigenic form of immunogen may be used to screen the hybridoma. Thus, for example, the splenocytes may be immunized with one immunogen, but the resulting hybridomas can be screened using a different immunogen. It is understood that any of the protein or peptide molecules of the present invention may be used to raise antibodies.

[0108] As discussed below, such antibody molecules or their fragments may be used for diagnostic purposes. Where the antibodies are intended for diagnostic purposes, it may be desirable to derivatize them, for example with a ligand group (such as biotin) or a detectable marker group (such as a fluorescent group, a radioisotope or an enzyme).

[0109] The ability to produce antibodies that bind the protein or peptide molecules of the present invention permits the identification of mimetic compounds of those molecules. A “mimetic compound” is a compound that is not that compound, or a fragment of that compound, but which nonetheless exhibits an ability to specifically bind to antibodies directed against that compound.

[0110] It is understood that any of the agents of the present invention can be substantially purified and/or be biologically active and/or recombinant.

[0111] Uses of the Agents of the Invention

[0112] The nucleic acid molecules and fragments thereof of the present invention from the subtractive cDNA library LIB3072 are isolated from seeds and pods harvested from soybean plants at the R3 stage. Seed libraries can enable acquisition of, including but not limited to, genes that store food and seed regulatory elements, therefore, the ESTs of the present invention will find use in the isolation of a variety of agronomically significant genes, including but not limited to genes that regulate protein, amino acids, sterols, oils, minerals, isoflavones, saponins, trypsin inhibitors, vitamins, tocopherols, antinutrient components, carbohydrates, starch metabolism and seed regulatory elements. Such genes are associated with plant growth, quality, yield, and could also serve as links in metabolic and catabolic pathways. The subtractive cDNA library of the present invention, LIB3072, is constructed by subtracting target cDNA, which is prepared from drought-stressed seeds and pods from a driver cDNA library, which is prepared from control seeds and pods. The ESTs of the present invention will therefore find use in the isolation of genes involved in drought stress.

[0113] The nucleic acid molecules and fragments thereof of the present invention from the subtractive cDNA library LIB3073 are isolated from jasmonic acid treated seedlings without cotyledons. Jasmonic acid plays a role in the response of plants to wounding and other stressors. It is one of the signal compounds responsible for the induction of pathogenesis-related (PR) proteins which show strong antifungal and antimicrobial activities. Therefore, the cDNA library of the present invention can enable acquisition of, including but not limited to, stress response genes and genes that regulate PR proteins. Seedlings are a developmental phase in the growth process therefore, the ESTs of the present invention will also find use in the isolation of a variety of agronomically significant genes, including but not limited to genes that regulate germination, developmental stress, protein, amino acids, sterols, oils, minerals, isoflavones, saponins, trypsin inhibitors, vitamins, tocopherols, antinutrient components, carbohydrates, starch metabolism, and seedling and vegetative regulatory elements. Such genes are associated with plant growth, quality, yield, and could also serve as links in metabolic, developmental and catabolic pathways.

[0114] The nucleic acid molecules and fragments thereof of the present invention from the substractive cDNA library LIB3074 are isolated from jasmonic acid treated seedlings without cotyledons. Jasmonic acid plays a role in the response of plants to wounding and other stressors. It is one of signal compounds responsible for induction of pathogenesis-related (PR) proteins which show strong antifungal and antimicrobial activities. Therefore, the cDNA library of the present invention can enable acquisition of, including but not limited to, stress response genes and genes that regulate PR proteins. Seedlings are a developmental phase in the growth process therefore, the ESTs of the present invention will also find great use in the isolation of a variety of agronomically significant genes, including but not limited to genes that regulate germination, developmental stress, protein, amino acids, sterols, oils, minerals, isoflavones, saponins, trypsin inhibitors, vitamins, tocopherols, antinutrient components, carbohydrates, starch metabolism, and seedling and vegetative regulatory elements. Such genes are associated with plant growth, quality, yield, and could also serve as links in important metabolic, developmental and catabolic pathways.

[0115] The nucleic acid molecules and fragments thereof of the present invention from the cDNA library LB33087 are isolated from axis tissue harvested from soybean seeds 4, 8 and 12 hours after imbibition. The harvested axis tissue consists of unexpanded root, hypocotyl, epicotyl, and apex. The ESTs of the present invention can enable the acquisition of, including but not limited to, genes involved in seed germination, seedling development, and regulation of growth and development. Therefore, the ESTs of the present invention will find great use in the isolation of a variety of agronomically significant genes, including but not limited to, genes that regulate the synthesis and activity of proteins, amino acids, sterols, oils, minerals, isoflavones, saponins, trypsin inhibitors, vitamins, tocopherols, antinutrient components, carbohydrates, and starch metabolism. Such genes are associated with plant growth, quality, yield, and could also serve as links in metabolic and catabolic pathways. The ESTs of the present invention will also find use in the identification of genes important in initiating and maintaining seed germination, including but not limited to, genes encoding transcription factors and components of signal transduction including receptors and ion transporters and channels. The ESTs of the present invention will also further find use in the identification of genes that may be used to mitigate stressors encountered during seed germination, including but not limited to, genes that encode heat shock factors, cold-induced proteins, and proteins required for anaerobic respiration and desiccation tolerance, and genes that regulate the synthesis and activity of those proteins.

[0116] The nucleic acid molecules and fragments thereof of the present invention from the subtractive cDNA library LIB3092 are isolated from soybean leaf tissue. Leaves are the carbohydrate factories of crop plants, therefore, the ESTs of the present invention will find great use in the isolation of a variety of agronomically significant genes, including but not limited to genes that are necessary for the interception and transformation of light energy via photosynthesis linked with plant growth, quality, and yield. Genes isolated utilizing the disclosed ESTs would also be critical in pathways including but not limited to a pathway such as nitrogen metabolism linked to fruiting and mobilization and distribution of nitrogen. The subtractive cDNA library of the present invention, LIB3092, is constructed by subtracting target cDNA, which is prepared from leaves from drought-stressed plants from a driver cDNA library which is prepared from leaves from control plants. The ESTs of the present invention will therefore find use in the isolation of genes involved in drought stress.

[0117] The nucleic acid molecules and fragments thereof of the present invention from the normalized cDNA library LIB3094 are isolated from axis tissue harvested from soybean seeds 4, 8 and 12 hours after imbibition. The harvested axis tissue consists of unexpanded root, hypocotyl, epicotyl, and apex. The ESTs of the present invention can enable the acquisition of, including but not limited to, genes involved in seed germination, seedling development, and regulation of growth and development. Therefore, the ESTs of the present invention will find use in the isolation of a variety of agronomically significant genes, including but not limited to, genes that regulate the synthesis and activity of proteins, amino acids, sterols, oils, minerals, isoflavones, saponins, trypsin inhibitors, vitamins, tocopherols, antinutrient components, carbohydrates, and starch metabolism. Such genes are associated with plant growth, quality, yield, and could also serve as links in metabolic and catabolic pathways. The ESTs of the present invention will also find use in the identification of genes important in initiating and maintaining seed germination, including but not limited to, genes encoding transcription factors and components of signal transduction including receptors and ion transporters and channels. The ESTs of the present invention will also further find use in the identification of genes that may be used to mitigate stressors encountered during seed germination, including but not limited to, genes that encode heat shock factors, cold-induced proteins, and proteins required for anaerobic respiration and desiccation tolerance, and genes that regulate the synthesis and activity of those proteins.

[0118] The nucleic acid molecules and fragments thereof of the present invention from a cDNA library LIB3106 are isolated from jasmonic acid treated and arachidonic acid treated seedlings without cotyledons. Jasmonic acid plays a role in the response of plants to wounding and other stressors. It is one of the signal compounds responsible for the induction of pathogenesis-related (PR) proteins which show strong antifungal and antimicrobial activities. Arachidonic acid is an elicitor of the hypersensitive defense response. Therefore, the cDNA library of the present invention can enable acquisition of, including but not limited to, stress response genes and genes that regulate PR proteins. Seedlings are a developmental phase in the growth process therefore, the ESTs of the present invention will also find great use in the isolation of a variety of agronomically significant genes, including but not limited to genes that regulate germination, developmental stress, protein, amino acids, sterols, oils, minerals, isoflavones, saponins, trypsin inhibitors, vitamins, tocopherols, antinutrient components, carbohydrates, starch metabolism, and seedling and vegetative regulatory elements. Such genes are associated with plant growth, quality, yield, and could also serve as links in important metabolic, developmental and catabolic pathways.

[0119] The nucleic acid molecules and fragments thereof of the present invention from a cDNA library LIB3108 are isolated from soybean seedlings without cotyledons. Seedlings are a developmental phase in the growth process, therefore, the ESTs of the present invention will find use in the isolation of a variety of agronomically significant genes, including but not limited to genes that regulate germination, developmental stress, protein, amino acids, sterols, oils, minerals, isoflavones, saponins, trypsin inhibitors, vitamins, tocopherols, antinutrient components, carbohydrates, starch metabolism, and seedling and vegetative regulatory elements. Such genes are associated with plant growth, quality, yield, and could also serve as links in important metabolic, developmental and catabolic pathways.

[0120] The nucleic acid molecules and fragments thereof of the present invention from the normalized cDNA library LIB3138 were isolated from leaves collected from V4 stage, 15 days after flowering (DAF), 25 DAF, 35 DAF, 45 DAF, and 55 DAF soybean plants. Leaves are the carbohydrate factories of crop plants, therefore, the ESTs of the present invention will find great use in the isolation of a variety of agronomically significant genes, including but not limited to genes that are necessary to for the interception and transformation of light energy via photosynthesis linked with plant growth, quality and yield. Genes isolated using the disclosed ESTs would also be in pathways including but not limited to a pathway such as nitrogen metabolism linked to fruiting and mobilization and distribution of nitrogen.

[0121] The nucleic acid molecules and fragments thereof of the present invention from a normalized cDNA library LIB3139 are isolated from roots collected from V4 stage, 15 days after flowering (DAF), 25 DAF, 35 DAF, 45 DAF, 55 DAF, 65 DAF, and 75 DAF soybean plants. Roots play a critical role in major vegetative organs which supply water, minerals, and substances essential for plant growth and development, therefore, the ESTs of the present invention will find great use in the isolation of a variety of agronomically significant genes, including but not limited to genes that are necessary for absorption, anchorage, storage, transport, propagation, and nitrogen fixation. Such genes are associated with plant growth, quality, and yield and could also serve as links in important plant metabolic and catabolic pathways.

[0122] The nucleic acid molecules and fragments thereof of the present invention are generated from a subtracted cDNA library LIB3167. The subtractive cDNA library is constructed by subtracting the target cDNA, which is prepared from jasmonic acid treated and arachidonic acid treated seedlings without cotyledons, from the driver cDNA, which is prepared from control buffer (0.1% Tween-20) treated seedlings without cotyledons. Jasmonic acid plays a role in the response of plants to wounding and other stressors. It is one of signal compounds responsible for induction of pathogenesis-related (PR) proteins which show strong antifungal and antimicrobial activities. Arachidonic acid is an elicitor of the hypersensitive defense response. Therefore, the cDNA library of the present invention can enable acquisition of, including but not limited to, stress response genes and genes that regulate PR proteins. Seedlings are a developmental phase in the growth process therefore, the ESTs of the present invention will also find great use in the isolation of a variety of agronomically significant genes, including but not limited to genes that regulate germination, developmental stress, protein, amino acids, sterols, oils, minerals, isoflavones, saponins, trypsin inhibitors, vitamins, tocopherols, antinutrient components, carbohydrates, starch metabolism, and seedling and vegetative regulatory elements. Such genes are associated with plant growth, quality, yield, and could also serve as links in important metabolic, developmental and catabolic pathways.

[0123] The nucleic acid molecules and fragments thereof of the present invention from libraries LIB3072, LIB3073, LIB3074, LIB3087, LIB3092, LIB3094, LIB3108, LIB3106, and are from soybean genotype A3244. This genotype has disease resistance to brown stem rot (Phialophora gregata) and Phytophthora root rot (Phytophthora sojae). Libraries from this genotype are likely to find use in the isolation of genes involved in disease resistance against a number of agronomically important fungal pathogens.

[0124] Nucleic acid molecules and fragments thereof of the present invention may be employed to obtain other nucleic acid molecules. Such molecules include the nucleic acid molecules of other plants or other organisms (e.g., alfalfa, rice, potato, cotton, oat, rye, barley, maize, wheat, Arabidopsis, Brassica, etc.) including the nucleic acid molecules that encode, in whole or in part, protein homologues of other plant species or other organisms, and sequences of genetic elements such as promoters and transcriptional regulatory elements. Such molecules can be readily obtained by using the above-described nucleic acid molecules or fragments thereof to screen cDNA or genomic libraries obtained from such plant species. Methods for forming such libraries are well known in the art. Such homologue molecules may differ in their nucleotide sequences from those found in one or more of SEQ ID NO: 1 through SEQ ID NO: 54005 or complements thereof because complete complementarity is not needed for stable hybridization. The nucleic acid molecules of the present invention therefore also include molecules that, although capable of specifically hybridizing with the nucleic acid molecules may lack “complete complementarity.”

[0125] Any of a variety of methods may be used to obtain one or more of the above-described nucleic acid molecules (Zamechik et al., Proc. Natl. Acad. Sci. (U.S.A.) 83:4143-4146 (1986), the entirety of which is herein incorporated by reference; Goodchild et al., Proc. Natl. Acad. Sci. (U.S.A.) 85:5507-5511 (1988), the entirety of which is herein incorporated by reference; Wickstrom et al., Proc. Natl. Acad. Sci. (U.S.A.) 85:1028-1032 (1988), the entirety of which is herein incorporated by reference; Holt, et al., Molec. Cell. Biol. 8:963-973 (1988), the entirety of which is herein incorporated by reference; Gerwirtz, et al., Science 242:1303-1306 (1988), the entirety of which is herein incorporated by reference; Anfossi, et al., Proc. Natl. Acad. Sci. (U.S.A.) 86:3379-3383 (1989), the entirety of which is herein incorporated by reference; Becker, et al., EMBO J. 8:3685-3691 (1989); the entirety of which is herein incorporated by reference). Automated nucleic acid synthesizers may be employed for this purpose. In lieu of such synthesis, the disclosed nucleic acid molecules may be used to define a pair of primers that can be used with the polymerase chain reaction (Mullis, et al., Cold Spring Harbor Symp. Quant Biol. 51:263-273 (1986); Erlich et al., EP 50,424; EP 84,796, EP 258,017, EP 237,362; Mullis, EP 201,184; Mullis et al., U.S. Pat. No. 4,683,202; Erlich, U.S. Pat. No. 4,582,788; and Saiki, R, et al., U.S. Pat. No. 4,683,194, all of which are hereby incorporated by reference in their entirety) to amplify and obtain any desired nucleic acid molecule or fragment.

[0126] Promoter sequence(s) and other genetic elements including but not limited to transcriptional regulatory elements associated with one or more of the disclosed nucleic acid sequences can also be obtained using the disclosed nucleic acid sequences provided herein.

[0127] In one embodiment, such sequences are obtained by incubating EST nucleic acid molecules or preferably fragments thereof with members of genomic libraries (e.g. maize and soybean) and recovering clones that hybridize to the EST nucleic acid molecule or fragment thereof. In a second embodiment, methods of “chromosome walking,” or inverse PCR may be used to obtain such sequences (Frohman, et al., Proc. Natl. Acad. Sci. (U.S.A.) 85:8998-9002 (1988); Ohara, et al., Proc. Natl. Acad. Sci. (U.S.A.) 86: 5673-5677 (1989); Pang et al., Biotechniques, 22(6); 1046-1048 (1977); Huang et al., Methods Mol. Biol. 69: 89-96 (1977); Hartl et al., Methods Mol. Biol. 58: 293-301 (1996), all of which are hereby incorporated by reference in their entirety). In one embodiment, the disclosed nucleic acid molecules are used to identify cDNAs whose analogous genes contain promoters with desirable expression patterns. The nucleic acid molecules isolated from the library of the present invention are used to isolate promoters of tissue-enhanced, tissue-specific, developmentally- or environmentally-regulated expression profiles. Isolation and functional analysis of the 5′ flanking promoter sequences of these genes from genomic libraries, for example, using genomic screening methods and PCR techniques would result in the isolation of useful promoters and transcriptional regulatory elements. These methods are known to those of skill in the art and have been described (See for example Birren et al., Genome Analysis: Analyzing DNA, 1, (1997), Cold Spring Harbor Laboratory Press, Cold Spring Harbor, N.Y., the entirety of which is herein incorporated by reference).

[0128] Promoters obtained utilizing the nucleic acid molecules of the present invention could also be modified to affect their control characteristics. Examples of such modifications would include but are not limited to enhancer sequences as reported by Kay et al., Science 236:1299 (1987), herein incorporated by reference in its entirety. Such genetic elements could be used to enhance gene expression of new and existing traits for crop improvements.

[0129] The nucleic acid molecules of the present invention may be used to isolate promoters of tissue enhanced tissue specific, cell-specific, cell-type, developmentally or environmentally regulated expression profiles. Isolation and functional analysis of the 5′ flanking promoter sequences of these genes from genomic libraries, for example, using genomic screening methods and PCR techniques would result in the isolation of useful promoters and transcriptional regulatory elements. These methods are known to those of skill in the art and have been described (See, for example, Birren et. al., Genome Analysis: Analyzing DNA, 1, Cold Spring Harbor Laboratory Press, Cold Spring Harbor, N.Y. (1997), the entirety of which is herein incorporated by reference). Promoters obtained utilizing the nucleic acid molecules of the present invention could also be modified to affect their control characteristics. Examples of such modifications would include but are not limited to enhancer sequences as reported by Kay, et al Science 236:1299 (1987), herein incorporated reference in its entirety. Such genetic elements could be used to enhance gene expression of new and existing traits for crop improvements.

[0130] In an aspect of the present invention, one or more of the nucleic molecules of the present invention are used to determine whether a plant (preferably soybean) has a mutation affecting the level (i.e., the concentration of mRNA in a sample, etc.) or pattern (i.e., the kinetics of expression, rate of decomposition, stability profile, etc.) of the expression encoded in part or whole by one or more of the nucleic acid molecules of the present invention (collectively, the “Expression Response” of a cell or tissue). As used herein, the Expression Response manifested by a cell or tissue is said to be “altered” if it differs from the Expression Response of cells or tissues of plants not exhibiting the phenotype. To determine whether a Expression Response is altered, the Expression Response manifested by the cell or tissue of the plant exhibiting the phenotype is compared with that of a similar cell or tissue sample of a plant not exhibiting the phenotype. As will be appreciated, it is not necessary to re-determine the Expression Response of the cell or tissue sample of plants, not exhibiting the phenotype each time such a comparison is made; rather, the Expression Response of a particular plant may be compared with previously obtained values of normal plants. As used herein, the phenotype of the organism is any of one or more characteristics of an organism (e.g. disease resistance, pest tolerance, environmental tolerance, male sterility, yield, quality improvements, etc.). A change in genotype or phenotype may be transient or permanent. Also as used herein, a tissue sample is any sample that comprises more than one cell. In a preferred aspect, a tissue sample comprises cells that share a common characteristic (e.g. derived from leaf, root, or pollen etc).

[0131] In one sub-aspect, such an analysis is conducted by determining the presence and/or identity of polymorphism(s) by one or more of the nucleic acid molecules of the present invention and more specifically, one or more of the EST nucleic acid molecules or fragments thereof which are associated with phenotype, or a predisposition to phenotype.

[0132] Any of a variety of molecules can be used to identify such polymorphism(s). In one embodiment, one or more of the EST nucleic acid molecules (or a sub-fragment thereof) may be employed as a marker nucleic acid molecule to identify such polymorphism(s). Alternatively, such polymorphisms can be detected through the use of a marker nucleic acid molecule or a marker protein that is genetically linked to (i.e., a polynucleotide that co-segregates with) such polymorphism(s).

[0133] In an alternative embodiment, such polymorphisms can be detected through the use of a marker nucleic acid molecule that is physically linked to such polymorphism(s). For this purpose, marker nucleic acid molecules comprising a nucleotide sequence of a polynucleotide located within 1 mb of the polymorphism(s), and more preferably within 100 kb of the polymorphism(s), and most preferably within 10 kb of the polymorphism(s) can be employed.

[0134] The genomes of animals and plants naturally undergo spontaneous mutation in the course of their continuing evolution (Gusella, Ann. Rev. Biochem. 55:831-854 (1986)). A “polymorphism” is a variation or difference in the sequence of the gene or its flanking regions that arises in some of the members of a species. The variant sequence and the “original” sequence co-exist in the species' population. In some instances, such co-existence is in stable or quasi-stable equilibrium.

[0135] A polymorphism is thus said to be “allelic,” in that, due to the existence of the polymorphism, some members of a species may have the original sequence (i.e., the original “allele”) whereas other members may have the variant sequence (i.e., the variant “allele”). In the simplest case, only one variant sequence may exist, and the polymorphism is thus said to be di-allelic. In other cases, the species' population may contain multiple alleles, and the polymorphism is termed tri-allelic, etc. A single gene may have multiple different unrelated polymorphisms. For example, it may have a di-allelic polymorphism at one site, and a multi-allelic polymorphism at another site.

[0136] The variation that defines the polymorphism may range from a single nucleotide variation to the insertion or deletion of extended regions within a gene. In some cases, the DNA sequence variations are in regions of the genome that are characterized by short tandem repeats (STRs) that include tandem di- or tri-nucleotide repeated motifs of nucleotides. Polymorphisms characterized by such tandem repeats are referred to as “variable number tandem repeat” (“VNTR”) polymorphisms. VNTRs have been used in identity analysis (Weber, U.S. Pat. No. 5,075,217; Armour, et al., FEBS Lett. 307:113-115 (1992); Jones, et al., Eur. J. Haematol. 39:144-147 (1987); Horn, et al., PCT Application WO91/14003; Jeffreys, European Patent Application 370,719; Jeffreys, U.S. Pat. No. 5,699,082; Jeffreys. et al., Amer. J. Hum. Genet. 39:11-24 (1986); Jeffreys. et al., Nature 316:76-79 (1985); Gray, et al., Proc. R. Acad. Soc. Lond. 243:241-253 (1991); Moore, et al., Genomics 10:654-660 (1991); Jeffreys, et al., Anim. Genet. 18:1-15 (1987); Hillel, et al., Anim. Genet. 20:145-155 (1989); Hillel, et al., Genet. 124:783-789 (1990), all of which are herein incorporated by reference in their entirety).

[0137] The detection of polymorphic sites in a sample of DNA may be facilitated through the use of nucleic acid amplification methods. Such methods specifically increase the concentration of polynucleotides that span the polymorphic site, or include that site and sequences located either distal or proximal to it. Such amplified molecules can be readily detected by gel electrophoresis or other means.

[0138] The most preferred method of achieving such amplification employs the polymerase chain reaction (“PCR”) (Mullis, et al., Cold Spring Harbor Symp. Quant. Biol. 51:263-273 (1986); Erlich, et al., European Patent Appln. 50,424; European Patent Appln. 84,796, European Patent Application 258,017, European Patent Appln. 237,362; Mullis, European Patent Appln. 201,184; Mullis, et al., U.S. Pat. No. 4,683,202; Erlich., U.S. Pat. No. 4,582,788; and Saiki, et al., U.S. Pat. No. 4,683,194, all of which are herein incorporated by reference), using primer pairs that are capable of hybridizing to the proximal sequences that define a polymorphism in its double-stranded form.

[0139] In lieu of PCR, alternative methods, such as the “Ligase Chain Reaction” (“LCR”) may be used (Barany, Proc. Natl. Acad. Sci. (U.S.A.) 88:189-193 (1991), the entirety of which is herein incorporated by reference). LCR uses two pairs of oligonucleotide probes to exponentially amplify a specific target. The sequences of each pair of oligonucleotides is selected to permit the pair to hybridize to abutting sequences of the same strand of the target. Such hybridization forms a substrate for a template-dependent ligase. As with PCR, the resulting products thus serve as a template in subsequent cycles and an exponential amplification of the desired sequence is obtained.

[0140] LCR can be performed with oligonucleotides having the proximal and distal sequences of the same strand of a polymorphic site. In one embodiment, either oligonucleotide will be designed to include the actual polymorphic site of the polymorphism. In such an embodiment, the reaction conditions are selected such that the oligonucleotides can be ligated together only if the target molecule either contains or lacks the specific nucleotide that is complementary to the polymorphic site present on the oligonucleotide. Alternatively, the oligonucleotides may be selected such that they do not include the polymorphic site (see, Segev, PCT Application WO 90/01069, the entirety of which is herein incorporated by reference).

[0141] The “Oligonucleotide Ligation Assay” (“OLA”) may alternatively be employed (Landegren, et al., Science 241:1077-1080 (1988), the entirety of which is herein incorporated by reference). The OLA protocol uses two oligonucleotides which are designed to be capable of hybridizing to abutting sequences of a single strand of a target. OLA, like LCR, is particularly suited for the detection of point mutations. Unlike LCR, however, OLA results in “linear” rather than exponential amplification of the target sequence.

[0142] Nickerson, et al. have described a nucleic acid detection assay that combines attributes of PCR and OLA (Nickerson, et al., Proc. Natl. Acad. Sci. (U.S.A.) 87:8923-8927 (1990), the entirety of which is herein incorporated by reference). In this method, PCR is used to achieve the exponential amplification of target DNA, which is then detected using OLA. In addition to requiring multiple, and separate, processing steps, one problem associated with such combinations is that they inherit all of the problems associated with PCR and OLA.

[0143] Schemes based on ligation of two (or more) oligonucleotides in the presence of nucleic acid having the sequence of the resulting “di-oligonucleotide”, thereby amplifying the di-oligonucleotide, are also known (Wu, et al., Genomics 4:560 (1989), the entirety of which is herein incorporated by reference), and may be readily adapted to the purposes of the present invention.

[0144] Other known nucleic acid amplification procedures, such as allele-specific oligomers, branched DNA technology, transcription-based amplification systems, or isothermal amplification methods may also be used to amplify and analyze such polymorphisms (Malek, et al., U.S. Pat. No. 5,130,238; Davey, et al., European Patent Application 329,822; Schuster et al., U.S. Pat. No. 5,169,766; Miller, et al., PCT Application WO 89/06700; Kwoh, et al., Proc. Natl. Acad. Sci. (U.S.A.) 86:1173-1177 (1989); Gingeras, et al., PCT Application WO 88/10315; Walker, et al., Proc. Natl. Acad. Sci. (U.S.A.) 89:392-396 (1992), all of which are herein incorporated by reference in their entirety).

[0145] The identification of a polymorphism can be determined in a variety of ways. By correlating the presence or absence of it in a plant with the presence or absence of a phenotype, it is possible to predict the phenotype of that plant. If a polymorphism creates or destroys a restriction endonuclease cleavage site, or if it results in the loss or insertion of DNA (e.g., a VNTR polymorphism), it will alter the size or profile of the DNA fragments that are generated by digestion with that restriction endonuclease. As such, individuals that possess a variant sequence can be distinguished from those having the original sequence by restriction fragment analysis. Polymorphisms that can be identified in this manner are termed “restriction fragment length polymorphisms” (“RFLPs”). RFLPs have been widely used in human and plant genetic analyses (Glassberg, UK Patent Application 2135774; Skolnick, et al., Cytogen. Cell Genet. 32:58-67 (1982); Botstein, et al., Ann. J. Hum. Genet. 32:314-331 (1980); Fischer, et al. (PCT Application WO90/13668); Uhlen, PCT Application WO90/11369).

[0146] Polymorphisms can also be identified by Single Strand Conformation Polymorphism (SSCP) analysis. The SSCP technique is a method capable of identifying most sequence variations in a single strand of DNA, typically between 150 and 250 nucleotides in length (Elles, Methods in Molecular Medicine: Molecular Diagnosis of Genetic Diseases, Humana Press (1996), the entirety of which is herein incorporated by reference); Orita et al., Genomics 5: 874-879 (1989), the entirety of which is herein incorporated by reference). Under denaturing conditions a single strand of DNA will adopt a conformation that is uniquely dependent on its sequence conformation. This conformation usually will be different, even if only a single base is changed. Most conformations have been reported to alter the physical configuration or size sufficiently to be detectable by electrophoresis. A number of protocols have been described for SSCP including, but not limited to Lee et al., Anal. Biochem. 205: 289-293 (1992), the entirety of which is herein incorporated by reference; Suzuki et al., Anal. Biochem. 192: 82-84 (1991), the entirety of which is herein incorporated by reference; Lo et al., Nucleic Acids Research 20: 1005-1009 (1992), the entirety of which is herein incorporated by reference; Sarkar et al., Genomics 13: 441-443 (1992), the entirety of which is herein incorporated by reference). It is understood that one or more of the nucleic acids of the present invention, may be utilized as markers or probes to detect polymorphisms by SSCP analysis.

[0147] Polymorphisms may also be found using a DNA fingerprinting technique called amplified fragment length polymorphism (AFLP), which is based on the selective PCR amplification of restriction fragments from a total digest of genomic DNA to profile that DNA. Vos, et al., Nucleic Acids Res. 23:4407-4414 (1995), the entirety of which is herein incorporated by reference. This method allows for the specific co-amplification of high numbers of restriction fragments, which can be visualized by PCR without knowledge of the nucleic acid sequence.

[0148] AFLP employs basically three steps. Initially, a sample of genomic DNA is cut with restriction enzymes and oligonucleotide adapters are ligated to the restriction fragments of the DNA. The restriction fragments are then amplified using PCR by using the adapter and restriction sequence as target sites for primer annealing. The selective amplification is achieved by the use of primers that extend into the restriction fragments, amplifying only those fragments in which the primer extensions match the nucleotide flanking the restriction sites. These amplified fragments are then visualized on a denaturing polyacrylamide gel.

[0149] AFLP analysis has been performed on Salix (Beismann, et al., Mol. Ecol. 6:989-993 (1997), the entirety of which is herein incorporated by reference); Acinetobacter (Janssen, et al., Int. J. Syst. Bacteriol 47.1179-1187 (1997), the entirety of which is herein incorporated by reference), Aeromonas popoffi (Huys, et al., Int. J. Syst. Bacteriol. 47:1165-1171 (1997), the entirety of which is herein incorporated by reference), rice (McCouch, et al., Plant Mol. Biol. 35:89-99 (1997), the entirety of which is herein incorporated by reference); Nandi, et al., Mol. Gen. Genet. 255:1-8 (1997); Cho, et al., Genome 39:373-378 (1996), herein incorporated by reference), barley (Hordeum vulgare) (Simons, et al., Genomics 44:61-70 (1997), the entirety of which is herein incorporated by reference; Waugh, et al., Mol. Gen. Genet. 255:311-321 (1997), the entirety of which is herein incorporated by reference; Qi, et al., Mol. Gen. Genet. 254:330-336 (1997), the entirety of which is herein incorporated by reference; Becker, et al., Mol. Gen. Genet. 249:65-73 (1995), the entirety of which is herein incorporated by reference), potato (Van der Voort, et al., Mol. Gen. Genet. 255:438-447 (1997), the entirety of which is herein incorporated by reference; Meksem, et al., Mol. Gen. Genet. 249:74-81 (1995), the entirety of which is herein incorporated by reference), Phytophthora infestans (Van der Lee, et al., Fungal Genet. Biol. 21:278-291 (1997), the entirety of which is herein incorporated by reference), Bacillus anthracis (Keim, et al., J. Bacteriol. 179:818-824 (1997)), Astragalus cremnophylax Travis, et al., Mol. Ecol. 5:735-745 (1996), the entirety of which is herein incorporated by reference), Arabidopsis (Cnops, et al., Mol. Gen. Genet. 253:32-41 (1996), the entirety of which is herein incorporated by reference), Escherichia coli (Lin, et al., Nucleic Acids Res. 24:3649-3650 (1996), the entirety of which is herein incorporated by reference), Aeromonas (Huys, et al., Int. J. Syst. Bacteriol. 46:572-580 (1996), the entirety of which is herein incorporated by reference), nematode (Folkertsma, et al., Mol. Plant. Microbe Interact. 9:47-54 (1996), the entirety of which is herein incorporated by reference), tomato (Thomas, et al., Plant J. 8:785-794 (1995), the entirety of which is herein incorporated by reference), and human (Latorra, et al., PCR Methods Appl. 3:351-358 (1994)). AFLP analysis has also been used for fingerprinting mRNA (Money, et al., Nucleic Acids Res. 24:2616-2617 (1996), the entirety of which is herein incorporated by reference; Bachem, et al., Plant J. 9:745-753 (1996), the entirety of which is herein incorporated by reference). It is understood that one or more of the nucleic acids of the present invention, may be utilized as markers or probes to detect polymorphisms by AFLP analysis for fingerprinting mRNA.

[0150] Polymorphisms may also be found using random amplified polymorphic DNA (RAPD) (Williams et al., Nucl. Acids Res. 18: 6531-6535 (1990), the entirety of which is herein incorporated by reference) and cleaveable amplified polymorphic sequences (CAPS) (Lyamichev et al., Science 260: 778-783 (1993), the entirety of which is herein incorporated by reference). It is understood that one or more of the nucleic acids of the present invention, may be utilized as markers or probes to detect polymorphisms by RAPD or CAPS analysis.

[0151] Polymorphisms are useful, through line analysis, to define the genetic distances or physical distances between polymorphic traits. A physical map or ordered array of genomic DNA fragments in the desired region containing the gene may be used to characterize and isolate genes corresponding to desirable traits. For this purpose, yeast artificial chromosomes (YACs), bacterial artificial chromosomes (BACs), and cosmids are appropriate vectors for cloning large segments of DNA molecules. Although fewer clones are needed to make a contig for a specific genomic region by using YACs (Agyare et al., Genome Res. 7: 1-9 (1997), the entirety of which is herein incorporated by reference; James et al., Genomics 32: 425-430 (1996), the entirety of which is herein incorporated by reference), chimerism in the inserted DNA fragment can arise. Cosmids are convenient for handling smaller-size DNA molecules and may be used for transformation in developing transgenic plants. BACs also carry DNA fragments and are less prone to chimerism.

[0152] Through genetic mapping, a fine scale linkage map can be developed using DNA markers and, then, a genomic DNA library of large-sized fragments can be screened with molecular markers linked to the desired trait. Molecular markers are advantageous for agronomic traits that are otherwise difficult to tag, such as resistance to pathogens, insects and nematodes, tolerance to abiotic stress, quality parameters and quantitative traits such as high yield potential.

[0153] The essential requirements for marker-assisted selection in a plant breeding program are: (1) the marker(s) should co-segregate or be closely linked with the desired trait; (2) an efficient means of screening large populations for the molecular ma(s) should be available; and (3) the screening technique should have high reproducibility across laboratories and preferably be economical to use and be user-friendly.

[0154] The genetic linkage of marker molecules can be established by a gene mapping model such as, without limitation, the flanking marker model reported by Lander and Botstein, Genetics 121:185-199 (1989) and the interval mapping, based on maximum likelihood methods described by Lander and Botstein, Genetics 121:185-199 (1989) and implemented in the software package MAPMAKER/QTL (Lincoln and Lander, Mapping Genes Controlling Quantitative Traits Using MAPMAKER/QTL, Whitehead Institute for Biomedical Research, Massachusetts, (1990). Additional software includes Qgene, Version 2.23 (1996), Department of Plant Breeding and Biometry, 266 Emerson Hall, Cornell University, Ithaca, N.Y., the manual of which is herein incorporated by reference in its entirety). Use of Qgene software is a particularly preferred approach.

[0155] A maximum likelihood estimate (MLE) for the presence of a marker is calculated, together with an MLE assuming no QTL effect, to avoid false positives. A log₁₀ of an odds ratio (LOD) is then calculated as: LOD=log₁₀ (MLE for the presence of a QTL/MLE given no linked QTL).

[0156] The LOD score essentially indicates how much more likely the data are to have arisen assuming the presence of a QTL than in its absence. The LOD threshold value for avoiding a false positive with a given confidence, say 95%, depends on the number of markers and the length of the genome. Graphs indicating LOD thresholds are set forth in Lander and Botstein, Genetics 121:185-199 (1989) the entirety of which is herein incorporated by reference and further described by Arús and Moreno-González, Plant Breeding, Hayward et al., (eds.) Chapman & Hall, London, pp. 314-331 (1993), the entirety of which is herein incorporated by reference.

[0157] Additional models can be used. Many modifications and alternative approaches to interval mapping have been reported, including the use of non-parametric methods (Kruglyak and Lander, Genetics 139:1421-1428 (1995), the entirety of which is herein incorporated by reference). Multiple regression methods or models can be also be used, in which the trait is regressed on a large number of markers (Jansen, Biometrics in Plant Breeding, van Oijen and Jansen (eds.), Proceedings of the Ninth Meeting of the Eucarpia Section Biometrics in Plant Breeding, The Netherlands, pp. 116-124 (1994); Weber and Wricke, Advances in Plant Breeding, Blackwell, Berlin, 16 (1994), both of which is herein incorporated by reference in their entirety). Procedures combining interval mapping with regression analysis, whereby the phenotype is regressed onto a single putative QTL at a given marker interval and at the same time onto a number of markers that serve as ‘cofactors,’ have been reported by Jansen and Stam, Genetics 136:1447-1455 (1994), the entirety of which is herein incorporated by reference and Zeng, Genetics 136:1457-1468 (1994) the entirety of which is herein incorporated by reference. Generally, the use of cofactors reduces the bias and sampling error of the estimated QTL positions (Utz and Melchinger, Biometrics in Plant Breeding, van Oijen and Jansen (eds.) Proceedings of the Ninth Meeting of the Eucarpia Section Biometrics in Plant Breeding, The Netherlands, pp. 195-204 (1994), the entirety of which is herein incorporated by reference, thereby improving the precision and efficiency of QTL mapping (Zeng, Genetics 136:1457-1468 (1994)). These models can be extended to multi-environment experiments to analyze genotype-environment interactions (Jansen et al., Theo. Appl. Genet. 91:33-37 (1995), the entirety of which is herein incorporated by reference).

[0158] Selection of an appropriate mapping population is important to map construction. The choice of an appropriate mapping population depends on the type of marker systems employed (Tanksley et al., Molecular mapping plant chromosomes. Chromosome structure and function: Impact of new concepts, Gustafson and Appels (eds.), Plenum Press, New York, pp 157-173 (1988), the entirety of which is herein incorporated by reference). Consideration must be given to the source of parents (adapted vs. exotic) used in the mapping population. Chromosome pairing and recombination rates can be severely disturbed (suppressed) in wide crosses (adapted×exotic) and generally yield greatly reduced linkage distances. Wide crosses will usually provide segregating populations with a relatively large array of polymorphisms when compared to progeny in a narrow cross (adapted×adapted).

[0159] An F₂ population is the first generation of selfing after the hybrid seed is produced. Usually a single F₁ plant is selfed to generate a population segregating for all the genes in Mendelian (1:2:1) fashion. Maximum genetic information is obtained from a completely classified F₂ population using a codominant marker system (Mather, Measurement of Linkage in Heredity, Methuen and Co., (1938), the entirety of which is herein incorporated by reference). In the case of dominant markers, progeny tests (e.g. F₃, BCF₂) are required to identify the heterozygotes, thus making it equivalent to a completely classified F₂ population. However, this procedure is often prohibitive because of the cost and time involved in progeny testing. Progeny testing of F₂ individuals is often used in map construction where phenotypes do not consistently reflect genotype (e.g. disease resistance) or where trait expression is controlled by a QTL. Segregation data from progeny test populations (e.g. F₃ or BCF₂) can be used in map construction. Marker-assisted selection can then be applied to cross progeny based on marker-trait map associations (F₂, F₃), where linkage groups have not been completely disassociated by recombination events (i.e., maximum disequilibrium).

[0160] Recombinant inbred lines (RIL) (genetically related lines; usually >F₅, developed from continuously selfing F₂ lines towards homozygosity) can be used as a mapping population. Information obtained from dominant markers can be maximized by using RIL because all loci are homozygous or nearly so. Under conditions of tight linkage (i.e., about <10% recombination), dominant and co-dominant markers evaluated in RIL populations provide more information per individual than either marker type in backcross populations (Reiter et al., Proc. Natl. Acad. Sci. (U.S.A.) 89:1477-1481 (1992), the entirety of which is herein incorporated by reference). However, as the distance between markers becomes larger (i.e., loci become more independent), the information in RIL populations decreases dramatically when compared to codominant markers.

[0161] Backcross populations (e.g., generated from a cross between a successful variety (recurrent parent) and another variety (donor parent) carrying a trait not present in the former) can be utilized as a mapping population. A series of backcrosses to the recurrent parent can be made to recover most of its desirable traits. Thus a population is created consisting of individuals nearly like the recurrent parent but each individual carries varying amounts or mosaic of genomic regions from the donor parent. Backcross populations can be useful for mapping dominant markers if all loci in the recurrent parent are homozygous and the donor and recurrent parent have contrasting polymorphic marker alleles (Reiter et al., Proc. Natl. Acad. Sci. (U.S.A.) 89:1477-1481 (1992)). Information obtained from backcross populations using either codominant or dominant markers is less than that obtained from F₂ populations because one, rather than two, recombinant gametes are sampled per plant Backcross populations, however, are more informative (at low marker saturation) when compared to RILs as the distance between linked loci increases in RIL populations (i.e. about 15% recombination). Increased recombination can be beneficial for resolution of tight linkages, but may be undesirable in the construction of maps with low marker saturation.

[0162] Near-isogenic lines (NIL) created by many backcrosses to produce an array of individuals that are nearly identical in genetic composition except for the trait or genomic region under interrogation can be used as a mapping population. In mapping with NILs, only a portion of the polymorphic loci are expected to map to a selected region.

[0163] Bulk segregant analysis (BSA) is a method developed for the rapid identification of linkage between markers and traits of interest (Michelmore et al., Proc. Natl. Acad. Sci. (U.S.A.) 88:9828-9832 (1991), the entirety of which is herein incorporated by reference). In BSA, two bulked DNA samples are drawn from a segregating population originating from a single cross. These bulks contain individuals that are identical for a particular trait (resistant or susceptible to particular disease) or genomic region but arbitrary at unlinked regions (i.e. heterozygous). Regions unlinked to the target region will not differ between the bulked samples of many individuals in BSA.

[0164] It is understood that one or more of the nucleic acid molecules of the present invention may be used as molecular markers. It is also understood that one or more of the protein molecules of the present invention may be used as molecular markers.

[0165] In accordance with this aspect of the present invention, a sample nucleic acid is obtained from plants cells or tissues. Any source of nucleic acid may be used. Preferably, the nucleic acid is genomic DNA. The nucleic acid is subjected to restriction endonuclease digestion. For example, one or more EST nucleic acid molecule or fragment thereof can be used as a probe in accordance with the above-described polymorphic methods. The polymorphism obtained in this approach can then be cloned to identify the mutation at the coding region which alters the protein's structure or regulatory region of the gene which affects its expression level.

[0166] In one aspect of the present invention, an evaluation can be conducted to determine whether a particular mRNA molecule is present. One or more of the nucleic acid molecules of the present invention, preferably one or more of the EST nucleic acid molecules of the present invention are utilized to detect the presence or quantity of the mRNA species. Such molecules are then incubated with cell or tissue extracts of a plant under conditions sufficient to permit nucleic acid hybridization. The detection of double-stranded probe-mRNA hybrid molecules is indicative of the presence of the mRNA; the amount of such hybrid formed is proportional to the amount of mRNA. Thus, such probes may be used to ascertain the level and extent of the mRNA production in a plant's cells or tissues. Such nucleic acid hybridization may be conducted under quantitative conditions (thereby providing a numerical value of the amount of the mRNA present). Alternatively, the assay may be conducted as a qualitative assay that indicates either that the mRNA is present, or that its level exceeds a user set, predefined value.

[0167] A principle of in situ hybridization is that a labeled, single-stranded nucleic acid probe will hybridize to a complementary strand of cellular DNA or RNA and, under the appropriate conditions, these molecules will form a stable hybrid. When nucleic acid hybridization is combined with histological techniques, specific DNA or RNA sequences can be identified within a single cell. An advantage of in situ hybridization over more conventional techniques for the detection of nucleic acids is that it allows an investigator to determine the precise spatial population (Angerer et al., Dev. Biol. 101: 477-484 (1984), the entirety of which is herein incorporated by reference; Angerer et al., Dev. Biol. 112: 157-166 (1985), the entirety of which is herein incorporated by reference; Dixon et al., EMBO J. 10: 1317-1324 (1991), the entirety of which is herein incorporated by reference). In situ hybridization may be used to measure the steady-state level of RNA accumulation. It is a sensitive technique and RNA sequences present in as few as 5-10 copies per cell can be detected (Hardin et al., J. Mol. Biol. 202: 417-431. (1989), the entirety of which is herein incorporated by reference). A number of protocols have been devised for in situ hybridization, each with tissue preparation, hybridization, and washing conditions (Meyerowitz, Plant Mol. Biol. Rep. 5: 242-250 (1987), the entirety of which is herein incorporated by reference; Cox and Goldberg, In: Plant Molecular Biology: A Practical Approach (ed. C. H. Shaw), pp. 1-35. IRL Press, Oxford (1988), the entirety of which is herein incorporated by reference; Raikhel et al., In situ RNA hybridization in plant tissues. In Plant Molecular Biology Manual, vol. B9: 1-32. Kluwer Academic Publisher, Dordrecht, Belgium (1989), the entirety of which is herein incorporated by reference).

[0168] In situ hybridization also allows for the localization of proteins within a tissue or cell (Wilkinson, In Situ Hybridization, Oxford University Press, Oxford (1992), the entirety of which is herein incorporated by reference; Langdale, In Situ Hybridization 165-179 In: The Maize Handbook, eds. Freeling and Walbot, Springer-Verlag, New York (1994), the entirety of which is herein incorporated by reference). It is understood that one or more of the molecules of the present invention, preferably one or more of the EST nucleic acid molecules of the present invention or one or more of the antibodies of the present invention may be utilized to detect the level or pattern of a protein or fragment thereof by in situ hybridization.

[0169] Fluorescent in situ hybridization also enables the localization of a particular DNA sequence along a chromosome which is useful, among other uses, for gene mapping, following chromosomes in hybrid lines or detecting chromosomes with translocations, transversions or deletions. In situ hybridization has been used to identify chromosomes in several plant species (Griffor et al., Plant Mol. Biol. 17: 101-109 (1991), the entirety of which is herein incorporated by reference; Gustafson et al., Proc. Nat'l. Acad. Sci. (U.S.A.). 87:1899-1902 (1990), herein incorporated by reference; Mukai and Gill, Genome 34:448-452. (1991); Schwarzacher and Heslop-Harrison, Genome 34: 317-323 (1991); Wang et al., Jpn. J. Genet. 66: 313-316 (1991), the entirety of which is herein incorporated by reference; Parra and Windle, Nature Genetics, 5: 17-21 (1993), the entirety of which is herein incorporated by reference). It is understood that the nucleic acid molecules of the present invention may be used as probes or markers to localize sequences along a chromosome.

[0170] It is also understood that one or more of the molecules of the present invention, preferably one or more of the EST nucleic acid molecules of the present invention or one or more of the antibodies of the present invention may be utilized to detect the expression level or pattern of a protein or mRNA thereof by in situ hybridization.

[0171] Another method to localize the expression of a molecule is tissue printing. Tissue printing provides a way to screen, at the same time on the same membrane many tissue sections from different plants or different developmental stages. Tissue-printing procedures utilize films designed to immobilize proteins and nucleic acids. In essence, a freshly cut section of an organ is pressed gently onto nitrocellulose paper, nylon membrane or polyvinylidene difluoride membrane. Such membranes are commercially available (e.g. Millipore, Bedford, Mass.). The contents of the cut cell transfer onto the membrane, and the molecules are immobilized to the membrane. The immobilized molecules form a latent print that can be visualized with appropriate probes. When a plant tissue print is made on nitrocellulose paper, the cell walls leave a physical print that makes the anatomy visible without further treatment (Varner and Taylor, Plant Physiol. 91: 31-33 (1989), the entirety of which is herein incorporated by reference).

[0172] Tissue printing on substrate films is described by Daoust, Exp. Cell Res. 12: 203-211 (1957), the entirety of which is herein incorporated by reference, who detected amylase, protease, ribonuclease, and deoxyribonuclease in animal tissues using starch, gelatin, and agar films. These techniques can be applied to plant tissues (Yomo and Taylor, Planta 112:35-43 (1973); Harris and Chrispeels, Plant Physiol. 56: 292-299 (1975). Advances in membrane technology have increased the range of applications of Daoust's tissue-printing techniques allowing (Cassab and Varner, J. Cell. Biol. 105: 2581-2588 (1987), the entirety of which is herein incorporated by reference; the histochemical localization of various plant enzymes and deoxyribonuclease on nitrocellulose paper and nylon (Spruce et al., Phytochemistry, 26: 2901-2903 (1987), the entirety of which is herein incorporated by reference; Barres et al. Neuron 5: 527-544 (1990), the entirety of which is herein incorporated by reference; the entirety of which is herein incorporated by reference; Reid and Pont-Lezica, Tissue Printing: Tools for the Study of Anatomy, Histochemistry, and Gene Expression, Academic Press, New York, N.Y. (1992), the entirety of which is herein incorporated by reference; Reid et al. Plant Physiol. 93: 160-165 (1990), herein incorporate by reference; Ye et al. Plant J. 1: 175-183 (1991), the entirety of which is herein incorporated by reference).

[0173] It is understood that one or more of the molecules of the present invention, preferably one or more of the EST nucleic acid molecules of the present invention or one or more of the antibodies of the present invention may be utilized to detect the presence or quantity of a protein by tissue printing.

[0174] Further, it is also understood that any of the nucleic acid molecules of the present invention may be used as marker nucleic acids and or probes in connection with methods that require probes or marker nucleic acids. As used herein, a probe is an agent that is utilized to determine an attribute or feature (e.g. presence or absence, location, correlation, etc.) or a molecule, cell, tissue or plant. As used herein, a marker nucleic acid is a nucleic acid molecule that is utilized to determine an attribute or feature (e.g., presence or absence, location, correlation, etc.) or a molecule, cell, tissue or plant.

[0175] A microarray-based method for high-throughput monitoring of plant gene expression may be utilized to measure gene-specific hybridization targets. This ‘chip’-based approach involves using microarrays of nucleic acid molecules as gene-specific hybridization targets to quantitatively measure expression of the corresponding plant genes (Schena et al., Science 270: 467-470 (1995), the entirety of which is herein incorporated by reference; Shalon, Ph.D. Thesis. Stanford University (1996), the entirety of which is herein incorporated by reference). Every nucleotide in a large sequence can be queried at the same time. Hybridization can be used to efficiently analyze large amounts of nucleotide sequence.

[0176] Several microarray methods have been described. One method compares the sequences to be analyzed by hybridization to a set of oligonucleotides representing all possible subsequences (Bains and Smith, J. Theor. Biol. 135: 303 (1989), the entirety of which is herein incorporated by reference). A second method hybridizes the sample to an array of oligonucleotide probes. An array consisting of oligonucleotides complementary to subsequences of a target sequence can be used to determine the identity of a target sequence, measure its amount, and detect differences between the target and a reference sequence. Nucleic acid molecules microarrays may also be screened with protein molecules or fragments thereof to determine nucleic acid molecules that specifically bind protein molecules or fragments thereof.

[0177] The microarray approach may be used with polypeptide targets (U.S. Pat. No. 5,445,934; U.S. Pat. No. 5,143,854; U.S. Pat. No. 5,079,600; U.S. Pat. No. 4,923,901, all of which are herein incorporated by reference in their entirety). Essentially, polypeptides are synthesized on a substrate (microarray) and these polypeptides can be screened with either protein molecules or fragments thereof or nucleic acid molecules in order to screen for either protein molecules or fragments thereof or nucleic acid molecules that specifically bind the target polypeptides. Implementation of these techniques rely on recently developed combinatorial technologies to generate any ordered array of a large number of oligonucleotide probes (Fodor et al., Science 251:767-773 (1991), the entirety of which is herein incorporated by reference).

[0178] It is understood that one or more of the molecules of the present invention, preferably one or more of the nucleic acid molecules or protein molecules or fragments thereof of the present invention may be utilized in a microarray based method.

[0179] In a preferred embodiment of the present invention microarrays may be prepared that comprise nucleic acid molecules where preferably at least 10%, preferably at least 25%, more preferably at least 50% and even more preferably at least 75%, 80%, 85%, 90% or 95% of the nucleic acid molecules located on that array are selected from the group of nucleic acid molecules that specifically hybridize to one or more nucleic acid molecule having a nucleic acid sequence selected from the group of SEQ ID NO: 1 through SEQ ID NO: 54005 or complement thereof or fragments of either.

[0180] A particular preferred microarray embodiment of the present invention is a microarray comprising nucleic acid molecules encoding genes or fragments thereof that are homologues of known genes or nucleic acid molecules that comprise genes or fragment thereof that elicit only limited or no matches to known genes. A further preferred microarray embodiment of the present invention is a microarray comprising nucleic acid molecules having genes or fragments thereof that are homologues of known genes and nucleic acid molecules that comprise genes or fragment thereof that elicit only limited or no matches to known genes. Site-directed mutagenesis may be utilized to modify nucleic acid sequences, particularly as it is a technique that allows one or more of the amino acids encoded by a nucleic acid molecule to be altered (e.g. a threonine to be replaced by a methionine). Three basic methods for site-directed mutagenesis are often employed. These are cassette mutagenesis (Wells et al., Gene 34:315-23 (1985), the entirety of which is herein incorporated by reference), primer extension (Gilliam et al., Gene 12:129-137 (1980), the entirety of which is herein incorporated by reference); Zoller and Smith, Methods Enzymol. 100:468-500 (1983), the entirety of which is herein incorporated by reference; and Dalbadie-McFarland et al., Proc. Natl. Acad. Sci. (U.S.A.) 79:6409-4413 (1982), the entirety of which is herein incorporated by reference) and methods based upon PCR (Scharf et al., Science 233:1076-1078 (1986), the entirety of which is herein incorporated by reference; Higuchi et al., Nucleic Acids Res. 16:7351-7367 (1988), the entirety of which is herein incorporated by reference). Site directed mutagenesis approaches are also described in European Patent 0 385 962, the entirety of which is herein incorporated by reference, European Patent 0 359 472, the entirety of which is herein incorporated by reference, and PCT Patent Application WO 93/07278, the entirety of which is herein incorporated by reference.

[0181] Site-directed mutagenesis strategies have been applied to plants for both in vitro as well as in vivo site directed mutagenesis (Lanz et al., J. Biol. Chem. 266:9971-6 (1991), the entirety of which is herein incorporated by reference; Kovgan and Zhdanov, Biotekhnologiya 5:148-154; No. 207160n, Chemical Abstracts 110:225 (1989), the entirety of which is herein incorporated by reference; Ge et al., Proc. Natl. Acad. Sci. (U.S.A.) 86:4037-4041 (1989), the entirety of which is herein incorporated by reference, Zhu et al., J. Biol. Chem. 271:18494-18498 (1996), Chu et al., Biochemistry 33:6150-6157 (1994), the entirety of which is herein incorporated by reference, Small et al., EMBO J. 11:1291-1296 (1992), the entirety of which is herein incorporated by reference, Cho et al., Mol. Biotechnol. 8:13-16 (1997), Kita et al., J. Biol. Chem. 271:26529-26535 (1996), the entirety of which is herein incorporated by reference, Jin et al., Mol. Microbiol. 7:555-562 (1993), the entirety of which is herein incorporated by reference, Hatfield and Vierstra, J. Biol. Chem. 267:14799-14803 (1992), the entirety of which is herein incorporated by reference, Zhao et al., Biochemistry 31:5093-5099 (1992), the entirety of which is herein incorporated by reference).

[0182] Any of the nucleic acid molecules of the present invention may either be modified by site-directed mutagenesis or used as, for example, nucleic acid molecules that are used to target other nucleic acid molecules for modification. It is understood that mutants with more than one altered nucleotide can be constructed using techniques that practitioners skilled in the art are familiar with such as isolating restriction fragments and ligating such fragments into an expression vector (see, for example, Sambrook et al., Molecular Cloning: A Laboratory Manual, Cold Spring Harbor Press (1989)).

[0183] Sequence-specific DNA-binding proteins play a role in the regulation of transcription. The isolation of recombinant cDNAs encoding these proteins facilitates the biochemical analysis of their structural and functional properties. Genes encoding such DNA-binding proteins have been isolated using classical genetics (Vollbrecht et al., Nature 350: 241-243 (1991), the entirety of which is herein incorporated by reference) and molecular biochemical approaches, including the screening of recombinant cDNA libraries with antibodies (Landschulz et al., Genes Dev. 2: 786-800 (1988), the entirety of which is herein incorporated by reference) or DNA probes (Bodner et al., Cell 55: 505-518 (1988), the entirety of which is herein incorporated by reference). In addition, an in situ screening procedure has been used and has facilitated the isolation of sequence-specific DNA-binding proteins from various plant species (Gilmartin et al., Plant Cell 4: 839-849 (1992), the entirety of which is herein incorporated by reference; Schindler et al., EMBO J. 11: 1261-1273 (1992) the entirety of which is herein incorporated by reference). An in situ screening protocol does not require the purification of the protein of interest (Vinson et al., Genes Dev. 2: 801-806 (1988), the entirety of which is herein incorporated by reference; Singh et al., Cell 52: 415-423 (1988), the entirety of which is herein incorporated by reference).

[0184] Steps may be employed to characterize DNA-protein interactions. The first is to identify promoter fragments that interact with DNA-binding proteins, to titrate binding activity, to determine the specificity of binding, and to determine whether a given DNA-binding activity can interact with related DNA sequences (Sambrook et al., Molecular Cloning: A Laboratory Manual, 2^{nd} edition. Cold Spring Harbor Laboratory Press, Cold Spring Harbor, N.Y. (1989). Electrophoretic mobility-shift assay is a widely used assay. The assay provides a simple, rapid, and sensitive method for detecting DNA-binding proteins based on the observation that the mobility of a DNA fragment through a nondenaturing, low-ionic strength polyacrylamide gel is retarded upon association with a DNA-binding protein (Fried and Crother, Nucleic Acids Res. 9: 6505-6525 (1981), the entirety of which is herein incorporated by reference). When one or more specific binding activities have been identified, the exact sequence of the DNA bound by the protein may be determined. Several procedures for characterizing protein/DNA-binding sites are used, including methylation and ethylation interference assays (Maxam and Gilbert, Methods Enzymol. 65: 499-560 (1980), the entirety of which is herein incorporated by reference; Wissman and Hillen, Methods Enzymol. 208: 365-379 (1991), the entirety of which is herein incorporated by reference) and footprinting techniques employing DNase I (Galas and Schmitz, Nucleic Acids Res. 5: 3157-3170 (1978), the entirety of which is herein incorporated by reference), 1,10-phenanthroline-copper ion methods (Sigman et al., Methods Enzymol. 208: 365-379 (1991), the entirety of which is herein incorporated by reference) or hydroxyl radical methods (Dixon et al., Methods Enzymol. 208: 380-413 (1991), the entirety of which is herein incorporated by reference). It is understood that one or more of the nucleic acid molecules of the present invention, preferably one or more of the EST nucleic acid molecules of the present invention may be utilized to identify a protein or fragment thereof that specifically binds to a nucleic acid molecule of the present invention. It is also understood that one or more of the protein molecules or fragments thereof of the present invention may be utilized to identify a nucleic acid molecule that specifically binds to it.

[0185] The two-hybrid system is based on the fact that many cellular functions are carried out by proteins that interact (physically) with one another. Two-hybrid systems have been used to probe the function of new proteins (Chien et al., Proc. Natl. Acad. Sci. (U.S.A.) 88: 9578-9582 (1991) the entirety of which is herein incorporated by reference; Durfee et al., Genes Dev. 7: 555-569 (1993) the entirety of which is herein incorporated by reference; Choi et al., Cell 78: 499-512 (1994), the entirety of which is herein incorporated by reference; Kranz et al., Genes Dev. 8: 313-327 (1994), the entirety of which is herein incorporated by reference).

[0186] Interaction mating techniques have facilitated a number of two-hybrid studies of protein-protein interaction. Interaction mating has been used to examine interactions between small sets of tens of proteins (Finley and Brent, Proc. Natl. Acad. Sci. (U.S.A.) 91: 12098-12984 (1994), the entirety of which is herein incorporated by reference), larger sets of hundreds of proteins, (Bendixen et al., Nucl. Acids Res. 22: 1778-1779 (1994), the entirety of which is herein incorporated by reference) and to comprehensively map proteins encoded by a small genome (Bartel et al., Nature Genetics 12: 72-77 (1996), the entirety of which is herein incorporated by reference). This technique utilizes proteins fused to the DNA-binding domain and proteins fused to the activation domain. They are expressed in two different haploid yeast strains of opposite mating type, and the strains are mated to determine if the two proteins interact. Mating occurs when haploid yeast strains come into contact and result in the fusion of the two haploids into a diploid yeast strain. An interaction can be determined by the activation of a two-hybrid reporter gene in the diploid strain. The primary advantage of this technique is that it reduces the number of yeast transformations needed to test individual interactions. It is understood that the protein-protein interactions of protein or fragments thereof of the present invention may be investigated using the two-hybrid system and that any of the nucleic acid molecules of the present invention that encode such proteins or fragments thereof may be used to transform yeast in the two-hybrid system.

[0187] Synechocystis 6803 is a photosynthetic Cyanobacterium capable of oxygenic photosynthesis as well as heterotrophic growth in the absence of light. The entire genome has been sequenced, and it is reported to have a circular genome size of 3.57 Mbp containing 3168 potential open reading frames. Open reading frames (ORFs) were identified based upon their homology to other reported ORFs and by using ORF identification computer programs. Sixteen hundred potential ORFs were assigned based on their homology to previously identified ORFs. Of these 1600 ORFs, 145 were identical to reported ORFs (Kaneko et al., DNA Research 3:109-36 (1996), herein incorporated by reference in its entirety).

[0188] Several prokaryote promoters have been used in Synechocystis to express heterologous genes including the tac, lac, and lambda phage promoters (Bryant (ed.), The Molecular Biology of Cyanobacteria, Kluwer Academic Publishers, (1994); Ferino and Chauvat, Gene 84:257-266 (1989), both of which are herein incorporated by reference in their entirety). Several bacterial origins of replication such as RSF1010 and ACYC are reported to replicate in Synechocystis (Mermet-Bouvier and Chauvat, Current Microbiology 28:145-148 (1994); Kuhlemeier et al., Mol. Gen. Genet. 184:249-254 (1981), both of which are herein incorporated by reference in their entirety).

[0189] Synechocystis has been used to study gene regulation by gene replacement through homologous recombination or by gene disruption using antibiotic resistance markers (Pakrasi et al., EMBO 7:325-332 (1988), herein incorporated by reference in its entirety). In such gene regulation studies, double reciprocal homologous regions of the host genome flanking the gene of interest recombine to stably integrate the gene of interest into the genome. The gene of interest can be expressed once that gene has been stably integrated into the genome. Biochemical analysis can be performed to study the effect of the replaced or deleted gene.

[0190] It is understood that the agents of the present invention may be employed in a Synechocystis system.

[0191] Exogenous genetic material may be transferred into a plant cell and the plant cell regenerated into a whole, fertile or sterile plant. Exogenous genetic material is any genetic material, whether naturally occurring or otherwise, from any source that is capable of being inserted into any organism. Such genetic material may be transferred into either monocotyledons and dicotyledons including but not limited to the crops, maize and soybean (See specifically, Chistou, Particle Bombardment for Genetic Engineering of Plants, pp 63-69 (maize), pp 50-60 (soybean), Biotechnology Intelligence Unit Academic Press, San Diego, Calif. (1996), the entirety of which is herein incorporated by reference and generally Chistou, Particle Bombardment for Genetic Engineering of Plants, Biotechnology Intelligence Unit Academic Press, San Diego, Calif. (1996), the entirety of which is herein incorporated by reference).

[0192] Transfer of a nucleic acid that encodes for a protein can result in overexpression of that protein in a transformed cell or transgenic plant. One or more of the proteins or fragments thereof encoded by nucleic acid molecules of the present invention may be overexpressed in a transformed cell or transformed plant. Such overexpression may be the result of transient or stable transfer of the exogenous material.

[0193] Exogenous genetic material may be transferred into a plant cell by the use of a DNA vector or construct designed for such a purpose. Design of such a vector is generally within the skill of the art (See, Plant Molecular Biology: A Laboratory Manual eds. Clark, Springer, New York (1997), the entirety of which is herein incorporated by reference).

[0194] A construct or vector may include a plant promoter to express the protein or protein fragment of choice. A number of promoters which are active in plant cells have been described in the literature. These include the nopaline synthase (NOS) promoter (Ebert et al., Proc. Natl. Acad. Sci. (U.S.A.) 84:5745-5749 (1987), the entirety of which is herein incorporated by reference), the octopine synthase (OCS) promoter (which are carried on tumor-inducing plasmids of Agrobacterium tumefaciens), the caulimovirus promoters such as the cauliflower mosaic virus (CaMV) 19S promoter (Lawton et al., Plant Mol. Biol. 9:315-324 (1987), the entirety of which is herein incorporated by reference) and the CAMV 35S promoter (Odell et al., Nature 313:810-812 (1985), the entirety of which is herein incorporated by reference), the figwort mosaic virus 35S-promoter, the light-inducible promoter from the small subunit of ribulose-1,5-bis-phosphate carboxylase (ssRUBISCO), the Adh promoter (Walker et al., Proc. Natl. Acad. Sci. (U.S.A.) 84:6624-6628 (1987), the entirety of which is herein incorporated by reference), the sucrose synthase promoter (Yang et al., Proc. Natl. Acad. Sci. (U.S.A.) 87:414-44148 (1990), the entirety of which is herein incorporated by reference), the R gene complex promoter (Chandler et al., The Plant Cell 1:1175-1183 (1989), the entirety of which is herein incorporated by reference), and the chlorophyll a/b binding protein gene promoter, etc. These promoters have been used to create DNA constructs which have been expressed in plants; see, e.g., PCT publication WO 84/02913, herein incorporated by reference in its entirety.

[0195] Promoters which are known or are found to cause transcription of DNA in plant cells can be used in the present invention. Such promoters may be obtained from a variety of sources such as plants and plant viruses. It is preferred that the particular promoter selected should be capable of causing sufficient expression to result in the production of an effective amount of a protein to cause the desired phenotype. In addition to promoters which are known to cause transcription of DNA in plant cells, other promoters may be identified for use in the current invention by screening a plant cDNA library for genes which are selectively or preferably expressed in the target tissues or cells.

[0196] For the purpose of expression in source tissues of the plant, such as the leaf, seed, root or stem, it is preferred that the promoters utilized in the present invention have relatively high expression in these specific tissues. For this purpose, one may choose from a number of promoters for genes with tissue- or cell-specific or -enhanced expression. Examples of such promoters reported in the literature include the chloroplast glutamine synthetase GS2 promoter from pea (Edwards et al., Proc. Natl. Acad. Sci. (U.S.A.) 87:3459-3463 (1990), herein incorporated by reference in its entirety), the chloroplast fructose-1,6-biphosphatase (FBPase) promoter from wheat (Lloyd et al., Mol. Gen. Genet. 225:209-216 (1991), herein incorporated by reference in its entirety), the nuclear photosynthetic ST-LS1 promoter from potato (Stockhaus et al., EMBO J. 8:2445-2451 (1989), herein incorporated by reference in its entirety), the phenylalanine ammonia-lyase (PAL) promoter and the chalcone synthase (CHS) promoter from Arabidopsis thaliana. Also reported to be active in photosynthetically active tissues are the ribulose-1,5-bisphosphate carboxylase (RbcS) promoter from eastern larch (Larix laricina), the promoter for the cab gene, cab6, from pine (Yamamoto et al., Plant Cell Physiol. 35:773-778 (1994), herein incorporated by reference in its entirety), the promoter for the Cab-1 gene from wheat (Fejes et al., Plant Mol. Biol. 15:921-932 (1990), herein incorporated by reference in its entirety), the promoter for the CAB-1 gene from spinach (Lubberstedt et al., Plant Physiol. 104:997-1006 (1994), herein incorporated by reference in its entirety), the promoter for the cab1R gene from rice (Luan et al., Plant Cell. 4:971-981 (1992), the entirety of which is herein incorporated by reference), the pyruvate, orthophosphate dikinase (PPDK) promoter from maize (Matsuoka et al., Proc. Natl. Acad. Sci. (U.S.A.) 90: 9586-9590 (1993), herein incorporated by reference in its entirety), the promoter for the tobacco Lhcb1*2 gene (Cerdan et al., Plant Mol. Biol. 33: 245-255. (1997), herein incorporated by reference in its entirety), the Arabidopsis thaliana SUC2 sucrose-H+ symporter promoter (Truernit et al., Planta. 196: 564-570 (1995), herein incorporated by reference in its entirety), and the promoter for the thylacoid membrane proteins from spinach (psaD, psaF, psaE, PC, FNR, atpC, atpD, cab, rbcS). Other promoters for the chlorophyll a/b-binding proteins may also be utilized in the present invention, such as the promoters for LhcB gene and PsbP gene from white mustard (Sinapis alba; Kretsch et al., Plant Mol. Biol. 28: 219-229 (1995), the entirety of which is herein incorporated by reference).

[0197] For the purpose of expression in sink tissues of the plant, such as the tuber of the potato plant, the fruit of tomato, or the seed of maize, wheat, rice, and barley, it is preferred that the promoters utilized in the present invention have relatively high expression in these specific tissues. A number of promoters for genes with tuber-specific or -enhanced expression are known, including the class I patatin promoter (Bevan et al., EMBO J. 8: 1899-1906 (1986); Jefferson et al., Plant Mol. Biol. 14: 995-1006 (1990), both of which are herein incorporated by reference in its entirety), the promoter for the potato tuber ADPGPP genes, both the large and small subunits, the sucrose synthase promoter (Salanoubat and Belliard, Gene. 60: 47-56 (1987), Salanoubat and Belliard, Gene. 84: 181-185 (1989), both of which are incorporated by reference in their entirety), the promoter for the major tuber proteins including the 22 kd protein complexes and proteinase inhibitors (Hannapel, Plant Physiol. 101: 703-704 (1993), herein incorporated by reference in its entirety), the promoter for the granule bound starch synthase gene (GBSS) (Visser et al., Plant Mol. Biol. 17: 691-699 (1991), herein incorporated by reference in its entirety), and other class I and II patatins promoters (Koster-Topfer et al., Mol Gen Genet. 219: 390-396 (1989); Mignery et al., Gene. 62: 27-44 (1988), both of which are herein incorporated by reference in their entirety).

[0198] Other promoters can also be used to express a fructose 1,6 bisphosphate aldolase gene in specific tissues, such as seeds or fruits. The promoter for β-conglycinin (Chen et al., Dev. Genet. 10: 112-122 (1989), herein incorporated by reference in its entirety) or other seed-specific promoters such as the napin and phaseolin promoters, can be used. The zeins are a group of storage proteins found in maize endosperm. Genomic clones for zein genes have been isolated (Pedersen et al., Cell 29: 1015-1026 (1982), herein incorporated by reference in its entirety), and the promoters from these clones, including the 15 kD, 16 kD, 19 kD, 22 kD, 27 kD, and gamma genes, could also be used. Other promoters known to function, for example, in maize, include the promoters for the following genes: waxy, Brittle, Shrunken 2, Branching enzymes I and II, starch synthases, debranching enzymes, oleosins, glutelins, and sucrose synthases. A particularly preferred promoter for maize endosperm expression is the promoter for the glutelin gene from rice, more particularly the Osgt-1 promoter (Zheng et al., Mol. Cell. Biol. 13: 5829-5842 (1993), herein incorporated by reference in its entirety). Examples of promoters suitable for expression in wheat include those promoters for the ADPglucose pyrophosphorylase (ADPGPP) subunits, the granule bound and other starch synthases, the branching and debranching enzymes, the embryogenesis-abundant proteins, the gliadins, and the glutenins. Examples of such promoters in rice include those promoters for the ADPGPP subunits, the granule bound and other starch synthases, the branching enzymes, the debranching enzymes, sucrose synthases, and the glutelins. A particularly preferred promoter is the promoter for rice glutelin, Osgt-1. Examples of such promoters for barley include those for the ADPGPP subunits, the granule bound and other starch synthases, the branching enzymes, the debranching enzymes, sucrose synthases, the hordeins, the embryo globulins, and the aleurone specific proteins.

[0199] Root specific promoters may also be used. An example of such a promoter is the promoter for the acid chitinase gene (Samac et al., Plant Mol. Biol. 25: 587-596 (1994), the entirety of which is herein incorporated by reference). Expression in root tissue could also be accomplished by utilizing the root specific subdomains of the CaMV35S promoter that have been identified (Lam et al., Proc. Natl. Acad. Sci. (U.S.A.) 86:7890-7894 (1989), herein incorporated by reference in its entirety). Other root cell specific promoters include those reported by Conkling et al. (Conkling et al., Plant Physiol. 93:1203-1211 (1990), the entirety of which is herein incorporated by reference).

[0200] Additional promoters that may be utilized are described, for example, in U.S. Pat. Nos. 5,378,619, 5,391,725, 5,428,147, 5,447,858, 5,608,144, 5,608,144, 5,614,399, 5,633,441, 5,633,435, and 4,633,436, all of which are herein incorporated in their entirety. In addition, a tissue specific enhancer may be used (Fromm et al., The Plant Cell 1:977-984 (1989), the entirety of which is herein incorporated by reference).

[0201] Constructs or vectors may also include, with the coding region of interest, a nucleic acid sequence that acts, in whole or in part, to terminate transcription of that region. For example, such sequences have been isolated including the Tr7 3′ sequence and the nos 3′ sequence (Ingelbrecht et al., The Plant Cell 1:671-680 (1989), the entirety of which is herein incorporated by reference; Bevan et al., Nucleic Acids Res. 11:369-385 (1983), the entirety of which is herein incorporated by reference), or the like.

[0202] A vector or construct may also include regulatory elements. Examples of such include the Adh intron 1 (Callis et al., Genes and Develop. 1:1183-1200 (1987), the entirety of which is herein incorporated by reference), the sucrose synthase intron (Vasil et al., Plant Physiol. 91:1575-1579 (1989), the entirety of which is herein incorporated by reference) and the TMV omega element (Gallie et al., The Plant Cell 1:301-311 (1989), the entirety of which is herein incorporated by reference). These and other regulatory elements may be included when appropriate.

[0203] A vector or construct may also include a selectable marker. Selectable markers may also be used to select for plants or plant cells that contain the exogenous genetic material. Examples of such include, but are not limited to, a neo gene (Potrykus et al., Mol. Gen. Genet. 199:183-188 (1985), the entirety of which is herein incorporated by reference) which codes for kanamycin resistance and can be selected for using kanamycin, G418, etc.; a bar gene which codes for bialaphos resistance; a mutant EPSP synthase gene (Hinchee et al., Bio/Technology 6:915-922 (1988), the entirety of which is herein incorporated by reference) which encodes glyphosate resistance; a nitrilase gene which confers resistance to bromoxynil (Stalker et al., J. Biol. Chem. 263:6310-6314 (1988), the entirety of which is herein incorporated by reference); a mutant acetolactate synthase gene (ALS) which confers imidazolinone or sulphonylurea resistance (European Patent Application 154,204 (Sep. 11, 1985), the entirety of which is herein incorporated by reference); and a methotrexate resistant DHFR gene (Thillet et al., R Biol. Chem. 263:12500-12508 (1988), the entirety of which is herein incorporated by reference).

[0204] A vector or construct may also include a transit peptide. Incorporation of a suitable chloroplast transit peptide may also be employed (European Patent Application Publication Number 0218571, the entirety of which is herein incorporated by reference). Translational enhancers may also be incorporated as part of the vector DNA. DNA constructs could contain one or more 5′ non-translated leader sequences which may serve to enhance expression of the gene products from the resulting mRNA transcripts. Such sequences may be derived from the promoter selected to express the gene or can be specifically modified to increase translation of the mRNA. Such regions may also be obtained from viral RNAs, from suitable eukaryotic genes, or from a synthetic gene sequence. For a review of optimizing expression of transgenes, see Koziel et al., Plant Mol. Biol. 32:393-405 (1996), the entirety of which is herein incorporated by reference.

[0205] A vector or construct may also include a screenable marker. Screenable markers may be used to monitor expression. Exemplary screenable markers include a glucuronidase or uidA gene (GUS) which encodes an enzyme for which various chromogenic substrates are known (Jefferson, Plant Mol. Biol, Rep. 5: 387-405 (1987), the entirety of which is herein incorporated by reference; Jefferson et al., EMBO J. 6: 3901-3907 (1987), the entirety of which is herein incorporated by reference); an R-locus gene, which encodes a product that regulates the production of anthocyanin pigments (red color) in plant tissues ((Dellaporta et al., Stadler Symposium 11:263-282 (1988), the entirety of which is herein incorporated by reference); a β-lactamase gene (Sutcliffe et al., Proc. Natl. Acad. Sci. (U.S.A.) 75: 3737-3741 (1978), the entirety of which is herein incorporated by reference), a gene which encodes an enzyme for which various chromogenic substrates are known (e.g., PADAC, a chromogenic cephalosporin); a luciferase gene (Ow et al., Science 234: 856-859 (1986), the entirety of which is herein incorporated by reference) a xylE gene (Zukowsky et al., Proc. Natl. Acad. Sci. (U.S.A.) 80:1101-1105 (1983), the entirety of which is herein incorporated by reference) which encodes a catechol diozygenase that can convert chromogenic catechols; an α-amylase gene (Ikatu et al., Bio/Technol. 8:241-242 (1990), the entirety of which is herein incorporated by reference); a tyrosinase gene (Katz et al., J. Gen. Microbiol. 129:2703-2714 (1983), the entirety of which is herein incorporated by reference) which encodes an enzyme capable of oxidizing tyrosine to DOPA and dopaquinone which in turn condenses to melanin; an α-galactosidase, which will turn a chromogenic α-galactose substrate.

[0206] Included within the terms “selectable or screenable marker genes” are also genes which encode a scriptable marker whose secretion can be detected as a means of identifying or selecting for transformed cells. Examples include markers which encode a secretable antigen that can be identified by antibody interaction, or even secretable enzymes which can be detected catalytically. Secretable proteins fall into a number of classes, including small, diffusible proteins detectable, e.g., by ELISA, small active enzymes detectable in extracellular solution (e.g., α-amylase, β-lactamase, phosphinothricin transferase), or proteins which are inserted or trapped in the cell wall (such as proteins which include a leader sequence such as that found in the expression unit of extension or tobacco PR-S). Other possible selectable and/or screenable marker genes will be apparent to those of skill in the art.

[0207] Methods and compositions for transforming a bacteria and other microorganisms are known in the art (see for example Sambrook et al., Molecular Cloning: A Laboratory Manual, Second Edition, Cold Spring Harbor Laboratory Press, Cold Spring Harbor, N.Y., (1989), the entirety of which is herein incorporated by reference).

[0208] There are many methods for introducing transforming nucleic acid molecules into plant cells. Suitable methods are believed to include virtually any method by which nucleic acid molecules may be introduced into a cell, such as by Agrobacterium infection or direct delivery of nucleic acid molecules such as, for example, by PEG-mediated transformation, by electroporation or by acceleration of DNA coated particles, etc. (Pottykus, Ann. Rev. Plant Physiol. Plant Mol. Biol. 42:205-225 (1991), the entirety of which is herein incorporated by reference; Vasil, Plant Mol. Biol. 25: 925-937 (1994), the entirety of which is herein incorporated by reference. For example, electroporation has been used to transform maize protoplasts (Fromm et al., Nature 312:791-793 (1986), the entirety of which is herein incorporated by reference).

[0209] Other vector systems suitable for introducing transforming DNA into a host plant cell includes but is not limited to binary artificial chromosome (BIBAC) vectors (Hamilton et al., Gene 200:107-116, (1997), the entirety of which is herein incorporated by reference, and transfection with RNA viral vectors (Della-Cioppa et al., Ann. N.Y. Acad. Sci. (1996), 792 (Engineering Plants for Commercial Products and Applications), 57-61, the entirety of which is herein incorporated by reference.

[0210] Technology for introduction of DNA into cells is well known to those of skill in the art. Four general methods for delivering a gene into cells have been described: (1) chemical methods (Graham and van der Eb, Virology 54:536-539 (1973), the entirety of which is herein incorporated by reference); (2) physical methods such as microinjection (Capecchi, Cell 22:479-488 (1980), electroporation (Wong and Neumann, Biochem. Biophys. Res. Commun., 107:584-587 (1982); Fromm et al., Proc. Natl. Acad. Sci. USA, 82:5824-5828 (1985); U.S. Pat. No. 5,384,253; and the gene gun (Johnston and Tang, Methods Cell Biol. 43:353-365 (1994), all of which the entirety is herein incorporated by reference; (3) viral vectors (Clapp, Clin. Perinatol., 20:155-168 (1993); Lu et al., J. Exp. Med., 178:2089-2096 (1993); Eglitis and Anderson, Biotechniques, 6:608-614 (1988), all of which the entirety is herein incorporated by reference); and (4) receptor-mediated mechanisms (Curiel et al., Hum Gen. Ther., 3:147-154 (1992); Wagner et al., Proc. Natl. Acad. Sci. USA, 89:6099-6103 (1992), all of which the entirety is herein incorporated by reference).

[0211] Acceleration methods that may be used include, for example, microprojectile bombardment and the like. One example of a method for delivering transforming nucleic acid molecules to plant cells is microprojectile bombardment. This method has been reviewed by Yang and Christou, eds., Particle Bombardment Technology for Gene Transfer, Oxford Press, Oxford, England (1994), the entirety of which is herein incorporated by reference). Non-biological particles (microprojectiles) that may be coated with nucleic acids and delivered into cells by a propelling force. Exemplary particles include those comprised of tungsten, gold, platinum, and the like.

[0212] A particular advantage of microprojectile bombardment, in addition to it being an effective means of reproducibly, and stably transforming monocotyledons, is that neither the isolation of protoplasts (Cristou et al., Plant Physiol. 87:671-674 (1988), the entirety of which is herein incorporated by reference) nor the susceptibility of Agrobacterium infection is required. An illustrative embodiment of a method for delivering DNA into maize cells by acceleration is a biolistics g-particle delivery system, which can be used to propel particles coated with DNA through a screen, such as a stainless steel or Nytex screen, onto a filter surface covered with corn cells cultured in suspension. Gordon-Kamm et al., describes the basic procedure for coating tungsten particles with DNA (Gordon-Kamm et al., Plant Cell 2: 603-618 (1990), the entirety of which is herein incorporated by reference). The screen disperses the tungsten nucleic acid particles so that they are not delivered to the recipient cells in large aggregates. A particle delivery system suitable for use with the present invention is the helium acceleration PDS-1000/He gun which is available from Bio-Rad Laboratories (Bio-Rad, Hercules, Calif.) (Sanford et al., Technique 3:3-16 (1991), the entirety of which is herein incorporated by reference).

[0213] For the bombardment, cells in suspension may be concentrated on filters. Filters containing the cells to be bombarded are positioned at an appropriate distance below the microprojectile stopping plate. If desired, one or more screens are also positioned between the gun and the cells to be bombarded.

[0214] Alternatively, immature embryos or other target cells may be arranged on solid culture medium. The cells to be bombarded are positioned at an appropriate distance below the macroprojectile stopping plate. If desired, one or more screens are also positioned between the acceleration device and the cells to be bombarded. Through the use of techniques set forth herein one may obtain up to 1000 or more foci of cells transiently expressing a marker gene. The number of cells in a focus which express the exogenous gene product 48 hours post-bombardment often range from one to ten and average one to three.

[0215] In bombardment transformation, one may optimize the prebombardment culturing conditions and the bombardment parameters to yield the maximum numbers of stable transformants. Both the physical and biological parameters for bombardment are important in this technology. Physical factors are those that involve manipulating the DNA/microprojectile precipitate or those that affect the flight and velocity of either the macro- or microprojectiles. Biological factors include all steps involved in manipulation of cells before and immediately after bombardment, the osmotic adjustment of target cells to help alleviate the trauma associated with bombardment, and also the nature of the transforming DNA, such as linearized DNA or intact supercoiled plasmids. It is believed that pre-bombardment manipulations are especially important for successful transformation of immature embryos. In another alternative embodiment, plastids can be stably transformed. Methods disclosed for plastid transformation in higher plants include the particle gun delivery of DNA containing a selectable marker and targeting of the DNA to the plastid genome through homologous recombination (Svab et al., Proc. Natl. Acad. Sci. (U.S.A.) 87:8526-8530 (1990); Svab and Maliga, Proc. Natl. Acad. Sci. (U.S.A.) 90:913-917 (1993); Staub and Maliga, EMBO J. 12:601-606 (1993); U.S. Pat. Nos. 5,451,513 and 5,545,818, all of which are herein incorporated by reference in their entirety).

[0216] Accordingly, it is contemplated that one may wish to adjust various aspects of the bombardment parameters in small scale studies to fully optimize the conditions. One may particularly wish to adjust physical parameters such as gap distance, flight distance, tissue distance, and helium pressure. One may also minimize the trauma reduction factors by modifying conditions which influence the physiological state of the recipient cells and which may therefore influence transformation and integration efficiencies. For example, the osmotic state, tissue hydration and the subculture stage or cell cycle of the recipient cells may be adjusted for optimum transformation. The execution of other routine adjustments will be known to those of skill in the art in light of the present disclosure.

[0217] Agrobacterium-mediated transfer is a widely applicable system for introducing genes into plant cells because the DNA can be introduced into whole plant tissues, thereby bypassing the need for regeneration of an intact plant from a protoplast. The use of Agrobacterium-mediated plant integrating vectors to introduce DNA into plant cells is well known in the art. See, for example the methods described (Fraley et al., Biotechnology 3:629-635 (1985); Rogers et al., Meth. In Enzymol, 153:253-277 (1987), both of which are herein incorporated by reference in their entirety. Further, the integration of the Ti-DNA is a relatively precise process resulting in few rearrangements. The region of DNA to be transferred is defined by the border sequences, and intervening DNA is usually inserted into the plant genome as described (Spielmann et al., Mol Gen Genet., 205:34 (1986), the entirety of which is herein incorporated by reference).

[0218] Modern Agrobacterium transformation vectors are capable of replication in E. coli as well as Agrobacterium, allowing for convenient manipulations as described (Klee et al., In: Plant DNA Infectious Agents, T. Hohn and J. Schell, eds., Springer-Verlag, New York, pp. 179-203 (1985), the entirety of which is herein incorporated by reference. Moreover, recent technological advances in vectors for Agrobacterium-mediated gene transfer have improved the arrangement of genes and restriction sites in the vectors to facilitate construction of vectors capable of expressing various polypeptide coding genes. The vectors described have convenient multi-linker regions flanked by a promoter and a polyadenylation site for direct expression of inserted polypeptide coding genes and are suitable for present purposes (Rogers et al., Meth. In Enzymol., 153:253-277 (1987), the entirety of which is herein incorporated by reference). In addition, Agrobacterium containing both armed and disarmed Ti genes can be used for the transformations. In those plant strains where Agrobacterium-mediated transformation is efficient, it is the method of choice because of the facile and defined nature of the gene transfer.

[0219] A transgenic plant formed using Agrobacterium transformation methods typically contains a single gene on one chromosome. Such transgenic plants can be referred to as being heterozygous for the added gene. More preferred is a transgenic plant that is homozygous for the added structural gene; i.e., a transgenic plant that contains two added genes, one gene at the same locus on each chromosome of a chromosome pair. A homozygous transgenic plant can be obtained by sexually mating (selfing) an independent segregant transgenic plant that contains a single added gene, germinating some of the seed produced and analyzing the resulting plants produced for the gene of interest.

[0220] It is also to be understood that two different transgenic plants can also be mated to produce offspring that contain two independently segregating added, exogenous genes. Selfing of appropriate progeny can produce plants that are homozygous for both added, exogenous genes that encode a polypeptide of interest. Back-crossing to a parental plant and out-crossing with a non-transgenic plant are also contemplated, as is vegetative propagation.

[0221] Transformation of plant protoplasts can be achieved using methods based on calcium phosphate precipitation, polyethylene glycol treatment, electroporation, and combinations of these treatments. See for example (Potrykus et al., Mol. Gen. Genet., 205:193-200 (1986); Lorz et al., Mol. Gen. Genet., 199:178, (1985); Fromm et al., Nature, 319:791, (1986); Uchimiya et al., Mol. Gen. Genet.: 204:204, (1986); Callis et al., Genes and Development, 1183, (1987); Marcotte et al., Nature, 335:454, (1988), all of which the entirety is herein incorporated by reference).

[0222] Application of these systems to different plant strains depends upon the ability to regenerate that particular plant strain from protoplasts. Illustrative methods for the regeneration of cereals from protoplasts are described (Fujimura et al., Plant Tissue Culture Letters, 2:74, (1985); Toriyama et al., Theor Appl. Genet. 205:34. (1986); Yamada et al., Plant Cell Rep., 4:85, (1986); Abdullah et al., Biotechnology, 4:1087, (1986), all of which the entirety is herein incorporated by reference).

[0223] To transform plant strains that cannot be successfully regenerated from protoplasts, other ways to introduce DNA into intact cells or tissues can be utilized. For example, regeneration of cereals from immature embryos or explants can be effected as described (Vasil, Biotechnology, 6:397, (1988), the entirety of which is herein incorporated by reference). In addition, “particle gun” or high-velocity microprojectile technology can be utilized (Vasil et al., Bio/Technology 10:667, (1992), the entirety of which is herein incorporated by reference).

[0224] Using the latter technology, DNA is carried through the cell wall and into the cytoplasm on the surface of small metal particles as described (Klein et al., Nature, 328:70, (1987); Klein et al., Proc. Natl. Acad. Sci. USA, 85:8502-8505, (1988); McCabe et al., Biotechnology, 6:923, (1988), all of which the entirety is herein incorporated by reference). The metal particles penetrate through several layers of cells and thus allow the transformation of cells within tissue explants.

[0225] Other methods of cell transformation can also be used and include but are not limited to introduction of DNA into plants by direct DNA transfer into pollen (Zhou et al., Methods in Enzymology, 101:433, (1983); Hess et al., Intern Rev. Cytol., 107:367, (1987); Luo et al., Plant Mol. Biol. Reporter, 6:165, (1988), all of which the entirety is herein incorporated by reference), by direct injection of DNA into reproductive organs of a plant (Pena et al., Nature, 325:274, (1987), the entirety of which is herein incorporated by reference), or by direct injection of DNA into the cells of immature embryos followed by the rehydration of dessicated embryos (Neuhaus et al., Theor. Appl. Genet., 75:30, (1987), the entirety of which is herein incorporated by reference).

[0226] The regeneration, development, and cultivation of plants from single plant protoplast transformants or from various transformed explants is well known in the art (Weissbach and Weissbach, In: Methods for Plant Molecular Biology, (Eds.), Academic Press, Inc. San Diego, Calif., (1988), the entirety of which is herein incorporated by reference). This regeneration and growth process typically includes the steps of selection of transformed cells, culturing those individualized cells through the usual stages of embryonic development through the rooted plantlet stage. Transgenic embryos and seeds are similarly regenerated. The resulting transgenic rooted shoots are thereafter planted in an appropriate plant growth medium such as soil.

[0227] The development or regeneration of plants containing the foreign, exogenous gene that encodes a protein of interest is well known in the art. Preferably, the regenerated plants are self-pollinated to provide homozygous transgenic plants, as discussed before. Otherwise, pollen obtained from the regenerated plants is crossed to seed-grown plants of agronomically important lines. Conversely, pollen from plants of these important lines is used to pollinate regenerated plants. A transgenic plant of the present invention containing a desired polypeptide is cultivated using methods well known to one skilled in the art.

[0228] There are a variety of methods for the regeneration of plants from plant tissue. The particular method of regeneration will depend on the starting plant tissue and the particular plant species to be regenerated.

[0229] Methods for transforming dicots, primarily by use of Agrobacterium tumefaciens, and obtaining transgenic plants have been published for cotton (U.S. Pat. No. 5,004,863, U.S. Pat. No. 5,159,135, U.S. Pat. No. 5,518,908, all of which the entirety is herein incorporated by reference); soybean (U.S. Pat. No. 5,569,834, U.S. Pat. No. 5,416,011, McCabe et al., Biotechnology 6:923, (1988), Christou et al., Plant Physiol., 87:671-674 (1988), all of which the entirety is herein incorporated by reference); Brassica (U.S. Pat. No. 5,463,174, the entirety of which is herein incorporated by reference); peanut (Cheng et al., Plant Cell Rep. 15: 653-657 (1996), McKently et al., Plant Cell Rep. 14:699-703 (1995), all of which the entirety is herein incorporated by reference); papaya (Yang et al., (1996), the entirety of which is herein incorporated by reference); pea (Grant et al., Plant Cell Rep. 15:254-258, (1995), the entirety of which is herein incorporated by reference).

[0230] Transformation of monocotyledons using electroporation, particle bombardment, and Agrobacterium have also been reported. Transformation and plant regeneration have been achieved in asparagus (Bytebier et al., Proc. Natl. Acad. Sci. USA 84:5345, (1987), the entirety of which is herein incorporated by reference); barley (Wan and Lemaux, Plant Physiol 104:37, (1994), the entirety of which is herein incorporated by reference); maize (Rhodes et al., Science 240: 204, (1988), Gordon-Kamm et al., Plant Cell, 2:603, (1990), Fromm et al., Bio/Technology 8:833, (1990), Koziel et al., Bio/Technology 11:194, (1993), Armstrong et al., Crop Science 35:550-557, (1995), all of which the entirety is herein incorporated by reference); oat (Somers et al., Bio/Technology, 10:1589, (1992), the entirety of which is herein incorporated by reference); orchardgrass (Horn et al., Plant Cell Rep. 7:469, (1988), the entirety of which is herein incorporated by reference); rice (Toriyama et al., Theor Appl. Genet. 205:34, (1986); Park et al., Plant Mol. Biol., 32: 1135-1148, (1996); Abedinia et al., Aust. J. Plant Physiol. 24:133-141, (1997); Zhang and Wu, Theor. Appl. Genet. 76:835, (1988); Zhang et al. Plant Cell Rep. 7:379, (1988); Battraw and Hall, Plant Sci. 86:191-202, (1992); Christou et al., Bio/Technology 9:957, (1991), all of which the entirety is herein incorporated by reference); sugarcane (Bower and Birch, Plant J. 2:409, (1992), the entirety of which is herein incorporated by reference); tall fescue (Wang et al., Bio/Technology 10:691, (1992), the entirety of which is herein incorporated by reference), and wheat (Vasil et al., Bio/Technology 10:667, (1992), the entirety of which is herein incorporated by reference; U.S. Pat. No. 5,631,152, the entirety of which is herein incorporated by reference.

[0231] Assays for gene expression based on the transient expression of cloned nucleic acid constructs have been developed by introducing the nucleic acid molecules into plant cells by polyethylene glycol treatment, electroporation, or particle bombardment (Marcotte, et al., Nature, 335: 454-457 (1988), the entirety of which is herein incorporated by reference; Marcotte, et al., Plant Cell, 1: 523-532 (1989), the entirety of which is herein incorporated by reference; McCarty, et al., Cell 66: 895-905 (1991), the entirety of which is herein incorporated by reference; Hattori, et al., Genes Dev. 6: 609-618 (1992), the entirety of which is herein incorporated by reference; Goff, et al., EMBO J. 9: 2517-2522 (1990), the entirety of which is herein incorporated by reference). Transient expression systems may be used to functionally dissect gene constructs (See generally, Mailga et al., Methods in Plant Molecular Biology, Cold Spring Harbor Press (1995)).

[0232] Any of the nucleic acid molecules of the present invention may be introduced into a plant cell in a permanent or transient manner in combination with other genetic elements such as vectors, promoters enhancers etc. Further any of the nucleic acid molecules of the present invention may be introduced into a plant cell in a manner that allows for over expression of the protein or fragment thereof encoded by the nucleic acid molecule.

[0233] Cosuppression is the reduction in expression levels, usually at the level of RNA, of a particular endogenous gene or gene family by the expression of a homologous sense construct that is capable of transcribing mRNA of the same strandedness as the transcript of the endogenous gene (Napoli et al., Plant Cell 2: 279-289 (1990), the entirety of which is herein incorporated by reference; van der Krol et al., Plant Cell 2: 291-299 (1990), the entirety of which is herein incorporated by reference). Cosuppression may result from stable transformation with a single copy nucleic acid molecule that is homologous to a nucleic acid sequence found with the cell (Prolls and Meyer, Plant J. 2:465-475 (1992), the entirety of which is herein incorporated by reference) or with multiple copies of a nucleic acid molecule that is homologous to a nucleic acid sequence found with the cell (Mittlesten et al., Mol. Gen. Genet. 244: 325-330 (1994), the entirety of which is herein incorporated by reference). Genes, even though different, linked to homologous promoters may result in the cosuppression of the linked genes (Vaucheret C. R. Acad. Sci. III 316: 1471-1483 (1993), the entirety of which is herein incorporated by reference).

[0234] This technique has, for example been applied to generate white flowers from red petunia and tomatoes that do not ripen on the vine. Up to 50% of petunia transformants that contained a sense copy of the chalcone synthase (CHS) gene produced white flowers or floral sectors; this was as a result of the post-transcriptional loss of mRNA encoding CHS (Flavell, Proc. Natl. Acad. Sci. (U.S.A.) 91:3490-3496 (1994)), the entirety of which is herein incorporated by reference). Cosuppression may require the coordinate transcription of the transgene and the endogenous gene, and can be reset by a developmental control mechanism (Jorgensen, Trends Biotechnol, 8:340344 (1990), the entirety of which is herein incorporated by reference; Meins and Kunz, In: Gene Inactivation and Homologous Recombination in Plants (Paszkowski, J., ed.), pp. 335-348. Kluwer Academic, Netherlands (1994), the entirety of which is herein incorporated by reference).

[0235] It is understood that one or more of the nucleic acids of the present invention including those comprising SEQ ID NO: 1 through SEQ ID NO: 54005 or complement thereof or fragments of either or other nucleic acid molecules of the present invention may be introduced into a plant cell and transcribed using an appropriate promoter with such ascription resulting in the co-suppression of an endogenous protein.

[0236] Antisense approaches are a way of preventing or reducing gene function by targeting the genetic material (Mol et al., FEBS Lett. 268: 427-430 (1990), the entirety of which is herein incorporated by reference). The objective of the antisense approach is to use a sequence complementary to the target gene to block its expression and create a mutant cell line or organism in which the level of a single chosen protein is selectively reduced or abolished. Antisense techniques have several advantages over other ‘reverse genetic’ approaches. The site of inactivation and its developmental effect can be manipulated by the choice of promoter for antisense genes or by the timing of external application or microinjection. Antisense can manipulate its specificity by selecting either unique regions of the target gene or regions where it shares homology to other related genes (Hiatt et al., In Genetic Engineering, Setlow (ed.), Vol. 11, New York: Plenum 49-63 (1989), the entirety of which is herein incorporated by reference).

[0237] The principle of regulation by antisense RNA is that RNA that is complementary to the target mRNA is introduced into cells, resulting in specific RNA:RNA duplexes being formed by base pairing between the antisense substrate and the target mRNA (Green et al., Annu. Rev. Biochem. 55: 569-597 (1986), the entirety of which is herein incorporated by reference). Under one embodiment, the process involves the introduction and expression of an antisense gene sequence. Such a sequence is one in which part or all of the normal gene sequences are placed under a promoter in inverted orientation so that the ‘wrong’ or complementary strand is transcribed into a noncoding antisense RNA that hybridizes with the target mRNA and interferes with its expression (Takayama and Inouye, Crit. Rev. Biochem. Mol. Biol. 25: 155-184 (1990), the entirety of which is herein incorporated by reference). An antisense vector is constructed by standard procedures and introduced into cells by transformation, transfection, electroporation, microinjection, or by infection, etc. The type of transformation and choice of vector will determine whether expression is transient or stable. The promoter used for the antisense gene may influence the level, timing, tissue, specificity, or inducibility of the antisense inhibition.

[0238] It is understood that protein synthesis activity in a plant cell may be reduced or depressed by growing a transformed plant cell containing a nucleic acid molecule whose non-transcribed strand encodes a protein or fragment thereof.

[0239] Antibodies have been expressed in plants (Hiatt et al., Nature 342:76-78 (1989), the entirety of which is herein incorporated by reference; Conrad and Fielder, Plant Mol. Biol. 26: 1023-1030 (1994), the entirety of which is herein incorporated by reference). Cytoplasmic expression of a scFv (single-chain Fv antibodies) has been reported to delay infection by artichoke mottled crinkle virus. Transgenic plants that express antibodies directed against endogenous proteins may exhibit a physiological effect (Philips et al., EMBO J. 16: 4489-4496 (1997), the entirety of which is herein incorporated by reference; Marion-Poll, Trends in Plant Science. 2: 447-448 (1997), the entirety of which is herein incorporated by reference). For example, expressed anti-abscisic antibodies reportedly result in a general perturbation of seed development (Philips et al., EMBO J. 16: 4489-4496 (1997)).

[0240] Antibodies that are catalytic may also be expressed in plants (abzymes). The principle behind abzymes is that since antibodies may be raised against many molecules, this recognition ability can be directed toward generating antibodies that bind transition states to force a chemical reaction forward (Persidas, Nature Biotechnology 15:1313-1315 (1997), the entirety of which is herein incorporated by reference; Baca et al., Ann. Rev. Biophys. Biomol. Struct. 26:461-493 (1997), the entirety of which is herein incorporated by reference). The catalytic abilities of abzymes may be enhanced by site directed mutagenesis. Examples of abzymes are, for example, set forth in U.S. Pat. No. 5,658,753; U.S. Pat. No. 5,632,990; U.S. Pat. No. 5,631,137; U.S. Pat. No. 5,602,015; U.S. Pat. No. 5,559,538; U.S. Pat. No. 5,576,174; U.S. Pat. No. 5,500,358; U.S. Pat. No. 5,318,897; U.S. Pat. No. 5,298,409; U.S. Pat. No. 5,258,289 and U.S. Pat. No. 5,194,585, all of which are herein incorporated in their entirety.

[0241] It is understood that any of the antibodies of the present invention may be expressed in plants and that such expression can result in a physiological effect. It is also understood that any of the expressed antibodies may be catalytic.

[0242] In addition to the above discussed procedures, practitioners are familiar with the standard resource materials which describe specific conditions and procedures for the construction, manipulation and isolation of macromolecules (e.g., DNA molecules, plasmids, etc.), generation of recombinant organisms and the screening and isolating of clones, (see for example, Sambrook et al., Molecular Cloning: A Laboratory Manual, Cold Spring Harbor Press (1989); Mailga et al., Methods in Plant Molecular Biology, Cold Spring Harbor Press (1995), the entirety of which is herein incorporated by reference; Birren et al., Genome Analysis: Analyzing DNA, 1, Cold Spring Harbor, N.Y., the entirety of which is herein incorporated by reference).

[0243] The nucleotide sequence provided in SEQ ID NO: 1, through SEQ ID NO: 54005 or fragment thereof, or complement thereof, or a nucleotide sequence at least 90% identical, preferably 95%, identical even more preferably 99% or 100% identical to the sequence provided in SEQ ID NO: 1 through SEQ ID NO: 54005 or fragment thereof, or complement thereof, can be “provided” in a variety of mediums to facilitate use fragment thereof. Such a medium can also provide a subset thereof in a form that allows a skilled artisan to examine the sequences.

[0244] In one application of this embodiment, a nucleotide sequence of the present invention can be recorded on computer readable media. As used herein, “computer readable media” refers to any medium that can be read and accessed directly by a computer. Such media include, but are not limited to: magnetic storage media, such as floppy discs, hard disc, storage medium, and magnetic tape: optical storage media such as CD-ROM; electrical storage media such as RAM and ROM; and hybrids of these categories such as magnetic/optical storage media. A skilled artisan can readily appreciate how any of the presently known computer readable mediums can be used to create a manufacture comprising computer readable medium having recorded thereon a nucleotide sequence of the present invention.

[0245] As used herein, “recorded” refers to a process for storing information on computer readable medium. A skilled artisan can readily adopt any of the presently known methods for recording information on computer readable medium to generate media comprising the nucleotide sequence information of the present invention. A variety of data storage structures are available to a skilled artisan for creating a computer readable medium having recorded thereon a nucleotide sequence of the present invention. The choice of the data storage structure will generally be based on the means chosen to access the stored information. In addition, a variety of data processor programs and formats can be used to store the nucleotide sequence information of the present invention on computer readable medium. The sequence information can be represented in a word processing text file, formatted in commercially-available software such as WordPerfect and Microsoft Word, or represented in the form of an ASCII file, stored in a database application, such as DB2, Sybase, Oracle, or the like. A skilled artisan can readily adapt any number of data processor structuring formats (e.g. text file or database) in order to obtain computer readable medium having recorded thereon the nucleotide sequence information of the present invention.

[0246] By providing one or more of nucleotide sequences of the present invention, a skilled artisan can routinely access the sequence information for a variety of purposes. Computer software is publicly available which allows a skilled artisan to access sequence information provided in a computer readable medium. The examples which follow demonstrate how software which implements the BLAST (Altschul et al., J. Mol. Biol. 215:403-410 (1990)) and BLAZE (Brutlag et al., Comp. Chem. 17:203-207 (1993), the entirety of which is herein incorporated by reference) search algorithms on a Sybase system can be used to identify open reading frames (ORFs) within the genome that contain homology to ORFs or proteins from other organisms. Such ORFs are protein-encoding fragments within the sequences of the present invention and are useful in producing commercially important proteins such as enzymes used in amino acid biosynthesis, metabolism, transcription, translation, RNA processing, nucleic acid and a protein degradation, protein modification, and DNA replication, restriction, modification, recombination, and repair.

[0247] The present invention further provides systems, particularly computer-based systems, which contain the sequence information described herein. Such systems are designed to identify commercially important fragments of the nucleic acid molecule of the present invention. As used herein, “a computer-based system” refers to the hardware means, software means, and data storage means used to analyze the nucleotide sequence information of the present invention. The minimum hardware means of the computer-based systems of the present invention comprises a central processing unit (CPU), input means, output means, and data storage means. A skilled artisan can readily appreciate that any one of the currently available computer-based system are suitable for use in the present invention.

[0248] As indicated above, the computer-based systems of the present invention comprise a data storage means having stored therein a nucleotide sequence of the present invention and the necessary hardware means and software means for supporting and implementing a search means. As used herein, “data storage means” refers to memory that can store nucleotide sequence information of the present invention, or a memory access means which can access manufactures having recorded thereon the nucleotide sequence information of the present invention. As used herein, “search means” refers to one or more programs which are implemented on the computer-based system to compare a target sequence or target structural motif with the sequence information stored within the data storage means. Search means are used to identify fragments or regions of the sequence of the present invention that match a particular target sequence or target motif. A variety of known algorithms are disclosed publicly and a variety of commercially available software for conducting search means are available and can be used in the computer-based systems of the present invention. Examples of such software include, but are not limited to, MacPattern (EMBL), BLASTIN and BLASTIX (NCBIA). One of the available algorithms or implementing software packages for conducting homology searches can be adapted for use in the present computer-based systems.

[0249] The most preferred sequence length of a target sequence is from about 10 to 100 amino acids or from about 30 to 300 nucleotide residues. However, it is well recognized that during searches for commercially important fragments of the nucleic acid molecules of the present invention, such as sequence fragments involved in gene expression and protein processing, may be of shorter length.

[0250] As used herein, “a target structural motif,” or “target motif,” refers to any rationally selected sequence or combination of sequences in which the sequences or sequence(s) are chosen based on a three-dimensional configuration which is formed upon the folding of the target motif. There are a variety of target motifs known in the art. Protein target motifs include, but are not limited to, enzymatic active sites and signal sequences. Nucleic acid target motifs include, but are not limited to, promoter sequences, cis elements, hairpin structures and inducible expression elements (protein binding sequences).

[0251] Thus, the present invention further provides an input means for receiving a target sequence, a data storage means for storing the target sequences of the present invention sequence identified using a search means as described above, and an output means for outputting the identified homologous sequences. A variety of structural formats for the input and output means can be used to input and output information in the computer-based systems of the present invention. A preferred format for an output means ranks fragments of the sequence of the present invention by varying degrees of homology to the target sequence or target motif. Such presentation provides a skilled artisan with a ranking of sequences which contain various amounts of the target sequence or target motif and identifies the degree of homology contained in the identified fragment.

[0252] A variety of comparing means can be used to compare a target sequence or target motif with the data storage means to identify sequence fragments sequence of the present invention. For example, implementing software which implement the BLAST and BLAZE algorithms (Altschul et al., J. Mol. Biol. 215:403-410 (1990)) can be used to identify open frames within the nucleic acid molecules of the present invention. A skilled artisan can readily recognize that any one of the publicly available homology search programs can be used as the search means for the computer-based systems of the present invention. Having now generally described the invention, the same will be more readily understood through reference to the following examples which are provided by way of illustration, and are not intended to be limiting of the present invention, unless specified.

### EXAMPLE 1

[0253] The Soy60 (LIB3072) cDNA library is generated by subtracting the target cDNA, which is prepared from soybean cultivar Asgrow 3244 (Asgrow Seed Company, Des Moines, Iowa U.S.A.) seeds plus pods from drought stressed plants, from the driver cDNA, which is prepared from soybean cultivar Asgrow 3244 seeds plus pods from non drought-stressed (control) plants. Seeds are planted at a depth of approximately 2 cm into 2-3 inch peat pots containing Metromix 350 medium and the plants are grown in an environmental chamber set to a 12 h day/12 h night cycle, 26° C. daytime temperature, 21° C. nighttime temperature and 70% relative humidity. Daytime light levels are 300 μEinsteins/m². Soil is checked and watered daily to maintain even moisture conditions. At the R3 stage of the plant drought is induced by withholding water. After 3 and 6 days seeds and pods from both drought stressed and control (watered regularly) plants are collected from the fifth and sixth node and frozen in dry-ice. The harvested tissue is stored at −80° C. until RNA preparation. The RNA is prepared from the stored tissue as described in Example 2. SEQ ID NO: 1 through SEQ ID NO: 3621 are from LIB3072.

[0254] The Soy61 (LIB3073) cDNA library is generated by subtracting the target cDNA, which is prepared from soybean cultivar Asgrow 3244 (Asgrow Seed Company, Des Moines, Iowa U.S.A.) jasmonic acid treated seedling, from the driver cDNA, which is prepared from control buffer treated seedlings without cotyledon. Seeds are planted at a depth of approximately 2 cm into 2-3 inch peat pots containing Metromix 350 medium and the plants are grown in a greenhouse. The daytime temperature is approximately 29.4° C. and the nighttime temperature 20° C. Soil is checked and watered daily to maintain even moisture conditions. At 9 days post planting, the plantlets are sprayed with either control buffer of 0.1% Tween-20 or jasmonic acid (Sigma J-2500, Sigma, St. Louis, Mo. U.S.A.) at 1 mg/ml in 0.1% Tween-20. Plants are sprayed until runoff and the soil and the stem is soaked with the spraying solution. At 18 hours post application of jasmonic acid, the soybean plantlets appear growth retarded. After 18 hours, 24 hours and 48 hours post treatment, the cotyledons are removed and the remaining leaf and stem tissue above the soil is harvested and frozen in liquid nitrogen. The harvested tissue is stored at −80° C. until RNA preparation. To make RNA, the three sample timepoints are combined and ground. The RNA is prepared from the stored tissue as described in Example 2. For subtraction, target cDNA is made from the jasmonic acid treated tissue total RNA using the SMART cDNA synthesis system from Clonetech. Driver first strand cDNA from the control tissue is covalently linked to Dynabeads following a protocol similar to that described in the Dynal literature. The target cDNA is then heat denatured and the second strand trapped using Dynabeads oligo-dT. The target second strand cDNA is then hybridized to the driver cDNA in 400 μl 4×SSPE for three rounds of hybridization at 65° C. and 20 hours. After each hybridization, the hybridization solution is removed from the system and the hybridized target cDNA removed from the driver by heat denaturation in water. The refreshed driver is then reintroduced to the hybridization for the next round of hybridization. After hybridization, the remaining cDNA is trapped with Dynabeads oligo-dT. The trapped cDNA is then amplified as in previous PCR based libraries and the resulting cDNA ligated into the pSPORT vector. For this library's construction, the eighth fraction of the cDNA size fractionation step is used for ligation. SEQ ID NO: 3622 through SEQ ID NO: 5603 are from LIB3073.

[0255] The Soy62 (LIB3074) cDNA library is generated by subtracting the target cDNA, which is prepared from soybean cultivar Asgrow 3244 (Asgrow Seed Company, Des Moines, Iowa U.S.A.) jasmonic acid treated seedlings without cotyledon, from the driver cDNA, which is prepared from soybean cultivar Asgrow 3244 control buffer treated seedlings without cotyledon. Seeds are planted at a depth of approximately 2 cm into 2-3 inch peat pots containing Metromix 350 medium and the plants are grown in a greenhouse. The daytime temperature is approximately 29.4° C. and the nighttime temperature 20° C. Soil is checked and watered daily to maintain even moisture conditions. At 9 days post planting, the plantlets are sprayed with either control buffer of 0.1% Tween-20 or jasmonic acid (Sigma J-2500, Sigma, St Louis, Mo. U.S.A.) at 1 mg/ml in 0.1% Tween-20. Plants are sprayed until runoff and the soil and the stem is soaked with the spraying solution. At 18 hours post application of jasmonic acid, the soybean plantlets appear growth retarded. After 18 hours, 24 hours and 48 hours post treatment, the cotyledons are removed and the remaining leaf and stem tissue above the soil is harvested and frozen in liquid nitrogen. The harvested tissue is stored at −80° C. until RNA preparation. To make RNA, the three sample timepoints are combined and ground. The RNA is prepared from the stored tissue as described in Example 2. For subtraction, target cDNA is made from the jasmonic acid treated tissue total RNA using the SMART cDNA synthesis system from Clonetech. Driver first strand cDNA from the control tissue is covalently linked to Dynabeads following a protocol similar to that described in the Dynal literature. The target cDNA is then heat denatured and the second strand trapped using Dynabeads oligo-dT. The target second strand cDNA is then hybridized to the driver cDNA in 400 μl 4×SSPE for three rounds of hybridization at 65° C. and 20 hours. After each hybridization, the hybridization solution is removed from the system and the hybridized target cDNA removed from the driver by heat denaturation in water. The refreshed driver is then reintroduced to the hybridization for the next round of hybridization. After hybridization, the remaining cDNA is trapped with Dynabeads oligo-dT. The trapped cDNA is then amplified as in previous PCR based libraries and the resulting cDNA ligated into the pSPORT vector. For this library's construction, the ninth fraction of the cDNA size fractionation step is used for ligation. SEQ ID NO: 5604 through SEQ ID NO: 7406 are from LIB3074.

[0256] LIB3087 cDNA library is generated from hypocotyl axis from soybean cultivar Asgrow 3244 (Asgrow Seed Company, Des Moines, Iowa U.S.A.) seeds 4, 8 and 12 hours after imbibition. Seeds are imbibed in water for 4 hours at 30° C. and then the seed coat is removed. At the 4 hr timepoint axis tissue is immediately harvested and flash-frozen in liquid nitrogen. For 8 and 12 hr timepoints decoated seeds are transferred to cotton saturated with water and incubated at 30° C. for the remainder of the incubation period. Axis tissue is then excised and frozen in liquid nitrogen. Equal numbers of axes from each timepoint is pooled for RNA isolation. The collected tissue is stored at −80° C. Axis tissue consists of unexpanded root, hypocotyl, epicotyl and apex. The RNA is purified from the stored tissue and the cDNA library is constructed as described in Example 2. SEQ ID NO: 7407 through SEQ ID NO: 8401 are from LIB3087.

[0257] LIB3092 (Soy75) cDNA library is generated by subtracting a target cDNA, which is prepared from soybean cultivar Asgrow 3244 (Asgrow Seed Company, Des Moines, Iowa U.S.A.) leaves from drought stressed plants, from a driver cDNA, which is prepared from leaves from control (watered regularly) plants. Seeds are planted in moist Metromix 350 medium at a depth of approximately 2 cm. Trays are placed in an environmental chamber set to a 12 h day/12 h night cycle, 26° C. daytime temperature, 21° C. night temperature and 70% relative humidity. Daytime light levels are measured at 300 mEinsteins/m². Soil is checked and watered daily to maintain even moisture conditions. At the R3 stage of the plant, drought is induced by withholding water. After 3 and 6 days tissue is harvested. Leaves from both drought stressed and control (watered regularly) plants are collected from the fifth and sixth node and frozen in dry-ice. The tissue is then transferred to a −80° C. freezer for storage. For subtraction, a standard cDNA library is constructed in the pSPORT vector. Driver first strand cDNA is covalently linked to Dynabeads following a protocol similar to that described in the Dynal literature. The target library is then heat denatured and hybridized to the driver cDNA in 400 ml 4×SSPE for five rounds of hybridization at 68° C. and 20 hours. After each hybridization, the hybridization solution is removed from the system and the hybridized target cDNA removed from the driver by heat denaturation in water. The refreshed driver is then reintroduced to the hybridization for the next round of hybridization. The remaining cDNA in the hybridization solution is then used to transform E. coli for sequencing. SEQ ID NO: 8402 through SEQ ID NO: 11948 are from LIB3092.

[0258] The LIB3094 normalized cDNA library is generated from LIB3087. LIB3087 in the form of double-stranded plasmid DNA is used as the starting material for normalization. For normalization biotinylated genomic soybean DNA is used as the driver for the normalization reaction. Double stranded plasmid DNA representing approximately 1×10⁶ colony forming units is used as the target. The double stranded plasmid DNA is isolated using standard protocols. Approximately 4 micrograms of biotinylated genomic DNA is mixed with approximately 6 micrograms of double stranded plasmid DNA and allowed to hybridize. Genomic DNA-plasmid DNA hybrids are captured on Dynabeads M280 streptavidin. The dynabeads with captured hybrids are collected with a magnet. Captured hybrids are eluted in water. The resulting clones are subjected to a second round of hybridization identical to the first. SEQ ID NO: 11949 through SEQ ID NO: 16492 are from LIB3094

[0259] The Soy76 (Lib3106) cDNA library is generated from soybean cultivar Asgrow 3244 (Asgrow Seed Company, Des Moines, Iowa U.S.A.) jasmonic acid and arachidonic treated seedlings. Seeds are planted at a depth of approximately 2 cm into 2-3 inch peat pots containing Metromix 350 medium and the plants are grown in a greenhouse. The daytime temperature is approximately 29.4° C. and the nighttime temperature 20° C. Soil is checked and watered daily to maintain even moisture conditions. At 9 days post planting, the plantlets are sprayed with either control buffer of 0.1% Tween-20 or jasmonic acid (Sigma J-2500, Sigma, St. Louis, Mo. U.S.) at 1 mg/ml in 0.1% Tween-20. Plants are sprayed until runoff and the soil and the stem is soaked with the spraying solution. At 18 hours post application of jasmonic acid, the soybean plantlets appear growth retarded. Arachidonic acid treated seedlings are sprayed with 1 m/ml arachidonic acid in 0.1% Tween-20. After 18 hours, 24 hours and 48 hours post treatment, the cotyledons are removed and the remaining leaf and stem tissue above the soil is harvested and frozen in liquid nitrogen. The harvested tissue is stored at −80° C. until RNA preparation. To make RNA, the three sample timepoints from the jasmonic acid treated seedlings are combined and ground. RNA from the arachidonic acid treated seedlings is isolated separately. Poly A⁺ RNA is extracted from each total RNA sample separately and combined to make a cDNA library using approximately equal amounts of mRNA from each treatment. For the construction of this cDNA library, fraction 10 of the size fractionated cDNA is ligated into the pSPORT vector (Invitrogen, Carlsbad Calif. U.S.A.) in order to capture some of the smaller transcripts characteristic of antifungal proteins. SEQ ID NO: 16493 through SEQ ID NO:25178 are from LIB3106.

[0260] Soy77 (LIB3108) cDNA library is generated from soybean cultivar Asgrow 3244 (Asgrow Seed Company, Des Moines, Iowa U.S.A.) control buffer (0.1% Tween-20) treated seedlings. Seeds are planted at a depth of approximately 2 cm into 2-3 inch peat pots containing Metromix 350 medium and the plants are grown in a greenhouse. The daytime temperature is approximately 29.4° C. and the nighttime temperature 20° C. Soil is checked and watered daily to maintain even moisture conditions. At 9 days post planting, the plantlets are sprayed with either control buffer of 0.1% Tween-20 or jasmonic acid (Sigma J-2500, Sigma, St Louis, Mo. U.S.A.) at 1 mg/ml in 0.1% Tween-20. Plants are sprayed until runoff and the soil and the stem is soaked with the spraying solution. At 18 hours post application of jasmonic acid, the soybean plantlets appear growth retarded. After 18 hours, 24 hours and 48 hours post treatment, the cotyledons are removed and the remaining leaf and stem tissue above the soil is harvested and frozen in liquid nitrogen. The harvested tissue is stored at −80° C. until RNA preparation. To make RNA, the three sample timepoints from control buffer treated seedlings are combined and ground. The RNA is prepared from the stored tissue. For the construction of this cDNA library, fraction 10 of the size fractionated cDNA is ligated into the pSPORT vector in order to capture some of the smaller transcripts characteristic of antifungal proteins. SEQ ID NO: 25179 through SEQ ID NO: 29406 are from LIB3108.

[0261] Soy72 (LIB3138) normalized cDNA library is generated from Soy5 (SOYMON001), Soy20 (SOYMON008) and Soy24 (SOYMON012), Soy28 (SOYMON018) and Soy38 (SOYMON025). Equal amounts of Soy5 (SOYMON001), Soy20 (SOYMON008), Soy24 (SOYMON012), Soy28 (SOYMON018) and Soy38 (SOYMON025) in the form of double stranded DNA are mixed and used as the starting material for normalization. Biotinylated genomic soybean DNA is used as the driver for the normalization reaction. Double stranded plasmid DNA representing approximately 1×10⁶ colony forming units is used as the target. The double stranded plasmid DNA is isolated using standard protocols. Approximately 4 micrograms of biotinylated genomic DNA is mixed with approximately 6 micrograms of double stranded plasmid DNA and allowed to hybridize. Genomic DNA-plasmid DNA hybrids are captured on Dynabeads M280 streptavidin. The dynabeads with captured hybrids are collected with a magnet. Captured hybrids are eluted in water. The resulting clones are subjected to a second round of hybridization identical to the first. SEQ ID NO: 29407 through SEQ ID NO: 39013 are from LIB3138.

[0262] Soy73 (LIB3139) normalized cDNA library is generated from Soy6 (SOYMON002), Soy25 (SOYMON013) and Soy29 (SOYMON016), Soy31 (SOYMON017) and Soy39 (SOYMON026). Equal amounts of Soy6 (SOYMON002), Soy25 (SOYMON013) and Soy29 (SOYMON016), Soy31 (SOYMON017) and Soy39 (SOYMON026) in the form of double stranded DNA are mixed and used as the starting material for normalization. Biotinylated genomic soybean DNA is used as the driver for the normalization reaction. Double stranded plasmid DNA representing approximately 1×10⁶ colony forming units is used as the target. The double stranded plasmid DNA is isolated using standard protocols. Approximately 4 micrograms of biotinylated genomic DNA is mixed with approximately 6 micrograms of double stranded plasmid DNA and allowed to hybridize. Genomic DNA-plasmid DNA hybrids are captured on Dynabeads M280 streptavidin. The dynabeads with captured hybrids are collected with a magnet. Captured hybrids are eluted in water. The resulting clones are subjected to a second round of hybridization identical to the first. SEQ ID NO: 39014 through SEQ ID NO: 49440 are from LIB3139.

[0263] The subtractive cDNA library of the present invention, LIB3167, is constructed by subtracting the target cDNA, which is prepared from jasmonic acid treated and arachidonic acid treated seedlings without cotyledon, from the driver cDNA, which is prepared from control buffer treated seedlings without cotyledon. The soybean cultivar Asgrow 3244 is used for collection. Seeds are planted in moist Metromix 350 medium at a depth of approximately 2 cm. Plants are grown in Greenhouse 15 at Chesterfield village. Daytime and nighttime temperatures are approximately 29.4° C. and 20° C., respectively. At 9 days post planting, the plantlets are sprayed with either control buffer (0.1% Tween-20) or jasmonic acid (Sigma J-2500) at 1 milligram/ml in 0.1% Tween-20. Plants are sprayed until runoff and the soil around the stem is soaked with the spraying solution. At 18 hours after application of jasmonic acid, the soybean plantlets appear growth retarded compared to the control sprayed plants. At 18 hours, 24 hours and 48 hours post treatment spraying, a scissors is used to remove the cotyledons and to harvest the remaining leaf and stem tissue above the soil. This whole above soil plantlet minus the cotyledons was put into a 50 ml conical tube and immersed in liquid nitrogen. Arachidonic acid treated seedlings were sprayed with 1 mg.ml arachidonic acid in 0.1% Tween-20. A 24 hour sample is used in RNA preparation. The tissue is stored at −80° C. and transferred on dry-ice to −80° C. until tissue grinding. To make RNA, the three sample timepoints from the jasmonic Acid treated seedlings are combined and ground. Similarly, the three sample timepoints from the control buffer treated seedlings are combined to make RNA. RNA from the arachidonic acid treated seedlings was isolated separately from the 24 hour sample. Poly A+ RNA is extracted from each total RNA sample separately. Approximately equal amounts of mRNA from the jasmonic acid and arachidonic treatments are combined to make a cDNA library. SEQ ID NO: 49441 through SEQ ID NO: 54005 are from LIB3167.

### EXAMPLE 2

[0264] The stored RNA is purified using Trizol reagent from Life Technologies (Gibco BRL, Life Technologies, Gaithersburg, Md. U.S.A.), essentially as recommended by the manufacturer. Poly A+ RNA (mRNA) is purified using magnetic oligo dT beads essentially as recommended by the manufacturer (Dynabeads, Dynal Corporation, Lake Success, New York U.S.A.).

[0265] Construction of plant cDNA libraries is well-known in the art and a number of cloning strategies exist. A number of cDNA library construction kits are commercially available. The Superscript™ Plasmid System for cDNA synthesis and Plasmid Cloning (Gibco BRL, Life Technologies, Gaithersburg, Md. U.S.A.) is used, following the conditions suggested by the manufacturer.

[0266] Normalized libraries are made using essentially the Soares procedure (Soares et al., Proc. Natl. Acad. Sci. (U.S.A.) 91:9228-9232 (1994)). This approach is designed to reduce the initial 10,000-fold variation in individual cDNA frequencies to achieve abundances within one order of magnitude while maintaining the overall sequence complexity of the library. In the normalization process, the prevalence of high-abundance cDNA clones decreases dramatically, clones with mid-level abundance are relatively unaffected and clones for rare transcripts are effectively increased in abundance.

[0267] Normalized libraries are prepared from single-stranded and double-stranded DNA. Single-stranded and double-stranded DNA representing approximately 1×10⁶ colony forming units are isolated using standard protocols. RNA, complementary to the single-stranded DNA, is synthesized using the double stranded DNA as a template. Biotinylated dATP is incorporated into the RNA during the synthesis reaction. The single-stranded DNA is mixed with the biotinylated RNA in a 1:10 molar ratio) and allowed to hybridize. DNA-RNA hybrids are captured on Dynabeads M280 streptavidin (Dynabeads, Dynal Corporation, Lake Success, New York U.S.A.). The dynabeads with captured hybrids are collected with a magnet. The non-hybridized single-stranded molecules remaining after hybrid capture are converted to double stranded form and represent the primary normalized library.

### EXAMPLE 3

[0268] The cDNA libraries are plated on LB agar containing the appropriate antibiotics for selection and incubated at 37° for a sufficient time to allow the growth of individual colonies. Single colonies are individually placed in each well of a 96-well microtiter plates containing LB liquid including the selective antibiotics. The plates are incubated overnight at approximately 37° C. with gentle shaking to promote growth of the cultures. The plasmid DNA is isolated from each clone using Qiaprep plasmid isolation kits, using the conditions recommended by the manufacturer (Qiagen Inc., Santa Clara, Calif. U.S.A.).

[0269] The template plasmid DNA clones are used for subsequent sequencing. For sequencing the cDNA libraries of LIB3072, LIB3073, LIB3074, LIB3087, LIB3092, LIB3094, LIB3106, LIB3108, LIB3138, LIB3139, and LIB3167, a commercially available sequencing kit, such as the ABI PRISM dRhodamine Terminator Cycle Sequencing Ready Reaction Kit with AmpliTaq® DNA Polymerase, FS, is used under the conditions recommended by the manufacturer (PE Applied Biosystems, Foster City, Calif.). The ESTs of the present invention are generated by sequencing initiated from the 5′ end of each cDNA clone.

[0270] A number of sequencing techniques are known in the art, including fluorescence-based sequencing methodologies. These methods have the detection, automation and instrumentation capability necessary for the analysis of large volumes of sequence data. Currently, the 377 DNA Sequencer (Perkin-Elmer Corp., Applied Biosystems Div., Foster City, Calif.) allows the most rapid electrophoresis and data collection. With these types of automated systems, fluorescent dye-labeled sequence reaction products are detected and data entered directly into the computer, producing a chromatogram that is subsequently viewed, stored, and analyzed using the corresponding software programs. These methods are known to those of skill in the art and have been described and reviewed (Birren et al., Genome Analysis: Analyzing DNA, 1, Cold Spring Harbor, N.Y., the entirety of which is herein incorporated by reference).

1-7. (canceled)

8. A substantially purified nucleic acid molecule comprising a nucleic acid sequence wherein said nucleic acid sequence:
(a) hybridizes under stringent conditions to a nucleic acid sequence selected from the group consisting of SEQ ID NO: 1 through SEQ ID NO: 54005, a complement thereof or a fragment of either, or
(b) exhibits an 90% or greater identity to a nucleic acid sequence selected from the group consisting of SEQ ID NO: 1 through SEQ ID NO: 54005, a complement thereof or a fragment of either.

9. The substantially purified nucleic acid molecule of claim 8, wherein said nucleic acid molecule encodes a soybean protein or fragment thereof.

10. A substantially purified nucleic acid molecule comprising a nucleic acid sequence that shares between 100% and 90% sequence identity with a nucleic acid sequence selected from the group consisting of SEQ ID NO: 1 through SEQ ID NO: 54005, a complement thereof or a fragment of either.

11. The substantially purified nucleic acid molecule of claim 10, wherein said nucleic acid sequence shares between 100% and 95% sequence identity with a nucleic acid sequence selected from the group consisting of SEQ ID NO: 1 through SEQ ID NO: 54005, a complement thereof or a fragment of either.

12. The substantially purified nucleic acid molecule of claim 11, wherein said nucleic acid sequence shares between 100% and 98% sequence identity with a nucleic acid sequence selected from the group consisting of SEQ ID NO: 1 through SEQ ID NO: 54005, a complement thereof or a fragment of either.

13. The substantially purified nucleic acid molecule of claim 12, wherein said nucleic acid sequence shares between 100% and 99% sequence identity with a nucleic acid sequence selected from the group consisting of SEQ ID NO: 1 through SEQ ID NO: 54005, a complement thereof or a fragment of either.

14. The substantially purified nucleic acid molecule of claim 13, wherein said nucleic acid sequence shares 100% sequence identity with a nucleic acid sequence selected from the group consisting of SEQ ID NO: 1 through SEQ ID NO: 54005, a complement thereof or a fragment of either.

15. A substantially purified polypeptide, wherein said polypeptide is encoded by a nucleic acid molecule comprising a nucleic acid sequence, wherein said nucleic acid sequence:
(a) hybridizes under stringent conditions to a nucleic acid sequence selected from the group consisting of SEQ ID NO: 1 through SEQ ID NO: 54005, a complement thereof or a fragment of either, or
(b) exhibits an 90% or greater identity to a nucleic acid sequence selected from the group consisting of SEQ ID NO: 1 through SEQ ID NO: 54005, a complement thereof or a fragment of either.

16. A transformed plant having a nucleic acid molecule which comprises:
(a) an exogenous promoter region which functions in a plant cell to cause the production of an mRNA molecule; which is linked to;
(b) a structural nucleic acid molecule, wherein said structural nucleic acid molecule comprises a nucleic acid sequence, wherein said nucleic acid sequence
(i) hybridizes under stringent conditions to a nucleic acid sequence selected from the group consisting of SEQ ID NO: 1 through SEQ ID NO:54005, a complement thereof or a fragment of either; or
(ii) exhibits an 90% or greater identity to a nucleic acid sequence selected from the group consisting of SEQ ID NO: 1 through SEQ ID NO:54005, a complement thereof or a fragment of either,
which is linked to
(c) a 3′ non-translated sequence that functions in said plant cell to cause the termination of transcription and the addition of polyadenylated ribonucleotides to said 3′ end of said mRNA molecule.

17. The transformed plant according to claim 16, wherein said nucleic acid sequence is a complement of a nucleic acid sequence selected from the group consisting of SEQ ID NO: 1 through SEQ ID NO: 54005 or a fragment thereof.

18. The transformed plant according to claim 17, wherein said plant is selected from the group consisting of soybean, maize, cotton and wheat.

19. A transformed seed comprising a transformed plant cell comprising a nucleic acid molecule which comprises:
(a) an exogenous promoter region which functions in said plant cell to cause the production of an mRNA molecule; which is linked to;
(b) a structural nucleic acid molecule, wherein said structural nucleic acid molecule comprises a nucleic acid sequence, wherein said nucleic acid sequence
(i) hybridizes under stringent conditions to a nucleic acid sequence selected from the group consisting of SEQ ID NO: 1 through SEQ ID NO:54005, a complement thereof or a fragment of either; or
(ii) exhibits an 90% or greater identity to a nucleic acid sequence selected from the group consisting of SEQ ID NO: 1 through SEQ ID NO:54005, a complement thereof or a fragment of either,
which is linked to
(c) a 3′ non-translated sequence that functions in said plant cell to cause the termination of transcription and the addition of polyadenylated ribonucleotides to said 3′ end of said mRNA molecule.

20. The transformed seed according to claim 19, wherein said nucleic acid sequence is a complement of a nucleic acid sequence selected from the group consisting of SEQ ID NO: 1 through SEQ ID NO: 54005 or a fragment thereof.

21. The transformed seed according to claim 20, wherein said seed is selected from the group consisting of soybean, maize, cotton and wheat seed.

22. The transformed seed according to claim 20, wherein said exogenous promoter region functions in a seed cell.

23. The transformed seed according to claim 20, wherein said exogenous promoter region functions in a leaf cell.

24. A method of producing a genetically transformed plant, comprising the steps of:
(a) inserting into the genome of a plant cell a recombinant, double-stranded DNA molecule comprising
(i) a promoter which functions in plant cells to cause the production of an RNA sequence,
(ii) a structural nucleic acid molecule, wherein said structural nucleic acid molecule comprises a nucleic acid sequence, wherein said nucleic acid sequence
(A) hybridizes under stringent conditions to a nucleic acid sequence selected from the group consisting of SEQ ID NO: 1 through SEQ ID NO:54005, a complement thereof or a fragment of either; or
(B) exhibits an 90% or greater identity to a nucleic acid sequence selected from the group consisting of SEQ ID NO: 1 through SEQ ID NO:54005, a complement, thereof or a fragment of either,
which is linked to
(iii) a 3′ non-translated sequence which functions in plant cells to cause the addition of polyadenylated nucleotides to the 3′ end of RNA sequence,
(b) obtaining a transformed plant cell with said structural nucleic acid molecule that encodes one or more proteins, wherein said structural nucleic acid molecule is transcribed and results in expression of said protein(s); and
(c) regenerating from said transformed plant cell a genetically transformed plant.

25. A method for reducing expression of a protein in a plant cell comprising growing a transformed plant cell containing a nucleic acid molecule wherein the non-transcribed strand of said nucleic acid molecule encodes a protein or fragment thereof, and wherein the transcribed strand of said nucleic acid molecule is complementary to a nucleic acid molecule comprising a nucleic acid sequence selected from the group consisting of SEQ ID NO: 1 through SEQ ID NO:54005, a complement thereof or a fragment of either, and whereby said transcribed strand reduces or depresses expression of said protein.

26. A method for increasing expression of a protein in a plant cell comprising growing a transformed plant cell containing a nucleic acid molecule that encodes a protein or fragment thereof, wherein said nucleic acid molecule comprises a nucleic acid sequence selected from the group consisting of SEQ ID NO: 1 through SEQ ID NO:54005, a complement thereof or a fragment of either, and whereby said nucleic acid molecule increases expression of said protein.

27. A method of producing a plant containing reduced levels of a protein comprising:
(a) transforming a plant cell with a nucleic acid molecule comprising a nucleic acid sequence selected from the group consisting of SEQ ID NO: 1 through SEQ ID NO:54005, a complement thereof or a fragment of either, wherein said nucleic acid molecule is transcribed and results in co-suppression of endogenous protein synthesis activity, and
(b) regenerating said plant comprising said plant cell and producing subsequent progeny from said plant.

28. A method of growing a transgenic plant comprising
(a) planting a transformed seed comprising a nucleic acid sequence selected from the group consisting of SEQ ID NO: 1 through SEQ ID NO:54005, a complement thereof or a fragment of either, and
(b) growing a plant from said seed.

The application's sequence listing, which the Patent Office published only in electronic form, follows.

SEQUENCE LISTING (54005 sequences)

SEQ ID NO: 1 - DNA, 293 bp, Glycine max
  Clone ID: LIB3072-061-Q1-K1-H10
gacagcaaaaacaatgtaataaagatgagtttgaagaacaacatggtggtgctaaaggtgtgtttgttgcttcttttccttgtgggggttacagctgcacgcatggaactgagcttcttcaaaagtgatcagtcatcaagttatgatgatgatgagtattcaaaaccatgctgtgatctctgcatgtgcacacgctcaatgcctcctcaatgcagctgtgaagatattaggctgaattcatgccactcaaattgtaagagctgtatgtgcacacgctcacagccaggacagtg

SEQ ID NO: 2 - DNA, 332 bp, Glycine max
  Clone ID: LIB3072-061-Q1-K1-H11
gacagcaaaaacaattaataaagatgagtttgaagaacaacatggtggtgctaaaggtgtgtttgttgcttcttttccttgtgggggttacagctgcacgcatggaactgagcctcttcaaaagtgatcagtcatcaagttatgatgatgatgagtattcaaaaccatgctgtgatctctgcatgtgcacacgctcaatgcctcctcaatgcagctgtgaagatattaggctgaattcatgccactcagattgtaagagctgtatgtgcacacgctcacagccaggacagtgtcgttgtcttgacaccaacgacttctgctacaaaccttgc

SEQ ID NO: 3 - DNA, 328 bp, Glycine max
  Clone ID: LIB3072-061-Q1-K1-H3
gacagcaaaaacaattaataaagatgagtttgaagaacaacatggtggtgctaaaggtgtgtttgttgcttcttttccttgtgggggttacagctgcacgcatggaactgagcttcttcaaaagtgatcagtcatcaagttatgatgatgatgagtattcaaaaccatgctgtgatctctgcatgtgcacacgctcaatacctactcaatgcagctgtgaagatattaggctgaattcatgccactcatattgtaagagctgtatgtgcacacgctcacagacaggacagtgtcgttgtcttgacaccaacgacttctgctacaaacc

SEQ ID NO: 4 - DNA, 221 bp, Glycine max
  Clone ID: LIB3072-061-Q1-K1-H6
ggggatggtgaggggaggaagtagagagagaggatgaatgcgcgcggcgcgaggaagacggagaatgagaatattgttgatgaagtggaagaaatgttgcgagcggcgcaagaccaaatcctcttaattctcacccaagcccacattgcagtccgttcttctccggatcatgatcatgatctggatctggatctggatctagagcgtctatttcaggccct

SEQ ID NO: 5 - DNA, 356 bp, Glycine max
  Clone ID: LIB3072-061-Q1-K1-H8
gacactacacacagaaaaaaagagagagaagatgacgcggggaaagcagaatatcgaagcgcataagcgaaacgcagagaggaatcagaagggaaagggctctcagctcgaggccagagccgttggcctcaaagtcatctgccccatctgcaaggcccaacttgcaaatcaaaaccaactggttgatcattatgcttccaaacatccgaaggagaaacctcctgcagagtcaagctagttatatttgagcaaatggtacaaaaagtccccaaaaaaaattgctctctaagtgtgccttcgtgcttttaatgtaattctccctgcttgcaggcaggttgcaacatgttttaagttaa

SEQ ID NO: 6 - DNA, 340 bp, Glycine max
  Clone ID: LIB3072-061-Q1-K1-G9
gaccatagaagaaggacaaagagaagcattagcactaggagcagcaacaactagtctcagctgaaatggcctcttcagtgatggcatctgtggccctcaaacctgcccctttcactgttgagaagtcctcagtgagaggccttccctctctctcaaggaactcttcttcattcagagttgtggccagtggcaagaagatcaagactgacaaaccttatggaattaatggtggcatggctttgagggatggaactgatgcatctggcaggaaaggaaagggaaagggtgtttaccagtttgtagacaaatacggtgctaatgtcgatgggtacagtcctat

SEQ ID NO: 7 - DNA, 339 bp, Glycine max
  unsure at all n locations
  Clone ID: LIB3072-061-Q1-K1-F11
ggcacgcctccntacggcttctaaattactacacaaggggatcatcaacaaccagttgggtatcctagtacaccgcattaaaaaatttaatatatactatgatcacagcgcggttcccattactgttgctgggagttgttttcctggcatcaaattctgtctcatttggcattgcgtattgggaaaagcagaaccccattcacaacaagtgcctcctaagttgcaatatcgagaaagactcctacaagaaccaatcatgccacgctcgttgcaacctccttaaggtggaggaagaagaacaatgcgaaaaatgtcaaattccacgaccacgaccacaac

SEQ ID NO: 8 - DNA, 324 bp, Glycine max
  Clone ID: LIB3072-061-Q1-K1-F12
gattcacacagctgactaagaaagtcttccatagccccccaaaaatgaagagcaccatcttctttgctctctttctcttttgtgccttcaccacctcatacctaccttcagccatcgctgatttcgcgctcgataatgaaggtaaccctcttgaaaatggtggcacatattatatcttgtcagacataacagcatttggtggaataagagcagccccaacgggaaatgaaagatgccctctcactgtggtgcaatctcgcaatgagctcgacaaagggattggaacaatcatctcgtccccatatcgaatccgttttatcgccg

SEQ ID NO: 9 - DNA, 353 bp, Glycine max
  Clone ID: LIB3072-061-Q1-K1-F2
gacacaactaactaagaaagtcttccgtagccccccaaaaatgaagagcaccatcttctttgctctctttctcttttgtgccttcaccacctcatacctaccttcagccatcgctgatttcgtgctcgataatgaaggtaaccctcttgaaaatggtggcacatattatatcttgtcagacataacagcatttggtggaataagagcagccccaacgggaaatgaaagatgccctctcactgtggtgcaatctcgcaatgagctcgacaaagggattggaacaaccatctcgtccccatatcgaatccgttttatcgccgaaggccatcctttgagccttaagttcgattcat

SEQ ID NO: 10 - DNA, 322 bp, Glycine max
  Clone ID: LIB3072-061-Q1-K1-F3
acaaaaaacaaattcttgagattgactcttaaccatttcataccaccaacaccacttttaatcaaaatcttattccttgacatcaaaaacatttccccaacaaactttaaccattcgcaaaaatttttacattttaatcaataacaaaccattcaacattttttaattttccacttacaaaactatcaaacattaacacccaaaatcccacctttttataattgacatattcactcttaaaaaccttcaatatattatcccatcttaccataactatcatccttctcatttcaatctcatttactaccaactcatcaacatc

SEQ ID NO: 11 - DNA, 326 bp, Glycine max
  Clone ID: LIB3072-061-Q1-K1-F6
gatcatcaagaacgggtggaatatcctagtacaccgtattaaagaatttaagatatactatgatgagagcgcggttcccattactgttgctgggagttgctttcctggcatcagattctgtctcatttggcattgcgtattgggaaaagcagaaccccagtcacaacaagtgcctccgaagttgcaatagcgagaaagactcctacaggaaccaagcatgccacgctcgttgcaacctccttaaggtggaggaagaagaagaatgcgaagaaggtcaaattccacgaccacgaccacaacacccggagagggaacgtcatctacac

SEQ ID NO: 12 - DNA, 333 bp, Glycine max
  Clone ID: LIB3072-061-Q1-K1-F7
tataaatgaaattggtggttcagggaagttagagaagaatgagtttgttcaggatgctgatagcaagttagagaaagttgaactagttgaagaagcaagaaaatgtgtcacaaaaaagctagaaaaaaccagctccaaatttttcagaaagaaagcataatcttggagctaatgactggtaaattataaaatgtattaagacttgtatggagtatattatggtagtagacaatattttctgttgtggattaatggaagtaaagtgtaagatatgtatttgatttgatatctatcagtatgttagttataatacataaaaaacaatgttttgtc

SEQ ID NO: 13 - DNA, 341 bp, Glycine max
  Clone ID: LIB3072-061-Q1-K1-F8
ggatgcgtgtgatgaccataaccatgtcagacgaggaacaccacttcgagtcaaaggctgatgctggggcatcaaagacatttccccagcaagctggaaccatccgcaaaaatggttacattgtcatcaagaacaggccatgcaaggttgtggaggtttccacttccaaaactggcaagcatggacacgcaaagtgtcactttgttggaattgacatattcactgggaaaaagcttgaggatattgtcccatcttcccataactgtgatgttcctcatgttaatcgcattgactaccagctcatcgacatctcaaaggatgggtttgtgagtctgctgact

SEQ ID NO: 14 - DNA, 347 bp, Glycine max
  Clone ID: LIB3072-061-Q1-K1-F9
gacagcaaaaacaattaataaagaggagtttgaagaacaacatggtggtgctaaaggtgtgtttgttgcttcttttccttgtgggggttacagctgcacgcatggaactgagcttcttcaaaagtgatcagtcatcaagttatgatgatgatgagtattcaaaaccatgctgtgatctctgcatgtgcacacgctcaatgcctcctcaatgcagctgtgaagatattaggctgaattcatgccactcagattgtaagagctgtatgtgcacacgctcacagccaggacagtgtcgttgtcttgacaccaacgacttctgctacaaaccttgcaagtccagagatgac

SEQ ID NO: 15 - DNA, 375 bp, Glycine max
  Clone ID: LIB3072-061-Q1-K1-G1
tacgacaaaacggctcgaagtcctaatttgggtaacttacaaaggatgatagacgtcatatgggatggtcttttatactagacctttcattgtaatagagatattttaagtgatcaaaataaaactttttaaatttaagatatcaaactgaaaaaaaaatgatacatcaaaactatattctatcttttactttctcaatatttcaagcatttattaaaatatactaaatactttttaatgcattggcaatattcatattaatttaaggagttaattctgtatcattgacttgacgcgtccacgttatttagaattcggagaggatagttacataattccttcattttgtaaaatgcgacttttaaatttcttatc

SEQ ID NO: 16 - DNA, 316 bp, Glycine max
  Clone ID: LIB3072-061-Q1-K1-G11
gggattcttgcgtcttaatctgggcgggtcaaaagcatggggcactccaatgtgtggaactctcatccaaagaactactgacctggttctcgcacctggcgtgtgtgtgggaatcctcatggattgatcaggaagtatgggcttatgtgttgcatgcagtgcttgcttcgcaacgccaaagaaattggcttcattaaaaatccctgaatgattagcgtacaactgccccattcagtacggattcttgcattaggctgagccgattgtactgtctgaagaacctaaaaactcctgcgacatttagtgaagctcatta

SEQ ID NO: 17 - DNA, 329 bp, Glycine max
  Clone ID: LIB3072-061-Q1-K1-G2
ggcagcaaaaaacagtgatgaaaattaggttggagaacaacatggtggtgctaaaggtgtgtttgttgcttcttttccttgtgggggttacagctgcacgcatggaactgagcttcttcaaaagtgatcagtcatcaagttatgatgatgatgagtattcaaaaccatgctgtgatctctgcatgtgcacacgctcaatgcctcctcaatgcagctgtgaagatattaggctgaattcatgccactcagattgtaagagctgtatgtgcacacgctcacagacaggacagtgtcgttgtcttgacaccaacgacttctgctacaaacct

SEQ ID NO: 18 - DNA, 353 bp, Glycine max
  Clone ID: LIB3072-061-Q1-K1-G3
gacacaaagacaaggagacaaaacaaactaagcatgaatcccattggtttctctcttctcagcctcgcttctctagcacttgtctcgattgtcatagcccaagaaagagcccctcacgggcttgtttacgagaacccagaagccttttcaccatcagcatataacttctttcaccccaatgaacgaaagcccgagacaaaagacccttgtgctgcatcaaaatgctcaccaatgcctttagcagcacaagtggaagctactgaaattcatgaaagcaaggcctcaacccctcaaggaagtaagaagcaattgggagctggtagcgtagctggcattatctttggtgttgcttt

SEQ ID NO: 19 - DNA, 300 bp, Glycine max
  Clone ID: LIB3072-061-Q1-K1-G5
gacagcaaaaacaattaataaagatgagttggaagaacaacatgggggcgctaaaggtgtgttcgttgcttcttttccttgcgggggttacagctgcacgcatggaactgagcttcttcaaaagtgatcagtcatcaagttatgacgattatgagtattcaaaaccatgctgtgatctctgcatgtgcacacgctcaatgcctcctcaatgcagctgtgaagatattaggctgaattcatgccactcatattgtaagagctgtatgtgcacactctcacagccagcacagtgtcgttgtc

SEQ ID NO: 20 - DNA, 357 bp, Glycine max
  Clone ID: LIB3072-061-Q1-K1-G6
gacatcaaaatcacattgagacagcaagcctagaggaaataaggaataatatttctatctaaatggtgaaccgcatctcaaactatgttcctctcttcatcattttgattgttttggtaacagtgcaaaaacaagtggaaggattgacatgttcgagatatttcggtttatgttccgacacgagaaattgtgatcttaggtgtaaagcccgcaataagcatgcagaggggcactgtgatgatgacttcaactgtacttgtatttacccttgtgactctcctcagccaaataaagacaccgagcctataaggaagtgcactagtggccttggactttgcagtgttgatcactgctatg

SEQ ID NO: 21 - DNA, 294 bp, Glycine max
  Clone ID: LIB3072-061-Q1-K1-F10
aagaaggacacatgcagaagtgctgcacagaagtgagcgagctgagaagccccaaatgccagtgcaaagcgctgcagaagataatggagaaccagagcgaggaactggaggagaagcagaagaagaaaatggagaaggagctcattaacttggctactatgtgcaggtttggacccatgatccagtgcgacttgtcctccgatgactaataagttaaaagcaatgttgtcacttgtacgtactaacacatgatgtgatagtttatgctagctagctataacataagctgtctct

SEQ ID NO: 22 - DNA, 362 bp, Glycine max
  Clone ID: LIB3072-061-Q1-K1-G8
gacacttactagtagtaagcatggagtcctcaaagatctatgcttacctcttcctctgcatgatctttctctcttccgccactcccattctcggttgtggctactgtggcaaaccccccaaaaggcacaagcctggtaaaacaccaaagacacccaaaacacccgttgtttagccaccagtcaccatccctcccattaatgttcctcccgttgttcttccaccaatagtgaagcccccaggtattctccctccaattccaattattaacccaccaaccacaccagggaagggagggaacactccatgcccaccaccaaagtctcctgcgcaggctacgtgccccattgacacgctcaaactt

SEQ ID NO: 23 - DNA, 305 bp, Glycine max
  Clone ID: LIB3072-061-Q1-K1-C9
aggttggagtggtcaacccaagtacgatgagtaaaacccatgagaaaaatacattcatgttgtaaccgtggaagggcatgatttttggttcatgggttttgttaattctgacaaagcagttaataacatctcagaaggtatctcacattttgtagcgccagaagttgtcatgccatccactattggttctgaagctaatccaaagaactttcaatgatttctagtttttggagtactatgatgtatactaacatttgttaaaatttgacttttcggtttgtgtcgtatactaaaacaatactttg

SEQ ID NO: 24 - DNA, 361 bp, Glycine max
  Clone ID: LIB3072-061-Q1-K1-D1
ttgggacagcaaaaacaattaataaagatgagtttgaagaacaacatggtggtgctaaaggtgtgtttgttgcttcttttccttgtgggggttacagctgcacgcatggaactgagcttcttcaaaagtgatcagtcatcaagttatgatgatgatgagtattcaaaaccatgctgtgatctctgcatgtgcacacgctcaatgcctcctcaatgcagctgtgaagatattaggctgaattcatgccactcagattgtaagagctgtatgtgcacacgctcacagtcaggacagtgtcgttgtcttgacaccaacgacttctgctacaaaccttgcaagtccagagatgactagaaaaact

SEQ ID NO: 25 - DNA, 351 bp, Glycine max
  Clone ID: LIB3072-061-Q1-K1-D10
gacacttactagtagtaagcatggggtcgtcaaagatctatgcttacctcttcctctgcatgatctttctctcttccgccactcccattctcggttgtggctactgtggcaaaccccccaaaaagcacaagcctggtaaaacaccaaagacacccaaaacacccgttgttaagccaccagtcaccatccctcccattaatgttcctcccgttgttcttccaccaatagtgaagcccccaggtattctccctccaattccaattattaacccaccaaccacaccagggaagggagggaacactccatgcccaccaccaaagtctcctgcgcaggctacgtgccccattgaca

SEQ ID NO: 26 - DNA, 313 bp, Glycine max
  Clone ID: LIB3072-061-Q1-K1-D12
tggtcatccaaagaactactgaccggggtgtcgcacctgccgcgtgtgtgggaatcctcatggattgatcaggaagtatgggcttatgtgttgcaggcagtgcttccgtagcaatgccaaggaaattggcttcattaagtatcgctgaaggattagtgtccaactgccccattcggtttggattcttgcattaggctgggttgattttactgtctgaagaacctaagaatttttgtgacatttagtgaagttaattatcaaaactcaatttgtggaactaagaatatttttgttttttatataattggtttga

SEQ ID NO: 27 - DNA, 342 bp, Glycine max
  Clone ID: LIB3072-061-Q1-K1-D3
gacacttgacaggaggaacagttaagatgggtttgaagaacaacatggtggtgctaaaggtgtgtttcttggttcttttccttgtgggggttactaatgcacgcatggaactgaacctcttcaaaagtgatcactcatcaagtgatgatgagtcttcaaaaccatgctgtgatctctgcatgtgcacagcctcaatgccacctcaatgccattgtgcagatattaggttgaattcaagtcactcagcttgtgatcgctgtgcgtgcacacgctcgatgccaggccagtgtcgttgccttgacaccaccgacttctgctacaaaccttgcaagtccagtgatg

SEQ ID NO: 28 - DNA, 183 bp, Glycine max
  unsure at all n locations
  Clone ID: LIB3072-061-Q1-K1-D6
aggcgtncgtacacgacaaaacgactcatgttgacaacaaaaacaaatggggagggtgtgtttgaagaacaacatggaggatctaaaggcgggttagaaacttctttatcatgtggtggatacacatcctcgcgtggaacaaagcttgtttaaaagttatttttcttcaggggatgactatta

SEQ ID NO: 29 - DNA, 320 bp, Glycine max
  Clone ID: LIB3072-061-Q1-K1-D8
gaacacttggtttatcaagagaaaaaataccaaccatggcaaccatttctactgatcaaccaagaggatcctactcctatggaacctcctatggagcaccctatggaaccacctatgaggccaacagcagcattaacaaccctccttcacgccaaaccgtgaagttcataactgctgcaactattggcatcacactcttactcctgtctgggttgaccctcacaggcactgtcataggtttgatcattgcaacccctcttcttgttatcttcagccccatccttgtccctgctgcgtttgtgctgttcctggttgcttct

SEQ ID NO: 30 - DNA, 352 bp, Glycine max
  Clone ID: LIB3072-061-Q1-K1-D9
gacagcaaaaacaattaataaagatgagtttgaagaacaacatggtggtgctaaaggtgtgtttgttgcttcttttccttgtgggggttacagctgcacgcatggaactgagcttcttcaaaagtgatcagtcatcaagttatgatgatgatgagtattcaaaaccatgctgtgatctctgcatgtgcacacgctcaatgcctcctcaatgcagctgtgaagatattaggctgaattcatgccactcagattgtaagggctgtatgtgcacacgctcacagccaggacagtgtcgttgtcttgacaccaacgacttctgctacaaaccttgcaagtccagagatgactagaa

SEQ ID NO: 31 - DNA, 288 bp, Glycine max
  unsure at all n locations
  Clone ID: LIB3072-061-Q1-K1-E10
atgggcgagccaagcgaaccgtcacgcctncttacagattacaaattacttctgaaagtgatcaacactttgagatcggtagataaaataccaaccatggcaaccatttttacttatcaaccaaaaagatccctactctattgaaacctccatttaaccacctatttaaccacctattataccaacagcatcattaacaacccttcttcacacccaacccgtaaattcataacttcttcaactattttcattacactcttaatcccttcttggtttacccctacaaac

SEQ ID NO: 32 - DNA, 350 bp, Glycine max
  Clone ID: LIB3072-061-Q1-K1-E11
gagtctcagtttcagtttcggagctcgctcttctttcacaccaatttccatcatttgaaacatggcagattcaaaatcaggattgaggaaaccagtgttcaccaaggttgatcagctttgcccggggaccagtgggcacactttaactgtgaaggtggtcaatgctaagatggtgatgcagagaggtcgctctgatggtcctcaatctcgtcaaatgcgaattgctgagtgcttggttgctgatgagactggaatgatcatattcaccgccagaaatgatcaagtggatacgatgacagagggagctactgtgatcctgcgtaacgccaaaattgacatgttcaaaggat

SEQ ID NO: 33 - DNA, 276 bp, Glycine max
  Clone ID: LIB3072-061-Q1-K1-E12
ggcggcaaaaacaattaataaagatgagtttgaagaacaacatggtggtgctaaaggtgtgtttgttgcttcttttccttgtgggggttacagctgcacgcatggaactgagcttcttcaaaagtgatcagtcatcaagttatgatgatgagtattcaaaaccatgctgtgatctctgcatgtgcacacgctcaatgcctcctcaatgcagctgtgaagatattacgctgaattcatgccactcagattgctagagctgtatgtgcacacgctcac

SEQ ID NO: 34 - DNA, 367 bp, Glycine max
  Clone ID: LIB3072-061-Q1-K1-E2
gaagacgacagaagggggaaggagaacgcgatgttgggttgctctttggttcttcgtccccttcccaatcttcaactttagggttcctttaatctcgttattcctcttcactcccaaactccgttcactccaacaacactctgatttagaaatggatggaccggctggtcgaggtggtgctggactggacatgtttctgccaaattataaattgggaaaaacacttgggattggatcttttggcaaggtcaaaattgcagaacatgtattgactggccataaggttgcgatcaagattcttaaccgacgcatgataaagaacgtggaaatggaagaaaaagtgagaagagaaatcaaaattttaaga

SEQ ID NO: 35 - DNA, 296 bp, Glycine max
  unsure at all n locations
  Clone ID: LIB3072-061-Q1-K1-E3
gatagctacttgtacaagacagtggtgcctggcaatccattggaggatctgaaattggccattaacaccgttgggagcttagtgagggccaatgccataaggagggagatgaacaaacttaacgtatgacaataatagtcattatcatatttatcattcatttttgctttgtgtttttcctagtggacatgatctccttataattaagtgataattaactatatatgtgtaagaaaaaggattgaatttcatgcaatcccataaccggtatttgtaccttttaaaaaaacananna

SEQ ID NO: 36 - DNA, 343 bp, Glycine max
  Clone ID: LIB3072-061-Q1-K1-E5
gatcaacacttggtgtaggaggagaaaaaataccaaccatggcaaccatttctactgatcaaccaagaggatcctactcctatggaacctcctatggagcaccctatggaaccacctatgagaccaacagcagcattaacaaccctccttcacgccaaaccgtgaagttcataactgctgcaactattggcatcacactcttactcctgtctgggttgaccctcacaggcactgtcataggtttgatcattgcaacccctcttcttgttatcttcagccccatccttgtccctgctgcgtttgtgctgttcctggttgcttctggctttttgttctctggggg

SEQ ID NO: 37 - DNA, 323 bp, Glycine max
  Clone ID: LIB3072-061-Q1-K1-E7
gatcacattattctatatcaattttggttaagagtcttgaaaaagcaagagaaaaaaaaataccaaccatggcaaccatttctgatcaacctagagggtcctactcctatggaacctcatatggagcaccctatggaaccacgtatgagaccaacaccagcattaacaacccaccttcacgccaaacagtgaagttcataactgctgccactattggcatcacactcttgctcctgtctgggttgaccctcacaggcactgtcataggtttgatcattgcaacccctcttcttgttatcttcagccccatccttgtccctgct

SEQ ID NO: 38 - DNA, 354 bp, Glycine max
  Clone ID: LIB3072-061-Q1-K1-E9
ggtacgtgtgaagtgaagaatagtctggtgaatcgcgtaagctctctcaactcaactggatccgggtcacaaccgtcttgaaattaagaccaactgggtcattgatcacaatctcaattggtagcacaacatcaagggaaagtgaaaaaggaaggtatatttgatcagggatatggcaactcgaagatatgagtttggaaggatgaatgaggctagccacccagactccatcagagctgccttggctgaattcctctccacttgcatctttgtctttgctggagaaggctctgcccttgctttgcgacaaatttacaaggaaccagggtcatcagcgggtgagctagtggtaat

SEQ ID NO: 39 - DNA, 356 bp, Glycine max
  Clone ID: LIB3072-061-Q1-K1-F1
gattcacacaactaactaagaaagtcgtccatagccccccaaaaatgaagagcaccatcttctttgctctctttctcttttgtgccttcaccacctcatacctaccttcagccatcgctgatttcgtgctcgataatgaaggtaaccctcttgaaaatggtggcacatattatatcttgtcagacataacagcatttggtggaataagagcagccccaacgggaaatgaaagatgccctctcactgtggtgcaatctcgcaatgagctcgacaaagggattggaacaatcatctcgtccccatatcgaatccgttttatcgccgaaggccatcctttgagccttaagttcgattca

SEQ ID NO: 40 - DNA, 339 bp, Glycine max
  unsure at all n locations
  Clone ID: LIB3072-061-Q1-K1-B10
gacatcacgggtaaaagtggggtcccaaagaaagagcatctttctcctttctttcatcaccgttggaagagactgagatgggttcaaaaaccaagacttttacctttgaggaggtggctaagcacagtcacaggaaggattgctggattatagtcaaagggaaggtgtatgatgtcaccccatttttggatgatcatccaggaggtgatgaagttttagtgactgcaacagagaaggatgccaccactgattttgaagatattgggcacagtgattcagcaacagagatgatggaaaaatactttgttggtgaggttgacaccaacactcttncagcac

SEQ ID NO: 41 - DNA, 335 bp, Glycine max
  Clone ID: LIB3072-061-Q1-K1-B11
ggaggaggttctgatcttctttggttggtgtctaggaccctttcttgcttcaaccaatttctagatccgaaaccggcatcagatccgatccgaaatgtacggattcgaagctctcaccttcaacatccacggcggcttcctagaggccatcgtccgcggccaccgctccggccttctcaccaccggcgattacaacaacctctgccaatgcgaaaccctcagaatcaaaagtccagagttcatgacagcgttgtcttcatattttagtcggacggctcgttatagttcgtatgttcggtgggacaatctgcatactttctgcattatccatctga

SEQ ID NO: 42 - DNA, 75 bp, Glycine max
  Clone ID: LIB3072-061-Q1-K1-B12
cccactcgtcctcccacgcgtccgtccactcgtccgcccacgcgtccgtgcacgcgttcttccacgcgttcgtac

SEQ ID NO: 43 - DNA, 363 bp, Glycine max
  Clone ID: LIB3072-061-Q1-K1-B2
gactctcatcacattattctatatcagggtgggttaaaagtcctgaaaaagcaagaaaaaaaaaaataccaaccatggcaaccatttctgatcaacctagagggtcctactcctatggaacctcatatggagcaccctatggaaccacgtatgagaccaacaccagcattaacaacccaccttcacgccaaacagtgaagttcataactgctgccactattggcatcacactcttgctcctgtctgggttgaccctcacaggcactgtcataggtttgatcattgcaacccctcttcttgttatcttcagccccatacttgtccctgctgcgtttgtgctgttcctagttgcttctggctttt

SEQ ID NO: 44 - DNA, 292 bp, Glycine max
  Clone ID: LIB3072-061-Q1-K1-B3
gactctcatcacatggttggatatcaattttggttaagagtcttgaaaaagcaagagaaaaaaaaataccaaccatggcaaccatttctgatcaacctagagggtcctactcctatggaacctcatatggagcaccctatggaaccacgtatgagaccaacaccatcattaacaacccaccttcacgccaaacagtgaagttcataactgctgccactattggcatcacactcttgctcctgtctgggttgaccctcacaggcactgtcataggtttgatcattgcaacccc

SEQ ID NO: 45 - DNA, 309 bp, Glycine max
  Clone ID: LIB3072-061-Q1-K1-B4
aggagatgtggagctacgctatgcgaccctatgggttttggacattcgaacgccacaattctcagcttgcttgggatgcacagattagccaagtggccgggaggagggacccttatgatgatctcctccaacatttctctaccccacctaagtgagtgttgctgaacttgccacaagcattatcggtgaaaaggatgaatttgtcgtaatttccccttgtaatatcctgtcttgttgcatgttgcagagattacaactggattgtgctgttatttcaaaaataaaggttccatataactatgctgtttc

SEQ ID NO: 46 - DNA, 352 bp, Glycine max
  Clone ID: LIB3072-061-Q1-K1-B5
gcgggtatagtttagtggtaaaagtgcgatgggttccatggacccctaaatagttaagggatcccccgtttgattcatattccgatcaaaaactttatttcttacttaaagggaatcctttataccctcaatgaatgatttgcggtataatatacattatcgtaatttgtatacaagaagaatcaattctaaattgacaacttgagttctaaaattatgaaacataagtttttggaattggatctataatccgaatttttttgagtatgacgaaaggatctatggagagatatatagaaagtttctttctaatcgtaactaaatcttccatttttttgtatagtaaagattg

SEQ ID NO: 47 - DNA, 352 bp, Glycine max
  Clone ID: LIB3072-061-Q1-K1-B6
gcttcacagcaaaaacaattaataaagatgagtttgaagaacaacatggtggtgctaaaggtgtgtttgttgcttcttttccttgtgggggttacagctgcacgcatggaactgagcttcttcaaaagtgatcagtcatcaagttatgatgatgatgagtattcaaaaccatgctgtgatctctgcatgtgcacacgctcaatgcctcctcaatgcagctgtgaagatattaggctgaattcatgccactcagattgtaagagctgtatgtgcacacgctcacagccaggacagtgtcgttgtcttgacaccaacgacttctgctacaaaccttgcaagtccagagatgact

SEQ ID NO: 48 - DNA, 348 bp, Glycine max
  Clone ID: LIB3072-061-Q1-K1-B7
gacagcaaaaacaatggataaagatgagtttgaagaacaacatggtggtgctaaaggtgtgtttgttgcttcttttccttgtgggggttacagctgcacgcatggaactgagcttcttcaaaagtgatcagtcatcaagttatgatgatgatgagtattcaaaaccatgctgtgatctctgcgtgtgcacacgctcaatgcctcctcaatgcagctgtgaagatattaggctgaattcatgccactcagattgtaagagctgtatgtgcacacgctcgcagccaggacagtgtcgttgtcttgacaccaacgacttctgctacaaaccttgcaagtccagagatgact

SEQ ID NO: 49 - DNA, 316 bp, Glycine max
  Clone ID: LIB3072-061-Q1-K1-B8
gattgacacaactaactaagaaagtcttccatagccccccaaaaatgaagagcaccatcttctttgctctctttctcttttgtgccttcaccacctcatacctaccttcagccatcgctgatttcgtgctcgataatgaaggtaaccctcttgaaaatggtggcacatattatatcttgtcagacataacagcatttggtggaataagagcagccccaacgggaaatgaaagatgccctctcactgtggtgcaatctcgcaatgagctcgacaaacggattggaacaatcatctcgtccccatatcgaatccgttt

SEQ ID NO: 50 - DNA, 366 bp, Glycine max
  Clone ID: LIB3072-061-Q1-K1-C1
tgggattcacacaactaactaagaaagtcgggcatagccccccaaaaatgaagagcaccatcttctttgctctctttctcttttgtgccttcaccaccgcatacctaccttcagccatcgctgatttcgtgctcgataatgaaggtaaccctcttgaaaatggtggcacatattatatcttgtcagacataacagcatttggtggaataagagcagccccaacgggaaatgaaagatgccctctcactgtggtgcaatctcgcaatgagctcgacaaagggattggaacaatcatctcgtccccatatcgaatccgttttatcgccgaaggccatcctttgagccttaaattcgattcatttgcaa

SEQ ID NO: 51 - DNA, 348 bp, Glycine max
  Clone ID: LIB3072-061-Q1-K1-C10
gacagcaaaaacaattaataaagatgagtttgaagaacaacatggtggtgctaaaggtgtgtttgttgcttcttttccttgtgggggttacagctgcacgcatggaactgagcttcttcaaaagtgatcagtcatcaagttatgatgatgatgagtattcaaaaccatgctgtgatctctgcatgtgcacacgctcaatgcctcctcaatgcagctgtgaagatattaggctgaattcatgccactcagattgtaagagctgtatgtgcacacgctcacagccaggacagtgtcgttgtcttgacaccaacgacttctgctgcaaaccttgcaagtccagagatgact

SEQ ID NO: 52 - DNA, 347 bp, Glycine max
  Clone ID: LIB3072-061-Q1-K1-C11
ggagagaaagtgagagagaattagggagcattttccaacacgattacacgaccgaatcaaacccctctttctctccgaagctgcttttaatatcgtactggccttcgattgttctcctctttaatacatactgttctctcttcgatttgagggaacagcacaagagtctgagcatcggttaacccaactgcacaggtagtctccaaataatggagcctcatgatgagactggatgccaggctcttgaacgccccattctttgcattaataattgtggcttctttggaagagcagctaccatgaacatgtgttccaagtgttacaaggacatgctgttgaagcaggag

SEQ ID NO: 53 - DNA, 351 bp, Glycine max
  Clone ID: LIB3072-061-Q1-K1-C12
gattcatgcaactgaataattaggaggggccatttccatagcagcctaagaaaatgaagagcactagcttgttcgctatctttctactttgcgccttcacctcatacctaccttccgccaccgcccaggacgtgctcgacgtggatggcgatccgattcggaacggtttcatatactacgttttgccggcaataagaggaaacggtggcggaatagaacgagccgcactcgggaaagacacttgccctatcactgtagtgcaatctcccaatccaaactctaaggggttagaaattaagtttgaatctgcataccccgcctattacataaacgaaaccctaattttgcaaa

SEQ ID NO: 54 - DNA, 359 bp, Glycine max
  Clone ID: LIB3072-061-Q1-K1-C3
gggaaaggttggagtggtcaacccagggaccatgagggaaaacccatcagaaaagtacattcaggttgtaacggtggaagggcatgatttttggttcatgggttttgttaattttgacaaagcagttaagaacatctcagaaggtatctcacattttgtagcgccaggagtggccgtgccatccactagtggttcggaagctaatcgaaagaactttcagtgatttctagtttttggagtactatgatgtatactaattttgtttagaatttgactttgcggtttgtgtcgtatactagaacaatactttgttgtaaaaaaacttaggagtgtatgctatatatttcatgtgtgctcta

SEQ ID NO: 55 - DNA, 329 bp, Glycine max
  Clone ID: LIB3072-061-Q1-K1-C4
gatcaagaacgagggcaatatcctagtacaccggattaaagaatttaagatatactatgatgagagcgcggttcccattactgttgctgggagttgctttcctggcatcagtttctgtctcatttggcattgcgtattgggaaaagcagaaccccagtcacaacaagtgcctccgaagttgcaatggcgagaaagactcctacaggaaccaagcatgccacgctcgttgcaacctacttaaggtggaggaagaagaagaatgcgaagaaggtcaaattccacgaccacgaccacaacaccctgagagggaacgtctgcaacacggtgag

SEQ ID NO: 56 - DNA, 357 bp, Glycine max
  Clone ID: LIB3072-061-Q1-K1-C6
gacagcaaaaacaattaataaagatgagtgggaagaacaacatggtggtgctaaaggtgtgtttgttgcttcttttccttgtgggggttacagctgcacgcatggaactgagcttcttcaaaagtgatcagccatcaagttatgatgatgatgagtattcaaaaccatgctgtgatctctgcatgtgcacacgctcaatgcctcctcaatgcagctgtgaagatattaggctgaattcatgccactcatattgtaagagctgtatgtgcacacgctcacagccaggacagtgtcgttgtcttgacaccaacgacttctgctacaaaccttgcaagtgcagagatgactagaaaaact

SEQ ID NO: 57 - DNA, 330 bp, Glycine max
  Clone ID: LIB3072-061-Q1-K1-B1
gacacacacaacttttctccaaaatcgagattaggacgttgttccctttgcgctgtcccacaagcaattaagcacagcgcacaaaggtgtggtgggcaaagggaagtttcaagttggtgttgttgcaggtgaaaaatgtggttcgtgtacgtgtgcgacgaggaagagaaggaacttggaagacaacaagctcctgggtcgtgtccctactgtggagccaaggttgaagccatggatgttgagatccagtccaggctctgcttcttgcccctctgcttcaagatcaagagaaagtacttttgtacccactgcgctaggcgcttagagttg

SEQ ID NO: 58 - DNA, 447 bp, Glycine max
  Clone ID: LIB3072-060-Q1-K1-G6
ggcagacgccgtgactagacactcatctcactcgcgccatcttagggtttctccttttgtttcgcaacatggttgccgctaagaaaactaagaagacccatgagagcatcaacaacaggctcgctcttgtcatgaagagtggcaaattcaccctcggttacaagaccgttctcaaatctcttaggaactccaaaggaaaattgattatcattgctaacaactgcccccctttgagaaagtcagagattgaatactatgctatgttggcaaaagttggagttcatcattacaatgggaacaatgtggatttgggcactgcatgtggaaaatattacagagtgtgctgccttagcattattgatcctggtgattctgatatcatcaagacactgcctggcgaccaagtaaggagtattgaagttccctgcttgatattttctattttta

SEQ ID NO: 59 - DNA, 321 bp, Glycine max
  unsure at all n locations
  Clone ID: LIB3072-060-Q1-K1-G7
gaatctcttcacagaagaaaaaagagaagaagatgggtttgaagaacaacatggtggtgctaaaggtgtgtttggtgctacttttccttgtggggggtactactagtgccagcttgaggctgagtgagcttggcctgctcatgaaaagtgatcatcatcaacactcaaatgatgatgactcttcaaaaccatgctgtgatcaatgcgcatgcacaaagtcaaaccctcctcaatgccgctgttcagatatgaggctgaattcgtgccattcagcttgcaaatcttgtatttgcgcattatncgatcctgcacagtgttttt

SEQ ID NO: 60 - DNA, 285 bp, Glycine max
  Clone ID: LIB3072-060-Q1-K1-H10
gacagtattatatattaggtgggagtgacaggtttccctaccccgtcatcttcttctgattagggttcttctcgttccctcaaattctgagaatttgaccaccaattattactgcgttttaaaatctgacatttgtccgtatccaacgattcagcagaagatcgaaattcttcggcgttttccgttcgggtacggttctacgtggacaattacctatggcttcatcctacataatcactccccaaaatgtgttggagtcgctgattaacgacggcccaattgatg

SEQ ID NO: 61 - DNA, 318 bp, Glycine max
  Clone ID: LIB3072-060-Q1-K1-H11
gattcacacaactaactaagaaagtcttccatagccccccaaaaatgaagagcaccatcttctttgctctctttctcttttgtgccttcaccacctcatacctaccttcagccatcgctgatttcgtgctcgataatgaaggtaaccctcttgaaaatggtggcacatattatatcttgtcagacataacagcatttggtggaataagagcagccccaacgggaaatgaaagatgccctctcacttgggtgcaatctcgcaatgagctcgaccaaaggattggaacgatcatctcgtccccatattcaatccctttta

SEQ ID NO: 62 - DNA, 289 bp, Glycine max
  Clone ID: LIB3072-060-Q1-K1-H12
gacagcaaaaacaattaataaagatgagtttgaagaacaacatggtggtgctaaaggtgtgtttgttgcttcttttccttgtgggggttacagctgcacgcatggaactgagcttcttcaaaagtgatcagtcatcaagttatgatgatgatgagtattcaaaaccatgctgtgatctctgcatgtgcacacgctcaatgcctcctcaatgcagctgtgaagatattaggctgaattcatgccactcagattgtaagagctgtatgtgcacacgctcacagccaggaca

SEQ ID NO: 63 - DNA, 291 bp, Glycine max
  Clone ID: LIB3072-060-Q1-K1-H2
gacagcaaaaacaattaataaagatgagtttgaagaacaacgtggtggtgctaaaggggtgtttgttgcttcttttccttgtgggggttacagctgcacgcatggaactgagcttcttcaaaagtgatcagtcatcaagttatgatgatgatgagtattcaaaaccatgctgtgatctctgcatgtgcacacgctcaatgcctcctcaatgcagctgtgaagatattaggctgaattcatgccactcagattgtaagggctgtatgtgcacacgctcacagccaggacagt

SEQ ID NO: 64 - DNA, 333 bp, Glycine max
  Clone ID: LIB3072-060-Q1-K1-H3
gacacaccgtttgttctattcttaactcaacttctgctacccactctcttcttccaagtccaaccacgcttttctctacagtcatgggcaaggtcaagatcggaatcaacggatttggaagaattggccgtttggttgccagagtcgctctgcaaagagacgatgtggagctcgttgccgttaacgaccctttcattaccaccgattacatgacatacatgtttaaatacgacagtgttcacggacactggaagcatcacgatgtcaccgttaaggacgagaagacccttctcttctgtgacaagccagtcactgtttttggacacaggaacc

SEQ ID NO: 65 - DNA, 228 bp, Glycine max
  Clone ID: LIB3072-060-Q1-K1-H5
tgacacttggcttagcaaggggaaaaatacctaccttggcaaccatttctactgatcaaccaagaggatcctactcctatggaacctcctatggagcaccctatggaaccacctatgagaccaacagcatcatgaacaacccttcttcacgccaaaccgtgtacgacataactgctgcaactattggcatcacactcttactcctgtctgggctgaccctcacaggca

SEQ ID NO: 66 - DNA, 202 bp, Glycine max
  Clone ID: LIB3072-060-Q1-K1-H7
ttggaggaggccgccggagggggcagcaaaagcaactaattgagctgtgtttttgtaactacgtggaaggtgctggggtgggaatgaatgctctctggacatgtgggggaacccgctgcgatcgtgtaatggtgaatcttaaacagagtatttgacttaaatatatgatcctttgctgaacggacgctttgctgggcaaatt

SEQ ID NO: 67 - DNA, 344 bp, Glycine max
  Clone ID: LIB3072-061-Q1-K1-A10
ggaaacagagagtgatttcagggagtgatcggtgttcacttgatctcatcataatcgtcagcgtcaattgaagaagatgccgatcagaaacatcgccgtcggaaggcctgaagaggcgactcaccccgacacgttgaaggcggctttggctgagttcatctcaaccttcatcttcgtgttcgccggctcaggctccggcatcgcctacaacaagctcaccgacaacggcgctgccacccctgccggcctcatcttcgcctccatcgcccatgcattcgccctcttcgtcgccgtctccgtcggcgccaacatctccggcggccacgtcaaccccgccgtcacct

SEQ ID NO: 68 - DNA, 302 bp, Glycine max
  unsure at all n locations
  Clone ID: LIB3072-061-Q1-K1-A2
gatccacgttaatacaacacaagaaagggacggagagaaattcacacataaaaatcatcacttcaaattaagctagagctagaaagattcaaaagtagctatagagagagaaacagaggtcatggatggtttgcaaagatctgaggtgtctttcaagagacagggttcatcanggcttgtttgggacgacaagttattgtcaggggaattgaacaaagtgaacaacaacgaataccaaaagggtggtggttctggtggtgaccttaaccttaaagttagaactacaccacccaacaccacca

SEQ ID NO: 69 - DNA, 298 bp, Glycine max
  unsure at all n locations
  Clone ID: LIB3072-061-Q1-K1-A3
tccacgtaaatacaacacaanaaacgtacgttttataaattcacaggtaaaaatcatcacttcaaattaatctatatctagaaagattcataggtagctatagagagagaaacagatgtcatggatcgtttgcaaagatctgaagtgtctttcacgagacagggttcatcaagtcttgtttgggacgacaagttattgtcaggggaatttaacaaagtgaacaacaaccaataccaaaatggtggtggttctggtggtcaccttaaccttaaagttataactacaccacccaacacca

SEQ ID NO: 70 - DNA, 227 bp, Glycine max
  Clone ID: LIB3072-061-Q1-K1-A9
cacccgtcactcctgctgccacacgaccactcacgcgtacagacactggttaagactacggagagatacaatgccaacttttctaccaaatccacattattacgttgtttcctttgctctttcccacactctatctttcactccgcacaaaggtttagcggccgttatgaagttacaaggtccacctgctgcagcataataatttctgctcgcaaccctcagcgacg

SEQ ID NO: 71 - DNA, 307 bp, Glycine max
  Clone ID: LIB3072-060-Q1-K1-G5
ggaactgagtcaatcttgcaacgattaacaatggcttcaaccgacaagtcaccggacccaacgccggcgaagggtccggatccaactccggggaagccgatgagtgttggtcagcacgtgatcgacaagagtgcaatgatggtgcagtcgctggaccccattaagcagatgagtcagcacgtgtgctccttcgctatctacagccatgacatgtctcgccagatagagacacatcactactgctccagactccaccagaacttcatacaatgtgctgtctatgattccgatgaatccaaagctcgtc

SEQ ID NO: 72 - DNA, 269 bp, Glycine max
  unsure at all n locations
  Clone ID: LIB3072-060-Q1-K1-E6
gatacatgaccagaggaaaataatttcttttaataaaaaaaaacttagaatcgaaacgaaaaatcgccatgaatcccaaaatcctcttcgtgtttgctctgcttctgaatctcgtatccaattcgttccaaaaccctaaccctaaaacccccaaatcaacgtcatcgcaggctcacgtggagctcatcaaccacggcttacccgccggtcttctccccgccaccaccgtcttgggctacgccgtgaaccgtacctncggtgactttacc

SEQ ID NO: 73 - DNA, 387 bp, Glycine max
  Clone ID: LIB3072-060-Q1-K1-E9
gacagcaaaaacaattaataaagatgagtttgaagaacaacatggtggtgctaaaggtgtgtttgttgcttcttttccttgtgggggttacagctgcacgcatggaactgagcttcttcaaaagtgatcagtcatcaagttatgatgatgatgagtattcaaaaccatgctgtgatctctgcatgtgcacacgctcaatgcctcctcaatgcagctgtgaagatattaggctgaattcatgccactcagattgtaagagctgtatgtgcacacgctcacagccaggacagtgtcgttgtcttgacaccaacgacttctgctacaaaccttgcaagtccagagatgactagaaaaactaatagctctctaaatggacgaagccccttt

SEQ ID NO: 74 - DNA, 309 bp, Glycine max
  Clone ID: LIB3072-060-Q1-K1-F1
ggatccttctacactaactaaagccgagcagcgagagagagaaaccctagcaaaaatgccggctggtcacggtttgagatcccgcaccagagattccttctctcgtcccttcaggaagaagggtaccatcgccctcaccacatacctcagaacctaccacgtcggcgattatgtcgacgtcaaggttaacggcgccgtccacaagggaatgcctcacaagttctaccatggccgcaccggtcgcgtctggaatgtcaccaaacgtgctgttggggtcgaagtcaacaagcaggtcggcaacagaatcat

SEQ ID NO: 75 - DNA, 437 bp, Glycine max
  Clone ID: LIB3072-060-Q1-K1-F10
gacagcaaaaacaattaataaagatgagtttgaagaacaacatggtggtgctaaaggtgtgtttgttgcttcttttccttgtgggggttacagctgcacgcatggaactgagcttcttcaaaagtgatcagtcatcaagttatgatgatgatgagtactcaaaaccatgctgtgatctctgcatgtgcacacgctcaatgcctcctcaatgcagctgtgaagatattaggctgaattcatgccactcagattggtagagcttgatttgcacaccctcacagccaggacagtgtcgcttgcttgaccccaacgacttctgctaccaaccttgccaggcccgagatgactagaaaaactaatagctctcttaaattgaccaagcccctttaggctttggttggtatggtagggggggccaattaaaccaggaattaaag

SEQ ID NO: 76 - DNA, 434 bp, Glycine max
  Clone ID: LIB3072-060-Q1-K1-F11
aaaaggggtggccgggggagagagaaaaaaagagagatttcgagatttccaaaactggtcccagctttaatttatgctactaaaaaagttatattcgggtatcttggtgatttgatgccaccaccggagagacccatcttcagcttcaattccaagcaagagttaaacaagtggcatttgtattctgattctgaatttggaggtttgtcctctgcgtctctgcagataactgagtcggaaaatggagcaacttctggaatcttcttcgggaacctttctctggatgtctctgaaggctctaaatggaacatcactctgagtggcttctgtggaatgcgctcaaaaaagtttgatggctttattgatttggattcatatgatactattggtatgaaacttaaaggagaatgaagatgttatatatctactatcta

SEQ ID NO: 77 - DNA, 264 bp, Glycine max
  unsure at all n locations
  Clone ID: LIB3072-060-Q1-K1-F2
gactacaagcgagtcacatgcgaagtgaaagtgnggaaaaaaaagagaaaaaaaaaaaggcggcgcggctagaggatacgagctaagctaacctacccgggcatgcgatatcatatctatagtgtagcgtaaactaaattcaatggactggccgttacaacacacacgactggaaagaaaaaaccctgacgtaacttaattgaattgcattgcagtacattttcgtttggtgagctaatataatagaggacaggcaccgaccga

SEQ ID NO: 78 - DNA, 200 bp, Glycine max
  Clone ID: LIB3072-060-Q1-K1-F4
gctctgaaaactgaaaagtaaaggcgaaagactttaggtttggaattgggaattagggttgttcgcgtcacgaaaatgatcgaggtggggttgaacgatcgattggggaagaaggtgcgcgtgaagtgcaacgacgatgacaccatcggcgacctgaagaagctggtggcggctcagacgggcacaagagccgacaagat

SEQ ID NO: 79 - DNA, 237 bp, Glycine max
  unsure at all n locations
  Clone ID: LIB3072-060-Q1-K1-F5
gaaaatgagttgtacgatggtgcatgtgggggttttgtgctgcctatagatgcacgaatcgtagttaaatgggttttaagctactgaagtgaactatgtggatatggcttcttgtgcattagaaatagccaagtaaaattctgaagaactacttactaccttggcattgagattgaggggttgttctgttctcagcttccttcttccttccgntaataattattttattcaactcta

SEQ ID NO: 80 - DNA, 113 bp, Glycine max
  Clone ID: LIB3072-060-Q1-K1-F6
ggcacaagtgagtttgttgatcgagataactagaaacagtgtggtgaaaatgaaaggccttggtttcttcgttgctacaattttggtagcatggcaatgccctgcgtacgata

SEQ ID NO: 81 - DNA, 208 bp, Glycine max
  Clone ID: LIB3072-060-Q1-K1-F7
aggccacggcgggaagttcacgtggatcggccacggctacgagcaagttgagatgccgcacggtgctatggacgccaaggacccgaacttcgaggatcctgtggagatcgccaccgtgtgatcgcggtggtttccggtggccaggtctgtaaatagtagtaattggcgaaacgtgttttttcgtgttcaataatgtgaagcgaatcgg

SEQ ID NO: 82 - DNA, 395 bp, Glycine max
  Clone ID: LIB3072-060-Q1-K1-F8
gagagatagagagagaaagatgtctaagcgtggtcttggtggttcggcgggtaacatgttccgtatgtcgctgggtcttccagtggcggctacagtgaactgcgccgactacaccgtggcgatgcacctctacatcatttcggtgtaagggatcaatggtcgtttgaaccgccttccctcggcctgcgttggcgacatggtgatggccaccgctaacaacggaaaacccgatcttaggaagaaggtcttgccagctgtcatcgttcgccagcacatgccatggcgccgaaaggacagcgtctacatgtactttgaacataatgctggtgttattgacaatcccaagggagatatgaaaggatctgctatcactggtcccattggaaaagagtgtg

SEQ ID NO: 83 - DNA, 62 bp, Glycine max
  Clone ID: LIB3072-060-Q1-K1-F9
caccaaaaggggccacttttttttttattcccactttttttttggggtccctaaaaaaaata

SEQ ID NO: 84 - DNA, 362 bp, Glycine max
  Clone ID: LIB3072-060-Q1-K1-G1
gattcacacaactaactaagaaagtcttccatagccccccaaaaatgaagagcaccatcttctttgctctctttctcttttgtgccttcaccacctcatacctaccttcagccatcgctgatttcgtgctcgataatgaaggtaacccccttgaaaatggtggcacatattatatcttgtcagacataacagcatttggtggaataagagcagccccaacgggaaatgaaagatgccctctcactgtggtgcaatctcgcaatgagctcgacaaagggattggaacaatcatctcgtccccatatcgaatccgttttatcgccgaaagccatcctttgagccttaagttcgattcatttgca

SEQ ID NO: 85 - DNA, 280 bp, Glycine max
  Clone ID: LIB3072-060-Q1-K1-G10
ggtgatccttctacactaactaaagccgagcagcgagagagagaaaccctagcaaaaatgccggccggtcacggtttgagatcccgcaccagagattccttctctcgtcccttcaggaagaagggtaccatcgccctcaccacatacctcagaacctaccacgtcggcgattatgtcgacgtcaaggttaacggcgccgtccacaagggaatgcctcacaagttctaccatggccgcaccggtcgcgtctggaatgtcaccaaacgtgctgctggggtcg

SEQ ID NO: 86 - DNA, 313 bp, Glycine max
  Clone ID: LIB3072-060-Q1-K1-G11
gatagcgcagtttcatttctttggattagaaatttttcccaaagctgatcgagaagccagccaggccagaaagagttgaagaagaatgggaagggggaagatcgaaatcaaaaggattgagaacacaacaaatcggcaagtgaccttctgcaagagaagaaatgggcttctgaagaaagcttatgagctgtcagtgctgtgtgatgcaaaagttgccctcatcgtcttctccagccggggccgtctctatgagtattccaacaacaacataagatccacaattgagaggtacaaaaaggcatgttctgatcac

SEQ ID NO: 87 - DNA, 344 bp, Glycine max
  Clone ID: LIB3072-060-Q1-K1-G12
ccaagagcacgacagaagggggaagtagaaaagcattggaagaaaagaaaaacgtgaaagaaggaaagaagagaactgtaaagcattcaagattgggtacaaatgaatacatacaaaatgcctgttagataagaacaccttgattcaattcactgaaccatcgttttacaacctgccgacttaaaaaactaagccttcactcaccttaattccacggcaaaacttttttatattggcagctaaactaatagccttgacgcccgtttacaacgcccttactaacaaaaacccagccttaaccaacattattaccctccctgaaaatccccatttagccccttggg

SEQ ID NO: 88 - DNA, 334 bp, Glycine max
  unsure at all n locations
  Clone ID: LIB3072-060-Q1-K1-G2
gatctacgaggagactcgcggtgttctcaagatcttcttggagaatgtcatccgtgacgccgttacttacacggagcacgctaggaggaagaccgttacggctatggacgttgtttatgcgcttaagaggcagggaaggaccctctacggatttggtggttagggtttttgcttgattttcctcgccagggaaaagtcttgctgtcaagaaaaacaaacgaggcatggattgnggtagttttttttattttttatggtggtgtttgtagtgaatggggaaaattaggagcaattttatgcttacttgttggtgtcaaatatgtgatgtaactac

SEQ ID NO: 89 - DNA, 425 bp, Glycine max
  unsure at all n locations
  Clone ID: LIB3072-060-Q1-K1-E4
gaagtgcatagttatacacacaacacattcataccagacactctcctagagttaagtaaaaataaaggctatgtcaccaaacaagcgcttacttcttgttgcttttctgttgctttgcttcatcaccatgacagctagtgccagaagtttgagagatattaaggatgatgcagtcaagaagagtactcaaactagtttctttaagccaaaccatgaaggggtacaagacagcaatgatgagttggatacaatggattacacacctgcaaaaaggaatcctccaatccataantgaaagttccattatttttttcttttgttaaaaaagcaccaattttatttcacagtgcttaacccactctgcaagtgatctatcaaagaccgtcatgtattgatattggttggagcttggaaattcacacccc

SEQ ID NO: 90 - DNA, 422 bp, Glycine max
  Clone ID: LIB3072-060-Q1-K1-G3
ggttctagtgtgtgattgtttgttgttgtaactcgttcttcttcttttgttgttctgtgtttgtgtttgttttttctctcacctgaaaatgtcttgctgcggtggtaactgtggttgcggaagctcctgcaagtgcggcaacggctgcggaggctgcaagatgtacccagacttgagctacactgagtcaaccaccaccgagaccttggtcatgggagtggcacctgttaaggctcaatttgagggtgctgaaatgggtgtgcccgctgagaacgatggctgcaaatgtggaccaaactgctcctgcaacccctgcacttgcaagtgaggtgttgggagagcaagcttcaagcagagatagcccttaattaggaataatgataaactattaatgtgtagcttaaaacttatgtattatgtct

SEQ ID NO: 91 - DNA, 403 bp, Glycine max
  Clone ID: LIB3072-060-Q1-K1-G4
ggtgatccttctacactaactaaagccgagcagggagagagagaaaccctagcgaaaatgccggccggtcaccgtttgagatcccgcaccagagatttcttctctcgtgccttcaggaagaaggggaccatcgccctcaccacatacctcagaacctaccacgtcggtgattatgtctgacgtcaaggataacggcgccgttcacaagggaatgcgtcacaagttctaccatggccgcaccggtcgcgtctggaatgtcaccaaacgtgctgctggggtcgaagtcaacaagcatgttggtgacagaatcatattgaaaaggattcacgtgcgtgtggggcatgttatgccatcaaggtgcactgaggagttccgccttaggaagatcaggaatgatcagctc

SEQ ID NO: 92 - DNA, 423 bp, Glycine max
  Clone ID: LIB3072-060-Q1-K1-C9
gggggcccggtggtgatcacagtggtgctgttcgggctgttaagcccggggcttctgtttcatatgccagccaggggaagggtagcagagtttgggaacatgcaaaccagtggggcctccattttggttcacgccatcatctactttggcctcatcactatcttcctcattgccattggcgttcacatctacactggctaactcctggatctggttcagtttcacccatctatgtttatctctgccttttaattagtctttttagctttacaataatttccttgtttgatctctatgtatcttatgtggggttgggtcatgggtgcccagaaaaaaacaatagattcagataaggatgatgctgctgtgtgtgttttttttttttttatcaagatagtatgggtcatgaacctttttgcttat

SEQ ID NO: 93 - DNA, 53 bp, Glycine max
  Clone ID: LIB3072-060-Q1-K1-D1
gggggcccggtggtgatcacagaggtgctgttcgtgctgttaagcccggggct

SEQ ID NO: 94 - DNA, 433 bp, Glycine max
  Clone ID: LIB3072-060-Q1-K1-D10
ggccataccacaccacaacacaactctgggtcttccgtgtttctctttctcccattatccatttagagaccccaaatggcctctgccaccactctcttcacccctaaccccatgttttcaactgaacaacactctctctctctctccatctccaaccattcccaaatccttcactggcctctgcaagcccttccattcaagggtccccacttccatcccctcctttcattgcagaagacccaaattctttgtcagggccactgttataaagtggagatgtccaaagcaaactatcccttccgatgataccggtttccaaaagaaactcctgtatctggaatcaatcggtattgactctttctcgctttatgaaaaccatccaacagtgatcacaactttttttgcttgcctaaaatccaccgtggaatacatt

SEQ ID NO: 95 - DNA, 466 bp, Glycine max
  unsure at all n locations
  Clone ID: LIB3072-060-Q1-K1-D11
cccacacgttcgtactgcttttatacgacattatggtagaatgtttnttttgtgttatattgtgggtattttttatatatggtggtttattttatttttctcttataatattttatctttcttacttcttaattattatttttttttttttttattatttctttacttttatttgttttttattttttttaaaaataactattatttctttgatttttttatactctaattcttattttatttaattttaaaatataatattttaatttaaattactcttattttttttttcttttttttttatacttttctatcttttatataatttattttttttttttttattattttatttcttttatatttattttttttttttttcatttttaaatattttattatttttcttattttaaaaaaaccattctttctttttttttttttttttttttgtcttattttattt

SEQ ID NO: 96 - DNA, 360 bp, Glycine max
  Clone ID: LIB3072-060-Q1-K1-D12
gattcacacaactaactaagaaagtcttccatagccccccaaaaatgaagagcaccatcttctttgctctctttctcttttgtgccttcaccacctcatacctaccttcagccatcgctgatttcgtgctcgataatgaaggtaaccctcttgaaaatggtggcacatattatatcttgtcagacataacagcatttggtggaataagagcagccccaacgggaaatgaaagatgccctctcactgtggtgcaatctcgcaatgagctcgacaaaaggattggaacaatcatctcgtccccatatcgaatccgttttatcgccgaaggccatcctttgagccttaagttcgattcatttg

SEQ ID NO: 97 - DNA, 397 bp, Glycine max
  Clone ID: LIB3072-060-Q1-K1-D2
tgggagtgcaaaactcacaacacatctaaacaaaaaatcaagaacaatggcttatgctaggcttgctcctatggctgtcttcttgcttgccacttccaccataatgttcccaacgaagatagaagcagcagattgtaatggtgcatgttcacctttcgagatgccaccgtgccgctcacgtgattgtcgttgtgtccctataggactagttgctggtttctgcatacatccaactggactttcatctgttgcgaagatgatcgacgaacatcccaacttatgtcaatctgatgatgaatgcgtgaagaaaggaagtggcaatttttgcgctcgttaccctaataattatatcgattatggatggtgttttgattctgattctgaagcactgaaaggc

SEQ ID NO: 98 - DNA, 416 bp, Glycine max
  Clone ID: LIB3072-060-Q1-K1-D3
gattcacacaactaactaagaaagtcttccatagccccccaaaaatgaagagcaccatcttctttgctctctttctcttttgtgccttcaccacctcatacctaccttcagccatcgctgatttcgtgctcgataatgaaggtaaccctcttgaaaatggtggcacatattatatcttgtcagacataacagcatttggtggaataagagcagccccaacgggaaatgaaagatgccctctcactgtggtgcaatctcgcaatgagctcgacaaagggattggaacaatcatctcgtccccatatcgaatccgttttatcgccgaaagccatcctttgagccttaagttcgattcatttgcagttataatgctgtgtgttggaattcctaccgagtggtctgttgtggaggatcta

SEQ ID NO: 99 - DNA, 356 bp, Glycine max
  unsure at all n locations
  Clone ID: LIB3072-060-Q1-K1-D5
gacagcaaaaaacaattaataaaagatgagtttgaagaacaacatggtggtgctaaaagtgtgtttggtgcttcttttccttgtgggggttacagctgcacgcatggaactgagcttcttcaaaagtgatcagtcatcaagttatgatgatgatgagtattcaaaaccatgctgtgatctctgcatgtgcacacgctcaatgcctcctcaatgcagctgtgaagatattaggctgaattcatgccactcagattgtaagagctgtatgtgcacacgctcacagccaggacagtgtcgttgtcttgacaccaacgacttctgctacaaaccttgcangtccagagatgactagaaaa

SEQ ID NO: 100 - DNA, 383 bp, Glycine max
  Clone ID: LIB3072-060-Q1-K1-D7
gattgtgtgacagctaaattctcaaaggcaccaattctattgctcagagttcccaaattctccccaagagataaaatgtctctaatcccaaacttcttcggtggccggagaaacaatgtgttcgatcctttctcactggacgtgtgggatcccttcaaggattttcctttcccaaatacgctttcttcagcttccttccctgaattttctcgggaaaattcagcatttgtgagcacccgtgtggactggaaggagaccccagaggcgcacgtgttcaaggcagatattccaggactgaagaaggaggaagtgaaggtgcagattgaagacgataaggttcttcagataagcggagagagggacgttgagaaggaagataagaa

SEQ ID NO: 101 - DNA, 393 bp, Glycine max
  Clone ID: LIB3072-060-Q1-K1-D8
gaaaagtccagaagaaggagtataatgggagcaagaagaagccaggacagcaagcagggagggagagaagaaaacaccgagagagtgatagacaagttgaaaaacaaagccacaggaacagctttgaaggaaggagagttttgaaaataaggaacgtttgattccctcttgagacttacactcctggtgtgtatttttacaataagaacttcttttatgtctttgtcatgtattacttatgtttgttttttatgactggttgttgaaggccaacgtttcttgaatcaatagtacgcataaaataacaattgatttatataatgacgaatacttgtaagtttgaattttttttttctaaccaaattgttttggattataaaccattagggctat

SEQ ID NO: 102 - DNA, 139 bp, Glycine max
  Clone ID: LIB3072-060-Q1-K1-D9
gaagaaagctgctagcagagggaagttctacacttttttgtttggattgatcgagtgtactttttcttttcgagattggcttggtgtgcagtggaaagagggtggaaaagagtggtaagggggagggcggcgcccctag

SEQ ID NO: 103 - DNA, 412 bp, Glycine max
  Clone ID: LIB3072-060-Q1-K1-E1
gactttgagttcgaactaaacaattcgattcaatgtgcctcgatcatggagaggaaaacatttgggtttttgttcttgctcctccttggcttagcttctgatgtgacggtgaaaagagcagaggcgaaagattgcttgacaaggaggcacgggttccagggtagatgcttattcgacaggcaatgtgcacatgtgtgcaggagcgatggtttcattggtggtcagtgccgaggccctcttcgcaaatgcttttgcagcaggccatgttgatcgaaattactactgccaaagaggccatgaaataaacaaacaaacaaataaattaatagctctaaccgacacatatgtacgtagtgtcggggttctagctagcttggtaggtactggtgtcttttgttatcgatcctaattt

SEQ ID NO: 104 - DNA, 420 bp, Glycine max
  Clone ID: LIB3072-060-Q1-K1-E10
gacaacttcattagcaaaacaaaagccataggttactactcttcgccttttcctttgcaattgttaccaaacaattcttgcttagcccttacaagcaagcattaacaacaatgaagaaagtagtgttaaaggtgggcttacatgatgatagaatcaagcgaaaagttatgagaacagcatctggtctttcaggggttgaaccagtttctattgacatgaaagacgagaaaatgaccttattagggaacattgatccagtgaatgcagtgggcaagctacgaaagtgttgtcaaactgaaatagttacagttggtccagccaaagaggataaggggaaagggaagggggagccaggaaaagaacctggtcctctcaaactctatgatgcctattcctattattatcaaatgacacccccac

SEQ ID NO: 105 - DNA, 232 bp, Glycine max
  Clone ID: LIB3072-060-Q1-K1-E11
gaagttggagtggaggagcgtgaggtgagtgtctgtctgagaaaaaaataaaaggcaaagaaacaagaaaacaaaggaaagaaaagatgttacagttcccggcgtatatgactcagtacccattgtcgacgaggactattccgacgtcgtttctgctaccctctcagtggcctcagccccaaaacgaagaactccttctcgccatggaagagtccgatttcgaagaaaaatg

SEQ ID NO: 106 - DNA, 348 bp, Glycine max
  Clone ID: LIB3072-060-Q1-K1-E12
gatcacaaacccaatacacaatcataggctcaatgacctcaatttcacttctctgctccaaagtttcaatcttttctctgaaatcccaaatgggcatcgccacaatcaaaatgggaggcaactccgactccaactgttccatcactccacgccattacaacacccacaaggtgttccttttctgcaactacattctcttgggtgcagcctccagctgcatcttcctcaccctctccctgcgcctcattccctctctatgcggctttttcttcatccttcttcaagtcttcacgaatgcgggtgcagtctccggttgggcctctgggggggctaataagggggactctg

SEQ ID NO: 107 - DNA, 389 bp, Glycine max
  Clone ID: LIB3072-060-Q1-K1-C7
acgagaagacgacagagggggcaattaaacccaagcagaaggccatattatttttttttatttgaaataatgtgcgggatcatccacaagattgaggagacccttcatgtgggagggcacatgaaagaggagcacaaaggtgaacaccatggtgagcacaaaggtgaacacaaaggagaacaccatggtgagcacaaaggtgaacacgtaggagaacaacaccatggggagcacaaggagggacttgtggataagatcaaggacaagatccatggtgatggccatgacaagggtgagaaaaagaagaagaaggacaccgaaaagaagggggtggacatgaccattatggtcatagcaacagcagtgaccgggattagatcttatatgtt

SEQ ID NO: 108 - DNA, 312 bp, Glycine max
  Clone ID: LIB3072-060-Q1-K1-E2
gtcatcacattattctatatcaagtttggttaagaggtcttgaaaaagcaagagaaaaaaaaataccaaccatggcaaccatttctgatcaacctagagggtcctactcctatggaacctcatatggagcaccctatggaaccacgtatgagaccaacaccagcattaacaacccaccttcgcgccaaacggtgaagttcataactgctgccactattggcatcacactcttgctcctgtctgggttgaccctcacaggcactgtcataagtttgatcattgcaacccctcttcttgttatcttcagcccca

SEQ ID NO: 109 - DNA, 275 bp, Glycine max
  Clone ID: LIB3072-060-Q1-K1-A9
gacagcaaaaacaattaataaagatgagtttgaagaacaacatggtggcgctaaaggtgtgtttgttgcttcttttccttgtgggggttacagctgcacgcatggaactgagcttcttcaaaagtgatcagacgtgaagttatgatgatgatgagtattcaaaaccatgctgacatcctttgatgtgcacacgctcaatgcctcctcaatgcagctgtgaagatattgggctgaattcatgccactcagattgtaagagctgtatgtgcacacgc

SEQ ID NO: 110 - DNA, 357 bp, Glycine max
  unsure at all n locations
  Clone ID: LIB3072-060-Q1-K1-B1
gacagcaaaaacaattaataaagatgagtttgaagaacaacatggtggtgctaaaggtgtgtttgttgcttcttttccttgtgggggttacagctgcacgcatggaactgagcttcttcaaaagtggtcagtcatcaagttatgatgatgatgagtattcaaaaccatgctgtgatctctgcatgtgcacacgctcaatgcctcctcaatgcagctgtgaagatattaggctgaattcatgccactcanattgtaagagctgtatgtgcacacgctcacagccaggacagtgtcgttgtcttgacaccaacgacttctgctacaaacctttgcagtccagagatgactagaaaaact

SEQ ID NO: 111 - DNA, 307 bp, Glycine max
  Clone ID: LIB3072-060-Q1-K1-B10
gattcacacaactaactaagaaagtcttccatagccccccaaaaatgaagagcaccatcttctttgctctctttctcttttgtgccttcaccacctcatacctaccttcagccatcgctgatttcgtgctcgataatgaaggtaaccctcttgaaaatggtggcacatattatatcttgtcagacataacagcatttggtggaataagagcagccccaacgggaaatgaaagatgccctctcactgtggtgcaatctcgcaatgagctcgacaaagggattggaacaatcatctcgtccccatatcg

SEQ ID NO: 112 - DNA, 215 bp, Glycine max
  Clone ID: LIB3072-060-Q1-K1-B2
agggtgaatggtacttgagtgaatactgaaggcagatattttgtgccttctgctttccctcaacaaggcagatatttgtttgccacactaccacactttgctggtcaaaaaattcatggcaaaagcaaggctaatagcttatcttgttggtaaggggtggtttcgaacataaaatgttggagatgcttgcaggggttatagagtggtgtacacac

SEQ ID NO: 113 - DNA, 415 bp, Glycine max
  Clone ID: LIB3072-060-Q1-K1-B3
gacagcaaaaacaattaataaagatgagtttgaagaacaacatggtggtgctaaaggtgtgtttgttgcttcttttccttgtgggggttacagctgcacgcatggaactgagcttcttcaaaagtgatcagtcatcaagttatgatgatgatgagtattcaaaaccatgctgtgatctctgcatgtgcacacgctcaatgcctcctcaatgcagctgtgaagatattaggctgaattcatgccactcagattgtaagagctgtatgtgcacacgctcacagccaggacaggtgtgttgtcttgacaccaacgacttctgctacaaaccttgcaagtccagagatgactagaaaaactaatagctctcttaaatggacgaagcccctttaggctttgtttgttatgataggggaga

SEQ ID NO: 114 - DNA, 203 bp, Glycine max
  Clone ID: LIB3072-060-Q1-K1-B5
agggacacttactagtagtaagcatggagtcctcaaagatctatgcttacctcttcctctgcatgatctttctctctttcaccactcccattctcggttgtggctactggggcaaaccccccaaaaagcacaagcctggttaaacaccaaagacacccaaaacacccgttgttaaaccaccagtcaccatccctcccattaat

SEQ ID NO: 115 - DNA, 278 bp, Glycine max
  Clone ID: LIB3072-060-Q1-K1-B6
gaaagtttctgtctcacatacattaattgctggaaaaatatcgtacgcatcgatatgaaaagaaaatatttgatacgcgaagacataattgaaattgaaatgaattttttcttgtattcggaaaaaaagatgtttcaaatgaataaaaacttgtttggtggaacttggaataaggcccttctgagtaaagaaagggcatagcccttttttttataggatcttcacaggaacaagaagatttaattggaaatatcgacagattcttagggagtctaaac

SEQ ID NO: 116 - DNA, 410 bp, Glycine max
  Clone ID: LIB3072-060-Q1-K1-B7
acacaactaactaagaaagtcttccatagccccccaaaaatgaagagcaccatcttctttgctctctttctcttttgtgccttcaccacctcatacctaccttcagccatcgctgatttcgtgctcgataatgaaagtaaccctcttgaaaatggtggcacatattatatcttgtcagacataacagcatttggtggaataagagcagccccaacgggaaatgaaagatgccctctcactgtggtgcaatctcgcaatgagctcgacaaagggattggaacaatcatctcgtccccatatcgaatccgttttatcgccgaaagccatcctttgagccttaagttcgattcatttgcagttataatgctgtgtgttggaattcctaccgagtggtctgttgtgggggatct

SEQ ID NO: 117 - DNA, 435 bp, Glycine max
  Clone ID: LIB3072-060-Q1-K1-B8
ggttttctaaaacactatcccttttactgtttattgacaaagagaaacaatcggaggatctgttctgttccataagatggctggacttttaggatataggagccttccacctaaggcaaagaatctggtagttgctgggggtttgacagcttttgtctttggtgcatacttctacaccatgagggctgctggaggcactgatgaactgcaggtagcaattgataagtttgaagctgacaagagcaagaatgagggtgatgccaacatgccatcaaaggtctaaagcttgtacaataaagcaatactttgggtgtattcactgttttggtttgggatcaagctttttacttagtatgagaatgttctaaaaagaatgatattgaatctagttgctaataagtttcaaccagctttatgtactatgactgtgtggta

SEQ ID NO: 118 - DNA, 301 bp, Glycine max
  Clone ID: LIB3072-060-Q1-K1-C10
gattcacgcaactaaataagaaatgaagagtactatcttctttgctctctttctagtttgtgccttcaccatctcatacctgccttcagccaccgctcagttcgtgctcgacactgatgatgatcctcttcaaaacggtggcacatactatatgttgccagttatgagaggaaagggcggtggaatagaagtagattcaactggaaaagaaatatgccctctcactgttgtgcaatcacccaatgagctcgataaggggattggactagtctttacatctccattacatgccctttttatc

SEQ ID NO: 119 - DNA, 345 bp, Glycine max
  Clone ID: LIB3072-060-Q1-K1-C11
gactttgagttcgaactaaacaattcaattcaatctgcctcgatcatggagaggaaaacatttgggtttttgttcttgctcctccttgtcttagcttctgatgtgacggtgaagagagcagaggcgaaagattgcttgacaaggaggcacgggttccagggtagatgcttattcgacaggcaatgtgcacatgtgtgcaggagcgatggtttcatcggtggtcagtgccgaggccctcttcgcaaatgcttttgcagcaggccatgttgatcgaaattactactgccaaagaggccatgaagtaaacaaacaaacaaataaataaatagctctaaccgacacata

SEQ ID NO: 120 - DNA, 436 bp, Glycine max
  Clone ID: LIB3072-060-Q1-K1-C12
gacagcaaaaacaattaataaagatgagtttgaagaacaacatggtggtgctaaaggtgtgtttgttgcttcttttccttgtgggggttacagctgcacgcatggaactgagcttcttcaaaagtgatcagtcatcaagttatgatgatgatgagtattcaaaaccatgctgtgatctctgcatgtgcacacgctcaatgcctcctcaatgcagctgtgaagatattaggctgaattcatgccactcagattgtaagagctgtatgtgcacacgctcacagccaggacagtgtcgttgtcttgacaccaacgacttctgctacaaaccttgcaagtccagagatgacttgaaaaactaatagctctcttaaatggacgaagcccctttaggctttgtttggtatggtaggggagaccaattaaaccaggaattaaa

SEQ ID NO: 121 - DNA, 389 bp, Glycine max
  Clone ID: LIB3072-060-Q1-K1-C2
ggagttcgaactaaacaattcaattcaatctgcctcgatcatggagaggaaaacatttgggtttttgttcttgctcctgcttgtcttagcttctgatgtgacggtgaaaagagcagaagcgaaagattgcttgacaaggaggcacgggttccagggtagatgcttattcgacaggcaatgtgcacatgtgtgcaggagcgatggtttcatcggtggtcagtgccgaagccctcttcgcaaatgcttttgcagtaagccatgttgatcgaaattactactgccaaagaggccatgtaataaacaaacaaaccaattaataaatagctctaaccgacacatatgtacgtagtgtcggggttctagctagctaggtaggtacgtgtgtcttt

SEQ ID NO: 122 - DNA, 337 bp, Glycine max
  Clone ID: LIB3072-060-Q1-K1-C3
aggacagcaaaaacaattaataaagatgagtttgaagaacaacatggtggtgctaaaggtgtgtttgctgcttcttttccttgcgggggttacagctgcacgcatggaactgagcttcttcaaaagtgatcagtcatcaagttatgatgatgatgagtattcaaaaccatgctgtgatctttgcatgtgcacacgctcaatgcctgctcaatgcagctgtgaagatattaggctgaattcatgccactcagattgtaacgagctgtatgtgcacacgctcacagacaggacagtgtcgatgtcttgactccaacgacttctgctacaaaccttgcat

SEQ ID NO: 123 - DNA, 295 bp, Glycine max
  unsure at all n locations
  Clone ID: LIB3072-060-Q1-K1-C4
gattcacacaactaactaagaaagtcttccatagccccccaaaaatgaagagcaccatcttctttgctctctttctcttttgtgccttcaccacctcatacctaccttcagccatcgctgatttcgtgctcgataatgaaagtaaccctcttgaaaatggtggcacatattatatcttgtcagacataacagcatttggtggaataagagcagccccaacgggaaatgaaagatgccctctcactgtggtgcaatctcgcaatgagctcgacanagggattggaacaatcatctc

SEQ ID NO: 124 - DNA, 241 bp, Glycine max
  Clone ID: LIB3072-060-Q1-K1-C5
gacacatcacaacaacaacaacaaccaaaaaagacaaaaactacttccttctctcctttgctgggttttctttctcaaaaatgggtcgtacctatgttcttatgatggttgctgcattgttgttgagctccaccatggctcaatctccagcttcgtcgccggctttgtcccccacccacacgccggtggccactccacctaggagggcgttgtcgccgtctccgtcgtctgtgtcaccagc

SEQ ID NO: 125 - DNA, 388 bp, Glycine max
  Clone ID: LIB3072-059-Q1-K1-H10
ggaagcatttgagactaactcttagagagaaaaaaaatggctgatacaggtggaggagatgcagtgagaccagtggtaatatgtgataacaagtgtggctgcacacttccatgcactggtggttccacttgcaagtctattaagttcatgatttcaacaaagtgcacaagtgctggcactgtcacaggagggggtgatcacgcgacatgctcttgcggagagcactgtggctgcaatccatgctcatgtcccaaaattgctgctgctggaagaggttgcagatgtggcacagattgcgcatgtgcctactgccgcacttagtatcacaccttaaggcttaaacttcacgttttattttatgtcttcaaatcttgaatacgtactctat

SEQ ID NO: 126 - DNA, 372 bp, Glycine max
  Clone ID: LIB3072-059-Q1-K1-H5
gaacacttggtttagcaagagaaaaaataccaaccatggcaaccatttctactgatcaaccaagaggatcctactcctatggaacctcctatggagcaccctatggaaccacctatgagaccaacagcagcattaacaaccctccttcacgccaaaccgtgaagttcataactgctgcaactattggcatcacactcttactcctgtctgggttgaccctcacaagcactgtcataggtttgatcattgcaacccctcttcttggtatcttcagccccatccttgtcctgctgcgtttgtgctgttcctggttgcttctggctttttgttctctgggggctgtggtgtggctgccattgctgctttatcttg

SEQ ID NO: 127 - DNA, 369 bp, Glycine max
  Clone ID: LIB3072-059-Q1-K1-H6
gaatctcttcacagaagaaaaaagagaagaagatgggtttgaagaacaacatggtggtgctaaaggtgtgtttggtgctacttttccttggggggggtactactagtgccagcttgaagcttagtgaacttggcctgctcatgaaaagtgatcatcatcaactcttaaatgatgatgactctttaaaaccattctgtgatcaatgcgcatggcacaagtccaacccctgctcaatgccgctgttcagatatgaggctgaattcgtgccattcagcttgcatatcttgtatctgcgcattatcgtatcctgcacagtgtctttgtgttgacataacggatttctgctatgaacctttgcagcccagtgag

SEQ ID NO: 128 - DNA, 218 bp, Glycine max
  Clone ID: LIB3072-059-Q1-K1-H7
gattcacgcggctaaatctgaactgaagagtactgtcttctttgctctctttctaaacagcgccttcaccatctcatacctgccttcagtcaccgctcatgtcgtgctccacactgatgatgatccttttcaaaacggcggcacatactatatgttgccagttatgagaggaaagggcagtggaatagcagttgattccactggaaaagaaatatgcc

SEQ ID NO: 129 - DNA, 394 bp, Glycine max
  Clone ID: LIB3072-059-Q1-K1-H8
ggtgactgaaaaaaggttttagatcgtaaaaactaattactacgaaaacaagagatatcgaagatggctctgcccaaagctaaggagatcgtgtcgtccaattccgtcgtcgttttcagcaaaacctattgccctttctgcgtcgatgtgaagaagctcttcggtgacctcggtgccaattacaaggccatcgaactcgacactgaatccgatggaaaagagcttcaagcagcattagttgagtggacggaccagcgaaccgtgcctaatgcgtttattggtggaaaccacattggtggctgtgactcaacaactgccctgcacactcaggggaagctggttcctctgctgatatctgctggagctgctgccaaatcaactgcttaaaggatct

SEQ ID NO: 130 - DNA, 405 bp, Glycine max
  Clone ID: LIB3072-059-Q1-K1-H9
gatgcaactgaataattaagaaaagccatttccatagcagcctaagaaaatgaagagcactagcttgttcgctatctttctactttgcgccttcacctcatacctaccttccgccaccgcccaggacgtgctcgacgtggatggcgatccgattcggaacggtttcatatactacgttttgccggcaataagaggaaacggtggcggaatagaacgagccgcactcgggaaagacacttgccctatcactgtagtgcaatctcccaatccaaactctaaggggttagaaattaagtttgaatctgcataccccgcctattacataaacgaaaccctaattttgcaaataaagttcagttacccacagcagtgtgaaagaaagaatccttggtgggccatttctaa

SEQ ID NO: 131 - DNA, 355 bp, Glycine max
  Clone ID: LIB3072-060-Q1-K1-A1
gacacacatacccccaactaacgataattccttcacttgcagaacttagttctctgttgtatcatcatcatcttcattagggttagccctaaacttcaccttcaaccatgaccacagtgccaccacacagtgtccaagtgcacacaacaacacaccgctacgaagccggcgtcgacccgccggctcgttttgaggcgccgcgttacgaagccggcatcaaggcgccctcttccatttaccattccgagagaggtccgacgacctctcaagttctcgcagttgtcgccggccttccggtcggcggcatcctcctgctcctggcaggactgaccctggctggaactctcaccgggct

SEQ ID NO: 132 - DNA, 261 bp, Glycine max
  Clone ID: LIB3072-060-Q1-K1-A10
gatccaaacacagtataaataaaaaaaccaccttcgtccgatccactccaaacgcaacatccgaacgaaacaatcatggcagcgaacccacccgcgccttcagaatccgacccgaaccaaaacccgggttcggagtcctttccgtacttcgaagacatgaacgaactcgagacagtcttcaaccgcttcgacgccaacggcgacggcaagatctccgccgacgaactcgacagcgtgctccggtcgctcggatccggcgtc

SEQ ID NO: 133 - DNA, 176 bp, Glycine max
  Clone ID: LIB3072-060-Q1-K1-A11
tcgcccacgcgttcgtagacgacagaaggggacaccaacaccaaaacaaacccactaagatggcttgctttgtatcctttctagtgctgcttcttgcagcccttattctcatgcctcaagggcttgctacttactacaaaccaattaagaagccaccagtgtacaagccttcagtg

SEQ ID NO: 134 - DNA, 369 bp, Glycine max
  Clone ID: LIB3072-060-Q1-K1-A12
ggaggcggagacgaagaagtgaagagaagagaagagaagggatttggatctgaaaagagaagatggggggaggaatggaagcaaacaagaacaagttcatagaggattggggcactgccagagagaatctggagttcaatttccgttggactcgccgcaaccttgctcttgttggcatcttcggcatcgctattcccgtcctcgtctacaagggcatcgtccgtgaattccatatgcaagatgaagataatggtcggccgtacaggaagttcatgtgagagagtatggagagtcttttgtaataattcgtcaagttagaccttgatattatgaggctacaaaccatgtttttttttcttaattcgcaaa

SEQ ID NO: 135 - DNA, 402 bp, Glycine max
  Clone ID: LIB3072-060-Q1-K1-A2
ggatttcgtttcatttgtcaataggagggacctcgagagagagaatcagaggaggacgatcatctatatgaagtggagtctccttaccggcccggtcgccattctcggcggcgtagtcgtcgccatcgccgccgcaaacgttatcttcgtcaagaatgtgaggttgctgatgaatcaaccaagtccaagactattgaatcaaaaaacaaattctaagcaaaaatcatttgtaagaattgctttctcaatggcttgtcctaatatttagaggatcccttcctcaaaccagaagagaggaagtatgaaaatgaaccttgctccaagtaggagaaaagagacaacagaagtttgcgttttgatgtcttttaaaccctgagttatgagctctgtatactcgtttgc

SEQ ID NO: 136 - DNA, 280 bp, Glycine max
  unsure at all n locations
  Clone ID: LIB3072-060-Q1-K1-A4
gacagcaaanacaattaataaagatgagtttgaagaacaacatggtggtgctaaaggtgtgtttgttgcttcttttccttgtgggggttacagctgcacgcatggaactgagcttcttcaaaagtgatcagtcatcaagttatgatgatgatgagtattcaaaaccatgctgtgatctctgcatgtgcacacgctcaatgcctcctcaatgcagctgtgaagatattaggctgaattcatgccactcagattgtaagagctgtatgtgcacacgctcaca

SEQ ID NO: 137 - DNA, 308 bp, Glycine max
  Clone ID: LIB3072-059-Q1-K1-H1
tgtttcacacaactaactaagaaagtcttccatagccccccaaaaatgaagagcaccatcttctttgctctctttctcttttgtgccctcaccacctcatacctaccttcagccatcgctgatttcgtgctcgataatgaaggtaaccctcttgaaaatggtggcacatattatatcttgtcagacataacagcatttggtggaataagagcagccccaacgggaaatgaaagatgccctctcactgtggtgcaatctcgcaatgagctcgacaaagggattggaacaatcatctcgtccccatatcg

SEQ ID NO: 138 - DNA, 302 bp, Glycine max
  unsure at all n locations
  Clone ID: LIB3072-060-Q1-K1-A5
gaatatggatgatgaaagggagtaatnnttgtgatacccaacattttactttgggggggattaaattaaattactttgggttcaattacagaaaaacctagtattgttgtatatgaggctgctgagttgatacctgatattgttgcaggcactatctatttggttcaatgggtatctatgtattactattacagttcacaggttttcgataaaaaagaaaaaaacaacatagaatccttgaatgcggtgcaaattaacgatcagttttatttgttacacacataagtgtcctacatctgata

SEQ ID NO: 139 - DNA, 246 bp, Glycine max
  unsure at all n locations
  Clone ID: LIB3072-060-Q1-K1-A6
gacagcaaaaacaattaataaagatgagtttgaagaacaacatggtggtgctaaaggtgtgtttgttgcttcttttccttgtgggggttacggctgcacgcatggaactgagcttcttcaaaagtgatcagtcatcaagttatgatgatgatgagtattcaaaaccatgctgtgatctctgcatgtgcacacgctcaatgcctnctcaatgcagctgtgaagatattaggctgaattcatgccact

SEQ ID NO: 140 - DNA, 389 bp, Glycine max
  Clone ID: LIB3072-059-Q1-K1-F11
gactctcatcacattattctatatcaattttggttaagagtcttgaaaaagcaagagaaaaaaaaaataccaaccatggcaaccatttctgatcaacctagagggtcctactcctatggaacctcatatggagcaccctatggaaccacgtatgagaccaacaccagcattaacaacccaccttcacgccaaacagtgaagttcataactgctgccactattggcatcacactcttgctcctgtctgggttgaccctcacaggcactgtcataggtttgatcattgcaacccctcttcttgttatcttcagccccatccttgtccctgctgcgtttgtgctgttcctagttgcttctggctttttgatctctggcggctgtggtgtggc

SEQ ID NO: 141 - DNA, 389 bp, Glycine max
  unsure at all n locations
  Clone ID: LIB3072-059-Q1-K1-F12
aggacagcaaaaacaattaataaagatgagtttgaagaacaacatggtggtgctaaaggtgtgtttgttgcttcttttccttgtgggggttacagctgcacgcatggaactgagcttcttcaaaagtgatcagtcatcaagttatgatgatgatgagtattcaaaaccatgctgcgatctctgcatgtgcacacgctcaatgcctnctcaatgcagctgtgaagatattaggctgaattcatgccactcagattgtaagagctgtatgtgcacacgctcacaggcaggacagtgtcattgtcttgacaccaacgacttctgctacataccttgcaagttcagagatgactagaaaaactaatagctctctcaaatggacgaagcccctt

SEQ ID NO: 142 - DNA, 368 bp, Glycine max
  Clone ID: LIB3072-059-Q1-K1-F7
gacaggtgtgtgcaatactagcgatagctgataagagagataccaacaagaaaagaaaaaaagaagagttgagattccctttgaagaaaagatggcatcccataggcaaagctatgaagctggtcaaactaagggccgaactgaggaaaagacgaaccagacgatgggcaatattggagagaaggctcaagctgcaaaggagaagacccaggaaatggcccaagctgcaaaggagaagacccaacaaacagcccaagctgccaaggacaagacttgcgacacttcccaagcggcaaaggagaagacccaacagaatacaggagctgctcaacaaaagacctcagagatgggccagtccgcgaaggaat

SEQ ID NO: 143 - DNA, 348 bp, Glycine max
  Clone ID: LIB3072-059-Q1-K1-F8
aggcctagaagaccacatacggggatccacacgactaactaagaaagcatttcatagccctactaacatgagctgctccatcatattcgctctataactgatttgagccttcaccaccttatacctaccttaaaacatggcttattataggctcgataatgaacgtaaccctctagaaaacggtcgcacatattatatctcgacagacataacaacatttgatggaatgcgaacagtccaaacgggaaatgcaagatgccctctcactgtggtacagtctagcaatgacgctcgacaaagggattggaacactcatctcgtgaccatatccaatccgcaatatcgacg

SEQ ID NO: 144 - DNA, 406 bp, Glycine max
  unsure at all n locations
  Clone ID: LIB3072-059-Q1-K1-F9
gacagcaaaaacaattaataaagatgagtttgaagaacaacatggtggtgctaaaggtgtgtttgttgcttcttttccttgtgggggttacagctgcacgcatagaactgagcttcttcaaaagtgatcagtcatcaagttatgatgatgatgagtattcaaaaccatgctgtgatctctgcatgtgcacacgctcaatgcctnctcaatgcagctgtgaagatattaggctgaattcatgccactcagattgtaagagctgtatgtgcacacgctcacagccaggacagtgtcgttgtcttgacaccaacgacttctgctacaaaccttgcaagtccagagatgactagaaaaactaatagctctctcaaatggacgaagcccctttaggctttgtttgttatgt

SEQ ID NO: 145 - DNA, 404 bp, Glycine max
  Clone ID: LIB3072-059-Q1-K1-G10
gatgcaactgaataattaagaaaagccatttccatagcagcctaagaaaatgaagagcactagcttgttcgctatctttctactttgcgccttcacctcatacctaccttccgccaccgcccaggacgtgctcgacgtggatggcgatccgattcggaacggtttcatatactacgttttgccggcaataagaggaaacggtggcggaatagaacgagccgcactcgggaaagacacttgccctatcactgtagtgcaatctcccaatccaaactctaaggggttagaaattaagtttgaatctgcataccccgcctattacataaacgaaaccctaattttgcaaataaagttcagttacccacagcagtgtgaaagaaagaatccttggtgggccatttcta

SEQ ID NO: 146 - DNA, 388 bp, Glycine max
  Clone ID: LIB3072-059-Q1-K1-G11
gacagcaaaaacaattaataaagatgagtttgaagaacaacatggtggtgctaaaggtgtgtttgttgcttcttttccttgtgggggttacagctgcacgcatggaactgagcttcttcaaaagtgatcagtcatcaagttatgatgatgatgagtattcaaaaccatgctgtgatctctgcatgtgcacacgctcaatgcctcctcaatgcagctgtgaagatattaggctgaattcatgccactcagattgtaagagctgtatgtgcacacgctcacagccaggacagtgtcgttgtcttgacaccaacgacttctgctacaaaccttgcaagtccagagatgactagaaaaactaatagctctctcaaatggacgaagccccttt

SEQ ID NO: 147 - DNA, 405 bp, Glycine max
  Clone ID: LIB3072-059-Q1-K1-G12
gttacaagaatttaacatcttagaaaattttgaaataaatttgtagatttagagaagacttatggcaaagaatgagatgaaaattatcggagttgtgattatgactatgattctgtttggtttctcacaagctaattataatccttcatttgagaaaattggactaaatcatgtgtctgatggaatcgtttgtcgacttagatgcgagaataaatgtaaaaaattcctaataattccgcccggactcattttctatctgatatgttatcatacatgttatgcaaattgccatgacatgcccattgatgccgctcatgattgtatcactagttgtggcttgaccaagccggttgacttcaacaatgatgctcctggtcttgcaaccgacggggtgaattcttgttt

SEQ ID NO: 148 - DNA, 385 bp, Glycine max
  Clone ID: LIB3072-059-Q1-K1-G3
gacagcacaaacaattaataaagatgagtttgaagaacaacatggtggtgctaaaggtgtgtttgttgcttcttttccttgtgggggttacagctgcacgcatggaactgagcttcttcaaaagtgatcagtcatcaagttatgatgatgagtattcaaaaccatgctgtgatctccgcatgtgcacacgctcaatgcctcctcaatgcagctgtgaagatattaggctgaattcatgccactcagattgtaagagctgtatgtgcacacgctcacagccaggacagtgtcgttgtcttgacaccaacgacttctgctacaaaccttgcaagtccagagatgactagaaaaactaatagctctctcaaatggacgaagccccttt

SEQ ID NO: 149 - DNA, 372 bp, Glycine max
  Clone ID: LIB3072-059-Q1-K1-G5
gactcactcatacaatagagaccagcttttgcttctttgtgaacatggaaatgaggaaatcatgtggcttcttcttcttgctccttctccttgtctttgcttaccaggtggtggtgcaaaccgagggaagagtgtgtgagtcacaaagccactggttccatggcttgtgtaatagagaccacaactgcgctatggtctgcaagaacgaatgtttctcctgtggcaggtgcaaaggcttccgacgacgatgcttttgcaccaggatttgctgagatctcatccaacactactgttgtcatgccaattaataaatcataactaggccaaataaattgcatctactgtttatccaatagggagctagcttccaca

SEQ ID NO: 150 - DNA, 373 bp, Glycine max
  Clone ID: LIB3072-059-Q1-K1-G7
tggggaagcatttgagacttactattacagagaaaagagaatggctgatacaagtggaggagatgcaatgagaccagtggtgatatgtgataacaagtgtggctgtacacttccatgcactggtgggtacacttgcaggtgcacatgtgctggcactgacgcacgaggtggtgatcacgtgacatgctcgtgcggagagcactgcagatgcaatccatgctcatgtcccaagattgcggctgctgtaagtggttgcagatgtggcacagattgagcatgtgcctgctggcgtacttagtctcacaccttagggcttaaacttcacggcttatcatatgtgttccaatattgaatacgttctctatatattagt

SEQ ID NO: 151 - DNA, 287 bp, Glycine max
  Clone ID: LIB3072-059-Q1-K1-G8
gattgtgattcccagcaataaggttgcttctatattcttaaccttcttgacatcatatctgcacataccttaaaacaaattattagcattagtttgtgtttttttactctatttttcatctctctaccttaaactttatcatagtatcagagttctcctttttttttagagctttatataatcattaacattagttgcgcaatcttttctttggtccgctcatggcttctgttcgtgatgctgcttctcatgaacttggttttgaagaaggcatgatctggctaccc

SEQ ID NO: 152 - DNA, 388 bp, Glycine max
  unsure at all n locations
  Clone ID: LIB3072-059-Q1-K1-D4
gacagcaaaaacaattaataaagatgagtttgaagaacaacatggtggtgctaaaggtgtgtttgttgcttcttttccttgtgggggttacagctgcacgcatggaactgagcttcttcaaaagtgatcagtcatcaagttatgatgatgatgagtattcaaaaccatgctgtgatctctgcatgtgcacacgctcaatgcctnctcaatgcagctgtgaagatattaggctgaattcatgccactcagattgtaagagctgtatgtgcacacgctcacagccaggacagtgtcgttgtcttgacaccaacgacttctgctacaaaccttgcaagtccagagatgactagaaaaactaatagccctctcaaatggacgaagccccttt

SEQ ID NO: 153 - DNA, 386 bp, Glycine max
  Clone ID: LIB3072-059-Q1-K1-D6
tacgccaagttgcggattcgatgacccttttcatccaacaaggtggactttatattcaacaagttttctgtcaaacccgggtcagaggaggctcagatcatgaagaatactattagtgagtgtgaagagggtggaatcaaaggagaggaaaagtactgtgccacttcgcttgaatccatggttgatttcagcactttcaagcttggaaataatgttgaggttgtgtccacagaagtggacaaggaaacgggattgcagaaatacaccgtaacaccgggagtgaagaagttatcaggggacaaggctgttgtgtgccataagcagaactacccttatgctgcgttatactgtcacaaaaccgagaccaccagagcttactctgtgcc

SEQ ID NO: 154 - DNA, 360 bp, Glycine max
  Clone ID: LIB3072-059-Q1-K1-D7
aggcgtgagatgacagcagacggcggactggtgcgccaagttgcggattcgatacccttatcagtccaacgaggtagacgtatcacagttaacatgcgctttgatgcaaccggatcacaggaggctcagatcatgaagaatactattactgaccgtgaagagacagcaatcagactggaagaaccgtgccgtgacacaactatagcatccaggggcgaattcagctcttgcaagctggcatattatggaaaaggcgtgtacagagaggtgtacaaagcaactggacagcctaaatggccaatggcacccgccgtgaagaagttctatataggcacaacgctgttgtgtgccacacgcaga

SEQ ID NO: 155 - DNA, 386 bp, Glycine max
  Clone ID: LIB3072-059-Q1-K1-D8
gcacctccttgttcacatcatcatcatcatcatcatcatcatctttttcttcttcaatcagttgactcttcggtcctccctctattcatctgatggagcccatggacatcgttgggaaggccaaggaagacgcttctcttcctaaagcgacaatgacgaaaattattaaagagatgttgcccccggacgtgcgtgtcgccagagatgcacaggatttattgatcgagtgttgtgtcgagtttataaaccttgtctcgtccgagtccaacgaagtctgtaacaaagaagaaagaaggacgattgcaccggagcacgtgctgaaggctttaggggttctcggatttggcgagtaccttgaggaagtttatgcagcctatgaacaacac

SEQ ID NO: 156 - DNA, 380 bp, Glycine max
  Clone ID: LIB3072-059-Q1-K1-E1
gaaaaagagaaagtgagaaaagggtcgaacaactggtgaagtcattgatggctacagaggaagagagtgcggtgaaggagcctttggatctcattaggctcagcctcgacgagcgtatctatgtcaaactccgttccgacagagagcttcgtggcaaacttcacgcttatgatcagcatcttaatatgattcttggtgatgttgaagaaattgttactacagtggaaatcgatgatgagacatacgaagaaattgtgaggactacaaagcggacagttcctttcctgtttgtcaggggagatggggtgatattggtttccccgccattgaggactgcatgactggactgatgaactatgtgatcattttaataacaagtg

SEQ ID NO: 157 - DNA, 431 bp, Glycine max
  Clone ID: LIB3072-059-Q1-K1-E10
gcgagaagacgacagacgggggtgtgattgtttgttgttgtaactcgttcttcttcttttgttgctctgtgtttgtgtttgttttttctctcacctgaaaatgtcttgctgcggtggtaactgtggttgcggaagctcctgcaagtgcggcaacggctgcagaggctgcaagatgtacccagacttgagctacactgagtcaaccaccaccgagaccttggtcatgggagtggcacctgttaaggctcaatttgagggtgctgaaatgggtgtgcccgctgagaacgatggctgcaaatgtggaccaaactgctcctgcaacccctgcacttgcaagtgaggtgttgcgagagcaagcttcaagcagagatagcccttaattaggaataatgataaactattaatgtgtagctaagaacttatgtattatg

SEQ ID NO: 158 - DNA, 326 bp, Glycine max
  Clone ID: LIB3072-059-Q1-K1-E2
gactttgagttcgaactaaacaattcaattcaatctgcctcgatcatggagaggaaaacatttgggtttttggtcttgctcctccttgtcttaacttctgatgtgaccgtgaagagagccgaggccaaagattgcttgacaaggaggcacgggttccagggtagatgcttattcgacaggcaatgtgcacatgtgtgcaggagccatggtttcatcggtggtcagtgccgaagccctcttcgcaaatgcttttgcagcaggccatgttgatcgaaattactactggcaaagaggccatgaaattaaccaaccaaccaattaattaa

SEQ ID NO: 159 - DNA, 218 bp, Glycine max
  Clone ID: LIB3072-059-Q1-K1-E5
acgaccagcttgtgggacaagagccaggaggagaccacccgaaggagccatgtgaatgagcgtaaacacgactttcaagctcaccgtggctctcttggcaaactttatgacttttgcagctgtgtgtgatagggcatatttgcccaggagtgctaaagaacttatatggctgcgcattaagacatactccaaagcttttcaccccaaaagtatcagag

SEQ ID NO: 160 - DNA, 370 bp, Glycine max
  unsure at all n locations
  Clone ID: LIB3072-059-Q1-K1-E6
aggccccaaaaattaaagctcaaggttatcaaccaggaatttgtaaacttccaccggcaaattcagatcctgaaaaattctaacaggcacctgatgggtgatgccttgagcacactgactgtgaaggaacttaagcagttggagaatagacttgaaagagggatcactagaatcagatctaagaaacatgaaatgctattggcctgaattgaatactttcaaaaaagggagattgagctggaaaatgaaaaatcttgcctccggactaagataactgacgttgagaggattcagcangtaaacatggtttctggaccagaactgaatgtcattcaggcattagcttcccgtaacttcttcaatccaaaca

SEQ ID NO: 161 - DNA, 172 bp, Glycine max
  Clone ID: LIB3072-059-Q1-K1-E9
tacaggtgtcagaagacggctggatgtgatgcaactgagtgactgacaaaagccatttccatatacagcctaagataatgaagagcactagcttggtcgctatctttctactttgggcctttatctcatacttaccttgcggcaccagacattacgtgctctacgtggattg

SEQ ID NO: 162 - DNA, 398 bp, Glycine max
  Clone ID: LIB3072-059-Q1-K1-F1
gattcacacaactaactaagaaagtcttccatagccccccaaaaatgaagagcaccatcttctttgctctctttctcttttgtgccttcaccacctcatacctaccttcagccatcgctgatttcgtgctcgataatgaaggtaaccctcttgaaaatggtggcgcatattatatcttgtcagacataacagcatttggtggaataagagcagccccaacgggaaatgaaagatgccctctcactgtggtgcaatctcgcaatgagctcgacaaagggattggaacaatcatctcgtccccatatcgaatccgttttatcgccgaaggccatccttcgagccttaagttcgattcatttgcagttataatgctgtgtgttggaattcctaccgagtgg

SEQ ID NO: 163 - DNA, 376 bp, Glycine max
  Clone ID: LIB3072-059-Q1-K1-D2
gacacaactaactaagaaagtcttccatagccccccaaaaatgaagagcaccatcttctttgctctctttctcttttgtgccttcaccacctcatacctaccttcagccatcgctgatttcgtgctcgataatgaaggtaaccctcttgaaaatggtggcacatattatatcttgtcagacataacagcatttggtggaataagagcagccccaacgggaaatgaaagatgccctctcactgtggtgcaatctcgcaatgagctcgacacagggattggaacaatcatctcgtacccatatcgaatccgctttatcgccgaaggccattctttgagccttaagttcgattcatttgcagttataatgctctgtgtt

SEQ ID NO: 164 - DNA, 275 bp, Glycine max
  Clone ID: LIB3072-059-Q1-K1-B7
gaagcataggcatagggttggatatagctaaagcgcggagaggactacattagacacctggggtttgctactggccatcttaacttcacactttacattctaaactgctaaaaccaaatcatctttccacactgcatcaccagttgcatcttcaacgctcattcaacattccatgtgcacatcgcctgcttcatctattacttcataaatcttcagcgacgacgacctctcacccaatgcctttgcattaccgcaagttgatacaaacgactact

SEQ ID NO: 165 - DNA, 392 bp, Glycine max
  Clone ID: LIB3072-059-Q1-K1-B8
gataccaaaaacaaaacacgagccaagtgaaagtgagaaaaaataagaatcaaagagcataatgtcagggatcattcacaagattggggagacccttcatgtgggagggcacaagaaggaggaggagcataagggtgagcaccatgctggagaatacaaaggggagcaccatggtgaacacagtagtgagtacaaaggagagcatcatggtgaacacaaagctggagagtaccatggtgagcacaagccagagcacaaagaggggttcctagacaaagtcaaggacaagatccatggtgagggcggcgccgccgagggcgagaagaagaagaaggagaagaagaagaaggagcatggccatgagcatggccatgacagcagcagcagcagtg

SEQ ID NO: 166 - DNA, 383 bp, Glycine max
  Clone ID: LIB3072-059-Q1-K1-B9
gacaccgagtcgcagaaaaagaaaaaagcgatcatagtttcacttcggccttatccagtttagggtttcggttctctaccctatctttcccgtatcgaaaccttaaatttacgatcaggtctgagcaatctggttggtagaacctttggtcttagtgagtcaagttttatgtctgaattagacgatcaaattcctactgccttcgatccttttgctgatgcaaatgctgatgactcgggtgctgggtcaaaggagtatgtgcatattcgtgtacagcagcgaaatggtaggaaaagcctgacaaccgttcagggattgaaaaaggaattcagctataacaagatacttaaagacgtcaagaaagagttctgttgcaatggaac

SEQ ID NO: 167 - DNA, 390 bp, Glycine max
  Clone ID: LIB3072-059-Q1-K1-C1
gtcctacagattcttcagcaactgcgattttggatcggaacctcttctgcggcgtagcaatgggacactccaacgtttggaattctcactcaaaaaactacggtcctggttctcgcacttgccgagtgtgtgggaatccacatggattgatcaggaagtatggccttatgtgctgcaggcagtgcttacgtagcaatgccaaggaaattggcttcatcaagtatcgctaaaagagctgttgtcacctacggaccaatattatgttctggcactaggatgttttgaagatgttatgtttgaagaaacttgagacttgtctttttcatctattttattatcagacataatgtgtggaacgaagaatacttttatataaattggtttgcacga

SEQ ID NO: 168 - DNA, 374 bp, Glycine max
  unsure at all n locations
  Clone ID: LIB3072-059-Q1-K1-C11
gacagcaaaaacaattaataaagatgagtttgaagaacaacatggtggtgctaaaggtgtgtttgttgcttcttttccttgtgggggttacagctgcacgcatggaactgagcttcttcaaaagtgatcagtcatcaagttatgatgatgatgagtattcaaaaccatgctgtgatctctgcatgtgcacacactcaatgcctnctcaatgcagctgtgaagatattaggctgaattcatgccactcagattgtgagagctgtatgtgcacacgctcacagtcaggacagtgtcgttgtcttgacaccaacgacttctgctacaaaccttgcaagtccagagatgactagaaaaactaatagctctctcaaatg

SEQ ID NO: 169 - DNA, 376 bp, Glycine max
  Clone ID: LIB3072-059-Q1-K1-C2
tgggacagcaaaaacaattaatagagatgagtttgaagaacaacatggtggtgctaaaggtgtgtttgatgcttcttttccttgtgggggttacagctgcacgcatggaactgagcttcttcaaaagtgatcagtcatcaagttatgatgatgatgagtgttcagaaccatgctgtgatctctgcatgtgcacacgctcaatgccttctcaatgcaactgtgaagatattaggctgaattcatgccactcacattgtaagagctgtatgtgcacacgctcacagccaggacagtgtcgttgtcttgacaccaacgacttctgctacaaaccttgcaagtccagagatgactagaaaaactaatagctctctcaaat

SEQ ID NO: 170 - DNA, 369 bp, Glycine max
  Clone ID: LIB3072-059-Q1-K1-C3
gagcacatagatggctattcctgtgatagatttcagcactctcaatggagacaaaaggggtgaaaccatggcgcttttggatgaagcttgtcagaaatggggtttctttctggtaaagagaattagatttgcgttaattcctccttttaatcaattgttagtttagttggctttgttgtttaatacattacatgtgcagattgagaaccatgaaattgacaaaaacctgatggaaaaggtgaaggagctaattaatattcactatgaggagaacctgaaggaaggtttctaccagtccgagatagcaaagaccttggagaaaaaacagaacacctctgatatagattgggaaagtgccttcttcatttg

SEQ ID NO: 171 - DNA, 397 bp, Glycine max
  Clone ID: LIB3072-059-Q1-K1-C6
ggagtgattaacttctcaaactgagagagagagagagagaaagagagagtgcactgaagtgaagagtgcattgtgatatgaggaagcaacaacgttggcaagttggtatcgtggattgaggtggtcttttgggggaaaccatcaacgacaacgacagcatcaaaaggaagagaaagacccagaaacgggaacggctttcagaaactcacaagcttttcaaaaagagcttcaaagtgaaggaaaaaagtgccctttgattcttggtcaccacaacgccaagacaaacaacaaacaaagcaaatcacacacacacacacatgcaaactagaggagccaccgcaacatgttttctgtaaccgaatgctataattcatgggagttggtggtggtggttgtt

SEQ ID NO: 172 - DNA, 396 bp, Glycine max
  Clone ID: LIB3072-059-Q1-K1-C7
catttttggtattataggtaacatgatttctgtgatggtgtacttggctccggtgccaacgttttaccagatatacaaaaagaaatgcacggacggtttccactcgctgccatacttgttgtcattaatgagttctatgctttggttatactacgccttcctcaaaattcatgactgcgttgatccccttattacgatcaactcgatcggatgtgtcatagagctcatctacattctcacctacattaagtatgctcacacggatgcaaggaacttaacctatacgctattcgcggccatgaatattgccttcttgacctcggtcctttcctcgcattttgctctacatggttcccaccgtgtcaaagtcattggatggatttgtgacgccgtttc

SEQ ID NO: 173 - DNA, 394 bp, Glycine max
  unsure at all n locations
  Clone ID: LIB3072-059-Q1-K1-C8
gacagcaaaaacaattaataaagatgagtttgaagaacaacatggtggtgctaaaggtgtgtttgttgcttcttttccttgtgggggttacagctgcacgcatggaactgagcttcttcaaaagtgatcagtcatcaagttatgatgatgatgagtattcaaaaccatgctgtgatctctgcatgtgcacacgctcaatgccttctcaatgcagctgtgaagatattaggctgaattcatgccactcagattgtaagagctgtatgtgcacacgctcacagccaggacagtgtcgntgtcttgacaccaacgacttctgctacaaaccttgcaagtccagagatgactangaaaactaatagctctctcaaatggacgaagcccctttaggctt

SEQ ID NO: 174 - DNA, 385 bp, Glycine max
  Clone ID: LIB3072-059-Q1-K1-C9
agagacgacagagggggacacaactaactaagaaagtcttccatagccccccaaaaatgaagagcaccatcttctttgctctctttctcttttgtgccttcaccacctcatacctaccttcagccatcgctgatttcgtgctcgataatgaaggtaaccctcttgaaaatggtggcacatattatatcttgtcagacataacagcatttggtggaataagagcagccccaacgggaaatgaaagatgccctctcactgtggtgcaatctcgcaatgagctcgacaaagggattggaacaatcatctcgtccccatatcgaatccgttttgtcgccgaaggccatcctttgagccttaagttcgattcatttgcagttataatgct

SEQ ID NO: 175 - DNA, 376 bp, Glycine max
  Clone ID: LIB3072-059-Q1-K1-D1
gacattattctatatcaattttggttaagagtcttgaaaaagcaagagaaaaaaaaataccaaccatggcaaccatttctgatcaacctagagggtcctactcctatggaacctcatatggagcaccctatggaaccacgtatgagaccaacaccagcattaacaacccaccttcacgccaaacagtgaagttcataactgctgccactattggcatcacactcttgctcctgtctgggttgaccctcacaggcactgtcataggtttgatcattgtaacccctcttcttgttatcttcagccccatccttgtccctgctgcgtttgtgctgatcctagatgcttctggctatttgttctctgggggctgtggtgt

SEQ ID NO: 176 - DNA, 373 bp, Glycine max
  Clone ID: LIB3072-059-Q1-K1-B6
ggactttgagttccaactaaacaattcaattcaatctgcctcgatcatggagaggaaaacattagggtttttggtcttgctccttcttgtcttagcttctgatgtgacagtcaagagagcagaagccaaagattggttgacaaggaagcaccggttccagggtagatgcttattcgacaggccatgtgcacatgtgtgcaggagcgatggtttcatcggtggtcactgccgaggccctcttcgcaaatgcttatgcagcaggccatgttgatcgaaattactactgccaaagaggccatgtaataaacaaacagacgaattcactaattgctctaaccgacacatatgtacgtagtgtcggagctctagctag

SEQ ID NO: 177 - DNA, 382 bp, Glycine max
  unsure at all n locations
  Clone ID: LIB3072-059-Q1-K1-A1
ggcaaaatacaagtcttcaagaaacagatctgaataaaagaaacaaaacttgaaccaccgtgaaattcacaatgcaaatcccatgctcgtggaaccaccacaacatggtcaaagccgttcatctcccaaccacagcctgtgaaatccacggcacaaacatggtctgttccattattcagatccacagaggtttatcttctaactctgtggacaccttcaacaacgtcatcgaagctgttatgacgaagatggaggcacaactcgatcccctcctcgaccgctttcatgcgccgncgacgttcatcatctacatgtttctcttctgggccgttgccatacgcaaacagaggggtattccgatgagcgcactctggatgtggat

SEQ ID NO: 178 - DNA, 397 bp, Glycine max
  Clone ID: LIB3072-059-Q1-K1-A10
gacagccaaaacaattaataaagatgagtttgaagagcaacatggtggtgctaaaggtgtgtttgttgcttcttttccttgtgggggttacagctgcacgcatggaactgagcttcttcaaaagtgatcagtcatcaagttatgatgatgatgagtattcaaaaccatgctgtgatctctgcatgtgcgcacgctcaatgccttctcaatgcagctgtgaagatattaggctgaattcatgccactcagattgtaagagctgtatgtgcacacgctcacagccaggacagtgtccgtgacttgacaccaacgacttttgctaccaaccttgcaagtccagagatgactagaaaaactaatagctctcttaaatggacgaagcccctttaggctttga

SEQ ID NO: 179 - DNA, 314 bp, Glycine max
  Clone ID: LIB3072-059-Q1-K1-A11
gggaaagggtgaagtgtgggtaaacggtcgaagcattggtcgccattggcctggatatatagcacatggtagttgcaatgcttgtaattatgctggatattatactgatacaaaatgccggacgaattgtggacaaccttctcagagatggtatcatgttcctcgctcatggttgagctcaggtggtaactccttggttgtgtttgaagaatggggaggtgaccctaatggaattgctttggtgaaaagaacatgaagtgtgatattttatgatgctctcttaaaaggggcaacattgacaggcaatatatgtc

SEQ ID NO: 180 - DNA, 363 bp, Glycine max
  unsure at all n locations
  Clone ID: LIB3072-059-Q1-K1-A12
gacaggtgtttgcaatactagcgatagctgataagagagataccaacaagaaaagaaaaaaagaagagttgagattccctttgaagaaaagatggcatcccataggcaaagctatgaagctggtcaaactaagggccgaactgaggaaaagacgaaccagacgatgggcaatattggagagaaggctcaagctgcaaagggagaagacccaggaaaatggcccaagctgcaaaggagaagacccaacanacagcccaagctgccaaggacaagacttgcgacactttccaagcggcaaaagagaagacccaacagaatacaggagctgctcaacaaaagacctcagagatgggccagtccgcg

SEQ ID NO: 181 - DNA, 403 bp, Glycine max
  Clone ID: LIB3072-059-Q1-K1-A3
gacagcaaaaacaattaataaagatgagtttgaagaacaacatggtggtgctaaaggtgtgtttgttgcttcttttccttgtgggggttacagctgcacgcatggaactgagcttcttcaaaagtgatcagtcatcaagttatgatgatgatgagtattcaaaaccatgctgtgatctctgcatgtgcacacgctcaatgcctcctcaatgcagctgtgaagatattaggctgaattcatgccactcagattgtaagagctgtatgtgcacacgctcacagccaggacagtgtcgttgtcttgacaccaacgacttctgctacaaaccttgcaagtccagagatgactaggaaaactaatagctctctcaaatgacgaacccctttagggctttgttgtatgt

SEQ ID NO: 182 - DNA, 396 bp, Glycine max
  Clone ID: LIB3072-059-Q1-K1-A4
gattcacacaactaactaataaagtcttccatagccccccacatatgaagagcaccatcttctttgctctctttctctcttgtgccttcaccacctcatacctaccttcagccatcgctgatttcgtgctcgataatgaaggttaccctcttgaaaatggtggcacatattatatctcgtcagacataccagcatttggtgcaatctgagcacccccaacaggaaatgaaagatgccctatcactgtggtgcaatctcgcaatgagctcgacacactgattggaacaatcatctcgtccccatatcgaatccgttttatcgccgaatgccatcctgtgagccttaagttcgattcatttgcagctataatgctgcgtgttggaattcctaccgagt

SEQ ID NO: 183 - DNA, 350 bp, Glycine max
  Clone ID: LIB3072-059-Q1-K1-A5
gagttacataacatacttgagaagaagctgcatgtcaggacccggatattgaatctgaatccaatgaagatggtaagaaaagaagagaatggtacctactacctacctatcatttgagataaacctcggcttggaggcaaccgcattcttgacaatcaaaacaatgccgtgttcagacaactccaacacggcgtcctacgttaattaaggaatgaagaaaatagggaattactacctgctggcgcttccaccgaacggcccttgaacgttttccagctagcatataacgtctggggcttcttcctcctcctccatgccaccttcgcaaaaccccttctctatctttcaac

SEQ ID NO: 184 - DNA, 261 bp, Glycine max
  Clone ID: LIB3072-059-Q1-K1-A7
taagtggtaatcccattttaattctcagatccatgctggcgagactgataaggagaaagagattggtctccattgattctgtgatcgatccgctaagtgaattcgtagaggacatcgtgaggctcgagaagctcttctacatacccgatcgcagagaattctccaaggttgtcatccgaactgtgattgttttcatcctgaaggcattcatcgtgctgttcttgaggctcatgggtatatcgattaacatcatcatggacg

SEQ ID NO: 185 - DNA, 394 bp, Glycine max
  Clone ID: LIB3072-059-Q1-K1-A9
ggagagtgagggtttgctgctacttttgctttaacacattacactcacactctttgcgaataaggggagtctcttattctttctggacgcttgcattgatcggcgatttcttagacatggcggagcatcacgaacacgatgaagtgaaaggtgagtccttgttggagaagatctctgggaagatccacgaccacgattcgtcatcttcgtcggattccgacaacgagaaaaccagcgcttctgactccttgaagtcaaaggttttcaggcttttcggcagagaaaagcccattcaccatgttcttggtggctgaagaccggccgacggttttctctggagaaacaagaagatatctgcatcgacacttcgagttgcgaccgctatatgggttct

SEQ ID NO: 186 - DNA, 369 bp, Glycine max
  Clone ID: LIB3072-059-Q1-K1-B1
gagaagacgactgaagggactcactcatacaatagaaaccagcttttgcttcttggggacatggaataaggaatcatgtggctttttctttttgctcctctcttgtcttgcttccaagtgtggtgcagactgagggaagagtgtgtgagtcacaaagccacgggttccatggtctgtgtaatagagaccacaactgtgctttggtctgcatgaacgaaggtttctccggtggcaggtgcaaaggcttccgacgtcgctgcttttgcaccaggatttgttgagatctcatcaaacactactcttgccatgcaaattaataaatcatagctaggccaaataaattgcatctactctttatccatttgggag

SEQ ID NO: 187 - DNA, 386 bp, Glycine max
  Clone ID: LIB3072-059-Q1-K1-B11
gacagcacaaacaattaataaagatgagtttgaagaacaacatggtggtgctaaaggtgtgtttgttgcttcttttccttgtgggggttacagctgcacgcatggaactgagcttcttcaaaagtgatcagtcatcaagttatgatgatgatgagtattcaaaaccatgctgtgatctctacatgtgcacacgctcaatgcctcctcaatgcagctgtgaagatattaggctgaattcatgccactcagattgtaagagctgtatgtgcacacgctcacagccaggacagtgtcgctgtcttgacaccaacgacttctgctacaaaccttgcaagtccagagatgactagaaaaactaatagctctctcaaatggacgaagcccct

SEQ ID NO: 188 - DNA, 278 bp, Glycine max
  unsure at all n locations
  Clone ID: LIB3072-059-Q1-K1-B12
gacagcatttttgaagtagtttgtgtagacttaaagaagagttaagggaaaaaaataagatgaacactattggagttatgattatgatcatgtctatgttagggttcgcacaagctaataattacaatcctccatttgtgcaagttgagtcaatcagtgagactaatagacttacttgtccacaagcatgcagagtacaatgtgcagctttagcaccagttgaaccatggtatgacaaatgtgttaaagaatgcanctgcaaatgtaagcatgatgtg

SEQ ID NO: 189 - DNA, 272 bp, Glycine max
  Clone ID: LIB3072-059-Q1-K1-B2
tcatgggtcagactagaactaaccaactcaagctaatctgcctacatcatgatgaggaaaacatgtggcttattgttcttgctcctccttgtcgtaactgctgaccagacggtgaagcaaaccgaggccaaagagtgcttgacacggaggcacgggttccatggtctatgcttattagaccagcaatgtgcacatgtctgcaggaacgaaggtttcatcggtggtcagtgccaaggccttcttcgccaatgcttttgcaccaggacatgttg

SEQ ID NO: 190 - DNA, 306 bp, Glycine max
  Clone ID: LIB3072-059-Q1-K1-B5
gacttcaataacaaatatttcactagctactactcttcttagttcctctgttgtatcatttttattgctatatcctaatcaaacttcactctcaaaatgagtgatcccacactagcacaacagcatctagtcaaagtccacacaacaacacacgaaacagttgttaccacacacaatcataaccaaacaccctcaataaatgcctcaggtgaaaagaagaagattgtgggggtgttctacaaagggaatgaatatgctaaattgaatccaaattttgatggatgtgttgaaggtgcattgggaata

SEQ ID NO: 191 - DNA, 315 bp, Glycine max
  Clone ID: LIB3072-058-Q1-K1-H9
gacagcaaaaacaattaataaagatgagtttgaagaacaacatggtggtgctaaaggtgtgtttgttgcttcttttccttgtgggggttacagctgcacgcatggaactgagcttcttcaaaagtgatcagtcatcaagttatgatgatgatgagtattcaaaaccatgctgtgatctctgcatgtgcacacgctcaatgcctgctcaatgcagctgtgaagatattaggctgcattcatgccactcagattgtaagagctgtatgtgcacacgctcacagccaggacagtgtcgttgtcttgacaccaacgact

SEQ ID NO: 192 - DNA, 220 bp, Glycine max
  Clone ID: LIB3072-058-Q1-K1-G11
gatggactattggagcgccaccctctcacatggcggcagcaaccacaatttgctacggtccctcttctattggtctaaggtcaaatttacttaaacgaagacacttgaaaaacacttcgtttgctgatcgtttttctccttcaagatcattactttgtagcggatttgttccaaagaagcctgctttgggaagaaactctttctgggtatcaaaaatcat

SEQ ID NO: 193 - DNA, 127 bp, Glycine max
  Clone ID: LIB3072-058-Q1-K1-G12
gtaagtgatgacaaatataatcccagctctatgagaccttcgctactgcaaggtctgggattagatttgtttacagttgtctgagccacgttctcaaacgttatgtacatttttattatttctctct

SEQ ID NO: 194 - DNA, 334 bp, Glycine max
  Clone ID: LIB3072-058-Q1-K1-G2
ggtagcattcagtgaaacactagctagggtattgggagctctcgttgtttcggagttagggaccttacgcagccatggccactgctacgaatgccgccgccgccccaccacgccagctctcccagaaggaagctgacatccagatgatgttggccgccgacgtccacctcggcaccaagaactgcgacttccaaatggaacgttacatcttcaagcgccgcaacgacgggatttacattattaaccttgggaagacgtgggagaagcttcagctagcagctaggggggttatagttgcaattgagaacccccaagatatcattgttcaatctgc

SEQ ID NO: 195 - DNA, 360 bp, Glycine max
  Clone ID: LIB3072-058-Q1-K1-G3
gacagcaaaaacaattaataaagatgagtttgaagaacaacatggtggtgctaaaggtgtgtttgttgcttcttttccttgtgggggttacagctgcacgcatggaactgagcttcttcaaaagtgatcagtcatcaagttatgatgatgatgagtattcaaaaccatgctgtgatctctgcatgtgcacacgctcaatgcctcctcaatgcagctgtgaagatattaggctgaattcatgccactcagattgtaagagctgtatgtgcacacgctcacagccaggacaaaagtgtcgttgtcttgacaccaacgacttctgctacaaaccttgcaagtccagagatgactagaaaaact

SEQ ID NO: 196 - DNA, 337 bp, Glycine max
  Clone ID: LIB3072-058-Q1-K1-G5
gatagaagcaaagagattgtggaattggtgatcacacaacataagcatatatatagaaagatgtcaggggcacaaggggcacaaccaaaggagtcaaaaacagcaacaacatatgagtcagtagaaggaggagagaaccgaacaaggactgacttgctttcaagggaggatcaaggctgcattcaagtggaaaaacttcaggagaaggtccatgatcctgctggcaaaggtggtcctgtctttggtgctggcaaagatgaagacaaacaagacctttttggagttactggcacaggctaattaacctactatatatattactactatatactatata

SEQ ID NO: 197 - DNA, 353 bp, Glycine max
  Clone ID: LIB3072-058-Q1-K1-G6
ggcacaagtgagtttgttgatcgagatggctagaaacagtgtgatgaaaatgaaggtccttgttttcttcgttgctacaattttggtagcatggcaatgccatgcgtacgatatgttccctctccgaatgaacactggctatggtgcccgtactccggaggtgaaatgcgcaagttggaggcttgctgtggaagcacacaacatctttggctttgagaccattcctgaagagtgcgttgaagcaacaaaggaatacatccatggcgaacaatatagatcagacttttcaaaacagttaaccaacaagcttacttttatgccagagacctcgaagtccatcccaaggacacatt

SEQ ID NO: 198 - DNA, 323 bp, Glycine max
  Clone ID: LIB3072-058-Q1-K1-G7
gattcacacaactaacgaagaaagtcttccatagccccccaaaaatgaagagcaccatcttctttgctctcttcctcttttgtgccctcaccacctcatacctaccttcagccatcgctgatttcgtgctcgataatgaaggtaaccctcttgaaaatggtggcacatattatatcttgtcagacataacagcatttggtggaataagagcagccccaacgggaaatgaaagatgccctctcactgtggtgcaatctcgcaatgaaaggctcgacaaagggattggaacaatcatctcgttcccatatcgaatccgttttatc

SEQ ID NO: 199 - DNA, 337 bp, Glycine max
  Clone ID: LIB3072-058-Q1-K1-G8
gacagcaaaaacaattaataaagatgagtttgaagaacaacatggtggtgctaaaggtgtgtttgttgcttcttttccttgtgggggttacagctgcacgcatggaactgagcttcttcaaaagtgatcagtcatcaagttatgatgatgatgagtattcaaaaccatgctgtgacctctgcatgtgcacacgctcaatgccttctcaatgcagctgtgaagatattaggctgaattcatgccactcagattgtaagagctgtatgtgcacacgcttttacagccaggacagtgtcgttgtcttgacaccaacgacttctgctacaaaccttgcaag

SEQ ID NO: 200 - DNA, 356 bp, Glycine max
  Clone ID: LIB3072-058-Q1-K1-G9
gacagcaaaaacaattaataaaggtgagtttgaagaacaacatggtggtgctaaaggtgtgtttgttgcttcttttccttgtgggggttacagctgcacgcatggaactgagcttcttcaaaagtgatcagtcatcaagttatgatgatgatgagtattcaaaaccatgctgtgatctctgcatgtgcacacgctcaatgccttctcaatgcagctgtgaagatattaggctgaattcatgccactcagattgtaagagctgtatgtgcacacgctcacggtcaggacaagtgtcgtgtcttgacaccaacgacttcttgtacaaaccttgcaagtccagagatgacttgaaaaac

SEQ ID NO: 201 - DNA, 349 bp, Glycine max
  Clone ID: LIB3072-058-Q1-K1-H1
gacagcaaaaacaattaataaagatgagtttgaagaacaacatggtggtgctaaaggtgtgtttgttgcttcttttccttgtgggggttacagctgcacgcatggaactgagcttcttcaaaagcgatcagtcatcaagttatgatgatgatgagtattcaaaaccatgctgtgatctctgcatgtgcacacgctcaatgcctcctcaatgcagctgtgaagatattaggctgaattcatgccactcagattgtaagagctgtatgtgcacacgctcacagccaagggacagtgtcgttgtcttgacaccaacgacttctgctacaaaccttgcaagtccagagatgac

SEQ ID NO: 202 - DNA, 226 bp, Glycine max
  Clone ID: LIB3072-058-Q1-K1-H10
gacagcaaaaacaattaataaagatgagtttgaagaacaacatggtggtgctaaaggtgtgtttgttgcttcttttccttgtgggggttacagctgcacgcatggaactgagctttttcaaaagtgatcagtcatcaagttatgatgatgatgagtattcaaaaccatgctgtgatctctgcatgtgcacacgctcaatgccttctcaatgcacctgtgaagatat

SEQ ID NO: 203 - DNA, 211 bp, Glycine max
  Clone ID: LIB3072-058-Q1-K1-H11
ccagaggacgaccgacagagacagttaaaacatttaattaagatgagtctgaataacagccagcattgtctaaatgaatgtgtgcttcctccttcccttgctagggttacaaatacacgcatacaactgaacttgcttaaaaatgatcaaccattaagctctgattttaatgaatattcatattcaaaccttcatctctacatttgtacac

SEQ ID NO: 204 - DNA, 385 bp, Glycine max
  unsure at all n locations
  Clone ID: LIB3072-058-Q1-K1-H12
ggggatctatcacaatagaaagcaaagctatataggattatttgccatatcaagaaaatgaaaatccctttttattttcccatcctcgtgcttgttgtcttcattgcttctggaaaacaagtgcaaatgacagtggtaccaaattgtgtggtagaaagcttgtcagttcattgtgaaatattcaagaatccttgcgaacttctttgccaacaacatttggatcacccgcagcacatggagcttgtggcattaagttccatgtatgtgtttggtatttatgttaaatataaagtttaaccataacaatcacagctntcatacctatttatagtatgtaagccgatgaaaaaaataatttttaaataaatgacttcattatgaaccc

SEQ ID NO: 205 - DNA, 334 bp, Glycine max
  Clone ID: LIB3072-058-Q1-K1-H2
gagtgcaatttagctgaagcaaagcaatggctacttcaaagttgaaaacccagaatgtgggtgtatctctctccctaaccttaaccttggtactggtgctactgaccagcaaggcaaactcagcggaaactgtttctttcagctggaacaagttcgtgccgaagcaaccaaacatgatccttcaaggagacgctattgtgacctcctcgggaaagttacaactcaataaggttgacgaaaacggcaccccaaaaccctcgtatcttggtcgcgccctctactccacccccccatccacatttgggacaaagaaaccggtagcgttgtcagcttc

SEQ ID NO: 206 - DNA, 337 bp, Glycine max
  Clone ID: LIB3072-058-Q1-K1-H4
gacgcctaagccctctcttatttccagacgcggcggcttcttcttccgtttttgtctatcggcgtgaacaatggcgacttacgctgcgatgaagcccacaaagcccggcttggaggagccccaggagcagatccacaagataaggatcaccctttccttcaagcacgtcaaaaacctcgagaaggtttgtgcggacttggttcgcggtgcaaaggacaagcgcctcaaggttaagggacctgtcaggatgcccactaaggttcttctcatcactaccaagaagttttccccttgtggtgaaggtaccaacacatgggacagatttgaacttcgtgtg

SEQ ID NO: 207 - DNA, 127 bp, Glycine max
  Clone ID: LIB3072-058-Q1-K1-H5
aggtgtgcgaacacgtccgagaggacagaacacggacatccagtgacagaggcccacatagaaactggtttgccggtctgggatacacgcccagatggttattgttgacgcacgactccacatgctg

SEQ ID NO: 208 - DNA, 331 bp, Glycine max
  Clone ID: LIB3072-058-Q1-K1-G10
gaaaacatcaaaggcaaagttgctattgacattgttgatttaaagatggctaagatttctttcacaatcatttttgcttttgctcttatctttacagttatttcaagggcaagtgaagcaaccaccacagatgacaaacgtttaaaagtgtcggatcaaaataattgtgacctcactaagtgtcgggccaattgcaatcaacaatatcatggaactggacattgcattggcagaaatccttacaaatgtatttgcatatacgattgttctccgtagaatgatataccaattgttccaatttgaatacaaaaaataattaaataaggttaag

SEQ ID NO: 209 - DNA, 411 bp, Glycine max
  Clone ID: LIB3072-058-Q1-K1-D9
gacacaactaactaagaaggtcttccatagccccccaaaaatgaagagcaccatcttctttgctctctttctcttttgtgccttcaccacctcatacctaccttcagccatcgctgatttcgtgctcgataatgaaggtaaccctcttgaaaatggtggcacatattatatcttgtcagacataacagcatttggtggaataagagcagccccaacgggaaatgaaagatgccctctcactgtggtgcaatctcgcaatgagctcgacaaagggattggaacaatcatctcgtccccatatcgaatccgttttatcgccgaaggccatcctttgagccttaagttcgattcatttgcagttataatgctgtgtgttggaattcctaccgagtgggtctgtgtggaggatct

SEQ ID NO: 210 - DNA, 291 bp, Glycine max
  Clone ID: LIB3072-058-Q1-K1-E10
cacaaacacacaatttttgaaattgaaccaaaacacggggacctgtaggtagatctatctatatctctctctctatatctatctacagactccaataactttctctacaaccactaatataaactctcaatactaaatccttcttcccatctaactaaaacacaacttaccctctggaacattaaaaccatcaattctcaaaccccctaaaacactttacacccgaaaaattccaattcctaatgaaccaacatcatgctctaacccccctgcaatttcctatacccataa

SEQ ID NO: 211 - DNA, 384 bp, Glycine max
  Clone ID: LIB3072-058-Q1-K1-E11
gatatcttaatttcaaatcataaaattcttccaccaagttatgggtttccttgtgttgcttcttttctccctcttaggtctctcttctagttccagcatatcaactcatcgttccatattggaccttgacctaaccaagtttaccacacagaaacaggtgtcttcactgttccaactatggaagagtgagcatggacgtgtctaccataaccacgaagaagaggcaaagagacttgagattttcaagaataacttgaactatatcagggacatgaatgcaaacagaagatcaccccattctcatcgtttaggattgaacaagtttgctgacatcactcctcaagagttcagcaaaaagtacttgcaagctcccaaagatgtgtc

SEQ ID NO: 212 - DNA, 210 bp, Glycine max
  Clone ID: LIB3072-058-Q1-K1-E12
aggaacaccaaatacaactaatttagatgacgtcgcacaacaacatggtcattcgaaaagtgttaacagtgctacttttacctatcacatttacaaacgcactcatcgaacctaacattctcaaaactgatcagccatcaaattatcatgatgatcactattcaaaacacatctgcgatctctgaactttcacacactcaatacctcctc

SEQ ID NO: 213 - DNA, 350 bp, Glycine max
  Clone ID: LIB3072-058-Q1-K1-E3
gacgatgagtcgatttgataactaagatattgttattcgtgatattgatccaatttgatatcatcgaaatccaatttataccattgttgaattaattatcgatggaagatttatcatctctatgggattaaatcccgaatttttttattggaaatttaagagaaataaaacataataaagattatggaagtaaatattcttgcatttattgctactgcactgtttattctagttcctactgcttttttacttataatttacgtaaaaacggtaagtcaaaggggtgactaatttcactgaaatctgacttcttcatttttatcaatgtaatcaatgattaaaaaaaatga

SEQ ID NO: 214 - DNA, 351 bp, Glycine max
  Clone ID: LIB3072-058-Q1-K1-E6
gatgcaactgaataattaagaaaagccatttgcatagcagcctaagaagatgaagagcactagcttgttcgctatctttctactttgcgccttcacctcatacctaccttccgccaccgcccaggacgtgctcgacgtggacggcgatccgattcggaacggtttcatatactacgttttgccggcaataagaggaaacggtggcggaatagaacgagccgcactcgggaaagacacttgccctaccactgtagtgcaatctcccaatccaaactctaagggggggttagaaattaagtttgaatctgcataccccgcctattacataaacgaaaccctaattttgcaaat

SEQ ID NO: 215 - DNA, 117 bp, Glycine max
  Clone ID: LIB3072-058-Q1-K1-E7
ggtggactgcaagtgctgtttaactaatggagaaatctcactgataatggcatcacatggtaactaaaagcttggatcagggtcaggggtaaaaaaaagtaaaatgcacttgtatac

SEQ ID NO: 216 - DNA, 337 bp, Glycine max
  Clone ID: LIB3072-058-Q1-K1-E9
gacgcacgatggttgaaattgaagcaaagcacgtgtttgtgtgtgtagttctctctctctctctctctctctctctctctccaggctccaatggctttctctgcaatgactagcatgcactctcctcaatttctccgccttcccatctcccttccccgttcttcaccctctggtcgattttcaccgccaattctcaaacgccctaaaccactctccattcgatcagtttcaattcctgctgcaccagcatcagggtctctggcccctgcaatttctgttacggataatgtgctgaagcacttgaataagatgaggtctgaacgaaatcaagatttat

SEQ ID NO: 217 - DNA, 335 bp, Glycine max
  Clone ID: LIB3072-058-Q1-K1-F1
gataaaaagttagagatggcttcttcaagttttttatgtctgtgtttgatgtttgcttttgttgtggcttgctttgctcgtggcattcccacagaccaaccacccgtgctctacggagacacacacaagactccatctacttcaaacattgagcatcatcaatggtcgggagacaaagttacacacccaatttcaacccatgtcaagttctcaagtttcacagagaattcagaaaggatactgacagaggtagattatgacggtccacatttacacacccaaatccaccttctcatgctcagaagtttcgattgtaaacattgtcttctcaatga

SEQ ID NO: 218 - DNA, 303 bp, Glycine max
  Clone ID: LIB3072-058-Q1-K1-F11
taatttgggaattattgctcccatcgccattggtttcattgtcggcgctaacattttgttgggtggggccttctctggagcggccatgaaccccgctgtgacatttgggcctgctgtcgtgagctggaccaggaccaaccactggatctactgggccgggcctctcatcggtggtggaatcgctggccttgtttacgaggttgtctttatcagccacacccacgagcagcttaccaccactgactactagagggggggaaatgaaaattaaaaaaaaaaaattgcgtattattgaatttctct

SEQ ID NO: 219 - DNA, 389 bp, Glycine max
  unsure at all n locations
  Clone ID: LIB3072-058-Q1-K1-F12
ggggatctatcacaatagaaagcaaagctatataggattattggccatatcaagaaaatgaaaatccctttttattttcccatcctcgtgcttgttgtcttcattgcttctggaaaacaagtgcaaatgacagtggtaccaaattgtgtggtagaaagcttgtcagttcattgtgaaatattcaagaatccttgcgaacttctttgccaacaacatttggatcacccgcagcacatggagcttgtggcattaagttccatgtatgtgtttggtatntatgttaaatataaagcttaaccctaacaatcacagctttcatacctatttaatagtatgtaagccgatgaacaanataaatatataaataaaatgacttcattaatagaccc

SEQ ID NO: 220 - DNA, 324 bp, Glycine max
  Clone ID: LIB3072-058-Q1-K1-F2
ggttctagtgtatgtgattgttgtgactcgttcttcttcgtcgttatcttcttcttttgatgtttgtgtgtttgttttttctctcacctgaaaatgtcttgctgcggtggtaactgtggttgcggaaacgcctgcaagtgcggcaacggctgcggaggctgcaagatgtacccagacttgagctacaccgagtcaaccaccaccgagaccttggtcatgggagtggcaccagttaaagctcaattcgagagtgctgaaatgggtgttcccgctgagaacgattgggctgcaaatgtggagctaactgcacctgcaacccctgca

SEQ ID NO: 221 - DNA, 72 bp, Glycine max
  Clone ID: LIB3072-058-Q1-K1-F3
cccacgcgtccgcccacgcgtccgcccacgcgtccgcccacgcgtccgcccacgcgtccgcccacgcgttcg

SEQ ID NO: 222 - DNA, 330 bp, Glycine max
  Clone ID: LIB3072-058-Q1-K1-F5
ggcttattcacgcagctaaataagaaatgaagagtactatcttctttgctctctttctagtttgtgccttcaccatctcatacctgccttcagccaccgctcagttcgtgctcgacactgatgatgatcctcttcaaaacggtggcacatactatatgttgccagttacgagaggaaagggcggtggaatagaagtagattcaactggaaaagaaatatgccctctcactgttgtgcaatcacccaatgagctcgataagggggggattggactagtctttacatctccattacatgccctttttatcgccgaaggctatcctttgagca

SEQ ID NO: 223 - DNA, 340 bp, Glycine max
  unsure at all n locations
  Clone ID: LIB3072-058-Q1-K1-F6
ggagggtgaccggtgaacacaatacagggcagcatcgccatgggattgagtattctgagaagcacttccatttccactcctatctcttcctccaaatccaaacccattttctcaactcttgttcgttcatctttcgcctccatttcccccacaaagtgtgttactcccaccactcttttcgtttctgccacccccttcttcaccgcctcacccaagcgcggctttcgtggtgggattgtggccatggccgncgctggctcgctccgcaaatcagaagggaaagagtggcgcgcagttctctcccctgaacagtttcgtattctcaagcaaaagggcaccg

SEQ ID NO: 224 - DNA, 333 bp, Glycine max
  Clone ID: LIB3072-058-Q1-K1-F7
ggtagttcaattccaatatattccattctctctgtgtatttccctacctctcccttcaagatgcagatcttcgtcaagaccctcaccgacaagaccatcacccttgaggtggaaagctctgacaccatcgacaacgtcaaggccaagatccaggacaaggaaggaatccccccggaccagcaacgtctcattttcgccggaaagcaacttgaggacggccgtacccttgctgactacaacattcagaaggagagtactcttcaccccctcgtcctccgtctccgtggtggcatgcagatcttcgttaagacactcaccggcaagaccataacc

SEQ ID NO: 225 - DNA, 324 bp, Glycine max
  Clone ID: LIB3072-058-Q1-K1-F9
ggccctgagagagagaattggaaggttgcgacgagtgatgatatacacatattgtgacggtagtgaaatcgaggaaaaagaggtagcaatttgcgagttgcaatgagtaacgaaaaggctccttcatcagcttcttcgagtagctacgagttgagcaaaggcatcaatggcctcgacaaggttattcttcgcgacgcacgtggtagccccgctgaggtgtacttgtacggtgctcacgtgacttcatggaagaatgaccatgccgaggaattgctttttctcagtagtaaggctatctttaagccttcaaagccaattcgtgga

SEQ ID NO: 226 - DNA, 342 bp, Glycine max
  Clone ID: LIB3072-058-Q1-K1-G1
gattcctgacgttttgatatcaagtggacatacgtgaagattttaattatcagtctaaatatttcattagcacttaatacttttctgttttattcctatcctataagtagtcccgattctcccaacattgcttattcacacaactaactaagaaagtcttccatagccccccaaaaatgaagagcaccatcttctttgctctctttctcttttgtgccttcaccacctcatacctaccttcagccatcgctgatttcgtgctcgataatgaaaaaggtaaccctcttgaaaatggtggcacatattatatcttgtcagacataacagcatttggtggaataa

SEQ ID NO: 227 - DNA, 395 bp, Glycine max
  Clone ID: LIB3072-058-Q1-K1-C11
gacaggtgtttgcaatactagcgatagctgataagagagataccaacaagaaaagaaaaaaagaagagttgagattccctttgaagaaaagatggcatcccataggcaaagctatgaagctggtcaaactaagggccgaactgaggaaaagacgaaccagacgatgggcaatattggagagaaggctcaagctgcaaaggagaagacccaggaaatggcccaagctgcaaaggagaagacccaacaaacagcccaagctgccaaggacaagacttgcgacacttcccaagcggcaaaggagaagacccaacagaatacaggagctgctcaacaaaagacctcagagatgggccagtccacgaaggaatcggaccagtcagggaaggacaacaccc

SEQ ID NO: 228 - DNA, 275 bp, Glycine max
  Clone ID: LIB3072-058-Q1-K1-C12
ggtgtctgctcactcgctcttctccgccacttctgaatctatggaatcaacaatcatgtcggacgaagagcaccatttcgagtccaaggccgacgccggagccttcaaaacctaccctcagcaagccggtaccatccgcaagaacggctacatcgtcatcaaaggcccgccctgcaaggttgtggaagtttcgacttccaaaactggaaagcacggtcacgctaagtgtcacttttgtggaattgatattttcacttgccagaaacttgaggata

SEQ ID NO: 229 - DNA, 351 bp, Glycine max
  unsure at all n locations
  Clone ID: LIB3072-058-Q1-K1-C3
gacagcaaaaacaattaataaagatgagtttgaagaacaacatggtggtgctaaaggtgtgtttgttgcttcttttccttgtgggggttacagctgcacgcacggaactgagcttcttcaaaagtgatcagtcatcaagttatgatgatgatgagtattcaaaaccatgctgtgatctctgcatgtgcacacgctcaatgcctcctcaatgcagctgtgaagatattaggctgaattcatgccactcagattgtaagagctgtatgtgcacacgctcacaggnntcaggacagtgtcgttgtcttgacaccaacgacttctgctacaaaccttgcaagtccagagatgact

SEQ ID NO: 230 - DNA, 324 bp, Glycine max
  unsure at all n locations
  Clone ID: LIB3072-058-Q1-K1-C4
gactcactcatacaatagagaccagcttttgcttctttgtgaacatggagatgaggaaatcatgtggcttcttcttcttgctcctcctccttgtctttgcttcccaggtggtggtgcagacggagggaagagtgtgtgagtcacaaagccacgggttccatggtttgtgtaatagagaccacaactgtgctttggtctgcaggaacgaaggtttctccggtggcaggtgcaaaggcttccgccgncgctgcttttgcacccccaggatttgttgagatctcatcaaacactactcttgccatgcaaattaataaatcatagcta

SEQ ID NO: 231 - DNA, 342 bp, Glycine max
  unsure at all n locations
  Clone ID: LIB3072-058-Q1-K1-C5
gattcacgcaactaaataagaaatgaagagtactatcttctttgctctctttctagtttgtgccttcaccatctcatacctgccttcagccaccgctcagttcgtgctcgacactgatgatgatcctcttcaaaacggtggcacatactatatgtagccagttatgagaggaaagggcggtggaatagaagtagattcaactggaaaagaaatatgccctctcactgttgtgcaatcacccaatgagctcgataaggggattggactagtcttntttacatctccattacatgccctttttatcgccgaaggctatcctttgagcattaagtttggttcatt

SEQ ID NO: 232 - DNA, 452 bp, Glycine max
  unsure at all n locations
  Clone ID: LIB3072-058-Q1-K1-C9
ggtggtcgtcgaagcgcgagcaagcatcccaaaaccctagctcgcgttctgctttcgtcttttacatcaggatggagtctcaggtgaagcacgcacttgttgtcaaagttatgggtcgtactggatccagaggacaagtaacccaggttagagtgaaatttttggatgatcagaaccgtcacatcatgaggaatgtgaaaggacctgtgcgagaaggagacattctcaccctactcgagtctgaaagggaagcaagaagattgcgctagatggtttcttttggcttgcctccaaattcgaacaaaacagtgtgattatgttgattntaatggtagttggtggatgtcaaaggttntagcaccctatcttatngtctgtctttggtctattcttattcgaattatggcgtgaactttggatgatttgagtttaagcttcaagggtttagtatg

SEQ ID NO: 233 - DNA, 343 bp, Glycine max
  Clone ID: LIB3072-058-Q1-K1-D1
agtggtcctgagagccctgccagtgccaagggaaatgtgaaggatatggcgaagaatatttttaaacatgcagaaaaatcggctcgtggcttgaggcacgttctttcttgtaaatcaaggaaattgaaatttaaaggtgagtctccaacagttccagaaagagaacatgaatctgactcttctgacgaggaatctattgcagctcaatctcccatagatgtaataagaactccagttggttctcatgctgtggtctcaggtagcaatggttcccctggttccctggggtgaacgtggttcaaatagttccatcaaacactaatttggacaatgaagccacagc

SEQ ID NO: 234 - DNA, 336 bp, Glycine max
  Clone ID: LIB3072-058-Q1-K1-D10
gattcttcaagatgatgaaaatgttggaggccttgaagtgctccacagttctacttcttttgtgccaatccctcttttccctggatcccttctagtcaatcttggagatattgctcgtgtgtggagcaatggaaggttttgcaatttgacacaccgggtacaatgcaaggaagcgaccaaacgtttttcaattgctacatttatgatagcacccaagaataggaatgttgaagccccagcagaattggtggaccatgatcacccacgtttgtatcaaccttttatttatgaagactacaggaaagctcagaattagcaataagatgcacacttgtg

SEQ ID NO: 235 - DNA, 402 bp, Glycine max
  Clone ID: LIB3072-058-Q1-K1-D11
tgtggtcaattgaatggccatgagttttttcatcacagattgttgccaatactgctcttgagtcacccagattagcaatgacaagaccttcaccctatgtattgttattgttacattatgttctttttccctatattgaacatgaaaactatgggaaggtccatttacctgtgttttatgataactacagcagtggttccactgctagagcaatctaaattcttttgaagcttcacctacttgtccatcaccttgaaagcacttaaaattgcttctttccatttcttgcagtcgattcctctcttactgtgtcaacataggtctttgtggtgtactaaccattctttattgcatcaatcttttcaagaacattcttttggtccagtatgagggaagataaac

SEQ ID NO: 236 - DNA, 416 bp, Glycine max
  Clone ID: LIB3072-058-Q1-K1-D12
gattcacacaactaactaagaaagtcttccatagctccccaaaaatgaagagcaccatcttctttgctctctttctcttttgtgccttcaccacctcatacctaccttcagccatcgctgatttcgtgctcgataatgaaggtaaccctcttgaaaatggtggcacatattatatcttgtcagacataacagcatttggtggaataagagcagccccaacgggaaatgaaagatgccctctcactgtggtgcaatctcgcaatgagctcgacaaagggattggaacaatcatctcgtccccatatcgaatcccgtttatcgccgaaggccatcctttgagccttaagttcgattcatttgcagttataatgctgtgtgttggaattcctaccgagtggtctgttgtggaggatcta

SEQ ID NO: 237 - DNA, 350 bp, Glycine max
  unsure at all n locations
  Clone ID: LIB3072-058-Q1-K1-D2
gacagcaaaaacaattaataaagatgagtttgaagaacaacatggtggtgctaaaggtgtgtttgttgcttcttttccttgtgggggttacagctgcacgcatggaactgagcttcttcaaaagtgatcagtcatcaagttatgatgatgatgagtattcaaaaccatgctgtgatctctgcatgtgcacacgctcaatgccttctcaatgcagctgtgaagatattaggctgaattcatgccactcagattgtaagagctgtatgtgcacacgctcacagcnnccaggacagtgtcgttgtcttgacaccaacgacttctgctacaaaccttgcaagtccagagatgac

SEQ ID NO: 238 - DNA, 349 bp, Glycine max
  Clone ID: LIB3072-058-Q1-K1-D3
ggctgtgagtgagattacccatagatagagagcgcggcataacctaaacttacccttcttctctctgtgtgtgtgcgcatcaaacgcaaccagaagcagccatggccactgcaagaactgtgaaggacgtttctcctcatgagttcgtcaaagcttactcttctcacctcaagcgatctggcaagatggagctgccagagtggactgatattgtgaaaactgcaagatttaaggagttggctccttatgatcctgactggtactatgtcagagctgcttccaaatggcaagaaagatctacttgagaggaggacttggtgttggtgcctttcagaggatttatggtggg

SEQ ID NO: 239 - DNA, 311 bp, Glycine max
  Clone ID: LIB3072-058-Q1-K1-D4
gattcacacaactaactaagaaagtcttgcatagcgcggccaaaaatgaagagcaccatcttctttgctctctttctcttttgtgccttcaccacctcatacctaccttcagccatcgctgatttcgtgctcgataatgaaggtaaccctcttgaaaatggtggcacatattatatcttgtcagacataacagcatttggtggaataagagcagccccaacgggaaatgaaagatgccctctcactgtggtgcaatctcgcaatgagctcgacaaatggattggaaaaacaatcatctagttcccatatcg

SEQ ID NO: 240 - DNA, 338 bp, Glycine max
  Clone ID: LIB3072-058-Q1-K1-D6
gacagcaaaaacaattaataaagatgagtttgaagaacaacatggtggtgctaaaggtgtgtttgttgcttcttttccttgtgggggttacagctgcacgcatggaactgagcttcttcaaaagtgatcagtcatcaagttatgatgatgatgagtattcaaaaccatgctgtgatctctgcatgtgcacacgctcaatgcctcctcaatgcagctgtgaagatattaggctgaattcatgccactcagattgtaagagctgtatgtgcacacgccttcacagccaggacagcgtcgttgtcttgacaccaacgacttctgctacaaaccttgcaagt

SEQ ID NO: 241 - DNA, 418 bp, Glycine max
  unsure at all n locations
  Clone ID: LIB3072-058-Q1-K1-C10
gacagcaaaaacaattaataaagatgagtttgaagaacaacatggtggtgctaaaggtgtgtttgttgcttcttttccttgtgggggttacagctgcacgcatggaactgagcttcttcaaaagtgatcagtcatcaagttatgatgatgatgagtattcaaaaccatgctgtgatctctgcatgtgcacacgctcaatgccttctcaatgcagctgtgaagatattaagctgaattcatgccactcagattgtaagagctgtatgtgcacacgctcacagccaggacagtgtcgttgtcttgacaccaacgacttctgctacaaaccttgcaagtccagagatgactagaanaactaatagctctctcaaatggacgaagcccctttaggctttnngttgtatgtaggggagacaaa

SEQ ID NO: 242 - DNA, 342 bp, Glycine max
  Clone ID: LIB3072-058-Q1-K1-D7
gaatagaaatagaactggcttttcatatagatatcccttcaacacaacataggtcatcgaaaggatctcgaagacccaccaacgcacgaaagccgggatctttcagaaaatggattcctattcgaagggtgcataaccgcatggataagctcacactaacccgtcaatttgggatccaattcggttccttaggaggtatcgggaaggaattttggaatgtaataatatcgattcatacagatacagaagaaagggttctctattgattcaaacggggctctacctacgagatagggatagagaaagaggaaaaaaccgaggatttcacatagtacttttggt

SEQ ID NO: 243 - DNA, 329 bp, Glycine max
  Clone ID: LIB3072-058-Q1-K1-A5
gaaggcaatatatattcagaataaaacaacaatcagttaggagtgttgagtaagatcaaaatatggcagacttgatgaaaagaatcctcgaaatgattgaggccgagcaagctaggaaagggtccaatcatggtacctcaaactcacataacacctatggcagcggaagccagaatggatcaaccatcaacagcggcaatcatcataacaacggcaactggtatgacgactcataccactatggtgaacgccctatttataacgacggtacttttttcaatggtaatggcaacggggcacatgttgagggtggctttgacttcttaaca

SEQ ID NO: 244 - DNA, 262 bp, Glycine max
  Clone ID: LIB3072-058-Q1-K1-A6
gactttgagttcgaactaaacaattcaattcaatctgcctcgatcatggaaaggaaaacatttgggttttggttcttgctcctccttgcctaaccttctgatgtgacggtgaaaagagcaaaggcaaaagattgcttgacaaggaggcacgggttccagggtagatgcttattcgacaggcaatgtgcacatgtgtgcaggagcgatggtttcatcggtggtcagtgccgaggccctcttcgcaaatgcttttgcagcaggc

SEQ ID NO: 245 - DNA, 316 bp, Glycine max
  unsure at all n locations
  Clone ID: LIB3072-058-Q1-K1-A7
ggatctgttgttgtgttgggtaagcatgttccgttcattgctccgccgcccgttttcgacgacgtcggcgagggcgttgaagcactgcgagaaccacgagtttctctctaagaactcgttcctgggaagctgggatgcgccacgggaccccaaggaggcggaagcgaagctaacgcgtcttcgaagagaatacgcattgcaagtgaaggaggttcggaaggaatacataagagagatggaggtcatgaagattgagaaggagcgcaaggacgnnaaggctcgcagggaagcactcagagtcgccaacgaagagcgc

SEQ ID NO: 246 - DNA, 333 bp, Glycine max
  Clone ID: LIB3072-058-Q1-K1-A8
tggcagtggaacaacagttggggagtcaatcgaaatcggcggaaatggttgccatgaggtttcaccagtaccaggtggtggaaagggctcttcctaccgaatccgatgagcatcctaagatctaccgcatgaaactttgggccaccaacgaggtccgtgccaaatccaagttctggaattttttgagaaaattgaagaaggttaagaaaagcattggacaagtgctagccatcaatgagatttttgagaagaatcctaccaagattaagaattatggaaaaatttggctgcgttatcaaagccgcactggtatcacaatatgtccaaggaata

SEQ ID NO: 247 - DNA, 521 bp, Glycine max
  unsure at all n locations
  Clone ID: LIB3072-058-Q1-K1-A9
gacgactgcacgggactcactcatccaatatgagaccagcaccatgatcagtttgtgaacatggagatgaggaaatcatgtggcttcttcttcttgctcctcctccttgtctttgcttcccaggtggtggtgcagacggagggaagagtgtgtgagtcacaaagccacgggttccatggtttgtgtaatagagaccacaactgtgctttggtctgcaggaacgaaggtttctccggtggcaggtgcaaaggcttccgccgccgctgcttttgcaccaggatttgttgagatctcatcaaacactactcttgccatgcaaattaataaatcatagctaggccaaataaattgcatctactctntatccatttgggagctagctaccacaaccaactcatacttggtcattggattgcttccctttggcttctgcctttgcttatctctctacctctacgtcttggtcagggcttatgtttcggaatgattaatgaatgctggttaattaacttgccgaaaaa

SEQ ID NO: 248 - DNA, 349 bp, Glycine max
  Clone ID: LIB3072-058-Q1-K1-B1
gacagcagagaaagaagcttcacaattgacattcccaccaacggaaccatggcctccgtgtacagctgtacggagtgcggatccaacctgaatcttaactccgctcatgcctaccctccagacttctacttcgaagccggcaacaagggctccgtctccttctccgccgtggaccccaccaagttcaagttcgagaaggaggacaagcttcgccccttcttcgaaaccgtcaactactggggaatccagaggaagaggaccaagatcaagcgcaacaccttgggtgactgtctccttggctacgtctatgacgatggtccacctcttaccaatagtcccggtcaatttc

SEQ ID NO: 249 - DNA, 413 bp, Glycine max
  Clone ID: LIB3072-058-Q1-K1-B11
gacacttactagtagtaagcatggagtcctcaaagatctatgcttacctattactctgcatgatctttctctcttccgccactcccattctcgggtgtagctactgtggcaaaccccccaaaaagcacaagcctggtaaaacaccatagacacccaaaacacccgttgctaagccaccagtcaccatccctcccattaatgttcctaccgttggtcttgcaccaatagtgaagcccccaggtattctccctccaattccaattattaacccaccaaccacaccaaggaacggagggaacactccatgcccaccaccaaagtcttctgcgcaggctacgtgctccattgacacgttcaaactaggcgcctgtgtggatctccctggagggttggttcacattggcttgggtgac

SEQ ID NO: 250 - DNA, 324 bp, Glycine max
  Clone ID: LIB3072-058-Q1-K1-B2
gacgcacttagcaatcaatcaaaacattcccaataacaataatatacacatcttcaattaagctccttctcctatagccatggctctttctaagcttataattgcttcccttcttgcgtcgcttctccttcttcatttcgttgatgctgatcaatcggcacatgcacaaacgcaggggtctcttcttcagcagatagattgtaacggagcatgtgctgcgaggtgccgtttatcatctcgtccacgcctctgccaaagaagagcttgtggaacttgttgtagacgctgtaactgcgtgccacctggcactgctggaaaccaaga

SEQ ID NO: 251 - DNA, 172 bp, Glycine max
  Clone ID: LIB3072-058-Q1-K1-B3
ggagagagaggctgaaacaaagaagtgaaaataacagcaaaaagtagcagctgctgcagctcccccgaagcttatctcagcagcagatactcaaccctgtttgagtagccgagaataacaccaatgggagaggaggaaaagaaaccagaggaacaacccaaggcagaggagg

SEQ ID NO: 252 - DNA, 341 bp, Glycine max
  Clone ID: LIB3072-058-Q1-K1-B5
gacggcgacagcgaaagaaattaggagaggtgaggtgaccaccgacgattccatttctacgaactcagacccttcaattccaactcgtaccttatttctatctatttctttttcatgtttcattatttttctcaattttcttttgttccgcctttgatctgattcctagttattagggcttatatcgtgtatttggggttttcattttgtgtatgcactctgcaaatcgttcgtgtatttcttctgtttgattcgtctttatggaatatcattttttcaaatgcatataactagggcagattaattaccggtgtaattgatatattatgttttcagacttt

SEQ ID NO: 253 - DNA, 346 bp, Glycine max
  Clone ID: LIB3072-058-Q1-K1-B6
gacagcaaaaacaattaataaaggtgagtttgaagaacaacatggtggtgctaaaggtgtgtttgttgcttcttttccttgtgggggttacagctgcacgcatggaactgagcttcttcaaaagtgatcagtcatcaagttatgatgatgatgagtattcaaaaccatgctgtgatctctgcatgtgcacacgctcaatgcctcctcaatgcagctgtgaagatattaggctgaattcatgccactcagattgtaagagctgtatgtgcacacgctttcacagccaggacagtgtcgttgtcttgacaccaacgacttctgctacaaaccttgcaagtccagagat

SEQ ID NO: 254 - DNA, 315 bp, Glycine max
  Clone ID: LIB3072-058-Q1-K1-B7
ggaattcacacaagagatggcttctcctcttcttactccttacaagatgggcaaattcaatctgtcccatagagttgttttggcaccgctgaccagacagaggtcttacgacaacgtcccacaaccccatgccatcctctactactcccagagaacttccaacggaggccttctcattactgaagccactggcgtctctgacacggctcaaggctatccgcaaacccctggcatatggactaaagacccaaatgttcaagcttggaaacccattgtcgatgccgtccacgccaaaggcggtgttttcttctgtca

SEQ ID NO: 255 - DNA, 310 bp, Glycine max
  Clone ID: LIB3072-058-Q1-K1-B8
agggacagcaaaaacaattaataaagatgagtttgaagaacaacatggtggtgctaaaggtgtgtttgttgcttcttttccttgtgggggttacagctgcacgcatggaactgagcttcttcaaaagtgatcagtcatcaagttatgatgatgatgagtattcaaaaccatgctgtgatctctgcatgtgcacacgctcaatgcctcctcaatgcagctgtgaagatattaggctgaattcatggggccactcagattgtaagagctgtatgtgcacacgctcacagccaggacagtgtcgttgtcttga

SEQ ID NO: 256 - DNA, 456 bp, Glycine max
  Clone ID: LIB3072-058-Q1-K1-B9
aacgacgagaatctcagaatgatgacactcgccatacccgttaacaaacccggtagatttgagagtttcttcctatctagcactcaagctcaacagtcctacttgcaagggttcagcaagaatattctagaggcctcatacgacaccaaattcgaggagataaacaaggttctgtttggtagagaggaggggcagcaacaaggggaggagaggctgcaagagagtgtgattgtggaaatctcaaagaaacaaattcgggaactgagcaaacatgccaaatctagttcaaggaaaaccatttcttctgaagataaacctttcaacttgagaagccgcgaccccatctattccaacaagcttggcaagttggttgagattaccccagagaaaaacccttcagcttcggacttggatgtcttcctcagtggtgtggatatgaacgagggagctcttttt

SEQ ID NO: 257 - DNA, 349 bp, Glycine max
  unsure at all n locations
  Clone ID: LIB3072-058-Q1-K1-C1
ggtgtgcttctctaccagccactgcccgcgttctctgttggcccttccctctcaacaaaattatgtgccgcccctgtagccactggccatcgaatgtcaccactccatactcccaaagtgtaaccattggcaaaaactccatctctctcactctccaaactcaaacttttaccaaatctctcaccttcgtgagcaaagtaagaagcttcgtgcaaattggagaatgaatccccaatcaaagactagagagatcaatgttttgaaaggcaaaatgagaaatcncccttaaatcgggtcttatttttattatttcattttctgcattcatcacttgttcttgcaggttccg

SEQ ID NO: 258 - DNA, 205 bp, Glycine max
  Clone ID: LIB3072-058-Q1-K1-A3
gacagcataaacaattaataaagatgagtttgaagaacaacatggtggtgctaaaggtgtgtttgttgcttcttttccttgtgggggttacagctgcacgcatggaactgagcttcttcaaaagtgatcagtcatcaagttatgatgatgatgagtattcaaaaccgggctgggatctctggatgggcacacgcttaatggcttc

SEQ ID NO: 259 - DNA, 269 bp, Glycine max
  Clone ID: LIB3072-057-Q1-K1-F8
ggtagtgggagacgcagtgactaaaccaaacctttcactcgccgtcgtagggtttatcctttcgcttagcgacaacaacaatggttgcagccaagaaaaccaagaagacccatgagagcattaacaacaagctcgctcttgtcatgaagagtggaaaattcaacctctgctacaagacggttctcaaatcacttaggagcttcaaagggaaaatgattatcaatgctaacaacttgccccctttgaggaaatcaagagatggatactat

SEQ ID NO: 260 - DNA, 415 bp, Glycine max
  Clone ID: LIB3072-057-Q1-K1-G1
ggttgaacttcattgtttatggctaaacctcgaaatccagaaagatcgcgagcgaagatgatgcacatggccttttactggagcaggaaggtgaatctcctaatagattcatggaagaccaacgattggacggagtatctcatcactctgctcgcatgcctcgtcgttgccgccttctaccagttcctagagaatcgccgcatccgcctcaagctcatcggcgccggaaatcccttcccggcagagatcgaggccccgcttctgcgacggaagcttgccggaaaccgcgccaaggtgggcgtgaaggtagccggagcgtttcttgttcggctgagctcggcgatcgggtacttgctgatgttgtcggtgatgtccttcaacggtggggtgtttgtggccgtcgtcgtgggtcttg

SEQ ID NO: 261 - DNA, 479 bp, Glycine max
  unsure at all n locations
  Clone ID: LIB3072-057-Q1-K1-G2
ggggagtgaactgaaaaagcataaagtatggcttcgacggcagcgtaccttgctcggcgcgcggcgcagaaggagagggttcggatcctctaccgccgcgccctcaaagacactctcaactgggccgtacatcgccacctcttctacgacgacgcttcaaacctccgcgaaaggttcgaggagaacagacacgtggaagaccctgataccattgacaggctcataacggatgctgaagcttcctacaacaagtggcgccatcccgatccctatattgttccttgngctcctggtggttccaagtttactcgcaacccaactccacctcaagggattgagatagtttataattatggccgtgaagatgatgactgaaatcttattttattttttttgcacccttgcaatgaataaaagtctgcaatcaaactgttccgtattcacaaaatgataccgattgagtccatccatgcttatga

SEQ ID NO: 262 - DNA, 501 bp, Glycine max
  Clone ID: LIB3072-057-Q1-K1-G4
gctgaacatattatttgatcatgtattcgttgacagtgaaacctttcttcacacctaatttagtttcttgttcttcaacttccacttcgtcctcttcgatttctctcgtgtcctttccatctcgttcggtctcatcaattagcttttccagaaatttaaagcccaaaggaagatttggtctcagagttgaagcatacgattcctccaataatgacaattccaaccccgccagtgctggcgactccaaaccccctaatggcactttgtcaaagagcaggagagaaattttactggaatatgttaagaatgtgcagccagaatttatggaattgtttgtgaaaagagcaccgcaacaagttgtggatgcaatgcgacaaacagtgacaaatatgattggaacacttgcctctcaattttttgctgtaacaattaccactgtagcttgaaaccttgcacagctcatgtacagcatcatgatgactggatacatgttcaagaatg

SEQ ID NO: 263 - DNA, 240 bp, Glycine max
  Clone ID: LIB3072-057-Q1-K1-G5
gacaataagaatttaacactgatacaaaattctgagataagttgtaaagactcagagaaaagttatggcaaagaaggagatgaaatctaccggagtgacaattatgatcatgattatgttgggctatgcgcaagctaattataattctccatttgtgaaaattgagcctaacaacacaacggataaacttacatgtcctgcacaatgtggtatagattgcttcattgctaacattgcata

SEQ ID NO: 264 - DNA, 348 bp, Glycine max
  Clone ID: LIB3072-057-Q1-K1-G8
ggcagccgacacaatgaatcaatatgagtccgaagaacaacatgcgggaactaaacgtgtgcacattgccactttaccatgtgggggttacagctgcacgcatggaactgagcttattaatgagagatcagtccttaagatatgatcatgatgagtattgaaaaccatgctgaagatctatcgatgtgtacacgcttaatggactggtaatgcagctgtcaatatcttatgctgaaatcatgccactcagatcgttagaactggatgtgcacacggttacagcctggacagcgtcagtgtcttgacaataacgactattgctacgaatcttgcaagtgcagatatcac

SEQ ID NO: 265 - DNA, 263 bp, Glycine max
  Clone ID: LIB3072-057-Q1-K1-H1
gacagcaaaaacaattaataaagatgagtttgaagaacaacatggtggtgctaaaggtgtgtttgttgcttcttttccttgtgggggttacagctgcacgcatggaactgagcttcttcaaaagtgatcagtcatcaagttatgatgatgatgagtattcaaaaccatgctgtgatctctgcatgtgcacacgctcaatgcctcctcaatgcagctgtgaagatattaggctgaattcatgccactcagattgtaagagctgt

SEQ ID NO: 266 - DNA, 289 bp, Glycine max
  unsure at all n locations
  Clone ID: LIB3072-057-Q1-K1-H3
accggaggggacggcaaaaccattataaggatagtttgagaaccacatggggtgctaaagggtgttggttgcttcttttccttgtggggttacagctggacgcatggaactgagcttttttcaaagtgatcagtcatcaagttatgatgatgatgagtattcaaaccatgctggatctctgatgtcacacgctaatgcctctcatgcactgtgaaatatangctgaattatgcactcagatgtagagctgatgtcacacgctacagncagacagtgtcgtgtctgacac

SEQ ID NO: 267 - DNA, 273 bp, Glycine max
  Clone ID: LIB3072-057-Q1-K1-H4
ccacgcgtccgagacgacaggagatgacgaccacatacagcacgagatttaggcacttatagaaaatggtattaacatcatggtatctttggcaagagtgtaatttgcgactcacgataccacatgctacagatgctcgcatcgatcgtagctaatgaacttctgaatggtcataacgtgatgatgatactctgcaatgagatttgcatttacagttgtctctgcacgcacaatatgaactacttgcgtttacttcgtaagcgcatgaacacc

SEQ ID NO: 268 - DNA, 347 bp, Glycine max
  unsure at all n locations
  Clone ID: LIB3072-057-Q1-K1-H7
ggagagaggctgaaacaaagaagtgaaaataacagcaaaaagtagcagctgctgcagctcccccgaagcttatctcagcagcagatactcaaccctgtttgagtagccgagaataacaccaatgggggaggaggaaaagaaaccagaggaacaacccaaggcagaggagaaaaaaccagaggaagagaagaagaaagaagaagcagcagcagcggaaaaaccaagcgaagagaaaaaaccggaacaagagtcgaaagaggaagttgctgcttcgncaccgncaccgncaccggccgagattgtgctcaaagtgttcatgcattgcgagggttgcgctcgcaagggtc

SEQ ID NO: 269 - DNA, 284 bp, Glycine max
  Clone ID: LIB3072-058-Q1-K1-A10
gactttgagttcgaactaaacaattcaattcaatctgcctcgatcatggagaggaaaacatttgggtttttggtcttgctccttcttgtcttagcttctgatgtgacggtgaagagagcagaggcgaaagattgcttgacaaggaagcacgggttccaaggtggatgcttattcgacaggcaatgtgcacatgtgtgcaagaaccatggtttcatcggtggtcagtgccgaagccctcttcgcaaatgcttttgcagcaggccatggtgatcgaaattactact

SEQ ID NO: 270 - DNA, 341 bp, Glycine max
  unsure at all n locations
  Clone ID: LIB3072-058-Q1-K1-A11
gcccattttgtgaaattcaattccaagggtttccattttccatttcaatgtcttcccattcgcacaaaggcacctncttctacggcgatgccgccccttatcgatccagagaggggcttagcactcgacccgttgcatcctccgatgaaatccaattgcacatcgatcccggcatcgacttcgacgacgaaatcaccggtcttcgtggccaagttaaaaaattgaaaaatgttgctgaagagataggttcagaagtcaagtttcaaagagattttctggaacaagtgcaaatggtgatgatacaagctcaaactggggtcaagaataacttaagaagattg

SEQ ID NO: 271 - DNA, 244 bp, Glycine max
  Clone ID: LIB3072-057-Q1-K1-F7
gggtgctgatcggaacaaacagggaatagaagagaggagaagatgggtttcataatggaatttgcggagaacttggtattaaagttgatggaagatccgaaggaaagggatcggaggttcagggagcacgtttatagagtgaaggacaggtgcgagaagacgaatgagatgtggagctaccctatgcgaccctatgggttttggacattcgaacggcacaattctcagcttgcttgggatgcac

SEQ ID NO: 272 - DNA, 374 bp, Glycine max
  unsure at all n locations
  Clone ID: LIB3072-057-Q1-K1-D3
gatgcaactgattaattaagaaaagccatttccatagcagcctaagaaaatgaagagccctagcttgttcgctatctttctactntgcgccttcacctcatacctaccttccgncaccgnccaggacgtgctcgacgtggatggcgatccgattcggaacggtttcatatactacgttttgccggcaataagaggaaacggtggcggaatagaacgagccgcactcgggaaagacactngccctatcactgtagtgcaatctcccaatccanactctaaggggttagaaaataagtttgaatctgcataccccgcctattacataaacgaaaccctaatnttgcaaataaagttcagttacccacagcagtgtg

SEQ ID NO: 273 - DNA, 90 bp, Glycine max
  Clone ID: LIB3072-057-Q1-K1-D5
gacacaactaactaagaaaggctttcatagccccccaaaaattgagaggaccatcttttttggtctctttctcttttggggctttaacaa

SEQ ID NO: 274 - DNA, 78 bp, Glycine max
  Clone ID: LIB3072-057-Q1-K1-D6
ggtatcttaatttcaaatcatagaaatcttgcgccaaagtatggggtttcttggggtggttcttttcttccttttaag

SEQ ID NO: 275 - DNA, 296 bp, Glycine max
  Clone ID: LIB3072-057-Q1-K1-D8
gaccgcatgcacaattaatacagatgagttcgaataacaacatggtgctgctaaaggtgtatgcgacgcttctattacttgaaggcgttacagttgcacgcatggaacctgaacttctttaaacgtgatcagtcattaagtactgaggatgatgagtatataaaaccatgctgcgatctctacatgtgcacacgctcaaagcctgatccatgcagctgcgaagatatatgctgcattcatgccacttagaatgaaacagctgtatgtgcacaacctcacagactcgacagagacac

SEQ ID NO: 276 - DNA, 438 bp, Glycine max
  unsure at all n locations
  Clone ID: LIB3072-057-Q1-K1-E3
gacagcanaaacaattaatanagatgaagttgaagaacaacatggtggtgctaaaggtgtgtttgttgcttcttttccttgtggnggttacagctgcacgcatggaactgagcttcttcaaaagtgatcagtcatcaagttacgatgatgatgagtattcaaaaccatgctgtgatctctgcatgtgcacacgctcaatgcctnctcaatgcagctgtgaagatattaggctgaattcatgccactcagattgtaagagctgtatgtgcacacgctcacagccaggacagtgtcgttgtcttgacaccaacgacttctgctacaaaccttgcaagtccagagatgactagaaaaactaatagctctctcaaatggacgagggccccttaggctttgntngttatgttaggggagacaaataaaacaagaaataaaagc

SEQ ID NO: 277 - DNA, 433 bp, Glycine max
  Clone ID: LIB3072-057-Q1-K1-E5
gatgctggagaccatttcccagtaattgccttcaacttaggtggaaacctcgtaataaggatcgtaagcgagcaaactgatattcttgaaccatttactgcgtcgagtttgccaagttcccttatattgtggaaggaagcaaatgctaaaggaagtctatttcaaagatttccttcagatttgttgacacagctgaagacagattgtctcgtcctgcacaatcatcgttatgccatatccccacgcaagcttcaatataataccaagttatctgacttttttgagattctggcaatatctgaggatagagatggaaagactttcgtttccacagcacgtggtaagaaatatcccgtgactgtcaacctatggcaaccagagaaaaatgcttttgaatgggctacatctttgaaagcccctacacagaggatgc

SEQ ID NO: 278 - DNA, 414 bp, Glycine max
  Clone ID: LIB3072-057-Q1-K1-F1
gacagcagaaacaattgataaagatgagtttgaagaacaacatggtggtgctaaaggtgtgtttgttgcttcttttccttgtgggggttacagctgcacgcatggaactgagcttcttcaaaagtgatcagtcatcaagttatgatgatgatgagtattcaaaaccatgctgtgatctctgcatgtgcacgcgctcaatgcctcctcaatgcagctgtgaagatattaggctgaattcatgccactcagattgtaagagctgtatgtgcacacgctcacagccaggacagtgtcgttgtcttgacaccaacgacttctgctacaaaccttgcaagtccagagatgactagaaaaactaatagctctctcaaatggacgaagcccctttaggcttttgttgggtatgtaggggag

SEQ ID NO: 279 - DNA, 418 bp, Glycine max
  unsure at all n locations
  Clone ID: LIB3072-057-Q1-K1-F3
gcttcacagcataaacatttaataaagatgagtttgaggaacagcatggtggtgctaaaggtgtgtttgttgcttcttttccttgtgggggttaaagctgcacgcatggaactgagcttcttcaaaagtgatcagtcatcaagttatgatgatgatgagtattcanaaccatgctgtgatctctgcatgtgcacacgctcaatgcctnctcaatgcagctgtgaagatattaggctgaattcatgccactcagattgtaagagctgtatgtgcacacgctcacagncaggacagtgtcgttgtcttgacaccaacgacttctgctacaaaccttgcaagtncagagatgactaganaaactaatagctctctcaaatggacgaagcccctntagggcttgnntnngtatgtaggggag

SEQ ID NO: 280 - DNA, 345 bp, Glycine max
  Clone ID: LIB3072-057-Q1-K1-F4
gcatgcaactgaataattaagaaaagccagttccatagcagcctaagaaaatgaagagcactagcttgttcgctatctttctactttgcgccttcacctcatacctaccttccgccaccgcccaggacgtgctcgacgtggatggcgatccgattcggaacggtttcatatactacgttttgccggcaataagaggaaacggtggcggaatagaacgagccgcactcgggaaagacacttgccctatcactgtagtgcaatctcccaatccaaactctaaagggttagaaattaagtttgaatctgcataccccgcctattacataaacgaaaccctaattttgc

SEQ ID NO: 281 - DNA, 362 bp, Glycine max
  Clone ID: LIB3072-057-Q1-K1-F5
gatagcagcatcatacaaagcattgaattcaaaaactgaagttcattccttgtgttttgctttcttcctcaaaaccaagcatgtcgaacacatgcggcaactgcggctgcgctgacaagactagctgcaccaagggaaacagctatggtgttattgtagagactgagaagagttacatcgagactgttgtcatggatgttccagcagctgagcatgatgggaagtgcaagtgtggcactaactgcacttgcacggactgcacctgtggccattaaggaatatgtatgaaaatgtaattgccatgtgtttggcaatacaaatattcaaataatgtaatcttcgtatgaataaatgtgtgtgct

SEQ ID NO: 282 - DNA, 323 bp, Glycine max
  unsure at all n locations
  Clone ID: LIB3072-057-Q1-K1-F6
gagtaaagaagatgttcatgtaaagcggtgactgtgagaatggaaggaaggaggcgtggaggttatagtggtcgacgcataattgcaagcagaagagggagtggcaaaagcaatgccaacaacaacaacaacgacaaaaacaacaacaacatcaatgtcatcaagaagcttcagagccgcgaaatttggtcgaagcctcatcgagcttttgcttctgtcactgcttctcacagattccgctctatgtgcttgacgcaccaatacgacactcatgatccctncaagactccctcttccctttggcccttcttgatgaagagaac

SEQ ID NO: 283 - DNA, 416 bp, Glycine max
  unsure at all n locations
  Clone ID: LIB3072-057-Q1-K1-A1
gacagcataaacaattaataaagatgagtttgaagaacaacatggtggtgctaaaggtgtgtttgttgcttcttttccttgtgggggttacagctgcacgcatggaactgagcttcttcaaaagtgatcagtcatcaagttatgatgatgatgagtattcaaaaccatgctgtgatctctgcatgtgcacacgctcaatgcctnctcaatgcagctgtgaagatattaggctgaattcatgccactcagattgtaagagctgtatgtgcacacgctcacagccaggacagtgtcgttgtcttgacaccaacgacttctgctacaaaccttgcaagtccagagatgactagaaaaactaatagctctctcaaatggacgaagcccctttaggctttgnnttgtatgttaggggagac

SEQ ID NO: 284 - DNA, 454 bp, Glycine max
  unsure at all n locations
  Clone ID: LIB3072-057-Q1-K1-A2
gactctcatcacattattctatatcaattttggttaagagtcttgaaaaagcaagagaaaaaaataccaaccatggcaaccatttctgatcaacctagagggtcctactcctatggaacctcatatggagcaccctatggaaccacgtatgagaccaacaccagcattaacaacccaccttcacgccaaacagtgaagttcataactgctgccactattggcatcacactcttgctcctgtctgggttgaccctcacaggcactgtcataggtttgatcattgcaacccctcttcttgttatcttcagccccatccttgtccctgctgcgtttgtgctgttcctagatgcttctggctttttgttctctggaggctgtggtgtggctgccattgctgctntgtcttggatntacaactatgtgtctgggaaccagcctgcgggttatgacaccc

SEQ ID NO: 285 - DNA, 415 bp, Glycine max
  unsure at all n locations
  Clone ID: LIB3072-057-Q1-K1-A5
agataataaagagaataatcatattaaatattaaatagaaaaaagggcccgatcatttatcaaaggccaatcttcggtagaagagaaggttcctttggaatacttatttctatttcagtataccgggtctctttctttcatttcaaaaaatttatagaatttcgattttgaaatgaaagaaaagtgtggggataaatataaatgacaaaaagatattggaacataatcttggaagagatgatggaagcaggagttcattttggccacggtactagaaaatggaatcctaaaatgtcaccttatatatctgcaaagcgtaagggtattcatattataaatcttattagaactgctcggtttttatcagaagcttgtgatttagtttttgatgcagcataanaaaaaaatannaatt

SEQ ID NO: 286 - DNA, 228 bp, Glycine max
  Clone ID: LIB3072-057-Q1-K1-A8
ggaagtaagggatcgagcctcggaggagggaatcgcagcgaagtccactatgccgaagcaaattcacgagattaaggacttcctcctcactgctaggaggaaggatgcacgctctgtgaaaatcaagcggagcaaggatgtggtgaagttcaaagtcccgtgctccaagtacctttacaccctctgtgtgtttgattctgagaaggctgataagttgaagcaatcact

SEQ ID NO: 287 - DNA, 400 bp, Glycine max
  unsure at all n locations
  Clone ID: LIB3072-057-Q1-K1-B1
gaaaaacaagtaccattagaaatgaagttagaagcagtaggaggagggtgcaagtaccacccaaataacaagcaactacccggtgtttgtccctcatgcttaagagacaaactcttgaagctctatgacagcagcaatccaacttatcctctcccctgtcctcctcgaccttacgtgtctcgtggccaccgncgccatagttctctcgtaatggattctgcttcttccaccatggttagcttcaattatgggttgaagaagagcaactccattgcctttgcttcgagaagccaagccataaatagggaagtcaatggaaacaacaagggtagtaggaaaaggggtatttggtccaagctgctcaaattgaccaaaaagaacaccaaagaggccttcatgc

SEQ ID NO: 288 - DNA, 390 bp, Glycine max
  Clone ID: LIB3072-057-Q1-K1-B3
gagaagacacgtgggtggatagcaacttagaacacaagtgaactcaaagtggaacaacccaagcttgtttcacagctcaacaacaatggcttctatctcatgcatcacccaccaccccatcactttcaagctcaataatgccttctcttcaccccacgtctctgcctcaaacttggcctcacggtttctgggcaccagaaaaagagttgggttgcatagcctcacctctagaataattggaccctctaatggctccaaagccacatgctggttcaggttcggcaagaacggtgttgatgccaaaggtgctggcatctatggcagccagggccgtgatgactttgatagagatgacgtggaacagtacttcaactatatggggatgctcgc

SEQ ID NO: 289 - DNA, 133 bp, Glycine max
  unsure at all n locations
  Clone ID: LIB3072-057-Q1-K1-B4
cctcagccatatgcaaatgaagcagttgctaggtntgctaatggaggagcttatgctccagatctaagtctttgtaccaaaccccgtcacaatggtcagaactatgttttttgcccttctgaactggtatcgt

SEQ ID NO: 290 - DNA, 368 bp, Glycine max
  Clone ID: LIB3072-057-Q1-K1-B6
gacaggaacagcagagaaacaaagttagaagtgaagaagatcatggcttctctagcaaccttggctgctgttcaaccagctacgatcaatggccttgctggaagttccctctctggaactaagctctctttcaagccctctcgccacagtgtcaaatccaagaacttcaggagtggtgccgtggtagcaaagtatggtgacaagagtgtgtactttgatttggaggatttgggcaacactacagggcagtgggacttgcatggctcagatgcaccttcaccctacaaccctcttcagagcaagttcttcgagacatttgctgctccattcacaaagaggggattgttactcaagtttctgatattggg

SEQ ID NO: 291 - DNA, 194 bp, Glycine max
  Clone ID: LIB3072-057-Q1-K1-B8
taagtttgctaatcgagggacttatgctccatatctaagtctttttaccaaatcccgtcacaatggtcataactattttttttcccttctgacttgttatcgttacccacctgcttgtgtttctataagacaaggacttcattataatcctcacttttcttgtggaacaattgccatgcctaaaatgcttaatt

SEQ ID NO: 292 - DNA, 414 bp, Glycine max
  unsure at all n locations
  Clone ID: LIB3072-057-Q1-K1-C1
gacagcaaaaacaattaataaagatgagtttgaagaacaacatggtggtgctaaaggtgtgtttgttgcttcttttccttgtgggggctacagctgcacgcatggaactgagcttcttcaagagtgatcagtcatcaagttatgatgatgatgagtattcaaaaccatgctgtgatctctgcatgtgcacacgctcaatgcctcctcaatgcagctgtgaagatattaggctgaattcatgccactcagattgtaagagctgtatgtgcacacgcccacagccaggacagtgtcgttgtcttgacaccaacgacttctgctacaaaccttgcaagtccagagatgactagaaaaactaatagctctctcaaatggacgaagcccctttaggctttnngttgtatgttaggggag

SEQ ID NO: 293 - DNA, 429 bp, Glycine max
  Clone ID: LIB3072-057-Q1-K1-C5
cggcacagctgtcagaatacgacagaacggtacagctgtgaggatacgagagaacgagaatcatgtcatgttattagatgatttgtcatgcataccgttaccatgtgtcaaactgttggtctcaaagctggtatatcatgtgaaggatgtgttggagcagtgaagagagttctaggaaaattggatggtgtggaatcatatgacattgatttggaggaacaaaaggtggtagtgaaaggaaatgtgcagccagacacagttctgcagaccgaattcaaaactgggaagaatactaccttctgggaaggtgaatcagcagcatctgatactagcacagcaactgcctaaaacatttgcctatattctgtgcagaagaagtatctgcgtgaatccaatactatatgatggtcttgaaataatgatgaaact

SEQ ID NO: 294 - DNA, 269 bp, Glycine max
  Clone ID: LIB3072-057-Q1-K1-C6
aggccacggcgggaagttcacgtggatcggccacggctacgagaaagttgagatgccgcacggtgctatggacgccaaggacccgagcttcgaggatcctgtggagatcgccaccgtgtgatcgcggtggtttccggtggccaggtctgtaaatagtagtaattggcgaaacgtgttttttcgtgttcaataatgtgaagcgaatcggagaagaagcgttttctgtgattgattgttatagatctgatctatctgcggtatttggtagt

SEQ ID NO: 295 - DNA, 359 bp, Glycine max
  Clone ID: LIB3072-057-Q1-K1-C7
gactcactcatacaatagagaccagcttttgcttggttgcgaacatggagatgaggaaatcatgtggcttgttcttcttgctcctactccttgtctttgcttcccaggtggtggtgcatactgagggaagagtgtgtgagtcacaaagccacgggttccatggtttgtgtaatggagaccacaactgagctttggtctgcaggaacgaaggtttctccggtggcaggtgcaaatgcttacgacgtcgctgcttttgcaccaggatttgttgagatctcatcaaacactactcttgccatgcaaattaataaatcatagctaggcccaataaattgcatctactctttattcatttggga

SEQ ID NO: 296 - DNA, 258 bp, Glycine max
  Clone ID: LIB3072-057-Q1-K1-C8
taatttgggaattattgctcccatcgccattggtttcattgtcggcgctaacattttgttgggtggggccttctctggagcggccatgaaccccgctgtgacatttgggcctgctgtcgtgagctggacctggaccaaccactggatctactgggccgggcctctcatcggtggtggaatcgctggccttgtttacgaggttgtctttatcagccacacccacgagcagcttcccaccactgactactagaggggggg

SEQ ID NO: 297 - DNA, 428 bp, Glycine max
  unsure at all n locations
  Clone ID: LIB3072-057-Q1-K1-D1
ngtaccgtaatccttacgctctctcactcacanacgcacactgaattcaaaaacatcgaaagagagaggcatggccgagcaaaccttcatcatgatcaagccagatggcgttcaaagaggccttattggcgagattattagcagatttgagaggaagggtttttacttgaaagggttgaaactcgttactgtggaccgtccttttgctgagaagcactatgctgatttgtctgcaaagcctttctttagtggtttggtggattacattgtctctggccctgttgttgccatgatctgggagggtaagaatgttgttacaactggcncgaaagattatcggagccacanacncagctcaatctgagcctggaactattcgtggtgactttgctattgacattggaagggaatgtatccatggaagtgat

SEQ ID NO: 298 - DNA, 453 bp, Glycine max
  Clone ID: LIB3072-056-Q1-K1-H9
ggaagcatttgagactaactcttagagagaaaaaaaatggctgagacaggtggaggagatgcagtgagaccagtggtaatatgtgataacaagtgtggctgcacacttccatgcactggtggttccacttgcaggtctcttaagttcatgatttcaacaaagtgcacaagtgctggcactgccacaggagggggtgatcacgtgacatgctcgtgcggagagcactgtggttgcaatccatgctcatgtcccaagattgcggctgctggaagtggttgcagatgtggcacagattgtgcatgtgcctcctgccgcacttagtatcacaccttaaggcttaaacttcacgttttattttatgtcttcaaatcttgaatacgttttctatatattagtcttgtttaaagttcaaagtgtggacgtggtttctacttagtactcaaacgtattagt

SEQ ID NO: 299 - DNA, 258 bp, Glycine max
  Clone ID: LIB3072-056-Q1-K1-E9
aggcgtgagaacacctccgaaaggcggcttcattttctatcacccactcgacccccaaccttcacaaaggcactattaacgacccttctcttatttattcccacacctataccttaccgatcttccttcattttacacattcaccaacaaccccatagtgctctaactactcttgctttgcccaacattcaaactatcctcaaccaaactagagctatttcaaataccaaagacctgcaggataattcaattctgaaa

SEQ ID NO: 300 - DNA, 351 bp, Glycine max
  Clone ID: LIB3072-056-Q1-K1-F1
caacataggtcatcgaaaggatctcgaagacccaccaacgcacgaaagccgggatctttcagaaaatggattcctattcgaagggtgcataaccgcatggataagctcacactaacccgtcaatttgggatccaattctggtccttatgatgtatcgggaaggaattttggaatgtaataatatcgattcatacagattcagaagaaagggttctctattgattcaaacgctctacctacgagatagggatagagaaagaggaattaaccgatgattgcacatagtgcatttggtcgaaaaatcgatctgatttttttcgtacttttcgctcaatgatgaaatgggtcaaa

SEQ ID NO: 301 - DNA, 357 bp, Glycine max
  Clone ID: LIB3072-056-Q1-K1-F10
tgatttcgacagcaaaaactactaataaagatgagtttgaagaacaacatgggggtgctaaatgtgtgaatgttgcttcttttcacttgtggtggttacagcttcactcatagaactcatcttcttcaatagtgatcattcatcaagttatgatgatcatgactattcaaaaccatgctgtgatctctgcatgtgcacacatctcaatgcctattcaatgcacttgttaagatattaggctgaattcatgccactcagattgtaagagctgtatgtgcacactctcacagccaggacagtgtcgttgtcttgacaccaactacttctgctacaaaccttgcaagtccaaacatgact

SEQ ID NO: 302 - DNA, 414 bp, Glycine max
  unsure at all n locations
  Clone ID: LIB3072-056-Q1-K1-F12
gacagcaaaaacaattaataaagatgagtttgaagaacaacatggtggtgctaaaggtgtgtttgttgcttcttttccttgtgggggttacagctgcacgcatggaactgagcttcttcaaaagtgatcagtcatcaagttatgatgatgatgagtattcaaaaccatgctgtgatctctgcatgtgcacacgctcaatgcctnctcaatgcagctgtgaagatattaggctgaattcatgccactcagattgtaagagctgtatgtgcacacgctcacagccaggacagtgtcgttgtcttgacaccaacgacttctgctacaaaccttgcaagtccagagatgactagaaaaactaatagctctctcaaatggacgaagcccctttaggcttttgttgntatggtaggggag

SEQ ID NO: 303 - DNA, 407 bp, Glycine max
  unsure at all n locations
  Clone ID: LIB3072-056-Q1-K1-F4
tgagggtttggttattagggttttcgcttgccggtgcgcagtcgagcctncagaagacgaatcgaaaatgccgtcgcacatgacattcataatcaataagaagttggctaataagatgaggcagaacatgcccattccctactggatccgcattaggaccgatatcatcatcangtacaactcgaagcgccgtcactgtgctcntactcagcttggattctgaggtgtatgctctgcctaggttcaatttatccaattaattagtgtgttattttcttgaggcaaaaacattgttttgagttttaatattttccatttggtcgaagactatattgtggaaggaacttattgtaggtaatactcatggcggttggcaactatttttaaaggattttcggattcattgt

SEQ ID NO: 304 - DNA, 337 bp, Glycine max
  Clone ID: LIB3072-056-Q1-K1-F5
gaacaaaaaattaacacccagttcaattctcaaatggaagctcgggaacagagaatgagaaagagaatggacgccattgattcggtgtacgatccgttgagagaatactcagaggacagcatgaggctcgttaagcgctgttacaaacttgatcgcatagaattctacaaggttgtcgtgcgtaccgtaatagttatagatgtgatgggattcgtgggtttcttcgtgaagcttattttcaatccaattaacaacattaagtttatatctagttaggattgatgttactacaagcagcttaagaattcaggttgtcaagcaaaagtaggcagaaaga

SEQ ID NO: 305 - DNA, 395 bp, Glycine max
  Clone ID: LIB3072-056-Q1-K1-F6
ggggatctatcacaatagaaagcaaagctatataggattatgggccatatcaagaaaatgaaaatccctttttattttcccatcctcgtgcttgttgtcttcattgcttctggaaaacaagtgcaaatgacagtggtaccaaattgtgtggtagaaagcttgatatttcattgagaaatattcaagaatgcttgctaacttctttgccaacaacattttggatcacccgcagcacatggagcttgtggcattaaagtccaatgatgtatttgttatttatgttaaatataaagtttaaccataacaatcacagctttcatacctatttaatagtatgtaagccgattgaaaaaattaatatataaataaaataacttgattattagactcaaaaa

SEQ ID NO: 306 - DNA, 56 bp, Glycine max
  Clone ID: LIB3072-056-Q1-K1-F8
gacagcaaaaacaattagtaaagatgagtttgaagaacaacagggtggtgctaaag

SEQ ID NO: 307 - DNA, 110 bp, Glycine max
  unsure at all n locations
  Clone ID: LIB3072-056-Q1-K1-G10
ggcacaccaacaccaaaacaaacccactaagatggcttcctttgtatgcttcctagtgctgcttcttgcagcccttatnctcatgccctcaagggcttgctacttactac

SEQ ID NO: 308 - DNA, 349 bp, Glycine max
  Clone ID: LIB3072-056-Q1-K1-G11
gcatcaaaacacaagcaaatcctaaaaagttgattgagatatatagaaactagcttcaatttcacaaaatgaagaaagtgtttgtcacatttttagctgtgctagttgtatttgttcttacagcgaaagctttagaggcacgactaccagttaaaacaaattcagcatcaaatgactacaattgttcacaagtctataacctggtagtttcgtgcgtagattacatgattggtggagatgatggtgccccttcaggtgtttgttgccaaagtgttaatgcagtgaaagcatcaacaccaacacaaattcaacgaatggctgcatgtaagtgctttttcgacgtaacaac

SEQ ID NO: 309 - DNA, 72 bp, Glycine max
  Clone ID: LIB3072-056-Q1-K1-G4
tgtgaaaaggaaaaaaagataaaagtagtgcagtgaggaacgcgaagactcgagatagggaatatgcgacag

SEQ ID NO: 310 - DNA, 359 bp, Glycine max
  Clone ID: LIB3072-056-Q1-K1-H1
gagttccaagtcgcatacaaagtaacactagaactcacaaaggacagaagaaacgcgaatgccaggagaactccaattaccacccgggttcagattccaccccactgacgatgagcttgtgaatcactacttatgtagaaagtgtgctgcacaaaccattgctgtttccatcatcaaagaaatcgatttgtacaagtttgatccatggcagcttccagagatggctctttacggtgagaaagagtggtactttttctctcctatagaccgaaaatacccaaacggttagagaccgaaccgggctgccggaaacgggtactggaaagctaccggagctgacaaaccgatcggaaaaccga

SEQ ID NO: 311 - DNA, 376 bp, Glycine max
  Clone ID: LIB3072-056-Q1-K1-H11
gacagcaaaaacaattaatagagatgagtttgaagaacaacatggtggtgctaaaggtgtgtttgttgcttcttttacttgtgggggttacagctgcgcgcatggaactgagcttattcaaaagtgatcagtcatcaagttatgatgatgatgagtattcaaaaccatgctgtgatctctgcatgtgcacactcttaatgcctactcaatgcagctgtgaagatattaagctgaattcatgctactcagattgtaagagctgtatgtgcacacgctcacagccaggacagtgtcggtgttttgacaccaacaacttgtgctacaaaccttgcaagtacagagatgactagaaaaactaatagctctcttaaatgga

SEQ ID NO: 312 - DNA, 157 bp, Glycine max
  Clone ID: LIB3072-056-Q1-K1-H12
gacagcaaaaacaattaataaagatgagtttgaagaacaacatggtggtgctaaaggtgtgtctgctgcttcttttccttgggggggttacagcttcacgcatggaactgagcttcttcaaaagggatcaggcatcaagttatgatgaccatgagta

SEQ ID NO: 313 - DNA, 256 bp, Glycine max
  unsure at all n locations
  Clone ID: LIB3072-056-Q1-K1-E7
aagaacggcgtgcagagaatctgaaaatgaagagtgaaacagacgatatttcagatgatgaggaagctaaacaaatgggttatcatcaaagtggtagtgaagatgagcaaaagaagcttgagattgaattgcggaacaagtgttcttgaatccatcatagcgaagaggtgcgtgaataactaaatgcatganattcaagatgtaagttgttttatgctttaaaaacttattgagaaatatcttagcttggtaagga

SEQ ID NO: 314 - DNA, 314 bp, Glycine max
  Clone ID: LIB3072-056-Q1-K1-H4
gaaggcaagaaaaaaataaataaaacactaagatccttataagtgtccctcgatcggcgaaaatatgtctggtttccttagcaacctctatggtttcaacggaaacaacaatggcactgaggatgcctttaaaaactcaggaggaggaggacaagacttcaaggacgcggagttcaacactggtgtgcaagttgccaaggggagacacgctccttgcagtggtaacagtgggactaagagggcttttaacaactttggttcggggaaacaggatttcggaaatgctatgtttaacactggtgctaggtactact

SEQ ID NO: 315 - DNA, 445 bp, Glycine max
  unsure at all n locations
  Clone ID: LIB3072-056-Q1-K1-C12
gcgcccacgcgggcgcccacgcggccggacncacacaactttctaagaaagtcttccatagggggccaaaaatggagagcaccatcttctttgctctctatctcttttgtgccttcaccacctcatacctaccttcagccatcgctgatttcgtgctcgataatgaacgtaaccctcttgaaaatggtggcacatattatatcttgtcagacataacagcatttggtggaataagagcagccccaaccggaaacgaaagatgccctctcactgtcgtgcaatctcgcaatgagctcgacaaaaggattggaacaatcatctcgtccccatatcgaatccgctttatcgccgaatgccatcctttgaaccttaacttcgattcatttgcagatataatgctgtgcgttggaatttctaaccagtggtctgttgtggaggatctacc

SEQ ID NO: 316 - DNA, 374 bp, Glycine max
  Clone ID: LIB3072-056-Q1-K1-C3
agacgacagatggggattcacacaactaactaagaaagtcttctatagccattcaaaaatgaagagcaccatcttctatgctctctttctcttttgtgccttcatcacctcatacctaccttcagccatcgatgatattgtgctcgataattaatgtaaccctcttgataatggtggcacatattatatcttgtcagacatatcatcattcggtggaatattttcattctcaactggaaatgaaagatgccctctcactgtggtgcaatctcgcaatgagctcgacatatttatgtaacaatcattttgttcttatatcgaatcctgtttatcgccgagggccatcctttgagccttaagttcgattcatttgc

SEQ ID NO: 317 - DNA, 314 bp, Glycine max
  Clone ID: LIB3072-056-Q1-K1-C4
gacagcataaacaatgaataaagatgagtttgaagaacaagatggtggtgctaaaggtgtgattgaagcttcttttccttgtgggggttacagctgcacgcatggaactgagcatcttcaaaagtgatcagacatcaagttatgatgatgatgagtatgcaaaaccatgctgggatctctgcatgtgcacacggctaatgccttctcaatgcagctgtgaagatattaggctgaattcatgccactcagattgtatgagctgtatgtgcacacagttacaggcaggacagtgtcgttgtcttgacaccaacgac

SEQ ID NO: 318 - DNA, 62 bp, Glycine max
  Clone ID: LIB3072-056-Q1-K1-C7
tacagcaaaaacaattaatagtagatgagtttgaagaacaacatggtagtgctgaaggtgtg

SEQ ID NO: 319 - DNA, 92 bp, Glycine max
  Clone ID: LIB3072-056-Q1-K1-C8
gagtagtagtgttcctcaagccaccgtaccgtgttgcctctatgcaatctacagccaaaagccttcaagagtacttagacggagggtgccaa

SEQ ID NO: 320 - DNA, 374 bp, Glycine max
  Clone ID: LIB3072-056-Q1-K1-C9
gacagcaaaaacaattaataaagatgagtttgaagaacatcatggtggtgctaaaggtgtgtttgttgcttcttttccttgtgggggttacagctgcacgcatggaactgagcttcttcaaaagtgatcagtcatcaagttgtgatgatgatgagtattcaaaaccatgctgtgatctctgcatgtgcacacgctcaatgccttctcaatgcagctgtgaagatattaggctgaattcatgccactcagattgtaagagctgtatgtgcacacgctcacagccaggacagtgtcgttgtcttgacaccaacgacttctgctacaaaccttgcaagtccagagatgactagaaaaactaatagctctctcaaatg

SEQ ID NO: 321 - DNA, 184 bp, Glycine max
  Clone ID: LIB3072-056-Q1-K1-D1
aggaacaatgttggaaacagaagaccttggcatgtcgattcttcaaagattgcattcacagagacaatctctactgcatacacatgacacgcttcatggagtggatgataacacagacaagagcaagaaaattttggctaacatgtcaagaaagatggacaaaaacaaatggattttgagcacc

SEQ ID NO: 322 - DNA, 303 bp, Glycine max
  Clone ID: LIB3072-056-Q1-K1-D10
gatcacactaatcactcactcttcactcaaaactcttctctttcgtgttcataattcccacacattatggctgagcttcactaccaaccacaacaccaatacccccttcgctaccctaacgatccacaccaacaaacccgttccttcacccaccaagtcgtcaaggccgccaccgtcgtcacagcgggcggcttcctcttgatcctcgcctcggtgatcctcgccgccaccgtcattgccctcaccatcggcaccccgctgttcgtcattttcagtcccgttctcgtgcccgccgtaatcacc

SEQ ID NO: 323 - DNA, 279 bp, Glycine max
  Clone ID: LIB3072-056-Q1-K1-D12
aggagaggagaaatgaggacagacgagtagatcatgaaggtctatgcggaggagagagagtccatgttctgacaccgacaacattcatatgtacccaaagctcaccgcttcaatagctgaccagagtacattctttatcttgactttatgacacaatataaagatcttacaccccaattctcagctgtccctcagaacatcttggttactactcattccatgcctccaacggtaaagtcttcactgtaagcaccatgttactacattgtctcataccct

SEQ ID NO: 324 - DNA, 106 bp, Glycine max
  Clone ID: LIB3072-056-Q1-K1-D3
ggaattcgattcatacacattccctaactttcgagttctctcaggtcgcgcggtgctctactgtctcggcgccggtgccttcgcgtcttgagactgttcgtccatt

SEQ ID NO: 325 - DNA, 349 bp, Glycine max
  Clone ID: LIB3072-056-Q1-K1-D4
tggcagtgcataactcacaacacatctaaacaaagaatcaagaacaatggcttatgctaggcttgctcctatggctgtcttcttgcttgccacttccaccataatgttcccaacgaatatagaagcagcagattgtaatggtacatgttcacctttcgagatgccaccgtgccgttcacgtgattgtcgtggagtacctataggactagttgctggtttctgcatacatccaactggactgtcatctgttgcaagattgacgacagacattccaactgatgtcaatctgatgatgaatgcatgaagaaaggaagtggcaatttttgcgctcgttaccctaataattata

SEQ ID NO: 326 - DNA, 304 bp, Glycine max
  Clone ID: LIB3072-056-Q1-K1-D9
gattcacacggctaactaagaaagtcttccatagccccccaaaaatgaagagcaccatcttctttgctctctttctcttttgtgccttcaccacctcatacctaccttcagccatcgctgatttcgtgctcgataatgaaggtaaccctcttgaaaatggtggcacatattatatcttgtcagacataacagcatttggtggaataagagcagccccaacgggaaatgaaagatgccctctcactgtggtgcaatctcgcaatgagctcgacaaagggattggaacaatcatctcgtccccata

SEQ ID NO: 327 - DNA, 132 bp, Glycine max
  unsure at all n locations
  Clone ID: LIB3072-056-Q1-K1-E10
ggnncagnnngnngnncgaagccaaaacccnagcagccggcgaggagggcagacgangagggggangcggcggcagcggcaggggcagcgcagccgaagaagagaacgagcaagaaanncagcnncaggggc

SEQ ID NO: 328 - DNA, 418 bp, Glycine max
  Clone ID: LIB3072-056-Q1-K1-E11
gggctacattttctatcagctcctcgcctaccagccttcacaaaggcgctatcacccacccttaggatccaagtttacactacccttgcttaccacgctaccttcgttttacacatgcaccaacaaccacatcaccctcaaactcctcacagcttgcccactattcaaactttgcgcaaccaaactagagctattccagataccaaagacctgtgggataattcaattctgacaagtgaaatcccagtcctcgctatattctacgcaaactgatgctgaccgtgcaagatggctcacccgataatagatcagatcgcaacacagtatgctgggaaactcacatgttgtatagtcaacacagacactggcatgcaaactgctgatgactatgaaatcaatgctgtaccagcgggtttga

SEQ ID NO: 329 - DNA, 414 bp, Glycine max
  Clone ID: LIB3072-056-Q1-K1-E12
gacagccaaaacaattaataacgatgagtttgaagaacaacatggtggtgctaaaggtgtgtatgttgcttcttttacttgcgggggttacagctgcacgcatggaactgagcttcttcaaaagtgatcagtcatcaagttatgatgatgatgagtattcaaaaccatgctgtgatctctgcatgtgcacacgctcaatgcctcttcaatgcagctgtgaagatattaggctgaattcatgccactcagattgtaagagctgtatgtgcacacgctcacagccagtacagtgtcgctgtcttgacaccaactacttctgctacaaaccttgcaagtccagagatgactagaaaaactaatagctctctcaaatggacgaagtccctttaggctttgttgttatgttaggggaga

SEQ ID NO: 330 - DNA, 453 bp, Glycine max
  unsure at all n locations
  Clone ID: LIB3072-056-Q1-K1-E2
gtcgacccagcgttcgagcgagaatctacagagggggagggttattggacacattcttcagcgactgcgtttttggatcggaagctcttctgcggcgtatcaatgggacactccaacgtgtggaactcttacccataaaactacggtcctggttctcgcacttgccttgtatgtgggaatccacatggactgatcaggaagtatggccttatgtgctgcacgcagtgctttcgtatcattgccaaggaaattggcttcatcaagtatcgctaaaagagcagttgtcaactacggaccaatattgtgatcaggcactaggatgtgtataggatgttaatgttgaagaaacttgagactttcttttttcatctaattaattatcagacgtaatttgnggtactaagaatacttttatattaattggtttgaaccaaaacaaaaatacttntacct

SEQ ID NO: 331 - DNA, 460 bp, Glycine max
  unsure at all n locations
  Clone ID: LIB3072-056-Q1-K1-E3
ggggaaccctaattctgcgaggtgagtgaaaatggcggtaccggggctcttcaagaagatcgtgaagaagcgcgtcaagaagtttatacgccctcatagtgatcgcaagatctccgtcaagccaagctggcgcagacccaaaggtatagattctcgtgtcatgagaaagttcaaaggatgcactttgatgcccaacatnggttatggctcagacaagaaaacccgccattatctaccaaatggtttcaagaaatttgtcgtgcacagtgtgtaagacctggaacttctcataaggcataacaggacatattgtgctgagattgctcacgatgtatccacaaggaagaggaaggacatagttgagagagctgctcagcttgatgttgtcttgacgaacaagacgggcagactacgtatccaggaggatgagtngatccaatacatgggagatgtatttatg

SEQ ID NO: 332 - DNA, 242 bp, Glycine max
  unsure at all n locations
  Clone ID: LIB3072-056-Q1-K1-E4
gagggttttgcgctgttgatgctgcatatgctacgtaacctgggagctctgtgccgaagaacgaagccatggagaagactcatggaatgggatctgctcgcaagcttaagtcctaccgcangaggctaatgtgggcttgcaagtcatacagtgaatcacatcttggaaattgttggaatataccttttgctgggttattcctgtcaagggaattgtccttgaaaagataggtattgaggcta

SEQ ID NO: 333 - DNA, 79 bp, Glycine max
  Clone ID: LIB3072-056-Q1-K1-E6
ggccacaagctacatacacaagaatggcttgcacacttggctcagggatttcggtaattttttttacctttgcagtcat

SEQ ID NO: 334 - DNA, 356 bp, Glycine max
  unsure at all n locations
  Clone ID: LIB3072-055-Q1-K1-H6
gatgcaactgaataattaagaaaagccatttccatagcagcctaagaaaatgaagagcactagcttgttcgctatctttctactttgcgccctcacctcatacctaccttccgccaccgcccaggacgtgctcgacgtggatggcgatccgattcggaacggtttcatatactacgttttgccggcaataagaagaaacggtggcggaatagaacgagccgcactcgggaaagacacttgccctatcactgtagtgcaatctnccaatccaaactctaangggttagaaattaagctngaatctgcataccccgnctattacataaacgaaaccctatttttgcaataaagttcag

SEQ ID NO: 335 - DNA, 342 bp, Glycine max
  Clone ID: LIB3072-055-Q1-K1-H7
gatcccaatcagaaaaagttagggtttgtaactttgtcttttgcttgcgaatctgaatcgaataataatcaatcaatcatcatgtcgtcggcgaagaagatcacactgaagagttcggacggcgaggctttcgaggtggacgaggcggtggcgctggagtctcagacgataaagcacatgatcgaggacgactgcgccgacagcggcatccctctgccgaacgtgacgagcaagatcctggcgaaggtgatcgagtactgcaagaagcacgtcgaggccgcgaatcccgaagacaaacccttcgaggacgatctcaaagcctgggacgccgatttcgtcaag

SEQ ID NO: 336 - DNA, 257 bp, Glycine max
  Clone ID: LIB3072-055-Q1-K1-H8
tcgacagatggggatgcaactgaataatggacaaaagccatttacatagcagactgagacaatgaataccactaataaagatgagtttgaagaacaacatggtggtgctaaaggtgtgtttgtagcttcttttccttgtgggggttacagatgcacgcatggaactgagcttcttcaaaagtgatcagtcatcaagatatgatgatgatgagtattcaaaaccatgctgtgatctctgcatgtgcacactctcaatg

SEQ ID NO: 337 - DNA, 342 bp, Glycine max
  Clone ID: LIB3072-055-Q1-K1-H9
cccacgcgtccgttgcgagacgacagaagggaagaacggcgtgcagagaagctgaaaatgaagagtaaaacagacgatatttcagatgatgaggaagctaaacaaatgggttatcatcaaagtgatagtgaagattagcaaaagaagcttgagattgaattgcggaacaaggctcttgaatccctcaaagcaaagaggggcgtgaataactaaatgcatcaaatccaagttttaagttgttttatgctttaaaaacttattgagaaatatcttagcttgttaaggaacttggctttacaaatgttatgtttttttattcattggtaagtgtttgatgccgaa

SEQ ID NO: 338 - DNA, 367 bp, Glycine max
  Clone ID: LIB3072-056-Q1-K1-A1
gaatcacaatcattcatttcattcataccgttcgcgacacgatcactattctgcgacgatggtggcacattcgagttcttggggaagggcactcgtcgcgatcttgccctacaccttctccgccatcggcatcgacggcgctatcggcgtctacgtactcggctgccgctgggggatctacatcaccggaagcatcttgatctgcgctgcaatcagggctcctcgaatcacttccaaaaatctcattaggttgtgtgtaggagtaattggaagcagctgtgcattgtctgatgccaagaactcctctctctttgtgaaaattcttgtgatcgagatctttggtagtgcgctgaggctattggagtta

SEQ ID NO: 339 - DNA, 85 bp, Glycine max
  Clone ID: LIB3072-056-Q1-K1-A12
aggttacgatgcaagaagacgaccgcaggttactgctgcagtctgacaacagaatgctaccgttgctagaagactattcaatggt

SEQ ID NO: 340 - DNA, 161 bp, Glycine max
  unsure at all n locations
  Clone ID: LIB3072-056-Q1-K1-A8
aaggtgggaagagtgagtntgctccatggaggaaaaaccttagttctgtgaaggaaaagagctgtagcatgttggggatgaagtcatagtatatggcagctgccagcgctgcagccatgtcaggcccagccatggccttggtagatgagatactgagcact

SEQ ID NO: 341 - DNA, 391 bp, Glycine max
  unsure at all n locations
  Clone ID: LIB3072-056-Q1-K1-A9
ggacagaaaaccatgctaaaactgcagagagtggcgaaatggcgactaggagcaaaagagaagcagagggtgttggtgatggtgatggtaataagatcgtgtggaacgaagcgcagcagaggttcgagacgcaggacaaggaggcgttcgtagagtacgccctgaaagaaaaagggaaggtcatggtcatggatttgatccacactttcgtgcccccttccaagagaggccttggcttggcttcccacctctgcgtcgccgcctttcagcacgcccaatctcactcgctatccatcatccccacctgctcctatgtctctgacacatttcctncccggaacccgtcttggaattctgttgtgtacacagagggcggcaaatctaatatctg

SEQ ID NO: 342 - DNA, 338 bp, Glycine max
  unsure at all n locations
  Clone ID: LIB3072-056-Q1-K1-B10
gacaggtgtttgcaatactagcgatagctgataagagagataccaacgagaaaagaaaaaaaagaagagttgagattccctttgaagaaaagatggcatcccataggcaaagctatgaagctggtcaagctaagggccgaactgaggaaaagacgaaccagacgatgggcaatattggagagaaagctcaagctgcaaaggagaagacccaggaaatggcccaagctgcaaaagagaagacccaacaaacagtccaagctgccaaggacaagacttgcgacacnttccaagcggcaaaggagaagacccaacagaatacaggagctgctcaacaaaag

SEQ ID NO: 343 - DNA, 89 bp, Glycine max
  Clone ID: LIB3072-056-Q1-K1-B3
gacgacagaaggggaaaacaaaaaccatcacaaaaaaaagaaaaagtggagaaaaaaaaaaagcggccggtcaaaagaacccaggctaa

SEQ ID NO: 344 - DNA, 351 bp, Glycine max
  unsure at all n locations
  Clone ID: LIB3072-056-Q1-K1-B5
gccactttgagttcgaactaaacaattcaattcaatctgcctcgatcatggagaggaaaacatttgggtttttggtcttactcctacttgtcttagcttctgatgtgacggtgaagagagcagaggcgaaagattgcttgacaaggaagcacgggttccagggtagatgcttattcgacaggcaatgtgcacatgtgtgcaggagcgatggtttcatcggtggtcagtgccgaggccctcttcgcaaatgcttttgcagcaagccatgttgatcgaaagtactactggcaaagaggccatgaaataaacanacaaacaaataaataaatagctctaaccgacacatatgta

SEQ ID NO: 345 - DNA, 104 bp, Glycine max
  Clone ID: LIB3072-056-Q1-K1-B7
gacagcaaaaacaattaatgaagatgagtttgaagaacaacatggtggtgctaaaggtgtgtttgttgcttatattacttgttggggttacagctgtacgcatg

SEQ ID NO: 346 - DNA, 136 bp, Glycine max
  Clone ID: LIB3072-056-Q1-K1-B8
gaatctcttcacagaagaaaaaagagaagaagatgggtttgaagaacaacatggtggtgctaaaggtgtgtttggtgctacttttccttgtggggggtactactagtgccaacttgatgctgagtaagcttggcct

SEQ ID NO: 347 - DNA, 454 bp, Glycine max
  Clone ID: LIB3072-056-Q1-K1-B9
gactttgagttcgaactaaacaattcaattcaatctgcctcgatcatggagaggaaaacatttgggtttttgttcttgctcctccttgtcttagcttctgatgtgacggtgaagagagcagaggcgaaagattgcttgacaaggaggcacgggttccagggtagatgcttattcgacaggcaatgtgcacatgtgtgcaggagcgatggtttcatcggtggtcagtgccgaagccctcttcgcaaatgcttttgcagcaggccatgttgatcgaaattactactgccaaagaggccatgaaataaacaaacaaacaaataaataaatagctctaaccgacacatatgtacgtagtgtccgggttctagctagctaggtaggtacgtgtgtcttttgttatcgatcctaagttggtggaacaagtgtggcatcatgatctaagtatatatatata

SEQ ID NO: 348 - DNA, 322 bp, Glycine max
  Clone ID: LIB3072-056-Q1-K1-C1
ggacgctgaatatagaaacccaatctctaacatcgtccgtgcactgctccttcgcgcagctactgaagattgagtggagaaagagataagagatgggtctggcattgaacatctcaatgtgttgtttcccacagcatcgttgtcccactctcttcaaacccaccattaccaaacaaaccctctactttttaccgatttcgctttctcctccgtaactcaactcagcgtgggccaggatttacccgccaactacagtgattgagttcccagtccctgacccgagctttgcagaagatgcggcattctgctccacccgacgtcg

SEQ ID NO: 349 - DNA, 308 bp, Glycine max
  Clone ID: LIB3072-056-Q1-K1-C10
gacagcaggggcaattaataaagatgagtttgaagaacaacatggtggtgctaaaggtgtgtctgctgcttcttttccttgtgggggttacagctgcacgcatggaactgagcttcttcaaaagtgatcagtcatcaagttatgatgatgatgagtattcaaaaccatgctgcgatctctgcatgtgcacaagctcaatgtcttctcaatgcagctgtgaagatattatgctgaattcatgccactcaaattgtaagagctgtatgtgcacacgctcacaggcaggacagtgtccttgtattgacacc

SEQ ID NO: 350 - DNA, 337 bp, Glycine max
  unsure at all n locations
  Clone ID: LIB3072-055-Q1-K1-F6
gatgcaactgaataattaagaaaagcgatttccatagcagcctaagaaaatgaagagcactagcttgttcgctatctttctactttgcgccttcacctcatacctaccttccgccaccgnccaggacgtgctcgacgtggatggcgatccgattcggaacggtttcatatactacgttttgccggcaataagaggaaacggtggcggaatagaacgagccgcactcgggaaagacacttgccctatcactgtagtacaatctcccaatccaaactctaaggggttagaaattaagtttgaatctgcataccccgcctattacataaacgaaacccta

SEQ ID NO: 351 - DNA, 347 bp, Glycine max
  Clone ID: LIB3072-055-Q1-K1-F7
gccataatcccaatctcagtgttctggcttgtccctcaatacagccttcatggaatggctgaggcctttatgtcaattggacacttggagtttttctatgaccaggcccctgagagtatgaggagcactgccatggcattattttggactgctatcgctgctgggaactatgtgagtaccattatggttactttggtccacaagttcagtgctgggtctaatgggtcaaattggctccctgacaacaacctcaacaaagggaagttggagtacttttactggcttatcaccatattgcagtttctcaatcttatttactacttggtttgtgccaaattgtacaccta

SEQ ID NO: 352 - DNA, 390 bp, Glycine max
  unsure at all n locations
  Clone ID: LIB3072-055-Q1-K1-F9
aagccaaatggaagattcttcagctataatccagcaacaaagaagacaaccctgcttgcccaagacctctactttgccaatggggttgcagtttcagcagatcaacaatttgtggtcttctgtgaatctgtcttgtaagttatttactagcttaaagtaccttcaaatttaatagttttaaatgcagttttaattgctttatttttatatttgttcaactttggtcctcatacttttaattgagttattttaatcctttaattntattatatattaaatgggcttcctacaagagttataaaattaacttagtaattgaagagagaatgcatgagacaaatcgtgtcttgggaattttcctgattaataaactaacaactaacattaatc

SEQ ID NO: 353 - DNA, 347 bp, Glycine max
  Clone ID: LIB3072-055-Q1-K1-G1
ggggatctatcacaatagaaagcaaagctatataggattatttcccatatcaagaaaatgaaaatccctttttattttcccatcctcgtgcttgttgtcttcattgcttctggaaaacaagtgcaaatgacagtggtaccaaattgtgtggtagaaagcttgtcagttcattgtgaaatattcaagaatccttgcgaacttctttgccaacaacattttggatcacccgcagcacatggagcttgtggcattaagttccatgtatgtgtttggtatttatgttaaatataaagtttaaccataacaatcacagctttcatacctatttaatagtatgtaagccgatg

SEQ ID NO: 354 - DNA, 317 bp, Glycine max
  Clone ID: LIB3072-055-Q1-K1-G10
gattgtggaaatctcgaaggaacagattcgggcactgagcaaacgtgccaaatctagttcaaggaaaaccatttcttctgaagataaaccttttaacttgagaagccgcgaccccatctactccaacaagcttggcaagttctttgagatcaccccagagaaaaacccccagcttcgggacttggatatcttcctcagtattgtggatatgaacgagggagctcttcttctaccacacttcaattcaaaggcgatagtgatactggtaattaatgaaggagatgcaaacattgaactttgttgcctaaaagaacaac

SEQ ID NO: 355 - DNA, 308 bp, Glycine max
  Clone ID: LIB3072-055-Q1-K1-G11
accactggcgcagataccctggggctacggttctcttgtattgtctgtcgtgagtcaccatggtgagggatagtgtgctgaacgatgctctgaagagcatgtacaatgctgagaaaaggggaaagcgccaagtcatgattaggccatcctccaaagtcattatcaaattccttttggtgatgcaaaagcacggatacatcggagagtttgagtatgttgatgaccacagggctggtaaaatcgtggttgaattgaacggtagactgaacatgtgtggcgttattagtccccgttttgatgtgggcgtc

SEQ ID NO: 356 - DNA, 57 bp, Glycine max
  Clone ID: LIB3072-055-Q1-K1-G3
gagacctcaggtcaggcggggctaccggctgagtttaagcatatcaataagcggagg

SEQ ID NO: 357 - DNA, 164 bp, Glycine max
  Clone ID: LIB3072-055-Q1-K1-G4
gatcatgaaccagatcattatcctagtacaccgtattaaagaatttaagatatactatgatgagagcgcggtttccatgactgatgctgagagctggtttactggcatcagtatctgtctcatatggcatcgcatattgagataagtagaaccccattcacaac

SEQ ID NO: 358 - DNA, 314 bp, Glycine max
  Clone ID: LIB3072-055-Q1-K1-G5
gacagcaaaaacaattaataaagatgagtttgaagaacaacatggtggtgctaaaggtgtgtttgttgcttcttttccttgtgggggttacagctgcacgcatggaactgagcttcttcaaaagtgatcagtcatcaagttatgatgatgatgagtattcaaaaccatgctgtgatctctgcatgtgcacacgctcaatgccttctcaatgcagctgtgaagatattaggctgaattcatgccactcagattgtaagagctgtatgtgcacacgctcacagccaggacagtgtcgttgtcttgacaccaacgac

SEQ ID NO: 359 - DNA, 363 bp, Glycine max
  unsure at all n locations
  Clone ID: LIB3072-055-Q1-K1-G6
gaaagagaagcattagtaaaagcaagaagaactagtctaagcagaaatggcctcttcagtgatggcatctgtggccctcaaacctgcccctttcactgttgagaagtcctcagttagaggccttccctccctctcaaggaactcctcttcattcagagttgtggccagtggtggcaagaagatcaagactgacaagccttatggaattaatggtggcatggctttgagggaaggagttgatgcatctggcaggaaaggaaagggaaagggcgtttaccagtttgtagacaaatacggtgctaatgtcgatggttacagtcctatctacgacaccaaggactggtctncaaaccgtgatgtcta

SEQ ID NO: 360 - DNA, 313 bp, Glycine max
  Clone ID: LIB3072-055-Q1-K1-G7
gattcacgcaactaactaagaaagtcttccatagccccccaaaaatgaagagcaccatcttctttgctctctttctcttttgtgccttcaccacctcatacctaccttcagccatcgctgatttcgtgctcgataatgaaagtaaccctcttgaaaatggtggcacatattatatcttggcagacataacaacatttggtggaataagagcaagcccaacgggaaaatgaaagatccccctctcactgtgtgcaatctcgcaatgagctcgaccaagggattggaccatcatttcgtccccatatcgaatccg

SEQ ID NO: 361 - DNA, 363 bp, Glycine max
  unsure at all n locations
  Clone ID: LIB3072-055-Q1-K1-G8
gacagcaaaaacaattaataaagatgagtttgaagaacaacatggtggtgctaaaggtgtgtttgttgcttcttttccttgtgggggttacagctgcacgcatggaactgagcttcttcaaaagtgatcagtcatcaagttatgatgatgatgagtattcaaaaccatgctgtgatctctgcatgtgcacacgctcaatgccttctcaatgcagctgtgaagatattaggctgaattcatgccactcagattgtaagagctgtatgtgcacacgctcacagccaggacagtgtcngtgtcttgacaccaacgacctctgctacaaacctttgcagtncagagatgactagaaaaactaatagc

SEQ ID NO: 362 - DNA, 385 bp, Glycine max
  unsure at all n locations
  Clone ID: LIB3072-055-Q1-K1-G9
gacagcaaaaacaattaataaagatgagtttgaagaacaacatggtggtgctaaaggtgtgtttgttgcttcttttccttgtgggggtaacagctgcacgcatggaactgagcttcttcaaaagtgatcagtcatcaagttatgatgatgatgagtattcaaaaccatgctgtgatctctgcatgtgcacacgctcaatgcctnctcaatgcagctgtgaagatattaggctgaattcatgccactcagattgtaagagctgtatgtgcacacgctcacagncaggacagtgtcgttgtcttgacaccaacgacttctgctacaaaccttgcaagtccagagatgactaggaaaactaatggctctctcaaatggacgaagcccc

SEQ ID NO: 363 - DNA, 363 bp, Glycine max
  unsure at all n locations
  Clone ID: LIB3072-055-Q1-K1-H1
gacagcaaaaacaattaataaagatgagtttgaagaacaacatggtggtgctaaaggtgtgtttgttgcttcttttccttgtgggggttacagctgcacgcatggaactgagcttcttcaaaagtgatcagtcatcaagttatgatgatgatgagtattcaaaaccatgctgtgatctctgcatgtgcacacgctcaatgcctnctcaatgcagctgtgaagatattaggctgaattcatgccactcagattgtaagagccgtatgtgcatacgctcacagccaggacagtgtcgttgtcttgacaccaacgacttctgctacaaaccttgcaagtccagagatgactagaaaaactaatagc

SEQ ID NO: 364 - DNA, 190 bp, Glycine max
  Clone ID: LIB3072-055-Q1-K1-H10
gagtgcaatttagctgaagcaaagcaatggctacttcaaagttgaaaacccaaaatgtggttgtatctctctccctaaccttaaccttggtactggtgctactgaccagcaaggcaaactcagcggaaactgtttctttcagctggaacaagttcgtgccgaagcaaccaaacatgatccttcaaggaga

SEQ ID NO: 365 - DNA, 321 bp, Glycine max
  Clone ID: LIB3072-055-Q1-K1-H11
ggccgcatgggttgttaagttttggcctgtggccattgcaatatgcagagcgagttctccgatgcgaagaagcgcagagaggatgacaaccctcaaacactcgtttccctcgtacacgacagtgagaagaagaagagaaagagaaagagaaagaagaaaatcgaggaatcaaacgagcagccccaggttgaggtatgccctaaatccttagtagactcggttatcccaattgttgcacaaaaggaaaatgctgaaaccaccacagagaattctaacccaacccccaagataaagaagaagaagaagaataagaatgtgcaa

SEQ ID NO: 366 - DNA, 314 bp, Glycine max
  unsure at all n locations
  Clone ID: LIB3072-055-Q1-K1-H12
gacagcaaaaacaattaataaagatgagtttgaagaataacatggtggtgctaaaggtgtgtttgttgcttcttttccttgtgggggttacagctgcacgcatggaactgagcttcttcaaaagtgatcagtcatcaagttatgatgatgatgagtattcaaaaccatgctgtgatctctgcatgtgcacacgctcaatgccttctcaatgcagctgtgaagatattangctgaattcatgccactcagattgtaagagctgtatgtgcacacgctcacagncaggacagtgttcgtgtcttgacaccaacgac

SEQ ID NO: 367 - DNA, 358 bp, Glycine max
  unsure at all n locations
  Clone ID: LIB3072-055-Q1-K1-F5
ggattcacacaactaactgaaaaagtgttccatagccccccaaaaatgaagagcaccatcttctttgctctctttctcttttgggccttcaccaccttatacctaccttcaaccatcgctgatttcgggctcgattattaaagcaaccctcttgaaaatggttgcacaatttatatcttgtcagacataacaacatttgggtggaataagagcagccccaacgggaaattgaaagatgccctctcactgtggtgcaatctcgcaatgagctcgacanagggattggaacaatcatctcgtccccatatcgaatccgttttatcgccgaaggccatcctttgagccttaagttcgattc

SEQ ID NO: 368 - DNA, 308 bp, Glycine max
  Clone ID: LIB3072-055-Q1-K1-H3
gatagacattgagggttaacctcaggcagcagccctctcagattttcacacgcgcctcaaacgctttcacttctaacatctgcaggagctagtttccatggaaggtttggcgagttctgggatcagcacggttcgtgtttttggcattacaaaacaccaatctcgtgttcttacttcatcaactctgcatctgaggaataacagtgtgtgtggatttggaattggggttgagaagaagaagaagaaacagtgtttcgctgtggctgcttctcgtggtggctccaaagtggtccattttgagaacacac

SEQ ID NO: 369 - DNA, 257 bp, Glycine max; identical to SEQ ID NO: 336
  Clone ID: LIB3072-055-Q1-K1-H4

SEQ ID NO: 370 - DNA, 351 bp, Glycine max
  Clone ID: LIB3072-055-Q1-K1-D8
ggagggttggttcatttgatctgcgactgagagaagagaagagaattgtgatggggggaggacagggtcacggcacaacctacaaaggtgttaccattcatcagccaaagcgctggcacactatcaccggcaagggtttgtgcgcggtcatgtggttttgggtattctacagggcaaagcaagatggtcctgttgtattgggctggagacatccttgggagggtcaccatgatgatcatggcaagggccattagcattccttaggcatgagctccaagaacaggaagaacagaatttgaagtgtctgttgctgtggatgtgttgttcaaatgtttactttgatcaattcaa

SEQ ID NO: 371 - DNA, 410 bp, Glycine max
  Clone ID: LIB3072-055-Q1-K1-D9
gaggcttcagttcagccatgagaactcacactcacacttacacgtatactattttctctctaattcttctctccttatttcttcgaacccattccgaggttataacgttaacctctgatacatttaatgataagatcaaggagaaagacactgcatggtttgtgaaattctgcgttccctggtgcaagcattgtaagaatcttggttcattgtgggatgatttggggaaagcaatggaaggagaagatgaaatagaggttggagaagtcgattgcggcatggacaaagcagtatgttccaaagttgatattcactcctatcctacctttaaggttttctatgatggtgaagaagtagccagataccaaggtacaagagatgttgaatcaatgaaaacctttgttttggaa

SEQ ID NO: 372 - DNA, 424 bp, Glycine max
  unsure at all n locations
  Clone ID: LIB3072-055-Q1-K1-E10
gacagcaaaaacaattaataaagatgagtttgaagaacaacatggtggtgctaaaggtgtgtttgttgcttcttttccttgtgggggttacagctgcacgcatggaactgagcttcttcaaaagtgatcagtcatcaagttatgatgatgatgagtattcaaaaccatgctgtgatctctgcatgtgcacacgctcaatgcctnctcaatgcagctgtgaagatattaagctgaattcatgccactcaaaatggaagaactttattttcacacgcttacaagcaggacagtgtcgttgtcttgacaccaacgacttctgctacaaaccttgcaagttcagagatgactagaaaaactaatagctctctcaaatgggcgaagcccctttaggctttgnttggtatgttaggggagacaaattaaa

SEQ ID NO: 373 - DNA, 295 bp, Glycine max
  Clone ID: LIB3072-055-Q1-K1-E12
ggctgtggaaagaacgagcacacagagaaggagacatggcgttggagcaagcagtaccatcgtcatcaagcacattgaggaacgttctcaccttccccaaaaccctaatttcaaaaccccaattccaagtcgctgcttctccctcatggaaaacacagcggcgttgggggaacttgaagtgctccatgacgacaacgccatcataccctaagccctcggagattccgtggcagaaagagctctgcaactccgtcaacctcatcggcaatgtcgcggcccccgtcgaaatcaaaca

SEQ ID NO: 374 - DNA, 315 bp, Glycine max
  Clone ID: LIB3072-055-Q1-K1-E3
ggccgaaaagtagtaccaagatggcttcagttgtgtgtctcctctttggcttccatctcattgttatcatgtcaagttccttacccgcaactagtgaagtgtttgcaaaacagtatccatccacagaacccgtggaagaaaaactcacccaactccacttctatttccataacaacataacgggggaacacccaactgctatgaaaactgttttgcctcctaaggggtccattcatggttttggggctacttacacgatggatgaccctctaactgaaggaccaagtccaacttcaaagcttgtgggaagatctc

SEQ ID NO: 375 - DNA, 346 bp, Glycine max
  Clone ID: LIB3072-055-Q1-K1-E6
gaagaaaaggaagaaaaacaaaatcaaagaacacaaacaaagaagagagcaaaatgaagagtgcgatttgtgggagaatcctctctcccaaccacgtcttcaaaccaggggacacacattcaatttgtaaaggaccatactccaatctttgtgtacccatggttgtattggcaacagggcctggtataggaggtggggtgctggaaaagccagttattgaaaaagtcacccctggccgtgagtctgaatttgatttaaagaaatcacggaaatcggcaccgtcctatcgtgtaatattgcacaacgacaactttaataaacgggaatacgtggtccaagtgctgat

SEQ ID NO: 376 - DNA, 104 bp, Glycine max
  Clone ID: LIB3072-055-Q1-K1-E8
gtactttttgggatacatcacagaaatgaatcatttttccatcatggagtctgtgtttgtttgtgatttcttcatattcttgttcttatggattgctctgctac

SEQ ID NO: 377 - DNA, 404 bp, Glycine max
  unsure at all n locations
  Clone ID: LIB3072-055-Q1-K1-E9
gactttgagttcgaactaaacaattcaattcaatctgcctcgatcatggagaggaaaacatttgggtttttgttcttgctcctccttgtcttagcttctgatgtgacggtgaagagagcagaggcgaaagattgcttgacaaggaggcacgggttccagggtagatgcttattcgacaggcaatgtgcacatgtgtgcaggagcgatggtttcatcggtggtcagtgccgaggccctcttcgcaaatgcctttgcagcangccatgttgatcgaaattactactgccaaagaggccatgaaataaacaaacatacaaataaataaatagctctaaccgacacatatgtacgtagtgtcggggttctagttagctaggtaggtacgtgtgtcttttggtatcgat

SEQ ID NO: 378 - DNA, 328 bp, Glycine max
  Clone ID: LIB3072-055-Q1-K1-F1
gacagcaaaaacaattaataaagatgagtttgaagaacaacatggtggtgctaaaggtgtgtttgttgcttctttcccttgtgggggttacagctgcacgcatggaactgagcttcttcaaaagtgatcagtcatcaagttatgatgatgatgagtattcaaaaccatgctgtgatctctgcatgtgcacacgctcaatgcctcctcaatgcagctgtgaagatattaggctgaattcatgccactcagattgtaagagctgtatgtgcacacgctcacagccaggacagtgtcgttgtcttgacaccaacgacttctgctacaaacc

SEQ ID NO: 379 - DNA, 275 bp, Glycine max
  unsure at all n locations
  Clone ID: LIB3072-055-Q1-K1-F10
gacagcaaaaacaattaataaagatgagtttgaagaacaacatggtggtgctaaaggtgtgtttgttgcttcttttccttgtgggggttacagctgcacgcatggaactgagcttcttcaaaagtgatcagtcatcaagttatgatgatgatgagtattcaaaaccatgctgtgatctctgcatgtgcacacgctcaatgcctnctcaatgcagctgtgaagatattaggctgaattcatgccactcagattgtaagagctgtatgtgcacacgc

SEQ ID NO: 380 - DNA, 373 bp, Glycine max
  Clone ID: LIB3072-055-Q1-K1-F11
aagacgacagaaggggataacaatccctattaaaatcttctaaaattaaattaccatatatagtcacattggctttacactttgtgaggtctaaaatgttgtccatttttcacaaggggtttgctcacccacctgaagagcttaaaagccctgcatctaacagtggctccaacaagcctaagattcctgaggaaactctaagagaatttctttctcatcattcccataacactttttctctgagttttgatcactttgctgttctagcttatactcgtcctgatccacctttctttgttcatcaaaggttgttttgtgggattgatgacatatactgtatctttttggggagcttgaacaatttgtgctcact

SEQ ID NO: 381 - DNA, 253 bp, Glycine max
  Clone ID: LIB3072-055-Q1-K1-F12
gcactttgagttcgaactaaacaattcaattcaatctgcctcgatcatggagaggaaaacatttgggtatttgttcttgctcctacttgtcttagcttctgatgtgacggtgaatagagcataggcgaaagattgcttgacatggaggcacgggttccagtgtagatgcttattcgacaggcaatgtgcacatgtgtgcaggagcgatggtttcatcggtggtcagtgccgaggccctattcgcatatgcttt

SEQ ID NO: 382 - DNA, 354 bp, Glycine max
  Clone ID: LIB3072-055-Q1-K1-D6
gattgtaaagcattcttcgcctttctctctcttctttttactctctctctgtctctctctacgctttctcgttcgagatccctcaagggatccactaactgaaggagaaatggggttgacattcaccaagcttttcagccggcttttcgccaagaaggaaatgcgaattctgatggtgggtctcgatgcagctggtaagaccaccatcctgtacaagctcaaacttggagagatcgttaccacaattcccaccattgggttcaatgtggagactgtggaatacaagaacattagtttcactgtctgggatgttggtggccaggacaagattcgtcccttgtggaggcactactt

SEQ ID NO: 383 - DNA, 314 bp, Glycine max
  Clone ID: LIB3072-055-Q1-K1-F2
gacagcaaaaacaattaataaagatgagtttgaagaacaacatggtggtgctaaaggtgtgtttgttgcttcttttccttgtgggggttacagctgcacgcatggaactgagcttcttcaaaagtgatcagtcatcaagttatgatgatgatgagtattcaaaaccatgctgtgatctctgcatgtgcacacgctcaatgcctcctcaatgcagctgtgaagatattaggctgaattcatgccactcagattgtaagagctgtatgtgcacacgctcacagccaggacagtgtcgctgtcttgacaccaacgac

SEQ ID NO: 384 - DNA, 370 bp, Glycine max
  Clone ID: LIB3072-055-Q1-K1-F3
gatagacattgaggtttaacctcagtcaccagccctctcagattttcacacgcgcctcaaacgctttcacttctaacatctgcaggagctagtttccatggaaggtttggtgagttctgggatcagcacggttcgtgtttttggcattacaaaacaccaatctcgttttcttccttcatcaactctgcatctgaggaataacagtgtgtgtggatttggaattggggttgagaagaagaagaagaaacagtgtttcgttgtggctgcttctgttggtggctccaaagtggtccattttgagaacacactccctttcaaagaggttcttgagctttggagaaatggtgatgctgtgtgctttgatgtggat

SEQ ID NO: 385 - DNA, 219 bp, Glycine max
  Clone ID: LIB3072-055-Q1-K1-B11
gacacagctaactaagaaagtgtttcataggctcccaaaaatgaggagcaccatcttctttgctctcgttctcttttgtgccttcagcaccttatacctacctttagccatcgctgatttcgagctcgatcatgaacgtaaccctccttgaaatggtggcacatattatatcgtggcagacataacatcatttggtggaataagagcagcccccacggg

SEQ ID NO: 386 - DNA, 358 bp, Glycine max
  unsure at all n locations
  Clone ID: LIB3072-055-Q1-K1-B2
gacagcaaaaacaattaataaagatgagtttgaagaacaacatggtggtgctaaaggtgtgtttgttgcttcttttccttgtgggggttacagctgcacgcatggaactgagcttcttcaaaagtgatcagtcatcaagttatgatgatgatgagtattcaaaaccatgctgtgatctctgcatgtgcacacgctcaatgcctnctcaatgcagctgtgaagatattaggctgaattcatgccactcagattgtaagagctgtatgtgcacacgctcacagtcaggacagtgtcggtgtcttgacaccaacgacttctgctacaaaccttgcaagtncagagatgactagaaaaacta

SEQ ID NO: 387 - DNA, 314 bp, Glycine max
  Clone ID: LIB3072-055-Q1-K1-B4
gacagcaaaaacaattaataaagatgagtttgaagaacaacatggtggtgctaaaggtgtgtttgttgcttcttttccttgtgggggttacagctgcacgcatggaactgagcttcttcaaaagtgatcagtcatcaagttatgatgatgatgagtattcaaaaccatgctgtgatctctgcatgtgcacacgctcaatgccttctcaatgcagctgtgaagatattaggctgaattcatgccactcagattgtaagagctgtatgtgcacacgctcacagtcaggacagtgtcgttgtcttgacaccaacgac

SEQ ID NO: 388 - DNA, 145 bp, Glycine max
  Clone ID: LIB3072-055-Q1-K1-B5
gctggaagaggagtgaagcggcagagggaggagcggcattaaaaatgcagatcttcgtgaaaaccctaacggggaagaccataaccctcgaggtcgaaagcagcgacaccattgacaatgtcaaggctaagattcaagacaagga

SEQ ID NO: 389 - DNA, 223 bp, Glycine max
  Clone ID: LIB3072-055-Q1-K1-B6
ggaaacagagagtgatttcagtgagtgatcggtgttcacttgatctcatcataatcgtcagcgtcaattgaagaagatgccgatcagaaacatcgccgtcggaaggcctgaagaggcgactcaccccgacacgttgaaggcggctttggctgagttcatctcaaccttcatcttcgtgttcgccggctcaagctccggcatcgcctacaacaagctcaccgac

SEQ ID NO: 390 - DNA, 358 bp, Glycine max
  Clone ID: LIB3072-055-Q1-K1-B7
ggcttattcacgcaactaaataagaaatgaagagtactatcttctttgctctctttctagtttgtgccttcaccatctcatacctgccttcagccaccgctcagttcgtgctcgacactgatgatgatcctcttcaaaacggtggcacatactgtatgttgccagttatgagaggaaagggcggtggaatagaagtagattcaactggaaaagaaatatgccctctcactgttgtgcaatcacccaatgagctcgataaggggattggactagtctttacatctccattacatgccctttttatcgccgaaggctatcctttgagcattaagtttggttcatttgcagttataacgct

SEQ ID NO: 391 - DNA, 343 bp, Glycine max
  Clone ID: LIB3072-055-Q1-K1-B9
ggcgctaacaacaactaacgtgcaagttccaaggcggagaaaacaataatggccaccaacgaggagagggatatggagaacaagaagagtgaggaagaactgaagcatctcgggtttgtgaagattgcggcaatgaaagccttagtgtgtgtgtcgaatctctacggcttcgcaaagcaaaactcgggacttttgagatctgctgttggaaccgtggaagacactgtaaccaccgttctgggtcccgtctaccacaaattcaacgctgttcccaaccacatcctcctttttgtcgacaacaaggtggatgaagctgctcacaaattcgatgagcatgcacctt

SEQ ID NO: 392 - DNA, 333 bp, Glycine max
  Clone ID: LIB3072-055-Q1-K1-C1
gatgcaactgaataattaagaaaagccatttccatagcagcctaagaaaatgaagagcactagcttggtcgctatctttctactttgcgccttcacctcatacctaccttgcgccaccgcccaggacgtgctcgacgtggatggcgatccgattcggaacggtttcatatactacgttttgccggcaataagaggaaacggtggcggaatagaacgagccgcactcgggaaagacacttgccctatcactgtagtgcaatctcccaatccaaactctaaggggttagaaattaagtttgaatctgcataccccgcctattacataaacgaaac

SEQ ID NO: 393 - DNA, 377 bp, Glycine max
  unsure at all n locations
  Clone ID: LIB3072-055-Q1-K1-C11
gacagcacaaacaattaataaagatgagtttgaagaacaacatggtggtgctaaaggtgtgtttgttgcttcttttccttgtgggggttacagctgcacgcatggaactgagcttcttcaaaagtgatcagtcatcaagttatgatgatgatgagtattcaaaaccatgctgtgatctctgcatgtgcacacgctcaatgcctcctcaatgcagctgtgaagatattaggctgaattcatgccactcagattgtaagagctgtatgtgcacacgctcacagncaggacagtgtcgttgtcttgacaccaacgacttctgctacaagccttgcaagtncagagatgactagaaaaactaatagctctctcaaatggac

SEQ ID NO: 394 - DNA, 254 bp, Glycine max
  Clone ID: LIB3072-055-Q1-K1-C12
ttgttacagcttacacaattaataaagatgagtttgaagaactgcatattagttctaagagcgtcgtgtgttgctctcatttacttgtaggggctacatgctgctcgcatggaactcagcttctctaatagtgatcagtcattataatatgattatgatgactattcataaccatgctgagaactctgaatgatcacacgctcaatgcctgatcacatgctctatgaatattttatgcatgatattcatgatat

SEQ ID NO: 395 - DNA, 360 bp, Glycine max
  Clone ID: LIB3072-055-Q1-K1-C4
gacagcaaaaacaattaataaagatgagtttgaagaacaacatggtggtgctaaaggtgtgtttgttgcttcttttccttgtgggggttacagctgcacgcatggaactgagcttcttcaaaagtgatcagtcatcaagttatgatgatgatgagtatccaaaaccatgctgtgatctctgcatgtgcacacgctcaatgccttctcaatgcagctgtgaagatattaggctgaattcatgccactcagattgtaagagctgtatgtgcacacgctcacagccaggacagtgtcgttgtcttgacaccaacgacttctgctacaaaccttgcaagtccagagatgactagaaaaactaat

SEQ ID NO: 396 - DNA, 345 bp, Glycine max
  unsure at all n locations
  Clone ID: LIB3072-055-Q1-K1-C5
ggaagctgaaccctaactagctgagcagacggaggagaactcgactgaagctgcctctgcgacgccgtttcgattcagcctcagacatttccgttgcagtcatggtgcaagaaaatggcaagaggaagaaaccaaacattctggtgactggcacaccggggacaggaaagacaactgtgtgcactgctctagctgaagccacccagctctgccacatcaatgtcggagaattagtcaaagaaaagaacttgcatgatggatgggatgatgagcttgattgttaccttcttaatgaagacttggtttgtgatgaactngangatgttatggaagaggggggaaaca

SEQ ID NO: 397 - DNA, 225 bp, Glycine max
  Clone ID: LIB3072-055-Q1-K1-C9
aggccacggcgggaagttcacgtgggtcggccacggctacgagcaaggtgagatgccgcacggtgctatggacgccaaggacccgaacttcgaggatcctgtggagatcgccaccgtgtgatcgcggtggtttccggtggccaggtctgtaaatagtagtaattggcgaaacgtgttttttcgtgttcaataatgtgaagcgaatcggagaagaagcgttttctc

SEQ ID NO: 398 - DNA, 362 bp, Glycine max
  unsure at all n locations
  Clone ID: LIB3072-055-Q1-K1-B1
ggcacaagtgagtttgttgatcgagataactagaaacagtgtgatgaaaatgaaggtccttggtttcttcgttgctacaattttggtagcatggcaatgccatgcgtacgatatgttccctctccgaatgaacactggctatggtgcccgtactccggaggtgaaatgcgcaagttggaggcttgctgtggaagcacacaacatctttggctttgagaccattcctgaagagtgcgttgaagcaacaaaggaatacatncatggcgaacaatatagatcagactccaaaacagttaaccaacaagcttacttttatgccagagacctcgaagtccatgccaaggacacatttgtgttcagta

SEQ ID NO: 399 - DNA, 178 bp, Glycine max
  Clone ID: LIB3072-055-Q1-K1-D11
acggagggggaccacactcttaacacccactctaaattcctttctgcctggtgaattagcgcacttttccaacctttaattttaagcttaattggattccttttttttcttttccaaatggccacggttaaggttgcccttcaaccaccaccaccggttccggaaattgaaccacccg

SEQ ID NO: 400 - DNA, 372 bp, Glycine max
  Clone ID: LIB3072-055-Q1-K1-D2
gacagcaaaaacaattaataaagatgagtttgaagaacaacatggtggtgctaaaggtgtgtttgttgcttcttttccttgtgggggttacagctgcacgcatggaactgagcttcttcaaaagtgatcagccatcaagttatgatgatgatgagtattcaaaaccatgctgtgatctctgcatgtgcacacgctcaatgccttctcaatgcagctgtgaagatattaggctgaattcatgccactcagattgtaagagctgtatgtgcacacgctcacagccaggacagtgtcgttgtcttgacaccaacgacttctgctacaaaccttgcaagtccagagatgactagaaaaactaatagctctctcaaa

SEQ ID NO: 401 - DNA, 130 bp, Glycine max
  Clone ID: LIB3072-055-Q1-K1-D3
gccagcaaaaccaattaataaagatgggtttgaagaacaccttggtggtgctaaaggtgtgttggtggtttcttttcctggggggggttacagctgcacccatggaactgacctttttcaaaagtgatca

SEQ ID NO: 402 - DNA, 356 bp, Glycine max
  unsure at all n locations
  Clone ID: LIB3072-055-Q1-K1-D4
gacagcaaaaacaatgaataaagatgagtttgaagaacaacatggtggtgctaaaggtgtgtttgttgcttcttttccttgtgggggttacagctgcacgcatggaactgagcttcttcaaaagtgatcagtcatcaagttatgatgatgatgagtattcaaaaccatgctgtgatctctgcatgtgcacacgctcaatgcctnctcaatgcagctgtgaagatattaggctgaattcatgccactcagattgtaagagctgtatgtgcacacgctcacagccaggacagtgtcgttgtcttgacaccaacgacttctgctacaaaccttgcaagtccagagatgactagaaaaac

SEQ ID NO: 403 - DNA, 309 bp, Glycine max
  Clone ID: LIB3072-055-Q1-K1-D5
gattcacacaactaactgagaaaggcttccatatccccccaaaaatgaagagcaccatcttctttgctctctttctcttttgtgccttcaccacctcatacctaccttcagccatcgctgatttcgtgctcgataatgaaggtaaccctcttgaaaatggtggcacatattatatcttgtcagacataacagcatttggtggaataagagcagccccaacgggaaatgaaagatgccctctcactgtggtgcaatctcgcaatgagctcgacaaagggattggaacaatcatctcgtccccatatcgaa

SEQ ID NO: 404 - DNA, 300 bp, Glycine max
  Clone ID: LIB3072-054-Q1-E1-G4
gatagcagcatcatacaaagcattgaattcaaaaactaagttcatttcttgtgctttgctttattcctcaaaaccaaacatgtcgaacacatgcggcaactgtgactgcgctgacaagactaactgcaccaagggaaacagctatggtgttagagtagagactgagaagagctacatcgagactgttgacatggatgttccagcagctgagcatgatgggaagtgcaagtgtggcactaactgcacttgcaccgactgcacttgtggccattaaggaatatgtatgaaaatgtaattgcc

SEQ ID NO: 405 - DNA, 195 bp, Glycine max
  Clone ID: LIB3072-054-Q1-E1-G6
gacagcaaatacaattaataatgattagtttgactgaaacattcgcgacgctaaacgagtgtttgttgcctcttttccttgtgggggttacagctgcactcatgtgactgagcttcttcaatggtgatcagtcatcaagttatgatgatgatgagtattcacaaccatgctgtgatctctgcatgtgcacaccac

SEQ ID NO: 406 - DNA, 372 bp, Glycine max
  Clone ID: LIB3072-054-Q1-E1-G7
gacagcaaaaacaattaataaagatgagtttgaagaacaacatggtggtgctaaaggtgtgtttgttgcttcttttccttgtgggggttacagctgcacgcatggaactgagcttcttcaaaagtgatcagtcatcaagttatgatgatgatgagtattcaaaaccatgctgtgatctctgcatgtgcacacgctcaatgcctcctcaatgcagctgtgaagatattaggccgaattcatgccactcagattgtaagagctgtatgtgcacacgctcacagccaggacagtgtcgttggcttgacagcaacgacttctgctacaaaccttgcaagtccagagatgactaaaaaaactaatagctctctcaaa

SEQ ID NO: 407 - DNA, 344 bp, Glycine max
  Clone ID: LIB3072-054-Q1-E1-H1
ggccgtcacacagagagagaagagacaatgaagtttaacccaagggtttcctcaagccgtcgaaagagccgcaaggctcacttcaccgctccgtcgagcgtgtgtcgcgtcctgatgagcgcgcctctctcgaccgatctccggtcgaagtacaacgtgcggtccattccggttcgcaaggacgacgaggtgcaggtggtgaggggaacctacaagggccgcgagggcaaagtggtccaggtctatcgccgcaagtgtgtcatccacatcgagcgcatcacccgcgagaaggttaacggctccagcgtcaacgttgggattcacccttccaaagttgtcgtcac

SEQ ID NO: 408 - DNA, 294 bp, Glycine max
  Clone ID: LIB3072-054-Q1-E1-H11
acgcatccgtaccgatacgacaacacaaggggactttacgttcgaactaaacaattcaattcattctgcctcgatcatgggaaagaaaacatttgggtttttgttcttgctcctccttggcgttggggtctgatgtgacagtgataagactaggggcgaacgattgcttgacaaagatgcacggattccacagtagatgcttattcgacaagcaatgtgcacatttctgcaagaaccataggttcatcggttgtcaatgccaaaggcctcttcacaaatgcttttgcaacaaga

SEQ ID NO: 409 - DNA, 103 bp, Glycine max
  Clone ID: LIB3072-054-Q1-E1-H12
acgctggcaaaacagacagggaggtacagcacaaacaattaatctcaattcattcgaccaccatcatggccatgctaaaagtcagcttgtatgcttcttctcc

SEQ ID NO: 410 - DNA, 353 bp, Glycine max
  Clone ID: LIB3072-054-Q1-E1-H3
attcacacaactaactaagaaagtcttccatagccccccaaaaatgaagagcaccatcttctttgctctctttctcttttgtgccttcagcacctcatacctaccttcagccatcgctgatttcgtgctcgataatgaaggtaaccctcttgaaaatggtggcacatattagatcttgtcagacataacagcagttggtggaataagagcagccccaacgggaaatgaaagatggcctctcactgtggtgcaatctcgcaatgggctcgacaaagggattgggagaagcatcgcgtcgccatatcgaatccgttttatcgccgaaggcatcctttgagccttaagttcgattc

SEQ ID NO: 411 - DNA, 123 bp, Glycine max
  Clone ID: LIB3072-054-Q1-E1-H5
tgggagagaaagagagagaaagatgtcgaagcgtggcccagggggttccgcagggagtaagttccgcacgtcggtgcatcttccagtggcggcgaccgtgtagtgcgtccacaacaccggggc

SEQ ID NO: 412 - DNA, 86 bp, Glycine max
  Clone ID: LIB3072-054-Q1-E1-H6
tgcaggttacagctgcaaacagacgactaaaggtgacagcaagaccacattaatggtacatgattttagaaaacaacatggtggta

SEQ ID NO: 413 - DNA, 69 bp, Glycine max
  Clone ID: LIB3072-054-Q1-E1-H7
tacagcatcgagaagctggcagaaagattcagttgccagaagcctacatagggtccgctgactacttac

SEQ ID NO: 414 - DNA, 147 bp, Glycine max
  Clone ID: LIB3072-055-Q1-K1-A1
gaccgctaaaaccattgataaagatgaagttggagaaccaccttggggggcttaaaggggggttggtggttccttttccttgggggggttccagttgaccccttggacctgacctttttaaaaggggtccagccttaaggtattaat

SEQ ID NO: 415 - DNA, 369 bp, Glycine max
  Clone ID: LIB3072-055-Q1-K1-A10
gactttgagttcgaactaaacaattcaattcaatctgcctcgatcatggagaggaaaacatttgggtttttgttcttgctcctccttgtcttagcttctgatgtgacggtgaagagagcagaggcgaaagattgcttgacaaggaggcacgggttccagggtagatgcttattcgacaggcaatgtgcacatgtgtgcaggagcgatggtttcatcggtggtcagtgccgaggccctcttcgcaaatgcttttgcagcatgccatgttgatcgaaattactactgccaaagaggccatgaaataaacaaacatacaaataaataaatagctctaaccgacacatatgtacgtaggtgtcgggttctagc

SEQ ID NO: 416 - DNA, 324 bp, Glycine max
  Clone ID: LIB3072-055-Q1-K1-A11
attcacaattggaaataaaccttttgtcctcacaccagagcaggatattctaaaaactggagaaggcattacagaagtctgccttagtgggtttattgcttctgatgttcctcctccaaagggtccattgtggattcttggcgatgttttcatgagggcatatcacaccgtctttgactactgaaatctacaagttggttttgccgaaactgtctaattaggctttctggaggattttctttgaaaaattgttaagcgtgttgtaaataagctgctataacaattgtagctgggattcactctatggaatcacgaatggattta

SEQ ID NO: 417 - DNA, 371 bp, Glycine max
  unsure at all n locations
  Clone ID: LIB3072-055-Q1-K1-A2
ccagtttattttttcaccaccgcccattcagacaccgacaaatgggaagttctgtcgcaacagattcatgggcaacgacaacaaggttgtcggtggtgctgacgttaatggcccagatctcgcgtgggtgaacgagttgctgatgtaataggtgaaagatggtgacgacgaaaattaatggtagtgatcgatgactcatatcagtgaatgaaagtgtaaatacagcagagaaacattaaaaaaaaaaaacgtctctggcgtatctattgtcattgttaattactattgcttaattaaggtttcattgctttctgaatttgctgttaagtttgagacaatntatgtaatttggatttcatcttgtttttaat

SEQ ID NO: 418 - DNA, 321 bp, Glycine max
  Clone ID: LIB3072-054-Q1-E1-G2
gacagaacacaacacaaacacagagagagagagtgaataaatccagcattgttctgttctctgcaacattctccactctcaaccatggcttcaaagcttttactcatcactgtcttcgtttttgatttgattgcttttggacctgccatgggtgctgagcagagaagaagcaccgctagtgttgtgacggacaatgagtggtattagaattactgtgtctataactctgatatagcaactggctatggtgttggggcatttttgtttctcctgggtaggcaagtcctgataatggtggcaagtcgatgcttctggttgcgg

SEQ ID NO: 419 - DNA, 323 bp, Glycine max
  Clone ID: LIB3072-055-Q1-K1-A4
gagattttggttggaggaaaatacccaccgaaccatggctgcaaccattcctttctctctgcttaggaactgcgcgccattgaaactagcaacacctttcgctcgcaaagcctccatctttaatcttcttctccctcttcaaccacgcaggttggtctctagtacctgtgctgtgaacaatgaagaggctacagcaaaaacagcagctgttaattttgatagtgaagctccaacaatatttgataagatcataaataaggaaatcccttcgagcattgtatatgaggatgaaaaggttcttgcatttcgtgacattaatccac

SEQ ID NO: 420 - DNA, 292 bp, Glycine max
  unsure at all n locations
  Clone ID: LIB3072-055-Q1-K1-A6
gacagctaaaacaattaataaagatgagtttgaggaacaacatggtggtgctaaaggtgtgtttggtgcttcttttccttgagggggttacagctgcacgcatggaactgagctttttcaaaagtgatcagtcatcaagttatgatgatgatgagtattcaaaaccatgctgggatcattgcatgtgcacacgctcaatgcctccgtaatgcagcttgtaagatattaagctgaattgatgccactcatattgtaagagctgtatgtgcacacgcttacagncaggacagtg

SEQ ID NO: 421 - DNA, 312 bp, Glycine max
  Clone ID: LIB3072-055-Q1-K1-A7
gacagcaaaaacaattaataaagatgagtttgaagaacaacatggtggtgctaaaagtgtgtttgttgcttcttttccttgtgggggttacagctgcacgcatggaactgagcttcttcaaaagtgatcagtcatcaagttatgatgatgatgagtattcaaaaccatgctgtgatctctgcatgtgcacacgctcaatgccttctcaatgcagctgtgaagatattaggctgaattcatgccactcagattgtaagagctgtatgtgcacacgcttacagccaggacagtgtcggtgtcttgacaccaacg

SEQ ID NO: 422 - DNA, 293 bp, Glycine max
  Clone ID: LIB3072-055-Q1-K1-A8
gacagcaaaaacaattaataaagatgagtttgaagaacaacatggtggtgctaaaggtgtgtttggtgcttcttttccttgggggggttacagcttcacgcatggaactgaacttcttcaaaagtgatcagtcatcaagttatgatgatgatgagtattcaaaaccatgctgtgatctctgcatgtacacacgctcaatgccttctcaatgcagctgtgaagatattaggctgaattcatgccactcagattgtaagagctgtatgtgcacacgctcacagacaggacagtgt

SEQ ID NO: 423 - DNA, 345 bp, Glycine max
  Clone ID: LIB3072-054-Q1-E1-E3
gatgtgttaacaatcgtgaagttttttctttgagaagcaaaagatcttagtgcaagtaattaacatggaatctcagcaagcaaaccgtgaagaacttcatgagagggcaaggtaaggtgaaactgtggttcctggtggaaatggcgggaagagtcttgaggctcaagaacatcttgctgaaggaaggaaccgtggagggcagacgaggaaggagcagatggggagagaagggtaccaagagatgggacgcaaaggaggcctcagcgccatggacaagtctggtgtagagcgtgctgaagaggaacgcatagacatcgatgagtctaagtttaagaataaataaag

SEQ ID NO: 424 - DNA, 233 bp, Glycine max
  Clone ID: LIB3072-054-Q1-E1-E4
gacagcaaaaacaattaataaagatgagtttgaagaacaacatggtggtgctaaaggtgtgtttgttgcttcttttccttgtgggggttagagctgcacgcatggaactgagcttcttcagaagtgatcagtcagcaggtgaggagcaggagtacgcaaaaccatgcggtgatctctgcatgtcgagacgctcaatgccgcctcaatgcggctgtgaagatattaggctgaat

SEQ ID NO: 425 - DNA, 107 bp, Glycine max
  Clone ID: LIB3072-054-Q1-E1-E5
ggaagtgtacctgaggaacacttacttcgcgagtctttgtcgaagaacatataggtacccgttgtgtggttgatgcatctttgcggtgtcggggttacagctgcaaa

SEQ ID NO: 426 - DNA, 239 bp, Glycine max
  Clone ID: LIB3072-054-Q1-E1-E6
gataccaaaaacaaaacacaagccaagtgaaagtgagaaaaaataaaaatcaaagagcataatgtcagggatcattcacaagattggggagacccttcatgtgggagggcagaagaaggaggaggagcataacggtgagcacgatgctggagaatacaaaggggagcaccatggtgaacacagtagtgagtacaaacgagagcatcatggtgaacacaaagctggagagtaccatggtg

SEQ ID NO: 427 - DNA, 298 bp, Glycine max
  Clone ID: LIB3072-054-Q1-E1-E7
gacacttactagtagtaagcatggagtcctcaaagatctatgcttacctcttcctctgcatgatctttctctcttccgccactcggattctcggttgtggctactgtggcaaaccccccagaaagcacaagcgtggtaagaacaccagagacacccaaaacacccgttgttaggccaccagtcaccatccctcgcattagtgttcctcccgttggtcttccaccaatagtgcagcccccaggtattctcactccagttccaagtattaggccaccaaccactccagggaacgggagga

SEQ ID NO: 428 - DNA, 235 bp, Glycine max
  unsure at all n locations
  Clone ID: LIB3072-054-Q1-E1-E8
gaccttttagaacacaacacaataccaattatcctaacactctcaacccaacacaggttttttttttcttcagtttttctcttcggagagagtttttgttttgtcatttggtcttctcatgggtgggtttgaggagaggatgaaggatanggccaatgagctcaaggtcttgctcaagaaaggggtgaatattgtgggagattcatgcaagaaggggtggaacaaagtcagggac

SEQ ID NO: 429 - DNA, 398 bp, Glycine max
  Clone ID: LIB3072-054-Q1-E1-E9
ggaacatcaaaatcacattgagacagcaagcctaaaggaaataaggaataatatttctatctaaatggtgaaccgcatctcaaactatgttccgctcttcatcattttgattgttttggtaacagtgcaaaaacaagtggaaggattgacatgttcgagatatttcggtttatgttccgacacgagaagttgtgatcttaggtgtaaagcccgcaataagcatgcagaggggcgctgtgatgatgacttcaactgtacttgtatttacccttgtgactctcctcagccaaataaagacaccgagcctataaggaagtgcactagtggccttggactttgcagtgttgatcactgctatgatgattgttgcaattcaaaatgtgctaaacaattcaaag

SEQ ID NO: 430 - DNA, 289 bp, Glycine max
  Clone ID: LIB3072-054-Q1-E1-F1
ggcgtcaatgtggacacgtgaggcgcattttagtaacagtccacaagaccacgtactatatatatacgcgcatgggggcattctctttggcgtgcagttcaaagcgaaaagagattcgaatccatggaacggaaaggaaagttggagaagagaagaatggccgaagagggacatgtgagtggtgtccacagcgtggaggagtgggaggaacatctcaagaatggacaagagtccatgaaattgagtgtggtggattttactgcttcttggtgcggcacatgccgtttca

SEQ ID NO: 431 - DNA, 367 bp, Glycine max
  Clone ID: LIB3072-054-Q1-E1-F10
gtacagatgccaaaagacgacaacttgggattctcactcttcatttcttttcactctccctccatcatcgacaggactccctttttgtttctttcccctccttggcgtgggttctggtgtgacgttacagagaacagaggcgacacaatgcttgacacggaagcacgggttccattgtagatgcttattcgacacgcaatgtgcacatgtctgctggaccgatggtttcatctctgctcagtgccgtggccctcttcgcatatgcttttgcatcatgccatgttgatcgaatttaccactgccataccagccatgctatacactcaccctcatctccattgatatctctaacccacacatatttacc

SEQ ID NO: 432 - DNA, 395 bp, Glycine max
  Clone ID: LIB3072-054-Q1-E1-F11
gatcaagaaccagttcaatatcctagtacaccgtattaaagaatttaagatatactatgatgagagcgcggttcccattactgttgcggggagttgttttcctggcatcagtttctgtcgcagttggcattgcgtattgggaaaagcagaaccccagtcacaacaagtgcctccgaagttgcaatagcgagaaagactcctacaggaaccaagcatgccacgctcgttgcaacctccttaaggtggaggaagaagaagaatgcgaagaatgtcaaattccacgaccacgatcacaacacccggagagggaacgtcagcaacacggtgagaatgaggaagacgaacgtgagcaaccacgtccattcccattcccacgcccaagccaatctcatcaa

SEQ ID NO: 433 - DNA, 176 bp, Glycine max
  Clone ID: LIB3072-054-Q1-E1-F12
gcttcacagcaaaaacagcaagcaaagttgcgtttgaagattaccatggttgtgctaaaagtttctttgatgcgtcttatccttgtgggggttcaagctgaacttatgaaattaaacgtcgacatgactcatcagacgtcaagttataatgatgggaagtaatcacttgcatgctg

SEQ ID NO: 434 - DNA, 344 bp, Glycine max
  Clone ID: LIB3072-054-Q1-E1-F2
gcactcactcatacaatagagaccagcttttgcttctttgtgaacatggggatgaggaaatcatgtggcttcttcttcttgctcctcctccttgtctttgcttcccaggtggtggtgcagacggagggaagagtgtgtgagtcacaaagccacgggttccatggtttgtgtaatagagaccacaactgtgctttggtctgcaggaacgaaggtttctccggtgggaggtgcaaaggcttccgccggcgctgcttttgcaccaggatttgttgagatctcatcagacactactcttgccatgcaaattaataaatcatagctaggccaaataaattgcatctact

SEQ ID NO: 435 - DNA, 236 bp, Glycine max
  Clone ID: LIB3072-054-Q1-E1-F4
cgccaaatggaagggtatcacctttatgactagtagacaaggaatgggcgttggaggaggaacgccctatggatttgatgtaggccaatctgagagaggaacagtccttaaagggttggatttaggagtacaaggcatgcgagtatgaggccagcggctgttaattgttcctcctgaacttgcctatggaagcaaaggagtccaagaaatccctcccaagtgaacaatagagttgg

SEQ ID NO: 436 - DNA, 307 bp, Glycine max
  Clone ID: LIB3072-054-Q1-E1-F7
acgcatccgacacgcgtccgtacgaagacgacagaaggggactcactcatacaatagagaccagcttttgcttctttgtgaacatggacatgaggaaatcatgtggcttcttcttcgtgctcctcctccttgtcattgcttcccaggtggtggtgcagacggacggaagagtgtgtgagtcacagatccacgggttccatggtttgtgtaagagagaccatacctgtgctttggtctgcaggaacgaatgtttctccggtggcaggtgcaaaggcttccgtcgccgctgagtttgcaccaggatttg

SEQ ID NO: 437 - DNA, 332 bp, Glycine max
  Clone ID: LIB3072-054-Q1-E1-F9
ggagacattgttatgaggaaagtttttgtcactgaccaggacagaattgcaggagtaaactcctttcacgacacaaacaacgtacgtggtgtggcacgcgtaatggttgcttgtcaaaacagtggtatatcgatggacatctacaatatgtgtcacaagtacctaatggatacgaaacattttggagcaccattagcagctttccaaatcatccagcataaacttgttcagatgcctggtaatattcactctacgatacttgttggttgacgcctctgcaaattgtctgacaatggtaaaactacaccagttcaatctagcttgcaaaactc

SEQ ID NO: 438 - DNA, 342 bp, Glycine max
  Clone ID: LIB3072-054-Q1-E1-G1
gacaacacaacacaaacacacagagttagaggagaaatcatcatggcatcagcagcatctgggtttgtgttgtcacttaatgttgcagctgccaccacaaactcaagggtggtcatgttcaacacaaagaacaacgcttctaggcttgttgtaagggcttcagatgagcctgcagcggcggcacccgccaccgccacacccccagctgaagctgaagctaaaccaaagccaccacctattggccccaagagaggtgctaaggtgaagattcttaggaaggaatcctactggtacaaaggcactggttcagtgggtgctgttgatcaggaccccaacactcgc

SEQ ID NO: 439 - DNA, 368 bp, Glycine max
  Clone ID: LIB3072-054-Q1-E1-E1
gacagcaaaaacaattaataaagatgagtttgaagaacaacatggtggtgctaaaggtgtgtttgttgcttcttttccttgtgggggttacagctgcacgcatggaactgagcttcttcaaaagtgatcagtcatcaagttatgatgatgatgagtattcaaaaccatgctgtgatctctgcatgtgcacacgctcaatgcctcctcaatgcagctgtgaagatattaggctgaattcatgccactcagattgtaagagctgtatgtgcacacgctcacagccaggacagtgtcgttgtcttgacaccaacgacttctgctacaaaccttgcaagtccagagatgactagaaaaactaatagctctct

SEQ ID NO: 440 - DNA, 341 bp, Glycine max
  Clone ID: LIB3072-054-Q1-E1-G12
acccgtacgtatcggtacaagaatacgtcaggatgcgagagtactacataagggcaatgtcgatagcatgtcactaacaactacattcatacaaattcaccattcccattggaaatcattaatggagtgaggcatcaactaacacattacttaaaaaagggcacgataaatcggccttacgctcatgttccatgcttacctaggcatgcacgcgaccaccaagcgcttcaatagagtcacctatgttcacttcactgcggttccatttaaaacatcaagagcgtgaaaatcacgacgtcacccaaattacacgttttgcaccacatcccgcattcaccatc

SEQ ID NO: 441 - DNA, 185 bp, Glycine max
  Clone ID: LIB3072-054-Q1-E1-C12
gacagcagcaacaattaattcagatgagtttgaagaacaacatggtggtgctaaatgtgtgtctgttgcttctttgggttgggggggttacagctgcacgcaaggaactgagcttcttcaaaagtgatcagtcatcaagttatgatgatgatgagtattcaaaaccatgctgtgatctctgcatg

SEQ ID NO: 442 - DNA, 327 bp, Glycine max
  Clone ID: LIB3072-054-Q1-E1-C2
gagcgccaatgtttttttcagaggagtttcatcttgtaatcaaaagagtttatcttatagtaagaaatcgatgtcttactccattttaaggaacaaaacaagagaacaatagcctgacaaagggtttagccataaaatcgaatccagcattgatttgagatattgataaggtgaatactcatttctcgtcaatgctaggcataatgcgggtatagggacctaaaaaagattatcttttcgtccgatcgtatgaactttaacgtgtatgaagtgtcatttcctaacgtagattttaagtttagtaggtagatgaagagtccagttaac

SEQ ID NO: 443 - DNA, 370 bp, Glycine max
  Clone ID: LIB3072-054-Q1-E1-C3
ggcaaacgcaagtgcccttagacttaattggaccactatcctatgcatgcctttgatttatattataaaataaaaataatactatatataacatgttaattgcttaatatgtgctttaagcgtaaagaataacatcgtgaaatcaaattacccctttttcaatacgtgttgaatcatcgatcttggtttgtaatttggttgtatattcacaaaattaataagtatattgtgatgtgattaattcccttctctgttatggtgtacttgccttccctgtattgtccatctccatcatctgtctattaataagaattcttatgtgatatttccaaaaaaaaaaaggggcgcgaaaaaaaaaagcgggcgctct

SEQ ID NO: 444 - DNA, 355 bp, Glycine max
  unsure at all n locations
  Clone ID: LIB3072-054-Q1-E1-C4
ggaaacaaagcagggataggaagaaggaaaaatggaaaagtatttcggaaacgcttatcgtggcgacccgggagtgccccattcggacccggatcgcttcgtcaacatatgggtcggatccgctgccttcgctgttcgcacatatttcaatccctacatgtggcagctctctaatcagttcaattggcatgacaaagcaatgctatatgagcaatatcactggaaacaggcaacgaagaagaatcagccatatgagttcatgtggaacaagacctgggacaagaaccaccgggaagattacgactacaactgggctatttactttccttaaggcacttcganttttcgtgcatac

SEQ ID NO: 445 - DNA, 130 bp, Glycine max
  Clone ID: LIB3072-054-Q1-E1-C5
gacagaaaggggcagacgcaggtgcccttacacttaattggcccactatcctatgcatgcctttgacttggcctatcgaatattgacagtacgatatatggcatgttgattgcttggtaggtgcgtgagg

SEQ ID NO: 446 - DNA, 369 bp, Glycine max
  Clone ID: LIB3072-054-Q1-E1-C7
gacagcataaacaattaataaagatgagtttgaagaacaacatggtggtgctaaaggtgtgtttgttgcttcttttccttgtgggggttacagctgcacgcatggaactgagcttcttcaaaagtgatcagtcatcaagttatgatgatgatgagtattcaaaaccatgctgtgatctctgcatgtgcacacgctcaatgcctcctcaatgcagctgtgaagatattaggctgaattcatgccactcagattgtaataactgtatgtgcacacgctcacagccaggacagtgtcgttgtcgtgacaccaacgacctctgctacataccttgcaagtccagagatgactagaaaaactaatagctctctc

SEQ ID NO: 447 - DNA, 377 bp, Glycine max
  Clone ID: LIB3072-054-Q1-E1-C8
ggagtagaagaaaatggatccgcaaaaagcgcaagcagaagcctcaaagagaccaccaggtcatggtgctactgaagtgcttcatcagaagaaatcacttcctttcagcttcaccacaatgactatagctggtttgcttattacagctgctgtaggatacagtgtcttgtatgtgaagaaaaagcctgaagctagtgcaaaggatgtaacaaaggtttctgtcggagttgcaaaacctgaagagactcaccctgagaagtagttaatagatttatgatacatatataccacttgtctctctcttcgtttcatttccttttttttcattttccatgtgtcatctctgtggtgtcgttatttataagaggacacgtaca

SEQ ID NO: 448 - DNA, 253 bp, Glycine max
  Clone ID: LIB3072-054-Q1-E1-C9
ggacgcgtacgtaatgcaacgacaacacgacagaaagggacagctacgacagctaaaaaacatgagtttggatgagctgcatagaggtgctaatggtgtatatgatgcttcatttccatgtatgggtttgaggagcagacatcgaagtgaactgcgtcattggtgcttagtcaccatgtgagggttacaactactagcatggaacagaccgtcatcactgcttgtgaatcagcacattagcaccacaatgcat

SEQ ID NO: 449 - DNA, 276 bp, Glycine max
  Clone ID: LIB3072-054-Q1-E1-D1
acaaaagacaggtagggatgcaatcatacaatagaaaggaacttttgcttcattgtgacaatggggatcaggtgctcaagtagattcatcgtcatgcgcgtcatcaatatctatgctgctcaggttgtgatacaaacagagggaggtactggtgagatagacgagaaaaggttacattgctagtatgatacagaccaggactgtgctttagattacacgaacgaaagtttctccggcggcaagtgcaaacggttcctctagaggatcatttgctac

SEQ ID NO: 450 - DNA, 421 bp, Glycine max
  unsure at all n locations
  Clone ID: LIB3072-054-Q1-E1-D11
gactttgagttcgaactaaacaattcaattcaatctgcctcgatcatggagaggaaaacatttgggtttttgttcttgctcctccttgtctgagcttctgatgtgacggtgaagagagcagaggcgaaagattgcttgacaaggaggcacgggttccagggtagatgcttattcgacaggcaatgtgcacatgtgtgcaggagcgatggtttcatcggtggtcagtgccgaggccctcttcgcaaatgcttttgcagcaggccatgttgatcgaaattactactgccaaagagggcatgaaataaacaaacaaacaaataaataaatagctctaaccgacacatatgtacgtagtgtccgggttctagctagctaggtaagtacgtgtgtcntttgttatcgatcctagtttggtggagca

SEQ ID NO: 451 - DNA, 300 bp, Glycine max
  Clone ID: LIB3072-054-Q1-E1-D4
gacagcaaaaacaattaataaagatgagtttgaagaacaacatggtggtgctaaaggtgtgtttgttgcttcttttccttgtgggggttacagctgcacgcatggaactgagcttcttcaaaagtgatcagtcatcaagttaggatgatgatgagtattcaaaaccatgctgtgatctctgcatgtgcacacgctcaatgcctcctcaatgcagctgtgaagatattaggctgaattcatgccactcagattgtaagagctgtaggtgcacacgctcacaggcaggacagtgtcgttggc

SEQ ID NO: 452 - DNA, 383 bp, Glycine max
  Clone ID: LIB3072-054-Q1-E1-D5
gattcacgcaactaaataagaaatgaagagtactatcttctttgctctctttctagtttgtgccttcaccatctcatacctgccttcagccaccgctcagttcgtgctcgacactgatgatgatcctcttcagaaccgtggcgcatactatatgttgccagttatgagaggaaagggcggtggaatataagtagattcaactggaaaagaaatatgccctctcactgttgtgcaagcaggcaatgagctcgatgaggggattgggctagtcgttacatctccagttgatgccctttttagcgcctaaggctagcctttgagcattaagtttggttcatttgcagttaatacgctgtgtgccggcatgcctactgagttgggct

SEQ ID NO: 453 - DNA, 385 bp, Glycine max
  Clone ID: LIB3072-054-Q1-E1-D6
ggtcgagaaacggcgcactccgtctgttcctcaccgtcaccggcgcgcgcaccctctgttccagcgattcctaattaagttgggaaataaaaaagacttcaaatttcccagatggctgcagcctttgcttccagatgcgcgcgggtgggccgttctctgtctggtggattaaccaacagttcccctggtttatttacctcatcacatggcatgagatgcaacaatttgttttctcagcaacaacgtaccttcatggaagtgaggactgttctcaaggttgtcgataactcaggtgctaaaaaggggatgtgcatacaagcattgacaagggaagaaaggggcaagattacgtgacacaataatagcatctgtgaaggaagcacat

SEQ ID NO: 454 - DNA, 404 bp, Glycine max
  Clone ID: LIB3072-054-Q1-E1-D7
gacacaactaactaagaaagtcttccatagccccccaaaaatgaagagcaccatcttctttgctctctttctcttttgtgccttcaccacctcatacctaccttcagccatcgctgatttcgtgctcgataatgaaggtaaccctcttgaaaatggtggcacatattatatcttgtcagacataacagcatttggtggaataagagcagccccaacgggaaatgaaagatgccctctcactgtggtgcaatctcgcaatgagctcgacaaagggattggaacaatcatctcgtccgcatatcgaatccgttttatcgccgaaggccatcctttgagccttaagttcgattcatttgcagttataatgctgtgtgttggaattcctaacgattggtctgttgtgg

SEQ ID NO: 455 - DNA, 386 bp, Glycine max
  Clone ID: LIB3072-054-Q1-E1-D9
gacagcaaaaacaattaataaagatgagtttgaagaacaacatggtggtgctaaaggtgtgtttgttgcttcttttccttgtgggggttacagctgcacgcatggaactgagcttcttcaaaagtgatcagtcatcaagttatgatgatgatgagtattcaaaaccatgctgtgatctctgcatgtgcacacgctcaatgcctcctcaatgcagctgtgaagatattaggctgaattcatgccactcagattgtaagagctgtatgtgcacacgctcacagccaggacagtgtcgttgtcttgacaccaacgacttctgctacaaaccttgcaagtccagagatgactagaaaaactaatagctctctcaaattgaccaaacccct

SEQ ID NO: 456 - DNA, 376 bp, Glycine max
  Clone ID: LIB3072-054-Q1-E1-C11
gattcacacaactaactaagaaagtcttccatagccccccaaaaatgaagagcaccatcttctttgctctctttctcttttgtgccttcaccagctcatacctaccttcagccatcgctgatttcgtgctcgataatgaaggtaaccctcttgaaaatggtggcacatattatatcttgtcagacataacagcatttggtggaataagagcagccccaacgggaaatgaaagatgccctctcactgtggtgcaatctcgcaatgagctcgacaaagggattggaacaatcatctcgtccccatatcgaatccgttttatcgccgaaggccatcctttgagccttaagttcgattcatttgcagttataatgctgtg

SEQ ID NO: 457 - DNA, 349 bp, Glycine max
  Clone ID: LIB3072-054-Q1-E1-A3
gcactttgagttcgaactaaacaattcaattcaatctgcctcgatcatggagaggaaaacatttgggtttttgttcttgctcctccttgtcttagcttctgatgtgacggtgaagagagcagaggcgaaagattgcttgacaaggaggcacgggttccagggtagatgcttattcgacaggcaatgtgcacatgtgtgcaggagcgatggtttcatcggtggtcagtgccgaggccctcttcgcaaatgcttttgcagcagggcatgttgatcgaaattactactgccaaagagggcagtaaatacggaggcaagcagataagtgagatagctctaaccgacacatatg

SEQ ID NO: 458 - DNA, 305 bp, Glycine max
  Clone ID: LIB3072-054-Q1-E1-A5
ggactctttcttttctttctaacaagcaccgcctccactaatggctatgagatcgtgggtgagtcgaggatccgtgactcgtttgatggactcagcaaatcgaggggctttcagtcgcttcttcagcgagaagggtcgcgttctcagcgaggaggaacaggccaaagaaaacgtctacatccagaaatgggagagggagaggttggagaaacagaagcaacaggctgagaggaccaatgcagacaagggcaaagatgctgctgctgataagaaacctgaacgttctcaaaaggggctgagtttag

SEQ ID NO: 459 - DNA, 380 bp, Glycine max
  Clone ID: LIB3072-054-Q1-E1-A8
gacaaacattattcctaatccttatcctgtttgcttccatggaagtgatttccgcttcgagcttgaatcccaacgctccgatgttcgtgcctctcgcctatcggacggtggaggatttctccgaccaatggtgggacctcatccactcctccccctggttccgcgactactggctccgcgagtgcttccaagatccccagtaccaatacgacgacgttttcgacttcgactttgacctagatctccaagataaagatgaagatgaagggaaggaagggaaagaggtggtgtcgttgggggtgctcaaatggcgaagctgtggaggacgatgggccgaagcgccgaggtatgtggaaaaaggccctaagtttgtgaagccc

SEQ ID NO: 460 - DNA, 336 bp, Glycine max
  Clone ID: LIB3072-054-Q1-E1-A9
tccgtccgatgcgacaagacgacggtacgggatgcaactgactaattaagggtagtcatttccatagcaccatatgtaggtcaagatcactaacttgttcgggatgggtctactttgcgccttcacctcatagggagcgtcggcaaacgaccacaacgtgctctacgtggatggcgatccgattccgtccagtttcatatactacgttttgccagcatcatcattgctctgtttcacaattgaacgatcaccactccggaactacatttacccaatcactgttttgcactctctcactccaggctctatcgtgttactaattgcatatgtctctgc

SEQ ID NO: 461 - DNA, 329 bp, Glycine max
  unsure at all n locations
  Clone ID: LIB3072-054-Q1-E1-B1
ggagacacaaactcacacactttgtactctccgtccttccttcttcgatccagatctctctccttctccctcaaatggcttcccttctgcaatgttccatgcccctcgtctctctttccaatcgagctctggtacccggtaccaggatctccaacccaagttcagtttccctttcaattaagggaagaagtttcccatccgttacattgcagcccagagggcgtcggtttcagcttagatgtgcggcaaaaccagagacagtgaagaaggtgtgtgacatagtcaagaagcaattggcaatgccanatgaatcagctgttactggagag

SEQ ID NO: 462 - DNA, 280 bp, Glycine max
  Clone ID: LIB3072-054-Q1-E1-B10
gacacaagaatctcatcatcgaggtcaatttcaaaagccccatgatcgtcaccaaagtgtatatctcttcacatatccttattggatcggagtgcctactgcagttgcataatcaatgtacaacattataaatactcctgttgttgccgtttctattattcacaccaacaccttggtcaaccaactcgaccacatgcctaggacattctatcttgctgtgaaccaagagcaataatttctaacatatcagcatcaacaacatggatgttcccacaccaac

SEQ ID NO: 463 - DNA, 378 bp, Glycine max
  Clone ID: LIB3072-054-Q1-E1-B2
gattcacacaactaactaagaaagtcttccatagccccccaaaaatgaagagcaccatcttctttgctctctttctcttttgtgccttcaccacctcatacctaccttcagccatcgctgatttcgtgctcgataatgaaggtaaccctcttgaaaatggtggcacatattatatcttgtcagacataacagcatttggtggaataagagcagccccaacgggaaatgaaagatgccctctcactgtggtgcaatctcgcaatgagctcgacaaagggattggaacaatcatctcgtcgccatatcgaatccgttttatcgccgaaggccatcctttgagccttaagttcgattcatttgcagttataatgctgtgtg

SEQ ID NO: 464 - DNA, 100 bp, Glycine max
  Clone ID: LIB3072-054-Q1-E1-B4
gaaaaaaaaaattgtgtttattttgtacttcaagttatgaataaaagaatttcactgtttgtttgtaaaaaaaaaaaaaaaaaaaccaaagggagagagg

SEQ ID NO: 465 - DNA, 369 bp, Glycine max
  Clone ID: LIB3072-054-Q1-E1-B6
gacagcaaaaacaattaataaagatgagtttgaagaacaacatggtggtgctaaaggtgtgtttgttgcttcttttccttgtgggggttacagctgcacgcatggaactgagcttcttcaaaagtgatcagtcatcaagttatgatgatgatgagtattcaaaaccatgctgtgatctctgcatgtgcacacgctcaatgcctcctcaatgcagctgtgaagatattaggctgaattcatgccactcagattgtaacagctgtatgtgcacacgctcacggccaggacactgtcgttgtcttgagaccaacgacgtccgctacaaaccttgcaagtccagagatgactagaagaactaataactctctc

SEQ ID NO: 466 - DNA, 281 bp, Glycine max
  Clone ID: LIB3072-054-Q1-E1-B7
gacaactcaaacattctctccattgggccttaaacactcatcagtcatcaccatggccaggctagttttttccctttgttttctgcttttcagtggctgctgcttcgctttcagttccagatagcagcctcagcaaaagcagtgccacatccaatgactcaatgccctcaaaacggataaccgtatagagtcagaaggagggctcattgagacatggtaccctaacaacaagccattccagtgtgccggtgtcgccctctctcgctgcagcctcaaacgca

SEQ ID NO: 467 - DNA, 296 bp, Glycine max
  Clone ID: LIB3072-054-Q1-E1-B9
cacaaacgggattcacgcaacaactacatatgaataatacagcctctttgctccctctccactttgtgccttcaccatctcatacctacctggccggcgacagttcgtgctcacactatagggatcacctcacaccagtggcacatttctatagttccagttatatatgaatgggccgttaatataaatcattcacctgcaatagacattgccctctcacttttgtgctacctccctgtgtgcccgatattgggacttaactattctttatatctccatttcatactctttttatc

SEQ ID NO: 468 - DNA, 352 bp, Glycine max
  Clone ID: LIB3072-054-Q1-E1-C1
ggctgacaagccaatcctttgtgtaggtgctcaaccctagtaagccgcaatggtgaagtactcaagggagcctgacaatccaactaagtcttgcaaggctagaggcgccgaccttagggttcattttaagaacacaagggaaactgcctttgcaatcaggaagttgcccttggtcaaggctaaaaggtacttggaagatgttcttgcccacaagcaggcaattccattcagacgtttttgtcgaggtgttggaaggacagcccaggctaagaatagacactctaatggccaaggacggtggcctgtcaagtcagcaaaattcagtcttgatttgctcaaaaatgctgagagc

SEQ ID NO: 469 - DNA, 370 bp, Glycine max
  Clone ID: LIB3072-054-Q1-E1-C10
gacagcaaaaacaattaataaagatgagtttgaagaacaacatggtggtgctaaaggtgtgtttgttgcttcttttccttgtgggggttagagctgcacgcatggaactgagcttcttcaaaagtgatcagtcatcaagttatgatgatgatgagtattcaaaaccatgctgtgatctctgcatgtgcacacgctcaatgcctcctcaatgcagctgtgaagatattatgctgaattcatgccactcagattgtaagagctgtatgtgcacacgctcacagccatgacagtgtcgttgtcttgacaccaacgacttctgctacaaaccttgcaagtctagagatgactataaaaactaatagctctctca

SEQ ID NO: 470 - DNA, 420 bp, Glycine max
  Clone ID: LIB3072-053-Q1-E1-G2
gattcatgcaactgaataattaagaaaagccatttccatagcagcctaagaaaatgaagagcactagcttgttcgctatctttctactttgcgccttcacctcatacctaccttccgccaccgcccaggacgtgctcgacgtggatggcgatccgattcggaacggtttcatatactacgttttgccggcaataagaggaaacggtggcggaatagaacgagccgcactcgggaaagacacttgccctatcactgtagtgcaatctcccaatccaaactctaaggggttagaaattaagtttgaatctgcataccccgcctattacataaacgaagccctaattttgcacataaagttcagttacccacagcagtgtgaaagaaagaatccttggtgggccattttcaacgatatatctg

SEQ ID NO: 471 - DNA, 392 bp, Glycine max
  Clone ID: LIB3072-053-Q1-E1-G3
gggtgaagatggtaggtttgaggcgactgatacgacagcgttcaagtctcagagactccttagccgagaaggtccatagtccagttccctcgcagcatttggcacgcctcacccccaaacgcttcttcgatcttcatcagcttggaaataaggaagcaattgagaaggagcgcgctcgacttgcagatgaaatgactaggggatacttcgctgatatggctgagttcaaaaagcatgctggtaagattgctgtagctaataaattgataataccagcaatggtagccacaaagtttcctgattttgaagtcagcttcacagatggtaaaacaatgaagcttcctatccgtgtttctgatcgtgcagttgattctgataaatcgtctgtcccc

SEQ ID NO: 472 - DNA, 288 bp, Glycine max
  Clone ID: LIB3072-053-Q1-E1-G5
gacatcaagaacacttaatacagatgggtttgatctacacaacatgccggtgccaaaagtgtgtatgttgcatctggccgtgtgggggttacagctgcacgcatgggactgagcttcttcaaaagtgatcagtcatcaagttatgattatgatgagtattcaacaccatgctgtgatcaccgcatgtgcacacgctcaatgcctcctcaatgcaactgtgcagatattacgctgagttcatgccactcacattggtatagctgtatgtgcacaccctcacattcacga

SEQ ID NO: 473 - DNA, 407 bp, Glycine max
  Clone ID: LIB3072-053-Q1-E1-G6
gactttgagttcgaactaaacaattcaattcaatctgcctcgatcatggagaggaaaacatttgggtttttgttcttgctcctccttgtcttagcttctgatgtgacggtgaagagagcagaggcgaaagattgcttgacaaggaggcacgggttccagggtagatgcttattcgacaggcaatgtgcacatgtgtgcaggagcgatggtttcatcggtggtcagtgccgaggccctcttcgcaaatgcttttgcagcaggccatgttgatcgaaattactactgccaaagaggccatgaaataaacaaacaaacaaataaataaatagctctaaccgacacatatgtacgtagtgtcggggttctagctagctaggtaggtacgtgtgtcttttgttatcgatcct

SEQ ID NO: 474 - DNA, 311 bp, Glycine max
  Clone ID: LIB3072-053-Q1-E1-G7
agattgaggatgccaacgaggagcaagtacttgctgaactggccacgattgaggcttcgaaagaactgacagatactgagacccagagaaaacatgaacacacttaaattttcattcaacttgcaaagcacgaggacacagttgaaggaggccattgactagattgatgagtcacatgagcttgcaatgcacttgggtgtgacattatcagatgttgacttcttgcaacatgaattaaactcagttcacgcactggataacagggttcaaagacattcgactgcaagacagctagaatgaacactccccca

SEQ ID NO: 475 - DNA, 356 bp, Glycine max
  Clone ID: LIB3072-053-Q1-E1-G9
gataccaaaaacaaaacacaagccaagtgaaagtgagaaaaaataaaaatcaaagagcataatgtcagggatcattcacaagattggggagacccttcatgtgggagggcacaagaaggaggaggagcataagggtgagcaccatgctggagaatacaaaggggagcaccatggtgaacacagtagtgagtacaaaggagagcatcatggtgaacacaaagctggagagtaccatggtgagcacaagccagagcacaaagaggggttcctagacaaagtcaaggacaagatccatggtgagggcggcgccgccgagggcgagaagaagaagaatgagaagaagaagaaggagcatg

SEQ ID NO: 476 - DNA, 378 bp, Glycine max
  unsure at all n locations
  Clone ID: LIB3072-053-Q1-E1-H1
gattcacacaactaactaagaaagtcttccatagccccccaaaaatgaagagcaccgtcttctttgctctctttctcttttgtgccttcaccacctcatacctaccttcagccatcgctgatttcgtgctcgataatgaaggtgaccctcttgaaaatggtggcacatattatatcttgtcagacataacagcatttggtggaataagagcagccccaacgggaaatggaagatgccctctcactgtggtgcaatctcgcaatgagctcgacanagggattggaacaatcatctcgtccccatatcgaatccgttttatcgccgaaggccatcctttgagccttaggttcgattcatttgcagttataatgctgtgtg

SEQ ID NO: 477 - DNA, 284 bp, Glycine max
  Clone ID: LIB3072-053-Q1-E1-H10
gtacgagaagacgacaggatgggacacaactacataagggcatcgtccatagcatgtcactaacaactagcatgaccttcgttgactctctctctctgtgtagagcctttatggggtcaggtcatatcttcagccatcgcagaatttcgtgctcgataatgaaggtgaacctcttgatccatggtggcatatactagcacgtgacatccatacccttctatggtggcacataaattaacttcactggacgtcgttttatacccttccagatgtgggaaaatcct

SEQ ID NO: 478 - DNA, 374 bp, Glycine max
  Clone ID: LIB3072-053-Q1-E1-H11
gactttgagttcgaactaaacaattcaattcaatctgcctcgatcatggagaggaaaacatttgggtttttgttcttgctcctccttgtcttagcttctgatgtgacggtgaagagagcagaggcgaaagattgcttgacaaggaggcacgggttccagggtagatgcttattcgacaggcaatgtgcacatgtgtgcaggagcgatggtttcatcggtggtcagtgccgaggccctcttcgcaaatgcttttgcagcaggccatgttgatcgaaattactactgccaaagaggccatgaaataaacaaacaaacaaataaataaatagctctaaccgacacatatgtacgtagtgtcggggttctagctagct

SEQ ID NO: 479 - DNA, 418 bp, Glycine max
  Clone ID: LIB3072-053-Q1-E1-H2
gatatattgaagagctctctgaaaatgaatctagagagcacaatccgaggttgtcaatttctaataaaaccgtgggatttggacatgtttctccaacttcgaatgtcaggcctgctagaaatgctttttcagaggcgagaacatatagcaccaggttagactctcttggaggttctaatgtccaaattccttatgtgtctcgggttcggagaagtcgtccaagaaaagatatcgcgtctcttatgaaattccatccaactggaatgggtgaggctgaaaaactgagtaataagctccttgagcatagttctgatgctggtagtgacttttcagacaaagttttgaagtcaagaatgcctgcaaagtttcatcaaccatcctcttctgaacctgtgaaagagcagtgttcagtaatatg

SEQ ID NO: 480 - DNA, 381 bp, Glycine max
  unsure at all n locations
  Clone ID: LIB3072-053-Q1-E1-H4
ggcacttgcacatgcatttgctctatttgctgctgtttcttctagcatgcatgtatcaggtggccatgtcaacccagctgtgacatttggtgctctcattggaggcaggatttctgtgctccgtgccgtatactactggattgctcaaattctangtgctatagtggctgccctcgtgctcagacttgtcactaataacatgagaccatcagggttccacgtggggcaaggtgttggagtaggacacatgcttatacttgagataatcatgacatttgggctaatgtacactgtgtatggtactgcaattgatcccaanaagggttctgttagcaacattgcacctttggcaattggactcattgttggggcaaacatcct

SEQ ID NO: 481 - DNA, 289 bp, Glycine max
  Clone ID: LIB3072-053-Q1-E1-H6
cagaacggggcacttgcacatgcatttgctctatttgctgctgtttcttcaagcatgcatgtatcaggtggccatgtcaacccagctgtgacagttggtgctctcattggaggcaggatttctgtgctccgtgccgtataccactggattgctcaaattctaggtgctacactggctgccctcgtgctcagacttgtcactaataacatgggaccatcaaggttccacctggggcaatgtgttggcttacgacacatgcctatacttgagataatcatgacatttgggc

SEQ ID NO: 482 - DNA, 256 bp, Glycine max
  Clone ID: LIB3072-053-Q1-E1-H8
tgacatgatattcaagtggcacactgtcagacacaggtatgacagttggtgccctcattgggaggcaagatattctggtgctccagtgcacgtctaatagtggattgcacaaattctaggtgcaagaatggctgccctcgtgctcagacttgtcacgaaaaagatgagagcatcagggctccacatgaggcaacgtgtttgtctacgacacatgcctatacttgagaggagcatgacatttgcgctaatgtagact

SEQ ID NO: 483 - DNA, 410 bp, Glycine max
  Clone ID: LIB3072-053-Q1-E1-H9
gactctcatcacattattctatatcaattttggttaagagtcttgaaaaagcaagagaaaaaaaaataccaaccatggcaaccatttcggatcaacctagagggtcctactcctatggaacctcatatggagcaccctatggaaccacgtatgagactaacaccagcattaacaacccaccttcacgccaaacagtgaagttcataactgctgccactattggcatcacactcttgctcctgtctgggttgaccctcacaggcactgtcgtaggtttgatcattgcaacccctcttcttgttatcttcagccccatccttgtccctgctgcgtttgtgctgttcctagttgcttctggctttttgttctctgggggctgttgtgtggctgccaatgctgctttgtcctgg

SEQ ID NO: 484 - DNA, 205 bp, Glycine max
  Clone ID: LIB3072-054-Q1-E1-A11
cggtactgctgctacaatacaacataaggatgaagaccgttctcgtcatctcgacgtcttcatcttcattaccattcataaacagtaatttggttgggagaacatcaggatctcttctctcaatgggtgtattgattgaataatatttctttctttaggttttatgttttgggttatctcacaatttaagatcaacttacataac

SEQ ID NO: 485 - DNA, 301 bp, Glycine max
  unsure at all n locations
  Clone ID: LIB3072-054-Q1-E1-A12
acagagaagggacacaattacaataataaatatagtttgacatcagcatgcaatcgaaaggtgtgtgcgtcgcttccttgccttggggggagggaacgcacgcatcgaactacccacggggnattatactcatcaagttaaataatgaaactattcaaaccatgatgtatcctgcatatacaacactcaatcccactcaagttatctgtaaatatataggcttaattcatgcacacagattgaaatatctgtacatgcacacacatcacagccaagacactgtcgctgtccatgaaccaac

SEQ ID NO: 486 - DNA, 360 bp, Glycine max
  Clone ID: LIB3072-053-Q1-E1-G12
tacgtatcggtacaagaatacgtcaggctgggggggtaccacagacaggcaatgtcgtcagcacgtaaataacatgtacatccgtggaatatactatatcccatttgagaatcattacttgagtgagggaaccaccaccaccttagttaaaaaggggcggttagatcggacgtacgctatgatcggtggtgaccaaggcatgcatggaatcatcaagcggttcaaaacagtcacatctgttaactgcgttgcgggtcgattcaaatgatcaagagcgtgaaaatcatgacgtcacgcaacttacaccttctgcaccacatccggcattcatcatctgcgatgttgatcactaggagttca

SEQ ID NO: 487 - DNA, 222 bp, Glycine max
  Clone ID: LIB3072-053-Q1-E1-E11
cccacgcatccgtacacgcgtgcgcgagaaaacgacagaacgtgggtatgatcatgaagttcaccattacaatgaacagaagcaccacaagcatcttgagcaccttggtgacttaagtgctgcatcgccgcccgggtactccttgcatgataaggacagtgcagagaaccatccactgcatgctctccttcacatgatacagtttcaggtcccagccgcaac

SEQ ID NO: 488 - DNA, 382 bp, Glycine max
  Clone ID: LIB3072-053-Q1-E1-E12
gatggtaaagaagttggtggcatcgatataagaaaggcaagtttggtcggaataagattcaaaacgctgttttttgcagtttgggcggggctctcgttctctttcttcaaaaaaagtgaacccattcaaagaaagaaagaaagagcgatcatttccaatcacaatggcagatcaactcaccgatgaacagatctcggagctcaaggaagccttcagtttgttcgataaggatggcgatggttgcatcacaacaaaggagcttgggactgttatgcgttcgttgggtcacaatccaacagatgctgagctccaagacatgatcaatgaattacatgctgatgggaatggcaccaatgactttcctgagtttcttaacctcatt

SEQ ID NO: 489 - DNA, 388 bp, Glycine max
  Clone ID: LIB3072-053-Q1-E1-E3
gacagcaaaaacaattaatagagatgagtttgaagaacaacatggtggtgctaaaggtgtgtttgttgcttcttttccttgtgggggttacagctgcacgcatggaactgagcttcttcaaaagtgatcagtcatcaagttatgatgatgatgagtattcaaaaccatgctgtgatctctgcatgtgcacacgctcaatgcctcctcaatgcagctgtgaagatattaggctgaattcatgccactcagattgtaagagctgtatgtgcacacgctcacagccaggacagtgtcgttgtcttgacaccaacgacttctgctacaaaccttgcaagtccagagatgactagaaaaactaatagctctctcaaatggacgaagccccttt

SEQ ID NO: 490 - DNA, 381 bp, Glycine max
  Clone ID: LIB3072-053-Q1-E1-E5
gacagcaaaaacaattaataaagatgagtttgaagaacaacatggtggtgctaaaggtgtgtttgttgcttcttttccttgtgggggttacagctgcacgcatggaactgagcttcttcaaaagtgatcagtcatcaagttatgatgatgatgagtattcaaaaccatgctgtgatctctgcatgtgcacacgctcaatgcctcctcaatgcagctgtgaagatattaggctgaattcatgccactcagattgtaagagctgtatgtgcacacgctcacagccaggacagtgtcgttgtcttgacaccaacgacttctgctacaaaccttgcaagtccagagatgactagaaaaactaatagctctctcaaatggacgaag

SEQ ID NO: 491 - DNA, 281 bp, Glycine max
  Clone ID: LIB3072-053-Q1-E1-E7
ggggagagaatagagaagagagatggatccagacgcgttggcaaaggcattcgtggagcactactacagcaccttcgagaccaagaggaacggcttagcgaatctctaccaggagggttccatgctcactttccaacggcagaacatccaaggcgcttcgatcatcgttgccaagctcaccgcactcccttttcagcagtgccaccactcaatctccaccgtcgactgccaaccgtccggcgtcaacgccggcatgctcgtcttcgtcagcggaaaccttc

SEQ ID NO: 492 - DNA, 348 bp, Glycine max
  Clone ID: LIB3072-053-Q1-E1-E8
gacagcaaaaacaattaataaagatgagtttgaagaacaacatggtggtgctgaaggtgtgtttgttgcttcttttccttgtgggggttacagctgcacgcatggaactgagcttcttcaaaagtgatcagtcatcaagttatgatgatgatgagtattcaaaaccatgctgtgatctctgcatgtgcacacgctcaatgcctcctcaatgcagctgtgaagatattaggctgaattcatgccactcagattgtaagagctgtatgtgcacacgctcacacccagtacagtgtcgttgtcttgacaccaacgacttctgctacaaaccttgcaagtccatagatgact

SEQ ID NO: 493 - DNA, 336 bp, Glycine max
  Clone ID: LIB3072-053-Q1-E1-E9
gaagaaggacaagaagaagaaggagcatggacatgaccatcatggtcatatcagcagcagtgacagtcatgatatggtacatgttaagcatgtgtacggtacgatggtagtgaggagccataatccgtcttcctgctttatgatataacagatatagtatagcgattccggaaatcatgtctgtagctgctctttttatttatgtgataaatgtaaaacgctttggtttggcctggtcgttgtgcattaagttgagtaaatcactgttatcattacccaacaccgagcctataaggaagtgtactaaagcggcctcgctataggattgatgcttac

SEQ ID NO: 494 - DNA, 241 bp, Glycine max
  Clone ID: LIB3072-053-Q1-E1-F12
ataagagacagaaagggactttgacttcgaattagacaattcaattcaatctgcctcgatcatggtgaggaaaacatttgggtttttgttcttgctcctccttggcgtagggtctgatgtgacggtgaagagaacaggggtgatagattgcatgacatcgaagcatgggatccatggtagatgcttattcgacagggaatgtgcagatgtgtgcaagaccgatggtttcatcagtggacag

SEQ ID NO: 495 - DNA, 360 bp, Glycine max
  Clone ID: LIB3072-053-Q1-E1-F3
gaagacgacagaaggggactctcatcacattattctatatcaattttggttaagagtcttgaaaaagcaagagaaaaaaaaataccaaccatgggaaccatttctgatcaacctatagggtcctactcctatggaacctcatatggagcaccctatggaaccacgtatgagaccaacaccagcattaacaacccaccttcacgccaaacagtgaagttcataactgctgccactattggcatcacactcttgctcctgtctgggttgaccctcacaggcactgtcataggtttgatcattgcaacccctcttcttgataccctcagccccatcagtgtccctgtcgcgtatgtgctggtc

SEQ ID NO: 496 - DNA, 380 bp, Glycine max
  Clone ID: LIB3072-053-Q1-E1-F8
gattcacacaactaactaagaaagtcttccatagccccccaaaaatgaagagcaccatcttctttgctctctttctcttttgtgccgtcaccacctcatacccaccttcagccatcgctgatttcgtgctcgataatgaaggtaaccctcttgaaaatggtggcacatattatatcttgtcagacataacagcatttggtggaataagagtagccccaacgggaaatgaaagatgccctctcactgtggtgcaatctcgcaatgagctcgacaaacggattggaacaatcatctcgtccccatatcgaatccgttttatcgccgaaggccatcctttgagccttaagttcgattcaattgcagttataatgctgtgtgtt

SEQ ID NO: 497 - DNA, 375 bp, Glycine max
  Clone ID: LIB3072-053-Q1-E1-F9
ggtagtgtgtagtcaccaaacaaacatggcgaaaaaggcaaaagggtctcactctgcctcttctgcctctgcatcttcttcgtccgacaaactagtgctgaggattaaatcaaatgaggggaccaagagatcagtgcggcaaactaattcaagaaagaaacttaaagcaaagcaaaagaagaacaaacaaaagtttgatgctatgaaacccaggaaacctcctacagctttcttctacttcttggaggattttcgtaaagaatttcaagagcagaatccagatgtaaagtcaatgcgtgatattggcaaggcatgtggagagaagtggaaaacaatgacttatgaagagaaagtacaatactatgatatagcaac

SEQ ID NO: 498 - DNA, 385 bp, Glycine max
  unsure at all n locations
  Clone ID: LIB3072-053-Q1-E1-G1
gacagcanaaacaattaataaagatgagtttgaagaacaacatggtggtgctaaaggtgtgtttgttgcttcttttccttgtgggggttacagctgcacgcatggaactgagcttcttcaaaagtgatcagtcatcaagttatgatgatgatgagtattcaaaaccatgctgtgatctctgcatgtgcacacgctcaatgcctcctcaatgcagctgtgaagatattaggctgaattcatgccactcagattgtaagagctgtatgtgcacacgctcacagccaggacagtgtcgttgtcttgacaccaacgacttctgctacanaccttgcaagtccagagatgactagaaaaactaatagctctctcaaatggacgaagcccc

SEQ ID NO: 499 - DNA, 370 bp, Glycine max
  Clone ID: LIB3072-053-Q1-E1-G10
gaagctagtacaaagaaaaaagagcaggctaaatatctgaaagagattgcactacgtgaaaagagaattgctgagaaacgcaacaagcttgacaggagtcaacctgagcttctgaagttaaaggacgaaatgactcgtataacttcgagaattaaaaaagggaagaaagagcttgatagaagaaaggttgaacggaagaagcatgatgctgatacagcattactacagaatgacatccaggatcttacagcacaaatggcagaccttcaggaaaagggacgagatgttgatgacgagcttgatttgcaatgcaatgacttggaagaatagtttcgcatcaatgaggaacctggaatgaaaactgcaaagc

SEQ ID NO: 500 - DNA, 324 bp, Glycine max
  Clone ID: LIB3072-053-Q1-E1-G11
acgcttacaccaaacctttttttccaaaacaaaaaccaatgagtcatggccaaaccaagaagccacaagcagacggtgaacccagcgagggcggcgacgttttcggtgtctccaccgccgcggagcctcacgctgcgccggtggtgtccgccggtatcggttcggctgccatagatggcgaccccataaccatcggagaagctctggaagcggcggcaatatcgatcggggataaaccagtggaccaaaatgacgccgatgcgattggcgtcgcggacattagggccaccggagagaataatgtaaggtccggttgggtgggtg

SEQ ID NO: 501 - DNA, 142 bp, Glycine max
  Clone ID: LIB3072-053-Q1-E1-E10
acctttcaaaagacaataatgtcttcagtcatttacactttcaaaaggcgacaatgccttcattttcattttgaagatgacggggtctggagtcatctcaaagacttcaatgtcgacgtcctttatttatatgctttttttt

SEQ ID NO: 502 - DNA, 389 bp, Glycine max
  Clone ID: LIB3072-053-Q1-E1-C12
ggcaaaaatccgatcagaaaacagcatcgaacccgtcgtagcagaaaaacttgtcaccatggtttcttccgacaaggatccacgagaggatgtccttcaagcctggtacatggatgatagtgatgaagatcaaagactcccccaccacaaagaacccaaggagtttgtctcgttggaccaacttgctgaacttggagtccttagctggaaactagatgctgataaccatgaaaatgatccagagctgaagaagattcgtgaagagcgtggttacacctacatggatgtttgtgaggtctgcccagaaaagttgccaaattatgaacagaaaatcaaaagcttctttgaagagcatcttcacactgatgaggagatccgcttttgtgctg

SEQ ID NO: 503 - DNA, 400 bp, Glycine max
  Clone ID: LIB3072-053-Q1-E1-C2
ggagggagagaggatgaagggaagcagcaagaggaagacggagaaggagaagatagaggatgaagtggaagaaatgttgcgagcggcgcaagaccaaatcctcttaaatctcacccaagcccacatagcagcccgtccttctccggatcatgatcatgatctggatctggatctggatctggagcgtcgattccaggccctcaaaatgaaaaccaaatctcaacctcaagatgatctctctgccagattcgatgccctaaaagccaaatcatcatcttctgttgtcacagcatccaattccaacgcccaatttgattatgctgaagaagacccagaggctcaagttcagaaactcatccagtgggctaaggatgctgcacgtctcgatccttctcccccc

SEQ ID NO: 504 - DNA, 398 bp, Glycine max
  Clone ID: LIB3072-053-Q1-E1-C3
gattcacacaactaactaagaaagtcttccatagccccccaaaaatgaagagcaccatcttctttgctctctttctcttttgtgccttcaccacctcatacctaccttcagccatcgctgatttcgtgctcgataatgaaggtaaccctcttgaaaatggtggcacatattatatcttgtcagacataacagcatttggtggaataagagcagccccaacgggaaatgaaagatgccctctcactgtggtgcaatctcgcaatgagctcgacaaagggattggaacaatcatctcgtccccatatcgaatccgttttatcgccgaaggccatcctttgagccttaagttcgattcatttgcagttataatgctgtgtgttggaattcctaccgagtgg

SEQ ID NO: 505 - DNA, 102 bp, Glycine max
  Clone ID: LIB3072-053-Q1-E1-C4
caagtgtggcatcatgatctagttatatatatatgtcgtgatcatcttgctctgttcagcaataaattataatggaaattaataaattagttatgccttttc

SEQ ID NO: 506 - DNA, 188 bp, Glycine max
  Clone ID: LIB3072-053-Q1-E1-C5
cgagacgacgactagaatcgggatgtgctgttgcacgaacactaagggaactaacaacaaatgggacaaaaaaaagtatccacatttcccgttcttccttcttccatattgaggttttctcagacagtgatctcgcataattccgctgaacttccacaagtcaccaactcgcgatcagtcatgcacac

SEQ ID NO: 507 - DNA, 406 bp, Glycine max
  Clone ID: LIB3072-053-Q1-E1-C6
gattcacacaactaactaagaaagtcttccatagccccccaaaaatgaagagcaccatcttctttgctctctttctcttttgtgccttcaccacctcatacctaccttcagccatcgctgatttcgtgctcgataatgaaggtaaccctcttgaaaatggtggcacatattatatcttgtcagacataacagcatttggtggaataagagcagccccaacgggaaatgaaagatgccctctcactgtggtgcaatctcgcaatgagctcgacaaagggattggaacaatcatctcgtccccatatcgaatccgttttatcgccgaaggccatcctttgagccttaagttcgattcatttgcagttataatgctgtgtgttggaattcctaccgagtggtctgttgt

SEQ ID NO: 508 - DNA, 382 bp, Glycine max
  Clone ID: LIB3072-053-Q1-E1-C9
ggggatctatcacaatagaaagcaaagctatataggattatttcccatatcaagaaaatgaaaatccctttttattttcccatcctcgtgcttgttgtcttcattgcttctggaaaacaagtgcaaatgacagtggtaccaaattgtgtggtagaaagcttgtcagttcattgtgaaatattcaagaatccttgcgaacttctttgccaacaacattttggatcacccgcagcacatggagcttgtggcattaagttccatgtatgtgtttgttatttatgttaaatataaagtttaaccataacaatcacagctttcatacctatttaatagtatgtaagccgatgaaaaaaatagatatataaataaaatgacttcatta

SEQ ID NO: 509 - DNA, 401 bp, Glycine max
  Clone ID: LIB3072-053-Q1-E1-D10
gaatctcttcacagaagaaaaaagagaagaagatgggtttgaagaacaacatggtggtgctaaaggtgcgtttggtgctacgtttccttgtggggggtactactagtgccaacttgagactgagtaagcttggcctgctcatgaaaagtgatcatcatcaacactcaaatgatgatgagtcttcaaaaccatgctgtgatcaatgcgcatgcacaaagtcaaaccctcctcaatgccgctgttcagatatgacgctgaattcgtgccattcagcttgcaaatcttgtatttgcgcattatcgtatcctgcacagtgtttttgtgttgacaataacgatttctgctatgaaccttgcagacccagttaagatgacaaggaaaactactaatgaacaaatgtt

SEQ ID NO: 510 - DNA, 405 bp, Glycine max
  Clone ID: LIB3072-053-Q1-E1-D12
gattcacacaactaactaagaaagtcttccatagccccccaaaaatgaagagcaccatcttctttgctctctttctcttttgtgccttcagcacctcatacctaccttcagccatcgctgatttcgtgctcgataatgaaggtaaccctcttgaaaatggtggcacatattatatcttgtcagacataacagcatttggtggaataagggcagccccaacgggaaatgaaagatgccctctcactgtggtgcaatctcgcaatgagctcgacaaagggattggaacaatcatctcgtccccatatcgaatccgttttatcgccgaaggccatcctttgagccttaagttcgattcatttgcagttaaaatgctgtgtgttggaattcctaacgagtggtctgttg

SEQ ID NO: 511 - DNA, 399 bp, Glycine max
  Clone ID: LIB3072-053-Q1-E1-D2
gagagaaagagagagaaagatgtcgaagcgtggtcgtggtggttcggcggggaacaagttccgcatgtcgctgggtcttccagtggcggcgacggtgaactgcgccgacaacacgggggcgaagaacctctacatcatttcggtgaaagggatcaaaggccgtttgaaccgtcttccctcggcctgcgttggcgacatggtgatggccaccgtgaagaagggaaagcccgatctgaggaagaaggtcttgccagctgtcatcgttcgccagcgcaagccatggcgccgaaaggacggcgtctacatgtacttcgaagataatgctggtgttattgtcaatcccaagggagaaatgaaaggttctgctatcactggtcccattggaaaagagtgtgctga

SEQ ID NO: 512 - DNA, 397 bp, Glycine max
  Clone ID: LIB3072-053-Q1-E1-D8
gatagaaagaaaggacggtggccggtggcggtgagtggtgtgtttgggaaagcgtaagagtaagaatggagggtggagaggaaggattggtgatgatggtggactcaaaggacttacagcaacagagcaaagcgttggacaaactcactgatcacgtcgaggatcgccaactcgattccactcgcgtccaagaggccatggcttccatcgctgcttctgccgaagctgatcgcaatgccatgcgcatcagggaaaaagaattggctgctgttaagataaatgcagcacatgttgatataaatgcaaatgaactagagttgggcaaaaaggttgctgaaacgactttgcgtgagcataaacgtgatgcaattgctgctattcgggaatttcttcacta

SEQ ID NO: 513 - DNA, 394 bp, Glycine max
  Clone ID: LIB3072-053-Q1-E1-D9
gagagcgaaagagatgtcgttggtttcaagcatgttcgggtgtggagtggtgatggcggcgtcgcaggcaatgggaattggaaggagaagcgatggtggattgacgatagtgtgttcgtctaggccgcagaagaaagcgacggcgcatcacatgaagactcggcctcggaagacgcaggcatgggatagaaaccgcaagcccaccgtctacgatccactccctcctcttcctcctgattggaccctcgttattcccgctgacgcttcttctgctcccgttacgcctccgcctccaactccctctgcctagtcactctctcggtactctctctcgttttcatgtagtcttatctttaattccagcagcttttctttcatgttttcatctcaaatc

SEQ ID NO: 514 - DNA, 267 bp, Glycine max
  Clone ID: LIB3072-053-Q1-E1-E1
cgtccgaacaggagtcaggacgatacgaggggataacagaaggagaccataagttaagtgtaagtgattcaatttaaatcatcactcgagtataatgtcagggatcattcacaatattggtgatacccttcatgttcgaaggtacaaaaatgacgatgagcataaggatgagcaacatactgcgtaatacagaggggaggattatagtgtacatacttatgcgtacagcagagagcatcattgtgcacacacaactggttaatacca

SEQ ID NO: 515 - DNA, 389 bp, Glycine max
  unsure at all n locations
  Clone ID: LIB3072-053-Q1-E1-A2
gactcaacatttgcaggtcctcctcatatacagtacaaacttcagctggtagatagtgcttccaaatggagaagaaaaggaagactttactattactgctgctcatggctgcaactctcttctgcatgccaattgtgtcgtatgctgtttctagtgtcaacattcaaggtcatctcacccattctgagctggtaaaaggtcccaatagaaggcttttgccatttgtggattgtggagcgaggtgcaaggtgaggtgcagtttgcactcaaggccaaaaatttgctcaagagcttgcgggacatgctgtttcaagtgcangtgtgttcctccaggcacttacgggaacagagagatgtgtggcaagtgttacactgacatgatcactcat

SEQ ID NO: 516 - DNA, 166 bp, Glycine max
  Clone ID: LIB3072-053-Q1-E1-A4
gaatggaagcatagtcaacgcttctctgcctaaaataatattacgcgtctagagggccaaacgtattgcctttgatcctctctcatcgcattcatagtcaggtactattagttttgcactccgcggtctgtcttcatgtccctgatcagatccgcttttttacatt

SEQ ID NO: 517 - DNA, 373 bp, Glycine max
  Clone ID: LIB3072-053-Q1-E1-A5
gggagcaacagaaaaattaaattcttatcatttacagaatatggagtcccagacttccacacgagagaaggagtctctcaatctcagggaagtcccagaagcagatagaaccttgggcttggacatggccaagggcagcgcattctgcaagatgggtgaaggttggacatgcatcataactaaaactgaggggcctgatgctggcaaagttttcgttaaatgcggtgaaaattgcacctgtaccattgagggcgaagcagtgtcccaagaattgaatttgccacctgatgttgtgagcagcagtggcagtggagcattctgcaagtgtggtgaagggtggagttgtgtcattttcaggactgaaggccctgat

SEQ ID NO: 518 - DNA, 370 bp, Glycine max
  Clone ID: LIB3072-053-Q1-E1-A6
ggacagaagatatatcaaacttccaacggagagaccattgaagcagattgtcatttcttatgtatagggaaaccacttgcttcagcatggcttaaggaaactgtgttgaataatgacttggatggtcatggaagtatcaacgtatatgaaaaattaagagtcaagggcacggacaacatttttgcaattggagatattacagatattccagaaatcaagcaaggttttttggcacagcagcaggctgaagtggctgtgaacaacttgaacgtgatattatacggaggaagacaatgtacgatggtaactcacaagccatattcagcaatagcaatagtttcacttgggaagaaagatgctgtggcacagt

SEQ ID NO: 519 - DNA, 338 bp, Glycine max
  Clone ID: LIB3072-053-Q1-E1-A7
agaaggcagcggtggtttacgagagaaagaagcaactcaacaaattaagggtgaaagctgacaaggttgctgaagagaagctcggttcccaacttgatgttcttgctcctgttaagtattgagtagtttttgttagtgtttgaaattttttatgccacttataccacattgaactacctttcaattttgcttgacgttgctttgttattggatcatagatttgatatctgatcatcttggaaactgttttttatttaattgtgtgttttgtgtaatttttgtcatccagaagttttccaatgccttgggaaaaaaagaaaaaaagctgttcactgtgc

SEQ ID NO: 520 - DNA, 388 bp, Glycine max
  Clone ID: LIB3072-053-Q1-E1-A8
gacagcaaaaacaattaataaagatgagtttgaagaacaacatggtggtgctaaaggtgtgtttgttgcttcttttccttgtgggggttacagctgcacgcatggaactgagcttcttcaaaagtgatcagtcatcaagttatgatgatgatgagtattcaaaaccatgctgtgatctctgcatgtgcacacgctcaatgcctcctcaatgcagctgtgaagatattaggctgaattcatgccactcagattgtaagagctgtatgtgcacacgctcacagccaggacagtgtcgttgtcttgacaccaacgacttctgctaaaaaccttgcaaatccagagatgactagaaaaactaatagctctctcaaatggacgaaaccccttt

SEQ ID NO: 521 - DNA, 386 bp, Glycine max
  Clone ID: LIB3072-053-Q1-E1-A9
gatgcaactgaataattaagaaaagtcatttccatagcagcctaagaaaatgaagagcactagcttgttcgctatctttctactttgcgccttcacctcatacctaccttccgccaccgcccaggacgtgctcgacgtggatggcgatccgattcggaacggtttcatatactacgttttgccggcaataagaggaaacggtggcggaatagaacgagccgcactcgggaaagacacttgccctatcactgtagtgcaatctcccaatccaaactctaaggggttagaaattaagtttgaatctgcataccccgcctattacataaacgaaaccctaattttgcaaataaagttcagttacccacagcagtgtgaaagaaagaatc

SEQ ID NO: 522 - DNA, 329 bp, Glycine max
  Clone ID: LIB3072-053-Q1-E1-B1
gacaggtgtttgcaatactagcgatagctgataagagagataccaacaagaaaagaaaaaaagaagagttgagattccctttgaagaaaagatggcatcccataggcaaagctatgaagctggtcaaactaagggccgaactgaggaaaagacgaaccagacgatgggcaatattggagagaaggctcaagctgcaaaggagaagacccaggaaatgggccaagctgcaaaggagaagacccaacaaacagcccaagctgccaaagacaagacttgcgacacttcccaagcggcacaggagaagacccaacagaataaaggagctgctc

SEQ ID NO: 523 - DNA, 423 bp, Glycine max
  Clone ID: LIB3072-053-Q1-E1-B10
gacagcaaaaacaattaataaagatgagtttgaagaacaacatggtggtgctaaaggtgtgtttgttgcttcttttccttgtgggggttacagctgcacgcatggaactgagcttcttcaaaagtgatcagtcatcaagttatgatgatgatgagtattcaaaaccatgctgtgatctctgcatgtgcacacgctcaatgcctcctcaatgcagctgtgaagatattaggctgaattcatgccactcagattgtaagagctgtatgtgcacacgctcacagccaggacagtgtcgttgtcttgacaccaacgacttctgctacaaaccttgcaagtccagagatgactagaaaaactaatagctctctcaaatggacgaagcccctttaagctttgtttgttaagttaagggagaccaataaa

SEQ ID NO: 524 - DNA, 388 bp, Glycine max
  Clone ID: LIB3072-053-Q1-E1-B11
gaataagatttgtgagagaaagggagaaagggtgcgagaatggagagcaaagaggaagatgtaagggttggagcaactaagttctcagaaaggcaaccaattggtacagcagctcagggtgacaaggactacaaagaaccacccccagcacctttgtttgagcctggtgagctaaagtcatggtccttctacagagctggaattgctgagtttgtggccactttcttgttcctctacattaccatcttaactgtcatgggtgtcaacaggtcaccctccaagtgtgcctctgttggcattcaaggcattgcttgggcctttggtggcatgatctttgcccttgtctactgcactgctggaatttcagggggacacatcaacccagctg

SEQ ID NO: 525 - DNA, 272 bp, Glycine max
  Clone ID: LIB3072-053-Q1-E1-B12
gccgcaagaatctcagcaacgaggacgaagccagaggccccaagaccgtcaccaaaaggtacatcgcttcagagagggtgatttgatcgcagtgcctactggtgttgcatggtggatgcacaacaatgaagacactcctgttgttgccgtttctattattgacaccaacagcttggagaaccagctcgaccagatgcctaggagattctatcttgctgggaaccaagagcaagagtttctaaaatatcagcagcagcagcaaggaggttccc

SEQ ID NO: 526 - DNA, 398 bp, Glycine max
  Clone ID: LIB3072-053-Q1-E1-B3
gacagcgaaacagagagtgatttcagtgagtgatcggtgttcacttgatctcatcataatcgtcagcgtcaattgaagaagatgccgatcagaaacatcgccgtcggaaggcctgaagaggcgactcaccccgacacgttgaaggcggctttggctgagttcatctcaaccttcatcttcgtgttcgccggctcaggctccggcatcgcctacaacaagctcaccgacaacggcgctgccacccctgccggactcatctccgcctccatcgcccatgcattcgccctcttcgtcgccgtctccgtccgcgccaacatctccggcggccacgtcaaccccgccgtcaccttcggcgccttcgtcgggggcaacatcaccttcctccggggcatcgtcta

SEQ ID NO: 527 - DNA, 196 bp, Glycine max
  Clone ID: LIB3072-053-Q1-E1-B5
ttgcacataccaaccgatcagctgactaacgacagataccacacaacactacaaacaaagaagaattgagattccctttgcagaggagatggcatcccacaggcaaagctatgaagctggtcaacctaacggccgaactgacgaaaatacgaaccagacgatgggcaatatttgggacaaggctcaaactgcaaag

SEQ ID NO: 528 - DNA, 171 bp, Glycine max
  Clone ID: LIB3072-053-Q1-E1-B6
ggaacaagaagatattaaggaaatacgcatcgaggagcacgtgcgaacttgaaaatcggcgagtttcctgtcagggcgacgtttcggactctgttgcaaacttcggatcgtcatatcatcacttctttttacatccatgttttgtccaatgtcgcccccgatcttctccac

SEQ ID NO: 529 - DNA, 283 bp, Glycine max
  Clone ID: LIB3072-053-Q1-E1-B7
gattcacacaactaactaagaaagtcttccatagccccccaaaaatgaagagcagcatcttctttgctctctttctcttttgtgccttcaccacctcatacctaccttcagccatcgctgatttcgtgctcgataatgaacgtaaccctcgtgaaaatggtggcacatattatatcttgtcagacataacagcatttggtggaataagagcagccccaacgggaaatgaaagatgccctctcactgtggtggaatctcgcagtgagctcgaacaagggattgg

SEQ ID NO: 530 - DNA, 383 bp, Glycine max
  Clone ID: LIB3072-053-Q1-E1-B9
gagagacggagcagaagaaggatccacaccgttctcttcctctcttcttctccttcttcattaccaaacctaaaaggtatgtatgtattcatatcatatgcatgtcctctctctatctttatatacatacactaatgtttctttttttagtttttacgttttggattatataaaaaattactaatagatggaaaaacgatggttagaaatggaaatggtggttgtggtgtggttatgtgattgtgagatattagaaaatatgaatttgaaatgaatgcatttatatttttgggtaaagtttggtgtcgggtgaagaaagaattaataaatgcaaccacggattcaacccatgacattaattaattaatatacgatcctccttt

SEQ ID NO: 531 - DNA, 366 bp, Glycine max
  Clone ID: LIB3072-053-Q1-E1-C1
gattcacacaactaactaagaaagtcttccatagccccccaaaaatgaagagcaccatcttctttgctctctttctcttttgtgccttcaccacctcatacctaccttcagccatcgctgatttcgtgctcgataatgaaggtaaccctcttgaaaatggtggcacatattatatcttgtcagacataacagcatttggtggaataagagcagccccaacgggaaatgaaagatgccctctcactgtggtgcaatctcgcaatgagctcgacaaagggattggaacaatcatcccgtccccatatcgaatccgttttatcgccgaagggcatcctttgagccttaagttcgattcatttgcagtta

SEQ ID NO: 532 - DNA, 242 bp, Glycine max
  Clone ID: LIB3072-053-Q1-E1-C10
gacagttgcaagggatgacaagggtggtcccacaaaggtgtttaaggagacaggtgcaaataattgtgtgattttctgagtttctttatttctatttccttggagtggttgtagtgtggttgaaggagtcacaagtagaaggagaagaagctaagtgtggatcagtcacgagtcagcgttgttacttgttagaagaagtacagtagatgaggaaaagggtctgtgggggaagctttttgaat

SEQ ID NO: 533 - DNA, 401 bp, Glycine max
  Clone ID: LIB3072-053-Q1-E1-A12
gacagcaaaaacaattaataaagatgagtttgaagaacaacatggtggtgctaaaggtgtgtttgttgcttcttttccttgtgggggtgtagaactgcacgcatggaactgagcttcgtcaaaagtgatcagtcatcaagttatgatgatgatgagtattcaaaaccatgctgtgatctctgcatgtgcacacgctcaatgcctcctcaatgcagctgtgaagatattaggctgaattcatgccactcagattgtaagagctgtatgtgcacacgctcacagccaggacagtgtcgttgtcttgacaccaacgacttctgctacaaaccttgcaagtccagagatgactagaaaaactaatagctctctcaaatggacgaagccccttttagctttgtttg

SEQ ID NO: 534 - DNA, 202 bp, Glycine max
  Clone ID: LIB3072-052-Q1-E1-F3
cgggggacagaacggcatggacagagacacagagacactgcgtgttgggttgcgttgtgactgcatacacaactaaatgaggggggtgggtcaccattcaaaatgacatcattaggatctgtgtcaaccaccaacatctctgacgcagagggcactgtctactgtcacaggcatcggtgaccgaaacacacaccacggaaac

SEQ ID NO: 535 - DNA, 388 bp, Glycine max
  Clone ID: LIB3072-052-Q1-E1-F8
gggaacggacagaaacagataagggcgttctctttgccagctaacatttccagtgttcccatgtctcctgcccactgaagtcgaacccctaatggcttctcaagttcttcttcaacaggcactgtttgcccccaagctaagtttcccttcttcttctcgtaacgtcgcgttaatttctagggttccttccaccccaatttcatggcgttgcactcctctcattgctaagcctagtttcgctgtgagagctgactccaacgtcgaaggcgctggtgaagccaccgaggatgttccttcgtataatgttgatgaagtttcggaaggcgaaggagaacaagtttcggattctgaagccccaaaatctcccaagaaaacccgagtcaagctc

SEQ ID NO: 536 - DNA, 415 bp, Glycine max
  Clone ID: LIB3072-052-Q1-E1-F9
gaacactgtattgacaggctacttctttgtacttgggattgttgccctttcggcaacattattaccatttattaaacgttttctgccaaagcattgggatgaggacctcatagtctggcgttttccatatttccgttcattggagattgagtttacaaagtcacaggtcgttgctggaatccctgggacatttttttgtgcctggtatgctttgcagaagcattggctagcaaataatatattgggtcttgctttctgtattcagggaattgaaatgctttctcttgggtctttcaagactggtgctattctcttggctggtctatttgtgtatgacattttctgggttttcttcaccccagtgatggtcagcgttgcaaaatcatttgatgctccaatatagcttttgttccca

SEQ ID NO: 537 - DNA, 403 bp, Glycine max
  Clone ID: LIB3072-052-Q1-E1-G10
gagtgagagagagagaaggcaagatgtcgaagagaggacgcggtggttcggcggggaacaagttccggatgtcgctgggtctgccggtggcggcgacggtgaactgcgccgacaatacgggggcgaagaacctctacatcatatcggtgaaagggatcaaagggcgtttgaaccgtctcccctcggcttgcgttggcgacatggtgatggccaccgtgaagaaggggaaacccgatctgaggaagaaggttttgccagctgtcattgttcgccagcgcaagccatggcgccgaaaggacggcgtctacatgtatttcgaagataatgctggtgttattgtcaatcccaaaggagaaatgaaaggttctgctatcactggtctcattggaaaagagtgtgctga

SEQ ID NO: 538 - DNA, 397 bp, Glycine max
  Clone ID: LIB3072-052-Q1-E1-G11
gacagcaaaaacaattaataaagatgagtttgaagaacaacatggtggtgctaaaggtgtgtttgttgcttcttttccttgtgggggttacagctgcacgcatggaactgagcttcatcaaaagtgatcagtcatcaagttatgatgatgagtattcaaaaccatgctgtgatctctgcatgtgcacacgctcaatgcctcctcaatgcagctgtgaagatattaggctgaattcatgccactcagattgtaagagctgtatgtgcacacgctcacagccaggacagtgtcgttgtcttgacaccaacgacttctgctacaaaccttgcaagtccagagatgactagaaaaactaatagctctctcaaatggacgaagcccctttaagctttgtttg

SEQ ID NO: 539 - DNA, 108 bp, Glycine max
  Clone ID: LIB3072-052-Q1-E1-G7
gacccattttgattttgtcctgagaaattatcccaaaaattaaaaaaatacaaaattacctaacaattttcccttctatttcatttgctcagtaaaagaattataaca

SEQ ID NO: 540 - DNA, 401 bp, Glycine max
  unsure at all n locations
  Clone ID: LIB3072-052-Q1-E1-G8
gacacaactaactaagaaagtcttccatagccccccaaaaatgaagagcaccatcttccttgctctctttctcttttgtgccttcaccacctcatacctaccttcagccatcgctgatttcgtgctcgataatgaaggtaaccctcttgaaaatggtggcacatattatatcttgtcagacataacagcatttggtggaataagagcagccccaacgggaaatgaaagatgccctctcactgtggtgcaatctcgcaatgagctcgacaaagggattggaacaatcatctcgtcnccatatcgaatccgttttatcgccgaaggccatcctttgagccttaagttcgattcatttgcagttataatgctgtgtgttggaattcctaccgagtggtctgttg

SEQ ID NO: 541 - DNA, 349 bp, Glycine max
  Clone ID: LIB3072-052-Q1-E1-H10
gatgcaactgaataattaagaaaagccatttccatagcagcctaagaaaatgaagagcactagcttgttcgctatctttctactttgcgccggcagctcagacctaccttccgccaccgaccaggacgtgctcgacgtggatggcgatccgattcggaacggtttcatatactacgttttgccggcaataagaggaaacggtggcggaatagaacgagccgcactcgggaaagacacttgccctatcactgtagtgcaatctcccaatccaaactctaaggggttagaaattaagtttgaatctgcataccccgcctattacataaacgaaaacctaattttgcaaata

SEQ ID NO: 542 - DNA, 373 bp, Glycine max
  Clone ID: LIB3072-052-Q1-E1-H12
gacagcaaaaacaattaataaagatgagtttgaagaacaacatggtggtgctaaaggtgtgtttgttgcttcttttccttgtgggggttacagctgcacgcatggaactgagcttcttcaaaagtgatcagtcatcaagttatgatgatgatgagtattcaaaaccatgctgtgatctctgcatgtgcacacgctcaatgcctcctcaatgcagctgtgaagatattaggctgaattcatgccactcagattgtaagagctgtatgtgcacacgctcacagccaggacagtgtcgttgtcttgacaccaacgacttctgctacaaaccttgcaagtccagagatgactagaaaaactaatagctctctcaaat

SEQ ID NO: 543 - DNA, 431 bp, Glycine max
  Clone ID: LIB3072-052-Q1-E1-H7
gacactcaaatccaattccactcccaccgaccaaaacgcgcaacacgttgtaattaaaacgacaccgaaactaatgggcgtcttcagcgaaaacccgaatccggacccggttgtgatccgccaggtttgggcttcaaatctcgaatccgaattccaactcatccgcgaactcatcgaccactatccttttatctcgatggacacagaattccccggtgttgttttccgaccacacctggaccccacaaaaccctacaaccaccgcaacaacaatcgcaaccgccactccgaccactaccgcctcctcaagtccaacgtcgacgctctcaacctcatccaggtcggcctcactctcaccgacgccgccggcaaccttcccgatctcgccggaaaccgctccatctgggaattcaacttccgtgacttcgacg

SEQ ID NO: 544 - DNA, 387 bp, Glycine max
  Clone ID: LIB3072-052-Q1-E1-H8
gacagcaaaaacaattaataaagatgagtttgaagaacaacatggtggtgctaaaggtgtgtttgttgcttcttttccttgtgggggttacagctgcacgcatggaactgagcttcttcaaaagtgatcagtcatcaagttatgatgatgatgagtattcaaaaccatgctgtgatctctgcatgtgcacacgctcaatgcctcctcaatgcagctgtgaagatattaggctgaattcatgccactcagattgtaagagctgtatgtgcacacgctcacagccaggacagtgtcgttgtcttgacaccaacgacttctgctacaaaccttgcaagtccagagatgactagaaaaactaatagctctctcaaatggacgaagcccctt

SEQ ID NO: 545 - DNA, 334 bp, Glycine max
  Clone ID: LIB3072-052-Q1-E1-F10
cagtatgaaggggtagctgccatatttaaaattgggaacagcaaagatatgcgtgagggcgccgagcatctttcgaacgatgcaaaaaatttcatcaagctatgcttacaaagagacccattagctcgtccgacagcccataagttactagatcaccccttcattcgagatcaatcggcaacaaaagctgcaaatgtcagcataaccagagatgcttttccttgcatgtttgatggaagccggacaccgcctgtgttagagtcccattccaaccgaagaagtataacttctcttgatggagactttgcatcacagccagctcctgcagcaccac

SEQ ID NO: 546 - DNA, 409 bp, Glycine max
  Clone ID: LIB3072-052-Q1-E1-H9
gattcacacaactaactaagaaagtcttccatagccccccaaaaatgaagagcaccatcttctttgctctctttctcttttgtgccttcagcagctcatacctaccttcagccatcgctgatttcgtgctcgataatgaaggtaaccctcttgaaaatggtggcacatattatatcttgtcagacataacagcatttggtggaataagagcagccccaacgggaaatgaaagatgccctctcactgtggtgcaatctcgcaatgagctcgacaaagggattggaacaatcatctcgtccccatatcgaatccgttttatcgccgaaggccatcctttgagccttaagttcgattcatttgcagttataatgctgtgtgttggaattcctaccgagtggtctgttgtgga

SEQ ID NO: 547 - DNA, 353 bp, Glycine max
  Clone ID: LIB3072-053-Q1-E1-A11
ggccgaaaagtagtaccaagatggcttcagttgtgtatctcctctttggcttccatctcattgtgatcatgtcaagttccttacccgcaactagtgaagtgtttgcaaaacagtatccatccacagaacccgtgggagaaaaactcacccaactccacttctatttccataacaacataacgggggaacacccaactgctatgaaaactgttttgcctcctaaggggtccattcatggttttggggctacttacatgatggatgaccctctaactgaaggaccaagtccaacttcaaagcttgtgggaagatctcaaggaatatacgctttggcttcacaacatgagcctggg

SEQ ID NO: 548 - DNA, 408 bp, Glycine max
  Clone ID: LIB3072-052-Q1-E1-C12
agaaggggacacaactaactaagaaagtcttccatagccccccaaaaatgaagagcaccatcttctttgctctctttctcttttgtgccttcaccacctcatacctaccttcagccatcgctgatttcgtgctcgataatgaaggtaaccctcttgaaaatggtggcacatattatatcttgtcagacataacagcatttggtggaataagagcagccccaacgggaaatgaaagatgccctctcactgtggtgcaatctcgcaatgagctcgacaaagggattggaacaatcatctcgtccccatatcgaatccgttttatcgccgaaggccatcctttgagccttaagttcgattcatttgcagttataatgctgtgtgttggaattcctaccgagtggtctgttg

SEQ ID NO: 549 - DNA, 326 bp, Glycine max
  Clone ID: LIB3072-052-Q1-E1-C3
ggaggccctgtacttgcaggggttcgtcgtttacccttccctaaattatctggtgtgctttgtggcggtaggggcgaaaaacgatgggacctgaaactgaatcatcacaggaaaacccatcacacgagaggccaaacgctgctctctcacaggaacagttcctctcatggaaaccccacaaagatcctgcaatatcagccagaaaagctgaactatccacgaaccgtgcttaagatattgcaccaggaactgtccaaatgaatggccgacaactgcttttacatgagccatggctgtttgacaattcaccttattgacgtctcttt

SEQ ID NO: 550 - DNA, 473 bp, Glycine max
  Clone ID: LIB3072-052-Q1-E1-D10
gggtccgccacgcgtccgcagcaagaagacgacagaagggcttctcagagatggtatcatgttcctcgctcatggctgagctcaggtggtaactccttggttgtgtttgaagaatggggaggtgaccctaatggagagtgcgttggtgaaaagaacatgaagtgtgatattttatgatgctctcttaaaaggcattgacaggcaatatatatcttgtaacaaatgtctaggaaatgcaaagaagctgtcaagtgagtcctatgcggttaggaccctatgatgcagcaatttaccaaatatgtgtggtttagatcatattaggttcagtatataaaaaatatttgaagttcataattggtgctccttgtcttctggttgttcgagtatacctcaaaagattgccaaggcctaatcatgcattgcctggccaaaaacaaagatttatataagagaattttgattcgcaaagactg

SEQ ID NO: 551 - DNA, 420 bp, Glycine max
  Clone ID: LIB3072-052-Q1-E1-D11
gacagcaaaaacaattaataaagatgagtttgaagaacaacatggtggtgctaaaggtgtgtttgttgcttcttttccttgtgggggtgagagctgcacgcatggaactgagcttcttcaaaagtgatcagtcatcaagttatgatgatgatgagtattcaaaaccatgctgtgatctctgcatgtgcacacgctcaatgcctcctcaatgcagctgtgaagatattaggctgaattcatgccactcagattgtaagagctgtatgtgcacacgctcacagccaggacagtgtcgttgtcttgacaccaacgacttctgctacaaaccttgcaagtccagagatgactagaaaaactaatagctctctcaaatggacgaagcccctttaggctttgtttgttatgttaggggagacaaat

SEQ ID NO: 552 - DNA, 245 bp, Glycine max
  Clone ID: LIB3072-052-Q1-E1-D12
gacagcaaaaacaattaataaagatgagtttgaagaacagcatggtggtgctaaaggtgtgtttgttgcttcttttccttgtgggggttacagctgcacgcatggaactgaccttcttcaaaagtgatcagtcatcaagttatgatgatgatgagtattcaaaaccatgctgtgatctctgcatgtgcacaccctcaatgcctcctcaatgcagctgtcaacatattacgctgaattcatgccca

SEQ ID NO: 553 - DNA, 340 bp, Glycine max
  Clone ID: LIB3072-052-Q1-E1-D2
agggacaccaaaaacaattaataaagatgagtttgaagaacaacatggtggtcccaaaggtgtgtttgttgcttcttggcggtgtgggggttacacctcccaacatggaagcgagcttcctcacaaatgatccgtcatcaagttatgatgatgatcagtattcaaaaccatgccgtgatctctgcatgtccacaccctcaatgcctcctcaatgcacccgtgaagatatcacgccgaactcataccacccacattgtaacagctgtatgtccacactcccacagccacgacagtctccgtgtggtgacaccaacgaccctcttgccacacaccctgcccc

SEQ ID NO: 554 - DNA, 307 bp, Glycine max
  Clone ID: LIB3072-052-Q1-E1-D3
gacagcaaaaacaattaataaagatgagtttgaacaacaccatggtggtgctaaaggtgtgtgtgttgcttcttttccttgagggggatacagctgcacgcatggcactgagcttcttcaaaagtgatcagtcatcaagttatgacgatgatgagtattcaaaaccatgctgtgatctctgcatgtgcacacgctcaatgcctcctcaatgcacctgtgaatatattaggctgaattcatgccactcacattgtaagatctgtacgtgcacacactcacagcgaggacagtgtccttgtcttgacac

SEQ ID NO: 555 - DNA, 405 bp, Glycine max
  Clone ID: LIB3072-052-Q1-E1-D8
gacagcaaaaacaattaataaagatgagtttgaagaacaacatggtggtgctaaaggtgtgtttgttgcttcttttccttgtgggggttacagctgcacgcatggaactgagcttcttcaaaagtgatcagtcatcaagttatgatgatgatgagtattcaaaaccatgctgtgatctctgcatgtgcacacgctcaatgcctcctcaatgcagctgtgaagatattaggctgaattcatgccactcagattgtaagagctgtatgtgcacacgctcacagccaggacagtgtcgttgtcttgacaccaacgacttctgctacaaaccttacaagtccagagatgactagaaaaactaatagctctctcaaatggacgaagcccctttaggctttgtttgttatg

SEQ ID NO: 556 - DNA, 104 bp, Glycine max
  Clone ID: LIB3072-052-Q1-E1-D9
cgacagaagggtcctaaagtcaagaaggaagaaaatgacgacgacattcccatctggagaagcacctccaactccaaggaagtgaagaaaaagaggataacaat

SEQ ID NO: 557 - DNA, 368 bp, Glycine max
  Clone ID: LIB3072-052-Q1-E1-E11
ggggggaaagcctgagaagaagaaagaaagatggtgaaagtggcgacgtacttcgcgatgacgcttggagccttcgtgttctggcagtcggagggagggactccatgtctggatcactcttcgtcaagacgaaaacaaagagaggttggagaatgaagcggagatcataacggttagagaagaattattgcagcagcatgccagtcagaaggattctctttcttgaattcgaattatgttgtaattttgctttgtaatttccccttgcttctgtttttccaatgcaatgtcttgtgctcaaataaaatctgctacgcccgagcactccaaaagtaaattaaaccactgccagttaaaaagcggccgcc

SEQ ID NO: 558 - DNA, 420 bp, Glycine max
  Clone ID: LIB3072-052-Q1-E1-E2
gacagcaaaaacaattaataaagatgagtttgaagaacaacatggtggtgctaaaggtgtgtttgttgcttcttttccttgtgggggttagagctgcacgcatggaactgaacttcttcaaaagtgatcagtcatcaagttatgatgatgatgagtattcaaaaccatgctgtgatctctgcatgtgcacacgctcaatgcctcctcaatgcagctgtgaagatattacgctgaattcatgccactcagattgtaagagctgtatgtgcacacgctcacagccaggacagtgtcgttgtcttgacaccaaagacttctgctaaaaaccttgcaagtccagagaatactataaaaactaatagctccctcaaatggacgaaacccctttaagccttgttttgtatgtaagggagacaaata

SEQ ID NO: 559 - DNA, 314 bp, Glycine max
  Clone ID: LIB3072-052-Q1-E1-E3
ccacagaagggtacggctgccataacaccacagaacggtactgttgacagaacacgacataacggcatgattgacctctgcaactgtgataatatggggggcgtcggatttcttcttgctctttcaagcctctatgccacatctttactaaggctgctcccaacacgtgtggattcatggacaatgtgatgatggaaagcttgagcaccgacatgatcaatttctccttttaactaagctgcctattgttttttaaacaattggacaacaataacttcacttcctacctttcttttttgtttataaaatcaaac

SEQ ID NO: 560 - DNA, 465 bp, Glycine max
  Clone ID: LIB3072-052-Q1-E1-E7
gcgtccggattcaagtgtgtgattgtttgttgttgtaactcgttcttcttcttttgttgttctgtgtttgtgtttgttttttctctcacctgaaaatgtcttgctgcggtggtaactgtggttgcggaagctcctgcaagtgcggcaacggctgcggaggctgcaagatgtacccagacttgagctacactgagtcaaccaccaccgagaccttggtcatgggagtggcacctgttaaggctcaatttgagggtgctgaaatgggtgtgcccgctgagaacgatggctgcaaatgtggaccaaactgctcctgcaacccctgcacttgcaagtgaggtgttgggggagcaagcttcaagcaaagatagcccttaattaggaataatgataaactattaatgtgtagctaacaacttatgtattatgtctgtgatggttttcgtgcactctggtgttttgtgtaaa

SEQ ID NO: 561 - DNA, 397 bp, Glycine max
  Clone ID: LIB3072-052-Q1-E1-E8
gacagcaaaaacaattaataaagatgagtttgaagaacaacatggtggtgctaaaggtgtgtttgttgcttcttttccttgtgggggttacagctgcacgcatggaactgagcttcttcaaaagtgatcagtcatcaagttatgatgatgatgagtattcaaaaccatgctgtgatctctgcatgtgcacacgctcaatgcctcctcaatgcagctgtgaagatattaggctgaattcatgccactcagattgtaagagctgtatgtgcacacgctcacagccaggacagtgtcgttgtcttgacaccaacgacctctgctacaaaccttgcaagtccagagatgactacaacaactaatagctctctcaaatggacgaagcccctttaagctttgt

SEQ ID NO: 562 - DNA, 300 bp, Glycine max
  Clone ID: LIB3072-052-Q1-E1-E9
gggaaaaagggtaaagctgtttgtccatgctgccgggttccaattgaagagagaattcctatatttggggcatgttcgtagtcttacatcggtgagctatgaatattttgcaaaaaaactatgctctgccgtagcttatcttttgaatgtctgaaaatgaaaatctattattgctaccttgaaaataagataagtaaatactaacatgtgctttgaagggactaatcaaggattaaaaaatataaatgattttaagatatgagtaaactgtaaagacctgagttgtttatgcaacaaaac

SEQ ID NO: 563 - DNA, 361 bp, Glycine max
  unsure at all n locations
  Clone ID: LIB3072-052-Q1-E1-C11
acataaaaaagcacaaagaaaacattagcactangagcagcaacaactagtctcagctganatggcctcttcagtgatggcatctgtggccctcagacctgcccctttcactgttgagaagtcctcagcgagaggccttccctctctctcaaggaactcttcttcattcagagttgtggccagtggcaagaagatcaagactgacaaaccttatggaattaatggtggcatggctttgagggatggaactgatgcatctggcangaaaggaaagggaaagggtgtttaacagtttgtagacaaatacggtgctaatgtcgatggttacagtcctatctacgacaccaaggactggtctcca

SEQ ID NO: 564 - DNA, 314 bp, Glycine max
  Clone ID: LIB3072-051-Q1-E1-G4
tgaacttgtagatgaatttgaagattcagaagctataactccaccagaattagttgtgctgcccctgaatgccacggtggctgatcggaggagggggcggcaaatgcttttcaaaatgtatatctaaggttcacaagacttcaagttgatgggcgacatggttatagctgtgtcgacgattccacccaggtcaagctcttgttaggatcgagagatatagtttgtgtccgaggaagatgcatccggaaaaatgggttgagcaagttccgaattgaaacgggacctcagacggtgactgtatatttcagctgcgg

SEQ ID NO: 565 - DNA, 372 bp, Glycine max
  Clone ID: LIB3072-051-Q1-E1-G6
gacagcaaaaacaattaataaagatgagtttgaagaacaacatggtggtgctaaaggtgtgtttgttgcttcttttccttgtgggggttacagctgcacgcatggaactgagcttcttcaaaagtgatcagtcatcaagttatgatgatgatgagtattcaaaaccatgctgtgatctctgcatgtgcacacgctcaatgcctcctcaatgcagctgtgaagatattaggctgaattcatgccactcagattgtaagagctgtatgtgcacacgctcacagccaggacagtgtcgttgtcttgacaccaacgacttctgctacaaaccttgcaaatccagagaatactagaaaaactaataactcctctcaa

SEQ ID NO: 566 - DNA, 387 bp, Glycine max
  Clone ID: LIB3072-051-Q1-E1-G8
gacagcaaaaacaattaataaagatgagtttgaagaacaacatggtggtgctaaaggtgtgtttgttgcttcttttccttgtgggggttacagctgcacgcatggaactgagcttcttcaaaagtgatcagtcatcaagttatgatgatgatgagcattcaaaaccatgctgtgatctctgcatgtgcacacgctcaatgcctcctcaatgcagctgtgaagatattaggctgaattcatgccactcagattgtaagagctgtatgtgcacacgctcacacccaggacagtgtccttgtcttgacaacaacgacttctgctacaaaccttgcaagtccagagatgactagaaaaactaatagctctctcaaatggacgaaacccctt

SEQ ID NO: 567 - DNA, 274 bp, Glycine max
  Clone ID: LIB3072-051-Q1-E1-G9
gagacagaaagaacactaaaaaaaaaagaaaaaaaaagtcttaatttgtttcttgttttctctgtcgtttcgttcccttaatctttgatctctgagttacaagttataacaaaagaaataaggaggagatagaaatatttgtaagaaaatatatatatgatcatgggttttcttcacaaactatgggacgaagcgttggcgggtccagcaccggaaacgggtctggggaagctccgaaagtacaactcgttcttcggcggaagctccgtccggt

SEQ ID NO: 568 - DNA, 324 bp, Glycine max
  unsure at all n locations
  Clone ID: LIB3072-051-Q1-E1-H11
gactcaacatttgcatttcctcttcatatacagtacacacttcagctggtggtagcctggtagatagtgtgcttccaaaatgaagaacaaaaggaagactttactattgctgctgctcatggctgcaactctcttttgcatgccaattgtgtcgtatgctgtttctaatgtcaacattcaagaccatctcaccaatatttctgagctggtaaaaggtccaaatanaaggcttttgtcatttgtggattgtggagagaggtgcacggtgaggtgcagtttgcactcaaggccaaagatttgcacgagagcttgcgagacatgctg

SEQ ID NO: 569 - DNA, 405 bp, Glycine max
  Clone ID: LIB3072-051-Q1-E1-H3
cacgcatccgcagcaaaaaagacgacagaaggggacagcaaaaacaattattaaagatgattttgaaaaacaacatgggggggctaaaggggtgtttgttgcttcttttccttgtgggggttacagctgcacgcatggaactgaacttcttcaaaagtgatcagtcatcaagttatgatgatgatgagtattcaaaaccatgctgtgatctctgcatgtgcacacgctcaatgcctcctcaatgcagctgtgaagatattaggctgaattcatgccgctcagattgtaagagctgtatgtgcacacgctcacagccaggacagtgtcgttgtcttgacaccaacgacttctgctacaaaccttgcaagtccagagatgactagaaaaactaatagctctctcaaa

SEQ ID NO: 570 - DNA, 286 bp, Glycine max
  unsure at all n locations
  Clone ID: LIB3072-051-Q1-E1-H6
gggaacctgaaaatctagtttcttacaaggctctactctactgcttcaccttctgctctagaaaattcagtggtgatacatggcttcggctactctctctgtanccaaaccagcccttcaggcaaatgggaaaggcttctctgaattctctggcctccgcagctcatcaggcttccttcccttttctagaaaatcttcagaggatttccattctgtcattgccttccagacctatgcagttggnagcagtggaggatacaaaaagggtgtgacagaagcaaaactg

SEQ ID NO: 571 - DNA, 386 bp, Glycine max
  Clone ID: LIB3072-051-Q1-E1-H8
gacagcaaaaacaattaataaagatgagtttgaagaacaacatggtggtgctaaaggtgtgtttgttgcttcttttccttgtgggggttacagctgcacgcatggaactgagcttcttcaaaagtgatcagtcatcaagttatgatgatgatgagtattcaaaaccatgctgtgatctctgcatgtgcgcacgctcaatgcctcctcaatgcagctgtgaagatattaggctgaattcatgccactcagattgtaagagctgtatgtgcacacgctcacagccaggacagtgtcgttgtcttgacaccaacgacttctgctacaaaccttgcaagtccagagatgactagaaaaactaatagctctctcaaatggacgaaacccct

SEQ ID NO: 572 - DNA, 384 bp, Glycine max
  Clone ID: LIB3072-051-Q1-E1-H9
gaaggcaagaaaaaaataaataaaacactaagatccttataagtttccctcgatcggcgaaaatatgtctgggttccttagcaacctctttggtttcaacggaaacaacaatggcactgaggatgcctttaaaaactcaggaggaggaggacaagacttcaaggacgcggagttcaacactggtgtgcaagttgccaaggggagacacgctccttgcagtggtaacagtgggactaaaagtgcttttaacaactctggttcgggaaaacaggatttcggaaatgctatgtttaacactgggggcaggtactactaatttatataagaccttcctcttgggggggctgggcttccaaaacatacaaaataatcataagtatgggg

SEQ ID NO: 573 - DNA, 328 bp, Glycine max
  unsure at all n locations
  Clone ID: LIB3072-052-Q1-E1-A11
ctcaatgggatctggcatcanaagaacaactacttgataactaagaatgagaagcaaatggcttcctcaatgatctcctccccagctgttaccacgtgtggggggtggcggtgccggcatagataaaccattcactgccctcaattccatggctggcttccccaccagaaagaccaataatgacattacctccattgctaccaacggtggaagactgcaatgcatgcacgcgtggccaccacttggcaaaaacaactttgagactctttcctacctgccataccttgatgatgcacaattggcaaacgaactataatatcttcttagg

SEQ ID NO: 574 - DNA, 76 bp, Glycine max
  Clone ID: LIB3072-052-Q1-E1-A4
ggttctagtgtctgcattccttgttgttgtcactccttcttcctcttttgttgttctatctttctctttctttttt

SEQ ID NO: 575 - DNA, 207 bp, Glycine max
  Clone ID: LIB3072-052-Q1-E1-A7
gtgacggagaacagaataactgagtaatggcaagcattcaactttcaagttacattggcaatacaagttcagttggtgactcattttcaggcatcaaattcccttgtctcaatccacatttttttttctgtttactatgtatgtgaaaagttttgtgagacaaattttgggttgataattgagaagaattagtagatagtttggctt

SEQ ID NO: 576 - DNA, 283 bp, Glycine max
  Clone ID: LIB3072-052-Q1-E1-A8
cacagaacggggaggaagccacatacagacacaatacagagtgagttgttgctccttcgccacaactctctgccaacatgggtatctccagagattcgaggcggaaggggcgtgccactggtggcaaaaagaaggcctggaggaaaaatataaagtatgaccttggtcgccaccctgctaacactaacctgtcaagcaacaaaacagtcaggaggatccgtgttacaggtggaaatgtgaactggagggcattgacattggatactggaaattacccctgcgg

SEQ ID NO: 577 - DNA, 384 bp, Glycine max
  Clone ID: LIB3072-051-Q1-E1-G10
tgtgattctgatgtctttcagctttcaaattctatgtggcctcgtgcacaatacttgcctgaggtcgaagtatatgcgttgccagacgcagttccgttttgattcttttggattattttttgacaataggtggtagtttgatgaaagtagggagctgttctgtgttctaattgagaaccggtggatgattgtttttttgaaagagaaaaacaattacatggcatatgggcaaagattgcgttaatatgttcaaacatgatcgatgtaattttgtcatccatacttggcgttagtagtatttgtagaatgcacagacataaatattatagtagtaaaacagttttttagccacccccccgacgccggcccgccgcgccggggccg

SEQ ID NO: 578 - DNA, 357 bp, Glycine max
  Clone ID: LIB3072-052-Q1-E1-B7
ggagagagaagatggcgagcaacgatggaggaggaggaggaaaagaagaaagaagaagaagaagaattgcagagagaggttcagatcgcatggccttaataacgggtcgaatcaatgcgcttcctccgacaccaccctcttcggcgtcgtccccaacccacccccacatccctcgccacgcgcaatccttgtcggtcgcagctttcgattctaactcagatgatcagcagcggcatcttccccctcgccaacagcgccctcagtcgttgtcagcattcgccgattaccacgaagatctcactggcggtgctgaaaataaacgtagtggctctccttcttcaacaagactaagacatc

SEQ ID NO: 579 - DNA, 405 bp, Glycine max
  Clone ID: LIB3072-052-Q1-E1-B8
gacagcaaaaacaattaataaagatgagtttgaagaacaacatggtggtgctaaaggtgtgtttgttgcttcttttccttgcgggggttacagcgtgcacgcatggaactgagcttcttcaaaagtgatcagtcatcaagttatgatgatgatgagtattcaaaaccatgctgtgatctctgcatgtgcacacgctcaatgcctcctcaatgcagctgtgaagatattaggctgaattcatgccactcagattgtaagagctgtatgtgcacacgctcacagccaggacagtgtccttgtcatgacaccaacgacttctgcgacaaaccttgcgagttcagagatgactacaaaaactaatagctctctcaaatggaccaaaccccctttacgctttgtttgtta

SEQ ID NO: 580 - DNA, 378 bp, Glycine max
  Clone ID: LIB3072-051-Q1-E1-E1
gattcacacaactaactaagaaagtcttccatagccccccaaaaatgaagagcacatcttctttgctctctttctcttttgtgccttcagcacctcatacctaccttcagccatcgctgatttcgtgctcgataatgaaggtaaccctcttgaaaatggtggcacatattatatcttgtcagacataacagcatttggtggaataagagcagccccaacgggaaatgaaagatgccctctcactgtggtgcaatctcgcaatgagctcgacaaagggattggaacaatcatctcgtccccatatcgaatccgttttatcgccgaaggccatcctttgagccttaagttcgattcatttgcagttataatgctgtgtgt

SEQ ID NO: 581 - DNA, 321 bp, Glycine max
  Clone ID: LIB3072-051-Q1-E1-E10
gattcacacaactaactaagaaagtcttccatagccccccaaaaatgaagagcaccatcttctttgctctctatctcttttgtgccttcagcacctcatacctaccttcagccatcgctgatttcgtgctcgataatgaaggtaaccctcttgaaaatggtggcacatattatatcttgtcagacataacagcatttggtggaataagagcagccccaacgggaaatgaaagatgccctctcactgtggtgcaatctcgcaatgagctcgacaaagggattggaacaatcatctcgtccccatatcgaatccgttttatcg

SEQ ID NO: 582 - DNA, 261 bp, Glycine max
  Clone ID: LIB3072-051-Q1-E1-E12
gacacaactaactaagaaagtcttccatagccccccaaaaatgaagagcaccatcttctttgctctctttctcttttgtgccttgagggggtgagacctaccttcagccatcaaagatttcgtgctcgataatgaaggtaaccctcttgaaaatggtggcacatattatatcttgtcagacataacagcatttggtggaataagagcagccccaacgggaaatggaagatgccctctcactgtggtgcaatctcccaatga

SEQ ID NO: 583 - DNA, 353 bp, Glycine max
  Clone ID: LIB3072-051-Q1-E1-E2
gatgcaactgaataattaagaaaagccatttccatagcagcctaagaaaatgaagagcactagcttgttcgctatctttctactttgcgccttcacctcatacctaccttccgccaccgcccagggcgtgctcgacgtggatggcgatccgattcggaacggtttcatatactacgttttgccggcaataagaggaaacggtggcggaatagagcgagccgcactcgggaaagacacttgccctatcactgtagtgcaatctcccaatccaaactctaaggggttagaaattaagtttgaatctgcataccccgcctattacataaacgaaaccctaattttgcaaataaagt

SEQ ID NO: 584 - DNA, 224 bp, Glycine max
  Clone ID: LIB3072-051-Q1-E1-E3
aaaaacgacaggtgggatcatctattattaacaaaaccatttcacaccacccaatatctttataccttctcttctccctacccttctactttgtgcgggggcggatatctattttccaacaacacatatcgttttctctacttccattactattcttttcactcctgtttcatattctatcttttcccacatatcataatttactgtcatagaataaacctaac

SEQ ID NO: 585 - DNA, 374 bp, Glycine max
  Clone ID: LIB3072-051-Q1-E1-E4
gacaaacaagctttccatatctgatatcatatcatactgtttcctataattctaatttatctgggcatggctacgccagggtttggtctcgctgaagcatacatgacacggaagatatacaaggaaaaaatgaaaaagatagcacaagaagaacaagagggagagaaaaactccaacatgaagatttctactatcaaaacgggttccgaggataaaacatcaagtgggtgtttctcatgggtctccaaacagcaacacaagaaaaattctcgaatttcagattacaacgaaaccctagctgctgccaattcatgattgacgatgttgggcttttatacattttaagtactaattaatgtttctttcaatttttc

SEQ ID NO: 586 - DNA, 372 bp, Glycine max
  Clone ID: LIB3072-051-Q1-E1-E5
gacagcaaaaacaattaataaagatgagtttgaagaacaacatggtggtgctaaaggtgtgtttgttgcttcttttccttgtgggggttacagctgcacgcatggaactgagcttcttcaaaagtgatcagtcatcaagttatgatgatgatgagtattcaaaaccatgctgtgatctctgcatgtgcacacgctcaatgcctcctcaatgcagctgtgaagatattaggctgaattcatgccactcagattgtaagagctgtatgtgcacccgctcacagccaggacagtgtcgttgtcttgacaccaacgacttctgctacaaaccttgcaagtccaaagatgactagaaaaactaatagctctctcaaa

SEQ ID NO: 587 - DNA, 247 bp, Glycine max
  unsure at all n locations
  Clone ID: LIB3072-051-Q1-E1-E6
gagtgtctgcgtctcttcctcctctctctgcatcgctgcgttttccgaatccaaacgttaggttagtaagtaacaatggtggaaaacgccaaaggtangaaggaggaggttgtcactcgagagtacaccatcaacctccacaaacgcttgcatggctgcacatttaagaagaaggctcctaaagcaattaaggagataaagaagtttgctcacaaagcgatggggacgaatgatgttagagtggatg

SEQ ID NO: 588 - DNA, 135 bp, Glycine max
  Clone ID: LIB3072-051-Q1-E1-E7
gatacacaattagggacaccctttggattactttgcttgtttaattagttatccaatgcccaatctgccaatcatgtgattatatggagcaggtcccaattaaaaaaaatccaatatgagaaattgggattcaac

SEQ ID NO: 589 - DNA, 340 bp, Glycine max
  unsure at all n locations
  Clone ID: LIB3072-051-Q1-E1-E8
caacaagggggggggcaaaaggtgtgtttgttgcctcctttccnttgtggggtttacagctgcacncatggaaactgagcttcttcaaaagtgatcagtcatcaagttatgatgatgatgagtgttcacaaccatgctgtgatctctgcatgtgcacacgctcaatgcctcctcaatgcagctgtgaagatattaagctgaattcatgccactcagattgttagagctgtatgtgcacacgctcacagccaggacagtgtcgttgtcttgacaccaacgacttctgctacaaaccttgcaagtccagaaatgactagaaaaactaatagctctctcaaat

SEQ ID NO: 590 - DNA, 410 bp, Glycine max
  unsure at all n locations
  Clone ID: LIB3072-051-Q1-E1-E9
gacccttttcttgcaatctaagttttttctccttttcttttttctttttttctttttttaatattctcaatttatacccttcgagaggggggcgcactagctatcacagtttcacctgagaaactgagggaaaaaaaaaaagatgagctcagtatgcatatcaaactgcatcaacgacgcacgtgacccacgtgttccggtgaaggcttcctacgtgaacctctataagtggccggaatcggatgctgagttcgtgaggtctanaagctgcaacaaagaaaaggggtctcagatattgtacggtcactccaggggggtggatagcatctcttgcagacaaatgttcttcaaaagctacacgttttcaagggaaagaaaaaccgagcacgagaaaacccacaaatgttttg

SEQ ID NO: 591 - DNA, 378 bp, Glycine max
  unsure at all n locations
  Clone ID: LIB3072-051-Q1-E1-F1
gacagcanaaacaattaataaagatgagtttgaagaacaacatggtggtgctaaaggtgtgtttgttgcttcttttccttgtgggggttacagctgcacgcatggaactgagcttcttcaaaagtgatcagtcatcaagttatgatgatgatgagtattcaaaaccatgctgtgatctctgcatgtgcacacgctcaatgcctcctcaatgcagctgtgaagatattaggctgaattcatgccactcagattgtaagagctgtatgtgcacacgctcacagccaggacagtgtcgttgtcttgacaccaacgacttctgctacaaaccatgcaagttcagagatgactagaaaaactaatagctctctcaaatggacg

SEQ ID NO: 592 - DNA, 347 bp, Glycine max
  Clone ID: LIB3072-051-Q1-E1-F10
gattcaaaaaaaaaaaccttacaaattaacataacatgttcacaaaatcaaaattcgtcaacaaagtcaaaacttagaaaatttttgcgaaaaagtgaaatagtttacagtaaaagttgtcaaagaaaaagttaatgataaaaagtacaattatacaagcatgtcacatcaacttgacaataaatatataatttaaagttgtttttaacaagttaaaagtaaaatacaccaaattaatttgttggtagtaaaatgtcccaaaaaataaaataaaaaaacataaaaatgtgattaagctaatttttctaattatatctctagtgagaattaatttttaaaaaatataa

SEQ ID NO: 593 - DNA, 327 bp, Glycine max
  Clone ID: LIB3072-051-Q1-E1-F5
ggattcccaacttcaccatattatgaagctcacaggtttcctgcaagcggtgactctaactgctttggtgttatccaccttcactgcatcagatggcgattctcttcaagacctctgtgtcacagaccttgcctcaccggttaaagtgaatggattcacctgcaaagatgctggcaaggtaaatgcgagtgatttcttctcagacatactatccaaaccaggtaccacaaacaacacgtatggctccctagtgactggagccaacgttcagaaaatcccacgactcaacacccttggcgtgtccttttcacgcattgactatgcccc

SEQ ID NO: 594 - DNA, 403 bp, Glycine max
  Clone ID: LIB3072-051-Q1-E1-F7
gacagcaaaaacaattaataaagatgagtttgaagaacaacatggtggtgctaaaggtgtgtttgttgcttcttttccttgtgggggttacagctgcacgcatggaactgaacttcttcaaaagtgatcagtcatcaagttatgatgatgatgagtattcaaaaccatgctgtgatctctgcatgtgcacacgctcaatgcctcctcaatgcagctgtgaagatattaggctgaattcatgccactcagattgtaagagctgtatgtgcacacgctcacagccaggacagtgtcgttgtcttgacaccaacgacttctgctacaaaccttgcaagtccagagatgactagaaaaactaatagctctctcaaatggaccaagcccctttacgctttgtttgtta

SEQ ID NO: 595 - DNA, 384 bp, Glycine max
  Clone ID: LIB3072-051-Q1-E1-F9
ggagttcgaactaaacaattcaattcaatctgcctcgatcatggagaggaaaacatttgggtttttgttcttgcccctccttgtcggagcgtctgatgtgacggtgaaaaaagcagaggcgaaagattgcttgacaaggaggcacgggttccagggtagatgcttattcgacaggcaatgtgcacatgtgtgcaggagcgatggtttcatcggtggtcagtgccgaggccctcttcgcaaatgcttttgcagcaggccatgttgatcgaaattactactgccaaagaagccatgaaataaacaaacaaacaaataaataaatagctctaaacgacacatatgtacgtagtgtcggggttctagctagctacgtaagtacgtgtg

SEQ ID NO: 596 - DNA, 379 bp, Glycine max
  Clone ID: LIB3072-051-Q1-E1-G1
gatccccatcaaaacacaagcaaatcctaaaaagttgattgagatatatagaaactagcttcaatttcacaaaatgaagaaagtgtttgtcacatttttggctgtgctagttgtatttgttcttacagcgaaagcttcagaggcacgactaccagttaaaacaaattcagcatcaaatgactacaattgttcacaagtctataacctgttagtttcgtgcgtagattacatgattggtggagatgatggtgccccttcaggtgtttgttgccaaagtgttaatgcagtgaaagcatcagcaccaacacaaattcaacgaatggctgcatgtaagtgctttttcgacgtagcaactcgccttcctttcttgctcgaaaac

SEQ ID NO: 597 - DNA, 200 bp, Glycine max
  Clone ID: LIB3072-051-Q1-E1-B8
gagaagccaccgaacggacccactcgttttcgttctcgttctggtttatacatctttgccaacgatgtttacaccgctcaaccaaacatgcaccacggggggggggaggtcactgacctttacaaaccaaagaagtgctcctccacacccacattcattaccgctaatgaccatgcttccgttcacatcaacattgcgca

SEQ ID NO: 598 - DNA, 405 bp, Glycine max
  unsure at all n locations
  Clone ID: LIB3072-051-Q1-E1-C1
ggtgacagtgaagagatggaaggcatagtacacaggacagttgaagtgaatggcataaaaatgcatgttgctgagaaaggtgaaggtcccgtggtcttgttcctccacggcttcccggagctctggtactcctggcgccaccagattctggctctcagcaacctcggctaccgcgccgtggctccagatctccgcggctacggagacaccgaggcaccagcttcaatcagcggctacaccatcctccacttagtttctgacatcgtcgcgctcattcactcacttgctgtggattaagtcttcctcgtagcccatgattggggggctgtcatangttggtacctctgcttgtttcgccccgacagaatcaaggcctatgtttgtctcagtgttcctttcatgcct

SEQ ID NO: 599 - DNA, 147 bp, Glycine max
  Clone ID: LIB3072-051-Q1-E1-C10
gagaagacgacagcagggtacagctgctaaaagacgacataatgtgagtgtatgtaattgttgtgactcgttcttcttcttccttatcttcctcttttgttgtgtgtgtgtgtggtttttctctcaccctaaaaatttcttgcttcc

SEQ ID NO: 600 - DNA, 265 bp, Glycine max
  Clone ID: LIB3072-051-Q1-E1-C12
gataccaaaaacaaaacaagccaagtgaaagagagaagaaaagtcaaagacaatgtcagggatcattcacaagattgaggagacccttcatgtgggaggccacaagaaggaggaggagcacaagggtgagcagcaccatggtggagaatacaaaggggagcatcatggtgaacacagtactgaatacaaaggagagcatcatgttggtgagcacaagccggagcaccatggaggagaagagcacacagaggggttcctagacaag

SEQ ID NO: 601 - DNA, 372 bp, Glycine max
  Clone ID: LIB3072-051-Q1-E1-C2
ggaggcaatagaggtcattagagaaacagctatggaaggagaaaatggaaagaagctgaaaatactgtgcctccacggattcagaacaagtgggagttttcttaaaaagcaaatcagcaaatgggatccttctctattcattcaatttgatatggttttcccagatggtaaataccctgctggagggaagtctgacatagaaggcatcttccctccaccttactatgagtggtttcaattcgaaaaggacttcacagtgtactttaacttggaagaatgcatctcatacttatgcgattatattacagccaatggtccctttgatggcttccttggcttctcacaaggtgcaactctttcagcacttttgat

SEQ ID NO: 602 - DNA, 394 bp, Glycine max
  unsure at all n locations
  Clone ID: LIB3072-051-Q1-E1-C3
gatggccaccgtttctttcaacgaaaactagcttctgtatttattcttctgtttgtgaaatatgtttttgtcttcgttactttttagagttactcgtctgatgttttcgatttgattatttttgttttgacggaggaacaagatgtgagttgtggttttctctgtgatgatgaaaacgatgacgagtctgatatgatatccattccttacaatactgacgacaaatcgaggcatttgtctgagaggattccactctttctcccatcctttatatttgggttgtttaattttttgcgcgtggtttgttgtttcgantgtttgtattttttgtgtttttttgaaattacgcatggggatgattgtttattgtcatctgatgattcatttgatgaat

SEQ ID NO: 603 - DNA, 347 bp, Glycine max
  unsure at all n locations
  Clone ID: LIB3072-051-Q1-E1-C4
ggccagcaagtgtgagtgatatttgagcttaaaccctagccgctcttctcttcattcttcactttggaaacaatcataatggcgttctgtaagaaggttggaaatgtcttgaggcagggtgctgctcgcancacacatgcccctgttgcgtccatgcttaattacatccgctgcatgtcttcaagcaagcttttcattggaggcctttcatatggagttgatgaccagtctcttaaggatgcattttctggctttggagatgtggttgatgcacaagttataactgatagagacagtggaaaattaaggggatttggaatttgtcacttctccaatgatgagtctgc

SEQ ID NO: 604 - DNA, 205 bp, Glycine max
  unsure at all n locations
  Clone ID: LIB3072-051-Q1-E1-C6
gactcactcatacaatagagaccagcttttgcttctttgtgaacatggagatgaggaaatcatgtggcttcttcttcttgctcctcggcgggtgggggtgcctcccangtggtggtacagacggagggaacagtgtgtgagtcacaaagccacgggttccatggtttgtgtaataaagaccaaaactgtgctttggtctgcagga

SEQ ID NO: 605 - DNA, 410 bp, Glycine max
  Clone ID: LIB3072-051-Q1-E1-C7
gattcacacaactaactaagaaagtcttccatagccccccaaaaatgaagagcaccatcttctttgctctctttctcttttgtggcttcaggagctcatacctaccttcaaccatcgctgatttcgtgctcgataatgaaggtaaccctcttgaaaatggtggcacatattatatcttgtcagacataacagcatttggtggaataagagcagccccaacgggaaatgaaagatgccctctcactgtggtgcaatctcgcaatgagctcgacaaagggattggaacaatcatctcgtccccatatcgaatccgttttatcgccgaaggccatcctttgagccttaagttcgattcatttgcagttataatgctgtgtgttggaattcctaccgagtggtctgttgtggag

SEQ ID NO: 606 - DNA, 403 bp, Glycine max
  Clone ID: LIB3072-051-Q1-E1-C9
acagcatatctatttactaaagatgagtttgaagaacaacatggtggtgctaaaggtgtgtttgttgcttcttttccttgtgggggttacagctgcacgcatggaactgagcttcttcaaaagtgatcagtcatcaagttatgatgatgatgagtattcaaaaccatgctgtgattcctgcatgtgcacacgctcaatgcctcctcaatgcagctgtgaagatattaggctgaattcatgccactcagattgtaagagctgtatgtgcacacgctcacagccaggacagtgtcgttgtcttgacaccaacgacttctgctacaaaccttgcaagttcagagatgactagaaaaactaatagctctctcaaatggacgaaacccctttaggctttgtttgttat

SEQ ID NO: 607 - DNA, 376 bp, Glycine max
  Clone ID: LIB3072-051-Q1-E1-D1
gagatcagcacatggtaagtggatgaaggatctcggacgtgccgcggtacatgggtcggtgatcctcgattgcctgcttcccgtctaggtttcacaccagtgacggcaacactacaagagccacctatattctccgcgatgacggcagcatcactcttcttaacgagacttgatatgacggcatgacaggtttcattgaaggcactgcttataaagttgatcccaacagagacgaagccaagttgcacgacaagttctgggtgcctccctttttacccatcattcacgttacaggcgattactggcttttgtacattgatcatgattatcactaggctgtcattggccaaacttccaagacatatccttggataat

SEQ ID NO: 608 - DNA, 253 bp, Glycine max
  Clone ID: LIB3072-051-Q1-E1-D11
gacggatccaaaaactagtttaacttatttaatatgatatctctcaaaggcaaagtaaaaccatctcctccgtgtctctcccagactgagtggagacacgaacaagtaattgaaactcctacagttgaatcagaaacactccacgcctacgctattgccttataatctttgttccacgcttttccctctcctcttcgcacacagccttccttcctagggtttcatccaattatgaactgtgaagtgtgccagc

SEQ ID NO: 609 - DNA, 401 bp, Glycine max
  Clone ID: LIB3072-051-Q1-E1-D2
gacacacaactaactaagaaagtcttccatagccccccaaaaatgaagagcaccatcttctttgctctctttctcttttgtgccttcaccacctcatacctaccttcagccatcgctgatttcgtgctcgataatgaaggtaaccctcttgaaaatggtggcacatattatatcttgtcagacataacagcatttggtggaataagagcagccccaatgggaaatgaaagatgccctctcactgtggtgcaatctcgcaatgagctcgacaaggggattggaacaatcatctcgtccccatatcgaatccgttttatcgccgaaggccatcctttgagccttaagttcgattcatttgcagttataatgctgtgtgttggaattcctaccgagtggtctgt

SEQ ID NO: 610 - DNA, 298 bp, Glycine max
  unsure at all n locations
  Clone ID: LIB3072-051-Q1-E1-D3
gacgcagcttcatccctaacgcgtgcatagcagagtcagagacagagacgcagccatggggcggagacctgcgaggtgttatangcaaattaagaacaagccataccccaagtcacgtttctgccgtggtgttcctgatcccaagatcaggatttatgatgttggtatgaagaagaacggtgttgatgagtttcctttctgtgtccatctggttagttgggagaaggaaaatgtttcaagtgaggccctggaagctgctcgcattgcttgcaacaagtacatggccaaatttgctgga

SEQ ID NO: 611 - DNA, 291 bp, Glycine max
  Clone ID: LIB3072-051-Q1-E1-D5
gaaaatcgattgggagaaaggcaaaggggatcgctgaaatcaattagtctggttgtagtgggaaaagaaaagaaaatgaaaatgggtggtgggtgcaagtgtttggtatcgttggtgttggctttggtgttgatgaggagtttggcggaggcgcaatcgggcagcagcaccacctgcgcccaggagctaattccatgtgtgaactttctgaatgggacaaccaccccaccaagctcttgctgtgaccctctcaaacaaaccgtggaaaaccaactggattgcctctgcaac

SEQ ID NO: 612 - DNA, 179 bp, Glycine max
  Clone ID: LIB3072-051-Q1-E1-B6
gacagcaaaaacaattaataaagatgagtttgaacaacaacccggtggtgctaaacgtgtgtttgttgcttcttttgcgggcgggggttacagctgcacccataaaactgagcttcttcaaaagtgatcagtcatcaagttatgatgatgatgactattcaaaaccatgctgtcatctc

SEQ ID NO: 613 - DNA, 390 bp, Glycine max
  unsure at all n locations
  Clone ID: LIB3072-051-Q1-E1-D6
gactcactcatacaatagagaccagcttttgcttctttgtgaacatggagatgaggaaatcatgtggcttcttcttcttgctcctcctccttgtctttgcttcccaggtggtggtgcanacggagggaagagtgtgtgagtcacaaagccacgggttccatggtttgtgtaatacagaccacaactgtgctttggtctgcaggaacgaaggtttctccggtggcaggtgcaaaggcttccgccgccgctgcttttgcaccaagatttgttgagatctcatcaaacactactcttgccatgcaaattaataaatcatagctaggccaaataaattgcatctactctttatccatttgggagctagctaccacaaccaactcatacttggtc

SEQ ID NO: 614 - DNA, 376 bp, Glycine max
  Clone ID: LIB3072-051-Q1-E1-D7
gacagcaaaaacaattaataaagatgagtttgaagaacaacatggtggtgctaaaggtgtgtttgttgcttcttttccttgtgggggttagagctgcacgcatggaactaaacttcttcaaaagtgatcagtcatcaagttatgatgatgatgagtattcaaaaccatgctgtgatctctgcatgtgcacacgctcaatgcctcctcaatgcagctgtgaagatattaggctgaattcatgccactcagattgtaagagctgtatgtgcacacgctcacagccaggacagtgtcgttgtcttgacgccaacgacttctgctacaaaccttgcaagtccagagatgactagaaaaactaatagctctctcaaatgga

SEQ ID NO: 615 - DNA, 407 bp, Glycine max
  unsure at all n locations
  Clone ID: LIB3072-050-Q1-K1-H12
gacagcaaaaacaattaataaagatgagtttgaagaacatcatggtggtgctaaaggtgtgtttgttgcttcttttccttgtgggggttacagctgcacgcatggaactgagcttcttcaaaagtgatcagtcatcaagttatgatgatgatgagtattcaaaaccatgctgtgatctctgcatgtgcacacgctcaatgcctgctcaatgcagctgtgaagatattaggctgaattcatgccactcagattgtaagagctgtatgtgcacacgctcacagccaggacagtgtcgttgtcttgacaccaacgacttctgctacaaaccttgcangtccagagatgactagaaatactaatagctctctcaaatggacgaagcccccttagggcttttgttggtatgt

SEQ ID NO: 616 - DNA, 368 bp, Glycine max
  Clone ID: LIB3072-050-Q1-K1-H3
gatcaagaaccagttcaatatccgagtacaccgtattaaagaatttaagatatactatgatgagagcgcggttcccattactgttgctgggagttgttttcctggcatcagtttctgtctcatttggcattgcgtattgggaaaagcagaaccccagtcacaacaagtgcctccgaagttgcaatagcgagaaagactcctacaggaaccaagcatgccacgctcgttgcaacctccttaaggtggaggaagaagaagaatgcgaagaaggtcaaattccacgaccacgaccacaacacccggagagggaacgtcagcaacacggtgagaaagaggaagacgaatgtgagcagccacgttcattccca

SEQ ID NO: 617 - DNA, 297 bp, Glycine max
  Clone ID: LIB3072-050-Q1-K1-H7
gagcgccaatgtttttttcagaggagtttgatcgggtaatcaaaagagtttatcttatagtaagaaatcgatgtcttactccattttaaggaacaaaacaagagaacaatagcctgacaaagggtttagccataaaatcgaatccatcattgatttgagatattgataaggtgaatactcatttctcgtcaatgctaggcataatgcgggtatagggacctaaaaaagattatcttttcttcctatcttatgaactttaatgtgtatgaagtgtcagttactatcttagatttgaat

SEQ ID NO: 618 - DNA, 425 bp, Glycine max
  Clone ID: LIB3072-050-Q1-K1-H8
gaagacgacagaaggggattcacaaaaccaaattgctttgcactactactaaactaccatgttgctttccaagcaatcactaaagtaaaagccagccatgggaaactgcttggtgctgcaagagaacgttgtgaagatcgtgaaaaccgatgggaaagttcttgaatacaaaacacccatcaaagtggaagaggttctgatacaattttctggccatgcagtgtctgaatcactcacagtgctgcggcatcttgagccacacacaaagttgcttagagggcagttatattacctagtgcctctgccaccatcaccaaaaaccaacaagaaggtgaggtttgcggaaccagaagtccaagatgtacataaaagtaacgtggttaggattaaggtggttattagtaaacaacagcttgagaacatgc

SEQ ID NO: 619 - DNA, 203 bp, Glycine max
  Clone ID: LIB3072-051-Q1-E1-A1
ggagttcgaactaaacaattcaattcaatctgcctcgatcatggagaggaaaacatttgggtttttgttcttgctcctccttgtcttagcttctgatgtgacggtgaaaaaagcagaggcgaaagattgcttgacaaggaggcacgggttccagggtagatgcttattcgacaggcaatgtgcacatgtgtgcacgagcgatg

SEQ ID NO: 620 - DNA, 354 bp, Glycine max
  unsure at all n locations
  Clone ID: LIB3072-051-Q1-E1-A4
ggccgcaagcagagatgacaacccgatttaaggagaaccgcaagaagcgcggccacgtcagcgccggccacggccgtattggaaancaccgcaagcaccccggcggccggggaaatgccggcggcatgcaccaccacaggatcctcttcgacaagtaccacccggggttcttcgggaaggtanggatgaggtactttcataagctccgcaacaaattctactcccccagcgtcaacatccacaagctatggtctctgatatcccaagacgcgaacgacaaaaccctaaaatcgaaagacactgcccctctaatcgaggtcactcaacacgggtacttcaaggttctcggaaaag

SEQ ID NO: 621 - DNA, 350 bp, Glycine max
  Clone ID: LIB3072-051-Q1-E1-A5
gatagtttccaatttcacatcctcttattgttaattaaaccctttgtttgcacaagaaaagagtaataacttgatcatcatcaacatgagtcgcgggagcaatcagcaagaaacccctgtatcatatcctccagctccatatgttagtgccccaccacctatgggttatccttccaaagatgatcctacagctgtagggtacccccaacaaagagtttcagaggaaaccacaagcaggggtgatggattttggaaaggatgttgtgctgccttatgttgctgccgggtcctggattgttgcttccgattgaagcaaagcacatatttgtgtttgtcaccatttttttttc

SEQ ID NO: 622 - DNA, 102 bp, Glycine max
  Clone ID: LIB3072-051-Q1-E1-A6
attgtaaacataacaaaaggaacgagggaaattagcaacagtctaccatcaataaaaagaatcagttaaaaaaagatcctttttgatagggggggggggggg

SEQ ID NO: 623 - DNA, 288 bp, Glycine max
  Clone ID: LIB3072-051-Q1-E1-A8
ggcagcacttggtggcaatcgtgatgtggcaggaagccagaacagccttgagatcgatggtttagctcgctttgctgttgaagaacagaggaaaaaacagaatgcccttttggagtttgaaaaggtagtaagtgcaaaacagcaagtggtttctggtaccttgtacaccatcactttggaggcaatagatggtgggcaaaagaaggtttatgaagccaaagtttgggagaaggcatggttgaacttcaaggaggtgcaagagttcaagcttgttggagatgcacctgc

SEQ ID NO: 624 - DNA, 343 bp, Glycine max
  unsure at all n locations
  Clone ID: LIB3072-051-Q1-E1-A9
cagaaaggggaaacaaacaacaaatattcatggctttctttattctctccttccccttccttcttcttgtttcatctgccactgcttgtgatcgctgcttgtatcaatccaaggcttcctatttctccaaagcttctgctctttcatctggggcatgtgggtatggctctttggcactanacataagtggtggacaccttgcagctggtgtggattctctcttcaaaaatggagcaggttgtggtgcctgctttcggataagatgcaagaacccaactctatgtagcaaagaaggtaccaaagtggtattgactgatcttaatcacaacaatcaaactgattt

SEQ ID NO: 625 - DNA, 351 bp, Glycine max
  Clone ID: LIB3072-051-Q1-E1-B1
cgacagacggggacactctcttttctctctctacaaacaatatcaagacatcttcatctaattaaccattaatcaccaacaatattctcctgtgacttcaggggcagcggtgggtcagagcaacccaaacaaaccaccaccacctgttggttatcccacaaatgatcatgttccttcccaccaaaatgttccaatcaaaacctctattatgggtgatcgctttttccacggatcttgtgctggattgttctgttgctgttccctcgattgttttctcctattccctttattcctttcggcctatcccctctgtcctttgtcattttcctttacccacttaactttttttcc

SEQ ID NO: 626 - DNA, 360 bp, Glycine max
  Clone ID: LIB3072-051-Q1-E1-B10
gacagcaaaaacaattaataaagatgagtttgaagaacaacatggtggtgctaaaggtgtgtttgttgcttcttttccttgtgggggttacagctgcacgcatggaactgagcttcttcaaaagtgatcagtcatcaagttatgatgatgatgggtattcaaaaccatgctgtgatctctgcatgtgcacacgctcaatgcctcctcaatgcagctgtgaagatattaagctgaattcatgccactcagattgtaagagctgtatgtgcacacgctcacagccaggacagtgtcgttgtcttgacaccaacgacttctgctacaaaccttgcaaatcaagagatgactagaaaaactaat

SEQ ID NO: 627 - DNA, 434 bp, Glycine max
  unsure at all n locations
  Clone ID: LIB3072-050-Q1-K1-H10
gaactaagtagagaataaaatcaaatcaggagagcatgcatatgaacatgatgatgaagaaagtgtgtgggtttgcaatagtgatggtggcagtgcagcttctggtggaggtgagtcccaaggcagangctgtgacttgtacccctgtggagctgagtccttgtttggnggcaataacttcctctcaaccaccatcaacaatttgttgccagaaggtgagggaacaaaggcaatgcctctgtggttacctcaaaaacccaagtctaaggccatatgccaattctcctggctccagaagggttgctagctcttatggggttccctttccaacttngtaattaccttcatatcatatcatatatagtatgtaataaacccttgtggctggaaaatatatatatatatatataagaatgatatcagtcagtattgca

SEQ ID NO: 628 - DNA, 402 bp, Glycine max
  Clone ID: LIB3072-051-Q1-E1-B2
gacagcaaaaacaattaataaagatgagtttgaagaacaacatggtggtgctaaaggtgtgtttgttgcttcttttccttgtgggggttacagctgcacgcatggaactgagcttcttcaaaagtgatcagtcatcaagttatgatgatgatgagtattcaaaaccatgctgtgatctctgcatgtgcacacgctcaatgcctcctcaatgcagctgtgaagatattaggctgaattcatgccactcagattgtaagagctgtatgtgcacacgctcacagccaggacagtgtcgttgtcttgacaccaacgacttctgctacaaaccttgcaagtccagagatgactagaaaaactaatagctctctcaaatggacgaagcccctttaagctttgtttgtt

SEQ ID NO: 629 - DNA, 409 bp, Glycine max
  Clone ID: LIB3072-051-Q1-E1-B3
gtaggcgcgagaagacacagaaggtacgctgcacaagacacagaagggaagcaaaacaattaataaagatgatttgaaaacacatgtggtgcaaaggtgtgttgttgctctttacttgtgggggttaagctgcacgcatggaactgagcttctcaaaagtggtcagtcatcaagttatgatgatgatgagtattcaaaaccatgctgtgatctctgcatgtgcacacgctcaatgcctcctcaatgcagctgtgaagatattaggcagaattcatgccactcagattgtaacagctgtatgtgcacacgctcacagccaggacagtttctttgtcttgacaccaaccacttctgctacaaaccttgcaagtccagagattactagaaaaactaatacctctctcaaatg

SEQ ID NO: 630 - DNA, 384 bp, Glycine max
  unsure at all n locations
  Clone ID: LIB3072-051-Q1-E1-B4
gactctcatcacattattctatatcaattttggttaagagtcttgaaaaagcaagagaaaaaaggataggaggcatggcaaccatttctgatcaacctagagggtcctactcctatggaacctcatatggagcaccctatggaaccacgtatgagaccaacaccagcattaacaacccaccttcacgccaaacagtgaagttcataactgctgccactattggcatcacactcttgctcctgtctgggttgaccctcacaggcactgtcataagttttatcattgcaaggcctcgtcttgttacctttagccccatccttgtcnctgctgcgtttgtgctgttcctagttgcttctggctttttgttcctctgggggctgtggt

SEQ ID NO: 631 - DNA, 381 bp, Glycine max
  Clone ID: LIB3072-051-Q1-E1-B5
acgcgtccggatgaaagaagacgacagaaggggacagcaaaaacaattaataaagatgagtttgaagaacaacatggtggtgctaaaggtgtgtttgttgcttcttttccttgtgggggttagagctgcacgcatggaactgagcttcttcaaaagtgatcagtcatcaagttatgatgatgatgagtattcaaaaccatgctgtgatctctgcatgtgcacacgctcaatgcctcctcaatgcagctgtgaagatattaggctgaattcatgccactcagattgtaagagctgtatgtgcacacgctcacagccaggacagtgtcgttgtcttgaacacaacgacttctgctacaaacctttcaagtccagagatgacta

SEQ ID NO: 632 - DNA, 381 bp, Glycine max
  Clone ID: LIB3072-050-Q1-K1-E3
ggaggaagtgatgcctcaggaacaatgggtggggcatgtggatatggaaacctctacagccaaggttatggaacaaatactgctgctttgagcactgctttgttcaacaatggtcttagttgtggctcatgctatgagataaggtgtgtgaatgaccataggtggtgcctccctggctccattatggtcactgccaccaatttctgtcctccaaacaatgctttaccaaacaatgcaagagggtggtgcaacccttcaatgcaccattttgacctctctcaacctgttttccttcgcattgcacaatacagagcaggaattgtgcctgttttctacagaagggtaccctgcaagagaaggggaggcataaggttcacaatc

SEQ ID NO: 633 - DNA, 178 bp, Glycine max
  Clone ID: LIB3072-050-Q1-K1-E4
ttgttggacacaactaacttataaagtgttacgggtccctcttataatgatgagcgccatcttttttgctctttatcttaaatgtaccttcactcatcatattcctacctttcatcctattcttatttcttgctctataattaatgtaacctttatgaaaattccttcacttattatt

SEQ ID NO: 634 - DNA, 268 bp, Glycine max
  Clone ID: LIB3072-050-Q1-K1-E7
gatttctaaaacaattaataaagatgagtttgaggaacaacatggtggtgctaaaggtgtgtttgttgcttcttttccttgtgggggttacagctgcacgcatggaactgtgcttcttcaaaagtgatcagttcatcaagttatgatgatgatgagtattcataaccatgctgtgatctctgcatgtgcacacgctcaatgccttctcaatgcatttttgaatatattatgccgaattcattccactcatattgtttgatcttgtatg

SEQ ID NO: 635 - DNA, 406 bp, Glycine max
  Clone ID: LIB3072-050-Q1-K1-E8
gatttacacaactaactaagaaagtcttccatagctccccaaaaatgaagagcaccatcttctttgctctctttctcttttgtgccttcaccacctcatacctaccttcagccatcgctgatttcgtgctcgataatgaaggtaaccctcttgaaaatggtggcacatattatatcttgtcagacataacagcatttggtggaataagagcagccccaacgggaaatgaaagatgccctctcactgtggtgcaatctcgcaatgagctcgacaaagggattggaacaatcatctcgtccccatatcgaatccgttttatcgccgaaggccatcctttgagccttaagttcgattcatttgcagttataatgctttgtgttggaattcctaccgagtggtctgttgt

SEQ ID NO: 636 - DNA, 211 bp, Glycine max
  Clone ID: LIB3072-050-Q1-K1-E9
ggtggatgtgcaaatggtttatgcagccttgtatcttcatggtgagtaacatttaaaaaaaaaaaatgtataattacctttctcatccttataatcgaaagaatcttccttcatagtttaagacattttattatgattcatataattgtaattttcttatcctttcaaaaaaaaaaaatgactataaatgcaaaaagcggccactcgaatt

SEQ ID NO: 637 - DNA, 191 bp, Glycine max
  Clone ID: LIB3072-050-Q1-K1-F10
cagacttgagtatgtgaaaaaagagaggatttttgtgaggaagagaagggagaatgaatttgaaagagaaaaaaaaaagagcatagacacgtacccttgaagtatgtctctgattatatttagggtgagcctattgctattctattttcctttattttattattttataaaaagaactctattttacttcg

SEQ ID NO: 638 - DNA, 283 bp, Glycine max
  unsure at all n locations
  Clone ID: LIB3072-050-Q1-K1-F12
ccttggggtttgacctaaccatttcatttcaatctgcctcgagcgtggataggaaaacatttgggtgtttgttcttgctcctccttgtcttagcttctgatgtgactgtgaagagagcagatgcgaaagattgcttgacaaggaggcacgggttcctgngtagatgcttattcgacaggcaatgtgcacatgtgtgcangagcgatggtttcaatcgtggtcagtgccgaggccctcttcgcaaaatgctttgcagcangccatgtngatcgaaattactact

SEQ ID NO: 639 - DNA, 390 bp, Glycine max
  Clone ID: LIB3072-050-Q1-K1-F3
tactataaatgttacaggcttacttctccaaatcctaggatgtacattggctctggcaaggtttctgaaattaagagtgcaattcatgcattgggcgttgaaactgttatctttgatgatgagctgtcagctgggtagggccctttttcctttgttttaacatttatgtcatccatatgtgtgcttcatgcttcatgttaagactaatttttgtctgtgccaccatttattagtgaattaagggttagatgggtgggtattgagagtatgatgtatttatgttggagaatatcaatttgcaagctgttggaatggaaaggtattaagcagtcaattggtccgtttggggttgtgagtttacctgcagcatttggattttgggattgatta

SEQ ID NO: 640 - DNA, 152 bp, Glycine max
  Clone ID: LIB3072-050-Q1-K1-F5
gacttatagagagattgatgaagaaatcagcatgtgttcaatagcatctgggtttgtgctgactcttaatgttgcatcttccaccacaaactcactggttgtcttgttcaacacaaataacaactcttatatacttctcgtgagggcttcat

SEQ ID NO: 641 - DNA, 149 bp, Glycine max
  Clone ID: LIB3072-050-Q1-K1-F6
caacagcaaaaacaatgaatagggatcaatttgaaggaccacatggtggtgctaaaggtgtgattgttgctccttttccatgttgtacttacagatatacacatggtactgagcgttctaaaaagtgatcagtcatcaagttattatta

SEQ ID NO: 642 - DNA, 378 bp, Glycine max
  Clone ID: LIB3072-050-Q1-K1-F9
gacagcaaaaacaattaataaagatgagtttgaagaacaacatggtggtgctaaaggtgtgtttgttgcttcttttccttgtgggggttacagctgcacgcatggaactgagcttcttcaaaagtgatcagtcatcaagttatgatgatgatgagtattcaaaaccatgctgtgatctctgcatgtgcacacgctcaatgcctcctcaatgcagctgtgaagatattaggctgaattcatgccactcagattgtaagagctgtatgtgcacacgctcacagccaggacagtgtcgttgtcttgacaccaacgacttctgctacaaaccttgcaagtccagagatgactagaaaaactaatagctctctcaaatggacg

SEQ ID NO: 643 - DNA, 380 bp, Glycine max
  unsure at all n locations
  Clone ID: LIB3072-050-Q1-K1-G11
gacagcataatcaattaataaagattgagttgagaacaacatgggtggtgctaaaggtgtggtntgtggcttcctttnccttgtgggggttacagctgcacgcattggaactgagcttcttcaaaagtgatcagtcatcaagttatgatgatgatgagtattcataaccatgctgtgatctctgcatgtgcacacgctcaatggcctnctcaatgcatctgtgaagatattaggctgaattcatgccactcagattgtaagagctgtatgtgcacacgctcacagccaggacaagtgtcgtgtcttgacaccaacgacttctgctacaaaccttgcaagtccagagatgactagaaaaactaataactctctcaaatgga

SEQ ID NO: 644 - DNA, 344 bp, Glycine max
  Clone ID: LIB3072-050-Q1-K1-E2
gacagcaaaaacaattaataaagatgagtttgaagaacaacatggtggtgctaaaggtgtgtttgttgcttcttttccttgtgggggttacagctgcacgcatggaactgagcttcttcaaaagtgatcagtcatcaagttatgatgatgatgagtattcaaaaccatgctgtgatctctgcatgtgcacacgctcaatgcctcctcaatgcagctgtgaagatattatgctgaattcatgccactcagattgtaagagctgtatgtgcacacgctcacagtcaggacagtgtcgttgtcttgacaccaacgacttctgctacaaccttgcaagttcagaaatg

SEQ ID NO: 645 - DNA, 362 bp, Glycine max
  Clone ID: LIB3072-050-Q1-K1-G4
taatacgacagaatttgtcagcatatacaatttatataggggagtgtgaagaacaacatggtggtgctaaatgtgtttttgttgctttttttccttttttgagttacatctttcactcatgtaactgatcttctttaaaatttatcattctttaatttattattattatttttatttaaaactatgttgatattttttctatttcttatccttaatgtctccttaattcttttgtttatttttaaagcttatttaatcctcttcttatttttatatcctttatttttcatatttttatatttattactttaattttatttttatatctaataaatttttttttccatatttttttattatct

SEQ ID NO: 646 - DNA, 227 bp, Glycine max
  Clone ID: LIB3072-050-Q1-K1-G6
tctaatacgatttattgttacagcaaaaacaattaataaaggtgagtgtttatatcaacatgggggtgctaaatgtgtgttagttgcttcttttcctttctgttgttacatcttcacgcatggaactgatctttttcaaaagttatcagtcatcaatttatgatgattattagtattccaaaccattctttgatctcttcatttgcacactctcaatgccttcttaa

SEQ ID NO: 647 - DNA, 353 bp, Glycine max
  Clone ID: LIB3072-050-Q1-K1-C3
gattcattcaactaaaagcaagaacaattacttgagtggtttctcttgtcacataaaagtcatctaagaagaattacaagatcatcatcacaataacaagatgagttcaggaattagagcatggagtgtggcagcaagtgttggaattgtggaggccttgaaagaccaaggcatatgcaggtggaatcatgccttaagatcagctcaacaccatctcaaaaaccatgttggctcattctctcaggctaacaagctttcctcttctgctatgatatccacaacactaaaacatgagaaggcaaatcaatcataagagtctttgagaactgtcatgtacttaagcctgctgggtt

SEQ ID NO: 648 - DNA, 300 bp, Glycine max
  Clone ID: LIB3072-050-Q1-K1-C5
ggttgctgcagcagagaagcactcatcattcttggtttgtctaagatccgccttcgctgaattgtaaaaatgtcgctcggagaaactgcttgttcatacgcagctctcatccttcatgaagatggaatcagtgtaactgccgacaagatcagcaccttgttggaaactgcaaaggttcaagtagatacctattggccaaccttatttgctaaacttgctgagaagaaaaatcttggcgatttgatagccaatgcagcatgcggtggtgcaccaagtgctgttgcagctgcccctgttgct

SEQ ID NO: 649 - DNA, 330 bp, Glycine max
  Clone ID: LIB3072-050-Q1-K1-C7
gacaactcaaacattctctccattggtccgtagagactcatcagtcatcaccatggccaagctagttttttccctttgttttctgcttttcagtggctgctgcttcgctttcagttccagagagcagcctcagcaaaacgagtgccagatccaaaaactcaatgccctcaaaccggataaccgtatagagtcagaaggagggctcattgagacatggaaccctaacaacatgccattccagtgtgccggtgttgccctctctcgctgcaccctcaaccgcaacgcccttcgtagacctttctacaccaacggtccccaggaaatctacat

SEQ ID NO: 650 - DNA, 252 bp, Glycine max
  Clone ID: LIB3072-050-Q1-K1-C8
cacacgcgtgagcacacgcgtccggaagacttcagaaagacgttgataaactaagcatggggggctactatggagtgaactagtagtatcagtgattacataagtgcgggtgtaatacatagtaggataagtatcaaagttatggatactatagactatagttaatgaagcttctatgatattaattgggcctatgataacttattaaccattatagactctgaatgataagcatcatcacctgtaaattat

SEQ ID NO: 651 - DNA, 416 bp, Glycine max
  Clone ID: LIB3072-050-Q1-K1-D10
gacagcaaaaacaattaataaagatgagtttgaagaacaacatggtggtgctaaaggtgtgtttgttgcttcttttccttgtgggggttacagctgcacgcatggaactgagcttcttcaaaagtgatcagtcatcaagttatgatgatgatgagtattcaaaaccatgctgtgatctctgcatgtgcacacgctcaatgccttctcaatgcagctgtgaagatattaggctgaattcatgccactcagattgtaagagctgtatgtgcacacgctcacagccaggacagtgtcgttgtcttgacaccaacgacttctgctacaaaccttgcaagtccagagatgactagaaaaactaatagctctctcaaatggacgaagcccctttagggctttgttgtatgttaggggagaca

SEQ ID NO: 652 - DNA, 459 bp, Glycine max
  unsure at all n locations
  Clone ID: LIB3072-050-Q1-K1-D12
ggcagccaatgaaaagaaaatcctcaattttctgagcagccaagcgactctctctctgtctctcgaaaattctcagtttgcagagaaaatctgaatcatgtcgtggcaagcgtatgtcgacgatcaccttctgtgtgacatcgaaggtaaccacctcactcacgctgctatcatcggccaagacggcagcgtttgggctcagagtaccgacttccctcagttcaaacctgaggagataactgccatcatgaatgactntaatgagcctggatcacttgctccaactggattgtatctcggtggcaccaaatatatggtcatccagggtgaacccggtgctgtcattcgagggaagaagggtcctggtggtgttactgtgaagaggactcgtgcggccttgatcattggcatttatgatgaaccaatgactncaggtcaatgcaacatggtagttgaaag

SEQ ID NO: 653 - DNA, 244 bp, Glycine max
  Clone ID: LIB3072-050-Q1-K1-D3
ggtataaacgccggatcagaaaaaaaaagtgatggagatgggaagaaagggcgtaaattggagaatgataatttttctgtagctaattctaattctaatgctaatgttaaccatagtggtgataagagtagtgtgaataataatattgggaaagagaatgagagttccaatgttggggcttttgatgtaaataggcttcagaagcttaaaggaaaaattaaattatttttaaaataaataaaag

SEQ ID NO: 654 - DNA, 152 bp, Glycine max
  Clone ID: LIB3072-050-Q1-K1-D4
cccactcgttcgtactgtatactacagaatgttacttctgctagaagactacagatggtgggatcggtttcaattaataaagatgagggtgaagaacaacatggtggtgctaaaggtgttgtttgatgcttcttttacttgtgtgtggttac

SEQ ID NO: 655 - DNA, 199 bp, Glycine max
  Clone ID: LIB3072-050-Q1-K1-D5
ataaaaaaaaaaaaaattagagaaggtttaaatcgcactctcgtctaggatacacacttacatacactctcatacgacatcttatctctcttatattgacacatctattcaatacacacttcctctcttttcacaattttgactctgaaaacacctttcgtttcacaattctatatcctttcatctcatatcccttttt

SEQ ID NO: 656 - DNA, 260 bp, Glycine max
  Clone ID: LIB3072-050-Q1-K1-D6
gataccatggcgtctaactctgcgtccctcttacttgctggatgcctatcgcccatcacttgcttcttctgcgtttcgtgctcaagctcaatctcatgctccagctccactttaagtactgtgaaaagaatgctactaatcttgaaagtagtgtagtggtaatattgctgccccttggtagaggagtgccaatacctttaagatccctcttatactcctgaccaatatcaagctgggactctttatataaaattttaatg

SEQ ID NO: 657 - DNA, 238 bp, Glycine max
  Clone ID: LIB3072-050-Q1-K1-D7
cccacgcgtgcgtacacgcgtgcgggcatttgtcagctcactcattaaggctgctgttaggggacaacataagggggggctaggtacattagttaatagagatgatgatgggtatcaacatcatcatgatggagctaaatgtgtgtatggtgctatctttcatttgttgaaggtactactagtgccttcttacatatgattaattttcagcagttcatgaattgtgatgattaataac

SEQ ID NO: 658 - DNA, 342 bp, Glycine max
  Clone ID: LIB3072-050-Q1-K1-D9
tcgacctacgacgtacgcacagtcgccagaagactactgaacgctactgcactgacaattaatacagatgcggttgaaggacatcatggtgcagctacaggtgtgacggacagcttcagatgcttatctggttcactactgcgctcatacaactgagctactctataagttatcagtcacggagacatcatgataacttacattcgtcaccatgctgctatctcttgctgtgatctctctcgatacttgttaaatgcgaccactgctatatctgatcacactgctgcgcctcagaatgtaagatctgcatgtgcacactctcattgccaggtcaatgcccct

SEQ ID NO: 659 - DNA, 318 bp, Glycine max
  Clone ID: LIB3072-050-Q1-K1-E1
gagtgaaggtgctgaatcgaatcgaatctccgaagatggccgcgagcgatcgcacagtgttgcaattctcttcatcatcttcttcttcgcagagcttgtccgcgaaggtccaccctctggtcatcttcaacatctgcgattgctacgttcgacgccctgaccaagccgatcgcgtcatcggaaccctactcggctccgtccttcccgatggaaccgtcgatatccgcaattcctatgctgttccttacaacgaatctatcgaacaggttgcgttggatatagagtaccaccacaatatgttaatatcccaccaaaaag

SEQ ID NO: 660 - DNA, 469 bp, Glycine max
  unsure at all n locations
  Clone ID: LIB3072-050-Q1-K1-E10
gcaaggcacagggacagcagcagcagcagataagatagagtgcggtgaacaacgatgtcgaatttgcagttacagattcactctccttcaccatcactcttatcatattcatcatcatcactatcctcttcttctcttaagctattcccaaaccaccctttctactcaaagtcccttcctttcaacactcctaaacccttctccctcagatgccgtcactctgacctcttcgatcagaacaccttagcctctacaccacgaccaacgagaccctctgcttcagctggagctatgccgcctagggtttatgtcggttactccatttacaaagggaaggctgcgcttacatcgactactacgcccnccgcattcatgccactcgattcggcggcatacataatatctaaggaaggttatgtgctgcttcagtttgcaccggcagttggtacgcgccaatatgattggaata

SEQ ID NO: 661 - DNA, 411 bp, Glycine max
  Clone ID: LIB3072-050-Q1-K1-E11
gacagcaaaaacaattgataaagatgagtttgaagaacaacatggtggtgctaaaggtgtgtttgttgcttcttttccttgtgggggttacagctgcacgcatggaactgagcttcttcaaaagtgatcagtcatcaagttatgatgatgatgagtattcaaaaccatgctgtgatctctgcatgtgcacacgctcaatgcctcctcaatgcagctgtgaagatattaggctgaattcatgccactcagattgtaagagctgtatgtgcacacgctcacagccaggacagtgtcgttgtcttgacaccaacgacttctgctacaaaccttgcaagtgcagagatgcctagaaaaactaatagctctctcaaatggacgaagcccctttaggctttgtttgttatgttaggg

SEQ ID NO: 662 - DNA, 414 bp, Glycine max
  Clone ID: LIB3072-050-Q1-K1-E12
cggggatctatcacaatagagagcaacgctatgtaggatcatttcccatatcaagaaaatgaagatccctttttattttcccatcctcgtgcttgtcgtcttcattgcttctggaaaacaagtgcaaatgacagtggtaccaaattgtgtggtagaaagcttgtcagttcattgtgaaatattcaagaatccttgcgaacttctttgccaacaacattttggatcacccgcagcacatggagcttgaggcattaagttccatgtatgtgttcgttatatatgttaaatataaagtctaaccatatcaatcacagctttcatacctatctaatagtatgtaagccgctgtagaaaatatatatatacataacatgacttcattattagaccaatgataggagagacaaataaaac

SEQ ID NO: 663 - DNA, 396 bp, Glycine max
  Clone ID: LIB3072-050-Q1-K1-C12
ggttctagtgtgtgattgtttgttgttgtaactcgttcttcttgttttgttgttctgtgtttgtgtgggttttttctctcacctgaaaatgtcttgctgcggtggtaactgtggttgcggaagctcctgcaagtgcggcaacggctgcggaggctgcaagatgtacccagacttgagctacactgagtcaaccaccaccgagaccttggtcatgggagtggcacctgttaaggctcaatttgagggtgctgaaatgggtgtgcccgctgagaacgatggctgcaaatgtggaccaaactgctcctgcaacccctgcacttgcaagtgaggtgttgggagagcaagcttcaagcagagatagcccttattaggaataatgataaactattaatgtgt

SEQ ID NO: 664 - DNA, 400 bp, Glycine max
  Clone ID: LIB3072-050-Q1-K1-A8
gctacacagagttagaattaaattagattataagtaaacgtagagttgactgaaagatacgaatggaaccgaacaagtgaaggattgcacaacacatagagatcggatgacaaaacattctcactacgaacaaaatgattgttaacagcaaatctacgcaatcaccgatgatcgtcaaaatcgatccttacatcgtattcatgacgactcatgctacaccgataccattcgacgatcacgacgtcatcaccaagatcgcaactcagccgactcagattcgcaaagcctgtactatcttcaaacgctgttgcgaccatcgcgattccggactcggcttcttaagaaatgccagtaccaacgtgcaaatcgtacacttaagtctggatgatcatttggcacg

SEQ ID NO: 665 - DNA, 518 bp, Glycine max
  unsure at all n locations
  Clone ID: LIB3072-050-Q1-K1-A9
gatagtaagagtttgtaatattattgtattgtagtagtagccagtggggactttcaatcactatgtgattgttaagttcaaggatggcgtggctgttgatgaacttattcaagggttggagaagatggtctcggggattgaccatgtcaagtccttcgaatggggaaaggacattgaaagtcatgatatgctaagacaaggtttcactcatgttttcttgatggcattcaatgggaaggaggagttcaacgcatttcagactcacccaaatcaccttgagtttactggagtattttcacctgctattgagaagattgtggtgctggacttcccatctaaccttgtgaaagcaccagcaagatcctcaacttattcaagcaaataaaattttccattnttaaagtgcatgcatgtgtgtgcatctgctatttgtagtctggtatggttgttcctagctagtttctaaaagctcttatgcaatttcaacttgataaataagctcttttttttcctaaata

SEQ ID NO: 666 - DNA, 406 bp, Glycine max
  Clone ID: LIB3072-050-Q1-K1-B1
gacattcacagagcacaatcaagtgcatagagacaaagacaagaagatgggagaagaagaaggttgcgaatgcaggccactgggtttcttgctcggattgccctttgctcttttggctttgattttatctcttgtgggtgcagttatctgggtgcttggatctatattgagttgcttgtgcccatgttgcatttactgcgctggattggctaatttggcagtgagtcttgtaaagcttccagtaaaagttcttagatggttcactcgtcaaattccttgctagagcataatctttcccctttttgattcttttgtagcaatacttgggtccttgtattgcctctttttttatctttgttgggattgcctattgtttgattaatggatttgttacgatcattaagcg

SEQ ID NO: 667 - DNA, 369 bp, Glycine max
  unsure at all n locations
  Clone ID: LIB3072-050-Q1-K1-B10
cggtgtgtgtgaagaagcagagggagcagcggcgtggagcatgcagatcttcgtgagaactctgacagggaagactataaccctggacgcctagagcagcgacaccatcgacaatgtcaaggccaagattcaagacaaggaaggcattcctacggatcaccagcatntgagtattcgcacgaaagcaactggaagatggaaggaccctggccgattacaacatgcataaagaatcaacccttcatctgagcctcatgctctcaggcggcatcattgaaccttgcctcatggctgtggctcgcaaatacaaccaggacacgatgatgtgccgcaagtgctatgcccgcctgcatcctatggctgtgaact

SEQ ID NO: 668 - DNA, 355 bp, Glycine max
  unsure at all n locations
  Clone ID: LIB3072-050-Q1-K1-B11
gacagcataaacaattaataaagatgagnttgaagaacaacatggtggtgctaaaggtgtgttcgttgcttcttttccttgtgggggtacagctgcacgcatggactgacttttaaaagtgacagcataatatatatatagttcaaaatctggacttgattcacacctaagctctaagcctgaaatttagctgatcatgcatcaatgagactgattcaacctaaccgacaggtcgtgctgacacacatttgtcaactgagtcaaatgctgaactatgctttaatgcaacccttagctgtgtatgaggaacataacagataaactatgcatattgttacaattgcatttatatcta

SEQ ID NO: 669 - DNA, 462 bp, Glycine max
  Clone ID: LIB3072-050-Q1-K1-B12
gattcacacaactaactatgaaagtcttccatagccccccaaaggtgaagagcaccatcttctgtgctctctttctcttttatgccttcaccacctcatacctaccttcagccatcgctgatttcgtgctcgataatgaaggtaaccctcttgaaaatggtggcacatattatatcttgtcagacataacagcatttggtggaataagagcagccccaacgggtaatgaaagatgccctctcactgtggtgcaatctcgcaatgagctcgacaaagggattggaacaatcatctcgtccccatatcgaatccgctttatcgccgaaggccatcctttgagccttaagttcgattcatttgcagttataatgctgtgtgttggaattcctaccgagtggtctgctgtggaggatctaccagaaggacctgcttgtaaaatggtgagaacaaagatgcaatgga

SEQ ID NO: 670 - DNA, 424 bp, Glycine max
  Clone ID: LIB3072-050-Q1-K1-B2
ggcggcgcacagcagaactctgcttcttcggattccgatcgcacgcgccgtcaccatggtgaacgttccgaaaacaaagaagacatactgcaagagtaaggagtgcaggaagcacacgctgcacaaggttacccaatacaagaagggtaaggatagcattgctgcccaaggaaaacgccgttatgatcgcaaacaatccggttattgcggacaaactaagcccgtctttcacaagaaggcttaaaccaccaagaagattgttctgaggttgcaatgccagggttgcaagcatgtcttccaacacgctattaagaagtgcaagcactttgagattggtggtgacaagaaaggcaagggaacatcactcttctagtttgagaattaggatttagagctttatgtttcagcaatgttggaatgtttt

SEQ ID NO: 671 - DNA, 305 bp, Glycine max
  Clone ID: LIB3072-050-Q1-K1-B3
gacagcaaaaacaattaataaagatgagtttgaagagacaacatggtggtgctaaaggtgtgtttgttgcttcttttccttgtgggggttacagctgcacgcatggaactgagcttcttcaaaagtgatcagtcatcaagttatgatgatgatgagtattcaaaaccatgttgtgatctctgcatgtgcacacgctcaatgcctactcaatgcaactgtgaagatattaggctgaattcatgccactcagattgtaagagctgtatgtgcacacgctcacagccaggacagttgtcttgtcttga

SEQ ID NO: 672 - DNA, 375 bp, Glycine max
  Clone ID: LIB3072-050-Q1-K1-B5
cccacgcgtccgcgactgaaggggacaacttaaacattctctccattggtccttggacacggatcagtcatcaccatggccaagctagttttttccctttgttttctgcttttcagtggctgctgcttcgctttcagttccagagagcagcctcagcaaaacgagtgccagatccaaaaactcaatgccctcaaaccggataaccgtatagagtcataaggagggctcattgagacatggaaccctaacaacaagccatttcagtgtgccggtgttgccctctctcgctgctccctcaaccgtatacgcccttcgttgaccttcctacaccaactgtccccaggaaatttacattcaacatggtaagggtatttt

SEQ ID NO: 673 - DNA, 356 bp, Glycine max
  Clone ID: LIB3072-050-Q1-K1-B6
gacacaactaactaagaaagtcttccatagcccggcaaaaatgaagagcaccatcttctttgctctctttctcttttgtgccttcaccacctcatacctaccttcagccatcgctgatttcgtgctcgataatgaaggtaaccctcttgaaaatggtggcacatattatatcttgtcagacataacaacatttggtggaataagagcagccccaacgggaaatgaaagatgccctcttactgtggtgcaatctcgcaatgagctcgacaaagggattggaacaatcatcttgtccccatattcaatatcgtttatcgcccaatgccattctttgagccttaaattcgattcatttt

SEQ ID NO: 674 - DNA, 383 bp, Glycine max
  Clone ID: LIB3072-050-Q1-K1-B7
gatgcaactgaataattaggaaaagccatttccagtagcagcctaagaaaatgaagagcactagcttgttcgctatctttctactttgcgccttcacctcatacctaccttccgccaccgcccaggacgtgctcgacgtggatggcgatccgattcggaacggtttcatatactacgttttgccggcaataagaggaaacggtggcggaatagaacgagccgcactcgggaaagacacttgccctatcactgtagtgcaatctcccaatccaaactctaaggggttagaaattaagtttgaatctgcataccccgcctattacataaacgaaaccctaattttgcaaataaagttcagttacccacagcagtgtgaaagaaag

SEQ ID NO: 675 - DNA, 417 bp, Glycine max
  Clone ID: LIB3072-050-Q1-K1-B9
gacagcaaaaacaattaataaagaagagtttgaagaacaacatggtggtgctaaaggtgtgtttgttgcttcttttccttgtgggggttaccgctgcacgcatggaactgagcttcttcaaaagtgatcagtcatcaagttatgatgatgatgagtattcaaaaccatgctgtgatctctgcatgtgcacacgctcaatgcctcctcaatgcagctgtgaagatattaggctgaattcatgccactcagattgtaagagctgtatgtgcacacgctcacagccaggacagtgtcgttgtcttgacaccaacgacttctgctacaaaccttgcaagtccagagatgactagaaaaactaatagctctctcaaatggacgaagcccctttaggctttgtttgttatgttaggggagaca

SEQ ID NO: 676 - DNA, 424 bp, Glycine max
  Clone ID: LIB3072-050-Q1-K1-C10
gatcaagaaccagttcaatatcctagtacaccgtattaaagaatggaagatatactatgatgagagcgcggttcccattactgttgctgggagttgttttcctggcatcagtttctgtctcatttggcattgcgtattgggaaaagcagaaccccagtcacaacaagtgcctccgaagttgcaatagcgagaaagactcctacaggaaccaagcatgccacgctcgttgcaacctccttaaggtggaggaagaagaagaatgcgaagaaggtcaaattccacgaccacgaccacaacacccggagagggaacgtcagcaacacggtgagaaggaggaagacgaatgtgagcagccacgttcattcccattcccacgcccacgccaacctcatcaagaggaagagcacgagcagaatgaggaaca

SEQ ID NO: 677 - DNA, 415 bp, Glycine max
  unsure at all n locations
  Clone ID: LIB3072-050-Q1-K1-C11
gacagcaaatacaattaataaagatgagtttgaagaacaacatggtggtgctaaaggtgtgtttgttgcttcttttccttgtgggggttacagctgcacgcatggaactgagcttcttcaaaagtgatcagtcatcaagttatgatgatgatgagtattcaaaaccatgctgtgatctctgcatgtgcacacgctcaatgcctgctcaatgcagctgtgaagatattaggctgaattcatgccactcagattgtaagagctgtatgtgcacacgctcacagccaggacagtgtcgttgtcttgacaccaacgacttctgctacaaaccttgcaagtccagagatgactagaaaaactaatagctctctcaaatggacgaagccnctttaggctttggttgttatgttaggggaga

SEQ ID NO: 678 - DNA, 406 bp, Glycine max
  Clone ID: LIB3072-050-Q1-K1-A7
gattcacacaactaactaagaaagtcttccatagccccccaaaaatgaagagcaccatcttctttgctctctttctcttttgtgccttcaccacctcatacctaccttcagccatcgctgatttcgtgctcgataatgaaggtaaccctcttgaaaatggtggcacatattatatcttgtcagacataacagcatttggtggaataagagcagccccaacgggaaatgaaagatgccctctcactgtggtgcaatctcgcaatgagctcgacaaagggattggaacaatcatctcgtccccatatcgaatccgttttatcgccgaaggccatcctttgagccttaagttcgaatcatttgcagttataatgctgtgtgttggaattcctaccgagtggtctgttgt

SEQ ID NO: 679 - DNA, 222 bp, Glycine max
  Clone ID: LIB3072-049-Q1-K1-G5
caacacaacgggctgggataccaggggcgctaagacaagatgagacgcagtgggctgatgctcatgaagggtgcatacccagcacctgttccaatgtacaagacctaacaaacaacacgacattcgatcagcattgcacaaacaccacaaccttaattctggcaccataaccctaactttaaaagctggagctttcgatgattcaatcttacgtactcatgg

SEQ ID NO: 680 - DNA, 404 bp, Glycine max
  unsure at all n locations
  Clone ID: LIB3072-049-Q1-K1-H1
gatagcagcatcatacaaagcattgaattcaaaaactaagttcatttcttgtgctttgttttattcctcaaaaccaaacatgtcgaacacatgcggcaactgtgactgcgctgacaagactaactgcaccaagggaaacagctatggtgttatagtagagactgagaagagctacatcgagactgttgacatggatgttccagcagctgagcatgatgggaagtgcaagtgtggcactaactgcacttgcacggactgcacttgtggccattaaagaatatgtatgaaaatgtaattgccatgtgttttgcaatacaaatctccaaataatgtaatcctcgtatgaataaatgtgtgcttgtatcctacttcanggtctgtgtagtcatgcaatctgaatcatg

SEQ ID NO: 681 - DNA, 409 bp, Glycine max
  Clone ID: LIB3072-049-Q1-K1-H2
gattcacacaactaactaagaaagtcttccatagccccccaaaaatgaagagcaccatcttctttgctctctttctcttttgtgccttcaccacctcatacctaccttcagccatcgctgatttcgtgctcgataatgaaggtaaccctcttgaaaatggtggcacatattatatcttgtcagacataacagcatttggtggaataagagcagccccaacgggaaatgaaagatgctctctcactgtggtgcaatctcgcaatgagctcgacaaagggattggaacaatcatctcgtccccatatcgaatccgttttatcgccgaaggccatcctttgagccttaagttcgattcatttgcagttataatgctgtgtgttggaatttctaccgagtggtctgttgtgga

SEQ ID NO: 682 - DNA, 358 bp, Glycine max
  Clone ID: LIB3072-049-Q1-K1-H3
gacacttactagtagtaagcatggagtcctcaaagatctatgcttacctcttcctctgcatgatctttctctcttccgccactcccattctcggttgtggttactgtggcaaaccccccaaaaagcacaagcctggtaaaacaccaaagacacccaaaacacccgttgttaagccaccagtcaccatccctcccattaatgttcctcccgttgatcttccaccaatcgtgaagcccccaagtattctccctccaattccaattattaacccaccaaccacaccattgaagggagggaacacttcatgcccaccaccaaagtcttctgctcatgctacttgccccattgtcactctaaa

SEQ ID NO: 683 - DNA, 363 bp, Glycine max
  Clone ID: LIB3072-049-Q1-K1-H4
gactctcatcacattattctatatcaattttggttaagagtcttgaaaaagcaagagaaaaaaaaataccaaccatggcaaccatttctgatcaacctagagggtcctactcctatggaacctcatatggagcaccctatggaaccacgtatgagaccaacaccagcattaacaacccaccttcacgccaaacagtgaagttcataactgctgccactattggcatcacactcttgctcctgtctgggttgaccctcacaggcactgtcataggtttgatcattgcaaccccttttcttgatatctttagccccatccttggtcctgctgcgtttgtgctgtttctagttgcttttggctttt

SEQ ID NO: 684 - DNA, 262 bp, Glycine max
  Clone ID: LIB3072-049-Q1-K1-H5
gcttgacaggttaaacaattaataaagatgagtttgaagaacaacatggtggtgctaaaggtgtgtttgttgcttctttttcttgtgggggttacagctgcacgcatggaactgagcttcttcaaaagtgatcagtcatcaagttatgatgatgatgagtattcaaaaccatgctgtgatctctgcatgtgcacactctcaatgccttcttaatgcatctgtgaagaatttatgctggattcatttccactcagattgtaag

SEQ ID NO: 685 - DNA, 406 bp, Glycine max
  Clone ID: LIB3072-049-Q1-K1-H7
ggaagcatttgagactaactcttagagagaaaaaaaatggctgatacaggtggaggagatgcagtgagaccagtggtaatatgtgataacaagtgtggctgcacacttccatgcactggtggttccacttgcaggtgcacaagtgctggcactgccacaggagggggtgatcacgtgacatgctcgtgcggagagcactgtggttgcaatccatgctcatgtcccaagattgcggctgctggaagtggttgcagatgtggcacagattgtgcatgtgccttctgccgcacttagtatcacaccttaaagcttaaacttcacgttttattttatgtcttcaaatttttgaatacgttttctatatattagtcttgtttaaagttaaagtgtggacgtgggttctact

SEQ ID NO: 686 - DNA, 376 bp, Glycine max
  Clone ID: LIB3072-050-Q1-K1-A1
gacagcaaaaacaattaataaagatgagtttgaagaacaacatggtggtgctaaaggtgtgtttgttgcttcttttccttgtgggggttacagctgcacgcatggaactgagcttcttcaaaagtgatcagtcatcaagttatgatgatgatgagtattcaaaaccatgctgtgatctctgcatgtgcacacgctcaatgcctcctcaatgcagctgtgaagatattaggctgaattcatgccactcagattgtaagagctgtatgtgcacacgctcacagccaggacagtgtcgttgtcttgacaccaacgacttctgctacaaaccttgcaagtccagagatgactagaaaaactaatagctctctcaaatgga

SEQ ID NO: 687 - DNA, 387 bp, Glycine max
  Clone ID: LIB3072-050-Q1-K1-A10
ggtctgcaacatttgtatctaccattggggtttcactgttcagtgtagcgtctcaagccatgtctccgggtcccgttattgacgcagccaccgaccccggcgccgaccaacaaattccctccgtcgacgacgcaatcctcaagaagaaagctcacccccaggaagatgacgctcccattgtcgaggacgtcaaggacgatgacaaagaggaaaccgaatactaggatgaggacgatgacgacgatgacaaggaagacgacgcccaaagtggtgctgatggtgggaagcagagcataagtgagaagaatagccgaaaagcaatgttgaagttgggactgaaacctgttactggcgttagtagggtcacaatcaagaggacacagaata

SEQ ID NO: 688 - DNA, 375 bp, Glycine max
  Clone ID: LIB3072-050-Q1-K1-A11
ggaggatcgttcacataaaacatcgacagagatcgacgaggaagggctaagcctaacaatgtggagctccaaaacgacattgatgtttggcgtcgcagccattgctctgatgatgtttctctcatctgcttcagcggacgacgtcgttgcactcacagaggaaaccttcgaaaacgaggttggcaaggatcgtgccgctctcgtcgagttttacgctccctggtgtggacactgtaaaaggcttgcaccggagtacgaacagctcggaacgacttttaagaaaacgaagtccgttttgattgccaaggtggattgtgatgaacagaaaagtgtttgtagtaaatatggggtatctggttactctaccattcaatg

SEQ ID NO: 689 - DNA, 432 bp, Glycine max
  unsure at all n locations
  Clone ID: LIB3072-050-Q1-K1-A12
ggaattgaagcatataaatgaatatgttttgctgattataaaaaaagagtccaagcaacaacatctcataaaaagttagagatggcttcttcaagttttttatgtctgtgtttgatgtttgcttttgttgtggcttgctttgctcgtggcattcccacagaccaaccacccgtgctctacggagacacacacaagaatccatctacttcaaacattgagcatcatcaatggtcgggagacaaagttacacacccaatttcaacccgtgtcaagttctcaagtttcacagagaattcagaaaggatactgacagaggtagattatgacggtccacatacacacccaaatccaccttctcatgctcagaagtttcgattgtaaacattgtcttctcaatgacaannaaataataaaatattatgtcacaattta

SEQ ID NO: 690 - DNA, 292 bp, Glycine max
  unsure at all n locations
  Clone ID: LIB3072-050-Q1-K1-A2
gacagcaaaaacaattaataaagatgagtttgaagaacaacatggtggtgctaaaggtgtgtttgttgcttcttttccttgtgggggttacagctgcacgcatggaactgagcttcttcaaaagtgatcagtcatcaagttatgatgatgatgagtattcaaaaccatgctgtgatctctgcatgtgcacacgctcaatgcctnctcaatgcagctgtgaagatattaagctgaattcatgccactcagattgtaagagctgtatgtgcacacgctcacagacaggacagtg

SEQ ID NO: 691 - DNA, 396 bp, Glycine max
  Clone ID: LIB3072-050-Q1-K1-A3
gctggagcaagggtgtcaaatgatgcctgttgtgttatgtatgttaaattgtaagtcactgttagcttagaaagtagggattctgccaggtcatttgttgtgagattaataatattcacgaatgagtctacgtcaacttaggtttattttttctttcatctgttctttcttcttttttgggcgattacgttcatggaaatcaggttcaggttcaggaattggaatgtatttgctgtataaaatggttaaattagctacatgttctttctttcttttttagctggttaactagcttacacggatttatgggacatgtacgaacttgtgcatcctgaatgaggcttcttcatgaatcaatacattttgtaacattccagtactcgaattattttgagt

SEQ ID NO: 692 - DNA, 290 bp, Glycine max
  Clone ID: LIB3072-050-Q1-K1-A4
gacagcaaaagcaattaataaagatgagtttgaagaacaacatggtggtgctaaaggtgtgtttgttgcttcttttccttgtgggggttacagctgcacgcatggaactgagcttcttcaaaagtgatcagtcatcaagttatgatgatgatgagtattcaaaaccatgctgtgatctctgcatgtgcacacgctcaatgcctactcaatgcagctgtgaagatattaggctgaattcatgccactcagatcgtaagagctgtatgtgcacacgcttacagccaggacag

SEQ ID NO: 693 - DNA, 374 bp, Glycine max
  Clone ID: LIB3072-050-Q1-K1-A5
ttgggacagcaaaaacaattaataaagatgagtttgaagaacaacatggtggtgctaaaggtgtgtttgttgcttcttttccttgtgggggttacagctgcacgcatggaactgagcttcttcaaaagtgatcagtcatcaagttatgatgatgatgagtattcaaaaccatgctgtgatctctgcatgtgcacacgctcaatgcctactcaatgcagctgtgaagatattaggctgaattcatgccactcagattgtaagagctgtatgtgcacacgctcacagtcaggacagtgtctttgtcttgacaccaacgacttctgctacaaaccttgcaagttcagagattgactagaaaaacttattactctctc

SEQ ID NO: 694 - DNA, 395 bp, Glycine max
  Clone ID: LIB3072-050-Q1-K1-A6
gattcacacaactaactgagagagtcttccatagccccccaaaaatgaagagcaccatcttctttgctctctttctcttttgtgccttcaccacctcatacctaccttcagccatcgctgatttcgtgctcgataatgaaggtaaccctcttgaaaatggtggcacatattatatcttgtcagacataacagcatttggtggaataagagcagccccaacgggaaatgaaagatgccctctcactgtggtgcaatctcgcaatgagctcgacaaagggattggaacaatcatctcgtccccatatcgaatccgttttatcgccgaaggccatcctttgagccttaagttcgattcatttgcaattataatgctgtgtgttggaattcctaccgag

SEQ ID NO: 695 - DNA, 374 bp, Glycine max
  Clone ID: LIB3072-049-Q1-K1-G4
gatgatcgtgaagaagccaaaaatcaaacactgatctgtaatggctgcgtctatatagtacaacaataaacataatcctttcagccaaagaagagagaaagaaaataatgttcacagaaattcgtaactatgcttgttgtatggatatggcttattgactttatggtttgatacgttgaggcacagtttatttttaaagatggaaccatcagaaaatatgtacgtatcaggactttaccttacattgtacacgaaaagttcttgaactgatgagttcaattccattactgctcttttcatccttaataaaataaaatagtaaaaaaatattgtactagtttattgcaatgcactactagcctgaacaatttctt

SEQ ID NO: 696 - DNA, 260 bp, Glycine max
  Clone ID: LIB3072-049-Q1-K1-C5
gattcacacaactaactaagaaagtcttggcataggcccccaaaaatgaagagcaccatcttctttgctctctttctcttttgtgccttcaccacctcatacctaccttcatccatcgctgatttcgtgctcgattatgaaggtaaccctcttgaaaatggtggcacatattatatcttgtcatacataacatctatttggtggaataagagcagccccatctgttaatgaaagatgcccttttactgtggtgcaattct

SEQ ID NO: 697 - DNA, 145 bp, Glycine max
  Clone ID: LIB3072-049-Q1-K1-C6
tgggactataagtcaatctgataactaacatatccggatactttatattgacccaatgttatatcatcttaatccattttctaccatcacattattaattacttattaaatctctattttctttatccactttaaatttaaacct

SEQ ID NO: 698 - DNA, 364 bp, Glycine max
  Clone ID: LIB3072-049-Q1-K1-C7
gaggtttttagggtttacaccgagcagccacacgtcccgcagcagccatggttctcaaaactgaactatgccgattcagtggtgccaagatctacccaggaaagggcatcagatttgttcgtggtgattctcaggttttcctgtttgcaaactcaaaatgtaagaggtatttccacaatcgcctgaagccttcaaagctcacctggactgcaatgtacagaaagcaacacaaaaaggacattgctcaagaagctgtgaggaagaggagacgtgctgccaaaaagccttactctaggtccattgttggtgcgaccttggaagtaatccagaaaaagagagctgagaagcccgaagttcgagatgc

SEQ ID NO: 699 - DNA, 394 bp, Glycine max
  Clone ID: LIB3072-049-Q1-K1-D1
gacaccaacaccaaaacaaacccactaagatggcttcctttgtatccttcctagtgctgcttcttgcagcccttatcctcatgcctcaagggcttgctacttactacaaaccaattaagaagccaccagtgtacaagcctccagtgtacaagccaccagtgtacaaaccaccggtttataagccaaaaccaccggtttacaagccgaaaccaccggtttacaagccaccatataagaagccaccatacaagaaaccaccttatggaaagtaccctccagtagaggacaacacccatgcctaaagcaagcaatgaggtctattatctacttaataaataagaggaacttgcttgtgttttctagcaatgtgatttacaactttctaacaatgcat

SEQ ID NO: 700 - DNA, 141 bp, Glycine max
  Clone ID: LIB3072-049-Q1-K1-D5
gagcacaagccagagcacaaagaggggtgcctagacaaagtcaaggacaagatccatggtgagggcggctcctctaagggctagaagattaagaaggcgtacatgcagaatgatcatggtcatgtgcatggccatgacttc

SEQ ID NO: 701 - DNA, 383 bp, Glycine max
  Clone ID: LIB3072-049-Q1-K1-E2
gataacaatccctattaaaatcttctaaaattaaattaccatatatagtcacattttctttacactttgtgaggtctaaaatgttgtccatttttcacaaggggtttgttcacccacctgaagagcttaaaagccctgcatctaacagtggctccaacaagcctaagattcctgaggaaactctaagagaatttctttctcatcatccccataacactttttctctgagttttggtcactctgctgttctagcttatactcgtcctgatccacctttctttgttcatcaaaggttgttttgtgggattgatgacatatactgtatctttttggggagcttgaacaatttgtgctcactcaacaagcagtatggttttggcaaa

SEQ ID NO: 702 - DNA, 95 bp, Glycine max
  Clone ID: LIB3072-049-Q1-K1-E3
tggagacttctataacaattaatatagatgagtctggggaacaacatgatggtgctaaaggtgcatctgctgcgtctattccctgtgttgcttac

SEQ ID NO: 703 - DNA, 182 bp, Glycine max
  Clone ID: LIB3072-049-Q1-K1-E4
caagcttgtggtggatgatgcttgttcataatgaaatcagaaatatggttgtagcctatgattttgattttcctaaagcaccttaagtctcgttaagtatccaaagaataataaagaagtatcaaatgcgattaataatgtatgaaatgaggtttgtatagcctattaaaaaatctttttat

SEQ ID NO: 704 - DNA, 139 bp, Glycine max
  Clone ID: LIB3072-049-Q1-K1-E5
gacagcaataacaattaataaagatgagtttgaagaacaacatggtggtgctaaaggtgtgtttgttgcttctttgtcttgtgggggttacagctccacgcatggaacttatctttttcagatgtgatcagtcattcat

SEQ ID NO: 705 - DNA, 415 bp, Glycine max
  Clone ID: LIB3072-049-Q1-K1-E7
gacagaagggggcaacaagatggacaccacaaggaagtcttcagtcgcactgacattcttattggctttcttcatcattgcatcagatatgtgtatggaatcagaagcaaggggacccattgtgcatgttcattgttctagggacgatgactgcaaatatcgtccttgtagagctaaatgtggttgcgtatgtagtaatagctactgtacatgtgtattttcttttatggataatgttcttactcatgcacccacaaattgagtaacgaggtcttgtcatgcaatcaccaagtgagaatgagaacaataaaggattgcatcttaattgtgtatgaaaaatcttaattttactatatcttcaataaaatttatgcttataaaaaaaaaaaatattaaaaaaggaaaataatttttt

SEQ ID NO: 706 - DNA, 413 bp, Glycine max
  Clone ID: LIB3072-049-Q1-K1-E8
gacagcaaaaacaattaataaagatgagtttgaagaacaacatggtggtgctaaaggtgtgtttgttgcttcttttccttgtgggggttacagctgcacgcatggaactgagcttcttcaaaagtgatcagtcatcaagttatgatgatgatgagtattcaaaaccatgctgtgatctctgcatgtgcacacgctcaatgcctcctcaatgcagctgtgaagatattaggctgaattcatgccactcagattgtaagagctgtatgtgcacacgctcacagccaggacagtgtcgttgtcttgacaccaacgacttctgctacaaaccttgcaagtccagagatgactagaaaaactaatagctctctcaaatggacgaagcccctttaggctttgtttgttatgttaaggga

SEQ ID NO: 707 - DNA, 303 bp, Glycine max
  Clone ID: LIB3072-049-Q1-K1-F1
gacaattgagctagttgcaagtcaccaccatggcacttgttcaaccctttgcttctctttcaatctcttttcgcgatgctcgtgttttcactgcaccaaaatgctctcccaccactcactttcctcatcggaatttggttccaactcgagcatcattcatcgctggttccccactgttgattcgaagaaatcatggaaggaatggtgcatgcaaagcaatgcctgtttcaataagatgtgagcaaagtacccaggaagggaacagtttagatgtgtggctaggccggctagccatggttgggt

SEQ ID NO: 708 - DNA, 254 bp, Glycine max
  Clone ID: LIB3072-049-Q1-K1-F4
aagaagaagaagaaggagcatggccatgagcatggccgtgacggcagcagcagcagtgagagtgattaaactgctgcatcacctatatatttaaaaggtttatgggaccatagtagcgagggctgtgccttaatttctctctatctctctctttttatctctctttctctctattattcctggttccctatcttgtgatctatttatgagtgtgataaacatacttgtgaaattgttcgtgtattttgttgcta

SEQ ID NO: 709 - DNA, 308 bp, Glycine max
  Clone ID: LIB3072-049-Q1-K1-F5
gacagcaaaaacaattaataaagatgagtttgaagaacaacatggtggtgctaaaggtgtgtttgttgcttcttttccttgtgggggttacagctgcacgcatggaactgagcttcttcaaaagtgatcagtcatcaagttatgatgatgatgagtattcaaaaccatgctgtgatctctgcatgtgcacacgctcaatgccttctcaatgcagctgtgaagatattaggctgaattcatgccactcagattgtaagagctgtatgtgcacacgctcacagccaggacagtgtcgttgtcttgacacc

SEQ ID NO: 710 - DNA, 329 bp, Glycine max
  Clone ID: LIB3072-049-Q1-K1-F8
gacagcaaaaacaattaataaagatgagtttggggaacaacatggtggtgctaaaggtgtgtttgttgcttcttttccttgtgggggttacagctgcacgcatggaactgagcttcttcaaaagtgatcagtcatcaagttatgatgatgatgagtattcaaaaccatgctgtgatctctgcatgtgcacacgctcaatgcctcctcaatgcagctgtgaagatattaggctgaattcatgccactcagattgtaagagctgtatgtgcacacgctcacagccaggacagtgtcgtcgtcttgacaccaacgacttctgctacaaacct

SEQ ID NO: 711 - DNA, 390 bp, Glycine max
  Clone ID: LIB3072-049-Q1-K1-C4
gattcacacaactaactaagaaagtcttccatagccccccaaaaatgaagagcaccatcttctttgctctctttctcttttgtgccttcaccacctcatacctaccttcagccatcgctgatttcgtgctcgataatgaaggtaaccctcttgaaaatggtggcacatattatatcttgtcagacataacagcatttggtggaataagagcagccccaacgggaaatgaaagatgccctctcactgtggtgcaatctcgcaatgagctcgacaaagggattggaacaatcatctcgtccccatatcgaatccgttttatcaccgaaggccatcctttgagccttaagttcgattcatttgcagttataatgctgtgtgttggaattccta

SEQ ID NO: 712 - DNA, 245 bp, Glycine max
  Clone ID: LIB3072-049-Q1-K1-G1
gattcacacatctaactaagaaagtcttccatagccccgcaaaaatgaagagcaccatcgtctttgctctctttctcttttgtgccttcaccacctcatacctaccttcagccatcgctgatttcgtgctcgataatgaaggttaccctcttgaaaatggtggcacatattatatcttgtcagacataacatcatatggtggaataagagcagccccaacgggaaatgaatgatgccctcttact

SEQ ID NO: 713 - DNA, 346 bp, Glycine max
  Clone ID: LIB3072-049-Q1-K1-G2
ggcgcctctggttgcgggagtgaaaaccttgtgttacccttctctcaagtttcaagagatttcatcatggctccaaagaaggacaaggctccaccaccttcctccaagcccgccaaatctggctgtggcaagcagaagaagaagaagtggagcaagggaaagcaaaaggagaaggtgaacaatatggtgccgtttgatcatggcacctatgacaagctcctttctgaagctcccaaatacaagctcattactccttccattctctctgatcgtttgaggattaatggatcacttgcaaggaatgctttttgagaattgatgcaagaagttctattaggattgtgtc

SEQ ID NO: 714 - DNA, 189 bp, Glycine max
  Clone ID: LIB3072-047-Q1-K1-H3
aaaaaactcttccataccccccccggcattattatcaccatcatccctcccctctatctctttttttccttcaccacctcatacctaccttcatccattccctatttctcactccataataaaactaactcctctttcaaatatttccacctattatatctttttacacataacaacatctctttttat

SEQ ID NO: 715 - DNA, 197 bp, Glycine max
  Clone ID: LIB3072-047-Q1-K1-H5
cagaaggggttataaatggaggagaaagaagagctcaaagagtgtaatgttattaaaatagactctcaaaaatcatgggaacaccacatctcttatgctaccaatcaaaagtaccctattgtagttcatttctctgctttctggtgtgtcccttctttagttatgaatcctttctttcaagaattggcctccactta

SEQ ID NO: 716 - DNA, 354 bp, Glycine max
  Clone ID: LIB3072-047-Q1-K1-H7
gggttgagaaaatagcgacgcagaaacacgctcggctacacgatcctgcgatccaacgcggtgtgtccagtgattccgctctccgtcgagtctgctcatggtgaagaatcacgaggccatccgccggtgaagaatcacgaggccatccgccggtgaagaatcgcgcgattcgtctggaaatcgcgattcaaacacgattcatccccgatgcagagattcaaccacgattcaggaacaaaaaccagacaagctccgattcatattggtagctgctggaatcgtatacaatcgtgcgatgcgtatggtgaatcgtacgatactaactaccatggagggtactactttataatcatg

SEQ ID NO: 717 - DNA, 210 bp, Glycine max
  Clone ID: LIB3072-047-Q1-K1-H9
gattcacacatctaactaagaaagtcttccatagcccgccggaaatgaagagcaccatcttctttgctctctttctcttttgagccttcaccacctcatacctaccttcagccatcgatgatttcgtgctcgataatgaaggtaaccctcttgaaaatggtggcacatattatatcttgtcagacataacagcatttggtggaataagag

SEQ ID NO: 718 - DNA, 273 bp, Glycine max
  Clone ID: LIB3072-049-Q1-K1-A1
gggggggggggatatttaacatgagacagagattaatatgaaaatgaagaaaaaatacaaacaaaaaataaattttaggaaactaaaagctgaaaaaaaaaaaaaaaaaacttctgatatatatgcagaataagaagagaaaactaggtagttgcaaattggtttaatattagactgtttaaacaagctaagaagaagagggagaaaaattaattggaaacttaataaacagaatagtaaattttaaatttgtcaaaaaagagtcttttaact

SEQ ID NO: 719 - DNA, 274 bp, Glycine max
  Clone ID: LIB3072-049-Q1-K1-A3
cactgattctagatgactacggagagcaacatggtgcgagatgacggcgtaatggttccttttgtagattacgacagatacagctacacacatggtactgaacttattcaaaagtgatcagtcatcacgtcctgattataataactattctaaactcatgctttgatctatgtatgtgctcactcttaatgcctcctaaatgcaactgacaagacattattcttaaatcatgccactcatattgcaatatcctcacgaaattaaatattccttc

SEQ ID NO: 720 - DNA, 385 bp, Glycine max
  Clone ID: LIB3072-049-Q1-K1-A4
gattattaccaacacctcgcttcctttttcttctcttcgaagtgaatcaatagtagtaattttagttaattaagatgaacctgaacacgagcagtaacttggagactcggtcactgcttgatgagctttgtaacttccacaagaagggactcttcgaccttggacatcctcttcttaatcgcatccttgagaccttcgtcaaagctgctggaattggagcagttcaagctgtgtcccgtgaggcttatttcacagccattgaaggtaccgggactgacaatagtggaggtttgccaccagaaatttcaagtgccaagaaaaaatcgttgccaagtcttaaaggagagaccaattacatatctcttgaagccatggtgaagaacac

SEQ ID NO: 721 - DNA, 204 bp, Glycine max
  Clone ID: LIB3072-049-Q1-K1-A6
acgcgtccgaagacgacgacaggatgcttctgctgcaagacgacgacagggggggacagcaactacctttgatagtgatgagtatgaagaacaacatggtggggctcaaggtgtgtgcgctgcttctattccgtgccgtggttacatcatacctccctgaactgatcgttttttaaagggatcattcttaatgttacgatgttg

SEQ ID NO: 722 - DNA, 344 bp, Glycine max
  Clone ID: LIB3072-049-Q1-K1-A8
gattcacacaactaactaagaaagtcttccatagccccccaaaaatgaagagcaccatcttctttgctctctttctcttttgtgccttcaccacctcatacctaccttcagccatcgctgatttcgtgctcgataatgaaggtaaccctcttgaaaatggtggcacatattatatcttgtcagacataacagcatttggtggaataagatcagccccaactggaaatgaaagatgccctctcactgtggtgcaatctcgcaatgagctcgacaaatggattggaacaatcatcttgtccccatatcgaatccgttttatcgcctaatgccatcctttgagcctt

SEQ ID NO: 723 - DNA, 435 bp, Glycine max
  unsure at all n locations
  Clone ID: LIB3072-049-Q1-K1-B1
acgacagaagggggaccaacgcaactcgattcctagcctcttcacgttgttcttttaagcttgttttaacggctcgaagttcccggccagcttgttttcagcttctttgacggctccaacttcgcgactcgaacgcgacgaggtcgtgaagaaggatattgttcgatcacttttgccgaaatcagggaatttcttccttttctgaacaacaggtactgggttgcaaacgggttgtgaaggttcattaaaatactgggtatgtagacaacacaccaacacagagactgctccaggtcattggtaagcataagctcctgttcatctatattttctttgaaacatgtaattaattaaattactttgcaagatttgtagatacttctgcttaattattatatggatgataaattntggaactgattagatgttaatatc

SEQ ID NO: 724 - DNA, 310 bp, Glycine max
  Clone ID: LIB3072-049-Q1-K1-B3
gaacacttggtttagcaagagaaaaaataccaaccatggcgaccatttctactgatcaaccaagaggatcctactcctatggaacctcctatggagcaccctatggaaccacctatgagaccaacagcagcattaacaaccctccttcacgccaaaccgtgaagttcataactgctgcaactattggcatcacactcttactcctgtctgggttggccctcacaggcactgtcataggtttgatcattgcaacccctgttcttgttatcttcagccccatccttgaacctgctgcgctagtgctgttcct

SEQ ID NO: 725 - DNA, 51 bp, Glycine max
  Clone ID: LIB3072-049-Q1-K1-B4
ggccttgaggtgtgaggaggctccattggatgttggcatctagggtggtgg

SEQ ID NO: 726 - DNA, 383 bp, Glycine max
  Clone ID: LIB3072-049-Q1-K1-B5
gattcacacaactaactaagaaagtcttccatagccccccaaaaatgaagagcaccaccttctttgctctctttctcttttgtgccttcaccacctcatacctaccttcagccatcgctgatttcgtgctcgataatgaaggtaaccctcttgaaaatggtggcacatattatatcttgtcagacataacagcatttggtggaataagagcagccccaacgggaaatgaaagatgccctctcactgtggtgcaatctcgcaatgagctcgacaaagggattggaacaatcgtctcgtccccatatcgaatcccgtttatcgccgaaggccatcctttgagccttaagttcgattcatttgcagttataatgctgtgtgttgga

SEQ ID NO: 727 - DNA, 339 bp, Glycine max
  Clone ID: LIB3072-049-Q1-K1-B6
gctgccgcaagcagagatgacaacccgatttaagaagaaccgcaagaagcgcggccacgtcagcgccggccacggccgtattggaaagcaccgcaagcaccccggcggccggggaaatgccggcggcatgcaccaccacaggatcctcttcgacaagtaccacccggggttcttcgggaaggtagggatgaggtactttcataagctccgcaacaaattctactcccccatcgtcaacatcgacaagctatggtctctgataccccaagacgcgaaggacaaagccctaaaatcgaaggacactgcccctctaatcgacgtcactcagcacgggtactt

SEQ ID NO: 728 - DNA, 377 bp, Glycine max
  Clone ID: LIB3072-049-Q1-K1-C1
gattcacacaactaactaagaaagtcttccatagccccccaaaaatgaagagcaccatcttctttgctctctttctcttttgtgccttcaccacctcatacctaccttcagccatcgctgatttcgtgcccgataatgaaggtaaccctcttgaaaatggtggcacatattatatcttgtcagacataacagcatttggtggaataagagcagccccaacgggaaatgaaagatgccctctcactgtggtgcaatctcgcaatgagctcgacaaagggattggaacaatcatctcgtccccatatcgaatccgttttatcgccgaaggccatcctttgagcctttagttcgattcatttgcagttataatgctgtgt

SEQ ID NO: 729 - DNA, 314 bp, Glycine max
  Clone ID: LIB3072-049-Q1-K1-C2
gaaggatcatcagggagaattaggtttttagggtttacaccgagcagccacacctgccgcagcagccatggttctcaaaactgaactatgccgattcagtggtgccaagatctacccaggaaagggcatcagatttgttcgtggtgattctcaggttttcctgtttgcaaactcaaaatgtaagaggtatatccacaatcgcctgaagccttcaaagctcacctggactgcaatgtacagaaagcaacacataaaggacattgcttaagaagctgtgaggaagaagaaacgtgctgtcaaaaagccttactcta

SEQ ID NO: 730 - DNA, 329 bp, Glycine max
  unsure at all n locations
  Clone ID: LIB3072-047-Q1-K1-H2
gggttgagaaaatagcgacgcanaaacacgctcggctacacgatcctgcgatccaacgcggtgtgtccagtgattccgctctccgtcgagtctgctcatggtgaagaatcacgaggccatccgccggtgaagaatcacgaggccatccgccggtgaagaatcgcgcgattcgtctggaaatcgcgattcaaacacgattcatccccgatgcagagattcaaccacgattcaggaacaaaaaccagacaagctccgattcatattggtagctgctggaatcgtatacaatcgtgcgatgcgtatggtgaatcgtacgatactaactacca

SEQ ID NO: 731 - DNA, 234 bp, Glycine max
  Clone ID: LIB3072-047-Q1-K1-F1
atttacatccttatccttcccaattactaaagcgactctcattaatatctcattcctattcctatatcctaacccttaggctcattcattcttctactcaaaacaaaacatgtctcacacacaacccatctaatctcccccttcaacacaacaacttactgttatacaccttccgccacattattcaatccactatttcttcactctcattatagtcagtaacatatattcact

SEQ ID NO: 732 - DNA, 367 bp, Glycine max
  Clone ID: LIB3072-047-Q1-K1-F10
tgtttgagtagacatattattatcaaaaagcggggggggtgtatattgaattcaatcctgacacattaacaatagtttcaattcaattgtggtgctgtcagctccctatctcagacgaccatgttatttttatatatatgggaatccaagatgtacaacactaaaccaagatgaccttataatttgacaacacaaaataagcattagattaatgaagcctttgagttattatatactgatggctcacgtactattgatgccaaagagctgaatgttgctattatggcacttgttttttaaattacataacaacaaataaattcaatgatagccatatttttaacaacgatggaagtggagcattttt

SEQ ID NO: 733 - DNA, 357 bp, Glycine max
  Clone ID: LIB3072-047-Q1-K1-F11
tgacagcaaaaacaattaataaagatgagtggggggaacaacatggtggtgctaaaggtgtgtttgttgcttcttttccttgtgggggttacagctgcacgcatggaactgagcttcttcaaaagtgatcagtcatcaagttatgatgatgatgagcattcaaaaccatgctgtgatctctgcatgtgcacacgctcaatgcctcctcaatgcagctgtgaagatattaggctgaattcatgccactcagattgtaagagctgtatgtgcacacgctcacagccaggacagtgtctttgtcttgacaccaacgacttctgctacaaaccttgcaagtccagaaatgactagaaaaac

SEQ ID NO: 734 - DNA, 323 bp, Glycine max
  Clone ID: LIB3072-047-Q1-K1-F2
gtttacaaccttatcctttccaattgctaaggcgactcttatcaatatctcattcctattcctatgtcttaagccttaggattattttcttttctactcaaaacaaaacatgtctcacaccccacccagctaatctcccccttcaacacaacaacatattggttgcaactgccgccacatttttcaatccactatttcttcacacgcatggtagggttaacatatgggcactaagcaggattagcttcttaagttgaaatgttaagtctacgctccctatttatagatcagaaattcatcatcacgttcattacttttcacac

SEQ ID NO: 735 - DNA, 412 bp, Glycine max
  unsure at all n locations
  Clone ID: LIB3072-047-Q1-K1-F3
acggcttcanaagacaaaaaagcgactttaaaaacaataaataatataaggaggcgaaaatcttaaagtacctaaagtcctttttatccctcctttcctttgaggggttaccacatcaccccatgaaccatacctctttaaaaattaaccagcattaaattaataatattaataataatcaaaacccatctcttaacctttcacaatcccacccctaataccctcctaatacaattttttaaaaaattacctcaatataatcctcactcaaattgtaaaaccctgtatttaccacctcctcacatcacaaaacatttgccactatcttatacactaacaatcttatcttataacctttcatattcccatataattatcttaaaatactttatttctttttttttaaattaaa

SEQ ID NO: 736 - DNA, 318 bp, Glycine max
  Clone ID: LIB3072-047-Q1-K1-F7
gatcacaaccttatcctttccaattgctaagttgactctcatcaatatctcattcctattcctatgtcttaagccttaggattattttcttttctactcaaaacaaaacatgtctcacaccccacccagctaatctcccccttcaacacaacaacataatggttgcaactgccgccacatttttcaatccactatttcttcacacgcatggtagggttaacatatgggcactaagcaggattagctacttaagtggaaatgtgaagtctaggttccctattttatagatcaaaaattcatcatcaggttcattacttt

SEQ ID NO: 737 - DNA, 356 bp, Glycine max
  Clone ID: LIB3072-047-Q1-K1-F8
gacagcaaaaacaattaataaggatgagtttggggaataacatggtggtgctaaaggtgtgtttgttgcttcttttccttgtgggggttacagctgcacgcatggaactgagcttcttcaaaagtgatcagtcatcaagttatgatgatgatgagtattcaaaaccatgctgtgatctctgcatgtgcacacgctcaatgcctcctcaatgcagctgtgaagatattaggctgaattcatgccactcagattgtaagagctgtatgtacacacgctcacagccaggacagtgttgttgtcttgacaccaacgacttctgctacatacctttgaagttcagagatgactagaaaaac

SEQ ID NO: 738 - DNA, 254 bp, Glycine max
  Clone ID: LIB3072-047-Q1-K1-F9
gacttcaaaaacaattaataaagatgagtttggagaacaacatggtggtgctaaaggtgtgtttgttgcttcttttccttgtgggggttacagctgcacgcatggaactgagcttcttcaaaagtgatcagtcatcaagttatgatgatgatgagtattcaaaaccatgctgtgatctctgcatgtgcacacgctcaatgcctcctcaatgcagctgtgaagatattaggctgaattcatgccactcagattgt

SEQ ID NO: 739 - DNA, 300 bp, Glycine max
  Clone ID: LIB3072-047-Q1-K1-G11
agggaccacattaattactcactcttcactcagaaggcttgtctttcattttgataattcccacactatggctgagcttcactaccaacaacaacaccaataccctcaccgataccctaatgatccatacgaacaacaaactagctactccactcaggtcgtcaaggcggccaccgccgtcaccgcgggcggctccctcttgatcctcgcctcgttgatccttgccggcaccatcatcgccctcaccatcgtcacaccaccgctcgtcatcttcagtccggttctcgtccccgcggtgat

SEQ ID NO: 740 - DNA, 350 bp, Glycine max
  unsure at all n locations
  Clone ID: LIB3072-047-Q1-K1-G12
tggcaatctgttgttttccatgnaagatttttggcgttggacgagacatttacatgtataggcttcaaatggagttattatttggcatatttttgtggttctttttttattatgtgtattgagataacataatacatattctgtgctatgtgtaagcacatcttcaacgagcaaatggtcattacatagaattcttacaacaaaattgacagaaacactccagggcccaaattcccttggttatcaaatgataaaaatgctattttttttttgctttttttggtattggaaggagaattaactttgttattttaccctacgtttttttttagcctaaattaactgatttt

SEQ ID NO: 741 - DNA, 388 bp, Glycine max
  Clone ID: LIB3072-047-Q1-K1-G4
gacagcaaaaacaattaataaagatgagtttgaggagcaacatggtggtgctaaaggtgtgtttgttgcttcttttccttgtgggggttacagctgcacgcatggaactgagcttcttcaaaagtgatcagtcgtcaagttatgatgatgatgagtattcaaaaccatgctgtgatctctgcatgtgcacacgctcaatgcctcctcaatgcagctgtgaagatattaggctgaattcatgccactcagattgtaagagctgtatgtgcacacgctcacagccaggacagtgtcgttgtcttgacaccaacgacttctgctacaaacctttgcagtccagagatgactagaaaaactaatagctctcttaaatggacgaagccccttt

SEQ ID NO: 742 - DNA, 344 bp, Glycine max
  Clone ID: LIB3072-047-Q1-K1-G6
agaaggggacaccaacaccaaaacaaacccactaagatggcggggggtgtatccttcctagtgctgcttcttgcagcccttatcctcatgcctcaagggcttgctacttactacaaaccaattaagaagccaccagtgtacaagcctccagtgtacaagccaccagtgtacaaaccaccggtttataagccaaaaccaccggtttacaagccgaaaccaccggcttacaagccaccatataagaagccaccatacaagaaaccaccttatggaaagtaccctccagtagaagacaacacccatgcctaaagcaagcaatgaggtctattatctacttaataaat

SEQ ID NO: 743 - DNA, 208 bp, Glycine max
  Clone ID: LIB3072-047-Q1-K1-G7
tgcgatagtaggaaaaccaactcaatctagggtatgggcaataacaaaaccaaactattcaaccccttcatacctaccggatacccctcaggtatgctcccaaatccaaccatcacagattctcaacactcccaggattaagattaattatcaaaccgctttcactaagaccatactacctacgtgcactgtcactgtaaacattatt

SEQ ID NO: 744 - DNA, 376 bp, Glycine max
  unsure at all n locations
  Clone ID: LIB3072-047-Q1-K1-G8
gtgaaacttgaagagttgaaaagcggcgtttgctccgaccgagtgcttcagaggagaagtaatgactgcgatcgcgggaacgcacgtttttggtgttgtgagttttcagctcaaacaagctgaaatgccttttgcatgttcttgcctaatccgcaagcgtattggagattctcctcagcgcaatgtggctctaagacgcagagtaaatggaacaattcttccccaaatcagagcccagaatcttctagattatgttccaaaatccgagttttacaaagtagaagcgattctcaagccatggcgagttcnccaggtttctgcggctttgttgaaaatgggaattcgtggtggtactgtatctgatgtcaggggcttt

SEQ ID NO: 745 - DNA, 364 bp, Glycine max
  Clone ID: LIB3072-047-Q1-K1-H1
ggttttataaaatatcgacgcaaaaacacgctctgctacactatcctgccattcaacacgatctgtccagtgattccgctctccgtcaagtctgctcatggtgaagaatcacgaggccatccgccggtgaagaatcactaggccatccgccggtgaagaatcgctcgattcgtttggaaatcgcgattcaaacacgattcatcctcgatgcagatattcaaccacgattcaggaacaaaaaccacacaagctccaattcatattgatacttgatggacattgatacaagccctctatccgtatagtaaattctacgatacctaacttaccaaggacagttctactttttaatttgcagttcctt

SEQ ID NO: 746 - DNA, 292 bp, Glycine max
  Clone ID: LIB3072-047-Q1-K1-H10
gactctcatcacattaggctgtatcaattttggttaagagtcttgaaaaagcaagagaaaaaaaaataccaaccatggcaaccatttctgatcaacctagagggtcctactcctatggaacctcatatggagcaccctatggaaccacgtatgagaccaacaccagcattaacaacccaccttcacgccaaacagtgaagttcataactgctgccactattggcatcacactcttgctcctgtctgggttgaccctcacaggcactgtcataagtttgatcattgcaacccc

SEQ ID NO: 747 - DNA, 306 bp, Glycine max
  unsure at all n locations
  Clone ID: LIB3072-047-Q1-K1-H11
tggactgtgcaaaaacccaattaataaagaatgagtgtgagagaacaatctatggtggtgctttaaaggtgtgtttgttgcttttcttttcctttgtnngggggttacangnnctgcacgcnnatggaactgagctttttcttcaaaagnntgatcagtcatttcaagttatttgatgnnntgatgagnntattcaaaacncnnatgcttgtgatctttcttgcatgtngnccacacgcttcannatgccttccttcaattgcagctttgtgaaagaatattaangcttgaaattcaattgccact

SEQ ID NO: 748 - DNA, 114 bp, Glycine max
  unsure at all n locations
  Clone ID: LIB3072-047-Q1-K1-H12
gggggcatcattgtgtagttnnngctgatcgagaaataacctagaaacagggtgtgtattgaaannatgaaggtcncnnttgttttctttttcgttgcttacanannttttggt

SEQ ID NO: 749 - DNA, 272 bp, Glycine max
  Clone ID: LIB3072-047-Q1-K1-C6
gacagcaaaaacaattaataatgatgagtttgaagagcggcatggtggtgctaaaggtgtgtttgttgcttctttttcttgtgggggttacagctgcacgcatggaactgagcttcttcaaaagtgatcagtcatcaagttatgatgatgatgagtattcaaaaccatgctgtgatctctgcatgtgcacacgctcaatgcctcctcaatgcaaatgtgaagatattaggctgaattcatgccactcacattgtaagagctgtatgtgcaca

SEQ ID NO: 750 - DNA, 350 bp, Glycine max
  Clone ID: LIB3072-047-Q1-K1-C8
gatgcaactgaataattaagaggagccatttccatagcagcctaagaaaatgaagagcactagcttgttcgctatctttctactttgcgccttcacctcatacctaccttccgccaccgcccaggacgtgctcgacgtggatggcgatccgattcggaacggtttcatatactacgttttgccggcaataagaggaaacggtggcggaatagaacgagccgcactcgggaaagacacttgccctatcactgtagtgcaatctcccaatccaaactctaaagggttagaaaataaatttgaatcttcataccccgcctattacataaacgaaaccctaattttgcaaaata

SEQ ID NO: 751 - DNA, 415 bp, Glycine max
  Clone ID: LIB3072-047-Q1-K1-C9
gtcagcaaaaacaattaataaagatgagtttgaagaacaacatggtggtgctaaaggtgtgtttgttgcttcttttccttgtgggggttacagctgcacgcatggaactgagcttcttcaaaagtgatcagtcatcaagttatgatgatgatgagtattcaaaaccatgctgtgatctctgcatgtgcacacgctcaatgcctactcaatgcagctgcgaagatattaagctgaattcatgccactcatattgtaagaactgtatttgcacacgcttacagacaggacagggtcgttgtcttgacaccaacgacttctgctacaaaccttgcaagttcaaagatgacttgaaaaactaataacttttttaaatggaccaaacccctttaagctttgtttgttatgttaagggaaa

SEQ ID NO: 752 - DNA, 231 bp, Glycine max
  Clone ID: LIB3072-047-Q1-K1-D1
tttttcaacaacaaacaaaaaaaaaaagataaggcgacatcttcgaagaactacatcttctttctcaacttgttttacttgctccttttccatctgcccacatctaacagagcctacttaaaactgaacaatcatgaccttctcatgaagatgaatcatcataaacactcaaatatttctgaatgtgcacacccttactgccatctaaatgcatgtacaaagatataactt

SEQ ID NO: 753 - DNA, 373 bp, Glycine max
  Clone ID: LIB3072-047-Q1-K1-D10
tgattcacacaactaactaagaaagtcttccgtggccccccaaaaatgaagagcaccatcttctttgctctctttctcttttgtgccttcaccacctcatacctaccttcagccatcgctgatttcgtgctcgataatgaaggtaaccctcttgaaaatggtggcacatattatatcttgtcagacataacagcatttggtggaataagagcagccccaacgggaaatgaaagatgccctctcactgtggtgcaatctcgcaatgagctcgacaaagggattggaacaatcatctcgtccccataccgaatccgttttatcgccgaaggccatcctttgagccttaaattcgattcatttgcagttattatgc

SEQ ID NO: 754 - DNA, 370 bp, Glycine max
  unsure at all n locations
  Clone ID: LIB3072-047-Q1-K1-D11
tgtgacagcaaaaacaattaataaagatgagtttgaanaacaacatggtggtgctaaaggtgtgtttgttgcttcttttccttgtgggggttacagctgcacgcatggaactgagcttcttcaaaagtgatcagtcatcaagttatgatgatgatgagtattcaaaaccatgctgtgatctctgcatgtgcacacgctcaatgcctcctcaatgcagctgtgaagatattaggctgaattcatgccactcagattgtaagagctgtatgtgcacacgctcacagccaggacagtgtcgttgtcttgacaccaacgacttttgctacaaacctttgcagttcagagattactagaaaaactaattgctttt

SEQ ID NO: 755 - DNA, 422 bp, Glycine max
  Clone ID: LIB3072-047-Q1-K1-D7
gacttcatctcttcacacaaaaaaaaagagaggaggatgtttttgaagaacaacattctcgttctcaacgtgtcatacgtgctacttttccttgttgcgagttctactagtgcctacttgaagctgaatatacttgacctgctcatgaaaagtgatcatcattaacactcaaatgatgatgagtcttcaaaaccatgctgcgatcaataagcatgcacaaagttaaaccctcctcaatgcatctaactaacattttatgctgcattcatgcccctcaaaaagtaagagcttttattttcttacgctcaccaaacagtttagtcttcatttttttactaccatctacttttttttcaaacctttttaatttctataatattttaaaaaaacctaataacttttttatattgaccaaaccccct

SEQ ID NO: 756 - DNA, 250 bp, Glycine max
  Clone ID: LIB3072-047-Q1-K1-E1
acaaaaaaacaaaaaaggggatttcctaaacaattactacaaatgagtacgacgaacaatttactactactaaactcctctttaatactacttcacattggagcggttacaactatacgaatgaaactgatctctttcaaaagacaacagacatcaacttatgatgataaacactatatcaaaaccatcctgagatctctacatatgcacacgcttaatacctccttaatgaaggtgacaagatattaaa

SEQ ID NO: 757 - DNA, 239 bp, Glycine max
  unsure at all n locations
  Clone ID: LIB3072-047-Q1-K1-E10
ccgacccaggcgtacgggtactcntagacaaacgcgtgggattctttcaaagaagacaacaaaaggggcttcggaggttatatacaataaaaaaacactagccccaacaacaacattgtggtgctcaatgtctatttatagcttcttttactcatgggtgatacatctcctcacattgaactgaactctttcaaaagtgatcagtcatattatatgatgatgatatacttcaaaaccat

SEQ ID NO: 758 - DNA, 395 bp, Glycine max
  Clone ID: LIB3072-047-Q1-K1-E12
ggcactgcaactttgctctctgtggggcttcaatttctaattagggtttcgcttagagtaaccaataaccatgggagtcttcacctttgtcgtccgcaaatccggcagcgaatggagcgccaagcaatattccggcgacatcgaggcctccgccgattccaccttcgatctccaacggaagctcgtgcaagccgctctcgccgttgattcctccggtggagttcagtcctctttctctcccgtgtctcctacctccgctgtgttccaggtgatagtgggtggtgcagtattcgttggaggtggtggtggtgcttttgcagctgcacctgcaggtggtgctgccgcagctgatgcttgcccacttgctgaaaaaaaggaagaaaaggtggaggaag

SEQ ID NO: 759 - DNA, 363 bp, Glycine max
  Clone ID: LIB3072-047-Q1-K1-E2
gcaaccataacgacaagacgacatttctataccaattcattaagacgacagaggtgtacggtttctagaagacaacagactgttactcctttcttaagactacagagggtaccggttgacacatgacgacagactggttacagatgcgataagacaacagattgttactgttgtgagaagactacaaacatgctctgatctctgaatacgaccaaactttacgccttctaaatgacgacagaaggatatttagttgattaatagccacatctatttttattattaatataaccacacgcttacagccaagacattgaatctttattttaactcgattatttttatacatacctttcaaattca

SEQ ID NO: 760 - DNA, 302 bp, Glycine max
  Clone ID: LIB3072-047-Q1-K1-E4
gattcacacaactaactaagaaagtcttccatggccccccaaaaatgaagagcaccatctcctttgctctctttctcttttgtgccttcaccacccatacctaccttcagccatcgctgatttcgtgctcgataatgaaggtaaccctcttgaaaatggtggcacatattatatcttgtcagacataacagcatttggtggaataagagcagccccaacgggaaatgaaagatgccctctcactgtggtgcaatctcgcaatgagctcgacaaagggatggaacaatcatctcgttcccata

SEQ ID NO: 761 - DNA, 276 bp, Glycine max
  Clone ID: LIB3072-047-Q1-K1-E6
gtgaaaacaaacgacagagagcctttccaattgaattctccacagagaagaaggggcggagtcgatcatcacttaacttcactaatacatcatggcagacgagacccagaacaagtatgagagctctgaggttgaggtccaggatcgtgacctctttgactttctcgtgaagaaaaaggatgaagaacacaagcctcatcctcaggaagaggtcatcgccaccgagtttcaaaaagtcactgtctcagaccaaggagagaacaagcacagcctctt

SEQ ID NO: 762 - DNA, 319 bp, Glycine max
  Clone ID: LIB3072-047-Q1-K1-E7
gatttcaaaaacaattaataaagatgagtttgagaacaacatggtggtgctaaaggtgtgtttgttgcttcttttccttgtgggggttacagctgcacgcatggaactgagcttcttcaaaagtgatcagtcatcaagttatgatgatgatgagtattcaaaaccatgctgtgatctctgcatgtgcacacgctcaatgcctacttaatgcagctgtgaagatattacgctgaattcatgccactcagattgtaagagctgtatgtgcacacgctcacagccaggacagtgtctttgacttgacaccaacgacttctgc

SEQ ID NO: 763 - DNA, 234 bp, Glycine max
  Clone ID: LIB3072-047-Q1-K1-A1
tttttactacagaaggggatagtgaagaaggcaaatcgcgaatactagatgtgatctgagagaatggctcctcggtctagcagcaaggacgcccaagaccttttccgcgctctttggtctgcttatgctgcaacccccactaatctcaagatcattgatctctatgtcatctatgccgtattcaccgctttcatccaggttgtttacatggctttggttggatcattttcattt

SEQ ID NO: 764 - DNA, 391 bp, Glycine max
  Clone ID: LIB3072-047-Q1-K1-A11
gatagagaaaaaaaatagactccaaaaatgactggcaactcagagatacacaatggcaaaagcttcaatgttgtttccttgcttaatagttttatttctcataacatatgcaacaggttttgtggatgcatgtaactacccgtgcaaattcccaagtgattgtaataatttacgatgtcttcgccctgattgcaaaaagtattgcctcaatggatgttgcctttgcaattgtcgtcttattccacctagtggaaatgtttgataaagaattttaataaaagaaagttgagtctttcatgattcaaattagaatgcaaaaatttccatgactttgtgggggaattaatttgaaataataaagttgaaataataccgtctttaattctccgcc

SEQ ID NO: 765 - DNA, 110 bp, Glycine max
  Clone ID: LIB3072-047-Q1-K1-A12
acaacaaaacattcttctgctaaaagactacataatggtacttttgcttgaagacgacacaactgtacgcatgcaacaatacttcttaacaatacgactgttataagact

SEQ ID NO: 766 - DNA, 220 bp, Glycine max
  Clone ID: LIB3072-047-Q1-K1-A3
ttgtattattttctactgaaatgcattcaacaaaccaaaaaaatattccattccccgcgaggaataaaaagcaccatcttctttactctctctctctattgacccttcaccacctcatacctaccttcagccatcgctgatcatctgctcaataatcaaagtcacaccaaattaaatgggggggacattacatatttttggtgccgtcccagccttttca

SEQ ID NO: 767 - DNA, 329 bp, Glycine max
  unsure at all n locations
  Clone ID: LIB3072-047-Q1-K1-A4
ggatggatgatgaggttgtcaatggcagggtttggaaggtcgttgcccttttctgcgctaattanataggtcgagcaagagatggaaactgtgatgaaggtgcttcagcctggacccttgggaatcatagagcacaagttttccgccgacgaaattcgcaaggctaatgccacggtttctaaagcagtgaccaattggcgaaccaatgcgatcctcgaagactacaatcacgtttaaaaagactatattcacaacaagtgaacccaattttagttcttcccgccaaattttgacccaaggtaacttccattttcttttggggggggggg

SEQ ID NO: 768 - DNA, 297 bp, Glycine max
  Clone ID: LIB3072-047-Q1-K1-A5
gatagagaaaaaaaatagactccaaaaatcacgggcggcgtcagagatacacaatggcaaaagcttcaatgttgtttccttgcttaatagttttatttctcataacatatgcaacaggttttgtggatgcatgtaactacccgtgcaaattcccaagtgattgtaataatttacgatgtcttcgccctgattgcaaaaagtattgcctcaatggatgttgcctttgcaattgtcgtcttattccacctaatggaaatgtttgataaagaattatcataaaaagaaagttgagtcttt

SEQ ID NO: 769 - DNA, 266 bp, Glycine max
  Clone ID: LIB3072-047-Q1-K1-A6
ggaagaaagagagagaaagagaggagggagttttggttggttgtttttcttgtgtgagaaagaaaaaagaaaaaaaaaaaaccttcctgtagctaaacaacaaaaaccaagtcttcattggcaacaagaagattattattttgatatgatttgtttatttgccacccaatgattgactttgcctagctgctgctacgagagaagatattggtggtggtgctagcaatagcaagttcaaacctctttcaagtaatttataagttgag

SEQ ID NO: 770 - DNA, 241 bp, Glycine max
  unsure at all n locations
  Clone ID: LIB3072-047-Q1-K1-A7
gagagtgaagaaggcaaatcgcgaagactagatgtgatctgagagaatggctcctcggtctagcagcaaggacgcccaagaccttttccgcgctctttggtctgcttatgctgcaacccccactaatctcaagatcattgatctctatgtcatctatgccgtattcaccgctttcatccaggttgtttacatggctttggttggatcatttccatntaactccttcctatcaggagtactt

SEQ ID NO: 771 - DNA, 275 bp, Glycine max
  Clone ID: LIB3072-047-Q1-K1-A8
gattcacacaactaactaagaaagtcttccatagccggccaaaaatgaagagcaccatcttctttgctctctttctcttttgtgccttcaccacctcatgcctaccttcagccatcgctgatttcgtgctcgataatgaaggtaaccctcttgaaaatggtggcacatattatatcttgtcagacataacagcatttggtggaataagagcagccccaacgggaaatgaaagatgctctctcactgtggggcaatctcgcaatgagctcgacaaa

SEQ ID NO: 772 - DNA, 347 bp, Glycine max
  Clone ID: LIB3072-047-Q1-K1-A9
ggcagttcaaagcgaaaagagattcgaatccagggaagggaaaggaaagtaagagaagagaagaatggccgaagagggacaagtgattggtgtccacagcgtggaggagtgggaggaacatctcaagaagggacaagagtccaagaaattgattgtggtggattttactgctttttggtgcggcccatgcccgttcattgtcccaattcttggggatatggctaaaaaggtggccaatggcacctttcttaaagtggattgtgattaattggccacttgtttcaaggaattggaaggtgaagctaatccaacctttctattctttaaagaaagccaacttgtgaaaa

SEQ ID NO: 773 - DNA, 409 bp, Glycine max
  Clone ID: LIB3072-047-Q1-K1-B10
tgttatttcagttcaattttaaacatgctttgcgtcgacactgtcttcacctctttcttacccacaaaatcaacttgcgtcttttcctccaaatcaaccaccccaatttcctgcaccctccaaggaacagttgcagagccaaaatctacagctgctgctgaaccgcttttgctaaatgcagttcgcgggatagatgttgaaagacccccggtttggctcatgaggcaagcagggaggtacatgaagagttaccaaaccatctgtgagaaatatccttcattccgtgaaagatctgaaaatgttgatcttcgtgtggaaatttctctgcaaccgtggcatgtttttaagccttgatgaatgattttattctcagacacttttaccccactttcctgaattaatataccct

SEQ ID NO: 774 - DNA, 392 bp, Glycine max
  unsure at all n locations
  Clone ID: LIB3072-047-Q1-K1-B12
gaagactacagaangggacagcaaatacaattaataaagatgagtttgaagaacagcgtggtggtgctaaaggtgtgtttgttgcttcttttccttgtgggggttacagctgcacgcatggaactgagcttcttcaaaagtgatcagtcatcaagttatgatgatgatgagtattcaaaaccatgctgtgatctctgcatgtgcacacgctcaatgcctcctcaatgcagctgtgaagatattaggctgaattcatgccactcagattgtaagagctgtatgtgcacacgctcacagccaggacagtgtcgttgtcttgacaccaacgacttctgctacaaacctttgcagtccagaaatgactagaaaaactaatagctctctcaaaatga

SEQ ID NO: 775 - DNA, 189 bp, Glycine max
  unsure at all n locations
  Clone ID: LIB3072-047-Q1-K1-B5
aattttaaacatcctttgcgccggctttttcttcacctctttctcacccacaaaatcaatttncctcttttcctccaaatcaaccaccccaatttcctacacccttcaatcaacattttcaaatccaaaatctacaccttctcctcaacctctttttctaaattcaattcacataataaatatttaaat

SEQ ID NO: 776 - DNA, 348 bp, Glycine max
  Clone ID: LIB3072-047-Q1-K1-B6
ctcggagaagacaacacaaggggacaacctaccgtgtcaactctccttcaaacaccagcagttggacttgtctctctttaatctcttaataccaaaacgctaccgttttgctcttttatttctctctctctctatggattgcaagaagcgagttcgggatgactcggacgaatcaattctggaatcgcccgaggcgaaacgactcatggacgatttactcgagttcttctacgacgccgatgatgcagcttccactcaggaccttgactccgtcatgaagagcttgcaggaggagatttcctgcgtgacgtcagattactgccagtctcacgcgcacatcggatacct

SEQ ID NO: 777 - DNA, 244 bp, Glycine max
  unsure at all n locations
  Clone ID: LIB3072-047-Q1-K1-B8
tataggattatttggaatttcttggttatgtgctcaatggcttcttaagaggaaagtcagatacttgatagtcacatttactttaccccgcactaaacttggatatttataatattattcttactgtagtttatcaaaaaatgttgttctcactatctctttccgttgtactactttttttccagtcttccttggcagggactaaaggctggcacccnnnnaaaatnatattttttttaatttt

SEQ ID NO: 778 - DNA, 348 bp, Glycine max
  Clone ID: LIB3072-047-Q1-K1-B9
gaagaagagtgtcatttagcgtggaagataatcgtaaagagtacctaagccaggccctataaccaggggacatatctgcaactagctttgatgatgaagaggtcacaagcgatggagaatatggtgatggacaggactggtgcaggagggaaccagagataatatgtcggcatatcgatcatgtcaacatgcttggtctcaataaaactacactacgacttcggtttttgataaattggcttggtacctcgttactgcaactgaaagtgcctgcttctgatgggggtgaaaaagcaaggcttggccaaatctattgtcccaaaaaaaaaaaagccctttaaaaagaaa

SEQ ID NO: 779 - DNA, 359 bp, Glycine max
  Clone ID: LIB3072-047-Q1-K1-C10
gacggcaaaaacaattaatggagatgagtttgaagaacaacatggtggtgctaaaggtgtgtttgttgcttcttttccttgtgggggttacagctgcacgcatggaactgagcttcttcaaaagtgatcagtcatcaagttatgatgatgatgagtattcaaaaccatgctgtgatctctgcatgtgcacacgctcaatgcctcctcaatgcagctgtgaagatattaggctgaattcatgccactcagattgtaagagctgtatgtgcacacgctcacagccaggacagtgtcgttgtcttgacaccaacgacttctgctacaaacctttgcagtccagagatgactaagaaaaacta

SEQ ID NO: 780 - DNA, 265 bp, Glycine max
  Clone ID: LIB3072-047-Q1-K1-C12
ggttctagtgtatgtgattgttgtgactcggtggtcttcgtcgttatcttcttcttttgttgtttgtgtgtttgttttttctctcacctgaaaatgtcttgctgcggtggtaactgtggttgcggaagcgcctgcaagtgcggcaacggctgcggaggctgcaagatgtacccagacttgagctacaccgagtcaaccaccaccgagaccttggtcatgggagtggcaccagttaaagctcaattcgagagtgctgaaatgggtg

SEQ ID NO: 781 - DNA, 400 bp, Glycine max
  Clone ID: LIB3072-046-Q1-K1-H9
ggctttgagaaagagagagatgggaagagaaaaggagacaacaaaggtagcttacacggtggagcagcttgtagccttcaatccatacaatcccgatattcttccagatctcgaaaactatgtcaacgaccaggtttcgtcgcaaacttacagcctggacgcgaatctctgccttcttcgcctctaccagtttgaaccagagaaaatgagttcccagattgtggcccgcatattggtcaaggctctcatggcaatgccggcgccggatttcagcctttgtctctttttgattccagaacgcgtgcaaatggaggggcagttcaagactttgattgtcctgtctcactatttggagacaggaagatttcggcagttctgggatgaagcagcaaaaagtcgt

SEQ ID NO: 782 - DNA, 371 bp, Glycine max
  unsure at all n locations
  Clone ID: LIB3072-047-Q1-K1-C2
gacccacgcttccttccgctctttcttaccgnttctataagatttcagaaagggatgcaactgaataattaatagaagcctttttcatatcatcctactaaaatgaataccactaccttgttcgctatctttctactttgcgccttcacctcatacctaccttccgccaccgtccagtacgtgctctacgtggatgtcaatcctattcggaacggtttcatatactaccttcttccggcaataatatgaaactgtggcggaatataactagccgcactctctaaaaacacttgccctatcactgtaatgcaatcttccaatccaaaatttaaggtgttagaaattaactttgaattttcatacccctccta

SEQ ID NO: 783 - DNA, 228 bp, Glycine max
  Clone ID: LIB3072-046-Q1-K1-F7
ttagaacacacatactggcacttcactcattaccactctcaggccggcttagagatcttttcaaaagacgtttacagaacatcatccaaagatccagaacgaggaaggacatatcactgatctttacattcccaggaagtgctacgccacaaacacattgattaaccttaaagaccatgcttcatgtcagatcaacattattcataaccatgataatatcttttacaa

SEQ ID NO: 784 - DNA, 379 bp, Glycine max
  Clone ID: LIB3072-046-Q1-K1-F8
cccactcgtcctcccactcgtccttactctagaagacgacagaaggggacagcggaaacgagtaataaagatgagtttgaagaacaacatggtggtgctaaaggtgtgtttgttgcttcttttccttgtgggggttacagctgcacgcatggaactgagcttcttcaaaagtgatcagtcatcaagttatgatgatgatgagtattcaaaaccatgctgcgatctctgcatgtgcacacgctcaatgccttctcaatgcagctgtgaagatattaggctgaattcatgccactcatattgtaagagctgtatgtgcacacgctcacagccaggacagtgtcgttgtcttgacaccaacgacttctgctacaaaccttgc

SEQ ID NO: 785 - DNA, 280 bp, Glycine max
  Clone ID: LIB3072-046-Q1-K1-F9
gatagcaaaatcgtgtctccggtttaatcaccattgtacaacccaattcccttcgtcgttttcgattaagagagcaatggcacgtaccaagcaaaccgctcgcaagtccaccggaggaaaggctccgaggaagcaattggcaaccaaagccgctcgcaagtcagccccggcgaccggcggagtgaataagccccaccgcttcaagccaggaacggtggctctgaaggagattcgaaagtaccagaagagcaccgaacttctgatccgaaaactcccattc

SEQ ID NO: 786 - DNA, 314 bp, Glycine max
  Clone ID: LIB3072-046-Q1-K1-G1
gacagcaaaaacaattaataaagatgagtttgaagaacaacatggtggtgctaaaggtgtgtttgttgcttcttttccttgtgggggttacagctgcacgcatggaactgagcttcttcaaaagtgatcagtcatcaagttatgatgatgatgagtattcaaaaccatgctgtgatctctgcatgtgcacacgctcaatgcctcctcaatgcagctgtgaagatattaagctgaattcatgccactcagattgtaagagctgtatgtgcacacgctcacagccaggacagtgtcgttgtcttgacaccaacgac

SEQ ID NO: 787 - DNA, 375 bp, Glycine max
  Clone ID: LIB3072-046-Q1-K1-G10
gacagcaaaaacaattaataaagatgagtttggggaacaacatggtggtgcgaaaggtgtgtttgttgcttcttttccttgtgggggttacagctgcacgcatggaactgagcttcttcaaaagtgatcagtcatcaagttatgatgatgatgagtattcaaaaccatgctgtgatctctgcatgtgcacacgctcaatgcctcctcaatgcagctgtgaagatattaggctgaattcatgccactcagattgtaagagctgtatgtgcacacgctcacagccaggacagtgtcgttgtcttgacaccaacgacttctgctacaaaccttgcaagtgcagagatgactagaaaaactaataactctctcaaatgg

SEQ ID NO: 788 - DNA, 392 bp, Glycine max
  Clone ID: LIB3072-046-Q1-K1-G11
tttgggtcagcaaaaacaattaataaagatgggttttgtgaacatcatggtggtgcgaaaggtgtgtttgttgcttcttttccttgtgggggttacagctgcacgcatggaactgagcttcttcaaaagtgatcagtcatcaagttatgatgatgatgagtattcaaaaccatgctgtgatctctgcatgtgcacacgctcaatgccttctcaatgcacctgtgaagatattaggctgaattcatgccactcagattgtaagagctgtatgtgcacactctcacagccagtacagtgtcgttgtcttgacaccaacgacttctgctacaaaccttgcaagtccagagatgactagaaaaactaatatctctctcaaatgaccaaaccccttt

SEQ ID NO: 789 - DNA, 181 bp, Glycine max
  Clone ID: LIB3072-046-Q1-K1-G2
acgtttccgcacacgtttcctcccacccttccttccggttgagagaggccgccaaagggttccggttgcaaaaacacccagaaggtccggttgcaagaagccaacagaaggattttgagttgtgataacctcaaaattctaaataaaatgaaataaaaatgaccaacacacaatatttcat

SEQ ID NO: 790 - DNA, 343 bp, Glycine max
  Clone ID: LIB3072-046-Q1-K1-G3
gatccccatcaaaacacaagcaaatcctaaaaagttgattgagatatatagaagcgagctgcaatttcacaaaatgaagaaagtgtttgtcacatttttagctgtgctagttgtatttgttcttacagcgaaagcttcagaggcacgactaccagttaaaacaaattcagcatcaaatgactacaattgttcacaagtctataacctgttagtttcgtgcgtagattacatgattggtggagatgatggtgccccttcaggtgtttgttgccaaagtgttaatgcagtgaaagcatcagcaccaacacaaattcaacgaatggctgcatgtaagtgctttttc

SEQ ID NO: 791 - DNA, 321 bp, Glycine max
  Clone ID: LIB3072-046-Q1-K1-G6
gccacaagctacatacacaagaatggctcgcagacttgtgtcagtgatttcgttaattttttttacctttgcagtcatggttgttgttctattctcaattggtgtgaatagcagtcagatctgtcctggaaattgcgaaaatttttcaaactgcaatgcctactgccaggcccactatcataagaaagggatatgcatcagcccacctaaacgagggtacatttgttgttgcttctcatgagttttcttcatataattataagcaagcaatgtattgtttttaataattattagcatcagtgctggaaataaaaaagcatt

SEQ ID NO: 792 - DNA, 185 bp, Glycine max
  Clone ID: LIB3072-046-Q1-K1-G8
ggggagagagagagagagttggaagaagaagaacggaagatgaacttgggatggatggaagcggcgctgccgctgggaatcatagcgggaatgctctgcgtcatgggaaacgctcagtattacattcacaaatccgcgcatggcagacctaagcacatcgggaacgatatgtgggacgtggccat

SEQ ID NO: 793 - DNA, 103 bp, Glycine max
  Clone ID: LIB3072-046-Q1-K1-G9
ggtcgttggattgctttatttttttggcattcattcatacccaacaacttaacaactcctccaaccctcctagactacgaaaaaacaaaaaaagacaagcgat

SEQ ID NO: 794 - DNA, 429 bp, Glycine max
  Clone ID: LIB3072-046-Q1-K1-H1
cccacgcgtccgtccggcaacggaagggggatacattacagagtgcgttgttgctccttcccacagctccctgccaacatgggtatctccagagattctatgcacaagaggcgtgccactggtggcaagaagaaggcatggaggaagaagagaaagtatgagcctggtcgccagcctgctaacactaagctgtcaagcaacaagacagtcaggaggatccgggttagaggtggaaatgtgaagtggagggcactgagattggatactggaaattactcctggggaagtgaagctgtaactcgcaagactcgtatactagatgtggtttacaatgcctcaaacaacgagcttgtgcgtactcagactcttgtaaaaagtgctattgttcaagttgatgctgctccattcaaacaatggtaccttcagcac

SEQ ID NO: 795 - DNA, 375 bp, Glycine max
  unsure at all n locations
  Clone ID: LIB3072-046-Q1-K1-H11
ggcttattcacgcaactaaataagaggggaagagtactatcttctttgctctctttctagtttgtgccttcaccatctcatacctgccttcagccaccgctcagttcgtgctcgacactgatgatgatcctcttcaaaacggtggcacatactatatgttgccagttatgagaggaaagggcggtggaatagaagtagattcaactggaaaagaaatatgccctctcactgttgtgcaatcacccaatgagctcgataaggggattggactagtctttacatctccattacatgccctttttatcgccgaaggctatcctttgagcattaagtttggttcatttgcagntataacgctgtgtgccggcatgccta

SEQ ID NO: 796 - DNA, 340 bp, Glycine max
  Clone ID: LIB3072-046-Q1-K1-H4
ggttacacatactcacacactttgtactctccggccttgcttcttcgatccagatctctctccttctccctcaaatggcttcccttctgcaatgttccatgcccctcgtctctctttccaatcgagctctggtacccggtaccaggatctccaacccaagttcagtttccctttcaattaagggaagaagtttcccacccgttacattgcagcccagagggcgtcggtttcagcttagatgtgcggcaaaaccagagacagtgaagaaggtgtgtgacatagtcaagaagcaattggcactgccaaatgaatcagctgttactggagagtctaaatttgc

SEQ ID NO: 797 - DNA, 379 bp, Glycine max
  Clone ID: LIB3072-046-Q1-K1-H6
tgggacagcacaaacaattaatggagatgagtgtgaagaacaacatggtggtgctaaaggcgtgtttgttgcttcttttccttgtgggggttacagctgcacgcatggaactgagcttcttcaaaagtgatcagtcatcaagttatgatgatgatgagtattcaaaaccatgctgtgatctctgcatgtgcacacgctcaatgcctcctcaatgcagctgtgaagatattaggctgaattcatgccactcacattgtaagagctgtatgtgcacacgctcacagccaggacagtgtcgttgtcttgacaccaacgacttctgctacaaaccttgcaagtccagagatgactagaaaaactattagctctctcaaatgga

SEQ ID NO: 798 - DNA, 316 bp, Glycine max
  Clone ID: LIB3072-046-Q1-K1-F6
aggacagcagagacaattaataaagatgagtttgaagaacaacatggtggtgctaaaggtgtgtttgttgcttcttttccttgtgggggttacagctgcacgcatggaactgagcttcttcaaaagtgatcagtcatcaagttatgatgatgatgagtattcaaaaccatgctgtgatctctgcatgtgcacacgctcaatgcctcctcaatgcagctgtgaagatattaggctgaattcatgccactcagattgtaagagctgtatgtgcacacgctcacagccaggacagtgtcgttgtctagacaccaacgac

SEQ ID NO: 799 - DNA, 385 bp, Glycine max
  Clone ID: LIB3072-046-Q1-K1-H7
gtctcaacactttctcgcattttccctgttcttgctctctcacgttttccgcttcagttttctcgggaaaatcatggtgaaaggtccaggcctctactctgacattggcaagagagctcgcgatcttctgttcaaggattatcagaatgaccacaagttcaccatcaccacttacacttccaccggagtggaaatcacttcaactggagtcaggaaaggtgagatatatttggccgatgtcagcactaaggtgaagaacaagaacatcacaactgatgtcaaagtggacactaactcatatctgcgtacaatcattactgtggatgaacctgcccctggactcaggacaatttttagctttaattttccagatcagaaatctggc

SEQ ID NO: 800 - DNA, 140 bp, Glycine max
  Clone ID: LIB3072-046-Q1-K1-D9
ctctcttgttcttccaggggggcaacggaaggggtacacccgtccagtggaaaaccaccgcttgtctgcgaacaagtttcgggcgcaagctccgcctgttgccagattgtgactataaccattgctcaatataatatact

SEQ ID NO: 801 - DNA, 394 bp, Glycine max
  Clone ID: LIB3072-046-Q1-K1-E12
ggcacaagtgagtttgttgatcgagggaactagaaacagtgtgatgaaaatgaaggtccttgttttcttcgttgctacaattttggtagcatggcaatgccatgcgtacgatatgtcccctctccgaatgaacactggctatggtgcccgtactccggaggtgaaatgcgcaagttggaggcttgctgtggaagcacacaacatctttggctttgagaccattcctgaagagtgcgttgaagcaacaaaggaatacatccatggcgaacaatatagatcagactccaaaacagttaaccaacaagcttacttttatgccatagacctcgaattccatcccaaggacacatttgtgttcagtatagatggcaccgtactctctaatattccatac

SEQ ID NO: 802 - DNA, 394 bp, Glycine max
  Clone ID: LIB3072-046-Q1-K1-E2
aaaccccacaaagggggcccaaacccatttaataaatatgtttttagggaacgacttgttgtccctaaaggcgggttggttgcttcttttcctgtgggggtacagctccccctggaactagcttcttcaaaagtgatcagccatcaagttatgatgatgatgagtattcaaaccatgctgtgatctctgcatgtgcacacgctcaatgcctcctcaatgcagctgtgaagatattaggctgaattcatgccactcagattgtaagagctgtatgtgcacacgctcacagccaggacagtgtcgttgtcttgacaccaacgacttctgctacaaaccttgcaagtccagagatgactagaaaaactaatagctctctcaaatggacgaagcccct

SEQ ID NO: 803 - DNA, 287 bp, Glycine max
  Clone ID: LIB3072-046-Q1-K1-E4
agggatagcaaccacagcacgcaatattttcagctgggtcaggttctctctttgtgcgaagattggaaaattgcacatctatgtttcactacttgctgctgcatttgtatttgagataggagtagctgaatgcacataatagaaagtaaacccttttgaaaatggtccggccttttatatgttcccagccttaataccacatcgttcgaatttgataactctttactgggtatgcaaaattcaatttaactgtccggcgttttcaaagtgatgtcttgaaataacct

SEQ ID NO: 804 - DNA, 426 bp, Glycine max
  Clone ID: LIB3072-046-Q1-K1-E5
cccacccgtccgtgcaataagacgacagatgggggacaaagaaaactaaaccctagtgggagtcttgtcgtcgtctcttcctcttcgcaacaatggttgccgccaagaaaaccaagaagacccatgagagcatcaacaacaggcttgctcttgtcatgaagagcggcaaatacacccttggttataagaccgttctcaaatctcttaggagctccaaagggaaattgattatcattgctaacaactgcccccctttgagaaagtcagagattgaataccatgccatgttggcaaaggttggagttcatcattacaatgggaacaatgtggatttgggcactgcctgcggcaaatattacagagtgtgctgccttagcattattgatcctggtgattcggatatcattaagacactgcctggtgaac

SEQ ID NO: 805 - DNA, 378 bp, Glycine max
  Clone ID: LIB3072-046-Q1-K1-E6
acatatggctgtctctaagggaagccagttggattgaaacaggaaagccatgtctattcattgcaacgtgtgcatgcaaacatttatatgcaccacatcataagtgaggtgcaaggagcatgcttattccaaacaccccaaatctgatctccatgtttgttttcctcatcttaaaaagtgaaagaatgcatgttgagacatgatatatcaatatatggcctgttatatattctctatacacagagatcttcaatttcttttataacaaatatgtctgtgtgtatgtgtcctatggggtcagtagagactagaggggataattagtaaatttttccattgtttaatcgtgaaaaactatggtaattttctatttttttg

SEQ ID NO: 806 - DNA, 386 bp, Glycine max
  Clone ID: LIB3072-046-Q1-K1-E7
tcatgttatattttgttcatgctttttataggaaattgaggtaatttgcttatactttttttgagtttaaatattagattttaaatatattgtgaaagactaaaataaactatttaatttaatttaaaagaaaattcaattttgattagataaaaaaaaaaaacccatttaataaaagtgaaccttgtgtttgattgtgtggaaatgagggggcaaggaaagaagatcaaagaaaggagaggatctccagttgagtgcatcatttggtatgcaagaaatgagaaaataaaatttttatgtaggtgaatttaataaaataaattttaattttaaattaataaaaataaaataaaataaaataaataaaaaattttaaattgtatccc

SEQ ID NO: 807 - DNA, 365 bp, Glycine max
  Clone ID: LIB3072-046-Q1-K1-F1
ggaagcatttgagactaactcttagagagaaaaaaaatggctgatacaggtggaggagatgcagtgagaccagtggtaatatgtgataacaagtgtggctgcacacttccatgcactggtggttccacttgcaggtgcacaagtgctggcactgccacaggagggggtgatcacgtgacatgctcgtgcggagagcactgtggttgcaatccatgctcatgtcccaagattgcggctgctggaagtggttgcagatgtggcacagattgtgcatgtgcctcctgccgcacttagtatcacaccttaaagcttaaacttcacgttttattttatgtcttcaaatcttgaatacgttttctatatat

SEQ ID NO: 808 - DNA, 353 bp, Glycine max
  Clone ID: LIB3072-046-Q1-K1-F10
gacacttgacagggggaacgggaaagatgggtttgaagaacaacatggtggtgctaaaggtgtgtttcttggttcttttccttgtgggggttactaatgcacgcatggaactgaacctcttcaaaagtgatcactcatcaagtgatgatgagtcttcaaaaccatgctgtgatctctgcatgtgcacagcctcaatgccacctcaatgccattgtgcagatattaggttgaattcatgtcactcaacttgtgatcgctgtgcgtgcacacgctcgatgccaggccagtgtcgttgccttgacaccaccgacttttgctacaaaccttgcaagtccagtgatgaagatgatgac

SEQ ID NO: 809 - DNA, 190 bp, Glycine max
  unsure at all n locations
  Clone ID: LIB3072-046-Q1-K1-F11
tggcttcttcttcctgctcctcctccttgtctttgcttcccnggtggtggtgctctctgggggctgtgtgtgtgtgtcnccttgccccggtttccttggtttgtgnttttgngtccccctctgtgctttggtctgctggttcgctcgtttctccggtggccggtgccttggcttccgccgccgctgcttt

SEQ ID NO: 810 - DNA, 376 bp, Glycine max
  unsure at all n locations
  Clone ID: LIB3072-046-Q1-K1-F12
ggaagagtgaagagaatggctcccaaaggtttggcctttctggctgtgttaatatgcgtttcagcactgtcactgagtccttctgttgcgggggaagggcaaaataatggccttgttatgaacttctacaaggaatcatgccctcaggctgaaggcatcatcacagaacaagtcaagcttctctacaagcgccacaagaacactgctttctcctggctcaggaacatcttccatgactgtgctgttcagagttgtgatgcttcactgttgctggactccacaagaaggagcttgtctgagaaggaaacagatagaagctttgggttgagaaatttcangtacattgaaaccatcaaagaagctttggaaagagaat

SEQ ID NO: 811 - DNA, 406 bp, Glycine max
  Clone ID: LIB3072-046-Q1-K1-F2
ggttccaaaaagactccaaaaggggccgcgtgaaaatcactggttgttcagagtcccccgtatatatccgttcttttttcttccttccttccttccttccttcaacgctcagcactcaaatcctctgagagaaaaaaaattagggttttgcatttcgggtcagacagactcagacatgggaagaggcaatgcccagaagtcaaagatggctcgcgagaagaacctcgagaagcagaaggctgccgctaaaggaagccagttggattcaaacaagaaagccatgtctattcagtgcaaggtgtgcatgcaaacatttatatgcaccacatcaaaagtgaaatgccaggagcatgctgaagccaaacaccccaaatctgatctccatgtttgttttcctcatcttaaa

SEQ ID NO: 812 - DNA, 381 bp, Glycine max
  Clone ID: LIB3072-046-Q1-K1-D7
gctcctacagatccggcaggggctgcgattttggatcggaacctcttctgcggcgtaacaatgggacactacatcgtttgaaattatcacccaataaactacggtcctggttatcgcacttgccgagtgtgtgggaacacacatggattgatcaagaaacatggccttatgtgctacaagcaatgctttcctttcaatgccaaagaaactgacttcatcaaatatggcttaaagagctgctgtcacctactgaccaacattatgttctaacactagaatgctctgaagatgttatgtatgaagaaacttgagacttacttttttcatctatgttattatcagacataatgtgtgaaacgaaaaatactcttatataaattg

SEQ ID NO: 813 - DNA, 154 bp, Glycine max
  unsure at all n locations
  Clone ID: LIB3072-046-Q1-K1-C1
gatatctttcttcacagaagaaaaaagaagaagaagagtgggttgtgaaagaanccaacatggtgnnngtgctaaagggnnngtgtttggtggctttacttttccttgggtggggggtacctatctanngtgccannacttgagagggctgagt

SEQ ID NO: 814 - DNA, 303 bp, Glycine max
  Clone ID: LIB3072-046-Q1-K1-C10
ggctgaagaccaaggaggttgggcaggatattgagagcatggcacaggatacaagggaggcagctgcaagggatgcaagggaggcagctgcaagggatgcaagggaagctgctgcaagggatgcaaaggtggaagcaagggatgtaaagaggacaacagtgacagcaacaaccgcaaccgcatgatgagtaattctgatattagagggagcattaatggtgttgtgggatgtgggttatatggggaaaataaaataaatgatgtatgtccctcttgcctaatgtaaggttgtgtgtttttgtt

SEQ ID NO: 815 - DNA, 317 bp, Glycine max
  Clone ID: LIB3072-046-Q1-K1-C11
gccgtccagactaccacacacatcttttattactacaacaaacgatctcctgcagcagaaatagataattttttatcataacaacacctatttcattcattgcattctcatatttcatccttagcaatttttcaacacagacaaccaaatcaaggcaacttctcttctattattattttcaaccaatcataatattcataactattataatctaataacactaattcccatttcatttagatttcccataatttacatatattgaaatgcattcctaccatttatttttatccttaatttctgaataatatattaac

SEQ ID NO: 816 - DNA, 354 bp, Glycine max
  Clone ID: LIB3072-046-Q1-K1-C12
ggcagcagaaagcgatgaaaggtcaacaacagctaaaaaaatctaaggtggtgaaaattgactcaagaaaatcatgggaacaccacataactaatgcaaccaataaaggctaccctgttatggttcatttctctgcttattggtgcatgccttcaatagctatgaatcatttctttcaacaactggcctccacctatcaaaatgttctctttctgaatgttgatgttgatgaggtcaaggaagttgcttccaagttggaaattaaagcaattcctaccttttgtttgatgaatggaagagctccagtggataaaattgtgggtgcaaaccctgatgaattaaagaaaaagatca

SEQ ID NO: 817 - DNA, 402 bp, Glycine max
  Clone ID: LIB3072-046-Q1-K1-C2
ggagagagaaaaaaggcaaaatgtcaaaaagaggacgcggtggttcggcggggaacaagttccggatgtcgctgggtctgccggtggcggcgacggtgaactgcgccgacaatacgggggcgaagaacctctacatcatatcggtgaaagggatcaaagggcgtttgaaccgtctcccctcggcttgcgttggcgacatggtgatggccaccgtgaagaaggggaaacccgatctgaagaagaaagttttgccagctgtcattgttcgccagcgcaagccatggcgccgaaaggacggcgtctacatgtatttcgaagataatgctggtgttattgtcaatcccaaaggaaaaatgaaaggttctgctatcactggtcccattggaaaagagtgtactgatc

SEQ ID NO: 818 - DNA, 163 bp, Glycine max
  Clone ID: LIB3072-046-Q1-K1-C4
gatagatagagagcgcggcataacctaaacttagccttggtctctctgtgtgtgtgcgcatcaaacgcatcctgtagcagccatggccactgcaagaactgtgaaggacgtttctcctcatgagttcgtcaaaacttactcttcttacctcaagcgatctggc

SEQ ID NO: 819 - DNA, 303 bp, Glycine max
  Clone ID: LIB3072-046-Q1-K1-C5
aagactacttctgattatgcacctaaatacttaacatggcccttgttctatatttattagcactatttaaacccctaccttgttagttatctccttattctgaaccttaacttactacataccttacgacatcctccaagacgagttctatcagattaggcaatctatcatgaacgacctgatatactacacttttattgacattactggaatatttagcgacttacttcgttacgaaccttgccataacactttaactattacttccattccaagatccaatgcattctataatggacttga

SEQ ID NO: 820 - DNA, 369 bp, Glycine max
  Clone ID: LIB3072-046-Q1-K1-C6
aaagagacccggaaagggtgggaaccgcttttggaaatcgattgagcttggatttaatactcccagggaagccatcgaaggaacctacattgacaagaagtgccccttcactggcaatgtttacatccgtggccgtatcttggctggaacatgtcacagtgctaagatgaacaggactattattgttaggaggaattatctccattttatcaagaagtaccagaggtacgagaaaaggcactccaacattcctgctcatatatcacctgctttccgtgtgaaagaaggagatcacgttattattggtcaatgcaagccactttctaagactgtgaagttcaatgtgttgaaagtgatcccagctggatc

SEQ ID NO: 821 - DNA, 356 bp, Glycine max
  Clone ID: LIB3072-046-Q1-K1-C7
ccggtacggctgcgatccgacttcggaagtgtactgctctccgattacaaactaccggggagtccataggaagtacctaccttgacaaaattttccacttcactagctatgttaccatcctccactttagctttgatataaccatcctcgtttctcatatacacaagtctattattgttaaaaggaattatttccattctatcaacaagtaccagacgttcaagaatatgcgctccagctctgatgatcatatcttacctacttttcgtttcaacgaaagagatctcgtaattattgacctatgcacaacactctgtaagactgtttacatcaatgtgattaaaaaaacccctgct

SEQ ID NO: 822 - DNA, 401 bp, Glycine max
  Clone ID: LIB3072-046-Q1-K1-C8
gacacatcacaacatcatcaacaacagacaaaggcaaaaactacttccttctctcctttgctgtgttttctttctcaaaaatgggtcgtacctatgttcttatgatggttgctgcattgttgttgagctccaccatggctcaatctccagcttcgtcgccggctttgtcccccacccacacgccggtggccactccacctaggagggcgttgtcgccgtctccgtcgtctgtgtcaccagcggcttcacccgccaccggaaattctcctccgacaccacctacttcttctccttcggaatcgccacttccatcagctgctactcccaacatctctccctcgaccatctcgactccgccatctgaaggaccagctgcatacggtgccgttttcaacagagtt

SEQ ID NO: 823 - DNA, 402 bp, Glycine max
  Clone ID: LIB3072-046-Q1-K1-C9
gactttgagttcgaactaaacaattgggttcaggctgcctcgatcatggagaggaaaacatttgggtttttgttcttgctcctccttgtcttagcttctgatgtgacggtgaagagagcagaggcgaaagattgcttgacaaggaggcacgggttccagggtagatgcttattcgacaggcaatgtgcacatgtgtgcaggagcgatggtttcatcggtggtcagtgccgaggccctcttcgcaaatgcttttgcagcaggccatgttgatcgaaattactactgccaaagaggccatgaaataaacaaacaaacaaataaataaatagctctaaccgacacatatgtacgtagcgtcggggttctagctagctaggtaggtacgtgtgtcttttgttatcg

SEQ ID NO: 824 - DNA, 363 bp, Glycine max
  Clone ID: LIB3072-046-Q1-K1-D1
gacagcataaacaattaatacagatgagtttggggaacgggatggcggcgctaaaggtgcgtctgttgcttctcttccttgtgggggctacagctgcacgcatggaactgagcttcttcaaaagtgatcagtcatcaagttatgatgatgatgagtattcaaaaccatgctgtgatctctgcatgtgcacacgctcaatgcctactcaatgcagctgtgaagatattatgcagaattcatgccactcagattgtaagagctgtatgtgcacactctcacagccagtacagtgtcgttgtcttgacaccaacgacttctgctacaaaccttgcaagtccagagatgactagaaaaactaatagc

SEQ ID NO: 825 - DNA, 379 bp, Glycine max
  Clone ID: LIB3072-046-Q1-K1-D10
gattcacacaactaagtaaggagttcttccatagccccccaaaaatgaagagcaccatcttctttgctctctttctcttttgtgccttcaccacctcatacctaccttcagccatcgctgatttcgtgctcgataatgaaggtaaccctcttgaaaatggtggcacatattatatcttgtcagacataacagcatttggtggaataagagcagccccaacgggaaatgaaagatgccctctcactgtggtgcaatctcgcaatgagctcgacaaaaggattggaacaatcatctcgtccccatatcgaatccgttttatcgccgaaagccatcctttgagccttaagttcgattcatttgcagttataatgctgtgtgt

SEQ ID NO: 826 - DNA, 88 bp, Glycine max
  Clone ID: LIB3072-046-Q1-K1-D12
gttaacaacataacatatcaaaaacagacgacagatacactcttttagttcattaacctcttcagaaaaaacaactacaacatctaat

SEQ ID NO: 827 - DNA, 414 bp, Glycine max
  Clone ID: LIB3072-046-Q1-K1-D2
ccaagccttccaacgcttccaaaaaacctccgaatggggccggcaaaaccatttattaaggttggggtggaaaaccaccatggtggtgctaaaggtgtgttggttgcttcttttcctggtgggggttacagctgcacgcatggaactgagcttcttcaaaagtgatcagtcatcaagttatgatgatgatgagtattcaaaaccatgctgtgatctctgcatgtgcacacgctcaatgcctcctcaatgcagctgtgaagatattaggctgaattcatgccactcagattgtaagagctgtatgtgcacacgctcatagccaggacagtgtcgttgtcttgacaccaacgacttctgctacaaaccttgcaagtccagagatgactagaaaaactaatagctctctcaaatgga

SEQ ID NO: 828 - DNA, 364 bp, Glycine max
  Clone ID: LIB3072-046-Q1-K1-D3
caactcgaataatcagagaaaagccatttgcggagcagggctaagaaaatgaatagcactatcttgctcgctatctttctactttgcgccttcacctaatacctaccttccgccaccgtccaatacgtgctcgacgtggatggcgatccgattcataacggcttcatatactacgttttgccggcaataagaagaaacggtggcagaatacaacgagccccactcgggaaagacacttgccctatcactgttgtgcactctaccaatccaaactctaaggggttagaaactaagcttgaatctgcataccccgcctattacataaacgacaccctaattttgcaaataaagatcagatacccac

SEQ ID NO: 829 - DNA, 354 bp, Glycine max
  unsure at all n locations
  Clone ID: LIB3072-046-Q1-K1-D4
ggagcgtgtcaagcgctaagggggaaggagaaacagaattgaattgaattgcgtttgcgccattgaaaatcggaagtaatggaattgcattgctccgtgaaaaaattggaaaacgagaaagcgtttgagtttctcggaggcgttcctcttctgcagaggcttccgagctcgtctctgaggaagatagctcaacttgtggatgtcaaacactgtgagccaagagagtatgttgttcgcgagggtgaacctggagatggcgtgtacttcatattggatggagaggctgangttcttggatctgctatggccaatgatgaaaatcgaccagagttccaattgaaacaatatgactac

SEQ ID NO: 830 - DNA, 414 bp, Glycine max
  Clone ID: LIB3072-046-Q1-K1-D5
cgataagacaacaaaaggggactttgagttcgaactaaacaattcaattcaatctggctcgagcatggagaggaaaacatttgggtttttgttcttgctcctccttgtcttagcttctgatatgacggtgaagagagcagaggcgaaagattgcttgacaaggaggcacgggttccagggtagatgcttattcgacaggcaatgtgcacatgtgtgcaggagcgatggtttcatcggtggtcagtgccgaggccctcttcgcaaatgcttttgcagcaggccatgttgatcgaaattactactgccaaagaggccatgaaataaacaaacaaacaaataaataaatagctctaaccgacacatatgtacgtagtgtcggggttctagctagctaggtaggtacgtgtgtctttt

SEQ ID NO: 831 - DNA, 479 bp, Glycine max
  unsure at all n locations
  Clone ID: LIB3072-044-Q1-K1-H3
cacgacagaagggggcagccactctgtgagagaaagagatagtgtggtagagagagaggagcggaggagagaaaatgacgacgaggttcaagaagaacaggaagaagagaggccacgtcagcgccggtcacggtcgtatcgggaagcaccgcaagcatcccggtggtcggggtaacgccggtggcatgcaccaccaccgcatcctcttcgacaagtaccatcccggtttcttcggaaaggtgggtatgcgctacttccacaaactccgcaacaaattctactgccccatcgtcagcattgataagctatggtccctcctaccccaggaggccaaggacaaggccaccgncgacaaggcgccattgctcgatgtcacccagttcggttactttaaggttttgggtaaaggggttttgcctcagaaccagcctctggtcgtgaaggccaagcttgtttccaagatcgccgagaagaagatc

SEQ ID NO: 832 - DNA, 485 bp, Glycine max
  Clone ID: LIB3072-044-Q1-K1-H5
gacagcaaattcaattaataaagatgagtttgaagaacaacatggtggtgctaaaggtgtgtttgttgcttcttttccttgtgggggttacagctgcacgcatggaactgagcttcttcaaaagtgatcagtcatcaagttatgatgatgatgagtattcaaaaccatgctgtgatctctgcatgtgcacacgctcaatgcctactcaatgcagctgtgaagatattaggctgaattcatgccactcagattgtaagagctgtatgtgcacacgctcacagccaggacagtgtcgttgtattgacaccaacgacttctgctacaaaccttgcaagtccagagatgactagaaaaactaatagctctctcaaatggacgaagcccctttaggctttgtttgttatgttaggggagacaaataaaacaagaaataaaagctcagtggacggtaatttgcttttagtaaatttggtcatttttatcag

SEQ ID NO: 833 - DNA, 377 bp, Glycine max
  Clone ID: LIB3072-044-Q1-K1-H7
ttctgacagagatttctactgatggggacgacttcgaggaacctccgggaggttctggatgtgagatgggggcttattgttattgctgtgataacacctccacgcatggcacttagcttcttacaacgtgatcattcatcaacttatgatcatgatgagtatccaaaaccatgctatgatctctgcatctgctcacgctcaatgcctactgaatccagttgtgaaaatcttaagatgaattcatgccactcagattgctagatctgtctgtgcacacgctcacagccaggacatcgtctgcgacttgacaacaacaacttctgctacaaaccttgcaagtccacagatgactagaacatctaatagctctctgatat

SEQ ID NO: 834 - DNA, 375 bp, Glycine max
  Clone ID: LIB3072-046-Q1-K1-A1
gacagcaaaaacaattaataaagatgagtttgaggaacaacatggtggtgctaaaggtgtgtttgttgcttcttttccttgtgggggttacagctgcacgcatggaactgagcttcttcaaaagtgatcagtcatcaagttatgatgatgatgagtattcaaaaccatgctgtgatctctgcatgtgcacacgctcaatgcctcctcaatgcagctgtgaagatattaggctgaattcatgccactcagattgtaagagctgtatgtgcacacgctcacagccaggacagtgtcgttgtcttgacaccaacgacttctgctacaaaccttgcaagtccagagatgactagaaaaactaatagctctctaaatgga

SEQ ID NO: 835 - DNA, 387 bp, Glycine max
  Clone ID: LIB3072-046-Q1-K1-A10
gattcacacaactaactaagaaagtcgggcatgagccccccaaaaatgaagagcaccatcttctttgctctctttctcttttgtgccttcaccacctcatacctaccttcagccatcgctgatttcgtgctcgataatgaaggtaaccctcttgaaaatggtggcacatattatatcttgtcagacataacagcatttggtggaataagagcagccccaacgggaaatgaaagatgccctctcactgtggtgcaatctcgcaatgagctcgacaaagggattggaacaatcatctcgtccccatatcgaatccgttttatcgccgaatgccatcctttgagccttaaattcgattcatttgcagttataatgctgtgtgttggaatt

SEQ ID NO: 836 - DNA, 268 bp, Glycine max
  Clone ID: LIB3072-046-Q1-K1-A11
acagctccttttagtcttcagacagcgatccacacaactaagtaatagtgtcttttataacccccccaaccttaacaacaccatcttctttgctctctttctctcttttgccttcaccacctcatacctaccttcatccatctctcatttctttctctataataaacctaaccctccccaaaataattgcacatattacatctcatcatacataacatcattttatagaataaaatcacccccaacttgaaattaaatattccctctc

SEQ ID NO: 837 - DNA, 386 bp, Glycine max
  Clone ID: LIB3072-046-Q1-K1-A12
ggcttattcacgcaacggaataagaaatgaagagtactatcttctttgctctctttctagtttgtgccttcaccatctcatacctgccttcagccaccgctcagttcgtgctcgacactgatgatgatcctcttcaaaacggtggcacatactatatgttgccagttatgggaggaaagggcggtggaatagaagtagattcaactggaaaagaaatatgccctctcactgttgtgcaatcacccaatgagctcgataaggggattggactagtctttacatctccattacatgccctttttatcgccgaaggctatcctttgagcattaagtttggttcatttgcagttataacgctgtgtgccggcatgcctactgagtgggct

SEQ ID NO: 838 - DNA, 380 bp, Glycine max
  Clone ID: LIB3072-046-Q1-K1-A4
gattcatgcatctgaataattaaaaaaagccattgccatagcagcctaagaaaatgaagagcactaccttgttcgctatctttctactttgcgccttcacctcatacctaccttccgccaccgcccaggacgtgctcgacgtggatggcgatccgattcggaacggtttcatatactacgttttgccggcaataagaggaaacggtggcggaatagaacgagccgcactcgggaaagacacttgccctatcactgtagtgcaatctcccaatccaaactctaaggggttagaaattaagtttgaatctgcataccccgcctattacataaacgaaaccctaattttgcaaataaagttcagttacccacagcagtgtgaa

SEQ ID NO: 839 - DNA, 381 bp, Glycine max
  Clone ID: LIB3072-046-Q1-K1-A5
aggggctcagcataaacaattaataaacataatttggaggagcgatcatttgtagctaaaggcgtctttgttcctccttttccttgtgggggttacagctgcccgcatggaactgagcttcttcaaaagtgatcagtcatcacgttatgatgatgatgagtattgaaaaccatgctgtgatctctgcatgtgcacacgctcaatgcctcctcaatgcagctgtgaagatattaggctgtattcatgccactcacattgttagagctgtatgtgcacacattcacatccaggacagtgtcgttgtcttgacaccaacgacttctgctacaaacctcgcaagtccagagatgactagaaaaactaattgctctctcaaatgga

SEQ ID NO: 840 - DNA, 396 bp, Glycine max
  Clone ID: LIB3072-046-Q1-K1-B1
ccgacagaaggggatatagattagtgttttctgcacgcctgattggagtggttctcgttgccgatgccctatattttggtgctcaacaaattgggcgctatcttcaggatatctggacccattgaggtatgcttttggttaatcctcacggagacaatattccttgtggataagcatatgcagacagcaggctaaggaactcaattttgaatgctgacccttggcagaggctttccgagattatcataattgcccccatcttttctcactactggattttaatgtaagtttcttccatgtagctatgtattaataccttttttgtacaaatggttgtgtttttcttagaaatttccttaacaaaaaaataataataattgtgtcctattactgtcc

SEQ ID NO: 841 - DNA, 350 bp, Glycine max
  Clone ID: LIB3072-046-Q1-K1-B3
gtccaaggctactttaatcagggctcggatcacaaccgttttctatatgttatgtggctgctttggctatgcttcttttatgcaagcccgggaaaccttctcactggcttcggcttctataacccatattggctcattgacatagccaatgttggcatagttatccaccttgttggtgcataccaagtttactgccaacccctcttctcattcgtggaatcacatgcagcagcaaggttcccaaatagtgattttatgagcagagagtttgaagtaccaatacctggctgtaaaccctacaggctcaacctcttcaggttggtttggaagacaatttttgtgattttgtc

SEQ ID NO: 842 - DNA, 396 bp, Glycine max
  unsure at all n locations
  Clone ID: LIB3072-044-Q1-K1-H12
gattcacacaactaactaagaaagtcttccatagccccccaaaaatgaagagcaccatcttctttgctctctttctcttttgtgccttcaccacctcatacctaccttcagccatcgctgatttcgtgctcgataatgaaggtaaccctcttgaaaatggtggcacatattatatcttgtcagacataacagcatttggtggaataagagcagccccaacgggaaatgaaagatgccctctcactgtggtgcaatctcgcaatgagcccgacaaagggattggaacaatcatctcgtccccatatcgaatccgttttatcgccgaaggccatcctttgagccttaagttcgattcatttgcaggtataatgctgngtgttggaattcctaccgagt

SEQ ID NO: 843 - DNA, 332 bp, Glycine max
  unsure at all n locations
  Clone ID: LIB3072-046-Q1-K1-B6
gcgttagaacacntcagaaaggactccacattgacactgattaaagattacttcagagagcgacattttttatataaccacatacttgttcctccttttcattacgacagatacatacgcacgcatgaaaacgacctaattctaaagttatcagacatcaacttatgattacgattagtattcaaaaccatactgtgatctctgcatatgcacacactcaattccttcttaatgaagacgtcaatatattacgcttaatccatgacaatcaaattgtacgagctgtatatgcacacattcacatccaagacaatgtcgatgtctttacacca

SEQ ID NO: 844 - DNA, 483 bp, Glycine max
  Clone ID: LIB3072-044-Q1-K1-F7
gacagcaaattcaattaataaagatgagtttgaagaacaacatggtggtgctaaaggtgtgtttgttgcttcttttccttgtgggggttacagctgcacgcatggaactgagcttcttcaaaagtgatcagtcatcaagttatgatgatgatgagtattcaaaaccatgctgtgatctctgcatgtgcacacgctcaatgcctcctcaatgcagctgtgaagatattaggctgaattcatgccactcagattgtaagagctgtatgtgcacacgctcacagtcaggacagtgtcgttgtcttgacaccaacgacttctgctacaaaccttgcaagtccagagatgactagaaagactaataactctctcaaatggacgaagcccctttaggctttgattgttatgttaggggagacaaataaaacaagaaataaaagctcagtggccagtaatttgcttttagcaaatttggtcatttctaat

SEQ ID NO: 845 - DNA, 345 bp, Glycine max
  Clone ID: LIB3072-044-Q1-K1-F8
caccgattgggacaacgatttcaattagataagatgagattggagaacaacatggtggtgctaaaagtgtgtctgtggcttcttttacttagctcgactacagctgcacgcatggaactgagcttcatcaaaagtgatcattcatcaagttatgattatgatgattattcaataccatgctagaatctctagttgtgtacactctcaatgcctactcaatgcagctgagaatatattatgcttaattcacgccactcatattatctgaactatatgagcacacactcacagtcaggacattatcgttgacttgacatcgacgacttctactcctaacctttcaag

SEQ ID NO: 846 - DNA, 432 bp, Glycine max
  Clone ID: LIB3072-044-Q1-K1-G10
agcaacaggtttagcaacctttggaagtgcggaaaggtagagctgaattgtctgaacaagatatatttgtaatcccagcaggttatccagttgtggtcaacgctacctcagatctgaatttctttgcttttggtatcaatgccgagaacaaccagaggaacttccttgcaggttcgaaagacaatgtgataagccagatacctagtcaagtgcaggagcttgcgttccctgagtctgcaaaagatattgagaacctaataaagagccaaagtgagtcctactttgtggatgctcagcctcagcagaaagaggaggggaacaagggaagaaagggtcctttgtcttcaattttgagggctttttacttgataagtacgtagtactaaaatgtatgctgtaataactcatagtgagcgaggaaagtttcgggct

SEQ ID NO: 847 - DNA, 319 bp, Glycine max
  Clone ID: LIB3072-044-Q1-K1-G11
gacacacagtttaaacaattaataaagatgagtttgaagaacaacatggtggtgctaaaggtgtgtttgttgcttcttttccttgtgggggttacagctgcacgcatggaactgagcttcttcaaaagtgatcagtcatcaagttatgatgatgatgagtattcaaaaccatgctgtgatctctgcatgtgcacacgctcaatgccttctcaatgcagctgtgaagatattaggctgaattcatgccactcagattgtaagagctgtatgtgcacacgctcacagccaggacagtgtcgttgtcttgacaccaacgact

SEQ ID NO: 848 - DNA, 340 bp, Glycine max
  Clone ID: LIB3072-044-Q1-K1-G12
tatgggtcacacagctgagacacttaataaagatcagttagaagaacttcaaaattgtggtaaaggtgtgggtgttgctacttttccttgtccagcttacatctgcactcattcaactgagcttcttcaaaagtgatcagtcattaacttatgatgattatgagtattcataaccattctgtaatctctgcatgtgcacacgctcaatacctactcaatacatctgtgaatatattatgctgaattcattccactcatattgtaatatctctatgttcacactctcacagccaatacagtgtcgttgtcttgacaccaacgacttatgctacaaaccttg

SEQ ID NO: 849 - DNA, 453 bp, Glycine max
  unsure at all n locations
  Clone ID: LIB3072-044-Q1-K1-G2
cgacagaaggggacttttgccaagtgctaccaatgcccgcaaaagtccctgcttcaacaacacaatgctgcatcattgaaaattatatatgttcttctgctttaaacatatagggacgcatcagcatctccacccttgtgtatttcccctatctttttgtttaatctctctagctataaatattgttaatgctgatgttcccttgtgtagaaaggcaacattgttatatttcgctttcgaatcattttggttaatcataagcatgcactatagttatagcatatgtagggagtgatgtttggcaattggcatatagcgacctcaagtatagcctgcatgtttccaataatgtctntgcattccaatataatcatttttttcttctccaaatctcaagtattggtagaacatgtatgtttggtgaaagttacattataaaagcgtgtagtatat

SEQ ID NO: 850 - DNA, 476 bp, Glycine max
  Clone ID: LIB3072-044-Q1-K1-G3
gaacaccaattagacaatagacagcgacgatgaaagcaatgacagcaacgacaacgtttgatgtctctgccgcttgcttccgtgcccctccttcttgttcaccgaatccatgccacaccagtttttcagttataaactccctgaatcctcacaagggacgacggataagcgttgctgttccacctaagtttccaagcttccggagggaagcagctctgcaggggaatttggaggctgttagagtcccaacttcggtgcctgtgcgtgtagcatacgaacttcttctagctggtcatcgatatttggatgtaaggactccagaagagttcaatgctggacacgctcctggcgcaattaacataccttatatgttcagagttggatcggggatgacaaagaatagcaactttattagagaggtgtcttcaaattttaggaaagaagatgaaattattggtgggtgtgagcttggtaaa

SEQ ID NO: 851 - DNA, 441 bp, Glycine max
  Clone ID: LIB3072-044-Q1-K1-G4
ggcacaagtgagtttgttgatcgagataactagaaacagtgtgatgaaaatgaaggtccttgttttcttcgttgctacaattttggtagcatggcaatgccatgcgtacgatatgttccctcttcgaatgaacactggctatggtgcccgtactccggaggtgaaatgcgcaagttggaggcttgctgtggaagcacacaacatctttggctttgagaccattcctgaagagtgcgttgaagcaacaaaggaatacatccatggcgaacaatatagatcagactccaaaacagctaaccaacaagcttactcttatgccagagacctcgaagtccatcccaaggacacatttgtgttcagtatagatggcaccgtactctctaatattccatactacagaaaacatggatatggcgtggagaaatttaactttaccttgta

SEQ ID NO: 852 - DNA, 61 bp, Glycine max
  Clone ID: LIB3072-044-Q1-K1-G5
gtggatatgcaatagaatgttcacaatttagtttaatttataaataaaaagtaatatgcac

SEQ ID NO: 853 - DNA, 160 bp, Glycine max
  unsure at all n locations
  Clone ID: LIB3072-044-Q1-K1-G6
tgggatagaaagaaaggacggtggccggtggcggtgagtggtgtgtttgggaaagcgtaagagtaagaatggagggtggagaggaaggattggncatgatgtctgaatgatcggagtttcagtacccgtgcatggcattggataaatttactgttcacgt

SEQ ID NO: 854 - DNA, 311 bp, Glycine max
  unsure at all n locations
  Clone ID: LIB3072-044-Q1-K1-G7
cgattttgtgtatatgcaatggcttggagacaagatagggcaagatatgaatgaaaagtagtgatcgcaacaatttatgatcaacctaaagggtcctactgctatgtgtacctgatccagagtaacctacgcaaccatgcatgatactaactctactattaacaaacctaatttaaattcaatagtcaacgttatacaatgntgtcgattttgaaatcactctcttgatccagcttaatctgattgtaacacatactcgtttaggcagctatcattgtacccaatattcttggtatctatagccctatcca

SEQ ID NO: 855 - DNA, 438 bp, Glycine max
  Clone ID: LIB3072-044-Q1-K1-G8
tcccggtcgaccgcgcgtccgaccactcctacaagacgacagaatttgactcacacatttaactaagaaagtcttccatgggcccccaaaaatgaagatcaccatcttctttgggctctttctcttttgtgccttcaccacctcatacctaccttcagccatcgctgatttcgtgctcgataatgaacgtaaccctcttgaaaatggtggcacatattatatcttgtcagacataacagcatttggtggaataagagcatccccaactgcaaatgaaagatgccctctcactgtggtgcaatctcgcaatgagctctacaaacggattggaacaatcatctcgtccccatatccaatccctcttatcgtcgaacgccatcctttgagccttaagttctattcatttgcaattataatgctccgtgttggaattcctac

SEQ ID NO: 856 - DNA, 483 bp, Glycine max
  unsure at all n locations
  Clone ID: LIB3072-044-Q1-K1-H1
gacagtaaaaacaattaataaagatgagtttgaagaacaacatggtggtgctaaaggtgtgtttgttgcttcttttccttgtgggggttacagctgcacgcatggaactgagcttcttcaaaagtgatcagtcatcaagttatgatgatgatgagtattcaaaaccatgctgtgatctctgcatgtgcacacgctcaatgcctcctcaatgcagctgtgaagatattaggctgaattcatgccactcagattgtaagagctgtatgtgcacacgctcacagccaggacagtgtcgttgtcttgacaccaacgacttccgctacaaaccttgcaagtccagagatgactagaaaaactaatagctctctcaaatggacgaagcccctttaggcttntgttgntatgttaggggagacaaataaaacaagaaataaaagctcagtggccagtaatttgcttttagcaaatttggtcatttttatt

SEQ ID NO: 857 - DNA, 497 bp, Glycine max
  unsure at all n locations
  Clone ID: LIB3072-044-Q1-K1-H10
tgttaggatttaaacaactttgccgaagatttaaagcaagagggtaaaatagcaccagatgaaccagcaattctgcccccgttgcctatagtccctaaacctgaaaagcgtaaacccatatatgtaactcctcaatcaaagagaattgattacagggatagagattgggatagggagcgtgatagggactttgagctgatgcctccaccaggaagtcataaaaaggagtatgctaccccgatggatgttgaccaacccattgatccaaatgaaccgacatactgtgtttgtcatcaggtatcttttggagatatgattgcttgtgacaatgaaaattgccaaggaggtgaatggttccactattcgtgcgttgggctaacgcangagacaatgttcaagggaaagtggtactgtccgacttgcatattactcccacaatgtcaacgatgaatctttgcacgaactaaattacattcataaatgaccactgtttcaat

SEQ ID NO: 858 - DNA, 199 bp, Glycine max
  Clone ID: LIB3072-044-Q1-K1-H11
gatagatagctccgttaattagggtttttgtgatctgcaagctacgatgggtaagggaacggggagtttcggtaagagaaggaacaagacccacaccctctgtgtgaggtgtggccgccgcagtttccacctccagaagagtcgttgcgccgcgtgcgctttccccgctgcgcgcaccaggaaatataactggagcgtg

SEQ ID NO: 859 - DNA, 476 bp, Glycine max
  Clone ID: LIB3072-044-Q1-K1-F6
gacagcaaaaacaattaataaagatgagtttgaagaacaacatggtggtgctaaaggtgtgtttgttgcttcttttccttgtgggggttacagccgcacgcatggaactgagcttcttcaaaagtgatcagtcatcaagttatgatgatgatgagtactcaaaaccatgctgtgatctctgcatgtgcacacgctcaatgcctcctcaatgcagctgtgaagatattaggctgaattcatgccactcagattgtaagagctgtatgtgcacacgctcacagccaggacagtgtcgttgtcttgacaccaacgacttctgctacaaaccttgcaagtccagagatgactagaaaaactaatagctctctcaaatggacgaagcccctttaggctttgtttgttatgttaggggagacaaataaaacaggatataaaagctcagtggccagtaatttgcttttagcaaaattggtcat

SEQ ID NO: 860 - DNA, 512 bp, Glycine max
  unsure at all n locations
  Clone ID: LIB3072-044-Q1-K1-E11
tggggctcttaaagattcagattctgggtagagagaaagagagagaaatggctttcacgatttccagatctcaatctgctttgacagatagagagaaggagaatcttgacaacttagttgacaaggagtgtgcaaccacagagggtatgatatcgagccagctcaagttgaagtcttctttgtcatccaaagcgtcttctcatcaaagcatggacaaacatgcaatccttcgacgtatcaggcaacgcaggtttaataacaaagccaaaaccgctctggaagctctcataggcacctcagaagccaacaataccggcaccgcccaagaacagaagtggcttcaactgggtgactctttctcatctccttaactggaaacacaatctccccccagtttgcaacccatctataaataccctctntagcttccttcacccaacanagtcatcttttccatacgcttgcatggctaggaaaggaaatccaacccgatctttatcggcatgcttaag

SEQ ID NO: 861 - DNA, 446 bp, Glycine max
  Clone ID: LIB3072-044-Q1-K1-E2
atagcaatactgggtcacagaaatgttcatcagaggcaagaaatgagaaaagcttatgaggagatttaccaagaggatctcatcaaacgccttgagtccgagatctctggtgactttgagagagctatgtaccggtggatgttgcagcctgcggatcgtgatgctgttttggtgaatgtggcaatcaagaatggcaccaaagactaccatgtgattgcagagattgcttgcgtcctatcagctgaagagctcttggcagtgaggcgggcctaccaccgacgctacaagtgttccttggaggaagatgtggcagctaacaccaccggcaatcttcgccagctgttggttggattggtgacctcatataggtatgagggtgatgagatcaatgtaaaattttcacaaactgaagctaatgttcttcatgaatctgtcaaggagaagaa

SEQ ID NO: 862 - DNA, 433 bp, Glycine max
  Clone ID: LIB3072-044-Q1-K1-E3
atcggattgctgaagaccacattagggcaccgctggcagagaggacagaagggtacgactagatagaccacgacagatctcgtataccgcctcgagtcccagatctatggtgactgtgagagagctatgtaccggtagatgtcgctttctagggatcgagattctgacgcggtgaatgcagcaattaagaatggcatcatggactcccatgtgaatgcactgtgacgcttgtgtcctatcagctgatgagctattgctgggaggcccaacttccaccgcctgtacaagagttccttgttggaagatgtggcaattaacaccaacggcaatcttctccagcttttggatagattggcgacctgatataggtatgaggctgatgccatcaatgtaaaattttcacagactgaagctaatgttcttcatgaatctg

SEQ ID NO: 863 - DNA, 463 bp, Glycine max
  Clone ID: LIB3072-044-Q1-K1-E4
tatgcaactgaataattaagaaaagccatttccggagcagcctgagaaaatgaagagcactagctggttcgctatctttctactttgcgccttcacctcatacctaccttccgccaccgcccaggacgtgctcgacgtggatggcgatccgattcggaacggtttcatatactacgttttgccggcaataagaggaaacggtggcggaatagaacgagccgcactcgggaaagacacttgccctatcactgtagtgcaatctcccaatccaaactctaaggggttagaaattaagtttgaatctgcataccccgcctattacataaacgaaaccctaattttgcaaataaagttcagttacccacagcagtgtgaaagaaagaatccttggtgggccatttctaaggatatatctgaaggaccacctgctattaaactctctgggttccatggtactgaactc

SEQ ID NO: 864 - DNA, 492 bp, Glycine max
  unsure at all n locations
  Clone ID: LIB3072-044-Q1-K1-E5
ggcatcgaacagagagagagagaatggcagcacttggtgggaatcgtgatgtgacaggaagccagaacagcgttgagatcgatgctctagctcgctttgctgttgaagaacacaacaaaaaacagaatgcccttttggagtttgaaaaggtggtaactgcgaaacagcaagtggtttctggtaccttgtacaccatcactttggaggcaaaagatggtgggcaaaagaaggtttatgaagccaaagtttgggagaagtcatggttgaacttcaaggaggtgcaagagttcaagcttgttggagatgcacctgcatagtctagtgcttaattaggttgctgaagagtgaagaatgagacagcctggttcgaaggggaaaagcctaaggatatatcaaaggatcctatatgtataaaataaatgttgcttttttaccttcggtattgatatctgaagtctaattngacatcctatatatgaatatatgatctat

SEQ ID NO: 865 - DNA, 260 bp, Glycine max
  Clone ID: LIB3072-044-Q1-K1-E7
ttgtgacagcgaattcagttaataaagatgagtttgaggaacaacagggtgatgctaaaggtgtgtttgatgcttcttttacttgtgggggatacagctgcactcatgaaactgagcttgttcaaaagtgatcattcatcaagttatgatgatgatgagtattcaaaaccatgctgtgatctctgcatgtgcccacactaaatgcctactcaatgcagctgtgataatattaggctgaattcatgccactcagattagta

SEQ ID NO: 866 - DNA, 483 bp, Glycine max
  unsure at all n locations
  Clone ID: LIB3072-044-Q1-K1-F1
gacagcaaaaacaattaataaagatgagtttgaggaacaacatggtggtgctaaaggtgtgtttgttgcttcttttccttgtgggggttacagctgcacgcatggaactgagcttcttcaaaagtgatcagtcatcaagttatgatgatgatgagtattcaaaaccatgctgtgatctctgcatgtgcacacgctcaatgccttctcaatgcagctgtgaagatattaggctgaattcatgccactcagattgtaagagctgtatgtgcacacgctcacagccaggacagtgtcgttgtcttgacaccaacgacttctgctacaaaccttgcaagtccagagatgactagaaaaactaatagctctctcaaatggacgaagcccctttaggcttntgttgttatgttaggggagacaaataaaacaagaaataaaagctcagtggccagtaatttgcttttagcanattnggtcatttttatt

SEQ ID NO: 867 - DNA, 388 bp, Glycine max
  Clone ID: LIB3072-044-Q1-K1-F10
gacagcaaattcaattaataaagatgagtttgaaggacaacatggtggtgctaaaggtgtgtttgttgcttcttttccttgtgggggttacagctgcacgcatggaactgagcttcttcaaaagtgatcagtcatcaagttatgatgatgatgagtattcaaaaccatgctgtgatctctgcatgcgcacacgctcaatgcctcctcaatgcagctgtgaagatattaggctgaattcatgccactcagattgtaagagctgtatgtgcacacgctcacagccaggacagtgtcgttgtcttgacaccaacgacttctgctacaaaccttgcaagtccagagatgactagaaaaactaatagctctctcaaatggacgaagccccttt

SEQ ID NO: 868 - DNA, 424 bp, Glycine max
  Clone ID: LIB3072-044-Q1-K1-F2
gacagcaaaaacaattaatgaagatgagtttgaagaacaacatggtggtgctaaaggtgtgtttgttgcttcttttccttgtgggggttacagctgcacgcatggaactgagcttcttcaaaagtgatcagtcatcaagttatgatgatgatgagtattcaaaaccatgctgtgatctctgcatgtgcacacgctcaatgccttctcaatgcagctgtgaagatattaggctgaattcatgccactcagattgtaagagctgtatgtgcacacgctcacagccaggacagtgtcgttgtcttgacaccaacgacttctgctacaaaccttgcaagtccagagatgactagaaaaactaatagctctcttaaatggacgaagcccccttaggctttagttgatatgttaggggagacaaataaaa

SEQ ID NO: 869 - DNA, 486 bp, Glycine max
  unsure at all n locations
  Clone ID: LIB3072-044-Q1-K1-F4
ggatggcgatgctttcgcttctgttgtgtcttcgtcctctccgaccactcttcctcggtcaagcccgtcggcctcattgcactctcgttgcctacgacaaggccacctccgtcgcagagcaagaccatcacaagaaagtcctctgtaaaatctgagagctgagtgtttttagatctgaaatctgagtttttttattttagatctgagatctgcggagcaccgtgcgactctccctccgccaactacgtcctcctccaccagaccacaacttcttcaccgacgactgcgacaacgacttcctctccggcggcgacggcggctgctccttctccgcctcctcgctggcgacaactnccacccccaccaccaccaccactaccaggccaacaaccttcctgcgccactgccactcttctacttctttcattnttcctctccctgttcatcgcattnntctgggttttttatgttcaagatttggttttc

SEQ ID NO: 870 - DNA, 455 bp, Glycine max
  Clone ID: LIB3072-044-Q1-K1-F5
gacacaactaactaagaaagtcttccatagccccccaaaagtgaagggcaccatcttctttgctctctttctcttttgtgccttcaccacctcatacctaccttcagccatcgctgatttcgtgctcgataatgaaggtaaccctcttgaaaatggtggcacatattatatcttgtcagacataacagcatttggtggaataagagcagccccaacgggaaatgaaagatgccctctcactgtggtgcaatctcgcaatgagctcgacaaagggattggaacaatcatctcgtccccatatcgaatccgctttatcgccgaaggccatcctttgagccttaagttcgattcatttgcagttataatgctgtgtgttggaattcctaccgagtggtctgttgtggaggatctaccagaaggacctgctgttaaaattggtgagaacaaagatgcac

SEQ ID NO: 871 - DNA, 433 bp, Glycine max
  unsure at all n locations
  Clone ID: LIB3072-044-Q1-K1-E10
gacagcaaattcaattaataaagatgagtttgaagaacaacatggtggtgctaaaggtgtgtttgtggcttcttttccttgtgggggttacagctgcacgcatggaactgagcttcttcaaaagtgatcagtcatcaagttatgatgatgatgagtattcaaaaccatgctgtgatctctgcatgtgcacacgctcaatgcctcctcaatgcagctgtgaagatattaggctgaattcatgccactcagattgtaggagctgtatgtgcacacgctcacagccaggacagtgtcgttgtcttgacaccaacgacttctgctacaaaccttgcaagtccagagatgactagaaaaactaatagctctctcaaatggacgaagcccctttaggcttntgttggtatgttaagggagacaaataaaccagaaataa

SEQ ID NO: 872 - DNA, 317 bp, Glycine max
  unsure at all n locations
  Clone ID: LIB3072-044-Q1-K1-C4
ggatttgattgttgtgcatccatcgttaagctagtggcgatcggatccagctacagcatagagatcaaggaaggaaggaaggaagatgttgggtgctataaggaacaagagtattcgtcctgccttctccgcaatcagacactagtcttatgcagctaaagagattactgtcagggacgctctgaacttcgtactcgatgaggaaatgtgaggtgatcctaaagtgttcttgatgggtgaagaggttgnggaatactatggtgcgatcacgatatgacatgggctgatggacaggtacggtcaccacagggtcatat

SEQ ID NO: 873 - DNA, 405 bp, Glycine max
  Clone ID: LIB3072-044-Q1-K1-C5
ggcatttgcagcacaaaaacgtcaacatggcggccaaactcactctatcttctgccttttccctcaaaacttcatttctgccaaaatcaccatcattttctctaggtttatactcccccagaactaatgttaccggtgtcaaagttcatgctaaattaggtggtggagatgaacaagccaagaaaggaggaaagaagaaattcataaccagagaggaagaaccacaacagtattggcagacagcaggacaaagggaaggagagaatcccatgaagacccctattccttacattatcatatctggtatgtcaactcctttcgtaatcttggcaattgcttttgcaaatggctggattaaggtacctgttcgatgagacagcacttcgttgtctactctactcctcg

SEQ ID NO: 874 - DNA, 300 bp, Glycine max
  Clone ID: LIB3072-044-Q1-K1-C6
aggtgtactgcaactttgctctctgtgaggcttcaatggctaattagcgataagcttacagtgaccagtaggcatgggagacattacctttgtagtacctaaatcctgccgcgaatggtgcgtcaagcaacattccgtcgacatcgaggcctacaccgattccaccttcgatctccaaccgaagctcgagcaagccgttatcgccgatgattactccggcggagtacagaactctatctataccgtgactgctacctacgctgtctttcacgtgatagagggtggtgcaacattcatacc

SEQ ID NO: 875 - DNA, 383 bp, Glycine max
  Clone ID: LIB3072-044-Q1-K1-C7
gacacgcagttgtattgtagaactgaacaagggtttctctttctctttctctgtctgcttcttcagtttctctcgtttcaatcgaaaaaaatcatgggcagaaaattcttcgtcggtggcaactggaaatgcaatgggaccactgaggaggtgaagaagattgttactactttaaatgaagctaaagtccctggagaagatgttgtagaagttgttgtgagccctccttttgtgttccttccttttgtaaaaagtttgctgcgccctgatttccatgtctcggcccaaaattgttgggttcgcaaaggtggtgcttatactggagaggctagtgctgaaatgcttggtaatctgggaattccttgtgttattattggtcactc

SEQ ID NO: 876 - DNA, 489 bp, Glycine max
  unsure at all n locations
  Clone ID: LIB3072-044-Q1-K1-C8
ggcttcgcctcattttctagcttccaaaccctaacactcctcttgctcttcgatcatcacctctccacaatgccgccgaagttcgacccctcccagatagtcgacgtcttcgtccgcgttaccggcggcgaagtcggcgcggcgagttccctggccccgaagatcggtcccctcggtctctcccccaagaagatcggagaagacatcgccaaagaaaccgccaaggactggaagggcctccgcgtcaccgtcaagctcaccgttcagaatcgtcaggcgaaggtcacggtggtcccctccgccgncgccctcgttatcaaggccctcaaggagcccgagcgcgaccgcaagaagaccaagaacatcaagcacaacggcaacatctcgctcgatgacgtcatcgagatcgctagggttatgaggccgaggtccatggccaatgacctcagcggcttcattaaggagattctcggaacatgcgtntcggtt

SEQ ID NO: 877 - DNA, 431 bp, Glycine max
  unsure at all n locations
  Clone ID: LIB3072-044-Q1-K1-D1
gacagcaaatacaattaataaagatgagtttgaagaacaacatggtggtgctaaaggtgtgtttgttgcttcttttccttgtgggggttacagctgcacgcatggaactgagcttcttcaaaagtgatcagtcatcaagttatgatgatgatgagtattcaaaaccatgctgtgatctctgcatgtgcacacgctcaatgccttctcaatgcagctgtgaagatattaggctgaattcatgccactcagattgtaagagctgtatgtgcacacgctcacagccaggacagtgtcgttgtcttgacaccaacgacttctgctacaaaccttgcaagtccagagatgactagaaaaactaatagctctctcaaatggacgaagcccctttaggcttntgttggtatgttaggggagacaaattaaacaagaaa

SEQ ID NO: 878 - DNA, 486 bp, Glycine max
  Clone ID: LIB3072-044-Q1-K1-D10
ggaatattatagcagttactgtagcttggatcaaaggagaaggtttgttttactactagatattgaaccaacaaacacagtagggctgttgtttacataaatttgtcttaccttgtaggtctttcaatctggtttctatctatcatatactttatttccggtgttccagcatcctatgtgatgtggtatcgtcctctttatcgtgcgacaaggtagttttcaatttgattgaattcaattcttatggtatggcatggataattgatattcaagatgatttcagccttttcctaaactataaaaaattgttaatgtcatccacattggctttattgccattgtgaagcattaaacattttctgtagcagcagtatgtacatctggcgactttgtgagcagaatgtaagttaataaatgacaacgttgtcatcttgaaactgaaaggctttggggtgcaaagcttacattataaaataccttaatcta

SEQ ID NO: 879 - DNA, 205 bp, Glycine max
  Clone ID: LIB3072-044-Q1-K1-D11
cttctaaaaggacaccgaatggggactatcatattaactactgcagatgagatcaacggacaacgtgtgatctactaatatatgttgggccatccaacacattacagctgatacagacataaacatgccttaccttgtaggtcttagaatctagttactatatatcatatactatacgtactgcgatccataatgctatatcatg

SEQ ID NO: 880 - DNA, 130 bp, Glycine max
  Clone ID: LIB3072-044-Q1-K1-D12
ggaatcaatatcacgaaatctatgtatctatatatggagagatggagattcatgtcttatcgtgatggcgacaaacaagaatggttgggacaatcaatatacatctcgatcatattttggatacccatat

SEQ ID NO: 881 - DNA, 306 bp, Glycine max
  Clone ID: LIB3072-044-Q1-K1-D2
gagggcagcatttgtgactagctcttacagagaaaaaagatggctgagacaagcggaggagatgcactgagaccagtggtgatatgtgataacatgggtggctgtacacttgcatgcactggtgggtccacttgcaggtgcacacgtgcttgcactgacacaggaggtggtgatcacgtgacatgctgttatgtatagaactgcacatgctatacatgctcatgatgcaagattgaggatgctagaagtggttgcagatgcggcacacattgtgcatgtacctgcagacgcacttagtctgacacc

SEQ ID NO: 882 - DNA, 482 bp, Glycine max
  Clone ID: LIB3072-044-Q1-K1-D5
ggattggggactcaagatcacgaaaacgatgtagctataggaggacagagggatgtccatgacggatcgagatggcgacaaacaagaatgggtgggacaataaatatccatctcgaccatattttggatacccatataaccatcgaagattattgaagtgactaatttcgtgaaattaagcagcggagatgacaaagaaattgctagaggtactgtagttcttatccagtaccaacatacttaatgttaagaaatcattatttacagagaggtatgatagatattttgatgtcaaaacactagccctgttcagttaataatgacaatactgcaatcttttttgattctatgaatatttatcattacacacattatgtaagagctcgatgagatgaatatcgtacgtacggatctggagcggagattctctgaaccgaatgacaacctgaacggatgttaatttaatcttaacgaaattatgc

SEQ ID NO: 883 - DNA, 494 bp, Glycine max
  Clone ID: LIB3072-044-Q1-K1-D7
gacagcaaaaacaattaataaagatgagtttgaagaacaacatggtggtgctaaaggtgtgtttgttgcttcttttccttgtgggggttacagctgcacgcatggaactgagcttcttcaaaagtgatcagtcatcaagttatgatgatgatgagtattcaaaaccatgctgtgatctctgcatgtgcacacgctcaatgcctgctcaatgcagctgtgaagatattaggctgaattcatgccactcagattgtaagagctgtatgtgcacacgctcacggccaggacagtgtcgttgtcttgacaccaacgacttctgctacaaaccttgcaagtccagagatgactagaaaaactaatagctctctcaaatggacgaagcccctttaggctttgcttgatatgttaggggagacaaataaaacatgaaataaaagctcagtggccagtaatttacttttagcaaatttggtcatttttattattcttatttt

SEQ ID NO: 884 - DNA, 454 bp, Glycine max
  Clone ID: LIB3072-044-Q1-K1-E1
acgacagaaggggggatgttagttcgtgttgcgggagataacatcatgatgtctccaccatatattatatgtcctggagaagttgaagagttaatcagcatttatgggaaagctttgaaagaaacggaaaagaaggtacaggagctcaagtctcagcgcaagtagcttaggcctcatgatggaataataaactctgctgcgcccacttccgggggaaaaggaaatattgtagtaacttgataagactttgttccaaccttttcgttattggaaatgtcaataaattgggttcctagttgcttcctaattatatgttggagttatacatatgcttagaataatgctcgttacacatcttcacattgcatgtagcgtagcctctcattaatgacgtggcagcatcaatagtgcaagtgtagaaattttagtaagccaaactgtaataaggtgatgg

SEQ ID NO: 885 - DNA, 489 bp, Glycine max
  unsure at all n locations
  Clone ID: LIB3072-044-Q1-K1-C3
gattcacacaactaactaagaaagtcttccatagccccccagaaatgaagagcaccatcttctttgctctctttctcttttgtgccttcaccacctcatacctaccttcagccatcgctgatttcgtgctcgataatgaaggtaaccctcttgaaaatggtggcacatattatatcttgtcagacataacagcatttggtggaataagagcagccccaacgggaaatgaaagatgccctctcactgtggtgcgatctcgcaatgagctcgacaaagggattggaacaatcatctcgtccccatatcgaatccgttttatcgccgaaggccatcctttgagccttaagttcgattcattgcagttataatgctgtgtgttggaattcctaccgagtggtctgttgtggaagatctaccagaaggacctgctgttaaaattggtgagaacaaagatgcnaatggatggtggtttagacttgagagagtttc

SEQ ID NO: 886 - DNA, 464 bp, Glycine max
  Clone ID: LIB3072-044-Q1-K1-A7
gacagcacaaacaattgataaagatgagtttgaagaacagcatggtggtgctaaaggtgtgtttgttgcttattttccttgtgggggttacagctgcacgcatggaactgagcttcttcaaaagtgatcagtcatcaagttatgatgatgatgagtattcaaaaccatgctgtgatctctgcatgtgcacacgctcaatgcctactcaatgcagctgtgaagatattaggctgaattcatgccactcagattgtaagagctgtatgtgcacacgctcacagccaggacagtgtcgttgtcttgacaccaacgacttctgctacaaaccttgcaagtccagagatgactagaaaaactaatagctctctcaaatggacgaagcccctttaggctatgtttgttatgttaggggagacatataaaacacgatataaaagttcagtggccagtaatttgcttttagc

SEQ ID NO: 887 - DNA, 419 bp, Glycine max
  Clone ID: LIB3072-044-Q1-K1-B1
gacagcaaaaacaattaataaagatgagtttgaagaacaacatggtggtgctaaaggtgtgtttgttgcttcttttacttgtgggggttacagctgcacgcatggaactgagcttcttcaaaagtgatcagtcatcaagttatgatgatgatgagtattcaaaaccatgctgagatctctgcatgtgcacacgctcaatgcctgctcaatgcagctgtgaagatattaggctgaattcatgccactcagattgtaagagctgtatgtgcacacactgacagcctggacagtgtcgttgtgttgacaccaacgacttttgctacaaaccttgcaagtccagatatgactagaacaactaatagctgtctcaaatggacgaaggccctttaggctttgattgttatgttaggggagacaaa

SEQ ID NO: 888 - DNA, 281 bp, Glycine max
  Clone ID: LIB3072-044-Q1-K1-B10
tgggcttcacagttaagacaatcaataaagatgagtttgaagaacagcatgatgctgctaaaggtgtgtacagttgcttgttttccttgcgggggttacagatgcacgcatggcactgagctctttcaaaagtgatcagtcatcaagttatgatgatgatgagtattcaaaaccatgctgtgatctctgcatgtgcacacgctcaatgcctactcaatgcagctgcgaagatattacgctgaatttatgacactcacattgtaagagctgtatgtgcacac

SEQ ID NO: 889 - DNA, 487 bp, Glycine max
  Clone ID: LIB3072-044-Q1-K1-B2
gacagcacaaacaattaataaagatgagtttgaagaacaacatggtggtgctaaaggtgtgtttgttgcttcttttgcttgtgggggttacagctgcacgcatggaactgagcttcttcaaaagtgatcagtcatcaagttatgatgatgatgagtattcaaaaccatgctgcgatctctgcatgtgcacacgctcaatgcctactcaatgcagctgtgaagatattaggctgaattcatgccactcagattgtaagagctgtatgtgcacacgctcacagccaggacagtgtcgttgtcttgacaccaacgacttctgctacagaccttgcaagtccagagatgactagaaaaactaatagctctctcaaatggacgaagcccctttaagctttgtttgttatgttaggggagacaaatcaaacaagaaataaaagctcagtggccagtaatttgcttttaacaaatttggtcatttttagcataa

SEQ ID NO: 890 - DNA, 499 bp, Glycine max
  Clone ID: LIB3072-044-Q1-K1-B3
gactctcatcacattattctatatcaattttggttaagagtcttgaaaaagcaagagaaaaaaaaataccaaccatggcaaccatttctgatcaacctagagggtcctactcctatggaacctcatatggagcaccctatggaaccacgtatgagaccaacaccagcattaacaacccaccttcacgccaaacagtgaagttcataactgctgccactattggcatcacactcttgctcctgtctgggttgaccctcacaggcactgtcataggtttgatcattgcaacccctcttcttgttatcttcagccccatccttgtccctgctgcgtttgtgctgttcctagttgcttctggctttttgttctctgggggctgtggtgtggctgccattgctgctttgtcttggatttacaactatgtgtctgggaaccagcctgcgggttatgacacccttgactatgcaaaagggtaccttgccgataaggcaagggatgt

SEQ ID NO: 891 - DNA, 146 bp, Glycine max
  Clone ID: LIB3072-044-Q1-K1-B4
ttgcgactctcattttattatactattttaattttgactaacatcctggtactattaggagaattttggaggcctaccatggttaccatttctgctcaacctctattgttctacttctatttacctcatatcaatcaccctattat

SEQ ID NO: 892 - DNA, 349 bp, Glycine max
  Clone ID: LIB3072-044-Q1-K1-B5
ggggggattgtatatcatggacgatttcaatctctctctctctctgtctctctctctctagacttagattttgtgaatggctgaagtggaagagggacaggtcatcggcgtccacaccgttgatgagtggaagctgcaactccagaatgcaaaagactccaaaaaactgattgtggtggattttactgcttcctggtgtggtccatgccgttttatggccccagttcttgcagagattgcaaagaaaactcctgaattgatcttcctcaaagtggatgtggatgaagtgaggcctgttgctgaggaatattccattgaagccatgccaaccttcctcttcttgaaagat

SEQ ID NO: 893 - DNA, 495 bp, Glycine max
  Clone ID: LIB3072-044-Q1-K1-B6
ggagtttgttgatcgagataactagaaacggtgtgatgaaaatgaaggtccttgttttcttcgttgctacaattttggtagcatggcaatgccatgcgtacgatatgttccctctccgaatgaacactggctatggtgcccgtactccggaggtgaaatgcgcaagttggaggcttgctgtggaagcacacaacatctttggctttgagaccattcctgaagagtgcgttgaagcaacaaaggaatacatccatggcgaacaatatagatcagactccaaaacagttaaccaacgagcttacttttatgccagagacctcgaagtccatcccaaggacacatttgtgttcagtatagatggcaccgtactctctaatattccatactacaaaaaacatggatatggggtggagaaatttaactcgaccttgtatgatgaatgggttaacaagggcaatgcaccggcactgcccgagactcttaagaattacaaca

SEQ ID NO: 894 - DNA, 419 bp, Glycine max
  Clone ID: LIB3072-044-Q1-K1-B8
ctgtgaagcaactgtataattaacaaaagccatttcggtagcaaccggagaaaatgaagagcactagcttgttcgctatacatctactttgcaccttcatctgatacctaccttgcgacaccgcccaagacctgctcgacgaggatggctatccgatttgcaacgatctcatatactacgctctgtcagaaactagacgaaacagttgtggaatagaacgagtcaaactatgcaaagacaattgccctatcactgtattgcaaccttccaatccaaactctaatgggttagaaatcaacaccgaattttcatacccaacctattacatcaacgaaaccctaattatgtaaataaagtctaattacccacagcactctgaaagaaagaatccttgttggaccatttctaaagatatatct

SEQ ID NO: 895 - DNA, 196 bp, Glycine max
  Clone ID: LIB3072-044-Q1-K1-B9
caattctcacattctcctataacttaccttctatccccataccttccatcaattatatcttcaatatatcataacccatctcttcaaccatatatacttcaacacacattctcatttacatcatacctttatcaaacttattatttcaacaatcttcattcctatcttttatacaatcatttttacaaaccattat

SEQ ID NO: 896 - DNA, 483 bp, Glycine max
  Clone ID: LIB3072-044-Q1-K1-C1
gacagcaaaaacaattaataaagatgagtttgaagaacaacatggtggtactaaaggtgtgtttgttgcttcttttccttgtgggggttacagctgcacgcatggaactgagcttcttcaaaagtgatcagtcatcaagttatgatgatgatgagtattcaaaaccatgttgtgatctctgcatgtgcacacgctcaatgcctcctcaatgcagctgtgaagatattaggctgaattcatgccactcagattgtaagagctgtatgtgcacacgctcacagccaggacagtgtcgttgtcttgacaccaacgacttctgctacaaaccttgcaagtccagagatgactagaaaaactaatagctctctcaaatggacgaagtccctttaggctttgtttgttatgttaggggagacaaataaaccaggaaataaaagctcagtggccagtaattggcttttagcaaattgggacatttttatt

SEQ ID NO: 897 - DNA, 407 bp, Glycine max
  Clone ID: LIB3072-044-Q1-K1-C11
ggcacacagcagggaacaacgtgtaacacgtgcacagctgagagagacgcacccatggggccaagacccgcaaggtgttataggcaaattaataacacaccataccacaagtcacggttttgccgcggagctcctgatcccaagatcaggattcaccatgttggtatgaagaataagggtgttgctgagtttgctttctgtgtacatctgcctcgttgggagaaggaaaacgtttctagtgaggccctggaagctgctcgtattgcttgcaacacgtacatggtcaaatttgatggacaggatcgctttcactcgacagtcagggtgcacccattccatgttcttaggatcaacaacatgctgtcgcgtgctggcactgatagcctccaaactgcaatgagaggtgc

SEQ ID NO: 898 - DNA, 509 bp, Glycine max
  unsure at all n locations
  Clone ID: LIB3072-044-Q1-K1-C12
gattcacacatctaactaagaaagtcttccatagccccccaagggtgaagagcaccatcttgtttggtctctatctcttttgcgccttcaccacctcatacctaccttcagccatcgctgatttcgtgctcgataatgaacgtaaccctcttgaaaatggcggcacatattatatctcgtcagacataacagcatttggtggaataagagcagcctcaacgggaaatgaaagatgccctctcactgtggtgcaatctaccaatgagctcgacaaatggattggaacaatcatatcgtccccatatcgaatccgttctatcgccaaatgccatcctttgagccttaagttcgattcatttgcagttataatgctgtgtgttggaattcctaccgagtggtctgttgtggatgatctaccagaaggacctgctgntcaaattggcgagaacaaagatgcaatggatggttcggttagacttgagagactttctgatgatgaattcaataac

SEQ ID NO: 899 - DNA, 491 bp, Glycine max
  Clone ID: LIB3072-044-Q1-K1-C2
agaaggggacagcgcaaacacttaatatagatgagtttgaagagcaacatggtggtgctataggtgtgtgtgttgcttcttttccttgtgggggttacagatgtacgcatggaactgagcttcttcaaaagtgatcagtcatcaagttatgatgatgatgagtattcaaaaccatgctgtgatctctgtatgtgcacacgctcaatgcctcctcaatgcagatgtgaagatattatgctgaattcatgccactcagattgtgagagctgtatgtgcacacgctcacagacaggacagtgtcgctgtcttgacaccaacgacttttgctacaaacctttgaagtgcacagatgactataaaaactcatagctctctcaaatggacgaaacccctttagggtttgtttgttatgttaggggagacaaatataacacgaaatataagctcattggccagtaatttgcttttagcacatatggtcatttttattt

SEQ ID NO: 900 - DNA, 491 bp, Glycine max
  unsure at all n locations
  Clone ID: LIB3072-044-Q1-K1-A6
agaaggggacagcaaaaacaattaataaagatgggtttgaagaacaacatggtggtgctaaaggtgtgtttgttgcttcttttccttgtgggggttacagctgcacgcatggaactgagcttcttcaaaagtgatcagtcatcaagttatgatgatgatgagtattcaaaaccatgctgtgatctctgcatgtgcacacgctcaatgcctcctcaatgcagctgtgaagatattaggctgaattcatgccactcagattgtaagagctgtatgtgcacacgctcacagccaggacagtgtcgttgtcttgacaccaacgacttctgctacaaaccttgcaagtccagagacgactagaaaaactaatagctctctcaaatggacgaagcccctttaggctttgtttgttatgttaggggagacaaataaaacaagaaataaaagctcagtggccagtaatttgcttttagcanatttggtcattnttatca

SEQ ID NO: 901 - DNA, 423 bp, Glycine max
  Clone ID: LIB3072-043-Q1-K1-G8
gaccgcattagcactcgtctttggttctggtttatagatctctgtgaagtcgctttataacactcaacctaagatgcagaacgaggaaggacagatcactgagctttacattcctaggaagtgctctgccacaaaccgattgattaccgctaaggaccatgcttcggttcaggttaacattgggcatgtggatgagaatggcgtctgcaatggccatttctccacttttgctctctgcggcttcatacgtgctcagggggatgctgacagtgccctagatcgcttgtggcagaagaagaaagttgaagttaagcaacagtagacacccatgatagtttgttactttgctatgtattaatttctacgcttgctagagatatttgagtactatgaatgtcgtcttgagcaaatactcattctaaa

SEQ ID NO: 902 - DNA, 265 bp, Glycine max
  Clone ID: LIB3072-043-Q1-K1-G9
acagcgtacgaccagactacagatgactatagatatattaccaatgcacgggcctccatactgtaggggggcacctcggacacagagtatgggaaaacatctcttatgctgactgcgaaaccgtcgcacgatctaactgacatgacaaagctcgaataagcactgctatctgtacatacaaaatgcgcgcttacaggtgcattcaaactactaccttgtgagtcctgtactaacacaactgcaaggatacttactattgcggatg

SEQ ID NO: 903 - DNA, 196 bp, Glycine max
  Clone ID: LIB3072-043-Q1-K1-H10
acgagaaaacgactgatctctgcaccctaatgagttctcacaaatggagagttatggtgagtaacgcgtgacttggggtcaaggcggctggactctcgcagcagctctatacttatgatactcgcgtcaggctagaggttctcaaaacatcctactcatcttctagctctggctcacatagaaatcacttatcaca

SEQ ID NO: 904 - DNA, 369 bp, Glycine max
  Clone ID: LIB3072-043-Q1-K1-H12
ggcaggcaaagaaaagaaaatcctcaattatctgagcagccaaacactctctctctgtctctcgaaaattctcagtttgcagagaaaatctgaatcatgtcgtggcaagcgtatgtcgacgatcaccttctgtgtgacatcgaaggtaaccacctcactcacgctgctatcatcggccaagacggcagcgtttgggctcagagtaccgacttccctcagttcaaacctgaggagatcactgccatcatgaatgactttaatgagcctggatcacttgctccaactggattgtatctcggtggcaccaaatatatggtcatccagtgtgaacccggagactgcattcgacggaagaagggtcctggtggt

SEQ ID NO: 905 - DNA, 385 bp, Glycine max
  Clone ID: LIB3072-043-Q1-K1-H3
ttctaaggggctgaggagtagagggttgtggggggtgcctgtgtcatgcgcacggcatgttggaagtgacattggagcagattattgggctccagccctaggattggggctttcgataggagttttttacaaatggggcagcatatacatataaatatggtatcatgcatataggaaaattcatggaaatgatataacatcatgagcagtcaatctgctaaaaaaaaatctaatgctgattgctcatgatgctatacttcattattcctgaataaaatgtgtgctagctagccgtgacagtatttgcaagccctttgaagacttcataattttatggtaaataagcttaattagttttttttatttttatttaatttaattaatt

SEQ ID NO: 906 - DNA, 409 bp, Glycine max
  Clone ID: LIB3072-043-Q1-K1-H5
gctgaggagtagagggttgtgtctggtgccagtgtcatgcacactgcaagttggaagtgacaatggagcagattattgggctccagccctaggagggggctttcgttaggagttttttacaaatggggcagcatatacatataaatatggtagcatgcatagaggtaaattcatggaaatgatataacatcatgagcagtcaatctgctaaaaaaaaatctaaggctgattgctcatgatgctatacttcattattcctgaataaaatgtgtgctagctagccgtgacagtatttgcaagcccttgaagacttcataattcatggaaatcaagcttaattagttttctttattctcatttagcttaattaattaagatgatggtactaattaatgcgctatatttcgat

SEQ ID NO: 907 - DNA, 416 bp, Glycine max
  Clone ID: LIB3072-043-Q1-K1-H6
ggacacacaactaactaagaaagtcttccatagccccccaaaaatgaagagcaccatcttctttgctctctttctcttttgtgccttcaccacctcatacctaccttcagccatcgctgatttcgtgctcgataatgaaggcaaccctcttgaaaatggtggcacgtattatatcttgtcagacataacagcatttggtggaataagagcagccccaacgggaaatgaaagatgccctctcactgtggtgcaatctcgcaatgagctcgacaaagggattggaacaatcatctcgtccccatatcgaatccgttttatcgccgaaggccatcctttgagccttaagttcgattcatttgcagttataatgctgtgtgttggaattcctaccgagtggtctgttgtggaagatctac

SEQ ID NO: 908 - DNA, 425 bp, Glycine max
  Clone ID: LIB3072-043-Q1-K1-H9
ggaaaactgaaaagttatggcgaaagactttaggtttggaattgggaatgagggttgttcgcgtcacgaagatgatcgaggtggtgttgaacgatcgattggggaagaaggtgcgcgtgaagtgcaacgacgatgacaccatcggcgacctgaagaagctggtggcggctcagacgggcacaagagccgacaagatccgcatccagaggtggtacaccatatacaaggatcacatcactctcaaggattacgagatccacgacggcatgggtctcgaactctactacaactaaacacaaagtgtgttttatgcatgatatattactatgatctgggaatgggatgaggcgccaaatgtaattttgacttgcgaaagtccctatgatttgaataatgtacattcccgaatgatattgggtattaca

SEQ ID NO: 909 - DNA, 495 bp, Glycine max
  Clone ID: LIB3072-044-Q1-K1-A1
gattcacacaactaactaagaaagtcttccagagccccccaaaaatgaagagcaccatcttctttgctctctttctcttttgtgccttcaccacctcatacctaccttcagccatcgctgatttcgtgctcgataatgaaggtaaccctcttgaaaatggtggcacatattatatcttgtcagacataacagcatttggtggaataagagcagccccaacgggaaatgaaagatgccctctcactgtggtgcaatctcgcaatgagctcgacaaagggattggaacaatcatctcgtccccatatcgaatccgttttatcgccgaaggccatcctttgagccttaagttcgattcatttgcagttataatgctgtgtgttggaattcctaccgagtggtctgttgtggaggatctaccagaaggacctgcttgtaaaattggtgagaacaaagatgcaatggatggttggttaagactgagagagtttctgatga

SEQ ID NO: 910 - DNA, 477 bp, Glycine max
  unsure at all n locations
  Clone ID: LIB3072-044-Q1-K1-A11
gatgcaactttatgactacgaaaagccatttccatagcnacctgagaaaatgaagagcactggctaggtcgctatatatctactttgcgcctatacctcatacctaccttccgtcaccgaccacgacgtgctcgacgtggatggcgatccgattcggaacggtttcatatactacgttttgccggcaataagaggaaacggtggcggaatagaacgagccgcactcgggaaagacacttgccctatcactgtagtgcaatctcccaatccaaactctaaggggttagaaattaagtttgaatctgcataccccgcctattacataaacgaaaccctaattntgcanataaagttcagttacccacagcagtgtgaaagacagaatccttggtgggccatttctaangatatatctgaaggaccacatgctattaaactctctgggttccatggtactgaactcggttggtttaaaat

SEQ ID NO: 911 - DNA, 503 bp, Glycine max
  Clone ID: LIB3072-044-Q1-K1-A3
gattcacacagctaactaagaaagtcttccatagccccccaaaggtgaagagcgccatcttctttgctctctttctcttttgtgccttcaccacctcatacctaccttcagccatcgctgatttcgtgctcgataatgaaggtaaccctcttgaaaatggtggcacatattatatcttgtcagacataacagcatttggtggaataagagcagccccaacgggaaatgaaagatgccctctcactgtggtgcaatctcgcaatgagctcgacaaagggattggaacaatcatctcgtccccatatcgaatcccgtttatcgccgaaggccatcctttgagccttaagttcgattcatttgcagttataatgctgtgtgttggaattcctaccgagtggtctggtgtggaggatctaccagaaggacctgctgttaaaattggtgagaacaaagatgcaatggatggttggtttagacttgagagagtttctgatgatgaattc

SEQ ID NO: 912 - DNA, 403 bp, Glycine max
  unsure at all n locations
  Clone ID: LIB3072-043-Q1-K1-G7
gaggattggatttaaaaaagaaaagacaaaaaccacattgagtggggcctgccctaaaatggcccttacagagcttctctatcaagagctgctagttggtggttgaggagtaataggttccgcataagctacatttcgtgggggaggcacctatccagtacttccgaactcgtctttcatctacagacattgggtcgctaaagccaatagttcggtgtccgggcaacagccaagccactcatctttggttgcagcttcggcggaagcctatgcttttagttcagttccattccttggttctccggttgattgccctgcccgcgtcacaccttanaaagctntggagcggcagtttcacttaacttctcacgacattggaccttcttcaaactggcctttgaac

SEQ ID NO: 913 - DNA, 262 bp, Glycine max
  Clone ID: LIB3072-043-Q1-K1-E8
tgggacaggacaggcaattaatatggatgagttcggagaacaacatggtggtgctaaaggtgtgtttgttgcttcttttccttgctggggttacagctgcacgcatggaactgatcttcttcaacagtgatcacgcatcaagttattatgatgattaattttcacatccatccttagatctttgcttgtgcacactctcaatgctttcctatttctatttgcccttatactactcttgaatttcatgccatcttatattcgt

SEQ ID NO: 914 - DNA, 418 bp, Glycine max
  Clone ID: LIB3072-043-Q1-K1-F10
gattcacacatctaactaagaaagtctttcatagccctccggatatgaagagcaccatgttctgagctctctttctcttttgagccttcaccacctcatacctaccttcagccatcgatgatttcgtgctcgataatgaacgtaaccctcttgaaaatggtggcacatattatatcttgtcagacataacagcatttggtggaatacgagcagtctcaacgggaaacgaaagatgccctctcactgtggtgcaatttcgcaatgagctcgacatacggattggaacaatcatctcgtgctcatatagaatccgttttatcgacgaaggccatcctttgagccttaagttcgaatcatttgcaggtataatgctgcgtgctggaattcctaccgagtggtctgttgtggaagatctacc

SEQ ID NO: 915 - DNA, 314 bp, Glycine max
  Clone ID: LIB3072-043-Q1-K1-F11
acacgtaccgaaagaactcttgcctgtttaggactctcaacttctcccacgagatcggctctctctggctatcgtgtaatctgtaagaaggagattgctacttcagaaacagccttaactctacttgcaaaagttcttcatctatcatactgcaatcgttatcgtccatggactagcagcaaaccctacactcctctactgctactactactcaattccataatctatttgactcgcactctactgactttactactgcagctgcttcttcctcaaatccctcactcttgaagtctccctacttaagcgcactc

SEQ ID NO: 916 - DNA, 373 bp, Glycine max
  Clone ID: LIB3072-043-Q1-K1-F12
ttgggactgctacaacaatttatgaagattagggcgatgaacaacatggtggtgctaaaagtgtgtctgctgcttcttttccttgtgggacgttacaagctgcacgcatggaactgagcttattcaaaagtgatcattcatcatcttctgatgatgatgagtattcaatatcatgctgctatctctgcatgtgcacacgcttaatgccttatcaatgctgctgcgaagatattatgctgaattcatgcctctcagattgtaagagctgtatgtgcacacgctcacagccaggacagtgtcgctgtctttacaccaactactactgctacaaaccttgcatgtccagatatgactacaaacactaatagctctc

SEQ ID NO: 917 - DNA, 385 bp, Glycine max
  Clone ID: LIB3072-043-Q1-K1-F2
gacaacacaaacattctctccattgtctttgaacactcatcaccagtggccaagcttgttctttcccggggtttccttcttttcagtggctgcttcgctctgagagagcaggcacagcaaaatgagtgccagatccaaaagctgaatgccctcaaaccggataaccgtatagagtcggaaggtgggttcattgagacctggaaccctaacaacaagccattccagtgtgccggtgttgccctctctcgctgcacccttaaccgcaatgcccttcgtagaccttcctacaccaacggtccccaggaaatctacatacaacaaggtaatggtatttttggcatgatattcccgggttgtcctagcacttatcaagagccggcagaat

SEQ ID NO: 918 - DNA, 107 bp, Glycine max
  Clone ID: LIB3072-043-Q1-K1-F3
gcggccacgcgagcggacacacgtgcgcaccgctgccagtttacgactgaagggtacacattcgagacgaggaccaaacgggacgggtgcgagaagaccactgattg

SEQ ID NO: 919 - DNA, 425 bp, Glycine max
  Clone ID: LIB3072-043-Q1-K1-F4
ggtgcctctttgctttttcccattgcttctaacgtgagatctcagattgcaattgcctcttgtcttctcccagaatcggtgtaggttacaggtttaagggttttgttttcatttaggtcactaatccgatatcatgaagctcgatacgactagtctcgaatcgtttcccacactgattgcacctcaaaacgacgtcgccggagaactctccgccgctccgttctttgaccttccgaattccaatgacttcgatgggttcttgaaagacgctattcagatggtgaagcccgcgaagggtactacaactcttgcttttatatttaaagagggtgttatggtagctgctgattctcgagctagcatgggaagatatatatcgtcgcagtctgtgaagaaaattatcgaaatcaatccgtatatgcttg

SEQ ID NO: 920 - DNA, 417 bp, Glycine max
  Clone ID: LIB3072-043-Q1-K1-F5
gacttcaaaaacaattaataaagatgagtttgaagaacaacatggtggtgctaaaggtgtgtttgttgcttcttttccttgtgggggttacagctgcacgcatggaactgagcttcttcaaaagtgatcagtcatcaagttatgatgatgatgagtattcaaaaccatgctgtgatctctgcatgtgcacacgctcaatgcctcctcaatgcagctgtgaagatattaggctgaattcatgccactcagattgtaagagctgtatgtgcacacgctcacagtcaggacagtgtcgttgtcttgacaccaacgacttctgctacaaaccttgcaagtccagagatgactagaaaaactaatagctctctcaaatggacgaagcccctttaggctttgtttgttatgttaggggagaca

SEQ ID NO: 921 - DNA, 221 bp, Glycine max
  Clone ID: LIB3072-043-Q1-K1-F6
taaacacttgaaaacagaaacaagaaactaggtgagggtgggtttcttttatagggaacatataaccattaagatacagaacctaactttattattttatctattccaattactttatcttgttaaaccggataaccttattgaaattacaatttcacaaatccacaccttttatcattccaacaaaactttcccaaaagctcattctttaactatctcaa

SEQ ID NO: 922 - DNA, 296 bp, Glycine max
  Clone ID: LIB3072-043-Q1-K1-F8
caacgggatttacacgcctaacttagatacccttgcattgggaccgaatgatgagtagcgcggtgttatgtcatctctttatactttgtgccttcaccacctcatacctaccttaaaccattcctgatttcgcgctatataatgaactgtaaccatttttaaaacggaggcacatattatatcttggcagacataacaacgtatatcggactaaaaccagtctgaaccggaaatcaataacgccttgtcacttgtgatgcactttctcaatgagctctacaaatgtattggaacaa

SEQ ID NO: 923 - DNA, 289 bp, Glycine max
  Clone ID: LIB3072-043-Q1-K1-F9
acatcgcaatctagataagcatcataaaatcatagccactccgaccttacttccttccttagctgtagagaatgccactctgagcaatcatcatacccacttttacgcataggatcatctaactctgcactctattttacactgtgaaaccaagacgaaggtagcatttgacgctgacttaactaatcgtactgctctaagctcctccttgttagaagcgtcaatggccaggtctgccttctgatgctaacagagcgccaaaaggcgttatagggctcctatgaaagac

SEQ ID NO: 924 - DNA, 384 bp, Glycine max
  Clone ID: LIB3072-043-Q1-K1-G1
gaattcattctgaattggggccgcggagagtttgcagctgcatcatcgatcatcgtcacctcatggacggacacgattcacaagacccgaagcagagccctgctgacatgactgcctttgtgcaaaatcttctccagcagatgcaaaataggttccagacaatgtccgactccattgttacaaagattgatgatatgggaagtcgcataaatgagttggaacaaagcatcaatgacctaagagcatagatgggagtggagtcctcttcatcacctgcgacccctgctaagccaacagaggaaatcaccaaagaagagggttcagcttaagtggcgtgttctgatttcagttgctcggtattaatgttttcatgtattggattgc

SEQ ID NO: 925 - DNA, 361 bp, Glycine max
  Clone ID: LIB3072-043-Q1-K1-G10
gactccactgaaccgagtctgaaagaggagaagatttaactaactgcaatggctgcacgtgtggctgcaaggtacggatccagaaggctatttagtagtggttctgggaaaatacttagcgaggaggaaaaagctgcagagaatgcttactttaagaaagctgagcaagagaagttggagaagcttgctcgcaagggtcctcaatcagaagcagtctcggagggttcagtaactgatgccaaaccaagtagctcatgacatactggaacatcagttgacagagtttcaactgacaagtaccggaattatgcagttgtagctggtactgtaacaatgcttggggctttggggtggtacctta

SEQ ID NO: 926 - DNA, 136 bp, Glycine max
  Clone ID: LIB3072-043-Q1-K1-G11
tacggctgtattacgactacatatggctacataccctagtggtgcatatgagtcatatacgtagcggcctagcaaattgcacagacttcgctagagccacatcgacttactttgcgcccacacctaatacctacct

SEQ ID NO: 927 - DNA, 413 bp, Glycine max
  Clone ID: LIB3072-043-Q1-K1-G12
ggggaattagggttattcgcgtggcgaagatgattgaggtggttttgaacgatcgattggggaagaaggtgcgcgtgaagtgcaacgacgatgataccatcggcgacctgaagaagcttgtggcggctcagactggcacaagagccgacaagatccgcatccagaagtggtacaccatctacaaggatcacatcactctcaaggattacgagatccatgacggcatgggtctcgaactctactacaactaaacacaacaaggtgtgttttatgcgtaatatactatgtgctgggaatgggataagcgcttaatgtaattctgacttgcgaaaagttccatgatttgaaataatgtacatcttcaaatgatattgggtattatataccggtgacaggttaaggtggtttggtat

SEQ ID NO: 928 - DNA, 332 bp, Glycine max
  Clone ID: LIB3072-043-Q1-K1-G2
gacagcaaaaacaattaataaagatgagtttgaagaacaacatggtggtgctaaaggtgtgtttgttgcttcttttccttgtgggggttacagctgcacgcatggaactgagcttcttcaaaagtgatcagtcatcaagttatgatgatgatgagtattcaaaaccatgctgtgatctctgcatgtgcacacgctcaatgcctcctcaatgcagctgtgaagatattaggctgaattcatgccactcagattgtaagagctgtatgtgcacacgctcacagtcaggacagtgtcgttgtcttgacaccaacgacttctgctacaaaccttgc

SEQ ID NO: 929 - DNA, 416 bp, Glycine max
  Clone ID: LIB3072-043-Q1-K1-G4
gacagaatagaaaaaggaaaccctagctggataggtcaaacatcatcatgtcggacgaagagcaccatttcgagtccaaggcagacgccggtgcccccaaaacctaccctcagcaagccggtaccattcgcaagaacggctacatcgtcatcaaaggacgcccccgcaaggttgtggaagtttcgacttccaaaactggaaagcacggtcacgccaagtgccactttgttggaattgatattttcactgccaagaaacttgaggatattgtgccctcttctcacaactgtgatgttcctcatgtgaatcgtactgattaccagctcattgatattgctgaggatggatttttgagtctgcttactgaaaatgggaacaccaaggatgacctcaagctttccactgatgagagtttg

SEQ ID NO: 930 - DNA, 404 bp, Glycine max
  Clone ID: LIB3072-043-Q1-K1-E5
gacagctaaaacaattaataaagatgagtttgaagaacaacatggtggtgctaaaggtgtgtttgttgcttcttttccttgtgggggttacagctgcacgcatggaactgagcttcttcaaaagtgatcagtcatcaagttatgatgatgatgagtattcaaaaccatgctgtgatctctgcatgtgcacacgctcaatgcctcctcaatgcagctgtgaagatattaggctgaattcatgccactcacattgtaagagctgtatgtgcacactctcacagccaggacagtgtcgttgtcttgacaccaacgacttctgctacaaaccttgcaagtccagagatgactagaaaaactaatagctctctcaaatggacgaagcccctttaggcttttgttgttat

SEQ ID NO: 931 - DNA, 364 bp, Glycine max
  Clone ID: LIB3072-043-Q1-K1-B1
gacacatcacaacaacaacaacaacaaaaaaagacgaaaaacgacttccttctctcctttgctgtgttttctttctcaaaaatgggtcgtacctatgttcttatgatggttgctgcattgttgttgagctccaccatggctcaatctccagcttcgtcgccggctttgtcccccacccacacgccggtggccactccacctaggagggcgttgtcgccgtctccgtcgtctgtgtcaccagcggcttcacccgccaccggaaattctcctccggcaccacctacttcttctccttcggaatcgccacttccatcagctgctactcccaacatctctccctcgaccatctcgactccgccatctg

SEQ ID NO: 932 - DNA, 387 bp, Glycine max
  Clone ID: LIB3072-043-Q1-K1-B2
gacttattaattgtgttaagaaatttaggtgaggggctagagaatgatgatgaagtctgctatgtgtgcagtggtggttgtagcacttcttcttctggcggaagtggggcccatggctgaagctgtgacatgcaccccaacagaattgagtccctgtctttcaacaatcactttccgtgcttaacctttcaattcttggtgcaccaaacttaagcaacaaaaaccatgcttatgtggctacctcaaaaacgctagcttgaagcagtatgttaactctcctaatgcccgaaaaaccgttgcttcttgtgggattccctttccaacttgttaattaattaagccttcttatgattcaaagagtgctatatcatatagacatgtatatat

SEQ ID NO: 933 - DNA, 237 bp, Glycine max
  Clone ID: LIB3072-043-Q1-K1-B4
cggcgattttctttttagaagaaaaaagagaagaatatgagtttgaagaacaacatggtggtgctaaacgtgtgtttggtgctactttttcttgtggtgggtactactagtgccaacttgaggctgattaatcttggtctgctcatgaaaagtgatcattatcaacactcaaatgatgatgagtcttcaaaaccatgctgtgatcaatgttcatgcacaaagtcaaaccctcctcaa

SEQ ID NO: 934 - DNA, 67 bp, Glycine max
  Clone ID: LIB3072-043-Q1-K1-B5
ttgggggtttgatattatgatctaggaataggggactagtcaaaaacatatcgacggacggaatgaa

SEQ ID NO: 935 - DNA, 413 bp, Glycine max
  Clone ID: LIB3072-043-Q1-K1-B6
gaagaagcaattgatgtcatcggcgccgtggagaggcgaggagagtgaagaatccttcaaagagggaaagctgaaagtgacgaggcagggtgatggcacttccaccatgcacgtccctgcctccaagtccaagcatcatcaccatgacctccacgacgacctcggaatcgagattgatcctgaactacgctacagcttccagcgcaattttcagtttcttcagcgtgtttttagcattgacactatggtgaaacctcttcctcctgtcatggcatacaatgtctctcgcaacttgaacttcttcactcgcattttcacacaattctttgatcctgaaggtattgcaaatgcccagaaatccttgggcataggacaggaagataaagttcgcaaggttcgttgaagacaatggg

SEQ ID NO: 936 - DNA, 187 bp, Glycine max
  Clone ID: LIB3072-043-Q1-K1-B8
ttggaacattgagatacatattgtagagtgggagagacgcttttttgttagattgtggtgttaataggcaatcacagttttgagctataaataatggtattggtatggaaataaaaaaaaatgatgttatatcagtattttacaaatttatatatcaaataattaaaaaaaaatctgtccttcttaa

SEQ ID NO: 937 - DNA, 411 bp, Glycine max
  Clone ID: LIB3072-043-Q1-K1-C1
ggaaggagaaaagctcccacatcggaggagcgttctacttggcctaggaggattttgcggcgctgctgttatgtctctgaacaacaagaacataccttttgcctctgctgctcccacacccatgttccctctggtgttggattccgctgtgagcacggtggtgaagaggccaagcaagtcgaggagcaagaagcagaaggaagaggaggaggaggttctcgtgattgaagggatcgagtttgagggaaacacacatgccaagttcgatgtcatcattaacgccgatgattataacgaaatccgtcccgatcacaccgagtttgcaagaagctttgcgagtctgcctcacttaaataacaaaaagatcgttactttcatgagtctgggattgacggatttgttggaagattt

SEQ ID NO: 938 - DNA, 228 bp, Glycine max
  unsure at all n locations
  Clone ID: LIB3072-043-Q1-K1-C10
caccanncctcataccnnntaccttcanngccatcgcnntgactttcgtgcttcgactaatgaagagtaaacccttctctgaacaatgcgcggcaccataattatatctctcgtcagacattaaccagcnnatttggtgcgaaataacgaagcaagcnncccaaccgtggaaaaatgaaaagaaatgcccttcttcaactgtgnnngtgcaatctttcgcaattgaag

SEQ ID NO: 939 - DNA, 389 bp, Glycine max
  Clone ID: LIB3072-043-Q1-K1-C11
ggtgactctcgcgggtggacaacgaaatttctcagccaaaggacacggatcagaatcgcttaatcaagttgaggaagatggcactagtctccgcaggaagatcaacactgaaccctaacgcccctctttacattcccgccgcgttccgccaagtggacgatccttctccataatagtggtagctggtgacgacactgacatggtaccatgactactggctaagccagcagcacgatgatggagccttctatggcgaggatgggtttgatggcaatgatgtggttgatctgcttcctgattcgtttgattttgatgctggtgaagatctttttgaagagtttattcgatcttctgaatcccaagaagaaactggacccaaaggaactgca

SEQ ID NO: 940 - DNA, 121 bp, Glycine max
  Clone ID: LIB3072-043-Q1-K1-C12
aacactcgtgcgactacgagaacacgacataacgttataaaacttttatctcccaaatattccactgaggacccctagaacaaagcagctgtcaccaactattaacacgaacttctatact

SEQ ID NO: 941 - DNA, 104 bp, Glycine max
  Clone ID: LIB3072-043-Q1-K1-D1
ggccaaaccattgagccgaacccggcctttagggaaaaaagaaagaaagaaaaaaaaaaaacccttctttcccctccttctctcttccatagagatttttctcc

SEQ ID NO: 942 - DNA, 166 bp, Glycine max
  Clone ID: LIB3072-043-Q1-K1-D12
cacacgcgtccgaggatgagagaagacagccgacggtgagcgccacactacaatcgttgccgtcacgcgatgtttgactgcgccgactgcgatctccaacaataccgacccagatatgcaatatgagaaagatcgcttctggtgaaccgttcttcattaaactgaa

SEQ ID NO: 943 - DNA, 429 bp, Glycine max
  Clone ID: LIB3072-043-Q1-K1-D2
ggcagttcaaagcgtagaaagattcgaaacgaagaaaggaagcgttgtgaagaatggcggaagagggacaagtgatcggtgtccacagcgtagaggagtggaaggaacatctcaagaagggagaagagtccaagaaattgattgtggtggattttactgcttcttggtgcggtccatgccgtttcattgccccaattcttgcagagtttgctaaaaagttgccgaatgtcaccttcctcaaggtggatgtggatgaattggagactgtttccaaggagtggggaattgaggctatgccaaccttcctgttcttgaaagaaggcaagctggtggacaaggttgtgggtgccaagaaagaggagctgcaattgacaatagccaaacatgccgcaattgctgctgcttgaagtgccatatgaatatgttaag

SEQ ID NO: 944 - DNA, 373 bp, Glycine max
  Clone ID: LIB3072-043-Q1-K1-D3
ggcagcttcaaagctttataaagattcgaaacgaataaaggaagcggtgtgaagaatggcggaagagggacaagtgatcggtgtccacagcgtagaggagtggaaggaacatctcaagaagggagaagagtccaagaaattgattgtggtggattttactgcttcttggtgcggtccatgccgtttcattgccccaattcttgcagagtttgctaaaaagttgccgaatgtcaccttcctcaaggtggatgtggatgaattggagactgtttccaaggagtggggaattgaggctatgccaaccttcctgttcttgaaagaaagcaagctggtggacaaggttgtgggtgccaagaaagatgaactgctattg

SEQ ID NO: 945 - DNA, 352 bp, Glycine max
  Clone ID: LIB3072-043-Q1-K1-D4
gatgcaactgaataattaagaagagccggttccatagcagcctaggaaaatgaagagcactagcttgctcgtatctttctactttgcgccttcacctcatacctaccttaccgccaccgaccaggacgtgctcgacgtggatggcgatccgattcggaacggcttcatatactacgttttgccggcaataagaggaaacggtggcggaatagaacgagccgcactcgggaaagacacttgccctatcacctgagtgcaatctcccaatccaaactctaaggggctagaaattaagtttgaatatgcataccccggctattacataaacgagaccctaattttgcaaataaag

SEQ ID NO: 946 - DNA, 142 bp, Glycine max
  Clone ID: LIB3072-043-Q1-K1-D5
acctaatcaattactggccgcgtttcacatcatcagactggaaaaccctgggttcccacataatcgcttgaaacatacactttcgcagctgcgaatacgaataggccataccgatcacacttcaacagtgccagccttaatg

SEQ ID NO: 947 - DNA, 347 bp, Glycine max
  Clone ID: LIB3072-043-Q1-K1-E10
aacacgcgtacgttcggctcctataccacgacagtttgtgatcccataacatacacaagcaaatcctagaaacttcagctgagatctatagggctatcttaaatttcacaaaatgaataacgtgtttgtcacatttctagatctgctagttgtatatgttcttacagtgacagcctcagagtcaaagccaccagtcacaacaaattcagcaccaaatgactacaattgttcacaagcgatgaataacttcattgtttcgtgcctaaattaccccattggtgaacatcctgttacttcaagtgttcgcttccaaaatgttaatgcatcgaatgcattaacacaaacac

SEQ ID NO: 948 - DNA, 376 bp, Glycine max
  Clone ID: LIB3072-043-Q1-K1-A9
gacagcaaaaacaattaataaagatgagtttgaggaacaacatggtggtgctaaaggtgtgtttgttgcttcttttccttgtgggggttacagctgcacgcatggaactgagcttcttcaaaagtgatcagtcatcaagttatgatgatgatgagtattcaaaaccatgctgtgatctctgcatgtgcacacgctcaatgcctcctcaatgcagctgtgaagatattaggctgaattcatgccactcagattgtaagagctgcatgtgcacacgctcacagacaggacagtgtcgttgtcttgacaccaacgacttctgctacaaaccttgcatgtccagagatgactagaaaaactaatagctctctcaaatgga

SEQ ID NO: 949 - DNA, 455 bp, Glycine max
  unsure at all n locations
  Clone ID: LIB3072-043-Q1-K1-E11
gactttgagttcgaactaaacaattcaattcaatctgcctcgatcatggagaggaaaacatttgggtttttgttcttgctcctccttgtcttagcttctgatgtgacggtgaagagagcagaggcgaaagattgcttgacaaggaggcacgggttccagggtagatgcttattcgacaggcaatgtgcacatgtgtgcaggagcgatggtttcatcggtggtcagtgccgaggccctcttcgcaaatgcttttgcagcaagccatgttgatcgaaattactactgccaaagaagccatgaaataaacaaacaaacaaataaataaatagctctaaccgacacatatgtacgtagtgtcggggttctagctagctaagtaggtacgtgtgtcttttggtatcgatcctaanttggtggagcaagtgtggcatcatgatctagttatatatatatat

SEQ ID NO: 950 - DNA, 452 bp, Glycine max
  unsure at all n locations
  Clone ID: LIB3072-040-Q1-E1-H3
gaaccattgggctgatttatgtgcttgcatccgtgagaagatgacatnaggggacgccatcgaacaaccaagaaaagttacccttacagtagtgcaagaaaacgaagagtatcagtccgcctgtcactccctcatcccgtgttcctattctacattcattccttgttattgtttaggatgcgtctgatgcggacggtgacttgacctggaatggccctacacatcatgccccgttggtaacaagaggaaatggcggtggaacacaatgagttgtatctgggaaagatttccgtttcactatcgcagcgtaactctttaacttaaatctcaaggcgccagaaaccaagcccgaactcgtacattttgttcaccatacaaatgaaatttcaaccccgtaaacaaagcctagccatttataatagcgcgaaagaaagaacttccggcgggttacc

SEQ ID NO: 951 - DNA, 482 bp, Glycine max
  unsure at all n locations
  Clone ID: LIB3072-040-Q1-E1-H4
ttggcctgtgggctgatttatgtgcttgcatggtcgtgagaagatgatagaaggggatagtaaacataaccaacaaagacgagcccgagagaatagtacggcggcgtcaaaggcgcgcccgccgtcctccccttccgcgggggccatagtcgtatgtacggaatcgagtcctcctaaaagcgactagctactaagccacgacgacgacgagcacctaaaattacgtcgcgactctcgtacgcgtatatgtctaacgttcttctaacgtagtcgcgaagacaccaggtcgaacctacgttatctagaccgcaagagtcgcacgcgtatgtgtctatagttaggatagcgctgccgctccgatattaatgatcctcgtcataaattccgtaagcttagagacgatcagaaaaatcaacagtctctctaaacggatgaagttttcccaggtccnncgccgcacgccaagggagataaacaaaata

SEQ ID NO: 952 - DNA, 376 bp, Glycine max
  Clone ID: LIB3072-040-Q1-E1-H5
tggctcggaacctttgggctgattttgtgcttgtttatgtgcttgcatggtcgtgcccagatcctagagagggacctatataatcaatgaagagagctccctacagttttttaaacacgaagagtattactcctcccgtctctccctctctctgtgttcctattattctacattcattcctagttacagtcgaccctgcgtctgacaacgaatgcaatttctccgaaaacggcggtatacaccacactctgctagatacaatactacctgccggaacaagagtagttttaataggaaacgaaagacgtttctctatccgggtgtaactctgtaacgagtctgataaagggaccggaataactaccctgcttttaca

SEQ ID NO: 953 - DNA, 168 bp, Glycine max
  Clone ID: LIB3072-040-Q1-E1-H6
ctaatactctgaactttattatcggacgttacaagaagtcttagactcatgatgactcgaaatcgtgagtaccccgggataagaggactctatatgaggctactggagacgtatctggcgaggaacccaagggtcacgctcctaaaaccatttgaggccgcgataaat

SEQ ID NO: 954 - DNA, 477 bp, Glycine max
  unsure at all n locations
  Clone ID: LIB3072-040-Q1-E1-H8
ttggctccgaacctttgggctgatttatgtgcttgcatggtcgtgagaagatgatagacggggatagtaaaaataaccaacaaagacgagcccgaggaataatacggcggcgtcaaagacgcgcccgccgtcctccccttccgcgggggccatagtcgtatgtacggaatcgagtcctcctaaaagcgactagctactaagccacgacgacgacgagcacctaaaattacgtcgcgactctcgtacgcgtatatgtctaacgttcntctaacgtagtcgcgaagacaccaggtcgaacctacgttatctagaccgcaagagtcgcacgcgtatatgtctatggttaggatagcgctgccgctccgatattaatgatcctcgtcataaattccgtaagcttagagacgatcagaaaaatcaacagtctctctaaacggatgaagtttttccaggtccccgccggcacgccaggggaga

SEQ ID NO: 955 - DNA, 300 bp, Glycine max
  Clone ID: LIB3072-040-Q1-E1-H9
cctcaaaccctaaactacaaaaccgccttagtaattcaccaaacggtccgcggcctcctaaactctttctccatgctctctcctcactcttactacactaatctactcccttacaccgcattctgattcaattaaccccattatatataaatatgctctcctatcgccttaatcacgcaacataaaataccgatcctctcattacaattatcaacaacacctactaacatccgaaacccctaaaaacaatacgaatcacaccacacataccaacctatatacaaaactattttacctcta

SEQ ID NO: 956 - DNA, 383 bp, Glycine max
  Clone ID: LIB3072-043-Q1-K1-A1
gatcctaaaactgcagagagtggcgaaatggcgactaggagcaaaagagaagcagagggtgttggtgatggtgatggtaataagatcgtgtggaacgaagcgcagcagaggttcgagacgcaggacaaggaggcgttcgtagagtacgccctgaaagaaaaagggaaggtcatggtcatggatttgatccacactttcgtgcccccttccaagagaggccttggcttggcttcccacctctgcgtcgccgcctttcagcacgcccaatctcactcgctatccatcatccccacctgctcctatgtctctgacacatttcttccccggaacccgtcttggaattctgttgtgtacacagagggcggcaaatctaatatctgagc

SEQ ID NO: 957 - DNA, 416 bp, Glycine max
  Clone ID: LIB3072-043-Q1-K1-A10
gattcacacaactaactaagaaagtcttccatagccccccaaaaatgaagagcaccatcttctttgctctccttctcttttgtgccttcaccacctcatacctaccttcagccatcgctgatttcgtgctcgataatgaaggtaaccctcttgaaaatggtggcacatattatatcttgtcagacataacagcatttggtggaataagagcagccccaacgggaaatgaaagatgccctctcactgtggtgcaatctcgcagtgagctcgacaaagggattggaacaatcatctcgtccccatatcgaatccgttttatcgccgaaggccatcctttgagccttaagttcgattcatttgcagttataatgctgtgtgttggaattcctaccgagtggtctgttgtggaggatcta

SEQ ID NO: 958 - DNA, 445 bp, Glycine max
  Clone ID: LIB3072-043-Q1-K1-A11
ggtgggaaggatgtaatgtaacagcacgtttgctcaaaggagagagcaaattagcattaaaaagaaaaaattaggatgcccccagatgtgcttcattttcgtcctctcctatcacctctagttcaattttctccttcactcgcatctcgggtgcaagaaaatcaaccttgtgctaaaaaatattggcaaggaatgaaagggatgaatctaaccaaaaagaaactcatccctatccttgttttgatcctttcaatcatatcaatcctcagacttctgagcctcaatgccaagacttcacttttttccactgggatatctgttttgtcctcagctcctcaacaaaattgttctcaacctttgtccacctgcaacaaaactgcatcacatacacctgaatcctcagataagcctatgaaacctcacaacatcaccaccaccctgactg

SEQ ID NO: 959 - DNA, 399 bp, Glycine max
  Clone ID: LIB3072-043-Q1-K1-A12
cttgacaaaagcttcgaagggacaccaaaaattgctaaaccgtaaaaaaccggggaagagaaacctgcagcaaccaaagtctcaagtatgtttggtggaactagagataaatgtgccggttgtcaaaaaacagtgtatcccactgaaaaggttactgtgaatggaactccttatcacaagagttgtttcaaatgcactcatggagggtgtgttattagtccctccaactacattgcacacgagggcaaactctactgcaagcaccaccacgttcaactgatcaaggagaaaggtaatttaaacccacttgaaagggaccactaaaagaatgcataacaagagaaaatcaaccgggaagtaattgcaacttaaacatgaaatgaaatgaaatgaaatgct

SEQ ID NO: 960 - DNA, 415 bp, Glycine max
  Clone ID: LIB3072-043-Q1-K1-A2
gactcactcatacaatagagaccagcttttgcttctttgtgaacatggagatgaggaaatcatgtggcttcttcttcttactcctcctccttgtctttgcttcccaggtggtggtgcagacggagggaagagtgtgtgagtcacaaagccacgggttccatggtttgtgtaatagagaccacaactgtgctttggtctgcaggaacgaaggtttctccggtggcaggtgcaaaggcttccgccgccgctgcttttgcaccaggatttgttgagatctcatcaaacactactcttgccatgcaaattaataaatcatagctaggccaaattaattgcatctactctttatccatttgggagctagctaccacaacccactcatacttggtcattggattgctttcctttggcttct

SEQ ID NO: 961 - DNA, 413 bp, Glycine max
  Clone ID: LIB3072-043-Q1-K1-A4
gacttattaattgtgttaagaaatttaggtgaggggctagagaatgatgatgaagtctgctatgtgtgcagtggtggttgtagcacttcttcttctggcggaggtggggcccatggctgaggctgtgacatgcaccccaacagagttgagtccgtgtcttccagcaatcacttccggtgctaaaccttccaatgcttgttgcacgaagctgaagcagcaaaaaccatgcttatgtggctacctcaaaaacgctagcttgaagcagtatgttaactctcctaatgcccgaaaaaccgttgcttcttgtgggattccctttccaacttgttaattaattaagccttcttataattaaagtgtgggatatatatatatatatatagataaacagtttaatttatgcacactttgat

SEQ ID NO: 962 - DNA, 291 bp, Glycine max
  unsure at all n locations
  Clone ID: LIB3072-043-Q1-K1-A6
gactttgagttcgaactaaacaattcaattcaaggtgcctcgatcatggagaggaaaacatttgggtttttgttcttgctcctccttgtcttagcttctgatgtgacggtgaagagagcagaggcgaaagattgcttgacaaggaggcacgggttccagggtagatgcttattcgacaggcaatgtgcacatgtgtgcaggagcgatggtttcatcggtggtcagtgccgaggccctcttcgcaaatgcttttgcagcangccatgttgatcgaaattactactgccaaag

SEQ ID NO: 963 - DNA, 394 bp, Glycine max
  unsure at all n locations
  Clone ID: LIB3072-043-Q1-K1-A7
gaacccattagacactattgaattgaagaaaagaggacattattctagagtcaaattaagatgaaggccattactatcattttgattgttctgcttgttctttccgttgggattgaaaatgaagggccattgaaagtgattgaagcaagaacctgtcaagataggttgggcgcgctaaactgtatacaagacgaatgtcatattagttgcataaaaaaacatggaaagttaacaaaagttgggtgcagtacgcctttatatgattgcatatgtctttacccatgttaataagtgtttgaccttcttcctacattgtccctatatgaatgtcaatttatttgtaccagacaatgatggaatcaaagaaaataaaattactttntggtaacaaaaa

SEQ ID NO: 964 - DNA, 413 bp, Glycine max
  Clone ID: LIB3072-043-Q1-K1-A8
gacttattaattgtgttaagaaatttaagtgaggagctagagaatgatgatgaagtctgctatgtgtgcagtggtggttgtagcacttcttcttctggcggaggtggggcccatggctgaggctgtgacatgcaccccaacagagttgagtccgtgtcttccagcaatcacttccggtgctaaaccttccaatgcttgttgcacgaagctgaagcagcaaaaaccatgcttatgtggctacctcaaaaacgctagcttgaagcagtatgttaactctcctaatgcccgaaaaaccgttgcttcttgtgggattccctttccaacttgttaattaattaagccttcttataattaaagtgtgggatatatatatatatatatagattaacaagttaatttatgcacactttgat

SEQ ID NO: 965 - DNA, 435 bp, Glycine max
  unsure at all n locations
  Clone ID: LIB3072-040-Q1-E1-H2
aacctcttgggctgatttatgtgcttgcatggtcgtgagaagatgatagaaggggattgcgtgtcagcctcgagcacctcgactgtctttcgagagagtctgctgtggtggccgtagaagaagaccgtaagacgaagcctaatactgtgaactttattatcggacgttagaagaagtctgagactgatgatgactcgaaatcgtgagtaccccgggataagaggactctataggaggctactggagacgtatctggcgaggaacccaagggtcacgctcctaaaaccattggaggccgcgataaataaggacccttaacgaagtagggagcgtcgatcttcggctgcgccagatccccgtcctataggggaatcttccgtccttgcggacacggaaggtgcaacggagagtgcangagaaagctcgcctgcgggc

SEQ ID NO: 966 - DNA, 287 bp, Glycine max
  Clone ID: LIB3072-040-Q1-E1-F5
gaacctttgggctgatttatgtgcttgcttatgtgcttgcatggtcgtgagaagatcatagaaggtgaacggtggacacggaattgaggttcaatgatctgttctcagaggaaacgcgaaaatcttaaatacccgcgagtgagtcaaggaggagaccgaggtcgagtcctactgtgatagactgtcatattactatcgacaaatctacgggataagagacgataccgacaacgcaatcgcatttgacgaaactaaagtgttcggcgtagccgaatagacgaaggagc

SEQ ID NO: 967 - DNA, 469 bp, Glycine max
  unsure at all n locations
  Clone ID: LIB3072-040-Q1-E1-F7
ggctctggaacctttgggctggatgtatgtgcattgcgttgagaagatgatagtaaggggtacctatgataantcaatcaagcaaagctaccttacagtgttttgcaaatacgtaagagtagttactgcccggccgtctcatccctctaccccgcgtctcctattatctctacatctcatctcctagtatactgatcgcaccctgcgttctgacatacgaacggcaatcttctaccgacaaactggcggtattacactcatcactcctgctacgataccaatcagtacaccggcgtgaacaatgagtagttctcaatgggtaaacagaaagacgttatctctatccgtggcgtacactctgtaacgcagtctgcataaagggaccgcgaatacactactactgctctttacacatgaacttaccaccactcgttcaacgttactctcccgaagttccaagacctgacct

SEQ ID NO: 968 - DNA, 398 bp, Glycine max
  Clone ID: LIB3072-040-Q1-E1-F8
acctttggtctgatgtatgtgcttgcatggtcgtgagaagatgatagcacgggatccctagcctgaatcaaataacctagcttagctcgttctgactacggagagggaaatacacgggcactagcctccgtcttcttccgctccagtcctcgacgcgataccgaacagagtagacgttaaagaccgtccgataaggaagtgtcagctttagggcacacgtccacctcataggtaacgcgtatacccgcgtatcactgacagacctactggcggctatcgctaaagtttcacctgtaaacgtcactgtagtaggttacgctgactgataccatcatcgttaaagacgttacgtaacaaatacataaataaagctacaataactctcaatctctatacac

SEQ ID NO: 969 - DNA, 403 bp, Glycine max
  Clone ID: LIB3072-040-Q1-E1-F9
aacctttggtctgatgtatgtgcatgcatggtcgtgaagatgatagaagggcatcgccgtgagaaaatgatagaaggggaacttaggatgttcaaaaaacaataaaagagtaaaaaaaaaaaaaaaaaaaaaaaaaaaaagtggttgtctcagaggacttaagtccatgcatgtgcgtacgtgatgctacagtctcctcacagcgctattcaaacctaacctatcggttgctgccccataatgctgcgatcgggaaaatttcggtgccatttaatccaactgttccgtagtatactttttccctgttagtcggtgcaacagtgaagaagtttgtattgactgtttcctttaatagccgtgtacttcgaacggtgaacgggatgtgtttcgcactggtgtacca

SEQ ID NO: 970 - DNA, 396 bp, Glycine max
  unsure at all n locations
  Clone ID: LIB3072-040-Q1-E1-G1
aacctttgggctgatttatgtgcttgcatggtcgtgagaagatgatagaagggcatcgtcgtgagaagatgatagaagggcatggtcgtnagaagatgatagaagggcatggtcgtgagaagatcttagatgggcatggtcgttaaacgatgatataggggcattgtcgtgagaagatgatagaaggtcacggtaaaaaatcaaaaaaaaataaaaaagtggttgtctcagatgacttaagtccattcatatgcgtacgttacgctacagtctcctcacagcgctattcaaacctaacctatcggttcgggtcccataatacaatgatcgggaaaatttcgttgccatttaatccaaccgatccgtactatactttatccctgttagtcgaggcaa

SEQ ID NO: 971 - DNA, 403 bp, Glycine max
  Clone ID: LIB3072-040-Q1-E1-G11
tcgtgagaagatcatagaccgggctcctaaatagagacgatgatttgacgctaagggcaattctccgaagtgtgcttgtgcgagtgttcgctacggttgcactgcaaagtattgcaagtattttgctggttcgcgaaatcttcgcggtacgtactattataccacttcgcctgataagcattacttgggtcctcctggcaaggcggacaacgaggcatccttacaagtcccgtaacaaacctcatctttttactgccaatgctcaaaagtcacggctctctacattttaagatctgaaggaaatagtttcaaaactgaacgatatcctattctcaactgatgctatatagtatgggcatcccaaagttccctcaaaacgcgcctccttctaaaactacctccc

SEQ ID NO: 972 - DNA, 478 bp, Glycine max
  Clone ID: LIB3072-040-Q1-E1-G2
tggaacctttgggctgatttatgtgcttgcatggtcgtgagaaaatgatagaagggaaggacaagaggtaaagtcggctcaagtttctcgatagagtcgaccacgacaatacgtgcggaagatactcagactacggagacgagtaacactacggagcaaagggcccggtactacacgaattagactcaagcgtcgccgaagaaggggaggcactggtatccgacgataccggggcagggtccttactatttaagctaagtaactgtaagagaaaagtaggaagtcttttcgaaagaggaacggaggggaagtaatgctacaaccacggctccggattaaattataacaactgccccgaccatgcggaggactgaaataaggctagctggtcaggttacatcgagagggatagtaaaaggtacgcataggaaaattacgcccgaacaacgcgcattacggccgcgcgcggttcgcgcgc

SEQ ID NO: 973 - DNA, 405 bp, Glycine max
  Clone ID: LIB3072-040-Q1-E1-G3
aacctttgggctgatttatgtgcttgcatggtcgtgagaagatgatagaaggggcacggaatacccctagcacaaggctacgcccgcggacggccccaacaaggaaaaaaaaagaaaaaaaaaaaaaaaaaaaagtggttgtctcagaggacttaagtccatgcatgtgcgtacgtgatgctacagtctcctcacagcgctattcaaacctaacctatcggttgctgccccataatgctgcgatcgggaaaatttcggtgccatttaatccaactgttccgtagtatactttttccctgttagtcggtgcaacagtgaagaagtttgtattgactgtttcctttaatagccgtgtaattcgaacggtgaacgggatgtgtttcgcagtggtgtaccaagtgtggt

SEQ ID NO: 974 - DNA, 463 bp, Glycine max
  Clone ID: LIB3072-040-Q1-E1-G4
aacctttgggctgatttatgtgcttgcatggtcgtgagaagatgatggaagggcatggtcgtcagaagatgatagaaggggacctaggatatgaatcaagaaagctccttacagttttttaaaaacgaagagtattactcctcccgtctctccctctccccgcgttcctattattctacattcattcctagttactgtcgaccctgcgtctgacaacgaaggcaatttctccgaaaacggcggtatacaccacactccgctagatacaatagtacccggcggaacaagagtagttttaatgggaaacgaaagacgtttctctatcgcggcgtaactctgtaacgagtctgataaagggaccggaataactactctgcttttacactgaacttgccccactgttgaaggttacttcccgagttccaagcctgacctacccgtagccacaacgtcgcgcgccgga

SEQ ID NO: 975 - DNA, 343 bp, Glycine max
  Clone ID: LIB3072-040-Q1-E1-G5
tggctctggaacctttgggtctgatttatgtgcattgcatggttcgatagaatattcatagaccggtgtcctcatagtaacacataacaaacaaacggcgaggggcgaatacataatacgtgctaaggcgcacgtcgccaccgtactccatctgcttccatcatcagtcatatatgctatatacgaaatccgactattattgactgtcaacctctacttcgcgacgacgtccacctacaattacgactatatccttactctcgtatatgtctatcgctaatctaacgtcatcgttaagacgcagtctcacactcacgctctcgacacctacactgtcacactc

SEQ ID NO: 976 - DNA, 384 bp, Glycine max
  Clone ID: LIB3072-040-Q1-E1-G7
tttgggctgatgtatgtgcatgcatggtcgtgaaagatgatagacgccgatcctaaaaataaccaacaaagacgagcgccgagggataatacggcggcgtcaaaggcgcgcccgccgtcctccccttccgcgggggccatagtcgtatgtacggaatcgagtcctcctaaaagcgactagctactaagccacgacgacgacgagcacctaaaattacgtcgcgactctcgtacgcgtatatgtctaacgttcttctaacgtagtcgcgaagacaccaggtcgaacctacgttatctagaccgcaagagtcgcacgcgtatatgtccatagttaggatagcgctgccgctccgatattaatgatcctcgtcataaattccgtaag

SEQ ID NO: 977 - DNA, 402 bp, Glycine max
  Clone ID: LIB3072-040-Q1-E1-G8
tggctctggaacctttgggctgatttatgtgcttgcatggtcgtgagaagatgatagacgggggcgctctatctatactatatatatctctacaggcgcagtggtgatatcaagactggagaaagaacggtgaaaatgatgctgccgtcgtctcccatatcgtcttctcctggaatttcagtctctacttaggtgaagaaactgaaggaggacccgaaggaggcgatttataaggcccatcccgacgccgagaccaacggaaaagaagtaggctgcaccgcaacgggctcccacgggaaggtcgccttaaaaatcgtagaaaatccttgagtatcccgtataggggaaaagggaatcggcaaaagcggaaagttctcttaccataaaggcagtctaccttac

SEQ ID NO: 978 - DNA, 434 bp, Glycine max
  Clone ID: LIB3072-040-Q1-E1-G9
ttggctccgaacctttgggctgatgtatgtgcttgcatggtcgtgagaagatgatagacggggatcgtaaaaataaccaacaaagacgagcccgagcaatactacggcggcgtcaaaggcgcgcccgccgtcctccccttccgcgggggccatagtcgtatgtacggaatcgagtcctcctaaaagcgactagctactaagccacgacgacgacgagcacctaaaattacgtcgcgactctcgtacgcgtatatgtctaacgttcttctaacgtagtcgcgaagacaccaggtcgaacctacgttatctagaccgcaagagtcgcacgcgtatatgtctatagttaggatagcgctgccgctccgatattaatgatcctcgtcataaattccgtaagcttaaagacgatcagaaaaatcaacagtctctctaaa

SEQ ID NO: 979 - DNA, 186 bp, Glycine max
  Clone ID: LIB3072-040-Q1-E1-H10
ccccagactgaatcaaagaacctaacctaactcactctcactacccacatcaaaatacctacacccccgtctccatcttcatccactccactcctccacaccatccactaaaacagtataactcaaagaccctcccatatcaaactatcccccttacccctcacctccacctcataactaaccact

SEQ ID NO: 980 - DNA, 309 bp, Glycine max
  Clone ID: LIB3072-040-Q1-E1-H11
tgcttgattatgtgcttgcatggtcgtgagaagatgatagaaggagaaagaaaggaagaaccaaaaaagagacagggaaaaaaaaaaaaaaagtggttgtctcagaggacttaagtccatgcatgtgcgtacgtgatgctacaatctcctcacagcgctattcaaacctaacctatcggttgctgccccataatgctacgatcgggaaaatttcggtgccatttaatccaactgttccgtagtatactttttccctgttagtcggtgcaacagtcaacaggtttgtattgactgtttcctttaatagcc

SEQ ID NO: 981 - DNA, 418 bp, Glycine max
  Clone ID: LIB3072-040-Q1-E1-H12
tggctcggaacctttgggttgtcgcagaggacttaagtccatgcatgtgcgtacgtgatgctacagtctcctcacagcgctttcaaacctacgtatcggttgctgccccataatgctgcgatcgggaaaatttcggtgccatttaatccaactgttccgtagtatactttttccctgttagtcggtgcaacagtgaagaggtttgtattgactgtttcctttaatagccgtgtagttcgaacggtgaacgggatgtgtttcgcagtggtgtaccaagtgtggtgggcgcggcggccatgtgtagtgcgattgtcatatccgttagtgtttcagtgtttgtcttccctgtccctcctttccttccctctgttatgcctgttggtcccttttgctaagtctcaaactgggggtctttccc

SEQ ID NO: 982 - DNA, 467 bp, Glycine max
  Clone ID: LIB3072-040-Q1-E1-F4
tggaacctttgggctgatttatgtgcttgcagatgatagaaggggatctgtagacctaaatgcccttgaggcgaggtcgaggtactctggctcggccctcagaacgggagtcgggtgcggagctcttactctatccgacggggcgagggataagaattccacgtagtctaaaaagtctaactctgtctccccttttgcctgccataacgataaacatcacgctgacgtatctgtccttggcgaacccgttaaatcagtccatcacagcgacacccgcgccggagtaaccgtacgttggtcggagaagaaggaaggcggggggtaagcctgggcccatactacgatgccaggcgccccggcattccattgcggatccggcaccggaataaagccaccgaactacgcctccgactcccgtcttaagtaaaataccctcgaggcccatccgtacgcgtagataaataacg

SEQ ID NO: 983 - DNA, 464 bp, Glycine max
  Clone ID: LIB3072-040-Q1-E1-D9
tggctcggaacctttgggctgatttatgtgcttgcatggtcgtgagaagatgatagaagggcatggtcgtgagaagatgatagaaggggacgtggtcgaacaaccaagaaaagttacccttacagtagttcaagaaaacgaagagtatcagtccgcctgtcactccctcatcctgtgttcctattctacattcattccttgttattgtttaggatgcgtctgatgcggacggtgacttgacctggaatggccctacacatcatgccccgttggtaacaagaggaaatggcggtggaacagaatgagttgtatctgggaaagatatccgtttcactatcgcagcgtaactctttaacttaaatctcaaggggccagaaaccaagcccgaactcgtacattttgttcaccatacaaatgaaatttcaaccccgtaaaacaagcctagccatttatagtaacgcgaa

SEQ ID NO: 984 - DNA, 354 bp, Glycine max
  unsure at all n locations
  Clone ID: LIB3072-040-Q1-E1-E1
gaacctttgggctgatttatgtgcttgtttatgtgcttgcatggtcgtgagaagaccatagaagggcatggtcgtgagaagatgatagaagggggttataatacatagtaatagtcattcntcttacctcctacccttaccattgaaaaaaaaaaaaaaaaaaaaaaaaaaaaaagtggttgtctcagaggacttaagtccatgcatgtgcgtacgtgatgctacagtctcctcacagcgctattcaaacctaacctatcggttgctgccccataatgctgcgatcgggaaaatttcggtgccatttaatccaactgttccgtagtatactttttccctgttagtcggtgcaac

SEQ ID NO: 985 - DNA, 380 bp, Glycine max
  Clone ID: LIB3072-040-Q1-E1-E10
tcgtcagaagatgatagaccgggacccaagaagtataaagagaagtaccagtatcagcagtactaataatcagctctagtcgaaacggttctcctagcgacggtactcgcggtttctaaattcgttttccctatcgccgagaagcttctagcgagaggttcctttctctctctaaggaatctcctcctacctacagccgcggttagcggtaagaagactaagatcggtaaattccacggaaccaacggcgatacggtcccgacggacggaatcgacgtactccctaagaaacgaaacggaaagggcgcccattagcccgcggataaacatcgcgtcaacgctcacggccataagctcacccatcatattaaacatcggct

SEQ ID NO: 986 - DNA, 420 bp, Glycine max
  Clone ID: LIB3072-040-Q1-E1-E11
aacctttgggctgatgtatgtgcttgcatggtcgtgagaagatgatagaagggaaccaacaaaatgtacaccctcaattagaaattgctgtctcactagacttaagtcgatacatctgcctacgttatactacagtctcctcacagcgctattcaaacctaacctatcgcttgatgacccataatgatgcgatcgcgaaaattacggtacaatttaatccaactgttccgtaatatacattatccctgttagtcgcatcaacagtcaataggtttaaattcactgctacctataataaccgtgtagttcgaaccgtgaacgcgatctgtttcgcaatcatttaccaagtctggattgcccggcgcccatatttaccgcgattgtcatatccgttaaggtatcaatttttgacttccctac

SEQ ID NO: 987 - DNA, 371 bp, Glycine max
  Clone ID: LIB3072-040-Q1-E1-E12
aacctttggctgatgtactgcttgctggtcgtgagaagctcatagaagggggcaccggcggacgtcgtacctttctggtccaagggcgccgccgttataatcgacgcggccgaggtacgtatcggggctaacaccgttgcgacggccggcggacctttaagaaaagaaggcacggagaggaaggacgcgacgatcaagaatgctcttacccataagctttaggtcctcgtttccgaaaagtacgtcgtcgttaatcgcctccgccgccgtcaatttagtaaatattaacgtaccgactccgaaggaacccgtcttactcacctttgagaagaataccctcccgccgatcagaccggactataataaggtac

SEQ ID NO: 988 - DNA, 466 bp, Glycine max
  Clone ID: LIB3072-040-Q1-E1-E2
tggaacctttgggctgatttatgtgcttgcatggtcgtggaagatgatagaaggggggaagagagaagaagacggtgctgagtggagtggcgttgccccggagggtagtggggacgatacatactatacatctaaatacacgtgtgaactcggctagggaccgttctaaggaatttcataaggtcgaagttactctctgcgagaaggcttaccccgtctctcttaaacgggctgatgttaagttcgaaaaattcatcacctgcctagatattttagagtagcgacttggaacagccggaagtcacaaacgtacaaactcccgagactcggaagcctaccgctaccccgaattccctcgcgacgcccaaccttcccgtcctccccccccctaccttacgaaacggaatacatatcggaccccgacccgtacgaccaactccgcaacaacaaaaagccaaataaacga

SEQ ID NO: 989 - DNA, 475 bp, Glycine max
  Clone ID: LIB3072-040-Q1-E1-E3
tggcttggacctttgggctgatttatgtgcttgcatggtcgtgagaagatgatagaaggggatagtaaaaataaccaacaaagacgagcccgaggaataatacggcggcgtcaaaggcgcgcccgccgtcctccccttccgcgggggccatagtcgtatgtacggaatcgagtcctcctaaaagcgactagctactaagccacgacgacgacgagcacctaaaattacgtcgcgactctcgtacgcgtatatgtctaacgttcctctaacgtagtcgcgaagacaccacgtcgaacctacgttatctagaccgcaagagtcgcacgcgtatatgtctatagttaggatagcgctgccgctccgatattaatgatcctcgtcataaattccgtaagcttagagacgatcagaaaaatcaacagtctctctaaacggatcaagctttcccacgtcccgcccgccacgccaggggaga

SEQ ID NO: 990 - DNA, 483 bp, Glycine max
  unsure at all n locations
  Clone ID: LIB3072-040-Q1-E1-E4
tggaacctttgggctgatttatgtgcttgcatggtcgtgagaagatgatagaaggggatagtaaaaataaccaacaaagacgagcccgagagaatagatacggcggcgtcaaaggcgcgcccgccgtcctccccttccgcgggggccatagtcgtatgtacggaatcgagtcctcctaaaagcgactagctactaagccacgacgacgacgagcacctaaaattacgtcgcgactctcgtacgcgtatatgtctaacgttcttctaacgtagtcgcgaagacaccaggtcgaatctacgttatctagaccgcaagagtcgcacgcgtatatgtctatagttaggatagcgctgccgctccgatattaatgatcctcgtcataaattccgtaagcttagagacgatcagaaaaatcaacagtctctctaaacggatgaagttttcccaggtcccgcccgncacgccaggggagataaacaaaat

SEQ ID NO: 991 - DNA, 207 bp, Glycine max
  Clone ID: LIB3072-040-Q1-E1-E5
aacctttggtctgatttatgtgcatgcatggtcgtgagcagatgatagacccggaccatcataaacagcacgacctcctagcatcgggtattcctatcctatatatgagtacccttcattattgttcctatgtcctttagtctccgtatttagacacctctctcgatgacgaagatcccataaaacttcgcgattacgatctaataa

SEQ ID NO: 992 - DNA, 480 bp, Glycine max
  Clone ID: LIB3072-040-Q1-E1-E6
ggctcggaacctttgggctgatttagtgcttgcatggtcgtgagaagatgatagacggggcgataccacccccaactgtcctaaccccgcttgaccccggacatgaagcagctcagtacgcaaacctcgccgtagagcacactgaggaaaacgggaagaagtcccgcgcgaccaagaaacaaccacgacctgcaacctgttctaaaaaaaaaaacacacaaaaaaaaaaaaaagtggttgtctcagaggacttaagtccatgcatgtgcgtacgtgatgctacagtctcctcacagcgctattcaaacctaacctatcggttgctgccccataatgctgcgatcgggaaaatttcggtgccatttaatccaactgttccgtagtatactttttccctgttagtcggtgcaacagtgaagaggtttgtattgactgtttcctttaatagccgtgtagttcgaacggtgaacgggatgtgtt

SEQ ID NO: 993 - DNA, 430 bp, Glycine max
  Clone ID: LIB3072-040-Q1-E1-E8
aacctttgggctgatgtatgtgcttgcatggtcgtgagaagatgatagacgggcatcgtcgtgagaagatgatagaaggggacatgaaaaataaaatataagttaagcgaaaaaaaaaaaaaaaaaaaaaaaaaaaaaaagtggttgtctcagaggacttaagtccatgcatgtgcgtacgtgatgctacagtctcctcacagcgctattcaaacctaacctatcggttgctgccccataatactgagatcgggaaaatttcgataccatttaatccaactgtaccgtagtatactttatccctgataatcggtgcaacactgaacaggtttgtatatgactgcttcccttaatagccgtatatctcgaacggttaacggcatgtctttcgcaatggtgtaccaagtctgcccgacgcggaagccatatc

SEQ ID NO: 994 - DNA, 472 bp, Glycine max
  Clone ID: LIB3072-040-Q1-E1-F1
tggaactttgggctgatttatgtgcttgcatggtcgtgagaagatgatagaagggggagccgttaccgaagaagaagtctagactggaaaaaccgattctcttaactttaactttactgccgtaaacgacttgacctacctcgccgtagaataggtagggtaagatttgctccgttaaacatcatgccttctctgaggatcttgagaagtataaggctgaacatgaggcctactggtctgctgcaaatagagatttcaaacatataaaccctgctgagccctgcatgtataagacaacacataggtgacacgtcgggccaccccctctatctcgcgccgacactatcgacaacgagccggtgcacccagagcgtacttacccgcccgcggaaacaccggactatcctcctagtaacgctcgcgagtctgacccggcccccaatccttataaggctcactccacatccgacga

SEQ ID NO: 995 - DNA, 277 bp, Glycine max
  Clone ID: LIB3072-040-Q1-E1-F11
agtcatggcgtgagacccacaaaccgaactttcaaccctgaggccttcatcttcgcggagcgactacacattgaaccccgggccagtgaactaacccgtagagcaaggaacaaggacgggaaaaaattaagttcatagagtcacgtacagagttaggtctgctggtgttcctgctggttttcatcaggccgaacatcgtacggcggacggcctaccctacctattagaacggtacgtagtctccccggccagttccaatattctccatattaccctt

SEQ ID NO: 996 - DNA, 470 bp, Glycine max
  Clone ID: LIB3072-040-Q1-E1-F2
tggaacctttgggctgatttatgtgcttgcatgtcgtgagaagatgatagaagggcatggtcgtgagaagatgatagaaggggacctatgataatcaatcaagaaagctccttacagttttttaaaaacgaagagtattactcctcccgtctctccctctccccgcgttcctattattctacattcattcctagttactgtcgaccctgcgtctgacaacgaaggcaatttctccgaaaacggcggtatacaccacactccgctagatacaatagtacccggcggaacaagagtagttttaacgggaaacgaaagacgtttctctatcgcggcgtaactctgtaacgagtctgataaagggaccggaataactactctgcttttacactgaacttgccccactgttgaaggttacttcccgagttccaagcctgacctacccgtagccacaacgtcgcgcgccggaacct

SEQ ID NO: 997 - DNA, 436 bp, Glycine max
  Clone ID: LIB3072-040-Q1-E1-F3
aacccttgggctgatttatgtgcttgtttatgtgcttgcatggtgagaagatgatacgagggcgagcgagcagcgagaacggagccgtaaggggcattggaaggccgtaccgtcagcacatctctctgtatcatgttggtggatgcgcgcaggccccttgctgcactaaagaccccttgcctggttgtcgaactggatgtcgcgcggaaatgcccctctttccttgaccattaccttactaccctttagctcttcctgttctctaatcacttccttaagaaggagtctcactctgtctctctggactgtttcactactactgactagggcaaaaagagtccctaaccggagaaaaagagcgggaagaagcgccatacgtccgtcgtcagagtctctagtaccacccggggcgatatcgagtaacatcggaatcgga

SEQ ID NO: 998 - DNA, 474 bp, Glycine max
  Clone ID: LIB3072-040-Q1-E1-D8
aacctttggtctgatttatgtgcttgcatggtcgtgagaagatgatagaccgggaacaaccccctcgctatcatttatctgccctgtcgctcttactgccctgtaccgtataagtatctctctccctttccatttccccctaggccctaatgtcttaatcacttacggtaaattgtcggtctagatttgaggcgcacttatcgcctgtcgtggccggcgtcgtcgccgggactcgcggaccttaatcggcctgcaacactcgtactaatttcgaagctagggcgagtaaggagggaaggaaggtaggagccccggagaatcccgtcgagggagagaagcacgttgagtatccttcgaggaagcacgcgtgtaatagaatcttggagaccacgtttcttactaatagtcctcctgtcgatatacgctgtaatcaagccgtcccgaacaaataaaggccaacgcgagacaccaacc

SEQ ID NO: 999 - DNA, 336 bp, Glycine max
  Clone ID: LIB3072-040-Q1-E1-C2
tggaacctttgggctgatttatgtgcttgcatatctgcatagataatataatggaagggcatggtcgtcagaagatgatggacggacatggacgtgagatgataatagaagggagaatcagagcctgaatgcagttaacgaaacgtaacacgatcagactacggagaggaaaatacccgagtaaccgtcaccgtcgtcttgcgcaccattcctcgacgcgatcgtaaagagagtcaaggtgaaagaaagtccgataacgacgtctaggacgcagtgcagacgatcacctgataggtaacgcgtatacatatctatgactgaaggccctactcgcgg

SEQ ID NO: 1000 - DNA, 450 bp, Glycine max
  Clone ID: LIB3072-040-Q1-E1-C3
tggaacctttgggctgatttatgtgcttgtttatgtgcttgtttatgtgcttgtttatgtgcttgtttatgtgcttgatggtcgtgagaagatgatagaagggcgacaggaaacagaaaaaaaaaaaaaaaaaaaaaaaaaaaaaagtggttgtctcagaggacttaagtccatgcatgtgcgtacgtgatgctacagtctcctcacagcgctattcaaacctaacctatcggttgctgccccataatgctgcgatcgggaaaatttcggtgccatttaatccaactgttccgtagtatactttttccctgttagtcggtgcaacagtgaagaggtttgtattgactgtttcctttaatagccgtgtagttcgaacggtgaacgggatgtgtttcgcagtggtgtaccaagtgtggttggcgcggcggccatgtgtagtgcgattgtcat

SEQ ID NO: 1001 - DNA, 437 bp, Glycine max
  Clone ID: LIB3072-040-Q1-E1-C4
aacctttgggctgatttatgtgcttgtttatgtgcttgcatggtcgtgaaagatgctacgaggggatagtaaaaataaccaacaaagacgagcccgaagaataatacggcggcgtcaaaggcgcgcccgccgtcctccccttccgcgggggccatagtcgtatgtacggaatcgagtcctcctaaaagcgactagctactaagccacgacgacgacgagcacctaaaattacgtcgcgactctcgtacgcgtatatgtctaacgttcttctaacgtagtcgcgaagacaccaggtcgaacctacgttatctagactgcaagagtcgcacgcgtatatgtctatagttaggatagcgctgccgctccgatattaatgatcctcgtcataaattccgtaagcttagagacgatcagaaaaatcaacagtctctctaaac

SEQ ID NO: 1002 - DNA, 330 bp, Glycine max
  Clone ID: LIB3072-040-Q1-E1-C5
tggctctggacctttgggctgatttatgtgcttgcatggtcgtgagaaatgctagaagcgggatcctaaaaataaccaacaaagacgagcgcgaagaataatacggcggcgtcaaggacgcgcccgtcgtcctccgactccgcgggcgccatagtcgtatgtacgcaatccagtcatcctaaaagcgactagctactaagccacgacgacgacgagcacctaaaactaagtcgcgactctcgtacgcgtatatgtccaacgtatcgaccaacgtactcgagcagacgccagcgtcgaacccacgttacctagaccgcgtgactcgtacgc

SEQ ID NO: 1003 - DNA, 263 bp, Glycine max
  Clone ID: LIB3072-040-Q1-E1-C6
aacctttgggctgatctatgtgcatgtttatgtgcttgcatagccgtgcccagatcctagaaggggatagtaaaaataatggacagggacgagccctatgagtaatacgtcgacgtcaaatccgtgtccgacgtcctccccttccgcatacgtcatagtcatatatccggatatccatccagtcaaaagcgaccaccatacccacccacgactaccacctagactctcgattacataccgtctcacgtacacgtctatgtctc

SEQ ID NO: 1004 - DNA, 358 bp, Glycine max
  Clone ID: LIB3072-040-Q1-E1-C7
aacaactaagaaaagttaccctgggatgggtcaagacaacgaagagtatgagtccgcctgtcactccctcattccgtgttcctattctacattcatatccatgttattctttatgatgcgtctcatgtatacggtcacttgacctggaatggccctacacatcattccccgttagtaacaagatgaaatcgcagtataacagaatgagttagatctgctaaagatatccgtttcactatcgcagcgtaactctttaacttaaatctcaatgggccagaaaccaagcccgaactcgtacattttgttcaccatacaaatgaaatttcaaccccgtaaacaaagcctagccatttatact

SEQ ID NO: 1005 - DNA, 425 bp, Glycine max
  Clone ID: LIB3072-040-Q1-E1-C8
tggtcggaacctttgggctgatttatgtgcttgcatggtcgtgagaagatgatagaccgggatagtaaaaataaccaacaaagacgaggccggggcaataatacggcggcgtcaaaggcgcgcccgccgtcctccccttccgcgggcggccatagtcgtatgtacggaatcgagtcctcctaaaagcgactagctactaagccacgacgacgacgagcacctaaaattacgtcgcgactctcgtacgcgtatatgtctaacgttcttctaacgtagtcgcgaagacaccatgtcgaacctacgttatctagaccgcaagagtcgcacgcgtatatgtctatagttaggatagcgctgccgctccgatattaatcatcctcgtcataaattccgtaagcttagagacgatcagaaaaatcaacagt

SEQ ID NO: 1006 - DNA, 462 bp, Glycine max
  unsure at all n locations
  Clone ID: LIB3072-040-Q1-E1-C9
ggcttggaacctttgggctgatgtatgtgcttgcatggtcgtgagaagatcatagaagggaacgtataagccattacggatcaaacgggaatggctagaaaagatacacgactagtcctagatggggaggaacgtccccgtcgtagcgtcccgaacccaacccccctcttctagtcgccagcactctcaacgaaaaacaccccacgaatacttaacgcgccacacgatatttagcgaaaaaggaaaaagagcaaaaacacacgcaccagaagccacaccacacgactcaacgggaggaaatagacaaagaaaaacaacaaaccgccaatgcagcgcccaaaaaaagcgagcgcttacgcaatctattctctacgcccagacccctctcacaccgcgcattaccggtacggaccacactcactcgncaaccaaccctcctctaacataagaagtatcgaccgg

SEQ ID NO: 1007 - DNA, 470 bp, Glycine max
  Clone ID: LIB3072-040-Q1-E1-D1
ggaacctttgggctgatttatgtgcttgcatggtcgtgagaagatgatagaaggggacgtaatcgaacaaccaagaaaagttaccctgacagtagttcaagaaaacgaagagtatcagtccgcctgtcactccctcattccgtgttcctattctacattcattccttgttattgtttaggatgcgtctgatgcggacggtgacttgacctggaatggccctacacatcatgccccgttggtaacaagaggaaatggcggtggaacagaatgagttgtatctgggaaagatatccgtttcactatcgcagcgtaactctttaacttaaatctcaaggggccagaaaccaagcccgaactcgtacattttgttcaccatacaaatgaaatttcaaccccgtaaacaaagcctagccatttatagtagcgcgaaagaaagaacttccggcgggttaccctcaaggacacactc

SEQ ID NO: 1008 - DNA, 468 bp, Glycine max
  Clone ID: LIB3072-040-Q1-E1-D10
aacctttggtctgatttatgtgcttgcatgtcgtgagaagatgatagaaggggacctatataatcaatcaagaaagctccttacaggtttttaaaaacgaagagtattactcctcccgtctctccctctccccgcgttcctattattctacattcattcctagttactgtcgaccctgcgtctgacaacgaaggcaatttctccgaaaacggcggtatacaccacactccgctagatacaatagtacccggcggaacaagagtagttttaatgggaaacgaaagacgtttctctatcgcggcgtaactctgtaacgagtctgataaaaggaccggaataactactctgcttttacactgaacttgccccactgttgaaggttacttcccgagttccaagcctgacctacccgtagccacaacgtcgcgcgccggaaccttcattgagcggctcgccgcggaggactca

SEQ ID NO: 1009 - DNA, 469 bp, Glycine max
  Clone ID: LIB3072-040-Q1-E1-D11
aacctttggtctgatttatgtgcttgcatgtccttagaagattattgaaggggacctatataatcaatcaacaaagctccgtacaggtttttatacacgaagagtatgactcctcccgtctctccctctctccgcgttcctattattctacattcattcctagttactgtcgaccctgcgtctgacaacgaaggccatttctccgaaaacggcggtatacactacactctgctagatacaataatacccggcggaacaagagtagttttaataggaaacgaaagacgtttcacgatcgcggcataactctataacgactcttataaatcgaccggaataactactctgcttttacactgaacatgatccactgcttaaagttacttccccgagttccaagtctgacctacccgtaagcacaacgtcacgctgcggaaccttcatttaacggctcgccaccgacgactca

SEQ ID NO: 1010 - DNA, 371 bp, Glycine max
  Clone ID: LIB3072-040-Q1-E1-D12
aacctttgggctgatttagtgctttctgtcgtgagtactcattgaacgggacccatataatcaatcaagacatctccgtacaggtttttaaagacgtagagttttcctcattacgtctcttcctctctacgcgttcctattattctacatacattcctagttactgtcaaatttgtgtctcacatcgaaggcaattttccagaaaaaggttgtatacaccacacacggattcatacactacttacagccgcaactagagttgttataattagaatcgataaatgttactcaatcaacgcctatatcgtcaccaagtacggtataggcatactcattactacacgacatttacacggcacttattacaccgc

SEQ ID NO: 1011 - DNA, 393 bp, Glycine max
  Clone ID: LIB3072-040-Q1-E1-D2
tggaacctttgggctgatttatgtgcttgcatggtcgtgagaagatgatagaaggggaaaatagaaaaaaaaaggcagggcctcgaacgcggaacctctaataaaacgagaccgacccaattggtgatggggaagagaggctaaatctctctccagtgaatatgtgccgtagtcctcgtccctttcgtcgtcccggcctttggcgttatctggctagtgttgggcctgtgcggcgggagtgtgcgtgagttatgctgctacggctggagataagtttctatctcgaggtgtaattagtaattgggagccttagcgggagccggcggctcggtggcgcgagggttcccacgaaggcgtgggagcggctggagtctgtggtggggttctggcgga

SEQ ID NO: 1012 - DNA, 378 bp, Glycine max
  Clone ID: LIB3072-040-Q1-E1-D3
tgggctgatttatgtgcttgcatggtcgtgagaaatgatagaaggggatactataccatctcccgtaatatattaaaagggaaaagggaaaaacaaaaaagaaaaagtggttgtctcagaggacttaagtccatgcatgtgcgtacgtgatgctacagtctcctcacagcgctattcaaacctaacctatcggttgctgccccataatgctgcgatcgggaaaatttcggtgccatttaatccaactgttccgtagtatactttttccctgttagtcggtgcaacagtgaagaggtttgtattgactgtttcctttaatagccgtgtagttcgaacggtgaacgggatgtgtttcgccatggtgtaccaagtgtggtg

SEQ ID NO: 1013 - DNA, 471 bp, Glycine max
  Clone ID: LIB3072-040-Q1-E1-D4
tggaacctttgggctgatttatgtgcttgcatggtcgtgagaagatgatagaaggggatctaatacagaacccgactagcgacaaaaaagaaaagagagatgaacagagagaatttaacacgctcaaatcagttatctctccgatcccggtctcctcatcgagtcctaacccaactcacgttctttgcttaaatttcctatccactagcgctctcctcccgtacggggacgccgtggtcataaaggtagaagagacagacggcgagagccgcgaagaagggatagaggaacgcccggtaagaaggatatccgtcgtgtactctgaccacactcatatctagaaggacaaatcgggctagtacctccaacggtactataggtacacgaaccgtaacatcacaaacaaaccaacgcattatatacacacgcacgcgcgcatccaccctaccaataaataaacgtcccgtcggt

SEQ ID NO: 1014 - DNA, 466 bp, Glycine max
  unsure at all n locations
  Clone ID: LIB3072-040-Q1-E1-C12
aacctttgggctgatgtatgtgcttgcatggtcgtgagaagatcatagaaggggaccttatcgagcgcagcaactaactactcccggcccgcctcctagcgtcccagcgcgcgacccaaccttaagaccccgagaacgctcagtcgcgggcgcggaagcagtcgtaatcgcggtagtaatcgtggccgtaataagcatctccccgatccgagtcacgccgagaagataattatagacatctccgccccgggcgccgggctcgcgaaggtttaaccggagggcgtcgaaacgggcgccgtagtcgacaatggcggtcgtaatcgcggactaagtcgtattcgtgatttacgtaatcgtaagccaagctaaaacccacaattccgaagtagacacaatcgcaacacacgcactaataaacaacaagnaccatgcgccgcgcccaacaaaacgactaccgtctgcaccc

SEQ ID NO: 1015 - DNA, 485 bp, Glycine max
  Clone ID: LIB3072-040-Q1-E1-B10
ggcttggaacctttgggctgatttatgtgcttgcatggtcgtgagaagatgatagacgggggggaccgccctcgcgcccctcaataagtaacggtcacgagactgcgggcgagctgaggaggacttacgatctgcccgacggatctaataaactgaggggtcccgagctggcctccgagtgataagggctgtacctctagtgaggaggaataggttaaagagaacgctcatacttagaaacgggagagggagaggccggagaaatagaagtaatcgctcgagaaggttaaggtctctatggataaagacgtcctcgtcgtcgtctacaagaaattcgaaggcgtctaaaaggatcgagcccactccctatataatttgctaaggctatcccgcgggaaacaagtacggagaacaaaatataccgatttcgagcgaatcccggctcccgcacagaccgcgccctccggccacccgcaaccctgcga

SEQ ID NO: 1016 - DNA, 430 bp, Glycine max
  Clone ID: LIB3072-040-Q1-E1-B11
aacctttgggctgatgtatgtgcttgcatggtcgtgagaagatgatagaaggggctcgaggaaaagtaagatctccccagaggtagggagagatatcgtaacagcccgcatatttaaacctatacagaaaccaaaaggcctaccacgagtcatagcaatctcaaaaccataagcattatatttggagacacaagaccagcagggcgagaaaagaaggaaagacatcattccagaccccctcagcaacaaaaatcaataatcagcaacaaaaatcaataatgcaacaaccaatacccacgccaaaaaaaaaaaaagaataggtattttatacaagcgatacgtatcaaacccctacagttcgacaaatcacacagtatacgtcagtcaagaaacaaggctacgtagggaaggccggcaagaaacgagaagg

SEQ ID NO: 1017 - DNA, 358 bp, Glycine max
  Clone ID: LIB3072-040-Q1-E1-B12
tttggtctgatgtatgtgcttgcatggtcgtgagaagatcatagaccggggccaataaaaattactattaaaaaagagatgagaaaaaccaaaaaaaaagtgggggtctcagaggacttaagtccatccatgtgcgtacgtaatactacaatctcctcacagcgctattcaaacctaacctatcggttgctaccccataatgctgcgatcgggaaaattccggtgccatttaatccaactgttccgtaatatacgtttaccctcttagtcggttcaacaatcaacaggttctgattgactgtttccattaatatacgtatagttcgaacggtaaacggaatgtatttcgacatggcgt

SEQ ID NO: 1018 - DNA, 458 bp, Glycine max
  Clone ID: LIB3072-040-Q1-E1-B2
tttgggctgatttatgtgcttgcatggtcgtgagaagatcatagaagggggttgaaacgcagcattaagacggtcctagccgcgcactgttctcccggtccttactctaccgccactacgctaagccttccatttgtaatcagcgaagcgcccgtaaaatagcacttacttatagaatttgcggaagaaaaatctatttaatcttatcctcacccttacaataatacaatgggggaatatttaatcgtcacgaaaatcgccccgttcttcaaggggcttacctacggccccggggtcatccatacgacggacgatttctcaatcgaaggattaagcttaatcctaaagtccgcgggaagactctagggaacacatgttccggtcctataatacgagttcgggccgtctacggcgataaacccctctcctatcccgggtacccataacggtaagtattt

SEQ ID NO: 1019 - DNA, 479 bp, Glycine max
  Clone ID: LIB3072-040-Q1-E1-B3
gaacccttgggctgatttatgtgcttgcatggtcgtgagaagatcatagaagggggtcctaaacataaccaacaaagacgagcccgaggaatagtacggcggcgtcaaaggcgcgcccgccgtcctccccttccgcgggggccatagtcgtatgtacggaatcgagtcctcctaaaagcgactagctactaagccacgacgacgacgagcacctaaaattacgtcgcgactctcgtacgcgtatatgtctaacgttcttctaacgtagtcgcgaagacaccaggtcgaacctacgttatctagaccgcaagagtcgcacgcgtatatgtctatagttaggatagcgctgccgctccgatattaatgatcctcgtcataaattccgtaagcttagagacgatcagaaaaatcaacagtctctctaaacggatgaagttttcccaggtcccgcccgccacgccaggggagataaacaaaat

SEQ ID NO: 1020 - DNA, 454 bp, Glycine max
  Clone ID: LIB3072-040-Q1-E1-B4
tgggctgatttatgtgcttgcatggtcgtgagaagatgatagaagggcatcgtcgtcagaagatgatagaagggcatggtcgtgagaagatgatagaagggcatggtcgtgagaagatgatagaagggcatggtcgtgagaagataaaaaaaaaaaaaaaaaaaaaaaaaaaaagtggttgtctcagaggacttaagtccatgcatgtgcgtacgtgatgctacagtctcctcacagcgctattcaaacctaacctatcggttgctgccccataatgctgcgatcgggaaaatttcggtgccatttaatccaactgttccgtagtatactttttccctgttagtcggtgcaacagtgaagaggtttgtattgactgtttcctttaatagccgtgtagttcgaacggtgaacgggatgtgtttcgcagtggtgtaccaagtgtgggtggcgcggc

SEQ ID NO: 1021 - DNA, 463 bp, Glycine max
  Clone ID: LIB3072-040-Q1-E1-B5
ctggctcggaacctttgggctgatttatgtgcttgtttatgtgcttgcatggtcgtgagaagatcatagaaggggatatcgaccgagagaaaaacaacggaggtccatatcaaggccgcccgtacctccggatccccaacccccgcaagtaccctagacacctacagagcggagggcgtaggggaacgcgggaggctcatcatcttagacaacgaagtaacaaagtccaccttccgcgctctcgttgtaaaagacgaaaacgccaaagccatcaagaaccgtcgcgtctagactgagaaatccggtaagaatttcagccgctcgcgcgtcgccacgtctcctaatatagtaaaaacgctcggagttgacttcaaggccgttacaattactctaaaatgtcgtaattccgtcaactgtttcgccggcataagcgcggattccatatctccttccaagacagcat

SEQ ID NO: 1022 - DNA, 477 bp, Glycine max
  Clone ID: LIB3072-040-Q1-E1-B6
tggctcggaacctttgggctgatttatgtgcttgtttatgtgcttgtttatgtgcttgtttatctgcttgtttatgtgcttgtttatgtgcttgcatggcgtgagaagatgatagaagggcatggtcgtgagaagatgatagaagggcatggtcgtgagaagatgatagaagggcatggtcgtgagaagatgatagaagggcatggtcgtgagaagatgatagaagggcatggtcgtgagaagatgatagaagggcatggtcgtgagaagatgatagaagggcatggtcgtgagaagatgatagaaggggaaaaagaaaaaaaaacacgtaacaaaaaaaaaaagtggttgtctcagaggacttaagtccatgcatgtgcgtacgtgatgctacagtctcctcacagcgctattcaaacctaacctatcggttgctgccccataatgctgcgatcgggaaaatctcggtgccattta

SEQ ID NO: 1023 - DNA, 454 bp, Glycine max
  Clone ID: LIB3072-040-Q1-E1-B7
ggctctggaacctttgggctgatttatgtgcttgcatggtcgtgagatgatatgagggggagcgcgagagaaattagcgatcgatcccctgagagagaaaaataaaaacgggcccttgctaccttactacgaatgtctcctttacctcttctcctccttctcctgccctcgtaccagctctcgtgaagaaaatcggcgacgcgatggagtcgtaaaccggtgcgaagtacaaattagcactacgcgaagcctaggtatataaaggcgatagagctaaagcatatcacaggggaaaatctatcgacggaatcgcccctgacctcagtctcgaaagaaacaacttaaccgaacccgagtccggcatcggctaagcgactaaaggccgggattagcgaccaccgtgaacgcgctccggcgagaagtgcaagtcgaaaacattactaaaatccggtca

SEQ ID NO: 1024 - DNA, 452 bp, Glycine max
  Clone ID: LIB3072-040-Q1-E1-B8
ggtcggaacctttgggctgatttatgtgcttgcatggtcgtgagaagatgatagacgggggacaaggtaaaaaaaaaaaaaaaaaagaaaaggaaaaagtggttgtctcagaggacttaagtccatgcatgtgcgtacgtgatgctacagtctcctcacagcgctattcaaacctaacctatcggttgctgccccataatgctgagatcgggaaaatttcggtgccatttaatccaactgttccgtagtatactttttccctgttagtcggtgcaacagtgaacaggtttgtattgactgtttcctttaatagccgtgtagttcgaacggtgaacgggatgtgtttcgcaatggtgtaccaagtgtggtgggcgcggcggccatgtgtagtgcgattgtcatatccgttagtgtttcagtgtttgtcttccctgtccctcctttccttccct

SEQ ID NO: 1025 - DNA, 437 bp, Glycine max
  Clone ID: LIB3072-040-Q1-E1-B9
aacctttgggctgatttatgtgcttgcatggtcgtgagaagatgataggggggttacatataaccttcaaacccaacgcgctgcgccctacaggcgaaattactagagaccccaacaatcacgtaacgaaacacaaactaacgcaaaacacttatgcacccgacgaggcccaagcagcatcttaacaaggcgacccctatcgttctgcgtagccgcactcgcccaacgaacgaacaacgtacaatgccccccagcagtattcgcacgtaaaaaaaaaaaaaaaaaaaaaaaaaaaaaagtggttgtctcagaggacttaagtccatgcatgtgcgtacgtgatgctacagtctcctcacagcgctattcaaacctaacctatcggttgctgccccataatgctgcgatcgggaaaatttcggtgccatttaatccaa

SEQ ID NO: 1026 - DNA, 464 bp, Glycine max
  Clone ID: LIB3072-040-Q1-E1-C1
aacctttgggctgatttatgtgcttgtttatgtgcttgcatggtcgtgagagatgatagaacggggttgtacgggccgccaagccccggttcgcggttaccgtaacacgtagagtgagcctcttgacgtgaagaagtgtagagaggaggataatttctaaatatctgccctttctgcatatgatagcgagaagaagaagagaaagagaaagagaaagaagaaaactgaggaactaaatgagtagttttaggccgaggcacgtttcaaacttccagcagatctggccactttaaccgccgtataaaaggaaaacgtcgaaattattatagagaacctcaatttaatttttaagaaaaaaaaaaaaaaaaaaaaaaaaaaaaaagtggttgtctcagaggacttaagtccatgcatgtgcgtacgtgatgctacagtctcctcacagcgctattcaaacctaacct

SEQ ID NO: 1027 - DNA, 431 bp, Glycine max
  Clone ID: LIB3072-040-Q1-E1-C10
gcttgaagatgatagaaggggaagagagagcaacgccaggaaagggaaaaagaagaagagagaaagatcatacggtcgtctacggcggtcatatcggttctttcttcttattcgacgtcctcaaatacgatgtcccgtttcttaaatcctgctaaactactctccctatataaaatttaatcggggtgaccgggcccctaaacgataagaaaaatgccggcgggtacgtttaaaacaagatcgttccaaaggatataggcgacgccgaaatcgcagacgctaaataggggactctcaacggataaccgaaggtattctaatcctcggacaggagcgaagaaaagtgcaccgaaagcggcggcgccgataagaaaaagaaaaaaagaaagaagaaggaggccaaagaatctacgcccgaaacggaaacggac

SEQ ID NO: 1028 - DNA, 472 bp, Glycine max
  Clone ID: LIB3072-040-Q1-E1-C11
gaacctttgggctgatttatgtgcttgcatggtcgtgagaagatgatagaaggggatttcatcatacaaaccggactgatggcacggagaaaactgcaacccgcgacggcccaaaattactatcaaacgaccccaaattaccataaaacgtacaccctacgacgcagccagcccaaccgaaacgaaacgactaaactgacaaaaaaaccagacgattaaactaaattcaaacaacaagtcagaggaaaaaaaacaacccaataaaaaaaaataatccactcatacgaagtacaacaacaacctcacaaaaggaaaaccaagaaacgggaaaaaaaaaaaaaaaaaaaaaaaaaaaaagtggttgtctcagaggacttaagtccatgcatgtgcgtacgtgatgctacagtctcctcacagcgctattcaaacctaacctatcggttgctgccccataatgctgcgatccgga

SEQ ID NO: 1029 - DNA, 232 bp, Glycine max
  Clone ID: LIB3072-040-Q1-E1-B1
aaggggatatccaccgagaggaaacgacggacgtccatatcaagggcgcccgtacctccggatctccaacccccgcaagtaccctacacacctacagagctcaaggcgtaggggaacgccggaagctcatcatcttagacaacgaagtaacaaagtccaccttccgcgctctccttgtaaaagaccaaaacgccaaagccatcaacaaccgtcgcgtctaaactcacaaatc

SEQ ID NO: 1030 - DNA, 387 bp, Glycine max
  Clone ID: LIB3072-039-Q1-E1-H6
tttgggctgatttatgtgcttgcttatgtgcttgtttatgtgcctgcatggccgtgagaagatgatagaaggggatagtaaggataaccaacaaagacgagcccgaagaataatacggcggcgtcaaaggcgcgcccgccgtcctccccttccgcgggggccatagtcgtatgtacggaatcgagtcctcctaaaagcgactagctactaagccacgacgacgacgagcacctaaaatcacgtcgcgactctcgtacgcgtatatgtctaacgttcctctaacgtaatcgcgaagacaccacgtcgaacctacgttatctagaccgcaagagtcgcacgcgtatatctccatagctaggatagcgctgccgctccgatattaatcat

SEQ ID NO: 1031 - DNA, 343 bp, Glycine max
  Clone ID: LIB3072-039-Q1-E1-H7
aacctttgggctgatttatgtgcttgcatggtcgtcagaagatgatagcagggggagcgtgatatcatataaatcctaggaccactgagatctgcgaatcgtagtatttccagaccctaccattcaagatcaggcgaagtattggaagtgcaacagaatggacacgcatacctggcgccaaatgtaccaagatacttcatctaacatggcgtatgttactcgacacaacatccgatacaaagtagaacccgtaagaatccaccgactagctactcaccaactaatgtacaacccgattcgacataggagaagcaccagaagatctcaagatctcgatagacta

SEQ ID NO: 1032 - DNA, 293 bp, Glycine max
  Clone ID: LIB3072-039-Q1-E1-H8
gaacctttgggctgatttatgtgcagtgttatgtgcttgcatcgtcgtcccaagatcatagaaggggatggtataaataagctacagagacgagcccgaagagtaatacggcggcgtcaaaggcgcgcccgccgtcctccccatccgcgggggccatagtcgtatgtacggaatcgagtcctcctaaaagcgactacctactaagccacgacgacgacgatcacctcaaattacgtcgcgactctcgtacgcgtatatgtctaacgttcatctaacgtagtcgcgaacacacc

SEQ ID NO: 1033 - DNA, 385 bp, Glycine max
  Clone ID: LIB3072-039-Q1-E1-H9
aacctttgggctgatgtatgtgcttgtttatgtgcttgcatggtcgtgagaagatcactagaggggggggctgtagcgattacatgtgggtgatcgcccattaaaaagggaaaaaaaaaaaaaaaaaaaaaaagtggttgtctcagaggacttaagtccatgcatgtgcgtacgtgatgctacactctcctcacagcgctattcaaacctaacccatcggttgctgccccataatgctccgatcgggaaaatttcggtgccatttaatccaactgttccgtagtatacattttccctgttagtcggcgcaacagtgaacaggtttgaattgactgtttcatttaatagccgtgtagttcgaacgcatcaacgggatctgtttcgc

SEQ ID NO: 1034 - DNA, 392 bp, Glycine max
  Clone ID: LIB3072-040-Q1-E1-A1
ctttgggctgatttatgtgcttgcatggtcgtgagaagatgatagaaggggatagtaaaataacccctaaatctaaccattacgttacaattcaaactcttctcccgcccttgagctagagagtaatggtatgcattaagtaaattgtctgtaagcttattggtggaaaggtgttgaggaagtaaccggtgatcaaagttgtctgtaagctagtcttggttattggtggagcgaagaagttttattgtcctaggtttggaatggcggtctcgagggagactagaaagcattagaagagtatcgaatcctcgacttgaaaatctttaccttagaggtctgctagagaaactgtctaggaccctaaaatagactcctgcccttagagtagtgtc

SEQ ID NO: 1035 - DNA, 486 bp, Glycine max
  Clone ID: LIB3072-040-Q1-E1-A10
ttggcccggaacctttgggctgatttagtgcttgcatggtcgtgagaagatgatagaaggggatcgtaaaaataaccaacaaagacgagcccggggaataatacggcggcgtcaaaggcgcgcccgccgtcctccccttccgcgggggccatagtcgtatgtacggaatcgagtcctcctaaaagcgactagctactaagccacgacgacgacgagcacctaaaattacgtcgcgactctcgtacgcgtatatgtctaacgttcttctaacgtagtcgcgaagacaccaggtcgaacctacgttatctagaccgcaagagtcgcacgcgtatatgtctatagctaggatagcgctgccgctccgatattaatgatcctcgtcataaattccgtaagcttagagacgatcagaaaaatcaacagtctctctaaacggatgaagttttcccaggtcccgcccgccacgccaggggagataaacaaaat

SEQ ID NO: 1036 - DNA, 479 bp, Glycine max
  Clone ID: LIB3072-040-Q1-E1-A11
tggctctggaacctttgggctgatttatgtgcttgcatggtcgtgagaagatgatagaaggggacctatataatcaatcaagaaagctccttacgagttttttaaaaacgaagagtattactcctcccgtctctccctctccccgcgttcctattattctacattcattcctagttactgtcgaccctgcgtctgacaacgaaggcaatttctccgaaaacggcggtatacaccacactccgctagatacaatagtacccggcggaacaagagtagttttaatgggaaacgaaagacgtttctctatcgcggcgtaactctgtaacgagtctgataaagggaccggaataactactctgcttttacactgaacttgccccactgttgaaggttacttcccgagttccaagcctgacctacccgtagccacaacgtcgcgcgccggaaccttcattgagcggctcgccgcggaggactca

SEQ ID NO: 1037 - DNA, 441 bp, Glycine max
  Clone ID: LIB3072-040-Q1-E1-A12
tggctcggaacctttgggctgatttatgtgcttgtttatgtgcttgattatgtgcttgtttatctgcttgtttatgtgcttgcatggtcgtaaggggatgatagaagggacgacactaataatatagctttaggtaaaataaaatcaatataaataataccagtaaaaaaaaaaaaaaaaaaaaaaaaaaaaagtggttgtctcagaggacttaagtccatgcatgtgcgtacgtcatgctacagtctcctcacagcgctattcaaacctaacctatcggttgctgccccataatgctgcgatcgggaaaatttcggtgccatttaatccaactgttccgtaatatacttattccctgttagtcggtgcaacactgaacaggtttgtattgactgtttcctttaatagccgtgtaattcgaacggtgaacgggatctgttt

SEQ ID NO: 1038 - DNA, 402 bp, Glycine max
  Clone ID: LIB3072-040-Q1-E1-A2
aacctttgggctgatttatgtgcttgcatggtcgtgagaaaatcatagaagggcgcctgcgcactcggccgtcaacctgagcgtcaccagctcgcggcccggccggcccgcaattttgtcatccgggccacgcccgaccgcacaccacttcagagaaacaaaaaccccaaaccactagcatgcaccggcaccaaaaaaaaaaaaaaaaaaaaaaaaaaaaaaagtggttgtctcagaggacttaagtccatgcatgtgcgtacgtgatgctacagtctcctcacagcgctattcaaacctaacctatcggttgctgccccataatgctgcgatcgggaaaatttcggtgccatttaatccaactgttccgtagtatactttttccctgttagtcggtgcaac

SEQ ID NO: 1039 - DNA, 413 bp, Glycine max
  Clone ID: LIB3072-040-Q1-E1-A3
tgggctgatttatgtgcttgcatggtcgtgagaagatgatagaaggggatagtaaaaataaccaacaaagacgagcccgagagaatagtacggcggcgtcaaaggcgcgcccgccgtcctccccttccgcgggggccatagtcgtatgtacggaatcgagtcctcctaaaagcgactagctactaagccacgacgacgacgagcacctaaaattacgtcgcgactctcgtacgcgtatatgtctaacgttcttctaacgtagtcgcgaagacaccaggtcgaacctacgttatctagaccgcaagagtcgcacgcgtatatgtctatagttaggatagcgctgccgctccgatattaatgatcctcgtcataaattccgtaagcttagagacgatcacgaaaatcaacagtct

SEQ ID NO: 1040 - DNA, 472 bp, Glycine max
  Clone ID: LIB3072-040-Q1-E1-A4
ttgggctgatttatgtgcttgtttatgtgcttgtttatgtgcttgcacggatgatagcacggggacgaaataaaaaaaaacggctctagagaaaaaaaaaaaagaaaaaaaaaaaaaaaagtggttgtctcagaggacttaagtccatgcatgtgcgtacgtgatgctacagtctcctcacagcgctattcaaacctaacctatcggttgctgccccataatgctgcgatcgggaaaatttcggtgccatttaatccaactgttccgtagtatactttttccctgttagtcggtgcaacagtgaagaggtttgtattgactgtttcctttaatagccgtgtagttcgaacggtgaacgggatgtgtttcgcaatggtgtaccaagtgtggtgggcgcggcggccatgtgtagtgcgattgccatatccgttagtgtttcagtgtttggcttccctgtccctcctttccttcc

SEQ ID NO: 1041 - DNA, 455 bp, Glycine max
  Clone ID: LIB3072-040-Q1-E1-A6
tggctcggaacctttgggctgatttatgtgcttgcatggtcgtgagaagatgatagacggggatagtaaaaataaccaacaaagacgagcccgaggaataatacggcggcgtcaaaggcgcgcccgccgtcctccccttccgcgggggccatagtcgtatgtacggaatcgagtcctcctaaaagcgactagctactaagccacgacgacgacgagcacctaaaattacgtcgcgactctcgtacgcgtatatgtctaacgttcctctaacgtagtcgcgaagacaccaggtcgaacctacgttatctagaccgcaagagtcgcacgcgtatatgtctatagttaggatagcgctgccgctccgatattaatgatcctcgtcataaattccgtaagcttagagacgatcagaaaaatcaacagtctctctaaacggatgaagttttcccaggtcc

SEQ ID NO: 1042 - DNA, 429 bp, Glycine max
  Clone ID: LIB3072-040-Q1-E1-A7
gatttatgtgcttgcatggtcgtgagaagatgatagacggggaccgtaaaaataaccaacaaagacgagcccgaggaataatacggcggcgtcaaaggcgcgcccgccgtcctccccttccgcgggggccatagtcgtatgtacggaatcgagtcctcctaaaagcgactagctactaagccacgacgacgacgagcacctaaaattacgtcgcgactctcgtacgcgtatatgtctaacgttcttctaacgtagtcgcgaagacaccaggtcgaacctacgttatctagaccgcaagagtcgcacgcgtatatgtctatagttaggatagcgctgccgctccgatattaatgatcctcgtcataaattccgtaagcttagagacgatcagaaaaatcaacagtctctctaaacggatgaagttttccc

SEQ ID NO: 1043 - DNA, 432 bp, Glycine max
  Clone ID: LIB3072-040-Q1-E1-A8
aacctttgggctgatttatgtgcttgtttatgtgcttgcatggtcgtgagaagatcactagaggggatagtaaaaataaccaacagagacgagcccgaagaataatacggcggcgtcaaaggcgcgcccgccgtcctccccttccgcgggggccatagtcgtatgtacggaatcgagtcctcctaaaagcgactagctactaagccacgacgacgacgagcacctaaaattacgtcgcgactctcgtacgcgtatatgtctaacgttcttctaacgtagtcgcgaagacaccaggtcgaacctacgttatctagaccgcaagagtcgcacgcgtatatgtctatagttaggatagcgctgccgctccgatattaatgatcctcgtcataaattccgtaagcttagagacgatcagaaaaatcaacagtctct

SEQ ID NO: 1044 - DNA, 466 bp, Glycine max
  unsure at all n locations
  Clone ID: LIB3072-040-Q1-E1-A9
ttggcttggaacctttgggctgatttatgtgcttgcatggtcgtgagaagatgatagaaggggatcccgagcctgaatcaaataacctaacctagctcgttctgactacggagaggaaaatacccgggcccccgcctccgtcttcttccgctccagtcctcgacgcgatggcgaagagagtagaggtgaaagaccgtccgataaggaggtatgggccttagggcagacgtccacctgataggtaacgcgtatacgcgcgtaggagtgacggccctactggcggttagcgttgaggtttctcctgtaaacgtccccgtagtaggttacgccgactgaaaccatcatcgttaaagaggttacgaaacaaataaataaataaacaaacaaacagtctcaattgatatacacgcatgcagcgctngggcctcagtcagtcaggcaggcatgcgcgctccccggcactgac

SEQ ID NO: 1045 - DNA, 436 bp, Glycine max
  Clone ID: LIB3072-039-Q1-E1-H5
ttggcttggaacctttgggctgatttatgtgcttgcatggtcgtgagaagatgatagaccgggaggtggaactcaggggcaatgttctgaccacgagcttccccttaggtgcggcccccattcaatttcataacctgttgacttccttagccggggccccctgtccctagtgaagagtggcgcacacagaaatttcacctttttcacgtattaggggaaccgaacacagaaacaagaaaaaggtgaaaaaaaaaaaaaaaaaaaaataaaaaaaagtggtttctcagaggacttaagtccatgcatgtgcgtacgtgatgctacagtctcctcacagcgctattcaaacctaacctatcggttgctgccccataatgcttcgatcgggaaaatttcggtgccatttaatccaactgttccgtactatactttttcc

SEQ ID NO: 1046 - DNA, 451 bp, Glycine max
  Clone ID: LIB3072-039-Q1-E1-F9
ggctccgaacctttgggctgatttatgtgcttgcatggtcgtgagaagatgatagaagggggtagtgtccgacccgaggttaggtaagtgcgagctaattattatattctgttcggcctatgtcattttccctcgtctcctcctcattccctaagccccaaaagcacaaagacggtagagataccttcacccattctagagctggcgaatgagggatatttcgataagtctcgtgattaaactcctgacgtcgcttctgatgtccgttctgagtaggatttagatagtaaagccgttcgtgaaatacgtattaaaattaatccggctacggctcctggagaaaccatgattaacgttaatgccgatcatcagaagacagcgtgcgatattcctaggaatactggtcccgctctaaacgacgcgggatcggacgttgataatcgtaaggctt

SEQ ID NO: 1047 - DNA, 401 bp, Glycine max
  Clone ID: LIB3072-039-Q1-E1-G1
tggaacctttgggctgatttatgtgcttgcatggtcgtgagaagatgatagaagaggtcgtagtagtaatcccaaatgttgaagaaagcttacttaactcttgaagtttcctattgtaccgtaattacgctgagaagaaaggccagagagttaaaggaagaaaatgcgatctcgggtttagtcgccagggacggtgaatacgctcccggtgctgtctgtactcccgttcttcctaacgacattcctacctacgctatcgactcgcttgggagggaaatatccgcttgtactataggcggaacgaaggccaaggtcgatagagacgaactgctctttcacgtcgtcacgtccgtcgtataggatgccgtcgttagacgtaaggaatcgggtacaatcgtctc

SEQ ID NO: 1048 - DNA, 211 bp, Glycine max
  Clone ID: LIB3072-039-Q1-E1-G10
ccaacaaagacgaggccggggaataatacggccgcgtcaaaggcgcgcccgccgtcctcccctcccgcgggggccatagtcgtacctacggaatcgagtcctactaaaagcgactacctactaagccacgacgacgacgagcacctcaaattccgtccgcactctcgtacccgtatatgtctaacgttcccccaacgtacaccccaagaca

SEQ ID NO: 1049 - DNA, 376 bp, Glycine max
  Clone ID: LIB3072-039-Q1-E1-G2
tggaacctttgggctgatttatgtgcttgtttatgtgcttgcatggtcgtgagaagatcatagaaggggacctcttcagagacgttatagttgtggaagcaagtataatccgccgagtcatccaagttccgccgcgcacctaatcctcatgcatacacaaccgcgccacacagccccggctccaagttccggttcccgcgaaatcgtaatcgcccgcggtccggaccccccccagttaacgccgccaacggcgcccttcgcaccccatcgccccttcccggcgttaccgagaaccgaagaacgagatagaccctatcggagcgcgccgagtccccagttcgccagctgccaacgacgcaataccctcgtcccgaat

SEQ ID NO: 1050 - DNA, 347 bp, Glycine max
  Clone ID: LIB3072-039-Q1-E1-G3
tggaacctttgggctgatttatgtgcttgcatggtcgtgaaagatgatagaagggggcagtacacccgagatcaatctggagagaaagagagagagagagagaaaaacggtcgacataagcggaggagacgtagcgagattggcggcaacacgcgacaataagcgcggtcgtatagccttacgtatcggcggccttatccgtgggcgtataagcgctggtacgataatcggaggtggcgactatgcgatacgtctgcgtggagagcatcgcgggcgtaacttacgtctacgctttaagatcgtggtcctcggaatcggccgtagacgcggtatagaccgtctacgcg

SEQ ID NO: 1051 - DNA, 471 bp, Glycine max
  unsure at all n locations
  Clone ID: LIB3072-039-Q1-E1-G4
gaacctttgggctgatttatgtgcttgcatggtcgtgagaagatgatagaaggggacctatataatcaatcaagaaagctccttacgagttttgtaaaaacgaagagtattactcctcccgtctctccctctccccgcgttcctattattctacattcattcctagttactgtcgaccctgcgtctgacaacgaaggcaatttctccgaaaacggcggtatacaccacactccgctagatacaatagtacccggcggaacaagagtagttttaatgggaaacgaaagacgtttctctatcgcggcgtaactctgtaacgagtctgataaagggaccggaataactactctgcttttacactgaacttgccccactgttgaaggttacttcccgagttccaagcctgacctacccgtagncacaacgtagcgcgccggaaccttcattgagcggctcgtcgcggaaggctca

SEQ ID NO: 1052 - DNA, 263 bp, Glycine max
  Clone ID: LIB3072-039-Q1-E1-G5
aacctttgggctgatttatgtgcgtcgttagtgcttgctggtcgtgacaagatcatagaacgggacataactccccctggaaaagagagcacaaaacaagggacataaaaaaaaaaaaaaaagtggttatctcagaggacttaagtccatacatgtgcgtacgtaatgctacagtctcctcacagcgctattcaaacctaacctatcggttagcaccccataatgctgcgatcgggaaaatttccatgccatttaatccaact

SEQ ID NO: 1053 - DNA, 428 bp, Glycine max
  Clone ID: LIB3072-039-Q1-E1-G6
gaacctttgggctgatgtatgtgcatgcatggtcgtggaagatgatagaccggtgcagcaagtgatgaaacgtcctgtgcgcccgagaacaagtgcagacttggggacctttgacacaggctaattccctgaatcgtcgtcgaacttatgggtaggtaaaaaaaaaaaaaaaaaaaaaatcaaaaaagtggttgtctcagaggacttaagtccatgcatgtgcgtacgtgatgctacagtctcctcacagcgctattcaaacctaacctatcggttgctgccccataatgctgagatcgggaaaatttcggtgccatttaatccaactgttccgtagtatactttttccctgttagtcggtgcaacagtgaaaaggtttgtattgactgtttcccttaatagccgtgtaattcgaacggttaacggga

SEQ ID NO: 1054 - DNA, 271 bp, Glycine max
  Clone ID: LIB3072-039-Q1-E1-G7
gaacctttgggctgatttagtgcttgctggtcgtgagaagatgatagacggggcataaaatcaatctctaccaaaaagggaagagagaaaccaaaaagttggtggctgtctcaacttacttaagtccatgtatgtgcgtacatcatcattcagtctactcacatagttattcatacctaacctattggttgctgacacataatgcatcgatcgagaaaatttcgcttcaattcaatccaaccgttacgtaacatacctcctcccagttagt

SEQ ID NO: 1055 - DNA, 395 bp, Glycine max
  Clone ID: LIB3072-039-Q1-E1-G8
aacccttgggctgatttatgtgcgtgtttatgtgcttgtttatgtgcttgcatggccgtgagaagatgatagaaggggatagtaaaggtaacgaacaaagacgagcccgaagaataatacggcggcgtcaaaggcgcgcccgccgtcctccccttccgcgggggccatagtcgtatgtacggaatcgagtcctcctaaaagcgactagctactaagccacgacgacgacgagcacctaaaatcacgtcgcgactctcgtacgcgtatatgtctaacgttcttctaacgtagtcgcgaagacaccatgtcgaacctacgttatctagaccgcaagagtcgcacgcgtatatgtctatagctaggatagcgctgccgctccgatattaatgatcctc

SEQ ID NO: 1056 - DNA, 358 bp, Glycine max
  Clone ID: LIB3072-039-Q1-E1-G9
gtttatgtgcttgcatggtcgtgagaagatcactagaggggggaagaaaaacgaagggcatgtcagtccaagagtcgagagaggtacctaaagcacccgatagacactaaaacggacatacacttgttatcgagtcgaggtatgcaacgacgaaccaccgagagaggtcgatagacgaagaggtagaataaacgaccagagaggtagacccgcacggggacggctaagccagtcccgaagaacccctaaggaccacgacgtcaaaacgacgaacccgcaaacataatccccaccccacctaccctcataaccatcatcgccgccgaaacgcccaccgttagccataatccttctcccc

SEQ ID NO: 1057 - DNA, 302 bp, Glycine max
  Clone ID: LIB3072-039-Q1-E1-H1
tggaacctttgggctgatttatgtgcttgcatggtcgtgagaagatgatagaaggggacctatatagtcgatcaagtaagctcgttacagtttttgtaaaacgaggtgtatgactcatcccgtctctcgttcactccgcgttcctattactctacattcattcgctagttactgtcgatcttgcgtctagacgcggaagcgatttctccgaatacggtggtgtacaccacactccgttagatacagtagtacccggcggaacaatagtagttttagtgggattagtaagacgtttctctatc

SEQ ID NO: 1058 - DNA, 409 bp, Glycine max
  Clone ID: LIB3072-039-Q1-E1-H11
aacctttgggctgatttatgtgcttgcatggtcgtgagaagatgatagacggggacctctcctatagaacaacaaagagaggcaggcgggcccgaagaatagtacgggggcgtcaaaggcgcgcccggcgccatccccttccgcggggggcatcatcagcgttaatccgaggtcgagcaagtccggttcgtctacgaaaagcgactactaccaatatctaaacgacgacgagctcccgaaattacgtcgcgactaacgtgtacgtacaaagcccaatttcccctacgttgtcgcctacacacgacgtcgaacctgcgttacctactccgcagactccgcacccgtgtaccactgcacttcgtatagcgcccccgcgccgataacgattcacctcgtcccgaattccgtc

SEQ ID NO: 1059 - DNA, 443 bp, Glycine max
  Clone ID: LIB3072-039-Q1-E1-H12
aacctttgggctgatttatgtgcttgtttatgtgcttgcatggtcgtgaaaaaatgcatagagggggaatttattgtgccctggagagagagatgctgtaacggggaggaggttcgtaaggcgccattggtagacaaaaaataagttacatcttaaactatgccctcgttgcggcgccttcgacttcaagactagaacccacgacgccggcacgaagaacaaaggcgccgacgagccctttcctcgtgcctactcggcgagtcgggaaaaagaaaacgccctaagcccagtaccggaagtcgtcagaaccgtacgtaataaacacacggcgaaacccgtcggaaaggaccgtccctatccgagagctagagcatacttaccttacgcctccaagactaataaaacgtccctacgcgtcggaatcgacacgtcctagatcggaa

SEQ ID NO: 1060 - DNA, 190 bp, Glycine max
  Clone ID: LIB3072-039-Q1-E1-H2
caaagacgagcccgaagaataatacggcctgcgtcaaaggcgcgtccgccgtcctccccttccgcggcggccataatcgtatgtaccgaatccgatccaccgaaaagtcactagctactaaggcacgaacacgacgaagacctaaaatcaagtcgcgactctcgtacgcgtatatgtctaacgttcctcc

SEQ ID NO: 1061 - DNA, 411 bp, Glycine max
  Clone ID: LIB3072-039-Q1-E1-H3
ggaacctttgggctgatttatgtgcttgtttatgtgcttgtggtcgtgagaagatgatcagaggggagtccccgactcccgcgcccgcgtcaacaacaatcccgagccctacgacgtcccgcgtagaggtgagaaattcatacgtcccctagtaataggtaacggaacacggcgtcgtcggcccgtgaatgtaaagcctacactaactaataacactcatcccggaacgccgtgcacgggatcggcctttttactcgggtgcctcatattaacctaatctcgtcagggtacgtacacaccgtaatcatgaagcctaaagtcaaccctcttacactaccaaccacgcccgcagctccccaaaccacagggccgacccccagactcacaaacgaaaaaagaaacgcaccccca

SEQ ID NO: 1062 - DNA, 475 bp, Glycine max
  unsure at all n locations
  Clone ID: LIB3072-039-Q1-E1-H4
gaaccttgggctgatttagtgcttgagaagtgatagaaggggacatctaacaagtcaccgcgcaagcgctacttcaataaacgtgataataacataagctgcaacgacgatcccggccaggaccgcccccactgtggctgcctccatcccgacaatccttaacgtggccggacctatcagcatattaaagatgctgggcttcaactaacgctacgacaacgttgaccgtctaacaaagccattccatcgcaagggaacagttccccgctgcaacggagcccgtgtgcgccatgaagagaaagtaagtacaatataataacgctaaaacgacaaagaccgtacctacccaacccgcgtcttgttgcgcgaagcccttcaccgcgatatanaaatccttaaacgtaaacgtaagcgcaagaatcagtcagacgtcagagacccgactatcaaacacgcagcggacaacgaccccaac

SEQ ID NO: 1063 - DNA, 296 bp, Glycine max
  Clone ID: LIB3072-039-Q1-E1-F8
tcccaccttctaaattaaatacgctgaatatacgtcgtatcgcgatcgtctcctaagatcaatcgtattaagggaaatagtcacggagccacagcagacatcgagaagagtcatactcagatcgaccatacggacgccttactaatcgagtacgacgggaagcgtaagcgagctgatcaatcgtatccgtatggatcgtatccgcggtaaccaaggaatacgcacgtaaacgcgaccgtttcgcgtccggtaacataaactcttaaacaacgcaactcccgcacgaacaaatgcct

SEQ ID NO: 1064 - DNA, 451 bp, Glycine max
  Clone ID: LIB3072-039-Q1-E1-E11
aacctttgggctgatttatgtgcttgcatcgtcgtggaagatcatagaagggcatcgtcgtgagaagatgatagaagggcgtgcgtcgtgagaagatgatagaggggcgtggtcgtgagaagatgatagaaggggatataatcaatcaagaaagctccttacagttttttaaaaacgaagagtactactcctcccgtctctccctctccccgccttcctattattctacattcattcctagttactgtcgaccctgcgtctgacaacgaaggcaatttctccgaaaaccgcggtatacaccacactccgctagatacaatagtacccggcggaacaacactacttttaatgggaaacgaaagacgtttctccatcgcggcgtaactctgtaacgagtctgatacaaggaccggaataactactctgcttttacactgaacttgccccactg

SEQ ID NO: 1065 - DNA, 382 bp, Glycine max
  Clone ID: LIB3072-039-Q1-E1-E12
gaacctttgggctgatgtatgtgcttgtttatgtgcttgcttatctgcttgcttacctgcttgcttatgtgcttgcatggtcgtgaggggatcatagaaggggagcgtgtggatgtagcgatcaaattaaatcctctatctgttgctgcagggccctcttccctgcccagtactaataataaccgccgtagttaagaaaattaagaagatttacgagagtactaataataggtctgtctccgctacgaacagcggaaaacctacttctgcccataagatcgactcgaaaccaccctcgaccttaaagggaaaccgaccactaccgtcaatactcgttccttcccgacgaaactccacaccgaacatcacgtcacgcccgtta

SEQ ID NO: 1066 - DNA, 473 bp, Glycine max
  Clone ID: LIB3072-039-Q1-E1-E2
ctttgggctgatttatgtgcttgcatggtcgtgagaagatgatagaaggggagggcccggccaccagggcccctgtctattggggcgtagctgagtttttgaagaaaaagtgaaaacgttgctgtataagatacctagaactaagaagaagccggtgaagaagacgaggtagaataggttcacttttcatcggacttgtacgaggattgataatattactaggcataatgtgaagtgttgctatcggtgctgtattaagtccggacctcgaggcgtccgtcccgttctggcctcgcccacttaaccaaccagcgccccacccctccgagttaaaaataacgtcccggagaccccaacaccccgtaccccgccttaagatcacaccgcgcaaggaatccaccgcagcctagatcaacggcggcgccggctattcccccccaaaagcaccccggaaccttccgtgcccgggccaa

SEQ ID NO: 1067 - DNA, 464 bp, Glycine max
  unsure at all n locations
  Clone ID: LIB3072-039-Q1-E1-E3
tggaacctttgggctgatttatgtgcttgcatggtcgtgagaagatgatagaagggcaacccgggaaccaccgtctttactgttaccggccctaccgctggtgtcaataccccgccgggcggggttgctctcggagtggttacgaattttgtcgcgatacccgggttcgtcgctgcgagtcggattcggattaattatcggactcatcgggttgggttctctactggcggcggaactgtcggttccgcccatgaggccgctcccactagttatatttatgagtagtcctttattatcgatcatcagagggggggaaacgaaaacaaaaaaaaaaaaaaccgcgcaccaccgaaccctctcggaactcctcctcgcgcacggccccttccttccgggcccctccttcaacctatccctgagggccgcatcngccttccctgctccaaacttccggacgaccgacg

SEQ ID NO: 1068 - DNA, 421 bp, Glycine max
  Clone ID: LIB3072-039-Q1-E1-E4
cttggaacctttgggctgatttatgtgcttgatggtcgtgagaagattatagaaggggaagaaacgtaactataacggcccgcaacccggggacgaccgaacggagcgagaaaaagagaccagagagagagagagaggagatgaacgatatacgacagtcgaatacaaaggcgaggccatgcgcactctccgaagcagcgttacgttattttactaacaacaagactatctaactattaacgtactactgccgccggaaccctagtgtcgcgcccggaaaccggaatcggaggggtcctatgcgctacaactctaattccagacaatagaccaccgtatagtaaaaattccgcaaaaggagaaccagaactattctctccatgaacgcggaaagaaaagtcacggcgaaagaaatagatac

SEQ ID NO: 1069 - DNA, 385 bp, Glycine max
  Clone ID: LIB3072-039-Q1-E1-E5
tggctctggaacctttgggctgatttatgtgcttgcatggtcgttagaagatgatagaccgggaccaaccccaatgccaagtccaggaggaaaatgcgctgcgaggataaaagaagaagcactatctacacaacatctcgcactaccctaccctgacaactacttacagtcatcgaagaaaacggtaattactctcgtcgtcactataattttactgactctttgtgtaatctccgcgtaaaagtgggctctactctttgcctccggcccgttagtaacgggcaaggcgcgaagagcgagccgtcttacggaggaaaaattccacctcgcgaaagaaagtagtctcagtacgccggggacggaggtactctcgacggtagccgtt

SEQ ID NO: 1070 - DNA, 469 bp, Glycine max
  Clone ID: LIB3072-039-Q1-E1-E6
tggcctggaacctttgggctgatttatgtgcttgtttatgtgcttgtttatgtgcttgcatgagaagatgatagaaggggacctatatgatcagtcaagaaagctccttacagttttttaaaaacgaagagtattactcctcccgtctctccctctccccgcgttcctattattctacattcattcctagttactgtcgaccctgcgtctgacaacgaaggcaatttctccgaagacggcggtatacaccacactccgctagatacaatcgtaccaggcggaacaagagtagttttaatgggaaacgaaagacgtttctctatcgcggcgtaactctgtaacgagtctgataaagggaccggaataactactctgcttttacactgaacttgccccactgttgaaagttacttcctgagttccaaacctgacctactcgtagccacaacgtcgcgcgccggaaccttca

SEQ ID NO: 1071 - DNA, 352 bp, Glycine max
  Clone ID: LIB3072-039-Q1-E1-E7
gaacctttgggctgatttatgtgcttgcatagtcgccagaagatcatagcccgggaccgtaaatataaccaacaaatactgacccgagagaataatacgtcggcgtcaaaggcgcgcccgacctccaccacttccgcagtgtccatagtcgtatctactcaatcgactcctcctaaatgcgactagctaccaagccaccaccacgacgagctcctaaaattacgtcgcgactctcgtacgcgtatatatctaacgttcctctaacatattcccgaacacaccatgtccaacctacgttatccagaccgcaacactcccacgcctatatctctatagttcccatagccctcca

SEQ ID NO: 1072 - DNA, 315 bp, Glycine max
  Clone ID: LIB3072-039-Q1-E1-E8
acctgtggtatgttttatgtgcgtgcttatatgcttgtttatgtgcatcctgagaatatgatagaaaggagaagcgaggcatatggtaccgcggctcagtgagtcgggcctatctattacgtaggtcagcgacacgatcaatacttatacctaatctaagtactcttaagttaaatacgcacgaatccgctacgtcgaccagaatagacccttacgtctagactatacctcatgtatctgtcacgtactacacacaggttatcattaccaatcgagatctcacgtcactgtcctaaacgaactcactcgaacaca

SEQ ID NO: 1073 - DNA, 402 bp, Glycine max
  Clone ID: LIB3072-039-Q1-E1-F1
gaacctttgggctgatttatgtgcttgtttatgtgcttgccgtgagaagatgatagacgggggaaataaagttacgcgtacggagatgatcaaaaacgctttttataacctttaccgcgctcccaaaccaccaccacacggcgagtacagcctgtcatgcatatacgaccgactaagtgatactagtaaccggactggagtcttccaccaccaccactcccggtcgaacttctccgctagtacgctcttaataacgcatctcctcacggaacctccccgccccacgcgccgaccctccccatacccctcgaaaccaacaaacctgaccagccctcggatcagcccacccggcgctctacaactctcgaccttgaaccgatcctgtattcgtatcccgtaacc

SEQ ID NO: 1074 - DNA, 440 bp, Glycine max
  Clone ID: LIB3072-039-Q1-E1-F2
gaacctttgggctgatttatgtgcttgcatggtcgtgagaagatgatagaaggggatagtaaaaataaccaacaaagacgagcccgaggaataatacggcggcgtcaaaggcgcgcccgccgtcctccccttccgcgggggccatagtcgtatgtacggaatcgagtcctcctaaaagcgactagctactaagccacgacgacgacgagcacctaaaattacgtcgcgactctcgtacgcgtatatgtctaacgttcttctaacgtagtcgcgaagacaccaggtcgaacctatgttatctagaccgcaagagtcgcacgcgtatatgtctatagttaggatagcgctgccgctccgatattaatgatcctcgtcataaattccgtaagcttagagacgatcagaaaaatcaacagtctctctaaacggatgaaattttc

SEQ ID NO: 1075 - DNA, 451 bp, Glycine max
  unsure at all n locations
  Clone ID: LIB3072-039-Q1-E1-F4
ggaacctttgggctgatttatgtgcttgctgagaagatgatagaaggggatgtaatcaaacaagaaacgaagagcatcactcctctcggctctccctcagcccgcgttcctattactctacattcgttcctagttattgtctagcctgcgtctgatatcgacgacgacttctcctaaaatggcggtatacatcacacgccgttagccacgagaggaaagggtggcggaacagaagcagacctaatcggaaaagaaacacgtttctctatcgccgcgtaactatttaacgagtctgacaaggggaccggatcagctcccatactcttaccatacgtttcccccactgttgaaggtcacttcccgagtaccaagcccggcctacccgtagccacaatgtcgcgcgttggtacgttcatcgagcgggtcaccgncgagagagagggctcataag

SEQ ID NO: 1076 - DNA, 305 bp, Glycine max
  Clone ID: LIB3072-039-Q1-E1-F5
taaattacgcgtacttacatgatcaagcacgctttttataaggtttacggcgctcccaaaccaccaccacacggcgagtacagcctgtcatacatatacgaccgactaagtgatactattaaccgaactggagtcttccaccaccaccactcccaatcgaacttctccgctagtacgctcataataacgcatctcctcacagaacctcccagccacacgcgccgaccctccccatacacctcgaaaccaacaaaccttaccagccctcggaatcacccacccggacactctacaactctccacct

SEQ ID NO: 1077 - DNA, 457 bp, Glycine max
  Clone ID: LIB3072-039-Q1-E1-F6
gaacctttgggctgatttatgtgcttgtttatgtgcttggagaagatgatcacgaggcgatagtaaaaataaccaacaaaggggagcgcgaagaataatacggcggcgtcaaaggcgcgcccgccgtcctccccttccgcgggggccatagtcgtatgtacggaatcgagtcctcctaaaagcgactagctactaagccacgacgacgacgagcacctaaaattacgtcgcgactctcgtacgcgtatatgtctaacgttcttctaacgtaatcgcgaagacaccacgtcgaacctacgttatctagaccgcaagagtcgcacgcgtatatgtctatagctaggatagcgctgacgctccgatattaatcatccacgtcataaattccgtaagcatagaaacgatcagaaaaatcaacagtctctctaaacggatcaagttttcccaagtcccgccc

SEQ ID NO: 1078 - DNA, 380 bp, Glycine max
  Clone ID: LIB3072-039-Q1-E1-F7
tttatctgcttgtttatgtgcttggataagatgatcccagtccatagtagagatagccaacataggcgatcgggaataatactacggatacttggaaggcgtgcacgccgacctccccttccacttacttccatagatcgcattctactgaatctgactcctcctaatcgtcactacctacactaccacctcgaccacgaccacctaaaattacgtcgagactctcgtacgcgtatatctcttacgttcctctaatgtatccactattacaccaattacaaccatcctaatctacatcgtaaaaatcgcacgagtatacctctataatctcgatagatcgcatgaccctatcttactcatcctcatcataatttccctca

SEQ ID NO: 1079 - DNA, 473 bp, Glycine max
  unsure at all n locations
  Clone ID: LIB3072-039-Q1-E1-E1
tggaacctttgggctgatttatgtgcttgcatggtcgtgagaagatgatagaaggggataaaaacttacctctaaccgagaaagtgaagtgtacagaactgaaagaggggaaaagaaaaagaaaagccagggccagggaccccgagagacggtactgatcaagaagactatttcgaagagcctggatggcgaggttcctgaggcggaggaggtggcggtgtcggagctgtagatgactaagtatacgactgaggatgatcgtgttgatagcggaactttctcttttaacgctattagtaagacctcggtgaaggccactgagcatcgtaagaagtatgccgaggtgaatagcgtcgacgagaagtttagcgaggacgcgtctaaggtccgggatgcggaccctgctaatgtcgactaggttatctctcctgactctacctcggtcgtanatcatccgaatactaagagttccc

SEQ ID NO: 1080 - DNA, 310 bp, Glycine max
  Clone ID: LIB3072-039-Q1-E1-C2
gcttgcatggtcgtcagaagatcatagaacgggacctacactctacggttctcaatctcgtccttggctcccgtcattccgcacgtggactgtttactatcccgtcttccctcgtgtcctgcgcctaaatctaactctacgtcttagtctttatccctaagcatcgcgaaaagaacgtacatcacgtcgcaaatgcgagcttaccgcaaacaccgttcgattttgccgacacataactcttacctattcctcagactttagtccacatcctcgaattaacctaaccttccgatccgccacactaaaccct

SEQ ID NO: 1081 - DNA, 406 bp, Glycine max
  Clone ID: LIB3072-039-Q1-E1-C3
gaacctttgggctgatttatgtgcttgcatggtcgtgagaagatgatagaaggggcagaaaggacacggacctcaggtccgtcatgcgaagctaataaataataaaaaaaaaaaaaaaaaaaaaaaaaagtggttgtctcacaggacttaagtccatgcatgtgcgtacgtaattctacagtctcttcacagagctattcaaacctaacctatcgattgctgccccataatgattccatcggtaaaatttcggtgccatttaatccaactgttccgtactatacatactccctgctagtcagtccaacagtcaataggtttgtattgactgattcacttaataaccgtgtagttcgaacggtcaacgggatgtgtctcgcactggtgtaccaactgtgtttggcgc

SEQ ID NO: 1082 - DNA, 439 bp, Glycine max
  unsure at all n locations
  Clone ID: LIB3072-039-Q1-E1-C4
cttggaacctttgggctgatttatgtgcttgcatggtcgtgagaagatgatagaagggagaccataggagtatttcatagggtatgtcgcgacggcccgattgctatagacgcgcttcggccgctgcatatggagtactggggggccagggtaccctaggagaccctactcccttaaggctaatcgagacggggcttcacggctactatagtctgattggagagggcggcatgttaacccggccatacttagagtacttacttgttgttcgccagcgtatgaccgctatatgaccagacatacgataggcggacgtagcccgtggactatccatcattcgtgggctagtcccgctcagcgtccgggcaggcactcgtggaccatacggagcggccnccttgtacactctatttacctacgacattgattcaggtaggcg

SEQ ID NO: 1083 - DNA, 343 bp, Glycine max
  Clone ID: LIB3072-039-Q1-E1-C5
ctttgggctgatttatgtgcttgcatggtccgtggaagtcttggacggggatcagtaaaaataaccaacaaagacgggcccggagaataatacggcggcgtcaaaggcgcgcccgccgtcctccccttccgcgggggccatagtcgtatgtacggaatcgagtcctcctaaaagcgactagctactaagccacgacgacgacgagcacctaaaattacgtcgcgactctcgtacgcgtatatgtctaacgttcatctaacgtagtcgcgaagacaccacgtcgaacctacgttatctataccgctacagtcccacgcgtctatgtctatagatcggatagcgc

SEQ ID NO: 1084 - DNA, 442 bp, Glycine max
  Clone ID: LIB3072-039-Q1-E1-C6
tggctctggaacctttgggctgatttatgtgcttgcatggtcgtgagaagatcatagacggggctcttcccctaccccacaccctctcggcctttgattcttcctctcccaactctccggctaagcctacctgcctggtctagctaatacactcacaacaaccacaatcttctctccctccctctaatctctataatataagaagacggtcctcactctatagggttcctcctctattatcgttacgtcctctcttattatttcgtcccacgccgtccctcttaggttcctaccctaaacctattatctcaataaatttatcccgtgtctccgtccgcacctagaggaaaagaaaaaggagggaaagaagaagaaaaagaagaaagcgaaacccgtagacagcgcgaaggacggaagagaaaggaacgaataaagaagtaat

SEQ ID NO: 1085 - DNA, 389 bp, Glycine max
  Clone ID: LIB3072-039-Q1-E1-C7
aacctttgggctgatttatgtgcttgtttatgtgcttgcatggtcgtgacaagatcatagaaggggaagtataaattcgagctagtgtctacacttccacgtcgcccgccctaacggaagctaccctcgtcctcagtccgaactttaatgtcttgacgcctgcgttatctgttcactggatggcggaggaccctcttgattagcggcgggattctgcctatcttctttttcggccttgtgatcatcggtcttgtgagcgtccttaagacttttagccttaaaatgatgatctccctgatcctgatcccgattcagactcttaagacgaatacgaacgggaatgaaaggaagggaaagaggctgcgcttccggggtcgtcgaaacggtta

SEQ ID NO: 1086 - DNA, 308 bp, Glycine max
  Clone ID: LIB3072-039-Q1-E1-C8
gtcgttataagatcatagcacgggacaattacgttgctcaatctcgtccgggtctggcatcaatctcaacgatcactgcttactatcaataccgcatccgttcaaaaggtctacatctaagtctacgtcatagtctttatccttaagcatcgagaaaagaacgtacatcacgtcaagaaagtgagacaatcttcaacaccgatcaactttacgaatataccaatgttaccaacaacgtagacatggatcaatatcttaacattaccatgaaaataggatacaacacacctaaaacgccaaatgtcaac

SEQ ID NO: 1087 - DNA, 346 bp, Glycine max
  Clone ID: LIB3072-039-Q1-E1-C9
ctttgggctgatttatgtgcttgcatggtcgtgagaagatcatagaaggggcagtacattgcgattaaatcaaacggagaagaacgctaacaccgaatatagtaggcctacataagcccagtagcgattgtatgacctacgaacacgtttgagagacacggaataccgaattagcttaaccgttacagaggagcacagagaactggcgttacgcggccgcgacgactatcgtacagtccaaccttctgcagtagagaacaaaacacaatcctgtgcagacatgtctcccaagggcgtgtctacagctaaaacaagtccgtagcctcgcaacacacacgccccacgg

SEQ ID NO: 1088 - DNA, 428 bp, Glycine max
  Clone ID: LIB3072-039-Q1-E1-D1
tggaacctttgggctgatttatgtgcttgcatggtcgtgagaagatgatagaagggggaagaagaagggaagacgaatccgagacggacggaagtggcgtcgttgtcgggaactacagtgggaacgtctcgtgctacgggaaatgtctagcaccatacctataaacttgtgtacggtagattcaagtatactgggaatgacacgcgggatgcggttacggaatgaagggataagaagtccgctgagtaagttctctttcttaaccaatactgccgccccgttaacgataccgcgaagaaaacaaatcgtctattcggacccatgatcgcgcctcagggaagtagggccaactataagaactaaaccttgctcgccccttcgcacgtaacctaatacaagacccacaaacacactcacgccttaactat

SEQ ID NO: 1089 - DNA, 275 bp, Glycine max
  Clone ID: LIB3072-039-Q1-E1-D10
aacctttgggctgatttatgtgcttgcatggtcgtgagaagatgatagaaggggccacgaaaagaaaaaaaaaaacaaaagggtaggaaataacagtggttgactgcacaggacttaagtccatccatgtgcgcacgtgatgctacagtctcctcacagcgctattcaaacccaacctatcggtttctcgccccataatgctctgatcgggaaaattccgcttgcatttaatccaactcttccgtactatacctcctccctcttagtcggcgcaa

SEQ ID NO: 1090 - DNA, 333 bp, Glycine max
  Clone ID: LIB3072-039-Q1-E1-D11
taaacaaactaactctaagagggagacgacacaaccccccccagtaagggttacggtacactcctacgaaacgtcggacgtctcgaagggctccgccggcgcgtcaaacaatacggacgagggcgaaatctatactaataacgtaattcctccctttaacaacctttacagcttcgtcctcacgttcgcaaggaactgtctcgccggaaaacacactagtagccgtatctacaagaccaaaggctcgagccattaaatcggtcccactgacagtaatccgcatccgattaccaatcccggtaaaccatacgttcaaacaaaccaacccattaa

SEQ ID NO: 1091 - DNA, 290 bp, Glycine max
  Clone ID: LIB3072-039-Q1-E1-D12
ctttggtctgatgtatgtgcttgcatggtcgtgagaagatcatagacggggcgcctgagaataccctcggcacctttggtgcggcggggcttacgcctgtcctgtgcgcctttactacagtcttcaacacgagcgccctcgtccatcctaataagaaatatatcgacaggaattataagctcctgcacctggccatcgcctaaggcgccgccgatcacacaggggcccctatccgcgcgcgtaccgggcggtttcggctaaccggcgacgactacgccccggcaaaacta

SEQ ID NO: 1092 - DNA, 450 bp, Glycine max
  unsure at all n locations
  Clone ID: LIB3072-039-Q1-E1-D2
ggaacctttgggctgatttatgtgcttgtttatgtgcttgtttatgtgcttgcatggtcgtgagaagatgatagaaggggaacttctctcttgatctaagaggtgatttatcctgtcgtatgttaaataccgtatcgtgtgaaaagctctagagcacggatatctagaaagggttgctcctactggtcgtagtcgccatcctacgctgaaagaagaagaatgaagaagttatccccccggaggatccgaaggactataccgatgagcccaccaacgtcctcacggacgaatacaagatccgtcctaagaaaatagcctagaagacgcctggaacgcttaaggtcgccgtagagagggatattaacgtcgttaaagaagccgagagcctctcgttctcctagataatcccgtaagatcagcactacgtcngtctctaggaaaaacaacggc

SEQ ID NO: 1093 - DNA, 378 bp, Glycine max
  Clone ID: LIB3072-039-Q1-E1-D3
aacctcttgggctgatttatgtgcttgcttatgtgcttgattatgtgcgtgcatggccaagatcatagacgggcatggtcgttagagggttatggaatgacatggtcgagagaagatgatagaatgtcctggacgtaagaagatgatcgacagtgatcccgagcctgaatcaaataacctaccctaactcgttctcactacggacagaaaaatacccgggcccccgcctccgtcttcgtccgctccaatcgtcgacgcgatggcgaagagagtagacgtcaaagaccgtccgataaggaagtatggtccatacggcagacgtccacctgataggtaacgcgtatacgcgcgtaggagtgacggctcgactggcggcta

SEQ ID NO: 1094 - DNA, 472 bp, Glycine max
  unsure at all n locations
  Clone ID: LIB3072-039-Q1-E1-D5
tggctctggaacctttgggctgatttatgtgcttgcatggtcgtgaaaagatgatagaagggcatggtcgtgagaagatgatagaagggcatggtcgtgagaagatgatagaagggcatggtcgtgagaagatgatagaagggcatggtcgtgagaagatgatagaagggcatggtcgtgagaagatgatagaaggggatagtaaaaataaccaacaaagacgagcccgaagaataatacggcggcgtcaaaggcgcgcccgccgtcctccccttccgcgggggccatagtcgtatgtacggaatcgagtcctcctaaaagcgactagctactaagccacgacgacgacgagcacctaaaattacgtcgcgactctcgtacgcgtatatgtctaacgttcntctaacgtagtcgcgaagacaccacgtcgaacctacgttatctagaccgcaaagatcgcacgcgtatatgt

SEQ ID NO: 1095 - DNA, 393 bp, Glycine max
  Clone ID: LIB3072-039-Q1-E1-D6
gcctctggctctggaacctttgggctgatttatgtgcttgtttatgtgcttgcatggtcgtgacaagatcactagaggggatagtaaaaatagggaacagggacgagcccgaagaataatacggcggcgtcaaaggcgcgcccgccgtcctccccttccgcgggggccatagtcgtatgtacggaatcgagtcctcctaaaagcgactagctactaagccacgacgacgacgagcacctaaaattacgtcgcgactctcgtacgcgtatatgtctaacgttcttctaacgtagtcgcgaagacaccaggtcgaacctacgttatctagaccgcaagagtcgcacgcgtatatgtctatagttaggatagcgctcccgctccgatattaatgat

SEQ ID NO: 1096 - DNA, 385 bp, Glycine max
  Clone ID: LIB3072-039-Q1-E1-D8
aatttctcaaggcaaagtgaaaaccttcctctataatatacctacaactaccaacacacccctcatacaacaccacttcacaatacgtctcactctttcatccgcacttataccgacgattcataatattactacgcataatctacaactctctctatcactgctctattaagtccctacctccacgcgtccgtcccattctcccctcgcccacttaaccaaccatcgccccacccctccgagttaaaactaacctccccgacactccaacaccccccaccccaccctaaaatcacaccgtgcaacgcaatccaccgcaccctacatcaaccccaccccccccattccccccccaaaaacccccccaaactcccctccccccccc

SEQ ID NO: 1097 - DNA, 305 bp, Glycine max
  Clone ID: LIB3072-039-Q1-E1-C12
accttggggttgatttatgtgcttgtttagtgcctgctggtcggagacgtcctagacgggaggttggtataaaccggttatgcgccaaccctccgacggtcggcgatctagacccccatgccggtgtaccgggcctccttcggcttccctccacagacggaacgagaaacatcggctgacaggcaacggtcgggcccccgagcgccgaccaagctcgaccccggcacagagccatatgcccgcaaaccacactactagcgctcaggtcgctacagtcacacgacctctcgtgcgcacaaccaccg

SEQ ID NO: 1098 - DNA, 398 bp, Glycine max
  Clone ID: LIB3072-039-Q1-E1-A6
gaacctttgggctgatttatgtgcttgtttatgtgcttgcatggtcgtgacaagatgatagaagggcatggtcgtgagaagatgatggaagggcatggtcgtgagaagatgatagaagggcatggtcgtgagaagatgatagaagggcatggtcgtgagaagatgatagaagggcatggtcgtgagaagatgatagaagggcatggtcgtgagaagatgatagaagggcattgtcgtgagaagatgatagaacggcatggtcgtgagaagatgatagaagggcatggtcgtgagaagatgatagaagggcatggtcgtgagaagatgatagaagggcatggtcgtgagaagatgatagaagggcatggtcgtcagaagatgatcgcagggcatagtcg

SEQ ID NO: 1099 - DNA, 468 bp, Glycine max
  unsure at all n locations
  Clone ID: LIB3072-039-Q1-E1-A7
ggctcggaacctttgggctgatttatgtgcttgcatggtcgtgagaagatgatagacggggatagtaaaaataaccaacaaagacgagcccggggaataatacggcggcgtcaaaggcgcgcccgccgtcctccccttccgcgggggccatagtcgtatgtacggaatcgagtcctcctaaaagcgactagctactaagccacgacgacgacgagcacctaaaattacgtcgcgactctcgtacgcgtatatgtctaacgttcntctaacgtagtcgcgaagacaccaggtcgaacctacgttatctagaccgcaagagtcgcacgcgtatatgtctatagttaggatagcgctgccgctccgatattaatgatcctcgtcataaattccgtaagcttagagacgatcagaaaaatcaacagtctctctaaacggatgaagttttcccaggtccccgccgacacgcca

SEQ ID NO: 1100 - DNA, 407 bp, Glycine max
  Clone ID: LIB3072-039-Q1-E1-A8
tggcctggaacctttgggctgatttatgtgcttgcatggtcgtgagaagatgatagaagggggaagaaaaaaaaaaaagtaagataaaggccagaaaaaaaaaaaaaaagaaaaaaaaaaaaaaaaagtggttgtctcagaggacttaagtccatgcatgtgcgtacgtgatgctacagtctcctcacagcgctattcaaacctaacctatcggttgctgccccataatgctgcgatcgggaaaatttcggtgccatttaatccaactgttccgtagtatactttttccctgttagtcggtgcaacagtgaagaggtttgtattgactgtttcctttaatagccgtgtagttcgaacggtgaacgggatgtgtttcgcagtggtgtaccaaatgtggtgggcgcggc

SEQ ID NO: 1101 - DNA, 473 bp, Glycine max
  Clone ID: LIB3072-039-Q1-E1-A9
aacctttgggctgatttatgtgcttgcatggtcgtgagaagatgatagaaggggatagtaaaaataaccaacaaagacgagcccgagagaataatacggcggcgtcaaaggcgcgcccgccgtcctccccttccgcgggggccatagtcgtatgtacggaatcgagtcctcctaaaagcgactagctactaagccacgacgacgacgagcacctaaaattacgtcgcgactctcgtacgcgtatatgtctaacgttcttctaacgtagtcgcgaagacaccaggtcgaacctacgttatctaggccgcaagagtcgcacgcgtatatgtctatagttaggatagcgctgccgctccgatattaatgatcctcgtcataaattccgtaagcttagagacgatcagaaaaatcaacagtctctctaaacggatgaagttttcccaggtcccgcccgccacgccaggggagataaa

SEQ ID NO: 1102 - DNA, 470 bp, Glycine max
  Clone ID: LIB3072-039-Q1-E1-B1
ggaacctttgggctgatttatgtgcttgcatggtcgtgagaagatgatagaaggggacctatataatcaatcaagaaagctccttacagttttttaaaaacgaagagtattactcctcccgtctctccctctccccgcgttcctattattctacattcattcctagttactgtcgaccctgcgtctgacaacgaaggcaatttcttcgaaaacggcggtatacaccacactccgctagatacaatagtacccggcggaacaagagtagttttaatgggaaacgaaagacgtttctctatcgcggcgtaactctgtaacgagtctgataaagggaccggaataactactctgcttttacactgaacttgccccactgttgaaggttacttcccgagttccaagcctgacctacccgtggccacaacgtcgcgcgccggaaccctcattgagcggctccgcgcggaggactc

SEQ ID NO: 1103 - DNA, 268 bp, Glycine max
  Clone ID: LIB3072-039-Q1-E1-B10
ctttgggctgatgtatgtgcttgcatggtcgtgagaagatcatagaagggcatcgtcgtgagaagatgatagaagggcgtcggggtcagaagatgatagaggggcgtggtcgtgagaagatgatagacgggcatggtcgtgagaagatgatagaagggcatggtcgtgagaagatgatacgagggcatggtcgtgagaagatgatagaagggcatggtcgtgagaagatgatagaagggcatggtcgtgagaagatgatagaagggca

SEQ ID NO: 1104 - DNA, 480 bp, Glycine max
  unsure at all n locations
  Clone ID: LIB3072-039-Q1-E1-B11
ctttgggctgatttatgtgcttgcatggtcgtgagaagatcatagaaggggatctaagtataatactctcactgaggggaccgatcacgaagttcattgcatcacgcactttcccttccttcgttctcccccgtcccttcggtctccctagaagacgccgaataagccgcggatacaagccgctaattttacccctttaggcggtatacaccataccacgttactaatccggggtgtcgttggcggcggaccgaagtcaggttggataggaaatctaaatcgtttagccatcgccccgtaagaccatctagaaactccttgcggtatattagctcaacctagtacattcgggacaagtttcggaactactcncataggcatctcatccgaaactgagccctgagagaaattccaccgcgtcgaacttcctaaacgggcggtgcccgcggataacgacacctaaaagtacgcgcgggcacc

SEQ ID NO: 1105 - DNA, 259 bp, Glycine max
  Clone ID: LIB3072-039-Q1-E1-B12
acctttggtctgatttatgtgcttgcatcgtcgtgagaagatgatagaacgggatcccggcctgatcaaatacctaggtaagctcttctgactacggggaggggaatacccgcgcccccgcctccgtcttcttccgctccactcctcgacgcgatcgccaacagagtacacgtcacacaccgtccgataaggacgtatggcccttacggcagacgtccacctcataggtaacgcgtatacgcgcctccgactcaccgcc

SEQ ID NO: 1106 - DNA, 347 bp, Glycine max
  Clone ID: LIB3072-039-Q1-E1-B2
tggcttggaacctttgggctgatttatgtgcttgcatggtcgtgagaagatgatagaagggggagagagcgagcgagacagagagagatgtccggtaaactctaactgaactctagaaaaacgagagaaactactagtacctatacaggctaggttgggacttaggctggaaatcttcgtcgggaatctcatcgttctgaatacggtacttagtttgatggtacaacgttcctcgatcttattcctggcgcagtttatgatgttcctaatattcctcctagtgaaattggactcggtaagtatgctttttgcgtcgctcctgctgattctgaatttattgctactga

SEQ ID NO: 1107 - DNA, 301 bp, Glycine max
  Clone ID: LIB3072-039-Q1-E1-B3
tggaacctttgggctgatttatgtgcttgcatatgtgcttgcatagtcgtgagaagatcataggagggggagtcgctccccgcgtttcggcacgctaacaacacggtcgaggaatatctaagtccatataacgacgccagctaacacgtcgcgtcacgacccgcaagtcccttaacgagatcggcccactcggaaacgaatcccaccagccggaactaaccaaccaacgaccaaatacaagccgcaattaaagaagtaaaaagtggttgccccaaaggacttaggcccaggcatttccgtc

SEQ ID NO: 1108 - DNA, 361 bp, Glycine max
  Clone ID: LIB3072-039-Q1-E1-B4
tggaacctttgggctgatttatgtgcttgtttatgtgcttgcatggtcgtgagaagatcatagaaggggaattcccgtacctcacctacgtaagagctagtaagcgtgccccggaagtagagattgaaacatcctgagacggtttgcataaagtaaatcgtctgcaagctaatcggaggaaaagtctttaggaagtagtccgtaattaaggtcgtatgcaagctcgtattaataatcggcggcgtgaagaagttctactgccactgtttcggaatcgccgtctcctgcgagaccaggaaacattagaagagtatcgagtcttcaactaggaagtccttcccttagaggccgccctgcgaaa

SEQ ID NO: 1109 - DNA, 481 bp, Glycine max
  Clone ID: LIB3072-039-Q1-E1-B5
ggcctggaacctttgggctgatttatgtgcttgatggtcgtgagaagatgatagacgggcatggtcgtgagaagatgatagaagggcgtgggcgtgagaagatgatagaagggcatggtcgtgagaagatgatagaagggcatggtcgtgagaagatgatagaagggcatggtcgtgagaagatgatagaagggcatggtcgtgagaagatgatagaagggcatggtcgtgagaagatgatagaagggcatggtcgtgagaagatgatagaagggcatggtcgtgagaagatgatagaagggtacactaacaagtggaaaataaaataaaaggaaccgaaaaaaaaagtggttgtctcagaggacttaagtccatgcatgtgcgtacgtgatgctacagtctccccacagcgctattcaaacctaacctatcggttgctgccccataatgctgcgatcgggaaaatttcggtgccatttaa

SEQ ID NO: 1110 - DNA, 303 bp, Glycine max
  unsure at all n locations
  Clone ID: LIB3072-039-Q1-E1-B6
ggctctggaacctttgggctcgatttatgtgccttgtttcatgtgcttgcttatgtgctctgcttatcgtgcttgcatgcgtcgtcgagaagatcgatagaggcggggtataagtcgagcccgcacgactgagacaatcagtaaatagcgacgacgaaaacgaaggcttcacgcccctccntgccgtcataaccccaggcaggtacggtaacgtatacgctgcatgaaacactgcctttctccttgaacgtaataatcgagtccacggcgttatgcatccttggaaggcgaaacgttgtaagc

SEQ ID NO: 1111 - DNA, 430 bp, Glycine max
  Clone ID: LIB3072-039-Q1-E1-B7
tggcctggaacctttgggctgatttatgtgcttgcatggtcgtgagaagatgatagacgggggagagggaccggagccgggaagaacgagaacgtgttctggactccacctagtctaatctaggcacacacggccactttatttttcgcaaggttctttaggaccatataaccctctaaattccacgcctcgaagacgaaccccattaacaagcacgcgagcgtttaggcgacctatagtttaatcgtcatcgcagttctcctcgtaagtctgtaggagaaagtgccgagactaagtccggaaatcagctgtgacgcggtcgtagtcgtaaagaccgggaagacatcagtagaatgttgcccgtccaagaatacactcgtcgccctcgcctatccgtagagagagtataagcactacggacaggccaaag

SEQ ID NO: 1112 - DNA, 430 bp, Glycine max
  unsure at all n locations
  Clone ID: LIB3072-039-Q1-E1-C1
ggaacctttgggctgatttatgtgcttgcatggtcgtgagaagatgatagaaggggacttacaattacggtgctcaatctcgtccttgtctcccatccttccccacgttcactgtttactatcccgtcttccctcgtgtcctgcgcctaagtctaactctacgtcttagtctttatccctaagcatcgcgaaaagaacgtagatcacgtcgcgaaggcgagcggagcggaaacaccgttcgattttgcggagagaggagcgttacctattcccaagactttagtccacatcttcgaattaacctaaagtggngatccgccacacgaaaccctccacgtcggaacagaagtataattcgtcataccctcttacgactctcgcgaggaagtattacgtttagcattcgtaggtaatcccgcgtctgcctata

SEQ ID NO: 1113 - DNA, 438 bp, Glycine max
  Clone ID: LIB3072-039-Q1-E1-C10
ctttgggctgatttatgtgcttgcatggtcgtgagaagatgatagaagggcatcgtcgtgagaagatgatagaagggggtagtggaaataaccaacaaagacgagcccgaagaataatacggcggcgtcaaaggcgcgcccgccgtcctccccttccgcgggggccatagtcgtatgtacggaatcgagtcctcctaaaagcgactagctactaagccacggcgacgacgagcacctaaaattacgtcgcgactctcgtacgcctatatgtctaacgttcctccaacgtagtcgcgaagacaccaggtcgaacctacgttacctagaccgcacgagtcgcacgcgtatatgtctatagttaggatagcgctgccgctccgatattaatccatcccgtcataaattccgtaagcttacagacgatcagaaaaatcaaca

SEQ ID NO: 1114 - DNA, 429 bp, Glycine max
  unsure at all n locations
  Clone ID: LIB3072-039-Q1-E1-A5
tggcctggaacctttgggctgatttatgtgcttgcatggtcgtgtgaagatgatagacggggagggccagacctgccgccgccgccggaaaatgcgtatatacctcttgctgttataataataacggtcttgaagaaaggcgcgaaaggccttgccgcagtagtgaagaagaaggcctaggagaaggcgatgaacttcccgcctgagaagtgcttgaagtagcctgggactggaggtgtgtcgttgttgaagtgggattcgatgtggcctgcgaagcggttgaagaatgcttaaacttaatgtaagaagtgtacttctaagtagaggtctaaggctttcttcgtatctaattagcctattaaaatttcagataagaactctgttatgaactcacncaagacgtcgtctaagcataggttggaagataag

SEQ ID NO: 1115 - DNA, 500 bp, Glycine max
  unsure at all n locations
  Clone ID: LIB3072-038-Q1-E1-H10
ggctccgaacctttgggctgatttatgtgcttgcttatgtgcttgtttatgtgcttgtttatgcccttgcatgggtcgtgagaagatgatagagggggatagtaaaaataaccaacaaagacgagcccgaagaataatacggcggcgtcaaaggcgcgcccgccgtcctccccttccgcgggggccatagtcgtatgtacggaatcgagtcctcctaaaagcgactagctactaagccacgacgacgacgagcacctaaaattacgtcgcgactctcgtacgcgtatatgtctaacgttcctctaacgtagtcgcgaagacaccaggtcgaacctacgttatctagaccgcaagagtcgcacgcgtatatgtctatagttagggtagcgctgccgctccgatattaatgatcctcgtcataaattccgtaagcntagagacgatcagaaaaatcaacagtctctctaaacggatgaaattttccaggtcccgccggcacg

SEQ ID NO: 1116 - DNA, 341 bp, Glycine max
  Clone ID: LIB3072-038-Q1-E1-H11
tgcttcgaacctttgggctgattgatgtgcttgcatggtcgtggatgaatgatcgacatggtcgccagaagatgatcgatagacgtggacgtaagaggataatagaagggcatggtcgtgagaagatgatagatgggcatggtcgtgagaagatgatacgagggcatggtcgtgagaagatgatagaagggcatcgtcgtgacaagatgatagacgggcataaactaagaacaacgccacgacgacgacgcacacaccagtggttcgcccagacgacctaacgccatgcatgtccgtacgtcatgctacattctcctcacaacgctatttaaacctaacct

SEQ ID NO: 1117 - DNA, 420 bp, Glycine max
  Clone ID: LIB3072-038-Q1-E1-H12
tttgggctgattgatgtgcatgtttatgtgcttgcatggtcgtgagaagagatagaagggcatggtcgtgagaagatgatagagcggggagtgagaaacataaagtataaaaaaaaaaaaaaaaaaaaaaaaaaaaaagtggttgtctcagaggacttaagtccatgcatgtgcgtacgtgatgctacagtctcctcacagcgctattcaaacctaacctatcggttgctgccccataatgctgcgatcgggaaaatttcggtgccatttaatccaactgttccgtagtatactttttccctgttagtcggtgcaacagtgaagaggtttgtattgactgtttcctttaatagccgtgtagttcgaacggtgaacgggatgtgtttcgcagtggtgtaccaagtgtggtgggcgcggcgg

SEQ ID NO: 1118 - DNA, 309 bp, Glycine max
  unsure at all n locations
  Clone ID: LIB3072-038-Q1-E1-H2
tggaacctttgggctgttgtgagtgcttgnatggtcgtgagaagatgatagaagggggtgtaccgaatgaaaagnaggganagnagngtagtggggagaagtagtaanggtgttgaagacaatatgcaaggccagtagaaatttcgaaccgacaaggggaactggaaagcatctaaggctgtagacgcattataagaggggtacccgggtcactaaggctaaaaatggcggtgccccattctgttatgatttcaaatttaagttcgaagtcgtcgtcgaaaaattatttaaaccccatttcgtcggcga

SEQ ID NO: 1119 - DNA, 372 bp, Glycine max
  Clone ID: LIB3072-038-Q1-E1-H3
tggcttggaacctttgggctgattgatgtgcttgcatggtcgtgagaagatgatagaaggggggtagaagattaaggaggccgggtaggacacctagagtagggtataggacataagggaggtagtcgtaagggacgtaagggaggtagtcgtaagggacgtaagggaagtcgtcgtaagggacgtaaaggcggaagtaagggacgcaaagagaataatagcgatagtaataattgtaattgtacgacgagcaacctcgacaccagagggagtaccaacggcgccgcgcgacgcggcccacacggggaaaccaaaccaacgacagacgcattccccgtgtcacgcaggcccgcgcgccccggcccggcgctc

SEQ ID NO: 1120 - DNA, 320 bp, Glycine max
  Clone ID: LIB3072-038-Q1-E1-H4
gcttggaacctttgggctgattgaagtgcttgcatggtcgtgagaagatgatagaagggcatttaccaaccgcgataaaatttacaaactcctcgatggaacaaattctaacccaccgtaccgtacaacattacgctaacgaagccgcacgtcctttctatttccatggcgcggtcccctacggttatacccctgtgagtttaacatgccaccgatataaacggtgaatttgccgataacgacgacgagcaccatactaggttagttacaattgataatggacggtgccctattccgactaattgaaatgggctgcgttt

SEQ ID NO: 1121 - DNA, 397 bp, Glycine max
  Clone ID: LIB3072-038-Q1-E1-H5
gcttcgaacctttgggctgatttatgtgcttgcatggtcgtgagaagatgatagaagggcatggtcgtgagaagatgatagaagggcatggtcgggagaagatgatagaaggggatcccgagcctgaatcaaataacctaacctaactcgttctgactacggagaggaaaatacccgggcccccgcctccgtcttcttccgctccagtcctcgacgcgatggcgaagagagtagaggtgaaagaccgtccgataaggaggtatgggccttagggcagacgtccacctgataggtaacgcgtatacgcgcgtaagaatgacggccctcctggcggctagcgttgaagtttctccggtaaacgtccccgtagcaagttacgccgactgaaaccatcatc

SEQ ID NO: 1122 - DNA, 397 bp, Glycine max
  Clone ID: LIB3072-038-Q1-E1-H6
tggttggaaccttgggctgattagtgcttgctggtcgtgagaagagatagagggcatggtcgtgagaagatgatagaagggcatggtcgggagaagatgatagaagggcatggtcgtgaaagatgatagaaggggggatccgaggaggaacccggcaccattgcggaagaagaaagcgtttagagcactattattgcctaagatgtcgtcgacacgactgacaagtcctccgaaattaaggtccaaatcagcaaaaaggataagtacgcttaccccagagccccccgtcacgctgatggaaggggcccccaaactccaactccggcaccataatccgaccggtcaagcaatcggcagcctcccctcggaacggaccggtgacatcaccacaacaggc

SEQ ID NO: 1123 - DNA, 255 bp, Glycine max
  Clone ID: LIB3072-038-Q1-E1-H8
tgggctgagtgatgtgcttgcatggtcgtgagaagatgatagaaggggagatcaaaaatataaaaaaaaaaaaaaaatcggaggaaaatcctttactcagaggggttaaatccattcatgttcattccttattccacaatctcctcacagcggtattcaaacctaacctatcggttgccgccccataatgcctcgatcgggaaaatttcggtgccatttagtccaaacgttccgtagcgataccttttccccgtt

SEQ ID NO: 1124 - DNA, 401 bp, Glycine max
  Clone ID: LIB3072-039-Q1-E1-A1
ggctcggaacctttgggctgatttatgtgcttgtttatgtgcttgcatggtcgtgagaagatcatagaagggctatatctaaagaacacagggaacccgcatatgattaaaaaaaaaaaaagaagataaaaaaaaaaggtggatgtctcagaggacttaagtccatgcatgtacgtacgtgatgctacagtctccacacagcgcaattcaaacctaaccaaacggttgctatcccataatgctccgatcgggaaaatctcgctgccatttaatccaactgttccgtagtatacgttgtcccagttagtcggtgcaacagtgaagaggcttgtattgactgtttcctttaatagccgtatagtacgaacggtgaacgggatgtctaacgcagtggtgtacca

SEQ ID NO: 1125 - DNA, 489 bp, Glycine max
  Clone ID: LIB3072-039-Q1-E1-A10
ggctcggaacctttgggctgatttatgtgcttgcatggtcgtgagaagatgatagaagggcatcgtcgtgagaagatgatagaagggcacgggggtgagaagatgatagaaggggatagtaaaaataaccaacaaagacgagcccgaagaataatacggcggcgtcaaaggcgcgcccgccgtcctcccactccgcgggggccatagtcgtatgtacggaatcgagtcctcctaaaagcgactagctactaagccatgacgacgacgagcacctaaaattacgtcgcgactctcgtacgcgtatatgtctaacgttcatctaacgtagtcgcgaagacaccacgtcgaacctacgttatctagaccgcaagagtcgcacgcgtatatgtctatagttaggatagcgctgccgctccgatattaatgatccctcgtcataaattccgtaagcctagagacgatcagaaaaatcaacagtccctctaaacg

SEQ ID NO: 1126 - DNA, 451 bp, Glycine max
  Clone ID: LIB3072-039-Q1-E1-A11
tggctcggaacctttgggctgatttatgtgcttgcagtcgtgagaagatgatagaagggcatggtcgtgagaagatgatagaagggcatggtcgtgagaagatgatagaagggcatggtcgtgagaagatgatagaagggcatggtcgtgagaagatgatagaagggcatggtcgtgagaagatgatagaagggggtaatcgaacaaccaagaaaagttacccttacagtagttcaagaaaacgaagagtatcagtccgcctgtcactccctcatcccgtgttcctattctacattcattccttgttattgtttaggatgcgtctgatgcggacggtgacttgacctggaatggccctacacatcatgccccgttggtaacaagaggaaatggcggtggaacagaatgagttgtatctgggaaagatatccgtttcactatcgcagcgtaa

SEQ ID NO: 1127 - DNA, 372 bp, Glycine max
  Clone ID: LIB3072-039-Q1-E1-A12
ggctcggaacctttgggctgatttatgtgcctgcttatgtgcttgcatggccgtgagaagatcatagaagggcatggtcgtgagaagatgctggaaggggcctatataatagtaggaaaagtagtaataatacgtaaccttaagaggaaccatccgcggcccttaaggactatatttaaacgacgacgaccaagggtaaaagaattaagtgctaaagaccgttacttctctccaggtcagttacgttccacaacctaattctaagcaacagcagtcttaataaccttacccacatcgttataattcatccatttctctatctccctattaataatataaccgaaccctgagaagattaacatacggcgaacc

SEQ ID NO: 1128 - DNA, 325 bp, Glycine max
  Clone ID: LIB3072-039-Q1-E1-A2
ggcttggaacctttgggctgatttatgtgcttgcatggtcgtgagaagatgatagaagggcatggtcgtgagaagatgatagaaggggggaaaaaaaaaaaaaaaaaaaaaaaaaaaaaagtggttgtctcagaggacttaagtccatgcatgtgcgtacgtgatgctacagtctcctcacagcgctattcaaacctaacctatcggttgctgccccataaatgctcgatcgggaaaatttcggtgccatttaatccaactgttccgtaatataccttttccctgttagtccggtgcaacagtgaaaaggtttgaattgactgtt

SEQ ID NO: 1129 - DNA, 359 bp, Glycine max
  Clone ID: LIB3072-039-Q1-E1-A3
aacctcttgggctgatttatgtgcttgcatggtcgtgagaagatgatagaagggggcaaagttaagaaaatggatagacccaaccacggaagagtgactcgaaaacacgacgtacgacactgcatggtcgaacgtcctcactaaatggccttacgattccgagaagcctcatctcacagagtatgaaaccaaaatgatcggatcgggaaaaataagtggctgtctcatacaacttaagtcgcatgcatactgcgtacgcttatgttacagtacaccccacagcgatattcaaacctaccctatcgcttaatgccccataaggttgcgatcggaaaaatatcggtcccactgaatccaac

SEQ ID NO: 1130 - DNA, 372 bp, Glycine max
  Clone ID: LIB3072-039-Q1-E1-A4
aacctttgggctgatttatgtgcttggtgagaagatgatagaagggcatgatcgtcagaagatgatagaagggacatagcaacatagacctagccgcgcgtccacgtacattcgagcctcccgtctactccgagcaatttcgcgcggattcctatgaatagtcactgaataaaaaaaaaaaaaaaaaaaaaaaaaaaaaagtggttgtctcagaggacttaagtccatgcatgtgcgtacgtgatgctacagtctcctcacagcgctattcaaacctaacctatcggttgctgccccataatgctgcgatcgggaaaatttcggtgccatttaatccaactgttccgtagtatactttttccctgttagtcg

SEQ ID NO: 1131 - DNA, 292 bp, Glycine max
  Clone ID: LIB3072-038-Q1-E1-H1
tttgggctgattgatgtgcttgctggtcgtgagaagatgatagaacggggggtaactgcgcaatgtagctgcaccggatcgcaacgggtatacacagaagacttagccttaactttaattgaataaatcacaaaccaaggcctacactttacccttctagaccctactctagaccctgtaccgacccgtgccgtgcggccggccccgtggcactgaaaaacaagacggcgaactaagcccccttcgcgaaactagcgactcatgtcgtccccttcccctagtaaaagaccac

SEQ ID NO: 1132 - DNA, 461 bp, Glycine max
  unsure at all n locations
  Clone ID: LIB3072-038-Q1-E1-F12
tggcttggaacctttgggctgatttatgtgcttgtttatgtgcttgtttatgtgcttgcatggtcgtgagaagatgatagaaggggatagtaaaagtaaccaacaaagacgagcccgaagaataatacggcggcgtcaaaggcgcgcccgccgtcctccccttccgcgggggccatagtcgtatgtacggaatcgagtcctcctaaaagcgactagctactaagccacgacgacgacgagcacctaaaattacgtcgcgactctcgtacgcgtatatgtctaacgttcttctaacgtagtcgcgaagacaccaggtcgaacctacgttatctagaccgcaagagtcgcacgcgtgtatgtctatagttaggatagcgctgccgctccgatattaatgatcctcgtcataaattccgtaagcttagagacgatcagaanaatcaacagtctctctaaacgga

SEQ ID NO: 1133 - DNA, 310 bp, Glycine max
  Clone ID: LIB3072-038-Q1-E1-F2
gcttcgaacctttgggctgattgatgtgcttgtttatgtgcttgcatggtcgtgagaagatgatagaaggggatagtaaaaataaccaacaaagggagcccgaagaataatacggcggcgtcaaaggcgcgcccgccgtcctccccttccgcgggggccatagtcgtatgtacggaatcgagtcctcctaaaagcgactagctactaagccacgacgacgacgagcacctaaaattacgtcgcgactctcgtacgcgtatatgtctaacgttcttctaacgtagtcgcgaagacaccaagtcgaacctac

SEQ ID NO: 1134 - DNA, 231 bp, Glycine max
  Clone ID: LIB3072-038-Q1-E1-F3
ggcttggaacctttgggctgattgatgtgcttgcatggtcgtgagaagatgatagaaggggactaagaattagcctaacacttcagcatattgcacgagggaacccaagacacatcacgacgagagtgtggcctttaccatcgccgtcgggagccgccccttcggtactagccctcgctctacccggtaccgtgccccgggaaaagtacaattttagctataataagcgtt

SEQ ID NO: 1135 - DNA, 402 bp, Glycine max
  Clone ID: LIB3072-038-Q1-E1-F4
ggcttggaacctttgggctgattgatgtgcttgcgtgagaagatgatagaagggcatggtcgtgagaagatgatagaagggcatggtcgtgagaaggtggtagaagggcatggtcgtgagaagatgatagaagggcatggtcgtgagaagatgatagaagggcatggtcgtgagaagatgatagaagggcatggtcgtgagaagatgatagaaggggaactctcctatagaagaaaaaagagaagaagacgggcccgaagaataatacggcggcgtcaaaagcgcgccgggcgtcatccccttccgcggggggcatcatccacgttaatccgggtcgaacaagtccggttcgtctacgaaaagcgactactactaatatccaaacgacgaacagctcccaaa

SEQ ID NO: 1136 - DNA, 282 bp, Glycine max
  Clone ID: LIB3072-038-Q1-E1-F5
tggcttggaacctttgggctgatttatgtgcttgcatatgtgcgtgaataggtgtaagaagatgatagacgggactggacgtgagaagatgatagagggggatagtcgtgagatgatgataaatgggattcgtcgcgagaatatgatagacgggcatcgtcgtaataagatgatagatggtcatggtcgtgagaagattatagaaaggcatggtcgcgagaagatgattgacggtaatcgtcgtgataagatgattgatgggtatggtcgttagaagatcat

SEQ ID NO: 1137 - DNA, 394 bp, Glycine max
  Clone ID: LIB3072-038-Q1-E1-F6
tggcttggaacctttgggctgatttatgtgcttgcatggtcgtgagaagatgatagaagggtccgataaaaattcagtaataagctcgcctaagggggcctcgaagcataggtttgaggataaagtcgaaaagaaggagaggtctccgaaaagggtctaggtagaggtcgaaggtaaaatcgccgaagtcaagaagttcaccgccgcgaagcacggctctaattacgccattcattctactgagtagaataaagtatagtctgccgcgaccgtctatgacgcggattttaccgaaccggccgctcggtccttcgtcccgcgtaggaagaacggaaccttgcatcgcaccgcgaaaggaaaggtttgtccgggaatggcccgttataagaaaatc

SEQ ID NO: 1138 - DNA, 140 bp, Glycine max
  unsure at all n locations
  Clone ID: LIB3072-038-Q1-E1-F7
ggttcgaactttgggctgattttgtgcttgtttatgtgcttgnatggntgagaagatgatagaagggggttaaatnngnnnngnnnnntnggggttttnngtnnnttttngtaagagtaanggttatngtaatagaagtt

SEQ ID NO: 1139 - DNA, 296 bp, Glycine max
  unsure at all n locations
  Clone ID: LIB3072-038-Q1-E1-F8
ttgggctgagttgagtgcttgnatggtcgtgagaagatgatagaagggggagccgagaggactgcgagaggggtagcagttgaggccttgcgagccgtaaaaacgaagatgacctcccttattgagattacgaatactttggatggtgcgagtactaaagcctacgttaaggctactgaagccgagggtttttgtggaaaaccggcgtgagatcctaagtacccgaactctgacccctagtctaccatcgatgaaaatggcaaaagaaagtccaaaaccgatgtgcggcccgggct

SEQ ID NO: 1140 - DNA, 395 bp, Glycine max
  Clone ID: LIB3072-038-Q1-E1-F9
ggcttggaacctttgggctgattgatgtgcttgcagtgagaagatgatagaaggggatgtatatataatatataataatataaaaacctctaaaggtctaaatctaaatggcatccataaaaaaaaaaaaaaaaaaaaaaaaaaaaaagtggttgtctcagaggacttaagtccatgcatgtgcgtacgtgatgctacagtctcctcacagcgctattcaaacctaacctatcggttgctgccccataatgctgcgatcgggaaaatttcggtgccatttaatccaactgttccgtagtatactttttccctgttagtcggtgcaacagtgaagaggtttgtattgactgtttcctttaatagccgtgtagttcgaacggtgaacgggatgtgtt

SEQ ID NO: 1141 - DNA, 456 bp, Glycine max
  Clone ID: LIB3072-038-Q1-E1-G10
ttggcttggaacctttgggctgattgatgtgcttgcatggtcgtgagaagatgatagaagggcatggtcgtgagaagatgatagaagggggagagggagagagaggagaaaggaggaaagacgagcagcctactaaggttggcgttgaggagagagagcttacggggagctattggagagaactacttcgaatttaaagtctattgtcgtaacgattgcgctgaggatgccacctaggtccgtcccgagggaaatttacctaagatcgccttgggattccctaagtctcctcggtagcgtacgtgccttaaatttggcgaggaattaatagttttacccatccactcggacccggagttctcaaagagagaaatggaattcgcgaaattcgagcagcgctatccccatccataaacgtttcactagtcccggtatcgtacggcttcccaacggccc

SEQ ID NO: 1142 - DNA, 397 bp, Glycine max
  unsure at all n locations
  Clone ID: LIB3072-038-Q1-E1-G11
gcttgaatttggctgatttatgtgctgcatgtcgtgagagtgatagaggggacctatatatcaatcaaaaagctccttacagtgttttaaacgaagagtttactcctcccgtctccctcccctggttccattattctacattcattcctattactgtcgaccctggtctgacaacgaagcatttctccgaaaaggggctacaccacactccgtagatacatataccgcggaacaaaagtattttatgggaaagaaagactttctctatcggggtaatctgtaacgacctgataaaggaccggaatactactctgctttacactgacttgcccactgttgaggttacttcccgagttccagcctgacctacnccgtagcacaacgtcgngcgccggaa

SEQ ID NO: 1143 - DNA, 478 bp, Glycine max
  unsure at all n locations
  Clone ID: LIB3072-038-Q1-E1-G12
gttggaacctttgggctgattgatgtgcttgtttatgtgcttggtgagaagatgatagaaggggacgtaatcgaacaaccaagaaaagttacgcttacagtagttcaagaaaacgaagagtatcagtccgcctgtcactccctcatcccgtgttcctattctacattcattccttgttattgtttaggatgcgtctgatgcggacggtgacttgacctggaatggccctacacatcatgccccgttggtaacaagaggaaatggcggtggaacagaatgagttgtatctgggaaagatatccgtttcactatcgcagcgtaactctttaacttaaatctcaaggggccagaaaccaagcccgaactcgtacattttgttcaccatacaaatgaaatttcaaccncgtaaacaaagcctagccatttatagtagcgcgaaagaaagaacttcccgcgggttaccctcaaagacacactc

SEQ ID NO: 1144 - DNA, 278 bp, Glycine max
  Clone ID: LIB3072-038-Q1-E1-G2
ggcttggaacctttgggctgattggagtgcttgcatggtcgtgagaagatgatagaagggcatggtcgtgagaagatgatagaagggcatggtcgggagaagatgatagaagggcatggtcgtgagaagatgatagaagggcatggtcgtgagaagatgatagaagggcatggtcgtgagaagatgatagaagggcatggtcgtgagaagatgatagaagggcatggtcgtgagaagatgatagacgggcatgggcgtgagaagatgatagaaaggca

SEQ ID NO: 1145 - DNA, 380 bp, Glycine max
  Clone ID: LIB3072-038-Q1-E1-G3
cttggaacctttgggctgatttatgtgcttgtttatgtgcttgcatggtcgtgagaagatgatagaaggggacatatggaaaacaaacaagaacgcagaaattccagtcaagctattacgctcttaaaactaaaggtcaaagtaacgcctcctactccgaaaacaacaacgccaaactccccgttattaacacacgtacgcgggttacgtatcttgttatgctattataaatatttgttgtactatggtggaagttggttgaaagcgcttttcttgtcgttgttgactacaactaatttcttggcggcattgctcgctgcggcgacacatttattattaactctattattgcatttggtggtgtatggcggtagcttccc

SEQ ID NO: 1146 - DNA, 382 bp, Glycine max
  Clone ID: LIB3072-038-Q1-E1-G4
gcttggaacctttgggctgattgatgtgcttgcatggtcgtgagaagatgatagaagggccatggtcgtgagaagatgatagaagggcatggtcgtgagaagatgatagaagggcatggtcgtgagaagatgatagaagggcatggtcgtgagaagatgatagaagggcatggtcgtgagaagatgatagaagggcatggtcgtgagaagatgatagaagggcatggtcgtgagaagatgatagaagggcatcgtcgtgagaagatgatagaagggcatggtcgtgagaagatgatagaaaggcatggtcgtgagaagatgatacaaggggtagtaaaaataaccaacaaagacgaagccgaagaataatacggcggcgtca

SEQ ID NO: 1147 - DNA, 357 bp, Glycine max
  Clone ID: LIB3072-038-Q1-E1-G6
tggcttggaacctttgggctgatttatgtgcttgcatgggtgagaagatgatagaagggggacctctctcgaagatctcccgccccccaccccaggcgcagatccgcgggcaaccaacaacccagccacaaccaggaccgtctccgcggtcgtcgtaaccgagcccccgaagaccgtagcgtcatccgcaggacccggaccacgccagctcccccctccccctcccccccccccaaacccgtccaccggtcacctgacggctaacacgacgcaaactctctcattccggctagtcggcccccccccctccgtacggttacggcaaacgaccttgggccaagctcccggtcacggccc

SEQ ID NO: 1148 - DNA, 348 bp, Glycine max
  unsure at all n locations
  Clone ID: LIB3072-038-Q1-E1-G9
gcttggaacctttgggctgattgatgtgcttgcatggtcgtgagaagatgatagaagggggcctcagcgcgcgaccgcccgccgccgcaatcgggctcctcctccccgccgcctcgcgcccgcgcccgcccccctctctattcgaaaacgctccgtcgtggcggcaatcgcggccgtggaagtcttcgtaagcgtggtaatggtcgtggaggtcgtaagacgcatttagatccgagtcatatcgagctaattattattgagattccggctacgggagcggtattcgccaaggtctaacccgagggcgtcgaaacgggcgcgtttgtcgagaatgacggtcgtanacgc

SEQ ID NO: 1149 - DNA, 457 bp, Glycine max
  Clone ID: LIB3072-038-Q1-E1-F11
tggcttggaacctttgggctgattgatgtgcttgcatggcgtgagaagatgatagaaggggctctcgaaaagtaatatcacaggtgaaggatcccgggccgggacccgggaaccagggccacctgtgcggtgaagacgaccgaggcggccccgaatgactgaccggggaagaaggcgtgtgcgaagcgtaatgatgacgacattactggtgattcgaagaagtccgcggtggtctagatcggtataagagttgataagacttgtacttagaagcggcatattactcataaggactatactatctctaaggaccatgagacttacgatggtacgggctctgaatctcatcataatcaaatataataaggctcacctttactctaacctcctccccaaccgacatcagggccccgccccccagggcctttgaaccccgacccgccccctcgtcacaact

SEQ ID NO: 1150 - DNA, 400 bp, Glycine max
  Clone ID: LIB3072-038-Q1-E1-D3
gttcgaacctttgggctgatttatgtgcttgatggtgagaagatgatagaaggggatagtaaaaataaccaacaaagacgagcccgaagaataagacggcggcgtcaaaggcgcgcccgccgtcctccccttccgcgggggccatagtcgtatgtacggaatcgagtcctcctaaaagcgactagctactaagccacgacgacgacgagcacctaaaattacgtcgcgactctcgtacgcgtatatgtctaacgttcttctaacgtagtcgcgaagacaccaggtcgaacctacgttatctagaccgcaagagtcgcacgcgtatatgtctatagctaggatagcgctgccgctccgatattaatgatcctcgtcataaattcccgcagcttagagacga

SEQ ID NO: 1151 - DNA, 313 bp, Glycine max
  Clone ID: LIB3072-038-Q1-E1-D4
tggcttggaacctttgggctgatttatgtgcttgtttatgtgcttgtttatgtgcttgcatggtcgtgagaagatgatagaaggggatatatataaaggtagataaatacaaaaaaaaaaaataatatatatatatctctacatatatgccgctgtgtatataccttcctaccttgtagtaataaataaatactccccattccaaataataacggttgacgttgaggacacctaattttctgcccgtgacaacggaattggaacggctaaggtcggccccgtcggagacgacgtattgaaggtcgcgcctttc

SEQ ID NO: 1152 - DNA, 308 bp, Glycine max
  Clone ID: LIB3072-038-Q1-E1-D6
ggcttggaacctttgggctgatttatgtgcttgcatggtcgtgagaagatgatagaagggggcctcagcgcgcgaccgcccgccgccgcaatctgcgtcctcctccccgccgcctcgcgcccgcgcccgcccccctctctattcgaaaacgctccgtcgtggcggcaatcgcggccgtggaagtcttcgtaagcgtggtaatggtcgtggaggtcgtaagacgcatttagatccgagtcatatcgagctaattattattgagattccggctacgggagcggtattcgccaaggtctaacccgagggcg

SEQ ID NO: 1153 - DNA, 141 bp, Glycine max
  unsure at all n locations
  Clone ID: LIB3072-038-Q1-E1-D7
gtgcttgatggtcgtgagaagatgatagaagggnatggtcgtgagaagatgatagaaggganaaanggaggaaaaagaaanataagaggaagaaaaaaaaaaaaaaaaaaaaaaaaaagtggttgattaagaggatttaag

SEQ ID NO: 1154 - DNA, 308 bp, Glycine max
  Clone ID: LIB3072-038-Q1-E1-D8
tgcttcgaacctttgggctgatttatgtgcttgcatggtcgtgagaagatgatagacggggatagtaaaaataaccaacaaagacgagcccgaggagtaatacgccggcgtcaaaggcgcgcccgccgtcctccccttccgcgggggccatagtcgtatgtacggaatcgagtcctcctaaaagcgactagctactaagccacgacgacgacgagcacctaaaattacgtcgcgactctactacgcgtatatgtccaacgttcctctaacgtagtcgccaacacaccacgtcgaacctacgttatcta

SEQ ID NO: 1155 - DNA, 464 bp, Glycine max
  unsure at all n locations
  Clone ID: LIB3072-038-Q1-E1-D9
ggcttggaacctttgggctgatttatgtgcttgcatggtcgtgagaagatgatagaaggggggcgagcgcaataacgacaacaaacccgaggccgagagagcgaaagaggagacgggcgtgacaatgagtgtggcgacagtagccgcaggagcctcctcaggccggattataacagagactgtacgcaaattccgctccgaaaagggctgtgaagttactgactgaagctctgacttagaccatgactttgatgatattgttacctgtgttttatctaattttattgctgttcctgttattgctaaagttgtccgagaaaccgacgctttactcctctatgcccttgttcggcacctaacctggcgctcaaactaaaaggtcacncccccctcccccccgacgcccgcgcacccgtgtgtccccgacggtgtcaccaaacggtgaacccacgacacaaagcgcg

SEQ ID NO: 1156 - DNA, 494 bp, Glycine max
  Clone ID: LIB3072-038-Q1-E1-E10
tgcttggaacctttgggctgattgagtgcttgcatggtcgtgagatgatagaagggggaagagcgaagagaacggtctttaagggcccaattcgctcggtcgcgccaacacgtgccctagtatcgctatcgagcttcctcgccgtgggggaagggtaaaacaacggttccgccacgaatcctcataaggaactacgtttctaggtcgaagatactactatagagtaagctaagtcctctcataagtgttataagaatatcgtccctcttcggtctaggaatactccttacgatcgcgtcgcctagagccgcgacgtcctatcgccgtcggatcttataagaaggagtccgctcgagaaggaaatagacagaagtcccgggccgagaaaccctaagcataccgagattactaaagaagtcccggaaagagaacgtttcggagccgccctacgcgtcgacacttccggctctcccgctagagacggtaccgccctg

SEQ ID NO: 1157 - DNA, 477 bp, Glycine max
  unsure at all n locations
  Clone ID: LIB3072-038-Q1-E1-E11
ggcttggaacctttgggctgattgatgtgcttgtttatgtgcttggtgagaagatgatagaaggggatagtaaaaataaccaacaaagacgagcgggaagaataatacggcggcgtcaaaggcgcgcccgccgtcctccccttccgcgggggccatggtcgtatgtacggaatcgagtcctcctaaaagcggctagctactaagccacgacgacgacgagcacctaaaattacgtcgcgactctcgtacgcgtatatgtctaacgttcttctaacgtagtcgcgaagacaccaggtcgaacctacgttatctagaccgcaagagtcgcacgcgtatatgtctatagttaggatagcgctgccgctccgatattaatgatcctcgtcatanattccgtangcttagagacgatcaggaaaaatcaacagtctctctaaacggatgaagttttcccaggtccccgccgncacgccaggg

SEQ ID NO: 1158 - DNA, 488 bp, Glycine max
  Clone ID: LIB3072-038-Q1-E1-E12
ggctccgaacctttgggctgattgatgtgcttggtgagaagatgatagaagggtataaggacggggatataagcgctttcgccgagaaagccgaggccgccgaaatagtatacgtcgaggaaaagaaggggccttctgataagaccaaggagaagtcattagggtataagaagatagaggaggttatagtcatcatcttcttcttattattcgccgtactaccggagtacggcgaaggcgtctactacgaaggagaggttaaggagaagaaaggcacaccagaaaagacaaaagagaagtccttcggccactatcttaagatagaggaggaaaaggaaaaggaaaaggagagcggcgtctaccgacacccaagaccgagataaggtccccccgccggccggagacgtacgaccgcggcgcgtccccgccctaccctactacacgatagttccgcgggccctcccggcgccctccgacgtacatccaac

SEQ ID NO: 1159 - DNA, 311 bp, Glycine max
  Clone ID: LIB3072-038-Q1-E1-E2
tggcttggaacctttgggctgattgatgtgcttgtttatgtgcttgcatggtcgtgagaagatgatagaaggggacagacagtcttcctaaccagggcgcgggcgactcgtaagtcatgacgggcaagggaatggggagccctggcaagagaaggaataagatttatatttctcgcgcgaggcgcggttgttgtagcccttattcctagaagagctgccgtgttgtgcgtgtcccttttgtcgcgtgtattaggaaacacaatcggagtgcgaaggttaccaggagaaagattattggaatcggaaagacg

SEQ ID NO: 1160 - DNA, 438 bp, Glycine max
  Clone ID: LIB3072-038-Q1-E1-E3
tggcttggaacctttgggctgctttatgtgcttgcatggtcgtggaagatgatagaaggggacctatataatcaatcaagaaagctccttacagtttgttgaaaacgaagagtattactcctcccgtctctccctctccccgcgttcctattattctacattcattcctagttactgtcgaccctgcgtctgacaacgaaggcaatttctccgaaaacggcggtatacaccacactccgctagatacaatagtacccggcggaacaaaagtagttttaatgggaaacgaaagacgtttctctatcgcggcgtaactctgtaacgagtctgataaaagggccggaataactactctgcttttacactgaacttgccccactgttgaaagttacttcccgagttccaaacctgacctacccgtagccacaacgtcccgcg

SEQ ID NO: 1161 - DNA, 384 bp, Glycine max
  Clone ID: LIB3072-038-Q1-E1-E4
gcttcgaacctttggctggttgagtgcttgcatggtcgtgaaagatgatagcaggggatagtaaaaataaccaacaaagacgagcccgaagaagaagacggcggcgtcaaaggcgcgcccgccgtcctccccttccgcgggggccatagtcgtatgtacggaatcgagtcctcctaaaagcgactagctactaagccacgacgacgacgagcacctaaaattacgtcgcgactctcgtacgcgtatatctctaacgttcctctaacgtagtcgcgaagacaccaagtcgaacctacgttatctagaccgcaagcactccacgccttatgtccgtagctaggatagcgctgccgctccgatattaatgatcctcgtcctaaattc

SEQ ID NO: 1162 - DNA, 394 bp, Glycine max
  Clone ID: LIB3072-038-Q1-E1-E5
aacctttgggctgagttatgtgcttgtttatgtgcttgcatggtcgtgagaagatgatagaagggcatggtcgtgagaagatgatagaggggcatggtcgtgagaagatgatagaagggcatggtcgtgagaagatgatagaagggcatggtcgtcagaagatgatagaagggcatggtcgtgagaagatgatagaagggggcaaataaaaattactattaaaaaaaaaaccgagacaaaaaacaaaagtggttgcctcagaggacttaagtccatgcgtgtgcgtacgtgatgctacagtctccccacaggagcattcacccccaacctatcggttgctgccccataatgctgcgatcgggaaaatttcggtgccatttaaaccaaatgttcc

SEQ ID NO: 1163 - DNA, 389 bp, Glycine max
  unsure at all n locations
  Clone ID: LIB3072-038-Q1-E1-E6
tggcttggaacctttgggctgatttatgtgcttgcatggtcgtgagaagatgatggaaggggatagtaaaaataaccaacaaagacgagcccgaggagtaatacggcggcgtcaaaggcgcgcccgccgtcctccccttccgcgggggccatagtcgtatgtacggaatcgagtcctcctaaaagcgactagctactaagccacgacgacgacgagcacctaaaattacgtcgcgactctcgtacgcgtatatgtctaacgttcntctaacgtagtcgcgaagacaccaggtcgaacctacgttatctagaccgcagagtccgccgcgtatatgtctatagttaggatagcgctcgcgctccgatattaatgatcctcgtcataaattc

SEQ ID NO: 1164 - DNA, 413 bp, Glycine max
  unsure at all n locations
  Clone ID: LIB3072-038-Q1-E1-E9
tgcttcgaactttgggctgattgangtgcttgcatggtcgtgagaagatgatagaaggggacgtaatcgaacaaccaagaaaagttacccttaggatattcaagaaaacgaagagtatcagtccgcctgtcactccctcatcccgtgttcctattctacattcattccttgttattgtttaggatgcgtctgatgcggacggtgacttgacctggaatggccctacacatcatgccccgttggtaacaagaggaaatggcggtggaacagaatgagttgtatctgggaaagatatccgtttcactatcgcagcgtaactctttaacttaaatctcaaggggccagaaaccaagcccgaactcgtacattttgttcaccatacaaatgaaatttcaaccccgtaaacaaagcct

SEQ ID NO: 1165 - DNA, 474 bp, Glycine max
  Clone ID: LIB3072-038-Q1-E1-F10
tggctccgaacctttgggctgattgatgtgcttgcatggtcgtgagaagatgatagaaggggatcgtaaaaataaccaacaaagacgagcccgaagagataatacggcggcgtcaaaggcgcgcccgccgtcctccccttccgcgggggccatagtcgtatgtacggaatcgagtcctcctaaaagcgactagctactaagccacgacgacgacgagcacctaaaattacgtcgcgactctcgtacgcgtatatgtctaacgttcttctaacgtagtcgcgaagacaccaggtcgaacctacgttatctagaccgcaagagtcgcacgcgtatatgtctatagttaggatagcgctgccgctccgatattaatgatcctcgtcataaattccgtaagcttagagacgatcagaaaaatcaacagtctctctaaacggatgaagtttttccaggtcccgcccgccacgccagggg

SEQ ID NO: 1166 - DNA, 347 bp, Glycine max
  Clone ID: LIB3072-038-Q1-E1-D2
ggcttggaacctttgggctgattgatgtgcttgtttatgtgcttgcatggtcgtgagaagatgatagaaggggatacaaagtattctacgaagcctcgtgatagttcttacggaggtccgaataagtctgtcgagccgccggaggctgagagggccgggaccagttactaggttggtcttgacagtccgtctatccttcgcatacctaggaaaccgaaggacaaccctcccagcggtcttccggagaagcacgtaagcgctccgcacgggccaggcgccgagaacggataaggcctctaccgaagaaaaaaaaaaacgacaaaattccggagaatctctcccggccg

SEQ ID NO: 1167 - DNA, 178 bp, Glycine max
  unsure at all n locations
  Clone ID: LIB3072-038-Q1-E1-B5
ttgggntgatttatgtgcttgnatggtcgtgagaagatgatagaaggacatggtcgtgagaagatgatagaaggggaagaaaggagaaaggannngganntgaggtccgtcaggagaagntaataaaaaaaaaaaaaaaaaaaaaaaaaaaaaagtggttgtntnagaggatttaagt

SEQ ID NO: 1168 - DNA, 400 bp, Glycine max
  Clone ID: LIB3072-038-Q1-E1-B6
attggcttggaacctttgggctgatttatgtgcttgatggtcgtgagaagatgatagaagggggtaccccgtaaccctagtaaaaaaaaaaaaaaaggggaaaaaaaaaagtggttgtctcagaggacttaagtccatgcatgtgcgtacgtgatgctacagtctcctcacagcgctattcaaacctaacctatcggttgctgccccataatgctgcgatcgggaaaatttcggtgccatttaatccaactgttccgtagtatactttttccctgttagtcggtgcaacagtgaagaggtttgtattgactgtttcccctaatagccgtctaattcgaacggtgaacgggatgtgtttcgcagtggtgtaccaagtgtggtgggcgcggcggccatgtgt

SEQ ID NO: 1169 - DNA, 408 bp, Glycine max
  Clone ID: LIB3072-038-Q1-E1-B7
attggcttggaacctttgggctgatttatgtgcttgtttatgtgcttgcatggtcgtggaagatgatagaggggatagtaaaaataaccaacaaagacgagcccgaagaataatacggcggcgtcaaaggcgcgcccgccgtcctccccttccgcgggggccatagtcgtatgtacggaatcgagtcctcctaaaagcgactagctactaagccacgacgacgacgagcacctaaaattacgtcgcgactctcgtacgcgtatatgtctaacgttcttctaacgtagtcgcgaagacaccaggtcgaacctacgttatctagaccgcaagagtcgcacgcgtatatgtctatagttaggatagccgctgcgctccgatattaatgatcctcgtcataaatcccgtaag

SEQ ID NO: 1170 - DNA, 437 bp, Glycine max
  Clone ID: LIB3072-038-Q1-E1-B8
tgcttcgaacctttgggctgatttatgtgcttgcatggtgagaagatgatagaaggggacctatataatcaatcaagaaagctccttacagtttttgaaaaaccaagagtattactcctcccgtctctccctctccccgcgttcctattattctacattcattcctagttactgtcgaccctgcgtctgacaacgaaggcaatttctccgaaaacggcggtatacaccacactccgctagatacaatagtacccggcggaacaagagtagttttaatgggaaacgaaagacgtttctctatcgcggcgtaactccctaacgagcctcatacacggaccggaataactactctgcttttacactgaacttgccccactgttgaaggttacctcccgagttccaagcctcacctacccgtaagcacaacgtcgcgcgcc

SEQ ID NO: 1171 - DNA, 445 bp, Glycine max
  Clone ID: LIB3072-038-Q1-E1-C10
tggcttggaacctttgggctgattgatgtgcttgcatggtcgtgagaagatgatagaagggcatggtcgtgagaagatgatagaagggcatggtcgggagaagatgatagaagggcatggtcgtgagaagatgatagaagggcatggtcgtgagaagatgatagaagggcatggtcgtgagaagatgatagaagggcatggtcgtgagaagatgatagaagggcatggtcgtcagaagatgatagaagggcatggtctgagaagatgatagaagggcacgaaaacagacactaccattaaaaacgaaaagcgcaacaaaaaaaaaaaagtggttgtctcagaggacttaagtccatgcatgtgcgtacgtgatgctacagtctcctcacagcgctattcaaacctaacctatcggttgatgccccataaatgcacgatcgggaaa

SEQ ID NO: 1172 - DNA, 499 bp, Glycine max
  unsure at all n locations
  Clone ID: LIB3072-038-Q1-E1-C11
ggcttggaacctttgggctgattgatgtgcttgtttatgtgcttgtttatgtgcttgcatggtcgtcagaagatgatagaaggggatagtagaggtaaccaacaaagacgagcccgaagaataatacggcggcgtcaaaggcgcgcccgccgtcctccccttccgcgggggccatagtcgtatgtacggaatcgagtcctcctaaaagcgactagctactaagccacgacgacgacgagcacctaaaattacgtcgcgactctcgtacgcgtatatgtctaacgttcttctaacgtagtcgcgaagacaccaggtcgaacctacgttatctagaccgcaagagtcgtacgcgtatatgtctatagttaggatagcgctgccgctccgatattaatgatcctcgtcataaattccgntagcttagagacgatcagacaaatcaacagtctctctaaacggatgaagttttcccaagtcccgcccgccacgccaggggaga

SEQ ID NO: 1173 - DNA, 485 bp, Glycine max
  Clone ID: LIB3072-038-Q1-E1-C12
tggcttggaacctttgggctgattgatgtgcttgcatggtcgtgagaagatgatagaaggggacattaaaaataaaatataagttaagcgaaagcgggaaaaaacaaaaactaaagagtacaacgctagggactacctataagactggggagatttcctacgcgggagggtataagaaggaggaggagtacaagggcgagtattacgtcggagaacataaaggggagtattacggcgaatatagcagcgagcataaaggagagtactacggcgaatataaagtcggagagcattacggcgagtataagttagagtataaagaggggccttcagataaagctaaggataagacttacggcgagggtggtgttgctgaaggtgagaagaagaagaaggagaagaagaagaaggagtacggttacgagtacggttacgatagtagtagtagtagcgatagcgaccaaatcgtcgtaccaatcacacac

SEQ ID NO: 1174 - DNA, 376 bp, Glycine max
  Clone ID: LIB3072-038-Q1-E1-C2
cttggaacctttgggctgattgatgtgcttgcatggtcgtgagaagatgatagaaggggacctatataatcaatcaagaaagctccttacagttttggaaaaacgaagagtattattcctcccgtctctccctctccccgcgttcctattattctacattcattcctagttactgtcgaccctgcgtctgacaacgaaggcaatttctccgaaaacggcggtatacaccacactccgctagatacaataatacccggcggaacaagagtagttttaatgggaaacgaaagacgcttctctatcgcggcgtaactctgtaaccagtctcataaacggaccggaataactactctgcgtttacactgaacttgcccca

SEQ ID NO: 1175 - DNA, 312 bp, Glycine max
  Clone ID: LIB3072-038-Q1-E1-C4
gcttcgaacctttgggctgatttatgtgcttgtttatgtgcttgcatggtcgtgagaagatgatacgaggggatagtaaaaataaccaacaaagacgagcccgaagaataatacggcggcgtcaaaggcgcgcccgccgtcctccccttccgcgggggccatagtcgtatgtacggaatcgagtcctcctaaaagcgactagctactaagccacgacgacgacgagcacctaaaattacgtcgcgactctcgtacgcgtatatgtctaacgttcctctaacgtactcgcgaaaacaccaagtcgaacctacg

SEQ ID NO: 1176 - DNA, 305 bp, Glycine max
  unsure at all n locations
  Clone ID: LIB3072-038-Q1-E1-C5
ggttggaacctttgggctgatttatgtgcttgnatggtcgtgagaagatgatagaaggggaaaaaaaaaagaagagtaannnntttctataaaaggaaaaaaaaaaaaaaaaagagaaaaagtggttgtctcagaggacttaagtccatgcatgtgcgtacgtgatgctacagtctcctcacagcgctattcaaacctaacctatcggttgctgccccataatgctgcgatcgggaaaatttcggtgccatttaatccaactgttccgtagtatactttttccctgttagtcggtgcaacagtga

SEQ ID NO: 1177 - DNA, 476 bp, Glycine max
  Clone ID: LIB3072-038-Q1-E1-C6
tggcttggaacctttgggctgatttatgtgcttgcatggtcgtgagaagatgatagaaggggatagtaaaaataaccaacaaagacgagcccgaagaagaatacggcggcgtcaaaggcgcgcccgccgtcctccccttccgcgggggccatagtcgtatgtacggaatcgagtcctcctaaaagcgactagctactaagccacgacgacgacgagcacctaaaattacgtcgcgactctcgtacgcgtatatgtctaacgttcttctaacgtagtcgcgaagacaccaggtcgaacctacgttatctagaccgcaagagtcgcacgcgtatatgtctatagttaggatagcgctgccgctccgatattaatgatcctcgtcataaattccgtaagcttagagacgatccgaaaaatcaacagtctctctaaacggatgaaattttcccaggtcccggccggcacgccagggggag

SEQ ID NO: 1178 - DNA, 374 bp, Glycine max
  unsure at all n locations
  Clone ID: LIB3072-038-Q1-E1-C7
aacctttgggctgatttatgtgcttgntcgtgagaagatgatagaaggggataggngcccgtaacatcagtgacagtcgacaagagagagattaataagaaaagaaaaaaagaagagccgagacctttcccgaagaaaagacggtactttacaggtaaagtcacgaagtcggctaaatcaagggttgaatcgaggaaaagatgaattagatgacgggtaacaccggagagaaggtctaagtcgtaaaggagaagatttaggaaacggtttaagtcgtaaaggagaagatttaataaatagtttaagtcgttaaggataagatccgtgatatcctttaagtggtaaaggagaagatttaatagaacataggagtc

SEQ ID NO: 1179 - DNA, 271 bp, Glycine max
  Clone ID: LIB3072-038-Q1-E1-C8
tggcttggaacctttgggctgagttgagtgcttgcatggtcgtgaaagatgatagaagggcatggtcgtgagaagatgatagaagggcatggtcggcgtaagatcatagaagggcatggtcgtgagaagatgatagaagggcatggtcgtgagaagatgatagaagggcatggtcgtgagaagatgatagaagggcatggtcgtgagaagatgatagaagggcatggtcgtgagaagatgatagaaaggggcaagtacccgaaatcaatct

SEQ ID NO: 1180 - DNA, 463 bp, Glycine max
  Clone ID: LIB3072-038-Q1-E1-C9
tggcttggaacctttgggctgattgatgtgcttgcatggtcgtgagaagatgatagaagggcatggtcgtgagaagatgatagaagggcatggtcgggagaagatgatagaagggcatggtcgtgagaagatgatagaaggggatctatctacataacagagattagtccccgtcctcccgcgaatacggagacgaggaaactacgcggtcctcctcctccgtcttcttcttccgctcccgtcctttaggcggcggcgtagatggagggaagagcgcgcgagctataaagttatgggccttacggcccgcgcaacagagattataatcgcgtcccggctcgtaggaatgaaggccctcttggcggtaggcgtaaaggtccttgttgctgtcgtccccgtattgggacccggcgagactctactaaatatcatctccgttacgtaaaccaacaaactacagtca

SEQ ID NO: 1181 - DNA, 495 bp, Glycine max
  unsure at all n locations
  Clone ID: LIB3072-038-Q1-E1-D10
tggcttggaacctttgggctgatttatgtgcttgcatggtcgtgagaagatgatagaagggataataaaaataaccaacaaagacgagcccgaagagtaatacggcggcgtcaaaggcgcgcccgccgtcctccccttccgcgggggccatagtcgtatgtacggaatcgagtcctcctaaaagcgactagctactaagccacgacgacgacgagcacctaaaattacgtcgcgactctcgtacgcgtacatgtctaacgttcntctaacgtagtcgcgaagacaccaggtcgaacctacgttatctagaccgcaagagtcgcacgcgtatatgtctatggttaggatagcgctgccgctccgatattaatgatcctcgtcataaattccgtaagcttagagacgatcagaaaaatcaacagtctctctaaacggatgaagttttcccaggtcccgncccgcacgccaagggagatanacacaataagaaacaaa

SEQ ID NO: 1182 - DNA, 268 bp, Glycine max
  Clone ID: LIB3072-038-Q1-E1-D11
gcttggacctttgggctgattgagtgcttgcatggtcgtgagaagatgatagaagggggtatagaagtacgaagaataacactagaccagcggagattgccgaaatctcaatgaggctacctatgtccggtaccacagagatggaccttatcacgtttacagaatcgatacatcagaaatataactcgcacacaaagcacaccgacgtacaccatcccaactaacctcacgaactcacgtaaacgtacatctcacacgatctcctcat

SEQ ID NO: 1183 - DNA, 389 bp, Glycine max
  Clone ID: LIB3072-038-Q1-E1-B4
gcttggaacctttgggctgattgatgtgcttgcatggtagaagatgatagaagggcatggtcgtgagaagatgatagaagggcatggtcgtgagaggagtgatagagggcatggtcgtgagaagatgatagaagggcatggtcgtgagaagatgatagaagggggaagtattccgtatcataaaaaaaaaaaaaaaaaaaaaaaaaaaaagtggttgtctcagaggacttaagtccatgcatgtgcgtacgtgatgctacagtctcctcacagcgctattcaaacctaacctatcggttgctgccccataatgctccgatcgggaaaatttccgtcgcatttaatccaactgttccgtagtatactttttccctgttagtcggtgcaac

SEQ ID NO: 1184 - DNA, 389 bp, Glycine max
  Clone ID: LIB3072-038-Q1-E1-A1
tggcttggaacctttgggctgatttatgtgcttgcatggtcgtgagaagatgatagaagggggtgatgacggcggtatacctgagcctccggggtagggtgtctgcggttactctgtttcacattcctctcgttactggtactgttgctgtcactggtgctcttgcctctggtgttgttcgggggactcatactattggcagcagtccgactggtgtcgtaactagggtcttctgaactatccttaaaaactctatcagcgcaactcctcgcgaagtcgccgtcacacacggcgccaccgcggtcaccacctcctaaataaaagcagaaagcgccttagtactaaacactcacgtattcgagctctccaaggtcggacacgtaactccc

SEQ ID NO: 1185 - DNA, 464 bp, Glycine max
  Clone ID: LIB3072-038-Q1-E1-A10
tggcttggaacctttgggctgatttatgtgcttgcatggtcgtgagaagataatagaaggggagactaaaaaaaattaatcccgtggtcgtctcgtcgtaaacagtgtgccgtactcgtctttaactacctacacccctgttaaatagttgaccttgccaagcgccctcattgcagtgtctaggaaggaggtaccggtcggtggcgccggccgcggcggaggcggccccgttgactagccgcggcagagggcagaaaaaaaaaaaaaataagaaaaaaaaaaaaagtggttgtctcagaggacttaagtccatgcatgtgcgtacgtgatgctacagtctcctcacagcgctattcaaacctaacctatcggttgctgccccataatgctgcgatcgggaaaatttcggtgccatttaatccaactgttccgtagtatacttgttccctgttagtcggtgcaac

SEQ ID NO: 1186 - DNA, 455 bp, Glycine max
  Clone ID: LIB3072-038-Q1-E1-A11
cttcgaacctttgggctgatttatgtgcttgcatggtcgtgagaagatgatagaagggggcctcagcgcgcgaccgcccgccgccgcaatctgcctcctcctccccgccgactcgcgcccgcgcccgccaccctctctattcgaaaacgctccgtcgtggcggcaatcgcggccgtggaagtcttcgtaagcgtcgtaatggtcgtggaggtcgtaagacgcatttagatccgagtcatatcgagctaattattattgagattccggctacgggagcggtattcgccaaggtctaacccgagggcgtcgaaacgggcgcgtttgtcgagaatgacggtcgtaaacgcggattaaatcgtcttcgtaattttcgtatccgtaagcgaggcgccgggagagtaagtcctaagtagagacagtttccaaccaggaacaacgacaaatcaccaacgcgc

SEQ ID NO: 1187 - DNA, 469 bp, Glycine max
  Clone ID: LIB3072-038-Q1-E1-A12
tggctccgaacctttgggctgattgatgtgcttgtttaggtgcttgattatgtgcttgcatggtcgtgagaagatgatagaaggggagagaacggggacgaagctcgtcacgcgcgtagcggcggccgcagtatcctcctcctcggtggaggcggggtttacggtcgaggtcgcgatacgtattttaatagagccgatcttgcgctccttagtaactatccgtggcgtcaaattccttaacgtccgccgtatgaagtcgaagtagtacaaattacgtccacgcggtcattctaaaaatgtcagtccgaagtagcacgccaatctcttcaacgtttgaaaaattgccgtcctccgcgggacctttcccttaatctgccaaccaaccaagttcctccacaaccaaagcgcgggacacacacacacacagacaaatagctcaacccacatatatcccgacttcataaagtac

SEQ ID NO: 1188 - DNA, 381 bp, Glycine max
  Clone ID: LIB3072-038-Q1-E1-A2
ggcttcgaacctttgggctgatttatgtgcttgtttatgtgcttgtttatgtgcttgtttatgtgcctgtttatgtgcttgtttatgtgcttgcatggtggtgagaagatgatagaaggggagctataggcgcccgtaacatcagtgacagtcgacaagagagacattaataagaaaagaaaaaaagaagagccgagacctttcccgaagaaaagacggtactttacaggtaaagtcacgaagtcggctaaatcaagggttgaatcgaggaaaagatgaattagatgacgggtaacaccggagaggaggtctaagtcgtaaaggagaagatttaggaaacggtttaagtcgtaaaggagaagatttaataaatagtttaag

SEQ ID NO: 1189 - DNA, 253 bp, Glycine max
  unsure at all n locations
  Clone ID: LIB3072-038-Q1-E1-A3
tgtttatgtggttgnatggtggtagaagatgaccccagggggttgagaaaatttnagggtgttggtgggtatataagaggttaaggtgaggtaaagtttgagangggtgaagaagggaaggtaggagaattagaantagtggggaagaagtgtaagagggaggaggaatgggtgnaggttaagaagtaagaatatgangtagttaagaagaagagagttgagagttgtaaatgtagtgataatgaggatgaag

SEQ ID NO: 1190 - DNA, 220 bp, Glycine max
  Clone ID: LIB3072-038-Q1-E1-A4
tttgggctgattgatgtgcttgcttatgtgcttgcatcgtcgtgagaagatgtcccacggggatagtaaaaataaccaacacagacgagccccaccaataatacggcggcgtcaaaggcgcgcccgccgtcctccccttccgcgggggccatagtcgtatgtacggaatcgagtcctcctaaaagcgactagctaccaagccacgacgacgacgagcacc

SEQ ID NO: 1191 - DNA, 401 bp, Glycine max
  Clone ID: LIB3072-038-Q1-E1-A6
gcttcgaacctttgggctgatttatgtgcttgcatggtcgtgagaagataatagaaggggataatgtacttcaaacaagtactccaacctacagcgctccggcttccttccttcctcctcgtctaacaagcgcgcgttatctcaaccaaccattatttttcctcagatacagcctcctctttctcgcctctcacctctcatatcgcgaaattaagacgaaggcagtacccgtagtcgcctcatccacacgttccgcttctagtcttcttccgcctgaagcgctaacggtcggcctcgtccctcgccttcttacgcgtctgcagaagcggctcagagtcgggacgaaggataggcgtacgaagcctcgtgggacccgtcgtaataagcgttaattgcgcgtt

SEQ ID NO: 1192 - DNA, 358 bp, Glycine max
  Clone ID: LIB3072-038-Q1-E1-A7
tggcttggaacctttgggctgatttatgtgcttgcatggtcgtgagaagatgatagaagggcatggtcgtgaaaatattatagagggatattgtcgggaacatactaagacgagatagaagaattatacggcggagtcaaaggcgaggaataagacggcggcgtcagaggggggcatagtggtatgtatggaatcgagtgccataaaaagctattaggtattaagtcacgatgacgacgagtacctacaattacgtgacgactatcatacgcgtatatgtcgtagggacttccaaagtagtatatatcaaacgatcttgaaacgaagttatctagacagcaagactcgcatacgtata

SEQ ID NO: 1193 - DNA, 387 bp, Glycine max
  Clone ID: LIB3072-038-Q1-E1-A8
acctttgggctgagttatgtgcttgcatggtcgtcagaagatgatagaagggcatcaccatctgacccgacaatcaagacaccggcacgtgcgacaccgacttaacccgacactactgaaacttaacccacattaccgccgaaccaaccactgacgaaagacccactactctcacgggaccaaactttgaaccccccaccggaaacccaagagaaacaaaatacaacacagaccacggaagcaaacacctccgtacccaccgtcatcgtatcgcccacctcagccttcatcgtccccccatccacaacccatacacaatccccaacctaaagcgatcaaccctatcgaaaatcgatcctcctacccccactaacgcaaccaacgacc

SEQ ID NO: 1194 - DNA, 502 bp, Glycine max
  unsure at all n locations
  Clone ID: LIB3072-038-Q1-E1-A9
tggcttggaacctttgggctgattgatgtgcttgcatggtcgtgagaagatgatagaagggggtacatacgagacaagttaaccgcgacaagttagctatctangcgaaaagaaaaaaaaatacacagcaataaaattacggcgacctatagatctgaaccgcgtacaaatacggcctaatctgttacagagcctgctgcgagtgctatggaaatagcggctacagcctagtagagaattgcggagttctctggaacgccgaactgtgtaagcatattctccttccctcacggtcattcttgccgaacgccgaagagtactgtccgaccaaccatccctcagtccctctcctcctcacgaaaccttgtaacccccacagatttcgcgcccctcccttccccgggcgtactaagtgtcgaccgacgtaaatttatatgagccgtcgccgcaaggaaaaccgacgtttccggcccccccctcgggccccggtcggatccctccg

SEQ ID NO: 1195 - DNA, 362 bp, Glycine max
  Clone ID: LIB3072-038-Q1-E1-B10
tggcttggaacctttgggctgattgatgtgcttgtttatgtgcttgcatggtcgtgagaagatgatagaagggcatggtcgtgagaagatgataggggggcatggtcgtgagaagatgatagaagggcatggtcgtgagaagatgatagaagggcatggtcgtgagaagatgatagaagggcatggtcgtgagaagatgatagaagggcatggtcgtgagaagatgatagaagggtctcgcacgcactacacacgcgcaaacgaccgaaccctcccttgtggttgcctcagaggacttaagtccatacatgtgtgtaccagatgacttaagtccatccatgtgcgtacgtaatgatacaatc

SEQ ID NO: 1196 - DNA, 510 bp, Glycine max
  Clone ID: LIB3072-038-Q1-E1-B11
gcttcgaacctttgggctgatttatgtgcttgcatggtcgtgagaagatgatagaaggggacctatataatcaatcaagaaagctccttacaggtttttaaaaacgaagagtattactcctcccgtctctccctctccccgtgttcctattattctacattcattcctagttactgtcgaccctgcgtctgacaacgaaggcaatttctccgaaaacggcggtatacaccacactccgctagatacaatagtacccggcggaacaagagtagttttaatgggaaacgaaagacgtttttctatcgcggcgtaactctgtaacgagtctgataaagggaccggaataactactctgcttttacactgaacttgccccactgttgaaggttacttcccgagttccaagcctgacctacccgtagccacaacgtcgtgcgccggaaccttcattgagcggctcgccgcggaggactcatttagaagattccgtcgcaaaaccggcgagaataa

SEQ ID NO: 1197 - DNA, 481 bp, Glycine max
  unsure at all n locations
  Clone ID: LIB3072-038-Q1-E1-B12
tggcttggaacctttgggctgatttatgtgcttgcatggtcgtgagaagatgatagaaggggagttatgcatgtaatcgaaaaggaaaatttcaagagacgaagggaatctccactccgcctttctctcctccctcctcccgcgttcctattctacactcattcctagttattgtcgacgacgactacgcgcatgatatcgatggtgacaagtcctaacatggcgctaaccaccctgcgccgttagcgacaagaggaaacggtggcggaacataagcagtaaaagtaggaaatgaaatccgtttctcgatcgcggcgtaactcggtaatgagtctctcgaggggccattgacaaagaccgtactctgactagtaggagctgtccctactatttaaggttagtcccctaagagtancctagcctgcgcgcccttacttatatctagattagggcgctttttaagcttaaccttcctcaagcg

SEQ ID NO: 1198 - DNA, 286 bp, Glycine max
  Clone ID: LIB3072-038-Q1-E1-B2
gcttcgaacctttgggctgatttatgtgcttgcatggtcgtgagaagatgatagaaggggcacgctaacagaattagtactatctcatcttacatgaagaaaaaaaaaaaaaaaaaaaaaagtaaatttctcatatcacttaactcaattcaattccttaccttacgttacactccactcacagcacaattcaaaccaaacctaaccgatcgtttcccataatataatgatcggatcaattacatttccattcaatccaacccaaccgtaccatactttacccctc

SEQ ID NO: 1199 - DNA, 394 bp, Glycine max
  Clone ID: LIB3072-038-Q1-E1-B3
ggcttggaacctttgggctgatttatgtgcttgtttatgtgcttgcatggtcgtgagaatgatagaaggggataaacaacaacaacagcacgaacgaagggaaaggagagagagagagagagagagagaggcctccatacgagagaagggtgcgcccggacgtagcggcggaagtcgcgggacaaagtaacggactcgagaacagagaaagaagagagaagagaaaagggggcggaacaccgagaatagagacacccggacccgaagcgcgaggagacgagagagcccgccccgcgaagcgccaacaaaaagggaagcgggcatcgaaagctcaagaaagcgttggaaaaggaagggtcttccctaccccaacgcttatcaaatccttatacat

SEQ ID NO: 1200 - DNA, 423 bp, Glycine max
  Clone ID: LIB3072-037-Q1-E1-H9
gctgatttagtgcctgctggtcgtcagaagatcataaccggggacagtagtactacataaagtaccgagcctaaaggtccaaggctacctgccgcgccccgtccctccttctaaaattaaatacgctgaatatacgtggtaatcgtgatcgtgtcgataagatcagctgtattaagcccaaatagtcacggcgccaccgcagagatcgagaagagccatactgagatcgccgctacggacgccttagtagtcgagtacgacgggaagcgtaagcgcggtatcaatcgtatccgtatcgatcgtattcgcggttaccaaggaacacgcacgaaaacgcaaccgttacgcgcccggtaacataaacacttaaacaacgcaactcctgcacgaacaaacgcgcgcgtcgccacttcatctttaaaa

SEQ ID NO: 1201 - DNA, 140 bp, Glycine max
  Clone ID: LIB3072-037-Q1-E1-F3
agacgacagaaggggaaaaaaaagaaattaatattaatttatgaataaaactaaaaaaaaaaatgaataaaagaagatgaaaccctccaaaatccttctttgatttgaacttatctagttcaaaatctttttttattctg

SEQ ID NO: 1202 - DNA, 140 bp, Glycine max
  Clone ID: LIB3072-037-Q1-E1-F4
ctctgcatagtgcacactgctcaattgccttctcaatgcatgctgtgtaagatatttaggctgaattcatgccacttcagattgtaagaagctgtatgtgcacacgctcacagtcaggacagcttcgttgtcttgacacc

SEQ ID NO: 1203 - DNA, 279 bp, Glycine max
  Clone ID: LIB3072-037-Q1-E1-F5
gcagaatcttggagacaaagcagtgatgtgtcataggctaaattgcagaactgcagtattttactgcgatgaagtccgtgaaacaacagctttcatggttccattggtggctggtgatggaaccaaaactcaggcacttgctatttgccactcaaatacttctggaatgaatcatcaaatgcttcatcaacttatgggagttgatcctggaactaaccctgtttgccatttccttggaagcaaggccattttatgggtactcaatttatctgtggacac

SEQ ID NO: 1204 - DNA, 357 bp, Glycine max
  Clone ID: LIB3072-037-Q1-E1-F7
gattcacacatctaactaagaaagtcttccatagccccccaaaagtgaagagcaccatcttctttgctctctttctcttttgtgccttcaccacctcatacctaccttcagccatcgctgatttcgtgctcgataatgaaggtaaccctcttgaaaatggtggcacatattatatcttgtcagacataacagcatttggtggaataagagcaaccccaacgggaaatgaaagatgccctctcactgtggtgcaatctcgcaatgagctcgacaaagggattggaacattcatctcgtccccatatcgaattcgttttatcgccgaaggccatccttgacccttaagttcgattcatt

SEQ ID NO: 1205 - DNA, 238 bp, Glycine max
  Clone ID: LIB3072-037-Q1-E1-F8
aaggaagagaatggcatcatggacaatcatgctgatcagaaaggtagtgaaaacatcatggaatcagatctgtctattgccatggaggacttgagcttcgcctctgaatgatgtcttagatttagtaatgacggacgagaatctgtataaatatcatccagtccctaaacatgatgaattcttagattgtagtttgctaaagcacatgtatattaaatcaatatcgtaccctttctgc

SEQ ID NO: 1206 - DNA, 419 bp, Glycine max
  Clone ID: LIB3072-037-Q1-E1-F9
agaggggatagtaaaaataagcaacaacgacgagcgcgaagaggaatacggcggcgtcaaaggcgcgcccgccgtcctccccttccgcgggggccatagtcgtatgtacggaatcgagtcctcctaaacgcgactagctactaagccacgacgacgacgagcacctaaaattacgtcgcgactctcgtacgcgtatatgtctaacgttcctctaacgtactcgcgaagacaccaggtcgaacctacgttatctagaccgcaagagtcgcacgcgtatatgtctatagttaggatagcgctgccgctccgatattaatgatcctcgtcataaattccgtaagcttagagacgatcagaaaaatcaacagtctctctaaacggatgaagttttcccaagtccccgcccgccacgccagggg

SEQ ID NO: 1207 - DNA, 461 bp, Glycine max
  Clone ID: LIB3072-037-Q1-E1-G10
tgattgatctgcttgcatggtcgtcagaagatcatacacgggcatcgtcgtgagaagatcatagaacggcatggccgtgagaggatcatggaagggcatcgtcgtgagaagatgatagaagggcatggtcgtggaagatgatagaagggcatggtcgtgagaagatgatagaagggcatggtcgtgagaagatgatagaagggcatggtcgtgagaagatgatagaagggggagtattaaaaaagaaaaatctcgtttcagccggtcaaaaaaaaaaaaaaaacaacaacaaaaaaagtggttgtctcagaggacttaagtccatgcatgtgcgtacgtgatgctacagtctcctcacagcgctattcaaacctaacctatcggttgctgccccataatgctgcgatcgggaaaatttcggtgccatttaatccaactgttccgtagaatactttttccct

SEQ ID NO: 1208 - DNA, 357 bp, Glycine max
  Clone ID: LIB3072-037-Q1-E1-G5
tttacagacgggagcatcatggtgaagcgtgtggagagatttacttgccagaagcttacgttagaaccaagaggactacttaatggagcaaatcatttggaagaacttgtagctagcttcccaactggcttatctgagtgtggagaagcattatcaagccttatgaataggagaacgagtactgtttgtgatgaatgtctattgtttaagaaatctgtctttaaacaacttgagtgttttgatattcagttctcagcaataaactgctctggcaatctaatttcatgttcaaatccatctttatcttttgggctaaaacaatatatatagcttaattatttcttattatttaatttt

SEQ ID NO: 1209 - DNA, 466 bp, Glycine max
  Clone ID: LIB3072-037-Q1-E1-G9
tgggctgattttgtgcttgcatcgtcgtcagaagatcatagacggggatagtaaaaataaccaacaaagacgggcccgaagaataatacggcggcgtcaaaggcgcgcccgccgtcctcctcttccgcgggggccatagtcgtatgtacggaatcgagtcctcctaaaagcgactagctactaagccacgacgacgacgagcacctaaaattacgtcgcgactctcgtacgcgtatatgtctaacgttcttctaacgtagtcgcgaagacaccaggtcgaacctacgttatctagaccgcaagagtcgcacgcgtatatgtctatagttaggatagcgctgccgctccgatattaatgatcctcgtcataaattccgtaagcttagagacgatcagaaaaatcaacagtctctctaaacggatcaagttttcccaggtcccgcccgccacgccaggggagatacac

SEQ ID NO: 1210 - DNA, 423 bp, Glycine max
  Clone ID: LIB3072-037-Q1-E1-H10
tggcttggaacgttggggctgatttatgtgcttgcatggtcgtcagaagatgatagcagggatcataatacttagaaggaactaaggtcctattgtgcttcgtgctcttgcggcggtacgtagactcctgccaagatttctattggtaagatcacaatttcagaagctgagagtcttgatattactgataatgctaaggtcaagacttaggataaggagggcacttttttagattagtagaggtcgactcctgttggtaagtagtctgaggatggatgcatttccgtcgatcataatacttagaaggagctaatctcttatccggcgccgtgctcctgcggcggcacgtagactcctgctaagatttccatgggcaagatcaccatttctgaggcggagagtcttgatattaccgataacgcg

SEQ ID NO: 1211 - DNA, 200 bp, Glycine max
  Clone ID: LIB3072-037-Q1-E1-H12
aaaaacaaaaggtaaagaaataacacaataaacaaaaaaaaaaaaaaaaaaaaaaaaaagtgcttctctcagacgacttaagtccacccatgtacgtacctcatgcaacaatctcctcacaacgctattcaaacctaacctatcgattgatcccccataatcctccacatcgcgaaaatttcgctgccatttaatccaac

SEQ ID NO: 1212 - DNA, 318 bp, Glycine max
  Clone ID: LIB3072-037-Q1-E1-F2
gattcacacaactaactaagaaagtcttccatagccccgcaaagatgaagagcaccatcttctttgctctctttctcttttgtgccttcaccacctcatacctaccttcagccatcgctgatttcgtgctcgataatgaaagtaaccctcttgaaaatggtggcacatattatatcttgtcagacataacagcatttggtggaataagagcagccccaacggggaatgaaagatgccctctcactgtggtgcaatctcgcaatgagctcgacaaagggattggaacaatcatctcgttcccatatcgaatccgtttta

SEQ ID NO: 1213 - DNA, 78 bp, Glycine max
  Clone ID: LIB3072-037-Q1-E1-H2
tatttcctttcatcttacatttatcaaactattttaatattacaatttacatgcttcacgaatagtatcatcatttct

SEQ ID NO: 1214 - DNA, 265 bp, Glycine max
  Clone ID: LIB3072-037-Q1-E1-H3
gaacgataacaatggcaacggtagactactactaaagaaaaagctgagtgctccacgcgaggaagaagagaaaattagcaaaggaaaaaagaaaaaagagaaagaaggatagagcgagcaaaataaggtgtctctcttggactgattcgcttcaatcgcatctctattctctactactcattcatttttatatacctctataccttctcttttccacccttaacacaataaaaaaagtggacattggtatttaatttatttttgt

SEQ ID NO: 1215 - DNA, 246 bp, Glycine max
  Clone ID: LIB3072-037-Q1-E1-H5
tccgaacacatcacatcttaacatcaatattgtcatattatacaccatacataactgtatttgggaatcgatttttctataatcctgacctgatcattatactctccaactgagctcaactccatatttcatcaccatatcctatacctaatgattttttgtctgtcctataaatcctacgatcttaatgatccaatcatacttactcctgcatcctatgtcttaactattatcattggtcaccta

SEQ ID NO: 1216 - DNA, 245 bp, Glycine max
  unsure at all n locations
  Clone ID: LIB3072-037-Q1-E1-H6
gattcacacaactaactaagaaagtcttccagagccccccaaaaatgaagagcaccatcttctttgctctctttctcttttgtgccttcaccacctcatacctacctccagccatcgctgatttcgtgctcgataatgaaggtaaccctcttgaaaatggtggcacatattatatctngtcagacataacagcattttgtggaataagagcagccccaacgggaaatgaaagatgccctctcact

SEQ ID NO: 1217 - DNA, 157 bp, Glycine max
  Clone ID: LIB3072-037-Q1-E1-H8
gttccatactcttggactttatgtccataatgatctcgcccttagagttaggtgctaattgtcaacgagaatgtcattgatcattcacaagattgatgagacccttcatgtgggaggccacaataacgatgatgagtacaagggtgagcatcaccat

SEQ ID NO: 1218 - DNA, 483 bp, Glycine max
  unsure at all n locations
  Clone ID: LIB3072-037-Q1-E1-C9
gttggaaccttggctgatttagtgcttgtttatgtgcttgcatggtcgtcccaagatgatagaaggggacgtaatcgaacagccaacagaagttacccttacagtagttcaagaaaacgaagagtatcagtccgcctgtcactccctcatcccgtgttcctattctacattcattccttgttattgtttaggatgcgtctgatgcggacggtgacttgacctggaatggccctacacatcatgccccgttggtaacaagaggaaatggcggtggaacagaatgagttgtatctgggaaagatatccgtttcactatcgcagcgtaactctttaacttaaatctcaaggggccagaaaccaagcccgaactcgtacattttgttcaccatacaaatgaaatttcaacnccgtaaacaaagcctagccatttatagtagcgcgaaagaaagaacttccggcgggttaccctcaaggacacactcg

SEQ ID NO: 1219 - DNA, 235 bp, Glycine max
  Clone ID: LIB3072-037-Q1-E1-D1
gaaggtgatcgatgcgtagggccctgagatctctgcttcagagttcagaggaattcgttttctctgatcgggatctggaagggaagcgaatcgacatgggtttcttggtgacgacgctgatcttcgtagtgatcggaatcatcgcgtgcctctgcaccagaatttgctgcaacagaggatcctctgccaatctatttcaccttactttggtaattactgcatcaaatttgctgct

SEQ ID NO: 1220 - DNA, 485 bp, Glycine max
  Clone ID: LIB3072-037-Q1-E1-D10
cttggcttggaacctttgggctgatttatgtgcttgcatggtcgtgagaagatgatagcaggggggcggagagaggggcatcgatctagatttatagcagctgggggtagtcctaaagcattcttataccgctcttcatctccatcgcctctcctctcctctactacccccaccccccttaactaaattaaataaaatacaagtattgtctcccctctcttgaaacttttactctttcctatcctcgagtctcggatgagactttagactctattactccctatgtatctccttactagacctatttccctgcccaatgtaaatctacaatccgaaggccaacggtcgtcttattggtaagggtctgcgttgaccatgaccactctacaaagtcctctccgattggcggtagtggcgccgggaaaagccgttcttcctcgtgccctcttgacggcctccctattatcagccctactataatcaca

SEQ ID NO: 1221 - DNA, 422 bp, Glycine max
  Clone ID: LIB3072-037-Q1-E1-D11
gcttggaacctttgggctgatttatgtgcttgcatggtcgtcagaagatcatagcacggggacctatataatcaatcaagaaagctgcttacaggtttttaaaaacgaagagtattactcctcccgtctctccctctccccgcgttcctattattctacattcattcctagttactgtcgaccctgcgtctgacaacgaaggcaatttctccgaaaacggcggtatacaccacactccgctagatacaatagtacccggcggaacaagggtagttttaatgggaaacgaaagacgtttctctatcgcggcgtaactctgtaacgagtctgataaagggaccggaataactactctgcttttacactgaacttgccccactgttgaaggttacttcccgagttccaagcctgacctacccgta

SEQ ID NO: 1222 - DNA, 437 bp, Glycine max
  Clone ID: LIB3072-037-Q1-E1-D12
gcttcgaacctttgggctgatttatgtgcttgcatggtcgtgagaagatcctagcaggggtcctatatagtcaatcaagaaagctgcttacagttttttaaaaacgaagagtattactcctcccgtctctccctctctccgcgttcctattattctacattcattcctagttactgtcgaccctgcgtctgacaacgaatgcaatttctccgaaaacggcggtatacaccacactctgctagatacaatagtacctgccggaacaagagtagttttaatagtaaacgaaagacgtttctctatcgcggcgtaactctgtaacgagtctgataaagggaccggaataactactctgcttttacactgaacttgacacactgctgaaggttacttcccgagttccaagcctgacctacccgtagacacaacgtcgcgcg

SEQ ID NO: 1223 - DNA, 339 bp, Glycine max
  Clone ID: LIB3072-037-Q1-E1-D3
tgtcagcaaaaactattaataaagattaattttgagaaccacgtggtggggcctaaaagtgttgttggtggttctttttcctggtgggggtacaagttgcacccttggacctgacctctttaaaaagtgtccagtcttaaagtattattgatattaagttttcaaacccatcctgggatctctgcatgtgcacaccctcaatgcttcctaaatgcacctgtgaagatattaggctgaattcatgccactcagattgtaagagctgtatgtgcacacgctcacagccaggacagtgtctttgtcttgacaccaacgacttttgctacaaaccttgcaagt

SEQ ID NO: 1224 - DNA, 282 bp, Glycine max
  Clone ID: LIB3072-037-Q1-E1-D5
gcctgcaatcgctcatccttcactcaccgcacgctttatctccggtgtcgcgccatttctatcgctgtcttctcattaccactcaaccctcactgtgagcgatcccacactatcgcaaccactcataaccctagtccagccaccactcattaccgtggttaccacacacaatcatcaccatctaccctcaactaatgcctaacgtgaaactaaataatctcaccagcatctctacaaacggaatgagcatgctaaatataaccccaatatcgttaggtgtga

SEQ ID NO: 1225 - DNA, 352 bp, Glycine max
  Clone ID: LIB3072-037-Q1-E1-D8
ggggatctatcacaatagaaagcaaagctatataggattatttcccatatcaggaaaatgtaaatccctttttattttcccatcctcgtgcttgttgtcttcattgcttctggaaaacaagtgcaaatgacagtggtaccaaattgtgtggtagaaagcttgtcagttcattgtgaaatattcaagaatccttgcgaacttctttgccaacaacattttggatcacccgcagcacatggagcttgtggcattaagttccatgtatgtgtttgttatttatgttaaatataaaggttaaccataacaattacagctttcatacctatttaatagtatgtaagcccattaaaaa

SEQ ID NO: 1226 - DNA, 493 bp, Glycine max
  Clone ID: LIB3072-037-Q1-E1-D9
ggcttggaacctttgggctgatttatgtgcttgcatggtcgtgagaaatgatagacgggcatggtcgtgagaagatgatagaagggcatggtcgtgagaagatgatagaagggcatggtcgtgagaagatgatagaagggcatggtcgtgagaagatgatagaagggcatggtcgtgagaagatgatagaagggcatggtcgtgagaagatgatagaagggcatggtcgtgagaagatgatagaagggcatggtcgtgagaagatgatagaagggcatggtcgtgagaagatgatagaagggcatggtcgtgagaagatgataaacaaaaaaaaaaaaaaaaaaaaaaaaaagtggttgtctcagaggacttaagtccatgcatgtgcgtacgtgatgctacagtctcctcacagcgctattcaaacctaacctatcggttgctgccccataatgctgcgatcgggaaaatttcggtgccatttaatccaact

SEQ ID NO: 1227 - DNA, 164 bp, Glycine max
  Clone ID: LIB3072-037-Q1-E1-E4
tgactgttacagcaaatacaattaataaacatgagtttggtgaacatcatggtggtgctaaaggtgcttgtgttgcttcttttccttgtcatggttgcaactgcactcatggaacttaacttcttcaaaagtgatcattcatcatgttatgatgcttactagta

SEQ ID NO: 1228 - DNA, 148 bp, Glycine max
  unsure at all n locations
  Clone ID: LIB3072-037-Q1-E1-E5
gtccgcccacgcgtccgcccacgcgtccgaattcgagctgccgcttttttnttttttttttttttttttttttttagatttttttttaataaaaatgacgaaattttctaaaagcaaattactggccacttaacttttatttcttgtt

SEQ ID NO: 1229 - DNA, 294 bp, Glycine max
  Clone ID: LIB3072-037-Q1-E1-E6
cgaaggaagggagggaagaatagaatgatatcgggaagtggaaaacacactggagagttcttcatgagaatggatgcatggaggaagcatacgatgctcaccaatcagctccgccacgccacccctggccttggcatcgccgacgtcgccttcggtatctacctcgtcggcgaacaagtctacaataggctctatgctcccgatcctcattcgatttctcacgtgaaaaccggggatcaccactaaacgtttggacggacgcacttcattccatcatcacttaataagcttgct

SEQ ID NO: 1230 - DNA, 198 bp, Glycine max
  Clone ID: LIB3072-037-Q1-E1-E8
gacagcaaattcaattaataaagatgagtttgaagaacaacatggtggtgctaaaggtgtgtttgttgcttcttttccttgtgggggttacagttgcacgcatggaactgagcttcttcaaaagtgatcagtcatcaagttatgatgatgatgagtattcaaaaccatgctgtgatctctgatgtgcacacgctcaat

SEQ ID NO: 1231 - DNA, 464 bp, Glycine max
  Clone ID: LIB3072-037-Q1-E1-E9
aaccttggctgattgattgctgctcgtcgtcagagatcatacccgggtactaaaataaccaacaaagagagcccaggaatatacggcggggtcaaaggcgccccgcgtcctccccttccgcgggggccatagtcgtatgtacggaatcgagtcctcctaaaagcgactagctactaaccacgacgacgacgagcacctaaaattacgtcgcgactctcgtacgctaatctctaacgttcttctaacgtagtcgcgaagacaccaggtcgaacctacgttatctagaccgcaagagtcgcacgcgtatatctctatagttaggatagcgcctccgctccgatattaatcattctcctcataaattccgtaagcttacacacgatcacaaaaatcaacagtccctccacacggatgaactttctccaagtcccgcccggcacgccaggggagataaacaaaataaa

SEQ ID NO: 1232 - DNA, 319 bp, Glycine max
  Clone ID: LIB3072-037-Q1-E1-F10
tttttagtgcctgaactcagtcccttctcacagacttaagtccatccatgggctcctgaaaaggatccgtcacaggctattcaaacctaactacgttgctgcccctatgctcgacggaaaatttcgtgcctttaatccaatcccctatatactttcccattatcgtgcaacactgaaaggttttatgattttccttaataccgttattcgaacgtcaagggaatctttcgcatccttacaacttcctagcccgaacctatctactccattgtctatccttatctttcatattttactcccttcctcctttcctccctct

SEQ ID NO: 1233 - DNA, 276 bp, Glycine max
  Clone ID: LIB3072-037-Q1-E1-F12
tcgggagaagatgatagaagggcatggtcgtcagaagatcatagaagggtatcgtcgtgagaagatcatagaagggcatcgtcgtgagaacatcatagaagggcatcgtcgtaacaagatgatagaacgccacgacgacactagctaaaaaaaaaacaaccaacacacaactaaacgtcgcagactcataagacctacacccatgcctcctgctacctccacccacatcacacccacagcccaattcaacaccaacctatcgcccccccacccata

SEQ ID NO: 1234 - DNA, 300 bp, Glycine max
  Clone ID: LIB3072-037-Q1-E1-C6
gacacaactatctaagaaagtcttccatagccccccaaaaatgaggagcaccatcttctttgccctctttctcttttgtgccttcaccacctcatacctaccttcagccatcgctgatttcgtgctcgataatgaaggtaaccctcttgaaaatggtggcacatattatatcttgtcagacataacagcatttggtggaataagagcagccccaacgggaaatgaaagatgccctctcacttgggtgcaatctcgcaatgagctcgacaaagggattggaacaatcaccttctccccata

SEQ ID NO: 1235 - DNA, 293 bp, Glycine max
  unsure at all n locations
  Clone ID: LIB3072-037-Q1-E1-B1
tgacagcaaaaacaattaataaagatgagtttgaggaacaacatggtggtgctaaaggtgtgtttgttgcttcttttccttgtgggggttacagctgcacgcatggagctgagcttcttcaaaagtgatcagtcatcaagttatgatgatgatgagtattcaaaaccatgctgtgatctctgcatgtgcacacgctcaatgcctnctcaatgcagctgtgaagatattaggctgaattcatgccactcagattgtaagagctgtatgtgcacacgcttacagtcaggacagtg

SEQ ID NO: 1236 - DNA, 488 bp, Glycine max
  Clone ID: LIB3072-037-Q1-E1-B10
tgcttggacctttgggctgatttagtgcttgcatggtgagaagatgatagcaggcgactatatcaactatctatctcctatctagaatctccgctccctacccctacaacctttatataccacggtcgagtcctatcattaattataatattaacatttttcttgtcatttcaatgacttatattaataaatttgccttcttatttattaggctgctaaggttgttattgttgctatagtgggtggtctttctccgacttctgttctgccgacttctgttgttattgctaccgtttctattactgctattttgtcgcctgctacccctagcttggcctctgcttttgttgcaactattgccgtgtcttcgagttcggggccttctgttctgagcgggcctggcgcggtggtgactatggcgtcggtgcggactcataggcatgctattggtaagtaattattcggtgtggactagccagatagtgtgt

SEQ ID NO: 1237 - DNA, 471 bp, Glycine max
  Clone ID: LIB3072-037-Q1-E1-B11
ctttgggctgatttatgtgcttgcatggtcgtcagaagatcatagcaaggggacctatgtaatcaaacaagaaacggagagcatgactactcccgtctggccctcagcccgcgttcctattactctacattcgttcctagttattgtctagcctgcgtctgatatcgacgacgacttctcctaaaatggcggtatacatcacacgccgttagccacgagaggaaagggtggcggaacagaagcagacctaatcggaaaagaaacacgtttctctatcgccgcgtaactatttaacgagtctgacaaggggaccggatcagctcccatactcttaccatacgtttcccccactgttgaaggtcacttcccgagtaccaagcccggcctacccgtagccacaatgtcgtgcgttgctacgttcatcgagcgggtcaccgcggagagagagggctcataagtcgccaaatccgt

SEQ ID NO: 1238 - DNA, 357 bp, Glycine max
  Clone ID: LIB3072-037-Q1-E1-B12
aacctttgggctgatttatgctgcttgcatgcgtcgtcacaagatgatagacgcgcatcctcgtgagagaaatagaggggctctcgggacaagatcatagggggtcatggtcgtcagaagatcatacaagggcatcgtcgtcagaagatcatagaacggcatggtcgtcagacgatcatcgaaggccatcgtcgtcagaagatccatacaagggtgctctacaccccaaacctcaccaccacacccaccaagtaccccacccagaggacttaccaccctccatctgcccacctcacccaataccccccccaccgcgcccctcacacccaacccatcgcttaccccccatcatccacc

SEQ ID NO: 1239 - DNA, 380 bp, Glycine max
  Clone ID: LIB3072-037-Q1-E1-B2
ttaagttgcagccaaagaaaagaaaatcctcaagtttctgagcagccaaacactctgtctctgtctctcgaaaattctcagtttgcagagaaaatctgaatcatgtcgtggcaagcgtatgtcgacgatcaccttctgtgtgacatcgaatgtaaccacctcactcacgctgctatcatcggccaagacggcagcgtttgggctcagagtaccgacttccctcagttcaaacctgaggagataacttgcatcatgaatgactttaatgagcctggatcacttgctccaactggattgtatctcggtggcaccaaatatatggtcatccaaggtgaacccggtgctttcattccaaggaaaaaaggtcctggtggtgttac

SEQ ID NO: 1240 - DNA, 395 bp, Glycine max
  Clone ID: LIB3072-037-Q1-E1-B5
gagagaaagattataagattggaatggagaaggcaagcctgtgcgacaggaacactcctctcccacttcttaatcgcccttccaattttcttcaattcaagcaccaaaactccttcctcaagttcccgaacccaaacctccatcgactgcgcaggctcaattgctcagtatcagacggcaccgtttcgtgtaagcctcgtattgcatttctttcccctccggtttctgaattcaaattttgtgcagttagttagttaatgaatgttgttgttgttgcgtttgcatttttattattattcagcttcgcttggtgccacggactcgtctcttgcggtgaaggtgagacagattaagattgttgatagatagaatcatgcgtgtttgatttcacaatg

SEQ ID NO: 1241 - DNA, 227 bp, Glycine max
  unsure at all n locations
  Clone ID: LIB3072-037-Q1-E1-B6
gacagcaaaatctattattaaagatgagtttgaagaccaccatagtggtgctaaaggtgtgtttgttgcttcttttccttgtgggggttacagctgcacgcatggaactgagcttcttcaaaagtgatcagtcatcaagttatgatgatgatgagtattcanaaccatgctgtgatctctgcatgtgcacacgctcaatgcctnctcaatgcagctgtgaagatatt

SEQ ID NO: 1242 - DNA, 281 bp, Glycine max
  Clone ID: LIB3072-037-Q1-E1-B7
ggtggttaatttaaccaagtaaggttggaatggagggaactaagagtagcgttgataacgtgagtgcgggtgtggtgcaaagtaggatgaggatgaaggtgatggtggctatagacgagagtgaaggaagcttctatgctcttaagtgggcccttgataacctcttcaccaccatggccactgtgggagaagcatcatcacctgaaaatgatggcatggtgttcttggttcatgttgagcccaaagttcacaactatgtgtatcccatcggacccggtgga

SEQ ID NO: 1243 - DNA, 457 bp, Glycine max
  Clone ID: LIB3072-037-Q1-E1-B9
gcttggaacctttgggctgatttatgtgcttgatggtcgtgagaagatgatagacgggacactaacaagtggaataaaaaaaaaggaaaaaaggaaaaaaaaaaagtggttgtctcagaggacttaagtccatgcatgtgcgtacgtgatgctacagtctcctcacagcgctattcaaacctaacctatcggttgctgccccataatgctgcgatcgggaaaatttcggtgccatttaatccaactgttccgtagtatactttttccctgttagtcggtgcaacagtgaagaggtttgtattgactgtttcctttaatagccgtgtagttcgaacggtgaacgggatgtgtttcgcagtggtgtaccaagtgtggtgggcgcggcggccatgtgtagtgcgattgtcatatccgttagtgtttcagtgtttgtcttccctgtccctcctttccttcc

SEQ ID NO: 1244 - DNA, 273 bp, Glycine max
  Clone ID: LIB3072-037-Q1-E1-C10
ctttgggctgatttatgtgcctgcttatgtgcctgtcgtgagaagccgatagacgggcatggtcgtgagaagtgagagaacccgatatcgtgacaggatcatagaagggcatggtcgtcagaagatcatagaagggcatggtcgtgagaagatcatagaagggcatggtcgtgagaagatgatcgaccggcatggtcgtgagaagatcatagacggccatggtcgtgagaagatcatagaagggcatggtcgtcacacgatcatagaagggca

SEQ ID NO: 1245 - DNA, 310 bp, Glycine max
  Clone ID: LIB3072-037-Q1-E1-C11
ttgggctgatttatgtgcttgcatggtcgtcagagatgatagaccggcatggtcgtgagaagatgatagaagcgatggtcgtgagaagatgataggggggcatggtcgtgagaagatgatagaagggcatggtcgtgagaagatgatagaagggcatggtcgtgagaagatgatagaagggcatggtcgtgagaagatgatagaaggggggccccggccaacgccccaccccaccacctcaaaaaaaaaaaaaaaaaacaaccaccaaaaaaaaaacataaacaaacaaaaccaaaccaaaaaaacacaa

SEQ ID NO: 1246 - DNA, 349 bp, Glycine max
  Clone ID: LIB3072-037-Q1-E1-C12
tttgggctgatttatgtgcttgcatggtcgtccagaagtcatccccggggttcagtgcgctctcttgtagtagtgcctcccggtgaactagtctaggagttattagtacgcaagacacggccaagtacaataatgccacttttaacgggtatcctaggaaatatcggtaaaatcacgcgaagatccggcccaactaattagtatcgaagattagaaggtgcccactctggtagaacaacgtcgctaagacccctttaaggttcatcgtcggattctctacgttaaccgtctacggttagatctcgacacataatacgaaagctagactcgggacaggacccctctctca

SEQ ID NO: 1247 - DNA, 365 bp, Glycine max
  Clone ID: LIB3072-037-Q1-E1-C2
tgacagcaaaaacaattaataaagatgagtttggagaacaacatggtggtgctaaaggtgtgcttgttgcttcttttccttgtgggggttacagctgcacgcatggaactgagcttcttcaaaagtgatcagtcatcaagttatgatgatgatgagtattcaaaaccatgctgtgatctctgcatgtgcacacgctcaatgccttctcaatgcagctgtgaagatattatgctggattcatgccactcagattgtaagaactgtatgttcacacgcttacagtcaggacagtgtttttgactttacacccatcacttttgctacaaaccttgcaagttcagagattactagaaaaacttatactt

SEQ ID NO: 1248 - DNA, 480 bp, Glycine max
  Clone ID: LIB3072-037-Q1-E1-A9
ttgggctgatttatgtgcttgcatgcgtgagaagatgatagacccggatagcaaaaataaccaacaaagacgagggcgaagagtaatacggcggcgtcaaaggcgcgcccgccgtcctccccttccgcgggggccatagtcgtatgtacggaatcgagtcctcctaaaagcgactagctactaagccacgacgacgacgagcacctaaaattacgtcgcgactctcgtacgcgtatatgtctaacgttcttctaacgtagtcgcgaagacaccaggtcgaacctacgttatctagaccgcaagagtcgcacgcgtatatgtctatagttaggatagcgctgccgctccgatattaatgatcctcgtcataaattccgtaagcttagagacgatcagaaaaatcaacagtctctctaaacggatgaagttttcccaggtcccggccgccacgccagggcgagatacacaaaatacgaaaca

SEQ ID NO: 1249 - DNA, 187 bp, Glycine max
  Clone ID: LIB3072-037-Q1-E1-C4
cttccataagaccactttaagttaccactacaaacagacaacagacgtggtttgggagaacatcatagaagggcgtaatctcttaatctcttcttcttcttcctgctcttgatacagactatcacatggatctgacttaattaactgcagatcattaataatgtcattactattaatactcttaagt

SEQ ID NO: 1250 - DNA, 264 bp, Glycine max
  Clone ID: LIB3072-037-Q1-E1-C5
gacaaacattattcctaatccttatcctgtttgcttccatggaggtgatttccgcttcgagcttgaatcccaacgctccgatgttcgtgcctctcgcctatcggacggtggaggatttctccgaccaatggtgggacctcgtccactcctccccctggttccgcgactactggctccgcaagtgcttccaagatccccagtaccaatacgacaacgttttcaacttcaactttgacctagatctccaagataaagatgaaaatg

SEQ ID NO: 1251 - DNA, 345 bp, Glycine max
  Clone ID: LIB3072-036-Q1-E1-H3
ctttgggctgatttatgtgcttgcatggtcgtgagaagatgatagaagggcatggtcgtgagaagatgatagaggggaataaatatagcataaataaaaatgccggaagaggaaagcggtggcgaaaaacgaaagcgatccggaagaataagaagaagaaatgccgcccatttatgccgctatatcctatcgattcctttcccgagtacaactactaataatatcttaatattgatgtcgaagacggtgtgtacgcctttgatgttatataaccggtcaatgaaccctaagtctaaggagataagtccgtcacggacgggaagcattgggaagtatcaagcaaac

SEQ ID NO: 1252 - DNA, 370 bp, Glycine max
  Clone ID: LIB3072-036-Q1-E1-H4
tggcttggaacctttgggctgatttatgtgcttgcatggtcgtgagaagatgatagcaggggatagtaaaaataaccaacaaagacgagcccgaagaataatacggcggcgtcaaaggcgcgcccgccgtcctccccttccgcgggggccatagtcgtatgtacggaatcgagtcctcctaaaagcgactagctactaagccacgacgacgacgagcacctaaaattacgtcgcgactctcgtacgcgtatatgtctaacgttcctctaacgtagtcgcgaagacaccacgtcgaacctacgttatctagaccgcaagagtcgcacgcgtatatgtctatagttaggatagcggtgccgctccgatatta

SEQ ID NO: 1253 - DNA, 322 bp, Glycine max
  Clone ID: LIB3072-036-Q1-E1-H5
tttgggctgatttatgtgcttgcatggtcgtaagatgatagaagggggagagagcataaagaactaaagaaaggggcggcggtcgtcctgaaagtaccaacaaccgggcacccttagaatactacagcccctgtagtagtaaatcaataaaccatctacactacacaacaagacggtttgcctctctctgtaagttaaatgcaccggcgcttccgccgtctaactcactctttcaaccttagcctactggtgaggccatatagcggtaccttgacgcaccgggaagagccggaccgggcaacaccgggtgaaagaacggaac

SEQ ID NO: 1254 - DNA, 391 bp, Glycine max
  Clone ID: LIB3072-036-Q1-E1-H6
aacctttgggctgatttatgtgcttgcatggtcgtgagaagatgatagaaggggatagcacccccgaagcagcccgcgcagatccaaagaagagccaagggaaaaaaacaagacgaatatcaccggagccacgaccacgactacgctcacgccagggcctgtataagtcaacaaccataacttcttacccgcgtaagccgagctaactagcgagatcaacagatccatccgcttataagtacgtagagcataacgcgtagtcccagtattagccgaattacggcacgataaacgcgccaaagaacgtatcgtaaaccgcaagtacgacgcgcttgccgtcaaagaccgtcccatcaggcgcgttccaactaagcgtaccaatactaataac

SEQ ID NO: 1255 - DNA, 353 bp, Glycine max
  unsure at all n locations
  Clone ID: LIB3072-036-Q1-E1-H7
tggcttggaacctttgggctgatttatgtgcttgtttatgtgcttgtttatgtgcttgcatggtcgcgagaagatgatagaaggggatattaatattaaaataaatttatcaagacggtccttcccgcacttccttcagcgtcgtcctccgtagtttccacttctacgttctaagggtccgtcatccatcataaattaaccaagaagttattagcgcataagttcntagcgcataagttattagcgcataaattattggcccacaagttaaaattattggcccataagttgaaattattggcccataagttattacacaagaagttattacataagaaattattccacggaaa

SEQ ID NO: 1256 - DNA, 456 bp, Glycine max
  Clone ID: LIB3072-036-Q1-E1-H8
tttgggctgatttatgtgcttgtttatgtgcttgcatggtcgtgagaagatgatagaaggggaactctcctatagaagaaaaaagagaagaagacgggcccgaagaataatacggcggcgtcaaaggcgcgcccggcgtcatccccttccgcggggggcatcatcagcgttaatccgaggtcgagcaagtccggttcgtctacgaaaagcgactactactaatatctaaacgacgacgagctcctaaaattacgtcgcgactaacgtgtacgtataaagctaaatttcctccaacgttgtcgcctagacacgaagtcgaacctgcgttacctagtccgtaaactccgcacacgtgtaccactggacttcgtaaaacgcccccgcgccgatacaattgaccctcgtcacgaattccgtaaatttaacgaggacgataaggaaaatcatcaacgaata

SEQ ID NO: 1257 - DNA, 133 bp, Glycine max
  unsure at all n locations
  Clone ID: LIB3072-037-Q1-E1-A1
gggatacgtcgcagcatgcacagactgacaaaaggttttagagcgcaagaactcttctatatgtactcacgatacttcgtactatgctctgatgctagctaangatagcgattagcactattgctgctacctg

SEQ ID NO: 1258 - DNA, 443 bp, Glycine max
  Clone ID: LIB3072-037-Q1-E1-A10
gctccgaactttgggctgatttatctgcttgcatcgtcgtcagaagatcatagcccgggaaccagaaaaaaaagacctcaaagaggcacaatggacacctcccagaagaactaaaaagaacaccaaacctaaacaaaccccagaccgaaaaaagatccaaaaaggaggacccgaaacgtgagactcaaaaatacactcccttgcggtattagcagcaagcatctcacggcctggcgtcccggcgggctctccgacagagactaactgcccccccttagacgtaccgacacctttcccccccctacctcagccaccgatatgcaaaggggcgaagaagaccacagacttaaccaagcaccaaacacacgcaaccaacacgcaaccaactcttctcctcccaccctgctccccaccatccttcccccccataaccgcaacacaac

SEQ ID NO: 1259 - DNA, 372 bp, Glycine max
  Clone ID: LIB3072-037-Q1-E1-A11
ttgggctcatttatgtgcttgcatcgtcgtcagaagatcatcccccgggacctatatactcaatcaacaaagcggcctacacttttttaaaaacggggactattgactcctcccgtctctccctctccccgcgttcctattattctacattcattcctagttactctcgaccctgcgtctgacaacgaaagcaatttctccgaaaaccgcggtatacaccacactccgctagatacaacactacccgccggaacaagactagttttaatcggaaacgaaagacctttctctatcgcggcctaactctctaacgagtctgctaaacggaccgcaataactactctccttctacactcaacttcccccactctt

SEQ ID NO: 1260 - DNA, 419 bp, Glycine max
  Clone ID: LIB3072-037-Q1-E1-A12
tttgggctgatttatgtgcttgcatggtcgtcagaagatgatagcacggggacgggaagacgaatccgagacggagggaagtggcgtcgttgtcggggactacagtgggaacgtctcgtgctacgggaaatgtctagcaccatacctataaacttgtgtacggtagattcaagtatactgggaatgacacgcgggatgcggttacggaatgaagggataagaagtccgctgagtaagttctctttcttaaccaatactgccgccccgttaacgataccgcgaagaaaacaaatcgtctattcggacccatgatcgcgcctcagggaagtagggccaactataagaactaaaccttgctcgcccctccgcacgtaacctaatacaagacccacaaacacactcacgccttaactgtaaaa

SEQ ID NO: 1261 - DNA, 404 bp, Glycine max
  unsure at all n locations
  Clone ID: LIB3072-037-Q1-E1-A3
gacagttaanacaattaataaaggtgagtttgaagagcgacatggtggtgctaaaggtgtgtttgttgcttcttttccttgtgggggttacagctgcacgcatggaactgagcttcttcaaaagtgatcagtcatcaagttatgatgatgatgagtattcaaaaccatgctgtgatctctgcatgtgcacacgctcaatgcctnctcaatgcagctgtgaagatattaggctggattcatgccactcagattgtaagagctgtatgtgcacacgctcacagccaggacagtgtcgttgtcttgacaccaacgacttctgctacaaaccttgcaagtccagagatgactagaaaactaatagctctctcaaatggacgaagcccctttaggctttggttggtatg

SEQ ID NO: 1262 - DNA, 446 bp, Glycine max
  Clone ID: LIB3072-037-Q1-E1-A4
tgggatgcaactgaataattaagaaaagccatttccatagcggcctagtaaaatttagagcactagcttggtcgctatctttctactttgcgccttcacctcatacctaccttccgccaccggccacgacgtgctcgacttggatggctatccgattcagaacggactcatatactacgttttgcccgcaataaaaggaaactgtggccgaatacaacgagcctcactcgggaaaaacactctccctatcactgtactgcaatctcccaatccaaactctaaagcgttagaaattaagttagaatctgcataccccgtctattacataaacgaaaccctaatttttcaaataaagatcagttacccacatcagcgtgaaagaaataatccttggtgggccatttctaaggatatatcttaaagaccacctgctattaaactctctg

SEQ ID NO: 1263 - DNA, 132 bp, Glycine max
  Clone ID: LIB3072-037-Q1-E1-A5
gggatacgtcgcatcatgcacagactgactataggttttagatcgcaagaactcttctatatgtactcacgatacttcgtactatgctcttatgctagctaagataatcgttagcactattgctgctacctg

SEQ ID NO: 1264 - DNA, 384 bp, Glycine max
  unsure at all n locations
  Clone ID: LIB3072-037-Q1-E1-A6
aggacaactaactaagacagtcttccatagccccccaaaaatgaagagcgaccatcttctttgctctctgtctcttttgtgccttcaccacctcatacctaccttcagccatcgctgatttcgtgctcgataatgaatgtaaccctcttgaaaatggtggcacatattatatcttgtcagacataacagcatntggtggaataagatcatccccaacgggaaatgaaagatgccctcttactgtggtgcaatctctcaatgagctcgacaaaaggattggaacaatcatctcgtccccatatcgaatccgttttatcgccgaaggccatcctttgagccttaagttccattcatttgccagtataatgctgtgtgttggaattc

SEQ ID NO: 1265 - DNA, 477 bp, Glycine max
  Clone ID: LIB3072-036-Q1-E1-H11
tttgggctgatttatgtgcttgcatggtctggaagatgatagaagggcatggccctgagaagatgatagaaggggtccccccggggggaaccggggtaaatagtaggcttcattttcaatttcaatccggaattcctccttcctagacctacttgcattgtcagccacaccatcggacctggggtagaccgtcgccattgtgccctcttgtccctacccacaaggccccgagccgccggcccccgaacacaaacggatgttaaatggcctacttagtcggccgaggagaagaagaagaccacggagagaaaggaagtcttctcgaaacgggagtagaagtcggaagtcgtcgtcgaaatcaaagagaggaagtcgaaggtcataaagtacaaaaaaagactcggtctcgacagcgatagcgacaacgatagcgacgacgagagcagaaagataagcaagagactctatcaggagtat

SEQ ID NO: 1266 - DNA, 312 bp, Glycine max
  unsure at all n locations
  Clone ID: LIB3072-037-Q1-E1-A8
gacagcaaaatcaattaataaagatgagtttgaagaacaacatggtggtgctaaaggtgtgtttgttgcttcttttccttgtggnggttacagctgcacgcatggaactgagcttcttcaaaagtgatcagtcatcaagttatgatgatgatgagtattcaaaaccatgctgtgatctctgcatgtgcacacgctcaatgcctnctcaatgcagctgtgaagatattaggctgaattcatgccactcagattgtaagagctgtatgtgcacacgctcacaaccaggacagtgtcgttgtcttgacaccaacg

SEQ ID NO: 1267 - DNA, 440 bp, Glycine max
  Clone ID: LIB3072-036-Q1-E1-E8
tggcttggaacctttgggctgatttatgtgcttgcatggtcgtgagaagatgatagaaggggatataatcaatcaagaaagctccttacagtttttgaaaaacgaagagtattactcctcccgtctctccctctccccgcgttcctattgttctacattcattcctagttactgtcgaccctgcgtctgacaacgaaggcaatttctccgaaaacggcggtatacaccacactccgctagatacaatagtacccggcggaacaagagtagttttaatgggaaacgaaagacgtttctccatcgcggcgtaactctgtaacgagtctgataaagggaccggaataactactctgcttttacactgaacatgccccactgttgacagttacttcccgagttccaaacctgacctacccgtagccacaacgtcgcgcgccgga

SEQ ID NO: 1268 - DNA, 478 bp, Glycine max
  Clone ID: LIB3072-036-Q1-E1-E9
ttgggctgagttatgtgcttgaggatgtgcgggtggtcgtgagaagatgatagcagggggcatatagttctaataatttcaatgtgcgtacagcagagagagatgtgagttacggggtgaagatttgtgaggcgccacaggtaaaccaagaataaattacattttaagctatggccccgttgcggcgccttcgactttaagactaggacccatgacgccggcacgaagaagaagggcgccgacgagcccttccctcgcgcttactcggccagccgggagaaggaaaatgccctcagcgaggtttcggaagtcgtctgcaccgtccgtaataagcatacggttaaacccgtcggaaaggacgtcccttatccgagagctagggcgtatttaccttacgcctccaggactaataagacgtccctgcgcgtcggagtcgacaggtcttaaatcggaacgagaggcgtccccggaaagttat

SEQ ID NO: 1269 - DNA, 280 bp, Glycine max
  unsure at all n locations
  Clone ID: LIB3072-036-Q1-E1-F2
ggtcgtaaagagatgattgatgggtatagtngtgggaagatggtagaggggagtggaagtgagaagattatagaagggaatggatgtgagaagatgatagaagggtatggtngtgagaagatgatagaagggcatggtngtgagaagatgatagaagggtatagtngtgagaagatgatagaagggnatggttgtgagaagatgatagaagggtataggngagagaaagtagtagaagagtatggtcgttgagaagatgatagatgggtatagtcgtgag

SEQ ID NO: 1270 - DNA, 436 bp, Glycine max
  Clone ID: LIB3072-036-Q1-E1-F3
tggcttggaacctttgggctgatttatgtgcttgtttatgtgcttgcatggtcgtgagaagatgatagaaggggacgtaatcgaacaaccaagaaaagttacccttacagtagttcaagaaaacgaagagtatcagtccgcctgtcactccctcatcccgtgttcctattctacattcattccttgttattgtttaggatgcgtctgatgcggacggtgacttgacctggaatggccctacacatcatgccccgttggtaacaagaggaaatggcggtcgaacagaatgagttgtatctgggaaagatatccgtttcactatcgcagcgtaactctttaacttaaatctcaaggggccagaaaccaacgccgaactcgtacatttcgctcaacatacaaatgaaatttcaaccccgtaaacaaagcctagccattt

SEQ ID NO: 1271 - DNA, 359 bp, Glycine max
  Clone ID: LIB3072-036-Q1-E1-F4
tggaacctttgggctgatttatgtgcttgcatggtcgtgagaagatgatagacgggcatggtcgtgagaagatgatagaaggggacctatagaatcaatcaagaaagctccctacagttttttaaaaacgaagcagtattactcctcccgtctctccctctccccgcgttcctattattctacattcattcctagttactgtcgaccctgcgtcctgacaacgaaggcaatttctccgaaaacggcggtatacaccacactccgctagatacaatagtacccggcggaacaagagtagttttaatgggaaacgaaagacgtttctctatcgagccgtaactctgtaacgagtctgataa

SEQ ID NO: 1272 - DNA, 448 bp, Glycine max
  unsure at all n locations
  Clone ID: LIB3072-036-Q1-E1-F5
attggcttggaacctttgggctgatttatgtgcttgcatggtcgtgagaagatgatagaagggggcgcccctcccttcccgcgtaataataataatcgaagacgaacaactactaagtgctagagaagaagaatgacaatacggagaagttatcaatcttaccgacgttcntcttcttccttatatccgaaaggataatccttaccgacgacgagttcaaaatcccgtccgaagaggagacgaaagccgtaagggaagtagtctctaaaactactaacctctatctaaaagaagacgtttcgaaaacaccttcggtgggcccggcgttagcgggaataagtctaaagtaagcgaaagaagacggcgctgcgctcgatcatgacgatgatgatgaacgaagtaccacctgggcggaaaacgacggcttcgcggaaagtcgaagtcccaa

SEQ ID NO: 1273 - DNA, 403 bp, Glycine max
  unsure at all n locations
  Clone ID: LIB3072-036-Q1-E1-F6
tggcttggaacctttgggctgatttatgtgcttgcatggtcgtgagaaatgatagaaggggatagcatagtatctcccgtaatatattaaanaaaggaaaacaaaccaacaaaaaaaaaagtggttgtctcagaggacttaagtccatgcatgtgcgtacgtgatgctacagtctcctcacagcgctattcaaacctaacctatcggttgctgccccataatgctccgatcgggaaaatttcggtgccatttaatccaactgttccgtagtataccttttccctgttagtcggtgcaacagtgaagaggtttgtattgactgtttcctttaatagccgtgtaattcgaacggtgaacgggatgtgtttcgcaatggtgtaccaaatgtggtgggcgcggcggc

SEQ ID NO: 1274 - DNA, 437 bp, Glycine max
  Clone ID: LIB3072-036-Q1-E1-F7
tggcttggaacctttgggctgatttatgtgcttgcatggtcgtgagaagatgatagaagggggaaacttaaatacgcatcgaaacgtaggctgcttcaagaggccgccggcccccgccaacttgcccggcgagaagaaacttgtcatgaagacccctgtcgaataagcgaaattctcccccgaagacgtctacacttaaactatagcctaagaaattaagtattagtcttacgtaaaggaagccgtctgcctgtcaggcaccatcaaacatgacgggaccgcccgcgccagcggagacggaaccccggccgaagccagtcctaccgttaccatatccgccgtatcacccgccactactactccgaatgctaccgctaagcctggggccaacaacataaaataacgactacaacaacgactagactatatcttcccct

SEQ ID NO: 1275 - DNA, 367 bp, Glycine max
  Clone ID: LIB3072-036-Q1-E1-F8
tggcttggaacctttgggctgatttatgtgcttgtttatgtgcttgtttatgtgcttgcatggtacaagatgatagaaggggaagatctaagagcgaataaaaaaaaaacaaaacaaacgaaaaaaaaagtggttgtctcagaggacttaagtccatgcatgtgcgtacgtgatgctacagtctcctcacagcgctattcaaacctaacctatcggttgctgccccataatgctgcgatcgggaaaatttcggtgccatttaatccaactgttccgtagtatacattttccctgttagtcggtgcaacagtgaagaggtttgtattgactgtttcctttaatagccgtgtagttcgaacggtgaacg

SEQ ID NO: 1276 - DNA, 436 bp, Glycine max
  Clone ID: LIB3072-036-Q1-E1-F9
tttgggctgagttgaggtgcttgcatggtcgtgagaagatcatagaaggggggcctcgtatttcctatctataagctattagctcgctctccacgccgcgatccgcggggacgctaatcttcgtaaggaagagatctacgagagaccctaaaagaccgtaatcagacttcttcgtcggtactagcggcgtcttctaagataacaacaccacgtcccggaacgtagccactcctcgattggaccatatttttcgggacggaggtatacccaagccaatatcctagcctattgacgaccacttcaacaaattattcatagcgtgtccagccctccaaacgccctactttaatacccacctagaccgaactacacgcccggatactccataaaactaccggcattttccacacgacgccctcgacatctccattccaac

SEQ ID NO: 1277 - DNA, 357 bp, Glycine max
  Clone ID: LIB3072-036-Q1-E1-G12
gaaggggatactccaaataaccaacaaagacgagcccgaacgataacccccaaagggtcaaaggggtgcttgcagtcctccctttccgagggggccatagtcgtatgtacggaatcgagtcctcctaaaagcgactatctactaagccaccacgacgacgagcacctaaaattacgtcgcgactctcgtacgcgtatatgtctaacgttcatctaacgtagtcgcgaagacaccaggtcgaacctacgttatctagaccgtaagagtcgcatcgctatatctccatagctaagatagcgctctcacaccgatattactcatcttcttcataaactccgtatgccataccaacgatca

SEQ ID NO: 1278 - DNA, 295 bp, Glycine max
  unsure at all n locations
  Clone ID: LIB3072-036-Q1-E1-G4
gagaagatgatagacggggatgtaatngaanaannaagaaaagtgagnnttacagtagtagaagaaaacgaagagtatnagtangnntgtcactacctcatcccgtgttcctattctacattcattccttgttattgtttaggatgcgtctgatgcggacggtgacttgacctagaatggccctacacatcatgcaccgttggtaacaagaggaaatggaggtggaagagaatgaattgtatccgggaaagatatccgtttcactatcgcagcgtaactctttaacttaaatctc

SEQ ID NO: 1279 - DNA, 496 bp, Glycine max
  Clone ID: LIB3072-036-Q1-E1-G5
ggcttggaacctttgggctgatttatgtgcttgtttatgtgcttgcatggtcgtgagaagatgatccgaggggatctctactataccacctcacacgaaccccggccaagagctccgaaaaagtaagagaaaaaaaaacattaattacggtaattaccctcgactaattcaaagggcttcatcttcacggaattctacacggagtatttcacggaattatgcacgagattaatattagtaccaataatttattcctatgttaaatagcgaagcctacaatcgtcgttatcaccggtactgtatctccgtcttcgctcgggccgatttctataggtatcgctacaggcccgactaccgtaattttctcctccgccactcctagttttacttccggcttcgtcgtgcccgcgtcggcttcaaccgtcctcggtcccccggctctcgggggtcgcggcgcggtccttaccggcgtcccgctccggacccataatcacgc

SEQ ID NO: 1280 - DNA, 329 bp, Glycine max
  unsure at all n locations
  Clone ID: LIB3072-036-Q1-E1-G6
gcttggaacctttgggctgatttatgtgcttgtcgtgagaagatgatagaagggggcttcagccaacatgtaccacctcttcaatgtccacctcccctagtctctcgttcntgatagaaacagccctactaggtctacccaacccattctaaaacaaaataaccccactccgccacggtctccccggcgcactccgcgtccccttcagtttctatcgactacctaagcgtctcccaccgcccacgtaaagacggcgcgagcgactaaatttcctagaaagtaacagaccacgtccgcggaaacggagtcgatcgcattttcacctccta

SEQ ID NO: 1281 - DNA, 354 bp, Glycine max
  Clone ID: LIB3072-036-Q1-E1-G7
tggcttggaacctttgggctgatttatgtgcttgcatggtcgtgagaagatgatagaaggggatatactcaatcaagaaagctccttacagtttttgaaaaacgaagagtattactcctcccgtctctcactctccccgcgttcctattattctacattcattcctagttactgtcgaccctgcgtctgacaacgaaggcaatttctccgaaaacggcggtatacaccacactccgctagatacaatagtacccggcggaacaagagtagttttaatgggaaacgaaagacgtttctctatcgcggcgtaactctgtaacgagtctgataaagggaccggaataactactctgc

SEQ ID NO: 1282 - DNA, 372 bp, Glycine max
  Clone ID: LIB3072-036-Q1-E1-G8
gcttggaacctttgggctgatttatgtgcttgtttatgtgcttgtttatgtgcttgcatggtcgtgagaagatgatagaaggggactgagaatgagcctaacacttcagcacattccaacaaacaacccaagacatcacgacgagagtatggcctttaccatcgccgtcgggatccgccccttcggtcctagccctcgctctacccggtaccgtccatcgggaaaaagagaattttaaatataataagcgctcttagagccgtaacagtgagagagatctgcataggaattaagtacgttatgtctgccgtaattcttccaaggcggagaaagaagaacgcgaagaaagggaaaccctatgaatatgactat

SEQ ID NO: 1283 - DNA, 387 bp, Glycine max
  Clone ID: LIB3072-036-Q1-E1-E7
tggcttggaacctttgggctgatttatgtgcttgcatggtcgtgagaagatgatagaagggcatggccgtgagaagatgatagaggggcatggtcgtgagaagatgatagaagggcatggtcgtgagaagatgatagaagggcatggtcgtgagaagatgatagaagggcatggtcgtgagaagatgatagaagggcatggtcgtgagaagatgatagaaggggatagtaaaaataaccaacaaagacgagcccgaagaataataccgcggcgtcaaaggcgcgcccgacgtcctccccttccgcgggggccatagtcgtatgtacggaatcgagtcctcctaaaagcgactagctgctaaggcacgacgacgacaagcacctaaaa

SEQ ID NO: 1284 - DNA, 138 bp, Glycine max
  Clone ID: LIB3072-036-Q1-E1-C9
aattatcctaccccataaaacaacaaatacactcctatatgcctcaccagcacttaactccatacatctccctacatcacccctcactctccccacaacgaaattcatacctaacctacccattactaccccatcatc

SEQ ID NO: 1285 - DNA, 409 bp, Glycine max
  Clone ID: LIB3072-036-Q1-E1-D10
tggttccaacctttgggctgggttaggtgcttgcatggtcgtgagaagatgatagacgggcatgcgccgtgagaagatgatagaagggcattgtccgaggaacctgatagaagggcggggtcgtgagaagatgatagaagggcatggtcgtgagaagatgatagaagggcatggtcgtgagaagatgatagaagggcatggtcgtcagaagatgatagaagggcatggtcgtgagaagatcatacaagggcatggtcgtgagaagatgatagaagggcatggtcgtgagaagatgatagaacggcatggtcgtgagaagattatagaagggcatggtcgtcagaagatgatagaagggcatggtcgtgagaagatcatagaacggcctcgtcgtcacaagatcatacaa

SEQ ID NO: 1286 - DNA, 333 bp, Glycine max
  Clone ID: LIB3072-036-Q1-E1-D3
ggcttggaacctttgggctgatttatgtgcttgattgtcgtgagcaagcttatcgaccggcattacccggagctctagtcaaaagcccgtgcgacggcggcacagactcggcaggaaacacccatagtacgtggcgataccccgtaaccctggaagcctagccccaagtcaatctacccccctcatcatttcccctacccacgacattagtgaacacaacaaaaacaacacaaaaaaccacgtattggcgaacccataacccggacccgtaagaaaacgcaccgcaaacaacacacggaataagcacattagccccccccttctaaagtccga

SEQ ID NO: 1287 - DNA, 329 bp, Glycine max
  Clone ID: LIB3072-036-Q1-E1-D4
tggcttggaacctttgggctgatttatgtgcttgcatggtcgtgagaagatgatagaaggggatagtaaaaataaccaacaaagacgagcccgaagaataatacggcggcgtcaaaggcgcgcccgccgtcctccccttccgcgggggccatagtcgtatgtacggaatcgagtcctcctaaaagcgactagctactaagccacgacgacgacgagcacctaaaattacgtcgcgactctcgtacgcgtatatgtctaacgttcctccaacgtaatcgggaagacaccacgtcgaacctacgttatctagaccgcaagagtcgcacgcg

SEQ ID NO: 1288 - DNA, 359 bp, Glycine max
  Clone ID: LIB3072-036-Q1-E1-D5
gcttggaacctttgggctgatttatgtgcttgcatggtcgtgagagatgatagaagggggtgagtgagtgagtagccctaaagagaggacccgggaccgggaaggtgagggaccgtgtcgtgctctccttctcctctccctgacctaccttctacctacaactccgtaacttaataattccagttctatatccatatacatatatactcgaatgtgcaccgctttctctacggtcctaaagtgtacttctaaagagtctaaggatccgtagaaagatttattaatcctccgtagtgtcggcctagcagtcgaggatacgccttaccggtaagtaatgaccacgggcttcgtcgacagct

SEQ ID NO: 1289 - DNA, 356 bp, Glycine max
  Clone ID: LIB3072-036-Q1-E1-D6
tggcttggaacctttgggctgatttatgtgcttgtttatgtgcttgcatggtcgtgagaagatgatagaaggggatcccgagcctgaatcaaataagctaacctaactcgttctgactacggagaggaaaatacccgggcccccgcctccgtcttcttccgctccagtcctcgacgcgatggcgaagagagtagaggtgaaagaccgtccgataaggaggtatgggccttagggcagacgtccacctgataggtaacgcgtatacgcgcgtaggagtgacggccctactggcggctagcgttgaggtttctcctgtaaacgtccccgtagtaggttacgccgactgaaaccatcat

SEQ ID NO: 1290 - DNA, 349 bp, Glycine max
  Clone ID: LIB3072-036-Q1-E1-D7
tggcttggaacctttgggctgatttatgtgcttgcatggtcgtgagaagatgatagaaggggaggaaaaaaaaaactaaaagcggacaacggtcctggcactgtcccgtacagttacgaaagtatttatctttctaatcctctctacctctatcgttttaaaattactcctgtctctcccgaattccatttgtatccgtcttattgtctgtctcttgtcctcttaccgtcttccttctctcctcatcctttcctctctctttttccaacttacccaaagtccgctatccggaccggaacccatactcaaccccgggattagaagaagaaaaggcctcggttccgccgcg

SEQ ID NO: 1291 - DNA, 409 bp, Glycine max
  Clone ID: LIB3072-036-Q1-E1-D8
tggcttggaacctttgggctgatttatgtgcttgtttatgtgcttgtttatgtgcttgcatggtcgtgagaagatgatagaaggggggattagagaagtgctccaacaaatgtcaattctcgcattacctcctcctccaaaaacgagagagcgtacccttacttataccggttaggttggtacctaggctggaaacgtccgtcgggagtcccaccgttctgagtacgttacctaggtcgacgggtagacgttgagcgacaagattacaggcggcggcgatgacgtccccaatattcctcctagtgagattggcgttggaaagtatgcgttctgcgtagcccctgcggactctgagtttatcgctaccgacgaaactagaatcggtatacaattgtaaccggcctacctg

SEQ ID NO: 1292 - DNA, 449 bp, Glycine max
  Clone ID: LIB3072-036-Q1-E1-D9
ctttgggctgggttgggtgcttaaatggtcgtcagaagatgatcgaagggggcgcctgctgccatgtgagtaagtactttaaaatgtctatccctccatcgtccctgggccccataccacgacggagctctaggcgaagtatgtatccgccgctaaagccacgggctgcatcggacttacaggatacgcaattcacgtcagagcgaaacccccggacgactagacttgctatactacgacgaacgcgaaaggattcgcatcagaaggacatacctctatttcatctcagctcgacagggaagcacgaacaacgtatccgactgccctcaccggtccgttcataaacctcaatcacatcacgcgacccacgtcgacaccacacggcacacggcggacgctcaacgccccagtctttcaccccaacggccgctccccggcccacatccacc

SEQ ID NO: 1293 - DNA, 495 bp, Glycine max
  Clone ID: LIB3072-036-Q1-E1-E10
tggcttcgacctttgggctgagttgtgtgcttgtttatgtgcttgcatggtcgtgagaagatgatccgaggggatcccgagcctgaatcaaataagctaacctaactcgttctgactgacggagaggaaaatgcccgggcccccgcctccgtcttcttccgctccagtcctcgacgcgatggcgaagagagtagaggtgaaagaccatccgataaggaggtatgggccttagggcagacgtccacctgataggtaacgcgtatacgcgcgtaggagtgacggccctactggcggctagcgttgaggtttctcctgtaaacgtccccgtagtaggttacgccgactgaaaccatcatcgttaaagaggttacgaaacaaataaataaataaacaaacaaacagtctcaattgatatatacgcatgcagcgctggggcctcagtcagtcaggcaggcatgcgcgctccccggcactgacttcagcccggcggagtaa

SEQ ID NO: 1294 - DNA, 252 bp, Glycine max
  Clone ID: LIB3072-036-Q1-E1-E11
ccaaaagggagacagccttaattacgctcatctacctcgactaattcacacggcttcatcctcacggaattctacacggagtatttcacggaattatgcacgagattaatattagtaccaataatttattcctatgttaaatagcgaagcctacaatcgtcgttatcaccggtactatatctccgtcttcgctcgggccgatttccataggtatcgctacaggcccgactaccgtaattttctcctccgcca

SEQ ID NO: 1295 - DNA, 378 bp, Glycine max
  Clone ID: LIB3072-036-Q1-E1-E12
ataaccaacaaacacgaccccgaagggatatacccaaacgtcaaaggcgcgaccgacgtcctccccttccgcgcgcgccatagtcgtatgtacggaatcgactcctcctaaaagcgactagctactaacccacgacgaccacgagcacctaaaattacgtcgcgactctcgtacgcgtatatgtctaacgttcctctaacgtagtcgcgaacacaccacgtcgaacctacgttatctacaccgcaagactcgcacgcgtatatctctatagttcggatagcgtcgccgctccgctattaatgatccccgtcataaattccgtaagcctagagacgatcacacaactccacaatctccccaaacgcatcaaattctccc

SEQ ID NO: 1296 - DNA, 433 bp, Glycine max
  Clone ID: LIB3072-036-Q1-E1-E3
tggcttggaacctttgggctgatttatgtgcttgcatggtcgtgagaagatgatagacggggatcccgagcctgaatcaaataacctaacctaacgcgttctgactacggagaggaaaatacccgggcccccgcctccgtcttcttccgctccagtcctcgacgcgatggcgaacagagtagaggtgaaagaccgtccgataaggaggtatgggccttagggcagacgtccacctgataggtaacgcgtatacgcgcgtaggagtgacggccctactggcggctagcgttgaagtttttcctgtaaacgtccccgtagtaagttacgccgactgaaaccatcatcgttaaagacgttacgaaaccaatacataaataaacgaacaaacagtcccaattgatatacacgcatccagcgctggggcctcagtcag

SEQ ID NO: 1297 - DNA, 328 bp, Glycine max
  unsure at all n locations
  Clone ID: LIB3072-036-Q1-E1-E4
tggaacntttgggctgatttatgtgcttgtttatgtgcctgcatggacgtgagaagatgatagaaggggacattaaaaataaagtataagggaagagcaaaaaaagaaaaaaaaaaaaaaaaaaaaaagtggttgtctcagaggacttaagtccatgcatgtgcgtacgtgatgctacagtctcctcacagagctattcaaacctaacctatcggttgatgccccataatgctgcgatcgggaaaatttcggtgccatttaatccaactgtacggtaataaacctgttacctgttagtcggtgcaacagtgaagaggtttgaattgac

SEQ ID NO: 1298 - DNA, 471 bp, Glycine max
  Clone ID: LIB3072-036-Q1-E1-E5
tggcttggaacctttgggctgatttatgtgcttgtttatgtgcttgcatgtgtgagaagatgatagcaggggacctatataatcaatcaagaaagcgccttacagttttttaaaaacgaagagtattactcctcccgtctctccctctccccgcgttcctattattctacattcattcctagttactgtcgaccctgcgtctgacaacgaaggcaatttctccgaaaacggcggtatacaccacactccgctagatacaatagtacccggcggaacaagagtagttttaatgggaaacgaaagacgtttctctatcgcggcgtaactctgtaacgagtctgataaaaggaccggaataactactctgcctttacactgaacttgcgccactggttaaagttacctcccgagttcccaagctgacctacccgtagccacaacgtcgcgcgccggaaccttcattgaacggct

SEQ ID NO: 1299 - DNA, 457 bp, Glycine max
  Clone ID: LIB3072-036-Q1-E1-E6
tggcttggaacctttgggctgatttatgtgcttgtttatgtgcttgtttatgtgcttgcatggtcgtgagaagatgatagaagggcatggtcgtgagaagatgatagaagggcatggtcgtgagaagataatagaaggggacttatagtacaaaaaaaaaaaaaaaaaaaaaaaaaaaagtggttgtctcagaggacttaagtccatgcatgtgcgtacgtgatgctacagtctcctcacagcgctattcaaacctaacctatcggttgctgccccataatgctgcgatcgggaaaatttcggtgccatttaatccaactgttccgtagtatactttttccctggtagtcggtgcaacagtgaagaggtttgtattgactgtttcctttaatagccgtgtaattcgaacggtgaacgggatgtgtttcgcagtggtgtaccaaatgttggtggcgcg

SEQ ID NO: 1300 - DNA, 453 bp, Glycine max
  unsure at all n locations
  Clone ID: LIB3072-036-Q1-E1-C8
attggcttggaacctttgggctgatttatgtgcttgcatggtcgtgagaagatgatagaaggggatctatctacataacagagattagtccccgtccggccgcgaatacggagacgaggaaactacgcggtcctcctcctccgtcttcttcttccgctcccgtcctttaggcggcggcgtagatggagggaagagcgcgcgagctataaagttgtgggccttacggcccgcgcaacagagattataatcgcgtcccggctcgtaggaatgaaggccctcctggcggtaggcgtaaaagtccttgttgntgtcgtccccgtattaggacccgccgagactctactaaatatcatctccgttacgtaaaccaacaaactacaatcaggttaaacaaaccgtactcatctcccacttacccgggaatcagtcattataattaatccacatccggct

SEQ ID NO: 1301 - DNA, 495 bp, Glycine max
  Clone ID: LIB3072-036-Q1-E1-B12
ggcttgcaacctttgggctgatttatgtgcttgcatggtcgtgagaagatgatagaagggcatcgccgtgagaagatgatagaagggcatggtcggcagaagatgatagaagggcatggtcgtgagaagatgatagaagggcatggtcgtgagaagatgatagaagggcatggtcgtgagaagatgatagaaggggactttacaaaaaatataagtaaacttcaaaaagcctatcgagacacacagaatcactcctaaccctataaaacgaagaaagcgcccgctatacccgcagtctcgtcagccgcacccgcctccatagcgatagtcctagagctaaagttattagctataataaacctagtattaaacgatcataaccgcctataagcgacgaacaatccgcccgccctgcgtgcagaccattctaccggcggagacgtccgcttcctaggcgcccgccgttaaagcgccaacgtagcgaaagtaccaata

SEQ ID NO: 1302 - DNA, 341 bp, Glycine max
  Clone ID: LIB3072-036-Q1-E1-B2
tggaacctttgggctgatttatgtgcttgtttatgtgcttgcatggtcgtgagaagataatagaaggggatagtaaaaataaccaacaaagaggagcccgaagcaataatacggcggcgtcaaaggcgcgcccgccgtcctccccttccgcgggggccatagtcgtatgtacggaatcgagtcctcctaaaagcgactagctactaagccacgacgacgacgagcacctaaaattacgtcgcgactctcgtacgcgtatatgtctaacgttcctcaaacgtagtcgcgaagacaccaggtcgaacctacgttatctagaccgcaagagtcagacgcgtata

SEQ ID NO: 1303 - DNA, 318 bp, Glycine max
  unsure at all n locations
  Clone ID: LIB3072-036-Q1-E1-B3
tgcttgnatggtcgtgagaagatgatagaaggggatagtaaaaataangaacaaagangagggagaagaataatataanggggtcaaaggcgcgcccgcagacatacccttccgcgggggccatagtcgaatgtacggaatcgagtcctcctaaaagcgactagctactaagccacgacgacgacgagcacctaaaattacgtcgcgactcacgtacgcgtataagtctaacgttcctctaaccgtaccgccgagacaccaagtcgaagctacgttatctagaccgtaagagtcgcacgcctatatatccatagatag

SEQ ID NO: 1304 - DNA, 347 bp, Glycine max
  unsure at all n locations
  Clone ID: LIB3072-036-Q1-E1-B4
tggcttggaacctttgggctgattttgtgcttgnagaagatgatagaagggggttataagtcatacatataagaacggtctgtatatccgctctagcgaccctgccacccccccccattcccgtagctacggccggcgcctcacctctaaccggcgcgaacagtagccagactcgcttcggaaaccgtgaaaaccccctaaatcgtaacgtccatcgttaggtttatcactacaagaaagggacacgtactagcttattcaactcagggcataccngacgccgtcctctacgagcccctcctacacaaccacaagtaagtaacgcaccgcccacaacaaccaccagt

SEQ ID NO: 1305 - DNA, 357 bp, Glycine max
  Clone ID: LIB3072-036-Q1-E1-B5
tggcttggaacctttgggctgatttatgtgcttgcatggtcgtgagaagatgatagaaggggaaataaaaattactagaaaaaaaaaaaaaaaaaggaaaaaaaaaaagtggttgtctcagaggacttaagtccatgcatgtgcgtacgtgatgctacagtctcctcacagcgctattcaaacctaacctatcggttgctgccccataatgctgcgatcgggaaaatttcggtgccatttaatccaactgttccgtagtatactttttccctggtagtcggtgcaacagtgaagaggtttgtattgactgtttcctttaatagccgtgtagttcgaacggtgaacgggattttttcg

SEQ ID NO: 1306 - DNA, 359 bp, Glycine max
  Clone ID: LIB3072-036-Q1-E1-B6
tggcttggaacctttgggctgatttatgtgcttgtggatgtgcgggtggtcgtgagaagatgatagcaggggacctatataatcaatcaagaaagcggcttacagttttttaaaaacgaagagtattactcctcccgtctctccctctccccgcgttcctattattctacattcattcctagttactgtcgaccctgcgtctgacaacgaaggcaatttctccgaaaacggcggtatacaccacactccgctagatacaatagtacccggcggaacaagagtagttttagtgggaaacgaaagacgtttctctatcgcggcgtaactctgtaacgagtctgataaagggaccggaataa

SEQ ID NO: 1307 - DNA, 342 bp, Glycine max
  Clone ID: LIB3072-036-Q1-E1-B7
tggcttggaacctttgggctgatttatgtgcttgattggcggtaaaaggttattggaggggggttcggtctcagaggatagtctacgctagggaaaggagttctactaatatcggacgtctgattctggatagtcaactatacgagtgagagggccgaaatcgtactataagaggtccaaagatttgaagaaccacacgtagggtacataggatatcgtaagcgttctaaagtttctactccgattatatacatctatcgaaggttcattgtctacatttaggatatgaaatttataggagattgtgtacatacattgtgaaactaccgtaaccacggcgta

SEQ ID NO: 1308 - DNA, 350 bp, Glycine max
  Clone ID: LIB3072-036-Q1-E1-B8
ggcttggaacctttgggctgatttatgtgcttgcatggtcgtgagaagatgatagaaggcaaaaaaaaaaaaaaaaaaaaaaaaaaaaaagtggttgtctcagaggacttaagtcaatgcatgtgcgtacgtgatgctacagtctcctcacagcgctaatcaaacctaacctatcggttgctgccccataatgctgcgatcgggaaaatttcggtgccatttaatccaactgttccgtagtatactttttccatgttagtcggagcaacaatcaaaaagtttgaattgaatgttacctttaatagccgtgtaattcgaacggtgaacgggatgtgattcggaatggtata

SEQ ID NO: 1309 - DNA, 483 bp, Glycine max
  Clone ID: LIB3072-036-Q1-E1-C11
ttgggctgagttatgtgcttgcatggtcgtgagagatgatacgaggggatagtcccaaataaccaacaaagacgagcccgaagaggtatacggcggcgtcaaaggcgcgcccgccgtcctccccttccgcgggggccatagtcgtatgtacggaatcgagtcctcctaaaagcgactagctactaagccacgacgacgacgagcacctaaaattacgtcgcgactctcgtacgcgtatatgtctaacgttcttctaacgtagtcgcgaagacaccaggtcgaacctacgttatctagaccgcaagagtcgcacgcgtatatgtctatagttaggatagcgctgccgctccgatattaatgatcctcgtcataaattccgtaagcttagagacgatcagaaaaatcaacagtctctctaaacggatgaagttttcccaggtcccgcccgccacgccaggggagataaaccaaatacgaaacaaa

SEQ ID NO: 1310 - DNA, 466 bp, Glycine max
  Clone ID: LIB3072-036-Q1-E1-C12
ttgggctgagttatgtgcttgcatggtcgtgagaagatgatagaaggggacctatataatcaatcaagaaagctccttacagtgttttaaaaacgaagagtattggtcctcccgtctctccctctccccgcgttcctattattctacattcattcctagttactgtcgaccctgcgtctgacaacgaaggcaatttctccgaaaacggcggtatacaccacactccgctagatacaatagtacccggcggaacaagagtagttttaatgggaaacgaaagacgtttctctatcgcggcgtaactctgtaacgagtctgataaagggaccggaataactactctgcttttacactgaacttgccccactgttgaaagttacttcccgagttccaagcctgacctacccgtagtcacaacgtcgcgcgccggaaccttcattgagcggctcgccgcggaggactcatt

SEQ ID NO: 1311 - DNA, 283 bp, Glycine max
  unsure at all n locations
  Clone ID: LIB3072-036-Q1-E1-C2
agatgatagaaggggactngagaggagaggngtggtganggtnggggtaggggtctttaaganaacaatggnggtacctgacaagtaaaattgaaggaggagccctgaaggaccgcgcgggaaaaggcactgggcaagggcgaagtgaagctaagactacctagcgaaccgcggcaccgagtgaagtagtagtgacggaaagaaagggggtggaggaggaagatgcgcaaacctgaaccacgccgcgttgtcggataatacggtgaatctacttcgtacaata

SEQ ID NO: 1312 - DNA, 338 bp, Glycine max
  Clone ID: LIB3072-036-Q1-E1-C3
ggcttggaacctttgggctgatttatgtgcttgcatgtcgtgagaagatgatagaagggcatggtcgtgagaagatgatagaaggggaaccaaaaaagagtcaacaattaatgtactgtcctggaccactcagactcaaagaatcagctaaaatacaaaaaaacacaaaaaaagacacaccacagtaatcgaatcaccgcgaagtacaaaagaataaagactccacccaggcgcaaagtaacaaaaacacatagacaaacgaagaggcgagagaaagagagaaaaaaaactaacgacacagaacctcaacacgcaaaggctcacgggccactctacaa

SEQ ID NO: 1313 - DNA, 345 bp, Glycine max
  Clone ID: LIB3072-036-Q1-E1-C4
tggcttggaacctttgggctgatttatgtgcttgtttatgtgcttgcatggtcgtgagaagatgatagaaggggatagtaaaaataacgaacaaagacgggcccgaagaataatacggcggcgtcaaaggcgcgcccgccgtcctccccttccgcgggggccatagtcgtatgtacggaatcgagtcctcctaaaagcgactagctactaagccgcgacgacgacgagcacctaaaattacgtcgcgactctcgtacgcgtatatgtctaacgttcttctacagtaatcgcgaagacaccaggtcgaacctacgttatctagaccgcaacagtcgcacgcgtata

SEQ ID NO: 1314 - DNA, 330 bp, Glycine max
  Clone ID: LIB3072-036-Q1-E1-C5
gcttggaactttgggctgatttatgtgcttgcatgggtcgtgagaagatgatagacgggggatagtaaaataaccaacaaagacgagcccgaagaataatacggcggcgtcaaaggcgcgctcgctgtcctccccatccgcgggggccatagtcgtatgtacggaatcgagtcctcctaaaagcgactagctactaagccacgacgacgacgagcacctaaaattacgtcgcgactctcgtacgcgtatatgtctaacgttcttccaacgtactcgcgaaaacaccaggtcgaacctacgttatctagaccgcaagagtcgcacgcgtat

SEQ ID NO: 1315 - DNA, 385 bp, Glycine max
  Clone ID: LIB3072-036-Q1-E1-C6
tggcttggaacctttgggctgatttatgtgcttgcatggtcgtgagaagatgatagaaggggaatctaagccctacgaacgaccgacacgcggaagagcgcaccggcgccggcgcctccgcgctccagctccagcaacggcgacgactaagagaagaagaaatttcgcccgcgggagcggaagagatcgagcagtgtccatctcgttcactgggtatcccccttcctaagcaccggctccgatacgtccaagaattccgctatctatatacacgtttgccctcccttcttaaacacagaccccagaagagaggaagaagggtaagctaaaaagaacggagtcggggaaaaggccagagaagtccccgtgaaaagttcaagaaaca

SEQ ID NO: 1316 - DNA, 351 bp, Glycine max
  Clone ID: LIB3072-036-Q1-E1-C7
gcttggaacctttgggctgatttatgtgcttgcatgggtgagaagatgatacgaggggacgtactcgaacaaccaagaaaagttacccttacagtgagttcaagaaaacgcaagagtattagtccgcctgtcactccctcatcccgtgttcctattctacattcattccttgttactgtttaggatgcgtctgatccggacggtgacttgacctggaatggccctacacatcatgccccgttggtaacaagaggaaatggcggtggaacagaatgacgttgatctgggaaagatatccgtttcactatcgcagcgtaactctttaacttaaatctcaaggggccagaaacc

SEQ ID NO: 1317 - DNA, 482 bp, Glycine max
  Clone ID: LIB3072-036-Q1-E1-B11
ttgggctgatttatgtgcttgcatggtcgtgagaagatgatagaaggggatctatctacataacagagattagtccccgtcctgccgcgaatacggagacgaggaaactacgcggtcctcctcctccgtcttcttcttccgctcccgtcctttaggcggcggcgtagatggagggaagagcgcgcgagctatgaagttatgggccttacggcccgcgcaacagagattataatcgcgtcccggctcgtaggaatgaaggccctcttggcggtaggcgtaaaggtccttgttgttgtcgtccccgtattaggacccgccgagactctactaaatatcatctccgttacgtaaaccaacaaactacagtcacgttaaacaaaccgtactcatctcccacttacccgggagtcagtcattataattaatctacatccggctaccggaccgtcctttcccggtcctcgttcccgtccactctctca

SEQ ID NO: 1318 - DNA, 498 bp, Glycine max
  Clone ID: LIB3072-035-Q1-E1-H3
tttggctgattttgtgcttgcatggtcgtgagaagagatagaagggcatgctcgtcagaagatgatagaagggcatggtcgtcagaagatgatagaagggcatggtcgtgagaagatgatagaagggcatggtcgtgagaagatgatagaagggcatggtcgtgagaagatgatagaagggggagcttgagcgcgagagaaattagcgatcgatcccctgagaaagaaaaataaaaacgagcccttgctaccttactacggatgtctcctttacctcttctcctccttctcctgccctcgtaccagccctcgtgaagaaaatcggcgacgcgatggagtcgtaaaccggtgcgaagtacacattagcactacgcgaagtctacgtatataaaggcgatagagctaaagcatatcacacgggaaaatctatcgacggaatcgcccctgacctcagtcccgaaagaaaccacttaaccgaacccgagtccggcctcggct

SEQ ID NO: 1319 - DNA, 382 bp, Glycine max
  Clone ID: LIB3072-035-Q1-E1-H4
tgatttatgtgcttgcatggtcgtgagaagatgatagtaggggcccgaagcacagaagagagagagagagagaaagtgcgctctgcgaagtagtaggcgaagtctaagtaaaagaaaacaaaagtctattctccctacttccctccctccctccctctccttcctcctctcttacccctctctctctctcatacagtccctaatatcctataatatactatattttacccctctctctcaataacctaccttctatccctatgagacttttactattgtccgcgataccgtcgtcgtacacctatagagagagaaagaaagaatgaaaaaaaacctataaacccacaatacaagagagaccccagcccccaagacatttcct

SEQ ID NO: 1320 - DNA, 445 bp, Glycine max
  Clone ID: LIB3072-035-Q1-E1-H5
gaacctttggtctgatttatgtgcttgcatagtcgtgacaagatgatagaccgggcgcactggagcaacgaccagtaaggatgagctaggacgtcgacggcggaaacggcccctagagcacagcgacactatcgaaagatattccccacgataaagttgaagtaccagccggggcccatagagatctcgaaagaggtcgcctgagaatctctatacccgacccgatcaaacattgagagcctcaaaacctacttacaaggcatagccgacaagttgttcgccacacgcattgtacctagaggccggccgtacccccaccctccgctcggaggcggttaaatcaacgcgaacttcctcccccattttctcctaaccctccgcgccccaagccattagccgggccatccccaaaatcaaccgcaacaggacccttccagcacacgca

SEQ ID NO: 1321 - DNA, 406 bp, Glycine max
  Clone ID: LIB3072-035-Q1-E1-H6
tgtgcatgtatgggcgtaagtagatgatcgcccgagcctgttaaaatgacctacacacacgaggcagcgagatactacggcggggtcaaacgcgcgtccgaagtcactccccttaccgagcggggcacatagtccgtatagtaacggaatcgactccacctataagcgactagctactacgccaccacgactacgatcgcctaaaattacgtcgagactctcgtacgcgtctatgtcaaacgctcagccaacgtagtcgagaagacaccaagtcgaacctacgttatctagaccgctagagtcgcacgcatatatgtctatatctagtatagcgctgccgctccgatattaatgatcctcgtcataaattccgtaagcttacagacgatcagacaaatcaacagtc

SEQ ID NO: 1322 - DNA, 431 bp, Glycine max
  Clone ID: LIB3072-035-Q1-E1-H7
gaacctttgggctgatttatgtgcttgcatgggtcgtgacgagatgatagccggggctcagtaaaaataaccaacaaagacgagcccgaggaataatacggcggcgtcaaaggcgcgcccgccgtcctccccttccgcgggggccatagtcgtatgtacggaatcgagtcctcctaaaagcgactagctactaagccacgacgacgacgagcacctaaaattacgtcgcgactctcgtacgcgtatatgtctaacgttcttctaacgtagtcgcgaagataccaggtcgaacctacgttatctagaccgcaagagtcgcacgcgtatatgtctatagttaggatagcgctgccgctccgatattaatgatcctcgtcataaattccgtaagcttagagacgatcagaaaaatcaacagtctctctaaacgg

SEQ ID NO: 1323 - DNA, 277 bp, Glycine max
  Clone ID: LIB3072-035-Q1-E1-H8
gtcagaagatcatagaccggcccctaccgaatgaacaccagggcccggagccgagtaggcccgaagtaggaccggtggttgaacacaatatgcaaggccagtagaaatttcgaaccgacaaggggaactggaaagcatctgaggctgtacacgcattataagaggggtaccagggtcactaaggttaaaaatggccgtgccccattctgctacgatttcaaatttaagttcgaactcttcgtcgaaaaattatttcaaccccatttcgtccacgaca

SEQ ID NO: 1324 - DNA, 159 bp, Glycine max
  Clone ID: LIB3072-035-Q1-E1-H9
tagacgggcacctatataagcaaggggagaacgctccttacagttttttaaaaacgaacagtattactcatcccgtctctccctctccccgcgttcctattattctacattcattcctagttactgtcgaccctccgtctaacaccgaaagcaatttct

SEQ ID NO: 1325 - DNA, 265 bp, Glycine max
  Clone ID: LIB3072-036-Q1-E1-A10
ttgtaagatgatagaagggaatagtagtgagaagattatagaagggaatggtagtgagaggatgatagaaggggatagggggaataaaaaaaaaagaagaggaagaagaataatatggaggtgttaaaggtgtgtaaggagtagtagagattatgagggggtaatagtagtatgtagggaatagaatgataataaaagagattagataataagataggatgatgaagagaaaataaaattaggttgtgaatgtggtaagagtata

SEQ ID NO: 1326 - DNA, 478 bp, Glycine max
  Clone ID: LIB3072-036-Q1-E1-A11
tttgggctgatttatgtgcttgcatgggcgtgagaagatgatagaagggcatggtcgtgagaagatgatagaaggggaaaacagggaaaaaaaaaaaaaaaaaaaagaaaaaagtggttgtctcagaggacttaagtccatgcatgtgcgtacgtgatgctacagtctcctcacagcgctattcaaacctaacctatcggttgctgccccataatgctgcgatcgggaaaatttcggtgccatttaatccaactgttccgtagtatactttttccctgttagtcggtgcaacagtgaagaggtttgtattgactgtttccattaatagccgtgtagttcgaacggtgaacgggatgtgtttcgcagtggtgtaccaagtgtggtggccgcggcggccatgtgtagtgcgattgtcatatccgttagtgtttcagtgtttgtcttccctgtccctcctttccgtccctctgttatgcct

SEQ ID NO: 1327 - DNA, 437 bp, Glycine max
  Clone ID: LIB3072-036-Q1-E1-A12
ggcttggaactttgggctgatttatgtgcttgcatggtcgtgaaagatgatagaaggggatagtaaaaataaccaacaaagacgagcccgaagaggaatacggcggcgtcaaaggcgcgcccgccgtcctccccttccgcgggggccatagtcgtatgtacggaatcgagtcctcctaaaagcgactagctactaagccacgacgacgacgagcacctaaaattacgtcgcgactctcgtacgcgtatatgtctaacgttcttctaacgtagtcgcgaagacaccaggtcgaacctacgttatctagaccgcaagagtcgcacgcgtatatgtctatagttaggatagcgctgccgctccgatattaatgatcctcgtcataaattccgtaagcttagagacgatcagaaaaatcaacagtctctctaaacggatca

SEQ ID NO: 1328 - DNA, 336 bp, Glycine max
  unsure at all n locations
  Clone ID: LIB3072-036-Q1-E1-A5
tggcttcgaacctttgggctgatttatgtgcttgcatggtcgtgagaagatgatagaaggggatagtaaaaataaccaacaaagacgagcccgaagaataatacggcggcgtcaaaggcgtgcacgccgtcctccccttccgcgggggccatagtcgtatgtacggaatcgagtcctcctaaaagcgactagctactaagccacgacgacgacgagcacctaaaattacgtcgcgactctcgtacgcgtatatgtctaacgttcntctaacgtagtcgcgaagacaccaggtcgaacctacgttatctagaccgcaagagtcgcacgcgtatatgt

SEQ ID NO: 1329 - DNA, 411 bp, Glycine max
  Clone ID: LIB3072-036-Q1-E1-A6
tggcttcgaacctttgggctgatttatgtgcttgcatggtcgtgagaagatgatagaaggggatgtatgtccgtatgcgctgctttcccttcttgactctttcgaaaacattgtaatttcccgactcttgcccaacctttcccgtactcgaaagaagaaatctatagcggtccatggctactgaccctacagactcaccaagaccactcggaacggtagtaacccatagctcccatactactaacaaactcggcggaccaactcaccacaaggaccacgggctcgtcggatgaacggacattaacgacagtccgtgggcggtgagcccacggtatctaacgtatgtcactctctagtagccactattcgccctaagccggccaggaaccgaatccccctaagtagacatac

SEQ ID NO: 1330 - DNA, 341 bp, Glycine max
  Clone ID: LIB3072-036-Q1-E1-A7
gcttggaacctttgggctgatttatgtgcttgtggatgtgcgggtggatgtgcgggcgtgagaagatgatagaagggggaagtacccgagatcagtctccagagagaaaaaaaaacggtccgcgtaggcggaggagacgtagcgagattagcggcaacacgcgacaataagcgcggtcgcatatcctcacgtatcgcgggccttatccgtaggcgtataagcgtcggtatcgttataggagggggcgactatgcgatacgtctgcgtggagagtatcggcggcgtaacttacgtctacgccttaagaccgtggtcgtcggaagcggccgtagacgcggtat

SEQ ID NO: 1331 - DNA, 336 bp, Glycine max
  Clone ID: LIB3072-036-Q1-E1-A8
ggcttggaacctttgggctgatttatgtgcttgcatggtcgtgagaagatgatagcagggcatggtcgtggaagatgatagaagggcatggtcgtgagaagatgatagaagggcatggtcgtgagaagatgatagaaggggacattaaaaataaaatataagttaagcgaaagcgagaaaaaacaaaaactaaagagtacaacgctagggactacctataggaccggggagatttcctacgcgggagggtataagaaggaagaggagtacagggaggagtattacagcggaagaacgtaaaggggagtattacggcgaatatagcagcgagcataa

SEQ ID NO: 1332 - DNA, 502 bp, Glycine max
  Clone ID: LIB3072-036-Q1-E1-A9
ttggctacgacctttgggctgatttatgtgcttgcatggtcgtgaaaagatgatagaagggcatggtcgtgagaagatgatagaagggcatggtcgtgagaagatgatagaagggcatggtcgtgagaagatgatagaagggcatggtcgtgagaagatgatagaagggcatggtcgtgagaagatgatagaagggcatggtcgtgagaagatgatagaagggggaggaagaaaataataaaaaaaaaaaaaaaaaaaaaaaaaaaaaagtggttgtctcagaggacttaagtccatgcatgtgcgtacgtgatgctacagtctcctcacagcgctattcaaacctaacctatcggttgctgccccataatgctgcgatcgggaaaatttcggtgccatttaatccaactgttccgtagtatactttttccctgttagtcggtgcaacagtgaagaggtttgtattgactgtttcctttaatagccgtgtagttcgaacggt

SEQ ID NO: 1333 - DNA, 236 bp, Glycine max
  Clone ID: LIB3072-036-Q1-E1-B10
cttcgaactttgggctgagttgggtgcttacttatctgcttgcaaagtcgcaaaagtgatcccaaggcaaatacgcacagaacaccttagaggtgcgcccaataaatgtagcggtgcccgtattacgcaactacatcacccggtctaacaacacgcatccgaactaacgaccaccaaacacactcaacgcaatacaaaacccccaccgacagcaaccatcaccactcctatacccc

SEQ ID NO: 1334 - DNA, 391 bp, Glycine max
  unsure at all n locations
  Clone ID: LIB3072-035-Q1-E1-H2
gaactttgggctgatttatgtgcttgtttatgtgcttgtttatgtgcttggtcgtcagaagatgatagaaggggataggcgcccgtaacatcagtgacagtcgacaagagagacattaataagaaaagaaaaaaagaagagccgagacctttcccgaagaaaagacggtactttacaggtaaagtcacgaagtcggctaaatcaagggttgaatcgaggaaaagatgaattagatgacgggtaacaccggagagaaggtctaagtcgtaaaggagaagatttaggaaacggtttaagtcgtaaaggagaagatttaatanatagtttaagtcgttaaggataagatccgtgatatcctttaagtggtaagggagaagatttaatagaacat

SEQ ID NO: 1335 - DNA, 377 bp, Glycine max
  Clone ID: LIB3072-035-Q1-E1-F7
gaacctttgggctgatttatgtgcttgcatggtcgtgagtagatcatagacccgtccctagttgataatctatatcgtattggtttcggaatgacagtcagcggtctctctctctctcgctcgctgtcagcatacctagtacataaagcgagttccactaagcacgatatatttgaagggacaaaatacattaatttcagtacgatatgtacgtcagctgatgactaacgtatggtacaggtatagaaagatacatacataaataatattgattaaaaaccaagtaagaacaaacaaaaactagatggctcactcggcttacgtaaatccatgtatgtacgtaagtcaacattcactccacatacatagtcattcac

SEQ ID NO: 1336 - DNA, 346 bp, Glycine max
  Clone ID: LIB3072-035-Q1-E1-F8
gaggggacctatgtactcaagcaagagcacgaacagcatcacggctcccgtttctccctcagcccgcgttcctattactctacattcgttcctagttattgtctagcctgcgtctgatatcgacgacgacttctcctaaaatggcggtatacatcacacgccgttagccacgagaggaaagggtggcggaacagaaccagacctaatcggaaaagaaacacgtttctctatcgccgcgtaactatttaacgagtctgacaaggggaccgcatcagctcccatactcctaccatacgtcttcccccactgttcaacgtcacttcccgagtcccaagcccggcctacc

SEQ ID NO: 1337 - DNA, 307 bp, Glycine max
  Clone ID: LIB3072-035-Q1-E1-F9
ctttgggctgattgatgtgcttgcatggtcgtggaagatgctagaagggaccgcccataactactctgcttttacactgaacttgggcggctgttcaacgttacttcccgagttccaagcctgacctacccgtagccacaacgtcgcgcgccgcaaccttcattgagcggctcgccgcggaggactcattagaaggattcgtcgccaaaaccggccagaataaagacgtaacgcacggccgccccagatccgagagagctctcgacgactaacctaacactcacaagtccgcgcctccgttatagta

SEQ ID NO: 1338 - DNA, 367 bp, Glycine max
  Clone ID: LIB3072-035-Q1-E1-G1
ctccgaacctttgggctgatttatgtgcttgcatggtcgtgagaatgatagaagagcatgccacaccgccgagtagagccggatcgtcgaccaaccactccggagttctcaccgtcgccaaaaggccgctaaaggactcgaccgaacaattacacaagcatccaaaagaataaccgcgccccgcaatttccgataacgcgcccgcctagatccacacgaacagacgtcttattccacgactctaaaaaaaaaaaaaaaaaaaaaaaaaaaaaacaaaacaaacaacacattaaacaaaaaaaaaaaaaaaaaaaaaaaaaagtggttgcctcagaggacttaagtccatccatgtgcgtacgtaatg

SEQ ID NO: 1339 - DNA, 125 bp, Glycine max
  Clone ID: LIB3072-035-Q1-E1-G10
atcactccgcctttcactccctcatcccgtgttcctatctccacattcattccttgttattttttaggattcgtctcatcctcacagtgactatcacctcaaatcaccactacacatcatcaccc

SEQ ID NO: 1340 - DNA, 427 bp, Glycine max
  Clone ID: LIB3072-035-Q1-E1-G11
gctccgaacctttgggctgattgatgtgcttgcatggtcgtgagaagatcatagaagggggatagtaaaaataaccaacaaagacgagcccgaggaagaatacggcggcgtcaaaggcgcgcccgccgtcctccccttccgcgggggccatagtcgtatgtacggaatcgagtcctcctaaaagcgactagctactaagccacgacgacgacgagcacctaaaattacgtcgcgactctcgtacgcgtatatgtctaacgttcatctaacgtagtcgcgaagacaccacgtcgaacctacgttatctagaccgcaagagtcgcacgcgtatatgtctatagttagcatagcgctgccgatccgatattaatgatccccgtcataaattccgtacgcctagagacgatcacaaaaatcaacaatctct

SEQ ID NO: 1341 - DNA, 499 bp, Glycine max
  Clone ID: LIB3072-035-Q1-E1-G2
aacctttgggctgatttatgtgcttgcatggtcgtgagaagatgatagaaggggatcccgagcctgaatcaaataacctaacctagctcgttctgactacggagaggaaaatacccgggcccccgcctccgtcttcttccgctccagtcctcgacgcgatggcgaagagagtagaggtgaaagaccgtccgataaggaggtatgggccttagggcagacgtccacctgataggtaacgcgtatacgcgcgtaggagtgacggccctactggcggctagcgttgaggtttctcctgtaaacgtccccgtagtaggttacgccgactgaaaccatcatcgttaaagaggttacgaaacaaataaataaataaacaaacagtctcaattgatatacacgcatgcagcgctggggcctcagtcagtcaggcaggcatgcgcgctccccggcactgacttcagcccggcggaattagcgcggtactacgactcagccacacaca

SEQ ID NO: 1342 - DNA, 468 bp, Glycine max
  Clone ID: LIB3072-035-Q1-E1-G3
aacctttgggctgatttatgtgcttgcatggtcgtgagagatgatagaaggggacgcaaaagccgaggccgatcccggagtaagtcacagcatcccggactcttaacccgccctctcctaatacgaggcctaaacttttttcgtaaccgtctactacttcctcggcccccctacccgcctctctcctcgtcgtctcttaaataataagaaggtccccgttaaataaagaaaaaattttcatttaaaccatactagacaagccctagggcgccgaggaaccgaaaaacggagaagaaacgcccgacacggtagaagagcctacggcagagagaaggaccgacccggagagcaacgaccacttagggataggagtaaataattagtacgacttaaagatattaggaggattcccgagaaacaacgtacacatccccgcatagaccacgaggatcaagagaaccactaacg

SEQ ID NO: 1343 - DNA, 298 bp, Glycine max
  Clone ID: LIB3072-035-Q1-E1-G4
taaccaacaaagacgaggccggggaatactacggcggcgtcaaaggcgcgcccgccgtcctccccttccgcgggggccatagtcgtatgtacggaatcgagtcctcctaaaagcgactagctactaagccacgacgacgacgagcatctaaaattacgtcgcgactctcgtacgcctatatctctaacgttcttctaccgtagtcgccaagacaccaagtcgaacctacgttatctacaccgcaagagtcgtacgcgtatatctccatcgttaggatcgcgctgtcgctccgatactc

SEQ ID NO: 1344 - DNA, 131 bp, Glycine max
  Clone ID: LIB3072-035-Q1-E1-G5
tccgaggaccattgtatattatatatagatcggattctcgattctagccgggcgcaatataaaactcagaatgaaaatattacgtaacagtcaaaaaaaaagtgtgggtctcacaggagtcaagtccatac

SEQ ID NO: 1345 - DNA, 403 bp, Glycine max
  Clone ID: LIB3072-035-Q1-E1-G6
taaaaataaccaacaaagacgaggccggggaataatacggcggcgtcaaaggcgcgcccgccgtcctccccttccgcgggggccatagtcgtatgtacggaatcgagtcctcctaaaagcgactagctactaagccacgacgacgacgagcatctaaaattacgtcgcgactctcgtacgcgtatatgtctaacgttcttctaacgtagtcgcgaagacaccaggtcgaacctacgttatctagaccgcaagagtcgcacgcgtatatgtctatagttaggatagcgctgccgctccgatattaatgatcctcgtcataaattccgtaagcttagaaacgatcacaaaaatcaacagtctctccaaacggatcaagttttcccaagtcccgcccgccacgcca

SEQ ID NO: 1346 - DNA, 410 bp, Glycine max
  Clone ID: LIB3072-035-Q1-E1-G7
aactttggtctgatttagtgcttgcatggtcgtgagaagatgatagaccgggatctacaatacaatatacctctccctcgccgggactttatctaaactaggatttacttgctagtactcgagagagaattttataaatataaagagaacactcgctctaagctctaatcaaatctagtctagcgaagaacgtgaaagagtaacgaggaactcctgaactcgagctcgaggaagttatttccgaagaggagtaagataaccttgaacttaaaatatatagttctcgttttttaccctctcgctctcgctctcgatcttgatgagtaacggaatcatttcctcccttccggtattattattaagaaaaaaaaattactccctaaattttataattctaattcccttaaaca

SEQ ID NO: 1347 - DNA, 351 bp, Glycine max
  Clone ID: LIB3072-035-Q1-E1-G8
tgcttgcatggtcgtgacaagaccctagaagggcatggtcgtgagaagatgatggaaggccacgtaatcgaacaggcaagaaaagttacccttacagtagttcaagaaaacgaagagtatcagtccgcctgtcactccctcatcccgtgttcctattctacattcattccttgttattgcttaggatgcgtctgatgcggacggtgacttcacctggaatggccctacacatcatgccccgttggtaacaacaggaaatggcggtggaacagaatgagttgtatctgggaaagatatccgtttcactatcgcagcgtacctccttaacttaaatctcaaagtgccagaaac

SEQ ID NO: 1348 - DNA, 334 bp, Glycine max
  Clone ID: LIB3072-035-Q1-E1-G9
gggctgattgatgtgcctgcatggtcgtgagaagatgatagaagggagagcacgtagggtcgaagatacataacgtcggctggagggcacgagttaggcatacatcacagagaactaataagactgacgagtccgagtactgaataaggccccatagtcataaactgatgcatttgcggggccccccctcacttccgggccagagaaaaaaaaccaagatagactaaaacaaaaagtggttgcctcagaggacttaagtccatgcatgtgcgtacgtgatgctacagtctccccacagcgccattcaaacctaacctatcggttgctgccccat

SEQ ID NO: 1349 - DNA, 496 bp, Glycine max
  unsure at all n locations
  Clone ID: LIB3072-035-Q1-E1-H1
aacctttgggctgatttatgtgcttgcatggtcgtgagaagatgatagaaggggacctacgtaatcgaacaaccaagaaaagttacgcttacagtagttcaagaaaacgaagagtatcagtccgcctgtcactccctcatcccgtgttcctattctacattcattccttgttattgtttaggatgcgtctgatgcggacggtgacttgacctggaatggccctacacatcatgccccgttggtaacaagaggaaatggcggtggaacagaatgagttgtatctgggaaagatatccgtttcactatcgcagcgtaactctttaacttaaatctcaaggggccagaaaccaagcccgaactcgtacattttgttcaccatacaaatgaaatttcanacccgtaaacaaagcctagccatttatagtagcgcgaaagaaagaancttcggcgggttaccctcaaagacacactcggaagattattcgtcaccaaatct

SEQ ID NO: 1350 - DNA, 304 bp, Glycine max
  Clone ID: LIB3072-035-Q1-E1-H10
agttacccttacagtgatggcaacaacacgaacagtagcagtccgactatcactccctcatcacgtgttcatattctacattcattccatattaatgcttaggatacgtctaatacgcatcgtaacttgaccttgaattgacctacacatcatgcacacatcataacaagatgaaatcgcgatgaaacagaattagttctatctgagaaagatctccgtttcactatcgcatcataactccttaacttaaatctcacagagatagcaaccaaccacgaactcgtacattacgctcaccatacaa

SEQ ID NO: 1351 - DNA, 270 bp, Glycine max
  Clone ID: LIB3072-035-Q1-E1-H12
gaagatcctaccacgggatagtaaaaataaccaacaaagacggccccccccaataatacggcggcgtcaaaggcgcgcccgccgtcctccccttccgcgggggccatagtcgtatgtacggaatcgagtcctcctaaaagcgactagctactaagccacgacgacgacgagcacctaaaattacgtcgcgactctcgtacgcgtatatgtctaacgttcctctaacgtactcgcgaatacaccacgtcgaacctacgttatctacaccgc

SEQ ID NO: 1352 - DNA, 480 bp, Glycine max
  Clone ID: LIB3072-035-Q1-E1-F5
aacctttgggctgatttatgtgcttgtttatgtgcatccatagtcgtgagccgatcactagaggggatctacataacagaggttagtccccgtcctcccgcgaatacggagacgaggaaactacgcggtcctcctcctccgtcttcttcttccgctcccgtcctttaggcggcggcgtacatggagggaagagcgcgtgagctataaagttatgggccttacggcccgtgcaacatagattataatcgcgtcccggctcgtaggaatgaaggccctcttggcggtaggcgtaaaggtccttgttgttgtcgtccccgtattaggacccgccgagactctactaaatatcatctccgttacgtacaccaacaaactacagtcaggttaaacaaaccgtactcatctcccacttacacgggagtcagtcattataattaatctacatccggctaccggaccgtccattcccggtcctcgttc

SEQ ID NO: 1353 - DNA, 320 bp, Glycine max
  Clone ID: LIB3072-035-Q1-E1-D7
agagatagactcgcgagcgtaacataagctaccagagaaataggcacggcccgacaaaatggaaggaagtcgaaaacatcgccttcttatggacctacaataaccgcgagcccctccaaaaagtaaactagtaaacggcacttcctctcacctacctaacccgacacggccccattacaccgcaaacatttcacccgaagaaagctcgatacacaacgtactcctttcatattccatcacgagcggctataacctcaaaaggatccgatagcgcatcccactccgcaataacttactctacatccacgtgaccacaccat

SEQ ID NO: 1354 - DNA, 391 bp, Glycine max
  Clone ID: LIB3072-035-Q1-E1-D8
aacctttgggctgatttatgtgcttgcatggtcgtgagaagatgatagcagggcatggtcgtgagaagatgatagaagggcgtgggggtgagaagatgatagagggggttatcccgagcctgaatcaaataacctaacctaactcgttctgactacggagaggaaaatacccgggcccccgcctccgtcttcttccgctccagtcctcgacgcgatggcgaagagagtagaggtgaaagaccgtccgataaggaggtatgggccttagggcagacgtccacctgataggtaacgcgtatacgcgcgtacgagtgacggccctactggcggctagcgttgaggtttctcctgtaaacgtccccgtagtaagttacgccgactgaaaccatca

SEQ ID NO: 1355 - DNA, 383 bp, Glycine max
  Clone ID: LIB3072-035-Q1-E1-D9
gctccgaacctttgggctgattgatgtgcttgtttatgtgcttgcatggtcgtgagaagatgctagaaggggacgtaatcgaacaaccaagaaggctgtacccttacagtagttcaggaaaacgaagagtatcagtccgcctgtcactccctcatcccgtgttcctattctacattcattccttgttattgtttaggatgcgtctgatgcggacggtgacttgacctggaatggccctacacatcatgccccgttggtaacaagaggaaatggcggtggaacagaatgagttgtatctgggaaagatatccgtttcactatcgcagcgtaactctttaacttaaatctcaaggggccagaaaccaagcctgaactcgtacatt

SEQ ID NO: 1356 - DNA, 460 bp, Glycine max
  unsure at all n locations
  Clone ID: LIB3072-035-Q1-E1-E1
aacctttgggctgatttatgtgcttgcgtgagaagatgatagacggggatagtacccataaccaacaaagacgagcccgaagaataatacggcggcgtcaaaggcgcgcccgccgtcctccccttccgcgggggccatagtcgtatgtacggaatcgagtcctcctaaaagcgactagctactaagccacgacgacgacgagcacctaaaattacgtcgcgactctcgtacgcgtatatgtctaacgttcttctaacgtagtcgcgaagacaccaggtcgaacctacgttatctagaccgcaagagtcgcacgcgtatatgtctatagttaggatagcgctgccgctccgatatttatgatcctcgtcataaattccgtaagcttagagacgatcagaanaatcaacagtctctctaaacggatgaagttttcccaggtcccgcccggcacgccagggga

SEQ ID NO: 1357 - DNA, 352 bp, Glycine max
  Clone ID: LIB3072-035-Q1-E1-E2
tggttggaacctttgggctgatttatgtgcttgcatggtcggagaagatgatagaaggggatatatatgcaatcctactcgggccgtagggaaaaaaaaaaaaaaaaaaaaaaaaaaaaaaagtggttgcctcagaggacttaagtccatgcatgtgcgtacgtgatgctacagtctcctcacagggctattcaaacctaacctatcggttgctgccccataatgctgcgatcgggaaaatttcggtgccatttaatccaactgttccgtagtatactttttccctgttagtcggtgcaacagtgaaaaggtttgaattgactgtttccttaaatagccgtgtaattcgaac

SEQ ID NO: 1358 - DNA, 374 bp, Glycine max
  Clone ID: LIB3072-035-Q1-E1-E3
tggctcggaacctttgggctgatttatgtgcttgcatggtcgtgagaagatgatagaagggcaccgtcgtgagaagatgatagaagggcatggtcgtgagaagatgatagaaggggggggctgtagcgattaggtttgggtgatcgcccattaaaaaaaaaaaaaaaaaaaaaaaaaaaaaagtggttgtctcagaggacttaagtccatgcatgtgcgtacgtgatgctacagtctcctcacagcgctattcaaacctaacctatcggttgctgccccataatgctgcgatcgggaaaatttcggtgccatttaatccaactgttccgtagtatactttttccctgttagtcggtgcaacagtgaagaggttt

SEQ ID NO: 1359 - DNA, 444 bp, Glycine max
  Clone ID: LIB3072-035-Q1-E1-E5
aacctttgggctgatttatgtgcttgcatggtcgtgagaagatgatagaccggaacaaaaaacaaccgataaaaaaaaaaggaaaggaaaaaaaaaaaaagtggttgtctcagaggacttaagtccatgcatgtgcgtacgtgatgctacagtctcctcacagcgctattcaaacctaacctatcggttgctgccccataatgctgcgatcgggaaaatttcggtgccatttaatccaactgttccgtagtatactttttccctgttagtcggtgcaacagtgaagaggtttgtattgactgtttcctttaatagccgtgtagttcgaacggtgaacgggatgtgtttcgcagtggtgtaccaagtgtggtgggcgcggcggccatgtgtaatgcgattgccatatccgttagtgtttcagtgtttgtcttcacctgtccctcc

SEQ ID NO: 1360 - DNA, 418 bp, Glycine max
  Clone ID: LIB3072-035-Q1-E1-E6
aacctttgggctgatttatgtgcttgcatggtcgtgagaagatgatagaccgggacgtaatcgaacaaccaagaaaagttagccttacagtagttcaagaaagcgaagagtatcagtccgcctgtcactccctcatcccgtgttcctattctacattcattccttgttattgtttaggatgcgtctgatgcggacggcgacttgacctggaatggccctacacatcatgccccgttggtaacaagaggaaatggcggcggaacagaatgagttgtatctgggaaagatatccgtttcactatcgcagcgtaactctttaacttacatctcaaggggccagaaaccaagcccgaactcgtacattttgttcaccatacaaatgaaacttcaaccccgtacacaaagcctagccatttat

SEQ ID NO: 1361 - DNA, 334 bp, Glycine max
  Clone ID: LIB3072-035-Q1-E1-E7
aacctttgggctagatttatgtgctgtgtttatgtgcttccatgaaagatgatccgaaccgcgaccaggaaccctggacagaaaggtcgggagtgcgcactaatactgtcaaggagagggtgacgaagcctcgagtgcctcacggatcgagctacatctccaggacataaagcgtctgtcagaactagaggagacacacgtggtataaacactcttgattgagccgtatgcgaccgtaggaaagacacttcacaacgtgactcagctcgatatacgacaagtaaaaaatcattcggcctacctgacatccagctgcgtcgggtaaccctcacct

SEQ ID NO: 1362 - DNA, 347 bp, Glycine max
  Clone ID: LIB3072-035-Q1-E1-E8
ttggctgatttagtgcttgcatggtcgtgacaagatgatagcaccgtactccgccgcataacatacttgagagggactagctacgccgacaccccgcaaatcgccccccccccttcgcccagtatcctctaacctatacgtcccatgtctaccccacattgccgcccacaacttgtccataaaaaaaacaccaaaaacaaatcaaccaaagtggttgcctcagaggacttaagtccatgcatgtgcgtacgtgatgctacagtctcctcacagcgctattcaaacctaacctatcggttgctgccccataatgctccgatcggcaaaatttccgtgccatttaatcc

SEQ ID NO: 1363 - DNA, 424 bp, Glycine max
  unsure at all n locations
  Clone ID: LIB3072-035-Q1-E1-F1
tggtccgaccttggctgattagtgcctgttatgtgctgggagaagtgtagacccggagcctgatcaaatactacctagtcgtctgactacggaaggaaaatacccgggccccgctccgtcttctccgtccatcctcgacgcgatggcgaagagagtagagtgaagacgtccgataggaggtatggcctaggcagacgtccacctgataggtaacgcgtatacgcgcgtaggagtgacggcctactggcggctacgttgagtttctccgtaaacgtcccgtagtagttacgccgatgaaacatcatcgttaaagagttacgaaacaaataaataaataaacaaacaaacagtctcaattgatatacacgcatgcagcgctngggcctcagtcagtcaggcaagcatgcgcgctcnccggcactga

SEQ ID NO: 1364 - DNA, 355 bp, Glycine max
  Clone ID: LIB3072-035-Q1-E1-F10
tttggactgattgatgtgcttgcatggtcgtgagaagatcctagatgataaacacacacaaaaaaaaaaaaaaaaaaaagtcgtggtgtcagacgacttaagtccaggcgtgtgcgtacgtgatgctacagtctcctcacagcgctattcaaacctaacctatcggttgctgccccataatgctctcatcgggaaaatttcggtcccatttaatccaactattccgtaatatacctcttccctgttagtcggtccaacaatgaagaggtttcaattgactgtttccattaatacccctgtaactcgaacggtaaacgggatgtgtttcgcactgctctaccaactgtggtcaccg

SEQ ID NO: 1365 - DNA, 266 bp, Glycine max
  Clone ID: LIB3072-035-Q1-E1-F12
ctttgggctgattgatgtgcttgtttatctgcttgcatggtcgttagaagatgcccccggggatagtataaataaccaacaaagacggccccgacgaataatacggcggcgtcaaaggcgcgcccgtcgtcctccccttccgcggcggccatagtcgtatgtacggaatcgagtcctcctaaaagcgactagctactaagccacgacgacgacgagcacctaaaattacgtcgcgactctcgtacgcgtatatctctaacgttctt

SEQ ID NO: 1366 - DNA, 467 bp, Glycine max
  Clone ID: LIB3072-035-Q1-E1-F2
gacctttgggctgatttatgtgcttgcatggtcgtgagaagatgatagaagggggcggcgggcccggagggacgatactagtgacggctccagatgtgacgcgctcctggaatccgcgaaactccagcgtagaatagaggaggctgaactcggaaagcctgctagaaagcgtgagaaaattgaagagacctctaggaaccgtactggaaagttcgtcgaacgccgtaactaaataaagagcacatcgaaaaggacactatagacgaggcatccaaaggaaggctcgccttacccagtctactcgatggcggcgcgcccgaccctttcgggtcatgaaacgacaccgaagctacggaatgcaattcgccaggcggctctagctgccctcctgatatagtcgaacaaacgaagaacgggccccccgaagcccccctcaagctcttaagtactccccgacgtaaagctac

SEQ ID NO: 1367 - DNA, 412 bp, Glycine max
  Clone ID: LIB3072-035-Q1-E1-F3
ctttgggctgatttatgtgcttgcatggtcgtgagatgatagaagggggtagccgttaaaatgccatcatacccgagagaagcggtgttgaaatcttagtaatacagcagagcacccaccagtcatatatggagcctatcaattccttttgtcctcgactaaaactaaatcgtgaaaatttcaaaatttcagcataccatacccgaaaaaaaaaaaaaaaaaaaaaaaaaaaagtggttgtctcagaggacttaagtccatgcatgtgcgtacgtgatgctacagtctcctcacagcgctattcaaacctaacctatcggttgctgccccataatgctgcgatcgggaaaatttcggtgccatttaatccaactgttccgtagtatactttttccctgttagtcggtgcaac

SEQ ID NO: 1368 - DNA, 378 bp, Glycine max
  Clone ID: LIB3072-035-Q1-E1-F4
actttggctgtttatgtgcttgctggtcgtgagaagtgatagaagggagccggtatcgaacacgaaatagctaaaagatgaacagatgaagccgagggagtcgccgcgaaaccagcagacatcaacgactaatcgataaaggactccgaagagagtgttttgctctcgaataggtagattctggccgagccggaaaagagcagatatacttagagaaaaagaacaattgagtaggtatgaaaaggcctcgaatagacaggaaggccgtagcccgaggcgcagaatacctaacatatcccgtcgaaaccggtcgacgagagtaaagggaagagtacacctatcggaaaactagcggctccgtccacggatcccacctat

SEQ ID NO: 1369 - DNA, 473 bp, Glycine max
  Clone ID: LIB3072-035-Q1-E1-D6
gcttggaacctttgggctgatttatgtgcttgtttatgtgcttggtgagaagatgatcagagggaccatcaccatcgactaactaaaacacggactaaaagcaaaaagtgaagagaagggaaaaatcccaaccccccacggcaaaaaacctaaccacattcgccaccctataagaaaaaaaaaaaaaaaaaaaaaaaaaaaaaagtggttgtctcagaggacttaagtccatgcatgtgcgtacgtgatgctacagtctcctcacagcgctattcaaacctaacctatcggttgctgccccataatgctgcgatcgggaaaatttcggtgccatttaatccaactgttccgtagtatactttttccctgttagtcggtgcaacagtgaagaggtttgtattgactgtttcctttaatagccgtgtagttcgaacggtgaacgggatgtgtttcgcactggtgtaccaagtgtg

SEQ ID NO: 1370 - DNA, 384 bp, Glycine max
  Clone ID: LIB3072-035-Q1-E1-C11
ctttgggctgattgatgtgcttgcatggtcgtgagaagatcatagaaggggatagtacacacactaacaactcaccccacatcacgttgctaccccgacaacccctggcgcagccgacagttacggtcatttgcggaaagtccgaggccgataccgactctaagcttaatgtacataagcatcggtaaatttccacgaacctcatcgaaacacctttcaacgttcctttatacgaccataaaagtaccgaggcctccgagggcgacggtaagctcttcggcctcacttgttatacaagccacggcgaacgcctattatccgcgaaactacttcccgagaagaccgacgtcgccgacgaggaaaagaaagcaccgctgcatatca

SEQ ID NO: 1371 - DNA, 399 bp, Glycine max
  Clone ID: LIB3072-035-Q1-E1-C12
ggctccgaacctttgggctgattgatgtgcttgcttatgtgcttgtttatctgcttgcatggtcgtccacaagatgatagaaggggatagtaaaggtagcaacaaccacgagcccggggaataatacggcggcgtcaaaggcgcgcccgccgtcctccccttccgcggaggccatagtcgtatgtacggaatcgagtcctcctaaaagcgactagctactaagccacgacggcgacgagcacctaaaattacgtcgcgactctcgtacgcgtatatctctaacgttcatctaacgtagtcgcgaagacaccaggtcgaacctacgttatctagaccgcaagaatcgcacgcgtatatgtccatagttagcatagcgctgccgacccgatattaatgatc

SEQ ID NO: 1372 - DNA, 406 bp, Glycine max
  Clone ID: LIB3072-035-Q1-E1-C2
tggcttggaacctttgggctgatttatgtgcttgcatggtcgtggaagatgatagaagggcatcgtcgtgagaagatgatagaagggcatggtcgtgagaagatgatagaagggcatggtcgtgagaagatgatagaagggcatggtcgtgagaagatgatagaagggcatggtcgtgagaagatgatagaagggcatggtcgtgagaagatgatagaagggcatggtcgtgagaagatgatagaagggcatggtcgtgagaagatgtatagagggcatggtcgtgagaagatgatagaaggggaaaaaaaaaaaaaaaacctcaactaaaaaaaaaaaaacccaaaaaaaaaaaaaagtggttgtctcagaggacttaagtccatgcatgtgcgtacgtgatgct

SEQ ID NO: 1373 - DNA, 448 bp, Glycine max
  Clone ID: LIB3072-035-Q1-E1-C3
aacctttgggctgatttatgtgcttgcatggtcgtgagaagatgatagaagggggtataagcgagcccgccgactgagacaatcaggaatagcgcgacgaaaacgaaggcttccgcccctcctgccgtcataaccccggcagtacggtaacgttacgtgcatgacacgcctttctcttgaacgaatatcggtcacggcgtttgcatcttggaggcgaaacgtgtaagccggaggtccgtcgcggaagtatataatactcccggtcccgagattaccttcgaagagcgtgccgaagtaataaaggaacatacttacggtgaataacacagactagatcttaaaatagccaattaataagtccatccccacgttagagattctgaagcttactttaaggatatacccgcgcctagcacagacggtattgcatctctcaacaccttacatc

SEQ ID NO: 1374 - DNA, 329 bp, Glycine max
  Clone ID: LIB3072-035-Q1-E1-C5
ggtcggaacctttggctgatgtagtgcttgcttagtgcttgattatgtgcttgcctggccgtgatgatagaaggggaaaccaagtgcgaggctactaacgtcatggaggacggaggtcgaaaaggtcaaataataaaatatgacactggaaatccagccatagataacccgcgcaatcgctcctctccaaaacaccctcctaaagacgagaccaagacgcttaccaaagtaatcaatcgatacgcggcagtacgccacggtactgccccaaagcccaaaaggtctacgctatacctctcagaacaaataccgtactgacgaacagcccc

SEQ ID NO: 1375 - DNA, 393 bp, Glycine max
  Clone ID: LIB3072-035-Q1-E1-C6
gaactttgggctgatttatgtgcttgcatggtcgtgagaagatgatagaccggcatcgtcgtgagaagatgatagaagggcgtgggcgtgagaagatgatagaagggcatggtcgtgagaagatgatagaagggcatggtcgtgagaagatgatagaagggcatggtcgtgagaagatgatagaagggcatggtcgtgagaagatgatagaagggcatggtcgtgagaagatgatagaagataaaaaaaaaaaccacacaaccacaaaaaaagtggttgtctcagaggacttaagtccatgcatgtgcgtacgtgatgctacactctcctcacagcgctattcaacactaacctatcggttggctgcccataatgctgcgatcgggaaaattt

SEQ ID NO: 1376 - DNA, 338 bp, Glycine max
  Clone ID: LIB3072-035-Q1-E1-C8
tcgaacaaccaacaaaagttagccttgcagtagttcaagaaagcgaagagtatcagtccgcctgtcactccctcatcccgtgttcctattctacattcattccttgttattgtttaggatgcgtctcatgcggacggtgacttgacctggaatggccctacacatcatgccccgttggtaacaagacgaaatggcggtggaacagaatgagttgtatctggcaaagatatccgtttcactatcgcagcgtaactctttaacttaaatctcaaggggccagaaaccaagcccgaactcgtacatcttgttcaccatacaaatgaagtttcaaccccgca

SEQ ID NO: 1377 - DNA, 349 bp, Glycine max
  Clone ID: LIB3072-035-Q1-E1-C9
ggctccgaacctttgggctgattgatgtgcttgcatggtcgtgagaagatcatagaaggggatagtaccaaataaccaacaaagacgagcccgaaggatgatacggcggcgtcaaaggcgcacccgccgtcctccccttccgcgggggccatagtcgtatgtacggaatcgagtcctcctaaaagcgactagctactaagccacgacgacgacgagcacctaaaattacgtcgcgactctcgtacgcgtatatgtctaacgttcctctaacgtagtcgcgaagacaccaagtcgaacctacgttatctagaccgcaagagtcgcacgcgtatatgtctatagttaggat

SEQ ID NO: 1378 - DNA, 461 bp, Glycine max
  Clone ID: LIB3072-035-Q1-E1-D1
aacctttgggctgatttatgtgcttgtttatgtgcttggtcgtgagaagatgatacaaggggaggagaggtggagatgaagaagcgaagagaagagaagagaagggacccggactcgaaaagagaagacggggggaggaacggaagtaaataagaataagcctacagaggaccggggtatcgttagagagaattcggagcctaacccttgccggatctgttgtaattccgtctccgccggtactcctggtactgtcacctttgcttctgctcataagggtactgcttgcgaaccttacacgtaagacgaagacaacggctggttgcataggaagcctacgcgagagagcacggagagctccccgcaacaacctgctaagccagattccgacaccacgaggtcataaattacgcccccccccttccaacctgtaaaggtccgtccgtccccaagcatctcag

SEQ ID NO: 1379 - DNA, 409 bp, Glycine max
  Clone ID: LIB3072-035-Q1-E1-D10
ggcttcgaacctttgggctgattgatgtgcttgcatggtcgtgagaagatcatagaaggggatcccgagcctgaatcaaataacctaacctaacgcgtgctgactacggagaggaaaatacccgggcccccgcctccgtcttcttccgctccagtcctcgacgcgatggcgaagagagtagaggtgaaagaccgtccgataaggaggtatgggccttagggcagacgtccacctgataggtaacgcgtatacgcgcgtaggagtgacggccctactggcggctagcgttgaagtttctcctgtaaacgtccccgtagtaagttacgccgactgaaaccatcatcgttaaagaggttacgaaacaaataaatacatacacaaacaaacagtctcaattgatatacacgca

SEQ ID NO: 1380 - DNA, 371 bp, Glycine max
  Clone ID: LIB3072-035-Q1-E1-D12
ttatctgcttgtttatctgcctgcatggtcctccacaaatgatagaaagggacctatataagcaagcaacaccgctccttacagtttgttaaaaacgaacagtattactcctcccgtctctccctctccccgcgttcccattattctacattcattcctacttactctcgaccctgcgtctcacaaccaacgcaatttctccgaaaacggcggtatacaccacactccgctagatacaatactacccggcggaacaagactcattctaatcgcaaacgaaagacgtttctccatcgcgccgtaactccttaaccagtctcataaacggaccgcaataactaccccccctctacactcaacttccaccactc

SEQ ID NO: 1381 - DNA, 412 bp, Glycine max
  Clone ID: LIB3072-035-Q1-E1-D2
aacctttgggctgatttatgtgcttgcatggtcgtgagaagatgatagaaggggacaatacagccgccgcgccccaccagacggagccgtcttcccttcgccagacgaacaactaaacggccgtagcccgcgcacgccagacggagccgtcttcccttcgccagacgaacaactaaacggccgtagcccgcgcacgatgaaaaaaaaaaaaaaaaaaaaaaaaaaaaaaaaaaaaaaaacaaaaaaaaaaaaaaaaaaaaaaaaaaaaaagtggttgcctcagaggacttaagtccatgcatgtgcgtacgtgatgctacagtctcctcacagcgctattcaaacctaacctatcggttgctgccccataatgctgcgatcgggaaaatttcggtgccatttaatccaactg

SEQ ID NO: 1382 - DNA, 353 bp, Glycine max
  Clone ID: LIB3072-035-Q1-E1-D3
tggcttggaacctttgggctgatttatgtgcttgcatagacgatagtagtagtagaacgagatccagcccatggctcactcatacgagtcggaagcatactacggcggcgtcacacgattaagtagcgtgcgccaactcgggaatcgccatattcgcatctacgtcatatcgtcctccaagctgcgatcagcatcaacgctacgaatacgaccatcgcatacgattacatccggacgtccacacgcgtatatatctaaggtacctgctaagtacgcgcgaagacaccaggtcgaacctacgttatctagatcgctcgaatcactcgcgtctatatctatacgtacgtatagcg

SEQ ID NO: 1383 - DNA, 418 bp, Glycine max
  Clone ID: LIB3072-035-Q1-E1-D4
gaacctttggctgatttatgtgcttgcatggtcgtgagaagatgatagaaggggctcgtacaaataaccaacaaagacgagcccgaggaatgctacggcggcgtcaaaggcgcgtcagccgtcctccccttccgcgggggccatagtcgtatgtacggaatcgagtcctcctaaaagcgactagctactaagccacgacgacgacgagcacctaaaattacgtcgcgactctcgtacgcgtatatgtctaacgttcctccaacgtacccgcgaagaccccaggtcgcacctacgttatctacaccgcaagagtcgcacgcgtctatctccacagtccccccagcgcccccgccccctatcaacccccccccctctccaccccgaccgcccccatcccccctcccaacgccaccccccc

SEQ ID NO: 1384 - DNA, 495 bp, Glycine max
  unsure at all n locations
  Clone ID: LIB3072-035-Q1-E1-D5
tggtctggacctttgggctgatttatgtgcttgtttatgtgcttgcatggtcgtgagaagatgcatagaggggtaccaaaaaaaaaccagaaagtaacacagacatgactccccacttcacaaccccactaaccacgtagacaagaaagatctacacactcacggacacagactttcaccctaagcaaaaaaaaattaagcgaccctcctcaaccataatatgcacaaaaagaaccaccggacactacagacaactcttccactaagaaccacacactggaagacgtgacctcagacacggaaaaaaacacgcacagaaagcaccccgaccggacgggaactaacagagaaacatcaaactgccttacactgaacttagaaccccggcctcccctaaaacccgcgacaccccacgatgtacacaggggcaatctgtaggccacattaactaaaccatcccccccctcctcaacgcanactaaaacgccagcgaaa

SEQ ID NO: 1385 - DNA, 369 bp, Glycine max
  Clone ID: LIB3072-035-Q1-E1-C10
aacctttgggctgattgatgtgcttgtttatgtgcttgcatggtcgtgagaagatgcatagaggggggcggtaagctgttatagatagacagatatgcctataagtagagaacgaaaatgccgagagtcgagaaaacgatacgcccccgcgaacgtccgcaacgatctagatttatgcccctaaaactgcattccgaaacctctcgtcctcgccctatccgtaaccaactctcccgtctagttatctatttattatctattattaattgcgatctatagtattacaaggtaataacgaccgacgattactagcctcccccgaactttgcgatacctaagcggtcacaactacaacgaagtccggagacg

SEQ ID NO: 1386 - DNA, 484 bp, Glycine max
  Clone ID: LIB3072-035-Q1-E1-A3
aacctttgggctgatttatgtgcttgcatggtcgtgagaagatgatagaaggggatagtacccccgaagcagcccgcgcagatccaaagaagagccaagggaaaaaaacaagacgaatatcaccggagccacgaccacgactacgctcacgccagggcctgtataagtcaacaaccataacttcttacccgcgtaagccgagctaactagcgagatcaacagatccatccgcttataagtacgtagagcataacgcgtagtcccagtattagccgaattacggcacgataaacgcgccaaagaacgtatcgtaaaccgcaagtacgacgcgcttgccgtcaaggaccgtcccatcagccgcgttccaactaagcttaccaatactaataacgacgcctgcgactccctgattaacaccgcgacgaaccttcgtcccgtagaacgctaaaaatagaaacaagccgccataagaactcctaagaaa

SEQ ID NO: 1387 - DNA, 354 bp, Glycine max
  Clone ID: LIB3072-035-Q1-E1-A5
gaacctttggtctgatttatgtgcgtgcatggtcgtgagatgatagaaggccatggccgtgagaagatgatagaagggcatggtcgggagaagatgatagaagggcatggtcgtgagaagatgatagaagggcatggtcgtgagaagatgatagaaggggaaataaaaattactatcaataaaaaacaaataaaacaaacaaaaaagtggttgtctcagaggacttaagtccatgcatgtgcgtacgtgatgctacagtctcctcacagcgctattcaaacctaacctatcggttgctgccccataatgctccgatcgggaaaatttcggtgccatttaatccaactgctccgt

SEQ ID NO: 1388 - DNA, 490 bp, Glycine max
  Clone ID: LIB3072-035-Q1-E1-A6
ggtcggaacctttgggctgatttatgtgcttgcatggtcgtgagaagatgatagaccgggacagtagtactacataaagtaccgaacgtaaagatccaagcctaccttccgcgccccgtccctccttctaaaattaaatacgctgaatatacgtggtaatcgtgatcgtgtcgataagatcagtcgtatgcaagcgtcctaccctcccctcgtacccgcgcgtaagataactcccatatacacgcagcctacgccataactattacacccgactgtcaaaggaccaactcgcacaggagcacaccacgtacatagcacatcgagactcgacgcacagtccgtacgacctacacaaaggtcgccccatccacacttccctacatcacgttacgtagtaagggaaatagtcacggcgccaccgcagagatcgagaagaggcaaaagcctatccccggcactgaccgcaccacgtcccgaacatcccagagtc

SEQ ID NO: 1389 - DNA, 411 bp, Glycine max
  Clone ID: LIB3072-035-Q1-E1-A9
ctttgggctgattgatgtgcttgcatggtcgtgagaagatgatagaaggggagacataaaaataaaaaaaaaaaaaaaaaaaaaaggaagagtggttgtctcagaggacttaagtccatgcatgtgcgtacgtgatgctacagtctcctcacagcgctattcaaacctaacctatcggttgctgccccataatgctgcgatcgggaaaatttcggtgccatttaatccaactgttccgtagtatactttttccctgttagtcggtgcaacagtgaagaggtttgtattgactgtttcctttaatagccgtgtagttcgaacggtgaacgggatgtgtttcgcagtggtgtaccaagtgtggtgggcgcggcggccatgtgtagtgcgattgtcatatccgttagtgtttca

SEQ ID NO: 1390 - DNA, 371 bp, Glycine max
  Clone ID: LIB3072-035-Q1-E1-B1
tttgggctgatttatgtgcttgtttatgtgcttgtttatgtgcttgcatggccgtgagaagatgatagaagggcatggtcgtgagaagatgatagaagggcatggtcgtgagaagatgatagaagggcatggtcgtgagaagatgatagaagggcatggtcgtgagaagatgatagaagggcatggtcgtgagaagatgatagaagggcatggtcgtgagaagatgatagaagggcatggtcgtgagaagatgatagaagggcatggtcgtgagaagatgatagaagggcatggtcgtgagaagatgatagaagggcatggtcgtgagaagatgatagcagggcatcgtcgtgagaagatgatagaagggc

SEQ ID NO: 1391 - DNA, 398 bp, Glycine max
  Clone ID: LIB3072-035-Q1-E1-B10
ctttgggctgattgatgtgcttgcatggtcgtgagaagatcatagaaggggaactctcctatagaagaaaaaagagaagaagacgggggcgaagaataatacggcggcgtcaaaggcgcgcccggcgtcatccccttccgcggggggcatcatcagcgttaatccgaggtcgagcaagtccggttcgtctacgaaaagcgactactactaatatctaaacgacggcgagctcctaaaattacgtcgcgactaacgtgtacgtataaagctcaatttcttctaacgttgtcgcctacacacgatgtcgaacctgcgttacctactccgtaaactccgcacacctgtaccactgcacttcgtatagcgcccccgcgcccatacaattcaccctcgtcacc

SEQ ID NO: 1392 - DNA, 301 bp, Glycine max
  Clone ID: LIB3072-035-Q1-E1-B11
gagacgatacaagggggacggccaccctaccgaggagaaagtagaagaagcgggaacgtaaaactccaaaacgtggatatagaaaggcccgctaaagaaaaaaaagccaaaagaaagaaacaatgaacccgtagacgaagggaaaaaatagaaaaaagagaaagcacaagtaccagtagacacagaaatcttaaagaaaaggagcaagaagagatagcaaaccagcacacccaaggaaccagcatccaaattacaaccctcgagcatagaaagtacacccccgaagagaacaagagaggca

SEQ ID NO: 1393 - DNA, 444 bp, Glycine max
  unsure at all n locations
  Clone ID: LIB3072-035-Q1-E1-B2
ttggctccgaacctttgggctgatttatgtgcttgtttatgtgcttgcatggtcgtgagaagatcatagaagggcatggtcgtgagaagatgatagaaggggtacgacgacctcgggaaaaaaaaaaaaaaaaaaaaaaaaaaaaaagtggttgtctcagaggacttaagtccatgcatgtgcgtacgtgatgctacagtctcctcacagcgctattcaaacctaacctatcggttgctgccccataatgctgcgatcgggaaaatttcggtgccatttaatccaactgttccgtagtatactttttccctgttagtcggtgcaacagtgaagaggtttgtattgactgtttcctttaatagccgtgtagttcgaacggtgaacgggatgtgtttcgcaatggtgtaccaagtgtggtggncgcggcggccatgtgtaatgcga

SEQ ID NO: 1394 - DNA, 510 bp, Glycine max
  Clone ID: LIB3072-035-Q1-E1-B3
tggcttggaacctttgggctgatttatgtgcttgatggtcgtgagaagatgatagaaggggacctatataatcaatcaagaaagctccttacagtgtttttaaaaacgaagagtattactcctcccgtctctccctctccccgcgttcctattattctacattcattcctagttactgtcgaccctgcgtctgacaacgaaggcaatttctccgaaaacggcggtatacaccacactccgctagatacaatagtacccggcggaacaagagtagttttaatgggaaacgaaagacgtttctctatcgcggcgtaactctgtaacgagtctgataaagggaccggaataactactctgcttttacactgaacttgccccactgttgaaggttacttcccgagttccaagcctgacctacccgtagccacaacgtcgcgcgccggaaccttcgttgagcggctccgcgcggaagactcattagaaagattcgtcgctaaaaaccgcgagaat

SEQ ID NO: 1395 - DNA, 491 bp, Glycine max
  Clone ID: LIB3072-035-Q1-E1-B5
aacctttgggctgatttatgtgcttggtgagaagatgatagaaggggatctcatccatcaagaaagctccttacagttttggaaaagcgaagagtattactcctcccgtctctccctctccccgcgttcctattattctacattcattcctagttactgtcgaccctgcgtctgacaacgaaggcaatttctccgaaaacggcggtatacaccacactccgctagatacaatagtacccggcggaacaagagtagttttaatgggaaacgaaagacgtttctctatcgcggcgtaactctgtaacgagtctgataaagggaccggaataactactctgcttttacactgaaacttgcccactgttgaaggttacttcccgagttccaagcctgacctacccgtagccacaacgtcgcgcgccggaaccttcattgaagcgctcgccgcggaggactcattggaaggattccgtcgcaaaaccggcgagaat

SEQ ID NO: 1396 - DNA, 424 bp, Glycine max
  Clone ID: LIB3072-035-Q1-E1-B6
ctttggtctgatttatgtgcttgcatggtcgtgagaagatgatagaccgggatttactaacagtaaaacgattaagccgatagggtcttctactctctcggctcgtcgtactgtttatatccgtagtgttcttaaacggtagtattagtaagacagtcgttgtacgtagtcttagggggcgaattctatgtttcgtcagaagtatactacggagaacacttaaggttgtggtgacgatgacgacgacgacgatgatgataactatacctctaggattacgtggcgaagaactaatcatacaaggaggaatgaaggaaacgatgaagatcaacgagaagaaggatatacgtagaagcgtcgtatagaaacgagtgagtcgagaagttttaaacgttagcgtaaagtgtcgtaggaagacaacgga

SEQ ID NO: 1397 - DNA, 236 bp, Glycine max
  Clone ID: LIB3072-035-Q1-E1-B7
cgttcatatcatagaccctctccttcaccaaaaagtcgctactggtatgctagaccgaaatggtgcgtgctctatacacactcgtcctatcgtatctactagtcgcataatcattacaacctactgtccactctctctcagacaacagacgccatttttactcaaacgattatatacaccacacctcggtagatactatagtcccagacaggatacaagtacctttaatagtaaac

SEQ ID NO: 1398 - DNA, 429 bp, Glycine max
  Clone ID: LIB3072-035-Q1-E1-B8
ttgggctgatttagtgcttgcatggtcgtgagaagatgatagaccgggattcctatttactaacattaaaacgatgaagtgcataacctcttctactgtctcctctcctactgtttatattcgtcgtgttcttaaacggtaatagtattagtaagagagtcgttgtgagtagtctaaggggactaattctaattttcgcgagtataccacggagaagacttaagtcggttgttgtggtgaggatggtagtgatgaagactatacctctactacgattacgttgggaagaactaatcatactaggaagaacgaaggaaaagaagaagaagaaggatatacgtagaagcgtcgtagtgaaacgagtgagtcgaaaagttttacacgttaccgtaaagtgtcatagaggacaacggacaattagagtgagta

SEQ ID NO: 1399 - DNA, 419 bp, Glycine max
  Clone ID: LIB3072-035-Q1-E1-B9
tttgggctgattgatgtgcttgtttatgtgcttgtttatgtgcttgtttatgtgcccccatggtcgtgagaagatgatacacggggaagagtaatttccaattatagtagataatactgccctacacacagcgagcgagagaactcattactaattacgctcgacaccgtcacgccggcagtagaagaacacgagaggaggataacgaaccccaagaaggtcagtgtcgcataagagaggaatccgaatgcggccctccgcgtcctcccgccggcctcgaaggagaagaccgaggcgtagaagaaggagtccgctaagcgggccccggaatttaaaatttaacccgtaaccgtcgtccccaattaagcctcccctcgtccgaataaatccaatcccgtcggccgtaacagccggtcgcc

SEQ ID NO: 1400 - DNA, 429 bp, Glycine max
  unsure at all n locations
  Clone ID: LIB3072-035-Q1-E1-C1
aacctttgggctgatttatgtgcttgcatggtcgtgagaagatgatagaaggggatagtaaaaataaccaacaaagacgagcccgaagaataatacggcggcgtcaaaggcgcgcccgccgtcctccccttccgcgggggccatagtcgtatgtacggaatcgagtcctcctaaaagcgactagctactaagccacgacgacgacgagcacctaaaattacgtcgcgactctcgtacgcgtatatgtctaacgttcntctaacgtagtcgcgaagacaccaggtcgaacctacgttatctagaccgcaagagtcgcacgcgtatatgtctatagttaggatagcgctgccgctccgatattaatgatcctcgtcataaattccgtaagcttagagacgatcagaaaaatcaacagtctctctaaacgga

SEQ ID NO: 1401 - DNA, 478 bp, Glycine max
  Clone ID: LIB3072-035-Q1-E1-A2
aacctttgggctgatttatgtgcttgtttatgtgcttgcaggtcgtgagaagatgctacgaggggatagtaaaaataaccaacaaagacgagcccgaagaataatacggcggcgtcaaaggcgcgcccgccgtcctccccttccgcgggggccatagtcgtatgtacggaatcgagtcctcctaaaagcgactagctactaagccacgacgacgacgagcacctaaaattacgtcgcgactctcgtacgcgtatatgtctaacgttcttctaacgtagtcgcgaagacaccaggtcgaacctacgttatctagaccgcaagagtcgcacgcgtatatgtctatagttaggatagcgctgccgctccgatattaatgatcctcgtcataaattccgtaagcttagagacgatcagaaaaatcaacagtctctctaaacggatgaagttttcccaggtcccgaccggcacgccaggggag

SEQ ID NO: 1402 - DNA, 427 bp, Glycine max
  Clone ID: LIB3072-034-Q1-E1-G4
gaacccttgggctgatgtatgtgcttgcatggtcgtgagaagatgatagaagggtacaaaaacaataaaaaaaaaaaaaaaaaaaggggttgtgtcagaggacttaaggccatgcatgtgcgtacgtgatgctacagtctcctcacagcgctattcaaacctaacctatcggttgctgccccataatgctgcgatcgggaaaatttcggtgccatttaatccaactgttccgtagtatactttttccctgttagtcggtgcaacagtgaagaggtttgtattgactgtttcctttaatagccgtgtagttcgaacggtgaacgggatgtgtttcgcagtggtgtaccaagtgtggtgggcgccgcggccatgtgtagtgcgattgccatatccgttagtgtttcagtgtttgtcctccctgaccctc

SEQ ID NO: 1403 - DNA, 445 bp, Glycine max
  Clone ID: LIB3072-034-Q1-E1-G5
ggtcgtgagaagatgatagcaggggtcctatagtaaaaataaccaacaaagacgagccggaagaataatacggcggcggcaaaggcgcgcccgccgtcctccccttccgcgggggccatagtcgtatgtacggaatcgagtcctcctaaaagcgactagctactaagccacgacgacgacgagcacctaaaattacgtcgcgactctcgtacgcgtatatgtctaacgttcttctaacgtagtcgcgaagacaccaggtcgaacctacgttatctagaccgcaagagtcgcacgcgtatatgtctatagttaggatagcgctgccgctccgatattaatgatcctcgtcataaattccgtaagcctagagacgatcagaaaaatcaacagtctctctaaacggatgaagttttcccaggtcccgcccgccacgcccccccaaaag

SEQ ID NO: 1404 - DNA, 425 bp, Glycine max
  Clone ID: LIB3072-034-Q1-E1-G8
aacctttggtctgatttatgtgcttgcatggtcgtgagaagatcatagacggggacctatataatcaatcaagaaagcggcttacggttttttaaaaacggagagtagtactcctcccgtctctccctctccccgcgttcctattattctacattcattcctagttactgtcgaccctgcgtctgacaacgaaggcaatttctccgaaaacggcggtatacaccacactccgctagatacaatagtacccggcggaacaagagtagttttaatgggaaacgaaagacgtttttctatcgcggcgtaactctgtaacgagtctgataaagggaccggaataactactctgcttttacactgaacttgccccactgttgaacgttacttcccgagttccaagcctgacctacccgtagtcacaacgt

SEQ ID NO: 1405 - DNA, 411 bp, Glycine max
  Clone ID: LIB3072-034-Q1-E1-G9
accattgggctggatgatgtgcatgtttatgtgcttgtttatgtgcttgtttatgtccttgcaggtcgtgagaagatgatagaagcgcaaaaaaaaccacggggtaaggaaaaaaaaaaaaaaaaaaaaaaaaaagtggttgtctcagaggacttaagtccatgcatgtgcgtacgtgatgctacagtctcctcacagcgctattcaaacctaacctatcggttgctgccccataatgctgcgatcgggaaaatttcggtgccatttaatccaactgttccgtagtatactttttccctgttagtcggtgcaacagtgaagaggtttgtattgactgtttccattaatagccgtgtagttcgaacggtgaacgggatgtgtttcgcactggtgtaccaaatgtggtcgccg

SEQ ID NO: 1406 - DNA, 387 bp, Glycine max
  Clone ID: LIB3072-034-Q1-E1-H10
aacctttgggctgattgatctgcttgcatcgtcgtgagaagatcatagaaggggatcctaaaaataaccaacaaagacgagcccgaagaataatacggcggcgtcaaaggcgcgcccgccgtcctccccttccgcgggggccatagtcgtatgtacggaatcgagtcctcctaaaagcgactagctactaagccaccacgacgacgagcacctaaaattacgtcgcgactctcgtacgcgtgtatgtctaacgttcttctaacgtagtcgcgaagacaccaggtcgaacctacgttatctacaccgcaagagtcgcacgcctatatctctatagctaggatagcgctcccgctccgatattcatcatcctcgtcataaattccctac

SEQ ID NO: 1407 - DNA, 477 bp, Glycine max
  unsure at all n locations
  Clone ID: LIB3072-034-Q1-E1-H11
cttggctgttgagtgcatgctggtcgtgagaagaccatagaagggggcctcccgtgagacagaagagaaagttgctgtcgcttcagctctcctgcttttcggctttacgctagccctaggacggaactctaggcgaagtatgtttccgccgctaaagccacgggctgcatcgggctcagggggtggccgatctaggccagagcgaagcccccggacgactaaaattgatgtactacgaagaatgcgaagggatttgcgagagaaggagatacctctatttcatccgagctcgaaagagaagtaagaaggccgtgtcagaggactctcctacggcccggtctaagatccaaataaaatacctgccgccccgccgcagccaaaggacgctaaacgccaaccgctacggattcgaaccacgtattcatcacngccgataccacgttaccacgcccgcggtcgagccacgatcaaacccac

SEQ ID NO: 1408 - DNA, 437 bp, Glycine max
  unsure at all n locations
  Clone ID: LIB3072-034-Q1-E1-H12
gcatgtttatgtgcttgcatggtcgtgagaagatgccagnagggcatggtcgtgagaagatcataggagcgcatagtaaagataaccgacaaagacgagcccgaagaataatacggcggcgtcaaaggcgcgcccgccgtcctccccttccgcgggggccatagtcgtatgtacccaatcgagtcctcctaaaagcgactagctactaagccacgacgacgacgagcacctaaaattacgtcgcgactctcgtacgcgtatatgtctaacgttcttctaacgtagtcgcgaagacaccaggtcgaacctacgttatctagaccgcaagagtcgcacgcgtatatgtctatagttaggatagcgctgccgctccgatattaatgatcctcgtcataaattccgtaagcttagagacgatcagaaaaatcaacagtctc

SEQ ID NO: 1409 - DNA, 451 bp, Glycine max
  Clone ID: LIB3072-034-Q1-E1-H2
ggaacctttgggctgatttatgtgcttgcatggtcgtgagaagatgatagaagggggtgtatttagagaggaagtccagagagagagagagagagagagagagaggagagagcaccggtgtcctattaagacgggcaccctcagggaccttacgtataagaggtgcgttatcggcggtaagaaaaaggtccggagaaagaagagaaagcacgagtccgggtgctaggtagtaaatattaagccactaagtaataagataactaggaggacctgcgccagaggcggtaacgccaaacggagggtaccgaggtcggacatcggtaaccatctacggggcagcgaagtagccatctgtaagatctgcacctcagacgccgcccataacgttctaaataatgagtccgcgtgaatctagatttcggctaagagcgtcaccgcttaggccgacgtc

SEQ ID NO: 1410 - DNA, 476 bp, Glycine max
  Clone ID: LIB3072-034-Q1-E1-H3
ctttgggctgatttatgtgcttgtttatgtgcttgcatggtcgtgagaagatcatagaaggggatatccatcagcagcaagtgcggagcgtctaaagactcacgtccattttccttctcgtacgactccctctctccttgttatctttacctctggccgcggtcatcgcggtaaattttttaaaaagtataagttcggcaaaatattaaagatatttaaaatatttgccgccaagttattagctattactttctttaccaacgccttctttgccgcctccttattaacagcgaagtttttaggcacctctttcttaaccttaaccaccaatttattaattatattagggaagggagggaatatcttacgtttattattaaagttcctcgtgtaggtcatgcgttttaccgatatgtctaaatccggcgttcgcgcggactcctccggagggccggcctataccggccccggggggg

SEQ ID NO: 1411 - DNA, 388 bp, Glycine max
  Clone ID: LIB3072-034-Q1-E1-H4
ttgggctgatttatgtgcttgtttatgtgcttgggtcgtgagaagatgatcgaaagcaataaattaagtgtcaaaaattaaggtggttgtctcagaggacttaggtccatgcatgtgcgtacgtgatgctacagtctcctcacagtgctattcaaacctaacctatcggttggtgacccataatgatccgatcgggaaaatttcgatgccatttaatccaactgttccgtagtatactttatccctgctagtcggtgcaacactgaagaggtttgaattgactgtttcctttaatagccgtgtagttcgaacggtgaacgggatgtgtttcgcagtggtgtaccaagtatgtgtgtcgcagcggccatctatagttcgattgccatat

SEQ ID NO: 1412 - DNA, 179 bp, Glycine max
  Clone ID: LIB3072-034-Q1-E1-H8
atcggtcgtgcagaagatcatagcccggccccgtcgtgagaagatgatagaaggggatgggcgtgacaagatgatggaccggcatggtcgtcagaagatgatagaagggcatggtcgtgagaagatgatagaagggcatggtcgtgagaagatgatagacgggcatggtcgtcagaaga

SEQ ID NO: 1413 - DNA, 399 bp, Glycine max
  Clone ID: LIB3072-034-Q1-E1-H9
tcgtgagaagatgcatagaagggacccatataatcaatcaagaaagctccttacaagtttttccaaacgaagagtattgctcctcccgtctctccctctccccgcgttcctattattctacattcattcctagttactgtcgaccctgcgtctgacaacgaaggcaatttctccgaaaacggcggtatacaccacactccgctagatacaatagtacccggcggaacaagaataatttttaatgggaaacgaaagacgtttctctatcgcggcgtaactctgtaacgagtctgataaagggaccggaataactactctgcttttacactgaacttgccccactgttgaaggttacttcccgagttccaagctgacctacccgtagctacaacgtcgcgc

SEQ ID NO: 1414 - DNA, 507 bp, Glycine max
  unsure at all n locations
  Clone ID: LIB3072-035-Q1-E1-A1
aacctttgggctgatttatgtgcttgcatggtcgtgagaagatgatagaagggggcgaacaaacagaaaaaaaatgcagaaggaaggccaagatccaagagaggccgcagtaacgcctccccctcctgcgggagggccattgtaagagccgtggtaggcgtcgaaactcggcgcgggtaagcgtatgcgtcgtgttaataattgtgctgactctgctaatcatgataaggcctctaaatctcctcctgccttcgttgtttggaattgttgttgacctggtgctggtgaaggcctttggtgttccgtgtcgttgcccacgtgattgtgtggcggaggtcgatccttgacctcgttttcctcgcggtcttgaatcgcgaagagagacgcgctaagagaggccccgggaaaacccaaaaccaanaaanaaaaatccgaggcccaccagcgccccgccacgcataacatcacgactggaccaccccccggcgcagaaactgcaaaacaacc

SEQ ID NO: 1415 - DNA, 437 bp, Glycine max
  unsure at all n locations
  Clone ID: LIB3072-035-Q1-E1-A10
tggcttggaacctttgggctgattgatgtgcttgcatggtcgtgagaagatgatagaaggacatggtcgtgagaagatgatagaaggggggaaggagttggcatagtagtggaagtcgcagtccgggtagtgaactataacggtgagaggaccgaagaagtacccgaagaggtccaacgttttaaagtaccggacgtccgataaatcgggtggcgtacccgtcttcaagtttctactcggattatataaacttagggaacgttcgttatctacatctaccccgtgaaattggtcgaagcacgtctcgatacattgcgaagctaccgtcacctcgacgtagtgatacgcttcccgcgacggtaaagctaggatagataagatacacntcgtcggccctacggacgccgcactaactttcaaataaacgagaatccttg

SEQ ID NO: 1416 - DNA, 302 bp, Glycine max
  Clone ID: LIB3072-035-Q1-E1-A11
tgactgattgtagtgcttgcatggtcgtgcagagatcatacaaggaatagtacccctgaagcagaccgcgcagatccaaagaaggtccaccccaaaaaaaacgggaggaatatcaccggagccacgaccacgactacgctcacgccacggcctgtataagtcaacaaccataactccttacccgcgtaagccgagctaactagcgagatcaacacatccatccgcttataagtacgtccagcataacgcgtagtcccagtattagccgaattacggcacgataaacgcgccaaagaacgtat

SEQ ID NO: 1417 - DNA, 197 bp, Glycine max
  Clone ID: LIB3072-035-Q1-E1-A12
acacactcccgtgaaagacgcccatagtgtctaattaaagacgtccaatgaggaacgatatactatcgagtcccataccttcagcaaccgtcttgctataaatagacccaccattcccaacgattacctcctggcctacactaataccccctacgctcaccacaacggtgcccataacggttaccctcatatccccg

SEQ ID NO: 1418 - DNA, 385 bp, Glycine max
  Clone ID: LIB3072-034-Q1-E1-G3
gaacccttgggctgatttatgtgcgtgtttatgtgcttgcatggtcgtgagaagatcatagaccggacctgacctctctcgtatctagcctcagggcccctctcgtgtgacaagtaactacggtggacgaaatattaaacgagacgaaggaggaggccttagaaaccgccttccccgacttcattaaaaaaaaaaaaaaaaacaaaaaaaaaaaagtggtttctcagaggacttaagtccatgcatgtgcgtacgtgatgctacagtctcctcacagcgctattcaaacctaacctatcggttgctgccccataatgctgcgatcgggaaaatttcggtgccatttaatccaactgttccgtagtatactttttccctgttagtc

SEQ ID NO: 1419 - DNA, 459 bp, Glycine max
  Clone ID: LIB3072-034-Q1-E1-F1
tgggctgatttatgtgcgtgtttatgtgcttgcatggtcgtgagaagatcatagaccgggatagtacccccgaagcagcgggcgcggatccaaagaagagcgaagggagaaaaacaagacgaatatcaccggagccacgaccacgactacgctcacgccagggcctgtataagtcaacaaccataacttcttacccgcgtaagccgagctaactagcgagatcaacagatccatccgcttataagtacgtagagcataacgcgtagtcccagtattagccgaattacggcacgataaacgcgccaaagaacgtatcgtaaaccgcaagtacgacgcgcttgccgtcaacgaccgtcccatcagccgcgttccaactaagcttaccaatactaataacgacgcctgcgaatccctgattaacaccgcgacgaaccctcgtccgtaagaacgctaaaataa

SEQ ID NO: 1420 - DNA, 456 bp, Glycine max
  Clone ID: LIB3072-034-Q1-E1-F10
tcgtgagaaatgatagaaggggaacccaagctaccgagggacgttccctctccttcaataaacagcccccgcttttacgaacctcctctttatccgcctaccaataagcaatacaaataaacacccctaaccacaattaaaaaccgaaatcagacccgtataaaacgaaattaaactcgaagacggccctctctcttcttcccctaacggtggcctgtggcaagcgcaggtataatactgacgacgaaaattagcgcgtgatgactccgtccgacgggcgtacgatcgctacgtccgacgtttactttccatcaaattaaataatcgtaagttaccgctactagccgcctcgccagacttcagccccagctagactcagcccccaccgccgtgacgcgggccccctactggtgatagcgtgatatttcggcctgccccgcgcagactcaacccgcc

SEQ ID NO: 1421 - DNA, 483 bp, Glycine max
  Clone ID: LIB3072-034-Q1-E1-F12
tgggctgattgatgtgcatgtggtcgtgagaagatgatcagaggggtcatcctctccccccatatcaagcccccaccctaggagaggacatgtgagcgagaacgcgtgaaatggcgccggaacccgcgactcggcgagttacgaacgtcagaagagacggctgtaataatagagccgtctcccccgacggcaccgaggagggcggtactagagtactgctctcccaccttctaagcctcctttacgaaaccgacgaatacgacaacgaataagtaccggacggaccgtaagacagagctaactcgtccaaaagaccgctaggcgacacaaacgaggaagcggacagctacaattggacgtcggactgcacgggaaacgacacggacctcctgagaggagcttctctaggtatcacggacaaacctaaaacggcacccgagataaaactagttgaagaacgcccctatccgcagtacttcccgg

SEQ ID NO: 1422 - DNA, 154 bp, Glycine max
  Clone ID: LIB3072-034-Q1-E1-F2
ggctgatttatgtgcgtgcatggtcgtgagaagatcatagaccggcatcgtcgccagaagatgatagaagggcatcggcgtgagaggatcatacaagggcatcggcgtcacagatgatagaagggcatggtcgtcagaagatgatcgaacggca

SEQ ID NO: 1423 - DNA, 446 bp, Glycine max
  Clone ID: LIB3072-034-Q1-E1-F3
gggctgatttatgtgcgttggaagatgatagaagggcatggtcgtgagaagagatacaaggctggtcgtgagaaagggagaagccatcgtcgtgagaggatgatggaagggggaggtgaacttccattaccgtctgagacgggcgaagaagcgaaggttgtggccttagagctcgccccgaagaactagaagagagaggaggaacgggtgccggttaagaagtaggattctgaggtcgtgaagaagaagagagttgagagttgtaaatctactcataatagagtcaagtagcatgtcaaggagcatgactattagcagaaggaaccgacctggccgaaatgtgacgttaagtcgaaaggcggacctcacgctgacttacatgtccagtctcccgccaccgcctgtacttgcggcaccaacgttaccgattttaaactaaggaagac

SEQ ID NO: 1424 - DNA, 435 bp, Glycine max
  Clone ID: LIB3072-034-Q1-E1-F4
gaacctttgggctgatttatgtgcttgtttatgtgcttgtttatgtgcttgtttatgtgcttgcatggtcgtgagaagataatagaggggaagagattataaagagatgacggcgaatataaaaaaaaaaaaaaaaaaaaaaaaaaaaaagtggttgtctcagaggacttaagtccatgcatgtgcgtacgtgatgctacagtctcctcacagcgctattcaaacctaacctatcggttgctgccccataatgctgcgatcgggaaaatttcggtgccatttaatccaactgttccgtagtatactttttccctgttagtcggtgcaacagtgaagaggtttgtattgactgtttcctttaatagccgtgtaattcgaacggtgaacgggatgtgtttcgcagtggtgtaccaagtgtggtggccgcggcggcca

SEQ ID NO: 1425 - DNA, 468 bp, Glycine max
  Clone ID: LIB3072-034-Q1-E1-F5
tggctctggaacctttgggctgatgtatgtgcttgcatggtcgtgagaagatgatagaaggggacgaagaggatgaggatagcgataacgacgacgacgaagacgcggcggtaccgatgaagctatttaagaagtactaccgatgatgcgcctcaacacactacgccgccgcctcgccctaggtccttacgcgccggaagtagggaaattcttctagcccagacagaagaatgacggccagcccccaggaacccagtctctctacgaatagaggatacaccagggaaaaaaaagaaccgcacgccgggcggaaacacgcccagcctaaaaagctgccagcgcccccctttctccgttccctatacacagttgccatctcaccaaaacacctaaacggtagccactagaggcccattgtctagctacgcgtctgacgccggctcggcgccggtccgcaaaggaatcggc

SEQ ID NO: 1426 - DNA, 471 bp, Glycine max
  Clone ID: LIB3072-034-Q1-E1-F7
aacctttggtctgatgtatgtgcttgcatggtcgtgagaagatcatagaaggggacctacgtagtcgaacaaccaagaagaagttagccttacactagttcgaggaaagggaagagtatcagtccgcctgtcactccctcatcccgtgttcctattctacgttcattccttgttattgtttaggatgcgtctgatgcggacggtgacttgacctggaatggccctacacatcatgccccgttggtaacaagaggaaatggcggtggaacagaatgagttatatctgggaaagatatccgtttcactatcgcagcgtaactctttaacttaaatctcaaggggccagaaaccaagcccgaactcgtacattttgttcaccatacaaatgaaatttcaaccccgtaaacaaagcctagccatttatagtagcgcgaaagaaagaacttccggcgggttaccctcaaaaagggg

SEQ ID NO: 1427 - DNA, 408 bp, Glycine max
  Clone ID: LIB3072-034-Q1-E1-F8
aacctttggtctgatgtatgtgcttgcatggtcgtcagaagatcatagacggggccactatatatatagacatagttgggcacaagcattcctgaacccgagcccgcgcccctcttctctatatacgacagacaggacccctcctcgtcattcctaaaaatactatactaagaagtaacaatatttttcaacatgagccaggcgagcctctagcctaatctactgcgcataaaaaaaaaaaaacaaaacaaaaaaaaaaagtggttgtctcagaggacttaagtccatgcatgtccgtacgtcatgctacagtctcctcacagcgctattcaaacctaacctatcggttgctgccccataatgctccgatcgggaaaatttcgctgccatttaatccaactgttccgt

SEQ ID NO: 1428 - DNA, 243 bp, Glycine max
  Clone ID: LIB3072-034-Q1-E1-F9
ggacacacatacacaaaaaaaaacagaacttatcaacaccgatacactagaacacgcacaacaacaaagaaccacaaaatataattacactcatatcacttaactacatccatcttaatccataattacgaactcacctcacacctttaattaatacaaaactatcagatcacataccataatcctacaatctgaaaaatttctatacacttcacatcaactattccgtaatatactttttcc

SEQ ID NO: 1429 - DNA, 487 bp, Glycine max
  Clone ID: LIB3072-034-Q1-E1-G1
tggaacctttgggctgatttatgtgcttgcatggtcgtagaagatgatagaagggacactaacaagtggaggaaaaaaaaaaaaaaaaagaaaaggaaaaaagtggttgtctcagaggacttaagtccatgcatgtgcgtacgtgatgctacagtctcctcacagcgctattcaaacctaacctatcggttgctgccccataatgctgcgatcgggaaaatttcggtgccatttaatccaactgttccgtagtatactttttccctgttagtcggtgcaacagtgaagaggtttgtattgactgtttcctttaatagccgtgtagttcgaacggtgaacgggatgtgtttcgcagtggtgtaccaagtgtggtgggcgcggcggccatgtgtagtgcgattgtcatatccgttagtgtttcagtgtttgtcttccctgtccctcctttccttccctctgttatgcctgttggggttttccccccccc

SEQ ID NO: 1430 - DNA, 333 bp, Glycine max
  unsure at all n locations
  Clone ID: LIB3072-034-Q1-E1-G10
gcatgcatggtcgtgagaagatcatagaaggggatcctaaaaataaccaacaaagacgagcccgaggaataatacggcggggtcaaaggcgcgcccgccgtcctccccttccgcgggggccatagtcgtatgtacggaatcgagtcctcctaaaagcgactagctactaagccacgacgacgacgagcacctaaaattacgtcgcgactctcgtacgcgtatatgtctaacgttcctctaacgtagtcgcgaagacaccaggtcgaacctacgttatctagaccgcaagagtcgcacgcgtatatgtctataantaggatagcgctgccgctc

SEQ ID NO: 1431 - DNA, 446 bp, Glycine max
  Clone ID: LIB3072-034-Q1-E1-G11
tgggctgagtgatgtgcttgcatggtcgtgagaaggatagaagggcatggccgtgagaagatgatagaagggcatggtcgtgagaagatgatagaggggcatggtcgtgagaagatgatagaagggcatggtcgtgagaagatgatagaagggcatggtcgtgagaagatgatagaagggcatggtcgtcagaagatgatagaagggcatggtcgtgagaagatgatagaagggcatggtcgtgagaagatgatagaagggcatggtcgtgagaagatgatagaagggcatggtcgtgagaagatgatagaagggcatggtcgtgagaagatgatagaagggcatggtcgtgagaagatgatagaagggcatggtcgtgagaagatgatagaagggcatggtcgtgagaagatgatagaagggcatggtcgtgagaagatgatagc

SEQ ID NO: 1432 - DNA, 456 bp, Glycine max
  Clone ID: LIB3072-034-Q1-E1-G12
ttgggctgattgatctgcatgcatggtcgtggaaatgatcagaggggatagcccaaaataaccaacaaagacgagcccgaagagatatacggcgacgtgcaaaggggcgcccgccgtcctccccttccgcgggggccatagtcgtatgtacggaatcgagtcctcctaaaagcgactagctactaagccaccacgacgacgagcacctaaaattacgtcgcgactctcgtacgcgtatatgtctaacgttcttctaacgtagtcgcgaagacaccaggtcgaacctacgttatctagaccgcaagagtcgcacgcgtatatgtctatagttaggatagcgctgccgctccgatattaatgatcctcgtcataaattccgtaagcttagagacgatcagaaaaatcaacagtctctctaaacggatgaagttttcccaggtcccgcccgccacgcca

SEQ ID NO: 1433 - DNA, 440 bp, Glycine max
  unsure at all n locations
  Clone ID: LIB3072-034-Q1-E1-G2
gggctgatttagtgcttgcatggtcgtgagaagatgatagaaggggaatgcaaaaaaaaaaagaacaacaaacagaagaaggaggacgccgaccacacagaaagcaaagggtaataactacccccgcccattacgggcaaggatattactgtcgatacaacaattcacacaagaaacgtcgatacgaacaaaaaaggaacggcctaaacattacccatcaatacaatagaaaataccgcaaaaacatccccatgtgagggccccgccgaaaatgctagaaaatacagagaaaatgataaacaccccccagccccaatctcatggcacagaagaaacagaaaaggactacacaaaagccccccaaacccaaaatggactagcatatttggctcatgaacacacctcaaccactaatgaacnttctgaaccccaaggggtac

SEQ ID NO: 1434 - DNA, 457 bp, Glycine max
  Clone ID: LIB3072-034-Q1-E1-E9
tgggctgattgatgtgcttgcatggccgtgagaagatcatagaagggcatcctcgtgagaagatgatagaagggcatggtggggagaagatgatagaagggcgtggtcgtgagaagatgatagaagggcatggtcgtgagaagatgatagaagggcatggtcgtgagaagatgatagaagggcatggtcgtgagaagatgatagaaggggacaaaaagccagagacggtcctcctaagccccccacgctcgcgcccgacgcccgtccccgccgcggtccgtcccgtctgcggtacctttatagattaattatttgcgtctcatggagatatatataagaacttactcatcctaaataccgagtactactaacggctgggagataaagccatatattttaaccctaatttacgctaagcctctaagccctatagagaacctagaaaggacatcgatag

SEQ ID NO: 1435 - DNA, 364 bp, Glycine max
  Clone ID: LIB3072-034-Q1-E1-D4
ttgggctgatttatgtgcttgcatggtcgtgagaagatcatagacggggatagtaaacataaccaacaaagacgagcccgaggaatagtacggcggcgtcaaaggcgcgcccgccgtcctccccttccgcgggggccatagtcgtatgtacggaatcgagtcctcctaaaagcgactagctactaagccacgacgacgacgagcacctaaaattacgtcgcgactctcgtacgcgtatatgtctaacgttcctctaacgctatcgcgaagacaccaagtcgaacctacgttatctagaccgcaagagtcgcacgcgtatatgtccatagctagcgatagcgctgccgctccgatattaatgatc

SEQ ID NO: 1436 - DNA, 474 bp, Glycine max
  unsure at all n locations
  Clone ID: LIB3072-034-Q1-E1-D5
tggcctggaacctttgggctgatttatgtgcttgtttatgtgcttgtttatgtgcttgtttatctgcttgcatggtcgtgagaagatgatagaggggtaagaataatatcctcaggcccgccgcaaaggtcctagacgagttcgtagtggtggtatttgttattgttatatttttagtcgaagtcgaagtcaaattaaagttattattcaccggttttaagagaggcgtcaaggcgaagacctccaggaaggaactccatcggcataaaggtattggcctagcggccgtcgccgactaggattttaatatctgtcatttcgccgcggcctgacctaataaagctaatcacgttaacgcactaataaataatcacgtcccggacgagactgcggaagctgaacgaacttaatccaaccgcaaccccgacatccgctacgtcactgtagncatcatcagttcaaagacaccccccc

SEQ ID NO: 1437 - DNA, 472 bp, Glycine max
  Clone ID: LIB3072-034-Q1-E1-D6
tggcctggaacctttgggctgatttatgtgcttgtttatgtgcttgcatgggtgagaagatgatagaaggggtcgtaatcgaacaaccaagagaggttacccttacagtagttcaagaaaacgaagagtatcagtccgcctgtcactccctcatcccgtgttcctattctacattcattccttggtattgattaggatgcgtctgatgcggacggtgacttgacctggaatggccctacacatcatgccccgttggtaacaagaggaaatcgtggtcgaacagaatgagttgcatctgggaaagatatccgtttcactatcgcagcgtaactctttaacttaaatctcaaggggccagaaaccaatcccgaactcgtacattttgttcaccatacacatgaaatttcaaccccgtaaacaaagcctagccatttataataccgcgaacgacagaacttccggcgggttaccc

SEQ ID NO: 1438 - DNA, 459 bp, Glycine max
  Clone ID: LIB3072-034-Q1-E1-D8
aacctttggtctgatttatgtgcttgcatggtcgtgagaagatcatagaaggggacttaacttaaccgaacctcttagagagaaggggaaatccaactgagtactatgctatcctatcaacatactacggtagatgagatttagaataagcacgagagtctcgaggccgaggcttaggactgcggcgcccccgatccctctggcaagaaaaaggacgaagaagataagttctacttctaggaggaggctactgttattgagccctaaaaagctatcgctctagattaaggagagaataagtatagttctccagaaaagtcctattgactcgatagtagtctcagtctcctaagcgaggaggaaggagaagacggagagaaaaggaagaagaagaagacggaaaagaaagggtcgaaagagaagactgaggagaaaacagaaggcgactactactactat

SEQ ID NO: 1439 - DNA, 484 bp, Glycine max
  Clone ID: LIB3072-034-Q1-E1-D9
aacctttgggctgattgatgtgcttgcatggtcgtgagaagatcatagaaggggatcctaaaaataaccaacaaagacgagcccgaagaataatacggcggcgtcaaaggcgcgcccgccgtcctccccttccgcgggggccatagtcgtatgtacggaatcgagtcctcctaaaagcgactagctactaagccacgacgacgacgagcacctaaaattacgtcgcgactctcgtacgcgtatatgtctaacgttcttctaacgtagtcgcgaagacaccaggtcgaacctacgttatctagaccgcaagagtcgcacgcgtatatgtctatagttaggatggcgctgccgctccgatattaatgatcctcgtcataaattccgtaagcttagagacgatcagaaaaatcaacagtctctctaaacggatgaagttttcccaggtccccgccgccacgccaggggagataaacaaaataagaaa

SEQ ID NO: 1440 - DNA, 227 bp, Glycine max
  Clone ID: LIB3072-034-Q1-E1-E1
agcgacggaccacaaaaaaataccaacaataccaaaccgaacaaaaaaccacgcaccaccccaaaaaggtgccgtggtctcacacgacttaagtccatcaatctccgtacgtaatcctacactctcctcacagcgctattcaaacctaacctatcgcttgcccccccataatcaccacatccgcaaaatttccatgccatttaatcccaactcctccctaatatacc

SEQ ID NO: 1441 - DNA, 418 bp, Glycine max
  Clone ID: LIB3072-034-Q1-E1-E10
ctttgggctgattgatgtgcttgcatggtcgtgagaagatcatagaaggggatcctaaaaataaccaacaaagacgagcccgagggataatacggcggcgtcaaaggcgcgcccgccgtcctccccttccgcgggggccatagtcgtatgtacggaatcgagtcctcctaaaagcgactagctactaagccacgacgacgacgagcacctaaaattacgtcgcgactctcgtacgcgtatatgtctaacgttcttctaacgtagtcgcgaagacaccaggtcgaacctacgttatctagaccgcaagagtcgcacgcgtatatgtctatagttaggatagcgctgccgctccgatattaatgatcctcgtcataaattccgtaagcttagagacgattaaaaaaaaaaacaacaacac

SEQ ID NO: 1442 - DNA, 422 bp, Glycine max
  Clone ID: LIB3072-034-Q1-E1-E11
ttggctgatgattgctgctggtcgtgagaatgatcagagggggtatcctaaccgtaactaaaccagcctacctctccggtgtagcctttcattctcttcgctaagacgtagactcctgctaagatttctattggaaagattactatttccgaggcggaaagtctcgatattactgataatgctaaggttaagacttaggataaggaaggaacctttttggactagtaatgctctactcctgttggaaagtagtctgaggatggttgcatttctgttgatcataatacttagaaggagctaatttcctattccgcttcctgctcttgcggcggtacgtagactcctgctaagatctctatcggtaaaattacaatttcagaagctgaaagtctcgatattaccgataatgctaaggttaagac

SEQ ID NO: 1443 - DNA, 411 bp, Glycine max
  Clone ID: LIB3072-034-Q1-E1-E2
gggctgatttatgtgcttgcatcgtcgtgagaagatcatagtacgggatagtaaacataaccaacaaagacgagcccgaggaatagtacggcggcgtcaagggcgcgcccgccgtcctccccttccgcgggggccatagtcgtatgtacggaatcgagtcctcctaaaagcgactagctactaagccacgacgacgacgagcacctaaaattacgtcgcgactctcgtacgcgtatatgtctaacgttcttctaacgtactcgcgaagacaccaggtcgaacctacgttatctataccgctagagtcgcacgcgtatatgtctatagctaggatagcgctgccgctccgatattaatgatccccgtcataaattccgtaagcttaaacacgatcagaaaaatcaacagtct

SEQ ID NO: 1444 - DNA, 466 bp, Glycine max
  Clone ID: LIB3072-034-Q1-E1-E3
ggctgatttatgtgcgtgcttatgtgcttgatggtcgtgagaagatgctagaacgcgatagtaaaaataaccaacaaagacgaggccgaacaataatacggcggcgtcaaaggcgcgcccgccgtcctccccttccgcgggggccatagtcgtatgtacggaatcgagtcctcctaaaagcgactagctactaagccacgacgacgacgagcacctaaaattacgtcgcgactctcgtacgcgtatatgtctaacgttcctctaacgtagtcgcgaagacaccaggtcgaacctacgttatctagaccgcaaaagtcgcacgcgtatatgtctatagttagcatagcgctgccgttccgatattaatgatcctcgtcataaattccctaagcctagagacgatccgaaaaatcaacagtctctctaaacggatcaacttttccccaggtcccgcctgccccaaaac

SEQ ID NO: 1445 - DNA, 490 bp, Glycine max
  Clone ID: LIB3072-034-Q1-E1-E4
gaacccttgggctgatttatgtgcgtgtttatgtgcttgcatggtcgtgagaagatgatagaaggggaaaaacaaaaaaaaataaaggaaaaaaaaaaaaaaaaaaaggaaaagtggttgtctcagaggacttaagtccatgcatgtgcgtacgtgatgctacagtctcctcacagcgctattcaaacctaacctatcggttgctgccccataatgctgcgatcgggaaaatttcggtgccatttaatccaactgttccgtagtatactttttccctgttagtcggtgcaacagtgaagaggtttgtattgactgtttcctttaatagccgtgtagttcgaacggtgaacgggatgtgtttcgcagtggtgtaccaagtgtggtgggcgcggcggccatgtgtaacgcgattgtcatatccgttagtgtttcagtgttttgccttccctgtcccctcctttccctcccctccggttatggcgcccccccc

SEQ ID NO: 1446 - DNA, 486 bp, Glycine max
  Clone ID: LIB3072-034-Q1-E1-E5
tggctctggaacctttgggctgatgtatgtgcttgtttatgtgcttgcatggtcgtgagaagatgatagaagggcatggtcgtgagaagatgatggaagataaaaaaaagaaaaaagaaaaaaaaaaaaaagtggttgtctcagaggacttaagtccatgcatgtgcgtacgtgatgctacagtctcctcacagcgctattcaaacctaacctatcggttgctgccccataatgctgcgatcgggaaaatttcggtgccatttaatccaactgttccgtagtatactttttccctgttagtcggtgcaacagtgaagaggtttgtattgactgtttcctttaatagccgtgtagttcgaacggtgaacgggatgtgtttcgcaatggtgtaccaagtgtggtgggcgcggcggccatgtgtaatgcgattgtcatatccgttagtgtttcaatgttttggcttccctgttccccccctttcccccc

SEQ ID NO: 1447 - DNA, 392 bp, Glycine max
  Clone ID: LIB3072-034-Q1-E1-E6
gaacctttgggctgatttatgtgcttgcatggtcgtgagaagatcatagaaggggacttaatatagttctattaatattatgtattagtattataataaacagcgaccgagaggaccgcctacttctaataatcaaacacctcagcgatacgacggaggaatacgacgataaagaaggggctacgagatattcctccgaagtcctcgacgacgaatccgggaccttaaacaaagaggacgaactatctgactccggcgaagacgggcctaagcctaatggcggagatacgcccctcctaacccgcgacggcccgccgcgggagtccgaacacgaagtcgtcactcatcacgactcccccgtagctccaatccccctctcaagccaccccccc

SEQ ID NO: 1448 - DNA, 196 bp, Glycine max
  Clone ID: LIB3072-034-Q1-E1-E7
aaatgataagcggaaatacaaggcgacggaaaaaaaaaaaaaaaaaaaaaaaaaaaaaaaaaaaaaaaaaaaaaaaaaaaaaaaaaaaacaaaaaaaaaaaaaaaaaaaaaaaataaacaaaaaaaaaaaaccaaaaaaaaaaacatccatccccaaaaaaaaaaaatccaacaaataacaacaccaacccaaaaa

SEQ ID NO: 1449 - DNA, 457 bp, Glycine max
  Clone ID: LIB3072-034-Q1-E1-E8
aacctttggtctgatttatgtgcttgcatggtcgtgagaagatcatagaaggggccagtaaaaataaccaacaaagacgagcccgaggaataatacggcggcgtcaaaggcgcgcccgccgtcctccccttccgcgggggccatagtcgtatgtacggaatcgagtcctcctaaaagcggctagctactaagccacgacgacgacgagcacctaaaattacgtcgcgactctcgtacgcgtatatgtctaacgttcttctaacgtagtcgcgaagacaccaggtcgaacctacgttatctagaccgcaagagtcgcacgcgtatatgtctatagttaggatagcgctgccgctccggtattagtgatcctcgtcataaattccgtaagcttagagacgatcagaaaaatcaacagtctctctaaacggatgaagttttcccaggtcccgcccgccac

SEQ ID NO: 1450 - DNA, 429 bp, Glycine max
  Clone ID: LIB3072-034-Q1-E1-D3
tgatttatgtgcttgcatacgatgatagaacgcgatagtaaaaataaccaaccaagacgagcccgaagaataatgcggcgagctcaaaggcgcgcgggccgtggtccccttccgcgggggccatagtcgtatgtacggaatcgagtcctcctaaaagcgactagctactaagccacgacgacgacgagcacctaaaattacgtcgcgactctcgtacgcgtatatgtctaacgttcttctaacgtagtcgcgaagacaccacgtcgaacctacgttatctacaccgcaagaatcgcacgcgtatatgtctatagttaggatagcgcttccgctccgatattaatcatcctcgtcataaattccgtaagcttagagacgatcacaaaaatcaacagtctctctaaacggatgaaattttccccagtcccg

SEQ ID NO: 1451 - DNA, 466 bp, Glycine max
  unsure at all n locations
  Clone ID: LIB3072-034-Q1-E1-B9
tggcttggaacctttgggctgatttatgtgcttgtttatgtgcttgcatggtcgtgagaagatgatagaaggggacctcgcaaaattaaactaagagggaatagagaaagagagaggagaggtaccgcaactgcgattctctaagtcctccctaaagatagagaagaaagaagaaaataactctaataaatataaataaataagtaaatactaacggtaaatctgcacatgcggtttccttctgtgaccctcgttatttctccgtcctcctcgctcctgctgttgatagtggatgtgggagtgtcgggtacggaaacgatacggacatttcttacgtttacggaagaggagccttagtcggatagtgagactagttggtgtactccagttatgattaagcatactagtcatggcgtgtcgtagaggaatatcgcttttcgtctctgttgtggagttcntcatcata

SEQ ID NO: 1452 - DNA, 424 bp, Glycine max
  Clone ID: LIB3072-034-Q1-E1-C10
aacctttgggctgatttatgtgcttgcatggtcgtgagaagaccatagaaggggagcacgagaagaatccggttgagctctcacggagatattgccggtcactctcagtcaacgtcaccgacctagataagaacactaccgacctcagaacccgtaggacttcgcaaaccggctcacccctcgggcatttccccgccatcacaggcctcagccggattgcgacatacgatcaagattacggaccaacagcgtagagccatccctcatagcaccgtccggaacagaaacgctgcgttgatacacatcacgacacttatggctggttgacgcacacccagattgaaccccaacgaggctcccccaacacctatccaaaccacccgcagccgacgccccaaacgccccgaccgcgaagccacccacc

SEQ ID NO: 1453 - DNA, 467 bp, Glycine max
  Clone ID: LIB3072-034-Q1-E1-C11
tgggctgatttatgtgcttgcatggtcgtgagaagatcatagaagggcatcgtcgtgagaagatgatagaagggtagagtagccataaaaaaaaaaaaaaagggaaaaaaaaaaaagtggttgtctcagaggacttaagtccatgcatgtgcgtacgtgatgctacagtctcctcacagcgctattcaaacctaacctatcggttgctgccccataatgctgcgatcgggaaaatttcggtgccatttaatccaactgttccgtagtatactttttccctgttagtcggtgcaacagtgaagaggtttgtattgactgtttcctttaatagccgtgtagttcgaacggtgaacgggatgtgtttcgcagtggtgtaccaagtgtggtgggcgcggcggccatgtgtagtgcgattgtcataccgttagtgtttcaatgtttgtcttccctgtccctcctttccttcc

SEQ ID NO: 1454 - DNA, 422 bp, Glycine max
  Clone ID: LIB3072-034-Q1-E1-C2
tgggctgatttatgtgcttgtttatgtgcttgcatggtcgtgagaagatcatagaacgggacagtcgagagagaaagggagggccggtcaacaagtaacatcctaacggttatttccgccgcctacaattaaatcctcctcgtctaagacgtcgaggtctcttaataggtccctaaaggacggggggtcgacgataaggttaccacagtaacatcgggctatagaaacgcctactagaggtaagaaactagaaaagtccacgaggagacccattaagaggactctactaaatgttccgagcttgagactctcggcgatcccgagagagtcacgcattggcggacgccgtacttcgtggactgcgacgtcgccccggcgaacgcggtaactaataacgggattaaacatcactacgcgaccgt

SEQ ID NO: 1455 - DNA, 425 bp, Glycine max
  Clone ID: LIB3072-034-Q1-E1-C3
cttgggctgatttatgtgcttgcatggtcgtgagaagatgatagaaggggactgatacatacaagcatacgcccggaaccgcgctatagcgggccggggaaaacgggccttaaggtcccgtctgcctccgccacgcctccggtcctcgtttctacctccctcgtcgaagccgtttttaaaaacccggacgagaaccccgacgtaaagtacgcaggcgccgcggacataaacgaggcagacgaaaaaaaagacggccacgccagccggtgaagcggcgccttaccgtgccgcgtctacttccgtcgccaccggcattacggaaggtgcccaaagcatcgtcgtggcttcctcttcttaaaattctacaatcaagtaggaatccacgtcaagataagccggcgtaactatagctatcacgcacaaac

SEQ ID NO: 1456 - DNA, 449 bp, Glycine max
  Clone ID: LIB3072-034-Q1-E1-C5
tggcttggaacctttgggctgatttatgtgcttgcatggtcgtgagaagatgatagaagggggtagcctaaagtgaagaaagacctgaaatgaagaaagaaagtgccgcgaagaacggtggaagagggataagcgactggcgcttatagtgcagaggagcggaaggaatactctaagaagggagaagagcttaagaaaccgaccgcggcggaccccatcgtcctccggcgtggcttacgttgccctaccgttttaacctccgtagagcccgtcaaaaagccgttgaacgctattccttctaaggcggacgcggacgaaccggagatcgcccttaaggagcggggaaccgaggtcacgttaattccttcgcctccgaaagaaggtaagtcggcggataaggccgcgggcgttaagaaagaggagtcgtaaccgataacagttaaatacgt

SEQ ID NO: 1457 - DNA, 446 bp, Glycine max
  Clone ID: LIB3072-034-Q1-E1-C6
aacctttgggctgatttatgtgcttgcatggtcgtgagaagatcatagacggggacctatataatcaatcaagaaagctccttacggttttttaaaaacgaagagtattactcctcccgtctctccctctccccgcgttcctattattctacattcattcctagttactgtcgaccctgcgtctgacaacgaaggcaatttctccgaaaacggcggtatacaccacactccgctagatacaatagtacccggcggaacaagagtagttttaatgggaaacgaaagatgtttctctatcgcggcgtaactctgtaacgagtctgataaagggaccggaataactactctgcttttacactgaacttgccccactgttcaaggttactttccgggttccaagcctgacctacccgtagccacaacgtcgcgcgccggaaccttcattg

SEQ ID NO: 1458 - DNA, 356 bp, Glycine max
  Clone ID: LIB3072-034-Q1-E1-C8
cgtcagaagctcatagacggggcccactcactataactgaaagtaaagtcacacgagaccaccctttacactaagagaacgaaagctttcccccacccctttacttctgcgtccgccgctcctaccgtcctcggaaaataagcgtaaacgatagcggcattaaaccgcgcggcagaaagtccgctagcctaccgcgaaacacctaagaacttccgtcaatcctcccgttaataataccccggactatttgtagtatacggagtccgcggtaccaaaccttacgcacgcgcccgccacccacgccaaacacaaagcccaattacaataactatagtccccacattcacccaacaaca

SEQ ID NO: 1459 - DNA, 459 bp, Glycine max
  Clone ID: LIB3072-034-Q1-E1-C9
ctttgggctgatttatgtgcttgagatgatagaagggatgcccacttacctaacacatacactacatagctaaaaagccccttacaaccagaaacaaaatacgtttcacaggtcccattacgacaagaaccctactagcaaagtcatctctcggcttcaccacaacatagactctcgctcactcaatcggcaatcgatgctagatatcacccgacaaaaaaaatcaataaccaataatatccgtcaaaaaaaaaaaaaaaaaaaaaaaaaaaaaagtggttgtctcagaggacttaagtccatgcatgtgcgtacgtgatgctacagtctcctcacagcgctattcaaacctaacctatcggttgctgccccataatgctgcgatcgggaaaatttcggtgccatttaatccaactgttccgtagtatactttttccctgttagtcggtgcaacagtga

SEQ ID NO: 1460 - DNA, 456 bp, Glycine max
  Clone ID: LIB3072-034-Q1-E1-D1
tggaacctcttgggctgatttatgtgcttgcatgtgagaagatgatagaagggcatggtcgtgagaagatgatagaagggcatggtcgtgagaagaggatagaagggcatggtcgtgagaagatgatagaaggggaaaaacaagaaagaataataaaaagacataagaaaaaaggttgtctcagaggacttaagtccatgcatgtgcgtacgtgatgctacagtctcctcacagcgctattcaaacctaacctatcggttggtgccccataatgctgtgatcgggaaaatttcggtgccatttaatccaactgttccgtactataccttttccctgttagtcggtgcaacagtgaacaggtttgtattgactgtttccattaatagccgtgtagttcgaacggtgaacgggatgtctttcgcactggcgtaccaagtgtggtgggcgcggcggcca

SEQ ID NO: 1461 - DNA, 434 bp, Glycine max
  Clone ID: LIB3072-034-Q1-E1-D10
ctttgggctgatttatgtgcttgacctgagtggttgtctcagaggacttaagtccatgcatgtgcgtacgtgatgctacagtctcctcacagcgctattcaaaccgaacctatcggttgctgccccataatgctgcgatcgggaaaatttcggtgccatttaatccaactgttccgtagtatactttttccctgttagtcggtgcaacagtgaagaggtttgtattgactgtttcctttaatagccgtgtagttcgaacggtgaacgggatgtgtttcgcagtggtgtaccaagtgtggtgggcgcggcggccatgtgtagtgcgattgtcatatccgttagtgtttcagtgtttgtcttccctgtccctcctttccttccctctgttatgcctgttggtcccttttgctaagtctcaaactgggggtctttcc

SEQ ID NO: 1462 - DNA, 336 bp, Glycine max
  Clone ID: LIB3072-034-Q1-E1-D11
tttgggctgattgatgtgcttgcatggtcgtgagaagatgcatagaaggcatcctcgtgacaagatgatagaagggcatcgtggtgagaagatgatagaagggcgatacgagcaattacaaacttcgccaaaaaaaaaaaaaaaaaattaacataacgtagttgtctcaaaggacttaagtccattcatgtacgtacgtgatgctacactctcctcacagcgctattcaaacctaacctatcggtatatgccccataatgctaaaatcgcgaaaatttcgatgccatttaatccaacttttccgtagtatacgttatccctgttaatacttacaac

SEQ ID NO: 1463 - DNA, 462 bp, Glycine max
  unsure at all n locations
  Clone ID: LIB3072-034-Q1-E1-D12
aacctattgggctgattgatgtgcttgtttatgtgcttgcatggtcgtgagaagatgccangaggggaaaataaaaattactattaaagaaaaaaggaaaaaaaaaaaaagaaaagtggttgtctcagaggacttaagtccatgcatgtgcgtacgtgatgctacagtctcctcacagcgctattcaaacctaacctatcggttgctgccccataatgctgcgatcgggaaaatttcggtgccatttaatccaactgttccgtagtatactttttccctgttagtcggtgcaacagtgaacaggtttgtattgactgtttcctttaatagccgtgtagttcgaacggtgaacgggatgtgtttcgcagtggtgtaccaagtgtggtgggcgcggcggccatgtgtagtgcgattgtcatatccgttagtgtttcagtgtttgtcttccctgtccctcctttc

SEQ ID NO: 1464 - DNA, 381 bp, Glycine max
  Clone ID: LIB3072-034-Q1-E1-D2
tgggctgatttatgtgcgtgcatggtcgtgagaagtgatagacggggggagaacaccggggagaagacggccataccgcggacttggaagaaatatgggcggcccacggggagcgcgcgggacgaaccaccctgtcctacatttaattaaagaggaactacaaatatcggcgctcgtctgtgccaaaggctactgaagagccgactatctcttctcccgagttgcaaaggcctaacataatgagcgtccgcccctccagggataagtaccgcatccacgcacgacctcgcgcaattacgagctccttatgccgcatcaacgcgaaaggtaaaaacaaaatatagaataagcctgccccctctaaacaacgcgaacgtacca

SEQ ID NO: 1465 - DNA, 466 bp, Glycine max
  Clone ID: LIB3072-034-Q1-E1-B8
aacctttggtctgatttatgtgcttgcatggtcgtgagaagatgatagaagggcatcgtcgtgagaagatgatagaagggcatgggcgtgagaagatgatagaagggcgtggtcgtgagaagatgatagaagggcatggtcgtgagaagatgatagaaggggaaaatatgttggcgcaccgcacggatcagaggctcctcgctaaccataaaaaccaccaaagtacaaaaacaacaaaaacctacccgaccgaccgcaaaaaaaaaaaaaaaaaaaaaaaaaaaaaagtggttgtctcagaggacttaagtccatgcatgtgcgtacgtgatgctacagtctcctcacagcgctattcaaacctaacctatcggttgctgccccataatgctgcgatcgggaaaatttcggtgccatttaatccaactgttccgtagtatactttttccctgttagtcggtgcaac

SEQ ID NO: 1466 - DNA, 463 bp, Glycine max
  Clone ID: LIB3072-034-Q1-E1-A4
ttgggctgattttgtgcttgcatggtcgtgagaagatcatagaaggggatcagtaaacataaccaacaaagacgagcccgaggaatggtacggcggcgtcaaaggcgcgcccgccgtcctccccttccgcgggggccatagtcgtatgtacggaatcgagtcctcctaaaagcgactagctactaagccacgacgacgacgagcacctaaaattacgtcgcgactctcgtacgcgtatatgtctaacgttcttctaacgtagtcgcgaagacaccaggtcgaacctacgttatctagaccgcaagagtcgcacgcgtatatgtctatagttaggatagcgctgccgctccgatattaatgatcctcgtcataaattccgtaagcctagagacgatcagaaaaatcaacagtctctccaaacgggtgaagttttcccaggtcccgcccgccacgccaggggaga

SEQ ID NO: 1467 - DNA, 398 bp, Glycine max
  Clone ID: LIB3072-034-Q1-E1-A5
aacctttggtctgatttatgtgcttgcatggtcgtgagaagatgatagcaggggacgttcacgacgaagccgagccgcggcgtcgagccgcggtcggacgcgcgaactaaaacaagctccaagtctctccgaaccgcgccgcctaagacaaccgagtacaagtaaatataaaccgcaatcacttaagttccaagtaacacaaatatcatctccgaccctcaggccgaaactgtcggcgtcggtagtccgaatacaagaatccgcacaaaccatcgggaaccggctatcatgcgccccgagtcgaaacccccatcgaacccctcagatactcggattaaaaccacgaaaaaagaaataagtaacccggaaaaaagacgccccccttaaatccaaaaagt

SEQ ID NO: 1468 - DNA, 339 bp, Glycine max
  Clone ID: LIB3072-034-Q1-E1-A6
tggtcggaacctttgggctgatgtatgtgcttgtttatgtgcttgagaagatgatccacgggcctggtcgtgagaagatgatagaagggcatggtcgtcagaagatgaggcgagggcatggtcgcgagaagatgatagaagggcatggtcgtgagaagatgatagaagggcatggtcgtgagaagatgatagaagggcatcgtcgtcagaagatgatagaagggcatcgtcgtgagaagatgatagaagggcatggtcgtgagaagatgatagaacggcatggtcgtaagaagatcatacaaggacatcgtcgtgacaagatcatacaacgccatcgcc

SEQ ID NO: 1469 - DNA, 398 bp, Glycine max
  Clone ID: LIB3072-034-Q1-E1-A7
tggcctggaacctttgggctgatttatgtgcttgtttatgtgcttgcatggccgtgagaagatcatagaagggcatggtcgtgagaagatgatggaagggcatggtcgtgagaagatgatagaaggggataggcgcccgtaacatcagtgacagtcgacaagagagacattaataagaaaagaaaaaaagaagagccgagacctttcccgaagaaaagacggtactttacaggtaaagtcacgaagtcggctaaatcaagggttgaatcgaggaaaagatgaattagatgacgggtaacaccggagagaaggtctaagtcgtaaaggagaagatttaggaaacggtttaagtcgtaaaggagaagatttaataaatagtttaagtcgttaaggataag

SEQ ID NO: 1470 - DNA, 326 bp, Glycine max
  Clone ID: LIB3072-034-Q1-E1-A8
tgatttatgtgcttgtttatgtgcttgattacctgcttgattatcctcgtcgatagacgataatagatggtcatgggcgtaataaaattaccgaagggcatagacagaaaaagataataaaaagtggttggcccagagaacataattcaatgcctttgcctacataatattacagactcccctcagcgctatacaatcataaactatcgtttgctgcacaataatactgagatccataaactttcgatgataattaatccacctggtccgtagaatacgatagcccgactaggccgtgcaacaatgataaagtttcatattcactg

SEQ ID NO: 1471 - DNA, 485 bp, Glycine max
  Clone ID: LIB3072-034-Q1-E1-A9
gcttggaacctttgggctgatttatgtgcttgcatggtcgtgagaagatgatagaagggcatcgtcgtgagaagatgatagaagggcatggtcgtgagaagatgatagaagggcatggtcgtgagaagatgatagaagggcatggtcgtgagaagatgatagaagggcatggtcgtgagaagatgatagaaggacatggtcgtgagaagatgatagaaggacatggtcgtgagaagacgatagaagggcatggtcgtgagaagatgatagaagggcatggtcgtgagaagatgatagaagggcatggtcgtgagaagatgatagaagggcatggtcgtgagaagatgatagaagggcatggtcgtgagaagatgatagaagggcatggtcgtgagaagatgatagaagggcatggtcgtgagaagatgatagaagggcatggtcgtgagaagatgatagaagggcatggtcgtgagaagatgata

SEQ ID NO: 1472 - DNA, 461 bp, Glycine max
  Clone ID: LIB3072-034-Q1-E1-B10
tggctccgaacctttgggctgatttatgtgcttgcaggtcgtgagaagatgatagaaggggacctatataatcaatcaagaaagctccttacagtgttttaaaaacgaagagtattactcctcccgtctctccctctccccgcgttcctattattctacattcattcctagttactgtcgaccctgcgtctgacaacgaaggcaatttctccgaaaacggcggtatacaccacactccgctagatacaatagtacccggcggaacaagagtagttttaatgggaaacgaaagacgtttctctatcgcggcgtaactctgtaacgagtctgataaagggaccggaataactactctgcttttacactgaacttgccccactgttgaaggttacttcccgagttccaagcctgacctacccgtagccacaacgtcgcgcgccggaaccttcattgagcggctc

SEQ ID NO: 1473 - DNA, 475 bp, Glycine max
  unsure at all n locations
  Clone ID: LIB3072-034-Q1-E1-B11
tgggctgatttatgtgcttgtttatgtgcttgcatggtcgtgagaagatgctangaggggacctatataatcaatcaagagagctccttacagttttttaaagacgaagagtattactcctcccgtctctccctctccccgcgttcctattattctacattcattcctagttactgtcgaccctgcgtctgacaacgaaggcaatttctccgaaaacggcggtatacaccacactccgctagatacaatagtacccggcggaacaagagtagttttaatgggaaacgaaagacgtttctctatcgcggcgtaactctgtaacgagtctgataaagggaccggaataactactctgcttttacactgaacttgccccactgttgaaggttacttcccgagttccaagcctgacctaccngtagccacaacgtcgcgcgccggaaccttcattgagcggctcgccgcggaggactca

SEQ ID NO: 1474 - DNA, 366 bp, Glycine max
  Clone ID: LIB3072-034-Q1-E1-B12
ctttgggctgatttatgtgcttgtttatgtgcttgcataggcgcgtgaatatccctgagagatgttggcgtgaggagatgatagagagtactgtttgtccgatcgggtccatcatcgcgtcaataacaccctcctctccttattctcctcctccaggtttccataacgggcttaatccatccctgtgcatccatcgtgggacagactacgaacaatgatcttgaagaataggcctatcggttcgcgtggtcacatcgagtacatcgtcagagtactctcccgttatcgcgaagtagtccgcgctataggtcacaccggttaaacgtctcactactgacgtatctaccatcgactgctacactgaat

SEQ ID NO: 1475 - DNA, 475 bp, Glycine max
  Clone ID: LIB3072-034-Q1-E1-B2
aacccttgggctgatttatgtgcttgcatggtcgtgagaagatgatagacggggatataatcaatcaagaaagctccttacagttggttaaagacgaagagtattactcctcccgtctctccctctccccgcgttcctattattctacattcattcctagttactgtcgaccctgcgtctgacaacgaaggcaatttctccgaaaacggcggtatacaccacactccgctagatgcaatagtacccggcggaacaagagtagttttaatgggaaacgaaagacgtttctctatcgcggcgtaactctgtaacgagtctgataaaaggaccggaataactactctgcttttacactgaacttgccccactgttgaaggttacttcccgagttccaagcctgacctacccgtagccacaacgtcgcgcgccggaaccttcattgagcggctcgccgcggaagactcattaagaaaaa

SEQ ID NO: 1476 - DNA, 146 bp, Glycine max
  Clone ID: LIB3072-034-Q1-E1-B3
ggaacccttgggctggatttatgtgcgttgcgtgcagaagatgcatagacaggggaccgtcctctaagaatctcttccgtctgaaagtgaactcataggagtcatcggaagttccgcaaagcacgggcttacgagcccgcaacacg

SEQ ID NO: 1477 - DNA, 449 bp, Glycine max
  Clone ID: LIB3072-034-Q1-E1-B4
aacccttgggctgatttatgtgcttgtttatgtgcttgcatggtcgtgagaagatgatagacgggcatggtcgtgagaagatgatgagaggggatggtcgtgagaagatgatagaagggcatggtcgtgagaagatgatagaagggcatggtcgtgagatgatagaagggaaaaaaatccgctcggacgacgtccccccgccgacagttttggaaaacaaaaagaaattaaaaatagagccacaaaactagcaagaaaaaacaatcaccaccaagaaaaaaaaaaacaaaaaaaaaaaaaaaaaagtggttgtctcagaggacttaagtccatgcatgtgcgtacgtgatgctacagtctcctcacagcgctattcaaacctaacctatcggttgctgccccatagtgcaacgatcgggaaaatttcggtgccatttaatccaactgtt

SEQ ID NO: 1478 - DNA, 444 bp, Glycine max
  Clone ID: LIB3072-034-Q1-E1-B5
aacctttggtctgatttatgtgcttgcatggtcgtgagaagatcatagaaggacatcgtcgtgagaagatgatagaagggcatgggcgtgagaagatgatagaaggacatggtcgtgagaagatgatagaagggcatggtcgtgagaagatgatagaagggcatggtcgtgagaagatgatagaagggcatggtcgtgagaagatgatagaagggcatggtcgtgagaagatgatagaaggggttggaaaaaaccaacccaactacagcactgcgtaaaaaaaaaaaaaaaaaaacaaaaaaaaaagtggttgtctcagaggacttaagtccatgcatgtgcgtacgtgatgctacagtctcctcacagcgctattcaaacctaacctatcggttgctgccccataatgctgcgatcgggaaaatttcggtgccatttaatcca

SEQ ID NO: 1479 - DNA, 469 bp, Glycine max
  Clone ID: LIB3072-034-Q1-E1-B6
ttgcttggctccgaacctttggtctgatttatgtgcttgcatcgtcgtgagaagatcatagaaggggatagtaaaaataaccaacaaagacgagcccgaggaataatacggcggcgtcaaaggcgcgcccgccgtcctccccttccgcgggggccatagtcgtatgtacggaatcgagtcctcctaaaagcgactagctactaagccacgacgacgacgagcacctaaaattacgtcgcgactctcgtacgcgtatatgtctaacgttcttctaacgtagtcgcgaagacaccaggtcgaacctacgttatctagaccgcaagagtcgcacgcgtatatgtctatagttaggatagcgctgccgctccgatattaatgatcctcgtcataaattccgtaagcttagagacgatcagaaaaatcaacagtccctctaaacggatgaaattttcccaagtcccgcccgcca

SEQ ID NO: 1480 - DNA, 447 bp, Glycine max
  Clone ID: LIB3072-034-Q1-E1-B7
ttggctctggaacctttgggctgatttatgtgcttgcatggtcgtgagaagatgatagaagggggacgattctacccaaggcctttaataaaatatgctatcacttcaagggaaaaccattcaaaaccaccacatataaacggaagcagagccattaaccggaggtctttaatccatccttaacgaaaggttcccccgccataaagcccgaaaataaagaaaaccgctaaccataaaaaaaaaaaaaaaaaaaaaaaaaaaaaagtggttgtctcagaggacttaagtccatgcatgtgcgtacgtgatgctacagtctcctcacagcgctattcaaacctaacctatcggttgctgccccataatgctgcgatcgggaaaatttcggtgccatttaatccaactgttccgtagtatactttttccctgttagtcggtgcaacagtg

SEQ ID NO: 1481 - DNA, 460 bp, Glycine max
  Clone ID: LIB3072-034-Q1-E1-A3
gaacctttgggctgatttatgtgcttgcatggtcgtgagaagatgatagaaggggacctatataatcaatcaagaaagctccttacagttttttaaaaacgaagagtattactcctcccgtctctccctctccccgcgttcctattattctacattcattcctagttactgtcgaccctgcgtctgacaacgaaggcaatttctccgaaaacggcggtatacaccacactccgctagatacaatagtacccggcggaacaagagtagttttaatgggaaacgaaagacgtttctctatcgcggcgtaactctgtaacgagtctgataaagggaccggaataactactctgcttttacactgaacttgccccactgttgaaggttacttcccgagttccaagcctgacctacccgtagccacaacgtcgcgcgccggaaccttcattgagcggctcgccgc

SEQ ID NO: 1482 - DNA, 408 bp, Glycine max
  unsure at all n locations
  Clone ID: LIB3072-033-Q1-E1-H11
agtgcttgcatggtcgtgagaagatgatagaaggggacctatataatcaatcaagaaagctccttgcagggttttaaaaacgaagagtattactcctcccgtctctccctctccccgcgttcctattattctacattcattcctagttactgtcgaccctgcgtctgacaacgaaggcaatttctccgaaaacggcggtatacaccacactccgctagatacaatagtacccggcggaacaagagtagttttaatgggaaacgaaagacgtttctctatcgcggcgtaactctgtaacgagtctgataaagggaccggaataactactctgcttttacactgaacttgccccactgttgaaggttacttcccgagttccaagcctgacctaccngtagccacaacgtc

SEQ ID NO: 1483 - DNA, 380 bp, Glycine max
  Clone ID: LIB3072-033-Q1-E1-H12
gggcacctatataatcaatcaagacagcgccttacagttttttaaaaacgaagagtattactcctcccgtctctccctctccccgcgttcctattattctacattcattcctagttactgtcgaccctgcgtctgacaacgaacgcaatttctccgaaaacggcggtatacaccacactccgctagatacagtagtacccggcggaacaagagtagttttaatgggaaacgaaagacgtttctctatcgcggcgtaactctgtaacgagtctgataaatggaccggaataactactctgcttctacactgaacttgccccactgttgaacgttacttcccgagttccaagcctgacctacccctagccacaacgtcgcgc

SEQ ID NO: 1484 - DNA, 290 bp, Glycine max
  Clone ID: LIB3072-033-Q1-E1-H2
caacaaaaacgaacctcaaaatatgagtcccctcaaaggcgcgcgtgacatcatccccttcctcagaggccatagtcgtatgtacggaatcgactcctcctaaaagcgactagctactaagccacgacgacgacgagcacctaaaattacgtcgcgactctcgtacgcgtatatgtctaacgttcttctaacgtagtcccgaagacaccacgtcgaacctacgttatctaaaccgcaagaatcgcacgcgtatatttctataattaaaataacgctccccctcccatatt

SEQ ID NO: 1485 - DNA, 387 bp, Glycine max
  unsure at all n locations
  Clone ID: LIB3072-033-Q1-E1-H3
tcgtgagaagatnatagaaggggatagtaaccctaaccaacaaagacgagcccgaagaataggacggcgctgtcaaaggcgcgcgcgccgtcctccccttccgcgggggccatagtcgtatgtacggaatcgagtcctcctaaaagcgactagctactaagccacgacgacgacgagcacctaaaattacgtcgcgactctcgtacgcgtatatgtctaacgttcttctaacgtagtcgcgaagacaccaggtcgaacctacgttatctagaccgcaagagtcgcacgcgtatatgtctatagttaggatagcgctgccgctccgatattaatgatcctcgtcataaattccgtaagcctagagacgatcagaaaaatcaacagtct

SEQ ID NO: 1486 - DNA, 326 bp, Glycine max
  Clone ID: LIB3072-033-Q1-E1-H4
atagaagggcatggtcgtgagaagatgatacaagggtcgggagtaatcttgctataaagattactcgcgtttacacgcccgataaattatcccttaatatctttatcgctcacgatcggtcgcatagcggggagattagaactacgtattgtcgaagtcgaagctcccactcaacgcgattgcgggccgtacgcaaacaccgctgccccctgccaagtactcgttatgcccgtaatcatcaccatcaccacgcgctgggaacccaccgtcttgccgtccatctaaatacaacaccatcagttcccccggcccccccccaataagcc

SEQ ID NO: 1487 - DNA, 374 bp, Glycine max
  Clone ID: LIB3072-033-Q1-E1-H5
tggatccgaacgtttgggttgatttatgtgcgtgcatggtcgtaagatgataagagaccccatccgagtttaacccgacccctacctacatcggcgatggaaaacgatcgcgcgcatccacgcgggaaacgtccaaaccctaagattaaccgtatctatacgtacacccctacaaagtagtagtcggcgtcactaggcgcacactacgctccccgccagcacctcctacagccgctagaatcggcttggattggcctaaccgggaataggatcggcgactggcttggctatctcaaaaaagtaaacgaccctagatttagcgagaatcggttaagaattggctaaacaaaaattggccagaattggtatccctt

SEQ ID NO: 1488 - DNA, 282 bp, Glycine max
  Clone ID: LIB3072-033-Q1-E1-H6
atagacgggcattgtcgtcagaagatgatagaagggcatggtcgtgagaagatgatagaagggcatggtcgtgagaagatgatagaagggcatggtcgtgagaagatgatagaagggcatggtcgtgagaagatgatagaagggcatggtcgtgagaagatgatagaagggcatggtcgtgagaagatgatagaagggcatggtcgtgagaagatgatagcagggggtagggcatacgctaagtaagaagattacggagactaatttcgagaatttaactac

SEQ ID NO: 1489 - DNA, 465 bp, Glycine max
  unsure at all n locations
  Clone ID: LIB3072-033-Q1-E1-H7
ggcttggaacctttgggctgatttatgtgcttgcatggtcgtgagaagatgatagaagggggcagaaacgggagacgtccctctcctaaatacgggaataaaacctccagacagactgcacagaagccacggaataaaacaagacaaaaacgatcggagccgcgaccacgacaacgaccagggcgagccccctaccgggcgaccataactacttacccgactaaaccggattaaactacgcgctcgataaatctagacgcgccgattcccgcaaaacagaacgcgtgttcccatcaacattcttcggtggcggctcctcacacacacaccgcgccaaaaagcgcgcggtcggccgcggtccgagtaaacttaccgacgtctgctacaccgtggttaatagagtaagccttcgtgcgtaaagacgctaaaaataaacaacaccccgncataaaaaacgccagaaaa

SEQ ID NO: 1490 - DNA, 376 bp, Glycine max
  Clone ID: LIB3072-033-Q1-E1-H8
ggctctcgacctttgggctgatttatgtgcttgtttatgtgcttgtttatctgcttgcgtggtcgtgaagatgatagtagggggcctcagtgcgcgcgaccgccgcgatctgcctcctcctgctgccactcctcctccccgccgcccgcgcgctcgcccccctctctattcgaaaacgctccgtcgtggcggcaatcgcggccgtagcagtgttcgtaagcgtactaattgtcgtggaggtcgtaagacgcatttacatccgagtcatattgagctaattattattgacattccggctacgggagcggtattagccaaagtctaacctgagagcgtcgaaacgggcgcctttgtcgagaatgacggtcgtacacgc

SEQ ID NO: 1491 - DNA, 430 bp, Glycine max
  Clone ID: LIB3072-033-Q1-E1-H9
tggcttggaacctttgggctgatttatgtgcttgcatggtcgtgagaagatatatagtaggtggccgccccgatgaacaaaaggaaagacagcgaagggcccggtaagagagagcaacggcaggaaagggaaaaagaagacgagagaaaaatcatagggtcgtctacgcgagtcatatcggttctgtcgtcgtattcgacgtccgcaaatacgatgtcccgtttcgtaaatcctgctaaactactcgccctatataaaatttattcggtgtgaccgagcccctaaacgataagaaaaatgccagcgggtacgtttaaaacaagatcgttccaaaggatatacgcgacgccgagatcgcagacgctaaataggcgactcgcaacggataaccgaatgtattctaatcctcgcacaggagcgaagaaaagtg

SEQ ID NO: 1492 - DNA, 451 bp, Glycine max
  Clone ID: LIB3072-034-Q1-E1-A1
tgatttatgtgcttgcatggtcgtgagaagatcatagaaggggtctcccgagcctgaatcaaataacctaaccgagctcgttctgactacggagaggaaaatacccgggcccccgcctccgtcttcttccgctccagtcctcgacgcgatggcgaagagagtagaggtgaaagaccgtccgataaggaggtatgggccttagggcagacgtccacctgataggtaacgcgtatacgcgcgtaggagtgacggccctactggcggctagcgttgaggtttctcctgtaaacgtccccgtagtacgttacgccgactgaaaccatcatcgttaaagaggttacgaaacaaatcaattcatcaacaaacaaacagtctccattgatatacacgcatgcaacgctggggcctcaatcattcaagcatgcatgcgcggtccccggcactgactttc

SEQ ID NO: 1493 - DNA, 486 bp, Glycine max
  unsure at all n locations
  Clone ID: LIB3072-034-Q1-E1-A10
gcttcgacctttgggctgatttatgtgcttgtttatgtgcttgatggtcgtgagatgatagacggggatagtaaaaataaccaacaaagacgagcccgaagaataatacggcggcgtcaaaggcgcgcccgccgtcctccccttccgcgggggccatagtcgtatgtacggaatcgagtcctcctaaaagcgactagctactaagccacgacgacgacgagcacctaaaattacgttgcgactctcgtacgcgtatatgtctaacgttcntctaacgtagtcgcgaagacaccaggtcgaacctacgttatctagaccgcaagagtcgcacgcgtatatgtctatagttaggatagcgctgccgctccgatattaatgatcctcgtcataaattccgtaagcttagagacgatcagaaaaatcaacagtctctctaaacggatgaagttttcccaggtcccgnccgccacgccaggggagataaac

SEQ ID NO: 1494 - DNA, 473 bp, Glycine max
  Clone ID: LIB3072-034-Q1-E1-A11
aacctttgggctgatttatgtgcttggaagatgatagaagggtattacaccttccaccgcacgagctaggacctttgggcggtaaagatagcttgcatcgaattctgcgacgtagacagaagactcttctcctacatagcgcactggacgttattactcctaaacgacctctacgtagactacttcaccggattcgagaataggacagaactcagggaccccaaggagagcagagacttttggcccgagaactgcgacatgaagatagagaagaaggaaccgtacggcgaagttagaagggacctctagaccgtaaagagcgagaaggacgcgtgagccgacggtagagaagatgataataaggacactagacacgaatgggacagttacaacgacctaaaaggcgataccaagatagataaagacggtcacggcacggcaagtagtagtagttattcgagccggaaagaact

SEQ ID NO: 1495 - DNA, 443 bp, Glycine max
  unsure at all n locations
  Clone ID: LIB3072-034-Q1-E1-A12
tatgtgcttgatggtcctgagaagatgcccgcaggggatagtaaaaataaccaacaaaggcgagcccgaagaataatacggcggcgtcaaaggcgcgcccgccgtcctccccttccgcgggggccatagtcgtatgtacggaatcgagtcctcctaaaagcgactagctactaagccacgacgacgacgagcacctaaaattacgtcgcgactctcgtacgcgtatatgtctaacgttcntctaacgtagtcgcgaagacaccaggtcgaacctacgttatctagaccgcaagagtcgcacgcgtatatgtctatagttaggatagcgctgccgctccgatattaatgatcctcgtcataaattccgtaagcttagagacgatcagaaaaatcaacagtctctctaaacggatgaagttttcccaggtcccgcccgccacgcc

SEQ ID NO: 1496 - DNA, 481 bp, Glycine max
  Clone ID: LIB3072-034-Q1-E1-A2
aaccttgggctgatttatgtgcttgcatggtcgtgagaagatgatagaaggggaaaaaaaacctcaactaaaaaaaaaaaaaaaggaaaaaggaaaaaagtggttggctcagaggacttaagtccatgcatgtgcgtacgtgatgctacagtctcctcacagcgctattcaaacctaacctatcggttgctgccccataatgctgcgatcgggaaaatttcggtgccatttaatccaactgttccgtagtatactttttccctgttagtcggtgcaacagtgaagaggtttgtattgactgtttcctttaatagccgtgtagttcgaacggtgaacgggatgtgtttcgcagtggtgtaccaagtgtggtgggcgcggcggccatgtgtagtgcgattgtcatatccgttagtgtttcagtgtttgtcttccctgtccctcctttccttccctctgttatgcctgttgggtcccccccccc

SEQ ID NO: 1497 - DNA, 418 bp, Glycine max
  Clone ID: LIB3072-033-Q1-E1-H10
ttgggctgatttatgtgcttgtttatgtgcttgcatggtcgtgagaagatgctcgcaggggaatctaaatacctctcttacgggcttccaaatatctactagctactattacggttaagtcagcccccctttcccgcccctcgtcccctagcggtcgtcgtcctgtccctagccttagagagtagttctagtaaaatgagcgttagacttaaaaatctaacgtttctaaattggacaattgcacagagctagaaggagggtctaccgagatacggaatttcactaataagttaccttagcgcgttggcgccgtttctctctgtcgtatttctaattgtaatgtttcctgcagattccttcatattaatggcttttaggaaactcatacttaataaggcaagggcacccccggtacgac

SEQ ID NO: 1498 - DNA, 375 bp, Glycine max
  unsure at all n locations
  Clone ID: LIB3072-033-Q1-E1-F6
gggggtggaccataccgctaggcggggagcccggtcgaggtggtgacgaaaagacctcctcatgtgcacaagtaggcgccggtggcggcgacgggaagcctagaggtcaatggcaattgagccgggccgagccgtgatctggtcgatctgccgatctagaccccttccgaattgatgcaccccttaagtccggacgttgttaagatcccctccggacattcgcgggacaacaatgacaacaataaacggacacgaaaatgannnanaaaaaaaaaaaaaaaaaaaaaaaagtggttgtctcagaggacttaagtccatgcatgtgcgtacgtgatgctacagtctcctcacagcgctattcaaacctaacctatc

SEQ ID NO: 1499 - DNA, 476 bp, Glycine max
  unsure at all n locations
  Clone ID: LIB3072-033-Q1-E1-F7
tggntctggacctttgggctgattgtagtgcttgggtcgtgagaagatgatagcaggggtctgctcagcattctagcgcgagtgcctcgttgcatgttcgtccctaactgatcgtaggactcctcctcctcctcgtcgctctttttacagacggaccggtaagggtaaaagtcagtggagtaatcgacgtagacaacgtcgtccgtacccgtcgcgaccgtacccgccggcggacacgctacggtcctcccttaaacgacgacctctacacacgtcgggggcgtggcccctattattccgcctatcgcttttaaccggttttcccctaactgttacttatccatgcggccggacttaatcgaagcggaaaagtacttttagttataattactcgctaacgcaatctaaaaaaagaaatttggcaaaaagcaggccccccccaccacaaattccccccgggggacgacacactcccg

SEQ ID NO: 1500 - DNA, 252 bp, Glycine max
  Clone ID: LIB3072-033-Q1-E1-F8
tggaacctttgggctgatttatgtgcttgcatggtcgtgagaagatgatagaaggggatctctatactcaatcacgatcgttccttacgggtttgtaacaacgacgagtattagtcctcccgtctctctactctcccgtgttcctattattctacattcattccgacttactgtcgacactgggtctaacaacgaacgccatttcgccgaaaacggaggtatacactacactccgctagatacaatagtacc

SEQ ID NO: 1501 - DNA, 446 bp, Glycine max
  Clone ID: LIB3072-033-Q1-E1-F9
ggctctggacctttgggctgatttatgtgcttgtttatgtgcttgcatggtcgtgagaagatgctagaagggcatggtcgtgagaagatgatagaggggcatcgtcgtgagaagatgatagaaggggacaattacggtgctcaatctcgtccttgtctcccatccttccccacgttcactgtttactatcccgtcctccctcgtgccctgcgtctaagtctaactctacgtcttagtctttatccctaagcatcgcgaaaagaacgtagatcacgtcgcgaaggcgagcggagcggaaacaccgttcgattttgcggagagaggagcgttacctattcccaagactttagtccacatcttcgaattaatctaaagtggggatccgccacacgaaaccctccacgtcggaacagaaatataattcgtcatacccccctacgactctc

SEQ ID NO: 1502 - DNA, 262 bp, Glycine max
  Clone ID: LIB3072-033-Q1-E1-G1
cccaacaaagacgagcccgaagaagaatacggcggcgtcaaaggcgcgcccgccgtcctccccttccgcgggggccatagtcgtatgtacggaatcgagtcctcctaaaagcgactagctactaagccacgacgacgacgagcacctaaaattacgtcgcgactctcgtacgcgtatatgtctaacgttcttctaacgtagtcgcgaagacaccaggtcgaacctacgttatctagaccgcaagagtcgcacgcgtatatgt

SEQ ID NO: 1503 - DNA, 474 bp, Glycine max
  Clone ID: LIB3072-033-Q1-E1-G10
tggtcggaacctttgggctgatttatgtgcttcgttatgtgcttgtttatctgcttgcttatctccctgcttatgtgcttgtttatgtgcgtgcgtggtcgtcagaagatgatagaggggcatcgtcgtcagaagatgatagacgggcatggtcgtgagaagatgatagaagggcatggtcgtgagaagatgatagaaggggatagtaaaaataaccaacaaagacgagcccgaagaataatacggcggcgtcaaaggcgcgcccgccgtcctccccttccgcgggggccatagtcgtatgtacggaatcgagtcctcctaaaagcgactagctactaagccacgacgacgacgagcacctaaaattacgtcgcgactctcgtacgcgtatatgtctaacgttcttctaacgtagtcgcgaagacaccaggtcgaacctacgttatctagaccgcaagagtcgcacgcgtatat

SEQ ID NO: 1504 - DNA, 470 bp, Glycine max
  Clone ID: LIB3072-033-Q1-E1-G11
tgggttgatttatgtgcttgcatggtcgtgagaagatcatagaaggggatcccgagcctgaatcaaataacctaacctaacgcgttctgactacgaagaggaaaatacccgggcccccgcctccgtcttcttccgctccagtcttcgacgcgatggcgaagagagtagaggtgaaagaccgtccgataaggaggtatgggccttagggcagacgtccacctgataggtaacgcgtatacgcgcgtaggagtgacggccctactggcggctagcgttgaggtttctcctgtaaacgtccccgtagtaggttacgccgactgaaaccatcatcgttaaagaggttacgaaacaaataaataaataaacaaacaaacagtctcaattgatatacacgcatgcagcgctggggcctcagtcagtcaggcaggcatgcgcgctccccgccactgacttcagcccggcggataagc

SEQ ID NO: 1505 - DNA, 319 bp, Glycine max
  Clone ID: LIB3072-033-Q1-E1-G12
ttgggttgattgatgtgcatgtttatgtgcttgtttatctgcttgcatggtcctcagaagatgatagaaggggagattgtaggcgaggtcgcgacatttgtcgagctcaagtacactaacaagtggaggtaaaaaaaaaaaaaaaaaaaaaaaaaaagtgtgtgtctcacaggagataaaactatatatatgtgtatatgagatcatacactccacacacagctattaaaaaacaaaacatcgcgtgtgggcccataaaatgcagatatcgaaaaaattgaggtgatataaactaacactgccgtagaatataatttcc

SEQ ID NO: 1506 - DNA, 298 bp, Glycine max
  Clone ID: LIB3072-033-Q1-E1-G2
tcgtgagaagaacatagcaggggtcctatactaaaaataaccaacaaagacgagcccgaagaataatacggcggcgtcaaaggcgcgcccgccgtcctccccttccgcgggggccatagtcgtatgtacggaatcgagtcctcctaaaagcgactagctactaagccacgacgacgacgagcacctaaaattacgtcgcgactctcgtacgcgtatatgtctaacgttcttctaacgtagtcgcgaagacaccaggtcgaacctacgttatctagaccgcaagagtcgcacgcgtata

SEQ ID NO: 1507 - DNA, 307 bp, Glycine max
  Clone ID: LIB3072-033-Q1-E1-G3
gcttggaacctttgggctgatttatgtgcttgcatggtcgtgagaagatgatagaagggggaatggcacaatatcggtgtactcatttcgaggtgctgtcctctcctctcgctgcgagctattacggcgagggccagcgcgtcgaatgacgtctcgaagagtacgcataacgtcgagaaaaggggaaagtgttaagctacgaccaggttacttcttaaagctaccactaaaccttccccggcgacgtaaaagtatggacatactggagagcccgagcacgccgacgattatagggtcggcaaaactg

SEQ ID NO: 1508 - DNA, 458 bp, Glycine max
  Clone ID: LIB3072-033-Q1-E1-G4
tttgggctgatttatgtgcttgcatggtcgtgagaagatgatagaaggggaactctcctatagaagaaaaaagagaagaagacgggcgcgaagaataatacggcggcgtcgaaggcgcgcccggcgtcatccccttccgcggggggcatcatcagcgttaatccgaggtcgagcaagtccggttcgtctacgaaaagcgactactactaatatctaaacgacgacgagctcctaaaattacgtcgcgactaacgtgtacgtataaagctaaatttcttctaacgttgtcgcctagacacgaggtcgaacctgcgttacctagtccgtaaactccgcacccgtgtaccactgcacttcgtatagcgcccccgcgccgatacaattgaccctcgtcacgaattccgtacatttaacgaggacgataaggaaaatcatcaacgaataagcgccacgtacgc

SEQ ID NO: 1509 - DNA, 424 bp, Glycine max
  unsure at all n locations
  Clone ID: LIB3072-033-Q1-E1-G5
gatttatgtgcttgctggtcgtgagaagatgatagcaggggacctatctcctcaatcaagaaagctccttacagttttggaaaaaccaagagtattactcgtcccgtctctccctctccccgcgttcctattattctacattcattcctagttactgtcgaccctgcgtctgacaacgaaggcaatttctccgaaaacggcggtatacaccacactccgctagatacaatagtacccggcggaacaagagtagttttaatgggaaacgaaagacgtttctctatcgcggcgtaactctgtaacgagtctgataaagggaccggaataactactctgcttttacactgaacttgccccactgttgaangttactttcccgagttccaaacctgacctacccgtagccacaacgtcgcgcgccgga

SEQ ID NO: 1510 - DNA, 380 bp, Glycine max
  unsure at all n locations
  Clone ID: LIB3072-033-Q1-E1-G6
tagcccggactcattaaaatcagtanacagctaaaggagaaaaaagagagcaaaagcccagccgagttaaacggcttagagaaaatgaaagtcattaacaaaaaaaaggcgcgcctcgacggcaaaatacaaaaaggagaaaaaaaaaggtacgaaatggagatctgagtaagacactacatccaaaccatacccgcatacaaaaaaaaaaatttccataccacacccggccagaaaaaaaaaaaaaaaaaaaaaaaaaaaaaggtggttgtctcagaggacttaagtccatgcatgtgcgtacgtgatgctacagtctcctcacagcgctattcaaacctaacctatcggttgctgccccataatgctgcgatcgggaa

SEQ ID NO: 1511 - DNA, 380 bp, Glycine max
  Clone ID: LIB3072-033-Q1-E1-G7
tggctcggaacctttgggctgatttatgtgcttgatggtcgtcagaagatgatagaagggggccgccaaaccaagtaagcaaggccgggacggagggaatcaacagcagtggcgacaatgcgcgcgtgggcgcggcgtacagcaggacgaggacgaaggcgacggcggtcacagatgagagcgaaggaagtcctcacgtctccaagcgggtttccgacaattctcctattattacggttatcgcgggagaagtactactattcgaaaacgacggtacggcgcctccggcctacgccgagtttaaagcctataatcacgcgcactttactggatttggcggagtagttccccacttcgtaatcgcagcagcggacctggcg

SEQ ID NO: 1512 - DNA, 396 bp, Glycine max
  Clone ID: LIB3072-033-Q1-E1-G8
ggcttggaacctttgggctgatttatgtgcttgcatggtcgtgagaagatgatagaaggggatgacgagctgacccgacaatcaagacaccgccacctgcgacaccgacttaacccgacactactgaaacttaacccacattaccgccgaaccaaccactgacgaaagacccactactctcacgggaccaaactttgaaccccccaccgggaacccaagagaaacaaaatacaacaaagaccacggaagcaaacacctccgtacccaccgtcatcgtatcgcccacctcagccttcatcgtccccccatccacaacccatgcaaaaatggcaagctaaagcgatcaaccctatcgaaactcgatcctcctacccccactaacgcaactaacgacca

SEQ ID NO: 1513 - DNA, 357 bp, Glycine max
  Clone ID: LIB3072-033-Q1-E1-G9
tggcttggaacctttgggctgatttatgtgcttgcatggtcgtaataatatgatagagagcgatcccgagctagcgcggtcatcataacaccgcgagcccctactccgacttaagaggactctacttcatcttaacctacattacagtcgaacctctcactaatcaacgacgcactactcacacggaacacaatattagaaccccccaccgggaactcaatagaaacaatttacatcaaagaccacagatttaaacaccaccgtacttaccgtcatcgattcgcctacgacagtcatcatcgacccgtcatccacaacgcatgcaaaaattgctattgaaagcgatcaaccctaaca

SEQ ID NO: 1514 - DNA, 280 bp, Glycine max
  Clone ID: LIB3072-033-Q1-E1-H1
cgagaatcaagaaggagaagtaaacggtccttctaacgactctccttttagtcgccattaccgctaattgcgttggcgttggtacggccgtcttacctatcggttctaagcttacggtcggtccttttattagaaagattaataacgataccattcttaccgtcagtaatggcggaagagcgtaacgtacgtaagcgcggttattagccggtaagaaaaagcccgagatctcccttcattcgttagattccgacgacgtataaccggtaaaagaagcaga

SEQ ID NO: 1515 - DNA, 296 bp, Glycine max
  unsure at all n locations
  Clone ID: LIB3072-033-Q1-E1-F4
gggaacacccctccaaataaaanaaaaaaaaaaaagaaaagaaaaaccctgaatgtctcagaggacttaagtccatgcatgtgcgtacgtgatgctacagtctcctcacagcgctattcaaacctaacctatcggttgctgccccataatgctgcgatcgggaaaatttcggtgccatttaatccaactgttccgtagtatactttttccctgttagtcggtgcaacagtgaagaggtttgtattgactgtttcctttaatagccgtgtaattcgaacggtgaacgggatgtgttt

SEQ ID NO: 1516 - DNA, 340 bp, Glycine max
  Clone ID: LIB3072-033-Q1-E1-D8
aacctttgggctgatttatgtgcttgcatggtcgtgagaagatgatagaagggtgtcaccacgggaaaaaaaaaaaaaaaaaaaaaagaaaaaagttgtttgccccaagggcttaaatcccttccttttccttccttaatctacaatccccccaccagggtatttaaacctaacctaaccgtttgtgccccataattcttcgattcggaaaatttccgttccatttaattcaaccgttccctaagaaaacttttcccctttaatccgttccacaattaaaaagttttgaattacttgttcccttaataaccggttaattccaaccggtaaccggattttt

SEQ ID NO: 1517 - DNA, 417 bp, Glycine max
  Clone ID: LIB3072-033-Q1-E1-D9
ctttgggttgatttatgtgcttgtttatgtgcttgcatggtcgtgagaagatgcatcgaggggaaggcaaatgatggcgatgaggggcgggcggtgttgcatgttctactttacttactgttactggtattccttccaaatgatactgtgcttactattttcccctctccttctatagctatagtagcggcagtcctttaaaaaagagcgttaacggtacttctcctagatctacgggcgaaggaacacaacgaagtatcgaaatccgtcgacgacactagcggtacgaccctcgagtagagcctacccttcgtactcggattagaaatttagtactacctactcgtcacaacgagaaagaccataacaccggcgattaggtccgacagtccgtagcttttcccgctaaagtccttt

SEQ ID NO: 1518 - DNA, 300 bp, Glycine max
  unsure at all n locations
  Clone ID: LIB3072-033-Q1-E1-E10
tgggttgattgatgtgcttgcttatgtgcttgcatagccgtgagaagatcccccanaaaaaaaaaaaaaaaaaaaagacaagaagtgctctctcagaggactgaagtccatccatttgcgtacgtcatgctacactctcctcacagcgctattcaaacctaacctatcggttgcttccccataatgctgcgatcgcgaaaatttcggtgccatttaatccacctcttccgtaatatactttttccctgttagtcggtgcaacattgaagaggtttgtattacactgtttcctttaatacc

SEQ ID NO: 1519 - DNA, 359 bp, Glycine max
  unsure at all n locations
  Clone ID: LIB3072-033-Q1-E1-E11
ctttgggctgattgatgtgcttgcatggtcgtgagaagatgatagaagggcggccggagcggaacggaaatcccgtaccggatggaccgcatcacgtcgagcatacgaatatcggactaggcgtcggagccgtcaattgcgcgaagcggttagggcattacgtaccgaacgacctgagttaggtcagcaatcctattgcgctctaacccaccgaggggaactcacggccgttcctaatcggagcaattcctatcatgggatctatagcccaatagaaacaaatcatcgttatgttccggtatctctccgcatccaaccacacaaagncaccacacacccacagcccacactacaggaag

SEQ ID NO: 1520 - DNA, 427 bp, Glycine max
  Clone ID: LIB3072-033-Q1-E1-E12
aaccattgggttgatttatgtgcttgtttatgtgcttgcatggtcgtgagaagatgcatcgaggggataccaccctactggaaaaaagaaaagacatgactccacgacgaggggaagaataagatacgaggaagacgagtaactctgagtcccgcattagtctcttgtgtctgcctctaattcttcctgtctgttctcgctgctgccgatgcctctcgatgaggccttgttgccggtggtgctatggtgctttgggtcgggctagacactgttggtgggacctgttcttccgtcgccgggaacactgtcggtgccgacgtcccgcggactggcgatgcctcctactgggcctgcgccgacgttgcgggcctcgggaccggctacgtctcctcatgctgttggaacttctcttagttctcttgctcct

SEQ ID NO: 1521 - DNA, 350 bp, Glycine max
  unsure at all n locations
  Clone ID: LIB3072-033-Q1-E1-E2
ggttggaccttggctgattagtgctgctggtcgtgagaagatgataggagggcatggtcgtgagaagatgatagaagggcatggtcggtgagaagatgatagaagggcatggtcgtgagaaggtgatagaagggcatggtcgtgagaagatgatagaaggggatagaaaaatatatactnnanaaaaaaaaaaaaaaaaaaaaaaaaaagtggttgtctcagaggacttaagtccatgcatgtgcgtacgtgatgctacagtctcctcacagcgctattcaaacctaacctatcggttgctgccccataatgctgcgatcgggaaaatttcggtgccatttaatccaact

SEQ ID NO: 1522 - DNA, 329 bp, Glycine max
  unsure at all n locations
  Clone ID: LIB3072-033-Q1-E1-E3
ggttggantttggctgattagtgctgttattgcctgtttctacctgctcgtcggccccatcatagaaggagatccctagccggaatgagataacctaacgtaactcggtctgactacggataggaaaatacccgcgcccccgcctccgtcttcgtccgctccagtcctcgacgcgatggcgaagagagtagacgtgaaagaccgtccgataacggaagtattggccctatggctgacctccactcgataggtaacgcctatacagcgcgtatgagtcacagccctactggtggctagccttaatgtttcccccggaaacgtcccccgtc

SEQ ID NO: 1523 - DNA, 458 bp, Glycine max
  Clone ID: LIB3072-033-Q1-E1-E4
tgggctgatttatgtgcttgcatggtcgtgagaagatgatagacggggatcgcgtccaccgccagggcccgtaattctaacgggtcgggaagaactcttactcccttactgatgacgaagaagaatgaggaatgtagtgacaactagagtacgaagaagaaataaacaacgacgaagaagaagaatgccctgaggccgggtggaagcggttccctgtctaatgtccctgttaatgtaaaacctaagaatagctatcacaatttagttactacaaagaagtaaagggagcctcacaaaaacgtcaagaacgcgaacaagcccaagaagccggcaaagtagtaaaattagtagaacgaatttctcctggtctagagatacacagagccctcgcccgtccccatagaacgcaaacgaaatcgaaaagaataaggatgacagcgagaggaaggaagaggaag

SEQ ID NO: 1524 - DNA, 324 bp, Glycine max
  unsure at all n locations
  Clone ID: LIB3072-033-Q1-E1-E6
gcatggtcgtgagaagatgatagaagggcatggtcgtgagaagatgatagaagggcatggtcgtgagaagatgatagaagggcatggtcgtgagaagatgatagaagggcatggtcgtgagaagatgatagaagggcatggtcgtgagaagatgatagaagggcatggtcgtgagaagatgatagaagggtcagcattattcaaaaacaccccctttcaccaaaccataataaaaacagcangggaaaaaaaaaaaaaaaaaaaaaaaaaaaaagtggttgtctcagaggacttaagtccatgcatgtgcgtacgtgatgctac

SEQ ID NO: 1525 - DNA, 139 bp, Glycine max
  Clone ID: LIB3072-033-Q1-E1-E8
tttccgccgtcccccccggttcattacattcattcatcgcactgtctaaaagcttccgaaagggttacaccacaccgtaaaatatccgggaaagatattatgaaagaaattccacggggtactctacgatcgtaaggac

SEQ ID NO: 1526 - DNA, 309 bp, Glycine max
  Clone ID: LIB3072-033-Q1-E1-E9
tggcttggaactttgggctgattttgtgcttgtttatgtgcttgcatggtcgtgagaagatgctcgaaaaaaaaaaaaaaaaaaaaaaaaaaaggggtggttgtctcagaggacttaagtccatgcatgtgcgtacgtgatgctacagtctcctcacagcgctattcaaacctaacctatcggttgctgccccataatgctgcgatcgggaaaatttcggtgccatttaatccaactgttccgtagtatactttttccctgttagtcggtgcaacagtgaagaggtttgtattgactgtttcctttaat

SEQ ID NO: 1527 - DNA, 254 bp, Glycine max
  Clone ID: LIB3072-033-Q1-E1-F1
tagaaggggaccgttactaaaacataagcgcacttcaagaagccctccgagacagaaccctgtcccataaaacgaagaaagcgcccacagtaacccccttctcatcagccgcacccgcctctatagccatagtcctagaattagagttattagccatattcctacgattattaaaggtagggttattacaggtattagccatagtcctagaactagagttattagccatattcctacgaatattaaaaggtagg

SEQ ID NO: 1528 - DNA, 464 bp, Glycine max
  Clone ID: LIB3072-033-Q1-E1-F10
gaacctttgggttgatttatgtgcttgcatggtcgtgagaagatgatagaaggggaccctaccctctaacctctataccaccacctagagtctctctctctctttttaagaaacctaatagagccccgaccaatccgaaaccgcctaataagaaacggagaacctaccgggaaagcatggaaaagagtccaactctgaggtcatagagccgaggccggggccgttcggaagtgacgagttcgagaaatgccccgtcgccagaagtaataagagactcctattagaagtaagcgaagaagagcgtacaagtaagggtaatacgaacctcctcgacggcctcgacactataagcgacgattaagataatgccgcgttattcgtaaagcaagcgcgacacacacacacacacacatatacacttccccaaccccttaaaacggcgttagagacaaaagaaaaaaata

SEQ ID NO: 1529 - DNA, 417 bp, Glycine max
  Clone ID: LIB3072-033-Q1-E1-F11
tgggttgatttatgtgcttgcatggtcgtgagatgatcataaaaggggagcctaacccaatcgaagtaaagtaacggtcatgctaaagccgaaaatttagaacgcggccgcactctctctttcaattccaattccggcatcggcgtcatcgattagtaaggtaaatctagtggaaatcgccctccctagtcggaataagcctgcgttgaagtaattaaatacgacttcttaaggagatgtcaccgcgattcttctgggaaagccataatctaacaaggccgatgaaaatggtattttacaatttctgctctccggctgtgtttctcatcttatttttacttatacccgggataaagaaattggcagtgccgttagtcctgttgtccttcctaatcctattcctcacgttttcgatat

SEQ ID NO: 1530 - DNA, 460 bp, Glycine max
  Clone ID: LIB3072-033-Q1-E1-F12
tgggttgattgatgtgcttgcatggtcgagaagtgatcgcaggggtcctcgactcaaaataaccaacaaagacgagcccggagaatactacggcggcgtcaggggcgcgcccgccgtcctccccttccgcgggggccatagtcgtatgtacggaatcgagtcctcctaaaagcgactagctactaagccacgacgacgacgagcacctaaaattacgtcgcgactctcgtatgcgtatatgtctaacgttcttctaacgtagtcgcgaagacaccaggtcgaacctacgttatctagaccgcaagagtcgcacgcgtatatgtctatagttaggatagcgctgccgctccgatattaatcatcctcgtcataaattccgtaagcctagagacgatcagaaaaatcaacagtctctctaaacggatgaaattttccccaggtcccgcccgccacagcaggg

SEQ ID NO: 1531 - DNA, 379 bp, Glycine max
  Clone ID: LIB3072-033-Q1-E1-F2
ggaacctttgggctgatttatgtgcttgcatggtcgtgagaagatcatagacgggcatcgtcgtcagaagatgatagaagggcatggtcgtgagaagatcatagaagggcatgggcgtgagaagatgatagaagggggagggaaagacgacgagactaacggatccgcctggagagacggatgagtaggcactgctgacggtaacggatgcggatgatgctaatttctctgagactcctgttgagggtgctactgttgttgataataaatctgttgatgttgaccctcctaataacccttaaagatgaccctgacgatctcgacactaatcaaaattttccctcctcctacgggcacctctggggccaaacaaccctct

SEQ ID NO: 1532 - DNA, 426 bp, Glycine max
  unsure at all n locations
  Clone ID: LIB3072-033-Q1-E1-D7
tggaacctttgggctgatttatgtgcttgcaagagatagaaggggataacagaaagagaatacaaggctaaacttccataacggtccccgacacccactaatgattccacgccccgagtgctacacgtaccgtcacgacccctgtcgtaggagcagcaatccgccccgagctcttatcatcaagtcgttaggagtgacgtacacacgacttaatgcgtgatcccactcgttacaaaaagggccccgctaaagggggactccgcaagttaactacctcacacccctcgtgccgtcgcacgaaacgagcaactcttacgcgcgaaaaacagaacaaaatcaccggagccagcaagaatcctccgcatccgacccactaacatacgcgtggcgcgatctgccgtcctcatcnacaaccctacgcgcctc

SEQ ID NO: 1533 - DNA, 462 bp, Glycine max
  Clone ID: LIB3072-033-Q1-E1-F3
tggaacctttgggctgatttatgtgcttgccgtgagaagattatagaagggggagcgaacagttccaacgttgttgttaagattattgttgattggtcgatcctgcataatcgttcgaagctccttgttacttaaactcttggtcctaaagttaataatgttgttctctcttttggtaaacgtggagctcttacttttcataagactagtattcttattaatcgtgtcattactaaagcccgaagagagagctacggatgtaggaaattggacatcatctatcaacacacgagcagtaccaccaacaccaagaacaaaactgagggcgacgagggtcttatccacacgtttttctttctccgcacggagacccgcaccgggaaaatcccaaaacgcgccgtgccgccaacctctcccacgaagcatttacagccacactcaatcccaaaaccggccttcttc

SEQ ID NO: 1534 - DNA, 338 bp, Glycine max
  Clone ID: LIB3072-033-Q1-E1-C11
tgggttgatttatgtgcttgtttatctgcttgtttatctgcttgtttatgcccttgcatggtcgtgtgaagatgatagaagggggcaaataaaaattactatagaaaaaaaaaaaaaaaaaaaaaaaaaaaagtggttgtctcagaggacttaagtccatgcatgtgcgtacgtgatgctacagtctcctcacagcgctattcaaacctaacctatcggttgctgccccataatgctgcgatcgggaaaatttcggtgccatttaatccaactgttccgtagtatactttttccctgttagtcggtgcaacagtgaacaggtttgtattgactgtttc

SEQ ID NO: 1535 - DNA, 424 bp, Glycine max
  unsure at all n locations
  Clone ID: LIB3072-033-Q1-E1-C12
aaaattgggttgattgatgtgcatgatgtcgtgagaagatgatcagaggggcttccctcagatacgataacggggcggggcgaggaggggcaccgctcatttaacttgtgatttcgatctttctaatacgcctttacatctgcatttgacatctgatagaccaaaacccaccactctacttttgcatttaccgggcactgggcacctttgattctgctttgcattagacctaaaccagaaaaacgcccccccccgcaaagaaaacaccaaaaacccgaccccagaaaaaaacaaaccgaccgccaaatacccacccccaatcatccacacgccaacaaacccaccacagtgtccgcgctcataaaaactgccaagaaaaagacaccaaaccacgcaaaanaaaaaaaaaaaaggaaaaacaaaa

SEQ ID NO: 1536 - DNA, 381 bp, Glycine max
  Clone ID: LIB3072-033-Q1-E1-C2
tggaccctttgggctgatttatgtgcttgtttatgtgcttgtttatgtgcttggtgagaagatgcatagaggggatagtaaaaataaccaacagagacgagcccgaagaataatacggcggcgtcaaaggcgcgcccgccgtcctccccttccgcgggggccatagtcgtatgtacggaatcgagtcctcctaaaagcgactagctactaagccacgacgacgacgagcacctaaaattacgtcgcgactctcgtacgcgtatatgtctaacgttcttctaacgtagtcgcgaagacaccaggtcgaacctacgttatctagaccgcaagagtcgcacgcgtatatgtctatagttaggatagcgctgtcgctccgatatt

SEQ ID NO: 1537 - DNA, 423 bp, Glycine max
  Clone ID: LIB3072-033-Q1-E1-C3
ctttgggctgatttatgtgcttgcatggtcgtgagaagatgatagaaggggacctatatactcaatcacgaaagctccttacagttttggaaaaacgaagagtattactcctcccgtctctccctctccccgcgttcctattattctacattcattcctagttactgtcgaccctgcgtctgacaacgaaggcaatttctccgaaaacggcggtatacaccacactccgctagatacaatagtacccggcggaacaagagtagttttaatgggaaacgaaagacgtttctctatcgcggcgtaactctgtaacgagtctgataaagggaccggaataactactctgcttttacactgaacttgccccactgttgaaggttacttcccgagttccaagcctgacctacccgtaagcacaacgtc

SEQ ID NO: 1538 - DNA, 347 bp, Glycine max
  Clone ID: LIB3072-033-Q1-E1-C5
agatgatagaaggggacattaggaatgaaatacgttaagtgcaggaggggaaaaaaaaaaaaaaaagtggttgtctcagaggacttaagtccatgcatgtgcgtacgtgatgctacagtctcctcacagcgctattcaaacctaacctatcggttgctgccccataatgctgcgatcgggaaaatttcggtgccatttaatccaactgttccgtagtatactttttccctgttagtcggtgcaacagtgaagaagtttgtattgactgtttcctttaatagccgtgtagttcgaacggtgaacgggatgtgtttcgcagtggtgtaccaagtgtggtgggcgcggcg

SEQ ID NO: 1539 - DNA, 398 bp, Glycine max
  Clone ID: LIB3072-033-Q1-E1-C6
tcgtggaagatgatagaccgggacccctaccctcaatcaagaaagctccttacagtgtttggcaaaccaagagtattactccgcccgtctctccctctccccgcgttcctattattctacattcattcctagttactgtcgaccctgcgtctgacaacgaaggcaatttctccgaaaacggcggtatacaccacactccgctagatacaatagtacccggcggaacaagagtagttttaatgggaaacgaaagacgtttctctatcgcggcgtgactctgtaacgagtctgataaagggaccggaataactactctgcttttacactgaacttgccccactgttgaaagttacttcccgagttccaaacctgacctacccgtagccacaacgtcgcgc

SEQ ID NO: 1540 - DNA, 415 bp, Glycine max
  Clone ID: LIB3072-033-Q1-E1-C7
ttgggttgatttatgtgcttgcttatgtgcttgtttatctgcttgcctcgccctcagaagatgatagaaggggacgtggtgggacaaccaagaaaagttagccgtgacagtagttcaagaaaacgaagagtatcagtccgcctgtcactccctcatcccgtgttcctattctacattcattccttgttattgtttaggatgcgtctgatgcggacggtgacttgacctggaatggccctacacatcatgccccgttggtaacaagaggaaatggcggtggaacagaatgagttgtatctgggaaagacatccgtttcactatcgcagcgtaactctttaacttaaatctcaaggggccagaaaccaagcccgaactcgtacattttgttcaccatacaaatgaaatttcaacccc

SEQ ID NO: 1541 - DNA, 432 bp, Glycine max
  Clone ID: LIB3072-033-Q1-E1-C8
tggctcggaacctttgggctgatttatgtgcttgggtcgtgagaagatgatagaaggggatccccagcctgaatcaaataacctaacctaattcggtctgactacggagaggaaaatacccgggcccccgcctccgtcttcttccgctccagtcctcgacgcgatggcgaagagagtagaggtgaaagaccgtccgataaggaggtatgggccttagggcagacgtccacctgataggtaacgcgtatacgcgcgtaggagtgacggccctactggcggctagcgttgaggtttctcctgtaaacgtccccgtagtaggttacgccgactgaaaccatcatcgttaaagaggttacgaaacaaataaataaataaacaaacaaacagtctcaattgatatacacgcatgcagcgctggggcctcagtcagtc

SEQ ID NO: 1542 - DNA, 449 bp, Glycine max
  Clone ID: LIB3072-033-Q1-E1-C9
aacctttgggctgatttatgtgcttgggtcgtgagaagatgatagaagggggagcctcaatcaaataacctaacctaactcgttctggctacggccaggaaaatacccgggcccccgcctccgtcttcttccgctccagtcctcgacgcgatggcgaagagagtagaggtgaaagaccgtccgataaggaggtatgggccttagggcagacgtccacctgataggtaacgcgtatacgcgcgtaggagtgacggccctactggcggctagcgttgaggtttctcctgtaaacgtccccgtagtatgttacgccgactgaaaccatcatcgttaaagaggttacgaaacaaataaataaataaactaacaaacagtctcaattgatatacacgcatgcagcgctggggcctcagtcagtcaggcaggcatgcgcgctccccgccactgac

SEQ ID NO: 1543 - DNA, 388 bp, Glycine max
  Clone ID: LIB3072-033-Q1-E1-D10
ggaacctttgggctgatttatgtgcttgtttatgtgcttgcatggtcgtgagaagatgcatagagggaggttatggtgggaagcctatgcggactggttatggtcatgagtaagccgagacgttgtatggcgtcacggatgttaaggatttgaatcctgaggacttcgcggagactgttattgcgcgactgtggcggcccttggcggttaggctcgcaaacagcagcaaccggtgaaatgcgcccccctgcgcctaacaacgcgaagtgaactggagaagaagtgcccctcgcgaccgaccgccacagactcgactcactcgtggcacccggcagcagtacggtatccgccgcatacacactgctccggagccggaagcgtatctgca

SEQ ID NO: 1544 - DNA, 403 bp, Glycine max
  Clone ID: LIB3072-033-Q1-E1-D11
ggctccgaacctttgggctgatttatgtgcttgtttatctgcttgtttatctgcttgcatggccctcagaagatgatagaagggggtagttaagggaacgacaacttctaacccctcgagtagttaaatatctctctctcgctctctgaaaacctctagcccgtagagaaaactcgaactacgctgcggcaagtgcacgctgatgactattcctcgcgcgatactcaacgcaattattctatctatgtcgtcactactgcttaagatcgtagtgcccgggtctagagcattgatcctttctagcctaaattcgacgagacaatcgttactacgaacgatcccaacgagttcggactatccgtcttaatcggaccgcactctggcggtattaaacacacggcta

SEQ ID NO: 1545 - DNA, 431 bp, Glycine max
  Clone ID: LIB3072-033-Q1-E1-D12
aacctttgggctgatttatgtgcttgcatggtcgtgagatgatacgagggcatggccctcagaagatgatagacgggcatagtaaaggtaaccaacaaagacgagcccgaagaataatacggcggcgtcaaaggcgcgcccgccgtcctccccttccgcgggggccatagtcgtatgtacggaatcgagtcctcctaaaagcgactagctactaagccacgacgacgacgagcacctaaaattacgtcgcgactctcgtacgcgtatatgtctaacgttcttctaacgtagtcgcgaagacaccaggtcgaacctacgttatctagaccgcaagagtcgcacgcgtatatgtctatagttaggatagcgctgccgctccgatattaatgatcctcgtcataaattccgtaagcttagagacgatcagaaaa

SEQ ID NO: 1546 - DNA, 464 bp, Glycine max
  Clone ID: LIB3072-033-Q1-E1-D2
tttgggctgatttatgtgcttgcatggtcgtgagaagatgatagaagggacatacgagacaagttaaccgcgacaagttacctatctaggcgaaaagaaaaaaaaaatacacagcaataaaattacggcgacctatagatctgaaccgcgtacaaatacggcctaatctgttacagagcctgctgcgagtgctgtggaaatagcggctacagcctagtagagaattgcggagttctctggaacgccgaactgtgtaagcatattctccttccctcacggtcattcttgccgaacgccgaagagtactgtccgaccaaccatccctcagtccctcccctcctcacgaaaccttgtaacccccacagatttcgcgcccctcccttccccgggcgtactaagtgtcgaccgacgtaaatttatatgagccgtccgcgcaaggaaaaccgacgtttccggcccccccc

SEQ ID NO: 1547 - DNA, 335 bp, Glycine max
  unsure at all n locations
  Clone ID: LIB3072-033-Q1-E1-D3
ggctgatttatgtgcttgtttatgtgcgtgcatggtcgtgagaagatgatagaccgggagccgaggaataaaatanatgggatgagaaaaaaaaaaaaaaaaaagtggttgtctcagaggacttaagtccatgcatgtgcgtacgtgatgctacagtctcctcacagcgctattcaaacctaacctatcggttgctgccccataatgctgcgatcgggaaaatttcggtgccatttaatccaactgttccgtagtatacgttttccctgttagtcggtgcaacagtgaaaaggtttgtattgactgtttcccttaatacccgtataattcgaacg

SEQ ID NO: 1548 - DNA, 380 bp, Glycine max
  unsure at all n locations
  Clone ID: LIB3072-033-Q1-E1-D6
gcgccaccgaagagcanggacgacagaacttgcactgcagtaaaatgtatgagccaagggtggtgacgggaggtctactggaggaccctctggcggcggcgtcggtgctggattctggtgctgacgtgtgattcccttctgaatatgaccaatagtaagaagaagagaaccggtatgatcgcctttagcattctctttttgatgaggatcctcttgactctgactagccgtaaccttcttgttcttaaggtcttgataagaatcttaactgtacctcttgtactgctggtaagcatccctttggcatcttccctatcttccttctcatctaattaacatctgcaaccctacgcgcctctgaccccgtcctctacatatat

SEQ ID NO: 1549 - DNA, 476 bp, Glycine max
  Clone ID: LIB3072-033-Q1-E1-C10
tggttcgaacctttgggctgatttatgtgcttgcatggtcgtcagaagatcatagaaggggacctatataatcaatcaagaaagctccttacagttttttaaaaacgaagagtattactcctcccgtctctccctctccccgcgttcctattattctacattcattcctagttactgtcgaccctgcgtctgacaacgaaggcaatttctccgaaaacggcggtatacaccacactccgctagatacaatagtacccggcggaacaggagtagttttaatgggaaacgaaagacgtttctctatcgcggcgtaactctgtaacgagtctgataaggggaccggaataactactctgcttttacactgaacttgccccactgttgaaggttacttcccgagtttcaagcctgacctacccgtagccacaacgtcgcgcgccggaaccttcattgagcggctcgccgcggaggactca

SEQ ID NO: 1550 - DNA, 374 bp, Glycine max
  Clone ID: LIB3072-033-Q1-E1-A5
cctttgggctgatttatgtgcttgcatggtcgtgagaagatgatagacggggggcgaggccaacaaaaccaaaccagcggtgtatgccacgtgtcttagagagcgtgaggtgagagagaacgataacactcgcccctccagccttcctgatgttctagccgcgcaatcatagaactctacggttaacctttatccatttcctctccctcctcctcaagccaatcgccctatcgcgtctcttccttttcttaatactcgccactgaagagggcttcctcttcctattagaaccgattagcggccgcaaggtgcgcggaagagaagaaacggagtaaggacgtaacggcgaaggaaagacctaaggcgggaccgtc

SEQ ID NO: 1551 - DNA, 342 bp, Glycine max
  Clone ID: LIB3072-033-Q1-E1-A6
tttgggctgatttatgtgcttgcggtcgtgagaagattatagacggggacctatatcctcaatcaagaaagctccttacatttgtttgaaaacgcagagtattactcctcccgtctctccctctccccgcgttcctattattctacattcattcctagttactgtcgaccctgcgtctgacaacgaaggcaatttctccgaaaacggcggtatacaccacactccgctagatacaatagtacccggcggaacaagagtagttttaatgggaaacgaaagacgtttctctatcgcggcgtaactctgtaacgagtctgataaagggaccggaataactactct

SEQ ID NO: 1552 - DNA, 320 bp, Glycine max
  Clone ID: LIB3072-033-Q1-E1-A7
gcttgcatggtcgtgaagatgatcgacgggcatggtcgtgagaagatgatgagaggggggagggaaagacgacgagactaacggatccgcctggagagacggatgagtaggcactgctgacggtaacggatgcggatgatgctgatttctctgagactcctgttgagggtgctactgttgttgataataaatctgttgatgttgaccctcctaataacccttaagatgaccctgacgatctcgacactaatcaaaattttccctcctcctacgggcacctctggggccaaacaaccctctggccagggccctggcacccc

SEQ ID NO: 1553 - DNA, 400 bp, Glycine max
  Clone ID: LIB3072-033-Q1-E1-A8
ttgggttgatttatgtgcttgcatggtcgtagaagatgatagaagggacctcggcgaggacgggtttctcgatcggaagaagggggtagaaaacggcggacggaagaacggcaacggactctaggtccggaattaggacatcggcgataaggacaggtaaagtcggagttagggaaacgtagacaaggagtgcttcagtcggaattaaggaagcggaagcaactagagtcggagcctagtcagcgtcggagtcaatgacaaccggaataataacgggctcatatagatcgtagaagtcagtcggaaaaaaactcatcataatcgaagagattaatacttacgatagcgggcggaataagggactcagcctaaatatcatcctctggggacggggctaact

SEQ ID NO: 1554 - DNA, 339 bp, Glycine max
  Clone ID: LIB3072-033-Q1-E1-A9
tgggttgatttatgtgcttgcatggtcgtgagaagatcatagaaggcgatcctaaaaataaccaacaaagacgagcgggaggaataatacggcggcgtcgaaggcgcgcccgccgtcctccccttccgcgggggccatagtcgtatgtacggaatcgagtcctcctaaaagcgactagctactaagccacgacgacgacgagcacctaaaattacgtcgcgactctcgtacgcgtatatgtctaacgttcttctaacgtagtcgcgaagacaccaggtcgaacctacgttatctagaccgcaagagtcgcacgcgtatatgtctatagttaggatagcg

SEQ ID NO: 1555 - DNA, 310 bp, Glycine max
  Clone ID: LIB3072-033-Q1-E1-B1
gggaagactctacagagagagagagagaagcgtagaaaagacgagatcgcctgacttacggttcgcccctcctaagagagaacggaagtggaaccggtttcctccggccggacctgttactattggaatctctactattaaatccctttccggctctctcgaggaggaagttaaaaagctgaaacctgcttaagtatataagaggcgatcccagaacggaagacccgtagcggtcccgtataccgcaccaaacgcgcgaagagagtccccgcccgcaacaaacgaagagagacgccgcacatatcttacg

SEQ ID NO: 1556 - DNA, 388 bp, Glycine max
  Clone ID: LIB3072-033-Q1-E1-B10
ggttggaactttgggctgatttagtgcttgagatgatagagggcatggtcgtgagaagatcatagaagggggcactgtaggaaccaggaggtgccacggggcctctcgcaattatgtcaacccctgtagcgaccggaaccgcggtgctttcccgcattagaacccgccctaatagaggattccttgtcaactcaccctattcaatcccggcctccatcgtaataatacgtcgtcggacgacgcgggtgaccgcacactcagtatagacgaaattgtctacagcattcacaccgagcgagggcgaacaatccctcgcacaaatagacgtaatctccaagaacgtgaactatcagccggatgtcggagaggagacgaccctagtctctac

SEQ ID NO: 1557 - DNA, 365 bp, Glycine max
  Clone ID: LIB3072-033-Q1-E1-B12
tgggttgattgatgtgcttgcttatgtgcttgcatggtcgtgagaagatgcatcgagggcatggtcgtcagaagatgataggagggcatcgtcgtgagaagatgatagaagggcatggtcgtaagaagatgatagaagggcatggtcgtgagaagatgatagaagggcatggtcgtgagaagatgatagaagggcatggtcgtgagaagatgatagaaggggagaacgagaaaaatgactcaaaaaaaaaaaaataaaacacaccatgtggtatgtctcagaagacttaagtccatgcatgtgcgtacgtgatgctacagtctcctcacagcgctattcaaacctaacctatccgttgctgcccc

SEQ ID NO: 1558 - DNA, 352 bp, Glycine max
  unsure at all n locations
  Clone ID: LIB3072-033-Q1-E1-B2
tgggctgatttatgtgcttgcatggtcgtgagaagatgatagaagggggacaaaaatgaagaaagaaaaactcaagatcacgcgagagaaagaaatgtcctctctctgagtgcgactgcgacttgcctttccttaaccccattaaanaaaaaaaaaaaaaaaaaaaaaaaaaggtggttgtctcagaggacttaagtccatgcatgtgcgtacgtgatgctacagtctcctcacagcgctattcaaacctaacctatcggttgctgccccataatgctgcgatcgggaaaatttcggtgccatttaatccaactgttccgtagtatactttttccctgttagtcggtgcaac

SEQ ID NO: 1559 - DNA, 418 bp, Glycine max
  Clone ID: LIB3072-033-Q1-E1-B3
tggaaccttgggctgatttaggtgcttgcatggtcgtgagaagatcatagacgggggcaccgtactagcgaaacggtcggcctaaccggaagtggagggaatataagtatgggcgcggagcggtatgcgtgattcttaaatttcaagaactttactgctcctcctgacgctattactggcaatacctttgttggctgaactaagacggaatctcctgttgacaccgtttttaaaatcgttgagaaccctaggtagcctcgtatcggggaacataggaaagtaggatcgttcgccggccataagggccgctaaccctacagagccaccaaagaccccacgacctatgtcggcgaacccgcaaagggagacggcagcggacgcgcccttactcacggatctaagcccgacgacgaaaatc

SEQ ID NO: 1560 - DNA, 441 bp, Glycine max
  Clone ID: LIB3072-033-Q1-E1-B4
cctttgggctgatttaggtgcttgaagatgatagacggggatagtacaaataacccacaccgacgagcccgaagaataatacggcggcgtgaaaggcgcgcccggcgtccgcgccttccgcgggggccatagtcgtatgtacggaatcgagtcctcctaaaagcgactagctactaagccacgacgacgacgagcacctaaaattacgtcgcgactctcgtacgcgtatatgtctaacgttcttctaacgtagtcgcgaagacaccaggtcgaacctacgttatctagaccgcaagagtcgcacgcgtatatgtctatagttaggatagcgctgccgctccgatattaatgatcctcgtcataaattccgtaagcttagagacgatcagaaaaatcaacagtctctctaaacggatgaaattttcccaggtccccgcccgc

SEQ ID NO: 1561 - DNA, 206 bp, Glycine max
  Clone ID: LIB3072-033-Q1-E1-B5
ctttgggctgatttatgtgcttgcatggtcgtgagaagatgatagacgggggtcgcaacccagcacgagaacggtatcgtcctagaggagaccaacacagaaataaaaaagaaattaataaacacccgagccaaaactcgcaaaaacacaagaaaacaccgctatcccacgacaacacccacgttcgttgaaaataaatccgtcgc

SEQ ID NO: 1562 - DNA, 239 bp, Glycine max
  Clone ID: LIB3072-033-Q1-E1-B6
tagaagggcatggtcgtgagaaggtgatacacgggcatgggcgtgagaagatcataggagggcatggtcgtgagaagatgatagaagggcatggtcgtgagaagatgatagaagggcatggtcgtgagaagatgatagaagggcatggtcgtgagaagatgatagaagggcatggtcgtgagaagatgatagaagggcatggtcgtgagaagatgatagaagggcatggtcgtgagaag

SEQ ID NO: 1563 - DNA, 349 bp, Glycine max
  Clone ID: LIB3072-033-Q1-E1-B7
aacctttgggctgatttatgtgcttgtttatctgcttgtttatctgcttgtttatctccttgtttatgtgcttgcatggtcgggaggggatgatcgaagggcatggtgaaaataaccaacaaagacgagcccgaagaataatacggcggcgtcaaaggcgcgcccgccgtcctccccttccgcgggggccatagtcgtatgtacggaatcgagtcctcctaaaagcgactagctactaagccacgacgacgacgagcacctaaaattacgtcgcgactctcgtacgcgtatatgtctaacgttcttctaacgtagtcgcgaagacaccaggtcgaacctacgttatcta

SEQ ID NO: 1564 - DNA, 411 bp, Glycine max
  Clone ID: LIB3072-033-Q1-E1-B8
ctttgggctgatttatgtgcttgcatggtcgtgagaagatgatagaagggggccgtagtactacataaagtaccgaacctaaaggtccaagcctaccttccgcgccccgtccctccttctaaaattaaatacgctgaatatacgtggtaatcgtgatcgtgtcgataagatcagtcgtattaagggaaatagtcacggcgccaccgcagagatcgggaagagccatactgagatcgccgctacggacgccttagtagtcgagtacgacgggaagcgtaagcgcggtatcaatcgtatccgtatggatcgtattcgcggttaccaaggaacacgcacgaaaacgcaaccgttacgcgcccggtaacataaacacttaaacaacgcaactcctgcacgaacaaacgcgcgcgt

SEQ ID NO: 1565 - DNA, 316 bp, Glycine max
  Clone ID: LIB3072-033-Q1-E1-B9
gaacctttgggctgatttatgtgcttgcatggtcgtgagagatgatagaagggcatcgtcgtgagaagatgatagaagggcatggtcgggagaagatgatagaagggcatggtcgtcagaagatgatagaagggcatggtcgtgagaagatgatagaagggcatggtcgtgagaagatgatagaagggcatggtcgtgagaagatgatagaagggcatggtcgtgagaagatgatagaagggcatggtcgtgagaagatgatagaagggcatggtcgtgagaagatgatagaagggcatggtcgtgagaagatgat

SEQ ID NO: 1566 - DNA, 299 bp, Glycine max
  Clone ID: LIB3072-033-Q1-E1-C1
ggggataccccatattgcctaacccgactctctttcgctcggctcccctcgctcgctcgcggtctccctctctctcctggggagtgagactaactagtcatagtccttttttataaaaattaaaaactagacaatttagacaaaaataatctttaaaaaaaaaaaaaaaaaaaaaaaaaaaaaagtggttgtctcagaggacttaagtccatgcatgtgcgtacgtgatgctacagtctcctcacagcgctattcaaacctaacctatcggttgctgccccataatgctgcgatcggga

SEQ ID NO: 1567 - DNA, 419 bp, Glycine max
  Clone ID: LIB3072-033-Q1-E1-A4
ggcttggaacctttgggctgatttatgtgcttgtttatgtgcctgcatggtcgtgagaagatgatagacggggactccaaccctaaactacaaaggctcgttattaagccacgggcccttccgcgccgtcctcccctctttctccaggctctctcctcagccttagtacactaatctactgccttacaccggattccgattcaattaagcccattatatagaaataggcgctcctatcgccttaatcacggaagagcgagtacggatgcgctcattacaattatgaagaagaggtaaagagatccgagacccctaagaacaatccgaatcacactagggatacgaacgtaaatagaaaactattttacctctactgcccaggaccgaataagcccgtcgatactatcttctaagagcct

SEQ ID NO: 1568 - DNA, 289 bp, Glycine max
  Clone ID: LIB3072-032-Q1-E1-G6
tttgggctgatttatgtgcttgcatgggccctaaaaaattttttcaaagggcttccccctctaaaaaatttttataaaggcatgtttcgtgagacgataataaaagggcatgggtcgtgaaaaaattatataacgccatagacgtaagaccatgattgtacgtccttgacgttacaagatcatcacagcggtattcaaaactaacccaacggattgcttcccacaaatgatttaatatcgaaaaatttccgtaccctttaatccaaactctccacaacgtaacttttcc

SEQ ID NO: 1569 - DNA, 457 bp, Glycine max
  Clone ID: LIB3072-032-Q1-E1-G8
tgcttggaacctttgggctgatttatgtgcttgtggatgtgcgggtcgtgagaagatgatccacggggacctatataatcaatcaagaaagctgcgtacatttttttaaaaacgaggagtattactcttctcgtctctccctctccccgcgttcctattattcgacattcattcctagttactgtcgaccctgcgtctgacaacgaaggcaatttctccgaaaacggcggtatacaccacactccgctagatacaatagtacccggcggaacaagagtagttttaatgggaaacgaaagacgtttctctatcgcggtgtaactctgtaacgagtctgataaagggaccggaataactactctgcttctacactgaacttgacccactgttgaaggttacatcccgagttccaagcctgacctactcgtagtcacaacgtcgcgcgccggaaccttca

SEQ ID NO: 1570 - DNA, 486 bp, Glycine max
  unsure at all n locations
  Clone ID: LIB3072-032-Q1-E1-H1
ttgcttggaacctttgggctgatttatgtgcttgtttatgtgcttgcatggtcgtgagaagatgatagaaggggatagtaaaaataaccaacaaagacgagcccgaagaataatacggcggcgtcaaaggcgcgcccgccgtcctccccttccgcgggggccatagtcgtatgtacggaatcgagtcctcctaaaagcgactagctactaagccacgacgacgacgagcacctaaaattacgtcgcgactctcgtacgcgtatatgtctaacgttcntctaacgtagtcgcgaagacaccaggtcgaacctacgttatctagaccgcaagagtcgcacgcgtatatgtctatagttaggatagcgctgccgctccgatattaatgatcctcgtcataaattccgtaagcttagagacgatcagaaaaatcaacagtctctctaaacggatgaagttttcccaggtccccgccnngcacgcagggga

SEQ ID NO: 1571 - DNA, 376 bp, Glycine max
  Clone ID: LIB3072-032-Q1-E1-H10
ttgggctgatttatgtgcttgcatggtcgtgagaagatcatagaaggggatcgtacaaataaccaacaaagacgagcccggggaataatacggcggcgtcaaaggcgcgcccgccgtcctccccttccgcgggggccatagtcgtatgtacggaatcgagtcctcctaaaagcgactagctactaagccacgacgacgacgagcacctaaaattacgtcgcgactctcgtacgcgtatatgtctaacgttcctctaccgtagtcgcgaagccaccacgtcggacccacgttatctagaccgcaagagtcgcacgcgtatatgtctatagctaggatagcgctgccgctccgatattaatcatcctcgtcatacatt

SEQ ID NO: 1572 - DNA, 289 bp, Glycine max
  Clone ID: LIB3072-032-Q1-E1-H12
acccactcacgacaaactcggcaaaggcacaccacgcaccagccctggaaaagcccatcccataactacccccaaaaaacacccaccaaacccctataccaacgaaaccgccaaacaccttaccaccctccaaccacaccacaccaccgaccaacccacctccaccaataaacacccccaacccacccaccacttaccaaacccactttcaaccacactacccctccaaaaccactcccaatataccccccaactccaccaccaccccacacccccacccaacaaccct

SEQ ID NO: 1573 - DNA, 494 bp, Glycine max
  unsure at all n locations
  Clone ID: LIB3072-032-Q1-E1-H2
ttggttcgaacctttgggctgtttatgtgcttgcatggtcgtgagaagatgatagaaggggacccccccactccgaaatatacaccatcagatcgatcttaaaacaatcactcctacctcgtatttcctccgcctcctcgcccagttaaaaaacctcgagcgccaaaccagcgatctacgatcgtcatcacgactaagccacacccccccctttccgttaccccggccactccttccgttaacttaaagggcgcgatcctaagcctaagcattagcgagttcataaccctagtactcttcggcgccccgttccacgcgatcattttagagacccttctacccccctttatcttaagcgtaacctaattaacgagcctcggccccgaagttgaggtattggtattggtatttagcctaagggaagccgagggtaagaggctcctcggcctagtcaggccggaccgcgtangcgttaccggccggcgctcgtctcg

SEQ ID NO: 1574 - DNA, 420 bp, Glycine max
  Clone ID: LIB3072-032-Q1-E1-H3
tggcttggaacctttgggctgatttatgtgcttgtttatgtgcttgcatggtcgtgagaagatgatagaaggggataatactactactaataataagtagactaactctctctctctctctaattacaacagctacgggcccgaaggaggaccccgagtagcacgtcgagaaagtaaagatcccgttattgatctaactaaatgaagatccgtccacttcccacggaccgcataaataggttattgccggattcgctaatattagttgcttcggaacgcctaatacgagggatagagtcaaacgggacgtacggaaagtcgccgaaaggaaacttaaggatgaagtaacgggcgaccatactaccaaggcgaaatagtcgtcggaagtagtcggtccgttcgtccgacaataccgctacg

SEQ ID NO: 1575 - DNA, 476 bp, Glycine max
  Clone ID: LIB3072-032-Q1-E1-H4
ttgcttggaacctttgggctgatttatgtgcttgcatggtcgtgagaagatgatagaaggggatagtaaaaataaccaacaaagacgagcccgaagaataatacggcggcgtcaaaggcgcgcccgccgtcctccccttccgcgggggccatagtcgtatgtacggaatcgagtcctcctaaaagcgactagctactaagccacgacgacgacgagcacctaaaattacgtcgcgactctcgtacgcgtatatgtctaacgttcttctaatgtagtcgcgaagacaccaggtcgaacctacgttatctagaccgcaagagtcgcacgcgtatatgtctatagttaggatagcgctgccgctccgatattaatgatcctcgtcataaattccgtaagcttagagacgatcagaaaaatcaacagtctctctaaacggatgaagttttcccaggtccccgccggcacgccaagggaga

SEQ ID NO: 1576 - DNA, 389 bp, Glycine max
  Clone ID: LIB3072-032-Q1-E1-H5
aacctttggtctgatttatgtgcctgtagatgtgcgggtgagaagatgatatacccccactaagttacggaaagtacgaagacgagagcgatccccataaagaacaggaggaattctacgtcgactatttcttatagtgattaactaggtttaaatactaagaattatgctcaagatgacgctagatcagaaacggggccgaggaaaacacccgtattacgaagtcctatgagaataccgtctggttcctatacatcgatcaccataatctaaaagtcggctgtacaagcctttccgatagctcgatttctttagcttcgtaataacccggatctatcgtttaacacgccgattcgcataggaacggaactcatctcatataccgcaat

SEQ ID NO: 1577 - DNA, 487 bp, Glycine max
  Clone ID: LIB3072-032-Q1-E1-H8
tggcttggaacctttgggctgatttatgtgcttgtttatgtgcttgcatggtcgtgagaagatcatagatggggatagacacccacgcgctcaggagatacacatcaaaaaattaaggtgagcgaaagaaaaaaaacgctaggcgcgctctcagtagcgctcggcttattagtagtaatagcggtcgaagtagtaggcataaagttcaaatgaagaatagaataggtactaacgggcggtacgacgggcctatcgtgtgcgacagaatcctagtcggcggttcctactccggcgcctctagtaagcggttccgctttatcttccgactcagagcctttcgtacctgttctcgtacatactccggtgtccctataacctgtacccatactggtgctcctgctggggatcgagactcctaaagggagtacaccgccgtgaacgcacgccgacgtcggtattattgcggggtcgcctccgttgtcggtcc

SEQ ID NO: 1578 - DNA, 452 bp, Glycine max
  Clone ID: LIB3072-032-Q1-E1-H9
ggaacctttgggctgatttatgtgcttgcatggtcgtgagaagatgatagaaggggcggaacggcgacgtctaccaatccggtccctagcgagggcgagcacgtcggtagtatctctagtacgtccgggaggaatttcgcctaggatatcgccagggaaacgtttaccgccggaggtatgggtgcgcctaggcccgttaagggtcacgttaccgttaagagctcccgggaaaccctcgataacgagtaccccgcggcggagcactacgctatcgccctctacttccacactcgacacgctccccgccaagagcaacaaaccccaggtccagacactcctaagacggcacgacaaacgaacaaaccccaccgagccccaagtaaaaaaaaccaaccaacaaaccaaaaaaaagtggttgtctcagaggacttaagtccatgcatgtgcgtacg

SEQ ID NO: 1579 - DNA, 244 bp, Glycine max
  Clone ID: LIB3072-033-Q1-E1-A1
agtaaaaataaccaacaaagacgagcccgaagaataatacggtggcgtcaaaggcgcgcccgccgtcctccccttccgcgggggccatagtcgtatgtacggaatcgagtcctcctaaaagcgactagctactaagtcacgacgacgacgagcacctaaaattacgtcgcgactctcgtacgcgtatatgtctaacgttcctctaacgtagtcgcgaagacaccacgtcgaacctacgttatct

SEQ ID NO: 1580 - DNA, 469 bp, Glycine max
  Clone ID: LIB3072-033-Q1-E1-A10
tggctctcgacctttgggctgattgatgtgcttgcatggtcgtgagaagatgatagaaggggatcctaaaaataaccaacaaagacgagcgggaagaataatacggcggcgtcaaaggcgcgcccgccgtcctccccttccgcgggggccatagtcgtatgtacggaatcgagtcctcctaaaagcgactagctactaagccacgacgacgacgagcacctaaaattacgtcgcgactctcgtacgcgtatatgtctaacgttcttctaacgtagtcgcgaagacaccaggtcgaacctacgttatctagaccgcaagagtcgcacgcgtatatgtctatagttaggatagcgctgccgctccgatattaatgatcctcgtcatacattccgtaagcttagagacgatcagaaaaatcaacagtctctctaaacggatgaaattttcccaggtcccgcccgccacgcca

SEQ ID NO: 1581 - DNA, 274 bp, Glycine max
  unsure at all n locations
  Clone ID: LIB3072-033-Q1-E1-A12
gggagggtaaaaataaccaacaaanacgagcccgaagaataatacggcggcgtcaaaggcgcgcccgccgtcctccccttccgcgggggccatactcgtatgtacggaatcgagtcctcctaaaagcgactagctactaagccacgacgacgacgagcacctaaaattacgtcgcgactctcgtacgcgtatatgtctaacgttcttctaacgtagtcgcgaagacaccaggtcgaacctacgttatctagaccgcaagagtcgcacgcctata

SEQ ID NO: 1582 - DNA, 263 bp, Glycine max
  unsure at all n locations
  Clone ID: LIB3072-033-Q1-E1-A2
ggggtggtcgtgagaagatgatagaagggcatggtcgtcagaagatgatagaagggcatggtcgtgagaagatgatagaaggggcaagcagcatacaaaataaaaaccaatcgagcaacttcacgacttacacttatcgtaaacaggactgacttaatagccagagggattcaaaacaaacccnanaaaaaaaaaaaaaaaacaaaacaaaaagtggttgtctcagaggacttaagtccatgcatgtgcgtacgtgatgctac

SEQ ID NO: 1583 - DNA, 352 bp, Glycine max
  Clone ID: LIB3072-033-Q1-E1-A3
gtgatttatgtgcttgcatggtcgtgagaagatgatagaaggggacctatatactcaatcaagaaagctccttacaggtttggaaaaacgaagagtattactcctcccgtctctccctctccccgcgttcctattattctacattcattcctagttactgtcgaccctgcgtctgacaacgaaggcaatttctccgaaaacggcggtatacaccacactccgctagatacaatagtacccggcggaacaagagtagttttaatgggaaacgaaagacgtttctctatcgcggcgtaactctgtaacgagtctgataaagggaccggaataactactctgcttttacactgaa

SEQ ID NO: 1584 - DNA, 476 bp, Glycine max
  Clone ID: LIB3072-032-Q1-E1-G5
gcttggaacctttgggctgatttatgtgcttgtttatgtgcttgtttatgtgcttgcatggtcgtgagaagatgatagaagggacactactggggctcaacctactcgagcaagcgcataagtgaaagaccctctactctcacgggaccaaactttgagacaccttaaaaaaaaaaaaaaaaaaaaaaaaaaaaaagtggttgtctcagaggacttaagtccatgcatgtgcgtacgtgatgctacagtctcctcacagcgctattcaaacctaacctatcggttgctgccccataatgctgcgatcgggaaaatttcggtgccatttaatccaactgttccgtagtatactttttccctgttagtcggtgcaacagtgaagaggtttgtattgactgtttcctttaatagccgtgtagttcgaacggtgaacgggatgtgtttcgcagtggtgtaccaagtgtggtgggcgcggc

SEQ ID NO: 1585 - DNA, 281 bp, Glycine max
  Clone ID: LIB3072-032-Q1-E1-F1
ggcttggaacctttgggctgatttatgtgcttgatggtcgtgagaaagatgatagaggacatggtcgtgagaagaatgatagagggggccaatgagagttactattgaaaaaaaaaggggaaaaaaaaaaaaagtaagtggctgactcagaggacgtaagtccatgcatgtacgtacgtgaagcgacagtctacacacagagctattcaaacctaaccgatcggttgctgacacataatgcatcgatcgggaaaatttcggagccatttaaaccaactggt

SEQ ID NO: 1586 - DNA, 503 bp, Glycine max
  Clone ID: LIB3072-032-Q1-E1-F11
cttggaacctttgggctgatttatgtgcttgtttatgtgcttgcatggtcgtgagaagatgatagaaggggaaaaaaaaaagaaatacaccgggtagcgaacccgcaaacagggtaaaagcaacggacaaggaaccaaccctctcggacacaccagaaaattgaacctgaccgctcaacgacgaaatcaaaatgaaacacccaatcaaaacacacgacttcccttcgaatggatgtccctgcggataaactgaaaacgcccccctaattctaacttaacacgaaaaaaacgaaaaaaaaacattaccccgacaaacaaaacctacggcacttccaccctcaacaacatccacaaaaaaaacaacagcaaccacctagaaccagagaaaaaaacacacacacccgacagaaaactcccagcaatcataccccccacccctaactcaactagcaaacccctaaaaaaaaccacactaagtccgacccccgaagtatccctccaac

SEQ ID NO: 1587 - DNA, 468 bp, Glycine max
  Clone ID: LIB3072-032-Q1-E1-F2
tggcttggaacctttgggctgatttatgtgcttgcattgagaagatgatagaagggcatggtcgtgagaagatgatagaagggcatggtcgtgagaagatgatagaagggcatggtcgtgagaagatgatagaagggcatggtcgtgagaagatgatagaagggcatggtcgtgagaagatgatagaagggcatggtcgtgagaagatgatagaagggcatggtcgtgagaagatgatagaagggacactaatcttatgaaaaaaaaaaaaaaaaaaaaaaaaaaaaaagtggttgtctcagaggacttaagtccatgcatgtgcgtacgtgatgctacagtctcctcacagcgctattcaaacctaacctatcggttgctgccccataatgctgcgatcgggaaaatttcggtgccatttaatccaactgttccgtagtatactttttccctgttagtcggtgcaac

SEQ ID NO: 1588 - DNA, 466 bp, Glycine max
  unsure at all n locations
  Clone ID: LIB3072-032-Q1-E1-F3
ggcttggaacctttgggctgatttatgtgcttgcatggtcgtgagaagatgatagaagggggcctcagcgcgcgaccgcccgccgccgcaatctgcgtcctcctccccgccgcctcgcgcccgcgcccgcccccctctctattcgaaaacgctccgtcgtggcggcaatcgcggccgtggaagtcttcgtaagcgtggtaatggtcgtggaggtcgtaggacgcatttagatccgagtcatatcgagttaattattattgagattccggctacgggagcggtattcgccaaggtctaacccgagggcgtcgaaacgggcgcgtttgtcgagaatgacggtcgtaaacgcggattaaatcgtcttcgtaattttcgtatccgtaagcgangcgccgggagagtaagtcctaagtagagacagtttccaaccaggaacaacgacnaatcaccaacgcacagtccaaaa

SEQ ID NO: 1589 - DNA, 464 bp, Glycine max
  Clone ID: LIB3072-032-Q1-E1-F4
tggcttggaacctttgggctgatttatgtgcttgcatggtcgtgagaagatgatagaaggggacttaacttaaccgaacctcttagagagaagaagaaatccaactgactactatcctatcctatcaacatactacggtagatgagatttagaataagcacgagagtctcgaggccgaggcttaggactgcggcgcccccgatccctctggcaagaaaaaggacgaagaagataagttctacttctaggaggaggctactgttattgagccctaaaaagctatcgctctagattaaggagagaataagtatagttctccagaaaagtcctattgactcgatagtagtctcagtctcctaagcgaggaagaaggagaagacggagagaaaaggaagaagaagaagaaagaaaagaaagggtcgaaagagaagactgaggagaaaacagagggcgactactactac

SEQ ID NO: 1590 - DNA, 388 bp, Glycine max
  Clone ID: LIB3072-032-Q1-E1-F5
aacctttggtctgatttatgtgcttggtgagaagatgatagaaggggagataaagccccgccgtaaagtaaaaaatcatgaagagtcgcttcttacatgaacttaaggaggagagaggagatatagatatcaaggaaatggaaaaagtaatatatataaaaaaggctcgcgttcatctccacacgcaacagacagccctcgaagtagacaaaagaagcatttaaatccaaatcaagtcgatgtcacagaggacttaaatccatgcatctgcatacgtaatccgccaggccccacacaggggtattcaaacctaacctatcggttgctgacccataatgttaagatcgggaaaattgcggtgccatttaatccaactgttccgtagtat

SEQ ID NO: 1591 - DNA, 278 bp, Glycine max
  Clone ID: LIB3072-032-Q1-E1-F7
tacgtagacctaatattgttattattatgagagttcacatcgcaagtacgtagaactttatcgcctctctcacttatttacatactccttttactaataaaaatagctatagatatagtcatcgtaaacatagaaataatcaaaagtggtcgtctcacacgacttaattccatgcatgtccgtacgtgattcaacagtcatctcacatacgctattcagtattaaccaatctcttactcgagcataacgatacgatcgcgaaaatctcgaatccattt

SEQ ID NO: 1592 - DNA, 355 bp, Glycine max
  Clone ID: LIB3072-032-Q1-E1-F8
tggcttcgaacctttgggctgatttatgtgcttgcatggtcgtgagaagatgatagaaggggagtactacggcgaagtcggcggagagacccaggggttagaagtccatgccagaattaagaggatcatccaacggagtaaactagccggaagaatccgcagtcagtcctttaatcggtccactcgagcgcggagaagtaccactaagttccaggagcaggagaatgagcatcgcccgcgacgaacgctcacggcccaagaaactcgctcccagctaatccgcgcgccccgccacctagcctctagtaacaaatcgtctcggtaactcagccctacgcctaacgttaaatcacaa

SEQ ID NO: 1593 - DNA, 412 bp, Glycine max
  Clone ID: LIB3072-032-Q1-E1-F9
gtgcatgcatggtcgtgagaagatgatagcagggcatggtcgccagaagatgatagaagggcatgggggggagaagatgatagaagggggtgggcgtgagaagatgatagaagggcatggtcgtgagaagatgataaaaggggatgaaagacatgacgcaaccgtaaaatggtaaccggtaaccgtaaggaagagagaccattgatgccgaaaaaggaggtgtacccaactaaactaaaataaataaattatacaaaacaaatgaaactgaaaaaaaaaaaagtggttgtctcagaggacttaagtaccatgatgtgcgtacgtaatgctacagtctcctcacagcgctattcaaacctaacctatcggttgatgccccataatgctgcgatcgggaaaatttcggtgccat

SEQ ID NO: 1594 - DNA, 412 bp, Glycine max
  Clone ID: LIB3072-032-Q1-E1-G1
tggcttggaacctttgggctgatttatgtgcttgcatggtcgtgagaagatgatagaaggggaaactcaaggagataaaaaaaaaaaaaaaaaaaaggggatgaacgtggatgactcagaggacttaagtccatgcatgtacgtacgtgatgctacagtctcctcacagagctattcaaacgtaacctatcggttgctgccccataatgctaagatcgggaaaatttcggtgccatttaatccaactgttccgtagtatacgttgtccctgttagtcggtgcaacagtgaagaggtttgtattgactgtttccgttaatagccgtatagttcgaacggtgaacggcatgtgtttcgcactggtgtaccaagtgtggtgggcgcggtgagcatgtgtagcgcgattgtcatat

SEQ ID NO: 1595 - DNA, 296 bp, Glycine max
  Clone ID: LIB3072-032-Q1-E1-G10
atgtgcttgcatggtcgtgagaagatgatagaaggggactgagaatcagcctaacacttcagcatattggcacagacaacccaagacatcgggacgagagtatggcctttaccatcgtcgtcgggatccgccccttcgctcctagccctcgctctacccggtaccgtccatcgggaaaaagcgaattttaaatataataagcgctcctagagccgtaacagtgacagagatctgcataggaattaaatacgttatgtctgccgtaatctctcgcaggcggagaaagaagaacgcga

SEQ ID NO: 1596 - DNA, 368 bp, Glycine max
  Clone ID: LIB3072-032-Q1-E1-G11
tatgtgcatgcatggtcgtgagaagatgatagaaggggatagtacacataaccaacaaagacgagcccggggcatgatacggcggcgtcaaaggcgcgcccgccgtcctcccctttcgccggggccatagtcgtatgtacggaatcgagtcctcctaaaagcgactagccactaagccacgacgacgacgagcacctaaaattacgtcgcgactctcgtacgcgtatatgtctaacgttcctctaacgtactcgcgaagacaccatgtcgaaccaccgttatctagaccgcaagagtcgcacccctatatgtcgatagctaggaaggcgctgccgctccgatattaatgatcctcgtcataaattccg

SEQ ID NO: 1597 - DNA, 409 bp, Glycine max
  Clone ID: LIB3072-032-Q1-E1-G2
cttggaacctttgggctgatttatgtgcttgcatggtcgtgagaagatgatagaagggcatggtcgtgagaagatgatagaaggggggtatcgagcagaaaaaaaaaaaaaaaaaaaaaaaaaaaaaagtggttgtctcagaggacttaagtccatgcatgtgcgtacgtgatgctacagtctcctcacagcgctattcaaacctaacctatcggttgctgccccataatgctgcgatcgggaaaatttcggtgccatttaatccaactgttccgtagtatactttttccctgttagtcggtgcaacagtgaagaggtttgtattgactgtttcctttaatagccgtgtagttcgaacggtgaacgggatgtgtttcgcagtggtgtaccaagtgtggtgggcgcggcg

SEQ ID NO: 1598 - DNA, 462 bp, Glycine max
  Clone ID: LIB3072-032-Q1-E1-G3
aacctttgggctgatttatgtgcttgtttatgtgcttgtttatgtgcttgtttatgtgcctgcatggtcgtgaatgatagaagggcatggtcgtgagaagatgatagaagggcatggtcgtgagaagatgatagaagggcatggtcgtgagaagatgatagaagggcatggtcgtgagaagatgatagaagggcatggtcgtgagaagatgatagaagggcatggtcgtgagaagatgatagaagggcatggtcgtgagaagatgatagaagggcatggtcgtgagaagatgatagacggggacaataacagaagacagagaaaaatcccacaaatacacgtcaaaagtggttgtctcagaggacttaagtccatgcatgtgcgtacgtgatgctacagtctcctcacagcgctattcaaacctaacctatcggttgctgccccataatgctgcgatcggga

SEQ ID NO: 1599 - DNA, 358 bp, Glycine max
  Clone ID: LIB3072-032-Q1-E1-G4
tggcttggaacctttgggctgatttatgtgcttgatggtcgtgagaagatgatagaagggcatggccgtgagaagatgatagaagggcatggtcgtgagaagatgatagaagggcatggtcgtgagaagatgatagaagggcatggtcgtgagaagatgatagaagggcatggtcgtgagaagatgatagaaggggctattattaatacccacccgaagtggatgactcagaggacttaagtccatgcatgttcgtacgtgatgctacagtctcctcacagcgctattcaaacctaacctatcggatgtaggcccataatgctgcgatcgggaaaattccggtgccattcaatccaac

SEQ ID NO: 1600 - DNA, 467 bp, Glycine max
  Clone ID: LIB3072-032-Q1-E1-E7
gcttcgaacctttgggctgatttatgtgcttgtttatgtgcttgcatggtcgtgagaagatccatcgagggggcctcagcgcgcgaccgtcgagcgtcgcaatctgcctcctccgcgccgccgcctcgcgcccgcgcccgcccccctctctattcgaaaacgctccgtcgtggcggcaatcgcggccgtggaagtcttcgtaagcgtggtaatggtcgttgaggtcgtaagacgcatttagatccgagtcatatcgagctaattattattcagattccggctacgggagcggtattcgccaaggtctaacccgagggcgtcgaaacgtgcccgtttctcgagaatgacggtcgtaaacgcggattaaatcgtcttcgtaattttcgtatccgtaagcgaggcgccgggagagtaagtcctaagtacagacagtttccaaccatgaacaacgacaaatcaccaacgcg

SEQ ID NO: 1601 - DNA, 421 bp, Glycine max
  Clone ID: LIB3072-032-Q1-E1-D2
tggcttggaacctttgggctgatttatgtgcttgtttatgtgcttgcatggtcgtgagaagatgatagaagggcatggtcgtgagatgatagaagggactaaaagaaaatgaaaaaaaaaaaaaaaaaaaaaaaaaaaaaagtggttgtctcagaggacttaagtccatgcatgtgcgtacgtgatgctacagtctcctcacagcgctattcaaacctaacctatcggttgctgccccataatgctgcgatcgggaaaatttcggtgccatttaatccaactgttccgtagtatactttttccctgttagtcggtgcaacagtgaagaggtttgtattgactgtttcctttaatagccgtgtagttcgaacggtgaacgggatgtgtttcgcagtggtgtaccaagtgtggtgggcgcggc

SEQ ID NO: 1602 - DNA, 351 bp, Glycine max
  Clone ID: LIB3072-032-Q1-E1-D3
tgcttgcatggtcgtgagaagtgatagaagggggaagtagccgtagattgagtcagtcagtcagtaagtaagtatagagacggaggtaaagtgaggttacgtttctacgcgtccggtatgcgccctatctccttctcgtgtctcaatttcacttgtcgtctatggaagtattatggcctaagatactgtgagaaagccgaaatctggggataatgagtcctcgtgtatggagaagaagcctaaggcccctacggagaaccatgggaggagtcatcttatagaggaggagcacccgtgttgcccggggacccctgtttagaatacggctagagtggtggagtactaggtgtc

SEQ ID NO: 1603 - DNA, 446 bp, Glycine max
  Clone ID: LIB3072-032-Q1-E1-D4
tggcttggaacctttgggctgatttatgtgcttgcatggtcgtgagaagatgatagaagggcatggtcgtgagaagatgatagaagggcatggtcgtgagaagatgatagaagggcatggtcgtgagaagatgatagaaggggacctatataatcaatcaagaaagctccttacagttttttaaaaacgaagagtattactcctcccgtctctccctctccccgcgttcctattattctacattcattcctagttactgtcgaccctgcgtctgacaacgaaggcaatttctccgaaaacggcggtatacaccacactccgctagatacaatagtacccggcggaacaagagtagttttaatgggaaacgaaagacgtttctctatcgcggcgtaactctgtaacgagtctgataaagggaccggaataactactctgcttttaca

SEQ ID NO: 1604 - DNA, 397 bp, Glycine max
  Clone ID: LIB3072-032-Q1-E1-D5
ggctgatttatgtgcttgtttgtatatgagattatgtgcgatattaactacgtcgatggtccacataggtatgatcgagggggttcccttacgtcacctctgcgcctgataacgcgcgcggaacacacatcgcggacgataaagatggcccacttgagtactagtagacgctcatttaaccttgagcgaccaatttcccaacgaaagctttcgtcgcaggagatggaaggattaattcacgtgagagatacagaagtcgcgtcacggtcgaatagagataagctactcgtctgtatatcggtgatgtgcggatcggtaatctctgaatgtaatagatcctaactaatcggatcgatacatgaacgatcttagacacgagaaatgacagagagagaat

SEQ ID NO: 1605 - DNA, 479 bp, Glycine max
  Clone ID: LIB3072-032-Q1-E1-D6
tgcttggaacctttgggctgatttatgtgcttgcatggtcgtgagaagatgatagaaggggatagtaaaaataaccaacaaagacgagcccgaggaataatacggcggcgtcaaaggcgcgcccgccgtcctccccttccgcgggggccatagtcgtatgtacggaatcgagtcctcctaaaagcgactagctactaagccacgacgacgacgagcacctaaaattacgtcgcgactctcgtacgcgtatatgtctaacgttcttctaacgtagtcgcgaagacaccaggtcgaacctacgttatctagaccgcaagagtcgcacgcgtatatgtctatagttaggatagcgctgccgctccgatattaatgatcctcgtcataaattccgtaagcttagagacgatcagaaaaatcaacagtctctctaaacggatgaagttttcacaggtcccgcccgtcacgccaggggagataaa

SEQ ID NO: 1606 - DNA, 360 bp, Glycine max
  Clone ID: LIB3072-032-Q1-E1-D7
tttgggctgagttatgtgcttgcatggtcgtgagaagatgatagaagggcgacacacacacgaactcaatcaaccatcacacggggtcatctaattacacacgcgtacacacccccctatcagcatcagtgcctgcactcatacgaacatcacaacacaacacgtgaagcatcgaattaaccaacggcgagtcctgccggctctctgcttgcgccgcaacgacggactgggcatcagtcagcctcgtagccttatcgcgccgcaacgctcggccccgcccgaagcgtccacaagtacgaccaacccgtcgcgcctcgtagcagacgaacgaactcgacgcgtccaccaacccgtgagcat

SEQ ID NO: 1607 - DNA, 440 bp, Glycine max
  Clone ID: LIB3072-032-Q1-E1-D8
tgcttggaacctttgggctgatttatgtgcttgcatggtcgtgagaagatgatagaagggaccgggacgtacgggtccaagaggaccagatcggggggaaaggacaccggaaaaacaaagggcccgtcttaccccataaaaaccgagaaaaatcacggacgctacggcggacacaagaggaacccacacatcttacaaacgcccaccgcaaataccataagcagccaacaacccaccgacaaccacccgcgtaaaaacacacacccagccgcccaccattgcgcgctggccccctcgaaaccggagaccggacccgacgaaacacactaatccccgggaaaataaaagtaacaaaaagtggttgtctcagaggacttaagtccatgcataatcgtacgtgatgctacaatctcctcacagggctattcaaacctaaccta

SEQ ID NO: 1608 - DNA, 435 bp, Glycine max
  Clone ID: LIB3072-032-Q1-E1-D9
tttgggctgatttatgtgcttgcatggtcgtgagaagatgatagaaggggacctatataatcaatcaagaaagctccttacagttttttaaaaacgaagagtattactcctcccgtctctccctctccccgcgttcctattattctacattcattcctagttactgtcgaccctgcgtctgacaacgaaggcaatttctccgaaaacggcggtatacaccacactccgctagatacaatagtacccggcggaacaagagtagttttaatgggaaacgaaagacctttctctatcgcggcgtaactctgtaacgagtctgataaagggaccggaataactactctgcttttacactgaacttgccccactattgaaggttacttcccgagttccaagcctgacctaaccgtagccacaacgtcgcgcgccggaaac

SEQ ID NO: 1609 - DNA, 488 bp, Glycine max
  unsure at all n locations
  Clone ID: LIB3072-032-Q1-E1-E1
acctttgggctgatttatgtgcttgcatggtcgtgagagatgatagaagggggactagaacccctcgtagcccgacttagtcttttgagaaaccgagtttgatattatatgaaagatattagaccaccccccgcaatcctacacaatttcccgcccgcaagtcatcgtcccacgtcgccatcgcagacgcgctcccaaggagagaagagccctatcgcccaagcgggatggccactactaatacaacctccctccccggagcccgctcgtcgccgtcgtcgtcgttgctccacccggataagaaatanacagaaaccgatataaccggcgcccgcacacccccgacaggaggaagtggtaacaatacgacacactacgcgtcgcaaaccccctccaaaccaaactctaagccagagagtagnaccccgagcctcgattactacgcctacccgagatcgccgacggcgatagacgtaagcgccgaaaaa

SEQ ID NO: 1610 - DNA, 191 bp, Glycine max
  unsure at all n locations
  Clone ID: LIB3072-032-Q1-E1-E10
atggtcgtgacaagatgatagaagggcgataaagagcnaagggaaacaaaacaaaaggcaaagcaaaaaaaaagtggttgtctccaagcgattaagtccatgcatgtgcgtacgtcatgctacaatctcctcactcgactattcaaacctaacctatcggttgctgccccataacccaccgatcgggaaaa

SEQ ID NO: 1611 - DNA, 226 bp, Glycine max
  Clone ID: LIB3072-032-Q1-E1-E11
gatcatagcccgggatagtaaacataaccaacagggccgggcccgaacaataatacggcggggtcaacggcgcgcccgccgtctcccccttccgcgggggccatagtcgtctctacggaatcgagtccccctaaacccgactagctactaagccacgacgacgaccagcacctaaaattacgtcgcgactctcgtacgcgtatatgtctaccgttcttctaacgta

SEQ ID NO: 1612 - DNA, 456 bp, Glycine max
  Clone ID: LIB3072-032-Q1-E1-E2
tggcttggaacctttgggctgatttatgtgcttgtttatgtgcttgcttcggtgagaagatgatagaaggggatgggcccgacggtaacgacgctggggacccgtccttcgacctgcccgactccgacgtcggtgaggactcccccgaagagcccacaagactcctcgaactttaagaagaaatcggatttaaagcaatcgtacgaggtccagagacgaatttacccaaagaactcattcattaattcaagagatcggatttaaggttccagtcccaggctagccagacgacacgcccgtactacgccacttgcagtcctaatccctcgcaatcctccgcacaggtaaaggccctaaattcctaactcacttcctctccgtccccgttaaaacgccacggcgaacagggaaggaaaaagacggaaaaaaacgcgatcggcctacgcatcgacaccg

SEQ ID NO: 1613 - DNA, 420 bp, Glycine max
  unsure at all n locations
  Clone ID: LIB3072-032-Q1-E1-E3
aacctttgggctgatttatgtgcttgcatggtcgtgagagatgatagaagaggatagtaaaaataaccaacaaagacgagcccgaagaataatacggcggcgtcaaaggcgcgcccgccgtcctccccttccgcgggggccatagtcgtatgtacggaatcgagtcctcctaaaagcgactagctactaagccacgacgacgacgagcacctaaaattacgtcgcgactctcgtacgcgtatatgtctaacgttcttctaacgtagtcgcgaagacaccaggtcgaacctacgttatctagaccgcaagagtcgcacgcgtatatgtctatagttaggatagcgctgccgctccgatattaatgatcctcgtcataaattcccgtagcttagagacgatcagganaatcaacagtctctc

SEQ ID NO: 1614 - DNA, 411 bp, Glycine max
  Clone ID: LIB3072-032-Q1-E1-E5
tggcttggaacctttgggctgatttatgtgcttgtcgtgagaagatgatagaagggggagcgagataacactatatacaacacaaccttaaaacgagcttcaccatcacagtaacacgacgggcgatatcgagactaaattactagccgaagcagctacacgcgtccttacgaataacaataacagtgtaaataattatatttctttaattgatactattaagctactataactatatccattaactccgattaagtcttacgtcggccatccccctacacgttcccttcccggcgtataagtcccgtctcggaagagcccgagcaaatataataaggatctataaatctctcggtacggacctaacccgacgttccttacggtgccctcatcatctcggcgtgcggtatc

SEQ ID NO: 1615 - DNA, 455 bp, Glycine max
  Clone ID: LIB3072-032-Q1-E1-E6
tggcttggaacctttgggctgatttatgtgcttgatggtcgtgagaagatgatagaagggacaatttagcgagctcatttccactctcgattacgggccctctcgaagttaatcttaaaatcaatagatagaaagaaagagaaaaagaaatttaaccttcgccctaatcgaaatatagtatatataataactactaaccctctcataaaaaacaattttataaagaaaataaatcgaaataatagtaaaaaaaaaaaaaaaaaaaaaaaaaaaaaagtggttgtctcagaggacttaagtccatgcatgtgcgtacgtgatgctacagtctcctcacagcgctattcaaacctaacctatcggttgctgccccataatgctgcgatcgggaaaatttcggtgccatttaatccaactgttccgtagtatactttttccctgttagtcggtgcaac

SEQ ID NO: 1616 - DNA, 410 bp, Glycine max
  Clone ID: LIB3072-032-Q1-E1-D10
tttgggctgatttatgtgcttgcttatgtgcttgcatggtcgtgagaagatcatagacggggatagtacaaataaccaacagggacgagcccgaagaataatacggcggcgtcaaaggcgcgcccgccgtcgtccccttccgcgggggccatagtcgtatgtacggaatcgagtcctcctaaaggcgactagctactaagccacgacgacgaggagcacctaaaattacgtcgcgactctcgtacgcgtatatgtctaacgttcctctaacgtagtcgcgaagacaccaggtcgaacctacgttatctagaccgcaagaatcgcacgcgtatatgcctatagctaggatagcgctgccgctccgatattaatgatcctcgtcatcaattccccaagcctagagacgatca

SEQ ID NO: 1617 - DNA, 320 bp, Glycine max
  Clone ID: LIB3072-032-Q1-E1-B8
tggcttcggacctttgggctgatttatgtgcttgcatggtcgtgagaagatgattagaggggctaccgactagaatagaatctccgcttacgtttgcgacaccgcgaagctttaagggaaccctaaaaggtccctttcaattgacaccaagaccgataccaagaaggctttcaagaagaaagactccgctaaagttacggaagacgtccacgccaagattaagcgggagaagagcctacggggtaagaaatctaccgctaggaagagaagggtaccttctaacgaccccgacagggctaagacaacgccggttaagacta

SEQ ID NO: 1618 - DNA, 377 bp, Glycine max
  Clone ID: LIB3072-032-Q1-E1-B9
ggaacctttgggctgatttatgtgcttgcataggtgcgagaatattatagagagggtacatatatagtcaatgaagaaagctctctacggtttggccaaaacgaatagtaggactattccagtctcacgttctcatcgcgttcctattattcaacattcattcctagttactttcgacaatgggtctgactacgaacgcaatttcaccagaaaacgggggtgtacaccacactccgatagatacaatagtacccggcggaacaagagtagttctaatgggaaacgaaagacgtttctctatcgatgtgtcaacctgtaacgagtctgataaaaggaccggaataactactctgcttttacactgaacttgtcccact

SEQ ID NO: 1619 - DNA, 472 bp, Glycine max
  Clone ID: LIB3072-032-Q1-E1-C1
gcttcgaacctttgggctgatttatgtgcttgcatggtcgtgagaagatgatagaaggggaactctcctatagaagaaaaaagagaagaagacgggcccgaagaataatacggcggcgtcaaaggcgcgcccggcgtcatccccttccgcggggggcatcatcagcgttaatccgaggtcgagcaagtccggttcgtctacgaaaagcgactactactaatatctaaacgacgacgagctcctaaaattacgtcgcgactaacgtgtacgtataaagctaaatttcctctaacgttgtcgcctagacacgaggtcgaacctgcgttacctagtccgtaaactccgcacccgtgtaccactgcacttcgtatagcgcccccgcgccgatacaattgaccctcgtcacgaattccgtaaatttagcgaggacgataaggaaaatcatcaacgaataaagcgcacgtacgcaagt

SEQ ID NO: 1620 - DNA, 376 bp, Glycine max
  Clone ID: LIB3072-032-Q1-E1-C10
tttgggctgatttatgtgcttgcagatgatagaaggggcggataccgaaccaccgtatgacgttataggaagagaagtttggggtggccagcgctcctaccccgcgacgcactccacccacgagaacctgccgggtccatacaaggcggacgccaattccttcatcctagaaggaaatctcccctagacgccaaaggccacgcaatcgcaccggtccccttccccagcctccccggacgtcccgcttagccccaacgggaaaaacacaacacaacccacacaccaaccaaagtcgttcgctcagaggacttaagtccatccatgtgcgtacgtgatcctacagtctcctcaccgcgctattcaaacctaacctatc

SEQ ID NO: 1621 - DNA, 368 bp, Glycine max
  Clone ID: LIB3072-032-Q1-E1-C11
tttgggctgatgtatgtgcttgcatggtcgtgagaagatgataaaagggcatggtcgtgagaagatgatagaagggcatgggggtgagaagatgatagaagggcgtggtcgtgagaagatgatagaagggcatggtcgtgagaagatgatagaagggcatggtcgtgagaagatgatagaaggcgctggtcgtgagaagatgatagaagggcatggtcgtgagaagatgatagaagggcatggtcgtgagaagatgatagaagggcatggtcgtgagaagatgatagaagggcatggtcgtgagaagatgatagaagggcatggtcgtgagaagatgatagaagggcatggtcgtgagaagatcatag

SEQ ID NO: 1622 - DNA, 417 bp, Glycine max
  Clone ID: LIB3072-032-Q1-E1-C12
ttatgtgcttgcatggtcgtgagaagatcatagcaggggacctatatcatcaatcaataaagctccttacgggttggcaaaaacgaacagtattactcctcccgtctctccctctccccgcgttcctattattctacattcattcctagttactgtcgaccctgcgtctgacaacgaaggcaatttctccgaaaacggcggcatacaccacactctgctagatacactactacccggcggaacaagactagttctactgggaaacgaaagacgttcctccatcgcgccgtaactctgtaccgactctcatacacggaccgcaataactcctccgcatttacactcaactttccccactgcttcaggttacttcccgaattccaaaccctaactacccgtacccacaacgtcgccccg

SEQ ID NO: 1623 - DNA, 366 bp, Glycine max
  unsure at all n locations
  Clone ID: LIB3072-032-Q1-E1-C2
tggcttggaacctttgggctgatttatgtgcttggtgagaagatgatagaaggggacagtgaaatagagagcggccctagcgagcgactggcgcctagccgacttcctacaagctgctactactactactactactattgccgaccgaagaagacgttgactagaaatactgttactggaaggttcgaagaggtcatctattttgatatgccgaaggtggggccggtcgagcctactcttattccgactcctgcgcctgttggcctaggccttggtactgttcataataagtctattgataatggtgttgntatctttgttggttctactcttgtccttactgtttacgtccctgtttctcctgct

SEQ ID NO: 1624 - DNA, 445 bp, Glycine max
  Clone ID: LIB3072-032-Q1-E1-C3
tttggcttggaacctttgggctgatttatgtgcttgcatggtcgtgtgaagatgatagaaggggacgtaatcgaacaaccaagaaaagttacccttacggtagttcaagaaaacgaagagtatcagtccgcctgtcactccctcatcccgtgttcctattctacattcattccttgttattgtttaggatgcgtctgatgcggacggtgacttgacctggaatggccctacacatcatgccccgttggtaacaagaggaaatggcggtggaacagaatgagttgtatctgggaaaggtatccgtttcactatcgcagcgtaactctttaacttaaatctcaaggggccagaaaccaagcccgaactcgtacattttgttcaccatacaaatgaaatttcaaccccgtaaacaaagcctagccatttatagtagcgcgaaagaaag

SEQ ID NO: 1625 - DNA, 401 bp, Glycine max
  Clone ID: LIB3072-032-Q1-E1-C4
gcttcgaactttgggctggttgagtgcttgcataggcgtctgaatatgcatcgaggggacgcacacgagcatccaagaaaagttacccttacagtagttccccaaaacgaagagtgtcagtccgcctgtcactccctcatcccgtgttcatattctacattcattccttgttattgattaggatacgtctgatgcgcacggtgacttgacctggaatggcgctacacatcatatactgttggtatcaagatgaaatcgcggtcgaacacaataagttgtatctcctaaaggtatccgtttcactatcgcaccgtaacccttcaacttaaatctcaaggagccataaatcaagcccgaactcgaacatttaacccaccatacatatgaaatgtcaaccccgt

SEQ ID NO: 1626 - DNA, 493 bp, Glycine max
  unsure at all n locations
  Clone ID: LIB3072-032-Q1-E1-C5
gcttcgaacctttgggctgattatgtgcttgcatggtcgtgagaagatgatagaaggggatcctaaaaataaccaacaaagacgagcccgaggagataatacggcggcgtcaaaggcgcgcccgccgtcctcctcttccgcgggggccatagtcgtatgtacggaatcgagtcctcctaaaagcgactagctactaagccacgacgacgagcacctaaaattacgtcgcgactctcgtacgcgtatatgtctaacgttcttctaacgtagtcgcgaagacaccaggtcgaacctacgttatctagaccgcaagagtcgcacgcgtatatgtctatagttaggatagcgctgccgctccgatattaatgatcctcgtcataaattccgtaagcttagagacgatcagaaaaatcaacagtctctctaaacggatgaagttttcccaggtcccgnccgccacgccaggggagataaaccacataagaaacaaaag

SEQ ID NO: 1627 - DNA, 474 bp, Glycine max
  unsure at all n locations
  Clone ID: LIB3072-032-Q1-E1-C6
gcttggaacctttgggctgatttatgtgcttgcatggtcgtgagaagatgatagaaggggatagtaaaaataaccaacaaagacgagcccgaagagataatacggcggcgtcaaaggcgcgcccgccgtcctccccttccgcgggggccatagtcgtatgtacggaatcgagtcctcctaaaagcgactagctactaagccacgacgacgacgagcacctaaaattacgtcgcgactctcgtacgcgtatatgtctaacgttcttctaacgtagtcgcgaagacaccaggtcgaacctacgttatctagaccgcaagagtcgcacgcgtatatgtctatagttaggatagcgctgccgctccgatattaatgatcctcgtcataaattccgtaagcttagagacgatcagaaaaatcaacagtctctctaaacggatgaagttttcccaggtccnncgccgcacgccaagggag

SEQ ID NO: 1628 - DNA, 497 bp, Glycine max
  unsure at all n locations
  Clone ID: LIB3072-032-Q1-E1-C7
gcttggaacctttgggctgatttatgtgcttgtttatgtgcttgcatggtcgtgaaaagatcatagaaggggatagtaaaaataaccaacaaagacgagcccgaagaataatacggcggcgtcaaaggcgcgcccgccgtcctccccttccgcgggggccatagtcgtatgtacggaatcgagtcctcctaaaagcgactagctactaagccacgacgacgacgagcacctaaaattacgtcgcgactctcgtacgcgtatatgtctaacgttcctctaacgtagtcgcgaagacaccaggtcgaacctacgttatctagaccgcaagagtcgcacgcgtatatgtctatagttaggatagcgctgccgctccgatattaatgatcctcgtcataaattccgtaagcttagagacgatcagaaaaatcaacagtctctctaaacggatgaagttttcccaggtcncgcccgccacgccaggggagataaacaaaata

SEQ ID NO: 1629 - DNA, 185 bp, Glycine max
  Clone ID: LIB3072-032-Q1-E1-C8
cttggacctttgtgattatctggtgagagtatgagggggtttttaagatccaaaggagagagagaggagagcgtgtcacaagccccgggactagttagaggtacgggtgaaaaagcgaaagaaagccatcggtcagttataagacagttagataacagagactgcaaggtacgcaacggagtccg

SEQ ID NO: 1630 - DNA, 356 bp, Glycine max
  Clone ID: LIB3072-032-Q1-E1-C9
tttgggctgatttatgtgcttgcatggtcgtagaaggttattgaagggggcctatataatctatctatatagctctatacagggtttgtaaaaacgaagagtgttacgccgcatgtctcgtcctctcctcgcgttcaaattattctacattcattcctagatactgtcgaccctgcgtctgacaacgaaggctatttctccgaaaacggtggtgtacaccacactccgctagatacaatagttcccggcggaacaagagtcgtttcaatgggaaacgaaagacgtttctctatcgcggcgtaacactgtaacgagtccgataaatggaccggaataacatctcagcttttacactg

SEQ ID NO: 1631 - DNA, 387 bp, Glycine max
  Clone ID: LIB3072-032-Q1-E1-D1
tttgctgatttatgtgcttgcataggtgcgtgattatgttcgtgggtatgtgcatgcttatctgcttgcatcgacgtgcgacgatgatcgacgggttacccgggaataaacgtctttacagttaccggccctaccggtagtgtcaatacccgccgggtcggtgtatctacgcggagtggtctacgagttttgacgcgatacccgggttcgtcggtgcgagtaggattcggattaattatcggactcatcgcatttcattctctactatcagcggaactgtcacatcaggagatgaagaagctcccactagttatatttatgagtagtcctttattatcgatcatcatcagagaagttacgtccatgcatgtgcgtacgtgatgctac

SEQ ID NO: 1632 - DNA, 398 bp, Glycine max
  Clone ID: LIB3072-032-Q1-E1-B7
gctccgaacctttgggctgatttatgtgcttgtttatgtgcttgcatggtcgtgagaagatccatcgagggcaccctctcacgacaaaatcgggagaacacagcacgcaccaacgctccaaaagcccatccgataactacccccaaaaaacacccaccaaacccctataccaacgaaaccgccaaacaccttaccagcctccaaccacaagacaccaccgaccaacccacgtccaccaagaaacctcactaacccacccaccagtaccaaacccacttgcaaccacaccacccccttaaaaccactaccaatataccccccaaatcactaccacgaggcaccaccccgcaacaaggctattaccaaaccacttagcaaacgactgaaatgtggcaaac

SEQ ID NO: 1633 - DNA, 462 bp, Glycine max
  Clone ID: LIB3072-032-Q1-E1-A2
ggcttcgaacctttgggctgatttatgtgcttgcatggtcgtgagaagatgatagaaggggatacaaagagaaagtaacggtcctctcggtaagtccagtcgccgcctaattactcatcgctaagggttccgtcggaatcaagtctctccctaagtttctctgttagagtcctagatttaagaaccctaggagcggcgttgccgcagtaaagcatggcgataagagcgcgcatcccgacccggaggactcaggtaatatcatcggctagcgggatccgcatggtcttgacgtattcctatttcataatttctcctagagtaagcctcctgagatacctgttgtcttacctataaagaggggaccgccatcaaagcccccgacttcgggaggcggccttatttcggtacatccgagcgttatagtgctaggcgatacctcattaactaagaagggtttataat

SEQ ID NO: 1634 - DNA, 454 bp, Glycine max
  Clone ID: LIB3072-032-Q1-E1-A3
ggcttggaacctttgggctgatttatgtgcttgcatggtcgtgagaagatgatagaaggggaatatccggcccagtaagagaaaaaacattaattacggtaattaccctcatcgactaattaagaggacttcatcttcacggaattcttcacggagtatttcacggaattattcacgagattaatagtagtaccaataatttcttcctatgttaaattgcgaagcctacaatcgtcgtaatcaccggtactatatctccatcttcgctcgggccgatttctataggtatcgctacaggcccgactgccgtaattttctcctccgccactcctagttttacttccgctttcgtcgtgcccgcgtcgccttcggccgtcctcggtcccccgcctctcgggggtcgcggcgcggtcgttaccgtcgtcccactcgggacccataatcatgccctcgg

SEQ ID NO: 1635 - DNA, 301 bp, Glycine max
  Clone ID: LIB3072-032-Q1-E1-A4
gcttcgaacctttgggctgatttatgtgcttgatgggagaagatgatagaaggggatagtcgacataagctactaagacgagctcgacgaataatagggatgcgtcaaaagcgtgcacgtcgtccaccccgtccgggggggccattgtcgttgccggaatcgatcccgaaaagtgactagtacaagcactagcgatagcactataatacgtcggatccgtacggttatgtcaacgtcatcacgttgcgtgaagacccagtcgaaccgacgttatctagaccgtaagagtcgcacgtgtata

SEQ ID NO: 1636 - DNA, 425 bp, Glycine max
  Clone ID: LIB3072-032-Q1-E1-A5
tggcttggaacctttgggctgatttatgtgcttgagaagatgatagaaggggatgacgagctgacccgacaatcaagacaccgccacctgcgacggggacttaacccgacactactgaaacttaacccacattaccgccgaaccaaccactgacgaaagacccactactctcacgggaccaaactttgaaccccccaccggaaacccaagagaaacaaaatacaacaaagaccacggaagcaaacacctccgtacccaccgtcatcgtatcgcccacctcagccttcatcgtccccccatccacaacccatgcaaaaatggcaagctaaagcgatcaaccctatcgaaacttgatcctcctacccccactaacgcaactaacgaccaaaaaaaacgaaaaaggcccctaacccccggctccagct

SEQ ID NO: 1637 - DNA, 437 bp, Glycine max
  Clone ID: LIB3072-032-Q1-E1-A6
tgcttcgaacctttgggctgatttatgtgcttgcatggtcgtgagaagatgatagaagggcatcgtcgtgagaagatgatagaagggcatggtcgggagaagatgatagaagggcatggtcgtgagaagatgatagaagggcatggtcgtgagaagatgatagaagggcatggtcgtgagaagatgatagaagggcatggtcgtgagaagatgatagaagggcatggtcgtgagaagatgatagaaggggtactataaaaacaagaaaaaaaaaaaaaaaaaaaaaaaaaaaaaaagtggttgtctcagaggacttaagtccatgcatgtgcgtacgtgatgctacagtctcctcacagcgctattcaaacctaacctatcggttgctgccccataatgctgcgatcgggaaaatttccgtgccatttaatccaact

SEQ ID NO: 1638 - DNA, 300 bp, Glycine max
  Clone ID: LIB3072-032-Q1-E1-A8
cttgtttatgtgcttgatggtcgtgagaagatccccgacggggatagtgaaatagagagcgagttgccgacccactaacgcctaggggactctactacaactgctagtgctaaccgacgaagacgttgactagaaatacccttgctgtaaggttcgaagaggtgatctattccgatatgccgaatgtggtcgtggtcgagtctactctaattcctactcctacgcctgctcgtctacgtcttaatacagctcataataagtccattgattatggcctcgctattttcgttggttctactc

SEQ ID NO: 1639 - DNA, 460 bp, Glycine max
  Clone ID: LIB3072-032-Q1-E1-A9
tggcatggaacctttgggctgatttatgtgcttgcatggtcgtgagaagatgatagaaagggaacttagaatgtccctacatatactgaaagaagaaagaaataacaataatcaagtaagtattacaaaccccccaaaattctctcctccctcctcttactgtcgttggagaacggataccttggtgatttcaatccttttgctgacgaacaacgtctgctctcttgattattgctgttatgctccttatgaaaatatctgttcctaaaaaattcctatctttccagttcagaagaaaaatcaaaattgcatacaatcatgcacaacttttctcccaacctcccccctcccccttccccccctcaattcccttctctccaagaatatgttgaacttgccacctccgatcggcgcaggaagcaagaatgacgaccacgcgccgatcaaggcccctttgccc

SEQ ID NO: 1640 - DNA, 451 bp, Glycine max
  Clone ID: LIB3072-032-Q1-E1-B1
tttggcttggaacctttgggctgattttaaaaaatccgaccagggcgacggcctatgcagcgggttactgtttcgacagatggccccctgtttcccgatgccggagcttatgcctccaacagcggatctccgccttaaatcggaataatatctaatttcactctggctcacctccccgacccacaagggaccccgttgaccctggttcaccggccaaaaaacgagtcgacccaataaaaacccaatgtgaaccccaataaaacaccaatgtccataacccaggcggtatcccctggggaaacgcgtgtggaattttcacccgtccaccccctcaaacatacctaaacacgcacttgtctacgagataacaatttcgacaaacgtcctaacaacaccgaaaaaggaagagcacgagcacctaatacccttgcgctgtttccacctttccccc

SEQ ID NO: 1641 - DNA, 465 bp, Glycine max
  Clone ID: LIB3072-032-Q1-E1-B10
tggcttggaacctttgggctgatttatgtgcttgcatggtcgtgagaagatgatagaaggggatagtaaaaataaccaacaaagacgagcccgaggaataatacggcggcgtcaaaggcgcgcccgccgtcctccccttccgcgggggccatagtcgtatgtacggaatcgagtcctcctaaaagcgactagctactaagccacgacgacgacgagcacctaaaattacgtcgcgactctcgtacgcgtatatgtctaacgttcttctaacgtagtcgcgaagacaccaggtcgaacccacgttatctagaccgcaagagtcgcacgcgtatatgtctatagttaggatagcgctgccgctccgatattaatgatcctcgtcataaattccgtaagcttagagacgatcagaaaaatcaacagtctctctaaacggatgaagttttcccaggtccccgccgccac

SEQ ID NO: 1642 - DNA, 313 bp, Glycine max
  Clone ID: LIB3072-032-Q1-E1-B11
caaagacgagccccaaggatatgacccaaccgtcaaaggggcgggcgccgtcctccccttccgcggccgccatactcgtatgtacgcaatcgagtcctcctaaaagcgactaactacccagccacgacgacgacgagcacctaaaataccgtcgcgactctcgtacgcgtataactctaacgttcttctaacgtaatcgcgaagacaccacgtcgaatctacattatctacaccgcaacactcgcacgcgtatatctctatacctagaataccgactcccgccccgaaattcatcatccacgtcatacacctc

SEQ ID NO: 1643 - DNA, 436 bp, Glycine max
  unsure at all n locations
  Clone ID: LIB3072-032-Q1-E1-B2
tggcttcggaactttgggctgatttatgtgcttgcatggtcgtgagaagatgatagaagggcancgccgtgagaagatgatagaagggcatggtcgtgagaagatgatagaagggcatggtcgtgagaagatgatagaaggggacctatataatcaatcaagaaagctccttacagttttttaaaaacgaagagtattactcctcccgtctctccctctccccgcgttcctattattctacattcattcctagttactgtcgaccctgcgtctgacaacgaaggcaatttctccgaaaacggcggtatacaccacactccgctagatacaatagtacccggcggaacaagagtagttttaatgggaaacgaaagacgtttctctatcgcggcgtaactctgtaacgagtctgataaagggaccggaataactactc

SEQ ID NO: 1644 - DNA, 478 bp, Glycine max
  Clone ID: LIB3072-032-Q1-E1-B3
gcttggaacctttgggctgatttatgtgcttgcatggtcgtgagaagatgatagaaggggatagtaaaaataaccaacaaagacgagcccgaagaataatacggcggcgtcaaaggcgcgcccgccgtcctccccttccgcgggggccatagtcgtatgtacggaatcgagtcctcctaaaagcgactagctactaagccacgacgacgacgagcacctaaaattacgtcgcgactctcgtacgcgtatatgtctaacgttcttctaacgtagtcgcgaagacaccaggtcgaacctacgttatctagaccgcaagagtcgcacgcgtatatgtctgtagttaggatagcgctgccgctccgatattaatgatcctcgtcataaattccgtaagtttagagacgatcagaaaaatcaacagtttctctaaacggatgaagttttccccagccccgcccgccacgccaggggagataaa

SEQ ID NO: 1645 - DNA, 406 bp, Glycine max
  Clone ID: LIB3072-032-Q1-E1-B4
tgcttggaacctttgggctgatttatgtgcttgcatggtcgtggaagatgatagaagggcatggtcgtgagaagatgatagaaggggagtgccgcgtttaatcgaacgcgggaggtgaggaaagaaaagtaccagaacagtgccggaggaggacttgctactttctgtaaagcaccatccccgtagagtctactaaattgaattcctacctttgttcctatgcccctcccttccctattaataataatccccgccctccccttcccccaccgcaccggcgaagtcctattacaacctaaccacgagtcttattatcctgaaagttatgcttatgacccgaccttcggacttaatgtacttaccaagtccctgtgacggtgcggcccagcgggaaaaacatacgggg

SEQ ID NO: 1646 - DNA, 486 bp, Glycine max
  unsure at all n locations
  Clone ID: LIB3072-032-Q1-E1-B5
tgcttggaacctttgggctgatttatgtgcttgcatggtcgtgagaagatgatagaaggggatagtaaaaataaccaacaaagacgagcccgaagaataatacggcggcgtcaaaggcgcgcccgccgtcctccccttccgcgggggccatagtcgtatgtacggaatcgagtcctcctaaaagcgactagctactaagccacgacgacgacgagcacctaaaattacgtcgcgactctcgtacgcatatatgtctaacgttcttctaacgtagtcgcgaagacaccaggtcgaacctacgttatctagaccgcaagagtcgcacgcgtatatgtctatagttaggatagcgctgccgctccgatattaatgatcctcgtcataaattccgtaagcttagagacgatcagaaaaatcaacagtctctctaaacggatgaaattttcccaggggtccgccgncacgccaggggagataaacaaaata

SEQ ID NO: 1647 - DNA, 491 bp, Glycine max
  Clone ID: LIB3072-032-Q1-E1-B6
tggcttggaacctttgggctgatttatgtgcttgcatggtcgtgagatgatagaaggggacagtagtactacataaagtaccgaacctaaaaatggaggcctaccttccgcgccccgtccctccttctaaaattagatacgctgaatatacgtggtaatcgtgatcgtgtcgataagatcagtcgtattaagggaaatagtcacggcgccaccgcagagatcgagaagagccatactgagatcgccgctacggacgccttagtagtcgagtacgacgggaagcgtaagcgcggtatcaatcgtatccgtatggatcgtattcgcggttaccaaggaacacgcacgaaaacgcaaccgttacgcgcccgataacataaacacttaaacaatgcaactcctgcacgaacaaacgcgcgcgtcggcacttcatcctaggctcgcgcagctacgtagctcgaactaccctaagccttcgctcccagcaacacaat

SEQ ID NO: 1648 - DNA, 224 bp, Glycine max
  Clone ID: LIB3072-032-Q1-E1-A12
acctatacctttattaatggaattacggttcttgcgcatagtcgcatcgagcgtggacttaattcgcactccgatcctgtctacgttcatttcctacatccagcatcccgaattggtaataacggtcttgctcttcctcctcgtcgcgattttatcaagcctaagcctcacaacgcggataagtcctgttttcctcctgaaattgccaatcatcggggaaccta

SEQ ID NO: 1649 - DNA, 481 bp, Glycine max
  unsure at all n locations
  Clone ID: LIB3072-031-Q1-E1-H1
tggcttggaacctttgggctgatttatgtgcttgcatggtcgtgagaagatgatagaaggggatagtaaaaataaccaacaaagacgagcccgaagagataatacggcggcgtcaaaggcgcgcccgccgtcctccccttccgcgggggccatagtcgtatgtacggaatcgagtcctcctaaaagcgactagctactaagccacgacgacgacgagcacctaaaattacgtcgcgactctcgtacgcgtatatgtctaacgttcttctaacgtagtcgcgaagacaccaggtcgaacctacgttatctagaccgcaagagtcgcacgcgtatatgtctatagttaggatagcgctgccgctccgatattaatgatcctcgtcataaattccgtaagcttagagacgatcagaaaaatcaacagtctctctaaacggatgaagttttcccaggtcccgtccgncacgccaggggagataaa

SEQ ID NO: 1650 - DNA, 449 bp, Glycine max
  Clone ID: LIB3072-031-Q1-E1-H10
ttgcacgtgagaagatgattgctggggatagtcacaactaataacaaagacgagcccgaagaatagtacggcccgtcaaaggcgcgcccgccgtcctccccttccgcgggggccatagtcgtatgtacggaatcgagtcctcctaaaagcgactagctactaagccacgacgacgacgagcacctaaaattacgtcgcgactctcgtacgcgtatatgtctaacgttcttctaacgtagtcgcgaagacaccaggtcgaacctacgttatctagaccgcaagagtcgcacgcgtatatgtctatagttaggatagcgctgccgctccgatattaatgatcctcgccataaattccgtaagcctagagacgatcagaaaaatcaacagtctctctaaacggatgaagttttcccaagtcccgaccgccacgccaggggagataaaccaac

SEQ ID NO: 1651 - DNA, 476 bp, Glycine max
  Clone ID: LIB3072-031-Q1-E1-H11
tgggctgatttatgtgcttgtttatgtgcttgtttatgtgcttgcatggtcccgagaagatgatagaaggggatagtaaaaagaaccacccaagacgagcccgaagaataatacggcggcgtcaaaggcgcgcccgccgtcctccccttccgcgggggccatagtcgtatgtacggaatcgagtcctcctaaaagcgactagctactaagccacgacgacgacgagcacctaaaattacgtcgcgactctcgtacgcgtatatgtctaacgttcttctaacgtagtcgcgaagacaccaggtcgaacctacgttatctagaccgcaagagtcgcacgcgtatatgtctatagttaggatagcgctgccgctccgatattaatgatcctcgtcataaattccgtaagcttagagacgatcagaaaaatcaacagtctctctaaacggatgaagttttcccaggtcccgcccgccacg

SEQ ID NO: 1652 - DNA, 437 bp, Glycine max
  Clone ID: LIB3072-031-Q1-E1-H12
tgcttgatgatagaaagggatagtaaaaataaccaaccaagacgagcccgaagaataatacggcggcgtcaaaggcgcgcccgccgtcctccccttccgcgggggccatagtcgtatgtacggaatcgagtcctcctaaaagcgactagctactaagccacgacgacgacgagcacctaaaattacgtcgcgactctcgtacgcgtatatgtctaacgttcttctaacgtagtcgcgaagacaccaggtcgaacctacgttatctagaccgcaagagtcgcacgcgtatatgtctatagttaggacagcgctgccgctccgatattaatgatcctcgtcataaattccgtaagcttagagacgatcagaaaaatcaacagtctctctaaacggatgaagttttcccaggtcccgcccgccacgccaggggagataaa

SEQ ID NO: 1653 - DNA, 471 bp, Glycine max
  Clone ID: LIB3072-031-Q1-E1-H2
tggaacctttgggctgatttatgtgcttgcatggtcgtgagaagatgatagaaggggacctatataatcaatcaagaaagctccttacagggttttaaaaacgaagagtattactcctcccgtctctccctctccccgcgttcctattattctacattcattcctagttactgtcgaccctgcgtctgacaacgaaggcaatttctccgaaaacggcggtatacaccacactccgctagatacaatagtacccggcggaacaagagtagttttaatgggaaacgaaagacgtttctctatcgcggcgtaactctgtaacgagtctgataaagggaccggaataactactctgcttttacactgaacttgccccactgttgaaggttacttcccgagttccaagcctgacctacccgtagccacaacgtcgcgcgccggaaccttcattgagcggctcgccgcggaggactc

SEQ ID NO: 1654 - DNA, 495 bp, Glycine max
  unsure at all n locations
  Clone ID: LIB3072-031-Q1-E1-H3
tggcttggaacctttgggctgatttatgtgcttgcatggtcgtgagaaatgatagaaggggaccgcagaatcgaataagggccctctccctctccctctcgctcgtcctcctatccctctctgccctaactgaaaaaactacgggtagaaaacctcctgctggcggtaatcggaaacgtaacgggattatcgaggaggcgaagaagaccgccatcatcccaaacgaagtcaaagctttcggagaagacgccgcagaagccgccgcgagtttcttccccgcgccttccttccccgcaaaaagcccgtcgtgtttcgacccttacgctctggtttaaaaccgccgggcctataaaggcggcgtccacatcggagaggccagcgtcgaaacgtccgccaacccgggaaccttccgggccaccaccggctatctcgaatggaggtagtccccgaacgaactanacgagcccgcgggagacaaagccgttcacgtatcct

SEQ ID NO: 1655 - DNA, 438 bp, Glycine max
  Clone ID: LIB3072-031-Q1-E1-H4
tttggacctttgggctgatttagtgcttgcatggtcgtggatgatagaagggcatggtcgccagaagatgatagaagggcatcgtcgtcagaagatgatagaagggcatcgtcgtcagaagatgatagaaggggattaaaatgaagtacaccagctagcggtaaatcggaaacgtaagtggatgactcagaggacttaagtccatgcatgtccgtacgtgatgctacagtctcctcacagcgctattcaaacctaacctatcggttgctgccccataatgctccgatcgggaaaatttcgctgccatttaatccaactgatccgtagtatacattttccctgttagtcggtgcaacagtgaagaggtttgaattgactgtttcccttaatagccgtgtagttcgaacggtgaacgggatgtgtttcgcagtggtgtac

SEQ ID NO: 1656 - DNA, 473 bp, Glycine max
  Clone ID: LIB3072-031-Q1-E1-H5
tggcttggaaccgttggactgatttatgtgcttgtttatgtgcttgcatggtcgtgcagcaagatgatagtaggggacaacacatatacgtgaacttccgaaagcctatcgagacacacagaatcactcctaaccctatagtacgaaaaatgcgcccgctatacctgcgagtctcgtcaggcgtactcggctccatagcgatagaccgacatctacacttattaactctaataaatctaatattaaacgatcataaccgcctataatcgacgaacaatccgttcgctctgcgtacaaaccattccaccgttggagacgtcggcttcctatgcgcccggcgttaaagatacaacgtagctccagtactaatatgcctatgtacctacttagcggtcgtacgcacgcgtcaccatcatgaccgactcacatccatccatctgtctgcagatagggttagactatccctcacacat

SEQ ID NO: 1657 - DNA, 478 bp, Glycine max
  Clone ID: LIB3072-031-Q1-E1-H7
gcttggaaccttggctgatttagtgcatgctggacgtgagaagatgatagaccgggaaggagaagtaaataccgaatccgccggtaccgaggaataataatagaggtagtaataggaagagtaattcccggaagcgtggaaacacagagtcgaaccgctcgaataagacacacccgcaactttagtaggccacttagccgcggctaatgtcattctagactcgaaccctcccgtccccggcactaacgttgacaataattagaggaatccatccgtaggcctgaaagataacgcgacaagttagacattcagctaagcgtatgagtccgtgcctttcgggctcgtaaaagacaccgagaattcaacaaagagttaaagcgagcttcatctcgcggacgtctagttctactagaaagaggaggggaatacgggaagaaagggcttcccgctcctaaccacgaaggtcccacatcgaaca

SEQ ID NO: 1658 - DNA, 246 bp, Glycine max
  Clone ID: LIB3072-031-Q1-E1-H8
tagaccgcgatagccgagaggccccgacgtactgtcggtatcgacaaaggactctcactcatcaaggattggaacaaaatttcctctctcgctaccaacagaacggtcctagactgcaaatcctatatcccccaggaggcggtaaactatacttagattaacgaccgtcgatctactacccccggtaaggcgcacgacgctatttcccctacggacgactactttggaggccacgagaatttccca

SEQ ID NO: 1659 - DNA, 483 bp, Glycine max
  Clone ID: LIB3072-031-Q1-E1-H9
tttgggctgatttatgtgcttgaatggtcgtgagaagatgatagaaggggatatcctcaatcaagaaagctccttacagtttttggaaaaccaagagtattactcctcccgtctctccctctccccgcgttcctattattctacattcattcctagttactgtcgaccctgcgtctgacaacgaaggcaatttctccgaaaacggcggtatacaccacactccgctagatacaatagtacccggcggaacaagagtagttttaatgggaaacgaaagacgtttctctatcgcggcgtaactctgtaacgagtctgataaagggaccggaataactactctgcttttacactgaacttgccccactgttgaaggttacttcccgagttccaagcctgacctacccgtagccacaacgtcgcgcgccggaaccttcattgagcggctcgccgcggaggactcattagaaggattcgtcgccaaaa

SEQ ID NO: 1660 - DNA, 411 bp, Glycine max
  Clone ID: LIB3072-032-Q1-E1-A1
gttggaacctttgggctgatttatgtgcttgtttatgtgcttgcatggtcgtgaagatgatagaaggggtacgtatcaccgcctaaccacacacggaccatcgtaaaaaaaaaagaaaaaaaaaaaaaaaaaaagtggttgtctcagaggacttaagtccatgcatgtgcgtacgtgatgctacagtctcctcacagcgctattcaaacctaacctatcggttgctgccccataatgctgcgatcgggaaaatttcggtgccatttaatccaactgttccgtagtatactttttccctgttagtcggtgcaacagtgaagaagtttgtattgactgtttcctttaatagccgtgtagttcgaacggtgaacgggatgtgtttcgcagtggtgtaccaagtgtggtgggcgc

SEQ ID NO: 1661 - DNA, 481 bp, Glycine max
  Clone ID: LIB3072-032-Q1-E1-A10
tgggctgatttaggtgcttgcatggtcgtgagaagatgatagcaggggatagtacaaataaccaacaaagacgagcccgaggcgatgatacggcggcgtcaaaggcgcgcccgccgtcctccccttccgcgggggccatagtcgtatgtacggaatcgagtcctcctaaaagcgactagctactaagccacgacgacgacgagcacctaaaattacgtcgcgactctcgtacgcgtatatgtctaacgttcttctaacgtagtcgcgaagacaccaggtcgaacccacgttatctagaccgcaagagtcgcacgcgtatatgtctatagttaggatagcgctgccgctccgatattaatgatcctcgtcataaattccgtaagcttagagacgatcagaaaaatcaacagtctctctaaacggatgaagttttccccagtctcgcccgccacgccaagggggatacacaaaataagaaaca

SEQ ID NO: 1662 - DNA, 290 bp, Glycine max
  Clone ID: LIB3072-032-Q1-E1-A11
tgcttgcatggtcgtgagaagatcatagcaggggagcgtaacccagtcgaagtaaagtaacggtcagcctagagccgaaaatttagagcgcgggcgcactctctctttcaattcctcttccggcatcggcgtcatcgattagtaaggtaaatctagtggaaatcgccctccctagtcggagtaagcctgcgttgaactaattaaatacgacttcttaacgagatgtcaccgcgattcttctgggaaagccataatctaacaaggccgatctaaatggtattttaaaattt

SEQ ID NO: 1663 - DNA, 485 bp, Glycine max
  Clone ID: LIB3072-031-Q1-E1-G9
ttgggctgatttatgtgcttgattatgtgcttgtttatgtgcttgcatggtccccagaagatgatagaaggggatggtatctcgccctgcctctgcctcggcccacagactcccgtgaaggaggcccatagtgtctaattaaagacgtagaatgaggaaggatagactatcgagtcccataccttcaggaagcgtcttgttataaatagaccgaccattgtcaaggattacgtcctggcctagactaataccgggtacgcggacgagaacggtgctcataacggttaccctcttatccccgtttctcgtggacctacttgcgtctagggcgacgtcgatagcgtctcagattgtccgcggtagaagaagaaagccgaagccaagtaatagcagatatttacgacagcccgccatcctgccacgcaccaaccctcatctccgtcagagacacccgagcatcacgaccgctgccccgagtataaaca

SEQ ID NO: 1664 - DNA, 498 bp, Glycine max
  Clone ID: LIB3072-031-Q1-E1-F6
ttggcttggaacctttgggctgatttatgtgcttgtttatgtgcttgcatggtcgtgagaagatgatagaaggggatagtaaaaataacggacaaagacgagcccgaagaataatacggcggcgtcaaaggcgcgcccgccgtcctccccttccgcgggggccatagtcgtatgtacggaatcgagtcctcctaaaagcgactagctactaagccacgacgacgacgagcacccaaaattacgtcgcgactctcgtacgcgtatatctctaacgttcttctaacgtaatcgcgaagacaccaggtcgaacctacgttatctagaccgcaagagtcgcacgcgtatatctctatagttaggatagcgctgccgctccgatattaatgatcctcgtcataaattccgtacgcttagagacgatcagaaaaatcaacagtctctctaaacggatgaagttttcccaggtccagcccgccacgccaggggagataaacaaaa

SEQ ID NO: 1665 - DNA, 485 bp, Glycine max
  Clone ID: LIB3072-031-Q1-E1-F7
tggcttggaacctttgggctgatttagtgcttgctggacggtagaagatgatagacgggctacccgggaaccaccgtctttactgttgccggcgctaccgctggtgtctataccccgccgggcgaggttcctctcggagtggttacgaattttgtcgcgatacccgggttcgtcgctgcgagtcggattcggattaattatcggactcatcgggttgacttctctactggcggcggaactgtcggttccgcccatgaggtcgctcccactagttatatttatgagtagtcctttattatcgatcatcaaagggggcgaaacgaaaacagtcaatcgcgtatctatctatactaagaagtggttgtctcataggacttaagtccatgcatgtccgtacgtgatgctacagtctcctcacagcgctattcaaccctaacctatcggttgttgccccataatgctgcgatcgggaaaatttcggtgcc

SEQ ID NO: 1666 - DNA, 465 bp, Glycine max
  Clone ID: LIB3072-031-Q1-E1-F8
tggcttggaacctttgggctgatttatgtgcttgcatggtcgtgagaagatgatagaaggggatagtaaaaataaccaacaaagacgaggccgaagaataatacggcggcgtcaaaggcgcgcccgccgtcctccccttccgcgggggccatagtcgtatgtacggaatcgagtcctcctaaaagcgactagctactaagccacgacgacgacgagcacctaaaattacgtcgcgactctcgtacgcgtatatgtctaacgttcttctaacgtagtcgcgaagacaccaggtcgaacctacgttatctagaccgcaagagtcgcacgcgtatatgtctatagttaggatagcgctgccgctccgatattaatgatcctcgtcataaattccgtaagcttagagacgatcagaaaaatcaacagtctctctaaacggatgaagttttcccaggtcccgaccgccac

SEQ ID NO: 1667 - DNA, 479 bp, Glycine max
  Clone ID: LIB3072-031-Q1-E1-F9
tttgggctgagttatgtgcttggtgagaagatgatagaaggggatctctactatcaccacctcacactaaccccggccaagagctgcgaaaaagtaagagaaaaaaggcttaattacggtaattaccctcgactaattcagagggcttcatcctcacggaattctacacggagtatttcacggaattatgcacgagattaatattagtaccaataatttattcctatgttaaatagcgaagcctacaatcgtcgttatcaccggtactatatctccgtcttcgctcgggccgatttctataggtatcgctacaggcccgactaccgtaattttctcctccgccactcctagttttacttccgctttcgtcgtgcccgcgtcgccttcagccgtcctcggtcccccggctctcgggggtcgcggcgcggtcgttaccgtcgtcccgctccggacccataatcacgcgctcgggaattagt

SEQ ID NO: 1668 - DNA, 438 bp, Glycine max
  Clone ID: LIB3072-031-Q1-E1-G1
cttggaacctttgggctgatttatgtgcttgtcgtgagaagatgatagaaggggggagccgagccgagaaggaaaggtcgaagaatatacagagagagagagaagcgtagaaaaaacgagatcgcctgacttacggttcgcccctcctaagagagaacggaagtggaaccggtttcctccggccggacctgttactattggaatctctactattaaatccctttccggctctctcgaggaggaagttaaaaagctgaaacctgcttaggtatataagaggcgatcccagaacggaagacccgtagcggtcccgtataccgcaccagacgcgcgaagagagtccccgcccgcaacaaacgaagagagacgccgcacatatcttacgccttcacccttaccccggccgcccatcccaacgcgaccgagaaacctacatcg

SEQ ID NO: 1669 - DNA, 467 bp, Glycine max
  Clone ID: LIB3072-031-Q1-E1-G10
tttgggctgagttatgtgcttgcatggtcgtgagaagataatagaaggggatcgtcaaaaataaccaacaaagacgagcccgaaggatatacggcggcgtcaaaggggcgcccgccgtcctccccttccgcgggggccatagtcgtatgtacggaatcgagtcctcctaaaagcgattagctactaagccacgacgacgacgagcacctaaaattacgtcgcgactctcgtacgcgtatatgtctaacgttcttctaacgtagtcgcgaagacaccaggtcgaacctacgttatctagaccgcaagagtcgcacgcgtatatgtctatagttaggatagcgctgccgctccgatattaatgatcctcgtcataaattccgtaagcttagagacgatcagaaaaatcaacagtctctctaaacgggtgaagttttcccaagtcccgcccgccacgccaggcgagatac

SEQ ID NO: 1670 - DNA, 443 bp, Glycine max
  Clone ID: LIB3072-031-Q1-E1-G11
tggcttgcaacctttgggctgatttatgtgcttggtgagaagatgatagaaggggatgacgagctcacccgacaatcaagacaccgccacctgcgagaccgacttaacccgacactactgaaacttaacccacattaccgccgaaccaaccactgacgaaagacccactactctcacgggaccaaactttgaaccccccaccggaaacccaagagaaacaaaatacaacaaagaccacggaagcaaacacctccgtacccaccgtcatcgtatcgcccacctcagccttcatcgtccccccatccacaacccatgcaaaaatggcaagctaaagcgatcaaccctatcgaaactcgatcctcctacccccactaacgccactaacgaccaaaaaaaacgaaaaaggcgcctaacccccggctccagcttgaaaaacaaccccc

SEQ ID NO: 1671 - DNA, 487 bp, Glycine max
  Clone ID: LIB3072-031-Q1-E1-G12
ttgggctgatttatgtgcttgcatggtcgtgagaagatgatagaaggggacgcactcgaacaaccaagaaaagttacccttagagtagtccacgaaaacgaagagtatcagtccgcctgtcactccctcatcccgtgttcctattctacattcattccttgttattgtttaggatgcgtctgatgcggacggtgacttgacctggaatggccctacacatcatgccccgttggtaacaagaggaaatggcggtggaacagaatgagttgtatctgggaaagatatccgtttcactatcgcagcgtaactctttaacttaaatctcaaggggccagaaaccaagcccgaactcgtacattttgttcaccatacaaatgaaatttcaaccccgtaaacaaagcctagccatttatagtagcgcgaaagaaagaacttccggcgggttaccctcaaagacacactcgaaggattattcgtcaccaaatct

SEQ ID NO: 1672 - DNA, 437 bp, Glycine max
  unsure at all n locations
  Clone ID: LIB3072-031-Q1-E1-G2
tgtttggaacctttgggctgatttatgtgcttgcatgggtgagaagatgatagaaggggatatactcaatcaagaaagctccttacagttttttggaaacgaagagtattactcctcccgtctctccctctccccgcgttcctattattctacatccattcctagttactgtcgaccctgcgtctgacaacgaaggcaatttctccgaaaacggcggtatacaccacactccgctagatacaatagtacccggcggaacaagagtagttttaatgggaaacgaaagacgtttctctatcgcggcgtaactctgtaacgagtctgataaagggaccggaataactactctgcttttacactgaacttgccccactgttgaaggttacttcccgagttccaagcctgacctacccgtagccacaacgtcgcngcgcgga

SEQ ID NO: 1673 - DNA, 496 bp, Glycine max
  Clone ID: LIB3072-031-Q1-E1-G3
ttggaacctttgggctgatttatgtgcttgcatggtcgtgagaagatgataaaagggggaggaagaaacgtactacactcgcgcccgtcgtaggggtccgatcttctcattcttcttcttcttcttgtcctattaaagatgaaatatctcagctaccatccccgtcctaaagctcggaggaggacccctatccaatctgccatcgaaaagccgcaaaagccgtggaggaaagggggtaaccgaacgcttcggacgcaaggggatgggaaagaacaaaaagaatggaaacacacccgaatggcggaaacgccccgaccgttaaggacccgggtcaaagagtcgctttagtcgtggaaaggaaggtgcaatatttgaataaagaggagaaagacaggaccaaggacctaaatccgtatcccctctctaaccgactaattttccattttcccacgtaactccacatccatgacacaaacagaggctacacgtactcccc

SEQ ID NO: 1674 - DNA, 492 bp, Glycine max
  Clone ID: LIB3072-031-Q1-E1-G4
tggaacctttgggctgatttatgtgcttgcttatgtgcgtgcatagtcgtgagaagatcatagaagggggaggtaagaagccgcaccccggtgcttgtgcggtcctaagaagagaactctaacggaggtttacgagtcgaagtgtgcgccttagacgcctgattgtaatggtgatgggagaacaatgaagaaggagtcgaatgatctgtcggagaattcgggtactcctactcacgataaggattcgagttaaacgacttagaggactgatgctaatggtgatagccgtgcggatacggatgagcccggggagtcgcactagattacaacggatgaatgtgataacgacgaggatacgagggaggttcctaatgctcctgattagaatgttgatagtcctactattgctgatgagccgaagattgctccgcttctttctggtcagaagtcaggaagaattgcctaagatcgtaaggttacgactcttaaagc

SEQ ID NO: 1675 - DNA, 303 bp, Glycine max
  Clone ID: LIB3072-031-Q1-E1-G5
tcgcctgacttacggttcgtccctcctaagagataacggaaatggaaccggtttcctccggccggacctgttactattggaatctctactattaaatccctttccggctctctcgatgatgaagttaaaaagctgaaacctgcttaggtatataagaggcgatcccataacggaagacccgtagcggtcccgtataccgcaccagacgcgcgaagagagtccccgcacgcaacaaacgaagagagacctcgcacatatcttacgccttcacccttaccccggccggccatcccaacgcgaccg

SEQ ID NO: 1676 - DNA, 307 bp, Glycine max
  Clone ID: LIB3072-031-Q1-E1-G7
agatgatagaccccgaaacaaggtacactgtgaatatccgaggcgactcgatagaacggtcctggggctcagtactaacgatctttaagattcccctcgcatctaccgtctcgtccacgtcgttcttatgatcaactctaacactactgacatccacacaactcacattgcacctattgaccctacttacgccaaccatacggtcgcaaccggactacccttacccaatcaatcttcactacgaccatccctccgaaaccccaataaccggtaaccgacgcgctcacaaagtcttattcgaccaaaa

SEQ ID NO: 1677 - DNA, 332 bp, Glycine max
  Clone ID: LIB3072-031-Q1-E1-G8
tatgtgcttgcatggacgtgcacagatgatacccccgatagtcaaatctaaccaactcagaccagggcgaagggtaatacggcgacgtgcaaatgcgagctcgccgtcctccccttccgctggggccatagacgcatgtacggaatcgagtcaccctaaaagcgactacgtactaaatcacgacgacgacgagcacctaaaattacactcccgactatcgtacgcgtatatgtctaacgtatcatctaacgtaatcgcgaagacaccacgtctcaacctacgttatctacaccgcaacagtctcacgcgtatatctctatatatagcatagc

SEQ ID NO: 1678 - DNA, 303 bp, Glycine max
  Clone ID: LIB3072-031-Q1-E1-F5
tggcttggaacctttgggctgatttatgtgcttggtgagaagatgatagaagggacactaaaaagtagaataaaaaaacaaaaacaaagggagaagagtattggctgacacgaatgacgtaaatgcatgcatgtacgtacgtgaagatactatccacacacagagtcaatcaaacctaaccgatcgattgacgacaaataatccatcgataggaaaactttcgcatgacattcaaaccaacccgtcggaaacatactcactgcccagtcagtcgaagcatcaataaacaggtatggactgact

SEQ ID NO: 1679 - DNA, 461 bp, Glycine max
  Clone ID: LIB3072-031-Q1-E1-E2
cttggaacctttgggctgatttatgtgcttgcatggtcgtgagaagatgatagaagggggagtctactgattatgtaacctaggcttaagggcgttcttacaataacgacgtctaacattaaaacgtctccctttattcccctctcgctctctagccgaaaacgccgaaaggagaagagacatccgagtaacctgaggtcctcagcctcctcgagttcgcggtcctcccaatctaggaaatagaaagcgaaaaggagaacggaagggaaggcaagggaagcaagaacgacgagacaactaaagagtcgaagaaggcgaagaggtagaatcccgcgatctaccgctcctccctggcgacgaccgcttctaacgcggtccggtaatcactagaggccctctccaccccgaaagctaaagacggatcaagttatttccccagacttaagaattcgacgataaag

SEQ ID NO: 1680 - DNA, 494 bp, Glycine max
  Clone ID: LIB3072-031-Q1-E1-E3
ggcttggaacctttgggctgatttatgtgcttgcatggtcgtaagatgatagaagggggccgtaaaccgtaatatctagctagtatcgtattatcgtaccctaccctttagtccagtcataatcataagtttatgctgtccctacaaaattatatttattcgttattactatcccttttaaaatgtaatactactaaaatccaaatctagagaactagagagagagagagagagaaacgagcgaagaagttaaaaagaatcctgttggagtctcaatggtgaggtttaatcttgacgagttgaaattggtattggcgttagtcgcctttttgaagaaggctgctactaagagtgtcgacacgacttttgatacgtagaaggaggttgccgacactgttgctgttgtgcccgagaagcataacgcggagaaagatgccgtggagtagacaaagaaggagcctgacaagaggtacggttttatgcggtaccgcact

SEQ ID NO: 1681 - DNA, 491 bp, Glycine max
  unsure at all n locations
  Clone ID: LIB3072-031-Q1-E1-E4
tggaacctttgggctgatttatgtgcttgtttatgtgcttgtggatgtgcgggtcgtgagaagatgatagaaggggacgtaatcgaacaaggaacaaaagttacccttacagtagttcaagaaaacgaagagtatcagtccgcctgtcactccctcatcccgtgttcctattctacattcattccttgttattgtttaggatgcgtctgatgcggacggtgacttgacctggaatggccctacacatcatgccccgttggtaacaagaggaaatggcggtggaacagaatgagttgtatctgggaaagatatccgtttcactatcgcagcgtaactctttaacttaaatctcaaagggccagaaaccaagcccgaactcgtacattttgttcaccatacaaatgaaatttcaaccccgtatacaaagcctagccatttatagtagcgcgaaagaaagaacttcnggcgggttacactcaaggacacactcg

SEQ ID NO: 1682 - DNA, 476 bp, Glycine max
  Clone ID: LIB3072-031-Q1-E1-E5
tggcttggaacctttgggctgatttatgtgcttgatggtcgtgagaagatgatagaaggcgatagtaaaaataaccaacaaagacgagcgggaagagtaatacggcggcgtcaaaggcgcgcccgccgtcctccccttccgcgggggccatagtcgtatgtacggaatcgagtcctcctaaaagcgactagctactaagccacgacgacgacgagcacctaaaattacgtcgcgactctcgtacgcgtatatgtctaacgttcttctaacgtagtcgcgaagacaccaggtcgaacctacgttatctagaccgcaagagtcgcacgcgtatatgtctatagttaggatagcgctgccgctccgatattaatgatcctcgtcataaattccgtaagcttagagacgatcagaaaaatcaacagtctctctaaacggatgaagttttcccaggtcccgcccgccacgccaggggagat

SEQ ID NO: 1683 - DNA, 363 bp, Glycine max
  Clone ID: LIB3072-031-Q1-E1-E6
tggcttggaacctttgggctgatttatgtgcttgcatggtcgtgagaagatgatagaagggcatggtcgtgagaagatgatagaaggatgaacaaagaaaaacgaagacaaaaaaaaaaaagtggttgtctcagaggacttaagtccatgaatgtgcgtacgtgatactacagtctcctcacagcgttattcaaacttaacctatcggttgaagtcccataatgctgagatcgggaaaatttcggtgccatttaatccaactgttccgtagtatactttttcccacgttagtcgctgcaacaattaacaggtatggattaactgtatcctttaatagccgtgtagttcgaacggtaaacggga

SEQ ID NO: 1684 - DNA, 439 bp, Glycine max
  Clone ID: LIB3072-031-Q1-E1-E7
tggaaccttgggctgatttagtgcttgtttagtgcttgcatggccgtgacaagataatacaaggggatagtaaaaataaccgacaaagacgagcccgaagaatgatacggcggcgtcaaaggcgcgcccgccgtcctccccctccgcgggggccatagtcgcatgtacggcatcgagtcctcctaacagcgactagcatactaagccacgacgacgacgagcacctaaaattacgtcgcgactctcgcacgcgtatatctctaacgttcgtctaacgtattcgcgaagacaccaggtcgaacctacgttatctagaccgcaagagtcgcacgcgtatatgtctatagttaggatagcgctgccgatccgatattaatgatcctcgtcataaattccgtaagcttagacacgatcagaaaaatcaacagtctcactaaac

SEQ ID NO: 1685 - DNA, 479 bp, Glycine max
  Clone ID: LIB3072-031-Q1-E1-E8
ggcttggaaccgttgggctgatttatgtgcttgcttatgtgcttgcatggtcgtgagaagataatagaaggggatagtaaaaataaccgacaaagacgagcccgaagaataatacggcggcgtcaaaggcgcgcccgccgtcctccccttccgcgggggccatagtcgtatgtacggaatcgagtcctcctaaaagcgactagctactaagccacgacgacgacgagcacctaaaattacgtcgcgactctcgtacgcgtatatgtctaacgttcttctaacgtaatcgccaagacaccaggtcgaacctacgttatctagaccgcaagagtcgcacgcgtatatgtctatagttaggatagcgctgccgctccgatattaatgatcctcgtcataaattccgtaagcttagagacgatcagaaaaatccacagtctctctaaacggatgaacttatcccaggtcccgcacgccacgcc

SEQ ID NO: 1686 - DNA, 248 bp, Glycine max
  Clone ID: LIB3072-031-Q1-E1-E9
tcgtgagaagatgatagacgggcatcgccgtcagaagatgatagaagggcatggtccgcagaacctcatagaagggcatggtcgtcagaagatgatagaagggtatggtcgtcagaagatcatagaagggcatggtcgtgacaagatgatagaagggcatcgtcgtaagaagatgctagaacggcatagtcgtgagaagatcatagaagggcatactcgtcagacgatcatagatacgcatggacgtc

SEQ ID NO: 1687 - DNA, 499 bp, Glycine max
  Clone ID: LIB3072-031-Q1-E1-F1
tggtttggaacctttgggctgatttatgtgcttgcatggtcgtgatgatagaagggggccaactcgaagactcccaacgcgctagtaaataagtcggtcgtctccttcgaacttaccgtctcccgtaggctatcagctgaaccggacgtaagtcccaataatccaacgcgctcgttaatgaatacgggccccggatccgccaattccgagaagtctccgacttacccgaataagacatgaccctcctttgttcttaccggagaaacgaaactctctaggtactccgacgcttaccctaacgagtcctacggttcattctaacttaccgggaaatctataaactcggaacactcgaacgccagtagcaatcccagcgatacgatagagtcattcgaaatatccggcgactcggctaatccaagggagtccgattctagtaataattaaacttgagtctccttccatctgcctggcaggtccgaaaaaacgataaagtcta

SEQ ID NO: 1688 - DNA, 486 bp, Glycine max
  Clone ID: LIB3072-031-Q1-E1-F10
gcttcgaactttgggctgagttatgtgcttgtttatgtgcttgcatggtcgagaagatgatccaaggggacctatataatcaatcaagaaagggccttacagttttttaaaaacgaagagtattactcctcccgtctctccctctccccgcgttcctattattctacattcattcctagttactgtcgaccctgcgtctgacaacgaaggcaatttctccgaaaacggcggtatacaccacactccgctagatacaatagtacccggcggaacaagagtagttttaatgggaaacgaaagacgtttctctatcgcggcgtgactctgtaacgagtctgataaagggaccggaataactactctgcttttacactgaacttgccccactgttgaaagctacttcccgagttccaagcctgacctacccgtagccacaacgtcgcgcgccggaaccttcattgagcggctccgcgcggaggactcatt

SEQ ID NO: 1689 - DNA, 280 bp, Glycine max
  Clone ID: LIB3072-031-Q1-E1-F11
actttgggctgagttgggtgcttaattatgtgcttgtttatgtccctctttatgtccctgcatggtcgtcagaagatgatagaagcgctatacccaatcaagaaagggccttacagttttttaaaaacgaagcgtattactcctcccgtctctccctctccccgcgttcctattattctacattcattcctacctactctcgaccctccgtctgacaacgaaggcaatttctcccaaaaccgccctatacaccacactccgctacatacaatactccccc

SEQ ID NO: 1690 - DNA, 457 bp, Glycine max
  Clone ID: LIB3072-031-Q1-E1-F2
tgcttggaacctttgggctgatttatgtgcttgcatggtcgtgagaagatgatagaagggcatggtcgtgagaagatgatagaagggcatggtcgtgagaagatgatagaagggcatggtcgtgagaagatgatagaagggtgttttaaaaaaaaaaaaaaaaaaaaaaaaaaaaaagtggttgtctcagaggacttaagtccatgcatgtgcgtacgtgatgctacagtctcctcacagcgctattcaaacctaacctatcggttgctgccccataatgctgcgatcgggaaaatttcggtgccatttaatccaactgttccgtagtatactttttccctgttagtcggtgcaacagtgaagaggtttgtattgactgtttcctttaatagccgtgtagttcgaacggtgaacgggatgtgtttcgcagtggtgtaccaagtgtggtgggcgcggc

SEQ ID NO: 1691 - DNA, 492 bp, Glycine max
  Clone ID: LIB3072-031-Q1-E1-F3
ttggaacctttgggctgatttatgtgcttgcatggtcgtgagaagatgatagaagggcatggtcgtgagaagatgatagaagggcatggtcgtgagaagatgatagaagggcatggtcgtgagaagatgatagaagggggaaggaagggagggaagaacagaacgggactcggaagcggaaaatatatcggagagcctcctaggagaagggacgtacggaggaagtacttgacgtctattaactagtcttgttatgttattttcggttccggtactgttgctgctgttcctggcactcattctgctggtgaataagctcataacaggtctcacgtctttgacttctacctgaccctctatgcgaaggttggggactattatcaaatgcccggatggatgtatcttaccttactactatccaacaagtccgtcagtacgcctctgtagttcccaacgcccaaaccctagattgcgcctgtcctcccggtatct

SEQ ID NO: 1692 - DNA, 489 bp, Glycine max
  Clone ID: LIB3072-031-Q1-E1-F4
ttggaacctttgggctgattttgtgcttgcatggtgtgagaagatgatagaagggggcccctaccgggcgtcgactggaataaatagggagcagaagagaggagaagacgggccctacaacggaacccgtggagaatccggcaccaaagccgacggaagacttgaaggaaagggactggaggcctagggagtatgcccacagagcgaaggataggcgtgagaagatgaaggagacgcggagtcatttcacgtgatttcacgggccccggatacctgaatgttataacctctagtccgtccgggacgtatagaccagttaagcggttgggaggagggatttccacgacgactcttcttaataccctctcattttattcaagcgagcgccgtcgaatccgttataagtaccactggcgaaaaggacggacccgctgcaacccttttccgcaacacttcgctccgccgtacgccgtagagaccataatcgga

SEQ ID NO: 1693 - DNA, 350 bp, Glycine max
  Clone ID: LIB3072-031-Q1-E1-E11
acctttgggctgatttatgtgcttgcaccgtcgtgagaagatgatagaaggggacgtccatcgaacaaccaagaaaagttacccttaggggtattcaccaaaacgaagggggtcagtccgcctgtcactccctcatcccgtgttcctattctacattcattccttgctattgtttaggatgcgtctcatgcggacggtcacttgacatggaatggacctacacatcatgccccgttcgtgcccatccgcaatctccctcgaacacaatccagttctatccccgccaagatctccgtttcactatccaccagtaactccaccactcccctcccatccctccagaccccccc

SEQ ID NO: 1694 - DNA, 490 bp, Glycine max
  Clone ID: LIB3072-031-Q1-E1-D10
gcttcgaactttgggctgatttatgtgcttgcatggtcgtgagaagatgatagaaggggatagtaaaaataaccaacaaagacgagcccgcagggtaatacggcggcgtcaaaggcgcgcccgccgtcctccccttccgcgggggccatagtcgtatgtacggaatcgagtcctcctaaaagcgactagctactaagccacgacgacgacgagcacctaaaattacgtcgcgactctcgtacgcgtatatgtctaacgttcttctaacgtagtcgcgaagacaccaggtcgaacctacgttatctagaccgcaagagtcgcacgcgtatatgtctatagttaggatagcgctgccgctccgatattaatgatcctcgtcataaattccgtaagcttagagacgatcagaaaaatcaacagtctctctaaacggatgaagttttcccaggtcccgcccgccacgccaggggagataaacccaataagacac

SEQ ID NO: 1695 - DNA, 451 bp, Glycine max
  Clone ID: LIB3072-031-Q1-E1-D11
tttgggctgagttgtgtgcttgattatgtgcttgcatggtccgtgagaagatgctccaagggcatggtcgtgagaagatgatagaggtgcatccccgtgagaagatgggagaagggcatggtcgtgagaagatgatagaagggcatggtcgtcagaagatgatagaacggcatggtcgtcagaagatgatagaccggcatggtcgtcagaagatgatagaaggggatggtctctgaccctgcctccgcctcggcccacagactcccgtcaacgacgcccatagtgtccaattaaagacgtacactgaggaacgatagactatcgagtcccataccttcaggaagcgtcctcctataaatagaccgaccattgccaacgattacgctccggcctagactaataccgcgtacgcggacgacaacggtgcccataaaggttacccccctaaccc

SEQ ID NO: 1696 - DNA, 478 bp, Glycine max
  Clone ID: LIB3072-031-Q1-E1-D12
gcttcgaactttgggctgagttatgtgcttgcatggaagatgatagaagggggactctatggagatggattctctctctgtgtggatgtgcgggcgcagtctgtctatctctaggtctctgtgtaattttttctctgcggatgtgccgccgtagacttctgcctgcctctgtctctctgtgcgagcccccgaacccgccggctcacgcgtaggattagttttgaatcttcgtctaactttcgcggactagtccggcatctacttacaacggagtccgggtccattcccatccccgatcgtccgacgccccaacgccatctcaccccgccccttaccgcccccaccagccgatttcgaaatcccattaccccgcggcccggctcggcccctacagtactgacccactttcggaggaaagccaataaaacttcggacaacagttctccggggtccccaaaccgaactgaggacgggagat

SEQ ID NO: 1697 - DNA, 465 bp, Glycine max
  Clone ID: LIB3072-031-Q1-E1-D2
attggcttggaacctttgggctgatttatgtgcttgtttatgtgcttgatggtcgtgagaagataatacaagggcatggtcgtgagaagatgatagaagggagcggcgcacaacgacgagagacatccgccaagacgtgcaaaacgccataaaaaaaaacaaaacaaaaaaaaaaaaaaagtggttgtctcagaggacttaagtccatgcatgtgcgtacgtgatgctacagtctccacacagcgctattcaaacctaacctatcggttgctgccccataatgctgcgatcgggaaaatttcggtgccatttaatccaactgttccgtagtatacattttccctgttagtcggtgcaacagtgaagaggtttgtattgactgtttcctttaatagccgtgtacttcgaacggtgaacgggatgtgtttcgcagtggtgtaccaagtgtggtgggcgcggcggcca

SEQ ID NO: 1698 - DNA, 490 bp, Glycine max
  Clone ID: LIB3072-031-Q1-E1-D3
tgcttggaacctttgggctgatttatgtgcttgcatggtcgtgagaagatgatagaaggggatagtaaaaataaccaacaaagacgagcccgaagaataatacggcggcgtcaaaggcgcgcccgccgtcctccccttccgcgggggccatagtcgtatgtacggaatcgagtcctcctaaaagcgactagctactaagccacgacgacgacgagcacctaaaattacgtcgcgactctcgtacgcgtatatgtctaacgctcttctaacgtagtcgcgaagacaccaggtcgaacctacgttatctagaccgcaagagtcgcacgcgtatatgtctatagttaggatagcgctgccgctccgatattaatgatcctcgtcataaattccgtaagcttagagacgatcagaaaaaaaaaaaaaaaaaaaaaaaaaaaaaagtggttgtctcagaggacttaagtccatgcatgtgcgtacgtgatgctac

SEQ ID NO: 1699 - DNA, 491 bp, Glycine max
  Clone ID: LIB3072-031-Q1-E1-D4
ggcttggaacctttgggctgatttatgtgcttgcatggtcgtgagaagatgatagaaggggataatataaatacctctcttaccgctcccgaatatctactattacggttaagtccgcctccctttcccgcccttcctcccctagcggtcgtcctgtctcgagagagtaggtatagtaaaacgagcgttagacttaaaagtcgaacgtttctaaattggacaattgcacagagctggaaggcgggcctaccgagattcggaatttcaataataagttaccttagcgcgttggcgccgtttctctctgtcgtatttccaattgtaacgtttcctgcagattccttcatattaatggcttttaggaaactcatacataataaggcaacggcacccccggtacgacacctttgggccgcttcagtatccactaagagttgtaagaactctagtaatgaggatgaagttaggggttttaagattgctattaaaag

SEQ ID NO: 1700 - DNA, 490 bp, Glycine max
  Clone ID: LIB3072-031-Q1-E1-D5
tgcttggaacgttgggctgatttagtgcttgcatggtcgtgagaagatgatagaccgggatcttatctataatcgaaattaaaaaaggaaaaggaaaaaaaaaaaaaaaggtggttgtctcagaggacttaagtccatgcatgtgcgtacgtgatgctacagtctcctcacagcgctattcaaacctaacctatcggttgctgccccataatgctgcgatcgggaaaatttcggtgccatttaatccaactgttccgtagtatactttttccctgttagtcggtgcaacagtgaagaggtttgaattgactgtttcctttaatagccgtgtagttcgaacggtgaacgggatgtgtttcgcagtggtgtaccaagtgtggtgggcgcggcggccatgtgtagtgcgattgtcatatccgttagtgtttcaatgtttgacttccctgtccctcctttccttcccactgttatgcctgttggtcccttttgc

SEQ ID NO: 1701 - DNA, 497 bp, Glycine max
  Clone ID: LIB3072-031-Q1-E1-D6
cttggcttggaaccgttgggctgatttatgtgcttgcttatgtgcttgtttatgtgcttccttatgtgcttgcatggtcgtgataagatgatggaaggggatataatcaatcgagaaagctccttacagttttttaaaaacgaagagtattactcctcccgtctctccctctccccgcgttcctattattctacattcattcctagttactgtctaccctgcgtctgacaacgaaggcaatttctccgaaaacgtcggtatacaccacactccgctagatacaatagtacccggcggaacaagagtagctttaatgggaaacgaaagacgtttctctatcgcggcgtaactctgtaacgagtctgataaagggaccggaataactactctgcttttacactgaacttgccccactgttgaacgttacttcccgagttccaagcctgacctacccgtagacactacgtcgtgcgccggaaccttcattgagcggctcg

SEQ ID NO: 1702 - DNA, 495 bp, Glycine max
  Clone ID: LIB3072-031-Q1-E1-D7
attggcttggaacctttgggctgatttatgtgcttgcatggtcgtgagaagatgatagaaggggaaaataaagcagaacaagtataaaaaggaaaaagggaaaaaaaaaaaaaaagtggttgtctcagaggacttaagtccatgcatgtgcgtacgtgatgctacagtctcctcacagcgctattcaaacctaacctatcggttgctgccccataatgctgcgatcgggaaaatttcggtgccatttaatccaactgttccgtagtatactttttccctgttagtcggtgcaacagtgaagaggtttgtattgactgtttcctttaatagccgtgtagttcgaacggtgaacgggatgtgtttcgcagtggtgtaccaagtgtggtgggcgcggcggccatgtgtagtgcgattgtcatatccgttagtgtttcagtgtttgtcttccctgtccctcctttccttccctctgttatgcctgttggacccttttgc

SEQ ID NO: 1703 - DNA, 429 bp, Glycine max
  Clone ID: LIB3072-031-Q1-E1-D8
tggttggaacgttgggctgatttagtgcttgctggtcgtgagaagatgatagacggggagatctaaaaaaaaaaaaaaaaaaaaagagaaagaagtggttgtctcagaggacttaagtccatgcatgtgcgtacgtgatgctacagtccccccacagcgctattcaaacctaacctatcggttgctgtcccataatgctgcgatcggaaaaatttcggtgccatttaatccaactgttccgtagtatactttttccctgttagtcggtgcaacagtgaagaggtttgtattgactgtttcctttaatagccgtgtagttcgaacggtgaatgggatgtgtttcgcagtggtgtaccaagtgtgacgggcgcggcggacatgtgtagtgcgattgtcatatccgttagtgttacagtgcatgtcttccct

SEQ ID NO: 1704 - DNA, 487 bp, Glycine max
  Clone ID: LIB3072-031-Q1-E1-D9
ctttgggctgatttatgtgcttgcatggagaagatgatagaaggggggagcggaggcagcagtaagcatgctgcacacgcggccgactcctcgtcggccgcccgccccgccttccttaaccgctagactcgaactattggatctatctcctatatctatctatatcgaacggtcctcgaaggtgattgctattattattattattattactaagactatgactactactactacgactacgactattactactactatgacggagagggagagattaatctacgggcaggcaaggacgggaaggcgcattacagttatgacggctcggtgttgtacctctatgaatttacccatctttttggtcatcctgttagaagagtcttattgtcctctaatagaaatcctaatgaaagagttcctattgctggaactggcggatttgctggcatcggtaaaatagtctctacgccggtttcccgcgaatctc

SEQ ID NO: 1705 - DNA, 479 bp, Glycine max
  Clone ID: LIB3072-031-Q1-E1-E1
ggaacctttgggctgatttatgtgcttgcatggtcgtgagaagatgatagaagggaaaacaaaaaaaaaaaaaaaaaaaaaaaaagtggtggtctcagaggacttaagtccatgcatgtgcgtacgtgatgctacagtctcctcacagcgctattcaaacctaacctatcggttgctgccccataatgctgcgatcgggaaaatttcggtgccatttaatccaactgttccgtagtatactttttccctgttagtcggtgcaacagtgaagaggtttgtattgactgtttcctttaatagccgtgtagttcgaacggtgaacgggatgtgtttcgcagtggtgtaccaagtgtggtgggcgcggcggccatgtgtagtgcgattgtcatatccgttagtgtttcagtgtttgtcttccctgtccctcctttccttccctctgttatgcctgttggtcccttttgctaagtctcaaactg

SEQ ID NO: 1706 - DNA, 485 bp, Glycine max
  Clone ID: LIB3072-031-Q1-E1-E10
tttgggctgagttatgtgcttgcatggtcgtgagaagatgatagaaggggatagctaaagataaccaacaaagacgagcccgaacgataatacggcggcgtcaaaggcgcgcccgccgtcctccccttccgcgggggccatagtcgtatgtacggaatcgagtccacctaaaagcgactagctactaagccacgacgacgacgagcacctaaaattacgtcgcgactctcgtacgcgtatatgtctaacgtacttctaacgtagtcgcgaagacaccaggtcgaacctacgttatctagaccgcaagagtcgcacgcgtatatgtctatagttaggatagcgctgccggtccgatattaatgatccccgtcatcaattccgtaagcatagagacgatcagaaaaatcaacagtctctctaaacggatgaagttatcccaggtcccgtacgccacgccaggcgagataaaccatatacgaaacaaa

SEQ ID NO: 1707 - DNA, 492 bp, Glycine max
  unsure at all n locations
  Clone ID: LIB3072-031-Q1-E1-D1
tggaacctttgggctgatttatgtgcttgtttatgtgcttgtttatgtgcttgcatggtcgtgagagatgatagaaggggatagtaaaaatgaaccaacaaagacgagcccgaagaataatacggcggcgtcaaaggcgcgcccgccgtcctccccttccgcgggggccatagtcgtatgtacggaatcgagtcctcctaaaagcgactagctactaagccacgacgacgacgagcacctaaaattacgtcgcgactctcgtacgcgtatatgtctaacgttcttctaacgtagtcgcggagacaccaggtcgaacctacgttatctagaccgcaagagtcgcacgcgtatatgtctatagttaggatagcgctgccgctccgatattaatgatcctcgtcataaattccgtaagcttagagacgatcagaaaaatcaacagtctctctaaacggatgaagttttcccaggtcccgnccgccacgccagggg

SEQ ID NO: 1708 - DNA, 488 bp, Glycine max
  Clone ID: LIB3072-031-Q1-E1-B7
tggcttggaacctttgggctgatttatgtgcttgcatggtcgtgagaagatgatagaaggggaaaacctcaaccaaaaaaaaaataaaggcaaccgacacccctccaaagaataaaacgcccgccacgtccaacactcccaacccggctcgcacccgcacctatcttgcttcccacctaagcagcccccctctggtgaaaccgtttgaagttcatgtccctccgaacttaaccgcggacaccacgttagcaacatttccatctcccccctccccagtccccgcccggtaagtcgtcgcaagcccctgacgacactcgcaacccgagcaacgctccaaaaaaaaaccaagaacccactagaaaatcaaaacctgaataccccaataacccaaaagactaaacaagctccatagcgcgaaccactgaccttaacaccgaaacccccggacacacatgaaaaaacatggattactctactactcatgcccc

SEQ ID NO: 1709 - DNA, 422 bp, Glycine max
  Clone ID: LIB3072-031-Q1-E1-B9
ctttggctgagttatgtgcttgaatatgtgcttgcatggtcgtgagaagatgatcgaagggcatggtcgtgagaagatgatagaggtgcatcgtcgtgagaagatgatagaagggcatggtcgtgagaagatgatagaagggcatggtcgtgagaagatgatagaagggcatggtcgtgagaagatgatagaagggcatggtcgtgagaagatgatagaagggcatggtcgtgagaagatgatagaaggggacaaaaaacacacacacaaacacaaaaaaaaagtggttgtctcagaggacttaagtccatccatgtgcgtacgtgatgctacagtctcctcacagcgctattcaaacctaacctatcggttgctgccccataatgctccgatcgggaaaatttcggtgccatttaatccaa

SEQ ID NO: 1710 - DNA, 495 bp, Glycine max
  Clone ID: LIB3072-031-Q1-E1-C1
tggaacctttgggctgatttatgtgcttgcatggtcgtgagaagatgatagaagggggataaagcagtcgagccggccacccacttacccagaaagataccgcggccatttacagctctacagcgctacatcgtaatataaaataacgggcctttccacggtaggacgggatctcatttatacagacttctaactagttatatccaaaaggaattgtctatctattaaggacgaaaccgacgtccatcggaaactaaagaagaagacagaggaagaatattccagagtcacccttaatccgctagagatcacctaggtcagtaaaagtatagaattcgagaagaagccgtagaagctaacgattacgttcgcgatttgcgtatgggatcatccaaacacgggtacagatataagcccggagtactccaccaagaaaaacggtcggcggattaagagcagtcgggtaccctcgaacgagttcttagcgatcgaagt

SEQ ID NO: 1711 - DNA, 483 bp, Glycine max
  Clone ID: LIB3072-031-Q1-E1-C10
gcttcgaactttgggctgatttatgtgcttgcatggtcgtgagaagatgatagaaggggatagtaaatataaccaacaaagacgagcccgaaggataatacggcggcgtcaaaggcgcgcccgccgtcctccccttccgcgggggccatagtcgtatgtacggaatcgagtcctcctaaaagcgactagctactaagccacgacgacgacgagcacctaaaattacgtcgcgactctcgtacgcgtatatgtctaacgttcatctaacgtagtcgcgaagacaccaggtcgaacctacgttatctagaccgcaagagtcgcacgcgtatatgtctatagttaggatagcgctgccgctccgatattaatgatcctcgtcataaattccgtaagcttagagacgatcagaaaaatcaacagtctctctaaacggatgaagttctcccaggtcccgcctgccacgccaggggagataaacaaaat

SEQ ID NO: 1712 - DNA, 483 bp, Glycine max
  Clone ID: LIB3072-031-Q1-E1-C11
ttgggctgagttatgtgcttgcatggtcgtgagaagatgatagaaggggagagcgcggaattcctgtcaatttcaaaacccctgcacaatgaaacggtacttatggttggtgttgttgtgagactgaccccttgcctgcgccttctctgttgtgttgtgccttgctctggtcttgaagttaaagtggtctggctcttgccttgtgctgtccttaattaattctctctgtgactcatatctaggcgctttgccgaaccgagtccccgcgcggaacttacgccattgcattacatagtaatcgtcctcgtcccgacgatcctgacgtcacttgctctctgttatagtcatggccggtccttcgaaggtaaagagaagatcacccgaagactaagaactaaggccgggacgatacggattctccccgacgccgggtcccaaataaaacaaattacctccaccaggaagacccgtcagacactcact

SEQ ID NO: 1713 - DNA, 491 bp, Glycine max
  Clone ID: LIB3072-031-Q1-E1-C12
ggcttcgaactttgggctgagttatgtgcttgtttatgtgcttgtttatgtgcttgcatggtcgtgagaagatgatagaaggggaagaacaggagtttaaaaatcattacagttatcgatcgacctagaaatctccaggtacagtgaaaacgataattattcctgtgattgctgtaggatctggcggcgtactatcgctacttattctactctgctctattctagggcccgcgaaactgttagcgagcgtcaggaactttccgaggtaagtcgcggtaacgggaaacgggagggccatacgtcctgagaggaaccggtcgtgggtagaccatagcgcgaccgggcccgggccgaccggccggtcagtatttctaagtgcattggtcactaatggcaaaagctcgatcggttctcctcccgagagtaccggagtcgagtccgtctatccttttattttcctcgtttccatcctacttccccggccacggtcg

SEQ ID NO: 1714 - DNA, 454 bp, Glycine max
  Clone ID: LIB3072-031-Q1-E1-C2
tggcttggaacctttgggctgatttatgtgcttgcatgggcgtgagatgatcgaaggggataggtccattaatctacgtagatgagcccgcagactgataccgcggcgtctcaggcgcgaccgatgtcctccccttccgtagtggccatagccgtatgtacggaatcgagtccacctaaaagcgactagctactacgtcacgacgactacgagcacctacaattacgtcgtgactctcgtacgcgtatatgtctaacggtctactaacgtaggcgagaagactctatgtcgaacctacgttatctatatcgcaagagtcgcacgcgtatatatctatatttagcatagcgctagcgctccgatattaatcatcctcgtcataaatttcgtaagcttagagacgatcagaagactcaacagtcacgccacacggatgaagtcttcccaagtcccg

SEQ ID NO: 1715 - DNA, 499 bp, Glycine max
  Clone ID: LIB3072-031-Q1-E1-C3
tggcttggaacctttgggctgatttatgtgcttgcatggtcgtgagaagatgatagaaggggagagcggcggagcgcgtagaagagtgctgtagctgtaatttcaactagaagaagtgtagtcctaagtgagcgatagttattagttacgggctgcacgtatagttgtggcaagggcacacttctcctcgtcccgtttcataaaaggatattcttcagtcggtctaagactctcctgtaagacgctgaagaaaacactcgtaagcccgtgaagaaaggcccgattttgctctagaccggcgctacctctagagacctctatggcaccgtctaggctaacagtgctatcggtagtaaaacttcctgtacttctaaagtctatggatccgtgttcgaaaccttagaggattcgcattacccgaccaagaaggtagccctaaccaggaagtactccgagaggaataggaaggataaggatcttaagcctaggccgacctccg

SEQ ID NO: 1716 - DNA, 465 bp, Glycine max
  unsure at all n locations
  Clone ID: LIB3072-031-Q1-E1-C4
tggcttggaacctttgggctgatttatgtgcttgcatggtcgtgagaagatgatagaaggggacagtagtactacataaagtaccgaacctaaaaatgccaagcctaccttccgcgccccgtccctccttctaaaattaaatacgctgaatatacgtggtaatcgtgatcgtgtcgataagatcagtcgtattaagggaaatagtcacggcgccaccgcagagatcgagaagagccatactgagatcgccgctacggacgccttagtagtcgagtacgacgggaagcgtaagcgcggtatcaatcgtatccgtatggatcgtattcgcggttaccaaggaacacgcacgaaaacgcaaccgttacgcgcccggtaacataaacacttaaacaacgcaactcctgcacgaacaaacgcgcgcgtcgncacttcatcctaggctcgcgcagctacgtagctcgaact

SEQ ID NO: 1717 - DNA, 496 bp, Glycine max
  unsure at all n locations
  Clone ID: LIB3072-031-Q1-E1-C5
tggcttggaacctttgggctgatttatgtgcttgcatggtcgtgagaaggatagaagggcatggtcgtgagaagatgatagaaggggatagtaaagataaccaacaaagacgagcccgaagaataatacggcggcgtcataggcgcgcccgccgtcctccccttccgcgggggccatagtcgtatgtacggaatcgagccctcctaaaagcgactagctactaagccacgacgacgacgagcacctaaaattacgtcgcgactctcgtacgcgtgtatgtctaacgttcttctaacgtagtcgcgaagacaccaggtcgaacctacgttatctagaccgcaagagtcgcacgcgtatatgtctatagttaggatagcgctgccgctccgatattaatgatcctcgtcataaattccgtaagcttagagacgatcagaaaaatcaacagtctctctaaacggatgaagttttcccaggtcccgnccgccacgccagg

SEQ ID NO: 1718 - DNA, 439 bp, Glycine max
  Clone ID: LIB3072-031-Q1-E1-C6
tggcttggaacctttgggctgatttatgtgcttgtttatgtgcttgcatggtcgtgagaagatgatagaagggaaaaaaaaaaaaaaaggaaaaaagaaaaagtggttgtctcagaggacttaagtccatgcatgtgcgtacgtgatgctacagtctcctcacagcgctattcaaacctaacctatcggttgctgccccataatgctgcgatcgggaaaatttcggtgccatttaatccaactgttccgtagtatactttttccctgttagtcggtgcaacagtgaagaggtttgtattgactgtttcctttaatagccgtgtagttcgaacggtgaacgggatgtgtttcgcagtggagtaccaagtgtggtgaacgcgtcggccatgtatagtgcgattgacatatccgttagtgtttcaatgtttgtctaccctgt

SEQ ID NO: 1719 - DNA, 493 bp, Glycine max
  Clone ID: LIB3072-031-Q1-E1-C7
ggcttggaacctttgggctgatttatgtgcttgcatggtcgtgagaagatgatagacggggaccgagtaaaactcggaaaaaagcccgaagaaaggaaaaagaaataacctagcaaaaccgagcgcgtacacgcgccggcgcactcgtacgatattaaactagcggaagacatctataaaattcccattctgaaaccctctacccaaaataaagataatccgggagaaaaacctacactaagcggttacgacgggggccgacccaaccccttctcccctccttctctctcctactcttcacactctctcctctcgtcctaaaaaacccctaagaaaaaaaccctttcccaccagccctctcctctcatcctcacgccaggcctaagagaacttaaacctttccgttcccgagccccgagaccggggacaagaaccgagaaggatctacatcgtatgcgggccccctagaacctcgacccaggcgcaaggccct

SEQ ID NO: 1720 - DNA, 477 bp, Glycine max
  Clone ID: LIB3072-031-Q1-E1-C9
ctttgggctgatttatgtgcttgcatggtcgtgagaagatgatagaaggggaactcggcgagcaacaaaaactaagaaaaaaaagaaaaaaaagtggattcacaaaggggttaagtcaatggatttacgtccatgaatctacatacgtcacacagcggtattcaaacagagctaatcggttgtaacccaataattcttggatcgtaaaaatttcatcggcataaaatcgaactcatccaaaccaaacgttccccaggatactcggtccaacatagacgaggtatcaattaacaggttcctataaacggcgtctagtacgaacggtgtacgtcatacgtttaacggtatgttacccactgtggtgtaccaagtgtccatgtctagtcggatatgcatatcccgaagggcataactgttagtcttccactgctcgccttccctgccctccgttacgctcgctcggccatgtcggtaagt

SEQ ID NO: 1721 - DNA, 483 bp, Glycine max
  Clone ID: LIB3072-031-Q1-E1-B6
tggcttggaacctttgggctgatttatgtgcttgcatggtcgtgagaagatgatagaaggggatagtaaaaataaccaacaaagacgaggccgaagaataatacggcggcgtcaaaggcgcgcccgccgtcctccccttccgcgggggccatagtcgtatgtacggaatcgagtcctcctaaaagcgactagctactaagccacgacgacgacgagcacctaaaattacgtcgcgactctcgtacgcgtatatgtctaacgttcttctaacgtagtcgcgaagacaccaggtcgaacctacgttatctagaccgcaagagtcgcacgcgtatatgtctatagttaggatagcgctgccgctccgatattaatgatcctcgtcataaattccgtaagcttagagacgatcagaaaaatcaacagtctctctaaacgaatgaagttttcccaggtcccgcccgccacgccaggggagataaacaa

SEQ ID NO: 1722 - DNA, 424 bp, Glycine max
  Clone ID: LIB3072-031-Q1-E1-A5
ggcttggaaccgttgggctgatttatgtgcgtgcttatgtgcttgattatgtgcgtcatggtcgtcagaagatgatagatgggcatgggcgttagaacatgatagaaggggatagtaaaaataaccaacaaagacgagcccgaagaataatacggcggcgtcaaaggtccgcgaagcgtccgccccatccgccggggccatagtcgtatctacggaatcgactcctcctacatgtgactacctactcagtcacgacgacgacgagtacctaaacgtacgtcgagactctcggacgcgtatatgtctaacgttcggctaacgtatccgccaaaacaccaagtcgaacccacgttatcgataccgcaaaggtcgcacgcgtatatgtcgatagttaggatagcgtttccggtccgataatacgatc

SEQ ID NO: 1723 - DNA, 439 bp, Glycine max
  Clone ID: LIB3072-031-Q1-E1-A6
ggcttggaacctttgggctgatttatgtgcgtgcataggcgagaagatgatagaaggccttgatcgtgagaagatgatagaaaggtggggtaatggaacaaccaagaaaaggtacccttacagtagttcaagaaaacgaaaagtatcagtccggaagtcactccctcatcccgtgttcctattctacattcattccatgatattgcttaggatgcatctcatgagtacggtgactttatatgtcataaggcttacacatcataccccgttagaaacaagaggaaatcgaggttgaacagaatgagttatatctacgaatgatatccgattcactatcgcagcgtaactctttaacttaaatctcaaggggccagaaaccaagaacgatctcgtacatcttgatcaccatacatatgaaatttcaaccccgtagaccaaa

SEQ ID NO: 1724 - DNA, 469 bp, Glycine max
  Clone ID: LIB3072-031-Q1-E1-A7
tggcttggaacctttgggctgatttatgtgcttgcatggagatgatagaaggggataccaaaaataaccaacaaagacgagcccgaagagtaatacggcggcgtcaaaggcgcgcccgccgtcctccccttccgcgggggccatagtcgtatgtacggaatcgagtcctcctaaaagcgactagctactaagccacgacgacgacgagcacctaaaattacgtcgcgactctcatacgcgtatatgtctaacgttcttctaacgtagtcgcgaagacaccaggtcgaacctacgttatctagaccgcaagagtcgcacgcgtatatgtctatagttaggatagcgctgccgctccgatattaatgatcctcgtcataaattccgtaagcttagagacgatcagaaaaatcaacagtctctctaaacggatgaagttttcccaagtcccgcccgccacgccaagggagat

SEQ ID NO: 1725 - DNA, 384 bp, Glycine max
  Clone ID: LIB3072-031-Q1-E1-A8
cggtcgtaacgacgtcctactccaatataatcatctttacggagagtaccgactatcgacgtcaagaaccactacggaccaccgtaccaaagtttgaacctaacatcgtcaaacgtccagagtctggatacaatgtagacctcggacgagaagtcctttatacccaatggcatcggatcgtacaactcaaccctcatacgcaaagcaatcacgtacgatagtaaaatgcgacgattacaggatcaaccatattccgaacacgttcacaacaataccactaaggcaactcaaggccgaaaaaatagacaaacgcctataaaccgtggctccagactaaaacggccagggcagacgccgtaatccgaaggaacgtccctcggccct

SEQ ID NO: 1726 - DNA, 485 bp, Glycine max
  Clone ID: LIB3072-031-Q1-E1-A9
tgggctgatttatgtgcttgcatggtcgtgagaagatgatagaaggggatagtaaaaataaccaacaaagacgagcccgaagagtaatacggcggcgtcaaaggcgcgcccgccgtcctccccttccgcgggggccatagtcgtatgtacggaatcgagtcctcctaaaagcgactagctactaagccacgacgacgacgagcacctaaaattacgtcgcgactctcgtacgcgtatatgtctaacgttcttctaacgtagtcgcgaagacaccaggtcgaacctacgttatctagaccgcaagagtcgcacgcgtatatgtctatagttaggatagcgctgccgctccgatattaatgatcctcgtcataaattccgtaagcttagagacgatcagaaaaatcaacagtctctctaaacggatgaagttttcccaggtcccgcccgccacgccaggggagataaacaaaataagaaacaaaagt

SEQ ID NO: 1727 - DNA, 474 bp, Glycine max
  unsure at all n locations
  Clone ID: LIB3072-031-Q1-E1-B1
ggaacctttgggctgatttatgtgcttgcatggtcgtgagaagatgataaaaggggatagtaaaaataaccaacaaagacgagcccgaagaataatacggcggcgtcaaaggcgcgcccgccgtcctccccttccgcgggggccatagtcgtatgtacggaatcgagtcctcctaaaagcgactagctactaagccacgacgacgacgagcacctaaaattacgtcgcgactctcgtacgcgtatatgtctaacgttcntctaacgtagtcgcgaagacaccaggtcgaacctacgttatctagaccgcaagagtcgcacgcgtatatgtctatagttaggatagcgctgccgctccgatattaatgatcctcgtcataaattccgtaagcttagagacgatcagaaaaatcaacagtctctctaaacggatgaagttttcccaggtcccgnccgccacgccaggggagataaa

SEQ ID NO: 1728 - DNA, 492 bp, Glycine max
  Clone ID: LIB3072-031-Q1-E1-B10
ggcttggaactttgggctgatttatgtgcttgcatggtcgtgagaagatgatagaaggggatattaatattaatatcaattccgcccctcctgcgcccatctcctctcctatagaagtgcaaaaataaaaggtccgatcagagaaagagagagagagagtcctgaactgaaatctagaagcagaaagaaatataaactataactgtcacggtcaggcatgattgagtaactattgcgcctcttttcgatggttactctccttaggctgagcatgtttctgaagttgcttgtaagggtaatgttgttgctggtgcttgtggtattgataacgccgcttctggtgctgagaagaaacttattgttaaatcttaagatcttaggctggcgaggaagacagcgaactcggatgattataccgtgtcggttcgtgtggggtcgaaggttgatgtatgtgcgtctacaaataaggtatgcgcggagcgttagagctat

SEQ ID NO: 1729 - DNA, 492 bp, Glycine max
  Clone ID: LIB3072-031-Q1-E1-B11
ggcttggaacctttgggctgatttatgtgcttgatggtcgtgagaagatgatagaagggggagacggagtaaacaaagtatagaatagccgaagcgaacggtacaaaaacgtacgccgtagagaaaggagagggcttagcggcgccgccttcgtatggtcctttcgagtctcggcatctacggtgttactagacctctctttctagtctttctggtcattgtgttgctgtctttgactcttgcggtcatggcgatattgaagtattattcctaactagtagtcataatcgtccttatacagcgggcgactctgccgtgtccaccgatctctcgggcgcttaataagcgccttccgcggtctacgatcggggagttactacaggccggcactcacgtacgccctgtttcgataaagccaaggttcacgctcgttctagcgctttctcttcttgtagagatttaaatactagaatggcggacggtacgtgcgtc

SEQ ID NO: 1730 - DNA, 444 bp, Glycine max
  Clone ID: LIB3072-031-Q1-E1-B12
ttgggctgatttatgtgcttgtttatgtgcttgcatggtcgtgagaagatgatcagagggcatggtcgtgagaagatgatagaggggggcattaaaaataaaatataagttaaaaaaaaaaaaaaaaaaaaaaaaaaaaagtggttgtctcagaggacttaagtccatgcatgtgcgtacgtgatgctacagtctcctcacagcgctattcaaacctaacctatcggttgctgccccataatgctgcgatcgggaaaatttcggtgccatttaatccaactgttccgtagtatactttttccctgttagtcggtgcaacagtgaagaggtttgtattgactgtttcctttaatagccgtgtagttcgaacggtgaacgggatgtgtttcgcagtggtgtaccaagtgtggtgggcgcggcggccatgtgtaatgcgattgtcat

SEQ ID NO: 1731 - DNA, 448 bp, Glycine max
  Clone ID: LIB3072-031-Q1-E1-B2
tggcttggaacctttgggctgatttatgtgcttgtttatgtgcttgcatggtcgtgagaagatgatagaaggggatgacgagctgacccgacaatcaagacaccgccacctgcgacaccgacttaacccgacactactgaaacttaacccacattaccgccgaaccaaccactgacgaaagacccactactctcacgggaccaaactttgaaccccccaccggaaacccaagagaaacaaaatacaacaaagaccacggaagcaaacacctccgtacccaccgtcatcgtatcgcccacctcagccttcatcgtccccccatccacaacccatgcaaaaatggcaagctaaagcgatcaaccctatcgaaactcgatcctcctacccccactaacgcaactaacgaccaaaaaaaacgaaaaaggcccctaacccccggttccagctt

SEQ ID NO: 1732 - DNA, 477 bp, Glycine max
  Clone ID: LIB3072-031-Q1-E1-B3
tggaacctttgggctgatttatgtgcttgcatggtcgtgagaagatgatagaagggaggagaggggagagaaaacgttaacaccagaagggggcagacggaaccagcgaatacatttgtctaaagtgatatttaaaccatatgtataattatattcccaaacctctttaaaaaaaaaaaaaaaaaaaaaaaaaaaaagtggttgtctcagaggacttaagtccatgcatgtgcgtacgtgatgctacagtctcctcacagcgctattcaaacctaacctatcggttgctgccccataatgctgcgatcgggaaaatttcggtgccatttaatccaactgttccgtagtatactttttccctgttagtcggtgcaacagtgaagaggtttgtattgactgtttcctttaatagccgtgtagttcgaacggtgaacgggatgtgtttcgcagtggtgtaccaagtgtggtggacgcggc

SEQ ID NO: 1733 - DNA, 452 bp, Glycine max
  Clone ID: LIB3072-031-Q1-E1-B4
ctttgggctgattagtgcttgctgggcgtgagaatagatagagggatgacaggagacataaaacgtttacaccagaaaggcgcacacggaaccatcgaatacatttgtctaaagtgatatttaaaccatatgtataattatattcccaaacctcattaaaagaaagaccaactactctcacaaaaactagatgtctcagaggacttaagtccatgcatatacgtacgttatactacagactcctcacagcgatattcaaacttaacactatcgattgcatgccccataatcatcctgatcgggaaaatttagctaccatttaatccaacttttccgtagtatacgttttccctgatagtcagtgcatcattcaacaggttcgaattgactgtatcactaaatagccctatagatcgaacgatcaacgggatctatttcgcaatggtgtacca

SEQ ID NO: 1734 - DNA, 498 bp, Glycine max
  Clone ID: LIB3072-031-Q1-E1-B5
tggcttggaacctttgggctgatttatgtgcttgcatggtcgtgagaagatgatagaagggcatggtcgtgagaagatgatagaagggggacaagcagaatcggcttaactgaaatcacgcacccgtttccctatcactcttgaagaaatacctctgacgcgggcaccgattacaccccagaccggacccagagtacagtcaccttccggcggcaagaaatgtccgcagttagcgcaagactagcctcaacgcaagaactagcctccaataccaaaacaccgtcccctcataaaaaataacaaaaaagaaaaaatcaaacaaatatatatcaataaataaaataaaaaaaaacaaaccgaaaataataatccacgacctaaaattccaaaaacataaagaagatcaggggaaatcaacagtctcaccaaacggaaaaaagttttctcaccacaaggcttttacccccaggttgatcccccgaatacgaaacccccccc

SEQ ID NO: 1735 - DNA, 495 bp, Glycine max
  Clone ID: LIB3072-031-Q1-E1-A4
ggcttggaacctttgggctgatttagtgcttgcatggtcgagaagatgatacgaggggaaggccgcctctacccttgaatataacacttgccgggcaaggcgaagaggaaaaaagagaaaaaagccgcgtagcgaggaatgtgaagatgtgagacagggaacaggtgatagcgtgcccggtcgtttttagtaactgaatcttccgcgtcatctgtattctacctctctctctcactgcactcataatcctaatcaatcaatccccacgaagttgaaggtgctagcgaactgatttttaatattagacgcggctgaaaacgctttcgaaagagaatttatgtcctaagagtctactaatactaagccgactgagatcggagagaacgagtgttctacggagtcgccgagggaaaggtccgccgaccgtggtcggaaggacgaaacggaaatctctcgtagagtcgccgcgaagaacaaagggagggacaacgccat

SEQ ID NO: 1736 - DNA, 488 bp, Glycine max
  unsure at all n locations
  Clone ID: LIB3072-030-Q1-E1-H2
ggaacctttgggctgatttatgtgcttgcatggtcgtgagaagatgatagaagggggcagtaaggtattccacttccttctactaatgataaaagcggtcgataatacagagaataatcctcgcgtcgataacgtattagaatcggcccttccgaattgactcgaggaggaaccctagttaatggctctcgttctccgagtacaattagcgcccgtcttgcctcacgccgcgcgacagcgcggaagatcacgagcacgaacgcagaactatagatatcgacgcaaccgcaccaggccacgaagctcgcaatcgcgccccacacgcaatacagtcatcaaattcgaaacggctcgcaatagcgcgatccgaaagcngcgcgtactcgcttatgctcaggaagcacgtcacngcgcccgactatctcacagcaaatcggcacctcggcacgagatcacgcggattatcggacactaacggggcgacgcct

SEQ ID NO: 1737 - DNA, 328 bp, Glycine max
  Clone ID: LIB3072-030-Q1-E1-H3
ggaacctttgggctgatttatgtgcttgcatggtcgtgaaagatgatagaaggggaagagcaacccacacagaaccgtctccatccagccagaacataaatcaaaaactgtagcaaaaaaaaaaaaaaaaaaaaaaaaaaaaaagtggttgtctcagaggacttaagtccatgcatgtgcgtacgtgatgctacagtctcctcacagcgctattcaaacctaacctatcggttgctgccccataatgctgcgatcgggaaaatttcggtgccatttaatccaactgttccgtagtatactttttccctgttagtcggtgcaacagtga

SEQ ID NO: 1738 - DNA, 434 bp, Glycine max
  unsure at all n locations
  Clone ID: LIB3072-030-Q1-E1-H4
aacctttgggctgatttatgtgcttgtttatgtgcttgtttatgtgcttgcatggccgtgagaagatgatagaaggggacctatatgaatcaatcaagaaagctccttacagttttttaaaaacgaagagtattactcctcccgtctctccctctccccgcgttcctattattctacattcattcctagttactgtcgaccctgcgtctgacaacgaagacaatttctccgaaaacggcggtatacaccacacttcgctagatacaatagtacccggcggaacaagagtagttttaatgggaaacgaaagacgtttctctatcgcggcgtaactctgtaacgagtctgataaagggaccggaataactactctgcttttacactgaacttgncccactgttgaaagttacttcccgagttccaagcctgaccta

SEQ ID NO: 1739 - DNA, 404 bp, Glycine max
  Clone ID: LIB3072-030-Q1-E1-H5
ttggcttggaacctttgggctgatttatgtgcttgtttatgtgcttgcatggtcgtcagaagatgatagaagggtcagtaccgtcgatgaaacatagaaccgaggtgccgttgatccctactacgcccaaggacggagaattccacgactgtcccgagggagtaccgatcgtagactagtctaccgaatgtacagaagttggttctaaggccaagtaacaatttcatcacaacgaagatataaagaagtccgctcaccggaacggctgactatacatacgacacgaccgatcggaactatccgccctaatactggctagatacccccgaagcgaccaacggactctaaaacgttaagacctaatttcaaaacacccaacccaaccagtagcgcgacccccacaa

SEQ ID NO: 1740 - DNA, 410 bp, Glycine max
  Clone ID: LIB3072-030-Q1-E1-H6
tgcttgcatggtcgtgagaagatgatagcagggaacaccgactacccccttaaaaaaggaaaaaggaaaaaaaaaaaaaagtggttgtctcagaggacttaagtccatgcatgtgcgtacgtgatgctacagtctcctcacagcgctattcaaacctaacctatcggttgctgccccataatgctgcgatcgggaaaatttcggtgccatttaatccaactgttccgtagtatactttttccctgttagtcggtgcaacagtgaagaggtttgtattgactgtttcctttaatagccgtgtagttcgaacggtgaacgggatgtgtttcgcagtggtgtaccaagtgtggtgggcgcggcggccatgtgtagtgcgattgtcatatccgttagtgtttcagtgtttgcct

SEQ ID NO: 1741 - DNA, 371 bp, Glycine max
  Clone ID: LIB3072-030-Q1-E1-H7
gcttggaaccgttggacggatttatgtgcttgcatggtcgtgagaagatgatagcaggggactctaaaaaataaaaactaacatggcagagagaatataagtataggactgaaagaagagcctccccccgagagagaccgggacggtcccgatgaagaagactatatcgaagagcctggatggtgaggttcctgaggcggaggaggtggcggtagcggagctttagatgactaagtatacgactgacgatcatcgtgttgatagtggaaccttctcctttaacgccattagtaagacctcggctaatgccactgagcaccgtaagaagtatgccgaggttaaccgtgtcgacgagaagtttagctaggacg

SEQ ID NO: 1742 - DNA, 414 bp, Glycine max
  unsure at all n locations
  Clone ID: LIB3072-030-Q1-E1-H8
tggctctggaacctttgggctgatttatgtgcctgcatgagtngcctgctggtcgtgcccaagatcctagaaggggatctctactatacgacctcagactaaccccggccaagagctgggaaaaagtaagccgataaaaaaacattagttacggtaattaccctcgactaattcagagggcttcatcttcacggaatcctacacggagtatttcacggaattatgcacgacattaatattagtaccaataatttattcctatgttaaatagtgaagcctacaatcgtcggtatcaccggtactatatctcagtcatcgctcgcaccgatttctataggtatcgctacatgccatactaccgtaattttctcctccgccactcctagctttacttccgcattcgtcatacgcgcg

SEQ ID NO: 1743 - DNA, 443 bp, Glycine max
  Clone ID: LIB3072-030-Q1-E1-H9
aacctttgggctgatttatgtgcgtgcatggtcgtgagaagatcatagaagggcatcgtcgtgagaagatgatagaagggcatggtggtgaggggatgatagaaggggggaccggaggaaaaaaggcgctactatttaagcaaagcattaagggggtcgcggaagtggccgggtgcccctcgttatgggagttacagaagtagtatacgtaacagtaataggagattccgccagttccctcgaataagaatctgcagatcgcgcggaagaaagtgaaggccgccataacggacggtatcactaactgcctgaacgggccccagaatacggcgggaccgttatcgacgacgaccacttccatagagtcaaagaaggcagacgtaaagttaacaagacataagataaggccataaccgatggacacgaaatctcaacaacgctag

SEQ ID NO: 1744 - DNA, 483 bp, Glycine max
  Clone ID: LIB3072-031-Q1-E1-A1
tggcttggaacctttgggctgatttatgtgcttgtttatgtgcttgtttatgtgcttgcatggtcgtgaaagatgatagaagggggttgaaaagcagcattaagacggtcctagccgcgcactcttctcccggtccttactctaccgccactacgttaagccttccatttgtaatcagcgaagcgcccgtaaaatagcacttacttatagaatttgcggaagaaaaatctatttaatcttatcctcacccttacaataatacaatgggggaatatttaatcgtcacgaaaatcgccccgttcttcaaggggcttacctacggccccggggtcatccatacgacggacgatttctcaatcgaaggattaagcttaatcctaaagtccgcgggaagactctagggaacacatgtcccggtcctataatacgagttcgggccgtctacggcgataaacccctctcctatcccgggtacccataacg

SEQ ID NO: 1745 - DNA, 493 bp, Glycine max
  Clone ID: LIB3072-031-Q1-E1-A10
tgcttcgaacctttgggctgatttatgtgcttgcatggtcgtgagaagatgatagaaggggatagtaaaaataaccaacaaagacgagcccgaagagtaatacggcggcgtcaaaggcgcgcccgccgtcctccccttccgcgggggccatagtcgtatgtacggaatcgagtcctcctaaaagcgactagctactaagccacgacgacgacgagcacctaaaattacgtcgcgactctcgtacgcgtatatgtctaacgttcttctaacgtagtcgcgaagacaccaggtcgaacctacgttatctagaccgcaagagtcgcacgcgtatatgtctatagttaggatagcgctgccgctccgatattaatgatcctcgtcataaattccgtaagcttagagacgatcagaaaaatcaacagtctctctaaacggatgaagttttcccaggtcccgcccgccacgccaggggagatatacaaaataagaaacc

SEQ ID NO: 1746 - DNA, 487 bp, Glycine max
  Clone ID: LIB3072-031-Q1-E1-A11
ctttgggctgatttatgtgcttgattatgtgcttgcatggtcgtgagaagatgatcagaaggggatagtaaaaataaccaacaaaggcgagcccgaagagtaatacggcggcgtcaaaggcgcgcccgccgtcctccccttccgcgggggccatagccgtatgtacggaatcgagtcctcctaaaagcgactagctactaagccacgacgacgacgagcacctaaaattacgtcgcgactctcgtacgcgtatatgtctaacgttcttctaacgtagtcgcgaagacaccaggtcgaacctacgttatctagaccgcaagagtcgcacgcgtatatgtctatagttaggatagcgctgccgctccgatattaatgatcctcgtcataaattccgtaagcttagagacgatcagaaaaatcaacagtctctctaaacggatgaagttttcccaggtcccgcccgccacgccaggggagataaacaaaa

SEQ ID NO: 1747 - DNA, 338 bp, Glycine max
  Clone ID: LIB3072-031-Q1-E1-A12
tgagaagatgatagaagggaatggtagtgagaagatgatagagtggggtagagagagggaaatgggtaaaaaaaaaaaagaaaaaaaaaaaaaaaaagtggtagaataagaggaattaagttaatgaatgtgagtaagttatgatagaatataagtaagagggatatttaaagataatatataggttgatgaagaataatgataaaatagggaaaatttagatgagatttaatgaaaaggttaagtaaaataatttataaaggatagaaggtataaaattaaaaaggtttgtattgaatgaataaagaaatggtagtataaatagaaaggtgaaagga

SEQ ID NO: 1748 - DNA, 491 bp, Glycine max
  Clone ID: LIB3072-031-Q1-E1-A2
tggaacctttgggctgatttatgtgcttgcattgagaagatgatagaaggggatagtaaacataaccaacaaagacgagcccgaagaataatacggcggcgtcaaaggcgcgcccgccgtcctccccttccgcgggggccatagtcgtatgtacggaatcgagtcctcctaaaagcgactagctactaagccacgacgacgacgagcacctaaaattacgtcgcgactctcgtacgcgtatatgtctaacgttcttctaacgtagtcgcgaagacaccaggtcgaacctacgttatctagaccgcaagagtcgcacgcgtatatgtctatagttaggatagcgctgccgctccgatattaatgatcctcgtcataaattccgtaagcttagagacgatcagaaaaatcaacagtctctctaaacggatgaagttttcccaggtcccgcccgccacgccaggggagataaaccaaataggaaacaaaagtct

SEQ ID NO: 1749 - DNA, 474 bp, Glycine max
  Clone ID: LIB3072-031-Q1-E1-A3
ggtttggaacctttgggctgatttatgtgcttgcatggtcgtgagatgatagaagggcatggtcgtgagaagatgatagaagggcatggtcgtgagaagatgatagaagggcatggtcgtgagaagatgatagaagggcatggtcgtgagaagatgatagaagggcatggtcgtgagaagatgatagaagggcatggtcgtgagaagatgatagaagggcatggtcgtgagaagatgatagaagggcatggtcgtgagaagatgatagaagggcatggtcgtgagaagatgatagaagggggataaaaaaaaaaaaaaaaaaaaaaaaaaaaaagtggttgtctcagaggacttaagtccatgcatgtgcgtacgtgatgctacagtctcctcacagcgctattcaaacctaacctatcggttgctgccccataatgctgcgatcgggaaaatttcggtgccatttaatccaac

SEQ ID NO: 1750 - DNA, 394 bp, Glycine max
  Clone ID: LIB3072-030-Q1-E1-H12
gcttgattatgtgcttggtgagcagatgatcagaaggggtagtcgtgaaaattcggcgtagtgcaagggccgcgaagtacggggagaagagttacggcgtatgccctccctcattgaaatcacgggaaaatgcctaagaagttctgctgctttcatgagaaggagtgcccggatgttgagccgaagtcggctggcgagcatgggtcctgtcgtaagagggagccacggacggcttagcatgtttcgagttgtacttgcaataatgttagaaattcaccgatttccgacgagaagaatttctgttgcactcctgagggcgaagtttcctcctgaagaacgccttgccatggatcttctgatgagatatacaataagtcggaccacgcgccggtct

SEQ ID NO: 1751 - DNA, 389 bp, Glycine max
  Clone ID: LIB3072-030-Q1-E1-G1
ctttgggctgatttatgtgcttgtttatgtgcttgcatggtcgtgagaagatcgtagaagggcatggtcgtgagaagatgatagaaggggatagtaaaaataaccaacaaagacgagcccgaagaataatacggcggcgtcaaaggcgcgcccgccgtcctccccttccgcgggggccatagtcgtatgtacggaatcgagtcctcctaaaagcgactagctactaagccatgacgacgacgagcacctaaaattacgtcgcgactctcgtacgcgtatatgtctaacgttcttctaacgtagtcgcgaagacaccaggtcgaacctacgttatctagaccgcaagagtcgcacgcgtatatgtctataattaggatagcgctgccgct

SEQ ID NO: 1752 - DNA, 375 bp, Glycine max
  Clone ID: LIB3072-030-Q1-E1-G10
ttgggctgatttatgtgcttgcatatgtgccagaagattcttgaagatgctctaaagcgaggacaaggtccccctcctagggtgccggctccgcaggaataatgcctcaatacctgtccctctatacatccatctcccctgcactactcacctcaaactagcctccgccgctagagatccacaaatctacagccctaagcgccttcggcgtctacaccggccctaacagaaagatcgcacaacgcaaggcactatcaaccgcaaactaattaaccttcgcgatacttaacgctataactacaccggatcgataggtcacataaacgaaaagcgtcccgggctactcagtaccaatccacatctgacaatcgctac

SEQ ID NO: 1753 - DNA, 421 bp, Glycine max
  Clone ID: LIB3072-030-Q1-E1-G11
ttgggctgattgatgtgcgtgtttatgtgcttgtgagaagatgatagaacgcggggatcaggcggaggagtcgagtgtggtggtcacgtatgttcaacataagtgaaaggaaaaggatcttgatttgtctgagattcatcgtaaggataacttggagattaccgagcgtaaaatccctgaagatcgagaaagtgtcctccatgcgtacgacgactcttatacgctcgctcgctaatcaaaatatcaccgtgccctacgacacactaaaccgcgaatacgtcacgcgccaacgccctcccaaagtacaacttacagttttccacgcccaactaaattaaaaccacgtttcagccccccccccccgcgaacgtcaaactaaaccaaggaaataaacactgaccgtgcgaaaacgcagactccc

SEQ ID NO: 1754 - DNA, 390 bp, Glycine max
  Clone ID: LIB3072-030-Q1-E1-G12
gcttgcatggtcgtgagaagatcctagacggggactgtagtactacataaagggccagggctaaaaatccaagcgtacctgccgcgccacgtccctccttctaaaattaaatacgctgaatatacgtggtaatcgtcatcgtctcgatacgatcagtcgtattaccggaaatagtcacggcgccaccgcagagatcgagaagagccatactgacatcgtcgctacggacgccttactagtcgaatacgaccggaagcgtacgcgcggtatcaatcgtatccgtatggatcgtattcgcggttaccaacgaacacgcacgaaaacgcaaccgttacgcgcccggtaacataaacacctaaacaacgcaactcccgcacgaacaaacgcgcg

SEQ ID NO: 1755 - DNA, 400 bp, Glycine max
  Clone ID: LIB3072-030-Q1-E1-G2
ctttgggctgatttatgtgcttgcatggtcgtgagaagatgatagaagggccccccgggaaccaccgtctttactgttaccgggcctaccgctggtgtcaataccccgccgggcggggttcctctcggagtggttacgaattttgtcgcgatacccgggttcgtcgctgcgagtcggattcggattaattatcggactcatcgggttgggttctctactggcggcggaactgtcggttccgcccatgaggccgctcccactagttatatttatgagtagtcctttattatcgatcatcagagggggggaaacgaaaacaaaaaaaaaaaaccgcgcaccaccgaaccctctcggaactcctcctcgcgcacggccccttccttccgcgcccctccttcca

SEQ ID NO: 1756 - DNA, 359 bp, Glycine max
  Clone ID: LIB3072-030-Q1-E1-G3
ggaacctttgggctgatttatgtgcttgtttatgtgcttgcatggtcgtgagaagatgatagaagggcctaaaaaaaaataaaaaagagaaaaaggaaaaaaaaaaaaaagtggttgtctcagaggacttaagtccatgcatgtgcgtacgtgatgctacagtctcctcacagcgctattcaaacctaacctatcggttgctgccccataatgctgcgatcgggaaaatttcggtgccatttaatccaactgttccgtagtatactttttccctgttagtcggtgcaacagtgaagaggtttgtattgactgtttcctttaatagccgtgtagttcgaacggtgaacgggatgtgtttc

SEQ ID NO: 1757 - DNA, 404 bp, Glycine max
  Clone ID: LIB3072-030-Q1-E1-G4
tggcttggaacctttgggctgatttatgtgcttgcatggtcgagaagatgatagaaggggatagtaaaaataaccaacaaagacgagcccgaagaataatacggcggcgtcaaaggcgcgcccgccgtcctccccatccgcgggggccatagtcgtatgtacggaatcgagtcctcctaaaagcgactagctactaagccacgacgacgacgagcacctaaaattacgtcgcgactctcgtacgcgtatatgtctaacgttcatctaacgtagtcgcgaagacaccaggtcgaacctacgttatctagaccgcaagagtcgcacgcgtatatgtctatagttaggatagcgctgacgctccgatattaatgatcctcgtcataaattcccgtagcttagagacg

SEQ ID NO: 1758 - DNA, 456 bp, Glycine max
  Clone ID: LIB3072-030-Q1-E1-G5
tggcttggaacctttgggctgatttatgtgcttgcatggtcgtgagaagatgatagatggggatgcccaaatggagcctcaaaccggtggtgagccctttctctctgaactcgtgatattgatgaactctatcaagtggaatcctgtacctagaaaacggtcccaggcggaatagtctttttgagaggaagcgtagtagtcatcgttagtacgaggagaaggagaataattggcggcgtggttctcggaggagtagtcggaatcacgtcttgaccccatatcgacgacgttttcggatctaagactcttttaaacgcggtctccgcaacgagtaccggtcccacagtacccgtcgttacatcctacgcgacgggtaagtcgcatctcgcgtgtatggaggtccatgagacagactatgacgccatgcgtatacccggacccctaacatatagctct

SEQ ID NO: 1759 - DNA, 373 bp, Glycine max
  Clone ID: LIB3072-030-Q1-E1-G6
tggcttggaacctttgggctgatttatgtgcttgcatggtcgtgagcagatgatagcagggggtcttacctcgtataacctctctcgactactggcgccaccattctcccttaaagcttaaacccctcagccttattaaattaaattaaattaaaacggtagtagttctagttctacttacgacactaatattagttccactcttaattacttaaaagtattactacccgaagttacttaatgcgcgtccttaaggctccagattttctgtaaggcctattaaagttctactaattaaagcgagtattattattaaaagggccaccttaaagggcggcgccagagtcgaatctaatctagtttccgcgacaag

SEQ ID NO: 1760 - DNA, 295 bp, Glycine max
  Clone ID: LIB3072-030-Q1-E1-G7
gcttggaccgttggctgattatgtgctgctggtcggagaagtgatacaggggtagtaaaaataacctacaaagacgagcccgaggaataatacggcggcgtcaaaggcgcgcacgccgtcctccccttccgcgggggccatagtcgtatgtacggaatcgagtcctcctaaaagcgactagctactaagccacgacgacgacgaacccctaaaattacgtcgcgactcacgtacgcgtatatgtctaacgttcctccaacgttagccggaagaccccaggtcggacctacgttaa

SEQ ID NO: 1761 - DNA, 435 bp, Glycine max
  Clone ID: LIB3072-030-Q1-E1-G8
tggcttggaacctttgggctgatttatgtgcttgtttatgtgcttgtttatgtgcctgcatggtcgtgagaagatgatagaaggggataagtccctccccggacgcgataacggccctccgcgggacgcgactaacttagaacttagcgaattgtaattagaagacggggcgctcagagaaaacgtcctcgaggtcccggacgtcgagatcaggctaagcattttcaatgttatcaactagtaaacggataagtgcacgagtcttttgaggacgtttaacctcaaatgaccgaaggaacgaaaaagccttaagacaaataagacccattaccagcgtagttagtaatcggagaaccggttactcgaacctccggaatggtacaccactaccccacatgcaaaaggcaccgacgcaacctctgcgcaacactctcg

SEQ ID NO: 1762 - DNA, 395 bp, Glycine max
  Clone ID: LIB3072-030-Q1-E1-G9
aacccttgggctgatgtatgtgcgtgatggtcgtgagaagatgatagaagggcatggtcgtgacaagatgatagaagggcatggtggtgagagcatgatagaagggcgtggtcgtgagaagatgatagaagggcatggtcgtgagaagatgatagaaggggcaccgagacaagtccaaagaacacctaacaaaaccacccaaaaaaaaaaaaaaaaaaaaaaaaaaaaaagtggttgtctcagaggacttaagtccatgcatgtgcgtacgtgatgctacagtctcctcacagcgctattcaaacctaacctatcggttgctgccccataatgctgcgatcgggaaaatttcggtgccatttaatccaactgttccgtagtatacattttccctg

SEQ ID NO: 1763 - DNA, 458 bp, Glycine max
  Clone ID: LIB3072-030-Q1-E1-H1
tttgggctgatttatgtgcttgcatggtcgtgagaagatgatagaaggggactctacgctctacttttatatcagagagaatgcagaaattacaaattaccttatattcctataaatatataaatctaaagaaatatatatatacagagcgagatagagagagaggtacggggaactataggcccaagccactagacacgaccttaaacgtccggccccataagtcgagggatacgggcaaaggaagagacctaagaaagtaaaatataatatttctcaggaaaaagaagtaaatcctatttttcctaattatatacctactaacatgaaattaattttattaataaaataataataattttagaaaacttcatcaccctataagagattctaaaactctatttccaaaatattttaaaatcacccttttcttcagaaaactaattaattaagaattt

SEQ ID NO: 1764 - DNA, 273 bp, Glycine max
  Clone ID: LIB3072-030-Q1-E1-H10
aacctcttgggctgatttatgtgcttgcatggtcgtgagaagatgatagaagggtaccgacgacacaaattaatagaagggcatggagcgacggaaaaaactggatgtcgcaaaggacttaaatccatccatatgcgtacgtcatactacaaactcctcacagcgctattcaaacctaacctatcggttgcagtcccataatgctcagatctaacaaatttcggtgacacttacaccaactgctccgtagaatactctttcccagttaatcaa

SEQ ID NO: 1765 - DNA, 483 bp, Glycine max
  Clone ID: LIB3072-030-Q1-E1-H11
aacctttgggctgattgatgtgcttgatggtcgtgagaagatgatagaagggcatcgtcgtagaagatgatagaaggggaactaaggaactgggaactagagttactgatgatcgtaacggctcgtgagaagcgcgagaagaaaccactgaaggcgacagcattagataagcggaaagaaggggttagtaacatcattgagggcggcggttgtaagactaatgagaataagtcctctcttaagaaaaatagacggattttccatggaaatatcaagcgtattacccgtaagtagtaagcgtattagaacgtcaagcatcgttatattcgcgtccatctcaaaggagcccgcgtaacgcgcggtaagtaagcctccgacattaagccccataagtaaagtaacgcgcaacggacatctgcgccgcaccgcgcgttgcgctcctccccagacgtacggcaataccggtccctcccttacccgctc

SEQ ID NO: 1766 - DNA, 453 bp, Glycine max
  Clone ID: LIB3072-030-Q1-E1-F9
aacccttgggctgatgtatgtgcgtgtttatgtgcttgcatggtcgtgagaagatcatagaccggggaattagggatattagataagaatagggaaggcttattaatcgagttggcgatggagccctattatatcttaactataccttgttatgctatttatttccttctcgtttctcttttatgcgctgatggctattgctaatctatttctccttgctcaatgaaattttaaaaaaggccttaagataaccccttttgcaacccgccccaaaaacaaaaattaaaaaaaaaaaaacacaaacaaaaaaaaaagtggttgtctcagaggacttaagtccatgcatgtgcgtacgtgatgctacagtctcctcacagcgctattcaaacctaacctatcggttgctgccccataatgctgcgatcgggaaaatttcggtgccatttaatccaa

SEQ ID NO: 1767 - DNA, 376 bp, Glycine max
  Clone ID: LIB3072-030-Q1-E1-E4
cttggaccttggctgtttagtgcttgcatggcgtgagaagatgatagagggggctagtaaaaataaccaacaaagacgagcccgaagaataatacggcggcgtcaaaggcgcgcccgccgtcctccccttccgcgggggccatagtcgtatgtacggaatcgagtcctcctaaaagcgactagctactaagccacgacgacgacgagcacctaaaattacgtcgcgactctcgtacgcgtatatgtctaacgttcgtctaacgtagtcgcgaagacaccaggtcgaacctacgttatctagaccgcaagagtcgcacgcgtatatgtctatagttaggatagcgctgccgctccgatattaatgatcctcgtcata

SEQ ID NO: 1768 - DNA, 396 bp, Glycine max
  Clone ID: LIB3072-030-Q1-E1-E5
tggcttggaacctttgggctgatttatgtgcgtgcatggtcgtggcaagatgatatcaccgggactccaaccctaaactacaaaacctgcttattaagccacgggcccttccgcgccgtcctcccctctttctccaggctctctcctcagccttagtacactaatctactgccttacaccggattccgattcaattaagcccattatatagaaataggtgctcctatcgccttaatcacggaagagcgagtacggatgcgctcattacaattatgaacaagaggtaaagagatccgagacccctaagaacaatctgaatcacactaaggatacgaacgtacatagaaaactattttacctctactggctaggaccgaatatgcacgtcgatactat

SEQ ID NO: 1769 - DNA, 428 bp, Glycine max
  unsure at all n locations
  Clone ID: LIB3072-030-Q1-E1-E6
tggcttggaacctttgggctgatttatgtgcttgtttatgtgcttgcatggtcgtccagaagatgatagaagggggcatgtagtcctgctttcaatgtgcgtacagtagagctagagatagagatgtagttacggggtggagattcgtgaggcgccacaggtaaaccaagaataagttacattttaagctatgccctcgttgcggcgccttcgactttaagactaggacccacgacgccggcacgaagaagaagggcgccgacgagcccttccctcgcgcttactcggccagccgggagaaggaaaacgccctaagcgaggtttcggaagtcgtctgtaccgtccgtaataagcatacggttaaacccgtcggaaaggacgtcccttatccgagagctanggcgtatttaccttacgcctccaggact

SEQ ID NO: 1770 - DNA, 371 bp, Glycine max
  unsure at all n locations
  Clone ID: LIB3072-030-Q1-E1-E7
gctgatttatgtgcgtgattacgtgcctgcatggtcgagagaagatcatagaaggggacctctaacctaacctcgccgacttccggtcctttaaagaaggagaaaacaaaaagtaacgggcagttccgaagtggaaagaataatagcaggaccggtagtaagagatttcctaaggacctctcttttacatattcataactcaagaaatataggtttcgacgacgcccatacaaaagcctgtcatcgcggaacccgttacctcgactcttattagaccaaaaacgactccggtacgcttaatcactttacggcttctaggatacgaagcggccgtcgaggcatcggatgcggngctagatgccagtaggcct

SEQ ID NO: 1771 - DNA, 434 bp, Glycine max
  Clone ID: LIB3072-030-Q1-E1-E8
ggctctggaacctttgggctgatttatgtgcttgtttatgtgcttccatggtcgtccagaagatgatagaagggggagagagagaaaggaaagcggcggtaacggtaatgacggaagagaccttataaagtttagaagtgaagccggggacgtgagcggaggactcccgggatgcctaggacgtatagccgagcctttattgagaagtctaatgtccgccccgaaagtactttcgctctcgtccccttcccggacttcctaaatatagaaaccgagaccaaactagatgttatttcagtagacgtcgccaagacaccggtaggatataatgcccctagtgtgttcgcggcggacgccgaggtgttcgaagatgtcagccggaccgatagacatactggaaccgccgagcccgtcggaaccgccgcacggacccc

SEQ ID NO: 1772 - DNA, 443 bp, Glycine max
  Clone ID: LIB3072-030-Q1-E1-E9
aacctttgggctgactgtatgtgcttgtcgtgagaagatgatagcaggggatagtccaaataaccaacaaagacgagcccgaagaatggtacggcggcgtcaaaggcgcgcccggcgtcctccccttccgcgggggccatagtcgtatgtacggaatcgagtcctcctaaaagcgactagctactaagccacgacgacgacgagcacctaaaattacgtcgcgactctcgtacgcgtatatgtctaacgttcctctaacgtactcgcgaagacaccaggtcgaacctacgttatctacatcgcaagagtcgcacgcgtatatgtctatagttaggatagcgctcccgctccgatattaatgatccccgtcctaaattccgtaagcctagagacgatcagaacaatcaaccctctctctaaaccgattaactttctccaagtcc

SEQ ID NO: 1773 - DNA, 331 bp, Glycine max
  Clone ID: LIB3072-030-Q1-E1-F1
tggcttggaacctttgggctgatttatgtgcttgcatggtcgtgaggatgatagaaggggatctactgccctcgcccctctcctccttcatacgtctctcagaaaagaaaagaaaggaaaaaaaaaaaaaaaaaaaaaaaaaaaaaagtggttgtctcagaggacttaagtccatgcatgtgcgtacgtgatgctacagtctcctcacagcgctattcaaacctaacctatcggttgctgccccataatgctgcgatcgggaaaatttcggtgccatttaatccaactgttccgtagtatactttttccctgttagtcggtgcaacagtga

SEQ ID NO: 1774 - DNA, 267 bp, Glycine max
  Clone ID: LIB3072-030-Q1-E1-F10
aaagactcttgaactaactaaacctccctatcccaatataacccttaaaaccttcctctcccgaccacggatcccgtaagtcgaattcggcgccccagtctaaatctctattatagttacctaatccggacataggtacaccgatcgcctcagcgtgcacaagaactaagtacaaaccgtcctcgtctccaaaaagtcccccgacgaccgcgcggcgaactccgacgatccacgcactatccctaaatctccacgcctaaactacct

SEQ ID NO: 1775 - DNA, 470 bp, Glycine max
  Clone ID: LIB3072-030-Q1-E1-F12
ggaactttgggctgatttatgtgcttgtttatgtgcttgcattcgtgagaagatgatagaaggggaataatacccgcctcagataagactctgtgcactcgcctttaaaagtccggccgcaagaacggtccttggcgaatagaaacctttcttctaataataataaatatagttcgggaaggagtacgtcacgatcttagcattttaacctatcagtttcgatcataagttcctaaacaaatcctaagggaagaccgtaccagctatcgggggcgacctcgggaccggatgagtggcgcgcaatccgcccgttccagaaggcgtcattgcggttcctatgcacgcgaaggggtacgaggataaggatgtgagggatataccggaaacgactaagagagtaaagatcctggacgttaaggacttaacggtaacagtactcgacccgggccatgacgagaatcgtaagaagg

SEQ ID NO: 1776 - DNA, 365 bp, Glycine max
  Clone ID: LIB3072-030-Q1-E1-F2
tggtctgatttatgtgcttgcatggtcgtcaggatcataaagagggatccactgccctcgaccctctcctccttcatacgtctctcagaaaagaaaagaaaggaaaagaaaaaaatatacaaaaaaaaaaaaagtggttgtctcagaggacttaagtccatgcatgtgcgtacgtgaagctacaaactcctcacagtgctattcaaacctaacctatcggttgatgccccataatgcttcgatcgggaaaatttcggtgccatttaatccaactgttccgtagtatacatttaccctgatagtcggtgcaacactgaataggttctaattgaatgtttcctttaatagccgtgtaattcgaacgg

SEQ ID NO: 1777 - DNA, 390 bp, Glycine max
  unsure at all n locations
  Clone ID: LIB3072-030-Q1-E1-F3
ggaacctttgggctgatttatgtgcttgtttatgtgcttgcatggtcgtgagaagatcatagaagggcatggtcgtgagaagatgatggaagggcatggtcgtgagaagatgatagaagggcatggtcgtgagaagatgatagaagggcatggtcgtgagaagatgatagaagggcatggtcgtgagaagatgatagaagggcatggtcgtgagaagatgatagaagggcatggtcgtgagaagatgatagaagggcatggtcgtgagaagatgatagaagggcatggtcgtgagaagatgatagaagggcatggtcgtgagaagatgatagaaggggatagtanaaataaccaacaaagacgagcccgaagaataatacggcggcgtca

SEQ ID NO: 1778 - DNA, 416 bp, Glycine max
  unsure at all n locations
  Clone ID: LIB3072-030-Q1-E1-F4
gaacctttgggctgatttatgtgcttgcatggtcgtgagaagatgatagaaggggatagtaaaaataaccaacaaagacgagcccgagagaataatacggcggcgtcaaaggcgcgcccgccgtcctccccttccgcgggggccatagtcgtatgtacggaatcgagtcctcctaaaagcgactagctactaagccacgacgacgacgagcacctaaaattacgtcgcgactctcgtacgcgtatatgtataacgttcttctaacgtagtcgcgaagacaccaggtcgaacctacgttatctagaccgcaagagtcgcacgcgtatatgtctatagttaggatagcgctgccgctccgatattaatgatcctcgtcatanattccgtaagcttagagacgatcagaanaatcaaca

SEQ ID NO: 1779 - DNA, 446 bp, Glycine max
  Clone ID: LIB3072-030-Q1-E1-F5
tggctctggaaccgttgggctgatttatgtgcttgcatggtcgtgagaagatgatcgcagggcatggtcgtgagaagatgatagaagggcatgggcgtgagaagatgatgagagggcatggtcgtgagaagatgatagaagggcatggtcgtgagaagatgatagaagggcatggccgtgagaagatgatagaagggcatggtcgtgagaagatgatagaagggcatggtcgtgacaagatgatagaaggggatagtatagataaccaacaaagacgagcccgaagaataatacggcggcgtcaaaggcgcgtccgccgtcctccccgtccgcgggggccatagtcgcatgtacggaatcgagtcctccaaaaagcgactagctactaaggcacgacgacgacgagcacctaaaattacgtcgcgactctcgtacgcgtatatatg

SEQ ID NO: 1780 - DNA, 414 bp, Glycine max
  Clone ID: LIB3072-030-Q1-E1-F6
tggcttggaacctttgggctgatttatgtgcttgcatggtctgagaagatgatagaaggggactacaagaagaagaagaaaagtaagcaaaaaggccctaagccccaatttacccgccccgtcccactccccctatcccctagacttccccctctctaacctcgagtagaaaatccacacttccgctcgaggccaatcccccctactggcaacttttctttctttcatggactgcgctcccctccctttctaccataccttcccaaagcctaaattatcttcttaattgtatttccccctccgcaggatataatagataataattagagtaagaagaattagcccccgcccgcgcgctcaccctagtcgttaaacacggacaggagtgggtaaacattagtgcccgggaatcgg

SEQ ID NO: 1781 - DNA, 381 bp, Glycine max
  Clone ID: LIB3072-030-Q1-E1-F7
ttggcttggaacctttgggctgatttatgtgcttgcatggtcgtgacgagatgattcatggggatatattcaatcaagaaagatcctgacagttgtttaaaaacgaagagtattactcctcccgtctctccctctccccgcgttcctattattctacattcattcctagttactgtcgaccctgcgtctgacaacgaaggctatttctccgaaaacggcggtatacaccacactccgctagatacaatagtacccggtggaactcgagtagttttaatgggaaacgatcgacctttcaccatcggggcgtaactctgtaacgagtctgatcaagggactggaataactactctgcgtttacactgaacttgatacactggt

SEQ ID NO: 1782 - DNA, 396 bp, Glycine max
  Clone ID: LIB3072-030-Q1-E1-F8
gggacgtactcgcacaaccaagaaacggtgctagtacagtagttcaagaaaacgaagagtatcagtccgcctgtcactggctcatcacgtgttcctattctacattcattccctgataatgcttaggatgcgtctgatgcggacggtgacgtgacctggaatggccctacacatcatgccccgttggtaacaagaggaaatggcggtggaacagaatgagttgtatctgggaaagatatccgtttcactatcgtagcgtaactctttaacttaaatctcaaggggccagaaaccaagcccgaactcgtacatttcgctcaccatacagatgaaatttcaaccccgtaaacaaagcctagccatttatagtagcgcgaaagaaccaacttccggcgg

SEQ ID NO: 1783 - DNA, 353 bp, Glycine max
  unsure at all n locations
  Clone ID: LIB3072-030-Q1-E1-E3
ggttggaacctttgggctgattagtgctgttattgctgcatgcgtagagatatgaaggggactctaactacctcgcgtacttccggcccttaaaaaaagaagaaaacaaaagtaacgggcagttccgaaagtggaagaataatagcaggaccggtagtaagagatttcctaaggacctctcttttacatattcataactcaagaaatataggtttcgacgacgcccatacaaaagcctgtcatcgcggaacccgttacctcgactcttattagaccaaaaacgactccggtacgcttaatcactttacggctttaggatacgaagcggccggcgaggcatcggangcggggct

SEQ ID NO: 1784 - DNA, 413 bp, Glycine max
  Clone ID: LIB3072-030-Q1-E1-D1
ctttgggctgatttatgtgcttgcatggtcgtgagaagatgatagaaggggatagtaaaaataaccaacaaagacgagcccgaggaataatacggcggcgtcaaaggcgcgcccgccgtcctccccttccgcgggggccatagtcgtatgtacggaatcgagtcctcctaaaagcgactagctactaagccacgacgacgacgagcacctaaaattacgtcgcgactctcgtacgcgtatatgtctaacgttcttctaacgtagtcgcgaagacaccaggtcgaacctacgttatctagaccgcaagagtcgcacgcgtatatgtctatagttaggatagcgctgccgctccgatattaatgatcctcgtcataaattccgtaagcttagagacgatcagaaaaatcaacagt

SEQ ID NO: 1785 - DNA, 448 bp, Glycine max
  Clone ID: LIB3072-030-Q1-E1-D10
ttgggctgatttatgtgcttgatggtcgtgagaagatgtagaagggggaggctcggttgggccaaaaagaacagtagtggggttatcggggtagaggaggaggaggaggaggaagaagactaataatatactattaaataattccacggagacccgggttaatacgccccccttttctaagtgcgctcggtccctctctctcgtctgttctaagttccgtaaaaatggagtagggtcgtctaagtcctaggacgacgcatagatccgcggacactaagacgcataagcgacgcgggaaacgtcatagagaattgaaggcgaagccacagaaaattattacaagtgtaagtagccctttcctcggaggactcccgcacggcttaattacatctaactcgtaaactatgtcctaagccaaaattagatataagccctaagcccataaaca

SEQ ID NO: 1786 - DNA, 373 bp, Glycine max
  Clone ID: LIB3072-030-Q1-E1-D12
tgggctgatgtatgtgcctgctgagaagatgatagacggggatagttaacctaacccacaaagacgagcccgaagaatagtgcggcggcgtcaaaggagcgggcgtcgtcctccccatccgcggcggccctagtcgtatctacggaattgactcctcctaaaagcgactagctactaagctacgacgacgacgagcacctacaattatgtcgcgactctcgtacgcctatatgtctaacgttcctccaacgtagtcgcgaagacaccaggtcgaacccacgttatccacaccgcaagagtcggacgcgtatatatccatacttagtatagcgctgccgcaccgatattcatgatcaccgtcatcaattcccca

SEQ ID NO: 1787 - DNA, 373 bp, Glycine max
  Clone ID: LIB3072-030-Q1-E1-D2
tggcttggaacctttgggctgatttatgtgcttgatggtcgtgagaagatgatagaaggggatagtaaaaataaccaacaaagacgagcccgaagaataatacggcggcgtcaaaggcgcgcccgccgtcctccccttccgcgggggccatagtcgtatgtacggaatcgagtcctcctaaaagcgactagctactaagccacgacgaccacgagcacctaaaattacgtcgcgactctcgtacgcgtatatgtctaacgttcttctaacgtagtcgcgaagacaccaggtcgaacctacgttatctagaccgcaagagtcgcacgcgtatatgtctatagttaggatagcgctgccgctccgatattaatga

SEQ ID NO: 1788 - DNA, 397 bp, Glycine max
  unsure at all n locations
  Clone ID: LIB3072-030-Q1-E1-D3
tggcttggaacctttgggctgatttatgtgcttgtttatgtgcttgcatggtcggtgagagatcataagaagggcatgggtcggtgagaagatgatggaagggcatggtcgtgagaagatgatagaagggcatggtcgtgagaagatgatagaagggcatggtcgtgagaagatgatagaagggcatggtcgtgagaagaatgatagagggtaaaaaaacgcagcctaaanaaaacnnnnacncncaaaaaaaaaaagtggttgtctcagaggacttaagtccatgcatgtgcgtacgtgatgctacagtctcctcacagcgctaattcaaacctaacctatcggttgctgccccataatgctgcgatcgggaaaatttcggtgccatttaatccaa

SEQ ID NO: 1789 - DNA, 382 bp, Glycine max
  unsure at all n locations
  Clone ID: LIB3072-030-Q1-E1-D4
tggcttggaacctttgggctgatttatgtgcttgtttatgtgcttgcatggtcgtgagaagatcatagaaggggatagtaaaaataaccaacagagacgagcccgaagaataatacggcggcgtcaaaggcgcgcccgccgtcctccccttccgcgggggccatagtcgtatgtacggaatcgagtcctcctaaaagcgactagctactaagccacgacgacgacgagcacctaaaattacgtcgcgactctcgtacgcgtatatgtctaacgttcntctaacgtagtcgcgaagacaccaggtcgaacctacgttatctagaccgcaagagtcgcacgcgtatatgtctatagttaggatagcgctggcgttccgatatta

SEQ ID NO: 1790 - DNA, 389 bp, Glycine max
  Clone ID: LIB3072-030-Q1-E1-D5
tggcttggaacctttgggctgatttatgtgcttgcatggtcgtgagaagatgatagcagggcatggtcgtgagaagatgatagaaggggatagtaaaaataaccaacaaagacgagcccgaagaataatacggcggcgtcaaaggcgcgcccgccgtcctccccttccgcgggggccatagtcgtatgtacggaatcgagtcctcctaaaagcgactagctactaagccacgacgacgacgagcacctaaaattacgtcgcgactctagtacgcgtatatgtctaacgttcctctaacgtagtcgcgaagacaccaggtcgaacctacgttatctagaccgcaagagtcgcacgcgtatatgtctatagctaggatagcgctgccgctc

SEQ ID NO: 1791 - DNA, 360 bp, Glycine max
  Clone ID: LIB3072-030-Q1-E1-D6
cttggcttggaacctttgggctgatttatgtgcttgcatggccgtgagcaagatgatagaaggggacctatataatcaatcaagaaagcggcttacagttttttaaaaacgaagagtattactcctcccgtctctccctctccccgtgttcctattattctacattcattcctagttactgtcgaccctgcgtctgacaacgaaggcaatttctccgaaaacggcggtatacaccacactccgctagatacaatagtacctggcggaacaagagtagttttaatgggaaacgaaagacgtttcactatcgcggcgtaactctgtaacgagtctgataaaggggcccggaattactacccg

SEQ ID NO: 1792 - DNA, 400 bp, Glycine max
  Clone ID: LIB3072-030-Q1-E1-D7
tggcttggaacctttgggctgatttatgtgcttgccgtgagaagatgatagaaggcgcatggtcgtgagaagatgatagaagggcatggtcgtgagaagatgatagaagggcatggtcgtgagaagatgatagaagggcatggacgtgagaagatgatagaaggggataaaaaggaatccaacaccaacccacgaacaaaatcaaaaaaaaacgaacaaaacaagacaaaatttcttaaaaaaaaaaaataaaattacctagagaaagtggttgtctcagaggacttaagtccatgcatgtgcgtacgtgatgctacagtctcctcacagcgctattcaaacctaaccaatcggttgatgccccataatgctgcgatcgggaaaatttcggtgccattta

SEQ ID NO: 1793 - DNA, 298 bp, Glycine max
  Clone ID: LIB3072-030-Q1-E1-D8
aaccgttgggctgatttatgtgcttgtttatgtgcttcgctatgtgcccccatgtcgtgagaagatgatagacgggttgggtcgggagaagatgatagaggggcatggtcgtcagaagatgatagacgggcatggtcgtcagaagatgatagaagggcatcgtcgtcagatccatgctagaagggcatggtcgccagaagatgatagataggcatcgccgtgagaagatcatagatggccatgcgtcgtcgagaagcatgatagaagggcatagtcgtcacaagatcatagcggggca

SEQ ID NO: 1794 - DNA, 458 bp, Glycine max
  Clone ID: LIB3072-030-Q1-E1-D9
tggaacctttgggctgatttatgtgcttgatggtcgtgagaagatgtagaagggggaggctcggttgggccaaaaagaacagtagtggcgttatcggggtagaggaggaggaggaggaggaagaagactaataatatactattaaataattccacggagacccgggttaatacgccccccttttctaggtgcgctcggtccctctctctcgtctgttctaagttctgtaaaaatggagtagggtcgtctaagtcctaggacgacgcatagatccgcggacactaagacgcataagcgacgcgggaaacgtcatagagaattgaaggcgaagccacagaaaattattacaagtgtaagtagccctttcctcggaggactcccgcacggcttaattacatctaactcgtaaactatgtcctaagccaaaattagatataagccccaagcccataaacaaa

SEQ ID NO: 1795 - DNA, 409 bp, Glycine max
  Clone ID: LIB3072-030-Q1-E1-E1
ggctcggaacctttgggctgatttatgtgcttgtttatgtgcttgctggtcgtgagaagatcatagaagggcatggtcgtgagaagatgatagaagggcatggtcgtgagaagatgatagaagggcatggtcgtgagaagatgatagaagggcatggtcgtgagaagatgatagaagggcatggtcgtgagaagatgatagaagggcatggtcgtgagaagatgatagaagggcatggtcgtgagaagatgatagaagggcatggtcgtgagaagatgatagaagggggaagaaaaggcggcgtaaggcaaaattcccgcgttcccaaacttctaacgcttaagctccgtaaagggccggttacggagtcagctaagcgctctagcgaactcgaacggggccaaggcga

SEQ ID NO: 1796 - DNA, 470 bp, Glycine max
  unsure at all n locations
  Clone ID: LIB3072-030-Q1-E1-E10
tggaacctttgggctgatgtatgtgcttgtttatgtgcttgtttatgtgcttgcatggtcgtgagaagatgatagaaggggacattacggaanaagtataaagagaagtaccagtatcaggagtagtaataatcagctctagtcgaaacggttctcctagcgacggtactcgcggtttctaaattcgttttccctatcgccgagaagcttctagcgagaggttcctttctctctctaaggaatctcctcctacctagagccgcggttagcggtaagaagactaagatcgataaattccacggaaccaacggcggtacggtcccgagggacggaatcgacgtactcggtaggaaaggaaagggaaagggcgcccattagcccgcagataaacatggcgtcaacgctgacggccatagcttcactcatgatattaaggatcggctcttaattggcgacgctcatgtcggtgg

SEQ ID NO: 1797 - DNA, 440 bp, Glycine max
  Clone ID: LIB3072-030-Q1-E1-E11
tgggctgatttatgtgcgtgcatggtcggagaagatgatagaaggggaatgacaataccaataatatgagatcatcctcagagaagaagtcgagcgtcttatgtgaggaagaagagaaaaccagtaaaggaaaaaaagaaaaaagagaaagaaggagagagtgagtagaacaaggcgctctctccggatcgacctgttctaactgtactctcacctctcatcatctacctacccccacacattctctccttcctctctctttatttctaatatacaaaaaaaaaaaaaaaaaaaaaaaaaaagtggttgtctcagaggacttaagtccatgcatgtgcgtacgtgatgctacagtctcctcacagcgctattcaaacctaacctatcggttgctgccccataatgctgcgatcgggaaaatttcggtgccatttaatcca

SEQ ID NO: 1798 - DNA, 412 bp, Glycine max
  Clone ID: LIB3072-030-Q1-E1-E2
tggcttggaacctttgggctgatttatgtgcttgcatggtcgtgagaagatgatagaaggggatcatatcaatcaagaaagctccttacagttggttaaaaacgaagagtattactcctcccgtctctccctctccccgcgttcctattattctacattcattcctagttactgtcgaccctgcgtctgacaacgaaggcaatttctccgaaaacggcggtatacaccacactccgctagatacaatagtacccggcggaacaagagtagttttaatgggaaacgaaagacgtttctctatcgcggcgtaactctgtaacgagtctgataaagggaccggaataactactctgcttttacactgaacttgccccactgttgaaagttacttcccgagttccagcctgaccta

SEQ ID NO: 1799 - DNA, 472 bp, Glycine max
  unsure at all n locations
  Clone ID: LIB3072-030-Q1-E1-C9
ggaacctttgggctgatttatgtgcttgcatgggtcgtgagaagatgatagaaggggatagtaaaaataaccaacaaagacgagcccgagagaatgaatacggcggcgtcaaaggcgcgcccgccgtcctccccttccgcgggggccatagtcgtatgtacggaatcgagtcctcctaaaagcgactagctactaagccacgacgacgacgagcacctaaaattacgtcgcgactctcgtacgcgtatatgtctaacgttcttctaacgtagtcgcgaagacaccaggtcgaacctacgttatctagaccgcaagagtcgcacgcgtatatgtctatagttaggatagcgctgccgctccgatattaatgatcctcgtcataaattccgtaagcttagagacgatcagaaaaatcaacagtctctctaaacggatgaagttttcccaggtcccgnccgccacgccaggggag

SEQ ID NO: 1800 - DNA, 337 bp, Glycine max
  Clone ID: LIB3072-030-Q1-E1-B4
ggaacctttgggctgatttatgtgcttgcatggtcgtgagaagatgatagaaggggctattatataataaataacaccacctaacagagaagaaagaaagacgagcttaatacgggcccccgcgccaggcaccaccgtagtaacgccggcggccgcgaacggataactactaacgaagttaccggcgaagatagcggaaggggaagaaggcgcgcgatatagggcgggagcgtaagggccggctcgtccaccgtcgtaacgagatcactcttgaccatccctagatacattagtccgagaattctcctgtgaagtgtaacctgttggcggtatacat

SEQ ID NO: 1801 - DNA, 483 bp, Glycine max
  Clone ID: LIB3072-030-Q1-E1-B5
gttgcattggctctggaacctttgggctgatttatgtgcttgtggatgtgcgggtggtcgtgaaagatgatagaaggggacctatataatcaatcaagaaagctccttacagttttttaaaaacgaagagtattactcctcccgtctctccctctccccgcgttcctattattctacattcattcctagttactgtcgaccctgcatctgacaacgaaggcaatttctccgaaaacggcggtatacaccacactccgctagatacaatagtacccggcggaacaagagtagttttaatgggaaacgaaagacgtttctctatcgcggcgtaactctgtaacgagtctgataaagggaccggaataactactctgcttttacactgaacttgccccactgttgaaggttacttcccgagttccaagcctgacctacccgtagccacaacgtcgcgcgccggaatcctcattgagcggctcgccg

SEQ ID NO: 1802 - DNA, 372 bp, Glycine max
  Clone ID: LIB3072-030-Q1-E1-B6
tggcttggaacctttgggctgatttatgtgcttgcatggtcgtagaagatgatagacgggggaaaagaagagccctagaaaacggacgtataagaagtataagtagaagttctaaagagattattaggctgcggcgttatcgaagcgtcctactagagaaaactatccctccctaatcctataataacgatcacagtcggcccggacaccatagtcgtcgcgggacatatcgctccacacgcgaagaagaagttcgaagtcagtgtcaaggacgcagtaaaggccatctccggagccgtgaacttcgaagaagatcatttcaagagacggacaacacaccaccagtcggactacacaacagcccataatccc

SEQ ID NO: 1803 - DNA, 372 bp, Glycine max
  Clone ID: LIB3072-030-Q1-E1-B7
tggctcggaaccgttggactgatttatgtgcttgcatggtcgtcagaagatgatacacgggcatggtcgtgagaagatgatagaagggaaaatggaattaaaaaaaaaggaaaaaggataaaaaaaaaagtgggtgtctcagaggacttaagtccatgcatgagcgtacgtaatgctacagtctcagcacagcgctattcacacctaacttatcggttactgaccaataatgctacgatcgggaaaattacggtgctatttaagctaccacgttccgaactatacttatgccctgatagtacggtgcaccactaaataggtttgaattgactgaatccattaatacaggagtagttcgataggttaacggca

SEQ ID NO: 1804 - DNA, 345 bp, Glycine max
  Clone ID: LIB3072-030-Q1-E1-B8
aacctctgggctgatttatgtgcttgcatggtcgtgagaagatgatagaaggggccagccagacatatatatcttatacaaagagggggaaaggagaagtcataccgtcctccgccggagatactaaatacggcaatcggcgttattttagacggaccacctcggctagagcacgaacggcgtacacttcgtcatgacaatcgtgctgagtgataatttcattattgcaatcgcggccgcgtatcttacaataagctatccaccaaccgtatgtataagtccgtaaggcgcaataacgcgctacatttcacgaggagggtacggaccgaatgaagtccggctccg

SEQ ID NO: 1805 - DNA, 433 bp, Glycine max
  Clone ID: LIB3072-030-Q1-E1-B9
aacctcttgggctgatttatgtgcttgcatggtcgtgagaagatgatagaaggggttaaattacagagttgaatttggttcccagggagaaagagaagaaaaaaaaaactttcctctcccccgccctttctctcctctctccttacggaaaaaacggtggtagtcctcagaaaattaagaagtgtagcaaccggactttccctcctaattttcaggcctcgtaatctctatctcatactactactcctcctccttctagtccctgtcctccttattcttagtcctattctctgtcttcttcttcctccctattgtctccgtctcttaatatgcgctaattctcatggccttattgtctttcttgcttggcctctttctgattgcctggctctcttgaattgtcttactctggcggtgttgtgaattggtgtcc

SEQ ID NO: 1806 - DNA, 459 bp, Glycine max
  unsure at all n locations
  Clone ID: LIB3072-030-Q1-E1-C1
ggaacctttgggctgatttatgtgcttgcatggtcgtgagaagatgatagaaggggacagaagaagtagaaggagaagtaccagtaaaagtaagaagaatcagctcaagtagaaacggttctcctagcgacggtactcgcggtttctaaattcgttttccctatcgccgagaagcttctagccagaggttcctttctttctctaaggaatcttctcctacctagagccgcggttagcggcggtaagaagactaagatcgataagttccacggaaccaacggcggtacggtcccgagggaaggagccgacgtactcggtaggaaaggaaagggaaagggtgcccattagcccgcagataaacatggcgtcaacgctgacggccatagcttcactcatgatattaaagatcggctcntaatttgcgacgctcatgtcggtggcatgatcggtccggtcact

SEQ ID NO: 1807 - DNA, 459 bp, Glycine max
  Clone ID: LIB3072-030-Q1-E1-C10
gggctgatttatgtgcgtgctgggtcgagagaagatgatagaaggggctcagtaccaataaccaacaaagacgagcccggagaatgatgactccggcgtcaaaggcgggtccgccgtcctccccttccgcgggggccatagtcgtatgtacggaatcgagtcctcctaaaagcgactagctactaagccacgacgacgacgagcacctaaaattacgtcgcgactctcgtacgcgtatatgtctaacgttcttctaacgtagtcgcgaagacaccaagtcgaacctacgttatctagaccgcaagagtcgcacgcgtatatgtctatagttaggatagcgctgccgctccgatattaatgatcctcgtcataaattccgtaagcttagagacgatcagaaaaatcaacagtctctctaaacggatcaagttttcccaggtcccgcccgccacgccaagg

SEQ ID NO: 1808 - DNA, 201 bp, Glycine max
  Clone ID: LIB3072-030-Q1-E1-C11
caagcgagccgaacgaatgtctatgatacctaagcgcgttacactcgatactacggtaagaggcggaaaatcaatgaagtcaaagctagcgtcgaagaaactgaatctacctggtaataatagtaagtacacttgctattatagtactagtcttgctttaaatgatgaacttcatcctacactagattcatatgtttatca

SEQ ID NO: 1809 - DNA, 292 bp, Glycine max
  Clone ID: LIB3072-030-Q1-E1-C2
tggcttggaacctttgggctgatttatgtgcttgcatggtcgtgagaagatgatagaaggggggagccagacatatatatattataaaaagaaagaaaaaaaagaagtcataccgtcctccgccggagatactaaatacggtaatcggcgttattttagacggaccacctcggctagcgcacgaaaggcgtacacttcgtcatgacaatcgtgctgagtgatgatttcattattgcaatcgcggccgcgtatcttacaataagctatccaccaaccgtatgtataagtccct

SEQ ID NO: 1810 - DNA, 351 bp, Glycine max
  Clone ID: LIB3072-030-Q1-E1-C3
aacctttgggctgatttatgtgcttgatggtcgtcagaagatgacagaagggggacggaaaaactaaaatgagaaataccaataaggagaagaaaaaaaaaaaacaagtaaaaacggaaaaacaacaaaaaacacaaaaaaaaaaaagtggttgcctcaaaggacttaagtcaatccatgtgcgtacgtaatgctacagtctccacacagggctattcaaaccaaacctatcgtttgctgccccataatgcagagatcggaaaaatttcgatgccattaaatccaactgttccgtaaaatacttttcccctgtaagccggtgcaacagtaaaaaggtttctattgactgtt

SEQ ID NO: 1811 - DNA, 355 bp, Glycine max
  Clone ID: LIB3072-030-Q1-E1-C4
ggaacctttgggctgatttatgtgcttgcatggtcgtgagaatgatagaagagcatgcgagaccgccgagtagagccggatcgtcgatgcaactactacagacaagacagggtcctcgcgataactaaaaggccgctaaaaggacacacgaccgaacaattagtagatcctaaaaagaattaccacgacccctcagcttccgatatcgcgtccgtctaaatctcacgagccaacgccttattccacccctcttaaaaaaaaaaaaatacaaaaaataaaagaaagtacaaacaaaaaaaaaagaaacaaaataaggagataaaaaaagaaagaaaaaaaaaaaaaaagtgtttcc

SEQ ID NO: 1812 - DNA, 466 bp, Glycine max
  Clone ID: LIB3072-030-Q1-E1-C5
ttggctctggaacctttgggctgatttatgtgcttgcatggtcgtgagaagatgatacacgggcatggtcgtgagaagatgatagaaggggataggaaaaataaccaacaaagacgagcccgaagaataatacggcggcgtcaaaggcgcgcccgccgtcctccccttccgcgggggccatagtcgtatgtacggaatcgagtcctcctaaaagcgactagctactaagccacgacgacgacgagcacctaaaattacgtcgcgactctcgtacgcgtatatgtctaacgttcttctaacgtagtcgcgaagacaccaggtcgaacctacgttatctagaccgcaagagtcgcacgcgtatatgtctatagttaggatagcgctgccgctccgatattaatgatcctcgtcataaattccgtgcgcttaaagacgatcaagaaaatcaacagtctctctaaacgga

SEQ ID NO: 1813 - DNA, 349 bp, Glycine max
  Clone ID: LIB3072-030-Q1-E1-C6
ttggcttggaacctttgggctgatttttgtgcttgcatggttgagaagatgatagacggggacggcggctacgaccctcatcatagagtccgcgctactcgtttaacgttccaagtaaccttaaaatcgtccacgccccgctctctcgcccagggtcggcctcgatctgactaagtccccgatcttccaaaaaagaaaaaaaaaaacacggagggcgatatacctctcggctccggtaatggcatttagaccgacagtaagactccgtagatacccaagaaaagtcccgcctaagcttagaatactccggactagaattgggcatctactaacgagacaaattagaact

SEQ ID NO: 1814 - DNA, 394 bp, Glycine max
  Clone ID: LIB3072-030-Q1-E1-C7
gtgcttgcatggtcgtcagatgatggacccggatagttaacataaccaacaaagacgagggcgaagcataatacggcgccgtcaaaggcgcgcccgccgtcctccccttccgcgggggccatagtcgtatgtacggaatcgagtccgcctaaaagcgactagctactaagccacgacgacgacgagcacctataattacgtcgtgactctcgtacgcgtatatgtctaacgttcatctaacgtagtcgcaaagacaccaggtcgaacctacgttatctagaccgcatgagtcgcacgcgtatatgtctatagttaagatagcgctgccgcaccgatattaatgatcctcgtcataaattccgtatgcttagagacgatcagataaatcaacagt

SEQ ID NO: 1815 - DNA, 361 bp, Glycine max
  unsure at all n locations
  Clone ID: LIB3072-030-Q1-E1-C8
tggcttggaacctttgggctgatttatgtgcttgtttatgtgcttgcatggtcgtcagaagatgatagaaggggatagtaaaaatagccaacaaagacgagcccgaagaataatacggcggcgtcaaaggcgcgcccgccgtcctccccttccgcgggggccatagtcgtatgtacggaatcgagtcctcctaaaagcgactagctactaagccacgacgacgacgagcacctaaaattacgtcgcgactctcgtacgcgtatatgtctaacgttcntctaacgtagtcgcgaagacaccaggtcgaacctacgttatctagaccgcaagagtcgcacgcgtatatgtctatagctaggat

SEQ ID NO: 1816 - DNA, 383 bp, Glycine max
  Clone ID: LIB3072-030-Q1-E1-B3
gaacctttgggctgatttatgtgcttgtttatgtgcttgcatggtcgtgaatgatagcagggggaaagagagagaaatagcactcgcgccccttccctgaagacagtcagagagaaagcgaaaaagaaagaaaaaacaagcccccacccccccacccccctacaatccgaaaaaaaaaaaacaaaaaaaaaaaaaaaaagtggttgtctcagaggacttaagtccatgcatgtgcgtacgtgatgctacagtctcctcacagcgctattcaaacctaacctatcggttgctgccccataatgctgcgatcgggaaaatttcggtgccatttaatccaactgttccgtagtatactttttccctgttagtcggtgcaacagtga

SEQ ID NO: 1817 - DNA, 173 bp, Glycine max
  Clone ID: LIB3072-029-Q1-E1-H8
cccaaacccaatcaccaaatttaacccaaactaacattcataaatctctatccctacatataccccacttaacccactaaacctccctctcccatcactctaataaaaacaatactctttaattacttttcaaccattctacccaagatctccacccccattaaataaccttc

SEQ ID NO: 1818 - DNA, 351 bp, Glycine max
  unsure at all n locations
  Clone ID: LIB3072-029-Q1-E1-H9
tggaantttgggctgatttatgtgcttgcatggtcganaagatgatagaagggcatggtcgtgagaagatgatagaagggcatgggcgggagaagatgatagaaggggactctaaataccagcatcaacaatttaaaaacggtattactacccctactagtaattaagtctcctcttcctctaccgtccccgtcaattataataacggcccacgaagttaacctctaaccattctcgtaaatgatgccggcgcctcattcttgagatacagtaataggatttaatgtaatagcccttttaactattggttctattggaagggaccggattcatgaataacctggaataaca

SEQ ID NO: 1819 - DNA, 426 bp, Glycine max
  Clone ID: LIB3072-030-Q1-E1-A1
tggctcggaacctttgggctgatttatgtgcttgtttatgtgcttgcatggtcgtgagaagatcatagaagggaagagtagttataaacggaagcctcccttccgacggagacgtcgccgagggtaagaaaactaataccgtaaggaaaggcgaaagtcccctcgcccttaagactcggtaacgtctcaggaaagacaagccgataggtctactagacgtctacccttacaatctcatcgctatcctgatcccgttacggacgaacaaagctagaggcatccgatatacgaagtcagcccgcaccccaatcaaccctatacccctaccgaaggaacttacccgccgtgtattagtaaccttctctatcccgaccccatttccccccaccacccgcagcgatagaatccgcaactgcattacaatac

SEQ ID NO: 1820 - DNA, 242 bp, Glycine max
  Clone ID: LIB3072-030-Q1-E1-A10
aaaagtcgttgtctcagatgacttaagtccatgcatatacgtacgtcatgttccaatctcctcacacagctattcaaacctaacctatcggttgatgctccctaatgattgcatcgagaaaatttctctgcaatttaatccaactgttccgtacaatacttcttccctattagtcggtccaacacttcacaagatcccattaaatgtttccattaatagccgtctatatcaaaccgttaacc

SEQ ID NO: 1821 - DNA, 356 bp, Glycine max
  Clone ID: LIB3072-030-Q1-E1-A11
caagaaagctccttacagtttgttaaagacgaacagtattacgccgccggtctctccctctccccgcgttcctattattctacattcattcctagttactctcgaccctgcgtctgacaactaatgcaatttctccgaaaacggcggtatacaccacactccgctagatacaatagtacccgtcggaacaagagtagttttaatgggaaacgaaagacgtttctctatcgcggcgtaactctgtaacgagtctgataaatggacccgaataactactctgcttttacactgaacttgccccactcttgaacgttacttcccgagttccaagcctgacctacccgtagccacaacgt

SEQ ID NO: 1822 - DNA, 353 bp, Glycine max
  Clone ID: LIB3072-030-Q1-E1-A2
tggcttggaacctttgggctgatttatgtgcttgcatggtcgtgagaagatgttcgaggggggcacagagcgtggccgagagaagagagtgtcggcctttctattaaacgacaattagagtaagggtggactaatctatcgacgaatagacgcttgagcctaaggaagttccgagtccgcctaactcggattgtgactgccgtacgacaattaaggcgtccgaaatcgtcacgtccctaccgtggtgaaatttaatcgaggtagaatcctacgatacgactaacgaaccggacgtcgacgggaacgggattacagatccgtgtgagccttcaaattctacggccaggacgacg

SEQ ID NO: 1823 - DNA, 403 bp, Glycine max
  unsure at all n locations
  Clone ID: LIB3072-030-Q1-E1-A3
ctttgggctgatttatgtgcttgtttatgtgcttgtcgtgagaagatgatagcaggggataaatacctctcttaccgctcccgaatatctactattacggttaagtccgcctccctttcccgcccttcctcccctagcggtcgtcctgtctcgagagagtaggtatagtaaaacgagcgttagacttaaaagtcgaacgtttctaaattggacaattgcacagagctggaaggcgggcctaccgagattcggaatttcaataataagttaccttagcgcgttggcgccgtttctctctgtcgtatttccaattgtaacgtttcctgcagattccttcatattaatggcttttaggaaactcatacataantaggcaacggcacncccggtacgacacctttgg

SEQ ID NO: 1824 - DNA, 387 bp, Glycine max
  Clone ID: LIB3072-030-Q1-E1-A4
aacctttgggctgatttatgtgcttgtttatgtgcttgtttatgtgcttgcatggccgtgagaagatgatagaagggggctgcgaggataaaagaagaagcactatctacacaacatctcgcactaccctaccctgacaactacttacagtcatcgaagaaaacggtaattactctcgtcgtcactataattttactgactctttgtgtaatctccgcgtaaaagtgggctctactctttgcctccggcccgttagtaacgggcaaggcgggaagagcgagccgtcttacggaggaaaaattccacctcgcgaaggaaagtagtctcagtacgccggggacgggggtactctcgacggtagtcgttagtgtcgtagttacgctaggt

SEQ ID NO: 1825 - DNA, 478 bp, Glycine max
  unsure at all n locations
  Clone ID: LIB3072-030-Q1-E1-A5
aaccgttgggctgatttatgtgcttgcatggtgagaagatgatagaagggggccgtactgaagagagagagagtgagagagagagagagaacggtagtatccggcggtaactgcgacgcggtaggaagttagaatagttccgagactgacggcccagtctgtcccgtcgccgaagaatataataaaaaatagaacgtttccccggagcccgaaaaggcagcaagcgtaaaatagtaagcggccctcggcattccgcatattactatcccggaggtaaaagacggcgggtaaaagaaggcccacgaagttaaagcccgggagaaggtacggccgaatcctaaggaggcgtaagagcctaagtccgccggagacgtattcgtacagctcagcgtccaaccaggccgtagaagagcgaacagcgagatagttcgntctgaaggggaaagttcaaggacacactaaagtacgtcacacgcac

SEQ ID NO: 1826 - DNA, 361 bp, Glycine max
  Clone ID: LIB3072-030-Q1-E1-A6
tggcttggaacctttgggctgatttatgtgcttgcatggtcgtgacgagatgatagaaggggatagtaaaaataaccaacaaagacgagcccgaagaataatacggcggcgtcaaaggcgcgcccgccgtcctccccttccgcgggggccatagtcgtatgtacggaatcgagtcctcctaaaagcgactagctactaagccacgacgatgacgagcacctaaaattacgtcgcgactctcgtacgcgtatatgtctaacgttcttctaacgtagtcgcgaagacaccaggtcgaacctacgttatctagaccgcaagagtcgcacgcgtatatctctatagttaggatagcgctaccgct

SEQ ID NO: 1827 - DNA, 338 bp, Glycine max
  Clone ID: LIB3072-030-Q1-E1-A8
gaacctttgggctgatttatgtgcttgtatatgtgcttgcatggccgtgagaagatcctagacggggtatatcttgcccagtacgaggaaaagcgttaattacggtagtgaccctcatcgactaattaataggacttcatcgttacggaattcatcgcggagtatttcacggagattattcacgagattcatagtagtacgaataatttcttcctatgtcgtatggcgaggcctacaatcgtcgtaatcaccggtactatatctcgatcttcgctcgagacgatttctataggtatcgctacaggcatcactaccgtaattttcgcctccgcaactcc

SEQ ID NO: 1828 - DNA, 393 bp, Glycine max
  Clone ID: LIB3072-030-Q1-E1-A9
attggcttggaacctttgggctgatgtatgtgcttgcatggtcgtgagaagatgatagaagggcatggtcgtgagaagatgatagaaggggattgagttcaacgaatgagtgaataagaaaaaaaaaaaagtggttgtctcagaggacttaagtccatgcatgtgcgtacgtgatgttacaatctcatcacagagctattcaaacctaacctatcggttgatgccacataatgctgcgatcgggaaaatttcgctgccatttaatccaactgttccgtagaatacttctgccctataagtcggtgcaacaatgaagaggtttatattgaatgtttccattaatagccgtctaaatcgaacggttaacgcgatctgtttcgcagatgtgtacca

SEQ ID NO: 1829 - DNA, 430 bp, Glycine max
  Clone ID: LIB3072-030-Q1-E1-B1
aacctttgggctgatttatgtgcttgcatggtcgtgagaagatgatagaaggggatcccttcgaactccgagttccctccatcccgaccccgaatcttccaacgaagtacgcgtccctatcttctaatttatttgaaaacgtttcctaaccctacgtaaccctccccggtcgccgagtccttacgtcttaactcaaagtcatatagacacagacctcttacgtcccgccaagaagcatccgagaacccgaagtatagccaaagtattaatccgtccagtcctcctattgagaacgtactccggttcgcggcccaaagtctcgagtcgccttacgaacttctgcgtcctactcccgtccttccctgggaaaacacgaaggacggtagaggccatcccgaacctaggcgctaacactccacattacataatt

SEQ ID NO: 1830 - DNA, 425 bp, Glycine max
  Clone ID: LIB3072-030-Q1-E1-B10
tggaacctttgggctgatttatgtgcttggatagaagggggcagaagaaaaaaaccgacctcaaacaaaaataaatttagttcccaaggggaatggttgtctcagaggacttaagtccatgcatgtgcgtacgtgatgctacagtctcctcacagcgctattcaaacctaacctatcggttgctgccccataatgctccgatcgggaaaatttcggtgccatttaatccaactgttccgtagtatactttttccctgttagtcggtgcaacagtgaagaggtttgtattgactgtctcctttaatagccgtgtagttcgaacggtgaacgggatgtgtttcgcaatggtgtaccaagtgtgctgggcgcggcggccatctgtagtgcgattgtcatatccgttagtgtttcagtgtttgtcttcc

SEQ ID NO: 1831 - DNA, 439 bp, Glycine max
  Clone ID: LIB3072-030-Q1-E1-B11
aacccttgggctgatgtatgtgcttgtttatgtgcttgcatggtcgtgagaagatgatagaccgggacctagaactagaacaagacgaacaagaaacgaaaaaaaaaaatctcggtccattatacccgagcccgagtccggcctcctaaacgagacttttcctcgccggacctattggaacatccgcgtcctccgccccttctctcgtccgtcgccgtagcctcctcatatacgggagcccggaaatggagaaaatccccgttaccacaaaattagatggaccgtccggcaatcatatagacgacactaagagaataaccgcagaacacggccctagaaccccaaaggaaaagaccgcctaatctgacgagggtatcgcgaaaagcccccacgtcgagtatctccctaaaagtcctcccctaagttccacaaaacatac

SEQ ID NO: 1832 - DNA, 477 bp, Glycine max
  unsure at all n locations
  Clone ID: LIB3072-030-Q1-E1-B12
ggaacctttgggctgattgatgtgcttgcgtgagaagatgatagaaggggatagtacccctaaccaacaaagacgagcccgaagaatagtacggcggcgtcaaaggcgcgcccgccgtcctccccttccgcgggggccacggtcgtatgtacggaatcgagtcctcctaaaagcgactagctactaagccacgacgacgagcacctaaaattacgtcgcgactctcgtacgcgtatatgtctaacgttcttctaacgtagtcgcgaagacaccaggtcgaacctacgttatctagaccgcaagagtcgcacgcgtatatgtctatagttaggatagcgctgccgctccgatattaatgatcctcgtcataaattccgtaagcttagagacgatcagaaaaatcaacagtctctctaaacggatgaagttttcccaggtcnncgccgccacgccaggggagataaacaaaataagaaa

SEQ ID NO: 1833 - DNA, 279 bp, Glycine max
  Clone ID: LIB3072-029-Q1-E1-H7
aaaataaatgctccccaaaccgaaactccaaatttcaccgaaggtaacattcataaatctttaaccggacatagacccgacttaagcgacgaaacctccgtcggccatcactctaagaagaggactacggtttaattacttttcaacgattctacctaagatcgcgacgcccattaaatagccttccgggaatcgttacgaagcggcagcaagaacccgaaccggtataggccccctccttacgacccgatgatttgctcgcctgaaaattctaataaa

SEQ ID NO: 1834 - DNA, 403 bp, Glycine max
  Clone ID: LIB3072-030-Q1-E1-B2
tggcttggaacctttgggctgatttatgtgcttgtttatgtgcttgcatggtcgtgagaagatcatagaaggggaatatccggcccagtaagagaaaaaacattaattacggtaattaccctcatcgactaattaagaggacttcatctttacggaattcttcacggagtatttcacggaattattcacgagattaatagtagtaccaataatttcttcctatgttaaattgcgaagcctacaatcgtcgtaatcaccggtactatatctccatcttcgctcgggccgatttctataggtatcgctacaggcccgactaccgtaattttctcctccgccactcctagttttacttccgctttcgtcgtgcccgcgtcgccttcgggcgtcctcggtcccccgc

SEQ ID NO: 1835 - DNA, 330 bp, Glycine max
  unsure at all n locations
  Clone ID: LIB3072-029-Q1-E1-G10
ggaantttgggctgattgatgtgcttgcatggtcgtgagaagatgacagaaggggtcctatagtaaaaataaccaacaaagacgggcgcgaagaataatacggcggcgtcaaaggcgcgcccgccgtcctccccttccgcgggggccatagtcgtatgtacggaatcgagtcctcctaaaagcgactagctactaagccacgacgacgacgagcacctaaaattacgtcgcgactctcgtacgcgtatatgtctaacgttcttctaacgtagtcgcgaagacaccacgtcgaacctacgttatctagaccgcaagagtcgcccgcgtata

SEQ ID NO: 1836 - DNA, 373 bp, Glycine max
  Clone ID: LIB3072-029-Q1-E1-G2
tggcttggaacctttgggctgatttatgtgcttgtttagtgcttgctggtcgtgagaagatgatagaagggggcgtattgcgggaagtatagcgcccgctctccttccttttgtcttcctctccttaattaatgccgacgccgcaattttaagtaagggccctccccgccccaccccctgacccccgacctaaacccgctccgatccctccctgcgcacccccgccgacgcaccgaccctccagacccggatggagcaaaagagaagggaataagaaaggagaaataagatcaaccctggtggcacgacgaagagccggctgctagtgacgggagcagagaatgaagagaagaagaaggagaaacaagcctca

SEQ ID NO: 1837 - DNA, 441 bp, Glycine max
  Clone ID: LIB3072-029-Q1-E1-G3
gttggaacctttgggctgatttatgtgcttgcatggtcgtgagaagatgatagaaggggagagaacgaataacggcgtaaatgcacggaaccgtttagcagttcatgataagtccggggcgagacatagaacgcggagagacgtaccggagagaggagttaaataatcattacctctattataatatacagaccaagcatagagcgaataacccccacccctccccctctctatctagcgatgtcctccaaacttcctgacaaggaaccccctcccccctaatctaaggtcctactactctcataagagtccttggaaatcgccgcacctactagaggtcgccttccttttcacaacagctgagctccgatattcccctatttcccccctaccccccccaaacgcgcatagccctaaaattacccccccttttccgcgaca

SEQ ID NO: 1838 - DNA, 408 bp, Glycine max
  Clone ID: LIB3072-029-Q1-E1-G4
gttggaacctttgggctgatttatgtgcttgcatggtcgtgagaagatgatagaagggggttccccaataataagaacccggacacaagcccgcccgcccctaagttaatcaccgcaactacagacgattccgcctacggatccaaatatcctcttccaattatcgagagttccggccgcgcctaaagtctcacacccaggagtacttacggaaacacgactacacggcacggagtacggtagaggtggctgagcaaggaaaaagaggagtcgattctaatttccaaactaacgccaagtaatacactaagtacggtcgcgccaaccgaatatagcccttccgaagtacatggcggagaactaagagacggtcccctagtcgtaaaacctcttatccgggatacaaca

SEQ ID NO: 1839 - DNA, 352 bp, Glycine max
  unsure at all n locations
  Clone ID: LIB3072-029-Q1-E1-G5
gaantttgggctgattgatgtgcttgcatggtcggagaagatgatagaagggaagactggtgcgtggagaagtcgaaaacgaacagcgaaggagacgacaccctaggcgacgaggaggtcaaatgaacggaccactactaaagcgacagcgcagccatattactcgagtaaaagaagttcgagaccgaaccgtggaataaggtctccgaactttctaaagtaaagaagggtacgaacaatcaaacgtactatacttaagccccacgccgccccgcgtcccaaaaatccaccgagaaacactccagtccgcccaagaaatccggccccgtaaacgccacgcccacccacctac

SEQ ID NO: 1840 - DNA, 408 bp, Glycine max
  Clone ID: LIB3072-029-Q1-E1-G6
tggaacctttgggctgatttatgtgcttgtttatgtgcttgtttatgtgcttgtttatgtgcttgtttatgtgcttgcatggtcgtgagaggatgatagaaggggacctatataatcaatcaagaaagctccttacagttttttaaaaacgaagagtattactcctcccgtctctccctctccccgcgttcctattgttctacattcattcctagttactgtcgaccctgcgtctgacaacgaaggcaatttctccgaaaacggcggtatacaccacactccgctagatacaatagtacccggcggaacaagagtagttttaatgggaaacgaaagacgtttctctatcgcggcgtaactctgtaacgagtctgataaaagggacggaataactactctggctttaca

SEQ ID NO: 1841 - DNA, 240 bp, Glycine max
  unsure at all n locations
  Clone ID: LIB3072-029-Q1-E1-G7
ttgggttgatttatgtgcttatttatgtgcttgcatggtcgtgataacatcctagnaggtgttagaaagagagaaaagggcggccaactccgcctgcggcggccttctttagaataagccttctacgctatcttgctccttagcggtgctcatcgccaatcgtgttcataatatctagatcaataattctcatactaccctcacccaaaggcactaaaccttccctcaattcctccattc

SEQ ID NO: 1842 - DNA, 366 bp, Glycine max
  unsure at all n locations
  Clone ID: LIB3072-029-Q1-E1-G8
gttggaantttgggctgatttatgtgcttgcatggtcgtgagaagatgatagaagggcatcgtcgtgagaagatgatagaagggaggcgaaggacactctctctaccatacgactgactacctacagtacagcgcgaaacccgagtgagatttcacgaaaaaaaaaaaaaaaaaaaaaaaaaaaaaagtggttgcctcagaggacttaagtccatgcatgtgcgtacgtgatgctacagtctcctcacagcgctattcaaacctaacctatcggttgctgccccataatactccgatcgggaaaatttcggtgccatttaatccaactgttccgtaatatactttttccctgttagtcggtgcaac

SEQ ID NO: 1843 - DNA, 458 bp, Glycine max
  Clone ID: LIB3072-029-Q1-E1-H1
gttggaacctttgggctgatttatgtgcttgtttatgtgcttgcatggtctgagaagatgatagaaggggatctctactataccacctcacagtaaccccggccaagagctccgaaaaagtaagagaaaaaaaacattaattacggtaattaccctcgactaattcagagggcttcatcttcacggaattctacacggagtatttcacggaattatgcacgagattaatattagtaccaataatttattcctatgttaaatagcgaagcctacaatcgtcgttatcaccggtactatatctccgtcttcgctcgggccgatttctataggtatcgctgcaggcccgactaccgtaattttctcctccgccactcctagttttacttccgctttcgtcgtgcccgcgtcgccttcagccgtcctcggtccccgcctctcggggtcgcggcgcggtcgtt

SEQ ID NO: 1844 - DNA, 361 bp, Glycine max
  Clone ID: LIB3072-029-Q1-E1-H10
tggaacctttgggctgatttatgtgcttgcatggtcgtgagaagatgatagaaggggatagtaaaaataaccaacaaagacgagcccgaagaataatacggcggcgtcaaaggcgcgcccgccgtcctccccttccgcgggggccatagtcgtatgtacggaatcgagtcctcctaaaagcgactagctactaagccacgacgacgacgggcacctaaaattacgtcgcgactctcgtacgcgtatatgtctaacgttcttctaacgtagtcgcgaagacaccaggtcgaacctacgttatctagaccgcaagagtcgcacgcgtatatgtctatagttaggatagcgctgccgctccgat

SEQ ID NO: 1845 - DNA, 436 bp, Glycine max
  unsure at all n locations
  Clone ID: LIB3072-029-Q1-E1-H11
tgggntgattgatgtgcttgcatggtcgtgagaagatcatagaacgcgatctctactataccacctcacactaaccggggggagagctccgaaaaagtaagagaaaaaaaaacattaattacggtaattaccctcgactaattcagagggcttcatcttcacggaattctacacggagtatttcacggaattatgcacgagattaatattagtaccaataatttattcctatgttaaatagcgaagcctacaatcgtcgttatcaccggtactatatctccgtcttcgctcgggccgatttctataagtatcgctacaggcccgactaccgtaattttctcctccgccactcctagttttacttccgctttcgtcggtgccgcgtcctctttcagcgtcctcggtccccccgcctctcgggggtcgcgggcgggtt

SEQ ID NO: 1846 - DNA, 397 bp, Glycine max
  Clone ID: LIB3072-029-Q1-E1-H12
gaagggggctcccccgaatccatattcgaacctcgaaagcgagggcacgcggatattaccaaaagaatttctctatcgaaaatatgtgcatcacccacccggcggaatcacactagtccagagaccccccggggtatagaaacgtcgagcatggctcaaaggcagcgacctttgcacggacggggagaagttctgggaatatatcgaatcctcctctaactcagtacttggaaacattttcatccgagccattcgccctggaacaaccgagactcttaattcccttacgatactatgcacgtctactttcccccaccgcgagggccctcaaccgtcaccggggcccagacacccatcgccaaaaacccgcctaagttacaatgttgcgtaacccccg

SEQ ID NO: 1847 - DNA, 394 bp, Glycine max
  Clone ID: LIB3072-029-Q1-E1-H2
gttggaacctttgggctgatttatgtgcttgatggtcgtgagaagatgatagaaggggatagcgacctatctcaagagtcgagataataagcggttccttcctctcctcctcctcttaaaggtaaaggctcccgagacggaagctccaaatttgaccgaaggtaagattcataagtctttagccggacatagacccgacttaagcgacgaaacctccgtcggccatcactccaaggaagaggactacggtttaattacttttcaacgattctacctaagatcgcgacgcccattaaatagcgttccgggagtcgttaggaggcggcagcaagaacccgaaccggtagaggccccctccttacgacccgaggatttgcgcgcctgaaaattctaa

SEQ ID NO: 1848 - DNA, 369 bp, Glycine max
  Clone ID: LIB3072-029-Q1-E1-H3
tggttggaacctttgggctgatttatgtgcttgcatggtcgtgagaagatgatagaagggcatggtcgtgagaagatgatagaaggggtctaccgataacctataataatatataatacaccaccaagatatattttaaattaaattatcctatatagaatatacacttaccggcgaaggagcactacgggcgaataaccagggtcatcaaaagctacggccgcgtaagggaaaaggccggcgacttgggaccctaagattagcgacttccacgcagcatctaaatcagggaactagatcgtaaagattaaggcaaccaacagtcgtccgaacttcgcccggaacgaagagtcgaaccctatctcgata

SEQ ID NO: 1849 - DNA, 341 bp, Glycine max
  unsure at all n locations
  Clone ID: LIB3072-029-Q1-E1-H4
tggaacctttgggcttgatttatgttgcttgcatgnngtcgtgagaagatgattagaaggggatttgttgcctctactctactcctttagcctctatgtctatgtgtcgtactcctatgctgctctcaatgagggaaaacgagctgaggaggcgtagtagtagtgaagggaaagaagaagggcgtcatacctattaccgatcgcgtaaagttagcagaagataagactacggataccgtcctctctgagaagccctcctaagagaggactaaggccggcggtaaagccggcgtctccggcgatctcgccattgccatatgcgagaagatcaagaccacctc

SEQ ID NO: 1850 - DNA, 318 bp, Glycine max
  Clone ID: LIB3072-029-Q1-E1-H5
ggttggaactttgggctgatttatgtgcttgatggtcgtgagaagatgatagaagggcatggtcgtgagaagatgatagaagggcatggtcgtgagaagatgatagaaggggaaaaaaaaaaaaaaaaaaaaaaaaaaaaaggtggttgtctcagaggacttaagtccatgcatgtgcgtacgtgatgctacagtctcctcacagcgctattcaaacctaacctatcggttgctgccccataatgctgcgatcgggaaaatttcggtgccatttaatccaactgttccgtaatatactttttccctgttagtcggtgc

SEQ ID NO: 1851 - DNA, 325 bp, Glycine max
  Clone ID: LIB3072-029-Q1-E1-H6
ggctgatttatgtgcttgcagtcgtgagaagatgatagaaggggactttaactagaaaaagccagggcccgcaatcccggtccgcgtccgtgaactcgaactgaacaacaactaactaactactacgctgctggtgaagaagactatatcgaagagcctggatggtgaggtccctgaggcggatgaggtggcggtgtcggagctctagatgacaaagtatacgactgaagatgatcgtgttgatagtggtactttctcgttgaatgcgatgagtaagacttcggtgaaggcgactgagcatcgtaagaagtatgctgaggttgtg

SEQ ID NO: 1852 - DNA, 346 bp, Glycine max
  Clone ID: LIB3072-029-Q1-E1-G1
ttggaacctttgggctgatttatgtgcttgtttatgtgcttgctggtcgtgagaagaatgatagagggtctcgaggacgactagaaaaacgttcccttgaaccgcccacgaggaaaacatacggagattcgaatcgaagaggtaacggtcacgcagcggtcctccacatgcaggtacctcggtcctaaaacaccaatacgcatgctcaacgcccgcacggaacagccctaaaacgcgcagcctcccacgcttccgcctccccgcttccgcgcaaccatgtcggaccacccaccaccgcagaacacagacccggcttacttaaaccagacgaccaccggagatcact

SEQ ID NO: 1853 - DNA, 435 bp, Glycine max
  Clone ID: LIB3072-029-Q1-E1-E12
tggaacctttgggctgatttatgtgcttgcgaagatgatagaaggggatagtaaaaataaccaacaaagacgagcccgaagaatagtgacggcggcgtcaaaggcgcgcccgccgtcctccccttccgcgggggccatagtcgtatgtacggaatcgagtcctcctaaaagcgactagctactaagccacgacgacgacgagcacctaaaattacgtcgcgactctcgtacgcgtatatgtctaacgttcttctaacgtagtcgtgaagacaccaggtcgaacctacgttatctagaccgcaagagtcgcacgcgtatatgtctatagttaggatagcgctgccgctccgatattaatgatcctcgtcataaattccgtaagcttagagacgatcagaaaaatcaacagtctctctaaacggatgaaattttccc

SEQ ID NO: 1854 - DNA, 407 bp, Glycine max
  unsure at all n locations
  Clone ID: LIB3072-029-Q1-E1-E2
gttggaacctttgggctgatttatgtgcttgtttatgtgcntgctggtcgtgagagatgataaaggctggtcgtgagaagatgatagaggggcatggtcggagaagaatgatagaaggcatggtcgtgagaagatgatagaagggcatggtcgtgagaagatgatagaaggggaagataaaaacaaaaccncccanaaaaaaaaaaaaaaaaaaaaaaaaaaagtggttgtctcagaggacttaagtccatgcatgtgcgtacgtgatgctacagtctcctcacagcgctattcaaacctaacctatcggttgctgccccataatgctgcgatcgggaaaatttcggtgccatttaatccaactgttccgtagtatactttttccctgttagtcggtgcaacagtga

SEQ ID NO: 1855 - DNA, 422 bp, Glycine max
  unsure at all n locations
  Clone ID: LIB3072-029-Q1-E1-E3
tggttggactttggctgtttagtgcttgctggtcgtgagaagatgatagaagggggcgagaganattagcgatcgatccccttagaaagaaaaataataacgagcccttgctaccttactacgaatgtctcctttacctcttctcctccttctcctgacctcgtaccagccctcgtgaagaaaatcggcgacgcgatggagtcgtaaaccggtgcgaagtacaaattagcactacgcgaagcctaggtatataaaggtgatagagctaaagcatatcacaggggaaaatctatcgacgaaatcgcccctgatctcagtcccgaatgaaacaacttaactgaacccgagtccgtcatcggctaagcgactaaaggccgggattagggaccaccgggaacgcgctccggcgagaagtgcaagtc

SEQ ID NO: 1856 - DNA, 427 bp, Glycine max
  unsure at all n locations
  Clone ID: LIB3072-029-Q1-E1-E4
gttggaacctttgggctgatttatgtgcttgcatggtcgtgaaagatgatagaagggggactcactataacaganagtanagtcacacaggagcaccctttacactaagaaaacgaaaactttcccccacccctttacttctgcgtccgccgctcctaccgtcctcggaaaataagcgtaaacgatagcggcattaaaccgcgcggcagaaagtccgctagcctaccgcgaaacacctaagaacttccgtgaatcctcccgttaataataccccggactatttgtagtatacggagtccgcggtaccaagccttacgcacgcgcccgccacccacgccaaacacaaagcccaattacaataactatagtccctacattcacccaacagcacgcaagttgacgaaaaaaacaaacacacaaacaaaac

SEQ ID NO: 1857 - DNA, 343 bp, Glycine max
  unsure at all n locations
  Clone ID: LIB3072-029-Q1-E1-E5
gttggaacctttgggctgatttatgtgcttggtgagaagatgatagaagggcacggtcgtgagaagatgatagaaggtanannaaaaaaagggggaggaaaaaaaaaggtggttgtctcagaggacttaagtccatgcatgtgcgtacgtgatgctacagtctcctcacagcgctattcaaacctaacctatcggttgctgccccataatgctgcgatcgggaaaatttcggtgccatttaatccaactgttccgtagtatactttttccctgttagtcggtgcaacagtgaagaggtttgtattgactgtttcctttaatagccgtgtagttcgaacggtga

SEQ ID NO: 1858 - DNA, 453 bp, Glycine max
  Clone ID: LIB3072-029-Q1-E1-E6
tggttggaacctttgggctgatttatgtgcttgcatggtcgtgagaagatgatagaagggggaatcgagtcctcctaaaagcgactagctactgagccacgacgacgacgagcacctaaaattacgtcgcgactctcgtacgcgtatatgtctaacgttcttttaacgtagtcgcgaagacaccaggtcgaacctacgttatctagaccgcaagagtcgcacgcgtatatgtctatagttaggatagcgctgccgctccgatattaatgatcctcgtcataaattccgtaagcttagagacgatcagaaaaatcaacagtctctctaaacggatgaagttttcccaggtcccgcccggcacgccaggggagataaacaaaataagaaacaaaagtctagcggttagcaacccgtccccagtaaaaccgggttaccccaacaacttcaaccctt

SEQ ID NO: 1859 - DNA, 459 bp, Glycine max
  unsure at all n locations
  Clone ID: LIB3072-029-Q1-E1-E8
gttggaantttgggctgattgatgtgcttgtttatgtgcttgcatggtgtgaaagcaccatagagggggctcgaaggtgaggccaagtgcagaacaaagaagagaacggtcagagatagtgcttcaatatgtgcggtgattggagttgttgccggtggcgtcactggtggtgtagctggcgtcgcccacgggatccatgacgtaaccaggcacaaggccttcggatcttctaagacaaggtacacagggtagattatctcgggaagcgtagtcgcacccagtccgccttcagtggtaggaattccgacatgactctatcagcccgcccttccagaccgcgtagctacggcgatgagcccctccctaaccccagttagtaaaaaccgttacgcaattctataccaactccccgggcgccgataccacacaaagcctccccccaacaaaaaatagaaaacc

SEQ ID NO: 1860 - DNA, 345 bp, Glycine max
  Clone ID: LIB3072-029-Q1-E1-F1
tcgtgccccgattcctaactctaactacggttaaagtcgaaggcggtaaggaattaacaaacgaataagtagcagtaaacacgcacgtcgtaacgaggctcgagtctaattaaacccatcttaaaacaatcgaatcggagacggaagccagcgagtatataccggccattaacgttacctaattatccgattaactcagatgacgtcactgcacgaccggaggggcgtccgcggagagaattactaaagaggctccgttcgtcgcgtagtgaaacaaagaaggatctgaagaggccgcggtaaggtccaatgaggtgcccgaaaagaagaaaaaggaaaccctcg

SEQ ID NO: 1861 - DNA, 325 bp, Glycine max
  unsure at all n locations
  Clone ID: LIB3072-029-Q1-E1-F2
gttggaacctttgggctgatttagtgcttgctggtcgtgagagatttagaggcgatagtgtaataactaacanagacgagcccgacgaataatatgatagagtcaaatgcgcgccagaagaccacccaatccgaggtggccatagtcgtatctacggaatcgagtcgacctaccagcgattggttactaagccacgacgacgacgagcacctagtgtttcgtctcgactctcgtacgcgtatatgtctaacgctcgtcgaacgtagccgcgcacacaccaagtcgaacctacgttatctagaccgcaagagtcgcacgcgtatat

SEQ ID NO: 1862 - DNA, 478 bp, Glycine max
  unsure at all n locations
  Clone ID: LIB3072-029-Q1-E1-F3
tggaacctttgggctgattgatgtgcttgcatggtcgtaagaaggatagaaggggatagtaaaaataaccaacaaagacgagcccgaagagtaatacggcggcgtcaaaggcgcgcccgccgtcctccccttccgcgggggccatagtcgtatgtacggaatcgagtcctcctaaaagcgactagctactaagccacgacgacgacgagcacctaaaattacgtcgcgactctcgtacgcgtatatgtctaacgttcttctaacgtagtcgcgaagacaccaggtcgaacctacgttatctaaaccgcaagagtcgcacgcgtatatgtctatagttaggatagcgctgccgctccgatattaatgatcctcgtcataaattccgtaaagctagagacgatcagaaaaatccacagtctctctaaacggatgaaatttttcccaggtcccnggccgccacgccagggcgagataaaac

SEQ ID NO: 1863 - DNA, 447 bp, Glycine max
  unsure at all n locations
  Clone ID: LIB3072-029-Q1-E1-F4
gttggaacctttgggctgatttatgtgcttgtttatgtgcttgtttatgtgcntgtttatgtgcttgtttatgtgcttgcatggtcgtgagaagatgatagaagggtattcagcgaagaagacatttttgaggtaaacgttaaacacgatataatcatggtagactaggctatccactagctcgtccagggcaataactcaaggccataccataccgaccatgttaggtcacggagttaccgccgcgctttcgacccgcataggaaccggagaggtcactaaccaggcggaaacgtcagttaaaacacgggaccaaatcactttccgaaattacggcgtcgtacgcacctctaagactacccccgttagtagcacgaggaattttgcacatacttactcgaagtaccagtacctccccccgcacagttacgccgaaaggaaaaagtc

SEQ ID NO: 1864 - DNA, 373 bp, Glycine max
  Clone ID: LIB3072-029-Q1-E1-F5
ttgggttgatttatgtgcttgcataggtgctgaagatgatacatggtgacgcgatcgaacatactagaaaagttatacttacgagtagttcaacaaaacgatgagtgtcagtccgactgtcactccatcatcacgtgtgcgtattctacattcattccgtcgtattgtttacgatcggtctgatgcggacggtgacttgatctggaatgcggctacacatcatgtcccgtttgtaacaagaggaaatggaggtggaacagaatgagttgtctctaggaaagatatctgcttcactatcgcagcgtaactccctaacgtgaatctcaaggggaacgaaaccaaagccgaactcgtacattatgttcaccataca

SEQ ID NO: 1865 - DNA, 448 bp, Glycine max
  Clone ID: LIB3072-029-Q1-E1-F6
gttggaactttggctgtttagtgctgttatgtgctgttattgctgctggtcgtgagaaaatgatagaagaggactaagaatgaggctaacacttcagcatattgcaccaaagaacccaagacacatcacgacgagagtgtggcctttaccatcgccgtcgggagccgccccttcggtactagccctcgctctacccggtaccgtgcaccgggaaaagtagaattttagctataataagcgttcttgaagccgtaacagtgagaaagatcttcataggaattaagtacgttatgtctgccgtaattcttccaaggcggaggaagaagaagaacgtgaagaaggctaaaacctatgattatgattataatatttggagagcgaatgctaggtatatggcgagaaaggagaagataaaggcgagtagttatgcttacctttaccttaatgt

SEQ ID NO: 1866 - DNA, 477 bp, Glycine max
  Clone ID: LIB3072-029-Q1-E1-F7
ggcttggaacctttgggctgatttatgtgcttgcatggtcgtgagaagatgatagaagggcatggtcgtgagaagatgatagaagggcatggtcgtgagaagatgatagaagggggttgcggaagagagaaatttcagggcccggaagaagtcgactggagaagacggcgtagtgctctattcattgtaagtgttatagtcacgttattaaacttaattagtatagagctgctaagatctttggcggtaagtccgcccactagattatgaagaagagggttagtggatttaagcgtttcgctatcggaaagaggacctaagggaccttatacccaaggttaatagaacacaagagactaaggccatttaaaaattgaaggatcgcgaattgcgtacacggcggcgcgccgctcggtagcgtcgccagagagagaactacctgagtccctccggccgaaagagtaaagaccgcgaaaa

SEQ ID NO: 1867 - DNA, 168 bp, Glycine max
  Clone ID: LIB3072-029-Q1-E1-F8
ttgggctgatttatgtgcttgcatggtcgtgatagatgatagaaggtcctataatcaatcaaaaaagctccttacagtgttggaaaaacaaagagtattgagtgctcccgtctctccctctccccgcgttcctattattctacattcattcctagttactgtctacca

SEQ ID NO: 1868 - DNA, 74 bp, Glycine max
  Clone ID: LIB3072-029-Q1-E1-F9
aaatctaacaacttctcctcctaatataaaaaattatctcctcatgtcctccacgacggtcccacattacttcc

SEQ ID NO: 1869 - DNA, 392 bp, Glycine max
  unsure at all n locations
  Clone ID: LIB3072-029-Q1-E1-E1
tttgggctgatttatgtgcttgcatggtcgtgagaagttaataaaaggggccccgccggacgcaaaattacgggacgacgaaggcgatacgaaaaagtccgaagaactagcgagactcgcctagacggaaggccgtcccggggcgtacttaaatccgccttcgccggacatggcaccaagaaatcgtanaccacgtccatcaccgcggacgattcagccctcgccgacatctccaccgaggaatactctatagccgagtttactaacgaacacgcttagagccgcgataccgcggttcctaacaaaacacaaatcataactggcgggacccggagactacggtaatcgggagaaccgtaagccccagaaatcacgcctcagggggaatcatt

SEQ ID NO: 1870 - DNA, 310 bp, Glycine max
  unsure at all n locations
  Clone ID: LIB3072-029-Q1-E1-C5
tggaactttgggctgattgatgtgcttgtttatgtgcntgcaggtcgtgagaagatgatagacaggcataatagccaaaaaacaacacggccgtgacttacttgtaagaagggaagggaaaaaaagaaaaagggtggttgtctcagaggacttaagtccatgcatgtgcgtacgtgatgctacagtctcctcacagcgctattcaaacctaacctatcggttgctgccccataatgctgcgatcgggaaaatttcggtgccatttaatccaactgttccgtagtatactttttccctgttagtcggtgca

SEQ ID NO: 1871 - DNA, 425 bp, Glycine max
  Clone ID: LIB3072-029-Q1-E1-C6
tttgggctgattgatgtgcttgtttatgtgcttgtttatgtgcttgtttatgtgcttgtttatgtgcttgtttatgtgcttgtggatgtgcttgtttatgtgcgtgtttatgtgcttgcatggtcgtgagatgatagaaggggatatcgaccgagagaagaacaacggaggtccatatcaaggccgcccgtacctccggatccccaacccccgcaagtaccctagacacctacagagcggagggcgtaggggaacgcgggaggctcatcatcttagacaacgaagtaacaaagtccaccttccgcgctctcgttgcaaaagacgaaaacgccaaagccatcaagaaccgtcgcgtctagactgagaaatccggtaagaatttcagccgctcgcgcgtcggcacgtctcttaatatagtaaaaacg

SEQ ID NO: 1872 - DNA, 326 bp, Glycine max
  Clone ID: LIB3072-029-Q1-E1-C7
tggaacctttgggctgatttatgtgcttgcatggtcgtgagatgatgatagaacgccctcgtcgtaagatgatgatagatggtcgtggtcgtcagatgatgatagagggtcgtcgtcgtaagatgataatagaaggtcgtcgtcgtcagatgataatagaacgtcgtcgtcgtaagatgatgatacagcgtcatcgtcgtaagatgataatagaaggtcgtcgtcgtgagatgatgatagaacgtcatcgtcgtgagatgattatagaaggggccacagcgacactcccaacaaccagcgccaagaatcgtcatcaacctgcaaaa

SEQ ID NO: 1873 - DNA, 353 bp, Glycine max
  Clone ID: LIB3072-029-Q1-E1-C8
tgggctgatttatgtgcttgcatggacgtgataagatgatagaacgcgctcctatataatcaatcaaaaattctccttgcaggtccttaaaaacgaagagtgttactcctctcctctctccctctccccgcgttcctattattctacattcattcctagttactctcgaccctgcgtctgacaacgaaagcaatttctccgaaaacggcggtatacaccacactccgctagatacaatactactcggcgtaacaagagtaatttcaatcgtaaatcaaccacgtttctctatcgaggagtaactctataacgagtctcataataggaccggaataactactctgcatttacac

SEQ ID NO: 1874 - DNA, 430 bp, Glycine max
  Clone ID: LIB3072-029-Q1-E1-C9
ggttggaactttgggctgatttagtgcttgcatggtcgtgagaagatgatagaaggggatagtaaaaataaccaacaaagacgagcccgaagaataatacggcggcgtcaaaggcgcgcccgccgtcctccccttccgcgggggccatagtcgtatgtacggaatcgagtcctcctaaaagcgactagctactaagccacgacgacgacgagcacctaaaattacgtcgcgactctcgtacgcgtatatgtctaacgttcttctaacgtagtcgcgaagacaccaggtcgaacctacgttatctagaccgcaagagtcgcacgcgtatatgtctatagttaggatagcgctgccgctccgatattaatgatcctcgtcataaattccgtaagcttagagacgatcagaaaaatcaacagtctctctaaac

SEQ ID NO: 1875 - DNA, 445 bp, Glycine max
  unsure at all n locations
  Clone ID: LIB3072-029-Q1-E1-D1
gttggaacctttgggctgatttatgtgcttgcatggtcgtgagagtgattagagggggatagtananataaccaacaaagacgagcccgaagagtaatacggcggcgtcaaaggcgcgcccgccgtcctccccttccgcgggggccatagtcgtatgtacggaatcgagtcctcctaaaagcgactagctactaagccacgacgacgacgagcacctaaaattacgtcgcgactctcgtacgcgtatatgtctaacgttcttctaacgtagtcgcgaagacaccaggtcgaacctacgttatctagaccgcaagagtcgcacgcgtatatgtctatagttaggatagcgctgccgctccgatattaatgatcctcgtcataaattccgtaagcttagagacgatcagaaaaatcaacagtctctctaaacggatgaagttttccc

SEQ ID NO: 1876 - DNA, 367 bp, Glycine max
  unsure at all n locations
  Clone ID: LIB3072-029-Q1-E1-D10
tggaantttgggctgatttatgtgcttgtttatctgcttgtttatctgcttgcatcgccgtcagaatgatagaagggcatggtcggcaggggatcatagaggggcagggtgcgtgacaagatcatagaagggcatcgtcgtcagaagatgatagaaggaataagaatcggtaaaaagagagtaagaaaggaggtgctcagaacaagcactcggaaagggagaagaggaggaacaatatgtacgaagagggtatgaaaggagaaaagaagaagaagaaatagtatcgagggaataagaatacgaataggtcgaaagatagtcaataaaagacagaaaagaggagataaaaggacgaataccgccaacg

SEQ ID NO: 1877 - DNA, 454 bp, Glycine max
  Clone ID: LIB3072-029-Q1-E1-D11
tggaacctttgggctgatttatgtgcttgcatggtcgtgagaagatgatagaaggggatagtaaaaataaccaacaaagacgagcgggaagaataatacggcggcgtcaaaggcgcgcccgccgtcctccccttccgcgggggccatagtcgtatgtacggaatcgagtcctcctaaaagcgactagctactaagccacgacgacgacgagcacctaaaattacgtcgcgactctcgtacgcgtatatgtctaacgttcttctaacgtagtcgcgaagacaccaggtcgaacctacgttatctagaccgcaagagtcgcacgcgtatatgtctatagttaggatagcgctgccgctccgatattaatgatcctcgtcataaattccgtaagcttagagacgaatcagaaaatcaacactctctctaaaacggtcaaattttcccaggtcccgcc

SEQ ID NO: 1878 - DNA, 472 bp, Glycine max
  unsure at all n locations
  Clone ID: LIB3072-029-Q1-E1-D2
cttggaacctttgggctgatttagtgcttgctggtcgtgagaagatgatagaaggggactccaaccctaaactacaaaacctccttattgagccacgggcccttccgcgccgtcctcccctctttctccaggctctctcctcagccttagtacactaatctactgccttacaccggattccgattcaattaagcccattatatagaaataggcgctcctatcgccttaatcacggaagagcgagtacggatgcgctcattacaattatgaagaagaggtaaagagatccgagacccctaagaacaatccgaatcacactagggatacgaacgtaaatagaaaactattttacctctactgcccaggaccgaataagcccgtcgatactatcttctaagagcctagtaaaaagcatccgtaagtctttaaggacgcgctgtagtaaactaaaacggttaatangaaaacgaag

SEQ ID NO: 1879 - DNA, 452 bp, Glycine max
  Clone ID: LIB3072-029-Q1-E1-D3
gttggaacctttgggctgatttatgtgcttgggtcgtgagaagatgatagaaggggatagtaaaaataaccaacaaagacgagcccgaagaatgaatacggcggcgtcaaaggcgcgcccgccgtcctccccttccgcgggggccatagtcgtatgtacggaatcgagtcctcctaaaagcgactagctactaagccacgacgacgacgagcacctaaaattacgtcgcgactctcgtacgcgtatatgtctaacgttcttctaacgtagtcgcgaagacaccaggtcgaacctacgttatctagaccgcaagagtcgcacgcgtatatgtctatagttaggatagcgctgccgctccgatattaatgatcctcgtcataaattccgtaagcttagagacgatcagaaaaatcaacagtctctctaaacggatgaagttttcccaagtcccg

SEQ ID NO: 1880 - DNA, 419 bp, Glycine max
  unsure at all n locations
  Clone ID: LIB3072-029-Q1-E1-D4
gttggaacctttgggctgatttatgtgcttgtggtcgtgagaagatgatagaaggggatagtanaaataaccaacaaagacgagcccgaagaataattcggcggcgtcaaaggcgcgcccgccgtcctccccttccgcgggggccatagtcgtatgtacggaatcgagtcctcctaaaagcgcctagctactaagccacgacgacgacgagcacctaaaattacgtcgcgactctcgtacgcgtatatgtctaacgttcttctaacgtagtcgcgaagacaccaggtcgaacctacgttatctagaccgcaagagtcgcacgcgtatatgtctatagttaggatagcgctgccgctccgatattaatgatcctcgtcataaattccgtaagcttagagacgatcagaaaaatcaacagt

SEQ ID NO: 1881 - DNA, 235 bp, Glycine max
  unsure at all n locations
  Clone ID: LIB3072-029-Q1-E1-D5
gatagtatagtatctcccgtactatattcnacnaaaaaaaaaaaaaaaaaaaaaaaaaggtggttgtctcagaggacttaagtccatgcatgtgcgtacgtgatgctacagtctcctcacagcgctattcaaacctaacctatcggttgctgccccataatgctgcgatcgggaaaatttcggtgccatttaatccaactgttccgtaatatactttttcccctttagtcggtgc

SEQ ID NO: 1882 - DNA, 325 bp, Glycine max
  Clone ID: LIB3072-029-Q1-E1-D6
tggaacctttgggctgatttatgtgcttgcttatgtgcttgaatagtcgtaaaagatgatagaagggcatggtcgtaagaagatgatagaggggataacaaaaacgaaaacgttgaagtaaaaaacaaaaacaaaaaccaaccgtggtttctcagaggacttaagtccatgcatgtgcgtacgtgatgctacaatcacctcacagtgctattcaaacctaacctatcggttagtgccccataatactctgatcgggaaaatttcagtgccatttaatccaactgttccgtagaaaactttttcccctttagtcggtgcaacaatg

SEQ ID NO: 1883 - DNA, 451 bp, Glycine max
  Clone ID: LIB3072-029-Q1-E1-D7
tggaacctttgggctgatttatgtgcttgcatggtcgtgagagatgatagaaggggataatataaatacctctcttaccgctcccgagatatctactattacggttaagtccgcctcccttttcccgcccttcctcccctagcggtcgtcctgtctcgagagagtaggtatagtaaaacgagcgttagacttaaaagtcgaacgtttctaaattggacaattgcacagagctggaaggcgggcctaccgagattcggaatttcaataataagttaccttagcgcgttggcgccgtttctctctgtcgtatttccaattgtaacgtttcctgcagattccttcatattaatggcttttaagaaactcatacataataaggcaacggcacccccggtacgacacctttgggccgcttcagtatccactaagagttgtaagaactctagtaatg

SEQ ID NO: 1884 - DNA, 362 bp, Glycine max
  Clone ID: LIB3072-029-Q1-E1-D8
tggaacctttgggctgatttatgtgcttgtttatgtgcttgcatggtcgtgagaccatcatagaaggggatctctactataccaccgcacactaaccccggccaggaggtccgaaaaagtaagacaaaaaaaaacattaattacggtaattaccctcgactaattcagagggattcatcttcacggaattccacacggagtatttcacggaattatgcacgagattaatattagtaccaataatttattcctatgttacatagcgaaacctacaatcgtcgttatcaccggtactatatctccgtcttcgctcgggccgatttctataggtatcgctacaagcccgactaccgtaatttctc

SEQ ID NO: 1885 - DNA, 414 bp, Glycine max
  Clone ID: LIB3072-029-Q1-E1-D9
tggaacctttgggctgatttatgtgcttgcatggtcgtgagaagatgataaaagggcatggtcgtgagaagatgatagaagggcagggtcgtgagaagatgatagaagggcatggtcgtcagaagatgatagaagggcatggtcgtgagaagatgatagaagggcatggtcgtgagaagatgatagaagggcatggtcgtgagaagatgatagaaggggaagccgaagaagttcgaatgccacgcaaaaaaaaaaaaaaaaaaaacaaaaaaaaggtggttgtctcagaggacttaagtccatgcatgtgcgtacgtgatgctacagtctcctcacagcgctattcaaacctaacctatcggttgctgccccataatgctgcgatcgggaaaatttcggtgccatttaatccaa

SEQ ID NO: 1886 - DNA, 359 bp, Glycine max
  Clone ID: LIB3072-029-Q1-E1-C4
gttggactttggctgtttagtgctgctggtcgtgagaagtgatagaaggggataatatacttcaaacaagtactacaaacctacgagctgcctggcttccttccttccttcttgtctcagcgcacgttatctcggccaaccactacatttttcctcaggtacagcctcctctttctcgcctctcacctcatatcgcgaaactaagacgaaggcagtacccgcagtcgcctcatccacccgttccgcttcaagtcttcttccgcctgaggcgctaacggttggcctcgtccctcgtcttcttaagcgtgtgaagaggcgcctcagggtcgggacgaaggataggcgtatgaggcctcgtg

SEQ ID NO: 1887 - DNA, 186 bp, Glycine max
  Clone ID: LIB3072-029-Q1-E1-A5
ccaacaaagacgagcccgaagaataatacggcggcgtcaaaagcgcgcccgccgtcctccccttccgcgggggccatagtcgtatgtacggaatcgggtcctcctaaaagcgactagctactaagccacgacgacgacgagcacctaaaattacgtcgcgactctcgtacgcgtatatgtctaacg

SEQ ID NO: 1888 - DNA, 408 bp, Glycine max
  unsure at all n locations
  Clone ID: LIB3072-029-Q1-E1-A6
tggttggaacttggctgtttagtgctgctggtcgtgagaagtgatagagggggatagtanaaataaccaacaaagacgagcccgaagaataatacggcggcgtcaaaggcgcgcccgccgtcctccccttccgcgggggccatagtcgtatgtacggaatcgagtcctcctaaaagcgactagctactaagccacgacgacgacgagcacctaaaattacgtcgcgactctcgtacgcgtatatgtctaacgttcttctaacgtagtcgcgaagacaccaggtcgaacctacgttatctagaccgcaagagtcgcacgcgtatatgtctatagttaggatagcggctgcgctccgatattaatgatccccgtcataaattcccgtagcttagagacgatcagaaaaat

SEQ ID NO: 1889 - DNA, 267 bp, Glycine max
  Clone ID: LIB3072-029-Q1-E1-A8
ttggggtgattgatgtgcttgcatggtcgagataagtcatagagccgctcgtcgtgtgaagatgatcaaacgcgcagtgggcgtacacaagatgatagaggggcgtcgtccttacaagatgatagaagggggaaaaataaagttattcgtgtcaaatacaacctaaaaacgactaactactgtggctctctcacaggacttaagtccattcatgtgcgtacgtcatgctccagtctctttacagcgctattcaaacctaacctatcg

SEQ ID NO: 1890 - DNA, 329 bp, Glycine max
  Clone ID: LIB3072-029-Q1-E1-A9
tggatggaacctttgggctgatttatgtgcttgcatggtcgtgagaagatgatagaagcgcgaagaaagaaagtgagaaaataagaagcagggagaagaacggagagaacggaggaaaaggtaaaagtcgagtagaagaagacaggcacgattgagatccggccgaagaagtattgctcctcccataacggagttatcaggtatttctccaccaccagtacctgtgacggtattactaatatcgtccttcctaaaatacggtctgtataggaccatccgcctgcctgggtgcccgctttacccgcggtcagcgcgtcgacaaaagtgcg

SEQ ID NO: 1891 - DNA, 292 bp, Glycine max
  Clone ID: LIB3072-029-Q1-E1-B1
tccctgcccgccggcgtcctctcagccttccaaatctctcgccttaaaacttccagaaaaggcaaaaaacccacaaaaaaaaaaaaaccaaaaacggcggccgcggccctttaagaaaacgccgcggtaccggccctctgcattggcagggagccgtaatgccacagaaaaggctgctgttaagccgcgggacgtacattgcatagacccaagaccggggagaagatccgtccggacgccctcgacgaaccggaagcctcggccaccagcctctagaaaggaaaaaggacgt

SEQ ID NO: 1892 - DNA, 371 bp, Glycine max
  Clone ID: LIB3072-029-Q1-E1-B10
tggaacctttgggctgatttatgtgcttgcatggtcgtgagaagatgaagaagggtatggtcgtgagaagatgatagaagggcatggtcgggagaagatgatagaagggcatggtcgtgagaagatgatagaagggcatggtcgtgagaagatgatagaagggcatggtcgtgagaagatgatagagggaccatagccgttcacgttggatcacgtccgccccgctcccatactcccgttgagcgtctctaactaaccattcctcctgggagaatcatcgaaatcgaagaataagatattactactcaaccgcaatacaatcatctacccctgtcaccgcacgctccttttgctaagaacaaactactccc

SEQ ID NO: 1893 - DNA, 53 bp, Glycine max
  unsure at all n locations
  Clone ID: LIB3072-029-Q1-E1-B11
tggaacntttgggctgattgatgtgcttgcatggtcgtgagaagatgatagaa

SEQ ID NO: 1894 - DNA, 389 bp, Glycine max
  unsure at all n locations
  Clone ID: LIB3072-029-Q1-E1-B12
ggaantttgggctgattgatgtgcttgcatggtcgtgagaagatgatagaaggccgtataaaataaagtcaaacctaattaatagtagagtgtatacccctaccctggacgacattttctcgtgtagaagattctagaaaacaccctgacggtgggaatttcaaactctatgttctttattggcgttggtaggatctcttggttcttgcctaggactctaacctgggtacctatggtgatggtgactgacctttggtgagtggtgagttctcacgaggcgccttggactaagtagaatgtccttgtggcggagacaaagctggtacattcgaattccgtgaaggcgcactatttcgacctggtgtcttgctcgctggaactggatgaat

SEQ ID NO: 1895 - DNA, 374 bp, Glycine max
  Clone ID: LIB3072-029-Q1-E1-B2
tggttggaatttggctgtttagtgctgcaggtcggaagatgaagagggctggtcgtgagagatgatgagggctggtcgtgagagagatgatagagggcatggtcgtgagaagatgatagaaggggcttggatcatcacgtgaactaaagcagaagaacgactaggaataataaaagaacaaattaaaaaacaagtcccgcaagaaccataaagacaatatattcgccacgacaaaaactgccgtccccttcgagacaaaaactaaagtcccagctccgcttgggtccccacgtgaaataaagcagcagaaggacgaggaatatttaaataacaaattaaaaaaaaccaagtcccgaaagaatcataaagaaaat

SEQ ID NO: 1896 - DNA, 450 bp, Glycine max
  unsure at all n locations
  Clone ID: LIB3072-029-Q1-E1-B3
tggttggaacctttgggctgatttatgtgcttgcagtcgtgagaagatgatagaaggggtcttaatccacgaagataaggacggcgatcggacgtccgccggagacgccttacggaatacgcccgcacttcttcgtaagaggtcgaagacaactaaaggactagaagtaaagggcccgggccgcccgcgattaataaaatccataaaagtaaaagtaagacagctacgagactcctagagataaacatttcccgcgccgcgtaagtaagcatacggcgccccacgagaatctacacacagcccaccacaggaaaacagacgaacacacacacatatgccacccccctcccaccaaccctaatagaggtggtcccgaggctcgtccctcaaaccacacgcaacaccttctctaaaaagaaagaggaaggaaacaccaggaaagccnacctt

SEQ ID NO: 1897 - DNA, 437 bp, Glycine max
  Clone ID: LIB3072-029-Q1-E1-B4
tggttggactttggctgtttatgtgctgctggtcgtgagaagatgatagaaggggatagtaaaaataaccaacaaagacgagcccgaagaataatacggcggcgtcaaaggcgcgcccgccgtcctccccttccgcgggggccatagtcgtatgtacggaatcgagtcctcctaaaagcgactagctattaagccacgacgacgagcacctaaaattacgtcgcgactctcgtacgcgtatatgtctaacgttcttctaacgtagtcgcgaagacaccaggtcgaacctacgttatctagaccgcaagagtcgcacgcgtatatgtctatagttaggatagcgctgccgctccgatattaatgatcctcgtcataaattccgtaagcttagagacgatcagaaaaatcaacagtctctctaaacggatgaaattttc

SEQ ID NO: 1898 - DNA, 321 bp, Glycine max
  Clone ID: LIB3072-029-Q1-E1-B5
tggttggaactttggctgatttagtgcttgctggtcgtgagaagatgatagaagggggtctgaaaagcagcattaagacggtcctagccgcgcactcttctcccggtccttactctaccgccactacgctaagccttccatttgtaatcagcgaggcgcccgtaaaatagcacttacttatagaatttgcggaagaaaaatctatttaatcttatcctcacccttacaataatacaatgggggaatatttaatcgtcacgaaaatcgccccgttcttcaaagggcttacctacggccccggggtcatccatacgacggacg

SEQ ID NO: 1899 - DNA, 417 bp, Glycine max
  Clone ID: LIB3072-029-Q1-E1-B6
tggttggactttggctgtttatgtgctgctggtcgtgagaagatgatagaaggggatatctaaaatgaaataaagaagaaaaaaaaaatctaaatattcctaagaatccgcactccctcccgccagcacccgccatcataaccccatacctcccctactctcatacaccctaccagctacggtattctaagtagcccttcctaagcttcctgttgccgtctccaccgcggtgtcccctcctcttgttcttgtctcggatccagccctggggtagctgttggcgttggtgttggtgttggtattagacgttggagtagtcggacttgcgctgagtctggctgttacgaccggagtccttgccgcgaccctaccgtctgttactcctaagtatcgaaaaacaactcgacgacggactga

SEQ ID NO: 1900 - DNA, 403 bp, Glycine max
  Clone ID: LIB3072-029-Q1-E1-B9
ggttggaacctttgggctgatttatgtgcttgcatggtcgtgagaagatgatagaagggggcctcgagaccgagtctacgccgggcgcgggcgagaaagaatctataacagagaataataatataaccttacggtcgaccccgatctaatccacagcttcttcctcttctcccgtgtcttctccccctcctattttttctttaccgggctttgatgattattattataataattccgctattgttgatatgtttttcttcttgataattctccttagcgctcctccccctgatgacacctaaacctagtagaccgatcttttgcccatcaactatgacctactgtttatctacttattaattattccgtagggcgggtagaattcaccaccaaaaggtgaaac

SEQ ID NO: 1901 - DNA, 399 bp, Glycine max
  Clone ID: LIB3072-029-Q1-E1-C1
ggttggaacttggctgattagtgctgcatggtcgtgagagatgataggagggggaccgtcaaataaaaagaagtacgctcaactactagtatgcagcctagattctgttattgaaatcacctggccctttatcaatagagtaggaggaaccgaacctagacgtagaaagaaaacatgaggccggagaggatagaaaacctagacgttatcatcgtaaatgagcacctggaaatctctaggttccagggggttattaaaatgtttataagaaagagtgctagagggtgaggtgcccttaaacttatatctacagatgtcttaccgcagtattactcctcgtcctcgcctctaatctatacgtaacaacaagactagcattcctagccataggcatcatgt

SEQ ID NO: 1902 - DNA, 83 bp, Glycine max
  Clone ID: LIB3072-029-Q1-E1-C12
tggaacctttgggctgatttatgtgcttgcatcgtcctcacaagatcatagaagccccatactaaaaataaccaacaaacacg

SEQ ID NO: 1903 - DNA, 382 bp, Glycine max
  Clone ID: LIB3072-029-Q1-E1-C2
gttggaactttgggctgatttatgtgcttgcatggtcgtgagatgataagaagggactaagaattagcctaacacttcagcatattgcaccgaagaacccaagacacatcacgacgagagtgtggcctttaccatcgccgtcgggagccgccccttcggtactagccctcgctctacccggtaccgtgcaccgggaaaagtagaattttagctataataagcgttcttgaagccgtaacagtgagaaagatcttcataggaattaagtacgttatgtctgccgtaattcttccaaggcggaggaagaagaagaacgtgaagaaggctaaaccttatgattatgattataatatttggagagggaatgctagtaatatggcga

SEQ ID NO: 1904 - DNA, 459 bp, Glycine max
  Clone ID: LIB3072-029-Q1-E1-C3
tggttggaacctttgggctgatttatgtgcttgcatggtcgtgagaagatgatagaaggggagagcgagaaagagagagagagagagagaaatcgagagaaacctgtaaatttcaaccctggaaagactggtgacggtcgttcttaaggactgtgagaatcctgctcatactgttaagtctgttgaataggttgagtgacatgaagagacggcggaactaacgaagaatgccgtgaactctgatgccgaatcgatcgcggaggagtggaacccatccctcgccgggcataagaacgcgaccggcgtctggagagtactgcggaggacttcgctccttaccgagtaaaaggaagaaataaaagggaatgagccgaacgtgaagtggaccaaagagcataggtagaaagccgaaccggagtccctaaatactcgcaacgacgccacgatagcgaacgacga

SEQ ID NO: 1905 - DNA, 364 bp, Glycine max
  Clone ID: LIB3072-029-Q1-E1-A4
gttggaacctttgggctgatttatgtgcttgcatggtcgtgagaagatgatagaaggggacctatataatcaatcaagaaagctccttacagtttttaaaaacgaagagtattactcctcccgtctctccctctccccgcgttcctattattctacattcattcctagttactgtcgaccctgcgtctgacaacgaaggcaatttctccgaaaacggcggtatacaccacactccgctagatacaatagtacccggcggaacaagagtagttttaatgggaaacgaaagacgtttctctatcgcggcgtaactctgtaacgagtctgataaagggaccggaataactactctgcttttacactg

SEQ ID NO: 1906 - DNA, 168 bp, Glycine max
  Clone ID: LIB3072-028-Q1-E1-F2
aatggagtagagacatgaggggacagcagagacaattaataaagatgagtttgatgaacaacatggtggtgctgaaggtgtgtttgagtgttcttttccttgtggtggttagagctgctggcatggaactgagcttcttcacaagtgatcagtcatcacgttatgatg

SEQ ID NO: 1907 - DNA, 164 bp, Glycine max
  Clone ID: LIB3072-028-Q1-E1-F3
gacagcataaacaattaatacagatcactttgttgataaagatagtggtgcgaaaagtatgtttagttgttcttttcctatgattgcgttagatcatgacacatagaactcagcttcagcaaaagtgatcattcatcaatttataatgatgaggattattcaaa

SEQ ID NO: 1908 - DNA, 325 bp, Glycine max
  Clone ID: LIB3072-028-Q1-E1-F5
gattcacgggtctagctaagaaagtcttcgatgggcccccagatatgaagagcaccagctggctgtgctctctttctcttttgtgcgttcacgacgtcatatctaccttcagcgatcgctgatttcgtgctcgatagtgaaggtagccgtcttgacaatggtggcacatagtattggttgggacggagggcagcatttcgggggataggtgcagcgcctacggggaatgcaagatgccctctcactgtggggcaatggggcagtgagctcgacgtatggattgggtcaatcatctcgtcggcatatcgtgtccgttttatcgccg

SEQ ID NO: 1909 - DNA, 246 bp, Glycine max
  Clone ID: LIB3072-028-Q1-E1-F6
gacagcaaaaacagttaataaagatgagtttgaagaacaacatggtggtgctaaaggtgtgtttgttgcttcttttccttgtgggggttacagctgcacgcatggaactgagcttcttcaaaagtgatcagtcatcaagttatgatgatgatgagtagtcaaaaccatgctgtggtctggggagtgtcacacgctcaatgccgcctgaatgcagctgtcgatgtattaggctgaagtcatgccact

SEQ ID NO: 1910 - DNA, 287 bp, Glycine max
  Clone ID: LIB3072-028-Q1-E1-F7
ggggacttttatagcctgtgcggatctcagcaatgtctctgaaactcacgacgcttatgcagaccccttgggcttcaacggtcaatgagcgtccccatgtaaaggcttggtgggaagatatctcttctaggcctgcgttcactaaggttgggggaggaatgacgtttgggcaggatgaggaagaatgactagtattttgtgacgttcaattggtacggaatttgttgcagtgtctagtgcgagcaaggactggaatctagtgatgggtgttccggaaaacttgtttc

SEQ ID NO: 1911 - DNA, 313 bp, Glycine max
  Clone ID: LIB3072-028-Q1-E1-F8
gacagaagaaaaaagagaagaagatgggtttgaagaacaacatggtggtgctaaaggtgtgtttggtgctacttttccttgtggggggtactactagtgccaacttgaggctgagtaagcttggcctgctcatgaaaagtgatcatcatcaacactcaaatgatgatgagtcgtcaaaagcgtgctgtgatcaatgcgcatgcacaaagtcaagccctcgtcaaggccgctgttcaaaatataagctgaattcctgccattcagctcgcagatcctgtatttgcgcattatcgtatcctgcacaatgtttttg

SEQ ID NO: 1912 - DNA, 157 bp, Glycine max
  Clone ID: LIB3072-028-Q1-E1-G2
agaagacgacacgatggggaagcatttgagactaactcttagagagaaatggtgatggctgatacaggtggaggagatgcatgtcggaccagcggtaatatggtataggaagttgggctgcacacttccatgcactggtggttccacttgcaggtgc

SEQ ID NO: 1913 - DNA, 325 bp, Glycine max
  Clone ID: LIB3072-028-Q1-E1-G4
gaatctcttcacagaagaaaaaagagaagaagatgggtttgaagaacaacatggtggtgctaaaggtgtgtttggtgctactttgccttgtggggggtactactagtgccaacttgaggctgagtaagcttggcctgctcatgaaaagtgatcatcatcaacacgcaaatgatgatgactcttgagaagcatgctgtgatcaatgcgcatgcacaaagtcaaagccgcctcaatgccgccgttcagatataaggctgaagtcgttgcattcagcgtgcaaatcttggatttgcgcattatcgtatcctgcagagtgttttggtgt

SEQ ID NO: 1914 - DNA, 263 bp, Glycine max
  unsure at all n locations
  Clone ID: LIB3072-028-Q1-E1-G5
gacgacagatggggattcccaaaatgtctcattctccctttcctctgcgaagcctcgatcactctcacgcgctcctagagtcgctcctccaccgtctgtctctcgaacaaccacaacaccatcttcatcgcatggcaaacgcagcatctggtatggcagtccaggatgactgcaagtggaggtttttgggggtgagggcgcgttggacacaccgtttcagantgtgtaaggttgacgancggcagaagcaggtcattgtggag

SEQ ID NO: 1915 - DNA, 314 bp, Glycine max
  Clone ID: LIB3072-028-Q1-E1-G8
gacagcaaaaacaattaataaagatgactttgaagaacaacatggtggtgctaaaggtgtgtttgttgcttcttttccttgtgggggttacagctgcacgcatggaactgagcttcttcaaaagtgatcagtcatcaagttatgatgatgatgagtattcaaaaccatgctgtgatctgtgcatgtgcacacgctcaatgcctcctcaatgcggctgtgaagatattaggctgaattcatgccactaggattgtgagagcggtgtgtgtgcacgctcacaagcaggacagtgtcgttgtcttgaaagcaacgac

SEQ ID NO: 1916 - DNA, 146 bp, Glycine max
  Clone ID: LIB3072-028-Q1-E1-H2
gacggcaaaaacaattaataaagatgagtttgaagaacaacatggtggtgctaaaggtgtgtttgttgcttcgtttccttgtggcggttacagctgcacgcatggaactgagcttcttcaaaagtgatcagtcatcatgttatgat

SEQ ID NO: 1917 - DNA, 305 bp, Glycine max
  Clone ID: LIB3072-028-Q1-E1-H3
gattcacacaactaactaagaaagtcttccataagcccccaaaaatgaagagcaccatcttctttgctctctttctcttttgtgccttcagcacctcatacctaccttcagccatcgctgatttcgtgctcgataatgaaggtaaccctcttgaaaatggtggcacatattatatcttggtacgggtggcagcatttggtggaataggagcagccccgacgggaaatgaaagatgccctctcactgtggtgcggtctcggagtgagctcgacaaagggattgggacgatcatctcgtccccatat

SEQ ID NO: 1918 - DNA, 247 bp, Glycine max
  Clone ID: LIB3072-028-Q1-E1-H4
gacagcaaaaacaattaataaagatgagtttgaagaacaacatggtggtgctaaaggtgtgtttagtgcctcttttccttgtgggggttacagctgcacgcatggaactgagcttcttcaaaagtgatcagtcatcaagttatgatgatggtgagtattcaagagcatgctgtgatgggggcgggggcgcgcgggcaatgcctcctgaatgcagcttggaagagattgagctgaattcatgccactc

SEQ ID NO: 1919 - DNA, 229 bp, Glycine max
  Clone ID: LIB3072-028-Q1-E1-F1
gacaggtgtttgcaatactagcgatagctgatgaagagagataccaacaagaaaagacggtgagaagagttgagattccctttgaagaaaagatggcatcccataggcaaagctatgaagctggtcaaactaagggccgaactgaggaaaagacgaaccagacgatgggcaaaggtggggagggagggcaagctgcaaaggagaagacgcagcgaatggcccaagctgc

SEQ ID NO: 1920 - DNA, 308 bp, Glycine max
  Clone ID: LIB3072-028-Q1-E1-H7
ccaagaagaaactggacccaaagtaactgcatgaggcttagagatcaacccatttaaagaatctacctaccaacctaagagactggacccaaggccttagctttaggtcagttagatgatatgtttgcatcatgttatccgtagcttcaagtttctgtaacttggtgtggacggaagggtttcaaaccttcaatccatccttcgcttgcttttgtcaaaatgttatggtgaataaggggggaacgagatggaaaaaaatcggactgtttcaggtactgatattgtaaaagctgccgaaagtattcaaa

SEQ ID NO: 1921 - DNA, 299 bp, Glycine max
  Clone ID: LIB3072-028-Q1-E1-H8
gataccaaaaacaaaacacaagccaagtgaaagtgagaaaaaataaaaatcagggagcataaggtcagggatcattcacaggattggggagacccttcatgtgggagggcacaagaaggaggaggagcataagggtgagcaccatgctggagaatacaaaggggagcaccatggggaacagggtagtgactacaaaggagagcatcagggtgaagacaaagctggagagtaccatggggaggacaagccagggcacaaggaggggttcctaggcaaagtcaagggcaagattcatggtg

SEQ ID NO: 1922 - DNA, 253 bp, Glycine max
  Clone ID: LIB3072-029-Q1-E1-A10
tggaacctttgggctgatttatgtgcttgcatggtcgtgagtagatgatagaacgccacctatataatcaatcaacaaagctccttgcagttttttaaaatcgaagagtattactcctctcgtctctccctctccccgagttcctattattctacattcattcctcattactgccgaccctttctctgactacgaatgcaatttctccgtaaacggcagtttacaccacacctcgctatataccatacttccc

SEQ ID NO: 1923 - DNA, 398 bp, Glycine max
  unsure at all n locations
  Clone ID: LIB3072-029-Q1-E1-A12
tggaantttgggctgatttatgtgcttgcatggtcgtgagaagatgatagaaggccacacgtatactacataaagtacccaacctgaagtccaagcctaccttccgggcggcgtccctccttctaaaattaaatacgctgaatatacgtggtaatcgtgatcgtgtcgataagatcagtcgtattaagggaaatagtcacggcgccaccgcagagatcgagaagagccatactgagatcgccgctacggacgccttactagtcgagtacgacgggaagcgtaagcgcggtatcaatcgtatccgtatcgatcgtattcgcggttaccaaggaacacgcacgaaaacgcaaccgttacgcgcccggtaacataaacacttaaacaacgcaactcctgca

SEQ ID NO: 1924 - DNA, 409 bp, Glycine max
  unsure at all n locations
  Clone ID: LIB3072-029-Q1-E1-A2
gacctttgggctgatttatgtgcttgcatggtcgtgagaagatgatagaaggggatagtanaaataaccaacaaagacgagcccgaagaatagtacggcggcgtcaaaggcgcgcccgccgtcctccccttccgcgggggccatagtcgtatgtacggaatcgagtcctcctaaaagcgactagctactaagccacgacgacgacgagcacctaaaattacgtcgcgactctcgtacgcgtatatgtctaacgttcttctaacgtagtcgcgaagacaccaggtcgaacctacgttatctagaccgcaagagtcgcacgcgtatatgtctatagttaggatagcgctgccgctccgatattaatgatcctcgtcataaattccgtaagcttagagacgatcagaaaaat

SEQ ID NO: 1925 - DNA, 257 bp, Glycine max
  Clone ID: LIB3072-029-Q1-E1-A3
agtgctgctggtcgtgagaagatgatagaaggggcccctactaatatactgccaattaaaaaaagacgagttggacaaaaaaagtggatgtgctcagaggactgtggttcactcatatgacttaagtccatgcatgtgcgtacgtgatgctacactcacctcacagagcgattcaaacctaacatatcggttgacgccacataatgctgtgatcgggaaaatatcggtgccatttaatccaactgctccgtagtata

SEQ ID NO: 1926 - DNA, 181 bp, Glycine max
  Clone ID: LIB3072-028-Q1-E1-B4
gcgtccgaatggcaagaagacgacagaaagggaaactcatacacggaaaataaataagaatttagaaaccttagctaagtcaccatgtctccaaaatcaaaggctaaagcaatgttcttcatcgtgaaaataataatgttaaatcttttggcatcaatatatgcatgtgggccatgcactc

SEQ ID NO: 1927 - DNA, 303 bp, Glycine max
  Clone ID: LIB3072-028-Q1-E1-B8
gacagcaaaaacaattaataaagatgagtttgaagaacaacatggtggtgctaagggtgggtttgttgcttcttttccttgtgcgggttacagctgcacgcatggaactgagcttcttcaaaagtgatcagtcatcaagttatgaggatgatgagtattcaaacccatgctgggatcgtcgcgcaggtgcacacgctcaatgcctcctcaatgcgtctgtgatgatattaggctgaattcatgccactcagattgcgggagcggtatgtgtgcacgctcacacgcaagacagtttcgttgtct

SEQ ID NO: 1928 - DNA, 304 bp, Glycine max
  Clone ID: LIB3072-028-Q1-E1-C11
acgcgtccggacagaagacgacagaaggggaggcagtgcaaaactcacaagagatctaaacagcaaatcaagaagaatggcttatgctaggcttgctcctatggctgtcttcttgcttgccacttccaccataatgttcccaacgaagatagaagcagcagattgtaatggtgcatgttcacctttcgagatgcgaccgtgccgcccacgtgattgtcgttgtgtcgctataggactagttgctggtttctgcatacatcgagctggactttcatctgttgcgaagatgatggacgaacatccc

SEQ ID NO: 1929 - DNA, 164 bp, Glycine max
  Clone ID: LIB3072-028-Q1-E1-C3
tgatgctcataaaacaccacagataggtacagttgcaacataattaaaaatctgtatgatgcttaaatatacaccctgtgtcctgctgctactaaacaacacaaaggtacagtcacgtttcaattacatccaggtcaactattagatgttaatatcattcacac

SEQ ID NO: 1930 - DNA, 315 bp, Glycine max
  Clone ID: LIB3072-028-Q1-E1-C4
ggccacaagctacatacacaagaatggctcgcacacttgtctcagtgatttcgttaattttttttacctttgcagtcatggttgttgttctattctcaattggtgtgaatagcagtcagatctgtcctggaaattgcgaaaatttttcaaactgcaatgcctagggccaaggccagtatcataagaaagggatatgcatcagctgacctaaacgagggtacatttgttgttgcttctcaggagtttgcctcacgtaattatcgacaagcaatggattgtttttaataattattaacagcagtgctggaaataaaa

SEQ ID NO: 1931 - DNA, 245 bp, Glycine max
  Clone ID: LIB3072-028-Q1-E1-C5
ggaagcagtagggactcccattccgactcttagccgccgatctctcagggcttgcatcttctcaggtaagctgtgaagatgtacacatcaaggaagaaaatccacaaggataaggatgctgaaccaactgaatttgaagagtcagttggacaggcattgtttgatctggagaataccgagcaggagcttaaaagtgatcggaaggagttacgcataaactcagccgtgcaagttgatgtttctgg

SEQ ID NO: 1932 - DNA, 303 bp, Glycine max
  Clone ID: LIB3072-028-Q1-E1-C7
gattcacacaactaactaagaaagtcttccatagccccccaaaaatgaagagcaccatcttctttgctctctttctcttttgtgccttcaccacctcatacctaccttcagccatcgctgatttcgtgctcgataatgaaggtaaccctcttgaaaatggtggcacatattatatggtgtcagacataacagcatttggtggagtaagagcagccgcaacgggaaatgaaagatgccctctcactgtggtggaatctcggaataggctcgactgagggattggaagaatcatctcgtccccat

SEQ ID NO: 1933 - DNA, 177 bp, Glycine max
  Clone ID: LIB3072-028-Q1-E1-D1
tgggagtcacataacaatcgataaatgtctgctgtagcgccacaatggtggagatcaacatctggtttgcgctccttctcctttgtgccgtctacacctcataccatggattcagccattcctgaattcgtgctctcttctgattgtaaccgtcatgagtatggtggcacatactat

SEQ ID NO: 1934 - DNA, 332 bp, Glycine max
  Clone ID: LIB3072-028-Q1-E1-D3
ggttcaccaattaagtctttgaagagaaagagtaattggaaaatggcttcagagagtgtttcagctgttgccctaattctggtctcccttaacctccttttcttctccatggttagctccaatcccctaatgacccctgcccttgtctcatcaataatatctaacagaaagtgccccgagttacatgtgtgcgccactattttgcctcgccatcacaagcgagacaaaggttgctgccccctcatcgccggtctgagttgatcgggaatgcgccgtgtgcctctgcgccgtactcaagctcgacctccgtcgaatgatctccattccccttg

SEQ ID NO: 1935 - DNA, 283 bp, Glycine max
  Clone ID: LIB3072-028-Q1-E1-D4
cgggacagcaaaaacaattaataaagatgagtttgaggaacaacatggtggtgctaaaggtgtgtttgtcgcttcttttccttgtgggggttacagctgcacgcatggaactgagcttcttcaaaagtgatcagtcatcaagttatgatgatgatgagtattcaaaaccatgctgtgatgtcggcgtgtgcacacgctcaatgcctcctcaatgcagccgtgaagatagtatgctgaattcatgccactcagatgtgttagagctgtaggtgcacacgctcac

SEQ ID NO: 1936 - DNA, 326 bp, Glycine max
  Clone ID: LIB3072-028-Q1-E1-D5
gacagcaaagacaattaataaagatgagtttgaagaacaacatggtggtgctaaaggtgtggttgttgcttcttttccttgtgggggttacagctgcacgcatggaactgagcttcttcaaaagtgatcagtcatcaagttatgatgatgatgagtattcagaaccatgctgtgatctctcgatgtgcacacgcgcaatgcctgctcaatgcagcggtgaagatgttaggctgaattcatgccactcagagggtaaaggctgtgtgtgcacacgctcacatccatgacagtgtcgttgtcttgacgccaaggacttctgctacaaa

SEQ ID NO: 1937 - DNA, 138 bp, Glycine max
  Clone ID: LIB3072-028-Q1-E1-B2
gaacacttggtttagcaagagaaaaaataccaaccatggcaaccatttctactgatcaaccaagaggatcctacgcctatggaacctcctatggagcaccctatggaaccacctattagaccaacaagaacattaaaa

SEQ ID NO: 1938 - DNA, 240 bp, Glycine max
  Clone ID: LIB3072-028-Q1-E1-D6
ggtgatttgagaggatcgtgagagggacggtagcagagattccgtgagttgcaaaaatgaaaacaattctttctgcagagaccatgaacatcccggacggcgtgagcgtcaaggttaatgccaaggtcatcgaagttgagggcccccgcggaaaattggtgcgagacgtcaggcacttgaatctcgatttgcacgtcatcagtgacgaaaacggtaaaaggaagctgaaagtggagggct

SEQ ID NO: 1939 - DNA, 326 bp, Glycine max
  Clone ID: LIB3072-028-Q1-E1-D7
gacagcaaaaacaattaataaagatgagtttgaagaacaacatggtggtgctaaaggtgtgtttgttgcttcttttccttgtgggggttacagctgcacgcatggaactgagcttcttcaaaagtgatcagtcatcaagttatgatgatgatgagtattcaaaaccatgctgtgatctctgcatgtgcacacgctcaatgcctcctcaatgcatgtgtgaagatattaggctgaattcatgccactcagagtgtaagagctgtatgtgcacaggctcacagccaggacagtgtcattgtcttgacaccaacgacttctgctacaaa

SEQ ID NO: 1940 - DNA, 575 bp, Glycine max
  unsure at all n locations
  Clone ID: LIB3072-028-Q1-E1-E11
ggggggggagggagatgaggggggggaggggaggggggggggggaaggggggagggggaggggggtgactacgtcgtgggggtaaggnggggcggggagggggaggaggnagggggggggggggggggggggggggggaggggggagaggggggggggagggggggggggggggggggggggaggaggggggggggggaggagggggggggggggggggggggggggggggggggaggggggggaggggagggatgggggggggggggggggggggggggaggggggggggggaggggggggaggggggggggggggggggggggggaggagggggggggggggggagaggaggggggggaggggagaggggggggggggagggggagggggggggggggggggagggaggggggggggggaggagggggggggagggggaggggaggaggggggggggagggggggggagggggggaggggaggggggagggggggggggaggaggggggaggggagggaggggagagggggggggggggaggggggagggggggggggagggggggggggggg

SEQ ID NO: 1941 - DNA, 172 bp, Glycine max
  Clone ID: LIB3072-028-Q1-E1-E2
gattcacacaactaactaataaagtcttccatagccgcccaaaaatgaagagcagcagcttcttggcgctctttctcttttgtggcgtcggcacctcgtacctaccttcagccatcgctgatttcgtgctcgataatgaatgtaatcctcttggaaatggtggcacacatta

SEQ ID NO: 1942 - DNA, 202 bp, Glycine max
  Clone ID: LIB3072-028-Q1-E1-E5
ccaacggtcccgctcctacaagactacataagggtacagctgccatcataccacatcaaggtactgatgcaagatcactacactagggttcggttgcgagacgactacactaggataacgctgccataacgcgattgacgtcgtcttgctgcgaaaagaccattcaccggcgcggctgctagaaaacaacaccacggtactg

SEQ ID NO: 1943 - DNA, 239 bp, Glycine max
  Clone ID: LIB3072-028-Q1-E1-E7
gacagcactaacaattatgtagatgatgagtttgacgaacaacatggtgctgctaaaagtgttttagttccttctgttccttgtaggggtcacagctgcacgcctggaactgagcttcttcaaaagtgatcactcacgaagttatgatgcatgacgattagtcatggtcagcgtgtggttcctgcatgtgcagagactgaaggctgcctcaatgcgcctgtgaagatattacgctgcat

SEQ ID NO: 1944 - DNA, 394 bp, Glycine max
  Clone ID: LIB3072-027-Q1-E1-G4
ggcactttctagaaaccaaagcaaagttccctgtttcactttctgttctgttttggatatttctcaacataaccaaaccaaagcgttttactattttgttttctagtttcctccatctccctcccatactcaccttctctctggtcagttttccttcttttccacctttttcagtttttattttcaaacaaaacaaacacgccaacacgggtttctgttacaagagttttttaaaaaaagaaaaaaaaaaatggaaaataaatttattgttcccttgttttctttctccatatgcttgtctttcgtttcttttagtttttagcgtgtccttgtttctggacttcgttttgttggtttaaggttaaagcctcaacgtgttgtccttccctaaatg

SEQ ID NO: 1945 - DNA, 403 bp, Glycine max
  Clone ID: LIB3072-027-Q1-E1-G5
caatgttcagcagacaatatggcctcgagctgctgcagctgcagaacgcttatggagtcagagagattctacctcacaaaatattaccttaattgcattgccccggttgctaaacttcagatgtctattgaatagactaggggttccagctgctcctgtcacaaattattatgctagaagggcacctgttggtccagggtcatgttatgaccaataatccttgtaatgattcacatgttcaggtgtaacctggtatgcaagtaactgatgtttcatctactttacctggttgatgagctagaatcattatttgagctcaactccatggcagatatggttgttgatgtcagaactctttaatgaactggcaacagccatgttgcaatgtaatttagtgttgagt

SEQ ID NO: 1946 - DNA, 279 bp, Glycine max
  Clone ID: LIB3072-027-Q1-E1-G8
cgggacagcaaaaacaattaatagagattagtttgaagaacaacatggtggtgcgaaaggtgtgtttgttgcttcctttccttgtgggggttacagctgcacgcatggaactgagcttcctcaaaagtgatcagtcatcaagttatgatgacgatgagtattcaaaaccatgctgtgatctctgcatgtgcacacgctcaatgcctcctcaatgcatctgtgaagatattaagctgaattcatgccactcagattgtaagagctgtatgtacacacact

SEQ ID NO: 1947 - DNA, 386 bp, Glycine max
  Clone ID: LIB3072-027-Q1-E1-H2
gacagcaaaaacaattaataaagatgagtttgaagaacaacatggtggtgctaaaggtgtgtttgttgcttcttttccttgtgggggttacagctgcacgcatggaactgagcttcttcaaaagtgatcagtcatcaagttatgatgatgatgagtattcaaaaccatgctgtgatctctgcatgtgcacacgctcaatgcctcctcaatgcagctgtgaagatattaggctgaattcatgccactcagattgtaagagctgtatgtgcacacgctcacagccaggacagtgtcgttgtcttgacaccaacgacttctgctacaaaccttgcaagtccagagatgactagaaaaactaatagctctctcaaatggacgaagcccct

SEQ ID NO: 1948 - DNA, 365 bp, Glycine max
  Clone ID: LIB3072-027-Q1-E1-H4
aaaacagaatgggagggatgctcaataattcatttgagtttgaagaacaacaattgggcgcccactgagtcccttaagactgattaatgtagcaaggtattggtttgcttatcgttgttctccttctttcctctttcttatcatctgctcgtctccttgaaccactgaaaggtccaagacaaggtgagaaggaagtggagatcaatgaaaacgcttttcctcaatcatctcatgagctaaaagatgatatggaagaactcatgggattacaggagtgctatatgaaagatgaagaatgcattagcagaaggatgatggtggaagctcacttggattacatctacacccaacatcataaaccttga

SEQ ID NO: 1949 - DNA, 426 bp, Glycine max
  Clone ID: LIB3072-027-Q1-E1-H5
agaaggggattgtgtctcactcacatcacacacactctcatagctgtagcggcgacactaagatcggagaaagaatggcgaaaacgacgtcgttgctgctctttacactgctcctcttcggaaccctagctctcatccaggcgaagaaatcgaaggaggatttgaaggaggtgacccacaaggtttactttgatgtcgagattaatggaaaagaagcaggtcgtattgtaatgggtctttatgggaaggctgttccaaaaactgcagaaaacttccgagcactttgcacaggggaaaagggaactggtaaaagtggaaagcctctccattacaaaggtagctcattccatagaattattcctagctttatgcttcaaggaggtgattttacacaaggaaatggaatgggtggagaatcaatttgcg

SEQ ID NO: 1950 - DNA, 421 bp, Glycine max
  Clone ID: LIB3072-027-Q1-E1-H6
gatgcttacttattttcttttgctttgatacatctctattggtctctctctcattcccttaatattgaaccaatgaagcaacaaattggtttgcttttctttgttctccttctttcctctttcttagcttctgcccgtctccttgaaccactgaaaggtccaagacaaggtgagaaggaagtggagatcaatgaaaacgcttttcctcaatcatctcatgagctaaaagatgatatggaagaactcatgggatcagaggagtgctatatgaaggatgaagaatgcattagcagaaggatgatggtggaggctcacttggattacatctacacccaacaccataaaccttgaattaattgaacttacaacttgattcacactttagaagcagagtattaagtatgaatccctatatataaaa

SEQ ID NO: 1951 - DNA, 325 bp, Glycine max
  Clone ID: LIB3072-027-Q1-E1-H7
gacagcaaagacaattaataaagatgagtttgaagaacaacatggtggtgctaaaggtgtgtttgttgcttcttttccttgtgggggttacagctgcacgcatggaactgagcttcttcaaaagtgatcagtcatcaagttatgatgatgatgagtattcaaaaccatgctgtgatctctgcatgtgcacacgctcaatgcctcctcaatgcagctgtgaagatattacgctgaattcatgccactcagattgtaagagctgtatgtgcacacgctcacatccaagacagtgtcgttgtcctgacatcaactacttctgctacaa

SEQ ID NO: 1952 - DNA, 348 bp, Glycine max
  Clone ID: LIB3072-027-Q1-E1-H8
gacagcaaaaacaattaataaagatgagtttgaagaacaacaattgggcgcccactgagtctcttaatgattgaattacattagcaaggaaattggtttgcttatcgttgttctccttctttcctctttcttatcatctgctcgtctccttgaaccactgaaaggtccaagacaaggtgagaaggaagtggagatcaatgaaaacgcttttcctcaatcatctcatgagctaaaagatgatatggaagaactcatgggattacaggagtgctatatgaaggatgaagaatgcattagcagaaggatgatcgtggaagctcacttggattacatctactcccaacatca

SEQ ID NO: 1953 - DNA, 279 bp, Glycine max
  Clone ID: LIB3072-028-Q1-E1-A1
gacagcaaaaacaattaataaagatgagtttgaagaacaacatggtggtgctaaaggtgtgtttgttgcgtcttttccttgtgggggttacagctgcacgcatggaactgagcttcttcaaaagtgatcagtcatcaagttatgatgatgatgagtattcaaaaccatgctgtgatctctgcatgtgcagaggctgaatgcctcgtcaatgcagctgtgaggatagtacgctgaattcatgccactcagattgttagagcggtatgttgacacgctcac

SEQ ID NO: 1954 - DNA, 180 bp, Glycine max
  Clone ID: LIB3072-028-Q1-E1-A4
cgatgggactttgagttcgaactaaacaattcaattcaagctgcctcgatcatggagaggaaaacatttgggtttttgttcttgctcctccttgtcttagcttctgatgtgacagtgaacagagcagaggcgaaagattgcttgacaaggatgcacgggttccatggtagatgcttattc

SEQ ID NO: 1955 - DNA, 170 bp, Glycine max
  Clone ID: LIB3072-028-Q1-E1-A5
ccaggtacacgtacgtatcggaacaggtacacgacaacgagggacagcgaatccaattaagcaagatgtgtttgaataacgacagtgtggtgctaaaggtgtgtttgttgcgtcttttccttgtgggggtgatcgctacgctcatggcactgatcttcttcaagagtgat

SEQ ID NO: 1956 - DNA, 329 bp, Glycine max
  Clone ID: LIB3072-028-Q1-E1-A7
gagcgccaatgtttttttcagaggagtttcagcttgtgatcaaaagagtttatcttatagtaagaaatcgatgtcttactccattttaaggaacaaaacaagagaacaatagcctgacaaatggtttagccataaaatcgaatccatcattgatttgagatattgataatgtgaatactgcatttctcggcaatgctaggcataatgcgggtgtaaggagctaagaaagattatcttttcttcctatcttatgagcgttaaggggtatgaagtgtcagttcctatcttagattttaattttggtaggtatagtaggagtccatttaact

SEQ ID NO: 1957 - DNA, 416 bp, Glycine max
  Clone ID: LIB3072-027-Q1-E1-G2
gatgcaactgaataattaagaaaagccatttccatagcagcctaagaaaatgaagagcactagcttgttcgctatctttctactttgcgccttcacctcatacctaccttccgccaccgcccaggacgtgctcgacgtggatggcgatccgattcggaacggtttcatatactacgttttgccggcaataagaggaaacggtggcggaatagaacgagccgcactcgggaaagacacttgccctatcactgtagtgcaatctcccaatccaaactctaaggggttagaaattaagtttgaatctgcataccccgcctattacataaacgaaaccctaattttgcaaataaagttcagttacccacagcagtgtgaaagaaagaatccttggcgggccatttctaaggatatatctg

SEQ ID NO: 1958 - DNA, 319 bp, Glycine max
  unsure at all n locations
  Clone ID: LIB3072-028-Q1-E1-A8
gactctcatcaacacttggtttagcaagagagaaaataccaaccatggcaaccatttctactgatcaaccaagaggatcctactcctatggaacctcctatggagcaccctatggaaccacctatgagaccaacagcagcattaacaaccctccttcacgccaaaccgtgaagttcatggctgctgcaactattggcatcagactcttactccggtctgggttgaccctcacaggcactgtcatanggttgatcaggtgaagccctcctcgtgttaacttcaaccccatccttgtccctgctgcgtgtgtgctgttcct

SEQ ID NO: 1959 - DNA, 178 bp, Glycine max
  Clone ID: LIB3072-028-Q1-E1-B1
ccaggtacacgtacgaatacgaatcgctaccgctgcaacaaacaacggaaaggggatatagttttcattagactatcatcgttgttgagcaaaaaacattatcatactataggtgtattagttgctactctaccttgtggaagttaccactacatccatggccctgagcatcggttta

SEQ ID NO: 1960 - DNA, 259 bp, Glycine max
  Clone ID: LIB3072-028-Q1-E1-B11
gaagggagggaagaatagaatgggatctggaagtggaaaacacactggagagttcttcaggagaagggatgcatggaggaagcatccgatgctcagcaatcagctccgccacgccagccctggccttggcatcgccgtcgtcgccttcggtatcgacctcgtcggcgaagaagtctacaataggctctatgctcccgatcctcagtcgatttctcacgtgaaaggcggggatcacgactaaacgtttggacggacgcac

SEQ ID NO: 1961 - DNA, 197 bp, Glycine max
  Clone ID: LIB3072-027-Q1-E1-D7
gacagcatcgccaattaatcccaatcactttgaagcacagcatggtggtgcaataggtgcgtgtgcagcatcgtctccgtgtggaggctatcccgtcatacatgtgactgagtttcttcaaatttgattcttcatccagttagctacatgatcagtatctcatcagatgctctgctctctacaggtgctacacatcc

SEQ ID NO: 1962 - DNA, 393 bp, Glycine max
  Clone ID: LIB3072-027-Q1-E1-D8
gggaaatctgatttgtttttcttcagccctgagcatcctcctttgactgaaccagcccagaaagcccttgattgggcaattgaggagaaattgaagtcagatcttggctactctaggttttgatgatggaaaagccaaagaactttctaaaaaaattgatggagatgtttgatttaagtttcaaaaggcaagcttaagaaatttcttgcagattgatggttgattaatacccgttgatccttggggttgcaagttcctcttagggaaaattaactatactccctcaagattatcaacaagtacctgtgttaatgttatttcaaatgctgtgtcgtacaccattttggggatgatgtatttcttattcttttttaatttatccaagttttgtac

SEQ ID NO: 1963 - DNA, 269 bp, Glycine max
  Clone ID: LIB3072-027-Q1-E1-D9
ggaagaagaagacccagaatcaaatcaaaaggtaaaaaacagattacgagaaaaagggacaagtatactacgcagaacaggtggttcagagttcagtggctgagaagaaggaaatgattccgcaacaatttgacatcgatgccaaatgggacgcctgcattgatctcaccgtccgtcgcttcgtctactccacaaccgccggtgcatttgggggtctcctacttttcaggaatcgtgtgactcgatgggcatcgattgcttttggtgct

SEQ ID NO: 1964 - DNA, 395 bp, Glycine max
  unsure at all n locations
  Clone ID: LIB3072-027-Q1-E1-E1
gattggaagaaagagtagatcgatcagagaaagaggggagatggaagttgaagggtcatcgaagaggatgatagcgactcaggaggagatggtggaggccaaggttcctctggcctacagggaccagtgcgcccacttgctcatccctctcaacaagtgcangcaggccgagttctacctcccatggaagtgccaggaccagcgtcactcctacgaaaagtgccagtacgagctcgttatggagagaatgctccagatgcaaaagatccgcgagcaccaacaaaaccccaacgccaaacaaccccttatcgcgcttcccaaacccgccaatgcctgattcatattcactgaacctttgcttgggacagatgttatttcatgttttgctattgtat

SEQ ID NO: 1965 - DNA, 644 bp, Glycine max
  Clone ID: LIB3072-027-Q1-E1-E11
gggggggtgggggggggaggggagggggggggggtggaggggggggggggggggggggggggggggggggggggggggggctccgtcggggggggtggggggagtgcgggggggcgggtagggggagggagggggggaggggagggaggggggggggaggggagggagggggggaggggggcgggggggagggggaggagaggaggggggggggggggggagggggggcggggggggagggggggggggggggggggggggaggggggggggggggggaggggggagggaggagggggggggagggggggggggggggaggagggagggagggggggggggggggggggggggggggggggggggggggggggggggggggggggggggggcggggggaggggggggggcgggggggaggtgggggggggggcggggggggggagggggggagggggggggagggggtggggggggggggggggtggggggggggggtggggggagggggaggggggggggggggggggggggggggggggtgggggggagggggaggggggggaggggggaggggggggggggggggggggggggggggggggggggggggggaggggtggggggaggtgggtgggggggggg

SEQ ID NO: 1966 - DNA, 386 bp, Glycine max
  Clone ID: LIB3072-027-Q1-E1-E2
ggctcttaaagattcagattctcaatagagagaaagagagagaaatggttttcacgatttccagatctcaatctgctttgacagatagagagaaggagaatcttgacaacttagttgacaaggagtgtgcaaccacagagggtatgatatcgagccagctcaagttgaagtcttctttgtcatccaaagcgtcttctcatcaaagcatggacaaacatgcaatccttcgacgtatcaggcaacgcaggtttaataacaaagccaaaaccgctctggaagctctcataggcacctcagaagccaacaataccggcactgcccaagaacagaagtggcttcaactgggtgactctttctcatctccttaactggaaacacaatctccc

SEQ ID NO: 1967 - DNA, 388 bp, Glycine max
  Clone ID: LIB3072-027-Q1-E1-E5
gacacacaactaactaagaaagtcttccatagccccccaaaaatgaagagcaccatcttctttgctcgcgttctcttttgtgccttcacgatctcatacctaccgtcagccatcgctgagttcgtgctcgataatgaaggtaaccctcttgaaaatggtggcacatattatatcttgtcagacataacagcatttggtggaataagagcagccccaacgggaaatgatagatgccctctcactgtggtgcaatctcgcaatgagctcgacaaagggattggaacaatcatctcgtccccatatcgaatccgttttatcgccgaaagccatcctttgagccttaagttcgattcatttgcagttataatgctgtgtgttggaattccta

SEQ ID NO: 1968 - DNA, 384 bp, Glycine max
  Clone ID: LIB3072-027-Q1-E1-E6
gacaacacagaacaaaaacaaagaaaaaaaaaacccttagccaacacaaccatcatggccacctctgctattcagcaatcagcattcactggtcaaactgctctgaagcagctcaatgagttcgtccgcaagaccggtggcgccggcaaaggtcgcactaacatgcgccgcaccgtcaagagtgctcctcagagcatttggtatggccctgaccgtcccaagtacttgggtccattctcggagcagattccatcatacctgaccggagaattccctggtgactacggatgggacactgctggattatcagctgacccggaaaccttcgccaggaaccgggagctggaggtgattcacagcagatgggcaatgcttggtgccctg

SEQ ID NO: 1969 - DNA, 386 bp, Glycine max
  Clone ID: LIB3072-027-Q1-E1-E7
cggggcagtgcaaaactcacaacacatctaaacaagcaatcaagaacaatggcttatgctaagcttgctcctatggctgtcttcttgcttgccacttccaccataatgttcccaacgaagatataagcagcagattgtaatggtgcatgttcacctttcgagatgccaccgtgccgctcacgtgattgtctttgtgtccctataggactagttgctggtttctgcatacatccaactggactttcatctgttgcgatgacgatcgacttacatcccaacttatgtcactcagatgatgaatgcatgaataaatgaaatgttaatttttgcgctcgttaccctattaattatatccatgattgatggtgtattgattctgactctga

SEQ ID NO: 1970 - DNA, 313 bp, Glycine max
  Clone ID: LIB3072-027-Q1-E1-E8
gacatcacgacatcacatcgcagagaagaacagagagagatccatccatcaattccaatggccgatcagctcaccgacgaacagatctccgagttcaaggaagccttcagcctcttcgacaaggacggggatggttgtattaccaccaaggaacttgggaccgtgatgcggtcacttggccagaacccaactgaggcagagctgcaggatatgataaatgacgttgatgctgatgggaatggtaccattgatttcccagaattcctgaatctcatggctcgcaagatgaaagacactgattcagaggacgagc

SEQ ID NO: 1971 - DNA, 313 bp, Glycine max
  unsure at all n locations
  Clone ID: LIB3072-027-Q1-E1-F1
ggccgagcttagtanaagagaaaaagaggagcaagangcatcaccgttacaaacatggtgaaaggcccaagagacgtgtagactttagtccgggttcaaattggatacaaagtccaatcaatcatancaaacacctcattaatcagattgaatgtaacacaagaaaattgctgtacgtggaacgtatgcttaattaaaaccaagtaaaaagacgaagcactatcgctgcatttggggtaaggtcaccaggcctcatggtaacagtggtatagttcgtgctaagttcaagtccaatctgccgcccacatcaatg

SEQ ID NO: 1972 - DNA, 117 bp, Glycine max
  Clone ID: LIB3072-027-Q1-E1-F2
gatgaaagtccaaatccaaaggtcttttcaaggaagaagaaaaatgagaaaggaggaaagcagaagattgatgatagtgatgaaagtccaaatccaaaggtattttcaaggaagaag

SEQ ID NO: 1973 - DNA, 415 bp, Glycine max
  Clone ID: LIB3072-027-Q1-E1-F3
gctttttgtttggggttttctgattaactctttcttctcataactctgctgccgcaacagccccaaatccaatggcttcagagaagaaactttcgaacccaatgagggagataaaggtgcagaagctcgtcctcaatatctccgttggcgagagtggagatcgtcttaccagagccgctaaggtgttggaacagcttagtggccaagcccctgtgttttccaaagcaaggtacacggttcgttcctttgggattagaagaaatgagaagattgcatgctatgtcactgtcagaggtgacaaggcaatgcaacttttggagagtggtttgaaggtgaaggaatatgaacttctcagaaggaacttcagtgatactggttgctttggctttggcattcaagagcatatccatttggg

SEQ ID NO: 1974 - DNA, 293 bp, Glycine max
  Clone ID: LIB3072-027-Q1-E1-F7
gactctcatcatattattctatatcaactttggttaagagtcttgaagaagcaagagatggtgttataccactcatggcaaccacttctgatcaacctatagggtcctactcctatggaacctcagacggagcaccttatggaaccacgtattagaccaacaccagcatgaacaagccaccttcacgccaaacactggtgttcacaactgctgccactattggcatcacactcttgctcatgtctgggttgaccctcacaggcactgtcataggtttcatcactgcaactcct

SEQ ID NO: 1975 - DNA, 417 bp, Glycine max
  Clone ID: LIB3072-027-Q1-E1-F8
gaattccgaaagcagccaccaacaagaacccaaccggtgtcgctgctctctctctgttacttccctatcctcgtgtgtggttcgtactatgaagaggactatgccatggagtgacgacgatgagtcatcgtcttcacattcagattctgaacgtgatagtgaaactggaggggaaaactccaaaggtaaatctaggaagcagaaaactgagaaaagtggtgtaattgactttgaggctttgaagcgacacgggtatagaggtggaccttctgtcctaaaagtacccgcaccaaaagaagatgactcaaagcaagattggtcgtggtccactggaaaagaaaagcgtgtagacaaggaaattgaagaatcatatgaagaacgaaagaaaacaagagaggctatttccctacgagagga

SEQ ID NO: 1976 - DNA, 422 bp, Glycine max
  Clone ID: LIB3072-027-Q1-E1-D6
gacagcaaaaacaattaataaagatgagtttgaagaacaacatggtggtgctaaaggtgtgtttgttgcttcttttccttgtgggggttacagctgcacgcatggaactgagcttcttcaaaagtgatcagtcatcaagttatgatgatgatgagtattcaaaaccatgctgtgatctctgcatgtgcacacgctcaatgcctcctcaatgcagctgtgaagatattaggctgaattcatgccactcagattgtaagagctgtatgtgcacacgctcacagccaggacagtgtcgttgtcttgacaccaacgacttctgctacaaaccttgcaagtccagagatgactagaaaaactaatagctctctcaaatggacgaagcccctttaggctttgtttgttatgttaagggagacaaataa

SEQ ID NO: 1977 - DNA, 411 bp, Glycine max
  Clone ID: LIB3072-027-Q1-E1-B2
gggtttttgtggatgtaggttttgaatggcaactgtgagaagtctgaagatcaagacaagtacctgcaaacgtatagtgaaggagctgcattcttatgagaaggaagttgagagagaagctgccaaaacagctgatatgacggaaaaaggagctgacccccatgatctcaagcaacaggaaaatgtgttggcagagtctaggatgatgattcctgactgccgcaagcgccttgaggccgctttggcagacttgaaaggaatattggctgagttggaggagtcagatgagaaggccagtcttgagattgatgaagctaagaacaccattgtagaagttgaaaaagtatttgaaacaacagaagattaacaacgttgtttgattagtgatcttgaaggaggatattggacctg

SEQ ID NO: 1978 - DNA, 404 bp, Glycine max
  Clone ID: LIB3072-027-Q1-E1-B7
gggggcccggtggtgatcgcagtggtgctgttcgtgctgttaagcccggggcttctgtttcagatgccagccaggggaagggtagcagagtttgggaacatgcaaaccagtggggcctccattttggttcacgccatcatctactttggcctcatcactatcttcctcattgccattggcgttcacatctacactggctaactcctggatctggttcagtttcacccatctatgtttatctctgccttttaattagtctttttagctttacaataatttccttgtttgatctctatgtatcttatgtggggttgggtcatgggtgcccagaagacaacaatatattcagatcaggatgatgctgctgtgtgtgttcttttttttttttaccaagatagtatgga

SEQ ID NO: 1979 - DNA, 412 bp, Glycine max
  Clone ID: LIB3072-027-Q1-E1-B8
gacagcaaaaacaattaataaagatgagtttgaagaacgacatggtggtgctaaaggtgtgtttgttgcttcttttccttgtgggggttacagctgcacgcatggaactgagcttcttcaaaagtgatcagtcatcaagttatgatgatgatgagtattcaaaaccatgctgtgatctctgcatgtgcacacgctcaatgcctcctcaatgcagctgtgaagatattaggctgaattcatgccactcaggttgtaagagctgtatgtgcacacgctcacagccaggacagtgtcgttgtcttgacaccaacgacttctgctacaaaccttgcaagtccagagatgactagaaaaactaatagctctctcaaatggacgaagccgctttaggctttgtttgttatgttacggg

SEQ ID NO: 1980 - DNA, 316 bp, Glycine max
  Clone ID: LIB3072-027-Q1-E1-B9
gacagcaaaaacaattaataaagatgagtttgaagaacaacatggtggtgctaaaggtgtgtttgttgcttcttttccttgtgggggttacagctgcacgcatggaactgagcttcttcaaaagtgatcagtcatcaagttatgatgatgagtattcaaaaccatgctgtgatctctgcatgtgcacacgctcaatgcctcctcaatgcagctgtgaagatattaggctgaattcatgccactcagattgtaagagctgtatgtgcacacgctcacagccaggacagtgtcgttgtcttgacaccaacgacttctg

SEQ ID NO: 1981 - DNA, 414 bp, Glycine max
  Clone ID: LIB3072-027-Q1-E1-C2
gagtcttcagctggacaaggatcattcatcttgaaagaagagtttgtgtgtgacaatctttatagttctaaggagggtgcaagagagaactgaatttgctgtgatggcaactcgtagatatgcttttggaagagctgatgaggccactcatccagactccatgagggccactttggctgaatttgtttctactttcatctttgcctttgctggagaaggctctggccttgctttggttaaaatttaccaggattcagctttctcagctggtgaattgttggcagttgcacttgcacatggatttgctctatttgctgctgtttctgcaagcatgcatgtatcaggtggccatgtcaacccagctgtgacatttggtgctctcattggaggcagaatttctgttctccgtgccgt

SEQ ID NO: 1982 - DNA, 376 bp, Glycine max
  Clone ID: LIB3072-027-Q1-E1-C3
gctcacacttactactactaagcatggagtcctcaaagatctatgcttacctcttcctctgcatgatctttctctcttccgccactcccattctcggttgtggctactgtggtaaaccccccaaaaagcacgaagcctggtaaaacaccatagagacccacaacacccgttgttaagccaccattcatcatcgctcccattaatgttcctcccgttgttcctccaccaatagtgaagcccccatgtattctccctccaattccaattattaacccatcaaccataccatggaatggagggaacactccatgcccaccaccaaaatctcctgcgcaggctacctgccccattgacgcgctcaaacttggtgcctgtg

SEQ ID NO: 1983 - DNA, 404 bp, Glycine max
  Clone ID: LIB3072-027-Q1-E1-C4
gatgcaactgaataattaagaaaagccatttccatagcagcctaagaaaatgaagagcactagcttgttcgctatctttctactttgcgccttcaccgcatacctaccttccgccaccgcccaggacgtgctcgacgtggatggcgatccgattcggaacggtttcatatactacgttttgccggcaataagaggaaacggtggcggaatagaacgagccgcactcgggaaagacacttgccctatcactgtagtgcaatctcccaatccaaactctaaggggttagaaattaagtttgaatctgcataccccgcctattacataaacggaaaccctaattttgcaaataaagttcagttacccacagcagtgtgaaagaaagaatccttggtggggcatttct

SEQ ID NO: 1984 - DNA, 396 bp, Glycine max
  Clone ID: LIB3072-027-Q1-E1-C6
gactcactcatacaatagagaccagcttttgcttctttgtgaacatggagatgaggaaatcatgtggcttcttcttcttgctcctcctccttgtctttgcttcccaggtggtggtgcagacggagggaagagtgtgtgagtcacaaagccacgggttccatggtttgtgtaatagagaccacaactgtgctttggtctgcaggaacgaaggtttctccggtggcaggtgcaaaggcttccgccgccgctgcttttgcaccaggatttgttgagatctcatcaaacactactcttgccatgcaaattaataaatcatagctaggccaaataaattgcatctactctttatccatttgggagctagctaccacaaccaactcatacttggtcattgga

SEQ ID NO: 1985 - DNA, 135 bp, Glycine max
  Clone ID: LIB3072-027-Q1-E1-C7
gagaagaaaaaggaaaagaaggataaagatgaagaaacagacacattaaaggaaaagggaaaaaatgatggaggtgaggatgatgaaggaaataagaaaaagaaaaaggataagaaggagaaagagaaggatcac

SEQ ID NO: 1986 - DNA, 120 bp, Glycine max
  Clone ID: LIB3072-027-Q1-E1-C9
gaaaaacagaacttaatattaatttatgaataacactaggagaaaatgaataaagtaagagaaaaccctccaaggaaaaaggaaagaacgggggagaaaagcggccgcccgacaagatgc

SEQ ID NO: 1987 - DNA, 372 bp, Glycine max
  Clone ID: LIB3072-027-Q1-E1-D1
gattcacacagctaactaagaaagtcttccatagccccccaaaaatgaagagcaccatcttctttgctctctttctcttttgtgccttcaccacctcatacctaccttcagccatcgctgatttcgtgctcgataatgaaggtaaccctcttgaaaatggtggcacatattatatcttgtcagacatatcagcatttggtggaataagagcagccccaacgggaaatgaaagatgccctctcactgtggtgcaatctcgcaatgagctcgactaagggatttggacaatcttctcgtccccatatcgaatccgttttatcgcccaacggcatcctttgagccttaagttcgattcatttgcagttacaatgc

SEQ ID NO: 1988 - DNA, 415 bp, Glycine max
  Clone ID: LIB3072-027-Q1-E1-D3
ggaaggtgagaagcgaagatgagcagcgacacaaaagccaacagcaacgttggagggggatccagatcgaggttaaatcactacctctatagcggtgacaagaaacatgtcttcgttggtttaactctcatcaccgctgtctttaccatcccatggttccttatgaacagagggaccaaacaccaatctcatcaagattacttggaaaaagctgataaagcaaggagccaaagactctcatccagttctgcttctgccaaatgagcttcatcaatattctgttgaagagcatactttttccggtaacacttaattaaaaggctttaaatatgtttgttggatgtccttttctctctagttttattctatggaatggagatccatcttcctttttctgttgtcccgtactgctaaa

SEQ ID NO: 1989 - DNA, 420 bp, Glycine max
  Clone ID: LIB3072-027-Q1-E1-D4
gacagcaaaaacaattaataaagatgagtttgaagaacaacatggtggtgctaaaggtgtgtttgttgcttcttttccttgtgggggttacagctgcacgcatggaactgagcttcttcaaaagtgatcagtcatcaagttatgatgatgatgggtattcaaaaccatgctgtgatctctgcatgtgcgcacgctcaatgcctcctcaatgcagctgtgaagatattaggctgaattcatgccactcagattgtaagagctgtatgtgcacacgctcacagccaggacagtgtcgttgtcttgacaccaacgacttctgctacaaaccttgcaagtccagagatgactagaagaactaatagctctctcaaatggacgaagcccctttacgctttgtttgttatgttaggggagacaaat

SEQ ID NO: 1990 - DNA, 284 bp, Glycine max
  Clone ID: LIB3072-027-Q1-E1-B11
ggaaccagaaaaggtgaatgcaaatgcattaggggcagttttgtttcttgatcaatgatcacgagtcatttcctgcccaaagaaaaccaggaaggagcagcgcaaccccacaatgccaccacatattttcacccttccatcgtcagaaagtcatgagatcatttaccaaacaaggaacggagaacactttgtctggaacaaaactaattgcagtagtggtccatcgatccttcacgaatattatgagggaaagcctacgatgggatttgcaagtggttaatgtg

SEQ ID NO: 1991 - DNA, 226 bp, Glycine max
  Clone ID: LIB3072-026-Q1-E1-G7
ccacgcccccgtacggcgggaaaagacgaccacaagggacagcaagatctggttgtcctcatcagtttgaatggaaacgtggcggtgcgaaacgcgtgtgttgttgcctccttcccatgtgaaggtcggaacggggcacttggggctgaggctcctcatgggtgatcactcctcatgttatgcagatgagtcgtattcagaatcaagctgtgatatccgcatgtgc

SEQ ID NO: 1992 - DNA, 316 bp, Glycine max
  Clone ID: LIB3072-026-Q1-E1-H1
gactcaacatttgcatttcctcttcatatacagtacacacttcagctggtggtagcctggtagatagtgtgcttccaaaatgaagaacaaaaggaagactttactattgctgctgctcatggctgcaactctcttttgcatgccaattgtgtcgtatgctgtttctaatgtcaacattcaagaccatctcaccaatatttctgagctggtaaaaggtccaaatagaaggcttttgtcatttgtggattgtggagaaaggtgcagggtgaggtgcattttgcactcaaggccaaaaatttgcacaaaattttgcggg

SEQ ID NO: 1993 - DNA, 257 bp, Glycine max
  Clone ID: LIB3072-026-Q1-E1-H10
gactagcaaccccactctacaatggccaagcccgctgccatccacacaccaatactgacagaagcagattacgagaggtatttcgctgatttgagtcatccaatgcatggagagaaaacaaagaataaagagaaaaagaaataaaaatcctcctcctcctgatgtttcttgtttatccgtttaccttgctcattggcatttatgtatatacctttttgtacaattctttaaacattacatgattttgagaaaggatg

SEQ ID NO: 1994 - DNA, 374 bp, Glycine max
  Clone ID: LIB3072-026-Q1-E1-H11
cgggatagaagcaaagagattgtggaatttgtgatcacacaacataagcatatatatagaaagatgtcaggggcacaaggagcacaaccaaaggagtcaaaaacagcaacaacatatgagtcagtagaaggaggagagaaccgaacaaggactgacttgctttcaagggaggatcaaggctgcattcaagtggaaaaacttcatgagaaggtccatgatcctgctggcaaaggtggtcctgtctttggtgctggcaaagatgaagacatacaagaccttggagttactggcacacgctaattaacctactatatatattactactatataccatatactgtattactatagtatatacccaacaaattactagt

SEQ ID NO: 1995 - DNA, 211 bp, Glycine max
  Clone ID: LIB3072-026-Q1-E1-H3
aacccaagatttggtgcagagaagagactagttccctctggaccaaacccacttcacaactgattatactggtttcaccaccattagcaccctttggtatatctatttaccttaattccagaacgggcaacaacaactcaaaaaatcatttccttcacaaaaccctttggaattagttcaaacgttttgcttccttctcatggtcaaactt

SEQ ID NO: 1996 - DNA, 321 bp, Glycine max
  Clone ID: LIB3072-026-Q1-E1-H5
gacaacagaacagattaataatcctcaatcagcttgtggcaatcgtgggctaggggatgctttcaggtgcagtacctgcccttacaagggactgcctgccttcaaattgggcgagaaggtagcactgtccggtaacttccttgctgctgacatataaatggataaagttgtagtacgctttgtcatgggaatgatattattatagaatttaattatttagtatggaattgtcatcagttatgttaatgctagcagaaccattcatccaagttgtggttttgatacaattttacatatgagcatacgagagattcaagtttt

SEQ ID NO: 1997 - DNA, 350 bp, Glycine max
  Clone ID: LIB3072-026-Q1-E1-H6
ggattgattccctcattcttcatccatagacatggccaccgtcacttctgcagccgttgctattccctcattcactggcctcaagggaagcgcaggcaaagtgagtgccgcagttaaagtctcagctccccaagccacaacgttgggcatcaacgcttcgctgaaagacgttggagtcgctgttgtggccactgtcgcgagtgcagtgctggctaacaacgccatgggcattgaagtgttgctgggtggtgatgacaggtcactggctttcgttcccaacaatttctccgtgggctctggggaaaagatcgtgttcaagaaaaacgcacgtttcccccacaacgttgtgt

SEQ ID NO: 1998 - DNA, 430 bp, Glycine max
  Clone ID: LIB3072-026-Q1-E1-H8
gacagcaaaaacaattaataaagatgagtttgaagaacaacatggtggtgctaaaggtgtgtttgttgcttcttttccttgtgggggttacagctgcacgcatggaactgagcttcttcaaaagtgatcagtcatcaagttatgatgatgatgagtattcaaaaccatgctgtgatctctgcatgtgcacacgctcaatgcctcctcaatgcagctgtgaagatattacgctgaattcatgccactcagattgtaagagctgtatgtgcacacgctcacagccaggacagtgtcgttgtcttgacaccaacgacttctgctacaaaccttgcaagtccagagatgactagaaaaactaatagctctctcaaatggacgaagcccctttaggctttgtctgttatgttaggggagacaaattaaacaagaa

SEQ ID NO: 1999 - DNA, 264 bp, Glycine max
  Clone ID: LIB3072-026-Q1-E1-H9
gattcacgcaactaaataagaaatgaagagtactatcttctttgctctctttctagtttgtgccttcaccatctcatacctgccttcagccaccgctcagttcgtgctcgacactgatgatgatcctcttcacaacggtggcacatactatatgttgccagttatgacatgaaagggcggtggaatacaagtagattcatctggaaaagaaatatgccctctcactgttgtgcaatcagccaatggagttcgatcaggggattg

SEQ ID NO: 2000 - DNA, 393 bp, Glycine max
  Clone ID: LIB3072-027-Q1-E1-A1
gattcacacaactaactaagaaagtcttccatagccccccaaaaatgaagagcaccatcttctttgctctctttctcttttgtgccttcaccacctcatacctaccttcagccatcgctgatttcgtgctcgataatgaaggtaaccctcttgaaaatggtggcacatattatatcttgtcagacataacagcatttggtggaataagagcagccccaacgggaaatgaaagatgccctctcactgtggtgcaatctcgcaatgagctcgacaaagggattggaacgatcatctcgtccccatatccaatccgttttatcgccgaagggcatcctttgagccttaagttcgattcatttgcagttaaaatgctgtgtgttggaattcctaccg

SEQ ID NO: 2001 - DNA, 324 bp, Glycine max
  Clone ID: LIB3072-027-Q1-E1-A11
gattcacacaactaactaagaaagtcttccatagccccccaaaaatgaagagcaccatcttctttgctctctttctcttttgtgccttcaggacctcatacctaccttcagccatcgctgatttcgtgctcgataatgaaggtaaccctcttgaaaatggtggcgcatattatatcttgtcggacataagagcatttggtggaataagacgagcccgcaacgggaaatgaaagatgcgctctcactgtggtgcaatctcgcaatgagctcgacaaagggattggaacagtcatctcgtcgccatatcgaatccgttttatcgcc

SEQ ID NO: 2002 - DNA, 338 bp, Glycine max
  Clone ID: LIB3072-027-Q1-E1-A3
tactgctgccaaaagactacagaatgcggcatgaataagaaacaatctcaaaatccctttcttgtgttctatgatatattgccttcacaccatagtctgagtcctctgagactttccttcaatccttcaccttctgtctctctaagcgcaaaacctcatattgtttgtggcggctaaggatgtcagggaaaggggctaacgggttgatcacaagcataaactccggcgccaataataaatactatgacatgaagaaacccatctcgcgttcttcacattccggccttcacttcccaatttgccgtatccaccggcttttgatgtcaatgacaaccgcc

SEQ ID NO: 2003 - DNA, 416 bp, Glycine max
  Clone ID: LIB3072-027-Q1-E1-A5
gagagagtgtagtgttgttgaggttttttgtagcagaattcagtgcggtgtgttgtagcagcgattagaaggaaggaggaaagatgaacacagacatcactgcatcgacgaagccagagtacccagtcattgatcgcaaccctcctttcaccaaagtcgtcggcaacttcaacaccctcgactatctccgattcgtcacaatcaccggcgtttccgtcaccgtcggccacctctccgggattaagcctggaattaggggtccttcgatggtgacagggggtttgatcggtgtgatgggtgggttcatgtatgcttaccagaactccgctgggagactcatgggtttcttccccaacgatgattaggtagctccctacaacaaaaaataattcccttttttgtgctcatcagaaaac

SEQ ID NO: 2004 - DNA, 408 bp, Glycine max
  Clone ID: LIB3072-027-Q1-E1-A6
gattcacacaactaactaagaaagtcttccatagccccccaaaaatgaagagcaccatcttctttgctctctttctcttttgtgccttcaccacctcatacctaccttcaaccatcgctgatttcgtgctcgataatgaaggtaacccccttgaaaatggtggcacatattatatcttgtcagacataacagcatttggtggaataagagcagccccaacgggaaatgaaaggtgccctctcactgtggtgcaatctcgcaatgagctcgacaaagggattggaacaatcatctcgtcgccatatcgaatccgttttatcgccgaaggtcatcctttgagccttaagctcgattcatttgcagttataatgctgtgtgttgggattcctaccgagtggtctgttgtgg

SEQ ID NO: 2005 - DNA, 443 bp, Glycine max
  Clone ID: LIB3072-027-Q1-E1-A7
ggaagacgacagaaggggagagaaaaaaaaaaaaactttcgtttctactatttcagtattgttctctctcttcacctcactcgtctttctcttttcactctcccagcatgtaacccacgccctcatgcatcgccctcttcccttccctttcaagtgagtctcatcaccttacttcaacaccgcggcgaacgacaataatccgtattcagatttgctcaccgtggacaatagtcatcatcgatccagattcagatctgctcataacgcacaacgactatcgatctagattggttcgtgcggttgttctgtgatattggatcagatctgtgatttgattccaccatgacattaccgacgaccacaaccatgcatgcctcgaaactcccacacgtcggaggagtgacgattgataccgctacggaaccttgcaatgcaattctgca

SEQ ID NO: 2006 - DNA, 415 bp, Glycine max
  Clone ID: LIB3072-027-Q1-E1-A8
gattcatgcaactgaataattaagaaaagccatttccatagcagcctaagaaaatgaagagcactagcttgttcgctatctttctacttcgcgccttcacctcatacctaccttccgccaccgcccaggacgtgctcgacgtggatggcgatccgattcggaacggtttcatatactacgttttgccggcaataagaggaaacggtggcggaatagaacgagccgcactcgggaaagacacttgccctatcactgtagtgcaatctcccaatccaaactctaaggggttagaaattaagtttgaatctgcataccccgcctattacataaacgaaaccctaattttgcaaataaagttcagttacccacagcagtgtgaaagaaagaatccttggtgggccatttctaaggatat

SEQ ID NO: 2007 - DNA, 348 bp, Glycine max
  Clone ID: LIB3072-027-Q1-E1-A9
gatatcagaagcgcagacctaggatttcggccgtttgctccccaaggaaagaagcagagtgtttcttttgaaatcagctagaaaagatgtcaggtgaagaggtagctgttgcagctgaggcacctgctgcttcaattccaggtgagccaatggacatcatgactgctctacagcttgtgctgagaaaatctctggcctatggtggtcttgcacgaggtcttcatgaaggtgctaaggtgatcgagaagcgtactgcacagctctgcgttctaccagaagattgtgaccaacctgattatgtgaaactggtgaaggctctttgtgcagagcacaatgttagccttttga

SEQ ID NO: 2008 - DNA, 311 bp, Glycine max
  Clone ID: LIB3072-026-Q1-E1-E10
gacagcaaaaacaattaataaagatgagtttgaagaacaacacggtggtgctaaaggtgtgtttgttgcctcttttccttgtgggggttacagctgcacgcatggaactgagcttcttcaaaagtgatcagtcatcaagttatgatgatgatgagtattcaaaaccatgctgtgatctctgcatgtgcacacgctcaatgcctcctcaatgcagctgtgaagatattacgctgaattcatgccactcacattgtaacagctgtatgtgcacacgctcacaggcacgacagtgtccttgtcttgacaccaac

SEQ ID NO: 2009 - DNA, 309 bp, Glycine max
  Clone ID: LIB3072-026-Q1-E1-E12
gaacacttggtttagcaagagaaaaaataccaaccatggcaaccatttctactgatcaaccaagaggatcctactcctatggaacctcctatggagcaccctatggaaccacctatgagaccaacagcagcattaacaaccctccttcacgccaaaccgtgaagttcataactgctgcaactactggcatcacactcttactcctgtctgggttgaccctcacacgcactgtcatacgtttgatcattgcaacccctcatcttgttatcttcagccccatccctgtccctgctgcgtttgtgctgttcc

SEQ ID NO: 2010 - DNA, 409 bp, Glycine max
  Clone ID: LIB3072-026-Q1-E1-E2
ggttgataaattaagcaagtaaggttgggatggagggaactaatagtagcggtgataacgtgagtgcgggtgtggtgcagagtaggatgaggatgaaggtgatggtggctatagacgagagtgaaggaagcttctatgctcttaagtgggcccttgataacctcttcaccaccatggccactgtgggagaagcatcatcacctgaaaatgatggcatggtgttcttggttcatgttgagcctaaagttcacaactatgtgtatcccatcggacccggtggagcagccttttatcctgcaactgtagtagtggattcggtgaagaaagcacaacaagaacgatcagcagctattctctcacgggcattgaaaatgtgccatgataagctggtgaaaggagagagtattat

SEQ ID NO: 2011 - DNA, 400 bp, Glycine max
  Clone ID: LIB3072-026-Q1-E1-E4
aaaaaagagaagaagatgggtttgaagaacaacatggtggtgctaaaggtgtgtttggtgctacttttccttgtggggggcactactagtgccaacttgaggctgagtaagcttggcctgctcatgaaaagtgatcatcatcaacactcaaatgatgatgagtcttcaaaaccatgctgtggtcaatgcgcatgcacaaagtcaaaccctcctcaatgccgctgttcagatatgaggctgaattcgtgccattcagcttgcaaatcttgtatttgcgcattatcgtatcctgcacagtgtttttgtgttgacataaccgatttctgctatgaaacttgcaaacccagtgaggatgacaaggaaaactactaatgaacaagtgttatgcatgtaagctctc

SEQ ID NO: 2012 - DNA, 113 bp, Glycine max
  Clone ID: LIB3072-026-Q1-E1-E5
tagtggtccacattgtgtttcgtgcatttttattctcgttttgtttactttttataccccctctagctaaatccttggaaaactaattgtagatcagtttaacatcatcttgt

SEQ ID NO: 2013 - DNA, 133 bp, Glycine max
  Clone ID: LIB3072-026-Q1-E1-E6
gtgcattacattaatataaagaacggtttggctaacaaatgtatttaacacattggttaaaaaattaaaaaaatatttattgtgaaaattatagaaaaatgtaaaaaaaatcacaaacattataatgttttac

SEQ ID NO: 2014 - DNA, 403 bp, Glycine max
  Clone ID: LIB3072-026-Q1-E1-E9
cccacgcaaccgtacagctgtcagtagaggagagaatgggacacatcaagagcagaatgaccaagttcacaatcctcctcatctctcgtctcctctgcatcgcccagacttgcagcgcctccaaatggtaggaccagcaagatacctgccgcaggcagctccagggggtgaatctcacgctctgcgagaagcacatcatggataagatccaaggccgcggtcgatgatcgatgatgatgacgacgacaatcacattctcaggagcatgcggggaatattcagctatataacgaggaaccattgaatacacgatgacgaacaaaagattgcgacatgcagaactgctgcacagaaatgagcgagctgagaaacgccaaatgcgactgcatagcaccgcacaaga

SEQ ID NO: 2015 - DNA, 349 bp, Glycine max
  Clone ID: LIB3072-026-Q1-E1-F1
ggcacaagtgagtttgttgatcgagataactagaaacagtgtgatgaaaatgaaggtccttgttttcttcgttgctacaattttggtagcatggcaatgccatgcgtacgatatgttccctctccgaatgaacactggctatggtgcccgtactccggaggtgaaatgcgcaagttggaggcttgctgtggaagcacacaacatctttggctttgagaccattcctgaagagtgcgttgaagcaacaaaggaatacatccatggcgaacaatgtagatcagacttcaaaacagttaaccaacaagcttacttttatgccagagacctcgaagtccatcccaaggacaca

SEQ ID NO: 2016 - DNA, 326 bp, Glycine max
  unsure at all n locations
  Clone ID: LIB3072-026-Q1-E1-F3
gaagagagaaatatcttgttgagttgatttctgatcccaaattgagtttgagtttcagccatggtatctgtttctctgctcttattcctatctttctttgccttctttgcaccctctgaatctcacgacaaagtctcgttggaattgtactacgaaagcttatgcccctacagcgccaacttcatcgtgaatcacctcccaaaaatcttcaccccagatcttgcnccaatcgttcacctcaaactcgttccttggggcaatgccaaactccgtgccaacgccacctttgactgccaacatgggccatatgagtggcttctgaacac

SEQ ID NO: 2017 - DNA, 395 bp, Glycine max
  Clone ID: LIB3072-026-Q1-E1-F4
gcaatgttcgtgccacactacaacctgaacgcgaacagcataatatacgcattgaatggacgggcattgatacaagtggtgaattgcaacggtgagagagtgtttgatggagagctgcaagagggacgggtgctgatcgtgccacaaaactttgtggtggctgcaagatcacagagtgacaacttcgagtatgtgtcattcaagaccaatgatacacccatgatcggcactcttgcaggggcaaactcattgttgaacgcattaccagaggaagtgattcagcacattttcaacctaaaaagccagcaggccaggcagataaagaacaacaaccctttcaagttcctggttccacctcaggagtctcagaagagagctgtggcttagagcccttt

SEQ ID NO: 2018 - DNA, 418 bp, Glycine max
  Clone ID: LIB3072-026-Q1-E1-F5
gatagatagagagcgcggcataacctaaacttaccctccttctctctgtgtgtgtgcgcatcaaacgcaaccagaagcagccatggccactgcaagaactgtgaaggacgtttctcctcatgagttcgtcaaagcttactcttctcacctcaagcgatctggcaagatggagctgccagagtggactgatattgtgaaaactgcaagatttaaggagttggctccttatgatcctgactggtactatgtcagagctgcttccatggcaagaaagatctacttgagaggaggacttggtgttggtgcctttcagaggatttatggtgggagcaagaggaatggtagccgccctcctcatttctgcaagagcagtggtgctgttgctcgtcacattcttcaacagttgcagaacatgagc

SEQ ID NO: 2019 - DNA, 255 bp, Glycine max
  Clone ID: LIB3072-026-Q1-E1-F7
ttttggggagaaaaatggcgaagctgatgtgtatattgtatgtgtcatatccctatgttggtagcaacaggactaattaatgtagcaaatcacttggaagatcatgtatctagtttctcaactggcttatctgagtgtggataaccattatcacgccttatgagtaggacaacgagtactgtttgtgatgcctgtccatggtttaagaaatccgtccttacacaacttgtgtgctttgttattcaattctcatca

SEQ ID NO: 2020 - DNA, 360 bp, Glycine max
  Clone ID: LIB3072-026-Q1-E1-F8
ggaagcatttggtggagcttccaggtgcaaagaccaaattgtctctgtggaaggctgatcttgctcaagagggaagctttgatgaagccattaaaggctgcactggagttttccacgtggcaacccccatggattttgactccaaggaccctgagaatgaagtgataaagcctacaataaacggattgctagacatcatgaaagcatgcgtgaaggccacaactgtccgaaggcttgtactcacttcctcagcgggaactgtggatgttacggaatacccaaaccctgtcatcgatgagaactgttggagccatgttgacttctgcataaaggtcaaaatgaccgggttgatgtaatttg

SEQ ID NO: 2021 - DNA, 288 bp, Glycine max
  Clone ID: LIB3072-026-Q1-E1-G1
gacagcaaaaacaattaataaagatgagtttgaagaacaacatggtggtgctaaaggtgtgtttgttgcttcttttccttgtgggggttacagctgcacgcatggaactgagcttcttcaaaagtgatcagtcatcaagttatgatgatgatgagtattcaaaaccatgctgtgatctctgcatgtgcacacgctcaatgcctcctcaatgcagctgtgaagatattaggctgaattcatgccactcagattgttagagctgtatgtgcacacgctcacagccaggac

SEQ ID NO: 2022 - DNA, 287 bp, Glycine max
  Clone ID: LIB3072-026-Q1-E1-E1
gggcattggtacaagtggtgaattgcaatggtgagagagtgtttgatggagagctgcaagagggaggggtgctgatcgttccacaaaactttgcggtggctgcaaaatcccagagcgataactttgagtatgagtcattcaagaccaatgatagaccctcgatcggaaaccttgcaggggcaaactcattgttgaacgcattgccagaggaagtgattcagcacacttttaacctaaagagccagcaggccacgcaggtgaagaacaacaaccctttcagcttccct

SEQ ID NO: 2023 - DNA, 433 bp, Glycine max
  Clone ID: LIB3072-026-Q1-E1-G2
ggctctaataactcattattcattaacacacacctcaaactaaaaaaaaaaaatgtattctgttgcttccacttcccttacttcaccactcctccacgaccttgagaacttccattactcaagaaggttactccttcactccccataccttaaccaatcagccaaacccccaagaagcagccacgattcttcaacagaaacataccttggagatggcaatttcgatgcaaatgttgtcatggtactctcagtcctactctgtgctctcatatgctcactggggctaaactccatcataaggtgtgcactaaggtgttcaaattttgttgtgagtgactcagtggcaaccaataacaataacaacaaccctccagcagcaagagttgccacacacgagtgaagaagaaagcaaccaagacttttaccacagtga

SEQ ID NO: 2024 - DNA, 326 bp, Glycine max
  Clone ID: LIB3072-026-Q1-E1-G3
gacagcaaaaacaattaataaagatgagtttgaagaacaacatggtggtgctaaaggtgtgtttgttgcttcttttccttgtgggggttacagctgcacgcatggaactgagcttcttcaaaagtgatcagtcatcaagttatgatgatgatgagtattcaaaaccatgctgtgatctctgcatgtgcacacgctcaatgcctcctcaatgcagctgtgaagatattaggctgaattcatgccactcagattgtaagagctgtatgtgcacacgctcacagccaggacagtgtctttgtctccgacacaacgactttctgcacaaa

SEQ ID NO: 2025 - DNA, 423 bp, Glycine max
  Clone ID: LIB3072-026-Q1-E1-G4
gcgagagagacagtggaaagaaaggaaagggatgacgctgggtctgatcaatgcgaatcctgtggttcacgccaagaaagagcgaatcgctcgttctgatgatcctcacgccgatgacgccgttgatcctctcgacatctatgatttcgtgagggatattcgggatcccgaacatccttattccctggaacagctcagtgttctctccgaggaatctatctccgttgacgacaaattaggccgaattctgataacttttacgccgaccgtacagcactgtagcatggccacggttattggactttgtctcagagttaaactgaagcactacttccctcctcattacaaagtggacatcaacgtttctcctggatctcatgccaacgaagaatcagtcaataagcagttaaatggataagaaag

SEQ ID NO: 2026 - DNA, 374 bp, Glycine max
  Clone ID: LIB3072-026-Q1-E1-G5
gacagcaaaaacaattaataaagatgagtttgaagaacaacatggtggtgctaaaggtgtgtttgttgcttcttttccttgtggggttacagctgcacgcatggaactgagcttcttcaaaagtgatcagtcatcaagttatgatgatgatgagtattcaaaaccatgctgtgatctctgcatgtgcacacgctcaatgcctcctcaatgcagctgtgaagatattaggctgaattcatgccactcagattgtaagagctgtatgtgcacacgctcacagccaggacagtgtccttgtcttgacaccaacgacttctgctacaaaccttgcaagttcacaagatgactacaaaaactaatacctctctcaaaat

SEQ ID NO: 2027 - DNA, 432 bp, Glycine max
  Clone ID: LIB3072-026-Q1-E1-C12
gattcacacaactaactaagaaagtcttccatagccccccaaaaatgaagagcaccatcttctttgctctctttctcttttgtgccttcaccacctcatacctaccttcagccatcgctgatttcgtgctcgataatgaaggcaaccctcttgaaaatggtggcacatattatatcttgtcagacataacagcatttggtggaataagagcagccccaacgggaaatgaaagatgccctctcactgtggtgcaatctcgcaatgagctcgacaaagggattggaacaatcatctcgtccccatatcgaatccgttttatcgccgaaggccatcctttgagccttaaattcgattcatttgcagttataatgctgtgtgttgggattcctaccgagtggtccgttgtggaggatctaccagaaaggaactgct

SEQ ID NO: 2028 - DNA, 309 bp, Glycine max
  Clone ID: LIB3072-026-Q1-E1-C2
gatgaacggtgaaccgaatcccccttcgaagtgaattatattgcagcgaatcacacacactctgaacaacgcccaccatgcacgccagtgataggtttaacatcaattcccagcttgagcatctccaagccaaatatgttggaactggccatgccgatttgaacagatttgagtgggcagtgaacattcaacgagataactatgcatcatatattggacactaccctttactgtgattctttgctattgctgaaaatgaatctatttggaagagaacgctacagccttatgcagaaaaatgctccctgc

SEQ ID NO: 2029 - DNA, 308 bp, Glycine max
  Clone ID: LIB3072-026-Q1-E1-C3
gacacttactagtactaagcatggagtcctcaaagatctatgcttacctcttcctctgcatgatctttctctcttccgccactcccattcacggttgtggctactgtggcaaaccccccaaaaagcacaagcctggtaaaacaccagagacacccaaaatacccgttgttaagccagcagtcaccatccctcccaataatgttcctcccgttgttcgtccatcaatagtgaagcccaccaggtagtctccctccaattccaattattaacccaacaaccacaccacggaatggagggaacactccatg

SEQ ID NO: 2030 - DNA, 327 bp, Glycine max
  Clone ID: LIB3072-026-Q1-E1-C4
gacagcagaaacaattaatacagatgagtttgaagaacaacatggtggtgctaaaggtgtgtttgttgcttcttttccttgtgggggttacagctgcacgcatggaactgagcttcttcaaaagtgatcagtcatcaagttatgatgatgatgagtattcaaaaccatgctgtgatctctgcatgtgcaaacgctcaatgccttcccaatgcagctgttaagatattaggctgaattcatgccactcagattgtaacagctgtatgtgcacacgctcatagccaggacagtgtcattgtcgtgacaccaaccacttctgccacaaac

SEQ ID NO: 2031 - DNA, 400 bp, Glycine max
  Clone ID: LIB3072-026-Q1-E1-C5
ggtagactcgaatcctaaaaaattaaaccctagctagagagagagagagagagggtttaaagcttctttctggcgcaacgcaattcatagcaaaaacagagagtgagagagggagatggggagcgacagcgaggcagagaagtcggtgcagaaagagaaggagaagaagaagatgttggccctggctcccattgctaaacctcttgctgggaagaagctttgcaagcgaaccctaaaacttgttcgtagagctgccgaacacaaatgcttgaaaagaggagtgaaggaggtcgttaaaagtataaggagaggtcataaaggattgtgtgtgattgctgggaacatatcaccgattgatgtcatcactcatgttcctaatctttgtgaagagtctgacatt

SEQ ID NO: 2032 - DNA, 404 bp, Glycine max
  unsure at all n locations
  Clone ID: LIB3072-026-Q1-E1-C6
gccactttgagttcgaactaaacaattcaattcaatctgcctcgatcatggagaggaaaacatttgggtttttgttcttgctcctccttgtcttagcttctgatgtgacggtgaagagagcagaggcgaaagattgcttgacaaggaggcacgggttccagggtagatgcttattcgacaggcaatgtgcacatgtgtgcaggagcgatggtttcatcggtggtcagtgccgaggccctcttcgcaaatgcttttgcagcaggccatgttgatcgaaattactactgccaaagaggccatgaaataaacaaacaaacaaataaataaatagctctaaccgacacatatgtacgtagtgtcggggttctagctagctacgtangtacgtgtgtcntttgttatcg

SEQ ID NO: 2033 - DNA, 331 bp, Glycine max
  Clone ID: LIB3072-026-Q1-E1-C7
gggagaaggggacagcaaaaacaattaatacagatgagtttgaagaacaacatggtggtgctaaaagtgtgtttgttgcttcttttccgtgtgggggttacagctgcacgcatggaactgagcttcttcaaaagtgatcagtcatcacgttatgactatgatgactattcataaccatgctagtgatcactgcatgtgcacacgctcaatgcctcctcaatgcagctgtgaagatattacgctgaattcatgccactcatattgttagagctgtatgtgcacacgctcacagccactacaatgtccttgtcttgacaccaaggacttctgc

SEQ ID NO: 2034 - DNA, 411 bp, Glycine max
  Clone ID: LIB3072-026-Q1-E1-C8
gacacgcagttgtattgtagaactgaacaagggtttctctttctctttctctgtctgcttcttcactttctctcgtttcaatcgaaaaaaatcatgggcagaaaattcttcgtcggtggcaactggaaatgcaatgggaccactgaggaggtgaagaagattgttactactttaaatgaagctaaagtccctggagaagatgttgtagaagttgttgtgagccctccttttgtgttccttccttttgtaaaaagtttgctgcgccctgatttccatgtctcggcccaaaattgttgggttcgcaaaggtggtgcttatactggagaggttagtgctgaaatgcttgttaatttgggaattccttgggttattattggtcactctgaacggaggcagcttttaaatgaatca

SEQ ID NO: 2035 - DNA, 325 bp, Glycine max
  Clone ID: LIB3072-026-Q1-E1-C9
gacagcaaaaacaattaataaagatgagtttgaagaacaacatggtggtgctaaaggtgtgtttgttgcttcttttccttgtgggggttacagctgcacgcatggaactgagcttcttcaaaagtgatcagtcatcaagttatgatgatgatgagtattcaaaaccatgctgtgatctctgcatgtgcacacgctcaatgcctcctcaatgcagctgtgaagatcttaggctgaactcatgccactcagattgttaaagctgtatgtgcacacactcatatccaggacaatgtcgttgtcttgataccaactacttctgctacaa

SEQ ID NO: 2036 - DNA, 278 bp, Glycine max
  Clone ID: LIB3072-026-Q1-E1-D1
gaagtacaaaacgcaataccctaatttgtttctctgtctctgtctctgtctctctctccattcgtgctttcagctccggcaatctctcttccggcgccgccgctatctcagccgcgcaccaatcttcaatttgattacttgggtcaacgatttctgtcaatctcaatcatggcaactagacttcagtttgaaaataaatgtgaacttggagtcttctctaaacttaccaatgcctactgtttggttgccactggtggttctgaaagcgtctacagtgt

SEQ ID NO: 2037 - DNA, 410 bp, Glycine max
  Clone ID: LIB3072-026-Q1-E1-D10
gactctcattttttcagtttatcagtttctcaatcgttagatctcatcttatactcaccggcgagtccatctcgcgccagcgtcgacgccgctccggccaccgctccggccaccgcctttggttccctcactttctcgtccttcttcttctcagaaatatgccttctcagaaagttgaaacgggtcatcaagacacggtccatgatgttgcaatggattactatggtaagaggctggccacggcttcatcagatcacacaattaagataattggggtgagtaatacggcctctcagcatctcgcaacattgactggtcaccaaggacctgtttggcaagtggcgtgggctcaccctaagtttggtttcccacttgcatcgtgttcctatgatgggcgtgtcattgtttgg

SEQ ID NO: 2038 - DNA, 388 bp, Glycine max
  Clone ID: LIB3072-026-Q1-E1-D2
aggacgaagaagagcgtggagacgtacaagatctacatcttcaaggtgctgaagcaggttcaccctgacatcgggatctccagcaaggccatggggatcatgaacagcttcatcaacgacatcttcgagaagctcgctcaagaatcttccagactcgcgcgctacaacaagaagcctaccatcacctctcgtgaaatccagactgcggttcgtcttgtgctccctggtgagctcgccaagcacgctgtctccgaaggcaccaaggctgtaaccaagttcactagctcttgaacgcgtttctgagaattttagggtttacgagatgtatattttgggagaattttaattttatatttatcctcttttataaaaaaaacatccttccctg

SEQ ID NO: 2039 - DNA, 370 bp, Glycine max
  unsure at all n locations
  Clone ID: LIB3072-026-Q1-E1-D3
gacagcaaaaacaattaataaagatgagtttgaagaacaacatggtggtgctaaaggtgtgtttgttgcttcttttccctgtgggggttacagctgcacgcatggaactgagcttcttcaaaagtgatcagtcatcaagttatgatgatgatgagtattcaaaaccatgctgtgatctctgcatgtgcacacgctcaatgcctcctcaatgcagctgtgaagatattaggctgaattcatgccactcagattgtaagagctgtatgtgcacacgctcacagccaggacagtgtcgttgtcntgacaccaacgacttctgccacaaaccttgcaagtccagagatgactagaaaaaactaatagctctctc

SEQ ID NO: 2040 - DNA, 428 bp, Glycine max
  Clone ID: LIB3072-026-Q1-E1-D4
gattcacacaactaactaagaaagtcttccatagccccccaaaaatgaagagcaccatcttctttgctctctttctcttttgtgccttcaccacctcatacctaccttcagccatcgctgatttcgtgctcgataatgaaggtaaccctcttgaaaatggtggcacatattatatcttgtcagacataacagcatttggtggaataagagcagccccaacgggaaatgaaagatgccctctcactgtggtgcaatctcgcaatgagctcgacaaagggattggaacaatcatctcgtccccatatcgaatccgttttatcgccgaaggccatcctttgagccttaagttcgattcatttgcagttataatgctgtgtgttggaattcccaccgagtggtctgttgtggaggatctacacaaagacctg

SEQ ID NO: 2041 - DNA, 389 bp, Glycine max
  Clone ID: LIB3072-026-Q1-E1-D5
gactctcatcacattattctatatcaattttggttaagagtcttgaaaaagcaagagaaaaaaaaataccaaccatggcaaccatttctgatcaacctagagggtcctactcctatggaacctcatatggagcaccctatggaaccacgtatgagaccaacaccagcattaacaacccaccttcacgccaaacagtgaagttcataactgctgccactattggcatcacactcttgctcctgtctgggttgaccctcacaggcactgtcataggtttgatcattgcaacccctcttcttgttatcttcagccccaatccttgtcctgctgcgtttgtgctgttcctagttgcctctggctttttgtctctggggctgtggtgttgctgc

SEQ ID NO: 2042 - DNA, 152 bp, Glycine max
  Clone ID: LIB3072-026-Q1-E1-D7
aagacgacagaaagggatagcacggggaattcagaaagatgagtttgaagaacaatatggtggtgctaaccgtgtgtttgttgcgtcctttccctgtcgcggtgacaactggacgcatggaactgaccttcttcaaacgtgatcagtcatca

SEQ ID NO: 2043 - DNA, 202 bp, Glycine max
  Clone ID: LIB3072-026-Q1-E1-C11
gattcacacaactaactaagaaagtcttccatagccccccaaaagtgaagagcaccatcttctttgcgcgctttctcttttgtgccttcacgacctcatacctatcttcagccatcgctgatttcgtgctcgatactgatcggagccctcttgatgatggtgggacatattagtatcttgtcagacataacagcatttggtg

SEQ ID NO: 2044 - DNA, 336 bp, Glycine max
  Clone ID: LIB3072-026-Q1-E1-D9
gacagcaaaaacaattaataaagatgagtttgaagaacaacatggtggtgctaaaggtgtgtttgttgcttcttttccttgtgggggttacagctgcacgcatggaactgagcttcttcaaaagtgatcagtcatcaagttatgatgatgatgagtattcaaaaccatgctgtgatctctgcatgtgcacacgctcaatgcctcctcaatgccgctgtgaagatattaggctgaattcatgccactcatattgtaagagctgtatgtgcacacgctcacagccaggacagtgtcgttgtcttgacaccaacgacttctgctacaaaccttgcaact

SEQ ID NO: 2045 - DNA, 312 bp, Glycine max
  unsure at all n locations
  Clone ID: LIB3072-025-Q1-E1-H9
gacagcanaaacaattaataaagatgagtttgaagaacaacatggtggtgctaaaggtgtgtttgttgcttcttttccttgtgggggttacagctgcacgcatggaactgagcttcttcaaaagtgatcagtcatcaagttatgatgatgatgagtattcaaaaccatgctgtgatctctgcatgtgcacacgctcaatgcctcctcaatgcagctgtgaagatattaggctgaattcatgccactcagattgttagagctgtatgtgcacacgctcacagccaggacagtgtccttgtcntgacaccaacg

SEQ ID NO: 2046 - DNA, 407 bp, Glycine max
  Clone ID: LIB3072-026-Q1-E1-A1
gattcacacaactaactaagaaagtcttccatagccccccaaaaatgaagagcaccatcttctttgctctctttctcttttgtgccttcaccacctcatacctaccttcagccatcgctgatttcgtgctcgataatgaaggtaaccctcttgaaaatggtggcacatattatatcttgtcagacataacagcatttggtggaataagagcatgcccaacgggaaatgaaagatgccctctcactgtggtgcaatctcgcaatgagctcgacaaagggattggaacaatcatctcgtcaccatatcgaatccgttttatcgccgaacgccatcgtttgagccttaagttcgattcatttgcagttataatgctgtgtgttgggattcctacggagtggtccgttgtg

SEQ ID NO: 2047 - DNA, 294 bp, Glycine max
  Clone ID: LIB3072-026-Q1-E1-A10
gattcacacaactaactaagaaagtcttccatagccccccatgaaatgaagagcaccatcttctttgctctctttcacttttgtgccttcagcatctcatacctaccttcagccagcgctgatttcgtgctccataatgagcgtagccctcttgataatggtggtacatattatatcttgtcagacacaatacgatttggcggactaagagcagctccatgggtaaatgaaagatgccctcgcactgtggtgcactcgcgcactgacctcgatcaacggattggattaatcatt

SEQ ID NO: 2048 - DNA, 425 bp, Glycine max
  Clone ID: LIB3072-026-Q1-E1-A3
gatagacataaattaagaaatcaaagagacagaaagttgagagagaagtgttcacgtctttgagaaatgggtgcttcggcatcggtcacagaaaaatccatccatgaattcatggtcaaggatgctaagggcagagacgtgaacctcagcacctacaaagggaaggttcttcttgtagttaacgtcgcttcaaaatgtggatttacaaattccaattacacccagttaactgagctttacagcaaatataaagacagaggtcttgagatactggcatttccatgcaaccagtttctgaaacaagagcccgggagtagccatgaggcagaggaatttgcctgtacaaggtacaacgctgagtatcccatttttggaaaggtacgtgtcaatggacctgatacagcacctgtccacaaattccttaa

SEQ ID NO: 2049 - DNA, 307 bp, Glycine max
  unsure at all n locations
  Clone ID: LIB3072-026-Q1-E1-A4
ggctgccgctctctgagaaaaacagatagtgtgggagagagaagagcggaagagaaaatgacgaccaggttcaagaagaacaggaagaagagaggtcacgtcagcgccggacacggccgtatcggaaagcaccgcaagcatcccggaggtcgcggtaacgccggtggcatgcatcaccaccgtatcctcttcgacaagtaccatcctggtttcttcgggaaggtangcatgcgctactttcacaaacttcgcaacaaattctacaatccgatcatcaacatcgaacagctgtgggcccccctccccc

SEQ ID NO: 2050 - DNA, 290 bp, Glycine max
  Clone ID: LIB3072-026-Q1-E1-A7
ccggggcgatactgacactggcaattactgaaggacatgcattcattgaacttgttggcctaaagtaacaacatcaggaccaggaacagggggaacaacctttggaactgcggcaatatagacccgaactgtctgaacaagatatatttgtaaacccaccacgttacccacttgtgctcagcgctatctcaaatctgaacttctttgctactgctatccaatgcccaccacaatcacacgcacttcctcctcacgttcgcaatacactctgctcaaccatatactttcct

SEQ ID NO: 2051 - DNA, 169 bp, Glycine max
  Clone ID: LIB3072-026-Q1-E1-A9
acataaagggacagcaaatacacttactaaagatgagtttgacgaacaacatggtggtgctaaacgtgtgtttgttgcttcttttccttgtgggggttacagctgcacgcatggaactgagcttcttcaaaagtgatcagtcatcatcttatgatgatgatgactattc

SEQ ID NO: 2052 - DNA, 410 bp, Glycine max
  Clone ID: LIB3072-026-Q1-E1-B10
ggggatctatcacaatagaaagcaaagctatataggattatttcccatgtcaagaaaatgaaaatccctttttattttcccatcctcgtgcttgttgtcttcattgcttctggaaaacaagtgcaaatgacagtggtaccaaattgtgtggtagaaagcttgtcagttcattgtgaaatattcaagaatccttgcgaacttctttgccaacaacattttggatcacccgcagcacatggagcttgtggcattaagttccatgtatgtgtttgttatttatgttaaatataaagtttaaccataacaatcacagctttcatacctatttaatagtatgtaagccgatggaaaaaataaatatataaataaaatgacttcattattagacacagtacgaaagatcgagcttc

SEQ ID NO: 2053 - DNA, 325 bp, Glycine max
  Clone ID: LIB3072-026-Q1-E1-B11
gattcacacaactaactaagaaagtcttccataggcggccaaaaatgaagagcaccatcttctttgctctctttctcttttgtgccttcaccacctcagacctaccttcagccatcgctgatttcgtgctcgataatgaaggtaaccctcttgaaaatggttgcacatattatatcttgtcagacataatatcatttggtggaataagaacatccccagcgggaaatgatagatgccctctcactgtggtgcaatctcgcaatgagctgcgaaaatggattgggccaatcatcttgtccccatcatcgagttcgtttttatccgc

SEQ ID NO: 2054 - DNA, 253 bp, Glycine max
  Clone ID: LIB3072-026-Q1-E1-B12
cgggacaagaaataaagataacacgatgggtttgaagaacaacatggtggtgctaaaggtgtgtttggtgctacttttccttgtggggggtactaccagtgccaactttaggctgaataaccttggcctgctcatgaaaagcgatcatcatcaacactcaaatgatcatgagtcttcacaaccatgccgtgatcaatgcgcatgcacaaagtcaaaccctcctcaatgccgctgttcacatatgacgctgaac

SEQ ID NO: 2055 - DNA, 412 bp, Glycine max
  unsure at all n locations
  Clone ID: LIB3072-026-Q1-E1-B3
gattcacacaactaactaagaaagtcttccatagccccccaaaaatgaagagcaccatcttctttgctctctttctcttttgtgccttcaccacctcatacctaccttcagccatcgctgatttcgtgctcgataatgaaggtaaccctcttgaaaatggtggcacatattatatcttgtcagacataacagcatttggtggaataagagcagccccaacgggaaatgaaagatgccctctcactgtggtgcaatctcgcaatgagctcgacaaagggattggaacaatcatctcgtcnccatatcgaatccgttttatcgccgaaggccatcctttgagccttaagttcgattcatttgcagttataatgctgtgtgttggaattcctaccgagtggtctgttgtggagga

SEQ ID NO: 2056 - DNA, 396 bp, Glycine max
  Clone ID: LIB3072-026-Q1-E1-B7
gaagccaagaaataaatttatataggaatctgtatatgatgggaattaacttatatttatctttggcataaacattactgatgaaagcaattgttagattgaatcaatgacaaagaagagtccaaaagcaatgaacaaaatttgtctgtacagagtagcagaaacaaaatcccaatcccacctatatactaaaaaaaaacataaaatgaaaattaaactaactggtttgaattcataatcatattcgcgatataccagcaacaaattcaatttcaatcaatttaaaataaaattctgcaaacaaatctacgcggtttcatcatcttcccctgtaaacaaacgcggcctcttggcggttaccggcaacgggcttttcaactcttgttcaccgcctac

SEQ ID NO: 2057 - DNA, 195 bp, Glycine max
  Clone ID: LIB3072-025-Q1-E1-H6
ggggaatgggatacctcaggtcacgctgggctacccgctgagtttaagcatctcattaagcggagcatagaatgatccataaaagtgactgatatcgtggatgtacaatgggatccaaacttacatgtgcatgcaggcaacgtcatcactcgtcaatacagtaacgaacattcacttcactgcacgtcgtgatta

SEQ ID NO: 2058 - DNA, 328 bp, Glycine max
  Clone ID: LIB3072-026-Q1-E1-B8
gacagcaaaaacaattaataaagatgagtttgaagaacaacatggtggtgctaaaggtgtgtttgttgcttcttttccttgtgggggttacagctgcacgcatggaactgagcttcttcaaaagtgatcagtcatcaagttatgatgatgatgagtattcaaaaccatgctgtgatctctgcatgtgcacacgctcaatgcctcctcaatgcagctgtgaagatattacgctgaattcatgccactcaaattgtaagagctgtaagtgcacacgctcacagccaggacagtgtcgttgtcttgacgacaacaacttcggctacaaacc

SEQ ID NO: 2059 - DNA, 57 bp, Glycine max
  Clone ID: LIB3072-026-Q1-E1-B9
gcgagaaaaattagtctatgacctaatgggttgaaagatactcataatctctaatcc

SEQ ID NO: 2060 - DNA, 320 bp, Glycine max
  Clone ID: LIB3072-026-Q1-E1-C1
cagggagagcagcaacaattaataaagatgagtttgcagaacaacatggtggtgctaaaagtgtgtttgttgcctcatttccttgtgggggttacagctgcacgcatggaactgagcttcttcaaaagtgatcagtcatcaagttatgatgactgatgagtattcaaaaccatgctgtgatctctgcatgtgcacacgctcaatgccacctcaatgcaactgtgaagatattatgctgaacatcatgccactcacatatgtacagctgtatgtgcacactcacacagccataacagtgtctctgtcttgacatcaacgac

SEQ ID NO: 2061 - DNA, 399 bp, Glycine max
  Clone ID: LIB3072-026-Q1-E1-C10
gatgattaatcaccagaccaaatgtgcctggtcaattaggggaccgaatttcataactgagtgctttaggggaagaagaagcgaaacacagtgtcagtatctgagttttttcttcaaactcaaaccctaacaaacaaaaaccatgtatcgttttttctcttccattcgccatggccgtggatcttccctcgcatctcttctcgcgccgaaaactgcacttccattcaacgccgctctacgaactcgccgtttacctcaaaacgaccgtacacttcagattcctctgcctttatttccagcgtttccgaaatgggaaaaaaaatttagtttgattgcgtcctttccatgtgtggatttcattgctctaaactggtggaatacaaaatcgtgtaggtttgt

SEQ ID NO: 2062 - DNA, 340 bp, Glycine max
  Clone ID: LIB3072-025-Q1-E1-F3
ggagttttcaagttggaattatttttgccagaagaatatccaatggctgctccaaaggttaggtttctgacaaaaatatatcatccaaacattgataagcttggcaggatatgtcttgacattctgaaagataagtggagtcctgcccttcagattcgcactgtacttttgagctttccagtatcaacctgtgtttcacttctataagatgtaatgatacacgcagagaaatagagatatgcatgcatgcagattaccagtattcaagctcttctaagtgcaccaaacccaagatgattcgctttctgagaacattgccaagcattgggaatctaatgag

SEQ ID NO: 2063 - DNA, 314 bp, Glycine max
  Clone ID: LIB3072-025-Q1-E1-F7
gactttgagttcgaactaaacaattcagttcaatctgcctcgatcatggagaggaaaacatttgggtttttgttcatgctcctccttgtcttagcttctgatgtgatggtgaaaatagcagaggcgagtgattgcttgacaatgaggcacgggttccacggtagatgcttattcgacaggcaatgtgcacatgtgtgcaagatcgatggtttcatccgtggtcagtgccgaggtcctcttcgcaaatacatatgcatcatgccatgttgattgaaattactactgccaaataggccattaaataaacttacaaa

SEQ ID NO: 2064 - DNA, 303 bp, Glycine max
  Clone ID: LIB3072-025-Q1-E1-F8
gacagaagggggaactaaacaattcaattcaatctgcctcgatcatggagaggaaaacatttgggtttttgttcttgctcctccttgtcttagcttctggtaagatacatatttatagttccgtgttattcatttggggcacataattaaattatttttcacgtatggtatttgattttttaacttaatattaattgtttttttattaataccttaattaatttttttaatctaatattgatattattttttcatttatttaataattattttggggggaagataggaatatctttaccatat

SEQ ID NO: 2065 - DNA, 418 bp, Glycine max
  Clone ID: LIB3072-025-Q1-E1-G10
gaagtaaaaaaactaccctcgatccatgcctcaaaagggttgataataagtaaaaaaaaatcaatgaattcatgataaaacccttctgcgtttttttattataaatttttttgtcaataaagggatcaaggggttgggggatcaaatggtaaagttcttttgttggtaaattggaggattagaaacatgactattgctttccaattagctgtttttgcattaattgctatttcatttattttaatgattagtgtacctgttgtatttgcttctcctgaaggttggtcgaataacaaaaatgttgtattttccggtacatcattatggattggattagtgtttctcgtgggtaatcttaattctctcatttcctgaagccctatttagtctagatcaaaaacgaaatgaaccctccccc

SEQ ID NO: 2066 - DNA, 341 bp, Glycine max
  Clone ID: LIB3072-025-Q1-E1-G12
gatgcaactgaataattaagaaaagccatttccatagcagcctaagaaaatgaagagcactagcttgttcgctatctttctactttgcgccttcacctcatacctaccttccgccaccgcccaggacgtgctcgacgtggatggcgatccgattcggaacggtttcatatactacgttttgccggcaataagaggaaacggtggcggaatagaacgagccgcactcgggaaagacacttgccctatcactgtagtgcaatctcccaatccaaactctaaggggttagaaaataagtttgaatctgcataccccgcctattacataaacgaaaccctaattt

SEQ ID NO: 2067 - DNA, 247 bp, Glycine max
  Clone ID: LIB3072-025-Q1-E1-G2
gacagcaaaaacaattaataaagatgagtttgaagaacaacatggtggtgctaaaggtgtgtttgttgcttcttttccttgtgggggttacaactgcacgcatggaactgagcttcttcaaaagtgatcagtcatcaagttatgatgatgatgagtattcaaaaccatgctgtgatctctgcatgtgcacacgctcaatgcctcctcaatgcagttgtgaagatattaagctgaattcatgccactc

SEQ ID NO: 2068 - DNA, 362 bp, Glycine max
  Clone ID: LIB3072-025-Q1-E1-G3
gataataacacgcaattttcatttttctctctcccttagtcaaagggattcatcgttcttcttcccaggttatttagaaaagcaaaatggtgaagatttgctgcattggtgctggatatgtggggggtcctactatggcagtcattgcacttaagtgcccatccattgaagtcgctgttgttgatatctctaaatcccgcattgcagcctggaacagcgaccagcttcctatctatgaacctggccttgatggtgttgtgaagcaatgccgtggcaagaacctcttcttcagcactgatgttgaaaagcatgtctttgaggctgacatagtgtttgtctctgtcaaaacccaaacaaaactc

SEQ ID NO: 2069 - DNA, 277 bp, Glycine max
  Clone ID: LIB3072-025-Q1-E1-G4
gacagcaaaaacaattaataaagatgagtttgaagaacaacatggtggtgctaaaggtgtgtttgttgcttcttttccttgtgggggttacagctgcacgcatggaactgagcttcttcaaaagtgatcagtcatcaagttatgatgatgatgagtattcacaaccatgctgtgatctctgcatgtgcacacgctcaatgcctcctcaatgcagctgtgaagatattaggctgaattcatgccactcagattgtaagagctgtatgtgcacacgctc

SEQ ID NO: 2070 - DNA, 349 bp, Glycine max
  Clone ID: LIB3072-025-Q1-E1-G6
ggacagcaaaaacaattaataaagatgagtttgaagaacaacatggtggtgctaaaggtgtgtttgttgcttcttttccttgtgggggttacagctgcacgcatggaactgagcttcttcaaaagtgatcagtcatcaagttatgatgatgatgagtattcaaaaccatgctgtgatctctgcatgtgcacacgctcaatgcctcctcaatgtagctgtgaagatattaggctgaattcatgccactcagattgtaagagctgtatgtgcacacgctcacagccaggacagtgtcgttgtcttgacaccaacgacttctgctacaaaccttgcaagtccagagatgact

SEQ ID NO: 2071 - DNA, 353 bp, Glycine max
  Clone ID: LIB3072-025-Q1-E1-G7
gataagggcacccaattttcaattttcactctcccttaatcaaagggattcatcgttcctcctcccacgttacttacaaaagcaaaatggggaagatttgctgcattggtgctggatatatggggggtcccacgatggcagtcattggacttaagctgcccatccattgaaatccctgttgttgagatctccaaatcccgcattgcagcctggaaaagcgaccagcttcctatctatgaaccctgccttgatggtgttgtgaagcaatgccgtggcaagaacctcttcttcaacactgatgttgaaaagcatgtccttgaagctgacataatggttgtccccgtcaacacccc

SEQ ID NO: 2072 - DNA, 202 bp, Glycine max
  Clone ID: LIB3072-025-Q1-E1-G9
cgggaagataatgaggtggtgaagattgaaattgacgagtctctcttttctggttgattttggtggtgaattgtaattttgtgtcttccatggtttagttgttgacatatgattccattgttacattaaaaatttcgctttgtcttatgctaatcaattttctatttttaatgccccttatccacgtcaatggtctttcctt

SEQ ID NO: 2073 - DNA, 318 bp, Glycine max
  Clone ID: LIB3072-025-Q1-E1-H10
attcacacaactaactaagaaagtcttccatagccccccaaaaatgaagagcagcatcttctttgctctctttctcttttgtgccttcaccacctcatacctaccttcagccatcgctgatttcgtgctcgataatgaaggtaaccctcttgaaaatggtggcacatattatatcttgtcagacataacagcatttggtggaataagagcatccccaacgggaaatgaaagatgccctctcactgtggtgcaatctcgcactgagctcgacaaaaggattggtataatcatctcgtcgccatattcaatccgttttat

SEQ ID NO: 2074 - DNA, 396 bp, Glycine max
  Clone ID: LIB3072-025-Q1-E1-F11
gaacacttggtttagcaagagaaaaaataccaaccatggcaaccatttctactgatcaaccaagaggatcctactcctatggaacctcctatggagcaccctatggaaccacctatgagaccaacagcagcattaacaaccctccttcacgccaaaccgtgaagttcataactgctgcaactattggcatcacactcttactcctgtctgggttgaccctcacaggcactgtcataggtttgatcattgcaacccctcttcttgttatcttcagccccatccttgtccctgctgcgtttgtgctgttcccggttgcttctggctttttgttctctgggggctgtggtgtggccgccattgctgctttatcctggatttacaactacgtttctggga

SEQ ID NO: 2075 - DNA, 338 bp, Glycine max
  Clone ID: LIB3072-025-Q1-E1-H2
agaaggggggagttgagttgagaaggaaaggctgaagaacacatagagagagagagagaagtgcagaaaaaatgagactgttcgatccatggcctgttttcttcaagagagaatggaagcggaattggcccttcttggttggattcgccatcaccggaactctcatcaccaaactttcccttggtctctctgaggaggaagccaaaaagtcgaaattcgtccaggcacacaagaggtgactttagaatggaagatttgcagtggctttgcacattgtattagatgtgtgaagagagcttttgtttgtaataaatgaagagagatgttgtatacactcc

SEQ ID NO: 2076 - DNA, 321 bp, Glycine max
  Clone ID: LIB3072-025-Q1-E1-H4
gattcacacaactaactaagaaagtcttccatagccccccaaaaatgaagagcaccatcttctttgctctctttctcttttgtgccttcaccacctcatacctaccttcagccatcgctgatttcgtgctcgataatgaaggtaaccctcttgaaaatggtggcacatattatatcttgtcagacataacagcatttggtggaataagagcagccccaacgggaaatgaaagatgccctctcactgtggtgcaatctcgcaatgagctccacaaagggattggaacaatcatctcgtccccatatcgaatccgtgttatcg

SEQ ID NO: 2077 - DNA, 69 bp, Glycine max
  Clone ID: LIB3072-025-Q1-E1-H5
gagtgttggtacatattaacacttcatacacaacacaacacaacacaacaccacgacgctattcaacgc

SEQ ID NO: 2078 - DNA, 318 bp, Glycine max
  Clone ID: LIB3072-025-Q1-E1-C6
gatgcaactgaataattaagaaaagccatttccatagcagcctaagaaaatgaagagcactagcttgttcgctatctttctactttgcgccttcacctcatacctaccttccgccaccgcccaggacgtgctcgacgtggatggcgatccgattcggaacggtttcatatactacgttttgccggcaataagaggaaacggtggcggaatagaacgagccgcactcgggaaagacacttgccctatcactgtagtgcaatctcccaatccaaactctaaggggttagaaattaagtttgaatctgcataccccgccta

SEQ ID NO: 2079 - DNA, 57 bp, Glycine max
  Clone ID: LIB3072-025-Q1-E1-C7
gagacctcaggtcaggcggggctacccgctgagtttaagcatatcaataagcggagc

SEQ ID NO: 2080 - DNA, 332 bp, Glycine max
  unsure at all n locations
  Clone ID: LIB3072-025-Q1-E1-C8
gacacaactaactaagaaagtcttccatagccccccaaaaatgaagagcaccatcttctttgctctctttctcttttgtgccttcaccacctcatacctaccttcagccatcgctgatttcgtgctcgataatgaaggtaaccctcttgaaaatggtggcacatattatatcttgtcagacataacagcatttggtggaataagagcagccccaacgggaaatgaaagatgccctctcactgtggtgcaatctcgcaatgagctcgacaaagggattggaacaatcatctcgtcnccatatcgaatccgttttatcgccgaaggccatcctt

SEQ ID NO: 2081 - DNA, 406 bp, Glycine max
  Clone ID: LIB3072-025-Q1-E1-C9
ccacaacctggtgaaagatttaagctaataaaagagcaagaggcaagaagaaaacaacaaagagaagaagaagaagaaaaaaggaaagccttggaagcagcagctagagaaactaaagtagacaagacacttgaggaaacagttgaagtggagaatcaaactggaggtgatttagttgttgaaaaatctcggtctttggcttcagatactgatccctccatatctggagtagtaaatggtaatccattaagtaaagacttggagggaaatcagaattctacatctacatctgagacagaaaataatgaaggttctgctcatttcaacaatgttgagataaacgagaaaattttagacaaggaaccaagagaagtattaacaactacaaccaccacaaacaaacaac

SEQ ID NO: 2082 - DNA, 271 bp, Glycine max
  Clone ID: LIB3072-025-Q1-E1-D12
cggggagtcttttctttttctgtatcgtttttactttccatcacttccattttccgtcagcatggaggatgctgctgcttctgctaatgtgttggcagcccacgatggcactatttctgttgcttcatctggcaacgtatgattgatactttctgcctcatccgcaattgtccagcatacagaccacaagatccacacaacgccagtgttggggagacctgaggggagtatacactggatagatttatcccctgtggaaggaccacctgca

SEQ ID NO: 2083 - DNA, 237 bp, Glycine max
  Clone ID: LIB3072-025-Q1-E1-D2
gggtccagcacgcgtccgaacagaagagagaggggaattaagtttttagggtttacaccgagcagccatacggccggtctcaacgatggatcccaacatagacgtatatgcaatcactgatgtcatcatctatgcaacatagggcaacatcattggacgtcgtgatacacaggctttcctgtgagcaccctgacgttatacgacgtaatcccattgtagcatatcacccttacagca

SEQ ID NO: 2084 - DNA, 275 bp, Glycine max
  Clone ID: LIB3072-025-Q1-E1-D4
ggcacaagtgagtttgttgatcgagataactagaaacagtgtgatgaaaatgaaggtccttgttttcttcgttgctacaattttggtagcatggcaatgccatgcgtacgatatgttccctctccgaatgaacactggctatggtgcccgtactcccgaggtgaaatgcgcaagttggaggcttgctgtggaagcacacaacatctttggctttgagaccattcctgaagagtgcgtttaagcaacacaggagtatatccatagggaaaaatata

SEQ ID NO: 2085 - DNA, 111 bp, Glycine max
  Clone ID: LIB3072-025-Q1-E1-D5
cattgtaaataagagacagatgtatatctataattagtttttaatgtgtaagtaatagaatcactttgtatcttcctcccttttttattctattaattaaattgatttccc

SEQ ID NO: 2086 - DNA, 188 bp, Glycine max
  Clone ID: LIB3072-025-Q1-E1-D6
gaagtccaagagaaaacgaaaaatttgagagaaaaggaaaggcttaacaacgcacaaaatgtcctctaatccagtaatactgcagagtgagaacttgaccaagtatatactggagaccagcgtttacccacgagaagaagagactctcaaagacctaaggaatgccactgcaagccaatcctggggct

SEQ ID NO: 2087 - DNA, 352 bp, Glycine max
  Clone ID: LIB3072-025-Q1-E1-E1
gatagtttccaatttcacatcctcttattgttaattaaaccctttgtttgcacaagaaaagagtaataacttgatcatcatcaacatgagtcgcttcaacaatcagcaagaagcccctgtatcatatcctccagctccatatgttagtgccccaccacctatgggttatccttccaaagatgatcctacagctgtagggtacccccaacaaagagttccagaggaaaccacaagcacgggtgatggattttggaaaggatgttgtgccgccttatgttgctgctgggtcctggattgttgcttctgattgaatcatagcacatatttgtgtttgtcaccaattttttttcac

SEQ ID NO: 2088 - DNA, 414 bp, Glycine max
  Clone ID: LIB3072-025-Q1-E1-E10
ggaagaggggttgaattaactgcttgcaagcatggcgaagagcaaggaagacataacctatgcaacatcacaagcaaggctttcagaagatgaagcagtgagagtggcctacgagcatggctcaccccttgaaggaggaaagattgctgactctcaaccagttgacttgttttcaagtgcacacaatatgccaaagagtggccaaacaacaatggattcaaacactagtgatcaatctcagatgcaacgtgatacacaagaaaggggttctaaagaattcaccactggagctcctggatagccccaaaaggggctcctccagcaatgggtcataaattttgaaggcaataatatagacaaccttataaaatatgtttacctttgtgtgttttgttctgcctttgtttccttttt

SEQ ID NO: 2089 - DNA, 107 bp, Glycine max
  Clone ID: LIB3072-025-Q1-E1-E12
cgtccaagagaaaacgacagaagggggagagagagagaaggcaagatgtccacgagaggacgcggtggttcggcggggaacaagttccggatgtccctgggtctgcc

SEQ ID NO: 2090 - DNA, 380 bp, Glycine max
  Clone ID: LIB3072-025-Q1-E1-E3
ggtctgtgttacaacttacggctaaattctcaaagatttaaactttgcctcagagtttccaaattcacccaaccccagagagaaaatgtctctaatcccaaatttcttcggtggcagaaggagcaacgttttcgatcctttttccctcgacgtctgggaccccttcaaggattttcctttcccaaacactctttcttcagcttcctttcctgaattttctcgggaaaattctgcattcgtgagcactcgtgtggattggaaggagaccccagaagcacacgtattcaaggctgatattccagggctgaagaaggaggaagtgaaggttcagattgaagatgataaggttcttcagataagccgagagaggaacgttgaga

SEQ ID NO: 2091 - DNA, 368 bp, Glycine max
  unsure at all n locations
  Clone ID: LIB3072-025-Q1-E1-E6
gacagcaaaaacaattaataaagatgagtttgaagaacaacatggtggtgctaaaggtgtgtttgttgcttcttttccttgtgggggttacagctgcacgcatggaactgagcttcttcaaaagtgatcagtcatcaagttatgatgatgatgagtattcaaaaccatgctgtgatctctgcatgtgcacacgctcaatgcctcctcaatgcagctgtgaagatattaggctgaattcatgccactcagattgtaagagctgtatgtgcacacgctcacagccaggacagtgtcgttgtcttgacaccaacgacttctgctacaaaccttgcaagtccagagatgactagaanaactaatagctctct

SEQ ID NO: 2092 - DNA, 315 bp, Glycine max
  Clone ID: LIB3072-025-Q1-E1-E7
gattcacacaactaactaagaaagtcttccatagccccccaaaaatgaagagcaccatcttctttgctctctttctcttttgtgccttcaccacctcatacctaccttcagccatcgctgatttcgtgctcgataatgaaggtaaccctcttgaaaatggtggcacatattatatcctgtcagacataacagcatttggtggaataagagcatccccaacgggaaatgaaagatgccctctcactgtggtgcaatctcgcaatgagctcgacaaacggattggaagaatcatctcgtccccatatcgaatccgtt

SEQ ID NO: 2093 - DNA, 358 bp, Glycine max
  Clone ID: LIB3072-025-Q1-E1-C5
gagagcaaaaccaaaaacatggcgtggcgctgcggatctctctctcggtcggtgctctcggccgcgagaaccattccaactcgttcctccatttctccactctcgccttcccttcgctctcatcttctccactctcgccgccccctcaatacactccctaggtaaggactgtgggaattctcgtgtgcacgcattcgctgatgcctctgcacagcgctgacgcctccgctcgtctcacttctcacatttccgtcgaatcgcgcgcttgctgcgaattgtctcagggtacttgaatagactttacaatcagcatcagttgtgattacgtttggcatgatgcgaaaatggtggctaatgc

SEQ ID NO: 2094 - DNA, 375 bp, Glycine max
  Clone ID: LIB3072-025-Q1-E1-E9
gacacaactaactaagacagtcttccatagccccccaaaaatgaagagcaccatcttctttgctctctttctcttttgtgccttcaccacggcatagctaccttcagccatcgctgatttcgtgctcgataatgaaggtaaccctcttgaaaatggtggcacatattatatcttgtcagacataacagcatttggtggaataagagcagccccaacgggaaatgaaagatgccctctcactgtggtgcaatctcgcaatgggctcgacaaagggattggtacaatcatctcgtccccatatcgaatccgttttatcgccgaagggcatcctttgagccttaagttcgattcatttgcagttaaaatgctgtgtgt

SEQ ID NO: 2095 - DNA, 378 bp, Glycine max
  Clone ID: LIB3072-025-Q1-E1-F1
ggagaccagacagtgtcgcagctctttctccaatctccatcctgtaagtttagggtttttcacaaattgagctttcactccattttcattcccaaatacaatctccaaattctaattttaacatccatatacgacacaacatcgcaatttctcgtagttcgttttgataactcgcgaaatcgcacgataccgacagcgtcgtgcggtaatacgacacatttgttgattgatcatgttggccaagagattaagctctttcttcaaactctccccaaaacctcagatttccacttccacgaagaaagtggatgaagggacgggaaaatactatggtaaaaaggccgtgtcatttttcttgattactattacaagtggtgt

SEQ ID NO: 2096 - DNA, 390 bp, Glycine max
  Clone ID: LIB3072-025-Q1-E1-F10
ggttctagtgtgtgattgtttgttgttgtaactcgttcttcttcttttgttgttctgtgtttgtgtttgttttttctctcacctgaaaatgtcttgctgcggtggtaactgtggttgcggaagctcctgcaagtgcggcaacggctgcggatgctgcaagatgtacccagacttgagctacactgagtcaaccaccatcgagaccttggtcatgggagtggcacctgttaaggctcaatttgagggtgctgaaatgggtgtgcccgctgagaacgatggctgcaaatgtggaccaaactgctcctgcaacctctgcacttgcaattgatgttttgggagaacaagcttcaatcagagatagcccttaattatgaataatgattaactatt

SEQ ID NO: 2097 - DNA, 344 bp, Glycine max
  Clone ID: LIB3072-025-Q1-E1-A6
gcacagtggagtaaaaaaaaactgtgtaagaaattagaaagggcgaacggcgcactttatctgaaagcgaaaaccctagggtcaaccgtgacgccacaatcgctcttgcgcgtttcaatcgccttcgacttctttgcaacgggatcaggtgctcgtccttcacgatggcgggaactgaagcaaaaaaaactgaatccaaaaaacctgccgctaagcaatccggtgggaagaagaaggaggtgaagaaggagactggcttaggtctcacgcatcggaaggcggaggacttcggagagtggtattccgaggttgttgttaatgccgaaatgattgaatactatgat

SEQ ID NO: 2098 - DNA, 276 bp, Glycine max
  Clone ID: LIB3072-025-Q1-E1-A7
cacgtcagtacagctggggaatcacaccactagggggaagcatcttccactacctcttaaagataaacacgcatggtcgtcattggtcgcggtcacgttttgacattcgtggtcacatgtgttactatcatgcatctgtagatttccagcgcacaggtggttcgtcactgctcgtgaacatgttctggcacagtaacacgtgggggtgatcacatgacttggtcgtatagcgaccaccgtagttgtaattcatggacacgctcccactgtgctgca

SEQ ID NO: 2099 - DNA, 365 bp, Glycine max
  Clone ID: LIB3072-025-Q1-E1-B1
gacagcaaaaacaattaataaagatgagtttgaagaacaacatggtggtgctaaaggtgtgtttgttgcttcttttccttgtgggggttacagctgcacgcatggaactgagcttcttcaaaagtgatcagtcatcaagttatgatgatgatgagtattcaaaaccatgctgtgatctctgcatgtgcacacgctcaatgcctcctcaatgcagctgtgaagatattaggctgaattcatgccactcagattgtaagagctgtatgtgcacacgctcacagccaggacagtgtcgttgtcttgacaccaacgacttctgctacaaaccttgcaagtccagagatgactagaaaaactaatagctc

SEQ ID NO: 2100 - DNA, 420 bp, Glycine max
  Clone ID: LIB3072-025-Q1-E1-B12
gacagcaaaaacaattaataaagatgagtttgaagaacaacatggtggtgctaaaggtgtgtttgttgcttcttttccttgtgggggttacagctgcacgcatggaactgagcttcttcaaaagtgatcagtcatcaagttatgatgatgatgagtattcaaaaccatgctgtgatctctgcatgtgcacacgctcaatgcctcctcaatgcagctgtgaagatattaggctgaattcatgccactcagattgtaagagctgtatgtgcacacgctcacagccaggacagtgtcgttgtcttgacaccaacgacttctgccacaaaccttgcaagtccagagatgactagaataactaatagctctctcaaatggaacaaacccccttacgctttgtttgttatgttagggggaacaaat

SEQ ID NO: 2101 - DNA, 370 bp, Glycine max
  Clone ID: LIB3072-025-Q1-E1-B3
gacagcaaaaacaattaataaagatgagtttggagaacaacatggtggtgctaaaggtgtgtttgttgcttcttttccttgtgggggttacagctgcacgcatggaactgagcttcttcaaaagtgatcagtcatcaagttatgatgatgatgagtattcaaaaccatgctgtgatctctgcatgtgcacacgctcaatgcctcctcaatgcagctgtgaagatattaggctgaattcatgccactcagattgtaagagctgtatgtgcacacgctcgcagccaggacagtgtcgttgtcttgacaccaacgacttctgctacaaaccttgcaagtccagagatgactagaaaaactaatagctctctca

SEQ ID NO: 2102 - DNA, 345 bp, Glycine max
  Clone ID: LIB3072-025-Q1-E1-B4
ggagaacgagaggaggggttcgggtgtgagagcgagaatcagaagatgaagaaggaagacacagtgaagctgatcagtgccgaaggttttgaatttgtggtcgacaaagaagctgcaatggtttcacagaccatacataacatgcttacttctccagggagtttcgctgagaggcagcacggcgaagttacctttcctgagatcagcaccaccattttcgagaagatttgccagtacctttattggcatctccaattccccagtgggaaacgagacggaatttccccaatgagcctgaaataaatcctggagccaaatgatgggccgccaaattaccccccatac

SEQ ID NO: 2103 - DNA, 298 bp, Glycine max
  Clone ID: LIB3072-025-Q1-E1-B5
gattcacgcaactaaataagaaatgaagagtactatcttctttgctctctttctagtttgtgccttcaccatctcatacctgccttcagccaccgctcagttcgtgctcgacactgatgatgatcctcttcaaaacggtggcgcatactatatgttgccagttatgagaggaaagggcggtggaatacaagtagattcaactggaaaagaaatatgccctctcactgttgtgcaatcacccaatgagctcgataaggggattggactagtccttacatctccattaaattgccttttt

SEQ ID NO: 2104 - DNA, 327 bp, Glycine max
  Clone ID: LIB3072-025-Q1-E1-B6
ggagagagaaagctgtctcgtgaagcagcaggtgaagctcaagcaaaagaaaataaaagctcacctctttcatcctttctttctttctttctcttccttcttctctcgattttctctctctctctgcatagctttcaacacttcacaacacaacacaccccattttctctctctaacaattcattcctcactttcacgagatccccatcaccgcttgtgacattgctgctgcaaattcacagagagagacagaaagaaagaaaaagtattcatagatttatcacatcatagagattttagtttttaagatacccttcctgtggtttc

SEQ ID NO: 2105 - DNA, 390 bp, Glycine max
  Clone ID: LIB3072-025-Q1-E1-B9
gacttgagacacaaactcacacactttgtactctccgtccttccttcttcgatccagatctctctccttctccctcaaatggcttcccttctgcaatgttccatgcccctcgtctctctttccaatcgagctctggtacccggtaccaggatctccaacccaagttcagtttccctttcaattaagggaagaagtttcccatccgttacattgcagcccagagggcgtcggtttcagcttagatgtgcggcaaaaccagagacagtgaagaaggtgtgtgacatagtcaagaagcaattggcactgccagatgaatcagctgttactggagagtctaaatttgctgcgcttggagctgattctcttgacacggttgagattgtgatggga

SEQ ID NO: 2106 - DNA, 356 bp, Glycine max
  Clone ID: LIB3072-025-Q1-E1-C1
gactttgagttcgaactaaacaattcaattcaatctgcctcgatcatggagaggaaaacatttgggtttttgctcttgctcctccttgtcttagcttctgatgtgacggtgaagagagcagaggcgaaagattgcttgacaaggaggcacgggttccagggtagatgcttattcgacaggcaatgtgcacatgtgtgcaggagcgatggtttcatcggtggtcagtgccgaggccctcttcgcaaatgcttttgcagcaggccgtgttgatcgaaattactactgccaaagaggccatgaaataagcaaacaaacaaataaataaatagctctaaccgacacatatgtacgtagtg

SEQ ID NO: 2107 - DNA, 404 bp, Glycine max
  unsure at all n locations
  Clone ID: LIB3072-025-Q1-E1-C10
gacagcanaaacaattaataaagatgagtttgaagaacaacatggtggtactaaaggtgtgtttgttacttcttttccttgtgggggttacagctgcacgcatggaactgagcttcttcaaaagtgatcagtcatcaagttatgatgatgatgagtattcaaaaccatgctgtgatctctgcatgtgcacacgctcaatgcctcctcaatgcagctgtgaagatattaggctgaattcatgccactcagattgtaagagctgtatgtgcacacgctcacagccaggacagtgtcgttgtcttgacaccaacgacttctgctacaaaccttgcaagtccagagatgactagaaaaactaatagctctctcaaatggacgaagcccctttaagctttgtttgttat

SEQ ID NO: 2108 - DNA, 410 bp, Glycine max
  unsure at all n locations
  Clone ID: LIB3072-025-Q1-E1-C11
caatgggacagcaaaaacaattaataaagataagtttgaaaaacaacatggtggtgctaaaggtgtgtttgttgcttcttttccttgtgggggttacatctgcacgcatggaactgagcttcttcaaaagtgatcagtcatcaagttatgatgatgatgagtattcanaaccatgctgtgatctctgcatgtgcacacgctcaatgcctcctcaatgcagctgtgaagatattaggctgaattcatgccactcagattgtaagagctgtatgtgcacacgctcacagccaggacagtgtcgttgtcttgacaccaacgacttctgctacaaaccttgcaagtccacagatgactagaagaactcatagctctcctcaatggacgaaacccctttaggctttgtttgttat

SEQ ID NO: 2109 - DNA, 208 bp, Glycine max
  Clone ID: LIB3072-025-Q1-E1-C12
tgggacaggtgtttgcagtactatcgatagctgataaaagagatatcaacatgattagtagataagaggagttgagattccctttgaggggaagatggcatcccatatgcaaagctattaagctggtcaaactaagggccgaactgaggaaaagatgaaccagatgatgggcactattggtgataacgctcaagctgcataggagaag

SEQ ID NO: 2110 - DNA, 332 bp, Glycine max
  Clone ID: LIB3072-025-Q1-E1-C2
gactctcatcacattattctatatcaattttggttaagagtcttgaaaaagcaagagaaaaaaaaataccaaccatggcaaccatttctgatcaacctagagggtcctactcctatggaacctcatatggagcaccctatggaaccacgtatgagaccaacaccagcattaacaacccaccttcacgccaaacagtgaagttcataactgctgccactattggcatcacactcttgctcctgtctgggttgaccctcacaggcactgtcataggtttgatcattgcaacccctcttcttgttatcttcagccccatccttgtccctgctgcg

SEQ ID NO: 2111 - DNA, 373 bp, Glycine max
  Clone ID: LIB3072-025-Q1-E1-A4
gacagcaaaaacaattaataaagatgagtttgaagaacaacatggtggtgctaaaggtgtgtttgttgcttcttttccttgtgggggttacagctgcacgcatggaactgagcttcttcaaaagtgatcagtcatcaagttatgatgatgatgagtattcaaaaccatgctgtgatctctgcatgtgcacacgctcaatgcctcctcaatgcagctgtgaagatattaggctgaattcatgccactcagattgtaagagctgtatgtgcacacgctcacagccaggacagtgtcgttgtcttgacaccaacgacttctgctacaaaccttgcaagtccagagatgactagaaaaacaaaaacctctctcaaat

SEQ ID NO: 2112 - DNA, 327 bp, Glycine max
  Clone ID: LIB3072-025-Q1-E1-C3
gactccatcttatacaggatagattaactatcacaaactaaactacacacacaagatccggggtttgatcaaccatcatgtctgacgaagtcaacagcgttttcaagaaatatctcaaccagcttcagcttcatcctctcagaaccaaggcgattactgcggcatttttggctggttttagtgatgcagtggcacagaagttatctggggccaagaaacttcagttgagaagggtacttcatttcatgctctatggtttcgcctactctgggccctttggacattttctccacaaattgatggataaaatatttaacggggagaaag

SEQ ID NO: 2113 - DNA, 331 bp, Glycine max
  Clone ID: LIB3072-024-Q1-E1-G7
gacagcaaaaacaattaataaagatgagtttgaagaacaacatggtggtgctaaaggtgtgtttgttgcttcttttccttgtgggggttacagctgcacgcatggaactgagcttcttcaaaagtgatcagtcatcaagttatgatgatgatgagtattcaaaaccatgctgtgatctctgcatgtgcacacgctcaatgcctcctcaatgcagctgtgaagatattacgctgaattcatgccactcaaattgtaagagctgtatgtgcacacgctcacagccaggacagtgtcgttgtcttgacaacaacgacgtctgctacaaaccttg

SEQ ID NO: 2114 - DNA, 335 bp, Glycine max
  Clone ID: LIB3072-024-Q1-E1-G8
gacgaccaaaactatgccattacaggcaagacctaaagtttgaagaagcacagcgcaccaaaacctaggtagagagaatcaactagtgtactacagtactagctagctcctctcaggtcctaacacaagatagagacaaaaaaaaaacgccacaaatcacaaaacacaaaaaaatcagttttttcttgaagatgccgaggcccggccctagaccttacgagtgcatgaggcgagcttggcacagcgagcggcaccaaccccatgagaggttccatcattcggcaaatttttagggtcgtcgcggaagctcactccgcgggtactaagagcaacaa

SEQ ID NO: 2115 - DNA, 349 bp, Glycine max
  unsure at all n locations
  Clone ID: LIB3072-024-Q1-E1-H1
ggtgtaagtagcctagtcatactctgtatcatttcatttcgataatcatccatagttactgaagaaaatggcaaccatctccgctgctatcacaaccccatcgatcacccgcgcatgtctagtgcaaaaacgttctcttgggttctcatctcncgttcttggtttgccagcaatgggtaaggtgggaagagtgagttgctccatggaggaaaagccttcttctgtgaaggaaagcagctcaagcatgttggggatgggggcatctttgatggcagcggcccgcgccgcagccatgtcaggcccagccatggccttgggggatgagagacttaacactgaaggaaccggg

SEQ ID NO: 2116 - DNA, 318 bp, Glycine max
  Clone ID: LIB3072-024-Q1-E1-H11
gattcatgcaactgaataattaagagaagccatttccatagcagcctaagaaaatgaagagcactagcttgttcgctatcgttctactttgcgccttcacctcatacctaccttccgccaccgcccaggacgtgctcgacgtggatggcgatccgattcggaacggtttcatatactacgttttgccggcaatacgaggaaacggtggcggcatagaacgaggccgcactcgggaaagacacttgccctatcactgtagtgcaatctcccaatccaaaccctaaggggttagaaattaagtttgaatctgcatacccc

SEQ ID NO: 2117 - DNA, 301 bp, Glycine max
  Clone ID: LIB3072-024-Q1-E1-H12
tggaggagctgagcgcggcggcgagccacgccaaatacaagcaaaaggaaaaggactccgacccgctcgagacctattgcaaggacaatccggagaccattgagtgcaaaactttcgaagactgagaaagcgcttcttacgtgcatgatgatctccacatgtctgtctgtcaactaaaacactattgcgtttcatgatatatcaaattgtgaacatgcctatgtgttaatgtttctttaaaacataatccatagccccttatgtttaatcaaaccacaatttagccctagttttttttttt

SEQ ID NO: 2118 - DNA, 373 bp, Glycine max
  unsure at all n locations
  Clone ID: LIB3072-024-Q1-E1-H2
gatgcaactgaataattaagaaaagcatttccatagcagcctaagaaaatgaagagcactagcttgttcgctatctttctactttgcgccttcacctcatacctaccttccgccaccgcccaggacgtgctcgacgtggatggcgatccgattcggaacggtttcatatactacgttttgccggcaataagaggaaacggtggcggaatagaacgagccgcactcgggaaagacacttgccctatcactgtagtgcaatctcccaatccaaactctaaggggttagaaattaagtttgaatctgcatnacccgcctattacataaacgagaccctaattttgcaaataaagttcagtttaccacagcagtgtg

SEQ ID NO: 2119 - DNA, 339 bp, Glycine max
  unsure at all n locations
  Clone ID: LIB3072-024-Q1-E1-H4
gaaagaacaaaaaaaggggaaacaaaaactaaactaanagaaagttccttccaataagcnncccccacaaaaatgaaagagcaacatcctccttgccccccttcccctttgtgccttcacaactcatacctaccttcagccatcgctgatttcgtgctcgataatgaaggtaacctcttggaaatggtggcacatattatatcttgtcagacataacagcatttggtggaataagagcagccccaacgggaaatgaaagatgccctctcactgtggtgcaatctcgcaatgagctcgacaaagggattggaacaatcatctcggtcccatatcgaatcc

SEQ ID NO: 2120 - DNA, 358 bp, Glycine max
  Clone ID: LIB3072-024-Q1-E1-H5
gacagcaaaaacaattaataaagatgagtttgaagaacaacatggtggtgctaaaggtgtgtttgttgcttcttttccttgtgggggttacagctgcacgcatggaactgagcttcttcaaaagtgatcagtcatcaagttatgatgatgatgagtattcaaaaccatgctgtgatctctgcatgtgcacacgctcaatgcctcctcaatgcagctgtgaagatattaggctgaattcatgccactcagattgtaagagctgtatgtgcacacgctcacagccaggacagtgtcgttgtcttgacaccaacgacttctgctacaaaccttgcaagtccagagatgactagaaaaacta

SEQ ID NO: 2121 - DNA, 368 bp, Glycine max
  Clone ID: LIB3072-024-Q1-E1-H6
gacagcaaaaacaattaataaagatgagtttgaagaacaacatggtggtgctaaaggtgtgtttgttgcttcttttccttgtgggggttacagctgcacgcatggaactgagcttcttcaaaagtgatcagtcatcaagttatgatgatgatgagtattcaaaaccatgctgtgatctctgcatgtgcacacgctcaatgccacctcaatgcagctgtgaagatattaggctgaattcatgccactcagattgtaagagctgtatgtgcacacgctcacagccaggacagtgtcgttgtcttgacaccaacgacttctgctacaaaccttggcaatccagagatgactagaaaaactaatagctctct

SEQ ID NO: 2122 - DNA, 344 bp, Glycine max
  Clone ID: LIB3072-024-Q1-E1-H7
gaagtgtgagtgatatttgagcttaaaccctagccgctcttctcttcattcttcactttggaaacaatcataatggcgttctgtaataaggttggaaatgtcttgaggcagggtgctgctcgcagcacacatgcccctgttgcgtccatgcttaattacatccgctgcatgtcttcaagcaagcttttcattggaggcctttcatatggagttgatgaccagtctcttaaggatgcattttctggctttggagatgtggttgatgcaaaagttataactgatagagacagtggaagatcaaggcgatttggatttgtcaacttctccaatgatgagtctgcaag

SEQ ID NO: 2123 - DNA, 316 bp, Glycine max
  Clone ID: LIB3072-025-Q1-E1-A1
gattcacacaactaactaagaaagtcttccatagccccccaaaaatgaagagcaccatcttctttgctctctttctcttttgtgccttcaccacctcatacctaccttcagccatcgctgatttcgtgctcgataatgaaggtaaccctcttgaaattggtgcacatattatatcttgtcagacataaaagcatttggtggaataagagcagccccaccgggaattgaaaaatgccctctcactgtggtgcaatctcgcaatgagctcgacaaagggattggaacaatcatctcgtcccaatatcgaatccttttt

SEQ ID NO: 2124 - DNA, 402 bp, Glycine max
  Clone ID: LIB3072-025-Q1-E1-A10
gacacaactaactaagaaagtcttccatagccccccaaaaatgaagagcaccatcttctttgctctctttctcttttgtgccttcaccacctcatacctaccttcagccatcgctgatttcgtgctcgataatgaaggtaaccctcttgaaaatggtggcacatattatatcttgtcagacataacagcatttggtggaataagagcagccccaacgggaaatgaaagatgccctctcactgtggtgcaatctcgcaatgagctcgacaaagggattggaacaatcatctcgtccccatatcgaatccgttttatcgccgaaggccatcctttgagccttaagttcgattcatttgcagttataatgctgtgtgttggaattcctaccgagtggtctgttgt

SEQ ID NO: 2125 - DNA, 374 bp, Glycine max
  Clone ID: LIB3072-024-Q1-E1-G5
gacacaactaactaagaaagtcttccatagccccccaaaaatgaagagcaccatcttctttgctctctttctcttttgtgccttcaccacctcatacctaccttcagccatcgctgatttcgtgctcgataatgaaggtaaccctcttgaaaatggtggcacatattatatcttgtcagacatagcagcatttggtggaataagagcagccccaacgggaaatgaaagatgccctctcactgtggtgcaatctcgcaatgagctcgacaaagggattggaacaatcatctcgtccccatatcgaatccgttttatcgccgaagggcatcctttgagccttaagttcgattcatttgcagttataatgttgtgtg

SEQ ID NO: 2126 - DNA, 140 bp, Glycine max
  Clone ID: LIB3072-025-Q1-E1-A12
acagtatgggattcagacaactaacttaggaagtcttgcataaccccccaaaagtgaagaggaagatcttctctgctctctttctcttttggggcctcagcagcctcaggacctagcttcagccatcgctgatttcgtgg

SEQ ID NO: 2127 - DNA, 252 bp, Glycine max
  Clone ID: LIB3072-025-Q1-E1-A2
ggtcagcacgcgtccgtatagacgacgacagaatgggacagcagaaacaattaataaagatgagtttgaataacaacatggtggcgctaaaggtgtgtttgttgcatcgtttccttgtgggggttacagctgcaggcatggaactgagcttcctcaaaagtgattactcatcacgttatgattatgattagtattcacaaccatacggtgatctccgccactacagacgcacattgactcctcaatgcagct

SEQ ID NO: 2128 - DNA, 367 bp, Glycine max
  Clone ID: LIB3072-025-Q1-E1-A3
gattcacacaactaactaagaaagtcttccatagccccccaaaaatgaagagcaccatcttctttgctctctttctcttttgtgccttcaccacctcatacctaccttcagccatcgctgatttcgtgctcgataatgaaggtaaccctcttgaaaatggtggcacatattatatcttgtcagacataacagcatttggtggaataagagcagccccaacgggaaatgaaagatgccctctcactgtggtgcaatctcgcaatgagctcgacaaagggattggaacaatcatctcgtccccatatcgaatccgttttatcgccgaaggccatcctttgagccttaagttcgattcatttgcagttat

SEQ ID NO: 2129 - DNA, 336 bp, Glycine max
  Clone ID: LIB3072-024-Q1-E1-E1
gagagtggtggagtgtgcaaaaaagcgtcgtagtcgcaaccctaatcagaagaagcgcagcttcaagcgagtgacagccaccagccatgggtcgtatgcacagccgcggtaagggtatatcctcttctgctttgccctacaaaaggacgcctcctagctggctcaagatctcttcgcaagatgtcgaagaaaatatctgcaagtttgcgaagaaaggtttgaccccgtctcagattggtgtcattctcagagattctcacggtattgctcacgtcaatagcgtcactggcagcaaaatccttcgcatcctcaaagctcacggacttgcgcctgaaa

SEQ ID NO: 2130 - DNA, 384 bp, Glycine max
  Clone ID: LIB3072-024-Q1-E1-E11
gacaactcaaacattctctccattggtccttaaacactcatcagtcatcaccatggccaagctagttttttccctttgttttctgcttttcagtggctgctgcttcgctttcagttccagagagcagcctcagcaaaacgagtgccagatccaaaaactcaatgccctcaaaccggataaccgtatagagtcagaaggagggctcattgagacatggaaccctaacaacaagccattccagtgtgccggtgttgccctctctcgctgcaccctcaaccgcaacgcccttcgtagaccttcctacaccaaaggtccccaggaaatctacattcaacaaggtaagggtatttctggcatgatatacccgggttgtcctagcacatt

SEQ ID NO: 2131 - DNA, 277 bp, Glycine max
  unsure at all n locations
  Clone ID: LIB3072-024-Q1-E1-E2
gaaattaaacanagcaaaaggccatataatttttttttatttgaaataatgtccgggatcatccacaagattgaggagaccctccatgtgggagggcacaagaaagaggagcacaaaggagaacaccatggtgagcacaaaggtgaacacaaaggagaacaccatggtgagcacaaaggtgaacacaaaggagaacaacaccatggggagcacaaggagggacttgtggataagatcaaggacaagatccatggtgatggccatgacaagggtgaga

SEQ ID NO: 2132 - DNA, 364 bp, Glycine max
  Clone ID: LIB3072-024-Q1-E1-E3
gattcacacaactaactaagagagtcttccatagccccccaaaaatgaagagcaccatcttctttgctctctttctcttttgtgccttcaccacctcatacctaccttcagccatcgctgatttcgtgctcgataatgaaggtgaccctcttgaaaatggtggcacatattatatcttgtcagacataacagcatttggtggaataagagcagccccaacgggaaatgaaagatgtcctctcactgtggtgcaatctcgcaatgagctcgacaaagggattggaacaatcatctcgtccccatatcgaatccgttttatcgccgaagggcatcctttgagccttaagttcgattcatttgcagt

SEQ ID NO: 2133 - DNA, 407 bp, Glycine max
  Clone ID: LIB3072-024-Q1-E1-E4
gacagcaaaaacaattaataaagatgagtttgaagaacaacatggtggtgctaaaggtgtgtttgttgcttcttttccttgtgggggttacagctgcacgcatggaactgagtttcttcaaaagtgatcagtcatcaagttatgatgatgatgagtattcaaaaccatgctgtgatctctgcatgtgcacacgctcaatgcctcctcaatgcagctgtgaagatattaggctgaattcatgccactcagattgtaagagctgtatgtgcacacgctcacagccaggacagtgtcgttgtcttgacaccaacgacttctgctacaaaccttgcaagttcagagatgactagaaaaactaatagctctctcaaatggacgaagcccctttaggctttgtttgttatgtt

SEQ ID NO: 2134 - DNA, 381 bp, Glycine max
  Clone ID: LIB3072-024-Q1-E1-E6
gattcacacaactaactaagaaagtcttccatagccccccaaaaatgaagagcaccatcttctttgctctctttctcttttgtgccttcaccacctcatacctaccttcagccatcgctgatttcgtgctcgataatgaaggtaaccctcttgaaaatggtggcacatattatatcttgtcagacataacagcatttggtggaataagagcagccccaacgggaaatgaaagatgccctctcactgtggtgcaatctcgcaatgagctcgacaaagggattggaacaatcatctcgtccccatatcgaatccgttttatcgccgaaggccatcctttgagccttaagttcgattcatttgcagttataatgctgtgtgttg

SEQ ID NO: 2135 - DNA, 360 bp, Glycine max
  Clone ID: LIB3072-024-Q1-E1-E7
ggaggatgaagggaagcagcaagaggaagacggagaaggagaagatagaggatgcagtggaagaaatgttgcgagcggcgcaggagcaaatcctcttaaatctcacccaagcccagatagcagcccgtccttctccggatcatgattatgatctggatctggatctggatctggagcgtcgactccaggccctcaaaatgaaaaccaaatctcaatctcaagatgatctctctgtcagattccatgcccctaaaagccaaatcagcatcttctgttgtcaaagcatccaattccaacgcccaatttgattactccgaagaagacccagaggcgcatgttcagaaattcaaccactgggct

SEQ ID NO: 2136 - DNA, 351 bp, Glycine max
  Clone ID: LIB3072-024-Q1-E1-F1
gatgcaactgaataattaagaaaagccatttccatagcagcctaagaaaatgaagagcactagcttgttcgctatctttctactttgcgccttcacctcatacctaccttccgccaccgcccaggacgtgctcgacgtggatggcggtccgattcggaacggtttcatatactacgttttgccggcaataaaaggaaacggtggcggaataaaacgagccgcactcgggaaagacacttgccctatcactgtagtgcaatctcccaatccaaactctaaggggttagaaattaagtttgaatctgcattacccgcctattacataaacgaaaccctaattttgcaaataaa

SEQ ID NO: 2137 - DNA, 342 bp, Glycine max
  unsure at all n locations
  Clone ID: LIB3072-024-Q1-E1-F4
atacggctgcaaaaaaacaacagaagggatgatgatgatgatggttatgaaagaaagcagcgcaaaagggatgatgatgatcctgaagaaagaaagcagcacagcagggatgatgatggtcgtggagatagaaagcacaaaagggaggangaagagcgcggaaacaaaggttatgagaaggaaagccgtggagattactccaagagaggcagatactaaggttctcgttcgagtgagaggtgtgaaagtgactcatgaactgtgatccaagcatcttgagaatgtttacttgctgctttaatatttgaattaaatgtgtcagttgtcttataaatttgcttt

SEQ ID NO: 2138 - DNA, 217 bp, Glycine max
  Clone ID: LIB3072-024-Q1-E1-F5
gacagcaaaaacaattaataaagatgagtttgaagaacaacatggtggtgctaaaggtgtgtttgttgcctcctttccttgtgggggttacagctgcacgcatggaactgagcttcttcaaaagtgatcagtcatcaagttatgatgatgatgagtattcaaaaccatgctgtgatctctgcatgtgcacacgctcaatgcctcctcaatgcagctg

SEQ ID NO: 2139 - DNA, 351 bp, Glycine max
  Clone ID: LIB3072-024-Q1-E1-F6
agaagggcaagaagagcaactccagaagttagttcaggaaagggtgaaagaaattcagttgattgcggaaaaggtaaccctgcatcttgggagctcagggttggtggttaattagatttgtccttcccaagatggcatgggatgaaaaggtcatgcatctatgatattgtgtgatttttttcctgtggaccaattagagtttgtttttctggacaatcactcagtagtgtatttgggttcttccttctaggatgttttaagattctcttatagtagtctgtgaaggaaccagtgatctgttaagctgtaattactgagattaaccacaacaaagttgattgagtgacattc

SEQ ID NO: 2140 - DNA, 387 bp, Glycine max
  Clone ID: LIB3072-024-Q1-E1-F7
gacagcaaaaacaattaataaagatgagtttgaagaacaacatagtggtgctaaaggtgtgtttgttgcttcttttccttgtgggggttacagctgcacgcatggaactgagcttcttcaaaagtgatcagtcatcaagttatgatgatgatgagtattcaaaaccatgctgtgatctctgcatgtgcacacgctcaatgcctcctcaatgcagctgtgaagatattaggctgaattcatgccactcagattgtaagagctgtatgtgcacacgctcacagccaggacagtgtcgttgtcttgacaccaacgacttctgctacaaaccttgcaagtccagagatgactagaaaaactaaatactccctcaaatggacgaagcccttt

SEQ ID NO: 2141 - DNA, 130 bp, Glycine max
  Clone ID: LIB3072-024-Q1-E1-F8
gccatggtgtttcaattcaaaagtttgaagtttctttgtctttgatttcatgtttaattttgttagcctgattgatatcatattttttttcttatttaacaattgaaataatacgtgctgcctttctttc

SEQ ID NO: 2142 - DNA, 166 bp, Glycine max
  unsure at all n locations
  Clone ID: LIB3072-024-Q1-E1-G1
ngacgacaaaaagggaacacattaattactcactcttcactcaaaaatcttgtctttcattttgataattcccacactatgggtgagcttcactaccaacaacaacaacaattacctcaccgaatacctaatgattcatacgaacaacaaactagctactccactc

SEQ ID NO: 2143 - DNA, 370 bp, Glycine max
  Clone ID: LIB3072-024-Q1-E1-D8
agcaaaaacaattaataaagatgagtttgaagaacaacatggtggtgctaaaggtgtgtttgttgcttcttttccttgtgggggttacagctgcacgcatggaactgagcttcttcaaaagtgatcagtcatcaagttatgatgatgatgagtattcaaaaccatgctgtgatctctgcatgtgcacacgctcaatgcctcctcaatgcagctgtgaagatattaggctgaattcatgccactcagattgtaagagctgtatgtgcacacgctcacagccaggacagtgtcgttgtcttgacaccaacgacttctgctacaaaccttgcaagtccagagatgactagaaaaactaatagctctctcaaat

SEQ ID NO: 2144 - DNA, 330 bp, Glycine max
  unsure at all n locations
  Clone ID: LIB3072-024-Q1-E1-G2
agggaaaagtgtttgcaatactagcgatagctgataagagagatacaacaagaaaagaaaaaaagaagagttgagattccctttgaagaaaagatggcatcccataggcaaagctatgaagctggtcaaactaagggccgaactgaggaaaagacgaaccagacgatgggcaatattggagagaagctcaagctgcaaaggagaagaccaagaaatgggccaagctgcaaaggaganagaccaacaaacagcccaagctgccaaagacaagacttgcgacactttccaagcggcanaggagaagacccaacagaatacaggagctgctca

SEQ ID NO: 2145 - DNA, 292 bp, Glycine max
  Clone ID: LIB3072-024-Q1-E1-G4
aaacaaaaaaaggggctcaaaacaaaacattataaagatgatttgaaaacaacaatggggggcaaaagggtgtttgtttgcttcttttcccttgtgggggttacagctgcacgcatggaactgagcttcttcaaaagtgatcagtcatcaagttatgatgatgatgagtattcaaaaccatgctgtgatctctgcatgtgcacacgctcaatgcctcctcaatgcagctgtgaagatattaggctgaattcatgccactcagattgttagagctgtatgtgcacacgctcac

SEQ ID NO: 2146 - DNA, 416 bp, Glycine max
  Clone ID: LIB3072-024-Q1-E1-B7
gacagcaaaaacaattaataaagatgagtttgaagaacaacatggtggtgctaaaggtgtgtttgttgcttcttttccttgtgggggttacagctgcacgcatggaactgagcttcttcaaaagtgatcagtcatcaagttatgatgatgatgagtattcaaaaccatgctgtgatctctgcatgtgcacacgctcaatgcctcctcaatgcagctgtgaagatattaggctgaattcatgccactcagatcgtaagagctgtatgtgcacacgctcacagccaggacagtgtcgttgtcttgacaccaacgacttctgctacaaaccttgcaagtccagagatgactagaaaaactaatagctctctcaaatggacgaagcccctttaggctttgtttgttatgttaagggagac

SEQ ID NO: 2147 - DNA, 210 bp, Glycine max
  Clone ID: LIB3072-024-Q1-E1-B9
aatagatacggggatacgaaaaaatgataaagctgctcctacataacttcccggtacggaatgtgacagacaacagtgcgctcctgctcgtcatatgcctacactaggttaaagctgccagatgccaactcacaggtcgtgctctattaattcagcaatcgtcattaaactggttctaacaaattacatcttgtcatacccaaccgctct

SEQ ID NO: 2148 - DNA, 369 bp, Glycine max
  Clone ID: LIB3072-024-Q1-E1-C1
gacagcaaaaacaattaataaagatgagtttgaagaacaacatggtggtgctaaaggtgtgtttgttgcttcttttccttgtgggggttacagctgcacgcatggaactgagcttcttcaaaagtgatcagtcatcaagttatgatgatgatgagtattcaaaaccatgctgtgatctctgcatgtgcacacgctcaatgcctcctcaatgcagctgtgaagatattaggctgaattcatgccactcagattgtaagagctgtatgtgcacacgctcacagccaggacagtgtcgttgtcttgacaccaacgacttctgctacaaaccttgcaagtccagagatgactagaaaaactaatagctctctc

SEQ ID NO: 2149 - DNA, 192 bp, Glycine max
  Clone ID: LIB3072-024-Q1-E1-C10
gactgcttttaaagtagtttataagatgaaccctcacagcctcttggcttctgcagcgatagacataggcttggccttggtgacgctgcctccgttctccgtgctcaagaagcagccttccaacgctcccatctactacgctcgtcctctctctcgccgcgaccaactcgctttccatgagtcgtcttcttc

SEQ ID NO: 2150 - DNA, 147 bp, Glycine max
  Clone ID: LIB3072-024-Q1-E1-C12
accaaagaaggggatttctgaaactaacaacaacacaatggaatcatcatggcaactgcctccccaatgctaatccaactacaagtttaccttcagggagggggctggtaacacccaatgtcctctctgccccctcagcacattaac

SEQ ID NO: 2151 - DNA, 359 bp, Glycine max
  unsure at all n locations
  Clone ID: LIB3072-024-Q1-E1-C4
gaaagcaaaaacaattaataaagatgagtttgaagaacaacatggtggtgctaaaggtgtgtttgttgcttcttttccttgtgggggttacagctgcacgcatggaactgagcttcttcaaaagtgatcagtcatcaagttatgatgatgatgagtattcaaaaccatgctgtgatctctgcatgtgcacacgctcaatgcctcctcaatgcagctgtgaagatattaggctgaattcatgccactcagattgtaagagctgtatgtgcacacgctcacagccaggacagtgtcgttgtcttgacaccaacgacttctgctacaaancttgcangtccagagatgactagaaaaactaa

SEQ ID NO: 2152 - DNA, 379 bp, Glycine max
  Clone ID: LIB3072-024-Q1-E1-C6
gactctcatcacattattctatatcaattttggttaagagtcttgaaaaagcaagagaaaaaaaaataccaaccatggcaaccatttctgatcaacctagagggtcctactcctatggaacctcatatggagcaccctatggaaccacgtatgagaccaacaccagcattaacaacccaccttcacgccaaacagtgaagttcataactgctgccactattggcatcacactcttgctcctgtctgggttgaccctcacaggcactgtcataggtttgatcattgcaacccctcttcttgttatcttcagccccatccttgtccctgctgcgtttgtgctgttcccagttgcttctggctttttgttctctgggggctg

SEQ ID NO: 2153 - DNA, 300 bp, Glycine max
  Clone ID: LIB3072-024-Q1-E1-C7
aggacacaactaactaagaaagtcttccatagtcccccaaaaatgaagagcaccatcttctttgctctctttctcttttgtgccttcaccacctcatacctaccttcagccatcgctgatttcgtgctcgataatgaaggtaaccctcttgaaaatggtggcacatattaaatcttgtcagacataacaacatttggtggaataaaaacgggcccaacgggaaatgaaagatgccctctcaatgtggtgcaatcccccaattagctccaacaaagggattggaaaattcaccccgtcccc

SEQ ID NO: 2154 - DNA, 342 bp, Glycine max
  Clone ID: LIB3072-024-Q1-E1-C8
gattcacacaactaactaagaaagtcttccatagccccccaaaaatgaagagcaccatcttctttgctctctttctcgtttgtgccgttgaccacctcatacctaccttcagccatcgctgatttcgtgctcgataatgaaggtaaccctcttgcaaatggtggcacatattatatcttgtcagacataccagcatttggtggaataagaccagccccagggggaaatgacacattccctctcactgtggtgcaatctcgcaatgagctctacggagggattggatcaatcatctcgtccccatatctaatccgttttatcgccgaaagccatcctttgagc

SEQ ID NO: 2155 - DNA, 242 bp, Glycine max
  Clone ID: LIB3072-024-Q1-E1-D10
tgggacagcaaaaacaattaataaagatgagtttgaagaacaacatggtggtgccaaaggtgtgtttgttgcatcttttccttgtgggggttagagctgcacgcatggaactgagcgtcttcaaccgtgatcagtcatcgacttacgatcatgatcagtattcaaagccatcctgtgatttctccatgtccagacgcccaatcccctcttcattgcatctatgaacacactaggcttacttc

SEQ ID NO: 2156 - DNA, 82 bp, Glycine max
  unsure at all n locations
  Clone ID: LIB3072-024-Q1-E1-D12
cccggtcnacctacaagtctatacggctgcgacaacgacagcaaggggctgctgtttcactatgtctattctattccgcggc

SEQ ID NO: 2157 - DNA, 166 bp, Glycine max
  Clone ID: LIB3072-024-Q1-E1-D2
aggcagaatctaggggtaacgcctccattatcagtcctttttcaggcgtggtttttacctaaccctacaattcgccgatccttccagttggggtttttcgctttcagcgaagagcggtgtatatagaaaccctattccccctatgcaccaggggaattgaatatag

SEQ ID NO: 2158 - DNA, 380 bp, Glycine max
  Clone ID: LIB3072-024-Q1-E1-B5
gatgtaactgaataattaagaaaagccatttccatagcagcctaagaaaatgaagagcactagcttgttcgctatctttctactttgcgccttcacctcatacctaccttccgccaccgcccaggacgtgctcgacgtggatggcgatccgattcggaacggtttcatatactacgttttgccggcaataagaggaaacggtggcggaatagaacgagccgcactcgggaaagacacttgccctatcactgtagtgcaatctcccaatccaaactctaaggggttagaaattaagtttgaatctgcataccccgcctattacataaacgaaaccctaattttgcaaataaagttcagttacccacagcagtgtgaaagaa

SEQ ID NO: 2159 - DNA, 374 bp, Glycine max
  Clone ID: LIB3072-024-Q1-E1-D3
gagcgccaatgtttttttcagaggagtttcatcgtgtaatcaaaagagtttatcttatagtaagaaatcgatgtcttactccattttaatgaagaaaacaagagaacaatagcctgacaaagggtttagccataaaatcgaatccatcattgatttgagatattgataaggtgaatactcatttctcgtcaatgctaagcataatgcgggtatatggacctaaaaaagattatcttttcttcctatcttatgaactttaaggtgtatgaagtgtcatttcctagcatagattttaattttagtaagtagataaagagtccatttaacttaagttgatctaggccagaagcaggcctacgtcaagataatccttc

SEQ ID NO: 2160 - DNA, 247 bp, Glycine max
  unsure at all n locations
  Clone ID: LIB3072-024-Q1-E1-D4
agggggagcgcttgagaacaagccccaatcaancaacaaaacaatctctctggtcttcctctaactttcaagtttttaaagtaataagatgggagagacattcctatttaactcaaagtcagtgaacgaaggaaaccctgacaagctctgcgaacaaatctccgatgctgtcctcgacgcttgccttgaacaggaaccaaacagcaaggttgcctgcgaaacatgcaccaagaacaacttggtcatg

SEQ ID NO: 2161 - DNA, 400 bp, Glycine max
  Clone ID: LIB3072-024-Q1-E1-D6
gacagcaaaaacaattaataaagatgagtttgaagaacaacatggtggtgctaaaggtgtgtttgttgcttcttttccttgtgggggttacagctgcacgcatggaactgagcttcttcaaaagtgatcagtcatcaagttatgatgatgatgagtattcaaaaccatgctgtgatctctgcatgtgcacacgctcaatgcctcctcaatgcagctgtgaagatattaggctgaattcatgccactcagattgtaagagctgtatgtgcacacgctcacagccaggacagtgtcgttgtcttgacaccaacgacttctgctacaaaccttgcaagtccagagatgactagaaaaactaatagctctctcaaatggacgaagcccctttaagctttgtttg

SEQ ID NO: 2162 - DNA, 395 bp, Glycine max
  Clone ID: LIB3072-023-Q1-E1-H7
ggcgaggaagccacatagagacacaatacagagtgagttgttgctccttcgccacaactctctgccaacatgggtatctccagagattctatgcacaagaggcgtgccactggtggcaagaagaaggcctggaggaaaaagagaaagtatgagcttggtcgccagcctgctaacactaagctgtcaagcaacaagacagtcaggaggatccgtgttagaggtggagatgtgaaatggagggcattgagattggatactggaaattactcctggggaagtgaagctgtaactcgcaagactcgtgtactagatgtggtttacaatgcctcaaacaatgagcttgtgcgtactcagactcttgtcaaaagtgctatcgttcaggttgatgctgctcc

SEQ ID NO: 2163 - DNA, 379 bp, Glycine max
  unsure at all n locations
  Clone ID: LIB3072-023-Q1-E1-H8
gattcacacaactaactaagaaagtcttccatagccccccaaaaatgaagagcaccatcttctttgctctctttctcttttgtgccttcaccacctcatacctaccttcaaccatcgctgatttcgtgctcgataatgaaggtaaccctcttgaaaatggtggcacatattatatcttgtcagacataacagcatttggtggaataagagcagccccaacgggaaatgaaagatgccctctcactgtggtgcaatctcgcaatgagctcgacaaagggattggaacaatcatctcgtcnccatatcgaatccgttttatcgccgaaggccatcctttgagccttaagttcgattcatttgcagttataatgctgtgtgt

SEQ ID NO: 2164 - DNA, 292 bp, Glycine max
  Clone ID: LIB3072-024-Q1-E1-A1
gagtctaatatttgcagtgctgaaaatgtcgcagttgttggaaaaggccaaaaactatgttgcggagaaagtcaccaacatgcccaagccagaggcgagtgtcaccgacgtggacttcaagcgcgtgagccgcgacagcgtcgagtacttggccaaggtctccgttcagaacccttattccacttccattcccatttgtgagatcaagtactccctcaaaagtgctggcagggagatagcagcaggaacaatacctgacccacggtcattgaaggcaagtgacacaacaatg

SEQ ID NO: 2165 - DNA, 410 bp, Glycine max
  Clone ID: LIB3072-024-Q1-E1-A10
ggttctagtgtgtgattgtttgttgttgtaactcgttcttcttcttttgttgttctgtgtttgtgtttgttttttctctcacctgaaaatgtcttgctgcggtggtaactgtggttgcggaagctcctgcaagtgcggcaacggctgcggaggctgcaagatgtacccagacttgagctacactgagtcaaccaccaccgagaccttggtcacgggagtggcacctgttaaggctcaatttgagggtgctgaaatgggtgtgcccgctgagaacgatggctgcaaatgtggaccaaactgctcctgcaacccctgcacttgcaagtgaggtgttgggagagcaagcttcaagcagagatagcccttaattaggaataatgataaactattaatgtgtagctaaaacttat

SEQ ID NO: 2166 - DNA, 276 bp, Glycine max
  Clone ID: LIB3072-024-Q1-E1-A11
ggagctggtgttcaaggaggacgggcaggagtacgcgcaggtgctccggatgctggggaacgggcggtgcgaggcgatgtgcatcgacgggacgaacaggctctgccacatccgcgggaagatgcacaagaaggtgtggatcgccgccggagacatcatcctggttggactcacggactaccaggacgacaaggctgacgtcatcctcaagtacatgtccgacgagggcatgctccccaaggcctacggcgagctccccgataccacccgcctcaa

SEQ ID NO: 2167 - DNA, 376 bp, Glycine max
  unsure at all n locations
  Clone ID: LIB3072-024-Q1-E1-A2
gacagcaaaaacaattaataaagatgagtttgaagaacaacatggtggtgctaaaggtgtgtttgttgcttcttttccttgtgggggttacagctgcacgcatggaactgagcttcttcaaaagtgatcagtcatcaagttatgatgatgatgagtattcaaaaccatgctgtgatctctgcatgtacacacgctcaatgcctcctcaatgcagctgtgaagatattaggctgaattcatgccactcagattgtaagagctgtatgtgcacacgctcacagccaggacagtgtcgttgtcttgacnacaacgacttctgctacaaaccttgcaagtccagagatgactagaanaactaatagctctctcaaatgga

SEQ ID NO: 2168 - DNA, 381 bp, Glycine max
  Clone ID: LIB3072-024-Q1-E1-A3
gattcacacaactaactaagaaagtcttccatagccccccaaaaatgaagagcaccatcttctttgctctctttctcttttgtgccttcaccacctcatacctaccttcagccatcgctgatttcgtgctcgataatgaaggtaaccctcttgaaaatggtggcacatattatatcttgtcagacataacagcatttggtggaataagagcagccccaacgggaaatgaaagatgccctctcactgtggtgcaatctcgcaatgagctcgacaaagggattggaacaatcatctcgtccccatatcgaatccgttttatcgccgaaggccatcctttgagccttaagtttcgatcattttgcagtataatgctgtgtgttg

SEQ ID NO: 2169 - DNA, 160 bp, Glycine max
  unsure at all n locations
  Clone ID: LIB3072-024-Q1-E1-A4
tggatgaaatttttaatggaccttcaaaatacatatctcctattaatatggaacagttactggccatttgaattggcanataaattagtcacttagtcctttgtaatgtgctttccttttttgtggggttacttgttatcaagcaacacactggaaccca

SEQ ID NO: 2170 - DNA, 408 bp, Glycine max
  Clone ID: LIB3072-024-Q1-E1-A6
ggagagttgttttattcatgtcgtgaactctctcccttcatctagctcgagtttttttcttgcttccgggagctctgagcttgaccgacgtcgttttcacatcaaaacccttcaacaaaaaaatggcgttcttcttgaaccaaactagtatcgcttcccattttcgatctcactctcagaagactgcagatttggcttcttttcctcgccgtcgattccacgtcgaaccaggggctcgtgaaaaagctctcttggcagaagatgcaactctgaaaccgttcaaatcgtacaagaagagtgtaaaaaagcttagaaaaattgggaatgcccttacaattgttgttgctgcaggatgctgttacgaagtatatgtcagagcttttacaagagaagaagctcagaaactgt

SEQ ID NO: 2171 - DNA, 390 bp, Glycine max
  Clone ID: LIB3072-024-Q1-E1-A7
gcgcgaccacagaaggggacttgcaagtggaactctgagactattatttatggggaatcatgaccagttttcaggaacagtcccaaatgggactaacctgcaggcttttgtgtttgaattcataatgacctttttcctcatgttcgtcatatgcggggttgccaccgataacagagcggttggtgagttggctgggattgcaattgggtcgacattactgctgaatgtgattattggagggccagtgacgggagcatcaatgaacccagctagaagcctaggacctgcttttgtacacggtgaatactaaggaatatggatatatttgttggcacctgttgtgggggccatagcttgagcatgggtataaaacatcgtaaggtaacagac

SEQ ID NO: 2172 - DNA, 169 bp, Glycine max
  Clone ID: LIB3072-024-Q1-E1-A8
cgggctgcagcagttgggaggaggcactgtggcacaagtcttaggagtgtaaatcagagacgcaaaatgaggaggagtcgatcgtccgagaccatgaatattcccgacggtgtgagcatcaaggttcatgccaatgttatcgaggttgagggccctcgtggaaaatcca

SEQ ID NO: 2173 - DNA, 368 bp, Glycine max
  Clone ID: LIB3072-024-Q1-E1-B1
gacagcaaaaacaattaataaagatgagtttgaagaacaacatggtggtgctaaaggtgtgtttgttgcttcttttccttgtgggggttacagctgcacgcatggaactgagcttcttcaaaagtgatcagtcatcaagttatgatgatgatgagtattcaaaaccatgctgtgatctctgcatgtgcacacgctcaatgcctcctcaatgcagctgtgaagatattaggctgaattcatgccactcagattgtaagagctgtatgtgcacacgctcacagccaggacagtgtcgttgtcttgacaccgacgacttctgctacaaaccttgcaagtccagagatgactagaaaaactaatagctctct

SEQ ID NO: 2174 - DNA, 382 bp, Glycine max
  Clone ID: LIB3072-024-Q1-E1-B10
gattcacacaactaactaagaaagtcttccatagccccccaaaaatgaagagcaccatcttctttgctctctttctcttttgtgccttcaccacctcatacctaccttcagccatcgctgatttcgtgctcgataatgaatgtaaccctcttgaaaatggtggcacatattatatcttgtcagacataacagcatttggtggaataagagcagccccaacgggaaatgaaagatgccctctcgctgtggtgcaatctcgcaatgagctcgacaaagggattggaacaatcatctcgttcccatatcgaattcgttttacctccgagggccatcccttgagccttaagttccattcatttgcagttataaatccggtgtgttt

SEQ ID NO: 2175 - DNA, 203 bp, Glycine max
  Clone ID: LIB3072-024-Q1-E1-B11
ggtccaccaccaatccgtatggctgcgaacacacacaaggggatcaagaaccagttcaatatcctagtacaccgtattaaagaatttaagatatactatgatgacagcgcggttcccattactgttgccgggagttgttttcctggcatcaatttctgtctcatttggcattgcgtattgggaaaagcagaaccccagtcaca

SEQ ID NO: 2176 - DNA, 237 bp, Glycine max
  Clone ID: LIB3072-024-Q1-E1-B12
acctccgaatcagagaaagggagataccgaactaagaaaatcctccacagccccccatgccacaagacgacacaatgggacgatgagtcgacttgataactaagatattgttactcctccagggtgatcgagtttgacatcatccacatctaatttataacactgttccattacttaacgatcacagatttatcatctctacgggattaaatcccgagttttctattggaaacttaa

SEQ ID NO: 2177 - DNA, 363 bp, Glycine max
  Clone ID: LIB3072-023-Q1-E1-H6
ggtacgcagcttcatccctaacgcgtgcatagcagagtcagagacagagacgcagccatggggcggagacctgcgaggtgttataggcaaattaagaacaagccataccccaagtcacgtttctgccgtggtgttcctgatcccaagatcaggatttatgatgttggtatgaagaagaagggtgttgatgagtctcctttctgtgtccatctggttagttgggagaaggaaaatgtttcaagtgaggccctggaagctgctcgcattgcttgcaacaagtacatggccaaatttgctggaaaggatgctttccacttgagagtcacggtggcaccattccatgttcttatgatcaacaagatg

SEQ ID NO: 2178 - DNA, 329 bp, Glycine max
  Clone ID: LIB3072-024-Q1-E1-B4
ggatgttgttgtaaatgtcgtcgtcgttgtctttttgggaatacacggtgctcctccttctgcgggccctcttcgccgtagcgttcgttctcttcttaatatccctcggttggcttgtggcgtggaaactggtgctggtgcacgtgccattggtgcaagaggttttcggcctcaagaagaaagctgttcgagtgaagcccccaactggtcgcttttccaaaatctacagcacccttcacgcccaaaaatcaccttccacctcataagatcattaaatttgtaaatatgaagtgacatgttggaggtggttagcatgggatcttggacag

SEQ ID NO: 2179 - DNA, 389 bp, Glycine max
  Clone ID: LIB3072-023-Q1-E1-F5
gattcacacaactaactaagaaagtcttccatagccccccaaaaatgaagagcaccatcttctttgctctctttctcttttgtgccttcaccacctcatacctaccttcagccatcgctgatttcgtgctcgataatgaaggtaaccctcttgaaaatggtggcacatattatatcttgtcagacataacagcatttggtggaataagagcagccccaacgggaaatgaaagatgccctctcactgtggcgcaatctcgcaatgagctcgacaaagggattggaacaatcatctcgtccccatatcgaatccgttttatcgccgaaagccatcctttgagccttaagttcgattcatttgcagtttaaatgctgtgtgttgggattcct

SEQ ID NO: 2180 - DNA, 345 bp, Glycine max
  Clone ID: LIB3072-023-Q1-E1-F6
gcacacaactaactaagaaagtcttccatagccccccaaaaatgaagagcaccatcttctttgctctctttctcttttgtgccttcaccacctcatacctaccttcagccatcgctgatttcgtgctcgataatgaaggtaaccctcttgaaaatggtggcacatattatatcttgtcagacataacagcatttggtggaataagagcagccccaacgggaaatgaaagatgccctctcactgtggtgcaatctcgcaatgagctcgacaaagggattggaacaatcatctcgtccccatatcgaatccgttttatcgccgaacgtcatcctttgagccttaagt

SEQ ID NO: 2181 - DNA, 253 bp, Glycine max
  Clone ID: LIB3072-023-Q1-E1-F8
ggatcgggacaactcatacattcgccctattggtccttaaacactcatcagtcatcatcatcgttacgctagttcttttcccgttgttttctgcctttcagtggccgctgcttcgctttcagttccatgcaccatcctcagcgtaacgcacgtgagattcgtggcctcaatgacctcatgtcggacatccgtacattttcaggaagaaggctcactccgacagggaatgctagcatcactcccatcgagtgtg

SEQ ID NO: 2182 - DNA, 384 bp, Glycine max
  Clone ID: LIB3072-023-Q1-E1-F9
gctgccagaagacgggaaaaggggaggcgcggcgggatcaggacacggttgccaagtggagttcagcattgcacagcccaccactgggtgccagaaggtgctggtgctcgatgacgacctgaagcttcgggcattttgggacaacaggatgtcacaggaggttcatggtgatgctctgggtgaggagtttaaatgatatgttttcataatcaccgctgggtgtgacaaacactgattccctatgaagcaaggagtgatgacccctggtcgtgttcgacgtttgctccatagaggaactccttgtttccgtggatatggaaagcgcaatggacaacgtataacgaagtctgttcgtgggtgcattgtcagcccacatctctctgt

SEQ ID NO: 2183 - DNA, 343 bp, Glycine max
  Clone ID: LIB3072-023-Q1-E1-G12
gttaatgataagattgccttacacaaggttttactggttggcactgatacatcttgctacattgggaaaccaattgtaacaaatgctgtagtatatgcaacagtggaagagcatggtctagaccccaaactaattgtcttcacatataacaagaagaaacactatcgcagaaacattgggcacagacagccaaatacacgtatacggataaatagcattatgggctatgagaactacccacaagttactatggacgacatcaaatcagacgaacccggatcatgaacaccttgtttaccgtggccatactgtagcttcctcctccttcaatatgaaattattt

SEQ ID NO: 2184 - DNA, 407 bp, Glycine max
  Clone ID: LIB3072-023-Q1-E1-G4
cggggacacagctaactaagaaagtcttccatagccccccataattgaggagcatcatcttctttgctctctttcgcttttgggccgtcagcagctcatacctaccgtcagggatcgctgagttcgtgctcgataatgaaggtaaccctcttgaaaatggtggcacatattagatcttgtcagacataacagcatttggtggaataagagcagccccaacgggaaatgaaagatgcgctctcactgtggtgcaatctcgcaatgagctcgaccaagggattggaacaatcatctcgtccccatatcgaatccgttttatcgccgaatggcatcctttgagccttaagttcgattcattttgcacttataatgctgtgtgttggaattcctaccagtggtccgttgtg

SEQ ID NO: 2185 - DNA, 340 bp, Glycine max
  Clone ID: LIB3072-023-Q1-E1-G5
ggagatgagagagaagaaagcctccagaacttcatcttcaacctctccatgtgctcaacttcgcgacgcataccacaattgcttcaacaggtggtacgccgataaattcatgaagggtcactgggacaaacaagaatgcgtttccgagtggtaaaaatacatagcctgtctttctgaacatttggaagataagcatctgagtcgtttcttacaaactgactgcgttgttcaagacaatggtgttgcttctcagtaacttgtaaggactaacgtcgctaactaccacgcctaatcatgtgacgaccactgttcatgtcggactttgtcgtcttgcctgccc

SEQ ID NO: 2186 - DNA, 265 bp, Glycine max
  Clone ID: LIB3072-023-Q1-E1-G7
aagctttggaggttctgggctcaagaaaagtggaaagaaataagggctctttatcatgattgtatgcattcaatattgagccctgtaattagagttgctaccatgataacttctcttattattgtggcctactttattgctaatgtgtactgaactgaggtatgtcgtgatgtaagctgcaataagttaattgtctgtatctttattgtatccccttcatggggttctgataattacatccttttagtagtgttgtggatttggc

SEQ ID NO: 2187 - DNA, 344 bp, Glycine max
  Clone ID: LIB3072-023-Q1-E1-G8
ggacacaactaactaagaaagtcttccatagccccccaaaaatgaagagcaccatcttctttgctctctttctcttttgtgccttcaccacctcatacctaccttcagccatcgctgatttcgtgctcgataatgaaggtaaccctcttgaaaatggtggcacatattatatcttgtcagacataacagcatttggtggaataagagcagccccaacgggaaatgaaagatgccctctcactgtggtgcaatctcgcaatgagctcgacaaagggattggaacaatcatctcgtccccatatcgaatccgttttatcgccgaaggccatcctttgagccttaag

SEQ ID NO: 2188 - DNA, 386 bp, Glycine max
  Clone ID: LIB3072-023-Q1-E1-H1
aagacgacagaagggggttgataaattaagcaagtaaggttgggatggagggaactaatagtagcggtgataacgtgagtgcgggtgtggtgcagagtaggatgaggatgaaggtgatggtggctatagacgagagtgaaggaagcttctatgctcttaagtgggcccttgataacctcttcaccaccatggccactgtgggagaagcatcatcacctgaaaatgatggcatggtgttcttggttcatgttgagcccaaagttcacaactatgtgtatcccatcggacccggtggagcagccttttatcctgcaactgtagtagtggattcggtgaagaaagcacaacaagaacgatcagcagctattctctcacgggcattgaaa

SEQ ID NO: 2189 - DNA, 346 bp, Glycine max
  Clone ID: LIB3072-023-Q1-E1-H11
gacacaaaacccgctaataacaacattcaacaattttctttttcttcatcttttttctttttcccagcggttcaggaaactcttcttcgtcactgtggttgaaaatcgaatcctttctctctctctctctctaggcaataaagtgaaacgcatcagtgaaattcaattcaatggatgcaaatcgcgagcaaattgtggacgttgggtcagtggtggaagtcgtatctgctgacgacagtgattctcctctctacagcctcgaaagtctctgcatgcgttgcggtgaaaaccggacttcatgatttttattgacttttattcctaactttaaaaagattttgttgtc

SEQ ID NO: 2190 - DNA, 237 bp, Glycine max
  Clone ID: LIB3072-023-Q1-E1-H12
ggggtccactgtgttcacacgcaccgctgaaagacgcaattcgagatgctccttcacttgcgctctcagacgttcatccagtcagaaatgcgtgtattcggagccagtatctgtcattcgcagagcactttcgagaaccagaagttcatatttgcaatcctttgggatctttccgaggagggcgtggtgaatttgcggacgaccttcattgcgtcctagatgtttgacgcgcagata

SEQ ID NO: 2191 - DNA, 317 bp, Glycine max
  unsure at all n locations
  Clone ID: LIB3072-023-Q1-E1-H2
gattcacacaactaactaagaaagtcttccatagccccccaaaaatgaagagcaccatcttctttgctctctttctcttttgtgccttcaccacctcatacctaccttcagccatcgctgatttcgtgctcgataatgaaggtaaccctcttgaaaatggtggcacatattatatcttgtcagacataacagcatttggtggaataagagcagccccaacgggaaatgaaagatgccctctcactgtggtgcaatctcgcaatgagctcgacaaagggattggnacaatcatctcgtccccatatcgaatccgtttt

SEQ ID NO: 2192 - DNA, 369 bp, Glycine max
  Clone ID: LIB3072-023-Q1-E1-H3
gacagcacaaacaattaataaagatgagtttgaagaacaacatggtggtgctaaaggtgtgtttgttgcttcttttccttgtgggggttacagctgcacgcatggaactgagcttcttcaaaagtgatcagtcatcaagttatgatgatgatgagtattcaaaaccatgctgtgatctctgcatgtgcacacgctcaatgcctcctcaatgcagctgtgaagatattaggctgaattcatgccactcagattgtaagagctgtatgtgcacacgctcacagccaggacagtgtcgttgtcttgacaccaacgacttctgctacaaaccttgcaagtccagagatgactagaacaactaatagctctctc

SEQ ID NO: 2193 - DNA, 378 bp, Glycine max
  Clone ID: LIB3072-023-Q1-E1-F4
gattcacacaactaactaagaaagtcttccatagccccccaaaaatgaagagcaccatcttctttgctctctttctcttttgtgccttcaccacctcatacctaccttcagccatcgctgatttcgtgctcgataatgaaggtaaccctcttgaaaatggtggcacatattatatcttgtcagacataacagcatttggtggaataagagcagccccgacgggaaatgaaagatgccctctcactgtggtgcaatctcgcaatgagctcgacaaagggattggaacaatcatctcgtccccatatcgaatccgttttatcgccgaaggccatcctttgagccttaagttcgattcatttgcagttataatgctgtgtg

SEQ ID NO: 2194 - DNA, 340 bp, Glycine max
  Clone ID: LIB3072-023-Q1-E1-D7
gacagcaaaaacaattaataaagatgagtttgaagaacaacatggtggtgctaaaggtgtgtttgttgcttcttttccttgtgggggttacagctgcacgcatggaactgagcttcttcaaaagtgatcagtcatcaagttatgatgatgagtattcaaaaccatgctgtgatctctgcatgtgcacacgctcaatgcctcctcaatgcagctgtgaagatattaggctgaattcatgccactcagattgtaagagctgtatgtgcacacgctcacagccaggacagtgtcgttgtcttgacaccaacgacttctgctacaaaccttgcaagtccagaga

SEQ ID NO: 2195 - DNA, 353 bp, Glycine max
  unsure at all n locations
  Clone ID: LIB3072-023-Q1-E1-D8
ggaacgaacgaacgaagacagcgaaggagctacactacgctgcgagatttggaaattgaatccctaatctaatttcgaggtccaactcctgtggagtgtgtgtggtgctttcaatctgcatgatcatatagcgaatttgtgtttagcgaatcatatttgcagagtaaggatggggaaaaaccaagcctacaaagctatgcagagagccaggctcggcggcgcctccgccggccccgacgaggttgaagacggcatggtggatggttcatttcattcaccagaatggcatgcagctcgtttggctagccttaacacctctcacaccattacctgggaagagtacaanaagaagc

SEQ ID NO: 2196 - DNA, 391 bp, Glycine max
  Clone ID: LIB3072-023-Q1-E1-D9
gacagatttcgcgaaaaataaaaaaatatcacgcgctggtaccacctttccccaaaccatcaattccaatcctcccaatttccacaatcttcaaccttcaaattctgcttcacctttcttcatttcacttcagagagagagaacaaaacagaatgggcgtcgtggtgatcgacggcagcaccgtgcgcgacttcgtgaacgacgaaaccgccttcaccaagagcgtggacgagcagttctcggcgctggacctcaacaacgacggcgtcctctcgcgctcggagctccgcacggccttcgagtccatgcgcctcatcgagacgcacttcggcatcgacgtttccacgccgccggagcagctcgcgaagctctgcgactccatcttcgacaa

SEQ ID NO: 2197 - DNA, 105 bp, Glycine max
  Clone ID: LIB3072-023-Q1-E1-E1
ggcttattcacgcaactaaataagaaatgaagagtactaacttccttgctccccttcgaagttggggcttcaacaatctaaaactggctttaagcaacggccaat

SEQ ID NO: 2198 - DNA, 281 bp, Glycine max
  Clone ID: LIB3072-023-Q1-E1-E10
gggttccattgtctgattgtttgttgttgtgacacattcttcttcttttgttgttctgtgtttgtctatgttttttctctcacctggggatatcctgctgcggtgctaactgtggttgcggaagctcccgcaagtgccgcaaccgctgccgaggctgcaacatatacccacacttgagccacactgagtcaaccaccaccgacaacttgcgtattctagtcggaccttttaaagctcaatttgatggtgcttaaatcggtgttctcgctcagaaccatggc

SEQ ID NO: 2199 - DNA, 375 bp, Glycine max
  Clone ID: LIB3072-023-Q1-E1-E2
gaagtcaatctgaaccattgaacataacagtgatcttatgatgtttaacagaattcagaagagaaaaggcagaaaggaatctgaaaagaaagtaccaggaaagagatggaggaaccaaacccaacagagaggaatcgaccgaggcaagaatcagcaatgaaagcacctatgagtggtgtgagattgcttgttgcagaggataagagaagcacctgagttgctttggctaaatgaaacttgtaactccccatcaaatacaatatcatgttcggcagaagaccgattttcgccacgcttgcaagtgcttcatttgctgcgaacacaaccaaaaccaaaaacaatgagaatccttaaccaaaccaaatccatgttttt

SEQ ID NO: 2200 - DNA, 282 bp, Glycine max
  Clone ID: LIB3072-023-Q1-E1-E3
gatgtaattcaagacagagccaaatagatggatgccccctttttttaaagtgggaatccaactccttatttatgtgctgagctaatcaattaatctgtcaatcttactctctctctttatttgctatatataaattaagtaaccatatatagtccaatgactgtatgacatgtgctatctcttcttctttcttgtttttatgctagtttaattgtgtttgatgtaagtggggcatctaatcttcaatccttactcataataataagttatgtgtaatatatg

SEQ ID NO: 2201 - DNA, 379 bp, Glycine max
  Clone ID: LIB3072-023-Q1-E1-E4
gattcacacaactaactaagaaagtcttccatagccccccaaaaatgaagagcaccatcttctttgctctctttctcttttgtgccttcaccacctcatacctaccttcagccatcgctgatttcgtgctcgataatgaaggtaaccctcttgaaaatggtggcacatattatatcttgtcagacataacagcatttggtggaataagagcagccccaacgggaaatgaaagatgccctctcactgtggtgcaatctcgcaatgagctcgacaaaggggttggaacaatcatctcgtccccatatcgaatccgttttatcgccgaaggccatcctttgagccttaagttcgattcatttgcagttataatgctgtgtgt

SEQ ID NO: 2202 - DNA, 386 bp, Glycine max
  Clone ID: LIB3072-023-Q1-E1-E6
gacagcaaaaacaattaataaagatgagtttgaagaacaacatggtggtgctaaaggtgtgtttgttgcttcttttccttgtgggggttacagctgcacgcatggaactgagcttcttcaaaagtgatcagtcatcaagttatgatgatgatgagtattcaaaaccatgctgtgatctctgcatgtgcacacgctcaatgcctcctcaatgcagctgtgaagatattatgctgaattcatgccactcagattgtaagagctgtatgtgcacacgctcacagccaggacagtgtcgttgtcttgacatcaacgacttctgctacaaaccttgcaagtccagagatgactagaaaaactaatagctctctcaaatggacgaagcccct

SEQ ID NO: 2203 - DNA, 375 bp, Glycine max
  Clone ID: LIB3072-023-Q1-E1-E7
gattcacgcaactaaataagaaatgaagagtactatcttctttgctctctttctagtttgtgccttcaccatctcatacctgccttcagccaccgctcagttcgtgctcgacactgatgatgatcctcttcaaaacggtggcacatactatatgttgccagttatgagaggaaagggcggtggaatagaagtagattcaactggaaaagaaatatgccctctcactgttgtgcaatcacccaatgagctcgataaggggattggactagtctttacatctccattacatgccctttttatcgccgaaggctatcctttgagcattaagtttggttcatttgcagttataacgctgtgtgccggcatgcctactga

SEQ ID NO: 2204 - DNA, 440 bp, Glycine max
  Clone ID: LIB3072-023-Q1-E1-E9
actgcgagacgacgaggggggatgcacaagtgaatttggtgatgcagataacgagtaacactgtgatcaagatgatggtccttgctttcttcgttgctacaattttggtagcatggcaatgcgatgcgtgcgatatgttccctctccgaatgaacactggctagtggtgcccgtacgccggaggtgaaatgcgcaagttggaggcttgctgtggaagcacacaagatctttggctttgagatcattcctgaagagtgcgttgaggcaccaaaggaatacatccatggcgagcaatatagatcagactccaagacagttaaccaacaagcttacttttatgccagagacctcgaagtccatcccaatgacacatttgtgttcagtatagatggcaccgtactctctaatattccatactacagaaaacatggatatggggt

SEQ ID NO: 2205 - DNA, 364 bp, Glycine max
  Clone ID: LIB3072-023-Q1-E1-F1
gacagcaaaaacaattaataaagatgagtttgaagaacaacatggtggtgctaaaggtgtgtttgttgcttcttttccttgtgggggttacagctgcacgcatggaactgagcttcttcaaaagtgatcagtcatcaagttatgatgatgatgagtattcaaaaccatgctgtgatctctgcatgtgcacacgctcaatgcctcctcaatgcagctgtgaagatattaggctgaattcatgccactcagattgtaagagctgtatgtgcacacgctcacagccaggacagtgtcgttgtcttgacaccaacgacttctgctacaaaccttgcaagtccagagatgactagaaaaactaatagct

SEQ ID NO: 2206 - DNA, 396 bp, Glycine max
  Clone ID: LIB3072-023-Q1-E1-F10
cggggcaggagccgctgaggtcttgcctattgtagattccgatttgagaaagattggcgccagagtcctcgaaaccgctaaacaactttgcatcaacaaatccgtaaatgatgtgacagcagaagtggtggaaggtgatcctagaaatgttctttgtgatgctgtagataagtaccgtgctgcaatgttggttgtgggtagtcatggttatggggctataaaaagggcggttttaggtagtgtcagtgactattgtgctcatcatgctcactgcactgtgatgatcgtgaacaagccaaagatcatacactgatctgtaatggctgcgtctatatagtacaacaataaacataatcctttcagctaaagaagagatacagaaaataatgttcacag

SEQ ID NO: 2207 - DNA, 376 bp, Glycine max
  Clone ID: LIB3072-023-Q1-E1-F2
gattcacacaactaactaagaaagtcttccatagccccccaaaaatgaagagcaccatcttctttgctctctttctcttttgtgccttcaccacctcatacctaccttcagccatcgctgatttcgtgctcgataatgaaggtaaccctcttgaaaatggtggtacatattatatcttgtcagacataacagcatttggtggaataagagcagccccaacgggaaatgaaagatgccctctcactgtggtgcaatctcgcaatgagctcgacaaagggattggaacaatcatctcgtccccatatcgaatccgttttatcgccgaaaggcatcctttgagccttaagttcgattcatttgcagttaaaatgctgtg

SEQ ID NO: 2208 - DNA, 418 bp, Glycine max
  unsure at all n locations
  Clone ID: LIB3072-023-Q1-E1-C10
ggagttcgaactaaacaattcaattcaatctgcctcgatcatggagaggaaaacatttgggtttttgttcttgctcctccttgtcttagcttctgatgtgacggtgaagagagcagaggcgaaagattgcttgacaaggaggcacgggttccagggtagatgcttattcgacaggcaatgtgcacatgtgtgcaggagcgatggtttcatcggtggtcagtgccgaggccctcttcgcaaatgcttttgcagcaggccatgttgatcgaaattactactgccaaagaggccatgaaataaacaaacaaacaaataaataaatagctctaaccgacacatatgtacgtagtgtcggggttctagctagctaggtangtacgtgtgtcntttgttatcgatcctagtttggtggagcaag

SEQ ID NO: 2209 - DNA, 325 bp, Glycine max
  Clone ID: LIB3072-023-Q1-E1-C11
gaatctcttcacagacgattcaattcaatcagatgggtttgtagaacagcatggtggtgctaaatgtgtgtttggtcgccacttttccttgtggggggtactactattgccaacttgaggctgagtaagcctgtactgctcatgaaaagtgctcatcatcaatactcaattgatgatcaatcttcaaatccatgctgtgatcaatgcgcatgcactaattcataccctcgtcaatgtcgctgttcagatatcacgctgacttcttgctattcagcatgcctgtcatgtatgtgcgcattatcctatcctgcacagtgtttttgtg

SEQ ID NO: 2210 - DNA, 279 bp, Glycine max
  Clone ID: LIB3072-023-Q1-E1-C12
gattgtatatcatttacaatttcaatctctctctctctctgtctctctctctctatacttagattttgtgaatgggtgaagtggaaaagggatatgtcatcggcgtccataccgttgatgagtggaagctgcacctcgagaatgcgcaatactcgaacacactgattgtggtggattttactgcttcctggtgtggtccatgccgttttattgacccagttctatgcagacagtgcattagtaactcctgatattgattctcctcaaattggatgtgga

SEQ ID NO: 2211 - DNA, 368 bp, Glycine max; identical to SEQ ID NO: 439
  Clone ID: LIB3072-023-Q1-E1-C3

SEQ ID NO: 2212 - DNA, 357 bp, Glycine max
  Clone ID: LIB3072-023-Q1-E1-C4
gactttgagttcgaactaaacaattcaattcaatctgcctcgatcatggagaggaaaacatttgggtttttgttcttgctcctccttgtcttagcttctgatgtgacggtgaagagagcagaggcggaagattgcttgacaaggaggcacgggttccagggtagatgcttattcgacaggcaatgtgcacatgtgtgcaggagcgatggtttcatcggtggtcagtgccgaggccctcttcgcaaatgcttttgcagcaagccatgttgatcgaaattactactgccaaagaggccatgaaataaacaaacaaacaaataaataaatagctctaaccgacacgtatgtacgtagtgt

SEQ ID NO: 2213 - DNA, 394 bp, Glycine max
  Clone ID: LIB3072-023-Q1-E1-C5
ggttctagtgtgtgattgtttgttgttgtaactcgttcttcttctttcgttgttctgtgtttgtgtttgttttttctctcacctgaaaatgtcttgctgcggtggtaactgtggttgcggaagctcctgcaagtgcggcaacggctgcggaggctgcaagatgtacccagacttgagctacactgagtcaaccaccaccgagaccttggtcatgggagtggcacctgttaaggctcaatttgagggtgctgaaatgggtgtgcccgctgagaacgatggctgcaaatgtggaccaaactgctcccgcaacccctgcacttgcaagtgaggtgttgggagagcaagcttcaagcagagatagcccttaattaggaataatgataaactattaatg

SEQ ID NO: 2214 - DNA, 367 bp, Glycine max
  Clone ID: LIB3072-023-Q1-E1-C6
ggcaagtgtgagtgatatttgagcttaaaccctagccgctcttctcttcattcttcactttggaaacaatcataatggcgttctgtaataaggttggaaatgtcttgaggcagggtgctgctcgcagcacacatgcccctgttgcgtccatgcttaattacatccgctgcatgtcttcaagcaagcttttcattggaggcctttcatatggagttgatgaccagtctcttaaggatgcattttctggctttggagatgtggttgatgcaaaagttataactgatagagacagtggaagatcaacgggatttggatttgtcaacttctccaatgatgagtctgcaagttcggcactctctgcaatgga

SEQ ID NO: 2215 - DNA, 51 bp, Glycine max
  Clone ID: LIB3072-023-Q1-E1-C7
gacagtgaagaagtaactaaaccaaactgcgaaacgctgaacatttgaagc

SEQ ID NO: 2216 - DNA, 333 bp, Glycine max
  Clone ID: LIB3072-023-Q1-E1-C8
gacagcaaaaacaattaataaagatgagtttgaagaacaacatggtggtgctaaaggtgtgtttgttgcttcttttccttgtgggggttacagctgcacgcatggaactgagcttcttcaaaagtgatcagtcatcaagttatgatgatgatgagtattcaaaaccatgctgtgatctctgcatgtgcacacgctcaatgcctcctcaatgcagctgtgaagatattatgctgaattcatgccactcagattgtaagagctgtatgtgcacacgctcacagccaggacagtgtcgttgtcttgacaccaacgacttctgctaacaaacttgca

SEQ ID NO: 2217 - DNA, 368 bp, Glycine max; identical to SEQ ID NO: 439
  Clone ID: LIB3072-023-Q1-E1-D1

SEQ ID NO: 2218 - DNA, 405 bp, Glycine max
  unsure at all n locations
  Clone ID: LIB3072-023-Q1-E1-D10
gacagcanaaacaattaataaagatgagtttgaagaacaacatggtggtgctaaaggtgtgtttgttgcttcttttccttgtgggggttacagctgcacgcatggaactgagcttcttcaaaagtgatcagtcatcaagttatgatgatgatgagtattcaaaaccatgctgtgatctctgcatgtgcacacgctcaatgcctcctcaatgcagctgtgaagatattaggctgaattcatgccactcagattgtaagagctgtatgtgcacacgctcacagccaggacagtgtcgttgtcttgacaccaacgacttctgctacaaaccttgcaagtccagagatgactagaaaaactaatagctctctcaaatggacgaagcccctttaagctttgtttgttatg

SEQ ID NO: 2219 - DNA, 393 bp, Glycine max
  Clone ID: LIB3072-023-Q1-E1-D11
gacagaggtagagagtaagacgccggcaatgtccgctgtgagagttcaagtttcggcgtgtgcggtttccgccaccgtcaaccaccttcgcctccgccaaaacgccgtcgtttccttcaggaagaagaagcctctcactctcagagtggtctcaatgtcatccgttcctccttcccaacccttcgaaatcgccgttaaagcttccgtcaccacacccaacaagctcggcgactgccctttttgccaaagggtgctgctgacactggaggaacaacatctaccttatgaccccaagttggtggacttgaccaataagccagaatggttccttaaagtcaaccctgatggtaaagttcctgtcataaagtttgatgacaactgggttcctgattc

SEQ ID NO: 2220 - DNA, 349 bp, Glycine max
  Clone ID: LIB3072-023-Q1-E1-D2
gactcactcatacaatagagaccagcttttgcttctttgtgaacatggagatgaggaaatcatgtggcttcttctccttgctcctcctccttgtctttgcttcccaggtggtggtgcagacggagggaagagtgtgtgagtcacaaagccacgggttccatggtttgtgtaatagagaccacgactgtgctttggtctgcaggaacgaaggtttctccggtggcaggtgcaaaggcttccgccgccgctgcttttgcaccaggatttgttgagatctcatcaaacactactcttgccatgcaaattaataaatcatagctaggccaaataaattgcatctactctttat

SEQ ID NO: 2221 - DNA, 370 bp, Glycine max
  Clone ID: LIB3072-023-Q1-E1-B9
gacagcaaaaacaattaataaagatgagtttgaagaacaacatggtggtgctaaaggtgtgtttgttgcttcttttccttgtgggggttacagctgcacgcatggaactgagcttcttcaaaagtgatcagtcatcaagttatgatgatgatgagtattcaaaaccatgctgtgatctctgcatgtgcacacgctcaatgcctcctcaatgcagctgtgaagatattaggctgaattcatgccactcagattgtaagagctgtatgtgcacacgctcacagccaggacagtgtcgttgtcttgacaccaacgacttctgctacaaaccttgcaagtccagagatgactagaaaaactaatagctctctca

SEQ ID NO: 2222 - DNA, 330 bp, Glycine max
  Clone ID: LIB3072-023-Q1-E1-D3
gagggttattggacacattcttcagcgactgcgtttttggatcggaacctcttctgcggcgtagcaatgggacactccaacgtttggaactctcacccaaaaaactacggtcctggttctcgcacttgccgtgtgtgtgggaatccacatggactgatcaggaagtatggccttatgtgctgcaggcagtgcttccgtagcaatgccaaggaaattggcttcatcaagtatcgctaaaagagcagttgtcaactacggaccaatattgtgttctggcactaagatgttttgaggaatgtatgtttgaagaaacttgagactttctttttc

SEQ ID NO: 2223 - DNA, 306 bp, Glycine max
  Clone ID: LIB3072-023-Q1-E1-D4
gagggttattggacacattcttcatcgactgcgtttttggatcggaacctcttctgcggtgtaccattgcgacactccaacgtttggaactcacacccaaaaaactacggtcctggttctcgcacttgccgtgtgtgtgggaatccacatggactgatcaggaagtatggccttatgtgctgcacgcagtgcttccgtagcaatgccaatgaaattggcttcatcaagtatcgctaaaagagcacttgtcaactacggaccattattgtgttctggcacaaggatgttttgacggatttatgtttg

SEQ ID NO: 2224 - DNA, 166 bp, Glycine max
  Clone ID: LIB3072-023-Q1-E1-D5
gcacacaactaactaagaaagtcttccatagccccccaaaaatgaagagcaccatcttctttgctctctttctcttttgtgccttcaccacctcatacctaccttcagccatcgctgatttcgtgctcgataatgaacgtaaccctcttgaaaatgggggcacata

SEQ ID NO: 2225 - DNA, 421 bp, Glycine max
  unsure at all n locations
  Clone ID: LIB3072-023-Q1-E1-A10
ggacgaagagcaccatttcgagtccaaggccgacgccggagcctccaaaacctaccctcagcaagccggtaccatccgcaagaacggctacatcgtcatcaaaggccgcccctgcaaggttgtggaagtttcgacttccaaaactggaaagcacggtcacgctaagtgtcactttgttggaattgatattttcactgccaagaaacttgaggatattgtgccctcttctcacaactgtgatgttcctcatgtgaatcgtactgattaccagctcattgatattgctgaggatggatttttgagtctgcttattgaaaatggtaacactaaggatgacctcaagcttcccactgatgagagtctgctcactcagataaatgatggatttgctganggcaacgatcttgttgtgtctgtcatg

SEQ ID NO: 2226 - DNA, 319 bp, Glycine max
  Clone ID: LIB3072-023-Q1-E1-A11
aataggacgacagaattggaaaggtccaaggagtaattgacacagttcagaacacagccatccacgagaaaagggacttcatcaatgcaccaatgttctgttctccgaaatattctcaaatctcatgcatgggattcaaggctttgactcagcactgtctacgtttttgacttcagtgcttttggacatggccgtggtgttcatcagagaagaactagcactagcattatgtgagacagctttgggaattaaacttagggtttctaatgctctcaacaagcaactagctatagtgttggagcatctttgtttctcttgg

SEQ ID NO: 2227 - DNA, 251 bp, Glycine max
  Clone ID: LIB3072-023-Q1-E1-A12
gatccatacacaggttcacatccataacccataccgccgcacaacattatgactttggaacaaaaatagagtttccgccaaggagacatatgccctaccacattaatggcaccaagaccctaaactcgttacgcatcaataacggtctgcaatcgtcgagacagacacgtccaatgatgggcgatacgactgcgttctcagtgtttccacacgaagtatgccaaacaggtggttgggaaccccagcaggca

SEQ ID NO: 2228 - DNA, 382 bp, Glycine max
  Clone ID: LIB3072-023-Q1-E1-A2
gagctgagagagaaaggaaaggttaactaagaagcaatacttcaatggccacccttgttgttcataaccaaacttcttctgctcaagatgctgaggctctccaacaggctttcaaaggatggggggctgatgacaaggccattatagcaatactgggtcacagaaatgttcatcagaggcaagaaatcagaaaagcttatgaggagatttaccaagaggatctcatcaaacgccttgagtccgagatctctggtggctttgagagagctatgtaccggtggatgttgcagcctgcggatcgtgatgctgttttggtgaatgtggcaatcaagaatggcaccaaagactaccatgtgattgcagaaattgcttgtgtcctatc

SEQ ID NO: 2229 - DNA, 365 bp, Glycine max
  Clone ID: LIB3072-023-Q1-E1-A4
gaagggagggaagaatagaatgggatctggaagtggaaaacacactggagagttcttcaggagaagggatgcatggaggaagcatccgatgctcaccaatcagctccgccacgccacccctggccttggcatcgccgtcgtcgccttcggtatctacctcgtcggcgaacaagtctacaataggctctatgctcccgatcctcattcgatttctcacgtgaaagccggggatcaccactaaacgtttggacggacgcactccattccatcatcacttaataagcttgctagcatgttctcgcagcctttaatgtttaaatttcagaccgtgttcgcttctttgggactcactatgttgtcttgta

SEQ ID NO: 2230 - DNA, 357 bp, Glycine max
  Clone ID: LIB3072-023-Q1-E1-A6
gacagcaaaaacaattaataaagatgagtttgaagaacaacatggtggtgctaaaggtgtgtttgttgcttcttttccttgtgggggttacagctgcacgcatggaactgagcttcttcaaaagtgatcagtcatcaagttatgatgatgatgagtattcaaaaccatgctgtgatctctgcatgtgcacacgctcaatgcctcctcaatgcagctgtgaagatattacgctgaattcatgccactcagattgtaagagctgtatgtgcacacgctcacagccagcacagtgtcgttgtcttgacaccaacgacttctgctacaaaccttgcaagtccaaagattactagaaaaact

SEQ ID NO: 2231 - DNA, 320 bp, Glycine max
  Clone ID: LIB3072-023-Q1-E1-A8
aggcacaacacccggagagggaacgtcagcaacacggtgagaaggaggaagacgaaggtgagcagccacgtccattcccattcccacgcccacgccaacctcatcaagaggaagagcacgagcagaaggaggaacacgaatggcatcgcaaggaggaaaaacacggaggaaagggaagtgaagaggaacaagatgaacgtgaacacccacgcccacaccaacctcatcaaaaggaagaggaaaagcacgaatggcaacacaagcaggaaaagcacaatacagcggtaacgtaaaaaacaaaaaaccggcggccctaaagg

SEQ ID NO: 2232 - DNA, 231 bp, Glycine max
  Clone ID: LIB3072-023-Q1-E1-A9
ggatacattaagcatttatggttaggattttgggaactaatagtagcggtgaaaacgtgagtgcatgtcttctgcaccttatgatgacgatcactgtgctggtcgctataaacttcagtaaacgaaacatctactcacttaattgtgcccatgattacctcgtcaccagcattgctaccgtcagatacgcatcatcacctgaacctcattgcatgcagttctaggttcatg

SEQ ID NO: 2233 - DNA, 96 bp, Glycine max
  Clone ID: LIB3072-023-Q1-E1-B11
gaaaggtaacgctacgagaacacaacagtatgttactgatgtcactttcttctatatcgctcaggttccaaaaatatgttagtagggtcatgtcgc

SEQ ID NO: 2234 - DNA, 158 bp, Glycine max
  Clone ID: LIB3072-023-Q1-E1-B12
ggagagacagtgagacagacttacagatcattttccaacacgattacacgaccgcatcaaacctctcattctctccgaacctgctttcaacatcgtattggccttcgattggtctcctctttaccacataatggtctctcctcgatttgatggaacag

SEQ ID NO: 2235 - DNA, 415 bp, Glycine max
  unsure at all n locations
  Clone ID: LIB3072-023-Q1-E1-B2
cccacgcgtccgaattcgagcggccgctcgaaaagacgacagaaggggacagcaaaaacaattaataaagatgagtttgaagaacaacatggtggtgctaaaggtgtgtttgttgcttcttttccttgtgggggttacagctgcacgcatggaactgagcttcttcaaaagtgatcagtcatcaagttatgatgatgatgagtattcaaaaccatgctgtgatctctgcatgtgcacacgctcaatgcctcctcaatgcagctgtgaagatattaggctgaattcatgccactcagattgtaagagctgtatgtgcacacgctcacagccaggacagtgtcgttgtcttgacaccaacgacttctgctacaaaccttgcaagtccagagatgactagannaactaatagctctct

SEQ ID NO: 2236 - DNA, 385 bp, Glycine max
  Clone ID: LIB3072-023-Q1-E1-B4
gatgcaactgaataattaagaaaagccatttccatagcagcctaagaaaatgaagagcactagcttgttcgctatctttctactttgcgccttcacctcatacctaccttccgccaccgcccaggacgtgctcgacgtggatggcgatccgattcggaacggtttcatatactacgttttgccggcaataagaggaaacggtggcggaatagaacgagccgcactcgggaaagacacttgccctatcactgtagtgcaatctcccaatccaaactctaaggggttagaaattaagtttgaatctgcataccccgcctattacataaacgaaaccctaattttgcaaataaagttcagtttaccacagcagtgtgaaagaaagaat

SEQ ID NO: 2237 - DNA, 407 bp, Glycine max
  Clone ID: LIB3072-023-Q1-E1-B6
agggggttggaattttcccctctgtcctgtttcaattgttggtctcttttttatctgatttatttttacccatagtttaatatagtttgatgcaagatatgcttgacgtacatgctgctaataaacaatcattgtacggttgccaaatccgtagggaaagtgctcatggagaaagtgtgtgttgcaacaatgtgagagctctttttgatgagctcccaacaccccatatcattgtggaaatcacaccttttcccgctggaccccttaatgacaatgagtacattaaagctgagaagcttgagaaggttctcagatctagtccttctgtttgatctgtctatgtatggtgtttcatgctttcacgtacatattctttgctaccttgtaaatattgacctctgttggga

SEQ ID NO: 2238 - DNA, 330 bp, Glycine max
  Clone ID: LIB3072-022-Q1-E1-H9
ggaagaaaaaaattgattctaaaaatcagtctcaacagagataaacaaatggcaaaagcttcattgttgtttccttacttgatagttataattctcatagcatttggaacaggttttgcaaatgcatgtaacttcccgtgtcattctcggaacggttgtggtaatctacactgccctggttgcttaaagcaatgcgtcaacttttgttgcctttgtgattgtagtccactacccaatggaaatgtttcataaacaaagaatcataataattaaataaacttgagatttcattgctcaaattatgatgtatgaactccctgcctttgcatt

SEQ ID NO: 2239 - DNA, 357 bp, Glycine max
  Clone ID: LIB3072-023-Q1-E1-B8
gataagaaagaagatcaaaagaaaaaagagaaacaaatggcagcactgggtggctttaccgacatcaccggagcacagaacagcatcgatatcgaaaatctcgctcgctttgctgttgatgaacacaacaaaaaagagaatgcagttctggagtttgtgagggtgattagtgcaaagaaacaagtggtttctggcaccttgtactatatcactttggaggcaaatgatggtgtgacgaaaaaggtttatgaaactaaggtgttggagaaaccatggttgaacatcaaggaggttcaagaattcaagcccatcactgttgctgttaatcctctttcggtgacggtctatcacatagct

SEQ ID NO: 2240 - DNA, 424 bp, Glycine max
  unsure at all n locations
  Clone ID: LIB3072-022-Q1-E1-G1
gacagcanaaacaattaataaagatgagtttgaagaacaacatggtggtgctaaaggtgtgtttgttgcttcttttccttgtgggggttacagctgcacgcatggaactgagcttcttcaaaagtgatcagtcatcaagttatgatgatgatgagtattcaaaaccatgctgtgatctctgcatgtgcacacgctcaatgcctcctcaatgcagctgtgaagatattaggctgaattcatgccactcagattgtaagagctgtatgtgcacacgctcacagccaggacagtgtcgttgtcttgacaccaacgacttctgctacaaaccttgcaagtccagagatgactagaanaactaatagctctctcaaatggacgaagcccctttaggctttgttttgtatgttaagggagacaaataaac

SEQ ID NO: 2241 - DNA, 391 bp, Glycine max
  Clone ID: LIB3072-022-Q1-E1-G11
gacagcaaaaacaattaataaagatgagtttgaagaacaacatggtggtgctaaaggtgtgtttgttgcttcttttccttgtgggggttacagctgcacgcatggaactgagcttcttcaaaagtgatcagtcatcaagttatgatgatgatgagtattcaaaaccatgctgtgatctctgcatgtgcacacgctcaatgcctcctcaatgcagctgtgaagatattaggctgaattcatgccactcagattgtaagagctgtatgtgcacacgctcacagccaggacagtgtcgttgtcttgacaccaacgacctctgctacaaacctcccaagtccagagatgactataaaaactaatagctctctcaaatggacaagccccttaagct

SEQ ID NO: 2242 - DNA, 231 bp, Glycine max
  Clone ID: LIB3072-022-Q1-E1-G12
ccacgcatccgaccacgcgtccgtgcgacatgacgacagaaagggacagcaagggtaaaagtgttgtcccaaaaaaagtgcatctttctcctttctttcatcaccgttggaatagactgatatgggctcagaaaccaatacttttacctttgaggaggtggctatccacagtcacaggaaggattgctggcttatagtcaacgggaatgtgtatgatgtcatcccattttt

SEQ ID NO: 2243 - DNA, 360 bp, Glycine max
  unsure at all n locations
  Clone ID: LIB3072-022-Q1-E1-G4
gacagcaaaaacaattaataaagatgagtttgaagaacaacatggtggtgctaaaggtgtgtttgttgcttcttttccttgtgggggttacagctgcacgcatggaactgagcttcttcaaaagtgatcagtcatcaagttatgatgatgatgagtattcaaaaccatgccgtgatctctgcacgtgcacacgctcaatgcctcctcaatgcagctgtgaagatattaggctgaattcatgccactcagattgtangagctgtatgtgcacacgctcacagccaggacagtgtcgttgtcttgacnacaacgacttctgctacaaaccttgcaagtccagagatgactagaanaactaat

SEQ ID NO: 2244 - DNA, 288 bp, Glycine max
  Clone ID: LIB3072-022-Q1-E1-G5
gacagcaaaaacaattaatagagatgagtttgaacaacaacatggtggtgctaaaggtgtgtttgttgcttcttttccgtgtgggggttacagctgcacgcatggaactgagcttcttcaacagtgatcagtcatcaagttatcatgatgacgagtattcaaaaccatgccgtgatctctgcacgtgcacacgctcaacgcctcctcaatgcagctgtgaacataatacgctcaagtcatgccactcagattgtacgagctgtatgtgcacaccctcacagtcacgac

SEQ ID NO: 2245 - DNA, 266 bp, Glycine max
  Clone ID: LIB3072-022-Q1-E1-G6
gggaccccacccatttgcagaaacaaaaaacaacaaagtttcacttcatccttatccggtttagggtttcggtttttgacccaacctttgaggtaccgaaaccttaagtttcggatcaagtctgagcaatctggttggtacaacctttggtcttagagagtcaagttttatgtctgaattacacgatgaaattcctactgccttcgatccttatgctgatgcaaatgctgatgactcgggtgctgggtcaaaggagtatgtgcata

SEQ ID NO: 2246 - DNA, 384 bp, Glycine max
  Clone ID: LIB3072-022-Q1-E1-G7
gactcactcatacaatagagaccagcttttgcttctttgtgaacatggagatgaggaaatcatgtggcttcttcttcttgctcctcctccttgtctttgcttcccaggtgatggtgcagacggagggaagagtgtgtgagtcacaaagccacgggttccatggtttgtgtaatagagaccacaactgtgctttggtctgcaggaacgaaggtttctccggtggcaggtgcaaaggcttccgccgccgctgcttttgcaccaggatttgttgagatctcatcaaacactactcttgccatgcaaattaataaatcatagctaggccaaataaattgcatccactctttatccatttgggagctagctaccacaaccaactcatac

SEQ ID NO: 2247 - DNA, 422 bp, Glycine max
  Clone ID: LIB3072-022-Q1-E1-G8
gactctcatcacattattctatatcaattttggttaagagtcttgaaaaagcaagagaaaaaaaataccaaccatggcaaccatttctgatcaacctagagggtcctactcctatggaacctcatatggagcaccctatggaaccacgtatgagaccaacaccagcattaacaacccaccttcacgccaaacagtgaagttcataactgctgccactattggcatcacactcttgctcctgtctgggttgaccctcacgggcactgtcataggtttgatcattgcaacccctcttcttgttatcttcagccccatccttgtccctgctgcgtttgtgctgttcctagttgcttctggctttttgttctctgggggctgtggtgtggctgccattgctgctttgtcctggatttacaactatg

SEQ ID NO: 2248 - DNA, 340 bp, Glycine max
  Clone ID: LIB3072-022-Q1-E1-G9
ggaagcccaaaattagtttagtggatatggggactgcatcatctattctaactcaatacgacatcgaggaagttcaggaacactgcactaatttattttcccagcaggaaattgtgtccttatatcaaaggttttgtcaacttgaccgcaacgccaagggatttatttccgcagatgagttcttgtccgttcacgaatttgccatgaatccactttctcagaggctgctcacgatggtcgacggtttgagatttacagactttgtggccttcgtatctgcattcaatgccaacgcgagcgcacaacaaaaaatagagcttattttcaaagtatatgactc

SEQ ID NO: 2249 - DNA, 272 bp, Glycine max
  Clone ID: LIB3072-022-Q1-E1-H10
gacagcaaaaacaattaataaagatgagtttgaagaacaacatggtggtgctaaaggtgtgtttgttgcttcttttccttgtgggggttacagctgcacgcatggaactgagcttcttcaaaagtgatcagtcatcaagttatgatgatgatgagtattcaaaaccatgctgtgatctctgcatgtgcacacgctcaatgcctcctcaatgcaactgtgaagatattaggctgaattcatgccactcagattgtaagaactgtatgtgcaca

SEQ ID NO: 2250 - DNA, 386 bp, Glycine max
  Clone ID: LIB3072-022-Q1-E1-H12
gagagatagagttatcgatccctttggggagataagaaaatgtggcttgtgcagctctcaaccccatctctgaacggccatggccatggctccagccttctctggaaacccagttcggcggtgactcaggcccactgggccccgccgagtttgctgcctcaaatcaatgcgatgaagacgatgcagggaaaagtggtgtgctccacgaacgacaagacggtggcagtggaggtggtgcggctggcccctcacccaaagtacaagaggcgcgtgaggaagaagaagaagtaccaagcccacgatcccgattaacaattcaatgtcggcgacatcgtccagctccagaagaccaggcccatcagcaagacaaaggctttctcgcactc

SEQ ID NO: 2251 - DNA, 445 bp, Glycine max
  unsure at all n locations
  Clone ID: LIB3072-022-Q1-E1-H2
agggggattgtaaaacgctgctgccgaaacccttccggaaccctaaggtaagtgagtaatcagtggttgagaatggtggagaaggcgaagggtanaaaggaggaggtggttacacgtgagcacaccattaacctccacaagcgcctccatggctgcacatttaagaagaaagctcctaaagctattaaggagataaggaaatttgcccaaaaggccatggggaccaatgatgtgagggtggatgtgaagttgaacaagtttgtctggagccagggaatcangagtgttccaaggaggattagagtaagaattgctcgcaagagaaatgattatgaagatgccaaggaagagctgtactctctttgttacgttgtttagatccctaaggacgagctcaaagggttaggcactaaagttattgatgacgacggatgatttatatctg

SEQ ID NO: 2252 - DNA, 394 bp, Glycine max
  unsure at all n locations
  Clone ID: LIB3072-022-Q1-E1-H3
gaaaacaaaatcagcaaaaataaaaggccccaaaatccgtttctcttatcttcaaattaattgagtaactgattaagcgcttcatcttcaacaacaccaaaaaaaacatacaccaaaaaggagttacatttgttcatcttcttcttcttcttcaactccaatttgggtcaccaaaatatcctccacctttatcaaactgaagcatttaaaaaacccagaagggtcaattatttccttgcatttcctagcttaaaatattcagtangtgcacttggtccatttgcttctttctctccattagcaattattattaccatccccttttaacccctcccttttcttattttcncatttgcaattttaatcaacctttcttcttgataccccaacccat

SEQ ID NO: 2253 - DNA, 328 bp, Glycine max
  Clone ID: LIB3072-022-Q1-E1-H4
acacaagggggttgcaatgcattgagaaactacacaagttacaacagagaatgagaaaagatgcagtagaaaaactacaaaaaaaacacttaaattttcacagacagtttaatacaagaatcaagatggacgcccaaaatatgagctacaatgctggacaagccaagggccaaactcaggaaaaggctaacaccatgatggacaaggctagcaatgctgctcaatctgctgaagaatccttgcaagaggttggacagcatatgcaggctaaagcacaatgagctgctgatgctgttaacaatgccacacgatgaacaaatgaagctaa

SEQ ID NO: 2254 - DNA, 267 bp, Glycine max
  Clone ID: LIB3072-022-Q1-E1-H5
gagcaacatggtgaagctggtggagagatttacttgccagaagcttacgttagaaccaagaggactacttaatggagcaaatcagttggaagaacttgtagctagcttcccaactggcttatctgagtgtggagaagcattatcaagccttaggagtaggagaacgagtactgtttgtgatgaatgtctatggtttaagaaatctgtctttagtcaacttgtgtgttttgttattcagttctcagcaataaactgctctggcaatct

SEQ ID NO: 2255 - DNA, 304 bp, Glycine max
  Clone ID: LIB3072-022-Q1-E1-H6
cacaacggggtggaagtaattgcagaactttgtttcccaacctcaattgcctccgcttctaccccgctaccatgatcattcctgagaagaaccgcaaggagatctgcaaatacctcttccaagagggagtttgctttgcgaagaaagacttcaatttggcgaagcaccctgagattgacgtgccgaatctgcaggtgattaagctgatgcatagtttcaagtctcgcgagtatgtgagggagacttttgcttggatgcactattactggttcctcaccaacgatggaatcgagtttctcacaac

SEQ ID NO: 2256 - DNA, 279 bp, Glycine max
  Clone ID: LIB3072-022-Q1-E1-E1
ccacatttaataaaaaactcgtggtgtattcaatgaaagacaagagagacaaaaaatttaaaatctaataaccatgtaaatactaaagagttttgtcttgttgctctcgttcgcccaaaatttggggtgccatcatttgaagctatggttatgtacctattcccatcacactggggtgccttaatttagggttagttacaatttacgttgacatgtgagattgctaacattacagtctctaatacattatctattgcttaaatttatcagaagcttcga

SEQ ID NO: 2257 - DNA, 416 bp, Glycine max
  Clone ID: LIB3072-022-Q1-E1-E10
gacacttactagtagtaagcatggagtcctcaaagatctatgcttacctcttcctctgcatgatctttctctcttccgccactcccattctcggttgtggctactgtggcaaaccccccaaaaagcacaagcctggtaaaacaccaaagacacccaaaacacccgttgttaagccaccagtcaccatccctcccattaatgttcctcccgttgttcttccaccaatagtgaagcccccaggtattctccctccaattccaattattaacccaccaaccacaccagggaagggagggaacactccatgcccaccaacaaagtctcctgcgcaggctacgtgccccattgacacgctcaaacttggtgcctgtgtggatcttcttggagggttggttcacattggtttgggtgaccct

SEQ ID NO: 2258 - DNA, 267 bp, Glycine max
  Clone ID: LIB3072-022-Q1-E1-E11
gacacacaactaactaagacagtcttccataaccccccaaaaatgaagagcaccatcttctttgctctctttctcttttgtgccttcaccaccgcatagttaccttcagccatcgctgatttcgtgctcgataatgaagggaaccctcatgaagatggtggcacatattatatcttgtcacacataacagcatttggtggaataagaccagccgcatagggaaatgaaagatgccctctcaatgtggtgcaatctcgcaatgagctc

SEQ ID NO: 2259 - DNA, 362 bp, Glycine max
  Clone ID: LIB3072-022-Q1-E1-E12
ggaagctgtgacagtttcagatgagtgaagcaacaacaagaaacgaacggcgggttctggtggcggtggacgaaggcgaggaaagcatgtacgctctttcttggagcctcaagaacataattttccaaaattccagcgatacccttatccttctttacgtcaagccccctcatgccgtttattcccccttagattccacagccaggatagatcatcctgaaactccaggatatttgttttcgtccgacgtaagtgcggccatcgaaaagtatggccaagaagtggcagattgcgttgtacagaaagcaaaaaattgtgtaaagatctccaaaacgtcaaggtggaaacccgggtacaaattg

SEQ ID NO: 2260 - DNA, 350 bp, Glycine max
  Clone ID: LIB3072-022-Q1-E1-E3
ggaagggtcgtcgaagaggatgatagcgactcaggaggagatggtggaggccagggttcctctggcctacagggaccagtgcgcccacttgctcatccctctcaacaagtgcaggcaggccgagttctacctcccatggaagtgccaggaccagcgtcactcctacgaaaagtgccagtacgagctcgtcatggagagaatgctccagatgcaaaagatccgcgagcaccaacaaaaccccaacgccaaacaaccccttatcgcgcttcccaaacccgccaatgcctgattcatattcactgaacctttgcttgggacagatgttatttcatgttttgctattgtatgga

SEQ ID NO: 2261 - DNA, 274 bp, Glycine max
  Clone ID: LIB3072-022-Q1-E1-E4
agggagaagcctacagtcatcacataatggacaattccacaaccacttgatcaagttgttatatgttccaaggtgtgctctaagttgagtgcatacgcaggttgtttattgcatgcctatccatatctgagctcgctcgagttcggtcacttttggttgttcaagaattttggagcgataggtcccctgtaaaatatgctacttatatatttatgtgcaaagtatgaagcaccgacgtgcaacaaaataataataaaaaagaatagtttgctgc

SEQ ID NO: 2262 - DNA, 404 bp, Glycine max
  Clone ID: LIB3072-022-Q1-E1-E5
gacagcaaaaacaattaataaagatgagtttgaagaacaacatggtggtgctaaaggtgtgtttgttgcttcttttccttgtgggggttacagctgcacgcatggaactgagcttcttcaaaagtgatcagtcatcaagttatgatgatgatgagtattcaaaaccatgctgtgatctctgcatgtgcacacgctcaatgcctcctcaatgcagctgtggagatattaggctgaattcatgccactcagattgtaagagctgtatgtgcacacgctcacagccaggacagtgtcgttgtcttgacaccaacgacttctgctacaaaccttgcaagtccagagatgactagaaaaactaatagctctctcaaatggacgaaacccctttaggctttgtttgttat

SEQ ID NO: 2263 - DNA, 231 bp, Glycine max
  Clone ID: LIB3072-022-Q1-E1-E7
gaccctcatccagaaaacacctgcttctggcgtcttaaaaatacgtcacactccttctgaaggctaaaatcagtgttctttgtttttttgcagaaaagactacgagatggcgaagcgcttgattccctgcttcaatcgcattctcatcgagaaaatcgcccctccctccaataccagcgacggtattctattcgcggggaagaactcccagcttaattccggtaaggtgat

SEQ ID NO: 2264 - DNA, 360 bp, Glycine max
  Clone ID: LIB3072-022-Q1-E1-E8
gacagcaaaaacaattaataaagatgagtttgaagaacaacatggtggtgctaaaggtgtgtttgttgcttcttttccttgtgggggttacagctgcacgcatggaactgagcttcttcaaaagtgatcagtcatcaagttatgatgatgatgagtattcaaaaccatgctgtgatctctgcatgtgcacacgctcaatgcctcctcaatgtagctgtgaagatattaggctgaattcatgccactcagattgtaagagctgtatgtgcacacgctcacagccaggacagtgtcgttgtcttgacaccaacgacttctgctacaaaccttgcaagtccagagatgactagaaaaactaat

SEQ ID NO: 2265 - DNA, 405 bp, Glycine max
  Clone ID: LIB3072-022-Q1-E1-E9
gaggcattccacattctcaaccccgaaccctaagagcagagcgaaaatgacaaccaccttcgcgaccgtcgcaggactcggtggcgcattactgtcatccacctcatctcgtctcacctcagggtttgtgaaatccccagtgattgctaggaatcccttgaggcaagctgtggcaatgggaaatgggaggattacatgctttgagaggaattggctgcgggcagattacagtgtgattgggtttgggttgattggttggctagcaccctcaagcataccggctatcaacggtaaaaggtctgactggcctcttctttgagagcattggtgctgagcttgctcacttttccagccctccttgccctacttcgtccttttggttatggctggttacgttgaaccttg

SEQ ID NO: 2266 - DNA, 72 bp, Glycine max
  Clone ID: LIB3072-022-Q1-E1-F1
gagaggaaagaccgagaaaaaaaaagaaggaattttgatggtaaactaatatttctaatatcagaattcgag

SEQ ID NO: 2267 - DNA, 224 bp, Glycine max
  Clone ID: LIB3072-022-Q1-E1-F11
cacgcatcgatgagagaagactacagaaggggtcattcattcaactaaaagcaagaacaattactttagtgttttctcttgtcacataaaagtcatctaagaagaattacaagatcatcatgagaatgacaagatgagttcaggaattagaggatggagtgtggcagcaagtgttggaattgtggaggccttgaaagatcaagggatatgcatgtggtattatt

SEQ ID NO: 2268 - DNA, 327 bp, Glycine max
  Clone ID: LIB3072-022-Q1-E1-F3
gacagcaaaaacaattaataaagatgattttgaaaaaaaacatggtggtgctaaaggtgtgtttgttgcttcttttccttgtgggggttacagctgcacgcatggaactgagcttcttcaaaagtgatcagtcatcaagttatgatgatgatgagtattcaaaaccatgctgtgatctctgcatgtgcacacgctcaatgcctcctcaatgcagctgtgaagatattaggctgaattcatgccactcagattgtaagagctgtatgtgcacacgctcacagccaggacagtgtcgttgtcttgacaccaacgacttctgctacaaac

SEQ ID NO: 2269 - DNA, 371 bp, Glycine max
  Clone ID: LIB3072-022-Q1-E1-D9
gacagcaaaaacaattaataaagatgagtttgaagaacaacatggtggtgctaaaggtgtgtttgttgcttcttttccttgtgggggttacagctgcacgcatggaactgagcttcttcaaagtgatcagtcatcaagttatgatgatgatgagtattcaaaaccatgctgtgatctctgcatgtgcacacgctcaatgcctcctcaatgcagctgtgaagatattaggctgaattcatgccactcagattgtaagagctgtatgtgcacacgctcacagccaggacagtgtcgttgtcttgacaccaacgacttctgctacaaaccttgcaagtccagagatgactagaaaaactaatagctctctcaaa

SEQ ID NO: 2270 - DNA, 395 bp, Glycine max
  Clone ID: LIB3072-022-Q1-E1-F5
gacagtttcaaacacttgtttttcttctctcttctccttttttttctgtgtggatctacacccactaagatgttacccctattctgaaaatggaaaacaatcatagtgcagctggaacacaagatagttctatgatgaagtctgttgatcaaagagtacgttcaaaagcgcgtaatgacataatgactcgacgtctgaagaatcgagagagacaacgaagatatagggcacgtaagcgtctagaagccgaaacaaagaagtcatttgttgtagaagagacaacagctgtgcaagtagaactacaaccaaacaggaatcacaacaacaacaacaacttcgtcagccgtatctattgtaaacgagaatgggaaaaagatgcaagacgagcccatgtt

SEQ ID NO: 2271 - DNA, 314 bp, Glycine max
  Clone ID: LIB3072-022-Q1-E1-F6
gactcactcatacaatagagaccagcttttgcttctttgtgaacatggagatgaggaaatcatgtggcttcttcttcttgctcctcctccttgtctttgcttcccaggtggtggtgcacacggagggaagagtgtgtgagtcacaaagccacgggttccatggtttgtgtaatatagaccacaactgtgctttggtctgcatgaacgaaggtttctccggtggcaggtgcaaaggcttccgccgccgctgcttttgcaccaagatttgttgagatctcatcaaacactaatcttgccatgcagattaataaatc

SEQ ID NO: 2272 - DNA, 350 bp, Glycine max
  Clone ID: LIB3072-022-Q1-E1-F8
aagaaggaagctgaagtcatagaggagaagaaggaagtggaagtgacggaagagaagaaggaaattgaagtaacagaagagaagaaggaagctgaagtcatagaagagaagaaggaagtggaagtgacggaagagaagaaggaaattgaagtaacagaagagaagaaggaagcagaagtgaaagaagagaagaaggaaggggaagtgacggaagagaagaaggaagttgaagtgacggaagagaagaaggaagcggcagtgatagtagaagagaagaatgaagttgaagtgaccgaaagagaacaatgaagtggaagtgaccgacggaaagaaagaagtggaagtgatcg

SEQ ID NO: 2273 - DNA, 390 bp, Glycine max
  Clone ID: LIB3072-022-Q1-E1-B9
cgacagaaggggattcacacaactaactaagaaagtcttccatagccccccaaaaatgaagagcaccatcttctttgctctctttctcttttgtgccttcaccacctcatacctaccttcagccatcgctgatttcgtgctcgataatgaaggtaaccctcttgaaaatggtggcacatattatatcttgtcagacataacagcatttggtggaataagagcagccccaacgggaaatgaaagatgccctctcactgtggtgcaatctcgcaatgagctcgacaaagggattggaacaatcatctcgtccccatatcgaatccgttttatcgccgaagggcatcctttgagccttaagttcgattcatttgcagtttataagctgtgtgt

SEQ ID NO: 2274 - DNA, 338 bp, Glycine max
  Clone ID: LIB3072-022-Q1-E1-C1
gatcacattattctatatcaattttggttaagagtcttgaaaaagcaagagaaaaaaaaataccaaccatggcaaccatttctgatcaacctagagggtcctactcctatggaacctcatatggagcaccctatggaaccacgtatgagaccaacaccagcattaacaacccaccttcacgccaaacagtgaagttcataactgctgccactattggcatcacactcttgctcctgtctgggttgaccctcacaggcactgtcataggtttgatcattgcaacccctcttcttgttatcttcagccccatccttgtccctgctgcgtttgtgctgttc

SEQ ID NO: 2275 - DNA, 343 bp, Glycine max
  Clone ID: LIB3072-022-Q1-E1-C10
gacatcacaaaccaaacaacttctaacacatacactactctctctctctctcttattgtatggccgccaattccagtagccgagggatcaccgccttagggaagcgagtcgccaaccggatctggacttccaacgcacctcctctcacttcaaggaggggagcatacagtagcggctcagtgtacgacaagaaccctgatgatgagatccagtctgggcaggtcccagacgatgtgatccaggcggcaacacaatccggcaaatactgggccccacatccacagactggggtatttgggccccccggaggaggtgaccaaactgcttctgccattcactctga

SEQ ID NO: 2276 - DNA, 384 bp, Glycine max
  Clone ID: LIB3072-022-Q1-E1-C11
gacagcaaaaacaattaataaagatgagtttgaagaacaacatggtggtgctaaaggtgtgtttgttgcttcttttccttgtgggggttacagctgcacgcatggaactgagcttcttcaaaagtgatcagtcatcaagttatgatgatgatgagtattcaaaaccatgctgtgatctctgcatgtgcacacgctcaatgcctcctcaatgcagctgtgaagatattaggctgaattcatgccactcagattgtaagagctgtatgtgcacacgctcacagccaggacagtgtcgttgtcttgacaccaacgacttctgctacaaaccttgcaagtccagaaatgactataaaaactaatagctctctcaaatggacgaacccc

SEQ ID NO: 2277 - DNA, 358 bp, Glycine max
  Clone ID: LIB3072-022-Q1-E1-C3
ggaagcatttgagactaactcttagagagaaaaaaaaatggctgatacaggtggaggagatgcagtgagaccagtggtaatatgtgataacaagtgtggctgcacacttccatgcactggtggttccacttgcaggtgcacaagtgctggcactgccacaggagggggtgatcacgtgacatgctcgtgcggagagcactgtggttgcaatccatgctcatgtcccaagattgcggctgctggaagtggttgcagatgtggcacagattgtgcatgtgcctcctgccgcacttagtatcacaccttaaggcttaaacttcacgttttattttatgtcttcaaatcttgaatacgtttt

SEQ ID NO: 2278 - DNA, 375 bp, Glycine max
  Clone ID: LIB3072-022-Q1-E1-C6
gccactttgagttcgaactaaacaattcaattcaatctgcctcgatcatggagaggaaaacatttgggtttttgttcttgctcctccttgtcttagcttctgatgtgacggtgaagagagcagaggcgaaagattgcttgacaaggaggcacgggttccagggtagatgcttattcgacaggcaatatgcacatgtgtgcaggagcgatggtttcatcggtggtcagtgccgaggccctcttcgcaaatgcttttgcagcaggccatgttgatcgaaattactactgccaaagaggccatgaaataaacaaacaaacaaataaataaatagctctaaccgacacatatgtacgtagtgtccgggttctagctagc

SEQ ID NO: 2279 - DNA, 267 bp, Glycine max
  Clone ID: LIB3072-022-Q1-E1-C7
gaacgcagccaggaaaagaaaatccgcacccattttcttcgtagccaaacacgctgaaattcccagttatgtcgtggcaggcgtaggtggaagatcacctactgtgtgaaatccaatgtgagcacctcactcaggcagcgtatcaccggacaagacggaagcgtttgggctcagaccaccaacttcactcagtgcaggcctgaggaaataaccgccatcaggaatgacattaatgagcctggatcacgtgctccaactggattgtat

SEQ ID NO: 2280 - DNA, 327 bp, Glycine max
  unsure at all n locations
  Clone ID: LIB3072-022-Q1-E1-C8
ggcttattcacgcaactaaataagaaatgaagagtactatcttctttgctctctttctagtttgtgccttcaccatctcatacctgccttcagccaccgctcagttcgtgctcgacactgatgatgatcctcttcaaaacggtggcacatactatatgttgccagttatgagaggaaagggcggtggaatagaagtagattcaactggaaaagaaatatgccctctcactgttgtgcanatcaccaatgagctcgataaggggattggactagtctttatatctccattacatgccctttttatcgcccaaggctatcctttgagca

SEQ ID NO: 2281 - DNA, 374 bp, Glycine max
  Clone ID: LIB3072-022-Q1-E1-C9
gacacaactaactaagaaagtcttccatagccccccaaaaatgaagagcaccatcttctttgctctctttctcttttgtgccttcaccacctcatacctaccttcagccatcgctgatttcgtgctcgataatgaaggtaaccctcttgaaaatggtggcacatattatatcttgtcagacataacagcatttggtggaataagagcagccccaacgggaaatgaaagatgccctctcactgtggtgcaatctcgcaatgagctcgacaaagggattggaacaatcatctcgtccccatatcgaatccgttttatcgccgaaggccatcctttgagccttaagttcgattcatttgcagttataatgctgtgtg

SEQ ID NO: 2282 - DNA, 325 bp, Glycine max
  Clone ID: LIB3072-022-Q1-E1-D1
agggattcacacaactaactaagaaagtcttccatagccccccaaaaatgaagagcaccatcttctttgctctctttctcttttgtgccttcagcacctcatacctaccttcagccatcgctgatttcgtgctcgataatgaaggtaaccctcttgaaaatggtggcacatattatatcttgtcagacataacagcatttggtggaataagagcagccccaacgggaaatgaaagatgccctctcactgtggtgcaatctcgcaatgagctcgacaaacggattggaacaatcatctcgtccccatatcgaatccgttttatcgc

SEQ ID NO: 2283 - DNA, 367 bp, Glycine max
  Clone ID: LIB3072-022-Q1-E1-D4
gcaaaaaaacaacagaaggggataccaaaaccatttaaaaacaatgaccttgaaaaccaaaatgttggtgcaaaaggtgtgtttgttgcttctttcccttgtgggggtaacagctgcacccatggaactaacctccttcaaaattgttaattcatcaagtgataagcataataattatccaaaacaatgctgtaatttctgcatttgcaaaccctcattgctccttcaatgaacctgtaagaatattaggctaaatccatccaactcaaattgtaaaagctgtatttgcacacactcacagccaagacagtgtcgttgtcttgacacaacgacttctgctacaaaccttgcaagtccacacatgact

SEQ ID NO: 2284 - DNA, 411 bp, Glycine max
  Clone ID: LIB3072-022-Q1-E1-D6
ggaacataaaggtgaataattttctttgtaataagataatataaattaaaaacggaaatgcgaagattcttaattttattgaggtgttgtgattcgaaatcaaactgaaggcaacgccactgcaatctgttctaattagaaatagaaggttcatcatctcaaaaaggcttttgcgattctcgatttgatttggatcgcacagaacgaaggcatgggtcaagcttttcggaagctcttcgacaccttcttcggcaacaccgaaatgccggttgtgatgcttggtctaaatgctgctggcaaaacaactatactgtacaagctccacattggaaaagttttatctactgttcctacaataagttttaatgtggagaacgttcagtataagaatgttgttttcaccgtttggga

SEQ ID NO: 2285 - DNA, 431 bp, Glycine max
  Clone ID: LIB3072-022-Q1-E1-B6
ggcagccaaagaaaagaaaatcctcaattttctgagcagccaaacactctctctctgtctctcgaaaattctcagtttgcagagaaaatctgaatcatgtcgtggtaagcgtatgtcgacgatcaccttctgtgtgacatcgaaggtaaccacctcactcacgctgctatcatcggccaagacggcagcgtttgggctcagagtaccgacttccctcagttcaaacctgaggagataactgccatcatgaatgactttaatgagcctggatcacttgctccaactggattgtatctcggtggcaccaaatatatggtcatccagggtgaacccggtgctgtcattcgagggaagaagggtcctggtggtgttactgtgaagaagacggtgcggccttgatcattggcatttatgatgaaccaatgactcca

SEQ ID NO: 2286 - DNA, 305 bp, Glycine max
  Clone ID: LIB3072-021-Q1-E1-H5
cgggacagcaaaaacaagtaatacagatgagtttgaacaacaccatggtggtgctaaaggtgtgtttgttgcgtcttttccttgcgggggttacatctgcacgcatggaactgagcttcttcagaagtgatcagtcatcacgttacgatgatcatgagtagttccacatcatgctgtgatctctgcatgtgcatgcgcgcaatgcctccccaatgcagctgtgaagatattacgctgaattcacgcgactcagaccgtaagagccgtatctgcacacgctcatcggcaggacactgtcgttgtct

SEQ ID NO: 2287 - DNA, 297 bp, Glycine max
  Clone ID: LIB3072-021-Q1-E1-H7
tcgcgggtccgacaacgcgtccgacgagcagacgagagaaggggataagtaagctttcccaaaaacccaaacccaaaggtgttacgttcagtttcatcattcagagttttcagaggagctctcttttttttgtagttcaggaagcagagagcacgcacttgcggaagtgaagttacggctttgcccttcatctggtggtgtcggagaggaagatgtccgtaggaggaacaacatcgagagcgacatggcgcgttgttttggcttaggttccgttctggttctggcggcgctcgcggc

SEQ ID NO: 2288 - DNA, 377 bp, Glycine max
  Clone ID: LIB3072-022-Q1-E1-A10
gcttcacagcaaaaacaattaataaagatgagtttgaagaacaacatggtggtgctaaaggtgtgtttgttgcttcttttccttgtgggggttacagctgcacgcatggaactgagcttcttcaaaagtgatcagtcatcaagttatgatgatgatgagtattcaaaaccatgctgtgatctctgcatgtgcacacgctcaatgcctcctcaatgcagctgtgaagatattaggctgaattcatgccactcagattgtaagagctgtatgtgcacacgctcacagccaggacagtgtcgttgtcttgacaccaacgacttctgctacaaaccttgcaagtccagagatgactagaaaaactaatagctctctcaaat

SEQ ID NO: 2289 - DNA, 333 bp, Glycine max
  unsure at all n locations
  Clone ID: LIB3072-022-Q1-E1-A3
agggggatacaacatcatacaaagcattgaattcaaaaacttaagttcaatccttgtgttttgctttcctcctcaanaacaaacatgtcgaacacatgcggcaactgcgactgcgctgacaagactagctgcaccaagggaaacagctatggtgttattgtagagactgagaagagttacatcgagactgttgtcatggatgttccagcagctgagcatgatgggaagtgcaagtgtggcactaactgcacttgcacggactgcacctgtggccattaaagaatatgtattaaaatgtaattgccatgtgtttggcaatacaaatatccaaat

SEQ ID NO: 2290 - DNA, 405 bp, Glycine max
  Clone ID: LIB3072-022-Q1-E1-A4
agacgacagaaggggataacatctgtaaacttggtaggagcaccccaatataaaggctgagtctcaatttgcctcatctgatctgagttgttgctaactggaatgatatcattgaagttgtgaacgcaaatggtgaaattgcgtgtgctaagtctttacagacggaacaaagctatcaattacattgcaaatcgttgaaaatgctttgcatttcctccttcaacaaataggtggttctgttggtttggaatttgtgatacatatgatgctagcacatattttattatactaataaaaattccctctatttcagttctataacgataaactttttgtggcagaggcacatgaaaaaattggtaaaattgtatgaaggctgaaaaaagaaaacgtgcaggttttaag

SEQ ID NO: 2291 - DNA, 254 bp, Glycine max
  Clone ID: LIB3072-022-Q1-E1-A7
gacagcgcactgagtgctgagaacgttacctcattcaaaagcagcaacagcagattattcttctttgtttctgttctttcttcatcagccgattcagctttgtccatggccaccgaaccaaaagcagccgccgatgacgtcaagatcgatctcttcgaagacgacgacgagttcgaagagttcgaaatcaatgaagagtgggatgacaacgaagaatggaaggaagtgactcaacactgggaggatgattggga

SEQ ID NO: 2292 - DNA, 284 bp, Glycine max
  Clone ID: LIB3072-022-Q1-E1-A8
gacagcaaaaacaattaataaagatgagtttgaagaacaacatggtggtgctaaaggtgtgtttgttgcttcttttccttgtgggggttacagctgcacgcatggaactgagcttcttcaaaagtgatcagtcatcaagttatgatgatgatgagtattcaaaaccatgctgtgatttctgcatgtgcacacgctcagtgcctcctcaatgcagctgtgaagatattaggctgaattcatgccactcagattgtaagagctgtatgtgcacacgctcacagcca

SEQ ID NO: 2293 - DNA, 347 bp, Glycine max
  Clone ID: LIB3072-022-Q1-E1-A9
gatgcaactgaataattaagaaaagccatttccatagcagcctaagaaaatgaagagcactagcttgttcgctatctttctactttgcgccttcacctcatacctaccttccgccaccgcccaggacgtgctcgacgtggatggcgatccgattcggaacggtttcatatactacgttttgccggcaataagaggaaacggtggcggaatagaacgagccgcactcgggaaagacacttgccctatcactgtagtgcaatctcccaatccaaactctaaggggttagaaattaagtttgaatctgcataccccgcctattacataaaccaaaccctaattttgcaaa

SEQ ID NO: 2294 - DNA, 396 bp, Glycine max
  unsure at all n locations
  Clone ID: LIB3072-022-Q1-E1-B10
ggagagagaacaaagaatcaaagaaaggggtggtggctgcttcgaaagcttaataatttgtttatttccagaacatcatagttttcgcagcagcaaactaacaaattactcatatcatataataagatggcccgttctctctcgcaagccaaacgtattggtgtccttgttgctcaatctatctccctaattcccgttcatcggcgaggttacgcagtggcatccgatgtatcggtaagagttggattgggtaatattgggcgaaggaatggaatcgtgggaggtgtanaagagaagcctgatacaagagatggttcaaaagcctactcaactgattgggccccagacccagtaacaggttactataggcccattaaaccacaccctgaaattgac

SEQ ID NO: 2295 - DNA, 382 bp, Glycine max
  Clone ID: LIB3072-021-Q1-E1-H3
ggagttcgaactaaacaattcaattcaatctgcctcgatcatggagaggaaaacatttgggtttttgttcttgctcctccttgtcttagcctctgatgtgacggtgaagatagcagaggcgaaagattgcttgacaaggaggcacgggttccagggtagatgcttattcgacaggcaatgtgcgcatgtgtgcaggagcgatggtttcatcggtggtcagtgccgatgccctcttcgcaaatgcttttgcatcaggccatgttgatcgaaattactagtgggaaaaaggccatgaaatagacaaacaaacaaatgagtaaatagctctaagcgagacatatgtacgtaatgtccgggttctagctaactaggtaggtacgtg

SEQ ID NO: 2296 - DNA, 365 bp, Glycine max
  Clone ID: LIB3072-022-Q1-E1-B2
cgagaagacgacaaaagggggcagccaagaaaagaaaatcctcacccattttcttcgtagccaaacactctgaaattctcagttatgtcgtggcaagcgtatgtggatgatcacctactgtgtgaaatcgaaggtaaccacctcactcacgccgctatcatcggccaagacggaagcgtttgggctcagagcaccaacttccctcagttcaaacctgaggaaataactgccatcaataatgactttaatgagcctggatcacttgctccaactggattgtatatcggtggcaccaaatacatggtcatccagggtgagcctggtgctgtcattcgagggaaagaaggtcctggtggtgttactgt

SEQ ID NO: 2297 - DNA, 421 bp, Glycine max
  Clone ID: LIB3072-022-Q1-E1-B4
gacagaagaaaaaagagaagaagatgggtttgaagaacaacatggtggtgctaaaggtgtgtttggtgctacttttccttgtggggggtactactagtgccaacttgaggctgagtaagcttggcctgctcatgaaaagtgatcatcatcaacactcaaatgatgatgagtcttcaaaaccatgctgtgatcaatgcgcatgcacaaagtcaaaccctcctcaatgccgctgttcagatatgaggctgaattcgtgccattcagcttgcaaatcttgtatttgcgcattatcgtatcctgcacagtgtttttgtgttgacataaccgatttctgctatgaaccttgcaaacccagtgaggatgacaaggaaaactactaatgaacaagtgttatgcatgtaagctctctcccaacggacaa

SEQ ID NO: 2298 - DNA, 396 bp, Glycine max
  Clone ID: LIB3072-022-Q1-E1-B5
gaaagatagatagaaattaagaggccccaaaagctgcacacattgcccttcctgtccaggaatttgagatctagcaactaacaaggcaataatgaagttcttgttccagtgcccttgctgctcttgcttttgcttcatgaagccaaagcaagggaaggcaaaggtcaaggaagtcaaagaaaccaaggtggaagaaaaaaaggttgaagaaaagaaagactgaccatgtaactccgtttcaagctttctttggttattattagtattatataagcatgcacaacaaatttgtgtctacttaatttgtgcttctttgttcctttaattaccactgctatgatgccttcctactacaattagtttgaaaatgtacaatgcgtttgcaagtaacttctt

SEQ ID NO: 2299 - DNA, 429 bp, Glycine max
  Clone ID: LIB3072-021-Q1-E1-F11
agaaggggacagcaaaaacaattaataaagatgagtttgaagaacaacatggtggtgctaaaggtgtgtttgttgcttcttttccttgtgggggttacagctgcacgcatggaactgagcttcttcaaaagtgatcagtcatcaagttatgatgatgatgagtattcaaaaccatgctgtgatctctgcatgtgcacacgctcaatgcctcctcaatgcagctgtgaagatattaggctgaattcatgccactcagattgtaagagctgtatgtgcacacgctcacagccaggacagtgtcgttgtcttgacaccaacgacttctgctacaaaccttgcaagttcagagatgactagaaaaactaatagctctctcaaatggacgaaagcccttttaggcttgtttgttatgttaggggagacaataaa

SEQ ID NO: 2300 - DNA, 324 bp, Glycine max
  Clone ID: LIB3072-021-Q1-E1-F12
gcgtccgaacacgagtccgaccgctgctacatgacacaacgagacaacaatagcaagtggtagagatgactttgaagaacagcatggtggtgcttaaagtgtgtatgatgcttcatttccttgtgggggttacaacggcacgcatggaactgagcttcttcaacagtggttagtcatcaagttaggatgaaaactagtattcaaaaccatgctgtgatcgctgacatgtgcacacgcgcaatgtcacctcaatgcagactcaagggatattacgactaattgactgcactcagattgtatgagcgctatgtacacacgctcaga

SEQ ID NO: 2301 - DNA, 378 bp, Glycine max
  Clone ID: LIB3072-021-Q1-E1-F2
gattcacacaactaactaagaaagtcttccatagccccccaaaaatgaagagcaccatcttctttgctctctttctcttttgtgccttcaccacctcatacctaccttcagccatcgctgatttcgtgctcgataatgaaggtaaccctcttgaaaatggtggcacatattatatcttgtcagacataacagcatttggtggaataagagcagccccaacgggaaatgaaagatgccctctcactgtggtgcaatctcgcaatgagctcgacaaagggattggaacaatcatctcgtccccatatcgaatccgttttatcgccgaaaggcatcctttgagccttaaattcgattcatttgcagttataatgctgtgtg

SEQ ID NO: 2302 - DNA, 125 bp, Glycine max
  Clone ID: LIB3072-021-Q1-E1-F3
ttaataaagatgagtttgaagaacaacatggtggtgctaaaagtgtgtttgttgcttcctttccttgtgggggtgacagctgcacccatggaactgaacttcttcaagagtgatgagtcatcaaa

SEQ ID NO: 2303 - DNA, 412 bp, Glycine max
  Clone ID: LIB3072-021-Q1-E1-F4
gacagcaaaaacaattaataaagatgagtttgaagaacaacatggtggtgctaaaggtgtgtttgttgcttcttttccttgtgggggttacagctgcacgcatggaaccgagcttcttcaaaagtgatcagtcatcaagttatgatgatgatgagtattcaaaaccatgctgtgatctctgcatgtgcacacgctcaatgcctcctcaatgcagctgtgaagatattaggctgaattcatgccactcagattgtaagagctgtatgtgcacacgctcacagccaggacagtgtcgttgtcttgacaccaacgacttctgctacaaaccttgcaagtccagagatgactagaaaaactaatagctctctcaaatgtgacaaacccccttatgctttgtttgttatgttaaggg

SEQ ID NO: 2304 - DNA, 367 bp, Glycine max
  Clone ID: LIB3072-021-Q1-E1-F7
atttcaattttaacacagattaatttgggtttggctatcgatacagttgtcagtttttaaaaagtgtaaccgacagaaatgcatatatctaaacaagtgaaaatcgtaaaatgcatgtgatacatacattcatgcagatacacatttttatgtatgtctatttatttgtttctccttgccatatatattaatggatagatagtctgattgctttggctacattgtcttttctatgtttctttgcttttttttgatggggaatatttcttctgtcttttctacattgttttttaatgaagttattagaaatacgaagaaatatcagcgcataaggatggaagataatgaatcctcagacccgataagg

SEQ ID NO: 2305 - DNA, 177 bp, Glycine max
  Clone ID: LIB3072-021-Q1-E1-G1
tacagcagcgacaattcaacatgatggtattgcagctatatatagagatactaatcgtgttgctagagcatcatatcattgtaggggttacagctgaccacataagggtgtgcttcgacaagactagtgaatcatcatgttacgataacactacatattgataccgctgctgtaata

SEQ ID NO: 2306 - DNA, 407 bp, Glycine max
  Clone ID: LIB3072-021-Q1-E1-G2
gacagcaaaaacaattaataaagatgagtttgaagaacaacatggtggtgctaaaggtgtgtttgttgcttcttttccttgtgggggttacagctgcacgcatggaactgaacttcttcaaaagtgatcagtcatcaagttatgatgatgatgagtattcaaaaccatgctgtgatctctgcatgtgcacacgctcaatgcctcctcaatgcagctgtgaagatattaggctgaattcatgccactcagattgtaagagctgtatgtgcacacgctcacagccaggatagtgtcgttgtcttgacaccgacgacttctgctacaaaccttgcaagtccagagatgactagaaaaactaatagctctctcaaatggacgaagcccctttaggctttgtttgttatgtt

SEQ ID NO: 2307 - DNA, 399 bp, Glycine max
  Clone ID: LIB3072-021-Q1-E1-G4
acagcaaaaacaattaataaagatgagtttgaagaataacatggtggtgctaaaggtgtgtttgttgcttcttttccttgtgggggttacagctgcacgcatggaactgagcttcttcaaaagtgatcagtcatcaagttatgatgatgatgagtattcaaaaccatgctgtgatctctgcatgtgcacacgctcaatgcctcctcaatgcagctgtgaagatattaggctgaattcatgccactcagattgtaagagctgtatgtgcacacgctcacagccaggacagtgtcgttgtcttgacaccaacgacttctgctacaaaccttgcaagtccagagatgactagaaaaactaatagctctctcaaatggacgaagcccctttaggctttgtttg

SEQ ID NO: 2308 - DNA, 374 bp, Glycine max
  Clone ID: LIB3072-021-Q1-E1-G6
gacagcacaaacaattaataaagatgagtttgaagaacaacatggtggtgctaaaggtgtgtttgttgcttcttttccttgtgggggttacagctgcacgcatggaactgagcttcttcaaaagtgatcagtcatcaagttatgatgatgatgagtattcaaaaccatgctgtgatctctgcatgtgcacacgctcaatgcctcctcaatgcagctgtgaagatattatgctgaattcatgccactcagattgtaacagctgtatgtgcacactctcatagccagtacagtgtcgttgtccttacaccaacgacttctgctacaaacctttcaagtccagagatgactacagaaactaataactctctcaaatg

SEQ ID NO: 2309 - DNA, 343 bp, Glycine max
  Clone ID: LIB3072-021-Q1-E1-G9
gaatcagaagaagaagcatgcgagttgagagagaatgggaaggaacaacgggtatgttgagttcgaggagtcgccgccggacgatttcgatccggcgcatccgtacaaggacccggtggcgatgctggggatgacggagcacatcgtgagggagaagtggatccaaatcgacaaggccaagatcattatggagaagctccgatggtgctaccgcatccaacgcgtcaaccacctccagaagtgcccccacctcgtcaaccagtatctcgagtccacccgcggcatcagttcgggcaacgacagtcgtcatccttctctccacgcctctcaacggttaaccctg

SEQ ID NO: 2310 - DNA, 373 bp, Glycine max
  Clone ID: LIB3072-021-Q1-E1-H1
attccgagtccgaccaaggcttcgtaccgctgctaagatacggctgcaagagacgacggagtggggtagtactgtgtttctcttcatggcgttctctgcgactcgatcctagatctcattcacttgcacttccgcgtttcgcgccacactttggcactacgatgtggtcatttcactccgattcatggagtgtaatgtggtcacgccgtgacaggcaagagcgtgaagagtgccaggtcatctgctgcgcagtctacaagtgctgctgcacctagagtcaaaacgcccgtcgatgcgttgatggcccgtcagattgttagggtggccatggtgaggtatccgaatagcgtcaggtagcggtctgttgggcagg

SEQ ID NO: 2311 - DNA, 348 bp, Glycine max
  Clone ID: LIB3072-021-Q1-E1-F10
gacagcacaaacaattaataaagatgagtttgaagaacaacatggtggtgctaaaggtgtgtttgttgcttcttttccttgtgggggttacagctgcacgcatggaactgagcttcttcaaaagtgatcagtcatcaagttatgatgatgatgagtattcaaaaccatgctgtgatctctgcatgtgcacacgctcaatgcctcctcaatgcacctgttaagatattacgctgaattcatgccactcagattgtaagaactgtatgtgcacacgctcacagccaggacaatgtcgttgtcttgacaccaacgacatctgctacaaaccttgcaagtccagagatgact

SEQ ID NO: 2312 - DNA, 324 bp, Glycine max
  Clone ID: LIB3072-021-Q1-E1-H2
ggaagaagaaacgaggaacaacgacacaacatgtgtgtgtatatatacatacatagcctaagaaactgaacatgtatacatgaagatgataagctatctactacggtccgtggagggaagaacggtcatctatttgtatatatactctcttcattgttgtgcacctgcagcagttgaagctgccagcatgatctgagtttaccttctattggtaagaacagatcatgtggctgcttcacctgttgaatggaagcatatagaaacgctaatttgctttctgattctcctcgaagattttcatccggtttcataggaaccctaaaa

SEQ ID NO: 2313 - DNA, 379 bp, Glycine max
  Clone ID: LIB3072-021-Q1-E1-D1
gacagcaaaaacaattaataaagatgagtttgaagaacaacatggtggtgctaaaggtgtgtttgttgcttcttttccttgtgggggttacagctgcacgcatggaactgagcttcttcaaaagtgatcagtcatcaagttatgatgatgatgagtattcaaaaccatgctgtgatctctgcatgtgcacacgctcaatgcctcctcaatgcagctgtgaagatattaggctgaattcatgccactcagattgtaaaagctgtatgtgcaaacgctcacagccaggacagtgtcattgtcttgacaccaacgacttctgctaaaaaccttgcaagtccagacattactaaaagaactaagaactctctcaaatggagga

SEQ ID NO: 2314 - DNA, 379 bp, Glycine max
  Clone ID: LIB3072-021-Q1-E1-D10
ggtagctgtttggttataaaattgaaaaaaaaagacgggaaaatagaatggacgcagatagtgattgagaattgggaattgcgatggatgggagaaacggaagcggaagcaggaggagtggggaagcaggaggaatgggggaggcgataatcgcgttggtaattgggagtcttgtgtactatcactgtgcctaccgcaattctacccttgtctctcttttttccgatgtcttcatcgtccttctctgctccctcgccattctcggtcttctattccgacaaatgggcatccaggttcctgttgattcccttgagtggcaaatatctcaagagagtgcgaacgcgatcgtggcatggttgaccaatacgattggtggcgc

SEQ ID NO: 2315 - DNA, 338 bp, Glycine max
  Clone ID: LIB3072-021-Q1-E1-D11
ggtagctgtttggttataaaattgaaaaaaaaagacgggaaaatagaatggacgcagatagtgattgagaattgggaattgcgatggatgggagaaacggaagcggaagcaggaggagtggggaagcaggaggaatgggggaggcgataatcgcgttggtaattgggagtcttgtgtactatcactgtgcctaccgcaattctacccttgtctctcttttttccgatgtcttcatcgtccttctctgctccctcgccattctcggtcttctattccgacaaatgggcatccacgttcctgttgatccccttgactggcaaatatcccaggagagtgcg

SEQ ID NO: 2316 - DNA, 170 bp, Glycine max
  Clone ID: LIB3072-021-Q1-E1-D12
tcaatgcggtagctgtatggctatatcattggaactatgatacgggacaatgcgccggtttcacatcatgactgagaatggggaattgctgtgggtgtgagacacggcatcggcagcatgaagactgcagaagcatgaggcatgggggaggcgataaacccgttgctcat

SEQ ID NO: 2317 - DNA, 404 bp, Glycine max
  Clone ID: LIB3072-021-Q1-E1-D3
gattcacgcaactaaataagaaatgaagagtactatcttctttgctctctttctagtttgtgccttcaccatctcatacctgccttcagccaccgctcagttcgtgctcgacactgatgatgatcctcttcaaaacggtggcacatactatatgttgccagttatgagaggaaagggcggtggaatagaagtagattcaaccggaaaagaaatatgccctctcactgttgtgcaatcacccaatgagctcgataaggggattggactagtctttacatctccattacatgccctttttatcgccgaaggctatcctttgagcattaagtttggtccatttgcagttataacgctgtgtgccggcatgcctactgagttgggtattgtggagagagagggtctac

SEQ ID NO: 2318 - DNA, 410 bp, Glycine max
  Clone ID: LIB3072-021-Q1-E1-D4
gattcacgcaactaaataagaaatgaagagtactatcttctttgctctctttctagtttgtgccttcaccatctcatacctgccttcagccaccgctcagttcgtgctcgacactgatgatgatcctcttcaaaacggtggcacatactatatgttgccagttatgagaggaaagggcggtggaatagaggtagattcaactggaaaagaaatatgccctctcactgttgtgcaatcacccaatgagctcgataaggggattggactagtctttacatctccattacatgccctttttatcgccgaaggctatcctttgagcattaagtttggttcatttgcagttataacgctgtgtgccggcatgcctactgagtgggctattgtggagagagagggtctacaagctg

SEQ ID NO: 2319 - DNA, 355 bp, Glycine max
  Clone ID: LIB3072-021-Q1-E1-D5
ggtgaggcgagggtaaggtcgcgttgtgttgcgtcgtgtcgtgcgccgttcctctgtttctcgtttttgtgttcagaccgaaccctagctccgcatcgcaaccatgtcgaccaagcaaggtggaaaagctaagcctttgaagaaacccaagtctgataagaaggattacgacgagattgatgtggctaacattcagaagaaaaaggaagaggagaaggcgctaaaggagttgaaagccaaggcgcaacaaaagggaagctttggaggttctgggctcaagaaaagtggaaagaaataagggctccgtatcatgaatgtctgcaatcaatattgagccccgtaattacagttgcta

SEQ ID NO: 2320 - DNA, 398 bp, Glycine max
  Clone ID: LIB3072-021-Q1-E1-D7
gacccatcaatagcaaaatgaccaagttcacaatcctcctcatctctcttctcttctgcatcgcccagacttgcagcgcctccaaatggcagcaccagcaagatagctgccgcaagcagctccagggggtgaacctcacgtcctgcgagaagcacatcatggagaagatccaaggccgcggcgatgacgatgatgatgatgacgacgacaatcacattctcaggaccatgcggggaagaatcaactacataaggaggaacgaaggaaaagacgaagacgaagaagaagaaggacacatgcagaagtgctgcacagaaatgatcgagctgagaagccccaaatgccagtgcaaagcgctgcagaagataatggagaagcagaacgaagaactggaggag

SEQ ID NO: 2321 - DNA, 121 bp, Glycine max
  Clone ID: LIB3072-021-Q1-E1-D8
gacagttgcataatctcaacagtacgttctaagtcgtcgtattctatcctcgcttatggctcgtacagacatacttgttctctcaatggcatcaccagatttagaacaacctcacgcttct

SEQ ID NO: 2322 - DNA, 396 bp, Glycine max
  Clone ID: LIB3072-021-Q1-E1-D9
cgcagaaggggttgactaattgtgtacttttgtctggacaggtttatcagaatggaggtttgcaaattggaagttctcgtgttgttgaccaaccaaagtgcttacacaattgcattggtgacgttattaggataaaacaacttggaaatgagaggtttggaattattaaacgatttgataaatattcccgaaaacactcgatcatgtttgaggatggttgtgttgaaatttatgacatgtcaaaagaggactgggaacttgtgagatagtgatgcaactgttggttgctgaagatctgatcaacagaatatgaagcggaatagatcaacataactcttactgattgaagataataagttcctttttccactaacagactgtattatcgtttaaaca

SEQ ID NO: 2323 - DNA, 332 bp, Glycine max
  Clone ID: LIB3072-021-Q1-E1-E1
gattcacgcaactaaataagaaatgaagagtactatcttctttgctctctttctagtttgtgccttcaccatctcatacctgccttcagccaccgctcagttcgtgctcgacactgatgatgatcctcttcaaaacggtgggacatactatatgttgccagttatgagaggaaagggcggtggaatagaagtaaattcaactggaaaagaaatatgccctctcactgttgtgcaatcacccaatgagctcgataaggggattggactactctttaaatgctcattacatgccctttttatcgccgaaggctattctttgaacagtaagtttg

SEQ ID NO: 2324 - DNA, 373 bp, Glycine max
  Clone ID: LIB3072-021-Q1-E1-E12
ggccgaaaaccctaacaacacaggcgcagagcgtgatccattgacgaagatggtgcagcgtctcacctaccgcaagaggcacagctatgccaccaaatccaaccaacacagggtcgtcaaaacccctggtgggaagctcgtttatcagaccaccaagaagagggccagcgggcccaagtgccccgtcactggcaagaggattcaggggattccacacttgaggcctgcagagtacaagagatcaaggttacccagaaaccgtaggactgtcaaccgtgcatatggcggagttttgtctggaagtgctgtcagggagaggattatccgagctttcttagttgaagagcaaaagattgtgaagaaggtcttgaag

SEQ ID NO: 2325 - DNA, 396 bp, Glycine max
  Clone ID: LIB3072-021-Q1-E1-E5
gattcacacaactaactaagaaagtcttccatagccccccaaaaatgaagagcaccatcttctttgctctctttctcttttgtgccttcaccacctcatacctaccttcagccatcgctgatttcgtgctcgataatgaaggtaaccctcttgaaaatggtggcacatattataccttgtcagacataacagcatttggtggaataagagcagccccaacgggaaatgaaagatgccctctcactgtggtgcaatctcgcaatgagctcgacaaagggattgggacaatcatctcgtccccatatcgaatccgttttatcgccgaaggccatcctttgagccttaagttcgattcatttgcagttataatgccgtgtgttgggattcctaccgagt

SEQ ID NO: 2326 - DNA, 436 bp, Glycine max
  unsure at all n locations
  Clone ID: LIB3072-021-Q1-E1-C9
gacagtgcaatttagctgaagcaaagcaatggctacttcaaagttgaaaacccagaatgtggttgtatctctctccctaaccttaaccttggtactggtgctactgaccagcaaggcaaactcagcggaaactgtttctttcagctggaacaagttcgtgccgaagcaaccaaacatgatcctccaaggagacgctattgtgacctcctcgggaaagttacaactcaataaggttgacgaaaacggcaccccaaaaccctcgtctcttggtcgcgccctctactccacccccatccacatttgggacaaagaaaccggtagcgttgccagcttcgccgcttccttcaacttcaccttctantgccctgacacagaaaggcttgcagatgggcttgccttcttttctcgcacaattgacactaaagcacaaacacat

SEQ ID NO: 2327 - DNA, 375 bp, Glycine max
  Clone ID: LIB3072-021-Q1-E1-F1
attcacacaactaactaagaaagtcttccatagccccccaaaaatgaagagcaccatcttctttgctctctttctcttttgtgccttcaccacctcatacctaccttcagccatcgctgatttcgtgctcgataatgaaggtaaccctcttgaaaatggtggcacatattatatcttgtcagacataacagcatttggtggaataagagcagccccaacgggaaatgaaagatgccctctcactgtggtgcaatctcgcaatgagctcgacaaagggattgggacaatcatctcgtccccatatcgaatccgttttatcgccgaaggccatcctttgagccttaagttcgattcatttgcagttataatgctgtg

SEQ ID NO: 2328 - DNA, 352 bp, Glycine max
  Clone ID: LIB3072-021-Q1-E1-A8
gacgcacttagcaatcaatcaaaacattcccaataacaataatatacacatcttcaattaagctccttctcctatagccatggctctttctaagcttataattgcttcccttcttgcgtcgcttctccttcttcatttcgttgatgctgatcaatcggcacatgcacaaacgcaggggtctcttcttcagcagatagattgtaacggagcatgtgctgcgaggtgccgtttatcatctcgtccacgcctctgccaaagagcttgtggaacttgttgtaaacgctgtaactgcgttgcacctggcactgctggaaaacaagaagtgtgtccctgctatgcaagtttgactact

SEQ ID NO: 2329 - DNA, 418 bp, Glycine max
  Clone ID: LIB3072-021-Q1-E1-A9
gaaacgaaataggagtagagtcgcctaagattcaaaaaggaagttggaacacaagagaggtctgattaatactagttttctgtaaaatcgcaaagaaacacacagttagcaccgtcaacctctgcaaccaccgattccaaccatgcttcccctttcccttctcaagactgcccaaggccaccccatgctggtggaactgaaaaatggggagacttataacgggcacttggttaattgtgatacatggatgaacatccatctccgagaagtcatttgtacctctaaagatggagatagattttggcgtatgcctgagtgctacattcgtggcaacaccattaagtaccttcgggttcctgatgaggttattgacaaagtccaagaagaaacaaagagccgtactgatcgcaaaccccct

SEQ ID NO: 2330 - DNA, 403 bp, Glycine max
  Clone ID: LIB3072-021-Q1-E1-B10
gacagcaaaaacaattaataaagatgagtttgaagaacaacatggtggtgctaaaggtgtgtttgttgcttcttttccttgtgggggttacagctgcacgcatggaactgagcttcttcaaaagtgatcagtcatcaagttatgatgatgatgagtattcaaaaccatgctgtgatctctgcatgtgcacacgctcaatgcctcctcaatgcagctgtgaagatattaggctgaattcatgccactcagattgtaagagctgtatgtgcacacgctcacagccaggacagtgtcgttgtcttgacaccaacgacttctgctacaaaccttgcaagtccagagatgactagaaaaactaatagctctctcaaatggacgaagcccctttaagctttgtttgtta

SEQ ID NO: 2331 - DNA, 434 bp, Glycine max
  Clone ID: LIB3072-021-Q1-E1-B12
gacgttgagtaattttttttttcctcttccgcgtctccaccaacatcaccgagaccatgtccaccgacttgcacctccaccacgagctaccaaagctccgaatcgccgccgtcgtcaaaaccgacgacgacctcccctccgacgcccaagacgaccgcaacgccgtctcctccgccgtcacacaagccgaggccgaaaacgacggtgccatcaccgtcgatgtcggcgtcaaagtcaacgacgagagttgccgtactccgacgtcgaatgagagcaaaattccggcgacgatgacgtgtccgccggcgccgacgaagccgaagttcgcctcgtgtaaaagaaaactacttgaggagtttcagttcttcgatgtcaccaataaggaggacatggaccccttcttcagattcacttttccaagaggggatgcacta

SEQ ID NO: 2332 - DNA, 357 bp, Glycine max
  Clone ID: LIB3072-021-Q1-E1-B3
gattcacacaactaactaagaaagtcttccatagccccccaaaaatgaagagcaccatcttctttgctctctttctcttttgtgccttcaccacctcatacctaccttcagccatcgctgatttcgtgctcgataatgaaggtaaccctcttgaaaatggtgggacatattatatcttgtcagacataacagcatttggtggaataagagcagccccaacgggaaatgaaagatgcccctctcactgtggtgcaatctcgcaatgagctcgacagagggattggcacaatcatctcgtccccatatcgaaatccgttttatcgccgacaggcatcctttgagccttaagttcgattc

SEQ ID NO: 2333 - DNA, 350 bp, Glycine max
  Clone ID: LIB3072-021-Q1-E1-B4
accacgcgtcagtaccgatgaagacgacagaaggggaacaacatttgttctagacaagatctccatatctgttcccaaaagcttgtttgtaagaatggcttccggtgaacagaaattccctcctcaacaacaacagacacagcctgggaaggagcatgctatgactccagtaccccaattcactagccctgactacaagccttcacataaacttcaagggaagattgcattagtcactgggggtgattctgggattggacgagcggtgtgtaacttgtttgccttagaaagtgctaccgtggccttcacgtatgtgcaggggcaataggacaaggacacgacggacacat

SEQ ID NO: 2334 - DNA, 373 bp, Glycine max
  Clone ID: LIB3072-021-Q1-E1-B5
ggaatgtttgagtgcagaaggtaaaaaagaaaatggtggtgaagattcgattggcaaggctcgggtgccggaaccacccattctatcgtgtggttgttacggatagcaaaacaacaagagatggcaagcaacttgaagttttaggtttctacaatcccgtcgcaggcaaggatgatgacaaaagaatgagcctcaaactggagagaatcaagtattggctttccgttggagctaagccttcagagcctgttgagcatcttcgatttagagcaggtttaggacaatctcatcaattccctgttgctgctctaaatggacatatcctcaaccaagaccaaccaaccaatgctgctgatcacaatggtatatctcc

SEQ ID NO: 2335 - DNA, 372 bp, Glycine max
  Clone ID: LIB3072-021-Q1-E1-B6
gaacgcagccaagaaaagaaaatcctcacccattttcttcgtagccaaacactctgaaattctcagttatgtcgtggcaagcgtatgtggatgatcacctactgtgtgaaatcgaaggtaatcacctcactcacgccgctatcatcggccaagacggaagcgtttgggctcagagcaccaacttccctcagttcaaacctgaggaaataactgccatcaataatgactttaatgagcctggatcacttgctccaactggattgtatatcggtggcaccaaatacatggtcatccacggtgagcctggtgctgtcattcgagggaagaatggtcctggtggtgttactgttaagaagaccggtgcggccttga

SEQ ID NO: 2336 - DNA, 145 bp, Glycine max
  Clone ID: LIB3072-021-Q1-E1-B7
gaacgcacccaagagaagaaaatcctcacgcattttcttcgtagccaagcactctgaaattcgcagtgatgtcgtggcaagcgtatgtggatgatgaccgactgtgtgaaatcgagggtaaggacctcactcacggcgctagcat

SEQ ID NO: 2337 - DNA, 208 bp, Glycine max
  Clone ID: LIB3072-021-Q1-E1-B8
gaacgcagccaagacaagaaaatcctcacccattttcgtcgtatccaaacactctgaaattctcagttatgtcgtggcaagcgtatgtggatgatcacctactgtgtgagatcgaaggtaaccacctcactcacgccgctatcatcggccaagacggaagcgtttgggctcagaggagcaacttccctcagttcaaagctgaggaaat

SEQ ID NO: 2338 - DNA, 416 bp, Glycine max
  unsure at all n locations
  Clone ID: LIB3072-021-Q1-E1-B9
gacagcaaaaacaattaataaagatgagtttgaagaacaacatggtggtgctaaaggtgtgtttgttgcttcttttccttgtgggggttacagctgcacgcgtggaactgagcttcttcaaaagtgatcagtcatcaagttatgatgatgatgagtattcaaaaccatgctgtgatctctgcatgtgcacacgctcaatgcctcctcaatgcagctgtgaagatattaggctgaattcatgccactcagattgtaagagctgtatgtgcacacgctcacagccaggacagtgtcgttgtcttgacnacaacgacttctgctacaaaccttgcaagtccagagatgactagaaaaactaatagctctctcaaatggacgaacccccttaggctttgtttgtaagttagggggacaaa

SEQ ID NO: 2339 - DNA, 272 bp, Glycine max
  Clone ID: LIB3072-021-Q1-E1-C1
acgcctccaaacgctgcgaaaacgacagaaggggacctacagcaatccattctcaattgcgaaagcaaaacgcatagaatcgaaagaggggaaacgacaacgaacagttacggttagggattttgagagatggcatcgactaagaagatcatcctgaagagttcggacggtgatgccttcgaggtggatgaagctgtggcgctggagtcgcacacgatcaagcacatgatcgatgacgactgcaccgacagtcgaatccctctcgccaatgt

SEQ ID NO: 2340 - DNA, 413 bp, Glycine max
  Clone ID: LIB3072-021-Q1-E1-C10
ggatgaaccaaatgagaggtatttctggttctggttcgagtagcagagaagcaaggagaagaaaggcgaggtcgacgtcaccagtgaaggaccgatccaaaacctcttcatctaagttaacctcttcttcttcttcatccaaacgaagcacctcaccctctgccactctcctcgacgtcgatgatgacgtcacctcactctttcacgattaccctagccctaaccctaaccctaatcctaaccctcggagcttccctcacagcgttaagcagaaatgctgggaaaaggccgacaaagtcaaaggacgcgaccccgatcgctggcgcagggacgccctcggcaacactctctttcgcaagctcgtaggttgcccccgttgtctctgccatgactacgaacacattattccttac

SEQ ID NO: 2341 - DNA, 319 bp, Glycine max
  Clone ID: LIB3072-021-Q1-E1-C4
gacgttccaatttgcgtgagaacgaaaaaagaaaaaaaaaaccctaacgcactcgagaccctgagatttttcatcttcgtttctcattctctttttgatcatggacgtcgaggtgcggcagatcttcaacaagttcgacaagaacggcgacggaaaaatctcggtaacggagctgaaggacatgctcgcggccctcggatccaaaacgacggacgaggagttgaaacgcatgatggaggagctcgaccagaacggcgacagtttcatcgacctcaaggagttcgcggattttcactgcaatggcggtgccggaaaggac

SEQ ID NO: 2342 - DNA, 289 bp, Glycine max
  Clone ID: LIB3072-021-Q1-E1-C5
gacagcacaaacaattaataaagatgagtttgaagaacaacatggtggtgctaaaggtgtgtttgttgcttcttttccttgtgggggttacagctgcacgcatggaactgagcttcttcaaaagtgatcagtcatcaagttatgatgatgatgagtattcaaaaccatgctgtgatctctgcatgtgcagacgctcaatgcctcctcaatgcaactgtgaagatattatgctgaattcatgccactcagattgtaagagctgtatgtgcacacgctcacagccaggaca

SEQ ID NO: 2343 - DNA, 248 bp, Glycine max
  Clone ID: LIB3072-021-Q1-E1-C6
gacagcaaaaacaattaataaagatgagtttgaagaacaacatggtggtgctaaaggtgtgtttgttgcttcttttccttgtgggggttacagctgcacgcatggaactgagcttcttcaaaagtgatcagtcatcaagttatgatgatgatgagtattcaaaaccatgctgtgatctctgcatgtgcagacgctcaatgcctcctcaatgcagctgtgaagatattacgctgaattcatgccactca

SEQ ID NO: 2344 - DNA, 412 bp, Glycine max
  Clone ID: LIB3072-020-Q1-E1-G6
gattcacacaactaactaagaaagtcttccatagccccccaaaaatgaagagcaccatcttctttgctctctttctcttttgtgccttcaccacctcatacctaccttcagccatcgctgatttcgtgctcgataatgaaggtaaccctcttgaaaatggtggcacatattatatcttgtcagacataacagcatttggtggaataagagcagccccaacgggaaatgaaagatgccctctcactgtggtgcaatctcgcaatgagctcgacaaagggattggaacaatcatctcgtccccatatcgaatccgttttatcgccgaaggccatcctttgagccttaagttcgattcatttgcagttataatgctgtgtgttggaattcctaccgagtggtcggttgtggggga

SEQ ID NO: 2345 - DNA, 209 bp, Glycine max
  Clone ID: LIB3072-020-Q1-E1-H10
aagacgacagaaggggttgtgataaagtatagcaagtacaagaagaaaaatatatcatttggggatcttgtttgggttgaagaaggtggaacacacagtgttaggagtcccattgtagtggcaccaagtggaattgtatgagttgtagtttgagttttttactccttgatggagcccccaaaataataaataatttgatggttaagcga

SEQ ID NO: 2346 - DNA, 121 bp, Glycine max
  Clone ID: LIB3072-020-Q1-E1-H12
gattacataaacaactactaaacatgagtttggggaacatcatggtggtgctaaacgtgtgtttgttgcttcttttccttgtgggggttacagctgcacgcatggtaactgaccttcttca

SEQ ID NO: 2347 - DNA, 278 bp, Glycine max
  Clone ID: LIB3072-020-Q1-E1-H3
ggaaaaaaagagctaccggggcgtcacacagacatgacgtgacgattcctgcttacccgcagaacttccaggcattttagctccggtcattgccgtatcccttatccggtaaggagccggcggcctgcaaaacaccggtggcatacatcaccactcgatcgtattcgatagttaccattcgtgcttcctcggtaatgttggcatgatgtacttccataaccttcgcactcaattctactcgtcccatccgtcatcgctgaattcctatagtctctcct

SEQ ID NO: 2348 - DNA, 339 bp, Glycine max
  Clone ID: LIB3072-020-Q1-E1-H6
ggagttcgaactaaacaattcaattcaatctgcctcgatcatggagaggaaaacatttgggtttttgttcttgctcctccttgtcttagcttctgatgtgacggtgaagagagcagaggcgaaagattgcttggcaaggaggcacgggttccagggtagatgcttattcgacaggcaatgtgcacatgtgtgcaggagcgatggtttcatcggtggtcagtgccgaggccctcttcgcaaatgcttttgcagcaggccatgttgatcgaaattactactgccaaagaggccatgaaataaacaaacaaacaaataaataaatagctctaaccgacacat

SEQ ID NO: 2349 - DNA, 398 bp, Glycine max
  Clone ID: LIB3072-020-Q1-E1-H7
gacagcaaaaacaattaataaagatgagtttgaagaacaacatggtggtgctaaaggtgtgtttgttgcttcttttccttgtgggggttacagctgcacgcatggaactgagcttcttcaaaagtgatcagtcatcaagttatgatgatgatgagtattcaaaaccatgctgtgatctctgcatgtgcacacgctcaatgcctcctcaatgcagctgtgaagatattaggctgaattcatgccactcagattgtaagagctgtatgtgcacacgctcacagccaggacagtgtcgttgtcttgacaccaacgacttctgctacaaaccttgcaagtccagagatgactagaaaaactaatagctctctcaaatggacgaagcccctttaagctttgtt

SEQ ID NO: 2350 - DNA, 431 bp, Glycine max
  unsure at all n locations
  Clone ID: LIB3072-020-Q1-E1-H8
gaagacgacagaagggggctgtgagtgagacaccgatagatagagagcgcggcataacctaaacctatctttcttctctctctgtgtgtgcgcttcaacggcaaccagaggcagccatggccactgcaaggactgtgaaggatgtttcacctcatgagttcgttaaggcgtactcctctcacctcaagcgatccggcaagatggagctgccagagtggactgatattgtgaaaactgcaagatttaaggagttggctccttatgatcctgactggtactatgtcagagctgcttccatggcaagaaagatctacttgagaggaggacttggtgttggtgcctttcaaangatttatggtgggagcaagaagaatggtagtcgccctcctcatttttgcaagagcagtggtgccattgctcgtcacattctt

SEQ ID NO: 2351 - DNA, 334 bp, Glycine max
  Clone ID: LIB3072-021-Q1-E1-A1
gacacaactaactaagaaagtcttccatagccccccaaaaatgaagagcaccatcttctttgctctctttctcttttgtgccttcaccacctcatacctaccttcagccatcgctgatttcgtgctcgataatgaaggtaaccctcttgaaaatggtggcacatattatatcgtgtcagagataacagcatttggtggaataagagcagccccaacgggaaatgagagatgccctctcacggtggtgcaatctcgcaatgagcgtcgcaacggggattggaacaatcatctcgtccccagagtcgaatccggttttatcgcccgaaacgccatc

SEQ ID NO: 2352 - DNA, 404 bp, Glycine max
  unsure at all n locations
  Clone ID: LIB3072-021-Q1-E1-A10
gaattgcttaaacttttttcagactcattcatctcaatgaaatttgaagaaaatggagtagcctcatgggagaagagcaccagcaccaatgccatctcaaatatctccaacaagaaggtgtgtgtagagaggcaggtcctatacaaggacgccaaggagagcaagagcgtggtagagcatggcaagtcaaataacgcgtttagatggcgaaagcgtattggccgtttggtccactttatcccatggaagaggtctaataagggtgggggtgtgggtcacgttgaacgagtgaaagttaatagaaagggttggatgagaacgctgacaaagaggaagaccgtggaacacaatggttaacaaagaaagtcacaccaacacttgcgtttctctcnctctcacccttt

SEQ ID NO: 2353 - DNA, 145 bp, Glycine max
  Clone ID: LIB3072-021-Q1-E1-A11
tgggaattgcttagacttttttcagactcattcatctcaatgagttttgacgaaaatggcgtatcctcatgggagagtatcaccagcaccagtgcgatctcaaatatctccaccatcaacgtgtgtgtcgataggcacgtcctat

SEQ ID NO: 2354 - DNA, 366 bp, Glycine max
  Clone ID: LIB3072-021-Q1-E1-A12
gtatttgatggggagttacaagtttcatttagccaaagcaactcaggtgcttctcttatcctctgcaacaagcaatctcacaccactcataggtgctttcattgctgattcttgcctcggtcgattcctctctgttgggtttggttcctccatctctttcctggtactttcttttcagattcctttctgccttttctcttctgaattctgttaaacatcataagatcactgttatgttcaatggttcagattgacttagtttgttagacacacatcactggtataaataggaatatctttgtaataattcatcatcttttatcatattaatacaatgagatattttcatggtagtcgtctcttata

SEQ ID NO: 2355 - DNA, 370 bp, Glycine max
  Clone ID: LIB3072-021-Q1-E1-A2
ttccagaggatgatcaggacgaagactgcgcagatggaagaagagtacgccgaaaagctttccaaactctgtttgcatgagaccgaggaaacgcagaggaagaaattggatgaactgaaagtcttggaaaattcttagtttgattactataagatgaaaaagagaatgcaagatgagattgatgggttgttgcggagaatggaggcaacaaagcagcaatgggtgtaaatttatattttgggtgcttttccctaggttttcttattgaggatactgcgaaatgtgtgtaagttattgaaatgaagtcgtggtaatccggtggttcccataatggatgggtttcgattgataaattcaacttttttggggt

SEQ ID NO: 2356 - DNA, 286 bp, Glycine max
  Clone ID: LIB3072-021-Q1-E1-A3
ggcgcgcacccagagaggaagcttagagagagagagagagagagagagagagaggagagagtattggcgcgtcatcaagatgggtatttctagggattccatgcacaagaggcgtgccactggtggcaagaaaaaggcttggagaaagaagagaaagtatgagcttgggcgtcaggcatcagagaccatgttatcaagcaacacgacaatcaggaggattcgtgttataggtggcagtgttaaatggagggcattgacgctgggtactgggaattaaccatggggt

SEQ ID NO: 2357 - DNA, 303 bp, Glycine max
  Clone ID: LIB3072-021-Q1-E1-A5
gatagtagcaacttcagctactgatatcaattataacacaacattgaaggattattagggaagttgtagtttgaaactgcaccaattatatatacaacatgtgtcgtggaacttttgtggttgcaaccactgttggactggtggaggcgttgaaggatgaagggtactgcaaaatgaacagcacactgatgaagttggtggctcaacatgccaagaggcacatagggtcagtaactgaggccaagaagctggcttctccgtctcggtcgccttctacttcgtcctccctcagtaacttccaaa

SEQ ID NO: 2358 - DNA, 301 bp, Glycine max
  Clone ID: LIB3072-020-Q1-E1-E6
tttctttagtttctgaacatatatcacctcttcaaacaacatctctttttctaccattatgatatcatgcctatcaaacctcggcggcgatgggctgaaggtaccatctatgtttccaacaccagccataggaaacctcattcgcaccatatcatgacatatcacacatctctttctattgataacagactcttcctccctatcctaggttaaacctctttagttatcggtatttagtttgctcattgatacccctcttcgtttgtttgtaatctttaaccctcacttaggtcattatgtt

SEQ ID NO: 2359 - DNA, 389 bp, Glycine max
  Clone ID: LIB3072-020-Q1-E1-E9
gacagcaaaaacaattaataaagatgagtttgaagaacaacatggtggtgctaaaggtgtgtttgttgcttcttttccgtgtggggggtacagctgcactcctaaaactgagcttcttcaaaagtgatcagtcatcaagttatgatgatgatgactattcaaaaccatgctgtgatctctgcatgtgcacacgctcaatgcctcctcaatgcagctgtgaagatattaggctgaattcatgccactcagattgtaagagctgtatgtgcacacgctcacagccaggacagcgtcgttgtcttgacaccaaaccacttctgctacaaaccttgcaagtccagaaatgactacaaaaactaattaccctctccaatggaagaaaccccttt

SEQ ID NO: 2360 - DNA, 358 bp, Glycine max
  unsure at all n locations
  Clone ID: LIB3072-020-Q1-E1-F1
ggaagtaagggggttgtcgacgggtcgagatcgagcctcggaagagggaatcgcagcgaagtccactatgccgaagcanattcatgagattaaagacttcctcctcactgcaaggaggaaggatgcacgctctgtgaaaatcaagcggagcaaggatgtagtgaagttcaaggtccgttgctccaagtacctgtacactctgtgtgtgtttgattctgagaaggctgataagttgaagcaatcacttcctccaggtttaagcgtgcaggatgtgtgattcttactgctgttgatgaagatcaagttttgctttggattttggggattcatatttagtgaaatggttcacagatttttc

SEQ ID NO: 2361 - DNA, 403 bp, Glycine max
  unsure at all n locations
  Clone ID: LIB3072-020-Q1-E1-F10
ggggttattggacacattcttcagcgactgcgtttttggatcggaacctcttctgcggcgtancaatgggacactccaacgtttggaactctcacccaaaaaactacggtcctggttctcgcacttgccgtgtgtgtgggaatccacatggactgatcaggaagtatggccttatgtgctgcaggcagtgcttccgtagcaatgccaaggaaattggcttcatcaagtatcgctaaaagagcagttgtcaactacggaccaatattgtgttctggcactacgatgttttgaggatgttatgtttgaagaaacttgagactttcttttttcatctaattaattatcagacgtaatttgtgggactaagaatgcttttatataaattgttttgaaccatattaaa

SEQ ID NO: 2362 - DNA, 287 bp, Glycine max
  Clone ID: LIB3072-020-Q1-E1-F11
gaggaaggaagggagggaagcatagactgggatctggaagtggaaaacacactggagagttcttcacgataatgcattcagggatgaggcgtccgcatctcaccaatcatctccgccacgccccccctggccttggcatcgccgtcctcgccttcggtatctacctcgtcggccaacaagtctacacgacgctctatgctcccgatgctcagtcgatttctcacgtgaaagccggggatgaccactatacttttggacggacgcactccattccatcatcccttaat

SEQ ID NO: 2363 - DNA, 400 bp, Glycine max
  Clone ID: LIB3072-020-Q1-E1-F2
gacagcaaaaacaattaataaagatgagtttgaagaacaacatggtggtgctaaaggtgtgtttgttgcttcttttccttgtgggggttacagctgcacgcatggaactgagcttcttcaaaagtgatcagtcatcaagttatgatgatgatgagtattcaaaaccatgctgtgatctctgcatgtgcacacgctcaatgcctcctcaatgcagctgtgaagatattaggctgaattcatgccactcagattgtaagagctgtatgtgcacacgctcgcagccaggacagtgtcgttgtcttgacaccaacgacttctgctacaaaccttgcaagcccagagatgactagaaaaactaataaccctctcaaatggacgaaacccctttaagttttgtttg

SEQ ID NO: 2364 - DNA, 260 bp, Glycine max
  Clone ID: LIB3072-020-Q1-E1-F3
gatttgtttgcagatcaacatggagcttctaaaagtgtatttgctgcttcttttccttgtcctggggacaggggggcgcgtggaaccttccttcttcaaaagtgatgaaatcacaacttatcatgaaaatcaatattcacaaccatgttgtgatctctacaggtccttaccctcaatacctcttcaatccatctgtgtatatatcagacaaagctcataccattcagaatttacttcctctatgtttacacgttcacaac

SEQ ID NO: 2365 - DNA, 407 bp, Glycine max
  Clone ID: LIB3072-020-Q1-E1-F4
gacacaacacaatcttaagaccaacctctctctctctctctatatccagactccaccctctcagtactcttcctcatcatcttcttctctcgtgtcgcgttctctctatgagaattgagatactagaggaagaattcgaagaagaaggcatgagaaacagcatccggtgttgcatctcctgcattctcccatgcggggccctggacgtaatccgcatagtgcactccaacggccgcgtcgaggaaatcagcggcaccatcaaggccagcgaaatcatgaaggcccaccccaagcacgtgctcaagaagccttcctccccctccacccaagacggcgttgttcccaagatcgtcgtcgtccctcccgacgccgacctcaaacgcggcaagatttacttcctcatgccc

SEQ ID NO: 2366 - DNA, 419 bp, Glycine max
  unsure at all n locations
  Clone ID: LIB3072-020-Q1-E1-F5
tggggcagaagaccaaggaggttgggcaggatattcagagcaaggcacaggatacaagggaggcagctgcaagggatgcaagggaggcagctgcaagggatgcaagggaagctgctgcaagggatgcaaaggtggaggcaagggatgtaaagagaacaacagtgacagcaacaaccgcaaccgcatgatgagtaattctgatattagagggagcattaatgtgttgttgtgatgtggtttatatggggaaattaaataaatgatgtatgtacctcttgcctatgtangtttgtgtgttttgttttgttgtctacctttggttattaagtagtanggacgttcgttcgtgtctcaaaaaaaggggtactaccactctgtagtgtatatggatgctggaaatcaatgtgttttgtatttgt

SEQ ID NO: 2367 - DNA, 415 bp, Glycine max
  Clone ID: LIB3072-020-Q1-E1-F8
agaagacgacagaaggggactcaacatttgcatttcctcttcatatacagtacacacttcagctggtggtagcctggtagatagtgtgcttccaaaatgaagaacaaaaggaagactttactattgctgctgctcatggctgcaactctcttttgcatgccaattgtgtcgtatgctgtttctaatgtcaacattcaagaccatctcaccaatatttctgagctggtaaaaggtccaaatacaaggcttttgtcatttgtggattgtggagagaggtgcagggtgaggtgcagtttgcactcaaggccaaagatttgcacgagagcttgcgggacatgctgtatgaggtgcaggtgtgttcctccgggcacttacgggaacagagagatgtgtggcaagtgttacactcacatga

SEQ ID NO: 2368 - DNA, 384 bp, Glycine max
  unsure at all n locations
  Clone ID: LIB3072-020-Q1-E1-G1
cggctgcaaaaaaacaaaaaaagggggaaggggaaacaaaaatgaaaaaaaaagaaaaaaagggatttggacctgaaaagagaagatggggggaggaatggaagcacacaagaacaagttcatagangattggggcactgccagagagaatctggagttcaatttccgttggactcgccgcaaccttgctcttgttggcatcttcggcatcgctattcccgtcctcgtctacaagggcatcgtccgtgaattccatatgcaagatgaagataatggtcggccgtacaggaagttcatgtgagagagtatggagagtcttttgtaataattcgtcaagttagaccttgatattatgaggctacaaaccatgtttttttttcctta

SEQ ID NO: 2369 - DNA, 422 bp, Glycine max
  Clone ID: LIB3072-020-Q1-E1-E5
agaaggggaacacttggtttagcaagagaaaaaataccaaccatggcaaccatttctactgatcaaccaagaggatcctactcctatggaacctcctatggagcaccctatggaaccacctatgagaccaacagcagcattaacaaccctccttcacgccaaaccgtgaagttcataactgctgcaactattggcatcacactcttactcctgtctgggttgaccctcacaggcactgtcataggtttgatcattgcaacccctcttcttgttatcttcagccccatccttgtccctgctgcgtttgtgctgttcctggttgcttctggctttttgttctctgggggctgtggtgtggctgccattgctgctttatcttggatttacaactacgtttctgggaacagcctgcgggttctgac

SEQ ID NO: 2370 - DNA, 392 bp, Glycine max
  unsure at all n locations
  Clone ID: LIB3072-020-Q1-E1-G10
gaagaaaaagagagacatcgcgtttgttagctccgaattgatcaatggctcagtcatattcgtggctcttcctggcgacttgtgccaccctcttccttctgatttcgtcggcgacaacagcggacgcaggaggagcaggaacagcaccagggatggaaatgacgtggatgccctccatctccatggaaggagctgaagaagagttcatgttggacaacgagatcaaccggcgcatgttagcgagcacaaggtacataagctactgtgcgatccatangggcagtgtcccctgttctcaccgcggagcctcctactaccattgccgacctggcgctcaggccaacccttaccatcgtggctgcagtgccattacaaggtgcaggcactaagct

SEQ ID NO: 2371 - DNA, 392 bp, Glycine max
  unsure at all n locations
  Clone ID: LIB3072-020-Q1-E1-G2
gagtgcaaaactcacaacacatctaaacaaaaaatcaagaacaatggcttatgctaggcttgctcctatggctgtcttcttgcttgccacttccaccataatgttcccaacgaagatagaagcagcagattgtaatggtgcatgttcacctttcgagatgccaccgtgccgctcacgtgattgtcgttgtgtccctatangactagttgctggtttctgcatacatccaactggactttcatctgttgcgaagatgatcgacgaacatcccaacttatgtcaatctgatgatgaatgcatgaagaaaggaagtggcaatttttgcgctcgttaccctaataattatatcgattatggatggtgttttgattctgattctgaagcactgaaaa

SEQ ID NO: 2372 - DNA, 396 bp, Glycine max
  Clone ID: LIB3072-020-Q1-E1-C8
gaccgtaatccttacgctctctcactcacaaacgcacactgaattcaaaaacatcgaaagagagaggcatggccgagcaaaccttcatcatgatcaagccagatggcgttcaaagaggccttattggcgagattattagcagatttgagaggaagggtttttacttgaaagggttgagactcgttactgtggaccgtccttttgctgagaagcactatgctgatttgtctgcaaagcctttctttagtggtttggtggattacattgtctctggccctgttgttgccatgatctgggagggtaagaatgttgttacaactggccgaaagattatcggagccacaaacccagctcaatctgagcctggaactattcgtggtgactttgctattgaca

SEQ ID NO: 2373 - DNA, 106 bp, Glycine max
  unsure at all n locations
  Clone ID: LIB3072-020-Q1-E1-D1
tggaataaaaaaaattaccttctttattttttatgtaagcatctgagaatgaaaaaataaaaaaataaagtggtgtgtttataataaaaaattcttaattcanaag

SEQ ID NO: 2374 - DNA, 418 bp, Glycine max
  unsure at all n locations
  Clone ID: LIB3072-020-Q1-E1-D11
agaaggggacaactcaaacattctctccattggtccttaaacactcatcagtcatcaccatggccaagctagttttttccctttgttttctgcttttcagtggctgctgcttcgctttcagttccagagagcagcctcagcaaaacgagtgccagatccaaaaactcaatgccctcaaaccggataaccgtatagagtcagaaggagggctcattgagacatggaaccctaacaacaagtcattccagtgtgccggtgttgccctctctcgctgcaccctcaancgcaacgcccttcgtagaccttcctacaccaacggtccccaggaaatctacatccaacaaggtaagggtatttttggcatgatatacccgggttgtcctagcacatttggagagcctcaacaacctcaacaaag

SEQ ID NO: 2375 - DNA, 395 bp, Glycine max
  Clone ID: LIB3072-020-Q1-E1-D12
ggagaacacaaacagcagcgtcttggtttgtgagagagacagaggcacagagagaaaatggtttcggggtcaggaatctgcgcgaagagggtagttgtggacgcgcggcaccacatgctggggaggctggcatcgatcgtggcgaaggaacttctgaatgggcagaaggtggtggtggtgcgctgcgaggagatttgtatctccggtgggctcgtcaggcagaagatgaagtacttgcgtttcctccgcaagcgcatgaacaccaagccctctcacggccccatccatttccgtgcacccggcaagatcttctggcgcaccgttcgtgggatgataccacacaagacaaagcgcggggaagctgctcttgcacgactgaaggtgtacgaaggcat

SEQ ID NO: 2376 - DNA, 378 bp, Glycine max
  Clone ID: LIB3072-020-Q1-E1-D2
gattcacacaactaactaagaaagtcttccatagccccccaaaaatgaagagcaccatcttctttgctctctttctcttttgtgccttcaccacctcatacctaccttcagccatcgctgatttcgtgctcgataatgaaggtaaccctcttgaaaatggtggcacatattatatcttgtcagacataacagcatttggtggaataagagcagccccaacgggaaatgaaagatgccctctcactgtggtgcaatctcgcaatgagctcgacaaagggattggaacaatcatctcgtccccatatcgaatccgttttatcgccgaaggccatcctttgagccttaagttcgattcatttgcagttataatgctgtgtg

SEQ ID NO: 2377 - DNA, 368 bp, Glycine max
  Clone ID: LIB3072-020-Q1-E1-D5
ttgtgtatatattagaaaaaaaaaaaaaaaaaaaaaaaaaaaaaaaaaaaaaaaaaaaaaaaaaaaaaaaaaggaaaaaaaaaaaaaaaccaaaaaaaaaaaaaaaaaaaaaaaaaaaacgggggccgcccaaaaggatcaaacctaacgtacgggggaaggcaacgccaaacccctccaaaagggcccccaaaatccaatccaggggcggtcgtttaaaaaggccgggaggggaaaaccccgggggtaaccaaattaaaccccctggaaaaaaacccccttttcccaagggggggaaaaagcaaaagggcccgcaccattccccctcccaaaaatttgcccacccgaaagggcaaagggaacccccc

SEQ ID NO: 2378 - DNA, 338 bp, Glycine max
  Clone ID: LIB3072-020-Q1-E1-D7
ggcagagtggagtaaaaaaaaagagcagtgtaagaaattagaaagggcgaaaggcgcactttatctgaaagcaaaaaccctacctagggtcaaccgtgacgccacaatcgccttcggcatctttgcaacgggatcaggtgctcctcgtccttcacgatggcgggaactgaagccaaaaaaaactgaatccaaaaaacctgccgctaagcaatccggtgcgaagaagaaggaggtgaagaaggaaactggcttaagtctcacgcatcggaaggcggagaacttcggagagtggtattccgaggtggttgttaatgcggaaatgattgagtactatgata

SEQ ID NO: 2379 - DNA, 378 bp, Glycine max; identical to SEQ ID NO: 2376
  Clone ID: LIB3072-020-Q1-E1-D8

SEQ ID NO: 2380 - DNA, 360 bp, Glycine max
  Clone ID: LIB3072-020-Q1-E1-E1
ttgcctctcatggttaatgatttccgaaatcgaattctgaatgaaaacgaaggaaaagggatgaaataagcataatagcaaaccctgtatgtatatggagatgagcttgtctccttcatttttttgttcttatttgcggtcagcatcaacagaaaaattctggcaacacgtcacttttgtaagaagatatacctactgctggcctttttacatttaatcatttatgcttgcttagcacacaattgatgtatttgttaaattttgaaagaattatttcagtagtttttcttgtccattgtatcgataaaaagttgtagtatttgatattttggattctggtatcttgagaatatatatttt

SEQ ID NO: 2381 - DNA, 282 bp, Glycine max
  Clone ID: LIB3072-020-Q1-E1-E11
gaacacaaatcattcacatcccaaaggagttcaggagtctcaacacttttcttaacaaattctcttctcaaatcaatacaacaatgggttttcgtttacctggtatcagaaaggcatcacatgcggtggatgcgccaaaaggctatcttgcagtctatgtcggggagaaaatgaagcggtttgtgattcccgtatcatacatgaaccaaccttcattccaggacttgttgactcaagctgaggaagagtttggatataatcatcccatgggtggcctcacaa

SEQ ID NO: 2382 - DNA, 241 bp, Glycine max
  unsure at all n locations
  Clone ID: LIB3072-020-Q1-E1-E12
gatccttctcaattgttgttatgttcactaacaaaatgaatctgatcaagccctttattttgctttgttttctgtatggggtgatcctcatcgctgcggtggtggctggtgagccatcgaaggatgaggaaaaggaacaaatggaattcacgaagagtttagtggatgcgatgacgtgcagggaagccttttgagcggaaggaaattccaactaaatcatgataccgatcactgtgcanna

SEQ ID NO: 2383 - DNA, 345 bp, Glycine max
  Clone ID: LIB3072-020-Q1-E1-C7
gacacaactaactaagaaagtcttccatagccccccaaaaatgaagagcaccatcttctttgctctctttctcttttgtgccttcaggacctcatacccaccttcagccgtcgctgatttcgtgctcgataatgaaggtaaccctcttgaaaatggtggcacatattatatcttgtcagacataacagcatttggtggaataagagcagccccaacgggaaatgaaagatgccctctcactgtggtgcaatctcgcaatgagctcgacaaagggattgggacaatcatctcgtccccatatcgaatccgttttatcgccgaaagccatcctttgagccttaagtt

SEQ ID NO: 2384 - DNA, 401 bp, Glycine max
  Clone ID: LIB3072-020-Q1-E1-E2
gacaacacaaacattctctccattgtctttgaacactcatcaccatggccaagcttgttcattccctttgtttccttcttttcagtggctgcttcgctctgagagagcaggcacagcaaaatgagtgccagatccaaaagctgaatgccctcaaaccggataaccgtatagagtcggaaggtgggttcattgagacctggaaccctaacaacaagccattccagtgtgccggtgttgccctctctcgctgcacccttaaccgcaatgcccttcgtagaccttcctacaccaacggtccccaggaaatctacatacaacaaggtaatggtatttttggcatgatattcccgggttgtcctagcacttatcaagagccgcaagaatctcagcaacgaggacga

SEQ ID NO: 2385 - DNA, 411 bp, Glycine max
  Clone ID: LIB3072-020-Q1-E1-E3
ggaagtcttgaatttctgaacatagaacaactcttcacacaacacaactttttctagcattgtagcatcatgactggcaaagacatcctccatataatgaaggtgaaagcagggtttgcaccaccagacacagggaaaggaaaaggcaaaatatcaaaacacatcacacatggctttcacttgatgaagggcaaatcggcacatcctatggaagattatttagtttcggaatttaagcaagaaaaggatagagaattaggcttgtttgcaatatttgatggccacttaggccatgatgttgccagctatttgcagaaccaccttttccaaaacatcttgaaagagcatgacttttggactgagacagaaagcgcggtgaagagagcttaacttgaaacagatgagaaaata

SEQ ID NO: 2386 - DNA, 210 bp, Glycine max
  Clone ID: LIB3072-020-Q1-E1-A6
taagtaaggatgcgaggggatgccagtgggggattcacacaactcagtttcatagtcttccatagacctgcagaactgaagcgcactaccctccttgctcactttcgcttttgaggcatcaccacctgatacgtaccttcaggaagcgctgatttcgtgctcgaatatgaacgggaaccgcttgataatggaggtatatgccatatcttg

SEQ ID NO: 2387 - DNA, 306 bp, Glycine max
  Clone ID: LIB3072-020-Q1-E1-A9
gtccgacaagacgacagagggggacactatggctgagcttcactaccaacaacaacaccaataccctcaccgataccctaatgatccatatgaacaacaaactacctattccactcaggtcgtcaaggcggccaccgccgtcaccgcgggcggctccctcttgattctcgcctcgttgatccttatcggcaccatcatcgccctcaccatcgttacaccaccgctcgtcatcttcagtccggttctcgtccccgcggtgatcaccgtcgcgctgctgagcctggggtcccttgcctcttgctggtt

SEQ ID NO: 2388 - DNA, 409 bp, Glycine max
  Clone ID: LIB3072-020-Q1-E1-B10
gattcacacaactaactaagaaagtcttccatagccccccaaaaatgaagagcaccatcttctttgctctctttctcttttgtgccttcaccacctcatacctaccttcagccatcgctgatttcgtgctcgataatgaaggtaaccctcttgaaaatggtggcacatattatatcttgtcagacataacagcatttggtggaataagagcagccccaacgggaaatgaaagatgccctctcactgtggtgcaatctcgcaatgagctcgacaaagggattggaacaatcatctcgtccccatatcgaatccgttttatcgccgaaggccatcctttgagccttaagttcgattcatttgcagttataatgctgtgtgttggaattcctaccgagtggtctgttgtgga

SEQ ID NO: 2389 - DNA, 406 bp, Glycine max
  Clone ID: LIB3072-020-Q1-E1-B12
ggcacatcaacaccaaaacaaacccactaagatggcttcctttgtatccttcctagtgctgcttcttgcagcccttatcctcatgcctcaagggcttgctacttactacaaaccaattaagaagccaccagtgtacaagcctccagtgtacaagccaccagtgtacaaaccaccggtttataagccaaaaccaccggtttacaagccgaaaccaccggtttacaagccaccatataagaagccaccatacaagaaaccaccttatggaaagtaccctccagtagaggacaacacccatgcctaaagcaagcaatgaggtctattatctacttaataaataaggggaactgctttgtgttttctagcattgtgatttacaacttcgtagcaatgcatattcttgact

SEQ ID NO: 2390 - DNA, 372 bp, Glycine max
  Clone ID: LIB3072-020-Q1-E1-B2
gacagcaaaaacaattaataaagatgagtttgaagaacaacatggtggtgctaaaggtgtgtttgttgcttcttttccttgtgggggttacagctgcacgcatggaactgagcttcttcaaaagtgatcagtcatcaagttatgatgatgatgagtattcaaaaccatgctgtgatctctgcatgtgcacacgctcaatgcctcctcaatgcagctgtgaagatattaggctgaattcatgccactcagattgtaagagctgtatgtgcacacgctcacagccaggacagtgtcgttgtcttgacaccaacgacttctgctacaaaccttgcaagttcagagatgactagaaaaactaatagctctctcaaa

SEQ ID NO: 2391 - DNA, 383 bp, Glycine max
  Clone ID: LIB3072-020-Q1-E1-B3
ggaggatgaaggtgatggtggctatagacgagagtgaaggaagcttctatgctcttaagtgggcccttgataacctcttcaccaccatggccactgtgggagaagcatcatcacctgaaaatgatggcatggtgttcttggttcatgttgagcccaaagttcacaactatgtgtatcccatcggacccggtggagcagccttttatcctgcaactgtagtagtggattcggtgaagaaagcacaacaagaacgatcagcagctattctctcacgggcattgaaaatgtgccatgataagctggtgaaaggagagagtattattcttcgtggagacgcaagggaaatgatttgtgaagccgcagagcaaatgcaaaataatctc

SEQ ID NO: 2392 - DNA, 290 bp, Glycine max
  Clone ID: LIB3072-020-Q1-E1-B4
ggacgggaagaaacgcatcgagcgtggagaaagagaaggatgatgaggttaaggtggagtgtactcgtaatggtcacgttcgcagtttctctgttttggcttggacccctgcaagtcaaagcctctaattctgtttccgccttcgttcaaaacgccatctactccaacagaatcgccgttttctccaaatcctattgcccctactgtttgcgcgccaaacgcttgcttgctgaactcaatgaaaaaccttttgtggtggagctcgatttgcgagatgatgggtttcaaat

SEQ ID NO: 2393 - DNA, 372 bp, Glycine max
  Clone ID: LIB3072-020-Q1-E1-B5
gacagcaaaaacaattaataaagatgagtttgaagaacaacatggtggtgctaaaggtgtgtttgttgcttcttttccttgtgggggttacagctgcacgcatggaactgagcttcttcaaaagtgatcagtcatcaagttatgatgatgatgatgagtattcaaaaccatgctgtgatctctgcatgtgcacacgctcaatgcctcctcaatgcagctgtgaagatattaggctgaattcatgccactcagattgtaagagctgtatgtgcacacgctcacagccaggacagtgtcgttgtcttgacaccaacgacttctgctacaaaccttgcaagtccagagatgactagaaaaactaatagctctctc

SEQ ID NO: 2394 - DNA, 302 bp, Glycine max
  unsure at all n locations
  Clone ID: LIB3072-020-Q1-E1-B7
gtccgaanggtggcgagaggacgacggagggggactacgtaaatggtttaaaataagcggcttttctattagatccaagccttgatccgcgtgtatgctacatcataacgcggcaaggggtgggcggtcgctcaaaaggatcgacgctctattttatcctgtctgcaccgggaaaaccctgccataacgccacttaaactcatttcagcggaggtcgctttcgccagttgggatggggacaaccatgccgttacccatgttactccccctgaattacatcgccctttctgcaactgggatac

SEQ ID NO: 2395 - DNA, 60 bp, Glycine max
  Clone ID: LIB3072-020-Q1-E1-B8
accacgcgtccgcccacgcgtccgcccacgcgtccgcccacgcgtccgcccacgcgtccg

SEQ ID NO: 2396 - DNA, 188 bp, Glycine max
  Clone ID: LIB3072-020-Q1-E1-C1
gtctcaaaatgcgatgattgaatggtgtcagttctgaaaaagtgcagtgaaattcggcacagacctgtttaaatggataaaagccagaatccaaccaatgcactgtgtttctcgcaagtttatagcgtgcggtccatgaactcgttaacgcaagcccgaacatctcgtcagcgattttcgctcgttgt

SEQ ID NO: 2397 - DNA, 227 bp, Glycine max
  Clone ID: LIB3072-020-Q1-E1-C10
gtccgtacaactgtcagtacaccacctaatggtactgctgcaagaacactacatattggtaccgctcctacaacaccacacaacgtgttatacatcatctatacattacatggagttcggggggcgggtgctctacactatccaaacttcttttctcttccatcctacttcatcactcttctatcctttctcctactttcaattctcttcccttcgtttttcaactt

SEQ ID NO: 2398 - DNA, 404 bp, Glycine max
  Clone ID: LIB3072-020-Q1-E1-C11
gttcacagcaaaaacaattactaaagatgagtttgaagaacaacatggtggtgctaaaggtgtgtttgttgcttcttttccatgtgggggttacagctgcacacatggaactgatcttcttcacaagtgatcactcatcaagttatgatgatgatgagtattcaaaaccatgctgtgatctctgcatgtgcacacgctcaatgcctcctcaatgcagctgtgaagatattaggctgaattcatgccactcatattgtaacagctgtatgtgcacacgctcacagccaggacagtgtcgttgtcttgacaccaacgactttctgcacaaaccttgcaagtccagagatgcctataaaaactaataactctctcaaatggacgaagcccccttacgctttgtttgt

SEQ ID NO: 2399 - DNA, 385 bp, Glycine max
  Clone ID: LIB3072-020-Q1-E1-A5
gatgcaactgaataattaagaaaagccatttccatagcagcctaagaaaatgaagagcactagcttgttcgctatctttctactttgcgccttcacctcatacctaccttccgccaccgcccaggacgtgctcgacgtggatggcgatccgactcggaacggtttcatatactacgttttgccggcaataagaggaaacggtggcggaatagaacgagccgcactcgggaaagacacttgccctatcactgtagtgcaatctcccaatccaaactctaaggggttagaaattaagtttgaatctgcataccccgcctattacataaacgaaaccctaattttgcgaataaagttcagtttaccacagcagtgtgaaagaaagaat

SEQ ID NO: 2400 - DNA, 416 bp, Glycine max
  Clone ID: LIB3072-020-Q1-E1-C3
gatgcaactgaataattaagaaaagccatttccatagcagcctaagaaaatgaagagcactagcttgttcgctatctttctactttgcgccttcagctcatacctaccttccgccaccgcccaggacgtgctcgacgtggatggcgatccgattcggaacggtttcatatactacgttttgccggcaataagaggaaacggtggcggaatagaacgagccgcactcgggaaagacacttgccctatcactgtagtgcaatctcccaatccaaactctaaggggttagaaattaagtttgaatctgcataccccgcctattacataaacgaaaccctaattttgcaaataaagttcagttacccacagcagtgtgaaagaaagaatccttggtggggcatttctaaggatatatctg

SEQ ID NO: 2401 - DNA, 414 bp, Glycine max
  Clone ID: LIB3072-020-Q1-E1-C6
gacacaactaactaagaaagtcttcaatagccccccaaaattgaaaagcaccatcttctttgctctctttctcttttgtgccttcaccacctcagacctaccttcagccatcgctgatttcgtgctcgataatgaaggtaaccctcttgaaaatggtggcacatattatatcttgtcagacataacagcatttggtggaataagagcagccccaacgggaaatgaaagatgccctctcactgtggtgcaatctcgcaatgagctcgacaaagggattggaacaatcatctcgtccccatatcgaatccgttttatcgccgaaggccatcctttgagccttaagttcgattcatttgcagttataatgctgtgtgttggcattcctaccgagtggtctgttgtggaggatctacc

SEQ ID NO: 2402 - DNA, 252 bp, Glycine max
  Clone ID: LIB3072-019-Q1-E1-G10
aaacgggactgcaactttgctctctgtgaggcttcaatttccaattatggtttcgcttagagtaattaattaccacgggattcgccacctttgtcgttcgcaaatccggcgcctaatggaacaccaagcatcatttcggtgacatctatgcctccgccaactctatctaccatctccaaaagaagctcgtgtaagcctctctcgccgttgattcctcaggtggagtctaatcctccttctctcccgtgtctc

SEQ ID NO: 2403 - DNA, 253 bp, Glycine max
  Clone ID: LIB3072-019-Q1-E1-G12
gatggaaagatctagaacaacgatgcatctggcgtggcagtaaacaatccacagtggtaacattaatactattaacattttggtgtacaagaacccgaaggtggacaaaaaacgggattactctaacctgtattcatattcggcagcctttgacttgctgttcactccgtttttcccccatctggagttcatcttcgtaatcacattgttttccacatgacctcaattctcaaagctgtggtccactgaactg

SEQ ID NO: 2404 - DNA, 379 bp, Glycine max
  Clone ID: LIB3072-019-Q1-E1-G2
gattcacacaagggactaagaaagtcttccatagccccccattaatgaagagcaccatcttctttgctcgctttctcttttgtgccttcaccacctcagagctaccttcagccatcgctgatttcgtgctcgataatgaatgtaaccctcttgaaaatggtggcacatattacatcttgtcagacatatcagcatttggtggaataagagcagccccaacgggaaatgaaagatgccctctcactgtggtgcagtctcgcaatgagctcgacaaatggattgggacactcatctcgtccccatatctaatctgttttatcgccgaacgtcatcctttgagccttaagttcgattcatttgcagttataatgctgtgtgt

SEQ ID NO: 2405 - DNA, 363 bp, Glycine max
  Clone ID: LIB3072-019-Q1-E1-G4
gattcacacaactaactaagaaagtcttccatagccccccaaaaatgaagagcaccatcttctttgctctccttctcttttgtgccttcaccacctcatacctaccttcagccatcgctgatttcgtgctcgataatgaaggtaaccctcttgaaaatggtggcacatattatatcttgtcagacataacagcatttggtggaataagagcagccccaacgggaaatgaaagatgccctctcactgtggtgcaatctcgcaatgagctcgacaaagggattggaacaatcatctcgtccccatatcgaatccgttttatcgccgaaggccatcctttgagccttaagttccattcatttgcag

SEQ ID NO: 2406 - DNA, 329 bp, Glycine max
  Clone ID: LIB3072-019-Q1-E1-G5
tccgttaggatgcaacaacagaacgggaggggattcacaagtgtattcagtgagtgcttcgagatcacccgataactgaacagcaccatcttctttgctctccttctcttttgtcccttcaccacccgcagggcaagcttgagccagcgactcatttcgtcctctataatgatggttcgcctctttacaacgctggcatctattacatcttgtccggcataagatcatttggtgcatacaaaacacccccacagggaagtgctgcatgccctctcagtgtgatgtactctcccaatgacctcgactttgggattgtgaacaaccatctc

SEQ ID NO: 2407 - DNA, 232 bp, Glycine max
  Clone ID: LIB3072-019-Q1-E1-G6
gattcacacagggacctaacaagtccttcgtgatcccccgattgctgaatagcacggtcttccttgcgctctttctcttttgtcctttcacggccgcgggattgcctgcagccatcgctcatttcgtcttcaaaaatgatggttcccctctttacaatggtggcacatattcaatcttgtccggcacacgctccttgggcgcacaaagactgcccccacagggaagtggtga

SEQ ID NO: 2408 - DNA, 344 bp, Glycine max
  Clone ID: LIB3072-019-Q1-E1-G8
gatgatctgaaatgtctttaaaagaaagtaaagataaaaaaaaaaaagtaaaataattacaaaataaagagtttcagaaatcaaaagatccggacttgttaaaaatattaacgtctgataaccataattaaaaaaagaaagaaagaaaatttgcttcacaacacttttttcaccctctttatatttccccgaaaaaaatgtcaaattcttaaacatttttatcgcgaatgtaaaattaaacatgaaaataaaagtgatcaaaaattactgtatggctcaagaccattaagtggccaatctttttatagcacgttaatatttcttaactttaaaaaaaaattata

SEQ ID NO: 2409 - DNA, 315 bp, Glycine max
  Clone ID: LIB3072-019-Q1-E1-G9
cacacatccgtaaaagagtccgacgagaagggaagcgactgggaaaatctgaactgtcatttccagaacatcctgagaaaatgaagaacgttagcttgttcgctatcattcgtttttgcggcctcagcagcgggggttgttccgccaacgaccgtcagatgctcatccttgatggaggtacgaatcaagatttgcttcacaaaacttttttcgcccgctttataattccccggtggcggtgtcaaattctcagccatctttaacgcaactgttcccttcaccgtgatggtaacactcatcccaaactactgtggg

SEQ ID NO: 2410 - DNA, 357 bp, Glycine max
  Clone ID: LIB3072-019-Q1-E1-H1
gctcacaagccagatagatctgcttcttgttgttggaaagaaaccctagcaagcggaacaatggcagacgttgaggtcgatgtggcggctgcagcagcagcagggcagccgaagaagagaacgttcaagaagttcagtttcaggggcgtggatctcgatgcgcttctggacatgtccaccgatgaactcgtgaagatgttcagtgctcgcgcacgtagaaggttccagagaggcctcaccagaaagcccatggccttgatcaagaagcttcgcaaagcgaaaagagaagctccaccaggtgagaagccagaacctgtccgcacccacctccgcaacatgattattgtgcctgagatg

SEQ ID NO: 2411 - DNA, 335 bp, Glycine max
  Clone ID: LIB3072-019-Q1-E1-H2
cagcctcaaccacacgtccgtggcgctgcgacaagacaactctgcgtgatgatgttgaaagagcatggtcatgagcatggacatgacagcagctagaggtacttatgtcattagcctgctgcatcagctatatatttaaaaggtttatcggaccattcatttccagggctgtgccatactttctctctctctctctctctctctctctctccctctctttttccattttccccaccttgtgatcgatctatgaatgcctaaacaaaaagctcatagactgtgtgtgtatccgtctgctagctcgagtgctatcaccaccatggtttggttggttt

SEQ ID NO: 2412 - DNA, 405 bp, Glycine max
  Clone ID: LIB3072-019-Q1-E1-H4
gacagcatttttgaagtagtttgtgtagacttaaagaagagttaagggaaaaaaataagatgaacactattggagttatgattatgatcatgtctatgttagggttcgtacaagctaataattacaatcctccatttgtgcaagttgagtcaatcagtgagactaatagacttacttgtccacaagcatgcagggtacaatgtgcagctttagcaccagttgaaccatggtatgacaaatgtgttaaagaatgcactgcaaattgtaagcatgatgtgtccgttgctaaggattgctttactagttgtgccttaatcaagtccattaacatcaacaatgatgttcgtgatctttcgaccaatattgtgatgaattcctgcttgcaagaatgtcaaaacaagaaat

SEQ ID NO: 2413 - DNA, 315 bp, Glycine max
  Clone ID: LIB3072-019-Q1-E1-H5
ttggggtctgtgttacgacttacggctaaattctcaaagatttaaactttgtcgcacagtttcgaagttcacccaaccccagagacaaaatgtcgctaatcccaaatttcttcggtggcacaacgagcatcgttttctatcctttttccctcgacgtctgggacctacttcatggattttcctttcgcaaacactctttcctcaacttccattcctgaaatttctcgggaaaagtctgcattcgtgaacactcgtgtggattggtaagatatccgataagcacgagtacttaacgatgatattccaaggctgatc

SEQ ID NO: 2414 - DNA, 370 bp, Glycine max
  Clone ID: LIB3072-019-Q1-E1-G1
gacagcaaaaacaattaataaagatgagtttgaagaacaacatggtggtgctaaaggtgtgtttgttgcttcttttccttgtgggggttacagctgcacgcatggaactgagtttcttcaaaagtgatcagtcatcaagttatgatgatgatgagtattcaaaaccatgctgtgatctctgcatgtgcacacgctcaatgcctcctcaatgcagctgtgaagatattaagctgaattcatgccactcagattgtaagagctgtatgtgcacacgctcccagccaggacagtgtcgttgtcttgacaccaacgacttctgctacaaaccttgcaagtccagagatgactagaaaaactaatagctctctca

SEQ ID NO: 2415 - DNA, 76 bp, Glycine max
  Clone ID: LIB3072-019-Q1-E1-H9
ggcagatactttactcactaactcagtgtctcagcaaatacttagaataatgctcgacgccggaaagaaccacaac

SEQ ID NO: 2416 - DNA, 364 bp, Glycine max
  Clone ID: LIB3072-020-Q1-E1-A1
gactgaggtcgttggcgagaatgggaagaaagaaggggtatgttgagttcgaggagtcgccgccggacgattttgatccggcgaatccgtacaaggacccggtggcgatgctggagatgagggagcacatcgtgagagagaagtggatccaaatcgagaaggccaagatcattagggagaagctccgctggtgctaccgcatcgaaggcgtcaaccacctccagaagtgccgccacctcgtcaaccagtatctcgagtccacccgcggcatcggttggggcaaggacggtcgccacccatctctccacgctcccaaggttgaccctgttgagtctgaatgaccttccctgtggacaattaatac

SEQ ID NO: 2417 - DNA, 308 bp, Glycine max
  Clone ID: LIB3072-020-Q1-E1-A10
gacagcaaaaacaattaataaagatgagtttgaagaacaacatggtggtgctaaaggtgtgtttgttgcttcttttccgtggggggggtacagctgcacgcatggaactgagcttcttcaaaagtgatcagtcatcaagttatgacgatgatgagtattcaaaaccatgctgtgatctctgcatgtgcacacgctcaatgcctcctcaatgcagctgtgaagatattaggctgaattcatgccactcagattgtaagagctgtatatgcacacgctcacaacccaagacagtgtctttgtcttgacac

SEQ ID NO: 2418 - DNA, 376 bp, Glycine max
  Clone ID: LIB3072-020-Q1-E1-A4
gcactcatacaatagagaccagcttttgcttctttgtgaacatggagatgaggaaatcatgtggcttcttcttcttgctcctcctccttgtctttgcttccccagaggtggtggtgcagacggagggaagagtgtgtgagtcacaaagccacgggttccatggtttgtgtaatatagaccacaactgtgctttggtctgcaggaacgaaggtttctccggtggcaggtgcaaaagcttccgccgccgctgcttttgcaccacgatctgttgagatctcatcaaacactactcttgccatgcaaattaataaatcatagctaggccaaataaattgcatctactctttatccattttggagctagctaccacaacca

SEQ ID NO: 2419 - DNA, 323 bp, Glycine max
  Clone ID: LIB3072-019-Q1-E1-D9
ggagggatcaccctctcaatttcgctctgcacgccttcatgccaggtcagacattaagttgctttgctaccaccataccatcagggggacatcatagcacccaattttgctgccatcgctaactacctccacatatgggtctcgaaatcccatacgaatttcggccaattatgcgcatcctaacagttcatgttcctaaggttacaaccttcagccaatgctcggagctggtagaggcctcaccaagtgaagagatgctgctgcaagagtgccacacgcccacgtcaacatcaacagtggctcaaacgttgttggtttgtcca

SEQ ID NO: 2420 - DNA, 227 bp, Glycine max
  Clone ID: LIB3072-019-Q1-E1-E1
gatcaggctctgaatttctctctgcacgccttcatgccagtgcaaacattaagttaatttgctacgagcataccatcaggagtaatgcataacaccgaattttgttgctatagctagctacctccacatatgggtctcgaaatcctatacgaatttcggccaattatgcccatccgaacagttcctgttcctaaggttataaccttcagccaaggctcggagctggt

SEQ ID NO: 2421 - DNA, 87 bp, Glycine max
  Clone ID: LIB3072-019-Q1-E1-E10
gtcccgctgcgagaacactacacaatggttctgtcgcgacaactcgatacactggtaccgcttcgatacctctactctccgctcctc

SEQ ID NO: 2422 - DNA, 277 bp, Glycine max
  Clone ID: LIB3072-019-Q1-E1-E2
gacagcaaacacaattaataaagatgagtttgaagaacaacatggtggtgctaaaggtgtgtttgttgcttcttttccttgtgggggttacagctgcacacatggaactgagcttcttcaaaagtgatcagtcatcaagttatgatgatgatgattagtcaaaaccatgctgtgatctctgcatgtgcacacgcgcaatgcctcctcaatgcagctgtgaagatattacgctgaactcatgccactcagattgtaagagctgtatgtgcacacgctc

SEQ ID NO: 2423 - DNA, 344 bp, Glycine max
  Clone ID: LIB3072-019-Q1-E1-E4
ggcgaaactgaggtcgtagaaagaatggcgaaaacgacgtcgttgttgctctttacactgctcctcttcggaaccttagctctcatccaggcgaagaaatcgaaggaggatttgaaggaagtgacccacaaggtttactttgatgttgagattaatggaaaagaagcaggtcgtattgtgatgggtctttttggaaaggctgttccaaaaactgcagaaaactttcgagctctttgcactggggaaaagggaactggtaaaagtggcaagcctctccattacaaaggtagctcattccatagaattattcctagctttatgctccaaggaggtgattttacaca

SEQ ID NO: 2424 - DNA, 365 bp, Glycine max
  Clone ID: LIB3072-019-Q1-E1-E5
gcagagaaaggggcaaaactggggacataaaactaatgttgactacgacgtcgttgttgctctttacactgctccacttcggtaccttaactctcatctaggcgaagggatcaagggaggatttgaaggaaataacccacaaggtttactttgatgttgagattactgaaaaaaaatcaggtcatattgtgataggtctttttggaaaggctgttccaaaaactgcataaaacattggagctctttgcactggggaaaatggaactggtaaaagtggcaggcctctccattaaaacggtagctcattccatagaattattcccagctttatggtccaatgaggtgactttacaaatcgcaattgt

SEQ ID NO: 2425 - DNA, 292 bp, Glycine max
  Clone ID: LIB3072-019-Q1-E1-E7
gacaaggtactgatgtaataaatctacatttgggtaccgatatgataatacgacaggtgtgtttggtgcctcatttccttataggggttacggcgccacacatcgacctgaggcgcttgcaatgtgttcagtcatcacggtttggatttttcgtagtagtcaataccatgctgtgatcactgcatgtgcgctctcgcagatgccacctcacctcagctgtgatgatattacgctcatctcctacgatgctaattatattcaattctatggcacacgctcaacaacatcataa

SEQ ID NO: 2426 - DNA, 294 bp, Glycine max
  Clone ID: LIB3072-019-Q1-E1-E8
gatagcacactcaattactaaatatgagtttgaataacaacatggtggtgctaaaggtgtgtttgttgcatcttttccttgtgggggttacagctgcacacatggaactgagcttcttcaaaagtgatcagtcatcaagttatgatgatgatgattagtcaaaaccatgctgtgatctctgcatgtgcacacgcgcaatgcctcctcaatgcagctgtgaagatattaagctgaattcatgccactcagattgtaagagctgtatgtgcacacgctcacagccaggacagtgtc

SEQ ID NO: 2427 - DNA, 287 bp, Glycine max
  Clone ID: LIB3072-019-Q1-E1-F1
ggtacggcagcgcggcgacaacacaacggtagggtaccgctgcgacaacacgacggtacggtagcgctgcgacaacacgacagggcgcggcacagttgattttgctgatcgagataactcaatacaatgtgattagagttcatgtccttcttctcttcgatgctacaggtttcatagcattgcaatgccatgcatacgatctctcccctctccgactcagcactggctacgcttcccctacaccggaggtgcactgctcagattcgtggcgtgctgtcacaccacac

SEQ ID NO: 2428 - DNA, 244 bp, Glycine max
  Clone ID: LIB3072-019-Q1-E1-F10
cgtccgtacagacgtcaggggggcagtgattgtatgtgtcaaggggagatataaataggatcatggttgtgagcaaggactttcaacattcccactactaacactggtttgcttcgcggccgggcatcatgtgccgcctgaatagtcgtaccctctctcgtcggctgtgcactttataccccctgttcctctaagcaccctgctccattcccttgcatcagcctttccagtgggagcagtttaa

SEQ ID NO: 2429 - DNA, 402 bp, Glycine max
  Clone ID: LIB3072-019-Q1-E1-F2
agggacagcataaacaattaataaagatgagtttgaagaacaacatggtggtgctaaaggtgtgtatgttgcttcttttccttgtgggggttacagctgcacacatggaactgagcttcttcaaaagtgatcagtcatcaagttatgatgatgatgagtattcaaaaccatgctgtgatctctgcatgtgcacacgctcaatgcctcctcaatgcatctgtgaagatattatgctgaattcatgccactcagattgtaagagctgtatgtgcacacgctcacagccaggacagtgtcgttgtcttgacaccaacgacttctgctgcaaaccttgcaagtccagagatgactagaaaaactaatatctctctcaaatggatcaagccctttaggctttgtttg

SEQ ID NO: 2430 - DNA, 327 bp, Glycine max
  Clone ID: LIB3072-019-Q1-E1-F3
gagggggacagcaaaaacaattaataaagatgagtttgaataacaacatggtggtgctaaaggtgtgtttgttgcttcttttccttgtgggggttacagctgcacgcatgggactgagcttcttcaaaagtgatcagtcatcacgttatgattatgatgactattcaaaaccatgctgtgatctctgcatgtgcacacgctcaatgcctcctcaatgcagctgtgaatatattatgctgaattcatgccactcagattgttacagctgtatgtgcacacgctcacagccagtacagtgtcgttgtcttgacaccaacgacttctgct

SEQ ID NO: 2431 - DNA, 349 bp, Glycine max
  Clone ID: LIB3072-019-Q1-E1-F4
gacagcaaaaacaattaataaatatgagtttgaagaacaacatggtggtgctaaaggtgtgtttgttgcttcttttccttgtgggggttacagctgcacgcatggcactgagcttcttcataagtgatcagtcatcaagttatgatgatgatgagtattcaaaaccatgctgtgatctctgcatgtgtacatgctcaatgcctcctcaatgcaactgtgaagatattaggctgaattcatgccactcagattgtaagagctgtatgtgcacacgctcacagacaggacagtgtcgttgtcttgacaccaacgacttctgctataaaccttgcaagtccagagatgacta

SEQ ID NO: 2432 - DNA, 272 bp, Glycine max
  Clone ID: LIB3072-019-Q1-E1-D8
gctatgctgaagatggagaatttcgtgatggatatgttcacaatgtcaatgtagataaagctctttgtaaaggtacagatttgtgaaagccattttgtcgtacgagagacaaagggaaataaaatgtgtcaccttcaattattgcacacctcatcatcatggatgtatacataccgcggtcgccccagaggatacaatctcatgtacccctgcatgtcacgtctgagctcttcgagattgtcacccaaagtcacttcatcgggcgtcgattt

SEQ ID NO: 2433 - DNA, 353 bp, Glycine max
  Clone ID: LIB3072-019-Q1-E1-F5
ggggcctgagaggcggtggtttaccctgtggcggatgtcagcggttcgagtccgcttatctccaactcgtgaacttagtcgatacaaagctatatgatagcacttccatttttccgattcggcagtttgatctatgctatgatttatcattcatggacgttgataagatccttccatctagcagcaccttaggatggcatagccttaaagttaagggcgaggttcaaacaaagaaaggcttatggtggatacctaggcgcccagagacgaagaagggcgtagtaagcgacgaagtgcttcggggagttgaaaataagcgtagatccggggattcccgatataggtcaaccttt

SEQ ID NO: 2434 - DNA, 204 bp, Glycine max
  Clone ID: LIB3072-019-Q1-E1-F7
ctgggagcgcaaaaatcattgctcagtgttagtttgagtgacaacaacaaggggcgaattgaattgggagatgtcattctcttatccatgttggggtaacagctgcacgaatagaactgaccgtctgcatctatgctcactcaccacgttagcaagaaaatcattatccatggggatgcctggtatcttcacacctacatacag

SEQ ID NO: 2435 - DNA, 377 bp, Glycine max
  Clone ID: LIB3072-019-Q1-E1-F8
ggacagtgtttgtgtgtgtctaagagagagagagatggcatcgttttgtgctgcaaggactttcaacattccggcgatgaacgccggcgttcttcgccgccgggcatcgtgggccgccggaatagtcggagcctcggtggccggcgctgcacttttgcgctcttgttcgtctaagcgctctgcgccattcgcttgcatgagcctctctactgataccagtttaaaggaagctgttcaaactgaaaaggccccagcggcattggggccatactctcaagcaatcaaagccaacaaccttctgtttgtgtcaggtgttcttggccttattcctgagacagggaagttcatccccgataatgttgaagatcagacagagc

SEQ ID NO: 2436 - DNA, 367 bp, Glycine max
  Clone ID: LIB3072-019-Q1-E1-F9
cagaacggggacagtgtttgtgtgtgtctaacatagagatagatggcatcgttttgtgctgcaatgactttcaacattccggctataaacgccggcgttcttctccgccgggcatcatgggctgcctgaatagtcggagcctccgtggccggctctgcacttttgcgctcttgttcgtctaagcgctctgcaccattcgcttgcatgagcctctctactgatacgactttatcagaacctgttcaaactgataaggccccagcggcattggagccatactctcaagcaatcaaagccaacagccttctgtttgtgttaagtgttcttgggcttattcctgagacaaggaagttcatctctgataatg

SEQ ID NO: 2437 - DNA, 347 bp, Glycine max
  Clone ID: LIB3072-019-Q1-E1-B3
aacagcggagattactctacagatgttttccgatcaacatggtggagtcaagggtgtgtttgttgcactcttttccttgtacaggtaagtgcttcacgtctgtaactagggtatcgatcacacctcataattcatcattttatcacaaaggtggtgattcaacaccatgtggtcatatctacaagtacacacgctcaatccgtcatatctgcatctacaaatatattctgcagacttcatgcaactcagatcatgctagctgtatgtccattagctcacagcctgtagtatgtccttgcaataacaccaacaacttccgctacagttcttgtggatccattcaagtc

SEQ ID NO: 2438 - DNA, 274 bp, Glycine max
  Clone ID: LIB3072-019-Q1-E1-B4
agggggcaaacaaggggactctcaccacatcaatctaaatcacttttgggtaacagtcttgagtcgccgcccctacaaatataaacctaattggggccttggtgggatctcctaacacccttcctaatcggacccaaactcaaatcaacggcgctcgcttttcaagttctctaccgggaaaaacactgcgtttaccccttaatcccccttgtgaaaatcacccctgctgccactattggcatcacaaccttgctcccgtccggtttccccccca

SEQ ID NO: 2439 - DNA, 311 bp, Glycine max
  Clone ID: LIB3072-019-Q1-E1-B6
gagcacttggtttagcaagagaaaaaataccaaccatggcaaccatttctactgatcacccatgatgatcctactcctatggaacctcctatggagcaccctatgggaccacctatgataccactagcagcatgtaacaatcctccttcacgccaagccgtgaagttcataactgctgcatctattggcatcacactcttacgcctgtctgggttgagcctcacaggcactgtcataagtttgatcattgcaacccctcttcttgttatcttcagccccatccgtgtccctgctgcgtgtgtgctgttcct

SEQ ID NO: 2440 - DNA, 343 bp, Glycine max
  Clone ID: LIB3072-019-Q1-E1-B7
gacgctcaacacattaatctatatcaattttggttaagagtcttgaatgagcaacagaaaaaacattgcactcatggcaatcagttctgataaaacgacatggtcacactcatatggaacctcatatggagcaccctatggaagcacgtctcataccaatagcagcattaataacccatcgtcacgccaaacagtgaatttcataactgcagccactattggcatcacactcttgcgcctgtctgggttgagcctcacacgcactgtcataggtttgatgattgcaaccctcttcttgttatcttcagacccattcttatccctgctgggtatgcgctgttcc

SEQ ID NO: 2441 - DNA, 250 bp, Glycine max
  Clone ID: LIB3072-019-Q1-E1-B8
acaacagagacaattactctagataagttttacgatcaacatggtggagctaagggtgtgtttgttgattcttttccttgtggaggtaagagctgcacttctgaaactaaggtatcgtcacaactgataattcatcattttatgacaaagatgattattcaacaccatgctgtgatctctacaagtacacacgctcaatccctcatatctgcatctataaatatattaagcatagttcatgcaactcaga

SEQ ID NO: 2442 - DNA, 196 bp, Glycine max
  Clone ID: LIB3072-019-Q1-E1-B9
gtacagcggggaagaatctaccgaagagtttcaggtacatggtattgatgcagaggttttggaagaggattatcctcgttgtacaggtatgtgcgtcgcttcattatccatgggtatcgttacacctgcacttctgcctctgactctcatcagtggtgttcagacaaccagttgtctctcccacgattagacacat

SEQ ID NO: 2443 - DNA, 238 bp, Glycine max
  Clone ID: LIB3072-019-Q1-E1-C1
ggaagaagctagcgaaaatatcaggtcatggtacgtggaggcaaaggtttgggaaagggaagaaccactatgcacatgtatgcgtctcgtgtcattatccagtggatcaccaaacccccaattcggggtttggctctcaaaggtagtgataattgaatctgttgtctcatcgacaatgaggaacgtctcatcctcaatatcttcttctataccatatttctcgacgctgttacattca

SEQ ID NO: 2444 - DNA, 358 bp, Glycine max
  Clone ID: LIB3072-019-Q1-E1-C10
gagagcaaaaacaattaataaagatgagtttgaagaacaacatggtggcgctaaaggtgtgtttgttgcttcttttccttgtgggggttacagctgcacgcatggaactgagcttcctcaaaagtgatcagtcatcaagttatgatgatgatgagtattcaaaaccatgctgtgatctctgcatgtgcacacgctcaatgcctcctcaatgcagctgtgaagatattaggctgaattcatgccactcagattgtaagagctgtatgtgcacacgctcacagccaggacagtgtcgttgtcttgacaccaaccacttctgctacaaaccttgcaagtccatagatgactagaaaaacta

SEQ ID NO: 2445 - DNA, 266 bp, Glycine max
  Clone ID: LIB3072-019-Q1-E1-C11
gaggggagaaagagttaataaagatcagtttggtgcacaacagagtggcccttaaggtgtgtttgttgcttccatcacttgtaggggttcgatgtgttgtcatggatatgagcttcctcataaatgatgaatcagcaacttatgatgatgatgaatacataatcaatgcagtgatttctgtctgtacaaacgcacaatgaatactgaatgcacctgtcacaatattaggctgaattcatgcgacgcacatagttgtaactgtttat

SEQ ID NO: 2446 - DNA, 283 bp, Glycine max
  Clone ID: LIB3072-019-Q1-E1-C12
gacagcagaaacaattagtaacgatgagtttgaagaacaacatggtggtgctaaaggtgtgtttgttgcttcttttccttgtgggggttacagctgcacgcatggaactgaccttcttcaaaagtgatcagtcaccaagttatgatgatgatgactattcaaaaccatgctgtgatctctgcatgtgcacacactcaatgcctcctcaatgcagctgtgaagatattaagctgaattcatgccactcagattgtaatagctgtatgtgcacacgctcacagcc

SEQ ID NO: 2447 - DNA, 225 bp, Glycine max
  Clone ID: LIB3072-019-Q1-E1-C2
ggagggaaaaatcattaaatccattgacttgttcggctagatggatgagcaggtatggcctgtggcaatggactttaactagggcgatcatctcaagattatcgtcgacggcgtctcataatctgatctaatattctcgggatccgatttcttcaagtgttaccacaatgatttctgactgagactgataagaaacaaaaggcctttcatcttcatgggtattcg

SEQ ID NO: 2448 - DNA, 232 bp, Glycine max
  Clone ID: LIB3072-019-Q1-E1-C3
gataccggggagggatgggtctccttaatttacgggcgtgtcctgcgagattcatcagactgtacgttgcatcttatcagatgtggttgacgtcggtgctggcttcaatttggccttcggcgtctatactccgacagattccaatggtcctgtttcttcaaagctttccagtagtatctctatgtgaacactcacaatgggtacgccttccatctgccgccgtattcgaggg

SEQ ID NO: 2449 - DNA, 254 bp, Glycine max
  Clone ID: LIB3072-019-Q1-E1-C8
ggagggaaagatgatgagatcaatggacttgtccggagagatggacgagcaggtatcgtcgatggcaatggacgtggatgacgtcgatgctctcgagatcctcgccgacggcgtcatcgccgccgaaaatatattcaccgacacctatttcttcaagaatttccacgacgatttctatgactctgatcatcaattaaaacgcctttcatctgcaggggtattcgcggggtcacaatgcttctcggttagggttt

SEQ ID NO: 2450 - DNA, 163 bp, Glycine max
  Clone ID: LIB3072-019-Q1-E1-B2
cccgggtgcccccacgagtccgtaaaggcgtcagctgagacaacagggcagaatgggctacagacgttttcctatcaagatcgtggattcaggggtttgtttgttgaactctattctctttgcaggcttgctcttcggtgcattcaccagggtatggtcacat

SEQ ID NO: 2451 - DNA, 304 bp, Glycine max
  unsure at all n locations
  Clone ID: LIB3072-019-Q1-E1-D11
gaggtgagtcagtatgatgatgtatgtacatcttacaggaagcagagaagcagcaattaccattcatcaatgagtgctanagccgccacaagatgagagcatctaattaccttttcatccaatattttggattccaggatcttagactagctcagttagctttgtctttattaatgtttctttgaatgactgtagttgagctgatacttttgtttgttatttgcctatggtccaatgtgccttttcagctgaaatcatggatttgatgtatcattccttgaccaaaactgaatattccataaac

SEQ ID NO: 2452 - DNA, 321 bp, Glycine max
  Clone ID: LIB3072-019-Q1-E1-D12
acgcatccgtaaggcggcaaaaaaacgacgcaaggggatgcagctgaaaaactaatacaagccatttctatagcagcctaagaaaatgaaaagcactatcgtgttcgcaacccttcgacgttgcggggtcagcgcagagctaacctccgccatcgcacaggatgtactctacgttgatggccatccgaatcggaaccgttccatatactacgttctgcctgcaaaaggaggaaacggtggccgtatacaactagccgcacctttgaaagacacttgccctatctctgttagtgcagacttccactccacaatccaaggggt

SEQ ID NO: 2453 - DNA, 194 bp, Glycine max
  Clone ID: LIB3072-019-Q1-E1-D2
aaaagggtacagcagggcaaaacacaacataaaggtattgctgctagataactacacaatggcactgctgctaaaactctttgtaaaggtacagatgtgagaaaaccatattgtggtacggctgccaaagggaaacagaatgtgacacttactattattgcacatggagtcctcaaagatctatgcttacctct

SEQ ID NO: 2454 - DNA, 324 bp, Glycine max
  Clone ID: LIB3072-019-Q1-E1-D3
ggataggacacagctaactaatttcggtcttcgataccttcccaattgtggagagcaccagtcttctttgctcgctttctcttttgtgccgtcagcatctcatgcctaccttcagccatcgctgatttcgtgcacttaaatgattgtaaccctcttgaacatggtggcacatattatatcttgtccgacatgataccatctggtggaataagagcagccccaacgggaactggaagatgttctctcactgtggtgtaatcgcgcgttgttctccaaaatcggattggaaaaatcatctcgtctccatatcgtaaccgttttatc

SEQ ID NO: 2455 - DNA, 437 bp, Glycine max
  Clone ID: LIB3072-018-Q1-E1-H10
gattcacacaactaactaagaaagtcttccatagccccccaaaaatgaagagcaccatcttctttgctctctttctcttttgtgccttcaccacctcatacctaccttcagccatcgctgatttcgtgctcgataatgaaggtaaccctcttgaaaatggtggcacatattatatcttgtcagacataacagcatttggtggaataagagcagccccaacgggaaatgaaagatgccctctcactgtggtgcaatctcgcaatgagctcgacaaagggattggaacaatcatctcgtccccatatcgaatccgttttatcgccgaaggccatcctttgagccttaagttcgattcatttgcagttataatgctgtgtgttggaattcctaccgagtggcctgttgtggaagatttaccagaaggacctgctgttaaa

SEQ ID NO: 2456 - DNA, 428 bp, Glycine max
  Clone ID: LIB3072-018-Q1-E1-H11
ggagagtcagagatggtagctattggctttggagcccctccttctccacttccgtttcatcttcgcctggcttcctctccttctcctttggccttcccaataatccacaaattccaaaacgcaggcaagtcagtgataacaatctgttcaaagaaaaatgcaaaatcaagggtggtcactctctgctctgcacctgtgcaagaggttagtgatattactttgagagagagaagtgtttcggttgtcctattggctggagggcagggcaagaggatgggagctagtatgccaaagcagtatcttcctctttttggtcaacccattgctttgtatagtttccacactttttttcacctggttcaagtcaaaaacattactgtgggttgtgatccttcatacaaagacatttttgaacatgcaaagggaga

SEQ ID NO: 2457 - DNA, 334 bp, Glycine max
  Clone ID: LIB3072-018-Q1-E1-H12
ggcagcagtgaggttgaaaggggatggtgagagtaagcaaagaggctctgcaaaaagcagccaaaaccctatccgaaatcctcgtgtgccctctctctaagcagcctttgaggtattgtgaggaatcaaattccttaatcagcgatgctattggcgttgccttccccataaaaaatgggataccatgcttggttccaagagatgggaagatacttgaggaagaagatgcctcaaaacctgataatgataccaatttatctgcagtaaatgaagagaatcaaggaagaagtggcctaagatgaagtgtaacgtgtctcgacttcaatttctatga

SEQ ID NO: 2458 - DNA, 430 bp, Glycine max
  Clone ID: LIB3072-018-Q1-E1-H2
gatcctctgtctcaatcttataacttggccatggtcaatgtatcttcataacgattttttggataagaattgtgtgtgtgagagacataattaacagtagacagtaggactcaaagtttatacctacaccaaattggtaaattctatctctctattctaccttaatctaaagatcaagattttatcattaaattaagatgacttgtttctcctctttcctctctgcccattaaacatcaaaaaagcctttctttgtttgtttttttttaatgatttcattgagcataagcattaactagagattctcacaattatcagtctcaacctcttattccgattcaaaaacaaactgaaaaacattatcaagaaaatgcacaataaaattatactacaattgtctgtagtcctcactcctcaagaaaaactgaag

SEQ ID NO: 2459 - DNA, 383 bp, Glycine max
  Clone ID: LIB3072-018-Q1-E1-H3
ggggtgcatccagaagcaaagcaaaggcatgatgaggttattagggttttagagatgatgaaatgagaagtcgaatggcatcatcgtcatcggcatttctggtgatctgcatcctgcactcgttaatagcagtgacatgtggggggctgatgatgttctacatgaaggaggtctacaccttcggccacggagtgcaggccgccaccaagcccttgggatccacgccgcacgaccagcttctcatcaagacctccgattccttctccggcttgctccttgtcgcaattgggttcctcctcttcatggtctcttttgttaaagatcgtgactttcaggtcttcttcgccaagggttgcacgctcctccacctcttcatggcgatg

SEQ ID NO: 2460 - DNA, 411 bp, Glycine max
  Clone ID: LIB3072-018-Q1-E1-H5
gacagcaaaaacaattaataaagatgagtttgaaccacaacatggtggtgctaaaggtgtgtttgttgcttcttttccttgtgggggttacagctgcacgcatggaactgagcttcttcaaaagtgatcagtcatcaagttatgatgatgatgagtattcaaaaccatgctgtgatctctgcatgtgcacacgctcaatgcctcctcaatgcagctgtgaagatattaggctgaattcatgccactcacattgtaagagctgtatgtgcacacgctcacagccaggacagtgtcgttgtcttgacaccaacgacttctgctacaaaccttgcaagtccatagatgactaaaaaaactaatagctccctcagatggaccaaccccctttaggctttgtttgttaagttaagg

SEQ ID NO: 2461 - DNA, 389 bp, Glycine max
  Clone ID: LIB3072-018-Q1-E1-H6
ggacggaagttgaaaattttggttgagcaagagccttctctttgttccgttccgcgaccatgtctcatgagacatgcccttccgtaaagaacttccttcttttggattctgatgggaaacgtgtcgcagtcaaatacttctctgaagactgggcaacgaatagtgccaaggaaaattttgagaaagttgtcttcaacaagactcagaagaccaatgcccgcacagaagcggaaatagcaatgtttgagaataacattgttgtttacaagtttgtccaagatcttcacttctttgttaccggtggtgattatgaaaatgagcttatcttagccacagttctgcaggcattttttgattctgtgggccttctgctcagaggcaatgtggac

SEQ ID NO: 2462 - DNA, 420 bp, Glycine max
  Clone ID: LIB3072-018-Q1-E1-H8
gattcacacaactaactaagaaagtcttccatagccccccaaaaatgaagagcaccatcttctttgctctctttctcttttgtgccttcaccacctcatacctaccttcagccatcgctgatttcgtgctcgataatgaaggtaaccctcttgaaaatggtggcacatattatatcttgtcagacataacagcatttggtggaataagagcagccccaacgggaaatgaaagatgccctctcactgtggtgcaatctcgcaatgagctcgacaaagggattggaacaatcatctcgtccccatatcgaatccgttttatcgccgaaggccatcctttgagccttaagttcgattcatttgcagttataatgctgtgtgttggaattcctaccgagtggtctgttgtggaggatctaccag

SEQ ID NO: 2463 - DNA, 372 bp, Glycine max
  Clone ID: LIB3072-019-Q1-E1-A1
tgctaaggatacgacaaaacggcagattcgaagatataaacaaagttctgtttactacataggaatggcagcagcaacgggaacataggctgcaagagaccgtgattgtggaaatctcgaacgaacagattcaggcactgatcaaacctgccgaatctacttcaaggaaaaccatttcttctgaagataaaccttttaacttgagaagccgcgacccatctactccaacaagcttggcaagttctttgagatcaccccagagaaaaacccccaacttcgggacttggatatcttcctcagtattgtggatattaacgagggagctcttcttctaccacacttcaattcagaggcgatagtgatactggtaat

SEQ ID NO: 2464 - DNA, 327 bp, Glycine max
  Clone ID: LIB3072-019-Q1-E1-A11
gacagcacaaacagttaataaagatgagtttgaagaacaacatggtggtgctaaaggtgtgtttgttgcttcttttccttgtgggggttacagctgcacgcatggaactgagcttcttcaaaagtgatcagtcatcaaattatgatgatgatgggtattcaaaactatgctgtgatctctgcatgtgcacacgctcaatgcctcctcaatgcatctgtgaagatattaggctgaattcatgccactcatattgtaagaactgtatgtgcacacgctcacagccaggacagtgtcattgtcttgacatcaacgacttctgctacaaac

SEQ ID NO: 2465 - DNA, 315 bp, Glycine max
  Clone ID: LIB3072-019-Q1-E1-A12
gactctcatcacatttttctatatcaattttggataacagtcttgagatgccaagagagtatatatagcaaccatggcatgcatttctgatcaacctacacggtcctactcctatggtacctcatatggagcaccctatggaaccacgtatgagaccaataccagcattaagatcccatcttcacgccaaacagtgaagttcatacctgctgccactattggcatcacactcttgctcctgtctgggttgatcctcacaggcactgtcataagtttgatcattgaaaaccctcttcttgttatcttcagacccat

SEQ ID NO: 2466 - DNA, 310 bp, Glycine max
  Clone ID: LIB3072-019-Q1-E1-A2
gtcgtaggctgcgagagggaacatatgcgtctttgggatgtaatgctcttaccacaatgggtttcataggccgtccgaacactttgtcgggttgggccatcgctagagcagacgtgcagctcaccattatagttggtggtcatgtcgtcagctggagatgaaccaacaactggatgtacagggcacgggctctcagcagtgaaggacccgcggatctcgtataaaaggatgtacgtatcacctccagcgggaaccagaatcttatctttaactactagacggggggaatattgtataatgtcatcaacag

SEQ ID NO: 2467 - DNA, 268 bp, Glycine max
  Clone ID: LIB3072-019-Q1-E1-A6
ctctgtccataatgtaacattggatgagatgtaaagagggatggtctagtattacatgtttgacctgatattaggttcttaaatactaatgaattaagatgttacggacgttcaataactacattgtatactcatgttggatttacactcgattgtttatgtcgaagtcacctctatgaatcctacaagcctaaaacacagtaaaatgcaattatgagaacatttggatcacccgaacaaaacccgcactattcactacgcggccgcc

SEQ ID NO: 2468 - DNA, 183 bp, Glycine max
  Clone ID: LIB3072-019-Q1-E1-A7
tgctagaatacgacaaaaggcatattcgaagatatgaacatagttctgtttactccataggaatggcagccccaacgggaacataggctgcttgagacctctcttgtgcaaatctccaccgaacagtttcagtcactgatcatatcttccgcttctacttcaccgaaaactatttcttctgaa

SEQ ID NO: 2469 - DNA, 245 bp, Glycine max
  Clone ID: LIB3072-019-Q1-E1-A8
cacaaggctactttggcatgtaatgctcttatcacaatgggtttcattggccgtccgaacactttgttgggttgggacttcgctggagcagataggcaccttaccattatagttggttgcgtcatgtcgtaccgctgaagacgcaaccacccactggatgtactgggcaggtgttgtcagcaatagaactctcgcggatcctatataaaaggatgtacgtatcgcctccagcgggaaccagaatc

SEQ ID NO: 2470 - DNA, 191 bp, Glycine max
  Clone ID: LIB3072-019-Q1-E1-B1
cccggggcgcccatgcatcagtaaagccgtcagatgagaaaacaatgcatcttgggattgaaattctcttttcacaatgcgtacattaggccgtacgaatgtcttagttcgatcttcattgctctcgttgtcttttgtagcgtcatgattgcattggttccttaagtcatcgctgattttgtaatcaacat

SEQ ID NO: 2471 - DNA, 363 bp, Glycine max
  Clone ID: LIB3072-018-Q1-E1-G9
gactttgagttcgaactaaacaattcaattcaatctgcctcgatcatggagaggaaaacatttgggtttttgttcttgctcctccttgtcttaacttctgatgtgacggtgaatagagcagaggcgaaagattgcttgacaaggaggcacaggttccagggtatatgcttattcgacaggcaatgtgcacatgtgtgcatgagcgatggtttcatcggtggtcagtgccgatgccctcttcgcaaatgcctttgcagcatgccatgttgatcgaaattactactgccaaagatgccatgaaatatacatacaatcagataaattaatatctctaaccgacacatatgtacgtaatgtccgggt

SEQ ID NO: 2472 - DNA, 185 bp, Glycine max
  Clone ID: LIB3072-019-Q1-E1-B11
aggggcacacaatagtctcgtcgcttaatcaagaaagaagggtacgggtgttagaagacgaacgagcgatactgcagcatcaaaaccttcgtagggttctgctgcgcatcatcaatcttcgggttcggctgctaaatcacaatagaagggtatcgctgctcaatgtccacacaggggtaccgctg

SEQ ID NO: 2473 - DNA, 357 bp, Glycine max
  Clone ID: LIB3072-019-Q1-E1-B12
gattcacacaactaactaacaaagtcttccatagccccccaaaaatgaagagcaccatcttctttgctctctttctcttttgtgccttcaccacctcatacctaccttcagccatcgctgatttcgtgctcgataatgaaggtaaccctcttgaaaatggtggcacatattatatcttgtcagacataacagcatttggtggaataagagcagccccaacgggaaatgaaagatgccctctcactgtggtgcaatctcgcaatgagctcgacaaagggattgggacaatcatctcgtccccatatcgaatccgttttatcgccgaaggccatcccttgagccttaagttcgaatcat

SEQ ID NO: 2474 - DNA, 138 bp, Glycine max
  Clone ID: LIB3072-018-Q1-E1-E8
gaaatagattttgaaaacagccacatagacaggcttccgtaactgcatcgtgtagtgaatgaatgtcgtcgcttacatcttccgagtcggtggcttgactctctcagggatatttccgctacatagttcattcgacaa

SEQ ID NO: 2475 - DNA, 199 bp, Glycine max
  Clone ID: LIB3072-018-Q1-E1-F1
ggaagagacgagtaaagaaataaaacaactaattggaaaaaaaaaaaaaaaaaccaaagcataagttaaatacggagtgagatcctcaatacagaagccaaattcgcaaactgactcgtgtagattccaaaaaattgcatatacacgtgtttaaatgcaactaagaaatttaggctttgggatgattgtcataatgaat

SEQ ID NO: 2476 - DNA, 231 bp, Glycine max
  Clone ID: LIB3072-018-Q1-E1-F10
ccactagggggggaagacgctactgagctgttttcaaactactatcatcttgtacatataccactgatttatgtcggggaggacttatgcagacgaacaatctgccatgaccgacgtatgctgtttccggtttcatcttgttatgatcgtgtcactcttctccattctcattctcattctctgtcgctcatcgctatcaatcacgtcctctcgcttagctgactgccatgt

SEQ ID NO: 2477 - DNA, 239 bp, Glycine max
  Clone ID: LIB3072-018-Q1-E1-F11
gatctcaatttcttttctctttgtcgcaaagagaagagatctgcctcctttttatcaaatctatctcttcttcaagaatagttgaaagtggggctgtctttcaccaagttgttcagccgactgtttgccaagaaagagatgcgtatactgatggtgggtcccgatgctgcgggtaagaccaccattctgttcaaactcaaacttggagagattgtcacaacatttccaccaatgggttt

SEQ ID NO: 2478 - DNA, 346 bp, Glycine max
  Clone ID: LIB3072-018-Q1-E1-F12
gacccaagagagagaaagacgctgctagagaagaagaatatggcgggtgctgctcggaaacaattgttcggattcggagttgtggcgatgctcgccactctcattcttgctctctttatgcccgccgctgttcaggcgcaatccgcatcccctgcacctgcacctactagcgacgggacctcccttgatcaagggatagcatatgtgttgatgctgctggctctggtactcacatacatcatccattcgccctaaatttcctccaccttctgaacttacagcagaaagggatatgggtgtttgatagggggttgttgtgtctgttatgattaacaagtttcgtaca

SEQ ID NO: 2479 - DNA, 394 bp, Glycine max
  Clone ID: LIB3072-018-Q1-E1-F2
ggcacaagtgagtttgttgatcgagataactagaaacagtgtgatgaaaatgaaggtccttgttttcttcgttgctacaattttggtagcatggcaatgccatgcgtacgatatgttccctctccgaatgaacactggctatggtgcccgtactccggaggtgaaatgcgcaagttggaggcttgctgtggaagcacacaacatctttggctttgagaccattcctgaagagtgcgttgaagcaacaaaggaatacatccatggcgaacaatatagatcagactccaaaacagttaaccaacaagcttacttttatgccagagacctcgaagtccatcccaaggacatatttgtgttcagtatagatggcaccgtactctctaatatccatact

SEQ ID NO: 2480 - DNA, 378 bp, Glycine max
  unsure at all n locations
  Clone ID: LIB3072-018-Q1-E1-F3
gacagcanaaacaattaataaagatgagtttgaagaacaacatggtggtgctaaaggtgtgtttgttgcttcttttccttgtgggggttacagctgcacgcatggaactgagcttcttcaaaagtgatcagtcatcaagttatgatgatgatgagtattcaaaaccatgctgtgatctctgcatgtgcacacgctcaatgcctcctcaatgcagctgtgaagatattaggctgaattcatgccactcagattgtaagagctgtatgtgcacacgctcacagccaggacagtgtcgttgtcttgacnacaacgacttctgctacaaaccttgcaagtccagagatgactagaaaaactaatagctctctcaaatggacg

SEQ ID NO: 2481 - DNA, 286 bp, Glycine max
  Clone ID: LIB3072-018-Q1-E1-F5
catccgtcaggaaggcagtaggctaccgacggggagaccactggcaatttataaagttgcgtttgacgatcaacatgttggtgctaaaggtgtgtttgttgcttcttttctctgtgggggttacatctgcacgcatggaactgagcttcttcactagtgcttagtcatccaattatgatgatgatgacttttctaaatcatgctgtgatctctgcatgtgcacacgctcaatgcctcctcaatgcaactgtgaatatattaggctgaattcatgccactcagattg

SEQ ID NO: 2482 - DNA, 384 bp, Glycine max
  Clone ID: LIB3072-018-Q1-E1-F7
ggttgattctgctattgatgaagatgcacaagagccttctgttgctgataaaaagaaagaaaagaaggacaagaagaaaaagaaggacaaaaaggaagaggatgcaactgtgcaagctgatggtgaggaaccagaacctgtagtagtgaaaaaagataagaagaagaaaaggaaggaaactgagagtgctgagttgcagaatgggaatgacgataatgcacgagagaagaagaaaaagagaaagaagcatggatagcaggaagaatctcctgaaatgccaagcaagaagaaaggcaaaaaaagaaaagtgaggactaaagtgaagtcatctactaatcaatcctgtggtgaatgacaaccatttttgtatactcctggcagctc

SEQ ID NO: 2483 - DNA, 424 bp, Glycine max
  Clone ID: LIB3072-018-Q1-E1-F8
gacagcaaaaacaattaataaagatgagtttgaagaacaacatggtggtgctaaaggtgtgtttgttgcttcttttccttgtgggggttacagctgcacgcatggaactgagcttcttcaaaagtgatcagtcatcaagttatgatgatgatgagtattcaaaaccatgctgtgatctctgcatgtgcacacgctcaatgcctcctcaatgcagctgtgaagatattaggctgaattcatgccactcagattgtaagagctgtatgtgcacacgctcacagccaggacagtgtcgttgtcttgacaccaacgacttctgctacaaaccttgcaagtccagagatgactagaacaactaatagctctctcaaatggacgaagcccctttaggctttggttgttaagttacggagacatataaaac

SEQ ID NO: 2484 - DNA, 438 bp, Glycine max
  unsure at all n locations
  Clone ID: LIB3072-018-Q1-E1-G1
ggtccgatatatccgggtgccgccacgcgtccgtaaagaagacgacagaagggggctgcagcttatcatcaccatcgcgcccaagagagagagagagggaggcgcgaaaatgagcggagcgaaggggaagaagaagggagcgagctttgtgatcgattgcgcgaagccggtggaggataaaattatggacattgcttctctggagaagttccttcaggagaggattaaggttggcggcaaggccggtgcactcggcgattccattactgtcactanggacaagagcaagatcaccgtcacctccgacagcaacttctctaaacggtatctgaaatatttgaccaagaagtacttgaaaaagcacaatgcgaaggattggcttcgcgtgattgcatccaacaaggagcggagtgtctatgaattgagatacttcaacat

SEQ ID NO: 2485 - DNA, 234 bp, Glycine max
  Clone ID: LIB3072-018-Q1-E1-G11
gacattacaaacattctctccattgtctttgaacactcatcaccatggtcaaccttgttcgttctctttgtttccttcttttcggtggttggctcgctctgagtgagcaggcttaccatagtgagtggcatatcgtattgctcaatgccctcaaaccggctaatcgtatacagtcggcatgcgggtgcattgagacttgggtcccttacagtacactattccactctttcggtg

SEQ ID NO: 2486 - DNA, 360 bp, Glycine max
  Clone ID: LIB3072-018-Q1-E1-G2
ggtgagacgagggtaaggtcgcgttgtgttgcgtcgtgtcgtgcgctgttcctctgtctgtcgtttttgttttcagaccaaaccctagctccgcatcgcaaccatgtcgaccaagcaaggtggaaaagctaagcctttgaagaaacccaagtctgataagaaggattacgacgaggttgacatggctaacattcagaagaaaaaggaagaggagaaggcgctaaaggagttgaaagccaaggcgcaacagaagggaagctttggaggttctgggctcaagaaaagtggaaagaaataagggctctttatcatgattgtatacatccaatattgagccctgtagtttattaccatgataac

SEQ ID NO: 2487 - DNA, 419 bp, Glycine max
  Clone ID: LIB3072-018-Q1-E1-G4
gacagcaaaaacaattaataaagatgagtttgaagaacaacatggtggtgctaaaggtgtgtttgttgcttcttttccttgtgggggttacagctgcacgcatggaactgagcttcttcaaaagtgatcagtcatcaagttatgatgatgatgagtattcaaaaccatgctgtgatctctgcatgtgcacacgctcaatgcctcctcaatgcagctgtgaagatattaggctgaattcatgccactcagattgtaagagctgtatgtgcacacgctcacagccaggacagtgtcgttgtcttgacaccaacgacttctgctacaaaccttgcaagtccagagatgactagaaaaactaatagctctctcaaatggacgaagcccctttaagctttgtttgttatgttaagggagacaaa

SEQ ID NO: 2488 - DNA, 418 bp, Glycine max
  Clone ID: LIB3072-018-Q1-E1-E6
gacaggtgtttgcaatactagcgatagctgataagagagataccaacaagaaaagaaaaaaagaagagttgagattccctttgaagaaaagatggcatcccataggcaaagctatgaagctggtcaaactaagggccgaactgaggaaaagacgaaccagacgatgggcaatattggagagaaggctcaagctgcaaaggagaagacccaggaaatggcccaagctgcaaaggagaagacccaacaaacagcccaagctgccaaggacaagacttgcgacacttcccaagcggcaaaggagaagacccaacagaatacaggagctgctcaacaaaagacctcagagatgggccagtccacgaaggaatcggcccagtcagggaatgacaaacaccaagggttcctgcagcagaccggg

SEQ ID NO: 2489 - DNA, 408 bp, Glycine max
  Clone ID: LIB3072-018-Q1-E1-G5
gctccaattatgagttactacaaccagcagcagccacccgtcggtgttcctcctccccaaggttacccaccgccggaatcttacggaaaggacgcgtaccctccgccagggtaccctccacagggaggataccctccgcaggcgtatccagcacaggggtaccctccaccctacgcgcctcctcagtacgctcagcctccgccgcaacaacaccagaattcatctggcccgggttgcttagaaggatgtttggctactctctgctgctgttgcctgttggatgcctgcttctgagaaagaaaagagaggttgctttgcacaaattggatttgaaactgtgttttgactttgaacatgaccattatcgctcttagtttttattattttctatgttgatttacatttcgt

SEQ ID NO: 2490 - DNA, 220 bp, Glycine max
  Clone ID: LIB3072-018-Q1-E1-C8
gacacttactattagtaagcatggagtcctcatatatcgatgcgcatctcttcctctgcatgatctttctctcttccgctactcccattcgaggttgcggccattgtggaattttccccaactctgtgactcttgctaattatattctatggacctattgtacccgttgttaagctatcattcaccatctcctcgcactaatgttcctcccgttgttctt

SEQ ID NO: 2491 - DNA, 323 bp, Glycine max
  Clone ID: LIB3072-018-Q1-E1-C9
gagattccttttgacagcttcctccaatttctttttttggtctccttctcttcataggactaaaaaccatgcagtttactcttttcactggtgcttcctgggacttcctttgaacatgtctaaactaccttaacccattttttttaccacacatctattttagcattttcatttctaccgctctcacatttttaatgcccaacatctagtattatagagtacaggcagatatgatgtaacagtaaaataaaatttgcctgagcttggtaggtaataataggtattttgtgatcataaatcctttcttcattttagctgctaag

SEQ ID NO: 2492 - DNA, 407 bp, Glycine max
  Clone ID: LIB3072-018-Q1-E1-D1
gattcacacaactaactaagaaagtcttccatagccccccaaaaatgaagagcaccatcttctttgctctctttctcttttgtaccttcaccacctcatacctaccttcagccatcgctgatttcgtgctcgataatgaaggtaaccctcttgaaaatggtggcacatattatatcttgtcagacataacagcatttggtggaataagagcagccccaacgggaaatgaaagatgccctctcactgtggtgcaatctcgcaatgagctcgacaaagggattggaacaatcacctcgtccccatatcgaatccgttttatcgccgaaggccatcctttgaggcttaagttcgattcatttgcagttataatgctgtgtgttggattccctacgagtggtctgttgtgg

SEQ ID NO: 2493 - DNA, 418 bp, Glycine max
  Clone ID: LIB3072-018-Q1-E1-D10
ggaataattaagaaaagccatttccatagcagcctaagaaaatgaagagcactagcttgttcgctatctttctactttgcgccttcacctcatacctaccttccgccaccgcccaggacgtgctcgacgtggatggcgatccgattcggaacggtttcatatactacgttttgccggcaataagaggaaacggtggcggaatagaacgagccgcactcgggaaagacacttgccctatcactgtagtgcaatctcccaatccaaactctaaggggttagaaattaagtttgaatctgcataccccgcctattacataaacgaaaccctaattttgcaaataaagttcagttacccacagcagtgtgaaggaaagaatccttggtgggccatttctaaagatatatctgaaggaccacc

SEQ ID NO: 2494 - DNA, 406 bp, Glycine max
  unsure at all n locations
  Clone ID: LIB3072-018-Q1-E1-D11
gacagcanaaacaattaataaagatgagtttgaagaacaacatggtggtgctaaaggtgtgtttgttgcttcttttccttgtgggggttacagctgcacgcatggaactgagcttcttcaaaagtgatcagtcatcaatttataataatgatgattattcaaaacaatgcggtgttccctgcatttgcacacgctcaatgcttcctcaatgcacctgtaaaaatattaggctgaattcatgccactcaaattgtaaaacctgtatttgcaaacgctcacagccagaacattgtcgttgtcttgacaccaacgacttctgctacaaaccttgcaattccagagatgactagaaaacctaatacccctctcaaatggacgaagccccttttaggctttgtttgttaag

SEQ ID NO: 2495 - DNA, 358 bp, Glycine max
  Clone ID: LIB3072-018-Q1-E1-D12
gacagcaaaaacaattaataaagatgagcttgaagaacaacatggtggtgctaaaggtgtgtttgttgcttcttttccttgtgggggttacagctgcacgcatggaactgagcttcttcaaaagtgatcagtcatcaagttatgatgatgatgagtattcaaaaccatgctgtgatctctgcatgtgcacacgctcaatgcctcctcaatgcagctgtgaagatattaggctgaattcatgccactcagattgtaagagctgtatgtgcacacgctcacagccaggacagtgtcgttgtcttgacaccaacgacttctgctacaaaccttgcaagtccagagatgactagaaaaacta

SEQ ID NO: 2496 - DNA, 377 bp, Glycine max
  Clone ID: LIB3072-018-Q1-E1-D3
gacagcaaaaacaattaataaagatgagtttgaagaacaacatggtggtgctaaaggtgtgtttgttgcttcttttccttgtgggggttacagctgcacgcatggaactgagcttcttcaaaagtgatcagtcatcaagttatgatgatgatgagtattcaaaaccatgctgtgatctctgcatgtgcacacgctcaatgcctcctcaatgcagctgtgaagatattaggctgaattcatgccacccagattgtaagagctgtatgtgcacacgctcacagccaggacagtgtcgttgtcctgacaccaacgacttctgctacaaaccttgcaagtccagagatgactagaaaaactaatagctctctcaaatggac

SEQ ID NO: 2497 - DNA, 379 bp, Glycine max
  Clone ID: LIB3072-018-Q1-E1-D4
gattcacacaactaactaagaaagtcttccatagccccccaaaaatgaagagcaccatcttctttgctctctttctcttttgtgccttcaccacctcatacctaccttcagccatcgctgatttcgtgctcgataatgaaggtaaccctcttgaaaatggtggcacatattatatcttgtcagacataacagcatttggtggaataagagcagccccaacgggaaatgaaagatgccctctcactgtggtgcaatctcgcaatgagctcgacaaagggattggaacaatcatctcgtccccatatcgaatccgttttatcgccgaaggccatcctttgagccttaagttcgattcatttgcagttataatgctgtgtgt

SEQ ID NO: 2498 - DNA, 404 bp, Glycine max
  Clone ID: LIB3072-018-Q1-E1-D5
gacagcaaaaacaattaataaagatgagtttgaagaacaacatggtggtgctaaaggtgtgtttgttgcttcttttccttgtgggggttacagctgcacgcatggaactgagcttcttcaaaagtgatcagtcatcaagttatgatgatgatgagtattcaaaaccatgctgtgatctctgcatgtgcacacgctcaatgcctcctcaatgcagctgtgaagatattaggctgaattcatgccactcagattgtaagagctgtatgtgcacacgctcacagccaggacagtgtcgttgtcttgacaccaacgacttctgctacaaaccttgcaagtccagagatgactagaaaaactaatagctctctcaaatggacgaagcccctttaagctttgtttgttat

SEQ ID NO: 2499 - DNA, 436 bp, Glycine max
  Clone ID: LIB3072-018-Q1-E1-D7
gattcatgcaactgaataattaagaaaagccatttccatagcagcctaagaaaatgaagagcactagcttgttcgctatctttctactttgcgccttcacctcatacctaccttccgccaccgcccaggacgtgctcgacgtggatggcgatccgattcggaacggtttcatatactacgttttgccggcaataagaggaaacggtggcggaatagaacgagccgcactcgggaaagacacttgccctatcactgtagtgcaatctcccaatccaaactctaaggggttagaaattaagtttgaatctgcataccccgcctattacataaacgaaaccctaattttgcaaataaagttcagttacccacagcagtgtgaaagaaagaatccttggtgggccatttctaaggatatatctgaaggaccacctgctat

SEQ ID NO: 2500 - DNA, 436 bp, Glycine max
  Clone ID: LIB3072-018-Q1-E1-D9
ggcacaagtgagtttgttgatcgagataactagaaacagtgtgatgaaaatgaaggtccttgttttcttcgttgctacaattttggtagcatggcaatgccatgcgtacgatatgttccctctccgaatgaacactggctatggtgcccgtactccggaggtgaaatgcgcaagttggaggcttgctgtggaagcacacaacatctttggctttgagaccattcctgaagagtgcgttgaagcaacaaaggaatacatccatggcgaacaatatagatcagactccaaaacagttaaccaacaagcttacttttatgccagagacctcgaagtccatcccaaggacacatttgtgttcagtatagatggcaccgtactctctaatattccatactacataaaacatggataatggggtggagaaatttaactcgac

SEQ ID NO: 2501 - DNA, 434 bp, Glycine max
  Clone ID: LIB3072-018-Q1-E1-E10
gacaacgcatcctaaataagcatcttaattcatagtctcttggtccttccttccttcttctgctcaataagtgtgtgccactctaattaattaccacccccttctagacatagttcttctccctctgttctccattctctacactgtgaaaccaagatgaaggtagcatttgcagctgttctacttatataccttgtcctcagctcctccttgttcgaggtgtcaatggctggttctgctttctgttcctccaagtgctcgaagaggtgttctagagctgggatgaaggacaggtgcatgaagttctgcgggatttgctgcagcaagtgcaactgtgtgccatctgggacttatgggaacaagcatgagtgcccttgctacagagacatgaagaactccaagggcaaggccaaatgcccttgaataattttttt

SEQ ID NO: 2502 - DNA, 420 bp, Glycine max
  Clone ID: LIB3072-018-Q1-E1-C6
gggtggagagaggggcactgactcacacccacaatagtcgggggcagcttcaaagtacctccacattgtctcctactcttactgttctcttctcttctcatcatttttattttttccaatcaaaccaaacataacataagcaccgctcttttctctccgaaatccccatctcccttcacttctgagctctggacgagatcccagatctcaccatctttcacgcactcttccatcagattcaccctttcgtttaacgcaaactcataacttgaaggttaatggctgctccaccggcaagggctcgtgccgattacgattatctcataaagcttctcttgatccgtgacagcggtgttgggaaaagttgcctccttctgcgtttctcccatggttcttttcacactagtttcatcacaacta

SEQ ID NO: 2503 - DNA, 213 bp, Glycine max
  Clone ID: LIB3072-018-Q1-E1-E11
gacagcacaaacaattaataaagatgagtttgaagaacaacatggtggtgctaaaggtgtgtttgttgcttcttttccttgtgggggttacagttgcacgcatggaactgagcttcttcaaaagtgatcagtcatcaagttatgatgatgatgagtattcaaaaccatgctgtgatctccgcatgtgcacacgctcaatgactctttaatgca

SEQ ID NO: 2504 - DNA, 60 bp, Glycine max
  Clone ID: LIB3072-018-Q1-E1-E2
gcgtccgtaaggaagccagtagaggagagaaggggacacataatggtgatcatcattagc

SEQ ID NO: 2505 - DNA, 384 bp, Glycine max
  Clone ID: LIB3072-018-Q1-E1-E4
ggcactcattctttcattctcattgccgtcacagagagagacaagaaacaatgaagtttaaccctagggtttcctcaagccgtcgcaagagccgcaaggctcacttcaccgctccgtcgagcgtgcgccgcatcctgatgagcgcgcctctctccaccgatctccggccaaagtccaacgtgcggtccattccggttcgcaaggacgacgaggttcaagtcgtgaggggaacctgcaagggccgcgagggcaaagtggtccaggtctatcgccgcaagtgggtcatccacatcgagcgcatcacccgcgagaaggttaacggctccaccgttaacgttggcattcacccttccaaggttgtcggtcacaagctccgaatggaca

SEQ ID NO: 2506 - DNA, 334 bp, Glycine max
  Clone ID: LIB3072-018-Q1-E1-B1
cagatgactgcgatggaattgcttgaacagtacatgcaattcaaacacgaggcagaaaaagatggcaagaagaacaagaaagacaaggatccattgataccaaagcaccccatgtcagcttatttcttgttcactaatgataggcgagcagctcttgctgccgagaacaagaatttcttggaggttccaaaaatcacatccgaagagtggaaaagcatgacagaagaacagaatagaccctatgaagagatggcatagaaaaataaggagcaatatgccctagaaatggacgcttataaacagaacaaagatgatgatgctgcccatttcatga

SEQ ID NO: 2507 - DNA, 343 bp, Glycine max
  Clone ID: LIB3072-018-Q1-E1-B10
cttccagaacgacagaagggggcaatgggaaggatagggggtcagagtgagaaagagaaagagagaattcgtaaaccctaagttcgggacatcggcgatcactgcctcgggggatcgccagaacttcgtctacatcgccaaactcgccgaacacgccgagcgttacgaagagatggtggaatcaatgaagaaccgttgcgaatctcgacgttgaactgaccgtggaggagcggaatttgccttctgttgggtacaagaatgtaattggtgctcgcagaccgtcctggaggatcctgtcttccattgagcagaacgcataaacaccagggaacgacttgaatgc

SEQ ID NO: 2508 - DNA, 324 bp, Glycine max
  Clone ID: LIB3072-018-Q1-E1-B12
gattcacacaactaactaagaaagtcttccatagccccccaaaaatgaagagcaccatcttctttgctctctttctcttttgtgccttcacgacctcatacctaccttcagccatcgctgatttcgtgctcgataatgaaggtaaccctcttgaaaatggcggcacatattatatcttgtcagacataacagcatttggtggaataagagcagccccaacgggaaatgaaagatgccctctcactgtggtgcaatctcgcaatgagctcgacaaagggattggaacaatcatctcgtccccatatcgaatccgttttatcgccg

SEQ ID NO: 2509 - DNA, 92 bp, Glycine max
  Clone ID: LIB3072-018-Q1-E1-B2
cggtccgagaaatccggggcgcagcacgcgtccgcccacgagtccgagacgacagaaggggaaaataaaaaaagaaagatagcaagagagag

SEQ ID NO: 2510 - DNA, 420 bp, Glycine max
  Clone ID: LIB3072-018-Q1-E1-B4
gacagcaaaaacaattaataaagatgagtttgaagaacaacatggtggtgctaaaggtgtgtttgttgcttcttttccttgtgggggttacagctgcacgcatggaactgagcttcttcaaaagtgatcagtcatcaagttatgatgatgatgagtattcaaaaccatgctgtgatctctgcatgtgcacacgctcaatgcctcctcaatgcagctgtgaagatattacgctgaattcatgccactcagattgtaagagctgtatgtgcacacgctcacagccaggacagtgtcgttgtcttgacaccaacgacttctgctacaaaccttgcaagtccagagatgactagaaaaactaatagctctctcaaatggacgaagccccttaagccttgtttgttatgttaggggagacaaata

SEQ ID NO: 2511 - DNA, 245 bp, Glycine max
  Clone ID: LIB3072-018-Q1-E1-B6
gaacgaaaaagagaacaaaaaccagaaaccctttccccgtgaaaacatctacctcaaacctcaaaccctcatcactctcattcattcatcatactaatcctcgttcctttcacttttctatataccccaaagcaaaaaaagaaaaaaaagtcacataaacctcacttcctcaacctcaatccaacacaacaacaaaaaaaatcaaaaacaaaaaacctcactttgatcacacagatcacacacac

SEQ ID NO: 2512 - DNA, 406 bp, Glycine max
  unsure at all n locations
  Clone ID: LIB3072-018-Q1-E1-B7
gattcacacaactaactaagaaagtcttccatagccccccaaaaatgaagagcaccatcttctttgctctctttctcttttgtgccttcaccacctcatacctaccttcagccatcgctgatttcgtgctcgataatgaaggtaaccctcttgaaaatggtggcacatattatatcttgtcagacataacagcatttggtggaataagagcagccccaacgggaaatgaaagatgccctctcactgtggtgcaatctcgcaatgagctcgacaaagggattggaacaatcatctcgtcnccatatcgaatccgttttatcgccgaaggccatcctttgagccttaagttcgattcatttgcagttataatgctgtgtgttggaattcctaccgagtggtctgttgt

SEQ ID NO: 2513 - DNA, 398 bp, Glycine max
  Clone ID: LIB3072-018-Q1-E1-B8
gactctgctcaatttgtgagattccaaagcaattctttgctgccaacacaatggattcaagagcttacatccttagagtcaccattgcaattctttgcatctcaatgctagcttccactcttttccctgtgtgtgatgctataaatcatggaagagcaataaggggtcacaaaatccgtagaagctccccaatcaaatctttaaagaaactgaaaataaaatctttaagacatttaaacaagtacacaccatttgattcatttgggtactcagactttgattcatatgggtactcaaactttgatgattcatatggctctccctcttccctacccttatcacctttcaattcactagcaacacatccacaacctacaacatcaagtttcattgctcct

SEQ ID NO: 2514 - DNA, 322 bp, Glycine max
  Clone ID: LIB3072-018-Q1-E1-C1
cgcgtcagtaaggcactagacgacagcaggggggagcacgctagacatttggaaattcctcctctgcgtaacatcatggtggtgcacaccgtatgtttgttgcttcatttccttcaagcgatcagtgttgcactcatcgcacgtacctccttcacgtctgatctcatcatcatcttattatgatgatgtactctcttagctatgccatgatgtcttcacatgcacacgcccactccctcctctttgctcctgtgataatattacgccgagcttcaagctaatcacatcgtcccagctgtcagtgctcacgctcatgtccagg

SEQ ID NO: 2515 - DNA, 351 bp, Glycine max
  Clone ID: LIB3072-018-Q1-E1-C10
gacagcaaaaacaattaataaagatgagtttgaagaacaacatggtggtgctaaaggtgtgtttgttgcttcttttccttgtgggggttacagctgcacgcatggaactgagcttcttcaaaagtgatcagtcatcaagttatgatgatgatgagtattcaaaaccatgctgtgatctctgcatgtgcacacgctcaatgcctcctcaatgcagctgtgaagatattaggctgaattcatgccactcagattgtaagagctgtatgtgcacacgctcacagccaggacagtgtcgttgtcttgacaccaacgacttctgctacaaaccttgcaagtcgggggatgactaga

SEQ ID NO: 2516 - DNA, 391 bp, Glycine max
  Clone ID: LIB3072-018-Q1-E1-C11
ggagagaaggggcatatcaaaatcaattttttttctttcttcttttccctgaagagcaaatgggggcgtatagagctgatgaggattacgattatttgttcaaggtggtactgattggggactctggtgtgggaaaatcgaaccttttgtcgaggttcaccaagaacgaattcagccttgaatcaaagtccaccattggggttgagtttgccaccagaagcattagggttgatgataaagttctcaaggctcagatttgggacgctgctggccaagaaaggtatcgagcaatcactagtgcatattatcgcggagctgttggtgctttattagtctatgatgttacccgccatgttacatttgaaaatgtggagagatggttgaaggagct

SEQ ID NO: 2517 - DNA, 372 bp, Glycine max
  unsure at all n locations
  Clone ID: LIB3072-018-Q1-E1-C12
gacagcanaaacaattaataaagatgagtttgaagaacaacatggtggtgctaaaggtgtgtttgttgcttcttttccttgtgggggttacagctgcacgcatggaactgagcttcttcaaaagtgaccagtcatcaagttatgatgatgatgagtattcaaaaccatgctgtgatctctgcatgtgcacacgctcaatgcctcctcaatgcagctgtgaagatattaggctgaattcatgccactcagattgtaagagctgtatgtgcacacgttcacagccaggacagtgtcgttgtcttgacaccaacgacttctgctacaaaccttgcaagtccagagatgactagaanaactaatagctctctcaaa

SEQ ID NO: 2518 - DNA, 291 bp, Glycine max
  Clone ID: LIB3072-018-Q1-E1-C2
aggaggataaaagggaatgagcgcttaagagctttttattaaccgcacttgcactgtttttacagctgtgttccgcaacccttcacgagaagtgttgtaaaattttgttcatttgtaccagaatagttagaatacgttttattgtgtatggaattactgtataacaagtattgtccatgccgatgatccaatttgctatcctattttttccctcacccttgtggacttcgaaatcttttcgattgttggattagtatgtgtgtataattaaaaaaagaacagtgaagtcgc

SEQ ID NO: 2519 - DNA, 418 bp, Glycine max
  unsure at all n locations
  Clone ID: LIB3072-018-Q1-E1-C3
gggagcaagctagaagttgggaagttcctcctccgctaacgtagtaggaaggaacacgacaggtagaacacagaatggtgctcatgcgaactgtgtacccaaccatcgctgttcctcttcctcttcctctttcaaaccttcccgttaggaccaatttcgccgttcgatgtgccaacgttcactcgcaaacgcaactcgactcgcgcaagttggttcttgccgtgaaggaaaagcttgaaaaagaacaccataacctccctgttggcagaaatggaagagatgatgaagatatgatactgtggtttctcaaagatcgcaagttttctattgatgatgctatttacaagttgactaaagccattaaatggcgtcgagattttgaggtgtctaaattaactgaagaagtcgttanagatgc

SEQ ID NO: 2520 - DNA, 408 bp, Glycine max
  unsure at all n locations
  Clone ID: LIB3072-018-Q1-E1-C4
gaggtgaaggaaaaaaaaaaaaaatcaaaagtggataatggcttcgttatcgctttgcatagccatgacagcacccactccctcagcttctctcattctcactgccccaaaaccatcttcgctctctttgaaccttacccgcacttgctccaccgctcgctctccgcttctccattgctccttcctctcttctccttcccttctctctcccccttcctccatttcaggcttgtcacttggattggatttgacatctaattttgggaccagaagaggaaaaggttctggccttgttgtgagggcangcaaggccgctctttgcctgactaagagaagcagatcaaganaatcattggcacgcactcatggtttccgcaaaagaatgagcacaccaagtgggaaaactgt

SEQ ID NO: 2521 - DNA, 416 bp, Glycine max
  Clone ID: LIB3072-018-Q1-E1-C5
gacagcaaaaacaattaataaagatgagtttgaagaacaacatggtggtgctaaaggtgtgtttgttgcttcttttccttgtgggggttacagctgcacgcatgggactgagcttcttcaaaagtgatcagtcatcaagttatgatgatgatgagtattcaaaaccatgctgtgatctctgcatgtgcacacgctcaatgcctcctcaatgcagctgtgaagatattaggctgaattcatgccactcagattgtaagagctgtatgtgcacacgctcacagccaggacagtgtcgttgtcttgacaccaacgacttctgctacaaaccttgcaagtccagagatgactagaaaaactaatagctctctcaaatggacgaagcccctttaggctttgtttgttacgttaagggagac

SEQ ID NO: 2522 - DNA, 388 bp, Glycine max
  unsure at all n locations
  Clone ID: LIB3072-017-Q1-E1-H11
gggaatctagcaactaccaaaaccaatctctttcaataatcaacaacaatgacaaacttgaagcctctaattctcttcttttatctcctagccattgttgttatgatttcaataccatcaagccactgcagcagaaccttgcttccagaaaacgaaaagctgatagagaacacttgcaagaaaactcccaactacaacgtttgccttgagtctctgaaggcaagccctgggagctccagtgctgacgtcacagggctggctcaaatcatggtcaaagagatgaaggccaaagcaaacgatgcattgaaaagaatccaagagttgcagagggtgggagcatcggggcctaagcanagaagagccttgagttcntgtgctgatanataca

SEQ ID NO: 2523 - DNA, 309 bp, Glycine max
  Clone ID: LIB3072-017-Q1-E1-H12
gactccaataacaaatccttcacttgttgctcgtcttagtttctgtgttgtgtcatttttattgctatatcctaattaaacttcaccctcaaaatgagtgatcccacactagcacaaccacacctagtcgaagtccacacaacactcgaaaccgttgttaccacgcacaaccataaccatagaccctcaataaatgtgtgttactgaatatttaattatttgtacacctgaccatgattaatatttaattcttcaactttgtttatgcatgaccgtgactaatttttaattctttccctatgattgaga

SEQ ID NO: 2524 - DNA, 364 bp, Glycine max
  Clone ID: LIB3072-017-Q1-E1-H3
ggccgaggaaaagaaagaaatagatgaagaagataaatgcacagcgtcctagatttcctcttctctgcttcggaagaaagagaaaacagacactacaatggcgttcgcctcattcctcggtagagtcctcttcgcttctgtcttcatactctctgcttatcaacaatttaatgaatatggagttgatgggggacctgctacaaaagcactcagacctaagtttgatgcctttacacatcgggtgcattctcaagtgggctttcaaattccagagattaatctgaaatttttaattgctggggctaatgctctgaagggtcttggaagggttcttttcatatttgggagctcttttggagctttg

SEQ ID NO: 2525 - DNA, 437 bp, Glycine max
  Clone ID: LIB3072-017-Q1-E1-H5
cgcgtccataaagctgtcagacgacagcaggggattcacacaacgaggtaagaaggtcgtccatagccccccaaaaatgaagagcaccatcgtctttgctctcgttctcttttgtgccttcaccacctcatacctaccttcagccatcgctgatttcgtgctcgataatgaaggtaatcctcttgaaaatggtggcacatattatatcttgtcagacataacagcatttggtggaataagagcagccccaacgggaaatgagagatgccctctcactgtggtgcaatctcgcaatgagctcgataaacggattggaacaatcatctcgtccccatatcgaatccgttttatcgccgaaggccatcctttgagccttaagttcgattcatttgcagttaaaatgccgtgtgttgggactcctaacgagtggtccgttg

SEQ ID NO: 2526 - DNA, 424 bp, Glycine max
  Clone ID: LIB3072-017-Q1-E1-H6
gacagcaaaaacaattaataaagatgagtttgaagaacaacatggtggtgctaaaggtgtgtttgttgcttcttttccttgtgggggttacagctgcacgcatggaaccgagcttcttcaaaagtgatcagtcatcaagttatgatgatgatgagtattcaaaaccatgctgtgatctctgcatgtgcacacgctcaatgcctcctcaatgcagctgtgaagatattaggctgaattcatgccactcagattgtaagagctgtatgtgcacacgctcacagccaggacagtgtcgttgtcttgacaccaacgacttctgctacaaaccttgcaagtccagagatgactagaaaaactaatagctctctcaaatggacgaagcccctttaggctttgtttgttatgttaagggagaacaaataaa

SEQ ID NO: 2527 - DNA, 391 bp, Glycine max
  Clone ID: LIB3072-017-Q1-E1-H7
gatggggagttataaaaacaacgaagcctgatagacacaagagatggattgcagggtgcagatgagaatttcgctgcgcaggatacttcagattctccgagtccttacgtactcaaactctgccaagagaacctcgcttgcgaagagtaccgttctacgcttagacaagctacagctcgcactggaaactgtcaagagacaatatgacaacctattagccacgagaagagagtgcgttaggctattgagccatgtcaaagagagcaaggatgtcagaatagagaaggtaagggcaggaacttttatggtgagggtcacatgtgagaaagggggtgacaatctggttgctatattaaatgcatttgatgagatgttcctggatgttcaacaa

SEQ ID NO: 2528 - DNA, 98 bp, Glycine max
  Clone ID: LIB3072-017-Q1-E1-H8
atcaaaaaaaaaaaaaaaaaaaaaaaaaaaaaaaaaaaaaaaaaaaaaaaaacaaaaaaaaacaaaattaaaaaaaaatatacataaaaccccaaaac

SEQ ID NO: 2529 - DNA, 369 bp, Glycine max
  unsure at all n locations
  Clone ID: LIB3072-018-Q1-E1-A1
gacagcagaaacaattaataaagatgagtttgaagaacaacatggtggtgctaaaggtgtgtttgttgcttcttttccttgtgggggttacagctgcacgcatggaactgagcttcttcaaaagtgatcagtcatcaagttatgatgatgatgagtattcaaaaccatgctgtgatctctgcatgtgcacacgctcaatgcctcctcaatgcagctgtgaagatattatgctgaattcatgccactcagattgtaagatctgtatgtgcacacgctcacagccaagacagtgtcgttgtcatgacaccaacgacttctgctacaaaccttgcaactcganagattactagaacaactaataactctctc

SEQ ID NO: 2530 - DNA, 377 bp, Glycine max
  unsure at all n locations
  Clone ID: LIB3072-018-Q1-E1-A10
gctcgccgctttgtgctgctgctgctgcaaaacctaaggttgagccttttgctcaggttttcagcgcttctttcttacaatggttctacagaacgatattgatttgctgaatcctccagctgagttggagaagagaaagcacaagctcaagcgtcttgtgcagtcaccaaactctttcttcatggacgttaagtgccagggctgcttcaacataacaactgtgtttagccactctcagactgttgtggtttgcggaaactgccagactgtgttgcgccaaccaacaagcggacgggcaaggttaaccgaagggtgctcttttangaagaagggagattgaatggtttgttaaccagacttttctttgtcaatgattg

SEQ ID NO: 2531 - DNA, 392 bp, Glycine max
  Clone ID: LIB3072-018-Q1-E1-A11
gacagcaaaaacaattaataaagatgagtttgaagaacaacatggtggtgctaaaggtgtgtttgttgcttcttttccttgtgggggttacagctgcacgcatggaactgagcttcttcaaaagtgatcagtcatcaagttatgatgatgagtattcaaaaccatgctgtgatctctgcatgtgcacacgctcaatgcctcctcaatgcagctgtgaagatattaggctgaattcatgccactcagattgtaagagctgtatgtgcacacgctcacagccaggacagtgtcgttgtcttgacaccaacgacttctgctacaaaccttgcaagtccagagatgactagaaaaactaatagctctctcaaatggacgaagccctttaagctttg

SEQ ID NO: 2532 - DNA, 368 bp, Glycine max
  unsure at all n locations
  Clone ID: LIB3072-018-Q1-E1-A3
gacagcanaaacaattaataaagatgagtttgaagaacaacatggtggtgctaaaggtgtgtttgttgcttcttttccttgtgggggttacagctgcacgcatggaactgagcttcttcaaaagtgatcagtcatcaagttatgatgatgatgagtattcaaaaccatgctgtgatctctgcatgtgcacacgctcaatgcctcctcaatgcagctgtgaagatattaggctgaattcatgccactcagattgtaagagctgtatgtgcacacgctcacagccaggacagtgtcgttgtcttgacaccaacgacttctgctacaaaccttgcaagtccagagatgactagaaaaactaatagctctct

SEQ ID NO: 2533 - DNA, 404 bp, Glycine max
  unsure at all n locations
  Clone ID: LIB3072-018-Q1-E1-A4
gacagcaaaaacaattaataaagatgagtttgaagaacaacatggtggtgctaaaggtgtgtttgttgcttcttttccttgtgggggttacagctgcacgcatggaactgagcttcttcaaaagtgatcagccatcaagttatgatgatgatgagtattcaaaaccatgctgtgatctctgcatgtgcacacgctcaatgcctcctcaatgcagctgtgaagatattaggctgaattcatgccactcagattgtaagagctgtatgtgcacacgctcacagccaggacagtgtcgttgtcttgacaccaacgacttctgctacaaaccttgcaagtccagagatgactagaaaaactaatagctctctcaaatggacgaagcncctttaggctttgtttgttat

SEQ ID NO: 2534 - DNA, 399 bp, Glycine max
  Clone ID: LIB3072-018-Q1-E1-A5
gaggttttagtctattctctaatctctcgcttcacaattcacatggctctggaagcttacgcagcagcaaaccctgacaaaatccacacagatgtcctcaccaaagctagggattcttgttacaaggctcgtgatgcgttctatgcctgcctggagaaggaatcggacaagaagcccacagagattgcatctgtgggtttgttatacccattagaatgcaaagagtgcaggaatgaatatgtcaaacagtgccgatcttcttgggtgaaacatttcgataggcaatactgccagaacaagagggttcagagacttttggatgacaaagggtcccggagaagtccgttgacgctcccacagccttacactttcaaacccattgcttgaattttatcaata

SEQ ID NO: 2535 - DNA, 384 bp, Glycine max
  Clone ID: LIB3072-018-Q1-E1-A7
gatagctgagagagaaaggaaaggttaactaagaagcaatacttcaatggccacccttgttgttcataaccaaacttcttctgctcaagatgctgaggctctccaacaggctttcaaaggatggggggctgatgacaaggccattatagcaatactgggtcacagaaatgttcatcagaggcaagaaatcagaaaagcttatgaggagatttaccaagagaatctcatcaaacgccttgagtccgagatctctggtgactttgagagagctatgtaccggtggatgttgcagcctgcggatcgtgatgctgttttggtgaatgtggcaatcaagaatggcaccaaagactaccatgtgattgcagagattgcttgtgtcctatc

SEQ ID NO: 2536 - DNA, 410 bp, Glycine max
  Clone ID: LIB3072-018-Q1-E1-A8
ggtgacagaacagcagaagggaagaagatggacttactggagttatgggcaattttcggccccggcgtcgccggcgctgtcttcggcgccggatggtggatctggcttgacgcggtcgtctgcagcttggtcaccgttcctttccttcactaccttcccggaattttcgcatcttttgcggctttgatgttcaattgcgttagaaaagaagacatcgattattctccatatgacgaaggcgagtggagactgaagctgtggctcttcattgcatatgttgtatcctttgtttctttagctggatcagctggcctactgatccaagattcacttgataaatctgccccttcagtttggactggagttgcaggtgttttgcagtgtgtttttgtcctgatcagtggactggt

SEQ ID NO: 2537 - DNA, 411 bp, Glycine max
  Clone ID: LIB3072-017-Q1-E1-E7
ggttctcctacagattcttcagcaactgcgattttggatcggaacctcttctgcggcgtagcaatgggacactccaacgtttggaattctcacccaaaaaactacggtcctggttctcgcacttgcccaatgtgttggaaaccacaatggatgattaaggaattatggccttatttgctgaaggcattgcttccttaccaatgcaaaggaaattggcttcatcaagtatcgctaaaagagctgttgtcacctacggaccaatattatgttctggcactaggatgttttgaagatgttatgtttgaagaaacttgagacttgtttttttcatcaattttattatcagacataatgtgtggaacgaagaaaacttttataaaaattgttttgcacaaaaaaaaggttcaaggg

SEQ ID NO: 2538 - DNA, 307 bp, Glycine max
  Clone ID: LIB3072-017-Q1-E1-F1
tgcttcatttccttgtgggggttacagctgcacgcatggatctgagcttcttcaaaagtgatcagtcatcaagttatgatgatgatgagtattcaaaatcatgctgtgatctctgcatgtgcacacgctcaatgcctcctcaatgcagctgtgacaatattaggctgaattcaagccactcagattgtaagagctgtatgtgcacacgctcacaggcagtacagtgtcgttgtcctgacaccaaacacttcagctacaaaccttgcaaatccaaagatgactaaaaaaacttataactctctcaaat

SEQ ID NO: 2539 - DNA, 324 bp, Glycine max
  Clone ID: LIB3072-017-Q1-E1-F11
ccacgcgtccgtcagggcgtccgtcgggtgctaggtatcgacaaaaaggtaaggctgctaatagaccatattaaggtactgatgctataatatgatgagagggttctgctgattaaagtcgactggtatggtttgtcctgaaaacactatctatcggtattggtactacttaatgatattaggggaccgtctgtcataagaatatactccgaggttgcaatatctataaagtatcccactatcaataggtattgccattcacttcgctggctccttatcgtacaactcttcaatgatttctcataatgtcaatttcctcgactt

SEQ ID NO: 2540 - DNA, 401 bp, Glycine max
  Clone ID: LIB3072-017-Q1-E1-F2
gacatccaattcactcaaactcagtaatggctctgcaggaaggagggtggcctttgggtttgagactattcaatgaaagaattgggttagcaagaaatggtgatttctctggatcagtctccttcagcactatgctcactgcttctcccacccgttcaactgattcttcctcagatcttgacacacagtccactggatcattcttccgcgataagagcatcactcttggcagccttattggtatttctagcttcctagaactatcaaggagatcaaccaggggaagaatattggtggaaccctcaaaggacaacaaaaagattaacaagctgaggccttggttgttctcactttgttcaatgctatctactgatgcagtgagtgtgaatgttgctccctct

SEQ ID NO: 2541 - DNA, 347 bp, Glycine max
  Clone ID: LIB3072-017-Q1-E1-F3
ggcaacaagaatttatcatttatacaaaactttgagataggttgcaaaggcttagagaagagttatggctaaaagtgagatgaaattcattggagtagtgattctgatgatgattatagtgggctctacacaagctgataacaacagccctgacttgactgggtgtgaagttaaatgtggtttcaaatgcatagcatatttctatagtaaaaaaaaatttgacgaatgttgtctcccttgtattcgaaaatgtcatcatgaaatgtccattgatgttgtccatgattgcattactggttgccgcttaaccaagtccattgatgacaacattgatgcccgtgttctta

SEQ ID NO: 2542 - DNA, 386 bp, Glycine max
  Clone ID: LIB3072-017-Q1-E1-F4
gatgcaactgaataattaagaaaagccatttccatagcagcctaagaaaatgaagagcactagcttgttcgctatctttctactttgcgccttcacctcatacctaccttccgccaccgcccaggacgtgctcgacgtggatggcgatccgattcggaacggtttcatatactacgttttgccggcaataagaggaaacggtggcggaatagaacgagccgcactcgggaaagacacttgccctatcactgtagtgcaatctcccaatccaaactctaaggggttagaaattaagtttgaatctgcataccccgcctattacataaacgaaaccctaattttgcaaataaagttcagttacccacagcagtgtgaaagaaagaatc

SEQ ID NO: 2543 - DNA, 406 bp, Glycine max
  Clone ID: LIB3072-017-Q1-E1-F8
caagaaaaacgttgtaacctctcactagtctatctaaggattggggtgtgaaaaaaaaaaaaagccggttcaatcgaattagtttatttttataaaatcaatagtttaaaaattagtttgaaaactaaattaaaaatgacttcaatcttaaaataagttaaaaactaattcaatttagaattggttttttaaaatcagtttgatttcaaactaatttttaaattaatttaattatttagatataaaactaaatgaaacaaattcaatttagttttttacctcacacccctacctatcgtaatggcacatacacgtgtgattatttaattaccagttagtatctactagtgcttatttttggctcttaatttgtttggggcttgttaagaaagaagaaaagaaagct

SEQ ID NO: 2544 - DNA, 329 bp, Glycine max
  Clone ID: LIB3072-017-Q1-E1-F9
gacagcaaaaacaattaataaagatgagtttgaagaacaacatggtggtgctaaaggtgtgtttgttgcttcatttccttgtgggggttacagctgcacgcatggaactgagcttcttcaaaagtgatcagtcatcaagttatgatgatgatgagtattcaaaaccatgctgtgatctctgcatgtgcacacgctcaatgcctcctcaatgcagctgtgaagatattacgctgaattcatgccactcacattgtaagtactgtatgtgcacacgcgcacagccagaacagtgtcgttgtcttgacactaatcacttctgctacaaacct

SEQ ID NO: 2545 - DNA, 453 bp, Glycine max
  Clone ID: LIB3072-017-Q1-E1-G11
gatcaagaaccagttcaatatcctagtacaccgtattaaagaatttaagatatactatgatgagagcgcggttcccattactgttgctgggagttgttttcctggcatcagtttctgtctcatttggcattgcgtattgggaaaagcagaaccccagtcacaacaagtgcctccgaagttgcaatagcgagaaagactcctacaggaaccaagcatgccacgctcgttgcaacctccttaaggtggaggaagaagaagaatgcgaagaaggtcaaattccacgaccacgaccacaacacccggagagggaacgtcagcaacacggtgagaatgaggaagacgaacgtgagcagccacgtccattcccattcgcacgcccacgccaacctcatcaagaggaagagcacgagcagaaggacgaacacgaatggcatcgcaaagaggaaaaacacg

SEQ ID NO: 2546 - DNA, 374 bp, Glycine max
  Clone ID: LIB3072-017-Q1-E1-G2
gcttcacagcaaaaacgattaataaagatgagtttgaagaacaacatggtggtgctaaaggtgtgtttgttgcttcttttccttgtgggggttacagctgcacgcatggaactgagcttcttcaaaagtgatcagtcatcaagttatgatgatgatgagtattcaaaaccatgctgtgatctctgcatgtgcacacgctcaatgcctcctcaatgcagctgtgaagatattaggctgaattcatgccactcagattgtaagagctgtatgtgcacacgctcacagccaggacagtgtcgttgtcttgacaccaacgacttctgctacaaaccttgcaagtccagagatgactagaaaaactaatagctctctca

SEQ ID NO: 2547 - DNA, 382 bp, Glycine max
  Clone ID: LIB3072-017-Q1-E1-G3
ggatggagcagaagaaggcaaagatagtggcagagctccaagctgtgaagcacaacagtggcaagtcctacaatcagttagcggaggagactggactcaccaacgtctatgttgctcagcttctcaggagacaggctcagctcaatccccaaactgcccctctacttcgggcagcgctgcccgacctgccccaagaccttgtttctgagatgatgagaccccctttgaggtcttatgaccctaatctcatccaagaccccactgtctataggttgaatgaagctgttatgcattttggggagagcatcaaagaaataatcaatgacgagtttggtgatgggatcatgtcagcaatagatttctactgctcggttgataaaat

SEQ ID NO: 2548 - DNA, 375 bp, Glycine max
  Clone ID: LIB3072-017-Q1-E1-G4
ggaagcatatttgagactaactcggagagaaagagagagagagagagaaaaatggctgatacaagtggaggagatgcagtgagaccggtggtaatatgtgataacaagtgtggctgcacagttccatgcactggtggttccacttgcaggtgcacaagtgtcggcatgacaactggaggcggtgatcacgtgacatgctcgtgcggagagtactgtgggtgcaatccatgctcatgccccaagactgcggcttctggaactggttgcagatgtggcacagattgctcatgtgcctcttgccgcacttaacatcataccttaattaagtctcaaacttcacaaatcttgaatgtgccttaaatctaactatgtact

SEQ ID NO: 2549 - DNA, 406 bp, Glycine max
  Clone ID: LIB3072-017-Q1-E1-E6
ggttctagtgtgtgattgtttgttgttgtaactcgttcttcttcttttgttgttctgtgtttgtgtttgttttttctctcacctgaaaatgtcttgctgcggtggtaactgtggttgcggaagctcctgcaagtgcggcaacggctgcggaggctgcaagatgtacccagacttgagctacactgagtcaaccaccaccgagaccttggtcatgggagtggcacctgttaaggctcaatttgagggtgctgaaatgggtgtgcccgctgagaacgatggctgcaaatgtggaccaaactgctcctgcaacccctgcacttgcaagtgaggtgttgggagagcaagcttcaagcagagatagcccttaattaggaataatgataaactattaatgtgtagctaaaaa

SEQ ID NO: 2550 - DNA, 422 bp, Glycine max
  Clone ID: LIB3072-017-Q1-E1-G8
actctcatcacattattctatatcaattttggttaagagtcttgaaaaagcaagagaaaaaaaataccaaccatggcaaccatttctgatcaacctagagggtcctactcctatggaacctcatatggagcaccctatggaaccacgtatgagaccaacaccagcattaacaacccaccttcacgccaaacagtgaagttcataactgctgccactattggcatcacactcttgctcctgtctgggttgaccctcacaggcactgtcataggtttgatcattgcaacccctcttcttgttatcttcagccccatccttatccctgctgcgtttgtgctgttcccaattgcttctggctttttgttctctgggggctgtggtgtggctgccattgctgccttgtcctggatttacaactatgt

SEQ ID NO: 2551 - DNA, 290 bp, Glycine max
  unsure at all n locations
  Clone ID: LIB3072-017-Q1-E1-H1
caacagaaggggacagcacaaccaattaataaagatgagtttgaagaacaacatggtggtgctaaacgtgtgtttgttgcttcttttccttgtgggggttacagctgcacgcatggaactgagcttcttcanaagtgatcagtcatcaagttatgatgatgatgagtattcagaaccatgctgtgatctctgcatgtgcacacgctcaatgcctcctcaatgcagctgtgaagatattaggctgaattcatgccactcaaattgttagagctgtatgtgcacacgctcac

SEQ ID NO: 2552 - DNA, 401 bp, Glycine max
  Clone ID: LIB3072-017-Q1-E1-C7
gacagcaaaaacaattaataaagatgagtttgaagaacaacatggtggtgcaaaaggtgtgtttgttgcttcttttccttgtgggggttacagctgcacgcatggaactgagcttcttcaaaagtgatcagtcatcaagttatgatgatgatgagtattcaaaaccatgctgtgatctctgcatgtgcacacgctcaatgcctcctcaatgcagctgtgaagatattaggctgaattcatgccactcagattgtaagggctgtatgtgcacacgctcacagccaggacagtgtcgttgtcttgacaccaacgacttctgctacaaaccttgcaagtccagagatggctagaaaaactaatagctctctcaaatggacgaagcccctttaggctttgtttgt

SEQ ID NO: 2553 - DNA, 309 bp, Glycine max
  Clone ID: LIB3072-017-Q1-E1-C9
tacagctgctacaagacgtcactccggtacagctgcaacacgaccacacaaaggtacagctgctactcgacgccctgacggtactgcatcagagaggatcacatcctgtgaacttcacaccatttcacaattccgagtttggatactccatctgcagattgaaaaactgtcctaatgttcagtaacattcctggtttttaacgatacgaaataaccatcgtcactcctgatcttccaaaccctccccagacattaccttcctcatagggaatcccttactagcattttcacaccatgatatccaagttt

SEQ ID NO: 2554 - DNA, 326 bp, Glycine max
  Clone ID: LIB3072-017-Q1-E1-D1
gaaggtatcaaaaacaaacaaaaatcctaaccgcaaaaggaaaagaagagaatgataacaatgagaataattgcgtatcgattccgagttcaaattcaaaatcaaagacttctattagcttgggtttgggaaatccccaattgttcacatcagtttcagtaaaggtatccgtgaacgtgaatggtccgggaagaaacacaggtttgagttgcaacgccatgttcggtctgggcgtgcctgaactggtccttaatgccggcgtggccgccctcgtttttgggcccaagaaattgcctgaagtcggccgcaacatcggcaaaactgtc

SEQ ID NO: 2555 - DNA, 406 bp, Glycine max
  Clone ID: LIB3072-017-Q1-E1-D12
acgtcagtacagaaggggacaacaacagcagggaataaagatgagcttgaagaacaacatggtggtgcgaacggtgtgtttgatgcttcctttccttgtgggggttacaggtgcgaccatggaactgagcttcttcaaaagtgatcagtcatcaagttatgatgatcatgagtagtcaaaaccatgctgtgatctctgcatgtgcatacgctcaatgcctcctcaatgcatctgtgaagatattaggctgaattcatgccactcagattgtaagagctgtatgtgcacacgctcacatccaggacagtgtcgttgtcttgacaccaaccacttctgctacaaagcttgcaagtccagagatgactagaacaactaagagctctctcaaatggacgagaccccttta

SEQ ID NO: 2556 - DNA, 337 bp, Glycine max
  Clone ID: LIB3072-017-Q1-E1-D2
gagggtttggttattagggttttcgctgaccggtgcgcagtcgagcctccagaagacgaatcgaaaatgccgtcgcacaagacattcagaatcaagaagaagttggcgaagaagatgaggcagaacaggcccattccctactggatccgcatgaggaccgataacaccatcaggtacaacgcgaagcgccgtcactggcgtcgcaccaagcttggattctgaggtgtatgctctgcctaggttcaatttatccaattaattagtgttttattttcttgaggcaaaaacaatgttttgagtttttaatattttccatttgttcgaagactatattgtg

SEQ ID NO: 2557 - DNA, 419 bp, Glycine max
  unsure at all n locations
  Clone ID: LIB3072-017-Q1-E1-D4
gacagcanaaacaattaataaagatgagtttgaagaacaacatggtggtgctaaaggtgtgtttgttgcttcttttccttgtgggggttacagctgcacgcatggagctgagcttcttcaaaagtgatcagtcatcaagttatgatgatgatgagtattcaaaaccatgctgtgatctctgcatgtgcacacgctcaatgcctcctcaatgcagctgtgaagatattaggctgaattcatgccactcagattgtaagagctgtatgtgcacacgcccacagccaggacagtgtcgttgtcttgacaccaacgacttctgctacaaaccttgcaagtccagagatgactagaaaaactaatagctctctcaaatggacgaagcccctttgggctttgtttgttaagttaagggagacaaa

SEQ ID NO: 2558 - DNA, 408 bp, Glycine max
  Clone ID: LIB3072-017-Q1-E1-D5
gactcactcatacaatagagaccagcttttgcttctttgtgaacatggagatgaggaaatcatgtggcttcttcttcttgctcctcctccttgtctttgcttcccaggtggtggtgcagacggagggaagagtgtgtgagtcacaaagccacgggttccatggtttgtgtaatagagaccacaactgtgctttggtctgcaggaacgaaggtttctccggtggcaggtgcaaaggcttccgccgccgctgcttttgcaccaggatttgttgagatctcatcaaacactactcttgccatgcaaattaataaatcatagctaggccaaataaattgcatctactctttatccatttgggagctagctaccacaaccaactcatacttggtcatcggattgcttcccttt

SEQ ID NO: 2559 - DNA, 390 bp, Glycine max
  Clone ID: LIB3072-017-Q1-E1-D7
gattcatgcaactgaataattaagaaaagccatttccatagcagcctaagaaaatgaagagcactagcttgttcgctatctttctactttgcgccttcacctcatacctaccttccgccaccgcccaggacgtgctcgacgtggatggcgatccgattcggaacggtttcatatactacgttttgccggcaataagaggaaacggtggcggaatagaacgagccgcactcgggaaagacacttgccctatcactgtagtgcaatctcccaatccaaactctaaggggttagaaattaagtttgaatctgcataccccgcctattacataaacgaaaccctaattttgcaaataaagttcagttacccacagcagtgtgaaagaaagaatc

SEQ ID NO: 2560 - DNA, 118 bp, Glycine max
  Clone ID: LIB3072-017-Q1-E1-E1
ggttctagtgtaggtgattgatgtgaatcgatcgtcgtcgtcgttaacatcctcctttgttgtttgtgtgtttgttttttctcccacctgagaatgtcttgctgccgtgggaaatgtt

SEQ ID NO: 2561 - DNA, 290 bp, Glycine max
  Clone ID: LIB3072-017-Q1-E1-E11
taggggcacatgtgagtttgttgatcgagatagctacagacagtgtgatgccaatgaaggtccttgttatcggcgttgctacaattttggtactcatggcaatgccatgcctataagatgattccctctccgaatgaaaactggctatggtgcgcgttctccggaggtgaaatgcgcaagttggaggcttgctgtggaagcacacatcatctttggctttggtaccattcctgaatagtgccttgaaacgtcaaatgaatacatccatggcgaacaatatagatcagact

SEQ ID NO: 2562 - DNA, 397 bp, Glycine max
  unsure at all n locations
  Clone ID: LIB3072-017-Q1-E1-E2
gaaggcaagaaaaaaataaataaaacactaagatccttataagtttccctcgatcggcgaaaatatgtctggtttccttagcaacctctttggtttcaacggaaacaataatggcactgaggatgcctttaaaaactcaggaggaggaggacaagacttcaaggacgcggagttcaacactggtgtgcaagttgccaaggggagacacgctccttgcagtggtaacagtgggactaaaagtgcttttaacaactctggttcgggaaaacaggatttcggaaatgctatgtttaacactggtgctaggtactactaatttatataagaccttcctcttggangggctgggcttccaaaacatacatattaatcataggtatggggaataaaaatcaca

SEQ ID NO: 2563 - DNA, 391 bp, Glycine max
  Clone ID: LIB3072-017-Q1-E1-C6
gactctcatcacattattctatatcaattttggttaagagtcttgaaaaagcaagagaaaaaaaataccaaccatggcaaccatttctgatcaacctagagggtcctactcctatggaacctcatatggagcaccctatggaaccacgtatgagaccaacaccagcattaacaacccaccttcacgccaaacagtgaagttcataactgctgccactattggcatcacactcttgctcctgtctgggttgaccctcacaggcactgtcataggtttgatcattgcaacccctcatcttgttatcttcagccccatccttgtccctgctgcgtttgtgctgttcctaattgcctctggctttttgttctctgggggctgttgtgtggctgcc

SEQ ID NO: 2564 - DNA, 360 bp, Glycine max
  Clone ID: LIB3072-017-Q1-E1-E3
gactgcgaaccagtagggactcccgttccgactcttagccgccgatctctcacggcttgcatcttctcaggtaagctgtgaagatgtacacatcaaggaagaaaatccacaaggataaggatgctgaaccaactgaatttgaagagtcagttggacaggcattgtttgatctggaaaataccaatcaggagcttaaaagtgatctgaaggatttatacataaactcagccgtgcaagttgatgtttctggaaaccgcaaggctgttgttattcatgtcccttacagattaaggaaaggtttccgtaagattcatgttaggcttgtcacggagcttgagaagaagtttagtggcaaggatg

SEQ ID NO: 2565 - DNA, 379 bp, Glycine max
  Clone ID: LIB3072-017-Q1-E1-E4
gacgaacattattcctaatccttatcctgtttgcttccatggaagtgatttccgcttcgagcttgaatcccaacgctccgatgttcgtgcctctcgcctatcggacggtggaggatttctccgaccaatggtgggacctcgtccactcctccccctggttccgcgactactggctccgcgagtgcttccaagatccccagtaccaatacgacgacgttttcgacttcgactttgacctagatctccaagataaagatgaaaatgaagggaaggaagggaaagaggtggtgtcgttgggggtgctcaaatggcgaagctgtggaggaggatgggccgaagcgccgaggtatgtggaaaaggcccctaagtttgtgaagcc

SEQ ID NO: 2566 - DNA, 411 bp, Glycine max
  Clone ID: LIB3072-017-Q1-E1-E5
gaagacgacagaaggggacaggtgtttgcaatactagcgatagctgataagagagataccaacaagaaaagaaaaaaagaagagttgagattccctttgaagaaaagatggcatcccataggcaaagctatgaagctggtcaaactaagggccgaactgaggaaaagacgaaccagacgatgggcaatattggagagaaggctcaagctgcaaaggagaagacccaggaaatggcccaagctgcaaaggagaagacccaacaaacagcccaagctgccaaggacaagacttgcgacacttcccaagcggcaaaggagaagacccaacagaatacaggagctgctcaacaaaagacctcagagatgggccagtccacgaaggaatcggcccagtcagggaaggacaacaccc

SEQ ID NO: 2567 - DNA, 201 bp, Glycine max
  Clone ID: LIB3072-017-Q1-E1-B1
gagggggtgggctttgtcctgttgtcactgctctttccctaggggctcccagctctgcaccgcattatcttgtcacggagcattcacatttgaggggagacggtcgcacgctcttctcgcaccgcacgaggcatacgcgagctggttggtcaatcacgttcggccagctttcagaatggacgttttgcccgtttgccggtg

SEQ ID NO: 2568 - DNA, 365 bp, Glycine max
  unsure at all n locations
  Clone ID: LIB3072-017-Q1-E1-B11
gattcatatgatagatattggtaatgactattttcttgtatactttcctcatccggaggacaaagaaaaagctcaatcagagggtccttggtttgtgtatgaccattacttggttgtgagagactagaaccctaattttcactcggatttggaggccattgagaaagtggcagtgtgggtgcgattttcaggattacctattgagtactatgactacaaagtgtttgttaccaatggagaccacattgggagaacagtgagagtggatagaaatatgttatcgcaactttctgttacttctcattccaaatatcanatttcaatccattcgttcaaacattctgacccattatatcatccgaaca

SEQ ID NO: 2569 - DNA, 353 bp, Glycine max
  Clone ID: LIB3072-017-Q1-E1-B12
ggctgcaaactaaaccaattttcttcgtctgtgtaacaaacacttcaacaatctactctatacccgatttacaagatgagttcatttagccaaaatccctatgttttagttctgttcctcgttctcactgtgtggatatcccgtgtagtgtctcgcgggctcattacatctgagagacatgagaaatggatggcacaatatggtaaggtttacaaagatgctgcagagaacgagaaacgtttccaagtattcaaaaacaatgtgcagttcattgagtcattcaatgctgctggggacaaacctttcaaccttagcattaaccaatttgcggaccttcatgatgaagaatttaa

SEQ ID NO: 2570 - DNA, 385 bp, Glycine max
  Clone ID: LIB3072-017-Q1-E1-B2
gatgcaactgaataattaagaaaagccatttccatagcagcctaagaaaatgaagagcactagcttgttcgctatctttctactttgcgccttcacctcatacctaccttccgccaccgcccaggacgtgctcgacgtggatggcgatccgattcggaacggtttcatatactacgttttgccggcaataagaggaaacggtggcggaatagaacgagccgcactcgggaaagacacttgccctatcactgtagtgcaatctcccaatccaaactctagggggttagaaattaagtttgaatctgcataccccgcctattacataaacgaaaccctaattttgcaaataaagttcagttacccacagcagtgtgaaagaaagaat

SEQ ID NO: 2571 - DNA, 307 bp, Glycine max
  Clone ID: LIB3072-017-Q1-E1-B3
gagggaccaaactcagaacatgccacatgacacagagaagataggtcacagacactgtcagggatcactcacacgattgaggagacacttcatgtgggatgccataagacagaggaggattacaacggtgagcagcaccatggtggcgaatacaaaggggagcatcatggtgaacacactactgtatacacatgtgagcatcatgttggtgagcacaagccggatcaccattgacgacaaaatcacatacaggggttcctatacactatcaagggcattatccacagtcatcgacggtggcaccacc

SEQ ID NO: 2572 - DNA, 310 bp, Glycine max
  Clone ID: LIB3072-017-Q1-E1-B4
ggtagcgcagagaaagaactagaactagggtttcatctttgccatcagtaaacgacaatgatttacgacgttaactctcctcttttccgatccttcctcagccagaagggaggctcctctgataagaggaaatcggacgaacagaagccaaaagagcagaaacccaaagccagcgagaacaaacctataatgactgagtgataacagctgagctgcattcagttgtagaatgaaaataggtggtaggtattgtatttggtgctaaactaagatctttttggctgtgttctgaagtatatgccggcgatgt

SEQ ID NO: 2573 - DNA, 377 bp, Glycine max
  Clone ID: LIB3072-017-Q1-E1-B5
gagggttttgtgctgttgtcgctgctcatcctccataacctccgagctctacaccgaagaacggagccatggggaagacacatggaatgggagctgctcgcaagctcaagtctcaccgcaggaggcaaaggtgggctgataagtcatacaagaaatcccatcttgggaatgaatggaagaaaccttttgccggttcatcccatgccaagggaattgtccttgaaaagataggtattgaagctaagcagcccgactctgctattcgtaagtgtgccagagttcaacttatcaagaatgggaagaaaattgcagcttttgtccctaatgatggttgcttgaactacattgaagagaatgacgaagtcttgattgctgga

SEQ ID NO: 2574 - DNA, 320 bp, Glycine max
  Clone ID: LIB3072-017-Q1-E1-B6
gactgtttattcaacattcaaagaaataaactcacgcactaatcactactacacaaatcacacacacacacacagagttgcaagagaaagagagcgagattccgatggcgactctggattccgacgtgcctatggttcccgccggcgagccctcaagcagcgccggtccttcttccaagaagcccaagcgcttcgagatcaagaagtggaacgccgtcgctctctgggcttgggacatcgttgtcgataactgtgctatctgccggaaccacatcatggatctctgcatcgagtgccaagccaaccatgctagcgccact

SEQ ID NO: 2575 - DNA, 388 bp, Glycine max
  Clone ID: LIB3072-017-Q1-E1-B7
gacagcaaaaacaattaataaagatgagtttgaagaacaacatggtggtgctaaaggtgtgtttgttgcttcttttccttgtgggggttacagctgcacgcatggaactgagcttcttcaaaagtgatcagtcatcaagttatgatgatgatgagtatccaaaaccatgctgtgatctctgcatgtgcacacgctcaatgcctcctcaatgcagctgtgaagatattaggctgaattcatgccactcagattgtaagagctgtatgtgcacacgctcacagccaggacagtgtcgttgtcttgacaccaacgacttctgctacaaaccttgcaagtccagagatgactagaaatactaatagctctctcaaatgggagaagccccttt

SEQ ID NO: 2576 - DNA, 408 bp, Glycine max
  Clone ID: LIB3072-017-Q1-E1-B8
ggaaccgaaacgaacctcaacaacgctgatcgtagaacggggaaaaggggattaaggtttatgaagcaccgccacccctggatttcacattggctacgaacgaatcagagaacaatccccaaaatgctcaaccaacaacgttggattcatcatctcaattggcatccgcacttgattccaacaacatacacatccacgaacgacaagctcgtgaactcaaagccggacttcaccccctaaagcacaagtttgtcgtctggtacactcgtccacaacctcgaattcgaaatcatgcatcagacgaggacaccataacgtctactgttgaacttactactgttgaaagaatttgggtctgctactgccatcttgctcctccagcttccttacctactccaacagatttgc

SEQ ID NO: 2577 - DNA, 389 bp, Glycine max
  Clone ID: LIB3072-017-Q1-E1-B9
gatcacaatctcattcgttaacatcaatttctatctctcttatactctcactactctctttgctctttcttttctccactatggctgcacaagaaaacaacttccaagactacttgcctgtgatggccaacaagcttggtggggatggcctaattgatgaactgtgcaatgggttcgatcttttgaaggattctgataaaggggtcatcacttttgagagcctcaagaggaattcttacttgcttggtcttcagggtctcagtgatgaggatcttcgctccatggttttggaaggtgactttgatggtgacggtgcactcaaccaggtggagttctgtgtcttgatgttcagactcagccctgaattgatggagggctcaaagatgtgg

SEQ ID NO: 2578 - DNA, 134 bp, Glycine max
  Clone ID: LIB3072-017-Q1-E1-C10
tggggcacaccaccattgacgttgcgcaggatattcacagcaaggcacatgatactctggatgtagctgcactgcatgcacgggatgcaactccactggatgccatggaacctgctgcatcggatgcatatgtc

SEQ ID NO: 2579 - DNA, 162 bp, Glycine max
  Clone ID: LIB3072-017-Q1-E1-C12
cacgcgtaaagcatgccgtccgttacgctgcggtactgctgcggaaagggaatcgcacggttcagtttgaatctcgtcaatcaccgggaggtaccgacacgcatgctcttctgtgctctccctcgcgtgggtgacatcaccatttcctcctacagattctcc

SEQ ID NO: 2580 - DNA, 368 bp, Glycine max
  Clone ID: LIB3072-017-Q1-E1-C2
gaccaaacgttccagaagctgcttcttagtttctccaaacccaaactttcaccacagggacctgtcagatttagttaacgtttttacatcatcactgtgtgaagataatatagatatggaaatctcccatgacatcaagatcaaggatgacaagctaggtggtgtgaaggaagagaagattaaggtagaagttgaactgaagaataaatcagttgagaaagagcatacaataagtaaagaagagaagaaacataaagatgaagataaatcaaagaaaaaaaagaaagagaaaggggaagaggaagatgaagaaggagagaagaaagaaaaagatgttaaagataaaggggatgatggtgaagagaaag

SEQ ID NO: 2581 - DNA, 384 bp, Glycine max
  Clone ID: LIB3072-017-Q1-E1-C3
gatcaacgaaaatgaaaaaaagagaaaacaaaagtgtaagaaagagagtgaatagagaagatggaggtggagcgttcttcgccgtgcaactgcgtggagcttctcgacgatggtcgccacgaccaggccattcgcctccaagagtacttgtctgatccacaaactcttctccaactcaaaaacgattccgaacacaagctgtccatcaccgattaccaacttcgtctcgccaaactcaaatctcaactctacgttgcttctgctggttccttccttcttaatcatgcaaataatttaatgataaattgattgataaactttacaacttaatcatgtaatcaatttgtaccttttagtttagatatcaatttgtcagatcatcac

SEQ ID NO: 2582 - DNA, 436 bp, Glycine max
  unsure at all n locations
  Clone ID: LIB3072-017-Q1-E1-A9
gaatctaaagataaataaaattcaggaaaaaaaaaaaaaaacatggtggtgaaggtgtatggtccaacctatggatcccccaagagggtcctggtgtgtctgattgagaaggaaattgagtttgaaacagtgcatgttgatctcttcaagggagagaataaggaacctgagttccttaagctgcagccatttggatcccttcctgttattcaagacggtgattatactctctatgaatctcgtgcaataatcagatacttagctgagaagtataaagaccaagggactgacttattgggaaagacaatagaagaaaagggtctagtggaacaatggcttgaagcggaagctcataactttcaccaccactctacaacttggttattaatgttctgtttgcgccattaancggggctccttcggaccanaaagtgat

SEQ ID NO: 2583 - DNA, 336 bp, Glycine max
  Clone ID: LIB3072-017-Q1-E1-C4
gagagtggtggagtgtgcagaagagcgtcgcagtcgcaaccctaatcagaagaagcgcagcttcaagcgagtgacagccaccagccatgggtcgtatgcacagccgcggtaagggtatatcctcttctgctttgccctacaaaaggacacctcctagctggctcaagatctcttcgcaagatgtcgaagaaaatatctgcaagtttgcgaagaaaggtttgaccccgtctcagattggtgtcattctcagagattctcacggtattgctcaggtcaatagcgtcactggcagcaaaatccttcgcatcctcaaagctcacggacttgcgcctgaaa

SEQ ID NO: 2584 - DNA, 399 bp, Glycine max
  Clone ID: LIB3072-017-Q1-E1-C5
ggtagactcgaatcctaaaaaattaaaccctagctagagagagagagagagggtttaaagcttctttctggcgcaacgcaattcatagcaaaaacagagagtgagagagggagatggggagcgacagcgaggcagagaagtcggtgcagaaagagaaggagaagaagaagatgttggccctggctcccattgctaaacctcttgctgggaagaagctttgcaagcgaaccctaaaacttgttcgtagagctgccgaacacaaatgcttgaaaagaggagtgaaggaggtcgttaaaagtataaggagaggtcataaaggattgtgtgtgattgctgggaacatatcaccgattgatgtcgtcactcatgttcctattctttgtgaagagtctgacattc

SEQ ID NO: 2585 - DNA, 83 bp, Glycine max
  Clone ID: LIB3072-016-Q1-E1-F12
ggcactgagtgcaaagtgcaaataaaataacaatcaagatgagtactaccaccattaaccttaccttctataccccttcctcg

SEQ ID NO: 2586 - DNA, 286 bp, Glycine max
  Clone ID: LIB3072-016-Q1-E1-F2
gaatgtaccctgatatacacacacacagctagcagatattacatacacgtgaatcactaattaagccatggagaagaaatcagtagcggggttgtgcttcctcttccttgttctctttgttgctcaagaagttgtggtgcaaactgaggcaaagacttgcgagaacctggctgatacatacaggggtccatgcttcaccactggcagctgcgatgatgagtgcgagactacagaccacttgctcagaggcagatcccgggacgattttcgctgttggtgcaccaaa

SEQ ID NO: 2587 - DNA, 250 bp, Glycine max
  Clone ID: LIB3072-016-Q1-E1-F3
gactcttaatcttttttctcttcctttcacctcctcagcagtcgtcagaaagactccataacccaaaaatgcctttcaggaggtaggttgagattggaagggttgctcagatgaactatggcaaagagtacgggcggctcgtgatcattgtcgatgtcattgaccagaatagggctcttgttgatgctcccgacatggtgaggtcccaagtgaagttcgaagaagctctcgctcactgacatcaagattg

SEQ ID NO: 2588 - DNA, 120 bp, Glycine max
  Clone ID: LIB3072-016-Q1-E1-F4
gacagcaaaaacaattaataaagatgagtttgaacaacaacatcgtggtgccaaaagtctcttgtggggcggcgggtccatatcccccttacacctccgcgggttcacctcatcttcttc

SEQ ID NO: 2589 - DNA, 216 bp, Glycine max
  Clone ID: LIB3072-016-Q1-E1-F7
gagagaaagaagcttcacaattcacattcccaccaacggaaccatggcctccgtgtacagctgtacggactgcggatccaacctgaggcgggggggcgcgcatgcctaccctccagacttcgacttcgaagccggcaacaacggctccgtctccttctccgccgtggatcccatcacgtgcaagttccagaaggaggacaagcctcgccccttctt

SEQ ID NO: 2590 - DNA, 308 bp, Glycine max
  Clone ID: LIB3072-016-Q1-E1-G10
ggcgtacacagcctcaacaaccctaacgcgtgcagagcagagagagacgcagccatggggcgaagacccgcgaggtgttataggcaagggaggagggaaccataccccaagtcacggttttgccgtggtgttcctgatcccaagatcaggatttacgatgttggtatgaagaagaagggtgttgatgagtttcctttctgtgtccatctggttagttgggagaaggaaaacgtttctagtgaggccctggaagctgctcgtattgcttgcaacaactacatggcccaccttgctggatacggagcttt

SEQ ID NO: 2591 - DNA, 223 bp, Glycine max
  Clone ID: LIB3072-016-Q1-E1-G2
gccgcaagatcattatcgatacttatggaggatggggtgctcatggtggtggtgctttctccgggaaggaccctaccaaggttgatacgagtggggggtggggtgtgagacaggctgctaatagcactttggcacgtgcatttgccagaacgtgcactgtgccagtgtcttatcccattcatctgcctgagcctttatctgtttttgttgaccactatagccc

SEQ ID NO: 2592 - DNA, 306 bp, Glycine max
  Clone ID: LIB3072-016-Q1-E1-G3
ggagactaactcggagagaaagagagagagagagagaaaaatggctgatacaagtggaggagatgcagtgagaccggtggtaatatgtgataacaagtgtggctgcacagttccatgcactggtggttccacttgcaggtgcacaagtgtcggcatgacaactggaggcggtgatcacgtgacatgctcgtgcggagagtactgtgggtgcaatccatgctcatgtcccaggacggcggcttctggaactggttgcagatgtggcacagattgctcatgtgcctcttgccgcacttaacatcatcc

SEQ ID NO: 2593 - DNA, 329 bp, Glycine max
  Clone ID: LIB3072-016-Q1-E1-G4
gttttcttctaattaaaacaaaaattataaaaaattttctcgtatcccctcctatatcacccacaaaatcctccactctccctctctagaggatggaggcttacttatccctccatacaacctcactatcctcttcacactctctccaaacttcacttcactacccgtccttttacatcctccttactacccaaattcctccctttctccacccctattacccttgcccacacccctcccctcttcatcaccccctactttccctaaccccccccccccacttcccctcaccttcctccatcttcttctcttctcacctcttctccctc

SEQ ID NO: 2594 - DNA, 136 bp, Glycine max
  Clone ID: LIB3072-016-Q1-E1-G8
gttgattttatgtttattttgttctattcgcatcaatctgcagcatgacaaccgaggaagactcgtctgtttttgttttgttcaggagtcggaggggggctcttaacacacaccttacatcggcgtttctctctcc

SEQ ID NO: 2595 - DNA, 86 bp, Glycine max
  Clone ID: LIB3072-016-Q1-E1-H1
gttttatctttttccttaattaaaactctcaaacctttaaaattcattcccataacagaatccttattatcgatcacataaatccg

SEQ ID NO: 2596 - DNA, 87 bp, Glycine max
  Clone ID: LIB3072-016-Q1-E1-H2
gacacttactactagtaagcatggagtcctcaaagatctatgcttacctcttcctctgcatgatctttctctcttccgccactccca

SEQ ID NO: 2597 - DNA, 79 bp, Glycine max
  Clone ID: LIB3072-016-Q1-E1-H3
gacagcaaaaacaattaataaagatgagtttgaagaacaacatggtggtgctaaaggtgtgtttgttgcttcttttcct

SEQ ID NO: 2598 - DNA, 116 bp, Glycine max
  Clone ID: LIB3072-016-Q1-E1-H4
gatagcaaacacaattaataaagatgagtttggggagggggtggtggttccaacagtatctttgttgcttcctttccttgtaggggttacaactgctaccctggaacctaccttct

SEQ ID NO: 2599 - DNA, 210 bp, Glycine max
  Clone ID: LIB3072-016-Q1-E1-H6
ggaaaaaacactcccatggaccgtcgtaaatataaaaatgctccatcgttatcgctgtcgcaatttgccgactgggatcacatggggcgggtgcgggagcccccacttcatttctcaaagatccgggaaactactgaactaccacatccttgccttttccacagctactcctttcccatccccaaccaatcttgtattcctcctcccccc

SEQ ID NO: 2600 - DNA, 272 bp, Glycine max
  Clone ID: LIB3072-017-Q1-E1-A1
cggtcgaaatccggggcgaccaagcctccggccaaacctccgttacggtgcgaaaagaccacaaaaagggaaaatttggaccaactccgggaaaaagagaaaaagagaaaaaaaaattggtgatacaagttggggggaatcattagaccgtgggaaaatgtgaccagcaatgcaaatgcacagttccatgcaccggtgggtccacattcatgtgcacaaatgtccgcaatacaactggacgcgggggttaccttacatgccccctccggaaa

SEQ ID NO: 2601 - DNA, 348 bp, Glycine max
  Clone ID: LIB3072-017-Q1-E1-A10
gactcgcagttgtattgttgaacaagggtttctctgtctgcttcttcactttctctcgtttcaatcgaaaccaaaacaaaaacatgggcagaaaattcttcgtcggtggcaactggaaatgcaatgggaccactgaggaggtaaagaagattgttactactttgaatgaggctaaagtccctggagaagatgtcgtagaagttgttgtgagccctccttttgtgttccttcctgttgtaaaaagtttgctgcgccctgatttccgtgtttcagcacaaaactgttgggttcgcaaaggtggtgcctataacgggtgaggttactgctgaaatgcttgttaatttgggg

SEQ ID NO: 2602 - DNA, 156 bp, Glycine max
  Clone ID: LIB3072-017-Q1-E1-A11
tcgggactcgcagttgtgctgttgaccacgggtttcgctgtctgcctcttcaccttctctcgggtcactctgctagcataccccatcatgggcctggcttgcctcagcgacttcacctttccgttgcctgggaccactgtcgaggtactgctgctt

SEQ ID NO: 2603 - DNA, 261 bp, Glycine max
  Clone ID: LIB3072-017-Q1-E1-A12
ggcagtgagaagaagagggggtcagagtgagaaagagaaagagagaattcgtaaaccctaatttcggaagatcggcgatgactgcctccaaggatcgcgagaacttcgtctacatcgccaaactcgccgagcaggccgagcgttacgaagagatggtggaatcaatgaagaacgttgcgaatctcgacgttgaactgacggtggaggagcggaatttgctttctgttgggtacaagaatgtgattggtgctcgcagagcgt

SEQ ID NO: 2604 - DNA, 337 bp, Glycine max
  Clone ID: LIB3072-017-Q1-E1-A3
gatgcaactgaataattaagaaaagccatttccatagcagcctaagaaaatgaagagcactagcttgttcgctatctttctactttgcgccttcacctcatacctaccttccggcaccgcccaggacgtgctcgacgtggatggcgatccgattcggaacggtttcatatactacgttttgccggcaataagaggaaacggtggcggcatagaacgagccgcactcgggaaagacacttgccctatcactgtagtgcaatctcccaatccaaactctaaagggtttagaattaagtttgaatctgcattacccgcctattacattaacgatacccta

SEQ ID NO: 2605 - DNA, 187 bp, Glycine max
  Clone ID: LIB3072-016-Q1-E1-F11
gcttaccaaatagtgaaaggaacatttcacctagtaaaagaagttacaaactaactcaaatatcttgttgaagaggggaggggtgagttaattctaacaacacatcgtgtgttattcattgaaattcacaaaaaattacaactttacatcgctctcatttctcatttaacgctcaccctcttacctt

SEQ ID NO: 2606 - DNA, 351 bp, Glycine max
  unsure at all n locations
  Clone ID: LIB3072-017-Q1-E1-A4
aagagagagctgtggagggtgcagtacgcgctcagccgcatccgcaacaacgcgcggaacctcctcaccctcgacgagaagaacccgcgccggatcttcgagggagaggcgctgctccgaaggatgttccgttacggtctcctcgatgagacacagaacaagcttgattacgtcctcgccctcaccgtcgagaactttctcgagcgccgcctccagacccttgttttcaagtccggcatggccaagtccatccaccatgctagggttcttatcaagcagagacatatcaaggttggtangcaagtggtgaacatcccatctttcttggtaagggttgactcacagaagcac

SEQ ID NO: 2607 - DNA, 374 bp, Glycine max
  Clone ID: LIB3072-017-Q1-E1-A5
gagtgcaatttagctgaagcaaagcaatggctacttcaaagttgaaaacccagaatgtggttgtatctctctccctaaccttaaccttggtactggtgctactgaccagcaaggcaaactcagcggaaactgtttctttcagctggaacaagttcgtgccgaagcaaccaaacatgatcctccaaggagacgctattgtgacctcctcgggaaagttacaactcaataaggttgacgaaaacggcaccccaaaaccctcgtctcttggtcgcgccctctactccacccccatccacatttgggacaaagaaaccggtagcgttgccagcttcgccgcttccttcaacttcaccttctatgcccctgacacaaaa

SEQ ID NO: 2608 - DNA, 377 bp, Glycine max
  Clone ID: LIB3072-017-Q1-E1-A6
gacaagttacaactcatcaattcggcagataaaggtagtagtagtgttacgttcgaattcgaattgttccatttgcttcgcaaaagttgcaactacttccacagaaagaaaaaaagtttctaagttaaggaaatccagagtgaaaaaaaaaaaaatggccggtgacggtgcagctacatgcatagacatccttcttgccattattctccctcctcttggtgtctttctcaaatatggttgccaggtggagttctggatttgtttggtgctgaccctttttggttatatacctggaattatctatgctgtctattctatcaccaagtgatcgtcaccctttaacttttgtggacaataaacaaatgtcatgggcgttt

SEQ ID NO: 2609 - DNA, 288 bp, Glycine max
  Clone ID: LIB3072-017-Q1-E1-A7
gacgacaacagggggtggcactgaataattcatagaaggcgtttctataggaggctaatgagatgaagagcactagcttgtgcgccatctttctagtttgcgccgtgacctcatacctaccttccggcaccgtccaggacgtgcgcgacgtggatggcgatccgattcgggacgggttcatagactacgttttgccggcgataagaggaaacggtggcggcatagaaggagccgcactctggaaagacacttgccctatcactgtagtgcaatctcccaggccaaact

SEQ ID NO: 2610 - DNA, 391 bp, Glycine max
  Clone ID: LIB3072-017-Q1-E1-A8
gacacaaaagtagcaaagcaattcactcaccctcttcaccacctctttaagctcaagctatctaagaattgttattacttctttctttgcatgtttacatcattttgtgtgtgagaaaaatggcatgcattagcacgagcagagcaatgttcttcttcatggctttctttgtggggcttctatttgctgcaggggtgagtgctcagaccaatgagttccctcaagcgccagcaccagcaccaacaatggacgctggagctggatttttggtgacttactctggcacatttgtttgctcctcactgatcatctctcttattgcccttctagggcattaattcatcatgatggaatgattgaaacctatctactctaatcaatttaatttttt

SEQ ID NO: 2611 - DNA, 415 bp, Glycine max
  unsure at all n locations
  Clone ID: LIB3072-015-Q1-E1-G8
ggaagcatttgagactaactcttagagagaaaaaaaaatggctgatacaggtggaggagatgcagtgagaccagtggtaatatgtgataacaagtgtggctgcacacttccatgcactggtggttccacttgcaggtgcacaagtgctggcattgccacaggagggggtgatcacgtgacatgctcgtgcggagagcactgtggttgcaatccatgctcatgtcccaagattgcggctgctggaagtggttgcagatgtggcacagattgtgcatgtgcctcctgccgcacttagtatcacaccttaaggcttaaacttcacgttttattttatgtcttcaaatcttgaatacgttttctatatattagtcttgtttaaagttcanagtgtggacgtggtttctacttagtactc

SEQ ID NO: 2612 - DNA, 249 bp, Glycine max
  Clone ID: LIB3072-015-Q1-E1-H11
ggaagagcgagaaacgaagaagatgtctggtatgggagatgggtacgtgggcaccgccctatacgcggtgaggattcgacggttggtgaatcagccagaagcggagcgtcgtataatcgatgagctgaaaaccaagtctgcctccgccaaggaccaacccggtcttctccaattcggttccagcacttccgagattctagagactgcctttatccacgtaactgttggtctggtcactatacagcaata

SEQ ID NO: 2613 - DNA, 426 bp, Glycine max
  Clone ID: LIB3072-015-Q1-E1-H4
ggcagtgcaaaactcacaacacgtctaaacaaaaaatcaagaacaatggcttatgctaggcttgctcctatggctgtcttcttgcttgccacttccaccataatgttcccaacgaagatagaagcagcagattgtaatggtgcatgttcacctttcgagatgccaccgtgccgctcacgtgattgtcgttgtgtccctataggactagttgctggtttctgcatacatccaactggactttcatctgttgcgaagatgatcgacgaacatcccaacttatgtcaatctgatgatgaatgcatgaagaaaggaagtggcaatttttgcgctcgttaccctaataattatatcgattatggatggtgttttgattctgattctgaagcactgaaaggcttcttggccatgcctaaggcaaaccacaag

SEQ ID NO: 2614 - DNA, 408 bp, Glycine max
  Clone ID: LIB3072-015-Q1-E1-H5
gattcacacaactaactaagaaagtcttccatagccccccaaaaatgaagagcaccatcttctttgctctctttctcttttgtgccttcaccacctcatacctaccttcagccatcgctgatttcgtgctcgataatgaaggtaaccctcttgaaaatggtggcacatattatatcttgtcagacataacagcatttggtggaataagagcagccccaacgggaaatgaaagatgccctctcactgtggtgcaatctcgcaatgagctcgacaaagggattggaacaatcatctcgtccccatatcgaatccgttttatcgccgaaggccatcctttgagccttaagttcgattcatttgcagttataatgctgtgtgttggaattcctaccgagtggtctgttgtgg

SEQ ID NO: 2615 - DNA, 406 bp, Glycine max
  Clone ID: LIB3072-015-Q1-E1-H6
gtgagtaaattgatcaatttactcacgtgaaataggctttattacttcatcaaatggtaggttcattggattttctgagatacaaccaataaattcttttttgattaaaaggtaagtaattcaattatatataataattatatataataatgtataacatagtagataaagaggtggtataccatttttttttagaaattttttttttgttttatctgttcatttgtatgttgagaatcaattcgacttcaacattttgagtttttctatttttttgaatgtctgatattttattagacaattcaatcttttcattttattgtttttattgcgattggatatatacacccacgttattttctaaattgtattggggttgctaactcaatggtagagtactcggctt

SEQ ID NO: 2616 - DNA, 405 bp, Glycine max
  Clone ID: LIB3072-015-Q1-E1-H7
gacagcaaaaacaattaataaagatgagtttgaagaacaacatggtggtgctaaaggtgtgtttgttgcttcttttccttgtgggggttacagctgcacgcatggaactgagcttcttcaaaagtgatcagtcatcaagttatgatgatgatgagtattcaaaaccatgctgtgatctctgcatgtgcacacgctcaatgcctcctcaatgcagctgtgaagatattatgctgaattcatgccactcagattgtaagagctgtatgtgcacacgctcacagccaggacagtgtcgttgtcttgacactaacgacttctgctacaaaccttgcaagtccagagatgactacaacaactaatagctctctcaaatggacgaagcccctttaggctttgtttgttatg

SEQ ID NO: 2617 - DNA, 230 bp, Glycine max
  Clone ID: LIB3072-015-Q1-E1-H8
ggcacaagtgagtttgttgatcgagataactagaaacagtgtgatgaaaatgaaggtccttgttttcttcgttgctacaattttggtagcatggcaatgccatgcgtacgatatgttccctcggcgaatgaacactggctatggtgcccgtactccggaggtgaaatgcccaagttggaggcttcctgtggaagcacacagcatctttggctttgagaccagtcctgaag

SEQ ID NO: 2618 - DNA, 254 bp, Glycine max
  Clone ID: LIB3072-016-Q1-E1-B4
gattcacacaactaactaagaaagtcttccatagccccccaaaaatgaagagcaccatcttctttgctctctttctctttggtggggtgaccacctcatacctaccttcagccggcgctgatttcgtgctcgataatgaaggtaaccctcttgaaaatggtggcacatattatatcttgtcagacataacagcatttggtggaataagagcagccccaacgggaaatgaaagatgccctctcactgtggtgcac

SEQ ID NO: 2619 - DNA, 165 bp, Glycine max
  Clone ID: LIB3072-016-Q1-E1-B5
ggcgtacacagcctcaacaaccctaacgcgtgcagagcagagagagacgcagccatggggcgaagacccgcgaggtgttataggcaaatgggggagcgggcgggaccccacgtcaccgttttgccgtggtcttcctgatcccctcatcaggacctaccacgtcgg

SEQ ID NO: 2620 - DNA, 340 bp, Glycine max
  Clone ID: LIB3072-016-Q1-E1-B6
cgtccggaaaaaagacgacagaaggggacacttactagtagtaagcatggagtcctcaaagatctatgcttacctcttcctctgcatgatctttctctcttccgccactcccattctcggttgtggcggacggtggcaaaccccccaaaaaacacaagcctggtaaaacaccaaagacacccaaaacacccgttgttaagccaccagtcaccatccctcccattaatgttcctcccgttgttcttccaccaatagtgaagcccccaggtattctccctccaattccaattattaactcaccaaccacaccagggaacggagggaacactccatgcccacc

SEQ ID NO: 2621 - DNA, 143 bp, Glycine max
  unsure at all n locations
  Clone ID: LIB3072-016-Q1-E1-B7
gagtgcaatttagctgaagcacaccaatggctacttcaaagttgaaactccanaatctggttctatctctctcccggggcgggggcttggcactgctcctactcacccgcaccgtaaactcatcttaccctgtctctttccac

SEQ ID NO: 2622 - DNA, 95 bp, Glycine max
  Clone ID: LIB3072-016-Q1-E1-C11
acagaaggggacaacataaacattctctccattgtctttgaacactcatcaccatatcaaaccttcttctttccatttatttccttcatttcact

SEQ ID NO: 2623 - DNA, 157 bp, Glycine max
  Clone ID: LIB3072-016-Q1-E1-C8
ggcacaagtgagtttgttgatccacataaccacacacagtctcactaacacccaacctcggtggggggggggggtcctaccctcctcctaccatccggattccccccctaccatccctatcccctcccatctaaccatcctctcttctcccccctcc

SEQ ID NO: 2624 - DNA, 168 bp, Glycine max
  unsure at all n locations
  Clone ID: LIB3072-016-Q1-E1-D10
acgacagaacgggacaacacagaacaaaaacaacgaacaaaaaaaacccttagccaacacaaccatcatggccacctccgctattcagcaatcancattcactcgtcaagcggcgcggaggcagctcaatcacttcatccccaacgaccccttcccctgcaaacgtct

SEQ ID NO: 2625 - DNA, 501 bp, Glycine max
  Clone ID: LIB3072-016-Q1-E1-D11
gtccctaccgcttccaccttactactgcctgtccacttcttctcctcttcttccccacccttctttccccctctcctcttctcttcctttcccctcccctttcccctgggcgggggtgctttctttcctttcccacttttcttgttcccctctctcctctccctctctttccccttctctccccttcctctcctcttcctttttcctccctcttcctcctccttcttcctctctctttcccccctttttcttccccgcgcttcctctcctctttctctctctctctctcttttcctccttctctctccctctttcttcctccctccccccttcctcttctctccattcttatccatcttctcctgtccttcttatctctctcatccctctcgctctctcttgtcttctcgccttttctcctctctccctctttctctttctctctccctctctctcctcccttcctttcacctcttgcttctcaccttctctgctctcttc

SEQ ID NO: 2626 - DNA, 262 bp, Glycine max
  Clone ID: LIB3072-016-Q1-E1-D2
gctgagaaataaccaacagaatctactctctattttcctagcttagattccttctccaatggctcttgccgtttccactacttcttcctcgtgagcgtggggcagcagcagcagcgtcgagctctttcttctcgcgccttggatcttcatcggacgctaaagttccgcaaattggttcctttcggtttccggagaggcctcaagtttcgtctggtgttgttaatttaagggaaacacgctcctccgtgaggccactcaatgc

SEQ ID NO: 2627 - DNA, 89 bp, Glycine max
  Clone ID: LIB3072-016-Q1-E1-D8
gacagcaaaaacaattaataaagatgagtttgaagaacaacatggtggtgctaaaggtgtgtttgttacctcttttccttgtgggggtg

SEQ ID NO: 2628 - DNA, 209 bp, Glycine max
  Clone ID: LIB3072-016-Q1-E1-E3
ggcagttcaattccaatatattccattctctctgtgtatttccctacctctcccttcaagatgcacatcttcgtcaagaccctcaccggcgggagggagggccgttgacgttgacacctctgacaccatccacaacctcaaggccaagatccacgataacgaacgaaccccccccgaccccacattctcatttttcccggacacgaact

SEQ ID NO: 2629 - DNA, 81 bp, Glycine max
  Clone ID: LIB3072-016-Q1-E1-F1
gactttccttctgcccacacctcacagacagggcaatgtcttccttggcacctgccgctctaaagaatacgatctggggtg

SEQ ID NO: 2630 - DNA, 405 bp, Glycine max
  Clone ID: LIB3072-015-Q1-E1-F2
gacagcaaaaacaattaataaagatgagtttgaagaacaacatggtggtgctaaaggtgtgtttgttgcttcttttccttgtgggggttacagctgcacgcatggaactgagcttcttcaaaagtgatcagtcatcaagttatgatgatgatgagtattcaaaaccatgctgtgatctctgcatgtgcacacgctcaatgcctcctcaatgcagctgtgaagatattaggctgaattcatgccactcagattgtaagagctgtatgtgcacacgctcacagccaggacagtgtcgttgtcttgacaccaacgacttctgctacaaaccttgcaagtccagagatgactagaaaaactaatagctctctcaaatggacgaagcccctttaagctttgtttgttatg

SEQ ID NO: 2631 - DNA, 395 bp, Glycine max
  Clone ID: LIB3072-015-Q1-E1-F4
gattcacacaactaactaagaaagtcttccatagccccccaaaaatgaagagcaccatcttctttgctccctttctcttttgtgccttcaccacctcatacctaccttcagccatcgctgatttcgtgctcgataatgaaggtaaccctcttgaaaatggtggcacatattatatcttgtcagacataacagcatttggtggaataagagcagccccaacgggaaatgaaagatgccctctcactgtggtgcaatctcgcaatgagctcgacaaagggattggaacaatcatctcgtccccatatcgaatccgttttatcgccgaagggcatcctttgagccttaagttcgattcatttgcagttataatgctgtgtgttggaattcctaccgag

SEQ ID NO: 2632 - DNA, 409 bp, Glycine max
  Clone ID: LIB3072-015-Q1-E1-F5
gcacacaactaactaagaaagtcttccatagccccccaaaaatgaagagcaccatcttctttgctctctttctcttttgtgccttcaccacctcatacctaccttcagccatcgctgatttcgtgctcgataatgaaggtaaccctcttgaaaatggtggcacatattatatcttgtcagacataacagcatttggtggaataagagcagccccaacgggaaatgaaagatgccctctcactgtggtgcaatctcgcaatgagctcgacaaagggattggaacaatcatctcgtccccatatcgaatccgttttatcgccgaaggccatcctttgagccttaagttcgattcatttgcagttataatgctgtgtgttggaattcctaccgagtggtctgttgtggagga

SEQ ID NO: 2633 - DNA, 450 bp, Glycine max
  unsure at all n locations
  Clone ID: LIB3072-015-Q1-E1-F6
cccacgcgaccgtaaagacgacagaaggggacagcatttttgaagtagtttgtgtagacttaaagaagagttaagggaaaaaataagatgaacactattggagttatgattatgatcatgtcgatgttagggttcgcacaagctaataactacaatcctccatttgtgcaagttgagtcaatcagtgagactaatagacttacttgtccacaagcatgcagagtacaatgtgcagctttagcaccagttgaaccatggtatgacaaatgtgttaaagaatgcactgcaaattgtaagcatgatgtgtccgttgctaaggattgctttactagttgtgccttaatcaagtccattaacatcaacaatgatgttcgtgatctttcgnacaatattgtgatgaattcctgcttgcaagaatgtcaaaacaagaaataagttgttacaagaatc

SEQ ID NO: 2634 - DNA, 394 bp, Glycine max
  Clone ID: LIB3072-015-Q1-E1-F7
gatccaatccaattgaattctccagagagaagaagaaacttaatcgatcatcacttcacttcactaatacatcatggcagacgggacccagaacaagtatgagagctctgaggttgaggtccaggatcgtggtgtttttgactttctcggtaagaaaaaggatgaagaagacaagcctcatcctcaggaggaggtcatcgccaccgagtttcaaaaagtcactgtctcagaccaaggagagaacaagcacagcctcttagaaaagcttcaccgatttgacagcagctctagctctgtaagcttcttttcctttattttctttgcatgcataaacattatatatataacttgttcatcctgaaaggaataactttatattaacttgtcttttttt

SEQ ID NO: 2635 - DNA, 404 bp, Glycine max
  Clone ID: LIB3072-015-Q1-E1-F8
gacagcaaaaacaattaataaagatgagtttgaagaacaacatggtggtgctaaaggtgtgtttgttgcttcttttccttgtgggggttacagctgcacgcatggaactgagcttcttcaaaagtgatcagtcatcaagttatgatgatgatgagtattcaaaaccatgctgtgatctctgcatgtgcacacgctcaatgcctcctcaatgcagctgtgaagatattaggctgaattcatgccactcagattgtaagagctgtatgtgcacacgctcacagccaggacagtgtcgtcgtcttgacaccaacgacttctgctacaaaccttgcaagtccagagatgactggaaaaactaatagctctctcaaatggacgaagccctttaagctttgtttgttatg

SEQ ID NO: 2636 - DNA, 317 bp, Glycine max
  Clone ID: LIB3072-015-Q1-E1-F9
gattcacacaactaactaagaaagtcttccatagccccccaaaaatgaagagcaccatcttctttgctctctttctcttttgtgccgtcaccagctcatacctaccttcagccatcgctgatttcgtgctcgataatgaaggtaaccctcttgacaatggtgggacatattatatcttgtcagacataacagcatttggtggaataagagcagccccaacgggaaatgaaagatgccctctcactgtggtgcaatctcgcaatgagctcgacaaagggattggaacaatcatctcgtccccatatcgaatccgtttt

SEQ ID NO: 2637 - DNA, 410 bp, Glycine max
  Clone ID: LIB3072-015-Q1-E1-G1
gatctcaaacattagtactaataacccaaaaatggcaccatcattttcatcagcaaccaagctcttctccttctcattgcttttgctaaccacaacaatggtttatgaagccaattctcaattacctctgcaaacgacgttggtgttctacctccaagacatagcaacaggacccaacgcaacagtttccccaatcaccggcctcaccggaagggattggacctacgaacaattcggaacaatattcgcagtggacgaccccgtgatgatgagcccaagcccggtctcagctcaagtgggccgggcccagggcctgctggtagtgtcagcccacgacggcgctaacgtgaacgcggtgctttcgattgtgttcacgaacttgcagtacagtgggagcagcattgagattc

SEQ ID NO: 2638 - DNA, 406 bp, Glycine max
  Clone ID: LIB3072-015-Q1-E1-G10
ggttctagcgtgtgattgtttgttgttgtaactcgttcttcttcttttgttgttctgtgtttgtgtttgttttttctctcacctgaaaatgtcttgctgcggtggtaactgtggttgcggaagctcctgcaagtgcggcaacggctgcggaggctgcaagatgtacccagacttgagctacactgagtcaaccaccaccgagaccttggtcatgggagtggcacctgttaaggctcaatttgagggtgctgaaatgggtgtgcccgctgagaacgatggctgcaaatgtggaccaaactgctcctgcaacccctgcacttgcaagtgacgtgttgggagagcaagcttcaagcagagatagcccttaattatgaaaaatgataactattaatgtgtagctaaaaac

SEQ ID NO: 2639 - DNA, 401 bp, Glycine max
  Clone ID: LIB3072-015-Q1-E1-G2
gacacaactaactaagaaagtcttccatagccccccaaaaatgaagagcaccatcttctttgctctctttctcttttgtgccttcaccacctcatacctaccttcagccatcgctgatttcgtgctcgataatgaaggtaaccctcttgaaaatggtggtacatattatatcttgtcagacataacagcatttggtggaataagagcagccccaacgggaaatgaaagatgccctctcactgtggtgcaatctcgcaatgagctcgacaaagggattggaacaatcatctcgtccccatatcgaatccgttttatcgccgaaggccatcctttgagccttaagttcgattcatttgcagttataatgctgtgtgttggaattcctaccgagtggtctgttg

SEQ ID NO: 2640 - DNA, 400 bp, Glycine max
  unsure at all n locations
  Clone ID: LIB3072-015-Q1-E1-G3
caagcacatgtggcctcttctaaaagtaggaggcggccacgggactggaagaagtgctgcagtggtggctagtttgagtgcaagggttgcatctattggggacaatcgtcttgggggctggtactcatatcgatcttcaaaggctgctcttaatcaattatcaaagactgtctccctggaatttgcaagaaagaaggatccaattgtatgcattttactgcatcctggtacagttgacacaaatctctctaagccatttcaaagaaatgttcccccagacaagctcttcaccaaagagttctcagttcagaagctactaagcatcattaacaatgtcaagatccatgacaatggcaagttctttgcctgngatggaaaagaaattccttggtaaccctgt

SEQ ID NO: 2641 - DNA, 405 bp, Glycine max
  Clone ID: LIB3072-015-Q1-E1-G4
gacagcaaaaacaattaataaagatgagtttgaagaacaacatggtggtgctaaaggtgtgtttgttgcttcttttccttgtgggggttacagctgcacgcatggaactgagcttcttcaaaagtgatcagtcatcaagttatgatgatgatgagtattcaaaaccacgctgtgatctctgcatgtgcacacgctcaatgcctcctcaatgcagctgtgaagatattaggctgaattcatgccactcagattgtaagagctgtatgtgcacacgctcacagccaggacagtgtcgttgtcttgacaccaacgacttctgctacaaaccttgcaagtccagagatgactagaaaaactaatagctctctcaaatggacgaagcccctttaagctttgtttgttatg

SEQ ID NO: 2642 - DNA, 405 bp, Glycine max
  Clone ID: LIB3072-015-Q1-E1-G5
gacagcaaaaacaattaataaggatgagtttgaagaacaacatggtggtgctaaaggtgtgtttgttgcttcttttccttgtgggggttacagctgcacgcatggaactgagcttcttcaaaagtgatcagtcatcaagttatgatgatgatgagtattcaaaaccatgctgtgatctctgcatgtgcacacgctcaatgcctcctcaatgcagctgtgaagatattaggctgaattcatgccactcagattgtaagagctgtatgtgcacacgctcacagccaggacagtgtcgttgtcttgacaccaacgacttctgctacaaaccttgcaagtccagagatgactagaaaaactaatagctctctcaaatggacgaagcccctttaggctttgtttgttatg

SEQ ID NO: 2643 - DNA, 376 bp, Glycine max
  Clone ID: LIB3072-015-Q1-E1-F10
gattcacacaactaactaagaaagtcttccatagccccccaaaaatgaagagcaccatcttctttgctctctttctcttttgtgcggtcaccacctcatacctaccttcagccatcgctgatttcgtgctcgataatgaaggtaaccctcttgaaaatggtggcacatattatatcttgtcagacataacagcatttggtggaataagagcagccccagcgggaaatgaaagatgccctcccactgtggtgcaatctcgcaatgagcctcgacaaagggattggtacaatcatctcgtcgccatatcgaatccgttttatctccgaatggcatcctttgagccttaagttcgattcatttgcacttacaatgctgt

SEQ ID NO: 2644 - DNA, 377 bp, Glycine max
  unsure at all n locations
  Clone ID: LIB3072-015-Q1-E1-D12
ggtggcatcagaaaatgaacagtttatcaatggcacttctccacccaaatcttcttcccactttcaattccaacactcttacctttccttccatcgaactcaaaccctcactctcgcacgtgccttctccaacccccacacgcttcagtctctctgtttccgcggcggaaaccaccgcttttgccgcccctcccactccccaacctgagaagcttggagttgtagttaagccaacggagaagccgagacttgtgttgaagttcatatggatggagaagaacattggaattgcgcttgaccagatggtaccgggccatggcaccattcctctgagcccatattacttttggccccgaaaagatgcctgngaagagctc

SEQ ID NO: 2645 - DNA, 402 bp, Glycine max
  Clone ID: LIB3072-015-Q1-E1-D2
ggttacatgagagaaaaaaagaaaaagataggagagttcaaattaaaggtaaaatctttttaaaaaatggatttgcacgtctttggaattttatgcattgttttggtcctgacttcaggagcagtaacatgtctggatgatgatccggaggatctgttttgtttaagaccatgctcaccattttgcaaccatgactgcattgtccgtggctataaatacggaggcgcctgtttcgcatatattatgtgttgttgtaagaagaattgatcatgactaccaccaatttgcaaccaagcaagaataatgcaacaacagatgatataagaaaaaagtgcatgcttctatggaatttgatgtgttttaatttgttgtaagaataattgaatattttgtacctctatc

SEQ ID NO: 2646 - DNA, 412 bp, Glycine max
  unsure at all n locations
  Clone ID: LIB3072-015-Q1-E1-D3
gattcacacaactaactaagaaagtcttccatagccccccaaaaatgaagagcaccatcttctttgctctctttctcttttgtgccttcaccacctcatacctaccttcagccatcgctgatttcgtgctcgataatgaaggtaaccctcttgaaaatggtggcacatattatatcttgtcagacataacagcatttggtggaataagagcagccccaacgggaaatgaaagatgccctctcactgtggtgcaatctcgcaatgagctcgacaaagggattggaacaatcatctcgtcnccacatcgaatccgttttatcgccgaaggccatcctttgagccttaagttcgattcatttgcagttataatgctgtgtgttggaattcctaccgagtggtctgttgtggagga

SEQ ID NO: 2647 - DNA, 405 bp, Glycine max
  Clone ID: LIB3072-015-Q1-E1-D6
gacagcaaaaacaattaataaagatgagtttgaagaacaacatggtggtgctaaaggtgtgtttgttgcttcttttccttgtgggggttacagctgcacgcatggaactgagcttcttcaaaagtgatcagtcatcaagttatgatgatgatgagtattcaaaaccatgctgtgatctctgcatgtgcacacgctcaatgcctcctcaatgcagctgtgaagatattaggctgaattcatgccactcagattgtaagagctgtatgtgcacacgctcacagccaggacagtgtcgttgtcttgacaccaacgacttctgctacaaaccttgcaagtccagagatgactagaaaaactaatagctctctcaaatggacgaagcccctttaggctttgtttgttatg

SEQ ID NO: 2648 - DNA, 404 bp, Glycine max
  Clone ID: LIB3072-015-Q1-E1-D7
gacattacacaagtttatgaccatcagtgggcgagttggtgaagcaaagtcaactcactggaaactcggttgaactcggtgtgtgtagaaatggcgaaacttgaagccaagctagggatgatcttggactcggtgggtcagttcttctccggcaaggaccatcttccttattgtgactctgacgtcgtagctggatgtgaaagagaggtcttggaggcagaaaagcaatcatctcaagagtatatgcaagactgtctcctgcgtttatcatgggctcttgttcactccaaacacccacaagatgtgcacccatctttgcctgctacagaggacccactgcagcaaagggagaagctttatcttctggctgttggatactatagaaatgctgattattcaaggag

SEQ ID NO: 2649 - DNA, 411 bp, Glycine max
  Clone ID: LIB3072-015-Q1-E1-D8
gattcacacaactaactaagaaagtcttccatagccccccaaaaatgaagagcaccatcttctttgctctctttctcttttgtgccttcaccacctcatacctaccttcagccatcgctgatttcgtgctcgataatgaaggtaaccctcttgaaaatggtggcacatattatatcttgtcagacataacagcatttggtggaataagagcagccccaacgggaaatgaaagatgccctctcactgtggtgcaatctcgcaatgagctcgacaaagggattggaacaatcatctcgtccccatatcgaatccgttttatcgccgaaggccatcctttgagccttaagttcgattcatttgcagttataatgctgtgtgttggaattcctaccgagtggtctgttgtggagg

SEQ ID NO: 2650 - DNA, 276 bp, Glycine max
  Clone ID: LIB3072-015-Q1-E1-E1
gacagcacacacaattaataaagatgagtttgaagaacaacatggtggtgctaaacgtgtgtttgttgcttcttttccttgtgggggttacagctgcacgcatggaactgagcttcttcaaaagtgataagtcatcaagttatgatgatgatgagtattcaaaacaatgctgtgatctctgcatgtgcaaacgctcaatgcctcctcaatgcagctgtgaacatattaggctgaattcatgccactcagattgtaaaagctgtatgtgcacacgct

SEQ ID NO: 2651 - DNA, 325 bp, Glycine max
  Clone ID: LIB3072-015-Q1-E1-E12
aatagcagaaacaattaacattgatgactttgacgaacatcatgatagtgcaaatagtatgtttattgcatctgttccctgtggaggtgacagctgacaacacagatctcagcttcatcaaaactcataattcatcacgataagatgacaatcattaatcacaatcatgctcagatctctgcaagtgcacatcctcaataccactgcaatacacctgtaaaaatattatgctgcattcaagctactcatagtgtaagatctgaatgtacacactctcacactcattacagtgtcgctggcgtgaacaaaacgtcttctgctacaa

SEQ ID NO: 2652 - DNA, 372 bp, Glycine max
  Clone ID: LIB3072-015-Q1-E1-E2
gacagcaaaaacaattaataaagatgagtttgaagaacaacatggtggtgctaaaggtgtgtttgttgcttcttttccttgtgggggttacagctgcacgcatggaactgagcttcttcaaaagtgatcagtcagcaagttatgatgatgatgagtattcaaaaccatgctgtgatctctgcatgtgcacacgctcaatgcctcctcaatgcagctgtgaagatattaggctgaattcatgccactcagattgtaagagctgtatgtgcacacgctcacagccaggacagtgtcgttgtcttgacaccaacgacttctgctacaaaccttgcaagtccagagatgactagaaaaactaatagctctctcaaa

SEQ ID NO: 2653 - DNA, 395 bp, Glycine max
  Clone ID: LIB3072-015-Q1-E1-E3
cactcactctttgactcttcttcgtctcaaatctcttcgttccttcgattcgttccatttcttccaaaatggccaaagacccagttcgcgttctcgtcactggagctgcagggcaaattgggtatgctcttgtccctatgattgctaggggagtgatgttgggtcctgaccagcccgtgatcctccacatgcttgacattcctccggcagcagagtcattgaatggggttaaaatggaattggtggatgctgcattccctcttcttaaaggtattgttgccacaactgatgtggttgaggcatgcactggggtcaatattgccgtgatggttggtggattcccaagaaaagaaggtatggagaggaaggatgtgatgactaagaacgtctccatt

SEQ ID NO: 2654 - DNA, 233 bp, Glycine max
  Clone ID: LIB3072-015-Q1-E1-E5
gatgcgacaacacgacgggacgggacccatcattagcaaagttgcgttgttcacaataccacggcagctgtcatcgcgtctgtgttgcctcatttccatgtcctcgttatggctgcacgcataggactgatgttcctcgcagctccataggttgcaacttatgcacagtgataagtattccatggcaagcattgatcgctgcagctatacacacgcagtgcatcatcactaca

SEQ ID NO: 2655 - DNA, 318 bp, Glycine max
  Clone ID: LIB3072-015-Q1-E1-E7
tgggacatcaatcacaattaacacacacgcaattccataacatcatggcggtgctaaacgcgtgcttgttgcttcttttcattgtgggggttacacctgcacccatagaactgaacatcttcacaagtgatcagtcatcaatcatacaattactatcattcaccatcatcatgctatgatctcagcatgtgcacacgcgcaatgtttcctcaatccacatgctcacatattatgatgaattcattccaatcagatcgtacgaactcttcgtgaatacactcacagccaagacagtatcttttacccgagatcaacaaa

SEQ ID NO: 2656 - DNA, 55 bp, Glycine max
  Clone ID: LIB3072-015-Q1-E1-E8
taccgctccgacaacatcagggaatggttccgatgcgtgatcacgacctactggt

SEQ ID NO: 2657 - DNA, 362 bp, Glycine max
  unsure at all n locations
  Clone ID: LIB3072-015-Q1-E1-D11
gacaggtgtttgcaatactagcgatagctgataagagagataccaacaagaaaagaaaaaaagaagagttgagattccctttgaagaaaagatggcatcccataggcaaagctatgaagctggtcaaactaagggccgaactgaggaaaagacgaaccagacgatgggcaatattggagagaaggctcaagctgcaaaggagaagacccaggaaatggcccaagctgcaaaggagaagacccaacaaacagcccgagctgccaaggacaagacttgcgacacttcccaagcggcaaaggagaagacccaacagaatacaggagctgctcaacanaagacctcagagatgggccagtccacga

SEQ ID NO: 2658 - DNA, 277 bp, Glycine max
  Clone ID: LIB3072-015-Q1-E1-F1
gctctttagtctttctctttttctctctctccattccgtgttttcagctccggtaacctctccttctccgccgccgttgctatctccgccgtgaccttccatccctcaacgccccacagatcttcaatttgattgcttgggtcaacaatttctgtcattctcaatcatggcaactagacttcagtttgaaaataattgtgaagttggagtcttctctaaactcaccaatgcttactgtttggttgcgactggaggttctgaaagcttctacagtgta

SEQ ID NO: 2659 - DNA, 403 bp, Glycine max
  Clone ID: LIB3072-015-Q1-E1-B2
gattcacacaactaactaagaaagtcttccatagccccccaaaaatgaagagcaccatcttctttgctctctttctcttttgtgccttcaccacctcatacctaccttcagccatcgctgatttcgtgctcgataatgaaggtaaccctcttgaaaatggtggcacatattatatcttgtcagacataacagcatttggtggaataagagcagccccaacgggaaatgaaagatgccctctcactgtggtgcaatctcgcaatgagctcgacaaagggattggaacaatcatctcgtccccatatcgaatccgttttatcgccgaaggccatcctttgagccttaagttcgattcatttgcagttataatgctgtgtgttggaattcctaccgagtggtctgt

SEQ ID NO: 2660 - DNA, 383 bp, Glycine max
  Clone ID: LIB3072-015-Q1-E1-B4
gacaacacaaacattctctccattgtctttgaacactcatcaccatggccaagcttgttctttccctttgtttccttcttttcagtggctgcttcgctctgagagagcaggcacagcaaaatgagtgccagatccaaaagctgaatgccctcaaaccggataaccgtatagagtcggaaagtgggttcattgagacctggaaccctaacaacaagccattccagcgtgccggtgttgccctctctcgctgcacccttaaccgcaatgcccttcgtagaccttcctacaccaacggtccccaggaaatctacatacaacaaggtaatggtatttttgggatgatattcccgggttgtcctagcacttatcaagagccgcaagaa

SEQ ID NO: 2661 - DNA, 417 bp, Glycine max
  unsure at all n locations
  Clone ID: LIB3072-015-Q1-E1-B5
ggtgttttcatcgttgtcgttcagttctgaacggaaaagcaccgtcgcaccttccctgaggcttctcttgtctgtcgcgagtgaccatggtgagggttagtgtgctgaacgatgctctgaagagcatgtacaatgctgagaaaaggggaaagcgccaagtcatgattcggccatcctctaaagtcattatcaaattccttttggtgatgcagaagcacggatacattggagagtttgagtatgttgatgaccacagggctggtaaaatcgtggtcgaattgaacggtacactgaacaagtgtggggttattagtccccgttttgatgtcngcgtcaaagagattgaacgttggactgctaggcttctcccctcaagacagtttgggtataatgtattgactacctctgccggcatca

SEQ ID NO: 2662 - DNA, 200 bp, Glycine max
  Clone ID: LIB3072-015-Q1-E1-B6
cacatagagggatgcacggaactgacgatcgaagtcttccatagggccccgcagttgaaaggcaccatcttgtttgctctctttctcttttgtgccttcagcagctcatagctaccgtcagccatcgctgatttcgtgctcgatactgcaagtagacctcttgaatatggtaggacatagtatatcttgtcatacatggg

SEQ ID NO: 2663 - DNA, 234 bp, Glycine max
  Clone ID: LIB3072-015-Q1-E1-B8
gatgcgagaactacatgagggtacagttgccataacactacataacgggcttttgatcatacacagtcagcgcattccataccccatattgcattcattcggctatagagctatcgcgttgctaaactttgccgtaaacagtcaggcgcatatctgcgcatggcttctgtatccggcgacttcaataccccactcactctggacacgtccaggttttgaacatcaactggtttc

SEQ ID NO: 2664 - DNA, 407 bp, Glycine max
  Clone ID: LIB3072-015-Q1-E1-C1
gattcacacaactaactaagaaagtcttccatagccccccaaaaatgaagagcaccatcttctttgctctctttctcttttgtgccttcaccacctcatacctaccttcagccatcgctgatttcgtgctcgataatgaaggtaaccctcttgaaaatggtggcacatattatatcttgtcagacataacagcatttggtggaataagagcagccccaacgggaaatgaaagatgccctctcactgtggtgcaatctcgcaatgagctcgacaaagggattggaacaatcatctcgtccccatatcgaatccgttttatcgccgaaagccatcctttgagccttaagttcgattcatttgcagttataatgctgtgtgttggaattcctaccgagtggtctgttgtg

SEQ ID NO: 2665 - DNA, 372 bp, Glycine max
  unsure at all n locations
  Clone ID: LIB3072-015-Q1-E1-C12
ggtgcagttgtgctgtatctgggtacagtttaagtacagaccaatcctcatattcattcaattcaatggctctctactccttcttctctccctctcttttataccctccctcacatattccccgtcgacttttttgtcccaaggcttccttaagctcttcctcccctgaatccaaagcatcgcaaagtgtttcttctgcaacttccaccaccacttcccctaccccttcggttgagtctaggccacctgaccctgccttcaactatgcactcaccaaccctaacggcaacccaatcgtaaggattgttcgagccaccgagtcttccattganagggtcatttttgatttccgcttcttggcattacttgctg

SEQ ID NO: 2666 - DNA, 409 bp, Glycine max
  unsure at all n locations
  Clone ID: LIB3072-015-Q1-E1-C2
gataacaatccctattaaaatcttctaaaattaaattaccatatatagtcacattttctttacactttgtgaggtctaaaatgttgtccatttttcacaaggggtttgctcacccacctgaagagcttaaaagccctgcatctaacagtggctccaacaagcctaagattcctgaggaaactctaagagaatttctttctcatcatccccataacactttttctctgagttttggtcactctgctgttctagcttatactcgtcctgattcaccttcctttgttcatcaaaggttgttttgtgggattgatgacatatactgtatctttttggggagcttgaacaatttgtgctcactcaacaagcagtatggtttggcaaanggcaccaacgaagccatgtttgtgat

SEQ ID NO: 2667 - DNA, 439 bp, Glycine max
  Clone ID: LIB3072-015-Q1-E1-C3
cacacgcgtccgtgcggaagacgacagaaggggatatttagatattttacttttagatttatttggagtttagtttagaacaggcctgtcttctcttaaacgaggtcgtgttgtttggttttgaatttgaagtgatttgatgatggagatgaatatattggcttcttcgttctctggttatgcaaaaccctttgtaagagtaaacccttctcttcttacgctcagggcatcttctctgcgccatgactaccctcttgcaagcaaaattgttgtcaaaaatttaccatattctaccggtgagactactttgcagaaggaattttcaaattttggcaagatagcagaagttaaaatggttaaagatatgaacacaaaaagatctaagggtattgctttcattcaatatacatgtcaagatgatgccatgcttgcactagaa

SEQ ID NO: 2668 - DNA, 377 bp, Glycine max
  Clone ID: LIB3072-015-Q1-E1-C5
gacacaactaactaagaaagtcttccatagccccccaaaaatgaagagcaccatcttctttgctctctttctcttttgtgccttcaccacctcatacctaccttcagccatcgccgatttcgtgctcgataatgaaggtaaccctcttgaaaatggtggcacatattatatcttgtcagacacaacagcatttggtggaataagagcagccccaacgggaaatgaaagatgccctctcactgtggtgcaatctcgcaatgagctcgacaaagggattggaacaatcatctcgtccccatatcgaatccgttttatcgccgaaggccatcctttgagccttaagttcgattcatttgcagttataatgttgtgtgttg

SEQ ID NO: 2669 - DNA, 306 bp, Glycine max
  Clone ID: LIB3072-015-Q1-E1-C6
gacactcctagtcatcaaacgtcttcgataacaccacaaacttgaagatcaccatcttcgttgctctcgttctcgctcgtgccttcggaacctcatacctagcttcatgtatcgctgatttcgtgctccatagtgattggtaaccctcttgaatatggtggcaatgatatatcttgtcatgacatagcatcatttggttgaatatgacctgccacaacgggaggtgacagatgatctctcactgtggtgcaaactagcagtgagctcgacaaacggattggaacactcatctcatcaccatatcga

SEQ ID NO: 2670 - DNA, 301 bp, Glycine max
  Clone ID: LIB3072-015-Q1-E1-C7
tcaatcgcaactgtcgctcgacgctcacaaaccggtaccgtagctcccaacacgtgttcaccggcacggatcgcgtcatgacgggaggagggtccagctgcgaatctaagacagccgggtatcctgctgctgtgatgacaaacggagccgccaccactgcgacgtaagcccccggcaaagggaaagcagcgaaagaacctaacaagcgaacgaggcgtctaagtgctttcttcgctttcatggaagatttcaggactgtattcaagatacaacatccctgaatacaaggcagtgtctgctg

SEQ ID NO: 2671 - DNA, 408 bp, Glycine max
  Clone ID: LIB3072-015-Q1-E1-C8
ggccggctccagcaacctctgccaatctttaatgggtgtgattgatttctacaacactggtgctttgtgctgggttaagtccaacgccaatctgaagcagcaagtgggtttggcaccaagacccatttgttcatttgaggggaataatcagaggaagtttgtggcaatggcttctaccgttcctgtggagcaagtcaacaatggccccctgcaggtgacaggtgactccttcatcagagagcatctgaggaagttggctccttatcagcccattttgccctttgaggttttatcagctcgccttggacgtaagcctgaggatatcgtgaagttagatgctaatgaaaatccttatggtccccctccagaggtcatggaagccctaagatcaatgcaatttccatatgt

SEQ ID NO: 2672 - DNA, 422 bp, Glycine max
  Clone ID: LIB3072-015-Q1-E1-D1
gatagtattatcattcattctcatctttctctcttctctctccacccaaaccctaactcccgaccctgttcccctctcgcatccgtcatgaaaggaggaaagtccaagaccgaatctaagagagccgatcccaaacttgctgtgaataagaagggagccgccaccaaggctaggaaacccgccggcaaggggaaggcagcgaaagaccctaacaagccaaagaggcctccaagtgctttcttcgttttcatggaggagttcaggaaggtattcaacaaagaacatcctgaaaacaaagcagtgtctgctgtgggcaaagctgctggagcaaaatggaagaccatgtctgatgctgaaaaagcaccttatgtggcaaagtctgagaaaaggaaagtggagtacgagaagaacatgagagccta

SEQ ID NO: 2673 - DNA, 398 bp, Glycine max
  unsure at all n locations
  Clone ID: LIB3072-015-Q1-E1-D10
gcgtcacaagaaaaaaagaaaactccccttaaacccccccccttcatgttcttttcttttctctttttgctctaagcaaaaaccaccactccgcaccacaccaccaccatggcagcaagagcaaaaactccccttaacactctctcctctttcacatacacactctttctctcattctctctcctccaactttctctctcctcccccaccaccatccacgaccttctccgctccaaaggcttaccaccggggctcctcccggaggaggtgaaatcctacaccttctctgaaactgggcacttggaagtgttcctggacgcaccatgcctcacanaatacgagaacagagtcctcttcgaacaagtcgtcactgctaacctcacctacggaagcctcat

SEQ ID NO: 2674 - DNA, 258 bp, Glycine max
  Clone ID: LIB3072-014-Q1-E1-G8
taatttgggaattattgctcccatcgccattggtttcattgtcggcgctaacattttgttgggtggggccttctctggagcggccatgaaccccgctgtggcatttgggcctgctgtcgtgagctggacctggaccaaccactggatctactgggccgggcctctcatcggtggtggaatcgctggccttgtttacgaggttgtctttatcagccacacccacgagcagcttcccaccactgactactagaggggggg

SEQ ID NO: 2675 - DNA, 414 bp, Glycine max
  Clone ID: LIB3072-014-Q1-E1-H11
gacactgattgagagaaaaataatggaggcttacactaaggttgtttgcattcttggacttttaatttttgtaagcatttcagatattcatagagtggagggtgcaggggaatgtgggaggtctactactccagataatgaagcaataaagcttattccttgtgtctctgccgcaaaagatgaaaatgttaaagttactaagaattgctgtgctcagatcgagaaacttggcaagaaccctagttgtctgtgtgctgttatgctctccaacacagcaaaaatgtctggagccgatcctaaggttgccataaccatcccaaaacgctgcaaccttgctaatcgccctgttggttacaagtgtggaccttacactcttccttaagatagtactgaggacaaggacggatttgggcg

SEQ ID NO: 2676 - DNA, 413 bp, Glycine max
  Clone ID: LIB3072-014-Q1-E1-H12
gaaggttcaggcagacaccaacgttgttaaaacccagattaaaccctccattttctcttcctctctttctagctctctctgctccaattcacagataacaatgcaaatttctcttagcaatttagctttcaagacccctcaactcttcccaattcagcaccccattttccctccaaaggcaccactgtaccaccaccaagtttcaacgcagagccatgtcaacaatgtcctgaaagggtcgtcggggtatttgtcagaaatcagcaaagcgattgatcacgaagaacagtaccggttagcccggtcgcaggttaaccggaaagttttggacttggaaggttattccataaaaggtctttcagttggaggccaagagacatgtatcaaaactcctgagttcaagtgcacttttg

SEQ ID NO: 2677 - DNA, 257 bp, Glycine max
  Clone ID: LIB3072-014-Q1-E1-H2
acacgtctcttattacccatcctcccacatttcggtaattttgcaaataatgctcccatcgccctttgtttcattctctgttctaacattttgttctgtgtggccttctcttcatctgttatgtgtgcctcggtgccatttgtgcctaaaaacctgagctggaccttcaccaacctctggatctattgtgtcgggcctctcatccgttgttttctccctgtcttttatttaccatgttttctttatcttcttctctc

SEQ ID NO: 2678 - DNA, 245 bp, Glycine max
  Clone ID: LIB3072-014-Q1-E1-H5
gacagcaaaaacaattaataaagatgagtttgaagaacaacatggtggtgctaaaggtgtgtttgtgacttcgggtccttgtgggccttacaaatgcacgcatggaactgagcttcttcaaaagtgatcagtcatcgacttatgatgatcaccagtactcaggatcatgctgtgatccctgcatgtccacacgctcaatagttcctcactgctactctggggataataagctgcattcatgccaa

SEQ ID NO: 2679 - DNA, 353 bp, Glycine max
  Clone ID: LIB3072-014-Q1-E1-H6
gacagcaaaaacaattaataaagatgagtttgaagaacaacatggtggtgctaaaggtgtgtttgttgcttcttttccttgtgggggttacagctgcacgcatggaactgagcttcttcaaaagtgatcagtcatcaagttatgatgatgatgagtattcaaaaccatgctgtgatctctgcatgtgcacacgctcaatgcctcctcaatgcagctgtgaagatattaggctgaattcatgccactcagattgtaagagctgtatgtgcacacgctcacagccaggacagtgtcgtcgtcttgacaccaacgacttctgctacaaaccttgcaagtccagagatgactaagag

SEQ ID NO: 2680 - DNA, 243 bp, Glycine max
  Clone ID: LIB3072-014-Q1-E1-H8
gattgtatatcatttacaatttcaatctctctctctctctatctctctctctctctagacttacattttgtgaagcgctcaagtggaacagggacaggtcaacagcgtggagaccttttatgagtgcactctgctactccagaatgttgaatactccaacaaactgattgtcgtggattttactgcttcctggtgctgtccatgccctttttatcgcgccagtttcttgcaccactatctctc

SEQ ID NO: 2681 - DNA, 109 bp, Glycine max
  Clone ID: LIB3072-015-Q1-E1-A11
ccaagcgtccgaacaagcgtccgaacgctgccaaaaggcgacacaaaggggaataaagattaattcaaataatcaatggcaacaatcaataaacgggtttaaggtacct

SEQ ID NO: 2682 - DNA, 405 bp, Glycine max; identical to SEQ ID NO: 2630
  Clone ID: LIB3072-015-Q1-E1-A2

SEQ ID NO: 2683 - DNA, 422 bp, Glycine max
  Clone ID: LIB3072-015-Q1-E1-A3
agttttggataattgtgtcttcctgcgtttattttattgccaaagaaaaaggaatttttacgaataatgaaatggaagatgatgaataaagagatatccagttaatccaccaggccacggcatattgaaagcagtttatggttaattacttaatttaatcattggttttgtgaaaactaaaaataatggctattattacggtttgcccataacgagacaagcagcaccgttttcttacaaaagtttttcaaggccactttggttggttggctcttgtgcaaatactgagaatcatataagttcttgcacttgcctttttgaaatgaccctaattgtgaaggggaagaaaatattatcaactttcatttttctgtgtaataatatataataatatatgctctctctctttttttttttttttt

SEQ ID NO: 2684 - DNA, 116 bp, Glycine max
  Clone ID: LIB3072-015-Q1-E1-A4
ggagaccgaactcgaacattcgaaccccaaagtccacgttacaaatagcgcactgcatctgcaactgcaaactgcgaagcgaagccaactcccaaaaagtaaagcacaatttcaac

SEQ ID NO: 2685 - DNA, 179 bp, Glycine max
  Clone ID: LIB3072-015-Q1-E1-A6
gctgcgacaagaggagagaacgatatcgatgcttcaagtcgacaagtcgataccgcagctagctcactgcatctgcgtgatcaaagtgcacttctaatccaactccggggggagggaagcacagtttcagcactacaatacaagcgtgcatacgcctacaatgcggacgctcaacacga

SEQ ID NO: 2686 - DNA, 395 bp, Glycine max
  unsure at all n locations
  Clone ID: LIB3072-015-Q1-E1-A9
ggcagccaagaaaagaaaatcctcacccattttcttcgtagccaaacactctgaaattctcagttatgtcgtggcaagcgtatgtggatgatcacctactgtgtgaaatcgaaggtaaccacctcactcacgccgctatcatcggccaagacggaagcgtttgggctcagagcaccaacttccctcagttcaaacctgaggaaataactgccatcaataatgactttaatgagcctggatcacttgctccaactggattgtatatcggtggcaccaaatacatggtcatccagggtgagcctggtgctgtcattcgagggaagaagggtcctgntggtgttactgtgaagaagaacggtgcggccttgatcattggcatttaagatgaaccaatg

SEQ ID NO: 2687 - DNA, 372 bp, Glycine max
  Clone ID: LIB3072-015-Q1-E1-B1
ggcatcaaattcaggagcgtgattcaacccaactcaagaacagtttgtcaggatcgaatttagagtgcaagaacccaagcttggagttcacattaggaagaccggactggaatggcaaagggcaagcctaattttcattggttccctttattgtctctagctagtttgcttaattagtttaattacaacccggtaacatgtgacaaacttcataatctttcctgaaatagaaaggtggtactatatataaaaatatatattcaggcagaaaaagtaaaagccctatatagttccgctaagtttatccttttttggaagttttatgacttcatgaacaattttgtttagcctttttcttgtatttaacatttt

SEQ ID NO: 2688 - DNA, 410 bp, Glycine max
  Clone ID: LIB3072-015-Q1-E1-B10
acaactcaaacattctctccattggtccttaaacactcatcagtcatcaccatggccaagctagttttttccctttgttttctgcttttcagtggctgctgcttcgctttcagttccagagagcagcctcagcaaaacgagtgccagatccaaaaactcaatgccctcaaaccggataaccgtatagagtcagaaggagggctcattgagacatggaaccctaacaacaagccattccagtgtgccggtgttgccctctctcgctgcaccctcaaccgcaacgcccttcgtagaccttcctacaccaacggtccccaggaaatctacatccaacaaggtaagggtatttttggcatgatatacccgggttgttctagcacatttgaagagcctcaacaacctcaacaaag

SEQ ID NO: 2689 - DNA, 420 bp, Glycine max; identical to SEQ ID NO: 551
  Clone ID: LIB3072-014-Q1-E1-G7

SEQ ID NO: 2690 - DNA, 354 bp, Glycine max
  Clone ID: LIB3072-015-Q1-E1-B11
ggaggacaaaagaagaagtatcactcatataatactctgtatcatttcatttcgataatcatccatagctactgaagaaaatggcagccatctctgctgctatcacaaccccatcgatctcccgcgcaactcttgtgcaaaagcgggtctcatctcccgttcttggtttgccagcaatgggtaaggtgggaagagtgagttgctccatggaggaaaaaccttattctgtgaaggaaagcagctctagcatgttggggatgggagcatctctgatggcagctgccagcgctgcagccatgtcaggcccagccatggccttggtagatgagagactgagcactgaacgaaacggac

SEQ ID NO: 2691 - DNA, 246 bp, Glycine max
  Clone ID: LIB3072-014-Q1-E1-E10
gattcacacaactaactaataaagtcttccatatccccccataaatgaagagcaccatcttctttgctctctttctcttttgtgccttgagcacctcatacctatcttcatccatcgctgatttcgtgctcgataatgaaggtctccctcttgacaatggtggctcatactatatcttgtcagacataacaccatttggtgcaatactagcagctcctacgggaatttaaacatgccctctcactg

SEQ ID NO: 2692 - DNA, 388 bp, Glycine max
  Clone ID: LIB3072-014-Q1-E1-E11
gacagcaaaaacaattaataaagatgagtttgaagaacaacatggtggtgctaaaggtgtgtttgttgctccttttccttgtgggggttacagctgcacgcatggaactgagcttcttcaaaagtgatcagtcatcaagttatgatgatgatgagtattcaaaaccatgctgtgatctctgcatgtgcacacgctcaatgcctcctcaatgcagctgtgaagatattaggctgaattcatgccactcagattgtaagagctgtatgtgcacacgctcacagccaggacagtgtcgttgtcttgacaccaacgacttctgctacaaaccttgcaagtccagagatgactagaataactaatagctctcccaaatggacgaagccccttt

SEQ ID NO: 2693 - DNA, 309 bp, Glycine max
  Clone ID: LIB3072-014-Q1-E1-E12
gacagcaaaaacaattaataaagatgagtttgaagaacaacatggtggtgctaaaggtgtgtttgttgcggctttgccttgtgggggttacagctgcacgcatggaactgagcttcttcaaaagtgatcagtcatcaagttatgatgatgatgagtattcataaccatgctgtgatctctgcatgtgcacacgctcaatgcctcctcaatgcagctgtgaagatcttacgctgaattcatgccactcagattgtaagagctgtacgtgcacacgctcacagccaggacagtgtcgttgtcctgacacca

SEQ ID NO: 2694 - DNA, 298 bp, Glycine max
  Clone ID: LIB3072-014-Q1-E1-E2
agaaggggagacacaacactagtaagcccctttcattagcctttctactattcctatataaaccacactcacctcagctccaaccttcatgcagagaggagagaagaaagagttttaattactgcctcaatagtttccaaattgcgaaaaaaatgtccgcctatggtaaaggtatgggttggggagctgacaaagcttcgagaaaaagttcttgcccgcaagcctttcttattacccaaagccaaggatggttcagaagggaaccaggaggaaaaggaaactcaaattgcggtggtta

SEQ ID NO: 2695 - DNA, 416 bp, Glycine max
  Clone ID: LIB3072-014-Q1-E1-E4
gatgcaactgaataattaagaaaagccatttccatagcagcctaagaaaatgaagagcactagcttgttcgctatctttctactttgcgccttcagctcatacctaccttccgccaccgcccaggacgtgctcgacgtggatggcgatccgattcggaacggtttcatatactacgttttgccggcaataagaggaaacggtggcggaatagaacgagccgcactcgggaaagacacttgccctatcactgtagtgcaatctcccaatccaaactctaaggggttagaaattaagtttgaatctgcataccccgcctattacataaacgaaaccctaattttgcaaataaagttcagttacccacagcagtgtgaaagaaagaatccttggtgggccatttctaaggatatacctg

SEQ ID NO: 2696 - DNA, 397 bp, Glycine max
  Clone ID: LIB3072-014-Q1-E1-E5
ggtgtttgagagattaagacctttttgcattgcaaatggctgctgcaactgctggagttgttggtggaaatggttcgtctgcttcttggatgcgattcaaaggcaaggaaaggaagcaaaccaagatgaacaagtcaaggattagttgctcttattcttcttctgtgatggatccttacaagaccttaagaatacaacgcggtgcctctgaatctgaggtcaggaaggctttcaggcagcttgctctgcagtaccatccagacgtgtgcagagggagcaattgtggggtgcagtttcacgaaatcaacgaggcttatgatactgtgatggccaacttaagaggagaatcaaatgcgacagaatcgtatgaggcttattatgatgctggaattgatga

SEQ ID NO: 2697 - DNA, 310 bp, Glycine max
  Clone ID: LIB3072-014-Q1-E1-E6
gatcccataaaaaacacaagcaaatcctaaaaagttcactgagatatatagaactatcttcaatttcacaaaatgaagaaagtgtttgtgagatttgtagctctgctagttgtaattgttcttaaagtgacagcttccgaattaaagccaacagtcacaacaaatttaacaacaaatgaacaataatggtcacaagtgatgaataacttgtttgtttcgtgcgtagattacctcaatggtggagatgctgttccctcaagtgtttgttgccaaagtgttaatgcactgtaagcatctacacaaacacaaa

SEQ ID NO: 2698 - DNA, 422 bp, Glycine max
  Clone ID: LIB3072-014-Q1-E1-E7
gaataatgttaatatcagagagacagcttatccttaaggcttgacccaaagccactcactcgtgcgtgtgtatagcgtagcagctaaggggaatgcccactttgaatctcttcacaaacgttcctgtcgacaccgtcgttgcttctgacattctcagagatgccaccaaagctgttgcaaaaatcatcggaaaacccgaatcctatgtgatgattttgttgaatgggggagtgcctattgcatttgctggaactgaagagccagctgcttatggagaactgatctcgattgggggccttggtccgagtgtcaatggaaaactgagttctacaattgcagaaattcttgaaactaagctatacattgacagttcccgtgtctatatcaagttttatgatgttcagcgctcattctttgggttc

SEQ ID NO: 2699 - DNA, 213 bp, Glycine max
  Clone ID: LIB3072-014-Q1-E1-E9
gacagcaaaaacaattaataaagatgagtttgaagaacaacatggtggtgctaaacgtgtgtttgttgcttcttttccttgtgggggtgacagctgcacgcatggaagtgaccttctgcggggagtgatcagtcatcaagttatgattatgatgagtattcaaaaccatgctgtcatctctgcacgtgcacacgctcaatgcctcgtcaatgc

SEQ ID NO: 2700 - DNA, 336 bp, Glycine max
  Clone ID: LIB3072-014-Q1-E1-F1
cacgtctctatacgctgcgagaacaccacagagggagaactcatcctatctaagcaacttatttcacattctgtttgaccttccttcattccccgttctgtatatatcttcacactaatgtggctatcagccccttcaacacctcaaaaatctctctctctacaccattctctacatctgtagaatcccaccataaacgtaccaatttcttccgtacaacatctgtaaattccaatcctatctgactagtttgatgtatcggggaatgcctattccattctctcgaactgatgatccaacacgttttctagaactgatatccaatacgggtccttg

SEQ ID NO: 2701 - DNA, 251 bp, Glycine max
  Clone ID: LIB3072-014-Q1-E1-F10
cagaaggggacacaactaactaagaaagtcttccatagccccccataagtgatgagcaccatcttctttgctctctttctcttttgtgccttcaccatctcgggggggggcttcagccatcgctgatttcgtgctggatagtgaacgtaatcctcttgaaaatggtggcacatattatatcttgtcagagataacagcatttggtggaataagagctgtcccaacggcgaaatcagacatgtcctctcact

SEQ ID NO: 2702 - DNA, 354 bp, Glycine max
  Clone ID: LIB3072-014-Q1-E1-F4
gaaggcacccacgtagagaacctctaaaaacaaaaataaaaacattctctcccattcctcccccccttagcccttccttccttcagtgggtttctctttcttttgttggtttgtttgttccttttgttgtacgttctcctttgttctcttcttccgcatttggtacatgcggtgttctacttctctcttggtttgataacaggatttgacacaagtgttgtggtctcccatttcaggagaatcactcactggcataatatagagcttgtcaaaaaaaaaaaaaaaaaaaagtaagtgttttgagatccggcatgttatccttttccctctagctttaaattctttgtgggggtg

SEQ ID NO: 2703 - DNA, 420 bp, Glycine max
  unsure at all n locations
  Clone ID: LIB3072-014-Q1-E1-G5
ggagagagaagcctccatttataaaacatcgtgtgcgcactctctcttctcctaggcttcgctcccatcaacagcaacgatggtgcagaggctcacttatcgcaagcgccatagctatgctaccaaatccaaccagcaccgggttgttaagacccctggtgggaagttggtgtaccagaccactaagaagagagcaagtggacctaagtgccctgtcactggcaagaggatccaagggattccacacttaagacctgctgaatacaagaggtctagattgcctangaaccgcaggaccgtaaaccgagcctatggaggtgttttatccgggggagctgttagagaaaggattattcgcgctttccttgttgaagagcaaaaaattgtgaaaaaggtattgaagattcagaaggcaaaaga

SEQ ID NO: 2704 - DNA, 426 bp, Glycine max
  Clone ID: LIB3072-014-Q1-E1-G6
gaaggaagggagggaagaatagaatgggatctggaagtggaaaacacactggagagttcttcaggagaagggatgcatggaggaagcatccgatgctcaccaatcagctccgccacgccacccctggccttggcatcgccgtcgtcgccttcggtatctacctcgtcggcgaacaagtctacaataggctctatgctcccgatcctcattcgatttctcacgtgaaagccggggatcaccactaaacgtttggacggacgcactccattccatcatcacttaataagcttgctagcatgttctcgcagcctttaatgtttaaatttcagaccgtgttcgcttctttggcactcactatgttgtcctgtatgcctacattttatgccttcaatttgcattcacaatgaaactcaatttactataaaa

SEQ ID NO: 2705 - DNA, 310 bp, Glycine max
  Clone ID: LIB3072-014-Q1-E1-B9
gattcacacaactaactaagaaagtcttccatagccccccaaaaatgaagagcaccatcttctttgctctctttctcttttgtgccttcaccacctcatacctaccttcagccatcgctgatttcgtgctcgataatgaaggtagccctcttgaaaatggtggcacatattatatcttgtcagacataacagcatttggtggaataagagcagccccaacgggaaatgaaagatgccctctcactgtggtgcaatctcgcaatgagctcgacagagggattggaacaatcatctcgtccccatatcgaat

SEQ ID NO: 2706 - DNA, 376 bp, Glycine max
  Clone ID: LIB3072-014-Q1-E1-C10
gaaggctgaaaaactctgaccgagtccgagaggcatcatggcgacactggattccgacgtgaccgtgtttccggccggcgaagcctccagcagcgccggtccttcttcgtccaccaagaagccgaagcgtttcgagatcaagaagtggaatgcggtttccctctgggcttgggatattgtcgtggataattgcgctatttgtcggaaccatatcatggatctctgtattgagtgccaggccaaccaggctagcgccactagccaggaatgcactgtagcttggggagtttgtaaccatgcttttcacttccattgcataagccgatggctcaagacccgtcaagtatgtcctctatataatagcgagtgggaattt

SEQ ID NO: 2707 - DNA, 281 bp, Glycine max
  Clone ID: LIB3072-014-Q1-E1-C11
gactttgagttcgaactaaacaattcaattcaatctgcctcgatcatggagaggaaaacatttgggtttttgttcttgctcctccttgtcttagcttctgatgtgacggtgaagagagcataggcgaaagattgcttgacaaggaggcacgggttccagggtagatgcttattcgacaggcaatgtgcacatgtgtgcaggagcgatggtttcatcggtggtcagtgccgaggccctcttcgcaaatgcttttgcagcatgccatgttgatcgaaattact

SEQ ID NO: 2708 - DNA, 122 bp, Glycine max
  Clone ID: LIB3072-014-Q1-E1-C3
ggaatttggatttacagtttgcagtaaatataaaaaaaaaaaaaatcggccgctcgagacgatacaggattacatcttccttcatcctaggtgctagctcttctatcttctcacctatcacc

SEQ ID NO: 2709 - DNA, 420 bp, Glycine max
  Clone ID: LIB3072-014-Q1-E1-C5
gacagcaaaaacaattaataaagatgagtttgaagaacaacatggtggtgctaaaggtgtgtttgttgcttcttttccttgtgggggttacagctgcacgcatggaactgagcttcttcaaaagtgatcagtcatcaagttatgatgatgatgagtattcaaaaccatgctgtgatctctgcatgtgcacacgctcaatgcctcctcaatgcagctgtgaagatattaggctgaattcatgccactcagattgtaagagctgtatgtgcacacgctcacagccaggacagtgtcgttgtcttgacaccaacgacttctgctacaaaccttgcaagtccagagatgactagaaaaactaatagctctctcaaatggacgaagcccctttaggctttgtttgttatgttaggggggacaaat

SEQ ID NO: 2710 - DNA, 198 bp, Glycine max
  Clone ID: LIB3072-014-Q1-E1-C6
ggaaggcattgggatggtggctgatagcggtaggcacgcttcgattggcctccgtgtggttcggtttcttcgacatttgggctcttcgactcgccgtcttctccaacactacaatgactgaagttcatgggcgcacatttggaacttggacactgttgacctgcaccctttgctaaatctgcgcattcaaccttgaaa

SEQ ID NO: 2711 - DNA, 401 bp, Glycine max
  Clone ID: LIB3072-014-Q1-E1-C7
ggttgataaattaagcaagtaaggttgggatggagggaactaatagtagcggtgataacgtgagtgcgggtgtggtgcagagtaggatgaggatgaaggtgatggtggctatagacgagagtgaaggaagcttctatgctcttaagtgggcccttgataacctcttcaccaccatggccactgtgggagaagcatcatcacctgaaaatgatggcatggtgttcttggttcatgttgagcccaaagttcacaactatgtgtatcccatcggacccggtggagcagccttttatcctgcaactgtagtagtggattcggtgaagaaagcacaacaagaacgatcagcagctattctctcacgggcattgaaaatgtgccatgataagctggtgaaaggagag

SEQ ID NO: 2712 - DNA, 323 bp, Glycine max
  Clone ID: LIB3072-014-Q1-E1-C9
ggacccacttcgctgcgcgccaaacattgcactgcgcgaaaagtctggcttggtaggtcacacaagtttaaacattacattcctctcagagtatggacactcagaaagggccgtcttcatcggctgcagctgttacttcatgtcgaaagaagaagaacgaagaagccacttttttggaggacttgaaggatcacattgacgagtttattaatgcttctatggatgaacataagacttgcttcaagaaaacggttcagaagatgttcggaatgtccaatgctgttgcagacagggacaccaatgctgccaaagaaatttgagag

SEQ ID NO: 2713 - DNA, 417 bp, Glycine max
  Clone ID: LIB3072-014-Q1-E1-D10
gacagcaaaaacaattaataaagatgagtttgaagaacaacatggtggtgctaaaggtgtgtttgttgcttcttttccttgtgggggttacagctgcacgcatggaactgagcttcttcaaaagtgatcagtcatcaagttatgatgatgatgagtattcaaaaccatgctgtgatctctgcatgtgcacacgctcaatgcctcctcaatgcagctgtgaagatattaggctgaattcatgccactcagattgtaagagctgtatgtgcacacactcacagccaggacagtgtcgttgtcttgacaccaacgacttctgctacaaaccttgcaagtccagagatgactagaaaaactaatagctctctcaaatggacgaagcccctttaggccttgtttgttatgttaggggagaca

SEQ ID NO: 2714 - DNA, 176 bp, Glycine max
  Clone ID: LIB3072-014-Q1-E1-D11
ggcggcagaaaatctttcaatatataggacaactccaaaagaagcagtcgcaatcaccacgatcaaactcactcgttacataagtatagcaaaaccatacaccaaaaccccatacctaacagcaaattattgaaaccaaaataaataaacaaaataacccacataaggggaaggac

SEQ ID NO: 2715 - DNA, 248 bp, Glycine max
  Clone ID: LIB3072-014-Q1-E1-D2
ggagagagaagcctccatttataaaacatcgtgtgcgcactctctcttctcctaggtttcgctcccatcaacggcaacgatggtgcagaggctcacttatcgcaagcgccatagctatgctaccaaatccaaccagcaccggtttgtaaaaacccctgttggaaatttggtttaacaaacaactagaagaaaaccaattgaacctaattgccctgtcactggcaagaggatccaagggattccacact

SEQ ID NO: 2716 - DNA, 384 bp, Glycine max
  Clone ID: LIB3072-014-Q1-E1-D4
gacaacagaaacaattaataaagatgagtttgaagaacaacatggtggtgctaaaggtgtgtttgttgcttcttttccgtgtgggggttacagctgcacgcatggaactgagcttcttcaaaagtgatcagtcatcaagttatgaagatgatgagtattcaaaaccatgctgtgatttccgcatgtgcacaagctcaatgcctcctcaatgcagctgtgaagatattaggctgaattcatgccactcagattgtaagagctgtatgtgcacgcgctcacagccaggacagtgtcgttgtcctgacaccaacgacgtctgctacaaaccttgcaagtccagagatgactagaaaaactaataactctctcaaatggacgaagccc

SEQ ID NO: 2717 - DNA, 424 bp, Glycine max
  Clone ID: LIB3072-014-Q1-E1-D5
gattcacgcaactaaataagaaatgaagagtactatcttctttgctcactttctagtttgtgccttcaccatctcatacctgccttcaggcaccgctcagttcgtgctcgacactgatgatgatcctcttcaaaacggtggcacatactatatgttgccagttatgagaggaaagggcggtggaatagaagtagattcaactggaaaagaaatatgccctctcgctgttgtgcaatcacccaatgagctcgataaggggattggactagtctttacatctccattacatgccctttttatcgccgaaggctatcctttgagcattaagtttggttcatttgcagttataacgctgtgtgccggcatgcctactgagtgggctattgtggagagagagggtctacaagctgttaaacttgctgca

SEQ ID NO: 2718 - DNA, 289 bp, Glycine max
  Clone ID: LIB3072-014-Q1-E1-B8
gactttgagttcgaactaaacaattcaattcaatctgcctcgatcatggagaggaaaacatttgggtttttgttcttgctcctccttgtcttagcttctgatgtgacggtgaagagagcagaggcgaaagattgcttgacaaggatgcacgggttccagggtagatgcttattcgacaggcaatgtgcacatgtgtgcaggagcgatggtttcatcggtggtcagtgccgaggccctcttcgcaaatgcctttgcagcacgccatgttgatcgaaattaccactgccaa

SEQ ID NO: 2719 - DNA, 85 bp, Glycine max
  Clone ID: LIB3072-013-Q1-E1-A12
gattcacacaactaactaatatagtcttccatagccccctaataatgaacagcatcatcttctttgctctcttcctcttttgtcc

SEQ ID NO: 2720 - DNA, 189 bp, Glycine max
  Clone ID: LIB3072-013-Q1-E1-B10
cgggattcacacaactaactaagaaagtcttccatagccccccaaaaactaagagggccatcttctttgctctctttctcttttgtgcggtcaccacctcatacctaccttcagccatcgctgatttcgtgctcgatacacaaggtaaccctcttgaaaatggtggcacatattatatcctgtcatatc

SEQ ID NO: 2721 - DNA, 182 bp, Glycine max
  Clone ID: LIB3072-013-Q1-E1-B11
gagtgcaatttagctgaagcaaagcaatggctacttcaaagttgaaaacccagaatgtggttgtatctctctccctaaccttaaccttggtagtggtgctactgaccagcattgcaacctcagcggaaaccgtctcgttcatctggaacaactccgtgccgacacatccagacatgatcctc

SEQ ID NO: 2722 - DNA, 254 bp, Glycine max
  Clone ID: LIB3072-013-Q1-E1-B12
cgggattcacacacctaactacgaaagtcttccatagccccccaaaaatgaatagcaccatcttctttgctctctttctcttttgtaccttggggaggtcatacctaccttcacccatccctgatttcgtgctcgataatgaatgtaaccctcttgaaaattcttgcacatactacaccctgtcagacataacaacacttcgtggactcatagctgccccaactggaaattaaacatgccctctcactgtggtg

SEQ ID NO: 2723 - DNA, 66 bp, Glycine max
  Clone ID: LIB3072-013-Q1-E1-D10
ggttctagtgtatgtgattgctttgactcgttcttcttcgtcgttatcttcatcttttgttctttg

SEQ ID NO: 2724 - DNA, 56 bp, Glycine max
  Clone ID: LIB3072-013-Q1-E1-E11
cactaatcactcacgctttactcaatcttcttctctttcatcttcatacttcccac

SEQ ID NO: 2725 - DNA, 128 bp, Glycine max
  Clone ID: LIB3072-013-Q1-E1-F12
ggcacaagtgagtttgttgatcgagataactagaaacagtctgatgaaaatgaaggtccttgttttcttcgttgctacaattttggtggcatggcaatgccatgcctacgatatgttccctctctgaa

SEQ ID NO: 2726 - DNA, 62 bp, Glycine max
  Clone ID: LIB3072-013-Q1-E1-G10
tgtgcacgagtttgttgtgagctataagctagtttatcctgaggagactatgaacttctttg

SEQ ID NO: 2727 - DNA, 58 bp, Glycine max
  Clone ID: LIB3072-013-Q1-E1-G11
ggacgacgaggccattacggttggacgatcgaaccacagtcatgccacccacgacctt

SEQ ID NO: 2728 - DNA, 72 bp, Glycine max
  Clone ID: LIB3072-013-Q1-E1-H12
ggaaatgcagaacattacctcatcaccaccatccccaactagagtaacctcagcccacaacctctttgcatc

SEQ ID NO: 2729 - DNA, 238 bp, Glycine max
  Clone ID: LIB3072-014-Q1-E1-A1
ggcgagatagaagagaaagccgtcgctatcctagtctcttcttcccctctacccatttcagtttcaggatggagtctcaggtgaagcaggcccttgttgtcaaagttatgggtcatactgggtctacggggcaggtgactcacgttagagtgaagtttttggatgatcaaaaccgacacatcatgaggaacgtcaagggacgcgtgagagaatgagacattctcacccctacctgagt

SEQ ID NO: 2730 - DNA, 248 bp, Glycine max
  Clone ID: LIB3072-014-Q1-E1-A11
agaagcctacagttatcacataatggacaattccacaaccacttgatcaagttgtcctatgtaccaaggtgtgctctaagttgagtgcatacgcaggttgtttgttacatgcctttccagatcaaagctcgctcgagttcagtcacttttggttgttcaagaattttggagcgataggtcccttgtaagatatggtacttaaatatttatgtgtaaaatatgaagcaccgttgtgcaacagcccccac

SEQ ID NO: 2731 - DNA, 272 bp, Glycine max
  Clone ID: LIB3072-014-Q1-E1-A12
gacaacgcatcctaaataagcatcataattcataatctcttggtccttccttccttcttctgctcaataagtgtgtgcgagtctaattaattaccacccccttcgacacatagttcttctccctctgttctctattctctacactgtgaaaccaacatgaacgtaccatttgcagctgttctacttatatgccttgtcctcagctcctccttgttcgaggtatcaatggctggttctgctttctgttcctccaagtgctctaagaggtgttc

SEQ ID NO: 2732 - DNA, 120 bp, Glycine max
  Clone ID: LIB3072-014-Q1-E1-A2
gacagcaacaacaattaataaagatgagtttgaagaacaacatggtggtgctaaaggtgtgtttgttgcttcctgtgcttgtgggggttacagctgcacgcaaagaactgagcttcttca

SEQ ID NO: 2733 - DNA, 421 bp, Glycine max
  Clone ID: LIB3072-014-Q1-E1-A3
gacagcaaaaacaattaataaagatgagtttgaagaacaacatggtggtgctaaaggtgtgtttgttgcatcttttccttgtgggggttagagctgcacgcatggaactgagcttcttcaaaagtgatcagtcatcaagttatgatgatgatgagtattcagaaccatgctgtgatctctgcatgtgcacacgctcaatgcctcctcaatgcagctgtgaagatattacgctgaattcatgccactcagattgtaagagctgtatgtgcacacgctcacagccaggacagtgtccttgtcttgacaccaacgacttctgctacaaaccttgcaagtccagagatgactagaaaaactaatagctctctcaaatggacgaagcccctttacgctttgtttgttatgttaagggagacacatg

SEQ ID NO: 2734 - DNA, 211 bp, Glycine max
  Clone ID: LIB3072-014-Q1-E1-A4
gcttcacagcaaaaacaattaataaagatgggtttgaagaacaacatggtggtgctaaaggtgtgtttgttgcttcttttccttgtgggggttacagctgcacgcatggaactgagcttcttcaaaagtgatcagtcatcaagttttgatgatgatgagtattcaaaatcatgctgtgatttccgcatgtgcacaagctcaatgcctcctc

SEQ ID NO: 2735 - DNA, 385 bp, Glycine max
  Clone ID: LIB3072-014-Q1-E1-A5
ggcgagatagaagagaaagccgtcgctatcctagtctcttcttcccctctacccatttcagtttcaggatggagtctcaggtgaagcacgcccttgttgtcaaagttatgggtcgtactgggtctagggggcaggtgactcaggttagagtgaagtttttggatgatcaaaaccgacacatcatgaggaacgtgaagggacccgtgagagaaggagacattctcaccctacctgagtctgaaagagaagcaagaaggttgcgctagaggatctcttcatggtttggctcaggacttaaacaaaacatcgttgtttttgttgtacttaaaggatgtcaaatgttaattgtcatggacctgaattatgcacctactatgtgtgacat

SEQ ID NO: 2736 - DNA, 369 bp, Glycine max
  Clone ID: LIB3072-014-Q1-E1-A6
gatagaagaagcagaaagagaagcattagcaaaagcaagaagaactagtctaagcagaaatggcctcttcagtgatggcatctgtggcccggaaacctgcccctttcactgttgagaagtcctcagttagaggccttccctccctctcaaggaactcctcttcattcagagttgtggccagtggtggcaagaagatcaagactgacaagccttatggaattaatggtggcatggctttgagggaaggagttgatgcatctggcaggaaaggaaagggaaagggcgtttaccagtttgtagacaaataccgtgctaatgtccatgggttcagtcccatctacgaaaccaaagactgggtctccaccggtg

SEQ ID NO: 2737 - DNA, 400 bp, Glycine max
  Clone ID: LIB3072-012-Q1-E1-H9
gacagcaaaaacaattaataaagatgagtttgaagaacaacatggtggtgctaaaggtgtgtttgttgcttcttttccttgtgggggttacagctgcacgcatggaactgagcttcttcaaaagtgatcagtcatcaagttatgatgatgatgagtattcaaaaccatgctgtgatctctgcatgtgcacacgctcaatgcctcctcaatgcagctgtgaagatattaggctgaattcatgccactcagattgtaagagctgtatgtgcacacgctcacagccaggacagtgtcgttgtcttgacaccaacgacttctgctacaaaccttgcaagtccagagatgactagaaaaactaatagctctctcaaatggacgaagcccctttaggctttgtttg

SEQ ID NO: 2738 - DNA, 178 bp, Glycine max
  Clone ID: LIB3072-014-Q1-E1-A7
gacagcagtaaaaatttggaaagattagtttgcacaccaacactagcggtccaaaaagtgtatttgcagcatctattcccacttgaagctggagcttcacgctctacaatacagcttaatacacgggttatcagtcatcaaattatgattatcatgactttctctgatcatgctgtga

SEQ ID NO: 2739 - DNA, 278 bp, Glycine max
  Clone ID: LIB3072-014-Q1-E1-A9
gatgcaactgaataattaagaaaagccatttccatagcagcctaagaaaatgaagagcactagcttgttcgctatctttctactttgcgccttcacctcatacctaccttccgccaccgcccaggacgtgctcgacgtggatggcgatccgattcggaacggtttcatatactacgttttgccggcaataagaggaaacggtggcggaatagaacgagccgcactcgggaaagacacttgccctatcactgtagtgcaatctcccaatcaaaactcta

SEQ ID NO: 2740 - DNA, 315 bp, Glycine max
  Clone ID: LIB3072-014-Q1-E1-B11
gataaccatggcgtctaactctgcttccgctctctacttccttttatgcctatcgcccatcactttgcttctttctgcgtttcgtgctcaggctcaatctcatgctccagctcccactttcaagtactgtgaaaagaatgcagactatgctgtgaaggtgagtggagtggaaatattgcctgaccccgtggagagaggagtgccattcacctttaagatcccagcttatactcctgaaccaattcaaagcggggacgtgttatatgaaatttcttatgctggaatagaagcacaacctgctagatttctccatga

SEQ ID NO: 2741 - DNA, 349 bp, Glycine max
  Clone ID: LIB3072-014-Q1-E1-B2
ggatcctttgtattctattcttcaagattcaggtactgcgtttcggaagcagacacagatgactcgtacgaagcaaaccgctcgtaagtccacaggaggaaaggctcctaggaagcagcttgcaaccaaggctgtacgtaagtctgcaccaactactggtggtgtgaagaagccccaccgttatcgtcctggtaccgttgctcttcgtgagattaggaaataccagaagagtaccgagcttttgatccggaagctccccttccagaggctggttcgtgaaattgctcaggacttcaagactgatctgcgtttccagagccacgccgtgcttgcattgcaagagctgctg

SEQ ID NO: 2742 - DNA, 386 bp, Glycine max
  Clone ID: LIB3072-014-Q1-E1-B3
gatagcagcaacatacagagcattgggttcagctgcttaagttcaatccatgggtattgctttcatcctcagaaccaaagatgtcgaacacatacggcaactgcgactgacgctgacaagactatctgcaccaaaggaaacagctatggtgttattgtcgagacggataagagttacatcgagaccgttgtcatggaagttccaccagctgagcatgatgcgaagtgcaaatttggcactcactgcacttgcacggactgcacctgttgccattaaggaataattacgacaatgtcactgccacatgtttggcactacacatctcctaataatgtaatcttcgtacgaataaatctgtgtgctgtaaccctaaatgcacacgctca

SEQ ID NO: 2743 - DNA, 399 bp, Glycine max
  Clone ID: LIB3072-012-Q1-E1-G11
ggggttctcctttggcagaaaaagcgatgattgattgcttctctctatctccacatttcttgcgtactcttcccttccggaccaaatcaaacctttttcataggtcgtttatcgagttttcgctttgacacttttacctcgttgatcctcgtcagtgtagaattctccgaattgaggtatggggaggctgtttgtgaaccatctggaggggcatgtctatagctgcaaacactgccgcacccaacttgctcactatgaagacatcgtttccaagtcgttccacagtagacatgggaaagcttatcgcttcagtaaggtcgtgaatgttaacgttggagtatatgacgacagatatatgctcaatgggatgcaaactgtggctgacattttctgtgtggg

SEQ ID NO: 2744 - DNA, 427 bp, Glycine max
  Clone ID: LIB3072-012-Q1-E1-G12
gactcaacaaagaatttgatcagtgataaaaaaaaaaaagaaagacgaatagagagaacccaatatgtctaaactagccactctcttgactttggctcttctactgagcttcaatttaatctatgcctcccgtccaaacccttcacttatcagtgtctcttctttgcatggggatgttgcgactacaaaggcagaagagatagatggtgagagttgtgaagaagggacagaggaatgtttggcaagaaggacacttgctgcgcatctcgattatatctacactcagaaggataaactgggtcagcatttttaacggcattacaggcatatgaattgcaatactataaataaattaatgtaccacacatatatgtatgtgtgtacttatttcattaacaaacaaatgctttgcttgaatgttcgcata

SEQ ID NO: 2745 - DNA, 384 bp, Glycine max
  Clone ID: LIB3072-012-Q1-E1-G3
ttcaagggtccatcgacccgtccgaaggctgaaagaacacgacagaaaggggagagtcagattcgcacgcattgcttcgcctcataacagcagcttcatcagcaatggttctcaaacgacgtggaatggctccggctcttgccgcgtaagaagaagcctgagaacgtcacgaaaccgttgttcgagaagcgtccgaagcaattcggaatcggacgggccttgcctccaaccagacacttgactaggttcgtgaagttgccagagcatgttcaaattcagaggaagaaggggattccgaagcagaggttgaaggttcccccacctttgaaccagtttaccataactcctgacaaaaacctagcaacaagtctgttcaagttgcct

SEQ ID NO: 2746 - DNA, 279 bp, Glycine max
  Clone ID: LIB3072-012-Q1-E1-G4
ggaggaacacactgctggtgacgtggttgctacagaggcgccactccagatgcttcgtcctcgccttctgccgcttcctcgcgtggatcgcggtcgcgctgcagcgcgcgtcctactcgtacgcgccgcctctctcctcgcacatagagatcagggcgaatctcgtcaggttcgacgcgttcgaggtcgctacggacacgcgcggttggatcctcgcagctatcgcgtctcgcacgcgcgatctgggatctcacgtggagcagtgacctctgcgtcgct

SEQ ID NO: 2747 - DNA, 349 bp, Glycine max
  Clone ID: LIB3072-012-Q1-E1-G5
cttgactcacttggcaggccaagcaatgctgagtaacttgttgcccccatcatttatttgtgggtgctgtgatgaaaatagaaactgagatgatatcatagcctaattatgcttccatagaaatggaagactacgaaatgaagaagcaaacaatcaatggagataataagtggaagaatgacaaaggctagtgatttgaaatgaagatgatgccaccacgtgaagtggtaaggtggaggattcttgtacctaaaaatcacacaaaatggtatagaatgtaggatatttgacgcggattcttgacgtctgttttgctttcctctcctcttgattttgtctcgtgatgttc

SEQ ID NO: 2748 - DNA, 418 bp, Glycine max
  Clone ID: LIB3072-012-Q1-E1-G6
gacagcaaaaacaattaataaagatgagtttgaagaacaacatggtggtgctaaaggtgtgtttgttgcttcttttccttgtgggggttacagctgcacgcatggaactgagcttcttcaaaagtgatcagtcatcaagttatgatgatgatgagtattcaaaaccatgctgtgatctctgcatgtgcacacgctcaatgcctcctcaatgcagctgtgaagatattaggctgaattcatgccactcagattgtaagagctgtatgtgcacacgcccacagccaggacagtgtcgttgtcttgacaccaacgacttctgctacaaaccttgcaagtccagagatgaactagaaaactaatagctctctcaaatggacgaaacccctttaagctttgtttggttagttaggggagacaa

SEQ ID NO: 2749 - DNA, 405 bp, Glycine max; identical to SEQ ID NO: 2647
  Clone ID: LIB3072-012-Q1-E1-G7

SEQ ID NO: 2750 - DNA, 383 bp, Glycine max
  Clone ID: LIB3072-012-Q1-E1-G8
gaccttgactccgctcagccacggctgagaaaatagctcgtcttcacgatccagcgattccgctctccaacgggactgcgcagggtgaagaatcgagaggccagccgccggtgaagaatcgcgcgattcgtctggaaatcgcgattccagcacgattcatgcccgatacagagatttaaccacgattcaggaacaaaaacgagacaacctccgattcgtattggtagcatctagaatcgtatcgaatcgtgcgatacgtatcctgaatcggttttggtttttctgtgagtatccctgttgatcaagaatgcaattctttggggtgtctgagattagtccttcacctcctgctccgacagcatcaagaaacaatggccaaaaga

SEQ ID NO: 2751 - DNA, 376 bp, Glycine max
  Clone ID: LIB3072-012-Q1-E1-G9
gcttcacagcaaaaacaattaataaagatgagtttgaagaacaacatggtggtgctaaaggtgtgtttgttgcttcttttccttgtgggggttacagctgcacgcatggaactgagcttcttcaaaagtgatcagtcatcaagttatgatgatgatgagtattcaaaaccatgctgtgatctctgcatgtgcacacgctcaatgcctcctcaatgcagctgtgaagatattatgctgaattcatgccactcagattgtaagagccgtatgtgcacacgctcacagccaggacagtgtcgttgtcttgacaccaacgacttctgctacaaaccttgcaagtccagagatgactagaaaaactaatagctctctcaaa

SEQ ID NO: 2752 - DNA, 63 bp, Glycine max
  unsure at all n locations
  Clone ID: LIB3072-012-Q1-E1-H1
cccacgcngtccgcacacgcaatccgcgtgacacagtgagcaggacagcgtggagacggacgc

SEQ ID NO: 2753 - DNA, 236 bp, Glycine max
  Clone ID: LIB3072-012-Q1-E1-H10
gagacacgattcaagttatcacatgtctcatccccacactagtacagacactagattaccaggtcagcagtccataccttcattttcacacaaccgggaaagatacatacacacatagaatgtgacagtgagagaggtacggggaatcacaggtttaagttatcaggtgtgaatccgtatgcctggttttactacactgaagtacatggctacgggaacattttcaagggagctgg

SEQ ID NO: 2754 - DNA, 416 bp, Glycine max
  Clone ID: LIB3072-012-Q1-E1-H11
gattcacacaactaactaagaaagtcttccatagccccccaaaaatgaagagcaccatcttctttgctctctttctcttttgtgccttcaccacctcatacctaccttcagccatcgctgatttcgtgctcgataatgaaggtaaccctcttgaaaatggtggcacatattatatcgtgtcagacataacagcatttggtggaataagaggagccccaacgggaaatgaaagatgccctctcactgtggtgcaatctcgcaatgagctcgacaaagggattggaacaatcatctcgtcaccatatcgaatccgttttatcgccgaaggccatcctttgagccttaagttcgattcatttgcagttataatgctgtgtgttggaattcctaccgagtggtttgttgtggaagatcta

SEQ ID NO: 2755 - DNA, 405 bp, Glycine max
  Clone ID: LIB3072-012-Q1-E1-H12
caccgtgctattcagataagaaggtcttcataccatgatgtgattagggttaatgagattcagaaggtgttggacatcacaggggtccaaacctacattatcaacagcgcaagggttgttttcttgaatgagaggcctcagccaaggcctggtaaaggtgtcaccaacacttgtgaagtctgcgagcgcagccttcttgattccttccgattctgttctcttggttgcaagattgttgggacttcaaggaacttccagaagaagaaaaagtcagcggcaatgggatcagacacagacgattcttcgtacagcagcaacagcagccatgggaagaagaacagcttcacaccgttcacaccgcctccaacttctgttaattacagaacggccaagagaagaaaggaa

SEQ ID NO: 2756 - DNA, 342 bp, Glycine max
  Clone ID: LIB3072-012-Q1-E1-H2
gttgttacagaagacataagcaagctctttgtaaaaaaacaacactaacattcatataacgttagaagtttgcatattaaaattaatgatgggtaagaaatgtaaacccgaagatgtggcacttctcctgcttgaaagtgcttgctatcgtagaaagtgtacttgtttaacttttaagtttgtttacccgtaagtagtacttcgtctagttgatcatattacgttgttaacttacagcttagccaagtaaaaaaaaatggagcagaaacccgacgggtgatttgcttcaacgcatatttattggatttgcagttacgatttaggattcttgagaatactatg

SEQ ID NO: 2757 - DNA, 273 bp, Glycine max
  Clone ID: LIB3072-012-Q1-E1-H4
ggcaactgaataattaagaaaagccatttccatagcagcctatggagatgcagagcgcgagcttgttcgctatcttcctagtttgcgccttcaccgcatacctagcttccgccatcgcccaggacgtgctcgacgtggatagcgatccgattcggtacggtttcatatactatgttttgccggcaatcagacgaaccggtggccgactataacgagccgcactcgggaaagagacttgccctatcactgtagtgcaatctcccaatctaaact

SEQ ID NO: 2758 - DNA, 399 bp, Glycine max
  Clone ID: LIB3072-012-Q1-E1-H6
gacagcaaaaacaattaataaagatgagtttgaagaacaacatggtggtgctaaaggtgtgtttgttgcttcttttccttgtgggggttacagctgcacgcatggaactgagcttcttcaaaagtgatcagtcatcaagttatgatgatgatgagtattcaaaaccatgctgtgatctctgcatgtgcacacgctcaatgcctcctcaatgcagctgtgaagatattaggctgaattcatgccactcagattgtaagagctgtatgtgcacacgctcacagccaggacagtgtcgttgtcttgacaccaacgacttctgctacaaaccttgcaagtctagagatgactagaaaaactaatagctctctcaaatggacgaagcccctttaggctttgttt

SEQ ID NO: 2759 - DNA, 317 bp, Glycine max
  Clone ID: LIB3072-012-Q1-E1-G10
aggggaagcccaatctcttgatcagaatcttcaggccacgccaggtaatcacaaccaaatcaacatcccaaatggcttcagcttctgtactcatggggtagtcactgaccactgttaccaacaataacaacccttcatccgaagccttcatcatgccactacccctacgccaaccaaagcggattctcttcactactattgcagtgtcaaactccaatcctcatatcaatgcacctttgtaggacaatgcagttgccggactcacaacagcttctgtgacagcatcatatgtggctcccgaagtggctcatgctgct

SEQ ID NO: 2760 - DNA, 304 bp, Glycine max
  Clone ID: LIB3072-012-Q1-E1-E5
gggatgtgttgagatccactgctgcagaatccaatttgtgaccctaaatccaagttactatgactgctcagacccaagaggagcttcttgcgcaacacctcgaacagcagaagatccatgatggtgaacctgttgtcgaggatgatgatgatgaggaagaggatgatgatgatgacgatgatgaggatgatgaccatgccgaaggactagaaggtgatgcatctggtacgtcgaagcagaccagaagtgaaaagaagagtccaaggcaatgcttaaacttggaatgaaacctgtcacaggtgtc

SEQ ID NO: 2761 - DNA, 379 bp, Glycine max
  Clone ID: LIB3072-012-Q1-E1-E7
aattacaaaggctagagatatggggagcaagggaccaagttggtctgaccaatggggaagtggagggtttggcagtgatcactatgaggaggaggagaagatgaagatgaagaagagtgggagcagcaagaagatggcagatgcaaaggctgtggcatcagctggaatggacaaggccaaaactgcagcagttgtgggtgcccagaaggtgaagagtggaacctctgctggcctcaaatgggtcaaggatcagtatcagataaggacttccaagtgaaactcactcactcacttgcttcttggacagtttcatttccatagctttggtaaataatacatgatgctctagtaaagtaaagtgttttgcttgtttcttaaa

SEQ ID NO: 2762 - DNA, 416 bp, Glycine max
  Clone ID: LIB3072-012-Q1-E1-F1
gaagacgacagaaggggacagcaaaaacaattaataaagatgagtttgaagaacaacatggtggtgctaaaggtgtgtttgttgcttcttttccttgtgggggttacagccgcacgcatggaaccgagcttcttcaaaagtgatcagtcatcaagttatgatgatgatgagtattcaaaaccatgctgtgatctctgcatgtgcacacgctcaatgcctcctcaatgcagctgtgaagatattaggctgaattcatgccactcagattgtaagagctgtatgtgcacacgctcacagccaggacagtgtcgttgtcttgacaccaacgacttctgcgacaaaccttgcaagtccagagatgactagaaaaactaatagctctctcaaattgacgaagcccctttaggctttgtttg

SEQ ID NO: 2763 - DNA, 426 bp, Glycine max
  Clone ID: LIB3072-012-Q1-E1-F10
gaacgaaaaaccgtgtttcactcggatcgcgcattcacaaataaggttgaagagggccctgccggaagaagataaataccgtctttcattttccggcgatctcttttttcttccatcaccgttttccggctatccctaatccttaacagaaatgacgacatcaaggcgccttgcggacaggaaggtggagaagtttgagaaaaacatcaccaaaagaggatttgtgccagacacaaccactaaaaaggggaaagactaccctgttggcccagtgctgctcggtttcttcgtctttgttgtcattggatcatctctcttccagataatcaggacagcaacgagtggaggcatggcttaaatggagctttattttggattgtgtcatcatctcttagcctcctcgtagaaaatgctaatacttctcta

SEQ ID NO: 2764 - DNA, 378 bp, Glycine max
  Clone ID: LIB3072-012-Q1-E1-F11
gacaggtgtttgcaatactagcgatagctgataagagagataccaacaagaaaagaaaaaaagaagagttgagattccctttgaagaaaagatggcatcccataggcaaagctatgaagttggtcaaactaagggccgaactgaggaaaagacgaaccagacgatgggcaatattggagagaaggctcaagctgcaaaggagaagacccaggaaatggcccaagctgcaaaggagaagacccaacaaacagcccaagctgccaaggacaagacttgcgacacttcccaagcggcaaaggagaagacccaacagaatacaggagctgctcaacaaaagacctcagagatgggccagtccacgaaggaatcggcccagtc

SEQ ID NO: 2765 - DNA, 425 bp, Glycine max
  Clone ID: LIB3072-012-Q1-E1-F12
gaaggcaagaaaaaaataaataaaacactaagatccttataagtttccctcgatcggcgaaaatatgtctggtttccttagcaacctctttggtttcaacggaaacaacaatggcactgaggatgcctttaaaaactcaggaggaggaggacaaaacttcaaggacgcggagttcaacactggtgtgcaagttgccaaggggagacacgctccttgcagtggtaacagtgggactaaaagtgcttttaacaactctggttcgggaaaacaggatttcggaaatgctatgtttaacactggtgctaggtactactaatttatataagaccttcctcttggaggggctgggcttccaaaacatacatattaatcataggtatggggaataaaaatcacaagtgctcatttgtgggtcatgtgtaaga

SEQ ID NO: 2766 - DNA, 402 bp, Glycine max
  Clone ID: LIB3072-012-Q1-E1-F2
ggcagcaaaaacaattaataaagatgagtttgaagaacaacatggtggtgctaaaggtgtgtttgttgcttcttttccttgtgggggttacagctgcacgcatggaactgagcttcttcaaaagtgatcagtcatcaagttatgatgatgatgagtattcaaaaccatgctgtgatctctgcatgtgcacacgctcaatgcctcctcaatgcagctgtgaagatattaggctgaattcatgccactcagattgtaagagctgtatgtgcacacgctcacagccaggacagtgtcgttgtcttgacaccaacgacttctgctacaaaccttgcaagtccagagatgactagaaaaactaatagctctctcaaatggacgaagcccctttaggctttgtttgtt

SEQ ID NO: 2767 - DNA, 381 bp, Glycine max
  Clone ID: LIB3072-012-Q1-E1-F4
gatgcaactgaataattaagaaaagccatttccatagcagcctaagaaaatgaagagcactagcttgttcgctatctttctactttgcgccttcacctcatacctaccttccgccaccgcccaggacgtgctcgacgtggatggcgatccgattcggaacggtttcatatactacgttttgccggcaataagaggaaacggtggcggaatagaacgagccgcactcgggaaagacacttgccctatcactgtagtgcaatctcccaatccaaactctaaggggttagaaattaagtttgaatctgcataccccgcctattacataaacgaaaccctaattttgcaaataaagttcagttacccacagcagtgtgaaagaaa

SEQ ID NO: 2768 - DNA, 406 bp, Glycine max
  Clone ID: LIB3072-012-Q1-E1-F5
ggaagaaagatagatccagatatcaatggcgacgaatcacgaaccggttttagggtacgttgtgctttacgtcaaagacgtagccgagtcggtggctttctatgccaaagccttcggctattctgttcgtcgcttagacgagtctcacagatggggagagttggaaacggggaacacaactattgctttcactccgattcaccagcacgagaccgatgatctgaccggtgcggttcataaccctggatcttgtcgagaaagaccacccatggaggtttgttttgtttaccctgacgttgatgctgcttacaagcatgcggtggagaatggagcggtggcggtgagcgagcctgagctgaacgagtggggacagaaggttgggtacgtcagagatattgacggcaac

SEQ ID NO: 2769 - DNA, 361 bp, Glycine max
  Clone ID: LIB3072-012-Q1-E1-F6
aagacgacagaagggattcacacaactaactaagaaagtcttccatagccccccaaaaatgaagagcaccatcttctttgctctctttctcttttgtgccttcaccacctcatacctaccttcagccatcgctgatttcgtgctcgataatgaaggtaaccctcttgaaaatggtggcacatattatatcttgtcagacataacagcatttggtggaataagagcagccccaacgggaaatgaaagatgccctctcactgtggtgcaatctcgcaatgagctcgacaaagggattggaacaatcatctcgtccccatatcgaatccgttttatcgccgaaggccatcctttgagccttaag

SEQ ID NO: 2770 - DNA, 423 bp, Glycine max
  Clone ID: LIB3072-012-Q1-E1-F7
gcgagagacgacagaaggggactcatacaatagagaccagcttttgcttctttgtgaacatggagatgaggaaatcatgtggcttcttcttgctcctcctccttgtctttgcttcccaggtggtggtgcagacggagggaagagtgtgtgagtcacaaagccacgggttccatggtttgtgtaagagagaccacaactgtgctttggtctgcatgaacgaaggtttctccggtggcaggtgcaaaggcttccgccgccgctgcttttgcaccaggatttgttgagatctcatcaaacactactcttgccatgcacattaataaatcatagctaggccatataaattgcatctagtctttatccatttgggagctagctaccagaagcaactcatacttggtcattggattgcttcgctttggc

SEQ ID NO: 2771 - DNA, 223 bp, Glycine max
  Clone ID: LIB3072-012-Q1-E1-F8
tcccgggtcgagtcacacatcggatcagtcgtgcgtccagatgggaaaagaaggggatccggttgagttgttagaagacgaccatttcgataccggcggtaagatcatagggtacagatcttgttcgcgatgcattcgaccttgtacctcctccacatagccaccttccgtcactgcacaggacgtcgttttcatggatggcgatgggaacagaccggcgttc

SEQ ID NO: 2772 - DNA, 406 bp, Glycine max; identical to SEQ ID NO: 507
  Clone ID: LIB3072-012-Q1-E1-F9

SEQ ID NO: 2773 - DNA, 387 bp, Glycine max
  Clone ID: LIB3072-012-Q1-E1-G1
gacagcaaaaacaattaataaagatgagtttgaagaacaacatggtggtgctaaaggtgtgtttgttgcttcttttccttgtgggggttacagctgcacgcatggaactgagcttcttcaaaagtgatcagtcatcaagttatgatgatgatgagtattcaaaaccatgctgtgatctctgcatgtgcacacgctcaatgcctcctcaatgcagctgtgaagatattaggctgaattcatgccactcagattgtaagagctgtatgtgcacacgctcacagccaggacagtgtcgttgtcttgacaccaacgacttctgctacaaaccttgcaagtccagagatgactacaaaaactaatagctctctcaaatggacgaagcccctt

SEQ ID NO: 2774 - DNA, 371 bp, Glycine max
  Clone ID: LIB3072-012-Q1-E1-E3
tggtttgatggcaatgatgtcgttgatttgcttcctgattcgtttgatcttgatgctggcgaggatctttttgaagagtttataagatcttctgaatcccaagaagaaactggacccaaagtaactgcatgaggcttagagatgaacccatttaaagaatctacctaccaacctaagagactggacccaaggccttagctttacgtcagttagatgaaatgtttgcatcatgttatccgtagcttcaactttctgtaacttcctgtgaaggcaaacgtttcaaaactttcaatctatccttctcttgcctttgccaaaatgttatggtgaataggggaaggaaaaacatgaaaaaaatggtggctgtttca

SEQ ID NO: 2775 - DNA, 386 bp, Glycine max
  Clone ID: LIB3072-012-Q1-E1-C2
gacccatcaatagcaaaatgaccaagttcacaatcctcctcatctctcttctcttctgcatcgcccacacttgcagcgcctccaaatggcagcaccagcaagatagctgccgcaagcagctccagggggtgaacctcacgccctgcgagaagcacatcatggagaagatccaaggccgcggcgatgacgatgatgatgatgacgacgacaatcacattctcaggaccatgccgggaagaatcaactacataaggaggaacgaaggaaaagacgaagacgaagaagaggaaggacacatgcagaagtgctgcacagaaatgagcgagctgagaagccgcaaatggcagtgcaaagccgctgtagaagataatggagaaccagagcca

SEQ ID NO: 2776 - DNA, 391 bp, Glycine max
  Clone ID: LIB3072-012-Q1-E1-C3
ggaactttgttactctcacacatgtctcgctccgtgcctttggtttcaaccatctttgtcttgcttctgcttctggtggccactgagatgatggggccaacaatggtggcagaagcaagaacttgtgagtctcagagccaccgtttcaaggggccatgtttgagtgacaccaactgtggctctgtttgccgaaccgaacgtttcactggaggacactgccgtggcttccgtcgcagatgcttctgcaccaaacattgttaattttaaaaaattaattaagagtgctttgatacaacatgatagatctatcatctttctactcgtgttgttaattagacactttgtgtttgagaataagggttacgcattctactatgggtttctttgtttg

SEQ ID NO: 2777 - DNA, 410 bp, Glycine max
  Clone ID: LIB3072-012-Q1-E1-C6
gagtgtatgtgattgttgtgactcgttcttcttcgtcgttatcttcttcttttgttgtttgtgtgtttgttttttctctcacctgaaaatgtcttgctgcggtggtaactgtggttgcggaagcgcctgcaagtgcggcaacggctgcggaggctgcaagatgtacccagacttgagctacaccgagtcaaccaccaccgagaccttggtcatgggagtggcaccagttaacgctcaattcgagagtgctgaaatgggtgttcccgctgagaacgatggctgcaaatgtggagctaactgcacctgcaacccctgcacttgcaagtgaggtgttggagagctaaagcttcaagcagaaatggcccttacaaataatgataaaaactatatgtaatttcagaacttcaaaa

SEQ ID NO: 2778 - DNA, 210 bp, Glycine max
  Clone ID: LIB3072-012-Q1-E1-C7
cgggacatttgatgaaaaagataacgcactagcagatccaagataacaatgtctttatttgcgataagtgtttccacactactggtgcttatattgttattaccaacgttgaacaatactatggcagagaacgcacttattggtgttacaaataagttggaaagtcgatacttaactgtttcctgcaagcatgataatcatccacacctt

SEQ ID NO: 2779 - DNA, 406 bp, Glycine max
  Clone ID: LIB3072-012-Q1-E1-C9
ggacagcaaaaacaattaataaagatgagtttgaagaacaacatggtggtgctaaaggtgtgtttgttgcttcttttccttgtgggggttacagctgcacgcatggaactgagcttcttcaaaagtgatcagtcatcaagttatgatgatgatgagtattcaaaaccatgctgtgatctctgcatgtgcacacgctcaatgcctcctcaatgcagctgtgaagatattaggctgaattcatgccactcagattgtaagagctgtatgtgcacacgctcacagccaggacagtgtcgttgtcttgacaccaacgacttctgctacaaaccttgcaagtccagagatgattagaaaaactaatagctctctcaaatggacgaagcccctttaagctttgtttgttatg

SEQ ID NO: 2780 - DNA, 388 bp, Glycine max
  Clone ID: LIB3072-012-Q1-E1-D11
gatgcaactgaataattaagaaaagccatttccatagcagcctaagaaaatgaagagcactagcttgttcgctatctttctactttgcgccttcacctcatacctaccttccgccaccgcccaggacgtgctcgacgtggatggcgatccgattcggaacggtttcatatactacgttttgccggcaataagaggaaacggtggcggaatagaacgagccgcactcgggaaagacacttgccctatcactgtagtgcaatctcccaatccaaactctaaggggttagaaattaagtttgaatctgcataccccgcctattacataaacgaaaccctaattttgcaaataaagttcagtttaccacagcagtgtgaaagaaagaatcct

SEQ ID NO: 2781 - DNA, 315 bp, Glycine max
  Clone ID: LIB3072-012-Q1-E1-D12
gcgtccgtacagcattcagagcgaccactccgtggcactggggttcgaccactttccgcggactcactctgcgttgctccagatcgatccacgtctacttcatcctacatgccacgtcagatctctcgtgtgggggtctcctactttcttgtgactgcacgtcattttaacatttcgggactgcgtaaatcctgctcttattcaacttcatcccgtttcggcacagctccatttcctcagttgtgctagtaacaagaaggaccggtgggttctcccttcccaccagtttcggaacctgtttttctactagcactg

SEQ ID NO: 2782 - DNA, 342 bp, Glycine max
  Clone ID: LIB3072-012-Q1-E1-D2
gattcacacaactaactaagaaagtcttccatagccccccaaaaatgaagagcaccatcttctttgctctctttctcttttgtgccttcaccagctcatacctaccttcagccatcgctgatttcgtgctcgataatgaaggtaaccctcttgaaaatggtggcacatattatatcttgtcagacataacagcatttggtggaataagagcagccccaacgggaaatgaaagatgccctctcactgtggtgcaatctcgtaatgagctcgacagagggattggaacaatcatctcgtccccagagcgaatccgttttatcggccgaagaccatcctttgagc

SEQ ID NO: 2783 - DNA, 170 bp, Glycine max
  Clone ID: LIB3072-012-Q1-E1-D4
ccgtaatgcttcgaaaatactacaaattgcggaaacagtgttgtcctgatggtagaccttcacatacatgtgaataatctatcatgaccatggaagaggcaccagcatccacgtgcaatccagaccacctcggaggggtcagaacgcgacgcacttcgacacgatctcca

SEQ ID NO: 2784 - DNA, 400 bp, Glycine max; identical to SEQ ID NO: 2737
  Clone ID: LIB3072-012-Q1-E1-D6

SEQ ID NO: 2785 - DNA, 359 bp, Glycine max
  Clone ID: LIB3072-012-Q1-E1-D7
ggacctagccaagccaacacagacggcacagaagagggtttcttttcgtttcgtttcaatggggagcgaagaggacaacggcgaattctacctgcgatactacgtcgggcacaatggcaagttcggtcaccagttcttggacttcgagttccgccccgacgggaagctccgctacgccaacaactccaactagacgaaacgacaccatcatccgcgaggaggtttacctcacccccgccgttctccgcgagtgccgtcgcatcatctccgagagcgacattatgagtgaagatgatgacaattggccggaaccctgatcggggtgcggcggcatgagcctgagattgttatggggaacg

SEQ ID NO: 2786 - DNA, 417 bp, Glycine max
  Clone ID: LIB3072-012-Q1-E1-D9
ggtcacaggtgtttgcaatactagcgatagctgataagagagataccaacaagaaaagaaaaaaagaagagttgagattccctttgaagaaaagatggcatcccataggcaaagctatgaagctggtcaaactaagggccgaactgaggaaaagacgaaccagacgatgggcaatattggagagaaggctcaagctgcaaaggagaagacccaggaaatggcccaagctgcaaaggagaagacccaacaaacagcccaagctgccaaggacaagacttgcgacacttcccaagcggcaaaggagaagacccaacagaatacaggagctgctcaacaaaagacctcagagatgggccagtccacgaaggaatcggcccagtcagggaaggacaacacccaagggttcctgcagcagac

SEQ ID NO: 2787 - DNA, 126 bp, Glycine max
  Clone ID: LIB3072-012-Q1-E1-C11
tggtgacggcgctaaaagatgataaagatgagtttgaacgacattatgatcatgcgatacgtctgtttgttgactcttttccgtgaaggggttaggggtgcatgcatcgccctgatattctccagg

SEQ ID NO: 2788 - DNA, 301 bp, Glycine max
  Clone ID: LIB3072-012-Q1-E1-E10
gagaacgcttttcatcacacataagaagaaaaagaacaataactaaacaaaaaccataatttttttaaaacctctctcttcgttcttttcatccgccgccggagaatgaacattccggcgacccaaacttccccgtcaatgaacaatgctcgtctctccgacaaccgtcgcaacttgttcaacgaaaccactcacctcaaaaaaaccttcaagcggggaggctaaaagaaagaaaaaaaaaaacccgttaataactaaataaaaaccccctttacttaatttttcctttttcccctttttt

SEQ ID NO: 2789 - DNA, 405 bp, Glycine max
  Clone ID: LIB3072-012-Q1-E1-E11
attcacacaactaactaagaaagtcttccatagccccccaaaaatgaagagcaccatcttctttgctctctttctcttttgtgccttcaccacctcatacctaccttcagccatcgctgatttcgtgctcgataatgaaggtaaccctcttgaaaatggtggcacatattatatcttgtcagacataacagcatttggtggaataagagcagccccaacgggaaatgaaagatgccctctcactgtggtgcaatctcgcaatgagctcgacaaagggattggaacaatcatctcgtccccatatcgaatccgttttatcgccgaaggccatcctttgagccttaagttcgattcatttgcagttataatgctgtgtgttggaattcctaccgagtggtctgttgt

SEQ ID NO: 2790 - DNA, 226 bp, Glycine max
  Clone ID: LIB3072-012-Q1-E1-E12
gtctcacagagtgtccaaggacaataatgcaccaccatgtgtttaggatacctatcaatcagacatcaattttagggatgcattccacctatgattgtggttcccctatagactaatgtacaaaaaaaaaaaaagaataagagtacagcccctttaattcttttactgacccaccttgtatactgtatcatcaacgtgattggactttaaattgcgcaatttgcgc

SEQ ID NO: 2791 - DNA, 418 bp, Glycine max
  Clone ID: LIB3072-012-Q1-E1-A12
gattcacacaactaactaagaaagtcttccatagccccccaaaaatgaagagcaccatcttctttgctctctttctcttttgtgccttcaccacctcatacctaccttcagccatcgctgatttcgtgctcgataatgaaggtaaccctcttgaaaatggtggcacatattatatcttgtcagacataacagcatttggtggaataagagcagccccaacgggaaatgaaagatgccctctcactgtggtgcaatctcgcaatgagctcgacaaagggattggaacaatcatctcgtccccatatcgaatccgttttatcgccgaaggccattctttgagccttaagttcgattcatttgcagttataatgctgtgtgttggaattcctaccgagtggtctgttgtggaggattctac

SEQ ID NO: 2792 - DNA, 370 bp, Glycine max
  Clone ID: LIB3072-012-Q1-E1-A3
gacagcaaaaacaattaataaagatgggtttgaagaacaacatggtggtgctaaaggtgtgtttgttgcttcttttccttgtgggggttacagctgcacgcatggaactgagcttcttcaaaagtgatcagtcatcaagttatggtgatgatgagtattcaaaaccatgctgtgatctctgcatgtgcacacgctcaatgcctcctcaatgcagctgtgaagatattaggctgaattcatgccactcagattgtaagagctgtatgtgcacacgctcacagccaggacagtgtcgttgtcttgacaccaacgacttctgctacaaaccttgcaagttcagagatgactagaaaaactaatagctctctca

SEQ ID NO: 2793 - DNA, 193 bp, Glycine max
  Clone ID: LIB3072-012-Q1-E1-A5
gggatgaattggcaaatgaatcatgactaggattttccttagttctctctatgtaactagttgtatatatagataatgggtacatcttcgtactctagatcgcaaattaaatataaaattaatgttgagaaaacgtgccattggcctattgctctacttagagttttcagtgtgccaaccacatattttgctg

SEQ ID NO: 2794 - DNA, 411 bp, Glycine max
  Clone ID: LIB3072-012-Q1-E1-A6
gatgcaactgaataattaagaaaagccatttccatagcagcctaagaaaatgaagagcactagcttgttcgctatctttctactttgcgccttcacctcatacctaccttccgccaccgcccaggacgtgctcgacgtggatggcgatccgattcggaacggtttcatatactacgttttgccggcaataagaggaaacggtggcggaatagaacgagccgcactcgggaaagacacttgccctatcactgtagtgcaatctcccaatccaaactctaaggggttagaaattaagtttgaatctgcataccccgcctattacataaacgaaaccctaattttgcaaataaagttcagttacccacagcagtgtgaaagaaagaatccttggtgggccatttctaaggatat

SEQ ID NO: 2795 - DNA, 74 bp, Glycine max
  Clone ID: LIB3072-012-Q1-E1-A8
gatacaactgagaacgttacagctaccatttccataacaacctgataagtctcactgatatctgacttgttcgc

SEQ ID NO: 2796 - DNA, 312 bp, Glycine max
  Clone ID: LIB3072-012-Q1-E1-B1
ggaaataggagagcgggaaaggcatttggagagtggagagagcaattggaagcgaagaaggcaatgggttccaaagacagttgcagaaccgaacttcgcattgccatccgccaactcagcgatcgatgcctctactctgcttctaaatgggcagcagaacagttggtgggtattgaggaagaccctgccaagttcactccttcgaatacgaggttccagcgtgggagttcgagaattttccgcaagtctaggactcatgagactgctgcggtgatcaccccggtcgtgggtgttttgtatgacgccacacct

SEQ ID NO: 2797 - DNA, 409 bp, Glycine max
  unsure at all n locations
  Clone ID: LIB3072-012-Q1-E1-B10
gccgccgcagcatccgaattcctttgatcgttggtgtggagcgatggaacacggctcatacactgatcagagtaaatcaacatttagtctcgtagatgaggatcatacttttgcaaacgctgttagattcaccttaaatcaagacccaagagtgtcattttgtggctacagcattcctcatccttcagataatcgtgttaatatcagagtccagacaacaggcgatccatcacgcgaggtgttaaaagatgcatgtcaagatctgatgcttatgtgccagcatgttaggagcacttttgataaggcagtcagtgattttaaaatcagcaaggctangaagaataatgaggatatggatgtcgagtaaatattttgcctgcgtagcagctatacactgaaatatgatgag

SEQ ID NO: 2798 - DNA, 376 bp, Glycine max
  unsure at all n locations
  Clone ID: LIB3072-012-Q1-E1-B12
gcacacaactaactaagaaagtcttccatagccccccaaaaatgaagagcaccatcttctttgctctctttctcttttgtgccttcaccacctcatacctaccttcagccatcgctgatttcgtgctcgataatgaaggtaaccctcttgaaaatggtggcacatattatatcttgtcagacataacagcatttggtggaataagagcagccccaacgggaaatgaaagatgccctctcactgtggtgcaatctcgcaatgagctcgacaaagggattggaacaatcatctcgtcnccatatcgaatccgttttatcgccgaaggccatcctttgagccttaagttcgattcatttgcagttataatgctgtgtgt

SEQ ID NO: 2799 - DNA, 400 bp, Glycine max
  Clone ID: LIB3072-012-Q1-E1-B2
gacagcaaaaacaattaataaagatgagtttgaagaacaacatggtggtgctaaaggtgtgtttgttgcttcttttccttgtgggggttacaactgcacgcatggaactgagcttcttcaaaagtgatcagtcatcaagttatgatgatgatgagtattcaaaaccatgctgtgatctctgcatgtgcacacgctcaatgcctcctcaatgcagctgtgaagatattaggctgaattcatgccactcagattgtaagagctgtatgtgcacacgctcacagccaggacagtgtcgttgtcttgacaccaacgacttctgctacaaaccttgcaagtccagagatgactagaaaaactaatagctctctcaaatggacgaagcccctttatgctttgtttg

SEQ ID NO: 2800 - DNA, 400 bp, Glycine max
  Clone ID: LIB3072-012-Q1-E1-B6
gacacacaggggaaatgatttgaaggtcggagagagagagagagtgagttggggattctacttcgatctatcatctaaactaagtcaataagatgactcagggaaagatagttgaagctgcagaagctcataaaacacttgaggatttcgatcctccaaagaagcgcaaaaggaacaagtatgcttttgcttgtgctgtgctggcctccatgacttccatcttgcttggctacggagaaactaacatagtcaatgatggaccgaagttcagttgaggggtgcacctgactttgagcgaaatacaagagtatatactagtgcgttcttatttttggcacctcctatttttataatttaatcccgttgccttcaatttattacttagtgtcaatttttatct

SEQ ID NO: 2801 - DNA, 403 bp, Glycine max
  Clone ID: LIB3072-012-Q1-E1-B7
gattcacacaactaactaagaaagtcttccatagccccccaaaaatgaagagcaccatcttctttgctctctttctcttttgtgccttcaccacctcatacctaccttcagccatcgctgatttcgtgctcgataatgaaggtaaccctcttgaaaatggtggcacatattatatcttgtcagacataacagcatttggtggaataagagcagccccaacgggaaatgaaagatgccctctcactgtggtgcaatctcgcaatgagctcgacaaagggattggaacaatcatctcgtccccatatcgaatccgttttatcgccgaatgccatcctttgagccttaagttcgattcatttgcagttataatgctgtgtgttggaattcctaccgagtggtctgt

SEQ ID NO: 2802 - DNA, 300 bp, Glycine max
  Clone ID: LIB3072-012-Q1-E1-A11
cacgacaacagagtacgcaagtaatgacattcacgaacattccaccttcacgtaaaggatgattgtggcgacattacggatctggagtctctgtggcacatctgaggactgagcttcctcaaaaggtattcatccacattctgaggagtcacgaggtatgcacactcgtaccattgtctcagcatgcgcacacgctgaatgcatcttcactacacttgtgaatatcggaagctgaactcggactggtcaaacttccacagctgtctgtgcacactctcacatacacgacggtctcattgt

SEQ ID NO: 2803 - DNA, 377 bp, Glycine max
  Clone ID: LIB3072-012-Q1-E1-B8
gatcccagagacagtgacagatataaattgaaaacggcgaaagatgaacggcgacgacgacaagggtttgctgtggaagctcccagtggtgaagtccgaccactttggcaaggtgggccccgccttcggcatcagtgccggctgcggcctcggtttcggccttggccttctcggaggagtgggtgttggccctggaattcctggattccaagttggttatggatttggtgctggatgtggtgttggtttagggtttggctatggtgtggggaaaggaattgcacaagattacaacaacgagatactctaatgttggaaatcctttccgtggttctagaagcaacatttctgaggatgatattaccgcacttgtggac

SEQ ID NO: 2804 - DNA, 425 bp, Glycine max
  unsure at all n locations
  Clone ID: LIB3072-012-Q1-E1-B9
ggagttagagactcgaaatcgggcaaaagcagaataccctgatcaacgaaatcttgaatcatctatctcaaaccaagaaaaagatattgaaaacgattatgtaggatcagacagtgaaaagaatagtaagggtataaagaaaaagaaagacaagaacaagatggaggcagaacttaatttcttactaagaaattttttgattttacatttaaattggaataatttcttaggtcaaagaatatttaacaatgtcaaagtatattgtctcctgattagattaaaaaatttaagagaaattacaatagcctctattcaaagaggagaactaggtctagatattatgatgattcanaatcagaagaatttaattcttctaggcttaaggaaaaagaaaaataacaaatttatgaaaaaagaaatatttg

SEQ ID NO: 2805 - DNA, 347 bp, Glycine max
  Clone ID: LIB3072-011-Q1-E1-G5
gactttgagttcgaactaaacaattcaattcaatctgcctcgatcatggagaggaaaacatttgggtttttgttcttgctcctccttgtcttagcttctgatgtgacggtgaagagagcagaggcgaaagattgcttgacaaggaggcacgggttccagggtagatgcttattcgacaggcaatgtgcacatgtgtgcaggagcgatggtttcatcggtggtcagtgccgaggccctcttcgcaaatgcttttgcagcaggccatgttgatcgaaattactactgccaaagaggccatgaaataaacaaacaaacaaattaataaatagctctaaccgacacatatg

SEQ ID NO: 2806 - DNA, 385 bp, Glycine max
  Clone ID: LIB3072-011-Q1-E1-G6
gacagcaaaaacaattaataaagatgagtttgaagaacaacatggtggtgctaaaggtgtgtttgttgcttcttttccttgtgggggttacagctgcacgcatggaactgagcttcttcaaaagtgatcagtcatcatcttatgattattatgagtactcaaaaccatgctgtgatctctgcatgtgcacacgctcaacgcctcctcaatgcagctgtgaagatattacgctgaattcatgccactcagattgtaagagctgtatgtgcacacgctcacagccaggacagtgtcgttgtcctgacaccaacgacttctgctacaaaccttgcaagtccagagatgactaaaaaaactaatagctctctcaaatggaccaagcccc

SEQ ID NO: 2807 - DNA, 389 bp, Glycine max
  Clone ID: LIB3072-011-Q1-E1-G7
ggagtcgagaaacggcgcactccgtctgttcctcaccgtcaccggcgcgcgcaccctctgttccagcgactcctaattaagttgggaaataaaaaagacttcaaatttcccagatggctgcagcctttgcttccagatgctctcgtgtgggccgttctctgtctggtggattaagcaacagttcccctggtttatttacctcatcacatggcatgacatgcaacaatttgttttctcagcaacaacgtaccttcatacagatgaggactgttctcaaggttgtcgataactcaggtgctaaaaaggtgatgtgcatacaggcattgaaagggaagaaaggggcaagattaggtgacacaataatagcatctgtgaaggaagcacatcct

SEQ ID NO: 2808 - DNA, 415 bp, Glycine max
  Clone ID: LIB3072-011-Q1-E1-G8
gacagcaaaaacaattaataaagatgagtttgaagaacaacatggtggtgctaaaggtgtgtttgttgcttcttttccttgtgggggttacagctgcacgcatggaactgagcttcttcaaaagtgatcagtcatcaagttatgatgatgatgagtattcaaaaccatgctgtgatctctgcatgtgcacacgctcaatgcctcctcaatgcagctgtgaagatattaggctgaattcatgccactcagattgtaagagctgtatgtgcacacgctcacagccaggacagtgtcgttgtcttgacaccaacgacttctgctacaaaccttgcaagtccagagatgactaaaaaaactaatagctctctcaaattggacaaaccctttaggctttttttgttatgttagggagaca

SEQ ID NO: 2809 - DNA, 346 bp, Glycine max
  Clone ID: LIB3072-011-Q1-E1-H1
gattcacacaactaactaagaaagtcttccatagccccccaaaaatgaagagcaccatcttctttgctctctttctcttttgtgccttcaccacctcatacctaccttcagccatcgctgatttcgtgctcgataatgaaggtaaccctcttgaaaatggtggcacatattatatcttgtcagacataacagcatttggtggaataagagcagccccaacgggaaatgaaagatgccctctcactgtggtgcaatctcgcaatgagctcgacaaagggattggaacaatcatctcgtccccatatcgaatccgttttatcgccgaagggcatcctttgagccttaa

SEQ ID NO: 2810 - DNA, 382 bp, Glycine max
  unsure at all n locations
  Clone ID: LIB3072-011-Q1-E1-H10
ggccgctctctgagaaaaacagatagtgtgggagagagaagagcggaagagaaaatgacgaccaggttcaagaagagcaggaagaagagaggtcacgtcagcgccggacacggccgtatcggaaagcatcgcaagcatcccggaggtcgcggtaacgccggtggcatgcatcagcaccgtatcctcttcgacaagtaccatcctggtttcttcgggaaggtaggcatgcgctacttcgagaaacttcgcaacaaattctacaatccgatcatcaacatcgacaagctgtggtcnctcctcccccaggaggccaaagacaaggccaccgccgacaaggcacccttgcccgatggtcaccagttcagttactttaagggtttgg

SEQ ID NO: 2811 - DNA, 190 bp, Glycine max
  unsure at all n locations
  Clone ID: LIB3072-011-Q1-E1-H11
cagaagggtacggcctacanaacgggatcaagacccagttcaatatcctactacatcgtattaaagaatttactatatactatcatcatatctcggttcccagggggtgttggtgggagttgtcttcctcacaccactgtcttctccatttcgcattccctattttgatctgcaccagtccactccccct

SEQ ID NO: 2812 - DNA, 324 bp, Glycine max
  unsure at all n locations
  Clone ID: LIB3072-011-Q1-E1-H12
ggaagtcgccgtttgttttcttttcgttcgcatcttctctctctctcagaaagatgaaggtggtcgccgcgtatttgctcgccgtccgcggtggcaacaacatcccctccgccgatgtcatcaaggaaatccttggctccgttggagtagaagcagatgaagataggattgaatcgtttttgtctgaagttaacggtaaggatatagttgagcttattgctgccggtatggaaaagttggccacggttccttctggtggtggtggtgccgttgccntcgccgcatctcctgggggaggtgctgctgctgctgctcctgctgctg

SEQ ID NO: 2813 - DNA, 379 bp, Glycine max
  Clone ID: LIB3072-011-Q1-E1-H2
ggttcacacaactaactaagaaagtcttccatagccccccaaaaatgaagagcaccatcttctttgctctctttctcttttgtgccttcaccacctcatacctaccttcagccatcgctgatttcgtgctcgataatgaaggtaaccctcttgaaaatggtggcacatattatatcttgtcagacataacagcatttggtggaataagagcagccccaacgggaaatgaaagatgccctctcactgtggtgcaatctcgcaatgagctcgacaaagggattggaacaatcatctcgtccccatatccaatccgttttatcgcccgaaggcatcctttgagccttaaattcgattcatttgcagttataatgctgtgtgt

SEQ ID NO: 2814 - DNA, 422 bp, Glycine max
  unsure at all n locations
  Clone ID: LIB3072-011-Q1-E1-H3
ggttcagattctatcgccaataacaataatgcaagtgggtgctgcaatggcaagagaagagaaatggaactcttttcattanagtgtagcaagaaacctaagattattggtgctttgtagcgttacgttactttttttgagtttttttttttttgagttttgtgactgatgaaagaaagaaggtacaagaagaacggcggtgtagtggcatagtggcatcgcaagttgctgcaaaaggtgaattgtatattacttaatattagatgctgaaatattaggtgtaatgttacaaaaaactgtacaaggagaagaaaaaaggttctaagaaggggagaagcctaaaaaaaaaaatgatgtcatcatgggataacggttaaatggtaatggtgaaaaaatgttaatgtttgataatatgttcacgg

SEQ ID NO: 2815 - DNA, 383 bp, Glycine max
  Clone ID: LIB3072-011-Q1-E1-H4
gattcacacagctaactaagaaagtcttccatagccccccaaaaatgaagagcaccatcttctttgctctctttctcttttgtgccttcaccacctcatacctaccttcagccatcgctgatttcgtgctcgataatgaaggtaaccctcttgaaaatggtggcacatattatatcttgtcagacataacagcatttggtggaataagagcagccccaacgggaaatgaaagatgccctctcactgtggtgcaatctcgcaatgagctcgacaaagggattggaacaatcatctcgtccccatatcgaatccgttttatcgccgaaaggcatcctttgagccttaagttcgattcatttgcagtttatatgctgtgtgttggg

SEQ ID NO: 2816 - DNA, 262 bp, Glycine max
  Clone ID: LIB3072-011-Q1-E1-H5
taatttgggaattattgctcccatcgccattggtttcattgtcggcgctaacattttgttgggtggggccttctctggagcggccatgaaccccgctgtgacatttgggcctgctgtcgtgagctggacctggaccaaccactggatctactgggccgggcctctcatcggtggtggaatcgctggccttgtttacgaggttgtctttatcagccacacccacgagcagcttcccaccactgactactagagggggggaaat

SEQ ID NO: 2817 - DNA, 374 bp, Glycine max
  Clone ID: LIB3072-011-Q1-E1-H7
gattcacacaactaactaagaaagtcttccatagccccccaaaaatgaagagcaccatcttctttgctctctttctcttttgtgccttcaccacctcatacctaccttcagccatcgctgatttcgtgctcgataatgaaggtaaccctcttgaaaatggtggcacatattatatcttgtcagacataacagcatttggtggaataagagcagccccaacgggaaatgaaagatgccctctcactgtggtgcaatctcgcaatgagctcgacaaagggattggaacaatcatctcgtccccatatcgaatccgttttatcgccgaaggccatcctttgagccttaagttcgattcatttgcagttataatgctg

SEQ ID NO: 2818 - DNA, 386 bp, Glycine max
  Clone ID: LIB3072-011-Q1-E1-G3
gacagcaaaaacaattaataaagatgagtttgaagaacaacatggtggtgctaaaggtgtgtttgttgcttcttttccttgtgggggttacagctgcacgcatggaactgagcttcttcaaaagtgatcagtcatcaagttatgatgatgatgagtattcaaaaccatgctgtgatctctgcatgtgcacacgctcaatgcctcctcaatgcagctgtgaagatattaggctgaattcatgccactcagattgtaagagctgtatgtgcacacgctcacagccaggacagtttcgttgtcttgacaccaacgacttctgccacaaaccttgcaagtccagagatgactagaaaaactaatagctctctcaaatggaacaaaccccc

SEQ ID NO: 2819 - DNA, 213 bp, Glycine max
  Clone ID: LIB3072-012-Q1-E1-A1
ggaaccaaaccacaaacacttagtttctcaactcatcatttcgaattctacctcttttctcttgggcgtaacagtccaagatgaataccaataacgagaccgagtctgagcaatcatttcgagaagcacatcggagatcttgatcatcatcttctccagccaatgttgggactgagaattggggaactcacataatgggcacccctcgctgtt

SEQ ID NO: 2820 - DNA, 404 bp, Glycine max; identical to SEQ ID NO: 2498
  Clone ID: LIB3072-012-Q1-E1-A10

SEQ ID NO: 2821 - DNA, 406 bp, Glycine max; identical to SEQ ID NO: 507
  Clone ID: LIB3072-011-Q1-E1-E6

SEQ ID NO: 2822 - DNA, 193 bp, Glycine max
  Clone ID: LIB3072-011-Q1-E1-E9
ctctgatgatgatgaaaaatataactttcgttcttccgatatttccatgaggaaaacgtttggagacctgaactgaagaggctttcttatgcttgacttcgtattccttctgcccaaagagggtgacctgttatttgtcacaatattcaagtgttttatgttttgttgtatagatattttgttgtttgctcgt

SEQ ID NO: 2823 - DNA, 282 bp, Glycine max
  unsure at all n locations
  Clone ID: LIB3072-011-Q1-E1-F1
aaggcacaagttaccatggactaaatttgaacaaacagaaaagacatatcatcaccttcagacggggaggaatgcttttgctgcagtgctttgaatttaattttttctcctcagctgttagtatctctaatgaaaaatattttatgaacatccaatgtgttatatgacacccagtgaaaaaggaaaaagagtaaaaatatatgtattagaagttatattatatgatctaatgggaggaaacagataaagaaaaataataaattgttaacgtagtgttcanna

SEQ ID NO: 2824 - DNA, 347 bp, Glycine max
  Clone ID: LIB3072-011-Q1-E1-F10
gactttgagttcgaactaaacaattcaattcaatctgcctcgatcatggagaggaaaacatttgggtttttgttcttgcgcctccttgtcttagcttctgatgtgacggtgaagagagcagaggcgaaagattgcttgacaaggaggcacgggttccagggtagatgcttattcgacaggcaatgtgcacatgtgtgcaggagcgatggtttcatcggtggtcagtgccgaggccctcttcgcaaatgtttttgcagcaggccatgttgatcgaaattactactgccaaagaggccatgaaatagacaaacaaacaaataaataaatagctctaaccgacacatatg

SEQ ID NO: 2825 - DNA, 420 bp, Glycine max
  Clone ID: LIB3072-011-Q1-E1-F2
gacttctcttttttacactaagtttttatttcaacagaggaaacgcgattgagaatttgcgaaacggtgttggaatttgtgatctggtgagccatgaatgctagaagagatggtcgcaacaacagagttgctctttttgatggtattgaggagggtggcatcagagcatcgtttctttattcctcaagttcttcccatgaaattgatgaacatgataatgaacaagcattggatggattgcaagatagagtcaatctgcttaaaagattgtcaggtgatataaatgaggaagtggatagtcataaccggatgctggatcgtatgggaaatgatatggattcttcgagaggagtcctctcaggcactatggataaattcaaaatggtatttgagacaaaatccagccgaaagaatgttttc

SEQ ID NO: 2826 - DNA, 435 bp, Glycine max
  Clone ID: LIB3072-011-Q1-E1-F4
gacagcaaaaacaattaataaagatgagtttgaagaacaacatggtggtgctaaaggtgtgtttgttgcttcttttccttgtgggggttacagctgcacgcatggaactgagcttcttcaaaagtgatcagtcatcaagttatgatgatgatgagtattcaaaaccatgctgtgatctctgcatgtgcacacgctcaatgcctcctcaatgcagctgtgaagatattaggctgaattcatgccactcagattgtaagagctgtatgtgcacacgctcacagccaggacagtgtcgttgtcttgacaccaacgacttctgctacaaaccttgcaagtccagagatgactagaaaaactaatagctctctcaaatggacgaaacccctttaggctttgtttgttatgttaggggagacaaataaaacaagaattaaa

SEQ ID NO: 2827 - DNA, 399 bp, Glycine max
  Clone ID: LIB3072-011-Q1-E1-F6
gacagcaaaaacaattaataaagatgagtttgaagaacaacatggtggtgctaaaggtgtgtttgttgcttcttttccttgtgggggttacagctgcacgcatggaactgagcttcttcaaaagtgatcagtcatcaagttatgatgatgatgagtattcaaaaccatgctgtgatctctgcatgtgcacacgctcaatgcctcctcaatgcagctgtgaagatattaggctgaattcatgccactcagattgtaagagctgtatgtgcacacgctcacagccaggacagtgtcgttgtcttgacaccaacgacttctgctacaaaccttgcaagtccagagatgactagaaaaactaatagctctctcaaatggacgaagccctttaaggcttgtttg

SEQ ID NO: 2828 - DNA, 323 bp, Glycine max
  Clone ID: LIB3072-011-Q1-E1-F7
gagggttttgcgctgttgttgctgctcatcctccgtaacctccgagctctgcaccgaaaaactaggccatggggaagacagatggcatgggatctgctcacaagctcaagtctcaccgcacgaggcaaacgtgggctgacaagtcatacaacaaatcacatcttggaaatgaatggaagaaaccttttgctggttcatctcatgccaagggaattgtcccttaacagatacgtaatgatgccaagcatcccaactctgccactctctagtgtgtcagcgttcaacctatcaagaatcggaagaatatccccgcttttgtccct

SEQ ID NO: 2829 - DNA, 416 bp, Glycine max
  Clone ID: LIB3072-011-Q1-E1-F9
atgatgatgatcctgaagaaagcagcacagcagggatgatgatggtcgtggagatagaaagcacagaagggaggaggaagagcggggaaacaaaggttatgagagggaaagccgtggagattactccaagagaggcagatactaaggttctcgttcgagtgagaggtgtgaaagtgactcatgaactgtgatccaggcatcttgagaatgtttacttgctgctttaatatttgaattagatgtgtcagttgtcttatacatttgctttttagaggatgtaatttgtgtgtgaactatgtttcatgtgttttcgtttcaaattccgtattatgtttttctttacaaaattctgtaatatgttgtgactggtagttttttaaaaaataaaatacaaaatcctacgcaggtgttgttat

SEQ ID NO: 2830 - DNA, 354 bp, Glycine max
  unsure at all n locations
  Clone ID: LIB3072-011-Q1-E1-G1
gagagcgaagaagaagaagaaacacgacacaagtccaaagtttgattccaaaatgcgatcctcaagcattcgcagcttcaccatcttcaccctctttctcattgcgatcctcncccacggacacgcaacaactccaacctccaaacttcgcctcaaacctctctcttctcccttttcaaccgccctcgaaaccctccagaaacaactcgggtacaccttcaagagcatcgatcttcttcgtcgcgccatgacacacgcttccttctccgaagaaaacaacaaagctttcgccattctcggcgccagcgtcatcgaaacctccgtctctttccatctgctctccagagacgttga

SEQ ID NO: 2831 - DNA, 301 bp, Glycine max
  Clone ID: LIB3072-011-Q1-E1-G10
gattcacacaactaactaagaaagtcttccatatccccccaaaaatgaaccaggagcatcttgggttgctctctttctcttttgtgccttcaccacctcatacctaccttcagccatcgctgatttcgtgctcgataatgaaggtaaccctcttgaaaatggtggcacatattatatcttgtcacacataacagcatttggtggaataagagcacccccaacgggaaatgaaagatgccctctcactgtggtgcgatctcgcaatgagctcgacaaagggattggaacaatcatctcttcc

SEQ ID NO: 2832 - DNA, 443 bp, Glycine max
  unsure at all n locations
  Clone ID: LIB3072-011-Q1-E1-E5
gattcacacaactaactaagaaagtcttccatagccccccaaaaatgaagagcaccatcttctttgctctctttctcttttgtgccttcaccacctcatacctaccttcagccatcgctgatttcgtgctcgataatgaaggtaaccctcttgaaaatggtggcacatattatatcttgtcagacataacagcatttggtggaataagagcagccccaacgggaaatgaaagatgccctctcactgtggtgcaatctcgcaatgagctcgacaaagggattggaacaatcatctcgtccccatatcgaatccgttttatcgccgaaggccatcctttgagccttaagttcgattcatttgcagttataatgctgtgtgttggaattcctaccgagtggtctgttgtggaggatctancagaaaggactgctgttaaattggtg

SEQ ID NO: 2833 - DNA, 358 bp, Glycine max
  Clone ID: LIB3072-011-Q1-E1-G12
gatagacaccttctagaaaaaaataactcaaccccaacattctcgtacgcttgatccttcctgggctgtcaacaattttccctcttttcattttctgtttctgaaaaatcataccttgaaattgaaagtcccttgttttttttttattccttggtgttttttttgttgctgtgagggaaatgtgccctttaaggtttatcttggtgttcttctccgccgtgctggcgggttattttgcgtggaaaacagtgcgttctgacccgaagatcgaggtgttttccgaggattctgccaatgaagataaatccttcaagaaggaagatattgatttcaagaagatgattcaaaatggattttg

SEQ ID NO: 2834 - DNA, 262 bp, Glycine max
  Clone ID: LIB3072-011-Q1-E1-C7
cagaacgggaccgcactccttttccttctcgttctggtttatggatctttcccaacgatgtttacagcgctcaaccacatattcgggaccacgggggacaggtcacttaactttacattcctacgcagtgctccctcacatacacattgactatcgctaatgaacatgcttcggttcacattaacattgcgcatgtcgatcacaatggcgtctacaactggtcatttctccatttttgccccctgcggattcatccgtgctc

SEQ ID NO: 2835 - DNA, 83 bp, Glycine max
  Clone ID: LIB3072-011-Q1-E1-C8
gatggaaaaagattaatagatccaaaaatgccattagacacttagtaggagagggaaaaaatatataatttattatgtaatag

SEQ ID NO: 2836 - DNA, 416 bp, Glycine max
  Clone ID: LIB3072-011-Q1-E1-C9
gacagcaaaaacaattaataaagatgagtttgaagaacaacatggtggtgctaaaggtgtgtttgttgcttcttttccttgtgggggttacagctgcacgcatggaactgagcttcttcaaaagtgatcagtcatcaagttatgatgatgatgagtattcaaaaccatgctgtgatctctgcatgtgcacacgctcaatgcctcctcaatgcagctgtgaagatattaggctgaattcatgccactcagattgtaagagctgtatgtgcacacgctcacagccaggacagtgtcgttgtcttgacaccaacgacttctgctacaaaccttgcaagtccagagatgactagaaaaactaatagctctctcaaatggacgaagcccctttaagctttgtttgttatgttaggggagac

SEQ ID NO: 2837 - DNA, 440 bp, Glycine max
  unsure at all n locations
  Clone ID: LIB3072-011-Q1-E1-D1
gatgtgtgaacaatcgtgaagttttttctttgagaagtaaaagatcttagtgcaagtaattaacatggaatctcagcaagcaaaccgtgaagaacttgatgagaaggcaaggcaaggtgaaactgttgttcctggaggaactggtgggaagagtcttgaggctcaagaacatcttgctgaaggaaggagccgtggagggcagacgaggaagcagcagctagggtcagaggggtatcatgaaatggggaccaaaggagggcagacaaggaaggaacagatggggagagaagggtaccaagagatgggacgcaaaggaggactcagcaccatggacaagtctggtggagaacgtgctgaagaggaaggcatanaaatanatgagtctaagtttaaaatttactaaaaaactaaaaaattgtgaggaagaagtgttttgttgt

SEQ ID NO: 2838 - DNA, 326 bp, Glycine max
  Clone ID: LIB3072-011-Q1-E1-D11
ggattcacacaactaattaacaacttcttccatacccccccaaaaatcaacagcaccatcttctttgctctctttctcttttgtgccttcacgacctcatacctaccttcatccatcgctgatttcctgctctataattaacgtaaccctcttcaaaatcgtggcacatattatatcttgtcagacataacagcatttggtcgaataataccatctccacacgcaaattaaaccatctcctcccactgtgtcgcaatctcacaatgcgctccacaaacggattccaacaatcctctcgtccccactatctagtctgtctttattcc

SEQ ID NO: 2839 - DNA, 442 bp, Glycine max
  Clone ID: LIB3072-011-Q1-E1-D2
ggcagcagcaactttaaacgccgaagaaagttcatccaatctccgaagcccttcaccgcattgcaaccatgtcgagaagaaaggttagagagccaaaggaagaaaacgtgactctgggcccagctgttagagatggcgaacatgtctttggcgtcgctcgcatctttgcctccttcaatgataccttcattcatgtcactgatctgtccgggagggaaacacttgtccgcatcacaggtggaatgaaggttaaggctgacagagatgaatcgtctccctatgctgctatgcttgctgcacaggacgttgctgccagatgcaaggaactgggcataactgctcttcacatcaagctccgtgcgacgggtggaaacaagacaaaaacacctggtcctggtgctcaatcagctcttcgtgtccttgctcgttctggaatgaaaat

SEQ ID NO: 2840 - DNA, 444 bp, Glycine max
  Clone ID: LIB3072-011-Q1-E1-D3
ggtagttccaccgagtagcaacaatgtcgaagcgaggtcgcggaggatcggcgggaaacaagttccgcatgtcgctgggtctgccggtggcggcgacggtgaactgcgccgacaacaccggcgcgaagaacctctacatcatatcagtgaaggggatcaagggtaggctgaaccggttgccgtcagcttgcgtcggagacatggttatggccaccgtcaagaagggaaagcccgatctccgtaagaaggtgctgcccgccgtcatcgtccgccagcgcaagccttggcgccgaaaggacggtgtttacatgtacttcgaagataatgctggtgttatcgtgaatcccaagggtgaaatgaaaggttctgctatcactggtccaattgggaaggagtgtgctgatctgtggcccaggattgcaagtgctgccaatgctattgttt

SEQ ID NO: 2841 - DNA, 378 bp, Glycine max; identical to SEQ ID NO: 2376
  Clone ID: LIB3072-011-Q1-E1-D4

SEQ ID NO: 2842 - DNA, 380 bp, Glycine max
  Clone ID: LIB3072-011-Q1-E1-D8
gatctcaaacattagtactaataacccaaaaatggcaccatcattttcatcagcaaccaagctcttctccttctcattgcttttgctaaccacaacaatggtttatgaagccaattctcaattacctctgcaaacgacgttggtgttctacctccaagacatagcaacaggacccaacgcaacagtttccccaatcaccggcctcaccggaagggattggacctacgaacaattcggaacaatattcgcagtggacgaccccgtgatgatgagcccaagcccggtctcagctcaagtgggccgggcccaaggcctgctggtagtgtcagcccgcgacggcgctaacgtgaacgcggtgctttcgattgtgttcacgaact

SEQ ID NO: 2843 - DNA, 382 bp, Glycine max
  Clone ID: LIB3072-011-Q1-E1-D9
gactcactcatacaatagagaccagcttttgcttctttgtgaacatggagatgaggaaatcatgtggcttcttcttcttgctcctcctccttgtctttgcttcccaggtggtggtgcagacggagggaagagtgtgtgagtcacaaagccacgggttccatggtttgtgtaatagagaccacaactgtgctttggtctgcacgaacgaatgtttctccggtggcaggtgcaaaggcttccgccgccgctgcttttgcaccaggatttgttgagatctcatcagacactactcttgccatgcaaattaataaatcatagctaggccaaataaattgcatctactctttatccaattgggagctagctacaaaagcaactcata

SEQ ID NO: 2844 - DNA, 420 bp, Glycine max
  Clone ID: LIB3072-011-Q1-E1-E10
ggaaggtcagaactgagaaacgcaatgagctcgtcgaacctcagagatcttcaacgcgaattggagaacaaagccaatgatcgcagcaagcttcaaaaggaaattgcgaagaatcaccaaatgagaaagaaatacacggtccagcttggcgagaacgagctcgtccttaaggaactggatttattgaaagacgacgcaaatgtttataagttgattgggccagtacttgttaagcaagatttggccgaggccaatgcaaatgtccgcaagagaatcgaatacatctcagctgaattgaagcgtctggatgccactgttcaagatttggaagagaagcaaaataccaagaaagatacgatactaaaattgcaacaaaggattcaatcatttcgggctggggaaaggaacgcgtagttttcc

SEQ ID NO: 2845 - DNA, 419 bp, Glycine max
  Clone ID: LIB3072-011-Q1-E1-E11
gacagcaaaaacaattaataaagatgagtttgaagaacaacatggtggtgctaaaggtgtgtttgtcgcttcttttccttgtgggggttacagctgcacgcatggaactgagcttcttcaaaagtgatcagtcatcaagttatgatgatgatgagtattcaaaaccgtgctgtgatctctgcatgtgcacacgctcaatgcctcctcaatgcagctgtgaagatattaggctgaattcatgccactcagattgtaagagctgtatgtgcacacgctcacagccaggacagtgtcgttgtcttgacaccaacgacttctgctacaaaccttgcaagtccagagatgactagaaaaactaatagctctctcaaatggacgaagcccctttaggctttgtttgttatgttaagggagacaaa

SEQ ID NO: 2846 - DNA, 375 bp, Glycine max
  Clone ID: LIB3072-011-Q1-E1-E2
gaggcaagggatgagttgcacaagacgttgaatgaggatgaacttagagatgctgttttgcttgtttttgccaacacgcaatatcctcccaatgcaatgaatgctgcacaaatgactgacaagcttggacttcattcactccgtcaacgccactggtatatccaaagcacttgtgcaacttctggacagggtctctatgagggtttggactggctttctaacaacattgccagcagggcatgagacatttgaaaatttttggtcctgtctggtgatttcctgctgagtatggcggttcttggagaaagatgcatatcccttcttgtcaatgttgtaatagcagaatgcctgctagaagtactctcttcatttgtg

SEQ ID NO: 2847 - DNA, 394 bp, Glycine max
  Clone ID: LIB3072-011-Q1-E1-E3
ggttctagtgtgtgattgtttgttgttgtaactcgttcttcttcttttgttgttctgtgtttgtgtttgttttttctctcacctgaaaatgtcttgctgcggtggtaactgtggttgcggaagctcctgcaagtgcggcaacggctgcggaggctgcaagatgtacccagacttgagctacactgagtcaaccaccaccgagaccttggtcatgggagtggcacctgttaaggctcaatttgagggtgctgaaatgggtgtgcccgctgagaacgatggctgcaaatgtggaccaaactgctcctgcaacccctgcacttgcaagtgaggtgttgggagagcaagcttcaagcagagatagcccttaattaggaataatgataaactattaatg

SEQ ID NO: 2848 - DNA, 373 bp, Glycine max
  unsure at all n locations
  Clone ID: LIB3072-011-Q1-E1-C5
ggagtgcagtgatagagataagaaaatgtggcttgtgcagctctcaaccccatttctgaacggacatggtcattccaccacccttctctccaagcacagttcggcggtgactcagacccactgggccccaccgagtttcctgcctcaaatcaatgcgatgaagacaatgcaggggagagtggtgtgctccaccagcgacaagacggtggcagtggaggtggtgcggctggcccctcacccaaagtacaagaggcgcgtgaggaagaagaagaagtaccaggcccacgaccccgataaccaattcaaagtcggcgacatcgtccagctccagannagacagcccatcagcaaagacaaggcctttctcgcactc

SEQ ID NO: 2849 - DNA, 409 bp, Glycine max
  Clone ID: LIB3072-011-Q1-E1-B12
ggaagaagatggcgtcgagcggagcggtgccgttttggagggcagcggggatgacatacatcacatactcaaacatatgcgcgaatctggtcaggaattgcctcaaggaaccctacaaggctgaagccatccctcgtgagaaggtccattttgctctctccaaatgggtcgacgccaagcctgaaaaacctactattcgttcagacaccccaaagcagtgatccggaatagttggaagctataaatgcataaatctttgagatctggaagttcattgtcattttgaacctttcctgtatgtttagttcctttgcttctttttttttcattccaataaatggagcatacactggattttgactttcatgagtaatcctgtaataatacaatttaaacaattattttgacc

SEQ ID NO: 2850 - DNA, 403 bp, Glycine max; identical to SEQ ID NO: 2659
  Clone ID: LIB3072-011-Q1-E1-B2

SEQ ID NO: 2851 - DNA, 416 bp, Glycine max
  Clone ID: LIB3072-011-Q1-E1-B3
ctagtcagtttagtagaggcaatcaaccaagtgtgttgaaagcatttgcagctgaacaagatgccatggaagaaaatgcaatgctcaagattgaagaagccaaggccaatgcaaacatgtccatggaattagccataaataaacgcaaaagggctcaatgtcttgctcagaatgcagatttggccacctacaaggccacaatgttaattagaatagccgaagcagctatggctgcagaatcattagatgatgcagcagcatattttcttgattgattgatggttaaatcaattccattgctaattatcacaccacaaatttttattacaggatggggggtcataatagatttgctgctgtttagctgtaaaattgtacagatttctgcttgtatttataacttggatttaaatgat

SEQ ID NO: 2852 - DNA, 400 bp, Glycine max
  Clone ID: LIB3072-011-Q1-E1-B6
gggggggcagcgcagcaatacgtaacaagttctatcattgaggaagtttccggtctccgaaaatgaacgacgcagatgtctcgaagcaaatccagcaggtggtgcggttcatccgccaggaagctgaggaaaaggccaacgagatctctgtctccgccgaagaggaattcaatatcgagaagctgcagttggtcgaagccgacaagaagaagatcgggcaagaatacgaacgcaaagagcgccaagtcgaaattcgcaagaagattgggtactcgatgcagctgaatgcttctcggatcaaagttcttcaagctcaagatgacgtgatcagttccatgaaagaagctgcatccaaggaactgttgaatgtgagtcatcatcatcatttgaatctactgag

SEQ ID NO: 2853 - DNA, 406 bp, Glycine max
  Clone ID: LIB3072-011-Q1-E1-B7
gacggcactcgttttcgttctcgttctggtttatggatctttgcgaaggaggtttacagcgctcaaccaaagatgcagaacgaggaaggacagatcactgagctttacattcctaggaagtgctccgccacaaacagattgattaccgctaaggaccatgcttcggttcagatcaacattgggcatgtggatgagaatggcgtctacaatggccatttctccacttttgccctctgcggattcatccgtgctcagggtgatgctgacagtgccctagaccgcttgtggcagaagaagaaagttgaagttaagcaacagtagacacccatgatagtttgttacttcgttatgtattaattcctactcttgctagagatatttgagtactatgattgtcgttttgagc

SEQ ID NO: 2854 - DNA, 409 bp, Glycine max
  Clone ID: LIB3072-011-Q1-E1-B9
gtcttaaagattcagattctcaatagagagaaagagagagaaatggctttcacgatttccagatctcaatctgctttgacagatagagagaaggagaatcttgacaacttagttgacaaggagtgtgcaaccacagagggtatgatatcgagccagctcaagttgaagtcttctttgtcatccaaagcgtcttctcatcaaagcatggacaaacatacaatccttcgacgtatcaggcaacgcaggtttaataacaaagccaaaaccgctctggaagctctcataggcacctcagaagccaacaataccggcactgcccaagaacagaagtggcttcaactgggtgactctttctcatctccttaactggaaacacaatctccccccaagtttgcaacccatctataaa

SEQ ID NO: 2855 - DNA, 369 bp, Glycine max
  Clone ID: LIB3072-011-Q1-E1-C1
acacaaaagggattccattgtgtagtaaccaatcatctttagttcttcagtaatttattgtgggattctattctaagattttgagaatgtctagctgtgggtgtggaagcagctgcaactgtggcagcaactgcggttgcaacaagtactcttttgacttgagttacgttgagaagacaaccacagagactctagttttgggtgttgggcctgtgaaggcccaattggagggtgctgaaatgggtgttgcatctgagaacggtggctgcaactgtggattaagctgcacctgtgacccatgcaactgcaagtaaggtcaagatgtataaccttgaagcagagatagctgtaatatatgtttcaacaaat

SEQ ID NO: 2856 - DNA, 338 bp, Glycine max
  Clone ID: LIB3072-011-Q1-E1-C10
gcactcactcatatgtgtgagaccagcttttgcttctttgtgaacatggagatgaggaactcatgtggcttcttcttcttgctcctcctccttgtctttgcttcccaggtggtggtgcatacggagggaacagtgtgtgagtcacaaaaccactggtactagggtttgtctaatataaaccacaagtgtgctttggtctgcaagaaccaatgtttctccggtggtaagtgtaaaggcttccgctgccgttgcttttgcaccaagatttgttgagatctcatcaaatacgactcttgccatgccaattcataaatcatagctaggccaaatgaaatgca

SEQ ID NO: 2857 - DNA, 414 bp, Glycine max
  Clone ID: LIB3072-011-Q1-E1-C11
ggcgtaatctagtcgttcatcccaaaatggtttgcttggcttgtttgctgcccctttttctggttccgatcgtcaacatcctccctcttctatactattttataatgggaaaaatctatcgggtttttggttgggagtacaggaaaccggagagggctcctcctgtatgtccatacaagcctccaaccaacagggttagtaaagttgaggcagatgttgaacctgttccagcagatcctgtttagcctggaagtgtagatgtcaagcacgattaatctggggtagctattctataaggtttgacgggagtaaaatgtatgataacatctgatggttgatgtaagtttttaacttttaataaatatcttgtcttgtcatgaccattaaacaataaaaaaaatgcttggttgggtt

SEQ ID NO: 2858 - DNA, 440 bp, Glycine max
  Clone ID: LIB3072-011-Q1-E1-C2
gacagcaaaaacaattaataaagatgagtttgaagaacaacatggtggtgctaaaggtgtgtttgttgcttcttttccttgcgggggttacagctgcacgcatggaactgagcttcttcaaaagtgatcagtcatcaagttatgatgatgatgagtattcaaaaccatgctgtgatctctgcatgtgcacacgctcaatgcctcctcaatgcagctgtgaagatattaggctgaattcatgccactcagattgtaagagctgtatgtgcacacgctcacagccaggacagtgtcgttgtcttgacaccaacgacttctgctacaaaccttgcaagtccagagatgactagaaaaactaatagctctctcaaatggacgaagcccctttaggctttgtttgctatgttaggggagacaaataaaacaagaaataaaagctc

SEQ ID NO: 2859 - DNA, 436 bp, Glycine max
  Clone ID: LIB3072-011-Q1-E1-C3
gggggtgtgactccaaacaaaaactactacttgcttagcacacaatattatgaaaaccaccgcagaggttgtttcatctcattgtcttgttgtagcagagtgctctcaatccagccccacacaactttctgctatggaacctcagattctgaatttggggtgcatgcattacagaaggagatgcaagatcagagcgccgtgctgtgatgaggtttttgactgtaggcattgccataatgaagctaagaattctgaggaggttgatgctgtggatcgtcatgatgttccacgccatgaaattaagaaggttatctgctccttatgtgatgtagagcaagatgttcagcagtactgtataaactgtggaatatgcatgggcaagtacttttgtactatatgcaaattctttgatgatgatatttcaaagaatcaatac

SEQ ID NO: 2860 - DNA, 428 bp, Glycine max
  unsure at all n locations
  Clone ID: LIB3072-011-Q1-E1-C4
gagcaaaaacaattaataaagatgagtttgaagaacaacatggtggtgctaaaggtgtgtttgttgcttcttttccttgtgggggttacagctgcacgcatggaactgagcttcttcaaaagtgatcagtcatcaagttatgatgatgatgagtattcaaaaccatgctgtgatctctgcatgtgcacacgctcaatgcctcctcaatgcagctgtgaagatattaggctgaattcatgccactcagattgtaagagctgtatgtgcacacgctcacagccaggacagtgtcgttgtcttgacaccaacgacttctgctacaaaccttgcaagtccagagatgactagaanaactaatagctctctcaaatggacgaagcccctttaggctttgtttgttatgttagggagacanttaaacagaaata

SEQ ID NO: 2861 - DNA, 406 bp, Glycine max
  Clone ID: LIB3072-011-Q1-E1-A8
gattcacacaactgactaagaaagtcttccatagccccccaaaaatgaagagcaccatcttctttgctctctttctcttttgtgccttcaccacctcatacctaccttcagccatcgctgatttcgtgctcgataatgaaggtaaccctcttgaaaatggtggcacatattatatcttgtcagacataacagcatttggtggaataagagcagccccaacgggaaatgaaagatgccctctcactgtggtgcaatctcgcaatgagctcgacaaagggattggaacaatcatctcgtccccatatcgaatccgttttatcgccgaaggccatcctttgagccttaagttcgattcatttgcagttataatgctgtgtgttggaattcctaccgagtggtctgttgt

SEQ ID NO: 2862 - DNA, 324 bp, Glycine max
  Clone ID: LIB3072-010-Q1-E1-G9
ggtagttccaccgagtagcaacaatgtcgaagcgaggtcgcggaggatcggcgggaaacaagttccgcatgtcgctgggtctgccggtggcggcgacggtgaactgcgccgacaacaccggcgcgaagaacctctacatcatatcagtgaacgggatcaagggtaggctgaaccggttgccgtcagcttgcgtcggagacatggttatggccaccgtcaagaagggaaagcccgatctccgtaagaaggtgctgcccgccgtcatcgtccgccaccgcaagccttggcgccgaaagtaacgtgtttacatctacttccaagata

SEQ ID NO: 2863 - DNA, 421 bp, Glycine max
  Clone ID: LIB3072-010-Q1-E1-H1
gacacacagctattcctcttaagcttgctactgagtttccacactgcataccttaggtcttccgaattcgaagttaatttgcaagatggctaaggaaaaggctcagatcaacattgtggtggttggtcatgtggaccctgaggaggcaaccaccattaacgagctgaagaagcctgttgtggagaaagaagctccagggcatgccatatgagggcatgcacgtacggcctcggaggggaaccagaaaattatgttaacaaaataatctggaaccctaatgtatcggtgtcatcatcagtgtgtagtttaagctagctttgctatggttacgttctttgagatgagagtcttgatgaacagtaccattctgatgtattgctttccttgaaagttaatgcatgcttcttatcttctgtcaaaa

SEQ ID NO: 2864 - DNA, 420 bp, Glycine max
  unsure at all n locations
  Clone ID: LIB3072-010-Q1-E1-H10
gacggcaaaaacaattaataaagatgagtttgaagaacaacatggtggtgctaaaggtgtgtttgttgcttcttttccttgtgggggttacagctgcacgcatggaactgagcttcttcaaaagtgatcagtcatcaagttatgatgatgatgagtattcaaaaccatgctgtgatctctgcatgtgcacacgctcaatgcctcctcaatgcagctgtgaagatattaggctgaattcatgccactcagattgtaagagctgtatgtgcacacgctcacagccaggacagtgtcgttgtcttgacaccaacgacttctgctacaaaccttgcaagtccagagatgactagaanaactaatagctctctcaaatggacgaagcccctttacgctttgtttgttatgttacgggagacaaat

SEQ ID NO: 2865 - DNA, 359 bp, Glycine max
  Clone ID: LIB3072-010-Q1-E1-H11
gacagcaaaaacaattaataaagatgagtttgaagaacaacatggtggtgctaaaggtgtgtttgttgcttcttttccttgtgggggttacagctgcacgcatggaactgagcttcttcaaaagtgatcagtcatcaagttatgatgatgatgagtattcaaaaccatgctgtgatctctgcatgtgcacacgctcaatgcctcctcaatgcagctgtgaagatattaggctgaattcatgccactcagattgtaagagctgtatgtgcacacgctcacagccaggacagtgtcgttgtcttgacaccaacgacttctgctacaaaccttgcaagtccagagatgactagaaaaactaa

SEQ ID NO: 2866 - DNA, 342 bp, Glycine max
  unsure at all n locations
  Clone ID: LIB3072-010-Q1-E1-H12
gactctcatcacattattctatatcaattttggttaagagtcttgaaaaagcaagagaaaaaaaaataccaaccatggcaaccatttctgatcaacctagagggtcctactcctatggaacctcatatggagcaccctatggaaccacgtatgagaccaacaccagcattaacaacccaccttcacgccaaacagtgaagttcataactgctgccactattggcatcacactcttgctcctgtcntgggttgacctcacaggcactgtcataggtttgatcattgcaanccctcctcctggtatcttcagccccatccttgtccctgctgcgtttgtgctgt

SEQ ID NO: 2867 - DNA, 395 bp, Glycine max
  Clone ID: LIB3072-010-Q1-E1-H3
gattcacacaactaactaagaaagtcttccatagccccccaaaaatgaagagcaccatcttctttgctctctttctcttttgtgccttcaccacctcatacctaccttcagccatcgctgatttcgtgctcgataatgaaggtaaccctcttgaaaatggtggcacatattatatcttgtcagacataacagcatttggtggaataagagcagccccaacgggaaatgaaagatgccctctcactgtggtgcaatctcgcaatgagctcgacaaagggattggaacaatcatctcgtccccatatcgaatccgttttatcgccgaaggccatcctttgagccttaagttcgattcatttgcagttataatgctgtgtgttggaattcccaccgag

SEQ ID NO: 2868 - DNA, 422 bp, Glycine max
  Clone ID: LIB3072-010-Q1-E1-H4
ggagcagaatcttcaggccaagccaggtaagcacaaccaaagcaacaccccaaatggcttcagcttctgttcccatggcgttgtcactgagctctgttaccaacaacaacaagccttcatccgaagccttcttcaggtcactacccctacgccaaccaaagaggaccctcttcaccacgaaggcagtgtcaaactccaagcctcaaatcaatgcatctttgaaggagaaggcagttgccggactcacagcagcttctgtgacagcatctatggtggttccggaggtggctcatgctgctggatatgagttctccccttccctaaagaactttctactcagcatctttgctggtggggttgttctagcagccatatttggagccgttattggggtttccaactttgatccggttaagagaact

SEQ ID NO: 2869 - DNA, 421 bp, Glycine max
  Clone ID: LIB3072-010-Q1-E1-H5
cagcaagagcaaggaggtcatcaaagccagaaaggaaagcatcagcaagaagaagaaaacgaaggaggcagcatattgagtggcttcaccctggaattcttggaacatgcattcagcgtggacaagcagatagcgaaaaacctacaaggagagaacgaaggggaagacaagggagccattgtgacagtgaaaggaggtctgagcgtgataaaaccacccacggacgagcagcaacaaagaccccaggaagaggaagaagaagaagaggatgagaagccacagtgcaagggtaaagacaaacactgccaacgcccccgaggaagccaaagcaaaagcagaagaaatggcattgacgagaccatatgcaccatgagacttcgccacaacattggccagacttcatcacctgacatctacaacc

SEQ ID NO: 2870 - DNA, 387 bp, Glycine max
  Clone ID: LIB3072-010-Q1-E1-H6
gacagcaaaaacaattaataaagatgagtttgaagaacaacatggtggtgctaaaggtgtgtttgttgcttcttttccttgtgggggttacagctgcacgcatggaactgagcttcttcaaaagtgatcagtcatcaagttatgatgatgatgagtattcaaaaccatgctgtgatctctgcatgtgcacacgctcaatgcctcctcaatgcagctgtgaagatattaggttgaattcatgccactcagattgtaagagctgtatgtgcacacgctcacagccaggacagtgtcgttgtcttgacaccaacgacttctgctacaaaccttgcaagtccagagatgactagaaaaactaatagctctctcaaatggacgaagcccctt

SEQ ID NO: 2871 - DNA, 414 bp, Glycine max
  Clone ID: LIB3072-010-Q1-E1-H8
ggaagtaagggatcgagcctcggaggagggaatcgcagcgaagtccactatgccgaagcaaattcacgagattaaggacttcctcctcactgctaggaggaaggatgcacgctctgtgaaaatcaagcggagcaaggatgtggtgaagttcaaggtccgttgctccaagtacctttacaccctctgtgtgtttgattctgagaaggctgataagttgaagcaatcacttcctccaggtttaagcgtgcaggatgtgtgattcttactgctgtatgaagatcaggtttttctctggattttggggattcatagttagtaaaatggttcagagaattttcgtatttgttgttacattcgggatcatgctagtattttgtttaagacggatccaacttgcttggggattatgtggct

SEQ ID NO: 2872 - DNA, 207 bp, Glycine max
  Clone ID: LIB3072-010-Q1-E1-H9
gatagcaaaatcgtttctccaatttaatcaccattgtacaacccaattcccttcgtcgttttcgattaagagagcaatggcacgtaccaagcaaaccgctcgcaagtccaccggacgaaacgctccgaggaagcaattggcaaccaaagccgctcgcaagtcagccccggcgaccggcggagtgaacaagccccaccgcttcaggcc

SEQ ID NO: 2873 - DNA, 376 bp, Glycine max
  Clone ID: LIB3072-011-Q1-E1-A1
gattcatgcaactgaataattaagaaaagccatttccatagcagcctaagaaaatgaagagcactagcttgttcgctatctttctactttgcgccttcacctcatacctaccttccgccaccgcccaggacgtgctcgacgtggatggcgatccgattcggaacggtttcatatactacgttttgccggcaataagaggaaacggtggcggaatagaacgagccgcactcgggaaagacacttgccctatcactgtagtgcaatctcccaatccaaactctaaggggttagaaattaagtttgaatctgcataccccgcctattacataaacgaaaccctaattttgcaaataaagttcagttacccacagcagtg

SEQ ID NO: 2874 - DNA, 339 bp, Glycine max
  Clone ID: LIB3072-011-Q1-E1-A3
ggttctactgtgtgaatgtttgttgttgtaactcgttcatcttcttttgttgttctgtgtttgtgtttgttttttctctcagctgaaaatgtcttgctgcggtggtaactgtggttgcggaagctcctgtaagtgaggaaacagctgcagaggctgcaagatgtacccagacttgagctacactgagtcaaccaccaccgagaccttggtcatgggagtggcacctgttaatgctcaatttgagggtgctgaaatgggtgtgcacgctgagaaagatggctgcaaatgtggagcaaactgctcctgcaatccctgcacgtgcaagtgacgtgttgggag

SEQ ID NO: 2875 - DNA, 351 bp, Glycine max
  Clone ID: LIB3072-011-Q1-E1-A4
gactttgagttcgaactaaacaattcaattcaatctgcctcgatcatggagaggaaaacatttgggtttttgttcttgctcctccttgtcttagcttctgatgtgacggtgaagagagcagaggcgaaagattgcttgacaaggaggcacgggttccagggtagatgcttattcgacaggcaatgtgcacatgtgtgcaggagcgatggtttcatcggtggtcagtgccgaggccctcttcgcaaatgcttttgcagcaggccatgttgatcgaaattactactgccaaagaggccatgaaataaacaaacaaacaaataaataaatagctctaaccgacacatatgtacg

SEQ ID NO: 2876 - DNA, 349 bp, Glycine max
  Clone ID: LIB3072-011-Q1-E1-A5
agaagaggaggaagaacacgcaggaagagggcacgaaaggagaaaagaagaagaagaaacagcacggagggaacaagaacaagaacaggctgaaagacagcaacaaaagagagaaaagaggagacaaaaggaggaacaaggagaaggagaagaagaagaagaagaagatgaagaggaaccaacatggtgggagagaagagaaagaagaaaacagaaggggaaaagtccagaagaaggagtagaatgggagcaagaacaagctacgagagaagcagaagaagcacagagggaacaagaacaagctaaaagagaagcagcacagagggaacaagaacggggcaaaagagag

SEQ ID NO: 2877 - DNA, 409 bp, Glycine max
  Clone ID: LIB3072-010-Q1-E1-G7
ggcatcgaacagagagagagagaatggcagcacttggtgggaatcgtgatgtgacaggaagccggaacagcgttgagatcgatgctctagctcgctttgctgttgaagaacacaacaaaaaacagaatgcccttttggagtttgaaaaggtggtaactgcgaaacagcaagtggtttctggtaccttgtacaccatcactttggaggcaaaagatggtgggcaaaagaaggtttatgaagccaaagtttgggagaagtcatggttgaacttcaaggaggtgcaagagttcaagcttgttggagatgcacctgcatagtctagtgcttaattaggttgctgaagagtgaagaatgagacagcctggttcgaaggggaaaagcctaacgatatatcaaaggatcctatatg

SEQ ID NO: 2878 - DNA, 441 bp, Glycine max
  Clone ID: LIB3072-010-Q1-E1-F10
gacacaactaactaagaaagtcttccatagccccccaaaaatgaagagcaccatcttctttgctctctttctcttttgtgccttcaccacctcagacctagcgtcagccatcgctgatttcgtgctcgacaatgaaggtaaccctcttgaaaatggtggcacatattatatcttgtcagacataacagcatttggtggaataagagcagccccaacgggaaatgaaagatgccctctcactgtggtgcaatctcgcaatgagctcgacaaagggattgggacaatcatctcgttcccatatcgaatccgttttatcgccgaacgccatcctttgagccttaagttcgattcacttgcagttataatgccgtgtgttgggattcctaccgagtggtctgttgttgaggatctacagaaaggactgctgttaacattggtgag

SEQ ID NO: 2879 - DNA, 386 bp, Glycine max
  Clone ID: LIB3072-010-Q1-E1-F11
gacagcaaaaacaattaataaagatgagtttgaagaacaacatggtggtgctaaaggtgtgtttgttgcttcttttccttgtgggggttacagctgcacgcatggaactgagcttcttcaaaagtgatcagtcatcaagttatgatgatgatgagtattcaaaaccatgctgtgatctctgcatgtgcacacgctcaatgcctcctcaatgcagctgtgaagatattaggctgaattcatgccactcagattgtaagagctgtatgtgcacacgctcacagccaggacagtgtcgttgtcttgacaccaacgacttctgctacaaaccttgcaagtccagagatgactagaaaaactaatagctctctcaaattgacgaagcccct

SEQ ID NO: 2880 - DNA, 454 bp, Glycine max
  Clone ID: LIB3072-010-Q1-E1-F12
atccctcaatttggttgcagagaacaactcagtcctcaaagcgcagcacggtagtggaatccctgttgttagccgttaagaaacactatctctatcgctaatcgaaacgacaccgccggatctgttcctccctcctctcagattttgctgcaatgggcaagaaaaggttagattcaaagttcgatcgcaagttcgaaaagaaggtccaattttattccaaggtgaaagatgctgttacctccttgagtacccaaaagtctattactaagaaaaagaaaaagagcaaacaacaaaggcggcagagcaaattgaaggcatataatctatcttcacttttagagtcccttcccgaggtgaagtcatcaaagaaaccagtttgtgagaatgaacggaaacttaagtgtaaatcaggcagatataatattgactgaaagagatcgatttctgccgttct

SEQ ID NO: 2881 - DNA, 400 bp, Glycine max
  Clone ID: LIB3072-010-Q1-E1-F2
gacagcaaaaacaattaataaagatgagtttgaagaacaacatggtggtgctaaaggtgtgtttgatgcttcttttccttgtgggggttacagctagacgcatggaactgagcttcttcaaaagtgatcagtcatcaagttatgatgatgatgagtattcaaaaccatgctgtgatctctgcatgtgcacacgctcaatgcctcctcaatgcggctgtgaagatattatgctgaattcatgccactcagattgtaagagctgtatgtgcacacgctcacagccaggacagtgtcattgtcatgacaccaacgacttctgctacaaaccttgcaagtccatagatgactagagaaactaataactctctcaaatggacgaagcccctttaagctttgtttg

SEQ ID NO: 2882 - DNA, 412 bp, Glycine max
  Clone ID: LIB3072-010-Q1-E1-F3
ggaagcaagatcgtggtcgttgttgggggttcagacagcgcaattgaaagctcaggggcattgttccgataaatctgtcgcaggaaaacaaaacaaaaggaaaaagatgattagcattctcacccaggaacggcttctgggagcttcattgggagttgtattgacgggagttgttgtgtttgagcaacgcagatacatctacgcttctatttccgattcccaatctcaggttaaagaacctatatttgggaagaagtcacgttctgaatttgcacatgtatggaacaaaactgtggatcagacatttggacctttgataaagtctctcagctcacgtggatggtagaaatgttatgagtgattttatttttagtaccatctcttgtaattttgatatcaaaacatacaatac

SEQ ID NO: 2883 - DNA, 414 bp, Glycine max
  Clone ID: LIB3072-010-Q1-E1-F7
gatgcaactgaataattaagaaaagccatttccatagcagcctaagaaaatgaagagcactagcttgttcgctatctttctactttgcgccttcacctcatacctaccttccgccaccgcccaggacgtgctcgacgtggatggcgatccgattcggaacggtttcatatactacgttttgccggcaataagaggaaacggtggcggaatagaacgagtcgcactcgggaaagacacttgccctatcactgtagtgcaatctcccaatccaaactctaaggggttagaaattaagtttgaatctgcataccccgcctattacataaacgaaaccctaattttgcaaataaagttcagttacccacagcagtgtgaaagaaagaatccttggtgggccatttctaaggatatatc

SEQ ID NO: 2884 - DNA, 405 bp, Glycine max
  Clone ID: LIB3072-010-Q1-E1-F8
gacagcaaaaacaattaataaagatgagtttgaagaacaacatggtggtgctaaaggtgtgtttgttgcttcttttccttgtgggggttacagctgcacgcatggaactgagcttcttcaaaagtgatcagtcatcaagttatgatgatgatgagtattcaaaaccatgctgtgatctctgcatgtgcacacgctcaatgcctcctcaatgcagctgtgaagatattaggctgaattcatgccactcagattgtaagagctgtatgtgcacacgctcacagccaggacagtgtcgttgtcttgacaccaacgacttctgctacaaaccttgcaagtccagagacgactagaaaaactaatagctctctcaaatggacgaagcccctttaggctttgtttgttatg

SEQ ID NO: 2885 - DNA, 182 bp, Glycine max
  Clone ID: LIB3072-010-Q1-E1-F9
tacggctaccaaatggtaacgctccggtactgctgctagatgtttacgttccggtacggcttctataggttacggcttcgctattgctgccatcacgttgaggttgggggacaacaaccttacgttactgcggtgagtttgccactcaccgtcatcgttcttactctatgatagctgcttcc

SEQ ID NO: 2886 - DNA, 404 bp, Glycine max
  Clone ID: LIB3072-010-Q1-E1-G1
gacagcaaaaacaattaataaagatgagtttgaagaacaacatggtggtgctaaaggtgtgtttgttgcttcttttccttgtgggggttacagctgcacgcatggaactgagcttcttcaaaagtgatcagtcatcaagttatgatgatgatgagtattcaaaaccatgctgtgatctctgcatgtgcacacgctcaatgcctcctcaatgcagctgtgaagatattaggctgaattcatgccactcagattgtaagagctgtatgtgcacacgctcacagccaggacagtgtcgttgtcttgacaccaacgacttctgctacaaaccttgcaagtccagagatgactagaaaaactaatagctctctcaaatggacgaagcccctttaggctttgtttgttat

SEQ ID NO: 2887 - DNA, 285 bp, Glycine max
  Clone ID: LIB3072-010-Q1-E1-G11
gagcaacatggtgaagctggtggagagatttacttgccagaagcttacgttagaaccaagaggactacttaatggagcaaatcagttggaagaacttgtagctagcttcccaactggcttatctgagtgtggagaagcattatcaagccttaggagtacgagaacgagtactgtttgtgatgaatgtctatggcttaagaaatctgtctttagtcaacttgtgtgttttgttattcagttctcagcaataaactgctctggcaatctaatttcatgttcaatgcc

SEQ ID NO: 2888 - DNA, 374 bp, Glycine max
  Clone ID: LIB3072-010-Q1-E1-G12
gcgaacgagaggctgaagagaacagcaagatattattcatccaattggagaacctgggctgctgtcaacattcaatttgcttggagacgttacaggcagaggactaaaggtccagtgacccctgtaagggacactaatggaggcactgaacgcaggctcttgcaatatgctgcaatgttcatgtcaataaggccacatgaccaccttgaatgaaaactggtgtgtccatgatttttcttattgttgttggttattgatcctcaataaaattgtatttcaaatccattagacctgttgaaggtgaaatgtattaaaaaaaaaaaacaacacagtgagtacgagtaattgacaaaattattgagaccccttctttc

SEQ ID NO: 2889 - DNA, 407 bp, Glycine max
  Clone ID: LIB3072-010-Q1-E1-G3
gattcacacaactaactaagaaagtcttccatagccccccaaaaatgaagagcaccatcttctttgctctctttctcttttgtgccttcaccacctcatacctaccttcagccatcgctgatttcgtgctcgataatgaaggtaaccctcttgaaaatggtggcacatattatatcttgtcagacataacagcatttggtggaataagagcagccccaacgggaaatgaaagatgccctctcactgtggtgcaatctcgcaatgagctcgacaaagggattggaacaatcatctcgtccccatatcgaatccgttttatcgccgaaggccatcctttgagccttaagttcgattcatttgcagttataatgctgtgtgttggaattcctaccgagtggtctgttgtg

SEQ ID NO: 2890 - DNA, 415 bp, Glycine max
  Clone ID: LIB3072-010-Q1-E1-G6
ggccgaaagtgtgggtaaaactaaaaccctttacctcctccaaacaaaaccctaacttgtgattttgaagatgaaggcgaagaagcatgcccacgctgaagaggagggagttgctccgcttccttcaccaacactatccgattccgactctgattacgaggactcttcagccgatgatcaccacgaatcttctgtctcgctggattctcaatcccaatcggaattagaagacgcttcacccgaaaatggtagctccggcgttgtagaatctgcagaaaatgaatcatctcaatacgaggacactgttaatgaagaagacggtggaagtgagagctctgatctccatctggaaggagctgagagtgactcctccgaggatgaggtggctcctcgaaacaccgtgggagatgtgcca

SEQ ID NO: 2891 - DNA, 303 bp, Glycine max
  Clone ID: LIB3072-010-Q1-E1-E9
gattcacacagctaactaagaaagtcttccatagccccccaaaaatgaagagcaccatcttctttgctctctttcacttttgtgccttcagcatcgcataccgaccttcagccatcgctgatttcgtgctcgataatgaatgtaaccctcttgaaaatggtggcacatattatatcgtgtcagacataacaacatttggtggaataagagcagccccaacgggaaatgaaagatgccctctcactgtggtgcaatctcgcaatgagctcgacaaggggattggaacagtcatctcgtcgccat

SEQ ID NO: 2892 - DNA, 405 bp, Glycine max
  Clone ID: LIB3072-010-Q1-E1-D3
gacagcaaaaacaattaataaagatgagtttgaagaacaacatggtggtgctaaaggtgtgtttgttgcttcttttccttgtgggggttacagctgcatgcatggaactgagcttcttcaaaagtgatcagtcatcaagttatgatgatgatgagtattcaaaaccatgctgtgatctctgcatgtgcacacgctcaatgcctcctcaatgcagctgtgaagatattaggctgaattcatgccactcagattgtaagagctgtatgtgcacacgctcacagccagggcagtgtcgttgtcttgacaccaacgacttctgctacaaaccttgcaagtccagagatgactagaaaaactaatagctctctcaaatggacgaagcccctttaagctttgtttgttatg

SEQ ID NO: 2893 - DNA, 413 bp, Glycine max
  Clone ID: LIB3072-010-Q1-E1-D5
gagagcgaaagagatgtcgttggtttcaagcatgttcgggtgtggagtggtgatggcggcgtcgcaagcaatgggaattggaaggagaagcgatggtggattgacgatagtgtgttcgtctaggccgcagaagaaagcgacggcgcatcacatgaagactcggcctcggaagacgcaggcatgggatagaaaccgcaagcccaccgtctacgatccactccctcctcttcctcctgattggaccctcgttattcccgctgacgcttcttctgctcccgttacgcctccgcctccaactccctctgcctagtcactctctcggtactctctctcgttttcatgtagtcttatctttaattccagcagcttttctttcatgttttcatctcaaatcaaaccttcatcatttgttt

SEQ ID NO: 2894 - DNA, 375 bp, Glycine max
  Clone ID: LIB3072-010-Q1-E1-D6
gacgatgagtcgatttgataactaagatattgttattcgtgatattgatccaatttgatatcatcgaaatccaatttataccattgttgaattaattatcgatgaaagatttatcatctctatgggattaaatcccgaattttttattggaaatttaagagaaataaaacataataaagattatggaagtaaatattcttgcatttattgctactgcactgtttattctagttcctactgcttttttacttataatttacgtaaaaacggtaagtcgaagtgactaatttcactgaaatctgacttcttcatttttatcaatgtaatcaatgattaaaaaaaatgaaaaaggttttcaatttttggtcttagtcc

SEQ ID NO: 2895 - DNA, 412 bp, Glycine max
  Clone ID: LIB3072-010-Q1-E1-D7
ggcagatagtgattgagaattgggaattgcgatggatgggagaaacggaagcggaagcaggaggagtggggaagcaggaggaatggggaaggcgataatcgcgttggtaattgggagtcttgtgtactatcactgtgcctaccgcaattctacccttgtctctcttttttccgatgtcttcatcgtccttctctgctccctcgccattctcggtcttctattccgacaaatgggcatccagagagtgcgaacgcgatcgtggcatggttggccaatacgattggtggcgccgagtcagtgttcagggtggcggctactgggcacgacaagaggctgtttctgaaggtcattctttccctatatctcttctctgctcttggaagactcgccagagggattacagttgcctatg

SEQ ID NO: 2896 - DNA, 401 bp, Glycine max
  Clone ID: LIB3072-010-Q1-E1-D8
gacagcaaaaacaattaataaagatgagtttgaagaacaacatggtggtgctaaaggtgtgtttgttgcttcttttccttgtgggggttacagctgcacgcatggaactgagcttcttcaaaagtgatcagtcatcaagttatgatgatgatgagtattcaaaaccatgctgtgatctctgcatgtgcacacgctcaatgcctcctcaatgcagctgtgaagatattaggctgaattcatgccactcagattgtaagagctgtatgtgcacacgctcacagccaggacagtgtcgttgtcttgacaccaacgacttctgctacaaaccttgcaagtccagagatgactagaaaaactaatagctctctcaaatggacgaagcccctttaagctttgtttgt

SEQ ID NO: 2897 - DNA, 373 bp, Glycine max
  Clone ID: LIB3072-010-Q1-E1-D9
agaaggggaacacaatactatgcattccctatgggcatagctttgagcagcaattgtgatcttatcagctatggcggagaaacacaaccttaagaatccagccgtgaagcggattctccaagagcacaaggagatgcaatcaaacccatccgatgactacctgagcctccctcttgaggaaaatatatttgaatggcaatttgctataagggggcctcgtgatgctgaatttgaaggtggtatttatcacggacggattcagctgccttcagaatatcccttcaaacctccttcgtttatgttgctcacacctagtggccgttttgagaaccaaaccaagatttgcttgagcatatcaaatcatcaccctgag

SEQ ID NO: 2898 - DNA, 290 bp, Glycine max
  Clone ID: LIB3072-010-Q1-E1-E10
gacagcaaaaacaattaataaagatgagtttgaagaacaacatggtggtgctaaaggtgtgtttgttgcttcttttccttgtgggggttacagctgcacgcatggaactgagcttcttcaaaagtgatcagtcatcaagctatgatgatgatgagtattcaaaaccatgctgtgatctctgcatgtgcacacgctcaatgtctcctcaatgcagctgtgaagatattacgctgaattcatgccactcagattgttagagctgtatgtgcacacgcccacagccaggacag

SEQ ID NO: 2899 - DNA, 201 bp, Glycine max
  Clone ID: LIB3072-010-Q1-E1-E11
agtacgtgagattgttgagcagagttggactgctgactaatcatcatagataagatagggcttctgtgacaatcaaaaggttgtcaaaaggatatatgattgaataaccagcagacttcaaaaagaaccattatgattttctagtccttgacactgtgcttgctcaaactctatgagttaatgttccaccttattttctcc

SEQ ID NO: 2900 - DNA, 411 bp, Glycine max
  unsure at all n locations
  Clone ID: LIB3072-010-Q1-E1-E2
aaataaggataatgctgttgttaaatcacagctagttgtagatggagttatttggcatgtgacctgtgttagcatggggaatccacactgtgtaactttcagtagagaaggaagccagaatttgcttgttgatgaattgaagctagcagaaattgggccaaaatttgaacatcatgaggtgttccctgcacgaactaacacagagtttgtgcaagtattatctaactctcacttgaaaatgcgtgtttgggagcggggagcaggagcaaccctagcctgtggaactggagcttgtgctactgttgttgcagcagttcttgagggtcgtgctgggaggaattgcacggttgatctacctggagggcctcttcagattgagtgganggaggaagataatcatgtttatatgac

SEQ ID NO: 2901 - DNA, 405 bp, Glycine max; identical to SEQ ID NO: 2630
  Clone ID: LIB3072-010-Q1-E1-E3

SEQ ID NO: 2902 - DNA, 419 bp, Glycine max
  Clone ID: LIB3072-010-Q1-E1-E4
gagcgccaatgtttttttcagaggagtttcatcttgtaatcaaaagagtttatcttatagtaagaaatcgatgtcttactccattttaaggaacaaaacaagagaacaatagcctgacaaagggtttagccataaaatcgaatccatcattgatttgagatattgataaggtgaatactcatttctcgtcaatgctaggcataatgcgggtatagggacctaaaaaagattatcttttcttcctatcttatgaactttaaggtgtatgaagtgtcatttcctatcttagattttaattttagtaggtagataaagagtccatttaacttaagttgatctaggccagaagcagacctacgtcaagataatccttctttgaaacactttggtagtgctcttagattgtaatccaaataaaa

SEQ ID NO: 2903 - DNA, 413 bp, Glycine max
  Clone ID: LIB3072-010-Q1-E1-E7
gacagaagaaaaaagagaagaagatgggtttgaagaacaacatggtggtgctaaaggtgtgtttggtgctacttttccttgtggggggtactactactgccaacttgaggctgagtaagcttggcctgctcatgaaaagtgatcatcatcaacactcaaatgatgatgagtcttcaaaaccatgctgtgatcaatgcgcatgcacaaagtcaaaccctcctcaatgccgctgttcagatatgaggctgaattcgtgccattcagcttgcaaatcttgtatttgcgcattatcgtatcctgcacagtgtttttgtgttgacataaccgatttctgctatgaaccttgcaaacccagtgaggatgacaaggaaaactactaatgaacaagtgttatgcatgtaagctctctctcc

SEQ ID NO: 2904 - DNA, 395 bp, Glycine max
  Clone ID: LIB3072-010-Q1-E1-D2
gaagtgtcatttttctcccttctcattctatttattcaagggtgggagtagtggttttttgtgtgttttctttcctttgtgcaacaacaacaactgaagatgaataagcatcaagcgtcagagaagaagaacgataacatggagaagccactaactccattgatgcctcctcctcctcccacacttgaaaggacaacttccattgatgatgagcctaaaactttgcttgaggaggagatgaaagttgcaagggaggcagctctcaaaatcatcaattctcactcaaaagaagatgccctgaaaatattcctggcgggtttggtgccagtgggaacaagctcaaagcaagtgaaagaagatggtgtcgtgtctgactacgatgacgacgacgaatg

SEQ ID NO: 2905 - DNA, 388 bp, Glycine max
  Clone ID: LIB3072-010-Q1-E1-E8
gatatcccattcttattcttatcatttctcaatcactgccacactgatactactgacacgcccacctagcaccttaatgctcttcagctcacactactgcctcactctctctcaggcccttcaaggttttctttaggataaagaatttatgggtggatcactttcagaacggatgcgttctacgcaacattcgtcaaatttttttcctcggtaacatcaacctcatttcccataaagccaagataatgggtctgttgggcattaagggtattcacctcagagctatggtggtggtcgtgctctagaacaaggaacgagcttggataggaagtattcaacgataagtgatgattattagagcttggaccacgtaactgatgctctggca

SEQ ID NO: 2906 - DNA, 396 bp, Glycine max
  Clone ID: LIB3072-010-Q1-E1-B3
gacacttgacaggaaaaacagtaaagatgggtttgaagaacaacatggtggtgctaaaggtgtgtttcttggttcttttccttgtgggggttactaatgcacgcatggaactgaacctcttcaaaagtgatcactcatcaagtgatgatgagtcttcaaaaccatgctgtgatctctgcatgtgcacagcctcaatgccacctcaatgccattgtgcagatattaggttgaattcatgtcactcagcttgtgatcgctgtgcgtgcacacgctcgatgccaggccagtgtcgttgccttgacaccaccgacttctgctacaaaccttgcaagtccagtgatgaagatgatgactaagaattaatcaacaaaagctctctcaaatgaacaaagccct

SEQ ID NO: 2907 - DNA, 400 bp, Glycine max; identical to SEQ ID NO: 2161
  Clone ID: LIB3072-010-Q1-E1-B4

SEQ ID NO: 2908 - DNA, 341 bp, Glycine max
  Clone ID: LIB3072-010-Q1-E1-B5
tgggaagcaaggacggaagaaataaaccgaatgagagcattaacctcgtcttcatccacgttcattccaaagcgttattccttcatcgtcttcctctcgattctcttcgctcttcgatcctcgtcagggggctgctccgaataccaccaccatcacgcgccgatggccactataggatgcttacacgactcgcaaggctctcaggacagcgtccagagtgaggcccacgctcagttcgcacgtcgatgaatacatgaagaagcacaactcacttctggagttctcaacggtggtgatgacacatgaacacgttgttgcgggaaccctgcatcaccgtactc

SEQ ID NO: 2909 - DNA, 406 bp, Glycine max
  Clone ID: LIB3072-010-Q1-E1-B6
gacagcaaaaacaattaataaagatgagtttgaagaacaacatggtggtgctaaaagtgtgtttgttgcttcttttccatgtgggggttacagctgcacacatggaactgaacttcttcaaaagtgatcagtcatcaagttatgatgatgatgagtattcaaaaccatgcatgtgatctctgcatgtgcacacgctcaatgcctcctcaatgcagctgtgaacatattatgctgaattcatgccactcacactgtaagagcagtatatgcacacgctcatagccaggacagtgtcgttgtcttgacaacagcgacttctgctacaaaccttgcaagtccagagatgactagaaaaactaatatctctctcaaatggacgtaaccccttgaggttatgtatgttatg

SEQ ID NO: 2910 - DNA, 401 bp, Glycine max
  Clone ID: LIB3072-010-Q1-E1-B7
gacgcaactaaataagaaatgaagagtactatcttctttgctctctttctagtttgtgccttcaccatctcatacctgccttcagccaccgctcagttcgtgctcgacactgatgatgatcctcttcaaaacggtggcacatactatatgttgccagttatgagaggaaagggcggtggaatagaagtagattcaactggaaaagaaatatgccctctcactgttgtgcaatcacccaatgagctcgataaggggattggactagtctttacatctccattacatgccctttttatcgccgaaggctatcctttgagcattaagtttggttcatttgcagttataacgctgtgtgccggcatgcctactgagtgggctattgtggagagagagggtctaca

SEQ ID NO: 2911 - DNA, 405 bp, Glycine max
  Clone ID: LIB3072-010-Q1-E1-C1
gattcacacaactaactaagaaagtcttccatagccccccaaaaatgaagagcaccatcttctttgctctctttctcttttgtgccttcaccacctcatacctaccttcagccatcgctgatttcgtgctcgataatgaaggtaaccctcttgaaaatggtggcacatattatatcttgtcagacataacagcatttggtggaataagagcagccccaacgggaaatgaaagatgccctctcactgtggtgcaatctcgcaatgagctcgacaaagggattggaacaatcatctcgtccccatatcgaatccgttttatcgccgaaggccatcctttgagccttaagttcgattcatttgcagttataatgctgtgtgttggaattcctaccgagtggtctgttg

SEQ ID NO: 2912 - DNA, 334 bp, Glycine max
  Clone ID: LIB3072-010-Q1-E1-C10
tgggacagcaaaaacaattaataaagatgagtttgaagaacatcatggtggtgctaaaggtgtgtttgttgcttcttttccttgtgggggttacagctgcacgcatggaactgagcttcttcacaagtgatcagtcatcaagttatgatgatgatgagtattcaaatccatgctgtgatcactgcatgtgcacacgctcaatgcctcctcaatgcagctgtgaaaatactacgctgaattcatgccactcagattgtaagaactgtatgtgcacacgctcacagccatgacagtgtccttgtcatgacaccaaacacttctgctacaatgcttg

SEQ ID NO: 2913 - DNA, 346 bp, Glycine max
  Clone ID: LIB3072-010-Q1-E1-C12
gacaggtgtttgcaatactagcgatagctgataagagagataccaacaagaaaagaaaaaaagaagagttgagattccctttgaagaaaagatggcatcccataggcaaagctatgaagctggtcaaactaagggccgaactgaggaaaagacgaaccagacgatgggcaatattggagagaaggctcaagctgcaaaggagaagacccaggaaatggcccaagctgcaaaggagaagacccaacaaacagcccaagctgccaaggacaagacttgcgacacttcccaagcggcaaaggagaagacccaacagaatacaggagctgctcaacaaaagacctcagag

SEQ ID NO: 2914 - DNA, 412 bp, Glycine max
  Clone ID: LIB3072-010-Q1-E1-C5
gacagcaaaaacaattaataaagatgagtttgaagaacaacatggtggtgctaaaggtgtgtttgttgcttcttttccttgtgggggttacagctgcacgcatggaactgagcttcttcaaaagtgatcagtcatcaagttatgatgatgatgagtattcaaaaccatgctgtgatctctgcatgtgcacacgctcaatgcctcctcaatgcagctgtgaagatattaggctgaattcatgccactcagattgtaagagctgtatgtgcacacgctcacagccaggacagtgtcgttgtcttgacaccaacgacttctgctacaaaccttgcaagtccagagatgactagaaaaactaatagctctctcaaatggacgaagcccctttaggctttgtttgttatgttagggg

SEQ ID NO: 2915 - DNA, 410 bp, Glycine max
  Clone ID: LIB3072-010-Q1-E1-C6
gattcacgcaactaaataagaaatgaagagtactatcttctttgctctctttctagtttgtgccttcaccatctcatacctgccttcagccaccgctcagttcgtgctcgacactgatgatgatcctcttcaaaacggtggcacatactatatgttgccagttatgagaggaaagggcggtggaatagaagtagattcaactggaaaagaaatatgctctctcactgttgtgcaatcacccaatgagctcgataaggggattggactagtctttacatctccattacatgccctttttatcgccgaaggctatcctttgagcattaagtttggttcatttgcagttataacgctgtgtgccggcatgcctactgagtgggctattgtggagagagagggtctacaagctg

SEQ ID NO: 2916 - DNA, 390 bp, Glycine max
  Clone ID: LIB3072-010-Q1-E1-C8
ggggatctatcacaatagaaagcaaagctatataggattatttcccatatcaagaaaatgaaaatccctttttattttcccatcctcgtgcttgttgtcttcattgcttctggaaaacaagtgcaaatgacagtggtaccaaattgtgtggtagaaagcttgtcagttcattgtgaaatattcaagaatccttgcgaacttctttgccaacaacattttggatcacccgcagcacatggagcttgtggcattaagttccatgtatgtgtttgttatttatgttaaatatagagtttaaccataacaatcacagctttcatacctatttaatagtatgtaagccgatgaaaaaaataaatatatacataaaatgacttcattattagactc

SEQ ID NO: 2917 - DNA, 432 bp, Glycine max
  Clone ID: LIB3072-010-Q1-E1-C9
gacagcaaaaacaattaataaagatgagtttgaagaacaacatggtggtgctaaaggtgtgtttgttgcttcttttccttgtgggggttacagctgcacgcatggaactgagcttcttcaaaagtgatcagtcatcaagttatgatgatgatgagtattcaaaaccatgctgtgatctctgcatgcgcacacgctcaatgcctcctcaatgcagctgtgaagatattaggctgaattcatgccactcagattgtaagagctgtatgtgcacacgctcacagccaggacagtgtcgttgtcttgacaccaacgacttctgctacaaaccttgcaagtccagagatgactagaaaaactaatagctctctcaaatggacgaacccctttaagctttgtttgttatgttacgggagacaaatacaacaagaaata

SEQ ID NO: 2918 - DNA, 167 bp, Glycine max
  Clone ID: LIB3072-010-Q1-E1-B12
gatagctgtccatttatgaaacccaggtttccgtgcaggataagttaatatggaacaccagcgtgttcgcgatctctctactgtgtgcgctcaggggatagggtgagtctgtttctgtctaaatgtgggctacgttttatgggtatttccgtcgtgcacggtgtcac

SEQ ID NO: 2919 - DNA, 455 bp, Glycine max
  unsure at all n locations
  Clone ID: LIB3072-010-Q1-E1-D12
ggcactacaaatcagttttttacttgaattttcttcatccttctctgttctcctagaacttgattacttgaacattccctatgacagatgaggtggttcttctggatttctggccaagtccatttgggatgagggtcaggattgcacttgctgaaaagggtatcgaatatgagtacaaagaagaggacttgaggaacaagagtcctcttctcttacaaatgaacccggttcacaagaagattccggttctcatccacaatggcaaacccatttccgaatccctcattgctgttcagtacattgangacgtttggaatgacagaaatcccttgttgccttcagacccttaccagagggctcaagctagattctgggctgattatgttgacattaagatacatgatcttggaaagaagatttggacatcaaaggagaagaaaagaagctgccaagaa

SEQ ID NO: 2920 - DNA, 393 bp, Glycine max
  Clone ID: LIB3072-009-Q1-E1-H5
gactcaccaagtgaaccaatatagcccaagccctatacaaccaaaccctaacacacacccatttgattcagtttccatggctagcctcaaggttgcatttttggctgcagtgctctgcatggttgtggtgagtgcacccatggcacatgcagctatcacgtgcgggcaggtgacgaatagcctgatcaattgcatcggttacctccagaacggaggaacgccgccgtcgggatgctacaacggagtgaagagcctcaatgccgccgccaagaccaccgccgaccgccagacggcatgcaactgcctcaagtcggccgccagccaaatctccggcttcaaagccaacaacgccgcctcgctccccggcaaatgcggagtctccatcccctacaa

SEQ ID NO: 2921 - DNA, 388 bp, Glycine max
  Clone ID: LIB3072-009-Q1-E1-H7
ggaactgagcttcttcaaaagtgatcagtcatcaagttatgatgatgatgagtattcaaaaccatgctgtgatctctgcatgtgcacacgctcaatgcctcctcaatgcagctgtgaagatattaggctgaattcatgccactcagattgtaagagctgtatgtgcacacgctcacagccaggacagtgtcgttgtcttgacaccaacgacttctgctacaaaccttgcaagtccagagatgactagaaaaactaatagctctctcaaatggacgaagcccctttaggctttgtttgttatgttaggggagacatataacacaagaaataaaagctcagtggccagtaatttgcttttagcaaatttggtcatttttattaagaaaaa

SEQ ID NO: 2922 - DNA, 397 bp, Glycine max
  Clone ID: LIB3072-009-Q1-E1-H8
gggagttgagttgagaaggaaaggctgaagaacacatagagagagagagagaagtgcagaaaaaatgagactgttcgatccatggcctgttttcttcaagagagaatggaagcggaattggcccttcttggttggattcgccatcaccggaactctcatcaccaaactttcccttggtctctctgaggaggaagccaaaaagtcgaaattcgtccaggcacacaagaggtgactttagaatggaagatttgcagtggctttgcacattgtattagatgtgtgaagagagcttttgtttgtaataaatgaagagagatgttgtatacactccatgttcctatttccattttggttgtttactttaatgtgattgagaaattcatactaagcagttctg

SEQ ID NO: 2923 - DNA, 391 bp, Glycine max
  unsure at all n locations
  Clone ID: LIB3072-009-Q1-E1-H9
gacagcanaaacaattaataaagatgagtttgaagaacaacatggtggtgctaaaagtgtgtttgctgcttcttttccttgtgggggttacagctgcacgcatggaactgagcttcttcaaaagtgatcagtcatcaagttatgatgatgatgagtattcaaaaccatgctgtgatctctgcatgtgcacacgctcaatgcctcctcaatgcagctgtgaagatattacgctgaattcatgccactcagattgtaagagctgtatgtgcacacgctcacagccaggacagtgtcgttgtcctgacaacaacgacttctgctacaaaccttgcaagtccagagatgactagaaaaactaatagctctctcaaatgtgacaaacccctttaag

SEQ ID NO: 2924 - DNA, 401 bp, Glycine max; identical to SEQ ID NO: 2896
  Clone ID: LIB3072-010-Q1-E1-A1

SEQ ID NO: 2925 - DNA, 343 bp, Glycine max
  Clone ID: LIB3072-010-Q1-E1-A10
ggcgagagaagttattagggtttttgagtgcggcggtccaaacactcttctctgcagcttttgcctacaactcccttcaccatggctgaacaaaccgagaaagcttttctgaagcaaccaaaagtgtttctcagcacaaagaagactgggaagggaaagagacctggaaaaggtgggaaccgcttttggaagtccattgggcttggatttaagactcccagggaagccatcgaaggaacctatattgacaagaagtgccccttcactggcaatgtttccatccgtggccgtatcttggctggaacatgtcacagtgctaagatgaacaggactattattgtta

SEQ ID NO: 2926 - DNA, 423 bp, Glycine max
  Clone ID: LIB3072-010-Q1-E1-A11
gactgcatcaaaacaaaacaaaagggttttctattcgattcgacccatacttcttcaaatcgccatctcatcctttctcaccaaccaattacaaagactatggcgagcgcgggcaagtttccaagtccgactcccccatcgataatagaagtgaagaagccgccgccggcgaccataatctctggaccctctggaccctctggagccttatacaactatgctgggaatgggaatagcaagacccaaactaagaatggaaaccttcttggcaaccgtcttggcaatgaaaagtgacaacaatcagaacaagaaaaagactttcaagtgaaaactcactcacttacttgcttcatggacagacagtttcatttcaatagctttggtgaatagtacatacatgatgatgctctagtaaaagtgttt

SEQ ID NO: 2927 - DNA, 328 bp, Glycine max
  Clone ID: LIB3072-010-Q1-E1-A12
ggagacgagggtaaggtcgcgttgtgttgcgtcgtgtcgtgcgctgttcctctgtctgtcgtttttgttttcagaccaaaccctagctccgcatcgcaaccatgtcgaccaagcaaggtggaaaagctaagcctttgaagaaacccaagtctgataagaaggattacgacgaggttgacatggctaacattcagaagaaaaaggaagaggagaaggcgctaaaggagttgaaagccaaggcgcaacagaagggaagctttggaggttctgggctcaagaaaagtggaaagaaataagggctctttatcatgattgtatacatccaata

SEQ ID NO: 2928 - DNA, 411 bp, Glycine max
  Clone ID: LIB3072-010-Q1-E1-A3
gacagcaaaaacaattaataaagatgagtttgaagaacaacatggtggtgctaaaggtgtgtttgttgcttcttttccttgtgggggttacagctgcacgcatggaactgagcttcttcaaaagtgatcagtcatcaagttatgatgatgatgagtattcaaaaccatgctgtgatctctgcatgtgcacacgctcaatgcctcctcaatgcagctgtgaagatattaggctgaattcatgccactcagattgtaagagctgtatgtgcacacgctcacagccaggacagtgtcgttgtcttgacaccaacgacttctgctacaaaccttgcaagttcagagatgactagaaaaactaatagctctctcaaatggacgaacccctttaagctttgtttgttatgttggggg

SEQ ID NO: 2929 - DNA, 414 bp, Glycine max
  Clone ID: LIB3072-010-Q1-E1-A5
gacgaacttctataataataagctccgacgacagcagatcataagcgcagttcgttccacgttgttgtccgctctgtggctctctacatttcatcactcatcggaaaaatggctctcgaggttgctgttaaggctgctgttggtgctccaaatgttctcggagattgtccattttcccaaagggtcctcttaactttagaggagaagaaaatcccttacaaactccacctcatcgatctcagtagtaaacccgaacggtttttgggtgtgaatcccgaagggaaggtgccagtggttctttttgatggcaaatgggtggctgattctgatgtgattgtggggatactcgaggaaaagtacccagaaccctctctcgtcactcctcctgaatttgcctccgtgggattaaagata

SEQ ID NO: 2930 - DNA, 397 bp, Glycine max
  Clone ID: LIB3072-010-Q1-E1-A7
gcacacaactaactaagaaagtcttccatagccccccaaaaatgaagagcaccatcttctttgctctctttctcttttgtgccttcaccacctcatacctaccttcagccatcgctgatttcgtgctcgataatgaaggtaaccctcttgaaaatggtggcacatattatatcttgtcagacataacagcatttggtggaataagagtagccccaacgggaaatgaaagatgccctctcactgtggtgcaatctcgcaatgagctcgacaaagggattggaacaatcatctcgtccccatatcgaatccgttttatcgccgaaggccatcctttgagccttaagttcgattcatttgcagtttatatgctgtgtgttggaattcctaccgagtggtc

SEQ ID NO: 2931 - DNA, 417 bp, Glycine max
  Clone ID: LIB3072-010-Q1-E1-A8
gacagcaaaaacaattaataaagatgagtttgaagaacaacatggtggtgctaaaggtgtgtttgttgcttcttttccttgtgggggttacagctgcacgcatggaactgagcttcttcaaaagcgatcagtcatcaagttatgatgatgatgagtattcaaaaccatgctgtgatctctgcatgtgcacacgctcaatgcctcctcaatgcagctgtgaagatattaggctgaattcatgccactcagattgtaagagctgtatgtgcacacgctcacagccaggacagtgtcgttgtcttgacaccaacgacttctgctacaaaccttgcaagtccagagatgactagaaaaactaatagctctctcaaatggacgaagcccctttaggctttgtttgttatgttaggggagaca

SEQ ID NO: 2932 - DNA, 400 bp, Glycine max
  Clone ID: LIB3072-010-Q1-E1-B1
gactcactcatacaatagagaccagcttttgcttctttgtgaacatggagatgaggaaatcatgtggcttcttcttcttgctcctcctccttgtctttgcttcccaggtggtggtgcagacggagggaagagtgtgtgagtcacaaagccacgggttccatggtttgtgtaatagagaccacaactgtgctttggtctgcagggacgaaggtttctccggtggcaggtgcaaaggcttccgccgccgctgcttttgcaccaggatttgttgagatctcatcaaacactactcttgccatgcaaattaataaatcatagctaggccaaataaattgcatctactctttatccatttgggagctagctaccacaaccaactcatacttggtcattggattgc

SEQ ID NO: 2933 - DNA, 401 bp, Glycine max
  Clone ID: LIB3072-009-Q1-E1-F8
gactcaataaagaatttgatcagtgataaaaaaaaaaaagaaagacgaatagagagaacccaatatgtctaaacgagccagtctcttgactttggctcttctactgagcttcaatttaatctatgcctcccgtccaaacccttcacttatcagtgtctcttctttgcatggggatgttgcggctacaaaggcagaagagatagatggtgagagttgtgaagaagggacagaggaatgtttggcaagaaggacacttgctgcgcatctcgattatatctacactcagaaggataaactgggtcagcattcttaatggcatcacaggcatatgaattgcaatactataaataaattaatgtaccacacatatatgtatgtgtgtacttatttcattaacaaac

SEQ ID NO: 2934 - DNA, 285 bp, Glycine max
  Clone ID: LIB3072-009-Q1-E1-F9
gataaattacaaggagaaattctaatttcattggatacctgcatctaaaaccccaaacctccctcatttcctcctttcgccaaccaacaactccactcctttgtgttcctgtaattcctttggctaaaatttcagcttccagaattgaaaaaaaatgatcaaacaagttcttcttcctgttctgctcttcttggcctctggattggccctctcagtctcacagtctgagtctgtttctcttccgcctcacgccgctgattccttcaatgttagctatatccagat

SEQ ID NO: 2935 - DNA, 176 bp, Glycine max
  Clone ID: LIB3072-009-Q1-E1-G1
gattgcctttttggttaattataattgtaattttattttttaaaaaacacatccaccatgtcacataatgccacataagacaaataagacacgtaatcatctattcaactaagttacttatttcacaggcaattaacaattgaccttatttgcatttttaaaaaaaactaagggct

SEQ ID NO: 2936 - DNA, 373 bp, Glycine max
  Clone ID: LIB3072-009-Q1-E1-G12
gacacaactaactaagaaagtcttccatagccccccaaaatgaagagcaccatcttctttgctctctttctcttttgtgccttcaccacctcatgcctaccttcagccatcgctgatttcgtgctcgataatgaaggtaaccctcttgaaaatggtggcacatattatatcttgtcagacatagcagcatttggtggaataagagcagccccaacgggaaatgaaagatgccctctcactgttgtgcaatctcgcaatgagctcgacaaagggattggaacaatcatctcgtcgccatatcgaatccgtgttatcgccgaaggccatcctttgagccttaagttcgattcatttgcagttaaaatgctgtgtg

SEQ ID NO: 2937 - DNA, 404 bp, Glycine max
  Clone ID: LIB3072-009-Q1-E1-G6
ggagttcgaactaaacaattcaattcaatctgcctcgatcatggagaggaaaacatttgggtttttgttcttgctcctccttgtcttagcttctgatgtgacggtgaagagagcagaggcgaaagattgcttgacaaggaggcacgggttccagggtagatgcttattcgacaggcaatatgcacatgtgtgcaggagcgatggtttcatcggtggtcagtgccgaggccctcttcgcaaatgcttttgcagcaggccatgttgatcgaaattactactgccaaagaggccatgaaataaacaaacaaacaaataaataaatagctctaaccgacacatatgtacgtagtgtcggggttctagctagctaggtaggtacgtgtgtcttttgttatcgattctag

SEQ ID NO: 2938 - DNA, 376 bp, Glycine max
  Clone ID: LIB3072-009-Q1-E1-G7
gacacaactaactaagaaagtcttccatagccccccaaaaatgaagagcaccatcttctttgctctctttctcttttgtgccttcaccacctcatacctaccttcagccatcgctgatttcgtgctcgataatgaaggtaaccctcttgaaaatggtggcacatattatatcttgtcagacataacagcatttggtggaataagagcagccccaacgggaaatgaaagatgccctctcactgtggtgcaatctcgcaatgagctcgacaaggggattggaacaatcatctcgtccccatatcgaatccgttttatcgccgaaggccatcctttgagccttaagttcgattcatttgcagttataatgctgtgtgtt

SEQ ID NO: 2939 - DNA, 425 bp, Glycine max
  Clone ID: LIB3072-009-Q1-E1-G8
gagcgccaagccaaagaaaagataatactaatactaacaataacaacccacgaagcttaggccttgcaaagtaagttcatttgactctcacaaaccttgcatccatccacacatggctggcatgaactctagcgtattggcctgtagctatgccatatctggtgcagcatgctccgagctcaatgggaaggtcacttccgtggcctctgttgcatcctctggctacaagttgccattgatcaaatgtgaggccagagttcccaaagccaaagaatctgaaggaaggagaggtgcccttgttctcttggcaactacccttttcatctctgcagcctccaattcttctgccaatgctgggatcattgatgattaccttgagaggagcaaggctaacaaggaattgaatgacaagaagaggttagcta

SEQ ID NO: 2940 - DNA, 409 bp, Glycine max
  unsure at all n locations
  Clone ID: LIB3072-009-Q1-E1-H1
catgcatagcttaaagtatgcccgagtcattcatccctatgaaaggttgttgaagtattggtgatcagaattatcattccttggattataggattgaactaagctcatgctttttcgaaaaaagttcatcaagtcaagttgaagtatggaagtaaccatcttgcaaaaattggggcaaaagatgaatcgagttacatcactgcttcgtctactgccaaacacatttaggattgttgatgtccttgttacttccagtttcaccttgaccaagatgtcatgaaccatgttgaaaaatctaaattgattcaaccccatgtcctgcgtaaaaattcacaatacttcaactgtgcatcattcgcatacatccatgcttttcattggttgcattgctcattgcattcntttcttg

SEQ ID NO: 2941 - DNA, 379 bp, Glycine max
  Clone ID: LIB3072-009-Q1-E1-F7
gattcacacaactaactaagaaagtcttccatagccccccaaaaatgaagagcaccatcttctttgctctctttctcttttgtgccttcaccacctcatacctaccttcagccatcgctgatttcgtgctcgataatgaaggtaaccctcttgaaaatggtggcacatattatatcttgtcagacataacagcatttggtggaataagagcagccccaacgggaaatgaaagatgccctctcactgtggtgcaatctcgcaatgagctcgacaaagggattgggacaatcatctcgtccccatatcgaatccgttttatcgccgaaaggcatcctttgagccttaagttcgattcatttgcagttaaaatgctgtgtgt

SEQ ID NO: 2942 - DNA, 344 bp, Glycine max
  Clone ID: LIB3072-009-Q1-E1-H12
gggggaagggggaagaagaaaacccagaatcaaatcaaaaggtaaaaaagtagaagtatacgcagaagaggtggttcaagttcaatggctgagaagaaggaaatgattcccaaacaatatgacatcgatgccaaatgggacgcctgcattgatctcaccgtccgtcgcttcgtctactccgcatctgccggtgcatttggcggtctcctattttttaggagtcctgttactcgatgggcatctattgcttttggcgctggagttggaattggatctgcatatgcagaatgttctcgtctgtttgaaggacctccaacaaatttacccctacctaaggtctctga

SEQ ID NO: 2943 - DNA, 404 bp, Glycine max; identical to SEQ ID NO: 2498
  Clone ID: LIB3072-009-Q1-E1-H2

SEQ ID NO: 2944 - DNA, 374 bp, Glycine max
  Clone ID: LIB3072-009-Q1-E1-H3
gacacaactaactaagaaagtcttccatagccccccaaaaatgaagagcaccatcttctttgctctctttctcttttgtgccttcaccacctcatacctaccttcagccatcgctgatttcgtgctcgataatgaaggtaaccctcttgaaaatggtggcacatattatatcttgtcagacatagcagcatttggtggaataagagcagccccaacgggaaatgaaagatgccctctcactgtggtgcaatctcgcaatgagctcgacaaagggattggaacaatcatctcgtccccatatcgaatccgttttatcgccgaaggccatcctttgagccttaagttcgattcatttgcagttataatgctgtgtg

SEQ ID NO: 2945 - DNA, 369 bp, Glycine max
  Clone ID: LIB3072-009-Q1-E1-E12
gacatcaaacatatacacaaaagagcactgaccaaaccattttattttatttttgaatcaagggtgagggccttccatggcttccgcttgtgcttcctctgcaattacagctgttgccatctctacgccgagttccgggcagaagaatggatcaggaggttgttttcttagtggaaggaaattgagggtgaaaaaggagagagcagcaattggaggacgatcgatgggcactacagtgtgcgcagttgctgagcctgacagacctctatggttcccaggcagcaaccctcctccatagcttgatggcactctacctggagacttcggctttgaccctcttggtcttggatctgacccgggagagtctga

SEQ ID NO: 2946 - DNA, 396 bp, Glycine max
  Clone ID: LIB3072-009-Q1-E1-E2
ggcgtaggcaaagagagagagagaaaagcgtgaatcatgtcggacgaagagcatcacttcgattctcaggcggatgcgggagcgtccaagacgtatcctcagcaggctggtaccattcgcaagaatggctacatcgtcatcaaatccaggccttgcaaggttgtagaggtctctacgtcaaagacaggcaagcatggacatgcaaagtgtcactttgttgcaattgatatttttaatgggaaaaagcttgaagatattgttccatcatcccacaactgtgatgttccacatgtgaatcgcactgactatcagcttattgatatctctgaagacggctttgtgagtctgttgactgataatggaaataccaaggatgatctgaagcttcctactgat

SEQ ID NO: 2947 - DNA, 400 bp, Glycine max
  Clone ID: LIB3072-009-Q1-E1-E4
gacagcaaaaacaattaataaagatgagtttgaagaacaacatggtggtgctaaaggtgtgtttgttgcttcttttccttgtgggggttacagctgcacgcatggaactgagcttcttcaaaagtgatcagtcatcaagttatgatgatgatgagtattcaaaaccatgctgtgatctctgcatgtgcacacgctcaatgcctcctcaatgcagctgtgaagatattaggctgaattcatgccactcagattgtaagagctgtatgtgcacacgctcacagccaggacagtgtcgttgtcttgacaccagcgacttctgctacaaaccttgcaagtccagagatgactagaaaaactaatagctctctcaaatggacgaagcccctttaggctttgtttg

SEQ ID NO: 2948 - DNA, 359 bp, Glycine max
  Clone ID: LIB3072-009-Q1-E1-E5
ggaagcttcaataagtaagtatcaatggcttccgaagaatcccagaacaagccccccagcgagcagtccactaccgaactcatcacgagcgcgaagctggtggcggaggcggcgcagtcggctctgaagagcgacagcgacaaagtggacaaggccaaggtggctgacgctgccggcgatcttctcgacgcggcggggaagtatggaaaacttgatgacaaacaaggcatagggcaatatgttgacaaggctgctgattatctgcataattaccagggtgataataccactgctccttcacagcctgcaaagtctaagtgtgaagaaagtggtggtgggttaggtggtcttgcaaactt

SEQ ID NO: 2949 - DNA, 288 bp, Glycine max
  Clone ID: LIB3072-009-Q1-E1-E8
gagagcgagagagagagttacttcccgcagaaggttctgtgtggaatctataaaacaaagatggggaaaggagaaaaaaaatactatagaaagagagagaggaagaaagagaaacggtttaattttaaattattagtgattagtgattgatttctaagaaatcatcaaagggggtttcgtgacatccttgttcttctgcttagccgagattctggaaaatcaaaatctccacgtaatctacttgtaaccatcttcttctccaagattttcgccttacccttttcccac

SEQ ID NO: 2950 - DNA, 400 bp, Glycine max
  unsure at all n locations
  Clone ID: LIB3072-009-Q1-E1-F1
gacagcanaaacaattaataaagatgggtttgaagaacaacatggtggtgctaaaggtgtgtttgttgcttcttttccttgtgggggttacagctgcacgcatggaactgagcttcttcaaaagtgatcagtcatcaagttatgatgatgatgagtattcaaaaccatgctgtgatctctgcatgtgcacacgctcaatgcctcctcaatgcagctgtgaagatattaggctgaattcatgccactcagattgtaagagctgtatgtgcacacgctcacagccaggacagtgtcgttgtcttgacaccaacgacttctgctacaaaccttgcaagtccagagatgactagaaaaactaatagctctctcaaatggacgaagcccctttaggctttgtttg

SEQ ID NO: 2951 - DNA, 332 bp, Glycine max
  Clone ID: LIB3072-009-Q1-E1-F10
gacagcaaaaacaattaataaagatgagtttgaagaacaacatggtggtgctaaaggtgtgtttgttgcttcttttccttgtgggggttacagctgcacgcatggaactgagcttcttcaaaagtgatcagtcatcaagttatgatgatgatgactattcaaaaccatgctgtgatctctgcatgtgcacacgctcaatgcctcctcaatgcagctgtgaagatattacgctgaattcatgccactcagattgtaagagctgtatgtgcacacgctcacagccaggacagtgtctttgtcttgacactaacgatttctgctacaaaccttgc

SEQ ID NO: 2952 - DNA, 426 bp, Glycine max
  Clone ID: LIB3072-009-Q1-E1-F11
ggcacaaagaagaatcaatgtgtcacccgggaattccttttgtgaaccgagaagggttgatggtgcatagaagatggcttgtgtcatcaccactggcaaggcagattcatgatggtggcagctctggagagagtggttcggtgcagcgatgcgtgtgctctccgtcgcagcatccggggtcgttccggtgccggttgcatcatgtcaagtatgtatggtgtggtagaacaattaagtgatgggatgttatacaattctaagcgtccataaaggttctggtttataagcatgcatgtaaataagtgtctcctcttttcctccttcaccatgaatggtgagagaatttgagaccacaaaaagtttggaactaacttcaattgtgaattataatgaccaacagaatactgtttttccttggttttcccg

SEQ ID NO: 2953 - DNA, 415 bp, Glycine max
  Clone ID: LIB3072-009-Q1-E1-F2
gggaaggggaagctggccatgacggtggaggtattcgaggtggcgccggaggtcgcggtggtcgagttctccaagtccgccggagacacgcttgaataccttaatttctgtgaggaccaagtcagaccttcgctcagggatattgtgtggagttggcaaggggacgctaattgccaccagtaactagtcaattcaatttagattattgcagcatgcaataaatatctggagtttgggatgttgattgaacataataagaattaagaatcatcttgattgacccttcttagttcttattatttcctcctcttaagcttatgactttctgttgtatttctttttaagattaagagttaagacagaggacatcccgttaatctgtatgatgtcagaatttgttctatgctagactact

SEQ ID NO: 2954 - DNA, 370 bp, Glycine max
  Clone ID: LIB3072-009-Q1-E1-F3
gactttgagttcgaactaaacaattcaattcaatctgcctcgatcatggagaggaaaacatttgggtttttgttcttgctcctccttgtcttagcttctggtgtgacggtgaagagagcagaggcgaaagattgcttgacaaggaggtacgggttccagggtagatgcttattcgacaggcaatgtgcacatgtgtgcaggagcgatggtttcatcggtggtcagtgccgaggccctcttcgcaaatgcttttgcagcaggccatgttgatcgaaattactactgccaaagaggccatgaaataaacaaacaaacaaataaataaatagctctaaccgacacatatgtacgtagtgtcggggttctagct

SEQ ID NO: 2955 - DNA, 416 bp, Glycine max
  Clone ID: LIB3072-009-Q1-E1-F4
gatgcaactgaataattaagaaaagccatttccatagcagcctaagaaaatgaagagcactagcttgttcgctatctttctactttgcgccttcacctcatacctaccttccgccaccgcccaggacgtgctcgacgtggatggcgatccgattcggaacggtttcatatactacgttttgccggcaataagaggaaacggtggcggaatagaacgagccgcactcgggaaagacacttgccctatcactgtagtgcaatctcccaatccaaactctaaggggttagaaattaagtttgaatctgcgtaccccgcctattacataaacgaaaccctaattttgcaaataaagttcagttacccacagtagtgtgaaagaaagaatccttggtgggccatttctaaggatatatctg

SEQ ID NO: 2956 - DNA, 396 bp, Glycine max
  Clone ID: LIB3072-009-Q1-E1-F6
gacagcaaaaacaattaataaagatgagtttgaagaacaacatggtggtgctaaaggtgtgtttgttgcttcttttccttgtgggggttacagctgcacgcatggaactgagcttcttcaaaagtgatcagtcatcaagttatgatgatgatgagtattcaaaaccatgctgtgatctctgcatgtgcacacgctcaatgcctcctcaatgcagctgtggagatattaggctgaattcatgccactcagattgtaagagctgtatgtgcacacgctcacagccaggacagtgtcgttgtcttggcaccaacgacttctgctacaaaccttgcaagtccagagatgactagaaaaactaatagctctctcaaatggacgaagcccctttaggctttg

SEQ ID NO: 2957 - DNA, 377 bp, Glycine max
  Clone ID: LIB3072-009-Q1-E1-E11
gattcacacaactaactaagaaagtcttccatagccccccaaaaatgaagagcaccatcttctttgctctctttctcttttgtgccttcaccacctcatacctaccttcagccatcgctgatttcgtgctcgataatgaaggtaaccctcttgaaaatggtggcacatattatatcttgtcagacataacagcatttggtggaataagagcagccccaacgggaaatgaaagatgccctctcactgtggtgcaatctcgcaatgagctcgacaaagggattggaacaatcatctcgtccccatatcgaatccgttttatcgccgaaggccatcctttgagccttaagttcgattcatttgcagttataatgctgtgt

SEQ ID NO: 2958 - DNA, 372 bp, Glycine max
  Clone ID: LIB3072-009-Q1-E1-C6
gacagcaaaaacaattaataaagatgagtttgaagaacaacatggtggtgctaaaggtgtgtttgttgcttcttttccttgtgggggttacagctgcgcgcatggaactgagcttcttcaaaagtgatcagtcatcaagttatgatgatgatgagtattcaaaaccatgctgtgatctctgcatgtgcacacgctcaatgcctcctcaatgcagctgtgaagatattaggctgaattcatgccactcagattgtaagagctgtatgtgcacacgctcacagccaggacagtgtcgttgtcttgacaccaacgacttctgctacaaaccttgcaagtccagagatgactagaaaaactaatagctctctcaaa

SEQ ID NO: 2959 - DNA, 415 bp, Glycine max
  unsure at all n locations
  Clone ID: LIB3072-009-Q1-E1-C7
gactttgagttcgaactaaacaattcaattcaatctgcctcgatcatggagaggaaaacatttgggtttttgttcttgctcctccttgtcttagcttctgatgtgacggtgaagagagcagaggcgaaagattgcttgacaaggaggcacgggttccagggtagatgcttattcgacaggcaatgtgcacatgtgtgcaggagcgatggtttcatcggtggtcagtgccgaggccctcttcgcaaatgcttttgcagcaggccatgttgatcgaaattactactgccaaagaggccatgaaataaacaaacaaacaaataaataaatagctctaaccgacacatatgtacgtagtgtcggggttctagctagctaggtaggtacgtgtgtcntttgttatcgatcctagtttggt

SEQ ID NO: 2960 - DNA, 371 bp, Glycine max
  unsure at all n locations
  Clone ID: LIB3072-009-Q1-E1-C9
agggatacanacatccatcatcattattagtttactccgaacgagttgaaccgattccactcactcaaccatgagccgattcaggcgttttgagctcatagaacaaccacctttcgtccactcctgctactctttcncttccttcgtcctccaagactcactctctctcgacctcgacctcttgccacttcccagccacttcgacgctttcgcagatctggtgcacgcgccgtcgttcgcttaccggcgcgtggagaggcatctcgagaatgagttgcgtttgcagagcctctctgaccgtgtggcggagctggagtcgcggttcgaccgtgtgctcggcggagatcngaagtacacgtgggcagcggaga

SEQ ID NO: 2961 - DNA, 379 bp, Glycine max
  Clone ID: LIB3072-009-Q1-E1-D10
gatgcaactgaataattaagaaaagccatttccatagcagcctaagaaaatgaagagcactagcttgttcgctatctttctactttgcgccttcacctcatacctaccttccgccaccgcccaggacgtgctcgacgtggatggcgatccgattcggaacggtttcatatactacgttttgccggcaataagaggaaacggtggcggaatagaacgagccgcactcgggaaagacacttgccctatcactgtagtgcaatctcccaatccaaactctaaggggttagaaattaagtttgaatctgcataccccgcctattacataaacgaaaccctaattttgcaaataaagttcagttacccacagcagtgtgaaaga

SEQ ID NO: 2962 - DNA, 402 bp, Glycine max
  Clone ID: LIB3072-009-Q1-E1-D11
gacagcaaaaacaattaataaagatgagtttgaagaacaacatggtggtgctaaaggtgtgtttgttgcttcttttccttgtgggggttacagctgcacgcatggaactgagcttcttcaaaagtgatcagtcatcaagtcatgatgatgatgagtattcaaaaccatgctgtgatctctgcatgtgcacacgctcaatgcctcctcaatgcagctgtgaagatattaggctgaattcatgccactcagattgtaagagctgtatgtgcacacgctcacagccaggacagtgtcgttgtcttgacaccaacgacttctgctacaaaccttgcaagtccagagatgactagaaaaactaatagctctctcaaatggacgaaacccctttaagctttgtttgtt

SEQ ID NO: 2963 - DNA, 331 bp, Glycine max
  Clone ID: LIB3072-009-Q1-E1-D12
gagtcgcaaccctaataagaagaaccacagcttcaagcgagtgacatccaccagccatgggtcgtatgcacagccgcggtaagggtatatcctcttctgctttgccctacaaaaggacaccccctagctggctcaagatctcttcgcaagatgtggaagaaaatatctgcaagtttgcgaagaagggtttgaccccgtctcagattggtgtcattcttcgagattctcacggtattgctcaggtcaacagcgtcactggcagcaaaatccttcgcatcctcaaagctcacgggcttgcgcctgaaattccagaggatctttaccatttgat

SEQ ID NO: 2964 - DNA, 420 bp, Glycine max
  Clone ID: LIB3072-009-Q1-E1-D2
gagcgccaatgtttttttcagaggagtttcatcttgtaatcaaaagagtttatcttatagtaagaaatcgatgtcttactccattttaaggaacaaaacaagagaacaatagcctgacaaagggtttagccataaaatcgaatccatcattgatttgagatattgataaggtgaatactcatttctcgtcaatgctaggcataatgcgggtatagggacctaaaaaagattatcttttcttcctatcttatgaactttaaggtgtatgaagtgtcatttcctatcttagattttaattttagtaggtagataaagagtccatttaacttaagttgatctaggccagaagcagacctacgtcaagataatccttctttgaaacactttggtagtgctcttagattgtaatccaaataaaaa

SEQ ID NO: 2965 - DNA, 424 bp, Glycine max
  Clone ID: LIB3072-009-Q1-E1-D3
gacagcaaaaacaattaataaagatgagtttgaagaacaacatggtggtgctaaaggtgtgtttgttgcttcttttccttgtgggggttacagctgcacgcatggaactgagcttcttcaaaagtgatcagtcatcaagttatgatgatgatgagtattcaaaaccatgctgtgatcactgcatgtgcacacgctcaatgcctcctcaatgcatctgtgaagatattaggctgaattcatgccactcagattgtaagagctgtatgtgcacacgctcacagccaggacagtgtcattgtcttgacaccaacgacttctgctacaaaccttgcaagtccagagatgactagaaaaactaatagctctctcaaatggacgaagcccctttaggctttgtttgttaagttacgggagaccaataaaa

SEQ ID NO: 2966 - DNA, 408 bp, Glycine max
  unsure at all n locations
  Clone ID: LIB3072-009-Q1-E1-D4
gcttcacagcaaaaacaattaataaagatgagtttgaagaacaacatggtggtgctaaaggtgtgtttgttgcttcttttccttgtgggggttacagctgcacgcatggaactgagcttcttcaaaagtgatcagtcatcaagttatgatgatgatgagtattcaaaaccatgctgtgatctctgcatgtgcgcacgctcaatgcctcctcaatgcagctgtgaagatattaggctgaattcatgccactcagattgtaagagctgtatgtgcacacgctcacagccaggacagtgtcgttgtcttgacaccaacgacttctactacaaaccttgcaagtccggagatgactagaaaaactaatagctctctcaaatggacgaagcccctttaggctttgtntgttat

SEQ ID NO: 2967 - DNA, 416 bp, Glycine max
  Clone ID: LIB3072-009-Q1-E1-D6
ggacatggtgctggtgactcactactttgacaacacgacagagattggcgcatcttcaaagtccacagctgttttcataccacatggtcctggcgcagttaatgatattgccatgcagattcgggatggtctgcttcaggccaccacttcacagaattaagctttcctgaagttgtaactaacacatagtaccgtgccagattttttttgagtaaatgcttttcttgtttgggcttaaaatgtcggaatctttactcttatattggatagattcatggcagtgtcgatgtttatgcatgtagatactgatattcacttttgacatacttgtatgaggatagtcttaatgtcaagttgcatgggaatcatactaattgtggggttgttatgtaagaattacttcccacatgatgtgc

SEQ ID NO: 2968 - DNA, 373 bp, Glycine max
  unsure at all n locations
  Clone ID: LIB3072-009-Q1-E1-D9
agggacagcacanacaattaatacagatgagtttgaagaacaacatggtggtgctaaaggtgtgcttgttgcttcctttccttgtgggggttacagctgcacgcatggaactgagcttcttcanaagtgatcagtcatcaagttatgatgatgatgagtattcaaaaccatgctgtgatctctgcatgtgcacacgctcaatgcctcctcaatgcagctgtgaagatattaggctgaattcatgccactcagattgtaagagctgtatgtgcacacgctcacagccaggacagtgtcgttgtcctgacaccaacgacttctgctacaaaccttgcaagtccagagatgactagaaaaactaatagctctctca

SEQ ID NO: 2969 - DNA, 402 bp, Glycine max
  Clone ID: LIB3072-009-Q1-E1-E10
ggttctagtgtatgtgattgttgtgactcgttcttcttcgtcgttatcttcttcttttgttgtttgtgtgtttgttttttctctcacctgaaaatgtcttgctgcggtggtaactgtggttgcggaagcgcctgcaagtgcggcaacggctgcggaggctgcaagatgtacccagacttgagctacaccgagtcaaccaccaccgagaccttggtcatgggagtggcaccagttaaggctcaattcgagagtgctgaaatgggtgttcccgcagagaacgatggctgcaaatgtggagctaactgcacctgcaacccctgcacttgcaagtgaagtgttggagagctaaagcttcaagcagaaatggcccttagaaatactgataaaaactatatgtagttt

SEQ ID NO: 2970 - DNA, 412 bp, Glycine max
  Clone ID: LIB3072-009-Q1-E1-C2
gacagcaaaaacaattaataaagatgagtttgaagaacaacatggtggtgctaaaggtgtgtttgttgcttcttttccttgtgggggttacagctgcacgcatggaactgagcttcttcaaaagtgatcagtcatcaagttatgatgatgatgagtattcaaaaccatgctgtgatctctgcatgtgcacacgctcaatgcctcctcaatgcagctgtgaagatattaggctgaattcatgccactcagattgtaagagctgtatgtgcacacgctcacagccaggacagtgtcgttgtcttgacaccaacgacttctgctacaaaccttgcaagtccagagatgactagaaaaactaatagctctctcaaatggacgaagcccctttaagctttgtttgttatgttaaggg

SEQ ID NO: 2971 - DNA, 344 bp, Glycine max
  Clone ID: LIB3072-009-Q1-E1-B1
gattcacacaactaactaagaaagtcttccatagccccccaaaaatgaagagcaccatcttctttgctctctttctcttttgtgccctcaccacctcatacctaccttcagccatcgctgatttcgtgctcgataatgaaggtaaccctcttgaaaatggtggcacatattatatcttgtcagacataacagcatttggtggaataagagcagccccaacgggaaatgaaagatgccctctcactgtggtgcaatctcacaatgagctcgacaaagggattggaacattcatctcttccccaaatcaatccctttttaccgccgaaggccatcctttgagcctt

SEQ ID NO: 2972 - DNA, 317 bp, Glycine max
  Clone ID: LIB3072-009-Q1-E1-B10
gattcacacaactaactaagaaagtcttccatagccccccaaaaatgaagagcaccatcttctttgctctctttctcttttgtgccttcaccacctcatacctaccttcagccatcgctgatttcgtgctcgataatgaaggtaaccctcttgaaaatggtggcacatattatatcttgtcagacataacagcatttggtggaataagagcagccccaacgggaaatgaaagatgccctctcactgtggtgcaatctcgcaatgagctcgacaaagggattggaacaatcatctcgtccccatatcgaatccgtttt

SEQ ID NO: 2973 - DNA, 373 bp, Glycine max
  Clone ID: LIB3072-009-Q1-E1-B11
gacagcaaaaacaattaataaagatgagtttgaagaacaacatggtggtgctaaaggtgtgtttgttgcttcttttccttgtgggggttacagctgcacgcatggaactgagcttcttcaaaagtgatcagtcatcaagttatgatgatgatgagtattcaaaaccatgctgtgatctctgcatgtgcacacgctcaatgcctcctcaatgcagctgtgaagatattaggctgaattcatgccactcagattgtaagagctgtatgtgcacacgctcacagccaggacagtgtcgttgtcttgacaccaacgacttctgctacaaaccttgcaagtccagagatgactagaacaactaatagctctctcaaat

SEQ ID NO: 2974 - DNA, 384 bp, Glycine max
  unsure at all n locations
  Clone ID: LIB3072-009-Q1-E1-B12
gatgcaactgaataattaagaaaagccatttccatagcagcctaagaaaatgaagagcactagcttgttcgctatctttctactctgcgccttcacctcatacctaccttccgccaccgcccaggacgtgctcgacgtggatggcgatccgattcggaacggtttcatatactacgttttgccggcaataagaggaaacggtggcggaatagaacgagccgcactcgggaaagacacttgccctatcactgtagtgcaatctcncaatccaaactctaaggggttagaaattaagttttgaatctgcatacccgcctattacattaacgaaaccctaattttgcaaataaagttcagtttaccacagcagtgtgaaagaaagaa

SEQ ID NO: 2975 - DNA, 422 bp, Glycine max
  Clone ID: LIB3072-009-Q1-E1-B4
ggagagaagttattagggtttttgagtgcggtggtccaaacactcttctctgcagcttttgcctacaactcccttcaccatggctgaacaaaccgagaaagcttttctgaagcaaccaaaagtgtttctcagcacaaagaagactgggaagggaaagaggcctggaaaaggtgggaaccgcttttggaagtccattgggcttggatttaagactcccagggaagccatcgaaggaacctatattgacaagaagtgccccttcactggcaatgtttccatccgtggccgtatcttggctggaacatgtcacagtgctaagatgaacaggactgttattgttagaaggaattatctccattttatcaagaagtaccagaggtacgagaagaggcactcaaatattcctgctcatatatcacctg

SEQ ID NO: 2976 - DNA, 389 bp, Glycine max
  unsure at all n locations
  Clone ID: LIB3072-009-Q1-E1-B5
ggcagtgatagagataagaaaatgtggcttgtgcagctctcaaccccatttctgaacggacatggtcattccaacaacccttcccccaaagcaaagttcggcggtaactcagaccaactgggcccaaccgagcttcctgcctcaaatcaatgcgatgaagacaatgcaggggagagtggtgtgctccaccagcgacaagacggtggcagtggaggtggtgcggctggcccctcacccaaagtacangaggcgcttgaggaagaagaggaagtaccaggcccacgaccccgataaccaattcaaagtcggcgacatcgtccagctccagaagaccaggcccatcagcaagaccaaggcctttctcgcactccccgttcccaaaaggccct

SEQ ID NO: 2977 - DNA, 408 bp, Glycine max
  Clone ID: LIB3072-009-Q1-E1-B7
ggttctagtgtatgtgattgttgtgactcgttcttcttcgtcgttatcttcttcttttgttgtttgtgtgtttgttttttctctcacctgaaaatgtcttgctgcggtggcaactgtggttgcggaagcgcctgcaagtgcggcaacggtcgcggaggctgcaagatgtacccagacttgagctacaccgagtcaaccaccaccgagaccttggtcatgggagtggcaccagttaacgctcaattcgagagtgctgaaatgggtgttcccgctgagaacgatggctgcaaatgtggagctaactgcaactgcaacccctgcacttgcaagtggggtgttggagaactaaagcttcaagcaaaaatgggacttagaaaataatgataaaactatatgtaatttcaaaac

SEQ ID NO: 2978 - DNA, 419 bp, Glycine max
  Clone ID: LIB3072-009-Q1-E1-B8
gatgcaactgaataattaagaaaagccatttccatagcagcctaagaaaatgaagagcactagcttgttcgctatctttctactttgcgccttcacctcatacctaccttccgccaccgcccaggacgtgctcgacgtggatggcgatccgattcggaacggtttcatatactacgttttgccggcaataagaggaaacggtggcggaatagaacgagccgcactcgggaaagacacttgccctatcactgtagtgcaatctcccaatccaaactctaaggggttagaaattaagtttgaatctgcataccccgcctattacataaacgaaaccctaattttgcaaataaagttcagttacccacagcagtgtgaaagaaagaatccttggtgggccatttctaaggatatatctgaag

SEQ ID NO: 2979 - DNA, 339 bp, Glycine max
  Clone ID: LIB3072-009-Q1-E1-C1
gcactcactcatacaatagagaccagcctttgcttctttgtgaacatggagatgaggaaatcatgtggcttcttcttcttgctcctcctccttgtctttgcttcccaggtggtggtgcagacggagggaagagtgtgtgagtcacaaagccacgggttccatggtttgtgtaatagagaccacaactgtgctttggtctgcaggaacgaaggtttctccggtggcaggtgcaaaggcttccgccgccgctgcttttgcaccaggatttgttgagatctcatcaaacactactcttgccatgcaaattaataaaccatagctaggccaaataaattgcat

SEQ ID NO: 2980 - DNA, 281 bp, Glycine max
  Clone ID: LIB3072-009-Q1-E1-C10
ggcaacacatcctaaataagcatcataaattcatagtctttcggtccttccttccttcctccgctctagtgtatgccactctggttaattatcatacccccttctaggcatagttcttctccctctgttctctattctacactgtgaaaccaagatgaaggtagcatttgtagctgttctacttatttgccttgtcctaagctcctccttgttcgaggtgtcaatggccggttctgctttctgctcctccaagtgcgcgaagaggtgttctagggctggga

SEQ ID NO: 2981 - DNA, 418 bp, Glycine max
  unsure at all n locations
  Clone ID: LIB3072-009-Q1-E1-A8
ggacctctgactcaaaagcattacaagcctttcaaaaatttggaaacaagctcaaagaaattgaggaaaaacttgcaaggaagaacaatgatcaaagtctctccaatcgacttgggccggttcaactgccatacactttgctccatcctaacagtggggaagggttgacttgcagggggattcctaatagcatctctatctaagggagcatgtggtctactttaattacagtactgtacctaccttccaataaaaaagatgcaaggctagagatccaataaatcttgcatcctatctaatgtttcaattatcttgtgttttaatgctgtaatggagcctacaatttgcaaattaattaagagcaccgagcactattagtttgcgtttgaaaaaaaaaaaaaaaanaaaaaaagaaaaa

SEQ ID NO: 2982 - DNA, 390 bp, Glycine max
  unsure at all n locations
  Clone ID: LIB3072-009-Q1-E1-C12
gacacttgacaggaaaaacagtaaagatgggtttgaagaacaacatggtggtgctaaaggtgtgtttcttggttcttttccttgtgggggttactaatgcacgcatggaactgaacctcttcaaaagtgatcactcatcaagtgatgatgagtcttcaaaaccatgctgtgatctctgcatgtgcacagcctcaatgccacctcaatgccattgtgcagatattncgttgaattcatgtcactcagcttgtgatcgctgtgcgtgcaaacgctcaatgccaggccagtgtcattgccttgacaccaccgacttctgctaaaaaccttgcaagttcagtgatgaagataatgactaggaattaatcaacaaaagctctctcaaatgaacaa

SEQ ID NO: 2983 - DNA, 144 bp, Glycine max
  Clone ID: LIB3072-008-Q1-E1-G3
tggcacatcaagctaagcgggccatggaagaatgtggatcatccaactctgattttaaagctttaattgagggattaagttcgttgagccactaatacaccaccatcaacactatgcatgcatttactctcaagactatctgtt

SEQ ID NO: 2984 - DNA, 368 bp, Glycine max
  Clone ID: LIB3072-008-Q1-E1-G4
acgcgtccgcagcgagaagacaacagaaggggattcacatagttactactgtcagtggcagagagagagaaagacgtggagtgtgtgagtgaagaagctctctgttgatgtttacctcttccagtccaacctttgaatctgtaggcttcagttgtgctatttaacagtgtagggcattgtgtgcttaggaaatagtaagtttgtataattactgtaaataaaatcagtatgggtgaggaagaatcactgaatgaagtttcagagactgattcaaatggaaagagctttcaggagaaaactttggatgaaattactgagatcaaggacttggaaactgatggacgagaagtcttggagagcaatggtat

SEQ ID NO: 2985 - DNA, 394 bp, Glycine max
  Clone ID: LIB3072-008-Q1-E1-G5
gacaacacaaacattctctccattgtctttgaacactcatcaccatggccaagcttgttctttcgctttgtttccttcttttcagtggctgcttcgctctgagagagcaggcacagcaaaatgagtgccagatccaaaagctgaatgccctcaaaccggataaccgtatagagtcggaaggtgggttcattgagacctggaaccctaacaacaagccattccagtgtgccggtgttgccctctctcgctgcaaccttaaccgcaatgcccttcgtagaccttcctacaccaacggtccccaggaaatccacatacaacaaggtaatggtacttttggcatgatattcccgggttgtcctagcacttatcaagagccgcaagaatctcagcaacg

SEQ ID NO: 2986 - DNA, 314 bp, Glycine max
  Clone ID: LIB3072-008-Q1-E1-G6
cgggatacttactgagtgcttgcagttgctgcgtcgcaaggtaccggcggcgacggagcgctatcttctcaatttccgatcactgcgttggttctgttgacgatggttgtgttctacttgacttgcatacttgatggcgtcaaagttgctgaagttgcagtccgcagcatgtcaagcatctcaatttgtatccagtcttggaactaattactacacgcaattgctggaccataccaagctgcacattcatgagcctcctacagtagagaaatgcatcctgctggcaaagcaactgtcttacacccgacctgcta

SEQ ID NO: 2987 - DNA, 188 bp, Glycine max
  Clone ID: LIB3072-008-Q1-E1-G9
ggttctagtgtgtgattgtttgttgttgtaactcgttcttcttcttttgttgttctgtgtttgtgtttgttttttctctcaggtgaaggtctcgtgctgctgtggtaactgtggttgcggaggctcccgcaagtgcggcaactgctgctgaggctgcaagatgtacccagacttcagctacactgagt

SEQ ID NO: 2988 - DNA, 169 bp, Glycine max
  Clone ID: LIB3072-008-Q1-E1-H1
gatctaattagatattattcaggatttcaattttgatttcatatttagggatgttattttgaatttatggtaattagtctgcattatcttattcaggatttggttggaatttgatttacctttatctttatcttatgtttaggaatttcatctttacttttgttgtttc

SEQ ID NO: 2989 - DNA, 415 bp, Glycine max
  unsure at all n locations
  Clone ID: LIB3072-008-Q1-E1-H3
gacagcanaaacaattaataaagatgagtttgaagaacaacatggtggtgctaaaggtgtgtttgttgcttcttttccttgtgggggttacagctgcacgcatggaactgagcttcttcaaaagtgatcagtcaccaagttatgatgatgatgagtattcaaaaccatgctgtgatctctgcatgtgcacacgctcaatgcctcctcaatgcagctgtgaagatattaggctgaattcatgccactcagattgtaagagctgtatgtgcacacgctcacagccaggacagtgtccttgtcttgacaccaacgacttctgctacaaaccttgcaagtccagagatgactagaagaactaataactctctcaaatggacgaagcccctttacgctttgtctgttatgttaggggaga

SEQ ID NO: 2990 - DNA, 339 bp, Glycine max
  Clone ID: LIB3072-008-Q1-E1-H4
gatgcaactgaataattaagaaaagccatttccatagcagcctaagaaaatgaagagcactagcttgttcgctatctttctactttgcgccttcagctcatacctaccttccgccaccgcccaggacgtgctcgacgtggatggcgatccgattcggaacggtttcatatactacgttttgccggcaataagaggaaacggtggcggaatagaacgagccgcactcgggaaagacacttgccctatcactgtagtgcaatctcccaatccaaactctaaggggttagaaattaagtttgaatctgcataccccgcctattacatatacgacaccctaaa

SEQ ID NO: 2991 - DNA, 330 bp, Glycine max
  Clone ID: LIB3072-008-Q1-E1-H6
gacagcaaaaacaattaataaagatgagtttgaagaacaacatggtggtgctaaaggtgtgtttgttgcttcttttccttgtgggggttacagctgcacgcatggaactgagcttcttcaaaagtgatcagtcatcaagttatgatgatgatgagtattcaaaaccatgctgtgatctctgcatgtgcacacgctcaatgcctcctcaatgcagctgtgaagatattacgctgaattcatgccactcatattgtaagagctgtatgtgcacacgctcacagcctggacagtgtcgttgtcctgacaccaacgatctctgccacaaacctt

SEQ ID NO: 2992 - DNA, 218 bp, Glycine max
  Clone ID: LIB3072-008-Q1-E1-H7
gtggagtgaactgatacagcatacagtatggcttcgacggcagcgtaccttgctcggcgcgcggcgcagaaggagagggttcggatcctctaccgccgcgccctcagagacactctcaactgggccgtacattgacacctcttctactatgacccttcaaacctccgccaaaggttcgaggacaacacacacctgcaacaccctcatacgattgacgc

SEQ ID NO: 2993 - DNA, 325 bp, Glycine max
  Clone ID: LIB3072-009-Q1-E1-A1
gatccaaagcttcttcagttattcatctgcttactaaaatttcttccattcttagctttgttcaatcaaagttttttaagatggcccagagaaatgttactgctaattcttcttttgaaaggactagcttgccttccctagatcaaaagttggccatggccaagcgctgctctcatgagggtgtgatggcaggagcaaaagcagctgttgttgctactattgctactgccgtaccaactctggctagtgtaaggatgcttccttgggcaagagccaatctcaatcactctgctcaagctctcataatttccacagtggcgggagc

SEQ ID NO: 2994 - DNA, 135 bp, Glycine max
  Clone ID: LIB3072-009-Q1-E1-A12
cggggtaaaggaaaaccatcaataccaagaataatgcagtcttccacagaaccagcggccactgcgagaggatccacgagtgaatctcgcgttcacgctacgtcaaacgtcttcgcgggtgtcacctaaacccac

SEQ ID NO: 2995 - DNA, 278 bp, Glycine max
  Clone ID: LIB3072-009-Q1-E1-A2
gatccaaagcttcttcagttattcatctgcttagcaacatttcttcgattcttagctttgttcactcaaagttttttaacatggcccataggggtgttactgctaattcttcttttgagaggactagcttgccttccctagatcaaaagttggtcatggccaatcgctgctctcatgacggtgtgatggcaggagcaaaatcacctgttgttgctactattgctactgccgtaccaactctcgctagtgtacggatgcttccttgggcaagacccatt

SEQ ID NO: 2996 - DNA, 400 bp, Glycine max
  Clone ID: LIB3072-008-Q1-E1-G2
gacagcaaaaacaattaataaagatgagtttgaagaacaacatggtggtgctaaaggtgtgtttgttgcttcttttccttgtgggggttacagctgcacgcatggaactgagcttcttcaaaagtgatcagtcatcaagttatgatgatgatgagtattcaaaaccatgctgtgatctctgcatgtgcacacgctcaatgcctcctcaatgcagctgtgaagatattaggctgaattcatgccactcagattgtaagagctgtatgtgcgcacgctcacagccaggacagtgtcgttgtcttgacaccaacgacttctgctacagaccttgcaagtccagagatgactagaacaactaatagctctctcaaatggacgaagcccctttaggctttgtttg

SEQ ID NO: 2997 - DNA, 417 bp, Glycine max
  Clone ID: LIB3072-009-Q1-E1-A5
gatctcactcttcaattcaaatccctaatgtctaccactctctcgaaccttcctaacgcctcctcttttcttcctaaacctaaacctaaaccctctcttcctcacccacaaacccctctcactcactccgcagtacttttatctcggtcaatttgcttgaggaatctgttgccaaaggcaacgtcttctgaagagcgatccactggaggaagtcaatttttcaatgagaaacgcgatggtgtcataatcctggagaatgttaaagaggataataagaatgatttcgataaaacggtgattgaagacacaatagaagaagagttgtctgatgatggacagggtctgtcatttgatttgatggataagctcaattttgatacagatgacacttgttctattggcctgtatgggggttgt

SEQ ID NO: 2998 - DNA, 408 bp, Glycine max
  unsure at all n locations
  Clone ID: LIB3072-009-Q1-E1-A7
ggacccacagcaacaagacaactacatgaagcgaaagccttccaattccaatgttctcgtcctcgccgccctcgtgcctttcggcgtctctcttctcatcctcgtcggcctcaccctctccgccaccgtcatcagcctcaccgtcgtcaccccactcttcgtcattttcagccccgtcttgctcnccgcggccctattcatcgctctcgccgtcgccggcttcctcacatccggagtcttcggcatcacctccatctcttcctttgcttggttagccaccaatctccgccgctcacactcaccggaacacccgcaacgtcctcgggacgacgcggaccgcgtggcccagaaaaccgatgaagccgtgcgtcaggcccaggaaacagcccatcaggcccaaaaagagac

SEQ ID NO: 2999 - DNA, 388 bp, Glycine max
  Clone ID: LIB3072-008-Q1-E1-E2
ggcgacacgatgcatagacaatccttgggttctccttctcccaaagtccccaagctcatcaccgacgaagacgacgatgctcccagacctcaccgtctcagtctcagcctctcctcgccgccgcctacgccgccgcacaagttcgtccacctcattcctctcctcactctcctctgcttcttcgtcctctacctcttctcccactctccctctccatcagacttgaatcacttcagcggattcaacggctcgccctcgcagcgtctagatttggcggagaagatcggcggcgacattggacgagacagggatgtcaacggatgcgatgttttggcgatccgaagtttgagacagctccgaggactcgccctcaccggaaactcccgat

SEQ ID NO: 3000 - DNA, 354 bp, Glycine max
  Clone ID: LIB3072-008-Q1-E1-E3
acgcgtccgtacaaacgtccgtacgcgagaagacgacagagaggacagagacccggaaagggtgggaatcgcttttggaaatccattgggcttggatttaagactcccagggaagccatcgaaggagtctacattgacaacaagtaccccttcactggcaatgtttctatctgtggccgtaacttggctggaacatgtcacagtgctaacattaataggactattattgttaggacgaattatctccattttatcaataagtaccagaggtacaagaaaaggcactccaacattcctgctcatatatcacctgccttccgtgtgaaagaatgacatcaccttaatactggtcaa

SEQ ID NO: 3001 - DNA, 316 bp, Glycine max
  Clone ID: LIB3072-008-Q1-E1-E5
gagaacagaaacacttaataggtatgagtttcaagaagaacatggtggtgctaaaagtgtgtatgttgcttcatttccttgtgggggttacagctgcacgcatgtaactcagcttcgtcaaaattgatcagtctgcacgttacgatgatgaagagtattcaagtccatgcagtgatctcagcatgcgcacacgcacaatgcctcctcaatgcagctgtgaatatcataggctgaattcatggcactcagattgtcatacccgtatgtccacaggctcacatccaggagagtgtcattgtcttgataccggtgactt

SEQ ID NO: 3002 - DNA, 214 bp, Glycine max
  Clone ID: LIB3072-008-Q1-E1-E6
gactcatacaatagagaccagcttttgcttctttgtgaacatggagatgaggacatcatgtggcttcttcttcgtgctcgtcgtcattgtctttgcttctcatgtggtggtgcaaacggacggaacagtgtgtgagtcacaaaaccaccggttcgcatggtttgtgtaatagacaccacaagcgtgtgttggtccgcacgaatcagtgtttctc

SEQ ID NO: 3003 - DNA, 161 bp, Glycine max
  Clone ID: LIB3072-008-Q1-E1-E7
gattcacgcagctacgtaagacttgaatagtactatcgtctttgctctctttccaatctgtgccatcatcagcgcagtgggggcttcagccaccgctcagttcgtgctcgacactgatgatgatcctcttcacataccgtcgcacacaccatactgttgcc

SEQ ID NO: 3004 - DNA, 143 bp, Glycine max
  Clone ID: LIB3072-008-Q1-E1-E8
cggggccgcgtgagcgcccttgtctcctcggatccacacgagacaagcatgctaagacagcgtgccaaccaggttcatcacgaaaagacagcgacctagccggagtccgagcgtcacatcaactacagaacgaatttaactac

SEQ ID NO: 3005 - DNA, 90 bp, Glycine max
  Clone ID: LIB3072-008-Q1-E1-F1
ctttcaaatgtttctttgtgaaagattggaatgtattcatagtgtagagcataatttttatttttttcatttttttgcttctttttcttt

SEQ ID NO: 3006 - DNA, 403 bp, Glycine max
  Clone ID: LIB3072-008-Q1-E1-F11
gatacttagatcttcttccttcactcaatcaagttttgactttatttggagtttctccaaaatgagccggccaatggaggaagatactgtgggtaagaatgaggaagaggagttcaacactggaccgctgtccgtactcatgatgagtgttaaaaataatactcaggtactgataaattgtcggaacaacaaaaagcttctgggtcgtgtaagggcttttgataggcactgcaacatggttcttgaaaatgtgagggagatgtggactgaggtgccaaaaactggtaaaggaaagaaaaaggcccagccagtcaacaaggatagattcatcagcaagatgttcctccgtggagattccatcatcattgttcttaagaatcccaaatgagattccatcatcaat

SEQ ID NO: 3007 - DNA, 383 bp, Glycine max
  Clone ID: LIB3072-008-Q1-E1-F3
gacagcaaaaacaattaataaagatgagtttgaagaacaacatggtggtgctaaaggtgtgtttgttgcttcttttccttgtgggggttacagctgcacgcatggaactgagcttctccaaaagtgatcagtcatcaagttatgatgatgatgagtattcaaaaccatgctgtgatctctgcatgtgcacacgctcaatgcctcctcaatgcagctgtgaagatattaggctgaattcatgccactcagattgtaagagctgtatgtgcacacgctcacagccaggacagtgtcgttgtcctgacaccaacgacttctgctacaaaccttgcaagtccagagatgactagaaaaactaatagctcctctaaatggacgaagcc

SEQ ID NO: 3008 - DNA, 328 bp, Glycine max
  Clone ID: LIB3072-008-Q1-E1-F6
tgatcaattttataagattgaatcgactataaaatgaaatgaatcatttcatattgatagtattgctatgcttagtgtgcgactcgttagttttttagaacggttccaatttaacaaatttataaaccggttcatcgtattaatgaattagataagaactaataaccaacgcatcgcttcggattatctagatctaaagaactagtcaaggcgtgacacaatatgagaacagatatattacagcatctgaactattgtgaagcataaaagaacatagctcttatttagttgttacgcaatacaaatatacagagcgatgaagacgccg

SEQ ID NO: 3009 - DNA, 282 bp, Glycine max
  Clone ID: LIB3072-008-Q1-E1-F7
gacacaactaactaacaaagtcttcgataggccgccgaaaatgaagagcaggatcttctttgcgctctttctgttttgtgccttcaccacctcatacgtaccttcggccatccctgatgttgtgctcgataatgaaggtaacgctcttgaaaatggtggcacatatgacatcttgtcagacataacagcagttggtggaataagatcagccccggcgggaactgacatatgccctcttaatgtcgtggaatctcgcaatgatctcggacaaatggattggaa

SEQ ID NO: 3010 - DNA, 398 bp, Glycine max
  Clone ID: LIB3072-008-Q1-E1-F8
gagataatgtaatggataatcaaattaccttaaaaagaagaatcctggtcgcatgatttgacagtgattagcacaaaatgcatctggcttccgctcataaatccaacttcaaattttccattacgctcaagccgcacaaccactacctctttcattttcaaccatagaacaagataatcacagtccaagtgcattaggagccaccagtccacagtatagcagaggtggactcttcagggcatgacaactctcgtcactggtggtactcgcggaattgggcacgccattgtggaggaattgacggggtttggagccagactgcatacctgtgccaggaatgaacatcatctcatcaagtgcctcacgaactggaatgattccggttttgatgtcactgg

SEQ ID NO: 3011 - DNA, 381 bp, Glycine max
  Clone ID: LIB3072-008-Q1-E1-G10
ggggatctatcacaatagaaagcaaagctatataggattatttcccatatcaagaagatgaaaatcccgttttatgttcccatcctcgtgcttgttgtcttcattgcttctggaaaacaagtgcaaatgacagtggtaccaaattgtgtggtagaaagcttgtcagttcattgtgaaatattcaagaatccttgcgaacttctttgccaacaacattttggattacccgcagcacatggagcttgtggcattaagttccatgtatgtgtttgttatttatgttaaatataaagtttaaccataacaatcacagctttcatacctatttaatagtatgtaagccgatgaacccaatatatatgtccatcaactgacttcatt

SEQ ID NO: 3012 - DNA, 361 bp, Glycine max
  Clone ID: LIB3072-008-Q1-E1-E12
ggtaaccgagttgggttgagttgcgactcggctgactcgttgactcagattttccttgaaccgacgtattttccaagcttggatgccgccaagacttttcttggatacttgtgggataataacgataataacaaatggatatgataagggaaaaaaaaaaaacggcacaaaaacgatggccaaagtgaaattttcggtttgggcattttatggataatgttattcagtttagtttggtagtgttacacctcaataaagagggaaaaagcacaaaacaaaagatgtaatttagaaattcgtttttttctttaaggaaaagtggattaaattctgtaatggtcctgatcgttgtaaaatattt

SEQ ID NO: 3013 - DNA, 419 bp, Glycine max
  unsure at all n locations
  Clone ID: LIB3072-008-Q1-E1-C2
gacagcanaaacaattaataaagatgagtttgaagaacaacatggtggtgctaaaggtgtgtttgttgcttcttttccttgtgggggttacagctgcacgcatggaactgagcttcttcaaaagtgatcagtcatcaagttatgatgatgatgagtattcaaaaccatgctgtgatctctgcatgtgcacacgctcaatgcctcctcaatgcagctgtgaagatattaggctgaattcatgccactcagattgtaagagctgtatgtgcacacgctcacagccaggacagtgtcgttgtcttgacaccaacgacttctgctacaaaccttgcaagtccagagatgactagaaaaactaatagctctctcaaatggacgaagctcctttagactttgtttgttatgttaggggagacaaa

SEQ ID NO: 3014 - DNA, 401 bp, Glycine max
  Clone ID: LIB3072-008-Q1-E1-C3
gacagcaaaaacaattaataaagatgagtttgaagaacaacatggtggtgctaaaggtgtgtttgttgcttcttttccttgtgggggttacagctgcacgcatggaactgagcttcttcaaaagtgatcagtcatcaagttatgatgatgatgagtattcaaaaccatgctgtgatctctgcatgtgcacacgctcaatgcctcctcaatgcagctgtgaagatattaggctgaattcatgccactcagattgtaagagctgtatgtgcacacgctcacagccaggacagtgtcgttgtcttgacaccaacgacttctgctacaaaccttgcaagttcagagattactacaaaaactaatagctctctcaaatggaccaagcccctttaggctttgtttgt

SEQ ID NO: 3015 - DNA, 385 bp, Glycine max
  Clone ID: LIB3072-008-Q1-E1-C4
gactcctcatcacattattctatatcaattttggttaagagtcttgaaaaagcaagagaaaaaaaaataccaaccatggcaaccatttctgatcaacctagagggtcctactcctatggaacctcatatggagcaccctatggaaccacgtatgagaccaacaccagcattaacaacccaccttcacgccaaacagtgaagttcataactgctgccactattggcatcacactcttgctcctgtctgggttgaccctcacaggcactgtcataggtttgatcattgcaacccctcttcttgttatcttcagccccatccttgtccctgctgcctttgtgctgttcctagttgcttccggctttttgttctctgggggctgtggtg

SEQ ID NO: 3016 - DNA, 390 bp, Glycine max
  Clone ID: LIB3072-008-Q1-E1-C5
gatagcagcatcatacaaagcattgaattcaaaaacttaagttcattccttgtgttttgctttcttcctcaaaaccaaacatgtcgaacacatgcggcaactgcgactgcgctgacaagactagctgcaccaagggaaacagctatggtgttattgtagagactgagaagagttacatcgagactgttgtcatggatgttccagcagctgagcatgatgggaagtgcaagtgtggcactaactgcacttgcacggactgcacctgtggccattaaggaatatgtatgaaaatgtaattgccatgtgtttggcaatacacatatccaaatcatgtaaccctcgtacgaatacaagtgtgtgctgttatcctacttcaagtctgtgtagtca

SEQ ID NO: 3017 - DNA, 203 bp, Glycine max
  Clone ID: LIB3072-008-Q1-E1-C6
gaaggagaagataatctcataaaaaacagacaaaggagtgaaaaagagagacccttttgaatggagtctgttctaagccacgttggtgcaggtttcgtcaatggcatgatcccaaggggagttttaggtacccatttcaaggttacttcctttgttggtgttcatggtgggaggccaaggcgtgtagtgttggtgaacgctga

SEQ ID NO: 3018 - DNA, 379 bp, Glycine max
  Clone ID: LIB3072-008-Q1-E1-C7
gacagcaaaaacaattaataaagatgagtttgaagaacaacatggtggtgctaaaggtgtatttgttgcttcttttccttgtgggggttacagctgcacgcatggaactgagcttcttcaaaagtgatcagtcatcaagttatgatgatgatgagtattcaaaaccatgctgtgatctctgcatgtgcacacgcccaatgcctcctcaatgcagctgtgaagatattaggctgaattcatgccactcagattgtaagagctgtatgtgcacacgctcacagccaggacagtgtcgttgtcttgacaccaacgacctctgctacaaatcttgcaagtccagagatgactagaccaactaatagctctctcaaatggacga

SEQ ID NO: 3019 - DNA, 419 bp, Glycine max
  Clone ID: LIB3072-008-Q1-E1-C8
gacagcaaaaacaattaataaagatgagtttgaagaacaacatggtggtgctaaaggtgtgtttgttgcttcttttccttgtgggggttacagctgcacgcatggaactgagcttcttcaaaagtgatcagtcatcaagttatgatgatgatgagtattcaaaaccatgctgtgatctctgcatgtgcacacgctcaatgcctcctcaatgcagctgtgaagatattaggctgaattcatgccactcagattgtaagagctgtatgtgcacacgctcacagccaggacagtgtcgttgtcttgacaccaacgacttctgctacaaaccttgcaagtccagagatgactagaaaaactaatagctctctcagatggactaagcccctttaggctttgtctgttatgttacgggagacaaa

SEQ ID NO: 3020 - DNA, 367 bp, Glycine max
  Clone ID: LIB3072-008-Q1-E1-C9
gactgcaactttgctctctgtgaggcttcaatttctaattagggtttcgcttagagtaaccaataaccatgggagtcttcagctttgtcgtccgcaaatccggcagcgaatggagcgccaagcaacattccggcgacatcgaggcctccgccgattccaccttcgatctccaacggaagctcgtgcaagccgctctcgccgttgattcctccggtggagttcagtcctctttctctcccgtgtctcctacctccgctgtgttccaggtgatagtgggtggtgcagtattcgttggacgtggtggtggtgctgtcgcagctgcacctgcacgtggtgctgccgcagctgatgctgcccagctgctgac

SEQ ID NO: 3021 - DNA, 368 bp, Glycine max
  Clone ID: LIB3072-008-Q1-E1-D10
agaaggggatagcgaaacagagagtggtttcagtgagtgatcggtgttcacttgatgcttcataagtcgtcatcatcatcatcatcatcagcgttgagtgaagaagatgccgatcagaaacatcgccatcggaaggcctgaagaggctactcaccccgacacgttgaaggcggggttggctgagttcatctccaccttgatcttcgtgttcgccggttcaggttccggcatcgcctacaacaagctcaccgacaacggcgccgccactcccgccggcctcatctccgcttccatcgcccatgctttcgccctcctcgtcgccgtctccgtcggcgccaacatctccggcgggcacgtcaaccccgccg

SEQ ID NO: 3022 - DNA, 61 bp, Glycine max
  Clone ID: LIB3072-008-Q1-E1-D11
aatctttggaagttctgggctaatgacttctggatctccatctcgtctctttctcatcatt

SEQ ID NO: 3023 - DNA, 431 bp, Glycine max
  Clone ID: LIB3072-008-Q1-E1-D2
gagaagaaaaaagagaagaagatgggtttgaagaacaacatggtggtgctaaaggtgtgtttggtgctacttttccttgtggggggtactactagcgccaacttgaggctgagtaagcttggcctgctcatgaaaagtgatcatcatcaacactcagatgatgatgagtcttcaaaaccatgctgtgatcaatgcgcatgcacaaagtcaaaccctcctcaatgccgctgttcagatatgaggctgaattcgtgccattcagcttgcaaatcttgtatttgcgcattatcgtatcctgcacagtgtttttgtgttgacataaccgatttctgctatgaaccttgcaaacccagtgaggatgacaaggaaaactactaatgaacaagtgttatgcatgtaagctctctctccaacggacaaagcccccttta

SEQ ID NO: 3024 - DNA, 324 bp, Glycine max
  Clone ID: LIB3072-008-Q1-E1-D3
cgggacagcagaaacaattaataaagatgagtttaaagaacaacatggtggtgctaaaggtgtgtttgttgcttcatttccttgtgggggtgacagctgcacgcatggaactgagcttcttcaaaagtgatcagtcatcatgttatgatgatgatgagtattcataaccatgctgtgatctctgcatgtgcacacgctcaatgcctcctcaatgcagctgtgaagatattaggctgaattcatgccacgcagattgtaagagctgtatgttgcacacgctcacagccaggacagtgtcgttgtcttgacaccaacgacttcctg

SEQ ID NO: 3025 - DNA, 308 bp, Glycine max
  Clone ID: LIB3072-008-Q1-E1-D5
gctcgaagcatttgagactaactcttagagagaaaaaaaaatggctgatacaggtggaggagatgcagtgagaccagtggtaatatgtgataacaagtgtggctgcacacttccatgcactggtggttccacttgcaggtgcacaagtgctggcattgccacaggacggggtgatcacgtgacatgctcgtgcggagagcactgtggttgcaatccatgcgcaggtcccaagattgcggctgctggaagtggttgcagatgtggcacagattgtgcatgtgcctcccgccgcacttagtcatcacacc

SEQ ID NO: 3026 - DNA, 96 bp, Glycine max
  Clone ID: LIB3072-008-Q1-E1-D6
atgcgtacggaagacgacagaaggggatctgaacttgcgagagtgaataaatgtcgcatgagttggcattggatttggacgagctgcgcctcctcg

SEQ ID NO: 3027 - DNA, 356 bp, Glycine max
  Clone ID: LIB3072-008-Q1-E1-D7
agggaagagaagcattagcaaaagcaagaagaactagtctaagcagaaatggcctcttcagtgatagcatctgtggccctcaaacctgccccttccactgttgagaagtcctcagttagaggccttccctccctctcaaggaactcctcttcattcagagttgtggccagtggtggcaagaagatcaagactgacaagccttatggaattaatggtggcatggctttgagggaaggagttgatgcatctggcaggaaaggaaagggaaggggcgtttaccagtttgtagacaaatacggtgctaatgtcgatggttacagtcctatctacgacaccaacgactggtctccaaccgg

SEQ ID NO: 3028 - DNA, 350 bp, Glycine max
  Clone ID: LIB3072-008-Q1-E1-D8
gattgcacaaaaaatggagttctacacaaggccaaataggagtgacatccacctctcagcagaggaagaagccaccatagaggcaaagaccagagactactttgatggggttgcaccacaacgccacacaaagcctcaacgaagtgagtattcagctcaatatgtggatgctttctccaatgcccatcactcttcttcttcttcttctataccagaattcatgcaattccaacgcctcgagaatgatccccaagagaagaaattggagtacaatggaagtcaagtaccggaagaatttgtggaaacagagtattaccaagatctcaacagcgtggaccaacaccaccata

SEQ ID NO: 3029 - DNA, 373 bp, Glycine max
  Clone ID: LIB3072-008-Q1-E1-E1
ggttagttgcctgcaacagagtaagagggcaaaaccctagctttagtgtcttcccgcccatctcttgcaatctcatagattttagcagccatggcgagtaccaaagttcagagggttatgacccaacctattaacttgattttcaggtttcttcagagcaaagcgcgcatccagatttggctctttgagcaaaagaatttgaggattgaaggccgaatcattggttttgatgaatacatgaatttggttcttgatgatactgaagaagtgaacgtcaagaagaaaagcagaaagacattatggacgatccttcttaaaggagacaacataaccttgatgatgaacacggggaaatgatgaacaacgctggcac

SEQ ID NO: 3030 - DNA, 332 bp, Glycine max
  Clone ID: LIB3072-008-Q1-E1-C12
gacagcaaaaacaattaataaagatgagtttgaagaacaacatggtggtgctaaaggtgtgtttgttgcttcttttccttgtgggggttacagctgcacgcatggaactgagcttcttcaaaagtgatcagtcatcaagttatgatgatgatgagtattcaaaaccatgctgtgatctctgcatgtgcacacgctcaatgcctcctcaatgcagctgtgaagatattacgctgaattcatgccactcagattgtaagagctgtatgtgcacacgctcacagccaggacagtctccttgtcttgacacccacgacttcctgcacaaaccttgc

SEQ ID NO: 3031 - DNA, 394 bp, Glycine max
  Clone ID: LIB3072-008-Q1-E1-E10
gtccccattcccaaatttctcattctcccatttcctctcagaaccctcgatcactcccacgcgctcctatatcctcttcggcaccgtcgctctctccaacgatcacaacaacatcgtcatcccatggcaaacgccgcatctggtatggcagtccatgatgactgcaagttaaggtttttggagctgaagacaaagaggacacaccgtttcatagtttttaagattgaggagcagcagaagcaggtcattgtggagaagcttggtgagccagcccaaggctatgaagatttcactgccagccttcctgctgatgagtgccgttatgctgtttatgattttgagtatctgactgaagggaatgtccctaaaagcagaatttttttcattgcatggt

SEQ ID NO: 3032 - DNA, 439 bp, Glycine max
  Clone ID: LIB3072-008-Q1-E1-A10
ggccttccggatggtgggatattgatgagtggatgtcagaccgaccaaacttctgccgatgcaagtcctgcaggaagcgctgccagtgcttatggagcttttagcaatgcaatacaggctataattgaggagactgacggtgcaatcacaaaccaagaacttgttcaaagggcaagagagaagctgaagaactccggtttcactcaaaaaccgggactctattgcagtgatcatcatgttgatgctccttttgtgtgttgatctgttctcatctgatgcagagaaagagagaataatatgtgttgtttatagtctgcttgtgtattgctgtatagttggagactcaaaatgaagttaatgttttcatccagttatcatatgcctgctctattatcacgaattatattccttcaacattttaccccttggtgtgtccttg

SEQ ID NO: 3033 - DNA, 295 bp, Glycine max
  Clone ID: LIB3072-008-Q1-E1-A5
gaagagagaaatatcttgttgagctgatttctgatcccaaattgagtttgagtttcagccatggtatctgtttctctgctcttattcctatctttctctgccttctttgcaccctctgaatctcacgacaaagtctcgttggaattgtactacgaaagcttatgcccctacagcgccaacttcatcgtgaatcacctcccaaaaatcttcaccccagatcttgccccaatcgttcacctcaaactcgttccttggggcaatgccaaactccgtgccaaagccacctttgaatgcc

SEQ ID NO: 3034 - DNA, 332 bp, Glycine max
  Clone ID: LIB3072-008-Q1-E1-A6
gatcacattattctatatcaattttggttaagagtcgtgaaaaagcaagagaaaaaaaaataccaaccatggcaaccatttctgatcaacctagagggtcctactcctatggaacctcatatggagcaccctatggaaccacgtatgagaccaacaccagcattaacaacccaccttcacgccaaacagtgaagttcataactgctgccactattggcatcacactcttgctcctgtctgggttgaccctcacaggcactgtcacacgtttgatcattgcaacccctcttcttgttatcttcagccccatccttgtccctgctgcctttgtg

SEQ ID NO: 3035 - DNA, 302 bp, Glycine max
  Clone ID: LIB3072-008-Q1-E1-A7
ggccgaggaaaagaaagaaagaaaaaaaaaacagcgccctagatttgctcttctttgcttcggaagaaagagaaaaacaaataacaatggcgttcgcttctttcctcggcagagttctcttcgcttccgtcttcatactctctgcttaccaagaatttaacgaatttggagttgatgggggacctgcagcaaaagcactcagacctaagtttgatgcctttacacatcgaatgcattctcaagttggctttcaacttcctgagattgatctgaaatttttaatttctggggctattgctctg

SEQ ID NO: 3036 - DNA, 282 bp, Glycine max
  Clone ID: LIB3072-008-Q1-E1-A8
cgggaacaaaaccacttgttcacccattaagctttcaagagacaaactgctttgacaaatgggatccactgttcttgcggcggttgtcgttctcctctccatcaacattcttttcatttccatggtcacgtccagcagccactactatccacagccccaatcttcttacgtcactgcacttagtatacgacctatttgtctggatctgagtatttgcctcaatatttgacgctggtcactaggaaccgtggatgatggttgtgccctcagcggtggtcatgg

SEQ ID NO: 3037 - DNA, 373 bp, Glycine max; identical to SEQ ID NO: 542
  Clone ID: LIB3072-008-Q1-E1-A9

SEQ ID NO: 3038 - DNA, 408 bp, Glycine max
  Clone ID: LIB3072-008-Q1-E1-B1
ggagttggaagaagaagaagggaagatgaacttgagatggatggaagcggtgctgccgctgggaatcatagcgggaatgctctgcgtcatgggaaacgctcagtattacattcacaaatccgcgcatggcagacctaagcacatcgggaacgatatgcgggacgtggccatggaacgaagggacaagaagcttgtcgagcaagcctctccctccaattaacatcgttgttttgccaatgacattgtgaagaaaataaactgctcacctggatttacgactgtgttctagggaagcagggttaatcacaagaatcaaattccgtctgttttcttgtatgcaattcgacataagatttataaatatatctatgtttccatcgcaattactttcgctaagcttggcttgtc

SEQ ID NO: 3039 - DNA, 320 bp, Glycine max
  Clone ID: LIB3072-008-Q1-E1-B10
ggcagccaaagaaaagaaaatcctcaattttctgagcagccaaacactctctctctgtctctcgaaaatgcgcagtttgcagagaagatctgaatcatgtcgtggcaagcgtatgtcgacgatcaccttctgtgtgacatcgaaggtaaccacctcactcacgctgctatcatcggccaagacggcagcgtttgggctcagagtaccgacttccctcagttcaaacctgaggagataactgccatcatgaatgactttaatgagcctggatcacttgctccaactggattgtatcccggttgcaccaaatatatggtcat

SEQ ID NO: 3040 - DNA, 53 bp, Glycine max
  Clone ID: LIB3072-008-Q1-E1-B12
agggatgcttcgggggaaactgacgctgaatattatactgtacacacacctgc

SEQ ID NO: 3041 - DNA, 345 bp, Glycine max
  Clone ID: LIB3072-008-Q1-E1-B2
gacgatttgagccatggcaacaacaacaccctcaaaccgatcatcagaggcgtttgctctcatggcaatcctcagcactctgctttgcacggcggtggcggcgaatgagagcgtgtacgagatactccccaagtacggcctcccgagcggtctgttaccggacaccgtcaccgactacacgctcgacgaggacgggcaattcgtcgtcgtcttggccaagccctgccacatacagttccgatacctagtgtactacgagaccaggatctcccgcaagctcagccatggctccatcaccaacctcaagggcattcaggtcagcgcctcttcatcctggttcaacgt

SEQ ID NO: 3042 - DNA, 317 bp, Glycine max
  Clone ID: LIB3072-008-Q1-E1-B8
gagcgcagtatctactgctctctctctccctctccctctccctccaaattttccttcattcgcaggcgcggccttggtttccgccggcggcaactccctatccaccgcgcatccatcccgcttccctctcctcgcttttctcacaaaacaaaaaaaattaaaaatttctccgaacactgtgtattaccgttatcgttcactgagttaggttttgctgttcttcatagggttttattgtgtccaataacaagaggagggggaagagacacagcacaacttgaacttagactaaggggcaaacattagggacttttttt

SEQ ID NO: 3043 - DNA, 376 bp, Glycine max; identical to SEQ ID NO: 686
  Clone ID: LIB3072-008-Q1-E1-A1

SEQ ID NO: 3044 - DNA, 288 bp, Glycine max
  Clone ID: LIB3072-008-Q1-E1-B9
gatgcttcgggggaaaaggagggtgaagaggagactgtagacacagctgctgcaaagaagaagaagaagagggaggaaaaggagaaggagaagaaggcagctgcggcggcagcagcagcagcagcagcagtagcaggaactgtaccagaaaatgaaacagcagaagataaagctgaggtaattgaaccaaagaagaatgattcaaaggctaaaaaagcagctgataagaaagtgccaaagcatgttagggagatgcaagaggcactagctcgaagacaagacgctgaa

SEQ ID NO: 3045 - DNA, 123 bp, Glycine max
  Clone ID: LIB3072-008-Q1-E1-C1
gaggataatttgagaaaagagagggcaatttccctttttcttttccgaccacgtctctccacgtaggtcagtactagccacactatcctctttcataagaggaattgcagttaattcaccttc

SEQ ID NO: 3046 - DNA, 419 bp, Glycine max
  Clone ID: LIB3072-008-Q1-E1-C10
ggtcgtggtcgtgtcgcagcaaaaccaggccacccactaacttgtttggtccaagacatggctctgatcctgcatgctaggaaaacaaacaagaatgccttcaagactctgattgcggcagagtacagtggcgtccaagtggaattggcccctaatttcgagatgggtgtctctaacaaaactcctgaatttctcaagatgaatcctattggaaaggttcctgttttggaaacgcccgatggtccagtctttgagagcaatgcaatcgctcgttacgttgctcgactaaagggtgacaacgctttgttctcatcttctgccattgataatgcccacattgaccagtggattgatttttcatccttggagatcgatgctaatcccatgaaattgctcctaccaagacttggatttgcccc

SEQ ID NO: 3047 - DNA, 362 bp, Glycine max
  Clone ID: LIB3072-008-Q1-E1-C11
gacaatagagactagagaagagagaggtgttggtgccctaatcgtgagaagaaaggaaagggaaaagaggaaaatggtgtgcataaggaaggcgacggtgaaggaccttctggcgatgcaggcgtgcaacctgttctgcctccctgagaactaccagatgaagtactacctctatcacatcctctcctggccccagctcctctacgtcgccgaagactacaacggccgcatcgtcggctacgtcctcgccaagatggaggaagaaaccaccgactgccacggccacatcacctccctcgccgtcctccgcacccaccgcaagctcggcctcgccaccaagctcatgaccgcagctcagaacg

SEQ ID NO: 3048 - DNA, 323 bp, Glycine max
  Clone ID: LIB3072-007-Q1-E1-E8
gacagcaaaaacaattaataaagatgagtttgaagaacaacatggtggtgctaaaggtgtgtttgttgcttcttttccttgtgggggttacagctgcacgcatggaactgagcttcttcaaaagtgatcagtcatcaagttatgatgatgatgagtattcaaaaccatgctgtgatctctgcatgtgcacacgctcaatgcctcctcaatgcagctgtgaagatattaggctgaattcatgccactcagattgtaagagctgtatgtgcacacgctcacagccaggacagtgtcgttgtcttgacaccaacgacttctgctac

SEQ ID NO: 3049 - DNA, 222 bp, Glycine max
  Clone ID: LIB3072-007-Q1-E1-E9
gacccatcaatagcaaaatgaccaagttcacaatcctcctcatctctcttctcttctgcatcgcccacacttgcagcgcctcgaaatggcagcaccagcaagatagctgccgcaagcagctccagggggtgaacctcacgccctgcgagaagcacatcatggagaagatccaaggccgcggcgatgacgatgatgatgatgacgacgacaatcacattctca

SEQ ID NO: 3050 - DNA, 355 bp, Glycine max
  Clone ID: LIB3072-007-Q1-E1-F1
ggttggaaggatcagcacgacactgagcatcagcaatggcaagcgcaagtgttggtaaagaactgacgcggtattcgtattggaggagctcttgttcccagcgagtccgaatcgctctcaacctcaaagggcttaaatacgaatacaagcccgtcaatctgctcaagggagaacaatctcgccctgagtttctccagctcaatcctgttggttgtgtccccgttccagtggatgaccacgttgttctctatgactctttccccattactatgtatttggaagataagtatcctcacaatccgttgctccctcatgatatttacctgagaggaatcaatttccacgctgcctagtg

SEQ ID NO: 3051 - DNA, 354 bp, Glycine max
  Clone ID: LIB3072-007-Q1-E1-F12
ggaagaacaacagaagcagagaaaaatgacgcagaaggcgaatcttttcaagggtaaagcaaagaagaaatcaatacctcccaatcgtcgtgggaaagtccctgttactcgtaaaggaaagagattcgtgaagccatccaaggttacaaaggatatggatactgatcgtgaggtgagcaaattcattaaccactgcaatgagatcaaagcagcgactctagcagcgaacgatggtgggcaactacgcaccattaagccgccacaagagccagcacgtaaatagttaatgattcgagaaacaaagatggttttgaatgtaccctgtgaatggcgcattgtccttgaagcctttgt

SEQ ID NO: 3052 - DNA, 121 bp, Glycine max
  Clone ID: LIB3072-007-Q1-E1-F3
gacagcacaaacaactaatacagatgagtttgaagaacaacatggtggtgctaaaggtgtgtttgttgcttcttttccttgtgggggttacagctgcacgaatgaaactaaccttcttcaa

SEQ ID NO: 3053 - DNA, 408 bp, Glycine max
  Clone ID: LIB3072-007-Q1-E1-F4
gaatacagagtgagttgttgctccttcgccacaactctctgccaacatgggtatctccagagattctatgcacaagaggcgtgccactggtggcaagaagaaggcctggaggaaaaagagaaagtatgagcttggtcgccagcctgctaacactaagctgtcaagcaacaagacagtcaggaggatccgtgttagaggtggaaatgtgaaatggagggcattgagattggatactggaaattactcctggggaagtgaagctgtaactcgcaagactcgtgtactagatgtggtttacaatgcctcaaacaatgagcttgtgcgtactcagactcttgtcaaaagtgctatcgttcaggttgatgctgctccattcaaacagtggtatcttcagcattatggtgttga

SEQ ID NO: 3054 - DNA, 357 bp, Glycine max
  Clone ID: LIB3072-007-Q1-E1-F5
ggtatgtgtgttgaagttctgaatttgaatggaaacacgtgctagtggtgatatgaagatggccatagatgatgctttgaatggcttctctcctgtctccacccctaggattttctggaaatcacgaaggagatcaggtatatattaagtcttaacttcacctacgttcctctattttctctctctactttatctattacattctgttccaaacaattttcgcaactgcactttactttctcctctgagccatttggatttcaaattcaatgtttttgttcatttttgcatggaattttcaatattataacatgccctctgccaattcttaattcctttcaaaattaaaattaaaat

SEQ ID NO: 3055 - DNA, 69 bp, Glycine max
  Clone ID: LIB3072-007-Q1-E1-F8
cagacaggggggaaatactgactgagttgttgctccatcgccacacctctctgtcaccaacggtaaccc

SEQ ID NO: 3056 - DNA, 404 bp, Glycine max
  Clone ID: LIB3072-007-Q1-E1-G1
gagaacctccaaagttaagttagggtttttgggggtgaagttgcgctttcggcacttccacttccacttcttcatcaccatgagcaggtcaggccaaccaccggatttgaagaagtacatggacaagaagcttcagattaaactgaatggaaatcgcatgattgttggcactctccgtggctttgaccagtttatgagtttagttgttgacaacactgtggaagtgaatggcaatgagaaaaatgacatagggatggtggtaatcagaggaaatagtgtggtcactgttgaggcgcttgaacccgtgaacagggcctgattactatttcttgtaaacatttacaagtagattttctggtttctgtgtttgaacaacgtagctattgagagtaacatgtaattgt

SEQ ID NO: 3057 - DNA, 360 bp, Glycine max
  Clone ID: LIB3072-007-Q1-E1-G10
gattcatgcaactgaataattaagaaaagccatttccatagcagcctaagaaaatgaagagcactagcttgttcgctatctttctacgttgcgccttcacctcatacctaccttccgccaccgcccaggacgtgctcgacgtggatggcgatccgattcggaacggtttcatatactacgttttgccggcaataagaggaaacggtggcggaatagaacgagccgcactcgggaaagacacttgccctatcactgtagtgcaatctcccaatccaaactctaaggggttagaaattaagtttgaatctgcataccccgcctattacataaacgaaaccctaattttgcaaataaagttca

SEQ ID NO: 3058 - DNA, 144 bp, Glycine max
  Clone ID: LIB3072-007-Q1-E1-G12
gacagccaacacaattagtaaagatgagttcgaagagcaacacggtgctgcgataggtctgtttgttgcttcttttccctattcgtgtggcaacggtacccgtggatctgaccttcttcagatttgatgagtcatccagtgttg

SEQ ID NO: 3059 - DNA, 389 bp, Glycine max
  Clone ID: LIB3072-007-Q1-E1-G3
ggcagccagagaaaagaaaatcctcaattttctgagcagctagacactctctctctgtctctcgaaaattctcagtttgcagagaaaatctgaatcatgtcgtggcaagcgtatgtcgacgatcagcttctgtgtgacatcgaaggtaaccacctcactcacgctgctatcatcaggcaagacggcagcgtttgggctcagagtaccgacatccctcagttcagacttgaggagataactgccatcttgaatgattttaaggagcctggatcacttgctccaactggattgtatctcggtggcaccaaatatatggttatccagggtgaacccggtgctgtcaatcgagggaatgaaggtcctgctggtgttactgtgaagaataccgg

SEQ ID NO: 3060 - DNA, 255 bp, Glycine max
  Clone ID: LIB3072-007-Q1-E1-G4
ggcagcttctgaaacctttgacactttcatcattgtttagggttttctctcgatcgtaatttctgcaacaatgggaagaagaagaagaagagaaacgtttccacacgaagaagatgagcgagagaaaatcagaaagaaaggaaaaatcaaagaatctgttaccttcgaagttgacgacgacgacgaggaagacttggatgtttttgagaatgatgggtttattgttgatgatgccgaagatgatcaggaggaaga

SEQ ID NO: 3061 - DNA, 87 bp, Glycine max
  Clone ID: LIB3072-007-Q1-E1-G5
ggcaccacccatggttctcaaaactgaactatgcccactcactggtgccaagatctactggggagagggcatcagatttgttcgttg

SEQ ID NO: 3062 - DNA, 100 bp, Glycine max
  Clone ID: LIB3072-007-Q1-E1-G6
aacacatcattactcctgcagacaatgagataatattatccttttttattttacaatgtatagtagtgacgtcacaaaacaaaacaaaaactgttacaag

SEQ ID NO: 3063 - DNA, 311 bp, Glycine max
  Clone ID: LIB3072-007-Q1-E1-H10
gattcatgcacctgaattattgatgaagttcgatttccatcacagcggtgcaaaatgtatatcagtagcttgttcgccatctttcgagggtacgcgctcacctgaaactgagcttccgccaacgctcatgatctgctcgacatggatagcgatactattcggaacggttccataatctacgttttgccggccacacaaggactcggtggcggaacagtgcgaaccgcacgcgggaatgacacttgcccgatcgttgtagtggtatctcccaatccacacaccaaggggtgtgtcattaactttgaatctgc

SEQ ID NO: 3064 - DNA, 402 bp, Glycine max
  Clone ID: LIB3072-007-Q1-E1-H12
gattcacacaactaactaagaaagtcttccatagccccccaaaaatgaagagcaccatcttctttgctctctttctcttttgtgccttgaccagctcatacctaccttcagccatcgctgatttcgtgctcgataatgaaggtaaccctcttgaaaatggtggcacatattatatcttgtcagacataacagcatttggtggaataagagcagccccaacgggaaatgaaagatgccctctcactgtggtgcaatctcgcaatgagctcgacaaagggattggaacaatcatctcgtccccatatcgaatccgttttatcgccgaaggccatcctttgagccttaagttcgattcatttgcagttataatgctgtgtgtttgaattccctacgagtggtctg

SEQ ID NO: 3065 - DNA, 85 bp, Glycine max
  Clone ID: LIB3072-007-Q1-E1-H2
tgggacagcaaaaacaattaataaacatcagtttgaacaacaacatggtcgtgctaaacgtctctttgttgcttcttttccttct

SEQ ID NO: 3066 - DNA, 252 bp, Glycine max
  Clone ID: LIB3072-007-Q1-E1-H6
ggcgatcgagcgtgatggatttggaaccctgggaagcacttgacgtggatgacaccaatctctccgccttcctccgcccttgcaactctaagggcgattcctcttccctcattcccggtcctgccggcgccgtccaggccgtgatgaggaaccggcgccaccatgaccccctctccactcaagaatttctaaagcgagttgagcgccaaagtgaccgcgatttcaacagcaatccctggctctgtgccctcc

SEQ ID NO: 3067 - DNA, 357 bp, Glycine max
  Clone ID: LIB3072-007-Q1-E1-H8
gattcacacaactaactaagaaagtcttccatagccccccaaaaatgaagagcaccatcttctttgctctctttctcttttgtgccttcacgacctcatacctaccttcagccatcgctgatttcgtgctcgataatgaaggtaaccctcttgaaaatggtggcacatattatatcttgtcagacataacagcatttggtggaataagagcagtctcaacgggaaatgaaagatgccctctcactgtggtgcaatctcgcaatgagctcgacaaagggattggaacaatcatctcgtcgccatatcgaatccgttttatcgccgaagggcatcctttgagccttaagtttcaatcat

SEQ ID NO: 3068 - DNA, 303 bp, Glycine max
  Clone ID: LIB3072-007-Q1-E1-B9
agggacacaactaactaagaaagtcttccatagccccccaaaaatggagagcaccatcttctttgctctctttctcttttgtgccttcaggagctcatacctaccttcagccatcgctgatttcgtgctcgataatgaaggtaaccctcttgaaaatggtggcacatattatatcttgtcagacataacagcatttggtggaataagagcagccccaaccggaaatgaaagatgccctctcactgtggtgcaatctcgcaatgagctcgacaaatggattggaacaatcatctcgttcccata

SEQ ID NO: 3069 - DNA, 269 bp, Glycine max
  Clone ID: LIB3072-007-Q1-E1-C1
gattcacacaactaactaagaaagtcttccatagccccccaaaaatgaagagcaccatcttctttgctctctttctcttttgtgccttgaggaggtcagacctaccttcagccatcgctgatttcgtgctcgataatgaaggtaaccctcttgaaaatggtggcacatattagacctggtcagacataacagcatttggtggaataagagcagccccaacgggaaatgaaagatgccctctcactgtggggcaatctgccatgagcccg

SEQ ID NO: 3070 - DNA, 294 bp, Glycine max
  Clone ID: LIB3072-007-Q1-E1-C10
ggcacactacacacagaaaaagagagagagaagatgacgcggggaaagcagaagatcgaagcgcagaagcgaaacgcagagaggaatcggaatggaaagggctctcagctcgaggccagagccgttggcctcaaagtcgtctgccccatctgcaaggcccaacttgtaaatcaaaaccaactggttgatcattatgcttccaaacatccgaaggagaaacctcctgcagagtcaagctagttatatttgagcaaatggtacaaacagtccccacacaaaattgctctctaggtg

SEQ ID NO: 3071 - DNA, 415 bp, Glycine max
  Clone ID: LIB3072-007-Q1-E1-C12
ggcaacaagaatttatcatttatacaaaactttgagataggttgcaaaggcttagagaagagttatggctaaaagtgagatgaaattcattggagtagtgattctgatgatgattatagtgggctctacacaagctgataacaacagccctgacttgactgggtgtgaagttaaatgtggtttcaaatgcatagcatatttctatagtaaaaaaaaatttgacgaatgttgtctcccttgtattcgaaaatgtcatcatgaaatgtccatcgatgttgtctatgattgcattactggttgccgcttaaccaagtccattgatgacaacattgatgctcgtgttcttaccgttcatgcaatggattcttgtgtgcaagagtgcaagaacaagtaagagtttgttgcaaaaatgctc

SEQ ID NO: 3072 - DNA, 388 bp, Glycine max
  Clone ID: LIB3072-007-Q1-E1-C3
ggatccaaagtcgcatcttttgcttcactctacgcagatcacagcaaaccagagattgaactccgacgatgcctcccgtcgctcctcgatccggcgatgccatattcgccaacgtcgaacgcgtcaatgcggagctgtttactttgacgtatggcgcaattgtgcgtcaattgctcacggatctggaagaggttgaggaggttaacgagcagcttgatcaaatgggttacaatattggaatccgattgattgatgagtttttagctaagtctaatgtctcaagatgcaccgatttcagagagactactgatgtaattgcaaaggttggttttaaaatgttccctggggttgctgcatctgtgaccaagtgggatcctgatggaacatg

SEQ ID NO: 3073 - DNA, 80 bp, Glycine max
  Clone ID: LIB3072-007-Q1-E1-C4
tacagcaaaaacacttaataaagatgagtttgaagaacaacatcgtcgtgctaaacgtgtgtctgttgcttcttttccct

SEQ ID NO: 3074 - DNA, 258 bp, Glycine max
  Clone ID: LIB3072-007-Q1-E1-C6
gaagaagaagaaggagcatggccatgagcatggccatgacagcagcagcagcagtgacagtgattaaactgctgcatcacctatatatggaaaaggtttatgggaccatagtagcgagggctgtgccttaatttctctctctctctctctctctctctctctctctctctctctctctttttcctttttccctatcttgtgatccacttatgagtgagacatacaaaagtcagaaactgtgcctgtacccggttgcta

SEQ ID NO: 3075 - DNA, 102 bp, Glycine max
  Clone ID: LIB3072-007-Q1-E1-C7
atcattactatcgatgatgtttgaaattctggaaccgtgtagagttcttcgtttaggaacatcgtccaaaagtatatatgtaaaatagacaaaagaatcatg

SEQ ID NO: 3076 - DNA, 391 bp, Glycine max
  Clone ID: LIB3072-007-Q1-E1-C8
gacacaactaactaagaaagtcttccatagccccccaaaaatgaagagcaccatcttctttgctctctttctcttttgtgccttcacgggctcagacctaccttcagccatcgctgatttcgtgctcgataatgaaggtaaccctcttgaaaatggtggcacatattatatcttgtcagacataacagcatttggtggaataagagcagccccaacgggaaatgaaagatgccctctcactgtggtgcaatctcgcaatgagctcgacaaagggattggaacaatcatctcgtccccatatcgaatccgttttatcgccgaaggccatcctttgagccttaagttcgattcatttgcagttataatgctgtgtgttggaattcctaccgag

SEQ ID NO: 3077 - DNA, 223 bp, Glycine max
  Clone ID: LIB3072-007-Q1-E1-C9
ggaaagagagtgaagagagaagaagatggcgtcgagcggagcggtgccgttttggagggcagcggggatgacatacatcacatactcgggagatatgcgcgaatctggtcaggaattgcctcacggaaccctacaaggctgaagccatctctcgtgagaacgtccattttgctctctccaaacgggtcgacgccaagcctgaaactcctactattccttcaga

SEQ ID NO: 3078 - DNA, 375 bp, Glycine max
  Clone ID: LIB3072-007-Q1-E1-D1
ggggggaatcattgattgtggcatgccatcgcgcaagcctaacgagagcgaaaccctcttgaccatcagcttcttggatagagcagccatcgttgtctggggacaatttccaagctcgtagtgcccaataatcggtaacattatcgttgtcaaagcaatgacttcctcatcgagcgtgaacagcgaatgccaatgtagaaaggccaaacacaaaattgaagtataggtcgacaattgtctcgagttttgccctctgaggattctgagctcctaacttgttaccaacatgtgtggacattttgaaactcaaagaagaccaaaaaatgtatatcaaagttgttgtttgaatcaaaacccccattgatgcacaagaag

SEQ ID NO: 3079 - DNA, 318 bp, Glycine max
  Clone ID: LIB3072-007-Q1-E1-D3
ggagcgagaagcgagaagggagtgaggtttggagaagagagagatgggaaaggagaagaagaggtatcttctgaaaacggaaccgtcggagtggtcgtgggaggaccaggcagcaaacggaggcacaagcaaatgggatggggtgaagaacaagcacgcccagaaatacctcaagtccatgtccatcaacgacctctgcttcttctaccactccggccccaaggcccgccgtatcgtcggcgttgtttccgtcgtccgcgagtggtaccgcgatgccgtcgacgtcaacgctgtccgggagatgaggacgcccgtcga

SEQ ID NO: 3080 - DNA, 423 bp, Glycine max
  unsure at all n locations
  Clone ID: LIB3072-007-Q1-E1-D5
ngacagcaagaaacaattaataagagatgaagtttganagaacaacatnggtggtgctaacaggtgtgtttngttgcttctgtttccttcgtgggggttaccacgctgcacgcatgcgaaactgagcttcttcaaagagtgattcagtcgatcaagttatgactgatgaatgagtattcaaaaccactgctgttgattctctgcatgtgcacacgctcgaatgcctcctcacatgtacgctgtgcaagatatctacgctgagattcatgccactccagattgtaaggagctgttatgtgcacaccgctcacgagccagggacagtgtcgtttgtcttgacaccaacgggcttccgctacaaaccttgcaagtccagagatgactagaataactaatagctctcttaaatggacgacacccctt

SEQ ID NO: 3081 - DNA, 393 bp, Glycine max
  Clone ID: LIB3072-007-Q1-E1-B7
gctccttctccatcctaaatcgaatagatagataggtgaaaatggcgcagtgtgtgaccaacacattcgtgcaaggaaaaccctttcttccagttgcagcagctcccactaaaaatcaggttcggagagcggttcagtgcggtgtgtggtgcaagaagaaggagatacacccgcaattctacgaggaatcgaaggtgtactgcaacggggagctggtgctgacgacaggtgggacccagaaggaatacgtggtggacgtgtggtcggggaaccaccccttctacctcggaagccggtcggcgtccatggtcagcgacgaccaggtcgagaagttccgcaagaagtccggggaactcaaagagatcatggagattcctggttccaagggagaga

SEQ ID NO: 3082 - DNA, 55 bp, Glycine max
  Clone ID: LIB3072-007-Q1-E1-E11
ccgtacagcgaaaagacgacagaagggggagcgaagaagatattagggtttttga

SEQ ID NO: 3083 - DNA, 315 bp, Glycine max
  Clone ID: LIB3072-007-Q1-E1-E4
gacagaagaaaaaagagaagaagatgggtttgaagaacaacatggtggtgctaaaggtgtgtttggtgctacttttccttgtggggggtaccactagtgccaacttgaggctgagtaagcttggcctgctcatgaacagtgatcatcatctacactcacatgatgatgagtcttcaaaaccatgctgtgatcaatgcgcatgcacaaagtcaaatcctcctcaatgccgctgttcacatatgaggctgaattcgtgccattcagcttgcacatcttgtacttgcccattatcgtaccctgcacaatgttcttgtg

SEQ ID NO: 3084 - DNA, 395 bp, Glycine max
  unsure at all n locations
  Clone ID: LIB3072-004-Q1-K1-H4
gcgcacacacgggcagagtgagtgcagagagatggcttgcagacagttgtgggctgcgagagctgcttcctacctgaggatctccgtgtttcacagaagcttctctaacgttttgaatgatctgaagtatgctgattctcatgagtgggtgaaggttgatggaaattctgcaactgttggcataactgatcatgcccaagatcatttgggtgaggttgtgtatgttgaattgcctgaagtgggagccaccgtgacacaaggagaaggttttggtgcagctgaaagtgtgaaggcaactagtgatattaactcttctgtttcaggaaaagtggtcgaagttaatgaaaaacttactagttctnctgcttttgtcaacacaagcccttacaaagatg

SEQ ID NO: 3085 - DNA, 399 bp, Glycine max
  Clone ID: LIB3072-004-Q1-K1-H5
gacaacacaaacattctctccattgtgttggaacactcatcaccatggccaagcttgttctttccctttgtttccttcttttcagtggctgcttcgctctgagagagcaggcacagcaaaatgagtgccagatccaaaagctgaatgccctcaaaccggataaccgtatagagtcggaaggtgggttcattgagacctggaaccctaacaacaagccattccagtgtgccggtgttgccctctctcgctgcacccttaaccgcaatgcccttcgtagaccttcctacaccaacggtccccaggaaatctacatacaacaaggtaatggtatttctggcatgatattcccgggttgtcctagcacttatcaagagccgcaagaatctcagcaacgaggac

SEQ ID NO: 3086 - DNA, 412 bp, Glycine max
  Clone ID: LIB3072-004-Q1-K1-H7
gaatctcttcacagaagaaaaaagagaagaggatgggtttgaagaacaacatggtggtgctaaaggtgtgtttggtgctacttttccttgtggggggtactactagtgccagcctgaggctgagtgagcttggcctgctcatgaaaagtgatcatcatcaacactcaaatgatgatgactcttcaaaaccatgctgtgatcaatgcgcatgcacaaagtcaaacccttctcaatgccgctgttcagatatgaggctgaattcgtgccattcagcctgcaaatcttgtatttgcgcattatcgtatcctgcacagtgtttttgtgttgacataacggatttctgctatgaaccttgcaagcccagtgaggatgacaaggaaaactactaatgaacaagtgttatgcatgtaag

SEQ ID NO: 3087 - DNA, 337 bp, Glycine max
  Clone ID: LIB3072-004-Q1-K1-H9
cactcatgcgacgacgccacaagactacagaatccatttacatgattaacatcacctcaacagccaggttaatacaccaatctgatcgcacaaatctctctcttaacccctctaacgccaaatctgcaccatacttcctgccctctccaacctcagagaaataacactttataactgacgactacacactaaaaatcaccttatcatagacaatatgatactacaatatgcttccactacataacatcacacaccccttactctccacagtgaaaagaacacacacatctgcactgaaagcccatataatctatactctatttaaaatgcacaaaaa

SEQ ID NO: 3088 - DNA, 65 bp, Glycine max
  Clone ID: LIB3072-007-Q1-E1-A1
aaagatcgaacgaacagaaaaaaaaaaaaaaaaaaaaaaaaaaaaacgggggcgctatagaatat

SEQ ID NO: 3089 - DNA, 296 bp, Glycine max
  Clone ID: LIB3072-007-Q1-E1-A10
gtctcaggttttggtgaattgtctgcgttactacctgcggacgccagagacagatattgatagttactgaaggaaccacccttgtaggataagccaatgcaatggttctttcctataccaaatcgccagttactgctaccacattatggaatgagttatgagtacctgtaactaactatggaatgaatacgtgttgcctgtggtatggaatctatgaatacctgaaactcactgaacgtccgttaaatctgatatgaaagctaaaaaaattgaaaatgaattttgcctcatttccc

SEQ ID NO: 3090 - DNA, 80 bp, Glycine max
  Clone ID: LIB3072-007-Q1-E1-A5
aaagatcgaacgaacagaaaaaaaaaaaaaaaaaaaaaaaaaaaaacgggggcgctatagaagtataactcatatatgcg

SEQ ID NO: 3091 - DNA, 405 bp, Glycine max
  Clone ID: LIB3072-007-Q1-E1-A6
aggggacagcagaaacaattaataaagatgagtttgaagaacaacatggtggtgctaaaggtgtgtttgttgcatcttttccttgtgggggttacagctgcacgcatggaactgagcttcttcaaaagtgatcaatcatcaggttatgatgatgatgagtattcaaaaccatgctgtgatcgctgcatgtgcacacgctcaatgcctcctcaatgcagctgtgaagatattaggctgaattcatgccactcagactgtaagagctgtaagtgcacacgctcacagccaggacagtgtcgttgtcttgacaccatcgacgtctgctacaaaccttgcaagtccacagatgactacaagaactaatagctctctcaaatggacgaagcgcctttaagctttgtttgt

SEQ ID NO: 3092 - DNA, 394 bp, Glycine max
  Clone ID: LIB3072-007-Q1-E1-A7
gacacaccgtttgttctattcttaactcaacttctgctacccactctcttcttccaagtccaaccacgcttttctctacagtcatgggcaaggtcaagatcggaatcaacggatttggaagaattggccgtttggttgccagagtcgctctgcaaagagacgatgtggagctcgttgccgttaacgaccctttcattaccaccgattacatgacatacatgtttaaatacgacagtgttcacggacactggaagcatcacgatgtcaccgttaaggacgagaagacccttttcttcggtgacaagccagtcaccgtttttggacacaggaaccctgaagagatccatgggggtcaactggagctgataacattgttgagttcaccggagttttc

SEQ ID NO: 3093 - DNA, 349 bp, Glycine max
  Clone ID: LIB3072-007-Q1-E1-B10
gacagcaaaaacaattaataaagatgagtttgaagaacaacatggtggtgctaaaggtgtgtttgttgcttcttttccttgtgggggtgacagctgcacgcatggaactgagcttcttcaaaagtgatcagtcatcaagttatgatgatgatgagtattcaaaaccatgctgtgatctctgcatgtgcacacgctcaatgcctcctcaatgcagctgtgaagatattaggctgaattcatgccactcagattgtacgagctgtatgtgcacacgctcacagccaggacagtgtcgttgtcttgacaccaacgacttctgccacaaacctttcaagtccagagatgacta

SEQ ID NO: 3094 - DNA, 399 bp, Glycine max
  Clone ID: LIB3072-007-Q1-E1-B3
gatcgttgggtgtgatcggtgtgagtctaatatttgcagtgctgaaaatgtcgcagttgttggacaaagccaaaaactatgttgcggagaaagtcacgaacatgcccaagcccgaggcgagtgtcaccgacgcggatttcaagcgcgtgagccgcgacagcgtcgagtacttggctaaggtctctgtttccaacccttattccactcccattcccatttgtgagatcaagtactccctcaaaagtgctggcaaggagatagcatcagggacaatacctgacccagggtcactgaaggcaagtgacacaacaatgctggatgtgccagtgaaggtgcctcatagcatattactgagcttggcaaaggacattggtgcagattgggacattgattaccaat

SEQ ID NO: 3095 - DNA, 372 bp, Glycine max
  Clone ID: LIB3072-007-Q1-E1-B4
gacgatgagtcgatttgataactaagatattgttattcgtgatattgatccaatttgatatcatcgaaatccaatttataccattgtgtgaattaattatcgatgaaagatttatcatctctatgggattaaatcccgaattttttattggaaatttaagagaaataaaacataataaagattatggaagtaaatattcttgcatttattgctactgcactgtttattctagttcctactgcttttttacttataatttacgtaaaaacggtaagtcaaagtgactaatttcactgaaatctgacgtcttcatttttatcaatgtaatcaatgattaaaagaaatgaaaaaggttttcaatttttggtcgta

SEQ ID NO: 3096 - DNA, 356 bp, Glycine max
  Clone ID: LIB3072-007-Q1-E1-B5
gatcgaaattctagacacacaacacataaaagatttccttgttctttttactgcttaaccgttcggctatctcatatatgaacaacagcatgttaggaatgaagagacggagagatgataatgaagggtccttggatttggcaaaatgtcttatgctgttttcttgtccaatagaaagcaacaagacacaacagaaaagttttggttctgtggaatttgagtgcaagacgtgcaaccgcaagttctcttcttttcaagcactgggagggcacagggcaagccacaagaggcagaagctggaaggggaagaactgaaagaacaggccaaaagttttagcttgtggaacaaaaccaaa

SEQ ID NO: 3097 - DNA, 377 bp, Glycine max
  Clone ID: LIB3072-007-Q1-E1-B6
gacagcaaaagcaattaataaagatgagtttgaagaacaacatggtggtgctaaaggtgtgtttgttgcttcttttccttgtgggggttacagctgcacgcatggaactgagcttcttcaaaagtgatcagtcatcaagttatgatgatgatgagtattcaaaaccatgctgtgatctctgcatgtgcacacgctcaatgcctcctcaatgcagctgtgaagatattacgctgaattcatgccactcagattgtaagagctgtatgtgcacacgctcacagccaggacagtgtcgttgtcttgacagcaacgacttctgctacaaaccttgcaagtccagacatgactagacaaacaaataggtctctcaaaatgga

SEQ ID NO: 3098 - DNA, 401 bp, Glycine max
  unsure at all n locations
  Clone ID: LIB3072-004-Q1-K1-F3
gcttcacagcaaaaacagttagtaaagatgagtttgaagaacaacatggtggtgctaaaggtgtgtttgttgcttcttttccttgtgggggttacagctgcacgcatggaactgagcttcttcaaaagtgatcagtcatcaagttatgatgatgatgagtattcaaaaccatgctgtgatctctgcatgtgcacacgctcaatgccttctcaatgcagctgtgaagatattaggctgaattcatgccactcagattgtaagagctgtatgtgcacacgctcacagccaggacagtgtcgttgccttgacaccaacgacttctgctacaaaccttgcaagtccagagatgactagaanaactaatagctctctcaaatggacgaagcccctttaggctttgt

SEQ ID NO: 3099 - DNA, 237 bp, Glycine max
  Clone ID: LIB3072-004-Q1-K1-F4
gcaacacagaaccttcacataaagtatctgaaagttttaatcccccaaaaaggtcaaaacaaatcaaaagaaaaaaaagaaatatatatatcactgtctctcactcttccaatctacaacctcccattttttttccttcctttcacacagtgttttctcttcaatcattctgctaaaagtaggagacttgagcaacacagaaccttcacataaagtatcttaaatttttaatcccct

SEQ ID NO: 3100 - DNA, 384 bp, Glycine max
  Clone ID: LIB3072-004-Q1-K1-F5
gggtagccgctgcatctcaacgaaacagagggagctagagagagagagagagagaaagagaagagagagaagcagcgattcatcacaatgggtaaggttcacggatctctcgcacgtgcgggtaaagtgagaggacaaactcccaaagtggcgaagcaagacaagaagaaaaagccacgcggacgcgctcacaagagaatgcaatacaaccgccgattcgtcaccgccgtggtgggattcggaaagaagcgtggaccaaactcctcggagaagtgagggaggcgtgttgaaaatcatggtttttcttagtttgggaaatgtatcacttgccttgatttgattgatgaactcaaacttttatgatagttcttattatgggtcaat

SEQ ID NO: 3101 - DNA, 77 bp, Glycine max
  Clone ID: LIB3072-004-Q1-K1-F6
aggggtgctatttgtattgtatgcacgtcaaagaacgcaaaaaaataatagcgtgaactggttccatcgaatcagac

SEQ ID NO: 3102 - DNA, 388 bp, Glycine max
  Clone ID: LIB3072-004-Q1-K1-F9
gacagcaaaaacaattaataaagatgagtgggaagaacaacatggtggtgctaaaggtgtgtttgttgcttcttttccttgtgggggttacagctgcacgcatggaactgagcttcttcaaaagtgatcagtcatcaagttatgatgatgatgagtattcaaaaccatgctgtgatctctgcatgtgcacacgctcaatgcctcctcaatgcagctgtgaagatattaggctgaattcatgccactcagattgtaagagctgtatgtgcacacgctcacagccaggacagtgtcgttgtcttgacaccaacgacttctgctacaaaccttgcaagtccagagatgactagaaaaactaatagctctctcaaatggacgaagccccttt

SEQ ID NO: 3103 - DNA, 385 bp, Glycine max
  unsure at all n locations
  Clone ID: LIB3072-004-Q1-K1-G12
ggaaccacacaatacaagttaaagggatggtggagaaaggaagtgtggttgaagctgcagtaactagatctcccatgcagatgaagatgggggatcatgaattagaaggcaacactaccagtgccctacgcactgccgagacgtttctgcgtttgttccctgttggtctatgtgtttcagcacttgttctcatgcttaagagctctcagcagaatgaatatggatctgttgattacagcgatcttggagctttcaggtacttggtgcatgcaaatggcatttgtgccggctactctctattttcagcggtgattgctgctatgccatgcccttccactatacctcgtgcttggactntctttttgcttgatcaggtgctgacata

SEQ ID NO: 3104 - DNA, 391 bp, Glycine max
  Clone ID: LIB3072-004-Q1-K1-G3
gattcacacaactaactaagaaagtcttccgtagccccccaaaaatgaagagcaccatcttctttgctctctttctcttttgtgccttcaccacctcatacctaccttcagccatcgctgatttcgtgctcgataatgaaggtaaccctcttgaaaatggtggcacatattatatcttgtcagacataacagcatttggtggaataagagcagccccaacgggaaatgaaagatgccctctcactgtggtgcaatctcgcaatgagctcgacaaagggattggaacaatcatctcgtccccatatcgaatcccgtttatcgccgaaggccatcctttgagccttaagttcgattcatttgcagttataatgctgtgtgttggaatttctac

SEQ ID NO: 3105 - DNA, 316 bp, Glycine max
  Clone ID: LIB3072-004-Q1-K1-G4
gaggaacagaaggagaaaggaaaggaagagaagagaagagaaggagaaggagaagggtttggtagttggttacttagtttgtttgattaacgaccgcgcactacactatccccacaatccagaagcttgttattatctccatccatttaatttaattcccacaaccacgctcacctaagtttcaatttcaatcccttttctttgtcttttttatttaaaattccaatttcgcgaaccccaaattccctccctgcttttccctttctctctgctctgtaacgtagcatttacagcgatcagtttatagtgagtcact

SEQ ID NO: 3106 - DNA, 264 bp, Glycine max
  Clone ID: LIB3072-004-Q1-K1-G5
ggagataagaataatcagttgaaggggttgatggctggtaggttgcctggtgttgggttgctagcatggaagagaacataccagaaccatcgatatgatcactaacaccatgcctcatgccgacaattctatcagctcggagaatcatcattggaaccaccatggatacctctcactgccttagatgaaactgttgtcaaagatagacatatgcttcactagaagcttggacactagttttgctcatacaggtcttgtgagaat

SEQ ID NO: 3107 - DNA, 315 bp, Glycine max
  Clone ID: LIB3072-004-Q1-K1-G6
gacagcataaacaattaataaagatgagtgtgaagaacaacatggtggtgctaaaggtgtgtttgttgcttcttttccttgtgggggttacagctgcacgcatggaactgagcttcttcaaaagtgatcagtcatcaagttatgatgatgatgagtattcaaaaccatgctgtgatctctgcatgtgcacacgctcaatgccttctcaatgcagctgtgaagatattaggctgaattcatgccactcagattgtaagagctgtatgtgcacacgctcacagccaagacagtgtcgctgtcttgacaccaacgact

SEQ ID NO: 3108 - DNA, 432 bp, Glycine max
  Clone ID: LIB3072-004-Q1-K1-G8
atcggataggaagacgacagaatgggacgccaaagccctctcttatttccagacgcggcggcttcttcttccgtttttgtctattggcgtgaacaatggcgacttacgctgcgatgaagcccacaaagcccggcttggaggagccccatgagcagatccacaagataaggatcaccctttccttcaagcacgtcaaaaacctcgagaaggtttgtgcggacttggttcgcggtgcataggacaagcgcctcagggttaagggacctgtcaggatgcccactaaggttcttctcatcactaccaggaagtccccttgtggtgaaggtaccaacacatgggacagatttgaacttcgtgtgcacaagagagtgatggacctctacagttccccagatgtagttaagcagattacctctatcacgattgaacctg

SEQ ID NO: 3109 - DNA, 411 bp, Glycine max
  Clone ID: LIB3072-004-Q1-K1-F2
gacagcaaaaacaattaataaagatgagtgtgaagaacaacatggtggtgctaaaggtgtgtttgttgcttcttttccttgtgggggttacagctgcacgcatggaactgagcttcttcaaaagtgatcagtcatcaagttgtgatgatgatgagtattcaaaaccatgctgtgatctctgcatgtgcacacgctcaatgcctcctcaatgcagctgtgaagatattaggctgaattcatgccactcagattgtaagagctgtatgtgcacacgctcacagccaggacagtgtcgttgtcttgacaccaacgacttctgctacaaaccttgcaagtccagagatgactatgaaaactaatagctctctcaaatggacgaagccccttttaggctttgttgtatgttagggg

SEQ ID NO: 3110 - DNA, 283 bp, Glycine max
  Clone ID: LIB3072-004-Q1-K1-G9
gtcgagttgagtaacatcagcttgtgacccaggtggggacaccaaggtaatgggacaggtctctggcttagccaggttgggttggtggctgcaccatgctgcctgcccgctccaagttcagagttgaactatgagaactgagtgaagacacaggtctcctggttcctagacaaggggatactgcgtgaggctgccttcacagagcagcgttcacccctgcctcttcacagtggagggaataccggctgctgcactgtcagcccatataacctttacttttttt

SEQ ID NO: 3111 - DNA, 331 bp, Glycine max
  Clone ID: LIB3072-004-Q1-K1-H10
gatcgtcatcaataggtgttttcatttgggattcaaactcaccatggtggacgccttcaaactttgcatcttccttcttgcgtcgatctgtgctttcctagtcttttctaatccagtgctgtgtagtgataaggaggacagtgtattcaagggaatcaacagctacaggcaaacacggagcctggtacccctgagccaagtttcgaaggcaacatgtttggctgatgaagttgcagaagaaatagagaagatgccctgtgaaaacgtgaaccaatactacccttcatctgttcctggtagtgggaacctcaaaatcccaaacttgcagaag

SEQ ID NO: 3112 - DNA, 364 bp, Glycine max
  unsure at all n locations
  Clone ID: LIB3072-004-Q1-K1-H12
ggtgagacgagggtaaggtcgcgttgtgttgggtcgtgtcgtgcgctgttcctctgtctgtcgtttttgttttcagaccaaaccctagctccgcatcgcaaccatgtcgaccaagcaaggtggaaaagttaagcctttgaagaaacccaagtctgataagaaggattacgacgaggttgacatggctaacattcagaagaaaaaggaagaggagaaggcgctaaaggagttgaaagccaaggcgcaacagaagggaagctttggaggttctgggctcaagaaaagtggaaagaaataagggctctntatcatgattgtatacatccaatattgagccctgtaagttattaccatgataacttct

SEQ ID NO: 3113 - DNA, 368 bp, Glycine max
  unsure at all n locations
  Clone ID: LIB3072-004-Q1-K1-H2
gggatggagatgagtgctaaacggaagaagaagcgcgtgatgacgttgaagaggaagcgccgaaagatgagacaaagatctaagtaggtgcttgaacaaggagtggagatgatgtgcttttccatctgctaccagcttcatgacattttatgctgtcatggctcttatgatgatcttgaggtctagtggcgaggggagcttccatcttgactttagtttagctttactggtctaaagattgctgttttagtgtgggttaagttatgatattgagagttttgtgttatctaattatgtactggtacgttttgtatactttttggnttatcttaatagcttaaatattagtattttgagacgtgcatgat

SEQ ID NO: 3114 - DNA, 408 bp, Glycine max
  Clone ID: LIB3072-004-Q1-K1-D1
gacagcaaaaacaattaataaagatgagtgggaggaacaacatggtggtgctaaaggtgtgtttgttgcttcttttccttgtgggggttacagctgcacgcatggaactgagcttcttcaaaagtgatcagtcatcaagttatgatgatgatgagtattcaaaaccatgctgtgatctctgcatgtgcacacgctcaatgcctcctcaatgcagctgtgaagatattaggctgaattcatgccactcagattgtaagagctgtatgtgcacacgctcacagccaggacagtgtcgttgtcttgacaccaacgacttctgctacaaaccttgcaagtccagagatgactagaaaaactaatagctctctcaaatggacgaagcccctttaggctttgtttgttatgtta

SEQ ID NO: 3115 - DNA, 383 bp, Glycine max
  Clone ID: LIB3072-004-Q1-K1-D11
gatccataaccatggcgtctaactctgctggcgctctttacttcctgttatgcctatcgcccatcactttgcttctttctgcgtttcgtgctcaagctcaatctcatgctccagctcccactttcaggtactgtgaaaagaatgcagactatgctgtgaaggtgagtggagtggaaatattgcctgaccccgtggagagaggagtgccattcacctttaagatcccagcttatactcctgaaccaatccaaagcggggacttgttatatgaaatttcttatgctggaatagaagcacaacctgctacatttctccatgatctctgtgaggaagcaccatgcccagtacctgcaggcaactttgtgctcgttcacaccgaatta

SEQ ID NO: 3116 - DNA, 293 bp, Glycine max
  unsure at all n locations
  Clone ID: LIB3072-004-Q1-K1-D3
gacagcaaaaacagttagtaaagatgagtttgaagaacaacatggtggtgctaaaggtgtgtttgttgcttcttttccttgtgggggttacagctgcacgcatggaactgagcttcttcaaaagtgatcagtcatcaagttatgatgatgatgagtattcaaaaccatgctgtgatctctacatgtgcacacgctcaatgcctnctcaatgcagctgtgaagatattaggctgaattcatgccactcagattgtaagagctgtatgtgcacacgctcacaaccaggacagtgt

SEQ ID NO: 3117 - DNA, 386 bp, Glycine max
  Clone ID: LIB3072-004-Q1-K1-D5
gacagcactaactattaatgaagatgagtgtgaagaacaacatggtggtgctaaaggtgtggctgtcgcttcttttccttgttggggttactgatgcacacatggaactgaacttgatcaaaagcgatctgtcatcaggttatgatgatgatgaggattcacatccatgctgtgatctctgcttgtacacacgctcaatgtctgatcaatgcagatgtgaagatattaagctgaattcattccagtgagattgtaagatctgcatgtgcacacgcttacagccatgacagtgtccttgtattgactccaacgacttgtgctacgaactttgctagtccataaatgactagaataactaatagctatgctaaatggacgaatccctt

SEQ ID NO: 3118 - DNA, 96 bp, Glycine max
  Clone ID: LIB3072-004-Q1-K1-D6
gacataacataagaaaaacacacacacaagcgaccctttgagttcattaacctcttcagaaaaaacaacaacaacaacaaaaaaaaacatcatcat

SEQ ID NO: 3119 - DNA, 202 bp, Glycine max
  Clone ID: LIB3072-004-Q1-K1-D8
gacacataaaatctgtccgagtgctgcatttgcgaattgaacctcaaaatcagtctctaatatttttctcactgtcttgtctcttcagagaactggatagagagagatggcagctgcaacatctggtgctgagttaaatgggttgggatcttccttcttgagtggaggaaaccggagccaaacccttattggcactggtttt

SEQ ID NO: 3120 - DNA, 388 bp, Glycine max
  Clone ID: LIB3072-004-Q1-K1-D9
gacagcaaaaacaattaataaagatgagttggaagaacaacatggtggtgctaaaggtgtgtttgttgcttcttttccttgtgggggttacagctgcacgcatggaactgagcttcttcaaaagtgatcagtcatcaagttatgatgatgatgagtattcaaaaccatgctgtgatctctgcatgtgcacacgctcaatgcctcctcaatgcagctgtgaagatattaggctgaattcatgccactcagattgtaagagcagtatgtgcacacgctcacagccaggacagtgtcgttgtcttgacaccaacgacttctgctacaaaccttgcaagtccagagatgactagaaaaactaatagctctctcaaatggacgaagccccttt

SEQ ID NO: 3121 - DNA, 362 bp, Glycine max
  Clone ID: LIB3072-004-Q1-K1-E1
gatcatttgtaagagaagggaaaagcgggagaagagaaaaaacagagggttttgtttctcttttgcagttgcactcttgcgttgcaggcaggggcatctgcttcccgttctgctccgagcgatcaagtgagtgagtgagtgagtgtcatatatatacatagtgcgttcgagaaatgcagcagcacctgatgcagatgcagcccatgatggctgcctactaccccaacaacgtcaccaccgatcacattcaacagtacctggatgagaacaagtccttgattctgaagattgttgaaagccagaattctggcaagcttaacgagtgtgccgagaaccaatcaaggctgcagagaaatctcatg

SEQ ID NO: 3122 - DNA, 362 bp, Glycine max
  Clone ID: LIB3072-004-Q1-K1-E10
ggcacaccaacaccaaagcaaacccactaagatggcttcctttgtatccttcctagtgctgcttcttgcagcccttatcctcatgcctcaagggcttgctacttactacaaaccaattaagaagccaccagtgtacaagcctccagtgtacaagccaccagtgtacaaaccaccggtttataagccaaaaccaccggtttacaagccgaaaccaccggtttacaagccaccatataagaagccaccatacaagaaaccaccttatggaaagtatcctccagtagaggacaacacccatgcctaaagcaagcaatgaggtctattatctacttaataaataagaggaactgctttggggtttc

SEQ ID NO: 3123 - DNA, 317 bp, Glycine max
  Clone ID: LIB3072-004-Q1-K1-E12
gacagcaaaaacaattaataaagatgagtgtgaagaacaacatggtggtgctaaaggtgtgtttgttgcttcttttccttgtgggggttacagctgcacgcatggaactgagcttcttcaaaagtgatcagtcatcaagttatgatgatgatgagtattcaaaaccatgctgtgatctctgcatgtgcacacgctcaatgccttctcaatgcagctgtgaagatattaggctgaattcatgccgctcagattgtaagagcttgatgtgcacacgctcacagccaggacagtgtcgttgtcttgacaccaacgacttc

SEQ ID NO: 3124 - DNA, 406 bp, Glycine max
  Clone ID: LIB3072-004-Q1-K1-E3
gattcacacgactaactaagaaagtcttccgtagccccccaaaaatgaagagcaccatcttctttgctctctttctcttttgtgccttcaccacctcatacctaccttcagccatcgctgatttcgtgctcgataatgaaggtaaccctcttgaaaatggtggcacatattatatcttgtcagacataacagcatttggtggaataagagcagccccaacgggaaatgaaagatgccctctcactgtggtgcaatctcgcaatgagctcgacaaagggattggaacaatcatctcgtccccatatcgaatccgctttatcgccgaaggccatcctttgagccttaagttcgattcatttgcagttataatgctgtgtgttggaattcctaccgagtggtctgttgt

SEQ ID NO: 3125 - DNA, 369 bp, Glycine max
  unsure at all n locations
  Clone ID: LIB3072-004-Q1-K1-E4
gggtgcagagtgagtgagagacgagaaaagaatgagtgaagaaggtcctccaaagctatataccaacaagcccggaaaagcgcaactgaagcagtttcgggggcaacagaaatcgaacgggttctcctcgtcggcggcgatggatacacacgcggctgctccgccaccgccgccaaaggaaccctttattcggcgctacaagttcgtttggcctgtgcttttggctgtgaatctcggtgtcggagcttatttgtttatggggacaaagaagaaagatactggtgaggaggaacaagatgctactcctgtctcaactaaggatgctacccctcatggtgntgagactcctgtgtcatcaccatctattac

SEQ ID NO: 3126 - DNA, 402 bp, Glycine max
  Clone ID: LIB3072-004-Q1-K1-E5
gattcacacaactaactaagaaagtctgccgtagccccccaaaaatgaagagcaccatcttctttgctctctttctcttttgtgccttcaccacctcatacctaccttcagccatcgctgatttcgtgctcgataatgaaggtaaccctcttgaaaatggtggcacatattatatcttgtcagacataacagcatttggtggaataagatcagtcccaacgggaaatgaaagatgccctctcactgtggagcaatctcgcaatgagctcgacaaagggattggaacaatcatctcgtccccatatcgaatccgttttatcgccgaaggccatcctttgagccttaagttcgattcatttgcagttataatgctgtgtgttggaattcctaccgagtggtctg

SEQ ID NO: 3127 - DNA, 268 bp, Glycine max
  Clone ID: LIB3072-004-Q1-K1-E6
ggaacggcccacaaaggtgccgattacaacttcagggccaccaaaggcaaggccaccaacggcaccagttacagattcagaaccagagccaccaatttcacattcaggaccaccaaaagcagggcaaccaagagcaccaatttcaacttcgggaccaccaaaagcaagtgcaacaacggcaccgattacaacttcaaggccaccaaaggcaagtccgccaatggcacctattacaacttcagggccagccaagacaccaattacaact

SEQ ID NO: 3128 - DNA, 251 bp, Glycine max
  Clone ID: LIB3072-004-Q1-K1-E8
gagttggattccaatatattccattctctctgtgtatttccctacctctcccttcaagatgcagatcttcgtcaagaccctcaccggcaagaccatcacccttgaggtggaaagctctgacaccatcgacaacgtcaaggccaagatccaagacaaggaaggaatccccccggaccagcaacgtctcattttcgccggaaagcaacttgaggacgggcgtacccttgctgactacaacattcagaaggaga

SEQ ID NO: 3129 - DNA, 384 bp, Glycine max
  Clone ID: LIB3072-004-Q1-K1-F11
gttccctagttgatagaggccgcccctctcgtgaggagaggcatgcatcttcttctcggagcaggagtccatcaaaatcccggtctaggtccaggtcatccgtggagtctccgccaagagcaagtagagacagcaggtccaggtcatcgtccagaagccctgatggaaagcaaggcttggtctcatatggcgatggttctccatactaacgtgaaaggtgaaatatgtggtgcggagggctttgggttactgtaatcttcaatgagctgcaagcttcaatttttgaacttcaccacctgcattgcttgatggaattcgtgaatgacaatcgttttcccccctttatagacagcaatggcatgttgaaaacttgaaatattctaa

SEQ ID NO: 3130 - DNA, 372 bp, Glycine max
  Clone ID: LIB3072-004-Q1-K1-C9
aatgaataaaaaaatcaaataataattaatgaaaagaaaaaagtgtaaatcaaatagaaatttataaaatctatggtcctagagtagttccctagacaaaatagaagtaagttcacaaacaagattcaagaataagattctctgatgaaaggagagaaatatgtctgaggatccgctgggtataaggagtgaaagaggggatcatttgtttcttgaacagttcttttaaaaaaattttctatcggatttttgagtcataggggattttatgatttatgacttggaggatttttaagaatagaaaggaataactacattgagttcatcgatttgccctagatatcaatagactcataaattattttttattcg

SEQ ID NO: 3131 - DNA, 396 bp, Glycine max
  Clone ID: LIB3072-004-Q1-K1-B10
gactcactcatacaatagagaccagcttttgctgctttgtgaacatggagatgaggaaatcatgtggcttcttcttcttgctcctcctccttgtctttgcttcccaggtggtggtgcagacggagggaagagtgtgtgagtcacaaagccacgggttccatggtttgtgtaatagagaccacaactgtgctttggtctgcaggaacgaaggtttctccagtggcaggtgcaaaggcttccgccgccgctgcttttgcaccaggatttgttgagatctcatcaaacactactcttgccatgcaaattaataaatcatagctaggccaaataaattgcatctactctttatccatttgggagctagctaccacaaccaactcatactttgtcattgga

SEQ ID NO: 3132 - DNA, 100 bp, Glycine max
  Clone ID: LIB3072-004-Q1-K1-B11
atcattaaaaattacttacaaaaattatcatacaaattattttactgcaaaataagaactaaaaaaaaaatttacttcaaagctgaaatttacttttaat

SEQ ID NO: 3133 - DNA, 387 bp, Glycine max
  unsure at all n locations
  Clone ID: LIB3072-004-Q1-K1-B2
ggtggccaatggtgcacgaggcagtagtggaccctacaaaggagcccttcgagagggcaaatggggagccagcatatggatactatctgaagcacccagagatgaatgacctaatggtgagggccatgtcaggggtgtcagtgcccttcattagggccatgttggagggctatgatggctttcaaggcgtggagaagcttgtggatgtgggtggtagtggcggtgattgccttcgtatgatcttggaaaaacaccccaccatcaaagaagggatcaactttgacctacctgaagttgtggccaaagccccacanatcccatttgtaacccatgtgggtggtgacatgttcaagtttattccccaaggagatgctatcttcatgaagt

SEQ ID NO: 3134 - DNA, 297 bp, Glycine max
  Clone ID: LIB3072-004-Q1-K1-B4
ggacgacagcagatcatgagcgcagttcgttccacgttgttgtccgctctgtggctctctacatttcatcattcatcggaaaaatggctctcgaggttgctgttaaggctgctgttggtgctccaaatgttctcggagattgtccattttcccaaagggtcctcttaactttagaggagaagaaaatcccttacaaactccacctcatcgatctcagtagtaaacccgaatggtttttgggtgtgaatcccgaagggaaagtgccagtggttctttttgatggcaaatgggtggctg

SEQ ID NO: 3135 - DNA, 397 bp, Glycine max
  Clone ID: LIB3072-004-Q1-K1-B5
gaccttcacccatcggtacgcaaaatgaccaagcttacaattctcctcatcgctcttctcttcatcgcccacacctgctgcgcctccaaatggcaacagcaccagcaagagagctgccgcgagcagctcaaggggatcaacctcaacccctgtgagcacatcatggagaagatccaagctggccgccgcggcgaggacggcagcgacgaagatcacattctcatcaggaccatgccgggaagaatcaactacatcaggaagaaggaaggaaaagaagaagaagaagaaggacacatgcagaagtgctgcagcgaaatgagcgagctgaaaagccccatatgccagtgcaaagcgctacagaagataatggataaccagagcgagcaactggagggga

SEQ ID NO: 3136 - DNA, 389 bp, Glycine max
  unsure at all n locations
  Clone ID: LIB3072-004-Q1-K1-B6
ggggatctatcacaatagaaagcaaagcgatgtangattatttcccatatcaagaaaatgaaaatccctttttattttcccatcctcgtgcttgttgtcttcattgcttctggaaaacaagtgcaaatgacagtggtaccaaattgtgtggtagaaagcttgtcagttcattgtgaaatattcaagaatccttgcgaacttctttgccaacaacattttggatcacccgcagcacatggagcttgtggcattaagttccatgtatgtgtttgttatttatgttaaatataaagtttaaccataacaatcacagctttcatacctatttaatagtatgtaagccgatgaaaaaaataaatatataaataaaatgacttcattattagaca

SEQ ID NO: 3137 - DNA, 186 bp, Glycine max
  Clone ID: LIB3072-004-Q1-K1-B9
gatgattttgatccagaagatgccctctgatctttgctagtataaagtacttttataatcccccctcccaaattaacaaaaggaaaaaaaaaacactcctgttttctgtgtaatggttacccctaaaaaattctggtctttctgtgctttggctactgatttgattcctaagtatttacatctccc

SEQ ID NO: 3138 - DNA, 394 bp, Glycine max
  Clone ID: LIB3072-004-Q1-K1-C1
acgagtgtagggctcagggcaggcatattctatctccacgccgctaactctctctcacactcagtctctgtgtctctctctctttcacacccttcactttactctctctctgacagctaaaatgcaaggaggaatgagatcatttttgtcacatgggaatgtcattagaaatgctgttctacaacgcgtgcgcatggtgaaccccctgctacagacaattgcctcttctcggtttgaatctgttacgcctgctcgcattgaggagcatggttttgagagcaccacaatttcagacatcttgaatgataaaagcaacggtgctgatggctcctggctttggtgcaccacagatgatactgtttacgatgctgctaaatcaatgacccaaaacaat

SEQ ID NO: 3139 - DNA, 396 bp, Glycine max
  Clone ID: LIB3072-004-Q1-K1-C11
gattcacacaactaactaagaaagtcttccatagccccccaaaaatgaagagcaccatcttctttgctctctttctcttttgtgccttcaccacctcatacctaccttcagccatcgctgatttcgtgctcgataatgaaggtaaccctcttgaaaatggtggcacatattatatcttgtcagacataacagcatttggtggaataagagcagccccaacgggaaatgaaagatgccctctcactgtggtgcaatctcgcaatgagctcgacaaagggattggaacaatcatctcgtccccatatcgaatccgttttatcgccgaaggccatcctttgagccttaagttcgattcatttgcagttataatgctgtgtgttggaattcctaccgagt

SEQ ID NO: 3140 - DNA, 390 bp, Glycine max
  Clone ID: LIB3072-004-Q1-K1-C12
gaacaaaagcacttgttcaccaattaagctttcaagagacaaactgctttgaaaaatgggatccaaggttgttgcatccgttgcccttctcctctccatcaacattcttttcatttccatggttagctccagcagccactacgatccacagccccaaccttctcacgtcactgctcttattacacgacctagttgtccggatctgagtatttgcctcaatattttaggcgggtctctaggaaccgtggatgattgttgtgccctcatcggtggtcttggtgacattgaagccattgtgtgcctttgcatccaactcagggccctcggaatattaaaccttaaccgtaatttgcagttaatattaaactcctgtggacgaagctacccgtc

SEQ ID NO: 3141 - DNA, 258 bp, Glycine max
  Clone ID: LIB3072-004-Q1-K1-C2
taatttgggaattattgctcccatcgccagggggttcattgtcggcgctaacattttgttgggtggggccttctctggagcggtcatgaaccccgctgtgacatttgggcctgctgtcgtgagctggacctggaccaaccactggatctactgggccgggcctctcatcggtggtggaatcgctggccttgtttacgaggttgtctttatcagccacacccacgagcagcttcccaccactgactactagagggggac

SEQ ID NO: 3142 - DNA, 406 bp, Glycine max
  Clone ID: LIB3072-004-Q1-K1-C3
gagagtgatccttctacactaactaaagcggagcggcgagagagagaaaccctagcaaaaatgccggctggtcacggtttgagatcccgcaccagagattccttctctcgtcccttcaggaagaagggtaccatcgccctcaccacatacctcagaacctaccacgtcggcgattatgtcgacgtcaaggttaacggcgccgtccacaagggaatgcctcacaagttctaccatggccgcaccggtcgcgtctggaatgtcaccaaacgtgctgttggggtcgaagtcaacaagcaggtcggcaacagaatcataaggaagaggattcacgtgcgtgtggagcatgttatgccatcaaagtgcactgaagagttccgccttaggaagatcaagaatgatcagctca

SEQ ID NO: 3143 - DNA, 369 bp, Glycine max
  Clone ID: LIB3072-004-Q1-K1-C5
cgggatgcaactgaataattaagaaaagccatttgcatagcagcctaagaaaatgaagagcactagcttgatcgctatcttcctactttgcgccttcacctcatacctaccttccgtcaccgtccaggacgtgctcgacgtggatggcgatccgattcagaacggattcatatactacgttttgccggcaataagaggaaacggtggcggaatagaacgagccgcactcgggaaagacacttgccctatcactgtagtgcaatctcccaatccaaactctaaggggttagaaattaagtttgaatctgcataccccgtctattacataaacgaaaccctaattttgcaaataaagttcagttacccaca

SEQ ID NO: 3144 - DNA, 400 bp, Glycine max
  unsure at all n locations
  Clone ID: LIB3072-004-Q1-K1-C6
gaatacagagtgagttgttgctccttcgcgacaactctctgccaacatgggtatctccagagattctatgcacaagaggcgtgccactggtggcaagaagaaggcctggaggaaaaagagaaagtatgagcttggtcgccagcctgctaacactaagctgtcaagcaacaagacagtcaggaggatccgtgttagaggtggaaatgtgaaatggagggcattgagattggatactggaaattactcctggggaagtgaagctgtaattcgcaagactcgtgtactagatgtggtttacaatgcctcaaacaatgagcttgtgcgtactcagactctngtcaaaagagctatcgntcangttgatgctgctccattcaaacagtggtatcttcagcactat

SEQ ID NO: 3145 - DNA, 58 bp, Glycine max
  Clone ID: LIB3072-004-Q1-K1-C7
gagaggaagagaagagaaagaggagcacataataaccctcaaactccatttcactcgc

SEQ ID NO: 3146 - DNA, 399 bp, Glycine max
  Clone ID: LIB3072-004-Q1-K1-B1
gataccaaaaacaaaacacaagccaagtgagggtgagaaaaaataaaaatcaaagagcataatgtcagggatcattcacaagattggggagacccttcatgtgggagggcacaagaaggaggaggagcataagggtgagcaccatgctggagaatacaaaggggagcaccatggtgaacacagtagtgagtacaaaggagagcatcatggtgaacacaaagctggagagtaccatggtgagcacaagccagagcacaaagaggggttcctagacaaagtcaaggacaagatccatggtgagggcggcgccgccgagggcgagaagaagaagaaggagaagaagaagaaggagcatggccatgagcatggccatgacagcagcagcagcagtgacagtga

SEQ ID NO: 3147 - DNA, 383 bp, Glycine max
  Clone ID: LIB3072-004-Q1-K1-C8
gacacaagtaacttctctgcatccaaaatgcgcaggtcttaccatcggagacactattcctgatcttcaagttgaaactaaccaagacaaaatcaagcttcatcagttctgtgctgatggctggaccatccttttctctcacccaggtgatttcaccccggtttgtaccactgagcttggtaaggtggctcagtatgctaaggagttttatcaacgaggagtgaagctcttaggtttatcttgtgatgatgtgcaatcccacaatgagtggatcaaagacattgaagcctacactccaggtgcgaaagtgaattatccaataattgctgatccgaagagagaaatcatcaagcaactcaacatggttgaccctgatgagaaag

SEQ ID NO: 3148 - DNA, 294 bp, Glycine max
  Clone ID: LIB3072-003-Q1-K1-F10
cacgcctcctgaagaattttatataccttacgcatcgtcgaatcaacagagcatgtgtgatttcatagtgcgggtggtcacaaaaatttaacacacacaacgtgatagagatacaaatcttcgctctatgtcaatgtcacgaagcaagtgtttttacacaacttagcaaccactccatatattagaaaagtcagtttatttggcgtcatatttgctaaaagtcgtttcgtaactataccctctaattcaagactgaacaaacaacgatgggattgacatataaatagtacaatt

SEQ ID NO: 3149 - DNA, 361 bp, Glycine max
  Clone ID: LIB3072-003-Q1-K1-F11
ttattcacacaactaactaagaaagtcttccagagcgccccaaaaatgaagagcaccatcttctttgctctctttctcttttgtgccttcaccacctcatacctaccttcagccatcgctgatttcgtgctcgataatgaaggtaaccctcttgaaaatggtggcacatattatatcttgtcagacataacagcatttggtggaataagagcagccccaacgggaaatgaaagatgccctctcacttgtgtgccaatctccaattgattccaccaaaggattggaaccatcatcttgttcccataatcaatcccttttatcgcccaaagccattcttttagccttaagttccaatcatttt

SEQ ID NO: 3150 - DNA, 348 bp, Glycine max
  unsure at all n locations
  Clone ID: LIB3072-003-Q1-K1-F12
cggttccagtttacccctaaagggtccggttgccaaaaggcggccgggggggacagccaaaacgcttaatataaataagattgagaagcaccacatggtggctctaaaggtgtgtgtggcgcttctttcccttgtggggttcacatctgcacacatggaactgctcttcttcaaaagtgatcagtcatcaagttatgatgatgatgagtattaaaaactatgctgtgatctctgcatgtgcacactctaaacgcctcctcagtgcagctgagaagatatgaggctgaattcacgccactcagattgtaacagctgtatgtgcacactctcacagncagaacagtgtcg

SEQ ID NO: 3151 - DNA, 387 bp, Glycine max
  Clone ID: LIB3072-003-Q1-K1-G10
gattcacacaactaactaagaaagtcttgcatagccccccaaaaatgaagagcaccatcttctttgctctctttctcttttgtgccttcaccacctcatacctaccttcagccatcgctgatttcgtgctcgataatgaaggtaaccctcttgaaaatggtggcacatattatatcttgtcagacataacagcatttggtggaataagagcagccccaacgggaaatgaaagatgccctctcactgtggtgcaatctcgcaatgagctcgacaaagggattggaacaatcatctcgtccccatatcgaatccgttttatcgcccaaagccatcctttgagccctaagttcgattcatttacagttataatgctttgtgttggaattc

SEQ ID NO: 3152 - DNA, 237 bp, Glycine max
  Clone ID: LIB3072-003-Q1-K1-G12
agaaggggacattactaatgtgggatatgccggccaacatgacatgaatggtttaatagtttttaaatgggatttgacaatattggttaatcattcttatatgcatgatttaaaaaagaatatcacaaaaataaaaatgaaaaaacataattaaaattttgtttactgtttaatatttataaacttatgaactcaagagaaaccatgaatgatgagaagagaaaaggtagcaagttg

SEQ ID NO: 3153 - DNA, 324 bp, Glycine max
  Clone ID: LIB3072-003-Q1-K1-H11
ggcctctgccgtttcctccttattccacaccacacgttcaatatatggaagaagtactttctccttctatctcccacctactttatctcctccttctttacctatgaaccaattaaacaacacacttcatcacaaaactttctttattccatttcctcaaacttagtttatatatatattaatctatttctcttgtgtcatgggggctggtgtttcttcatgtaataaagttgaaaaagaaggaggagggtctatttcttcatcatcaagagattcaaggccccgtcctggttaccttccaaaaaggttcattttcttcctggt

SEQ ID NO: 3154 - DNA, 240 bp, Glycine max
  unsure at all n locations
  Clone ID: LIB3072-003-Q1-K1-H12
gagcgccaatgttttttcagaggagtttcatcttggaatcaaaagagtttatcttatagtaagaaatcgatgtcttactccattttaaggaacaaaacaagagaacaatagcctgacaaagggtttagccataaaatcgaatccatcattgatttgagatattgataaggtgaatactcatttctcgtcaatgctaggcataantgcggtatagggtacctaaaaaagatnanntctttc

SEQ ID NO: 3155 - DNA, 387 bp, Glycine max
  Clone ID: LIB3072-004-Q1-K1-A10
gatgcaactgaataattaagaaaagccatgggcatagcagcctaagaaaatgaagagcactagcttgttcgctatctttctactttgcgccttcacctcatacctaccttccgccaccgcccaggacgtgctcgacgtggatggcgatccgattcggaacggtttcatatactacgttttgccggcaataagaggaaacggtggcggaatagaacgagccgcactcgggaaagacacttgcactatcactgtagtgcaatctcccaatccaaactctaaggggttagaaattaagtttgaatctgcataccccgcctattacataaacgaaaccctaattttgcaaataaagttcagttacccacagcagtgtgaaagaaagaatcc

SEQ ID NO: 3156 - DNA, 388 bp, Glycine max
  Clone ID: LIB3072-004-Q1-K1-A11
gacagcaaaaacaattaataaagatgagtgtgaagaacaacatggtggtgctaaaggtgtgtttgttgcttcttttccttgtgggggttacagctgcacgcatggaactgagcttcttcaaaagtgatcagtcatcaagttatgatgatgatgagtattcaaaaccatgctgtgatctctgcatgtgcacacgctcaatgcctcctcaatgcagctgtgaagatattaggctgaattcatgccactcagattgtaagagctgtatgtgcacacgctcacagccaggacagtgtcgttgtcttgacaccaacgacttctgctacaaaccttgcaagtccagagatgactagaaaaactaatagctctctcaaatggacgaagccccttt

SEQ ID NO: 3157 - DNA, 408 bp, Glycine max
  Clone ID: LIB3072-004-Q1-K1-A5
gacagcaaaaacaattaataaagatgagtgggaagaacaacatggtggtgctaaaggtgtgtttgttgcttcttttccttgtgggggttacagctgcacgcatggaactgagcttcttcaaaagtgatcagtcatcaagttatgatgatgatgagtattcaaaaccatgctgtgatctctgcatgtgcacacgctcaatgcctcctcaatgcagctgtgaagatattaggctgaattcatgccactcagattgtaagagctgtatgtgcacacgctcacagccaggacagtgtcgttgtcttgacaccaacgacttctgctacaaaccttgcaagtccagagatgactagaaaaactaatagctctctcaaatggacgaagcccctttagggctttgttggtatgtta

SEQ ID NO: 3158 - DNA, 434 bp, Glycine max
  unsure at all n locations
  Clone ID: LIB3072-004-Q1-K1-A7
gaagacgacagaaggggattcacgcaactaaataagaaatgaagagtactatcttcggtgctctctttctagtttgtgccttcaccatctcatacctgccttcagccaccgctcagttcgtgctcgacactgatgatgatcctcttcaaaacggtggcacatactatatgttgccagttatgagaggaaagggcggtggaatagaagtagattcaactggaaaagaaatatgccctctcactgttgtgcaatcacccaatgagctcgataaggggattggactagtctttacatctccattacatgccctttttatcgccgaaggctatcctttgagcattaagtntggttcatttgcagttataacgctgtgtgcccgcatgcctactgagtgggctatngtggagagagagggtctacaagctgntaaactt

SEQ ID NO: 3159 - DNA, 225 bp, Glycine max
  Clone ID: LIB3072-003-Q1-K1-E12
ggttctagtgtgtgattgtttggggttgtaactcgttcttcttcttttgttgttctgtgtttgtgtttgttttttctctcacctgaaaatgtcttgctgcggtggtaactgtggttgcggaagctcctgcaagtgcggcaacggctgcggaggctgcaagatgtgcccagacttgagctacactgagtcaaccaccaccgagaccttggtcattggagtggcacc

SEQ ID NO: 3160 - DNA, 341 bp, Glycine max
  Clone ID: LIB3072-002-Q1-K1-F10
gacacatccagtgcagacacaacttactcgtagactcatctcattacaaccctttgtacccgtaggtttccttacctaccgagagtgttccacaaattcatcaaaatgaccaactattacgcttaacacaccatcattaatgatactcctggatatttcaactatccatttgtgaccattgttccaagtgtcaaaaacaagcctctattcttttacgacaaactttacaaatccaagaaaattgctgtcacacatgactaatactctcaccaggatcatgctatacctcactgacattgacctagctaacatccatatggaattcattgacaaaccataca

SEQ ID NO: 3161 - DNA, 111 bp, Glycine max
  Clone ID: LIB3072-002-Q1-K1-F11
agcatctaactaatgtcaacactttttggcaacccaatttacatatttgtaatttacatgatatttctttcaaaagaaatatgatagcaaagaaatctctcattcccaaaa

SEQ ID NO: 3162 - DNA, 251 bp, Glycine max
  Clone ID: LIB3072-002-Q1-K1-F12
ctcaataacccaagcatattacatacattgagagaggcatgattcattggtcccatatatgatacccaccttgttattcacaacagacctgactaaatactaatacattatatatccaacatgtcccacttccattcaaactcacaccttgaatataaatgttctcaatcctaaccactattccaaacattaatctctacttgataattcactatcttatcattcttaacattactttctccaaataatat

SEQ ID NO: 3163 - DNA, 95 bp, Glycine max
  Clone ID: LIB3072-002-Q1-K1-F9
tgatacctttaattcacatttctctagtttactcattctctcaccaatctttgggccaggtttcttactacaatggccctaacattccaccaacc

SEQ ID NO: 3164 - DNA, 62 bp, Glycine max
  Clone ID: LIB3072-002-Q1-K1-G10
acccacacgtcccgtcactcaaagatttaatcaccataacttttataatttccttcacttaa

SEQ ID NO: 3165 - DNA, 193 bp, Glycine max
  Clone ID: LIB3072-002-Q1-K1-G9
ctccacctacatctctctgactacattcaattatctattatcctttacatcctgatctaacacttaattgactcattttctacctataacttaatcaccaacacttcaataaccacctatatgtatcctataaattcacttattcaaacctaaatacatatatccatacacacattttaacttatatcttctc

SEQ ID NO: 3166 - DNA, 313 bp, Glycine max
  Clone ID: LIB3072-002-Q1-K1-H10
atcaaggcggtgagtgccaacaagtgagcctgttgccgagcctgtcatcatggccacaaatgtcgaggtccatgtaatcaccaatgctctgcagactacagccaacatacctgacgaaagacacgatgaacttgcagactctgcgcttgagatcttcatacaagcatcaacagtattccagatgcattcccacaagtctgtgcgactagcccctgtctatcaaaagttattacagaccatgaagcattaccttgaagcactacacgatgaatgcaccaccctagctctcctacaatttctctcacatttcctc

SEQ ID NO: 3167 - DNA, 281 bp, Glycine max
  Clone ID: LIB3072-002-Q1-K1-H11
gaccgacgcgtacggtgaacatgacccttcgccatgggccttgttatccttgaacagaggaaaggcgccgtctagatgttcttgacacacttgaagcaccataaaggcactgttttctttttttccattcatttctctgatcttcacttctacatcttgttcatcgtcaacgacatcatccaccacccgggccgctgctctcccctctccaaggtggtcttccgggatccgtatcggttcaataagcggacagatctattcattgtcttcgatggcattca

SEQ ID NO: 3168 - DNA, 400 bp, Glycine max
  Clone ID: LIB3072-003-Q1-K1-A10
gagggtttggttattagggttttcgctcaccggtgggcagtctagcccccgaagaaaaagcgaaaatgccgtcgcacaagacattcagaatcaagaagaagttggcgaagaagatgaggcagaacaggcctatcccctactggatccgcatgaggaccgacaacaccatcaggtacaacgcgaagcgccgtcactggcgtcgcaccaagcttggattctgaagtgcttgctttgcctcggttctggttatccaattaattagtggtttattttcttgagccaaaaacaatgctttggagattttaatattttgcattttgctccaagactatattgtgtaaggaacttattgtagttcagactaatggtggtgttggtcacctttttttaaaaagtaaaa

SEQ ID NO: 3169 - DNA, 275 bp, Glycine max
  Clone ID: LIB3072-003-Q1-K1-A12
gattcacacaactaactaagaaagtcttccatagcgccccaaaaatgaagagcaccatcttctttgctctctttctcttttgtgccttcaccacctcatacctaccttcagccatcgctgatttcgtgctcgataatgaaggtaaccctcttgaaaatggtggcacatattatatcttgtcagacataacagcatttggtggaataagagcagccccaacgggaaatgaaagatgccctctcactgtggtgcaatctcgcaatgagctcgacaaa

SEQ ID NO: 3170 - DNA, 235 bp, Glycine max
  Clone ID: LIB3072-003-Q1-K1-B10
gggggtcaaagacttcactgacaggcagctttctcaagtgggctggcacgaatactatgattgttagctgtgccttcatcacctcatccctaccttcatccatcgatcatttcgtgctcgataatgaaggtagccttattgaaaatggtgtcacatattatatcttgtcagacataacatcatgtgctggaataagatcatccccaacttgaaatgaaagatgctctctcactgt

SEQ ID NO: 3171 - DNA, 417 bp, Glycine max
  Clone ID: LIB3072-003-Q1-K1-B9
gattcacacaactaactaagaaagtcttccgtgagcgccccaaaaatgaagagcaccatcttctttgctctctttctcttttgtgccttcaccacctcatacctaccttcagccatcgctgatttcgtgctcgataatgaaggtaaccctcttgaaaatggtggcacatattatatcttgtcagacataacagcatttggtggaataagagcagccccaacgggaaatgaaagatgccctctcactgtggtgcaacctcgcaatgagctcgacaaaaggattggaacaatcatctcgtccccatatcgaatccgttttatcgccgaaggccatcctttgagccttaagttcgattcatttgcagttataatgctgtgtgttggaattcctaccgagtggtctgttgtggaggatcta

SEQ ID NO: 3172 - DNA, 388 bp, Glycine max
  Clone ID: LIB3072-003-Q1-K1-C10
gacagcaaaaacaattaataaagatgagtttggagggcaacatggtggtgctaaaggtgtgtttgttgcttcttttccttgtgggggttacagctgcacgcatggaactgagcttcttcaaaagtgatcagtcatcaagttatgatgatgatgagtattcaaaaccatgctgtgatctctgcatgtgcacacgctcaatgcctcctcaatgcagctgtgaagatattaggctgaattcatgccactcagattgtaagagctgtatgtgcacacgctcacagccaggacagtgtcgttgtcttgacaccaacgacttttgctacaaaccttgcaagtccagagatgactagaaaaactaatagctctcttaaatggacgaagccccttt

SEQ ID NO: 3173 - DNA, 228 bp, Glycine max
  Clone ID: LIB3072-003-Q1-K1-C11
acatcctagggcgacatcacaaccaattattacttctaaaacaattaatcaacatgactgggcaagacaactttgtaatgctaaagggccatttgatgcttacattccttctcatgattacaactgcacgcataaaactgaacttattcaaaaatgatcattcatcaaattatcatcattattagtattcaaaaccatactcacatctcttcatgtgcacacactcaa

SEQ ID NO: 3174 - DNA, 361 bp, Glycine max
  Clone ID: LIB3072-003-Q1-K1-C12
gacagcaaaaacaattaataaagatgagtttgaagagcaacatggtggtgctaaaggtgtgtttgttgcttcttttccttgtgggggttacagctgcacgcatggaactgagcttcttcaaaagtgatcagtcatcaagttatgatgatgatgagtattcaaaaccatgctgtgatctctgcatgtgcacacgctcaatgcctcctcaatgcagctgtgaagatattaggctgaattcatgccactcagattgtaagagctgtatgtgcacacgctcacagccaggacagtgtccgtgtcttgacaccaacgacttctgctacaaaccttgcaagtccaaagatgactagaaaaactaata

SEQ ID NO: 3175 - DNA, 347 bp, Glycine max
  Clone ID: LIB3072-003-Q1-K1-C9
acagaaggggacagcaaaaacaattaataaagatgagtttgaagaacaacatggtggtgctagaggtgtgtttgttgcttcttttccttgtgggggttacagctgcacgcatggaactgagcttcttcaaaagtgatcagtcatcaagttatgatgatgatgagtattcaaaaccatgctgtgatctctgcatgtgcacacgctcaatgcctgctcaatgcagctgtgaagatattaggctgaattcatgccactcagattgtaagagctgtatgtgcacacgctcacagccaggacagtgtcggtgtcttgacacccacgacttctgctacaaacctttcaagtcc

SEQ ID NO: 3176 - DNA, 292 bp, Glycine max
  Clone ID: LIB3072-002-Q1-K1-E9
acaggacctgacaccctaccgaccttacacttactccgcacgcctctttgcctccgtgcggggttcctacccatgtccggtggttctacctccatacttgctgtcctctggccagtattacatgtacccgcctccgctcttccctgaccacgttcactacacccactatagcgaccagctcgacaacccctattactatcatagtcaccaggggactccttccacctacgtggaacacatcccgtctcaattccagcaccatatccatcacgaatgcataccaccaacaacc

SEQ ID NO: 3177 - DNA, 404 bp, Glycine max
  Clone ID: LIB3072-003-Q1-K1-D11
ggctgagaggagcttcgtgaactgcaaacgcagtgtggcatagaagcagtttcttcccaaaggtaacggttagcgtccaccgcaagttggtgaaatttcgaagcttctcattaaccaccacttgctcctctcttccacctccggatttgccgcgtttggcaaaaacggctcaaatttcacttaccccaaacgaggttgaagaaattgctcccaaaattcaacaagttatagaatggtttggacagcttcagggtgttgatcttgaaagtgttgaaccctcgatcagagcagctgagaatgcgtggttagtgtgtttgttttatgccaatccgtttccagaggcacattaaatgtcaatcccatgctcgctcatggattattagcattcaatgtgagcaaacaaa

SEQ ID NO: 3178 - DNA, 411 bp, Glycine max
  Clone ID: LIB3072-003-Q1-K1-D12
gacagacagacacacactcggtggtgccttcacaaaaaaattatcgagatcccctttttctcctaagaaaagccatggctaagggtcccggtctctactctgacatcggcaagaaagccagggatctgctgttcaaggactaccacagtgaccagaagttcaccatcaccacctactcacccactggagttgctataacagcatcaggaaccaggaaaagtgaactgtttgtggctgatgtcaacacccagttgaagaacaaaaacatcactactgatatcaaagttgatacagattctaatctcttcacaactatcactgttaatgaacctgctcctggtctgaaggctatttttagcttcaaagttcctgaccaaaagtctggaaaggtggaagttcagtacttgcatg

SEQ ID NO: 3179 - DNA, 318 bp, Glycine max
  Clone ID: LIB3072-002-Q1-K1-A10
cgtcgccatgggccttgttatcttttgacagaggaagggctccgggtaagaatgtttcgctcacatgaaggaccgtaaaggcgctgctcgcctgcgcgccttggatttcgctgagcggcacggctacatcaaggtcattgtcaaggacatcatccactatctcttccgtggcgcgcccttcgccaaggtggtcttccgggatccgtatcggtttaagaagcgtacggagctgttcattgccgtctagggcattcacacgggccagtttgtgtattgctttaagaatgcccatctcaacattggcaatgtgcttcctgt

SEQ ID NO: 3180 - DNA, 139 bp, Glycine max
  Clone ID: LIB3072-002-Q1-K1-A12
agaagggggttcttttgtgtgattgtatcttgaagaaaaggagaggttttttttaaagtgaggtctggccatgatttcatgcatctaattggagtgactgtatagcctagatcactattgtgataaaccccatttcacc

SEQ ID NO: 3181 - DNA, 292 bp, Glycine max
  Clone ID: LIB3072-002-Q1-K1-B10
aaaaatcaaatctctaatataaggacgggttttaattaaaaggtgggctggccaatattccatgcattatgttcgagtgactgacgggcctatatcactgttgtgataaaccctatttcaccccgttacgttttatttacacatacacatactgtacttatttataatacattattaactctctcttctccttgaattttaacatccatataggtttatctctactatatcatttcccatttattaatcaaatgtactcacataaccctaacactgtcttttatatttatat

SEQ ID NO: 3182 - DNA, 254 bp, Glycine max
  Clone ID: LIB3072-002-Q1-K1-B12
tgacttcacaaacacttaataaagatgagttgtcggaacaacatgctggcgctaaaggagcgctagccgtttatctcactcgtggcgcttacacatgttcgcatcccactcaagcagttcataagctatcacgcttaaccacaactacgctgacatccactaagcactatacaccacactatacctgaactccttctcacacgctggcgcatgcatgtggcacgccatcaatgccatcttacgcaactcacatt

SEQ ID NO: 3183 - DNA, 238 bp, Glycine max
  Clone ID: LIB3072-002-Q1-K1-C11
ctgttatatttaatcgattctcatgccaactattaacttgaaacaaagaaattgatcaccttaatacacctcctctgctaataaacacccccaaattattcaccttctaccactataactctcatatcaagacacaatcttttcaacaaacataatacctcaattattacatttacattttcatgatccaagaacttttctttcctcatgtatattcctctgtttatacttaaattca

SEQ ID NO: 3184 - DNA, 309 bp, Glycine max
  Clone ID: LIB3072-002-Q1-K1-C12
gacagcaaaaacaattaataaagatgagtgtgaagaacaacatggtggtgctaaaggtgtgtttgttgcttcttttccttgtgggggttacagctgcacgcatggaactgagcttcttcaaaagtgatcagtcatcaagttatgatgatgatgagtattcaaaaccatgctgtgatctctgcatgtgcacacgctcaatgcctcctcaatgcagctgtgaagatattaggctgaattcatgccactcagatttgtagagctgtatgtgcacacgctcacagccaggacagtggtcgtgtcttgacacca

SEQ ID NO: 3185 - DNA, 307 bp, Glycine max
  Clone ID: LIB3072-002-Q1-K1-D10
tcccgatcgacccggcgtcctcttctgcaggattctggaaaatgccagttttccttttccgcccttgttttccataaaacatgtttggatattgtgatgaggagtactgtctgaacagtacttcgtatttttttttaattgccttgtttgccttcaacttccttgattttcatagtttacatgggtgtgtgtaggggtgtgtgtgtgtatgtgtgtgggttagggcttttttcgttgcatgttatggttctgttgacatatgatccccacaaactgttgtagtgattggccaggccttgcttttttt

SEQ ID NO: 3186 - DNA, 422 bp, Glycine max
  unsure at all n locations
  Clone ID: LIB3072-002-Q1-K1-D12
gagaaaagaaaagaaaaaaaaagggttctcgttggtccactagcgaggcgtgagatagatagattccatcggtgcgtttctgctctgctagggtttcatcttcttccatcacctccgtcgcaatgaaaccaggcttcatctgaatccgattccccttcgccccttctcctccttcactttcaccttctccgaatcctctaccaattattatgatgaactccatcttcgtctctcacaaccttcgcgtctttggtcccggcttgaatcccttcgcaccttattgcatcgccaatcacaccctttcctctcgctaaataccaattcccctctccgattctcggcgttactctacttggtcgnnttgctattttctatgtggtcgtttttgctctaattgctgagaaagatagaaacatgctcga

SEQ ID NO: 3187 - DNA, 229 bp, Glycine max
  Clone ID: LIB3072-002-Q1-K1-E11
cagctgtcctctgtttcactttcccggcctgcctctttgttgccatgaagggcttctacctatggctggtggtcctgcctgcatgctagctggctcacggccagtatgacctgtaccctcttccgtctttctctgaccactaccagttcacccactatatctaccagatcgacaacccatactactatgattattatgaggtgactccttatacttccgaggaacattt

SEQ ID NO: 3188 - DNA, 213 bp, Glycine max
  Clone ID: LIB3072-002-Q1-K1-E12
gactgcaacaacaattaatcaagatgagtgtgagggaacaacatggtgctgctaacggtgtgtttgttgcttcttttccttgtggaggttacacatgcacccatgaacctgagcttctctacaagtgatcagtcttcaagatatgccgacgatcagtgttcaaagaccatcccatgatctcttatgtgtaccccactcaaagcctcctcaatg

SEQ ID NO: 3189 - DNA, 270 bp, Glycine max
  Clone ID: LIB3072-002-Q1-K1-A9
accgacgcgtccggtcaggaagacccgtcgctatgagctttgttatccacgcacataacactatctcctgatcgtttttcaatgcacaggtgaaggaccgtaaatgagcaccgctcttaggcacacgcttattatctgagatgctcagctacatcaacgtcatcttcaccgacatactccaacagccagtccacatatctaccctcatcacactcaacttcccagatctgtatctgactaagaagcatacacagctgtatcattaccaac

SEQ ID NO: 3190 - DNA, 422 bp, Glycine max
  Clone ID: LIB3072-002-Q1-K1-C9
gaattaccgggccgaccgacgcgtccgggcagtcatgcgctgactcagcagatttttttcaaggccgggctctatttccagcaggcagggttgtttctgaagcgtggggaccaagactacatacactgtcatatagacggactgttaatccaactatgaagtccaaacaaacaaagtgatcacctgaagacacatcatatgttaacaaacatccacaaagtgctcaactccagacactacatctattacaacaagagacaatccttcacacgatacacacacactcaatgatgacatatagattcacatgagccaagaactgtatgctacctaaagcggatctctatgtttgtacttaaattcatgtgacacatattcatttcctactatggatattcttattaatgcactcatatcataat

SEQ ID NO: 3191 - DNA, 373 bp, Glycine max
  Clone ID: LIB3072-002-Q1-K1-E10
tcctgaattcccgggtcgacccagcgcgtccggcaccatctgccacgggatcgtggaggtggatcctttgctcaccccacaagagcctcacctgaacgagatgcagaaccatgggtatgagaaccccacctacaaatacctggagcagatgcacatttaagtggcacggagcgcggcatccctggcagaggcatgcacgaagtccggaagatcccacgattccaatcgactgtcaagcagcagcagctgtcacgggctgcgtctgacatcctgaccttctggactgtaggactatataaagtactactgcataactgcaatttccattcttttaaatgtgtgaaaaatggtgatataacaatatatgatatat

SEQ ID NO: 3192 - DNA, 289 bp, Glycine max
  Clone ID: LIB3072-002-Q1-K1-H9
cccggtttgcgcttccctccgggcacgatatgattggagccagtccgagccccggccctagcgagatcgtcgccatgtggcgcccagaccccgacccctacccggacccctagcctgcctgcggctcccttacttaccccgcattccccagactcctagccctgttgacgattcgtacttacctctgctctctcaaacgccgtcttctgctgtcccaatcgtgtctctcaatcatcactcatatctgctatgcagtgtcctcagcatctaccttccttacagtgcctct

SEQ ID NO: 3193 - DNA, 257 bp, Glycine max
  Clone ID: LIB3072-003-Q1-K1-A9
atccgcacaggttcaaccatacttctcttcttccctttacatccgcactgattcctctcctagaacgataacttttcacattctgacggacaatggcagactggaacgcatggacgagatcatcatggaccatttgtaccccatttcaaagcaagtgttggggatctggttggatcattgtgcttgtgccaagcgacaagctggagaagcagaaagagcttatcttaagaaaagggatggtctcattagaaacaaga

SEQ ID NO: 3194 - DNA, 440 bp, Glycine max
  Clone ID: LIB3072-003-Q1-K1-G11
acagaagggggtggaagggtggtggcacttgggttggtagcggcgaagaacgtcgttggtggaagaagagaaagaagcagtgatggtaacaccgggagaagtgttgggtagaaccagcgatgtcaaagctggaagaggagcatacgcggcgctttacaacaacaccgtatacgcctccctaaccggcttccgccacaccgtacctcccgcccccgactcttccgacctgagaccgactgttgaagtaactggtcacaaggcccatggacctgttccacagcctggatctgtaatcattgctcgggtcaccaaagtgatggctcggtccgcttcagctgatattatgtgtgttggaccaaagtctgttcgagaaaaatttactggcatcattaggcagcaagatgttagagcgactgagattgataaagtagacatgcact

SEQ ID NO: 3195 - DNA, 68 bp, Glycine max
  Clone ID: LIB3072-004-Q1-K1-A1
gggaaaaaagaaatggaaaaacttttgataaaaataaagaaaaaaagcggccgctcgaattacgacag

SEQ ID NO: 3196 - DNA, 292 bp, Glycine max
  Clone ID: LIB3072-004-Q1-K1-A12
gacggcaaaaacaattaatagagatgagtttgaagaacaacatggtggtgctaaaggtgtgtttgttgcttcttttccttgtgggggttacagctgcacgcatggaactgagcttcttcaaaagtgatcagtcatcaagttatgatgatgatgagtattcaaaaccatgctgtgatctctgcatgtgcacacgctcaatgcctcctcaatgcagctgtgaagatattaggctgaattcatgccactcagattgtaagagctgtatgtgcacacgctcacagccaggacagtg

SEQ ID NO: 3197 - DNA, 266 bp, Glycine max
  Clone ID: LIB3072-004-Q1-K1-A3
atgggaggatgcttcagcacattttaatttgcaaaagtttccttcttatgagatcgattgggattctctctgaagactctttgtttttttatttttatgtctagtcttgtgggtaattaataatttagttataattaggattgctcttgtggctgctgcaattgagtttttgaagattgcagtgctacttgtaggatttggattatgttagtcttttttctttttcttttttttttttaaatttgcttattggctattcgatggtc

SEQ ID NO: 3198 - DNA, 64 bp, Glycine max
  Clone ID: LIB3072-004-Q1-K1-A4
caggatggcggagttggaaggagattaggtgtccattgtaaaaataaaataaaattcctatggc

SEQ ID NO: 3199 - DNA, 385 bp, Glycine max
  Clone ID: LIB3072-004-Q1-K1-A8
gacggatacaatagagaccagcttttgcttctttgtgaacatggagatgaggaaatcatgtggcttcttcttcttgctcctcctccttgtctttgcttcccaggtggtggtacagacggagggaagagtgtgtgagtcacaaagccacgggttccatggtttgtgtaatagagaccacaactgtgctttggtctgcaggaacgaaggtttctccggtggcaggtgcaaaggcttccgccgccgctgcttttgcaccaggatttgttgagatctcatcaaacactactcttgccatgcaaattaataaatcatagctaggccaaataaattgcatctactctttatccatttgggagctagctaccacaaccaactcatacttggt

SEQ ID NO: 3200 - DNA, 157 bp, Glycine max
  Clone ID: LIB3072-004-Q1-K1-B3
tgtgacagtacaaacattttatcaagatgagtttgaagaacaacatggtggtgctaaaggtgtgtatgatgcttcttttccttgtgggggttacagctgcacgcatggaactgaacttcttaaaagtgatcagtcgtcaagttatgatgatgatgag

SEQ ID NO: 3201 - DNA, 192 bp, Glycine max
  Clone ID: LIB3072-004-Q1-K1-B7
gacagcaaaaacaattaataaagatgagtttgaagaacaacatggtggtgctaaaggtgtgtttgttgcttcttttccttgtgggggttacagctgcacgcatggaactgagcttcttcaaaagtgataagtcatcaagttatgatgatgatgagtattcaaaaccatgctgtgatctctgcatgtgcacac

SEQ ID NO: 3202 - DNA, 179 bp, Glycine max
  Clone ID: LIB3072-004-Q1-K1-B8
gaattcattttttggtcgtgtcttgtgtaaattaataaaaacactatagggctcctcggtttatactttatatgcatctattgtctgtgaaatagtgtgcaaatgagattcgttgtaattttggtttttaataaatttgttggagagttataaattaaaaaataaaaagaattgtgcac

SEQ ID NO: 3203 - DNA, 200 bp, Glycine max
  Clone ID: LIB3072-004-Q1-K1-F7
ggaatccaaccaagtaaacaaaatccactcaaggttggagggtaatcagcttcaatttctttccattttcattttgccctaatacccaaaaaaaaaaaaaaaaaaaaaaaaaaaaagcggcccgtttaaaagatccaaacttacctacccctgcattccaactcataacttttctataagggcacctaaaatcaattcaa

SEQ ID NO: 3204 - DNA, 144 bp, Glycine max
  Clone ID: LIB3072-004-Q1-K1-F8
tgtagtggtaagtgtaacacgtacgtgggatgtgtagttgatcttttgctcggtcgttgtagaggatccaagcatacgtacacgtgcatgcgacgacatagctcttatattgagtcaactctgtatagtttactgacgcgacca

SEQ ID NO: 3205 - DNA, 231 bp, Glycine max
  Clone ID: LIB3072-004-Q1-K1-G10
aaggcacaagttaccatggactaaatttgaacaaacagaaaagacatatcatcaccttcagacggggaggaatgcttttgttgcagtgctttgaatttaattttttctcctcagctgttagtatctctaatgaaaaatattttatgaacatccaatgtgttatatgacacccagtgaaaaaggaaaaagagtaaaaatatatgtattagaagttatattatatgatctaat

SEQ ID NO: 3206 - DNA, 307 bp, Glycine max
  Clone ID: LIB3072-004-Q1-K1-G11
aacaaaagcacttgttcaccaattaagctttcaagagacaaactgctttgaaaaatgggatccaaggttgttgcatccgttgcccttctcctctccatcaacattcttttcatttacatggttagctccagcagccactacgatccacagtcccaaccttctcacgtcactgctcttattacacgacctagttgtccggatctgagtatttgcctcaatattttaggcgggtctctaggaaccgtggatgattgttgtgccctcatcggtggtcttggtgacattgaagccattgtgtgcctttgca

SEQ ID NO: 3207 - DNA, 318 bp, Glycine max
  Clone ID: LIB3072-004-Q1-K1-H3
ggcgacaagtgagtttgttgatcgagataactagaaacagtgtgatgaaaatgaaggtccttgttttcttcgttgctacaattttggtagcatggcaatgccatgcgtacgatatgttccctctccgaatgaacactggctatggtgcccgtactccggaggtgaaatgcgcaagttggaggcttgctgtggaagcacacaacatctttggctttgagaccattcctgaagagtgcgttgaagcaacaaaggaatacattcatggcgaacaatatagatcagactccaaaacagttaaccaacaagcttacttttatg

SEQ ID NO: 3208 - DNA, 96 bp, Glycine max
  Clone ID: LIB3072-004-Q1-K1-H8
gcctgaaaccagtgaagccaagtgaaacaactgatggcataactgaagctgccgatctagatcattctagaggatgcacgcttacattcgcctgca

SEQ ID NO: 3209 - DNA, 63 bp, Glycine max
  Clone ID: LIB3072-007-Q1-E1-A2
tattgggaagaaggaagatcaccgtgacgggggctggcttcgaacttaagcggcctctctaga

SEQ ID NO: 3210 - DNA, 364 bp, Glycine max
  Clone ID: LIB3072-007-Q1-E1-C5
ggtaattcagagtttctaacatttcatttcaattatacatccatagataggaagaaagaaacaagtatgaaaacacttcactctctcgcgatgttccagattccatgacattagaaaattattaaaagaaaaatcgagaatcacgacaaaacgaaaaaatttgaacaattcgaaaaaattaaggataaagttcaataaggtaacaaccgcgctatctcaaacaaaaagggggcggctctaaaggttcaagctttagttagcctgcatggcaagttatagctcttccataatgtcccccaaattcaattccatgggcgttggttttaaaacgttctgactgggaaaaacctgggggttccccaac

SEQ ID NO: 3211 - DNA, 132 bp, Glycine max
  Clone ID: LIB3072-007-Q1-E1-E12
cttggggccgagcctcgtcctagctatctttttctctgtctgcttcacacatatttagactgagagaaagagaatcacctactatactcctagacaaccagcacgacactgtgttctgtctgctcgtgtgtc

SEQ ID NO: 3212 - DNA, 330 bp, Glycine max
  Clone ID: LIB3072-007-Q1-E1-E7
gacacttactagtagtaagcatggagtcctcagggatctatgcttacctcttcctctgcatgatctttctctcttccgccactcccattctcggttgtggctactgtggcaaaccccccataaagcacaagcctggtaaaacaccaaagacacccaaaacacccgttgttaagccaccagtcaccatccctcccattaatgttcctcccgttgttcttccaccaacagtgaagcccccaggtattctccctccaattccaattattaaccctacaaccacaccagggaagggacggaacactccatgcccaccaccaacgtctcctgcgc

SEQ ID NO: 3213 - DNA, 117 bp, Glycine max
  Clone ID: LIB3072-007-Q1-E1-F7
gaatccaaatcaaaccagcgatctcaaaaaaaaaaaccggcggcccaaaagaatcaaacctacgttagccttccatgcaacttcggacggctccaagattgccaccaaaatccaatt

SEQ ID NO: 3214 - DNA, 75 bp, Glycine max
  Clone ID: LIB3072-007-Q1-E1-G7
tgcaggatcaaaggatacatactcatgtatgcgaggtcaggacgtttcaatactgtcatctaatcatcaattaat

SEQ ID NO: 3215 - DNA, 81 bp, Glycine max
  Clone ID: LIB3072-007-Q1-E1-H4
ttgggacagctctaacaattaataaacatgagtttgactaacaacatggttgtgctccacgtgtgtttgttgcttcctttc

SEQ ID NO: 3216 - DNA, 117 bp, Glycine max
  Clone ID: LIB3072-007-Q1-E1-H7
cgggacagcacaaccaactactaaagatgagtttgaagaacaacatggtggtgctaaaggtgtgtttgttgcctcctttccttgtggggttacagctgcacgcatggaactgagctt

SEQ ID NO: 3217 - DNA, 125 bp, Glycine max
  Clone ID: LIB3072-008-Q1-E1-A11
ggaacacaagcatgtagcaaaagaaactgaagaataaaggagaacaagctaaaagaaaacagcaaagtcagccaagagcaaaaaaccacgtaatcaaacaccagacaaccaaaaaaaaaacaaat

SEQ ID NO: 3218 - DNA, 80 bp, Glycine max
  Clone ID: LIB3072-008-Q1-E1-A2
tacagctgcgagactactacacaacggtaccgctgccagaacacgacacaatggtacagctgctacaacactacacaacg

SEQ ID NO: 3219 - DNA, 375 bp, Glycine max
  Clone ID: LIB3072-008-Q1-E1-B5
attgatgatttcgtttcatgtgtgagaagacgaacctgaaagagagagaatcggagcaagaagaagaagatgatctatcggaagtggagtctccttgccggcccggtcagcatcctcggcggcatagtcgtcgccagtcgccgccgccaacgcttagtcatcgtcaagaatgatgcattcctcaaaccagaggagaggaactatgaatatcagcctgctaccaagtaggagaaaagagacaacagaagtttgcgttttgatgtcatttaaaccctgatttatgagctctgtatactgttttgcaagatacgcgctcgctggttaataagattgagtttctgaatgaagtctggactccggagcatggaccctcag

SEQ ID NO: 3220 - DNA, 95 bp, Glycine max
  Clone ID: LIB3072-008-Q1-E1-E4
ctgggggtgatgaatactttctatccgtgacactactatctctgtcccaaacacgcatccctgccccccaccaccacaccggccgctctagagga

SEQ ID NO: 3221 - DNA, 187 bp, Glycine max
  Clone ID: LIB3072-008-Q1-E1-E9
gacggcaaaaacaattaataaagatgagtttgaagaacaacatggtcgtgctgggggtgtgtttgttgcttcttttccttgtgggggttacagctgcacgcatggaactgagcttcttcactagtgatcagtcctcaccttcttatcatgaccagtattcctaaccctgctgtcatctctgcatctc

SEQ ID NO: 3222 - DNA, 349 bp, Glycine max
  Clone ID: LIB3072-008-Q1-E1-F10
cgaaggggtccttccttaaaacctcaattgttaaccgtggaaaacagttggaagacaatcctttggaatttgaagttgcctcctccaaattaaacctcaactcaaccctgttgccccacaatgccacatgttcacgttcctgaatgtcctaaccttatagccttaataccttttgaaattaaccactttcaattaaccagtaacttccaaaaccttcaataataataataggtgatgaaatatttaattaagttcgccaaaaacaagacaaactcccacgacacaaaaagcgggcgctccaaaagattcaaccttacgttcgcctgcatgccaagttacagctcctcca

SEQ ID NO: 3223 - DNA, 368 bp, Glycine max
  Clone ID: LIB3072-008-Q1-E1-F4
ggcggcgggatcatcacgagattgcaaaatgaagttcaacattgcaaatcccaccactgggtgccagaagaagctggaaatcgatgacgacctgaagcttcgggcattttgggacaagaggatctcccaggaggtccttggtgacgccctgggtgaggagtttaaaggatatgttttcaaaaccactggtgggtgtgacaaacaaggattcccaatgaagcacggagtgttgacccctggtcgtgttcgactcttgctccatagaggaactccttgtttccgtggatatggaaggcgcactggagagcgtagaacgacatctgttcgtgggtgcattgtcagcccagacctctctgttttgaacctgg

SEQ ID NO: 3224 - DNA, 166 bp, Glycine max
  Clone ID: LIB3072-008-Q1-E1-F5
gaggcagaatctacgggtaacgcctccattatcagtcctttttcaggcgtggtttttacctaaccctacaattcgccgatccttccagttggggtttttcgctttcagcgaagagcggtgtatatagaaaccctattccccctatgcatcagcggaattgaatata

SEQ ID NO: 3225 - DNA, 170 bp, Glycine max
  Clone ID: LIB3072-008-Q1-E1-F9
aagctttggaggttctgggctcaagaaaactggaaagaaataggggctctttatcatgattgtacacatctaatattgagccctgtagtttactaccatgatatcttctgtcttattgtggccttctttattgctctaaggttagtactgcactgaggtatttcgtgatc

SEQ ID NO: 3226 - DNA, 121 bp, Glycine max
  Clone ID: LIB3072-008-Q1-E1-G11
aggcagtgattcagtctctcagtatattaattcatcacccacagtttctcacttttccttcttagttcttcccttttcctttgtttctaccaaaacagcaaatcaaaacaaaccccttttg

SEQ ID NO: 3227 - DNA, 77 bp, Glycine max
  unsure at all n locations
  Clone ID: LIB3072-009-Q1-E1-A10
aagcatatcaataagcggacaaaacagaaaaatgcccantaaaaaaaaaaaagcggccgctctagaggatccaagct

SEQ ID NO: 3228 - DNA, 358 bp, Glycine max
  Clone ID: LIB3072-009-Q1-E1-A11
gacacaactaactaagaaagtcttccatagccccccaaaagtgaagagcaccatcttctttgctctctttctcttttgtgccttcaccacctcatacctagcttcagccatcgctgatttcgtgctcgataataaaggtaaccctcttgaaaatggtggcacatattatatcttgtcagacataacagcatttggtggaataagagcagccccaacgggaaatgaaagatgccctctcactgtggtgcaatctcgcaatgagctcgacaaagggattggcataatcatctcgtccccatatcgaatccgttttatcgccgaacgccatcctttgagccttaagttcgattcatttgca

SEQ ID NO: 3229 - DNA, 63 bp, Glycine max
  Clone ID: LIB3072-009-Q1-E1-A3
ggggccttcactctgaaccaaataccatagtcttctctttgtccgtgacaaaacagttcccgc

SEQ ID NO: 3230 - DNA, 199 bp, Glycine max
  Clone ID: LIB3072-009-Q1-E1-B3
ggaaaaccctaaatctcagtttttcttatacagccactctttcattctcattgccgtcacacagagagagaagagacaatgaagtttaacccaagggttccctcaagccgtcaaaagacccgcagggtacatttaagggccctttaaagtgtgtctcgtgtcgagaaaagcgcctctctcgagagatatcccggcgaaa

SEQ ID NO: 3231 - DNA, 387 bp, Glycine max
  Clone ID: LIB3072-009-Q1-E1-B6
gacagcaaaaacaattaataaagatgagtttgaagaacaacatggtggtgctaaaggtgtgttcgttgcttcttttccttgtgggggttacagctgcacgcatggaactgagcttcttcaaaagtgatcagtcatcaagttatgatgatgatgagtattcaaaaccatgctgtgatctctgcatgtgcacacgctcaatgcctcctcaatgcagctgtgaagatattaggctgaattcatgccactcagattgtaagagctgtatgtgcacacgctcacagccaggacagtgtcgttgtcttgacaccaacgacttctgctacaaaccttgcaagtccagagatgactagaaaaactaatagctctctcaaatggacgaagcccctt

SEQ ID NO: 3232 - DNA, 312 bp, Glycine max
  unsure at all n locations
  Clone ID: LIB3072-009-Q1-E1-B9
gacagcanaaacaattaataaagatgagtttgaagaacaacatggtggtgctaaaggtgtgtttgttgcttcctttccttgtgggggttacagctgcacgcatggaactgagcttcttcaaaagtgatcagtcatcaagttatgatgatgatgagtattcacaaccatgctgtgatctctgcatgtgcacacgctcaatgcctccccaatgcagctgtgaagatattaggctgaattcatgccactcacattgtaagagctgtatgtgcacacgctcacaagcaggacactgtccttgtcctgacaccaaac

SEQ ID NO: 3233 - DNA, 339 bp, Glycine max
  Clone ID: LIB3072-009-Q1-E1-C11
gactctcatcacattattctatatcaattttggttaagagtcttgaaaaagcaagagaacaaaaaataccaaccatggcaaccatttctgatcaacctagagggtcctactcctatggaacctcatatggagcaccctatggaaccacgtatgagaccaacaccagcattaacaacccaccttcacgccaaacagtgaagttcataactgctgccactattggcatcacactcttgctcctgtctgggttgacactcacagggactgtcataagtttgatgagtgcaaaccctcctcttgttatcctcagccccatccttggtcctgttgcctttgtgc

SEQ ID NO: 3234 - DNA, 333 bp, Glycine max
  Clone ID: LIB3072-009-Q1-E1-C4
gacagcaaaaacaattaataaagatgagtttgaagaacaacatggtggtgctaaaggtgtgtttgttgcttcttttccttgtgggggttacagctgcacgcatggaactgagcttcttcaaaagtgatcagtcatcaagttatgatgatgatgagtattcaaaaccatgctgtgatctctgcatgtgcacacgctcaatgcctcctcaatgcagctgtgaagatattaggctgaattcatgccactcagattgtaagagctgtatgtgcacacgctcacagccaggacagtgtcgttgtcttgacaccaacgacttctgctacaaaccttgca

SEQ ID NO: 3235 - DNA, 272 bp, Glycine max
  Clone ID: LIB3072-009-Q1-E1-C5
gctccaccgtgcacctaatttctctcccaagggatttcaacaagttcaggtccatgcacatgtatgacatagttgtcaagaacaagaactacttcgaagttagggatatgtaataaggatttgtggaaaaaactatgcatggcccaaattgggcatggtatgtataaccttcttgatgtgtctcactcgatttgtgtcaaccctacaaaatttaattcttgggagagcaattttctctcttaattttttcttctgatttttatatctacatg

SEQ ID NO: 3236 - DNA, 272 bp, Glycine max
  Clone ID: LIB3072-009-Q1-E1-C8
tctttcaactaatcaactctccaaatcacatgtggttgaaatggttagggtcctgaatggtccggaaaaggataatgtatttcgaggatttacaccagtagattgcaccatctgacctgttgaaagcttccacagcacactacttgctccacaacaaggcacaattcactggccgtcgttttaaaaaatacctgactctcaaaaggatgcaatcttacatattcatccatgtgaagtaaaacctcttctatactgtcagctaaattcaattc

SEQ ID NO: 3237 - DNA, 383 bp, Glycine max
  unsure at all n locations
  Clone ID: LIB3072-009-Q1-E1-E3
gaatcctctgttgtttctcagccgcctcggctagggttcggaaacgaagaagggttctgttttcttttcgcgatgagggccaagtggaagaagaagcgtatgaggaggctgaagaggaagcgccgaaagatgagacagagatccaagtagtgcgttaaacctagtttgtttccgttgcttttacaattgcttatgttgtcaaataggacacccagttgttagtggcactggtctctcctttttgatgttttgatacattttgttggattttatttcgtcttatgttcttagctgaaaacaatgctgttactgtgtttgcgaatcaacaggatatcttggttgtaaaaaaaaaaaanaanataaaaaaaaaaagcgggcgctct

SEQ ID NO: 3238 - DNA, 362 bp, Glycine max
  Clone ID: LIB3072-009-Q1-E1-E6
ggccctttcgcctacgcactgcggagagagaaattgagtttccgagataaccagttttctctttgattcatcaatggcaactgcgagggccgtgaaggatgtttcgcctcacgatttcgtgaaggcttatgcttcccacctcaagcgttccggcaagatggagcttcctgagtggaccgatattgtaaaaacagcaaaatttaaggagttggctccatatgatcctgactggtactacattagggctgcctcaatggcaagaaagatctatttgagaggtggtcttggtgttggtgctttccagaggatctatggtggaagcaaaagaaatggaagccgtcccccacatttctgcaagagca

SEQ ID NO: 3239 - DNA, 131 bp, Glycine max
  Clone ID: LIB3072-009-Q1-E1-E7
gactttgagttcgaactaaacaattcaattcaatctgcctcgatcatggagaggaaaacatttgggtttttgtccttgcccctcctggccttacctccggatttgccggtgaaaaaacaaaaggcaaagaa

SEQ ID NO: 3240 - DNA, 364 bp, Glycine max
  Clone ID: LIB3072-009-Q1-E1-F5
gacagcaaaaacaattaataaagatgggtttgaagaacaacatggtggtgctaaaggtgtgtttgttgcttcttttccttgtgggggttacagctgcacgcatggaactgagcttcttcaaaagtgatcagtcatcaagttatgatgatgatgagtattcaaaaccatgctgtgatctctgcatgtgcacacgctcaatgcctcctcaatgcagctgtgaagatattaggctgaattcatgccactcagattgtaagagctgtgtgtgcacacgctcacagccaggacagtgtcgttgtcttgacaccaacgacttctgctacaaaccttgcaagtccagaaatgactaaaaaaactaatagct

SEQ ID NO: 3241 - DNA, 307 bp, Glycine max
  Clone ID: LIB3072-009-Q1-E1-G10
gggtatgaagtgattgactttttttcttcttctattctcacacatacccatctactccttccctcatggctgaacaatcttccaactccatttacgatttcactgtcaaggacatcagtggaaatgatgtgagtctgaatgattacaacgggaacgttctactgattgtgaatgtcgcctctcaatgtggtttgacacagacaaattacaaacaattgaatgtattgtacgagaagtacaagaatcaacgatttgaaatcttggcatttccgtgcaaccagtttgctggacaggaaccaagaaaaca

SEQ ID NO: 3242 - DNA, 76 bp, Glycine max
  Clone ID: LIB3072-009-Q1-E1-G2
gatagcagcatcatacaaagcattgaattcaaaaacttaagttcattccttgtgttttgctttcttcctcaaaacc

SEQ ID NO: 3243 - DNA, 178 bp, Glycine max
  Clone ID: LIB3072-009-Q1-E1-G3
gcgggttaaggttgtcatcataattatgcagacaatgtggaaattttgtttgttggattttagtgcagattctggttcttatatgaaaaacagcatctcttttagcaaaaagagaaaaaaaaaaaaaaaaaagaaagcggcagcacaagatgattcaagggtaccgacgcgggaattc

SEQ ID NO: 3244 - DNA, 386 bp, Glycine max
  Clone ID: LIB3072-009-Q1-E1-G4
ggagcagaatcttcaggccaagccaggtaagcacaaccaaagcaacaccccaaatggcttcagcttctgttcccatggcgttgtcactgagctctgttaccaacaacaacaagccttcatccgaagccttcttcaggccactacccctacgccaaccaaagaggaccctcttcaccacgaaggcagtgtcaaactccaagcctcaaatcaatgcatctttgaaggagaaggcagttgccggactcacagcagcttctgtgacagcatctatggtggttccggaggtggctcatgctgctggatatgagttctccccttccctaaagaactttctactcagcatctttgctggtggggttgttctagcagccatatttggagccgtt

SEQ ID NO: 3245 - DNA, 83 bp, Glycine max
  Clone ID: LIB3072-009-Q1-E1-H10
cgggaaaaaaattaatgtataaaacacactccacctcatcgcacccaccaaaaaaaccggccgctctacacgatccaagctta

SEQ ID NO: 3246 - DNA, 79 bp, Glycine max
  Clone ID: LIB3072-009-Q1-E1-H11
tcacgcatgataccgacacctagttgctcctgccttgcattttcaacacgcagccgcccttgacgatcaagcatacgtc

SEQ ID NO: 3247 - DNA, 315 bp, Glycine max
  Clone ID: LIB3072-009-Q1-E1-H4
gacagcaaaaacaattaataaagatgagtttgaagaacaacatggtggtgctaaaggtgtgtttgttgcttcttttccttgtgggggttacagctgcacgcatggaactgagcttcttcaaaagtgatcagtcatcaagttatgatgatgatgagtattcaaaaccatgctgtgatctctgcatgtgcacacgctcaatgcctcctcaatacagctgtgaagatattaggctgaattcatgccactcagattgtaagagctgtatgtgcacacgctcacagccaggacagtgtcgttgtcttgacaccaacgact

SEQ ID NO: 3248 - DNA, 255 bp, Glycine max
  Clone ID: LIB3072-009-Q1-E1-H6
ggtgtcagagagaaaaaaaatagactccaaaaatcactttcaactcagagatacacaatggcaaaagcttcaatgttgtttccttgcttaatagttttatttctcataacatatgcaacaggttttgtggatgcatgtaactacccgtgcaaattcccaagtgattgtaataatttacgatgtcttcgccctgattgtaaaaagtattgcctcaatggatgttgcctttgcaattgtcgtcttattccacctagt

SEQ ID NO: 3249 - DNA, 362 bp, Glycine max
  Clone ID: LIB3072-010-Q1-E1-A6
ggagcaaacaaaccgaaacacattcaccacgatggcgaccaaaacgatggaggtggtgaagggtctggacgtgaaacggtacatgggtcggtggtacgagattgcgtgtttcccgtcgaggtttcagcccagtgacggcgtcaacaccagagccacctacgctctcagagatgacggcaccgtcaacgttctcaatgagacttggagtggcggcaaaagaagcttcattgagggcactgcttataaggccgatcccaacagtgacgaggccaagttgaaggtcaggttctgggtgcctccgttcttacccctttttcccgttactggggattactgggttttgtacattgaccaagattatc

SEQ ID NO: 3250 - DNA, 426 bp, Glycine max
  Clone ID: LIB3072-010-Q1-E1-B2
agaaggggagggttttgcgctgttgttgctgctcatcctccgtaacctccgagctctgcaccgaagaacgaagccatggggaagacacatggaatgggatctgctcgcaagctcaagtcccaccgcaggaggcaaaggtgggctgacaagtcatacaagaaatcacatcttggaaatgaatggaagaaaccttttgctggttcatcccatgccaagggaattgtccttgaaaagataggtattgaggctaagcagcccaactctgccattcgtaagtgtgccagggttcaacttatcaagaatgggaagaagattgccgcttttgtccctaatgacggttgcttgaactacattgaagagaatgacgaagtcttgattgctggatttggacgaaaaggtcatgctgtgggagatattcctggtgtc

SEQ ID NO: 3251 - DNA, 309 bp, Glycine max
  Clone ID: LIB3072-010-Q1-E1-B8
gacagcaaaaacaattaataaagatgagtttgaagaacaacatggtggtgctaaaggtgtgtttgttgcttcttttccttgtgggggttacagctgcacgcatggaactgagcttcttcaaaagtgatcagtcatcaagttatgatgatgatgagtattcaaaaccatgctgtgatctctgcatgtgcacacgctcaatgcctcctcaatgcagctgtgaagatattaggctgaattcatgccactcagattgtaagagctgtatgtgcacacgctcacagccaggacagtgtcgttgtcttgacacca

SEQ ID NO: 3252 - DNA, 75 bp, Glycine max
  Clone ID: LIB3072-010-Q1-E1-B9
tgggaccagtcaaattctttgtagtaataactaccataaaataaattcttttttaaaaattcacataatacttta

SEQ ID NO: 3253 - DNA, 304 bp, Glycine max
  Clone ID: LIB3072-010-Q1-E1-D10
gacccacagggaggcgaacagagaaactcagagacccgaaggcagatttcaagatgaagttcaacattgcgaatcccaccaccggttgtcagaagaagctggagatcgatgatgacctgaagctgcgagcattttgggacaagaggatctcacaagaggttgttggtgatgctctgggtgaggaattcaaaggttatgtcttcaaaattactggaggttgcgacaagcaaggatttccaatgaagcaaggagtgttgacccctggtcgtgttcgcctcttgctgcatacaggaactccttgttt

SEQ ID NO: 3254 - DNA, 360 bp, Glycine max
  Clone ID: LIB3072-010-Q1-E1-E1
ggggaaacaaaaacaaaacatttcgtccgaaactaatataacgtgttcctccttggaagaagccatagccataacatagccaccagaaaacaaaacccaccttagttattaaaagaaccaaagaaaaaaaatcaaaaaaaaagaaggcggcggcccaaaaggttcaaacctaaggtatccttgaagggaagttcaaaccccttcaaaatggtcaccaaaattaaattcacgggccgccgtttaacaacgtcctgctgggaaaaaccctgcggttaccaaatttaacccccttgaacaaaatccccctttcgcaagctggggtattaccaaaaaggcccgaaccgttggcccttccaaaaa

SEQ ID NO: 3255 - DNA, 384 bp, Glycine max
  Clone ID: LIB3072-010-Q1-E1-E5
gatcgcacaacattattctttcgcaccttgcagaatcaattttctctctcaatcgtccttcatggctcgtaccaagcaaaccgctcgcaaatccaccggtgggaaggctcctaggaagcaactcgccaccaaggctgcaagaaaatctgcacctaccaccggtggagtcaagaagcctcatcgctatcgtcctggaactgttgctcttcgtgagatccgaaaataccaaaagagcacagagcttctgatccgcaagctcccctttcagcgtcttgttcgtgaaatcgcgcaagacttcaagactgatttgaggttccagagtcacgcggttcctgcgcttcaggaagctgcgggggcttacttggtgggtttgtttgaagacac

SEQ ID NO: 3256 - DNA, 360 bp, Glycine max
  Clone ID: LIB3072-010-Q1-E1-F5
gacagcaaaaacaattaataaagatgagtttgaagaacaacatggtggtgctaaaggtgtgtttgttgcttcttttccttgtgggggttacagctgcacgcatggaactgagcttcttcaaaagtgatcagtcatcaagttatgatgatgatgagtattcaaaaccatgctgtgatctctgcatgtgcacacgctcaatgcctcctcaatgcagctgtgaagatattaggctgaattcatgccactcagattgtaagagctgtatgtgcacacgctcacagccaggacagtgtcgttgtcttgacaccaacgacttctgctacaaaccttgcaagtccagagatgactagaaaaactaat

SEQ ID NO: 3257 - DNA, 300 bp, Glycine max
  Clone ID: LIB3072-010-Q1-E1-G10
taccgctgctacaatacgacagaatgggacagcaacaacagttaataacgatgactttgatgatcaacatggtggtgctaaaggtgtgtttgttgcatcttttccctgtgggggttacatctgcacgcatggaactgagcttcttcaaaactgatcagtcatcaagttatgatgatgatgagtattcagaaccatgctgtgatctctgcatgtgcacacgctcaatgcctcctcactgcagctgtgaagatactacgctgaattcatgccactcagattgtaagagctgtatgtgcacac

SEQ ID NO: 3258 - DNA, 315 bp, Glycine max
  Clone ID: LIB3072-010-Q1-E1-G8
gacagcaaaaacaattaataaagatgagtttgaagaacaacatggtggtgctaaaggtgtgtttgttgcttcttttccttgtgggggttacagctgcacgcatggaactgagcttcttcaaaagtgatcagtcatcaagttatgatgatgatgagtattcaaaaccatgctgtgatctctgcatgtgcacacgctcaatgcctcctcaatgcagctgtgaagatattaggctgaattcatgccactcagattgtaagagctgtatgtgcacacgctcacagccaggacagtgtcgttgtcttgacaccaacgact

SEQ ID NO: 3259 - DNA, 140 bp, Glycine max
  Clone ID: LIB3072-010-Q1-E1-H7
tccacacaagggtatctagcccaaccagcatacgacgccttgggacaacatagacaattgcggccgctctatatgatccaagcttaggtacgtgtgcatgtgacggggtagcgcgcctaccttgtcacggaaattcaatt

SEQ ID NO: 3260 - DNA, 287 bp, Glycine max
  Clone ID: LIB3072-011-Q1-E1-B5
gagagaaagagagagaaagatgtcgaagcgtggtcgtggtggttcggcggggaacaagttccgcatgtcgctgggtcttccagtggcggcgacggtgaactgcgccgacaacacgggggcgaagaacctctacatcatttcggtgaaagggatcaaaggccgtttgaaccgtcttccctcggcctgcgttggcgacatggtgatggccaccgtgaagaagggaaaacccgatctgaggaagaaggtcttgccagctgtcatcgttcgccagcgcaagccatggcgcc

SEQ ID NO: 3261 - DNA, 306 bp, Glycine max
  Clone ID: LIB3072-011-Q1-E1-D12
gacagcaaaaacaattaataaagatgagtttgaagaacaacatggtggtgctaaaggtgtgtttgttgcttcttttccttgtgggggttacagctgcacgcatggaactgagcttcttcaaaagtgatcagtcatcaagttatgatgatgatgagtattcaaaaccatgctgtgatctctgcatgtgcacacgctcaatgcctcctcaatgcagctgtgaagatattaggctgaattcatgccactcagattgtaagagctgtatgtgcacacgctcacagccaggacagtgtcgttgtcttgaca

SEQ ID NO: 3262 - DNA, 84 bp, Glycine max
  unsure at all n locations
  Clone ID: LIB3072-011-Q1-E1-D6
gtgcgtggctaatggataaagaattaaaataaaaaaaatttcataagaatttataattttattatcttaacanaaaaaaaagaa

SEQ ID NO: 3263 - DNA, 164 bp, Glycine max
  Clone ID: LIB3072-011-Q1-E1-E1
tacggctgccacaacaccacacaaggggggggacaacccctccccatcacaaaactcaccaagcggccgctccacaggactcaagcttagatacccgttcacgcaacctcacacctcatctaaagcgtcacctaaactcaattcaccggtcatctttttacaac

SEQ ID NO: 3264 - DNA, 355 bp, Glycine max
  Clone ID: LIB3072-011-Q1-E1-F12
gacggcaaaaacaattaataaagatgagtttgaagaacaacatggtggtgctaaaggtgtgtttgttgcttcttttccttgtgggggttacagctgcacgcatggaactgagcttcttcaaaagtgatcagtcatcaagttatgatgatgatgagtattcaaaaccatgccgtgatctctgcatgtgcacacgctcaatgcctcctcaatgcagctgtgaagatattaggctgaattcatgccactcagattgtaagagctgtatgtgcacacgctcacagccaggacagtgtcgttgtcttgacaccaacgacttctgctacaaaccttgcaagtccacagatgactagaaaaa

SEQ ID NO: 3265 - DNA, 203 bp, Glycine max
  unsure at all n locations
  Clone ID: LIB3072-011-Q1-E1-F3
aggtaccagagatgcctgccacaaatgacaacaaaagaaaatggaggacagaaaccttattcagtttcctatattcccttaggttgcttccaatagcataggcagtagcatagcagcagattaaaaaaaaagagagggtaaaattacaacataagagcttttcttttttcaatattttggaaaaaatgaaaagagaananggg

SEQ ID NO: 3266 - DNA, 62 bp, Glycine max
  Clone ID: LIB3072-011-Q1-E1-G9
tctcttctttctcgcctcatttttttttttatctcttctctcctaaaaacaatgaccaaatt

SEQ ID NO: 3267 - DNA, 278 bp, Glycine max
  Clone ID: LIB3072-011-Q1-E1-H6
agccgtcacttttggggaagaggtcgagtttcacagcagcaatggtgtacgtcaaggctcagaaatcaaaagcctacttcaagagatatcaagtcaagttcaagagaagaagagagggaaaaaccgattaccgtgccaggattcggttgattaatcaggacaagaacaaatataacactccgaaataccgatttgttgttcgctttagcaacaaggacattgttgcacaaataatatctgctagcattgctggcgatattgttcttgctgcagcatat

SEQ ID NO: 3268 - DNA, 319 bp, Glycine max
  Clone ID: LIB3072-011-Q1-E1-H8
gattcacacaactaactaagaaagtcttccatagccccccaaaaatgaagagcaccatcttctttgctctctttctcttttgtgccttcaccacctcatacctaccttcagccatcgctgatttcgtgctcgataatgaaggtaaccctcttgaaaatggtggcacatattatatcttgtcagacataacagcatttggtggaataagagcagccccaacgggaaatgaaagatgccctctcactgtggtgcaatctcgcaatgagctcgacaaagggattggaacaatcatcccgtccccatatcgaatccgttttat

SEQ ID NO: 3269 - DNA, 142 bp, Glycine max
  Clone ID: LIB3072-011-Q1-E1-H9
gaggcaaaattgggcttagcgtgagtgtcacgctaagcactgttggaatgaaaaaagcctcaaagagcgagactaatttaagtgtgctcgctaagcgcggatggtcggcttagcgagttcatctaatcccaaacaaacgaaa

SEQ ID NO: 3270 - DNA, 379 bp, Glycine max
  Clone ID: LIB3072-012-Q1-E1-A7
gacagcataaacaattaataaagatgagtttgaagaacagcatggtggtgctaaaggtgtgtttgttgcttcttttccttgtgggggttacagctgcacgcatggaactgagcttcttcaaaagtgatcagtcatcaagttatgatgatgatgagtattcaaaaccatgctgtgatctctgcatgtgcacacgctcaatgcctcctcaatgcagctgtgaagatattaggctgaattcatgccactcagattgtaatagctgtatgtgcacacgctcacagccaggacagtgtcgttgtcctgaaaccaacgacttctgctacaaaccttgcaagtccagagataactagagagaactaatagctctctcaaatggacg

SEQ ID NO: 3271 - DNA, 246 bp, Glycine max
  Clone ID: LIB3072-012-Q1-E1-B3
gacagcaaaaacaattaataaagatgagtttgaagaacaacatggtggtgctaaaggtgtgtttgttgcttcttttccttgtgggggttacagctgcacgcatggaactgagcttcttcaaaagtgatcagtcatcaagttatgatgatgatgagtattcaaaaccatgctgtgatctctgcatgtgcacacgctcaatgcctcctcaatgcagctgtgaagatattaggctgaattcatgccact

SEQ ID NO: 3272 - DNA, 205 bp, Glycine max
  Clone ID: LIB3072-012-Q1-E1-B5
gattcacacaactaactaataaagtcttccatagccccccaaaaatgaagagcaccatcctctttgctctctttctcttttgtgccttcaccacctcatacctaccttcagccatcgctgatttcgtgctcgataatgaaggtaaccctcttgaaaactgtggcacatattacatcttgtcagacataacagcatttggtggaac

SEQ ID NO: 3273 - DNA, 89 bp, Glycine max
  Clone ID: LIB3072-012-Q1-E1-E9
gaatcaagcaacttctgaagcagacattgaattgttgtcacattcaggacctacaacttcaagcatggttgcaagttcatctctggcac

SEQ ID NO: 3274 - DNA, 240 bp, Glycine max
  Clone ID: LIB3072-012-Q1-E1-H8
taccgctgcttgatgactacagtcggggattcttctcacttgttgttacgttcattaacaacatgaatctgattacgccctttattttgcgttgttttctgtatggggtgatcctcatccctgttgtggtcgttgataagccaccgtacgatgaggaaaacggaacaactggaattcaccaattgtttaatgactgcgattacgtgcagggaaccctttctagcggattgaaattccaac

SEQ ID NO: 3275 - DNA, 62 bp, Glycine max
  Clone ID: LIB3072-014-Q1-E1-A10
cgggaaacaccaaccatcacacagccccgcgccatcacgcgaaacccgcggccgccgctctt

SEQ ID NO: 3276 - DNA, 378 bp, Glycine max
  Clone ID: LIB3072-014-Q1-E1-B10
gacagcaaaaacaattaataaagatgagtttgaagaacaacatggtggtgctaaaggtgtgtttgttgcttcttttccttgtgggggttacagctgtacgcatggaactgagcttcttcaaaagtgatcagtcatcaagttatgatgatgatgagtattcaaaaccatgctgtgatctctgcatgtgcacacgctcaatgcctcctcaatgcagctgtgaagatattaggctgaattcatgccactcagattgtaagagctgtatgtgcacacgctcacagccaggacagtgtcgttgtcttgacaccaacgacttctgctacaaaccttgcaagtccagagatgactagaagaactaatagctctctcaaatggacg

SEQ ID NO: 3277 - DNA, 134 bp, Glycine max
  Clone ID: LIB3072-014-Q1-E1-B4
acagcgtcagcacacgactcagtggtgctgctacaagacgacgacagggtgctgctgctacaagacgacaacagggtggtgctgctacaagacgacaacagggtgctgctgcggcaagacgacaacagggtgct

SEQ ID NO: 3278 - DNA, 304 bp, Glycine max
  Clone ID: LIB3072-014-Q1-E1-C2
gattcacacaacggactaagaaagtcttccatagccccccaaaaatgaagagcaccatcttctttgctctctttctcttttgtgccttcaccacctcatacctaccttcagccatcgctgatttcgtgctcgataatgaaggtaaccctcttgaaaatggtggcacatattatagcctgtcaaacaaaacaacaattggtggaataagaacacccccaacggaaattaaaagatccctcccactgtggtgcaatctcgcacatagccccacaaagggatttggacaatcaactcgtccccaaat

SEQ ID NO: 3279 - DNA, 148 bp, Glycine max
  Clone ID: LIB3072-014-Q1-E1-C4
gaaaaaaaagaaattaataataaattaagaataaagccgaaaaaaaaaaaaaaaaaaaaaaaaaaaagcgggggcgctctaggatatacgcgcacatatacgtgtacacgacatctcatatctcctctagagtcacacatattcacat

SEQ ID NO: 3280 - DNA, 212 bp, Glycine max
  Clone ID: LIB3072-014-Q1-E1-C8
ggagtttcggttgagacatatcaaaaaaaaaaaacaaacaaaaaaaaaaaaacgggcgccccaaaaggttcaagcctaacttccccttccatccaacttcaaacccctccaaaatggcccccaaattccattccatggcccttcgtttaacaccttcttaacgggaaaaccccggcgtttacccaccttatcccccttgacaaaacccccct

SEQ ID NO: 3281 - DNA, 151 bp, Glycine max
  Clone ID: LIB3072-014-Q1-E1-D1
taccgctgctataagacgacatatgggtacggctgctagaatactattgaacggtacggttgcaacaatatgtcacccagcgagacccgaggagcaaccttttatcctgcaactgtaataattgactgccgttctaaaagctccatgctta

SEQ ID NO: 3282 - DNA, 395 bp, Glycine max
  Clone ID: LIB3072-014-Q1-E1-D3
gaaggaagagtgagcgtgaaagatgccttcggcgaggctttcagggtcaccaaggctcgacgttgctattgacatgggcaatccatttctcaatctcactgttgatggtttccttaagatcggagctgtcgcagccacgcgatcagctgctgaagatacttatcatattatccgaaacgggaatatctcaagtcatgatttcgagaaaacgttgaagaagatgtgtaaagaaggtgtatattggggaactttagctggtgtttatcttggaatggaatatggggtagagaggatccgtggcaccagagattggaagaatgccatgattgggggtgcactaactgcgactctgttatctgttgccaccaccaacaacagagacaaaattgtacctg

SEQ ID NO: 3283 - DNA, 293 bp, Glycine max
  Clone ID: LIB3072-014-Q1-E1-D8
ggaaatagggatctggtgtgggtgtgggtggaggtgagggttggttcatttgatctgcgactgagagaagagaagagaattgtgatggggggaggacagggtcacggcacaacctacaaaggtgttaccattcatcagccaaagcgctggcacactatcaccggcaagggtttgtgcgcggtcatgtggttttgggtattctacagggcaaagcaagatagtcctgttgtattgggctggagacatccttgggagggtcaccatgattatcatggcaagggccattaacattc

SEQ ID NO: 3284 - DNA, 199 bp, Glycine max
  Clone ID: LIB3072-014-Q1-E1-D9
gtcacacaactaactaagaaagtcttccatagccccccaaacatgaagagcaccatcttctttgctctctttctcttttgtgccttcatcagctcatacctaccttcagccatcgctgatttcgtgctcgataatgaaggtaaccctcttgaaaatggtggcacatattacatcttgtcagacataacaccatttcgtg

SEQ ID NO: 3285 - DNA, 145 bp, Glycine max
  Clone ID: LIB3072-014-Q1-E1-E8
ccaccggaggggagacgctgcgcgaagcagacacactgggggggtacacaaaaaaaaaaaaaaccggccgctcttaaagatccaggcctaccttacccttgcatgcaacgttctacctcttccaaagtgtcccctaaattcaatt

SEQ ID NO: 3286 - DNA, 201 bp, Glycine max
  Clone ID: LIB3072-014-Q1-E1-F12
tgctagaatactatagtaagggatgcaactgaatatttaacaaaagccatttccatagcagcctaagactatcaatatcactagcgctgtgcgctatctttccactttacgccttcagctcatacctaacttctgccaccgctcagcatgtgctcgacttctattgtcatccgattctgataagtttcatagactacgttt

SEQ ID NO: 3287 - DNA, 163 bp, Glycine max
  Clone ID: LIB3072-014-Q1-E1-F3
cggtaccgctgccacaataccacagaatgggacagcacagacaattgggtaccatcactttcaaaaacaacatggtggtcctaaatgtctctttgttgcttcttttccttcttggggttacatctcctcacattgatctcaccttcttcaaacctcatcactc

SEQ ID NO: 3288 - DNA, 71 bp, Glycine max
  Clone ID: LIB3072-014-Q1-E1-F6
tacaggatgcaagcttacgtactcgtggaggcgacgtcataacacttctacaatatcacctaaattcaatt

SEQ ID NO: 3289 - DNA, 321 bp, Glycine max
  Clone ID: LIB3072-014-Q1-E1-F7
gacagcaggggcaattaataaagatgagtttgaagaacaacatggtggtgctaaaggtgtgtttgttgcttcttttccttgtgggggttacagctgcacgcatggaactgagcttcttcaaaagtgatcagtcatcaagttatgatgatgatgagtattcaaaaccatgctgtgatctctgcatgtgcacacgctcaatgcctcctcaatgcagctgtgaagatattaggctgaattcatgccactcagattgtaagagctgtatgtgcacacgctcacagccaggacagtgtccttgtcctgacaccaacgacttctgct

SEQ ID NO: 3290 - DNA, 461 bp, Glycine max
  Clone ID: LIB3072-014-Q1-E1-H1
ccggggtcacccacgcgtccggaaagaagacgacagaaggggaacgaacaaaacaaaaaaccttcacctactactttataaaaaccgtcccttctcttctcctttcccaaatcaattattcatcactgtgttgtgttgtgttgtgttgtgttgttccttcgttcgttccctccactaagcaaaacccaaaagacattcattttcgtttcgtttgtatagagcatggccggtggttctaccagaaaacattgtttctccaaaaaggacaatttgaaccctgggtattctgggcacaacaacttcaatcattaccaacacggtttaatttctaggacattgggttatggcactttctacaaccgacttgtgaggagccattcgattttctcgccgagatctgggagattttatgatgccagattcgaagaccaccaaccccactttcttcaagctcgttctct

SEQ ID NO: 3291 - DNA, 51 bp, Glycine max
  Clone ID: LIB3072-015-Q1-E1-A1
gaacccccttcataaaaaaaatttctgtatataatatacagcaccctttcc

SEQ ID NO: 3292 - DNA, 255 bp, Glycine max
  Clone ID: LIB3072-015-Q1-E1-C10
gacagcaaaaacaattaataaagatgagtttgaagaacaacatggtggtgctaaaggtgtgtttgttgcttcttttccttgtgggggttacagctgcacgcatggaactgagcttcttcaaaagtgatcagtcatcaagttatgatgatgatgagtattcaaaaccatgctgtgatctctgcatgtgcacacgctcaatgcctcctcaatgcagctgtgaagatattaggctgaattcatgccactcagattgta

SEQ ID NO: 3293 - DNA, 179 bp, Glycine max
  Clone ID: LIB3072-015-Q1-E1-D4
ggggaaattaaataaatgatgtatgtacctcttgcctatgtaggtttgtgtgttttgttttgttgtctagctttggttattaagtagtagggacgttcgttcgtgtctcaaaaaaaggggtactaccactctgtagtgtatatggatgctggaaatcaatgtgttttgtatttgttcac

SEQ ID NO: 3294 - DNA, 392 bp, Glycine max
  Clone ID: LIB3072-015-Q1-E1-D9
caacgccaaaaacaacaaatatgaaagccttgtgtcaaatatattaccaaggatgcaaaaggaaataacccatgaatttagcaaccgtcaaactgatgcaatctagcatgaggtatgtctcaaacagaaaaaaacaaaatttcacttcagcggtgcaacaatactacataaattataaccagtacatctaggtgtttgtcgctctagtgtaaatctgctgactagcatgggcagacaccatccttattgaacctctggccatcaattccctaatagccttccttgcaagtgatccattaatcctcaaacggtcagagagaatggaaggagtaatgagtttgtatttgggtgcctcggagaggagcttgtcataggtagcctgattgaacagc

SEQ ID NO: 3295 - DNA, 63 bp, Glycine max
  Clone ID: LIB3072-015-Q1-E1-E4
tgaggacgaacacacccaaaataaatgcctaacacgaataaaaaaaaaaccggccgccctaaa

SEQ ID NO: 3296 - DNA, 131 bp, Glycine max
  Clone ID: LIB3072-015-Q1-E1-E6
ggtaaacaaaaaccatcaccaaaaaaaaaaaaaaaaaaaaaaaaaaaaaagcggccgccctaaaggttcaaaccttacttacccttgcaggcaacttcatacctcttcaaaattttcacctaaattcaatt

SEQ ID NO: 3297 - DNA, 83 bp, Glycine max
  Clone ID: LIB3072-015-Q1-E1-F3
ggaccttaatgaatcaatcacttcaacaaggataaaaaaaattttaagaagaatttaacgagagattaaattctcctcattag

SEQ ID NO: 3298 - DNA, 388 bp, Glycine max
  Clone ID: LIB3072-015-Q1-E1-G11
gggttcaagtggttgaattgttgttgttgtaactcgttcttcttcttttgttgttctgtgtttgtgtttgttttttctctcacctgaaaatgtcttgctgcggtggtaactgtggttgcggaagctcctgcaagtgcggcaacggctgcggaggctgcaagatgtacccagacttgagctacactgagtcaaccaccaccgagaccttggtcatgggagtggcacctgttaaggctcaatttgagggtgctgaaatgggtgtgcccgctgagaacgatggctgcaaatgtggaccaaactgctcctgcaacccctgcacttgcaagtgacgtgttgggagagcaagcttcaagcagagataaccccttagtaagaataatgaataact

SEQ ID NO: 3299 - DNA, 381 bp, Glycine max
  unsure at all n locations
  Clone ID: LIB3072-015-Q1-E1-H1
gactgcaactttgctctctgtgaggtttcaatttctaattagggtttcgcttagagtaaccaataaccatgggagtcttcacctttgtcgtccgcaaatccggcagcgaatggagcgccaagcaacattccggcgacatcgaggcctccgccgattccaccttcgatctccaacggaagctcgtgcaagccgctctcgccgttgattcctccggtggagttcagtcctccttctctcccgtgtctcctacctccgctgtgttccaggtgatagtgggtggtgcagtattcgttggaggtggtggtggtgctgttgcagctgcacctgcangtggtgctgccgcagctgatgctgccccagctgctgagaaaaaggaagaaa

SEQ ID NO: 3300 - DNA, 160 bp, Glycine max
  Clone ID: LIB3072-015-Q1-E1-H3
cgtccgtagagaagactacacaaggggacgcacattcacaacacaacacaaacaacatcacgtcaccataaataaacaagcggccgctctacaggatccaagcttacctacccgtgcatgcggggtcggagctcttctatactgtcacataaattcagct

SEQ ID NO: 3301 - DNA, 71 bp, Glycine max
  Clone ID: LIB3072-015-Q1-E1-H9
caaaggattcaagcttaagtacgcctgcatgcgaagtcaaaactcctccaaaatgtcacccaaattcaatt

SEQ ID NO: 3302 - DNA, 130 bp, Glycine max
  Clone ID: LIB3072-016-Q1-E1-B11
gaaaaacagaaacacacgaaaacaaaaaaacaaaaaaaccaacaccattctgccgctctaaacgatccaaccttacttacgcttgcaggggaggtggggggcccttctatcctatcaactaaattcaatt

SEQ ID NO: 3303 - DNA, 231 bp, Glycine max
  Clone ID: LIB3072-017-Q1-E1-B10
ggccttcagcacttgaagttgacaccttgctgatccccatcatgggaaccatttttcctcatcactctctctctccactcctcactaggggggcgtcaggctcatgaattctcttggctctctctctccagcccaagtcaaattctctcttttgcgccagccccattgattcaagtctcaacaagatcgatacttcatctcgtacagcttcatcgggcacaagttggttgg

SEQ ID NO: 3304 - DNA, 335 bp, Glycine max
  unsure at all n locations
  Clone ID: LIB3072-017-Q1-E1-C11
gacagacagacacacactcggttctgccttcacaaaaaaattatcgagatcccctttttctcctaagaaaagccatggctaagggtcccggtctctactctgacatcggcaagaaagccaggggtactctctctctaattatgttgaaattctattaaattgtggtttttttggggggtagaatttttccttactgttaaaaattggtgctttttgatgaatcctaaatgggtttttgtttgtttggtgtagatctgctgttcaaggactaccacagtgaccagaagttcaccatcaccacctactcacccactggagttgtgagtgtntttttt

SEQ ID NO: 3305 - DNA, 228 bp, Glycine max
  Clone ID: LIB3072-017-Q1-E1-D10
taccgatgcgcatggtggagctaaaggtgctgttgttacatcatttccatgggtacggttgagatgcacgcatcgaacggtacttcttcaaaaataatacttcatgatattgctgatgatgatcgatattcagagccatgcttttatctctgcatttgcacacgctcaatgcctcctcaatgcacctgtcaggatactacgctgaattcacgccacttagattcttac

SEQ ID NO: 3306 - DNA, 53 bp, Glycine max
  Clone ID: LIB3072-017-Q1-E1-D11
tacggctgctacaacactacagaacggtactgctgctagaataccacctaacg

SEQ ID NO: 3307 - DNA, 342 bp, Glycine max
  Clone ID: LIB3072-017-Q1-E1-D3
aactacactcagaccacatttcatatattatatcaacatgcatcaggtacattttgccagacacagaatggttcgcccaataatgagcccatgggttaactaattttgtcttaaacaaattcaaccaataggtgatttgcaaagctgtataatttatttttttctttaaattttttcatatgttaatgtaatgaaataccagaaaaataaaagcaatgtagtacaccatgattcacaaactcagtggggttgcatgaacctccatgaggatctgcagcttggtttgttatactggctgatgagatgcttccctgtgactgaacagcactgttgtccatatca

SEQ ID NO: 3308 - DNA, 100 bp, Glycine max
  Clone ID: LIB3072-017-Q1-E1-E10
ggctcgatttgtggatgttccctttgttattgcagatgcaacttcactcactcaggcaagtttgtgagctttattcttgttttctgattttccatctccc

SEQ ID NO: 3309 - DNA, 131 bp, Glycine max
  Clone ID: LIB3072-017-Q1-E1-F5
ctctttccaatgaaattatagaattttccaatgttgtcacccttgtattcgcagctgctctaaaggatccaaccttacctactctttcatgccacgtcacagctcttccacaatctcacttcaattcaatt

SEQ ID NO: 3310 - DNA, 111 bp, Glycine max
  Clone ID: LIB3072-017-Q1-E1-F6
gtattcggccttagcggaaggcatatataagctttgattattttatttagtgtaatgatttcgtacaaccagggcatttatttagtactctcacacttgtgtctcactcat

SEQ ID NO: 3311 - DNA, 215 bp, Glycine max
  Clone ID: LIB3072-017-Q1-E1-G7
ggtgtgttgaaggagtatcagtccagaatgtgatgcacaaaagtggccgctccaaaggatccatgcttaggtgcgcatggatgagaggtcacaactcttctacactgtcacatgagatcagttcactgctcttccttttagaacttcatacctgggaaaagcttggcgttactcaacagaatcacgttgtctcagatcaccctttccccatctgg

SEQ ID NO: 3312 - DNA, 138 bp, Glycine max
  Clone ID: LIB3072-017-Q1-E1-H10
gacaccagacaacacacaatattatgcaagcgatgccattggcgttcacttcgccaatcggccgctcgataggatccaagcttacatacgcgtgcatgcaacgtcatcgctcttcaacactgtcacctaaattcagtt

SEQ ID NO: 3313 - DNA, 319 bp, Glycine max
  Clone ID: LIB3072-017-Q1-E1-H4
ggtcgtacacacgagtatcacaaacctctctctataaatctttctagaacgtttcttcactccccgaacctgatctcttgctggttgccacactacaccgatatttccaccaaacccgtttgcgttgttgtttgcgaataaatggcaactaagaggagcgtgggaacgttgaaggagggtgatttgaaggggaagagggtattcgtgagggtcgatctgaacgtgcctttggatgacaaccttaacatcaccgatgacactagagtccgtgctgctgttcccaccatcaagtacttgactggttatggtgctaaagtga

SEQ ID NO: 3314 - DNA, 456 bp, Glycine max
  Clone ID: LIB3072-018-Q1-E1-A9
taccggtccgacattcacgggtgcccccacgcgtccgaaacgacagaaggggactcactcatacaatagagaccagcttttgcttctttgtgaacatggagatgaggaaatcatgtggcttcttcttcttgctcctcctccttgtctttgcttcccaggtggtggtgcagacggagggaagagtgtgtgagtcacaaagccacgggttccatggtttgtgtaatagagaccacaactgtgctttggtctgcaggaacgaaggtttctccggtggcaggtgcaaaggcttccgccgccgctgcttttgcaccaggatttgttgagatctcatcaaacactactcttgccatgcaaattaataaatcatagctaggccaaataaattgcatctactctttatccatttgggagcttagctacacaaccaactcatacttggtcattggaatgcttccc

SEQ ID NO: 3315 - DNA, 196 bp, Glycine max
  Clone ID: LIB3072-018-Q1-E1-B3
atctgtaaatacaagatctagggaaaatatttaaaaaaacaaaaaaatatttttttgttttttttcattgattccattttcaatcgatttgtcaataacaaaaagattgctcgtaatctgtgtcgatctcacaaaagtgcatatcgatatagatatcaatcaatatatacaaaaatccgcctctttcatttacagc

SEQ ID NO: 3316 - DNA, 200 bp, Glycine max
  Clone ID: LIB3072-018-Q1-E1-D8
gactcactcatacaatagagaccagcttttgcttctttgtgaacatggagatgaggaaatcatgtggcttcttcttcttgctcctcctccttgtctttgcttcccaggtggtggtgcagacggagggaagagtgtgtgagtcacaaagccacgggttccatggtttgtgtaatagagaccacaactgtgctttggtctgc

SEQ ID NO: 3317 - DNA, 268 bp, Glycine max
  Clone ID: LIB3072-018-Q1-E1-E1
gaaacgtgagagtgatataaaaaaacaagaaagaaaaaaaaagcggacgcgctacacgataggatctaagctaaccttgcattgcatgtcatatcacatctatactgtcatgtaaattcaattcaatggacgtcgcgtcagattataatgactggaatgggactgccctgacgtaacttaatctacttgcattacatcacattttcgttacgtgacctggtatcaaagaggccaggaccgatcggacttcccatcacatgagtagccc

SEQ ID NO: 3318 - DNA, 252 bp, Glycine max
  Clone ID: LIB3072-018-Q1-E1-E9
caatgggtacggctgtcattcaatctcattacggtcatgctgctacacaacgactgattgggatatcgtctccatattgatcatgacgggccattccgcgaattgatcattctctaccacagcggtcgctctacacgttccaatcttacatattcgttcatgccatgtctttgctcttcgattgtgtcatctaatttcatctcattggccctcattttaaagtttcttgcctgggacaaccctgccattacc

SEQ ID NO: 3319 - DNA, 113 bp, Glycine max
  Clone ID: LIB3072-019-Q1-E1-B5
tgggacagcaaaaacaattaataaagatgagtttgaagaacaacatggtggtgctaaaggtgtgtttgttgcttcttttccttgtgggggttacagctgcacgcatggaactg

SEQ ID NO: 3320 - DNA, 246 bp, Glycine max
  Clone ID: LIB3072-019-Q1-E1-C5
gtggctagtacagttaaccagctccacgctgccctataagattgctttgtacgtggccgctctatgggatgtcatcttacttccccgtcgatgcgatgtcacacctcatcggcagtcttatcaaaacttagttcatgggaagtccctttaaaattccattctagggacatcgctgtagatccccatttcaggcgccgtgctgcacatccccctgtcgccagctgtggtacttaccaacagttccgc

SEQ ID NO: 3321 - DNA, 252 bp, Glycine max
  Clone ID: LIB3072-019-Q1-E1-C7
taatggtactgctgcaaggaagattaacagaaaggcaccactattttgcctttttttcttccttattcattggcataaggcatcaatgttatcatactgagagataagagatctacggagggaaatttgtggttgttgttgcaatgacatttatgaacgtctgaaacaaaaacaattttcatattccaaattattacacattgttccattctgaaattgtcaaatgaaaaactgccccttaataatttcatg

SEQ ID NO: 3322 - DNA, 288 bp, Glycine max
  Clone ID: LIB3072-019-Q1-E1-D10
gacagcaaaaacaattaataaagatgagtttgaagaacaacatggtggtgctaaaggtgtgtttgttgcttcttttccttgtgggggttacagctgcacgcatggaactgagcttcttcaaaagtgatcagtcatcaagttatgatgatgatgagtattcaaaaccatgctgtgatctctgcatgtgcacacgctcaatgcctcctcaatgcagctgtgaagatattaggctgaattcatgccactcagattgtaagagctgtatgtgcacacgctcacagccaggac

SEQ ID NO: 3323 - DNA, 109 bp, Glycine max
  Clone ID: LIB3072-019-Q1-E1-D5
tcactaagaatatgtgcctcttctttaccttgttcctgttacaacatgcgcccgctcaagaggatctaatcttacgtactcctgcatgcgatgtcatacctcttctata

SEQ ID NO: 3324 - DNA, 159 bp, Glycine max
  Clone ID: LIB3072-019-Q1-E1-D7
tgacacttactagtattacgcatggactcctcaaagatctatgcttacctcttcctctccatgatctttctctcttctgccactcccattctcggttgtggctactgtggcaaaccccccaaaaagcacaagcctggttaaacaccaaagacacccacc

SEQ ID NO: 3325 - DNA, 270 bp, Glycine max
  Clone ID: LIB3072-019-Q1-E1-E9
gggtggaaaaggacgccacaaggtgctcatgtaagaaatctacaccacaggaggcctatgctacacgataaaagcttgtttcttcttccattaaacgtcatacggcgtcgggcgtgacacctagattcaattcattggccgtctttttactacttcccgattgggaattcccagacattcaccagcttaatcgccatgcaccatatccccctttcgcatccttgcttacctacgactgggcccgctctcatgactctccacaagagttgc

SEQ ID NO: 3326 - DNA, 207 bp, Glycine max
  Clone ID: LIB3072-019-Q1-E1-F11
gacagcaaaaacaattaataaagatgagtttgaagaacaacatggtggtgctaaaggtgtgtttgctgcttcttttccttgtgggggttacagctgcacgcatggaactgagcttcttcaaaagtggtcagtcatcaagttatgatgatgaagagtattcaaaaccatgctgtgatctctgcatgtgcacacgctcaatgcctcctc

SEQ ID NO: 3327 - DNA, 168 bp, Glycine max
  Clone ID: LIB3072-019-Q1-E1-F12
taatggtaccgctgctacaattccacaatatggttttgctgcgaaacatactactactgggagggtctcagctgcgtcatttctgtatccgcgtaaccactgctttcataaaatccaaccttcacaaatctgttcacttcacacttttgctcttagataatttatctc

SEQ ID NO: 3328 - DNA, 133 bp, Glycine max
  Clone ID: LIB3072-019-Q1-E1-F6
cggggtaacatttacttacgcaccttttccaagaacaagcttgaagctgggggcgggcgctctacaggatctaaactttcatatgcgtgcatgcgacatcataactcttctataatgtcacctctattcattt

SEQ ID NO: 3329 - DNA, 148 bp, Glycine max
  Clone ID: LIB3072-019-Q1-E1-H7
gacagcaaatgtagagaatgccgagttgtctgaaacacatcatagcggaacactgggcgctctagaggattcatgtttattgttggcggtcagggcaggtcacaggtcttcgaaagtgtcaacgagtgtcaattcactggccttcgtt

SEQ ID NO: 3330 - DNA, 61 bp, Glycine max
  Clone ID: LIB3072-020-Q1-E1-B1
cccttcgttaacgtgtaaataaataaaaatgaagaaaaattatgaatatttcttctaacag

SEQ ID NO: 3331 - DNA, 221 bp, Glycine max
  unsure at all n locations
  Clone ID: LIB3072-020-Q1-E1-C4
gaaaaaattgtcctccananaaaaaaaaaaaaaaaaaaaaaaaaagcgggcgctccaaaagatataaacctaagtaagcctgcaagccaagtcaaaactcctccaaaatggcacctaaaatcaattcaatggccgtccttttaaaaactcctgaatgggaaaaacctggcgttaaccaacttaaaccccttggaacacaaccccctttccccaactggggt

SEQ ID NO: 3332 - DNA, 139 bp, Glycine max
  Clone ID: LIB3072-020-Q1-E1-D10
gaaaaaaatgacccaaatttgctaaaataagaataataaaaatgaccaaatttgctaaaagcaaattgggggagtttgagtattcaaatcttggaaaaatggtacctcctttgctcgtttggggtgattttctttctga

SEQ ID NO: 3333 - DNA, 389 bp, Glycine max
  unsure at all n locations
  Clone ID: LIB3072-020-Q1-E1-D4
gaatctcttcacagaagaaaaaagagaagaagatgggtttgaagaacaacatggtggtgctaaaggtgtgtttggtgctacttttccttgtggggggtactactantgccagcttgaggctgagtgagcttggcctgctcatgaaaagtgatcatcatcaacactcaaatgatgatgactcttcaaaaccatgctgtgatcaatgcgcatgcacaaagtcaaaccctcctcaatgccgctgttcagatatgaggctgaattcgtgccattcagcttgcaaatcttgtatttgcgcattatcgtatcctgcacagtgtttttgtgttgacataacggatttctgctatgaaccttgcaagcccagtgaggatgacaaggaaaactactaa

SEQ ID NO: 3334 - DNA, 321 bp, Glycine max
  unsure at all n locations
  Clone ID: LIB3072-020-Q1-E1-D9
gacacatcacaacaacaacaacaacaaaaaaagacaaaaactacttccttctctcctttgctgtgttttctttctcaaaaatgggtcgtacctatgttcttatgatggttgctgcattgttgttgagctccaccatggctcaatctccagcttcgtcgccggctttgtcccccacccacacgccggtggccactccacctangagggcgttgtcgccgtctccgtcgtctgtgtcaccagcggcttcacccgccaccggaaattctcctccggcaccacctacttcttctccttcggaatcgccacttccatcagctgcta

SEQ ID NO: 3335 - DNA, 224 bp, Glycine max
  Clone ID: LIB3072-020-Q1-E1-E10
gaagaagaaggagaagaagaagaaggagcatggccatgagcatggccatgacagcagcagcagcagtgacagtgattaaactgctgcatcacctatatatttaaaaggtttatgggaccatagtagcgagggctgtgccttaatttctctctctctctctctctctctctctctctctctctttttcctttttccctatcttgtgatccacttatgagtgagaa

SEQ ID NO: 3336 - DNA, 70 bp, Glycine max
  Clone ID: LIB3072-020-Q1-E1-E8
agaggctccaagcttacgtccgccttcatgctacatcatacctcttctatcgtgtcacctaacttcaatt

SEQ ID NO: 3337 - DNA, 330 bp, Glycine max
  unsure at all n locations
  Clone ID: LIB3072-020-Q1-E1-F6
gaatctcttcacagaagaaaaaagagaagaagatgggtttgaagaacaacatggtggtgctaaaggtgtgtttggtgctacttttccttgtggggggtactactagtgccaacttgaggctgagtaagcttggcctgctcatgaaaagtgatcatcatcaacactcaaatgatgatgaggcttcaaaaccatgctgtgatcaatgcgcatgcacaaagtcaaaccctcctcaatgccgctgttcagatatgangctgaattcgtgccattcagcttgcaaatcttgtatttgcgcattatcgtatcctgcacagtgtttttgtgttgaca

SEQ ID NO: 3338 - DNA, 339 bp, Glycine max
  Clone ID: LIB3072-020-Q1-E1-F7
cgtccgaacagacgtcagaagacgacacaatggttatacgggttgatctgtgcgtgttgtcattgatgacatatatgtttggagagccgggaaagtcagtacaatgtgaatggtcctttggggtgagtttcaacatgaatggtattattctctcatacatgataatactaaacgtatatttagtactcggttgccctataggatgcaagcttatgtacaccttcatgctacgtcatagtgcttcgatcatgtcacctaatttcaattcacacgcagtcgttttaaacggtcttgtatggtaaaaccctgacgttaaccatattaatctccttgcaccac

SEQ ID NO: 3339 - DNA, 125 bp, Glycine max
  Clone ID: LIB3072-020-Q1-E1-G11
ttgggaataaaaacacagacatctcgtttgttagctccgacttgatcaatggctcaatcatattccttgctcttcctctagaggtgtgcaggctcttccttctcatttcatccatcacaacagcc

SEQ ID NO: 3340 - DNA, 339 bp, Glycine max
  Clone ID: LIB3072-020-Q1-E1-G3
gatgcaactgaataattaagaaaagccatttccatagcagcctaagaaaatgaagagcactagcttgttcgctatctttctactttgcgccttcacctcatacctaccttccgccaccgcccaggacgtgctcgacgtggatggcgatccgattcggaacggtttcatatactacgttttgccggcaataagaggaaacggtggcggaatagaacgagccgcactcgggaaagacacttgccctatcactgtagtgcaatctcccaatccaaactctaaggggttagaaattaagtttgaatctgcataccccgcccattaaataaacgaaaacctaat

SEQ ID NO: 3341 - DNA, 435 bp, Glycine max
  Clone ID: LIB3072-020-Q1-E1-G8
cgggtccacccacgcgtccgaagcgagaagacgacaaaaggggattcacacaactaactaagaaagtcttccatagccccccaaaaatgaagagcaccatcttctttgctctctttctcttttgtgccttcaccagctcatacctaccttcagccatcgctgatttcgtgctcgataatgaaggtaaccctcttgaaaatggtggcacatattatatcttgtcagacataacagcatttggtggaataagagcagccccaacgggaaatgaaagatgccctctcactgtggtgcaatctcgcaatgagctcgacaaagggattggaacaatcatctcgtcgccatatcgaatccgttttatcgccgaaagccatcctttgagccttaagttcgatttatttgcagttaaaatgctgtgtgttggaatttccaccg

SEQ ID NO: 3342 - DNA, 250 bp, Glycine max
  Clone ID: LIB3072-020-Q1-E1-H11
agcaagacgacagaaggggttgtgataaactataccaagtacaagaagaaaaatatatcatttggggatcttgtttgggttgaagaaggtggaacacacactgttaggaggcgcattgtactggcaccaaatggaattgtatgagttgtactttgacttttttactccttgatggagcccccacaacaataaataatttgatcgtgaagcgaaaaaacccaaatccccctcaaaaaagaaagcggccgct

SEQ ID NO: 3343 - DNA, 100 bp, Glycine max
  unsure at all n locations
  Clone ID: LIB3072-021-Q1-E1-A4
agncgtcagtagagctgcgaaaggtccagatgcggggaccaaattgattgatattgcttctatattccgacagaagggtaccgctgccatcatacgacat

SEQ ID NO: 3344 - DNA, 310 bp, Glycine max
  Clone ID: LIB3072-021-Q1-E1-C11
taggtatggctgcaagaaaactacagagagggacagcacaattaattaatatgcattagtttgacaaacaacatggtcgtgctgaatgtgtgtttcttccttcctttccgtgtgggggttatagctgcatgcatctgaccgaccttcttcatgattgatcagtcatcaacttatgatgatgatgagtattcacaaccattcattgatctctgtatatacacacactcaatgcctcctcaatgctatctgtaacatagcacgcttcattcaactcactcagattgtaacatctgtatatacacacactcac

SEQ ID NO: 3345 - DNA, 313 bp, Glycine max
  Clone ID: LIB3072-021-Q1-E1-C12
taggtacggctgcgcgacacctacagagagggacaacacaattaattaatatcaatgagtttgatcaccaacatgctcgtgctgaacgtgtgtttgttgcttcctttccttgtgtgggatacacctgcatgcaactcaccttccttcttcatgattaactcagtcatcaagttatgagcatgatgagtattcccaaccatacatttctccctgcacatacacacatctcactccctcctccatgcttctgtgaccatagtaggcttaattcataccactcacattgtcctatctgtatgtacacacactcaca

SEQ ID NO: 3346 - DNA, 264 bp, Glycine max
  Clone ID: LIB3072-021-Q1-E1-C8
caacggtactgctgcgcgcacacgacaatccggtaccgcttccacaagcttacaccgtggtactgctgcgacaatatcacataatggtacggctgcgacaatccgatataatgggacccacttgcaatctcccatccatgctccagaatagacaccgagaaacacatcggacgtccttgattcggtgttctatccgttgagagagctcccatcggacatcctaaggctcgtgcagccctgccacgaacccgctcgcgaactgtt

SEQ ID NO: 3347 - DNA, 225 bp, Glycine max
  Clone ID: LIB3072-021-Q1-E1-E6
gccccgatgagccgaaaccaaagcttttattttctgttgactaatcgttcgagtaagtcttgaatgagctcctcgaaaacttgatgtagataaacgaatttttgtccgtcgtttccgagctatatatcctcgtttaattctggtcattgaatagctgagactttgatgaataactatttgatttttcacttagtcttttcttcttactagtctactaatagcaca

SEQ ID NO: 3348 - DNA, 216 bp, Glycine max
  Clone ID: LIB3072-021-Q1-E1-E7
gacatcacaaaccattaatacagatgagtttggagaacaacatggtggtgctaaaggtgtgtctgttgcttcttttccttgtgggggttacagctgcacgcatggaactgagcttcttcacaagtgatcagtcatcaccttatgatgatcatgactattcaaaaccatgccgtgatctctacatgtgcacacgcccaatgcctcctcaatgcagct

SEQ ID NO: 3349 - DNA, 261 bp, Glycine max
  Clone ID: LIB3072-021-Q1-E1-F5
ggcagaagcagaggcacaccaatcccatttaatttatcgttcctcttctcctcttcactttccaaccacccattcattccttttcttcttgcactctgccctttgggaggagtttgtaacatggctgctctacctactgcggagcttagtgatgcaaatgcaacacatgtagcaagtggtgatgtgagggtgctgcatccagtgttcaaggtttatggccacgccacggcattctccggccccattgtcaccgtgaaggtg

SEQ ID NO: 3350 - DNA, 274 bp, Glycine max
  Clone ID: LIB3072-021-Q1-E1-F9
ggtgtatgaaaaaaaaggagacgaaaaggaaaaaacagaagaacagtgttcgaagatggagaatatgatgcgactgagaccattgttccgatcactgagttgcagatcttatcatttcgttcttcgtccttctctactctctcgctctcccaatcctcttccttctccttcaccctcagaatgcaggtctcctctctcaatgggtttagggagtatgagattctatagtgaagatgtgacccacatgcccaatattaaggaccctgtgctttac

SEQ ID NO: 3351 - DNA, 78 bp, Glycine max
  Clone ID: LIB3072-021-Q1-E1-G3
tacagctgccataagacgacatcatggggaacaaaatatgaaaactgtatgtgcacacgctcaaaaccagcagccgct

SEQ ID NO: 3352 - DNA, 60 bp, Glycine max
  Clone ID: LIB3072-021-Q1-E1-H11
caacgggatcccatccgtagaccatcatttcctctctgcctgcatccaacatccgccgct

SEQ ID NO: 3353 - DNA, 163 bp, Glycine max
  Clone ID: LIB3072-021-Q1-E1-H12
gacactcattattcctaatccttatcctgtttgcttccatggaagtgatttccgcttcgagcttgaatcccaacgcttcgatgttcgtgcctctcgcctatcggacggtggaggatttctccgaccactggtgggacttcgtccatacctccccctgcatccg

SEQ ID NO: 3354 - DNA, 180 bp, Glycine max
  Clone ID: LIB3072-021-Q1-E1-H6
gacagcacaaacaattaatacagatgagtttgaagaacaacatggtggtgctaaacgtgtgtttgatgcttcttttccttgtgggggttacagctgcacacatggaactgagcttcttcaagagtgatcagtcatcaagttatcatgataatgattattcaaaaccatgctgtgatctct

SEQ ID NO: 3355 - DNA, 217 bp, Glycine max
  Clone ID: LIB3072-022-Q1-E1-A11
gacagcaaaaacaattaataaagatgagtttgaagaacaacatggtggtgctaaaggtgtgtttgttgcttcttttccttgtgggggttacagctgcacgcatggaactgagcttcttcaaaagtgatcagtcatcaagttatgatgatgatgagtattcaaaaccatgctgtgatctctgcatgtgcacacgctcaatgcctcctcaatgcagctg

SEQ ID NO: 3356 - DNA, 379 bp, Glycine max
  unsure at all n locations
  Clone ID: LIB3072-022-Q1-E1-A2
ctgcaaaaaaacaacagaaggggacagcaaaaacaattaataaagatgagtttgaagaacaacatggtggtgctaaaggtgtgtttgttgcttcttttccttgtgggggttacagctgcacgcatggaactgagcttcttcaaaagtgatcagtcatcaagttatgatgatgatgagtattcaaaaccatgctgtgatctctgcatgtgcacacgctcaatgcctcctcaatgcagctgtgaagatattaggctgaattcatgccactcagattgtaagagctgtatgtgcacacgctcacagccaggacagtgtcgttgtcttgacnacaacgacttctgctacaaaccttgcaagttcagagatgactagaaaaact

SEQ ID NO: 3357 - DNA, 249 bp, Glycine max
  Clone ID: LIB3072-022-Q1-E1-B12
gacagcaaaaacaattaataatgatgagtttgaagaacaacatggtggtgctaaaggtgtgtttgttgcttcttttccttgtgggggttacagctgcacgcatggaactgagcttcttcaaaagtgatcagtcatcaagttatgatgatgatgagtattcaaaaccatgctgtgatctctgcatgtgcacacgctcaatgcctcctcaatgcagctgtgaagatattaggctgaattcatgccactcag

SEQ ID NO: 3358 - DNA, 165 bp, Glycine max
  unsure at all n locations
  Clone ID: LIB3072-022-Q1-E1-B3
gacagcaaaaacaattaataaagatgagtttgaagaacaacatggtggtgctaaaggtgtgtttgttgcctcctttcccttgtggggtttnaagctgcacgcatggaactgagcttcttcaaaagtgatcagtcatcaagttatgatgatgatgagtattcaaaa

SEQ ID NO: 3359 - DNA, 229 bp, Glycine max
  Clone ID: LIB3072-022-Q1-E1-D3
caacgggactttgagttcgaactaaacaattcaattcaatctgcctcgatcatggagaggaaaacatttgggtttttgttcttgctcctccttgtcttagcttctgatgtggcggtgaagagagcagaggcgaaagattgcttgacaaggaagcacgggttccacagtagatgcttattcgacaggcaatgtgcacatgtgtgcaggagcgatagtttcatcggtggtc

SEQ ID NO: 3360 - DNA, 80 bp, Glycine max
  unsure at all n locations
  Clone ID: LIB3072-022-Q1-E1-F2
gaagaagggttcgtaaacagcccgaaagaaggtcctctcttcgtattctatagaaagacgaantancanatcaaaacaaa

SEQ ID NO: 3361 - DNA, 254 bp, Glycine max
  Clone ID: LIB3072-022-Q1-E1-F4
gacagcaaaaacaattaataaagatgagtttgaagaacaacatggtggtgctaaaggtgtgtttgttgcttcttttccttgtgggggttacagctgcacgcatggaactgagcttcttcaaaagtgatcagtcatcaagttatgatgatgatgagtattcaaaaccatgctgtgatctctgcatgtgcacacgcccaatgcctcctcaatgcagctgtgaagatattatgctgaattcatgccactcagattgt

SEQ ID NO: 3362 - DNA, 271 bp, Glycine max
  Clone ID: LIB3072-022-Q1-E1-F7
taatttgggaattattgctcccatcgccattggtttcattgtcggcgctaacattttgttgggtggggccttctctggagcggccatgaaccccgctgtgacatttgggcctgctgtcgtgagctggacctggaccaaccactggatctactgggccgggcctctcatcggtggtggaatcgctggccttgtttacgaggttgtctttatcagccacacccacgagcagcttcccaccactgactactagaggggaaaaacaactttctcg

SEQ ID NO: 3363 - DNA, 453 bp, Glycine max
  Clone ID: LIB3072-022-Q1-E1-G2
cgggtcggcccacgcgtccgagctacgaagacaacagaagggggcggaagcaaccgtctctttttatctgcggcaagtttccaaagcagcaaacaacaaacccacaattcttcttcttcacttccctcagcattgccgttctcaaagatggcacatttgctggcaatggtggtggaaggtgttggaggcttcgtcaaaacgctttgggctcttcaagaacggcgttggtcctacaccttcgacgctgtggcctctgctgcggtgtccgtgaccatggcattggtgctctgcttgttgtctattcgtactagttatagacatagacgaagtgatatgttgtttgcctctttctgatgtaactactgtgtgtttctcttcttatccgttcagcaatttttaacaaaattcctgattatgatatcttggttgccacgcagaacatcaataaagaaa

SEQ ID NO: 3364 - DNA, 209 bp, Glycine max
  Clone ID: LIB3072-022-Q1-E1-H7
gacagcaaaaacaattaataaagatgagtttgaagaacaacatgatggtgctaaaggtgtgtttgttgcttcttttccttgtgggggttacagctgcacgcatggaactgagcttcttcaaaagtgatcagtcatcaagttatgatgatgatgagtattcaaaaccatgctgtgatctctgcatgtgcacacgctcaatgcctcctcaa

SEQ ID NO: 3365 - DNA, 378 bp, Glycine max
  Clone ID: LIB3072-023-Q1-E1-A1
gacttattaattgtgttaagaaatttaagtgaggagctagagaatgatgatgaagtctgctatgtgtgcagtggtggttgtagcacttcttcttccggcggaggtggggcccatggctgaggctgtgacatgcaccccaacagagttgagtccgtgtcttccagcaatcacttccggtgctaaaccttccaatgcttgttgcacgaagctgaagcagcaaaaaccatgcttatgtggctacctcaaaaacgctagcttgaagcagtatgttaactctcctaatgcccgaaaaaccgttgcttcctgtgggattccctttccaacttgttaattaattaagccttcttataattaaagtgttggataaatatatatata

SEQ ID NO: 3366 - DNA, 366 bp, Glycine max
  Clone ID: LIB3072-023-Q1-E1-A3
acagtaatgtcatcaccgactaggattatctaacagtttaagtacaattgatatagttgatgcacaatcaaaatatggttttggggatggaatttgtggcgtcaacctatgggtttcattgtttttctaatctcgtccctagcagaatgtgaaagattaccttttgatttaccggaagcagaagaagaactagtagcgggttatcaaaccgaatactcgggtatcaaatttggtttattttatgttgcttcctatttaaacctattcatttcttccttatttgttacagttctttactttggtggttcaaatatctctattccatacatattcgtttctgacttttttgaaataaatcaaacatat

SEQ ID NO: 3367 - DNA, 347 bp, Glycine max
  Clone ID: LIB3072-023-Q1-E1-B5
gactttgagttcgaactaaacaattcaattcaatctgcctcgatcatggagaggaaaacatttgggtttttgttcttgctcctccttgtcttagcttctgatgtgacggtgaagagagcagaggcgaaagattgcttgacaaggaggcacgggttccagggtagatgcttattcgacaggcaatgtgcacatgtgtgcaggagcgatggtttcatcggtggtcagtgccgaggccctcttcgcaaatgcttttgcagcaagccatgttgatcgaaattactactgccaaagaggccatgaaataaacaaacaaacaaataaataaatagctctaaccgacacatatg

SEQ ID NO: 3368 - DNA, 256 bp, Glycine max
  Clone ID: LIB3072-023-Q1-E1-B7
agggacagcaaaaacaattaataaagatgagtttgcagaacaacgtggtggtgctaaatgtgtgtttgttgcttcatttccttgcgggggttacagctgcacgcatggcactgagcttcttcaaaagtgatcagtcatcaagttatgacgatgatgaatattcacaaccatgctgtgatctctgcatgtgcacacgctcaatgtctcctcaatgcagttgtgaatatattatgctgaattcataccactcagattg

SEQ ID NO: 3369 - DNA, 403 bp, Glycine max
  Clone ID: LIB3072-023-Q1-E1-C1
agacgacagaaggggagagtgagaaagagagagagagagagagaaactgagagaaattcgcaaaccctaatttcggaaagatcggcgatggctgcctccaaggatcgcgagaacttcgtctacatcgccaagctcgccgaacaggccgagcgatacgaagagatggtggaatcaatgaagaacgttgcgaatctcgacgttgaactgactgtggaggagcggaatttactttctgttgggtacaagaatgtgattggtgctcggagagcatcgtggaggatcctgtcttccattgagcaaaaggaagaaacaaaagggaacgagttgaatgcgaagcggattaaggagtacaggcagaaggttgaattggagctttcaaacatctgtaatgatgttatgacag

SEQ ID NO: 3370 - DNA, 393 bp, Glycine max
  Clone ID: LIB3072-023-Q1-E1-C9
cgtccgaacgcgaaaagacgacagaagggggaaattggacaataacaaataccgattccaccaaacacaacacagaaaatgcaaacaccaaactgcgaagccgagaggcgaatccagaggctaaccctacacctaaaccccacggcgttggtcgcggcgaagcagttggagatggcaacgtgcgctcgcgggaagctgagcgtgaacacgccgtccttgtctagttacatgcgagggaaacacgtggacattcacgagaaggtgttcgattacttcaacgcgaacccgcgccttcaaactcccgttgagatctccaaggacgagcatcgcgacctctgcatgaagcagttaacgggactcgtcagagaagccgggattcgactcctccgttac

SEQ ID NO: 3371 - DNA, 338 bp, Glycine max
  unsure at all n locations
  Clone ID: LIB3072-023-Q1-E1-D6
gatcacactaatcactcactcttcactcaaaactcttctctttcattttcataattcccacacattatggctgagcttcactaccaaccacaacaccaataccccctccgctaccctaacgatccacaccaacaaacccgttcctccacccaccaggtcgtcaaggccgccaccgccgtcacagcgggcggctccctcttgatcctcacctcgttgatcctcgccgccaccgtcattgccctcaccatcgtcaccccgctgttcgtcattttcagtccggttctcgtcnccgccgtaatcaccgttgcgctcctgagcctgnggttcctcgcctcgag

SEQ ID NO: 3372 - DNA, 263 bp, Glycine max
  Clone ID: LIB3072-023-Q1-E1-E11
gatagcagcatcatacaaagcattgaattcaaaaacttaagttcattccttgtgttttgctttcttcctcaaaaccaaacatgtcgaacacatgcggcaactgcgactgcgctgacaagactagctgcaccaagggaaacagctatggtgttattgtagagactgagaagagttacatcgagactgttgtcatggatgttccagcagctgagcatgatgggaagtgcacgtgtggcactaactgcacttgcacggactgcacc

SEQ ID NO: 3373 - DNA, 262 bp, Glycine max
  Clone ID: LIB3072-023-Q1-E1-E8
aggcgtcagtacaggtgagaaagagaacagaacgggattcacataaataactaataaagtcttccatagcccctcataaatgaggagattatcatctgtgctctcgtactcattatgtgacttcataagcacacaagaatgttcagccaacgctgaatgcgtgcgccataatgatggtggtactcatgataacggggtaagacagtagatcttgtgtggcataacagcatttggtggaataagagcaactgagctggaaatg

SEQ ID NO: 3374 - DNA, 166 bp, Glycine max
  Clone ID: LIB3072-023-Q1-E1-F12
cgatatcgctgctacaagaccagagaaggatactgctgccacaacagcacacgagggtgctgctgctataatacgacagaacggtagtgctacgagtaagactacacaatggtactgctgcgataacatcacgaaatggtactgctgccgagaactacaccgaatg

SEQ ID NO: 3375 - DNA, 205 bp, Glycine max
  Clone ID: LIB3072-023-Q1-E1-F7
aaatcaataagatcagaaaataaaccaaagtgccgctctaaaggatggacgctcaataagatccacacttacgtgtgcgtgccttcaacagcataaccctactataatgcaacggaaattcaattcaacggccgtcattttgaactctcttgcatgagaaaacctagccgctgctcatcttaccccccttgcatcacatgcccct

SEQ ID NO: 3376 - DNA, 238 bp, Glycine max
  Clone ID: LIB3072-023-Q1-E1-G1
accaaaaggttacggttccaaaaaaccaccaaaaggttacggttccaaaaaaccaccaaaaggttacggttccaaaaaaccaccaaaaggttacgcttccaaaaaaccaccaaaaggttacgcttccaaaaaaccaccaaaaggttacgcttccaaaaaaccaccaaaaggttacgcttccaaaaaacaaccaaaaggttacgcttccaaaacaccaccaaaaggttacgcttccaaa

SEQ ID NO: 3377 - DNA, 372 bp, Glycine max
  Clone ID: LIB3072-023-Q1-E1-G3
gacagcaaaaacaattaataaagatgagtttgaagaacaacatggtggtgctaaaggtgtgtttgttgcttcttttccttgtgggggttacagctgcacgcatggaactgagcttcttcaaaagtggtcagtcatcaagttatgatgatgatgagtattcaaaaccatgctgtgatctctgcatgtgcacacgctcaatgcctcctcaatgcagctgtgaagatattaggctgaattcatgccactcagattgtaagagctgtatgtgcacacgctcacagccaggacagtgtcctttgtcttgacacaacgacctctgctacaaaccttcaagtccagagatgactagaaaaactaatacctctctcaaat

SEQ ID NO: 3378 - DNA, 64 bp, Glycine max
  unsure at all n locations
  Clone ID: LIB3072-023-Q1-E1-H4
ggtgaagagaaaatacggaaaaagttttgattcatttcaactctgagagcaaaannnannnnnn

SEQ ID NO: 3379 - DNA, 82 bp, Glycine max
  Clone ID: LIB3072-023-Q1-E1-H5
aacattgaaaagcctaatggaaatggcaatggcatcggccaaaaaaatgaaaaagagatgacaaccaccaaaaaaataaaaa

SEQ ID NO: 3380 - DNA, 430 bp, Glycine max
  Clone ID: LIB3072-023-Q1-E1-H9
acgggtacagctgcgaaaggtccagatgcgggtacagctgcgagaggtccagctgcgggtacagctgcgagaggtccagatacggggacaccatttttgggttaggctgtgtaaacataacaaaaagttacgggagcgaatgacatcaacacgattcggcttctaaataacatcatgccgatactgatggtacgcacacgactaataggtacaagtcctccatttgtccaagttgggtcaagcagtgagactactacacttacgtgtcgatacgcatgcacagtacaatgtacagctttaacaccaattaaaccatggtctgacacatgtgtacaacaatgcgcttcagattctaaacatcaactgtccgttgctaatgattgctttactagttgtgccttaatcaagtccattaacatcatcaatgata

SEQ ID NO: 3381 - DNA, 266 bp, Glycine max
  Clone ID: LIB3072-024-Q1-E1-B3
gattcacacaactaactaagaaagtcttccatagccccccaaaaatgaagagcaccatcttctttgctctctttctcttttgtgccttcaccacctcatacctaccttcagccatcgctgatttcgtgctcgataatgaaggtaacccttttgaaaatggtggcacatattatatcttgtcagacataacagcatttggtggaataagagcagccccaacgggaaatgaaagatgccctctcactgtggtgcaatctcgcaatgag

SEQ ID NO: 3382 - DNA, 408 bp, Glycine max
  Clone ID: LIB3072-024-Q1-E1-B6
acagaaggggacacaactaactaagaaagtcctccatagccccccaaaaatgaagagcaccatcttctttgctctctttctcttttgtgccttcaccacctcatacctaccttcagccatcgctgatttcgtgctcgataatgaaggtaaccctcttgaaaatggtggcacatattatatcttgtcagacataacagcatttggtggaataagagcagccccaacgggaaatgaaagatgccctctcactgtggtgcaatctcgcaatgagttcgacaaagggattggaacaatcatctcgtccccatatcgaatccgttttatcgccgaaggccatcctttgagccttaagttcgattcatttgcagttataatgctgtgtgttggaattcctaccgagtggtctgt

SEQ ID NO: 3383 - DNA, 226 bp, Glycine max
  unsure at all n locations
  Clone ID: LIB3072-024-Q1-E1-C2
agggaatgatgaggaagctaccctctgaggaatctgcaccataacaaaatcagcaacaaatatccaaaaaaaaagaagaaggagatttctgttgaatgatgaggaagctaccctcttgcgctgattgaggataagaaccagaacaggttgcagttaaaaaaaaaaaccataacttgatgcaaagaggagtagcagaaccatgtaacaaaccnnnnnnnannnnnnn

SEQ ID NO: 3384 - DNA, 191 bp, Glycine max
  Clone ID: LIB3072-024-Q1-E1-C3
gacagcaaaaacaattaataaagatgagtttgaagaacaacatggtggtgctaaaggtgtgtttgttgcttcttttccttgtgggggttacagctgcacgcatggaactgagcttcttcaaaagtgatcagtcatcaagttatgatgatggtgagtattcaaaaccatgctgtgatctctgcatgtgcaca

SEQ ID NO: 3385 - DNA, 142 bp, Glycine max
  Clone ID: LIB3072-024-Q1-E1-C5
aagggtcacacaacgggaccgtaaagtcttccctcccccacccaaaatggcaaacagcatcttcattgctctcattcaagatggatggctgagcaaatcatcatcatgattaagccacattgcgttcatagacgacttattg

SEQ ID NO: 3386 - DNA, 128 bp, Glycine max
  Clone ID: LIB3072-024-Q1-E1-D1
gacagtcacatttaccaaagaagaaaaaaaaactcaaacaccttcagcggccgctctcgatgattgaaacttacgtactcgtgcatgtttacatcacatctcatctatagagtcatcaatattcacct

SEQ ID NO: 3387 - DNA, 123 bp, Glycine max
  Clone ID: LIB3072-024-Q1-E1-D7
tacaggatccaagcttacttacgcctgcacgcgacgtcctatctctcccatactgtctcctaaattcaactcactggccctcatttcacaacctcatcactggtaaaaccctccgttacccaa

SEQ ID NO: 3388 - DNA, 206 bp, Glycine max
  Clone ID: LIB3072-024-Q1-E1-F12
gaagcacaaacaagacaacaaagagttttaattattgcctcattagtttctaactgctgagaaaaatgtctgctatggtagaggtacgggctggggagctgataaagcttcgagaaaaagttcttgcccgcaagcctttcttattatccaaagccaaagaacgattataactgaaccaacaatacaaggaaactcaaactgcggtg

SEQ ID NO: 3389 - DNA, 317 bp, Glycine max
  Clone ID: LIB3072-024-Q1-E1-F2
agaaagaacaaagaaagggaacaaaatcaccaaacccaaaccccctttctctactaacaaaaaaaaatcaaccaagttccaaacgaataatcacaaacaacaatccccggtgactgcatatccagcaggggcccagagcaacctagcagctccaccaccacctgtaggttatcccactaaggatgatcttccctcccaacaaaatgttcctgtcaaaaccactaccaagggtgatggcttctggaaaggatgttgtgcgggcttgtgctgttgctgtgccctggattgttgtctctgattgaacatccctgcagtac

SEQ ID NO: 3390 - DNA, 289 bp, Glycine max
  Clone ID: LIB3072-024-Q1-E1-G11
gacagcaaaaacaattaataaagatgagtttgaagaacaacatggtggtgctaaaggtgtgtttgttgcttcttttccttgtgggggttacagctgcacgcatggaactgagcttcttcaaaagtgatcagtcatcaagttatgatgatgatgagtattcaaaaccatgctgtgatctctgcatgtgcacacgctcaatgcctcctcaatgcagctgtgaagatattaggctgaattcatgccactcagattgtaagagctgtatgtgcacacgctcacaaccaggaca

SEQ ID NO: 3391 - DNA, 217 bp, Glycine max
  Clone ID: LIB3072-024-Q1-E1-G6
gacagcaaaaacaattaataaagatgagtttgaagaacaacatggtggtgctaaaggcgtgtttgttgcttcttttccttgtgggggttacagctgcacgcatggaactgagcttcttcaaaagtgatcagtcatcaagttatgatgatgatgagtattcaaaaccatgctgtgatctctgcatgtgcacacgctcaatgcctccccaatgcagctg

SEQ ID NO: 3392 - DNA, 348 bp, Glycine max
  Clone ID: LIB3072-024-Q1-E1-G9
gacagcaaaaacaattaataaagatgagtttgaagaacaacatggtggtgctaaaggtgtgtttgttgcttcttttccttgtgggggttacagctgcacgcatggaactgagcttcttcaaaagtgatcagtcatcaagttatgatgatgatgagtattcagaaccatgctgtgatctctgcatgtgcacacgcccaatgcctcctcaatgcagctgtgaagatattaggctgaattcatgccactcagattgtaagagctgtatgtgcacacgctcacagccaggacagtgtcgttgtcttgacaccaacgacttctgctacaaaacttgcaagtccagagatgact

SEQ ID NO: 3393 - DNA, 143 bp, Glycine max
  Clone ID: LIB3072-024-Q1-E1-H10
gtggacattgaattattgcacgatgccacaagaagagaagcccggggcggttagtgtcctcattttgtgatgtatcttacttatgagaattcggtgggcctacataatgtggatgttaaccttcctacttcaaaaggaaactc

SEQ ID NO: 3394 - DNA, 164 bp, Glycine max
  unsure at all n locations
  Clone ID: LIB3072-025-Q1-E1-B2
gacagcanaaacaattaataaagatgagtttgaagaacaacatggtggtgccaaacgtgtgtttgttgcctcttttccttgtgggggttacagctgcacgcatggaactgagcctcttcaaaattgatcagtcaccaagttatgataatgatgagtattcaaaa

SEQ ID NO: 3395 - DNA, 56 bp, Glycine max
  Clone ID: LIB3072-025-Q1-E1-C4
agttactgctgccatatgacgacaaagcggtacggctgctacaataccatataagg

SEQ ID NO: 3396 - DNA, 81 bp, Glycine max
  Clone ID: LIB3072-025-Q1-E1-E2
ggacaacattagacgttgaattgaattttgatggcgcaacaatcgtcacctccacggcggcaaactcctccgccatcgcag

SEQ ID NO: 3397 - DNA, 240 bp, Glycine max
  Clone ID: LIB3072-025-Q1-E1-E4
ggctgacaagccaatcctttgtgtaggtgctcaaccctagtaagccgcaatggtgaagtactcaagggagcctgacaatccaactaagtcttgcaaggctagaggcgccgaccttagggttcattttaagaacacaagggaaactgcctttgcaatcacgaagttgcccttggtcaaggctaaaaggtacttggaagatgttcttgcccacaagcaggcaattccattcagacgtttttg

SEQ ID NO: 3398 - DNA, 197 bp, Glycine max
  Clone ID: LIB3072-025-Q1-E1-E5
ccctgcctgatgggtttctgcacggataaaacttttaacattacccatcttattattatactcacagtgatgacaattccttgccaaaagaaaaaaatataaaatggccgctcatagcaggctctctacaagatccaagcttaattacacgtgcatgctacgtcatagcgcctccaaaatgtcacccaaattcagtt

SEQ ID NO: 3399 - DNA, 225 bp, Glycine max
  Clone ID: LIB3072-025-Q1-E1-E8
gacagcaacaacaattaatagagatgagtttgaagaacaacatggtggtgctaaaggtgtgtttgttgcttcttttccttgtgggggttacagctgcacgcatggaactgagcttcttcaaaagtgatcagtcatcatgttatgatgatgatgagtattcaaaaccatgctgtgatctctgcacgtgcacacgctcaatgcctcctcaatgcaactgtcaagata

SEQ ID NO: 3400 - DNA, 193 bp, Glycine max
  Clone ID: LIB3072-025-Q1-E1-F6
aatgtggtcactctacaatgtctctcttcaacatcttccccttcttgtgaggggttttcatgggaaggggttgtcgcatccaacaacatgtaatgtcttcttcgtttaagccataaaaaaaaaatgaaaaagtatgtcagcaatccatcataataatcaattatatttaactaagagaataaaataacattac

SEQ ID NO: 3401 - DNA, 164 bp, Glycine max
  Clone ID: LIB3072-025-Q1-E1-G1
gatcgagaactagttcaatatcctagtataccttaataaataatttaagatactatgatgagagcacggttcccattactgttgctgggacttgttttcctggcttcagtttctgtctcatttggcattgcttactgggaaaaagagaacccaaacacaacaag

SEQ ID NO: 3402 - DNA, 107 bp, Glycine max
  Clone ID: LIB3072-025-Q1-E1-G8
tatacttgacattttcatcaatctttcactcccaaatgatgctatttgtcaaaaaaataataacgtacgaccaatccttactttatggactaagaacatttctgtac

SEQ ID NO: 3403 - DNA, 127 bp, Glycine max
  Clone ID: LIB3072-026-Q1-E1-B5
gacgataaacatcacgcaggccaagcaaaaaaaaaaaaaaaaaaaaaaagcggacacccgacacgctacaggatcacatcttacgtacgcctacatgctacgtcatagatcttctaaactgtcacca

SEQ ID NO: 3404 - DNA, 323 bp, Glycine max
  Clone ID: LIB3072-026-Q1-E1-B6
ggaagaagcagagggagtagcggcattaaaaatgcagatcttcgtgaaaactctgacagggaagactataaccctcgaggtcgagagcagcgacaccatcgacaatgtcaaggccaagattcaagacaaggaaggcattcctccggatcagcagcgtttgattttcgccggaaagcagcttgaagatggaaggatcctggccgattacaacatccagaaggaatcaacccttcatctcgtcctcaggcttcgtggtggcgtcattgagccttccctcatggctttggctcgcaaatacaaccaggacaagatgatttgccgca

SEQ ID NO: 3405 - DNA, 94 bp, Glycine max
  Clone ID: LIB3072-026-Q1-E1-H7
atataattaactagcggacgtcctaaaggatccacgcttacgtacacgtgcatgctatgtgatcgctctcccatatgggcagccacgttcactt

SEQ ID NO: 3406 - DNA, 246 bp, Glycine max
  Clone ID: LIB3072-027-Q1-E1-B1
gaaatatgcaacgtgtcaattatgacacgtgtcgagctatggtgcatccagcgtattataactacttgctcgcatggtcacgtcatgctcgtgttctgttcggacggtggggatgactttattcgggagtgggagctgtatcattgtgacatagtcttatttttttttttttagcgtttctctctgtacttttttttataattttaatttgagtatgatgtttttcaccttagaaaaaaaaagaga

SEQ ID NO: 3407 - DNA, 202 bp, Glycine max
  Clone ID: LIB3072-027-Q1-E1-B6
cggggagaacaagaacaagaaactaggtgaggttgcgctccatatgatcggaacatacgtccacttgcatgcggcatcacatctcatcaatagagtcacctagattcaactcagcgtccgtcgtttgacaccttctctgcaggtaacattccagagttccacaacattcaccacttgcaacaaatccacatttcgccaactg

SEQ ID NO: 3408 - DNA, 477 bp, Glycine max
  Clone ID: LIB3072-027-Q1-E1-C8
taccggtccagaattcccgggtcgactgcgagaagaaacagaagggggagttcgaactaaacaattcaattcaatctgcctcgatcatggagaggaagacatttgggtttttgttcttgctcctccttgtcttagcttctgatgtgacggtgaagagagcagaggcgaaagattgcttgacaaggaggcacgggttccagggtagatgcttattcgacaggcaatgtgcacatgtgtgcaggagcgatggtttcatcggtggtcagtgccgaggccctcttcgcaaatgcttttgctgcaggccatgttgatcgaaattactactgccaaagaggccatgaaataaacaaacaaacaaataaataaatagctctaaccgacacatatgtacgtagtgtcggggttctagctagctaggtaggtacgtgtgtcttttgttatcgatcctagcttggtggagcaagtgtggcatcatga

SEQ ID NO: 3409 - DNA, 357 bp, Glycine max
  Clone ID: LIB3072-027-Q1-E1-D5
ggcaacacaaacattctctccattgtctttgaacactcatcaccatggccaagcttgttctttccctttgtttccttcttttcagtggctgcttcgctctgagagagcaggcacagcaaaatgagtgccagatccaaaagctgaatgccctcaaaccggataaccgtatagagtcggaaggtgggttcattgagacctggaaccctaacaacaagccattccagtgtgccggtgttgccctctctcgctgcacccttaaccgcaatgcccttcgtagaccttcctacaccaacggtccccatgaaatctacatacaacaaggtaatggtatttttggcatgatattcccgggttgtc

SEQ ID NO: 3410 - DNA, 387 bp, Glycine max
  Clone ID: LIB3072-027-Q1-E1-E3
gacacacaactaactaagaaagtcttccatagccccccaataatgaagagcaccatcttctttgctcgctttctcttttgtgccttcacgatctcatacctaccgtcagcgatcgctgagttcgtgctcgataatgaacgtaaccctcttgaaaatggtggcacatattatatcttgtcagacataacagcatttggtggaataagagcagggccaacgggaaatgatagatgccctctcactgtggtgcaatcgcgcaatgagctcgacatggggattgggacaatcatctcgtcgccatatcaaatccgttttatcgccgaaagccatcctttgagccttaagttcgattcatttgcagttataatgctgtgtgttggaattcct

SEQ ID NO: 3411 - DNA, 174 bp, Glycine max
  Clone ID: LIB3072-027-Q1-E1-E4
aacggctgcaaaaaaacaacagaagggacccaaaaaaatgttgaataacagttaacacacgctcaaaaagaatcaagcttaacgtaaaagtggacgctccataagatcccagctaacgtatccctgcatgccacgtcatagctcttcgatattgtcacccaaattcaattaaca

SEQ ID NO: 3412 - DNA, 271 bp, Glycine max
  Clone ID: LIB3072-028-Q1-E1-B5
gaggaaaagaagagtttcagaaaatggatccacatgaagcacaagcagaagcctcaaagagaccaccaggtcatggtgccactgaagtggttcatcagagaaaatcacttcctttcaacttcacaacaatgactatagctggtttgggtagtagagctgctgtgggatacactgtcgtagatgtcgaagaagaagcctgaagctagtgctaatgatgtacaggatgttaggcttggagttgcaagtcctgaagagactcaccctaagagat

SEQ ID NO: 3413 - DNA, 239 bp, Glycine max
  Clone ID: LIB3072-028-Q1-E1-B6
catcctcagctaaaaaaaaaaaaaaaaagaagaaaaaaaagcgggcgctccaaaaggttcaagcctaactaagccttcaagccaagttacaacccctccaaaatggcacaccaaattcaattcaatggccctccttttacaacgtcctgaatgggaaaaacctggcgttaacccaggtaagccccgttcaacacaaccccctttcgcgaagtggggttataaccaaaaaggccccaacc

SEQ ID NO: 3414 - DNA, 232 bp, Glycine max
  Clone ID: LIB3072-028-Q1-E1-B9
gacagcaaaaacaattaataaagatgagtttgacgaacaacatggtggtgctaaaggtgtgtttgttgcttcttttccttgtgggggttacagctgcacgcatggaactgagcttcttcaaaagtgctcagtcatcacgttatgatgatgatgagtactcaaaaccatgctgtgatctctgcatgtgcacacgctcaatgcctcctcaatgcagctgtgaagatattaggct

SEQ ID NO: 3415 - DNA, 54 bp, Glycine max
  Clone ID: LIB3072-028-Q1-E1-C1
cccgggtccacccacgcatccgaggacgcgtgggcggcagaagacgacagaagg

SEQ ID NO: 3416 - DNA, 102 bp, Glycine max
  Clone ID: LIB3072-028-Q1-E1-G3
gacagcacaaacaattaatgaagatgagtttggggaacaacatggtggtgctaaatgtgtcgttcgtgcttcctttccttgggggggttacagctgcacgca

SEQ ID NO: 3417 - DNA, 217 bp, Glycine max
  Clone ID: LIB3072-028-Q1-E1-G6
gacagcaaaaacaattaataaagatgagtttgaggaacaacatggtggtgctaaaggtgtgtttggtgcttcttttccttgtgggggttacagctgcacgcgtggaactgagcttcttcaaaagtgatcagtcgtcaagttatgagggggaggagtagtcaaaaccatgctgtgatctctgcatgtgcacacgctgaatgcctcctcagtgcaactg

SEQ ID NO: 3418 - DNA, 487 bp, Glycine max
  Clone ID: LIB3072-034-Q1-E1-C4
gaacctttgggctgatttatgtgcttgtggtcgtgagaagatgatagaaggggatattgagctgtagaaaaagaaaaaagtgactacagcccggtcctggttccacttagcccagggccctggcctctcatttcactccctatgcactgaaattccaaacccatgactaggctcgagtaactcggccggcagaattcccggctccagcgagctaagccccacgctcgaaccagatgactaaaccttcatcgttcctgacttccccgtcgacgtaaacgtcgacgatctgggcgtcgggctaaaggagcacgcgtacacctgcgcatagtagtgaaacggcaggaaaagttcgataattgcctagggaccgaaaagggaacctagtcacaataagacatccaaagatgctaagaaagagcctcgccgtaacggaatagccgcctaggatttagaatcaggataggccaccttaaaaatttcccccccc

SEQ ID NO: 3419 - DNA, 97 bp, Glycine max
  Clone ID: LIB3072-037-Q1-E1-A2
gacaagcagtgtttcactgacagtgtgtgtgagagatggagagagagagatggcatggttttgtgctgctaggactttccacattcctacgatgaac

SEQ ID NO: 3420 - DNA, 413 bp, Glycine max
  Clone ID: LIB3072-037-Q1-E1-A7
aatgccaaatggggccaaaaaactatggaggttgggcaggttattaaaaccacggagcaggtttcaaggaaggcacttgcaagggatgcaagggaggcacttgcaagggatgcaagggaagctgctgcaagggatgcaaaggtggaggcaagggatgtaaagagaacaacagtgacagcaacaaccgcaaccgcatgatgagtaattctgatattagagggagcattaatgtgttgttgtgatgtggtttatatggcgaaattaaataaatgatgtatgtacctcttgcctatgtaggtttgcgtgttatgatctgttgactagctttggctattaagtaatatggacgttcgttcgtgtctcacacaaaggggtactaccactctgtagtgtatatggatgctgcaaatcaa

SEQ ID NO: 3421 - DNA, 322 bp, Glycine max
  unsure at all n locations
  Clone ID: LIB3072-037-Q1-E1-B3
gaaatcgcgggtcatcgctttaacgaagcaaattggatatttgttggattattcttcggctccaccttcacctttaataaggcctcatctccacgcgacagtgtattgcgcacacatagaaatttccttaaaaaaatgtctgagaaggctgctcttggatcatggtcgagtggcttgtgcggctgcttctctgactgcagcagctgttgcctcacgttctggtgcccttgtgctagtttcggaagaataggagagatcgtggacaaaggaacaacttcttngtgtcttcatggatcacttttctgcctacttggtggtttct

SEQ ID NO: 3422 - DNA, 52 bp, Glycine max
  Clone ID: LIB3072-037-Q1-E1-B8
ggaggcggagacgaagaagtgaagagaagagaagagaagggatttggatctg

SEQ ID NO: 3423 - DNA, 236 bp, Glycine max
  Clone ID: LIB3072-037-Q1-E1-C1
gttggtgagggtatggaagaaggagagttctctgaagctcgtgaggatcttgctgctcttgagaaggactatgaggaggttggggctgaaggagcggaagatgattaggaaggagaggactattcataaatgaaggttttattatcaatgtaattgtttcgagtaaatagggtatatgcttcgttacattaccctgaaccagtattgttcgttccctttttgttttactcctgggt

SEQ ID NO: 3424 - DNA, 208 bp, Glycine max
  Clone ID: LIB3072-037-Q1-E1-C3
ggcaacaagaatttatcatttatacaaaactttgagataggttgcaaaggcttagagaagagttatggctaaaagtgagatgaaattcattggagtagtgattctgatgatgattatagtgggctctacacaagctgataacaacagccctgacttgactgggtgtgaagttaaatgtggtttcaaatgcatagcatatttctatagt

SEQ ID NO: 3425 - DNA, 397 bp, Glycine max
  Clone ID: LIB3072-037-Q1-E1-D7
tccgtattcccggtcgaccacgcgtccgtcacgcgtgcgaccacacatacggccacgctctctcacagctgctagcagacctctgtaggattatcacggatatcactaacacgaacatcccgtcatattctcccatactcgcgcttgttgccttcatagcttctggaaaacatgtgcatatgacagtcataccaacttgtgtgctacaaagcttgtcaagtcattatgaaatattcaagaatccttgcgaacttctttgccaacaacactttggatcacccgcaacacattgagcttgtggcatcaaattccatgtatgtgtatgacatccatgctaatttaaagtttaaccattacaatcacagctttaatacctatttaatagcatttatcccat

SEQ ID NO: 3426 - DNA, 315 bp, Glycine max
  Clone ID: LIB3072-037-Q1-E1-E1
gacagcataaagaattggtaaagatgagtttgaagaacaacatggtggtgctaaaggtgtgtttgttgcttcttttccttgtgggggttacagctgcacgcatggaactgagcttcttcaaaagtgatcagtcatcaagttatgatgatgatgagtattcaaaaccatgctgtgatctctgcatgtgcacacgctcaatgccttctcaatgcagctgtgaagatattaggctgaattcatgccactcagattgtaagagctgtatgtgcacacgctcacagccaggacagtgtcgttgtcttgacaccaacgact

SEQ ID NO: 3427 - DNA, 266 bp, Glycine max
  Clone ID: LIB3072-037-Q1-E1-G4
tggacgtaatgaaaaagattgttatggcggtgagtgcttatgttttggtggcatttgtggcaactcaattaggtggcccttcactgccaaagttgcattaaaatggctgggctatgactttctattaattaatacacagtgcatgatggcaatggccagtctctatcggttgggcgatcaacttacatcagattcttacttgtgtgtgaagagatgcaatgggaactcgtgcaaaagatgtcacttctcaactggtaaaactaaac

SEQ ID NO: 3428 - DNA, 138 bp, Glycine max
  Clone ID: LIB3072-037-Q1-E1-G7
gacaacagtaatatcatattatacacaataaaaaaatgaagtaagtagtagaatattcaagaggcctgaaaagatcaagataaagacgaaggagccgacttgatattttagcattataaccgaaaaaaaaaaaaatat

SEQ ID NO: 3429 - DNA, 238 bp, Glycine max
  unsure at all n locations
  Clone ID: LIB3072-037-Q1-E1-G8
gaggttagagtgaggttggtgcatgcctaanggtgaatgtctatccaaagtgccctcaacctgacctcacttttggactctcccctcactcagatcctggtggcatgaccattcttctccctgatgattttgtgtctggccttcaagtaagaagaggagatgaatggattacagttaagcctgtcccaaatgccttcatcatcaacattggtgaccaaattcaggtgctgagcaatgc

SEQ ID NO: 3430 - DNA, 54 bp, Glycine max
  Clone ID: LIB3072-043-Q1-K1-D9
ccctaattcccgggtcgaccgcacgcgtccgaacctataccttaccaactcatc

SEQ ID NO: 3431 - DNA, 402 bp, Glycine max
  Clone ID: LIB3072-043-Q1-K1-G6
gacagcagaaacaattaataaagatgagtgtgaagaacaacatggtggtgctaaaggtgtgtttgttgcttcttttccttgtgggggttacagctgcacgcatggaactgagcttcttcaaaagtgatcagtcatcaagttatgatgatgatgagtattcaaaaccatgctgtgatctctgcatgtgcacacgctcaatgcctcctcaatgcatctgtgaagatattaggctgaattcatgccactcagattgtaagagctgtatgtgcacacgctcacagccaggacagtgtcgttgtcttgacaccaactacttctgctacaaaccttgcaagttcagagatgactagaaaaactaattagctctctcatatggacgaagccccctttaagctttgtttg

SEQ ID NO: 3432 - DNA, 263 bp, Glycine max
  Clone ID: LIB3072-043-Q1-K1-H2
ggtgagacgagggtaaggtcgcgttgtgttgcgtcgtgtcgtgcgctgttcctctgtcagtcgtttttgttttcagaccaaaccctagctccgcatcgcaaccatgtcgaccaagcaaggtggaaaagctaagcctttgaagaaacccaagtctgataagaaggattacgacgaggttgacatggctaacattcagaagaaaaaggaagaggagaaggcgctaaaagagttgaaagccaaagcgcaacagaaaggaagctttg

SEQ ID NO: 3433 - DNA, 364 bp, Glycine max
  Clone ID: LIB3072-043-Q1-K1-H8
gattcacacatctaactaagaaagtcttccgtggcccgccaaaaatgaagagcaccatcttctatgctctgtttctcttttgtgccttcaccacctgatacctaccttcagccatcgctgatttcgagctcgataatgaaggtaaccctcttgaaaatggtggcacatattatatcttgtcagacataacagcatctggcggaataagagcagccccaacgggaaatgaaagatgccctctcactgaggtgcaatctcgcaatgagctcgacacagggattggaacaatcatctggtacgcatatcgaattccgcttatcgacgaaggccatcctctgagccttaagttcgattcatttgcagt

SEQ ID NO: 3434 - DNA, 239 bp, Glycine max
  Clone ID: LIB3072-044-Q1-K1-A10
cttctacaagaccaccgaatcgtacttctactttaagactacagatcagtactattgcgagaatacgtcagaaatcgtgcggctgcaacattaccaccaatgtgtacaccttccatatgactacatacagttacatataccacaacactacaacaccttacactctatgaaacacttcaacaaatacctcactactcattagcataaattcaatccataaatcatacatcaattcctct

SEQ ID NO: 3435 - DNA, 111 bp, Glycine max
  Clone ID: LIB3072-044-Q1-K1-B11
catgtacctctgctagaagacgactgatcggtactgatgctataatactactgaatgttacggatgctagaagactacataaagttacagctgctagatgactacataagg

SEQ ID NO: 3436 - DNA, 483 bp, Glycine max
  unsure at all n locations
  Clone ID: LIB3072-044-Q1-K1-F12
gacagcaggggcaattgataaagatgagtttgaagaacagcatggtggtgctaaaggtgtgtttgttgcttcttttccttgtgggggttacagctgcacgcatggaactgagcttcttcaaaagtgatcagtcatcaagttatgatgatgatgagtattcaaaaccatgctgtgatctctgcatgtgcacacgctcaatgcctcctcaatgcagctgtgaagatattaggctgaattcatgccactcagattgtaagagctgtatgtgcacacgctcacagccagggcagtgtcgttgtcttgacaccaacgacttctgctacaaaccttgcaagtccagagatgactagaaaaactaatagctctctcaaatggacgaagcccctttaggctttgnttgttatgttaggggagacaaataaaacaagaaataaaagctcagtggccagtaatttgcttttagcaaaattggtcatttttatt

SEQ ID NO: 3437 - DNA, 125 bp, Glycine max
  Clone ID: LIB3072-044-Q1-K1-F9
gatgtcttgttgggagaaaaaaaaacaaaaaaaagagaaaaaaaggcgcccgtttaaaagatccaaggttacctacccctgcattccacgtcataactcttctatagtggcaactaaattcaatt

SEQ ID NO: 3438 - DNA, 123 bp, Glycine max
  Clone ID: LIB3072-044-Q1-K1-H9
ttgtgcagaaagataaacaaacaaataagtaaaggggaaaaaaccgacgacaaagaaaggacaaaaaaaaaaaaaaaaaagcggccgttctagaggatcaaacttacctaccccttccttcca

SEQ ID NO: 3439 - DNA, 59 bp, Glycine max
  Clone ID: LIB3072-046-Q1-K1-A3
cggaattcacggatcgcagccaggcgtgcggtgagaagacgacagaagacaacaaaaag

SEQ ID NO: 3440 - DNA, 72 bp, Glycine max
  Clone ID: LIB3072-046-Q1-K1-A9
ttgtagatcaaagattacttactcctgcatgctacgacataattcttctattatggcacctaaattaaatta

SEQ ID NO: 3441 - DNA, 239 bp, Glycine max
  Clone ID: LIB3072-046-Q1-K1-B7
gattcacacaactaactaagaaagtcttccatagccccccaaaaatgaagagcaccatcttctttgctctctttctcttttgtgccttcaccacctcatacctaccttcagccatcgctgatttcgtgctcgataatgaaggtaaccctcttgaaaatggtggcacatattatatcttgtcagacataacagcatttggtggaataagagcagccccaacgggaaatgaaagatgccct

SEQ ID NO: 3442 - DNA, 422 bp, Glycine max
  Clone ID: LIB3072-046-Q1-K1-B9
ctgctataagacgaccgacggtgatagcgtatcagagagtggtttcagtgagggatcggggttcacttgatccttcataactcgtcatcatcatcatcatcatcaccgttgattgaagaagatgccgatcagaaacatcgccatcggaaggcctgaagaggctactcaccccgacacgttgaaagcggggttggctgagttcatctccaccttgatcttcgtgttcgccggttcaggttccggcatcgcctacaacaagctcaccgacaacagcgccgtcactcccgccggcctcatctacgcttccatcgcccatgctttcgccctcttcgtcgccgtctccgtcggcgccaacatctccggcggccacttctaccccgccgtcaccttctgcgccttctttggcggcaacatcaccttac

SEQ ID NO: 3443 - DNA, 299 bp, Glycine max
  Clone ID: LIB3072-046-Q1-K1-C3
ggtataaaaactagaatgaaaaaaaatagaagcggcccgtgtaaataaaaaaaaaaaaaataatgcgggcgctctataggatacaaacttacatacgcgcgcatgcgacaccatatatcttttatatagtgacataaaatcaaatcactgggcgccgttttacaaaacatcgactgtgaaaaaactgtcgttacacaaattaatatcgtttcagaacatacccctttttccagatgtcgtaatatagaaaagacccgcaccaatatcccttttcaaaagatgtgcagactgaatgtcga

SEQ ID NO: 3444 - DNA, 70 bp, Glycine max
  Clone ID: LIB3072-046-Q1-K1-D8
ttaatactactgatagatgccgatgcaagaagacgactgaaagggggggctgggagaatactacagacgg

SEQ ID NO: 3445 - DNA, 306 bp, Glycine max
  unsure at all n locations
  Clone ID: LIB3072-046-Q1-K1-E1
nnnttnnnnnnnngcnnaaaaaaatgagcaaatgtgctaaaagcaaattactggccacttatcttcttcaaaagtgatcagtcatcaagttatgatgatgatgagtattcaaaaccatgctgtgatctctgcatgtgcacacgctcaattcctcctcaatgcagctgcgaaaatattaggctgaattcattccactcatattgtaagagctgtatgtgcacacccttacatccaggacagtgtttttgtttttacaccaacgacttcttctacaaaccttgcaagttcctatattactacaaaaac

SEQ ID NO: 3446 - DNA, 415 bp, Glycine max
  unsure at all n locations
  Clone ID: LIB3072-046-Q1-K1-E3
ggaattcccgggtccgaccccacgcccgtccgtaccggtctggctgatgaatacctacatgaagggggatttcacacccaactaactaagaaaagtcnttccatgagccccgccaaataatgatgagcaccatcnttctttgctctctnttctcttttgggtgccttcaccacctcatantcctaccttcagnccatcgcnntgatttcgtgccctcgataatgaatgggtaaccctcttgaaaataggtggcacaatatnntatatcttgtcagacactaacagcatttggtggaataaagagccagtccccaacgggaaatgaaaagatgnccctctcatctgtgtgtgcaatctcgcaatgaagctcgacaaaagggattgggaaccaatnncatctcgtccccattatcga

SEQ ID NO: 3447 - DNA, 343 bp, Glycine max
  Clone ID: LIB3072-046-Q1-K1-E8
ggaaaaaaactgaaaagtaaaggcgaaagactttaggtttggaattgggaattagggttgttcgcgtcacgaagatgatcgaggtggtgttgaacgatcgattggggaagaaggtgcgcgtgaagtgcaacgacgatgacaccatcggcgacctgaagaagctggtggcggctcagacgggcacaagagccgacaaggtccgcatccagaagtggtacaccatatacaaagatcacatcactctcaaggattacgagatccacgacggcatgggtctcgaactctactacaactaaacacaaggtgtgttttatgcatgatatattactatgatctgggaatg

SEQ ID NO: 3448 - DNA, 273 bp, Glycine max
  Clone ID: LIB3072-046-Q1-K1-F3
ttcgggggccagatgacaacagaaggggaacacttggtttatcaagagaaaaaataccaaccatggcaaccatttctactgaccaaccaagaagatcctacttctatggaacctcctatggagcaccctatggaaccacctatgagaccaacagcagcattaacaacccttcttcacgccaaaccgtgaagttcataactgctgcaactattggcatcacactcttactactgtctgggtcgaccctaacaagcactgtaataggtttgatca

SEQ ID NO: 3449 - DNA, 104 bp, Glycine max
  Clone ID: LIB3072-046-Q1-K1-F4
ggaatcgtcgaggtatttattcaaataggtataatccacggaattgcggaaattttagaaatcttaaaaatgaaagaattcgagataataactataagtatacg

SEQ ID NO: 3450 - DNA, 413 bp, Glycine max
  unsure at all n locations
  Clone ID: LIB3072-046-Q1-K1-G5
cgggcgaccacgcgtgcgtacggtgnagaaganacagaggggcagcataacaattaataaagatgagtttgggaacgcatggtggnctaaagagtgtgtttgtgcttcttttccttgtgggggttacagctgcacgcatggaactgagcttcttcaaaagtgatcagtcatcaagttatgatgatgatgagtattcaaaaccatgctgtgatctctgcatgtgcacacgctcaatgcctcctcaatgcagctgtgaagatattaggctgaattcatgccactcagattgtaagagctgtatgtgcacacgctcacagccaggacagtgtcgttgtcttgacaccaacgacttctgctacaaaccttgcaagtccagagatgactagaaaaactaatagctctctcaaatggac

SEQ ID NO: 3451 - DNA, 259 bp, Glycine max
  Clone ID: LIB3072-046-Q1-K1-H3
ggcagcaacaaggtttagtgacaccaaacagacgggaaatgggtcgtggggtcagtgctggtggtggacagagttccttggattatctctttggcagtggggtacctgccagcagtgcatatggtgctcgcactcaaaatgcaagtgctccttcaccaccggttgataagcaaagtccagcaccaacaccagcaccagcacctgcacctgcagcatcaacagcaacagcacctgcaccagcaccagcaccagcaccagc

SEQ ID NO: 3452 - DNA, 401 bp, Glycine max
  unsure at all n locations
  Clone ID: LIB3072-047-Q1-K1-C3
ccgggctttcttacaccaccgaaaggattatcgaaggcgatgcaactgaataattaanagaagccatttccatagcatcctaccaaaatgaatagcactagcttgttcgctatctttctactttgcgccttcacctcatacctaccttccgccaccgcccaggacgtgctcgacgtggatggcgatccgattcggaacggattcatatactacgtttcgccggcaataagaggaaaccgtggcggaatagaacgagccgcactcaggaaagacacttgccctatcactgtagtgcaatctcccaatccaaactctaaagggttagaaattaaatttgaatctgcataccccgcctattacataaacgaaaccctaattttgcaaataagttcatttaccca

SEQ ID NO: 3453 - DNA, 230 bp, Glycine max
  Clone ID: LIB3072-047-Q1-K1-C5
gcatcatctacaacccctcgagtgggcacatttctactctacgctctaaaccctctctctctctctctctcgatctatcatggcttcgcccaatcagcaaaccgtggattaccctaccttcaaactcgtcatcttctgtgacggcggtacaagaatgacaacattcgtgaaaaggcatcttaccggtgaattccaaaaaaaatactaaccgaccatttgagtagaggttc

SEQ ID NO: 3454 - DNA, 106 bp, Glycine max
  Clone ID: LIB3072-047-Q1-K1-D12
gcatgcaactgaataattaagaaaagccatttccatagcagcctaagaaaatgaagagcactagcttgttcgctatctttctactttgcgccttcacctcatacct

SEQ ID NO: 3455 - DNA, 236 bp, Glycine max
  Clone ID: LIB3072-047-Q1-K1-D2
tatgtctgctagaaaacaacaaaaggatacagggtggagtttacgacaaactgcttcttcttccacaagacgacatacgggcttttaaaccaaaatatgaatgttgacagagcctactaaaagctaattaaacttatcctgctgctttagaggatccatgattacctacgcgtccattcatcattatacctcttttatcttgtatcctaaatcaaatacactgtccgaccttttac

SEQ ID NO: 3456 - DNA, 316 bp, Glycine max
  Clone ID: LIB3072-047-Q1-K1-D6
ccgcgcgtccgaacacctccgagaacgtctccagaaggggacacttactagtagtaaggatggagtcctcaaagatctatgcttacctcttcctctgcatgatctttctctcttaccacactcccattctcggttgtggctactgagacaaaccccccaaaaagcacatgcctggtaaaacacctaagacacccaaaacacccgctgttaagccaccagtcaccatccctcccattaatgttcctaccgatgttcttccaccaatagtcaaaccccccagtattattccttccattcccattattaacccaaccac

SEQ ID NO: 3457 - DNA, 168 bp, Glycine max
  Clone ID: LIB3072-047-Q1-K1-E3
gacccacgcgtcgtcggctccaacaaaaagacacatttgatcagctctacaaatcaacagaagggacggtttcagaagatacatatcttactattcaaactaaactacacatggatacggctgcaaaaatactacataggggtaccgatgctaaaatacttcacaatg

SEQ ID NO: 3458 - DNA, 125 bp, Glycine max
  unsure at all n locations
  Clone ID: LIB3072-047-Q1-K1-E8
gatataatttattaataattagaactttcttttttcttaaaaaaaaaaagtaaataaaaagatttgatagaatcgtaatttcaattcgattatatagatacctggannaaaagnnanaagttaat

SEQ ID NO: 3459 - DNA, 203 bp, Glycine max
  Clone ID: LIB3072-047-Q1-K1-G10
gtgtgactactagggtttacctctcttacacttagacttcacccttacacttacacattgccatttgaacactatttgggaatagtgggtcagggagtttaaaggagtggtcttttcgttttcctttgtatcctttacgacttgggagattataatatgcagacaccaaaagcaagagttggtacttcagaagtgccccatct

SEQ ID NO: 3460 - DNA, 361 bp, Glycine max
  Clone ID: LIB3072-049-Q1-K1-A5
gattcacacaactaactaagaaagtcttccatagccccccaaaaatgaagagcaccatcttctttgctctctttctcttttgtgccttcaccacctcatacctaccttcagccatcgctgatttcgtgctcgataatgaaggtaaccctcttgaaaatggtggcacatattatatcttgtcagacataacagcatttggtggaataagagcagccccaacgggaaatgaaagatgccctctcactgtggtgcaatctcgcaatgagctcgacaaagggattggaacaatcatctcgtccccatatcgaatccgttttatcgccgaaggccatcctttgagccttaaattcgattcatttgc

SEQ ID NO: 3461 - DNA, 358 bp, Glycine max
  Clone ID: LIB3072-049-Q1-K1-A7
gacaacacagaacaaaaacaaagaaaaaaaaaaacccttagccaacacaaccatcatggccacctctgctattcagcaatcagcattcactggtcaaactgctctgaagcagctcaatgagttcgtccgcaagaccggtggcgccggcaaaggtcgcactaacatgcgccgcaccgtcaagagtgctcctcagagcatttggtatggccctgaccgtcccaagtacttgggtccattctcggagcagattccatcatacctgaccggagaattccctggtgactacggatgggacactgctggattatcagctgacccggaaaccttcgccaggaaccgggagctggaggtgattcac

SEQ ID NO: 3462 - DNA, 181 bp, Glycine max
  Clone ID: LIB3072-049-Q1-K1-B7
gacaggtgtttgcaatactagcgatagctgataagagagataccaacaagaaaagaaaaaaagaagagttgagattccctttgaagaaaagatggcatcccataagcaaagctatgaagctggtcaaactaagggccgaactgaagaaaagacgaaccagacgaagggcaatattggagag

SEQ ID NO: 3463 - DNA, 142 bp, Glycine max
  Clone ID: LIB3072-049-Q1-K1-D2
atgcgttcgtaccgacacaaggggactccagcatctaaacatacccactaagatggctgtctgggtaatcttcatagtgctgcttcttgcagcccttatcctcatgccttaagggcttgccacttacttctaaccaatttat

SEQ ID NO: 3464 - DNA, 123 bp, Glycine max
  Clone ID: LIB3072-049-Q1-K1-D7
tggacacggctgcgactagacaaacgatgggttcgctgaccgtagacgacttacgggtaatgctgctttaagacgacggaatggtaccgatgagggaagaccacataagggttctcaacagtt

SEQ ID NO: 3465 - DNA, 196 bp, Glycine max
  Clone ID: LIB3072-049-Q1-K1-E6
gattcacacatctagctaagaaagtcttgcattgcccctcaaatatgaagagcaccatcttcattgctctctttctcttttgtgcctttaccaccttatacctacctttagccattgttgatttcgtgctcgataatgaaggtaaccctattgaatatggtggcacatattatatcttgtcagacataacatcatt

SEQ ID NO: 3466 - DNA, 262 bp, Glycine max
  Clone ID: LIB3072-049-Q1-K1-F7
ggttctagtgtgtgattgtttgttgttgtaactcgttcttcttcttttgttgttctgtgtttgtgtttgttttttctctcacctgaaaatgtcttgctgcggtggtaactgtggttgcggaaactcctgcaagtgcggcaacggctgctgaagctgcaagatgtacccagacttgagctacactgagtcaaccaccaccgagaccttggtcatgggagtggcacctgttaaggctcaatttgagggtgctgaaatgggtgtg

SEQ ID NO: 3467 - DNA, 293 bp, Glycine max
  Clone ID: LIB3072-049-Q1-K1-H6
gattcacacagctaactaagaaagtcttccatagccccccaaaaatgaagagcaccatcttctttgctctctttctctttcgtgccttcaccacctcatacctaccttcagccatcgctgatttcgtgctcgataatgaaggtcaccctcttgaaaatggtggcacatattatatcttgttagacataacagcatttggtggaataagagcattctcaacgggaaatgaatgatgccctctcactgtggtgcaatctctcaattgagctcgactaagggactggaacaatcat

SEQ ID NO: 3468 - DNA, 128 bp, Glycine max
  Clone ID: LIB3072-050-Q1-K1-B8
gacagcaaaaacaattaataaagatgagtttgaagaacaacatggtggtgctaaaggtgtgtttgttgcttctttttcttgtgggggttacagctgctcgcatggaactgagcttcttcaaaagtgat

SEQ ID NO: 3469 - DNA, 385 bp, Glycine max
  unsure at all n locations
  Clone ID: LIB3072-050-Q1-K1-C9
gaagttgtttaatatacacaacgattatgctgaaacaattaaggatcttgaagatgaggaaaaaagccgtgaaggtgttgttaaagagctagaatactttgaaagtgaagctagtaaaaagaaaaaagagcaggctaaatatctgaaagagattgcactacgtgaaaagagaattgctgagaaaggcaacaagcttgacaagagtcaacctgagcttctgaagttaaaggaggaaatgactcgtataacttcaaaaattaaaaaagggaagaaagagcttgataaaaaaaaggttgaacggaagaagcatgatgctgatatagcattactacagaatgacatccaggatcttacaacanaaatggcagaccttcaggaaaaggga

SEQ ID NO: 3470 - DNA, 214 bp, Glycine max
  Clone ID: LIB3072-050-Q1-K1-E5
gacatcaaacactatcaggaagggaaaattaaaaaaaaagcaggggaaagcggtcgttctagagtgattcaagcttactttcgctttcatgcgacgtcttatctgttttatattagtcactttaatgtaattcacttgtcatcgttttataatgttataactgggaataccttttctttatccatcttaattactattgattttattctttttt

SEQ ID NO: 3471 - DNA, 113 bp, Glycine max
  Clone ID: LIB3072-050-Q1-K1-F11
ggaatcatgagtgctgagttactaaaaagaaaagaaaaacaagaatcaagacatcacacactacgtatcttgaagcaggatctttggtctaagtaacgattctaccgaagacg

SEQ ID NO: 3472 - DNA, 135 bp, Glycine max
  Clone ID: LIB3072-050-Q1-K1-F4
gacccaggcgtacgcactggtgctagatgactatcagaatggattgttgctatcttaaattccattgtagatatgaaggaggggatacatcttttcattgtagggaacaattattatgaatacagaatctaattt

SEQ ID NO: 3473 - DNA, 256 bp, Glycine max
  Clone ID: LIB3072-050-Q1-K1-F7
gatccccaatcagagagaaaagttagggttcacaacttttccttttccttttgcttgcgaatctgaatcaaataatcaatcatccattcattattcatcatgtcgtctgcgaagaaaatcacgctgaagagttcggacggcgaggctttcgaggtggaggatgcggtggcgctggagtcgcatacgataaagcacatgatcgaagactactgctccgacagcggcatccctctgccgaacgttactagcaagatcc

SEQ ID NO: 3474 - DNA, 233 bp, Glycine max
  Clone ID: LIB3072-050-Q1-K1-F8
ccgcttgtacgaacacgccagagggggcctccaaaaccacttattaaggttacgtttgaggaccaccttgggggtcctaaaggttatttggtggctcattttcctggtggggtttcaagtttaccccttgaacctaacttttttaaaaattgttcattcataaattatgactgattataagtattcaaacccatgctgtgatctttgattttccaaatcttaaatgcttctta

SEQ ID NO: 3475 - DNA, 421 bp, Glycine max
  unsure at all n locations
  Clone ID: LIB3072-050-Q1-K1-G12
gacagcaaaaacaattaataaagatgagtttgaagaacaacatggtggtgctaaaggtgtgtttgttgcttcttttccttgtgggggttacagctgcacgcatggaactgagcttcttcaaaagtgatcagtcatcaagttatgatgatgatgagtattcaaaaccatgctgtgatctctgcatgtgcacacgctcaatgcctnctcaatgcagctgtgaagatattaggctgaattcatgccactcagattgtaagagctgtatgtgcacacgctcacaaccaggacagtgtcgttgtcttgacaccaacgacttctgctacaaacctttgcaagtncagagatgactaganaaactaatagctctctcaaatggacgaagcccctttaagcttttgttgtatgttaggggagacaaata

SEQ ID NO: 3476 - DNA, 200 bp, Glycine max
  Clone ID: LIB3072-050-Q1-K1-G8
gttttgtattttatttacattcacgtctgttgtgaggagccgctaaattgagttcggcagttaggcgaaagaagtatgactgctttaccaatagtattaactcaatcgggagatgtttcagcttatattcctactaatgtaatttccatttcagatggccaaattttctcatctgtcgatctattcaatgcttggaatca

SEQ ID NO: 3477 - DNA, 324 bp, Glycine max
  Clone ID: LIB3072-050-Q1-K1-G9
cgggattcacacaactgactaagaaagtcttccatagccccccaaaaatgaagagcaccatcttctttgctctctctctcttttgagccttcaccacctcatacctaccttcagccatcgctgatttcgtgctcgataatgaaggtaaccctcttgaaaatggtggcacatattatatcttgtcagacataacagcatttggtggaataagagcagccccaacgggaaatgaaagatgccctctcactgtggtgcaatctcgcaatgagctcgacatatggattggaacaatcatctcgagcccatatcgaatacgttttatcg

SEQ ID NO: 3478 - DNA, 90 bp, Glycine max
  Clone ID: LIB3072-050-Q1-K1-H4
gacagcataggcaagggataaagatgagtttgaagaacaacatggtggtgctaaaggtgttgtttgttgcttctttttcttgtgggggtt

SEQ ID NO: 3479 - DNA, 209 bp, Glycine max
  Clone ID: LIB3072-051-Q1-E1-A11
aggtgtcagaacagacgtccgtgatttcacttcattttgacttgatgctgcggctactttacaactgcatcatcgtatcatcgtcacctcatcgacagacactattcagggggggcggggcaaagccctgctggcaacaatacctttgtgcaatgtcttctctagcagatgccaactaagttctacaccttctccaattccattgttac

SEQ ID NO: 3480 - DNA, 201 bp, Glycine max
  Clone ID: LIB3072-051-Q1-E1-A12
gcccgatacattttttgctattgggtggtcacctgtactactaacttgcgtttctgaaacatttttctctcttacctttctcacgttgggggggggggccactcccccaaaaaaaaaaaagcggccgctctagcggctccacccttacctacccgtgcatcccacctcatacctcttctatatcgtcacccaaattcaatt

SEQ ID NO: 3481 - DNA, 69 bp, Glycine max
  Clone ID: LIB3072-051-Q1-E1-B9
gatccgttaccgaaatcaatcaaggtgggatagagagaaaaaagaagtggcaaccttattgtctcctac

SEQ ID NO: 3482 - DNA, 233 bp, Glycine max
  Clone ID: LIB3072-051-Q1-E1-C11
gacagcaaaaacaattaataaagatgagtttgaagaacaacatggtggggctaagggtgtgtttgttgcttcataaccttgtgggggttacagctgcacgcatggaactgagcttcttcaaaagtgatcagtcatcaagttatgatgatgatgagtattcaaaaccatgctgtgatctctgcatgtgcacacgctcaatgcctcctcaatgcagctttgaaaaatattaaggc

SEQ ID NO: 3483 - DNA, 136 bp, Glycine max
  Clone ID: LIB3072-051-Q1-E1-D10
tatttcgtataccaaaaaaaaaaaaaaaaaaaaaaaaaaaaagcgggcggtccaaaagatataaacttaaggaaggggggaagggaagtcaaaactcctccaaaatggcaactaaaattaatttacatgggcgttc

SEQ ID NO: 3484 - DNA, 58 bp, Glycine max
  Clone ID: LIB3072-051-Q1-E1-D9
gattcatctctacagcacaaaaaagaaagaaatccaacccgtgaagaaagcacagcac

SEQ ID NO: 3485 - DNA, 73 bp, Glycine max
  Clone ID: LIB3072-051-Q1-E1-F3
gctataggatataaacttatatatgcgtgcatacgacatcatagctcttctataatgtcacctaaattcaaat

SEQ ID NO: 3486 - DNA, 204 bp, Glycine max
  unsure at all n locations
  Clone ID: LIB3072-051-Q1-E1-G2
taggcgagtcataaagacgaggagcgtcgaatacatgccatttactttgtccatgtttttaaccatcaatgctgttatgtggttcttctatggccttctcctcanggattattacgttgctcttccaaacacgcttgggtttgtcttcggcataattcagatggtgatgtatttgatgtacagaaacgccaccccagtggtact

SEQ ID NO: 3487 - DNA, 218 bp, Glycine max
  Clone ID: LIB3072-051-Q1-E1-H4
gaccgcgacccctttcgctctccctctgcgcaaacatgttgttcttctcgtacttcaaggatttggtggggagggaagtaatcgtggagctgaagaacgatttggccatcaaagggacgttgcattctgttgatcagtacctcaacatcaagctcgaaaacactagcgtcgtcaatcaagaaaagtaccctcacatgctttctgtaaagaactgcttc

SEQ ID NO: 3488 - DNA, 304 bp, Glycine max
  Clone ID: LIB3072-052-Q1-E1-B2
gaccacacaccacacacatagtagctattagactcgctagagtaattgcggaatctgctagaattttctaataatggcgaaagacgttgagcaggtcacagagcaaggtgaatactccgcgaaggactaccatgaccctcctccggcaccgttgatcgacccagatgagctcacaaagtggtccttgtacagagccgccatagctgagttcatagcaacactcctttttctttacatcaccgtgttgaccattattggctacaagagacacaatcacaccaaaatccccggtaacaacgaaatg

SEQ ID NO: 3489 - DNA, 315 bp, Glycine max
  unsure at all n locations
  Clone ID: LIB3072-052-Q1-E1-C8
gattcacacaactaactaagaaagtcttccatagccccccaaaaatgaagagcaccatcttctttgctctctttctcttttgtgccttcaccacctcatacctaccttcagccatcgctgatttcgtgctcgataatgaaggtaaccctcttgaaaatggtggcacatattatatcttgtcagacataacagcatttggtggaataagagcagccccaacgggaaatgaaagatgccctctcactgtggtgcaatctcgcaatgagctcgacaaagggattggaacaatcatctcgtcnccatatcgaatccgtt

SEQ ID NO: 3490 - DNA, 62 bp, Glycine max
  Clone ID: LIB3072-052-Q1-E1-D7
attattaaagataaataatcacttttgtgtctgaatgtgtaattcgctgataaatgagtacc

SEQ ID NO: 3491 - DNA, 351 bp, Glycine max
  Clone ID: LIB3072-052-Q1-E1-E10
gaagaagaagaaggagcatggccatgagcatggccatgacagcagcagcagcagtaacagtgattaaactgctgcatcacctatatatttggaaggtttatgggaccatagtaacgagggctgtgccttaatttctctctctctctctctctctctctctctctctctctttttcctttttccctatcttgtgatctatttatgagtgagaaaaacaaaagtgagaaattgtgcgcgtatctggttgctaattcgagtgctattagtctgtggtttggttggtttgtaaccccgctacttgggttatgtttgattgtatactatcccagagagataaaaattttaaattat

SEQ ID NO: 3492 - DNA, 445 bp, Glycine max
  Clone ID: LIB3072-052-Q1-E1-E12
gcgtccgaagcaagaagacgacagaaggggacagaagaaaaaagagaagaagatgggtttgaagaacaacatggtggtgctaaaggtgtgtttggtgctacttttccttgtggggggtactactagtgccagcttgaggctgagtgagcttggcctgctcatgaaaagtgatcatcatcaacactcaaatgatgatgactcttcaaaaccatgctgtgatcaatgcgcatgcacaaagtcaaaccctcctcaatgccgctgttcagatatgaggctgaattcgtgccattcagcttgcaaatcttgtatttgcgcattatcgtatcctgcacagtgtttttgtgttgacataacggatttctgctatgaaccttgcaagcccagtgaggatgacaaggaaaactactaatgaacaagtgttatgcatgtaagctctctctccaat

SEQ ID NO: 3493 - DNA, 235 bp, Glycine max
  Clone ID: LIB3072-052-Q1-E1-F7
agacgtcagcacacgcgtcagtgcggctgctaagattacaaaaggggggtcgtctagccgcaatcacgaatcccaattccatacctcgcgttctgccttcctctattacatcaggatggagtcacaggtgatgcatgcaattgttggcagccttctgggtcgtagtgggtgaaaaggacaattatcacaactttggttgaaatttttggatgatcataatcttcgcaacagcagg

SEQ ID NO: 3494 - DNA, 333 bp, Glycine max
  Clone ID: LIB3072-052-Q1-E1-G3
aacaaaacaaagacgagaaaaaggaagaaacaaacgaagacaaacatgaggagaataaagaggacaacaacgaagaaaataacgaagagaagaaggaggagaaaaaataataaacaatacttgattatcatctggttttgtctaattctacccttttattttcttttctttttttttaactttgttttgcatattttcccatattcacaaccacttgttacctgcagcaacctcctccatctacttcactctcacgccgccgctctataggatccatgcttacctccccctccatcctacgtcctccctcttctgtagtgtcacccaaattca

SEQ ID NO: 3495 - DNA, 94 bp, Glycine max
  Clone ID: LIB3072-052-Q1-E1-H2
gtagaagttatggaacactaatgtgtaatcaaagtctgatagtttcaaaaaaaattaattatatccaaaaaattatattatatattggtacccg

SEQ ID NO: 3496 - DNA, 367 bp, Glycine max
  Clone ID: LIB3072-053-Q1-E1-B2
gggcaaacatagagtttctaagctacactacacagtcggggaagcaatgggttcgttctcaaatcaatcgagagggtcgtcgagccaattatctgctcaggatctcaaaaaccagttgaagaaccaacttgccattgagtatgctcaacaatttcttgagacagtgggaagaaagtgttttgagaagtgtgttacaaaaccaggttcaagcctcggtgggagtgaaagcagttgcatctctaggtgcgtagatcgatatattgaagccacaggcataattagcaaagcgttatttagttcacaatgaaatggacaaccccagtaaatcttgtttttgctcaacattgtgagtactaatttatagaca

SEQ ID NO: 3497 - DNA, 325 bp, Glycine max
  Clone ID: LIB3072-053-Q1-E1-C11
gacagcaaaaacaattaataaagatgagtttgaagaacaacatggtggtgctaaaggtgtgtttgttgcttcttttccttgtgggggttacagctgcacgcatggaactgagcttcttcaaaagtgatcagtcatcaagttatgacgatgatgagtattcaaaaccatgctgtgatctctgcatgtgcacacgctcaatgcctcctcaatgcagctgtgaagatattaggctgaattcatgccactcagattgtaagagctgtatgtgcacacgctcacagccaggacagtgtcgttgtcttgacaccaacgacttctgctacaa

SEQ ID NO: 3498 - DNA, 165 bp, Glycine max
  Clone ID: LIB3072-053-Q1-E1-C7
taacggtactgctgccgtcaacaccacattacgggtacacggggggacaggggtcactacctttcaatccagccgctctacatgctccaagcttacgtgtccgttcatgcgacctcatcgctcttctataatgtcacctaacttcaattcactgggcgtcgtttt

SEQ ID NO: 3499 - DNA, 312 bp, Glycine max
  Clone ID: LIB3072-053-Q1-E1-C8
aggacagcaaaaacaattaataaagatgagtttgaagaacaacatggtggtgctaaaggtgtgtttgttgcttcttttccttgtgggggttacagctgcacgcatggaactgagcttcttcaaaagtgatcagtcatcaagttatgatgatgatgagtattcaaaaccatgctgtgatctctgcatgtgcacacgctcaatgcctcctcaatgcagctgtgaacatattaggctgaattcatgccactcagattgtaagagctgtatgtgcacacgctcacagccaggacagtgtccctgtcttgacaccaa

SEQ ID NO: 3500 - DNA, 280 bp, Glycine max
  Clone ID: LIB3072-053-Q1-E1-D5
tggcacaatgatgaatgaagcaacttctggtttgaatcatctaatctgatacaggtaaagcatgccgaaaaaacgacaaaaagggtaaaaaaaaaaacgggcggcccaaaaggttcaaggctaacctagacgttcaaggaatacctaagccctcctgcatggtcaccgaacttcaattaaggggccttcgtttaaaaacttcgtaacgggaaaaaccctccggtactgcaaataacctcccttgaacaaaatcccccttttgcaacaggactcactttca

SEQ ID NO: 3501 - DNA, 74 bp, Glycine max
  Clone ID: LIB3072-053-Q1-E1-D6
caatggcagagacagatttgtaccatctcttgcctcaaataatgcagcaccatcacaagccaacctcttcatca

SEQ ID NO: 3502 - DNA, 112 bp, Glycine max
  Clone ID: LIB3072-053-Q1-E1-E2
aggcggcgcccctcgaaaaaaaaaaacaaagcggccgctctagaggctgcagccctagatgatcctaccttccatatccgtgcacgccacgtcagacaccttccatcatgtc

SEQ ID NO: 3503 - DNA, 373 bp, Glycine max; identical to SEQ ID NO: 542
  Clone ID: LIB3072-053-Q1-E1-F6

SEQ ID NO: 3504 - DNA, 75 bp, Glycine max
  Clone ID: LIB3072-053-Q1-E1-G8
ctgcgacaacacgacggtatggttccgttgcgacaacactacagattggtattgctgcgagacgactacataacg

SEQ ID NO: 3505 - DNA, 60 bp, Glycine max
  Clone ID: LIB3072-053-Q1-E1-H5
ggaagaagtaactaaaccaaactgcgaaacgctgaacatttgaagcaaaaaaacaaaaac

SEQ ID NO: 3506 - DNA, 212 bp, Glycine max
  Clone ID: LIB3072-053-Q1-E1-H7
cgcgtccgctgacacttcagtacagatggggacagtacgccttaggggcactcagtcaccaacccacactgcgttccgctgcacatttggagcgaggcatcgtcgaacagggccttcatcaggatcaggcgctctagagggtcaaagctgacttactcgtgcaagcaacgtcatagctcttccgtagggtcacctaaattcaggtcacgggc

SEQ ID NO: 3507 - DNA, 349 bp, Glycine max
  Clone ID: LIB3072-054-Q1-E1-A2
gattcacacaactaactaagaaagtcttccatagccccccaaaaatgaagagcaccatcttctttgctctctttctcttttgtgccttcaccacctcatacctaccttcagccatgcgtgatttcgtgctcgataatgaaggtaaccctcttgaaaatggtggcacatattatatcttgtcagacataacagcatttggtggaataagagcagccccaacgggaaatgaaggatgccctctcactgtggtgcaatctcgcaatgagctcgacaaagggagttgaacaatcatctcgtcgccataacgaatccgttttatcgccgaaaggcatcctttgagccttaagtt

SEQ ID NO: 3508 - DNA, 227 bp, Glycine max
  Clone ID: LIB3072-054-Q1-E1-A6
gattcacgcaactaaataagaaatgaagagtactatcttctttgctctctttctagtttgtgccttcaccatctcatacctgccttcagccaccgctcagttcgtgctcgacactgatgatgatcctcttcaaaacggtgggacatactaaatgttgccagttatgagaggaaagggcggtggaatagaagtagattcaacctggaaagaaatatgccctctcactg

SEQ ID NO: 3509 - DNA, 172 bp, Glycine max
  Clone ID: LIB3072-054-Q1-E1-A7
acgaagactgtctctaaggaggaagcgtctgccatcaacgctgctgggaaagcatggtatcacactatggtgtcagattctgagtatacagaattcgacaacttttcgaagtggttgggtgtttcacagtagacttcatgaattagtttttcgtattaaaattttgggtttt

SEQ ID NO: 3510 - DNA, 335 bp, Glycine max
  Clone ID: LIB3072-054-Q1-E1-B11
agagagaagagagatggatccagacgcgttggcaaaggcattcgtggagcactactacagcaccttcgacaccaccaagaacggcttagcgaatctctaccagcacggttccatgctcactttcgaagggcagaagatccacggcgcttccaacatcgttgccaagctcacctccctcccctttcagcagtgccaccactcaatctccaccgtccactgccacccctccggcgtccacgccggcatgctcgtcttcgtcagccgaaaccttcagctcgcccgcgaacagcacactctcaagttcagcccgatgttccatttgataccaacccctc

SEQ ID NO: 3511 - DNA, 285 bp, Glycine max
  Clone ID: LIB3072-054-Q1-E1-B3
gagtccgaaggtggtttgattcaaacatggaactctcaacaccctgagctgaaatgcgccggtgtcactgtttccaaactcaccctcaaccgcaatggcctccacttgccatcttactcaccttatccccggatgatcatcatcgcccaagggaaaggagcacttggagttgcaattccaggatgtcctgagacgtttgaggagccacaggaacaatcaaacgggagaggctcaaggtcgcagaagcagcaactacatgacagtcagcagaagattcgtcacttc

SEQ ID NO: 3512 - DNA, 99 bp, Glycine max
  Clone ID: LIB3072-054-Q1-E1-B8
gacagcacaagcaattaataaagatgagtttgaagaacaacatggtggtgctgcaggtgtgtttgttgcgtcttttccgtggtggggttacagctgcac

SEQ ID NO: 3513 - DNA, 59 bp, Glycine max
  Clone ID: LIB3072-054-Q1-E1-C6
ctcgggtacggctgccacaatactacacaatggtaccgctgcaagacgacgtcacaatg

SEQ ID NO: 3514 - DNA, 258 bp, Glycine max
  Clone ID: LIB3072-054-Q1-E1-D10
gagactctgtgggattcatgcaatggggtagtaaaatcttccatcatcccccatgagtgtcgtccaccatcttctctgctctctttctcatttgtgccttcaccacctcatacctagcttcagccatctctgatttcgtgctcgataatgacagtaaccctcttgaaaatggtggcacatattatatcatgtcagacataacagcatttggtggactaacaccagccccaacgggtaatgatagattccctctcactg

SEQ ID NO: 3515 - DNA, 290 bp, Glycine max
  Clone ID: LIB3072-054-Q1-E1-D12
tcacgcatcagtaaagcttccatactacatcatagggcattcatacatgtcacctaaattctcttcactggccctccttttataacgtccatcatcgttcattgctctcttgctcttttgcgggttcggcatctgagacataccttcatcgatagctggcttcatactcaataagcatgcgtagcttcttcttcctggtggttacacttacttcatgtcaaatcatacaccatttgtatggaataatgaagccccaacggtaaatgagttatgcctctcactgtggtgca

SEQ ID NO: 3516 - DNA, 216 bp, Glycine max
  Clone ID: LIB3072-054-Q1-E1-D3
gagagcgaaagagatgccgttggcttcaagcatgttcgggtgtggagtggtgatggcggcgtcgcaagcaatgggaattggaaggagaagcgatggtggattgacgatagtgtgttcgtctaggccgcagaagaaagcgacggcgcatcacatgaagactcggcctcggaagacgcaggcatgggatagaaaccgcaagcccaccgtctacgattc

SEQ ID NO: 3517 - DNA, 208 bp, Glycine max
  Clone ID: LIB3072-054-Q1-E1-E11
ggaaccgggtattgcgcacgctccttctttggagactgtttccgacatagggtgaaactgaaactcccgtgtcggggtgtttacactgcactgtcacaatgacttcctccaactctccgaaacctgaaaagaagataaccaaaaacacagaaatctccaaaacccaaaggaagacaaccacatacgctgaaacccccaaaaccgaaaa

SEQ ID NO: 3518 - DNA, 287 bp, Glycine max
  Clone ID: LIB3072-054-Q1-E1-F3
ggcaacgagacctaggaagcacgacgacaacaacactcgtcctcacaccgactgccaccgcgtccaaagatgattgatgatcaagatctgggtttctttgccaattttcttggcgtcttcatctttgtactggtcatagcgtatcattttgtcatggctgacccaaagttcgaaggaaactaggaatgtagactgaggtgctttgcaaatggaaatgaatttgatgcaatcaagaactgtagtttgggaatgtgaacgtttagcttactaaaactttcataaacatc

SEQ ID NO: 3519 - DNA, 209 bp, Glycine max
  Clone ID: LIB3072-054-Q1-E1-H4
gtcacaacagatgagaaagaacacaagcaagtttggtgggaaagtgaacgacaaagaggcgtaccccatggggggtgtatggccaagtccattatcaagcatgtttctcctaaatgcgtctctagacaccatgatccctcctcgtgttccagtcaggagcataggaccatatgtcgaccttgcatatctcaccatcacatagaagcaca

SEQ ID NO: 3520 - DNA, 81 bp, Glycine max
  Clone ID: LIB3072-054-Q1-E1-H8
gacagccatggcaggtaatatagatgagtttggtgacaagcatggttctcctaaatgcgtctctgttgcttcttttccctg

SEQ ID NO: 3521 - DNA, 292 bp, Glycine max
  Clone ID: LIB3072-055-Q1-K1-A3
cactaactaatcaaagatgttcttttttaattaaatggctatcacacaatggagttcgaaatttgcatcctcacatgctaaagtgaaacccatggtttagatatgcacgagattatcactaatagaccatattgggaatggtaaaaaaaacttaaaccattagcttgacaaaaaaaaaaaaaaaaaaaaaaaaaaaaaagcggccgttttaaaggatccaagtttacgtacccttgcttgcaacgtcttagcttttcattagggtaacctaaattcaattaactggccgtgg

SEQ ID NO: 3522 - DNA, 165 bp, Glycine max
  unsure at all n locations
  Clone ID: LIB3072-055-Q1-K1-B12
ggcggcacaaagcattcactgtgtcggaaaaagaagaagagaggaaagatgagcgacggaggaaaacgacaaggtggaagagcgttgccgccgccgccaagaggctctccgccttctaccccctctcgccctcgcctcgaacccgtcgatcgcgaaaagacatgn

SEQ ID NO: 3523 - DNA, 314 bp, Glycine max; identical to SEQ ID NO: 358
  Clone ID: LIB3072-055-Q1-K1-C6

SEQ ID NO: 3524 - DNA, 120 bp, Glycine max
  Clone ID: LIB3072-055-Q1-K1-D7
aagacgcctgaaggctgttccgagtagtcttcggactgatccagctgcttattgacttctcattgatgctgcttgtaaacaacttcataatgattcatttgtctaatgataacattatgt

SEQ ID NO: 3525 - DNA, 198 bp, Glycine max
  Clone ID: LIB3072-055-Q1-K1-E11
gatggtaccgtctgacagaagacgaccgaaggttaccgctgatagaagactactgatggttactgttgcgagacgaccacagatcgttacagtttgcacaagacgacagactggtagctgcagatgagacgatattaggctgaattcatgccactcagatcgtgcgatctatatgagtccaggttaactacccgtaca

SEQ ID NO: 3526 - DNA, 311 bp, Glycine max
  unsure at all n locations
  Clone ID: LIB3072-055-Q1-K1-E2
gacagcaaaaacaattaataaagataagtttgaagaacaacatggtggtgctaaaggtgtgtttgttgcttcttttccttgtgggggttacagctgcacgcatggaactgagcttcttcaaaagtgatcagtcatcaagttatgatgatgatgagtattcaaaaccatgctgcgatctctgcatgtgcacacgctcaatgcctcctcaatgtagctgtgaagatattaggctgaattcatgccactcagattgtaagagctgtatgtgcacacgctcacagncaggacagtgtcgttgtcttgacaccaac

SEQ ID NO: 3527 - DNA, 262 bp, Glycine max
  unsure at all n locations
  Clone ID: LIB3072-055-Q1-K1-H5
gaggataaggaaggttgaagaagaagcatgacgaagaaggggaagaagcaattgatgtcatcggcgccgtggggaggcgaggagagtgaagaatccttcaaagagggaaagctgaaagtgacgaggcaaggtgatggcacttncaccatgcacgttcctgccttcaagtccaagcatcatcaccatgacctncacgacgacctcggaatcgagattggtcctgaactacgctacagcttncagcgcaattttcagtttcttc

SEQ ID NO: 3528 - DNA, 256 bp, Glycine max
  Clone ID: LIB3072-056-Q1-K1-A11
gattcacacaactaactgagaaagtctttcatagccccccaaaaatgaagagcaccatcttctatgctctctttctcttttgtgcctccaccacctcatacctaccttcagccatcgctgatttcgtgctcgataatgaaggtaaccctcttgaaaatggtgccacatattatatctggtcagacataacagcatttggtggaataagaccagccccaacgggaattgaaaaatgccctctcactggggcgcaatc

SEQ ID NO: 3529 - DNA, 191 bp, Glycine max
  Clone ID: LIB3072-056-Q1-K1-A3
gacagcataaacaattaataaagatgagtttgaagaacaacatggtggtgctaaaggtgtgtttgatgcttcttttccttgtgggggttacagctgcacgcatggaactgagcttatttataagtgatcagtcatcaaggtatgatgatgatgagtattcaaaaccatgctgtgatctctgcatgtgcaca

SEQ ID NO: 3530 - DNA, 173 bp, Glycine max
  Clone ID: LIB3072-056-Q1-K1-A7
gacagcggaaacaattaataaagatgagtttgaagaacaacatggtggtgctaagggtgtgtatgaggcttatattactagtggggggtacagagtgaagcatggaacatagcttcttcaaaaggtgataggtagtcaaggtatgatgatgatgagtattcaaaaccatgctg

SEQ ID NO: 3531 - DNA, 398 bp, Glycine max
  unsure at all n locations
  Clone ID: LIB3072-056-Q1-K1-B12
ggtacattgcaagcaacaacaacaacaaccactccatcatcatcaattcatcacaatggaacacaccaattacaatgatgttcattgtgaagaaactatagtaaacgctcctttctcatgggaacacaaacctggtctctctaaagtgactacacatggccaaactggcactagcatggtgcttcagcctnctccatgttcatcatcaggatctggaagtgatcatagatataaagtggaggaggagtctcagattcttcgagccgtgcaaacctcactcagaatcagctcttttcggatggagagtcagaaggaagaagacccttttgttgaagcttacaagaaatgcactcaaagcccctttatacatgaacagagtgatagggtccaaaagaaca

SEQ ID NO: 3532 - DNA, 295 bp, Glycine max
  Clone ID: LIB3072-056-Q1-K1-D11
acgcttgcgtacacgcgtaacgaaacacttacggtttgatcatacaaaacgacccaaaggatttctcgggtctagcttacaaactaattcttagacttccagcaattcatatcactttcatcttcatcctttttttattatgatcaaataccaactaataccaaaacttatccttcacaaattaacagccttaaacttcaagtctcaactgcccctattaacaactataataattcgcgacccacgtgtccccatttgaatggataataaccagctccatggtaatacaaaaatt

SEQ ID NO: 3533 - DNA, 281 bp, Glycine max
  unsure at all n locations
  Clone ID: LIB3072-056-Q1-K1-D6
gacacttgacaggaaaaacagtaaagatgggtttgaagaacaacatggtggtgctaaaggtgtgttttttggatcttttgcttgagagggatactaatgctcgctggaactgaacctgtataaaagtgattactcatgaagtgatgatgagtcttcaaaaccatgctgtgatctctgcatgtgcacaggctcaatgccacctgaatgacattgggcagatattaaganggagttcaatgtactcagcttgtgatcgctgtgcgtgcacacgctcgatgcca

SEQ ID NO: 3534 - DNA, 55 bp, Glycine max
  Clone ID: LIB3072-056-Q1-K1-D7
cggtccggaattcccgggtcggacccacgacgttcgcccacgcgtctcgaccact

SEQ ID NO: 3535 - DNA, 170 bp, Glycine max
  Clone ID: LIB3072-056-Q1-K1-D8
gacagtaaaaacaattaataaagatgagattggagaacaacatggtggtgctaaaggtgtgtttgttgcgtattttgcgtgtgggtggtacagctgtacgcatggaactgagcttctttaatagtgatcagttatcaagttatgatgatgatgagtattcaaaaccatgc

SEQ ID NO: 3536 - DNA, 95 bp, Glycine max
  Clone ID: LIB3072-056-Q1-K1-E8
cttgaaaaataaaaaaatagaaaaaagaacaaaggagaaaaatgagaaaaaaaaaaaaaagcggcagttctagaggatccaagtttacgtacgcg

SEQ ID NO: 3537 - DNA, 419 bp, Glycine max
  unsure at all n locations
  Clone ID: LIB3072-056-Q1-K1-G12
gacagcaaaaacaattaataaagatgagtttgaagaacaacatggtggtgctaaaggtgtgtttgttgcttcttttccttgtgggggttacagctgcacgcatggaactgagcttcttcaaaagtgatcagtcatcaagttatgatgatgatgagtattcaaaaccatgctgtgatctctgcatgtgcacacgctcaatgcctnctcaatgcagctgtgaagatattaggctgaattcatgccactcagattgtaagagctgtatgtgcacacgctcacagtcaggacagtgtcgttgtcttgacaccaacgacttctgctacaaaccttgcaagtccagagatgactagaaaaactaatagctctctcaaatggacgaagcccctttaggctttgnttgntaatgtaggggagacaaa

SEQ ID NO: 3538 - DNA, 207 bp, Glycine max
  Clone ID: LIB3072-056-Q1-K1-G6
gactttgagttcgaactaaacaattcaattcaatctgcctcgatcatggagaggaaaacatttgggttttagttcttgctcctccttgtcttagcttctgatgtgacgtgtatgagagcagatgctatagagtgcttgacaaggaagcacgggtttcagggtatatacgtattcgacaggcaatgtgcacatgtgtgcaggagcgat

SEQ ID NO: 3539 - DNA, 272 bp, Glycine max
  unsure at all n locations
  Clone ID: LIB3072-056-Q1-K1-H10
tttggacagccaagactatttatgcagatcagcttgaagaacaacatggtagtgctaaacgtgagtttgatgcttctggtccttgtggacaacacagctgctcgcataaacctgagcttactcaaaagtgatcagttatcaagttatgatgattatgactgttgacaaccatgctaagagctctgcatgtagcacacgttcaaagcctncgtaatgcctgtatgaagatgttaacctgcattgatgcgactcatattgcacgagctgtatgt

SEQ ID NO: 3540 - DNA, 234 bp, Glycine max
  Clone ID: LIB3072-056-Q1-K1-H2
tgacagcataaacaattgataaagatgagtttgaagaacaacatggtggtgctaaaggtgtgtttgttgcttcttttccttgtgggggttacagctgcactcatggaactgagcttcttcaaaagtgatcagtcatcaagttatgatgatgatgagtattcaaaaccatgctaggatctctgcatgtgcacacgctcaacgccttctcaatgcagctgtgaagatattaagctg

SEQ ID NO: 3541 - DNA, 159 bp, Glycine max
  Clone ID: LIB3072-057-Q1-K1-B5
aggtaccggttgcaaaagaccaccgaaaggtaccgcttgcagaaaaccaccgaaaggtacggctgcaaaaaaacgacgaaaggtaccgctgcaaaagaccacgaaagggaacccccttcataaaaaaatttctgtatataatatacagcacccttttcc

SEQ ID NO: 3542 - DNA, 286 bp, Glycine max
  unsure at all n locations
  Clone ID: LIB3072-057-Q1-K1-D2
ggagaatcccaacccaagtttccaagccaaaaaagcagattcctctctatctctctctctcacgtaaacaaaagttacaaaaaaccaaacaccccttctcccaattcccattcccaccagaatcctccattactccgagacccagcacatgctagctccttcttttctcatttctttatttgcaaaatccacacaccctaaattcctttcccttcgaagaatcccttacatcaccgtaacccaataagaagtacctcatttcgctatctcgatccaaaacacanaa

SEQ ID NO: 3543 - DNA, 96 bp, Glycine max
  Clone ID: LIB3072-057-Q1-K1-D4
gtaccgggctgcgtatgaagaccgacatgaaggggtaccgggctggcgagaagtagcgacagaagggggtgacggctgctgagaagaacgtacaga

SEQ ID NO: 3544 - DNA, 353 bp, Glycine max
  Clone ID: LIB3072-057-Q1-K1-E2
gattctcaagttccatcaccgaaaaaaaaaaaaaaaaaaaaaaaaagcgaacggtctagactatccaagctaacctaccctaccctgccacgccatagcttatctatagtgtcacgtaaattaaattcactggactggcctttacaacacaacgactggaaaaacaaatacccttacccaactcaacttaattgcattacatcacattttcgtcaggtcacctaatatcgaagaggacaggaccgaacggatttcccaacagaacagcagcccgaattgcaaatggaacgcgacctgtactcgagcattaaattcagcgcgtgtggtggttacgctacacgcagaccgtacac

SEQ ID NO: 3545 - DNA, 424 bp, Glycine max
  unsure at all n locations
  Clone ID: LIB3072-057-Q1-K1-E4
gatcaagaaccagttcaatatcctagtacaccgtattaaagaatttaagatatactatgatgagagcgcggttcccattactgttgctgggagttgttttcctggcatcagtttctgtctcatttggcattgcgtattgggaaaagcagaaccccagtcacaacaagtgcctccgaagttgcaatagcgagaaagactcctacaggaaccaagcatgccacgctcgttgcaacctccttaaggtggaggaagaagaagaatgcgaagaaggtcaaattccacgaccacgaccacaacacccggagagggaacgtcagcaacacggtgagaaagaagaagacgaatgtgagcagccacgtncattcccattcccacgcccacgccaacctcatcaagaggaagagcacgagcagaatgagggaca

SEQ ID NO: 3546 - DNA, 416 bp, Glycine max
  unsure at all n locations
  Clone ID: LIB3072-057-Q1-K1-E6
gacagcaaaaacaattaataaagatgagtttgaagaacaacatggtggtgctaaaggtgtgtttgttgcttcttttccttgtgggggttacagctgcgcgcatggaactgagcttcttcaaaagtgatcagtcatcaagttatgatgatgatgagtattcaaaaccatgctgtgatctctgcatgtgcacacgctcaatgcctnctcaatgcagctgtgaagatattaggctgaattcatgccactcagattgtaagagctgtatgtgcacacgctcacagccaggacagtgtcgttgtcttgacaccaacgacttctgctacaaaccttgcaagtccagagatgactagaaaaactaatagctctcttaaatggacgaagcccctttaggcttttgttggtatgttaggggagac

SEQ ID NO: 3547 - DNA, 455 bp, Glycine max
  unsure at all n locations
  Clone ID: LIB3072-057-Q1-K1-E7
aggaaatgaagagtttgagaaaatggatccacataaagcacaagcagaagcctcaaagagaccaccaggtcatggtgccactgaagtgcttcatcagagaaaatcgcttcctttcaacttcacaacaatgactatagctggtttggttattacagctgctgtgggatacactgtcttatatgtgaagaagaaacctgaagctagtgctaaggatgtagcaaaggttactcttggagttgcgaatcctgaagagactcaccctaagagatagataatatattattagctntatcatatagtagtatacaacttttgagttcaagggcagggtcaatgactactctttgntctttttttttaatttcattttatatagnttntttctttgtgtgggttttaaaatttaatcatagcangtttgtgacagtcatacaatttcacgatgctaaatgaaa

SEQ ID NO: 3548 - DNA, 271 bp, Glycine max
  unsure at all n locations
  Clone ID: LIB3072-057-Q1-K1-E8
gattcatgcaactgaataattaagaaaagccatttccatagcagcctaagaaaatgaagagcactagcttgttcgctatctttctactttgcgccttcacctcatacccacccttcgncaccgtccaggacgtgctcgacgtggatggcgatccgattcggaacggtttcatatactacgttttgccggcaataagaggaaacggtggcggaatagaacgagccgtactcgggaaagacacttgccctatcactgtagtgcaatcttccaa

SEQ ID NO: 3549 - DNA, 258 bp, Glycine max
  Clone ID: LIB3072-057-Q1-K1-F2
gcattgtgattcatttgcacatttggaaagtgttgtttttctttttttcatttgcattgcaaagcaaaaaccttgcaaattgcaatggcttccaacaaggttattgccaccatcttggttctttctctccttgcctactcaacatcattcaccaatgcatgtggcacatgccacccaaaacctactccttctccccctcctccattagggaagtgccccaaggacacattgaagctaggggtgtgtgctgatgttcta

SEQ ID NO: 3550 - DNA, 247 bp, Glycine max
  unsure at all n locations
  Clone ID: LIB3072-057-Q1-K1-G3
gacagcaaaaacaattgataaagatgagtttgaagaacaacatggtggtgctaaaggtgtgtttgttgcttcttttccttgtgggggttacagctgcacgcatggaactgagcttcttcaaaagtgatcagtcatcaagttatgatgatgatgagtattcaaaaccatgctgtgatctctgcatgtgcacacgctcaatgcctnctcaatgcagctgtgaagatattangctgaattcatgccactc

SEQ ID NO: 3551 - DNA, 419 bp, Glycine max
  unsure at all n locations
  Clone ID: LIB3072-057-Q1-K1-G6
gacagcaaaaacaattaataaagatgagtttgaagaacaacatggtggtgctaaaggtgtgtttgttgcttcttttccttgtgggggttacagctgcacgcatggaactgagcttcttcaaaagtgatcagtcatcaagttatgatgatgatgagtattcaaaaccatgctgtgatctctgcatgtgcacacgctcaatgccttctcaatgcagctgtgaagatattaggctgaattcatgccactcagattgtaagagctgtatgtgcacacgctcacagccaggacagtgtcgttgtcttgacaccaacgacttctgctacaagccttgcaagtccagagatgactagaaaaactaatagctctctcaaatggacgaagcccctttaggctttgnttggtatgttaggggagacaaa

SEQ ID NO: 3552 - DNA, 399 bp, Glycine max
  Clone ID: LIB3072-057-Q1-K1-H2
gagagaaagagagagaaagatgtcgaagcgtggtcgtggtggttcggcggggaacaagttccgcatgtcgctgggtcttccagtggcggcgacggtgaactgcgccgacaacacgggggcgaagaacctctacatcatttcggtgaaagggatcaaaggccgtttgaaccgtcttccctcggcctgcgttggcgacatggtgatggccaccgtgaagaagggaaaacccgatctgaggaagaaggtcttgccagctgtcatcgttcgccagcgcaagccatggcgccgaaaggacggcgtctacatgtacttcgaagataatgctggtgttattgtcaatcccaaaggagaaatgaaagggtctgctatcactggtcccattggaaaagagtgtgctga

SEQ ID NO: 3553 - DNA, 264 bp, Glycine max
  Clone ID: LIB3072-057-Q1-K1-H5
atcagtatgttatgtaaacaccaaaaaaaaaaaaggaaaaaaagaaaagcgggcggtctatatgaacgaagcttacttacgcacgcatgcaagctaatagctatcttatagagagagctaactacaattaactgactggccgtttacaaacaacggactgactaaaaaaaggctgtacgctaactaaattaattggcatgacatacatctttcgttagctggctgaataactaacaagcaggcaccgatcgatcttcctaacaa

SEQ ID NO: 3554 - DNA, 292 bp, Glycine max
  Clone ID: LIB3072-057-Q1-K1-H8
gtctttcattctcattgccgtcacacagagagagaagagacaatgaagtttaacccaagggtttcctcaagccgtcgaaagagccgcaaggctcacttcaccgctccgtcgagcgtgcgtcgcgtcctgatgagcgcgcctctctcgaccgatcttcggtcgaagtacaacgtgcggtccattccggttcgcaaggacgacgaagtgcaagttgtgaagggaacctacaaaggccgcgagggcaaagtggtccaagtctatcgccgcaagtgggtcattcacattgagcgca

SEQ ID NO: 3555 - DNA, 242 bp, Glycine max
  Clone ID: LIB3072-058-Q1-K1-A1
caccaaataaaaaacatgtctaattattgtttcaaacctgatttatatatttattcatttatacatgagtcaacttcttgtattcattaaaactatatatttttcaagttcatttataaatatgtagtcaagatatcaggacatgttgaccattcgttgaaaaagtaaaaaaaaattatgaatgcctatcgcattcaataaaaagacaaggaattatgtatgatggaaaaaaaaaactaaat

SEQ ID NO: 3556 - DNA, 227 bp, Glycine max
  Clone ID: LIB3072-058-Q1-K1-B10
ggatttcgcgaaaaataaaaaaatatcacgcgctggtactaccttttcccaaaccatcaatttcaatactcccaattttcacaatcttcaaccttcaaattctgcttcacctttcttcatttcacttcagagagagagaacacaacagaatgggcgtcgtggtgatcgacggcagcaccgtgcgcgacttcttgaacgacgaaacacgctttaccaaaagcgtggac

SEQ ID NO: 3557 - DNA, 403 bp, Glycine max
  unsure at all n locations
  Clone ID: LIB3072-058-Q1-K1-B12
gatagcagcatcatacaaagcattgaattcaaaagcttaagttcattccttgtgttttgctttcttcctcaaaaccaaacatgtcgaacacatgcggcaactacgactgcgctgacaagactagctgcaccaagggaaacagctatggtgttattgtagagactgagaagagttacgtcgagactgttgtcatggatgttccagcagctgagcatgatgggaagtgcaagtgtggcactaactgcacttgcacggactgcacctgtggccattaaggaatatgtatgaaaatgtaattgccatgtgtttggcaatacaaatatccaaataatgtaatcttcgtatgaataaatgtgtgtgctgttatcctacttcaggtctgtgtagaaaaaaaaaaannant

SEQ ID NO: 3558 - DNA, 335 bp, Glycine max
  Clone ID: LIB3072-058-Q1-K1-B4
ataaaaatggccaaatttgctaaaagcaaattactggccactgagcttttatttcttggtttatttgtctcccctaacataacaaacaaagcttaaaggggcttcgtccatttgagagagctattagtttttctagtcatctctggacttgcaaggtttgtagcagaagtcgttggtgtcaagacaacgacactgtcctggctgtgagcgtgtgcacatacagctcttacaatctgagtggcatgaattcagcctaatatcttccaaacagctgcattgaggaggcattgagcgtgtgcacatgcagagatcacagcatggttttgaatactcat

SEQ ID NO: 3559 - DNA, 274 bp, Glycine max
  Clone ID: LIB3072-058-Q1-K1-C2
ggcagtggttgcgtgggtgcgtgcgtctgagtgggatagaaaagaaaagaatggcggaaagggcgaaaccgatcgacttcgaactcaccttaaagcctttctatcagagagcctcagaagcagaggagcgcttatcaagactagaagcagccttgaatagtaaaaaaggtactggaaacgaggaaaacttgaaagtgattaatggaaatcttcagtcaaagttagaagttgcaaacgtagagttaatttctgaaaaagagaaggctcaaatgct

SEQ ID NO: 3560 - DNA, 315 bp, Glycine max
  unsure at all n locations
  Clone ID: LIB3072-058-Q1-K1-C7
gactcactcatacaatagagaccagcttttgcttctttgtgaacatggagatgaggaaatcatgtggcttcttcttcttgctcctcctccttgtctttgcttcccaggtggtggtgcagacggagggaagagtgtgtgagtcacaaagccacgggttccatggtttgtgtaatagaggccacaactgtgctttggtctgcaggaacgaaggtttctccggtggcaggtgcaaaggcttccgncgnnnccgctgcttttgcaccaggatttgttgagatctcatcaaacactactcttgccatgcaaattaataaa

SEQ ID NO: 3561 - DNA, 159 bp, Glycine max
  Clone ID: LIB3072-058-Q1-K1-D8
tgcatgcggctgcgagatgactaccgtatgtggagcaacaaacagtgctcctacctgaactcgatgaacaacaactcattggtttaatgttctggatacatgcattcttcatgttgaatgcgacttttatctacagtgtgcagctagcttatatgaatt

SEQ ID NO: 3562 - DNA, 166 bp, Glycine max
  Clone ID: LIB3072-058-Q1-K1-F10
gagagtggaaccctaaagctacaggtctccttcctgcgtccaccatcgcaccaagtcgcagcttcatagcagcaccgcaccgcaccgcaccaggtcttctttttttctttcatggcggaggaagttacttctcaattaaaaaaaaatttgctgaaaaaaaaaacaa

SEQ ID NO: 3563 - DNA, 318 bp, Glycine max
  Clone ID: LIB3072-058-Q1-K1-G4
ggcacaagtgagtttgttgatcgagataactagaaacagtgtgatgaaaatgaaggtccttgttttcttcgttgctacaattttggtagcatggcaatgccatgcgtacgatatgttccctctccgaatgaacactggctatggtgcccgtactccggaggtgaaatgcgcaagttggaggcttgctgtggaagcacacaacatctttggctttgagaccattccttgagaatgcgttgaagcaacaaaggaataacccatccatggcgaacaatatagatcaaacttcaaaacagttaaccaacaagcttactttta

SEQ ID NO: 3564 - DNA, 272 bp, Glycine max
  Clone ID: LIB3072-058-Q1-K1-H3
gacagcaaaaacaattaataaagatgagtttgaagaacaacatggtggtgctaaaggtgtgtttgttgcttcttttccttgtgggggttacagctgcacgcatggaactgagcttcttcaaaagtgatcagtcatcaagttatgatgatgatgagtattcaaaaccatgctgtgatctctgcatgtgcacacgctcaatgcctttttctcaatgcagctgtgaagatattaggctgaattcatgccactcagattgtaagagctgtatgtgc

SEQ ID NO: 3565 - DNA, 179 bp, Glycine max
  Clone ID: LIB3072-058-Q1-K1-H6
gattcacacaactaactaagaaagtcttccatagccccccaaaaatgaagagcaccatcttctttgctctctttctcctttgtgccttcaccaccttatacctacctttagccattgcttttgatttcgtgctcgataatgaaagtaaccctcttgaaaatggtggcacatattatatc

SEQ ID NO: 3566 - DNA, 321 bp, Glycine max
  Clone ID: LIB3072-059-Q1-K1-A2
ccacgcgtccgatcacgcgttcgagacgacagaaggggacagcacaaacaattaatagagatgagtttgaagatcaacatggtggtgctaaaggtgtgtcagacgcttcttttccttgcgggggttacagcttcacgcatggaactgagctttttcaaaagtgatcagccttcaagttatgatcatgatgagtcttcaaaaccatgctgtgatctctgcatgtgcacacgctcgatgcctcctcaatgcatctgttaagatatgaggctgtaatcatgccacttatattgctagtgctcgctgtgcacatgctcacagcca

SEQ ID NO: 3567 - DNA, 397 bp, Glycine max
  Clone ID: LIB3072-059-Q1-K1-A6
gacgacagacggggcagggcttggttattagggttttcagcgtcgaccggtgcgcagtggagcctacataagactaatcgaaaatgccgtcgcacaggacattcagattcaagaagaatttggcgtataagatgaggcagaacaggcccattccactactggatccgcatgaggaccgataacaccatcaggtacaacgcgaagcgcctttactggcgatgcatcaagcttggattctgaggtgcatgctctggctaggtgcaatgtatccaagtaattagcgtactattttcttgaggcagacacgagtgttttgagttttgaacatcactcatttgatcgaagactatatcgagtaaggtacttattgtaggtcatacgcatggctgttgtcaac

SEQ ID NO: 3568 - DNA, 344 bp, Glycine max
  Clone ID: LIB3072-059-Q1-K1-A8
gaaggaccagacaagcggagctaaatgactctcggtgcccactgtgcaacagtccggacgaagatgcaacacacctatttttctactacactaagaccctacccctatggtgggaatctcagtcatggataaattcatcgggtgtatatccacacacttccaaagatcattttctgcaacatgataaccggtctgctgttggagttagagctagaagatggaagtgctggttgataacactaacatggacaatttggaagcatctaaacaggatagtcttagataatcaatcttttgatggaagttaagtcatggatgacgcactatttctactatggtcttgg

SEQ ID NO: 3569 - DNA, 382 bp, Glycine max
  Clone ID: LIB3072-059-Q1-K1-B3
agaagacgacagaaggggacaacacagacattctctccattgtctttgaacactcatcaccatggccaagcttgttctttccctttgtttccttcttttcagtggctgcttcgctctgagagagcaggcacagcaaaatgagtgccagatccaaaagctgaatgccctcaaaccggataaccgtatagagtcggaaggtgggttcattgagacctggaaccctaacaacaagccattccagtgtaccggtgttgccctctctcgctgcacccttaaccgcaatgcccttcgtagaccttactacaccaacggtccccaggaaatctacatacaacaaggtaatggtatttttggcatgatattcccgggttggcctaacact

SEQ ID NO: 3570 - DNA, 410 bp, Glycine max
  Clone ID: LIB3072-059-Q1-K1-C10
agttcgtcgaagacgtcagacggggatccacaccaacaaacccgttcctccacccaccgggtcgtcaaggccgccaccgccgtcacagcgggcggctccctcttgatccttgcctcatcgatcctcgccgacaccgtcattgccctcaccatcgtcaccccactgtccgtcattttcagtccggttctcggccctggcgtaatcaccgttgcgctcctgagcctggggttcctcgcctcgagtgggttctgtgtggcggctgtcactgtgctggcgtctatctacaggtacgttaccggcggacaaccacctggcgcggatcagttagacagcgcgcgtcacaagatcatggacaatgcgcgtgagatcaacgactacggacagcaacacatcatccgcgtccaggcttc

SEQ ID NO: 3571 - DNA, 367 bp, Glycine max
  Clone ID: LIB3072-059-Q1-K1-D11
gatgcaactgaataattaagaaaagccatttccatagcagcctaagaaaatgaagagcactagcttgttcgctatctttctactttgcgccttcatctcatacttaccttccgccaccgcccaggacgtgctcgacgtggatggcgatccgattcggaacggtttcatatactacgttttgccggcaataagaggaaacggtggcggaatagaacgagccgcactcgggaaagacacttgccctatcactgtagtgcaatctgccaatccaaactctaaggggttagaaattaagtttgaatctgcataccccgactattacataaacgaaaccctaattttgcaaataaagttcaggtacccacag

SEQ ID NO: 3572 - DNA, 92 bp, Glycine max
  Clone ID: LIB3072-059-Q1-K1-D3
tgaaagatgccgtacaactgtggtgcaatctcgcaatgagcttaagcggacggtttagaacattcatgtttacgtactcttgcatgcgattt

SEQ ID NO: 3573 - DNA, 256 bp, Glycine max
  Clone ID: LIB3072-059-Q1-K1-D5
ggttcacaatcctcctcatctctcttctcttctgcatcgcccacacttgcagcgcctccaaatggcagcaccagcaagatagctgccgcaagcagctccagggggtgaacctcacgccctgcgagaagcacatcatggagaagatccaaggccgcggcgatgacgatgatgatgatgacgacgacaatcacattctcaggaccatgcggggaagaatcaactacataaggaggaacgaagaaaaaaaaactaatag

SEQ ID NO: 3574 - DNA, 83 bp, Glycine max
  Clone ID: LIB3072-059-Q1-K1-E11
gaacacagaaccttcacataaagtatcttaaatttttaatcccccaaaaaggtcaaaacaaatcaaaagaaaaaaataaaaac

SEQ ID NO: 3575 - DNA, 373 bp, Glycine max
  unsure at all n locations
  Clone ID: LIB3072-059-Q1-K1-E3
gattcacacaactaactaagaaagtcttccatagccccccaaaaatgaagagcaccatcttctttgctctctttctcttttgtgccttcaccacctcatacctaccttcagccatcgctgatttcgtgctcgataatgaaggtaaccctcttgaaaatggtggcacatattatatcttgtcagacataacagcatttggtggaataagagcagccccaacgggaaatgaaagatgccctctcactgtggtgcaatctcgcaatgagctcgacaaagggattggaacaatcatctcgtccccatatcgaatccgttttatcgccgaaggccatcctttgagccttaagttcgattcattngcagttataatgct

SEQ ID NO: 3576 - DNA, 293 bp, Glycine max
  Clone ID: LIB3072-059-Q1-K1-E7
gacagcaaaaacaattaataaagatgagtttgaagaacgacatggtggtgctaaaggtgtgtttgttgcttcttttccttgtgggggatacagctgcacgcatggaactgagcttcttcaaaagtgatcagtcatcaagttatgatgatgatgagtattcaaaaccatgctgtgatctctgcatgtgcacacgctcaatgcctactcaatgcatctgtgaagatattaggctgaattcatgccactcagattgtaagagctgtatgtgcacacgctcacagccaggacagtgt

SEQ ID NO: 3577 - DNA, 455 bp, Glycine max
  Clone ID: LIB3072-059-Q1-K1-F10
cccggtacgttgcgagccttaggacactcggtcagacggatgagagatgacggccgcaggggcagagcatacgaaataccaagggtggcaaccatttctgatcaacctagaggggcctactcctatggaacctgatatggagcaccctatggaaccacgtatgagaccaacaccagcattaacaacccaccttgacgccaaacagtgaagttcataactgctgccactattggcatcacactcttgctcctgtctgggttgaccctcacaggcactgtcatgggtttgatcattgcaacccctcttcttgttatcttcagccccatccttgtccctgctgcgtttgtgctgttcctagttgcttctggctttttgttctctgggggctgtggtgtggctgccattgctgctttgtcttggatttacaactatgtgtctgggaaccagcctgcggg

SEQ ID NO: 3578 - DNA, 234 bp, Glycine max
  Clone ID: LIB3072-059-Q1-K1-F3
gattacatctgacatataacaatctgaagcggtgggcaacgaaaacgtggtgtatgcatcaaactgctctcctactatgttgtgccttaaacatctcatacacagcttccgctctagatgatcccagctctcgatcacgtacgtgcgactttttaaagcggttatacatataattactttcaatacactggcaccactttttacaactaagagactgcccaaaccatgacgaaa

SEQ ID NO: 3579 - DNA, 367 bp, Glycine max
  Clone ID: LIB3072-059-Q1-K1-F5
gcttcacagcaaaaacaattaataaagatgagtttgaagaacaacatggtggtgctaaaggtgtgtttgttgcttcttttccttgtgggggttacagctgcacgcatggaactgagcttcttcaaaagtgatcagtcgtcaagttatgatgatgatgagtattcaaaaccatgctgtgatctctgcatgtgcacacgctcaatgcctcctcaatgcagctgtgaagatattaggctgaattcatgccactcagattgtaagagctgtatgtgcacacgctcacagtcaggacagtgtcgttgtcttgacaccaacgacttctgctacaaaccttgcaagtccagagatgactagaaaaactaatagc

SEQ ID NO: 3580 - DNA, 284 bp, Glycine max
  Clone ID: LIB3072-059-Q1-K1-G2
gactttgagttcgaactaaacaattcaattcaatctgcctcgatcatggagaggaaaacatttgggtttttgttcttgctcctccttgtcttagcttctgatgtgactgtgaagagagcagaggcgaaagattgcttgacaaggaggcacgggttccagggtagatgcttattcgacaggcaatgtgcacatgtgtgcacgagcgatggtttcatcggtggtcagtgcccaggccctcttcgcaaatgcttttgcagcacgccatgttgatcgaaattactact

SEQ ID NO: 3581 - DNA, 350 bp, Glycine max
  Clone ID: LIB3072-059-Q1-K1-H12
taatttgggaattattgctcccatcgccattggtttcattgtcggcgctaacattttgttgggtggggccttctctggagcggccatgaaccccgctgtgacatttgggcctgctgtcgtgagctggacctggaccaaccactggatctactgggccgggcctctcatcggtggtggaatcgctggccttgtttacgaggttgtctttatcagccacacccacgagcagcttcccaccactgactactagagggggggaaatgaaaataaaaaaaaaaaaaattgtgtattattgaatttctctggaatcttcttctgtgtacggttttccttccttgtgttttcttcct

SEQ ID NO: 3582 - DNA, 334 bp, Glycine max
  Clone ID: LIB3072-059-Q1-K1-H2
gaagagaaaaaataccaaccatggcaaccatttctactgatcaaccaagaggatcctactcctatggaacctcctatggagcaccctatggaaccacctatgagactaacagcagcattaacaaccctccttcacgccaaaccgtgaagttcataactgctgcaactattggcatcacactcttactcctgtctgggttgacccttacaggcactgtcataggtttgatcattgcaacccctcttcttgttatcttcagacccatccttgtccctgctgcgtttgtgctgttcctggatacttctggctttttgttctctgggggctgtggtgt

SEQ ID NO: 3583 - DNA, 355 bp, Glycine max
  Clone ID: LIB3072-059-Q1-K1-H3
gaagagagaaaataccaaccatggcaaccatttctactgatcaaccaagaggatcctactcctatggaacctcctatggagcaccctatggaaccacctatgagactaacagcagcattaacaaccctacttcacgccaaaccgtgaagttcataactgctgcaactattggcatcacactcttactcctgtctgggttgaccctcacaggcactgtcataggtttgatcattgcaacccctcttcttgttatcttcagccccatccttgtccctgctgcgtttgtgctgttcctggttacttctggctttttgttctctgggggctgtggtgtggctgccattgctgctttatc

SEQ ID NO: 3584 - DNA, 136 bp, Glycine max
  Clone ID: LIB3072-059-Q1-K1-H4
ttccggttccagaagaccaccgaaggggagcttcacagattcatagctagagatagactgcatggtgaatacgatcaaatgtatcaaatgctgagaagacgacagaggggtccggttgcaaaaagaccacagaagg

SEQ ID NO: 3585 - DNA, 282 bp, Glycine max
  unsure at all n locations
  Clone ID: LIB3072-060-Q1-K1-A3
gacatcccgcaggagcagcctaaatattttttttcaggcttgtgttttttttctctggaggggaaacacaaaatttaggcttgtgttttttttggacgttgcagttgtgttcccctccatggacgttgcagcattcacaagtggatgttccccttcctctgcaagcgtagccgctgtgatcttctactaaagatagatctgctttaattcttatcatttttggtattctaaaattttgatgtagatctngtcaccattggacaatgtaaggaattatgatgc

SEQ ID NO: 3586 - DNA, 82 bp, Glycine max
  unsure at all n locations
  Clone ID: LIB3072-060-Q1-K1-C1
tgcagcgtaccgnngtccggaattcccggggtcggacccacgcccgtctcgtacgcgaggaagacgacacgaaggggtacgg

SEQ ID NO: 3587 - DNA, 291 bp, Glycine max
  Clone ID: LIB3072-060-Q1-K1-C6
gatgctcaaacttcttgttccaatcaacacacgttttccttgttccgtggtggcacacactataatctcatggaaaaggaaaacatgctcaaaacgcctccaaaagttccaattcaaccacaaacacccgaacctgaatgcaaaacaccagctccagttcaacaacaagaccccaatgatcataataactcctcaaatgaattgcacaaacctgttaccccaaatcgtcttagagtccccaaggctttcaaatacccagaaagatatacaagtccaactgatttgataatg

SEQ ID NO: 3588 - DNA, 72 bp, Glycine max
  unsure at all n locations
  Clone ID: LIB3072-060-Q1-K1-D4
ccacgcgtncgaccacgcgtncagccacgcgtncgaccacgcgtacgaccacgcgtacgnccacgcgtgcgt

SEQ ID NO: 3589 - DNA, 303 bp, Glycine max
  Clone ID: LIB3072-060-Q1-K1-E3
gacagcaaaaacaattaataaagatgagtttgaagaacaacatggtggtgctaaaggtgtgtttgttgcttattttccttgtgggggttacagctgcacgcatggaactgagcttcttcaaaagtgatcagtcattaagttatgatgatgatgagtattcaaaaccatgctgtgatctctgtatgtgcacacgctcaatgcctactcaatgcagttgtgaagatattaggctgaattcatgccactcagattgtaagagctgtatgtgcacacgctcacagttaggacagcgttgttgttttg

SEQ ID NO: 3590 - DNA, 241 bp, Glycine max
  Clone ID: LIB3072-060-Q1-K1-G8
tgcaagacagagggtcggtgagaagacagaaggtcggtggagaagacagaggtacgtgagaaacacagagggtacgtgagagacaagaggtacgtggagagacacagagggaagagtcagggttttagacttgcaaacctcccgatcaaacgattcgacggaaatggatcgcgcgcgacgatattcatatctcgcagcggcaggttcggtgatggaaccaaccgtcgtctcgtcgatcggt

SEQ ID NO: 3591 - DNA, 306 bp, Glycine max
  Clone ID: LIB3072-060-Q1-K1-G9
gggatggatgtttccttccttataaaggacattgactaacatcaattgcgggcttctgctatgcttttctggaatttgagttctgttgtgctgataagattcatacaagtggatatatgatgttatccacggtttccgttgccatcatttgtaaatattcctcataaatttgagaccatttgttgtatatatttaagaacatagtgcataaagatccactaaataggaaaaggcttagttgttgtagtgcagaatgaatacgtttggtagatatggatattgctttgcttaaatatcaaaatgtac

SEQ ID NO: 3592 - DNA, 59 bp, Glycine max
  unsure at all n locations
  Clone ID: LIB3072-060-Q1-K1-H9
cccacgcgttcgccacgcgtncgaccacgcgtgcgtacgctcgataagacaagggaagg

SEQ ID NO: 3593 - DNA, 270 bp, Glycine max
  Clone ID: LIB3072-061-Q1-K1-A11
gacagcaaaaacaattaataaagatgagtttgaagaacaacatggtggtgctaaaggtgtgtttgttgcttcttttccttgtgggggttacagctgcacgcatggaactgagcttcttcaaaagtgatcagtcatcaagttatgatgatgatgagtattcaaaaccatgctgtgatctctgcatgtgcacacgctcaatgcctcctcaatgcagctgtgaagatattaggctgaattcatgccactcagattgtaagagctgtatgtgca

SEQ ID NO: 3594 - DNA, 255 bp, Glycine max
  Clone ID: LIB3072-061-Q1-K1-A12
gacagcttaaacaattaataaagatgagtttgaagaacaacatggtggtgctaaagagtgtgtttgttgcttcttttccttgtgggggttacaactgcacgcatggaactgatcttcttcaaaagtgatcagtcatcaagttatgatgatgatgagtattcaaaaccatgctgtgatctctgcatgtgcacacgctcaatgtctcctcaatgcagctgtgaagatattaagctgaattcatgccactcatattgt

SEQ ID NO: 3595 - DNA, 304 bp, Glycine max
  Clone ID: LIB3072-061-Q1-K1-A5
gacagcaaaaacaattaataaagatgagtttgaagaacaacatggtggtgctaaaggtgtgtttgttgcttcttttccttgtgggggttacagctgcacgcatggaactgagcttcttcaaaagtgatcagtcatcaagttatgatgatgatgagtattcaaaaccatgctgtgatctctgcatgtgcacacgctcaatgcctcctcaatgcagctgtgaagatattaggctgaattcatgctactcagattgtaagagctgtatgtgcacacgctcacagccaggacagtgtcgttgtcttga

SEQ ID NO: 3596 - DNA, 329 bp, Glycine max
  Clone ID: LIB3072-061-Q1-K1-B9
gatgcaactgaataattaagaaaagccatttccatagcagcctaagaaaatgaagagcactagcttgttcgctatctttctactttgcgccttcacctcatacctaccttccgccaccgcccaggacgtgctcgacgtggatggcgatccgattcggaacggtttcatatactacgttttgccggcaataagaggaaacggtggcggaatagaacgagccgcactcgggaaagacacttgccctatcactgtagtgcaatctcccaatccaaactctaaggggttagaaattaagtttgaatctgcataccccgcctattacataaacg

SEQ ID NO: 3597 - DNA, 53 bp, Glycine max
  Clone ID: LIB3072-061-Q1-K1-C5
ttcggctgggagattacaacagaagggtacggctgctaaaacacgacatatgg

SEQ ID NO: 3598 - DNA, 138 bp, Glycine max
  unsure at all n locations
  Clone ID: LIB3072-061-Q1-K1-D4
cgantgcaaaaaaaaaaaaaaaaaaaaaaagcgggggggggacagtatccaagcttacgtcctccttcctccgacatcctacctcttatatattgtaacctaaaaccaatacactatccactggtttacaacttacaa

SEQ ID NO: 3599 - DNA, 124 bp, Glycine max
  Clone ID: LIB3072-061-Q1-K1-E8
gagtgagagaaagagagagagagggtgtcagtgatgcccttttgcttgatccctcatttgtcaagataataagaagagggtacataacttggtggtgatttgatacgcacgaaaaaaaaaaata

SEQ ID NO: 3600 - DNA, 301 bp, Glycine max
  Clone ID: LIB3072-061-Q1-K1-F4
gcatgcaactgaataattaagaaaagccatttccatagcagcctaagaaaatgaagagcactagcttgttcgctatctttctactttgcgccttcacctcatacctaccttccgccaccgcccaggacgtgctcgacgtggatggcgatccgattcggaacggtttcatatgctacgttttgccggcaataagaggaaacggtggcggaatagaacgagccgcactcgggaaagacacttgccctatcactgtagtgcaatctcccaatccaaactctaaggggttagaaattaagtttga

SEQ ID NO: 3601 - DNA, 285 bp, Glycine max
  Clone ID: LIB3072-061-Q1-K1-F5
gataccatagaagaagcacaaagagaagcattagcactaggagcagcaacaactagtctcagctgaaatggcctcttcagtgatggcatctgtggccctcaaacctgcccctttcactgttgagaagtcctcagtgagaggccttccctctctctcaaggaactcttcttcattcagagttgtggccagtggcaagaagatcaagactgacaaaccttatggaattaatggtggcatggctttgagggatggaactgatgcatctggcaggaaaggaaagggaaa

SEQ ID NO: 3602 - DNA, 180 bp, Glycine max
  Clone ID: LIB3072-061-Q1-K1-G10
gacattattctatatcaattttggttaagagtcttgaaaaagcaagagaaaaaaaaataccaaccatggcaaccatttctgatcaacctagagggtcctactcctatggaacctcatatggagcaccctatggaaccacgtatgagaccaacaccagcattaacaacccaccttcacgcc

SEQ ID NO: 3603 - DNA, 293 bp, Glycine max
  Clone ID: LIB3072-061-Q1-K1-G4
gagacaaagttttggtgcaaagcaaaggctggtacgaggagctttcctccataccaatcaaaggaggagagagagagagagggaggacacacacacacaaaaggaaccgagcaagccacacacaaaaaaagggacgtccgtgccttctcatatatgtgatagctcgcttccgagacaaaaaaaaaaaaataccaaccgcggccgccccggccgatctaaaggaaccaaccttacctacgcggagcacgcagatgtgataactcttctatagcacgaactaaactgactccact

SEQ ID NO: 3604 - DNA, 143 bp, Glycine max
  Clone ID: LIB3072-061-Q1-K1-H12
gtataattgtgtgtcattactataatatatgtcatgtatgcttaatttcactgaaccatgtgtactactgcttatcggtcacgtccatttagtggccacacctgtatccagcgaataaaatccacagatcaaaatctaaatct

SEQ ID NO: 3605 - DNA, 65 bp, Glycine max
  Clone ID: LIB3072-061-Q1-K1-H4
cgggaaaaaaaaaagaaaaaaaagattctaaagaaatataactaatattctttagaataatcaaa

SEQ ID NO: 3606 - DNA, 310 bp, Glycine max
  Clone ID: LIB3072-061-Q1-K1-H5
gagccgggaaataataatggcggggcggcactggtggaggctcagattcttctttaggaatgcagccatgacacgtgtgcccccttaacataatcactgcaatattgttgcttcatgcttttatgacctttgcttacacccgcaacaaattctccaacgctaactgtaactcagctcaactcaattacattaaagaatctgaaaaaattcgacttgccatgccaccggtggaactgataaaaagagtgagggagattgaccacgaagcatacactgaaccagaaactgcccagaataaagacacaaagct

SEQ ID NO: 3607 - DNA, 577 bp, Glycine max
  Clone ID: LIB3072-044-Q1-K1-H10.F1
acttctgcatttcacatgtaattaactttctccaaaattcatatctgaaatcacttctctcaaatcttagaagactttatacatgaggcctgatagagcccacttggcctctttgccaagcacaaatgaccaagcgatatagaagacaaataattcactaaaaagtgacaattctattgaaacagtggtcatttatgaatgtaatttagttcgtgcaaagattcatcgttgacattgtgggagtaatatgcaagtcggacagtaccactttcccttgaaccttgtctcttgcgttaccaacgcacgaatagggaaccattcacctccttggcaattttcattgtcacaagcaatcatatctccaaaagatacctgatgacaaacacagtatgtcggttcatttggatcaatgggttggtcaacatccatcggggtagcatactcctttttatgacttcctggtggaggcatcagctcaaagtccctatcacgctccctatcccaatctctatccctgtaatcagttctctttgattgaggagttacatatatggggttacgcctttcaggtttaggg

SEQ ID NO: 3608 - DNA, 481 bp, Glycine max
  Clone ID: LIB3072-044-Q1-K1-H10.F2
acttctgcatttcacatgtaattaactttctccaaaattcatattctgaaatcacttctctcaaatcttagaagactttatacatgaggcctgatagagcccacttggcctctttgccaagcacaaatgaccaagcgatatagaagacaaataattcactaaaaagtgacaattctattgaaacagtggtcatttatgaatgtaatttagttcgtgcaaagattcatcgttgacattgtgggagtaatatgcaagtcggacagtaccactttcccttgaaccttgtctcttgcgttagcccaacgcacgaatagtggaaccattcacctccttggcaattttcattgtcacaagcaatcatatctccaaaagatacctgatgacaaacacagtatgtcggttcatttggatcaatgggttggtcaacatccatcggggtagcatactcctttttatgacttcctgggggaggcatcagctc

SEQ ID NO: 3609 - DNA, 572 bp, Glycine max
  Clone ID: LIB3072-044-Q1-K1-H10.R1
ggcggctttggccgggagttgggggcgggggggtggggtgccgccgggtgggccggcggtgcgggccccgtggcctggggtccctgggcctggggggcgtgggcccgggtgtggggctccggggtcgggggcggttggttgcgggggtggggggtgggggggggggggtggggaggggcggggggggggggcgggggggggggggcggggggggggggggggggcgccggggggggggggggggccgggggggcggggggggcggggggacggggggggggggcggggggcgggggggggggggggggtggggggggcgggggggggtggcgggggggggggggggtgcggggggggggggggggggggggggcggggggggcggggggcggggggggggggggggggggggggggggggggggggggggggggggggggggggggggcggggggggggggggggggggggggggggggggggggcgcggggtggggggggggggggggcggggggggggggggggggggggggggggggggggggggggggggggggggcggggggggggg

SEQ ID NO: 3610 - DNA, 555 bp, Glycine max
  Clone ID: LIB3072-044-Q1-K1-H10.R2
gaggatttaaacaactttgccgaagatttaaagcaagagggtaaaatagcaccagatgaaccagcaattctgcccccgttgcctatagtccctaaacctgaaaagcgtaaacccatatatgtaactcctcaatcaaagagaattgattacagggatagagattgggatagggagcgtgatagggactttgagctgatgcctccaccaggaagtcataaaaaggagtatgctaccccgatggatgttgaccaacccattgatccaaatgaaccgacatactgtgtttgtcatcaggtatcttttggagatatgattgcttgtgacaatgaaaattgccaaggaggtgaatggttccactattcgtgcgttgggctaacgcaagagacaaggttcaagggaaagtggtactgtccgacttgcatattactcccacaatgtcaacgatgaatctttgcacgaactaaattacattcataaatgaccactgtttcaatagaattgtcactttttagtgaattatttgtcttctatatcgcttggtcatttgtgcttggc

SEQ ID NO: 3611 - DNA, 580 bp, Glycine max
  Clone ID: LIB3072-051-Q1-E1-G4.F1
gtcagaagaccataatcacttttagcataaaaagaagacccataatcattagaattcgctctaaatttaccaagaagctccttttgaacagaagaaaagaaagttgaatactctcactacccccgtccacatctttcagttagtactatatatacacacaataaacaaccgatgagtagacctgctgaaatatgaacaagacatgccccatccctgaacctactacctctaaggcctatctgtgttatgtacatgttctttcaggccaaagcaaaaaaaaaggagcttttcatacacatctaatctgactaatcaaataacatcagatggcactggcaagccgtttctgaagcaactactaccactaacgttatcacggtctcatctttgcagtgcccactacatttgagttttgattcacagttttggcatttcaggcaaacaaaacgagctggaacgggatcagtatcatggatgtcagaacacctggtgtgtcgccacactccacatatatcacacgccaacattctctctccatcatcgtccttggccccgcagctgcaatctacagtccacctct

SEQ ID NO: 3612 - DNA, 527 bp, Glycine max
  Clone ID: LIB3072-051-Q1-E1-G4.F2
ggcagaagaccataatcacttttagcataaaaagaagacccataatcattagaattcgctctaaatttaccaagaagctccttttgaacagaagaaaagaaagttgaatactctcactacccccgtccacatctttcagttagtactatatatacacacaataaacaaccgaaggtagaacctgctgaaatatgaacaagacatgccccatccctgaacctactacctctaaggcctatctgtgttatgtacatgttctttcaggccaaagcaaaaaaaaaggagcttttcatacacatctaatctgactaatcaaataacatcagatggcactggcaagccgtttctgaagcaactactaccactaacgttagtcacggtctcatctttgcagtgcccactacatttgagttttgattcacagttttggcatttcaggcaaacaaaacgagctggaacaggatcagtatcatggatgtcagaacacctggtgtgtcgccacactccacatatatcacacgccaaca

SEQ ID NO: 3613 - DNA, 517 bp, Glycine max
  Clone ID: LIB3072-051-Q1-E1-G4.R2
tgaacttgtagatgaatttgaagattcagaagctataactccaccagaattagttgtgctgcccctgaatgccacggtggctgagcttaagaatcaagcagcaaatgcttttcaagatgtatatctaaggttcagaagacttcaagttgatgggctacatggttatagcggtgtcgacgattccacccaggtcaagctcttgttaggatcgagagatgtagtttgtgtccgaggaagatgcatcgggaagaatgggttgagcaagttccgaatggaaaggggacttgagaggtggactgtagattgcagctgcggggccaaggacgatgatggagagagaatgttggcgtgtgatatatgtggagtgtggcgacacaccaggtgttctgacatccatgatactgatcctgttccagctcgttttgtttgcctgaaatgccaaaactgtgaatcaaaactcaaatgtagtgggcactgcaaagatgagaccgtgactaacgttagtggtagtagttgc

SEQ ID NO: 3614 - DNA, 572 bp, Glycine max
  Clone ID: LIB3072-059-Q1-K1-E6.F1
agcatattgttatgatatcatacaatcattaaacataagtatccataatccataattcatatgtaatgtatatagatcatttggtctagttaatgagcaatcaaaagagtagtaataataatgcatttagcctccggtaaatttggatagatagttataggctatagcgaagatcatattattgatcacccaagatgaagaatcttcttatctgtctgagggtaaacagttccaccgtccaacatgtttggattgaagaagttacgggaagctaatgcctgaatgacattcagttctggtccagaaaccatgtttacttgctgaatcctctcaacgtcattgatcttagtccggagcaaagattttcattttccagctcaatctcccttttctgaagtattcaatttcagccaatagcatctcatgtttcttagatctgattctagtgattcctctttcaagtctattctccaactgcttaagttccttcacagtcagtgtgctcaaggcatcacccatcaggtgcctgttagaattttgcagcatctgtatttgctgtcgcacttagcaga

SEQ ID NO: 3615 - DNA, 166 bp, Glycine max
  Clone ID: LIB3072-059-Q1-K1-E6.F2
ggccgcttttttttttttttttttttttttttttttagcatattgttatgatatcatacaatcattaaacataagtatccataatccataattcatatgtaatgtatatagatcatttggtctagttaatgagcaatcaaaagagtagtaataataatgcatttag

SEQ ID NO: 3616 - DNA, 554 bp, Glycine max
  unsure at all n locations
  Clone ID: LIB3072-059-Q1-K1-E6.R1
cacagaaatcaatgctcagtattatcaacaagaatctgctaagctgcgaccaaatacagatgctgcaaaattctaacaggcacctgatgggtgatgccttgagcacactgactgtgaaggaacttaagcagttggagaatagacttgaaagaggaatcactagaatcagatctaagaaacatgagatgctattggctgaaattgaatactttcagaaaagggagattgagctggaaaatgaaaatctttgcctccggactaagataactgacgttgagaggattcagcaagtaaacatggtttctggaccagaactgaatgtcattcaggcattagcttcccgtaacttcttcaatccaaacatgttggacggtggaactgtttaccctcagacagataagaagattcttcatcttgggtgatcaataatatgatcttcgctatagcctataactatctatccaattagccggcaaanntgcattattattactactcttttgattgctcattaactagaccaaatgatctatatacattacatatgaattatg

SEQ ID NO: 3617 - DNA, 387 bp, Glycine max
  unsure at all n locations
  Clone ID: LIB3072-059-Q1-K1-E6.R2
cacagaaatcaatgctcagtattatcaacaagaatctgctaagctgcgacagcaaatacagatgctgcaaaattctaacaggcacctgatgggtgatgccttgagcacactgactgtgaaggaacttaagcagttggagaatagacttgaaagaggaatcactagaatcagatctaagaaacatgagatgctattggctgaaattgaatactttcagaaaagggagattgagctggaaaatgaaaatctttgcctncggactaagataactgacgttgagaggattcagcaagtaaacatggtttctggaccagaactgaatgtcattcangcattagcttcccgtaacttcttcatcccaacatgtgggacggtggaactgtttac

SEQ ID NO: 3618 - DNA, 295 bp, Glycine max
  unsure at all n locations
  Clone ID: LIB3072-018-Q1-E1-B1.F3
ataggcgagcagctcttgctgccgagnacaagaatttcttggaggttccaaaaatcacatccgagggtggaaaagctgacagaagaacaaaaagnccctatgaagagaggcaaagaaaaataggagcaatatgccctagaaatggaggcttataaacagaagaaagatgaggaggctgcccatttcatgaaggaagaggaggagcagatgaaacttcaaaaacaagaagcattgcaactgcttaagaagaaggagaaaactgaaaatataatcaagaaaacaaaacagaaccgcc

SEQ ID NO: 3619 - DNA, 60 bp, Glycine max
  Clone ID: LIB3072-018-Q1-E1-B1.R3
tttttctgcctcttgtttgaattgcatgtactgttcaagcaattccatcgcagtcctctg

SEQ ID NO: 3620 - DNA, 560 bp, Glycine max
  unsure at all n locations
  Clone ID: LIB3072-044-Q1-K1-H10.R3
acccatatatgtanactcctcaatcaaagagaattgattacagggatagagattgggatagggagcgtgatagggactttgagctgatgcctccaccaggaagtcataaaaaggagtatgctaccccgatggatgttgaccaacccattgatccaaatgaaccgacatactgtgtttgtcatcaggtatcttttggagatatgattgcttgtgacaatgaaaattgccaaggaggtgaatggttccactattcgtgcgttgggctaacgcaagagacaaggttcaagggaaagtggtactgtccgacttgcatattactcccacaatgtcaacgatgaatctttgcacgaactaaattacattcataaatgaccactgtttcaatagaattgtcactttttagtgaattatttgtcttctatatcgcttggtcatttgtgcttggcaaagaggccaagtgggctctatcaggcctcatgtataaagtcttctaagatttgagagaagtgatttcagatatgaattttggagaaagttaattacatgtgaaatgcagaagt

SEQ ID NO: 3621 - DNA, 672 bp, Glycine max
  Clone ID: LIB3072-051-Q1-E1-G4.R3
gtgctgccccttatgcccggtggctgagcttaagatcaagcgcaatgcttttcaagatgtatatctaaggttcagaagacttcaagttgatgggctacatggttatagcggtgtcgacgattccacccaggtcaagctcttgttaggatcgagagatgtagtttgtgtccgaggaagatgcatcgggaagaatgggttgagcaagttccgaatggaaaggggacttgagaggtggactgtagattgcagctgcggggccaaggacgatgatggagagagaatgttggcgtgtgatatatgtggagtgtggcgacacaccaggtgttctgacatccatgatactgatcctgttccagctcgttttgtttgcctgaaatgccaaaactgtgaatcaaaactcaaatgtagtgggcactgcaaagatgagaccgtgactaacgttagtggtagtagttgcttcagaaacggcttgccagtgccatctgatgttatttgattagtcagattagatgtgtatgaaaagctcctttttttttgctttggcctgaaagaactgtacataacacagataggccttagaggtagtaggttcagggatggggcatgtcttgttcatatttcagcaggttctaccttcggttgtttattgtgtgtatatatagtactaactga

SEQ ID NO: 3622 - DNA, 301 bp, Glycine max
  Clone ID: LIB3073-013-Q1-K1-D3
gtactgaagctggtttacttgctctacgagaacgtcgaatgaaggtgactcatgccgactttaagaaggccaaggataaagtaatgtttaagaagaaagaaggggtgcctgaagggctgtatatgtgaaaaactatcctctattatctctggccctcttgtctttcttttaacgttctagttatgcgaacaaatgccaattcatttgtattctgcgaacaaatgtcagttgtattttaggggctttgaatctcaacaacgattttaattcaatatagttttctttcaatttcctcgatttc

SEQ ID NO: 3623 - DNA, 404 bp, Glycine max
  Clone ID: LIB3073-012-Q1-K1-D10
tgtggctcgctctctagggtttttctttttctcttggcactgcatcgcttcaggttcttctgaaaagatgtctcgcgtgtatgttggtaacttggattcacgagtcactgacagagatctcgaagacgaattccgcgttttcggagttattcggagtgtttgggttgcacgtagaccacctggttatgcttttattgactttgatgaccgcagagacgcacaggatgctatccgtgaattggatggcacgaatggttggagggttgagctttctcacaactctagaggtggacgtggtggtcgtggtggtcgctctggtggttctgatttgaaatgttacgagtgtggtgaacctggtcattttgctcgtgaatgccgcatgcgtggtggttcaggaagacgcc

SEQ ID NO: 3624 - DNA, 299 bp, Glycine max
  Clone ID: LIB3073-011-Q1-K1-G9
gctttctcgccgctttgtgctgctgttgcaaaacttagggttgagcctttttttgaggttttcagcgcttctttctcacaatggttcttcagaatgatattgatttgctgaatcctccagctgagttggagaagagaaaacacaaactcaagcgtcttgttcagtcaccaaactctttcttcatggatgttaagtgccagggatgcttcaacataacaactgtgtttagccactctcaaactgttgtggtgtgcggaaactgccagactgttttgtgccaaccaacggggggacgggcg

SEQ ID NO: 3625 - DNA, 401 bp, Glycine max
  Clone ID: LIB3073-025-Q1-K1-D6
gagactcaacaagcattccactcacacctcatcgtttctctctctagatctctgtttcttctttttctccaaccttcgtttcaccaccacacttacattactttgtcgaaatggctccaccaattgagaccccaaacaaggtttccagctatcaacagtccccaaaccctcgtcttaacgagaggattctttcatccatttccaggagacacgttgctgcacacccgtggcacgatcttgagataggacccgaagctccaaagatcttcaactgtgtggtcgaaatagggaaaggaagcaaggtgaaatatgaacttgtcaaaagaactggacttattatggttgatcgtatactttactcatcagttgtttatcctcacaactatgggtttattccacgt

SEQ ID NO: 3626 - DNA, 284 bp, Glycine max
  Clone ID: LIB3073-002-Q1-K1-A8
gatctggcagcagaagaacaagtagttgagaacgaagaaggagaagcaaatggcttcctcaatgatctcttccccagctgttaccactgtcaaccgtgccggtgccggcatggttgctccattcactggcctcaagtccatggctggcttccccaccagaaagaccaacaatgacattacctccattgctagcaaccgtggaagagtgcaatgcatgcaggtgtggccaccagttggcaagaagaagtttgagactctttcctacctgccagaccttgatgatg

SEQ ID NO: 3627 - DNA, 294 bp, Glycine max
  Clone ID: LIB3073-002-Q1-K1-E11
gatctggcagcagaagaacaagtagttgagaactaagaaggagaagcaaatggcttcctcaatgatctcttccccagctgttaccactgtcaaccgtgccggtgccggcatggctgctccattcactggcctcaagtccatggctggcttccccaccaggaagaccaacaatgacattacctccattgctagcaacggtggaagagtgcaatgcatgcaggtgtggccaccagttggcaagaagaagtttgagactctttcctacctgccagaacttgatgatgcacaattggc

SEQ ID NO: 3628 - DNA, 416 bp, Glycine max
  Clone ID: LIB3073-025-Q1-K1-G10
gatctggcagcagaagaacaagtagttgagaactaagaaggagaagcaaatggcttcctcaatgatctcttccccagctgttaccactgtcaaccgtgccggtgccggcatggttgctccattcactggcctcaagtccatggctggcttccccaccagaaagaccaacaatgacattacctccattgctagcaacggtggaagagtgcaatgcatgcaggtgtggccaccagttggcaagaagaagtttgagactctttcctacctgccagaccttgatgatgcacaattggcaaagggaagtagaataccttcttaggaaggggatggattcctttgcttggaattcgaagtggagcacggtttcgtgtaccgtgagcacaacaggtcaccaggatactacgatggacgctact

SEQ ID NO: 3629 - DNA, 317 bp, Glycine max
  Clone ID: LIB3073-011-Q1-K1-D5
tgtgatttggcagcagaagaacaagtagttgagaactaagaaggagaagcaaatggcttcctcaatgatctcttccccagctgttaccaccgtcaaccgtgccggtgccggcatggttgctccattcactggcctcaagtccatggctggcttccccaccagaaagaccaacaatgacattacctccattgctagcaacggtggaagagtgcaatgcatgcaggtgtggccaccagttggcaagaagaagtttgagactctttcctacctgccagaccttgatgatgcacaattggcataggaagtagaataccttc

SEQ ID NO: 3630 - DNA, 275 bp, Glycine max
  Clone ID: LIB3073-002-Q1-K1-F5
gatctggcagcagaagaacaagtagttgagaactgggaaggagaagcaaatggctttctcaatgatctcttccccagctgttaccactgtcaaccgtgccggtgccggcatggttgctccattcactggcctcaagttcatggctggctttgccaccagaaagaccaactttgactttacctgcattgctagcaacggtggaagagtgcaatgcacgcatgtgcggccaccagttgccaagaagtagtttgcgactctttcctacctgtcagacc

SEQ ID NO: 3631 - DNA, 250 bp, Glycine max
  Clone ID: LIB3073-026-Q1-K1-B9
ggggcagcagaagaacaactagttgataactaggaaggagaagcaaatggcttcctcaatgatctcttacccagctgttaccactgtcaaccgtgccggtgccggcatgggttctccattcactggcctaaagtccatggctggctgttccaccatgaagaccaacaatgacattacctacattgctagcaacggttgaagagtgcaatgcatgcaggtatggccaccagttggcaagaagaagtttgag

SEQ ID NO: 3632 - DNA, 428 bp, Glycine max
  Clone ID: LIB3073-011-Q1-K1-C7
tgtggggttttggcagcagaaaaacaagtagttgagaactaagaagaaggaaatggcttcctcaatgatctcctccccagctgttaccaccgtcaaccgtgccggtgccggcatggttgctccattcaccggcctcaaatccatggctggcttccccacgaggaagaccaacaatgacattacctccattgctagcaacggtggaagagtacaatgcatgcaggtgtggccaccaattggcaagaagaagttcgagactctttcctacttgccagacctcgatgatgcccaattggcaaaggaagtcgaataccttctaaggaaaggatggattccttgcttggaattcgagttggagccacggttcgtgtaccgtgagcacaacatgtcacctggatactatgatggacgctactggaccatgtgga

SEQ ID NO: 3633 - DNA, 388 bp, Glycine max
  Clone ID: LIB3073-025-Q1-K1-D2
gatctggcagcagaagaacaagtagttgagaactaagaaggagaagcaaatggcttcctcaatgatctcttccccagctgttaccactgtcaaccgtgccggtgccggcatggttgctccattcactggcctcaagtccatggctggcttactcaccagaaagaccaacaatgacattacctccattgctagcaacggtggaagagtgcaatgcatgcaggtgtggccaccagttggcaagaagaagtttgggactctgtcctacctgccagaccttgatgatgcacaattggcaaaggaagtagaataccttcttaggaagggatggattccttgcttgaaattcgagttggagcacggtttcgtgtaccgtgagcacaacaggtca

SEQ ID NO: 3634 - DNA, 356 bp, Glycine max
  Clone ID: LIB3073-025-Q1-K1-G3
catgatactacgatggacgctactggaccatgtggaagctgcctatgtttggttgcactgatgcttctcaggtgttgaaggagcttcaagaggctaagactgcataccccaacggcttcatccgtatcatcggattcgacaacgttcgccaagtgcagtgcatcagcttcatcgcctacaagcccccaggcttctaagtgtgaaaaatttgcaaagcatttgtagccgccaccccactttgtttgtttgcacttaaactacattcccatttgtttttgctttttgagatttcatcatcctgtatttttggtttctgttttcggacttcaatggaaattaatggatgagaactaatg

SEQ ID NO: 3635 - DNA, 349 bp, Glycine max
  Clone ID: LIB3073-013-Q1-K1-F6
gggcagcagaagaacaagtagttgagaactaagaaggagaagcaaatggcttcctcaatgatctcttccccagctgttaccactgtcaaccgtgccggtgccggcatggttgctccattcactggcctcaagtccatggccggcttccccaccagaaagaccaacaatgacattacctccattgctagcaacggtggaagagtgcaatgcatgcaggtgtggccaccagttggcaagaagaagtttgagactctttcctacctgccagaccttgatgatgcacaattggcaaaggaagtagaataccttcttaggaagggatggattccttgcttggaattcgagttgg

SEQ ID NO: 3636 - DNA, 400 bp, Glycine max
  Clone ID: LIB3073-025-Q1-K1-B10
gatctggcagcagaaaaacaagtagttgagaactaagaagaaggaaatggcttcctcaatgatctcctccccagctgttaccaccgtcaaccgtgccggtgccggcatggttgctccattcaccggcctcaaatccatggctggcttccccacgaggaagaccaacaatgacattacctccattgccagcaacggtggaagagtacaatgcatgcaggtgtggccaccaattggcaagaagaagttcgagactctttcctacttgccagacctcgatgatgcccaattggcaaaggaagtcgaataccttctaaggaaaggatggattccttgcttggaattcgagttggagcgcggtttcgtgtaccgtgagcacaacaggtcacctggatactatgat

SEQ ID NO: 3637 - DNA, 353 bp, Glycine max
  Clone ID: LIB3073-023-Q1-K1-D3
gatctggcagcagaagaacaagtagttgagaactaagaaggagaagcaaatggcttcctcaatgatctcttccccagctgttaccactgtcaaccgtgccggtgccggcatggttgctccattcactggcctcaagtccatggctggcttccccaccagaaagaccaacaatgacattacctccattgctagcaacggtggaagagtgcaatgcatgcaggtgtggccaccagttggcaagaagaagtttgagactctttcctacctgccagaccttgatgatgcacaattggcaaaggaagtagaataccttcttaggaagggatggattccttgcttggaattcgagttgg

SEQ ID NO: 3638 - DNA, 382 bp, Glycine max
  Clone ID: LIB3073-026-Q1-K1-E3
gatatggggcagcagaagaacaagtagttgagaactaataaggagaagcatatggctttctcaatgatctcttccccagctgttaccactgtcaaccgtgccggtgccggcatggttgctacattcactggcctcaagtccatggctggcttccgcaccaagaagaccaacaatgacattacctccattgctagcaacggtggaagagtgcaatgcatgcaggtgtggccaccatttggcatgaagaagtttgagactctttcctacctgccagaccttgatgatgcacaattggcaaaggaagtagaataccttcttaggaagggatggattccttgcttggaattcgagttggagcactgtttcgagtaccgtgagcaca

SEQ ID NO: 3639 - DNA, 408 bp, Glycine max
  Clone ID: LIB3073-025-Q1-K1-H8
ggcagcagaagaacaagtagttgagaactaagaaggagaagcaaatggctccctcaatgatctcttccccagctgttaccactgtcaaccgtgccggtgccggcatggttgctccattcactggcctcaagtccatggctggcttccccaccaggaagaccaacaatgacattacctccattgctagcaacggtggaagagtgcaatgcatgcaggtgtggccaccagttggcaagaagaagtttgagactctttcctacctgccagaccttgatgatgcacaattggcaaaggaagtagaataccttcttaggaagggatggattccttgcttggaattcgagttggagcacggtttcgtgtaccgtgagcacaacaggtcaccaggatactacgatggacgctact

SEQ ID NO: 3640 - DNA, 413 bp, Glycine max
  unsure at all n locations
  Clone ID: LIB3073-025-Q1-K1-F3
gatctggcagcagaagaacaagtagttgagaactaagaaggagaagcaaatggcttcctcaatgatctcttccccagctgttaccactgtcaaccgtgccggtgccggcatggttgctccattcactggcctcaagtccatggctggcttccccaccaggaagaccaacaatgacattacctncattgctagcaacggtggaagagtgcaatgcatgcaggtgtggccaccagttggcaagaagaagtttgagactctttcctacctgccagaccttgatgatgcacaattggcaaaggaagtagaataccttcttaggaagggatggattccttgcttggaattcgagttggagcacggtttcgtgtaccgtgagcacaacaggtcaccaggatactacgatggacgctact

SEQ ID NO: 3641 - DNA, 409 bp, Glycine max
  unsure at all n locations
  Clone ID: LIB3073-024-Q1-K1-B5
gatctggcagcagaaaaacaagtagttgagaactaagaagaaggaaatggcttcctcaatgatctcctccccagctgttaccaccgtcaaccgtgccggtgccggcatggttgctccattcaccggcctcaaatccatggctggcttccccacgaggaagaccaacaatgacattacctccattgctagcaacggtggaagagtacaatgcatgcaggtgtggccaccaattggcaagaagaagttcgagactctntcctacttgccagacctcgatgatgcccaattggcaaaggaagtcgaataccttctaaggaaaggatggattccttgctcggaattcgagttggagcacggtttcgtgtaccgtgagcacaacatgtcacctggatactatgatggacgctac

SEQ ID NO: 3642 - DNA, 399 bp, Glycine max
  Clone ID: LIB3073-007-Q1-K1-F1
gatctggcagcagaagaacaagtagttgagaactaagaaggagaagcaaatggcttcctcaatgatctcttccccagctgttaccactgtcaaccgtgccggtgccggcatggttgctccattcactggcctcaagtccatggctggcttccccaccaggaagaccaacaatgacattacctccattgctagcaacggtggaagagtgcaatgcatgcaagtgtggccaccagttggcaagaagaagtttgagactctttcctacctgccagaccttgatgatgcacaattggcaaaggaagtagaataccttcttaggaagggatggattccttgcttggaattcgagttggagcacggtttcgtgtaccgtgagcacaacaggtcaccaggatacta

SEQ ID NO: 3643 - DNA, 350 bp, Glycine max
  Clone ID: LIB3073-001-Q1-K1-B7
gatctggcagcagaagaacaagtggttgagaactaagaaggagaagcaaatggcttcctcaatgatctcttccccagctgttaccactgtcaaccgtgccggtgccggcatggttgctccattcactggcctcaagtccatggctggcttccccaccaggaagaccaacaatgacattacctccattgctagcaacggtggaagagtgcaatgcatgcaggtgtggccaccagttggcaagaagaagtttgagactctttcctacctgccagaccttgatgatgcacaattggcaaaggaagtagaataccttcttaggaagggatggattccttgcttggaattcgagt

SEQ ID NO: 3644 - DNA, 291 bp, Glycine max
  Clone ID: LIB3073-007-Q1-K1-B2
gatctggcagcagaagaacaagtagttgagaactaagaaggagaagcaaatggcttcctcaatgatctcttccccagctgttaccactgtcaaccgtgccggtgccggcatggttgctccattcactggcctcaagtccatggctggcttccccaccagaaagaccaacaatgacattacctccattgctagcaacggtggaagagtgcaatgcatgcaggtgtggccaccagttggcaagaagaagtttgagactctttcctacctgccagaccttgatgatgcacaatt

SEQ ID NO: 3645 - DNA, 348 bp, Glycine max
  Clone ID: LIB3073-023-Q1-K1-C3
gatctggcagcagaaaaacaagtagttgagaactaagaagaaggaaatggcttcctcaatgatctcctccccagctgttaccaccgtcaaccgtgccggtgccggcatggttgctccattcaccggcctcaaatccatggctggcttccccacgaggaagaccaacaatgacattacctccattgctagcaacggtggaagagtacaatgcatgcaggtgtggccaccaattggcaagaagaagttcgagactctttcctacttgccagacctcgatgatgcccaattggcaaaggaagtccgataccttctaaggaaaggatggattccttgcttggaattcgagtt

SEQ ID NO: 3646 - DNA, 419 bp, Glycine max
  unsure at all n locations
  Clone ID: LIB3073-024-Q1-K1-F3
gatctggcagcagaaaaacaagtagttgagaactaagaagaaggaaatggcttcctcaatgatctcctccccagctgttaccaccgtcaaccgtgccggtgccggcatggttgctccattcaccggcctcaaatccatggctggcttccccacgaggaagaccaacaatgacattacctccattgctagcaacggtggaagagtacaatgcatgcaggtgtggccaccagttggcaagaagaagttcgagactctntcctacttgccagacctcgatgatgcccatttggcaaaggaagtcgaataccttctaaggaaaggatggattccttgcttggaattcgagttggagcacggtttcgtgtaccgtgagcacaacaggtcacctggatactatgatggacgctactggaccatgt

SEQ ID NO: 3647 - DNA, 403 bp, Glycine max
  Clone ID: LIB3073-026-Q1-K1-D12
gatctggcagcagaagaacaagtagttgagaactaagaaggagaagcaaatggcttcctcaatgatctcttccccagctgttaccactgtcaaccgtgccggtgccggcatggttgctccattcactggcctcaagtccatggccggcttccccaccagaaagaccaacaatgacattacctccattgctagcaacggtggaagagtgcaatgcatgcaggtgtggccaccagttggcaagaagaagtttgagactctttcctacctgccagaccttgatgatgcacaattggcaaaggaagtagaataccttcttaggaagggatggattccttgcttggaattcgagttggagcacggtttcgtgtaccgtgagcacaacaagtcaccaagatactacgat

SEQ ID NO: 3648 - DNA, 403 bp, Glycine max
  Clone ID: LIB3073-013-Q1-K1-C1
gatctggcagcagaagaacaagtagttgagaactaagaaggagaagcaaatggcttcctcaatgatctcttccccagctgttaccactgtcaaccgtgccggtgccggcatggttgctccattcactggcctcaagtccatggctggcttccccaccagaaagaccaacaatgacattacctccattgctagcaacggtggaagagtgcaatgcatgcaggtgtggccaccagttggcaagaagaagtttgagactctttcctacctgccagaccttgatgatgcacaattggcaaaggaagtagaataccttcttaggaagggatggattccttgcttggaattcgagttggagcacggtttcgtgtaccgtgagcacaacaggtcaccaggatactacgat

SEQ ID NO: 3649 - DNA, 425 bp, Glycine max
  Clone ID: LIB3073-006-Q1-K1-F6
gatctggcagcagaaaaacaagtagttgagaactaagaagaaggaaatggcttcctcaatgatctcctccccagctgttaccaccgtcaaccgtgccggtgccggcatggttgctccattcaccggcctcaaatccatggctggcttccccacgaggaagaccaacaatgacattacctccattgctagcaacggtggaagagtacaatgcatgcaggtgtggccaccaattggcaagaagaagttcgagactctttcctacttgccagacctcgatgatgcccaattggcaaaggaagtcgaataccttctgaggaaaggatggattccttgcttggaattcgagctggagcacggtttcgtgtaccgtgagcacaacaggtcacctggatactatgatggacgctactggaccatgtggaagc

SEQ ID NO: 3650 - DNA, 284 bp, Glycine max
  Clone ID: LIB3073-011-Q1-K1-A12
gatttggcagcagaagaacaagtagttgagaacgaagaaggagaagcaaatggcttcctcaatgatctcttccccagctgttaccactgtcaaccgtgccggtgccggcatggttgctccattcactggcctcaagtccatggctggcttccccaccaggaagaccaacaatgacattacctccattgctagcaacggtggaagagtgcaatgcatgcaagtgtggccaccagttggcaagaagaagtttgagactctttcctacctgccagaccttgatgatg

SEQ ID NO: 3651 - DNA, 404 bp, Glycine max
  Clone ID: LIB3073-007-Q1-K1-B9
gatctggcagcagaagaacaagtagttgagaactaagaaggagaagcaaatggcttcctcaatgatctcttccccagctgttaccactgtcaaccgtgccggtgccggcatggttgctccattcactggcctcaagtccatggctggcttccccaccaggaagaccaacaatgacattacctccattgctagcaacggtggaagagtgcaatgcatgcaggtgtggccaccagttggcaagaagaagtttgagactctttcctacctgccagaccttgatgatgcacaattggcaaaggaagtagaataccttcttaggaagggatggattccttgcttggaattcgagttggagcacggtttcgtgtaccgtgagcacaacaagtcaccaaggatactacgat

SEQ ID NO: 3652 - DNA, 395 bp, Glycine max
  Clone ID: LIB3073-006-Q1-K1-F5
gatctggcagcagaagaacaagtagttgagaactaagaaggagaagcaaatggcttcctcaatgatctcttccccagctgttaccactgtcaaccgtgccggtgccggcatggttgctccattcactggcctcaagtccatggctggcttccccaccagaaagaccaacaatgacattacctccattgctagcaacggtggaagagtgcaatgcatgcaggtgtggccaccagttggcaagaagaagtttgagactctttcctacctgccagaccttgatgatgcacaattggcaaaggaagtagaataccttcttaggaagggatggattccttgcttggaattcgagttggagcacggtttcgtgtaccgtgagcacaacaggtcaccaggat

SEQ ID NO: 3653 - DNA, 423 bp, Glycine max
  Clone ID: LIB3073-022-Q1-K1-B9
gatatctggcagcagaaaaacaagtagttgagaactaagaagaaggaaatggcttcctcaatgatctcctccccagctgttaccaccgtcaaccgtgccggtgccggcatggttgctccattcaccggcctcaaatccatggctggcttccccacgaggaagaccaacaatgacattacctccattgctagcaacggtggaagagtacaatgcatgcaggtgtggccaccaattggcaagaagaagttcgagactctttcctacttgccagacctcgatgatgcccaattggcaaaggaagtcgaataccttctaaggaaaggatggattccttgcttggaattcgagttggagcacggtttcgtgtaccgtgagcacaacaggtcacctggatactatgatggacgctactggaccatgtgg

SEQ ID NO: 3654 - DNA, 408 bp, Glycine max
  Clone ID: LIB3073-023-Q1-K1-E8
gggcagcagaagaacaagtagttgagaactaagaaggagaagcaaatggcttcctcaatgatctcttccccagctgttaccactgtcaaccgtgccggtgccggcatggttgctccattcactggcctcaagtccatggctggcttccccaccaggaagaccaacaatgacattacctccattgctagcaacggtggaagagtgcaatgcatgcaggtgtggccgccagttggcaagaagaagtttgagactctttcctacctgccagaccttgatgatgcacaattggcaaaggaagtagaataccttcttaggaagggatggattccttgcttggaattcgagttggagcacgggttcgtgtaccgtgagcacaacaggtcaccaggatactacgatgggcgctac

SEQ ID NO: 3655 - DNA, 426 bp, Glycine max
  Clone ID: LIB3073-006-Q1-K1-E8
gatctggcagcagaagaacaagtagttgagaactaagaaggagaagcaaatggcttcctcaatgatctcttccccagctgttaccactgtcaaccgtgccggtgccggcatggttgctccattcactggcctcaagtccatggctggcttccccaccaggaagaccaacaatgacattacctccattgctagcaacggtggaagagtgcaatgcatgcaggtgtggccaccagttggcaagaagaagtttgagactctttcctacctgccagaccttgatgatgcacaattggcaaaggaagtagaataccttcttaggaagggatggattccttgcttggaattcgagttggagcacggtttcgtgtaccgtgagcacaacaggtcaccaggatactacgatggacgctactggaccatgtggaa

SEQ ID NO: 3656 - DNA, 422 bp, Glycine max
  Clone ID: LIB3073-024-Q1-K1-H4
gatctggcagcagaagaacaagtagttgagaactaagaaggagaagcaaatggcttcctcaatgatctcttccccagctgttaccactgtcaaccgtgccggtgccggcatggttgctccattcactggcctcaagtccatggctggcttccccaccagaaagaccaacaatgacattacctccattgctagcaacggtggaagagtgcaatgcatgcaggtgtggccaccagttggcaagaagaagtttgagactctttcctacctgccagaccttgatgatgcacaattggcaaaggaagtagaataccttcttaggaagggatggattccttgcttggaattcgagttggagcacggtttcgtgtaccgtgagcacaacaggtcaccaggatactacgatggacgctactggaccatgt

SEQ ID NO: 3657 - DNA, 422 bp, Glycine max
  Clone ID: LIB3073-001-Q1-K1-B10
gatctggcagcagaagaacaagtagttgagaactgagaaggagaagcaaatggcttcctcaatgatctcttccccagctgttaccactgtcaaccgtgccggtgccggcatggttgctccattcactggcctcaagtccatggctggcttccccaccagaaagaccaacaatgacattacctccattgctagcaacggtggaagagtgcaatgcatgcaggtgtggccaccagttggcaagaagaagtttgagactctttcctacctgccagaccttgatgatgcacaattggcaaaggaagtagaataccttcttaggaagggatggattccttgcttggaattcgagttggagcacggtttcgtgtaccgtgagcacaacaggtcaccaggatactacgatggacgctactggaccatgt

SEQ ID NO: 3658 - DNA, 375 bp, Glycine max
  Clone ID: LIB3073-002-Q1-K1-C1
ggcagcagaagaacaagtagttgagaactaagagggagaagcaaatggcttcctcaatgatctcttccccagctgttaccactgtcaaccgtgccggtgccggcatggttgctccattcactggcctcaagtccatggctggcttccccaccaggaagaccaacaatgacattacctccattgctagcaacggtggaagagtgcaatgcatgcaggtgtggccaccagttggcaagaagaagtttgagactctttcctacctgccagaccttgatgatgcacaattggcaaaagaagtagaataccttcttaggaagggatggattccttgcttggaattcgagttggagcacggtttcgtgtaccgtgagcaca

SEQ ID NO: 3659 - DNA, 423 bp, Glycine max
  Clone ID: LIB3073-013-Q1-K1-F11
gatctggcagcagaagaacaagtaggggagaactaagaaggagaagcaaatggcttcctcaatgatctcttccccagctgttaccactgtcaaccgtgccggtgccggcatggttgctccattcactggcctcaagtccatggctggcttccccaccaggaagaccaacaatgacattacctccattgctagcaacggtggaagagtgcaatgcatgcaggtgtggccaccagttggcaagaagaagtttgagactctttcctacctgccagaccttgatgatgcacaattggcaaaggaagtagaataccttcttaagaagggatggattccttgcttggaattcgagttggagcacggtttcgtgtaccgtgagcacaacaggtcaccaggatactacgatggacgctactggaccatgtg

SEQ ID NO: 3660 - DNA, 406 bp, Glycine max
  Clone ID: LIB3073-022-Q1-K1-A11
gagcagaagaacaagtagttgagaactaagaaggagaagcaaatggcttcctcaatgatctcttccccagctgttaccactgtcaaccgtgccggtgccggcatggttgctccattcactggcctcaagtccatggctggcttccccaccaggaagaccaacaatgacattacctccattgctagcaacggtggaagagtgcaatgcatgcaggtgtggccaccagttggcaagaagaagtttgagactctttcctacctgccagaccttgatgatgcacaattggcaaaggaagtagaataccttcttaggaagggatggattccttgcttggaattcgagttggagcacggtttcgtgtaccgtgagcacaacaggtcaccaggatactacgatggacgctact

SEQ ID NO: 3661 - DNA, 418 bp, Glycine max
  Clone ID: LIB3073-026-Q1-K1-G9
gatctggcagcagaagaacaagtagttgagaactgggaaggagaagcaaatggcttcctcaatgatctcttccccagctgttaccactgtcaaccgtgccggtgccggcatggttgctccattcactggcctcaagtccatggctggcttccccaccagaaagaccaacaatgacattacctccattgctagcaacggtggaagagtgcaatgcatgcaggtgtggccaccagttggcaagaagaagtttgagactctttcctacctgccagaccttgatgatgcacaattggcaaaggaagtagaataccttcttaggaagggatggattccttgcttggaattcgagttggagcacggtttcgtgtaccgtgagcacaacaggtcaccaggatactacgatggacgctactggacc

SEQ ID NO: 3662 - DNA, 414 bp, Glycine max
  Clone ID: LIB3073-026-Q1-K1-F9
gatctggcagcagaagaacaagtagttgagaactaagaaggagaagcaaatggcttcctcaatgatctcttccccagctgttaccactgtcaaccgtgccggtgccggcatggttgctccattcactggcctcaagtccatggctggcttccccaccaggaagaccaacaatgacattacctccattgctagcaacggtggaagagtgcaatgcatgcaggtgtggccaccagttggcaagaagaagtttgagactctttcctacctgccagaccttgatgatgcacaattggcaaaggaagtagaataccttcttaggaagggatggattccttgcttggaattcgagttggagcacggtttcgtgtaccgtgagcacaacaggtcaccaggatactacgatggacgctactg

SEQ ID NO: 3663 - DNA, 410 bp, Glycine max
  Clone ID: LIB3073-024-Q1-K1-A10
gtggcagcagaagaacaagtagttgagaactaagaaggagaagcaaatggcttcctcaatgatctcttccccagctgttaccactgtcaaccgtgccggtgccggcatggttgctccattcactggcctcaagtccatggctggcttccccaccaggaagaccaacaatgacattacctccattgctagcaacggtggaagagtgcaatgcatgcaggtgcggccaccagttggcaagaagaagtttgagactctttcctacctgccagaccttgatgatgcacaattggcaaaagaagtagaataccttcttaggaagggatggattccttgcttggaattcgagttggagcacggtttcgtgtaccgtgagcacaacaggtcaccaggatactacgatggacgctact

SEQ ID NO: 3664 - DNA, 440 bp, Glycine max
  Clone ID: LIB3073-012-Q1-K1-D7
cgagacgacagaaggggatctggcagcagaagaacaagtagttgagaactaagaaggagaagcaaatggcttcctcaatgatctcttccccagctgttaccactgtcaaccgtgccggtgccggcatggttgctccattcactggcctcaagtccatggctggcttccccaccagaaagaccaacaatgacattacctccattgctagcaacggtggaagagtgcaatgcatgcaggtgtggccaccagttggcaagaagaagtttgagactctttcctacctgccagaccttgatgatgcacaattggcaaaggaagtagaataccttcttaggaaaggatggattccttgcttggaattcgagttggagcacggtttcgtgtaccgtgagcacaacaggtcaccaggatactacgatggacgctactggacccatgtg

SEQ ID NO: 3665 - DNA, 230 bp, Glycine max
  Clone ID: LIB3073-001-Q1-K1-F7
ggagaatgggatctggcagcagaaaaacaagtagtttagaactaataagaaggaaatggctttcctcaatgattctcctccccagctgttaccaccgtcaaccgtgccggtgccgcatggttgttccattaaccggcctcaaatccatggctggcttccccacgaggaagaccaacattgactttacctcaatggttagcaccggtgaaagagtacaatgcatgcaggtg

SEQ ID NO: 3666 - DNA, 240 bp, Glycine max
  Clone ID: LIB3073-001-Q1-K1-H6
gaatgtcatcacttattcaatccaacggttgtaactggtcagcaaccaatcccctccatttcacaccatcggattagtactacacaaatcacactattatatatagtaagcttgagcagaagcttggatatctggcagcagaagaacaagtagttgagaactaagtacgagaaacatatggcttcctcaatgatctcttacccagctgataccactgtcaacccgtgcggtgccagcatg

SEQ ID NO: 3667 - DNA, 397 bp, Glycine max
  Clone ID: LIB3073-023-Q1-K1-C6
gatctggcagcagaagaacaagtagttgagaactaagaaggagaagcaaatggcttcctcaatgatctcttccccagctgttaccactgtcaaccgtgccggtgccggcatggttgctccattcactggcctcaagtccatggctggcttccccaccagaaagaccaacaatgacattacctccattgctagcaacggtggaagagtgcaatgcatgcaggtgtggccaccagttggcaagaagaagtttgagactctttcctacctgccagaccttgatgatgcacaattggcaaaggaagtagaataccttcttaggaagggatggattccttgcttggaattcgagttggagcacggtttcgtgtaccgtgagcacaacaggtcaccaggatac

SEQ ID NO: 3668 - DNA, 423 bp, Glycine max
  Clone ID: LIB3073-013-Q1-K1-A5
gggcagcagaagaacaagtagttgagaactaagaaggagaagcaaatggcttcctcaatgatctcttccccagctgttaccactgtcaaccgtgccggtgccggcatggttgctccattcactggcctcaagtccatggctggcttccccaccagaaagaccaacaatgacattacctccattgctagcaacggtggaagagtgcaatgcatgcaggtgtggccaccagttggcaagaagaagtttgagactctttcctacctgccagaccttgatgatgcacaattggcaaaggaagtagaataccttcttaggaagggatggattccttgcttggaattcgagttggagcacggtttcgtgtaccgtgagcacaacaggtcaccaggatactacgatggacgctactggaccatgtggaag

SEQ ID NO: 3669 - DNA, 397 bp, Glycine max
  Clone ID: LIB3073-026-Q1-K1-G5
gaaagacgtgttgagctgttaccctgtccatttggaatcctatgttctcaatcttatttttttttttcattttgaaattgaaatttccattttccaacatctctcgctccctccgttgttgttattagttgggttttttaagacaccgttcgttgcgattgtacctgagagggccctgtttcgtaccactcattcaaacaagtcacagtgttctcgctctttctttctctgaaaaacattccccgtataagctttctccgaatgtcacaatgtcttatcgacgcctcgctctgctttctttctccacgcatctgtcaccgttatcattcctcgctctcatttcggtcctgacaatgagatcaaactcgtagtagtggtttactaccagtcttttttc

SEQ ID NO: 3670 - DNA, 412 bp, Glycine max
  Clone ID: LIB3073-026-Q1-K1-G6
ggcacaagtgagtttgttgatcgagataacgagaaacagtgtgatgaaaatgaaggtccttgttttcttcgttgctacaattttggtagcatggcaatgccatgcgtacgatatgttccctctccgaatgaacactggctatggtgcccgtactccggaggtgaaatgcgcaagttggaggcttgctgtggaagcacacaacatctttggctttgagaccattcctgaagagtgcgttgaagcaacaaaggaatacatccatggcgaacaatatagatcagactccaaaacagttaaccaacaagcttacttttatgccagagacctcgaagtccatcccaaggacacatttgtgttcagtatagatggcaccgtactctctaatattccatactacaaaaaacatggatat

SEQ ID NO: 3671 - DNA, 412 bp, Glycine max
  Clone ID: LIB3073-026-Q1-K1-H1
gagccaaagaaaagaaaatcctcaattttgtgagcagccaaacactctctctctgtctctcgaaaattctcagtttgcagagaaaatctgaatcatgtcgtggcaagcgtatgtcgacgatcaccttctgtgtgacatcgaaggtaaccacctcactcacgctgctatcatcggccaagacggcagcgtttgggctcagagtaccgacttccctcagttcaaacctgaggagataactgccatcatgaatgactttaatgagcctggatcacttgctccaactggattgtatctcggtggcaccaaatatatggtcatccaaggtgaacccggtgctgtcattcgagggaagaagggtcctggtggtgttactgtgaagaagaccggtgcggccttgatcattggcatttat

SEQ ID NO: 3672 - DNA, 326 bp, Glycine max
  Clone ID: LIB3073-026-Q1-K1-H10
tgcaatgtatgggatatgaggaattgtcaaaaaaaaaaaagaatctatataaatataaaaataatatatataaggcacaaatagtaaatccaggtacccattttatgataaactatccttccatttttgttactctaataagcctagtattttccgcaatcgcaatgacttctttatttctttatgttcaaaaaaacatgatttcttagatccagaaaacaaagtaaaattctggagttctcaattccccaattataatactaaattcaaaaaaaggaaagtaatgagtataatctttcgctcacacgatgtactgatatattcta

SEQ ID NO: 3673 - DNA, 414 bp, Glycine max
  unsure at all n locations
  Clone ID: LIB3073-026-Q1-K1-H12
gggtgaatgtttgagtgcagaaggtataaaaggtggtggtgaagattcgattggcaaggctcgggtgcaggaaccacccattctatcgcgtggttgttactgatagcataacaacaagagatggcaagcaacttgaagttttaggtttctacaatcccgtcgcaggcaaggatgatgagaaaagaatgagtctcaaactggaaagagtcaagtattggctttctgtcggagctaagccttcagagcctgttgagcatcttctgtttcgagcaggtttagggcaatctcatcaattccctgttgctgctctaaatggacatttcctcaaccaagaccaaccaaccaatgctgatcacaatggtgtatctccagaagctatattntctattggcctacaagtttgaagagaatagc

SEQ ID NO: 3674 - DNA, 400 bp, Glycine max
  Clone ID: LIB3073-026-Q1-K1-H2
ggagttgagaggatcgcgagaggggcagtaggggagattccgtgagttgcaaaaatgaagacgattctttccaccgagaccatgaacatcccggacggcgtgagcatcaaagttcatgccaaggtcatcgaagttgatggcccccgcagaaaattggtgccagacttcaagcatttgaatctcgattctcagctcattactgacgaatacggttaacgaaagctgtaaatcgacgcgtggtttggttctcggaatacatacggcgtcattcgcaccggcttgagccacgtggagaatcttatcaccggcgtgaccaagggctaccgctacacaatgaggttcgtttatgcccattttgccatcaacgcatgcatcggcaacagcaacaagtctattgaga

SEQ ID NO: 3675 - DNA, 359 bp, Glycine max
  Clone ID: LIB3073-026-Q1-K1-H3
ggtaagagcaacatcgattaacatacatttagggagagaaggagtcatcaaccaaccatgtcggatattgccatgttggtagccgactaatatgagagaaggacaaagcattataggacgggtggtgctggcgctgttcaagagaggaatatgaacgtggtcaattgtgctaattcttatttggctctgaaggagaacattgacgtgcaaaagaaggagcttgtcaagttggttttggaacccaaaacccactttgcaatagctgcttctaacagcttattctatgcttgatcgaacatgttcagctttctgattgcaatatatatgggctgttggcaccatattgtgtgcttattttt

SEQ ID NO: 3676 - DNA, 262 bp, Glycine max
  Clone ID: LIB3073-026-Q1-K1-H4
agcgcaagcaggacctttaagcttactaataccatgggctacattgagtaataccttaacctctctgaacaatctagactacagtatgctactatctatatgaaacaacggatgctcatatacactaattaaataggaaacattagctatgttagataatgtcactgtacgttatataggatccatcatctaatacacttgaattacatacgatagctgtctcttaccggctccaataaataatttacccttggtccatatt

SEQ ID NO: 3677 - DNA, 403 bp, Glycine max
  Clone ID: LIB3073-026-Q1-K1-H7
aagaacggcgtgcggagaaggtgaaaatgaagagtaaaacagatgatatttcaggtgatgaggaggctaaacgaatggattatcatcaaagtgatagtgtagttacaccatctgagcaaaagaagcttgagattgaattgcggaacaaggctcttgaatccctcaaagcaaagaagggcatgaataactaaatgcatcacatccaagttttatgttgttttatgctttaaaaacttattgagaaatatcttagcttgtttaagaaacttggttttgcaaatgttatgtttatttattcatctgtaaatgtttgatgtcatctatctttaatgctggcagcggaaatggatagatgatgctttctgagtaaatctgttgagtacaactctatgcagacattgtc

SEQ ID NO: 3678 - DNA, 416 bp, Glycine max
  Clone ID: LIB3073-026-Q1-K1-H9
gaccacagtttacactcacgagagtacccatttgctcttctcaatttctcaagtgtgccgagaaaatcatggtggacgcagcggaacgtagatacttggaggatgatgattcatctctcatgaaaactatcaagggcgcaacaactggtttagtggctggaactatctggggtactgtagttgccacctggtatgatgtcccccgtgtcgagagaaatgttgctcttccagggctgattaggactatcaggatgatgggcaactatggtttgacctttgctgccataggaggagtctacataggtgtagagcagttggtgcagaactataggatgaagagggatttagtcaatggagctgttggcggatttgttgcaggtgcaactattctgggttacagaggaaggagcatcaaa

SEQ ID NO: 3679 - DNA, 416 bp, Glycine max
  unsure at all n locations
  Clone ID: LIB3073-026-Q1-K1-G4
gagagaagggctacacaaacacaatctctaatggcactcaggatgtgggcttcttccactgccaatgcactcaaactctcttctgtctccagacctcatctcttgcctcctttttctttctccagatgcttatcttccgtcttggatggacttaagtacgctgattcacatgaatgggtcaagcacgaaggctcagtcgccaccattggtatcactgaccatgcccaggaccatcttggagaggttgtgtatgtggagctgccagaaccaggtggcacagtttccaagaagtctggcttcggagccgttgaaagtgttaaagcaacaagtgatataaaccctccaatctcggnggagatcgttgaggttaacaaaaagctcacagaaacgcctggcctggtcaactcaagcccata

SEQ ID NO: 3680 - DNA, 397 bp, Glycine max
  Clone ID: LIB3073-026-Q1-K1-E9
ggcacaagtgagtttgttgatcgagataactagggacagtgtgatgaaaatgaaggtccttgttttcttcgttgctacaattttggtagcatggcaatgccatgcgtacgatatgttccctctccgaatgaacactggctatggtgcccgtactccggaggtgaaatgcgcaagttggaggcttgctgtggaagcacacaacatctttggctttgagaccattcctgaagagtgcgttgaagcaacaaaggaatacatccatggcgaacaatatagatcagactccaaaacagttaaccaacaagcttacttttatgccagagacctcgaagtccatcccaaggacacatttgtgttcagtatagatggcaccgtactctctaatattccatactac

SEQ ID NO: 3681 - DNA, 420 bp, Glycine max
  Clone ID: LIB3073-026-Q1-K1-F1
cggggagtgtgtgagagagcgagcgagcgagcagggtcaaagagaggatttgggattgggaaggcgagggattgcgctgcgtctcttactcttctgtttcgattcatcccccattcataatcttgcaatccaacaacctcagtctcacactgacacatacacacatctgaacgcgtatcgtccctcccatggcttcaaagcgcatcctcaaggagctcaaggacttgcacaaagacccaccaacttcttgcagcgctggtccagtagctgaggacatgttccatgggcaagcaacgattatgggtactgctgatagtccttatgctggaggtgtattcctagtcactattcactttcctccggattatcctttcgaaccttccaaggatgcctctaggactaatgagtttcatccgaaca

SEQ ID NO: 3682 - DNA, 418 bp, Glycine max
  Clone ID: LIB3073-026-Q1-K1-F11
gataccaaaaacaaaacacaagccaagtgaaagggagaaaaaataaaaatcaaagagcataatgtcagggatcattcacaagattggggagacccttcatgtgggagggcacaagaaggaggaggagcataagggtgagcaccatgctggagaatacaaaggggagcaccatggtgaacacagtagtgagtacaaaggagagcatcatggtgaacacaaagctggagagtaccatggtgagcacaagccagagcacaaagaggggttcctagacaaagtcaaggacaagatccatggtgagggcggcgccgccgagggcgagaagaagaagaaggagaagaagaagaaggagcatggccatgagcatggccatgacagcagcagcagcagtgacagtgattaaactgctgcatcacct

SEQ ID NO: 3683 - DNA, 406 bp, Glycine max
  Clone ID: LIB3073-026-Q1-K1-F12
gggtggccacagcaacaatagcaatggcagcctcactacaagctgcagctaccttcatgcaacccaccaaggtgggcatggccactcgcaacctcaaatctacacaatgcatttctaaggcttttggcttggaacccgctgcagctaaactcatttgctcccttaagcccgatctcaaagattttgctcaaaaatgtgtcgacgccaccaaaattgcaggattcgcccttgccacctcagctctcgttgtttctggagcgagtgcagaaggtgttccaaagaggctaaccttcgacgaaatccagagcaagacatacttggaagtgaagggaactggaactgctaatcagtgcccaaccattgaaggtggagtggactcatttgccttcaaggcagggaaatacaa

SEQ ID NO: 3684 - DNA, 419 bp, Glycine max
  Clone ID: LIB3073-026-Q1-K1-F3
taatttgggaattattgctcccatcgccattggtttcattgggggcgctagcattttgttgggtagggccttctctggagcggccatgaaccccgctgtgacatttgggcctgctgtcgtgagctggacctggaccaaccactggatctactgggccgggcctctcatcggtggtggaatcgctggccttgtttacgaggttgtctttatcagccacacccacgagcagcttcccaccactgactactagagggggggaaatgaaaatcaacaaaagaaaattgtgcattattgaatttctctggaatcttcttctgtgtatggttatccttccttatgttttcttcctaattcactttccagggttgtacttgatcctttcgtcttaaatacttggatggttgatgatcatgaagatc

SEQ ID NO: 3685 - DNA, 408 bp, Glycine max
  Clone ID: LIB3073-026-Q1-K1-F4
catccaggcaaaacaatgaaagtacaattcaccgggcgtccgtgatgcacaaccttatggtgtatatacatggttaacggatattaaagacacctctaaagaaggatatagttttgaagagatatgcatcaagaaagaagcgtttgagggagaagagaagttttgtgcaaaatccttgggaacagtaattggttttgccatttcaaagctgggaaagaacattcaagtactttcaagttcctttgtcaataagcaagagcaatacactgtggaaggagtgcagaatcttggagacaaagcagtgatgtgtcatgggctaaatttcagaactgcagtattttactgccataaagtccgggaaacaacagctttcatggttccattggtggctggtgatggaaccaaaac

SEQ ID NO: 3686 - DNA, 404 bp, Glycine max
  Clone ID: LIB3073-026-Q1-K1-F5
gcacaagtgagtgtgttgatcgagataactagaaacagtgtgatgaaaatgaaggtccttgttttcttcgttgctacaattttggtagcatggcaatgccatgcgtacgatatgttccctctccgaatgaacactggctatggtgcccgtactccggaggttaaatgcgcaagttggaggcttgctgtggaagcacacaacatctttggctttgagaccattcctgaagagtgcgttgaagcaacaaaggaatacatccatggcgaacaatatatatcagactccaaaacagttaaccaacaagcttacttttatgccagagacctcgaagtccatcccaaggacacatttgtgttcagtatagatggcaccgtactctctaatattccatactacaaaaaaca

SEQ ID NO: 3687 - DNA, 417 bp, Glycine max
  unsure at all n locations
  Clone ID: LIB3073-026-Q1-K1-F7
gactccgcagctgcagagctcaggaccctatagaggaggaagagagagcgtgcaagttccggccaccaccgaccatgacattcaagcgcaggaatggaggtcgcaacaaacatggccgcggccacgtcaaattcatgcggtgctccaactgtggcaaatgctgtcccaaggacaaggccatcaagaggtttctggtgaggaacattgttgaacaggctgcagtcatagatgcgcaagaagcttgtgtctatgaacaatatactcttccgaaactctatgtgaagatgcagtactgtgtttcttgtgctatccactctcatgttgtgagggttcgatcccgcactgacaggaggaaacgtgagcctccacagagattcatcangcgtagggatgatgcacctaggcctggtcagcccg

SEQ ID NO: 3688 - DNA, 401 bp, Glycine max
  unsure at all n locations
  Clone ID: LIB3073-026-Q1-K1-F8
ggctttccttttttttaatttgaatgcttctgatgcaactatagtgaggctaagagattggtccataattaatcaaaatgttggctatattccacaaagcttttgctcatccacctgaagagctcaacagccctgcatcttacaaaggttccaagaagcctaaggttcccgaggaaactctcaaagatttcctttcccaccatcctcacaacacttgctctatgagctttggtgatgctgctgttctagcttatgtccgtcctgatcaatctttctctcgtcatcaaaggctgttttgtgggatcgatgacatatattgtctcttcttggggagcttgaacaacttgtccctactcaacangcaatatggattgtcaaagagtactgatgaggccatgttt

SEQ ID NO: 3689 - DNA, 434 bp, Glycine max
  Clone ID: LIB3073-026-Q1-K1-G1
gggagtagatctgagttgggagcaatagattctccaaatttggcggcaatgggtgggctcaccgctgaagatctgtcgaccatcggcggaatctgcaccgtgtcccttctccattccttcattcccactcactggcttcctttctccattgacggtcgcgctcagaaatggactctgttcaccactctcatcggcactgcacttggagcaattttgcacgtaatatccacttcactgcttggtataacggcaattaccatggcaaacaccattgctggtgaagaaactgtgcataaggatgcttcacttttgcttgtatttttgggtggcagttatataattctgtttctgatgggaaagggtggccatagtcattcacacaaccaacccatggagaaacatggctgtagctggacttattctcgttcctgcat

SEQ ID NO: 3690 - DNA, 416 bp, Glycine max
  unsure at all n locations
  Clone ID: LIB3073-026-Q1-K1-G11
gggctttctctggttcctaagatggtgttgcaggtggtgcctctggcgaatctccacttacaagccacgagacccgcggtggttgggttcgcgttcccactgctcctcaagttcttgatgggcttcaggatcttccgagacaacgcgcttcaccagtcaagactcttccttttccaattgggtcaaattgcgttcaacaccgaagcccgagtctccaacgtggccagaatggaacgtgctctcaggttaatttggagaacactcactccttctccttcatccaccaccgataattcccaagtcactcaacagagccttcatgacctttctatgctttcgctctagtcaccactcactttgggtttctttgcggtgaaagaaacanagaanaaagttaaatcaacgcggaacgtatc

SEQ ID NO: 3691 - DNA, 407 bp, Glycine max
  Clone ID: LIB3073-026-Q1-K1-G2
ggcacaagtgagtttgttgatcgagatggctagaaggagtgtgatgaaaatgaaggtccttgttttcttcgttgctacaattttggtagcatggcaatgccatgcgtacgatatgttccctctccgaatgaacactggctatggtgcccgtactccggaggtgaaatgcgcaagttggaggcttgctgtggaagcacacaacatctttggctttgagaccattcctgaagagtgcgttgaagcaacaaaggaatacatccatggcgaacaatatagatcagactccaaaacagttaaccaacaagcttacttttatgccagagacctcgaagtccatcccaaggacacatttgtgttcagtatagatggcaccgtactctctaatattccatactacaaaaaacatg

SEQ ID NO: 3692 - DNA, 271 bp, Glycine max
  Clone ID: LIB3073-026-Q1-K1-G3
gcgcacagcctgtccgcagatgacaaaacggcaccatggggaactacagaatgacctgaccacccgtcattgggaaaaccctgatctgaatcatattttctaatcacatcccaacattggaacatgcattgaccacaatcttttgataccttctgatgcaatccttattggagaaccttatgacaccgatagccacgatttaagattcaacgatactagtctaacaccaaatctactaaatacttaaactgcttcctatacttatgactct

SEQ ID NO: 3693 - DNA, 391 bp, Glycine max
  unsure at all n locations
  Clone ID: LIB3073-026-Q1-K1-E8
gaccaacacagacaatagtggatagcgtttttcattgtgcattattcaatggccaccacagcagctctatccggaaccatggtgagcacctccttcatgaggaagcaacctatgacgaccaagagcctaaagacattccccaacgctctttttggtctgaaaggtggacgaggtggtcgtgtaacttgcgtggcctcgtacaaggtgaagctcataaccccagaaagagaagtggagtttgaatgcccagatgatgttttcattgttgacaaggctgangaagaaagcattgaacttccctactcgtgcaaggctggttcttgcgtttcatgtgttgggaaaattgtgaaaggtgacgtggaccagtcagatggtagcttccttgatgatg

SEQ ID NO: 3694 - DNA, 377 bp, Glycine max
  Clone ID: LIB3073-026-Q1-K1-D2
gacaacccgtctttcatgtccaaattccaatgcttattcttccttcttatttcaatttcaatcactactattattactctctcacgcttttgcttctcgatttttaaaccctaaatctatctatctgtctaatacataagatacggcaaaatcaaaacaaaacaaaatataaccctagccaaagaaagaccttgttgagcatcagcagcagatagagagaggcttatggaatgagtaccgtacccaatacccagaactgtctaagaggttttcaccgattttaagggcagacgcgctggtttgattaaggtcctcactactgacgttcaaaagttttaccatcgatgcgatctcgataaggagaatttgtgtctata

SEQ ID NO: 3695 - DNA, 414 bp, Glycine max
  Clone ID: LIB3073-026-Q1-K1-D3
ggcacaaagcagagctaaattcaaccaacaacaggcgcaacggtttcatttcccattatacccctctgcgcagaagacctcagaaaatattgcgatggcgggaaccctaaatctcacgcctctcaccggtgccggcaggactctccggcctccgttcaggatctcaattcgggcattcacggcgacggcgatcgattcccggcgagcggcgagcctctatgaagtgctccggatcaagcagaacgcttcagcggtggagataaagtcagcataccggaaccttgcgaaggtgtatcaccctgattcggcgttccgtcggtcggaatcggacgaacgggacttcatcgagatccacgacgcttacgagacgctgtcggatccgtcggcgagagcactgtatgatctgtcgctgat

SEQ ID NO: 3696 - DNA, 410 bp, Glycine max
  Clone ID: LIB3073-026-Q1-K1-D4
ggcacaagtgagtttgttgatcgagataactggaaacagtgtgatgaaaatgaaggtccttggtttcttcgttgctacaattttggtagcatggcaatgccatgcgtacgatatgttccctctccgaatgaacactggctatggtgcccgatactccggaggttaaatgcgcaagttgaaggcttgctgtggaagcacacaacatctttggctttgagaccattcctgaacagtgcgttgaatcaacaaaggaatacatccatggcgaacaatatagatcagactccaaaacggttaaccaactagcttacttttatgccagagacctcgaagtccatcccaaggacacatttgtgttcagtatagatggcaccgtactctctaatattccatactacaaaaaacatgga

SEQ ID NO: 3697 - DNA, 367 bp, Glycine max
  Clone ID: LIB3073-026-Q1-K1-D5
ggtgatttcattgcataatccattgactagcagagcccatattttccccccacattaactcacccaacccctctttctaaaaggcctcaaggatacactccggacttaattacgttattttgttagggtcaccgtttcgagatattctaaacttgtactgaaaaatatggagggaaaagaagaggacgtaagagttggagccaacaggtacggagagaggcagcccatacggacccgtgctcacgctaaagactacagagagccaccgtcggcgcctcttttcgaaccgggagagttgccatcgtggtctttctatagggctcgcatagcaaaagttgtggccactttcttggtactctacattaca

SEQ ID NO: 3698 - DNA, 402 bp, Glycine max
  Clone ID: LIB3073-026-Q1-K1-D6
ggtgatgtcagagaactacacactggaatcgggcaccgtcgaaggcagcgacggagtgaagctccgtacaagggtgttcaagccagatgctggaacagaagcggatgggaagttggggatcgttctggtgcacccgtattctattttgggtggctgccagggtctcctcaaaggaatcgcttctggcttggctctcaatggttacaccgctgtcacctttgacatgagaggcgttggcaagtccaccggcagggcttctctcaccggcttctccgaagttaaggatgtcgttgctgtctgcaactggctttccaacactttctctcttcccaggattttgttgcttggttcttccgctggtgcacctatagcagggtctgccgttgatcagattgaacaagt

SEQ ID NO: 3699 - DNA, 307 bp, Glycine max
  Clone ID: LIB3073-026-Q1-K1-D7
gaggtcaaacatcatcatgtcggacgaagagcggcatttcgagtccaaggcagacgccggtgcctccaaaacctaccctcagcaagccggtaccattcgcaagaacggctacatcgtcatcaaaggacgcccctgcaaggttgtggaagtttcgacttccaaaactggaaagcacggtcacgccaagtgccactttgttggaattgatattttcactgccaagaaacttgaggatattgtgccctcttctcacaactgtgatgttcctcatgtgaatcgtactggataccagctcattgatattgct

SEQ ID NO: 3700 - DNA, 364 bp, Glycine max
  Clone ID: LIB3073-026-Q1-K1-D8
gacatcactcatagtagagtaacggaaaggagagggcaataactcgttgtacattcctagtgtgtgggagagacatggctaagatgtgtgttttggtgttggttcttgctctggctgtggacacaagtgccagaaacgttcccaaccccaaggatgctggtcttaaggaccagaagaacttcatcagctatggtggagttggtggttattacgggattgtgaacaatggactgccttttggaggagctggtgcctgaataagtggtggtattggagtaggtggtggacttggtggaggacttggtggtggacttgatggtggactctgcagtcctaccactggaatcggaaggtttgacggtac

SEQ ID NO: 3701 - DNA, 413 bp, Glycine max
  Clone ID: LIB3073-026-Q1-K1-D9
ggaaaagttacaagtaaagtaaattaagaagatgattaatggcttctcttgcaaccttagctgctgttcaaccagctgcgctcaatggccttgctggaagttccctctctggaactaagctctccttcaagccctctcgccacactgtcaaatccaagaacttcaggagtggtgccgtggtagcaaagtatggtgacaagagtgtgtactttgatttggaggatctgggcaacactacggggcagtgggacttgtatggctcagatgcaccttcaccctacaaccctcttcagagcaagttcttcgagacatttgctgctccattcacaaagaggggattgttactcaagtttctgatattgggaggtggttccacccttgcatacttcagtgcaacagcctcaggtgacatt

SEQ ID NO: 3702 - DNA, 424 bp, Glycine max
  Clone ID: LIB3073-026-Q1-K1-E1
ggaacctttgcattgtattcattcatgattcagcacgtgcggggggaagcagagaccgaaatacttcgagatggcccgtacaaagcaaactgctcgtaagtcaactggaggaaaagctctcaggaagcagcttgcaaccaaggctgcacgcatgtctgcaccaacaactggtggtgtgaagaagcctcatcgttatcgccctgtaactggcgctgttagcgagattaggaaataccagaagagcactgagctcctaatcaggaagcttcctttccagaggttggttcgtgaaattgcccaggatttcaagactgatctgcgttaccagagccatgctgtgcttgcattgcaagaggctgctgatgcataccttgttgggctctatgaggacactaacttgtgtgccattcacgccaagcgtgtg

SEQ ID NO: 3703 - DNA, 415 bp, Glycine max
  Clone ID: LIB3073-026-Q1-K1-E10
gatacggcatttgtcggcggtgacgaaaggagggaagaagaagaagcgttctttcggagagttcgaagatgtcgggcgttaccaacaacaacgaggaagacaagaagccaaccgaacagggagcacacatcaaccttaaggttaaggggcaggatgggaatgaagtttttttcaggatcaagagaagcactcaattgaagaagcttatgaatgcttactgtgaccgacagtcggtggatttcaactccattgcttttctgttcgatggacgccgccttcgagctgagcagactccagatgagttggaaatggaggacggggacgagattgatgccatgcttcaccagacaggaggttctgttgtctgaaggatgtgattactttgctcctcattataagtaggaattagttaact

SEQ ID NO: 3704 - DNA, 339 bp, Glycine max
  Clone ID: LIB3073-026-Q1-K1-E11
aggtgtgcgaacaggtgtgagaggacgacggatgggtacggttgcgatactactactgaaggggagacatagtgtcacgcgagtgtacgcgctgagtttaggagtgaacaacaataaacatctccgattcttacaatatgaatgatacaagcttatgtacgactgcatacgacgtcttattttacgtatatcgtgacctaaggtatatgcaatggcctactgaatacaacctcttaactgtaaaaacggttattgttcccgacgtaactgcctttgaaatcatgcaaatttatgcagttgctgtagtaacgaaaatgaccgcatcgatagctgttatca

SEQ ID NO: 3705 - DNA, 415 bp, Glycine max
  Clone ID: LIB3073-026-Q1-K1-E12
gtgttggggatgttgctgatggtgtgccttgtgtgaggtttcgtctgatccaaagagagaagaagaaatactggaagaagaactacattttcccgataacgagccacttattgtgagagacgggaacagaaggctaatgcaagacatagattgtggtgggttgtgcaagacgaggtgcagtgcacattcgagacccaacttgtgcactagggcgtgtggcacgtgctgtgtgaggtgtaagtgtgtcccacctggtacatctggaaatagggaactatgtggagcttgctacactgatatgactacccatggcaacaagaccaagtgcccttagagaaaaaacccattgggaaatttgtgcttcattgattatgcaccgaagttcaagtgtactagtatgtggtggttcaattct

SEQ ID NO: 3706 - DNA, 411 bp, Glycine max
  Clone ID: LIB3073-026-Q1-K1-E2
gactgatacaggaacagcagagaaacaaagtgagaagtaaagaagatcatggcttctctagcaaccttggctgctgttcaaccagctacgatcaatggccttgctggaagttccctctctggaactgagctctctttcaagccctctcgccacagtgtcaaatccaagaacttcacgagtggagccgtggtagcaaagtatggtgacaagagtgtgtacttagatttggaggatctgggcaacactacagggcagtgggacttgtatggctcagatgcaccttcaccctacaaccctcttcagagcatgttcttcgagacatttgctgctccattcacaaagacgggattgatactcaagtatctgatatcgggagggtgtttcacccttgcatacttcagtgcaactgcc

SEQ ID NO: 3707 - DNA, 456 bp, Glycine max
  Clone ID: LIB3073-026-Q1-K1-E4
atctcccgtctcgacccacgcgtgagacaggcgttagaacaccacagaaagggatctgacagcactacagcaagtgatcaacaaggaagatagaggatcaaatggctacctcaatgatctctaccgcaactgttaccactgtataccgttccatagccagcatgtgcgttatcattcactggcactaagtccactagatgccttacctaccttaaagaccatcaatgacatcacctacattgctaacatcggtagaagacttcaatgcatcgcatcaaggccaacatttatacccaagaaggataagactctttcgtatgtgccatacattgatgatacacaatcgacactggaagtagaataccttaatatgaatgaatggatcccttgcttgcaattctagcaggagcacggaaacgtgtaccgtgagcacaacacgtcaccatgatactacta

SEQ ID NO: 3708 - DNA, 382 bp, Glycine max
  Clone ID: LIB3073-026-Q1-K1-E5
gacctcacccagctgcagaaagaaaagaccatcagagtttcacttcagccttatccggattagggtttcagtttttgacccaacctttgacgtatcgaaaccttaagtttcggatcaggtctgagcaatctggatggtagaacctttggtcttagagagtcaagttttatgtctgaattagacgatcaaattcctactgccttcgatccttctgctgatgcaaatgctgatgactcgggtgctgggtcaaaggagtatgtgcatattcgcgtacagcagcgaaatggaaggaaaagcctgacaaccgttcagggattgaaaaaagaattcagctataacaagatacttaacgatgttaagaaagagttctgctgcaatggaa

SEQ ID NO: 3709 - DNA, 405 bp, Glycine max
  Clone ID: LIB3073-026-Q1-K1-E7
gagcgccaatgtttttttcagaggagtttcatcttgtaatcaaaagagtttatcttatagtaagaaatcgatgtcttactccattttaaggaacaaaacaagagaacaatagcctgacaaagggtttagccataaaatcgaatccatcattgatttgagatattgataaggtgaatactcatttctcgtcaatgctaggcataatgcgggtatagggacctaaaaaagattatcttttcttcctatcttatgaactttaaggtgtatgaagtgtcatttcctatcttagattttaattttagtaggtagataaagagtccatttaacttaagttgatctaggccagaagcagacctatgtcaagataatccttctttgaaacactttggtagtgctcttagattg

SEQ ID NO: 3710 - DNA, 426 bp, Glycine max
  Clone ID: LIB3073-026-Q1-K1-B5
aagacgacagaaggggtgttggggatgttgctgatggtgtgggttgttaaggtttcgtctgatccaaagagagaagaagaaatactggaagaagaactacattttcccgataacgagccacttattgtgagagacgggaacagaaggctaatgcaagacatagattgtggtgggttgtgcaagacgaggtgcagtgcacattcgagacccaacttgtgcactagggcgtgtggcacgtgctgtgtgaggtgtaagtgtgtcccacctggcacatctggaaatagggaactatgtggaactttctacactgatatgactacccatggcaacaagaccaagtgcccttagagaaaaaacccattgggaaatatgtgcttcattgattatgcaccgaagttcaagtgtactagtatgtggtggttcaat

SEQ ID NO: 3711 - DNA, 396 bp, Glycine max
  Clone ID: LIB3073-026-Q1-K1-C1
gatataagcctaacgcaaaagcctagtttggtcttgcaggcgaaagagaagatggccaccgttccagggcagctcgtgtgggagatcgtgaagaaaaacaactcctttttggtcaagcagttcggaagggggacccagagcgtcgaattcagcagagagagcaacaatctctacaacctcaattcgttcaagtactctggtttggcaaacaagaaaactgttacggtacagcctgagggtaaagatcaggctgtgttgttggctacaacaaagacaaagaagcaaaacaagcctgctgcattgcttcacaaatctgtgatgaagaaggagttcaggaggatggcaaaggctgttgaaaatcaggtggcagaaaattactacaggcccgatctcaag

SEQ ID NO: 3712 - DNA, 421 bp, Glycine max
  unsure at all n locations
  Clone ID: LIB3073-026-Q1-K1-C10
tgcacaagtgagtttgttgatcgagataactagaaacagggtgatgaaaatgaaggtccttgttttcttcgttgctacaattttggtagcatggcaatgccatgcgtacgatatgttccctctccgaatgaacactggctatggtgcccgtactccggaggtgaaatgcgcaagttggaggcttgctgtggaagcacacaacatctttggctttgagaccattcctgaagagtgcgttgaagcaacaaaggaatacatccatggcgaacaatatagatcagactccaaaacagttaaccaacaagcttacttttatgccagagacctcgaagtccatcccaaggacacatttgtgttcagtatagatggcaccgtactctctaatattccatactacaaaaaacatggatatggngtggag

SEQ ID NO: 3713 - DNA, 146 bp, Glycine max
  Clone ID: LIB3073-026-Q1-K1-C11
cgtagtaagcgacgaaatgcttcggggagttgagaataagcgtagatccggggattcccgatataggtcaacctttcgaactgctgctgaatccacgggcaggcaagagacaacctggtgaactgaaacatcttagtagccagagc

SEQ ID NO: 3714 - DNA, 406 bp, Glycine max
  Clone ID: LIB3073-026-Q1-K1-C12
acagaagggggcacaagtgagtttgttgatcgagataactagaaacagtgtgatgaaaatgaaggtccttgttttcttcgttgctacaattttggtagcatggcaatgccatgcgtacgatatgttccctctccgaatgaacactggctatggtgcccgtactccggaggtgaaatgcgcaagttggaggcttgctgtggaagcacacaacatctttggctttgagaccattcctgaagagtgcgttgaagcaacaaaggaatacatccatggcgaacaatatagatcagactccaaaacagttaaccaacaagcttacttttatgccagagacctcgaagtccatcccaaggacacatttgtgttcagtatagatggcaccgtaccctctaatattccatactac

SEQ ID NO: 3715 - DNA, 406 bp, Glycine max
  Clone ID: LIB3073-026-Q1-K1-C6
gaaaataaaaagaacattactagggagaaatgagatgaatctcttgaatcggagttagagactcgaaatcgggcaaaagcagaataccctgatcaacgaaatcttgaatcatctatctcaaaccaagaaaaagatattgaaaacgattatgtaggatcagacagtgaaaagaatagtaagggtataaagaaaaagaaagacaagaacaagatggaggcagaacttaatttcttactaagaaatgttttgattatacatttaaattggaataatttcttaggtcaaagaatatttaacaatgtcaaagtatattgtctcctgattagattaaaaaatttaagagaaattacaatagcctctattcaaagatgagaactacgtctagatatcatggtgattcaaaatc

SEQ ID NO: 3716 - DNA, 416 bp, Glycine max
  Clone ID: LIB3073-026-Q1-K1-C7
ggcatttgttgaactcactccttcagttcagggcagaccaaacttggctacatcgtttgatattttgaagtctttgtgattgagaatgtcgtacactctgtgctttgctcccatttgttccttgaaatccacaaacagacctgggacaattgccggtaattcagttacccaaaaggcttttgggatgaacgaagtgtgtcagaattctaaagttccaagctttcagtccttgaaggttaaggctacagaagataaaactacacaaagcaaaacaattaggagcattgtttgttctgattgtgatggaaatggtgcaaaatcatgtactcaatgcaaaggtactggagttaattctgtagatcacttcaatggacaatttaaagctggtggattgtgttggctatgcaggggaaaaa

SEQ ID NO: 3717 - DNA, 93 bp, Glycine max
  Clone ID: LIB3073-026-Q1-K1-C8
gaatggtccggtgaagtgttcggattgcggcgacgtgagcggttcgctgcccgcgacgttgtgagaagtctactgaaccttatcatttagagc

SEQ ID NO: 3718 - DNA, 402 bp, Glycine max
  unsure at all n locations
  Clone ID: LIB3073-026-Q1-K1-D10
gacagcatatcaataatctatgttataccatacccacattttgataattatatttctagttgataagccatggctactcgaggaaagcttgaggttgacgttgatctcaagtctaacgcagacaagtactggcaaacccttaggaactccactgaaatattccccaaggccttccccaatgattacaaaagcattgaggttcttgagggtgatggcaaatcacctggttctatccgccacataagttatggtgaaggttcaccacttgcgaagtcatcctttgagaagattgaggctgttgatgaagaacagaaggtagtgtcgtacactatcattgatggagaactcctncaggactacaaaacattcaagggagacatttctgtgactccagttggcgat

SEQ ID NO: 3719 - DNA, 415 bp, Glycine max
  Clone ID: LIB3073-026-Q1-K1-B4
gaagcttcaatcagtaagtatcaatggctttcggagaatccgggaacaagccccacagcgagcagtccactaccgaactcatcacgagcgccaagctggtggcggcggcggcgcagtcagctctgaagagcgacagcgacaaagcggacaatgccaaggtggctgacgctgccggcgatcttctctacgcggtggggaagtatggaaaacttgatgacaaacaaggcatatggcaatatgttgacaaggctgctgattatctgcataattaccagggtgataataccactgctgcttcacagcctgcagagtctaaaggtgaagaaagcggtggtgggttaagtggtcttgcaaacttggctggaggcttcttcaaaagtagttacaaagcaactaaataagaccttaattgagt

SEQ ID NO: 3720 - DNA, 401 bp, Glycine max
  Clone ID: LIB3073-025-Q1-K1-H5
gatagcgtttttcattgtgcattattcaatggccaccacagcagctctatccggaaccatggtgagcacctccttcatgaggaagcaacctatgacgaccaagagcctaaagacattccccaacgctctttttggtctgaaaggtggacgaggtggtcgtgtaacttgcatggcctcgtacaaggtgaagctcataaccccagaaggagaagtggagtttgaatgcccagatgatgttttcattgttgacaaggctgaggaagaaggcattgaacttccctactcgtgcagggctggttcttgcgtttcatgtgttgggaaaattgtgaaaggtgacgtggaccagtcagatggtagcttccttgatgatgaacaaatagaaagtggatgggttctcacct

SEQ ID NO: 3721 - DNA, 400 bp, Glycine max
  Clone ID: LIB3073-025-Q1-K1-H6
gaccatagcaagtagcaaggagactagttctgtattcagattacattgcaaaaatggcatcattcaccatgacagcttctatctttggctgcccagctgtcaccaaacggtcggcagtggctgcgcagaggagattactcgtagtgagtgctgccaaagctgaaggggaaaaggtcagttatgacaacaatgatagcaatggaaggaggaacttgatgttcgctgtggctgctgctgctgttttctctgttgctgggatggcagtggcagatgagcctaaaccaggaacctcagaagccaagaaaaagtatgccccggtttgtgtcaccaatcctacagctaggatttgtcgcaattgaggatctcctggttcattttacctctgatgatcggaaatgta

SEQ ID NO: 3722 - DNA, 412 bp, Glycine max
  Clone ID: LIB3073-026-Q1-K1-A10
ggcacaagtgagtttgttgatcgagataactaggaacagtgtgatgaaaatgaaggtccttgttttcttcgttgctacaattttggtagcatggcaatgccatgcgtacgatatgttccctctccgaatgaacactggctatggtgcccgtactacggaggtgaaatgcgcaagttggaggcttgctgtggaagcacacaacatctttggctttgagaccattcctgaagagtgcgttgaagcaacaaaggaatacatccatggcgaacaatatagatcagactccaaaacagttaaccaacaagcttacttttatgccagagacctggaagtccatcccaaggacacatttgtgttcagtataaatggcaccgtactctctaatattccatactacaaaaaacatggatat

SEQ ID NO: 3723 - DNA, 380 bp, Glycine max
  Clone ID: LIB3073-026-Q1-K1-A11
gatagcaaagaaacataacaatttagatatataaatagtgtattttgctttagatattttgagtaacatggcatccctcaaggctgacaaacccgttggcactcaactttttgggcagggtaaaaaggaagctgctcccaaagctagtgatggtgcatcatccaaatccaagggttcagcttgcaaatctgctaccaagaaagttccagtacagaagccccaagaatccaagaaaaagggaaaaggaagcaaattatctacaaagcactagccagaaagccttattaatttactgaaagaaagtgtggtttaattgtaagaataaaaagccacacaaatattggatacaataaaaattgcaccttggtttcctttgcagt

SEQ ID NO: 3724 - DNA, 407 bp, Glycine max
  unsure at all n locations
  Clone ID: LIB3073-026-Q1-K1-A2
gagagcgaaagagatgtcgttggtttcaagcatgttcgggtgtggagtggtgatggcggcgtcgcaagcaatgggaattggaaggagaagcgatggtggattgacgatagtgtgttcgtctaggccgcagaagaaagcgacggcgcatcacatgaagactcggcctcggaagacgcaggcatgggatagaaaccgcaagcccaccgtctacgatccactccctcctcttcctcctgattggaccctcgttattcccgctgacgcttcttctgctcccgttacgccttcgncttcaactccctctgcctagtcactctctcggtactctctctcgntttcatgtagtcttatctttaattccagcagcttttctttcatgttttcatctcaaatcaaaccttcatcat

SEQ ID NO: 3725 - DNA, 410 bp, Glycine max
  Clone ID: LIB3073-026-Q1-K1-A3
gacagcagcagagcaaaagagggaaagaaggaaagtgcaacttcctctgttttgctcccctgtttaagccttatcataagcttagaatggcacacaaggaattttccattgccctagtgactctcattgttctctttgtcaacacgaacctccatggtgccatggctgactatggtggtggttggcagagtgctcatgccactttctatggtgggggtgatgcttctggcacaatgggtggagcatgtgggtatggaaatttgtatagccagggatatggaactgacactgtggctctaagcactgctttgttcaacaatggcttaagctgtggatcttgctatgaaatgagatgtgatgatgacccaagatggtgcaaacctggctctattaccggcactgctactaac

SEQ ID NO: 3726 - DNA, 421 bp, Glycine max
  Clone ID: LIB3073-026-Q1-K1-A4
gaacacagaacataaacaaagaaaaaaaaaacgcttagccaacacaaccatcatggccacctctgctattcagcaatcagcattcactggtcaaactgctctgaagcagctcaatgagttcgtccgcaagaccggcggcgccggcaaaggtcgcactaacatgcgccgcaccgtcaagagtgctcctcagagcatttggtatggccctgaccgtcccaagtacttgggtccattctcggagcagattccatcatacctgaccggagaattccctggtgactacggatgggacactgctggattatcagctgacccggaaaccttcgccaggaaccgggagctggaggtgattcacagcagatgggcaatgcttggtgcccttggctgcaccttcccagagatccttgagaagaatggtgtc

SEQ ID NO: 3727 - DNA, 415 bp, Glycine max
  Clone ID: LIB3073-026-Q1-K1-A6
ggcagttcaattccaatatattccattctctctgggtatttccctacctctcccttcaagatgcagatcttcgtcaagaccctcaccggcaagaccatcacccttgaggtggaaagctctgacaccatcgacaacgtcaaggccaagatccaggacaaggaaggaatccccccggaccagcaacgtctcattttcgccggaaagcaacttgaggacggccgtacccttgctgactacaacattcagaaggagagtactcttcacctcgtcctccgtctccgtggtggcatgcagatcttcgttaagacactcaccggcaagaccataaccctagaggttgaaagctccgacaccatcgataacgtcaaggccaagatccaggacaaggagggtatccccccggaccagcaacgtc

SEQ ID NO: 3728 - DNA, 412 bp, Glycine max
  Clone ID: LIB3073-026-Q1-K1-A8
ggtgctctgctcgtgcctctagggttatcattgctccatttccattttctctctctcacttttcaagaatcgtaagctatgggaaagtcttacccaactgtgagtgctgattaccagaaggccgttgagaaggcgaagaagaagctcagaggcttcatcgctgagaagagatgcgctcctctaatgctccgtttggcatggcactctgctggaacctttgacaggggcacgaagaccggtggacccttcggaaccatcaagcaccctgccgaactggctcacagcgctaacaacggtcttgacatcgctgttaggcttttggagccactcaaggcggagttccctattttgagctacgccgatttctaccagttggctggcattgttgccgttgaggtcacgggtggacctg

SEQ ID NO: 3729 - DNA, 420 bp, Glycine max
  Clone ID: LIB3073-026-Q1-K1-B10
gacaacacagaacaaaaacaaagaaaaaaaaagcgccttagccaacacaaccatcatggccacctctgctattcagcaatcagcattcactggtcaaactgctctgaagcagctcaatgagttcgtccgcaagaccggtggcgccggcaaaggtcgcactaacatgcgccgcaccgtcaagagtgctcctcagagcatttggtatggccctgaccgtcccaagtacttgggtccattctcggagcagattccatcatacctgaccggagaattccctggtgactacggatgggacactgctggattatcagctgacccggaaaccttcgccaggaaccgggagctggacgtgattcacagcagatgggcaatgcttggtgcccttggctgcaccttcccagagatccttgagaagaatgg

SEQ ID NO: 3730 - DNA, 420 bp, Glycine max
  Clone ID: LIB3073-026-Q1-K1-B12
ggcacaagtgagtttgttgatcgagataactagaaacagtgtgatgaaaatgaaggtccttgttttcttcgttgctacaattttggtagcatggcaatgccatgcgtacgatatgttccctctccgaatgaacactggctatggtgcccgtactccggaggtgaaatgcgcaagttggaggcttgctgtggaagcacacaacatctttggctttgagaccattcctgaagagtgcgttgaagcaacaaaggaatacatccatggcgaacaatatagatcagactccaaaacagttaaccaacaagcttacttttatgccagagacctcgaagtccatcccaaggacacatttgtgttcagtatagatggcaccgtactctctaatattccatactacaaaaaacatggatatggggtgga

SEQ ID NO: 3731 - DNA, 405 bp, Glycine max
  Clone ID: LIB3073-026-Q1-K1-B2
caagtactttcaagttcctgtggcaataaggaagagcaatacactgtggaaggagtgcagaatcttggagacaaagcagtgatgtgtcatgggctaaatttcagaactgcagtattttactgccataaagtccgtgaaacaacagctttcatggttccattggtggctggtgatggaaccaaaactcaggcacttgctgtttgccactcagatacttctggaatgaatcatcacatgcttcatgaactcatgggagttgatcctggaactaaccctgtttgccatttccttggaagcaaggccattttatgggtacccaatatatctatggacactgcctatcagactaacgttgctgtttaattagtccatgcatctgcatcttgggcaccataagattgtata

SEQ ID NO: 3732 - DNA, 418 bp, Glycine max
  unsure at all n locations
  Clone ID: LIB3073-025-Q1-K1-H2
gaaggtgcaagagtttgttgtgagctataagctagtttatcgtgaggagaatatgaagttgtttgttttctttgttgctgcagtagttttggtagcatggccatgccatggcgcangctaccaaaggttccctctccgaatgaaaactggctatggtgagcgttcttcggaggtaaaatgcgcaagttttaggcttgctgtggaagcacacaacatccgagcctttaaaaccattcctgaagagtgcgttgaaccaacaaaggactacattaatggcgaacaatttagatcagactctaaaacagttaaccaacaagctttcttttatgctagtgaacgcgaagtccatcacaacgacatatttatattcggcatagataacaccgtactctctaatatcccatactatgaaaaacat

SEQ ID NO: 3733 - DNA, 396 bp, Glycine max
  unsure at all n locations
  Clone ID: LIB3073-025-Q1-K1-F7
gagtattcagattacattgcgaaaatggcatcattcaccatgacagcttccatccttggcagcccagccgtcaccaaccggtcggcagtagcaacgcagaggagatcactcgtagtgaatgctgccaaagctgttgaagcagaaaaggtcagttatgacaatgacatggatggtagcaatggaaggaggaacttgatgttcgccgcggcggcggctgctgtttgctctgttgctgggatggcagtggcagatgagcctaaaccaggaaccccagaagccaagaaaaagtatgctccgatttgtgtcaccatgccaactgctaggatttgtcgcaattgagggactntggtttttattntacttctgatgattggaaatgtacaatggggttgttgt

SEQ ID NO: 3734 - DNA, 411 bp, Glycine max
  Clone ID: LIB3073-025-Q1-K1-F8
gacacttactagtagtaagcatggagtcctcaagagatctatgcttacctcttcctctgcatgatctttctctcttccgccactcccattctcggttgtggctactgtggcaaaccccccaaaaagcacaagcctggtaaaacaccaaagacacccaaaacacccgttgttaagccaccagtcaccatccctcccattaatgttcctcccgttgttcttccaccaatagtgaagcccccaggtattctccccccaattccaattattaacccaccaaccacaccagggaagggagggaacactccatgcccaccaccaaagtctcctgcgcaggctacgtgccccattgacacgctcaaacttggtgcctgtgtggatcttcttggagggttggttcacattggtttgggt

SEQ ID NO: 3735 - DNA, 397 bp, Glycine max
  unsure at all n locations
  Clone ID: LIB3073-025-Q1-K1-G1
ggaggcggagacgaagaagtgaagagaagagaagagaagggatttggatctgaaaagagaagatggggggaggaatggaagcaaacaagaacaagttcatagaggattggggcactgccagagagaatctggagttcaatttccgttggactcgccgcaaccttgctcttgttggcatcttcggcatcgctattcccgtcctcgtctacaagggcatcgtccgtgaattccatatgcaagatgaagataatggtcggccgtacaggaagttcatgtgagagagtatggagagtcttttgtaataattcgtcaagttagaccttggtattatgaggctacaaaccatgttttttttttccttaattcgcaaaggcttgctngcttttaagtactctag

SEQ ID NO: 3736 - DNA, 403 bp, Glycine max
  Clone ID: LIB3073-025-Q1-K1-G11
gacaccaacaccaaaacaaacccactaagatggcttcctttgtatccttcctagtgctgcttcttgcagcccttatcctcatgcctcaagggcttgctacttactacaaaccaattaagaagccaccagtgtacaagcctccagtgtacaagccaccagtgtacaaaccaccggtttataagccaaaaccaccggtttacaagccgaaaccaccggtttacaagccaccatataagaagccaccatacaagaaaccaccttatggaaagtaccctccagtagaggacaacacccatgcctaaagcaagcaatgaggtctattatctacttaataaataagaggaactgctttgtgttttctagcattgtgatttacaacttcgtagcaatgcatattcttgac

SEQ ID NO: 3737 - DNA, 351 bp, Glycine max
  Clone ID: LIB3073-025-Q1-K1-G2
ggagcatgcttacggttctggaatccatcgtgtaaaagctcaaatccaaaccctaaaataccaccgccgttctcatctctcttcccagccctcacctcaacgctgcatcttcacgtcgtctcacgaggtgcatatagtagagagggaaaatgagtcgaggaggcgcagtagcagcagcgaagggaaagaagaagggtgctacattcaccattgactgtgcaaagccagtggaagataagatcatggacattgcttctctcgaaaagtttcttcaagagaggatcaaggttggtggcaaagctggtgctcttggtgacagtatcactgttacccgcgagaagaccaagatca

SEQ ID NO: 3738 - DNA, 316 bp, Glycine max
  Clone ID: LIB3073-025-Q1-K1-G4
ggcacaagtgagtttgttgatcgagataactagaaacagtgtgatgaaaatgaaggtccttgttttcttcgttgctacaattttggtagcatggcaatgccatgcgtacgatatgttccctctccgaatgaacactggctatggtgcccgtactccggaggtgaaatgcgcaagttggaggcttgctgtggaagcacacaacatctttggctttgagaccattcctgaagagtgcgttgaagcaacaaaggaatacatccatggcgaacaatatagatcagacttcaaaacagttaaccaacaagcttacttttat

SEQ ID NO: 3739 - DNA, 386 bp, Glycine max
  unsure at all n locations
  Clone ID: LIB3073-025-Q1-K1-G5
gaagcataacttgcatagacgattgattaagaaagctattgtcattgatttgctagctccaacaatgggttctagcagattatcattcattttagtacttgtgcttgtaaccttttcatccatgatcattgactcaagggttgcagaggcacgtaccctgccaaaatcagccttattgccttccaaagttgatatacctactgttgatcctcttccactggtggcaccactgccaaatttgcctgttactctccctccagtgcctgaactacctgcagtacctaaagtaccaattcctgaagtaatagttaataacgccaaaataatcccttgagtacctatgatctatccagtcactactacttattntgtcacttgctaaatta

SEQ ID NO: 3740 - DNA, 411 bp, Glycine max
  Clone ID: LIB3073-025-Q1-K1-G8
ggcacaagtgagtttgttgatcgagataactagaggcagtgtgatgaaaatgaaggtccttgttttcttcgttgctacaattttggtagcatggcaatgccatgcgtacgatatgttccctctccgaatgaacactggctatggtgcccgtactccggaggtgaaatgcgcaagttggaggcttgctgtggaagcacacaacatctttggctttgagaccattcctgaagagtgcgttgaagcaacgaaggaatacatccatggcgaacaatatagatcagactccaaaacagttaaccaacaagcttacttttatgccagagacctcgaagtccatcccaaggacacatttgtgttcagtatagatggcaccgtactctctaatattccatactacaaaaaacatggata

SEQ ID NO: 3741 - DNA, 384 bp, Glycine max
  Clone ID: LIB3073-025-Q1-K1-G9
cgccggaggtagaaagggcggcggcccaaagaagaagccggtttcaaggtccgtcaaagccggtctccaattccccgtcggaagaattggccgttatttgaagaaaggaaggtacgctcagcgtgtcggtaccggtgctcccgtatacttggctgcagttctcgaatacctagctgccgaggtgcttgagttggctgggaatgccgcacgtgacaacaagaagaacaggattattccaagacacgtgcttttggcagtgaagaacgatgaggagttggggaaattgcttgctagagcgacaattgcacatggtggcgtgcttccaaacattaacctttgtttgttgcctaagaagaccgagagggcttccaaggaacctaaatc

SEQ ID NO: 3742 - DNA, 360 bp, Glycine max
  Clone ID: LIB3073-025-Q1-K1-H1
gctctctttttgctgtgggaagaggaaccctagctagggtttggaagaagctgatccgagaagatggtgcagcgtctcacctaccgcaaacgccacagctatgctaccaaatccaaccagcacagagtcgtcaagactcccggtggcaagcttgtttatcagaccacgaagaagagggccagcggacccaagtgccctgtcactggaaagaggattcaagggattccacatttaaggccagcagagtataatagatcaaggttacacagaaaccgaaggactgtgaaccgtgcatatggtggtgtgatgtctggcagtgctgttagagaaagaatcattcgagctttcttggccgaagag

SEQ ID NO: 3743 - DNA, 414 bp, Glycine max
  Clone ID: LIB3073-025-Q1-K1-H10
gggagaggcggagacgaagaagtgaagagaagagaagagaagggatttggatctgaaaagagaagatggggggaggaatggaagcaaacaagaacaagttcatagaggattggggcactgccagagagaatctggagttcaatttccgttggactcgccgcaaccttgctcttgttggcatcttcggcatcgctattcccgtcctcgtctacaagggcatcgtccgtgaattccatatgcaagatgaagataatggtcggccgtacaggaagttcatgtgagagagtatggagagtcttttgtaataattcgtcaagttagaccttgatattatgaggctacaaaccatgttttttttttccttaattcgcaaaggcttgctcgcttttaagtactctagacctatcaaacctc

SEQ ID NO: 3744 - DNA, 423 bp, Glycine max
  unsure at all n locations
  Clone ID: LIB3073-025-Q1-K1-H11
ggcacaagtgagtttgttgatcgagataactagaaacagtgtgatgaaaatgaaggtccttgttttcttcgttgctacaattttggtagcatggcaatgccatgcgtacgatatgttccctctccgaatgaacactggctatggtgcccgtactccggaggtgaaatgcgcaagttggaggcttgctgtggaagcacacaacatctttggctttgagaccattcctgaagagtgcgttgaagcaacaaaggaatacatccatggcgaacaatatagatcagactccaaaacagttaaccaacaagcttacttttatgccagagacctcgaagtccatcccaaggacacatttgtgttcagtatagatggcaccgtactctctaatattccatactacaaaaaacatggatatggngtggagaa

SEQ ID NO: 3745 - DNA, 437 bp, Glycine max
  unsure at all n locations
  Clone ID: LIB3073-025-Q1-K1-H12
acgacagaagggggttctagtgtatgtgattgttgtgactcgttcttcttcgtcgttatcttcttcttttgttgtttgtgtgtttgttttttctctcacctgaaaatgtcttgctgcggtggtaactgtggttgcggaagcgcctgcaagtgcggcaacggctgcggaggctgcaagatgtacccagacttgagctacaccgagtcaaccaccaccgagaccttggtcatgggagtggcaccagttaaggctcaattcgagagtgctgaaatgggtgttcccgctgagaacgatggctgcaaatgtggagctaactgcacctgcaacccctgcacttgcaagtgangtgttggagagctaaagcttcaagcagagatggcccttagaaataatgataaanactatatgtagtttcaaaacttcaaaattatgtagta

SEQ ID NO: 3746 - DNA, 413 bp, Glycine max
  unsure at all n locations
  Clone ID: LIB3073-025-Q1-K1-F6
ggtagtgttgttgaggttttttgtagcagaatgcagtgcggtgtgttgtagcagcgattagaaggaaggaggaaagatgaacacagacatcactgcatcgacgaagccagagtacccagtcattgatcgcaaccctcctttcaccaaagtcgtcggcaacttcaacaccctcgactatctccgattcgtcacaatcaccggcgtttccgtcaccgtcggctacctctccgggattaagcctggaattaggggtccttcgatggtgacagggggtttgatcggagtgatgggtgggttcatgtatgcttaccagaactccgctgggagactcatgggtttcttccccaacgatgatgaggtagctcgctacaacaaanaataattcctttttttgtgctcatcaaaaaaacaaa

SEQ ID NO: 3747 - DNA, 406 bp, Glycine max
  Clone ID: LIB3073-025-Q1-K1-E1
gattagaaagaggatcaaaagagaaaagagaagacaaagggcaacactggatggctttaccgacatcaccggagcacagaacagcatcgatatcgaaaatctcgctcgctctgctgttgatgaacacaacataaaagagaatgcagatctggagtttgtgaaggtgattagtgcacagaaacaagtggattctggcaccttgtactatatcactctggaggcaaatgatggtgtgacgaaaaaggtttatgaaactaacgtgttggagaaaccacggttgaacatcaaggaggttcaggaattcaagcccatcactgttgctgttaatcctctttcggtgacggtctagcacatagctaggttatggaagtgactagctttgccgcaagagttataatatgtatga

SEQ ID NO: 3748 - DNA, 156 bp, Glycine max
  Clone ID: LIB3073-025-Q1-K1-E12
tcaaacgaagaaaggcttatggtggatacctaggcacccagagacgaggaagggcgtagtaagcgacgaaatgcttcggggagttgaaaataagcgtagatccggggattcccgatataggtcaacctttcgaactgctgctgaatccacgggcag

SEQ ID NO: 3749 - DNA, 346 bp, Glycine max
  Clone ID: LIB3073-025-Q1-K1-E2
gacccatccattcttcaaatggaaaagctccatgcttctgtgctcgcccttgtattccttcttgtcatactatttcaggaaggattggtaacatgtatgaagaatgaagacggatcagaagaatggggatatgtgcaagttagaccaaaagcccacttgttctggtggctttacagaagtccatacagagtggagaatccctccaagccttggccaatcattctctggcttcagggaggaccaggctcttcaggagttgggtttggaaattttggagaggttggtcctttggatgctaatttgaagccacgaaatttcacatggttgagaaaagcagatctcttgg

SEQ ID NO: 3750 - DNA, 358 bp, Glycine max
  Clone ID: LIB3073-025-Q1-K1-E3
gcttctgagtcgtggtttacttctcagcagcttcggctagggttcagaaacgaaaaagggttcggtgttctgttcgcgatgagagccaagtggaagaagaagcgtatgaggaggttgaagaggaagcgccgaaagatgagacagagatccaagtagtgcgttaaacctagtttgtttctgttgcttttacaattgcttatgttgtcgaatgggacacccagttgttaatggcactggtttctcctttttgatgtttgatacattttgttggattcaagtagtctatgttcgtcttatgttattagctcaaaacaatgttgttactgcttttgctaatcaacatgatctcctatttgga

SEQ ID NO: 3751 - DNA, 365 bp, Glycine max
  Clone ID: LIB3073-025-Q1-K1-E4
catgagggagggtcccaaccttctcaagttggcgaggaaggagcagtgcttggctcttgggactaggctcaggtcaaagtacaagatcaagtaccagttttacagggtcttccccaatggggaggttcagtatttgcaccccaaggatggtgtgcaccctgagaaggtcaacgccggacgccaaggggttggtcagaacttcaggtctattggtaagaatgttagtcctattgaggtcaagttcactggcaagcaaccctatgatttgtgagcaactctatcatcattcccccatgcttcttccattcgtttatatgctatattgtcatctcatgtcatgccaagaatgctataactctttaccc

SEQ ID NO: 3752 - DNA, 440 bp, Glycine max
  unsure at all n locations
  Clone ID: LIB3073-025-Q1-K1-E5
cggaattgcagtttcgacctacacgtacgcgtacgcatgcgtgcacgcatacgaccggttgcgataagacaacatanggggcttctgagtcgcgtttgacttctctgcatgtttggatcgggttcacagacgaacaaggcatcatcgatctgttcgatgatgagagcctatggtgaagatgaagcctatgaggaggatgatgaggaagcgccgattgatgagacagatatccaagtagtgcgttaaacctaggtcgcctctgacgctattacaattgcttatgttgacgaatgggacacccagttgttaatggcactggtttctcctttatgatgtttgatacattttgatggattcaagtagtctatgatcgtctgatgctattagctcataacaatgatggtactgcttatgctaatcaacatgatctgctatttgga

SEQ ID NO: 3753 - DNA, 409 bp, Glycine max
  unsure at all n locations
  Clone ID: LIB3073-025-Q1-K1-E7
ggcacaagtgagtttgttgatcgagataactagaaacagtgtgatgaaaatgaaggtccttgttttcttcgttgctacaattttggtagcatggcaatgccatgcgtacgatatgttccctctccgaatgaacactggctatggtgcccgtactccggaggtgaaatgcgcaagttggaggcttgctgtggaagcacacaacatctttggctttgagaccattcctgaagagtgcgttgaagcaacaaaggaatacatccatggcgaacaatatagatcagactccaaaacagttaaccaacaagcttacttttatgccagagacctcgaagtccatcccaaggacacatttgtgttcagtatagatggcaccgtactctctaatattccatactacaaanaacatgga

SEQ ID NO: 3754 - DNA, 399 bp, Glycine max
  unsure at all n locations
  Clone ID: LIB3073-025-Q1-K1-E8
gaccaagtgaaccaatatagcccaagccctatacaaccaaaccctaacacacacccatttgattcagtttccatggctagcctcaaggttgcatttttggctgtagtgctctgcatggttgtggtgagtgcacccatggcacatgcagctatcacgtgcgggcaggtgacgagtagcctggccaattgcatcggttacctccagaagggaggaacgccgtcgtcgggatgctgcaacggagtgaagagcctcaatgccgccgccaagaccaccgccgaccgccagacggcgtgcaactgcctcaagtcggccgccagccaaatctccggcttcaacgccaacaacgccgnctcgctccccggcaaatgcggagtctccatccnctacaagatcagcacc

SEQ ID NO: 3755 - DNA, 294 bp, Glycine max
  Clone ID: LIB3073-025-Q1-K1-E9
gacaggcaggcaccaatcgaggttctgatttctcagcactgagcactcttaaaaccaataacggtgaaccaaactaacaaaaccatccatcatcatcatcatcgacatcaacaatctcacttttctctcttttttttctcattaaaatataaattgctctcttgtctccctcttcacccactaaccctcgatcctcatccacctctctcagttcccttccatcaagtttcgatctggatccactttttccacacccaatatttcctattccaacccctttattcatctccacgt

SEQ ID NO: 3756 - DNA, 373 bp, Glycine max
  unsure at all n locations
  Clone ID: LIB3073-025-Q1-K1-F1
ggacacacagctattcctcttaagcttgctactgagtttccacactgcataccttaggtcttccgaattcgaagttaatttgcaagatggctaaggaaaaggctcagatcaacattgtggtggttggtcatgtggaccctgaggaggcaaccaccattaacgagctgaagaagcctgttgtggagaaagaagctccagggcatgccatatgagggcatgcacgtacggcctcggaggggaaccagaaaattatgttaacaaaataatctggaaccctaatgtatcagtgtcatcatcagtgtgtagtttaagctagctttgctatggntacgttctttgagatgagagtcttgatgaacagtaccattctgat

SEQ ID NO: 3757 - DNA, 418 bp, Glycine max
  Clone ID: LIB3073-025-Q1-K1-F11
gaccacattccaaaacacaaacacatacattgtagtatcacttttgtctcggaatttgttcttttgagttatggcaagcttaaaggttgcatgtgtggttttgatgtgcatggctgtgatgagtgcaccaatgatggtgcaagccgtgtcatgcaatgatgtttctgtgaacctagcaccgtgcctatcttacctgatgcagggtggagatgttccagaatcgtgctgtagcggagtgaggaacattctgggttctgccagcaccacctttgacaaacaaaccgtgtgcaaatgtcttcagcaagctgctaataactatggcatcaacgacgaatacgctcaggcactccccgcccgctgcaatgtcagcgtcccttacaagatcagccgatccaccaactgcgactccatcaagttc

SEQ ID NO: 3758 - DNA, 369 bp, Glycine max
  Clone ID: LIB3073-025-Q1-K1-F2
gatcacacacaacaattttctcacaaaacaaaactccatttgtaactctctctccatttccactcatatcccataagcaccaccatggctccacctaaagaaattgcaaccctcatttaccagaatggtcacattgtagacgattcagttcaaggatcgacgtacacatgtacgaccccaatatttttttacgccaatcgttctattacatttacacaattcatttgaaaaactaacaatcgtctccctactcgagcaactgaacaagttgctcaattggtatttcgtgtccctatttcatttcatctcggccagacatgtaatggattggtatttataaataaatggaatttaaaaaaaggattaacc

SEQ ID NO: 3759 - DNA, 402 bp, Glycine max
  Clone ID: LIB3073-025-Q1-K1-F4
gaagaagaagaattggattcgaaaatcgtagcgtagcgttggtgcgattgaacgatacgatgggaagaggaaaattcaagagcaagcccactggtcgccgccagttctccaccccggaagatatgcttgctggaacctctaaccgtcctcgaacttttagacagaaagaagctgagcatgaagaggaagaacccgaggaagtatctggagatgaatctggagaagaatctgaagaagaaacttctaagaaaaaaggaacacaaggggttattgagattgaaaatcccaacttagtaaagccaaagaccttgaaagctagagatgttgatgttggaaaaacaacagaactttcaaggcgtgaaagggaagagatagagaaacagagagcccatgagcgctata

SEQ ID NO: 3760 - DNA, 408 bp, Glycine max
  Clone ID: LIB3073-025-Q1-K1-F5
gacaagtgagtttgttgatcgagataactagagacagtgtgatgaaaatgaaggtccttgttttcttcgttgctacaattttggtagcatggcaatgccatgcgtacgatatgttccctctccgaatgaacactggctatggtgcccgtactccggaggtgaaatgcgcaagttggaggcttgctgtggaagcacacaacatctttggctttgagaccattcctgaagagtgcgttgaagcaacataggaatacatccatggcgaacaatatagatcagactccaaaacagttaaccaacaagcttacttttatgccagagacctcgaagtccatcccaaggacacatttgtgttcagtatagatggcaccgtactctctaatattccatactacagaaaacatggat

SEQ ID NO: 3761 - DNA, 411 bp, Glycine max
  Clone ID: LIB3073-025-Q1-K1-D8
ggtttctaaaacactatcccttttactgtttattgacaaagagaaacaatcggaggatctgttctgttccataagatggctggacttttaggatataggagccttccacctaaggcaaagaatctggtagttgctgggggtttgacagcttttgtctttggtgcatacttctacaccatgagggctgttggaggcactgatgaactgcaggtagcaattgataagtttgaagctgacaagagcaagaatgagggtgatgccaacatgccatcaaaggtctaaagcttgtacaataaagcaatactttgggtgtattcactgttttggtttgggatcaagctttttacttagtatgagaatgttctaaaaggaatgatattgaatctagttgctaataagtttcaaccagct

SEQ ID NO: 3762 - DNA, 358 bp, Glycine max
  unsure at all n locations
  Clone ID: LIB3073-025-Q1-K1-B9
ggattgattccctcattcttcatccatagacatggccaccgtcacttctgcagccgttgctattccctcattcactggcctcaaggcaagcgcaggcaaagtgagtgccgcagttaaagtctcagctccccaagccacaaggttgggcatcaaggcttcgctgaaagacgttggagtcgctgttgtggccactgccgcgagtgcagtgctggctagcaacgccatggccattgaagtgttgctgggtggtgatgacgggtctctggctttcgttcccaacaatttctccgtggcctctggggagaagatcgtgttcaagaacaacgcangtttcccccacaacgttgtgttcgacgag

SEQ ID NO: 3763 - DNA, 377 bp, Glycine max
  unsure at all n locations
  Clone ID: LIB3073-025-Q1-K1-C1
ggtcaagcctgccgagaaaaccctagttcgcttgcagtcacacaagaggccaatcctattcatagctcgagatgggtgaggaagtgaaggtagttgttccagaatcagtgttgaagaagcgcaagagggaggaggaatgggcgttggccaagaagcaagaactcgatgctgccaagaagaagagagccgagagccgcaaactcatctacaacagagctaagcagtacgctaaggagtacgatcaccaggagaaggaattgattcggttgaaacgcgaggccaagctgaaaggtggtttctatgtggatccagaggctaagctgttgnttattattcgcattcgtggtattaatgccatggaccccaaatcaaggaag

SEQ ID NO: 3764 - DNA, 354 bp, Glycine max
  Clone ID: LIB3073-025-Q1-K1-C10
ggaagtgatagaggaaactgtagaagcgcacagagagagctaagtggaggaagaaaatgaaggcattgggatggtggctgatagcggtaggcacgcttcgattagcttccgtgtggttcggtttcttcgacatttgggctcttcgtctcgccgtcttctgcaacactacaatgactgaagttcatgggcgcacatttggaacttggacactgttgacctgcaccctttggtatatctgcgcattcaaccttgaaaataagcctctctacctggctacttttttggcattcatctatgcattcggtcatttcttgaccgaatatctaatttatcatacaatggagattaagaatc

SEQ ID NO: 3765 - DNA, 316 bp, Glycine max
  Clone ID: LIB3073-025-Q1-K1-C12
ggcacaagtgagtttgttgatcgagataactagaaacagtgtgatgaaaatgaaggtccttgttttcttcgttgctacaattttggtagcatggcaatgccatgcgtacgatatgttccctctccgaatgaacactggctatggtgcccgtactccggaggtgaaatgcgcaagttggaagcttgctgtggaagcacacaacatctttggctttgagaccattcctgaagagtgcgttgaaacaacaaaggaatacatccatggcgaacaatatagatcagacttccaaacagttaaccaacaagcttacttttat

SEQ ID NO: 3766 - DNA, 401 bp, Glycine max
  unsure at all n locations
  Clone ID: LIB3073-025-Q1-K1-C2
gacacacaaaaaagcaaagcagaaaacaactgttgatttggtatcaagactactacaatactcccctaacttgcggtgcacagctttagatgccttgacgcatcctttctttgacgaacttcgtgatccaaattctcgcttgccaaatggccgattccttccaccactatttaatttcaaatcccatgaactgaaaggtgtcccagctgagattttggtgaaattggttccagagcatgcaaggaagcaatgcccgtttcttggcttgtgaagtgtaacagaactgcaagtgttgtttccatatgagaatgccgcactttccttctatttaaaatgatatttgntggtatctttattgtattcggttgccctgtaaaatcagatttagagatacatgctac

SEQ ID NO: 3767 - DNA, 410 bp, Glycine max
  Clone ID: LIB3073-025-Q1-K1-C3
gatagaagaagcagaaagagaagcattagcagaagcgagaagaactagtctaagcagaaatggcctcttcagtgatggcgtctgtggccctcaaacctgcccctttcactgttgagaagtcctcagttagaggccttccctccctctcaaggaactcctcttcattcagagttgtggccagtggtggcaagaagatcaagactgacaagccttatggaattaatggtggcatggctttgagggaaggagttgatgcatctggcaggaaaggaaagggaaagggcgtttaccagtttgtagacaaatacggtgctaatgtcgatggttacagtcctatctacgacaccaaggactggtctccaaccggtgatgtctacgctggcggtacgactggcttggctatctgggct

SEQ ID NO: 3768 - DNA, 239 bp, Glycine max
  Clone ID: LIB3073-025-Q1-K1-C4
gattcagattacattgcaaaaatggcatcattcaccatgacagcttccatccttggcagcccagccgtcaccaaccggtcggcagtagcaacgcagaggagatcactcgtagtgaatgctgccaaagctgttgaagcagaaaaggtcagttatgacaatgacatggatggtagcaatggaaggaggaacttgatgttcgccgcggcggcggctgctgtttgctctgttgctgggatggc

SEQ ID NO: 3769 - DNA, 397 bp, Glycine max
  Clone ID: LIB3073-025-Q1-K1-C5
gacaccaacaccaaaacaaacccactaagatggcttcctttgtatccttcctagtgctgcttcttgcagcccttatcctcatgcctcaagggcttgctacttactacaaaccaattaagaagccaccagtgtacaagcctccagtgtacaagccaccagtgtacaaaccaccggtttataagccaaaaccaccggtttacaagccgaaaccaccggtttacaagccaccatataagaagccaccatacaagaaaccaccttatggaaagtacccttcagtagaggacaacacccatacctaaagcaagcaatgaggtctattatctacttaataaataagaggaactgctttgcgttttctaacattgtgatttaccacttcggaacaatgcatatt

SEQ ID NO: 3770 - DNA, 412 bp, Glycine max
  Clone ID: LIB3073-025-Q1-K1-C6
gaaggtgcaagagtttgttgtgagctataagctagtttatcgtgaggagaatatgaagttgtttgttttctttgttgctgcagtagttttggtagcatggccatgccatggcgcaggctaccaaaggttccctctccgaatgaaaactggctatggtgagcgttcttcggaggtaaaatgcgcaagttttaggcttgctgtggaagcacacaacatccgagcctttaaaaccattcctgaagagtgcgttgaaccaacaaaggactacattaatggcgaacaatttagatcagactctaaaacagttaaccaacaagctttcttttatgctagtgaacgcgaagtccatcacaacgacatatttatattcggcatagataacaccgtactctctaatatcccatactatgaa

SEQ ID NO: 3771 - DNA, 396 bp, Glycine max
  Clone ID: LIB3073-025-Q1-K1-C7
ggaatgggaggaagaataattgtgaggcgagggtaaggtcgcgctgtgttgcgtcgtgtcgtgcgctgttcctctgtttctcgtttttgtgttcagaccgaaccctagctccgcatcgcaaccatgtcgaccaagcaaggtggaaaagctaagcctttgaagaaacccaagtctgataagaaggattacgacgagattgatgtggctaacattcagaagaaaaaggaagaggagaaggcgctaaaggagttgaaagccaaggcgcaacagaagggaagctttggaggttctgggctcaagaaaagtggaaagaaataagggctctttatcatgattgtatgcattcaatattgagccctgtaattacagttgctaccatgataacttctcttatta

SEQ ID NO: 3772 - DNA, 398 bp, Glycine max
  Clone ID: LIB3073-025-Q1-K1-D1
ggagtacaacttcacattttagaagaataccccctcttttgctgcatcagaggagttgtaaattaagagcatggctgcacaagctcttgtatcatcatcttctcttaccttctcagcggaggctgcaagacaaagtcttggaccaagatcactccaatctccatttggcttctccagaaaagcctcctttcttgttaaggcagctgctaccccccctgtcaagcaaggatcagacaggcctttgtggtttgcatcaaagcaaagtctttcttacttggatggcagccttccgggtgactatggatttgaccctctgggactttcagaccctgaaggaacaggagggttcattgagccgaaatggctagcatatggtgagataatcaatgggtcgtatg

SEQ ID NO: 3773 - DNA, 293 bp, Glycine max
  Clone ID: LIB3073-025-Q1-K1-D10
ggagcaaaaccctaatccctatttttcttcctcagtagtgtcatttacgcttctcttctctgcagcaactatgcctaaccctaaggtcttcttcgacatgaccatcggcggtcaatctgctggccgcatcgtgatggagctctacgccgacgtcactccccgcaccgccgagaacttccgcgcgctttgcaccggcgagaagggcgtagggcggagcggcaagcccctccactacaagggctcgtccttccaccgcgtggtcccgagtttcatgtgtcagggtggcgacttca

SEQ ID NO: 3774 - DNA, 395 bp, Glycine max
  Clone ID: LIB3073-025-Q1-K1-D11
gattgtaaagcattcttctcttttctttctttgctctttcctctctctctctacgctttctcgcttgagatccctcaagggatccactaactgaaggagcaatggggttgacatttaccaagctttttagccggcttttcgccaagaaggaaatgcgaattctaatggttggtcttgatgccgctggtaagaccaccatcctgtacaagctcaaacttggagagatcgttaccacaattcccaccattgggttcaacgtggagactgtggaatacaagaacattagtttcactgtctgggatgttggtggccaggacaagattcgtcccttgtggaggcactacttccaaaatacacagggtctcatttttggtgttgacagcaatgacagggac

SEQ ID NO: 3775 - DNA, 366 bp, Glycine max
  unsure at all n locations
  Clone ID: LIB3073-025-Q1-K1-D4
cgagaaagacattaccccaatgggtggtttccctcactatggtgttgttaaggatgattttatcatggtcaagggatgctgtgttggtcccaagaagagggtcattacattgcgtcaatcccttcttaagcagacttctcgtgttgctcttgaggagatcaaactcaagtttatcgatacctcttcaaagtttgggcatggtcgcttccagaccacacaggagaagcagaagttctttggacgcctcanagcataattatgttaattggatggaaatgctggaattctatttggttgccatcacttataaactntgtagtgtttctggtttgatattatggattctcgggtagtgagttttttttc

SEQ ID NO: 3776 - DNA, 409 bp, Glycine max
  unsure at all n locations
  Clone ID: LIB3073-025-Q1-K1-D7
atagcaagtagcaaggagactagttctgtattcagattacattgcaaaaatggcatcattcaccatgacagcttctatctttggctgcccagctgtcaccaaacggtcggcagtggctgcgcagaggagattactcgtagtgagtgctgccaaagctgaaggggaaaaggtcagttatgacaacaatgatagcaatggaaggaggaacttgatgttcgctgtgactgctgctgctgttttctctgttgctgggatggcagtggcagatgagcctaaaccaggaacctcagaagccaagaaaaagtatgccccggtttgtgtcaccaatcctacagctagcatttgtcgcaattgaggatctcctgtttcattntacctctgatgatcggaaatgtacgttggggatgta

SEQ ID NO: 3777 - DNA, 394 bp, Glycine max
  Clone ID: LIB3073-025-Q1-K1-B8
gatagcaagtagcaaggagactagttctgtattcagattacattgcaaaaatggcatcattcaccatgacagcttctatctttggctgcccagctgtcaccaaacggtcggcagtggctgcgcagaggagattactcgtagtgagtgctgccaaagctgaaggggaaaaggtcagttatgacaacaatgatagcaatggaaggaggaacttgatgttcgctgtggctgctgctgctgttttctctgtcgctgggatggcagtggcagatgagcctaaaccaggaacctcagaagccaagaaaaagtatgccccggtttgtgtcgccaatcctacagctaggatttgtcgcaattgaggatctcctgtttcattttacctctgatgatcggaaat

SEQ ID NO: 3778 - DNA, 398 bp, Glycine max
  Clone ID: LIB3073-025-Q1-K1-A1
gataccaaaaacaaaacacaagccaagtgaaagtgagaaaaaataaaaatcaaagagcataatgtcagggatcattcacaagattggggagacccttcatgtgggagggcacaagaaggaggaggagcataagggtgagcaccatgctggagaatacaaaggggagcaccatggtgaacacagtagtgagtacaaaggagagcatcatggtgaacacaaagctggagagtaccatggtgagcacaagccagagcacaaagaggggttcctagacaaagtcaaggacaagatccatggtgagggcggcgccgccgagggcgagaagaagaagaaggagaagaagaagaaggagcatggccatgagcatggccatgacagcagcagcagcagtgacagtg

SEQ ID NO: 3779 - DNA, 416 bp, Glycine max
  Clone ID: LIB3073-025-Q1-K1-A10
ggatcctttgtattctattcttcaagattcaggtgctgcgtttcggaagcagacacagatggctcgtacgaagcaaaccgctcgtaagtccacaggaggaaaggctcctaggaagcagcttgcaaccaaggctgcacgtaagtctgcaccaactactggtggtgtgaagaagccccaccgttatcgtcctggtaccgttgctcttcgtgaaattaggaaataccagaagagtaccgagcttttgatccggaagctccccttccaaaggctggttcgtgaaattgctcaggacttcaagactgatctgcgcttccagagccacgccgtgcttgcattgcaagaagctgctgaggcataccttgttaggctctttgaggacactaacctgtgtgccattcacgccaagcgtgtaacca

SEQ ID NO: 3780 - DNA, 407 bp, Glycine max
  unsure at all n locations
  Clone ID: LIB3073-025-Q1-K1-A11
ggcacaagtgagttcgttgatcgagataactagaaacagtgtgatgaaaatgaaggtccttgttttcttcgttgctacaattttggtagcatggcaatgccatgcgtacgatatgttccctctccgaatgaacactggctatggtgcccgtactccggaggtgaaatgcgcaagttggaggcttgctgtggaagcacacaacatcttttggctttgagaccattcctgaagagtgcgttgaagcaacanaggaatacatncatggcgaacaatatagatcagactccaaaacagntaaccaacaagcttacttttatgccagagacctcgaagtccatcccaaggacacatttgtgttcaagatagatggcaccgtactctctaatattccatactacaaaaaacat

SEQ ID NO: 3781 - DNA, 413 bp, Glycine max
  Clone ID: LIB3073-025-Q1-K1-A2
agatacatatgccattcacataccatcaagacacgggatatgctggagaaactaaagagtatataccccaactacaaataccctgcgaagtatactgaggtggatgattacataagtttcagctcagagaaactgcaaaggttgggttggaaatacaggtcactggaggaaacactcgttgattctgttgagagctatcgggaagctggccatctgcaatcagaataaatgtgacttagtagaatagaataaaactaagtgctatatgatagtagatacttcagttttttaaaatctttattaggattcgattcgattctagtgtgagtatgaaaaagactatataatgagggatgttgtaggtagtttggtaatctcgggttagtctccagcgtccggaggaatattctagt

SEQ ID NO: 3782 - DNA, 412 bp, Glycine max
  unsure at all n locations
  Clone ID: LIB3073-025-Q1-K1-A3
ggggtttgaagaattgcacccaaaaggaagagtggtacagtgacactgtgactgctgttcttgttcctgcttacattgatagtactgaaatagttaggagggcatggaagagatacaatttgagcttaggtcttggactgaacaaagttgctgggaaggttttcaggattggacatcttggccacttgaatgagttgcaactgttgggatgtctagctggtgtagagatgatactcaaagatgtgggttatcctgtaaagcttggaagtggagttgctgctgccagtgcatacttacagaacactattcctatgatcccttccaggatttgagtcacaaatcattcttgtctttacttcctttntctgctctttcagaaattctgtanaatatatattaccctcttttacac

SEQ ID NO: 3783 - DNA, 407 bp, Glycine max
  unsure at all n locations
  Clone ID: LIB3073-025-Q1-K1-A5
gaatcagaagaagaagcaggcgagttgagagagaatgggaaggaagaaggggtatgttgagttcgaggagtcgccgccggacgatttcgatccggcgcatccgtacaaggacccggtggcgatgctggagatgagggagcacatcgtgagggagaagtggatccaaatcgagaaggccaagatcattagggagaagctccgatggtgctaccgcatcgaaggcgtcaaccaccttcagaagtgccgtcacctcgtcaaccagtatctcgagtccacccgcggcatcggttggngcaaggacggtcgtcatccttcttttcacgctccccagggtgagccctgtgaatctgattgactgtcctgtggggataataatannnagaagggaagactgtttatccaactga

SEQ ID NO: 3784 - DNA, 294 bp, Glycine max
  Clone ID: LIB3073-025-Q1-K1-A9
tgggttctaacgactaagtttaatcatccttgaaagtcaaactgaactatattcatctcgtatctactaaagcaattggaaagcacaacccttctatattttccaatattacctccgcttactcccaacataaaacctcctctatttacattaataatttgacttctataacccaagccttacatttaaacctcaagcccaacctttaccatacacttccttattttctttcttaacataccctttttatttcctattactccaacttttattccctttccgattcctcttcca

SEQ ID NO: 3785 - DNA, 281 bp, Glycine max
  Clone ID: LIB3073-025-Q1-K1-B1
ttttgttctcctgcataagactacagaacggggatcgggcacaaagccatggcttctttggcaagcttaactgatgttcaaccatcgtactgttaaaggccttgctctaactaagatctcttttaagacctctcggcaaagtttcagacccaaaaatttcaagaatgctgctgtagtaacaaactatggtgacaacaatgcgtactctcatttcgaggatctaggctccactactggtcaatgggacttgtacggatcctatgcacctttaccctacaacc

SEQ ID NO: 3786 - DNA, 404 bp, Glycine max
  unsure at all n locations
  Clone ID: LIB3073-025-Q1-K1-B11
gacaccaacaccaagacagacccactaagatggcttcctttgtatccttcctagtgctgcttcttgcagcccttatcctcatgcctcaagggcttgctacttactacaaaccaattaagaagccaccagtgtacaagcctacagtgtacaagccaccagtgtacaaaccaccgagttataagccaaaaccaccggtttacaagccgaaaccaccggtttacaagccaccatataagaagccaccatacaagaaaccaccttatggaaagtaccctccagtagaggacaacacccatgcctaaagcaagcaatgaggtctattatctacttaataaatnagaggaactgctttgtgttttctagcattgtgatttacaacttcgtagcaatgcatattcttgact

SEQ ID NO: 3787 - DNA, 386 bp, Glycine max
  unsure at all n locations
  Clone ID: LIB3073-025-Q1-K1-B2
cggaggattcgacgtgtcctaactctgaaactctactattctttctcctccgcagaaccttaacaaccaaaaccaagcattacagttcccaatttcacagaaacaccagaattgatcaaaacacataacaanaaaaagtgaaaatggcgagcgctgtagagaaagaaggtggcgcgagagaagaaactttctcttttgagcttnctgctccacctgggtgaaagaagcagttcatcccaaaagaagctggcacccccaagaaaaatgagattgtgttcactgcagcaacaggagaggagatccataacaggaagcagcttgaaaaaatattgaaagcacaccctggtggtccagctgtatcagaatttgactggngcactggtgag

SEQ ID NO: 3788 - DNA, 392 bp, Glycine max
  unsure at all n locations
  Clone ID: LIB3073-025-Q1-K1-B4
ggctgccgttctctgagaaaaacagatagtgtggaagagagaaaagcggaagagaaaatgacgaccaggttcaggaggaacaggaggaagaaaggtcacgtcagcgccggaaacggccgtatcggaaagcaccgcaagcatcccggaggtcgcggtaacgccggtggcatgcattaccaccgtatcctcttcgacaagtaccatcctggtttcttcgggaaggtaggcatgcgctactttcacaaacttcgcaacanattctacaatccgatcatcaacatcgacaagctgtggtccctcctcccccaggagccaaagacaaggccaccgncgacaaggcacccttgctcgatgtcacccagttcggttactttaaggttttgggtaaaggg

SEQ ID NO: 3789 - DNA, 402 bp, Glycine max
  Clone ID: LIB3073-025-Q1-K1-B5
ggaggtagtgaggtacgtagctcaaaaaggtgttccccaaaccaaggtagctaaatggcatcatcatttgtgggcactttattacccaacaagttcacacaaaacaaacacttatcatctgttcctgcaagtagaggtgctccaacaaggagaagagtacacttagcaacaacaagagcagagagcatgactactgtcatagaaaaacttggcatcaagattgagaggaaccctcctgagtccaagctcactcaactgggtgttaggcaatggcccaaatggggttgccctccaagcaagttcccatggacctatgaagccaaagagacttgctatcttctggaaggaaaagtgaaggtctttcctagtgggtcaaatgagtcagttgaaattgctgctggt

SEQ ID NO: 3790 - DNA, 397 bp, Glycine max
  unsure at all n locations
  Clone ID: LIB3073-025-Q1-K1-B6
gaccaagtgaaccaatatagcccaagccctatacaagcaaaccctaacacacacccatttgattcagtttccatggctagcctcaaggttgcatttttggctgcagtgctctgcatggttgtggtgagtgcacccatggcacatgcagctatcacgtgcgggcaggtgacgagtagcctggccaattgcatcggttacctccagaagggaggaacgccgtcgtcgggatgctgcaacggagtgaagagcctcaatgccgtcgccaagaccaccgccgaccgccagacggcgtgcaactgcctcaagtcggccgccagccaaatctccggcttcaacgccaacaacgccgnctcgctccccggcaaatgcggagtctccatcccctacaagatcagca

SEQ ID NO: 3791 - DNA, 406 bp, Glycine max
  Clone ID: LIB3073-025-Q1-K1-B7
ggcacaagtgagtttgttgatcgagataactagaaacagtgtgatgaaaatgaaggtccttgttttcttcgttgctacaattttggtagcatggcaatgccatgcgtacgatatgttccctctccgaatgaacactggctatggtgcccgtactccggaggtgaaatgcgcaagttggaggcttgctgtggaagcacacaacatctttggctttgagaccattcctgaagagtgcgttgaagcaacaaaggaatacatccatggcgaacaatatagatcagactccaaaacagttaaccaacaagcttacttttatgccagagacctcgaagtccatcccaaggacacatttgtgttcagtatagatggcaccgtactctctaatattccatactacaaaaaacat

SEQ ID NO: 3792 - DNA, 394 bp, Glycine max
  Clone ID: LIB3073-024-Q1-K1-H9
gaatccgaaacagagagagcgaggacaccatggccaacaacaacgaagaggaagaggaagcagtggcgccaatggtgaagttgggttcttacggtggtgaggttcggttggtggttggtggggaggaatccgctgcggaggagaccatgctgctttggggtattcagcagcccacactttccaaacccaatgccttcgtctctcaagcttccttgcaactctccctcgactcttgtggccactctctctccattcttcaatccccttcctcattgggaacgcctggagtaactggagcagtgatgtgggacagtggagttgtactgggaaagtttctagagcatgcttgtgactcagggatgcttgtccttcagggaaagaagattggtgaatt

SEQ ID NO: 3793 - DNA, 420 bp, Glycine max
  Clone ID: LIB3073-024-Q1-K1-G12
gatatttgagttcaaacaaatcaaagccatgggcacctgcaacttctctattgttctctccgtctccctagccttctttttggtgctacttaccaaggcacactcgaccgataccgtttctttcaccttcaacaagttcaactcagtccaaccaaacattatgctccaaaaagatgctagtatttcatcctctggggtgttacaactcaccaaagttggcagcaacggcgtgcccacctcgggatctctcggtcgtgccctttacgctgccccaatccagatttgggacagcgaaaccggcaaggtagccagctgggctacatcctttaaattcaacattttcgcacccaacaaatcaaactcagctgacgggcttgccttcttcttggcacccgtcgggtctcagccccaatccgacga

SEQ ID NO: 3794 - DNA, 282 bp, Glycine max
  Clone ID: LIB3073-024-Q1-K1-G2
tctcggaattcccgacgcgtgcgaccctgcgggaggactacgactacacacgggactatagctcaagagcgtcgtcaataaacctaagagcgtgaaatttccaacgaagaacgccaaagctaaaaagtcaacgattgtagagagctgtacttcaccgtcatagtgattatgtctttcaggttgaatcggatcataagtcgatatattaatagaacaatattgatgaaacttcctttgatagaaactttatcaacatatcttttttagcatctaaccagaccc

SEQ ID NO: 3795 - DNA, 261 bp, Glycine max
  Clone ID: LIB3073-024-Q1-K1-G3
tcccgacccacgcgacccctcgggcctcacctgctacaacacgaccataacaacaaatgggtacactaaaaacatcacgtacgattttctcactaatatcttacaacgaaaccctcctaaccacatctatttatcaacaacattacgtgcccaataacaaatttattctatgattaacacctgctttcctccacggactatcggcaattgccctaccaaaaacccttttttcttctaaaacccacaacacttgtaaccttt

SEQ ID NO: 3796 - DNA, 427 bp, Glycine max
  Clone ID: LIB3073-024-Q1-K1-G4
ccgtgaagaagcccaagagcgtcgtgaagaaacctaagagcgtggaaatctccagcgaaaaaggccaaggctaagaagtgagggattggagtgggttttagtttggcgttatagtgtttatgtatttcgggttgaatcgtagtataggtggatatatttttagaagagtattgatgtaaattcctttgctagaaattttatcaagtgttcttcttttgcattgaaaaaaaaaaaaaaaaaaaaaaaaaaaaaaaaaaaaaaaaaaaaaaaaaaaaaaaaaaaaaaaaaaaaaaaaaaaaaaaaaaaaaaaaaaacccccaaaaaaaaaaaaaaaaaaaaaaaaaaaaggggccctttttaagggcccaaatttttttccccgggttttgcaacttaaaactttttttttggggcccccaaattaaat

SEQ ID NO: 3797 - DNA, 417 bp, Glycine max
  Clone ID: LIB3073-024-Q1-K1-G5
gaaggaagggagggaagaatagaatgggatctggaagtggaaaacacactggagagttcttcaggagaagggatgcatggaggaagcatccgatgcccaccaatcagctccgccacgccacccctggccttggcatcgccgtcgtcgccttcggtatctacctcgtcggcgaacaagtctacaataggctctatgctcccgatcctcattcgatttctcacgtgaaagccggggatcaccactaaacgtttggacggacgcactccattccatcatcacttaataagcttgctagcatgttctcgcagcctttaatggttaaatttcagaccgtgttcgcttcttcggcactcactatgttgtcttgtatgcctacattttatgccttcaatttgcattcacaatgaaactcaattt

SEQ ID NO: 3798 - DNA, 365 bp, Glycine max
  Clone ID: LIB3073-024-Q1-K1-G6
ggaaaaagaaagcaatagaagccactgatatgggaggatcatcatataatgatttccatcgattagtgaaggaggttcttcacaatgatgttgtttgagtctttcaatatattgggggtccgaaggtagggtattaggtgtttcaatattggagatcctagtgttgggctgggctatcaaacaaaatattatgaagaaactagcatgacttgatggctgaaaatcaagtctattaaataaagatttgtgtggatgtaattcatcatataatggattgatttgaagtgtatgtcggtttacaatatacaatgtaattttcaatttcgaggtatttgaggttaaatattaattttgatcctctaatt

SEQ ID NO: 3799 - DNA, 201 bp, Glycine max
  Clone ID: LIB3073-024-Q1-K1-G7
gattgaaatactgatcttacattgggcttactcatgtatgaccacgaaaccctctttatcacgatctatctgtgacgagcatgatgggcttacgagcagtgttattgttggctgtacacttgctatcggggatggacttgggcattcaaacagccaagaaccctgtttgctttaaaggtccagtatactgtgacctttgac

SEQ ID NO: 3800 - DNA, 322 bp, Glycine max
  Clone ID: LIB3073-024-Q1-K1-G8
acctgtgaagccaccaaatgtctgtgacaactactacagctgtgctgatagtgctacttgttgctgtattttcgagttcggaaatgcttgctttgagtggggttgctgtcctcttgagggtgctacctgctgtgatgaccactacagttgctgccctaacgactatcccatctgcaacacttatgctggaacttgtctcaagagcaagaacaacccattcggagtgaaggcattgaggcgtactccggctaaaccccattggaccttttggcgtaagaacaaggtcagcagtgcttaagcagataaaggaaatgtgaaacgt

SEQ ID NO: 3801 - DNA, 408 bp, Glycine max
  Clone ID: LIB3073-024-Q1-K1-H1
ggaattgggtccaaaagaagatcactgatccccttctttccattatccgaagaggagctgaaccaaaccacttggctttctctgctgctcttggtgttacattgggactatttcctatatgtggtgtcactgtgttcctctgtggaatggctattgcattgcttggatcattttgccatgctccaactgtgatgcttgcaaactttattgctactccaatagagttgagtctggttgtaccctttctacgctttggtgaagttatctctggtggatctcatttccctttaacatctgatgctttaaagaaagttcttactggccaagcttcacgtgaagtcttattaagtggtgcccatgcgttattaaggtggctggttgcatcaccatttattttgggaactctat

SEQ ID NO: 3802 - DNA, 399 bp, Glycine max
  unsure at all n locations
  Clone ID: LIB3073-024-Q1-K1-H10
taaaacagttaaccaacaagctttcttttatgctagtgaacgcgaagtccatcacaacgacatatttatattcggcatagataacaccgtactctctaatatcccatactatgaaaaacatggatatggggtggaggaatttaatgaaaccttatatgatgaatgggttaacaagggcgacgcaccggcattgccagagactcttaaaaattacaacaagctgttgtctcttggcttcaagattgtattcttgtcaggaagatatcttgacaaaatggccgtaacagaagcaaacctaaagaaggctggcttncacacatgggagcagttaattctcaaggatccacatcttatcactccaaatgcactttcatacaaatcagcaatgagagagaatct

SEQ ID NO: 3803 - DNA, 299 bp, Glycine max
  Clone ID: LIB3073-024-Q1-K1-H11
gtttacggcgtgtgataaaaagatactatatagaactaaaggagattcccggttcaggtacattcaattcaacgattgaccaaaagagaattcaaaaaataacatttagatcacccaaattccaatatttctatgaaaccataattaaatctaaccaatttatttccaatgaatggattcatatggggtgattattaaagggggaagagagcttaaaaaaaccaggttaccaattaaggattaatgccggggggcaaaacgggtgtgtataatcggatcactattagacaactctttct

SEQ ID NO: 3804 - DNA, 326 bp, Glycine max
  Clone ID: LIB3073-024-Q1-K1-H2
gaccagaaaatgcaatgatttgtaaggaatgaagcagtaagcttttgtgaagggtggaaatggagtctcaaaaatctcaaaatcatgctaaaaaggcaaacaagtacattattatggaagttaccaagcgcaacatagcaccatgtagcaaaaactgcctaccgccagcatcaaatccttacaacagaggatgctccaggatatgcaaatgcagaaaatgaagtcttcagttcgttcaatgggaagaataaggaaatcatatacctatttttcatcttttatatttatgcagtcgtctatgatgaattgatgagtgttttcctggc

SEQ ID NO: 3805 - DNA, 380 bp, Glycine max
  Clone ID: LIB3073-024-Q1-K1-H3
gaggtgcagagtactacagaattattaatggcctgaatttcgaagacaaacttcatccaggtggtccatttgacccattggggcttgcaaatgatccagaccaagctgcactgctaaaggtgaaggaaattaaaaatggaagacttgctatgtttgccatgcttggtttctacttccaagcttatgtcactggagaaggtcctgttgagaaccttgcaaaacatctcagtgacccttttggcaacaacttgctcactgtcatttctggatctgctgagagagctccaactctctaaatcattcatcttcatgtttttctccaatcttacttaatgtacaatacatatcactgagatattaaaggcatttggcttggtccc

SEQ ID NO: 3806 - DNA, 412 bp, Glycine max
  Clone ID: LIB3073-024-Q1-K1-H5
gaattcaagttcgcaccaaatcttcctcccaaaatgtcaggccgtggaaaaggtgggaagggtttgggaaagggaggagctaagaggcacagaaaggttctttgtgacaacattcaaggaatcacgaaacctgcgattcgtaggttagcgagaagaggtggcgtgaagaggatcagtggtttgatttacgaggaaaccagaggagttctgaagatattcttggagaacgtgattcgcgatgctgtaacctacactgagcacgctaggaggaaaactgttactgctatggatgtcgtttatgctctcaagagacagggaaggaccctctatggctttggaagctaaagaatagaatctttaagtttaatgactgtgttgcaagataaaacattggttcttttgaatttgcgtg

SEQ ID NO: 3807 - DNA, 305 bp, Glycine max
  Clone ID: LIB3073-024-Q1-K1-H6
ccccgcgccgtacggctgaagacgacagaagggggaagcttcaataagtaagtatcaatggcttccgaagaatcccagaacaagccccccagcgagcagtccactaccgaactcatcacgagcgcgaagctggtggcggatgcggcgcagtcggctctgaagagcgacagcgacaaagtggacaaggccaaagtggctgacgctgccggcgatcttctcgacgcggcggggaagtatggaaaacttgatgacaaacaaggcatagggcaatatgttgacaaggctgctgattacctgcataatta

SEQ ID NO: 3808 - DNA, 303 bp, Glycine max
  Clone ID: LIB3073-024-Q1-K1-H7
gaactaaaaaaaagacactgcgtatggatttggtttagggtttagggtaaatccgtggctggtttctggaacttttgcatccgaatctccgtttgttttggcagaagcacaggttctccgcgtcagccatggccgatgacttcgacttcgcggataaagttcctccttcattcgatcgcgtgggaaatgtgatcaaggattctggatccaaagggttcaatccaggattaattgtcctcctggttgttggtgggttgttgttgacattcctcattggaaattatgtgctctacagttatgcac

SEQ ID NO: 3809 - DNA, 398 bp, Glycine max
  Clone ID: LIB3073-024-Q1-K1-G1
ccaaataaatttttcttttcctatgttaaaaaaggaaaaaaaaaaaaaaaaaaaaaaaaaaaaaaaaaaaaaacaaaaaaaaaaaaaaaaaaaaaaaaaaaaaaataaaaaaaaaaaaaaaaaaaaaaaaaaataaaaaaaaaaaaaaaaaaaaaaacccctaaaaaaaaaaaaaaaaaaaaaaaaaaatgccccctttttaaaacatccatttttttaccccattactacacaataatacttttttttataagaccaccaaattatactccttctccattattttaaaaaattataccttaaaaaacccttggcttccccctttttttaccctttttaaaaaatcccttttttccaaatgggctaaataccaaatatccccatccaaacttcctttc

SEQ ID NO: 3810 - DNA, 412 bp, Glycine max
  Clone ID: LIB3073-024-Q1-K1-E12
gatcaaaagcttttagttttctatatcactctcaactttactcctcttcaatcagttgcatattctttgctattccaatggccactgttgaggttgtgtcagccaaggttgccctcccagaggacacaaaagaggcatcattgaaggttgacgaggagaagaacacagaagaagttgttgagactccaacaccagaaactgtagtcactgagcaaaccaaggaggaaagtactgaggccccacgacctgcagcttcagaagacaagccctcggttgaagttcagactaaagaggtggcagaggaagttgtgtctgagaccgtcacacaagagccaacagttgagaaacaagaagctgcttgagggaacaaagaaaatgccgatcctgctgagattaagacaccagaagctgc

SEQ ID NO: 3811 - DNA, 318 bp, Glycine max
  Clone ID: LIB3073-024-Q1-K1-E2
ggtagcgcagagaaagaactagaactagaactagggtttcatctttgccatcagaaacaacaatgatttacgacgttaactctccccttttccgatccttcctcagccagaagggaggctcccccgataagaggaaaacggatgaacagaagccaaaagagcagaaacccaaagccagcgagaacaaacctataatgacagagtgacaacaaatttgctgcattcagttgtagaatgataataggtggtagatattgcatttggttctacaaaattaagatcattttggctgtgttctgaggtatatgtggtggttta

SEQ ID NO: 3812 - DNA, 286 bp, Glycine max
  unsure at all n locations
  Clone ID: LIB3073-024-Q1-K1-E3
tacggctgcgaaaggacaacgaaaggggccccaactggacaggataggctatccatagcagncaaagaaatgaagagtaccttgttcgccctctttctactttgtgccctcacctcttacctaccttcagccaccgctggtgatgtggtcgacactgatggtaatcctgttgaaaatggaggcacatactttgtgttgccaactataatattaaacggcggtggaatagaatatgccacatttggaatgaaacttgccctgtcactgttgcgcaatctcgcgatca

SEQ ID NO: 3813 - DNA, 399 bp, Glycine max
  Clone ID: LIB3073-024-Q1-K1-E5
ggcacaagtgagtttgttgatcgagatagctagaaacagtgtgatgaaaatgaaggtccttgttttcttcgttgctacaattttggtagcatggcaatgccatgcgtacgatatgttccctctccgaatgaacactggctatggtgcccgtactccggaggtgaaatgcgcaagttggaggcttgctgtggaagcacacaacacctttggctttgagaccattcctgaagagtgcgttgaagcaacaaaggaatacatgcatggcgaacaatatagatcagactccaaaacagttaaccaacaagcttacttttatgccagagacctcgaagtccaccccaaggacacatttgtgttcagtatagatggcaccgtactctctaatattccatactacag

SEQ ID NO: 3814 - DNA, 59 bp, Glycine max
  Clone ID: LIB3073-024-Q1-K1-E6
ggtatttggggtttaggaaaaaggtgaagggcgaagacacgttcttctctcaagtgccg

SEQ ID NO: 3815 - DNA, 368 bp, Glycine max
  Clone ID: LIB3073-024-Q1-K1-E7
tgtgttacaactgaatttggtgatcgacatagctagaatcagctttatgaaaatgaaggtccttgttatcttaccttctacaatcttggtataatgtcaatgccatgcttacaacttccttcactctcacaatgaacacttgctatacactccttactctccaggtgaaatgcgcagctcatactcttgctttccaactatactattaaatttggctttgaaaccattattgcacatttcgaaattaaaactaacctgtacatgcatggcaatcaatatatctcatactccaaagcttttcaataaccattttatttctatgccaaatacctcacattccaccccgacgtcacattaacattcagtat

SEQ ID NO: 3816 - DNA, 422 bp, Glycine max
  Clone ID: LIB3073-024-Q1-K1-E8
gaaaaaagaggagaaagaagaaaagcttgatggtgatgctgctttgaataaattgttccgtgatatttaccaaaatgcagatgaggacatgaggagagcaatgagcaagtctttcttggagtcaaatggaacagtgctatcaactgattggaaagaagtgggatcaaagaaggtggaaggcagtcccccagaaggtatggagttgaaaaaatgggagtattgattcggtacttaaatattcatttgagctgatgcttgtgagagttcaagtttgtctcctcccaacctcctgccaaaaaagaaattctgtaatttcttgttattattttgtgttaagagaaattaattagctgggataatgacctaatttgcttttgctgtggaagtggattttattttatttgtatatgttgataatggta

SEQ ID NO: 3817 - DNA, 406 bp, Glycine max
  Clone ID: LIB3073-024-Q1-K1-E9
gactgccgcgaaaacagaacagggactcactctcttcgcagcggcactctcggtggctttcatcttcttggggtgagttgtcaagatgtacacatcgaggaagaaaattcacaaggataaggatgctgagccaactgaatttgaggaatcagttggacaggcattgtttgatctagaaaataccaacaatgagctgaaaagtgatctgaaagatttatacataaactcagctgtccaaattgatgtttctggcaaccgaaaggctgtggttatccatgtcccctacagactaaggaaaggattccggaagattcatgtcaggcttgtgagagaacttgagaaaaagtttagtggaaaagatgtaatcttgattgccaccaggaggatagtaaggccaccaaagaaa

SEQ ID NO: 3818 - DNA, 418 bp, Glycine max
  Clone ID: LIB3073-024-Q1-K1-F1
gagtctagggttacgccgtcgtcgctgtttgtgtgtgtatcaggtgcagctaccaacgatggtgaagggtcgtcaaggagagcgcgtcagactctacgtgaggggtacaatccttggatacaaaaggtccaagtccaaccagtacccaaacacatccctgatccaaattgagggagtgaacaccaaagaagaagtaggatggtatgctggcaagaaaatggcctatatctacaaggctaaggtgaaaaaggatggaagccattaccgctgcatatggggcaaggttacgaggcctcacggcaacagtggtgttgtccgtgcaaaattcaagtcaaacctttcacccagatcgatgggagctcgagtaagagtattcatgtatccaagtaatatatgagattcaggtgataagacgctc

SEQ ID NO: 3819 - DNA, 415 bp, Glycine max
  Clone ID: LIB3073-024-Q1-K1-F10
gaagaccacatttttttgttttgcaactacattgtagcaatcgacaaaacacaacacggagtaatggggaggttgtttgtggtgaatctggaaggaaagatctatagctgcaaacactgccatacccatcttgcgctttacgatgacatctactccaggacattccattgcagacatgggaaagcttatctcttcaataatgttgtgaatgtttctgttggcgaaatggaggacagaccgatgatgactgggttacatacggtggctgacattttctgtgtgggttgtggatcgattgtgggttggaaatatgaaactgcatatgaaaaaaaccagaagtacaaggaaggaaaatcggtgcttgaacggtacaaagtgtcaggtcctgatggaagcaattatttgatcagcaatg

SEQ ID NO: 3820 - DNA, 425 bp, Glycine max
  Clone ID: LIB3073-024-Q1-K1-F2
gagtttagggttacgccgtcgtcgctgtttgtcggtgggttatgtgcagctaccaacgatggtgaagggtcgtcaaggagagcgcgtcagactctacgtgaggcgtacaatccttggatacaaaaggtccaagtccaaccagtacccaaacacatccctgatccaaattgagggagtgaacaccaaagaagaagtaggatggtatgctggcaagaaaatggcctatatctacaaggctaaggtgaaaaaggatggaagccattaccgatgcatatggggcaaggttacgaggcctcacggcaacagtggtgttgtccgtgcaaaactcaagtcaaaccttccacccagatcgatgggagctcgaataagagtattcatgtatccaagtaatatatgagattcaagtgatcagacgctcagaattc

SEQ ID NO: 3821 - DNA, 415 bp, Glycine max
  unsure at all n locations
  Clone ID: LIB3073-024-Q1-K1-F4
ggcacaagtgaattttggtgatcggggatacttagaaacagtggtgatgaaaaggaaggtcctttgttttcttcgntgctacaattttggtagcatggcaatgccatgcgtacgatatgttccctctccgaatgaacactggctatggtgcccgtactccggaggtgaaatgcgcaagttgggaggcttgctgtggaagcacacaacatctttggctttgagaccattcctgaagagtgcgttgaagcaacanaggaatacatccatggcgaacaatatagatcagactccaaaacagttaaccaacaagcttacttttatgccagagacctcgaagtccatcccaaggacacatttgtgttcagtatagatggcaccgtactctctaatattccatactacaaaaaacatggat

SEQ ID NO: 3822 - DNA, 409 bp, Glycine max
  Clone ID: LIB3073-024-Q1-K1-F5
ggcacaagtgagtttgttgatcgagataactagaaacagtgtgatgaaaatgaaggtccttgttttcttcgttgctacaattttggtagcatggcaatgccatgcgtacgatatgttccctctccgaatgaacactggctatggtgcccgtactccggaggtgaaatgcgcaagttggaggcttgctgtggaagcacacaacatctttggctttgagaccattcctgaagagtgcgttgaagcaacaaaggaatacatccatggcgaacaatatagatcagactccaaaacagttaaccaacaagcttacttttatgccagagacctcgaagtccatcccaaggacacatttgtgttcagtatagatggcaccgtactctctaatattccatactacaaaaaacatgga

SEQ ID NO: 3823 - DNA, 325 bp, Glycine max
  Clone ID: LIB3073-024-Q1-K1-F6
ggaccattctataaaatcaaaataattgaaaccgaagattctctctctctctctcatgatccctacgccatggaaccatttccctcataaaattctctcttcctttttgggttctcctcaatccattccaagcttcaatcttttctctcttctgccctctgcacctcccctcacacccttcctcattcgcaagaagtgaagatgtcgaccccggcaaggaaagagactgatgagggattttaaaaagattgcaacaagatcctcctgctggcatcagtgggggctccccaggacattaatataatgcttggaaatgctgttatct

SEQ ID NO: 3824 - DNA, 425 bp, Glycine max
  unsure at all n locations
  Clone ID: LIB3073-024-Q1-K1-F8
gattctgttccgcagaaaaccctagcccaaccggatcctcacgactaggagatggcaaagtcgaagaaccacaccgctcacaaccagtcctacaaggcccataagaatggcatcaaaaagccaaagaggcatcgccacacttccaccaaagggatggatccaaagtttctgaggaaccagaggtacgcgaggaagcataacaagaagagcggtgaaacagccaccgaagaagagtaaagtgccactctcaaatgggcctattaggaattgatttgttatttaagccccatatgntttgtgtcgaatctgtctttagtaggatagtaatttttatgagttaacttattccagagagaatgcagtacttactctaatagcatcgttgttggtttttgttaaggacccttgaaattttatcaatggat

SEQ ID NO: 3825 - DNA, 319 bp, Glycine max
  Clone ID: LIB3073-024-Q1-K1-E11
tggtactctccttcactcttaaacgttgaggtaaactttccacaagttttcctttttctaatatcctacaccaggaaacattattctacacacattatgattcaaacaaaagttttatgtagaacatctctcccaaaattaatatccatgaatactacacacatccattgtaagataacaaccgattctgcactctctggactagcatctataactattctccaattttacacacattacacacctgtactcatcaaatccccaaaactacagcttcgcatgatcattggctacatagactttcactccatactatatt

SEQ ID NO: 3826 - DNA, 386 bp, Glycine max
  unsure at all n locations
  Clone ID: LIB3073-024-Q1-K1-C7
gaaggcatttcattagcagcgttaaagaagagagaagaaaaatgcgaaagttcgatccatggcccgttttcttcaagcgcgagtggaaacgcaactggcccttcctcgttggattcgcagtcaccggagctctaatcaccaaactttcccttggccttaccgaggaagatgctaagaattccaaattcgttaaggcgcacaaaaggtgatttctgaatcgtgacatctgcctggctttgcactttatgttaggtttgtcaagattactttgcttgtcttgattntatggattgtaataacagaagagagatgctctagatagtctctttaagtctgtatcccatgttcttaatttcagtttttgtttggttacctaaatctgtttg

SEQ ID NO: 3827 - DNA, 415 bp, Glycine max
  Clone ID: LIB3073-024-Q1-K1-C8
gagcgccaatgtttttttcagaggagtttcatgttgtaatcaaaagagtttatcttatagtaagaaatcgatgtcttactccattttaaggaacaaaacaagagaacaatagcctgacaaagggtttagccataaaatcgaatccatcattgatttgagatattgataaggtgaatactcatttctcgtcaatgctaggcataatgcgggtatagggacctaaaaaagattatcttttcttcctatcttatggactttaaggtgtatgaagtgtcatttcctatcttagattttaattttagtaggtagataaagagtccatttaacttaagttgatctaagccagaagcagacctacgtcaagataattcttctttgaaacactttggtagtgctcttagattgtaatccaaaa

SEQ ID NO: 3828 - DNA, 386 bp, Glycine max
  Clone ID: LIB3073-024-Q1-K1-C9
gaagtaacttaaggtttcaaacctaggaagttggaagtcatggcagcaacattgatggcagcaacaacaagttctggtactcttaaagcaactcctttccttggccaaggcaagggtgccaatgccaatgctcttagggatgttgtctccatgggaactgggaagtacaccatgggcaatgatttgtggtatggaccagacagagtgaaatacttgggacccttctcagctcagaccccttcatacttgaaaggagaattccctggggattatggatgggacactgctggcttatctgctgacccagaagcatttgccaagaacagggctcttgaagtgatccatgggcgatgggccatgcttggagcactaggatgcatcacccc

SEQ ID NO: 3829 - DNA, 263 bp, Glycine max
  Clone ID: LIB3073-024-Q1-K1-D1
gtctcaagtgagtatgatgatctatataactagacacagtgtgatgaaaatgaaggttcttgttttctgcgatgctacaaatttggtagcatggcattgccatgcgttcgatatgtttactctactaatgaacactggctatcgagcccgtactacgcatgtgaaatgcacacaatggaggctcgctgtggaagctcacaacatgtgtggctttgagaccattactgatgagcgcggtgaagcatcatacgaacacatacatg

SEQ ID NO: 3830 - DNA, 349 bp, Glycine max
  Clone ID: LIB3073-024-Q1-K1-D10
agaagaagaagaaggagcatggccatgagcatggcgcatgacagcagcagcagcagtgacagtgattaaactgctgcatcacctatatatttaaaaggtttatgggaccatagtagcgagggctgtgccttaatttctctctctctctatctctctctctctctctctctttttcctttttccctatcttgtgatctatttatgagtgagaaaaacaaaagtgagaaattgtgcgtgtatctggttgctaattcgagtgctattagtctgaggtttggttggtttgtaaccccgctacttgggttatgtttgattgtatattatcctagagaaatgcagatttaaatta

SEQ ID NO: 3831 - DNA, 410 bp, Glycine max
  Clone ID: LIB3073-024-Q1-K1-D11
gacagctattcctcttaagcttgctactgagtgtccacactgcataccttaggtcttccgaattcgaagttaatttgcgagatggctaaggaaaaggctcagatcaacattgtggtggttggtcatgtggaccctgaggaggcaaccaccattaacgagctgaagaagcctgttgtggagaaagaagctccagggcatgccatatgagggcatgcacgtacggcctcggaggggaaccagaaaattatgttaacaaaataatctggaaccctaatgtatcagtgtcatcatcagtgtgtagtttaagctagctttgctatggttacgttctttgagatgagagtcttgatgaacagtaccatcctgatgtattgctttccttgaaagttaatgcatgcttcttatcttct

SEQ ID NO: 3832 - DNA, 369 bp, Glycine max
  Clone ID: LIB3073-024-Q1-K1-D12
gaccaaaccaaagtaagagtgagcaacttccaacaccatagtgaaatggcttccaaggctgcacttctcttgtgtttcaatgttctcttcttcaccgtggttagctccacatatgtgccatgcaacccaccccccaaaactccaaaacacccacctgtcccaaagccaccttccccaaagcaagcaagttgccccaaagacactattaagtttggtgtgtgtgctgatgtgttaggtttgatcaacgtgcaacttgtgaagccaccaaagaccccatgctgcaacctcattgagggtctcgctgatcttgaagctgcaatgtgcctctgcactgctctcaaagctaatgtgttgggcatcaacctcaat

SEQ ID NO: 3833 - DNA, 420 bp, Glycine max
  Clone ID: LIB3073-024-Q1-K1-D2
catttgaagccatccaacgtgtgcttccaaggtcttagacccctcgcaaggttcaccaaagcctcatcaaccaaagtgagcaccaccaccaaaagggttattccaaagggtggtgttagagctgaactcaactcagcccttgtgataagcctcagcactggcctctccctcttcttgggaaggtttgggttcttcaacttccaaagggagaacgtggcaaagcaagtgcctgagcagaacggcctcacacactttgaagctggtgatacacgtgccaaggagtatgtcagccttctcaaatccaatgaccctgttggattcaacattgttgatgtcttggcttggggctccattggccactgttgtgcttactacatcttggccaccactagcaatggctatgaccctgcattctttggc

SEQ ID NO: 3834 - DNA, 408 bp, Glycine max
  Clone ID: LIB3073-024-Q1-K1-D3
gactcaagcacaacatctctatcgagtaaattagctatgaagcctaccctactattatccctttccttcctgcctctctttgctttcctggctctttcagaagatgttgaacaagttgtggacataagtggcaaccccattttcccaggtggcacatattacattatgccatcaacttggggcgctgccggtggtggattgaaactaggccggacaggaaactcaaactgcccagttactgttttgcaagattactcagaaatcttccgtggcacaccagtcaaattcagcatacctgggataagccctggaatcatctttacaggtactccacttgaaatcgagttcgcagagaaaccttattgtgctgaatcctccaaatgggtggcgtttgtggacaatgaaatc

SEQ ID NO: 3835 - DNA, 420 bp, Glycine max
  Clone ID: LIB3073-024-Q1-K1-D4
gataaaaaaaagaaacatattgagcaatgaatgtgtaaatagggcaaaagtaatggataaggaattaatttctctggatatattagaaaaccgaattcgattgtctaatgatgaaactaaaacaaaatatttaactaaaatatatgatcctttcctgaacggacgctttcgtggacaaatcgaaaatgtttttttaacctcaatccaatatgaaaaaaatgaaaaaaaaaataccattttgataaataaaattcatggtatccttatttctaataatacttataaaaaaaataatagtaattatccagaattagagaaaaaaataaatatatttgatagaaaatctttagtaactacgttttttttttttcaatctaatcagtaaattttcaaaaaaattagtatcaagcttgagttttg

SEQ ID NO: 3836 - DNA, 411 bp, Glycine max
  Clone ID: LIB3073-024-Q1-K1-D5
gaaatctcagtttttcttatacagccactcttgcattctcattgccgtcacacagagagagaagagacaatgaagtttaacccaagggtttcctcaagccgtcgaaagagccgcaaggctcacttcaccgctccgtcgagcgtgcgtcgcgtcctgatgagcgcgcctctctcgaccgatctccggtcgaagtacaacgtgcggtccattccggttcgcaaggacgacgaggtgcaggtggtgaggggaacctacaagggccgcgagggcaaagtggtccaggtctatcgccgcaagtgggtcatccacatcgagcgcatcacccgcgagaaggttaacggctccaccgtcaacgttggcattcacccttccaaggttgtcgtcaccaagcttcgaatggataaggaccgc

SEQ ID NO: 3837 - DNA, 399 bp, Glycine max
  Clone ID: LIB3073-024-Q1-K1-D6
ggttctagtgtatgtgattgttgtgactcgttcttcttcgtcgttatcttcttcttttgttgtttgtgtgtttgttttttctctcacctgaaaatgtcttgctgcggtggtaactgtggttgcggaagcgcctgcaagtgcggcaacggctgcggaggctgcaagatgtacccagacttgagctacaccgagtcaaccaccaccgagaccttggtcatgggagcggcaccagttaaggctcaattcgagagtgctgaaatgggtgttcccgctgagaacgatggctgcagatgtggagctaactgcacctgcaacccctgcacttgcaagtgaggtgttggagagctaaagcttcaagcagagatggcccttagaaataatgataaaaactatatgtag

SEQ ID NO: 3838 - DNA, 411 bp, Glycine max
  Clone ID: LIB3073-024-Q1-K1-D8
agatatatatataatagaacgtaaaaaaaaaggggaataataaatagaaaaaggagcatgttgattatatagaaagtaaagggcaacaatcatttttgtttaccatgggtaaggacaccatcgctgacataataacctatataagaaatgctgacataaataaaaaaggaatggttcaaataccatttactaacataacagaaaacattgtaaaaatacttttacgcgagggttttgttgaaaacgtcagaaaacatagagaaaacgacaaatattttttagttttaactctacggtatagaagaaatagaaaaggatcatataaaagttttttaaatttaaaacggatcagtacacccggtctacgaatatattctaattatcaacgaatccctcgaatttaaggggcat

SEQ ID NO: 3839 - DNA, 411 bp, Glycine max
  unsure at all n locations
  Clone ID: LIB3073-024-Q1-K1-E1
gctttagaatgggttcaccgtgagatggaggtataccccatttggctctgcccacacaaattgttcaagctgcctgtcaaaactatgatttacccagggccagggttcgaactacatcgcaggcaaggagacacccaaactgctcaaatgtacacagatgttggagtttactatgcaccaggtcctgtttttaggggtgaggtatttgatggggcagaagcagtgcgtaaaatggagaactggttgattgaaaatcatggttttcagccacagtatgctgtgtctgagctgtctgagaaaaacttctggaggatgtttgatgctggtttgtatgagcatactangaagaagtatggagcttgtgggacctttatgagtgtatactacaaatcaaagaagggcangaaaact

SEQ ID NO: 3840 - DNA, 377 bp, Glycine max
  Clone ID: LIB3073-024-Q1-K1-C6
aggcaacatgctaatatgttgtcacaaacttatgtggatcctttgcaggcatctcagactccggttgatgagatgatgagacacgcatatgttgatcctaatgatccgacaaaaatatttctgcaacaacccacttctgattctcagcttaggcgtcgaacatatcagccacagacagatggaggccatgtctaagtctgaaattacactctcctcacgttcatcgtatgatgtttatatgggaattgtgtattaatacatcaaaataaacaaaaatcttatgagagactgagtatgggtttggatctatgttgatagaatttattttagatcaatgtgattatatagaattgattctgaagtaatgtatttctttt

SEQ ID NO: 3841 - DNA, 400 bp, Glycine max
  unsure at all n locations
  Clone ID: LIB3073-024-Q1-K1-B10
gactcaccaagtgaaccaatgtagcccaagccctatacaaccaaaccctaacacgcacccatttgattcagtttccatggctagcctcaaggttgcatttttggctgcagtgctctgcatggttgtggtgagtgcacccatggcacatgcagctatcacgtgcgggcaggtgacgagtagcctggccaattgcatcggttacctccagaagggaggaacgccgtcgtcgggatgctgcaacggagtgaagagcctcaatgccgncgccaagaccaccgtcgaccgccagacggcgtgcaactgcctcaagtcggccgccagccaaatctccggcttcaacgccaacaacgccgnctcgctccccggcaaatgcggagtctccatcccctacaagatcagc

SEQ ID NO: 3842 - DNA, 399 bp, Glycine max
  unsure at all n locations
  Clone ID: LIB3073-024-Q1-K1-B11
ggagaattgataaacaaatcgttagggttttttggttgtgcgagtgagagtgagagagaacaatggaagacataacagagggagtgaacaacatcaacatctctgattcgtataagaaaaatcgcattcaggtctctaacaccaagaagcccctcttcttctacgttaatctggccaagagatatatgcaacagcatgatgaggtcgagctctcagctctaggaatggctattgccacagtagtaactgttgctgaaattttgaaaaacaacagacttgctgttgaanagaanatcaggacatcaactgttgacataaaggatgactctagaggtcgacctgttcaaaaggccaagattgaaatagtactagggaagacagcanacttcgatgagttga

SEQ ID NO: 3843 - DNA, 420 bp, Glycine max
  Clone ID: LIB3073-024-Q1-K1-B2
gaacactttcacactctttctctctctctctctctctctcagaattttctcctctctccgattccttttattaattggagttttctcgctcctttttctttccctgaaaacatttcatcttcgtattgatgtcggaaaagggtcggccacttcccaaatttggtgaatgggatgtcaatgatccagcctcagctgaggggctcacagtgatttttaataaggccagggatgagaaaaagacaggtggcaacccagagtcaccaggaaagactgctactgatcctcatagcaaacctgcagtagagcctggcaaaactcagactaaaaaatggttttgctgcatgcaaaacccttctgccgaatcatagcatagcaatggttgcgcctgtgaaaagcctgaacagaagaacaatgtttatg

SEQ ID NO: 3844 - DNA, 440 bp, Glycine max
  Clone ID: LIB3073-024-Q1-K1-B3
gaagacgacagaaggggaagtggagcttccatttcatagccggcggtgaagatagatagttagcagacttggctgaccctgagcaggaggaataagaataagatgcctccttatgattgtatgtttctgtttaagccccatataaggaaggaagctgtcatggatttagttgtgggggtgggaaagcatgtgtgcagaagaaatggggttgtcactgatatcaagagtctcggaaaagttcagttgggctatggtgtgaaaaagctagatggcagatattatcagggcctactgatgcaaatgagcatgatggctacacctgaaatcaacaaagagttgcattacctaaacaaggaagaccggttactgcgttggcttttggttaagcagcgtaatacaaaatttgggcttgactcctatggtgatgaaggtagatatga

SEQ ID NO: 3845 - DNA, 420 bp, Glycine max
  Clone ID: LIB3073-024-Q1-K1-B4
gatagaagaagcagaaagagaagcattagcaaaagcaagaagaactagtctaagcagaaatggcctcttcagtgatggcatctgtggccctcaaacctgcccctttcactgttgagaagtcctcagttagaggccttccctccctctcaaggaactcctcttcattcagagttgtggccagtggtggcaagaagatcaagacagacaagccttatggaattaatggtggcatggctttgagggaaggagttgatgcatctggcaggaaaggaaagggaaagggcgtttaccagtttgtagacaaatacggtgctaatgtcgatggttacagtcctatctacgacaccaaggactggtctccaaccggtgatgtctacgctggcggtacgactggcttggctatctgggctgtgactctac

SEQ ID NO: 3846 - DNA, 381 bp, Glycine max
  Clone ID: LIB3073-024-Q1-K1-B6
gagaagcttcaataagtaagtatcaatggcttccgaagaatcccagaacaagccccccagcgagcagtccactaccgaactcatcacgagcgcgaagccggtggcggaggcggcgcagtcggctctgaagagcgacagcgacaaagtggacaaggccaaggtggctgacgctgccggcgatcttctcgacgcggcggggaagtatggaaaacttgatgacaaacaaggcatagggcaatatgttgacaaggctgctgattatctgcataattaccagggtgataataccactgctccttcacagcctgcagagtctaaaggtgaagaaagtggtggtgggttagggggtcttgcaaacttggctggaagcttcttcaaaaa

SEQ ID NO: 3847 - DNA, 399 bp, Glycine max
  unsure at all n locations
  Clone ID: LIB3073-024-Q1-K1-B7
gacaccaacaccaaaacaaacccactaagatggcttcctttgtatccttcctagtgctgcttcttgcagcccttatcctcatgcctcaagggcttgctacttactacaaaccaattaagaagccaccagtgtacaagcctncagtgtacaagccaccagtgtacaaaccaccggtttataagccaaaaccaccggtttacaagccgaaaccaccggtttacaagccaccatataagaagccaccatacaagaaaccaccttatggaaagtaccctccagtagaggacaacacccatgcctaaagcaagcaatgaggtctattatctacttaataaataagaggaactgctttgtgttttctagcattgtgatttacaacttcgtagcaatgcatattct

SEQ ID NO: 3848 - DNA, 324 bp, Glycine max
  Clone ID: LIB3073-024-Q1-K1-B8
gacagaagggggtgagacgagggtaaggtcgcgttgtgttgcgtcgtgtcgtgcgctgttcctctgtctgtcgtttttgttttcagaccaaaccctagctccgcatcgcaaccatgtcgaccaagcaaggtggaaaagctaagcctttgaagaaacccaagtctgataagaaggattacgacgaggttgacatggctaacattcagaagaaaaaggaagaggagaaggcgctaaaggagttgaaagccaaggcgcaacagaagggaagctttggaggttctgggctcaagaaaagtggaaagaaataagggctctttatcatga

SEQ ID NO: 3849 - DNA, 393 bp, Glycine max
  Clone ID: LIB3073-024-Q1-K1-C1
gacctcaagcataacttgcatagactattgattaagaaagctattgtcattgatttgctagctccaacaatgggttctagcagattatcattcattttagtacttgtgcttgtaaccttttcatccatgatcattgactcaagggttgcagaggcacgtaccctgccaaaatcagccttattgccttccaaagttgatatacctactgttgttcctcttccactggtggcaccactgccaaatttgcctgttactctccctccagtgcctgaactacctgcagtacctaaagtaccaattcctgaagtaatagttaataacgccaaaataatcccttgagtacctatgatctatccagtcactactacttattttgtcacttgctaaattaac

SEQ ID NO: 3850 - DNA, 413 bp, Glycine max
  Clone ID: LIB3073-024-Q1-K1-C11
agaagaaaaagagagagagagagatacaaaatggaaagtgaaaattagaaaaactcttgtacttggtttcatgccagattagggaactcttttagttgtcaattagatcacagagacatggtggttgctatggaactggaagatgatcttttttttgctgatttgagcaaggaaattgctctactaattatggatgaagatgaagatcctcttgcttcttgtcctcctgactctcttcaggctttttctggggcaattcatcctcctacacagtttgctttcatctatgagcatgctttgagaagagaaagcaaagggacaggtgtgtttatccctcaagcaacacagccaagaaggaagcagatgaaaggaagggctaataataattcatatgcaaaacatcaaaagcagtc

SEQ ID NO: 3851 - DNA, 379 bp, Glycine max
  Clone ID: LIB3073-024-Q1-K1-C12
gaaggaaggaaggaaggaagagtgagcgtgaaagatgccttcggcgaggctttcagggtcaccaaggctcgacgttgctattgacatgggcaatccatttctcaatctcactgttgatggtttccttaagatcggagctgtcgcagccacgcgatcagctgctgaagatacttatcatattatccgaaacggcctttgttgtaattcaacatgtctgttccagggaatatttcaagtcatgatttcgagaaaacgttgaagaagatgtgtaaagaaggtgtatattggggaactttagctggtgtttatcttggaatggaatatggggtagaaaggatccgtggcaccagaaattggaagaatgccatgattgggggtg

SEQ ID NO: 3852 - DNA, 410 bp, Glycine max
  Clone ID: LIB3073-024-Q1-K1-C3
aatctgaggagaaagtgactggtctggaatcgagtattggtcaattgcgcaaggaagcaaaggaagctgagagggtgatcatatcgctgaatgagaaggcggtggagaccgttgagtcaatcgatagaggtttaaatggtgtacacagtgaagggaagggattgaagttgcagtggccagtggtggcagcagggtctacaggagctgttgttgcagctgctgctgtaatctacgtgtgctatgggaaacggaggtgattttctgtctcaccggagagtgatgaaggagtgaggggaatttgaactggaggaagttctagaggttagacataccaggtctttagtagtcatagatatgctgctgcaattttgttagtcacaaaataatgctccttggctggcttttgtttt

SEQ ID NO: 3853 - DNA, 394 bp, Glycine max
  unsure at all n locations
  Clone ID: LIB3073-024-Q1-K1-C4
gtgattcattagatagagaagtcgtgaaaagttgtccgcgagaaagaaggacgcgactcctctctagcctagcaccctttccctcaaacctgagaacaggcatctcagaaggaaagtttttgaactttcgggcgatgtccttactaaaggaccggataagcagctagatcgattcctaacagattggaaaatctttctttgcttaaaacacaggagagctaactcgatgatcgaccaagccattcaatggcatcggtttttcctaagcctcaaagactggcacctncttcagattctagaaaagaaagtagaagaccaggattaacaaaccagacctaacctagttccccttcttttacctcaagcctaaggagaagatcggtacatcgattca

SEQ ID NO: 3854 - DNA, 415 bp, Glycine max
  Clone ID: LIB3073-024-Q1-K1-B1
gcagctgaacagtcactgaaaggatacgaggctgcttcagccactgcaaacacagatcttccatcaacacatccaatccgtcttggacttgcactcaatttctctgtcttttattatgagataatgaactctcctgaaagggcctgccatttggctaagcaagcttttgatgaggcaattgcggagttggacaccctgagtgaagagtcatacaaggacagcactttgatcatgcagctgttgagagacaacctgactctctggacctctgatttgcctgaggatggaagtgaggacagcataaaagctgaagaaaccaaaccttctgagcctgagcattgatgtgattcaatagtcagaaatctaaggtactctcaaagaggacattttctagcaatggatttggaccccgaca

SEQ ID NO: 3855 - DNA, 293 bp, Glycine max
  Clone ID: LIB3073-023-Q1-K1-H11
ggcattggggcatgcttttaatttccgggatctgccaaacaaattgtagcataagtcccatggccaaagagactagtgttgtttatctatatcccagcaaatcacaagtttggggtgagaattttgatcataaaaaacttgtaataacaacactagctgctaatggaaagaaagaagagagtaatggagcacctaatgacacatatcctgcgtttcccgggtggtatgctgatggttcctggccaggaaaagcacacacatattaaatagaaaagattctattccacgggaaa

SEQ ID NO: 3856 - DNA, 394 bp, Glycine max
  Clone ID: LIB3073-023-Q1-K1-H12
attcccggggtcgactccaacgcgtctcgtacgtgcttgtcgagaagaacgacacgaaggggtacctgtgctgtcgagaagactgacacgaagggagtacgcgtgtcgagaaagacgacacgaaaggggggtgcacacagtgaagttttgttgatacgagagtaactatgaaacacgtgttgatgaaaaatgtaaggtcccttggtgtttcttcgttggctacacatattttggtagcattgtgcaattgccatactgtaccgaatatgtgtccctcttccgtaatgaactactggctttatgtgtgcccgtacttccggaaggtgaaattgcgcacagttgtgaggctttgctgttggaagcaccacccatcatctttggctttttgagacca

SEQ ID NO: 3857 - DNA, 274 bp, Glycine max
  unsure at all n locations
  Clone ID: LIB3073-023-Q1-K1-H3
gaaaaaaaaaaaaggaaaggaacttgagccacattctgtccctggtggactcaagaagagtctttcataggacagttaaaattatagcttgcaaaaagggttcactagcaaacattgcaatggcctcaacctcttctgctctcactatatcctcttcttccacccttcttgatggcaaggctccaagacagtcaccagctgcttcccctcaatgtgtgagcctnccccctcccnctttgcactctcagaaccgttcatggaagaccactgctta

SEQ ID NO: 3858 - DNA, 253 bp, Glycine max
  unsure at all n locations
  Clone ID: LIB3073-023-Q1-K1-H4
ggtgtgattgtttgttgttgtaactcgttcttcttcttttgttgttctgtgtttgtgtttgttttttctctcacctgaaaatgtcttgctgctgtggtaactgtggttgcggaagctcctgcaagtgcggcaacggctgcngaggctgcaagatgtacccagacttgagctacactgagtcaaccaccaccgagaccttggtcatgggagtggcacctgttaaagctcaatttgaaggtgctgaaatgggtgt

SEQ ID NO: 3859 - DNA, 342 bp, Glycine max
  Clone ID: LIB3073-023-Q1-K1-H5
gtcttcccgttcctatcaaagtgagcacaaggactcaaatttagataagagaacaggtggaggtgtcattgataaaagtgaagatgctagtactagatggagatgattacaagctgataatttaatagaactacgtgcttagtttttggtctctatcagttttccaattcttgtgtctaagttaatttttaaaaatgaaagtagtttcttttttgtttttttattatatattattccactacgtgcttttttgttctttattatatagttttccactgtagtttcttaactatctatagtttcttttctgattcgttattataaaataaaaatatttatggc

SEQ ID NO: 3860 - DNA, 425 bp, Glycine max
  unsure at all n locations
  Clone ID: LIB3073-023-Q1-K1-H7
gatgatatctctgctggtgaaaatggattaattagattttggttggaggaaaatacccacccaaccatggcagcaaccattcctttctctctgcttaggaactgcgcgccattgaaactagcaacacctttcgctcgcaaagcctccaactttaatcttcttctccctcttcaaccacgcaggttggtctctagtacctgtgctgtgaacaatgaagaggctgcagcaaaaacagcagctgttaattttgatagtgaagctccaacaatatttgataagatcataaataaagaaatcccttcgagcattgtatatgaggatgaaaaggttcttgcatttcgtgacattaatccacaggcttccgttcatgtcctagtcattccanaattaagagaatgattaacacaacttgggaaggctgatag

SEQ ID NO: 3861 - DNA, 383 bp, Glycine max
  Clone ID: LIB3073-023-Q1-K1-H8
gcagtgttcccatgtctcctgcccactgaagtcgaacccctaatggcttctcaagttcttcttcaacaggcactgtttgcccccaagctaagtttcccttcttcttctcgtaacgtcgcgttaatttctagggttccttccaccccaatttcatggcgttgcactcctctcattgctaagcctagtttcgctgtgagagctgactccaacgtcgaaggcgctggtgaagccaccgaagatgttccttcgtataatgctgatgaagtttcagaaggcgaacgagaacacgtttctgattctgaaactccaaaatctcccaggaaaccccgagtcaagctcggagacgtcatggtgatactgaatcagagggcaattgaggcatt

SEQ ID NO: 3862 - DNA, 462 bp, Glycine max
  Clone ID: LIB3073-023-Q1-K1-H9
ggtcgaccacgcctgctacggctgcagaagacccacatttggggtattggagcatgcttttaatttccgagatcggccaaacaaatagtagcataagtcccatggcctaagagactacagttgtttatctatatcccagcaaatcacacgttttgggtgagaattttgatcataataaacttgtaataacaacactagctgctaatggaaccgaaggaggagagtaatggagcacctaatgacacatatcctgcttttaccgattggtatgctgatgtttcctggccactagaagcacacacatataaaatagataagattctattccacggtaaatcagaattccaatagcttcttgtatttgagtcttctatacaatgcaaggttgcaattcttgatgggcatatccagctcacagaatactatgaatttgcttaccaagagatgctcactcaccttgca

SEQ ID NO: 3863 - DNA, 301 bp, Glycine max
  Clone ID: LIB3073-024-Q1-K1-A11
gaaggagcaagaaggtgaagcccaagtacaagcagcattatctgctttaaaagatgggcaagtcatgggtattcactctagtggtgaattggaaaagaagttaagtgctgcatcaaagacatcacgcttggcgatcctgtattttactgcaacatggtgtggcccttgtcgcttcatttcccctatttatacaagcttggctgaaaagtacccaaaagtggtttttttgaaagttgacatagatgaggccagggacgttgctgcaggttggaatattagcagtgttccgacatttttcttt

SEQ ID NO: 3864 - DNA, 399 bp, Glycine max
  unsure at all n locations
  Clone ID: LIB3073-024-Q1-K1-A2
gagagagagcaaaacatattattttcattttcatctttttttgagtatcaacaaatggcaaccactgtgatgaccactctcccccaattcagtggtcttagaccccaattctcagctgcccctgtgaagaacttggttgctgtgcaacccatgagtcgcaaggtgaagggtgcattgngagctcgatgtgactacattggttcatccactaatctgattatggtggcttctacaaccctgatgctgtttgctggaaggtttggattggcttcatcagcaaacaggaaagccactgcagggctaaagctggangtgagggactcaggcttgcagactggtgaccctgctggctttacccttgctgacacctttggcctgtggatctgtggccacatcatt

SEQ ID NO: 3865 - DNA, 382 bp, Glycine max
  Clone ID: LIB3073-024-Q1-K1-A3
gatgtgaatggtgtgtgtgttgatgctgctgaggatgagttcttcaggttgactaccaaggaaggaaagttgactgtggagagagatgttgtgaggactaaaaccgcggatttttcgccaattttgcagtttgaacaagactccgttcagatccttgatgcactgctgccactgtatttgaacagccaggttctgagggcattgcaggagtccttggcgagtgaactcgccgccagaatgagtgccatgagcaatgccacagataatgctattgagttgaagaagaacttgtccaatgtgtacaatatggagcgccaggcttagatcactggtgaaattctggaaaatgtggctggtgccaatgccttgcaatagtgcaatt

SEQ ID NO: 3866 - DNA, 377 bp, Glycine max
  Clone ID: LIB3073-024-Q1-K1-A5
ggaagaagaagaagaagaagatggcattgggtgttcctgctcttcccctgacatacgtggctcacgttctggcacttgttgccagcatcttggtcgtgctctgggtcctcaattttaggggtggcttggcttgggattctgataacaaggccctaatcttaaattttattccggtcctatatggcattggcttactagtccctgggggtgaaactattataagctacaaagcattacccctgaagaaggaagtgaagaaattgatacaccttgttttccatgccatcgcattaatacttggaatagttggaatttatactgccttcaagtatcacaatgaaagtgggattgccaatctctacagcttgcattcatgg

SEQ ID NO: 3867 - DNA, 414 bp, Glycine max
  Clone ID: LIB3073-024-Q1-K1-A6
ggtgtctgctcactcgctcttctccgccacttgtgaatctattgaatcaacaatcatgtcggacgaagagcaccatttcgagtccaaggccgacgccggagcctccaaaacctaccctcagcaagccggtaccatccgcaagaacggctacatcgtcatcaaaggccgcccctgcaaggttgtggaagtttcgacttccaaaactggaaagcacggtcacgctaagtgtcactttgttggaattgatattttcactgccaagaaacttgaggatattgtgccctcttctcacaactgcgaagttcctcatgtgaatcgtacttgataccaacttaatggaaatggctgaggatggattttggagcctgctaactgaaaatggtaccactaaggatgacctcaagcttcccactg

SEQ ID NO: 3868 - DNA, 170 bp, Glycine max
  Clone ID: LIB3073-024-Q1-K1-A7
ggcacaagtgagtttgttgatcgagataactagaaacagtgtgatgaaaatgaaggtccttggtttcttcgttgctacaattttggtagcatggcaatgccatgcgtacgatatgttccctcttcgaatgaacgcttgctattgtgcccgtacttcggaagtgaaatgtg

SEQ ID NO: 3869 - DNA, 412 bp, Glycine max
  unsure at all n locations
  Clone ID: LIB3073-023-Q1-K1-H10
agaatagaatatgaaaaagaaaaaaaagattctaaagaaatataactaatattctttagaataatcaaaaagaatattaaattcaaataaattttagatagaaaaaagacttaaaaaggaggatttgaaatgcgagatctaaaaacgtatctttccgtggcaccagtagtaagtactctatggttcggggctttggcgggtctcttgatagagatcaatcgtttttttccagatgcattgatattcccttttttttcattctagttattgacacggaaaggggtgaagaagattatagatccaattaagtattaaatatatgtaattaatatgtaattaatctcctcttctttatttcgtcttttatttcttcttttttttacaaatggtnatagaataggntaccananaa

SEQ ID NO: 3870 - DNA, 197 bp, Glycine max
  Clone ID: LIB3073-024-Q1-K1-A8
cacgcactttgaggttctggctaaggttgatggggataaagttgtgccagagaaagttatgccggtgaaacctgttattgcggtggatagtgtggcggagaatttgctcactcggaatgcgtccatgtccaagacacaagttcatcctccacccgaccccttttacttgtaatttgtggaaaggaaaagggattatt

SEQ ID NO: 3871 - DNA, 158 bp, Glycine max
  Clone ID: LIB3073-024-Q1-K1-A9
tcttagcgaaagaaatgtccttggtttcaaacgtgttctgttgttgaacttctaatgccgcgtctcaagccatgggaattggaaggagaagcgattgtggattgaccataatgtcttcctctaggccgcataagaaagccactgcgcatcacattaat

SEQ ID NO: 3872 - DNA, 450 bp, Glycine max
  Clone ID: LIB3073-023-Q1-K1-F7
gaaagaaaagagaaatggcaacagaaacaaaagtgcaagaattaggtggcatcaccgatgtgcatggagctgccaacagcgtcgagatcaacaatctcgcccgctttgctgtagaggaacaaaacaaaagagagaattcagttctggagtttgtgagggtgattagtgcaaagcagcaagtggttgctggagtgaattactacataacattggaagcaaaagatggtttgattaaaaatgagtatgaagcgaaggtttgggtgagggaatggttgaactccaaagagttgctagaattcaagccagtcaatgtttctagcacaccaataggtggcattaccgatgtgactgcgaatagcctcgagatcgacattctcgctcgttttgctgttgatcaacacaacaaaaaagagaatgcatatctggagtttgtgggggtgattaaggcaa

SEQ ID NO: 3873 - DNA, 252 bp, Glycine max
  Clone ID: LIB3073-023-Q1-K1-F8
gggtgtagcgcagagaaagaactagaactagggtttcatctttgccatcagtaaacgacaatgatttacgacgttaactctcctcttttcccgaatccttcctcagccaaaagggaggctcctctgataagaggaaatcggacgaacagaagccaaaagagcagaaacccaaagccagcgagaacaaacctataatgactgagtgataacagctaagctgcattcagttgtagaatgaaaataggtggtagg

SEQ ID NO: 3874 - DNA, 428 bp, Glycine max
  Clone ID: LIB3073-023-Q1-K1-F9
tttggggttcaccaacaccaaaacaaacccagtaagagggcttcctttgtatccttcctagtgctgcttcttgcagcccttatcctcatgcctcaagggcttgctacttactacaaaccaattaagaagccaccagtgtacaagcctccagtgtacaagccaccagtgtacaaaccaccggtttataagccaaaaccaccggtttacaagccgaaaccaccggtttacaagccaccatataagaagccaccatacaagaaaccgccttatggaaagtaccctccagtagaggacaacacccatgcctaaagcaagcaatgaggtctattatctacttaataaataagaggaactgctttgtgttttctagcattgtgatttacaacttcgtagcaatgcatattcttgactcttgcatgcacttcaat

SEQ ID NO: 3875 - DNA, 272 bp, Glycine max
  unsure at all n locations
  Clone ID: LIB3073-023-Q1-K1-G1
ggtgcaattgtgtgaggaaatatctctcacgagtttgtataaggagagaagcggacatgaagaagcaattagcatcaaggcgtttgctgatgtgggttatggtacatttgagcatttcaggagtgttgtccaagtccaaccacaccacaactacaacttctctgctgtgcgatggctccgtagaggactgcctcaacgttcaccacttggactcacagncttccaccatctncagcacccactttcccagaatcctcgctggagaaaaatgc

SEQ ID NO: 3876 - DNA, 395 bp, Glycine max
  Clone ID: LIB3073-023-Q1-K1-G10
gatagcgtttttcattgtgcattattcaatgggcaccacagcagctctatccggaaccatggtgagcacctccttcatgaggaagcaacctatgacgaccaagagcctaaagacattccccaacgctctttttggtctgaaaggtggacgaggtggtcgtgtaacttgcatggcctcgtacaaggtgaagctcataaccccagaaggagaagtggagtttgaatgcccagatgatgttttcattgttgacaaggctgaggaagaaggcattgaacttccctactcgtgcagggctggttcttgcgtttcatgtgttgggaaaattgtgaaaggtgacgtggaccagtcagatggtagcttccttgatgatgaacaaatagaaagtggatgggttc

SEQ ID NO: 3877 - DNA, 389 bp, Glycine max
  Clone ID: LIB3073-023-Q1-K1-G11
ggtttgattgtttgttgttgtaactcgttcttgttctttggttgttctgtgtttgtgtttgttttttctctcacctgaaaatgtcttgctgcggtggtaactgtggttgccgaagctcctgcaagtgcggcaacggctgcggaggctgcaagatgtacccagacttgagctacactgagtcaaccaccaccgagaccttggtcatgggagtggcacctgttaaggctcaatttgagggtgctgaaatgggtgtgcccgctgagaactatggctgctaatgtggaccatactgctcctgcaacccctgcacttgcaagtgaagcgttgggagagcaagcttcaagcatacatagcccttaattaggaataatgatcaactattaatgtgt

SEQ ID NO: 3878 - DNA, 421 bp, Glycine max
  Clone ID: LIB3073-023-Q1-K1-G12
gaaagcaaatacagaaaaaaagagtgaagcggggagcaatggcgacatcgctggtgcgatcgggttttcttcgaagcgccctaagaggaagcgctcgtggctcccaggttccgaagcgaaactttgcttcctctggtcatcacgatgatgcatatgagacggccaaatgggagaagattacatatctaggcattgttagttgcactggtttagccgtttataatctatcaaagggccacccacacttcaaagaaccttctgcttacccatatttgcatatccgcaataaggaattcccctggggtcccgatggactatttgaaacgaagcaccatgaagagcattagtggtttaatgaaggtatttgtggcactggtgggcattcggtttgtcaatgttcaacgaatagtgattatgatga

SEQ ID NO: 3879 - DNA, 351 bp, Glycine max
  Clone ID: LIB3073-023-Q1-K1-G2
gacaactgaacaagataagctatccatagcagccaaagaaatgaagagtaccttgttcgccctctttctactttgtgccctcacctcttacctaccttcagccaccgctggtgatgtggtcgacactgatggtaatcctgttgaaaatggaggcacatactttgtgttgccaactataatattaaacggcggtggaatagaatatgccacatttggaaatgaaacttgccctgtcactgttgcgcaatctcgcgatcagttctgcaagggctttccgataaccatttcatccccagcccgaatccgtcacatcagcgaaggccttagtttgaacattgggttcactttcgc

SEQ ID NO: 3880 - DNA, 355 bp, Glycine max
  unsure at all n locations
  Clone ID: LIB3073-023-Q1-K1-G4
ggataaattgaagtatagattgaacacacacatagaaacccaacaacaagaatgaagaaggtgattctaaccctcttcttcaatatcattttatctctcctctccctctcccacgcctccgtggtggatttctgcgtagcagactacacaggccccaatggccccgcagggtactcatgcaagagcccagcaaaggtcacggtggacgacttcgtctactccggccttggcaccgncggcaacacctcaaacatcatcaaagccgcggtgacgccggcgttcgacgcgcaattccccggcgtcaacgggcttggaatctccattgcacgcctagacctagcagcccgtggagtca

SEQ ID NO: 3881 - DNA, 435 bp, Glycine max
  Clone ID: LIB3073-023-Q1-K1-G5
gattcagattacattgcaaaaatggcatcattcaccatgacagcttccatccttggcagcccagccgtcaccaaccggtcggcagtagcaacgcagaggagatcactcgtagtgaatgctgccaaagctgttgaagcagaaaaggtcagttatgacaatgacatggatggtagcaatggaaggaggaacttgatgttcgccgcggcggcggctgctgtttgctctgttgctgggatggcagtggcagatgagcctaaaccaggaaccccagaagccaagaaaaagtatgctccgatttgtgtcaccatgccaactgctaagatttgtcgcaattgagggactttggtttttattttacttctgatgattggaaatgtacaatggggttgttggaatgctttgatgatttcatttgatcctcactgtacaagatgt

SEQ ID NO: 3882 - DNA, 437 bp, Glycine max
  Clone ID: LIB3073-023-Q1-K1-G7
acaactacaataatccaccagtgtacattaccgaaaatggcgttgcggaatcaaagaatgactcacttgcaatcaatgaagcccgaaaggatggtattcgaattagataccatgatggccatctcaaatccctgcttcatgcgatcaaagatagagttaatgtgaagggctactatatatggtcattttcagatagctttgaacgggatgctggttacacagctcgatttggcatcatatatgtggattacaagaacaatttgagtagataccctaagtcctctgcgttttggctgaaaaaattccttctcaagtgatctaagtctattgttcctttggcatgcatgcccagtttttcttcttgtttgtttcctggatatcacagacatgcagtgtgtatcacttgctcttcgattcggatcaatgtaatcaagtca

SEQ ID NO: 3883 - DNA, 374 bp, Glycine max
  Clone ID: LIB3073-023-Q1-K1-G8
gattggacacattcttcagcgactgcgtttttggatcggaacctcttctgcggcgtagcaatgggacactccaacgtttggaactctcacccaaaaaactacggtcctggttctcgcacttgccgtgtgtgtgggaatccacatggactgatcaggaagtatggccttatgtgctgcaggcagtgcttccgtagcaatgccaaggaaattggcttcatcaagtatcgctaaaagagcagttgtcaactacggaccaatattgtgttctggcactaggatgttttgaggatgttatgtttgaagaaacttgagactttcttttttcatctaattaattatcagacgtaatttgtggtactaagaatacttttata

SEQ ID NO: 3884 - DNA, 443 bp, Glycine max
  Clone ID: LIB3073-023-Q1-K1-G9
gcttccacgcgtacacccacgcatttttacggtttctaaaagacgacctaatgtgagagcctggtaataatctaatctatactatacccacatttttataattatttttctactttataaaccattgctactcgaggaaagcttgaagattaccttgatctcaactctaacgcagacaagtactggcaaacccttatgaactccactgaaatatttcccaaggcctttcccaatgattaccaaagcattgaagttcttgaaggtgatggcaaatcacctggttctatccgccacataagctatggtgaatgttcaccacttgtgaagtcatcctttgagaagatcgaggctgttgatgaagaaaagaaggtagtgtcgtacactatcattgatggagaactcctccagcactacaaaacattcaaaggagacatttctgtgac

SEQ ID NO: 3885 - DNA, 299 bp, Glycine max
  unsure at all n locations
  Clone ID: LIB3073-023-Q1-K1-H1
gggtcttggtgtgaaccatagccatggctacttcatcaaccacattattgctatcatcactcatacctgcaagcatcccatcattcaactctggaaaccattcagtttttttgcttcaaaaccgttctttgaatcgacccaagaagagagtttccttcgttgttcaagcagccaagccccctattggtgtggaaattccaaaggtgcagcctcaatttaagcctccgtttcttgggttcactaagactgcagaagtatggaactctagagctngcatgattgggatcaatggaagtttt

SEQ ID NO: 3886 - DNA, 371 bp, Glycine max
  Clone ID: LIB3073-023-Q1-K1-F6
gactgctgcgaaaacagaacagggactcactctcttcgcagcggcactctcggtggctttcatcttcttggggtgagttgtcaagatgtacacatcgaggaagaaaattcacaaggataaggatgctgagccaactgaatttgaggaatcagttggacaggcattgtttgatctagaaaataccaacaatgagctgaaaagtgatctgaaagatttatacataaactcagctgtccaaattgatgtttctggcaaccgaaaggctgtggttatccatgtcccctacagactaaggaaaggattccggaagattcatgtcaggcttgtgagagaacttgagaaaaagtttagtggaaaagatgtaatcttga

SEQ ID NO: 3887 - DNA, 348 bp, Glycine max
  Clone ID: LIB3073-023-Q1-K1-E1
gatagcagcatcatacaaagcattgaattcaaaaactaagttcatttcttgtgctttgctttattcctcaaaaccaaacatgtcgaacacatgcggcaactgtgactgcgctgacaagactaactgcaccaagggaaacagctatggtgttatagtagagactgagaagagctacatcgagactgttgacatggatgttccaacagctgagcatgatgggaagtgcaagtgtggcactaactgcacttgcacggactgcacttgtggccattaaggaatatgtatgaaaatgtaattgccatgtgtttggcaatacaaatcttcaaataatggtatcttcgtattgat

SEQ ID NO: 3888 - DNA, 211 bp, Glycine max
  Clone ID: LIB3073-023-Q1-K1-E11
gatcgcattttcactcgtctttggttctggtgggtagaggtgctgtgaagtcggtgtataacactcaacctaagatgcacaacgaggaaagacagatcaccgagctttacattcctaacaagtgctctgccacaaaccgattgattaccgataatgaccatgctccgggtcaagttaacattgggcttatccatgacaatggcttttacaa

SEQ ID NO: 3889 - DNA, 306 bp, Glycine max
  Clone ID: LIB3073-023-Q1-K1-E2
gataataagagttttaatattattgtattgtagtagtagccatggggactttcaatcactatatgattgttaagttcaaagatggtgtggcagttgatgatctcattcaagggttggagaagatggtctttgggattgaccatgtcaagtcctttgaatggggaaaggacattgaaagtcatgatatgctaagacaaggtttcactcatgctttcttgatgacattcaatgggaaagaggagttcaacgcatttcagactcacccaaatcatcttgagttctcgggagtgttttcacctgctattg

SEQ ID NO: 3890 - DNA, 264 bp, Glycine max
  Clone ID: LIB3073-023-Q1-K1-E3
gtttcgaagcagcggaaacaaacatgtcgtggtgttactgcgctaagcctatgactttgcagttgccgttgcaatcaagagcagcatcatcgttccattcccacgttggaggagtaacagcaacattctcaacactgtctcttcgaccctcttctcctcttgttctgacccacaacctccacttccaacccaaactcaaacgcgcttccacaaccattcgctgctcctctgcgttgactcctcaattgaagtctaccttggatc

SEQ ID NO: 3891 - DNA, 357 bp, Glycine max
  Clone ID: LIB3073-023-Q1-K1-E4
gaccacaccgagtcgcagaaaaagaaaaaagcgatcatagtttcacttcggccttatccagtttagggtttcggttctctaccctatctttcacgtatcgaaaccttaaatttacgatcaggtctgagcaatctggttggtagaacctttggtcttagtgagtcaagttttatgtctgaattagacgatcaaattcctactgccttcgatccttttgctgatgcaaatgctgatgactcgggtgctgggtcaaaggagtatgtgcatattcgtgtacagcagcgaaatggtaggaaaagcctgacaaccgttcaaggattgaaaaaaggaattcagctataacaagatacttaaaga

SEQ ID NO: 3892 - DNA, 290 bp, Glycine max
  Clone ID: LIB3073-023-Q1-K1-E5
gatgagagcaaaggatagaggatagagtatagagagcaacataggaagtgaagtgtaggtaagtgagagccatgaagggttatgagccccgttcaagctcttcatgtgcagcttgcaagctattgaagagaagatgcataccaaattgtatttttgcaccttactttaggtctgatgagtgcaagaagtttgcaaaggtgcacaaggtgtttggagccagcaatgtgagcaagattctgattgaagtgccagaagagcagagagaggacacggtgaattctctggcttat

SEQ ID NO: 3893 - DNA, 337 bp, Glycine max
  Clone ID: LIB3073-023-Q1-K1-E6
ctaatgaacagatacaagagtttgtttgtactcgcttcaaggctgagtttcccgtttttgacaaggttgatgtgaatggtgacaaagctgctccactgtacaagtatctaaaatcaagcaaaggtggactctttggggatggtatcaaatggaacttctccaagttccttgttgataaagagggaaatgtggttgatcgctatgcacccacaacttctcctctgagcattgagaaggacttgctgaagttgttggatgcatgaatgaagctatgaatgactggagctgccaataaatgaattgtgattagaatataaattatgaataagaaatgtat

SEQ ID NO: 3894 - DNA, 408 bp, Glycine max
  Clone ID: LIB3073-023-Q1-K1-E9
ggggtagcagtgaggataaaaaatggctatggcgacagctgtcgtgtgtcctcagaacatcaccggagccatcgtgagctcacctagcaagaccaagaagagagtggtacacgtgagaggcataaattcatttgggggactgaaggctagcaatggtgttgtctctttggggattcctatgagcactgagaagtgctttgctaaagttgtgagctcagtgaaagcagctacatcaaatgggaaaggaaaaggaggggctctttcttccacgtgcaacgctgctggtgagatattcacgattgctgctatcatcaatggacttgttcttgtcggggttgctgatggctttgtgctcttgcgagttgaagcatgggtcgaggagtccgaggcagagtgaaaattcaatca

SEQ ID NO: 3895 - DNA, 274 bp, Glycine max
  Clone ID: LIB3073-023-Q1-K1-F1
gagaaagagaaagcaatggcttctctggcaagcttagctgttgttcaaccatctactgtcaagggccttgctggaactaagctctctttcaagccctctcgccagagcttcagacccaagaatttcaggagtggtgccgttgtagcaaagtacggtgacaagagtgtgtactttgatttggaggatctaggcaacactactggtcagtgggacttgtacggctccgatgcaccttcaccctacaaccctcttcagagcaagttcttcgagacat

SEQ ID NO: 3896 - DNA, 180 bp, Glycine max
  Clone ID: LIB3073-023-Q1-K1-F10
gaagagaagaagaaattaaatttaaactctgactaccttcttctccgttttctcggcccccattcattctcactgatatttcctctgtactaaagactaaagaaagacgaaacaatctctgtctctgtgtgcgtgcgtgcgtgttttcctctatctgtctgatagatagaataatatccc

SEQ ID NO: 3897 - DNA, 425 bp, Glycine max
  Clone ID: LIB3073-023-Q1-K1-F11
tgtatggggttccaggcttacccctcttaatacggaaattgtacggcttatacaaatatcgatggcttattcagatgttgagtaccgttgctttgtcggcgggctcgcttgggccactgacgaccaagctctcgagagagccttctctcagtacggcgaaatcgttgaaacgaagattatcaacgatcgtgagactggaagatccacgggttttggatttgtgaccttcgcctcggagcagtccatgaaagacgccatcgaagggatgaacggccaaaaccttgacggccgtaacatcactgttaacgaagctcagtcccgtggtggctatggcggtggcagagaccgtggttatggtggtggtggtgaccgtggttactctcgtggtggtgacggtggtgatgggggctggagaaactagggct

SEQ ID NO: 3898 - DNA, 414 bp, Glycine max
  Clone ID: LIB3073-023-Q1-K1-F2
ttatttgggaattattgctcccatcgccattggtttcattgtcggcgctaacattttgttgggtggggccttctctggagcggccatgaaccccgctgtgacatttgggcctgctgtcgtgagctggacctggaccaaccactggatctactgggccgggcctctcatcggtggtggaatcgctggccttgtttacgaggttgtctttatcagccacacccacgagcagcttcccaccactgactactagagggggggaaatgaaaataaaaaaaaaaaaaattgtgtattattgaatttctctggaatcttcttctgtgtatggttttccttccttgtgttttcttcctaattcactttcgagggttgtacttgttcctttcgtcttaaaaacttggatgggtgatgatcaaa

SEQ ID NO: 3899 - DNA, 356 bp, Glycine max
  Clone ID: LIB3073-023-Q1-K1-F3
ggcacgtgggaatgggatcagttcatcgaactaggccagcatgcaaaagaaaaaactcattccctcctagtagaggaagcatcaagaggaaaatattcatcttcatatgtggaaagataaggcaacgcatccttgcttatatggtcagctcaacttagcaagccattaatctctttgtttaaaaccaaagaatgctatacgtatctgcttcatatatattccagttgccatgttgtatctacatacgtgacagtacatatttaactaactacctcttgtgtgtgtctgatcgtaagagtttctcatggaacatgtaatatttctttactaaataaatgaagctatttcttattttc

SEQ ID NO: 3900 - DNA, 436 bp, Glycine max
  Clone ID: LIB3073-023-Q1-K1-F4
gaccgcattagcactcgtctttggttctggtttatagatctctgtgaagtcgctttataacactcaacctaagatgcagaacgaggaaggacagatcaccgagctttacattcctaggaagtgctctgccacaaaccgattgattaccgctaaggaccatgcttcggttcaggttaacattgggcatgtggatgagaatggcgtctacaatggccatttctccacttttgctctctgcggcttcatccgtgctcagggtgatgctgacagtgccctagatcgcttgtggcagaagaagaaagttgaagttaagcaacagtagacacccatgatagtttgttactttgctatgtattaatttctactctggctagagatatttgagtactatgattggcggcttgagcaaatactcattctaaattttcgtgggatt

SEQ ID NO: 3901 - DNA, 362 bp, Glycine max
  Clone ID: LIB3073-023-Q1-K1-D9
ctgccgggtggacccaaccttctacggctgtataagaccacctttggttccgctgctagagacgacagaacggggatttgtgaattattgctcccatcgccattggtttcattgtcgtcgctaacattttgttgggtggggccttctctggagcggccatgaaccccgctgtgacatttgggcctgctgtcgtgagcttgacctggaccaaccactggatctactgggccgtgcctctcatcggtggtggaatcgctggccttgttcaccaagttgtctttatcaaccacacccaccaacagctttccaacactgactactataaggggggaaattgaaatttaaaaaaattaattatctat

SEQ ID NO: 3902 - DNA, 414 bp, Glycine max
  unsure at all n locations
  Clone ID: LIB3073-023-Q1-K1-F5
ggcacccaagagagagaaagacgctgctagagaagaagaatatggcgggtgctgctcccaaacaattgttcggattcggagttgtggcgatgctcgccactctcattcttgctctctttatgcccgccgctgttcaggctcaatccgcatcccctgcacctgcacctactagcgacgggacctcccttgatcaagggatagcatatgtgttgatgctgctggctctggtactcacatacatcatccattcgccctaaatttcctccaccttctgaacttagagcagaaagggatatgggtgtttgatagggggttggtgtgtctgttatgattaacaagtttcgtacattgtgtagcaagaagtggaaaatgtaatattgctatgatactnttgttacaagagtaagtggtatg

SEQ ID NO: 3903 - DNA, 389 bp, Glycine max
  Clone ID: LIB3073-023-Q1-K1-B9
cgggttgaaccacgcggtcctacggcttgagaaaactacacattgggatatctggcagcagaaaaacaactaggtgagagctaagaataatgaaatggcttcctcaatgatctcctacccagctgataccaccgtcaaccgtgccgttgccggcatggttgctccattcaccggactcaaatccatggctggcttccccactatgaagaccaacaatgacattacctccattgctagcaacagttgaagagtacaatgcatgcaggtgtggccaccaattgtcaagaagaagttcgagactctttcctacttgccagaccttgatgatgcccaattggcaaatgaagtcgaataccttctaaagaaatgatggattccttgcttggaat

SEQ ID NO: 3904 - DNA, 419 bp, Glycine max
  unsure at all n locations
  Clone ID: LIB3073-023-Q1-K1-C1
ggttctagtgtgtgattgtttgttgttgtaactcgttcttcttcttttgttgttctgtgtttgtgtttgttttttctctcacctgaaaatgtcttgctgcggtggtaactgtggttgcggaagctcctgcaagtgcggcaacggctgcggaggctgcaagatgtacccagacttgagctacactgagtcaaccaccaccgagaccttggtcatgggagtggcacctgttaaggctcaatttgagggtgctgaaatgggtgtgcccgctgagaacgatggctgcaaatgtggaccaaactgctcctgcaaccnctgcacttgcaagtgangtgttgggagagcaagcttcaagcagagatagcccttaattaggaataatgataactattaatgtgtagctaaaacttatgaatatggct

SEQ ID NO: 3905 - DNA, 286 bp, Glycine max
  Clone ID: LIB3073-023-Q1-K1-C11
ctccaccatcagcatcacatgatctagacaacccattgcgtcttgggcacctattactcccttctgccaatggccaattcaacaacttcacccacaatcactgttgtcctcatctccagcgttcccaaaccacactgaaagcataggactctgcactccataacaggtcctaaactcacccacaggatctactgctcagaacctttcaacatcactagatccaccagccttcactaaacagttgtatctatcaaacgctctcaccaacaactatcaaacattaact

SEQ ID NO: 3906 - DNA, 419 bp, Glycine max
  Clone ID: LIB3073-023-Q1-K1-C2
gatccaatccaattgaattctccagagagaagaagaaacttaatcgatcatcacttcacttcactaatacatcatggcagacgagacccagaacaagtatgagagctctgaggttgaagtccaggatcgtggtgtttttgactttctcggtaagaaaaaggatgaagaagacaagcctcatcctcaggaggaggtcatcgccaccgagtttcaaaaagtcactgtctcagaccaaggagagaacaagcacagcctcttagaaaagcttcaccgatctgacagcagctctagctcttcaagtgaggaggaaggagaagatggagagaaaaggaagaagaagaagaaggaaaagaaagggctgaaagagaagatcgaggagaaaatagagggtgatcatcatcatcacaaggatgaggaca

SEQ ID NO: 3907 - DNA, 412 bp, Glycine max
  Clone ID: LIB3073-023-Q1-K1-C8
ggtgtgagtttattaacatatacaaattctctgtgttgtgttgtgtacttgtgttaattgtgttgttgttgtaggaaatttaagtgaagagagaatgatgatgaagtctgctgtgtgtgcattggtgcttgtggcactggttgtggttgaagtggggcccatggctgaggctgcggtgacttgcaacccaacacagttgactccttgtcttccggcaattaattcgggttctgcaccttcgagtgcttgttgccagaagctgaaggagcaaaagtcatgcttctgtggctacctcaaaaaccctagcttgaagcagtatgttaactctcctaatgccaaaaaaaccagtagttcttggggtattgcctatccaacttgttaagcacctcttatatatatatataaaaagtgt

SEQ ID NO: 3908 - DNA, 416 bp, Glycine max
  Clone ID: LIB3073-023-Q1-K1-C9
tttgggttcgctaaaaaaaaagaataattaagagaaaggggagcatgttgattatataggaagtaaagggcaacaatcatttttgtttaccatgggtaaggacaccatcgcttacataataacctatataagaaatgctgacatgaataaaaaaagaatggttcaaataccatttactaacataacagaaaacattgtaaaaatacttttaccccaaggttttgttgaaaacgtcagaaaacatatagaaaacgacaaatattttttagttttaactctacggtatagaagaaatataaaaggatcatataaaagttttttaaatttaaaacggatcagtacacccggtctacgaatatattctaattatcaacgaatccctcgaatttaaggggcatggggattgtaattctttc

SEQ ID NO: 3909 - DNA, 425 bp, Glycine max
  unsure at all n locations
  Clone ID: LIB3073-023-Q1-K1-D1
gggacgacagaagggcaacataggtcatcgaaaggatctcgaagacccaccaacgcacgaaagccgggatctttcagaaaatggattcctattcgaagggtgcataaccgcatggataagctcacactaacccgtcaatttgggatccaattcggttccttaggaggtatcgggaaggaattttggaatgtaataatatcgattcatacagatacagaagaaagggttctctattgattcaaacgctctacctacgagatagggatagagaaagaggaaaaaaccgaggattccacatagtacttttggtcgaaaaatcgatctgatttttttcgtacttttcgctcaatgatgaaatgggtcagattctacaggaccaaaccttgtgggagttaaggaatgatggaagaaaaaaaannnnnntt

SEQ ID NO: 3910 - DNA, 333 bp, Glycine max
  Clone ID: LIB3073-023-Q1-K1-D10
gacatgaacacctaaacaaacccactaagatagcttcctttgtatccttcctagtgctacttcttgcagaccttatactcatgcctcaaaggcttgctacttactacaaaccaattaagaagccaccaatgtacaagccttcaatgtacaaaccaacaaatgtcaaaccaccggtttataaaccaaaatcaccggtttacaagcctaaaccaaccgtttacaaaccaccatatatgaagcccccatactagaaaccaccttattgaaagtaccctccactacaagacaacacccatgcctaaagcaagctatgacgtctattatctacttaat

SEQ ID NO: 3911 - DNA, 422 bp, Glycine max
  Clone ID: LIB3073-023-Q1-K1-D12
ggatgccacaatggttgtccctcttaggcactgtcttgttttctctctcaccctcatatccatcatcttccacacccatggagcgttctctgagcaatcaataatcaagttacccacagaccaaccaagggtagagaaactgacccacttgcattttttctaccacgacatcttagggggcaagaacatcacggtggtgaaaatcatcgagccatcagcgagcgaggttcgtgaagcaactgggtttggaaccactttcatgatggacaatgttttgaccgagggtccagggctgagctcgaagcacgttgggagggctcaggggctgtttggcttggcctctttggaggaccgtggaatggtgatgctcattaacttggctttcagtgagggtgagtatgctggcagcactctcagcatgc

SEQ ID NO: 3912 - DNA, 262 bp, Glycine max
  Clone ID: LIB3073-023-Q1-K1-D2
gagcaatactaatagtagaacttattcgcgatctcgttctgttctgtacctgcacccagccgcagcagcaagtgatcgaagcgaaaagagagtaatcagcagagaaattcatcgtcgtagttatgggtaaagttcacggatcacttgcacgtgccggtaaggttagaggccaaaccccaaaagtggccaagcaggataagaagaagaagccacgtggccgcgctcacaagaggatgcagtataatcgccgattcgtcaccgc

SEQ ID NO: 3913 - DNA, 326 bp, Glycine max
  unsure at all n locations
  Clone ID: LIB3073-023-Q1-K1-D4
gactccaagaacaacaccacaggatctagaaaagccattccatcttcaccaccaaaaagaaaataatggcaatggccagtgcaacaactccagccacaatcactgttgtggccatctccagtgttgccagcacaaaaagaagggagaggaatgtgcacttcatcagaggtttgaattcctttggagggttgaaggctcagaacagtgtgacatcactaggtcttcctgtgtgcactgaacagtgttttgcaaaggtggtgagctcattgaaatatcaatcatcatctaagggcagaggtggaggtgctgnctcttcaacatgcaat

SEQ ID NO: 3914 - DNA, 355 bp, Glycine max
  Clone ID: LIB3073-023-Q1-K1-D6
gaccacattccaaaacacaaacacatacattgtagtatcacttttgtctcggaatttgttcttttgagttatggcaagcttaaaggttgcatgtgtggttttgatgtgcatggctgtgatgagtgcaccaatgatggtgcaagccgtgtcatgcaatgatgtttctgtgaacctagcaccgtgcctatcttacctgatgcagggtggagatgttccagaatcgtgctgtagcggagtgaggaacattctgggttctgccagcaccacctttgacaaacaaaccgtgtgcaaatgtcttcagcaagctgctaataactatggcatcaacgacgaatacgctcaagcacttcccggc

SEQ ID NO: 3915 - DNA, 328 bp, Glycine max
  Clone ID: LIB3073-023-Q1-K1-D7
gcagcatctcctcaaacacaaacatccctcttgatttgaaggttgttttgtgcttatagataaaagttctgccaaatcaagaggggttttcagatcatagtgtgtgtgtgtgtgttaaacaatggctaagttctttgctgctatgatcttggcactcattgccatttccatgcttcaaacagtggttatggctgctaatgagcaaggaggccacttgtatgacaacaagagcaaatatggaagtgggagtgtcaagagacaccaatgcccatcacaatgctcgaggagatgtagccagacccaataccacaagccctgcatgtttttc

SEQ ID NO: 3916 - DNA, 419 bp, Glycine max
  unsure at all n locations
  Clone ID: LIB3073-023-Q1-K1-D8
atagaagaagcagaaagagaagcattagcaaaagcaagaagaactagtctaagcagaaatggcctcttcagtgatggcatctgtggccctcaaacctgcccctttcactgttgagaagtcctcagttagaggccttccctccctctcaaggaactcctcttcattcagagttgtggccagtggtggcaagaagatcaagactgacaagccttatggaattaatggtggcatggctttgagggagggagttgatgcatctggcaggaaaggaaagggaaagggcgtttaccagtttgtagacaaatacggtgctaatgtcgatggttacagtcctatctacgacaccaaggactggtctncaaccggtgatggctacgctggcggtacaactggcttggctatctgggctgggactctac

SEQ ID NO: 3917 - DNA, 411 bp, Glycine max
  Clone ID: LIB3073-022-Q1-K1-H9
ggcacaagtgagtttgttgatcgagataactagaagcagtgtgatgaaaatgaaggtccttgttttcttcgttgctacaattttggtagcatggcaatgccatgcgtacgatatgttccctctccgaatgaacactggctatggtgcccgtactccggaggtgaaatgcgcaagttggaggcttgctgtgggagcacacaacatctttggctttgagaccattcctgaagagtgcgttgaagcaacaaaggaatacatccatggcgaacaatatagatcagactccaaaacagttaaccaacaagcttacttttatgccagagacctcgaagtccatcccaaggacacatttgtgttcagtatagatggcaccgtactctctaatattccatactacaaaaaacatggata

SEQ ID NO: 3918 - DNA, 420 bp, Glycine max
  Clone ID: LIB3073-023-Q1-K1-A10
ggcattggggcatgcttttaatttcctagatctgccaaacaaattgtagcataagtcccatggccaaagagactagtgttgtttatctatatcccagcaaatcacaagtttggggtgagaattttgatcataaaaaacttgtaataacaacactagctgctaatggaaagaaggaggagagtaatggagcacctaatgacacatatcctgcgtttcccgggtggtatgctgatgtttcctggccaggagaagcacacacatataaaatagaaaagattctattccacgggaaatcagaattccaagagcttcttgtatttgagtcttctagacaaggcaaggttgcaattcttgatgggcatatccagctgacagaaaacgatgaatttgcttaccaagagatgctcactcaccttgcac

SEQ ID NO: 3919 - DNA, 173 bp, Glycine max
  Clone ID: LIB3073-023-Q1-K1-A11
aaaaacaattcagttataggtcaaaacaaagaaattgctttctcaatgatcttctacccaacttttaccaccttaaaccgtgccctttcccgcattgtttctccattcacctgtcttaaattcatcgcttgctttcccaccaggaagacccacaattacattacctccatttc

SEQ ID NO: 3920 - DNA, 349 bp, Glycine max
  Clone ID: LIB3073-023-Q1-K1-A3
ttgggccctgaaaacatttcatcttcgtattgatgtcggaaaagggtcggccacttcccaaatttggtgaatgggatgtcaatgatccagcctcagctgaggggttcacagtgatttttaataaggccagggatgagaaaaagacaggtggcaacccagagtcaccaggaaagactgctactgatcctcatagcaaacctgcagtagagcctggcaaaactcagactaaaaaatggctttgctgcatgcaaaacccttttgccgaatcatagcatagcaatggttgctcctgtgaaaagcctgaacagaagaaccaatgttatgtgtaactagcgtcacagtattttct

SEQ ID NO: 3921 - DNA, 447 bp, Glycine max
  unsure at all n locations
  Clone ID: LIB3073-023-Q1-K1-A6
ggtgagacgagggtaaggtcgcgttgtattgcgtcgtgtcgtgcgctgttcctctgtctgtcgtttttgttttcagaccaaaccctagctccgcatcgcaaccatgtcgaccaagcaaggtggaaaagctaagcctttgaagaaacccaagtctgataagaaggattacgacgaggttgacatggctaacattcagaagaaaaaggaagaggagaaggcgctaaaggagttgaaagccaaggcgcaacagaagggaagctttggaagttctgggctcaagaaaagtggaaagaaataagggctctttatcatgattgtatacatccaatattgagcccttgagtttattaccatgataacttctgtcttatggtggggctcttattgctctaatgttagtactgaactgangtatttcgtgatgtaagctgcaacaagttacttgtt

SEQ ID NO: 3922 - DNA, 330 bp, Glycine max
  unsure at all n locations
  Clone ID: LIB3073-023-Q1-K1-A7
gagtctctgaatctgaaattgcaatgcttcacccggcggcactgatagcatcgtgtccttatccttatccttatcctgggcggcatgagttaccctcagcctcagcgtcagcgacagccagagtcgctgttccaatgccaaatctgagaggcaaagcggttgttggtgttggttccagaatgataaggtgcatggctaaccccagaagagttcaaatggtggccaagcaaattaggagagagctttctcatatgcttctcaccgataaagtcttgcagtatgctgntcttcccgaagcctncttaggagccgaccgttacctctcttctc

SEQ ID NO: 3923 - DNA, 394 bp, Glycine max
  unsure at all n locations
  Clone ID: LIB3073-023-Q1-K1-B1
ggcacaagtgagtttgttgatcgagataactagaaacagtgtgatgaaaatgaaggtccttgttttcttcgttgctacaattttggtagcatggcaatgccatgcgtacgatatgttccctctccgaatgaacactggctatggtgcccgtactccggaagtgaaatgcgcaagttggaggcttgctgtggaagcacacaacatctttggctttgagaccattcctgaagagtgcgttgaagcaacanaggaatacatccatggcgaacaatatagatcagaccccaaaacagttaaccaacaagcttacttttatgccagagacctcgaagtccatcccaaggacacatttgtgttcagtataagatgcaccgtactctctaatatttcatac

SEQ ID NO: 3924 - DNA, 431 bp, Glycine max
  Clone ID: LIB3073-023-Q1-K1-B10
aagaataatatgttatgcggaggtgttaagtctcagttgtgttgcgtgtgtgtcgtagcgctcgttcctcttgtttctctgtttttgtgttcatacacgaacacctagacttcgtatctgcaactcatgttctactcaatcacaggtggaaaagctataacctcttgtaagaaacccaagtacttatatataaggattatccacgcagattgatagtggctatacattctataagaaaaaggatatatgagaagagcgctctaatgagtttaaagccaaggcgcaacataaaggaagctttggaggttctgggcttaagaaaagtggaaagaaataatggctctttatcatgattgtatgcattcaatattgagccctgtaaatacagttgctaccatgataacttctcttattattgagggctactttat

SEQ ID NO: 3925 - DNA, 396 bp, Glycine max
  Clone ID: LIB3073-023-Q1-K1-B11
ggactatgagtcgatttgataactaaggtattggtattcgtgatattgatccaatttgatatcatcgaaatccaatttataccattgttgaattaattatcgatgaaagatttatcatctctatgggattaaatcccgaattttttattggaaatttaagagaaataaaacataataaagattatggaagtaaatattcttgcatttattgctactgcactggttattctagttcctactgcttttttacttataatttacgtaaaaacggttagtcaaagtgactaatttcactgaaatctgacttcttcatttttatcaatgtaatcaatgattaaaaaaaatgaaaaaggttttcaatttttggtcttagtataaaaaaaaaaaactttatct

SEQ ID NO: 3926 - DNA, 365 bp, Glycine max
  Clone ID: LIB3073-023-Q1-K1-B2
gaactccagtcgaatatgaagcgcctggatacaagttatgccttggaatggaagagaattccgaatcagctttgtctacgaacaatgaagctaagaacttataactaggaactgaaaaatttacgtttaataaaattagttattaaagtaactgaaaaatataaaataatggaaaaccattaaaatcataattaattaatgtaagataaatttaaaattggataaatttatcaaggttaaaaaatattaaaaaattggaaattatcagattaaaaatatttacttaaaataatattttaaaatacctaaaaactattaaaaaaatttattattcaaatatttaatggaatttttcaactatattt

SEQ ID NO: 3927 - DNA, 396 bp, Glycine max
  Clone ID: LIB3073-023-Q1-K1-B3
gagaagaatggcgactgagaatgagaagagaaagcggaaagaaagtagtgatgttagaagcaaaaagaagaagaagcagagaagcgaagatgaagaggcgacgaagcagttgcgtttctttgagtcggcgatgggtattgagctttcttcgctggagttggaatccctcaaagataataagtgcattttggaggtatcagaagccgctgattcagacgtgacagtattgggcaaaactattagggcagcgtttggcgcgtcttggaaagaggctctctgcgaagggaagcctgtagagggaaaagtcattgctggaagccccgcagttcttatcataacttcttctgctttaagatgcatagatctcttaagaggctttcggtctatgactgaaca

SEQ ID NO: 3928 - DNA, 411 bp, Glycine max
  unsure at all n locations
  Clone ID: LIB3073-023-Q1-K1-B4
ggggttattggacacattcttcagcgactgcgtttttggatcggaacctcttctgcggcgtagcaatgggacactccaacgtttggaactctcacccaaaaaactacggtcctggttctcgcacttgccgtgtgtgtgggaatccacatggactgatcaggaagtatggccttatgtgctgcaagcagtgcttccgtagcaatgccaaggaaattggcttcatcaagtatcgctaaaagagcagttgtcaactacggaccaatattgtgttctggcactaggatgttttgaggatgttatgtttgaagaaacttgagactttcttttttcatctaattaattatcagacgtaatttgtggtactaagaatactnttatataaattggttttgaaaaaaaaaattnnnattt

SEQ ID NO: 3929 - DNA, 413 bp, Glycine max
  Clone ID: LIB3073-023-Q1-K1-B5
gacacactgctattcctcttaagcttgctactgagtttccacactgcataccttaggtcttccgaattcgaagttaatttgcaagatggctaaggaaaaggctcagatcaacattgtggtggttggtcatgtggaccctgaggaggcaaccaccattaacgagctgaagaagcctgttgtggagaaagaagctccagggcatgccatatgagggcatgcacgtacggcctcggaggggaaccagaaaattatattaacaaaataatctggaaccctaatgtatcagtgtcatcatcagtgtgtagtttaagctagctatgctatggttacgttctttgagatgagagtcttgatgaacagtaccattctgatgtattgctttccttggaagttaatgcatgcttcttatcttc

SEQ ID NO: 3930 - DNA, 426 bp, Glycine max
  Clone ID: LIB3073-023-Q1-K1-B6
gacgatctgctttctctgaattgtgaaaatgtcgctcggagaaactgcttgttcatacgcagctctcatccttcatgaagatggaattagtgtaactgctgacaagatcagcaccttgttaaaaactgcaaaggttccagtagactcttattggccaaccttgtttgctaaacttgctgagaagaaaaatcttggcgatttgatagcaaatgcggcaggcggtggtgcaccagttgctgctgcagctgccccagttgctgctgctgctggtggtgctgctgccgcagctccagctgctgaggagaaaaagaaggaagaaccggaagaagagagtgatgatgatatgggattcggcttgtttgattagggacattctcaatgatttggttaaattttgtggggtcttaacctttaagggtactctgg

SEQ ID NO: 3931 - DNA, 428 bp, Glycine max
  unsure at all n locations
  Clone ID: LIB3073-023-Q1-K1-B7
gataccaaaaacaaaacacaagccaagtgaaagtgagaaaaaataaaaatcaaagagcataatgtcagggatcattcacaagattggggagacccttcatgtgggagggcacaagaaggaggaggagcataagggtgagcaccatgctggagaatacaaaggggagcaccatggtgaacacagtagtgagtacaaaggagagcatcatggtgaacacaaagctggagagtaccatggtgagcacaagccagagcacatagaggggttcctagacaaagtcaaggacaagatccatggtgagggcggcgccgncgagggcgagaagaagaagaaggagaagaagaagaaagagcatggccatgagcatggccatgacagcagcagcaacagtgacagtgattaaactgctgcatcacctatatatttaa

SEQ ID NO: 3932 - DNA, 420 bp, Glycine max
  Clone ID: LIB3073-022-Q1-K1-H11
ggcattggggcatgcttttaatttcctagatctgccaaacaaattgtagcataagtcccatggccaaagagactagtgttgtttatctatatcccagcaaatcacaagtttggggtgagaattttgatcataaaaaacttgtaataacaacactagctgctaatggaaagaaggaggagagtaatggagcacctaatgacacatatcctgcgtttcccgggtggtatgctgatgtttcctggccaggagaagcacacacatataaaatagaaaagattctattccacgggaaatcagaattccaagagcttcttgtatttgagtcttctagacaagggcaggttgcaattcttgatgggcatatccagctgacagaaaacgatgaatttgcttaccaagagatgctcactcaccttgcac

SEQ ID NO: 3933 - DNA, 419 bp, Glycine max
  Clone ID: LIB3073-022-Q1-K1-C11
gaacgatggctatccgaatcaactccttgacggtctcttccgctttacctatggagttaagaggtggaatttcgggcctctgggttggctcgcagatgatgccccaaatgcgaaaggaggctcgtggacgacgagtttggaggcgaagaaaattgataaaaaaggatgaatatatgcaccccaaaatggagcgcattccttttatggaggagcaggtaaggatggtaagggaacagggaaagctcttgacgatggacatagagaggttaatgttgttagaagataatcggtttgattttgtgaatgagatagcagctgaggccaattcttatgttgagaacaacagggatgagtatggaagtgagaagaaggccattcttcatgttttgagcaatcgaatgaatgatactggaatttac

SEQ ID NO: 3934 - DNA, 416 bp, Glycine max
  Clone ID: LIB3073-022-Q1-K1-C9
gaacgtaaaaaaaaaagaataataaatagaaaaaggagcatgttgattatatagaaagtaaagggcaacaatcatttttgtttaccatgggtaaggacaccatcgctgacataataacctatataagaaatgctgacatgaataaaaaaggaatggttcaaataccatttactaacataacagaaaacattgtaaaaatacttttacgcgagggttttgttgaaaacgtcagaaaacatagagaaaacgacaaatattttttagttttaactctacggtatagaagaaatagaaaaggatcatataaaagttttttaaatttaaaacggatcagtacacccggtctacgaatatattctaattatcaacgaatccctcgaatttaaggggcatggggatggtaatctttcaacttc

SEQ ID NO: 3935 - DNA, 358 bp, Glycine max
  Clone ID: LIB3073-022-Q1-K1-D11
cccacgcgtccggagacgacagaaggggaagaagaagaaggagcatggccatgagcatggccatgacagcagcagcagcagtgacagtgattaaactgctgcatcacctatatatttaaaaggtttatgggaccatagtagcgagggctgtgccttaatttctctctctctctctctctctctctctctctctctctttttcctttttccctatcttgtgatctatttatgagtgagaaaaacaaaagtgagaaattgtgcgtgaatctggttgctaattcgagtgctattagtctgtggtttggttggtttgtgaccccgctacttgggttatgtttgattgtatattatcctagag

SEQ ID NO: 3936 - DNA, 372 bp, Glycine max
  Clone ID: LIB3073-022-Q1-K1-D12
tctctctcaccctcatatccatcatcttgcacacccatgtagcgttctctgagcaatcaataatcaagttacccacagaccaaccaagggttgagaaactgacccacttgcattatttctaccacgacatcttatggggcaagaacattacggtggagaaaatcatcgagccatcagcgagcgatgttcgtgaaacaactgggtttggaaccactttcatgatggacaatgttttgaccgacggtccaaggctgagctcgaagcacgttgggaaggctcacgggctgattggctaggcctctttggaggaccgcggaatggtgatgctcattaacttggctttcagtgacggtgaatatgctggcagcactc

SEQ ID NO: 3937 - DNA, 273 bp, Glycine max
  Clone ID: LIB3073-022-Q1-K1-E10
caccaaggttgctcctcttgggcactggcatattttttctttcacccttaaattcattaattttcatacccattgaaccttcttttaacaatccataatcaaatttcccacctacccaccaatggcttaaaaactttcccaatttcatttttttttacaccaacattttacgggccacaaccttacagacgttaaaaatattataccattattcaaccatattctttaaaacaactggtttacaacccactttattattgaccatttttttaa

SEQ ID NO: 3938 - DNA, 420 bp, Glycine max
  unsure at all n locations
  Clone ID: LIB3073-022-Q1-K1-E11
gcacaccaacaccaaaacaaacccactaagatggcttcctttgtatccttcctagtgctgcttcttgcagcccttatcctcatgcctcaagggcttgctacttactacaaaccaattaagaagccaccagtgtacaagcctccagtgtacaagccaccagtgtacaaaccaccggtttataagccaaaaccaccggtttacaagccgaaaccaccggtttacaagccaccatataagaagccaccatacaagaaaccaccttatggaaagtaccctccagtagaagacaacacccatgcctaaagcaagcaatgaagtctattatctacttaataaataagaggaactgctttgtgttttctagcattgtgatttacaacttcgtagcaatgcatattctngactcttgcatgcacttca

SEQ ID NO: 3939 - DNA, 414 bp, Glycine max
  unsure at all n locations
  Clone ID: LIB3073-022-Q1-K1-E9
ggggtagcagtgaggataaaaaatggctatggccacagctgtcgtgtgtcctcagaacatcaccggagccatcgtgagctcacctagcaagaccaagaagagagtggtacacgtgagaggcataaattcatttgggggactgaaggctagcaatggtgttgtctctttggggattcctatgagcactgagaagtgctttgctaaggttgtgagctcagtgaaagcagctacatcaaatgggaaaggaaaaggaggggctctttcttccacgtgcaacgctgctggtgagatattcacgattgctgctatcatcaatggacttgttcttgtcggggttgctgttggctttgtgctcttgcgagttgaagcatgggtcgaggagtccgaggcagagtgaanattcaatcagataag

SEQ ID NO: 3940 - DNA, 411 bp, Glycine max
  Clone ID: LIB3073-022-Q1-K1-F11
ggtgccagtcttacccctcttaataccaattttctagggtttatacaattttcgatggcttcttcagatgttgagtaccgttgctttgtcggtgggctcgcttgggccactgacgaccaagctctcgagagagccttctctcagtacggcgaaatcgttgaaacgaagattatcaacgatcgtgagactggaagatccaggggttttggatttgtgaccttcgcctcggagcagtccatgaaagacgccatcgaagggatgaacggccaaaaccttgacggccgtaacatcactgttaacgaagctcagtcccgtggtggctatggcggtggcagagaccgtggttatggtggtggtggtgaccgtggttactctcgtggtggtgacggtggtgatgggggctggagaaac

SEQ ID NO: 3941 - DNA, 417 bp, Glycine max
  unsure at all n locations
  Clone ID: LIB3073-022-Q1-K1-F9
ggcacaccaacaccaaaacaaacccactaagatggcttcctttgtatccttcctagtgctgcttcttgcagcccttatcctcatgcctcaagggcttgctacttactacaaaccaattaagaagccaccagtgtacaagcctccagtgtacaagccaccagtgtacaaaccaccggtttataagccaaaaccaccggtttacaagccgaaaccaccggtttacaagccaccatataagaagccaccatacaagaaaccgccttatggaaagtaccctccagtagaggacaacacccatgcctaaagcaagcaatgaggtctattatctacttaataaataagaggaactgctntgtgttttctagcattgtgatttacaacttcgtagcaatgcatattctngactcttgcatgcac

SEQ ID NO: 3942 - DNA, 403 bp, Glycine max
  Clone ID: LIB3073-022-Q1-K1-G11
gacagaaagagaaagcaatggcttctttggcaagcttagctgttgttcaaccatctactgtcaagggccttgctggaactaagctctctttcaagccctctcgccagagcttcagacccaagaatttcaggagtggtgccgttgtagcaaagtacggtgacaagagtgtgtactttgatttggaggatctaggcaacactactggtcagtgggacttgtacggctccgatgcaccttcaccctacaaccctcttcagagcaagttcttcgagacattcgccgctccattcacaaagaggggattgttactaaagtttttgatcctgggaggtggttccaccctggcatacttgagtgccacagcgtcaggtgacattctaccaatcaagaagggcccacaact

SEQ ID NO: 3943 - DNA, 208 bp, Glycine max
  Clone ID: LIB3073-022-Q1-K1-G12
actttatgggttatcgttattcattgtgcattatgcaatgggcaccacagcaactctattctgaaccattgtgagcaccttcttcatgaggaagcaacctatgactaccaatagcctaaagacatttcccaacgctctttttggtctgaaatgtggaccaagtggtcgtgtaacttgcattgtctcttacaaagtgaagctcataacc

SEQ ID NO: 3944 - DNA, 389 bp, Glycine max
  unsure at all n locations
  Clone ID: LIB3073-022-Q1-K1-G9
gacagcatgtcaataatctattttatactatacccacattttgataattatttttctagttgataagccatggctactcgaggaaagcttgaggttgacgttgatctcaagtctaacgcagacaagtactggcaaacccttaggaactccactgaaatattccccaaggccttccccaatgattacaaaagcattgaggttcttgagggtgatggcaaatcacctggttctatccgccacataagttatggtgaaggttcaccacttgtgaagtcatcctttgagaagatcgaggctgttgatgaagaaaagaaggtagtgtcgtacactatcattgatggagaactcctncagcactacaaaacattcaagggagacatttctgtgac

SEQ ID NO: 3945 - DNA, 419 bp, Glycine max
  Clone ID: LIB3073-022-Q1-K1-B12
ggagtttgttgatcgagataactagagacagggtgatgaaaatgaaggtccttgttttcttcgttgctacaattttggtagcatggcaatgccatgcgtacgatatgttccctctccgaatgaacactggctatggtgcccgtactccggaggtgaaatgcgcaagttggaggcttgctgtggaagcacacaacatctttggctttgagaccattcctgaagagtgcgttgaagcaacagaggaatacatccatggcgaacaatatagatcagactccaaaacagttaaccaacaagcttacttttatgccagagacctcgaagtccatcccaaggacacatttgtgttcagtatagatggcaccgtactctctaatattccatactacaaaaaacatggatatggggtggagaaattt

SEQ ID NO: 3946 - DNA, 280 bp, Glycine max
  Clone ID: LIB3073-021-Q1-K1-G5
gacaaaaccaaattataatatttcatgctggtctttcactcttgtcacattccacaaaaacgaagtactactacaagggaagaaaaacttagctactaaggaaggatcaaagagaatggctcaagcaatggcatcaatggctggcttgcgtggttcctctcaggctgtgttggaaggtagccttcaagtgagtggctccacacgcttgaatgtggggagtggaagcagggtggcctcagtcacacgtgcaaggttcacagttagagcacaacaacaagtg

SEQ ID NO: 3947 - DNA, 331 bp, Glycine max
  Clone ID: LIB3073-021-Q1-K1-G8
gaactacaaagaacgaagacgagacattagcagcgttaaaaaaagagagaagaaaaatgcgaaagttcgatccacggcccgttttcttcaagcgcgagtggaaacgcaactggcccttcctcgttggattcgcagtcaccggagctctaatcaccaaactttcccttggccttaccgaggaagaggctaagaattccaaattcgttaaggcgcacaaaaggtgacttctgaatcgtgacatctgcctggctttgcattttatgttaggtttgtcaagattactttgcttgacttgattttatggattgtaataacagaagagagatgctct

SEQ ID NO: 3948 - DNA, 386 bp, Glycine max
  Clone ID: LIB3073-021-Q1-K1-G9
ggagaagaagaagccttcagcacttgaagttgaaaccgtgctgatcctcatcatgggaaccatttttcctcctcactctctctctccactcctcaacatcaaaccttcaccctcaagaattctcttggctccctctccccaacccaagtcaaattctctcttttgctccaaacccattgtttcaagtctcagaaagaaccaaacttcatctcccaaaccttcatcgggcacaagctggttagctcatgctcaacagggcctagcagctttggctatctccttggcacccaactttagcccagttttgtttagtggcaatgcattggcatctgagtttgatgtgcttaatgagggtccacccaaagattcttatgtgtttgatgatg

SEQ ID NO: 3949 - DNA, 314 bp, Glycine max
  Clone ID: LIB3073-021-Q1-K1-H10
ggcacaagtgagtttgttgatcgagataacgtagaaacagtgtgatgaaaatgaaggtccttgttttcttcgttgctacaattttggtagcatggcaatgccatgcgtacgatatgttccctctccgaatgaacactggctatggtgcccgtactccggaggtgaaatgcgcaagttggaggcttgctgtggaagcacacaacatctttggctttgagaccattcctggaagagtgcgttgaagcaacaaaggaatacatccatggcgaacaatatagatcagactccaaaacagttaaccaacaagcttactt

SEQ ID NO: 3950 - DNA, 367 bp, Glycine max
  Clone ID: LIB3073-021-Q1-K1-H11
gaccacaccgagtcgcagaaaaagaaaaaagcgatcatagtttcacttcggccttatccagtttagggtttcggttctctaccctatctttcacgtatcgaaaccttaaatttacgatcagacctgagcaatctggttggtagaacctttggtcttagtgagtcaagctttatgtctgaattagacgatcaaattcctactgccttcgatccttttgctgatgcaaatgctgatgactcgggtgctgggtcaaaggagtatgtgcatattcgtgtacagcagcgaaatggtaggaaaagcctgacaaccgttcagggattgaaaaaggaattcagctataacaagatacttaaagacgtcaagaaag

SEQ ID NO: 3951 - DNA, 77 bp, Glycine max
  Clone ID: LIB3073-021-Q1-K1-H2
aggaaatcgagacatgtcagtaatggagaggatgaagatgttcgcagtgcaagaaccatgagtctccttgttctgtt

SEQ ID NO: 3952 - DNA, 399 bp, Glycine max
  Clone ID: LIB3073-021-Q1-K1-H3
gacaccaacaccaaaacaaacccactaagggggcttcctttgtatccttcctagtgctgcttcttgcagcccttatcctcatgcctcaagggcttgctacttactacaaaccaattaagaagccaccagtgtacaagcctccagtgtacaagccaccagtgtacaaaccaccggtttataagccaaaaccaccggtttacaagccgaaaccaccggtttacaagccaccatataagaagccaccatacaagaaaccgccttatggaaagtaccctccagtagaggacaacacccatgcctaaagcaagcaattgaggctattatctacttaataattagaggaactgccttgggtttctaacttgtgattacaacttcgaaccatgcatattcttgact

SEQ ID NO: 3953 - DNA, 354 bp, Glycine max
  unsure at all n locations
  Clone ID: LIB3073-021-Q1-K1-H4
gattccacacacaagaagactcctcaatcatccatagacatggccaccgtcacttctgcagcagtttctattccctcattcactggcctcaaggcaagcgcaggcaaagtgagtgccgccgcagttaaagtctcagctccccaagccacaaggttctgcggcatcaaggcttccctcaaagacgttggagtcgctgttgtggccactgctgcgagcgcagttctagctagcaacgccatggccattgaagtgttactgggcactgatgacgggtctctggttttctcttccaactctttctacgtggccccctggggaaaaatcgtgttcaagaacacgcangcttccccacaa

SEQ ID NO: 3954 - DNA, 380 bp, Glycine max
  unsure at all n locations
  Clone ID: LIB3073-021-Q1-K1-H6
ggaacctttgcattctattcattcaagattcagcaagtgcgttttggaagcagagaccgaaatacttcgagatggcccgtacaaagcaaactgctcgtaagtcaactggaggaaaagctcccaggaagcagcttgcaaccaaggctgcacgtaagtctgcaccaacaactggtggtgtgaagaagcctcatcgttatcgccctggaactgttgctcttcgtgagattaggaaacaccagaagagcactgagctcctaatcaggaagcttcctttccagaggttggttcgtgaaattggcccagatttcaagactgatctgcgnttccagagccatgctgtgcttgcttggcagaagctgctgaggcatacctgttgggct

SEQ ID NO: 3955 - DNA, 83 bp, Glycine max
  Clone ID: LIB3073-021-Q1-K1-H8
ggcacaagtgaatttggtgatcgagataactagaaacagtgttatgaaaattaaaggccctggtttctttcgtggtacaattt

SEQ ID NO: 3956 - DNA, 397 bp, Glycine max
  Clone ID: LIB3073-022-Q1-K1-A10
ggcacaagtgagtttgttgatcgagatcactagaaacagtgtgatgaaaatgaaggtccttgttttcttcgttgctacaattttggtagcatggcaatgccatgcgtacgatatgttccctctccgaatgaacactggctatggcgcccgtactccggaggtgaaatgcgcatgttgcacgcttgctgtggtagcacacaacatctttggcttttacaccattcctgaagagtgcgttgacgcacccatggaatacatccatggcgatcaatctagatcagactccattacaggtgaccaacgagcttacttttatgccacagacctggaaggccatcctagggacacatttgcagttagcatagatcgctccgtactctctaatattgcatactac

SEQ ID NO: 3957 - DNA, 419 bp, Glycine max
  unsure at all n locations
  Clone ID: LIB3073-022-Q1-K1-A12
gaaggtgcaagagtttgttgtgagctataagctagtttatcgtgaggagaatatgaagttgtttgttttctttgttgctgcagtagttttggtagcatggccatgccatggcgcaggctaccaaaggttccctctccgaatgaaaactggctatggtgagcgttcttcggaggtaaaatgcgcaagttttaggcttgctgtggaagcacacaacatccgagcctttaaaaccattcctgaagagtgcgttgaaccaacaaaggactacattaatggcgaacaatttagatcagactctaaaacagttaaccaacaagctntcttttatgctagtgaacgcgaagtccatcacaacgacatatttatattcggcatagataacaccgtactctctaatatcccatactatgaaaaacatg

SEQ ID NO: 3958 - DNA, 419 bp, Glycine max
  unsure at all n locations
  Clone ID: LIB3073-022-Q1-K1-B10
ggaatgggaggaagaataattgtgaggcgagggtaaggtcgcgttgtgttgcgtcgtgtcgtgcgctgttcctctgtttctcgtttttgtgttcagaccgaaccctagctccgcatcgcaaccatgtcgaccaagcaaggtggaaaagctaagcctttgaagaaacccaagtctgataagaaggattacgacgagattgatgtggctaacattcagaagaaaaaggaagaggagaaggcgctaaaggagttgaaagccaaggcgcaacagaagggaagctttggaagttctgggctcaagaaaagtggaaagaaataagggctctntatcatgattgtatgcattcaatattgagccctgtaattacagttgctaccatgataacttctcttattattgtggcctactttattgctaat

SEQ ID NO: 3959 - DNA, 406 bp, Glycine max
  Clone ID: LIB3073-021-Q1-K1-G4
gaaggtgcaagagtttgttgtgagctataagcgagtttatcgtgaggagaatatgaagttgtttgttttctttgttgctgcagtagttttggtagcatggccatgccatggcgcaggctaccaaaggttccctctccgaatgaaaactggctatggtgagcgttcttcggaggtaaaatgcgcaagttttaggcttgctgtggaagcacacaacatccgagcctttaaaaccattcctgaagagtgcgttgaaccaacaaaggactacattaatggcgaacaatttagatcagactctaaaacaggtaaccaacaagctttcttttatgctagtgaacgcgaagttcatcacaacgacttatttatattcggcatagataacaccgtactctctaatattccatac

SEQ ID NO: 3960 - DNA, 375 bp, Glycine max
  Clone ID: LIB3073-022-Q1-K1-B11
gacgatgagtcgatttgataactaagatattggtattcgtgatattgatccaatttgatatcatcgaaatccaatttataccattgttgaattaattatcgatgaaagatttatcatctctatgggattaaatcccgaattttttattggaaatttaagagaaataaaacataataaagattatggaagtaaatattcttgcatttattgctactgcactgtttattctagttcctactgcttttttacttataatttacgtaaaaacggtaagtcaaagtgactaatttcactgaaatctgacttcttcatttttatcaatgtaatcaatgattaaaaaaaatgaaaaaggttttcaatttttggtcttagtat

SEQ ID NO: 3961 - DNA, 318 bp, Glycine max
  Clone ID: LIB3073-021-Q1-K1-E7
gacaagcaacattgctaaccattctctgcagttttcagttacaaagcatttcattgttttacaatatacaacactacaatggctgcttcaacaatggctctctcttcatcatcattggctggccaagctatcaagcttgcccccttcacccctcagcttggtgttggaagggttagcatgagaaaaacagcctccaagactgttacctcaggaagcccatggtacggcccagatcgtgtcaagtacttgtgcccattctctggtgagcccccatcctacctcactggtgaattcccaggtgactatggttgggacact

SEQ ID NO: 3962 - DNA, 306 bp, Glycine max
  Clone ID: LIB3073-021-Q1-K1-E8
cactcggtcctgttgtgtgtgcgcagaataaaatttctcatcgacgatggcgaataccttacaacgcgcccttcgcgccaccatggcccggccgttctccaccggcgcattggccgaaattaagcgaggcgagatcggaatggtttctggaattcctgaagaacaccttcgtaggagggttctaatttactctcctgctagaactgcatctcaacaaggatctggaaaggttggaagatggaagatcaacttcttatcaacccaaaagtgggaaaatccactgatgggctggacattcactgggga

SEQ ID NO: 3963 - DNA, 357 bp, Glycine max
  Clone ID: LIB3073-021-Q1-K1-E9
gaagaagaagaaggagcatggccatgagcatggccatgacagcagcagcagcagtgacagtgattaaactgctgcatcacctatatatttaaaaggtttatgggaccatagtagcgagggctgtgccttaatttctctctctctctctctctctctctctctctctctctctttttcctttttccctatcttgtgatctatttatgagtgagaagaacaaaagtgagaaattgtgcgtgtatctggctgctaattcgagtgctattagtctgtggtttggttggtttgtaaccccgctacttgggttatgtttgattgtatattatcctagagaaataaaaattttaaattatcacg

SEQ ID NO: 3964 - DNA, 400 bp, Glycine max
  Clone ID: LIB3073-021-Q1-K1-F1
agaatatgaaaaagaaaaaaaagattctaaggagatataactaatattctttagaataatcaaaaagaatattaaattcaaataaattttagatagaaaaaagacttaaaaaggaggatttgaaatgcgagatctaaaaacatatctttccgtggcaccagtagtaagtactctatggttcggggctttggcgggtctcttgatagagatcaatcgtttttttccagatgcattgatattccctttttttcattctagttattgacacggaaaggggtgaagaagattatagatccaattaagtattaaatatatggtattaatatgtaattaatctcctcttctttatttcggcttttaattcttcttttttttacaattggaataggattaggttacc

SEQ ID NO: 3965 - DNA, 409 bp, Glycine max
  Clone ID: LIB3073-021-Q1-K1-F10
ggatcaaatactcagaactgttcggttgttctggaaatttttcttctctcagccatctctctctctctctctgcgtccatggagttttggggtgttgaggtgaaaagtggagaatctctcaaggttgatccgggagatgacaagattatccacctttcaaatgcatgcctgggggatgtcactaaggataaagaaggtctaccagtagccctgtatgtcaagtttggtaaccaaaagcttgtacttggaacgctttcttctgaagcttttcctcagatatcttatgatttggtatttgagaaggaatttgagctatcccataactggaaacatggaagtgtcttctttaccggatttaaagctcaatctcagtcagagtctgataatgatgaagattctgatgattttg

SEQ ID NO: 3966 - DNA, 382 bp, Glycine max
  Clone ID: LIB3073-021-Q1-K1-F11
gatgagagcaaaggatagaggatagagtatagagagcaacataggaagtgaagtgtaggtaagtgagagccatgaagggttatgagccccgttcaagctcttcatgtgcagcttgcaagctattgaagagaagatgcataccaaattgtatttttgcaccttactttaggtctgatgagtgcaagaagtttgcaaaggtgcacaaggtgtttggagccagcaatgtgagcaagattctgattgaagtgccagaagagcagagagaggacacggtgaattctctggcttatgaggctgaggcaaggctgagagacccggtttatggatgcattggtgccatagctctgttgcaaaggaagatggtggagcttcaacatgatct

SEQ ID NO: 3967 - DNA, 303 bp, Glycine max
  Clone ID: LIB3073-021-Q1-K1-F12
tttaaggttatgagagcaaaggatagacgatgtagtatggaaagcaacatagggggtgaattgtaggtaagtgagagccatgaagggttatgagccccgttcaagctcttcatgtgcagcttgcaagctatctatgagaaccatgcataccaaattgtatttctgcaccttactttatgtctgatgagtgcacgacgtttgtagatgtgcacaccgtgtttgaagccagcaatgtgagccagattcttacttacgtgccagaagagcttagagaggacacggagaattctctggcttatgatg

SEQ ID NO: 3968 - DNA, 118 bp, Glycine max
  unsure at all n locations
  Clone ID: LIB3073-021-Q1-K1-F2
ggcacaagtgagtttgttgatcgagataactagaaacagtgtgatgaaaatgaaggttcttnngtttcttcgtgctacaattttggtagcatgggcatgccatgcgtacgatatgttc

SEQ ID NO: 3969 - DNA, 292 bp, Glycine max
  Clone ID: LIB3073-021-Q1-K1-F4
acaagcaacattgctaaccattctctgcagtggtcagttacaaagcatttcattgttttacaatatacaacactacaatggctgcttcaacaatggctctctcttcatcatcattggctggccaagctatcaagcttgcccccttcacccctcagcttggtgttggaagggttagtatgagaaaaacagcctccaagactgttaccttaggaagcccatggtacggcccagatcgtgtcaagtacttgggcccattctctggtgagcccccatcctaacttactggtgaaat

SEQ ID NO: 3970 - DNA, 400 bp, Glycine max
  Clone ID: LIB3073-021-Q1-K1-F5
agaatatgaaaaagaaaaaaaagattctaaagaggtataactaatattctttagaataatcaaaaagaatattaaattcaaataaattttagatagaaaaaagacttaaaaaggaggatttgaaatgcgagatctaaaaacatatctttccgtggcaccagtagtaagtactctatggttcggggctttggcgggtctcttgatagagatcaatcgtttttttccagatgcattgatattcccttttttttcattctagttattgacacggaaaggggtgaagaagattatagatccaattaagtattaaatatatgtaattaatatgtaattaaactgctcttctttatttcggcttttatttcttcttttttttaacaatgtatagaataaggtagcc

SEQ ID NO: 3971 - DNA, 314 bp, Glycine max
  Clone ID: LIB3073-021-Q1-K1-F6
gaccatagcaagtagcaaggagactagttgtgtattcagattacattgcaaaaatggcatcattcaccatgacagcttctatctttggctgcccagctgtcaccaaacggtcggcagtggctgcgcagaggagattactcgtagtgagtgctgccaaagctgaaggggaaaaggtcagttatgacaacaatgatagcaatggaaggaggaacttgatgttcgctgtggctgctgctgctgttttctctgttgctgggatggcagtggcagatgagcctaaaccaggaacctcagaagccaagaaaaagtatgcc

SEQ ID NO: 3972 - DNA, 312 bp, Glycine max
  Clone ID: LIB3073-021-Q1-K1-F7
gccagttctgaagagaaaatctcccttgttgtcactagtaaaattttcagatattcaaatagatcccgttgctgcattcagtaatcacaaccacctggaacgccattattcaattcaattggaaataaatcatgggtcgacctagaggtgatgaaaagtactggaatgaagtaacgagttttgaagagaacgggaagcagaagtggaagtgcaagcattgtgaaaaaacgtatggtggaggttattcaagaattaaactgcatttagataaagaacaaaaaaaaaaaaaaaaaaaaaaaaaaaaaagcggcc

SEQ ID NO: 3973 - DNA, 258 bp, Glycine max
  Clone ID: LIB3073-021-Q1-K1-F8
gagcgccaatgtttttttcagaggagtttggtcttgtcatcaaaagaggttatcttatagtaagaaatcgatgtcttactccattttaaggaacataacaagagaacaatagcctgacaaagggtttagccctaaaatcgaatccatcattgattcgagatattgataaggtgaatactcatttctcgtcaatgctaagcataatgcgggtattgggacctaaaaaagattatcttttcttcctatcttatgaacttt

SEQ ID NO: 3974 - DNA, 380 bp, Glycine max
  Clone ID: LIB3073-021-Q1-K1-F9
gagaagcttcaatgagtaagtatcaatggcttccgaagaatcccagaacaagccccccagcgagcagtccactaccgaactcatcacgagcgcgaagctggtggcggaggcggcgcagtcggctctgaagagcgacagcgacaaagtggacaaggccaaggtggctgacgctgccggcgatcttctcgacgcggcggggaagtatggaaaacttgatgacaaacaaggcatagggcaatatgttgacaaggctgctgattatctgcataattaccagggtgataataccactgctccttcacagcctgcagagtctaaaggtgaagaaagtggtggtgggttaggtggtcttgcaaacttggctggaggcttcttcaaaa

SEQ ID NO: 3975 - DNA, 384 bp, Glycine max
  Clone ID: LIB3073-021-Q1-K1-G11
gaacacagaactgtagttgcagaagcttcagataagtaagtatcaatggcttccgaagaatcccagaacaagccccccagcgagcagtccactaccgaactcatcacgagcgcgaagctggtggcgggggcggcgcagtcggctctgaagagcgacagcgacaaagtggacaaggccaaggtggctgacgctgccggcgatcttctcgacgcggcggggaagtatggaaaacttgatgacaaacaaggcatagggcagtatgttgacaaggctgctgattatctgcataattaccagggtgataataccactgctccttcacagcctgcagagtctaaaggtgaagaaagtggtggtgggttaggtggtcttgcaaacttggct

SEQ ID NO: 3976 - DNA, 390 bp, Glycine max
  Clone ID: LIB3073-021-Q1-K1-G12
gaaaaagtgaacctcaaaatcagcctctaatatttttctcactgtctctccagagaacttgatagagagatggcagctgcaacatctggtgccgtgttaaatgggttgggatcttccttcttgagtggaggaaacaggagccaaacccttctggcctctgctattggaggcaaagttggtgctgctgttactgttaatcccagaagactcattgtggtagctgctgctgcaccaaagaagtcatggctccctggtgttagaggtggtggcaatctcgtcgacccagaatggcttgatggatcgctaccaggtgactatggttttgatccactaggccttgggaaggacccagcattcctcaaatggtacagagaagctgagctcattcat

SEQ ID NO: 3977 - DNA, 380 bp, Glycine max
  Clone ID: LIB3073-021-Q1-K1-E6
gatctggcagcagaagaacaagtagttgagaactaagaaggagaagcaaatggcttcctcaatgatctcttccccagctgttaccactgtcaaccgtgccggtgccggcatggttgctccattcactggcctcaagtccatggctggcttccccaccagaaagaccaacaatgacattacctccattgctagcaacggtggaagagtgcaatgcatgcaggtgtggccaccagttggcaagaagaagtttgagactctttcctacctgccagaccttgatgatgcacaattggcaaaggaagtagaataccttcttaggaaaggatggattccttgcttggaaatcgagttggaacacggtttcgtgtaccgtgagcaca

SEQ ID NO: 3978 - DNA, 344 bp, Glycine max
  unsure at all n locations
  Clone ID: LIB3073-021-Q1-K1-G2
aggggcttatatttgcagtaacaacagctaacgtgcaagttccaaggcagagaaaacaataatggccaccacctcggagagggatatggagaacaagagtgatcaagaagaactgaagcatcttgggtttgtgaagattgcggcaattaaagcctttgcgtgtgtgtcgaatctctacgacttcgcaaagcaaaactcgggacctttgagatctgctgttggaaccgtggaagacactgtaaccaccgntctgggtcccgtctaccaccaattcaaggcttgtcccaaccaccttcttctttttgccgacaacaatgtggatgaagctgctcacaaattcgatg

SEQ ID NO: 3979 - DNA, 386 bp, Glycine max
  Clone ID: LIB3073-021-Q1-K1-D10
ggcacaagtgagtttgttgatcgagataacgagaaacagtgtgatgaaaatgaaggtccttgttttcttcgttgctacaattttggtagcatggcaatgccatgcgtacgatatgttccctctccgaatgaacactggctatggcgcccgtactccggaggtgaaatgcgcaagttggaggcttgctgtggaagcacacaacatctttggctttgagaccattcctgaagagtgcgttgaagcaacaaaggaatacatccatggcgaacaatatagatcagactccaaaacagttaaccaacaagcttacttttatgccagagacctcgaagtccatcccaaggacacatttgtgttcagtatagatggcaccgtactctctaata

SEQ ID NO: 3980 - DNA, 398 bp, Glycine max
  Clone ID: LIB3073-021-Q1-K1-D11
gatagaagaagcagaaagagaagcattagcagaagcaagaagaactagtctaagcagaaatggcctcttcagtgatggcatctgtggccctcaaacctgcccctttcactgttgagaagtcctcagttagaggccttccctccctctcaaggaactcctcttcattcagagttgtggccagtggtggcaagaagatcaagactgacaagccttatggaattaatggtggcatggctttgagggaaggagttgatgcatctggcaggaaaggaaagggaaagggcgtttaccagtttgtagacaaatacggtgctaatgtcgatggttacagtcctatctacgacaccaaggactggtctccaaccggtgatgtctacgctggcggtacgactggcttg

SEQ ID NO: 3981 - DNA, 385 bp, Glycine max
  Clone ID: LIB3073-021-Q1-K1-D12
ggatatctggcagcagaagaacaagtagttgagaactaagaaggagaagcaaatggcttcctcaatgatctcttccccagctgttatcactgtcaaccgtgccggtgccggcatggttgctccattcactggcctcaagtccatggctggcttccccaccaggaagaccaacaatgacattacctccattgctagcaacggtggaagagtgcaatgcatgcaggtgtggccaccagttggcaagaagaagtttgagactctttcctacctgccagaccttgatgatgcacaattggcaaaggaagtagaataccttcttaggaagggatggattccttgcttggaattcgagttggagcacggtttcgtgtaccgtgagcacaac

SEQ ID NO: 3982 - DNA, 205 bp, Glycine max
  Clone ID: LIB3073-021-Q1-K1-D2
tggtgtgtgttctctttgcaacatagactgatagtttttgttattccccactatgtgcttcagacagtgtatgtccacagtttgagggtgcaatgattggcgtcactctatggcaataactatgtgctgaatttgaggcaaagttgcattgtggttctgcatatttgattcagaacattaaaagtgttgacaatcattctacata

SEQ ID NO: 3983 - DNA, 346 bp, Glycine max
  Clone ID: LIB3073-021-Q1-K1-D4
gataaccatggcgtctaactctgcttccggtctttacttccttttatgcctatcgcccatcactttgcttctttctgcgtttcgtgctcaagttcaatctcatgctccagctcccactttcaagtactgtgaaaagaatgcagactatgctgtgaaggtgagtggagtggaaatattgcctgaccccgtggagagaggagtgccattcacctttaagatcccagcttatactcctgaaccaattcataggcgggacttgttatatgaaatttcttatgctggaatagaagcacaacctgctacatttctccatgatctctgtgaggaagcaccatgcccagtacct

SEQ ID NO: 3984 - DNA, 335 bp, Glycine max
  Clone ID: LIB3073-021-Q1-K1-D5
ggagggttattggacacattcttcagcgactgcgtttttggatcggaacctcttctgcggcgtagcaatgggacactccaacgtttggaactctcacccaaaaaactacggtcctggttctcgcacttgccgtgtgtgtgggaatccacatggactgatcaggaagtatggccttatgtgctgcaggcagtgcttccgtagcaatgccaaggaaattggcttcatcaagtatcgctaaaagagcagttgtcaactacggaccaatattgtgttctggcactaggatgttttgaggatgttatgtttgaagaaacttgagactttcttttttcatc

SEQ ID NO: 3985 - DNA, 210 bp, Glycine max
  Clone ID: LIB3073-021-Q1-K1-D6
gagagcgaaagagatgtcgttggttgcaagcatgttcgggtgtggagtggtgatggcggcgtcgcaagcaatgggaattgtaaggagaagcgatggtcgattgacgatagtgtgatcgtctaggccgcagaagaaagctacggcgcatcacatgaagactcggccttggaagacgcatgcatgggatagaaaccggaagcccaccgtcta

SEQ ID NO: 3986 - DNA, 376 bp, Glycine max
  unsure at all n locations
  Clone ID: LIB3073-021-Q1-K1-D8
ccaaggtatgatgccacagcttacagccaaatcatactgaatgcaagaccgcaaggtgtcaataacaatggccctccaaaactaagcatgtttggagtaacataccttcgtctatcagatgatctactgcaaaaatcaaattttaatatattcaaaaaatttgtgctaaagatgcatgcagatcatgattactgtgcatacnctcanaagtataatcacgccataacaccattgaagccatctgcaccaaagattcccatngaggttcttctggaagcaactaaaccaacactgncattcccctggctttcagagacagacatgaaagttgatggttgatttcccaatttgtgccatgaagtaataaataatctgc

SEQ ID NO: 3987 - DNA, 419 bp, Glycine max
  Clone ID: LIB3073-021-Q1-K1-D9
agacgacagaagggggcacaagtgagtttgttgatcgagataactagaaagagtgtggtgaaaatgaaggtccttgttttcttcgttgctacaattttggtagcatggcaatgccatgcgtacgatatgttccctctccgaatggacactggctatggtgcccgtactccggaggtgaaatgcgcaagttggaggcttgctgtggaagcacacaacatctttggctttgagaccattcctgaagagtgcgttgaagcaacaaaggaatacatccatggcgaacaatatagatcagactccaaaacagttaaccaacaagcttacttttatgccagagacctcgaagtccatcccaaggacacatttgtgttcagtatagatggcaccgtactctctaatattccatactacaaaaaaca

SEQ ID NO: 3988 - DNA, 336 bp, Glycine max
  Clone ID: LIB3073-021-Q1-K1-E1
gacaccaacaccaaaacaaacccactaagatggctcccgttgtatccttcctagtgctgcttcttgcagcccttatcctcatgcctcaagggcttgctacttactacaaaccaattaagaagccaccagtgtacaagcctccagtgtacaagccaccagtgtacaaaccaccggtttataagccaaaaccaccggtttacaagccgaaaccaccggtttacaagccaccatataagaagccaccatacaagaaaccaccttatggaaagtaccctccagtagaggacaacacccatgcctaaagcaagcaatgaggtctattatctacttaataaa

SEQ ID NO: 3989 - DNA, 365 bp, Glycine max
  Clone ID: LIB3073-021-Q1-K1-E10
ggtgcacaagtgagtttgttgatcgagatagctagaaacagtgtgatgaaaatgaaagtccttgttttcttcgttgctacaattttggtagcatggcaatgccatgcgtacgatatgttccctctccgaatgaacactggctacggtgcccgtactccggaggtgaaatgcgcaagttggaggcttgctgtggaagcacacaacatctttggctttgagaccattcctgaagagtgcgttgaagcaacaaaggaatacatccatggcgaacaatatagatcagactccaaaacagttaaccaacaagcttacttttatgccagagacctcgaagtccatcccaaggacacatttgtgttcagtat

SEQ ID NO: 3990 - DNA, 352 bp, Glycine max
  Clone ID: LIB3073-021-Q1-K1-E11
ggcacaagtgaggttgttggtcgagataactagaaacagtgtgatgaaaatgaaggtccttgttttcttcgttgctacaattttggtagcatggcaatgccatgcgtacgatatgttccctctccgaatgaacactggctatggtgcccgtactccggaggtgaaatgcgcaagttggaggcttgctgtggaagcacacaacatctttggctttgagaccattcctgaagagtgcgttgaagcaacaaaggaatacatccatggcgaacaatatagatcagactccaaaacagttaaccaacaagcttacttttatgccagagacctcgaagtccattccaaggacacattt

SEQ ID NO: 3991 - DNA, 367 bp, Glycine max
  Clone ID: LIB3073-021-Q1-K1-E12
ggcagttcaattccaatatattccattctggctgtgtatttccctacctctcccttcaagatgcagatcttcgtcaagaccctcaccggcaagaccatcacccttgaggtggaaagctctgacaccatcgacaacgtcaaggccaagatccaggacaaggaaggaatccccccggaccagcaacgtctcattttcgccggaaagcaacttgaggacggccgtacccttgctgactacaacattcagaaggagagtactcttcacctcgtcctccgtctccgtggtggcatgcagatcttcgttaagacactcaccggcaagaccataaccctagaggttgaaagctccgacaccatcgataacgtca

SEQ ID NO: 3992 - DNA, 311 bp, Glycine max
  unsure at all n locations
  Clone ID: LIB3073-021-Q1-K1-E2
gacgctgcaaacgacgagggagaacgccgcgcggagctgcacggagtgaagagcctcaatgccgtcgtcaagaccaccgtcgaccgccagacggcgtgcaactgcctcaagtcggccgccagccaaatctccggcttcaacgccaacaacgccgactcgctccccggcaaatgcggagtctccatcccctacaagatcagcacctncaccaactgcactaccatcaaggtttgaagagaaagtcatggacgcatgaaaccggaaactactcactagtatatgagtagcattattaatattaagaataagat

SEQ ID NO: 3993 - DNA, 325 bp, Glycine max
  Clone ID: LIB3073-021-Q1-K1-E3
gcacaagtgagtttgttgatcgagataactggagacagtgtgatgaaaatgaaggtccttgttttcttcgttgctacaattttggtagcatggcaatgccatgcgtacgatatgttccctcttcgaatgaacactggctatggtgcccgtactccggaggtgaaatgcgcaagttggaggcttgctgtggaagcacacaacatctttggctttgagaccattcctgaagagtgcgttgaagcaacaaaggaatacatccatggcgaacaatatagatcagactccaaaacagttaaccaacaagcttacttttatgccagagacc

SEQ ID NO: 3994 - DNA, 418 bp, Glycine max
  Clone ID: LIB3073-021-Q1-K1-D1
gcagcagttcaacaagatactgaactacaagcggggtggaaggaagctgtggagaagggtcatggtgacttaaaagaaaagccttggtggcctaaaatgcagacaactgaagatctcattcaatcatgctctattatcgtttggacagcttcggctctccatgctgctgttaattttggacaatatccttatgggggcttaatcctgaaccgtccaactctagccagaaggtttatcccagctgaaggaaccccagagtatgatgagatggtgaagaatcctcaaaaggcttatctgagaacaatcacacccaagtttgagacccttattgatctttcagtgatagagatattgccaggcatgcttctgatgagatataccttggagagagggagacttcaaattggactactgataa

SEQ ID NO: 3995 - DNA, 188 bp, Glycine max
  Clone ID: LIB3073-021-Q1-K1-E5
gaaaacctaaagacgaagctcgcaaattccctcaacactggagtcactaagtgggactcggtggaaattcattctgggactcagctaagctgaccaaccatgactcaaaatggttgcattgtatcccaagggtgtgcccctctgaattctaagtcacgcaaccatgtcatacctagtacctctggctt

SEQ ID NO: 3996 - DNA, 398 bp, Glycine max
  Clone ID: LIB3073-021-Q1-K1-B12
gagagggagacggtagcagataagcctaaacaggagactcgcaaattccctcaacactggagtcgctggaaaattcattctgggactcagctgggctgaccaagcatgattcaaaatggttgcattgtatcccaagggtgtgcccctctgaattctaggtcacgcaaccatggcatacctagtacctctgcctttcgttgcgcttctctaatgcctcccaaggttgccgtctccaacatccggagcttttggggacataatctggaatgcaaacccttgttgccaagaggaatgacattgacaaacacgtttgctgtatcaagcctgcgtgtaagggagggtcaaaatcatctctttcgtgctctccctcttttaccccggttgcgcaagtctaatat

SEQ ID NO: 3997 - DNA, 331 bp, Glycine max
  Clone ID: LIB3073-021-Q1-K1-B2
ggagagaaagagggagagaattacagagcgttgtgcaacacgattacacgaccgaatcaaacccctctttctctccgaagctgcttttaatatcgtattggccttcgattgttctcctctttaatacatactgttctctcttcgatttgagggaacagtacaagagtctgagcatcggttaacccaactgcacaggtagtctccaaataatggagcctcatgatgagactggatgccaggctcctgaacgccccattctttgcattaataattggggcttctttggaagagcagctaccatgaacatgtgtttcaagtgttacaaggacat

SEQ ID NO: 3998 - DNA, 319 bp, Glycine max
  Clone ID: LIB3073-021-Q1-K1-B3
gatagatagctccttcaattagggtttttgtgagctggaagctacgatgggtaagggaacggggagtttcggtaagagaaggaacaagacccacaccctctgtgtgaggtgtggccgccgcagtttccacctccagaagagtcgttgcgccgcgtgcgctttccccgctgcgcgcaccaggaaatataactggagcgtgaaggccattaggagaaagaccaccggaactggaaggatgaggtacttgcgtaacgtgccccgtagatttaagagtggcttcagagacggtaccgaagctgcacccaggaagagaggagct

SEQ ID NO: 3999 - DNA, 294 bp, Glycine max
  Clone ID: LIB3073-021-Q1-K1-B4
ggcacaagtgagtttgttgatcgagataacgagaaacagtgtgatgaaaatgaaggtccttgttttcttcgttgctacaattttggtagcatggcaatgccatgcgtacgatatgttccctctccgaatgaacactggctatggtgcccgtactccggaggtgaaatgcgcaagttggaggcttgctgtggaagcacacaacatctttggctttgagaccattcctgaagagtgcgttgaagcaacaaaggaatacatccatggcgaacaatatagatcagactccaaaacagt

SEQ ID NO: 4000 - DNA, 356 bp, Glycine max
  Clone ID: LIB3073-021-Q1-K1-B5
gaacacagaacaaaaacaaagaaaaaaaacgcttagccaacacaaccatcatggccacctctgctattcagcaatcagcattcactggtcaaactgctctgaagcagctcaatgagttcgtccgcaagaccggtggcgccggcaaaagtcgcactaacatgcgccgcaccgtcaagaagtgctcctcagagcatttggtatggccctgaccgtcccaagtacttgggtccattctcggagcagattccatcatacctgaccggagaattccctggtgactacggatgggacactgctggattatcagctgacccggaaaccttcgccaggaaacccggagctggaagtgattcaca

SEQ ID NO: 4001 - DNA, 329 bp, Glycine max
  Clone ID: LIB3073-021-Q1-K1-B6
gaaggtgcaagagtttgttgtgagctataggctagtttatcgtgaggagaatatgaagttgtttgttttctttgttgctgcagtagttttggtagcatggccatgccatggcgcaggctaccaaaggttccctctccgaatgaaaactggctatggtgagcgttcttcggaggtaaaatgcgcaagttttaagcttgctgtggaagcacacaacatccgagcctttaaaccattcctgaagagtgcgttgaaccaaccaaagactacattaatggcgaacaatttaaatcagactctaaaacaagtaaccaacaagctttcttttatgc

SEQ ID NO: 4002 - DNA, 393 bp, Glycine max
  Clone ID: LIB3073-021-Q1-K1-B8
gcacaagtgagtttgttgatcgagataactaggagcaatgttattaaaatggagggtcttggtttcttcggtgctaccaatttggtagcattgcaatgccattcgtaccatatggtccctttttcaatggacacttgctatggtggccgtacctccgaagttgaatgcgccaagttgaagcttgctgtggaagcacacaacatctttggctttgagaccattcctgaagagtgcgttgaagcaacataggaatacatccatggcgaacaatatagatcagactccaaaacagttaaccaacaagcttacttttatgccagagacctcgaagtccatcccaaggacacatttgtgttcagtttagatggcaccctactctctaaatattcatac

SEQ ID NO: 4003 - DNA, 343 bp, Glycine max
  Clone ID: LIB3073-021-Q1-K1-B9
ggcttttctctcgatcagggtttcccggcgtctgcgagctcgtttcgttctcgaagaatcgatctgcgataatgactcgcggtaaccagagggatcgtgatcgcgaaagggctcaggctagaaccggtggtaaaggcaagcagaaagatgatgggttgacccctgaacagcgcagggaaagagatgcgaaggcgctgcaggagaaggcggcaaagaaagcggcacaggatgcaagaaggaataatgcaagtggaaccaaaaaataggcaataattcaatgagtggtttgagttcgacattgggtgttgtagacatggaatttatggaaaatttatggtgccgt

SEQ ID NO: 4004 - DNA, 338 bp, Glycine max
  Clone ID: LIB3073-021-Q1-K1-C1
ggaacaaaaacttcctttgacagacgaaacgctgcgttgagagtagtggcgcccaaattctgcactgaaccgaactctctgttcgttcgcgttgcgctctctccgaaggattcgtttcaattcgaaaactctctgaagtgttctgatggatgtggagtggtctgattcacggtacgatggtagaaatgataaggaggattccccggtgagggagcaatatgacaatgatggggcggagaaatctagcaagcatagcggcaaggacaggaagaaggagcaccgtcgggaacatccaaaggatgcttcaaaagaaagaagggaacggaagaaggaagata

SEQ ID NO: 4005 - DNA, 327 bp, Glycine max
  Clone ID: LIB3073-021-Q1-K1-C10
tcccatccattcttcaaatggaagagctccgtgcttctgtgctcgcccttgtattccttcttgtcatactatttcaggaaggattggtaacatgtatgaagaatgaagactgatcagaagaatggggatatgttcaagttagactaaaagcccacttgttctggtggctttacagaagtccatacagagtggagaatcccttcaagccttggccaatcattctctggcttcagggatgaccaggctcttcaggagttgggtttggatatttcttataggttgtgtcttactatgctaattcgaagccacgaaatttctcatggatta

SEQ ID NO: 4006 - DNA, 158 bp, Glycine max
  Clone ID: LIB3073-021-Q1-K1-C11
tcaaacgaagaaaggcttatggtggataccgaggcacccagagacgaggaagggcgtagtaagcgacgaaatgcttcggggagttgaaaataagcgtagatccggggattcccgatataggtcaacctttcgaactgctgctgaatccacgggcaggt

SEQ ID NO: 4007 - DNA, 381 bp, Glycine max
  Clone ID: LIB3073-021-Q1-K1-C12
ggagcagaatcttcaggccaagccaggtaagcacaaccaaagcaacaccccaaatggcttcagcttctgttcccatggcgttgtcactgagctctgttaccaacaacaacaagccttcatccgaagccttcttcaggccactacccctacgccaaccaaagaggaccctcttcaccacgaagacagtgtcaaactccaagcctcaaatcaatgcatctttgaaggagaaggcagttgccggactcacagcagcttctgtgacagcatctatggtggttccggaggtggctcatgctgctggatatgagttctccccttccctaaagaactttctactcagcatctttgctggtggggttgttctagcagccatatttggag

SEQ ID NO: 4008 - DNA, 406 bp, Glycine max
  unsure at all n locations
  Clone ID: LIB3073-021-Q1-K1-C2
ggtcttggtgtgaaccatagccatggctacttgatcaaccacattattgctatcatcactcatacctgcaagcatcccatcattcaactctggaaaccattcagtttttttgcttcaaaaccgttctttgaatcgacccaagaagagagttttcctccgtggtcaagcagccaagccccctattggtgtggaaattccaaaggtgcaatcttaatttaagcctntcgttctttgggtcactaaaactgcagaggtatggaactctagagcttgcatgattggaatcatntgagtttttattgtagagtttataataaacaagggcatacttcaagtgattggggttgatgttgcaaaggccttaataatcctctctgaacattatttttggctgtgctcgtaaatg

SEQ ID NO: 4009 - DNA, 321 bp, Glycine max
  Clone ID: LIB3073-021-Q1-K1-C3
gccacaaaaaccaagtactacaagggaaggggaacttagctacaagctaaggaaggatcaaagagaatggctcaagcaatggcatcaatgactagcttacgtggttcctctcaggctgtgttggaaggtagccttggctccacacgcttgaatgtggggagtggaagcagggtggcctcagtcacacgtgcagggttcacagttagagcacagcaacaacaagtgaatggtggtgaggtacaaagtagccgtagggcagtgctttcacttgttgctgctggtttgaccactggctcttttgttcaaactgtgcttgctgat

SEQ ID NO: 4010 - DNA, 297 bp, Glycine max
  Clone ID: LIB3073-021-Q1-K1-C6
gaagcacaacatctctatcgagtaaattagctatgaagcctaccctactattatccctttccttcctgcctctctttgctttcctggctctttcagaagatgttgaacaagttgtggacataagtggcaaccccattttcccaggtggcacatattacattatgccatcaacttggggcgctgccggtggtggattgaaactaggccggacaggaaactcaaacttgccagttactggtttgcaagattactcagaaatcttccgtggcacaccagtcaaattcagcatacctggga

SEQ ID NO: 4011 - DNA, 342 bp, Glycine max
  Clone ID: LIB3073-021-Q1-K1-C7
gagggtttttgtcgttgcgactaagagttgcggcttcttccgccactcagcacttcgctccctctgtgcttcaccaaccatggccgaaatcgaagctaccgttccagatccctctcaaatcgacgtcaaacttttcaaccgctggagcttcgacgacgttgaggttactgatatgtctctggctgattacattggagtgtccccgtcaaagcatgctacatatgttcctcacactgctggtaggtactcagtgaagaggttcaagaaggcgcagtgccccattgttgagagactcaccaactctctcatgatgcacggaaagaacaatggaaagaagctcat

SEQ ID NO: 4012 - DNA, 305 bp, Glycine max
  unsure at all n locations
  Clone ID: LIB3073-021-Q1-K1-C8
gatcttcccaatcttcatctccaacaagtggttctgtaaccatggcatccaccactctatcccctacaaccccttctcagctatgctcaagaaagaatgggattttcagtccctcacaggcacttcttgtgaagccagtgaagaagcagatgatggggaagagcaagggaatgagaattgcatgccaagccaccagcattcctgctgatagagtccctgacatgggcaaaagacagctcatgaatctgcttcttcttggtgccatttcactcccctttgcttgaatgctntattcctacacctac

SEQ ID NO: 4013 - DNA, 371 bp, Glycine max
  Clone ID: LIB3073-021-Q1-K1-B11
gattgtatatcatttacaatttcagtctcgctctctctctgtctctctctctctagacttagattttgtgaatggctgaagtggaagagggacaggtcatcggcgtccacaccgttgatgagtggaagctgcaactccagaatgcaaaagactccaaaaaactgattgtggtggattttactgcttcctggtgtggtccatgccgttttatggccccagttcttgcagagattgcaaagaaaactcctgaattgatcttcctcaaagtggatgtggatgaagtgaggcctgttgctgaggaatattccattgaggccatgccaaccttcctcttcttgaaagatggcgagatcgtggacaaggtggttggt

SEQ ID NO: 4014 - DNA, 243 bp, Glycine max
  Clone ID: LIB3073-020-Q1-K1-H2
tcgaagacgacagaaagggacacccacacccaaacaaacccacttagatgggttcctttgggggcctcctaatgctggttcttgcggcccttatactcatgcctcaagggcttggttcttactacaaaccgatttagaagccaccactgtgcaagccctcagtgtgcaagccaccactgtgcaaaccaccgggttatatgccaaaaccaccgggtttcaagccgaaaccaccggttttcaagc

SEQ ID NO: 4015 - DNA, 365 bp, Glycine max
  Clone ID: LIB3073-020-Q1-K1-H3
gagaaagagaagcattagcaaaagcaagaagaactagtgtaagcagaaatggcctcttcagtgatggcatctgtggccctcaaacctgcccctttcactgttgagaagtcctcagttaggggccttccctccctctcaaggaactcctcttcattcagagttgtggccagtggtggcaagaagatcaagactgacaagccttatggaattaatggtggcatggctttgagggaaggagttgatgcatctggcaggaaaggaaagggaaagggcgtttaccagtttgtagacaaatacggtgctaatgtcgatggttacagtcctatctacgacaccaaggactggtctccaaccggtgatgtcta

SEQ ID NO: 4016 - DNA, 391 bp, Glycine max
  Clone ID: LIB3073-020-Q1-K1-H4
tggaaactaaattccaacaagttcctaccatagtctgaggaaagtgagtgagagaaagagatcgcagacacagagcagaatggcttctacccaatgtttcttgcaccaccatgctcttactacccctgccagtgccagatccccatcactacgcatcttggttagcaccaagcctaaccagcttgtttgcaaggcacagaaacaacaaacaccacaagaggatattgatgtcagcccaatctctcgccggttagctctaactgtgctcattggtgctgctgctgttggctccaaagtccaacctgctgatgcagcctatggtgaagctgccaatgtgtttggaaagccaaagacagacacagatttcctgccatacaatggagatggattc

SEQ ID NO: 4017 - DNA, 325 bp, Glycine max
  Clone ID: LIB3073-020-Q1-K1-H5
ggttctagtgtgtgattgtttgttgttgtaactcgttcttcttcttttgttgttctgtgtttgtgtttgttttttctctcacctgaaaatgtcttgctgcggtggtaactgtggttgcggaagctcctgcaagtgcggcaacggctgcggaggctgcaagatgtacccagacttgagctacactgagtcaaccaccaccgagaccttggtcatgggagtggcacctgttaaggctcaatttgagggtgctgaaatgggtgtgcccgctgagaacgatggctgcaaatgtggaccaaactgctcctgcaacccctgcacttgcaag

SEQ ID NO: 4018 - DNA, 349 bp, Glycine max
  Clone ID: LIB3073-020-Q1-K1-H6
gattgcatgttacatcatagcccttagaacagccagaggaacccagaagataaatctttcaaagaaaaaaggagagtgcttagagagagagcaaaacatattattttcattttcatctttttttgagtatcaacaaatggcaaccactgtgatgaccactctcccccaattcagtggtcttagaccccaattctcagctgcccctgtgaagaacttggttgctgtgcaacccatgagtcgcaaggggaagggtgcattgggagctcgatgtgactacattggttcatccactaatctgattatggtggcttctacaaccctgatgctgtttgctggaaggtttggattg

SEQ ID NO: 4019 - DNA, 354 bp, Glycine max
  Clone ID: LIB3073-020-Q1-K1-H7
gataccaaaaacagggcacaagccaagtgaaagtgagaaaaaataaaaatcaaagagcataatgtcagggatcattcacaagattggggagacccttcatgtgggagggcacaagaagaaggaggagcataagggtgagcaccatgctggagaatacaaaggggagcaccatggtgaacacagtagtgagtacaaaggagagcatcatggtgaacacaaagctggagagtaccatggtgagcacaagccagagcacaaagaggggttcctagacaaagtcaaggacaagatccatggtgagggcggcgccgccgagggcgagaagaagatgaaggagaagaagaagaaggagca

SEQ ID NO: 4020 - DNA, 256 bp, Glycine max
  Clone ID: LIB3073-020-Q1-K1-H9
gatagcaagtagcaaggagactagttctgtattcaggttacattgcaaaaatggcatcattcaccatgacagcttctatctttggctgcccagctgtcaccaaacggtcggcagtggctgcgcagaggagattactcgtagtgagtgctgccaaagctgaaggggaaaaggtcagttatgacaacaatgatagcaatggaaggaggaacttgatgttcgcttgggctgctgctgcttgtttctcttgtgctgggat

SEQ ID NO: 4021 - DNA, 294 bp, Glycine max
  Clone ID: LIB3073-021-Q1-K1-A1
gaaaaagaaaaaaaagagtctaaagaaatataactaatattctttagaataatcaaaaagaatattaaattcaaataaattttagatagaaaaaagacttaaaaaggaggatttgaaatgcgagatctaaaaacatatctttccgtggcaccagtagtaagtactctatggttcggggctttggcgggtctcttgatagagatcaatcggttttttccagatgcattgatattcccttttttttcattctaggtattgacacggaaaggagtgaagaagattatagatccaatt

SEQ ID NO: 4022 - DNA, 364 bp, Glycine max
  Clone ID: LIB3073-021-Q1-K1-A10
ttataccatagaagaagcacaaagagaagcattagcactaggagcagcaacaactagtctcagctgaaatggcctcttcagtgatggcatctgtggccctcaaacctgcccctttcactgttgagaagtcctcagtgagaggccttccctctctctcaaggaactcttcttcattcagagttgtggccagtggcaagaagatcaagactgacaagccttatggaattaatggtggcatggctttgagggaaggagttgatgcatctggcaggaaaggaaagggaaagggcgtttaccagtttgtagacaaatacggtgctaatgtcgatggttacagtcctatctacgacaccaaggactggtc

SEQ ID NO: 4023 - DNA, 398 bp, Glycine max
  Clone ID: LIB3073-021-Q1-K1-A12
ggaaaaactctgaccgagtccgagaggcatcatggcgacactggattccgacgtgaccgtgtttccggccggcgaagcctctagcagcgccggtccttcttcgtccaccaagaagccgaagcgtttcgagatcaagaagtggaatgcggtttccctctgggcttgggatattgtcgtggataattgcgctatttgtcggaaccatatcatggatctctgtattgagtgccaggccaaccaggctagcgccactagcgaggaatgcactgtagcttggggagtttgtaaccatgcttttcacttccattgcataagccgatggctcaagacccgtcaagtatgtcctctagataatagcgagtgggaatttcagaaatacggtcactagaactttgatg

SEQ ID NO: 4024 - DNA, 369 bp, Glycine max
  Clone ID: LIB3073-021-Q1-K1-A2
gaaactcaagtaggctatactaaggtgaaaaaggagagatggcagctgcaacatctagtgctgtgttaaacgggtttggatctcacttcttgtgtggaggaaagaggagccatgcccttcttgctgctagcattggagggaaagttggtgcttctgttagtcctaaaagagttattgtggcagttgctgctgcaccaaagaagtcatggatccccgctgtaaaaggtggtgggagtttcatagacccagaatggcttgatggctcgctaccaggtgactatggttttgacccactaggactaggaaaggacccggcattcctgaaatggtatagagaagctggactcattcatgggaggttggcaatgg

SEQ ID NO: 4025 - DNA, 295 bp, Glycine max
  Clone ID: LIB3073-021-Q1-K1-A3
gattccaatcaattaactcgtattttatatgtatgatttttaattcgcggtaggaattcgttttctctgatcgggatctggaagggaagcgaatcgacatgggtttcttggtgacgacgctgatcttcgtagtgatcggaatcatcgcgtgcctctgcaccagaatttgctgcaacagaggaccttctaccaatctatttcaccttactttggtaattactggaacaatttgctgctggatgatgtgggcgattgtatatctggcacaaatgaaaccactcattgtgtctatact

SEQ ID NO: 4026 - DNA, 325 bp, Glycine max
  Clone ID: LIB3073-021-Q1-K1-A4
gacaaccctagctagcagtcgctcagcattgtgtgcccacaaagcagctccttttcctgttccgttgagagaagatgggattttgggggacgcgggtgatggagattgtgaagaagcatgattctggagggctggtttggaagagaatcaagctcaccaccacccgaaaagccaatgctaagaagcgtcttcttcgggtttggcagaatgaagctgtcctcaaagcctgttctgccactcccaacgaacctcaacctacaccagtggctacaccagtggctagttaagttcaagcccacccatctcaatttcattacttttcttt

SEQ ID NO: 4027 - DNA, 318 bp, Glycine max
  Clone ID: LIB3073-021-Q1-K1-A6
tgggacaagtgagtttgttgatcgagataactaggaacagtgtgatgaaaatgaaggtccttgttttcttcgttgctacaattttggtagcatggcaatgccatgcgtacgatatgttccctctccgaatgaacactggctatggtgcccgtactccggaggtgaaatgcgcaagttggaggcttgctgtggaagcacacaacatctttggctttgagatcattcctgaagagtgcgttgaagcaacataggaatacatccatggcgaacaatatagatcagactccaaaacagttaaaccaacagcttactttttat

SEQ ID NO: 4028 - DNA, 261 bp, Glycine max
  Clone ID: LIB3073-021-Q1-K1-A7
ggttctagtgtgtgattgtttgttgttgtgactcgttcttcttcttttgttgttctgtgtttgtgtttgttttttctctcacctgaaaatgtcttgctgcggtggtaactgtggttgctgaagctcctgcaagtgcggcaacggctgctgaggctgcaagatgtacccagacttgagctacactgagtcaaccaccaccgagaccttggtcatgggagtggcacctgttaaggctcaatttgagggtgctgaaatgggtgt

SEQ ID NO: 4029 - DNA, 378 bp, Glycine max
  Clone ID: LIB3073-021-Q1-K1-A8
agaatatgaaaaagaaaaaaaagattctagagaaatataactaatattctttagaataatcaaaaagaatattaaattcaaataaattttagatagaaaaagacttaaaaaggaggatttgaaatgcgagatctaaaaacatatctttccgtggcaccagtagtaagtactctatggttcggggctttggcgggtctcttgatagagatcaatcgtttttttccagatgcattgatattcccttttttttcattctagttattgacacggaaaggggtgaagaagattatagatccaattaagtattaaatatatgtaattaatatgtaattaatctcctcttctttaattcggcttttaattccttctttttttaca

SEQ ID NO: 4030 - DNA, 309 bp, Glycine max
  Clone ID: LIB3073-020-Q1-K1-H11
gacatcacgtcacatcgcagagagagagatccatcgatcaattaatttccaatggccgatcagctcaccgacgaacagatctctgagttcaaggaagcctttagcctcttcgacaaggacggcgatggttgtattaccaccaaggaacttgggactgtgatgcggtcgcttgggcagaacccaactgaggctgagctgcaggacatgataaatgaggttgatgctgatgggaatggtaccattgatttcccagaattcctcaatctcatggcgcgcaagatgaaagacactgattcagaggaagagctg

SEQ ID NO: 4031 - DNA, 171 bp, Glycine max
  Clone ID: LIB3073-021-Q1-K1-A9
tataacggaacctcgcctgagcacacacaaccggttcactgcaacagatgcgatgacatatcacaatggcgctaaataagcctttctggtctaaaatacatatcatgcaacatccctgggaacacaccatctttcatccaactcaaagcttggaaacaacattctggcact

SEQ ID NO: 4032 - DNA, 386 bp, Glycine max
  Clone ID: LIB3073-021-Q1-K1-B1
gaatatgaaaaagaaaaaaagattctaaagaaggataactaatattctttagaataatcaaaaagaatattaaattcaaataaattttagatagaaaaaagacttaaaaaggaggatttgaaatgcgagatctaaaaacatatctttccgtggcaccagtagtaagtactctatggttcggggctttggcgggtctcttgatagagatcaatcgtttttttccagatgcattgatattcccttttttttcattctagttattgacacggaaaggggtgaagaagattatagatccaattaagtattaaatatatggtaataatatgtaattaatctcctcttctttaatttcgtcttttaatttcttctttttttttacaaattgg

SEQ ID NO: 4033 - DNA, 372 bp, Glycine max
  Clone ID: LIB3073-021-Q1-K1-B10
aagaagaagaagaaggagcagggccatgagcatggccatgacagcagcagcagcagtgacagtgattaaactgctgcatcacctatatatttaaaaggtttatgggaccatagtagcgagggctgtgccttaatttctctctctctctctctctctctctctctctctctctctttttcctttttccctatcttgtgatctatttatgagtgagaaaaacaaaagtgagaaattgtgcgtgtatctggttgctaattcgagtgctattagtctgtggtttggttggtttgtaaccccgctacttgggttatgtttgattgtatattatcctagagaaataaaaattttaaattatcagtacgtattggtatt

SEQ ID NO: 4034 - DNA, 323 bp, Glycine max
  Clone ID: LIB3073-020-Q1-K1-F12
gatagaagaagcacaaagagaagcattagcactaggagcagcaacaactagtctcagctgaaatggcctcttcagtgatggcatctgtggccctcaaacctgcccctttcactgttgagaagtcctcagtgagaggccttccctctctctcaaggaactcttcttcattcagagttgtggccagtggcaagaagatcaagactgacaaaccttatggaattaatggtggcatggctttgagggatggaactgatgcatctggcaggaaaggaaagggaaagggtgtttaccagtttgtagacaaatacggtgctaatgtcgat

SEQ ID NO: 4035 - DNA, 295 bp, Glycine max
  Clone ID: LIB3073-020-Q1-K1-F3
tctgggatcttgtcctttggatctgaaacactctctgagctttctttcttagaaaacgatgtcgtctcaacaacaagaccttcctcttcatctcaactttaacctcaacctcttatggtggacctcactctcattcatgaagctgattctaaaggagctggtctctctctcagctaaattgtttttatttggcttctttgtgtgatgtgtctcttttcgaaatctgcattttgagtttctatgtaattggtactcattagtacttcactgcttcacattgcattatctgtatctg

SEQ ID NO: 4036 - DNA, 367 bp, Glycine max
  Clone ID: LIB3073-020-Q1-K1-F4
ggagttcaaacaaatcaaagccatggccacctccaacttctgtattgttctctccgtctccctagccttctttttggtgctacttaccaaggcacactcgaccgataccgtttctttcaccttcaacaagttcaacccagtccaaccaaacattatgctccaaaaagatgctagtatttcatcctctggggtgttacaactcaccaaagttggcagcaacggcgtgcccacctcgggatctctcggtcgtgccctttacgctgccccaatccagatttgggacagcgaaaccggcaaggtagccagctgggctacatcctttaaattcaacattttcgcacccaacaaatcaaactcagctgacggg

SEQ ID NO: 4037 - DNA, 246 bp, Glycine max
  Clone ID: LIB3073-020-Q1-K1-F7
gaggtacgaaaagcgaagggtcatttgcacgatctgtctggtgtctacctccacccttcttctcattatttttgtgtataaatatatccattttcatctaacacatcacaaaccaaacaactactactactactgcacacactatttcgctctctctctcattgtatggccgccaattcgagtagccgagggatcaccgccttggggaagcgagtcgccaaccagatctggactttcaaccccccc

SEQ ID NO: 4038 - DNA, 245 bp, Glycine max
  Clone ID: LIB3073-020-Q1-K1-F9
gctctgaaaagcaacactttatgccgaaagactttatgttgggatttgggaattagggttattcccgtggcgaaaatgattgagggggttttgaacgatcgattggggaaaaaagtgcccgcgaaatgcaaccacaattataccatctgcgacctgaaaaagcttgtggcggctcagactggcacaagagccgacaagatccgcatccagaagtggtgcaccatctacaaggatcacatcactct

SEQ ID NO: 4039 - DNA, 410 bp, Glycine max
  unsure at all n locations
  Clone ID: LIB3073-020-Q1-K1-G1
tgagggggcacaagtngagtttgttggatcgaggatggctagaaacagtgtgatgaagaatgaaggtcccttgttttctttcgttgctacaattnttggtagcatggcaatgccatgcgtacgatatgttccctctccgaatgaacactggctatggtgcccgtactccggaggtgaaatgcgcaagttggaggcttgctgtggaagcacacaacatctttggccttgagaccattcctgaagagtgcgttgaagcaacaaaggaatacatccatggcgaacaatatagatcagactccaaaacagttaaccaacaagcttacttttatgccagagacctcgaagtccatcccaaagacacatttgtgttcagtatagatggcaccgtactctcttatattncatactac

SEQ ID NO: 4040 - DNA, 315 bp, Glycine max
  Clone ID: LIB3073-020-Q1-K1-G10
ggcgcgcattctcattcaccaatggcgttcaccgtcgccattggcagtggcgtggctataatcccctgcggcaataccaccaccgcaattccttacacccgtggtggtggtcaccgaacgagaagaaagctccatctccatgtggcgcgcgcgaagaagcccctgaacggcgacgacgtttccatttacactgagctcctcaaaaccgaagtttccgttttcgaaaataagcccctcggcgacaacgatgccgctttgaagttcgtagagaagatagaccgtcaatttcaataccccgatttctgggaaagatcc

SEQ ID NO: 4041 - DNA, 316 bp, Glycine max
  Clone ID: LIB3073-020-Q1-K1-G11
ggtctttctcagaagacaactcaaaaaaaccatggacgtgggtcagatgcagagacagtggatcgactacaccaaatccctcttccttgagggcttcctggatggtcagtttctgcaacttcagcagcttcaagatgagaacaaccctgactttgtggtcgaagttgtctctctcttctttgaagattctgaaaggcttctcaaagatctcacctttgccctagatcagaatggtgttgacttcaaaaaagttgatgctcatgtgcaccagttaaagggtagcagttcaagcataggcgcgcaaagggtgaaaaat

SEQ ID NO: 4042 - DNA, 280 bp, Glycine max
  Clone ID: LIB3073-020-Q1-K1-G12
gaagcaactaagcaagatatcatcacattgcaaagaaaatacacattacattactaagtctttgttcatttgagtagtagtgatggctagcctcaaggttgcatgtgtggttgctgtgatgtgcatggttgtggtggccatgagtgctgcacccatggcacaggccgcaatcacgtgcgggcaggtcgccggcgacatgtctccgtgcttcagttatcttcgaagcggcggaaaaccgtcgcaggcctgctgcaacggagtgaagtccctcagcagcgcg

SEQ ID NO: 4043 - DNA, 336 bp, Glycine max
  Clone ID: LIB3073-020-Q1-K1-G3
tccgctgcgaaaaagacgacagaagaagaagcgagcaaacaaacaactagcaagggaagaaagaaactacagaaaagaaatggcttccacttctgcagtttcaatggctatgccagtaacttatgctagccagaagagggtggtgcctagctcggatgcattcttcaagccactgcctctacggtcttccaaggcagtgacagcatcaaaactcaatggaaggtttcaagtgagggcctccatgaaggagaaagttgtgacggggctcaccgcagctgcattgacagcttcaatgatggttcctgatgtggctgaggctaccgttacaccttctct

SEQ ID NO: 4044 - DNA, 359 bp, Glycine max
  Clone ID: LIB3073-020-Q1-K1-G4
gcattatatttgagttcaaacaaatcaaagccatggccacctccaacttctctattgttctctccgtctccctagccttctttttggtgctacttaccaaggcacactcgaccgataccgtttctttcaccttcaacaagttcaacccagtccaaccaaacattatgctccaaaaagatgctagtatttcatcctctggggtgttacaactcaccaaagttggcagcaacggcgtgcccacctcgggatctctcggtcgtgccctttacgctgccccaatccagatttgggacagcgaaaccggcaaggtagccagctgggctacatcctttaaattcaacattttcgcacccaacaaa

SEQ ID NO: 4045 - DNA, 402 bp, Glycine max
  unsure at all n locations
  Clone ID: LIB3073-020-Q1-K1-G5
aagacgacagaagggggcgaagggtaagaaaggagagagagaagctgcgcaccgtttcatactagtgctgattgctgaaactgccatcgctcgccatttgcacaaagatcccaacaacacttgaaagttgaaacagaaaaacaccaatccctcatcgtactgttccgttatcaattctcgtgtttaagtctgcctacgttccgcttcctttgccatcagagcaagtccacgctttgaacccagtcgggtcacacatggctacaccaccacaatgggaatttagctgtgacatggaaatgtattttggatcggaggagaatgcttccattgtgtatgctgccttagcagttgacaaagagttacagnctgataaagtaaaacgacttatgacagtgtctgatg

SEQ ID NO: 4046 - DNA, 351 bp, Glycine max
  Clone ID: LIB3073-020-Q1-K1-G6
ggaagcatagcagcatcatacaaagcattgaattcaaaaacttaagttcattccttgtgttttgctttcttcctcaaaaccaaacatgtcgaacacgtgcggcaactgcgactgcgctgacaagactagctgcaccaagggaaacagctatggtgttattgtagagactgagaagagttacatcgagactgttgtcatggatgttccagcagctgagcatgatgggaagtgcaagtgtggcactaactgcacttgcacggactgcacctgtggccattaaggaatatgtatgaaaatgtaattgccatgtgtttgggcatacaaatatccaaataatgtaatcttcgtatg

SEQ ID NO: 4047 - DNA, 104 bp, Glycine max
  Clone ID: LIB3073-020-Q1-K1-G7
ggcagccaaaaaaagaaaatcctcacccattttctgggtagccaaacactctggaattctcagttatgtcgggggaagcgtatgtgggtgatcacctactgggg

SEQ ID NO: 4048 - DNA, 147 bp, Glycine max
  Clone ID: LIB3073-020-Q1-K1-G8
gaatctctgaaagcacaagtcacaaccgaaactgtgtccatctctcttacataatgacaactatatcaaattgctcccttcttttgctcatcctaatgcaatccactctccacatagcttccaccctctcaacccccaacaacttta

SEQ ID NO: 4049 - DNA, 76 bp, Glycine max
  Clone ID: LIB3073-020-Q1-K1-G9
ggagtttggtgatcgagataactagaaacagggtgatgaaaatgaaaggccttggtttcttcggtggtacaatttt

SEQ ID NO: 4050 - DNA, 264 bp, Glycine max
  Clone ID: LIB3073-020-Q1-K1-H1
gagacttgagttatggcacttgttgaagcctatgcttctctttcaatctcttctgttgctcgtcttttcactccaccaaaatgctctcccaccgctcactttcctcatcggaattttgttgcaactcgaccatcattcatcgttggttccccactcttgattcaaagaaatcatggaaggaaagctgcatgcaaagcaatccctgttccaataagatgtgagcaaagtacccaacaagggaatggtctggatgtgtggctaggc

SEQ ID NO: 4051 - DNA, 289 bp, Glycine max
  unsure at all n locations
  Clone ID: LIB3073-020-Q1-K1-H10
gacgtagtattatttcattgatttctccctcttcgctctctctcagtgaccagagacagatgatgatggagatggcgaagcgaaacgctgtcgttgcggcactcgcggcgttggtgctactcgcggcgagtgtggcggtggatgctcangagaactcggacgtgaagacgctggtgaagtacaagcacgggaagaagtactgcgacaaaggatgggaatgtaagggctggtcaatttactgttgtaacctcaccattaccgattatttccagacctaccagttcgagaa

SEQ ID NO: 4052 - DNA, 314 bp, Glycine max
  Clone ID: LIB3073-020-Q1-K1-F11
ggcacaagtgagtttgttgatcgagataactagaaacagtgtgatgaaaatgaaggtccttgttttcttcgttgctacaattttggtagcatggcaatgccatgcgtacgatatgttccctctccgaatgaacactggctatggtgcccgtactccggaggtgaaatgcgcaagttggaggcttgctgtggaagcacacaacatctttggctttgagaccattcctgaagagtgcgttgaagcaacaaaggaatacatccatggcgaacaatatagatcagactccaaaacagttaaccaacaagcttactttt

SEQ ID NO: 4053 - DNA, 322 bp, Glycine max
  Clone ID: LIB3073-020-Q1-K1-D12
ggaacatggctacattctttggttcccctccaattttctccctccccctcactagaactcaccacatttcttcatcatcacaaactccaccaccaactcctcctccacaatctcagcctccaacttcgtctccacagcagctaagaacaacaaatttgaatgatgaatcaatgcaagtgtgcactgaagctaagcaacagaagcccatcaaaccatccactaaggttgaatccacagattggatagccacttccttgaccagaaggtttgggataagagctggtcttgcatgggttggctttcttgcatttggtgtcatctc

SEQ ID NO: 4054 - DNA, 356 bp, Glycine max
  Clone ID: LIB3073-020-Q1-K1-D3
ggaaaacggaaaacctatcacagcacgctctgtcatcggtcactcatggcaacaacactcatgtttttccgaccaaccatgatccgggcctccgctggttctcccgccaagcccgacccgagaaacaggaagcccgtttcctccaactggtgggctcctctgttcggatggcccgcggatccggactacatgggcccattgcagaaggcgagtgagaaatcggatccggagcgggaagtgggcctggacctgggccggcccagatccaagttcacagcggggtgcttcacggagaagaaggcgaaagagctgagaaagaagaccgtggaaacgtcgacgtttcatgacatcatgta

SEQ ID NO: 4055 - DNA, 322 bp, Glycine max
  Clone ID: LIB3073-020-Q1-K1-D4
aggtctgttgagtgtagaacgctgctgccgaaacccttcgggaaccctaaggtaagtgagtaatcagtggttgagaatggtggagaaggcgaagggtagaaaggaggaggtggttacccgtgagtacaccattaaccttcacatgcgccttcatggctgcacatttaagaagaaagctcctaaagctattaatgagataaggaaatttgcccaaaaggccatggtgaccaatgatgtgagggtggatgtgaagttaaacaagtttgtctgtagccagggaatcaggagtgttccaaggaggattagagttagatttgctcgc

SEQ ID NO: 4056 - DNA, 383 bp, Glycine max
  unsure at all n locations
  Clone ID: LIB3073-020-Q1-K1-D5
gatctggcagcagaagaacaagtagttgagaactaagagggagaagcaaatggcttcctcaatgatctcttccccagctgttaccactgtcaaccgtgccggtgccggcatggttgctccattcactggccttcaagtccatggctggcttccccaccaggaagaccaacaatgacattacctccattgctagcaacggtggaagagtgcaatgcatgcaggtgtggccaccagttggcaagaagaagtttgagactctttcctacctgccagaccttgatgatgcacaattggcaaaggaagtagaataccttcttaggaagggatggattccttgcttggaattcgagttggagcacggnttcgtgtaccgtgagcacaac

SEQ ID NO: 4057 - DNA, 346 bp, Glycine max
  Clone ID: LIB3073-020-Q1-K1-D8
gggatttccaaagtttttaatagagggtaagtctcaaaaaatcgaagaattacagacgaatatgcaaaaaaaactgaattgtgtgaatcgaaaactaaacattgctattgtaaaagttgcaaatgcttataaacaccctaatattattgcagaatttatagctggacaattaaagaatagagtttcgtttcgtaaagcaatgaaaaaagctattgaattaactgaacaggcgggtacaaaaggagttcaagtacaaattgcaggacgtatcgacggaaaagaaattgcacgtgttgaatggatcagagaaggtagagttcctctacaaaccattcgagcgaaaatc

SEQ ID NO: 4058 - DNA, 333 bp, Glycine max
  Clone ID: LIB3073-020-Q1-K1-D9
gacattactcacagaaggagaaggggggggacagagagatgatggagttgaagaaggtggcattggtgaaggtagctttgttgcttttcctgttagggttcagtgcaaccactgcagatgctactcgcttcgacccacgttccttcattactcaggtgctccccaacaattactatgtaaaaatcaaatccacagccactgcatgttgtgatctttgtctttgcacaaaatcaaaccctccccagtgccaatgtgtatatgggagcgagacaggctgccactcatgttgcaaaaattgcatttgcaataagaaatttcctcggacgtgttttt

SEQ ID NO: 4059 - DNA, 135 bp, Glycine max
  Clone ID: LIB3073-020-Q1-K1-E1
ggttctagtgtgtgattgtttgttgttgtaacgcgttggtcttcttttggtgttctgtgtttgtgtttgttttttctctcacctgaaaatgtcttgctgcggtggtaactgtggttgcggaagctcctgcaagtg

SEQ ID NO: 4060 - DNA, 280 bp, Glycine max
  Clone ID: LIB3073-020-Q1-K1-E10
ggctcactctctagggtttttatttctctctgctctctgcatcgcttcaggttcttctgaaaagatgtctcgcgtgtatgttggtaacttggattcacgagtcaccgagagagatctcgaagacgaattccgtgttttcggagttgttcggagtgtttgggttgcacgtagaccacctggttatgcttttattgactttgatgatcgcagagatgcacaggatgctatccgtgaattggatggcaagaatggttggagggttgagctttctcacaactct

SEQ ID NO: 4061 - DNA, 315 bp, Glycine max
  Clone ID: LIB3073-020-Q1-K1-E11
ggcaaaactaagtggaataagagctgaaaaaccctgataacaatgggaggaaaatgtccgcacaggaacgtgaagaagagaagatattctcacaagaccgtgcggcgaaccaaatttgagctgaaaagggacgacatggtttatgcgcagctcaacaaacccgatcaagagagaccccctttacccgtcgacgaagatttgcctgggatgggccagtactattgccttcactgcgatcggtactttgccaatataactgtgagggatgagcactttaagaccaaacgacacaagaagcgtttagaacaaatgatg

SEQ ID NO: 4062 - DNA, 160 bp, Glycine max
  Clone ID: LIB3073-020-Q1-K1-E2
tccaattcgagcgggccgttttttttataggtctttttgtgtctttttgggaaatgtttttgatattggtaaccgaggggccttattcaaaattacccgacctttttccggagcgaaccatttcccaacctttaaaaaaaaaaaaaggaggcacccttgg

SEQ ID NO: 4063 - DNA, 365 bp, Glycine max
  unsure at all n locations
  Clone ID: LIB3073-020-Q1-K1-E4
actcagctttatccataaagcacaatttttttgcttgaacgggccttaccttacctgaagatggcttcngtgtcctttgccgtgggattattaccttgctcttcttcttcttgctatacccgcgtctcttatggttcagttcgatttcccgtattgaacaacgccaactcactgaaactcagctcctcagctaacatctccagtccaattcttcaccaaaagctttgcactgttccttctccccttgctctaaggcctcgccctctcaccattgtatccgctaagggctacaaaatgaaaacccacaaggcatctgcaaagcggtttatggtgacggngcgaggcaagatagtgcgtatgggagc

SEQ ID NO: 4064 - DNA, 329 bp, Glycine max
  Clone ID: LIB3073-020-Q1-K1-E5
gagaagcttcaataagtaagtatcaatggcttgcgaagaatcccagaacaagccccccagcgagcagtccactaccgaactcatcacgagcgcgaagctggtggcggaggcggcgcagtcggctctgaagagcgacagcgacaaagtggacaaggccaaggtggctgacgctgccggcgatcttctcgacgcggcggggaagtatggaaaacttgatgacaaacaaggcataaggcaatatgttgacaaggctgctgattatctgcataattaccagggtgataataccactgctccttcacagcctgcagagtctaaaggtgaagaaa

SEQ ID NO: 4065 - DNA, 311 bp, Glycine max
  Clone ID: LIB3073-020-Q1-K1-E6
gacaagtgagtttggtggtcgagataactaggaacagggtgatgaaaatgaagggccttgttttcttcgttgctacaattttggtagcatgggaatgccatgcgtacgatatgttccctttccgaatgaacactggctatggtgcccgtactccggaggtgaaatgcgcaagttggaggcttgctgtggaagcacacaacatctttggctttgggaccattcctgaagagtgcgttgaagcaacaaaagaatacattcattgcgaacaatatagatcagactccaaaacagttaaccaacaagcttacttt

SEQ ID NO: 4066 - DNA, 313 bp, Glycine max
  unsure at all n locations
  Clone ID: LIB3073-020-Q1-K1-E8
ggcacaagtgagtttgttgatcgagataactagaaacagngggatgaaaatgaaagtccctgttttcttcgttgctacaattttggtagcatggcaatgccatgcgtacgatatgttccctctccgaatgaacactggctatggtgcccgtactccggaggtgaaatgcgcaagttggaggcttgctgtggaagcacacaacatctttggctttgagaccattcctgaagagtgcgttgaagcaacaaaggaatacatccatggcgaacaatatagatcagactccaaaacagttaaccaacaagcttacttt

SEQ ID NO: 4067 - DNA, 359 bp, Glycine max
  Clone ID: LIB3073-020-Q1-K1-D11
atcagtggtgccccccatgataacaacatagggctgtggaatgctgtcatatttggtcctgatgatactccatgggatggaggcacgttcaagttgacactccaatttactgaggactatccaaataaaccaccgactgtacgatttgtgtctcgcatgtttcatccaaatatttatgctgatggaagtatttgtttggatatattacaaaatcagtggagtcctatttatgatgtggctgctatactcacatctatccagtcattgccttgtgatcccaacccaaattctcctgcaaactctgaagcagctcgaatgtttagtgagaacaagcgtgagtacaatcgaagagtgaggga

SEQ ID NO: 4068 - DNA, 292 bp, Glycine max
  Clone ID: LIB3073-020-Q1-K1-E9
gatctggcagcagaagaacaagtagttgagaactaagaaggagaagcaaatggcttcctcaatgatctcttccccagctgttaccactgtcaaccgtgccggtgccggcatggttgctccattcactggcctcaagtccatggctggcttccccaccaggaagaccaacaatgacattacctccattgctagcaacggtggaagagtgcaatgcatgcaggtgtggccaccagttggcaagaagaagtttgagactctttcctacctgccagaccttgatgatgcacaattg

SEQ ID NO: 4069 - DNA, 331 bp, Glycine max
  unsure at all n locations
  Clone ID: LIB3073-020-Q1-K1-F1
ttacaccatctccaaaacaaacccactaanatggctaaagttgtattcttactagagctggttcttccaacccttatcctcatgcctcaatatcttgctacttactacaaaccaattaataatccaccattgtacaatcctccattatacaatccaccattgtacaaaccacctgtttataaaccaaaaccacctttttacaaaccgaaaccacctatttacataccaccatataataatccaccatacaataaaccaccttattgaaaataccctccattataagacaacacccattcctaaagcaatcaatgaagtctattatctactt

SEQ ID NO: 4070 - DNA, 217 bp, Glycine max
  Clone ID: LIB3073-020-Q1-K1-F10
ggcacaagtgagtttgttgatcgagataactagaaacagtgtgatgaaaatgaaggtccttgttttcttcgttgctacaattttggtagcatggcaatgccatgcgtacgatatgttccctcttcgaatgaacactggctatggtgcccgtactccggaggtgaaatgcgcaagttggaggcttgctgtggaagcacacaacatctttggctttgag

SEQ ID NO: 4071 - DNA, 380 bp, Glycine max
  Clone ID: LIB3073-020-Q1-K1-B5
gatctggcagcagaagaacaagtagttgagaactaagaaggagaagcaaatggcttcctcaatgatctcttccccagctgttaccactgtcaaccgtgccggtgccggcatggttgctccattcactggcctcaagtccatggctggcttccccaccagaaagaccaacaatgacattacctccattgctagcaacggtggaagagtgcaatgcatgcaggtgtggccaccagttggcaagaagaagtttgagactctttcctacctgccagaccttgatgatgcacaattggcaaaggaagtagaataccttcttaggaagggatggattccttgcttggaattcgagttggagcacggtttcgtgtaccgtgagcaca

SEQ ID NO: 4072 - DNA, 313 bp, Glycine max
  Clone ID: LIB3073-020-Q1-K1-B7
ggcacaagtgagtttgttgatcgagataactagaaacagtgtgatgaaaatgaaagtccttgttttcttcgttgctacaattttggtagcatggcaatgccatgcgtacgatatgttccctctccgaatgaacactggctatggtgcccgtactccggaggtgaaatgcgcaagttggaggcttgctgtggaagcacacaacatctttggctttgagaccattcctgaagagtgcgttgaagcaacaaaggaatacatccatggcgaacaatatagatcagactccaaaacagttaaccaacaagcttacttt

SEQ ID NO: 4073 - DNA, 313 bp, Glycine max
  Clone ID: LIB3073-020-Q1-K1-B8
gcacaagtgagtttgttgagcgagataactagaaacagtgtgatgaaaatgaaggtccttgttttcttcgttgctacaattttggtagcatggcaatgccatgcgtacgatatgttccctctccgaatgaacactggctatggtgcccgtactccggaggtgaaatgcgcaagttggaggcttgctgtggaagcacacaacatctttggctttgagaccattcctgaagagtgcgttgaagcaacaaaggaatacatccatggcgaacaatatagatcagactccaaaacagttaaccaacaagcttactttt

SEQ ID NO: 4074 - DNA, 222 bp, Glycine max
  Clone ID: LIB3073-020-Q1-K1-B9
ggagcaggatctggacgccaaaccagggaaccacagccgattcaacgccacaaatggcttgagcttcctctgacaaggagcagaactgagctccgttacacaacaacaaccagactgtatgcgaaggctggtgtacgacattaccatgtacccttccatagatgacccttttcaccacgaaggcaatgttatacgcctagcctcaaatcaatgcatctttga

SEQ ID NO: 4075 - DNA, 285 bp, Glycine max
  unsure at all n locations
  Clone ID: LIB3073-020-Q1-K1-C1
gcaaaaaaaactgaattgtgtgaatcgaaaactaaacattgctattgtaaaagttgcaaatgcttataaacaccctaatattattgcagaatttatagctggacaattaaagaatagagtttcgtttcgtaaagcaatgaanaaagctattgaattaactgaacaggcgggtacaaaaggagttcaagtacaaattgcaggacgtatcgacggaaaagaaattgcacgtgttgaatggatcagagaaggtagagttcctctacanaccattcgagcgaaaatcga

SEQ ID NO: 4076 - DNA, 337 bp, Glycine max
  Clone ID: LIB3073-020-Q1-K1-C10
gacaccaacaccaaaacaaacccactaagatggcttcctttgtatccttcctagtgctgcttcttgcagcccttatcctcatacctcaagggcttgctacttactacaaaccaattaagaagccaccagtgtacaagcctccagtgtacaagccaccagtgtacaaaccaccggtttataagccaaaaccaccggtttacaagccgaaaccaccggtttacaagccaccatattagaagccaccatacaagaaaccaccttatggaaagtaccctccagtagaggacaacacccatgcctaaagcaagcaatgaggtctattatctacttaataaat

SEQ ID NO: 4077 - DNA, 244 bp, Glycine max
  Clone ID: LIB3073-020-Q1-K1-C11
ggccgaaaaccctaacaacacaggcgcagagcgtgatccattgacgaagatggtgcagcgtctcacctaccgcaagaggcacagctatgcctccaaatccaaccaacacagggtcgtcaaaacccctggtgggaagctcgtttatcagaccaccaagaagaaggccagcgggcccaagtgccccgtcactggcaagaagattcaagggattccacacttgaggcctgcagagtacaagagatca

SEQ ID NO: 4078 - DNA, 332 bp, Glycine max
  unsure at all n locations
  Clone ID: LIB3073-020-Q1-K1-C12
gcagatagatctgcttcttgttgttggaaagaaaccctagcaagcggaacaatggcagacgttgaggtcgatgtggcggctgcagcagcagcagggcagccgaagaagagaacgttcaagaagttcagtttcaggggcgtggatctcgatgcgcttctggacatgtccaccgatgaactcgtgaagatgttcagtgctcgcgcacgtagaaggttccagagaggcctcaccagaaagcccatggccttgatcaagaagcttcgcaaagcgaaaagagaagctccaccaagtgagaagccagaacctgtncgcacccaccttcggaacatgat

SEQ ID NO: 4079 - DNA, 88 bp, Glycine max
  Clone ID: LIB3073-020-Q1-K1-C2
ggttgcaaaaaaacaaaaaaggggtccggttgaaaaaaaacaacgggaggggaggagaaaggaccctattaataacagacgaatatgc

SEQ ID NO: 4080 - DNA, 274 bp, Glycine max
  unsure at all n locations
  Clone ID: LIB3073-020-Q1-K1-C3
taatttgggaattattgctcccatcgccattggtttcattgtcggcgctaacattttgttgggtggggccttctctggagcggccatgaaccccgctgtgacatttgggcctgctgtcgtgagctggacctggaccaaccactggatctactgggccgggcctctcatcggtggtggaatcgctggccttgtttacgaggttgtctttatcagccacacccacgagcagcttcccaccactgactactagagggggggaaatgaaaaccccnna

SEQ ID NO: 4081 - DNA, 383 bp, Glycine max
  Clone ID: LIB3073-020-Q1-K1-C4
ggcctcattttctggctaaccaaccctgacactccttggtctccgcttcctcttcgatcatcgcttcagaatgccgccgaagttcgacccctcccagatcgtcgacgtcttcgtacgcgtcaccggcggtgaggtcggcgcggcgagttccctcgccccgaagatcggtcccctcggtctctcccccaagaagatcggagaagatatcgccaaggaaaccgccaaggactggaagggcctccgcgtcaccgtcaagctcaccgtgcagaaccgtcaggccaaggtcacggtggtcccatccgccgccgcgctcgtcatcaaggccctcaaggagcccgagcgtggccgcaagaaaacgaagaacatcaagcacaacggcaaca

SEQ ID NO: 4082 - DNA, 382 bp, Glycine max
  Clone ID: LIB3073-020-Q1-K1-C5
gaagcagaatcttcaggccaagccaggtaagcacaaccaaagcaacaccccaaatggcttcagcttctgttcccatggcgttgtcactgagctctgttaccaacaacaacaagccttcatccgaagccttcttcaggccactacccctacgccaaccaaagaggaccctcttcaccacgaaggcagtgtcaaactccaagcctcaaatcaatgcatctttgaaggagaaggcagttgccggactcacggcagcttctgtgacagcatctatggtggttccggaggtggctcatgctgctggatatgagttctccccttccctaaagaactttctactcagcatctttgctggtggggttgttctagcagccatatttggagc

SEQ ID NO: 4083 - DNA, 317 bp, Glycine max
  Clone ID: LIB3073-020-Q1-K1-C6
ggagggttatttataaggcacacatctcatcgttttctctgtgcctggccatccggtttcccagatctgctccttcctcaccccacagaagtcagttgaagagcatgggtcgtggagttagcagtggtggtggtcaaagttccttgggttatctttttggcagtggagaggcccctgccgcaaaaccggcaacaaacaatgccccagcccaacctgaagtgcaggctgtaaataatgcgcctccttcaaaagcatctcctcctactaaaacaatagaccctaacaaggctgctggtataaacagtcattctactgat

SEQ ID NO: 4084 - DNA, 401 bp, Glycine max
  unsure at all n locations
  Clone ID: LIB3073-020-Q1-K1-C7
gacacacagctattcctcttaagcttgctactgagtttccacactgcataccttaggtcttccgaattcgaagttaatttgcaagatggctaaggaaaaggctcagatcaacattgtggtggttggtcatgtggaccctgaggaggcaaccaccattaacgagctgaagaagcctgttgtggagaaagaagctccagggcatgccatatgagggcatgcacgtacggcctcggaggggaaccataaaattatgttaacaaaataatctggaaccctaatgtatcagtgccatcatcagtgtgtagtttaagctagctttgctatggttacgttctttgagatgagggtcttgatgaacagtaccattctgatgtatngctttccttgaaagtaatgcatgc

SEQ ID NO: 4085 - DNA, 309 bp, Glycine max
  Clone ID: LIB3073-020-Q1-K1-C8
aggaacgccgtcgtcgggatgctgcaacggagtgaagagcctcaatgccgccgccaagaccaccgccgaccgccagacggcgtgcaactgcctcaagtcggccgccagccaaatctccggcttcaacgccaacaacgccgtctcgctccccggcaaatgcggagtctccatcccctacaagatcagcaccttcaccaactgcgctaccatcaaggtttgaagagaaagtcatggacgcaggaaaccggaaactactcactagtatatgagtagcattattaatattaagaataagatcgagggtgatga

SEQ ID NO: 4086 - DNA, 388 bp, Glycine max
  Clone ID: LIB3073-020-Q1-K1-B3
gtcagcgaaaaatggctgcaccaacaccgattcagaaaactgaagaggggtggaaggtcattctctcccccgagcagtttcggatccttcgccagaaaggaactgaattgaagggtacaggagaatataacaagttttatgaagaaggaatttacaactgtgctggctgtgggactcctctttacaagtcttcaaccaagtttgattctggttgtggttggcctgctttctttgagggttttcccggtgccatcgatcgatcccctgacccagatgggaggaggactgagataacttgtgcagcatgtggtgggcacttgggtcatgttttcaagggagagggattcaagaccccaactgatgaacgccattgcgtcaatagtatttc

SEQ ID NO: 4087 - DNA, 312 bp, Glycine max
  Clone ID: LIB3073-020-Q1-K1-C9
gaaggacaagtggctataacactacttgcattcagttagactttgatagtttgattagctctaataaggttaaggaccagagagagaaagagaaataagaagaaaaacacaagatgggttattggaagtctaaggttcttcccaagatcaagaaggttttcgagaagaatagcaccaagaaagctgctgctgctgaggccaccaagtcctttgatgagtcaaaggaggaatacaacaaagcctttgaagaaaagaagactgaacttcaaaccaaagttgttgaaatatatgaggcttcatcaacagaaatca

SEQ ID NO: 4088 - DNA, 350 bp, Glycine max
  Clone ID: LIB3073-020-Q1-K1-D1
gaaagggtgccgttttgttgcgttgcactcgcggaagcggagaaaaccaaagaatcaagcttcgtcaaagtgtctgtcacacacagtctttaagatctggaagcgcttcttacttgcccacaataagaattcctctcaaatttcaatttttcatttgaaaataataaaaccctaaaagaggggttgcaagcaaaatgagaagctcgaagatgtggatggttttcatgtgtctgacggtgagcttcttcgctcgcattgaatcgctatccgtgacggtgaacgacgtcgagtgcgtctacgagtacgtactttacgagggcgacaccgtttcggggaactttgttgtcgtc

SEQ ID NO: 4089 - DNA, 318 bp, Glycine max
  Clone ID: LIB3073-020-Q1-K1-D10
cccacgcgtccgtaagacgacagaagggggtgcagttcaaagcgaagaaagattcgaagcgaagaaagaaagcgttgtgaagaatggcggaagaaggacaagtgatcggtgtccgcagcgtagaggagtggaaggaacatctcaagaagggagaagagtccaagaaattgattgtggtggattttactgcttcttggtgcggtccatgccgtttcattgccccaattcttgcagagtttgctaaaaagttgccgaatgtcaccttcctcaaggtggatgtggatgaattggagactgtttccaaggagtggggaattg

SEQ ID NO: 4090 - DNA, 222 bp, Glycine max
  unsure at all n locations
  Clone ID: LIB3073-019-Q1-K1-H12
tatgtcgtgtgaaaggatgtgttggaacagtgaagagagttctaggaaaattggatggtgtggaatcatatgacattganttgaaggaacaaaaggtggtagtgaaaggaaatgtccagccagacacagttctgcagaccgtttccaaaactgggaagaagactaccttctgggaaggtgaagcagcaacatctgaaactagcacagcaactgcctaaaaca

SEQ ID NO: 4091 - DNA, 352 bp, Glycine max
  Clone ID: LIB3073-019-Q1-K1-H3
gaccggcggtctcatctctcttgccagttctcacctcaccggtgcatcttcacgtcgtctctaacgagggaaaatgagtcgaggaagtgcagcagtagcgaaaggaaagaagaaaggtgctacattcaccattgactgtgcaaagccagtagaagacaagatcatggacattgcttctctcgagaagtttcttcaagagaggatcaaggttggtggcaaagctggtgctcttggtgactctgttaccgttacacgtgagaagactaagattattctcacctctgactgtaacttttccaaacggtatttgaagtacttgacgaagaagtactttgagaaacacaatgtgcga

SEQ ID NO: 4092 - DNA, 370 bp, Glycine max
  Clone ID: LIB3073-020-Q1-K1-A10
ggaggcatttgaaaaagaaaagccgtccatagcctcccaaaaaatgaagagcactaccttgttcgctctctttctactttgtgccctcacttcatcatacctaccttcagccaccgctgatgtggtgctggacatggatggtaatcctcttggaaacggttggcaaaatgaatatttcatgttgccagttacaagaggaagcggtggtggaatagcactagctgcaactggaaatgaaagatgccctgtaactgtcgtgcaatctcacattgagcgcgataaggggtatgcggcaacttttagagctccattccacctcctttttatcgcagaaggccctcctttgacgatttcattcgataactttgaa

SEQ ID NO: 4093 - DNA, 299 bp, Glycine max
  unsure at all n locations
  Clone ID: LIB3073-020-Q1-K1-A11
aaagaccaatggggaacgatggctctgatgggcggttttgctagaataaacaataatgagatcactgttttagtaaatgatgcggaaaagggtagtgacattgatccacaagaagcacagcaaactcttgaaatagcagaagctaatttgaataaggcggaaggcaagagacaaacaattgaggcaaatctagctcttagacgagctaggacacgagtagaggctatcaatgtgatttcataacaagttgatgcgtccgaatatcggaataactaaaaaatggaaaatgaaacagtnna

SEQ ID NO: 4094 - DNA, 357 bp, Glycine max
  Clone ID: LIB3073-020-Q1-K1-A12
gactgatacaggaacaggagagaaacaaagttagaagtaaagaagatcatggcttctctagcaaccttggctgctgttcaaccagctacgatcaatggccttgctggaagttccctctctggaactaagctctctttcaagccctctcgccacagtgtcaaatccaagaacttcaggagtggtgccgtggtagcaaagtatggtgacaagagtgtgtactttgatttggaggatctgggcaacactacagggcagtgggacttgtatggctcagatgcaccttcaccctacaaccctcttcagagcaagttcttcgagacatttgctgctccattcacaaagaggggattgttactc

SEQ ID NO: 4095 - DNA, 361 bp, Glycine max
  Clone ID: LIB3073-020-Q1-K1-A3
tgacatcttatcttctaaagaataggtgctataatgaactccattcttatttctattcctagtatttagatttttttcattatatatggtatttgcaagtttagaacatatattaactcatatatcgttttcggtcgtatctattttaatttcaattcatttgataaccttattatttgtcaaagaaatcataggattatctgattcgtccaaaaaaggcatgataataactttttttggattaccaggatggttagtaactcgtggggttttttcaggccattaaccgttaagggattaatttgaatcattattattcttttcatgaactttttccatttttataaatgttccttgcttc

SEQ ID NO: 4096 - DNA, 355 bp, Glycine max
  Clone ID: LIB3073-020-Q1-K1-A4
gggtgcaagagtttgttgtgagctataagctagtttatcgtgaggagaatatgaagttgtttgttttctttgttgctgcagtagttttggtagcatggccatgccatggcgcaggctaccaaaggttccctctccgaatgaaaactggctatggtgagcgttcttcggaggtaaaatgcgcaagttttaggcttgctgtggaagcacacaacatccgagcctttaaaaccattcctgaagagtgcgttgaaccaacaaaggactacattaatggcgaacaatttagatcagaccctaaaacagttaaccaacaagctttcttttatgctagtgaacgcgaagtccatcacaacga

SEQ ID NO: 4097 - DNA, 405 bp, Glycine max
  Clone ID: LIB3073-020-Q1-K1-A6
acacaactgaacaagatagataagccttccacagcctcacaaaaatgaagaacactacctcgttcgctctctttctactttgtgccttcttcacctcatacctaccttcagccaccggtgcttttgtgcttgacagtgatggaaaccctcttgaaaatggtggcacatactatgtgccagcaccaaataactgcggtggaatagaatacactacatcaggaaacgaaacttgccctatcactgttgtgcaacatcacgacccaacctgtaaggggtttccgataacgatttcgtccccggcccgaatccgttacatctccgaaggccttaatgtgaacatagggttcactttcagaccccctccgtgtgccccctcttctttgtggactgttctcaaggatcaat

SEQ ID NO: 4098 - DNA, 372 bp, Glycine max
  unsure at all n locations
  Clone ID: LIB3073-020-Q1-K1-A8
gacagcatatatatcaataatctatgttatactatacctacattttgataattttctttgtagttgatagccatggctacccgtggaaagcttgaggttgacattgatctcaagtccaacgcagacaagtactggcaaacccttaggaattctactgaaatattccctaaggccttcccacatgattacaaaagcattgaggttcttgagggtgatggcaagtctcctggttctatccgccacataagttatggtgaaggttcaccacttgtgaaatcatcctttgagaggattgaggctgttgatgaggaaaagaaggtagtgtcgtacactatcattgatggggaactcctncagcactacaaaacattc

SEQ ID NO: 4099 - DNA, 364 bp, Glycine max
  Clone ID: LIB3073-020-Q1-K1-A9
agaaggggaaggtgcaagagtttgttgtgagctataagctagtttatcgtgaggagaatatgaagttgtttgttttctttgttgctgcagtagttttggtagcatggccatgccatggcgcaggctaccaaaggttccctctccgaatgaaaactggctatggtgagcgttcttcggaggtaaaatgcgcaagttttaggcttgctgtggaagcacacaacatccgagcctttaaaaccattcctgaagagtgcgttgaaccaacaaaggactacattaatggcgaacaatttagatcagactctaaaacagttaaccaacaagctttcttttatgctagtgaacgcgaagtccatcacaacga

SEQ ID NO: 4100 - DNA, 111 bp, Glycine max
  Clone ID: LIB3073-020-Q1-K1-B1
ctcataggttagggtttttttctcttcatgctctctctgcgttatttcatctcacagagctcaaaggggtcgaatgcgtgtgcggtctgtcttacccactcttcactcaac

SEQ ID NO: 4101 - DNA, 284 bp, Glycine max
  unsure at all n locations
  Clone ID: LIB3073-020-Q1-K1-B10
ctagatcaaaaacgaaatgacccctcccccagaattctttcggattgtcgggcacattaaaaaaggaatggataagttcctaaaaataaagaaaactataacacattataaggaggggtcaaatattaattaagataaaagatatagaatatctatctgtatatatatatatatagatataatttattaataattagaactttcttttttcttaaaaaaaaaaaaagtaaataaaaagatttgatagaatcgtaatttcaattcgattatatagatacctngna

SEQ ID NO: 4102 - DNA, 299 bp, Glycine max
  unsure at all n locations
  Clone ID: LIB3073-020-Q1-K1-B11
caacttatgtcatcgaaaggatctcgaaggcccacgcgactcacgtaagccgggatctttcataaaatggattcctattcgaagggtgcataaccgcatggataagctcacactaacccgtcaatttgggatccaattcggttccttaggaggtatcgggaaggaatctnggaatgtaacaatatccattcatacagattcagaagaaagggttctctattgattcaaacgctctacctacaatattggtatagagctagaggaaataaccgaggatctctcattgtacttttggtcga

SEQ ID NO: 4103 - DNA, 392 bp, Glycine max
  unsure at all n locations
  Clone ID: LIB3073-020-Q1-K1-B12
gatagcagcatcatacaaagcattgaattcaaaaacttaagttcattccttgtgttttgctttcttcctcaaaaccaaacatgtcgaacacatgcggcaactgcgactgcgctgacaagactagctgcaccaagggaaacagctatggtgttattgtagagactgagaagagttacatcgagactgttgtcatggatgttccagcagctgagcatgatgggaagtgcaagtgtggcactaactgcacttgcacggactgcacctgtggccattaaggaatatgtatgaaaatgtaattgccatgtgtttggcaatacaaatatccaaataatgtaatcttcgtatgaataaatgtgtgtgcttgtatcctacttcangcctgtgtagtcatg

SEQ ID NO: 4104 - DNA, 396 bp, Glycine max
  unsure at all n locations
  Clone ID: LIB3073-019-Q1-K1-G9
tgttaccaaaaacaaaacacaagccaagtgagagtgagaaaaaataaaaatcaaagagcataatgtcagggatcattcacaagattggggagacccttcatgtgggagggcacaagaaggaggaggagcataagggtgagcaccatgctggagaatacaaaggggagcaccatggtgaacacagtagtgagtacaaaggagagcatcatggtgaacacaaagctggagagtaccatggtgagcacaagccagagcacaaagaggggttcctagacaaagtcaaggacaagatccatggtgagggcggcgccgccgagggcgagaagaagatgaaggagaagaagaagaggagcatggccatgagcatggncatgacagcagcagcagcagtgacag

SEQ ID NO: 4105 - DNA, 399 bp, Glycine max
  Clone ID: LIB3073-019-Q1-K1-E8
ggcagcagaaaaacaagtagttgagaactaagaagaaggaaatggcttcctcaatgatctcctccccagctgttaccaccgtcaaccgtgccggtgccggcatggttgctccattcaccggcctcaaatccatggctggcttccccacgaggaagaccaacaatgacattacctccattgctagcaacggtggaagagtacaatgcatgcaggtgtggccaccaattggcaagaagaagttcgagactctttcctacttgccagacctcgatgatgcccaattggcaaaggaagtcgaataccttctaaggaaaggatggattccttgcttggaattcgagttggagcacggtttcgtgtaccgtgagcacaacaggtcacctggatactatgatggac

SEQ ID NO: 4106 - DNA, 313 bp, Glycine max
  Clone ID: LIB3073-019-Q1-K1-E9
ggcacaagtgagtttgttgatcgagataactagaaacagtgtgatgaaaatgaaggtccttgttttcttcgttgctacaattttggtagcatggcaatgccatgcgtacgatatgttccctctccgaatgaacactggctatggtgcccgtactccggaggtgaaatgcgcaagttggaggcttgctgtggaagcacacaacatctttggctttgagaccattcctgaagagtgcgttgaagcaacaaaggaatacattcatggcgaacaatatagatcagactccaaaacagttaaccaacaagcttacttt

SEQ ID NO: 4107 - DNA, 118 bp, Glycine max
  Clone ID: LIB3073-019-Q1-K1-F1
gtttatggtagtgttgtcagtgagaaagtattggccacccaccatccaagatatggatataatgctgccaccggaaaatatgaagatttgatgtctgctgggatcattgatcccacaa

SEQ ID NO: 4108 - DNA, 350 bp, Glycine max
  Clone ID: LIB3073-019-Q1-K1-F10
gggattcagcccaaagttgattcactggatttggggttccctaagcacaccattattttattatgaatgagtggcaatagcagcaacaacaacaatataagtaaaagaatctctgtgttgtcatcacacttcgctagatccagccccatcatggcttcagagaagcaagcggctcttgccgtcactccctctgatgctgatgctcctaccatatttgacaagatcatcaataaggagattccttctactgtggtttatgaggatgacaaggtgcttgccttcagggacataactcctcaagctcctacacatattcttatcattcctaaattcaaagacgggttaagtgg

SEQ ID NO: 4109 - DNA, 295 bp, Glycine max
  Clone ID: LIB3073-019-Q1-K1-F11
agcaggaatccaaagtaagccagggcaagctccaaagaaatctgcagaggaaaatggactgaactctacaaagcaataaggaaatgcatattagcctgtcgggataatgaacctttaatactgaggggctgtttatgtgtcagcaatatgatgaaaaagaagtcaaggagagttttttagtcatttgatctttatgatgtatcaaattaataactttccttttaggaagggcataaacggatgtattcctatttatataggttattaagccggtgccatgctgcaattttatgaa

SEQ ID NO: 4110 - DNA, 397 bp, Glycine max
  Clone ID: LIB3073-019-Q1-K1-F12
tgttctagtgtgtgattgtttggtgttgtagctcgttcttcttcttttgttgttctgtgtttgtgtttgttttttctctcacctgaaaatgtcttgctgcggtggtaactgtggttgcggaagctcctgcaagtgcggcaacggctgcggaggctgcaagatgtacccagacttgagctacactgagtcaaccaccaccgagaccttggtcatgggagtggcacctgttaaggctcaatttgagggtgctgaaatgggtgtgcccgctgagaacgatggctgcaaatgtggaccaaactgctcctgcaacccctgcacttgcaagtgaggtgttgggagagcaagcttcaagcagagataagcccttattaggaataatgataaactattaatgtgt

SEQ ID NO: 4111 - DNA, 101 bp, Glycine max
  Clone ID: LIB3073-019-Q1-K1-F2
tcacacaagaagactcctcaatcatccatagacatgggcaccgtcacttctgcagcagtttctattccctcattcactggcctcaaggcaagcgcaagcaa

SEQ ID NO: 4112 - DNA, 360 bp, Glycine max
  Clone ID: LIB3073-019-Q1-K1-F3
gaggcatttgaataagaaaagccttccatagcctgccaaaaaatgaagagcactaccttggtcgctctctttctactttgtgccctcacttcatcatacctaccttcagccaccgctgatgtggtgctggacatggatggtaatcctcttggaaacggttggcaaaatgaatatttcatgttgccagttacaagaggaagcgggggtggaatagcactagctgcaactggaaatgaaagatgccctgtaactgtcgtgcaatctcacattgagcgcgataaggggtatgcggcaacttttagagctccattccacctcccttttatcgcagaggccttcctttgacgatttcattcgata

SEQ ID NO: 4113 - DNA, 213 bp, Glycine max
  Clone ID: LIB3073-019-Q1-K1-F5
ctttctttcttttcttattactatgtaattatttaaagataatatattattgatatccccctcctcgtgtttcttcgtcctatgagatgaacattataatatatcatgataggagagaaaagcacaaatttcacttgttcagaaacctaccattttgattttgcattgcgtatctgatttgtgtttttctctcccgtatcatgataccccgat

SEQ ID NO: 4114 - DNA, 309 bp, Glycine max
  unsure at all n locations
  Clone ID: LIB3073-019-Q1-K1-F6
tagtcgttcaagatgagagctaagtggaagaagaagcgcatgaggaggttgaagaggaagcgccgaaagatgagacaaagatctaagtaggtgcttgagcaggagttgagatgagctttccatctgctaccagcctcatgacattntaggctgttatggctcttatgatcttgaggtctagtcgctaggggagcttcactcttgacttagtttgctttactggtcctggtcctggtccaagactattgagtgtgggttaagttgtgatgtttagtggtttgtggtatctaattatgtactggtttttat

SEQ ID NO: 4115 - DNA, 354 bp, Glycine max
  unsure at all n locations
  Clone ID: LIB3073-019-Q1-K1-G1
caacagaggggttggtgcaagaattcgatgggagctatcagcgagtttatcgcgaggggaatgtgcagctgcttgttttctttggtgctgcactagttttggtagcatagccatgccatcgggcangctaccaaacgttacctgtccgaatgaaaactggctatggtgagcgttcttcggagggaaaatgcgcaagaattatggcttgctgtgaagcacacaacatacgagcctttaaaaccattcctgaagagtgcgttgaaccaacaaaggactacattaatggcgaacaatctagatcagactctaaaacagtttacccacaagctttcttttatgctagtgaacgcgaag

SEQ ID NO: 4116 - DNA, 332 bp, Glycine max
  Clone ID: LIB3073-019-Q1-K1-G10
gacctcatgaagggtgttgcttcaatcagtacgcatgactggctggcgaagaatcccagaacaagccccccaccgagcagtccactaccgaactcatcacggagcgcaaatctggtggcggaggcagcgcaatcagctctgaagagcgacagcgacacaatggacaaagccaaagtggctgacgctgtcggcgatcttctcgacgcggcggggaagtattgaaaacttgctgacaaacaaggcatacggcaatatgctgacaacgctgctgattatctgcataattaccagggtgataataccactgctccttcacagccagcacagtctaa

SEQ ID NO: 4117 - DNA, 418 bp, Glycine max
  unsure at all n locations
  Clone ID: LIB3073-019-Q1-K1-G11
acgcgttcggcgagaagacgacagatttggaaaaactttgtttcactcggatcgcgcgagcacaaagaaagttgaagagggccctgccggaaaaagattaataccgtctttcattttccggcgatctcttttttcttccatcaccgttttccggctatccctaatccttaacagaaatgacgacatcaaggcgccttgcggacaggaaggtggagaagtttgagaaaaacatcaccaaaagaggatttgtgccagacacaaccactaaaaaggggaaagactaccctgttggcccagtgctgctcggtttcttcgtctttgttgtcattggatcatctctcttccagataatcaggacagcaacgagtggaggcatggcttaaatggagctntattttggattgtgtcatcatctctt

SEQ ID NO: 4118 - DNA, 252 bp, Glycine max
  Clone ID: LIB3073-019-Q1-K1-G12
gacccccaaactctgcatgggaagaaaccctagccactctcccggcgtcacgatgcagatcttcgtgaaaaccctaacgggtaaaacgatcacgttggaggtggagtcttcggacaccatcgacaacgtgaaggccaagatccaggacaaggaaggcatccctccggaccagcagcgcctcatcttcgccgggaagcagctggaggacggccgcaccctcgccgactacaacatccagaaggagtccacgct

SEQ ID NO: 4119 - DNA, 380 bp, Glycine max
  unsure at all n locations
  Clone ID: LIB3073-019-Q1-K1-E7
tttctaggttaatcctctgttgtttctcagccgcctctgctagggttcggaaacgaanaaaggttctgttttcttttcgcgatgagggccaagtggaagaagaagcgtatgaggaggctgaagaggaagcgccgaaagatgagacagagatccaagtagtgcgttaaacctagtttgtttccgttgcttttacaattgcttatgttgtcaaataggacacccagttgttagtggcactggtctctcctttttgatgttttgatacattttgttggattttatttcgtcttatgttcttagctgaaaacaatgctgttactgcgtttgcgaatcaacaggatatcttgtttaanaaaaaaaaaaaaataatttttaaaagc

SEQ ID NO: 4120 - DNA, 120 bp, Glycine max
  Clone ID: LIB3073-019-Q1-K1-G2
gtcacccactcccaaacaaacccacttagatgggttcctttgtattcctcctagtgctgcttctttcaacccttattctcatgcctcaagggcttggttcttacttcaaaccaatttaaa

SEQ ID NO: 4121 - DNA, 402 bp, Glycine max
  Clone ID: LIB3073-019-Q1-K1-G3
cggcaagagtttgttgtgagctataagctagtggatcgtgaggagaatatgaaggtgtttgttttctttgttgctgcagtagttttggtagcatggccatgccatggcgcaggctaccaaaggttccctctccgaatgaaaactggctatggtgagcgttcttcggaggtaaaatgcgcaagttttaggcttgctgtggaagcacacaacatccgagcctttaaaaccattcctgaagagtgcgttgaaccaacaaaggactacattaatggcgaacaatttagatcagactctaaaacagttaaccaacaagctttcttttatgctagtgaacgcgaagtccatcacaacgacatatttatattcggcatagataacaccgtactctctaatatcccatac

SEQ ID NO: 4122 - DNA, 285 bp, Glycine max
  unsure at all n locations
  Clone ID: LIB3073-019-Q1-K1-G6
tctttggtgctgcagtatttttgtagcatggccatgccatggcgcangctaccaaaggttccctctccgaatgaaaactggctatggtgagcgttcttcggaggtaaaatgcgcaagttntangcttgctgtggaagcacacaacatccgagcctttaaaaccattctgaagagtgcgtngaaccaacanaggactacattaatggcgaacaatttagatcagactctanaacagttaaccaacaagctttcttttatgctagtgaacgcgaagtccatcacaac

SEQ ID NO: 4123 - DNA, 308 bp, Glycine max
  Clone ID: LIB3073-019-Q1-K1-G7
gaccaagtgaggcaatatagcccaagccctatgcaaccaaaccctaacacacacccatttgattcagtttccatggctagcctcaaggttgcatttttggctgcagtgctctgcatggttgtggtgagtgcacccatggcacatgcagctatcacgtgcgggcaggtgacgagtagcctggccaattgcatcggttacctccagaagggaggaacgccgtcgtcgggatgctgcaacggagtgaagagcctcaatgccgccgccaagaccaccgccgaccgccagacggcgtgcaactgcctcaagtc

SEQ ID NO: 4124 - DNA, 266 bp, Glycine max
  Clone ID: LIB3073-019-Q1-K1-G8
tgttagcaaccaaagaaaaaggagagtgcttagagacagcagaacatattatcatttcctctttttttttttttttttgagttttaacaaatggcaacaaccactgtgatcatgaccactctcccccaattcagtggtcttagacctcaattctcagctgcccctgtgaagaacttggttgctgtccaacaacctatgaggcccaaagggaagggtgctttgggagctcgatgtgactacattggttcatccactaatctgattat

SEQ ID NO: 4125 - DNA, 374 bp, Glycine max
  Clone ID: LIB3073-019-Q1-K1-C9
tgaaaccaatgcaacaaaaagggaaaaaaaataacaactgaaagtttttctttttgtccataacaattaaaaaggttgaagcagaaccttaggcaattttcaaaaccttgcattttttggtgtgattttggtttatttgagcccagaaaaaaatcgttcaacaattccaaagctgaaaacaagcaacaaatcctttggcaaacaaaaatctgcacttttctgagattctggacgcatggcaaaaatctccataaaaccctaacaactcaattattacaattcacacatctttcaatcgaacaaagcaaaaagcaaagtggtcgccttcatcatcatctttacctttaaactttgcttactctaccatatgcccc

SEQ ID NO: 4126 - DNA, 402 bp, Glycine max
  Clone ID: LIB3073-019-Q1-K1-D1
tgaccacacacccttcttcatctctctttgatacccttttgttctttttggtgctttaatttgcactagcaagggggttggttttatttctgtttgcttgcaacaatggctgtggctaataagttactttctgttttgatcattgccctcattgccatttccatgcttcaaacagtggttatggcatctcatggacatggaggccaccactacaatgacaagaaaaaatatggacctggcagtctcaaaagcttccaatgcccatcacaatgctcaaggaggtgtggcaagacccagtaccacaagccctgcatgtttttctgtcagaagtgttgtaggaagtgcctatatgtgccaccggggtattatgggaacaaagcagtgtgcccttgctacaacaac

SEQ ID NO: 4127 - DNA, 405 bp, Glycine max
  unsure at all n locations
  Clone ID: LIB3073-019-Q1-K1-D11
aagacgacagaagggggtggataatttgcagagagcaaagaacagaagaagatggcacagacgctggcaatgcccgtggcaccttcgctagctatcatctccaattctcgcctctccaacacactctccgttcccgttctgaacaaaccaaaggttcaagggtcaagcatcaagtgcgttcgtgttggcggtgtggagattccgaacaacaagcgaatcgagtactcgctgcagtacattcatggagttggaaagaccagagcgaaacagattctctgtgatatccaaatggataataaaatcacgaaggaactcactgaggaggagctaatcacactcanggacgaggtctccatatacatgattgaaggcgacctgagacggttcaatgcggttaatataaag

SEQ ID NO: 4128 - DNA, 399 bp, Glycine max
  Clone ID: LIB3073-019-Q1-K1-D12
gaccttgatgaatggagcctgcaaccgagaggagagaggattttgggaagttgcagtacggatgcgagcactataagagacgatgcaaaattcgagcaccatgctgcaatcagatttttccatgtcgtcactgccacaacgacgccgcgaactcatctagcaaccccgcagatcgtcatgaacttgttagacgcgatgttaagcaagttatatgctctgtctgtgatactgaacaggaggttgccaaggtgtgttctagctgtggcgtcaatatgggaggatattattgcgagatttgcaaattctatgatgatgatacggataaaggacaattccattgtgatgaatgcggcatttgcagggttggtggtcgtgataagttctttcactgtaagaaat

SEQ ID NO: 4129 - DNA, 401 bp, Glycine max
  Clone ID: LIB3073-019-Q1-K1-D2
gtatagaaatagaactgtcttttcatatagatatgccttcaacacaacataggtcatcgaaaggatctcgaagacccaccaacgcacgaaagccgggatctttcagaaaatggattcctattcgaagggtgcataaccgcatggataagctcacactaacccgtcaatttgggatccaattcggttccttatgaggtatcgggaaggaattttggaatgtaataatatcgattcatacagatacagaagaaagggttctctattgattcaaacgctctacctacgagatagggatagagaaagaggaaaaaaccgaggatttcacatagtacttttggtcgaaaaatcgatctgatttttttcgtacttttcgctcaatgatgaaatgggtcagattctac

SEQ ID NO: 4130 - DNA, 376 bp, Glycine max
  unsure at all n locations
  Clone ID: LIB3073-019-Q1-K1-D4
gagtcaacaacaacctaggtcacaaccggagcagtcttttattttatagtataattcattctgtcatatatctgtgtagcaatggtggtctttctttgcaaggaagaatatggtgtgctcttgggcaatgactgggctgcaactcatgaatttggccacaacttttgtatctcaaatgaaggtgacgatgacgatgatgataatggcgtcattgatgtggccccggcggcatataagaatttcgcaaaacatgcataaatgaggaggatgaggagggatatagtagtagtcagtgtaagcttcattctgtggtcttgcttagtaattacattacatttgtgtttactcttggaatangttctagtgttatgcttaa

SEQ ID NO: 4131 - DNA, 349 bp, Glycine max
  unsure at all n locations
  Clone ID: LIB3073-019-Q1-K1-D5
agccaacaacaacctagggcacttccgaaactttcaatggttttatagcacaacacattctnccatatatctgtgtaccaatggtgctctttctttgcaaggaataatatggtgtgctcttctgcaattactgcgcttcaactcatgaatttggccacaacttttgtatctcaaatgaaggttacgatgacgattatgataatgtcgtcattgatgtgaccccggccgcatagaagaatttctcataacatgcataaatcatgaggatgaggagggatataatattagtcagtgtaagcttcattctgtggtcttgcttaattactacattacattcgtatttactctt

SEQ ID NO: 4132 - DNA, 389 bp, Glycine max
  unsure at all n locations
  Clone ID: LIB3073-019-Q1-K1-D7
ttcttnaaggtgtgcctcacttcagcttctacgaggagcatggagaagatacacgaggaggaagggattggtcccgacatgctggtaggggatgtgctatactacggggacaaccactctggtgtggtgcagctgcacaacgtggaggacgtgcagaagctcatagaggaccacaagctggatcacaagctcatcgtgctcgatgtgggtctcaaacattgtgggccctgcgttaaggtttatcctacagtggttaagctctcgaggcagatggactcggtggtgttcgctcggatgaacggggacgagaacgagagctgcatgcagttcttgaaagacatggaagtcatccaggtccctacctttctcttcatcagagatggcaacat

SEQ ID NO: 4133 - DNA, 380 bp, Glycine max
  Clone ID: LIB3073-019-Q1-K1-D8
gatctggcagcagaagaacaagtagttgagaactaagaaggagaagcaaatggcttcctcaatgatctcttccccagctgttaccactgtcaaccgtgccggtgccggcatggttgctccattcactggcctcaagtccatggctggcttccccaccaggaagaccaacaatgacattacctccattgctagcaacggtggaagagtgcaatgcatgcaggtgtggccgccagttggcaagaagaagtttgagactctttcctacctgccagaccttgatgatgcacaattggcaaaggaagtagaataccttcttaggaagggatggattccttgcttggaattcgagttggagcacggtttcgtgtaccgtgagcaca

SEQ ID NO: 4134 - DNA, 314 bp, Glycine max; identical to SEQ ID NO: 4052
  Clone ID: LIB3073-019-Q1-K1-D9

SEQ ID NO: 4135 - DNA, 355 bp, Glycine max
  Clone ID: LIB3073-019-Q1-K1-E10
gaaggtgcaagagtttgttgtgagctataagctagtttatcgtgaggagaatatgaagttgtttgttttctttgttgctgcagtagttttggtagcatggccatgccatggcgcatgctaccaaaggttccctctccgaatgaaaactggctatggtgagcgttcttcggaggtaaaatgcgcaagttttaggcttgctgtggaagcacacaacatccgagcctttaaaaccattcctgaagagtgcgttggaccaacaaaggactacattaatggcgaacaatttagatcagactctaaaacagttaaccaacaagctttcttttatgctagtgaacgcgaagtccatcacaac

SEQ ID NO: 4136 - DNA, 341 bp, Glycine max
  Clone ID: LIB3073-019-Q1-K1-E11
gttagtgacctggagagccttattgacctgcgatttagtgcactacagaaggcattgaagatacctcacaaggcttcagaagcgcggttaatggtgtccaagaagttccttactctattcaagaccggtaagcttggacctttcattctagatgatgtcccggatgtcaagcctgtgtcataaggtagattgaatcatggtttttccccctcctttttcttgtgtattagatctcctacctttcctcctttcccatttgtgcaatatgtatttcaatccaaattttgctgtaacttgtaaatatcgatgaatttaagttagaaagagaaatttgaactttc

SEQ ID NO: 4137 - DNA, 400 bp, Glycine max
  Clone ID: LIB3073-019-Q1-K1-E12
gattatatttgagttcaaacaaatcaaagcgatggccacctccaacttctctattgttctctccgtctccctagccttctttttggtgctacttaccaaggcacactcgaccgataccgtttctttcaccttcaacaagttcaacccagtccaaccaaacattatgctccaaaaagatgctagtatttcatcctctggggtgttacaactcaccaaagttggcagcaacggcgtgcccacctcgggatctctcggtcgtaccctttacgctgccccaatccagatttgggacagcgaaaccggcaaggtagccagctgggctacatcctttaaattcaacattttcgcacccaacaaatcaaactcagctgacgggcttgccttcttcttggcacccgtc

SEQ ID NO: 4138 - DNA, 358 bp, Glycine max
  Clone ID: LIB3073-019-Q1-K1-E2
gatctggcagcaaaagaacaagtagttgggaactaagaaggagaagcaaatggcttcctcaatgatctcttccccagctgttaccactgtcaaccgtgccggtgccggcatggttgctccattcactggcctcaagtccatggctggcttccccaccaagaagaccaacaatgacattacctccattgctagcaacggtggaagagtgcaatgcatgcaggtgtggccaccagttggcaagaagaagtttgagactccttcctacctgccagaccttgatgatgcacaattggcaaaggaagtagaataccttcttaggaagggatggattccttgcttggaattcgagttggagcac

SEQ ID NO: 4139 - DNA, 187 bp, Glycine max
  Clone ID: LIB3073-019-Q1-K1-E3
agggatctgggggcagaaagacaagtagttgggaactaagaagaaagaaatggcttcctcaatgatctcctccccagctgttaccaccgtcaaccgtgccggtgccggcatggttgctccattcaccggcctcaaatccatggctggcttccccacgaggaagaccaacaattgacattatcctccg

SEQ ID NO: 4140 - DNA, 410 bp, Glycine max
  unsure at all n locations
  Clone ID: LIB3073-019-Q1-K1-C8
tgaccttcacagaagcaattaatcatattggggtctcattcccactataaacacaaaacccttcccatcctaattaaggtgaaaatgaaggcatcacccattgcttggttcactttggtggttgtgtttcttgtggctgaagttcaagtttcaatggcagtgacatgcagcccaatgcagctgagtgcatgtgtaagtgcaataacctcttcaacccctccatcaaacctatgctgctccaagatcaaagaacagaaaccatgcctctgccaatacctcaagaaccccaatctcaagaagtttgttgactctcctaatgcaaggagagttgctagcacttgtggaactcccttcccaaggtgctaagtgctaataaattggaagaggttntaatttctctgcctgattat

SEQ ID NO: 4141 - DNA, 343 bp, Glycine max
  Clone ID: LIB3073-019-Q1-K1-E6
tctgaaaggaaaccctagagagaaggaactcctatcgtgttcccctctcttctttcttctttgtgccttcacctcatatctaccttcagccaccgctgatgatgatcatgtgtacgacactgacggcgataagcttcaatacggtgtcaattatttcgtgttgccagtgataagaggaaatggcggtggaatacaagtagcaaaagcaggaaacgaaacttgccctctgactgtggtgcaatctggcaacgagctctctgaggggttaccgataaagattgcatctcgatcagcaggagtcgctttcatcacccaaggccagcttttcaagagcattcagttc

SEQ ID NO: 4142 - DNA, 336 bp, Glycine max
  Clone ID: LIB3073-019-Q1-K1-A8
ggagtgtagaacgctgctgccgaaacccttgcggaaccctaaggtaagtgagtaatcagtggttgagaatggtggagaaggcgaagggtagaaaggaggaggtggttacccgtgagtacaccattaacctccacaagcgcctccatggctgcacatttaagaagaaagctcctaaagctattaaggagataaggaaatttgcccaaaaggccatggggaccaatgatgtgagggtggatgtgaagttgaacaagtttgtctggagccagggaatcaggagtgttccaaggaggattagagtaagaattgctcgcaagagaaatgatgatgaagatg

SEQ ID NO: 4143 - DNA, 425 bp, Glycine max
  Clone ID: LIB3073-019-Q1-K1-A9
aagacgacagaagggggtatcatttcatttcgataatcatccatagctgctgaagaaaatggcaaccatctctgctgctatcacaaccccatcgatctcccgcgcaactcttgtgcaaaagcgggtctcatctcccgttcttggtttgccagcaatgggtaaggtgggaagagtgagttgctccatgcaggaaaaaccttattctgtgaaggaaagcagctctagcatgttggggatgggggcatctctgatggcagctgccagcgctgcagccatgtcaggcccagccatggccttggtagatgagagactgagcactgaaggaaccggacttccctttggcctcagcaacaatcttcttggttggatccttttcggcgtctttggtcttatctggactctctattttgtctacacttccactc

SEQ ID NO: 4144 - DNA, 360 bp, Glycine max
  Clone ID: LIB3073-019-Q1-K1-B1
gaacctcaatcttcatatagattttctattccccaaatctgctccttagactgccaacccaatatagccattggatcgaattcagtctgaattcggtctaatggtttgggagttctaattaagtctaaggaacagaattctgtacatatatatatttagaagatcacagggtgcttgatcagtggtgtatcaggatggacaaggtgacgaggttggcttctgaaaagggtgtggtgattttcacaaagagctcttgttgcctctgctatgcagtcaacattctgtttcaagaacttggtgtgaatcctgtggttcatgagattgatcatgaccctgaaggcagagaaatggagaaagctc

SEQ ID NO: 4145 - DNA, 312 bp, Glycine max
  Clone ID: LIB3073-019-Q1-K1-B10
gacaagtgagtttgttgatcgagataactagaaacagtgtgatgaaaatgaaggtccttgttttcttcggtgctacaattttggtagcatggcaatgccatgcgtacgatatgttccctctccgaatgaacactggctatggtgcccgtactccggaggtgaaatgcgcaagttggaggcttgctgtggaagcacacaacatctttggctttgagaccattcctgaagagtgcgtcgaagcaacaaaggaatacatccatggcgaacaatatagatcagactccaaaacagttaaccaacaagcttactttt

SEQ ID NO: 4146 - DNA, 347 bp, Glycine max
  Clone ID: LIB3073-019-Q1-K1-B11
caatttgggaattattgctcccatcgccattggtttcattgttggcgctaacattttgttgggtggggccttctccggagcagccatgaaccctgctgtgacatttgggcctgctgtcgtgagctggacctggaccaaccactggatctactgggccggccctctcatcggaggtggaattgctgggcttatctacgaggttgtcttcatcagccacacccacgagcagcttcccagcactgactactagaggggaaaaatgaaataataaaaaaaaaaaaatgtgtattattgaatttctccggaatcttcttctgtgtatggttttccttcccttgtgttttctt

SEQ ID NO: 4147 - DNA, 390 bp, Glycine max
  Clone ID: LIB3073-019-Q1-K1-B2
ggcaacgagacctatgaagcacgacgacaacaacactcgtgctcacaccgactgccaccgcgtccaaagatgattgatgatcaagatctgggtttctttgccaattttcttggcgtcttcatctttgtactggtcatagcgtatcattttgtcatggctgacccaaagttcgaaggaaactaggaatgtagactgaggtgctttgcaaatggaaatgaatttgatgcaatcaagaactgtagtttgggaatgtgaacgttaagcttactaaaactttcataaacatcaaaggagcataacatttcaattttcgctatacttatgcgtgctcccttaagttatgttttgcagttaaggaactttcgttgatagactatatgaaaacactga

SEQ ID NO: 4148 - DNA, 397 bp, Glycine max
  Clone ID: LIB3073-019-Q1-K1-B3
ttgactattgctttccaattagctgtttttgcattaattgctatttcatttattttattgattagtgtacctgttgtatttgcttctcctgaaggttggtcgaataacaaaaatgttgtattttccggtacatcattatggattggattagtgtttctcgtgggtattcttaattctctcatttcttgaagctctatttattctagatcaaaaacgaaatgacccctcccccagaattctttcggattgtcgggcacattaaaaaaggaatggataagttcctaaaaataaagaaaactataacacattataaggaggggtcaaatattaattaagataaaagatatagaatatctatctgtatatatatatatatagatataatttattaataatt

SEQ ID NO: 4149 - DNA, 179 bp, Glycine max
  Clone ID: LIB3073-019-Q1-K1-B4
tggggcatcagaaaaagaaaaggcgtcaatcgtatagcattctaagaaatgaagagccctaccattttcattctctttctactttctggcctctacacctcacttctacctttagacaccgctcaagtcgtggttgacatggaaggggatgatcttcaaaatggtgggaaatattatgt

SEQ ID NO: 4150 - DNA, 317 bp, Glycine max
  Clone ID: LIB3073-019-Q1-K1-B5
ggagtgcacaagtgaatttggtgatcgagataactagaaacaaggggatgaaaatgaaaggccttggtttcttcggtggtacaattttggtagcatggcaatggcatgcgtacgatatgttccctctccgaatgaacactggctatggtgcccgtactccggaggtgaaatgcgcaagttggaggcttgctgtggaagcacacaacatctttggctttgagaccattcctgaagagtgcgttgaagcaacaaaggaatacatccatggcgaacaatatagatcagactccaaaacagttaaccaacaagcttacttt

SEQ ID NO: 4151 - DNA, 113 bp, Glycine max
  Clone ID: LIB3073-019-Q1-K1-B6
gcacaagtgagtttgttgatcgagataactagaaacagggtgatgaaaatgaaagggcctggtttcttcgttgctacaatttcggtagcatggcaatgccatgcgtacgatat

SEQ ID NO: 4152 - DNA, 360 bp, Glycine max
  Clone ID: LIB3073-019-Q1-K1-B7
agaagacgacagttttggagtgttttgtcgttgaggttttttggggcagaattgagtgcggtgtgtggtctcagacattccaacgaatgatgaaagatgaacacaaacatcactgcatcgacgaaaccagagtacccagtcattgatcgcaaccctcctttcaccaaagtcgtctgtatcttcaacaccatccactatctccgattcatcacaatcaccggcgtttccgtcaccgtcggctacctctccgggattaagcctggaattatgggtccttcgatggtgacagggggtttgatcggagaggtgggtgggttcatgtatgcttaccacaactccgctgggagactcatgggtttc

SEQ ID NO: 4153 - DNA, 316 bp, Glycine max
  Clone ID: LIB3073-019-Q1-K1-B8
acgacagaaggggggcgtgcagttcaatgcgaaaagagattcgaatccaaggaagggaaaggaaagtaagagaagagaagaatggccgaagagggacaagtgattggtgtccacagcgtggaggagtgggaggaacatctcaagaagggacaagagtccaagaaattgattgtggtggattttaccgcttcttggtgcggcccatgccgtttcattgccccaattcttgcggatatggctaaaaagttgccgaatgtcaccttcctcaaggtggatgtggatgaattggcgactgtttccaaggagtgggaagttg

SEQ ID NO: 4154 - DNA, 391 bp, Glycine max
  Clone ID: LIB3073-019-Q1-K1-C10
gggtaaccctaaatgaaccatatggctacagcgtgaatggctacagtggtggaaattttgtaccaggtagatgttctaactacgttggaaaatgccctgctggtgattcttccaccgagccctacattgttaaccaccacttaatacttgctcatggagcagcagtcaattgctacaagaacaaataccaggctcatcggaaaggacaaattggagtcaccatagtgactttcttctttgaaccaaaatctaatagtgatgctgatcgcaaggcagcaaggcgagctctggactttatgcttggctggtttgctaatcccattacatttggtgactatcctgagagtatgagatctttagttggttctagactccccacattcaccaaagc

SEQ ID NO: 4155 - DNA, 394 bp, Glycine max
  Clone ID: LIB3073-019-Q1-K1-C11
ggagtggattggagttaagcaaccactcctggactcgtacgttgtagacatatcctgtttcagttggcttaaggttttctttttattatataggaagaaacgaaatgaaacttgcttctttgatttctggtttcactgattacactcacctcctctctattaaggacaatgtgatgagggaagagaagacaattcctacaaggaagaatgaagtgaagtttttcaagagcttggctcctcctcttgtggctgcttttctagtcttatctccaatttgcagcactccagtttcaagtgctcaaaccgtagatattcagagaggaaccacattgtttcgtcaagcttgtattggatgccacgatgcatgtggaaacataatacataccggggcaac

SEQ ID NO: 4156 - DNA, 341 bp, Glycine max
  Clone ID: LIB3073-019-Q1-K1-C12
gcttcttcaattcagagagagcgaaacggcggcacgcgcaaaaatggtgaagtttctgaaaccaaacaaagccgtcatcgtccttcagggacgctacgccggcaaaaaagccgtgatagtgagaaccttcgatgaaggcacgcgcgagcgcccctacgggcactgcttggtggcagggataaagaagtaccctgcgaaggtgatcaagaaggattcggccaagaagacggccaagaagtcgcgtgtgaaagcgttcgtgaagctcgtgaactaccagcaccttatgcccacgcgctacacgctcgatgtcgatttgaaggacgcggttacccccgacgtgc

SEQ ID NO: 4157 - DNA, 442 bp, Glycine max
  Clone ID: LIB3073-019-Q1-K1-A7
accggttgggagatccaggcttgagcacggcgtccgtacgctgacagaagcgtctagaagggatgaagggagggaagaatagaaggggatctggaagtggaaaacacactggagagttcttcaggagaagggatgcatggaggaagcatccgatgctcaccaatcagctccgccacgccacccctggccttggcatcgccgtcgtcgccttcggtatctacctcgtccgcgaacaagtctacaataggctctatgctcccgatcctcattcgatttctcacgtgaaagccggggatcaccactaaacgtttggacggacgcactccattccatcatcacttaataagcttgctagcatgttctcgcagcctttaatgtttaaatttcagaccgtgttcgcttctttggcactcactatgttgtcttgtatgcctacatttta

SEQ ID NO: 4158 - DNA, 302 bp, Glycine max
  Clone ID: LIB3073-019-Q1-K1-C5
taaggtttgtgcgtttggttcacaacataggtggcgctcagaaaactaaaaacaaccatgggagcatgatccacaaggtcgctcttggcatgaagaggggcaaattcaacctcgggtacagaccggtctcaaatactttaggaacctgcaaggaaaattgattatcattgctaataactgcccccccttgagaaagtcagagattgaatactatgctatgttggccaaggttggagttgatcattacaatgggaacaatgtggattcgggcactgcatgtggaaaatattacagagtgtgct

SEQ ID NO: 4159 - DNA, 81 bp, Glycine max
  unsure at all n locations
  Clone ID: LIB3073-019-Q1-K1-C6
ttggcgagggagggcgtgagaaaaacaaaagagtagtggcctttaggtggtgaagaacaagagctcaaatcaaatcgancc

SEQ ID NO: 4160 - DNA, 414 bp, Glycine max
  Clone ID: LIB3073-019-Q1-K1-C7
ttttagggggcacaagtgagtttgttgatcgggatgactagaaacagtgtgaggaaaatgaaggtccttgttttcttcgttgctacaattttggtagcatggcaatgccatgcgtacgatatgttccctctccgaatgaacactggctatggtgcccgtactccggaggtgaaatgcgcaagttggaggcttgctgtggaagcacacaacatctttggctttgagaccattcctgaagagtgcgttgaagcaacaaaggaatacatccatggcgaacaatatagatcagactccaaaacagttaaccaacaagcttacttttatgccagagacctcgaagtccatcccaaggacacatttgtgttcagtatagatggcaccgtactctctaatattccatactacaaaaaacat

SEQ ID NO: 4161 - DNA, 390 bp, Glycine max
  Clone ID: LIB3073-018-Q1-K1-H12
actcgaattgttccacgccacatccaattggcggtgaggaacgacgaagagttgagcaagcttctaggagatgttaccattgctaacggcggtgttatgcctaacattcacaaccttcttcttcccaagaaggctgggggctcatccaagggtgctgctgctgacgatgactcttaaatagggattcactgttcacaaagttcttgaatttagattctatgtttgctctctttttttcctttttatttgtagttatgataattgtgccctttgtagtagtagttaggttttcagtcagatgtgtttaaagaatgctcttacgcatcaagaaaggttgttcaaaatttaaattattttaatgtcacctttgagtcttgatctagcatttga

SEQ ID NO: 4162 - DNA, 337 bp, Glycine max
  Clone ID: LIB3073-018-Q1-K1-H2
gatagcaagtagcaaggagactagctctatagggaggttacattgcaaaaatggcatcattcaccatgacagcttctatctttggctgcccaactgtcaccaaacggtagccagtggctgcaccgacgacattactcgtactgagtactgacaaagctgaacgggaaaaagccacttatgacaacaatgatagcaatggaatgaggaacttgatgttcgctgcggctgctgctgctgttctctctgttgctgggatggcagtggcagatgagcctaaaccaggaacctcaaaacccaagacaaagtatgccccaatttgtgtcaccaatcctacagc

SEQ ID NO: 4163 - DNA, 412 bp, Glycine max
  Clone ID: LIB3073-018-Q1-K1-H3
cggttatggtccaacaccaagactaaccctctatgaggggttcctttgaatcctagctatgactactcattacagcccttatcctcattcctcaaggtcttgctacttactacaaaccaattaagaagccaccagtacatcaccctactacttacaaacctccactgtacaaactacctgtttataagccagatccacctgtttacaagcccaaaccaccggtttacaatccaccatataagattccaccatactagaaaccaccttattgatagtaccctccagtagagctcaacacccaagcctaaagcatgcactgatgtctattatctacttaacaattatgattaactgctttgagttattctagcattgcgatttacatcttcatatcaatgcttatacttgactc

SEQ ID NO: 4164 - DNA, 409 bp, Glycine max
  unsure at all n locations
  Clone ID: LIB3073-018-Q1-K1-H4
cgcccatgctttcgccctctgcgtcgccgtctccgtcggcgccaacatctccggcggccacgtcaatcccgccgtcaccttcggcgccttcgtgggcggcaacatcaccttactccgcggcatcgtctacgtcatcgcccagctcctcggctccatcgtggcctccctcctcctcgccttcgtcactgcctcccctgttccagcattcgggctttccgctggagtcggagttggcaacgctttggtgttggagatcgtgatgaccttcggtttggtgtacacagtctacgccactgccgttgaccccaagaagggcaatttgggaattattgctcccatcgccattggtttcattggtggcgctaacattttgntgggtggggccttctccggagcagccatgaaccct

SEQ ID NO: 4165 - DNA, 410 bp, Glycine max
  Clone ID: LIB3073-018-Q1-K1-H5
gaaattaaaaatgctatcaaggaggaatcagagggcaagttgaagggaattcttggttacactgaagatgatgtggtctccaccgactttgtgggcgatagcagatcaagtatttttgatgcaaaggctggaattgcattgaataagaactttgtgaagcttgtctcttggtatgacaacgagtggggatacagctcacgtgtcattgacctgcttgtattcgttgccaagaagtctttttaaggttgtactgaaaaaaaagtagcttgtctagacattatgtgctggtgtctagctgcgatttagtgtcttcttgctcgggcagaaatgagaagtatgaataaatcggtttcgggaaccggtgttgttaccctgttaggagcattaagcttttttttgttgtctcttct

SEQ ID NO: 4166 - DNA, 319 bp, Glycine max
  Clone ID: LIB3073-018-Q1-K1-H6
gacggcaacagaagaataatcgagacgcagggcatagtgatcattttttaatttctcagatttatccgacgtcgctgcagatccaccaaccgttatggctgccttcagcggtgatgaaacggcaccgtttttcggcttccttggcgccgcagctgccctcgtcttctcctgtatgggagctgcctatggcacagcgaagagtggcgtgggcgtggcttccatgggtgtaatgagacctgagctggtgatgaagtcgattgttcctgttgtcatggctggagttttgggcatttatggccttattattgctgttattatc

SEQ ID NO: 4167 - DNA, 411 bp, Glycine max
  Clone ID: LIB3073-018-Q1-K1-H7
gaccaacaccaaaacaaacccactaagatggcttcctttgtatccttcctagtgctgcttcttgcagcccttatcctcatgcctcaagggcttgctacttactacaaaccaattaagaagccaccagtgtacaagcctccagtgtacaagccaccagtgtacaaaccaccggtttataagccaaaaccaccggtttacaagccgaaaccaccggtttacaagccaccatataagaagccaccatacaagaaaccaccttatggaaagtaccctccagtagaggacaacacccatgcctaaagcaagcaatgaggtctattatctacttaataaataagaggaactgctttgtgttttctagcattgtgatttacaacttcgtagcaatgcatattcttgactcttgcatgc

SEQ ID NO: 4168 - DNA, 397 bp, Glycine max
  Clone ID: LIB3073-018-Q1-K1-H8
ggcacaagtgagtttgttgatcgagataactagaaacagtgtgatgaaaatgaaagtccttgttttcttcgttgctacaattttggtagcatggcaatgccatgcgtacgatatgttccctctccgaatgaacactggctatggtgcccgtactccggaggtgaaatgcgcaagttggaggcttgctgtggaagcacacaacatctttggctttgagaccattcctgaagagtgcgttgaagcaacaaaggaatacatccatggcgaacaatatagatcagactccaaaacaggtaaccaacaagcttacttttatgccagagacctcgaagtccatcccaaggacacatttgtgttcagtatagatggcaccgtactctctaatattccatactac

SEQ ID NO: 4169 - DNA, 378 bp, Glycine max
  unsure at all n locations
  Clone ID: LIB3073-018-Q1-K1-H9
ggcatgcatatgaaataaactgcaaccgtgacgaaagttgcgtagcaatagcatactcttactctgattcgttagtgaagaaaaatggcaacaatcatcgccggcaccccaactacatcaatcactcgcacaggtcatgtgctcaaacgacctgttggggcctcatcctctaccgttcttggattgccagcaatggccaaggcggngagagtgaggtgctccatggaggaaaagccttcaagcagctcaaacctagggatgggggcatccttgttagcagctgcagctgccgcaaccatgtcaagcccagcagccatggctttggttgatgagagactcagcactgaaggaactgggcttccctttgggcttagcaac

SEQ ID NO: 4170 - DNA, 402 bp, Glycine max
  Clone ID: LIB3073-019-Q1-K1-A1
ggattccctcattcttcatccatagacatgggcaccgtcacttctgcagccgttgctattccctcattcactggcctcaaggcaagcgcaggcaaagtgagtgccgcagttaaagtctcagctccccaagccacaaggttgggcatcaaggcttcgctgaaagacgttggagtcgctgttgtggccactgccgcgagtgcagtgctggctagcaacgccatggccattgaagtgttgctgggtggtgatgacgggtctctggctttcgttcccaacaatttctccgtggcctctggggagaagatcgtgttcaagaacaacgcaggtttcccccacaacgttgtgttcgacgaggacgagattcctagcggcgtggatgcagggaaaatctccatgagcgat

SEQ ID NO: 4171 - DNA, 398 bp, Glycine max
  Clone ID: LIB3073-019-Q1-K1-A11
accggcccggaatacccaggcggacgcacgcgtgcgagagaagaccacagaaggggatctggctgcataaaaacaagtagttgcgagctaataagaacgaagtgggtgactcaatgatctccttcacagctgttaccaccgtctaccgtgcctgtgccggcatggttgctccattcaccggcctcaaatacatggctggcttccccacgtggaagaccaacaatgacattacctccattgcttgcaaccgtggatgagtacaatgcatgcatgtgtggccaccaattggcaagaagaagttcgagactctttcctacttgccagacctagatgatgcacaattggcaaacgaagtcgaataccttctaaggaaacgatggattgcttgcttggaattc

SEQ ID NO: 4172 - DNA, 401 bp, Glycine max
  unsure at all n locations
  Clone ID: LIB3073-019-Q1-K1-A12
agatgggggcgtttcactcggatcgcgcattcacaaataagggtgaagaggtcactgccggaagaagagagcaacaccatctttcattttccggcgatctcttgtttcttccatcatcaccgttttccggcgatccctaatcctcgcaaacagaaatgacgacatcaaggcgccttgcggacaggaaggtggagaagtttgagaagaacatcacaaaaagaggatttgtgccagacactaccactaagaagggaaaagactaccctgttggcccagtgctgctcggtttcttcgtctttgttgtcattggatcatctctcttccagatagtcaggacagcaacgagtggaggcatggcttanatgggagcttgttttggaatttgggcatcttctctttct

SEQ ID NO: 4173 - DNA, 374 bp, Glycine max
  Clone ID: LIB3073-019-Q1-K1-A2
tttattaaaccaaagcaaaaggccatataatgtttttttatttgaaataatgtccgggatcatccacaagattgaggagaccctccatgtgggagggcacaagaaagaggagcacaaatgagaacaccatggtgagcacaaaggtgtacacaaaggagaacaccatggtgggcacaaaggtgaacacaaaggagaacaacaccatggggagcacaaggagggacttgtggataagatcaaggacaagatccatggtgatggccatgacaagggtgagaaaaagaagaagaaggacaagaagaagaaggagcatggacatgaccatcatggtcatagcagcagcagtgacagtgattagatcttatatgttaagc

SEQ ID NO: 4174 - DNA, 386 bp, Glycine max
  Clone ID: LIB3073-019-Q1-K1-A3
ggaacttttgatgccataaaaaaccatcccatattagggctatttctgtctctgcctctccctttgtttcaagttccctctgcttattctgcacaggaacgatgtctgagaaaaccacagctgagaaccttattgaaaaccttgtggacacatttgttgataagaaaaaatctgtatcattctttgaggatgataagtcagactcagtgagttctcagatcaatagactgtttggacgccagaaacctgtgcaccatgttttagggggtggaaaatctgcggatgtcttgctatggaggaacaagaagatttctgctagtgttttagcatgtgcaacgattgcatgggtgcttttcgaatggcttaattacaactttcctactatc

SEQ ID NO: 4175 - DNA, 246 bp, Glycine max
  Clone ID: LIB3073-019-Q1-K1-A6
ggagaagcattatcaaaaagcaagaagaactagtctaagcagaaatggcctcttcagtgatggcatctgtggccctcaaacctgcccctttcactgttgagaagtcctcagttagaggccttccctccctctcaaggaactcctcttcattcaaagttgtggccagtggtggcaagaagatcaagactgacaagccttatggaattaatggtggcatggctttgagggaaagagttgatgcatctg

SEQ ID NO: 4176 - DNA, 353 bp, Glycine max
  Clone ID: LIB3073-018-Q1-K1-H11
ggtatatcatttacaatttgaatctctctctctctctgtctctctctctctagacttagattttgtgaatggctgaagtggaagagggacaggtcatcggcgtccacaccgttgatgagtggaagctgcaactccagaatgcacaagactccaaaaaactgattgtggtggatcttactgcttcctggtgtggtccatgccgttttatggccccagttcttgcagaggttgcaaagaaaactcctgaattgatcttcctcaaagtggatgtggatgaagtgaggcctgttgctgaggaatattccattgaagccatgccaaccttcctcttcttgaaagatggcgagatcgtg

SEQ ID NO: 4177 - DNA, 269 bp, Glycine max
  Clone ID: LIB3073-018-Q1-K1-F4
ctgcagagacacagaggggaccaagtgaccaatatagcccaagccctgtgaaccaaaccctaacacacacccatttgattcagttccatggctagcctcaagttgcatttttggctgcagtgctctgcatggttgtggtgagtgcacccatggcacatgcagctatcacgtgcgggcaggtgacgagtagcctggccaattgcatcggttacctccagaagggaggaacgccgtcgtcgggatgctgcaacggagtgaagagcctcaat

SEQ ID NO: 4178 - DNA, 404 bp, Glycine max
  Clone ID: LIB3073-018-Q1-K1-F6
ggctccgccatttttcgtagctgctggtcggtgcgcgtgaacaagcctcaggtaagccaaaaccatggttaagcataacaatgttatcccaaacggacacttccgtaagcactggcagaactatgcgaagacttggttcaatcagccagcacggaagacaaggagacgattggctcgtcagaagaaagctgtgaagatattccccagacctacggctggacctctcaggcccattgtacatggtcaaactttgaaatacaacatgaaagtgagaagtggaaggggattttctcttgaagaactcaaggcagcagggattcccaaaaagcttgcaccaaccataggtattgctgttgatcatcgtcgcaagaaccgttctttggaaagtctgcaagctaatgtgc

SEQ ID NO: 4179 - DNA, 405 bp, Glycine max
  Clone ID: LIB3073-018-Q1-K1-F7
gcacaagtgagtttgttgatcgagataactggaaacagtgtgatgaaaatgaaggtccttgttttcttcgttgctacaattttggtagcatggcaatgccatgcgtacgatatgttccctctccgaatgaacactggctatggtacccgtactccggaggtgaaatgcgcaagttggaggcttgctgtggaagcacacaacatctttggctttgagaccattcctgaagagtgcgttgaagcaacaaaggaatacatccatggcgaacaatatagatcagactccaaaacagttaaccaacaagcttacttttatgccagagacctcgaagtccatcccaaggacacatttgtgttcagtatagatggcaccgtactctctaatattccatactacaaaaaacat

SEQ ID NO: 4180 - DNA, 408 bp, Glycine max
  Clone ID: LIB3073-018-Q1-K1-G1
accaagtgaaccaatatagcccaagccctatacaagcaaaccctaacacacacccatttgattcagtttccatgactagcctcaaggttgcatttttggctgcagtgctctgcatggttgtggtgagtgcacccatggcacatgcagctatcacgtgcgggcaggtgactagtagcctggccaattgcatcggttacctccagaaaggaagaacgccgtcatcgggatgctgcaacggagtgaagagcctcaatgccgacgccaagaccaccgtcgaccgtcagactgcgtgcaactgcctcaagtcggccgtcagccaaatctccggcttcaacgccaacaacgccgactcgctccccggcaaatgcggagtctccatcccctacaagatcagcaccttcaccaact

SEQ ID NO: 4181 - DNA, 405 bp, Glycine max
  unsure at all n locations
  Clone ID: LIB3073-018-Q1-K1-G10
gaaggtgcaagagtttgttgtgagctataagctagtttatcgtgaggagaatatgaagttgtttgttttctttgttgctgcagtagttttggtagcatggccatgccatggcgcaggctaccaaaggttccctctccgaatgaaaactggctatggtgagcgttcttcggaggtaaaatgcgcaagttttaggcttgctgtggaagcacacaacatccgagcctttaaaaccattcctgaagagtgcgttgaaccaacaaaggactacattaatggcgaacaatntagatcagactctaaaacagttaaccaacaagctttcttttatgctagtgaacgcgaagtccatcacaacgacatatntatattcggcatagataacaccgtactctctaatattccata

SEQ ID NO: 4182 - DNA, 318 bp, Glycine max
  Clone ID: LIB3073-018-Q1-K1-G12
ggtgcacaagtgagtttgttgatcgagatagctagaaacagtgtgatgaaaatgaaggtccttggtttcttcgttgctacaattttggtagcatggcaatgccatgcgtacgatatgttccctctccgaatgaacactggctatggtgcccgtactccggaggtgaaatgcgcaagttggaggctcgctgtggaagcacacaacatctttggctttgagaccattcctgaagagtgcgttgaagcaacaaaggaatacattcatggcgaacaatatagatcagactccaaaacagttaaccaacaagcttacttttat

SEQ ID NO: 4183 - DNA, 406 bp, Glycine max
  Clone ID: LIB3073-018-Q1-K1-G2
gagtgaagaagatggcgtcgagcggagcggtaccgttttggagggcggcggggatgacgtacataacatactcaaacatatgcgcgaatctgctcaggaattgcctcaaggaaccctacaaggccgaatccctctctcgtgagaagctccattttggtctctccaaatgggtcgacgccaagcctgaaaaacctactattcgttcagacaccccagagcagtgatctggaatagttggaagctataaatgcataaatctttgagatctggaagttcattggcattttgaacctttctgtgatgtttaattcctttggttttttctcttcatgaaatggaacatggactggaatttgatttgcacggctaatcttggaataattccaggttaaaccgatgaattaaa

SEQ ID NO: 4184 - DNA, 414 bp, Glycine max
  Clone ID: LIB3073-018-Q1-K1-G3
gagcgccaatgtttttttcagaggagtttcatctggtaatcaaaagagtttatcttatagtaagaaatcgatgtcttactccattttaaggaacaaaacatgagaacaatagcctgacaaagggtttagccataaaatcgaatccctcattgatttgagatattgataaggtgaatactcatttctcgtcaatgctaggcataatgcgggtatagggacctaaaaaagattatcttttcttcctatcttatgaactttaaagtgtatgaagtgtcatttgctatcttagattttaattttaataggtagataaagagtccatttaacttaagttgatctaagccagaagcagacctacgtcaagataaatcttctttgaaacactttggtagtgctcttagattgtaatccaaa

SEQ ID NO: 4185 - DNA, 357 bp, Glycine max
  Clone ID: LIB3073-018-Q1-K1-G4
gatagcagcatcatacaaagcattgaattcaaaaacttaagttcattccttgtgttttgctttcttcctcaaaaccaaacatgtcgaacacatgcggcaactgcgactgcgctgacaagactagctgcaccaagggaagcagctatggtgttattgtagagactgagaagagttacatcgagactgttgtcatggatgttccagcagctgagcatgatgggaaatgcaagtgttgcactaactgcacttgcacggactgcacctgtggccattaaggaatatgtatgaaaatgtaattgccatgtgtttggcaatacaaatatccaaataatgtaatcttcgtatgaataaatgtgt

SEQ ID NO: 4186 - DNA, 407 bp, Glycine max
  unsure at all n locations
  Clone ID: LIB3073-018-Q1-K1-G5
ggcacaagtgagtttgttgatcgagataactggaaacagtgtgatgaaaatgaaagtccttgttttcttcgttgctacaattttggtagcatggcaatgccatgcgtacgatatgttccctctccgaatgaacactggctatggtgcccgtactccggaggtgaaatgcgcaagttggaagcttgctgtggaagcacacaacatctttggctttgagaccattcctgaagagtgcgttgaagcaacaaaagaatacatccatggcgaacaatatagatcagactccaaaacagttaaccaacaagcttacttttatgccagagaccttgaagtccatcccaaggacacatttgtgttcagtatagatggcaccgtactctgtaatattccatactacaaanaacatg

SEQ ID NO: 4187 - DNA, 415 bp, Glycine max
  Clone ID: LIB3073-018-Q1-K1-G6
gttctagtgtgtgattgtttgttgttgtagcgtcgttcttcttcttttgttgttctgtgtttgtgtttgttttttctctcacctgaaaatgtcttgctgcggtggtaactgtggttacggaagctcctgcaagtgcggcaacggctgccgaggctgcaagatgtacccagacttgagctacactgagtcaaccaccaccgagaccttggtcatgggagtggcacctgttaaggctcaatttgagggtgctgaaatgggtgtgcccgctgagaacgatggctgcaaatgtggaccaaactgctcctgcagcccctgcacttgcaagtgaggtgttgggagagcaagcttcaagcagagatagcccttaattaggaataatgataaactattaatgtgtagctaaaaacttatgtat

SEQ ID NO: 4188 - DNA, 409 bp, Glycine max
  Clone ID: LIB3073-018-Q1-K1-G7
gatcgcatttgatagcactcaccctcattagcgacacgaaagcatatccgaaaccttctttggaagtctctgattatcctaatggctcctgcaaaggcactgaagaagccggcggagaataagccagcggcagagaacgcacctgcggagaagaagccggaggctgcgaatacgatctcgaaggaaggatggagctagaagaagaagaagcacacgaagaagaacctggagacctacaagatctacatcttcaacgtcctcaagcaggttcaccgcgacattggcatttacagcaaggccatgggcatcatgaacagcttcatcaacgacatcttcgataagctcgctcaggaagcgtcgcgattggctcgctactacaagatgcccaccattacctctagggagatcc

SEQ ID NO: 4189 - DNA, 407 bp, Glycine max
  Clone ID: LIB3073-018-Q1-K1-H1
gatagcaagtagcaaggagactagttctgtattgagagtacattgcaaaaatggcatcattcaccatgacagcttctatctttggctgcccagctgtcaccaaacggtcggcagtggctgcgcagaggagattactcgtagtgagtactgccaaagctgaaggggaaaaggtcagttatgacaacaatgatagcaatggaaggaggaacttgatgttcgctgtggctgctgctgctgttttctctgttgctgggatggcagtggcagatgagcctaaaccaggaacctcagaagccaagaaaaagtatgccccggtttgtgtcaccaatcctacagctaggatttgtcgcaattgaggatctcctgtttcattttacctctgatgatcggaaatgtacgttggggat

SEQ ID NO: 4190 - DNA, 380 bp, Glycine max
  Clone ID: LIB3073-018-Q1-K1-H10
ggcgcacccagagaggaggaagctttgagagagagagagggaggagggagagtgttgacgctccatcaagatgggtatttctagggattccatgcacaagaggcgtgccactggtggcaagaagaaggcatggagaaagaagggaaagtatgagcttgggcgtcaggccgcaaacaccaagttatcaagcaacaaaactatccggaggatccgtgttcgaggtggcaatgttaaatggagggcattgaggttggataccggcaattactcatggggtagtgaagcagttactcgcaagactcgtattctagatgttgtttacaatgcctcaaacaatgagcttgtgcgaactcagaccctggtcaggaatgctattggtc

SEQ ID NO: 4191 - DNA, 360 bp, Glycine max
  unsure at all n locations
  Clone ID: LIB3073-018-Q1-K1-D9
aggggtgcacaagtgaatttggggatcgggataactagaaaccgtgttattaaaattaaagtccttggtttctttggtggtaccatttttggaacctgggaattcccttccttccaaattgttccttttccaattgaccttgctttgtgccctcctccgaggtgaaatcccaggttgaagctgctggtgagcaccacacatttttggctttgagaccattcctgaagagtgcgttgaagcaacanagggatacatncatggcgaacattatagatcagactccaaaacagttaaccaacaagcttacttttatgccagagacctcgaagtccatcccaaggacacatttgtgttcagtat

SEQ ID NO: 4192 - DNA, 414 bp, Glycine max
  Clone ID: LIB3073-018-Q1-K1-E1
gaaggtgcaagagtttgttgtgagctataagctaggttatcgtgaggagaatatgaagttgtttgttttctttgttgctgcagtagttttggtagcatggccatgccatggcgcaggctaccaaaggttccctctccgaatgaaaactggctatggtgagcgttcttcggaggtaaaatgcgcaagttttaggcttgctgtggaagcacacaacatccgagcctttaaaaccattcctgaagagtgcgttgaaccaacaaaggactacattaatggcgaacaatttagatcagactctaaaacagttaaccaacaagctttcttttatgctagtgaacgcgaagtccatcacaacgacatatttatattcggcatagataacaccgtactctctaatatcccatactatgaaaa

SEQ ID NO: 4193 - DNA, 336 bp, Glycine max
  Clone ID: LIB3073-018-Q1-K1-E11
accttaagaagatgcaagatctactcctaaggcaaaaggaagccatgtatggttctaaacctagtccaagaaaaaataacagctttagaaagactaatagttaccgtgcaaatggaaatggatctatgcctcctacacctcgccgtaactctttaagtggtggaacgacatctgaactactgacaccgcggtcctactctggccgtcagaatggatattttaaggaaatgagaagattgtctactgcacctctgaactttgtggctatatctaaggaagatacaatgtcatatgcttccctttgtggttcagagcctgattcccctccccaagttt

SEQ ID NO: 4194 - DNA, 346 bp, Glycine max
  Clone ID: LIB3073-018-Q1-K1-E12
agtctagacttttagatgatatggtactttccagacttaagggtgttaaacgcctgtattaatccaacaaaaaatgggcctttgaaactaaagaaaaacaaactaagattggcccaaactgaagaaatacaaaaaaatggcttgagatcaagcctaaccacgaaaaaagaaaaatgaaaaaatgaccaggggcttaaaatgtatttaggttgagaatgcttgagtctaataagtctagacttttagatgatatggtactttccaaacttataaatgttaaacgcctgcattaatacaacaaaaaatgggcctttgaaactaaagataaactaactaagattggccc

SEQ ID NO: 4195 - DNA, 240 bp, Glycine max
  unsure at all n locations
  Clone ID: LIB3073-018-Q1-K1-E2
gacccccaaaccctgctgcataggaagaaagcctagcctctcaccctccctgcgacacgatgcagatcttcgtgaaaaccctaacgggtaagacgatcacccttgaggtggagtcttctgacaccatcgacaacgtgaaggccaagatccatgacaaggaaggcatccctccggaccagcagcgcctcatcttcgtcggatagcagctggaggacagncgcaccctcgccgactacaaca

SEQ ID NO: 4196 - DNA, 377 bp, Glycine max
  Clone ID: LIB3073-018-Q1-K1-E3
gatagcgtttttcattgtgcattattcaatggccggcacagcagctctatccggaaccatggtgagcacctccttcatgaggaagcaacctatgacgaccaagagcctaaagacattccccaacgctctttttggtctgaaaggtggacgaggtggtcgtgtaacttgcatggcctcgtacaaggtgaagctcataaccccagaaggagaagtggagtttgaatgcccagatgatgttgtcattgttgacaaggctgatgaagaaagcattgaacttccctactcgtgcagggctggttcttgcgtttcatgtgttgggaaaattgtgaaaggtgacgtggaccagtcagatggtagcttccttgatgatgaacaaa

SEQ ID NO: 4197 - DNA, 407 bp, Glycine max
  Clone ID: LIB3073-018-Q1-K1-E5
ggcacaagtgagtttgttgatcgagataacgagaaacagtgtgatgaaaatgaaggtccttgttttcttcgttgctacaattttggtagcatggcaatgccatgcgtacgatatgttccctctccgaatgaacactggctacggtgcccgtactccggaagtgaaatgcgcaagttggaggcttgctgtggaagcacacaacatctttggctttgagaccattcctgaagagtgcgttgaagcaacaaaggaatacatccatggcgaacaatatagatcagaccccaaaacagttaaccaacatgcttacttttatgccagagacctcgaagtccatcccaaggacacatttgtgttcagtatagatggcaccgtactctctaatattccatactacaaaaaacatg

SEQ ID NO: 4198 - DNA, 381 bp, Glycine max
  unsure at all n locations
  Clone ID: LIB3073-018-Q1-K1-E6
ggttctagtgtgtgattgtttgttgttgtaactcgttcttcttcttttgttgttctgtgtttgtgtttgttttttctctcacctgaaaatgtcttgctgcggtggtaactgtggttgcggaagctcctgcaagtgcggcaacggctgcggaggctgcaagatgtacccagacttgagctacactgagtcaaccaccaccgagaccttggtcatgggagtggcacctgttaaggctcatttggaggtgcctgaatgggttgtgcccgcttagaacgattgctgcaaatgtggaccaaactgctcctgcaacccctgcacttgcaagtgangtgttgggagagcaagcttcaagcagagatagcccttaattaggaataatga

SEQ ID NO: 4199 - DNA, 407 bp, Glycine max
  Clone ID: LIB3073-018-Q1-K1-E7
agggctatagctcagttaggtagagcacctggtttacacgagcgccaatgtttttttcagaggagtttcatcttgtaatcaaaagagtttatcttatagtaagaaatcgatgtcttactccattttaaggaacaaaacaagagaacaatagcctgacaaagggtttagccataaaatcgaatccatcattgatttgagatattgataaggtgaatactcatttctcgtcaatgctaggcataatgcgggtatagggacctaaaaaagattatcttttcttcctatcttatgaactttaaggtgtatgaagtgtcatttcctatcttagattttaattttagtaggtagatgaagagtccatttaacttaagttgatctaggccagaagcagacctacgtcaagataa

SEQ ID NO: 4200 - DNA, 361 bp, Glycine max
  Clone ID: LIB3073-018-Q1-K1-E9
ggagtgtcattgtgaagttggaaacaatgcgagcttcttcgctctccttcctccattcttgtacatccccctcttcctcttccttattgtcaatttcacctccaaaccccaaaccctctcacttcctacctttcgtggtcgaagccaaagacaggacccgcagggaagacaggaccgctcgccacactcgcatcagaaagaaggtcgaagggacgcccgagaggccgaggctgtccgtgttccggtcgaacaagcatctctctgtgcaggtgattgatgacaccgcaatgcgcacgcttgcttcggtgtcgacaatgcagaagacggttgctgatgagttcaactactccgctggccctac

SEQ ID NO: 4201 - DNA, 243 bp, Glycine max
  Clone ID: LIB3073-018-Q1-K1-F10
gacagcttctgctgtttgtggttacgccggctattgcttgggttctttacaacatcttgcagcctgctcttaaccagctcaacaggatgagatcccagtgatttaatgtttgtgaaatttaaatagggaaggggcttaattaaatgctgtgggatatcaattatcatcatatgatcatactaatagttttcatgtaacttgcttcctgcaacttgtatctaatgctatatccgcttttctttc

SEQ ID NO: 4202 - DNA, 382 bp, Glycine max
  Clone ID: LIB3073-018-Q1-K1-F11
gatctggcagcagaagaacaagtagttgagaggctaagaagagaagcaaatggcttcctcaatgatctcttccccagctgttaccaccgtcaaccgtgccggtgccggcatggttgctccattcactggcctcaagtccatggctggcttccccaccagaaagaccaacaatgacattacctccattgctagcaacggtggaagagtgcaatgcatgcatgtgtggccaccagttggcaagaagaagtttgagactctttcctacctgccagaccttgatgatgcacaattggcaaaggaagtagaataccttcttaggaagggatggattccttgcttggaattcgagttggagcacggtttcgtgtaccgtgagcacaac

SEQ ID NO: 4203 - DNA, 401 bp, Glycine max
  Clone ID: LIB3073-018-Q1-K1-F12
gagacgacagaagggggcacaagtgagtttgttgatcgagataactagaaacagtgtgatgaaaatgaaggtccttgttttcttcgttgctacaattttggtagcatggcaatgccatgcgtacgatatgttccctctccgaatgaacactggctatggtgcccgtactccggaggtgaaatgcgcaagttggaggcttgctgtggaagcacacaacatctttggctttgagaccattcctgaagagtgcgttgaagcaacaagggaatacatccatggcgaacaatatagatcagactccaaaacagttaaccaacaagcttacttttatgccagagaccccgaagtccatcccaaggacacatttgtgttcagtatagatggcaccgtactctctaata

SEQ ID NO: 4204 - DNA, 411 bp, Glycine max
  Clone ID: LIB3073-018-Q1-K1-F2
ccatcacaacgacatatttatattcggcatagatgacaccgtactctctaatatcccatactatgaaaaacatggatatggggtggaggaatttaatgaaaccttatatgatgaatgggttaacaagggcgacgcaccggcattgccagagactcttaaaaattacaacaagctggttgtctctgggcttcaagattgtattcttgtcaggaagatatcttgacaaaatggccgtaacagaagcaaacctaaagaaagctggctatcacacatgggagcagttaattctcaaggatccacatcttatcacttcaaatgcactttcatacaaatcagcaatgaaagagaatctgttgaagcaaggatacagaatatgtggaatcattggagaccaatggagcgatctgcttg

SEQ ID NO: 4205 - DNA, 414 bp, Glycine max
  Clone ID: LIB3073-018-Q1-K1-D6
ggttctagtgtgtgattgtttgttgttgtaacggggtcttcttcttatgttgttctgtgtttgtgtttgttttttctctcacctgaaaatgtcttgctgcggtggtaactgtggttgcggaagctcctgccagtgcagcaacggctgcagaggctgcaagatgtacccagacttgagctacactgagtcaaccaccaccgataccttggtcatgggaatggcacctgttaaggctcaatttgagggtgctgaaatgggtgtgcccgctgagaacgatggctgcaaatgtggaccaaactgctcctgcaacccctgcacttgcaagtgaggtgttgggagagcaagcttcaagcagagatagcccttaattaggaataatgatcaactattaatgtgtagctaaaaacttatgta

SEQ ID NO: 4206 - DNA, 375 bp, Glycine max
  Clone ID: LIB3073-018-Q1-K1-B8
gacgatgagtcgatttgataactaagatattgggattcgtgatattgatccaatttgatatcatcgaaatccaatttataccattgttgaattaattatcgatgaaagatttatcatctctatgggattaaatcccgaattttttattggaaatttaagagaaataaaacataataaagattatggaagtaaatattcttgcatttattgctactgcactgtttattctagttcctactgcttttttacttataatttacgtaaaaacggtaagtcaaagtgactaatttcactgaaatctgacttcttcatttttatcaatgtaatcaatgattaaaaaaaatgaaaaaggttttcaatttttggtcttagtct

SEQ ID NO: 4207 - DNA, 61 bp, Glycine max
  Clone ID: LIB3073-018-Q1-K1-B9
caccgtaaggggtgcacaagttaatttggtggatgggataacttggaaccaggttgttgaa

SEQ ID NO: 4208 - DNA, 414 bp, Glycine max
  Clone ID: LIB3073-018-Q1-K1-C1
gggagatagctgtgagtagtgagagggaggaagacgtagacataaagaaggagaagtgaagtgatgaatgccccagatcgttacgagcgtttcgttgtccctgaaggcaccaaaaaggtttcttatgagagggacacaaagatcatcaatgccgcgtccttcaccatcgagagagaggagcacactatcggcaacatcctccgcatgcagcttcacagagaccccaatgtgttgtttgccggatacaagcttcctcaccctcttcaatacgaaattatcgtcaggatacacaccactagtcagtcttcgccaatgcaagcatataaccagtctattaatgatctggacagggaacttgatcatttaaagagtgcctttgaggcagagatgttgaagttttctagggactattga

SEQ ID NO: 4209 - DNA, 369 bp, Glycine max
  Clone ID: LIB3073-018-Q1-K1-C10
ggcgcaattgtgtgaggagatatctgtcacgagtttgtataaggagagaagcggacatgaagaagcaattagcatcaaggcgtttgctgatgtgggttatggtacatttgagcatttcaggagtgttgtccaagtccaaccacaccacaactacaacttctctgctgtgcgatggctccgtagaggactgcctcaacgttcaccacttggactcacagcttcccaccatctccagcacccacttccgcagaatcctcgctggagaaaaatgctgcagaggtaacactcagactgcaggtacaggtgatcccaataatcccaacttctgttcgaccgcaaccggttatcgtaagtgtggggccgcaactg

SEQ ID NO: 4210 - DNA, 323 bp, Glycine max
  Clone ID: LIB3073-018-Q1-K1-C11
ggcgcaattgtgtgaggggatatcgctcacgagtttgtataacgagagaagcggacatgaagaagcaattagcatcaaggcgtttgctgatgtgggttatggtacatttgagcatttcaggagtgttgtccaagtccaaccacaccacaactacaacttctctgctgtgcgatggctccgtagaggactgcctcaacgttcaccacttggactcacagcttcccaccatctccagcacccacttgcgcagaatcctcgctggagaaaaatgctgcataggtaacactcagactgcaagtacaggtgatcccaataatcccaac

SEQ ID NO: 4211 - DNA, 339 bp, Glycine max
  unsure at all n locations
  Clone ID: LIB3073-018-Q1-K1-C12
ggcatcaattcaaaatatatcatggattataagcatgggtttgtggaacacaacgaatacagtgtcttgccgctttcacaagtttggtgatgaccaaaagaatctggtcttccaaggtggtgccacgtcttcttccaggggcatagaactcacaaagttagacggtggaggaaaaccagtgggtggcagtgtggggagagtgttatactcttctncagtgcacctttgggaaagctctacagtggtcgcaagctttgaaaccgacttcaccttttgcatctcatcagactctactactgcaggtgatggccttgccttcttcattgcaccatttgacac

SEQ ID NO: 4212 - DNA, 413 bp, Glycine max
  Clone ID: LIB3073-018-Q1-K1-C3
gaagcttcaataagtaagtatcaatggcttgcgaagaatcccagaacaagcccaccagcgagcagtccactaccgaactcatcacgagcgcgaagctggtggcggaggcggcgcagtcggctctgaagagcgacagcgacaaagtggacaaggccaaggtggctgacgctgccggcgatcttctcgacgcggcggggaagtatggaaaacttgatgacaaacaaggcatagggcaatatgttgacaaggctgctgattatctgcataattaccagggtgataataccactgctccttcacagcctgcagagtctaaaggtgaagaaagtggcggtgggttaagtggtcttgcaaacttggctggaggcttcttcaaaaagtagttacaaagcaactaaataagaccttaattg

SEQ ID NO: 4213 - DNA, 411 bp, Glycine max
  Clone ID: LIB3073-018-Q1-K1-C4
gacaccaacaccaaaacaaacccactaagatgggttcctttggatccttcctaaggctggttcttgcaacccttatccttatgccttaaaggcttgctacttactaccaaacaattaaaaaaccaacaatgtaccaaccttcaatgtccaaccaaccatgtccaaacaaccggttaataagccaaaaccaccggtttacaagccgaaaccaccggtttacaagccaccatataagaagccaccatacaagaaaccaccttatggaaagtacccttcagtagaggacaacacccatgcctaaagcaagcaatgaggtctattatctacttaataaataagaggaactgctttgtgttttctagcattgtgatttacaacttcgtagcaatgcatattcttgactcttgcatg

SEQ ID NO: 4214 - DNA, 406 bp, Glycine max
  Clone ID: LIB3073-018-Q1-K1-C6
gaccacaccgagtcgcagaaaaagaaaggagcgatcatagtttcacttcggccttatccagtttagggtttcggttctctaccctatctttcacgtatcgaaaccttaaatttacgatcaggtctgagcaatctggttggtagaacctttggtcttagtgagtcaagttttatgtctgaattagacgatcaaattcctactgccttcgatccttttgctgatgcaaatgctgatgactcgggtgctgggtcaaaggagtatgtgcatattcgtgtacagcagcgaaatggtaggaaaagcctgacaaccgttcagggattgaaaaaggaattcagctataacaagatacttaaagacgtcaagaaagagttctgttgcaatggaacagttgttcaggacccagaac

SEQ ID NO: 4215 - DNA, 411 bp, Glycine max
  Clone ID: LIB3073-018-Q1-K1-C7
ggttctagtgtgtgattgtttgttgttgtaagtcgttcttcttcttttgttgttctgtgtttgtgtttgttttttctctcacctgaaaatgtcttgctgcggtggtaactgtggttgcggaagctcctgcaagtgcggcaacggctgcggaggctgcaagatgtacccagacttgagctacactgagtcaaccaccaccgagaccttggtcatgggagtggcacctgttaaggctcaatttgagggtgctgaaatgggtgtgcccgctgagaacgatggctgcaaatgtggaccaaactgctcctgcaacccctgcacttgcaagtgaggtgttgggagagcaagcttcaagcagagatagcccttaattaagaataatgataaactattaatgtgtagctaaaaacttat

SEQ ID NO: 4216 - DNA, 387 bp, Glycine max
  Clone ID: LIB3073-018-Q1-K1-C8
ggtgatccatatggctcttgaacctctgaggttttagaagctcagctaagcacaatagagagtttaattaggccattaacatatcatatggatgtgactaagcctcatgtgcttatgctgttgatcatcatggttgtctcaattgcagagaaaccatcagtaatagaaggaagggctctttccttgatatctggtcaagggtactcaaagatttttgcaacgcttggacttgtatgcaagtgttgtgatggggttggaagtgcctgcactagtacatggacagaatcttgcaataacttgcagtgtttaccttggaaatcacactagttaattattttctggatctttccttggattccattagctgtatattgagttttgaaatat

SEQ ID NO: 4217 - DNA, 348 bp, Glycine max
  Clone ID: LIB3073-018-Q1-K1-C9
gattatatttgagttcaagcaaatcaaagccatggccacctccaacttctctattgttctctccgtctccctagccttctttttggtgctacttaccaaggcacactcgaccgataccgtttctttcaccttcaacaagttcaacccagtccaaccaaacattatgctccaaaaagatgctagtatttcatcctctggggtgttacaactcaccaaagttggcagcaacggcgtgcccacctcgggatctctcggtcgtgccctttacgctgccccaatccagatttgggacagcgaaaccggcaaagtagccagctgggctacatcctttaaattcaacattttcgc

SEQ ID NO: 4218 - DNA, 426 bp, Glycine max
  Clone ID: LIB3073-018-Q1-K1-B6
acgcgtgcgaacacctgcgagaggactaccgaatgacgttgacacattgtagtgggcactctataactaattagaagccagcatacgccaaacatatgaatgctcgaactatgctctcagatactgagcattacgctatacacgagcgacactcatctagctgaggctaacacaagaagcagtaggcaaacggatgatatagcgcacaagaccgggcttgacaccgaagtcaggccctcaccgaaactcgctatggaggatgatccctctacgtaccgagccatgatatttatagaattcatgcagcttcaacagagccatgagcatcacagcaagacatgcttgaagacgatggacatgggcaatcaattgagctgctaccatagcttaactaggaaacagtagacacatgcattatttgcatct

SEQ ID NO: 4219 - DNA, 379 bp, Glycine max
  Clone ID: LIB3073-018-Q1-K1-D2
caacataggtcatcgaaaggatctcgaagacggagcaacgcacgaaagccgggatctttcagaaaatggattcctattcgaagggtgcataaccgcatggataagctcacactaacccgtcaatttgggatccaattcggttccttaggaggtatcgggaaggaattttggaatgtaataatatcgattcatacagatacagaagaaagggttctctattgattcaaacgctctacctacgagatagggatagagaaagaggaaaaaaccgaggatttcacatagtacttttggtcgaaaaatcgatctgatttttttcgtacttttcgctcaatgatgaaatgggtcagattctacaggaccaaaccttgtgggagtt

SEQ ID NO: 4220 - DNA, 402 bp, Glycine max
  Clone ID: LIB3073-018-Q1-K1-D3
gattatatttgagttcaggcaaatcaaagccatggccacctccaacttctctattgttctctccgtctccctagccttctttttggtgctacttaccaaggcacactcgaccgataccgtttctttcaccttcagcaagttcaacccagtccaaccaaacattatgctccaaaaagatgctagtatttcatcctctggggtgttacaactcaccaaagttggcagcaacggcgtgcccacctcgggatctctcggtcgtgccctttacgctgccccaatccagatttgggacagcgaaaccggcaaggtagccagctgggctacatcctttaaattcaacattttcgcacccaacaaatcaaactcagctgacgggcttgccttcttcttggcacccgtcgg

SEQ ID NO: 4221 - DNA, 408 bp, Glycine max
  unsure at all n locations
  Clone ID: LIB3073-018-Q1-K1-D4
gagcgccaatgttttttcagaggagtttcatgttgtaatcaaaagagtttatcttatagtaagaaatcgatgtcttactccattntaaggaacanaacaagagaacaatagcctgacaaagggtttagccataaaatcgaatccatcattgatttgagatattgataaggtgaatactcatttctcgtcaatgctaggcataatgcgggtatagggacctaaaaaagattatctnttcttcttatcttatgaactttaaggtgtatgaagtgtcatttcctatcttagattttaattttagtaggtagataaagagtccatttaacttaagttgatctaggccagaagcagacctacgtcaagataatccttctttgaaacactttggtagtgctcttagattgtaat

SEQ ID NO: 4222 - DNA, 418 bp, Glycine max
  Clone ID: LIB3073-018-Q1-K1-A1
gacggcactcgttttcgttctcgttctggtgtatagatctttgcgaaggaggtttacagcgctcaaccaaagatgcagaacgaggaaggacagatcactgagctttacattcctaggaagtgctccgccacaaacagattgattaccgctaaggaccatgcttcggttcagatcaacattgggcatgtggatgagaatggcgtctacaatggccatttctccacttttgccctctgcggattcatccgtgctcagggtgatgctgacagtgctctagaccgcttgtggcagaagaagaaagttgaagttaagcaacagtagacacccatgatagtttgttacttcgttatgtattaatttctactcttgctagagatatttgagtactatgattgtcgttttgagcacaaatactcat

SEQ ID NO: 4223 - DNA, 265 bp, Glycine max
  Clone ID: LIB3073-018-Q1-K1-A10
acgcgtgcgaacacctccgagagtgtcaactgaaggggaactacaacgctcgctaggtagtttcatctgggtaacgcttatgtctcgcacagaacaagtcaccattacaggatcaggactccgactgactacaattactacattggctatcattactgtgaacgctaccgcgctaatatactggtttactaatgcactcatctgggtaccgcactgactcaacttgctagacaggcctcttaaggcacatggtatcctaggaaat

SEQ ID NO: 4224 - DNA, 357 bp, Glycine max
  Clone ID: LIB3073-018-Q1-K1-A12
gggggggctaccaactgcggcttgatcagtctttcttggaactttgttactctcacacatgtctcgctccgtgcctttggtttcaaccatttttgtcttgcttctgcttctggtggccactgagatgatggggccaacaatggtggcagaagcaagaacttgtgagtctcagagccaccgtttcaaggggccatgtttgagtgacaccaactgtggctctgtttgccgaaccgaacgtttcactggaggacactgccgtggcttccgtcgcagatgcttctgcaccaaacattgctaattataaaaaattaattaagagtgctttgatagaagatgatagatctatcatctttctac

SEQ ID NO: 4225 - DNA, 391 bp, Glycine max
  Clone ID: LIB3073-018-Q1-K1-A2
gattccggttgaaacagaaaacctaatttctcaaatttgatttcgcaccaaattttcctcactaaaatgtctggtcgtggaaagggtggcaagggtttgggaaagggaggtgccaagaggcacaggaaggttctgcgcgatgacattcaaggaatcacgaaacctgcgattcgtaagttagcgagaagaggtggcgtgaaaaggatcagtggtttgatctacgaggaaaccagaggagttctgaagatattcttggagaacgtgattcgtgatgctgtgacctacactgagcacgctatgaggaagacagtgactgctatggacgtggtttatgctcttaagaggcaaggaaagaccctctacggttttggaggctgaacaattctttttt

SEQ ID NO: 4226 - DNA, 376 bp, Glycine max
  unsure at all n locations
  Clone ID: LIB3073-018-Q1-K1-A4
ggcacaagtgagtttgttgatcgagataactagaaacagtgtgatgaaaatgaaagtccttggtttcttcgttgctacaattttggtagcatggcaatgccatgcgtacgatatgttccctcttcgaatgaacactggctatggtgcccgtactccggaggtgaaatgcgcaagtggaggcttgctgtgggaacacacaacatctttggttttgagaccattcctgaagagtgcgttgaagcaaccaaagaatacatncatggcgaacattttagatcagactccaaaacagttaaccaacaagcttacttttatgccagagacctcgaagtccatcccaaggacacatttgtgttcagtatagatggcaccgtac

SEQ ID NO: 4227 - DNA, 413 bp, Glycine max
  Clone ID: LIB3073-018-Q1-K1-A6
gatacatggtggagggacagagagtcacggcggtacactatatggaatcatcatgcatcaatatcatcactagagaatagagatataaagagagagaaagtgtgagagaaagagaggaagagagaaggtgtgagagaaagagagaaagtggagtcttttgactgagcctagactgcaaaagccgtctaaggttgttgtctggttgatgataatgtttctttttaatgtctgaatacgcgttgaactttcaaacgtaccaccaccacactatttttttagttagccttctgatccattttcacccttaaccttaatcccaattcaaaggtccacttagtctttttccttttatttttttaaatgatggtctataaattgcattagtctccgagtgtttttattgcttgaatttc

SEQ ID NO: 4228 - DNA, 410 bp, Glycine max
  unsure at all n locations
  Clone ID: LIB3073-018-Q1-K1-A7
gacttgtcctgtattgaaaatccattgtgcttcatttcattccctcacatagtgttttttttctttccatggagaacttgttgggtctgctgagaattcatgttgaaaaaggtgtcaatcttgccatcagggatgtggtgagcagtgacccttatgttgtcatcaaaatgggaaggcagaagctgaagactcgggtagtcaagaagaatctaaatcctgaatggaatgatgacttgaccttgtctatttcagaccctcatgctccaattcatctacatgtgtatgacaaggacacatttagcatggatgacaaaatgggggatgctgagtttttcataggtccatttattgaagcagtgaagatgcgcttngtcaggtctcccaacaatactatagttacaaaagtgcta

SEQ ID NO: 4229 - DNA, 384 bp, Glycine max
  Clone ID: LIB3073-018-Q1-K1-A8
gacactaacaccaaaacaaacccactaagatggcttcctttatatccttcctagtgctgcttcttgcagcccttatcctcatgcctcaagggcttgctacttactacaaaccaattaagaagccaccagtgtacaagcctccagtgtacaagccaccagtgtacaaaccaccggtttataagccaaaaccaccggtttacaagccgaaaccaccggtttacaagccaccatataagaagccaccatacaagaaaccaccttatggaaagtaccctccagtagaggacaacacccatgcctaaagcaagcaatgaggtctattatctacttaataaataagaggaactgctttgtgttttctagcattgtgatttacaacttcgt

SEQ ID NO: 4230 - DNA, 137 bp, Glycine max
  Clone ID: LIB3073-018-Q1-K1-B1
gaagaaagctgctagcagagggaagttctacactgtgttgtttggattgatcgagtgtactttttcttttcgagattggcttggtgtgcagtggaaagagggtggaaaagaatggtaagggggagggcggcgccccg

SEQ ID NO: 4231 - DNA, 161 bp, Glycine max
  Clone ID: LIB3073-018-Q1-K1-B11
agtctagacttttagatgatatggtacttgccaaacttaaaaatgttaaacacctgtattaatccaacaaaaaatgggcctttgaaactaaagaaaaacaaactaagattggcccaaactgaagaaatacaaaaaaatggcttgagatcaagcctaaccac

SEQ ID NO: 4232 - DNA, 349 bp, Glycine max
  Clone ID: LIB3073-018-Q1-K1-B12
gacggctcagttgtgtattctcgttctgcacgaaggaaaaaccctagcttccgttcgatcaacaatgacaggagagacagtgaaccccaaagcttaccctttggccgatgcccaactctcaataaccatactagatcttgttcaacaagctgccaactacaagcagctcaaaaaaggtgctaatgaagccactaaaaccctgaacagaggtatctctgaatttggtggtatggctgctgatactgaaccccttgaaattcttctccatcttcctctactcgccgaggataagaatgtgccctacgtgtttgtcccttcaaaacaagcacttgggcgtgcatgtggggtc

SEQ ID NO: 4233 - DNA, 391 bp, Glycine max
  unsure at all n locations
  Clone ID: LIB3073-018-Q1-K1-B2
ggtgcctggccatccggtttcccagatctgctccttcctcaccccacagaagtcagttgaagagcatgggtcgtggagttagcagtggtggtggtcaaagttccttgggttatctttttggcagtggagaggcccctgccgcaaaaccggcaacaaacaatgccccagcccaacctgaagtgcaggctgtaaataatgcgcctacttcaaaagcatctnctcctactaaaacaatagaccctaacaaggctgctggtataaacagtcattctactgatggccagaacaccggcaacttcatcacggaccgaccctcaaccaaggtccatgctgcccctggtggtggttcttctctgagttatctctttggtggacctggagaggggaagtg

SEQ ID NO: 4234 - DNA, 330 bp, Glycine max
  Clone ID: LIB3073-018-Q1-K1-B3
aagttccgggcggttcagtttgccagaactgctccttcctcaccttacagaaattagcttaagatcctggatcacgcagttagcagacgaattggacaaagttcctcgggttatctttttggcaatgcataggcccctgccgcaaaaccggcaactaacaattcccaaatccaacctgaatcgctagctgtaaataattctcctacttcaaaagcatcttctcctacttaaacaatatactctaacaaggctgctggtataaacagtcattctactgatgtccataacaccggcaactatatcactgaccgaacctgaaccaatgtccat

SEQ ID NO: 4235 - DNA, 408 bp, Glycine max
  unsure at all n locations
  Clone ID: LIB3073-017-Q1-K1-H9
actcctaccactgctgcaacagctctctccgccagagcccggaagagccccctctattcgttgaaaaatgtttactttccaacttcaagagtgtgctgcgttggtcaccaatatcaacaatctcacccctcgtccctctctgatcttgatcaagtccctcctcccggtggcaatcactctctgcgtcgcaggacattgatggggttgagtggtgcggcaacgttggggttgagtttgagtgatgagcaaagtgcaaggggtgcagcaaggcgtccgncaccttcaccaccgacggagaagaaggacccgaatgtgagtggtgttcaagctaaagtgttggctagcaagaggagaaaagaagctatgaaagaagaagtggccaggcttanagagagagggaagccccgt

SEQ ID NO: 4236 - DNA, 327 bp, Glycine max
  unsure at all n locations
  Clone ID: LIB3073-018-Q1-K1-B4
cctagagcacacactatctcactgaatggctcttcatgatgcatctgtggcctcaaactgcccttcactggtgaaaaatctcatgagaggcccttcctctctctcaaggaactcttcttcattcagagttgtggccagtggcaagaagatcaagactgacanaccttatggaattaatggtggcatggctttgaaggatggaactgatgcatctggcaggaaaggaaaaggaaagggtgtttaccagtttgtagacaaatacggtgctaatgtcgatggttacagtcctatctacgacaccaaggactggtctccaaaccgtgatgt

SEQ ID NO: 4237 - DNA, 296 bp, Glycine max
  Clone ID: LIB3073-018-Q1-K1-B5
agaaggagacgcaggctgaggtggaacaaaagatcgctgaggggaggaagaaagtggaggctgagctgcaggaggctctggctgccttggagaatcaaaaggaagaaaccatcaagtcccttgattcccagatcgcagcccttagccaggagattgttaataaggttcttcccactgcttaatatgtctgtgtaattttcatttcaatcccctcaccaaaggattcatagtttctacttttgaatgggtctattctgtaatcgcaatacttttcaatgtaaaatccgagattcaga

SEQ ID NO: 4238 - DNA, 367 bp, Glycine max
  Clone ID: LIB3073-017-Q1-K1-G8
cgggagaaaaaatgagactgttcgatccatggcctggttgcttcaagagagaatggaagcggaattggcccttcttggtcggattcgacatcaccggaactctcatcaccaaacttttcattggtctgtctgaggaggaagccaacaagtcgaaattcgttcaggcacacaagaggtgactctagaatggacgatttgcagtggcttagcacattgtattagatgtgtgaagagagcttctgcttgtaataaatgaagagagatgttgtatacactccatgttcctatttgacattatgcacgtttactctaatgcgatcgataaagtcatactaagcagatctgaatcgatcgaggcacattatga

SEQ ID NO: 4239 - DNA, 312 bp, Glycine max
  Clone ID: LIB3073-017-Q1-K1-H10
ggcaacacaacctagtaagctcttttaaagttctggcccgaaccctttctttcgtcacaatcacaacttggtaaaggtactccgtgcaagaaagatgaagctcgagttcgcaaatgtgctacttctgtgccttgtccttagctcttctttcttggaaatctcaatggctggttctcctttctgtgactcaaagtgcgcgcagaggtgtgccaaagctggggttcaggacagatgcttgaggttttgcgggatctgctgcgagaagtgcaactgtgtcccatctgggacttacggaaaccaggaccaatgccc

SEQ ID NO: 4240 - DNA, 475 bp, Glycine max
  Clone ID: LIB3073-017-Q1-K1-H3
ggaactgcgtagcgacccatcagagaagatcgcgatcgtgggaaacatgtctggggaagaggaagaaaacgccgcagagctcaaaattggagacgagtttttgaaggcaaagtgcttaatgaactgtgaagttgcattgattcttgagcacaagtatgagcagcttcaacagacatccgatgatcccatgaatcaagtttctcaggtatttgaaaagtcactacagtatgtgaagcgcttcagccgctataaaaatcccgatgctgttagacaagttcgagaaattctcgccagatatgaattggctgagtttgagttgtgtgtccttggcaacctttgcccagaaactgtggaggaagctattgctatggttccatctatcaagtcaagaggacgggctcaggatgatgaagcagtcgagaaaatgctaaatgacctgtcgttgattaagaaatttgaataaatacgtcaaagt

SEQ ID NO: 4241 - DNA, 406 bp, Glycine max
  Clone ID: LIB3073-017-Q1-K1-H4
agaaacgaccgacggggggataaagagagaagaagagagtcccttcacttacgcatggagaaaaaaatggcagcatcagtttcatgctcatggctaactcttccgtcccaaatgaggaaactttccctcacatcctcttcttcttctctttccatctccaattctgcttctctcagtttctccagaaacctctcacaccctctcttctcacaaggtaactgcttgtcgctgagcacagtgcagaggcgcgcgtctgtggtctgcaaggctgcgccgaaaaaagtggattcggctgtgaagaaagcgcgccaagccgagaagcgccgcgtgtacaacaaagcttcgaaatcggagattaaaacacgcaccaagaaggttttggaagctcttgaagtgcttaagaaga

SEQ ID NO: 4242 - DNA, 324 bp, Glycine max
  Clone ID: LIB3073-017-Q1-K1-H5
ggaactgcgtagcgacccatcagagaagatcgcgatcttgtgaaacatgtctggggaagaggaagaaaacgccgcagagctcaaaattggagacgagtttttgaaggcaaagtgcttaatgaactgtgaagttgcattgattcttgagcacaagtatgagcagcttcaacagacatccgatgatcccatgaatcaagtttctcaggtatttgaaaagtcactacagtatgtgaagcgcttcagccgctataaaaatcccgatgctgttagacaagttcgagagattctcgccagatatgaattggctgagtttgagtcgtgtgt

SEQ ID NO: 4243 - DNA, 450 bp, Glycine max
  unsure at all n locations
  Clone ID: LIB3073-017-Q1-K1-H6
gggataaagagagaagaagagagtcccttcacttacgcatagagaaaaaaatggcagcatcagtttcatgctcatggctaactcttccgtcccaaatgaggaaactttccctcacatcctcttcttcttctctttccatctccaattctgcttctctcagtttctccagaaacctctcacaccctctcttctcacaaggtaactgcttgtcgctgagcacagtgcagaggcgcgcgtctgtggtctgcaaggctgcgccgaaaaaaggtgattcggctgtgaagaaagcgcgccaagccgagaagcgccgcgtgtacaacaaagctcggaaatcggagattaaaacacgcaccaagaaggttttggaggctcttgaagtgcttaagaagaaacangatgcgcaggcccgagaaatcctctccattgagaagttgatcggagaggcatact

SEQ ID NO: 4244 - DNA, 382 bp, Glycine max
  Clone ID: LIB3073-017-Q1-K1-H7
ggctttagattcttttcccctagattcagccacagttggaaaaaaaaaaagttgttcgagatggcacgtacgaagcaaactgctcgtaagtccacaggaggaaaggcacctaggaagcagctcgcaaccaaggctgcacgtaagtctgcaccaactactggtggtgtgaagaagccacatcgttatcgtcctggtaccgttgctcttcgtgagattaggaaataccagaagagtaccgagcttttgatcaggaagctccccttccagaggctggttcgtgaaattgctcaggacttcaagactgatctgcgtttccagagccatgctgtgcttgcattgcaagaagctgctgaggcatacctttgtggactctttgaggata

SEQ ID NO: 4245 - DNA, 408 bp, Glycine max
  Clone ID: LIB3073-017-Q1-K1-H8
aggacgaccgacggggggataaagagagaagaagagagtcccttcacttacgcatagagaaaaaaatggcagcatcagtttcatgctcatggctaactcttccgtcccaaatgaggaaactttccctcacatcctcttcttcttctctttccatctccaattctgcttctctcagtttctccagaaacctctcacaccctctcttctcacaaggtaactgcttgtcgctgagcacagtgcagaggcgcgcgtctgtggtctgcaaggctgcgccgaaaaaagtggattcggctgtgaagaaagcgcgccaagccgaagagcgccgcgtgtacaacaaagctcggaaatcggagattaaaacacgcaccaagaaggttttggaggctcttgaagtgcttaagaagaaac

SEQ ID NO: 4246 - DNA, 378 bp, Glycine max
  Clone ID: LIB3073-017-Q1-K1-G2
gacacaccgtttgttctattcttaactcaacttctgggaggcactctcttcttccaagtccaaccacgcttttctctacagtcatgggcaaggtcaagatcggaatcaacggatttggaagaattggccgtttggttgccagagtcgctctgcaaagagacgatgtggagctcgttgccgttaacgaccctttcattaccaccgattacatgacatacatgtttaaatacgacagtgttcacggacactggaagcatcacgatgtcaccgttaaggacgagaagacccttctcttcggtgacaagccagtcactgattttggacacaggaaccctgaagagatcccatcggggtcaactggagccgatatcattggtg

SEQ ID NO: 4247 - DNA, 108 bp, Glycine max
  Clone ID: LIB3073-017-Q1-K1-E9
attactattactgatcaatcaaaatatctatcaaaagtaaaaagcgaagagaagggaaaaactttaatttttttatggtaaaaaattcaattatacctgttatttcac

SEQ ID NO: 4248 - DNA, 260 bp, Glycine max
  Clone ID: LIB3073-017-Q1-K1-F1
ggttctagtgtgtgattgattgttgggggaactcgttcttcttcttttgttgttctgtgtttgtgactgcattttctctcacctgacaatgtctcgctgccctggcaactgtggatgcagaagctcctgcacgtgctgcaactgctgcagaggctgcgagatgtacccagacttgagctacactgacttaaccaccacctagacctcggtcatgggagaggcacctgttcaagctcaataacagggagctgaaatgagtg

SEQ ID NO: 4249 - DNA, 449 bp, Glycine max
  Clone ID: LIB3073-017-Q1-K1-F10
gacagaaagagaaagcaatggcttctctggcaagctgagctgttgttcaaccatctactgtcaagggccttgctggaactaagctctctttcaagccctctcgccagagcttcagacccaagaatttcaggagtggtgccgttgtagcaaagtacggtgacaagagtgtgtactttgatttggaggatctaggcaacactactggtcagtgggacttgtacggctccgatgcaccttcaccctacaaccctcttcagagcaagttcttcgagacattcgccgctccattcacaaagaggggattgttactaaagtttttgatcctgggaggtggttccaccctggcatacttgagtgccacagcgtcaggtgacattctaccaatcaagaagggcccacaacttccaccaaagccaggtccccgtggcaagatctaatttgtttcccaa

SEQ ID NO: 4250 - DNA, 359 bp, Glycine max
  Clone ID: LIB3073-017-Q1-K1-F11
gacaacgcatcctaaataagcatcttaattcataggggcttggtccttcctaccttcttctgctcaataagtgtgtgccactctaattaattaccacccccttctagacatagttcttctccctctgttctctattctctacactgcgaaaccaagatgaaagtagcatttgcagctgttctacttatatgccttgacctcagctcctccttgttcgaagtgtcaatggctggttctgctttctgatcctccaagtgctcgaagaagtgttctaaagctgggatgaacgacaagtgcatgaagttctgcgggatttgctgcatcaagtgcaactgtgtgccatctgcgacttatgggaa

SEQ ID NO: 4251 - DNA, 406 bp, Glycine max
  unsure at all n locations
  Clone ID: LIB3073-017-Q1-K1-F12
gaaccaagtatgctagcgtgtctattcattttagcagcaatgttgaatctcagagaaaaacagacatcgacacgcatgtctggaaggggaaagggaggcaagggtctcagaaagggaggagccaaacgacaccgaaaggctctgagggataacattcagggaatcaccaagcccacgattcgccagttggccagacgtggtggcgtcaatcgtatcactaggcttatctatgaagaaactcgcggtgttcttaagatcgttctagagaacgtcattcacgacgctgtcacctacactgaacacgctcgtcgcaagactcgcactgccatggacgcttgttacgccctcaagacgcatgggaagacccatgacagattcngctgctagacaattggggatttcttgg

SEQ ID NO: 4252 - DNA, 305 bp, Glycine max
  Clone ID: LIB3073-017-Q1-K1-F3
cgggcagcagaagatcaagtgcttgagaactaggagggagaagcaacatggctatgctaatcgaactcttacacccgagctgttcaccaactgtcacaccgtgctcgaggcaccgcatggctgcatccatacactggcctcaagtccatggctggcttgcccaccaggaagaccaacactgacattacctccattgctagcaacggtggaagagtgcaatgcatgcaggtgcggccaccagctggcagcatgaagtttgagactctatcctacctgccagaccttgatgacgcacaattggctaa

SEQ ID NO: 4253 - DNA, 428 bp, Glycine max
  unsure at all n locations
  Clone ID: LIB3073-017-Q1-K1-F4
gacagctattcctcttaagcttgctactgagtttccacagtgcataccttaggtcttccgaattcgaagttaatttgcaagatggctaaggaaaaggctcagatcaacattgtggtggttggtcgtgtggaccctgaggaggcaaccaccattaacgagctgaagaagcctgttgtggagaaagaagctccagggcatgccatatgagggcatgcacgtacggcctcggaggggaaccagaaaattatgttaacaaaataatctggaaccctaatgtatcagtgtcatcatcagtgtgtagtttaagctagctttgctatggttacgttctttgagatgagagtcttgatgaaccgtaccattctgatgtattgctttccttgaaagttaatgcatgcttcttatctacaaaaaaaaaaagtntacat

SEQ ID NO: 4254 - DNA, 475 bp, Glycine max
  Clone ID: LIB3073-017-Q1-K1-F5
gaactgctcggtttttatcagaagcttgtgatttagttttggatgcagcaagtgagggaaaacaattcttaattgttggtacaaaaaaaagcagcggatttagtagcacgggctgcaataagagctcggtgtcattatgttaataaaaagtggctcggcggtatgttaacgaattggtatactacagaaacacgacttcaaaagttcagggacttgagaatgcaacaaaagacggggagactcaatagttttccaaaaagagatgccgctatattgaagagacatttagctcatttggaaacatatcttggcggcattaaatatatgacggggttacctgatattgtaataatcgtcgatcaacaagaagaatatacggctcttcgagaatgtataactttggaaattccaacaatttgtttaatcgatacaaattgtgacccggacctcgccgatatttcaattccagctaatg

SEQ ID NO: 4255 - DNA, 414 bp, Glycine max
  Clone ID: LIB3073-017-Q1-K1-F7
gatctccaacaagtgtttctgtaaccatggcatccaccggtggatcccctacaaccccttctcagctatgctcaggaaagagtgggattttcagtccctcacaggcacttcttgtgaagccagtgaagaggcagatgatggggaagagcaagggaatgagaattgcatgccaagccaccagcattcctgctgatagagtccctgacatgggcaaaagacagctcatgaatctgcttcttcttggtgccatttcactcccctctgctggaatgcttattccctacacctacttttttgtccctccaggttcaggttcttcagctggtggtactggtgccaaggatgctgttggaaatgatgtaattgcggagaattgggctcaggcacatggacctggtgaccgaacccttgcac

SEQ ID NO: 4256 - DNA, 358 bp, Glycine max
  unsure at all n locations
  Clone ID: LIB3073-017-Q1-K1-F8
tattggatcgtaaggaattcatggggttctagctggggagaggatggctacatcagattagaaagaaatcttgctaacagcagatcaggcaagtgtggaattgcaattgagccatcttatccccttaagaatggtccaaatccccctaatcctggaccatcacccccttcacctgtgaagccgccaaatgtctgtgacaactactacagctgtgctgatagtgctacttngtgcttgattttgaggttcgaaatgcttgcttcgagtggggttcatgacctcttgagggtgcttcctgctgtgatgaccactacagttgctgccctgcagactatcccatctgcaacacttacgctgg

SEQ ID NO: 4257 - DNA, 250 bp, Glycine max
  Clone ID: LIB3073-017-Q1-K1-F9
agtggattatatcatagtgaaaaattgatggggatctaagtggggagagaaaggatacataagaatgaggaggaacattggaaaacccgagggaatctgcggtatctataagatggcttcttatcccactaagaagaaataagattcattcccattcttttgtctgaatatctttcagcttttccttggaaacaatgtaacgttttccatataataatagattgattgactcttttcattattcccttgc

SEQ ID NO: 4258 - DNA, 388 bp, Glycine max
  unsure at all n locations
  Clone ID: LIB3073-017-Q1-K1-G11
gatctggcagcagaagaacaagtagttgagaactaagaaggagaagcaaatggcttcctcaatgatctcttccccagctgttaccactgtcaaccgtgccggtgccggcatggttgctccattcactggcctcaagtccatggctggcttccccaccaggaagaccaacaatgacattacctccattgctagcaacggtggaagagtgcaatgcatgcaagtgtggccaccagttggcaagaagaagtttgagactctttcctacctgccagaccttgatgatgcacaattggcaaaagaagtagaataccttcttaggaagggatggattccttgcttggaanttcgagttgagcacggnttcgtgtaccgtgagcacaacaggtca

SEQ ID NO: 4259 - DNA, 289 bp, Glycine max
  Clone ID: LIB3073-017-Q1-K1-G12
gacacatcacaacaacaacaacaacaaataaagacaggaactacttccttctctcctttgctgtgttttctttctcaaaaatgggtcgtacctatgttcttatgatggttgctgcattgttgttgagctccaccatggctcaatctccagcttcgtcgccggctttgtcccccacccacacgccggtggccactccacctaggaaggcgttgccgtctccgtcgtctgtgtcaccagcggcttcacccgccaccggaaattctccttcggcaccacctacttctttctc

SEQ ID NO: 4260 - DNA, 464 bp, Glycine max
  Clone ID: LIB3073-017-Q1-K1-E8
gaaggtgcaagagtttgttgtgagctataagctagtgtatcgtgaggagaatatgaagttgtttgttttctttgttgctgcagtagttttggtagcatggccatgccatggcgcaggctaccaaaggttccctctccgaatgaaaactggctatggtgagcgttcttcggaggtaaaatgcgcaagttttaggcttgctgtggaagcacacaacatccgagcctttaaaaccattcctgaagagtgcgttgaaccaacaaaggactacattaatggcgaacaatttagatcagactctaaaacagttaaccaacaagctttcttttatgctagtgaacgcgaagtccatcacaacgacatatttatattcggcatagataacaccgtactctctaatatcccatactatgaaaaacatggatatggcgtggaggaatttaatgaaaccttatatgatgaatggg

SEQ ID NO: 4261 - DNA, 375 bp, Glycine max
  Clone ID: LIB3073-017-Q1-K1-D2
ggtaccgatcagtgaagagaccatatctatctattgagaaacatgaagaaggtttcacccttggcattttccattctctttttggccttcaccatagaaccctttattggcattgctgcagcagcaccagaagcagtgcttgacacctcaggccagaagctgagaacaggtgtcaagtactacattctgccagtgttcagaggcaaaggtggaggcctaacagtttcaagcagtggcaacaacacatgccccctctttgtggtgcaagagaagcttgaagtctcaaagggcaccccagttaccttcacaccctacaatgccaaaagtggtgtcatactaacctcaaccgatctcaacatcaagtcttatgggaaa

SEQ ID NO: 4262 - DNA, 436 bp, Glycine max
  Clone ID: LIB3073-017-Q1-K1-D3
agacgacagatgggggttctagtgtgtgattgtttgttgttgtaactcgttcttcttcttttggggggctgtgtttgtgtttgttgtttctctcacctgaaaatgtcttgctgcggtggtaactgtggttgcggaagctcctgcaagtgcggcaacggctgcggaggctgcaagatgtacccagacttgagctacactgagtcaaccaccaccgagaccttggtcatgggagtggcacctgttaaggctcaatttgagggtgctgaaatgggtgtacccgctgagaacgatggctgcaaatgtggaccaaactgctcctgcaacccctgcacttgcaagtgaggtgttgggagagcaagcttcaagcagagatagcccttaattaggaataatgattaactattaatgtgtagctaaaaacttatgtattatgtct

SEQ ID NO: 4263 - DNA, 452 bp, Glycine max
  unsure at all n locations
  Clone ID: LIB3073-017-Q1-K1-D4
gactcagcaacagcagctacagcactcaaaaacctagagcgaagagcgtgaaggcgccggccgccggccatgacattcaagcgcaggaacggaggtcgcaacaaacacggccgtggccatgtcaaattcatccgatgctccaactgcggcaaatgctgccccaaggacaaggccatcaagaggtttcttgtgaggaacattgttgaacaggctgcagtcagagatgtgcaggaagcctgtgtctatgaacaatacacgctttcgaaactatatgtgaagatgcaatactgtgttttctgtgctaatcattctcatgttgggaaggttcgatcccgcactgataggaagaagcgtgagccttcacagcgattcatcaggcgcagggatgatgcacaaaggcctggtcagcctggtcaagctcctcgtnctgctggcacaggagcacctgttcg

SEQ ID NO: 4264 - DNA, 339 bp, Glycine max
  unsure at all n locations
  Clone ID: LIB3073-017-Q1-K1-D5
agacgacagaaggggatcaaattgatgaactagtgtgacattagagaagaaccaatttaagagaagagcagcggagctaaagaggggagaggagagaggagaagagaagctaaagaaagaaaggagatgggagtggagaagcagttgttgaggtctggcaccggtccgaagccaattcccggtcagaacgtaaccgttcactgcactggtttcgggaagatcggtgacctttctcagaaattctggagcacaaaggatcctggccagaaccccattcactttcaaaatcggccaaggttctgatatcaaaggatgggatgaangtgtgcttggcatgca

SEQ ID NO: 4265 - DNA, 247 bp, Glycine max
  unsure at all n locations
  Clone ID: LIB3073-017-Q1-K1-D6
ggtaccgatcaatgaagaaccatatctatctattgagaaacatgaagaaggtttcacccttggcattntccattctctntttggccttcaccatagaaccctntattggcattgctgcagcagcaccagaagcagtgcttgacacctcangccagaagctgagaacaggtgtcaagtactacattctgccagtgttcagaggcaaaggtggaggcctaacagtttcaagcagtggcaacaacacatg

SEQ ID NO: 4266 - DNA, 407 bp, Glycine max
  Clone ID: LIB3073-017-Q1-K1-D7
ggaacggagaagcactggcgcatctaccctgaggcgtgctcttctctgctcttctctgtcgtgagtcaccatggtgaggggctgcgtgctgaactatgctctgaagagcatgtacaatgctgagaaacgggtaaagcgccacgtcatgatcaggccattctccaaagtcattatcaaattccttttggcgatgcaaaagcacggatacatcggagagttcgagtatgtagatgaccacagggctggtacaatcgtggatcaattgaacggtaaactgagcaagcgtggtgttattaccccgcgctttgatgtgggcgtcaaagagatcgaacgttggactgctatgcttcttccctcaagacagtttgggtctattgaattgactacctctgctggcatcatggatc

SEQ ID NO: 4267 - DNA, 386 bp, Glycine max
  Clone ID: LIB3073-017-Q1-K1-D8
gctggcagcagaagaacaagtagttgagaactaagaacgagaaggaaatggcttactgaatgatctgttgcccagctgataccactgtcaaccctgccggtgccagcatggctgctgcattcactggccttaaatccattgctggctttcccaccaataataccaacagtgacattacctccattgctagcaacggtggacgagtgcaatgcatgtacgtgtggccaccagctggcaagatgaagtttgagactctttcctacctgccagaccttgatgatgcacaattggcaaaggaagtagaataccttcttatgaagggatggattccttgcttggaattcgagttggagcacggtttcgtgtaccgtgagcacaacaggtca

SEQ ID NO: 4268 - DNA, 259 bp, Glycine max
  Clone ID: LIB3073-017-Q1-K1-E10
gatgagtcgatttgataactaagatattgttattcgggatattgatccaatttgatatcatcgaaatccaatttataccattgttgaattaattatcgatgaaagatttatcatctctatgggattaaatcccaaattttttattggaaatttaagagaaataaaacataataaagattatggaagtaaatattcttgcatttattgctactgcactgtttattctagttcctactgcttttttacttataatttacgc

SEQ ID NO: 4269 - DNA, 365 bp, Glycine max
  unsure at all n locations
  Clone ID: LIB3073-017-Q1-K1-E11
gaaggtgcaagagtttgttgtgagctataagctaggggatcgtgaggagaatatgaaggtgcttgatttctttggtgctgcagtagttttggtagcatgggcatgccatggcgcaagcttccaaagggttccttttcgaatgaaaactggctattgggaaccgtcttcggagggtaaatgcgccaggtttaagcttggctgggaaacacacaacattcgagcctttaaaaccatttcttgagagtgcgttgaccaaccaaagactacatttatgggcgacaatntagatcagactctaaaacagttaccaacaagctttcttttatgctagtgaacgcgaagttcattacaacgacatatttata

SEQ ID NO: 4270 - DNA, 423 bp, Glycine max
  Clone ID: LIB3073-017-Q1-K1-E12
aacatgacagaaagggacccagagagccaatgtaccccaagccctatacaaccataccctagcgcacacccattagattcagatgccatggctagcctcaaggtcgcatttttggctgcagtgctctgcatggctgtggtgagtgcacccatggcacatgcatctatcacgtgcgggcatgtgacgagtagcctggccaattgcatcggctacctccagaatggatgaacgccgtcatcgggatgctgcaacggagtgaagagcctcaatgccggcggcaagaccaccggcgtccgtcagacggcgtgcaactgcctcaagtcggtcgacagccaaatctccggcttcaacgccaacaacgccagctcgctccccggcacatgcggagtctacatcccctactagatcagcacctacaccaac

SEQ ID NO: 4271 - DNA, 466 bp, Glycine max
  Clone ID: LIB3073-017-Q1-K1-E3
gattcacaattcacaacaacacacaacatattattaagacgcaccccaaaccaaaccacttcacacagaacacatatccattggtgaaggagtatcatgggtgaacaattagggctactaaaagtcatggttgtgcaagggaaaaggttggtgatccgggatttcaagaccagtgatccttatgtagtactcaaactagggaatcagactgcaaagaccaaggtaattaatagctgcttgaatcctgtttggaatgaagagctgaatttcactctgacagaaccattgggagttctgaatttggaagtgtttgataaagatcttttgaaggctgatgacaagatgggaaatgctttcttgaaccttcaaccaatagtctctgcagccagattaagagacatcttaagagtgtcctctggtgagacaacattaaggaaggtcatacctgatggtgaaaactgtcttg

SEQ ID NO: 4272 - DNA, 425 bp, Glycine max
  Clone ID: LIB3073-017-Q1-K1-E4
gaagaagaactagtctaagcagaaatggcctcttcagtgatggcatctgtggccctcaaacctgcccctttcactgttgagaagtcctcagttagaggccttccctccctctcaaggaactcctcttcattcagagttgtggccagtggtggcaagaagatcaagactgacaagccttatggaattaatggtggcatggctttgagggaaggagttgatgcatctggcaggaaaggaaagggaaagggcgtttactagtttgtagacaaatacggtgctaatgtcgatggttacagtcctatctacgacaccaaggactggtctccaaccggtgatgtctacgctggcggtacgactggcttggctatctgggctgtgactctacttggtcttcttgctggtggtgcacttcttgtctacaacac

SEQ ID NO: 4273 - DNA, 340 bp, Glycine max
  Clone ID: LIB3073-017-Q1-K1-E7
gacgatgaacaacgagcatggacatgagcatgggcaggacagcagcagcagccgcgtcagtgattaaactgctgcatcagctatatatttaaaaggtttatgcggaccatacttccgaaggctatgcctgaacaactgtatatgtctgtgtatctgtatctctatatctgtgattcctttttacctatctagcgatcgatttatgagtgagaaaaccaagggtgtgaaattgtgcgtgaatctggttgctaatacgagtgctattagactgtgcctagactggtttgaaaccccgatactggagttatgtatgattgtctattatactatagaaacaaaa

SEQ ID NO: 4274 - DNA, 452 bp, Glycine max
  Clone ID: LIB3073-017-Q1-K1-D12
gatatctggcagcagaagaacaagtagttgagaactgggaaggagaagcaaatggcttcctcaatgatctcttccccagctgttaccactgtcaaccgtgccggtgccggcatggttgctccattcactggcctcaagtccatggctggcttccccaccagaaagaccaacaatgacattacctccattgctagcaacggtggaagagtgcaatgcatgcaggtgtggccaccagttggcaagaagaagtttgagactctttcctacctgccagaccttgatgatgcacaattggcaaaggaagtagaataccttcttaggaagggatggattccttgcttggaattcgagttggagcacggtttcgtgtaccgtgagcacaacaggtcaccaggatactacgatggacgctactggaccatgtggaagctgcctatgtttggttgcactga

SEQ ID NO: 4275 - DNA, 158 bp, Glycine max
  Clone ID: LIB3073-017-Q1-K1-B4
tcaaacgaagaaaggcttatggtggatacctaggcaggcagagacgaggaagggcgtagtaagcgacgaaatgcttcggggagttgaaaataagcgtagatccggggattcccgatataggtcaacctttcgaactgctgctgaatccacgggcagac

SEQ ID NO: 4276 - DNA, 218 bp, Glycine max
  Clone ID: LIB3073-017-Q1-K1-B5
gatctggcagcggatgatacaagtagttgagacctaagaaggacatgcacatggcttactcaacgatcgctctctcagctgttaccactgtcaaccgggccgtagccacgcatggttgattcattcactggcctcaagttcatggctggctacctcaccaggaagaccaccaatgacattacctacattgctagcaacggtggaagagtgcaatgcat

SEQ ID NO: 4277 - DNA, 449 bp, Glycine max
  Clone ID: LIB3073-017-Q1-K1-B6
gctggcagcagaaaaacaagtagttgagaactaagaggaaggaaatggcttcctcaatgatctccttcccagctgttaccaccgtcaaccgtgccggtgccggcatggttgctccattcaccggcctcaaatccatggctggcttccccacgaggaagaccaacaatgacattacctccattgctagcaacggtggaagagtacaatgcatgcaggtgtggccaccaattggcaagaagaagttcgagactctttcctacttgccagacctcgatgatgcccaattggcaaaggaagtcgaataccttctaaggaaaggatggattccttgcttggaattcgagttggagcacggtttcgtgtaccgtgagtacaacaggtcacctggatactatgatggacgctactggaccatgtggaagctgcctatgattggctgcactgatgct

SEQ ID NO: 4278 - DNA, 86 bp, Glycine max
  Clone ID: LIB3073-017-Q1-K1-B7
gaaacctcaggtcatgcggtgctacccgctgagttcaagcatatcaagtatcagatcaactaacccgtcaatgtgggatccaataa

SEQ ID NO: 4279 - DNA, 371 bp, Glycine max
  Clone ID: LIB3073-017-Q1-K1-B8
aataatgaataaaaaaatcaaataataattaatggggagaaaaaagtgtaaatcaaatagaaatttataaaatctatgatcctagagtagttccctagacaaaatagaagtaagttcacaaacaagattcaagagtaagattctctgatgaaaggcgagaaatatgtctgaggatccgctgggtataaggagtgaaagaggggatcatttgattcttgaacagttcttttaaaaaaattttctatcggatttttgagtcataggagattttatgatttatgacttggaggatttttaagaatagaaaggaataactacattgagttcatcgatttgccctagatatcaatagactcataaattatttttta

SEQ ID NO: 4280 - DNA, 408 bp, Glycine max
  Clone ID: LIB3073-017-Q1-K1-B9
gctgttagcagaaaaacaagtagttgagaactgagaggaaggaaatggcttcctcagtgatctcctccccagctgttaccaccgtcaaccgtgccggtgccggcatggttgctccattcaccggcctcaaatccatggctggcttccccacgaggaagaccaacaatgacattacctccattgctagcaacggtggaagagtacaatgcatgcaggtgtggccaccaattggcaagaagaagttcgagactctttcctacttgccagacctcgatgatgcccaattggcaaaggaagtcgaataccttctaaggaaaagatggattccttgcttggaattcgagttggagcacggtttcgtgtaccgtgaatacaacaagtcacctggatactatgatggacgctact

SEQ ID NO: 4281 - DNA, 479 bp, Glycine max
  Clone ID: LIB3073-017-Q1-K1-C1
gatctggcagcagaagaacaagtagttgagaactaagagggagaagcaaatggcttcctcaatgatctcttccccagctgttaccactgtcaaccgtgccggtgccggcatggttgctccattcactggcctcaagtccatggctggcttccccaccagaaagaccaacaatgacattacctccattgctagcaacggtggaagagtgcaatgcatgcaggtgtggccaccagttggcaagaagaagtttgagactctttcctacctgccagaccttgatgatgcacaattggcaaaggaagtagaataccttcttaggaagggatggattccttgcttggaattcgagttggagcacggtttcgtgtaccgtgagcacaacaggtcaccaggatactacgatggacgctactggaccatgtggaagctgcctatgtttggttgcactgatgcttctcaggtgttgaaggagcttcaag

SEQ ID NO: 4282 - DNA, 354 bp, Glycine max
  unsure at all n locations
  Clone ID: LIB3073-017-Q1-K1-C10
ggttctctggaggaggagtgaagcagcagagggaggagcggcattaaaaatgcagatcttcgtgaaaaccctaacggggaagaccataaccctcgaggtcgaaagcagcgacaccattgacaatgtcaaggctaagattcaagacaaggaaggcatccctccggatcagcagcgtttgattttcgccggaaagcaacttgaagatggaaggaccttggccgattacaacatccagaaggaatcaacccttcaccttgtcctcaggcttcgtggtggcatcatcgagccttncctcatggctttggctcgcaaatacaaccaaggacaagatgatttgccgcaaatgctatgctc

SEQ ID NO: 4283 - DNA, 386 bp, Glycine max
  unsure at all n locations
  Clone ID: LIB3073-017-Q1-K1-C11
gacccagttgcagaaagaaaagaccatcaaaggttgacttcagccttatccggtttagggtttcggtttttgacccaacctttgacgtatcgaaaccttaagtttcggatcaggtctgagcaatctggttggtagaacctttggtcttaaagagtcaagttttatgtctgaattagacgatcaaattcctactgccttcgatccttttgctgatgcaaatgctgatgactcgggtgctgggtcaaaagagtatgtgcatattcgcgtacagcagcgaaatggaaggaaaagcctgacaaccgttcagggattgaaaaaagaattcagctataacaagatacttnaagatgttaagaaagagtttctgtgcaatggaacagttgttc

SEQ ID NO: 4284 - DNA, 146 bp, Glycine max
  Clone ID: LIB3073-017-Q1-K1-C12
accgcttccaaaaaaccaccgaaaggggctaccttatccctctctctctatctctttctggttgatgcatatttatcactcttatggcacaatttcatcaagcgctcttactccaatcctaaacttcgttttcatttccaatctta

SEQ ID NO: 4285 - DNA, 295 bp, Glycine max
  Clone ID: LIB3073-017-Q1-K1-C5
gaccttaagtgccgcaaccacgtctttttagatcttcaagggggtatcaccttagccgatgtcagatatgagcactagctagtttcacaatttccaaatggctaggggattgaagaagcatcttaagaggctcaatgctcctaagcattggatgcttgacaaactgggtggtgcatttgcgcccaaaccctcatctggaccacacaaatctagggagtgccttcccctcatactcatgctacgaaaccggctaaagtatgctctgacttaccgtgaagtcatcagtattctgatg

SEQ ID NO: 4286 - DNA, 403 bp, Glycine max
  unsure at all n locations
  Clone ID: LIB3073-017-Q1-K1-C8
gatctggcagcagaagaacaagtagttgagaactaagagggagaagcaaatggcttcctcaatgatctcttccccagctgttaccactgtcaaccgtgccggtgccggcatggttgctccattcactggcctcaagtccatggctggcttccccaccagaaagaccaacaatgacattacctccattgctagcaacggtggaagagtgcaatgcatgcaggtgtggccaccagttggcaagaagaagtttgagactctntcctacctgccagaccttgatgatgcacaattggcaaaggaagtagaataccttcttaggaagggatggattccttgcttggaattcgagttggagcacgggttcgtgtaccgtgagcacaacaggtcaccaggatactacgat

SEQ ID NO: 4287 - DNA, 323 bp, Glycine max
  unsure at all n locations
  Clone ID: LIB3073-017-Q1-K1-C9
ggaaccaaaaaaatattaaggtttttgaatgcggtggggcgatcctaacaactctttctgcaactttcgccgacagcttcattcaccatggcttgaacaaccgaaaaagcttttttgaaacaaccaaaaggtgttctcagctcgaagaaaactgggaaaggaaagaaacccggaaagggtgggaacccgtttttgaaatccaattgngcttggatntaagaactccagggaaagccatcgaaagaacctacattgacaagaagtgccccttcactggcaatgtttncatccgtggccgtatcttggctggaacatgtcacagt

SEQ ID NO: 4288 - DNA, 376 bp, Glycine max
  Clone ID: LIB3073-017-Q1-K1-B12
gatctggcagcagaagaacaagtagttgagaactaggaaggagaagcaaatggcttcctcaatgatctcttccccagctgttaccactgtcaaccgtgccggtgccggcatggttgctccattcactggcctcaagtccatggctggcttccccaccaggaagaccaacaatgacattacctccattgctagcaacggtggaagagtgcaatgcatgcaggtgtggccaccagttggcaagaagaagtttgagactctttcctacctgccagaccttgatgatgcacaattggcaaaggaagtagaataccttcttaggaagggatggattccttgcttggaattcgagttggagcacggtttcgtgtaccgtgag

SEQ ID NO: 4289 - DNA, 52 bp, Glycine max
  Clone ID: LIB3073-017-Q1-K1-D11
gagacctcaggtcaggcggggctacccgctgagttgaagcatatcaataagc

SEQ ID NO: 4290 - DNA, 140 bp, Glycine max
  Clone ID: LIB3073-016-Q1-K1-H5
gcggacggagacgagagtgcgcaccgagctacatccgtggctacggctctgtatcctacacactcatgcgtggcctatctcgtctctcagataacttggctaacaattatgtgctacttcgctgttgactcatcgaaaca

SEQ ID NO: 4291 - DNA, 474 bp, Glycine max
  unsure at all n locations
  Clone ID: LIB3073-016-Q1-K1-H6
gacaccaacaccaaaacaaacccactaagatggcttcctttgtatccttcctagtgctgcttcttgcagcccttatcctcatgcctcaagggcttgctacttactacaaaccaattaagaagccaccagtgtacaagcctccagtgtacaagccaccagtgtacaaaccaccggtttataagccaaaaccaccggtttacaagccgaaaccaccggtttacaagccaccatataagaagccaccatacaagaaaccaccttgtggaaagtaccctccagtagaggacaacacccatgcctaaagcaagcaatgaggtctattatctacttaataaataagaggaactgctntgtgttttctagtattgtgatttacaacttcgtagcaatgcatattctngactcttgcatgcacttcaatccttcgtagcattaatgatgtggccaagtcatcatgagcatcatacttatttc

SEQ ID NO: 4292 - DNA, 435 bp, Glycine max
  unsure at all n locations
  Clone ID: LIB3073-016-Q1-K1-H8
gatctggcagcggaagaacaagtagttgagaactaagaaggagaagcatatggcttcctcaatgatctcttccccagctgttaccactgtcaaccgtgccggtgccggcatggttgctccattcactggcctcaagtccatggctggcttccccaccaggaagaccaacaatgacattacctccattgctagcaacggtggaagagtgcaatgcatgcaggtgtggccaccagttggcaagaagaagtttgagactctatcctacctgccagaccttgatgatgcacaattggcaaaggaagtagaataccttcttaggaagggatggattccttgcttggaattcgagttggagcacggtttcgtgtaccgtgagcacaacaggttaccaggatactacgatggacgctacttnaccatgtggaagctgcctat

SEQ ID NO: 4293 - DNA, 195 bp, Glycine max
  Clone ID: LIB3073-016-Q1-K1-H9
tacttctgcaagaagacgtcagatgggttctgttgcgggaggactacagaatggtacagttgctatatgactacagtatgactcttataatgataataatgaatgttacaatagaatactatacttatatagattacatgtctaaattaatcttatatgaatttgtacaaaattatttgacactatgtcttctaa

SEQ ID NO: 4294 - DNA, 367 bp, Glycine max
  Clone ID: LIB3073-017-Q1-K1-A10
ggaggcggagacgaagaagtgaagagaagagaagagaagggatttggatctgaaaagagaagatggggggaggaatggaagcaaacaagaacaagttcatagaggattggggcactgccagagagaatctggagttcaatttccgttggactcgccgcaaccttgctcttgttggcatcttcggcatcgctattcccgtcctcgtctacaagggcatcgtccgtgaattccatatgcaagatgaagataatggtcggccgtacaggaagttcatgtgagagagtatggagagtcttttgtaataattcgtcaagttagaccttgatattatgaggctacaaaccatgttttttttttccttaattcg

SEQ ID NO: 4295 - DNA, 329 bp, Glycine max
  Clone ID: LIB3073-017-Q1-K1-A11
caccgtcaaccgtgccggtgccggcatggttgctcggttcaccggcctcaaatccatggctggcttccccacgaggaagaccaaccatgacattacctccattgctagcaacggtggaagagtacaatgcatgcaggtgtggccaccaattggcaagaaggagttcgagactctttcctacttgccagacctcgatgatgcccaattggcaaaggaagtcgaataccttctaaggaaaggatggattccttgcttggaattccagttggagcacggtttcgtgtaccgtgagcacaacaggtcacctggatactatgatggacgctact

SEQ ID NO: 4296 - DNA, 472 bp, Glycine max
  Clone ID: LIB3073-017-Q1-K1-A2
gacaacgtaataataaccaaaacagcagagagaagagagggtgtagacaaacacaatctctaatggcactcaggatgtgggcttcttccactgccaatgcactcaaagtctcttctacctccagacctcatctcttgcatcctttttctttctccagatgcttgtcttccgtcttggatggacttaagtatgcagattcacacgaatgggtcaagcacgaaggctcagtcgccaccattggtatcactgaccatgcccaggaccatcttggagaggttgtgtatgtggagctgccagaatcaggtggcacagttacccagaagtctggcttcggagccgttgaaagtgttaaagtaacaagtgacataaactctccaatctcgggggagattgttgaggttaacaaaaagctcacagagacacctggcctggtcaactcaagcccatacgaagatggatggatgatcaaagt

SEQ ID NO: 4297 - DNA, 434 bp, Glycine max
  unsure at all n locations
  Clone ID: LIB3073-017-Q1-K1-A3
tgggcagcagaagaacaagtagtnnctaactttgaggggggccatcagtgatcgacaatgatttacgacgttaactctactattgtccgatccttcctcagccagaagggaggctcctctgatgagatgaaatcggacgaacagaagccaaaagagcagaaacccaaagccagcgagaacaaacctataatgactgagtgataacagctgagctgcattcagttgtagaatgaaaataggtggtaggtattgtatttggtgctaaactaagatctttttggctgtgttctgaagtatatgccggcgatgttggtctttggtattggaattggttgattttggatatgggtataacgaaaacttataatggacacaagtggacttgatgcacgcatgacacatgcaatgaagtcactcggttaaaaagtggtttg

SEQ ID NO: 4298 - DNA, 396 bp, Glycine max
  Clone ID: LIB3073-017-Q1-K1-A6
ggcattatatttgagttcaaacagatcaaagccatggccaccggcaacttctctattgttctctccggctccctagccttctttttggtgctacttaccaaggcacactcgaccgataccgtttctttcaccttcaacaagttcaacccagtccaaccaaacattatgctccaaaaagatgctactatttcatcctctggggtgttacaactcaccaaagttggcagcaacggcgtgcccacctcgggatctctcggtcgtgccctttacgctgccccaatccagatttgggacagcgaaaccggcaaggtaaccagctgggctacatgctttaaattcaacattttcgcacccaacaaatcaaactcagctgacgggcttgccttcttataggca

SEQ ID NO: 4299 - DNA, 212 bp, Glycine max
  Clone ID: LIB3073-017-Q1-K1-A7
agggtgtagcgcagaagaacgaactagaagctagcgttgcatgcgagagccatcatggctacgatcaatgatctactaccgcagctgctactactgtcaaatgcttcctcacccagatgggaggctcattcactgacactaaatccatcgatgagtagcccaccgagcagacccccaatgacatctcctacattgctatcaacactggaaga

SEQ ID NO: 4300 - DNA, 318 bp, Glycine max
  Clone ID: LIB3073-017-Q1-K1-A8
caacataggtcatcgaaaggatctcgaagacccaccggcgcacgaaagccgggatctttcagaaaatggattcctattcgaagggtgcataaccgcatggataagctcacactaacccgtcaatttgggatccaattcggttccttaggaggtatcgggaaagaattttggaatgtcataatatcgattcatacagatacagaagaaagggttctctattgattcaaacgctctaactacgaaatatggatttagaaagagggaaaaaaccgggggtttacatagaaccttttggccaaaaaatccgctcggattttt

SEQ ID NO: 4301 - DNA, 296 bp, Glycine max
  Clone ID: LIB3073-017-Q1-K1-B1
gattatatttgagttcaaacaaatgggggccatggccacctccaacttctctattgttctctccgtctccctagccttctttttggtgctacttaccaaggcacactcgaccgataccgtttctttcaccttcaacaagttcaacccagtccaaccaaacattatgctccaaaaagatgctagtatttcatcctctggggtgttacaactcaccaaagttggcagcaacggcgtgcccacctcgggatctctcggtcgtgccctttacgctgccccaatccagaattgggacagcg

SEQ ID NO: 4302 - DNA, 287 bp, Glycine max
  Clone ID: LIB3073-016-Q1-K1-H4
acacaactgaacaagataagctatgcatagcagccaaagaaatgaagagtaccttgttcgccctctttctactttgtgccctcacctcttacctaccttcagccaccgctggtgatgtggtcgacactgatggtaatcctgttgaaaatggaggcacatactttgtgttgccaactataatattaaacggcggtggaatagaatatgccacatttggaaatgaaactggccctgtcactgatgcgcaatctcgcgatcagttctgcaagggctttacgataaccatt

SEQ ID NO: 4303 - DNA, 301 bp, Glycine max
  Clone ID: LIB3073-017-Q1-K1-B11
gacatctctcatagtagagtaaccaaaaggagagttgaataactcgttgtacattcctagtgtgtgtgagagacatggctaagatgtgtgttttggtgttggttcttgctctgtctgtggccacaagtgccataaacgttcccaaccccaaggatgctggtcttaatgaccagaagaacttcatcagctattgtggagttggtggttatttcgggattgggaacaatggactgccttttggaggagctggtgcctgaatatgtggtgactttggcgaacgtagtgtacttgatggtacact

SEQ ID NO: 4304 - DNA, 425 bp, Glycine max
  Clone ID: LIB3073-016-Q1-K1-G1
ggtaaaaggtgagggtgacccgtgattcgtgaacacagagaccatcgccatgggcttcaatattctgagaaccacttccatctccactcctatctcttcctccaaatccaaacccattttctcaactcttcttcgttcttctccttccaccattttccccccaaagtccgttactcccaccactcttttcgtttctgccacccccttcttcactctccatcccaagcttggttttcgtggtgggattgtggccatggccgcacctggctctctccgcaaatccgaggaagagtggcgcgcaattctctcccctgaacagtttcggatcctcaggcaaaagggcaccgagttccctggaacaggagagtatgacaagttctatgaagagggagtttacaactgtgctggttgtgggacttcactct

SEQ ID NO: 4305 - DNA, 309 bp, Glycine max
  Clone ID: LIB3073-016-Q1-K1-G11
gagaaatctgtgtaagtagcctagtcatactgggtggcatatcatttcgataatcatccatagttactgaagaaaatggcaaccatctccgctgctatcacaaccccatcgatcacccgcgcatgtctagtgcaaaaacgttctcttgggttctcatctcccgttcttggtttgccagcaatgggtaaggtgggaagagtgagttgctccatggaggaaaagccttcttctgtgaaggaaagcagctcaagcatgttggggatgggggcatctatgatggcagcggccagcgccgcagccatgtcaagc

SEQ ID NO: 4306 - DNA, 412 bp, Glycine max
  unsure at all n locations
  Clone ID: LIB3073-016-Q1-K1-G12
gcacaagtgagtttgttgatcgagataactagaaagagtgtgatgaaaatgaaggtccttgttttcttcgttgctacaattttggtagcatggcaatgccatgcgtacgatatgttccctctccgaatgaacactggctatggtgcccgtactccggaggtgaaatgcgcaagttggaggcttgctgtggaagcacacaacatctttggctttgagaccattcctgaagagtgcgttgaagcaacaaaggaatacatccatggcgaacaatatagatcagactccaaaacagttaaccaacaagcttacttttatgccagagacctcgaagtccatcccaaggacacatttgtgttcagtatagatggcaccgtactctctaatattccatactataaaaaaaagaannnaa

SEQ ID NO: 4307 - DNA, 304 bp, Glycine max
  Clone ID: LIB3073-016-Q1-K1-G2
gataccaaaaacaaaacacaagccaagtgaaagtgagaaaaaataaaaatcaaagagcataatgtcagggatcattcacaagattggggagacccttcatgtgggagggcacaagaaggaggaggagcataagggtgagcaccatgctggagaatacaaaggggagcaccatggtgaacacagtagtgagtacaaaggagagcatcatggtgaacacaaagctggagagtaccatggtgagcacaagccagagcacaaagaggggttcctagacaaagtcaaggacaagatccatggtgagggc

SEQ ID NO: 4308 - DNA, 415 bp, Glycine max
  Clone ID: LIB3073-016-Q1-K1-G4
gattgaagaagtgcccaaggaagctcgttctttcggcggcgtcacaagtcacaactcgcagaccacaatgcctaagcagatccacgagattaaggattttcttctgacggcgcggaggaaggatgcgaggtcggtgaaaatcaagaggagcagggatgtcgttaagtttaaggttcgatgctccaagtacttgtacacgctttgggtctttgaccctgagaaagccgataagttgaagcaatctcttcctcccggtttgagtgttcaagacctgtagagctgttgagtgtggcagcatgcgtttgtttctctttttggtacctgatgctctagattttgtggctcggctttatatgttggtgatttttacgaggaccatttttgtttaaatgggtacgaaatgtgaaagtttgat

SEQ ID NO: 4309 - DNA, 359 bp, Glycine max
  Clone ID: LIB3073-016-Q1-K1-G5
gatagcagcatcatacaaagcattgaattcaaaaacgtaagttcattccttgtgttttgctttcttcctcaaaaccaaacaggtcgaacacatgcggcaactgcgactgcgctgacaagactagctgcaccaagggaaacagctatggtgttattgtagagactgagaagagttacatcgagactgttgtcatggatgttccagcagctgaacatgatgggaagtgcaagtgtggcactaactgcacttgcacggactgcacctgtggccattaaggaatatgtatgaaaatgtaattgccatgtggttggcaatacaaatatccaaataatgtaatcttcgtatgaataaatgtgtgt

SEQ ID NO: 4310 - DNA, 386 bp, Glycine max
  Clone ID: LIB3073-016-Q1-K1-G6
aagggactctgacagatgcaataattcggcttcctcctttttccatagattgcctgttcagacgcaactgcctctctgcatataatttctcagacaacctgtcaagagcttcagcatttgtactggtctagctcaactgggacaaaagtattcacattcatcctcaaagctttttggagcaagaggctatttcctacctttacaagattatccatgttcttcttgtcagcattatccatctcttccatggatggatccatgtaactcctaattccaagctctattgggatcaaatatcaatgtgtccttgttcgtcgctttaacaagcaatgaggtctattatctacttaataaataagacgaactgctttgtgttttctagtatt

SEQ ID NO: 4311 - DNA, 422 bp, Glycine max
  Clone ID: LIB3073-016-Q1-K1-G7
gaacgtaaaaaaaaaaaaagaataataaatagaaagaggagcatgttgattatatagaaagtaaagggcaacaatcatttttgtttaccatgggtaaggacaccatcgctgacataataacctatataagaaatgccgacatgaataaaaaaggaatggttcaaataccatttactaacataacagaaaacattgtaaaaatacttttacgcgagggttttgttgaaaacgtcagaaaacatagagaaaacgacaaatattttttagttttaactctacggtatagaagaaatagaaaaggatcatataaaagttttttaaatttaaaacgggtcagtacacccggtctacgaatatattctaattatcaacgaatccctcgaattttagggggcatggggattgtaattctttcaacttct

SEQ ID NO: 4312 - DNA, 379 bp, Glycine max
  unsure at all n locations
  Clone ID: LIB3073-016-Q1-K1-G8
gaccaagtgaaccaatatagcccaagccctatacaggcaaaccctaacacacacccatttgattcagtttccatggctagcctcaaggttgcatttttggctgcagtgctctgcatggttgtggtgagtgcacccatggcacatgcagctatcacgtgcggacaggtgacgagtaacctggccaattgcatcggttacctccagaagggaggaacgccgtcgtcgggatgctgcaacggagtgaagagcctcaatgccgtcgtcaagaccaccgtcgaccgtcagacggcgtgcaactgcctcaagtcggccgtcagccaaatctccggcttcaacgccaacaacgccgnctcgctaccccgcaaatgcggagtctcca

SEQ ID NO: 4313 - DNA, 380 bp, Glycine max
  Clone ID: LIB3073-016-Q1-K1-G9
ggcacaccttcaccaaaacaaacccactaagatggcttcgtgagtatccctcctagtgctgcttcttgcagcccttatcctcatgcctcaagggcttgctacttactacaaaccaattaagaagccaccagtgtacaagcctacagtgtacaagccaccagtgtacaaaccaccggtttataagccaaaaccaccggtttacaagccgaaaccaccggtttacaagccaccatataagaagccaccatacatgaaaccaccttatggaaagtacccttcagtagaggacaacacccatgcctaaagcaagcaatgaagtctattatctacttaatacataagaggaactgctttgtgttttccaacattgtgatttacaa

SEQ ID NO: 4314 - DNA, 417 bp, Glycine max
  Clone ID: LIB3073-016-Q1-K1-H1
gacgggtaagctggcgtagctatgggggaattcaagcactttgtaattgttaagttcaaggaaggtgtggccgttgacgagctcacaaaagggatggaaaagttggtcacggagattggtgctgtcaagtcctttgaatggggacaagacattgaaagcctagatgtgttgagacaaggttccactcatgcattcttgatgacattcaacaagaaagaagactttgttgcatttcagagccacccaaatcatgtcgagttctcgacaaagttttcggcagctattgagaatattgtgctactggatttcccatctactcttgtgaaggccccagcatgatcctaaagatattcaagcaataaagattccctctttaaaatttgttagtgtatgtttgtgcctgtgtccggtatcttt

SEQ ID NO: 4315 - DNA, 444 bp, Glycine max
  unsure at all n locations
  Clone ID: LIB3073-016-Q1-K1-H12
gagagcgaaagagatgtcgttggtttcaagcatgtgcgggtgtggagtggtgatggcggcgtcgcaagcaatgggaattggaaggagaagcgatggtggattgacgatagtgtgttcgtctaggccgcagaagaaagcgactgcgcatcacatgaagactcggcctcggaagacgcatgcatgggatagaaaccgcatgcccaccgtctacgatccactccctactgttcctcctgattggaccctcgttattcccgctgacgcttcttctgcttccgttacgcctncgncttcaactncctctgcctagtcactctctcggtactctctctcagtttcatgtagtcttatctttaattccagcagcttttctttcatgttttcatctcaaatcaaaccttcatcatttgttttggatcaataaatgtttctgaaatctctctc

SEQ ID NO: 4316 - DNA, 349 bp, Glycine max
  Clone ID: LIB3073-016-Q1-K1-H2
gactaccaagtgaaaaagcaactaagcatagtgtgtaagaagagggagaaaaacaagtgctgtgtagagagaaaaatggctaggtggtgcatgatcttggtggttcttgctcttgccgtggttgcaagtgccagaaacatgcccaatgacgctggtttggaggaccagaagaacttccttgggtatgggttttcgggagttggcaacaatggccttccctttggtggagtgggttctgggtttgatggtaatatgggtgggccttctgggctcggatgacttggaggattcggtgggcctggtgggcttggcggactcggaggtactggtaacggtgaatgacccagtc

SEQ ID NO: 4317 - DNA, 430 bp, Glycine max
  unsure at all n locations
  Clone ID: LIB3073-016-Q1-K1-H3
gaagcacaacaaaaccacaatctaagtaagtgttgagagaagagtgcgtttgtttgtttgaaattaagtagtaaagatgtttggaatcatcggaggaaacaagggtcacaagataaaggggaacttggtgattatgcgaaagaatgtgttggatatcaacagcatcaccagtgttaagggtgtcattggaaccggcattaacatcattggaggtgtcgtcgacaccgttactgctttggcgtcccacatctgcatccagctcatcagtgccaccaaggctgatgggcatgggaaaggtaaagttggaaaggctacaaatttaagaggacaagtgtcgttgccaaccttgggagctggcgaagatgcatacgatgttaattttgaatgggacagtgacttcngaattcccggtgcattttacataaagaac

SEQ ID NO: 4318 - DNA, 453 bp, Glycine max
  unsure at all n locations
  Clone ID: LIB3073-016-Q1-K1-E12
gagataaagaaaagagaaatggcaacagaaacaaaagtggcagtattaggtggcatcaccgaagtgcagggagctgccaacagcgtcgagatcaacaatctcgctcgctttgctgtagaggaacaaaacaaaagagggaattcagttctggagtttgtgagggtgattagtgcacagcagcaagtggtttctggagtgaattactacataacattggaagcaaaagatggtgagattaaaaatgagtataaagcgaaggtttgggagagggaatcccaagagttgctagaattcatgccaacattacgtgcangaggcgagatcgaccatctcgctcgctttgctgtacaagaacaaaacaaaagagagaatgcaaatctggagtttgtcggggtgattagggcatagcagcatgtggcggaagggtcatatactacatcactttggaaagca

SEQ ID NO: 4319 - DNA, 134 bp, Glycine max
  Clone ID: LIB3073-016-Q1-K1-E2
ggagtgtttgagatagagcgaaagagatgtcgttggtgtgaagcatgttcgggtgtggagtggtgatggcggcgtcgcaagcaatgggaattggaaggagaagcgatggtggattgacgatagtgtgttcgtct

SEQ ID NO: 4320 - DNA, 400 bp, Glycine max
  Clone ID: LIB3073-016-Q1-K1-E3
gaatagaaatagaactgtcttttcatatagatatccgtgcaacacaacataggtcatcgaaaggatctcgaagacccaccaacgcacgaaagccgggatctttcagaaaatggattcctattcgaagggtgcataaccgcatggataagctcacactaacccgtcaatttgggatccaattcggttccttaggaggtatcgggaaggaattttggaatgtaataatatcgattcatacagatacagaagaaagggttctctattgattcaaacgctctacctacgagatagggatagagaaagaggaaaaaaccgaggatttcacatagtacttttggtcgaaaaatcgatctgatttttttcgtacttttcgctcaatgatgaaatgggtcagattcta

SEQ ID NO: 4321 - DNA, 352 bp, Glycine max
  Clone ID: LIB3073-016-Q1-K1-E5
gaaggaaggaaggaaggaaggaagagtgagcgtgaaagatgccttcggcgaggctttcagggtcaccaaggctcgacgttgctattgacatgggcaatccatttctcaatctcactgttgatggtttccttaagatcggagctgtcgcagccacgcgatcagctgctgaagatacttatcatattatccgaaacgggaatatctcaagtcatgatttcgagaaaacgttgaagaagatgtgtaaagaaggtgtatattggggaactttagctggtgtttatcttggaatggaatatggggtagagaggatccgtggcaccagagattggaagaatgccatgattgggggtgc

SEQ ID NO: 4322 - DNA, 366 bp, Glycine max
  Clone ID: LIB3073-016-Q1-K1-E7
gaggctgaagaacacatagagagagagagagaagggcagaaaaaatgagactgttcgatccatggcctgttttcttcaagagagaatggaagcggaattggcccttcttggttggattcgccatcaccggaactctcatcaccaaactttcccttggtctctctgaggaggaagccaaaaagtcgaaattcgtccaggcacacaagaggtgactttagaatggaagatttgcagtggctttgcacattgtattagatgtgtgaagagagcttttgtttgtaataaatgaagagagatgttgtatacactccatgttcctatttccattttggttgtttactttaatgtgattgagaaattcatact

SEQ ID NO: 4323 - DNA, 306 bp, Glycine max
  Clone ID: LIB3073-016-Q1-K1-E9
gaaagaaaactccaaactcaagtaggcgatactaaggtgaaaaaggagagatggcagctgcaacatctagtgctgtgttaaacgggtttggatctcacttcttgtgtggaggaaagaggagccatgcccttcttgctgctagcattggagggaaagttggtgcttctgttagtcctaaaagagttattgtggcagttgctgctgcaccaaagaagtcatggatccccgctgtaaaaggtggtgggagtttcatagacccagaatggcttgacggctcgctaccaggtgactatggttttgacccac

SEQ ID NO: 4324 - DNA, 451 bp, Glycine max
  unsure at all n locations
  Clone ID: LIB3073-016-Q1-K1-F1
gaaaagaaaagagaaatggcaacagaaacaaaagtggcagtatgaggtggcatcaccgaagtgcagggagctgccaacagcgtcgagatcaacaatctcgctcgctttgctgtagaggaacaaaacanaagagagaattcagttctggagtttgtgagggtgattagtgcacagcagcaagtggtttctggagtgaattactacataacattggaagcaaaagatggtgagattaaaaatgagtataaagcgaaggtttgggagagggaatcccaagagttgctagaattcatgccaacattaggtgcaggaggcgagatcgaccatctcgctcgctttgctgtagaggaacaaaacaaaagagagaatgcaaatctggaatttgtgggggtgattaaggcaaagcaacaagtggtggaagggttcatatactacatcactttggaaagca

SEQ ID NO: 4325 - DNA, 417 bp, Glycine max
  Clone ID: LIB3073-016-Q1-K1-F10
cgacagaaggagtataatagacgtaacaagttcaacccattgtggaatgcacttgtacttgggggggtgaaaaacgggcagaagtaccttggcatggttaacatgattggcattaattttgaggacaaccatgtagcaaccgggcttggaaatcatctcgctaggccaattctccgtgatgagtggcatgaaaacttgacctttgaagagggcgtcaagttactggaaaaatgcatgcgtgtgcttttataccgtgataggtctgctgtcaacaaaatccagatatctaaaattacagatgaaggtgccactgttttcccaccattctcattgaaaacgtactgggagttctctgccttcaagaatccaactgtgggcgctgaaagttcatggtaactgactcattgtgaaatgaaa

SEQ ID NO: 4326 - DNA, 424 bp, Glycine max
  unsure at all n locations
  Clone ID: LIB3073-016-Q1-K1-F11
ggctgcagctgaggaggaccatcgcgcccaagggagagagagagagagagaggcgcgaaaatgagcggagcgaaggggaagaagaagggagcgagctttgtgatcgattgcgcgaagccggtggaggataaaattatggacattgcttctctggagaagttccttcaggagaggattaaggttggcggcaaggccggtgcactcggcgattccattactgtcactagggacaagagcaagatcaccgtcaccttcgacagcaacttctctaaacggtatctngaaatattgaccaagaagtacttgaaaaagcacaatgtgaggggatggcttcgcgtgatggcattcaacagggagcgaatgtctatgaatggagatacttaacatcgctgagaacgagggtgaagaggaagactgaagatct

SEQ ID NO: 4327 - DNA, 394 bp, Glycine max
  unsure at all n locations
  Clone ID: LIB3073-016-Q1-K1-F12
ggtacttgaaacctcaaaccaaccagagcctctttgattgaaaataatgcaagttttttttttcacagttaatttatttgtggagaaagaaaaaaaatgtctgcttccactgttgttcacaatttttgttccgtcgcttgttgcatttcagattgcggccataaccgaaccttggttcctacccatcatcagtttcattcacccaattaccttttgaggttaaagaagcaaactttcctcacgaacatttacttcaagagttccagaacccagaaacctcgctccagttttgtagtattcgcagcacaatcgaattttgttaaagctctgcagaatgcatggaaagttggtagggatggaattgaggcatgcactaatctcgntcctaattctg

SEQ ID NO: 4328 - DNA, 312 bp, Glycine max
  Clone ID: LIB3073-016-Q1-K1-F3
ggagacgagggtaaggtcgcgttgtgttgcgtcgtgtggtgcgctgttcctctgtctgtcgtttttgttttcagaccaaaccctagctccgcatcgcaaccatgtcgaccaagcaaggtggaaaagctaagcctttgaagaaacccaagtctgataagaaggattacgacgaggttgacatggctaacattcagaagaaaaaggaagaggagaaggcgctaaaggagttgaaagccaaggcgcaacagaagggaagctttggaggttctgggctcaagaaaagtggaaagaagtaagggctctttatcatga

SEQ ID NO: 4329 - DNA, 381 bp, Glycine max
  unsure at all n locations
  Clone ID: LIB3073-016-Q1-K1-F4
gatagcagcatcatacaaagcattgagttcaaaaacttaagttcattccttgtgttttgctttcttcctcaaaaccaaacatgtcgaacacatgcggcaactgcgactgcgctgacaagactagctgcaccaagggaaacagctatggtgttattgtagagactgagaagagttacatcgagactgttgtcatggatgttccagcagctgagcatgatgggaagtgcaagtgtggcactaactgcacttgcacggactgcacctgtggccattaaggaatatgtatgaaaatgtaattgccatgtgtttggcaatacaaatatccanataatgtaatcttcgtatgaataaatgtgtgtgctgttatcctactttaggtct

SEQ ID NO: 4330 - DNA, 308 bp, Glycine max
  unsure at all n locations
  Clone ID: LIB3073-016-Q1-K1-F5
ggcgtttttcattgtgcattattcaatggccaccacagcagctctatccggaaccatggtgagcacctccttcatgaggaagcaacctatgacgaccaagagcctaaagacattccccaacgctctttttggtctgaaaggtggacgaggtggtcgtgtaacttgcatggcctcgtacaaggtgaagctcataaccccagaaggagaagtggagtttgaatgcccagatgatgttttcattgttgacaaggctgangaagaaggcattgaacttccctactcgtgcaaggctggttcttgcgtttcat

SEQ ID NO: 4331 - DNA, 369 bp, Glycine max
  Clone ID: LIB3073-016-Q1-K1-F7
gaaggtgcaagagtttgttgtgagctataagctagggtatcgtgaggagaatatgaagttgtttgttttctttgttgctgcagtagttttggtagcatagccatgccatggcgcaggctaccaaaggttccctctccgaatgaaaactggctatggtgagcgttcttcgggggtaaaatgcgcaagttttaggcttgctgtggaagcacacaacatccgagcctttaaaaccattcctgaagagtgcgttgaaccaacaaaggactacattaatggcgaacaatttagatcagactctaaaacagttaaccaacaagctttcttttatgctagtgaacgcgaagtccatcacaacgacatatttatatt

SEQ ID NO: 4332 - DNA, 308 bp, Glycine max
  Clone ID: LIB3073-016-Q1-K1-F8
gataaccatggcgtctaactctgcttccgctcttggcttccttttatgcctatcgcccatcactttgcttctttctgcgtttcgtgctcaagctcaatctcatgctccagctcccactttcaagtactgtgaaaagaatgcagactatgctgtgaaggtgagtggagtggaaatattgcctgaccccgtggagagaggagtgccattcacctttaagatcccagcttatactcctgaaccaattcaaagcggggacttgttatatgaaatttcttatgctggaatataagcacaacctgctacatttc

SEQ ID NO: 4333 - DNA, 419 bp, Glycine max
  unsure at all n locations
  Clone ID: LIB3073-016-Q1-K1-C8
cccacgcgtccggacgacagaaggggagagaacctaagagatataaataagccataataaggaggcgattcggaaaagaagaaaagacattcaacaaacaacgcaatgggtattccgtcggaactgagggacatgttgttgcccaacaaaaagggcgtcctcgttgcctctcccgcagaggacaggaagactttgaggtccaagcaatgcactagggaaggtgtgcgagctggattcaaggctgcttccattgctggtgttgccagtgctgtgcctacattggctgcagttcgtatgattccatgggcaaaggcaaacctcaattatactgctcaagcacttatcatatctgctgcatccatcgnctcatacttcatcactgctgataaaactatcttggagtgtgcaacgaaaaatgc

SEQ ID NO: 4334 - DNA, 297 bp, Glycine max
  Clone ID: LIB3073-016-Q1-K1-D1
aaggacagaaggggtatgatgaatgggttaacaagggcaatgcaccggcactgcccgagactcttgagaattacaacaagctggtgtctcttggcttcaagattatattcttgtcaggaagaacactggacaaacaggccgtaacagaagcatacttaaagaatgctggcttccacacatgggataaatttattcttaaggatccacatgatcctttcactccaaatgcatattcattcaaagcagcaactagtgagaaactcattatgcacggctacaacatcctgcgaatccttg

SEQ ID NO: 4335 - DNA, 416 bp, Glycine max
  Clone ID: LIB3073-016-Q1-K1-D10
ggaacagagagagagagaatggcagcagttggtgggaatcgtgatgtgacaggaagccagaacagcgttgggatcgatgctctagctcgctttgctgttgaagaacacaacaaaaaacagaatgcccttttggagtttgaaaaggtggtaactgcgaaacagcaagtggtttctggtaccttgtacaccatcactttggaggcaaaagatggtgggcaaaagaaggtttatgaagccaaagtttgggagaagtcatggttgaacttcaaggaggtgcaagagttcaagcttgttggagatgcacccgcatagtctagtgcttaattaggttgctgaagagtgaagaatgagacagcctggttcgaaagggaaaagcctaaggatatatcaaaagatcctatatgtataaaataaat

SEQ ID NO: 4336 - DNA, 347 bp, Glycine max
  unsure at all n locations
  Clone ID: LIB3073-016-Q1-K1-D11
ggttctagtgtgtgattgcttgttgttgtaactcgtgctgcttcttttgttgttctgtgtttgtgtttgttttttctctcacctgaaaatgtcttgctgcggtggtaactgtggttgcggaagctcctgcaagtgcggcaacggctgcggaggctgcaagatgtacccagacttgagctacactgagtcaaccaccaccgagaccttggtcatgggagtggcacctgttaaggctcaatttgagggtgctgaaatgggtgtgcccgctgagaacgatggctgcaaatgtggaccaaactgctcctgcaacccctgcacttgcaagtgangtgttgggagagcaagct

SEQ ID NO: 4337 - DNA, 424 bp, Glycine max
  unsure at all n locations
  Clone ID: LIB3073-016-Q1-K1-D12
gatcatcaagtcccaacaactattctacttaccttttctggtaatccaaatatcatcgtctgaaacgatggctgccatggcaaccacaaccctctcttcaaacccgaaactctcatttttccacggaaagcccgttacatattcttcccgcgtcgcacccaccaccaagttattctcatccaaacaaggcacaatctccatgtccctaacccaacccccatacgacctccaatccttcaaattccaacccatcaaagaatccatcgtctcacgcgaaatgacgcgccgctacatgaccgacatgataacctacgccgacaccgacgtcgtaatcgtcggagccggctcggcggggctctcctgtgcgtacgagatcagcaagaaccccgncgtgagcgtcgccataatcgagcagtccgtgagc

SEQ ID NO: 4338 - DNA, 313 bp, Glycine max
  Clone ID: LIB3073-016-Q1-K1-D4
gacccttaataagttgtcacaaaacacaaacctagtgcgtagcatattccagtgtttttcatttcatcgtgcattcaatggccaccacagcagctctatccggaaccatggtgagcacctccttcatgaggaggcaacctatggccaccacaagcctaaagacattccccaacgttggtgaagctctttttggtctgaaaagtggacgaggtggtcgtgtcacttgcatggcctcgtacaaggtgaagctcataaccccagaaggagaagtggagtttgaatgcccagatgatgttttcattgttgacaaggc

SEQ ID NO: 4339 - DNA, 393 bp, Glycine max
  Clone ID: LIB3073-016-Q1-K1-D5
gatcacaaaccaaacaacttctaacacatacactaggctctctctctctcttattgtatggccgccaattccagtagccgagggatcaccgccttagggaagcgagtcgccaaccggatctggacctccaacgcacctcctctcacttcaaggaggggagcatacagtagcggctcagtgtacgacaagaaccctgatgatgagatccagtctgggcaggtcccagacgatgtgatccaggcggcaacacaatccggcaaatactgggccccacatccacagactggggtatttgggccccccggaggaggtgaccaaactgcttctgccattcactctgatgcgctggaggaaaaggcctggtttcgccccaccagtctcgaggatttcgag

SEQ ID NO: 4340 - DNA, 419 bp, Glycine max
  Clone ID: LIB3073-016-Q1-K1-D6
gaaagaagtgtgagtaagatcataagcaaaagcgggggtgaactgaagatgccggttctcaccctttctactaacgttagccttaatgatttagacgcctcttcgatactctcccaagtaatctccaccgtcgccagcatcatgcgcacacctgagccttttgtgatggtttcactggaaggatcaacaaccacatgttttggtgggactgaggagccagctgcctatggtgaactggtgtccatgggtgctcttaacccagaattgaacaaaaaactgagtgctggaattgcctgcgttcttgaaaccaagttgttggtgccaaagtcacggttcttcttaaaattctataacacagagggctataattgtgcatttgaacggtctatcatggtagtcgagtccaaatgatggaaaga

SEQ ID NO: 4341 - DNA, 440 bp, Glycine max
  Clone ID: LIB3073-016-Q1-K1-D7
aggaacgccgtcgtcgggatgctgcaacggagtgaggagcctcaatgccgccgccaagaccaccgccgaccgccagacggcgtgcaactgcctcaagtcggccgccagccaaatctccggcttcaacgccaacaacgccgcctcgctccccggcaaatgcggagtctccatcccctacaagatcagcacctccaccaactgcgctaccatcaaggtttgaagagaaagtcatggacgcaggaaaccggaaactactcactagtatatgagtagcattattaatattaagaataagatcgagggtgatgagggctccacttatatgcccctctcctcttgtatgagagatttgcattggatagctttaagttgggttgcgttggtatttctctggatgagttacacatagttatatctactttaatattgggttcttcctt

SEQ ID NO: 4342 - DNA, 376 bp, Glycine max
  Clone ID: LIB3073-016-Q1-K1-D9
gtactctgatggcaaggcaagcgcttctgctctttgtgtggtggctatgcttcttggcaagagttagatcggacgaggattgcgtgtacacggtgtacgttcggacgggttcgatcatcaagggaggcaccgattcagtaattggtctgaagctatacgacaagtccggctacggcatatacatcaccaacctcgaggcatggggcgggttaatggatccgggtcacaactactacgagcggtgcaacctcgacatattcagtggtagaggcccttgcttggaagcacctgtttgcgaggccaacctaacttctgacgggtcggtgccccatcacggctggtacgttaattacgtcgaggtcaccactactggggt

SEQ ID NO: 4343 - DNA, 381 bp, Glycine max
  Clone ID: LIB3073-016-Q1-K1-E1
attgatgggaagccggtttcattcacatttgcttatcatacatatttctctgtgtcagatataagtgaagtgcgggttgaaggattagagacattggattatcttgacaacttgcagaaaagggaacgctttactgaacagggggatgctttaacatttgaatcagaatttgacaggatatatctcagcactcctacaaagattgcaattcttgatcatgagaaaaagagaacaattgtattgcgtaaagatggtcttcctgatgctgtggtgtggaatccttgggatacgaaagcaaaggctatatctgatttcggtgatgatgagtataagtacatgctatgtgtagaggctgctgctattgaaaagcctatcactttg

SEQ ID NO: 4344 - DNA, 385 bp, Glycine max
  Clone ID: LIB3073-016-Q1-K1-E10
gtagtaattattagaatttgtagtaattattataaggatgagaagcagcaattcttaggtatttcagattaatacttgataacctaaacaatatatctatatatagaatatagatagatatatatataatagaacgtaaaaaaaagaagagaataataaatagaaaaaggagcatgttgattatatagaaagtaaagggcaacaatcatttttgtttaccatgggtaaggacaccatcgctgacataataacctatataagaaatgctgacatgaataaaaaaggaatggttcaaataccatttactaacataacagaaaacattgtaaaaatacttttacgcgagggttttgttgaaaacgtcagaaaacatagagaaaacgac

SEQ ID NO: 4345 - DNA, 452 bp, Glycine max
  Clone ID: LIB3073-016-Q1-K1-C7
ggttctccatctctgccactgccataactcactcaggagcttcttctctgttctcaccaatggcatcaacaatatcagcaatggccatgatcaacgccaaatgcgtcaacccaaagttccccaatcccaccaagctcgcaccatcaaaaccctcccttcagatcaaccttccaaagggcctcatagcctcacccgaaagcactaaactttcccccgcgacagcaatcgcaggagcaatattcacaaccctcggaacctgcgacgccgcattcgctgttcaacaaatagccgacatagcagaaggcgacaaccgcggactggcactgttgctgcccataatcccagcaatagggtgggttctgttcaacattctgcagccggcgctgaaccagctgaaccgaatgcgcagcaccaaaggcgtgatcattggcttgtggcttggcggcttggct

SEQ ID NO: 4346 - DNA, 377 bp, Glycine max
  Clone ID: LIB3073-016-Q1-K1-B1
gagcgtgacctagccagcacaaagggcgtaggagaagagggtttcgttccgtttcaatggggagcgaagagcagaacggcgaattctacctgcgttactacgtcggtcacaagggcaagtttggtcacgagttcctggagttcgagttccgcccagacggcaagctccgctacgccaacaactccaactacaaaaacgacaccatcatccgcaaggaggtttacctaacccccgccgttctccgcgagtgccgtcgcatcatcgccgagagcgagattatgaaggaagatgataacaactggcccgaaccggatcgggtggggcggcaggagctcgagattgttatggggaacgagcacatttcgttcaccacgtcg

SEQ ID NO: 4347 - DNA, 406 bp, Glycine max
  unsure at all n locations
  Clone ID: LIB3073-016-Q1-K1-B10
gattcagattacattgcaaaaatggcatcattcaccatgacagcttccatccttggcagcccagccgtcaccaaccggtcggcagtagcaacgcagaggagatcactcgtagtgaatgctgccaaagctgttgaagcagaaaaggtcagttatgacaatgacatggatggtagcaatggaaggaggaacttgatgttcgccgcggcggcggctgctgtttgctctgttgctgggatggcagtggcagatgagcctaaaccaggaaccccagaagccaagaaaaagtatgctccgatttgtgtcaccatgccaactgctaggatttgtcgcaattgaaggactttggtttttattttacttctgatgattggaaatgtacaaaatgggtngtgtaatgctttgatga

SEQ ID NO: 4348 - DNA, 371 bp, Glycine max
  Clone ID: LIB3073-016-Q1-K1-B11
gttattctattccacctcttagaaagaaaaaaacttgaagcaaaatacttaatagcatggcgatacatttatacaaaacttctaccccaagcacacgcaatggagccgtagacagtcaagtaaaatccaatccacgaaatcatttgatctatggacagcatcgttgtggtaaaggccgtaatgccagaggaatcattaccgcagggcatagagggggaggtcataagcgtctataccgtaaaattgattttcgacggaatgaaaaaaacatatatggtagaatcgtaaccatagaatatgaccctaatcgaaatgcatacatttgtctcatacactatggggatggtgagaaaaaatatatattacacccc

SEQ ID NO: 4349 - DNA, 410 bp, Glycine max
  Clone ID: LIB3073-016-Q1-K1-B2
cctgcaagaggacaacagagggggccggaaagagaatgcaatggcttctctggcaagcttagctggtgttcaaccatctactgtcaagggccttgctggaactaagctctctttcaagccctctcgccagagcttcagacccaagaatttcaggagtggtgccgttgtagcaaagtacggtgacaagagtgtgtactttgatttggaggatctaggcaacactactggtcagtgggacttgtactgctcctatgcaccttcaccctacaaccctgttcagagcaagttcttcgagacattcgtcgctccattcacaaagaggggattgctactaaagtatttgatcctgggaggtggttccaccactgcatacttgagtgccacatcgtcaggtgacattctaccaatca

SEQ ID NO: 4350 - DNA, 408 bp, Glycine max
  Clone ID: LIB3073-016-Q1-K1-B3
agaagacgacagaaggggaggtttttagggtttacattgaggaggcacaccttcaggagcagtggtggttctcaaaaccgagctgtgccgattcagcggtgccaagatctacccagggaaaggcatcagatttgttcgtggtgattctcaggttttcctgtttgctaactcaaaatgtaagaggtatttccacaacaggttgaagccgtcaaagctcacgtggactgcaatgtaccgaaagcagcataagaaggatattgctcaagaagctgtgaagaagagaagacgtgctaccaaaaaaccttactctaggtctattggtggtgctactttagaagttatccagaaaaagagaaccgagaagccagaagttcgagatgcagctagggaagcacagcttcgtgaaat

SEQ ID NO: 4351 - DNA, 272 bp, Glycine max
  Clone ID: LIB3073-016-Q1-K1-B5
gacacaactgaacaagataagctatccatagcaggggaagaaatgaagagtaccttgttcgccctctttctactttgtgccctcacctcttacctaccttcagccaccgctggtgatgtggtcgacactgatggtaatcctgttgaaaatggaggcacatactttgtgttgccaactataatattaaacggcggtggaatagaatatgccacatttggaaatgaaacttgccctgtcactgttgcgcaatctcgcgatcagttctgcaaggg

SEQ ID NO: 4352 - DNA, 456 bp, Glycine max
  Clone ID: LIB3073-016-Q1-K1-B6
ggattgattccctcattcttcatggatagacatggccaccgtcacttctgcagccgttgctattccctcattcactggcctcaaggcaagcgcaggcaaagtgggtgccgcagttaaagtctcagctccccaagccacaaggttgggcatcaaggcttcgctgaaagacgttggagtcgctgttgtggccactgccgcgagtgcagtgctggctagcaacgccatggccattgaagtgttgctgggtggtgatgacgggtctctggctttcgttcccaacaatttctccgtggcctctggggagaagatcgtgttcaagaacaacgcaggtttcccccacaacgttgtgttcgacgaggacgagattcctagcggcgtggatgcagggaaaatctccatgagcgatgaagaccttctcaatgcgcctggtgagacttacaagcgtactttggatgc

SEQ ID NO: 4353 - DNA, 224 bp, Glycine max
  Clone ID: LIB3073-016-Q1-K1-B7
gacacaccgtttgttctattcttaactcaacttctgctacccactctcttcttccaagtccaaccacgcttttctctacagtcatgggcaaggtcaagatcggaatcaacggatttggaagaattggccgtttggttgccagagtcgctctgcaaagagacgatgtggagctcgttgccgttaacgaccctttcattaccaccgattacatgacatacaatgtt

SEQ ID NO: 4354 - DNA, 261 bp, Glycine max
  Clone ID: LIB3073-016-Q1-K1-B8
ggttacagtgttgggaatggcgggcaaaggtggatcggctccggccacatattcgccgtgtccgacgaccgattagaagaaaccatcgcttttcaatgaggatttggctcgacctgatggccgcagtttccaccagtgcagacccgcatttttcaggactggtgctgggaatgctgcatctggatctgcttatgctgaaggtggaaataccaaggtcattggatcaatatttgggccaagaaagagccagaaggggatgat

SEQ ID NO: 4355 - DNA, 322 bp, Glycine max
  Clone ID: LIB3073-016-Q1-K1-B9
taatggagcacaagtgagtttgatgatcgagatggctagaaacagtgtgatgaatgtgaacgtccttgttttcttcgttgctacaattatggtagcatggcaatgccatgcgtacgatatgttccctctgcgaatgaacactggctatggtgcccgtactccggaagtgaaatgcgcaagttggaggcttgctgtggaagcacacaacatctttggctgtgagaccattcctgaagagtgcgttgaagcaacaaaggaatacatccatggcgaacaatatagatcagactccaaaacagttaaccaacaagcttacttttat

SEQ ID NO: 4356 - DNA, 294 bp, Glycine max
  Clone ID: LIB3073-016-Q1-K1-C1
aaggacagatacgacatgacgaatgggttgtcatttgcaatgcgccggttctgtccgagactggggagaattacaacacggtggtgtgtctagccttcaagattatattcttgtcatgacgaacactggacacacatgccgtaacacaagcaaacttacagaatgctggataccacacatgggaaaaattaattctcaaagatccacacgatccttccactccaaatgcacattcatacacagcatccatgagacgaaaactgattacgcatggatacagcattcatgagatca

SEQ ID NO: 4357 - DNA, 310 bp, Glycine max
  Clone ID: LIB3073-016-Q1-K1-C2
gatcctaaataagcatcataaattcatagtctttcggggcttccttccttcctctgctctagtgtatgccactctggttaattatcatacccccttctaggcatagttcttctccctctgttctctattctacactgtgaaacccagatgaaggtagcatttgtagctgttctacttatttgccttgtcctaagctcctccttgttcgaggtgtcaatggccggttctgctttctgctcctccaagtgcgcgaagaggtgttctagggctgggatgaaggacaggtgcacgaggttctgcgggatttgct

SEQ ID NO: 4358 - DNA, 426 bp, Glycine max
  unsure at all n locations
  Clone ID: LIB3073-016-Q1-K1-C3
gaagtgagtttgttgatcgagataactagaaacagtgtgatgagaatgaaggtccttgttttcttcgttgctacaattttggtagcatggcaatgccatgcgtacgatatgttccctctccgaatgaacactggctatggtgcccgtactccggaggtgaaatgcgcaagttggaggcttgctgtggaagcacacaacatctttggctttgagaccattcctgaagagtgcgttgaagcaacaaaggaatacatccatggcgaacaatatagatcagactccaaaacagttaaccaacaagcttacttttatgccagagacctcgaagtccatcccaaggacacanttgtgttcagtatagatggcaccgtactctctaatattccatactacnaaaaacatgggatatgggtggagaaaattaac

SEQ ID NO: 4359 - DNA, 167 bp, Glycine max
  Clone ID: LIB3073-016-Q1-K1-C4
gtgccttgatcggcattactcgtgcatcggcgacgggtgcgacatcgcttagattgttcacggctctattgatgccaacgacccgaactcctgcgatccagctgagatctctgccgtgtgaccccggctgtatgctgtgaactgatcaggacatactcataattggt

SEQ ID NO: 4360 - DNA, 462 bp, Glycine max
  Clone ID: LIB3073-016-Q1-K1-C5
gaagaaaaatggcaaccatcatcgccggcatcccgggtacatcgatcactcgcgcaggtcttgtgctcaaacgacctgttggagcctcgtcctctaccgttcttggattgccagcaatggctaaggcagggaaagtgaggtgctccatggaggaaaagccttcaagcagctcaaatatagggatgggggcatccttgttagcagctgcagttgccgcaaccatgtcaagcccagccatggctttggtggatgagagactcagcactgaaggaaccgggcttccctttgggcttagcaacaacctccttggttggatcctgtttggtgtcttcggtcttatatgggctctctactttgtctacgcttccacccttgaagaggatgaagagtctggattgtccctctaaacccccaagtggcgatgcatgcattgtagaaattgcaaagaattatctctttttc

SEQ ID NO: 4361 - DNA, 416 bp, Glycine max
  Clone ID: LIB3073-016-Q1-K1-C6
gacactgctattcctcttaagctgggtactgagtttccacactgcataccttaggtcttccgaattcgaagttaatttgcaagatggctaaggaaaaggctcagatcaacattgtggtggttggtcatgtggaccctgaggaggcaaccaccattaacgagctgaagaagcctgttgtggagaaagaagctccagggcatgccatatgagggcatgcacgtacggcctcggaggggaaccagaaaattatgttaacaaaataatctggaaccctaatgtatcagtgtcatcatcagtgtgtagtttaagctagctttgctatggttacgttctttgagatgagagtcttgatgaacagtaccattctgatgtattgctttccttgaaagttaatgcatgcttcttatcttctgtcc

SEQ ID NO: 4362 - DNA, 405 bp, Glycine max
  Clone ID: LIB3073-015-Q1-K1-H5
ggcacaagtgagtttgttgatcgagataactagggacagtgtgatgaaaatgaaggtccttgttttcttcgttgctacaattttggtagcatggcaatgccatgcgtacgatatgttccctctccgaatgaacactggctatggtgcccgtactccggaggtgaaatgcgcaagttggaggcttgctgtggaagcacacaacatctttggctttgagaccattcctgaagagtgcgttgaaacaacaaaggaatacatccatggcgaacaatatagatcagactccaaaacagttaaccaacaagcttacttttatgccagagacctcgaagtccatcccaaggacacatttgcgttcagtatagatggcaccgtactctctaatattccatactacaaaaaaca

SEQ ID NO: 4363 - DNA, 344 bp, Glycine max
  Clone ID: LIB3073-015-Q1-K1-H6
aagcctctaggtcagtttgggagaactcctatcttacactagcgccaatgtatcttatagaggagaatcatcgtgttactacaatagaaggtcctatactaggaaaccgttgccttactcaatgttaaggcacaaaaccagatacctctttcatgacagatgttgaagccgtgaattctaatccatcatcgatgctagatattgttcaggtgtatactcctatctcggaaaagctaggcatactaccgtattagctacctagtgtataaaatgtcatcttcctacctaaagaactataatgtgtatgaaatgtcgagtcctatcttcgaaagtagatctaggcc

SEQ ID NO: 4364 - DNA, 415 bp, Glycine max
  Clone ID: LIB3073-015-Q1-K1-H8
ggcacaagtgagtttgttgatcgagataactagaaacagtgtgatgaaaatgaaggtccttgttttcttcgttgctacaattttggtagcatggcaatgccatgcgtacgatatgttccctctccgaatgaacactggctatggtgcccgtactccggaggtggaatgcgcaagttggaggcttgctgtggaagcacacaacatctttggctttgagaccattcctgaagagtgcgttgaagcaacaaaggaatacatccatggcgaacaatatagatcagactccaaaacagttaaccaacaagcttacttttatgccagagacctcgaagtccatcccaaggacacatttgtgttcagtatagatggcaccgtactctctaatattccatactacaaaaaacatggatatggg

SEQ ID NO: 4365 - DNA, 375 bp, Glycine max
  unsure at all n locations
  Clone ID: LIB3073-016-Q1-K1-A1
gataagaaagaagatcaaaagaaaaaagagaaacagatggcagcactgggtggctttaccgacatcaccggagcacagaacagcatcgatatcgaaaatctcgctcgctttgctgttgatgaacacaacaaaaaagagaatgcagttctggagtttgtgagggtgattagtgcaaagaaacaagtggtttctggcaccttgtactatatcactttggaggcaaatgatggtgtgacgaaaaaggtttatgaaactaaggtgttggagaaaccacggttgaacatcaaggaggttcaggaattcaagcccatcactggttgctgtaatcctctntcggtgacggtctaacacatagctagggtatgggaagtgact

SEQ ID NO: 4366 - DNA, 378 bp, Glycine max
  unsure at all n locations
  Clone ID: LIB3073-016-Q1-K1-A11
gacgcgtgcggcgagacgacgacagaaggggatagcagcatcatacaaagcattgaattcaaaaactaagttcgtttgttgtgctttgctttattcctgaaaaccaaacatgtcgaacacatgcggcaactgtgactgcgctgacaagactaactgcaccaagggaaacggctatggtgttatagtagagactgagaagagctacatcgagactgttgacatggatgttccagcagctgagcatgatgggaagtgcaagtgtggcactaactgcacttgcacggactgcacttgtggccattaaggaatatgtatgaaaatgtaattgccatgtgtttgcaatacanatctncaaataatgtatcttcgtatgaataa

SEQ ID NO: 4367 - DNA, 371 bp, Glycine max
  Clone ID: LIB3073-016-Q1-K1-A12
gatagcagcatcatacaaagcattgaattcaaaaacgtagagttcattccttgtgttttgctttcttcctcaaaaccaaacatgtcgaacacatgcggcaactgcgactgcgctgacaagactagctgcaccaagggaaacagctatggtgttattgtagagactgagaagagttacatcgagactgttgtcatggatgttccagcagctgagcatgatgggaagtgcaagtgtggcactaactgcacttgcacggactgcacctgtggccattaaggaatatgtatgaaaatgtaattggcatgtgtttggcaatacaaatatccaaataatgtaatcttcgtatgaataaatgtgtgtgctgttatccc

SEQ ID NO: 4368 - DNA, 370 bp, Glycine max
  Clone ID: LIB3073-016-Q1-K1-A2
gatagcagcatcatacaaagcattgaattcaaaaacttaggttcattccttgtgtttcgctatcttcctcaaaaccaaacatgtcgaacacatgcggcaactgcgactgcgctgacaagactagctgcaccaagggaaacagctatggtgatattgtagagactgagaagagttatatccagactgttgtcatggatgttccagcagctgatcatgatggaagtgcaagtgtggcactaactgcacttgcacggactgcacctgtggccattaaggaatacgtatgaaaatgtaattgccatgtgtttggcaatacagatatccaaataatgtaatcttcggatgaataaatgtgtgtgctgttatccca

SEQ ID NO: 4369 - DNA, 391 bp, Glycine max
  Clone ID: LIB3073-016-Q1-K1-A4
gacagcagcagagcaaaagaaagaaagaaagaaagtgcgaacttcctctgttttgctcccctgtttaagccttatcataagcttagaatggcacacaaggaattttccattgccctagtgactctcattgttctctttgtcaacacgaacctccatggtgccatggctgactatggtggtggttggcagagtgctcatgccactttctatggtgggggtgatgcttctggcacaatgggtggagcatgtgggtatggaaatttgtatagccagggatatggaactgacactgtggctctaagcactgctttgttcaacaatggcttaagctgtggatcttgctatgaaatgagatgtgatgatgacccaagatggtgcaaacctggctcta

SEQ ID NO: 4370 - DNA, 405 bp, Glycine max
  Clone ID: LIB3073-016-Q1-K1-A5
ggaaaaagaaaaaaaaactaaatagttcatttggccgttctaaaattattcttgttggttgttggagcaacgatttggcggtgatcactatcgaaccaagaagaccaagattctcaacctacgccgccacaaaaaaagattctcttagcccacggcttcgctaactcctaaattccgatgctgcttttcactccctctcccgtaacggttactctctctcccagaaaaccatttccctcaaacgctcttactctgcaccactgtttccctcccttctctgcaaaacccatttccagaaattccttcacatgcgctctcacacattcacccacccacacgcacgcgtaccccgacccaggttccgaattcgcagaacacgagacccataagttcaaaagtgaactc

SEQ ID NO: 4371 - DNA, 448 bp, Glycine max
  Clone ID: LIB3073-016-Q1-K1-A6
gccgctgagctccctttctcctgggtccacagagacaaaatgtaagacaggtgccaacagttcatcacgaaagaaaggactagctgagccgagatcactaactaaaacgaatttaatactaatcgaaaatactaatagaatagaaatagaactgtcttttcatatagatatcccttcaacacaacataggtcatcgaaaggatctcgaagacccaccaacgcacgaaagccgggatctttcagaaaatggattcctattcgaagggtgcataaccgcatggataagctcacactaacccgtcaatttgagatccaattcggttccttaggaggtatcgggaaggaattttggaatgtaataatatcgattcatacagatacagaagaaagggttctctattgattcaaacgctctacctacgagataaggatagagaaagaggaaaaa

SEQ ID NO: 4372 - DNA, 369 bp, Glycine max
  unsure at all n locations
  Clone ID: LIB3073-016-Q1-K1-A7
gaccacagagagagaggttttgatgcaacgctgtcgctgagaaaggatctctatctacgaaggagcggaataaaacccttctctctgtgattaagagaatggcttcagatcggaaacttcacacttttgaggaggtggcaaagcacaaccagaccaaggattgctggctcatcatttctggcaaggtgtatgatgtcacccctttcatggaggatcatcccggaggtgatgaggttntgttatctgcaacagggaaagatgcaaccaatgactntgaagatgtggngcacagtgattctgctagagatatgatggaaaaatactacattggtgaagatgatgcatcaaccgttcccactaaacggacct

SEQ ID NO: 4373 - DNA, 410 bp, Glycine max
  Clone ID: LIB3073-015-Q1-K1-H3
gccgctgagctccctttctcctcggtccacagagacaaaatgtaagacaggtgccaacaggtcatcacgaaagaaaggactagctgagccgagatcactaactaaaacgaatttaatactaatcgaaaatactaatagaatacaaatagaactgtcttttcatatagatatcccttcaacacaacataggtcatcgaaaggatctcgaagacccaccaacgcacgaaagccgggatctttcagaaaatggattcctattcgaagggtgcataaccgcatggataagctcacactaacccgtcaatttgggatccaattcggttccttaggaggtatcgggaaggaattttggaatgtaataatatcgattcatacagatacagaagaaagggttctctattgattcaaac

SEQ ID NO: 4374 - DNA, 393 bp, Glycine max
  Clone ID: LIB3073-015-Q1-K1-F7
gacaccacagaacaaaaacaaagaagaaaaaaggcttagccaacacaaccatcatggccacctctgctattcagcaatcagcattcactggtcaaactgctctgaagcagctcaatgagttcgtccgcaagaccggtggcgccggcaaaggtcgcactaacatgcgccgcaccgtcaagagtgctcctcagagcatttggtatggccctgaccgtcccaagtacttgggtccattctcggagcagattccatcatacctgaccggagaattccctggtgactacggatgggacactgctggattatcagctgacccggaaaccttcgtcaggaaccgggagctggacgtgattcacagcagatgggcaatgcttggtgcccttggctgcacct

SEQ ID NO: 4375 - DNA, 385 bp, Glycine max
  Clone ID: LIB3073-015-Q1-K1-F8
ggttctagtgtgtgattgtttgttgttgtaaggcgttcttcttcttttgatgatctgtgtttgtgtttgttttttctctcacctgaaaatgtcttgctgcggtggtaactgtggttgcggaagctcctgcacgtgcggtaacggctgcggaggctgcaagatgtacccagacttgagctacactgagtcaaccaccaccgagaccttggtcatgggagtggcacctgttaaggctcaatttgagggtgctgaaatgggtgtgcccgctgagaacgatggctgcaaatgtggaccaaactgctcctgcaacccctgcacttgcaagtgaggtgttgggagagcaagcttcaagcagagatagcccttaattaggaataatgttaac

SEQ ID NO: 4376 - DNA, 401 bp, Glycine max
  Clone ID: LIB3073-015-Q1-K1-F9
ggaagtcgtcgtttatctctcctcgttcgcaggttcaccctttccctgtctctcagaaagatgaaggtggtcgctgcgtatctgctcgccgtcctcggtggcaacaacaccccttccgccgatgacatcaaggaaatcctcggctccgttggaatagaggcagatgaagataggattgaatcgttcttgtctgaagttaagggtaaggatatagttgagctaattgctgccggtaaggaaaagctggcctcggtgccttctggtggcggtggtgccgttgccgtcgccgctgctcctggtggaagtggcggtggtgctgctccggctgctgaggtaaagaaagaggaaaaggtggaggagaaagaggaatctgatgatgatatgggtttcagtctcttcga

SEQ ID NO: 4377 - DNA, 407 bp, Glycine max
  Clone ID: LIB3073-015-Q1-K1-G10
agaagggggagcgaagaagatattagggtttttgagtgcggtgcggcgatcctagcactctcttctgcagctttcgccgacagcttcattcaccatggctgagcaaaccgagaaggcttttttgaaacaaccaaaagtgtttctcagctcgaagaaaactgggaagggaaagagacccggaaagggtgggaaccgcttttggaaatccattgggcttggatttaagactcccagggaagccatcgaaggaacctacattgacaagaagtgccccttcactggcaatgtttccatccgtggccgtatcttggctggaacatgtcacagtgctaagatgaacaggactattattgttaggaggaattatctccattttatcaagaagtaccagaggtacgagaaaaggc

SEQ ID NO: 4378 - DNA, 408 bp, Glycine max
  Clone ID: LIB3073-015-Q1-K1-G2
cccacgcggacgcacgcgtcgcgacacgactacagacgggcgtcatgcgactactacttggccagctagaaacagttaaggtgtatgtactcaaccgtgacgcactagcgatatgggaaaatcactctcgacataaccaatattgcgtccatggaccaggcgcttcaagatgacagaagatctactattgaagactttgatagctgccatataactgcgactcatttagatttcctgtcctaatgtacctaccaagcaagagctgcatgcattgtcgtatgagaaaaagctagtctttgactcaaggagactctgctctcagcacgaaaggaaagggaaagggcaattaccacgttgtaaacgaactcagcgctcatacgcatgcatacaaccctatatactacacct

SEQ ID NO: 4379 - DNA, 404 bp, Glycine max
  Clone ID: LIB3073-015-Q1-K1-G5
gatactctgtatcattccatttcgaggatcatgcatagttactgaagaaaatggcaaccatctccgctgctatcacaaccgcatcgatcacccgcgcatgtctagtgcaaaaacgttctcttgggttctcatctcccgttcttggattgccagcaatgggtaaggtgggaagagtgagttgctccatggaggaaaagccttcttctgtgaaggaaagcagctcaagcatgttggggatgggggcatctttgatggcagcggccagcgccgcagctatgtcaggcccagccatggccttggtggatgagagacttagcactgaaggaaccgggctacccttcggcctcagcaacaaccttctcggatggatcctgttcggcgtcttcggactcatctgggctctc

SEQ ID NO: 4380 - DNA, 398 bp, Glycine max
  Clone ID: LIB3073-015-Q1-K1-G6
gatagaagaagcagaaagaggggcattagcaaaagcaagaagcactagtctaagcagaaatggcctcttcagtgatggcatctgtggccctcaaacctgcccctttcactgttgagaagtcctcagttagaggccttccctccctctcaaggaactcctcttcattcagagttgtggccagtggtggcaagaagatcaagactgacaagccttatggaattaatggtggcatggctttgagggaaggagttgatgcatctggcaggaaaggaaagggaaagggcgtttaccagtttgtagacaaatacggtgctaatgtcgatggttacagtcctatctacgacaccaaggactggtctccaaccggtgatgtctacgctggcggtacgactggcttg

SEQ ID NO: 4381 - DNA, 417 bp, Glycine max
  Clone ID: LIB3073-015-Q1-K1-G8
ggagggtgaccagtgaacacaatacagggcagcagggccatgggattgagtattctgagaagcacttccatttccactcctatctcttcctccaaatccaaacccattttctcaactcttgttcgttcatctttcgcctccatttcccccacaaagtgtgttactcccaccactcttttcgtttctgccacccccttcttcaccgcctcacccaagcgcggctttcgtggtgggattgtggccatggccgccgctggctcgctccgcaatcagaggaagagtggcgcgcagttctctcccctgaacagtttcgtattctcaggcaaaagggcaccgagttccctggaacaggagagtatgacaagttctttgatgagggagtctacaactgtgctggttgtgggacacctctctaca

SEQ ID NO: 4382 - DNA, 394 bp, Glycine max
  Clone ID: LIB3073-015-Q1-K1-G9
agaatatgaaaaagaaaaaaaagattctaaagaggtatagctaatattctttagaataatcaaaaagaatattaaattcaaataaattttagatagaaaaaagacttaaaaaggaggatttgaaatgcgagatctaaaaacatatctttccgtggcaccagtagtaagtactctatgggtcggggctttggcgggtctcttgatagagatcaatcgtttttttccagatgcattgatattccctttgttttcattctagctattgacacggaaaggggtgaagaagattatagatccaattaagtattaaatatatgtaattaatatgtaattaatctcctcttctttatttcgtctttcatttcttctttttttacaattgtaatagaatatg

SEQ ID NO: 4383 - DNA, 416 bp, Glycine max
  Clone ID: LIB3073-015-Q1-K1-H1
gacaaattaaaaccatagactatacaaagttcaaaaaaaataaaaattaacatgtctactactacacatgtctctcttctgtccctttacctcatcctatctctaaattcccttcacatgaccatggctgcaaggatcattccccaaagtgcttctagcacagttacaaggcctcaatttctatcagaagctgaaacttatttgaagccacatcttggtcacgaacaaaatgtcttccaagggagacacgtcaagaattgcttgccaaacgggtataggcataactcagctccaagcagattcgcgaactatgacacgctatgctctaatggctgatccggaatgcgttcggagaagccatgaggatgatcatgttcatgtcttcctgaatgaaaaaaaattccttactacaaaaa

SEQ ID NO: 4384 - DNA, 409 bp, Glycine max
  Clone ID: LIB3073-015-Q1-K1-H11
ggagagagcgagcgagcgagcagtttcaaagagaggatttgggattgggaaggcgagggattgcgctgcgtctcttcctcttctctttcgattcatccctcattcataatcttccaatccaacaacctcagcctcacactcacacatacacacatctgaacgcgtatcgtccctcccatggcttcaaagcgcatcctcaaggagctcaaggacttgcagaaagacccaccaacttcttgcagcgctggtccagtagctgaggacatgttccattggcaagcaacgattatgggtcctgctgatagtccttatgctggaggtgtattcctagtcactattcactttcctccggattatcctttcaaacctcccaaggttgcctttaggactaaggtgtttcatccgaaca

SEQ ID NO: 4385 - DNA, 429 bp, Glycine max
  Clone ID: LIB3073-015-Q1-K1-H12
accacagaaggttatcagctgtcccactctctttagcaatgggcgaattggcgattgattagggcaacgttagtggcacatacggctgcttacaacaactgagctcctcataaatatccatcattcatatatgttaacaatatcaacacatcgtcaacctgcacacttctagagcattagcgcgactatgaagaggcgcagcatcgatccaataaccatgatatctcaaaccgtcatctaagaaaacccataggactggccaaaacacgtaaagtacttttgcccattttgacctgaacccccatactatttcactgggcaattcccaggtgactatggttctgacactgctgagctttctgctgacccacagacttttgccaaaaaccgtgaactgtaagtcatccactccagataggccatgtttgg

SEQ ID NO: 4386 - DNA, 409 bp, Glycine max; identical to SEQ ID NO: 3822
  Clone ID: LIB3073-015-Q1-K1-F6

SEQ ID NO: 4387 - DNA, 397 bp, Glycine max
  Clone ID: LIB3073-015-Q1-K1-D9
tggggcatagataacaccgtacggtctaaggtcccatactatggaaaacatggatatggggtggaggaatttaatgaaaccttatatgatgaatgggttaacaagggcgacgcaccggcattgccagagactcttaaaaattacaacaagctgttgtctcttggcttcaagattgtattcttgtcaggaagatatcttgacaaaatggccgtaacagaagcaaacctaaagaaggctggcttccacacatgggagcagttaattctcaaggatccacatcttatcactccaaatgcactttcatacaaatcagcaatgagagagaatctgttgaggcagggatacagaattgttggaatcattggagaccaatggagcgatctgcttggagaccaca

SEQ ID NO: 4388 - DNA, 413 bp, Glycine max
  Clone ID: LIB3073-015-Q1-K1-E10
ggaaggcatttcattagcagcgttaaagaagagagaagaggaatgcgaaagttcgatccatggcccgttttcttcaagcgcgagtggaaacgcaactggcccttcctcgttggattcgcagtcaccggagctctaatcaccaaactttcccttggccttaccgaggaagatgctaagaattccaaattcgttaaggcgcacaaaaggtgatttctgaatcgtgacatctgcctggctttgcactttatgttaggtttgtcaagattactttgcttgtcttgattttatggattgtaataacagaagagagatgctctagatagtctctttaagtctgtatcccatgttcttattttcagttttggttgtttacctaaatctggttgaaaaaaaaccacaatagttaataattt

SEQ ID NO: 4389 - DNA, 407 bp, Glycine max
  Clone ID: LIB3073-015-Q1-K1-E11
ggaattcaataatgctctcttcttactaaaatgtctttcttctaaaatttctcacttctctgaaactctgattcatataatgattatcatttgaaactctcaacagctagtatgttctacactcgcctcttaggaggatcttgtgtatcagaacgtcgaatattgatatcaattggtgtgttatctctttagtttatagatatcttgcatcaaagttatcataaactgcttaatgtcttgggtatggctcaacaacatatcggatatcctgagataatggatatctataatgcttcaaagagacaatccatacgcttggtataagttgctttcaaacgtttgccacgcgtaaggtagctttaatcaaacaacatagcatgtatacaccttaactttaagggtgtgtt

SEQ ID NO: 4390 - DNA, 410 bp, Glycine max
  Clone ID: LIB3073-015-Q1-K1-E12
gattgtgattcattagcacatttgcaaagtgttagttttctttttttctcatttgcactacaaattgcaatggcttccaacaaggttattgccaccatcatggtgctttctctccttgcctactcaacatcattcaccaatgcatgtggcacatgccacccaaaacctaccccttctcctcctcctccatcaggaaagtgccctaaggacacattgaagctaggggtgtgtgcagatattctaggtcttgttactgttgttgttggttcccctgtctccagcaagtgttgtgcattgcttgaaggtttggctgatttggaggctgcactttgcctttgcactgctattaaggccaatgttcttggaatcaacttgaatgtgcctatcacactcagtgtgctactcagtgc

SEQ ID NO: 4391 - DNA, 319 bp, Glycine max
  Clone ID: LIB3073-015-Q1-K1-E2
ggcacaagtgagtttgttgatcgagataactagaaacagtgtgatgaaaatgaaggtccttggtttcttcgttgctacaattttggtagcatggcattgccatgcgtacaatatgttccctttccgaatgaacactggctatggtgcccgtactccggaggtgaaatgcccaagttggaggcttgctgtggaagcacacaacatctttggctttgaaaccattcctgaaaagtgcgttaaaccaccaaaggattccatccatggcgaacattttagatcagactccaaaacagttaaccaacaagtttacttttatgcc

SEQ ID NO: 4392 - DNA, 300 bp, Glycine max
  Clone ID: LIB3073-015-Q1-K1-E3
ggcacacgcgagcataacctacacgtaaactaggaacatctctatgaaaacgcttgaacttgaaccataagcagctcacaagccactgaacagactgataacgatcttacaacatatgagctctccaaaggaacattgtctatcgtgaagctactccgcaagataaatccgccagattgaacctatattgggaaaaccacaacatttatggatttgacaccatatcatactaactcgttctatctccaaactactaccttcatgagaaacatcttctatcaaagtggactacaggtaacc

SEQ ID NO: 4393 - DNA, 373 bp, Glycine max
  Clone ID: LIB3073-015-Q1-K1-E5
gaagaagaaggagcatggccatgagcatggccatgacagcggcagcagcagtgacagtgattaaactgctgcatcacctatatatttaaaaggtttatgggaccatagtagcgagggctgtgccttaatttctctctgtctctctctgtgtctctctctctctctctctttgtcctttttacctatcttgtgatctatttatgagtgagaaagactggagtgagaaactgtgcgtgtatctgagggctaattccagtgctattagtctgtggcttggttggttcgtcaccctgctactcgggttatgcacgatcgtatattatcctagagacataaaaatcttaaatcatgagtacgtattggtattataaaa

SEQ ID NO: 4394 - DNA, 405 bp, Glycine max
  Clone ID: LIB3073-015-Q1-K1-E7
ggcacaagtgagtttgttgatcgagataactagaaacagtgtgatgaaaatgaaggtccttgttttcttcgttgctacaattttggtagcatggcaatgccatgcgtacgatatgttccctctccgaatgaacactggctatggtgcccgtactccggaggtgaaatgcgcaagttggaggcttgctgtggaagcacacaacatctttggcttcgagaccattcctgaagagtgcgttgaagcaacaaaggaatacatccatggcgaacaatatagatcagactccaaaacagttaaccagcaagcttacttttatgccagagacctcgaagtccatcccaaggacacatttgtgttcagtatagatggcaccgtactctctaatattccatactacaaaaaaca

SEQ ID NO: 4395 - DNA, 213 bp, Glycine max
  Clone ID: LIB3073-015-Q1-K1-E8
aagctttggaggttctgggctcaagaaaagtggaaagaaataagggctctttatcatgattgtatacatccaatattgagccctgtagtttattaccatgataacttctgtcttattgtggccttctttattgctctaatgttagtactgaactgaggtatttcgtgatgtaagctgcaacaagttacttgtttgtagctttattgtgtggct

SEQ ID NO: 4396 - DNA, 403 bp, Glycine max
  Clone ID: LIB3073-015-Q1-K1-E9
ggaacatggctacattctttggttcccctccggttttctgcctccccctcactagaactcaccacatttcttcatcatcacaaactccaccaccaactcctcctccacaatctcagcctccaacttcgtctccacagcagctaagaacaacaaatttgaatgatgaatcaatgcaagtgtgcactgaagctaagcaacagaagcccatcaaaccatccactaaggttgaatccacagattggatagccacttccttgaccagaaggtttgggataggagctggtcttgcatgggttggctttcttgcatttggtgtcatctcagaacaaatcaagactcgccttgaggtgtctcagcaagaggcaaatacaaggagcgttgagaaggtggaagaggtggtgct

SEQ ID NO: 4397 - DNA, 409 bp, Glycine max
  Clone ID: LIB3073-015-Q1-K1-F12
ggcacaagtgagtttgttgatcgagataactagaaacagtgtgatgaaaatgaaggtccttgttttcttcgttgctacaattttggtagtatggcaatgccatgcgtacgatatgttccctctccgaatgaacactggctatggtgcccgtactccggaggtgaaatgcgcaagttggaggcttgctgtggaagcacacaacatctttggctttgagaccattcctgaagagtgcgttgaagcaacaaaggaatacatccatggcgaacaatatagatcagactccaaaacagttaaccaacaagcttacttttatgccagagacctcgaagtccatcccaaggacacatttgtgttcagtatagatggcaccgtactctctaatattccatactacaaaaaacatgga

SEQ ID NO: 4398 - DNA, 416 bp, Glycine max
  Clone ID: LIB3073-015-Q1-K1-F3
gagggcgagccacgttctccatctctgccactgccatgactcactcgctagcttcttgtctgttctgaccaatggcatcaacaatatcagcaatggccatgatcaacgccaaatgcgtcaacccaaaggtccccaatcccaccaagctcgcaccatcaaaaccctaccttcagatcaaccttccaaagggcctcatagcctcacccgaaagcactaaactttcccccgcgacagcaatcgcaagagcaatattcacaaccctcggaacctgcgacgccgcattcgcgtggtcatacaaatagcccacatagcagaaggcgacaaccgcggactggcactgttgctgcccataatcccaacgatatggcgggatctgttcaacattctgcagccggcgctgaaccagctgaaccgaa

SEQ ID NO: 4399 - DNA, 395 bp, Glycine max
  Clone ID: LIB3073-015-Q1-K1-D7
gaaccacaacacaacacatcggaacacaattacacacacgaatgtccttagttaggcattgctttgcgatggaaaaaatggaactggcagagacacctctacctttgctttcactaaaccacgtttcttttgtatgtaagagtgtgagtgagtcattgaaattctatgaggatgttcttggatttttgctcgtcaagaggccatcttctttcaaatttgaaggggcctggttattcaattatggcattggcattcacctgttggagtcagaaaaggttccggtgaaaaaaagagagatcaacccacaagaaaatcatatatcgtttcaatgctcagacatgaaagttataatgcagaaactggatgcaatgaagattgagtatgtgacagcagtt

SEQ ID NO: 4400 - DNA, 390 bp, Glycine max
  Clone ID: LIB3073-015-Q1-K1-F4
gacacacacacatcctaatcacaaagcgttggcgcatggcggacatgattgtggcttgcaccaaacctctggttccagtctgcaccagttcccgttcccccacacccaaagtccccattctccaaatttcactccccaaagccccaaccttgaaactgaaactcccgatttcaaagccccagatgctgtccctccttggagggatagcaccactggtcttggccagaccctccctcgcagaagaaattgagaaagcagcactctttgacttcaacctcacccttgccataataatggtggagtttctgctgctgatggttgccttggacaagatatggttcaccccgcttgggaaattcatggacgagagggacgcggcgatcagggaga

SEQ ID NO: 4401 - DNA, 401 bp, Glycine max
  Clone ID: LIB3073-015-Q1-K1-C11
gaagaagaagaaggagcatggccatgagcatggccatgacagcagcagcagcagtgacagtgattaaactgctgcatcacctatatatttaaaaggtttatgggaccatagtagcgagggctgtgccttaatttctctctctctctctctctctctctctctctctctctctttttcctttttccctatcttgtgatctatttatgagtgagaaaagcaaaagtgagaaattgtgcgtgtatctggttgctaattcgagtgctattagtctgtgctttggttggtttgtaaccccgctacttgggttatgtttgattgtatattatcctagagaaataaaaattttaaattatcaacaaagtaaatcaacctctgcatactataaaagcggtcgctctaga

SEQ ID NO: 4402 - DNA, 411 bp, Glycine max
  Clone ID: LIB3073-015-Q1-K1-C12
gagaatagagagctcctccaattagggtttttgtgatctgcagctacgatgggtaagggaacagggagtttcggtaagaggaggaacaagacccacaccctctgtgtgaggtgtggccgccgcagcttccacctccagaagagtcgttgctctgcgtgcgcttaccccgctgcgcgcaccaggaaatataactggagcgtgaaggccattaggagaaagaccaccggaactggaaggatgaggtacttgcgtaacgtgcctcgcagattcaagagcggcttcagagagggtaccgaagctgcacccaggaagagaggagctgctgcctctgcctaagctttgaatgaatgacagcaatttttgctgggtcagtgaattataggagttaatgtttctgtgttggtgccaaac

SEQ ID NO: 4403 - DNA, 354 bp, Glycine max
  Clone ID: LIB3073-015-Q1-K1-C2
caccgttcctacaagtctacggacacggctataaagcgtctgccatactcaagtatccacgggtgattgggtagatttatcgactttcttacttcctttctagtagggcttccactacagtgaataatgtgacccacttctatgctatacaaattgttcatatgacccctattacacactgtgaacccgagatcaaggtcatatttgtaactgatccacttattggccttgtcctaagctactacctggccatcgagtcaatagccggatctgcttaatgctcatcctagagccccaaaaggtgtcttagggctgtgatgaaagacaggggcaccatgttctgcaggattcgct

SEQ ID NO: 4404 - DNA, 413 bp, Glycine max
  Clone ID: LIB3073-015-Q1-K1-C3
ggaagcatcagcaacaaacaaactaattaagcagcacacacgtcaatttatcagcatggcctccgttcagtgccacaaaacctgcaaagtgagctgccaacaggaaaaccagcacgcctcgtttgggcagaaagtttctgacttgttcaaagggcatcaacataatgaccacagctccaattatgccacccaaaccaaagtgctttcccagtcagggtcagggttaggccccttcaccaccaaaactcaaacacaatgcggttgcccccaaacacatctcagtaccactcatggctccaacacaaaaggccatggccatggccaagggagaattaagagggagcacaagagagggatgctgcagaacatcaaggatcgcttatcaggtgacaccagcagcgacagcgagagcg

SEQ ID NO: 4405 - DNA, 405 bp, Glycine max
  Clone ID: LIB3073-015-Q1-K1-C6
gacaacacatcctaaataagcatcataaattcggagtctttcggtccttccttccttcctctgctctagtgtatgccactctggttaattatcatacccccttctaggcatagttcttctccctctgttctctattctacactgtgaaacccagatgaaggtagcatttgtagctgttctacttatttgccttgtcctaagctcctccttgttcgaggtgtcaatggccggttctgctttctgctcctccaagtgcgcgaagaggtgttctagggctgggatgaaggacaggtgcacgaggttctgcgggatttgctgcagcaagtgtaggtgtgtgccatctgggacttatgggaacaagcacgagtgcccttgctacagagacatgaagaactccaagggcaa

SEQ ID NO: 4406 - DNA, 228 bp, Glycine max
  Clone ID: LIB3073-015-Q1-K1-C7
gtcaccaaagagtatataaacatcactaactggggacattacgatgcttacttagttcctttgctatacagtatttaaatctttttaaacatgatactgccttgtatgcataattttgctatctataatcaacattctatactgcgataccaatattaacgagatattcacatcttatctacttattattctagtccaaaacttctataggtcataaacgacaatgga

SEQ ID NO: 4407 - DNA, 401 bp, Glycine max
  Clone ID: LIB3073-015-Q1-K1-C8
ggaaaagcaacactataggcgaaggactttagggtgggatttgggaattagggttgttcgcgtggcgaagatgattgaggtggttttgaacgatcgattggggaagaaggtgcgcgtgaagtgcaacaacgatgataccatcggcgacctgaagaagcttgtggcgactcagactggcacaagagccgacaagatccgcatccagaagtggtacaccatctacaaggatcacatcactctcaaggattacgagatccatgacggcatgggtctcgaactctactacaactaaacacaacaaggtgtgttttatgcgtaatatactatgtgctgggaatgggataagcgctaaatgtaattctgacttgcgaaagttcccatgatttgaaataatgtacatc

SEQ ID NO: 4408 - DNA, 407 bp, Glycine max
  Clone ID: LIB3073-015-Q1-K1-C9
ggaggccacaagtacctaacacccagctaagcggttggaacttagagttaagcagttaccttcctccaactataatatctcaaccaatcaaaatcctttttctcaattctctctctctctctctctctgactctctccacaatatgtgttgattttttcctaaataagtgaaagtgtagttacacctttttttagtgttttaccacttttgtgtgccagagttttctgagtttcataggagaaaaaaatgacagaagaacaaaccaaaacggctgagtcagaatcagtgacaccatcacctgctgctgctccttcacaggctccttcagctgctgaggctgaacatgttcctgaggctccaaaggatgtggctgaggagaaatctgtaattccagtgccttcttctg

SEQ ID NO: 4409 - DNA, 403 bp, Glycine max
  Clone ID: LIB3073-015-Q1-K1-D10
ggaggtagcgaggtacgtagctcaaaaaggtggtccccaggccaaggtagctaagtggcatcatcatttgtgggcactttattacccaacaagttcacacacaacaaacacttatcatctgttactgcaagtagaggtgctccaacaaggagaagagtacacttagcaacaacaagagcagagagcatgactactgtcatagaaaaacttggcatcaacattgagaggaacccttctgagtccaagctcactcaactgggtgttaggcaatggcccaaatggggttgcccttcaagcaagttcccatggacctatgaagccaaagagacttgctatcttctggaaagaaaagtgaaagtctttcctactgggtcaaatgaatcaattgagattgctgatggtg

SEQ ID NO: 4410 - DNA, 395 bp, Glycine max
  Clone ID: LIB3073-015-Q1-K1-D11
gattcagattacattgcaaaaatggcgtcattcaccatgacagcttccatccttggcggcccagccgtcaccaaccggttggcagtagcaacgcagaggagatcactcgtagtgaatgctgccaaagctgttgaagcggaaaaggtcagttatgacaatgacatggatggtagcaatggaaggaggaacttgatgttcgccgcggcggcggcggctgctgtttgctctgttgctgggatggcagtggcagatgagccaaaaccaggaaccccagcagccaagaaaaagtatgctccgatttgtgtcaccatgccaactgctaggatttgtcgcaattgagggactcggtttttattttacttctgatgatcggaaatgtgcattagggttgtagt

SEQ ID NO: 4411 - DNA, 410 bp, Glycine max
  Clone ID: LIB3073-015-Q1-K1-D12
gaagataaagaaaagagaaatggcaacagaaacaaaagtggcagtattaggtggcatcaccgaagtgcagggagctgccaacagcgtcgagatcaacaatctcgctcgctttgctgtagaggaacaaaacaaaagagagaattcagttctggagtttgtgagggtgattagtgcacagcagcaagtggtttctggagtgaattactacataacattggaagcaaaagatggtgagattaaaaatgagtataaagcgaaggtttgggagagggaatcccaagagttgctagaattcatgccaacattaggtgcaggaggcgagatcgaccatctcgctcgctttgctgtagaggaacaaaacaaaagagagaatgcaaatctggagtttgtgggggtgattagggcaaagc

SEQ ID NO: 4412 - DNA, 409 bp, Glycine max
  Clone ID: LIB3073-015-Q1-K1-D3
gataagaaagaagatcaaaggaaaaaagagaaacgaatggcagcactgggtggctttaccgacatcaccggagcacagaacagcatcgatatcgaaaatctcgctcgctttgctgttgatgaacacaacataaatgagaatgcagttctggagtttgtgaaggtgattagtgcaaagaaacaagtgggttctggcaccttgaactatatcactttggaggcaaatgatggtgtgacgaaaaaggtttatgaaactaaagtgttggagaaaccacggttgaacatcaaggaagttcaggaattcaagcccatcactgatactgttaatcctctatcggtgacggtctaacacatagctaggatatggaagtgactagctcggccggaagagtaataatatgtatgaactg

SEQ ID NO: 4413 - DNA, 138 bp, Glycine max
  Clone ID: LIB3073-015-Q1-K1-D5
gtttttaatctttatctttggtattacaactgggttgtctaagtaactgctaggtcttttctggattgtattgcgattactataataatagttttaagaactcagtcattttgtttccgttgaatgaaattgattgcc

SEQ ID NO: 4414 - DNA, 397 bp, Glycine max
  Clone ID: LIB3073-015-Q1-K1-D6
ggcacaagtgagtttgttgatcgagataactaggaacagtgtgatgaaaatgaaggtccttgttttcttcgttgctacaattttggtagcatggcaatgccatgcgtacgatatgttccctctccgaatgaacactggctatggtgcccgtactccggaggtgaaatgcgcaagttggaggcttgctgtggaagcacacaacatctttggctttgagaccattcctgaagagtgcgttgaagcaacaaaggaatacatccatggcgaacaatatagatcagactccaaaacagttaaccaacaagcttacttttatgccagagacctcgaagtccatcccaaggacacatttgtgttcagtatagatggcaccgtactctctaatattccatactac

SEQ ID NO: 4415 - DNA, 438 bp, Glycine max
  Clone ID: LIB3073-015-Q1-K1-C10
aagacgacagaagggggatacaggaacagcagagaaacaaagttagaagtaaagaagatcatggctggtctagcaaccttggctgctgttcaaccagctacgatcaatggccttgctggaagttccctctctggaactaagctctctttcaagccctctcgccacagtgtcaaatccaagaacttcaggagtggtgccgtggtagcaaagtatggtgacaagagtgtgtactttgatttggaggatctgggcaacactacagggcagtgggacttgtatggctcagatgcaccttcaccctacaaccctcttcagagcaagttcttcgagacatttgctgctccattcacaaagaggggattgttactcaagcttctgatattgggaggtggttccacccttgcatacttcagtgcaactgcctcaggtgacattcta

SEQ ID NO: 4416 - DNA, 396 bp, Glycine max
  Clone ID: LIB3073-015-Q1-K1-A5
ctgctggcataatttatgtttagatagatagagcaagattgatcaaaagggttgcaaaggtcaaagaggagcaggcaaagattgacgaggctgctgatttgatgcatgaagttgctgtcgaaacatttggctccatggcaaagacggagaaaattgctttcattcttgagcaggtccggctatgcctagatcgtcatgattatgtccgagcacaaattttatcaaggaaaatcaggactagagtatttgacgcagatccatcaaaggaaaaaaagaaaccaaaggagggtgacaacattgttcaggatgctcctgcagatattccttacctcctagaattgaagcgtatctactatgaactgatgattcgatattacttgcacaacaatgattacc

SEQ ID NO: 4417 - DNA, 388 bp, Glycine max
  Clone ID: LIB3073-015-Q1-K1-A6
taatggggcgcgcatgagtgagcagatcgagggcacttgggacagagtaacggggatggagggacttggttgctgatttgctacaagaaggggatgacgacacatccatctgtacgatatataccctctacaaagcaacaatggttgtcatgcccgtatttgcctagagcgacgcgcttatgtcacgatacatgtttaatcacacaacatctgtactttagtaaccgttgctgatcaatgcgttgaagcaacgaatccatacgtgcatgacaaccttgatcaagatgactctacagctattaattaactacttgacttgaatcgcatatactatgaactgaatactaaggactaattgcacaacagtgtatacctgaaagtatgttgt

SEQ ID NO: 4418 - DNA, 379 bp, Glycine max
  unsure at all n locations
  Clone ID: LIB3073-015-Q1-K1-A7
gggttgccgcacctgatcgtgagcggagaccagaggcactggggtgagttcatcacacccggaatactattcctgtacatctcgggatggatcggctgggtgggtcggagctacctgattgcgatcagggacgagaagaaacccaccatgaaggagatcatcatcgatgttcctctggcttctcgcttgctcttcaggggtttcagctggcccgttgctgcctacagagaactcatcaacggcgacctcattgccaaggatgtctagataagagagggtggatggctacattggaggaaagcctggagaatttgtatgtggatgggatctttacgcgctctttttgtaattactttntttataaaatgtacatgatatg

SEQ ID NO: 4419 - DNA, 377 bp, Glycine max
  Clone ID: LIB3073-015-Q1-K1-A8
gacaacaacagtaacaatggctgcctcactacaagctgcagctaccttcatgcaacccaccaaggtcggcatagcctctcgcaacctcaaatctacacaatgcatttctaaggcttttggctaggaacctgctgcagctaaactcacttgctcccttcagcctgatctcaaagaatttgctcaaaaatgtgtcgacgctaccaaaattgcaggattcgcccttgccacctctgctctcgttgcttctggagcaagtgcagaaggtgttccaaaagggctaaccttcgacgaaatccagagcaagacatacttggaagtgaagggaactggaactgctaaccagtgcccaaccattgaaagtggagtggactcattcg

SEQ ID NO: 4420 - DNA, 431 bp, Glycine max
  unsure at all n locations
  Clone ID: LIB3073-015-Q1-K1-A9
aagacgacagaagggcagtggaggtaatggtactgcttctgatatgaaaattgatgaagaaacaccactaatttcatcatcaaggttatctcatattggacgaacacagttaaccaaccaatatgcaacaggaaagtgaaaaactaaatactagattatttttagagtactcttttggagaaagaactaggaaggggaagctgagtctaatgcacccctattcctcattctttctaggcaatagattttataatgaaatcatatgcttgttctttgtaattacttgcttgtgtagaatgcatcatttctgagttattaccactctgaaacatggtttttgacaatagatgaggggacaaattggccccttgtataatctggtctcctggttgggaggcccagttatttaattntttcttaagttactgaat

SEQ ID NO: 4421 - DNA, 413 bp, Glycine max
  unsure at all n locations
  Clone ID: LIB3073-015-Q1-K1-B1
gaggaacccaaaaactaccatagccactactgagtcagaaactcttaggcatagcgaaaatgacaaccaccttcgcgaccgtcgcaggactcggtggtgcatcactgtcatccacctcatctcgactcacctcagggtttgtgaaatcgccagtgagtgctaggaatcccttgaggaaagctgtggcaatgggaaatgggagggttacatgcttcgagaggaattggctgcgggcagattacagtgtcattgggtttggattgattggttggctagcaccctcaagcgtaccggctatcaacggtcaaagtctgactggcctcttctttgagagcattggagctgagctagctcacttncccacccctactgcccttacttcatccttttggttatggctggttacgttgcac

SEQ ID NO: 4422 - DNA, 414 bp, Glycine max
  Clone ID: LIB3073-015-Q1-K1-B10
ggagcagaatcttcaggccaagccaggtaagcacaaccaaagcaacaccccaaatggcttcagcttctgttcccatggcgttgtcactgagctctgttaccaacaacaacaagccttcatccgaagccttcttcaggccactacccctacgccaaccaaagaggaccctcttcaccacgaaggcagtgtcaaactccaagcctcaaatcaatgcatctttgaaggagaaggcagttgccggactcacagcagcttctgtgacagcatctatggtggttccggaggtggctcatgctgctgggtatgagttctccccttccctaaagaactttctactcagcatctttgctggtggggttgttctagcagccatatttggagccgttattggggtttccaactttgatccggtta

SEQ ID NO: 4423 - DNA, 158 bp, Glycine max
  Clone ID: LIB3073-015-Q1-K1-B11
tcaaacgaagaaaggcttatggtggatacctaggcacccagagacgaggaagggcgtagtaagcgacgaaatgcttcggggagttgaaaataagcgtagatccggggattcccgatataggtcaacctttcgaactgctgctgaatccacgggcaggc

SEQ ID NO: 4424 - DNA, 393 bp, Glycine max
  Clone ID: LIB3073-015-Q1-K1-B12
gccttaatggtgcatgaaaaataaagcagatcgcaaagccagagaagaataaaaagcctttctcccggggccagtccagttcattgtagagagcagacaccaacaccaaaccctaaaattattttgcccctctgcttctctctctgtctttctcagaagacaactcaaaaaaaccatggacgtgggtcagatgcagagacagtggatcgactacaccaaatccctcttccttgagggcttcctggatggtcagtttctgcaacttcagcagcttcaagatgagaacaaccctgactttgtggtcgaagttgtctctctcttctttgaagattctgaaaggcttctcaaagatctcacctttgccctaaatcagaatggtgttgacttcaaaaa

SEQ ID NO: 4425 - DNA, 412 bp, Glycine max
  Clone ID: LIB3073-015-Q1-K1-B2
gggatttccaaagtttttaatagagggtaagtctcaaaaaatcgaagaattacagacgaatatgcaaaaaaaaactgaattgtgtgaatcgaaaactaaacattgctattgtaaaagttgcaaatgcttataaacaccctaatattattgcagaatttatagctggacaattaaagaatagagtttcgtttcgtaaagcaatgaaaaaagctattgaattaactgaacatgcgggtacaaaaggagttcaagtacaaattgcaggacgtatcgacggaaaagaaattgcacgtgttgaatggatcagagaaggtagagttcctctacaaaccattcgagcgaaaatcgattattgatgctataccgttcgaactatttatggggttttagggatcaaagtttggatattttc

SEQ ID NO: 4426 - DNA, 286 bp, Glycine max
  Clone ID: LIB3073-015-Q1-K1-B3
aggaaaaggagtcagtgactatgcctgacttggatggatatttggagagagagatacagagagattatcaatggatcgccgatcagtgtgcgactaggaacagtactttataccgagagtgcttcagaaatcatgcagaccgcctatgaagctgcgccacggaccgatgcttcgactacactgaggacggcgccttgggactacaatgcatccgatgcgggtgccaccaggtcttccaccggaaagtgaagtacctggcggccgctgaaaaccctgccacggagta

SEQ ID NO: 4427 - DNA, 409 bp, Glycine max
  unsure at all n locations
  Clone ID: LIB3073-015-Q1-K1-B7
ggtgtttgttgttgtaactcgttcttcttcttgggttgttctgtgtttgtgtttgttttttctctcacctgaaaatgtcttgctgcggtggtaactgtggttgcggaagctcctgcaagtgcggcaacggctgcggaggctgcaagatgtacccagacttgagctacactgagtcaaccaccaccgagaccttggtcatgggagtggcacctgttaaggctcaatttgagggtgctgaaatgggtgtgcccgctgagaacgatggctgcaaatgtggaccaaactgctcctgcaacccctgcacttgcaagtgaggtgttgggagagcaagcttcaagcagagatagcccttaattaagaataatgantaactattaatgtgtagctaaaaacttatgtattatgtctg

SEQ ID NO: 4428 - DNA, 393 bp, Glycine max
  Clone ID: LIB3073-015-Q1-K1-B9
ggaatctgaagtaagagggttgtcgacgggtcgagatcgagcctcggaagagggaatcgcagcgaagtccactatgccgaagcaaattcatgagattaaagacttcctccttactgcaaggaggaaggatgcacgctctgtgaaaatcaagcggagcaaggatgtagtgaagttcaaggtccgttgctccaagtacctgtacactctgtgtgtgtttgattctgagaaggctgataagttgaagcaatcacttcctccaggtttaagcgtgcaggatgtgtgattcttactgctgttgatgaagatcaagttttgctttggattttggggattcatatttagtgaaatggttcacagatttttcttatctgttgttattttttgggatcatat

SEQ ID NO: 4429 - DNA, 422 bp, Glycine max
  Clone ID: LIB3073-015-Q1-K1-C1
gacacttactagtagtaagcatggagtcctcaaagatctatgcttacgctcttcctctgcatgatctttctctcttccgccactcccattctcggttgtggctactgtggcaaaccccccaaaaagcacaagcctggtaaaacaccaaagacacccaaaacacccgttgttaagccaccagtcaccatccctcccattaatgttcctcccgatgatctttcaccaatagtgaagcccccaggtattctccctccaattccaattattaacccaccaaccacaccagggaagggagggaacactccatgcccaccaccaaagtctcctgcgcaggctacgtgccccattgacacgctcaaacttggtgcctgtgtggatcttcttggagggttggttcacattggtttgggtgaccctgttgc

SEQ ID NO: 4430 - DNA, 305 bp, Glycine max
  Clone ID: LIB3073-015-Q1-K1-A4
ctgggaccactgcgataacaatgaatggcttagtacaagttgcatgctacattatgcgtagcatcgcagtgccattcgtacgatatagcctcatatctacacgatcaatgtctaaggctcccggattgcaacctgctgatgctcaactcacttgctcgcttcagactgacatcacagaatttgctcaagagatgattgacgcatacaaaattgcaggattcgaccttgacatctatgctcatcaatgtatatgaagcatgtgcacaaggtgccccaaaagggataaccttgcacgaaatccagag

SEQ ID NO: 4431 - DNA, 293 bp, Glycine max
  Clone ID: LIB3073-014-Q1-K1-F12
gatagcagcatcatacaaagcattgaatggggggacttaagttcattccttgtgttttgctttcttcctcaaaaccaaacatgtcgaacacatgcggcaactgcgactgcgctgacaagactagctgcaccaaaggaaacagctatggtgttattgtagagactgagaagagttacatcgagactgttgtcatggatgttccagcagctgagcatgatgggaagtgcaagtgtggcactaactgcacttgcacggactgcacctgtggccattaaggaatatgtatgaaaatg

SEQ ID NO: 4432 - DNA, 273 bp, Glycine max
  unsure at all n locations
  Clone ID: LIB3073-014-Q1-K1-F2
ctttccatagtctttcatacatggtggatcttctctaaaaaatgggatcttgtttgcatcaaaacttccactcctgttgcaataaactaaccatctccatttccagaaactgtacaaatatacgctacctattgtcaccggactgagcttatttaccattcattttgttttctatcattggtaactctctcattggaaaggtactgatccaaacctatagtgctctttagccatgcatattagctcatncgtaatttgcatgctaaatcatta

SEQ ID NO: 4433 - DNA, 53 bp, Glycine max
  Clone ID: LIB3073-014-Q1-K1-F4
ggtgcacaagtgagtttgttgatccagataacgggggacaatgtggtgaaaat

SEQ ID NO: 4434 - DNA, 379 bp, Glycine max
  unsure at all n locations
  Clone ID: LIB3073-014-Q1-K1-F7
ggcagcatccattcttgttctcttctttcttgggatcagggtttcccctcgtctccgggctcgtttcgttctcgaataatcgatctacgataatgactcgcggtagccagagggatcgtgatcgcgaaagggctcangctagaactggcgctaaaggcaagcagaaagatgatggattgacccctgaacagcgcagggaaagagatgcaaaagcgctgcaggagaaggccgcaaagaaagcggcacagggtgcaggaggggataatgcagctggaagcaaaaataggcaataattcaatgagtaagttgagtttgccgtttgttgatggtggacatggaaaattggggaaatttatgttgcattattcatggaggatga

SEQ ID NO: 4435 - DNA, 327 bp, Glycine max
  Clone ID: LIB3073-014-Q1-K1-F9
gacaagcaacattgctagccattctctgcactggtcagttacaaagcatttcattgttttacaatatacaacactacaatggctgcttcaacaatggctctctcttcatcatcattggctggccaagctatcaagcttgccccctccacccctcagcttggtgttggaagggttagcatgagaaaaacagcctccaagactgttacctcatgaagcccatggtacggcccagatcgtgtcaagtacttgggcccattctctggtgagcccccatcctacctcactggtgaattcccaggtgactatggttgggacactgctgggctt

SEQ ID NO: 4436 - DNA, 181 bp, Glycine max
  unsure at all n locations
  Clone ID: LIB3073-014-Q1-K1-G1
ggttgctacccatcatagaagatcgcgatctggtnagacatgtctggggaagaggaagaaaacccctcatatctcaaaattggagacgagtttttgaaggcaaagtgcttaatgaactttgaatgggcattgattctttttctcaagtatgagcagcttcaacagacatccaattatccca

SEQ ID NO: 4437 - DNA, 174 bp, Glycine max
  Clone ID: LIB3073-014-Q1-K1-G10
tcccgctgctaaaaaacaacaaaaaggggcgggttggaaaaaaccaccgaagggtaccgctgccaaaaaacaacacaaaggtacggcttccaaaagaccacaaaaaggtactgctgggctaagaccacagaaaggtacagcttcgaaaaaaccacaaaaaggtaccgctgcgag

SEQ ID NO: 4438 - DNA, 99 bp, Glycine max
  Clone ID: LIB3073-014-Q1-K1-G11
gaaggtgcaagagttggtggtgagctataagctagtttatcgtgaggagaatatgaagctgcttgttttctttgttgctgcagtagttttggtaggatg

SEQ ID NO: 4439 - DNA, 160 bp, Glycine max
  Clone ID: LIB3073-014-Q1-K1-G12
aagaaggaagctgaaggcgtggaacaaaagaaggaagtggaagtgaccgaagataagaaggaaattgaagttacagaagagaagaaggaagctggagtcatacaagagaagaaagaagttgaagtgacggaagaaaaaaaagaaattggagttacagaag

SEQ ID NO: 4440 - DNA, 245 bp, Glycine max
  Clone ID: LIB3073-014-Q1-K1-G7
gctagatagagagtttcgttcgccaccatgacgtttaagcgcaggaatggaggtcgcaacaaacacggccgtggccacgtcaagttcattcgatgctccaactgcggcaaatgctgtcctaaggacaaggctatcaagaggtttctggtgaggaacattgttgaacaggcttgagtcagagatgttcaggaggcttgtgtctatgaacaatacacgcttgcgaagctttatgtgaagatgcagta

SEQ ID NO: 4441 - DNA, 148 bp, Glycine max
  Clone ID: LIB3073-014-Q1-K1-G8
ttcttgatcgagaatatcactccccaccagggcggttaatcgcaggaatggaggtcgcaacaaacacaaacgtgaccacgtaaagttcattctatgctcccacattcgacaatgctttcctaaagacaatgctatcaacaagtttctc

SEQ ID NO: 4442 - DNA, 90 bp, Glycine max
  Clone ID: LIB3073-014-Q1-K1-G9
aggacgacatattgatacgggtgagtgaccactgcactgtactgttcaggcacaacgacttattggtccggttcaccggagaaggcatgg

SEQ ID NO: 4443 - DNA, 345 bp, Glycine max
  Clone ID: LIB3073-014-Q1-K1-H10
ggtcaccaacacaaacaatagtgcatagggggtgtcattgtgcattattcaatggccaccacagcagctctatccggaaccatggtgagcacctccttcatgaggaagcaacctatgacgaccaagagcctaaagacattccccaacgctctttttggtctgaaaggtggacgaagtggtcgtgtaacttgcatggcctcgtacaaggtgaagctcataaccccagaaggagaagtggagtttgaatgcccagatgatgttctcattgttgacaaggctgaggaagaaggcattgaacttccctactcgtgcaaggctggttcttgcgtttcatgtgttgggaaa

SEQ ID NO: 4444 - DNA, 262 bp, Glycine max
  Clone ID: LIB3073-014-Q1-K1-F11
gaacacttgtattgtctcaagcaaccatgggggtggcaacccaagcctctctcttaaccccacccctctccggtctcaaagccagcgaccgcgcctccgtgccatggaagcaaaactccagcctctccttctccagcccgaagcccctcaagttctccagaacaatcaaagcagcagccgccgacgagaccacagaggcaccagcaaaagtagaggctgcatcggtcgggttcaccccaccagaacttgacccaaacacccc

SEQ ID NO: 4445 - DNA, 174 bp, Glycine max
  unsure at all n locations
  Clone ID: LIB3073-014-Q1-K1-H3
gaaccctccaattcagattggcttanttggcagcgttgatgcggcttatctctctctttcgttttgaaaaattaatttcggctctattttttcttctcctattttgttcagatgaactaaactccttaacacacctagataggaaattttaatgctgaagcagattattagtgt

SEQ ID NO: 4446 - DNA, 174 bp, Glycine max
  Clone ID: LIB3073-014-Q1-K1-H9
gacccaggtgcagaaagaaaagaccatcaaagtttcacttcagccttatccggtttaaggtttcggtttttgacccaacctttgacgtatcgaaaccttaagtttcggatcaggtctgagcaatctggttggtagaacctttggtcttagagagtcaagttttatgtctgaatt

SEQ ID NO: 4447 - DNA, 246 bp, Glycine max
  Clone ID: LIB3073-015-Q1-K1-A1
ctacacaccgccgcttgtgctgcagccatttctctaatgatccatgataagttccaacggattttttgggtacttaacaagggcatcgattggctacggaaaataccctttgccttaactgccattaaaggttcttatcatatatatactcatatcatgattattaaatccttcattaaccatataaagaagcccactgtactcaatattgatcatgtgcaacttttgataaacattattcagatt

SEQ ID NO: 4448 - DNA, 409 bp, Glycine max
  Clone ID: LIB3073-015-Q1-K1-A10
ggcagcgagacctaggaagcacgacaacaacactcatcagagggaaaagttgggcccactgcgatgaaaatgcaaagatgatggatgatcaagatctcagtttctgtggcaatgttcttggctgcttcatatatgtactagtgatcgctgatcattgtgtcatgggtgacccatagttcggaggaaactactaatgctttgaaggctaagatgtcacactgcgttgtagactttgaaatgataactgtagcttactaagacttccataaagattacaatgagcgtaacactatcaatatcagatatacttatgcgtgctcaattaagttacttttatgtcttaaagcttgaatgccattcaactgacgcatatgcgtggagtatctatggcaacgtactctctaatatt

SEQ ID NO: 4449 - DNA, 400 bp, Glycine max
  Clone ID: LIB3073-015-Q1-K1-A2
cgggctagcagaagaacacgtaggggaaaactaagaatgataagccaatggaccactcattgatctcatgctaagtattaactacattctacactagccgatgccccaatatggggaacatagatcttgctactttgcatgactgtcttagcgatgactatgttaaagcttatttcgaacagttccactcaactctgattatgatgttcactgatgttggatcagccatcacttacaacgagcttacaagagatgcagtcttggatccaacagtgctggtggcagtagctgtggcacatgcatttgcactgtttgtaagtgtctccgtcgccggcaacatctcacgtggccatttgaacccagctgtcacttttggattggccattggaggcaacatcac

SEQ ID NO: 4450 - DNA, 313 bp, Glycine max
  Clone ID: LIB3073-015-Q1-K1-A3
acagaaagagggagatagatgggagtaaagacagggaggaggacatagacatactggacgagaggtgaaacgataaatgctgcagatagttactaacactcggaatactatgaatgcacataaaaggatggatatgataggtacacaggaactatctgagcgcgatcacttgaccataagaagacaagcatgcactatatcataatatatgctcatgcagcttcacagatgctcttaatgggttgtatgtgggatacaagctgactacagataactcataccaagttatcttattgatacagatgactagata

SEQ ID NO: 4451 - DNA, 150 bp, Glycine max
  Clone ID: LIB3073-014-Q1-K1-B8
ccccgacggctatgctctgcctaaaacgacgggcgactaccttccccaatcctactctgacgacttgcctttcacttctgtttccaaaaccaccgtcgacacgtgcactcatccatattctggtacttcgaatgtcctgaccactactgc

SEQ ID NO: 4452 - DNA, 286 bp, Glycine max
  unsure at all n locations
  Clone ID: LIB3073-014-Q1-K1-C1
agattcccgtttcagttacattcaattcaacgattgaccaaaagagaattcaaaaaataacatttagatcacccaaattccaatatttctatgaaacaataattaaatctaacaaacttattgcgactgattgtatccatatggggtaataataaaagggggaggagagcttaaaaaaacaagatgacaaataaagtataagtgcggggggtcaaactgggtgtatataatcggatcactataaaacaactctntcttttgaggtttcaaaaaatgattttcgaat

SEQ ID NO: 4453 - DNA, 325 bp, Glycine max
  Clone ID: LIB3073-014-Q1-K1-C10
ggtcgcgctttacaaattcggagtctgcgactctgtgggaatcattaataaacatgggaaaagactcgaagccaaaggagtcaggagggaagggaaaggggaaacaggctgcaagtggaagtgatgagaatgcttctaagggaaaaggaaagggtgggaaaggtggagatgggcttggtacttgcacctatgtcaaagcaaggcatatcttatgtgagaaacaaggtaagatcaatgaagcctacaagaagctgcaggatggttggctttgcaacggagataaggtcccaccagctgagtttgcaaagatagctcaagagtattc

SEQ ID NO: 4454 - DNA, 149 bp, Glycine max
  Clone ID: LIB3073-014-Q1-K1-C11
tacggctgttaaaagacgggggaaaggtccggctgcgataagacaacacactggctgggaattgcattgataggaatgcccattattgacaaagaagggggtatttaacattctaacattaacaacttcgccattggctgaagtgttga

SEQ ID NO: 4455 - DNA, 358 bp, Glycine max
  Clone ID: LIB3073-014-Q1-K1-C12
agggaagaagaagaaggagcatggccatgagcatggccatgacagcagcaacagcagcagtgacagtgattaaactgctgcatcacctatatatttaaaaggtttatgggaccatagtagcgagggctgtgccttaatttctctctctctctctatatctatctctctctctctctctttttcctttttccctatcttgtgatctatttatgagtgagaaaaacaaaagtgagaaattgtgcgtgtatctggttgctaattcgagtgctattagtctgtggtttggttggtttagaaccccgctacttgggttatgtttgattgtatattatcctagagaaataaaaattttaaatta

SEQ ID NO: 4456 - DNA, 204 bp, Glycine max
  Clone ID: LIB3073-014-Q1-K1-C2
ctccttattttcttctttactacaattttagtaacatggcaatgcccttattacaatttttgaagggtttctcccttgcgctggtgattcttctgatccagtacaacaacgttgtcaacgcctacaacaacaaaaactgtgtcacaaaggattgcctcatcggcaacaaggatttggaatcagagttctactttggatcccatg

SEQ ID NO: 4457 - DNA, 69 bp, Glycine max
  Clone ID: LIB3073-014-Q1-K1-C8
acctccctcttctctcctttactacaatttttttaacataacaattccatgcttaccatattttccctc

SEQ ID NO: 4458 - DNA, 331 bp, Glycine max
  Clone ID: LIB3073-014-Q1-K1-C9
gaaggagaaagagaggggttagaaagcgaagaggcatggcttcactcaagaagaagaaaccctattacccgcttccgttaattcctatctattactacttcttattcaaagggtgatatgatcttcttcttccaagcgtctcatgcatgctactttctactctcttctcggggaattgaagcgttgtggtccgatagtttgctagatcaagcaaattaacctgtatactggtttatatatcttcacccttgcaccttctctctctctctctctctctatctctctctctctctatatatatatggggttaatctcttacccttcttatctt

SEQ ID NO: 4459 - DNA, 398 bp, Glycine max
  Clone ID: LIB3073-014-Q1-K1-D1
gagtgcacaagtgagtttgttgatcgagataactagaaacagtgtgatgaaaatgagggtccttgttttcttcgttgctacaattttggtagcatggcaatgccatgcgtacgatatgttccctctccgaatgaacactgtctatggtgcccgtactccggaggtgaaatgcgcaagttggaggcttgctgttgaagcacacaacatctttggctttgagaccattcctgaagagtgcgttgaagcaacaaatgaatacatccatggcgaacaatatagatcagactccaaaacagttaaccaacaagcttacttttatgccagagacctcgtagtccatcccaaggacacatttgtgttcagtatagtggcaccgtactctctatattccatacttc

SEQ ID NO: 4460 - DNA, 286 bp, Glycine max
  Clone ID: LIB3073-014-Q1-K1-D11
gaaaatagagaaaacacaaaaagttctgttctgggtcccacccaattcagttttctcaaatggctcgtacgaagcaaacggctcgcaagtccaccggcggcaaggcgccacgtaagcagctggccaccaaggcggctcgtaagtctgctccggctaccggcggcgtgaagaagccgcacagattccgtccgggaaccgtagcgctccgcgagatccggaagtaccagaagatcacggaacttctgatccggaagctcccgttccagcgattggtccgcgagatcgc

SEQ ID NO: 4461 - DNA, 337 bp, Glycine max
  Clone ID: LIB3073-014-Q1-K1-D12
gatccaactctctaaacaacacattaacctgggtcattccccatctgctcaccttattcagccactgctaatttctagggttccgaaatggacgctggcggaaagatcaagaagggcgccggaggaagaaagggcggcggccctaaaaagaagccggtttcaaggtccgtcaaggccggtctccaattccccgtcggaagaattggccgttatttgaagaaaggaaagtacgcccagcgtgtcggtaccggtgctcccgtttacttggccgcagttctcgagtacctagctgctgaggtgcttgagttggctgagaatgctgcacgtgacaacaaga

SEQ ID NO: 4462 - DNA, 323 bp, Glycine max
  Clone ID: LIB3073-014-Q1-K1-D3
aacactccgtatccacttcgctggtaatgggagaagagaagagagagagagagagagagggcgtggagaatgttaagtctctcagttgcttctccttcttcttcaaccatttcctttctcccaaagccattcaatggcattcagctccgtcgctctgccacatactccattccacccacgaaatgcagcgcttcggtgccagtggtgatgatgtctaaaaggacggaggaattgaaggaaattagacaaatgaccaccgaacaaattaacgaagaggttgtcgaccttaagggcgagcttgtcatgcttcgccttcagaaatc

SEQ ID NO: 4463 - DNA, 286 bp, Glycine max
  unsure at all n locations
  Clone ID: LIB3073-014-Q1-K1-D4
atataactgttgagaaagggatagcaagattaccaccacaaagcaatgggcggtatactttctgcgcttcttggcggcgacncggcggcggcggcgtcttcgccggagagttccactttagagtctctcttcactcgtngcggctggcagttattaacgagacaaagatccgatagctcgtggatagattttcgggtcggggcggccttgaaattatagagcagcgattcacgcatggcgacaagtaacgacgtacttcgtaagatcgacgtcgacaatacctgat

SEQ ID NO: 4464 - DNA, 136 bp, Glycine max
  Clone ID: LIB3073-014-Q1-K1-D6
accggtacttaattcccgactcgacgccatctcgtccttacggatacaacaaaaggatacgggttcttatatacctcttaacgacacattctggttgataactccccatgttctcgccttattcaaacactcctaa

SEQ ID NO: 4465 - DNA, 96 bp, Glycine max
  Clone ID: LIB3073-014-Q1-K1-D7
ctttgtttgttccatctctgcttcttggtctgattactgcttctttcttcaccatgtcacttgctgggaaaatcaccactgaaattggggttcatg

SEQ ID NO: 4466 - DNA, 84 bp, Glycine max
  Clone ID: LIB3073-014-Q1-K1-E10
tctagtaacaccatcaagacgaaactacagagggcttgtaatgtctcaaataataggcaaagttgtaaattgtgattgtgaccc

SEQ ID NO: 4467 - DNA, 171 bp, Glycine max
  Clone ID: LIB3073-014-Q1-K1-B7
ggcacaccaacaccaaaacaaacccactgggagggcttcctttgtatccttcctagtgctgcttcttgcagcccttatcctcatgcctcaagggcttgctacttactacaaaccaattaagaagccaccagtgtacaagccttcagtgtacaagccaccagtgtacaaacc

SEQ ID NO: 4468 - DNA, 198 bp, Glycine max
  Clone ID: LIB3073-014-Q1-K1-E7
ttgacccaacctttgacgtatcgaaaccttaagtttcggatcaggtctgagcaatctggttggtagaacctttggtcttagagagtcaggttttatgtctgaattagacgatcaaattcctactgccttcgatccttttgctgatgcaaatgctgatgactcgggtgctgggtcaaaagagtatgtgcatattcgcgt

SEQ ID NO: 4469 - DNA, 327 bp, Glycine max
  unsure at all n locations
  Clone ID: LIB3073-014-Q1-K1-E8
gggtgtgcaattgtgtgaggaaatatctctcacgagtttgtataaggagagaagcggacatgaanaagcaattagcatcaaggcgtttgctgatgtgggttatggtacatttgagcatttcaggagtgttgtccaagtccaaccacaccacaactacaacttctctgctgtgcgatggctccgtagaggactgcctcaacgttcaccacttggactcacagcttcccaccatctccagcacccacttncgcagaatcctcgctggagaaaaatgctgcagaggtaacactcagactgcaggtacaggtgatcccaataatcccaact

SEQ ID NO: 4470 - DNA, 301 bp, Glycine max
  Clone ID: LIB3073-014-Q1-K1-F1
tatctcaggtctttccagagtttttcatccatgtgttgatcttctctcgataattgtattttgtttgtaggaaaatttgcactcctgttgtaataaactaaacatttccattgccagaaaaagaaaaaagataggaaaccaattggcaatggattgagcttatttaccattcatttggttttggattattggtaattgtatcatgggaaaggaactgatgtaaacctatggtgctatttagccatggttattagctgttttgtaatttgtatgcgaaatcattatttacatccttggttgt

SEQ ID NO: 4471 - DNA, 304 bp, Glycine max
  Clone ID: LIB3073-014-Q1-K1-F10
gagcagaatcttcaggccaagccaggtgagcgcgaaccaaagcaacaccccaaatggcttcagcttctgttcccatggcgttgtcactgagctctgttaccaacaacaacaagccttcatccgaagccttcttcaggccactacccctacgccaaccaaagaagaccctcttcaccacgaaggcagtgtcaaactccaagcctcaaatcaatgcatctttgaaagagagggcagttgccggactcacagcagcttctgtgacagcatctatggtggttccggaggtggctcatgctgctggata

SEQ ID NO: 4472 - DNA, 351 bp, Glycine max
  Clone ID: LIB3073-013-Q1-K1-H12
agaagaagaagaaggagcatggccatgagcatggccatgacagcagcagcagcagtgacagtgattaaactgctgcatcacctatatatttaaaaggtttatgggaccatagtagcgagggctgtgccttaatttctctctctctctctctctctctctctctttttcctttttccctatcttgtgatctatttatgagtgagaaaaacaaaagtgagaaattgtgcgtgtatctggttgctaattcgagtgctattagtctgtggtttggttggtttgtaaccccgctacttgggttatgtttgattgtatattatcctagagaaaataaaaatttaaattatcagtacg

SEQ ID NO: 4473 - DNA, 130 bp, Glycine max
  Clone ID: LIB3073-013-Q1-K1-H3
atccaatttgatatcatggaagtccaatttataccattgttgaattaattattgatgaaagatttatcatgtttatgggattaaattctgaatttttcattggaaatttaagaattaaacccgaataaaa

SEQ ID NO: 4474 - DNA, 314 bp, Glycine max
  unsure at all n locations
  Clone ID: LIB3073-013-Q1-K1-H4
ggatccttctacactaactaaagccgagcagcgagagagagaaaccctagcaaaaatgccggctggtcacggtttgagatcccgcaccagagattccttctctcgtcccttcaggaagaagggtaccatcgccctcaccacatacctcagaacctaccacgtcggcgattatgtcgacgtcaaggttaacggcgccgtccacaagggaatgccccacaaagtctaccatggccgnaccggtcgcgtctggaatgtcaccaaacgtgcttgtggggtcgaagtcaacaagcaggtcggcaacagaatcataagga

SEQ ID NO: 4475 - DNA, 414 bp, Glycine max
  unsure at all n locations
  Clone ID: LIB3073-013-Q1-K1-H5
gccgtaacagaagcaaacttaaagaatgctggctaccacacatgggaaaaattaattctcaaggatccacaagatccttccactccaaatgcagtttcatacaaaacagcagcgagagagaaactgataaggcagggatacaacattgttgggatcattggagaccaatggagcgatctcctcggaggccacagaggcgaaagcaggacctttaagcttcctaatcccctgtactacattcagtagttccttcacctctcaacaatctagcttgctcctatctatctatatgtaataagatgcgttcaaataggggcactagcttcactttatgttgtttcagctgtgtgtcaacaagtcatgtaagagacttcactatgttgntntctctttcgtggctttaataaattatgc

SEQ ID NO: 4476 - DNA, 228 bp, Glycine max
  unsure at all n locations
  Clone ID: LIB3073-013-Q1-K1-H8
gaggttccaatctgatattccaggtaaaacctttctttgtacatataaaaaaaaaaaacataaaaacataaaaaaacagaataccaaccatggctgccaacaagtttgcaaccatgttacatagaaacaccaacaaaatcacccttgttctagtctatgccatcctagaatggattctgatcattctnctnctnctcaattctctcttctcttatctaatcataaagt

SEQ ID NO: 4477 - DNA, 417 bp, Glycine max
  Clone ID: LIB3073-013-Q1-K1-H9
aagctttggaggttctgggctcaagaaaagtggaaagaaataagggctctttatcatgattgtatgcattcaatattgagccctgtaattacagttgctaccatgataacttctcttattattgtggcctactttattgctaatgtgtactgaactgaggtatgtcgtgatgtaagctgcaataagttaattgtctgtagctttattgtatccccttcatggggttctgataattacatccttttaatagtgttgcggatttggcatacacttgttcaagtaaataatggcatggcttgcgaaattttatttgtcaattctattactatcatccattctgttgccaactgcctaacatttgtcagtgattgatatgaattctcaagtcaatacccaattgtctggaatttggtttcc

SEQ ID NO: 4478 - DNA, 217 bp, Glycine max
  Clone ID: LIB3073-014-Q1-K1-A10
gataccaaaaacaaaacacaagccaagtgaaagtgagaaaaaataaaaatcaaagagcataatgtcagggatcattcacaagattggggagacccttcatgtgggagggcacaagaaggaggaggagcataagggtgagcaccatgctggagaatacaaaggggagcaccatggtgaacacagtagtgagtacataggagagcatcatggtgaacac

SEQ ID NO: 4479 - DNA, 298 bp, Glycine max
  Clone ID: LIB3073-014-Q1-K1-A12
gaatccaaacctagctaagtgctcttacagagagaggagtgagtgagaaacaagatatttaaagttacaaaaaatggaaagagtggcaaaagtggtggtgatgttggccatggtggtgctggtgctaattgcttcaaatgttgaagggggacgattactgaagcaagagaatgtggatcagcccgagaccttccttggtgggatatttccaagcccaagcccaggtttcagcttcaccggtgtgggctttggcccatctgggttttgcactttccctggtggttgtaccggtacccct

SEQ ID NO: 4480 - DNA, 202 bp, Glycine max
  unsure at all n locations
  Clone ID: LIB3073-014-Q1-K1-A5
tcactactattattactctttcacgcttttgcttctcgatttttaaaccctaaatctatctatctgtctaatagataagatagggcaaaaacaaaacataacatattataaccctagccaaagaaagaccttgttgagcagcagcagcagagagagagaggcttatggaangagtaccgcacccaatacccagaactgtcga

SEQ ID NO: 4481 - DNA, 220 bp, Glycine max
  unsure at all n locations
  Clone ID: LIB3073-014-Q1-K1-A8
tgggaaaaaaaaaagaaacaaattgtgcaatgaatttgtaaataaggcaaaagttatggattaagaattaatttctctggatatattagaaaacccgaattcgattgtctaatgatngaaactaannacaaatatttaacttaaaatatatgatccttttcctgaacggacgctttcgtggacaaatcgaaaatgttttttcaaccctcaatcccatttg

SEQ ID NO: 4482 - DNA, 346 bp, Glycine max
  unsure at all n locations
  Clone ID: LIB3073-014-Q1-K1-B1
gcttctgaatcgtcttttacttctcancanctgcggcgggggttcagaaacgaaaaagggttcggtgttctgttcgcgatgagagccaagtggaagaagaagcgtatgaggaggttgaagaggaagcgccgaaagatgagacagagatccaagtagtgcgttaaacctagtttgtttctgttgcttttacaattgcttatgttgtcgaatgggacacccagttgttagtggcactggtttctcctttttgatgtttgatacattttgttggattcaagtagtttatgttcgtcttatgttattaactcaaaacaatggttgtactggttttgcttatcaacatgat

SEQ ID NO: 4483 - DNA, 406 bp, Glycine max
  Clone ID: LIB3073-013-Q1-K1-H10
ggcacaagtgagtttgttgatcgagataactggaaacagtgtgatgaaaatgaaggtccttgttttcttcgttgctacaattttggtagcatggcaatgccatgcgtacgatatgttccctctgcgaatgaacactggctatggtgcccgtactccggaggtgaaatgcgcaagttggaagcttgctgtggaagcacacaacatctttggctttgagaccattcctgaagagtgcgttgaagcaacaaagggatacatccatggcgaacaatatagatcagactccaaaacagttaaccaacaagcttacttttatgccagagacctcgaagtccattccaaggacacatttgtgttcagtatagatggcaccgtactctctaatattccatactacaaaaaacat

SEQ ID NO: 4484 - DNA, 316 bp, Glycine max
  Clone ID: LIB3073-014-Q1-K1-B12
tactgcgtcgagtttgccaaggtctcttgtattgtggaaggaagcaaatgctaaaggaagtctatttcaaagatttccttcagatttgttgacacagctgaagacagattgtctcgtcctgcacaatcatcgttatgccatatccccacgcaagcttcaatataataccaagttatctgacttttttgagattctggcaacatctgaggatagagatggaaagactttcgtttccacagcacgtggtaagaaatatcccgtgactgtcaacctacggcaaccagagaaaaatgcttttgaatgggctacatctttg

SEQ ID NO: 4485 - DNA, 333 bp, Glycine max
  unsure at all n locations
  Clone ID: LIB3073-014-Q1-K1-B4
cgatttcggtcgccacgcgtctacgtgcagacacagaagggatctgcagcagaagaacaagtagttganaactgagaaggagaaacaaatggcttgctcaatgatctcttccccagctgttaccactgtcaaccgtgccggtgccggcatggttgctccattcactggcctcaagtccatggctggcttccccaccagaaagaccaacaatggtattacctccattgctagcaacggtggaagagtgcaatgcatgcaggtgtggccaccagttggcaagaagaagtttgagactctntcctacctgccagaccttgatgatgcacaattggc

SEQ ID NO: 4486 - DNA, 151 bp, Glycine max
  Clone ID: LIB3073-014-Q1-K1-B5
tgctggttttgagacctcagctaccacctacattgctggtgctgagattatgttgcaatgcaagagcagggttagcaacgaggttgtgtacacgaagaatgggtacaccgactcaaccggagcatacacaatgtacgtggatgaggatcac

SEQ ID NO: 4487 - DNA, 225 bp, Glycine max
  Clone ID: LIB3073-014-Q1-K1-B6
gggggtataaagaacgaaaaattcacttacaacagggggggtatttctgcagcattgaacacccatttaacaccaatcttcagcattgaacaccaattcaacgcccatgggtcaagaagaagaaaaatccccaaaaaacaaaatggaggagaaaaaagttgaagaagaagaaaagaaagaagaagagaaaaaatcagatgagaagaaattcaaggagaaatctgc

SEQ ID NO: 4488 - DNA, 337 bp, Glycine max
  Clone ID: LIB3073-013-Q1-K1-F5
aaactgatgtcatagaacaaaagaaggatacggatgtgacaggacaacagaaggatactgatgtgacaaaacagaagaaggatactgaatgtcataagacagactaaaggatatcggattcaagaagacaaccaaaggatacggctgaacgaagaagactaacgggtcctgattcaataagaagactaaaggatgcgaattcacgaaggcgacgaaaggagttgaactgacgaaagataagaaggtttcgacagtcacaatatattatggcactgaagatgtagtctcatttcactgacaatgcactcaaagtctcttctacctgcagacgctcatt

SEQ ID NO: 4489 - DNA, 400 bp, Glycine max
  unsure at all n locations
  Clone ID: LIB3073-013-Q1-K1-F8
gatgagagcggaagttatgtgcatgcaagggggttctcagttcatcatgtgtttagacatattacggagtatgcatcaacagctctgcagtattttcttgggaaccaatctgaaacgtgtctgtattttcttatgcactggatttgcagctaccagacactgttttgaagaccttgcagcatatgttcccggctacttgcaatggataaacaatcaactatattgttacctncagttcatcgtccctattggcagttntacttntctaaaattgtggtgaacatatnctcaaaggaccagaattctgatactactgaggcttatcatattgactgcctctctgaggaaacataattgcatctaccagtgactcacgtataacccaagtgcccaattcaat

SEQ ID NO: 4490 - DNA, 418 bp, Glycine max
  Clone ID: LIB3073-013-Q1-K1-F9
gacaagtgagtttgttgatcgagatagctagaaacagtgtgatgaaaatgaaggtccttgttttcttcgttgctacaattttggtagcatggcaatgccatgcgtacgatatgttccctctccgaatgaacactggctatggtgcccgtactccggaggtgaaatgcgcaagttggaggcttgctgtggaagcacacaacatctttggctttgagaccattcctgaagagtgcgttgaagcaacaaaggaatacatccatggcgaacaatatagatcagactccaaaacagttaaccaacaagcttacttttatgccagagacctcgaagtccatcccaaggacacatttgtgttcagtatagatggcaccgtactctctaatgttccatactacaaaaaacatggatatggggtgga

SEQ ID NO: 4491 - DNA, 400 bp, Glycine max
  Clone ID: LIB3073-013-Q1-K1-G1
ggttctagtgtgtgatcgttcgttgttgtaactcgttcttcttcttttgttgttctgagtttgtgtttgtcttttctctcacctgaaaatgtcttgctgcggcggtaactgtggttgcggaagctcctgcaagtgcggcaacggctgcggaggctgcaagatgtacccagacttgagctacactgagtcaaccaccaccgagaccttggtcatgggagtggcacctgttaaggctcaatttgagggtgctgaaatgggtgtgcccgctgagaacgatggctgcaaatgtggaccaaactgctcctgcaacccctgcacttgcaagtgaggtgttgggagagcaagcttcaagcagagatagcccttaattaggaataatgataaactattaatgtgtagc

SEQ ID NO: 4492 - DNA, 123 bp, Glycine max
  Clone ID: LIB3073-013-Q1-K1-G10
gacaccaacaccaaaacaaacccactaagatggcttactttgtatccttactagtgctggttcttgcaacccttatccttatgcctcaaaggcttgctacttactacaaaccaattaagaaac

SEQ ID NO: 4493 - DNA, 388 bp, Glycine max
  Clone ID: LIB3073-013-Q1-K1-G11
gaggaacagcagagaaacaaagtgggaagtaaagaagatcctggcttctctagcaaccttggctgctgttcaaccagctacgatcaatggccttgctggaagttccctctctggaactaagctctctttcaagccctctcgccacagtgtcaaatccaagaacttcaggagtggtgccgtggtagcaaagtatggtgacaagagtgtgtactttgatttggaggatctgggcaacactacagggcagtgggacttgtatggctcagatgcaccttcaccctacaaccctcttcagagcaagttcttcgagacatttgctgctccattcacaaagaggggattgttactcaagtttctgatattgggaggtggttccacccttgcatac

SEQ ID NO: 4494 - DNA, 431 bp, Glycine max
  Clone ID: LIB3073-013-Q1-K1-G12
gataccatagaagaagcacaaagagaagcattagcactaggagcagcaacaactagtctcagctgaaatggcctcttcagtgatggcatctgtggccctcaaacctgcccctttcactgttgagaagtcctcagtgagaggccttccctctctctcaaggaactcttcttcattcagagttgtggccagtggcaagaagatcaagactgacaaaccttatggaattaatggtggcatggctttgagggatggaactgatgcatctggcaggaaaggaaagggaaagggtgtttaccagtttgtagacaaatacggtgctaatgtcgatggttacagtcctatctacgacaccaaggactggtctccaaccggtgatgtctacgctggcggtacgactggcttggctatctgggctgtgactctacttggtc

SEQ ID NO: 4495 - DNA, 419 bp, Glycine max
  Clone ID: LIB3073-013-Q1-K1-G3
gaaggtgcaagagtttgttgtgagctataagctagtttatcgtgaggagaatatgaaggttgttggtttctttgttgctggagtagttttggtagcatggccatgccatggcgcaagctaccaaaagttccctctccgaatgaaaactggctatggtgagcgttcttcggaagtaaaatgcgcaagttttaagcttgctgtggaagcacacaacatccgagcctttaaaaccattcctgaagagtgcgttgaaccaacaaaggactacattaatggcgaacaatttagatcagactctaaaacagttaaccaacaagctttcttttatgctagtgaacgcgaagtccatcacaacgacatattcatattcggcatagataacaccgtactctctaatatcccatactatgaaaaacatg

SEQ ID NO: 4496 - DNA, 382 bp, Glycine max
  unsure at all n locations
  Clone ID: LIB3073-013-Q1-K1-G4
gggaatgattgggtgctgttcttcaaggttgggctctctctgttcattctcagcttccttggagccttttcactgcagagcttgtatactataggggttacctttgcgtttatagctntctacgtatacgagcagaaggaggaagacattgatgacctattcatcaaaacacattcttttggatgcaaattgaaatctgatctcaccaggaagtttctttcttcaaagaagattgattgatagctnttgtggcactagctnttttcttagttgcaccttacttatccgttggagttctntgtatgattgtacaataattgtaatttaatttgatttgatatagccaacttgcaaatatttttatagaaaattcttactttgg

SEQ ID NO: 4497 - DNA, 420 bp, Glycine max
  unsure at all n locations
  Clone ID: LIB3073-013-Q1-K1-G5
ggccgaaaaccctaacaacacaggcgcagagcgtgatccattgacgaagatggtgcagcgtctcacctaccgcaagaggcacagctatgccaccaaatccaaccaacacagggtcgtcaaaacccctggtgggaagctcgtttatcagaccaccaagaagagggccagcgggcccaagtgccccgtcactggcaagaggattcaggggattccacacttgaggcctgcagagtacaagagatcaaggttacccagaaaccgtaagactgtcaaccgtgcatatggcggagttttgtctggaagtgctgtcagggagaggattatccgagctttcttagttgaagagcaaaagattgtggagaaagtcttgaagatccagaaggcaaagganaagcaagcctcataggcttgaatttgaac

SEQ ID NO: 4498 - DNA, 413 bp, Glycine max
  Clone ID: LIB3073-013-Q1-K1-G7
gactgctagtgaacttgaggcgaggatgagccattttcctccttatattatccaaaccattaaaaatcgctctgcttttgtgttggccaagatttgtcaggggaaacaaatgggagaagcaagagaaggatgacataatattactcaagattgtacctcctgtgaaccagatttatgctaaatggcttgctagagaccttgtaagaattcacggctttactgcaaaacgtactcgtgcagtgcagccgcccaatcattatgtagaacatatgaagttgaatggatggttggatgtggacttgaatgatcctgatcttgctcatttgttcgagtagataatttctatatgccatatagacaattattgtgactctgtagctgcactatgattacattaaattgttcagagggcg

SEQ ID NO: 4499 - DNA, 294 bp, Glycine max
  Clone ID: LIB3073-013-Q1-K1-G8
gtgttggggatgttgctgatggtgtgccttgttaaggtttcgtctgatccaaagagagaagaagaaatactggaagaagaactacattttcccgataacgagccacttattgtgagagacgggaacagaaggctaatgcaagacatagattgtggtgggttgtgcaagacgaggtgcagtgcacattcgagacccatcttgtgcactaaggcgtgtggcacgtgctgtgtgaagtgtaagtgtgttccacctggcacatctggaaatagggaactatgtggaactttctacact

SEQ ID NO: 4500 - DNA, 427 bp, Glycine max
  unsure at all n locations
  Clone ID: LIB3073-013-Q1-K1-G9
agaaggggatagaagaagcagaaagagaagcattagcaaaagcaagaagaactagtctaagcagaaatggcctcttcagtgatggcatctgtggccctcaaacctgcccctttcactgttgagaagtcctcagttagaggccttccctccctctcaaggaactcctcttcattcagagttgtggccagtggtggcaagaagatcaagactgacaagccttatggaattaatggtggcatggctttgagggaaggagttgatgcatctggcaggaaaggaaagggaaagggcgtttaccagtttgtagacaaatacggtgctaatgtcgatggttacagtcctatctacgacaccaaggactggtctncaaccggtgatgtctacgctggcggtacgactggcttggctatctgggctgtgactctac

SEQ ID NO: 4501 - DNA, 405 bp, Glycine max
  Clone ID: LIB3073-013-Q1-K1-F3
gacgcaccaaacccacaaaacgctatagcaatagaaacatttgcttttgaaaaacccctcactcttcatcactacactagctagccacatacaatgtcgaccaaatttaaggtgtttcgtgaattcacaagcgatgactcattcctaaaccaagttatccctgaaaacatcaccgaattccaagtgactctgtccctcgctagagactacgatggcaacaactcaaccaacggaaagttcattccttactgggacactgaaaaggtcactcccgaagtgataaaaaaattcaagaaaaaatacgaacccaccgcactgagggttaaggttcttgtcagcattggaaacagaaacaaacaatttcctttcaccattggctcggactcgaacagcgaagcatgggtc

SEQ ID NO: 4502 - DNA, 416 bp, Glycine max
  Clone ID: LIB3073-013-Q1-K1-D5
ggcacaagtgcgaatgatgatcgagatagctcggagcagtatgatgaaaatgaaggtgcttgttttcattagttactacgatgttgggtgcatggaaatgccatgtgttcgatatggtgattatgcgtatgaacattggctatggtgacagcactacggaggtggaatgcgctcattggacgatcgctgtaggagatcactacatgtttggatttgtaaccattcctgaagagtgattctgagcatcataggaatacatacattgactgcagtattgatgagactccaagacggataaccgagatgcttgctattgtgcaatagacttcgctatacatccgtgggacacataagtatccagcatagatagcaccgtgctctataatagatcatactgcaactgacatggttttggg

SEQ ID NO: 4503 - DNA, 374 bp, Glycine max
  Clone ID: LIB3073-013-Q1-K1-D7
ggaacttcaactcctgaaactgaaaagtgatcggagcaagaaatggagaatgcggaggagcagcagctgcaaaactaggaggttttgtcggttgaacttccggctccttccggttggaataaactggtcttccctaagaaagtggtaacaccactaaaaagggagattgcattcattgctccaactggggaggagatcactacctataaacaattggagccgtacctaaaggcacattctggcaatcctgtgatttcagagtttgactggggaactggtgagacccccaggcgatcagccaggatcagtgataaggtcaagtcaacttcaccagccgatagtgatactccaaagaaacgtgctcggaaatcatc

SEQ ID NO: 4504 - DNA, 218 bp, Glycine max
  Clone ID: LIB3073-013-Q1-K1-D8
ggcacaagtgagtttgttgatcgagataactagaaacagtgtgatgaaaatgaaagtccttggtttcttcgttgctacaattttggtagcatggcaatgccatgcgtacgatatgttccctcttcgaatgaacactggctattgtggccgtactctggaggtgaaatgcgccaagttggaggcttgctgtggaagcacacaacatctttgggttttag

SEQ ID NO: 4505 - DNA, 415 bp, Glycine max
  unsure at all n locations
  Clone ID: LIB3073-013-Q1-K1-D9
gatatacattctcttgtcagagtgttctgtgtcaccggaactcgtttctttcaaaacacttcaaacatctcgaacgctctctttccggcaactaggttaaagttcatcaatggcaggtcgcggcaaaaccctaggatctagcgccgccaagaaggctacctcaaggagcagcaaagccggcctccaattccccgtcggccgtatcgcccgtttcctcaaggccggaaaatacgctgagcgtgtcggcgccggcgcccctgtctacctcgccgncgtactcgaatatctcgcggctgaggttttggaattggctggaaacgctgcgagagacaacaagaagactcgaattgtgccgcgccacattcaattggcggtgaggaacgacgaggagttgagcaagctactcngtgacgtc

SEQ ID NO: 4506 - DNA, 424 bp, Glycine max
  Clone ID: LIB3073-013-Q1-K1-E1
gattatatttgagttcaaacaaatcaaagccatggccacctccaacttctctattgctctctccgtctccctagccttctttttggtgctacttaccaaggcacactcgaccgataccgtttctttcaccttcaacaagttcaacccagtccaaccaaacattatgctccaaaaagatgctagtatttcatcctctggggtgttacaactcaccaaagttggcagcaacggcgtgcccacctcgggatctctcggtcgtgccctttacgctgccccaatccagatttgggacagcgaaaccggcaaggtagccagctgggctacatcctttaaattcaacattttcgcacccaacaaatcaaactcagctgacgggcttgccttcttcttggcacccgtcgggtctcagccccaatccgacgat

SEQ ID NO: 4507 - DNA, 97 bp, Glycine max
  Clone ID: LIB3073-013-Q1-K1-E10
gcacaagtgagtttgttgatcgagataacttggaacagtgtgatgaaaatgaagggccttggtttcttcggtggtaccattttggtagcatggcaat

SEQ ID NO: 4508 - DNA, 417 bp, Glycine max
  Clone ID: LIB3073-013-Q1-K1-E11
gaccaacacaaacaatagtgcatagcggttttcattgtgcattattcaatggccaccacagcagctctatccggaaccatggtgagcacctccttcatgaggaagcaacctatgacgaccaagagcctaaagacattccccaacgctctttttggtctgaaaggtggacgaggtggtcgtgtaacttgcatggcctcgtacaaggtgaagctcataaccccagaaggagaagtggagtttgaatgcccagatgatgttttcattgttgacaaggctgaggaagaaggcattgaacttccctactcgtgcaaggctggttcttgcgtttcatgtgttgggaaaattgtgaaaggtgacgtggaccagtcagatggtagcttccttgatgatgaacaaatagaaagtggatgggttctc

SEQ ID NO: 4509 - DNA, 424 bp, Glycine max
  unsure at all n locations
  Clone ID: LIB3073-013-Q1-K1-E12
ggagacgagggtaaggtcgcgttgtgttgcgtcgtgtcgtgcgctgttcctctgtctgccgtttttgttttcagaccaaaccccagctccgcatcgcaaccatgtcgaccaagcaaggtggaaaagctaagcctttgaagaaacccaagtctgataagaaggattacgacgaggttgacatggctaacattcagaagaaaaaggaagaggagaaggcgctaaaggagttgaaagccaaggcgcaacagaagggaagctttggaggttctgggctcaagaaaagtggaaagaaataagggctctttatcatgattgtatacatccaatattgagccctgtagtttattaccatgataacttctgtcttattgtggccttctttattgctctaaatgtagtactgaactgangtatttcgtgatgt

SEQ ID NO: 4510 - DNA, 416 bp, Glycine max
  unsure at all n locations
  Clone ID: LIB3073-013-Q1-K1-E2
gaaagaaaagagaaatggcaacagaaacaaaagtggcagtattaggtggcatcaccgaagtgcagggagctgccaacagcgtcgagatcaacaatctcgctcgctttgctgtagaggaacaaaacaaaagagagaattcagttctggagtttgtgagggtgattagtgcacagcagcaagtggtttctggagtgaattactacataacattggaagcaaaagatggtgagattaaaaatgagtataaagcgaaggtttgggagagggaattccaagagttgctagaattcatgccaacattaggtgcaggaggcgagatcgaccatctcgctcgctttgctgtagaggaacaaaacaaaagagagaatgcaaatctggagtttgtggnggtgattaaggcaaagcagcaagtggtg

SEQ ID NO: 4511 - DNA, 413 bp, Glycine max
  Clone ID: LIB3073-013-Q1-K1-E7
catgttagatggctacgaaattccagccaagacattattatatgtgaatgcttgggcaattcatagagatcctaaggcttggaaagatccagaagagtttatacccgagaggtttttaaattgcgacatagatctttatggacaagattttgagtttattccattcggtgctggtcgtagattgtgccctggtatgaatatggcatttgctgcattggatcttatacttgctaatcttctttattcctttgactgggaattgccacaaggaatgaaaaaggaagacattgatactgaagtgatgccaggagttacacagcataagaagaatcctctgtgtgttgtggccaagtgctatatgtaaaatccaaaagtcgtaactactgctgaaaaaataaaataaaataattaat

SEQ ID NO: 4512 - DNA, 420 bp, Glycine max
  Clone ID: LIB3073-013-Q1-K1-E9
ggtggaaaatttgcagagatcaaaggagagaagatggcacaaacgctggcaatgcccgtggcaccttcgctcgctatcatctccaattctcgcctctccaagacactctccgttcccgttctcaacaacccaaagtttcaagggttaagcatcaagtgcgttcgtgttggaggtgtggagattccgaacaacaagcgaatcgagtactcgctgcagtacattcatggagttggcaggaccagagcaaaacagattctgtgtgatatccaaatggataacaaaatcacgaaggaactcactgaggaggagctcatcactctcagggacgaagtctccaaatatatgattgaaggcgacctgagacggttcaatgcggctaatataaagagactgaaggacattcagtgctacagagggaat

SEQ ID NO: 4513 - DNA, 417 bp, Glycine max
  Clone ID: LIB3073-013-Q1-K1-F1
ggaagtcgccgtttgttttcttttcgttcgcatgttctctctctctcagaaagatgaaggtggtcgccgcgtatttgctcgccgtcctcggtggcaacaacagcccctccgccgatgtcatcaaggaaatccttggctccgttggagtagaagcagatgaagataggattgaatcgtttttgtctgaagttaagggtaaggatatagttgagcttattgctgccggtagggaaaagttggcctcggttccttctggtggtggtggtgccgttgccgtcgccgcagctcctgggggaggtgctgctgctgctgctcctgctgctgaagcaaagaaggaggaaaaggtggaggagaaagaggaatctgatgatgatatgggtttcagtctcttcgattaattggtgtagtctattcagc

SEQ ID NO: 4514 - DNA, 337 bp, Glycine max
  Clone ID: LIB3073-013-Q1-K1-F10
gacagcatatatatcagtaatctatggcatgctatacctacattatgatgatggtctttgtagttgatagccatggctacccggggaaagcttgaggttgacattgatctcaggtccaactcagactggtcctggcatacccttacgaatcttactgggatattcgctaaagccttacgacatgattacaaacgcattgaagttcttgatggtgatggctagtctactggttctatgcggcacataaggtatggtgaagggtcaccacttgtgaaatcatcctttgagaagattgacgctgttgatgatgaaatgaaagtaatgtcgtacactatca

SEQ ID NO: 4515 - DNA, 397 bp, Glycine max
  unsure at all n locations
  Clone ID: LIB3073-013-Q1-K1-F2
gagaagcttcaataagtaagtatcaatggcttgcgaagaatcccagaacaagccccccagcgagcagtccactaccgaactcatcacgagcgcgaagctggtggcggaggcggcgcagtcggctctgaagaacgacagcgacaaagtggacaaggccaaggtggctgacgctgccggcgatcttctcgacgcggcggggaagtatggaaaacttgatgacaaacaaggcatagggcaatatgttgacaaggctgctgattatctgcataattaccagggtgataataccactgctccttcacagcctgcagagtctaaaggtgaagaaagtggtggtgggttaggtggtctggcanacttggctggaggcttcttcaaaaagtagttacaaagcaac

SEQ ID NO: 4516 - DNA, 381 bp, Glycine max
  Clone ID: LIB3073-013-Q1-K1-D4
aggggagcgaagaagatattagggtttttgagtgcggtgcggcgatcctagcactctcttctgcagctttcgccgacagcttcattcaccatggctgagcaaaccgagaaggcttttttgaaacaaccaaaagtgtttctcagctcgaagaaaactgggaagggaaagagacccggaaagggtgggaaccgcttttggaaatccattgggcttggatttaagactcccaaggaagccatcgaaggaacctacattgacaagaagtgccccttcactggcaatgtttccatacgtggccgtatcttggctggaacatgtcacagtgctaagatgaacaggactattattgttaggaggaattatctccattttatcaagaag

SEQ ID NO: 4517 - DNA, 392 bp, Glycine max
  unsure at all n locations
  Clone ID: LIB3073-013-Q1-K1-B9
ggcacaagtgagtttgttgatcgagataactagaaacagtgtgatgagaatgaaggtccttgttttcttcgttgctacaattttggtagcatggcaatgccatgcgtacgatatgttccctctccgaatgaacactggctatggtgcccgtactccggaggtgaaatgcgcaagttggaggcttgctgtggaagcacacaacatctttggctttgagaccattcctgaagagtgcgttgaagcaacaaaggaatacatccatggcgaacaatatagatcagactccaaaacagttaaccaacaagcttacttttatgccagagacctcggagtccatcccaaggacacnattgtgttcagtatagatggcaccgtactctctaatattccac

SEQ ID NO: 4518 - DNA, 419 bp, Glycine max
  unsure at all n locations
  Clone ID: LIB3073-013-Q1-K1-C10
ggagtcggttggtatttgtttttgttgttggctgtgcgatcactcatctcacctcttctcatcaacgctgcgaaagacaatggagctgacaccccagcagctgagccaatacaacggcacggacccatcgaagccgatctacgtggcggtgaagggccgcgtctacgacgtcaccaccggaaaatccttttacggccccggcggcccctacgccatgttcgccggcaaagacgccagcagagccctggcgaagatgagcaagaacgacgacgacatctncccctccctcgacggcctctccgacaaggagatcggcgttctcaacgactgggagaacaaattccaagctaagtaccctgtcgttgctcgtgttctcaattaatcatatgataacctaagtgtattttgtactctatcat

SEQ ID NO: 4519 - DNA, 421 bp, Glycine max
  Clone ID: LIB3073-013-Q1-K1-C3
gattatatatgaaatttatattcgtatttctttgtgtatttaaaaatattcgttgaacctagttaattgaaattagtctaacgtttgtatttgttacaaaaaaagctttttgaattccccgtaaaaatagattgcgctaatgaaaaagctttcaatgttgtaaaatatcccttctttttccataaagtgttccgaatccttttttttgatatagaagtgcgcttttttggaactgccatataattagtatagcttttgattgttatagaattcgatgtgaaagacatttttatgaaaatatatttatctttaattagccatatattgtatctatcttaattcccattttttactatttcaagtaaaacattgaatattataatactttttctaaaattttccaaacatagatattgcttat

SEQ ID NO: 4520 - DNA, 405 bp, Glycine max
  unsure at all n locations
  Clone ID: LIB3073-013-Q1-K1-C5
gggaacatggacgtgcgatgctgattctgggatgacaaatgctcacgaggagagagagaaaactgtgtctgaattgtggaaaatttaaccatggctattacaacaacacaagctttgacccccttgtagtatcacgtacaagtggagtagaaccacattttgcgccaatttcaccttcacaagctttgacgctactacactctactgcaatctactgctattcaagctcattcacacttaatgcaaacgaaccttatgcagcttccatgccgttaagcgcttttccgccgatgtggagtggcaggactgcacnggctaaatggggattgatgtgcccatctgtgtagcctatacttgttattctgatacgcgagccattcgatactggatgcactttatttcttc

SEQ ID NO: 4521 - DNA, 425 bp, Glycine max
  Clone ID: LIB3073-013-Q1-K1-C7
tggcacaagtgagtttgttgatcgagatagcgagaatcagtgtgatgaaaatgaaggtccttgttttcttcgttgctacaattttggtagcatggcaatgccatgcgtacgatatgttccctctccgaatgaacactggctatggtgcccgtactccggaagtgaaatgcgcaagttggaggcttgctgtggaagcacacaacatctatggctttgagaccattcctgaagagtgcgttgaatcaacataggaatacatccatggcgaacaatatagatcagactccaaaacagttaaccaacaagcttacttttatgccagagacctcgaagtccatcccaaggacacatttgtgttcagtatagatggcaccgtactctctaatattccatactacacaaaacatggatatggggtggagaaa

SEQ ID NO: 4522 - DNA, 400 bp, Glycine max
  unsure at all n locations
  Clone ID: LIB3073-013-Q1-K1-C8
aggccacggcgggaagttcacgtggatcggcaacggctgcgagaacgtcgagatggagcacggtgctatggacgccaaggacccgaacttcgaggatccaacggagatcgccgccgtgtgatcgcggtggttccggtgacgagatctgtacatactaataattgctaagagacgcggtttccgaattcaataatatgaagcaagtacgagaagaagcgctntctgtgattgattgttatagatcagatctgtctctggaatttggtagtggcatggcacttgtgtctgtgtacatatatcgaatggtcttggaagtgcgtgcactcatattcgcattcaagtttctacgagcttttgttatcaacgataattgaattttcaattttcaagtttatttaca

SEQ ID NO: 4523 - DNA, 432 bp, Glycine max
  Clone ID: LIB3073-013-Q1-K1-D1
agggacacaccccattgctacataaggctatatagcataaacatttgagtcttcattggacaatgtcaacctcttccataaacgggtggtgcctctcttccatcttcccagccaaaacctctctcaagaaggccacattacgcccttccgtcttcgcaacccttaacactccttcttctccttcctcttcatcttccttcccctctctcattcaagacaggcctgtttttactgcccctgcccccatcatcaccccaactgtgagagaggatatggcaaaggaatacgagaaagctattgaagaacttcagaaattgttgagggagaagagtgaactcaaagcgacagctgctgaaaaagtggagcagataacagcttctctagggacatcatcatctgatggcatcccatcatcagaagcctcagacagga

SEQ ID NO: 4524 - DNA, 412 bp, Glycine max
  Clone ID: LIB3073-013-Q1-K1-D12
gaagaacggtgatgctggttttgttaagatgattccaaccaaacccatggttgttgaaactttctccgagtatcctccacttggtaggtttgctgttagggacatgcgtcaaactgttgctgtgggagtcatcaagaacgttgagaagaaggatcctaccggagccaaggtcaccaaggctgcccagaagaagaagtgaatcgtgcgggctggttcatcaggggatgttggttacaataaatgttggtttcttttctgtactcttgtgtcttcttttctaggtagcttgtttttcggacaaagtttgaagtctccaccatcatctcgcaactgttgttcccagaactgggttcttgatcgacggtggcaaaattgcttttatttatctgtgttttaatgtgttgtgtttgtc

SEQ ID NO: 4525 - DNA, 414 bp, Glycine max
  Clone ID: LIB3073-013-Q1-K1-B8
ggttcataatcattacacatcataagctctctctgtaaggtttaatcagactcaagggtttaagccatgggaaaaaagaaagcaaaagcaaagcctcctccaaagaagcgaatggataagctcgataccgtcttcagctggcctttctgcaatcatggcagcagcggtcaatgccggctttgacatgaaaacttggtaagggaaagctatctgcgggataatgccagaaaactttaacactaccaatacaagtttattcaaaaccattggacatattcagtgagtggattgatgaatgtgaaactggtaaccaccccggacgatgatagtgctgagcactgatgctcagaatcctgttcctgtcggtgtgaactgattaactgggccaatttatatcttcaacctgtaactatg

SEQ ID NO: 4526 - DNA, 421 bp, Glycine max
  Clone ID: LIB3073-013-Q1-K1-A10
gaatctgaaatgtcaacctttgcattcacttcggtattccaaatcacagtctcatcttcatcttcatctttgcatgctatcagagcctcagcttctgagtatgttccctcccaacacacccttagaagggaattcttgaagggtgttgctgctttgatgcctcttccacttgttgtgctgatagagccacccccttcagatgctagagaagttgaggttggctccttccttccaccttcaccctctgacccttctttcggtctcttcaaggcctctgccaaggacactccagcccttcgtgcaggaaatgtgcagccatacaagtttatccttcccccgacgtggaaacaggctcgtgtagcaaatatactatctggaaattactgccagcctaaatgtgcagagccctgggtggaggtta

SEQ ID NO: 4527 - DNA, 410 bp, Glycine max
  unsure at all n locations
  Clone ID: LIB3073-013-Q1-K1-A11
gaccattcattccgacattgccatttttcacaccaccaacacaagatgtttctccacattgtgttcctccttttccttctctcatccacttcccatgccactgtccaagacttctgtgtggcaaacctcaaaggtgcacacacccttgcaggttacctgtgagcgacacgtgcttgtgactttacatgacactgtgtacactgggttagctgaaactgctaatgtgacacacataatcaatgctgctgtgaccccagcttttgttgctcaattcccaggtctcaatggccttgaactatctgcagcaaggttggaccttggtcctagtggtgttatcccactccacactcatcccggtgccaatgaactactcattgtgcttcaaggtcacatccttgcntggattcata

SEQ ID NO: 4528 - DNA, 418 bp, Glycine max
  unsure at all n locations
  Clone ID: LIB3073-013-Q1-K1-A2
gaccaagtgaaccaatatagcccaagccctatacaacgaaaccctaacacacacccatttgattcagtttccatggctagcctcaaggttgcatttttggctgtagtgctctgcatggttgtggtgagtgcacccatggcacatgcagctatcacgtgcgggcaggtgacgagtagcctggccaattgcatcggttacctccagaagggaggaacgccgtcgtcgggatgctgcaacggagtgaagagcctcaatgccgncgccaagaccaccgtcgaccgccagacggcgtgcaactgcctcaagtcggccgtcagccaaatctccggcttcaacgccaacaacgccgtctcgctccccggcaaatgcggagtctccatcccctacaagatcagcaccttcaccaactgcgctacca

SEQ ID NO: 4529 - DNA, 320 bp, Glycine max
  Clone ID: LIB3073-013-Q1-K1-A4
ggggaaaccctaattctgcgtggtgggtgaaaaaggccgtgcccttgctcttcaaaaaggtcgggaaaaaacgcctcaagaaatttatacgcccccagagtgatcccaagatctccggtcagccaagctggcgcaaacccaaaggtattgattctcgtgtcaggagaaagttcaaaggatgcactttgatgcccaacattggttatggctcagaacagaaaacccgccattatctaccaaatggtttcaagaaatttgtcgtgcacaatgtgaaagacctgtaacttctcatgatgcataacaggacatactgtgctgag

SEQ ID NO: 4530 - DNA, 406 bp, Glycine max
  Clone ID: LIB3073-013-Q1-K1-A6
gagagttaagttgagaacataccaatctacaatggacgatgattctcattatctccctcattttttctcttctctctttctcccatgcttctgtcctagatttctgtgttgcagattatgcaggtcctattggacctgcaggatattcctgcaagaagccttcaaaggtcacagcagatgattttgcttacagtggccttggcattgctggtaacacctcaaacattatcaaagctgcagtgacccctgcatttgatgctcagtttgctggtctcaacggtcttggcatttccgcagcacgtttggacttagcagcaggtggagttataccacttcacactcattctggagcttcagaattacttgttgtaattgaaaggagcatcctagctggattcatttcttc

SEQ ID NO: 4531 - DNA, 419 bp, Glycine max
  Clone ID: LIB3073-013-Q1-K1-A9
gacgcacttagcaatcaatcaaaacattcccaatagcgataatatacacatcttgaattaagctccttctcctatagccatggctctttctaagcttataattgcttcccttcttgcgtcgcttctccttcttcatttcgttgatgctgatcaatcggcacatgcacaaacgcaggggtctcttcttcagcagatagattgtaacggagcatgtgctgcgaggtgccgtttatcatctcgtccacgcctctgccaaagagcttgtggaacttgttgtagacgctgtaactgcgtgccacctggcactgctggaaaccaagaagtgtgtccctgctatgcaagtttgactactcatggtggcaaacgcaagtgcccttagacttaattggaccactatcctatgcatgccttagatttat

SEQ ID NO: 4532 - DNA, 422 bp, Glycine max
  Clone ID: LIB3073-013-Q1-K1-B11
gagggtttgtaactttgtcttttgcttgcgagtctgaatcgaataataatcaatcaatcatcatgtcgtcggcgaagaagatcacactgaagagttcggacggcgaggctttcgaggtggacgaggcggtggcgctggagtctcagacgataaagcacatgatcgaggacgactgcgccgacagtggcatccctctgccgaacgtgacgagcaagatcctggcgaaggtgatcgagtactgcaagaagcacgtcgaggccgcgaatcccgaagacaaacccttcgaggacgatctcaaagcctgggacgccgatttcgtcaaggtcgaccaggccacgctcttcgatcttatcctggctgcgaactacttgaacatcaagagcctgctggaccttacatgccaaactgtagccgacatgatc

SEQ ID NO: 4533 - DNA, 381 bp, Glycine max
  Clone ID: LIB3073-013-Q1-K1-B12
ggaagcttcaataagtaagtatcaatggcttgcgaagaatcccagaacaagccccccagcgagcagtccactaccgaactcatcacgagcgcgaagctggtggcggaggcggcgcagtcggctctgaagagcgacagcgacaaagtggacaaggccaaggtggctgacgctgccggcgatcttctcgacgcggcggggaagtatggaaaacttgatgacaaacaaggcataaggcaatatgttgacaaggttgctgattatctgcataattaccagggtgataataccactgctccttcacagcctgcagagtctaaaggtgaagaaagtggtggtgggttaggtggtcttgcaaactttgctggaggcttcttcaaaaag

SEQ ID NO: 4534 - DNA, 411 bp, Glycine max
  Clone ID: LIB3073-013-Q1-K1-B2
ggcaaaactaagtggaataagagctgaaaaaccgtaataacaatgggaggaaaatgtccgcacaggaacgtgaagaagagaagatattctcacaagaccgcgcggcgaaccaaatttgagctgaaaggggacgacatggtttatgcgcagctcaacaaacccgatcaagagagaccccctttacccgtcgacgaagatttgcctgggatgggccagtactattgccttcactgcgatcggtactttgccaatataactgtgagggatgagcactttaagaccaaacgacacaagaagcgtataaaacaaatgatgggtcctgcaccacatactcaacttgatgccgatttagcttctgggatgggtatgccagacaatggaccaaagctaatgtctatgtaacttcttttt

SEQ ID NO: 4535 - DNA, 413 bp, Glycine max
  unsure at all n locations
  Clone ID: LIB3073-013-Q1-K1-B3
ngagcgccaatgtttttttcagaggagtttcatcgtgtaatcaaaagagtttatcttatagtaagaaatcgatgtcttactccattttaaggaacaaaacaagagaacaatagcctgacaaagggtttagccataaaatcgaatccatcattgatttgagatattgataaggtgaatactcatttctcgtcaatgctaggcataatgcgggtatagggacctaaaaaagattatcttttcttcctatcttatgaactttaaggtgtatgaagtgtcatttcctatcttagattttaattttagtaggtagataaagagtccatttaacttaagttgatctaggccagaagcagacctacgtcaagataatccttctttgaaacactttggtagtgctcttagattgtaatcaa

SEQ ID NO: 4536 - DNA, 405 bp, Glycine max
  Clone ID: LIB3073-013-Q1-K1-B5
ggtgcctctcgtctccctttgcacaaaccctaacacctaaaagccagaagaagcgaaatcgtaatcgcaatctagcggatatgaaggtcgtcgctgcatacttgctcgcagtgttgggagggaatccatctccttctgccgatgatatcaaaaacatcctcggcgcagttggagctgaggctgagcatgagttgattgagttgctcttgaccgaagtcaagggcaaagacttcaatgagctacttgctagtggaagtgaaaagatttctgcagtggctggtggtggtgcagcggttgctgttgctgctgcaccagcgggaggtgctggtggcggtgctgcacctgctgccgaagcataggaagaaaagaaagtagaggagaaggaggaatctgatgatgatatgg

SEQ ID NO: 4537 - DNA, 337 bp, Glycine max
  Clone ID: LIB3073-013-Q1-K1-B6
gaagcttcaataagtaagtatcaatggctttcgaagaatcccagaacaagccccccagcgagcagtccactaccgaactcatcacgagcgcgaagctggtggcggaggcggcgcagtcggctctgaagagcgacagcgacaaagtggacaaggccaaggtggctgacgctgccggcgatcttctcgacgcggcggggaagtatggaaaacttgatgacaaacaaggcatacggcaatatgttgacaaggctgctgattatctgcataattaccagggtgataataccactgctccttcacagcctgcagagtctaaaggtgaagaaagtggtggtgg

SEQ ID NO: 4538 - DNA, 262 bp, Glycine max
  Clone ID: LIB3073-013-Q1-K1-B7
cgataagacaacacaacggagttctagtgtgtgattgttagttgtcagtactggttgttcaactctagatgatgtgcgtcagcgagcagtccactatctgaactcatcaatgtctcgatgctgtggtcactggcgttgcagaagcttctgcacatccaccgacacctagctgacgctgccagatgtgctcacacttgcgctacatcttagtcaaccactcaccgaaaccttggtcatcttgattaccaactgtgcatgctgc

SEQ ID NO: 4539 - DNA, 423 bp, Glycine max
  Clone ID: LIB3073-013-Q1-K1-A1
gactcacgttacacaacgcatacacatacattgcggaagcactttcgtctcggaaggcgttctttcgagttatcgcacgcttaaaggacgcacgtgtgctgctgatgcgcatgcctgacatgagtgcaccaatgatacagctagccgggtcatgcaatgacggttatgagaacctagcacactgcctatattacctgatgcacggtggacatgatccagaatcgcgctgtagcactgtgaggaacattccgggctgtgccatgaccacctttggcaaacagaccgtgagcgaatgtccacagcaagctgctaacaactatggcatcaacgacgaatacgctcaagcacttgccggccgctgcaatgtactcgtccgttacaagatcatgcgatccagcaactgcgactccatcaagttctaaa

SEQ ID NO: 4540 - DNA, 404 bp, Glycine max
  Clone ID: LIB3073-012-Q1-K1-G4
gattgctacatagggctatatagcataaacatttgagtcttcattgcacaatgtcaacctcttccataaacgggtggtgcctctcttccatctccccagccaaaacctctctcaggaaggccacattacgcccttccgtcttcgcaacccttaacactccttcttctccttcctcttcatcttccttcccctctctcattcaagacaggcctgtttttgctgcccctgcccccatcatcaccccaactgtgagagaggatatggcaaaggaatacgagaaagctattgaagaacttcagaaattgttgagggagaagagtgaactcaaagcgacagctgctgaaaaagtggagcagataacagcttctctagggacatcatcatctgatggcatcccatcatca

SEQ ID NO: 4541 - DNA, 402 bp, Glycine max
  Clone ID: LIB3073-012-Q1-K1-G5
ggaagacatagaagagaagaagatggtgatgggcatttcatctccatcttacaagctgaaattccttcgtcctcgccaacttgaacctctttctttgactccgccatcatcttcattcagagcgttggagttgaaagagaaggttcagcctctgatcccatggccggtgtctccctttacaaacctaaatcctacgaattccctctcttatgctcttcaagacggcaaaattcgcctcgaaatcgatttcccgtatataatataatataattacattcactttcactttctgcattttagtcttttgacattctttcctgatttgtccttgtgcttttgttagcaggcctttgcccagtaacatttcttcttataaggtactattctcttcagtgcagtccg

SEQ ID NO: 4542 - DNA, 407 bp, Glycine max
  Clone ID: LIB3073-012-Q1-K1-G6
gaactatgatggatctagcactggacaggcaccgggtgatgatagtgaagtaatcctatatcctcaagcaattttcaaagatcctttccgtggtggtaacaatattttggtcatttgcgattcttacaccccacaaggtgagcctatccctacaaacaagagacacagagctgctgaaattttcagtaacccaaaggtccaagcagaagttccatggtatggaatagaacaagagtacaccttacttcaaacaaatgtgaaatggccattaggttggcccgttggtggctatcctggtcctcagggtccttattattgcagcgctggggcagacaagtcatttggacgtgacatatctgatgctcattacaaggcttgcttatatgctggaattaacatcagtggta

SEQ ID NO: 4543 - DNA, 402 bp, Glycine max
  Clone ID: LIB3073-012-Q1-K1-G8
caacataggtcatcgaaaggatctcgaagacccaccaacgcacgaaagccgggatctttcagaaaatggattcctattcgaagggtgcataaccgcatggataagctcacactaacccgtcaatttgggatccaattcggttccttaggaggtatcgggaaggaattttggaatgtaataatatcgattcacacagatacagaagaaagggttctctattgattcaaacgctctacctacgagatagggatagagaaagaggaaaaaaccgaggatttcacatagtacttttggtcgaaaaatcgatctgatttttttcgtacttttcgctcaatgatgaaatgggtcagattctacaggaccaaaccttgtgggagttaaagaatgatggaagaaaagaaa

SEQ ID NO: 4544 - DNA, 407 bp, Glycine max
  Clone ID: LIB3073-012-Q1-K1-G9
tggcacaagtgagtttgttgatcgagataactagaaacagtgtgatgaaaatgaaggtccttgttttcttcgttgctacaattttggtagcatggcaacgccatgcgtacgatatgttccctctccgaatgaacactggctatggtgcccgtactccggaggtgaaatgcgcaagttggaggcttgctgtggaagcacacaacatctttggctttgagaccattcctgaagagtgcgttgaagcaacaaaggaatacatccatggcgaacaatatagatcagactccaaaacagttaaccaacaagcttacttttatgccagagacctcgaagtccatcccaaggacacatttgtgttcagtatagatggcaccgtactctctaatattccatactacaaaaaacat

SEQ ID NO: 4545 - DNA, 422 bp, Glycine max; identical to SEQ ID NO: 90
  Clone ID: LIB3073-012-Q1-K1-H1

SEQ ID NO: 4546 - DNA, 414 bp, Glycine max
  unsure at all n locations
  Clone ID: LIB3073-012-Q1-K1-H10
gatacatgagataagccaattgtgataagccattcactcaggtgaaaagaaaaaaaaacatatagtaacaaaaccatggtgattcacagactcgaattgtgcataaacatggttcaactcgccatagagttcgtcgtgagcgtcgcggaaacagtggtcatagttcagcagagaaccgtggagcctctcggaatgttgaatcgcgcaagtacacctcttcctttctatggctacctccgttgaatgttgaagagcatcgcttgattaattactttctagctntcttttcttctatgaaattccgcaatttttatagaccctgtgttttctttccttttgggtgcatcaagcgctgattgatgcaaacccacgcgagtngctgntgtaagggaaattgatgccctnggttttttt

SEQ ID NO: 4547 - DNA, 332 bp, Glycine max
  Clone ID: LIB3073-012-Q1-K1-H11
tgatcttacctcagcaccatcaatactataggctggcccatgagaagcttcgagaacgaccgccaatacaccctatcatcgtcacagagccattccatagacgtgtgcggtgaaggccctatcgctacagatcgagaacctagccatgtccggaggaaggcttctacctccggcttggaaaccggcgagactgccgtcgacggctcccgccgctatggcgccgaaagacgaaccctacgaaagcatcgtgctgcgacatacagcggagcttctaaccgcactacattgtacacttagaagctacatgacgatactgagcgtctcgctaatga

SEQ ID NO: 4548 - DNA, 373 bp, Glycine max
  Clone ID: LIB3073-012-Q1-K1-H12
ttggatagcagcatcatacaaagcattgaattcaaagaactaagttcatttcttgtgctttgctttattcctcaaaaccaaacatgtcgaacacatgcggcaactgtgactgcgctgacaagactaactgcaccaagggaaacagctatggtgttatagtagagactgagaagagctacatcgagactgttgacatggatgttccagcagctgagcatgatgggaagtgcaagtgtggcactaactgcacttgcacggactgcacttgtggccattaaggaatatggatgaaaatgtaattgccatgtgtttggcaatacaaatctccaaataatgtaatcttcgtatgaataaatgtgtgctgttatcctac

SEQ ID NO: 4549 - DNA, 363 bp, Glycine max
  Clone ID: LIB3073-012-Q1-K1-H2
ggcacaagtgagtttgttgatcgagataactagaaacagtgtgatgaaaatgaaggtccttgttttcttcgttgctacaattttggtagcatggcaatgccatgcgtacgatatgttccctctccgaatgaacactggctatggtgcccgtactccggaggtgaaatgcgcaagttggaggcttgctgtggaagcacacaacatctttggctttgagaccattcctgaagagtgcgttgaagcaacaaaggaatacatccatggcgaacaatatagatcagactccaaaacagttaaccaacaagcttacttttatgccagagacctcgaagtccatcccaaggacacatttgtgttcagtat

SEQ ID NO: 4550 - DNA, 425 bp, Glycine max
  unsure at all n locations
  Clone ID: LIB3073-012-Q1-K1-H3
gacaactccaacaaggcattgtttggtttggtttggttacttgaaaatctcgaatcgcttaattttgatttagttttccaccgcaacgcggaacctctttctcgaactggctaactctcaggcaagtggctcggacgctgattccagcaacacgcggctggtggttgcactgtatgacgccctaaactccggcgactccaacgccgtcgtcaagatcgtcgccgccgacctcgagtggtggttccatggtccgccctctcaccagtttttgatgcgcatgctcaccggcgactccgncgncgacaactccttccgattcgttccgcagtccatcgccgncttcggctccaccgtcatcgtcgagggctgcgacttccgccgcaacattgcctgggtccacgcctggaccgtcactgatgggatga

SEQ ID NO: 4551 - DNA, 362 bp, Glycine max
  Clone ID: LIB3073-012-Q1-K1-H4
gacacatcacaacaacaacaacaacaaataaagacggaaactacttccttctctcctttgctgtgttttctttctcaaaaatgggtcgtacctatgttcttatgatggttgctgcattgctggtgagctccaccatggctcaatctccagcttcgtcgccggctttgtcccccacccacacgccggtggccactccacctaggagggcgttgtcgacgtctccgtcgtatgtgtcaccagcggcttcacccgccaccggaaattctcctccggcgccacctacttcttctccttcggaatcgccacttgcatcaactgctactcccaacatctgtgcctcgaccatctcgactccgacatct

SEQ ID NO: 4552 - DNA, 426 bp, Glycine max
  Clone ID: LIB3073-012-Q1-K1-H5
ggagggacacaaaaaattctctcttttctctgagtcgcagcttttacgttttcctaattctttgtccttagcatcaccatctccatggccaacaccaaacacctcacatttactttcaccatcgttctcacgctcctcttctcattcgccacagcaaaatccccaacggctttgggtgtccagaaggagaagctcagccaccttcacttcttcttccacgacatagtgagcggtccaaagcccaccgcggtgagagtggcccaggcccacatgaccaacaccccctccacgcttttcgggctcctgatgatggccgacgacccattgaccgtgggccccgagcccgggtccaaactcgtgggaaaggcccaaggaatttacggatttgcgtcccaggaagatatgggtttattgatgatcatgaat

SEQ ID NO: 4553 - DNA, 400 bp, Glycine max
  Clone ID: LIB3073-012-Q1-K1-H6
gatattcaaaaaaaaaaataataaataaaaaaattaagagccataattagaattctgtatgatatttacgtttacggcgtgtgataaaaagatactatatagaactaaaggagattcccgtttcagttacattcaattcaacgattgaccaaaagagaattcaaaaaataacatttagatcacccaaattccaatatttctatgaaacaataattaaatctaacgaatttatttcgattgattgtatccatatggggtaataataaaagggggaggagagcttaaaaaaacaagataacaaataaagtataagtgcggggggtcaaactgggtgtatataatcggatcactataagacaaacttttcttttgagggtttcaaaaaatgattttcgaattc

SEQ ID NO: 4554 - DNA, 282 bp, Glycine max
  Clone ID: LIB3073-012-Q1-K1-H7
gtatattcaaaaaaagaaataatagataaagagatggagatccataattagaatgctgtatgatatttacgtttacggcgagtgataaaaagatcctatatagaactcagggagattcccgtgtcagttacattcaatttaacgattgaccaacagagaatttaaattataacatttatatcactcaaattccaatatttctacgacacaataatgaaatctaacgaatacatttcgattgattgtatccatatggggtaataccaaatgggggaggagagc

SEQ ID NO: 4555 - DNA, 439 bp, Glycine max
  Clone ID: LIB3073-012-Q1-K1-G3
aagacgacagaaggggaaggcaatatatattcaaaataaaacaacaatcagttaggagtgttgagtaagatcaaaatatggcagacttgatgaaaagaatcctcgaaatgattgaggccgagcaagctaggaaagggtccaatcatggtacctcaaactcacataacacctatggcagcggaagccagaatggatcaaccatcaacagcggcaatcatcataacaacggcaactggtatgacgactcataccactatggtgaacgccctatttataacgacggtactttcaatggtaatggcaacggggcacatgttgagggtggctttgactcctcaacaaggaactactatggtcgccgttatggttattaattatctgtatttgatatatagtatatgctgggcaacatcatatagcatgttatgttgtactaccc

SEQ ID NO: 4556 - DNA, 400 bp, Glycine max
  Clone ID: LIB3073-012-Q1-K1-E9
tgaaattggagatggtgcctcttatcataatatgggtggctgtgaagaacatccgacctcgtgcactgacaagagctgcaaaggtcatgaagttgacattatgcacttttcaataggaagtgccattccaggacgactttacggtggcaatcccctagacaatagatatggaaatggcggcgataggtttggtcacttggttgatctatatgcttggaatccacattgcagatacttggatggaattggtcctccaggttctgctaatgattcaagtgcgcagaatgactggaaaggtgcttggtggcatagcagcttcacagttcactcaggattcgtagaggatgagagtccatatgcagataatggaaaaaagggcacttacttttttgaattctcg

SEQ ID NO: 4557 - DNA, 87 bp, Glycine max
  Clone ID: LIB3073-012-Q1-K1-F10
tggggttacaaagagggagggtgcccgaacgaacgcgcggtgagtagttcaatgaatgaatgaataatcaaaaccgattttgataat

SEQ ID NO: 4558 - DNA, 409 bp, Glycine max
  Clone ID: LIB3073-012-Q1-K1-F11
aagacgacagaaggggaggacaactttgcctctagccagatattttggctattgaaagaaagtgagctaactcctagtaatgccaatatattggatggtcgatatgccgtctttggctatgtaacagaaaatgaggataacttggcagatctcaaagttggtgatgtcatagaatccattaaagtagtttctggcctggataatttggtgaatcccacctacaagattgctggctagttctgtgcttttgctatcaaatactgcatgagtgtttatttggcacttgcttcaaggctatattcaggaatgctggctattacattgctaagttcactcccccctggtttgtttccattgctattggaaaaagccattaatcattttactagaacctagcattcagttaaac

SEQ ID NO: 4559 - DNA, 413 bp, Glycine max
  Clone ID: LIB3073-012-Q1-K1-F12
gacaccaacaccaaaacaaaggcactaagatggcttcctttgtatccttcctagtgctgcttcttgcagcccttatcctcatgcctcaagggcttgcttccttactacaaaccaattaagaagccaccagtgtacaagcctccagtgtacaagccaccagtgtacaaaccaccggtttataagccaaaaccaccggtttacaagccgaaaccaccggtttacaagccaccatataagaagccaccatacaagaaaccaccttatggaaagtaccctccagtagaggacaacacccatgcctaaagcaagcaatgaggtctattatctacttaataaataagaggaactgctttgtgttttctagcattgtgatttacaacttcgtagcaatgcatattcttgactcttgcatg

SEQ ID NO: 4560 - DNA, 425 bp, Glycine max
  Clone ID: LIB3073-012-Q1-K1-F2
gaagggaagaaagaaactacagaaaagaaatggcttccacttctgcagtttcaatggctatgccagtaacttatgctagccagaagagggtggtgcctagctcggatgcattcttcaagccactgcctctacggtcttccaaggcagtgacagcatcaaaactcaatggaaggtttcaagtgagggcctccatgaaggagaaagttgtgacggggctcaccgcagctgcattgacagcttcaatgatggttcctgatgtggctgaggctgccgttacaccttctctcaagaacttcttgctcagcatcgcggcaggtggagttgttgttgttgccattattggtgctgtgatcggtgtttccaatttcgatcccgtcaagcgtagctgatggagttctgaggcacttgtgtttaattaatttttt

SEQ ID NO: 4561 - DNA, 395 bp, Glycine max
  unsure at all n locations
  Clone ID: LIB3073-012-Q1-K1-F3
gaaaaaaaagaaaaaaagattctaaagaaatataactaatattctttagaataatcaaaaagaatattaaattcaaataaattttagatagaaaaaagacttaaaaaggaggatttgaaatgcgagatctaaaaacatatctttccgtggcaccagtagtaagtactctatggttcggggctttggcgggtctcttgatagagatcaatcgtttttttccagatgcattgatattcccttttttttcattctagttattgacacggaaaggggtgaagaagattatagatccaattaagtattaaatatatgtaattaatatgtaattaatctcctcttctttatttcgtcttttatntcttcttttttttacaattgtnatagaataaggttag

SEQ ID NO: 4562 - DNA, 409 bp, Glycine max
  Clone ID: LIB3073-012-Q1-K1-F4
ggcacaagtgagtttgttgatcgagataactagaaacagtgtgatgaaaatgaaggtccttgttttcttcgttgctacaattttggtagcatggcaatgccatgcgtacgatatgttccctctccgaatgaacactggctatggtgcccgtactccggaggtgaaatgcgcaagttggaggcttgctgtggaagcacacaacatctttggctttgagaccattcctgaagagtgcgttgaagcaacaaaggaatacatccatggcgaacaatatagatcagactccaaaacagttaaccaacaagcttacttttatgccagagacctcgaagtccatcccaaggacacatttgtgttcagtatagatggcaccgtactctctaatattccatactacaagaaacatgga

SEQ ID NO: 4563 - DNA, 350 bp, Glycine max
  Clone ID: LIB3073-012-Q1-K1-F5
gaaaaaaaaagaaaaaaaagattctaaagaaatataactaatattctttagaataatcaaaaagaatattaaattcaaataaattttagatagaaaaaagacttaaaaaggaggatttgaaatgcgagatctaaaaacatatctttccgtggcaccagtagtaagtactctatggttcggggctttggcgggtctcttgatagagatcaatcgtttttttccagatgcattgatattcccttttttttcattctagttattgacacggaaaggggtgaagaagattatagatccaattaagtattaaatatatgtaattaatatgtaattaatctcctcttctttatttc

SEQ ID NO: 4564 - DNA, 392 bp, Glycine max
  Clone ID: LIB3073-012-Q1-K1-F8
gaacctcaaaaagagttctttcaaaatgcagacagccttaaccttcgctgcccccaacgttgtgccattggcacccacaaagagtgtctaccatattaccatctttcccaccaaattgaaagccccgcgctcctcacctcgttactctccgattagggttgcaaccgtggagcccgacacttcaactgtcgactacaactctgcgttctcagtgtttcctgcataagcatgcgaaactgtaagaggggaagcctgcatggcagagatgtaccctgaaacgaagctacagccagaggctaagactccacgagtcgttacagagaacgttgagagagagtatctggaatacgatgatcctaaaacggtatttcgaggagaggcttgtgatgatc

SEQ ID NO: 4565 - DNA, 400 bp, Glycine max
  unsure at all n locations
  Clone ID: LIB3073-012-Q1-K1-F9
tgcttcacagaaacatcgagcagcagaagaaagaaactacagaaaaaagaaaaaagacatggcttccacttctgcagtttcattggctatgccagtaacttatgccagccagaagagggtactggtgcctagctctgatgcattattcctcaagccactgcctctacgttcttattcttccaaggcaacggcagcatcaaaagtacccaatggaaggtttcaggtgagggcttccatgaaggagaaagttgtgacaggcctcacagcagctgcattcacagcctcaatgatggctcctgatgtggccgaggccgccgtttcgccttctctcaagaacttcttgctcagcatcgccgncggtggtgttgntggtgctgccattatcggtgcggtggtcggg

SEQ ID NO: 4566 - DNA, 413 bp, Glycine max
  Clone ID: LIB3073-012-Q1-K1-G11
tggcagttcaattccaatatattccattctctctgtgtatttccctacctctgccttcaagatgcagatcttcgtcaagaccctcaccggcaagaccatcacccttgaggtggaaagctctgacaccatcgacaacgtcaaggccaagatccaggacaaggaaggaatccccccggaccagcaacgtctcattttcgccggaaagcaacttgaggacggccgtacccttgctgactacaacattcagaaggagagtactcttcacctcgtcctccgtctccgtggtggcatgcagatcttcgttaagacactcaccggcaagaccataaccctagaggttgaaagctccgacaccatcgataacgtcaaggccaagatccaagacaaggaaggtattcccccggaccagcaac

SEQ ID NO: 4567 - DNA, 308 bp, Glycine max
  Clone ID: LIB3073-012-Q1-K1-G12
tgtggcactcacaactccataacacaaggcagaaagcaagctcatcctagagttttaaaaatggcagcagcctcctccatggctctctcttccccatccttggctggcaaggccgtgaagctgggcccatcagcccccgaagtcgggagggtcagcatgaggaagaccgtcaccaagcaggcctcctccggaagcccatggtacggcccagaccgcgtcaagtacttgggcccattctctggcgagcccccgtcctacctcactggcgagttcccaggtgactacggctgggacactgctgggctttc

SEQ ID NO: 4568 - DNA, 376 bp, Glycine max
  Clone ID: LIB3073-012-Q1-K1-G2
gatccatctttttcttcttactctagactcttgcttttctcttctctgtctaaggggtgccctgagatcacattgaacaatggtgaaggctgtggccgttcttggcagcagtgagggtgtcactggaactattcacttcgttcaggagggaagtggtccaaccaccgtaactggatctcttgctggtcttaagcctggtctccatggtttccatgtccatgccttgggggacactaccaatggttgcctctcaactggatcacatttcaatcctaataacaaggagcatggtgcccctgaggatgagaatcgtcatgctggtgatcttgggaatgttaatgtcggtgacgatggtactgtcagcttcactattact

SEQ ID NO: 4569 - DNA, 406 bp, Glycine max
  unsure at all n locations
  Clone ID: LIB3073-012-Q1-K1-E8
ggttctagtgtgtgattgtttgttgttgtaactcgttcttcttcttttgttgttctgtgtttgtgtttgttttttctctcacctgaaaatgtcttgctgcggtggtaactgtggttgcggaagctcctgcaagtgcggcaacggctgcggaggctgcaagatgtacccagacttgagctacactgagtcaaccaccaccgagaccttggtcatgggagtggcacctgttaaggctcaatttgagggtgctgaaatgggtgtgcccgctgagaacgatggctgcaaatgtggaccaaactgctcctgcaacccctgcacttgcaagtgangtgttgggagagcaagcttcaagcagagatagcccttaattaggaataatgantaactaataaatgtgtagcttaaa

SEQ ID NO: 4570 - DNA, 315 bp, Glycine max
  Clone ID: LIB3073-012-Q1-K1-D1
ggttgccttctgttgtgttgtgtgtgcataaacaaaacaaaaacaaagagcgtttcaattgctatctcccacaaacatctatagttaagatctgcgttaaccactaagatctctgaagcagagggcattgtctactgtcacaggcatgggtgaagaaaagaaagacgaaggaaacaaagaagaagccaaggaggaaaagaaggaagaagagaagaaggaggagccaccaccggagatagtgctcaaagttgatatgcattgtgaggcctgtgcaaggaaagttgcaaaagcattgaaaggattccaaggagtgga

SEQ ID NO: 4571 - DNA, 377 bp, Glycine max
  Clone ID: LIB3073-012-Q1-K1-D2
gaaggcacagggaaagcagcagaagcagaaaagatagagtgcggtgaagaaagatgtcgaatttgcagttacagattcactctcctccaccatcactcttatcatattcatcatcatcactatcctcttcttcttctcttaagctattcccaaaccaccctttctcctcaaagtcccttcctttcaacactcctaaacccttctccctcagatgccgtcactctgacctcttcgatcagaacaccttagcctctacaccacgaccaacgagaccctctgcttcagttggagctttgccgcctagggtttatgttggttactccatttacaaagggaaagctgcgcttacatttgactctaggccccccgaaatcatg

SEQ ID NO: 4572 - DNA, 379 bp, Glycine max
  Clone ID: LIB3073-012-Q1-K1-D3
ggttcaagggactgatcaggatcgtttgatcctccacatatctgaatcgtggctggatgaacgaatgcaaatgcagctggaagcaggtcagaatggttttacggacaaatccatagtcgataaactaagtcttgaaatagagactttccttaaagctaaacaaaatagtaggggttcagaaaatgttgcagtaaggaatcgccgtaattccttggaatctgtaccattgaatgatcgtgtcagtgcaccacaagaggttggtgatgacgatgattctgtgggcagtgattcaaattgttttgagttgaataagccaagcaacaagggatctaaagtatatggagaagagcctgtcgacaaaatttttaaagagacatcg

SEQ ID NO: 4573 - DNA, 409 bp, Glycine max
  unsure at all n locations
  Clone ID: LIB3073-012-Q1-K1-D6
gcctctcacgcagtgtctcactcaccccagtcacaccatggaggttgctacagcagcttctagcttcgcactcaacaagcccatgctggcattgccctcttcatctcgaactgtaaccccaatcagatgcatgaacacctccacctcccccgtcaggacctctctctctaccagcttcgtcgctccttacgccggaatctgcagcgcgtctagccctttctccggccacaagctccgtccctcctccctcaatccggcgtcgtttcttggctccaacgctaaacgaggcgtcgttaccatggttattccttttcaacgaagaagtgcatgggagcaacctncacccgacttagcttcttacttatacaaaaatcgaattggttatttgggcatgtctctggttccatct

SEQ ID NO: 4574 - DNA, 393 bp, Glycine max
  unsure at all n locations
  Clone ID: LIB3073-012-Q1-K1-D8
gataccaaaaacaaaacacaagccaagtgaaagtgagaaaaaataaaaatcaaagagcataatgtcagggatcattcacaagattggggagacccttcatgtgggagggcacaagaaggaggaggagcataagggtgagcaccatgctggagaatacaaaggggagcaccatggtgagcacagtagtgagtacaaaggagagcatcatggtgaacacaaagctggagagtaccatggtgagcacaagccagagcacaaagaggggttcctagacaaagtcaaggacaagatccatggtgaaggcggcgccgncgagggcgagaagaagaagaaggagaagaagaagaaagagcatggccatgagcatggncatgacagcagcagcagcagtga

SEQ ID NO: 4575 - DNA, 409 bp, Glycine max
  Clone ID: LIB3073-012-Q1-K1-D9
tgtgataccaaaaacaaaacacaagccaagtgaaagtgagaaaaaataaaaatcaaagagcataatgtcagggatcattcacaagattggggagacccttcatgtgggagggcacaagaaggaggaggagcataagggtgagcaccatgctggagaatacaaaggggagcaccatggtgaacacagtagtgagtacaaaggagagcatcatggtgaacacaaagctggagagtaccatggtgagcacaagccagagcacaaagaggggttcctagacaaagtcaaggacaagatccatggtgagggcggcgccgtcgagggcgagaagaagaagaaggagaagaagaggaaagagcatggccttgagcatggccatgacagcaacagcagcagtgacagtgattaaact

SEQ ID NO: 4576 - DNA, 392 bp, Glycine max
  unsure at all n locations
  Clone ID: LIB3073-012-Q1-K1-E11
ggcacacgccaacgcacacgccacgcacaacacaatctcagctccagccttcctcttcttttcttttttttctctcccttccgcacccaagagagagaaagacgctgctagagaagaagaatatggcgggtgctgctcccaaacaattgttcggattcggagttgtggcgatgctcgccactctcattcttgctctctttatgcccgccgctgttcaggctcaatccgcatcccctgcacctgcacctactagcgacgggacctcccttgatcaagggatagcatatgtgttgatgctgctggctctggtactcacatacatcatccattcgccctaaatttcctncaccttctgaacttagagcagaaaggggtatgggtgtttgataggg

SEQ ID NO: 4577 - DNA, 425 bp, Glycine max
  unsure at all n locations
  Clone ID: LIB3073-012-Q1-K1-E12
tttgaagggggttctagtgtgtgattgtttgttggtgtaactcgttcttcttcttttgttgttctgtgtttgtgtttgttttttctctcacctgaaaatgtcttgctgcggtggtaactgtggttgcggaagctcctgcaagtgcggcaacggctgcggaggctgcaagatgtacccagacttgagctacactgagtcaaccaccaccgagaccttggtcatgggagtggcacctgttaaggctcaatttgaaggtgctgaaatgggtgtgcccgctgagaacgatggctgcaaatgtggaccaaactgctcctgcaacccctgcacttgcaagtgangtgttgggagagcaagcttcaagcagagatagcccttaattaggaataatgataaactattaatgtgtagcttaaaacttatgtatt

SEQ ID NO: 4578 - DNA, 332 bp, Glycine max
  Clone ID: LIB3073-012-Q1-K1-E2
gacacctacaccaagacagacccactaagatggctgcctttgtatccttgctagtgctgcttcttgcagcccttatcctcatgcctcaagggcttgctacttactacaaaccaattaagaagccaccagtgtacaagcctccagtgtacaagccaccagtgtacaaaccaccggtttataagccaaaaccaccggtttacaagccgaaaccaccgggttacaagccaccatataagaagccaccatacaagataccaccttatggaaagtaccctacagtagaggacaacacccatgcctaaagcaagcaatgacgtctattatctacttaa

SEQ ID NO: 4579 - DNA, 395 bp, Glycine max
  Clone ID: LIB3073-012-Q1-K1-E3
gacaagataaagagaatggttgttccagatgctctgaaggtgttgagacttcagaaaggacacaagtactgcatactgggcaggttgtcatctgaagttggatggagctactatgataccatcagggagctagaaaagaagagaaaggaaaaggcacaattggtttatgagagaaagaagcagctcaacaaattaagggtgaaagccgagaaggttgctgaagacaagctcggctcccaacttgatattcttgctccagtcaagtactgagtagtctatgtttttaaatttttttatgcaacttatacccaattgaagctacctttcagttttgcttggtattggctatgaagtattgacaccgattcagacaccggacacggacacgttgacac

SEQ ID NO: 4580 - DNA, 382 bp, Glycine max
  Clone ID: LIB3073-012-Q1-K1-E4
gacctcaagcataacttgcatagactattgattaagaaagctattgtcattgatttgctagctccaacaatgggttctagcagattatcattcattttagtacttgtgcttgtaaccttttcatccatgatcattgactcaagggttgcagaggcacgtaccctgccaaaatcagccttattgccttccaaagttgatatacctactgttgttcctcttccactggtggcaccactgccaaatttgcctgttactctccctccagtgcctgaactacctgcagtacctaaagtaccaattcctgaagtaatagttaataacgccaaaataatcccttgagtacctatgatctatccagtcactactacttattttgtcactt

SEQ ID NO: 4581 - DNA, 408 bp, Glycine max
  Clone ID: LIB3073-012-Q1-K1-E5
gacagaaagccatggcttctctggcaagcttagctgttgttcaaccatctactgttaagggccttgctggaactaagctctctttcaagccctctcgccagagtttcagacccaagaatttcaggagtggtgctgtggtagcaaagtatggtgacaagagtgtgtactttgatttggaggatctaggcaacactactggtcagtgggacttgtacggctccgatgcaccttcaccctacaaccctcttcagagcaagttcttcgagacatttgcctctccattcacaaaaaggggattgttactcaagtttttgatcctgggaagtggttccaccctggcatacttcagttccacagcttcaggtgacattctaccaatcaagaaaggcccacaacttccaccaaagc

SEQ ID NO: 4582 - DNA, 317 bp, Glycine max
  Clone ID: LIB3073-012-Q1-K1-E7
ggcacaagtgagtttgttgatcgagataactagaaacagtgtgatgaaaatgaaggtccttgttttcttcgttgctacaattttggtagcatggcaatgccatgcgtacgatatgttccctctccgaatgaacactggctatggtgcccgtactccggaggtgaaatgcgcaagttggaggcttgctgtggaagcacacaacatctttggctttgagaccattcctgaagagtgcgttgaagcaacaaaggaatacatccatggcgaacaatatagatcagactccaaaacagttaaccaacaagcttacttttatg

SEQ ID NO: 4583 - DNA, 405 bp, Glycine max
  Clone ID: LIB3073-012-Q1-K1-C8
gattgtgattcatttgcacatttggaaagtgttgtttttctttttttcatttgcattgcaaagcaaaaaccttgcaaattgcaatggcttccaacaaggttattgccaccatcttggttctttctctccttgcctactcaacatcattcaccaatgcatgtggcacatgccacccaaaacctactccttctccccctcctccatcagggaagtgccccaaggacacattgaagctaggggtgtgtgctgatgttctaggacttgttaatgttgttgttggttcccctgtctctagcaagtgttgtgcattgcttgaaagtttggctgattcggaggctgcactttgcctttgcactgctattaaggccaatgttcttggaatcaacttgaatgtgcctatcacac

SEQ ID NO: 4584 - DNA, 303 bp, Glycine max
  unsure at all n locations
  Clone ID: LIB3073-012-Q1-K1-B2
ggaaagaaagaaagaaagaaggaaccgatagaagcaaaaatggcgatgttagcatcaccaccatctgtgaaactctcgctctcattccccctgtcagcttccaaacccaaccctcgcagactcttcaccatccgagccgccgagcccgaaaccccaccctccggttcggaccaatcccaggccgaaccggacccctccgacgacaccttcgacgaccgcatcaaccagctccgcctccggtaccgcagcggcacggngaagaaagcggagctccgaaagaacaaaaaatcaaagaaaggaacc

SEQ ID NO: 4585 - DNA, 324 bp, Glycine max
  Clone ID: LIB3073-012-Q1-K1-B4
ggagcgaagaagatattagggtttttgagtgcggtgcggcgatcctagcactctcttctgcagctttcgccgacagcttcattcaccatggctgagcaaaccgagaaggcttttttgaaacaaccaaaagtgtttctcagctcgaagaaaactgggaagggaaagagacccggaaagggtgggaaccgcttttggaaatccattgggcttggatttaagactcccagggaagccatcgaaggaacctacattgacaagaagtgccccttcactggcaatgtttccatccgtggccgtatcttggctggaacatgtcacagtgct

SEQ ID NO: 4586 - DNA, 422 bp, Glycine max
  unsure at all n locations
  Clone ID: LIB3073-012-Q1-K1-B6
gacaactccaacaaggcattgtttggtttggtttggttacttgaaaatctcgaatcgcttaattttgatttagttttccaccgcaacgcggaacctctttctcgaactggctaactctcaggcaagtggctcggacgctgattccagcaacacgcggctggtggttgcactgtatgacgccctaaactccggcgactccaacgccgtcgtcaagatcgtcgccgncgacctcgagtggtggttccatggntccgcctctcaccagtttttgatgcgcatgctcaccggcgactccgncgncgacaactncttccgattcgttccgcagtccatcgccgncttcggctccaccgtcatcgtcgagggctgcgactnncgccgcaacattgcctgggtccacgcctggaccgtcactgatggga

SEQ ID NO: 4587 - DNA, 331 bp, Glycine max
  unsure at all n locations
  Clone ID: LIB3073-012-Q1-K1-B9
tgtgacaccaacaccaaaacaaacccactaagatggcttcctttgtatccttcctagtgctgcttcttgcagcccttatcctcatgcctcaagggcttgctacttactacaaaccaattaagaagccaccagtgtacaagcctccagtgtacaagccaccagtgtacaaaccaccggtttataagccaaaaccaccggtttacaagccgaaaccaccggtttacaagccaccatataagaagccaccatacaagaaaccaccttatggaaagtaccctncagtagaggacaacacccatgcctaaagcaagcaatgaggtctattatctac

SEQ ID NO: 4588 - DNA, 300 bp, Glycine max
  Clone ID: LIB3073-012-Q1-K1-C1
gaccaaaactaataacaaaaactacttgtaaatttttgtgatacgtctaccgttgttgttctcagtctaagatcaccgaggctttccttgttcaatcaaaacacaaaaatggaggggactgttttcactcctgcacttgaaggaattaagcttgtaaaatcagagcaaggagaaattttgacccagcctttcttggatgcttgcaagcatatactgcctgttatagacaagtttggagctgctatggcccttgttaaatctgacatcggtggtaacatatcgagattggaatctaagtat

SEQ ID NO: 4589 - DNA, 330 bp, Glycine max
  Clone ID: LIB3073-012-Q1-K1-C10
aggttctttcggagggggagcgccaaagtttttgtcagaggagtttcatcttgtgatcaaaagagttgatctgatagtacgaaatcgatgtcttactccattttaaggaacaaaacaagagaacaatagcctgacaaagggtttagccataaaatcgaatccatcattgatttgagatattgataaggtgaatactcatttctcgtcaatgctaggcataatgacggtataggggacctaaaaaaagattatctggacttcctatctgatgaacgttaaggtgcatgaagtgtcatatcctatcttagatattaattctagtaggtagat

SEQ ID NO: 4590 - DNA, 387 bp, Glycine max
  Clone ID: LIB3073-012-Q1-K1-C11
tcatcggcattgacgtgaactcgatcaagtccgtcaaaacggcatcgtgggggttgtccaatggacaagtggcggagattctcgttacctataatgccgccacgagcctcttggttgcttctctgatccacccttcaaagaaaacaagttacatcctctctgacacagtgaacttgaagagtaatcttcccgaatgggtgagcgttgggttctctgccaccaccgggttgcatgaaggctccgttgaaacccatggtgtgatttcttggtcttttgcttccaagttgtcagatggtagcagcaatgatgctttggatcttccaagctttgtgctcaatgaggccatctaacttcaaacatcgtagttaaatgtgacaaaagaaaaat

SEQ ID NO: 4591 - DNA, 297 bp, Glycine max
  unsure at all n locations
  Clone ID: LIB3073-012-Q1-K1-C12
ggcagacgctgtgactagacactcatctcactcgcgccatgttanggttactccttttgtttcgcaacatggttgccgctaagaaaactaagaagacccatgagagcatcaacacaggctcgctcttgtcatgaaaaatggcaaattcacccttcgttacagacccgtcttcaatcttttaaggacctccaagggaaattggataatcatggttaccactggccccctttgagaaaagcagaaattggatactaatccatggtggccaaaggtggaagtcattaattccatgggaac

SEQ ID NO: 4592 - DNA, 389 bp, Glycine max
  Clone ID: LIB3073-012-Q1-K1-C2
gaacaaccttttaagcacaacacatcacacagtgagagaggtatacgtacgaggatgtctgacattgctatgttggtggcggaggagtatgagaggagggtcaagagtttaagaaaggccggtggtggtggaaccggagcgggggaatttgacatggtttcttgtgtttcggtgatggtgtctaggctcaaggaaaagaagcagcttcttcaatgggtttgggagcccaagacccaagttgccatggctgctttcaacagcttcttctctgcttaaacaactcattcatcaactcctctggactctgacgtgcttggtgattgattgttgcaaccaattggtatctagtttttccatattctaattttcatgaaatattgtacatagct

SEQ ID NO: 4593 - DNA, 442 bp, Glycine max
  Clone ID: LIB3073-012-Q1-K1-C4
cgggaagacgacagaaggggacctcacccagttgcggaaagaaaagaccatcaaagtttcacttcagccttatccggtttagggtttcggtttttgacccaacctttgacgtatcgaaaccttaagtttcggatcaggtctgagcaatctggttggtagaacctttggtcttagagagtcaagttttatgtctgaattagacgatcaaattcctactgccttcgatccttttgctgatgcaaatgctgatgactcgggtgctgggtcaaaggagtatgtgcatattcgcgtacagcagcgaaatggaaggaaaagcctgacaaccgttcagggattgaaaaaagaattcagctataacaagatgcttaaagatgctaagaaagagttctgttgcaatggaacaggtgttcaggacccagaactaggacaggttattcaaact

SEQ ID NO: 4594 - DNA, 355 bp, Glycine max
  Clone ID: LIB3073-012-Q1-K1-C5
gaagaagaagaaggagcatggccatgagcatggccatgacagcagcagcagcagtgacagtgattaaactgctgcatcacctatatatttaaaaggtttatgggaccatagtagcgagggctgtgccttaatttctctctctctctctctctctctctctctctctctctttttcctttttccctatcttgtgatctatttatgagtgagaaaaacaaaagtgagaaattgtgcgtgtatctggttgctaattcgagtgctattagtctgtggtttggttggtttgtaaccccgctacttgggttatgtttgattgtatattatcctagagaaataaaaattttaaattatcaat

SEQ ID NO: 4595 - DNA, 426 bp, Glycine max
  unsure at all n locations
  Clone ID: LIB3073-012-Q1-K1-C6
ggcacaccaacaccaaaacaaacccactaagatggcttcctttgtatccttcctagtgctgcttcttgcagcccttatcctcatgcctcaagggcttgctacttactacaaaccaattaagaagccaccagtgtacaagcctccagtgtacaagccaccagtgtacaaaccaccggtttataagccaaaaccaccggtttacaagccgaaaccaccggtttacaagccaccatataagaagccaccatacaagaaaccgccttatggaaagtaccctccagtagaggacaacacccatgcctaaagcaagcaatgaagtctattatctacttaataaataagaggaactgctttgtgttttctagcattgtgatttacaacttcgtagcaatgcatattctngactcttgcatgcacttcaatcct

SEQ ID NO: 4596 - DNA, 411 bp, Glycine max
  Clone ID: LIB3073-012-Q1-K1-B11
tggtcttcgacgactacgagcaggaatgaaaactcaaaacggcggcgtttgaacgaaacgatcgcattcgcaggtcgcttcgcttcccctttctccttatctcgccgttgccagagaacactgcggtaccttttctcgttttgttagggcattggtgcaatctagaaaatgctttcaggggtgaaattcattccccgggaccaggtgcatggtgaggacttggattctgtctcgaaagaaaggaaaaaatcagataggaggagggaaaagagtaagaggaaggggaggagctctagggacagctctgatgatgatgatgggcttgagaagattaagaaaggatctagaaagaagaagtggtattcgtcggatgaagactcttctatttacacaactgaaagcgagagtgag

SEQ ID NO: 4597 - DNA, 288 bp, Glycine max
  Clone ID: LIB3073-012-Q1-K1-C7
ggaaaacctaatcagaaaaaaaatcgtagttggaggcgccgcactccactccactccaatcaatcagatactagcgatggggaggaagcgaaaggtagcaccgaaatcttctgtatccgccgagcccccgctgaagcaacaccaaccaaaacccgaaaatgccgctcaggaatacgaagaagaggtcgaagaggaagttgaggaagaagaggtagaggaagaggtcgaagaggaagaagaagaagaggaggacgaagaggacgaggaagaagaagaagaagaccaatt

SEQ ID NO: 4598 - DNA, 232 bp, Glycine max
  Clone ID: LIB3073-011-Q1-K1-H3
agaatcgtgtacaattcactcttgtagttggaggtttgttggtcattgcatttgttgttcctatggcacagtactatgcctatgtatccaaaaaataagataatataaatagatctgtttttcaaattctcactgttcaaattcagatgtataatgtgcagttgtaaccatgctcatgttacaattgagtttgagaaagctgaagaagaataagatgacagtttttgcttgt

SEQ ID NO: 4599 - DNA, 297 bp, Glycine max
  unsure at all n locations
  Clone ID: LIB3073-011-Q1-K1-H5
tgttggttcaagtgagtttgttgatcgagataactagaaacagtgtgatgaaaatgtaggtccttgttttcttcgttgctacaattttggtagcatggcaatgccatgcgtacgatatgttccctctccgaatgaacactggctatggtgcccgtactccggaggtgaaatgcgcaagttggaggcttgctgtggaagcacacaacatctttggctttgagaccattcctgaagagtgcgttgaagcaacaaaggaatacatccatggcgaacaatatagatcagactccanaacag

SEQ ID NO: 4600 - DNA, 410 bp, Glycine max
  Clone ID: LIB3073-011-Q1-K1-H6
ttgggatagcagcatcatacaaagcattgaattcaaaaacttaagttcattccttgtgttttgctttcttcctcaaaaccaaacgtgtcgaacacatgcggcagctgcgactgcgctgacaagactagctgcaccaagggaaacagctatggtgttattgtagagactgagaagagttacatcgagactgttgtcatggatgttccagcagctgagcatgatgggaagtgcaagtgtggcactaactgcacttgcacggactgcacctgtggccattaaggaatatgtatgaaaatgtaattgccatgtgtttggcaatacagatatccaaataatgtaatcttcgtatgaataaatgtgtgtgctggtatcctacttcaggtctgtgtagtcatgcagtctgaatcatt

SEQ ID NO: 4601 - DNA, 388 bp, Glycine max
  Clone ID: LIB3073-011-Q1-K1-H7
gatgcataacttgcatagactattgattaagaaagctattgtcattgatttgctagctccaacaatgggttctagcagattatcattcattttagtacttgtgcttgtaaccttttcatccatgatcattgactcaagggttgcagaggcacgtaccctgccaaaatcagccttattgccttccaaagttgatatacctactgttgttcctcttccactggtggcaccactgccaaatttgcctgttactctccctccagtgcctgaactacctgcagtacctaaagtaccaattcctgaagtaatagttgataacgccaaaataatcccttgagtacctatgatctatccagtcactactacttattttgtcacttgctaaattaac

SEQ ID NO: 4602 - DNA, 300 bp, Glycine max
  Clone ID: LIB3073-011-Q1-K1-H8
tgggatactgctattcctcttaagcttgctactgagtttccacactgcataccttaggtcttccgaattcgaagttaatttgcaagatggctaatgaaaaggctcagatcaacattgtggtggttggtcatgtggaccctgaggaggcaaccaccattaacgagctgaagaagcctgttgtggagaaagaagctccagggcatgccatatgagggcatgcacgtacggcctcggaggggaaccagaaaattatgttaacaaaataatctggaaccctaatgtatcagtgtcatcatcagt

SEQ ID NO: 4603 - DNA, 378 bp, Glycine max
  Clone ID: LIB3073-011-Q1-K1-H9
gatttcaatttaaccaaagcaaaaggccatataattttttgttatttgaaataatgtccgggatcatccacaagattgaggagaccctccatgtgggagggcacaagaaagaggagcacaaaggagaacaccatggtgagcacaaaggtgaacacaaaggagaacaccatggtgagcacaaaggtgaacacaaaggagaacaacaccatggggagcacaaggagggacttgtggataagatcaaggacaagatccatggtgatggccatgacaagggtgagaaaaagaagaagaaggacaagaagaagaaagagcatggacatgaccatcatggtcatagcagcagcagtgacagtgattagaacttatatggtaagc

SEQ ID NO: 4604 - DNA, 284 bp, Glycine max
  Clone ID: LIB3073-012-Q1-K1-A1
ggcagccaagaaaagaaaatcctcacccattttcttcgtagccaaacactctgaaattctcagttatgtcgtggcaagcgtatgtggatgatcacctactgtgtgaaatcgaaggtaaccacctcactcacgccgctatcatcggccaagacggaagcgtttgggctcagagcaccaacttccctcagttcaaacctgaggaaataactgccatcaataatgactttaatgagcctggatcacttgctccaactggattgtatatcggtggcaccaaatacatg

SEQ ID NO: 4605 - DNA, 369 bp, Glycine max
  Clone ID: LIB3073-012-Q1-K1-A11
gaaggtgcaagagtttgttgtgagctataagctagtttatcgtgaggagaatatgaagttgtttgttttctttgttgctgcagtagttttggtagcatggccatgccatggcgcaggctaccaaaggttccctctccgaatgaaaactggctatggtgagcgttcttcggaggtaaaatgcgcaagttttaggcttgctgtggaagcacacaacatccgagcctttaaaaccattcctgaagagtgcgttgaaccaacaaaggactacattaatggcgaacaatttagatcagactctaaaacagttaaccaacaagctttcttttatgctagtgaacgcgaagtccatcacaacgacatatttatatt

SEQ ID NO: 4606 - DNA, 402 bp, Glycine max
  Clone ID: LIB3073-012-Q1-K1-A2
gcatttcgataatcatccatagttactgaagaaaatggcaaccatctccgctgctatcacaaccctatcgatcacccgcgcatgtctagtgcaaaaacgttctcttgggttctcatctcccgttcttggtttgccagcaatgggtaaggtgggaagagtgagttgctccatggaggaaaagccttcttctgtgaaggaaagcagctcaagcatgttggggatgggggcatctttgatggcagcggccagcgccgcagccatgtcaggcccagccatggccttggtggatgagagacttagcactgaaggaaccgggctacccttcggcctcagcaacaaccttctcgggtggatcctgttcggcgtcttcggactcatctgggctctctattttgtctacac

SEQ ID NO: 4607 - DNA, 415 bp, Glycine max
  unsure at all n locations
  Clone ID: LIB3073-012-Q1-K1-A4
atgactattgctttccaattagctgtttttgcattaattgctatttcatttattttattgattagtgtacctgttgtatttgcttctcctgaaggttggtcgaataacaaaaatgttgtattttccggtacatcattatggattggattagtgtttctcgtgggtattcttaattctctcatttcttgaagctctatttattctagatcaaaaacgaaatgacccctcccccagaattctttcggattgtcgggcacattaaaaaaggaatggataagttcctaaaaataaagaaaactataacacattataaggaggggtcaaatattaattaagataaaagatatagaatatctatctgtatatatatatatatagatataatntattaataattagaactttcttttttccg

SEQ ID NO: 4608 - DNA, 380 bp, Glycine max
  Clone ID: LIB3073-012-Q1-K1-A6
ggattgggactggaggtacaataacaggcgctggaaaatatctgaaagatcagaaccctgatataaagctatatggcattgaaccagtagaaagtccaatactgtctggaggaaaacctggccctcataagatccaaggaattggtgctggcttcatccctggtgttctggatgtcgatttacttgatgaagttgttcgaatttcaagtgaagaagccattgaaactgctaaacttcttgctttgaaagaaggtttgctggtgggaatatcatctggtgcagctgcagctgctgcaattaagatagcaaagaggccagaaaatgctggaaaactcattattgcggtcttcccaagctttggagagcgttatttatcatct

SEQ ID NO: 4609 - DNA, 392 bp, Glycine max
  Clone ID: LIB3073-012-Q1-K1-A9
agggccaagcgaagggaaagggttaggcatcattcatacactgaacgaacgctcagctcagtcaggtgccggcgttcctctttcacgttctcatggaaaacgacgacgtcgacatgcacgctgccgacaccagcgaagaattggatgacatgaagaagcgcttgaaggagatggaagatgaagctgctgctttgcgagagatgcaggccaaggtcgagaaggaaatgggatctgcgcaagatcctgcaaatgcttctgcaagtcaggccaataaagaggaaatagattctcgatcagtctttgtaggcaatgtggactattcatgcactcctgaagaagtgcaacagcattttcagtcttggggaacagtaaacagagtcaccattcgaact

SEQ ID NO: 4610 - DNA, 371 bp, Glycine max
  Clone ID: LIB3073-012-Q1-K1-B1
gaggtactgcactggttcatctctccactcatgtcccagcactcaaggacaagcttgatgatgcagatgagaggctaggagccgacattgtgcaaaaggcactgatagctcctgcagcattgattgctcaaaatgctggaatagaaggtgaagttgttgtggagaaaataaagagtggtgaatgggaggtcggttacaatgctatggtagacaggtatgagaatttagtggaggctggagttatcgaccctgccaaggtaacaaggtgtgcattgcagaatgctgcttcagttgctggaatggtgttgaccacacaagccattgtggtggaaaaacctaaacccaaagcacctgtagctggtgccccacaa

SEQ ID NO: 4611 - DNA, 385 bp, Glycine max
  Clone ID: LIB3073-012-Q1-K1-B10
gatcacaaataacaatggggctttgtacaggtcagcctatcactctctcgaagcttcctaacgcctcctcttttcttcctaaacctaaaccctctcttcctcagtcttacactccctccgccgcacacttatctcggtcagtttgcttaaggaatctgtcgccaaaggcaacatcttctgaagaagaaaggtccagtgggggaagtcagtttttcaatgagaagcgcgatggtgtaataatcctggaggatgttaaagaggataataataagaatgagttcgataaaacggtgattgaagatacaaagcaagacttgtttgatgatgatggacagggtctatcatttgatttgctggataagctcaactttgatacagatgacac

SEQ ID NO: 4612 - DNA, 419 bp, Glycine max
  Clone ID: LIB3073-011-Q1-K1-H2
gttccttattccccaatcaatcatctttacgtgttttttcgagaccatggccaaaagccccttcaagcttgaacatcccttggaaagaaggcaggctgagtctgctcgcattagagacaagtatcctgatagaatacctgtgattgttgagaaagctgaaagaagtgacatcccagacatcgataagaagaagtaccttgtcccagcagatttgactgttggccaatttgtttatgttgtccgtaaaaggattaaggtcagtgcagagaaggctatttttgtttttgtcaataacactctacctgcaactgccgctttgatgtcttctatttatgaggaaaataaagacgatgatggttttctttacatgacttacagtggagagaaacactttcggtcttgctagggtcaaatttaat

SEQ ID NO: 4613 - DNA, 420 bp, Glycine max
  unsure at all n locations
  Clone ID: LIB3073-011-Q1-K1-G1
gatgcgcggcgggatcagcacaagattgcaaaatgaagttcaacattgcaaatcccaccactgggtgccagaagaagctggaaatcgaatgacgacctgaagcttcgagcattttgggacaagaggatctcccaggaggttcttggtgatgctctgggtgaggagtttaaaggatatgttttcaaaatcaccggtgggtgtgacaaacaaggattccctatgaagcagggagtgctgacccctggtcgtgttcgacttttgctccatagaggaactccttgtttccgtggatatggaaggcgcaatggagagcgtagaaggaagtctgttcgtggttgcattgtcagcccagatctctctgttttgaccttgtnattgtgaagaatggtgagagtgatttgccaggtctcactgatgttg

SEQ ID NO: 4614 - DNA, 369 bp, Glycine max
  Clone ID: LIB3073-011-Q1-K1-G10
gatagcagcatcatacaaagcattgaattcaagaacttaagttcattccttgtgttttgctttcttcctcaaaaccaaacatgtcgaacacatgcggcaactgcgactgcgctgacaagactagctgcaccaagggaaacagctatggtgttattgtagagactgagaagagttacatcgagactgttgtcatggatgttccagcagctgagcatgatgggaagtgcaagtgtggcactaactgcacttgcacggactgcacctgtggccattaaggaatatgtatgaaaatgtaattgccatgtgtttggcaatacaaatatccaaataatggaatcttcgtatgaataaatgtgtgtgctggtatcc

SEQ ID NO: 4615 - DNA, 319 bp, Glycine max
  unsure at all n locations
  Clone ID: LIB3073-011-Q1-K1-G11
gcctctgagctccctttctcctcggtccacagagacaaaatgtaagacaggtgccaacagttcatcacgaaagaaaggactagctgagccgagatcactaactaaaacgaatttaatactaatcgaaaatactaatagaatagaaatagaactgtcttttcatatagatatcccttcaacacaacataggtcatcgaaaggatctcgaagacccaccaacgcacgaaagccgggatctttcagaaaatggattcctattcgaggggtgcataaccgcatggataagctcacactaacccgtcaatntgggatccaattc

SEQ ID NO: 4616 - DNA, 367 bp, Glycine max
  unsure at all n locations
  Clone ID: LIB3073-011-Q1-K1-G4
gttcctacagattcttcagcaactgcgattttggatcggaacctcttctgcggcgtagcaatgggacactccaacgtttggaattctcacccaaaaaactacggtcctggttctcgcacttgccgagtgtgtgggaatccacatggattgatcaggaagtatggccttatgtgctgcaggcagtgcttccgtagcaatgccaaggaaattggcttcatcaagtatcgctaaaagagctgttgtcacctacggaccaatattatgttctggcactaagatgttttgaagatgttatgtttgaaaaaacttgagacttgtgtatttcatctattntattatcagacataatgtgtggaacgaagaatac

SEQ ID NO: 4617 - DNA, 391 bp, Glycine max
  Clone ID: LIB3073-011-Q1-K1-G5
actcgaattgttccacgccacatgcaattggcggtgaggaacgacgaagagttgagcaagcttctaggagatgttaccattgctaacggcggtgttatgcctaacattcacaaccttcttcttcccaagaaggctgggggctcatccaagggtgctgctgctgacgatgactcttaaatagggattcactgttcacaaagttcttgaatttagattctatgtttgctctctttttttcctttttatttgtagttatgataattgtgccctttgtagtagtagttaggttttcagtcagatgtgtttaaagaatgctcttacgcatcaagaaaggttgttcacaatttaaattattttaatgtcacctttgagtcttgatctagcatttgat

SEQ ID NO: 4618 - DNA, 299 bp, Glycine max
  Clone ID: LIB3073-011-Q1-K1-G6
tggatttttacttataaaaaaataatagtaggtatgcagaattagagaaaaagaatagatatatttgatagaaaatctttggtaactacatttttgtttttttcaatctaatcagtaaattttcaaaaaaattagtatcaagcttgagttttgaagcactttctttatttccagaacatgaacaagtaaaaataaattatgaagaagaaaaataacaaataataaaaatattatttgatgcaattagaactgatttgaacgaaaaaacaatagtgaatggaaatagaacaaagtgcatt

SEQ ID NO: 4619 - DNA, 293 bp, Glycine max
  Clone ID: LIB3073-011-Q1-K1-G7
tgggtacaagtgagtttgttgatcgagataactagaaacagtgtgatgaaaatgaaggtccttgctttcttcgttgctacaattttggtagcatggcaatgccatgcgtacgatatgttccctctccgaatgaacactggctatggtgcccgtactccggaggtgaaatgcgcaagttggaggcttgctgtggaagcacacaacatctttggctttgagaccattcctgaagagtgcgttgaagcaacaaaggaatacatccatggcgaacaatatagatcagacttcaaaca

SEQ ID NO: 4620 - DNA, 402 bp, Glycine max
  unsure at all n locations
  Clone ID: LIB3073-011-Q1-K1-G8
tgggagcgccaatgtttttttcagaggagtgtcatcttgtaatcaaaagagtttatcttatagtaagaaatcgatgtcttactccattttaaggaacaaaacaagagaacaatagcctgacaaagggtttagccataaaatcgaatccatcattgatttgagatattgataaggtgaatactcatttctcgtcaatgctaggcataatgcgggtatagggacctaaaaaagattatcttttcttcctatcttatgaactttaaggtgtatgaagtgtcatttcctatcttagattttaattntagtaggtagataaagagtccatttaacttaagttgatctaggccagaagcagacctacgttaagaatatccctctttgaaacactttggtagtgctctt

SEQ ID NO: 4621 - DNA, 357 bp, Glycine max
  Clone ID: LIB3073-011-Q1-K1-H10
gggatatgaggataaatgttggacacccagtcttactatattgttttatacgtgatgagatttttgggctctctacatctaagaaactaccactggaaactgttgtggagcctaggcttccataccatctttattctctctgagcagtgcctttgcacaaagcgtttctctctaataagattgttgtagggataatgggtcttgagtgagtttatgtttgtcacactggattgcaataaatttttctctcttttcataacaatgttagaaagagagaataactaaaagatgttgtggtgatagggactcgtggtaaccaatgcatggcaaatgtgcaagcgaaagcattttaatgtg

SEQ ID NO: 4622 - DNA, 409 bp, Glycine max
  Clone ID: LIB3073-011-Q1-K1-H11
gaaggttttcaagttattgtgagcaaagaaagatagtgagtgaagtaactgaagagaagaaaaaatgccgtgcctcaacctcagcaccaacgtgtccctcgaaggcgtcgacacctcttccatcctcgccgaagccacctcctccgtcgccagcataatcggcaaacccgaagcctatgtgatgattgtactgaaaggatcagtacccatagcttttggtgggaatgagcagccagcagcttatggagaattggtttccattggtggtcttaaccctagtgtaaacaaggaacttagtgctgcaattgcttcaattctggaaaccaaattgtcagtgccgaagtcgcggttcttcttgaaattctatgacaccaaggggttcccaacttcggatgggatggatctacat

SEQ ID NO: 4623 - DNA, 346 bp, Glycine max
  Clone ID: LIB3073-011-Q1-K1-F5
ttaactgccacaacactttccacttgtctccgaatgagttatcttgagaaacattattcccattgctatatattatggctagcatgaaggttacatgggtggttgtgatcatgtgcatggccgtggtgggtgcaccgatgatggcgcaagccatgacatgcaatgatgtgacggtgaacacggcacagtgcctattctacctgatgcacggaggaacaccttcaacactttgctgcagcggacgtaagaacattcttggctctgctgtcaccaccgttgacaaacaaactgtgtgcaactgttataaggcggatgctgctaagttcaacatcaatgaccagtatgc

SEQ ID NO: 4624 - DNA, 424 bp, Glycine max
  unsure at all n locations
  Clone ID: LIB3073-011-Q1-K1-H12
gtcttctgaacaagataagctatccatagcagccaaagaaatgaagagtaccttgttcgccctctttctactttgtgccctcacctcttacctaccttcagccaccgctggtgatgtggtcgacactgatggtaatcctgttgaaaatggaggcacatactttgtgttgccaactataatattaaacggcggtggaatagaatatgccacatttggaaatgaaacttgccctgtcactgttgcgcaatcccgcgatcagttctgcaagggctttccgataaccatttcatccncagcccgaatccgtcacatcagcgaaggccttagtttgaacattgggttcactttcgcatncccgtgttcccccgcttctgagtggaccattgtgaaggatcaaccaggaaggactcgctgntaaactcac

SEQ ID NO: 4625 - DNA, 410 bp, Glycine max
  unsure at all n locations
  Clone ID: LIB3073-011-Q1-K1-D8
ttggggttgagagagagagaaggcaagatgtcgaagagaggacgcggtggttcggcggggaacaagttccggatgtcgctgggtctgccggtggcggcgacggtgaactgcgccgacaatacgggggcgaagaacctctacatcatatcggtgaaagggatcaaagggcgtttggaccgtctcccctcggcttgcgttggcgacatggtgatggccaccgtgaagaaggggaaacccgatctgaggaagaaggttttgccagctgtcattgttcgccagcgcaagccatggcgccgaaaggacggcgtctacatgtatttcgaagataatgctggtgttattgtcaatcccaaaggagaaatgaaaggttctgctatcactggtcccattggnaaagagtgtgctgatct

SEQ ID NO: 4626 - DNA, 374 bp, Glycine max
  Clone ID: LIB3073-011-Q1-K1-D9
gacataaaagaaaaaggaaaccctagctggataggtcaaacatcatcatgtcggacgaagagcaccatttcgagtccaaggcagacgccggtgcctccaaaacctaccctcagcaagccggtaccattcgcaagaacggctacatcgtcatcaaaggacgcccctgcaaggttgtggaagtttcgacttccaaaactggaaagcacggtcacgccaagtgccactttgttggaattgatattttcactgccaagaaacttgaggatattgtgccctcttctcacaactgtgatgttcctcatgtgaatcgtactgattaccagctcattgatattgctgaagatggatttttgagtctgcttactggaaatggg

SEQ ID NO: 4627 - DNA, 389 bp, Glycine max
  Clone ID: LIB3073-011-Q1-K1-E10
ggaaagccaaaataatgtgttatagggttgactgtaaaacctgtgggggggatgtggcaatcacttgaccactctctatgcaagcattgatcagggaatgcactgcacgtgccgctcctggctcggtgttgccacacgcacaaccaccactcagaaacctactcaatccaataactcctcccaaggaaatgggaattctcaaaattaatgaagctgctttggattttgatctgcaacagttcttttcgtgttatttgacacaagcaaaggaatagagatcgcggtagtaaaaagtattaaggaggttggtattaataatgcaatgtaaggatggtcatgtgaaattgaccaacgtagaccaacattattttctatggtaatggatctac

SEQ ID NO: 4628 - DNA, 369 bp, Glycine max
  Clone ID: LIB3073-011-Q1-K1-E11
gattcaactctctaaacaacacattaacctttcgcattccccatctcctcaccttattcagccactgctaatttctagggttccgaaatggacgctggcggaaagatcaagaagggcgccggaggaagaaagggcggcggccctaagaagaagccggtttcaaggtccgtcaaggccggtctccaattccccgtcggaagaattggccgttatttgaagaaaggaaggtacgcccagcgtgtcggtaccggtgctcccgtttacttggccgcagttctcgagtacctagctgctgaggtgcttgagttggctgggaatgctgcacgtgacaacaagaagaacgggattattccgagacatgtgctattg

SEQ ID NO: 4629 - DNA, 351 bp, Glycine max
  unsure at all n locations
  Clone ID: LIB3073-011-Q1-K1-E12
gatgacacaagtgtccctgttgagaaagttgaggttgttgaaacagcacatgctgaggaaaagaaggggttcctcgacaagattaaggagaagctaccagggcacaagaagacagaggaggccacagctactactcctnctccaccaccacctgttgcatcattggagcatggtgaaggtgctcatcatgaaggagaggccaaggagaagaaaggtatattagataagataaaagagaagcttcctggttatcactccaagacagaggaggaaaaagaaaagggaaaggagagtggtgctcatagatatttaagattgagacaaggcttttttggtggttggagatgcatg

SEQ ID NO: 4630 - DNA, 285 bp, Glycine max
  Clone ID: LIB3073-011-Q1-K1-E2
gttattgtaaaaggtgttgcctcagaagagcagcaagcacgtgtcagatatggagctggatgattgtgaggagaccactttgcatgatgtcaactttaaggaggagatgagacgaaagcagcaacagcaacaccgcgaggcatacgacgaagatgatgatgagccatctggtcaccgagtgcaatgtgctcaacagtagtgcaatttatggtagtagaggttctataatttctgcttggtttatcttttggttggataatgcagttataactgcgtgataaattt

SEQ ID NO: 4631 - DNA, 216 bp, Glycine max
  Clone ID: LIB3073-011-Q1-K1-E3
gttgcaaaagaccaccgaaggggatttcatttctttccaacacacactttctctgtctatctttgggtggctttctttctggtcattggtgatgatgtcacgcgccgccgtgctattacacgcgccggaggaagatgccgcggcggaggagtgctgtacctcgaattcgtcgtcgtcgatcgggaggaacagcgacgtgtcgtcggagagatcaat

SEQ ID NO: 4632 - DNA, 431 bp, Glycine max
  unsure at all n locations
  Clone ID: LIB3073-011-Q1-K1-E5
ttgggtttttttgctgattatacttataatcacctcacagttcgagtggaagcagcagcttgtggccgatgtcgactctaaccccaacttgcctcagaagcagcatcagatttctaaggctgaagaaaccgttaaggagaagattattttagtgcaagagaagaatattcgaaggctgaatgagctagtgcggcatctccaggaacaactgcagcagtgtagaggacgcaatggaacaataaatggaactgtaagccctctagctgagcggattcttgagctngagcgacagcaaattttagagggataagcaaatgctgctagtacggtaatgaaagtcggtgttatgctcaagctgtgaaagtgttccttaattcgggtgggaggaatgttgtagaagatttgctcccttgctgatcaattacgatttt

SEQ ID NO: 4633 - DNA, 397 bp, Glycine max
  unsure at all n locations
  Clone ID: LIB3073-011-Q1-K1-E6
ttggggttctagtgtgtgattgtttgttgttgtaactcgttcttcttcttttgttgttctgtgtttgtgtttgttttttctctcacctgaaaatgtcttgctgcggtggtaactgtggttgcggaagctcctgcaagtgcggcaacggctgcggaggctgcaagatgtacccagacttgagctacactgagtcaaccaccaccgagaccttggtcatgggagtggcacctgttaaggctcaatttgagggtgctgaaatgggtgtgcccgctgagaacgatggctgcaaatgtggaccaaactgctactgcatcccctgcacttgcaagtgaggtgttgggagagcaagcttcaagcagagatagcccttaattaggaataatgantaactattaat

SEQ ID NO: 4634 - DNA, 430 bp, Glycine max
  Clone ID: LIB3073-011-Q1-K1-E7
tggggtacaagtgagtttgttgatcgagataactagaaacagtgtgatgaaaatgaaggtccttgttttcttcgttgctacaattttggtagcatggcaatgccatgcgtacgatatgttccctctccgaatgaacactggctatggtgcccgtactccggaggtgaaatgcgcaagttggaggcttgctgtggaagcacacaacatctttggctttgagaccattcctgaagagtgcgttgaagcaacaaaggaatacatccatggcgaacaatatagatcagactccaaaacagttaaccaacaagcttacttttatgccagagacctcgaagtccatcccaaggacacatttgtgttcagtatagatggcaccgtactctctaatattccatactacaaaaaacatggatatggggtggagaaattt

SEQ ID NO: 4635 - DNA, 355 bp, Glycine max
  Clone ID: LIB3073-011-Q1-K1-F10
ggattctttcttttctttctaacaagcaccgcctccactaatggctatgagatcgtgggtgagtcgaggatccgtgactcgtttgatggactcagcaaatcgaggggctttcagtcgcttcttcagcgacaagggtcgcgttctcagcgaggaggaacaggccaaagaaaacgtctacatccagaaatgggagagggagaggttggagaaacagaagcaacaggctgagaagaccaaggcagacaagggcaaagatgctgctgctgataagaaacctgaaggttctcaaaagggctgagtttatccttcacacaacccggcaaggtcactttgtgggaaataagcatgatggaga

SEQ ID NO: 4636 - DNA, 338 bp, Glycine max
  Clone ID: LIB3073-011-Q1-K1-F11
ggaagcttcaataagtaagtatcaatggcttccgaagaatcccagaacaagccccccagcgagcagtccactaccgaactcatcacgagcgcgaagctggtggcggaggcggcgcagtcggctctgaagagcgacggcgacaaagtggacaaggccaaggtggctgacgctgccggcgatcttctcgacgcggcggggaagtatggaaaacttgatgacaaacaaggcatagggcaatatgttgacaaggctgctgattatctgcataattaccagggtgataataccactgctccttcacagcctgcagagtctaaaggtgaaagaaagtgtggtgg

SEQ ID NO: 4637 - DNA, 329 bp, Glycine max
  Clone ID: LIB3073-011-Q1-K1-F2
tacgtttgggagtgcacaagtgagttcggtgatcgagataactagaaacagtgtgatgaaaatgaaggtccttgttgtcttcgttgctacaattttggtagcatggcaatgccatgcgtacgatatgttccctctccgaatgaacactggctatggtgcccgtactccggaggtgaaatgcgcaagttggaggcttgctgtggaagcacacaacatctttggctttgagaccattcctgaagagtgcgttgaagcaacataggaatacatccatggcgaacaatatagatcagactgctaaacaggtaaccgagaagcttacttttatg

SEQ ID NO: 4638 - DNA, 424 bp, Glycine max
  Clone ID: LIB3073-011-Q1-K1-F3
tgtggaggagaatatgaagttgtttgttttctttgttgctgcagtagttttggtagcatggccatgccatggcgcaggctaccaaaggttccctctccgaatgaaaactggctatggtgagcgttcttcggaggtaaaatgcgcaagttttaggcttgctgtggaagcacacaacatccgagcctttaaaaccattcctgaagagtgcgttgaaccaacaaaggactacattaatggcgaacaatttagatcagactctaaaacagttaaccaacaagctttcttttatgctagtgaacgcgaagtccatcacaacgacatatttatattcggcatagataacaccgtactctctaatatcccatactatgaaaaacatggatatggggtggaggaatttaatgaaaccttatatgatgaatgg

SEQ ID NO: 4639 - DNA, 380 bp, Glycine max
  unsure at all n locations
  Clone ID: LIB3073-011-Q1-K1-F4
ggttgattgtccacggtgtagtcttcgtagtagaaaggtttacagtgacctgtctgttgactatttaaagatgttcttgctgaatgtcccagcaactgtggttgcactaggattgttcttcttccttgatgatgtgactggatttgagatctcatatctgataaagattccagagccttttagtttcatcttaacttggtttgccgctattccctttattttgtggctggctcaatcgatcactatggcaattgtacaagattttctgattttaaaaggcccttgtcccaactgtggtactgaaaatacctgttttgttggactatactgtcngtttcaagtgcgatttcaccaacaaagtcaaatgtgaaaactgtgaa

SEQ ID NO: 4640 - DNA, 402 bp, Glycine max
  Clone ID: LIB3073-011-Q1-K1-D7
gaataacaagcaggaaggtgtagcttgcaccaaaggtattgcttttttgttgtttttgaccgcttatggattttggatgcgatagctctagcatctgtgctggaaatttccattgctgtcctcttgtcaacaacgttattttgaagcatctatatatgttagagtgatttcactctcattcctcaatttcatcaaattaagatggcaccaatcaccacctattttttgattctcatgtcctcagtgttctatgttttctgggatgcacgtgtcgcgcttgaagagttcactgttcatgaccatctggctttgcaatgtcttcaatgaattactccctaaccaccatgaatatcaaatcttctatgaatctcaagcacaatatgcatctctctctgctcttta

SEQ ID NO: 4641 - DNA, 348 bp, Glycine max
  Clone ID: LIB3073-011-Q1-K1-C11
ggtttggagcaatagcagcagaacagagagagcaaaaccctagagcatccatcacaagcagaggaagaagatggtgaagttcctgaagcctaacaaggcagtgatcgtcctgcagggccgctacgccgggcgcaaggcggtgatcgtgaggaccttcgacgagggaaccagggagcgcccctacggccactgcctcgtcgccggaataaagaagtacccaagcaaggtcatcaagaaggactccgcgaagaagaccgcgaagaaatctagggttaaggccttcgtgaagctcgtgaactaccagcacctcatgcccacgcgctacacgctcgacgtggatctaaagga

SEQ ID NO: 4642 - DNA, 407 bp, Glycine max
  Clone ID: LIB3073-011-Q1-K1-C12
ggctcaagtgagtttgttgatcgagataactagaaacagtgtgatgaaaatgaaggtccttgttttcttcgatgctacaattttggtagcatggcaatgccatgcgtacgatatgttccctcttcgaatgaacactggctatggtgcccgtactccggaggtgaaatgcgcaagttggaggcttgctgaggaagcacacaacatctttggctgtgagaccattcctgaagagcgcgttgaagcatcaaaggaatacatccatggcgaacaatatagatcagactccagaacagctaaccaacaagcttacttttatgccagagactctcgagtccatcccaaggacacatttgtgttcagtatacatggcaccgtactctttaatattccatgctacaaaaaacatg

SEQ ID NO: 4643 - DNA, 371 bp, Glycine max
  Clone ID: LIB3073-011-Q1-K1-C2
ggtagcataacttgcatagactattgattaagaaagctattgtcattgatttgctagctccaacaatgggttctagcagattatcattcattttagtacttgtgcttgtaaccttttcatccatgatcattgactcaagggttgcagaggcacgtaccctgccaaaatcagccttattgccttccaaagttgatatacctactgttgttcctcttccactggtggcaccactgccaaatttgcctgttactcttccttcagtgcctgaactacctgcagtacctaaagtaccaattcctgaagtaatggttagtaacgccaaaataatcccttgagtacctatgatctatccagtcactactacttatttt

SEQ ID NO: 4644 - DNA, 405 bp, Glycine max
  Clone ID: LIB3073-011-Q1-K1-C3
ggtacatgtgagtttgttgatcgagataactagaaacagtgtgatgaaaatgaaggtccttgttttcttcgttgctacaattttggtagcatggcaatgccatgcgtacgatatgttccctctccgaatgaacactggctatggtgcccgtactccggaggtgaaatgcgcaagttggaggcttgctgtggaagcacacaacatctttggctttgagaccattcctgaagagtacgttgaagcaacaaaggaatacatccatggcgaacaatatagatcagactccaaaacagttaaccaacaagcttacttttatgccaaagacctcgaagtccatcccaaggacacatttgtgttcagtatagatggcaccgtactctctaatatttcatactaacaaaaaca

SEQ ID NO: 4645 - DNA, 345 bp, Glycine max
  unsure at all n locations
  Clone ID: LIB3073-011-Q1-K1-C4
ggtagcttcaataagtaagtatcaatggcttgcgaagaatcccagaacaagccccccagcgagcagtccactaccgaactcatcacgagcgcgaagctggtggcggaggcggcgcagtcggctctgaagagcgacagcgacaaagtggacaaggccaaggtggctgacgctgccggcgatcttctcgacgcggcggggaagtatggaaaacttgatgacaaacaaggcatatggcaatatgttgacaaggctgctgattatctgcataattaccagggtgataataccactgctcctgtaaagnctgcagagtctaaaggtgaagaaagtggtggtgggttaggt

SEQ ID NO: 4646 - DNA, 348 bp, Glycine max
  unsure at all n locations
  Clone ID: LIB3073-011-Q1-K1-C5
actagttgaaggagggaagagagagattttcacaccaatgtacttcttcctggcacggaagcctgatttagacaggaactaagctggctgtacaaataggttgctgttttcatcagttacggtgattctggtagggtgaaccgtaagctaggattgtttttggccttgttgccttagtgattcttgctgtttctttgttttgtttaggttaccaacacttcattttgctgcttgtttcgatgaagcagtgctcctccatattttgnttaccctacatattatatgctcttttactttgtttaaaagggatttggcagattttggtctttggaaaaaaaaatnnanaat

SEQ ID NO: 4647 - DNA, 417 bp, Glycine max
  Clone ID: LIB3073-011-Q1-K1-C8
gaacctgttatcttcacttcacatctctctatcctctcattctcatcaccaacaagtgtttctgtaaccatggcatccaccactctatcccctacaaccccttctcagctatgctcaggaaaaagtgggattttcagttcctcacaggcacttcttgtgaagccagtgaagaggcagatgatggggaagagcaagggattgagaattgcatgccaagccaccagcatttccgctgatagagtccctgacatgggcaaaagacagctcatgaatcttcttcttcttggtgccatttcactccccactgctggaatgcttattccctacacctacttctttgtccctccaagttcaggttcttcagctggcggtactgttgccaaggatgccgttggaaatgatgtaattgccgagaat

SEQ ID NO: 4648 - DNA, 350 bp, Glycine max
  Clone ID: LIB3073-011-Q1-K1-C9
ggggctgttttgacaagacgacatattgacacagtggccggaacacaagcgaacgtaacgaatgctggattacacacatgggagccggttattataaaagatccacatgttatcactgcaaaagcactatcatacagatcagctgtgagagagaatctgatgaggccgggatacagaatagtaggaatcattgcagaccaatggagacatctgattggacaccacacaagacgaagcaggacctttcagcttgctaatacactgtactacattgagtagcaccttgacctctctcaacaatctagctagaagttgctgctatctatatgtgatcaggcatgctgatatgc

SEQ ID NO: 4649 - DNA, 412 bp, Glycine max
  unsure at all n locations
  Clone ID: LIB3073-011-Q1-K1-D1
gatcgcctatgtttttttcagaggagtttcatcttgtaatcaaaagagtttatcttatagtaagaaatcgatgtcttactccattttaaggaacaaaacaagagaacaatagcctgacaaagggtttggccataaaatcgaatccatcattgatttgagatattgataaggtgaatactcatttctcgtcaatgctaggcataatgcgggtatagggacctaaaaaagattatcttttcttcctatcttatgaactttaaggtgtatgaagtgtcatttcctatcttagattttaattntagtaggtagataaagagtccatttaacttaagttgatctaggccagaagcagacctacgtcaagataatccttctttgaaacactttggtagtgctcttagaatgtaatccc

SEQ ID NO: 4650 - DNA, 240 bp, Glycine max
  Clone ID: LIB3073-011-Q1-K1-D10
tccgagggggacatactttgactaggcactcatatcattctaggcaggtatcatcatgtcttacgacgagcaacatggttagcgctacagaaaactccgaagactcatgagcgtatcatcaacatgctcgctctagtcatgaaaactggcacatccaccctaaatgacaagaccgcactgacatgtatgaagaacttcacaggactattgatcatgattactcacaactgccctcctttg

SEQ ID NO: 4651 - DNA, 391 bp, Glycine max
  unsure at all n locations
  Clone ID: LIB3073-011-Q1-K1-D11
gactggtatgtgcgatcgatcatctcctctgcgaaatacaatggagctgacagcccagcagctgagccaatacaacggcactgacccatcgaagccgatctacgtggcggtgaaaggccgagtctacgacgttacctccggaaaatccttctacggtcccggcggcccctacgccatgttcgccggcaaagacgccagcagggccctcgccaagatgagcaagaacgacgaagacatctccccctccctcgacggcctctccgacaaggagatcggcgttctcaacgactgggagaacanattccaagctaagtacactgtcgttgctcgtcttctcattaattggattctatctatcatatgacatcatctcaccctaataactaataat

SEQ ID NO: 4652 - DNA, 388 bp, Glycine max
  Clone ID: LIB3073-011-Q1-K1-D12
ggctgcgagacctaggaagcacgacaacaacactcatcagagggaaaagtcgcgcccactgccaccgcgtccaaagatgatcgatgatcaagatctgggtttctttgccaattttcttggcgtcttcatctttgtactagtgatcgcgtatcattttgtcatggctgacccaaagttcgaaggaaactagtaatgcttttaagtttaagatgtaattttgtgttgtagacttgggaatgtgaacgttagcttactaaaacttgcataaacatcaaaggagcataacatttcaatttttgctatacttatgcgtgctcccttaagttattttttgcttgtaaggagtgtttgtggtaaactaatgaaaatactggattttcttcaaaaa

SEQ ID NO: 4653 - DNA, 431 bp, Glycine max
  Clone ID: LIB3073-011-Q1-K1-D3
cttgaactcggacgattgggccacgcagggtggtcgtgtgaagacagattggagccacgcacccttcgttgccacctacaaggacttccaaatcgacgcgtgcgcgtgccccgtgccggtgacgtcagcagatagtgctaagaactgtagcagcagcgaggataagaagtattggtgggacgaaccaacgttgtccgaactgaacttgcaccagagccaccagctcatgtgggttagggctaaccatatggtttatgattattgcgccgacactgctaggttccccgttatacctgctgagtgtgttcaccaccgtcaccactgaaagggagaagagaagaggaagagaacgaactacttttgtttaacataacatgggcttcatgtttcaccctgtaacatatttcggcttagctttatgtgaatctttt

SEQ ID NO: 4654 - DNA, 340 bp, Glycine max
  Clone ID: LIB3073-011-Q1-K1-D4
gatagagttcaaaacatattattttcattttcatctttttttgagtatcaacaaatggcaaccactgtgatgaccactctcccccaattcagtggtcttagaccccaattctcagctgcccctgtgaagaacttggttgctgtgcaacccatgagtcgcaaggggaagggtgcattgggagctcgatgtgactacattggttcatccactaatctgattatggtggcttctacaaccctgatgctgtttgctggaaagtttggattggctccatcagcaaacaagaaagccactgcaggggttaaactggaggggaagggactaagcttggagactggtg

SEQ ID NO: 4655 - DNA, 357 bp, Glycine max
  Clone ID: LIB3073-011-Q1-K1-D6
ttgtgatgaagaagaaggagcatggccatgagcatggccatgacagcagcagcagcagtgacagtgattaaactgctgcatcacctatatatttaaaaggtttatgggaccatagtagcgagggctgtgccttaatttctctctctctctctctctctctctctctctctctctttttcctttttccctatcttgtgatctatttatgagtgagaaaaataaaagtgagaaattgtgcgtgtatctggttgctaattcgagtgctattagtctgtggtttggttggtttgtaaccccgctacttgggttatgtttgattgtatattatcctagagaaataaaaattttaaattatca

SEQ ID NO: 4656 - DNA, 418 bp, Glycine max
  unsure at all n locations
  Clone ID: LIB3073-011-Q1-K1-C1
tatgggatttctgctagtattaagatcaatgaaaggaattcaagaggaccaaagggacgcaaggttgtttctaatttagtcaagcctattcatgtggttcctggatctgagcctgaaattcaggctccctttactgttaataatggatctgaaaatctggtggaaagtagcatcatcaaggagggcttacttgtagaggttttcaaagatgaggaagggtttaaagctgcatggttctcagccaatattttgactttgagggatgataaagcttatgtaggctacacttcacttgtagctgctgaaagtgcanggccattaaaggaatgggtttcactcgtatgtgatggagacaaacaccccagaatacgtactgctcgtnctcttaatacttttacatatgaaggaacaagaaaga

SEQ ID NO: 4657 - DNA, 406 bp, Glycine max
  Clone ID: LIB3073-011-Q1-K1-A4
ggtgctctctgaagattcatgcaattaccaaagaatgggaacccacaaaggttgtgcctcaggctgatagagttcttattcgtttggaggagctttcagataaaacagttggcggagttttgctgcctaaatcagctgttaaatttgagcgctatcttgtgggagaaatcctaactgttggtgctgaagctggagaactaaaggctggaacaaaggtactattcactgacatgaatgcttatgaggtggatttggggactgatgcaaaacactgcttctgtaaagcaagtgacttattggccgttgtggagtaaggttttggccattgaacgagacaaaaagggagcaatcttttttggatatctttgataagtgtattttagtagaataaaccatttttttcatt

SEQ ID NO: 4658 - DNA, 418 bp, Glycine max
  unsure at all n locations
  Clone ID: LIB3073-011-Q1-K1-A5
tgtattataagcagcaattcttatttatttcagattaatacttgataacctaaacaatatatctatatatagaatatagatagatatatatacaatagaacgtaaaaaaaaaagaataataaatagaaaaaggagcatgttgattatatagaaagtaaagggcaacaatcatttttgtttaccatgggtaaggacaccatcgctgacataataacctatataagaaatgctgacatgaataaaaaaggaatggttcaaataccatttactaacataacaganaacattgtaaaaatacttttacgcgagggttatagtgaaaacgatagaaaacatagagaaaacgacacatatttttaagtttactctacggtatagaagaaatagaaaggatcatataaaagtttttaaattaaaa

SEQ ID NO: 4659 - DNA, 383 bp, Glycine max
  Clone ID: LIB3073-011-Q1-K1-A6
gacgatggcccgacgacagtttctgttcgcatcactggccttactccggggcttcatggttttcacctacatgagtatggtggtacgacaaatgggtgtatttctacgggagcacattttaatcctaataaattgacacatggtgctcctgaggatgaagtccgtcatgcgggtgacctgggaaacatagttgctaatgcagagggggttgcagaggctacaattgtggataatcagataccactctctggccccaattcagtagttggaagagccttgagggtacatgagcttgaagatgaccttggaaagggtgggcatgaactcagtttgacaactggaaatgctggtggaagattagcatgtggtgtggctggtttgac

SEQ ID NO: 4660 - DNA, 158 bp, Glycine max
  Clone ID: LIB3073-011-Q1-K1-A7
ttggcctaacgaagaaaggcttatggtggatacctaggcacccagagacgaggaagggcgtagtaagcgacgaaatgcttcggggagttgaaaataagcgtagatccggggattcccgatataggtcaacctttcgaactgctgctgaatccacgggt

SEQ ID NO: 4661 - DNA, 383 bp, Glycine max
  unsure at all n locations
  Clone ID: LIB3073-011-Q1-K1-A8
tgttatagggatctgcaaagatttctagcagaaagtgcagccgggaatgaatcaaccaattccacaatttgtgatgaagtctgccagcttaaatcatctcttctagagggaattttagtgggtatagttttgctaataattttgatatcgggcctttgctgcatgatgggaattgacaccccaacaagatttgagacgccacaagagtaatgatccgtttgctgaagctaataattgttatgatgctcggcctactggattaaaatattactgctatattatttgcgaatttacgggaggctctagtaagggttctgtagttgatgacttgtctcaaggactntttatattgaattttaaaataatttggatcagtatataaa

SEQ ID NO: 4662 - DNA, 348 bp, Glycine max
  Clone ID: LIB3073-011-Q1-K1-A9
ggctgacacaggaaagaaagatcgaggtttctctgcactcatccttcgccctagctgcgtatccctaccaccgttctagacaggacctacaaacatagaaaatagatgggattgtcgaatgcttctgaggatttgtcatcagagatggaggttgatgcctttagacgcctttttccacttcgatattttgagcgtcatcttgctgaatctataaggccagatggtagaccacttggaaaagctagagaaacaagtatttttcttggtgctgttgcgtctgctaatgggtcggctcttgtgaagattggatcaactactatgttgactgctattaaaatggaagtcatg

SEQ ID NO: 4663 - DNA, 357 bp, Glycine max
  Clone ID: LIB3073-011-Q1-K1-B1
tcatatggggagaggaacccagaagataaatctttcaaagaaaaaggagagtgcttagagagagagcaaaacatattattttcattttcatcttttttgagtatcaacaaatggcaaccactgtgatgaccactctcccccaattcagtggtcttagaccccaattctcagctgcccctgtgaagaacttggttgctgtgcaacccatgagtcgcaaggggaagggtgcattgggagcttgatgtgactacattggttcatccactaatctgattatggtggcttctacaaccctgatgctgtttgctggaaggtttggattggctccatcagcaaacaggaaagccactgcagggc

SEQ ID NO: 4664 - DNA, 384 bp, Glycine max
  Clone ID: LIB3073-011-Q1-K1-B10
ggctttggggcatgcttttaatttcctagatctgccaaacaaattgtagcataagtcccatggccaaagagactagtgttgtttatctatatcccagcaaatcacaagtttggggtgagaattttgatcataaaaaacttgtaataacaacactagctgctaatggaaagaaggaggagagtaatggagcacctaatgacacatatcctgcgtttcccgggtggtatgctgatgtttcctggccaggagaagcacacacatattaaatagaaaagattctattccacgggaaatcagaattccaagagcttcttgtatttgagtcttctagacaaggcaaggttgcaattcttgatgggcatatccagctgacagaaaacgatg

SEQ ID NO: 4665 - DNA, 316 bp, Glycine max
  Clone ID: LIB3073-011-Q1-K1-B11
ggttaagtgagtttgttgatcgagataactagaaacagtgtgatgaaaatgaaggtccttgttttcttcgttgctacaattttggtagcatggcaatgccatgcgtacgatatgttccctctccgaatgaacactggctatggtgcccgtactccggaggtgaaatgcgcaagttggaggcttgctgtggaagcacacaacatctttggctttgagaccattcctgaagagtgcgttgaagcaacaaaggaatacatccatggcgaacaatatagatcagactccaaaacagttaaccaacaagcttacttttatg

SEQ ID NO: 4666 - DNA, 380 bp, Glycine max
  Clone ID: LIB3073-011-Q1-K1-B3
gattcaaacagaacaagaaaaataaagcgttccatagcctcccataaaaatgaagaatactatcttctctgctctctttctactttgtgccttcaccacctcatacctaccttcaaccaccgcggtggtcgataccaacggtgatattcttcagaatcctggcacatactttatcttgtccgtttttcgacccggcggcggagtagaattcgccgccactggaaacgaaacttgccctctcactgttgtgcagactctcttcgggaggggatttccagtaatcttatcgtcccagttactaatgcctatcatcggcgaaggacaactcttcagcatcctgttccgtattgtgccatggtgcgccaccactccttctaagt

SEQ ID NO: 4667 - DNA, 279 bp, Glycine max
  unsure at all n locations
  Clone ID: LIB3073-011-Q1-K1-B4
attgngttgccccccaggataacaacataatgctgtggaatgctgtcatatttggtcctgatgatactccatgggatggaggcacgttcaagttgacactccaatttactgaggactatccaaataaaccaccgactgtacgatttatgtctcgcatgtttcatccaaatatttatgctgatggaagtatttgtttggatatattacaaaatcagtggagtcctatttatgatgtggctgctatactcacatctatccagtcattgctttgtgatccca

SEQ ID NO: 4668 - DNA, 436 bp, Glycine max
  unsure at all n locations
  Clone ID: LIB3073-011-Q1-K1-B5
tgtgggattcaccacttcaaaacactcataacacaaagcacaaagcaaagctcatccttgagttaaaaaatggcagcagcttcttccatggctctctcatccccatccttggctggcaaggccgtgaagctgggcccatcagccccagaagtgggaagggtgagcatgaggaagaccgtcaccaagcaggtctcctcaggaagcccatggtacggcccagaccgagtcaagtacttgggcccattctctggcgagcccccgtcctacctaaccggtgagttcccaggcgactacggctgggacactgctgggctttccgcagacccagaaaccttcgccaagaaccgtgaactcgaagtgatccactccaggtgggccatgctcggagccttgngctgcgtcttcccgaattgctgtcccgcaacggggtgaagtc

SEQ ID NO: 4669 - DNA, 276 bp, Glycine max
  Clone ID: LIB3073-011-Q1-K1-B6
gatctcacattcataccctaggactccttattcattcaccaccctatccaacatggctgaggagactccaaaccagacaaccacaccaccccctcctcaagagtcagtggtgcaagtggaggaagtggtggtaaccgatgttccacagcccgacaaaacaacaactacagttccagttgaaagagattcgcaacctcaaccttatgagccaaaaaacaaaaacccaataaaaggaaaaaagcggccgttctaaaggacccaggttaccttccccgt

SEQ ID NO: 4670 - DNA, 442 bp, Glycine max
  unsure at all n locations
  Clone ID: LIB3073-011-Q1-K1-B7
ggcgctcttctattggagtctctgcctgaagatggcaagccttcagttaacaacaacacccttcactcttttgagacaacaaaggcagcaccccacaaagaagaagtccactgcttctcagctgaaccctcctcggccacgtcccctcagagtgagtgtgaggtcctataaagtggtgattgagcacgatggagagtccactgaggtggaggttgaacctgacgagaccattctgtcaaaggcattggactctggcttgtctgtgcctcatgattgcaagcttggagtctgcatgacatgccctgctcgcctcattagtggatctgttgatcagagtgatggaatgctaagtgatgatgtggtggagcgtggctatgcactctngtgtgcagnctaccctcaatccgattgtcatattaagaatatccccgaggatgagcta

SEQ ID NO: 4671 - DNA, 405 bp, Glycine max
  Clone ID: LIB3073-011-Q1-K1-B8
ggcacaagtgagtttgttgatcgagataactggaaacagtgtgatgaaaatgaaggtccttgttttcttcgttgctacaattttggtagcatggcaatgccatgcgtacgatatgttccctctccgaatgaacactggctatggtgcccgtactccggaggtgaaatgcgcaagttggaggcttgctgtggaagcacacaacatctttggctttgagaccattcctgaagagtgcgttgaagcaacaaaggaatacatccatggcgaacaatatagatcagactccaaaacagttaaccaacaagcttacttttatgccagagacctcgaagtccatcccaaggacacatttgtgttcagtatagatggcaccgtactctctaatattccatactacaaaaaaca

SEQ ID NO: 4672 - DNA, 333 bp, Glycine max
  Clone ID: LIB3073-011-Q1-K1-B9
acgagacgacagaagggggcacaagtgagtttgttgatcgagataactagaaacagtgtgatgaaaatgaaggtccttgttttcttcgttgctacaattttggtagcatggcaatgccatgcgtacgatatgttccctctccgaatgaacactggctatggtgcccgtactccggaggtgaaatgcgcaagttggaggcttgctgtggaagcacacagcatctttggctttgagaccattcctgaagagtgcgttgaagccaccaaggaatacatccatggcgaacaatatagatcagactccaaaacagttaaccaacaagcttacttttat

SEQ ID NO: 4673 - DNA, 385 bp, Glycine max
  Clone ID: LIB3073-010-Q1-K1-G7
gatatctggcagcagaagaacaagtagttgagaactaagaaggagaagcaaatggcttcctcaatgatctcttccccagctgttaccactgtcaaccgtgccggtgccggcatggttgctccattcactggcctcaagtccatggctggcttccccaccaggaagaccaacaatgacattacctccattgctagcaacggtggaagagtgcaatgcatgcaggtgtggccaccagttggcaagaagaagtttgagactctttcctacctgccagaccttgatgatgcacaattggcaaaggaagtagaataccttcttaggaagggatggattccttgcttggaattcgagttggagcacggtttcgtgtaccgtgagcacaaca

SEQ ID NO: 4674 - DNA, 170 bp, Glycine max
  Clone ID: LIB3073-010-Q1-K1-G9
gaacgtgcacgaggcgtcagggaactataacatagccaatgctgccgagaatatgacttcagcagctgttcccaatgctacaccactgaattctacgatggacataccctagccttagctcccagccttggcctctccgcttgaaatctgcctatggagatcgatcctct

SEQ ID NO: 4675 - DNA, 400 bp, Glycine max
  Clone ID: LIB3073-010-Q1-K1-H1
aaggcgagcgtggagaagacgaagaggaggttcgacaactacgcgaagcaggggttgctgtgcggcggcgatgggttgccgcacctgatcgtgagcggagaccagaggcactggggtgagttcatcacacccggaatactattcctgtacatctcgggatggatcggctgggtgggtcggaactacctgattgcgatcagggacgagaagaaacccaccatgaaggagatcatcatcgatgttcctctggcttctcgcttgctcttcaggggtttcagctggcccgttgctgcctacagagaactcatcaacggcgacctcattgccaaggatgtctagataagagagggtggatggctacattggaggaaagcctggagaatttgtatgtggatgggat

SEQ ID NO: 4676 - DNA, 411 bp, Glycine max
  Clone ID: LIB3073-010-Q1-K1-H10
gatcaccagtagccattctcttcagttttaagttacatggtttttcattgctttacttaatctacaatggctgcttcaacaatggctctctcttcatcatcattggctggccaagctatcaagcttgccccctccacccctgagcttggtgttggaagggttagcatgaggaaaacagcctccaaaactgtttcctcaggaagcccatggtacggcccagaccgtgtcaagtacttgggcccattctcaggtgagcccccatcctatctcactggtgaattcccaggtgactatggttgggacactgctgggctttctgctgacccagagacttttgccaaaaaccgtgaactggaagtcatccactccagatgggccatgttgggagccttgggctgtgttttccctgaa

SEQ ID NO: 4677 - DNA, 402 bp, Glycine max
  Clone ID: LIB3073-010-Q1-K1-H11
gacagcatatcaataatctattttatactatgcccacattttgataattatttttctagttgataagccatggctactcgaggaaagcttgaggttgacgttgatctcaagtctaacgcaggcaagtactggcaaacccttaggaactccactgaaatattccccaaggccttccccaatgattacaaaagcattgaggttcttgagggtgatggcaaatcacctggttctatccgccacataagttatggtgaaggttcaccacttgtgaagtcatcctttgagaagattgaggctgttgatgaagaaaagaaggtagtgtcgtacactatcattgatggagaactcctccagcactacaaaacattcaagggagacatttctgtgactccagttggcgat

SEQ ID NO: 4678 - DNA, 392 bp, Glycine max
  Clone ID: LIB3073-010-Q1-K1-H2
ccacactcttcgtagttgagctctttttcattggttgggccgagggtagaaggtgggctgatatcatcaagccaggctgtgtcaacactgaccctatctttcccaacaacaagctcacaggaactgatgttgggtacccaggtgggctttggtttgatccacttgactggggaagtggttctcctgagaagatcaaggagttgagaacaaaggagatcaagaatggggggttggccatgttggctgtgatgggggcatggttccagcgcatttacactggcactggtcctattgacaacctctttgctcaccttgcagatcctggtcatgctactatttttgctgctttcactcccaagtgagaagggttggaacaactctatgattgcaag

SEQ ID NO: 4679 - DNA, 391 bp, Glycine max
  unsure at all n locations
  Clone ID: LIB3073-010-Q1-K1-H3
gaaggcaatattcactaacaaaaacaacaattgattaagagtgttgagtgagatcagaatggccgacttgatgaaaagaatcctcctaatggaggccgagcaagcaagcaaatggtccaaacatgttacttcaaccatcaacagtggcaatcatcacaacaacggtaacaggtatgaccactcataccactacgatgaacgccctatttataacagaggcactttcaatggtgatggcaatgggtcacatattcagggtgactttgactcctcagaacggaactactatggtcgtcgntatggttattaattatctgtatttgatacatagtatatgctgggcaacatcatatagtatgttatgttgtactacccataaataatgttgagc

SEQ ID NO: 4680 - DNA, 390 bp, Glycine max
  Clone ID: LIB3073-010-Q1-K1-H4
taatttgggaattattgctgccatcgccattggtttcattgtcggcgctaacattttgttgggtggggccttctctggagcggccatgaaccccgctgtgacatttgggcctgctgtcgtgagctggacctggaccaaccactggatctactgggccgggcctctcatcggtggtggaatcgctggccttgtttacgaggttgtctttatcagccacacccacgagcagcttcccaccactgactactagagggggggaaatgaaaataaaaaaaaaaaaattgtgtattattgaatttctctggaatcttcttctgtgtatggttttccttccttgtgttttcttcctaattcactttcgagggttgtacttgttcctttcgtcttaaa

SEQ ID NO: 4681 - DNA, 395 bp, Glycine max
  Clone ID: LIB3073-010-Q1-K1-H5
gatattccagtgtttttcatttcatcgtgcattcaatggccaccacagcagctctatccggaaccatggtgagcacctccttcatgaggaggcaacctatgaccaccacaagcctaaagacattccccaacgttggtgaagctctttttggtctgaaaagtggacgaggtggtcgtgtcacttgcatggcctcgtacaaggtgaagctcataaccccagaaggagaagtggagtttgaatgcccagatgatgttttcattgatgacaaggcagaagacgaaggcattgaacttccctactcgtgcagggccggttcttgcgtttcctgtgttggcaaaattgtggaaggtaacgtggaccagtcagatggtagcttccttgatgatgagcaaata

SEQ ID NO: 4682 - DNA, 385 bp, Glycine max
  Clone ID: LIB3073-010-Q1-K1-H6
gacacaactgaacaagataagctatccatagcagccaaagaaatgaagagtaccttgttcgccctctttctactttgtgccctcacctcttacctaccttcagccaccgctggtgatgtggtcgacactgatggtaatcctgttgaaaatggaggcacatactttgtgttgccaactataatattaaacggcggtggaatagaatatgccacatttggaaatgaaacttgccctgtcactgttgcgcaatctcgcgatcagttctgcaagggctttccgataaccatttcatccccagcccgaatccgtcacatcagcgaaggccttagtttgaacattgggttcactttcgcattcccgtgttcccccgcttctgagtggacca

SEQ ID NO: 4683 - DNA, 315 bp, Glycine max
  Clone ID: LIB3073-010-Q1-K1-H7
tgatatataataataccaaaacagcaggagaaagaagggctcccgggacaatctctaatggcactaaggatgtggcctctttcaactgccatgccattaaacttttttctggcttcaaaacttatctcttggcctcctttttctttctccaaatgctaatcttccgtttggattggactaaagtcccctattcacatgaatgggtcaagcaacaaaggttcagtcgccaccattggaataactgacattgccaagaacatttttgacaagttgggtatgttgagctgcccagaaccagttggcccagtttcacaa

SEQ ID NO: 4684 - DNA, 404 bp, Glycine max
  Clone ID: LIB3073-010-Q1-K1-H8
gactgccgcgaaaacagaacagggactcactctcttcgcagcggcactctcggtggctttcatcttcttggggtgagttgtcaagatgtacacatcgaggaagaaaattcacaaggataaggatgctgagccaactgaatttgaggaatcagttggacaggcattgtttgatctagaaaataccaacaatgagctgaaaagtgatctgaaagatttatacataaactcagctgtccaaattgatgtttctggcaaccgaaaggctgtggttatccatgtcccctacagactaaggaaaggattccggaagattcatgtcaggcttgtgagagaacttgagaaaaagtttagtggaaaagatgtaatcttgattgccaccaggaggatagtaaggccaccaaaga

SEQ ID NO: 4685 - DNA, 358 bp, Glycine max
  unsure at all n locations
  Clone ID: LIB3073-011-Q1-K1-A10
ggcactnatccagttcggtccctcacttaagccactgtgtggaactaacaacaacacaaggccatcatcacggcagctgcttctcctatggcaagccaactcaagtccaccttcactaaaactcttgtagctcccaagggcctctctgcctcttcaccactccacctcctgccttctaagaggcaatttagcttcactgttagggccatccaatcagaaaagccaacctatcaagtgattcaaccaatcaacggtgatcccttcattggaagccttgaaaccccagttacatccagccccttgattgcatggtacttatcgaacctncccgcatacaggaccgcaatgagcccactac

SEQ ID NO: 4686 - DNA, 158 bp, Glycine max
  Clone ID: LIB3073-011-Q1-K1-A11
tcaaacgaagaaaggcttatggtggatacctaggcacccagagacgaggaagggcgtagtaagcgacgaaatgcttcggggagttgaaaataagcgtagatccggggattcccgatataggtcaacctttcgaactgctgctgaatccacgggcagac

SEQ ID NO: 4687 - DNA, 406 bp, Glycine max
  Clone ID: LIB3073-011-Q1-K1-A2
gattgtgtattcattagcacatttgcaaagtgttattgttctttttttctcatttgcactgcaaattgcaatggcttccaacaaggttattgccaccatcatggtactttctctccttgcctactcaacatcattcaccaatgcatgtggcacatgccacccaaaacctaccccttctcctcctcctccatcaggaaagtgccctaaggacacattgaagctaggggtgtgtgcagatattttaggtcttgttactgttgttgttggttcccctgtctccagcaagtgttgtgcattgcttgaaggtttagctgatttggtggctgcactttgcctttgcactgctattaaagccaatgttcttggaatcaacttgaatgtgcctatcacactcagtgtgctactc

SEQ ID NO: 4688 - DNA, 383 bp, Glycine max
  Clone ID: LIB3073-010-Q1-K1-F1
ggcagacacgttacttgattcaaaagtagtacaagattcttgggctcatagggttgacactccaacctccctagtcggttttcgaaataaccgcatccatggcgaccgaaccaaaagcagccaccgatgacgtcaagatcgatctcttcgaagacgatgatgagtttgaagagtttgaaatcaatgaagagtgggatgacaaggaggaaggaaaagaagtgactcagcagtgggaggatgattgggatgatgatgatgttagtgatgattttctctccagttgaaaagggagctggagagcaacactaattagaattaaaccacctggtagttattattgcttgatataacatgctatatgacttgggtgtttaagctctagg

SEQ ID NO: 4689 - DNA, 396 bp, Glycine max
  Clone ID: LIB3073-010-Q1-K1-F10
tttgcaccattaaaaatcatagttctggaacagcgagaggagctacaggtaccaatggaagccagggtgaattggttggaacagatgaagaatcttcaagccattaaatctgtgccgagaaaggaaagaaaattcgagagttgactgctgagttagaggtcacaaatcaacgatgtgaagtttatagagcaaacttgctgactgtgctaaaggatatatggaagaccagatgttagcgctctcattaagggttcaatgcgcgagatagattgagagagagtctgtgcccattgcgcaaggggtatataaagtgtgcgtatatgtgcatatggatacctcttatgatatgtgaataacctttgcgtagattatagcgggccgcgttaaaatataatg

SEQ ID NO: 4690 - DNA, 412 bp, Glycine max
  Clone ID: LIB3073-010-Q1-K1-F11
ggagacattttcataatcgaaattggaagcgaggaaggaaaagccaaatcgaaaatggcagtgatggagaggttgaagatgttcgtcgttcaagagccagttgttgccgcttcctgtctcatcgctggcttcggtctttttcttccagcttttgtgaggcccatgttggattcatatcaggcaaccaagcaacctccccagcctgctttaagtgacgtggttgcaggaatgactggtaaaaagtaaaggtgatttacttgacagatgcaagggcaaatttgctaagtttcttgtttgaacttattttaagtctcaaatgtgagagaaataagagtactgaatattggatttaacttccctgtctgacgatctctatctgttccggaatcattcagtggtttcatttcatagc

SEQ ID NO: 4691 - DNA, 402 bp, Glycine max
  Clone ID: LIB3073-010-Q1-K1-F2
atggcaggaaagtacaagaacataccaatattgcggcatctacgtacaactaccaccaagaggatggaagcaattgaaagagagatacgagattcaattgagggtatcataaaaaaacgagagaaagccatggagaatggtgaaacctctaatgaagatttattaagcatacttttggaatcaaatcacaaggaaatccagggacatggaaacagtagggctgttggaatgaccaagcaagaagtaattgaggaatgcaagctattttacctggcagggcaagagaccacttcatctctgctgggttggacaatggtcttattggctaagtatccagaatggcaagcacgagcaagggacgaagtttttcaagtttttggaaaccaaaatccaaacactgat

SEQ ID NO: 4692 - DNA, 398 bp, Glycine max
  Clone ID: LIB3073-010-Q1-K1-F3
ggctcaagtgagtttgttgatcgagataactagaaacagtgtgatgaaaatgaaggtccttgttttcttcgttgctacaattttggtagcatggcaatgccatgcgtacgatatgttccctctccgaatgaacactggctatggtgcccgtactccggaggtgaaatgcgcaagttggaggcttgctgtggaagcacacaacatctttggctttgagaccattcctgaagagtgcgttgaagcaacaaaggaatacatccatggcgaacaatatagatcagactccaaaacagttaaccaacaagcttacttttatgccagagacctcgaagtccatcccaaggacacatttgtgttcagtatagatggcaccgtactctctaatattccatactaca

SEQ ID NO: 4693 - DNA, 401 bp, Glycine max
  Clone ID: LIB3073-010-Q1-K1-F6
ggtgcacaagtgagtttgttgatcgagataactagaaacagtgtgatgaaaatgaaggtccttgttttcttcgttgctacaattttggtagcatggcaatgccatgcgtacgatatgttccctctccgaatgaacactggctatggtgcccgtactccggaggtgaaatgcgcaagttggaggcttgctgtggaagcacacaacatctttggctttgagaccattcctgaagagtgcgttgaagcaacaaaggaatacatccatggcgaacaatatagatcagactccaaaacagttaaccaacaagcttacttttatgccagagacctcgaagtccatcccaaggacacatttgtgttcagtatagatggcaccgtactctctaatattccatactacaa

SEQ ID NO: 4694 - DNA, 373 bp, Glycine max
  Clone ID: LIB3073-010-Q1-K1-F7
ggaatggacgcagatagtgattgagaattgggaattgcgatggatgggagaaacggaagcggaagcaggaggagtggggaagcaggaggaatggggaaggcgataatcgcgttggtaattgggggtcttgtgtactatcactgtgcctaccgcaattctacccttgtctctcttttttccgatgtcttcatcgtccttctctgctccctcgccattctcggtcttctattccgacaaatgggcatccaggttcctgttgatccccttgagtggcaaatatctcaggagagtgcgaacgcgatcgtggcatggttggccaatacgattggtggcgccgagtcagtgttcaaggtggcggctactgggcacgaca

SEQ ID NO: 4695 - DNA, 257 bp, Glycine max
  Clone ID: LIB3073-010-Q1-K1-F8
ggaagttggaagaaggagtgagatcagaggaagggaggaggcattaggtgtagaaagagcgaaagagagagagatggcgtctgggtggggaatcacaggaaacaaaggtcgctgctacgatttctggatggatttcagcgagtgcatgtctcgctgccgagagcccaaggactgtgctcttctccgcgaagactacctcgagtgccttcaccattccaaggagtttcaacgacgaaaccgaatttacaagggggagc

SEQ ID NO: 4696 - DNA, 378 bp, Glycine max
  Clone ID: LIB3073-010-Q1-K1-G10
acgctcgtggaagataccaaggcgcatacatacgaacacagacacgatgaacgacgaaatgctcgacgaagtgctaaatagacttgaatacaagcattcatcctgtaattcaacctttacgactgcctttgaatccgctgctgagtccacgggcagacaaaaaaaaaaaaaaaaaagcggccgatctagacgatctaaactatccaaccttaccttcccatgcattcgatgttatatctcgtctattaagttaactaaattgaacgcactggtccaacgtttacaatgtcaaaactgtgaaaaccctgaacttactcaacttactcgacatgcagcatatgccagtttgggcagttgccataatacccaaaacgatcg

SEQ ID NO: 4697 - DNA, 397 bp, Glycine max
  unsure at all n locations
  Clone ID: LIB3073-010-Q1-K1-G12
gaacaacacgtagtattatttcatggatttcggcctcttcgctctctctcagtgaccagagacagatgatgatggagatggcgaagcgaaacgctgtcgttgcggcactcgcggcgttggtgctactcgcggcgagtgtggcggtggatgctcaggagaactcggacgtgaagacgctggtgaagtacaagcacgggaagaagtactgcgacaaaggatgggaatgtaagggctggtcaatttactgttgtaacctcaccattaccgattatttccagacctaccagttcgagaatctgttctccaagcggaactcgccggtggcgcacgcggtcggattttgggactaccactccttcatcgccgncgncgcgctttttgagccggaagggttcgg

SEQ ID NO: 4698 - DNA, 141 bp, Glycine max
  Clone ID: LIB3073-010-Q1-K1-G2
ggcatttcacttgcggctgcagtagagaagcgctcttcggtcttcgactggcttccaaccggtttctctggattgggaaaatggcccttcgagaaaccggttggtcattccccagttttaatcctcattgagaatggattt

SEQ ID NO: 4699 - DNA, 381 bp, Glycine max
  Clone ID: LIB3073-010-Q1-K1-E9
cacctatgaggggtctacacacggttacgcctaacgagagatcggggaacaatatgggtctaatgagtgaccttgatgattctgatgttacaactcttgcaactggccctgacgagactagccttctggtgcctctcactatgatcatacagtttggactccacagtcctgatgacaactgcaaggcctctgcagctagcttactaatctctcgacttggtaggataatacaccaatcgacacaaggtctatggatcaacaacacaacacatctgctgctaacactagatattcatacatgctaccgctagactatttagcgtcctggtataccacgcatatacacgtttgtcacatggacagactcacggatagtgctac

SEQ ID NO: 4700 - DNA, 393 bp, Glycine max
  Clone ID: LIB3073-010-Q1-K1-D3
gacagacacgcacgctgcttgattcaaaagtagtacatacaagattcttcgctcatagggtttatactccaacatcatctgtttttccatggcgaccgaacccaaagcagtcactgaggacgtcaagatcgatctcttcgaagacgatgatgagtttgaagagtttgaaatcaatgaagagtgggatgacaaagaggaaggaaaagaagtgactcagcagtgggaggatgattgggatgatgatgatgttagtgatgatttctctctccagttgaaaagggagttggagagcaacactaataagaattaaatcacctgctagttattattgcttgatataacatgttatatgactggggtgtttaagctctatgaaggaaatgaaaattatgc

SEQ ID NO: 4701 - DNA, 378 bp, Glycine max
  Clone ID: LIB3073-010-Q1-K1-D4
gagagtggataatggcttcggtatcgctttgcatagccatgagagcacccactccctcagcttctctcattctcactaccccaaaaccatcttcactctctttgaaccttacccgcacttgctccagcgctcgctctccgctcctccattgctccttcctctcttctccttcccatctctcttccccttcctccgtttcaggcttgtcacttggattggatttgacatctaatgttgggaccagaagaggaaaaggttctggcctagttgtgagggcaggcaaggctgctctttgtctgactaagagaagcagatcaagaaaatcattggcacgcactcatggtttccgcaaaagaatgagcacaccaagtggaagag

SEQ ID NO: 4702 - DNA, 391 bp, Glycine max
  Clone ID: LIB3073-010-Q1-K1-D5
tgacacaacacaacacaaagagagagtttggggaagaaatcatcatggcttcagcagcatctgggtttgtgctgtctcttaatgttgcagcttccaccacaaactcaagggtggtcttgttcaacacaaagaacaacgcttctagacttcttgtgagggcttcagatgagcctgcagcggcggcacctgccaccgccacacccccagctgaagctgaagccaaaccaaaaccaccaccaattggtcccaagagaagtgctaaggtgaaaattcttaggaaggaattctactggtacaaaggcactggttcagtggttgctggtgatcaggaccccaacactcgctaccctgttgtggtccgattcaacaaagtcaactatgccaatgtatc

SEQ ID NO: 4703 - DNA, 373 bp, Glycine max
  Clone ID: LIB3073-010-Q1-K1-D7
ggcatagcgtttttcattgtgcattattcaatggccaccacagcagctctatccggaaccatggtgagcacctccttcatgaggaagcaacctatgacgaccaagagcctaaagacattccccaacgctctttttggtctgaaaggtggacgaggtggtcgtgtaacttgcatggcctcgtacaaggtgaagctcataaccccagaaggagaagtggagtttgaatgcccagatgatgttttcattgttgacaaggctgaagaagaaggcattgaacttccctactcgtgcaaggctggttcttgcgtttcatgtgttaggaaaattgtgaaaggtgacgtggaccagtcagatggtagcttccttgatgatg

SEQ ID NO: 4704 - DNA, 387 bp, Glycine max
  Clone ID: LIB3073-010-Q1-K1-D8
gaggcacgaagttgtattttggcatccccgtggcttcaagaagagaatctcaatggaggcccaggagctgaagcgcgtgctccagatgttcgaccgcaacggcgacgggagaataacgaagaaggagctgaacgactcgctggagaacctgggcatcttcatctctgacaaggacctgagccaaatgatccagaggatcgacgtcaacggcgacggttgcgtggacatggacgagtttggggagctgtatcagaccataatggacgagcgcgacaatgaggaggacatgagggaggccttcaacgtcttcgaccagaacgccgacagcttcatcaccgtcgacgagttgaggaccgtcttgtcctccctcggcttgaagcatggaag

SEQ ID NO: 4705 - DNA, 389 bp, Glycine max
  Clone ID: LIB3073-010-Q1-K1-D9
gtttcacatgattagcctgacgcagtgacttggccaaacctataagtcgacggcatacgctgtctacttctttgtatcaacaacaacaatggcaacagccaataaaaccatatatacccatgacaccataaacaactcgctcgatcttgtcatgaatagtagaaaattcaacctcatttactatacggctatcaaatcacttaagatctacaaagggaaattgattatcatagctaacaactacccccatttgaagaaatcaataattgaatactatgctatgttagacaaggttggagttcatcattacaatgttaacaatgtaaatttgtgcacttcatgtgtaaaatattacagagtgtgctgccttaacattaatgatcctggtt

SEQ ID NO: 4706 - DNA, 358 bp, Glycine max
  Clone ID: LIB3073-010-Q1-K1-E1
ggtgtgcagtttaactagggtttttggaatttcgaataaagggaaagagggtgcaaagtgcatcttctttttgttgttttctcaaactttaacaatctcataaataaataatcagaacgaagaagaagaagaattgaattcgaaaaatcatagcgtagcgttggttgcgattgaaacggtacgatgggaagaggaaaattcaagagcaagcccaccggtcgccgccagttctccaccccggaagatatgcttgctggaacctctaaccgtcctcgaacttttagacagaaagaagctgagcatgaagaggagcctgaagaagtatctggggatgaatctggagaagaatcagaagagg

SEQ ID NO: 4707 - DNA, 412 bp, Glycine max
  Clone ID: LIB3073-010-Q1-K1-E11
agaaggggagcgccaatgtttttttcagaggagtgtcatcttgtaatcaaaagagtttatcttatagtaagaaatcgatgtcttactccattttaaggaacaaaacaagagaacaatagcctgacaaagggtttagccataaaatcgaatccatcattgatttgagatattgataaggtgaatactcatttctcgtcaatgctgggcataatgcgggtatagggacctaaaaaagattatcttttcttcctatcttatgaactttaaggtgtatgaagtgtcatttcctatcttagattttaattttagtaggtagataaagagtccatttaacttaagttgatctaggccagaagcagacctacgtcaagataatccttctttgaaacactttggtagtgctcttagatcg

SEQ ID NO: 4708 - DNA, 412 bp, Glycine max
  Clone ID: LIB3073-010-Q1-K1-E12
attaggagagctcagcacattttgcgaaatgaggggcatctggtaatctcatgagcgctactaattgcaataaattccaacatgactccattctaaataactggccatgacactactagcctactgaacagcattacccctatgcatgagtcacttgtcaactatagactaccctaacgcctactcttacatctcgaaagtgctctaaatacacattgtatctagacctgcgtgcgattattataggtctcgatactgttaacgttaatgcctctgaattcagcttgcatagcgcatagcttgatggtatggcttacataaaggctgcacttagcctttgcactgctattaaagacaatgatcttggaatcaacttgaatgtgcctatcacactcagtgtgctactcagagc

SEQ ID NO: 4709 - DNA, 361 bp, Glycine max
  Clone ID: LIB3073-010-Q1-K1-E2
gtgaatcagcaccacattcacctgagctttttgtgaggattccaaagcatggcttcccttgcagcatccactgctgctgcttcccttggcatgtcagaaatgcttggaaaccccatcaacctcagtggtgccacaaggccagctccatctgcctctagccctgcctccttcaagactgtggctcttttctccaaaaagaaggctgcacctccaaaaaaagctgcagctgctgctcctgccaatgatgagcttgccaagtggtatggtcctgacagaaggatcttcttgcctgagggtctcttggaccgatctgagatcccagagtacttgaccggagaagtccccggagactatggttatg

SEQ ID NO: 4710 - DNA, 395 bp, Glycine max
  unsure at all n locations
  Clone ID: LIB3073-010-Q1-K1-E3
ggcacaccaacaccaaaacaaacccactaagatggcttcctttgtatccttcctagtgctgcttcttgcagcccttatcctcatgcctcaagggcttgctacttactacaaaccaattaagaagccaccagtgtacaagcctccagtgtacaagccaccagtgtacaaaccaccggtttataagccaaaaccactggtttacaagccgaaaccaccggtttacaagccaccatataagaagccaccatacaagaaaccaccttatggaaagtaccctccagtagagggcaacacccatgcctaaagcaagcaatgaggtctattatctacttaataaataagaggaactgctttgngttttctagcattgtgatttacaacttcgtaacaatgca

SEQ ID NO: 4711 - DNA, 402 bp, Glycine max
  Clone ID: LIB3073-010-Q1-K1-E4
gaccgtattccttacgctctctcactcacaaacacacactgaactaaaaaacatcaaaagagacatggctgagcaaaccttcatcatgatcaagcctgatggcgtccaaagaggccttattggcgagatcattagcagatttgagaagaaaggtttctacttgaaaggtttgaaacttgttactgtggaccgtccttttgctgagaagcactatgctgatttgtctgccaagcctttctttagtggtttggtggattacattatctctggccctgttgttgccatgatctgggagggcaagaatgttgttacaactggccgaaagattatcggagccacaaacccagctcaatctgagcctggaactatccgtggtgactttgccattgacattggaaggaa

SEQ ID NO: 4712 - DNA, 352 bp, Glycine max
  Clone ID: LIB3073-010-Q1-K1-E5
ggcacaagtgagtttgttgatcgagataactagaaacagtgtgatgaaaatgaaggtccttgttttcttcgttgctacaattttggtagcatggcaatgccatgcgtacgatatgttccctctccgaatgaacactggctatggtgcccgtactccggaggtgaaatgcgcaagttggaggcttgctgtggaagcacacaacatctttggctttgagaccattcctgaagagtgcgttgaagcaacaaaggaatacatccatggcgaacaatatagatcagactccaaaacagttaaccaacaagcttacttttatgccagagacctcgaagtccatgccaaggacacattt

SEQ ID NO: 4713 - DNA, 94 bp, Glycine max
  Clone ID: LIB3073-010-Q1-K1-E6
gaagaaagctgctagcagagggaagttctacacttttttgtttggattgatcgagtgtactttttcttttcgagattggcttggtgtgcagtgc

SEQ ID NO: 4714 - DNA, 394 bp, Glycine max
  Clone ID: LIB3073-010-Q1-K1-E7
ggtgtctgctcactcgctcttctccgccacttctgaatctattgaatcaacaatcatgtcggacgaagagcaccatttcgagtccaaggccgacgccggagcctccaaaacctaccctcagcaagccggtaccatccgcaagaacggctacatcgtcatcaaaggccgcccctgcaaggttgtggaagtttcgacttccaaaactggaaagcacggtcacgctaagtgtcactttgttggaattgatattttcactgccaagaaacttgaggatattgtgccctcttctcacaactgcgatgttcctcatgtgaatcgtactgattaccagctcattgatattgctgaggatggatttttgagtctgcttactgaaaatggtaacactaaggat

SEQ ID NO: 4715 - DNA, 392 bp, Glycine max
  Clone ID: LIB3073-010-Q1-K1-E8
gagtgcagcgatagagataagaaaatgtggcttgtgcagctctcaaccccatttctgaacggacatggtcattccaccacccttctctgcaagcacagttcggcggtgactcagacccactgggccccaccgagtttcctgcctcagatcaatgcgatgaatacaatgcatgggagagtggtgtgctccaccagcgacaagacggtggcagtggaggtggtgcggctggcccctcacccaaagtacaagaggcgcgtgaggaagaagaagaagtaccaggcccacgaccccgataaccaattcaaagtcggcgacatcgtccagctccagaagaccaggcccatcagcaatgaccaaggcctttctcgcactccccgttcccaaaaggccct

SEQ ID NO: 4716 - DNA, 380 bp, Glycine max
  Clone ID: LIB3073-010-Q1-K1-D2
gactcaccacttcaaaacacggcataacacaaagcacaaagcagagctcatccttgagttaaaaaatggcagcagcttcttccatggctctctcatccccatccttggctggcaaggccgtgaagctgggcccatcagccccagaagtgggaagggtgaccatgaggaagaccgtaaccaagcaggtctcctcaggaagcccatggtccggcccagaccgagtcaagtacttgggcccattctctggcgagcccccgtcctacctaaccgggaagttccaaggcaattacggttggaaacctgttggcctttccgaatacccagaaaccttggccaagaaccgtgaactcgaagtgatccactccaggtgggccatgctc

SEQ ID NO: 4717 - DNA, 366 bp, Glycine max
  Clone ID: LIB3073-010-Q1-K1-B6
gacagccattcctcttaagcttgctactgagtttccacactgcataccttaggtcttccgaattcgaagttaatttgcaagatggctgaggaaaaggctcagatcaacattgtggtggttggtcatgtggaccctgaggaggcaaccaccattaacgaactgaagaagcctgttgtggagaaagaagctccagggcatgccatatgagggcatgcacgtacggcctcggaggggaaccagaaaattatgttaacaaaataatctggaaccctaatgtatcagtgtcatcatcagtgtgtagtttaagctagctttgctatggttacgttctttgagatgagagtcttgatgaacagtaccattctg

SEQ ID NO: 4718 - DNA, 393 bp, Glycine max
  Clone ID: LIB3073-010-Q1-K1-B8
gaaggtgcaagagtttgttgtgagctataagctagtttatcgtgaggagaatatgaagttgcttgttttctttgttgctgcagtagttttggtagcatggccatgccatggcgcaggctaccaaaggttccctgtccgaatgaaaactggctatggtgagcgttcttcggaggtaaaatgcgcacgttttacgcttgttgtcgaagcacacaacatccgagcctttaaaaccattcctgaagagtgcgttgaaccaacaaaggactacattaatggcgaacaatttagatcagactctaaaacagtgcaccaacaagctttcttttatgctagtgaacgcgaagtccatctcaacgacatatttatattcggcatagatcacaccgtactctc

SEQ ID NO: 4719 - DNA, 158 bp, Glycine max
  Clone ID: LIB3073-010-Q1-K1-B9
acgcgtacgaacaggtccgacgggtctacacatggggagacataccgggggactgggggacgagtatgggcctaggaaacaacttcatgcttcagatgtcatatcaccaaccatggatccggaagtagacaactctacgtaaaccttagggactgatg

SEQ ID NO: 4720 - DNA, 381 bp, Glycine max
  Clone ID: LIB3073-010-Q1-K1-C1
ggcagaaaaagaaaaaagcgatcatagtttcacgtcggccttatccagtttagggtttcggttctctaccctatctttcacgtatcgaaaccttaaatttacgatcaggtctgagcaatctggttggtagaacctttggtcttagtgagtcaagttttatgtctgaattagacgatcaaattcctactgccttcgatccttttgctgatgcaaatgctgatgactcgggtgctgggtcaaaggagtatgtgcatattcgtgtacagcagcgaaatggtaggaaaagcctgacaaccgttcagggattgaaaaaggaattcagctataacaagatacttaaagacgtcaagaaagagttctgttgcaatggaacagttgttc

SEQ ID NO: 4721 - DNA, 115 bp, Glycine max
  Clone ID: LIB3073-010-Q1-K1-C11
gtggcgagacagtgagagggtggaaatggcggctgtggcagcgagaagcacaggcagcgttggtgttggtgctgtcatcttcatctcagtcgctctcaccacttatttcatctcg

SEQ ID NO: 4722 - DNA, 405 bp, Glycine max
  Clone ID: LIB3073-010-Q1-K1-C12
gaccacctctcatccttgctcttgtttgttcctttgatggtttctttcttgatcatgtcgcttgttggtaaaattagtactgaaattggggttcatgcaactgctgcaaagtggttcaacctctttgcaacgcagctccatcatgttcaaaaccttactgatagagtgcatgaaaccaagctgcatcatggtgatgactggcatcacaacgagtcgatcaaacactggacttgtacaatagatggtaagattacaacatgtctggagagtattgaatccgttgatgaaccgaacataacaatcacctacaagctcttcggaggagatattggtcataagtataaagtctttaagctcatttttcaagctattgacaccgatcatgggggtgttattatcaaatgg

SEQ ID NO: 4723 - DNA, 297 bp, Glycine max
  Clone ID: LIB3073-010-Q1-K1-C2
ggaggcggagacgaagaagtgaagagaagagaagagaagggatttggatctgaaaagagaagatggggggaggaatggaagcaaacaagaacaagttcatagaggattggggcactgccagagagaatctggagttcaatttccgttggactcgccgcaaccttgctcttgttggcatcttcggcatcgctattcccgtcctcgtctacaagggcatcgtccgtgaattccatatgcaagatgaagataatggtcggccgtacaggaagttcatgtgagagagtatggagagtcttt

SEQ ID NO: 4724 - DNA, 368 bp, Glycine max
  unsure at all n locations
  Clone ID: LIB3073-010-Q1-K1-C3
cccacgcgtccgacgacagaaggggacactctctctcaccaaagccttcctagaacgaagaagaaagaagagcaattttcgctcaccaaagaagaagaagcaaacaatggccgatcaacttaccgatgaacagatctccgagttcaaggaagccttcagcttgttcgacaaggacggcgatggttgcatcacaaccaaggagcttggaactgttatgcgttcattggggcaaaacccaactgaggcagagctccaggacatgatcaatgaagtggatgctgatgggaatggtaccattgacttccctgagttcctaaatctcatggccaggaagatgaaggacactgattctgangaggagctgaaag

SEQ ID NO: 4725 - DNA, 370 bp, Glycine max
  Clone ID: LIB3073-010-Q1-K1-C4
gaataaaaaaatcaaataatgattaataaaaagaaaaaagtggaaatcaaatagaaatttataaaatctatgatcctagagtagttccctagacaaaatagaagtaagttcacaaacaagattcaagaataagattctctgatgaaaggagagaaatatgtctgaggatccgctgggtataaggagtgaaagaggggatcatttgtttcttgaacagttcttttaaaaaaaattttctattggatttttgagtcataggagattttatgatttatgacttggaggatttttaagaatagaaaggaataactacattgagttcatcgatttgccctagatatcaatagactcataaattattttttattcg

SEQ ID NO: 4726 - DNA, 391 bp, Glycine max
  Clone ID: LIB3073-010-Q1-K1-C5
ggttgccttctgttgtgttgtgtgtgcataagcgaggcagaaacaaagagcgtggcaattgctatctcccacaaacatctatagttaagatctgcgttaaccactaagatctctgaagcagagggcattgtctactgtcacaggcatgggtgaagaaaagaaagacgaaggaaacaaagaagaagccaaggaggaaaagaaggaagaagagaagaaggaggagccaccaccggagatagtgctcaaagttgatatgcattgtgaggcctgtgcaaggaaagttgcaaaagcattgaaaggattccaaggagtggaagaggtgagtgcggatagcacgacaagcaaagtggtagtgaaaggaaaggcagctgaccccataaaggtgtgtgag

SEQ ID NO: 4727 - DNA, 371 bp, Glycine max
  Clone ID: LIB3073-010-Q1-K1-C6
gacagctattcctcttaagcttgctactgagtttccacactgcataccttaggtcttccgaattcgaagttaatttgcaagatggctaaggaaaaggctcagatcaacattgtggtggttggtcatgtggaccctgaggaggcaaccaccattaacgagctgaagaagcctgttgtggagaaagaagctccagggcatgccatatgagggcatgcacgtacggcctcggaggggaaccagaaaattatgttaacaaaataatctggaaccctaatgtatcagtgtcatcatcagtgtgtagtttaagctagctttgctatggttacgttctttgagatgagagtcttgatgaacagtaccattctgatgta

SEQ ID NO: 4728 - DNA, 426 bp, Glycine max
  Clone ID: LIB3073-010-Q1-K1-C8
acgacagaaggggagcgccaatgtttttttcagaggagtttcatcttgtaatcaaaagagtttatcttatagtaagaaatcgatgtcttactccattttaaggaacaaaacaagagaacaatagcctgacaaagggtttagccataaaatcgaatccatcattgatttgagatattgataaggtgaatactcatttctcgtcaatgctaggcataatgcgggtatagggacctaaaaaagattatcttttcttcctatcttatgaactttaaggtgtatgaagtgtcatttcctatcttagattttaattctagtaggtagataaagagtccatttaacttaagttgatctaggccagaagcagacctacgtcaagataatccttctttgaaacactttggtagtgctcttagattgtaatccaaa

SEQ ID NO: 4729 - DNA, 370 bp, Glycine max
  unsure at all n locations
  Clone ID: LIB3073-010-Q1-K1-D1
ggaactgtgaagtgtatttggtcactgacctatcttggtagagatttgaagtttaaaccttcaaattaatcaaaccattttaatttgcctttagattctgagtcactgctgctatggcgctacgcgtacttcttgtgttggggatgttgctgatgttgtgccttgttaaggtttcatctgatccaaagatagaagaagaaatactggaagcagaagaagaactgcagtttcccgataacgagccacttatcgtgagagacgcgaacagaaggctaatgcaagatatggattggggcgggttgtgcaagacgaggtgcagtgcacattcgaggcccaacttgtgcactanggcgtgtggcacgtgctgtgt

SEQ ID NO: 4730 - DNA, 389 bp, Glycine max
  Clone ID: LIB3073-010-Q1-K1-D11
gagggtttggttattagggttttcgctcaccggtgtgcagtcgagcccccgaagaaaaagcgaaaatgccgtcgcacaagacattcagaatcaagaagaagttggcgaagaagatgaggcagaacaggcctatcccctactggatccgcatgaggaccgacaacaccatcaggtacaacgcgaagcgccgtcactggcgtcgcaccaagcttggattctgaggtgcttgctttgcctcggttctgtttatccaattaattagtgttttattttcttgagccaaaaacaatgctttggagattttaatattttgcattttgttccaagactatattgtgtaaggaacttattgtagttcagactaatggtggtgttggtcaccttttttt

SEQ ID NO: 4731 - DNA, 383 bp, Glycine max
  unsure at all n locations
  Clone ID: LIB3073-010-Q1-K1-D12
aggaacgccgtcgtcgggatgctgcaacggagtgaagagcctcaatgccgccgccaagaccaccgtcgaccgccagacggcgtgcaactgcctcaagtcggccgccagccaaatctccggcttcaacgccaacaacgccgcctcgctccccggcaaatgcggagtctccatcccctacaagatcagcacctccaccaactgcgctaccatcaaggtttgaagagaaagtcatggacgcaggaaaccggaaactactcactagtatatgagtagcattattaatattaagaataagatcgagggtgatgagggctccacttatatgcccctctcctcttgtatgagagatttgcattggatagctntaagttgtgttgcgttgc

SEQ ID NO: 4732 - DNA, 382 bp, Glycine max
  Clone ID: LIB3073-010-Q1-K1-B5
gacacaactgaacaagagaagctatccatagcagccaaagaaatgaagagtaccttgttcgccctctttctactttgtgccctcacctcttacctaccttcagccaccgctggcgatgtggtcgacactgatggtaatcctgttgaaaatggaggcacatactttgtgttgccaactataatattaaacggcggtggaatagaatatgccacatttggaaatgaaacttgccctgtcactgttgcgcaatcccgcgatcagttctgcaagggctttccgataaccatttcatccccagcccgaatccgtcacatcagcgaaggccttagtttgaacattgggttcactttcgcatccccgtgttcccccgcttctgagtgga

SEQ ID NO: 4733 - DNA, 373 bp, Glycine max
  Clone ID: LIB3073-009-Q1-K1-H8
gaagaagcgcactcgcaacaggggaggaagcagagcactgcagcctcatcatttcaaggccaacacaaagcagagaaagcaaaaaagaaaaaaaagcaaagagagagagagagataataaagagaaaaaactgaaggaagaagaaagggtttgtttgtgtgaaagaaagagaaagagaggatgcagagtgagaaccagaacaaccagttggtggtgcagaattcggggagcctgagcttcagcagccatttgtcgaaggaagacgaagagatgtcaaggtctgctctctccaccttcagagccaaggaggaagagattgaaaggaagaagatggaggtcagagaaaaggttcagcttcagttaggtcgagtcg

SEQ ID NO: 4734 - DNA, 381 bp, Glycine max
  unsure at all n locations
  Clone ID: LIB3073-010-Q1-K1-A1
gacagcatatcaataatctattttatactatacgcacattttgataattatttttctagttgataagccatggctactcgaggaaagcttgaggttgacgttgatctcaagtctaacgcagacaagtactggcaaacccttaggaactccactgaaatattccccaaggccttccccaatgattacaaaagcattgaggttcttgagggtgatggcaaatcacctggttctatccgccacataagttatggtgaaggttcaccacttgtgaagtcatcctttgagaagattgaggctgttgatgaagaaaagaaggtagtgtcgtacactatcattgatggagaactcctncagcactacaaaacattcaagggagacatt

SEQ ID NO: 4735 - DNA, 392 bp, Glycine max
  Clone ID: LIB3073-010-Q1-K1-A10
ggcacaagtgagtttgtcgatcgagataactagaaacagtgtgatgaaaatgaaggtccttgttttcttcgttgctacaattttggtagcatggcaatgccatgcgtacgatatgttccctctccgaatgaacactggctatggtgcccgtactccggaggtgaaatgcgcaagttggaagcttgctgtggaagcacacaacatctttggctttgagaccattcctgaagagtgcgttgaagcaacaaaggaatacatccatggcgaacaatatagatcagactccaaaacagttaaccaacaagcttacttttatgccagagacctcgaagtccatcccaaggacacatttgtgttcagtatagatggcaccgtactctctaatattccat

SEQ ID NO: 4736 - DNA, 402 bp, Glycine max
  Clone ID: LIB3073-010-Q1-K1-A11
gacttatctaaaagtagatggtccagattagtaccacaaaaatggagaaatagaataactgaatatcgtatagctcaaaataaagatttaaccaaatgcaattcatatgaaaaaagccaattaattctttacaaagaacaacaagtaaacgcattaaaaaaaaaaattagaaaacaatatagatacgatcttttatcctataattttatcaattatgcagataagaaagactcatatatttatggatatagatccctatttcaagtaaaaaaaaaccaagtgatttcttctaattacaacacgtataaaaaagaattattggatatcatagataatctctttatcaagaattatatatcggaagatgcgattctagatatggaaaaaaatatgtatagaaag

SEQ ID NO: 4737 - DNA, 405 bp, Glycine max
  Clone ID: LIB3073-010-Q1-K1-A12
aggaacgccgtcgtcgggatgctgcaacggagtgaagagcctcaatgccgccgccaagaccaccgccgaccgccagacggcgtgcaactgcctcaagtcggccgccagccaaatctccggcttcaacgccaacaacgccgcctcgctccccggcaaatgcggagtctccatcccctacaagatcagcacctccaccaactgcgctaccatcaaggtttgaagagaaagtcatggacgcaggaaaccggaaactactcactagtatgtgagtagcattattaatattaagaataagatcgaaggtgatgagggctccacttatatgcccctctcctcttgtatgagagatttgcattggatagcttttaagtgtgttgcgttgttatttctctgtatgagttacac

SEQ ID NO: 4738 - DNA, 320 bp, Glycine max
  Clone ID: LIB3073-010-Q1-K1-A2
agggacaactgaacaagataagctatccatagcagccaaagaaatgaagagtaccttgttcgccctctttctactttgtgccctcacctcttacctaccttcagccaccgctggtgatgtggtcgacactgatggtaatcctgttgaaaatggaggcacatactttgtgttgccaactataatattaaacggcggtggaatagaatatgccacatttggaaatgaaacttgccctgtcactgttgcgcaatctcgcgatcagttctgcaagggctttccgataaccatttcatccccagcccgaatccgtcacatcagcg

SEQ ID NO: 4739 - DNA, 241 bp, Glycine max
  unsure at all n locations
  Clone ID: LIB3073-010-Q1-K1-A4
gacacgcaaaccacgcactctctctctctctctctcctcttgaagccctcaaaggctcaaacacaaacactaacactaacactagcattcactcaagagatcaataatgggatctggggccggcaatttcctcaaggtgcttctcaaaaacttcgatgtgcttgctgggcctgtcattagtcttggttatcctctatatgcttcaattagggcaattgagagcaagtctnctattgatgat

SEQ ID NO: 4740 - DNA, 381 bp, Glycine max
  Clone ID: LIB3073-010-Q1-K1-A6
gatctggcagcagaagaacaagtagttgagaactaagaaagagaagcaaatggcttcctcaatgatctcttccccaactgttaccactgcaaaccgtcccggtgccggcttggttgttcaattaattggcttaaattcattggttgctttcccaccctaaagacccaccatgacattaccttcattgctagcaacggtggaagagtgcaatgcatgccagtgtggccaccagttggcaagaagaagtttgagactctttcttacctgccagaccttgatgatgcacaattggcaaaggaagtagaataccttcttatgaagggatggattccttgcttggaattcgagttggagcacagtttcctgtaccgtgagcacaac

SEQ ID NO: 4741 - DNA, 388 bp, Glycine max
  unsure at all n locations
  Clone ID: LIB3073-010-Q1-K1-A8
gatctcacagcagggcaaaagaaagaaactgcaacttcctctgttttgctcccctgtttaggccttttcataagcttagaatgacacacaaggaattttccattgctctagtgactctcattgctgttctctttgtcaacatgaacatccaaggtgccactgctgactatggtagttggcagagtgctcacgccactttttatggcggcggtgatgcttctggcacaatgggtggagcatgtgggtatggaaatctgtatagccagngctatggaactgacactgtggctctaagcactgctttgttcaacaatggcttaagctgtggatcttgctatgaaatgagatgtgatgatgacccaagatggtgcaaacctggctccattac

SEQ ID NO: 4742 - DNA, 386 bp, Glycine max
  Clone ID: LIB3073-010-Q1-K1-B1
agaaaaagataatagaaaaaaaaaaaaaagcgggcgatctaaacgatccatgttgacgatccaatgtttcctacgcgttcattctactatatagctacctaatagcgataccttggtcgaatttactgaacgtcgtgattgaaaaaaccgtgtgggaaaaccatttagttacccagcttaatatccttgtttcacatgctggtttagtcagctggaggcctagccaaaaggcccttaccaatagttgttcacaacagatgggcaatgtgaatggccattgggacgcgcattgtacccgggcattaagctcggtacgcgcagcgggtacgctcaacttgaccgctacatttggcagggtcctatcgctcgcttcctttgctttcttg

SEQ ID NO: 4743 - DNA, 403 bp, Glycine max
  Clone ID: LIB3073-010-Q1-K1-B10
acacacaagaagactcctcaatcatgcatagacatggccaccgtcacttctgcagcagtgtctattccctcattcactggcctcaaggcaagcgcaggcaaagtgagtgccgccgcagttaaagtctcagctccccaagccacaaggttctgcggcatcaaggcttccctcaaagacgttggagtcgctgttgtggccactgctgcgagcgcagttctagctagcaacgccatggccattgaagtgttactgggcactgatgacgggtctctggttttctctcccaactctttctccgtggcccctggggaaaagatcgtgttcaagaacaacgcaggtttcccgcacaacgttgtgttcgacgaggacgagattcctagcggcgtggatgcagggaaaatct

SEQ ID NO: 4744 - DNA, 393 bp, Glycine max
  Clone ID: LIB3073-010-Q1-K1-B11
gacctcaagcataacttgcatagactattgatgaagaaagctattgtcattgatttgctagctccaacaatgggttctagcagattatcattcattttagtacttgtgcttgtaaccttttcatccatgatcattgactcaagggttgcagaggcacgtaccctgccaaaatcagccttattgccttccaaagttgatatacctactgttgttcctcttccactggtggcaccactgccaaatttgcctgttactctccctccagtgcctgaactacctgcagtacctaaagtaccaattcctgaagtaatagttaataacgccaaaataatcccttgagtacctatgatctatccagtcactactacttattttgtcacttgctaaattaac

SEQ ID NO: 4745 - DNA, 403 bp, Glycine max
  Clone ID: LIB3073-010-Q1-K1-B12
ggaagaaggaaagaaggatgagcgtgaagttgaattgcgtgggtggtggcgagactcacaacgtcttcgtttaccgtagtctgttaaccgatgagggtgtacataccctattgaagcgcgtaccttcaaccgcacccgccattctttacgactatcacaggtttcagatcaaaggtcccgtttatcccgctattatgcccgtacagaacatcaacgttaatggcagggtgcttcttgatatctccggagtagaactagatatgttacatgagttcgaggatgatgagtatactacaactgatgttgacgttgccttgaatgacaagtctgaagagttacaagtgtgcgcttatgtttggagcaacccatatgatcctaacttagatgcatagtgggattttga

SEQ ID NO: 4746 - DNA, 396 bp, Glycine max
  Clone ID: LIB3073-010-Q1-K1-B2
ggggtttcagagtggtggggcgtgcagaagagcgtcgcagttgtaaccctaatcagaagaagcgcagcttcaagcgagtgacagccaccagccatgggtcgtatgcacagccgcggtaagggtatatcctcttctgctttgccctacaaaaggacacctcctagctggctcaagatctcttcgcaagatgtcgaagaaaatgtatgcaagtttgcgaagaaaggtttgaccccgtctcagattggtgtcattctcagagattctcacggtattgctcaggtcaatagcgtcactggcagcaaaatccttcgcatcctcaaagctcacggacttgcgcctgaaattccagaggatctgtaccatttgattaagaaggcagtttcaattaggaagcat

SEQ ID NO: 4747 - DNA, 360 bp, Glycine max
  Clone ID: LIB3073-010-Q1-K1-B4
ggaagtttgctgtgcatagatatggcaaaaccgcgctttttggtttcgacgattcctgtgtctgtcaggcacacattctgccctagcaggataagagttgtcgaagaatatcaagaaggtttgtctgatgaagatgatgatctctgtcccgtcgaatgtgtaagagaattcaccactgatgaagagttcagcaaaattctggacaaggctaaagaaactggatctttggtggtggtagatttctttcgcacctcttgtggaagctgcaagtatatagagcagggttttgcaaaactgtgcaagaaatctggtgatcatgaagctccagtaatctttctaaagcataatgtaatggatgag

SEQ ID NO: 4748 - DNA, 355 bp, Glycine max
  Clone ID: LIB3073-009-Q1-K1-H7
caccaacatggacttgaccctttccccttcttcttcttcttcttctttagtaatctcgagaccttcttactcttcatcctcttccaccttgtccttcttggccaccaactcaattctctctaggaaagctagaatcagcaccagaagaagcaaggctctaacttgcaacgcattgttcggattgtgcgttcccgaactcgtcgttattgctggagttgctgtcctcgctttcggacctaagaatttcccccaagtgggtcgctccatcggcaaaaccattaagagcttccaacaggcagcaaaggagtttgagtccgagattaaaaaggaacctgattccacagaagagaaccct

SEQ ID NO: 4749 - DNA, 341 bp, Glycine max
  Clone ID: LIB3073-009-Q1-K1-F4
atcttttcaaaaatggattcctattcgaagggtgcataaccgcatggataagctcacactaacccgtcaatttgggatccaattcggttccttaggaggtatcgggaaggaattttggaatgtgataatatcgattcatacagatacagaagaaagggttctctattgattcaaacgctctacctacgagatagggatagagaaagaggaaaaaaccgaggatttcacatagtacttttggtcgaaaaatcgatctgatttttttcgtacttttcgctcaatgatgaaatgggtcagattctacaggaccaaaccttgtgggagttaaggaatgatgggag

SEQ ID NO: 4750 - DNA, 329 bp, Glycine max
  Clone ID: LIB3073-009-Q1-K1-F8
gcagcatgttagttctaggaaccctagaattgagaaatgtagttctatgttagataatcttgtgggctcacttgatcttcctaaggttaaaaattctgccaaaggaaaggttttgatgcaagctatgtatggagttaaggtggagactgtatttatttgcagggtgtttactgcagcattctctggctcgtcaaagaagttatcagacttgaatgtggccgacatacattcatgggctccagattttagaaggttgcaggatcttgtaaatgaggaaattagagttagattttctggtggtaaatttactgtattgaatgagttggaag

SEQ ID NO: 4751 - DNA, 404 bp, Glycine max
  Clone ID: LIB3073-009-Q1-K1-F9
gactgctattcctcttaagcttgctactgagtttccacactgcataccttaggtcttccgaattcgaagttaatttgcaagatggctaaggaaaaggctcagatcaacattgtggtggttggtcatgtggaccctgaggaggcaaccaccattaacgagctgaagaagcctgttgtggagaaagaagctccagggcatgccatatgagggcatgcacgtacggcctcggaggggaaccagaaaattatgttaacaaaataatctggaaccctaatgtatcagtgtcatcatcagtgtgtagtttaagctagctttgctatggttacgttctttgagatgagagtcttgatgaacagtaccattctgatgtattgctttcctttgaagttaatgcatgcttctta

SEQ ID NO: 4752 - DNA, 390 bp, Glycine max
  Clone ID: LIB3073-009-Q1-K1-G3
gctttttggaaattccttttcctcgtgaacgatcggctcactctcgctctccctagatcgcgcactttcgctctccctcgtcgcgtgctcgttctcgctatcgtgctctcgcgctctctcggatctaactctgtgtagtctgtaatcatgtcaggcaagtatatcgtttctgctattcttggatcatttggagttgcatgggtttgtgattattatgtttcagaaaaaaagctatttggaggtactacccctggcactattacaaacaatgagtgggcagaagagaccgacaaaaaattacaggcatggcctcgtactgcccgtccaccagtggtcatgaatcccataagtcgccaaaatttcattgtgaagtctcgccctgagtaatat

SEQ ID NO: 4753 - DNA, 270 bp, Glycine max
  Clone ID: LIB3073-009-Q1-K1-G4
gaagaagaagaaggagcatggccatgagcatggccatgacagcagcagcagcagtgacagtgattaaactgctgcatcacctatatatttaaaaggtttatgggaccatagtagcgagggctgggccttaatttctgtctctctctctctctctatgtctgtctctctctctttttactttttgcctatcttgagatctatgtatgagtgagaaaaacaaaagtgagaaattgcgcgtgtatctggctgctaattccagtgctattaacc

SEQ ID NO: 4754 - DNA, 334 bp, Glycine max
  Clone ID: LIB3073-009-Q1-K1-G5
gaagaagaagaaggagcatggccatgagcatggccatgacagcagcagcagcagtgacagtgattaaactgctgcatcacctatatatttaaaaggtttatgggaccatagtagcgagggctgtgccttaatttctctctctctctctctctctctctctctctctctctctttttcctttttccctatcttgtgatctatttatgagtgagaaaaacaaaagtgagaaattgtgcgtgtatctggttgctaattcgagtgctattagtctgtggtttggctggtttgtaaccccgctacttgggttatgtttgattgtatattatcctagaga

SEQ ID NO: 4755 - DNA, 373 bp, Glycine max
  Clone ID: LIB3073-009-Q1-K1-G6
gggaaggtccaggagtttgttgtgagctataagctagtttatcgtgaggagaatatgaagttgtttgttttctttgttgctgcagtagttttggtagcatggccatgccatggcgcatgctaccaaaggttccctctccgaatgaaaactggctatggtgagcgttcttcggaggtaaaatgcgcaagttttaggcttgctgtggaagcacacaacatccgagcctttaaaaccattcctgaagagtgcgttgaaccaacaaaggactacattaatggcgaacaatttagatcagactctaaaacagttaaccaacaagctttcttttatgctagtgaacgcgaagtccatcacaacgacatatttatattcg

SEQ ID NO: 4756 - DNA, 346 bp, Glycine max
  Clone ID: LIB3073-009-Q1-K1-G7
gaggagtctttaccaaacgaaccgtagataacgtcgcgtttggttgttaagttgttccctttcaaccatggtggagaacaatcccttcgaggatatctttagggtcgaaaaattaaaccccgatgacaaaaaattattcgataaagtcactcgcattgaagcaagaagtgaaaagtttgacatgtttatgcacctggacattaattctgaggtatatccattaaaggtgggtcagaagtttgctcttgtgcttgtttcatcgcttaatcctgatggaacaccagacactggctattatacccagatcagtcgacaatcactgggcaacaatttttgatatgtcatg

SEQ ID NO: 4757 - DNA, 287 bp, Glycine max
  unsure at all n locations
  Clone ID: LIB3073-009-Q1-K1-G8
gacaatagagactagagaagagagaggtgttggtgccctaatcgtgagaagaaaggaaagggaaaagaggaaaatggtgtgcataaggaaggcgacggtgaaggaccttctggcgatgcaggcgtgcaacctgttctgcctccctgagaactaccagatgaagtactacctctatcacatcctctcctggccccagctcctctacgtcgccgaagactacaacggccgcatcgtcggctacgtcctcgccaagatggtggaagaaaccaccgactgccacggncaca

SEQ ID NO: 4758 - DNA, 269 bp, Glycine max
  Clone ID: LIB3073-009-Q1-K1-G9
gaagaagaagaaggagcatggccatgagcatggccatgacagcagcagcagcagtgacagtgattaaactgctgcatcacctatatatttaaaaggtctatgggaccatagtagcgagggctgtgccttaatttctatctatctctctatgtatctctctctctatatctttttcctttctccctatcttgcgatctatttatgagtgagaaaaacaaaagtgagatattgcgcgtgcatctggttgctaattcgagtgctattagtct

SEQ ID NO: 4759 - DNA, 358 bp, Glycine max
  Clone ID: LIB3073-009-Q1-K1-H10
caacataggtcatcgaaaggatctcgaagacccaccaacgcacgaaagccgggatctttcaaaaaatggattcctattcgaagggtgcataaccgcatggataagctcacactaacccgtcaatttgggatccaattcggttccttaagaagtatcgggaaggaattttggagtgtaataatatcgattcatacagatacagaagaaagggttctctattgattcaaacgctctacctacgagatagggatagagaaagaggaaaaaaaccgaggatttcacatagtacttttggtcgaaaaatcgatctgatttttttcgtacttttcgctcaatgatgaaatgggtcagattctac

SEQ ID NO: 4760 - DNA, 296 bp, Glycine max
  Clone ID: LIB3073-009-Q1-K1-H11
gatatctggcggctgaagagcatgtcgttgagaactaagaacgcgaagcgcatggcttcctcaatgatctcttccccagctgttaccactgtcaaccgtgccggagcccgcatggttgctccattcactgacctcaagtccatggctgggttgcccaccaaaaagaccaacaatgacattaccttcattgctagcaacggcggaagagtgcaatgcatgcaggtgtggccaccatttggcaagaagaagtttgagactctttgctacctgccagaccttgatgatgcacatttggc

SEQ ID NO: 4761 - DNA, 233 bp, Glycine max
  Clone ID: LIB3073-009-Q1-K1-H12
gggggggctgcatgagggttgagagtcatgcccaggagcacaactatgccgtacgagatgagtcttggagcacatgcttcagctattgtcacaaccacaaacaatcccggagcttgcacatgagcatgaacttctacaacaacatcaataggctgggtgcttatactgatgacgactatgactaataactgcatatgcctcatcatgggcatgagaacggcgtatgagccatg

SEQ ID NO: 4762 - DNA, 400 bp, Glycine max
  Clone ID: LIB3073-009-Q1-K1-H3
ggtaagtagcctagtcatactctgtatcatttcatttcgataatcatccatagttactgaagaaaatggcaaccatctccgctgctatcacaaccccatcgatcacccgcgcatgtctagtgcaaaaacgttctcttgggttctcatctcccgttcttggtctgccagcaatgggtaaggtgggaagagtgagttgctccatggaggaaaagccttcttctgtgaaggaaagcagctcaagcatgttggggatgggggcatctttgatggcagcggccagcgccgcagccatgtcaggcccagccatggccttggtggatgagagacttagcactgaaggaaccgggctacccttcggcctcagcaacaaccttctcggttggatcctgttcggcgtctt

SEQ ID NO: 4763 - DNA, 353 bp, Glycine max
  Clone ID: LIB3073-009-Q1-K1-H4
cattcctgagaagtacctggatgagaagaccatcttccaccttaacccttctggccgttttgtcattggtggccctcatggtgatgctggtctcactggaagaaagatcatcattgatacctatggtgggtggggtgctcatggtggaggtgccttttcaggaaaggaccctaccaaggttgacagaagtggtgcctatatcgtgaggcaggctgcaaagagtgttgtggcaaatggccttgccagaaggtgcattgtccaagtttcctatgccattggtgtccctgagcccttgtcagtgtttgtggacacttatggaactgggaagattcctgacaaggagattcttcaaa

SEQ ID NO: 4764 - DNA, 434 bp, Glycine max
  Clone ID: LIB3073-009-Q1-K1-H5
tgatactaagtaggagaataataatcacaatcagggagagcatcgcatcatgaacactgactgatgaagaagggtgtgtgggtttgcaactagtgatggtggcacgtgcagctttctggtgagaggtgagtcccaagggcagagggctgtgatcttgtaccacctgtgggagctgagtcccttgatttgggggcatataactgtcctctcaaccagccatcatacaatttgttgcccagaatgtgatgggaacataagggcaatgcctctgtggttacactcaaaatacccaagtctaagggccatatgtccaattctccttggctccatgaaaggttgctaagctcttgtgtgggttaccctttccaaacttgttaattaccttcatatcatatcatatatagtatgtaataaaccctgttggctgggaatta

SEQ ID NO: 4765 - DNA, 303 bp, Glycine max
  unsure at all n locations
  Clone ID: LIB3073-009-Q1-K1-F2
aaaaattccaatggtaaaatccaataaaatgggattcgatcctaaccataaaatagatatctttttagatagataatttgaaacaaaatcaattaaaatatggaaaaggtctctatgggggattttttgtcttttcctagagtccgattcctattccttcttgtttgtgtcgaaatagaaatattctaaaaatatcaataaaataatcttttttaaccccttcctgaanaatcctatatcttagtttctattttttccaacttagaatatttctgccatatagtattttattgcatataatac

SEQ ID NO: 4766 - DNA, 396 bp, Glycine max
  Clone ID: LIB3073-009-Q1-K1-D10
taatttgggaattattgctcccatcgccattggtttcattgtcggcgctaacattttgttgggtggggccttctctggagcggccatgaaccccgctgtgacatttgggcctgctgtcgtgagctggacctggaccaaccactggatctactgggccgggcctctcatcggtggtggaatcgctggccttgtttacgaggttgtctttatcagccacacccacgagcagcttcccaccactgactactagagggggggaaatgaaaataaaaaaaaaaattgtgtattattgaatttctctggaatcttcttctgtgtatgggtttccttccttgtgttttcttcctaattcactttcgagggttgtacttgttccttttcgtttaaatccttgga

SEQ ID NO: 4767 - DNA, 389 bp, Glycine max
  Clone ID: LIB3073-009-Q1-K1-D11
gagaagaacgagtagttgagaactaagaaggagaagcaaatggcttcctcaatgatctcttccccagctgttaccactgtcaaccgtgccggtgccggcatggttgctccattcactggcctcaagtccatggctggcttccccaccaggaagaccaacaatgacattacctccattgctagcaacggtggaagagtgcaatgcatgcaggtgtggccaccagttggcaagaagaagtttgagactctttcctacctgccagaccttgatgatgcacaattggcaaaggaagtagaataccttcttaggaagggatggattccttgcttggaattcgagttggagcacggtttcgtgtaccgtgagcacaacaggtcaccaggatacta

SEQ ID NO: 4768 - DNA, 113 bp, Glycine max
  Clone ID: LIB3073-009-Q1-K1-D12
gggagtttggcaactggagaaaaagtttcctaccttctttatttgttgataatcatatacgatattcttggaaattcttaagagaaaggagatcgggtgtatttgtaatgtac

SEQ ID NO: 4769 - DNA, 335 bp, Glycine max
  Clone ID: LIB3073-009-Q1-K1-D3
agggcacaagtgagtctgttgatcgagataactagaaacagtgtgatgaaaatgaaggtccttggtttcttcgttgctacaattttggtagcatggcaatgccatgcgtacgatatgttccctctccgaatgaacactggctatggtgcccgtactccggacgtgaaatgcgcaagttggacgcttgctgtggaagcacacaacatctttggctttgagaccattcctgaagagtgcgttgaatccacaaaagaatacatccatggcgaacaatatagatcagacttcaataacagctaacaacaggcttacttttatgccagagacctcgaagt

SEQ ID NO: 4770 - DNA, 305 bp, Glycine max
  Clone ID: LIB3073-009-Q1-K1-D4
ggcaagatgggaaagcacagtttgttttcattgggtgctgatcggaacaaacagggaatagaagagaggagaagatgggtttcataatggaatttgcggagaacttggtattaaagttgatggaagatccgaaggaaagggatcggaggttcatggagcacgtttatagagtgaaggacaggtgcgagaagacgaatgagatgtggagctaccctatgcgaccctatgggttttggacattcgaacgccacaattctcagcttgcttgggatgcacagattagccaagtggccgggaggagggac

SEQ ID NO: 4771 - DNA, 375 bp, Glycine max
  Clone ID: LIB3073-009-Q1-K1-D8
gacttcaaaacactcataacacaaagcacaaagcaaagctcatccttgagttaaaaaatggcagcagcttcttccatggctctctcatccccatccttggctggcaaggccgtgaagctgggcccatcagccccagaagtgggaagggtgagcatgaggaagaccgtcaccaagcaggtctcctcaggaagcccatggtacggcccagaccgagtcaagtacttgggcccattctctggcgagcccccgtcctacctaaccggtgagttcccaggcgactacggctgggacactgctgggctttccgcagacccagaaaccttcgccaagaaccgtgaactcgaagtgatccactccaggtgggccatgctcgga

SEQ ID NO: 4772 - DNA, 399 bp, Glycine max
  Clone ID: LIB3073-009-Q1-K1-D9
ggttctagtgtgtgattgtttgttgttgtaactcgttcttcttcttttgttgttctgtgtttgtgtttgttttttctctcacctgaaaatgtcttgctgcggtggtaactgtggttgcggaagctcctgcaagtgcggcaacggctgcggaggctgcaagatgtacccagacttgagctacactgagtcaaccaccaccgataccttggtcatgggagtggcacctgttaaggctcaatttgagggtgctgaaatgggtgtgcccgctgagaacgatggctgcaaatgtggaccaaactgctcctgcaacccctgcacttgcaagtgaggtgttgggagagcaagcttcaagcagagatagccccttattaggaaataatgataaactattaatgtgta

SEQ ID NO: 4773 - DNA, 233 bp, Glycine max
  Clone ID: LIB3073-009-Q1-K1-E1
accctaccattccaaagctcgaaggtgaacagggagtgagtgagttattcaaaacccaggatttggcgaaagtgaagcgatgagcagtgataggaatattggggttgccttggacttttccaaaggaagcaaaatcgctctcaaatgggctattgacaatcttctccgcaacggtgacatactctacatcgtccacatcaagccttccggaagaagtgaattccgaaatcttc

SEQ ID NO: 4774 - DNA, 347 bp, Glycine max
  Clone ID: LIB3073-009-Q1-K1-E10
gaaacagggagagagaaaaaggagaaccttcttttctctgtttttttgttgttattcttcttccagacctaaagacccaaagcaccgattctgatttcaagaattacatcatcatatcaagaaaaccttggaactacacaaaaatggtgtcggcgaacaaggagatggtcgtgcactgctttgacaccctcctcgctcactacaacagcacggaagcacctcctcctgccttcgatcaggctcaacatccattgtttgttacatggaagaaagtggtgaatggtggagatcctcgccttcggggatgtattggaactctggaagcacgcagcttgatcaatgggctc

SEQ ID NO: 4775 - DNA, 365 bp, Glycine max
  Clone ID: LIB3073-009-Q1-K1-E11
gattctgcaaaaccaaatcaagaaggaacagagaaagagagaggagaggcattgtaatcgtgacctctcaagcttctttcaaagacagagaagaaagaacaaaacaatctcaacaaacacaaacaaacaagcaaacatcaatggcaaactcgtatacgtggttcttcctcgcgatttctgccaccctcttgcttcttctgtcttcgtcgccgacagcggacgcgggagcgctgggcatggaaatgacatggataccctccatgcccatggaagaggagttccagctggacagcgagatcagccggcgcatcttagccacgaccaagtacatcagctacggtgcgctgcagaggaacactgtcccc

SEQ ID NO: 4776 - DNA, 374 bp, Glycine max
  Clone ID: LIB3073-009-Q1-K1-E12
gggaacatgaacgtgcgatgctgattcttgtatgacaaatcctcacgaagagagagagagagctgtgtctgaattctgaaaaattaaaccatgtctattacaacaacacaagctttgacccccttgtcgtcatcacgtaaaagtagaagtagaaccacatttggcgccaattccacctccacaagcttccccgctactccactctcctccaatctcctcctcttcaagctcagtcacacttcttccaaacgaacctcaaccaccttccatgccttcaagcgcttttcccccgtcatggagcggcaggattgcacggttaagatggagattgatgtgcccatctctgtagcctatacttgttattctgatcgcga

SEQ ID NO: 4777 - DNA, 252 bp, Glycine max
  Clone ID: LIB3073-009-Q1-K1-E2
cttacctaacaataaaccctagcttttcaatgctcgggcgggcacagtgagtgagtgagttatttcaaaaacccgcgattcggctaaaggataccaattaacatagacttgcatattggggttgccttggacttttccaaaggaagcaaaatcgctctcaaatgggctattgacaatcttttccgtgacggtgacatactctacatcgtccacatcaagcctttcggaggaagtgaattccgaaattttctt

SEQ ID NO: 4778 - DNA, 79 bp, Glycine max
  Clone ID: LIB3073-009-Q1-K1-E3
tgtgtgtcacaagcgtcctcagactcactaaatgcggcaaacatttttatgttcagggcattccccaaaaagtcaacct

SEQ ID NO: 4779 - DNA, 339 bp, Glycine max
  Clone ID: LIB3073-009-Q1-K1-E4
ggttctagtgtgtgattgtttgttgttgtaactcgttcttcttcttttgttgttctgtgtttgtgtttgttttttctctcacctgaaaatgtcttgctgcggtggtaactgtggttgcggaagctcctgcaagtgcggcaacggctgcggaggttgcaagatgtacccagacttgagctacactgagtcaaccaccaccgagaccttggtcatgggagtggcacctgttaaggctcaatttgagggtgctgaaatgggtgtgcccgctgagaacgatggctgcaaatgtggaccaaactgctcctgcaacccctgcacttgcaagtgaggtgttgggag

SEQ ID NO: 4780 - DNA, 104 bp, Glycine max
  Clone ID: LIB3073-009-Q1-K1-E8
cgtagtaagcgacgaaatgcttcggggagttgaaaataagcgtagatccggggattcccgatataggtcaacctttcgaactgctgctgaatccacgggcagac

SEQ ID NO: 4781 - DNA, 204 bp, Glycine max
  Clone ID: LIB3073-009-Q1-K1-E9
gtacacaacttttctcagattcactaattcggcatccatttttatgttaaggacattccccaaaaaagtaaaaaacgaaagaaacaaagaaagttatttcaaggaaaaaacgagagaagaaaaaaaaaagtatggtgcgaactttatgcaatttccacagaagaaagttggcaaattttttcatcaaaagaaagttgtcttaca

SEQ ID NO: 4782 - DNA, 322 bp, Glycine max
  Clone ID: LIB3073-009-Q1-K1-F1
aaaccaacccccttagaagggcttccttggattccttccaagggctgcttcttgcagcccttatcctcatgcctaaagggcttgctacttactacaaaccaattaagaagccaccagtgtacaagccttcagtgtacaagccaccagtgtacaaaccaccggtttataagccaaaaccaccggtttacaagccgaaaccaccggtttacaagccaccatataagaagccaccatacaagaaaccaccttatggaaagtaccctccagtagaggacaacacccatgcctaaagcaagcaatgaggtctattatctacttaata

SEQ ID NO: 4783 - DNA, 57 bp, Glycine max
  unsure at all n locations
  Clone ID: LIB3073-009-Q1-K1-F10
gagacctcaggtcaggcggggctacccgctgagtttaagcatatcaataagcggngg

SEQ ID NO: 4784 - DNA, 383 bp, Glycine max
  Clone ID: LIB3073-009-Q1-K1-C9
gaactacctttgaatttctctctcttctgctctcactctcactctctctcacttggggttgaagatgagaatttgtggagcagcaatcagcagcagctacaccaccacgtccaattcccttttagtgtttgcttcctcttccctctccagtcctgcaaaaaccaagttcctgccctcactttctagattttctgtcaagcgtccgtacttcctttcccaaacttatccgcgcattgctgtgaacaagccctccatgaacctgttgaacagactcgggtttggcagcgcaagagcaacagagaacatggattcatccattcctcagggtccagatgatgacataccagcaccaggccagcagtttgccgagtttggtgctggct

SEQ ID NO: 4785 - DNA, 317 bp, Glycine max
  Clone ID: LIB3073-009-Q1-K1-A9
taatttgggaattattgctcccatcgccattggtttcattgtcggcgctaacattttgttgggtggggccttctctggagcggccatgaaccccgctgtgacatttgggcctgctgtcgtgagctggacctggaccaaccactggatctactgggccgggcctctcatcggtggtggaatcgctggccttgtttacgaggttgtctttatcagccacacccacgagcagcttcccaccactgactactagagggggggaaatgaaaataaaaaaaaaaaaaattgtgtattattgaatttctctggaatcttcttct

SEQ ID NO: 4786 - DNA, 406 bp, Glycine max
  Clone ID: LIB3073-009-Q1-K1-B10
ggcacaaatgagtttgttgatcgagataactagaaacagtgtgatgaaaatgaaggtccttgttttcttcgttgctacaattttggtagcatggcaatgccatgcgtacgatatgttccctctccgaatgaacactggctatggtgcccgtactccggaggtgaaatgcgcaagttggaggcttgctgtggaagcacacaacatctttggctttgagaccattcctgaagagtgcgttgaagcaacaaaggaatacatccatggcgaacaatatagatcagactccaaaacagttaaccaacaagcttacttttatgccagagacctcgaagtccatcccaaggacacatttgtgttcagtatagatggcaccgtactctctaatattccatactacaaaaaacat

SEQ ID NO: 4787 - DNA, 398 bp, Glycine max
  Clone ID: LIB3073-009-Q1-K1-B11
gacaccaacaccaaaacaaacccactaagatggcttcctttgtatccttcctagtgctgcttcttgcagcccttatcctcatgcctcaagggcttgctacttactacaaaccaattaagaagccaccagtgtacaagcctccagtgtacaagccaccagtgtacaaaccgccggtttataagccaaaaccaccggtttacaagccgaaaccaccggtttacaagccaccatataagaagccaccatacaagaaaccaccttatggatagtaccctccagtagaggacaacacccatgcctaaagcaagcaatgaggtctattatctacttaataaataagaggaactgctttgtgttttctagcattgtgatttacaacttcgtagcaatgcatattc

SEQ ID NO: 4788 - DNA, 401 bp, Glycine max
  Clone ID: LIB3073-009-Q1-K1-B12
gatccttaataagtcagaactttgtcacaactttttcccatcactttgtggaaagatattcattctaagggaaaaatgacagaggagcaatccaaaaaggtggctgagactgagagttttccctctaatcctgcacctgaacctgttgttgttccaaaggaggatgtggcagaggagaaatctgtaattccacaaccctctccctctcctgctgatgagtccaaagctcttgtcatagttgagaagactagtgaagttgctgaagagaaaccgattgaggggtctgtgaaccgagatgctgtgcttgcaagagttgcaaccgagaagaggctgccactaatcaaagcatgggaagaaagtgaaaagtccaaagcagataacaagtcttacaaaaagctttc

SEQ ID NO: 4789 - DNA, 155 bp, Glycine max
  Clone ID: LIB3073-009-Q1-K1-B3
gtgactcgttctgtgtcggctgcgacttgacctcttgttggttcggctgctagaagaccatctaccggacagctgctagatgacgacggaacggggagcacagtatcgccggcaagcccggtaacacctgcagaggctcccccatgttcgcttac

SEQ ID NO: 4790 - DNA, 356 bp, Glycine max
  Clone ID: LIB3073-009-Q1-K1-B4
gaccatagcaagtagcaaggagactagttctgtattcagattacattgcaaaaatggcatcattcaccatgacagcttctatctttggctgcccagctgtcaccaaacggtcggcagtggctgcgcagaggagattactcgtagtgagtgctgccaaagctgaaggggaaaaggtcagttatgacaacaatgatagcaatggaaggaggaacttgatgttcgctgtggctgctgctgctgttttctctgttgctgggatggcagtggcagatgagcctaaaccaggaacctcagaagccaagaaaaagtatgccccggtttgtgtcaccaatcctacagctagcatttgtcgcaat

SEQ ID NO: 4791 - DNA, 339 bp, Glycine max
  Clone ID: LIB3073-009-Q1-K1-B6
taaaaaagctattgccattgatttgctagctccaacaatgggttctagcagattatcattcattttagtacttgtgcttgtaaccttttcatccatgatcattgactcaagggttgcagaggcacgtaccctgccaaaatcagccttattgccttccaaagttgatatacctactgttgttcctcttccactggtggcaccactgccaaatttgcctgttactctccctccagtgcctgaactacctgcagtacctaaagtaccaattcctgaagtaatagttaataacgccaaaataatcccttgagtacctatgatctatccagtcactactactta

SEQ ID NO: 4792 - DNA, 371 bp, Glycine max
  Clone ID: LIB3073-009-Q1-K1-C10
gagatcccgtcgtcgcaggcgcagagtagagcagcacagaagagggaaaacggcaccgccgccgtagaagaaaacaaccatggtgcacgtctccttttacaggaactatgggaagacattcaagaagccgcgtcgtccgtacgagaaggagcgtctcgacgcggagttgaagctggttggtgagtacgggcttcggtgcaagagagagctgtggagggtgcagtacgcgctcagccgcatccgcaacaacgcgcggaacctcctcaccctcgacgagaagaacccgcgccggatcttcgagggagaggcgctgctccgaaggatgttccgttacggtctcctcgatgagacacagaacaagcttgattacg

SEQ ID NO: 4793 - DNA, 158 bp, Glycine max; identical to SEQ ID NO: 4423
  Clone ID: LIB3073-009-Q1-K1-C12

SEQ ID NO: 4794 - DNA, 241 bp, Glycine max
  Clone ID: LIB3073-009-Q1-K1-C2
actgcgctgacaagactaactgcaccaagggaaacagctatggtgttatagtagagactgagaagagctacatcgagactgttgacatggatgttccagcagctgagcatgatgggaagtgcaagtgtggcgctaactgcacttgcacggactgcacttgtggccattaaggaatatgtatgaaaatgtaattgccatgtgtgtggcaatacaaatctccaaataatgtaatcttcgtatg

SEQ ID NO: 4795 - DNA, 428 bp, Glycine max
  Clone ID: LIB3073-009-Q1-K1-C3
ggttttcatctgcggaaactcctccgttctcaaaaccctaacccgacgccaccattcatccgatccaatgagttcgagaggagccagcgcgctgctatctcgagccagcaggattcgctcgaagcttcaaacggcgctggaagccaccgttttggaggtggacgacgtgtcgtaccagcacgcgggccacgccgccgtgaagggaagttccgacaaagaaacccacttcaacgtgaagatcgtatcgcccaagttcgagggccagagcctcgtcaaacgacaccgtctcgtctacgacctcctcgccgaggagctccagagcggcctccacgccctctctatcgtcgccaaaacgctccacgaaacaaaccctaataagtgacgcgtcgggagtgtcaaagttcgaggcttttccgcctttcattcaa

SEQ ID NO: 4796 - DNA, 339 bp, Glycine max
  Clone ID: LIB3073-009-Q1-K1-C4
aggagagggagaaagtcctagtgaggtgtgtatacaattactatagccacatatatacacacagcagtagttaaagtcttaaagattagaataagatcagtggtggagagaaagttcatttcagtagttgttttgggagtatgtttggtgctgggaatgtcccaatatgttgatgcaaggaacttggagaaaaaatcaaaggaagaggtgaagaagccagaatcgtgcttagatggagggtccattggtggtgttgggggcattggcggcattggcggtgctggtggaggtggtggtggtttaagaggtggctatggaggaggagctggtggtgatagt

SEQ ID NO: 4797 - DNA, 355 bp, Glycine max
  Clone ID: LIB3073-009-Q1-K1-C5
aggggggcacaagtgagtttgttgatcgagataactagaaacagtgtgatgaaaatgaaagtccttgttttcttcgttgctacaattttggtagcatggcaatgccatgcgtacgatatgttccctctccgaatgaacactggctatggtgcccgtactccggaagtgaaatgcgcaagttggaggcttgctgtggaagcacacaacatctttggctgtgagaccattcctgaagagtgcgttgaagcaacaaatgaatacatccatggcgaacaatatagatcagactccaaaacagttaaccaacaagcgtacttttatgccagagacctcgaagtgcatcccaagggacaca

SEQ ID NO: 4798 - DNA, 351 bp, Glycine max
  Clone ID: LIB3073-009-Q1-K1-C6
gggttgggggataaatggagggatacacatcacattttctcaaagtaatttattaattaataaataaatggcggcggcggcggcagtgacggtgctactcccacctaggattccgaccgccaccaacgttacccgctgctctgctttgccttctctgcctcctcgcggcaccaacactaaaaccactttgctcttatcttccctcaaccacttctcagtgtcccgaaaatcttctctgcttcagaccagagcttcttcagaggaatcatcctcagtagatgccaatgaggtgttcacagatttgaaggaaaagtgggatgctctttgaaacaagtccacagtactttttta

SEQ ID NO: 4799 - DNA, 414 bp, Glycine max
  unsure at all n locations
  Clone ID: LIB3073-009-Q1-K1-C7
gacaagtgagtttgttgatcgagataactagaaacagtgtgatgaaaatgaaggtccttgttttcttcgttgctacaattttggtagcatggcaatgccatgcgtacgatatgttccctctccgaatgaacactggctatggtgcccgtactccggaggtgaaatgcgcaagttggaggcttgctgtggaagcacacaacatctttggctttgagaccattcctgaagagtgcgttgaagcaacaaaggaatacatccatggcgaacaatatagatcaggctccaaaacagttaaccaacaagcttacttttatgccagagacctcgaagtccatcccaaggacacatttgtgttcagtatagatggcaccgtactctctaatattccatactacanaaaacatggatatgggg

SEQ ID NO: 4800 - DNA, 366 bp, Glycine max
  Clone ID: LIB3073-009-Q1-K1-A8
ggaactgtgaagtgtatttggtcactgacctatcttggtagagatttgaagtttaaaccttcaaattaatcaaaccattttaatttgcctttagattctgagtcactgctgctatggcgctacgcgtacttcttgtgttggggatgttgctgatgttgtgccttgttaaggtttcatctgatccaaagatagaagaagaaatactgggagcagaagaactgcagtttcccgataacgagccacttatcgtgagagacgcgaacagaaggctaatgcaagatatggattgtggtgggttgtgcaagacgaggtgcagtgcacattcgaggcccaacttgtgcactatggcgtgttgcacgtgctgtg

SEQ ID NO: 4801 - DNA, 306 bp, Glycine max
  Clone ID: LIB3073-009-Q1-K1-C8
ggttgagaataggattggatggaaaacgggatcaagcttaattactttccgttgtgatcaattgttgtaccgatgggtgtttatgaaagtggagcttcgggaaagatgggcactcgtcatgtgctgcaactcgatttgtcgcaacaagaggagaagaagataccttgatgaaacccaatcaggatgtgaacaaaggccactgctcaaactcttcgatatgcgctagctaggcaatccctttacttaatctgataattgatctcttgctaccagatctgcccttacggatctgttgaagggaggatt

SEQ ID NO: 4802 - DNA, 406 bp, Glycine max
  Clone ID: LIB3073-008-Q1-K1-H10
gagaaagagaagcattagcaaaagcaagaagaactagtctaagcagaaatggcctcttcagtgatggcatctgtggccctcaaacctgcccctttcactgttgagaagtcctcagttagaggccttccctccctctcaaggaactcctcttcattcagagttgtggccagtggtggcaagaagatcaagactgacaagccttatggaattaatggtggcatggctttgagggaaggagttgatgcatctggcaggaaaggaaagggaaagggcgtttaccagtttgtagacaaatacggtgctaatgtcgatggttacagtcctatctacgacaccaaggactggtctccaaccggtgatgtctacgctggcggtacgactggcttggctatctgggctgtgactc

SEQ ID NO: 4803 - DNA, 365 bp, Glycine max
  Clone ID: LIB3073-008-Q1-K1-H11
gacaccaacaccaaaacaaacccactaagatggcttcctttgtatccttcctagtgctgcttcttgcagcccttatcctcatgcctcaagggcttgctacttactacaaaccaattaagaagccaccagtgtacaagcctccagtgtacaagccaccagtgtacaaaccaccggtttataagccaaaaccaccggtatacaagccgaaaccaccggtttacaagccaccatataggaagccaccatacaagaaaccaccttatggaaagtaccctccagtagaggacaacacccatgcctaaagcaagcaatgaggtctattatctacttaataaataagaggaactgctttgtgttttctagca

SEQ ID NO: 4804 - DNA, 423 bp, Glycine max
  Clone ID: LIB3073-008-Q1-K1-H2
ggaaggaagggagggaagaatagaatgggatctggaagtggaaaacacactggagagttcttcaggagaagggatgcatggaggaagcatccgatgctcaccaatcagctccgccacgccacccctggcctcggcatcgccgtcgtcgccttcggtatctacctcgccggcgaacaagtctacaataggctctatgctcccgatcctcattcgatttctcacgtgaaagccggggatcaccactaaacgtttggacggacgcactccattccatcatcacttaataagcttgctagcatgttctcgcagcctttaatgtttaaatttcagaccgtgttcgcttctttggcactcactatgttgtcttgtatgcctacattttatgccttcaatttgcatccacaatgaaactcaatttactcc

SEQ ID NO: 4805 - DNA, 428 bp, Glycine max
  Clone ID: LIB3073-008-Q1-K1-H4
gagatttgtgcgttaagaaagaaagaaaaaaaaaaaagtcatggcagcgagtgacggttgcagcagcttcttaacattgtcgtgtgcaggtgcagtgcaaaatcaacatgtatcacaccctacaacgtttttgggagttcctaaaaacaatcagagaaaaaggaaaacaccgcacaggttagttgtggtcgcggtgactcaaggctctgctgaatcaagcaagtccgatgaaaaaatcccttcgtgggccaaaccggactccgatgaacctccgccgtgggcccgggacgagcccaacaacaacagttcgcaacaagaaggatttgagatcccgttctatgcttatttgtttgcctctgctatcactgctattgccgctataggctccattttcgaatatgtgaatcaaaaagccctgttttcgagta

SEQ ID NO: 4806 - DNA, 211 bp, Glycine max
  Clone ID: LIB3073-008-Q1-K1-H5
ctgcgagaaaactactgacggggatcttgcaacagaagaacaactagttctgaactaataacgagaagcaaatggttttctcaatgatctcttccccagctgttaccactcttaaccgtgccggtgcccgcatggtcgctccattcactggcctcaagtacatggctggcttactcaccaagaagaccaacaatgacattacctccattgc

SEQ ID NO: 4807 - DNA, 360 bp, Glycine max
  Clone ID: LIB3073-008-Q1-K1-H6
agggaagagtgcaagagtttgttgtgagctataagctagtttatcgtgaggagaatatgaagttgtttgttttctttgttgctgcagtagttttggtagcatggccatgccatggcgcaggctaccaaaggttccctctccgaatgaaaactggctatggtgagcgttcttcggaggtaaaatgcgcaagttttaggcttgctgtggaagcacacaacatccgagcctttaaaaccattcctgaagagtgcgttgaaccaacaaaggactacattaatggcgaacaatttagatcagactcttaaacagttaaccaaccagcctttctttatgctagtgaacgcgaagtcccttacaacg

SEQ ID NO: 4808 - DNA, 432 bp, Glycine max
  Clone ID: LIB3073-008-Q1-K1-H7
ggcacaagtgagtttgttgatcgagataactagaaacagtgtgatgaaaatgaaggtccttgttttcttcgttgctacaattttggtagcatggcaatgccatgcgtacgatatgttccctctccgaatgaacactggctatggtgcccgtactccggaggtgaaatgcgcaagttggaggcttgctgtggaagcacacaacatctttggctttgagaccattcctgaagagtgcgttgaagcaacaaaggaatacatccatggcgaacaatatagatcagactccaaaacagttaaccaacaagcttacttttatgccagagacctcgaagtccatcccaaggacacatttgtgttcagtatagatggcaccgtactctctaatattccatactacaaaaaacatggatatggggtggagaaatttaactc

SEQ ID NO: 4809 - DNA, 399 bp, Glycine max
  Clone ID: LIB3073-008-Q1-K1-H9
gattatatttgagttcaaacaaatcaaagccatggccacctccaacttctctattgttctctccgtctccctagccttctttgtggtgctacttaccaaggcacactcgaccgataccgtttccttcaccttcaacaagttcaacccagtccaaccaaacattatgctccaaaaagatgctagtatctcatcctctggggtgttacaactcaccaaagttggcagcaacggcgtgcccacctacggatctctcagtcgtgccctttacgctgccccaatccagatttgggacagcgaaaccggcaaggtaaccagctgggctacatcctttaaattcaacatcttcgcacccaacagatcaaactcagctgacgggcttgccttcttattggcacccgt

SEQ ID NO: 4810 - DNA, 378 bp, Glycine max
  Clone ID: LIB3073-009-Q1-K1-A12
ggaagcttcaataagtaagtatcaatggcttccgaagaatcccagaacaagccccccagcgagcagtccactaccgaactcatcacgagcgcgaagctggtggcggaggcggcgcagtcggctctgaagagcgacagcgacatagtggacaaggccaaggtggctgacgctgccggcgatcttctcgacgcggcggggaagtatggaaaacttgatgacaaacaaggcatagggcaatatgttgacaaggctgctgattatctgcataattaccagggtgataataccactgctccttcacagcctgcagagtctaaaggtgaagaaagtggtggtgggttaggtggtcttgcaaacttggctggaggcttcttcaaa

SEQ ID NO: 4811 - DNA, 420 bp, Glycine max
  Clone ID: LIB3073-009-Q1-K1-A2
gaaggtgcaagagtttgttgtgagctataagctagtttatcgtgaggagaatatgaagttgcttgttttctttgttgctgcagtagttttggtagcatggccatgccatggcgcaggctaccaaaggttccctctccgaatgaaaactggctatggtgagcgttcttcggaggtaaaatgcgcaagttttaggcttgctgtggaagcacacaacatccgagcctttaaaaccattcctgaagagtgcgttgaaccaacaaaggactacattaatggcgaacaatttagatcagactctaaaacagttaaccaacaagctttcttttatgctagtgaacgcgaagtccatcacaacgacatatttatattcggcatagataacaccgtactctctaatatcccatactatggaaaacatgg

SEQ ID NO: 4812 - DNA, 408 bp, Glycine max
  Clone ID: LIB3073-009-Q1-K1-A3
gacacatactcatacactgcacactctctctacttaaacttcagcctttgcatatctctctctcttcatcattgtgctctagtaatcacactagtagtcagtagcagtagtacttgtacccataacataacaaccatggctaatgtgtcccttctccttttccttttgttcttgtctctctcatcaggagggaatttgatcatggctaatgggcagaaaacttggtgtgtggcaaagccttcatcagatcaagcaacccttttggccaacctcaattatgcctgttctcaagttgattgcaggattcttcagaaaggatgcccctgctcttaccctgacaatctcatgaaccatgcttccatagccatgaatctctattacccaatccagggaaaaaaccactggaat

SEQ ID NO: 4813 - DNA, 122 bp, Glycine max
  Clone ID: LIB3073-009-Q1-K1-A4
aaagtgcaagagtttgttgtgagctataagctagtttatcgtgaggagaatatgaagttgttaggtttctttgttgctgcagtaattatggtatcatggccatgccagtgcgcatgctacca

SEQ ID NO: 4814 - DNA, 402 bp, Glycine max
  Clone ID: LIB3073-008-Q1-K1-G9
gagagttaagttgggaacataccaatctacaataaacgatgattctcattatctccctcattttttctcttctctctttctcccatgcttctgtcctagatttctgtgttgcggattatgcaggtcctattggacctgcaggatattcctgcaagaagccttcaaaggtcacagcagatgattttgcttacagtggccttggcattgctggtaacacctcaaacattatcaaagctgcagtgacccctgcatttgatgctcagtttgctggtctcaacggtcttggcatttccgcagcacgtttggacttagcagcaggtggagttataccacttcacactcatcctggagcttcagaattacttgttgtaattgaagggagcatcctagctggattcattt

SEQ ID NO: 4815 - DNA, 394 bp, Glycine max
  Clone ID: LIB3073-008-Q1-K1-F12
gacggcactcgttttcgttctcgttctggtttatagatctttgcgaaggaggtttacagcgctcaaccaaagatgcagaacgaggaaggacagatcactgagctttacattcctaggaagtgctccgccacaaacagattgattaccgctaaggaccatgcttcggttcagatcaacattgggcatgtggatgagaatggcgtctacaatggccatttctccacttttgccctctgcggattcatccgtgctcagggtgatgctgacagtgctctagaccgcttgtggcagaagaagaaagttgaagttaagcaacagtagacacccatgatagtttgttacctcgttatgtattaatttctactcttgctagagatatttgagtactatgatt

SEQ ID NO: 4816 - DNA, 393 bp, Glycine max
  unsure at all n locations
  Clone ID: LIB3073-008-Q1-K1-F2
ggctcaaactctcttatctccctcttacacacccaagcgctactactactactttctttctagatatgggttctggtgctgtgcaactgtttctgatcttggggctcttggctagctcatgcttagcccaagccccaggtgctgcaccgtcacaaccacccactacaaccccatcaccaccaccacccagatcagcacctgcaccagcacccaccagaccagcaacccgaccaccagcaaccctaccaccagcagcaactccaccaccagcagcaactccaccaccagcagcaacaccaacaccagcaccagcaccaccaacggctgcacctacacctgcttcctctcctgcagcctctcctncttcaccttctnctacagtgacaccaagcc

SEQ ID NO: 4817 - DNA, 428 bp, Glycine max
  unsure at all n locations
  Clone ID: LIB3073-008-Q1-K1-F4
gacataaacttcaagcgagcaaacaaacaactagcaagggaagaaagaaactacagaaaagaaatggcttccacttctgcagtttcaatggctatgccagtaacttatgctagccagaagagggtggtgcctagctcggatgcattcttcaagccactgcctctacggtcttccaaggcagtgacagcatcaaaactcaatggaaggtttcaagtgaaggcctccatgaaggagaaagttgtgacggggctcaccgcagctgcattgacagcttcaatgatggttcctgatgtggctgaggctgncgttacaccttctctcaagaacttcttgctcagcatcgcggcaggtggagttgttggtgccattattggtgctgtgatcggtgtttccaatttcgatcccgtcaagcgtagctgatggagttc

SEQ ID NO: 4818 - DNA, 415 bp, Glycine max
  unsure at all n locations
  Clone ID: LIB3073-008-Q1-K1-F5
aggaacgccgtcgtcgggatgctgcaacggagtgaagagcctcaatgccgccgccaagaccaccgccgaccgccagacggcgtgcaactgcctcaagtcggccgccagccaaatctccggcttcaacgccaacaacgccgcctcgctccccggcaaatgcggagtctccatcccctacaagatcagcacctccaccaattgcgctaccatcaaggtttgaagagaaagtcatggacgcaggaaaccggaaactactcactagtatatgagtagcattattaatattaagaataagatcgagggtgatgagggctccacttatatgcccctctcctcttgtatgagagatttgcattggatagctntaagttgtgttgcgttgttatttctctgtatgagttacacatagttatat

SEQ ID NO: 4819 - DNA, 418 bp, Glycine max
  unsure at all n locations
  Clone ID: LIB3073-008-Q1-K1-F7
gggtgtggcactcaaacattgtttgttgtaggaagaggaatcttgagaaatggcaggggacagcaagagcaagattctgttcatcggagggactggttacatcggaaaattcatcgtggaagccagcgccaaagctggccacccaactttccttttggtgagggagtccactctctccaaccccgcanaatcacccctcatcgacaatttcaaaggcctcggtgtcaatcttgttttaggagatctatacgatcaccaaagtttggtgagtgctataaagcaggtcgatgtggtaatttctactgtangacacctgcaactagctgatcaaggatagatcatttctgcaattaaagaagcaggaaatgttaagaagttctatccatctgagtttggaaatgatgtggaccggactcat

SEQ ID NO: 4820 - DNA, 368 bp, Glycine max
  Clone ID: LIB3073-008-Q1-K1-F8
ggcacaagtgagtttgctgatcgagataactaggggcagtgtgatgaaaatgaaggtccttgttttcttcgttgctacaattttggtagcatggcaatgccatgcgtacgatatgttccctctccgaatgaacactggctatggtgcccgtactccggaggtgaaatgcgcaagttggaggcttgctgtggaagcacacaacatctttggctttgagaccattcctgaagagtgcgttgaagcaacgaaagaatacatacatggcgaacaatatagatcagactccaaaacagtttaccaacaagcttacttttatgccagagaccctcaagtccatcccaaggacacatgtgtgttcagtatagatg

SEQ ID NO: 4821 - DNA, 403 bp, Glycine max
  Clone ID: LIB3073-008-Q1-K1-F9
ggaaaagctaagcctttgaagaaacccaagtctgataagaaggattacgacgagattgatgtggctaacattcagaagaaaaaggaagaggagaagacgctaaaggagttgaaagccaaggcgcaacagaagggaagctttggaggttctgggctcaagaaaagtggaaagaaataagggctctttatcatgattgtatgcattcaatattgagccctgtaattacagttgctaccatgataacttctcttattattgtggcctactttattgctaatgtgtactgaactgaggtatgtcgtgatgtaagctgcaataagttaattgtctgtagctttattgtatccccttcatggggttctgataattacatccttttagtagtgttgtggatttggcataa

SEQ ID NO: 4822 - DNA, 315 bp, Glycine max
  Clone ID: LIB3073-008-Q1-K1-G1
ggcacaagttatgtttgacgatcgagataactagaatcagagtgaggataatgaaagaactcgtgtgatacgttgctacaatattcggtagcttggatgtactgggctcatcagataatccatcttggaatccatagccaaatctggccacataactttgcttttgatgagggagttcactctctccaacctcgcaaaatcacccatcatcgacaatttcaaaggcctcggtgtcaatcttgctttatgagatctatacgatcaccaaagcttgcttagtgctatatagcaggtcgatgtggtaatttctactgt

SEQ ID NO: 4823 - DNA, 350 bp, Glycine max
  Clone ID: LIB3073-008-Q1-K1-G10
gactggaaggaagggagggaagaatacaatgggatctcggagtggttaacacactggagagctcttcacgagaagggatgcatggaggaagcatccgatgctcaccaatcagctgcgtcacgccacccctggccttggcatcgccgtcgtcgccttccgaatctacctggtcggcgaacatgtctacaacacgctctatgctcccgatcctcattcgatttctcacgtgagaggcaaggatcaccactaaacgtttggacggacgcactacattccatcatcacttaataagcttgctagcatgttctcgcagcctttaatgtgtaaatttcaaaccgtgttcacttctt

SEQ ID NO: 4824 - DNA, 383 bp, Glycine max
  Clone ID: LIB3073-008-Q1-K1-G11
ggaacgcagccaaagaaaagaaaatcctcaattttctgagcagccaaacactctctctctgtctctcgaaaattctcagtttgcagagaaaatctgaatcatgtcgtggcaagcgtatgtcgacgatcaccttctgtgtgacatcgaaggtaaccacctcgctcacgctgctatcatcggccaagacggcagcgtttgggctcagagtaccgacttccctcagttcaaacctgaggagataactgccatcatgaatgactttaatgagcctggatcacttgctccaactggattggatctcggtggcaccaaatatatggtcatccagggtgaacccggtgctgtcattcgagggaagaagggtcctggtggtgttactgtga

SEQ ID NO: 4825 - DNA, 436 bp, Glycine max
  Clone ID: LIB3073-008-Q1-K1-G3
ggatgatcggagggattaaaaaaaaaacctattctcctgatatggtctactcttgtgggtggtgggtaggaacaattcccagtgttctcagattggaatcccattgactctaccatggccacgccctctgatccttccaaccaagaagctgttgtaagaaggagaaacaacggaccccctattaagttcctccttcctctcatatatgcccctgttctccctctaattcgtctatcgctgcggcataaacccgtcttgagagatcgcttgtttactgctgtgttggctggggcctttgctcatggcttctatttggtaacagatctgtatgatattgagagcaagtgattaagcagagcatgtttcagacatttcttcggcatcatttacatcacaacctcaggtcttcaataaatttcttcgaccactatttaca

SEQ ID NO: 4826 - DNA, 436 bp, Glycine max
  Clone ID: LIB3073-008-Q1-K1-G4
catgggtcttgagaaagaacttggctatacatcaagttgtccctcaggacaagaaggaggctgcgatcctcctcatggctttatcttatggccttgttcattgatgaaccttaatagctagctagagctaccaccgcttcacttaatttcagatcgttaattaattaggttaatttcttgccttgctgtcttatgactagctagtttttgttagattattattattgtgtgagatcaatggtttgagttatatgtgcgagaagagtatgtaatattgcagtactagctagttagttaggaaaggggagggaaaataaagttacatgggtgtggaggtgatcttatgtacttcatataatattatgtctgatgtgaacatgttgaggaccaaaaaatgtgggtctcttcttgatgtatcttaaaaataagttcaata

SEQ ID NO: 4827 - DNA, 436 bp, Glycine max
  unsure at all n locations
  Clone ID: LIB3073-008-Q1-K1-G5
gaaggtgcaagagtttgttgtgagctataagctagtttatcgtgaggagaatatgaagttgtttgttttctttgttgctgcagtagttttggtagcatggccatgccatggcgcaggctaccaaaggttccctctccgaatgaaaactggctatggtgagcgttcttcggaggtaaaatgcgcaagttttaggcttgctgtggaagcacacaacatccgagcctttaaaaccattcctgaagagtgcgttgaaccaacaaaggactacattaatggcgaacaatttagatcagactctaaaacagttaaccaacaagccttcttttatgctagtgaacgcgaagtccatcacaacgacatatttatattcggcatagataacaccgtactctctaatatcccatactatgaaaaacatggatatggngtggaggaa

SEQ ID NO: 4828 - DNA, 440 bp, Glycine max
  Clone ID: LIB3073-008-Q1-K1-G7
gacgctagcacaaataaaaagaaccaaatttcagaggaaaaaagagtcacttgaaggttcaatgggcgaggaagagaaaaaattagaagaaagcaaagaggagaacaaaaaagcagaggaaccaaagaaggaagaagagaagaaagaggagagaaaaactgaggaatcaaaagatgacaaagaatctaaggagaaagttgcgccgtcagaaatcgtgcttaaagtgttcatgcattgtgaagggtgtgctcgcaaggttcgtcgctccctcaaaggattcccaggggtcgaagatatactcacagattgcaagtctcacaaggtggttgtgaaaggagaaaaagcggatccgctgaaggttctagagagactacagaagaaaagccatagaaagggtgaacttctctttccgatcccaaaaccacccacggaagaggaga

SEQ ID NO: 4829 - DNA, 401 bp, Glycine max
  Clone ID: LIB3073-008-Q1-K1-F11
ggcccgaactccttcgacgaccgtcttccccaatcgcctgcgtctctctctgaattgacaagcttaaagacaaagtcttaaatggctggtccaaggattgcccatgctaccttgaaaggtccgagtgtggttaaggagataataattggaataacacttggcttagctgctggtagcgtgtggaagatgcaccactggaatgaacagaggaaaaccaggaccttctacgatttactggaaaagggtgagatcagtgttgttgcagaggaacagtgaaaatgttcttgttttgttgcctatgctctccatttataggctttttttcccatgctatattcaattggctcttcaactgtaaatgagccaacttactattagattgaaaagaataagtttcttac

SEQ ID NO: 4830 - DNA, 386 bp, Glycine max
  unsure at all n locations
  Clone ID: LIB3073-008-Q1-K1-D12
ggcacaagtgagtttgttgatcgagataactagaaacagtgtgatgaaaatgaaagtccttggtttcttcgttgctacaattttggtagcatggcaatgccatgcgtacgatatggtccctctccgaatgaacactggctatggtgcccgtactccggaagtgaaatgcgcaagttggaagcttgctgtggaagcacacaacatctttggctttgagaccattcctgaagagtgcgttgaagcaacaaaggaatacattcatggcgaacaatatagatcagactccanaacagttaaccaacaagcttacttttatgccagagaccttcgagtccatcccaaggacacatttgtgttcagtatagatggcaccgtactctctaata

SEQ ID NO: 4831 - DNA, 275 bp, Glycine max
  Clone ID: LIB3073-008-Q1-K1-D2
tacggctgcgaagacgagcggaaggtgaggcatttcattagcagcgttaaagaagagagaagaaaaatgcgaaagttcgatccatggcccgctttcttcaagcgcgagtggaaacgcaactggcccttcctcgttggattcgcagtctccggagctctaatcaccaaactttcccttggccttacctaggatgatgcttataattctaaattcgtttaggctcatacatagtgatttttgaattgcgacatttgcctagctttgcattttatgtt

SEQ ID NO: 4832 - DNA, 401 bp, Glycine max
  Clone ID: LIB3073-008-Q1-K1-D6
gataaccatggcgtctaactctgcttccgctctttacttccttttatgcctatcgcccatcactttgcttctttctgcgtttcgtggctcaagctcaatctcatgctccagctccaactttcaagtcctgggaaaggaatgcgaactatcctgtgaaggtaattgaaggggaaatatggcctgaccccgtgaaaagaggagtgccttccacctttaaaatccgggttaatcctccggacccatttcaaagcgggacctggtaataggaaattcctaagccggaattgaagccccacctggttccattcttcatgaacctttggagggaagcaccatgcccagtacctgcaggcaactttgtgctcgttcacaccgaattattgcctccggttaccccacca

SEQ ID NO: 4833 - DNA, 309 bp, Glycine max
  Clone ID: LIB3073-008-Q1-K1-E1
ggcactcgatcatcaatattaaagctaaccactcgtttgcattgggtagtatatatcattctaagaagtaagaatctcagcaacaccaattagacaataaacagcgacgatgaaagcaatgacagcaacgacaacgtttgatgtctctgccgcttgcttccgtgcccctccttcttgttcaccgaatccatgccacaccagtttttcagttataaactccctgaatcctcacaagggacgacggataagcgttgctgttccacctaagtttccaagcttccggagggaagcagctctgcaggggaattt

SEQ ID NO: 4834 - DNA, 388 bp, Glycine max
  Clone ID: LIB3073-008-Q1-K1-E11
gatagctcaatggcatcatcatttgtgggtactttattacccaaccacttcacacaaaccaaacactcagctgttcctgcaagtagatcaggtgctccaagaaggaggggagtgcacttagcaacaacaagagcagagaccatgactactgtcatagaaaaactgggcattaagattgagaggaaccctcctgagtccaagctcactcaactgggtgttaggcaatggcccaaatggggttgccctccaagtaagttcccatggacatatgaagccaaagagacttgctatcttctggaaggaaaagtgaaggtctttcctagtgggtcgaatgagtcagttgaaattgctgctggtgacttggttgtgtttcccaaagggatgagtt

SEQ ID NO: 4835 - DNA, 401 bp, Glycine max
  Clone ID: LIB3073-008-Q1-K1-E12
ggttctagtgtgtgattgtttgttgttgtaactcgttcttcttcttttgttgttctgtgtttgtgtttgctttttctctcacctgaaaatgtcttgctgcggtggtaactgtggttgcggaagctcctgcaagtgcggcaacggctgcggaggctgcaagatgtacccagacttgagctacactgagtcaaccaccaccgagaccttggtcatgggagtggcacctgttaaggctcaatttgagggtgctgaaatgggtgtgcccgctgagaacgatggctgcaaatgtggaccaaactgctcctgcaacccctgcacttgcaagtgaggtgttgggagagcaagcttcaagcagagatagcccttaattaggaataatgataaactattaatgtgtagct

SEQ ID NO: 4836 - DNA, 418 bp, Glycine max
  Clone ID: LIB3073-008-Q1-K1-E2
ggcatagcatattccagtgtttttcatttcatcgtgcattcaatggccaccacagcagctctatccggaaccatggtgagcacctccttcatgaggaggcaacctatgaccaccacaagcctaaagacattccccaacgttggtgaagctctttttggtctgaaaagtggacgaggtggtcgtgtcacttgcatggcctcgtacaaggtgaagctcataaccccagaaggagaagtggagtttgaatgcccagatgatgttttcattgttgacaaggcagaggacgaaggcattgaacttccctactcgtgcagggccggttcttgcgtttcctgtgttggcaaaattgtggaaggtaacgtggaccagtcagatggtagcttccttgatgatgagcaaatagatagtggctgggttc

SEQ ID NO: 4837 - DNA, 139 bp, Glycine max
  Clone ID: LIB3073-008-Q1-K1-E3
gagcactggttagctctcaatcatcaactatttaaaacaatggtcagaggctaacttctccactagttttctgtgtcgagagctctttggacaacaccctctaaaccaatctatcaagtcctgattaatcttgacagcc

SEQ ID NO: 4838 - DNA, 417 bp, Glycine max
  unsure at all n locations
  Clone ID: LIB3073-008-Q1-K1-E4
ggcagcagaaaagcaagtagttgagaactaagaagaaggaaatggcttcctcaatgatctcctccccagctgttaccaccgtcaaccgtgccggtgccggcatggttgctccattcaccggcctcaaatccatggctggcttccccacgaggaagaccaacaatgacattacctccattgctagcaacggtggaagagtacaatgcatgcaggtgtggccaccaattggcaagaagaagttcgagactctntcctacttgccagacctcgatgatgcccaattggcaaaggaagtcgaataccttctaaggaaaggatggattccttgcttggaattcgagttggagcacggtttcgtgtaccgtgagcacaacaagtcacctggatactatgatggacgctactggaccatgtgga

SEQ ID NO: 4839 - DNA, 396 bp, Glycine max
  Clone ID: LIB3073-008-Q1-K1-E6
ggtagccgctgcatctgaacgaaacacagagggagagagagagagagagagtgagagagaagcagttgttcatcacaatgggtaaggttcacggatctctcgcacgtgcggggaaagtgagaggacaaactcccaaagtggcgaagcaagacaagaagaagaagccacgcggacgtgctcacaagagaatgcaatacaaccgccgattcgtcaccgccgtggtgggattcggaaagaagcgtggaccaaactcgtcggagaagtgagggaggcgtttggaagatgatggtttttcttagtttgcgaaatgtatcatctctttttatttgattgatgaactcaaactttgatagttctgattaagcttcaatgaaggagttttttgctagttaatat

SEQ ID NO: 4840 - DNA, 321 bp, Glycine max
  Clone ID: LIB3073-008-Q1-K1-E8
gacttcatcgatttcgtcgattatgccaagtcctaattggccagctgataagattaagggagaagagtgttggacggaccttgaatactgcaagcaaaaggggttgtattatcccattgcaaagactctagcagagaaagcgggttgggactttgcgaaggagacaggttttgatgttgtcatgataaaccctggtacagcattgggccctctgcttcctccaagaatcaattcaagcatggctgtgcttggtagtgttctcaaagggggcaaagagacctacgaggacttctttatgggaacggctcacttcaaagacat

SEQ ID NO: 4841 - DNA, 397 bp, Glycine max
  Clone ID: LIB3073-008-Q1-K1-E9
ggcacaagtgagtttgttgatcgagataactagaaacagtgtgatgaaaatgaaggtccttgttttcttcgttgctacaattttggtagcatggcaatgccatgcgtacgatatgttccctctccgaatgaacactggttatggtgcccgtactccggaggtgaaatgcgcaagttggaggcttgctgtggaagcacacaacatctttggctttgagaccattcctgaggagtgcgttgaagcaacaaaggaatacatccatggcgaacaatatagatcagactccaaaacagttaaccgacaagcttacttttatgccagagacctcgaagtccatcccaaggacacatttgtgttcagtatagatggcaccgtactctctaatattccatactac

SEQ ID NO: 4842 - DNA, 387 bp, Glycine max
  Clone ID: LIB3073-008-Q1-K1-F1
gagtattcagattattatacattgcaaaaatggcatcatgcaccatgacagcttccatccttggctgcccagccgtcaccaaccggtcggcagcgacgcagaggagatcagtggtagtgaatgcagccagcaaatctgttgaaggggaaaaggtcagttatgacaacaatggtagcaatgcaaggaggaacttgatgttcgccacggcggcggctgctgtttgctcttttgctgcagggatggcattggcagatgagccctaaccaggaccctcagaagccaagaaaaagtgtgccccggtttgggtcaccaatcctacagttaggatttgccgcaatggaggacctttttggtttaacttttggaatttggaaatgtccaaggaat

SEQ ID NO: 4843 - DNA, 413 bp, Glycine max
  Clone ID: LIB3073-008-Q1-K1-B7
gatctggcagcagaagaacaagtagttgagaactaagaaggagaagcaaatggcttcctcaatgatctcttccccagctgttaccactgtcaaccgtgccggtgccggcatggttgctccattcactggcctcaagtccatggctggcttccccaccaggaagaccaacaatgacattacctccattgctagcaacggtggaagagtgcaatgcatgcaggtgtggccaccagttggcaagaagaagtttgagactctttcctacctgccagaccttgatgatgcacaattggcaaaggaagtagaataccttcttaggaaaggatggattccttgcttggaattcgagttggagcacggtttcgtgtaccgtgagcacaacaagtcaccaagatactacgatggacgctact

SEQ ID NO: 4844 - DNA, 395 bp, Glycine max
  Clone ID: LIB3073-008-Q1-K1-B9
gaggcctcagaagcagaacaacaatggccactgccactgtttcaatttcaacactatgcgctaccttcggaacccattgcgccatttcccacgaccctaaacctcttttttctcaacctttcagtctcaatcgctttccttccacctcttacaagctcactttatcacctcgctcacctatttcaacccttcctaaggtctctgaatccgcggttgccgaaaccgaaaccggttcgtccgagcccgaaccggaccaaattgtcccggctcagcctccctcctgggaacccggtctcttcgctgtcgtaatgattggtggacgccaatatattgttcacccggggcgacatcttactgttcagaggttgaaaggtgctaatgttaatgataagatt

SEQ ID NO: 4845 - DNA, 429 bp, Glycine max
  Clone ID: LIB3073-008-Q1-K1-C1
gatctggcagcagaagaacaagtagttgagaactaagagggagaagcaaatggcttcctcaatgatcttttccccagctgttatcactgtcaaccgtgccggtgccggcatggttgctccattcactggcctcaagtccatggctggcttccccaccagaaagaccaacaatgacattacctccattgctagcaacggtggaagagtgcaatgcatgcaggtgtggccaccagttggcaagaagaagtttgagactctttcctacctgccagaccttgatgatgcacaattggcaaaggaagtagaataccttcttaggaagggatggattccttgcttggaattcgagttggagcacggtttcgtgtaccgtgagcacaacaggtcaccaggatactacgatggacgctactggaccatgtggaagct

SEQ ID NO: 4846 - DNA, 402 bp, Glycine max
  Clone ID: LIB3073-008-Q1-K1-C10
gggttgaagggagcttaccttacctgaagatggctgcggtgtcctttgccgtgggacttttaccttacgcttcagttcgatttcccgtattgagcaacgccaactcactgaaactcagttcctcagctagcatctctactccaattcctcagcaaaagctctgctctcttctttcccccctccctctaagccctcgccctcgccctctcaccattgtatccgctaagggctacaaaatgaaaacccacaaggcatctgcaaagcggtttagggtgaccggacgaggcaaaatagtgcgtaggagagctggcaagcagcatttgctcgtcaagaagaataccaagcgcaaatcccgactctccaaaatgcacgcggtcagcaggagcgactatgacaacgtaa

SEQ ID NO: 4847 - DNA, 379 bp, Glycine max
  Clone ID: LIB3073-008-Q1-K1-C11
gacagctattcctcttaagcttgctactgagtttccacactgcataccttagatcttccgaattcgaagttaatttgcaagatggctaaggaaaaggctcagatcaacattgtggtggttggtcatgtggaccctgaggaggcaaccaccattaacgagctgaagaagcctgttgtggagaaagaagctccagggcatgccatatgagggcatgcacgtacggcctcggaggggaaccagaaaattatgttaacaaaataatctggaaccctaatgtatcagtgtcatcatcagtgtgtagtttgagctaactttgctatggttacgttctttgagatgagagtcttgatgaacagtaccattctgatgtattgctttc

SEQ ID NO: 4848 - DNA, 329 bp, Glycine max
  Clone ID: LIB3073-008-Q1-K1-C12
gaaaagaagaagtatcactcatataatactctggatcatttcatttcgataatcatccatagctactgaagaaaatggcaaccatctctgctgctatcacaaccccatcgatctcccgcgcaactcttgtgcaaaagcgggtctcatctcccgttcttggtttgccagcaatgggtaaggtgggaagagtgagttgctccatggaggaaaaaccttattctgtgaaggaaagcagctctagcatgttggggatgggggcatctctgatggcagctgccagcgctgcagccatgtcaggcccagccatggcccttgtagatgagagactg

SEQ ID NO: 4849 - DNA, 312 bp, Glycine max
  unsure at all n locations
  Clone ID: LIB3073-008-Q1-K1-C2
aacagaattccatggaaggcaaatcaattatccaaatatgcagcatgtatcaagaggtgtacaactctacaatctataatcctatcagaaatagtcatgcatcttaatttgcagataagatccgtgacataagttgtataatttttgaagttggtaatgaatatcctttccacttttgtgctacttcggtacaactttttggaaatggaatggattgtgttgtaaagggtagggtgtcaaaggtaaacattttgtagtntaattttgaagaattaagtattaccaatttaaatcctttcaagtttgtggaac

SEQ ID NO: 4850 - DNA, 224 bp, Glycine max
  Clone ID: LIB3073-008-Q1-K1-C3
ggaagcttcaataagtcagtatcaatggcttccgaagaatcccagaacaagccccccagcgagcagtccactaccgaactcatcacgagcgcgaagctggtggcggaagcggcgcagtcggctctgaagagcgacagcgacaaagtggacaaggccaaggtggctgacgctgccggcgatcttctcgacgcggcggggaagtatggaaaacttgatgacaaaca

SEQ ID NO: 4851 - DNA, 332 bp, Glycine max
  Clone ID: LIB3073-008-Q1-K1-C4
ttggcaaagtgcaacacaaccaaagacaattgctcattcagagggttgaggttgagtgatcaatctttaaaatcgcggaataggaagtgccatccatttttaagtatgctcatgcttgtttgttactcgtgtgacaagttgatgcaataggtggtggcaccttattctttgcctgtaattataaactatgtcagagtagattttagctctgtattagtactttcaaattttgttgtcaaaatgccttggcaacactctaattagttgagacaccttcgaagctgtagtgttcaaaccagcaatgtagttctttttccttgctccctcataaa

SEQ ID NO: 4852 - DNA, 427 bp, Glycine max
  Clone ID: LIB3073-008-Q1-K1-C5
gacacaattctctctcatcatctttgctattacctctgttgccaaactctaaaaatttttagttccacaaaaccaaaccaaaatggcagcagcctcggcctcatccaccatgatatcaacaccagccttatctccaagcacaagcatccaaaagcaccatcatttgaagccatccaacgtgtgctttcaaggccttagacccctcacaaggttcacaaccaaagtgagcagcaccaccaaaagggttattccaaagggtggtgtcggtgttagagctgaactcaactcagcacttgtcataagcctcagcactgggctctccctcttcttggggaagtttgtgttcttcaacttccaaagggagaacgtggcaaagcaagtgcctgagcagaacggactcacacactttgaggctggtgacacacgt

SEQ ID NO: 4853 - DNA, 373 bp, Glycine max
  unsure at all n locations
  Clone ID: LIB3073-008-Q1-K1-C6
ggtctcgtggaagtgtaagcaagcaggaccctagcggcgcctgctttctttgttcgtgttttgcatcaggatggagtctcaggtgaagcacgcacttgttgtcaaagttatgggtcgtactggatccagaggacaagtgacccaggttagagtgaagtttttggatgatcagaaccgtcacatcatgaggaatgtgaaaggacctgtgagagaaggagacattctcaccctactcgagtctgaaagggaagcaagaagattgcgctagatggtctctttattttggcttgcctccaaattcgaacaaaagcaatatttntcttgatatttatggtagttagtcggtgctaaaggggttatagcaccctatctt

SEQ ID NO: 4854 - DNA, 391 bp, Glycine max
  Clone ID: LIB3073-008-Q1-K1-C9
gatagcagcatcatacaaagcattgaattcaaaaacttaggttcattccttgtgttttgctttcttcctcaaaaccaaacatgtcgaacacatgcggcaactgcgactgcgctgacaagactagctgcaccaagggaaacagctatggtgttattgtagagactgagaagagttacatcgagactgttgtcatggatgttccagcagctgagcatgatgggaagtgcaagtgtggcactaactgcacttgcacggactgcacctgtggccattaaggaatatgtatgaaaatgtaattgccatgtgtttggcaatacaaatatccaaataatgtaatcttcgtatgaataaatgtgtgtgctgttatcctacttcaggtctgtgtagtcat

SEQ ID NO: 4855 - DNA, 416 bp, Glycine max
  unsure at all n locations
  Clone ID: LIB3073-008-Q1-K1-B4
gaaaaacaagtgtttcgaatagattatcctaagtctttgggaatagtgctgcaatggcttcaagtcaggaagaggtgacccttttgggagctactggaagcccatttgtgtgcagggttcatattgccctcaagttgaaaggagttcaatacaaatatgtcgaaaaaaatttgaagaacaagagtgaactgcttctcaaatccaacccagttcacaagaaagttccagtgtttattcacaatgagaagcccatagcagagtctcttgtgattgntgaatacattgatgagacatgngagaacaatcccatcttgccttctgatccttaccagagagccttggctcgtttctggtccaaattcattgatgataagggttttggtgctgcatggaaaatcgttttcacagctgatgag

SEQ ID NO: 4856 - DNA, 391 bp, Glycine max
  Clone ID: LIB3073-008-Q1-K1-A11
gactgatacaggaacagctagcagagaaacaaggttacaagtaaagtaaattaagaagatcattaatggcttctcttgcaaccttagctgctgttcaaccagctgcgctcaatggccttgctggaagttccctctctggaactaagctctctttcaagccctctcgccacactgtcaaatccaagaacttcaggagtggtgccgtggtagcaaagtatggtgacaagagtgtgtactttgatttggaggatctgggcaacactacggggcagtgggacttgtatggctcagatgcaccttcaccctacaaccctcttcagagcaagttcttcgagacatttgctgctccattcacaaagaggggattgttactcaagtttctgatattggg

SEQ ID NO: 4857 - DNA, 401 bp, Glycine max
  Clone ID: LIB3073-008-Q1-K1-A12
ggtcgccgtttgttttcttttcgttcgcatcttctctctcagaaagatgaaggtggtcgccgcgtatttgctcgccgtcctcggtggcaacaacagcccctccgccgatgtcatcaaggaaatccttggctccgttggagtagaagcagatgaagataggattgaatcgtttttgtctgaagttaagggtaaggatatagttgagcttattgctgccggtagggaaaagttggcctcggttccttctggtggtggtggtgccgttgccgtcgccgcagctcctgggggaggtgctgctgctgctgctcctgctgctgaggcaaagaaggaggaaaaggtggaggagaaagaggaatctgatgatgatatgggtttcagtctcttcgattaattggtgtagt

SEQ ID NO: 4858 - DNA, 469 bp, Glycine max
  Clone ID: LIB3073-008-Q1-K1-A2
gaagacgacagaaggggatctggcagcagaagaacaagtagttgagaactaagaaggagaagcaaatggcttcctcaatgatctcttccccagctgttaccactgtcaaccgtgccggtgccggcatggttgctccattcactggcctcaagtccatggctggcttccccaccagaaagaccaacaatgacattacctccattgctagcaacggtggaagagtgcaatgcatgcaggtgtggccaccagttggcaagaagaagtttgagactctttcctacctgccagaccttgatgatgcacaattggcaaaggaagtagaataccttcttaggaagggatggattccttgcttggaattcgagttggagcacggtttcgtgtaccgtgagcacaacaggtcaccaggataccacgatggacgctactggaccatgtggaagctgcctatgtttggttgcactgatgc

SEQ ID NO: 4859 - DNA, 376 bp, Glycine max
  Clone ID: LIB3073-008-Q1-K1-A3
ggcctcaaaaaacgaaaatcattcccttagagaaaacaaaagcacagaatcgaaagaagagttattttttgagagagattgggatggcttcgacgaagaagatcacactgaagagttcggacggcgaggccttcgaggtggaggaggcggtggcggtggagtcccagacgatcaagcacatgatcgaggacaactgcgccgacagcggaattcctctccccaatgttaccagcaagattctggccaaggttatcgagtattgcaagaagcacgttgaggccaattgcgctgatgagaagcccagtgaggatgaactcaaggcttgggacgctgatttcgtcaagggtgatcaggccacactctttgatctcattct

SEQ ID NO: 4860 - DNA, 431 bp, Glycine max
  Clone ID: LIB3073-008-Q1-K1-A6
gacaacacagaacaaaaacaaagaaagaaaaaacccttagccaacacaaccatcatggccacctctgctattcagcaatcagcattcactggtcaaactgctctgaagcagctcaatgagttcgtccgcaagaccggtggcgccggcaaaggtcgcactaacatgcgccgcaccgtcaagagtgctcctcagagcatttggtatggccctgaccgtcccaagtacttgggtccattctcggagcagattccatcatacctgaccggagaattccctggtgactacggatgggacactgctggattatcagctgacccggaaaccttcgccaggaaccgggagctggaggtgattcacagcagatgggcaatgcttggtgcccttggctgcaccttcccagagatccttgagaagaatggtgtcaaattcgg

SEQ ID NO: 4861 - DNA, 371 bp, Glycine max
  Clone ID: LIB3073-008-Q1-K1-A7
ggagtcaacaacacaagctaggccacaaccgaggcagtcttttattttatatagtataattcattctgtcatatatatctgtgtgtgtaacaatggtggtctttatttgcaaggaagaatatggtgttcccttgagcaatggctgggctgcaacacatgaatttggccacaagttttgcatctcaaatgaaggtgatgatgacgatgatgataatggcgtcatcgatgtggccccagctgcatagaacaatttggcagaaagacatgcatagatgaggaggatggatatagtagctagcttagtagtcactgttagcttcattctgtcgtctagcttagttacatttgagtttactcttggtatatattgg

SEQ ID NO: 4862 - DNA, 376 bp, Glycine max
  unsure at all n locations
  Clone ID: LIB3073-008-Q1-K1-B1
gattccacacacaggaagactcctcaatcatccatagacatggccaccgtcacttctgcagcagtttctattccctcattcactggcctcaaggcaagcgcaggcaaagtgagtgccgccgcagttaaagtctcagttccccaagccacaaggttctgcggcatcaaggcttccctcaaagacgttggagtcgctgttgtggccactgctgcgagcgcagttctagctagcaacgccatggccattgaagtgttactgggcactgatgacgggtctctggttttctctcccaactctntctccgtggcccctggggaaaagatcgtgttcaagaacaacgcaggtttcccccacaacggtgtgttcgacgaggacg

SEQ ID NO: 4863 - DNA, 402 bp, Glycine max
  Clone ID: LIB3073-008-Q1-K1-B10
ggagttggttggtatttgtttttgttgttggctgtgcgatcactcatctcacctcttctcatcaacgctgcgaaagacaatggagctgacaccccagcagctgagccaatacaacggcacggacccatcgaagccgatctacgtggcggtgaagggccgcgtctacgacgtcaccaccggaaaatccttttacggccccggcggcccctacgccatgttcgccggcaaagacgccagcagagccctggcgaagatgagcaagaacgacgacgacatcttcccctccctcgacggcctctccgacaaggagatcggcgttctcaacgactgggagaacaaattccaagctaagtaccctgtcgttgctcgtgttctcaattaatcatatgataacctaagtgt

SEQ ID NO: 4864 - DNA, 389 bp, Glycine max
  Clone ID: LIB3073-008-Q1-K1-B12
gaaggtgcaagagtttgttgtgagctataagctagtttatcgtgaggagaatatgaagttgtttgttttctttgttgctgcagtagttttggtagcatggccatgccatggcgcaagctaccaaaggttccctctccgaatgaaaactggctatggtgagcgttcttcggaggtaaagtgcgcaagttttaggcttgctgtggaagcacacaacatccgagcctttaaaaccattcctgaagagtgcgttgaaccaacaaaggactacattaatggcgaacaatttagatcagactctaaaacagttaaccaacaagctttcttttatgctagtgaacgcgaagtccatcacaacgacatatttatattcggcatagataacaccgtac

SEQ ID NO: 4865 - DNA, 250 bp, Glycine max
  Clone ID: LIB3073-008-Q1-K1-B2
atctcctcggaggccacagaggcgaaagcaggacctttaagcttcctaatcccctgtactacattcagtagttccttcacctctcaacaatctagcttgctcctatctatctatatgtaataagatgcgttcaaataggggcactagcttcactttatgttgtttcagctgtgtgtcaacaagtcatgtaagagacttcactatgttgttttctctttcgtggctttaataaattatgcgcccttgttcc

SEQ ID NO: 4866 - DNA, 414 bp, Glycine max
  Clone ID: LIB3073-008-Q1-K1-B3
gagggtacaatacaaacacaaagtcagaaacacaaatctgggtatagtggagtagtagggtttttgcgtttgagagagaagaagcatgagcaggagtttgggaattccggtgaagctgctccacgaggcttcggggcacgtggtgacggtggagctcaagagcggagaactctacagaggaagcatgatcgagtgcgaggacaactggaactgtcaactcgagagcatcacctacactgccaaagatggcaaaacatcgcaacttgagcatgtgtttattcgaggcagcaaagtcaggtttatggtcatccctgacatgctgaagaatgctcctatgtttaagcgtttggatgcaagaatcaagggtaagggtgcatcacttggtgttggtaggggcagagcagttgcaatgcg

SEQ ID NO: 4867 - DNA, 422 bp, Glycine max
  Clone ID: LIB3073-008-Q1-K1-A1
ggttctagtgtgtgattgtttgttgttgtaactcgttcttcttcttttgttgttctgtgtttgtgtttgttttttctctcacctgaaaatgtcttgctgcggtggtaactgtggttgcggaagctcctgcaagtgcggcaacggctgcggaggctgcaagatgtacccagacttgagctacactgagtcaaccaccaccgagaccttggtcatgggagtggcacctgttaaagctcaatttgagggtgctgaaatgggtgtgcccgctgagaacgatggctgcaaatgtggaccaaactgctcctgcaacccctgcacttgcaagtgaggtgttgggagagcaagcttcaagcagagatagcccttaattgggaataatgataaactattaatgtgtagctaaaaacttatgtattatgtct

SEQ ID NO: 4868 - DNA, 282 bp, Glycine max
  Clone ID: LIB3073-007-Q1-K1-G2
gagggttacacgccgtcgtcgctgtggttgtgtgtcgcttcttcgtaggtgcagctgcaatggtgaagggacgccaaggagaacgtgtcagactctacgtgaggggtacaatccttggatacaaaaggtccaagtcaaaccagtatccaaatacatccctgatccaaattgagggtgtgaatgccaaagaagaagtagcatggtatgctggcaagaaaatggcctatatctacaaggctaaggtgaagaagaatggaagccattaccgctgcatatggggca

SEQ ID NO: 4869 - DNA, 259 bp, Glycine max
  Clone ID: LIB3073-007-Q1-K1-G3
agaggcctacagcagagaacagaagaagatggcacaaacgctggcaatgcccgtggcaccttcgctagctatcatctccaattctcgcctctccaacacactgtccgttaccgttctgaacaaaccaaatgttcaagggccaagcatcaagtgcgttcgtgtttgcagtgcagagattgcgaacaacaagcgaatcgagtactcactgcaatacattcatggagctggcaggaccatagcgaaacagattctctgtgat

SEQ ID NO: 4870 - DNA, 286 bp, Glycine max
  Clone ID: LIB3073-007-Q1-K1-G4
ttacaggacaaacgtgaagaagcctgatactgacgtttgaattttacaagtgatgatgttgtagctttgagattggtgtgtgtactcgcgaagttaaatatacagtgaagggggtacatttctagaggaatcacgatcatgagaaatgatgcaatgtttctgtttcttgttgacctttcatcttattttgtaatttagattatttaatttactaaatatattaattgtggaagcttaatgttgagttcgtactgcatgtctgattttcaaaactaatatgggtgac

SEQ ID NO: 4871 - DNA, 336 bp, Glycine max
  Clone ID: LIB3073-007-Q1-K1-G5
ggtgcagttcaaagcgaagaaagattcgaaacgaagaaagaaagcgttgtgaagaatggcggaagagggacaagtgatcggcgtccacagcgtagaggagtggaaggaacatctcaagaagggagaagagtccaagaaattgattgtggtggattttactgcttcttggtgcggtccatgccgtttcatttgcccaattcttgcagagtttgctaaaaagttgccgaatgtcaccttcctcaaggtggatgtggatgaattggagactgtttccaaggagtggggaattgaggctatgccaaccttcctgttcttgaaagaaagcaagctggtgga

SEQ ID NO: 4872 - DNA, 338 bp, Glycine max
  unsure at all n locations
  Clone ID: LIB3073-007-Q1-K1-G6
gggattcagcccaaagttcattcactggatttggggttccctaagcacaccattattttattatgaatgagtggcaatagcagcaacaacaacaatataagtaaaagaatctctgtgttgtcatcacacttcgctagatccagccccatcatggcttcagagaagcaagcggctcttgccgtcactccctctgatgctgatgctcctaccatatttgacaagatcatcaataaggagattccttctactgtggtttatgaggatgacaaggtgcttgccttcagggacataactnctcaagctcctacacatattcttatcattcctaaattcaaaga

SEQ ID NO: 4873 - DNA, 407 bp, Glycine max
  Clone ID: LIB3073-007-Q1-K1-G7
gaaggtgcaagagtttgttgtgagctataagctagtttatcgtgaggagaatatgaagttgtttgttttctttgttgctgcagtagttttggtagcatggccatgctatggcgcaggctaccaaaggttccctctccgaatgaaaactggctatggtgagcgttcttcggaggtaaaatgcgcaagttttaggcttgctgtggaagcacacaacatccgagcctttaaaaccattcctgaagagtgcgttgaaccaacaaaggactacattaatggcgaacaatttagatcagactctaaaacagttaaccaacaagctttcttttatgctagtgaacgcgaagtccatcacaacgacatatttatattcggcatagataacaccgtactctctaatatcccatact

SEQ ID NO: 4874 - DNA, 379 bp, Glycine max
  Clone ID: LIB3073-007-Q1-K1-G8
gataaccatggcgtctaactctgcttccgctcggtacttccttttatgcctatcgcccatcactttgcttctttctgcgtttcgtgctcaagctcaatctcatgctccagctcccactttcaagtactgtgaaaagaatgcagactatgctgtgaaggtgagtggagtggaaatattgcctgaccccgtggagagaggagtgccattcacctttaagatcccagcttatactcctgaaccaattcaaagcggggacttgttatatgaaatttcttatgctggaatagaagcacaacctgctacatttctccatgatctctgtgaggaagcaccatgcccagtacctgcaggcaactttgtgctcgttcacaccgaatta

SEQ ID NO: 4875 - DNA, 349 bp, Glycine max
  Clone ID: LIB3073-007-Q1-K1-G9
ggcacaagtgagtttgttgatcgagataactagaaacagtgtgatgaaaatgaaagtccttgttttcttcgttgctacaattttggtagcatggcaatgccatgcgtacgatatgttccctctccgaatgaacactggctatggtgcccgtactccggaggtgaaatgcgcaagttggaggcttgctgtggaagcacacaacatctttggctttgagaccattcctgaagagtgcgttgaagcaacaaaggaatacattcatggcgaacaatatagatcagactccaaaacagttaaccaacaagcttacttttatgccagagacctcgaagtccatcccaaggacaca

SEQ ID NO: 4876 - DNA, 330 bp, Glycine max
  Clone ID: LIB3073-007-Q1-K1-H1
gaaggacaagtggctataacactacttgcattgagttagactttgatagtttgattagctctaataaggttaaggaccagagaaagagagaaagaaacagaatttggaagaaaaaaagcacaagatgggttattggaagtctaaggttcttcccaagatcaagaaggtttttgagaagaatagcaccaagaaagctgctgctgctgaggccaccaagtcctttgatgagtcaaaggaggaatacaacaaagcctttgaagaaaagaagactgaacttcaaactaaagtagttgaaatatacgaggcttcatcaactgaaatcaaaagttt

SEQ ID NO: 4877 - DNA, 268 bp, Glycine max
  Clone ID: LIB3073-007-Q1-K1-H2
gaccgactggtccattttagactacgcgctatgcatccgacccctatcgcacacccatctgatacaaggttcatggctagcctaaaggatgcatgtttcggctgtcaggctatgcatggctcaggagagtgcaccgatggcacatgcagctatcacgtaccgacaagggactagtgacctgtccaattgcatagctactcttataaggacgaacgtcctttgatgaatgctgcgacggattcaacagcctctatgccgacgacaagac

SEQ ID NO: 4878 - DNA, 187 bp, Glycine max
  Clone ID: LIB3073-007-Q1-K1-H3
ggctgactagccaatccttcgcgaaggtgcatagagccgaataagtaccaatggtgaagtcctcaagggaccttgactttccacctaggtcttacaaggctaaaggggcttacctaaggttcaatttaaggaccccagggaaaacggcttttccaatgaggaactggcccttggtcaaggttaaaag

SEQ ID NO: 4879 - DNA, 359 bp, Glycine max
  Clone ID: LIB3073-007-Q1-K1-H4
gaccctttggaaatggcagaggattggaaccgcacagcccttcttgtgatcgacatgcagaaagattttatagaagatgggggtcccatgctagtaaaaggagggaaagacattgtcccaaatgttattaaggctgtcgatgttgctaggcagcgtggaattctcatagtttgggtagtacgggaacatgatcccttaggaagagatgttgaactctttcgtcggcatctatatgcagcagggaaagttggtccaacctctaaaggaagtgaaggtgcagaattagttgatggactggtaattaaagaaggggattataaacttgtgaaaaccatgtttagtgcattctttgctacaca

SEQ ID NO: 4880 - DNA, 341 bp, Glycine max
  Clone ID: LIB3073-007-Q1-K1-H6
gcagagagcgagcgagcgagcagtttcaaagagaggatttgggattgggaaggccagggattgcgctgcgtctcttcctcttctctttcgatccatccctcattcataatcttccaatccaacaacctcagcctcacactcacacatacacacatctgaacgcgtatcgaccctgccatggcttcaaagcgcatcctcaaggagctcaaggacttgcagaaagacccaccaacttcttgcagcgctggtccagtaactgaagacatgttccattggcaagcaacgattatgggtcctgctgatagtccttatgctggacgtgtattcctagtcactattca

SEQ ID NO: 4881 - DNA, 431 bp, Glycine max
  Clone ID: LIB3073-007-Q1-K1-G12
ggcacaagtgagtttgttgatcgagataactagaaacagtgtgatgaaaatgaaggtccttgttttcttcgttgctacaattttggtagcatggcaatgccatgcgtacgatatgttccctctccgaatgaacactggctatggtgcccgtactccggaggtgaaatgcgcaagttggaggcttgctgtggaagcacacaacatctttggctttgagaccattcctgaagagtgcgttgaagcaacaaaggaatacatccatggcgaacaatatagatcagactccaaaacagttaaccaacaagcttacttttatgccagagacctcgaagtccatcccaaggacacatttgtgttcagtatagatggcaccgtactctctaatattccatactacaaaaaacatggatattgggtggaagaaatttaac

SEQ ID NO: 4882 - DNA, 407 bp, Glycine max
  unsure at all n locations
  Clone ID: LIB3073-007-Q1-K1-H8
ggcgtgcaggtcccggtgttagaattggggtttccgtttcgattgtacctaccggccaacttagggtgcagtcactctcgatctcaccgatcaccaacgtgccttcttctcctcaggttcccttagtcaactttcggttttttgattgttgaggatggtgctggttttagccctgggggatttgcacataccccacagggcacctgatcttcctgcaaagttcaaatccatgcttgtccccggcaagatccagcacattatttgtactggaaatttgtgtattaaagaaattcgtgactacttaaagactctttgtccagacttgcatataactcgtggtgagtatgatgaagagacgaaatatncggagaccaaaatactaaccattggccaatttaagctgggac

SEQ ID NO: 4883 - DNA, 425 bp, Glycine max
  Clone ID: LIB3073-007-Q1-K1-H9
gcattcgataagaagcagtttgttaccttcatgaagaggtttatcaagaatttgactcccaagctcgatgcagagcaacaggagttgtttaagaagcacatcgagggagcaactaaatacctgctctctaagattaaagatttccaattttttgttggtgagagcatgggtgatgatgcttgcttggtctttgcctactacaaggacggcgctgctgatccaacattcctgtactttgcatatgccttaaaggaggtcaagtgctaagtgacttaatgtaccgagctatctactcattttatctagtttttttttacgttctgtcctaagttacttgaaactttgacctggtattttgattttaatggtgagacgtgtgctactgctacatcataattcccatcaaatttaattatcgatgggtt

SEQ ID NO: 4884 - DNA, 405 bp, Glycine max
  unsure at all n locations
  Clone ID: LIB3073-007-Q1-K1-E6
agacgtacgaacacacctaagttcactttactcacgactacagaaagtgaccggcagagccattattcacctggagatggtcaccttaatcatagtacatttctttctaattctgctagcattcatagcatccactgcagacgctactctcttcnaccctccatccttcattactcagcagctccccaacattcactatgcacatatcaactcctcactcactgcctgtccaaatccatgtcttatctcaaaatcgaaccctcaccatagtcccaatgcttataccatctagacaggctgattctcaacttccaaaacatgcatttgcaataaaacattttctactacctcaagtagcgcagatattaacaattcctgctatgctacatcaaattcaactctatc

SEQ ID NO: 4885 - DNA, 408 bp, Glycine max
  unsure at all n locations
  Clone ID: LIB3073-007-Q1-K1-E8
gatccgcgcatattctcatctgaatttgcatttgcatttcatttggcgttttgtttctttctggaagcttcacttcggcatccatggcgtcgttcgaagaagctcctcccggaaactccaagaacggcgagaagatcttcaagaccaggtgcgctcagtgccacaccgtggacaaaggtgccggtcacaaacaaggacccaatctgaatggtttgtttggaaggcaatctggcacaactcctggatattcctattctactgctaacaaaaacatggctgtgatttgggaggaaaagaccttgtatgattacttgctcaaccccaaanagtatattccagggacaaagatggtgtttcccggtcttaagaaaccttaggaacgtgccgatcttattgcatatcttaaag

SEQ ID NO: 4886 - DNA, 425 bp, Glycine max
  unsure at all n locations
  Clone ID: LIB3073-007-Q1-K1-F10
ggtgcacaagtgagtttgttgatcgagataactagaaacagtgtgatgaaaatgaaggtccttgttttcttcgttgctacaattttggtagcatggcaatgccatgcgtacgatatgttccctctccgaatgaacactggctatggtgcccgtactccggaggtgaaatgcgcaagttggaggcttgctgtggaagcacacaacatctttggctttgagaccattcctgaagagtgcgttgaagcaacaaaggaatacatccatggcgaacaatatagatcagactccaaaacagttaaccaacaagcttacttttatgccagagacctcgaagtccatcccaaggacacatttgtgttcagtatagatggcaccgtactctctaatattccatactacananaacatggatatgggggtggaga

SEQ ID NO: 4887 - DNA, 404 bp, Glycine max
  Clone ID: LIB3073-007-Q1-K1-F11
gagggttttgtgctgttgtcgctgttcatcctccgtaacctccgagctctacaccgaagaacgaagccatggggaagacacatggaatgggagctgctcgcaagctcaagtctcaccgcaggaggcaaaggtgggctgataagtcatacaagaaatcccatctcgggaatgaatggaagaaaccttttgccggttcatcccatgccaagggaattgtccttgaaaagataggtattgaagctaagcagcccaactctgctattcgtaagtgtgccagagttcaacttatcaagaatgggaagaaaattgcagcttttgtccctaatgatggttgcttgaactacattgaagagaatgacgaagtcttgattgctggatttggacgaaagggtcatgctgtggga

SEQ ID NO: 4888 - DNA, 397 bp, Glycine max
  Clone ID: LIB3073-007-Q1-K1-F12
gagtgcacaagtgagtttgttgatcgagataactagaaacagtgtgatgaaaatgaaggtccttgttttcttcgttgctacaattttggtagcatggcaatgccatgcgtacgatatgttccctctccgaatgaacactggctatggtgcccgtactccggaggtgaaatgcgcaagttggaggcttgctgtggaagcacacaacatctttggctttgagaccattccttgaaaatgcgttgaagcaacaaaggaatacatccatggcgaacaatatagatcagactccaaaacagttaaccaacaagcttacttttatgccagagacctcgaagtccatcccaaggacacatttgtgttcagtatagatggcaccgtactctctaatattccatac

SEQ ID NO: 4889 - DNA, 315 bp, Glycine max
  Clone ID: LIB3073-007-Q1-K1-F2
gactcaagaagactcctcaatcatccatagacatggccaccgtcacttctgcagcagtttctatgccctcattcactggcctcaaggctagcgcaggcaaagtgagtgccgtcgcagttaaagtctcagctctccaagccacaagggtctgcggcatcaaggctaccctcaaagacgttggagtcgctgctgtggccactgctgcgagcgcatgtctagctagcaacgccatggccattgaagtgttactgtgcactgatgactgatctctggatctctatgacaactctttctccgaggcccctggggaaaaga

SEQ ID NO: 4890 - DNA, 419 bp, Glycine max
  Clone ID: LIB3073-007-Q1-K1-F3
gaacgtgcaagagtttgttgtgagctataagctagttgatcgtgaggagaatatgaagttgtttgttttctttgctgctgcagtagttttggtagcatggccatgccatggcgcaggctaccaaaggttccctctccgaatgaaaactggctatggtgagcgttcttcggaggtaaaatgcgcaagttttaggcttgctgtggaagcacacaacatccgagcctttaaaaccattcctgaagagtgcgttgaaccaacaaaggactacattaatggcgaacaatttagatcagactctaaaacagttaaccaacaagctttcttttatgctaatgaacgcgaagtccatcacaacgacatatttatattcggcatagataacaccgtactctctaatatcccatactatgaaaaacatg

SEQ ID NO: 4891 - DNA, 347 bp, Glycine max
  Clone ID: LIB3073-007-Q1-K1-F4
gaagacacacaacacaacacagacacacagagttagaggagaaatcatcatggcatcagcagcatctgggtttgtgttgtcacttaatgttgcagctgccaccacaaactcaagggtggtcatgttcaacacaaagaacaacgcttctaggcttgttgtaagggcttcagatgagcctgcagcggcggcacccgccaccgacacacccccagctgaagctgaagctaaaccaaagccaccacctattggccccaagagaggtgctaaggtgaagattcttaggaaggaatcttactggtacaaaagcacttgttcagtggttgcttgtgatcaagaccccaacactc

SEQ ID NO: 4892 - DNA, 388 bp, Glycine max
  unsure at all n locations
  Clone ID: LIB3073-007-Q1-K1-F5
gagagcgaaagagatgtcgttggtttcaagcatgctcgggtgtggagtggtgatggcggcgtcgcaagcaatgggaattggaaggagaagcgatggtggattgacgatagtgtgttcgtctaggccgcagaagaaagcgacggcgcatcacatgaagactcggcctcggaagacgcaggcatgggatagaaaccgcaagcccaccgtctacgatccactccctactcttcctcctgattggaccctcgttattcccgctgacgcttcttctgcttccgttacgccttcgacttcaaccccctctgcctagtcactctctcggtactctctctcngttacatgtagtcttatctttaattccggcagcttttctttcatgttttcatct

SEQ ID NO: 4893 - DNA, 343 bp, Glycine max
  unsure at all n locations
  Clone ID: LIB3073-007-Q1-K1-F7
ggcagggttaggtttaatttatttatcttggtttagttgtttaatttgtatttctcagttaccttgttgtttaggttggttaattggcttgttttgtttgttttctattttgtgacattttcgactgaacggataatttggtaggagtataaatgttccttccttgacttcagtctaaaaatgtcgtggaatttcccttctttatctctatgttgacccaattcagactatgtatgactttttttctatgtttaaataagttgcacgatcacgtgtttgtgtaatgtgtgttcaatgagagacacattattccctttttacttctaaaaaaaaaaacaangaa

SEQ ID NO: 4894 - DNA, 419 bp, Glycine max
  unsure at all n locations
  Clone ID: LIB3073-007-Q1-K1-G10
gaccggaacttcaagcgagtaaacaaacaacgactagggcaagaaagaaactagagaaaaagatatggcttccacttctgcagtttcaatggttatgccggtaacttataccagccagaagagagtggtgcctagctctgatgcattcttcaagccactcacactacggtcctccaaggtagtggcggcatcaaattccaatggaaggtttcaggtgaggacctccatgaaggagaaagttgtaacagggctcacagcagctgcattgacagcttcaatgatggttcctgatgtggctgaggctgccgtctcaccttctctcaagaacttcttgctcagcatcgcggcangtggaagttgtggtgttgccattattggtgctgtgatcggtgtttccaatttcgaacccgtcaagcgaa

SEQ ID NO: 4895 - DNA, 374 bp, Glycine max
  Clone ID: LIB3073-007-Q1-K1-G11
taccattcattcccacattcccattgttcacaccaccaacacaagatgtttctccacattgtgttcctccttttccttctctcatccacttcccatgccactgtccaagacttctgtgtggcagacctcaaaggtgcagacacccctgcaggctacccctgcaagccacctgctaatgtcacttcagatgactttgtgtacactggcttagctgaagctgcaaatgtcacaaacataatcaatgctgctgtgaccccagcttttgttgctcaattcccaggtctcaatggccttgaactatctgcagcaaggttggaccttggtcctagtggtgttatcccactccacactcatccccgtgccaatgaactact

SEQ ID NO: 4896 - DNA, 387 bp, Glycine max
  Clone ID: LIB3073-007-Q1-K1-E5
gaccaagtgaaccaatatagcccaagccctatacaaccaaaccctaacacacacccatttgattcagtttccatggctagcctcaaggttgcatttttggctgcagtgctctgcatggttgtggtgagtgcacccatggcacatgcagctatcacgtgcgggcaggtgacgagtagcctggccaattgcatcggttacctccagaagggaggaacgccgtcgtcgggatgctgcaacggagtgaagagccccaatgccgccgccaagaccaccgtcgaccgccagacggcgtgcaactgcctcaagtccgccgtcagccaaatctacggcttcaacgccaacaacgccgtctcgctccccggcaaatgccgaatcttcatcccctac

SEQ ID NO: 4897 - DNA, 429 bp, Glycine max
  Clone ID: LIB3073-007-Q1-K1-D11
ggttcccacaaagcaaggtatagctcaatggcatgatcatttgtgggtactttattacccaaccacttcacacaaaccaaacactcagctgttcctgcaagtagatcaggtgctccaagaaggaggagagtgcacttagcaacaacaagagcagagaccatgactactgtcatagaaaaactgggcattaagattgagaggaaccctcctgagtccaagctcactcaactgggtgttaggcaatggcccaaatggggttgccctccaagtaagttcccatggacatatgaagccaaagagacttgctatcttctggaaagaaaagtgaaggtctttcctagtgggtcgaatgagtcagttgaaattgctgctggtgacttggctgtgtttcccaaagggatgagttgcacttgggatgtgtctgttggt

SEQ ID NO: 4898 - DNA, 430 bp, Glycine max
  Clone ID: LIB3073-007-Q1-K1-D12
gcacaagtgagtttgttgatcgagataactagaaacagtgtgatgaaaatgaaggtccttgttttcttcgttgctacaattttggtagcatggcaatgccatgcgtacgatatgttccctctccgaatgaacactggctatggtgcccgtactccggaggtgaaatgcgcaagttggaggcttgctgtggaagcacacaacatctttggctttgagaccattcctgaagagtgcgttgaagcaacaaaggaatacatccatggcgaacaatatagatcagactccaaaacagttaaccaacaagcttacttttatgccagagacctcgaagtccatcccaaggacacatttgtgttcagtatagatggcaccatactctctaatattccatactacaaaaaacatggatatgggggtggagaaaatttaa

SEQ ID NO: 4899 - DNA, 424 bp, Glycine max
  Clone ID: LIB3073-007-Q1-K1-D2
gacaccaaaacgaaacagagaagaaaaaaaaactcagacaccttcaagaacttgtatctttctttgttagtatttgttactacaattttacattcttttcatctctacatatttcattagtcatggcacctcaagcagtttccttcaagtccttcgccgttgctcttattgtggcgcttttcttctccgactccgctctggacttagtttcggggcagtcgccggtgccggcgccggcgccggcaccagatgccggaacagctggatccgtgtcgagctcggtcgccatgattggagcttccgttgtgatttcattgctcgccatcttcaagcactgaagaataatctgatgatggatcgattttgtgtgaagattattgattcgttctgcacactcagatttattgttgctgctttataatac

SEQ ID NO: 4900 - DNA, 224 bp, Glycine max
  Clone ID: LIB3073-007-Q1-K1-D3
acgacagaagggggcacaagtgagtttgttgatcgagataactagaaacagtgtgatgaggatgaacgtccttgttttcttcgttgctacaattttggtagcatggcaatgccatgcgtacgatatgttcccttctccaaatgaacactggtatggtgcccgtactccgaaggggaaatgcccagttggaggcttgctgtggaaacacacaacatctttgggtt

SEQ ID NO: 4901 - DNA, 412 bp, Glycine max
  Clone ID: LIB3073-007-Q1-K1-D4
agaagacagaagggcaacataggtcatcgaaaggatctcgaagacccaccaacgcacgaaagccgggatctttcagaaaatgggatgcctattcgaagggtgcataaccgcatggttaagctcacactaacccgtccaattgggatccaattcggttccttaggaggtatcgggaaggaattttggaatgtaataatatcgattcatacagatacagaataaagggttctctattgattcaaacgctctacctacgagatagggatagacatagaggaaaaaaccgaggatttcacatagtactttttggtcgaaaaatcgatctgattttcttcgtacttttcgctcaatgatgaaatgggtcagattctacaggaccaaaccttgtgggagttaaggaatgatggatgaa

SEQ ID NO: 4902 - DNA, 407 bp, Glycine max
  Clone ID: LIB3073-007-Q1-K1-D5
ggtgcacaagtgagtttggtgatcgagataactagaaacagtggtgtgaaaaataaaggccttggtttctttggtggttccattttgggtagattggaattgccttgctaccaaatggtcccttttcggatggacaattggttttggggccggacttccgaaggggaatggcccagtttgaaggttggttgtgaaacccaacacaatttttgcttttaaaacatttcttgaaaatgccttgaaaccaccaagggattcattcattgggaaccattttgatcagacttccaaacaggtaacccacaaggttacttttatggccgagaccttgaagttcattccaaggacacatttgtggtcaatatagattggaccgtactttttaatatttcatacttcaaaaaaca

SEQ ID NO: 4903 - DNA, 423 bp, Glycine max
  Clone ID: LIB3073-007-Q1-K1-D6
gacattactcacagaaagagaaagtgagagacagagagatgatggagttgaagaaggtggcattggtgaaggtagctttgttgcttttcctgttagggttcagtgcaaccactgcagatgctactcgcttcgacccacgttccttcattactcatgtgctccccaacaattactatgtaaaaatcaaatccacagccactgcatgtcgtgatctttgtctttgcacataatcaaaccctcctcagtgccaatgtgtagatgggagcgagacaggctgccactcatgttgcagaaattgcatttgcaataagaaatttcctcggacgtgtttttgtggagatataaccaacttctgctatgacaaatgtaactcaactgaagccaattaaagctcactagctaggaatatgaatgagcatgttt

SEQ ID NO: 4904 - DNA, 418 bp, Glycine max
  Clone ID: LIB3073-007-Q1-K1-D7
gacaccaacaccaaaacaaacccactaagagggcttcctttgtatccttcctagtgctgcttcttgcagcccttatcctcatgcctcaagggcttgctacttactacaaaccaattaagaagccaccagtgtacaagcctccagtgtacaagccaccagtgtacaaaccaccggtttataagccaaaaccaccggtttacaagccgaaaccaccggtttacaagccaccatatacgaagccaccatacaagaaaccaccttatggaaagtaccctccagtagaagacaacacccatgcctaaagcaagcaatgaggtctattatctacttaataaataagaggaactgctttgtgttttctagcattgtgatttacaacttcgtagcaatgcatattcttgactcttgcatgcacttc

SEQ ID NO: 4905 - DNA, 421 bp, Glycine max
  Clone ID: LIB3073-007-Q1-K1-D8
gaaggtgcaagagtttgttgtgagctataagctagtttatcgtgaggagaatatgaagttgtttgttttctttgttgctgcagtagttttggtagcatggccatgccatggcgcaggctaccaaaggttccctctccgaatgaaaactggctatggtgagcgttcttcggaggtaaaatgcgcaagttttaggcttgctgtggaagcacacaacatccgagcctttaaaaccattcctgaagagtgcgttgaaccaacaaaggactacattaatggcgaacaatttagatcagaccctaaaacagttaaccaacaagctttcttttatgctagtgaacgcgaagtccatcacaacgacctatttatattcggcatagataacaccggactctctaatatcccatactatgaaaaacatgga

SEQ ID NO: 4906 - DNA, 370 bp, Glycine max
  Clone ID: LIB3073-007-Q1-K1-E3
ggtcgcaattgttgatcgagtctgactcatggcggagattgaactgaaaactgcacctgctgattttcgttttcctacaacaaatcaaaccagacattgtttcactcgctacatagagtttcatagatgcttggcagcaaagggtgaaaactcaagtgaatgtgagagatttgctaaatattaccgctccctttgcccgggtgaatgggttgaaaagtggaatgaacagaaggagaatgggacttttccaggacccttttgaaatcatgtggcacttggatatccttccgaagcatgagaagtctttaacattctattctcttcaattggtgagtaattgtgaataaggcaagttggggatattcattac

SEQ ID NO: 4907 - DNA, 319 bp, Glycine max
  unsure at all n locations
  Clone ID: LIB3073-007-Q1-K1-E4
gggtgttctaagaacagctatctcgcttttacatcgtttattcgacaagagacgaaaccacatcggaggcatcgtgtatctgtcttcatagagatggctaggacattttaaggatatatggagcgcttccaacctaagggcaaacgaatgctggtaagttgctcggggggtttgacacgcttttcgtctttggtgccatacttctacanccatgagaggctgttggaggcacctgatgatactgcaggtagcacattgatagagtttgaaagctgacaaagaagcaagaatgaagggtgaatgccannacatgccatca

SEQ ID NO: 4908 - DNA, 402 bp, Glycine max
  Clone ID: LIB3073-007-Q1-K1-D1
gacacactgctattgctcttaagcttgctactgagtttccacactgcataccttaggtcttccgaattcgaagttaatttgcaagatggctaaggaaaaggctcagatcaacattgtggtggttggtcatgtggaccctgaggaggcaaccaccattaacgagctgaagaagcctgttgtggagaaagaagctccagggcatgccatatgagggcatgcacgtacggtctcggaggggaaccagaaaattatgttaacaaaataatctggaaccctaatgtatcagtgtcatcatcagtgtgtagtttaagctagctttgctatggttacgttctttgagatgagagtcttgatgaacagtaccattctgatgtattgctttccttgaaagttaatgcatgc

SEQ ID NO: 4909 - DNA, 379 bp, Glycine max
  unsure at all n locations
  Clone ID: LIB3073-007-Q1-K1-B11
gacacaactgaacaagataagctatccataggggccaaagaaatgaagagtaccttgttcgccctctttctactttgtgccctcacctcttacctaccttcagccaccgctggtgatgtggtcgacactgatggtaatcctgttgaaaatggaggcacatactttgtgttgccaactataatattaaacggcggtggaatagaatatgccacatttggaaatgaaacttgccctgtcactgttgcgcaatctcgcgatcagttctgcaagggctttccgataaccatttcatccncagcccgaatccgtcacatcagcgaaggccttaatttgaacattgggttcactttcgcatccccgtgttcccccgcttctgagt

SEQ ID NO: 4910 - DNA, 411 bp, Glycine max
  Clone ID: LIB3073-007-Q1-K1-B3
gatccgcatttgtctgaagtctgaacccatcggcagagaagaaagtgtttagccttctcttacttacatcatcacttgctcgctgtgatattatctaacaaattattcatttcattgttcatactcactcgcacctaactccgccatggcttctcttcccaccactttcgctataaccaaatctgcatcctccataaacaaggtggaccactctctggtcaagatcaaaccatacaacttctctctcaatctaaatcgtcaagggaccatgcaaacatctttaaccagaaggcctctaacaattcaagctacgtatagtgatggtggaaggcccagcagtgctagtgtatttgttggtgggtttctcttgggaggattaatagttggtactcttggttgcgtgtatgcacc

SEQ ID NO: 4911 - DNA, 420 bp, Glycine max
  unsure at all n locations
  Clone ID: LIB3073-007-Q1-K1-B5
gaaagggctgaaagagaagatcgaggagaaaagagagggtgatcatcatcatcacaaggatgaggacacaagtgtccctgttgagaaagttgaggttgttgaaacagcacatgctgaggaaaagaaggggttcctcgacaagattaaggagaagctaccagggcacatgaagacagaggaggccacagctactactcctcctccaccaccacctgttgcatcattggagcatggtgaaagtgctcatcatgaaggagaggccaaggagaagaaaggtatattagaaaagattaaagagaagcttcctggttatcactccaagacagaggaggaaaaggaaaaggaaaaggagagtggtgctcattgatatttaagattgagacaaggcttttntgttggttggagatgcatgattgtggt

SEQ ID NO: 4912 - DNA, 238 bp, Glycine max
  Clone ID: LIB3073-007-Q1-K1-B6
ggtgcacaagtgagtttgttgatcgagataactagaaacagtgtgatgaaaatgaaggtccttgttttcttcgttgctacaattttggtagcatggcaatgccatgcgtacgatatgttccctctccgaatgaacactggctatggtgcccgtactccggaggtgaaatgcgcaagttggaggcttgctgtggaagcacacaacatctttggctttgagaccattcctgaagagtgcg

SEQ ID NO: 4913 - DNA, 371 bp, Glycine max
  unsure at all n locations
  Clone ID: LIB3073-007-Q1-K1-B7
gatgcgcatgagagagagtagatcggggtaactagaaactgagcattgtgattgcaaggatcaggacacatgtgtgcttcaattgaaagagcatggtgatgccatagcacatgcttaggaaactatcgggttgatcactgagattagtgccaatactccagagctcaagagcacaaattaggggattgctactactgctcatacaatatcatctgtttgatacatatgcatcatggagagcgtngctcatcacgaaggaatacgtccatgagaaacaatgtatatagaactgctaaacgagtaacttactggctatcacttatggacaaaacatgaaaaggcatacgaaggacacattggtgctcattgat

SEQ ID NO: 4914 - DNA, 426 bp, Glycine max
  Clone ID: LIB3073-007-Q1-K1-C10
ggtctaaggggtgccctgagatcacattgaacaatggtgaaggctgtggccgttcttggcagcagtgagggtgtcactggaactattcacttcgttcaggagggaagtggtccaaccaccgtaactggatctcttgctggtcttaagcctggtctccatggtttccatgtccatgccttgggggacactaccaatggttgcctctcaactggatcacatttcaatcctaataacaaggagcatggtgcccctgaggatgagaatcgtcatgctggtgatcttgggaatgttgatgtcggtgatgatggtactgtcagcttcactattactgacagccagattcctctcactggaccaaacaacatcataggaagggcggttgttgtccatgctgatcctgatgatcttgggaaaggtggtcatgag

SEQ ID NO: 4915 - DNA, 429 bp, Glycine max
  Clone ID: LIB3073-007-Q1-K1-C11
gtgcgacttgaaagacatgattagattagctgtggattcttacatccgccattttttctagtatatagaaatgaacatgctcttgactcgacatcgtttgttctgttccactagaacttattgttttggggacgggaaagcagttgatgatgtaagttgatgatgtaaatagtacatgatggagctcgagtttattcatttatcaggggcaagtatctaaggttagtaaaaattaataagttagaaaaacttcgtaagtttatttttgatagaaaaatagaaaggatccaatttgagcaaggttcaaaaaaatggttggaattagtaaaactgttttgatcaaaagtgtagccgcaagaattaaccttctatttgtatgattctttcatagaaaggaaaaaatggtatgtttgcttgcaatttttgaaa

SEQ ID NO: 4916 - DNA, 248 bp, Glycine max
  Clone ID: LIB3073-007-Q1-K1-C2
gatgcttatgaaaataaactgcaggcgtaacaaaagtggcgtagccatactctgattcattagtgaagaaaaatggcaaccatcatcgtcggcatcccaactacatcgatcactcgcgcaggtcttgtgctcaaacgacctgttggagcctcgtcctctaccgttcttggattgccagcaatggctaaggcagggaaagtgaggtgctccatggaggaaaagccttcaagcagctcaaatatagggat

SEQ ID NO: 4917 - DNA, 343 bp, Glycine max
  Clone ID: LIB3073-007-Q1-K1-C3
cgacatatgtcatcgaaagggtctcgatgacccacgatggcacgaaagccgggatctttcacaaaatggattcctattccaagggtgcataacctcatggataaactgacacttaccccacgatttgggatccaattacgtgccttaggatgtatctctaacgaactttggaatgcaataatatctattgatacagatacagaagaatgggttctctattgattcaaacgctctacctacgtgatcgggatagaataagaggcagaaaccgatgatttcacatagatctttaggtcaaacaatcgatctgaggatgatcgaactattagctcaatgatcaaat

SEQ ID NO: 4918 - DNA, 282 bp, Glycine max
  Clone ID: LIB3073-007-Q1-K1-C4
gaaggggaaaagaaaagagatgctgagactgaaagtaaatcgaagcagagaagaagaaagaaagaaagatggtgaaagtggcgacgtacttcgcgatgacgctaggagccttcgtgttctggcagtccatggacaagctccatgtctggatcgctctccgtcaagacgaaaaggaagagaggttggagaaggaagccgagatcagaagggttagagaagaattattgcagcaacaggccagtcagaaagattttctttctggaatttgaattatgttgaaat

SEQ ID NO: 4919 - DNA, 422 bp, Glycine max
  Clone ID: LIB3073-007-Q1-K1-C6
gacagaaaagaaaaaggaaaccctagctggataggtcaaacatcatcatgtcggacgaagagcaccatttcgagtccaaggcagacgccggtgcctccaaaacctaccctcagcaagccggtaccattcgcaagaacggctacatcgtcatcaaaggacgcccctgcaaggttgtggaagtttcgacttccaaaactggaaagcacggtcacgccaagtgccactttgttggaattgatattttcactgccaagaaacttgaggatattgtgccctcttctcacaactgtgatgttcctcatgtgaatcgtactgattaccagctcattgatattgctgaggatggatttttgagtctgcttactgaaaatgggaacaccaaggatgaccctcaagcttccactgatgagagtctgctcact

SEQ ID NO: 4920 - DNA, 410 bp, Glycine max
  Clone ID: LIB3073-007-Q1-K1-C8
gacaccaacaccaaaacaaacccactaagatggcttcctttgtatccttcctagtgctgcttcttgcagcccttatcctcatgcctcaagggcttgctacttactacaaaccaattaagaagccaccagtgtacaagcctccagtgtacaagccaccagtgtacaaaccaccggtttataagccaaaaccaccggtttacaagccgaaaccaccggtttacaagccaccatataagaagccaccatacaagaaaccaccttatggaaagtaccctccagtagaggacaacacccatgcctaaagcaagcaatgaggtctattatctacttaataaataagaggaactgctttgtgttttctagcattgtgatttacaacttcgtagcaatgcatattcttgactcttgca

SEQ ID NO: 4921 - DNA, 195 bp, Glycine max
  Clone ID: LIB3073-007-Q1-K1-B1
catctggcagcagacgaccgagtgggatatatggcagcaggaggaccagttggcgtgctctatgatcgattagccaactgctaccactgtgaactgttcccgagctggtatcactgttaactgtactggcgtcaacatcattgctggattcactgacctgaagaccatcgctggctttacctccattgatagcaa

SEQ ID NO: 4922 - DNA, 393 bp, Glycine max
  unsure at all n locations
  Clone ID: LIB3073-006-Q1-K1-H2
gataccaaaggcaaaacacaagccaagtgaaagtgagaaaaaataaaaatcaaagagcataatgtcagggatcattcacaagattggggaggcccttcatgtgggagggcacaagaaggaggaggagcataagggtgagcaccatgctggagaatacaaaggggagcaccatggtgaacacagtagtgagtacaaaggagagcatcatggtgaacacaaagctggagagtaccatggtgagcacaagccagagcacanagaggggttcctagacaaagtcaaggacaagatccatggtgagggcggcgccgncgaaggcgagaagaagaagaaggagaagaagaagaaggagcatggccatgagcatggccatgacagcagcagcagcagtga

SEQ ID NO: 4923 - DNA, 389 bp, Glycine max
  Clone ID: LIB3073-006-Q1-K1-H4
gaatagaaatagaactgtcttttcatatagatagcccttcaacacaacataggtcatcgaaaggatctcgaagacccaccaacgcacgaaagccgggatctttcagaaaatggattcctattcgaagggtgcataaccgcatggataagctcacactaacccgtcaatttgggatccaattcggttccttaggaggtatcgggaaggaattttggaatgtaataatatcgattcatacagatacagaagaaagggttctctattgattcaaacgctctacctacgagatagggatagagaaagaggaaaaaaccgaggatttcacatagtacttttggtcgaaaaatcgatctgatttttttcgtgcttttcgctcaatgatgaaatgg

SEQ ID NO: 4924 - DNA, 422 bp, Glycine max
  Clone ID: LIB3073-006-Q1-K1-H5
ggcgagatagaagcgtaagcagcggctaccctaacctcgtcttcctctctactaatttcagctatggccgacgaagctgtggctgttccagatcccacccagatcgatgtcaagctctttaaccgctggagcttcgaggatattgaggttactgacatttcactggctgattacattggagttgcggcatccaagcacgccacatatgttcctcacaccgccggaaggtactccgtgaagcggttcaggaaggcgcagtgccccattgttgagaggctcaccaactctctcatgatgcacggtagaaacaatggcaagaaactcttggctgttaggatcatcaagcatgctatggagattattcatttgttgactgaccagaaccccattcaggttattgttgatgctgtcatcaacagtgg

SEQ ID NO: 4925 - DNA, 415 bp, Glycine max
  unsure at all n locations
  Clone ID: LIB3073-006-Q1-K1-H6
gacacaccaaaccaaagtaagagtgagcaacttccaacaccatagtgaaatggcttccaaggctgcacttctcttgtgtttcaatgttctcttcttcaccgtggttagctccacatatgtgccatgcaacccaccccccaaaactccaaaacacccacctgtcccaaagccaccttccccaaagcaagcaagttgccccaaagacactattaagtttggtgtgtgtgctgatgtgttaggtttgatcaacgtgcaacttgggaagccaccaaagaccccatgctgcaacctcattgacggtctcgctgatcttgaagctgcagtgtgcctctgcactgctctcaaagctaatgtgttgggcatcaacctcaatgttccagtgaacttgagctngctactcaactactgtggaaag

SEQ ID NO: 4926 - DNA, 412 bp, Glycine max
  unsure at all n locations
  Clone ID: LIB3073-006-Q1-K1-H8
ggttgtgttgtgtctcttctcttcccaaactctcttcttctattccaaagacccttttgaagtaatcgatggagtttcagtctctttccagattctaccttcttctttccttaaccattctcttccttgcaccctttcacgctcaagctaaaattaaagtcacttactgcgataagaaggcagactatcctgtgaaggtgtctggagttgaaatatcaccagaccctgtggagagtggcaagcctgctacctttaagatctcggctacttctagtaaagctatttatggtggagaagtngtaattggagtttcatacgttggggtgcctgtccatactgaaagaattgatctctgtcatgaagtatcctgtcctgttgccaatggcaattttctgatttctcacacccaaac

SEQ ID NO: 4927 - DNA, 314 bp, Glycine max
  unsure at all n locations
  Clone ID: LIB3073-007-Q1-K1-A1
ggcacaagtgagtttgttgatcgagataactagagacagtgtgatgaaaatgaaggtccttgttttcttcgttgctacaattttggtagcatggcaatgccatgcgtacgatatgttccctctccgaatgaacactggctatggtgcccgtactccggaggtgaaatgcgcaagttggaggcttgctgtggaagcacacaacatctttggctttgagaccattcctgaagagtgcgttgaagcaacanaggaatacatncatggcgaacaatatagatcagacttcaaacagtttaccaacaagcttactttta

SEQ ID NO: 4928 - DNA, 427 bp, Glycine max
  Clone ID: LIB3073-007-Q1-K1-A10
ggcacaagtgagtttgttgatcgagataactagaaacagtgtgatgaaaatgaaggtccttgttttcttcgttgctacaattttggtagcatggcaatgccatgcgtacgatatgttccctctccgaatgaacactggctatggtgcccgtactccggaggtgaaatgcgcaagttggaggcttgctgtggaagcacacaacatctttggctttgagaccattcctgaagagtgcgttgaagcaacaaaggaatacatccatggcgaacaatatagatcagactccaaaacagttaaccaacaagcttacttttatgccagagacctcgaagtccatcccaaggacacatttgtgttcagtatagatggcaccgtactctctaatattccatactacaaaaaacatggatatggggtggaagaaatt

SEQ ID NO: 4929 - DNA, 323 bp, Glycine max
  Clone ID: LIB3073-007-Q1-K1-A11
gtagcgggtatagtttagtggtaaaagtgcgattcgttgcattggacccctaataggttaagggatcccccgttggattaatattccgatcaaaaactttatttcttacttaaagggaatcctttataccctcaatgaatgatttgcggtataatatacattatcgtaatttgtatacaagaagaatcaattctaaattgacaacttgagttctaaaattatgaaacataagtttttggaattggatctataatccgaatttttttgagtatgacgaaaggatctatggagagatatatagaaagtttctttctaatcgtaac

SEQ ID NO: 4930 - DNA, 391 bp, Glycine max
  Clone ID: LIB3073-007-Q1-K1-A12
gtgcaattgtgtgaggaaatatctctcacgagtttgtataaggagagaagcggacatgaagaagcaattagcatcaaggcgtttgctgatgtgggttatggtacatttgagcatttcaggagtgttgtccaagtccaaccacaccacaactacaacttctctgctgtgcgatggctccgtagaggactgcctcaacgttcaccacttggactcacagcttcccaccatctccagcacccacttccgcagaatcctcgctggagaaaaatgctgcagaagtaacactcagactgcaggtacaggtgatcccaataatcccaacttctgttcgaccgcaaccggttatcgtaagtgtggggccgcaactgatcctggtcaacccaaccgatgt

SEQ ID NO: 4931 - DNA, 243 bp, Glycine max
  Clone ID: LIB3073-007-Q1-K1-A2
ggaaccactcgcatcttgttcctccgctcaacagctatgataacatctttctctctccgaacagatcacactatggccacctcaagcgtcaaatcagtccatgatttcaccgttaaagatgccaagggaaatgatattaatcttggtgactacaaaggaacgggccttatcaattgcaatggtgccttacaatggggcttgacttattcaaattacactgggctcagtcaggtgtatgagaaa

SEQ ID NO: 4932 - DNA, 328 bp, Glycine max
  unsure at all n locations
  Clone ID: LIB3073-007-Q1-K1-A3
gaccgtattccttacgctctctcactcacaaacacacactgaactaaaaaacatcaaaagagacatggctgagcaaaccttcatcatgatcaagcctgatggcgtccaaagaggccttattggcgagatcattagcagatttgagaagaaaggtttctacttgaaaggtttgaaacttgttactgtggaccgtccttttgctgagaagcactatgctgatctgtctgccaagcctntctttagtggtttggtggattacattatctctggccctgttgttgccatgatcttggagggcaagaatgttgttacgactggccgaaagata

SEQ ID NO: 4933 - DNA, 296 bp, Glycine max
  unsure at all n locations
  Clone ID: LIB3073-007-Q1-K1-A4
gactacgttccaaaacacaaacacatacattgtagtatcacttttgtctcggaatttgttcttttgagttatggcaagcttaaaggttgcatgtgtggttttgatgtgcatggctgtgatgagtgcaccaatgatggtgcaagccgtgtcatgcaatgatgtttctgtgaacctagcaccgtgcctatcttacctgatgcagggtggagatgttccagaatcgtgctgtagcggagtgaggaacattctgggttctgccagcaccacctttgacanacaaaccgtgtgcaaatgtc

SEQ ID NO: 4934 - DNA, 414 bp, Glycine max
  Clone ID: LIB3073-007-Q1-K1-A5
gggaaagtgcaaacggtggtgtagtctgtgagtgtcattgtgaagctggagacaatgttagcttcttctctctccttcctccattcttgttcatcttcctctttcttattgtcaatttcactatctaatcccaaaccctctcattccctacctttcgtgctcgaagccaaatacaggacccgtacggaagacaggtccgcgcgccacactcgcatcagatagaaggtcgaagggacacccgagaggccgaggctgtccgtgttccggtcgaacaagcatctctctgtgcaggtgatagatgacaccaagatgcacacgctcgcttcgatttcgacaatgcagaggacggttgctgaagagttcaactacttcgctggccctacacttgaagtagcagagaggatgggtgagatc

SEQ ID NO: 4935 - DNA, 412 bp, Glycine max
  Clone ID: LIB3073-007-Q1-K1-A6
agaatatgaaaaagaaaaaaaagattctaaagaaatggaactagtattctttagaataatcaaaaagaatattaaattcaaataaattttagatagaaaaaagacttaaaaaaggaggatttgaaatgcgagatctaaaaacatatctttccgtggcaccagtagtaagtactctatggttcggggctttggcggatctcttgatagagatcaatcgtttttttccagatgcattgatattcccttttttttcattctagttattgacccggaaaggggtgaagaagattatagatccaattaagtataaaatatatgtattaaatatgtaataaatctctcttcttaattcggcttttattctttcttcttttacaattggtataagataaggtaggaaagagaaagaaat

SEQ ID NO: 4936 - DNA, 415 bp, Glycine max
  unsure at all n locations
  Clone ID: LIB3073-007-Q1-K1-A7
cccacgcgtccgagacgacagaagggggagtttgttgatcgagataactagaaacagtgtgatgaaaatgaaggtccttgttttcttcgttgctacaattttggtagcatggcaatgccatgcgtacgatatgttccctctccgaatgaacactggctatggtgcccgtactccggaggtgaaatgcgcaagttggaggcttgctgtggaagcacacaacatctttggctttgagaccattcctgaagagtgcgttgaagcaacanaggaatacatccatggcgaacaatatagatcagactccaaaacagttaaccaacaagcttacttttatgccagagacctcgaagtccatcccaaggacacatttgtgttcagtatagatggcaccgtactctctaatattccatactac

SEQ ID NO: 4937 - DNA, 272 bp, Glycine max
  Clone ID: LIB3073-007-Q1-K1-A8
gaagaagaagaaggagcatggccatgagcatgggcatgacagcagcagcagcagtgacagtgattaaactgctgcatcacctatatatttaaaaggtttatgggaccatagtagcgagggctgtgccttaatttctctctctctctctctctctctctctctctctctctttttcctttttccctatcttgtgatctatttatgagtgagaaaaacaaaagtgagaaattgtgcgtgtatctggttgctaattcgagtgctattagtctgtg

SEQ ID NO: 4938 - DNA, 390 bp, Glycine max
  Clone ID: LIB3073-007-Q1-K1-A9
ggtgtgattgtttgttgttgtaactcgttcttcggcttttgttgttctgtgtttgtgtttggtttttctctcacctgaaaatgtcttgcttccgtggttacctgtggttccgaaacttcttgcaattccggcaccggttgcgaaggctgcaagatgtccccagacttgagctacactgagtcaaccaccaccgagaccttggtcatgggagtggcacctgttaaggctcaatttgagggtgctgaaatgggtgtgcccgctgagaacgatggctgcaaatgtggaccaaactgctcctgcaacccctgcacttgcaagtgaggtgttgggagagcaagcttcaagcagagatagcccctaattaagaataatgataaactattaatgtgt

SEQ ID NO: 4939 - DNA, 335 bp, Glycine max
  Clone ID: LIB3073-006-Q1-K1-H12
taacgggactatacgttcttcgagctacatggacgggagatcgagataacgctacggatgacacgagactggcgctggtgtgcggttcaacttccgtgactacattcctttctgacaagaacgttcgtatcacaacctctgcaaaatctccctttgttggctctcaattgccgcttacaaagctgacattatcttcttacgttcgaacccttctgacggcatcatcccgtgctcgttgccagcacgagtctactgctgctaacgctgtcgcacaagaagacccgcgcttcgcgtgcgtcgaacccgaacccagatttaaacgcccggacatttgg

SEQ ID NO: 4940 - DNA, 395 bp, Glycine max
  unsure at all n locations
  Clone ID: LIB3073-006-Q1-K1-F7
ggatacgattcctttggtttgcagtaatgggtgctctggatcacatatcggaactctttgactgctccagtggcagttccaagcacaagaagcgcaagcaattgcagacggtggaggtgaaagtgaagatggactgcgaaggatgcgagaggaaagtgaggaaggcggtggaggggatgaaaggcgtgaaccaggtggatgtggagcgtaaggccaacaaagtcactgtggtcggctacgtcgaggcctctaaggtggtcgcccgcatcgctcaccgcaccggcaagaaagcagagctctggccctacgtnccctacgacgtcgttgctcacccctacgcacccggagtctacgacaagaaagccccctccggttatgtccgcaacaccgatgat

SEQ ID NO: 4941 - DNA, 412 bp, Glycine max
  Clone ID: LIB3073-006-Q1-K1-F8
gaatctttacaatcgataaccacacccatcgcctttattcagaatgtcggaatcaccattcagaccacgagaaaagcttgctgagaagcaaaaatattttcagagtatccacaggcatacctacttgaagggacccatggataagattacatccgtggccataccactggctttggttgcaacgtcaatttacatgattggacgagggatctataatatgtcgcatggaattggaaagaaagaataacctgggaatttctgattgaggagggtttcccacacaaacctaccttagcttcgttaatatgggccagtggttttctttgcatttatgtctgttctcttaataaattgcttagttgcagattttgactgccattgggggtttataacttgaatgaaagttgttctt

SEQ ID NO: 4942 - DNA, 336 bp, Glycine max
  Clone ID: LIB3073-006-Q1-K1-F9
gagccacagaaaggccaatccattcacccaccctataaaaaacactctgcaattttgattgattcccctattccacacacaagaagactcctcaatcatccatagacatggccaccgtcacttctgcagcagtttctattccctcattcactggcctcaaggcaagcgcaggcaaagtgagtgccgccgcagttaaagtctcagctccccaagccacaaggttctgcggcatcaaggcttccctcaaagacgttggagtcgctgttgtggccactgctgcgagcgcagttctagctagcaacgccatggccattggagtgttactggggggggggg

SEQ ID NO: 4943 - DNA, 355 bp, Glycine max
  unsure at all n locations
  Clone ID: LIB3073-006-Q1-K1-G10
gcacaagtgagtttgttgatcgagataactagaaacagtgtgatgaaaatgaaggtccttgttttcttcgttgctacaattttggtagcatggcaatgccatgcgtacgatatgttccctctccgaatgaacactggctatggtgcccgtactccggaggtgaaatgcgcaagttggaggcttgctgtggaagcacacaacatctttggctttgagaccattcccgaagagtgcgttgaagcaacaaaggaatacatccatggcgaacaatatagatcagactccaaaacagttaaccaacaagcttacttttatgccagagacctcgaagtccatcccaaggacacantttttt

SEQ ID NO: 4944 - DNA, 347 bp, Glycine max
  Clone ID: LIB3073-006-Q1-K1-G11
ggttgcattgcagtatcatcagaatcagagttgagttgaccccttcattccattaactatcactcttaacaatgcaagcagcaattgcagccatggccgcccacactattctcttttcttccttcccagctcctcaatccattgcccttcccgccactaccaagaaagccgttgcaatcctcaagggcaattcctccgtccatggccttgtcactctaacccaacaacaagacaacggcccaacaactgttactgttcgtgtttctggtcttactcctgggcctcatggttttcatctccatgagtttggtgatataacaaatgggtgcatatcaactgggccacat

SEQ ID NO: 4945 - DNA, 404 bp, Glycine max
  unsure at all n locations
  Clone ID: LIB3073-006-Q1-K1-G2
gtagcgggtatagtttagtggtaaaagtgcgattcgttccatggacccctaaatagttaagggatcccccgtttgattcatattccgatcaaaaactttatttcttacttaaagggaatcctttataccctcaatgaatgatttgcggtataatatacattatcgtaatttgtatacaagaagaatcaattctaaattgacaacttgagttctaaaattatgaaacataagtttttggaattggatctataatccgaatttttttgagtatgacgaanggatctatggagagatatatagaaagtttctttctaatcgtaactaaatcttccatttttttgtatagtagagattgaagcanaatagctattaaacgattcttttagtttactagagacacctac

SEQ ID NO: 4946 - DNA, 419 bp, Glycine max
  unsure at all n locations
  Clone ID: LIB3073-006-Q1-K1-G3
gaacggataacagtagagtaagagtagcaggagcagaaagaaagaaagaacgaaaatggcgagcggcgcctcaccgcaactgcaaatgaggttgaagtcctctttcatcggagatcgtctcttacgctgttcaacttcaaggcaccaacctcttcctcaactattccgttacaaccctggaaccaagcatgtttcgatgcagttatctagaacactttctggcttgaccaatctcttttttaatagaagaaatttggatgaattgcctaacagcaagcgtaaacgtctgagacctgngaaagtttctccgcggcgacaggtgccgaagaatataccgaggcctccgtatgtgaattctatgattcctccagggattgccagtggagctgaagtgcatgacaagaaagggatagaatgca

SEQ ID NO: 4947 - DNA, 426 bp, Glycine max
  Clone ID: LIB3073-006-Q1-K1-G4
ggtgccatgaattggaacttggcaatataataaccaacaaacttggtcaggttccaactcttcgaacaaactaactagctaggtgagaaaaagagaaacatgccttgcctttacatcaccaccaaccttaacctagatggagttgacaccaaccccgtcttttctgaagccaccactgctgtctctacaatcattggcaaacctgagaagtttgtaatggtcatattgaagtcatcagtaccaatatcatttgagggtaacaaggaaccagcagcatatgctgagatagtttcaatgggtggcataaatacagaagtgaagaggaagctgattgctaccattggaaccattttgtagtccaacctgtctatcccaagaacacgatttttcctcaaagtctttgatgtgagtgcgtttcgtaccaac

SEQ ID NO: 4948 - DNA, 389 bp, Glycine max
  Clone ID: LIB3073-006-Q1-K1-G5
gatttcgataatcatccatagttactgaagaaaatggcaaccatctccgctgctatcacaaccccatcgatcacccgcgcatgtctagtgcaaaaacgttctcttgggttctcatctcccgttcttggtttgccagcaatgggtaaggtgggaagagtgagttgctccatggaggaaaagccttcttctgtgaaggaaagcagctcaagcatgttggggatgggggcatctttgatggcagcggccagcgccgcagccatgtcaggcccagccatggccttggtggatgagagacttagcactgaaggaaccgggctacccttcggcctcagcaacaaccttctcggttggatcctgttcggcgtcttcggactcatctgggctctcta

SEQ ID NO: 4949 - DNA, 426 bp, Glycine max
  Clone ID: LIB3073-006-Q1-K1-G6
gagtgaagctctaaaccattgtcaagtatggcagtttcttcgtgctctttgagctggatttcaccctgcttatcccataagctaaacttaccacatacaaattgtttgccacgcaacactgcaacttcctcttccaacactgtcttttgtgcattggagacaaaccccagaggagaaatcttctgccagagaagaccgctactgttgggcgttggagcattaactgcaaatttacaaccaataaatttggtctttgctcaagaaaaaccagacagataccgagcttttgtggactatgaagatggatattcttacgtatatcccattgattggaaggaatttgacttcagggctcatgattctgcattcaaagacagatatctacagttacagaatgtaagggtgagatttataccaactgagaag

SEQ ID NO: 4950 - DNA, 324 bp, Glycine max
  Clone ID: LIB3073-006-Q1-K1-G7
gattatatgtgagttcaaacaaatcaaagccatggccacctccaacttctctattgttctctccgtctccctagccttctttttggtgctacttaccaaggcacactcgaccgataccgtttctttcaccttcaacaagttcaacccagtccaaccaaacattatgctccaaaaagatgctagtatttcatcctctggggtgttacaactcaccaaagttggcagcaacggcgtgcccacctcgggatctctcggtcgtgccctttacgctgccccaatccagatttgggacagcgaaaccgccagggaaccaacttggcttcc

SEQ ID NO: 4951 - DNA, 348 bp, Glycine max
  unsure at all n locations
  Clone ID: LIB3073-006-Q1-K1-G9
gacccccaaactctgcatcggaagaaaccctagccacgctcccggcgtcacgatgcagatcttcgtgaaaaccctaacgggtaaaacgatcacgttggaggtggagtcttcggacaccatcgacaacgtgaaggccaagatccaggacaaggaaggcatccctccggaccagcagcgcctcatcttcgccgggaagcagctggaggacggccgcaccctcgccgactacaacatccagaaggagtccacgcttcacctcgtcctccgncttcgtggcggcgccaagaagcgtaagaagaagacctacaccaagcccaagaagatcaagcacaagcacaagaaggtcaa

SEQ ID NO: 4952 - DNA, 429 bp, Glycine max
  Clone ID: LIB3073-006-Q1-K1-H1
gatagcatcatcatacaaagcattgaattcaaaaactgaagttcattccttgtgttttgctttcttcctcaaaaccaaacatgtcgaacacatgcggcaactgcggctgcgctgacaagactagctgcaccaagggaaacagctatggtgttattgtagagactgagaagagttacatcgagactgttgtcatggatgttccagcagctgagcatgatgggaagtgcaagtgtggcactaactgcacttgcacggactgcgcctgtggccattaaggaatatgtatgaaaatgtaattgccatgtgtttggcaatacaaatatccaaataatgtaatcttcgtatgaataaatgtgtgtgctgttatcctacttcaggtctgtgtagtcatgcagtctgaatcatttcaagttcctgtcttagttaata

SEQ ID NO: 4953 - DNA, 342 bp, Glycine max
  Clone ID: LIB3073-006-Q1-K1-H10
gacacaccaacaccaaaacaaacccactaagatggctggctttgtatccttcctagtgctgcttcttgcagcccttatcctcatgcctcaagggcttgctacttactacaaaccaattaagaagccaccagtgtacaagcctccagtgtacaagccaccagtgtacaaaccaccggtttataagccaaaaccaccggtttacaagccgaaaccaccggtttacaagccaccatataagaagccaccatacaagaaaccaccttatggaaagtaccctccagtagaggacaacacccatgcctaaagcaagcaatgaggtctattatctacttaataaataag

SEQ ID NO: 4954 - DNA, 317 bp, Glycine max; identical to SEQ ID NO: 4582
  Clone ID: LIB3073-006-Q1-K1-H11

SEQ ID NO: 4955 - DNA, 426 bp, Glycine max
  Clone ID: LIB3073-006-Q1-K1-F4
gatagcgtttttcattgtgcattattcaatggcgaccacagcagctctatccggaaccatggtgagcacctccttcatgaggaagcaacctatgacgaccaagagcctaaagacattccccaacgctctttttggtctgaaaggtggacgaggtggtcgtgtaacttgcatggcctcgtacaaggtgaagctcataaccccagaaggagaagtggagtttgaatgcccagatgatgttttcattgttgacaaggctgaggaagaaggcattgaacttccctactcgtgcagggctggttcttgcgtttcatgtgttgggaaaattgtgaaaggtgacgtggaccagtcagatggtagcttccttgatgatgaacaaatagaaagtggatgggttctcacctgtgttgctctacctaggtcagacgt

SEQ ID NO: 4956 - DNA, 433 bp, Glycine max
  Clone ID: LIB3073-006-Q1-K1-D8
agaaggggacaccaacaccaaaacaaacccactaagatggcttcctttgtatccttcctagtgctgcttcttgcagcccttatcctcatgcctcaagggcttgctacttactacaaaccaattaagaagccaccagtgtacaagcctccagtgtacaagccaccagtgtacaaaccaccggtttataagccaaaaccaccggtttacaagccgaaaccaccggtttacaagccaccatataagaagccaccatacaagaaaccaccttatggaaagtaccctccagtagaggacaacacccatgcctaaagcaagcaatgaggtctattatctacttaataaataagaggaactgctttgtgttttctagcattgtgatttacaacttcgtagcaatgcatattcttgactcttgcatgcacttcaatccttc

SEQ ID NO: 4957 - DNA, 347 bp, Glycine max
  Clone ID: LIB3073-006-Q1-K1-D9
gaaggtgcaagagtttgttgtgagctataagcgagtggatcgtgaggagaatatgaagttgtttgttttctttgttgctgcagtagttttggtagcatggccatgccatggcgcatgctaccaaaggttccctctccgaatgaaaactggctatggtgagcgttcttcggaggtaaaatgcgcaagttttaggcttgctgtggaagcacacaacatccgagcctttaaaaccattcctgaagagtgcgttgaaccaacaaaggactacattaatggcgaacaatttagatcagactctaaaacagttaaccaacaagctttcttttatgctagtgaacgcgaagtcc

SEQ ID NO: 4958 - DNA, 290 bp, Glycine max
  Clone ID: LIB3073-006-Q1-K1-E10
tcatcttcaataactaagtatcgattggtttctaataatccgagatcgggccccccatatagcagtccactaccaaactcatctccatctccaatcttttttctccatcttttcactcagctctcaacatcttcttctaccaattcgacaattccaacatctcttactctaccaccaatcttttatactctgatcctaaatatgcacaactttatcacaaacatcgcatacttcaatctcataactacgcttctcattatctccataattaccattattatatataccac

SEQ ID NO: 4959 - DNA, 347 bp, Glycine max
  Clone ID: LIB3073-006-Q1-K1-E11
ctttgctccaggagtgtctcagatggagccagtaggtctttgtttgcgtgatgttctcaacatcctgcacaatcttcaaggcgcttttgttgctggagacgtggtcgaatttaacccgcaacgtgataccgttgatggaatgactgccatggtagctgctaagctggtcagagaactggctgcaaagatttctaaatgatgatctcctgcctccccctgatctatacttcaacccacccgttccctaaaatgcacctgaaaggataactttccagaatggcatccaattttcactacatttaatttggagcattcatagacgaacatggtttataaaattttttttt

SEQ ID NO: 4960 - DNA, 412 bp, Glycine max
  unsure at all n locations
  Clone ID: LIB3073-006-Q1-K1-E2
ggttctagtgtgtgattgtttgttgttgtaactcgttcttcttcttttgttgttctgtgtttgtgtttgttttttctctcacctgaaaatgtcttgctgcggtggtaactgtggttgcggaagctcctgcaagtgcggcaacggctgcggaggctgcaagatgtacccagacttgagctacactgagtcaaccaccaccgagaccttggtcatgggagtggcacctgttaaggctcaatttgagggtgctgaaatgggtgtgcccgctgagaacgatggctgcaaatgtggaccaaactgctcctgcaacccctgcacttgcaagtgaggtgttgggagagcaagcttcaagcagagatagcccttaattaggaataatgataaactattaatgtgtagctaanaacttatg

SEQ ID NO: 4961 - DNA, 394 bp, Glycine max
  Clone ID: LIB3073-006-Q1-K1-E3
caacataggtcatcgaaaggatctcgaagacccaccaacgcacgaaagccgggatctttcagaaaatggattcctattcgaagggtgcataaccgcatggataagctcacactaacccgtcaatttgggatccaattcggttccttaggaggtatcgggaaggaattttggaatgtaataatatcgattcatacagatacagaagaaagggttctctattgattcaaacgctctacctacgagatagggatagagaaagaggaaaaaaccgaggatttcacatagtacttttggtcgaaaaatcgatctgatttttttcgtacttttcgctcaatgatgaaatgggtcagattctacaggaccaaaccttgtgggagttaaggaatgatggaag

SEQ ID NO: 4962 - DNA, 401 bp, Glycine max
  unsure at all n locations
  Clone ID: LIB3073-006-Q1-K1-E5
gagggttggttcatttgatctgcgagtggagaagagaatcgtgatgggaggaggacacggtcacggcaccacctacaaaggagttaccgttcatcacccaaagcgctggcacactatcaccggcaagggtttgtgcgcggtcatgtggttttgggtattctacagggcaaagcaagacggtcctgttgtattgggctggaggcatccttgggagggtcatcacgatgatcatggcaagggccattaagcattccttaggcatgagctccaagaacaggaagaacagaatttgaagtgtctgttgctgtgggtgtgctgttagttgaaatgtttactttgatcaattcaataaatttggctgtaaaataagagatttctttntgcgtggtttcatgagcatt

SEQ ID NO: 4963 - DNA, 402 bp, Glycine max
  Clone ID: LIB3073-006-Q1-K1-E6
gaacgcagggaacaaaagaaaatcctgaccgattctcttcgtagccaagcactctgaaattctcagatatgtcgtggcaagcgtatgtggatgatcacctactgtgtgaaatctgaaggtgaccacctaactcacgccgatatcataggccaagacggaagcgttggggctcagagcaccaactgccctcagttcaaacctgaggaaataactgccatcaataatgactataatgagcctggatcacttgctccaactggattgtatatcggtggcaccaaatacatggtcatccagggtgagcctggtgctgtcattcgagggaagaagggtcctggtggtgttactgtgaagaagaccggtgcggccttgatcattggcatttatgatgaaccaatgact

SEQ ID NO: 4964 - DNA, 442 bp, Glycine max
  Clone ID: LIB3073-006-Q1-K1-E7
acgacagaaggggcagatagatctgcttcttgttgttggaaagaaaccctagcaagcggaacaatggcagacgttgaggtcgatgtggcggctgcagcagcagcagggcagccgaagaagagaacgttcaagaagttcagtttcaggggcgtggatctcgatgcgcttctggacatgtccaccgatgaactcgtgaagatgttcagtgctcgcgcacgtagaaggttccagagaggcctcaccagaaagcccatggccttgatcaagaagcttcgcaaagcgaaaagagaagctccaccaggtgagaagccagaacctgtccgcacccacctccgcaacatgattattgtgcctgagatgattggtagcattattggagtgtacaatggcaagacctttaatcaggttgaaatcaaacctgagatgattgggcattatctgg

SEQ ID NO: 4965 - DNA, 333 bp, Glycine max
  Clone ID: LIB3073-006-Q1-K1-E9
gagcttcaataagtaagtatcgatgggttccgaagaatcccagaacaagccccccagagagcagtccactaccgaactcatcacgagcgcgaagctggtggcggaggcggcgcagtcggctctgaagagcgacagcgacaaagtggacaaggccaaggtggctgacgctgccggcgatcttctcgacgcggcggggaagtatggaaaacttgatgacaaacaaggcatagggcaatatgttgacaaggctgctgattatctgcataattaccagggtgataataccactgctccttcacagcctgcagagtctaaaggtgaagaaagtggtgg

SEQ ID NO: 4966 - DNA, 394 bp, Glycine max
  Clone ID: LIB3073-006-Q1-K1-F1
gctcctttagattcttcagcaactgcgattttggatcggaacctcttctgcggcgtagcaatgggacactccaacgtttggaattctcacccaaaaaactacggtcctggttctcgcacttgccgagtgtgtgggaatccacatggattgatcaggaagtatggccttatgtgctgcaggcagtgcttccgtagcaatgccaaggaaattggcttcatcaagtatcgctaaaagagctgttgtcacctacggaccaatattatgttctggcactaggatgttttgaagatgttatgtttgaagaaacttgagacttgtttttttttcatctattttattatcagacataatgtgtggaacgaagaatacttttatataaattgttttgcacaaa

SEQ ID NO: 4967 - DNA, 339 bp, Glycine max
  Clone ID: LIB3073-006-Q1-K1-F10
ggatctatgtggtgattcagaaacaaacgaaagccaggagacatggcgaaatcggcgtggaattctctgatgcagagcctgaagcggttcataaagaagccatgggagatcacgggcccgtgcgcggaccctgagtacaaatccgcattgcccttggccgtggagtaccgcctcagctgccccgccaccgtcaaggagaagcccatcatccccaactccctcccggagaccgtctacgacatcaagtacttcacccgcgaccagcgccgcaaccgtccttccatacgacgcaccgtcttgaagaagcccgacgtcgagaagctcatgaaggaacagacc

SEQ ID NO: 4968 - DNA, 339 bp, Glycine max
  Clone ID: LIB3073-006-Q1-K1-F11
gaagactgtctctaaggaggaagcgtctgccatgaaggctgctgggaaagcatggtatcacactatggtgtcagattctgattatacagaattcgacagcttttctaagtggttgggtgtttcacagtaaacttcatgatttattttttcgtattagaattttgttttttatgctcatcagaactaaatatccttatctttggtttttttgttttgcgggttaaggttgtcatcataattatgcagacaatgtggaaattttgtttgctggattttagtgcaaattctggttcttatacaaaaaagcacaacgtaaaaaacaaaaaaaagcggccgctc

SEQ ID NO: 4969 - DNA, 232 bp, Glycine max
  Clone ID: LIB3073-006-Q1-K1-F12
tcctaacgggaattctttttctacattcaaaacctatcccatgccaggttacattacaacgtgggcttgcactactctgacacatactcattatccatacatcaacaactcatctaagatcacggtccctttaacgtacacttcatacataatcttatcgtactagaactttgattaccatcctcattataactacacattcatatataagcccatcatccccaactcccta

SEQ ID NO: 4970 - DNA, 326 bp, Glycine max
  Clone ID: LIB3073-006-Q1-K1-F2
aggcgtgcgaacacgtgcgagaggactacagagggggagagggagaggcgttagcaagagcaagaataactctgctaggcccatgtgctctattcagcgatcgagtatggggccctcacagctgccccttgcactgatgagacgtcctcagaactatgcctaccatacctcttatggaactccttgctaaccagagtctccgtctgcggtggcaacaacatccagactggcatgcctgatcggagtaatggtgccatggctgcaaaggaaggagccgcagcatctggcttgatacgaacgcgcaagagcggacaccagaatggaac

SEQ ID NO: 4971 - DNA, 422 bp, Glycine max
  Clone ID: LIB3073-006-Q1-K1-F3
gagcgcaaaacaatgggcagtgcattttctgccctattcggccgcgggtccaccgtcgccgaagggtcgtcggagagtttacacgtgttgccgttccactcgtcggaacgctggcagctacacttcaacgaggtcaaagagacctctaagctcgttgtgatagatttcacggcgtcgtggtgcggcccttgtagattcatagctccggtatttaacgagatggccaagaagtttagcaacgctgagtttgtcaagatcgatgtcgacgaattacctgatgtggctaaggattttaaggtggaggcgatgccgacgtttgtgttgtgtaagaaaggaaaagaagttgatagggttgtgggcgccaggaaggacgagctccagaacaagattcagaaacattatcaataaaacgtggaatcaat

SEQ ID NO: 4972 - DNA, 272 bp, Glycine max
  Clone ID: LIB3073-006-Q1-K1-B9
gactcacaaggcaatcaatcaatcttctgagagtgtttggttgaaagtagcaaagatgtgtcctttcgggcaaaagggtcaaaagataaaggggactatggtggttatgcagaagaatgtgttggatatcaacagcatcaccagttgttgaagggatcgttgaccaaggcttaggcttcataggcagtgcagtcgatgcacttacttttgcagccaccaaaatctccatccagttgattagtgctaccaaggttgatggtgggaaaggaaaa

SEQ ID NO: 4973 - DNA, 329 bp, Glycine max
  Clone ID: LIB3073-006-Q1-K1-C10
gacacataaaccaagtactacaagggaagaagaactgagctacaagctaaggaaggatcaaagagaatggctcaagcaatggcatcaatgactagctaacgtggttcctctaaggctgtgttgaaaggtagccttggctcaaaacccttgaatgtgggaagtggaagcagggtggcctaagtcacacgtgcagggttcacagttgaagcccagaaccaccagttgaatgttgttaaggtccaaattacccgtagggcatggctttaactggttgctgctggtttgaccactggctctttggttcaagctgtgcttgctgatgccaaacc

SEQ ID NO: 4974 - DNA, 337 bp, Glycine max
  Clone ID: LIB3073-006-Q1-K1-C11
gatctggcagcagaagaacaagtagggtgagaactaagaaggagaagcaaatggcttcctcaatgatctcttccccagctgttaccactgtcaaccgtgccggtgccggcatggttgctccattcactggcctcaagtccatggctggcttccccaccaggaagaccaacaatgacattacctccattgctagcaacggtggaagagtgcaatgcatgcaggtgtggccaccagttggcaagaagaagtttgagactctttcctacctgccagaccttgatgatgcacaattggcaaaggaagtagaataccttcttaggaagggatggattccttg

SEQ ID NO: 4975 - DNA, 337 bp, Glycine max
  Clone ID: LIB3073-006-Q1-K1-C12
cggtaagtagcctagtcatactctgtatcatttcgtttggattatcatccatagttactgaagaaaatggcaaccatctccgctgctatcacaaccgcatcgatcacccgctcatgtctagtgcaaaaacgtcctcttggggtctcatctcccgttcttggactgcgcagcaatgggtaaggtggcaagagtgagctgctccatggaggaaaagccatcttctgtgaaggaaagcagctcacgcctgttggggacaggggcatctttgatggcagctgacagcgccgcagccatgtcaggcccagtcatggccatggcggatgacagacttagcact

SEQ ID NO: 4976 - DNA, 426 bp, Glycine max
  Clone ID: LIB3073-006-Q1-K1-C2
gacacaactgaacaagataagctatccatagcagccaaagaaatgaagagtaccttgttcgccctctttctactttgtgccctcacctcttacctaccttcagccaccgctggtgatgtggtcgacactgatgataatcctgttgaaaatggaggcacatactttgtgttgccaactataatattaaacggcggtggaatagaatatgccacatttggaaatgaaacttgccctgtcactgttgcgcaatctcgcgatcagttctgcaagggctttccgataaccatttcatccccagcccgaatccgtcacatcagcgaaggccttagtttgaacattgggttcactttcgcatccccgtgttcccccgcttctgagtgaaccattgtgaaggatcaaccagaaggactcgctgttaaactcact

SEQ ID NO: 4977 - DNA, 384 bp, Glycine max
  Clone ID: LIB3073-006-Q1-K1-C3
ggaacctttttgtttctaatcaacagacatagcctattcctggttgcttctgtttttgtttttcatttcagaataggaaccaatggctcatttgctgacaccaactcctgccactgctgcaacagctctctccccgagagcccgaaagagcaagagccccctccattcttggaaaaatggttactttccaactccaagagtgtgctgcgttggccaccaatctcaacgatctcacacctcttccatctcttctgatcttgatcaagtccctcctccccttgacaaccactctcttcgtcgcaggacattgatggggttgagtggtgcggcaatgttggggttgagtttgagtgatgagcaaagtgcaagtggcgcggcaaggcg

SEQ ID NO: 4978 - DNA, 401 bp, Glycine max
  Clone ID: LIB3073-006-Q1-K1-C4
ggacaacgcgaatatattccgttaatgaaaaagcggtagccgctagagcaggagattgaagggcgaaaaagaagactgagagaagagagatgggcgtgacgaaggaagaagttgaatcatccttgaaggccaaactgaacccttctcatcttgaagtggttgatacatctggagggtgcggtgcaagttttgtggtggagattgtatcagaacaatttgaaggcaaaaggctacttgagaggcatcgaatggtgaatgctgccttagaggaggaaatgaaacaaatccatgctctctctattaagaaagctgttaccccagaccagtggaaacaacagcaagaatccaaccaatcaaatcctgctgcctaaagcatatgtttcggttataaaataagaaat

SEQ ID NO: 4979 - DNA, 345 bp, Glycine max
  Clone ID: LIB3073-006-Q1-K1-C5
gacagaaacatcgagcagcagaagaaagaaactacagaaaaaagaaaaaagacatggcttccacttctgcagtttcattggctatgccagtaacttatgccagccagaagagggtactggtgcctagctctgatgcattattcctcaagccactgcctctacgttcttattcttccaaggcaatggcagcatcaaaagtacccaatggaaggtttcaggtgagggcttccatgaaggagaaagttgtgacaggcctcacagcagctgcattcacagcctcaatgatggctcctgatgtggccgaggccgccgtttcgccttctctcaagaacttcttgctcagca

SEQ ID NO: 4980 - DNA, 353 bp, Glycine max
  Clone ID: LIB3073-006-Q1-K1-C7
gatcaccactcggacgcaaaaatggcacctgcgacactgtctctgtctctccttctactgctctcactcaacattgacgtaaccgtcagatagagcgactacgactactattgactgtacactgcatacgttggaaccgattcagtgctggaaggccaaacgtactctaagatcgggctgaagctgtacgacaagtacggtcactacatctacattaaaaacctctacgcatggcgcagcttgatgagcatgggctacgactacttccagcgcggcaacctcgacatcttcagcaggaagagaccctgtattgacggacccatatgtgccgttaaagttacttctagctgatc

SEQ ID NO: 4981 - DNA, 421 bp, Glycine max
  Clone ID: LIB3073-006-Q1-K1-C8
gaccacaccgagtcgcagaaaaagacaaaagcgatcatagtttcacttcggccttatccagtttagggtttcggttctctaccctatctttcacgtatcgaaaccttaaatttacgatcaggtctgagcaatctggttggtagaacctttggtcttagtgagtcaagttttatgtctgaattagacgatcaaattcctactgccttcgatccttttgctgatgcaaatgctgatgactcgggtgctgggtcaaaggagtatgtgcatattcgtgtacagcagcgaaatggtaggaaaagcctgacaaccgttcacggattgaaaaaggaattcagctataacaagatacttaaagacgtcaagaaagagttctgttgcaatggaacagctgctcaggacccagaactaggacaggttattc

SEQ ID NO: 4982 - DNA, 393 bp, Glycine max
  Clone ID: LIB3073-006-Q1-K1-D1
gcacatgtgagtttgttgatcgagataactagaaacagtgtgatgaaaatgaaggtccttgttttcttcgttgctacaattttggtagcatggcaatgccatgcgtacgatatgttccctctccgaatgaacactggctatggtgcccgtactccggaggtgaaatgcgcaagttggaggcttgctgtggaagcacacaacatctttggctttgagaccattcctgaagagtgcgttgaagcaacacaggaatacatccatggcgaacaatatagatcagactccaaaacagttaaccaacaagcttacttttatgccagagacctcgaagtccatcccaaggacacatttgtgttcagtatagatggcaccgtactctctaatattccatac

SEQ ID NO: 4983 - DNA, 105 bp, Glycine max
  Clone ID: LIB3073-006-Q1-K1-D10
gattcacaatttcatcatcaactcatagcaacgattgttgtcaaaaagaacagggaagaaaaggcccagaaacctcatcatcaagttcttgcaactctttcttcc

SEQ ID NO: 4984 - DNA, 347 bp, Glycine max
  Clone ID: LIB3073-006-Q1-K1-D11
gatagaagaagcacaaagagaagcatgagcactaggagcagcagcaactagtctcagctgaaatggcctcttcagtgatggcatctatggccctcaaacctgcccctttcactgttgagaagtcctcagtgagaggccttccctctctctcaaggaactcttcttcattcagagttgtggccagtggcaagaagatcaagactgacaaacctcatggaattaatggtggcatggctttgagggatggaactgatgcatctggcaggaaaggaaagggaaagggtgtttaccagtttgtagacaaatacggtgctaatgtcgatggttacagtcctaatctttttaaa

SEQ ID NO: 4985 - DNA, 426 bp, Glycine max
  Clone ID: LIB3073-006-Q1-K1-D3
ggttctagtgtatgtgattgttgtgactcgttcttcttcgtcgttatcttcttcttttgttgtttgtgtgtttgttttttctctcacctgaaaatgtcttgctgcggtggtaactgtggttgcggaagcgcctgcaagtgcggcaacggctgcggaggctgcaagatgtacccagacttgagctacaccgagtcaaccaccaccgagaccttggtcatgggagtggcaccagttaaggctcaattcgagagtgctgaaatgggtgttcccgctgagaacgatggctgcaaatgtggagctaactgcacctgcaacccctgcacttgcaagtgaggtgttggagagctaaagcttcaagcagagatggcccttagaaataatgataaaaactatatgtagtttcaaaacttcaaaattatgtagtat

SEQ ID NO: 4986 - DNA, 420 bp, Glycine max
  unsure at all n locations
  Clone ID: LIB3073-006-Q1-K1-B7
ggttctagtgtgtgattgtttgttgttgtaactcgttcttcttcttttgttgttctgtgtttgtgtttgttttttctctcacctgaaaatgtcttgctgcggtggtaactgtggttgcggaagctcctgcaagtgcggcaacggctgcggaggctgcaagatgtacccagacttgagctacactgagtcaaccaccaccgagaccttggtcatgggagtggcacctgttaaggctcaatttgagggtgctgaaatgggtgtgcccgctgagaacgatggctgcaaatgtggaccaaactgctcctgcaacccctgcacttgcaagtgangtgttgggagagcaagcttcaagcagagatagcccttaattagaataatgataaactattaatgtgtagctaaaaacttatgtattatgtc

SEQ ID NO: 4987 - DNA, 426 bp, Glycine max
  unsure at all n locations
  Clone ID: LIB3073-006-Q1-K1-D5
ggtacaagtgagtttgttgatcgagataactagaaacagtgtgatgaaaatgaaggtccttgttttcttcgttgctacaattttggtagcatggcaatgccatgcgtacgatatgttccctctccgaatgaacactggctatggtgcccgtactccggaggtgaaatgcgcaagttggaggcttgctgtggaagcacacaacatctttggctttgagaccattcctgaagagtgcgttgaagcaacaaaggaatacatccatggcgaacaatatagatcagactccaaaacagttaaccaacaagcttacttttatgccagagacctcgaagtccatcccaaggacacatttgtgttcagtatagatggcaccgtactctctaatattccatactacaaaaaacatggatatggngtggagaaatt

SEQ ID NO: 4988 - DNA, 424 bp, Glycine max
  unsure at all n locations
  Clone ID: LIB3073-006-Q1-K1-A2
gaccctcaaacacgtaactactatttcgaactccgccatggctgccaccaccgccaccgccacgtcatacttttttggcacccgcctcaacaacccgacaaccttaaacaacggaagattccacgcgctcctcaacttcggcaaaaagaaggcggcggcgccgccaccgaagaaaaaggaagtgaaagtgaaaccctccggcgaccggctggtgtggtttcctaatgcggagccgccggagtggctcgacggaagcatgatcggcgaccgcgggttcgacccgttcggtttcgcgaagcccgcggagtacctgcagttcgacctggactcgctggaccagaacctcgcgaagaacgtcgccggcgatgtgatcggaaccagngtggaggtcgccgacgttaaaccgacgccgtttcagccctac

SEQ ID NO: 4989 - DNA, 419 bp, Glycine max
  Clone ID: LIB3073-006-Q1-K1-A3
ggctgtgggaagaggaaccctagctagggtttggaagaagctgatccgagaagatggtgcagcgtctcacctaccgcaaacgccacagctatgctaccaaatccaaccagcacagagtcgtcaagactcccggtggcaagcttgtttatcagaccacgaagaagagggccagcggacccaagtgccctgtcactggaaagaggattcaagggattccacatttaaggccagcagagtataatagatcaaggttacacagaaaccgaaggactgtgaaccgtgcatatggtggtgtgttgtctggcagtgctgttagagaaagaatcattcgagctttcttggttgaagagcaaaagattgtgaaaaaggtcttgaagatccaaaagacataggaaaaacaagctttgaagggctgagtt

SEQ ID NO: 4990 - DNA, 408 bp, Glycine max
  Clone ID: LIB3073-006-Q1-K1-A4
ggagacacaaactcacacactttgtactctccgtccttccttcttcgatccagatctctctccttctccctcaaatggcttcccttctgcaatgttccatgcccctcgtctctctttccaatcgagctctggtacccggtaccaggatctccaacccaagttcagtttccctttcaattaagggaagaagtttcccatccgttacattgcagcccagagggcgtcggtttcagcttagatgtgcggcaaaaccagagacagtgaagaaggtgtgtgacatagtcaagaagcaattggcactgccagatgaatcagctgttactggagagtctaaatttgctgcacttggagctgattctcttgacacggttgagattgtgatgggacttgaggaggaatttggtatta

SEQ ID NO: 4991 - DNA, 392 bp, Glycine max
  Clone ID: LIB3073-006-Q1-K1-A6
tgcgcatgcgaaaagccgacagatggctactgatacggaaagacgactgactgcttcagtgatcagatgaccacctgatgctactgttgacagagcacgagccagcgttactgctgcattaactggactgaaggctatggctgccttacgaccacggaaggctaccgctgacataacatgacttgctgggctcgttgtatgatcagcaatgcatgcaggtgtggccaccagttggcaagaggtctatagggactatgttttagttggcatacctgcaacatgctcaatctgctaaggaggcacaaaacttaattaagtgggcatggatttacagcttggaatctgagataacgcacgcgttaccgtactgagagcacttgaggtaaatacga

SEQ ID NO: 4992 - DNA, 312 bp, Glycine max
  Clone ID: LIB3073-006-Q1-K1-A8
gacacaccacaagcttctccttcttttgggaaaagattaacaataaaagtgtggagtactgttgatagcaaagatgtttgggatcttcgacaaggggcaaaagataaaggggacagtggtgttgatgccaaagaatgtgttggacttcaacgccataacctccatcggtaaaggtggtgttattgacacagccaccggcatcttaggccaaggcgtcagcttagttggtggagtaattgatactgccacttccttcttaggccgtaatatctccatgcaattgatcagtgctactcagactgatggcagtgg

SEQ ID NO: 4993 - DNA, 396 bp, Glycine max
  Clone ID: LIB3073-006-Q1-K1-B1
gctcaagtgagtttgttgatcgagataactagaaacagtgtgatgaaaatgaaggtccttgttttcttcgttgctacaattttggtagcatggcaatgccctgcgtacgatatgttccctctccgaatgaacactggctatggtgcccgtactccggaggtgaaatgcgcaagttggaggcttgctgtggaagcacacaacatctttggctttgagaccattcctgaagagtgcgttgaagcaacaaaggaatacatccatggcgaacaatatagatcagactccaaaacagttaaccaacaagcttacttttatgccagagacctcgaagtccatcccaaggacacatttgtgttcagtatagatggcaccgtactctctaatattccatactac

SEQ ID NO: 4994 - DNA, 350 bp, Glycine max
  Clone ID: LIB3073-006-Q1-K1-B10
gactcacaaggcaatcaatcaatcttctgagagtgttgggttgaaagtagcaaagatgtgtcctttcgggcaaaagggtcaaaagataaaggggactatggtggttatgcagaagaatgtgttggatatcaacagcatcaccagtgttggagggatcgttgaccaaggcttatgcttcataggcagtgcagtcgatgcacttacttttgcagccaccaaaatctccatccagttgattagtgctaccaaggctgatggtgggaaaggaaaaattggaaagagtacaaatttaagaggaaagataacattaccaaccttgggagctggcgaacaagcatacgatgtttttt

SEQ ID NO: 4995 - DNA, 313 bp, Glycine max
  Clone ID: LIB3073-006-Q1-K1-B11
ctcagttaatttggtgatccaaaatactagggacggtgttaataaatgaaagtcctgtgtttctttcgttgctacaattttggtagcatggcaatgccatgccttacgatatgttccctctccgaatgaacactggctatggtgcccgtactctggaagtgaaatgcgcaagttggaagcttgctgtggaagcacacaacatctttggctttgagaccattcctgaagagtgcgttgaagcaacaaaggaatacattcatggcgaacaatatagatcagactccaaaacagttaaccaacaagcttactttta

SEQ ID NO: 4996 - DNA, 406 bp, Glycine max
  Clone ID: LIB3073-006-Q1-K1-B4
cagtaggctccaggagaagcgttgataatagggagggaaagctatcagtaaaattgaaggcgggtagaatttcacgtgacttacatcctgcatcccacaaattatcttcaatagaggtccgggttgaggatgctaaagacacagccagggtccaagctaaaaaatcttctgaactaaagaatagtcatttgcttgaaggtggtgtccatgttgaacaacctggttattgtgctaatggtaaacgttatgaggagaaagtaaacaaggacaatcaggaaagtgaattttcttggcagaaatctggtaaggtttcatcattgcacagcaaggagaaggacagaaagtctggttctcatgttggtacagataagatgaagatttcagtttcagagactggtggttattc

SEQ ID NO: 4997 - DNA, 423 bp, Glycine max
  Clone ID: LIB3073-006-Q1-K1-B6
gcttgcttccgtgacttgagaaaagagaattagggtcacgagggtttcatcctgcggcatcagacatgggaggaggcaatgggcaaaaggcaaagatggctcgcgagaagaacatcgagaagcagaaggccgcctcaaagggaagccagctggattcaaacaagaaagcaatgtcgatccagtgcaaggtgtgcatgcaaacatttatgtgcaccacatcggaagtgaagtgtagggagcatgctgaagccaaacaccctaaatctgatgtttatgcttgttttcctcatctcaaaaagtgaacatattggagagtgcaaatggagaaaaactttatatcatcatggcctcttccttaaacctattgacagagatcttccccattttctatctatataaaatgtgtttttctgtgtttgtgcc

SEQ ID NO: 4998 - DNA, 341 bp, Glycine max
  Clone ID: LIB3073-006-Q1-K1-A12
gattatgatttaatttaatctgattttgcagcgacgagaccacagtccacaagacccagaagcaccaccgcgaccggcgaatccagccaccgtgtgcggcttcgaattgagtccgagaacgcagttagacaggctttatattgaaacttgagacttgaagggaagctgttataattggtccggctttggatgtttaaacaattctgatcaagaatccaagtttgccttctaaatatgtcatagatttttcgttacagtcttcccatggcgtatcccttctcagatttcaagtactcagatggcctcactgtagtgggtatctccttctgcacagctattgt

SEQ ID NO: 4999 - DNA, 364 bp, Glycine max
  Clone ID: LIB3073-005-Q1-K1-G6
gccacgcgtcgggagaagacgacgagggggaagctcataagtaagtatcaatggcttccgaagaatcccagaacaagccccccagcgagcagtccactaccgaactcatcacgagcgcgaagctggtggcggaggcggcgcagtcggctctgaagagcgacagcgacaaagtggacaaggccaaggtggctgacgctgccggcgatcttctcgacgcggcggggaagtatggaaaacttgatgacaaacaaggcatagggcaatatgttgacaaggctgctgattatctgcataattaccagggtgataataccactgctccttcacagcctgcagagtctaaaggtgaagaaagtggtggtgg

SEQ ID NO: 5000 - DNA, 371 bp, Glycine max
  Clone ID: LIB3073-005-Q1-K1-G7
actgcaactttgctctctgtgaggcttcaatttctaattagggtttcgcttagagtaaccaataaccatgggagtcttcacctttgtcgtccgcaaatccggcagcgaatggagcgccaagcaacattccggcgacatcgaggcctccgccgattccaccttcgatctccaacggaagctcgtgcaagccgctctcgccgttgattcctccggtggagttcagtcctctttctctcccgtgtctcctacctccgctgtgttccaggtgatagtgggtggtgcagtattcgttggaggtggtggtggtgctgttgcagctgcacctgcaggtggtgctgccgcagctgatgctgccccagctgctgagaaaa

SEQ ID NO: 5001 - DNA, 413 bp, Glycine max
  unsure at all n locations
  Clone ID: LIB3073-005-Q1-K1-G8
gaaaaccacaagtaaaagaaagaagctttcttgagttgagttaacagcatggagagggaggaagatgttaaggttggagcacagaaattctcagagaggcaagcattggggacaggagctcagggtgacaaggactacaaggaggcaccaccagcacccttgtttgagccaggggagttaaagtcatggtctttttacagagctgggattgcagagtttgtggccacattcttgttcctctacatcactgtcttgactgtcatgggtgtcaacagggcacccaacaagtgctcctctgttggcattcaaggaattgcatgggctttcggtggcatgatctttgccctcgtctactgcactgcttgaatatcangtgggcacataaattcggcagtgacgttcggttggttctg

SEQ ID NO: 5002 - DNA, 394 bp, Glycine max
  Clone ID: LIB3073-005-Q1-K1-G9
gaaggtgcaagagtttgttgtgagctataagctagttgatcgagaggagaatatgaagttgttaggtttctttgatgctgcagtagttttggtagcatggacatgccatggcgcaggctaccaaaggttccctcttcgaatgaaaactggctatggtgagcgttcttcggaggtcaaatgctcatgttttatgcttgctgcggaagtacacaacatccgagcctttaaaaccattactgaagagtgcgttgaaccaacaaaggactacatgaatggctaacaatctagatcatactctaaaacagttgaccaacaagctttcttgtatgctagtgaacgcagaatccatcacaacgacatatttatattcggcatagataacaccgcactctct

SEQ ID NO: 5003 - DNA, 358 bp, Glycine max
  Clone ID: LIB3073-005-Q1-K1-H10
caacataggtcatcgaaaggatctcgaagacccaccaacgcacgaaagccgggatctttcagaaaatggattcctattcgaagggtgcataaccgcatggataagctcacactaacccgtcaatttgggatccaattcggttccttaggaggtatcgggaaggaattttggaatgtaataatatcgattcatacagatacagaagaaagggttctctattgattcaaacgctctacctacgagatagggatagagaaagaggaaaaaaccgaggatttcacatagtacttttggtcgaaaaatcgatctgatttttttcgtacttttcgctcaatgatgaaatgggtcagattctaca

SEQ ID NO: 5004 - DNA, 409 bp, Glycine max
  Clone ID: LIB3073-005-Q1-K1-H12
ggtagccgctgcatctgaacgaaacacagagggagagagagagagagagagtgagagagaagcagttgttcatcacaatgggtaaggttcacggatctctcgcacgtgcggggaaagtgagaggacaaactcccaaagtggcgaagcaagacaagaagaagaagccacgcggacgtgctcacaagagaatgcaatacaaccgccgattcgtcaccgccgtggtgggattcggaaagaagcgtggaccaaactcgtcggagaagtgagggaggcgtttggaagatgatggtttttcttagtttgcgaaatgtatcacctctttttatttgattgatgaactcaaactttgatagttctgattaagcttcaatgaaggagttttttgctagttaatatcaaaccacatttt

SEQ ID NO: 5005 - DNA, 292 bp, Glycine max
  Clone ID: LIB3073-005-Q1-K1-H2
gatctggcagcagaagaacaagtagttgagaactaagaaggagaagcaaatggcttcctcaatgatctcttccccagctgttaccactgtcaaccgtgccggtgccggcatggttgctccattcactggcctcaagtccatggctggcttccccaccaggaagaccaacaatgacattacctccattgctagcaacggtggaagagtgcaatgcatgcaagtgtggccaccagttggcaagaagaagtttgagactctttcctacctgccagaccttgatgatgcacaattg

SEQ ID NO: 5006 - DNA, 404 bp, Glycine max
  unsure at all n locations
  Clone ID: LIB3073-005-Q1-K1-H3
gagagttaagttgagaacataccaatctacaataaacgatgattctcattatctccctcattttatctcttctctctttctcccatgcttctgtcctagatttctgtgttgcagattatgcaggtcctattggacctgcacgatattcctgcacgaagccttcaaaggtcacagcagatgattttgcttacagtggccttggcattgctggtaacacctcanacattatcaaagctgcagtgacccctgcatttgatgctcagtttgctggtctcaacggtcttggcatttccgcagcacgtttggacttagcagcangtggagttataccacttcacactcatcctgtagcttcagaattaccttgtcgtaatgaagggagcatnctagctggattcatttct

SEQ ID NO: 5007 - DNA, 378 bp, Glycine max
  Clone ID: LIB3073-005-Q1-K1-H5
gagaagaacaagtagttgagaactaagaaggagaagcaaatggcttcctcaatgatctcttccccagctgttaccactgtcaaccgtgccggtgccggcatggttgctccattcactggcctcaagtccatggctggcttccccaccaggaagaccaacaatgacattacctccattgctagcaacggtggaagagtgcaatgcatgcaggtgtggccaccagttggcaagaagaagtttgagactctttcctacctgccagaccttgatgatgcacaattggcaaaggaagtagaataccttcttaggaagggatggattccttgcttggaattcgagttggagcacggtttcgtgtaccgtgagcacaacaggtca

SEQ ID NO: 5008 - DNA, 380 bp, Glycine max
  Clone ID: LIB3073-005-Q1-K1-H6
gatctggcagcagaagaacaagtagttgagaactaagaaggagaagcaaatggcttcctcaatgatctcttccccagctgttaccactgtcaaccgtgccggtgccggcatggttgctccattcactggcctcaagtccatggctggcttccccaccagaaagaccaacaatgacattacctccattgctagcaacggtgaaagagtgcaatgcatgcaggtgtggccaccagttggcaagaagaagtttgagactctttcctacctgccagaccttgatgatgcacaattggcaaaggaagtagaataccttcttaggaagggatggattccttgcttggaattcgagttggagcacggtttcgtgtaccgtgagcaca

SEQ ID NO: 5009 - DNA, 272 bp, Glycine max
  Clone ID: LIB3073-005-Q1-K1-H7
gaagcctccatttataaaacatcgtgtgcgcactctctcttctcctaggtttcactcccatcaacagcagcgatggtgcagaggctcacttatcgcaagcgccatagctatgctaccaaatccaaccagcaccgggttgttaagacccctggtgggaagttggtgtaccagaccactaagaagagagcaagtggacctaagtgccctgtcactggcaagaggatccaagggattccacacttaagacctgctgaatacaagaggtctagatt

SEQ ID NO: 5010 - DNA, 352 bp, Glycine max
  Clone ID: LIB3073-005-Q1-K1-H8
gagaccacaattttttttgcaactacattatagcaattcacacaacacaacacagattaatggggaggttgtttgtggtgaatctggaagggaagatctatagctgcaaacactgccatacccatcttgcgctttacgatgacatctactccaggacattccattgcagacatgggaaagcttatctcttcaataaggttgtgaatgtttctattggcgaaatggaggacagaccgatgatgactgggttacataccgtggctgacattttctgtgtgggttgtggatcaatcgtgggttggaaatatgagactgcctatgaaaaaaaccagaagtacaaggaaagaaaatc

SEQ ID NO: 5011 - DNA, 326 bp, Glycine max
  Clone ID: LIB3073-005-Q1-K1-H9
taatgagaggaagaagacggatcatggccatgggcatggccatgacagctacagcagtctccacagcgattaaactgctgcatgagctacttatctaggaggactatggcaccatcgtagccagggctgtgcactagttcctctctgtctaactatatatttagctccctatctatgctagtactttatccctagctggggaactacttatgaaggataaaaacaacagtgagaacatgtgcgtatatctggttgctaactttacggctattactatgaggtttgggtcagttgaaaccgcgatgatcgcggtatggctgcatgca

SEQ ID NO: 5012 - DNA, 402 bp, Glycine max
  unsure at all n locations
  Clone ID: LIB3073-006-Q1-K1-A1
ggaaaaagaaanaaaaagattctganagaaatataanctaatattctgttagaataatcaataaagaatattcaaattcaaataacattttagatagaaaaaagacttaaaaaggaggatttgaaatgcgagatctaaaaacatgtctttccgtggcaccagtagtaagtactctatggttcggggctttggcgggtctcttgatagagatcaatcgtttttttccagatgcattgatattccctttgtttcattctagttattgacacggaaaggggtgaagaagattatagatccaattaagtattaaatatatgtaattaatatgtaattaatctcctcttctttatttcgtcttttatttcttcttttttttacaattggaatagaataagttagcat

SEQ ID NO: 5013 - DNA, 335 bp, Glycine max
  Clone ID: LIB3073-006-Q1-K1-A10
gctaccacaccgcacttcaccggcggtcgtttcttcacactctgccgtgctctttcggcgcaggtcaagagattcgcaatagaaagtgagaaaaaaaatgagtcgaggaagtgcaactgctgcgaagggcaagaagaagggtgcgacattcaccattgactgcgcgaagccggtggaggacaagatcatggacattgcgtctctcgagaagttccttcaagagaggattaaggttggtggcaaggccggtgctctcggcgacttcattaacggtcgtacgtgagaagaccaaaatcattgttacttccgacagcaacttctccaaacggtaccct

SEQ ID NO: 5014 - DNA, 191 bp, Glycine max
  Clone ID: LIB3073-006-Q1-K1-A11
gactgataagatcatgccacctctgtctacacctgtcggaggctctcgacactagagagcgcatatgtcatcgaacgctaacgattctcgttagacctctgcgagaaagaccctacttggcgaacgtacattgctgcgaaggaccttacgatcgagtacgaccggcaccattgactgcatatttgccggtg

SEQ ID NO: 5015 - DNA, 399 bp, Glycine max
  Clone ID: LIB3073-005-Q1-K1-F1
ggctttatgaaacttgaaactagtgaaacagagaggtgaaggaaaaaaaaaaaaatcaaaagtggataatggcttcgttatcgctttgcatagccatgacagcacccactccctcagcttctctcattctcactgccccaaaaccatcttcgctctctttgaaccttacccgcacttgctccaccgctcgctctccgcttctccattgctccttcctctcttctccttcccttctctctcccccttcctccatttcaggcttgtcacttggattggatttgacatctaattttgggaccagaagaggaaaaggttctggccttgttgtgagggcaggcaaggctgctctttgcctgactaagagaagcagatcaagaaaatcattggcacgcactcatg

SEQ ID NO: 5016 - DNA, 398 bp, Glycine max
  Clone ID: LIB3073-005-Q1-K1-F10
ttttggcacaagtgagtttgttgatcgagataactagaaacagtgtgatgaaaatgaaggtccttgttttcttcgttgctacaattttggtagcacggcaatgccatgcgtacgatatgttccctcttcgaatgaacactggctatggtgcccgtactccggaggtgaaatgcgcaagttggaggcttgctgtggaagcacacaacatctttggctttgagaccattcctgaagagtgcgttgaagcaacaaaggaatacatccatggcgaacaatatagatcagactccaaaacagttaaccaacaagcttacttttatgccagagacctcgaagtccatcccaaggacacatttgtgttcagtatagatggcaccgtactctctaatattccatac

SEQ ID NO: 5017 - DNA, 400 bp, Glycine max
  Clone ID: LIB3073-005-Q1-K1-F12
ggttctagtgtgtgattgtttgttgttgtaactcgttcttcttcttttgttgttctgtgtttgtgtttgttttttctctcacctgaaaatgtcttgctgcggtggtaactgtggttgcggaagctcctgcaagtgcggcaacggctgcggaggctgcaagatgtacccagacttgagctacactgagtcaaccaccaccgagaccttggtcatgggagtggcacctgttaaggctcaatttgagggtgctgaaatgggtgtgcccgctgagaacgatggctgcaaatgtggaccaaactgctcctgcaacccctgcacttgcaagtgaggtgttgggagagcaagcttcaagcagagatagcccttaattaggaataatgataaactattaatgtgtagc

SEQ ID NO: 5018 - DNA, 102 bp, Glycine max
  Clone ID: LIB3073-005-Q1-K1-F2
cgggattgtgattcatttgcacatctgcaaagtgttgctggtccgggaagaatacgcattgctacggctacacctagccgattgcaatgtcctgcaacaagg

SEQ ID NO: 5019 - DNA, 186 bp, Glycine max
  Clone ID: LIB3073-005-Q1-K1-F4
aaggctttccacagattctgtgaacgcacgttactgctccttatttctccacatgctaggtttcacaacaaattttgagtataggtcgttttcctacactaatgcaactctgatcttgttcatagcatgatatagtttatagttcttcacacaataacttttattggtcaatacaaataccatgct

SEQ ID NO: 5020 - DNA, 269 bp, Glycine max
  Clone ID: LIB3073-005-Q1-K1-F6
gaaggtgcaggagttggtggtaagctttaagggagttaatcgtaaggggattttgaagtggttggtttccttggtggctgcagtagttttggaagcatggccatgccatggcccaggttaccaaaggttccttctccgaatgaaacctgcttatggtgagcgttcttcggaggtaaaatgcgcaagtttaaggctggctgtggaagcacacaacatccgagcttttaaaaccatccctgaagagtgcgttgacccaacaggggtctact

SEQ ID NO: 5021 - DNA, 308 bp, Glycine max
  Clone ID: LIB3073-005-Q1-K1-F7
gagatcccgtcgtcgcaggcgcagagtagaggagcacagaagagggaaaacggcaccgccgccgtagaagaaaacaaccatggtgcacgtctccttttacaggaactatgggaagacattcaagaagccgcgtcgtccgtacgagaaggagcgtctcgacgcggagttgaagctggttggtgagtacgggcttcggtgcaagagagagctgtggagggtgcagtacgcgctcagtcgtatccgcaacaacgcgcggaaccttctcaccctcgacgagaagaactcgcgctggatctttgagggagagg

SEQ ID NO: 5022 - DNA, 209 bp, Glycine max
  Clone ID: LIB3073-005-Q1-K1-F8
gtccattccattccatcacggctctgtgcaacacagcttctatttcaccttccccagaaaatacccttggctttttccctcaccagcattgttcctttgctgttattctagcttcattaatcacacactcacacgcgtagcgccaggtggagtaaaatacactagccaaacggccatgctttagagctcaagaaccttcccagcaaccg

SEQ ID NO: 5023 - DNA, 392 bp, Glycine max
  Clone ID: LIB3073-005-Q1-K1-F9
gaaggaaggaaggaaggaaggaagagtgagcgtgaaagatgccttcggcgaggctttcagggtcaccaaggctcgacgttgctattgacatgggcaatccatttctcaatctcactgttgatggtttccttaagatcggagctgtcgcagccacgcgatcagctgctgaagatacttatcatattatccgaaacgggaatatctcaagtcatgatttcgagaaaacgttgaagaagatgtgtaaagaaggtgtatattggggaactttagctggtgtttatcttggaatggaatatggggtagagaggatccgtggcaccagagattggaagaatgccatgattgggggtgcagtaactgcgactctgttatctgttgccaccaccaacaac

SEQ ID NO: 5024 - DNA, 206 bp, Glycine max
  Clone ID: LIB3073-005-Q1-K1-G1
cagcctatccaacggatcaaagatgtcatcaagatgatcaacatcatcggagcaccaggtctactctaaccattaatgttactcaaatgggtgtatgcacgatacacaacaacccttgtacctgcgatcataactcctggggattctgctgggatgtatggtacaatgactatcatggcacccttttcaaggctgattaccctcct

SEQ ID NO: 5025 - DNA, 407 bp, Glycine max
  Clone ID: LIB3073-005-Q1-K1-G10
gaaggtgcaagagtttgttgtgagctataagctagtttatcgtgaggagaatatgaagttgtttgttttctttgttgctgcagtagttttggtagcatggccatgccatggcgcaggctaccaaaggttccctctccgaatgaaaactggctatggtgagcgttcttcggaggtaaaatgcgcaagttttaggcttgctgtggaagcacacaacatccgagcctttaaaaccattcctgaagagtgcgttgaaccaacaaaggactacattaatggcgaacaatttagatcagactctaaaacagttaaccaacaagctttcttttatgctagtgaacgcgaagtccatcacaacgacatatttatattcggcatagataacaccgtactctctaatatcccatact

SEQ ID NO: 5026 - DNA, 404 bp, Glycine max
  Clone ID: LIB3073-005-Q1-K1-G11
gaaattgaaggagaacttattggataaagaaaatgagttgcagtgtatgtttcaagaaaatgatgaactccgaattagggaagctgaatctatcaagaaggtggaggagttatctaagttgctggaagaagctacaaccagaaaccactacactgaggaaaatggggatcttactgacagtgagaaggactatgatttgcttcctaaagtagttgaattttctgaagaaaatggacatgtaagagaagacatttcaaaggtagagctttcagtgaatcaggaggaactcaagcaaaacagcatacaggaagatagcattctatccaacgacaaggctgaaaaaattgaatctcccaaatatgaggaagtgagtgaaaaactggaggaaaatgagagcaaagaaa

SEQ ID NO: 5027 - DNA, 314 bp, Glycine max
  Clone ID: LIB3073-005-Q1-K1-G2
gttgttagggcaaaaactttctatgctgggaaagccaatgttccagttgctggtgttaatgtacctgttgtgggtggccatgcaggcattactattctgccattattttctcaagccacaccaaaagccaatcttgatgatgatgtcattaaggctcttacaaagaggacacaagatggaggaacagaagttgtagaagctaaggctggaaagggttctgcaactttgtcaatggcctatgctggtgccctatttgctgatgcttgccttaaaggcctcaatggagtcccagatgttgtggagtgctcattcgt

SEQ ID NO: 5028 - DNA, 392 bp, Glycine max
  Clone ID: LIB3073-005-Q1-K1-G3
gaatagaaatagaactgtcttttcatatagatatcccttcaacacaacataggtcatcgaaaggatctcgaagacccaccaacgcacgaaagccgggatctttcagaaaatggattcctattcgaagggtgcataaccgcatggataagctcacactaacccgtcaatttgggatccaattcggttccttaggaggtatcgggaaggaattttggaatgtaataatatcgattcatacagatacagaagaaagggttctctattgattcaaacgctccacctacgagatagggatagagaaagaggaaaaaaccgaggatttcacatagtacttttggtcgaaaaatcgatctgatttttttcgtacttttcgctcaatgatgaaatgggtc

SEQ ID NO: 5029 - DNA, 324 bp, Glycine max
  Clone ID: LIB3073-005-Q1-K1-G4
gacacaactgaacaagataagctatccatagcagccaaagaaatgaagagtaccttgttcgccctctttctactttgtgccctcacctcttacctaccttcagccaccgctggtgatgtggtcgacactgatggtaatcctgttgaaaatggaggcacatactttgtgttgccaactataatattaaacggcggtggaatagaatatgccacatttggaaatgaaacttgccctgtcacttgtgcgcaatctcgcgatcagttctgcaagggctttccgatagccatttcatccccagcccgaatccgtcacatcagcgaaggc

SEQ ID NO: 5030 - DNA, 405 bp, Glycine max
  Clone ID: LIB3073-005-Q1-K1-E9
ggcacttagccagttcggtccctcacttaagccactgtgtggaactaacaacaacacaaggccatcatcatggcagctgcttctcctatggcaagccaactcaagtccaccttcactaaaactcttgtagctcccaagggcctctctgcctcttcaccactccacctcctgccttctaagaggcaatttagcttcactgttagggccatccaatcagaaaagccaacctatcaagtgattcaaccaatcaacggtgatcccttcattggaagccttgaaaccccagttacatccagccccttgattgcatggtacttatcgaacctccccgcatacaggaccgcagtgagcccactactaagagggatcgaggtgggcctggcccatggctaccttctggtgggc

SEQ ID NO: 5031 - DNA, 403 bp, Glycine max
  Clone ID: LIB3073-005-Q1-K1-D11
gaaggtgcaagagtttgttgtgagctataagctagtttatcgtgaggagaatatgaagttgtttgttttctttgttgctgcagtagttttggtagcatggccatgccatggcgcaggctaccaaaggttccctctccgaatgaaaactggctatggtgagcgttcctcggaggtaaaatgcgcaagttttaggcttgctgtggaagcacacaacatccgagcctttaaaaccattcctgaagagtgcgttgaaccaacaaaggactacattaatggcgaacaatttagatcagactctaaaacagttaaccaacaagctttcttttatgctagtgaacgcgaagtccatcacaacgacatatttatattcggcatagataacaccgtactctctaatatccca

SEQ ID NO: 5032 - DNA, 393 bp, Glycine max
  Clone ID: LIB3073-005-Q1-K1-D12
gacatcaaggtttgtgaagcatctaagtgagatacatagtagttaggtagcaagcataagtgtctaaccttagaaacatatctgctacatatcgtgtgcattttggaattgtgccactaaaattctattcatctatggctgcctcatcttatgctatgcaatcaatccttgcaaaccctatgatccgcatttccagcgggtctagggagaaccattttggtgttcctgcttatcacatgagaaggaatgttggcctgagagttaggtccatggctgaggaagagcaaccaagtcagcctgcgacctcagttacaccaccaccagcagaacccaaaccacagccagtctctactccttgaccaaaggtgagcaccaagtttctgatgtgttggc

SEQ ID NO: 5033 - DNA, 378 bp, Glycine max
  Clone ID: LIB3073-005-Q1-K1-D3
aagaaggaagctgaagtcatagaagagaagagggaagtggaagtgacggaagagaagaaggaaattgaagtaacagaagagaagaaggaagctgaagtcatagaagagaagaaggaagtggaagtgacggaagagaagaaggaaattgaagtaacagaagagaagaaggaagcagaagtgaaagaagagaagaaggaaggggaagtgacggaagagaagaaggaagttgaagtgacggaagagaagaaggaagcggaagtgatagtagaagagaagaaggaagttgaagtgacggaagagaagaaggaagtggaagtgaccgaaggaaagaaagaagtggaagtgatcgaagagaagaaggaaacagaagtgacagaa

SEQ ID NO: 5034 - DNA, 208 bp, Glycine max
  Clone ID: LIB3073-005-Q1-K1-D4
ggtgttgaatttaatttgagaaaatatatctgtgacaagttgtatcaaggagaagcatagacatgaagaagcgaggatcaagcaagcgtttcctgatgtgggttatggtgatttggctccacgcacatctcagcattgcagctgaactgtccaagtccaatgacacggacactgcttctgagagttctgtgtgcgatggctccgtaga

SEQ ID NO: 5035 - DNA, 250 bp, Glycine max
  Clone ID: LIB3073-005-Q1-K1-D5
cactctaactggtgtggggttttttaaccccgcggctagggaaaacagcgtgaaaaagttgcagcaagagataaaacttgaataagttcatatatttgaagtccgatcaagcatcaattctcatattgctgtttgtgatcttttttcattttcattttttccaccttttcttctttttattacagtttatgctgtatttgtacccctatcaaggcacatgtatcttaattatgctgtttgttatcctgac

SEQ ID NO: 5036 - DNA, 400 bp, Glycine max
  Clone ID: LIB3073-005-Q1-K1-D7
caacataggtcatcgaaaggatctcgaagacccaccaacgcacgaaagccgggatctttcagaaaatggattcctattcgaagggtgcataaccgcatggataagctcacactaacccgtcaatttgggatccaattcggttccttaggaggtatcgggaaggaattttggaatgtaataatatcgattcatacagatacagaagaaagggttctctattgattcaaacgctctacctacgagatagggatagagaaagaggaaaaaaccgaggatttcacatagtacttttggtcgaaaaatcgatctgatttttttcgtacttttcgctcaatgatgaaatgggtcagattctacaggaccaaaccttgtgggagttaaggaatgatggaagaaaaga

SEQ ID NO: 5037 - DNA, 362 bp, Glycine max
  Clone ID: LIB3073-005-Q1-K1-E1
gacaccaacaccaaaacaaacccactaagatggcttcctttatatccttcctagtgctgcttcttgcagcccttatcctcatgcctcaagggcttgccacttactacaaaccaattaagaagccaccagtgtacaagcctccagtgtacaagccaccagtgtacaaaccaccggtttataagccaaaaccaccggtttacaagccgaaaccaccggtttacaagccaccatataagaagccaccatacaagaaaccaccttatggaaagtaccctccagtagaggacaacacccatgcctaaagcaagcaatgaggtctattatctacttaataaataagaggaactgctttgtgttttcta

SEQ ID NO: 5038 - DNA, 383 bp, Glycine max
  Clone ID: LIB3073-005-Q1-K1-E10
gacaacacagcacacagagagagtttgaggaagaaatcatcatggcttcagcagcatctgggtttgtgctgtctcttaatgttgcagcttccaccacaaactcaagggtggtcttgttcaacacaaagaaccacgcttctaggcttcttgtgagggcttcagacgagcctgcagcggcggcacccgcaaccaccacccctccagctgaagctgaagcaaagccaaaaccaccacctattggccccaagagaggtgctaaggtgaagattcttaggaaggaatcctactggtacaaaggcactggtgcagtggttgctgttgatcaggaccccaacactcgctaccctgttgtggttcgattcaacaaagtcaactatgccaat

SEQ ID NO: 5039 - DNA, 403 bp, Glycine max
  Clone ID: LIB3073-005-Q1-K1-E11
ggaaggggaaaaaaaaaagagtagagtggataatggcttcgttatcgctttgcatagccatgagagcacccactccctcagcttctctcattctcactaccccaaaaccatcttcactctctttgaaccttacccgcacttgctccagcgctcgctctccgctcctccattgctccttcctctcttctccttcccatctctcttccccttcctccgtttcaggcttgtcacttggattggatttgacatctaatgttgggaccagaagaggaaaaggttctggcctagttgtgagggcaagcaaggctgctctttgtctgactaagagaagcagatcaagaaaatcattggcacgcactcatggtttccgcaaaagaatgagcacaccaggtggaagagctgt

SEQ ID NO: 5040 - DNA, 391 bp, Glycine max
  Clone ID: LIB3073-005-Q1-K1-E12
gaggtttttagggtttacactgaggaggcacaccttcaggagcagtcatggttctcaaaaccgagctgtgccgattcagcggtgccaagatctacccagggaaaggcatcagatttgttcgtggtgattctcaggttttcctgtttgctaactcaaaatgtaagaggtatttccacaacaggttgaagccgtcaaagctcacgtggactgcaatgtaccgaaagcagcataagaaggatattgctcaagaagctgtgaagaagagaagacgtgctaccaaaaaaccttactctaggtctattgttggtgctactttagaagttatccagaaaaagagaaccgagaagccagaagttcgagatgcagctagggaagcacagcttcgtgaaat

SEQ ID NO: 5041 - DNA, 62 bp, Glycine max
  Clone ID: LIB3073-005-Q1-K1-E2
tgtaaaagacaaccgaaggggaaggtgcaagagtttgttgtgagctataagcgtatttatcg

SEQ ID NO: 5042 - DNA, 418 bp, Glycine max
  Clone ID: LIB3073-005-Q1-K1-E3
gaaggtgcaagagtttgttgtgagctataagctagtttatcgtgaggagaatatgaagttgtttgttttctttgttgctgcagtagttttggtagcatggccatgccatggcgcaggctaccaaaggttccctctccgaatgaaaactggctatggtgagcgttcttcggaggtaaaatgcgcaagttttaggcttgctgtggaagcacacaacatccgagcctttaaaaccattcctgaagagtgcgttgaaccaacaaaggactacattaatggcgaacaatttagatcagactctaaaacagttaaccaacaagctttcttttatgctagtgaacgcgaagtccatcacaacgacatatttatattcggcatagataacaccgtactctcttatatcccatactttgaaaacatg

SEQ ID NO: 5043 - DNA, 180 bp, Glycine max
  Clone ID: LIB3073-005-Q1-K1-E4
tggggctgaaggactgtgacctagttcgagaggcatcatggcgacactggattccgacgtgaccgtgttttcagccggagaagcctctaacaacgccggttcttctttgaccaccaagaaactctaaacgtttcgagatcaagaattggaatgcgggttccctctgggcttgggatattg

SEQ ID NO: 5044 - DNA, 426 bp, Glycine max
  unsure at all n locations
  Clone ID: LIB3073-005-Q1-K1-E5
aggaacgccgtcgtcgggatgctgcaacggagtgaagagcctcaatgccgccgccaagaccaccgccgaccgccagacggcgtgcaactgcctcaagtcggccgccagccaaatctccggcttcaacgccaacaacgccgcctcgctccctggcaaatgcggagtctccatcccctacaagatcagcacctgcaccaactgcgctaccatcaaggtttgaagagaaagtcatggacgcaggaaaccggaaactactcactagtatatgagtagcattattaatattaagaataagatcgagggtgatgagggctccacttatatgcccctctcctcttgtatgagagatttgcatcggatagctntaagttgtgttgccgttgtatttctctgtatgacgtacacataggtatatctactttaata

SEQ ID NO: 5045 - DNA, 310 bp, Glycine max
  Clone ID: LIB3073-005-Q1-K1-E7
acgacggtaaaaaatactgatgaggttgagatcgctatgaaaggtaatggcaagaaattggattgaggccattggagattttaatttattcattttattaagtttgattctacataaaaaaaaaaaaactataaaaatgaaaactaaaaatagaaaaaaaaaattcaaaagaaaaattcacaaaataatagtatagttattgaaacacacataaatgttagcctctaaagacatttcgcaaaaaacaaaaaaaccggcccttttaaaaagaaccgggttatcaatcccgattatgcacctcaaaagtttt

SEQ ID NO: 5046 - DNA, 350 bp, Glycine max
  Clone ID: LIB3073-005-Q1-K1-E8
ggtatgtgattgttgtgactcgttcttcttcgtcgttatcttcttcttttgttgtttgtgtgtttgttttttctctcacctgaaaatgtcttgctgcggtggtaactgtggttgcggaagcgcctgcaagtgcggcaacggctgcggaggctgcaagatgtacccagacttgagctacaccgagtcaaccaccaccgagaccttggtcatgggagtggcaccagttaaggctcaattcgagagtgctgaaatgggtgttcccgctgagaacgatggctgcaaatgtggagctaactgcacctgcaacccctgcacttgcaagtgaggtgttggagagctaaagcttcaag

SEQ ID NO: 5047 - DNA, 300 bp, Glycine max
  unsure at all n locations
  Clone ID: LIB3073-005-Q1-K1-D10
gagctttggaggttctgggctcaagaaaagtggaaagaaataagggctctttatcatgattgtatacatccaatattgagccctgtagtttattaccatgataacttctgtcttattgtggccttctttattgctctaatgttagtactgaactgaggtatttcgtgatgtaagctgcaacaagttacttgtttgtagctttattgtgtggcccttcatggggttctgataattacatnctattagtagtgctgtggatttggcatagacttgttcaagtaataatgacttgggcttgac

SEQ ID NO: 5048 - DNA, 360 bp, Glycine max
  Clone ID: LIB3073-005-Q1-K1-B5
taatttgggaattattgctcccatcgccattggtttcattgtcggcgctaacattttgttgggtggggccttctctggagcggccatgaaccccgctgtgacatttgggcctgctgtcgtgagctggacctggaccaaccactggatctactgggccgggcctctcatcggtggtggaatcgctggccttgtttacgaggttgtctttatcagccacacccacgagcagcttcccaccactgactactagagggggggaaatgaaaataaaaaaaaaaaaaattgtgtattattgaatttctctggaatcttcttctgtgtatggttttccttccttgtgttttcttcctaattcacttt

SEQ ID NO: 5049 - DNA, 377 bp, Glycine max
  Clone ID: LIB3073-005-Q1-K1-B6
gagggaaaataaatatctgaacaacataatctatattctttccctgggggcctcagaatccttaacagaacaagttgcagggatggcctccactctctctatatcctcttcatccacccttgttgatgccaagcctccaactccaagacaatgcgtcacccttcccactcttccccctccaccttttcactctcagactcgtccttggaagaccactgctttctgtcgtaagcttgctcgcaattttatggcaatggccaccacaagagaggcagccgcagcagaagttgccgccacaactgacctctctattgccgagacgccagagattgtgaagactattcaagaagcttgggacaaagttgaaagataatatg

SEQ ID NO: 5050 - DNA, 398 bp, Glycine max
  unsure at all n locations
  Clone ID: LIB3073-005-Q1-K1-B7
gaactgctcggtttttatcagaagcttgtgatttagtttttgatgcagcaagtgagggaaaacaattcttaattgttggtacaaaaaaaaagcagcggatttagtagcacgggctgcaataagagctcggtgtcattatgttaataaaaagtggctcggcggtatgttaacgaattggtatactacagaaacacgacttcaaaagttcagggacttgagaatgcaacaaaagacggggagactcaatagttttccaaaaagagatgccgctatattgaagagacatttagttcatttggaaacatatcttggcggcattaaatatatgacggngttacctgatattgtaataatcgtcgatcaacaagaagaatatacggctcttcgagaatgtataa

SEQ ID NO: 5051 - DNA, 405 bp, Glycine max
  Clone ID: LIB3073-005-Q1-K1-B9
agagtgagagagagagaaggcaagatgtcgaagagaggacgcggtggttcggcggggaacaagttccggatgtcgctgggtctgccggtggcggcgacggtgaactgcgccgacaatacgggggcgaagaacctctacatcatatcggtgaaagggatcaaagggcgtttgaaccgtctcccctcggcttgcgttggcgacatggtgatggccaccgtgaagaaggggaaacccgatctgaggaagaaggttttgccagctgtcattgttcgccagcgcaagccatggcgccgaaaggacggcgtctacatgtatttcgaagataatgctggtgttattgtcaatcccaaaggagaaatgaaaggttctgctatcactggtcccattggaaaagagtgtgctgat

SEQ ID NO: 5052 - DNA, 226 bp, Glycine max
  Clone ID: LIB3073-005-Q1-K1-C1
taatttgggaattattgctcccatcgccattggtttcattgtcggcgctaacattttgttgggtggggccttctctggagcggccatgaaccccgctgcgacatttgggcctgctgtcgtgagctggacctggaccaaccactggatctactgggccgggcctctcatcggtggtggaatcgcttgccttggttacgaaggttgctttatcagccacacccacgag

SEQ ID NO: 5053 - DNA, 396 bp, Glycine max
  Clone ID: LIB3073-005-Q1-K1-C10
gatagcaagtagcaaggagactagttctgtattcagattacattgcaaaaatggcatcattcaccatgacagcttctatctttggctgcccagctgtcaccaaacggtcggcagtggctgcgcagaggagattactcgtagtgagtgctgccaaagctgaaggggaaaaggtcagttatgacaacaatgatagcaatggaaggaggaacttgatgttcgctgtggctgctgctgctgttttctctgttgctgggatggcagtggcagatgagcctaaaccaggaacctcagaagccaagaaaaagtatgccccggtttgtgtcaccaatcctacagctagcatttgtcgcaattgaggatctcctgtttcattttacctctgatgatcggaaatgt

SEQ ID NO: 5054 - DNA, 402 bp, Glycine max
  Clone ID: LIB3073-005-Q1-K1-C11
ggcacaagtgagtttgttgatcgagataactagaaacagtgtgatgaaaatgaaggtccttgttttcttcgttgctacaattttggtagcatggcaatgccatgcgtacgatatgttccctctccgaatgaacactggctatggtgcccgtactccggaggtgaaatgcgcaagttggaggcttgctgtggaagcacacaacatctttggctttgagaccattcctgaagagtgcgttgaagcaacaaaggaatacatccatggcgaacaatatagatcagactccaaaacagttaaccaacaagcttacttttatgccagagacctcgaagtccatcccaaggacacatttgtgttcagtatagatggcaccgtactctctaatattccatactacaaaaa

SEQ ID NO: 5055 - DNA, 394 bp, Glycine max
  Clone ID: LIB3073-005-Q1-K1-C12
gccttcccaaaaccaaaccacaggccaggtgaaggtgaaaaaaattaaaattcaaagaccttaatgtcagggatcattcacaggaattggggagacccttcatgtgggagggcacaagaaggaggaggagcataagggtgagcaccatgctggagaatacaaaggggagcaccatggtgaacacagtagtgagtacaaaggagagcatcatggtgaacacagagctggagagtaccatggtgagcacaagccagagcacaaagaggggttcctagacaaagtcaaggacaagatccatggtgagggcggcgccgccgagggcgagaagaagaagaaggagaagaagaagaaggagcatggccatgagcatggccatgacagcagcagcagcagt

SEQ ID NO: 5056 - DNA, 263 bp, Glycine max
  Clone ID: LIB3073-005-Q1-K1-C2
acgtgccgcagcgtgagatagtgggatcgaccattctagcattgatgagcgccgtataggaatggcgtgcgaatattaccatcagtaggatgtgactgagctaactagagatgaccgtagaaaagaggactctaagaatgatttgctatacccatatggtcatgaggaacttgctgtctgctaagacgttgatcaagatcgagctgttattgataagtattcctattatcactctatatatgctaagctatcatatggataga

SEQ ID NO: 5057 - DNA, 300 bp, Glycine max
  Clone ID: LIB3073-005-Q1-K1-C3
gaatgatgcatgctaccatcaaatcattagccattggctaagcactcatgcaattgttgagccatttgtcatagcaacaaacaggcaactgagtgtggttcaccctatttacaaacttctgtttcctcactaccgtgacaccatgaatattaattcacttgcccggaaagccctggtcaatgcagatggtattatagagaaaacattcttgtggggtaggtactctatggaaatgtccgctgtcatttacaaagactgggttttcactgatcaagcattacctaatgatcttgtaaagag

SEQ ID NO: 5058 - DNA, 326 bp, Glycine max
  Clone ID: LIB3073-005-Q1-K1-C4
gcactacctcaagcataacttgcatagactattgattaagaaagctattgtcattgatttgctagctccaacaatgggttctagcagattatcattcattttagtacttgtgcttgtaaccttttcatccatgatcattgactcaagggttgcagaggcacgtaccctgccaaaatcagccttattgccttccaaagttgatatacctactgttgttcctcttccactggtggcaccactgccaaatttgcctgttactctccctccagtgcctgaactacctgcagtacctaaagtaccaattcctgaagtaatagttaataacg

SEQ ID NO: 5059 - DNA, 406 bp, Glycine max
  Clone ID: LIB3073-005-Q1-K1-C5
gatccctgcgtgtcttagtcttaattaagactctcacccttcttagtctctctttgaaaatgaagacctcatatgcaacattgtgcatcatgcttactttgcttcttctaggtcagagtgagttgttgtgtatggcagcagtgacgtgtaacgcgttgcagctgagtgcatgtgccagcgccatcacgtcctcaactcctccttcagctctttgctgtagcaaactgaaggaacaaaggccttgcctttgccagtatttgaaagaccccaacctcaagaagcttgttaactctcctaatgctaggatggtagctaatgcatgtggttccccattccccacctgctagaaagaattcagtatttcactagtctctctcaatccaaccactatataggagcatcttat

SEQ ID NO: 5060 - DNA, 295 bp, Glycine max
  Clone ID: LIB3073-005-Q1-K1-C6
gatatctggcagcagaagaacaagtagttgagaactaagaaggagaagcaaatggcttcctcaatgatctcttccccagctgttaccactgtcaaccgtgccggtgccggcatggttgctccattcactggcctcaagtccatggctggcttccccaccaggaagaccaacaatgacattacctccattgctagcaacggtggaagagtgcaatgcatgcaggtgtggccaccagttggcaagaagaagtttgagactctttcctacctgccagaccctgatgatgcacaaattg

SEQ ID NO: 5061 - DNA, 269 bp, Glycine max
  Clone ID: LIB3073-005-Q1-K1-C7
agaaggggactcacaaggcaatcaatcaatcttctgagagtgtttggttgaaagtagcaaagatgtttcctttcgggcaaaagggtcaaaagataaaggggactatggtggttatgcagaagaatgtgttggatatcaacagcatcaccagtgttggagggatcgttgaccaaggcttaggcttcataggcagtgcagtcgatgcacttacttttgcagccaccaaaatctccatccagttgattagtgctaccaaagctgatggtggg

SEQ ID NO: 5062 - DNA, 368 bp, Glycine max
  Clone ID: LIB3073-005-Q1-K1-C8
gaaagtgcacaagtgagtttgttgatcgagataactagaaacagtgtgatgaaaatgaaggtccttgttttcttcgttgctacaattttggtagcatggcaatgccatgcgtacgatatgttccctctccgaatgaacactggctatggtgcccgtactccggaggtgaaatgcgcaagttggaggcttgctgtggaagcacacaacatctttggctttgagaccattcctgaagagtgcgttgaagcaacaaaggaatacatccatggcgaacaatatagatcagactccaaaacagttaaccaacaagcttacttttatgccagagacctcgaagtccatcccaaggacacatttgtgttcagtat

SEQ ID NO: 5063 - DNA, 215 bp, Glycine max
  unsure at all n locations
  Clone ID: LIB3073-005-Q1-K1-D1
gatctggcagcagaagaacaagtagttgagaactaagaaggagaagcaaatggcttcctcaatgatcccttccccagctgttaccactgtcaaccgtgccggtgccggcatggttgctccattcactggcctcaagtccatggctggcttccccaccagaaagaccaacaatgacattacctncattgctagcaacggtggaagatgcaatgcat

SEQ ID NO: 5064 - DNA, 363 bp, Glycine max
  Clone ID: LIB3073-005-Q1-K1-B4
actcagcagtagcaaacaaaattcttcgtatttgcttcttgcttttttctttttgaaccacaaaatggccgacgacagcacagctacctgcatcgacatcctccttgccatcatcctccctcctctcggtgtcttcctcaagtatggatgcaaggtagagttctggatctgtttggtgcttactctttttggttacattcctggaattatctatgctgtctatgctatcaccaagtgatcatattcatcacctcttgtagacaatgaataatttgtcaaagtacaacggttatgcatgtttctcaactccagcattgatataatcgtttgatctcagaacaatgtgattcttttttggtttct

SEQ ID NO: 5065 - DNA, 367 bp, Glycine max
  unsure at all n locations
  Clone ID: LIB3073-004-Q1-K1-H7
gaatatttagaaaaaaaatatatatatataaaatcgtggttggggaggttatagtagcaagagccatcggaattttttttttatacattggaagaatccatttttgttattaatagactagtaagaagaaaagaataactgaaaaatcaaatagttattcatcaaagtctcaattattcaatgaccagaattaaacgaggatatatagctcggaaacgaaggacaaaaattcgtttatttacatcaagttttcgaggagctcattcaagacttactcgaacgattactcaacagaaaataaaagctttggtttcggctcatcgggatagagatagcataaaaaaaaagtgnaagaaaaataaaaagc

SEQ ID NO: 5066 - DNA, 335 bp, Glycine max
  Clone ID: LIB3073-004-Q1-K1-H8
gacttgtattgtctcaagcaaccatggcaatggcaacccaagcctctctcttaaccccacccctctccggtctcaaagccagcgaccgcgcctccgtgccatggaagcaaaactccagcctctccttctccagcccgaagcccctcaagttctccagaacaatcagagcagcagccgccgacgagaccacagaggcaccagcaaaagtagaggctgcaccggtcgggttcaccccaccagaacttgacccaaacaccccttccccgatcttcgggggcagcaccggcgggctcctgcgcaaggcacaggtggaggagttttatgtcattacgtgg

SEQ ID NO: 5067 - DNA, 407 bp, Glycine max
  Clone ID: LIB3073-005-Q1-K1-A10
gactgtgcaaattgttagggtttgcaacctcagtgtgctctgaagaatctccatctttccatcgacgatgaagaagaacgaggaacgcagcgataatcagagcatgaagaagaaacaaataatgatgaagaagaagaacgtttcgaggttgggcggaagtggcctttcgctcaacgctttcgccaacgcagaattcaagaacaatcactataacccagccatcataaagaagcaaagggagttctataaaaatgctaagaatgtgaataagtttaagaagttggtaaagcagcaaaaccagcagaatgaaccctccttggctcagagacatatagagaatgtaaatgaaactgaagagaacaaggacgatagtgagaggaggaagaggaagaatagtgcccttagtt

SEQ ID NO: 5068 - DNA, 215 bp, Glycine max
  Clone ID: LIB3073-005-Q1-K1-A11
ggagaccacaaacattaagagtaagcgttatgaatcagtccaaagtggagcaattcagcacatagtaatccaacacagaagaggaacacactgttaacaatctcaacagaaattttgtatttggtgacaacttcggcagaagagagatccaactctttctcctccctttcatcgtccgacatggtggcacaactctttagtccttgtgaactctg

SEQ ID NO: 5069 - DNA, 349 bp, Glycine max
  unsure at all n locations
  Clone ID: LIB3073-005-Q1-K1-A3
gaaagctacgcgaaattagggttgatcgaggaagaagaagaagatgtcgtacctgttgcctcacttgcactctgggtgggcggttgatcaagcaatcctggcagaagaggagcgtctggtcgtgatccgtttcgggcacgactgggacgaaacctgcatgcagatggacgaggtgttggcgtcggtggcggagacgataaagaactttgcggtgatatacctggttgacataacggaggtgccggatttcaacaccatgtacgagctctacgacccttccacggtgatgttcttcttcaggaacaagcacatcatgattgatctgggaaccggtnacaacaacaagatc

SEQ ID NO: 5070 - DNA, 385 bp, Glycine max
  unsure at all n locations
  Clone ID: LIB3073-005-Q1-K1-A5
gagactcaacaagcattccactcacacctcatcgtttctctctctagatctctgtttcttctttttctccaaccttcgtttcaccaccacacttacattactttgtcgaaatggctccaccaattgagaccccaaacaaggtttccagctatcaacagtccccaaaccctcgtcttaacgagaggattctttcatccatttccaggagacacgttgctgcacacccgtggcacgatcttgagataggacccgaagctccaaagatcttcaactgtgtggtcgaaataaggaaaggaagcaaggtgaaatatgaacttgtcaaaagaactggacttattatggttgatcgtatactttactcatcangttgttatcctcacaacta

SEQ ID NO: 5071 - DNA, 371 bp, Glycine max
  Clone ID: LIB3073-005-Q1-K1-A7
ggtatctacccacttctcaaccaacaatggcaatggcaacccaagcctctctcttcaccccacccctctccggtctcaaacccagcgaccgagccaccgcgccatggaaacaatcctccaccctctccttctccacctcgaagcccctcaagttctcgcgaacaatcagagcagcagccaccgaccagaccacagaggcaccggttgggttcaccccaccggaactggacccaaacaccccttccccgatcttcggaggcagcaccggcgggctcctgcgcaaggcccaagtggaggagttttatgtcatcacatgggactccccgaaagaacagatctttgaaatgcccactggcggcgctgccatcatg

SEQ ID NO: 5072 - DNA, 402 bp, Glycine max
  Clone ID: LIB3073-005-Q1-K1-A9
ggtgtggactgtgttataatacgagaaaacggataacagcatccgataggtagagaagcaagcaaaccattaaccacaacacatggcgctatgttcctcactctcacttgtctctcccatcaaactcacttccaagtccttcttatctccaacaccagtcagttggcatggcatcttgataaagaataacacctcaacaagattcttgctgaaagctggttttaatgagattgaacctgacctcagtgaagatcctagagaccaatttgccaccaatggcgttgacgctgatgattttgtgtatggaatatatgatgaccaccacacttaccatgaaggagaacagaaaggaacattttggggctcaattaaagaagagatggcagaaacaggaccccccac

SEQ ID NO: 5073 - DNA, 266 bp, Glycine max
  Clone ID: LIB3073-005-Q1-K1-B10
cgaaaacctaatcagaaaaaaaatcgtagttggaggcgccgcactccactccactccaatcaatcagatactagcgatggggaggaagcgaaaggtagcaccgaaatcttctgtatccgccgagcccccgctgaagcaacaccaaccaaaacccgaaaatgccgctcaggaatacgaagaagaggtcgaagaggaagttgaggaagaagaggtagaggaagaggtcgaagaggaagaagaagaagaggaggacgaagaggacgagc

SEQ ID NO: 5074 - DNA, 397 bp, Glycine max
  Clone ID: LIB3073-005-Q1-K1-B11
ggcacaagtgagtttgttgatcgagataactagaaacagtgtgatgaaaatgaaggtccttgttttcttcgttgctacaattttggtagcatggcaatgccatgcgtacgatatgttccctctccgaatgaacactggctatggtgcccgtactccggaggtgaaatgcgcaagttggaggcttgctgtggaagcacacaacatctttggctttgagaccattcctgaagagtgcgttgaagcaacaaaggaatacatccatggcgaacaatatagatcagactccaaaacagttaaccaacaagcttacttttatgccagagacctcgaagtccatcccaaggacacatttgtgttcagtatagatggcaccgtactctctaatattccatactac

SEQ ID NO: 5075 - DNA, 359 bp, Glycine max
  Clone ID: LIB3073-005-Q1-K1-B12
ggtgtccatttcgtgatccactctctgagccccaagctgttgagcagcagaatcttcaggccaagccaggtaagcaagcacaacacaaccccgaaatggcttctgcttctgttcccatggctttctcgctgagctctgttatcaacaacaacaagccttcatccgaagccttcttcaggccactacccctacggcaaccaaagaggaccctcttcaccacaaaagcagtggcaaactccaaggctcaaatcaatgcatccttgaaggagaaagcagttgcaggactcacagcagcttctgtgacagcatctatggtggttccggaggtggctcatgctgctggatatgagttctcccct

SEQ ID NO: 5076 - DNA, 346 bp, Glycine max
  Clone ID: LIB3073-005-Q1-K1-B2
gatagtgtgttaagcctcgccgactcggttgctatcagcgagtgagagtgagtgagtggttctcttgcagcaacaaggtttagtgacaccaaacagactggaaatgggtcgtggggtcagtgctggtggtggacagagttccttggattatctctttggcagtggggtacctgccagcagtgcaaatggtgctcgcactcaaaatgcaagtgctccttcaccaccggttgataagcaaagtccagcaccagcagcagcagcagcacctgcacctgcagcagcagcagcaccagcacctgcaccagcaccagcaccagcaccagctgataagcaaattccagctgga

SEQ ID NO: 5077 - DNA, 338 bp, Glycine max
  unsure at all n locations
  Clone ID: LIB3073-005-Q1-K1-B3
ggacactcgtcgcgatggaacgtgtagctgaatgcgagcgaactctgtacccatacgtgactggatcctctgtagtcgctatcaaatacaaagatgggattctaatggccgctgacatgggaggttcgtatggatctaccctgcggtacaagagtgttgagcgtatcaagcctattggaaagcattctcttcttggtgctagcggngagataagtgactttcaggagattctgcgttaccttgatgagcttatcctatatgacaacatgtgggatgatgggaattctctagggccgaaggaggtgcataattatntaacccgtgtgatgtataataga

SEQ ID NO: 5078 - DNA, 309 bp, Glycine max
  Clone ID: LIB3073-004-Q1-K1-H6
tgggttgagtgtagaacgctgctgccaaaacccttccggaaccctaaggtaagtgagtaatcagtggttgagaatggtggagaaggcgaagggtacaaaggaggaggcggctacccgtgagtacaccattaaccttgacaagcgcctccatggctgcacatttaagaagaaagctcctaaagctatcacggagatgaggaaatttgcccaaaaggccatggggaccaatgatgtcagggtggatgtgaagttgaacaagttcgtctggagccagggaatcaagagtgttccaaggaggattagagtaag

SEQ ID NO: 5079 - DNA, 440 bp, Glycine max
  Clone ID: LIB3073-004-Q1-K1-G10
gatcgggcagcagaagaacaagtagttgagagctaagaaggagaagcaaatggcttcctcaatgatctcttccccagctgttaccactgtcaaccgtgccggtgccggcatggttgctccattcactggcctcaagtccatggctggcttccccaccagaaagaccaacaatgacattacctccattgctagcaacggtggaagagtgcaatgcatgcaggtgtggtcaccagttggcaagaagaagtttgagactctttcctacctgccagaccttgatgatgcacaattggcaaaggaagtagaataccttcttaggaagggatggattccttgtttggaattcgagttggagcacggtttcgtgtaccgtgagcacaacaggtcaccaggatactacgatggacgctactggaccatgtggaagctgcctatgtttg

SEQ ID NO: 5080 - DNA, 435 bp, Glycine max
  unsure at all n locations
  Clone ID: LIB3073-004-Q1-K1-G11
ggtgtggaagtattcgcagaactttgtttccgaagttccattgcctccgcttccacctcgcaaccatgatcatcccggagaagaaccgcaaggagatctgcaaatacctcttccaagagggagtttgcttcgcgaagaaggacttcaatttggccaagcaccctgagatcgacgtgccgaatctgcaggcgattaagctgatgcagagtttcaagtctcgcgagtacgtgagagaaacttttgcttggatgcactattactggttcctcaccaacgatggcatcgagtttctcagaacttaccttaaccttccttccgaaattgtccctgctactttgaagaagcaagccaagccacctggcaggccctttggaggcccatccggtgatcgccctagaggtccaccacgctttgaaggggagcgtanngttggtg

SEQ ID NO: 5081 - DNA, 444 bp, Glycine max
  unsure at all n locations
  Clone ID: LIB3073-004-Q1-K1-G12
gagctcgtagttgtatcacattggtttaggttgaaaccctaaagtttgcccccttacacgttttttgtcttcttttttctcccatctttgtttcgagaagcatttgacgaagagaagagacagtgaatcgcggtttcaattcaacccacttcatctcaggtgtttgaagttgagataaaaatgagcggaacagagaaagcaggatcaggaaccaccaaaacccccgccgatttcctcaaatccattcgtgggaggccggttgtcgtcaagctcaattctggtgttgattacagaggtatacttgcttgtctagatggctatatgaatattgcaatggagcagacagaggagtacgtcaatggacaactgaagaacangtatggtgacgctttcatccgacggaataatgttctatacatcagtgcctcaaagaggactctagca

SEQ ID NO: 5082 - DNA, 284 bp, Glycine max
  Clone ID: LIB3073-004-Q1-K1-G5
gggtcagggttctggtttgtgagcaccagtggtgaccctaatgatatcactagcaagttcaagattgagaggcttgaaggggatcatgcttatgagatctacagcttcaagttctgccccagtgtgcctggtgcgctatgtgctcctgtggggacttttgaagatgctgatggacccaaagcaatgcttgtggggaaggatattgagccttactatgtgaggtttcaaaaagtctccatctttggtcaagacatgaaacaaccttttagcattttgtaggttgg

SEQ ID NO: 5083 - DNA, 340 bp, Glycine max
  Clone ID: LIB3073-004-Q1-K1-G6
tgtgtgtcagggttctggtttgagagcaccaggggggaccctaatgatatcactagcaagttcaagattgagaggcttgaaggggatcatgcttatgagatctacagcttcaagctctgccccagtgtgcctggtgcgctatgtgctcctgtggtgacttttgaagatgcttatggaaccaaagtcaaggctgtagaggatgatattgagccttactatgtgaggtttcaaaaagtctccatctttggtcaagacaagaaacaaccttttagcattttgtaggttggtttgtgcctgtaatacgtagatgcggttcatgactcggaataatgagctacta

SEQ ID NO: 5084 - DNA, 384 bp, Glycine max
  unsure at all n locations
  Clone ID: LIB3073-004-Q1-K1-G8
ggcacattcaacaggtactttctgtctgtgatatcttaggagggagcatggaatagaacagaaaataagtggtggccttctaatggtgcttgttccatagtcaagtgattgaggttgacaaacaccaaattgaaggagaatatgggaaaacctgacaatgatgacactgattgtggaattagaagtagaaagcaatcaggaaataacaacatgaagaaagggttgttacaatcagaagctttcaaggtttaattacctaattgatcatatgggtgttgccattttactgctttacaacttttggttcatgtacttaccttgttggatctaaatctgagagcttttaatttctaattttagggtgaaaaaaaaaaaatnnataat

SEQ ID NO: 5085 - DNA, 435 bp, Glycine max
  unsure at all n locations
  Clone ID: LIB3073-004-Q1-K1-G9
gaggaaaaagaatcaaaagaaagaaatggcagtgtcatcctcatcagagataggttggagttggagggttttgtgtcagagagttaacccagcaataccaaacacgcccttgttcctccaaatcccaaagtcaactcgcttcactgggtcttcttctgttgttgctcgcgcttgggaccctaaaacggcctcttcgcaagaggaggatctagtgtacgtgggaaaactagtggcgggttcttttgcgggtggggctgcaatcaagtacggcagtgctctattccctgagataacgactccgaaccttgtgctggctctgctcctcattctaactcctgtgcttgntgttgnttttcttttgatcaaggaaagtcgtacaaacccataataccaacctttnttgtatttacaatccagatcatcaaattcgttcta

SEQ ID NO: 5086 - DNA, 436 bp, Glycine max
  Clone ID: LIB3073-004-Q1-K1-H11
gacgaagggggggccttcactctgaaccaaataccatagtcttctctttgtccgtgacaaaacagttcccacaaaaaaaagaaaaaagaaaaaagaaaagcactaaaaaaaaatgaagaagggtttctcccttgtgctgctgattcttctgatccagtacaacaacgttgtcaacgcctacaacaacaaaaactgtgtcacagaggattgcctcatcggcaacaaggatttggaatcagagttctactttggatcccatgtggccagaatgctctacgatgtgagccaatctgtgagtggcaaaacaggcaataaaaataacaaagctgttaattgtccaaataagcaaggctaccgaagctgcttgccttccaaaaacggtggtggccctaagcaaagttgtggcgattacaccagggtttgctaagaactcgtt

SEQ ID NO: 5087 - DNA, 397 bp, Glycine max
  unsure at all n locations
  Clone ID: LIB3073-004-Q1-K1-H12
gaccaagtgaaccaatatagcccaagccctatacaaccaaaccctaacacacacccatttgattcagtttccatggctagcctcaaggttgcatttttggctgcagtgctctgcatggttgtggtgagtgcacccatggcacatgcagctatcacgtgcgggcaggtgacgagtagcctggccaattgcatcggttacctccagaagggaggaacgccgtcgtcgggatgctgcaacggagtgaagagcctcaatgccgtcgncaagaccaccgtcgaccgccagacggcgtgcaactgcctcaagtcggccgccagccaaatctccggcttcaacgccaacaacgccgtctcgctccccggcaaatgcggagtctccatcccctacaagatcagca

SEQ ID NO: 5088 - DNA, 266 bp, Glycine max
  Clone ID: LIB3073-004-Q1-K1-H2
gaaggtcacggcgagacgagccgtttctaattaatgataggtgtcaagtggaagtgcagtgatgtatgcagctgaggcatcctaacagaccgatagactcattctagtatcagtaatctagtgtttgcttgcatgcttgtttagtctgtagattacttctgatattcctattgtggtgttttcttgtttttccacatgtatactaacgtacaatcttaagctaataacgaactttgattttatgtaaaaaaaataaaataaaataa

SEQ ID NO: 5089 - DNA, 317 bp, Glycine max
  Clone ID: LIB3073-004-Q1-K1-H4
ggcacaagtgagtttgttgatcgagataactagaaacagtatgatgaaaatgaaggtccttgttttcttcgttgctacaattttggtagcatggcaatgccatgcgtacgatatgttccctctccgaatgaacactggctatggtgcccgtactccggaggtgaaatgcgcaagttggaggcttgctgtggaagcacacaacatctttggctttgagaccattcctgaagagtgcgttgaagcaacaaaggaatacatccatggcgaacaatatagatcagactccaaaacagttaaccaacaagcttacttttatg

SEQ ID NO: 5090 - DNA, 309 bp, Glycine max
  Clone ID: LIB3073-004-Q1-K1-H5
agacgacagaaggggggtgagtggcgacataaataagcatttgcctacgttgttcgtgttggatgcttcccacctctcattgattggattaagcgccaaagtttccgaatttgcataatggtattgctagttgggcttacattgcttttgggtctcttcctcgctgttcttctattcaacccacgacaccgaaaatctgggcttaaggcaaaagctcaagccagtttaaacgttgataaggcatcaaaatcctacagtaaaccagaagtttcgttgcttaccaggagaccagactgttggataatcatc

SEQ ID NO: 5091 - DNA, 431 bp, Glycine max
  Clone ID: LIB3073-004-Q1-K1-F9
gacttcaaaacactcataacacaaagcacagagcaaagctcatccttgagttaaaaaatggcagcagcttcttccatggctctctcatccccatccttggctggcaaggccgtgaagctgggcccatcagccccagaagtgggaagggtgagcatgaggaagaccgtcaccaagcaggtctcctcaggaagcccatggtacggcccagaccgagtcaagtacttgggcccattctctggcgagcccccgtcctacctaaccggtgagttcccaggcgactacggctgggacactgctgggctttccgcagacccagaaaccttcgccaagaaccgtgaactcgaagtgatccactccaggtgggccatgctcggagccctgggctgcgtcttcctcgagttgctgtcccgcaacggggtgaagttcggaga

SEQ ID NO: 5092 - DNA, 421 bp, Glycine max
  Clone ID: LIB3073-004-Q1-K1-E12
gacacccaataatttctccatcctcaacggaagtacgagtttctacaaagcaaaaacctgaaaacggaaaacctatcgcagcacgctctttcatctctcactcatggcaacaacactcatgtttttccgaccaaccatgatccgggcctccgctggttctcctgccaagcccgacccgagaaacaggaagcccgtttcctccaactggtgggctcctctgttcggatggcccgcggatccggactacatgggcccattgcagaaggcgagtgagaaatcggatccggagcgggaagtgggcctggacctgggccggcccagatccaagttcacagcggggtgcttcacggagaagaaggcgaaagagctgagaaagaagaccgtggaaacgtcgacgtttcatgacatcatgtaccactcc

SEQ ID NO: 5093 - DNA, 366 bp, Glycine max
  unsure at all n locations
  Clone ID: LIB3073-004-Q1-K1-E2
ggtcaccaacacaaacaatagtgcatagcgtttttcattgtgcattattcaatggccaccacagcagctctatccggaaccatggtgagcacctccttcatgaggaagcaacctatgacgaccaagagcctaaagacattccccaacgctctttttggtctgaaaggtggacgaggtggtcgtgtaacttgcatggtctcgtacaaggtgaagctcataaccccagaaggagaagtggagtttgaatgcccagatgatgttttcattgttgacaaggctgatgaagaaggcattgaacttncctactcgtgcagggctggttcttgcgtttcatgtgttgggaaaaatgtgaaaggtgacgtggac

SEQ ID NO: 5094 - DNA, 340 bp, Glycine max
  unsure at all n locations
  Clone ID: LIB3073-004-Q1-K1-E4
gagcgccaatgtttttttcagaggagtttcatgttgtaatcaaaagagtttatcttatagtaagaaatcgatgtcttactccattttaaggaacaaaacaagagaacaatagcctgacaaagggtttagccataaaatcgaatccatcattgatttgagatattgataaggtgaatactcatttctcgtcaatgctaggcataatgcgggtatagggacctaaaaaagattatcttttcttcctatcttatgaactttaaggtgtatgaagtgtcatttcctatcttagattntaattntagtaggtagataaagagtccatttaacttaagttgatcta

SEQ ID NO: 5095 - DNA, 390 bp, Glycine max
  Clone ID: LIB3073-004-Q1-K1-E7
gacctcaagcataacttgcatagactattgatgaagaaagctattgtcattgatttgctagctccaacaatgggttctagcagattatcattcattttagtacttgtgcttgtaaccttttcatccatgatcattgactcaagggttgcagaggcacgtaccctgccaaaatcagccttattgccttccaaagttgatatacctactgttgttcctcttccactggtggcaccactgccaaatttgcctgttactctcactccagtgcctgaactacctgcagtacctaaagtaccaattcctgaagtaatagttaataacgccaaaataatcccttgagtacctatgatctatccagtcactactacttattttgtcacttgctaaatt

SEQ ID NO: 5096 - DNA, 385 bp, Glycine max
  unsure at all n locations
  Clone ID: LIB3073-004-Q1-K1-E8
ggcacattcaacaggtactttctgtctgtgatatcttaggagggagcatggaatagaacagaaaataagtggtggccttctaatggtgcttgttccatagtcaagtgattgaggttgacaaacaccaaattgaaggagaatatgggaaaacctgacaatgatgacactgattgtggaattagaagtagaaagcaatcaggaaataacaacatgaagaaagggttgttacaatcagaagctttcaaggtttaattacctaattgatcatatgggtgttgccattttactgctntacaacttttggttcatgtacttaccttgntggatctaaatctgagagcttttaatttctaattttagggtgaaaaaaaaataannatttttt

SEQ ID NO: 5097 - DNA, 394 bp, Glycine max
  unsure at all n locations
  Clone ID: LIB3073-004-Q1-K1-F1
acaccaacaccaaaacaaacccactaagatggcttcctttgtatccttcctagtgctgcttcttgcagcccttatcctcatgcctcaagggcttgctacttactacaaaccaattaagaagccaccagtgtacaagcctccagtgtacaagccaccagtgtacaaaccaccggtttataagccaaaaccaccggtttacaagccgaaaccaccggtttacaagccaccatataagaagccaccatacaagaaaccaccttatggaaagtaccctccagtagaggacaacacccatgcctaaagcaagcaatgaggtctattatctacttaataaataagaggaacttgcttgtngtttctagcattgtgatttacaacttcgtagcaatgcata

SEQ ID NO: 5098 - DNA, 427 bp, Glycine max
  Clone ID: LIB3073-004-Q1-K1-F11
gaggtggtcgtgtaacttgcatggcctcgtacaaggtgaagctcataaccccagaaggagaagtggagtttgaatgcccagatgatgttttcattgttgacaaggctgaggaagaaggcattgaacttccctactcgtgcagggctggttcttgcgtttcatgtgttgggaaaattgtgaaaggtgacgtggaccagtcagatggtagcttccttgatgatgaacaaatagaaagtggatgggttctcacctgtgttgctctacctaggtcagacgttgtcattgagacacacaaggatggagagatcgaatgatcgatatatatcataatgtaatcttgtccattgctcttctaatgccatctatctatgtcgtgttttgattttgttagagtgatttggcattggctagttagctagctgaaatc

SEQ ID NO: 5099 - DNA, 222 bp, Glycine max
  Clone ID: LIB3073-004-Q1-K1-F2
gacagcatatcaataatctattgtatactatacccacattttgataattatttttctagttgataagccatggctactcgaggaaagcttgaggttgacgttgatctcaagtctaacgcagacaagtactggcaaacccttaggaactccactgaaatattccccaaggccttccccaatgattacaaaagcattgaggttcttgagggtgatggcaaatca

SEQ ID NO: 5100 - DNA, 389 bp, Glycine max
  Clone ID: LIB3073-004-Q1-K1-F3
gaagtcgccgtgttttcttttcgttcgcatcttccctctctctcagaaagatgaaggtggtcgccgcgtatttgctcgccgtcctcggtggcaacaacagcccctccgccgatgtcatcaaggaaatccttggctccgttggagtagaagcagatgaagataggattgaatcgtttttgtctgaagttaagggtaaggatatagttgagcttattgctgccggtagggaaaagttggcctcggttccttctggtggtggtgccgttgccgtcgccgcagctcctgggggaggtgctgctgctgctgctcctgctgctgaggcaaaagaagaggaaaaggtggaggagaaagaggaatctgatgatgatatgggtttcaggctcttcgat

SEQ ID NO: 5101 - DNA, 369 bp, Glycine max
  unsure at all n locations
  Clone ID: LIB3073-004-Q1-K1-F4
ggtgagaagtagagtgaaagaaagagagagagagagagaaagagaagagagagaagcagcgattcatcacaatgggtaaggttcacggatctctcgcacgtgcgggtaaagtgagaggacaaactcccaaagtggcgaagcaagacaagaagaaaaagccacgcggacgcgctcacaagagaatgcaatacaaccgccgattcgtcaccgccgtggtgggattcggaaagaagcgtggaccaaactcctcggagaagtgagggaggcgtgttgaagatcatggtttttcttagtttgtgaaatgtatcacttggtttgatttgattgatgaactcanacttttatgatagttcttattatggttcaatg

SEQ ID NO: 5102 - DNA, 351 bp, Glycine max
  Clone ID: LIB3073-004-Q1-K1-F7
gaagaagaagaaggagcatggccatgagcatggccatgacagcagcagcagcagtgacagtgattaaactgctgcatcacctatatatttaaaaggtttatgggaccatagtagcgagggctgtgccttaatttctctctcactctctctctctctctctctctctttttcctttttccctatcttgtgatctatttatgagtgagaaaaacaaaagtgagaaattgtgcgtgtatctggttgctaattcgagtgctattagtctgtggtttggttggtttgtaaccccgctacttgggttatgtttgattgtatattatcctagagaaataaaaattttaaattatcaac

SEQ ID NO: 5103 - DNA, 435 bp, Glycine max
  unsure at all n locations
  Clone ID: LIB3073-004-Q1-K1-E10
gaacctttgcattctattcattcaagattcagcaagtgcgttttggaagcagagaccgaaatacttcgagatggcccgtacaaagcaaactgctcgtaagtcaactggaggaaaagcccccaggaagcagcttgcaaccaaggctgcacgtaagtctgcaccaacaactggtggtgtgaagaagcctcatcgttatcgccctggaactgttgctcttcgtgagattaggaaataccagaagagcactgagctcctaatcaggaagcttcctttccagaggttggttcgtgaaattgcccaggatttcaagactgatctgcgtttccagagccatgctgtgcttgcattgcaagaggctgctgaggcataccttgttgggctctttgaggacactaactngtgtgccattcacgccaagcgtgtgactattatgcc

SEQ ID NO: 5104 - DNA, 388 bp, Glycine max
  unsure at all n locations
  Clone ID: LIB3073-004-Q1-K1-F8
gactctgcagcagcacctttaaacgccgaaggttcatccaatctccgaaggccttcaccggattgcaaccatgtcgaggagaaaggttagagagccaaaggaggaaaacgtgactctgggcccagctgttagagatggtgaacatgtttttggagtcgctcgcatctttgcctccttcaatgacaccttcattcatgtcactgatctgtctgggagggaaacacttgtccgcatcactggcgggatgaaggttaaagctgacagagatgaatcatctncatatgctactatgcttgctgcgcangatgttgctgctagatgcaaggaacttggcataactgctcttcatatcaggctccgtgccacatgtggaaacantgacaaaaca

SEQ ID NO: 5105 - DNA, 352 bp, Glycine max
  Clone ID: LIB3073-004-Q1-K1-C6
ggcacaagtgagtttgttgatcgagataactagaaacagtgtgatgaaaatgaaggtccttgttttcttcgttgctacaattttggtagcatggcaatgccatgcgtacgatatgttccttctccgaatgaacactggctatggtgcccgtactccggaggtgaaatgcgcaagttggaggcttgctgtggaagcacacaacatctttggctttgagaccattcctgaagagtgcgtcgaagcaacaaaggaatacatccatggcgaacaatatagatcagactccaaaacagttaaccaacaagcttacttttatgccagagacctcgaagtccatcccaaggacacattt

SEQ ID NO: 5106 - DNA, 315 bp, Glycine max
  Clone ID: LIB3073-004-Q1-K1-C7
cggacaccaacaccaagacaaacccactaagatggcttcctttgtatccttcctagcgctgcttattgcagcccttatgctcatgtctcaggggcttgctacttactacaaaccaattaagaagccaccagtgtacaagcctgcagtgtaaaagccaccagtgtacaaaccaccggtttataagccaaaaccaccggcttacaagccgataccaccggtttacaagccaccatataagaagccaccatacaagaaaccaccttatggaaagtacccttcaatagaggacaacacccatgcctaaagcaagcaatg

SEQ ID NO: 5107 - DNA, 185 bp, Glycine max
  Clone ID: LIB3073-004-Q1-K1-C8
agagacacgaggggcttttggaaatcctttcctcggaacgagggctcactctcgctctcctagatcgcgcactttcgctctccctcgtcgcgtgctcgtctcgctatcggctctgcgctcttcggatctaactctggtagtctgaatcatgcagcagtatatcgtttgcttcgtggacatttgga

SEQ ID NO: 5108 - DNA, 431 bp, Glycine max
  Clone ID: LIB3073-004-Q1-K1-C9
ggcacaagtgagtttgttgatcgagataactagaaacagtgtgatgaaaatgaaggtccttgttttcttcgttgctacaattttggtagcatggcaacgccatgcgtacgatatgttccctctccgaatgaacactggctatggtgcccgtactccggaggtgaaatgcgcaagttggaagcttgctgtggaagcacacaacatctttggctttgagaccattcctgaagagtgcgttgaagcaacaaaggaatacatccatggcgaacaatatagatcagactccaaaacagttaaccaacaagcttacttttatgccagagacctcgaagtccattccaaggacacatttgtgttcagtatagatggcaccgtactctctaatattccatactacaaaaaacatggatatggggtggagaaatttaact

SEQ ID NO: 5109 - DNA, 386 bp, Glycine max
  Clone ID: LIB3073-004-Q1-K1-D10
ggcacaagtgagtttgctgatcgagatagcgagaaacagcgtgatgaaaatgaaggtgcttggtttcttcgttgctacaatcatggtagcatggcaatgccatgcgtacgatatggtccctctctgaatgaacactgtctatggtgcccgtactcccgaggtgaaattcccaagttggacgctctctgtggaagcacacaacatctttggctgtaagaccattcctgaagagtgcgttgaagcaacatatgaatacatgcatggcgaacaatatagatcagactccagaacagttaaccagcaggcttactcttatgccatagaccgtcaagtccattccaatgacacatttgagttcagtatagatggcaccgtactgtataata

SEQ ID NO: 5110 - DNA, 392 bp, Glycine max
  Clone ID: LIB3073-004-Q1-K1-D11
tttactacagacggggacgatgagtcaattggatgctaacatataggtgtgggtgatattgatccaatttgatatcatcgaaatccaatttataccattgatgaattaattatctatgaaagatttatcatctctatgggattaaatcccgaattttttattggaaatttaagacaaataaaacataataaagattatggaagtaaatattcttgcatttattgctactgcactgcttattctagctcctactgcttttttacttataatttacgtaaaaaccgtaagtcaaagtgactaatttcactgaaatctgacttcttcatttatatcaatgtaatcaatgattaatataaatgaaaaaagtttccaatttttggtcttatttcaaa

SEQ ID NO: 5111 - DNA, 441 bp, Glycine max
  Clone ID: LIB3073-004-Q1-K1-D12
gacacacactctgcacctccattgagttgagtgcaaaactctgttctttcctccatgaattcaatttctttaggttccttcatcctcacaccatgcaagttccgcccttttcttcaaaccaaacaccaacccatattccgcactctctccccaattcccctgacacaaaaacccacttttcttcgagccacagactcgaacatcgacgcccccatttccctccccgagggcgcgtccttcgtttccatcccagaaatcatcgagaaggactggtccgtgcttgattgcgcctaacaccgaaccactgaccgcattatagcttccggaaacatcgaacagagttcgagggttttggtctcaattgggtcagaagactttgttgattccttagcgggtttaactacctctgtgtttgttgttcatgactcgcttctgacactg

SEQ ID NO: 5112 - DNA, 158 bp, Glycine max
  Clone ID: LIB3073-004-Q1-K1-D2
cttgtgctgctcctgccaatgattaacttgccaaggggtatggtcctgacagaaggaacttcttgccttaaggtctcttggaccgatccgaaattccagaatacttgaccggaaaagttccttgagactattggtatgacccatttggtcttaaccag

SEQ ID NO: 5113 - DNA, 366 bp, Glycine max
  Clone ID: LIB3073-004-Q1-K1-D3
agaagggggtgtgcactgctagggttgtgtccaaggctgtgatcactggctacaaagatgggttcaaccagattaagtccttggttgatgttggaggtggcattggagggtctctttcggagattgttagggcttatcctcatatcaatgccatcaactttgacttgcctcatgtggttgccactgctcctaagttcgatgggatcacccatgttggaggtgacatgttcgtgtccattcctagtgctgatgctatttacatgaagtggattctgcatgactggagcgacgagcactgcatcaagatcttgaagaactgcaggaaggcaacaccagagaagacaggaaaagtcataatcgtggatc

SEQ ID NO: 5114 - DNA, 294 bp, Glycine max
  Clone ID: LIB3073-004-Q1-K1-D4
gatctggcagcagaagaacaagtagttgagaactaagaaggagaagcaaatggcttcctcaatgatctcttccccagctgttaccactgtcaaccgtgccggtgccggcatggttgctccattcactggcctcaagtccatggctggcttccccaccagaaagaccaacaatgacattacctccattgctagcaacggtggaagagtgcaatgcatgcaagtgtggccaccagttggcaagaagaagtttgagactctttcctacctgccagaccttgatgatgcacaattggc

SEQ ID NO: 5115 - DNA, 401 bp, Glycine max
  Clone ID: LIB3073-004-Q1-K1-D5
ggaaaacgattatttctagtcccaaagagctaacacgagattcaagaccggcatggctaatgaagaggaacagaaaaaccacctcttcggcatcaaagatctcggtcacaagactctccttcagagtgatgcactctatcagtatatacttgaaaccagtgtctatccaagagagcacgagtgcttgaaagagatacgcaagatgactgcaaaacacccactgaacatcatggcaacaccagcagacgaaggacaacttctgagcatgcttgttaagctcacgaattcaaagaacgccttggaaattggtgtattcactggttactctctgctctccactgccctggctcttccccctgatggaaagatcttggctttggatgtgaatcgcgaatactatg

SEQ ID NO: 5116 - DNA, 380 bp, Glycine max
  Clone ID: LIB3073-004-Q1-K1-D7
gacatttcaacgtttatttatttttgttgaaagaagagaagcaacaaatcaatctcacacttagtgttgttacgatggaatcaccgttcaaaccagagattctgaaggggaaggttgctctaatcactggtggagcctccggaatcggattcgaaatttccacccaattcggtaaacatggagcctctgttgcgctcatgggtcgccgcaaacaagtccttcagtccgctgtctccgttctccaatccctcgtcattcccgctgttgggtttgagggggatgtacggaagcaagaggatgccgcaagggtggtggaatccacgttcaagcattttggaaggattgatatactcgtcaatgctgcagctgggaactttctc

SEQ ID NO: 5117 - DNA, 395 bp, Glycine max
  Clone ID: LIB3073-004-Q1-K1-D8
gacaccaaaacgaaacaaagaagaaaaaagaactcaaacaccttcaagaacttgtatctttctttgttagtatttgttactacaattttacattcttttcatctctacatatttcattagtcatggcacctcaagcagtttccttcaagtccttcgccgttgctcttattgtggcgcttttcttctccgcctccgctctggacttagtttcggggcagtcgccggtgccggcgccggcgccggcaccagatgccggagcagctggatccgtgtcgagctcggtcgccatgattggagcttccgttgtgatttcattgctcgccatcttcaagcactgaagaataatctgatgaaggatcgattttgtgtgaagattattgattcgttctgcacac

SEQ ID NO: 5118 - DNA, 436 bp, Glycine max
  Clone ID: LIB3073-004-Q1-K1-D9
gacacaactgaacaagataagctatccatagcggccaaagaaatgaagagtaccttgttcgccctctttctactttgtgccctcacctcttacctaccttcagccaccgctggtgatgtggtcgacactgatggtaatcctgttgaaaatggaggcacatactttgtgttgccaactataatattaaacggcggtggaatagaatatgccacatttggaaatgaaacttgccctgtcactgttgcgcaatctcgcgatcagttctgcaagggctttccgataaccatttcatccccagcccgaatccgtcacatcagcgaaggccttagtttgaacattgggttcactttcgcatccccgtgttcccccgcttctgagtggaccattgtgaaggatcaaccagaaggactcgctgttaaactcactgggtttaaaa

SEQ ID NO: 5119 - DNA, 330 bp, Glycine max
  unsure at all n locations
  Clone ID: LIB3073-004-Q1-K1-C3
ggtagacaaattggaatattcactctatatttaagtattattcagcattggaaaaacaaatgaatgcgcgaattttgttctcagatactgagcaatgggaaatacaagagcgttgttcatcgagctgtggtgaacacgaaaggcattaggttttccgttggtatagcacacgggcccgagcttgacaccattgtggggcccgcaccggagcttgttggtgatgatgatcctgctgcataccgtgccatcaaatatagagattacatgcagcttcagcanaaccatgaactcgacggtnagtcatgcttggatcgtattcgaatttgaatc

SEQ ID NO: 5120 - DNA, 329 bp, Glycine max
  Clone ID: LIB3073-004-Q1-K1-B1
ggttctagtgtatgtgattgatgtgactcgtgcttcttcgtcgctatcttcttcttttgttgtttgtgtgtttgcatttctctcacctgaaaatgtcttgctgcggtggtaactgtggttgcggaagcgcctgcaagtgctgcaacggctgcagaggctgcaagatgtacccagacttgatctacaccgagtcaaccaccaccgagaccttggtcatgggagtggcaccaggtaaggctcaattcgagagtgctgaaatgggtgctcccgctgagaacgatggctgcaaatgtggatctaactgcacctgcaacccctgcactcgcaag

SEQ ID NO: 5121 - DNA, 407 bp, Glycine max
  unsure at all n locations
  Clone ID: LIB3073-004-Q1-K1-B10
ggcacaggtgagtttggtgatcgagataactagaaacagtgtgatgaaaatgaaagtccttggtttcttcgttgctacaattttggtagcatggcaatgccatgcgtacgatatggttcctcttcgaatgaacactggctatggtgcccgtacttcggaggtgaaatgcgcaagttggaagcttgctgtggaagcacacaacatctttggctttgagaccattcctgaagagtgcgttgaagcaacanaggaatacatncatggcgaacaatatagatcagactccaaaacagttaaccaacaagcttacttttatgccagagacctcgaagtccatcccaaggacacatttgtgttcagtatagatggcaccgtactctctaatattccatactacanaaaacatg

SEQ ID NO: 5122 - DNA, 418 bp, Glycine max
  unsure at all n locations
  Clone ID: LIB3073-004-Q1-K1-B11
ggcctcattttctagcttccaaaccctaacacttgtcttcctcttcgatcatcacctctccattaaggagattctcggaacatgcgtttcggttggttgcaccgttgatggaaaggatccaaaggacttgcagcaggagatttccgatggtgatgttgaggtccctctcgattgaggaagaagactttgtttctctctctttttccttctctcttatgtttgtttcgtgttttttaaatataaatctggggaaactattgaacgttttgtttaaggctattttactgttttggataatttagatgatggtttcgagaggtattattatgggctgattagtttatttctctgctcacagtatgatatgttttttgatataattttgccaatggatttttaacaaanaaaaatnnnnant

SEQ ID NO: 5123 - DNA, 394 bp, Glycine max
  Clone ID: LIB3073-004-Q1-K1-B12
ggggttattggacacattcttcagcgactgcgtttttggatcggaacctcttctgcggcgtagcaatgggacactccaacgtttggaactctcacccaaaaaactacggtcctggttctcgcacttgccgtgtgtgtgggaatccacatggactgatcaggaagtatggccttatgtgctgcaggcagtgcttccgtagcaatgccaaggaaattggcttcatcaagtatcgctaaaagagcagttgtcaactacggaccaatattgtgttctggcactaggatgttttgaggatgttatgtttgaagaaacttgagactttcttttttcatctaattaattatcagacgtaatttgtggtactaagaatacttttatataaattgttttgaat

SEQ ID NO: 5124 - DNA, 373 bp, Glycine max
  Clone ID: LIB3073-004-Q1-K1-B2
gacgtctgttactcatttcttctcatcttctggttcttccctttaaaattattattccgtgcaaacacaacaacaacttcatcaccaacacgaagaacaagattagcgttatgggtctcttcctttctaggaatttggcttgcaaattcatatacccttctcttttttccaataaggtttcaaaggatttgttccccaagcagttggagaacatgatgtctctggtctctcctcgtactggcaggcatttgcagcgctatgacaaaggctgtcgccaagttgtgggatgcattccttacagatacaagaacaatggaacacaggataaggaattagaggttcttgtgattagtgctcagaagggtcatggaat

SEQ ID NO: 5125 - DNA, 387 bp, Glycine max
  Clone ID: LIB3073-004-Q1-K1-B3
gataccaaaaacaaaacaagccaagtgaaagagagaagaaaagtcaaagacaatgtcagggatcattcacaagattgaggagacccttcatgtgggaggccacaagaaggaggaggagcacaagggtgagcagcaccatggtggagaatacaaaggggagcatcatggtgaacacagtactgaatacaaaggagagcatcatgttggtgagcacaagccggagcaccatggaggagaagagcacaaagaggggttcctagacaagatcaaggacaagatccacggcgaggagggtggcaccgctgagggcgagaagaagaagaagaagaaggagaagaggaagcatgaacatggccatgacagcagcagcagcagtgacagtgatta

SEQ ID NO: 5126 - DNA, 200 bp, Glycine max
  Clone ID: LIB3073-004-Q1-K1-B5
ggcactgtgttttatttatttttttgttacctgttatcatgatatgtatctttaatgtaatgttcttcagaaatgaagtgaaccctctgatgtgtgtactaatatgtgactcttatgctccacttgagcagaagcttttcaatgcttaaaattgtaatttttgttttgacccattatagaaatagttaattacgtgtttt

SEQ ID NO: 5127 - DNA, 333 bp, Glycine max
  unsure at all n locations
  Clone ID: LIB3073-004-Q1-K1-B6
gaacaccaaaacaaacccactaagatggcttcctttgtatccttcctagtgctgcttcttgcagcccttatcctcatgcctcaagggcttgctacttacttcaaaccaattaagaagccaccagtgtacaagcctacagtgtacaagccaccagcgtacaaaccaccggtttataagccaaaaccaccggtttacaagccgaaaccaccggtttacaagccaccatataagaagccaccatacaagacaccaccttatggaaagtaccctncagtagaggacaacactcatgcctcaagcaagcaatgaggtctagtatctacttaataaata

SEQ ID NO: 5128 - DNA, 210 bp, Glycine max
  Clone ID: LIB3073-004-Q1-K1-B7
ggacgtttctcttcaaaaccctagttagcctctgtttgtctcccctgcaatcaacggcaccccccacaaaaatgacaggagagacagtgaacccaaaagcttaccctttggccgatgcgcaactcgcaataacaatcttggatcttgtgcaacaggctgtcaactacaagcacctaaaaaaggtgcctaatgaaccgactaaaaccctga

SEQ ID NO: 5129 - DNA, 325 bp, Glycine max
  unsure at all n locations
  Clone ID: LIB3073-004-Q1-K1-B8
ggtgcacaagtgagtttgttgatcgagataactagaaacagtgtgatgaaaatgaaggtccttgttttcttcgttgctacaattttggtagcatggcaatgccatgcgtacgatatgttccctctccgaatgaacactggctatggtgcccgtactccggaggtgaaatgcgcaagttggaggcttgctgtggaagcacacaacatctttggctttgagaccattcctgaagagtgcgttgaagcaacaaaggaatacatccatggcgaacaatatagatcagactccanaacagttaaccaacaagcttacttttatgccagag

SEQ ID NO: 5130 - DNA, 366 bp, Glycine max
  unsure at all n locations
  Clone ID: LIB3073-004-Q1-K1-B9
aggaacgccgtcgtcgggatgctgcaacggagtgaggagcctcaatgccgccgccgagaccaccgccgaccgccagacggcgtgcaactgcctcaagtcggccgccagccaaatctccggcttcaacgccaacaacgccgnctcgctccccggcaaatgcggagtctccatcccctacaagatcagcaccttcaccaactgggctaccatcaagggttgaagagaaagtcatggacgcaggaaaccggaaactactcactagtatatgagtagcattattaatattaagaataagatcgagggtgatgaaggctccacttatatgcccctcttctcttgtatgagagatttgcattggatagcttt

SEQ ID NO: 5131 - DNA, 349 bp, Glycine max
  Clone ID: LIB3073-004-Q1-K1-C1
ggctgtgagtgagacaccgatagatagagagcgcggcataacctaaacctatctttcttctctctctgtgtgtgcgcttcaacggcaaccagaagcagccatggccactgcaaggactgtgaaggatgtttcacctcatgagttcgttaaggcgtactcctctcacctcaagcgatccggcaagatggagctgccagagtggactgatattgtgaaaactgcaagatttaaggagttggctccttatgatcctgactggtactatgtcagagctgcttccatggcaagaaagatctacttgagaggaagacttggtgttggtgcctttcagaggatttatggtgggagc

SEQ ID NO: 5132 - DNA, 438 bp, Glycine max
  unsure at all n locations
  Clone ID: LIB3073-004-Q1-K1-C10
ggcttatgaaataaactgcaggcgtaacagaagttgcgtagccatactctgattcattagtgaagaaaaatggcaaccatcatcgccggcatcccaactacatcgatcactcgcgcaggtcttgtgctcaaacgacctgttggagcctcgtcctctaccgttcttggattgccagcaatggctaaggcagggaaagtgaggtgctccatggaggaaaagccttcaagcagctcaaatatagggatgggggcatccttgttagcagctgcagttgccgcaaccatgtcaagcccagccatggctttggtggatgagagactcagcactgaaggaaccgggcttccctttgggcttagcaacaacctncttggttggatcctgtttggtgtcttcggtcttatatgggctctctactttgcctacgcttncacccttgaa

SEQ ID NO: 5133 - DNA, 380 bp, Glycine max
  Clone ID: LIB3073-004-Q1-K1-C11
ggtagccgctgcatctgaacgaaacacagagggagagagagtgagagaagcagtaattcatcacaatgggtaaggttcacggatctctcgcacgtgcggggaaagtgagaggacaaactcccaaagtggcgaagcaagacaagaagaagaagccacgcggacgtgctcacaagagaatgcaatacaaccgccgattcgtcaccgccgtggtgggattcggaaagaagcgtggaccaaactcgtcggagaagtgagggaggcgtttggaagatgatggtttttcttagtttgcgaaatgtatcacctctttttatttgattgatgaactcaaactttgatagttctgattaagcttcaatgaaggagttttttgctagttg

SEQ ID NO: 5134 - DNA, 426 bp, Glycine max
  Clone ID: LIB3073-004-Q1-K1-C12
gaccaacacaaacaatagtgcatagcgtttttcattgcgcattattcaatggccaccacagcagctctatccggaaccatggtgagcacctccttcatgaggaagcaacctatgacgaccaagagcctaaagacattccccaacgctctttttggtctgaaaggtggacgaggtggtcgtgtaacttgcatggccccgtacaaggtgaagctcataaccccagaaggagaagtggagtttgaatgcccagatgatgttttcattgttgacaaggctgaggaagaaggcattgaacttccctactcgtgcagggctggttcttgcgtttcatgtgttgggaaaattgtgaaaggtgacgtggaccagtcagatggtagcttccttgatgatgaacaaatagaaagtggatgggttctcacctgtgct

SEQ ID NO: 5135 - DNA, 397 bp, Glycine max
  Clone ID: LIB3073-004-Q1-K1-A9
ggcacaagtgagtttgttgatcgagataactagaaacagtgtgatgaaaatgaaggtccttgttttcttcgttgctacaattttggtagcatggcaatgccatgcgtacgatatgttccctctccgaatgaacactggctatggtgcccgtactccggaggtgaaatgcgcaagttggaggcttgctgtggaagcacacaacatctttggctttgagaccattcctgaagagtgcgttgaagcaacaaaggaatacatccatggcgaacaatatagatcagactccaaaacagttaaccaataagcttacttttatgccagagacctcgaagtccatcccaaggacacatttgtgttcagtatagatggcaccgtactctctaatattccatactac

SEQ ID NO: 5136 - DNA, 402 bp, Glycine max
  Clone ID: LIB3073-004-Q1-K1-C2
cccacgcgtccgttgcggaagacgacagaaggggcagtgatagagcaataacctaagaagagaaagagagagtatgagtaacgtgacagagaaattgggcatcaagattgagaggaaccctcctgaagacaagctcactcaacttggtgttaggcaatggcccaaatggggttgtcctctaagcaaattcccgtggacatatgaatctaaagagacctgctatctcttggaaggaaaagtgaaggttacccctagtggggcaaatgagtcagtagaaattgctgctggtgattttgttgagtttccaaaagggatgagttgcacttgggatgtgtcagttgctgttgacaagcactataactttgaataaaatcctacaagggatattcctaatgaatgaaa

SEQ ID NO: 5137 - DNA, 451 bp, Glycine max
  unsure at all n locations
  Clone ID: LIB3073-003-Q1-K1-H12
gactgcacttctccagctgtttgaccgctctggagtgttgtatggagagctagctagatttgtgttgcggttgcttgggattagaacgaagtccaagaaggtttacccgccaggtccaaatggacagccgctgcttggacctggaccacacaatccttccggaaatgtaaactacattgaggcaccaaaggctgctccaagtggctcttgggacaacgtttggggaaatgacgccaatcaatgatacggtatgttattctgctaaaagagttcgtccaaatacattgaaaagaagaaacagctgcattcattatgaagatactgaaactgcagaagtcatgtatatcctgngattaaaattgagtttgctattttctctttgcttgcgttggctcttgattttactagaaaggggatcttaaataggataccattcctgcattataccttg

SEQ ID NO: 5138 - DNA, 350 bp, Glycine max
  Clone ID: LIB3073-003-Q1-K1-H2
gtcgcatgtgagtctgatgatcgagatatccagaaggggtgttatcaaatttaaggtccttgttttcttaagtgctacaattttgattgcatggctatgccgtgcgtacgatatgttccctcttcgaatgaacactgtctatggtgcccgtactgcggaagttaaatgctcaagttggaggctagctgtggaagcacacatcatctttgactgttagaccattcctgaatagtgcgttgaatcaacatatgtataccttcatggcgatcaatatatatcagacttcaaaacaggtaaccaacaagcttacttttatgccagagacctttaaatccattccaaggacacat

SEQ ID NO: 5139 - DNA, 336 bp, Glycine max
  Clone ID: LIB3073-003-Q1-K1-H4
gagtagggagaaagtcctagtgaggtgtgtatacaattactatagtcacatatatacacacagtagtagttaaagtcttaaagattagaataagatcagtgatggagagaaagttcatttcagtagttgttttgggagtatgtttggtgctgggaatgtcccaatatgttgatgcaaggaacttggagaaaaaatcaaaggaagaggtgaagaagccagaatcgtgcttagatggagggtccattggtggtgttgggggcattggcggcattggcggtgctggtggaggtggtggtggtttaggaggtggctatggaggaggagctggtggtgata

SEQ ID NO: 5140 - DNA, 346 bp, Glycine max
  Clone ID: LIB3073-003-Q1-K1-H6
gtgcagcagaagaacaagtagttgagaactaggaatgggaagcaaatggcttgctcaatgatctcctccccagctgttaccactgtcaaccgtgccggtgccggcatggttgctccattcactggcctcaagtccatggctggcttccacaccaggaagaccaactacgacattacctccattgctagcaacggtggaagagtgcaatgcatgcacgtgcggccaccagttggcaagaagaagtttgagactctttcctacctgccagaccttgatgatgcacaattggcataggaagtagaataccttcttaggaagggatggattccttgcttggaattcgagt

SEQ ID NO: 5141 - DNA, 440 bp, Glycine max
  Clone ID: LIB3073-003-Q1-K1-H9
gatagaagaagcagaaagagaagcattagcaaaagcaagaagaactagtctaagcagaaatggcctcttcagtgatggcatctgtggccctcaaacctgcccctttcactgttgagaagtcctcagttagaggccttccctccctctcaaggaactcctcttcattcagagttgtggccagtggtggcaagaagatcaagactgacaagccttatggaattaatggtggcatggctttgagggaaggagttgatgcatctggcaggaaaggaaagggaaagggcgtttaccagtttgtagacaaatacggtgctaatgtcgatggttacagtcctatctacgacaccaaggactggtctccaaccggtgatgtctacgctggcggtacgactggcctggctatctgggctgtgactctacttggtcttctggctggtggt

SEQ ID NO: 5142 - DNA, 319 bp, Glycine max
  Clone ID: LIB3073-004-Q1-K1-A1
ggtcacacagagagagaagagacaatgaagtttaacccaagggtttcctcaagccgtcgaaagagccgcaaggctcacttcaccgctccgtcgagcgtgcgtcgcgtcctgatgagcgcgcctctctcgaccgatctccggtcgaagtacaacgtgcggtccattccggttcgcaaggacgacgaggtgcatgtggtgaggggaacctacaagggccgcgagggcaaagtggtccaggtctatcgccgcaagtgggtcatccacatcgagcgcatcacccgcgagaaggttaacggctccaccgtcaacgttggcattc

SEQ ID NO: 5143 - DNA, 180 bp, Glycine max
  Clone ID: LIB3073-004-Q1-K1-A10
ggtgctggagacaagaagaaataagtcttatttactgttttccagattcactagatggacctgtgtattgatggacgagctttcatatttttgctttggttcaattagtttacttcaagattttgtttgagaaatatgttttgcttaactgagacatgatttatggaagaagctagattg

SEQ ID NO: 5144 - DNA, 413 bp, Glycine max
  Clone ID: LIB3073-004-Q1-K1-A12
cagtatataacaacatatattaaaaaaataacaacatatattaaaaaagtcagaataaaaaaacaaatcctttatagtatttcttgtaataaatgtgatttttggaatagggataaataaaccatggaaaaatctaagcgactctttatgaaatccaagcgatcttttcgtaggcgtttgcccccgatccaatcgggggaccgaattgattataaaaacatgggtttaattagtcgatttattagtgaacaaggaaaaatattatccagacgcgtaaatagattgaccttaaaacaacaacgattaataacaattgctataaaacaagctcgtattttatctttgttaccttttcttaataatgaaaaacaatttgaaaaaagcgagtcaaccgctagaactactactttaag

SEQ ID NO: 5145 - DNA, 386 bp, Glycine max
  Clone ID: LIB3073-004-Q1-K1-A2
agaaggggactcaccacttcaaaacactcataacacaaagcacaaagcaaagctcatccttgagttaaaaaatggcagcagcttcttccatggctctctcatccccatccttggctggcaaggccgtgaagctgggcccatcagccccagaagtgggaagggtgagcatgaggaagaccgtcaccaagcaggtctcctcaggaagcccatggtacggcccagaccgagtcaagtacttgggcccattctctggcgagcccccgtcctacctaaccggtgagttcccaggcgactacggctgggacactgctgggctttccgcagacccagaaaccttcgccaagaaccgtgaactcgaagtgatccactccaggtgggccatgctc

SEQ ID NO: 5146 - DNA, 338 bp, Glycine max
  Clone ID: LIB3073-004-Q1-K1-A3
accactcgtacgtgccctgcgagaggaccacgaatggggagctggctgtagacgaacaagtcgttgagagcttataaggagaagcgaatggcttgctgaatgatctcttccgcagctgttaccactgtcaaccgtgccggtgccgacatggctgcttcattcactggcctgaatgtcatgactggcttccccaccaggaagaccaacgatgacagcaccttcattgctcgcaccggatgcagagcgcaatgcctgcacgtgtagacaccagttggccagcagaagtctgagactatggcctacctgtcagaccttgctgatgcacaattggccaacga

SEQ ID NO: 5147 - DNA, 366 bp, Glycine max
  Clone ID: LIB3073-004-Q1-K1-A4
acagaaaggggcttatatttgcagtaacaacagctaacgtgcaagttccaaggcagagagaacaataatggccaccacctcggagagggatatggagaacaagagtgatcaagaagaactgaaacatcttgggtttgtgaagattgcggcaattaaagcctttgtgtgtgtgtcgaatctctacgacttcgcaaagcaaaactcgggacctttgagatctgctgttggaaccgtggaagacactgtaaccaccgttctgggtcccgtctaccaccaattcaaggctgtccccaaccaccttctcctttttgccgacaacaaggtggatgaagctgctcacaaattcgatgagcatgcaccttcttt

SEQ ID NO: 5148 - DNA, 348 bp, Glycine max
  Clone ID: LIB3073-004-Q1-K1-A6
attcacatagttactactgtcagtggcagagagagagagaaagacgtggagtgtgtgagtgaagaagctctctgttgatgtttacctcttccattccaacctttgaatctgtaggcttcagttgtgctatttaacagtgtagggcattgtgtgcttaggaaatagtaagtttgtataattactgtaaataaaatcagtatgggtgaggaagaatcagtgaatgaagtttcaaagactgattcaaatggaaagagctttcaggagaaaacttcggatgaaattactgagaaaaaggacttggaaactgatggacgaaaagtcttggagaacaatggtatcaaaaagaat

SEQ ID NO: 5149 - DNA, 277 bp, Glycine max
  unsure at all n locations
  Clone ID: LIB3073-004-Q1-K1-A7
ggtcacaaattttccactcttcctcaccgattgctagaatggaatttcgatgctcagtcatctcttttaccattctcttctctcttgctcttgcaggagagagccatgtccatgcatcgctacctgaggaagattattgggaagctgtttggccaaacactcccattcccactgcactgcgagagcttctaaagcctctccctgcnaggtgtgaaatcgatgaactccctaagcaaattgatgatacacagtacccaaaaaccatcttctataagga

SEQ ID NO: 5150 - DNA, 317 bp, Glycine max
  Clone ID: LIB3073-004-Q1-K1-A8
ggtccttttgccacgcttaagatcacccaagagagaacctaagacacacaacacaacacacagagagagtttgaggaagaaatcatcatggcttcagcagcatctgggtttgtgctgtctcttaatgttgcagcttccaccacaaactcaagggtggtcttgttcaacacaaagaaccacgcttctaggcttcttgtgagggcttcagacgagcctgcagcggcggcacccgcaaccaccacccctccagctgaagctgaagcaaagccaaaaccaccacctattggccccaagagaggtgctaaggtgaagattct

SEQ ID NO: 5151 - DNA, 451 bp, Glycine max
  Clone ID: LIB3073-003-Q1-K1-H10
gagagaagcattagcaaaagcaagaagaactagtctaagcagaaatggcctcttcagtgatggcatctgtggccctcaaacctgcccctttcactgttgagaagtcctcagttagaggccttccctccctctcaaggaactcctcttcattcagagttgtggccagtggtggcaagaagatcaagactgacaagccttatggaattaatggtggcatggctttgagggaaggagttgatgcatctggcaggaaaggaaagggaaagggcgtttaccagtttgtagacaaatacggtgctaatgtcgatggttacagtcctatctacgacaccaaggactggtctccaaccggtgatgtctacgctggcggtacgactggcttggttatctgggctgtgactctacttggtcttcttgcttgtggtgcacttcttgtctacaacacaagtgc

SEQ ID NO: 5152 - DNA, 374 bp, Glycine max
  unsure at all n locations
  Clone ID: LIB3073-003-Q1-K1-F5
gcacacagctattcctcttagagcttgctactgagtttccacactgcataccttaggtcttccgaattcgaagttaatttgcaagatggctaaggaaaaggctcagatcaacattgtggtggttggtcatgtggaccctgaggaggcaaccaccattaacgagctgaagaagcctgttgtggagaaagaagctccagggcatgccatatgagggcatgcacgtacggcctcggaggggaaccagaaaattatgttaacaaaataatctggaaccctaatgtatcagtgtcatcatcagtgtgtagtttaagctagctntgctatggttacgttctttgagatgagagtcttgatgaacagtaccattctgatgt

SEQ ID NO: 5153 - DNA, 367 bp, Glycine max
  Clone ID: LIB3073-003-Q1-K1-F6
ggaagtatagattgaacacacacatagaaacgcaacaacaagaatgaagaagatgattctaaccctcttcttcaatatcattttatctctcctctccctctcccacgcctccgtggtggatttctgcgtagcagactacgcaggccccaatggccccgcagggtactcatgcaagagcccagcaaaggtcacggtggacgacttcgtctactccggccttggcaccgtcggcaacacctcaaacatcatcaaagccgcggtgacgccggcgttcgacgcgcaattccccggcgtcaacgggcttggaatctccattgcacgcctagacctagcagccggtggagtcatccctcttcacacgcaccct

SEQ ID NO: 5154 - DNA, 355 bp, Glycine max
  Clone ID: LIB3073-003-Q1-K1-F7
gataccaaaaacaaaacacaagccaagtgaaagtgagaaaaaataaaaatcaaagagcataatgtcagggatcattcacaagattggggagacccttcatgtgggagggcacaagaaggaggaggagcataagggtgagcaccatgctggagaatacaaaggggagcaccatggtgaacacagtagtgagtacaaaggagagcatcatggtgaacacaaagctggagagtaccatggtgagcacaagccagagcacaaagaggggttcctagacaaagtcaaggacaagatccatggtgagggcggcgccgccgagggcgagaagaagaagaaggagaagaagaagaatgagcat

SEQ ID NO: 5155 - DNA, 364 bp, Glycine max
  Clone ID: LIB3073-003-Q1-K1-F8
ggcttatgaaataaactgcaggcgtaacaaaagttgcgtagccatactctgattcattagtgaagaaaaatggcaaccatcatcgccggcatcccaactacatcgatcactcgcgcaggtcttgtgctcaaacgacctgttggagcctcgtcctctaccgttcttggattgccagcaatggctaaggcagggaaagtgaggtgctccatggaggaaaagccttcaagcagctcaaatatagggatgggggcatccttgttagcagctgcagttgccgcaaccatgtcaagcccagccatggctttggtggatgagagactcagcactgaaggaaccgggcttccctttgggcttagcaacaacc

SEQ ID NO: 5156 - DNA, 425 bp, Glycine max
  Clone ID: LIB3073-003-Q1-K1-F9
gatctggcagcagaagaacaagtagttgagaactaagaaggagaagcaaatggcttcctcaatgatctcttccccagctgttaccactgtcaaccgtgccggtgccggcatggttgctccattcactggcctcaagtccatggctggcttccccaccaggaagaccaacaatgacattacctccattgctagcaacggtggaagagtgcaatgcatgcaggtgtggccaccagttggcaagaagaagtttgagactctttcctacctgccagaccttgatgatgcacaattggcaaaggaagtagaataccttcttaggaagggatggattccttgcttggaattcgagttggagcacggtttcgtgtaccgtgagcacaacgggtcaccaagatactacgatggacgctactggaccatgtgga

SEQ ID NO: 5157 - DNA, 445 bp, Glycine max
  unsure at all n locations
  Clone ID: LIB3073-003-Q1-K1-G10
gatagaagaagcagaaagagaagcattagcaagagcaagaagaactagtctaagcagaaatggcctcttcagtgatggcatctgtggccctcaaacctgcccctttcactgttgagaagtcctcagttagaggccttccctccctctcaaggaactcctcttcattcagagttgtggccagtggtggcaagaagatcaagactgacaagccttatggaattaatggtggcatggctttgagggaaggagttgatgcatctggcaggaaaggaaagggaaagggcgtttaccagtttgtagacaaatacggtgctaatgtcgatggttacagtcctatctacgacaccaaggactggtctccaaccggtgatgtctacgctggcggtacgactggcctggctatctgggctgtgactctactnggtcttcttgctggtggtgcact

SEQ ID NO: 5158 - DNA, 388 bp, Glycine max
  Clone ID: LIB3073-003-Q1-K1-G11
gaccgacgcattcgtacgctcggatgcgacaacacaacagaatgggataaacaagaatctaaacattgacatgggcagctaattctcatcagagataggttggacttctaaggtattgcgtcagagagttaacacacctgtaccaaacactcccgttgattctctcaattccaaagcttacttgcttcactgggtactcttcttgagtcagctcgcgcttgcaaccctaacacgaacatttcgactgacgaggatcaagtgttcgatggaaaactaactgcgagggcttgtgctgatgcagcttgcatcaaatacatcagaactgtattccatgagattacgaacttcgaccttgctcttgctctgcttctcattcctactactgagc

SEQ ID NO: 5159 - DNA, 447 bp, Glycine max
  unsure at all n locations
  Clone ID: LIB3073-003-Q1-K1-G12
ccttacgcatgtgacaaaacatttgaggtcaaaagtgtgattccatttagcgagccatttactgtggatccaacaaaccctcctccagaaaaggactatgacgtatattttaaaaatttaaatgaaggcattactgggaaggaagctctccaacaaaatcctgtttctgtttagttcagctatgaatgttgcatatgcgagtactttgagagctgtgcagtctttgatctaaagagatctaaacttgacaaatctgtgatactaagttttatgataaaataggttatgtcctaacagtataaaacagttttaaaccaagttagatatgatctttaccttacaatatgcatgtatattctgtcttcaaacaatcaaacatgagtccttttcctcatatgttacagacttctagcanataggaaagcaaaagaattttatattcttggt

SEQ ID NO: 5160 - DNA, 362 bp, Glycine max
  Clone ID: LIB3073-003-Q1-K1-G2
gactttcctaacgagaaggggagagactaatcgaagatataattgaataaagtaacgttgcttaaggtagcttagctgcttttcctgttatggttcagttcaacgactgcacttgctactctattcgatccaggtcacttcattacataagtgctgcgctacaattactatgctatgatcaaatccacatccactgcatggtatgatctgagcctttgctcagcaccaaatcctacccattgccaatccgtagattagatcgaaacaagacatgactcatgtcacgtagcttgcatttgctatacgatatgtaattggacgtgacgttgtgtagatataacctactcctgttatgacatatc

SEQ ID NO: 5161 - DNA, 337 bp, Glycine max
  Clone ID: LIB3073-003-Q1-K1-G3
agaacaaagaagagcgttgagacgtacaagatctacatcttcaaggtgttgaagcaagtgcaccccgacatcgggatctccagcaaggctatggggatcatgaacagtttcataaacgacatcttcgagaagctcgcccaggagtcatcgcgtctcgctaggtacaacaagaagcccaccattacttccagggagatccaaacggcggtgcgtttggtcctccctggggagttggccaagcatgccgtttctgaaggcaccaaggccgtcaccaaattcaccagctcttgattggtttcgtgtgtttatgtcagggttttctgttagcccgatttaa

SEQ ID NO: 5162 - DNA, 400 bp, Glycine max
  Clone ID: LIB3073-003-Q1-K1-G4
gatctggcagcagaaaaacaagtagttgagaactaagaagaaggaaatggcttcctcaatgatctcctccccagctgttaccaccgtcaaccgtgccggtgccggcatggttgctccattcaccggcctcaaatccatggctggcttccccacgaggaagaccaacaatgacattacctccattgctagcaacggtggaagagtacaatgcatgcaggtgtggccaccaattggcaagaagaagttcgagactctttcctacttgccagacctcgatgatgcccaattggcaaaggaagtcgaataccttctaaggaaaggatggattccttgcttggaattcgagttggagcacggtttcgtgtaccgtgagcacaacatgtcacctggatactatgat

SEQ ID NO: 5163 - DNA, 337 bp, Glycine max
  Clone ID: LIB3073-003-Q1-K1-G5
ggtgattgtttgttgttgcaactcgttcttctgtcttttgttgttctgtgtttgtgtttgttatttctctcacctgaaaatgtcttgctgcggtggtaactgtggttgcggaagctcctgcaagtgcggcaacggctgcggaggctgcaagatgtacccagacttgagctacactgagtcaaccaccaccgagaccttggtcatgggagtggcacctgttaaggctcaatttgagggtgctgaaatgggtgtgcccgctgagaacgatggctgcaaatgtggaccaaactgctcctgcaacccctgcacttgcaagtgaggtgttgggagagcaagc

SEQ ID NO: 5164 - DNA, 389 bp, Glycine max
  Clone ID: LIB3073-003-Q1-K1-G8
gtgaaacaataatttgtgaggtagacagacagaggcggcagtaaataagaatggcttcaaatcccaaacctttgacttttgaggaggtggctaatcacaacaacaaaaaggattgctggattattatcaatggaaaggtgtatgatatcacgccatttctggatgagcatcctggaggagatgaagttttggtaacgtcaacagggaaggatgccaccattgattttgaagatgtgggccacagtgattctgccatagaaatgatggaaaaatacttcgtcgggaaggttgacacttccactcttccagcgaaagttaaccatagtctgccacaacctacacaagcaggtggcgctggcaatcaatcttctggatttgttgtaaagatc

SEQ ID NO: 5165 - DNA, 410 bp, Glycine max
  Clone ID: LIB3073-003-Q1-K1-G9
gcccctcgtcggcgcgttttgcatgctcagtttgggactctccaatctctacacacccctcaaaacggggtgcgttcaatctctcttacgatccaagttgggtattcgaacccagtcctgcatcagaatggaagggagtaacaccaccgtgcccagcattgttgtctatgtcactgttcccaacaaagatgcaggtaagaagttggctgaaagcatcgtcaaagagaagcttgctgcttgtgtcaacagggtaccgggtattgaatcggtgtaccagtgggagggaaagatccaaactgattctgaggaacttcttataatcaagactaggcaatcccttctggaggcactgacagagcatgtcaaggctaatcatgaatatgatgtgccagaggtgatctccttaccca

SEQ ID NO: 5166 - DNA, 318 bp, Glycine max
  Clone ID: LIB3073-003-Q1-K1-H1
agggacaagtgagtttgttgatcgagataactagaaacagtgtgatgaaaatgaaggtccttgttttcttcgttgctacaattttggtagcatggcaatgccatgcgtacgatatgttccctctccgaatgaacactggctatggtgcccgtactccggaggtgaaatgcgcaagttggaggcttgctgtggaagcacacaacatctttggctttgagaccattcctgaagagtgcgttgaagcaacaaaggaatacatccatggcgaacaatatagatcagactccaaaacagttaaccaacaagcttacttttatg

SEQ ID NO: 5167 - DNA, 349 bp, Glycine max
  Clone ID: LIB3073-003-Q1-K1-F3
gaaaacaagtcgtacacgttgaaacggagttctaaatttccggcgagttttcctctctcgaatctgcgacaccgacgaatctcactcaccggaatttcggattcagaaaatggctttaggtggaacagctcccccaagaggaagtgcagcggctactgcaagcatgaggagaaggagaacaaccggtggtgcggcctctggaggagcagctggaactatgctccaattttacacagatgatgcccctggactcaagatctccccaaatgttgttcttgtaatgagcattggcttcatagcatttgttgccatccttcatgtgatgggcaagctgtactttgtgcgtagg

SEQ ID NO: 5168 - DNA, 389 bp, Glycine max
  unsure at all n locations
  Clone ID: LIB3073-003-Q1-K1-D6
tgggataccatagaagaagcacaaagagaagcattagcactaggagcagcaacaactagtctcagctgaaatggcctcttcagtgatggcatctgtggccctcaaacctgcccctttcactgttgagaagtcctcagtgagaggccttccctctctctcaaggaactcttcttcattcagagttgtggccagtggcaagaagatcaagactgacaaaccttatggaattaatggtggcatggctttgagggatggaactgatgcatctggcaggaaaggaaagggaaagggtgtttaccagtttgtagacaaatacggtgctaatgtcgatggttacagtcctatctacgacaccaaggactggtctncaacccgtgatgtctacgctg

SEQ ID NO: 5169 - DNA, 381 bp, Glycine max
  Clone ID: LIB3073-003-Q1-K1-D8
gaagataaagaaaagagaaatggcaacagagggaaaagtggcagtattaggtggcatcaccgaagtgcagggagctgccaacagcgtcgagatcaacaatctcgctcgctttgctgtagaggaacaaaacaaaagagagaattcagttctggagtttgtgagggtgattagtgcacagcagcaagtggtttctggagtgaattactacataacattggaagcaaaagatggtgagattaaaaatgagtataaagcgaaggtttgggagagggaatcccaagagttgctagaattcatgccaacattaggtgcaggaggcgagatcgaccatctcgctcgctttgctgtagaggaacaaaacataagagagaatgcaaatct

SEQ ID NO: 5170 - DNA, 434 bp, Glycine max
  Clone ID: LIB3073-003-Q1-K1-D9
gaagcatagcagcatcatacaaagcattgaattcaaaaacttaagttcattccttgtgttttgctttcttcctcaaaaccaaacatgtcgaacacatgcggcaactgcgactgcgctgacaagactagctgcaccaagggaaacagctatggtgttattgtagagactgagaagagttacatcgagactgttgtcatggatgttccagcagctgagcatgatgggaagtgcaagtgtggcactaactgcacttgcacggactgcacctgtggccattaaggaatatgtatgaaaatgtaattgccatgtgtttggcaatacaaatatccaaataatgtaatcttcgtatgaataaatgtgtgtgctgttatcctacttcaggtctgtgtagtcatgcagtctgaatcatttcaagttcctgtcttagttaatat

SEQ ID NO: 5171 - DNA, 440 bp, Glycine max
  Clone ID: LIB3073-003-Q1-K1-E10
ggtgatcacacagaaagagaaagcaatggcttgtctggcaagcttagctgttgttcaaccatctactgtcaagggccttgctggaactaagctctctttcaagccctctcgccagagcttcagacccaagaatttcaggagtggtgccgttgtagcaaagtacggtgacaagagtgtgtactttgatttggaggatctaggcaacactactggtcagtgggacttgtacggctccgatgcaccttcaccctacaaccctcttcagagcaagttcttcgagacattcgccgctccattcacaaagaggggattgttactaaagtttttgatcctgggaggtggttccaccctggcatacttgagtgccacagcgtctggtgacattctaccaatcaagaagggcccacaacttccaccaaagccaggtccccgtggcaaga

SEQ ID NO: 5172 - DNA, 438 bp, Glycine max
  Clone ID: LIB3073-003-Q1-K1-E11
ggttctagtgtgtgattgcttgttgttgtaacggggtcttcttcttttggtgctctgtgtttgtgtttgctttttctctcacctgaaaatgtcttgctgcggtggtaactgtggttgcggaagctcctgcaagtgcggcaacggctgcggaggctgcaagatgtacccagacttgagctacactgagtcaaccaccaccgagaccttggtcatgggagtggcacctgttaaggctcaatttgagggtgctgaaatgggtgtgcccgctgagaacgatggctgcaaatgtggaccaaactgctcctgcaacccctgcacttgcaagtgaggtgttgggagagcaagcttcaagcagagatagcccttaattaggaataatgatcaactattaatgtgtagctaaaaacttatgtattatgtctgtgatggttttcgtgc

SEQ ID NO: 5173 - DNA, 448 bp, Glycine max
  Clone ID: LIB3073-003-Q1-K1-E12
taccgacaggggttctaccacagcattctattcattcaatcacgcagggcttacaatatgggtgggcagacctaaatacttcaagatccctcatacaaatcagacttcttgcaagtcaacttgacgaaaatccaccctcaagcatcttccaaccaatgctgctcgtctgtatgatccaaccactcttggtgctaacatacctcatcatcatcgtcctcttactgctgctcttcatcacattatgaaataccacacgagcactcttctactaatcatcaagcttcctttcctgaacatgcttcgttacattacccatcatgacatcactgctctaccttttcaaatccatgctgagcttgcatcacacgaagatgcttattcatacctagttgggctcttttatgacactaacttgcttgccattcactccaagcgtgtgactattatt

SEQ ID NO: 5174 - DNA, 360 bp, Glycine max
  Clone ID: LIB3073-003-Q1-K1-E3
ggcattatatttgagttcaagcaaatcaaagccatggccacctccaacttctctattgttctctccgtctccctagccttctttttggtgctacttaccaaggcacactcgaccgataccgtttctttcaccttcaacaagttcaacccagtccaaccaaacattatgctccaaaaagatgctagtatttcatcctctggggtgttacaactcaccaaagttggcagcaacggcgtgcccacctcgggatctctcggtcgtgccctttacgctgccccaatccagatttgggacagcgaaaccggcaaggtagccagctgggctacatcctttaaattcaacattttcgcacccaacaaa

SEQ ID NO: 5175 - DNA, 414 bp, Glycine max
  Clone ID: LIB3073-003-Q1-K1-E4
ggtttcataggctcctttttgattacgaaaatgtggaagagaacgggttttgaagaagaagcagttcaattgatcaactcagatttcagggacctaagtctagctgctaatagactcgcccatcatgccatcaaacttggtggcattggctttggagcctcttttttcggattgtttgctgccattgctgctatttatctgttgattttggatcgtacaaactggaaaacaaatattctcacagcactactcattccatacattttcttcagcttgccttcattaattttcgacgtcttcaggggagagcttggaaaatggattgctgcagttgctgttgtattacgccttttacttccaagacactttcctgattggctggaattgcctggtgctctgattcttcctaatcgt

SEQ ID NO: 5176 - DNA, 302 bp, Glycine max
  Clone ID: LIB3073-003-Q1-K1-E6
ctacaaccctgatgctgttggctggaaggtttggattggctccatcagcaaacaggaaagccactgcagggctaaagctggaggtgagggactcaggcttgcagactggtgaccctgctggcttcacccttgctgacaccttggcctgtggatctgttggccacatcattggggttggggttgttcttggtctcaagaacattggtgccctgtaaaaagcaactatataagtttagtgcttgatgcatctgtaatcaatgttattatgtacttcattttcacatcactctgcagtctttctc

SEQ ID NO: 5177 - DNA, 365 bp, Glycine max
  Clone ID: LIB3073-003-Q1-K1-E7
gatctggcagcagaagaacaggtagttgagaactaagaaggagaagcaaatggcttcctcaatgatctcttccccagctgttaccactgtcaaccgtgccggtgccggcatggttgctccattcactggcctcaagtccatggctggcttccccaccaggaagaccaacaatgacattacctccattgctagcaacggtggaagagtgcaatgcatgcaggtgtggccaccagttggcaagaagaagtttgagactctttcctacctgccagaccttgatgatgcacaattggcaaaggaagtagaataccttcttaggaagggatggattccttgcttggaattcgagttggagcacggtttcg

SEQ ID NO: 5178 - DNA, 383 bp, Glycine max
  Clone ID: LIB3073-003-Q1-K1-E8
caacgaaggacagagtattcaactatgtgaatcaactgtgtgagagcctgccaagtccatctggagagtcagtgataagctgtaataatctttccaagatgccaaacattacgttcacaattggaaataaaccttctgtcctcacaccagagcagtatattctaagaactggagaaggcattacagaagtctgccttagtgggtttattgcttttgatgttcctgctccaaagggtccattgtggattcttggcgatgttttcatgagggcatatcacaccgtctttgactatggaaatctccaagttggctttgccgaagcagtctaattacgctttctggaggattttctttgtaaatttgttaagcgtgttgtaaataag

SEQ ID NO: 5179 - DNA, 381 bp, Glycine max
  Clone ID: LIB3073-003-Q1-K1-D5
ggcacacagtttactcactaactcactgtgagagcaaagaagaagaagaatgaaggacgccggaaagagccacaaggcgaacggaaagctgtcgccggagactcggaaggatcggaagtcggcgacggggctgagcggatcgccgaagaagggaggccacggcgggaagttcacgtggatcggccacggctacgagcaagttgagatgccgcacggtgctatggacgccaaggacccgaacttcgaggatccggtggagatcgccaccgtgtgatcgcggtggtttccggtggccaggtctgtaaatagtagtaattggcgaaacgtgttttttcgtgttcaataatgtgaagcgaatcggagaagaagcgttttctgtga

SEQ ID NO: 5180 - DNA, 388 bp, Glycine max
  Clone ID: LIB3073-003-Q1-K1-F2
ggagagaaagagatcacatagcagaatggcttctactcaatgtttcttgcaccaccatgctcttaccacccctgccagatccccatcacaacgcatcatggttagcaccaagcctaaccagcttgtttgcaaggcacagaagcaagaggatattgatgtcagcccaatctctcgccggttagctctaaccgtgctcattggtgctgctgctgttggctccaaagtccaacctgctgatgcagcttatggggaagctgccaatgtgtttggaaagccaaagacagacacagatttcctgccatacaatggagatggattcaaactatcgattccctcaaagtggaacccaagcaaagaggttgagtacacaggtcaggttgttagatat

SEQ ID NO: 5181 - DNA, 339 bp, Glycine max
  Clone ID: LIB3073-003-Q1-K1-C1
ggaagcttcaataagtaagtatcaatggcgtgccgaagaatcccagaacaagccccccagcgagcagtccactaccgaactcatcacgagcgcgaagctggtggcggaggcggcgcagtcggctctgaagagcgacagcgacaaagtggacaaggccaaggtggctgacgctgccggcgatcttctcgacgcggcggggaagtatggaaaacttgatgacaaacaaggcatagggcaatatgttgacaaggctgctgattatctgcataattaccagggtgataataccactgctccttcacagcctgcagagtctaaaggtgaagaaagtggtggtgg

SEQ ID NO: 5182 - DNA, 190 bp, Glycine max
  Clone ID: LIB3073-003-Q1-K1-C10
actccttatttaaaattcacaacatccacacatcctataaaatctcacaacatcctactatctactacaatttctcaataactcgtcacttctccacataaacacatacataactatcaatctatatctacctaccaatcatttatccaacaccctttcttttatacaatatacctccaacttcatccct

SEQ ID NO: 5183 - DNA, 326 bp, Glycine max
  Clone ID: LIB3073-003-Q1-K1-C11
gagtgcacaagtgagtttgttgatcgagatagctagaaacagtgtgatgaaaatgaaggtccttgttttcttcgttgctacaattttggtagcatggcaatgccatgcgtacgatatgttccctctccgaatgaacactggctatggtgcccgtactccggaggtgaaatgcgcaagttggaggcttgctgtggaagcacacaacatctttggctttgagaccattcctgaagagtgcgttgaagcaacaaaggaatacatccatggcgaacaatatagatcagactccaaaacagttaaccaacaagcttacttttatgccagag

SEQ ID NO: 5184 - DNA, 433 bp, Glycine max
  Clone ID: LIB3073-003-Q1-K1-C12
ggaagtgtatttggtcactgacctatcttggtagagatttgaagtttaaaccttcaaattaatcaaaccattttaatttgcctttagattctgagtcactgctgctatggcgctacgcgtacttcttgtgttggggatgttgctgatgttgtgccttgttaaggtttcatctgatccaaagatagaagaagaaatactggaagcagaagaagaactgcagtttcccgataacgagccacttatcgtgagagacgcgaacagaaggctaatgcaagatatggattgtggtgggttgtgcaagacgaggtgcagtgcacattcgaggcccaacttgtgcactaaggcgtgtggcacgtgctgtgtgaggtgcaagtgtgtcccacctggtacatctggaaatagggaactatgtggaacctgctacactgatatg

SEQ ID NO: 5185 - DNA, 300 bp, Glycine max
  Clone ID: LIB3073-003-Q1-K1-C2
gactgctacacctaagcaaacgcggttagatcggtggctaagcatacttcctagcggacatggttgctgcacttatcctcattcctaacggacttggtacgtaactcaaacccactgagacgcaaccagtgtactggcttacatcgttgcaacgaacactgtgcaaaccacagtggtatgctccaacagcaacgggacacaagccgtagccagcgtgctacaagccaccatatcagaagccaccatgcacgagacgaccatatgggaagtaccctccagacgacgacaacacccatgcct

SEQ ID NO: 5186 - DNA, 353 bp, Glycine max
  Clone ID: LIB3073-003-Q1-K1-C4
gaagaagaagtaagagcatggccatgagcatggccatgacagcagcagcagcagtgacagtgattaaaccgctgcatcacctatatatttaaaaggtttatgggaccatagtagcgagggctgtgccttaatttctctctctctctctctctctatctctctctctctctctatttcctttttccctatcttgtgatctatttatgagtgagaaaaacaaaagtgagaaattgagcgtgtatctggttgctaattcgagtgctattagtctgtggttcggatggtttgtaaccgcggtacttgggttatgtttgattgtatattatcctagagaaatataaattttaaattat

SEQ ID NO: 5187 - DNA, 369 bp, Glycine max
  Clone ID: LIB3073-003-Q1-K1-C5
ggagcgaaagagatgtcgttggtttcaagcatgttcgggtgtggagtggtgatggcggcgtcgctagcaatgggaattggaaggagaagcgatggtggattgacgatagtgtgttcgtctaggccgcataagaaagcgactgcgcatgacatgaagactcggcctcggaagactcacgcatgggatagaaaccgcaagcccaccgtctacgatccactccctcctgttactgctgattggaccctcgctattaccgctgacgcttcttctgctcccggtacgcctccgcctccaactgcctctgcctagtcactctctaggtactctctctcgttttcatgtagtcttatctttaattccagcagcttt

SEQ ID NO: 5188 - DNA, 271 bp, Glycine max
  Clone ID: LIB3073-003-Q1-K1-C6
tttttaactaacaaaataacattcctttcaaggagggtctcttctaaactgacgatgaccacactcgataccactcctaattgtaacgagaatcaattccccattgactataatgtctgcagatagaccccataatatatccactgctacacaccatcatactctaccatataatacacaatcactttatacaaaccgctagcccaccatataccatccactccctcacctttctcatgattctactctcactattcccacttacgctttt

SEQ ID NO: 5189 - DNA, 382 bp, Glycine max
  unsure at all n locations
  Clone ID: LIB3073-003-Q1-K1-C7
gaatcctctgttgtttctcagccgcctcggctagggttcggaaacgaagaagggttctgttttcttttcgcgatgagggccaagtggaagaagaagcgtatgaggaggctgaagaggaagcgccgaaagatgagacagagatccaagtagtgcgttaaacctagtttgtttccgttgcttttacaattgcttatgttgtcaaataggacacccagttgttagtggcactggtctctcctttttgatgttttgatacattttgttggattttatttcgtcttatgttcttagctgaaaacaatgctgttactgcgtttgcgaatcaacaggatatcttgtttgcatttctgtttctctctttgcgaaaaaaacaannnnnntt

SEQ ID NO: 5190 - DNA, 407 bp, Glycine max
  Clone ID: LIB3073-003-Q1-K1-D10
gagagttaagttgggaacatggcaatctacaataaacgatgattctcattatctccctcattttttctcttctctctttctcccatgcttctgtcctagatttctgtgttgcagattatgcaggtcctattggacctgcaggatattcctgcaagaagccttcaaaggtcacagcagatgattttgcttacagtggccttggcattgctggtaacacctcaaacattatcaaagctgcagtgacccctgcatttgatgctcagtttgctggtctcaacggtcttggcatttccgcagcacgtttggacttagcagcaggtggagttataccacttcacactcatcctggagcttcagaattacttgttgtaattgaagggagcatcctagctggattcatttcttct

SEQ ID NO: 5191 - DNA, 401 bp, Glycine max
  Clone ID: LIB3073-003-Q1-K1-D11
gacgatgagtcgatttgatgactaagatattgttattcgtgatattgatccaatttgatatcatcgaaatccaatttataccattgttgaattaattatcgatgaaagatttatcatctctatgggattaaatcccgaattttttattggaaatttaagagaaataaaacataataaagattatggaagtaaatattcttgcatttattgctactgcactgtttattctagttcctactgcttttttacttataatttacgtaaaaacggtaagtcaaagtgactaatttcactgaaatctgacttgttcatttttatcaatgtaatcaatgattaaaaaaaatgaaaaaggctctcaatttttggtcttagtccaagatcaaccacaaggactcagtgtt

SEQ ID NO: 5192 - DNA, 426 bp, Glycine max
  Clone ID: LIB3073-003-Q1-K1-D12
cgacagaagggggcacaagtgagtttgttgatcgagataactagaaacagtgtgatgaaaatgaaggtccttgttttcttcgttgctacaattttggtagcatggcaatgccatgcgtacgatatgttccctctccgaatgaacactggctatggtgcccgtactccggaggtgaaatgcgcaagttggaggcttgctgtggaagcacacaacatctttggctttgagaccattcctgaagagtgcgttgaagcaacaaaggaatacatccatggcgaacaatatagatcagactccaaaacagttaaccaacaagcttacttttatgccagagacctcgaagtccattccaaggacacatttgtgttcagtatagatggcaccgtactctctaatattccatactacaaaaaacatggatatggg

SEQ ID NO: 5193 - DNA, 148 bp, Glycine max
  Clone ID: LIB3073-003-Q1-K1-D2
ctaccacatctgcctctaaattatatgctccatgtgtcgttcatattattaacaactctataaactctttattaatcctatagattctctttctacactacatatctttttccattaactccaacatccacatgcactaccactaatt

SEQ ID NO: 5194 - DNA, 409 bp, Glycine max
  Clone ID: LIB3073-003-Q1-K1-D3
cttaccgggttgaagaagttcgtcaagtggtagcctgcctattacggctacaatcacggcaaacctgtaaattaattttattttattttgtttccccccccccttttttttttctttttcggaaagggtttttttctttttttagtgtggtaggttttaagtcacagattaaaacagacagggaaaaaaaagaagaaagaacctggtcaagaagattagaagaagaagggaaattggggctaaaaggaaagaagaaaagaaaagagaaaagaaaagaagagaaagagaagaatacaattctttacttaggaggccagctaaaacagcttgtgttccttcgttgatttcttttcttttttgtattaattgggtgttttttgtatttttttttaccattttctttttctgt

SEQ ID NO: 5195 - DNA, 399 bp, Glycine max
  Clone ID: LIB3073-003-Q1-K1-B9
gtccacaaaaacgaagtactactacaagggaagaaaaacttagctactaaggaaggatcaaagagaatggctcaagcaatggcatcaatggctggcttgcgtggttcctctcaggctgtgttggaaggtagccttcaggtgagtggctccacacgcttgaatgtggggagtggaagcagggtggcctcagtcacacgtgcagggttcacagttagagcacaacaacaacaagtgagtggtgaggtacaaagcagccgtaaggcagtgctttcacttgttgctgctggtttggccactggctcttttgttcaagctgtgcttgctgatgccaaatctatcaaagttggaccaccttccccaccttctggtggattgcctggaacgttgaactcagatgaa

SEQ ID NO: 5196 - DNA, 332 bp, Glycine max
  Clone ID: LIB3073-003-Q1-K1-A2
acgacaggcgacagaagagacagatggggctagcggcagataaacgggagttgcaagcgggtaagaaggaaatgtcttggcgaatgatctgatcccaaactgataccacggtgaaccgtaccgatgccggcgcgattgcttgattgaccggactaaaatccatggctggattgcgcacgaggtagaccaacactgacattaccttcattgctagcaactgtggaagaactcagtgcatgcaagtgtagtcaccaatcggctagaagaagtctgagacatctttctacttgccagacctcgatgatgcccaattggcaaaagaagtcgaatac

SEQ ID NO: 5197 - DNA, 349 bp, Glycine max
  Clone ID: LIB3073-003-Q1-K1-A5
gcacaagtgagtttgttgatcgagataactagaaacagtgtgatgaaaatgaaggtccttgttttcttcgttgctacaattttggtagcatggcaatgccatgcgtacgatatgttccctctccgaatgaacactggctatggtgcccgtactccggaggtgaaatgcgcaagttggaggcttgctgtggaagcacacaacatctttggctttgagaccattcctgaagagtgcgttgaagcaacaaaggaatacatccatggcgaacaatatagatcagactccaaaacagttaaccaacaagcttacttttatgccagagacctcgaagtccattccaaggacacat

SEQ ID NO: 5198 - DNA, 398 bp, Glycine max
  Clone ID: LIB3073-003-Q1-K1-A6
gctggcagcagaaaaacaagtagttgagaactaagaagaaggaaatggcttcctcaatgatctcctccccagctgttaccaccgtcaaccgtgccggtgccggcatggttgctccattcaccggcctcaaatccatggctggcttccccacgaggaagaccaacaatgacattacctccattgctagcaacggtggaagagtacaatgcatgcaggtgtggccaccaattggcaagaagaagttcgagactctttcctacttgccagacctcgatgatgcccaattggcaaaggaagtcgaataccttctaaggaaaggatggattccttgcttggaattcgagttggagcacggtttcgtgtaccgtgagcacaacaggtcacctggatactatgat

SEQ ID NO: 5199 - DNA, 367 bp, Glycine max
  unsure at all n locations
  Clone ID: LIB3073-003-Q1-K1-A7
gggccgctgcagcaagggctgaacgcacgcaggaggaggagattgatcgagagaagagaagatgactacacgcttcaagaagaacaggacgaagagaggccacgtgagtgccggccatggccgcatcgggaagcaccggaagcaccctggaggacgcggtaatgccggaggcatgcaccaccaccggatcctctttgacaagtaccaccctgggttcttcggcaaggtcggaatgcgctattttcacaagctgcgtaacaaattctactctccgatcctcaacatcgacaagctctggtccctggttccgcaagaagtgaaggacaatgcctncaaggagaacaaggcgccgctgatcgacgttacg

SEQ ID NO: 5200 - DNA, 302 bp, Glycine max
  Clone ID: LIB3073-003-Q1-K1-A8
acatgggggcactcgtgattttgttgatcgggatatctagagactgcgtgatgaaaatgaaagtcctcgtgttcttcgttgctacaattttggtcgcatggcattgccatacgttcgacatgtaccatatgcgaatgaacactgactatggtgcccgctctacgtacgtgaactgcgcaagttggaggcttgttgtggaagtacactacatctttggctctgagaccattcctggagagtgccttggacctgcacaggtatacatgcatggctaacagtacacatcagactgcaaaacagtt

SEQ ID NO: 5201 - DNA, 105 bp, Glycine max
  Clone ID: LIB3073-003-Q1-K1-A9
cggctcaagtgcggtttatgatcgagataactgggaacattgtgatgaaaatgagaggtacttgttttcttagaagctccaagtttcttagcataggcatgccgt

SEQ ID NO: 5202 - DNA, 414 bp, Glycine max
  Clone ID: LIB3073-003-Q1-K1-B10
ggcatcagaaaaagaaaagccttcaatcatatagcattctaagaaatgaagagccctaccattttcattctctttctactttctgccttctacacctcactcctaccttcagccaccgctcaagtcgtggttgacatggaaggtaatgatcttcaaaatggtgggaaatattatgtgttgccagtaatagagtcatcatatggtggaataagagtagccgcaactggaaaagaaagatgccctctcactgttgtacaatctgccgatccgtatgataaggggattgcaacaattatttcaaccccatatcgagttcctgttatccgcgaaggctttcctttgaacattacgttccgtaattttgcaggtatactgccttgtgtcccccttcgatctgagtggaccgtcgttaat

SEQ ID NO: 5203 - DNA, 439 bp, Glycine max
  Clone ID: LIB3073-003-Q1-K1-B11
gacagcagtaaagtgagttaaaagaaccgataataggggttccttcactctccgctctctctgccactgagccaagaagatggcctcacaggtttgcaaatctgcttccagagccgcgaggtcccttctatcctctcgttttcactctcaaggacgtgcgcttggggctgctgcggctgtttcattgagcagcaaagtgcctcttttttacggaaagaacggttctggaaatggatccgcttcttcatcatcaacatcatcatcatggatttcaggagctcttgctcttcctgccgcagcttacatgttccaagatcaggaggtgcaggcagctgagctggagcgcactttcattgccattaagcctgatggagtgcagagaggcctgatttctgagattatatctcgttttgagcggaaagggtacaagcttgtggga

SEQ ID NO: 5204 - DNA, 318 bp, Glycine max
  Clone ID: LIB3073-003-Q1-K1-B2
acatggaggcacacgtgattatgttgatcgggatatctagaaactacgtgatgaaaataaaagtcctcgtgttcttctttgctacaatcttggtcgcatggcaatgccataccttcgacatgttccatatgccaatgaacactcactatggtccccactctacgtacgtgaaatgcacaagttggaggcttgttgtggaagtacactacatctatagcatcgagaccattcctgaagagtgccttgaacctgcacaggtatacatgcacggctaacaatacagatcacactccaaaacagttaaccaacaggctatac

SEQ ID NO: 5205 - DNA, 334 bp, Glycine max
  Clone ID: LIB3073-003-Q1-K1-B4
ggcaagagtttgttgtgagctataagctagtttatcgtgaggagaatatgaagttgtttgttttctttgttgctgcagtaattttggtagcatggccatgccatggcgcatgctaccaaaggttccctctccgaatgaaaactggctatggtgagcgttcttcggaggtaaaatgcgcaagttttaggcttgctgtggaagcacacaacatccgagcctttaaaaccattcctgaagagtgcgttgaaccaacaaaagactacattaatggcgaacaatttagatcagactctaaaacaagtaaccaacaagctttcttttatgctaatgaacg

SEQ ID NO: 5206 - DNA, 377 bp, Glycine max
  Clone ID: LIB3073-003-Q1-K1-B5
ggcacacagtttactcactaactcactgtgagagcaaagaagaagaagaatgaaggacgccggaaagagccacaaggcgaacggaaagctgtcgccggagactcggaaggatcggaagtcggcgacggggctgagcggatcgccgaagaagggaggccacggcgggaagttcacgtggatcggccacggctacgagcaagttgagatgccgcacggtgctatggacgccaaggacccgaacttcgaggatccggtggagatcgccaccgtgtgatcgcggtggtttccggtggccaggtctgtaaatagtagtaattggcgaaacgtgttttttcgtgttcaataatgtgaagcgaatcggagaagaagcgttttct

SEQ ID NO: 5207 - DNA, 407 bp, Glycine max
  Clone ID: LIB3073-003-Q1-K1-B6
tggaagacgacagaaggggagagacagagcaagaatgtggtcagagaaggaaagcgagagtcggaagagatttggcgcgagttgaaaaccctagtgagttccaatgatctccactcccttaacctcatgcaacacaccatattgggaaggttgcaggatagcaatgcggtgttgtcgcatttcaacgacttctctcagcactgctttgctgagatttccggcgacatcgctagaaacacgcgtgttttgagaagtatgaaataaaaaattatggctacttatcccgatgcatttcctgaagactcatcgagcgaagtgattgataggagaccggatcttgaaatgtccaagtaactaacgttatccgaacacagattagaatgagttatactaatgaaaagttggtt

SEQ ID NO: 5208 - DNA, 353 bp, Glycine max
  Clone ID: LIB3073-003-Q1-K1-B7
ggtaggcaaagagagagagagaaaagcgtgaatcatgtcggacgaagagcatcacttcgattctcaggcggatgctggagcgtccaagacgtatcctcagcaggctggtaccattcgcaagaatggctacatcgtcatcaaatccaggccttgcaaggttgtagaggtctctacgtcaaagacaggcaagcatggacatgcaaagtgtcactttgttgcaattgatatttctaatgggaaaaagcttgaagatattgttccatcatcccacaactgtgatgttccacatgtgaatcgcactgactatcagcttattgatatctctgaagacagctttgtgagtctgttgactg

SEQ ID NO: 5209 - DNA, 352 bp, Glycine max
  Clone ID: LIB3073-003-Q1-K1-A12
ggcacaagtgagtttgttgatcgagataactagaaacagtgtgatgaaaatgaaggtccttgttttcttcgttgctacaattttggtagcatggcaatgccatgcgtacgatatgttccctctccgaatgaacactggctatggtgcccgtactccggaggtgaaatgcgcaagttggaggcttgctgtggaagcacacaacatctttggctttgagaccattcctgaagagtgcgttgaagcaacaaaggaatacatccatggcgaacaatatagatcagactccaaaacagttaaccaacaagcttacttttatgccagagacctcgaagtccatcccaaggacacattt

SEQ ID NO: 5210 - DNA, 78 bp, Glycine max
  Clone ID: LIB3073-002-Q1-K1-F9
agggactgcagtaaagtgaattaacagaaccaatggtgggtattccttcactctacggtgtctctaccaccgaaccat

SEQ ID NO: 5211 - DNA, 295 bp, Glycine max
  unsure at all n locations
  Clone ID: LIB3073-002-Q1-K1-G10
tggggcctagatatactgtgtatcatttcatagcgagagtcattcatagtgcctggataaattggtaaccatctaacatgttataaacacgccgtcgctgagactggcatgactagagcaactgcaccaacggaaacagctatggcgttatagtagagactgagaatagctacatctagactgatgacatggatgctccaacgactgaccatcatgtgaagtgcaaagctggcactaactgcacttgcacggactgcacttgtggccattaangaatatctatgacaatgtaatt

SEQ ID NO: 5212 - DNA, 397 bp, Glycine max
  Clone ID: LIB3073-002-Q1-K1-G11
caggacaccaactccaaaacaaacccacttagatggcttcctgtggatccttgctagagctgctatttgcaagccttatcctcatgcctcaagggcttgctacttactacaaacccattagaagccaccgtgtcaagccttcgtgtcaagccaccgtgtacaaccaccggttataaaccaaaccaccgtttacagccgaaccaccggttacaagccaccatattagaagccaccattcaagaaaccaccttatggaaagtacccttcagtaggggacaacacccatgcctaaagcaagccatgagggctattatctacttaataaattagaggaactgctttgtggtttctaacattgtgatttacaacttcgtagcaatgcatattcttgactctt

SEQ ID NO: 5213 - DNA, 98 bp, Glycine max
  Clone ID: LIB3073-002-Q1-K1-G12
gacagaaagaaaaagccatggcttgtatggcaagcttagctgctgctcaaccatctactgtcaagggccttgctggaacttagctacttttcaagccc

SEQ ID NO: 5214 - DNA, 356 bp, Glycine max
  Clone ID: LIB3073-002-Q1-K1-G2
caacataggtcatcgaaaggatctcgaagacccgccaacgcacgaaagccgggatctttcagaaaatggattcctattcgaagggtgcataaccgcatggataagctcacaccaacccgtcaatttgggatccaattcggttccttaggaggtatcgggaaggaattttggaatgtaataatatcgattcatacagatacagaagaaagggttctctattgattcaaacgctctacctacgagatagggatagagaaagaggaaaaaaccgaggatttcacatagtacttttggtcgaaaaatcgatctgacttttttcgtacttttcgctcaatgatgaaatgggtcagattcta

SEQ ID NO: 5215 - DNA, 332 bp, Glycine max
  Clone ID: LIB3073-002-Q1-K1-G3
gatcgcatgacatagcactcaccctcattaccaaggcgagggcatagccaaaacctactttcgaaggctctgattttcctaatggctccggcagaggcagataagaagccaccagagaagaagccagctgcggaaaaagcaccgacggataagaatccgaaagcacgacaagaagatctcggatgaaggaaggcgcgagaagaaaaagacgcgcacgaagaagagcgtggagacctacaagatctacatcgtcaaggtcctgacgcaggttcaccccgacattggtatcaccagcaaggacatgggcatcatgaacagcttcatcatcgaca

SEQ ID NO: 5216 - DNA, 421 bp, Glycine max
  unsure at all n locations
  Clone ID: LIB3073-002-Q1-K1-G4
gatgttttctgtctgtaatatcaatgttgtccacttctccttccattcctccaccgtcataaacccacccacaaacaatggaaatcaaatcatgcttagttaatactacaacattgaaaaacaattaataaaatagaacttgatgaaatggctcttctcttctccagaagcttccattgtctctggttaccatgctgcaatgttccaccaaaatcttctgaaaggcttcgaatttatgctcctattccacttcccaaaccttgggtcagcttcacacaccatacccgcctgcttcccaatgccacttcttccccaaactctgatcctgaagatnttgatattctctcttcaactgaacattccgatggtaagtttgtgttccggttcgccagtgctaatgagattagagaacaattagatg

SEQ ID NO: 5217 - DNA, 140 bp, Glycine max
  Clone ID: LIB3073-002-Q1-K1-G5
gatagtaagtagcaaggagactagatccggattcggatatcattgcttaaactgcatcattcaccattactgcctatatctttggttgaactaaattcaatttaaaggcctctggagctaaccttagacccatgaatttc

SEQ ID NO: 5218 - DNA, 412 bp, Glycine max
  Clone ID: LIB3073-002-Q1-K1-G9
ggcctagtcatactctgtatcatttcatttcgatgatcatccatagttactgaagaaaatggcaaccatctccgctgctatcacaaccccatcgatcacccgcgcatgtctagtgcaaaaacgttctcttgggttctcatctcccgttcttggtttgccagcaatgggtaaggtgggaagagtgagttgctccatggaagaaaagccttcttctgtgaaagaaagcagctcaagcatgttggggatgggggcatctttgatggcagcgggcagcgccgcaaccatgtcatgcccaaccatggcccttgtggatgagagacttagcactgaaaggacccggctacccttcggcctcagcaacaaccttctcggttggatcccctgtcgcgtcttcggactcatctgggctctc

SEQ ID NO: 5219 - DNA, 312 bp, Glycine max
  Clone ID: LIB3073-002-Q1-K1-H1
agaaggggacacgtcagtttgttgatcgagataactagctacagtgtgatgcaaatgaatgtccttgatttcttcgttgctacaattttggtagcatggcaatgccatgcgtacgatatgttccctcttctaatgaacactggctattgtgcccgtactcctgaggtgaaatgctcaagttggaggcttgctgctgaagcacacaacatcattcgcttctataccatgattgaagagtgcgttgtatcaacaacggaatacatccatggcgaacaatatatttcatactacttaacagctaatcaacaagct

SEQ ID NO: 5220 - DNA, 351 bp, Glycine max
  Clone ID: LIB3073-002-Q1-K1-H10
gagtggtgagggagaagaaaacaaggagaaaaagggagagggtgaagccaaagcagaagaggaatccaaagaagaaaccgcagtgttggagctgaaaaagagtgagtattattacaactcaccaccgaggtattgcatggagttctatgccttctaccctggaccatcgtacccgcctcagatcttcagtgatgagaaccccaatgcctgttctgtcatgcaaaaatggtggaatgtcaggggtaatactgtaacttttgtgggaatatggaatttgagtgagtgatcgattggcattgcctactgagatagatgtgccctactacttcttcttctgtacttttactctaa

SEQ ID NO: 5221 - DNA, 341 bp, Glycine max
  Clone ID: LIB3073-002-Q1-K1-H11
ggatatattatgcctacaacgtaataataaccaaaacagcagagagaagagaaggtgtagacaaacacaatctctaatggcactcaagatgtgggcttcttccactgccaatgcactcaaagtctcttctacctccagacctcatctcttgcatcctttttctttctccagatgcttgtcttccgtcttggatggacttaagtatgcagattcacacgaatgggtcaagcacgaaggctcagtcgccaccattggtatcactgaccatgcccaggaccatcttggagaggttgtgtatgtggagctgccagaatcaagtggcacagttacccagaagtctg

SEQ ID NO: 5222 - DNA, 380 bp, Glycine max
  Clone ID: LIB3073-002-Q1-K1-H3
gacaattgagctagtttcaagtcaccaccatggcacttgttcaaccctttgcttctctttcaatctcttttcgcgatgctcgtgttttcactgcaccaaaatgctctcccaccactcactttcctcatcggaatttggttccaactcgagcatcattcatcgctggttccccactgtcgattcgaagaaatcatggaaggaatggtgcatgcaaagcaatgcctgtttcaatacgatgtgagcacagtacccaggaagggaacagtttagatgtgtggctaggccggctagccatggctgggtctgcagtatccatcactgatgaaattgctaccgccaagggactcctagagaacttttgactcacaagtgcactgtct

SEQ ID NO: 5223 - DNA, 164 bp, Glycine max
  Clone ID: LIB3073-002-Q1-K1-H4
tgggacatctaatctagtcatatgtcgccaccatggcgcctgggcgacaacctactgcggtttcaatcactgtatgcatccctcggcttttaaatggacctaatctctctgagtccaatcgctatcaacatatacaacttgttatcaatccatcttcaatcatt

SEQ ID NO: 5224 - DNA, 351 bp, Glycine max
  Clone ID: LIB3073-002-Q1-K1-H5
ggcacaagtgtttttttttatcgagataactatttgcagtgtgatgaaaatgaaggtcctcgttttcttcgttgctacaattttggtagcatggcaatgccatgcgtacgatatgttccctctccgaatgaacactggctatggtgcccgtactccggaggtgaaatgcgcaagttggaggcttgctgtggaagcacacaacatccttggctttgagaccattcctgaagagtgcgttgaagcaacaaaggaatacatccatggcgaacaatatagatcagactccaaaacagttaaccaacaagcttacttttatgccagagacctcgaagtccatcccaaggacacatt

SEQ ID NO: 5225 - DNA, 258 bp, Glycine max
  Clone ID: LIB3073-002-Q1-K1-H7
gggtctctagtttagttaggtatagcacggatggggcacgagccccaatgtaggtgttatatgagtggcatcttgtggtcgaaatagtcgatgttatagtaggaaatttatgacttactgcattctaaggatatcctacatgagagcattaatctgtgcaaatttttaagcatagattcgaatgctttttaggggctagatatcttttacgggaatgcttatgtctcctacaatctaaggattgatccaatattggga

SEQ ID NO: 5226 - DNA, 158 bp, Glycine max; identical to SEQ ID NO: 4686
  Clone ID: LIB3073-003-Q1-K1-A1

SEQ ID NO: 5227 - DNA, 444 bp, Glycine max
  Clone ID: LIB3073-003-Q1-K1-A11
agacgacagaagggggacagcatatcaataatctattttatactatacccacattttgataattatttttctagttgataagccatggctactcgaggaaagcttgaggttgacgttgatctcaagtctaacgcagacaagtactggcaaacctttaggaactccactgaaatattccccaaggccttccccaatgattacaaaagcattgaggttcttgagggtgatggcaaatcacctggttctatccgccacataagttatggtgaaggttcaccacttgtgaagtcatcctttgagaagattgaagctgttgatgaagaaaagaaggtagtgtcgtacactatcattgatggagaacccctccagcactacaaaacattcaagggagacatttctgtgactccagttggcgatggatgcgaggtgaagtggagtgctgtg

SEQ ID NO: 5228 - DNA, 393 bp, Glycine max
  Clone ID: LIB3073-002-Q1-K1-E10
catgtaaaatgatctatttttcttatctatatagatagatctatctgtattctatcatttacagttgaatatatacaaatatcagtatataacaacatatattaaaaaaataacaacatatattaaaaaagtcagaataaaaaaacaaatcctttatagtatttcttgtaataaatgtgatttttggaatagggataaataaaccatggaaaaatctaagcgactctttatgaaatccaagcgatcttttcgtaggcgtttgcccccgatccaatcgggggaccgaattgattataaaaacatgggtttaattagtcgatttattaatgaacaaggaaaaatattatccagacgccgtaatagatggacctttaaacaacaacgattaataac

SEQ ID NO: 5229 - DNA, 120 bp, Glycine max
  Clone ID: LIB3073-002-Q1-K1-E12
ggcacaagtgagtttgttgatcgagataactagaaacagtgtgatgaaaatgaaaggccttggtttcttcggtgctacaattttggtagcattgcaatgccattcctaccatatggtccc

SEQ ID NO: 5230 - DNA, 417 bp, Glycine max
  unsure at all n locations
  Clone ID: LIB3073-002-Q1-K1-E2
gacagctattcctcttaagcttgctactgagtttccacactgcataccttaggtcttccgaattcgaagttaatttgcaagatggctaaggaaaaggctcagatcaacattgtggtggttggtcatgtggaccctgaggaggcaaccaccattaacgagctgaagaagcctgttgtggagaaagaagctccagggcatgccatatgagggcctgcacgtacggcctcggaggggaaccagaaaattatgttaacaaaataatctggaaccctaatgtatcagtgtcatcatcagtgtgtagtttaagctagctntgctatggttacgttctttgagatgagagtcttgatgaacagtaccattctgatgtattgctttccttngaagttaatgcatgccttctatcttctgtctatt

SEQ ID NO: 5231 - DNA, 340 bp, Glycine max
  Clone ID: LIB3073-002-Q1-K1-E3
acgcatgcgtgcaggcgtccgaaagacaccgctattcctatcaagccagctactgagatcccactcttgagtaccttaagtctaacggattcgaagttaaagctcaaaaccgatcacgaaaatgctcagaccaacattgtagtgcactgtcatggataccctgacgaggcaaccaacattaaccagctgaagaagcctgtcgcggacaactaggctccaaggcatgccatatgatggccagcccataccgactacgaaggcaaccagaacattaagctaacacaataatatggaaccctaatgtatcagtgtcatcgtcaatatgtagtttaagctagct

SEQ ID NO: 5232 - DNA, 338 bp, Glycine max
  Clone ID: LIB3073-002-Q1-K1-E4
gtgaaaacagacgaccgagacagctattcctcttaagcttgctactgagtttacagactgggtaccttaggtcttgcgaattcgaaggtaatttgcaagatggctaacgaaaaggctcagatcaacattgtggaggttggtcatgtgtaccctgaggaggcaaccaccattaacgagctgaagacgcctgttgtggacaaagaagctacagcgcatgccatatgagggcctgcacgtacggcctctgaggggaaccacaagattatgttaacaaaataatcttgaaccctgatgtatcagtgtcatcatcaatgcgtaatttaagctagctttgctat

SEQ ID NO: 5233 - DNA, 321 bp, Glycine max
  Clone ID: LIB3073-002-Q1-K1-E6
cccacgcgtccgaaagacaacggaatggctagcacacacgttaatcccaatcccgagacgggtaccttaaatgtaactgattcccacttcgatctctagatccatcgctacaacgctcaaaccaacagcctatcggacggtcatggataccatgaaccagcaatcagaattaacgaactgaataagcctgttccgcaaatacaagctccacgagatgccatatgatggcctgcacctacagtctcacatgtgaaccagaaaattatgcctacataatcatcttgaaccctaatgtatcagtgtcatcatcaaagagtagtt

SEQ ID NO: 5234 - DNA, 363 bp, Glycine max
  Clone ID: LIB3073-002-Q1-K1-E7
ggcacaagtgagtttgttgatcgagataactagaggacagtgtgatgaaaatgaaggtccttgttttcttcgttgctacaattttggtagcatggcaatgccatgcgtacgatatgttccctctccgaatgaacactggctatggtgcccgtactccggaggtgaaatgcgcaagttggaggcttgctgtggaagcacacaacatctttggctttgagaccattcctgaagagtgcgttgaagcaacaaaggaatacatccatggcgaacaatatagatcagactccaaaacagttaaccaacaagcttacttttatgccagagacctcgaagtccattccaaggacacatttgtgttcagta

SEQ ID NO: 5235 - DNA, 346 bp, Glycine max
  Clone ID: LIB3073-002-Q1-K1-E8
gactgactcactgttctaattcatttctgagatagaattccgttattctctctctctctcttgtttcatcgatgggtggcacagttgttgctgaagtacccacatagaggggaaggggcagaagggccctgaaggagaaaaccccatcaacgaacgatgctaacatcatcatagccacaccaatttcgccatcatccgaaaaggcggcacaagttgttccctcaaagaaaaaacaagattcaaagaagcagcaatctttcgaaaaagaattgctggagatgcaggaaatgctgcagcagatgcgcctcgagaaggagaaggccgaagagctcttgaaggtcaagga

SEQ ID NO: 5236 - DNA, 410 bp, Glycine max
  Clone ID: LIB3073-002-Q1-K1-E9
gagcctcagcagaagcagaacgaggagaagcagaaggagcaaaagcaatggcgccgaagaagccgagaaccacgacaaggaaccctgatttggttagggggattggcaagtattcgaggtcgcagatgtaccacaagaggggcatctgggccatcaaggccaaaaacggtggcgttttgccccgccacgatcccaagcccaagcccgaggccccggcccagaagccgcccaagttctaccccgcggacgatgttaagaagcccctcgtcaacaagcacaagcccaaacccgcgaaactcagggctagcattactccagggactgtgttgatcctgcttgctgggaggttcaagggaaagagggttgttttcctgaagcagctcccatctggattgcttcttgtaactggt

SEQ ID NO: 5237 - DNA, 378 bp, Glycine max
  Clone ID: LIB3073-002-Q1-K1-F1
cgcacgaagaagagcgtggagacctacaagatctacatcttcaaggtcctcaagcaggttcaccccgacattggtatttccagcaaggccatgggcatcatgaacagcttcatcaacgacatcttcgagaagctcgcccaggaagcgtcgcgtttggctcgctacaacaagaagcccaccatcacctcgagggagatccagaccgccgtgcgtctcgtgctccctggtgaattggccaaacacgccgtttctgaagggaccaaggcggttaccaagtttaccagctcttgaattagggtttgttaagcggttgtgttgcagatctagggttttctgtggattttctttcttaaaaaataagttgtagatgtaatgatc

SEQ ID NO: 5238 - DNA, 103 bp, Glycine max
  Clone ID: LIB3073-002-Q1-K1-F11
aaaaggccgccggaagggtcctcttgcaaaaggcctccgaatgggtccggtggggtgatgccaccataagggttctgctttgagcagactactcaatggtacg

SEQ ID NO: 5239 - DNA, 416 bp, Glycine max
  unsure at all n locations
  Clone ID: LIB3073-002-Q1-K1-F12
gattccacacacaagaagactcctcaatcatccatagacatggccaccgtcacttctgcagcagtttctattccctcattcactggcctcaaggcaagcgcaggcaaagtgagtgccgccgcagttaaagtctcagctccccaagccacaaggttctgcggcatcaaggcttccctcaaagacgttggagtcgctgttgtggccactgctgcgagcgcagttctagctagcaacgccatggccattgaagtgccactgngcactgatgacgggtctctggttttctctcccaactctttctccgtggcccctggggaaaagatcgtgttcaagaacaacgcangtttnccccacaacgttgtgttcgacgaggacgagattcctagccgcgtggatgcagggaaaatctncatgag

SEQ ID NO: 5240 - DNA, 359 bp, Glycine max
  Clone ID: LIB3073-002-Q1-K1-F2
gtactcattcctagaccgagttgtcaacttgggacttcctaggacaagagatttccaaggtgtgaaccccaacagctttgatgggcatgggaactacagcattggcattaaggaccagggtgtcttcccagagatcagagctggtgttgttggtaagcctcggggaatggatatctacatcgcaacaacagctaaaaccgaccaagaagcacacaaattgttggctcttatgggtatgcccttcagagagggaagtggtcccgccaccacaattcggaaaaagaagctcaagtctcatcattttgatgcaaaatcaaagggaagaggaaggaagtgacatagttttgatgcaaaatcat

SEQ ID NO: 5241 - DNA, 285 bp, Glycine max
  Clone ID: LIB3073-002-Q1-K1-F3
gagtgtttgggaattttgtataatgtcacagacagtgagtcactgacagtgtttgtgtgtgtctaagagagagagagatggcatcgttttgtgctgcaaggactttcaacattccggcgatgaacgccggcgttcttcgccgccgggcatcgtgggccgccggaatagtctgagcctcggtggccggcgctgcacttttgcgctcttgttcgtctaagcgctctgcgccattcgcttgcatgagcctctctactgataccagtttaaaggaagctgttcaaactg

SEQ ID NO: 5242 - DNA, 436 bp, Glycine max
  unsure at all n locations
  Clone ID: LIB3073-002-Q1-K1-F4
gataagaaagaagatcaaaagaaaaaagagaaacaaatggcagcactgggtggctttaccgacatcaccggagcacagaacagcatcgatatcgaaaatctcgctcgctttgctgttgatgaacacaacaaaaaagagaatgcagttctggagtttgtgagggtgattagtgcaaagaaacaaatggtttctggcaccttgtactatatcactttggaggcaaatgatggtgtgacgaaaaaggtttatgaaactaaggtgttggagaaaccacggttgaacatcaaggaggttcaggaattcaagcccatcactgttgctgttaatcctctttcggtgacggtctagcacatagctaggttatggaagtgactagcttggccgcangagtaataatatgtatgaactgaataaatgtacctattaactctacaaa

SEQ ID NO: 5243 - DNA, 251 bp, Glycine max
  Clone ID: LIB3073-002-Q1-K1-D9
taatttgggaattattgctcccatcgccattggtttcattgtcggcgctaacattttgttgggtggggccttctctggagcggccatgaaccccgctgtgacatttgggcctgctgtcgtgagctggacctggaccaaccactggatctactgggccgggcctttcatcggtggtggaatcgcttgccttgattacgaggttgtctttattagccacacccacgttctgctttgcaccactgactactaga

SEQ ID NO: 5244 - DNA, 376 bp, Glycine max
  unsure at all n locations
  Clone ID: LIB3073-002-Q1-K1-C3
cagctgcaacagtgacagggacaacagctatagttgtggcatcagttaccggaaaagccgccgtggcagctggaactgctatagccaacagtagctactttgccaaaggtgctctttgggtttcagatatgctgacacgtgcagcgaaaacggctgctgatttgggccagaatgaaaagaaatgaaactccaaaaatgaattactgtataatatgttaagttgttgaacacaaacaaatagcagcatttgtttgttgctattgtattataagacgtgaacttgctttacatatgtggctactcatttggtgcaaatgttcatatcagntaattttgagaatccatggtaagcagccaaaaaaaaaaaataannaat

SEQ ID NO: 5245 - DNA, 436 bp, Glycine max
  Clone ID: LIB3073-002-Q1-K1-C4
ggttcccacaaaaaacgaaaacagaaactagaggagcactgaaaaaaaatgaagaagggtttctcccttgtgctgctgattcttctgatccagtacaacaacgttgtcaacgcctgcaacaacaaaaactgtgtcacagatgattgcctcatcggcaacaaggatttggaatcagagttctatttggatcccatgtggccagaatgctctacgatgtgagccaatctgtgagtggcaaaacaggcaataaaaataacaaagctgttaattgtccaaataagcaaggctaccgaagctgcttgccttccagaaacggtggtggccctaagcaaagttgtggcgattacactcaggtttgctaagaactcgttccacccttgtgatttcatttctgattttaagattgtgatatgatggaatctaattatgtcaattg

SEQ ID NO: 5246 - DNA, 225 bp, Glycine max
  Clone ID: LIB3073-002-Q1-K1-C5
gaaggtcacggcaagacgagccgtttctaattagggatagttgtcaagtagaagtgcttttatcaattcatgtgagtcatcttcacataccagaacgacccagaaactctactgctataacctagattcaatgacttactgactcaccaagacgaccaacggttacatttgctagattactagccacagttacagattccaaaacatgacagttttgccactatg

SEQ ID NO: 5247 - DNA, 347 bp, Glycine max
  unsure at all n locations
  Clone ID: LIB3073-002-Q1-K1-C7
gaccaagtgaaccaatatagcccaagccctatacagcgcaaaccctaacacacacccatttgattcagtttccatggctagcctcaaggttgcatttttggctgcagtgctctgcatggttgtggtgagtgcacccatggcacatgcagctatcacgtgcgggcaggtgacgagtagcctggccaattgcatcggttacctccagaagggaggaacgccgtcgtcgggatgctgcaacggagtgaagagcctcaatgccgccgccaagaccaccgtcgaccgccagacggcgtgcaactgcctcaagtcggccgncagccaaatctccggcttcaacgccaacaacg

SEQ ID NO: 5248 - DNA, 299 bp, Glycine max
  Clone ID: LIB3073-002-Q1-K1-C8
gacacaactgaacaagatgagctatccatagcagccaaagaagttaagagtaccttggtcggcctctttctactttgtgcccttaccttttacctaccttcatccaccgctggtgatgtcgtctacactgatggtaattctgttgaaaatggatgcacatactttgtgttgccaacttttatattaaacggcagtggaatagaatatgccacatttgcaaatgaaacttgccctgtcactgttgcgcaatctcgcgatcagatctgcgatggctttcctgaaaccatttcatttccagc

SEQ ID NO: 5249 - DNA, 180 bp, Glycine max
  Clone ID: LIB3073-002-Q1-K1-D10
gaccacattccaaaacacaaacacatacattgtagtatcacttttgtctcggaatttgttcttttgagttatggcaagcttaaaagttgcatgtgtggttttgatgggcatggctgggatgagtgcaccaatgatggtgcaagccgtgtcatggcatgatgtttctgggaacctagcacc

SEQ ID NO: 5250 - DNA, 390 bp, Glycine max
  Clone ID: LIB3073-002-Q1-K1-D11
gcacaagtgagtttgctgatcgagataactagaggcagtgtgatgaaaatgaaggtccttgttttcttcgttgctacaattttggtagcatggcaatgccatgcgtaccatatgttccctctccgaatgaacactggctatggtgcccgtactccggaggtgaaatgcgcaagttggaggcttgctgtggaagcacacaacatctttggctttgagaccattcctgaagagtgcgttgaagcaacacaggaatacatccatggcgaacaatatagatcagactccaaaacagttaaccaacaagcttacttttatgccagagacctcgaagtccatcccgaggacacatttgtgatcagtatagatggcaccgtactctttaatattcca

SEQ ID NO: 5251 - DNA, 425 bp, Glycine max
  Clone ID: LIB3073-002-Q1-K1-D12
gaaaaagagagagagagaaaagcgtgaatcatgtgggacgaagagcatcacttcgattctcagacggatgcgggagcgtccaagacgtatcctcagcaggctggtaccattcgcaagaatggctacatcgtcatcaaatccaggccttgcaaggttgtagaggtctctacgtcaaagacaggcaagcatggacatgcaaagtgtcactttgttgcaattgatatttttaatgggaaaaagcttgaagatattgttccatcatcccacaactgtgatgttccacatgtgaatcgcactgactatcagcttattgatatctctgaagacggctttgtgagtctgttgactgataatggaaataccaaggatgatctgaagcttcctactgatgaggcattgcttgctcagattaaagatggattttc

SEQ ID NO: 5252 - DNA, 309 bp, Glycine max
  Clone ID: LIB3073-002-Q1-K1-D4
gatttagcattataatatcatggtattgaaatcggagacgtagaaacttataattactataataatctctagctcagatattactcactgacaacgagtgactctgactcaacatgtttgcgtacattcactgtcgctatagaccatgtctggcttctttaccagaaagacggacattgacattaattacatggctagccacggattgagagttgcatgcatgcaggcatggactgccaatgacgagttcaactcagagaactcttaatacatgccagacgaggattatgcacaattgtcaaatgatgt

SEQ ID NO: 5253 - DNA, 330 bp, Glycine max
  Clone ID: LIB3073-002-Q1-K1-D6
ggatttcatttcgtttgcaattgaatttgaattggcctaggggcttaatatctcccctcacttgtgcctagccttatgtcatagtattatcattcattctcatctttctctcttctctctccacccaaaccctaactcccgaccctgttcccctctcgtatccgtcatgaaaggaggaaagtccaagaccgaatctaagagagccgatcccaaacttgctgtgaataagaagggagccgccaccaaggctaggaaacccgccggcaaggggaaagcagcgaaagaccctaacaagccaaagaggcctccaagtgctctcttcggtttcat

SEQ ID NO: 5254 - DNA, 343 bp, Glycine max
  Clone ID: LIB3073-002-Q1-K1-D7
aggcgtccgaacacctccgagaggacatctcatggcgagtgccattgaatgtgaatgggcctagatgcttaatatgtcctctcacttgtgcctagccctatgtcataccatcatcattcattctcacctttctctctgctctctccacccaatccctaactcccgaccctgttcccgtctcgtatccgtcatgaaaggaggaacgttcaagacctcatctaagatagccgatcccaaccttactgtgactaacatggcagacgtcaccaatgctaggaatcccttcggcaacggtaaggctcctcaagaccctaacaagccaaagtggcctccaagtgctttc

SEQ ID NO: 5255 - DNA, 429 bp, Glycine max
  unsure at all n locations
  Clone ID: LIB3073-002-Q1-K1-D8
ggtttcataggctcctttttgattacgaaaatgtggaagagaacgggttttgaagaagaagcagttcaattgatcaactcagatttcagggacctaagtctagctgctaatagactcgcccatcatgccatcaaacttggtggcattggctttggagcctcttttttcggattgtttgctgccattgctgctatttatctgttgattttggatcgtacaaactggaaaacaaatattctcacagcactactcattccatacattttcttcagcttgccttcattaattttcgacgtcttcaggggagagcttggaaaatggattgctgcagttgctgttgtattacgccttttccttccaagacacttncctgattggcttgaattgcctggtgctctgattctttctaatcgtgtaactccttctcta

SEQ ID NO: 5256 - DNA, 390 bp, Glycine max
  Clone ID: LIB3073-002-Q1-K1-A12
gacagcagcagagcaaaagaaagaaagaaagaaagtgcaacttcctctgatttgctcccctgtttaagccttatcataagcttagaatggcacacaaggaattttccattgccctagtgactctcattgttctctttgtcaacacgaacctccatggtgccatggctgactatggtggtggttggcagagtgctcatgccactttctatggtgggggtgatgcttctggcacaatgggtggagcatgttggtatggaaatttgtatagccagggatattgaactgacacttgggctctaagcactgctttgttcaacaatggcttaaagctgggatcttgctatgaaatgagatgtgatgatgacccaagatggtgcaaacctggctcta

SEQ ID NO: 5257 - DNA, 363 bp, Glycine max
  Clone ID: LIB3073-002-Q1-K1-A3
gacagcgcacctggtttatcggaacgttgctgtggacgttgttgctttcagatagacacgtgactcactatctatctatgaatcgatatctgcgagctcaaccgaaccaaactccggagctatggcagagctccaaaccaaggttgaacctgttacggtcccggcttcagctccagtggatcccgagccaccggtagctgaagcttccccgctcgagaagaaagcggcggcagtgccaccacctgtttcggctgccgcagaggaaaccaaagctctcgatggtgaggagaaggagaatgagaagataccaaaacctgtataacataacgcctcatgtggatccctcgatagagacattgctct

SEQ ID NO: 5258 - DNA, 260 bp, Glycine max
  Clone ID: LIB3073-002-Q1-K1-A4
gacagcacaacttgtttatcggaacgttgctatgaacgtggttgttttcagataaacacgtgactcactatctatctatcaatcgatatctccgagttcaaccgaaccaaactccgaagctatggcagagctccaaaccaaggttgaacctgttacggtcccggctccggctccggtggatcccgagccaccgctagctgaggctccgccgctcgagaagaaagcggtggcagtgccaccacctgttccggctgcggcag

SEQ ID NO: 5259 - DNA, 241 bp, Glycine max
  Clone ID: LIB3073-002-Q1-K1-A5
gcttgcaaattaagttcattttcctccctttcactctcgtagacatcacagaccttccctccattcatcccacgcatggctgccatgaactctagcgtattggcctgtagctatgccatatcaggtgcagcgtgttcggagctcaatgggaaggtcacttccgtggcctatgttgcatgctctggctacaagttgccattgatcaaagctgaggccagagttcctaaagccaaagaatctg

SEQ ID NO: 5260 - DNA, 168 bp, Glycine max
  Clone ID: LIB3073-002-Q1-K1-A6
tgggacaagaacaagcagcattagcaaccaagcaagagaatggcgacgagtgcttgcttgttcggaactatgatgagcagttacttcctgaggagaaaagcagaggtcacaagcctgaaggccttctccaatgctaacgcagtgtatggcgaaaagggtggacctcca

SEQ ID NO: 5261 - DNA, 323 bp, Glycine max
  Clone ID: LIB3073-002-Q1-K1-A7
ggcacaagtgagtttgttgatcgagataactagaggcagtgtgatgaaaatgaaggtccttgatttcttcgatgctacaattttggtagcatggcaatgccatgcgtacgatatgttccctctccgaatgaacactggctatggtgcccgtactccggatgtgaaatgcgcaagttggaggcttgctgtggaagcacacaacatctttggctttgagaccattcctgaagagtgcgttgaagcaacaaatgaatacatccatggcgaacaatatagatcagactccaaaacagttaaccaacaagcttacttttatgcccgag

SEQ ID NO: 5262 - DNA, 330 bp, Glycine max
  Clone ID: LIB3073-002-Q1-K1-A9
tgccatgcgtacgatatgtgcgctctccgaatgaacactgtctatggtgcccgtactccggaggtgaaatgcgcaagttggaggcttgctgtggaagcacacaacatctttggctctgagaccattcctgatgagtgcgttgaagcatcacaggaatacatccatggcgaacactatacatcagactccgcaacagttaaccgacaagctcactcttatgccagagacctcgaagtccatcccaaggacacatttgtgttcagtatatatggcaccgtactctctaatatgccatactacacaaaacatggatatggggtggagaaattt

SEQ ID NO: 5263 - DNA, 366 bp, Glycine max
  Clone ID: LIB3073-002-Q1-K1-B1
ggtcgtggtcgtttttggctaagcctcgaaatccaaaaaatcttaagcgaagatgatgcacatgaccttctactggagcagaaaggtgaatctcctaatcgattcatggaagaccaacgattggacggactatctcctcactctgctcgcgtgcctcgtcgtcgccgccttctaccagttcctcgagaatcgccgcatccgcctcaagctcatcggctccggaaagcccttcccggcggagatcgaggcccctcttctgcggcggaagctcgccggaaaccgcgtcaaggtgggcgtgaaggtcgccggagcgtttctcttcgggctgagctccgcggtcgggtacttgttgatgatgtcggtgat

SEQ ID NO: 5264 - DNA, 291 bp, Glycine max
  unsure at all n locations
  Clone ID: LIB3073-002-Q1-K1-B10
ggaagcttccataagtaagtatcaatggctttcggagaatcccagaccaagctcgccatcgagcattccactaccggactcatcacgagcgccaagctggcggcagacgcggcgcattctgctctgaagagcgacagcgacaaactggacaaggccaatgtggctgacactgccggcgatcttaatgacgcggtactgaagtatgggaaacttgatgacgtacacggcatanggcagtatgttgacaaggctgctgattatacgcatgattaccaaggtgataataccact

SEQ ID NO: 5265 - DNA, 419 bp, Glycine max
  Clone ID: LIB3073-002-Q1-K1-B11
gattgcaggtgtagcagcagagagtgcggtaggctcttgggagacccgaagcagccatggggatcgatctcaaggccggaggtaagagcaaaaagaccaaaataacagcacccaagtccaatgatatctatctcaagctcttggtcaagctttatcgcttccttgttcggagaactggcagcaactttaatgctggtatacttaagagattgctcatgagcaaggttaacaaactcccattgtctttgtcgagggtgattaagtatacgaatgggaaggaagataagaatgccagtgttggtgggtctataaccgatgatattcgtgtttatgaagttccaccatagaaaggtacagcactcatgtctacagagactgtccgtgcaagaatcgagaaggcatgctgtgaatgcttgacg

SEQ ID NO: 5266 - DNA, 309 bp, Glycine max
  Clone ID: LIB3073-002-Q1-K1-B12
ggatcacaacactgtcacataggaaaagtacttgggttttaaaaaaaattatcttatttgagtgtgatcgatggcatacccaaacccttatccggcgcaaccgtatccctgcacctgcgtgccgatgccagcggtgcccaccgccgtgatcggtccccagttctgtgcgccctacccgctggatctggcggttgtgaagaaggtgatgacgctctacgacggtaactttgtggtcaccgacgtcaacggccacgtcgtcttcaaagttaagggatcgctcatgaccctacgtgaccgcgcatactcgtc

SEQ ID NO: 5267 - DNA, 319 bp, Glycine max
  Clone ID: LIB3073-002-Q1-K1-B5
ggctcacgtcactgtgtcgatcgatatggctagagacagtgtgatgaaaatgaaggtccttgtttgacttgattgctacaattttcctagcatgggaatgccatgcttactatatgttcgcgtctagaatgaacactggctatggtgccacgtactccggatgtgaaacgcgcaagttggatgctcgttctggaagcacacaacatctgacgctttcacaccattcctgaagagtgcgttgaagcaaccaatgaatacatctatggggaacagtatcgatcagactccaaaagagatcgccaacaagcttacttttatg

SEQ ID NO: 5268 - DNA, 392 bp, Glycine max
  Clone ID: LIB3073-002-Q1-K1-B6
gatagcagcatcatacagggcgttgaattcaaaaacttaagttcattccttgtgttttgctttcttcctcaaaaccaaacatgtcgaacacatgcggcaactgcgactgcgctgacaagactagctgcaccaagggaaacagctatggtgttattgtagagactgagaagagttacatcgagactgttgtcatggatgttccagcagctgaacatgatgggaagtgcaagtgtggcactaactgcactagcacggactgcacctgttgccattaaagaatatgtatgaaaatgtaattgccatgtgtttggcaatacaaatatccaaataatggaatcttcgtatgaataaatgtgtgtgctggtatcctacttcaggtctgtgtaagcatg

SEQ ID NO: 5269 - DNA, 419 bp, Glycine max
  Clone ID: LIB3073-002-Q1-K1-B7
gactgcaactttgctctctgtgaggcttcaatttcgaattagggtttcgcttagagtaaccaataaccatgggagtcttcacctttgtcgtccgcaaatccggcagcgaatggagcgccaagcaacattccggcgacatcgaggcctccgccgattccaccttcgatctccaacggaagctcgtgcaagccgctctcgccgttgattcctccggtggagttcagtcctctttctctcccgtgtctcctacctccgctgtgttccaggtgatagtgagtggtgcagtattcgttggaggtggtggtggtgctgttgcagctgcacctgcaagtggtgctgccgcagctgatgcttgcccagctgctgagaaaaaggaagaaaaggtggaagaaagagtccgatgatgatatgggattggg

SEQ ID NO: 5270 - DNA, 277 bp, Glycine max
  Clone ID: LIB3073-002-Q1-K1-B8
gcagtgtgtgagatatctagcgagctagcggttttaaagatcggatttgtgattgggaacgctaacgattgcactgtctctcttcctcttctctttcgactcatacctcattcataatcttccaattcaacaaccttatcctgacactcacccattcccacatctatacgcctatcggcccttccatggctttaaagcgcatcctcaacgagctcaaggacttgcataaagactccaccacttcttgcagttcttgtccagtccactgacgacatgt

SEQ ID NO: 5271 - DNA, 253 bp, Glycine max
  Clone ID: LIB3073-002-Q1-K1-A11
gaccgactcagttgttgtcagcgagtgagtgagtggtttctctgcagcaacaaggtttagccactccaaacagacgagaaatgggtcgtggggtcagtgctggtggtggtcagagttccttaggttatctctttggcaattgggtgcctgcctgcagtgcaaacagtcagcctgctaatggttctcgcactcaaaatgctagtgctcctttaccagccgtctattagcaaagtccagcacctgcatcagcacc

SEQ ID NO: 5272 - DNA, 387 bp, Glycine max
  Clone ID: LIB3073-002-Q1-K1-C11
gaccagaagcagcaccagcaccgttctattcttcttgcaaaatgggtatctctcgtgattccatgcacaagaggcgcgccaccggcggcaagaagaaagcttggaggaagaagagaaagtatgagcttgggaggcagccagcaaacacaaagctatcaagcaacaagacggttaggaggattagggttcgcggtgggaacgtgaagtggcgcgctttgaggcttgatactgggaactactcttgggggagtgaagctgcaacccgcaagacaaggattcttgatgtggtgtacaatgcatccaacaatgagcttgttaggactcagacattggtcaagagtgccattgttcaagtcgatgcaacacccttcaagcagtggtatctgc

SEQ ID NO: 5273 - DNA, 285 bp, Glycine max
  unsure at all n locations
  Clone ID: LIB3073-001-Q1-K1-G1
gaaaagcataactgaagaaaactaagaaaggaaggagggaaggaagaatgaacgtgaaagatgccttcggcgaggctttcagggtcacccaagctcgacgttgctattgacatgggcaatncatttctcaatctcactgttgatggtttccctaagatcggagctgtcgcaggcacgcgatcagctgctgaagatacttatcattatatccgaaacggaatatctcaagtcatgaattcgagaaaacgttgaagaagatgtgtaaagaaggtgtatattggggaa

SEQ ID NO: 5274 - DNA, 262 bp, Glycine max
  Clone ID: LIB3073-001-Q1-K1-G10
gactcaccaagtgaaccaatatagcccaagccctatacaaccaaaccctaacacacacccatttgattcagtttccatggctagcctcaaggttgcatttttggctgcagtgctctgcatggttgtggtgagtgcacccatggcacatgcagctatcacgtgcgggcaggtgacgagcagcctggccaattgcatcggttacctccagaagggaggaacgccgtcgtcgggatgctgcaacggagtgaagagcctcaatgcc

SEQ ID NO: 5275 - DNA, 413 bp, Glycine max
  Clone ID: LIB3073-001-Q1-K1-G11
aatccctctgtcaaggtcaactagtgatgggtatgaggcctctggtggggaagatagtgacagggttcccaccaggattgttcagaggtccacaaattggactaatatgctcttcagtgctgatcagtacgagagaccttttgagccaaaatcatcatctagcgtggtttatagcagaaagttgtgaccaatttgggtgttaattagacaaaactattatcagattatattgatgggaattgttcattctttgatttgtgagcccaaaggtactctctcaccttcaacaacccttaactctctcaccttcttgaggttgagttgatgcccctcaaagtttttggggtaagctaaatgggaagtgggaacccatgtacaaggtttaagtcacaagagctgattgagtattccaa

SEQ ID NO: 5276 - DNA, 367 bp, Glycine max
  Clone ID: LIB3073-001-Q1-K1-G12
gatagcagcatcatacaaagcattgaattcaaaaactaagttcatttcttgtgctttgctttattcctcaaaaccaaacatgtcgaacacatgcggcaactgtgactgcgctgacaagactaactgcaccaagggaaacagctatggtgttatagtagagactgagaagagctacatcgagactgttgacatggatgttccagcagctgagcatgatgggaagtgcaagtgtggcactaactgcacttgcacggactgcacttgtggccattaaggaatatgtatgaaaatgtaattgccatgtgtttggcaatacaaatctccaaataatgtaatcttcgtatgaataaatgtgtgctggtatcct

SEQ ID NO: 5277 - DNA, 156 bp, Glycine max
  Clone ID: LIB3073-001-Q1-K1-G2
cgagggcactcaacattttacactctattcttcttctcgttgtggcttcggtgtcgaatcatggatcaaaaagtcgatttcagctctccgcattccatgggatccactatcatcggcgatacttacaacagctgtgtctatctctgagcctacttt

SEQ ID NO: 5278 - DNA, 345 bp, Glycine max
  unsure at all n locations
  Clone ID: LIB3073-001-Q1-K1-G3
gaagaagaaggagcatggccatgaacatggccatgacagcagcagcagcagtgacagtgattaaactgctgcatcacctatatatttaaaaggtttatgggaccatagtagcgagggctgtgccttaaattctctctctctctctctctctctctctctctctctttttcctttttccctatcttgtgatctatttatgagtgagaaaaacanaagtgagaaattgtgcgtgtaatctggtgctaaatcgagtgctattagtctgtggttgggttggtttgtaaccccgctacttgggttatgtttgattggatattatcctagagaaataaaaattctaaatta

SEQ ID NO: 5279 - DNA, 155 bp, Glycine max
  Clone ID: LIB3073-001-Q1-K1-G5
gttcttccaaaaggcatgaatctaagagtgctggaattgaaatggtgactgaaagggaacaaggagaggttaccgcgagagattaatccttggggtcctcctttgaaaatcctggtccttggaatccgaattcacttaaaccaaaaggcaccaaa

SEQ ID NO: 5280 - DNA, 220 bp, Glycine max
  Clone ID: LIB3073-001-Q1-K1-G6
gactgctattcctcttaagcttgctactgagtttgcacactgcataccttaggtcttccgaattcgaagttaatttgcaagatggctaaagaaaaggctcagatcaacattgtggtggttggtcatgttgaccctgaagaggcatccaccattaacgagcttaagaagcctgttgtggagaatgaagctacagggcatgccatatgagggcatgcacgta

SEQ ID NO: 5281 - DNA, 192 bp, Glycine max
  Clone ID: LIB3073-001-Q1-K1-H1
gaaaggtgcagtgcaaattcaactaacaaaggttcagactactgacatgacgccagaagatacgattcaagcagatctgcaggaactggaccagctccttatacttatgtgccatatggtggagggccaagtatgtaccctggaaaagagtatgctgcgaatggaacatatggtgatcatgcacaacttaat

SEQ ID NO: 5282 - DNA, 284 bp, Glycine max
  Clone ID: LIB3073-001-Q1-K1-H10
ggcacaagtgagtttgttgatcgagagaactagaaacagtgtgatgaaaatgaacgtccttgttttcttcgttgctacaattttggtagcatggcaatgccatgcgtacgatatgttccctctccgaatgaacactggctatggtgcccgtacttcggaggtgaaatgcgcaagctggaggcttgctggggaagcacacaacatctgtggctttgagaccattcgtgaagagtgcgtttaagcaacctaggaattcattcatggggaacaatatagatcagact

SEQ ID NO: 5283 - DNA, 415 bp, Glycine max
  Clone ID: LIB3073-001-Q1-K1-H11
gaacggtaaagcactggcgcagctaccctgaggcttcgcttctcttctcttctctgtcgtgagtcaccatggtgagggttagtgtgctgaacgatgctctgaagagcatgtacaatgctgagaaaaggggaaagcgccaagtcatgattaggccatcctctaaagtcattatcaaattccttttggtgatgcaaaagcacggatacatcggagagtttgagtatgttgatgaccacagggctggtaaaatcgtggttgaattgaacggtagactgaacaagtgtggggttattagtccccgttttgatgtgggcgtcaaagagattgaaagttggactgctaggcttctcccctcaagacagtttgggtatattgtattgactacctctgctggcatcatggatcatgaagaggc

SEQ ID NO: 5284 - DNA, 372 bp, Glycine max
  Clone ID: LIB3073-001-Q1-K1-H12
gattgcaggtgtagcagcagagagtgcggtaggctcttccgagacccgaagcagccatggggatcgatctcaaggccggaggtaagagcaaaaagaccaaaagaacagcacccaagtccaatgatatctatctcaagctcttggtcaagctttatcgcttccttgttcggagaactggcagcaacttcaatgctgttatacttaagagattgttcatgagcaaggttaacaaacccccattgtctttgtcgaagttgattaagtatacgaaggggaaagaagataagattgcagtggtggtggggtctataaccgatgatattcgggtttatgaagttccaccattgaaagttacagcactcaggtttacag

SEQ ID NO: 5285 - DNA, 287 bp, Glycine max
  Clone ID: LIB3073-001-Q1-K1-H3
gacaatcagctaatcccacactctcttttctctacgtacagagaataaaatcatctaagttctaacgatgaatcaccaacaacatatctcctgcagtgactgcatatccagcaggggctcagagcaacctagcagctccaccatcatctgtaagctatcccactaaggatgatcttacttcccaacgaaatgttcctgtcaaaaacactaccaagggtggaggctactggagcggatgctggacgggactacgctatggtagctggtgcatacaatggcttcaatga

SEQ ID NO: 5286 - DNA, 232 bp, Glycine max
  Clone ID: LIB3073-001-Q1-K1-H4
gaagtcacacacatttactcactcactgtgagagcggcgaagaagaagagcaataatgaaggacgccggaaagagccacaaggcgaatgcaaagctgtcgccggagacgcggaaggattggaaatcggcgacggggctgagtggatcgccgaagaagggaggccacggcgggaagttcacgtggatcggcaacggctacgagaacgtcgagatggagcacggtgctatggac

SEQ ID NO: 5287 - DNA, 388 bp, Glycine max
  unsure at all n locations
  Clone ID: LIB3073-001-Q1-K1-F9
gattcaccaatggcgttcaccgtcgccagtggcagtggcgtggctataatcccctgcggcaacaccggcaccgccgcactcttccctcaccgaacgagaagaaacctncacgtggcgcgcacgaagaagcccctcaacggcgacgacgtttccgtttacgctgagctcctcaaagccgaagtttccgttttggaaaataataagcctctcgacgacaacgatgccgctttgaagttcctagagaagatagaccgtcagtttcaacagcccgatttatgggaaggaccccagtggggactggctcgcatcttcatcaagttttcccccatcattggcatcgcttgtgcggcaagtcttgctatctacggttgctttacatttcatgaac

SEQ ID NO: 5288 - DNA, 208 bp, Glycine max
  Clone ID: LIB3073-001-Q1-K1-H8
aagaaggaagctgaagtcatagaagagaagaaggaagtggaagtgacggaagagaagaaggaaattgaagtaacagaagagaagaaagaagcttgaagtcatagaagagaaagaagaagtggaagtgactgatgagatgaaggaaattgaaataacagatgagaagaagaagcagaagtgaaagaagagaacaatgaaggggaagtga

SEQ ID NO: 5289 - DNA, 351 bp, Glycine max
  Clone ID: LIB3073-002-Q1-K1-A1
gacacaactgaacaagataagctatccatagcggcgaaagaaatgaagagtaccttgttcgccctctttctactttgtgccctcacctcttacctaccttcagccaccgctggtgatgtggtcgacactgatggtaatcctgttgaaaatggaggcacatactttgtgttgccaactataatattaaacggcggtggaatagaatatgccacatttggaaatgaaacttgccctgtcactgttgcgcaatctcgcgatcagttctgcaagggctttccgataaccatttcatccccagcccgaatccgtcacatcagcgaaggccttagtttgaacattgggttcactttc

SEQ ID NO: 5290 - DNA, 248 bp, Glycine max
  Clone ID: LIB3073-002-Q1-K1-A10
accgcttacgacagaacaagtctgttgagtgtagaacgctgctgcctaaacccttccggaggcctaatgtaagtgagtaatcagctgttgagaatggtggataaagccaagggtacaaaggaatgacgtgctacccatgagtacactattaacctgcacactcgctttcatggctgcacatataagatgaaagctcctaaagctatttacgtgatagggaaactctatcaacaggccatgtggaccaa

SEQ ID NO: 5291 - DNA, 346 bp, Glycine max
  Clone ID: LIB3073-001-Q1-K1-E10
gagagaaaaatggaagaagacctggacggcgtcgctccgtgctcctccctcgccgtcgaggctatgattcgtgtcggagcggccggtgcaatctggggcttgtgtgctggtccttacgacgctcgtcaacagggtcttagaggctctgctaaagcttcttttgtggcaaagtcggttggcaggtttgggactcgatgcgggtttgtagctggcgttttcagtattacgcgatgcggggttcagaggtaccgagggcggaatgattgggtcaatggtttgattgggggtgctgtagcaggtgcagctgctgctgctgctgctgggacacgaaattggtcacaggtga

SEQ ID NO: 5292 - DNA, 348 bp, Glycine max
  Clone ID: LIB3073-001-Q1-K1-E11
gagagaaaaatgtaagaagacctggacggcgtcgctccgtgcgtcctccctcgccgtcgaggctatgattcgagtcggagcggccgttgcaatctggggcttgtgtgctggtccttactacgctcgtcaacagggtcttagaggctctgctaaagcttcttttgtggcaaagtcggttggcaggtttgcgactcgattcggatttgtagctggcgttttcagtattacgcgatgcggagttcagaggtaccgagggcggaatgattgcgtcaatggtttgattgggggtgctgtagcaggtgcagctgctgctgctgctgctgggacacgaagcttgtcacatgtgat

SEQ ID NO: 5293 - DNA, 187 bp, Glycine max
  unsure at all n locations
  Clone ID: LIB3073-001-Q1-K1-E2
ggtatatcatttacaatttcaatctctctctctctctgactgtgtctctgtagacttagattctgtggatggctgaagtggaagacggacaggtcatcggcgtgcacaccgttgatgagtggaagctgcaactccagaatgcagaagactccataaaactgattgtggtggattntactgctttctg

SEQ ID NO: 5294 - DNA, 409 bp, Glycine max
  Clone ID: LIB3073-001-Q1-K1-E4
ggcacaatgtcaacctcttccataaccgggtggtgcctgttttgcatctccccagccaaaacctctctcaggaaggccacattacgcccttacgtcttcgcaacccttaacactccttcttctgcttcctcttcatcttactgtccctctctcattcaagacaggcctgtttttgctgcccctgcccacatcatcaccccaactgtgagagaggatatggcacaggaatacgagaaagctattgagaactcacaaattgctgaaggagaagagtgaactcaaagcgacagctgctgaaaaagtggagcagaaacagcttctctagggacatcatcatctgatggcatcccatcatcagaagcctcagacaggatcaaagcttggttcattcacttcaagaaggagaaat

SEQ ID NO: 5295 - DNA, 418 bp, Glycine max
  unsure at all n locations
  Clone ID: LIB3073-001-Q1-K1-E6
gagaagcttcaataagtaagtatcaatggcttccgaagaatcccagaacaagccccccagcgagcagtccactaccgaactcatcacgagcgcgaagctggtggcggaggcggcgcagtcggctctgaagagcgacagcgacaaagtggacaaggccaaggtggctgacgctgccggcgatcttctcgacgcggcggngaagtatggaaaacttgatgacaaacaaggcatagggcaatatgttgacaaggctgctgattatctgcataattaccagggtgataataccactgctccttcacagcctgcagagtctaaaggtgaagaaagtggtggtgggttaggtggtcttgcaaacttggctggaggcttcttcaaaaagtagttacaaagcaactaaataagaccttaattgagt

SEQ ID NO: 5296 - DNA, 291 bp, Glycine max
  Clone ID: LIB3073-001-Q1-K1-E8
aagaaggaagctgaagtcatagaagagaagaaggaagtggaagtgacggaagagaagaaggaaattgaagtaacagaagagaagaatgaagctgaagtcatagaagagaagaaggaagtggaagtgacggaagagaagaatgaaattgaagtaacagaagagaagaaggaagcagaagtgaaagaagagaagaaggaaggggaagtgacggaagagaagaaggaagttgaagtgacggaagagaagaaggaagcggaagtgatagtagaagaaaaacaagtgatcgttcat

SEQ ID NO: 5297 - DNA, 415 bp, Glycine max
  Clone ID: LIB3073-001-Q1-K1-E9
gatccatactatcactttcgcatcggtacttctcttttgagttgtcgcgcagacacaaatcagtaccatacgaagcccgacactacgtgaattaagcatgtcgggcataaaggaaacggctttggaccttgcaaagtttgtagacaaaggcgttcaagttaagcttactggtggcagacaagtgacagggactctgaaagggtatgatcagttgcttaaccttgtcctagatgaagctgttgagtttttaagagatcctgatgatcccctcaaaactaccgatcagaccagaaatcttggcttaattgtttgtagaggaactgctgtcatgcttgtgtccccaactgatggtacagatgagatcgccaacccctttatacagccagatgggtcttaagtgtgaagtatttctatc

SEQ ID NO: 5298 - DNA, 86 bp, Glycine max
  Clone ID: LIB3073-001-Q1-K1-F1
ggccattgttgttgctattatcatccgcagctggttttattcgcaccggaaacagtgagccatggccgtcggaaagaacaagcgca

SEQ ID NO: 5299 - DNA, 224 bp, Glycine max
  Clone ID: LIB3073-001-Q1-K1-F11
ggtgcacaagtgagtttgttgatcgagataactaggaacagtgtgatgaaaatgaaggtccttggtttcttcgttactacaattttggtagcatggcaatgccatgcgtacgatatgttccctctccgaattgacactggctattgtgcccgtactccggaaggtgaatgcgcaagtttgaagcttgctgtggaaacacacatcatcttttgcttttagaccct

SEQ ID NO: 5300 - DNA, 196 bp, Glycine max
  Clone ID: LIB3073-001-Q1-K1-F2
ggccattgttgttgctattatcatccgcagctgcttttattcgcaccgcaaacagtgagccatggccgtcggaaagaacaagcgcatcttcaaggggaagaagggtggcaagaagaaggcagctgatccctttgccaagaaggattggtatgacattaaggctccttctggtgttcaagtgaaaaatgttggcaaa

SEQ ID NO: 5301 - DNA, 270 bp, Glycine max
  unsure at all n locations
  Clone ID: LIB3073-001-Q1-K1-F3
gagaaggtaaagaagcaattgacgtgagcggccatccatggtttcgcttcatccacatacactaacactagtgtgccctttgtccgtttcctcttcatcctcccgttttctcagatgctccgtaaattctgccccgaagcgaagaagaagcagcttcattactgcttcgtggcaagagctcgcgggagttttactattctncggggattcctttaactgccgtgaaagctatagctaatagtccgttaggggagtcgcttaaaggaaaat

SEQ ID NO: 5302 - DNA, 303 bp, Glycine max
  Clone ID: LIB3073-001-Q1-K1-F4
gacagcagtaaagtgagttaaaagaaccgataatagttgttgcttcactctccgctctctctgccactgagccaagaagatggcctcacaggtttgcaaatctgcttccagagccgcgaggtcccttctatcctctcgttttcactctcaaggacgtgcgcttggggctgctgcggctggttcattgagcagcaaagtgcctcttttttacggaaagaacggttctggaaatggatccgcttcttcatcatcatcatcatcatggatttcaagagctcttgctctttcttggcgagcttacat

SEQ ID NO: 5303 - DNA, 188 bp, Glycine max
  unsure at all n locations
  Clone ID: LIB3073-001-Q1-K1-F5
gagcgaaacagagagtgatttcagtgagtgatcggtgttcacttgatctcatcataatcgtcagcgtcaattgaagaagatgccgatcagaaacatcgncgtcggaaggcctgaagaggcgactcaccccgacacgttgaaggcggctttggctgagttcatctcaaccttcatcttcgtgttcgccg

SEQ ID NO: 5304 - DNA, 399 bp, Glycine max
  Clone ID: LIB3073-001-Q1-K1-F6
gagtgagccaccgagatccgtcaccgattcatcggggataactagaccttatagtatgaactctgttctacaaatgcacataccgcacatctacatgatatactggaatacatgagaatcaactacaacgatcaagttatagatgcatacgtctaagacgatgtaaaatcaaatcttctttcactcccacataaccatcttagtgctttagcacaagctaacatacacagccacattcagaacattaagtctaatctcacgttagatggtacattcatattgactgttcctactactttgcatgccattctaattgtctggtccactagaactggcaaatatgactttagtgtcactactgctaactttattgacgatactctaaaatgtactatatcc

SEQ ID NO: 5305 - DNA, 408 bp, Glycine max
  unsure at all n locations
  Clone ID: LIB3073-001-Q1-K1-F8
catgtaccctgagcttatcttaccaacaatcttccggtacctcttcttgatcggagtttggtactacagatggaggccaaggcacccacctcacatggacactcacctctcccatgcagattctgcgcatcctgatgaactggatgaagagtttgacacattcccaaccaccaagccttcagacatcgtgaggatgcgatacgaccgacttagaagcattgctgggaggatacagactgtggttggtgatttggccactcaaggggagaggctgcagtctttgctcagctggagagatccaagagccactgccctctttgtgattntctgtctggctgctgccattgtactctatgtcactcctttccaaattgtcgcacttttcactggaatctatgtgttgagaca

SEQ ID NO: 5306 - DNA, 314 bp, Glycine max
  unsure at all n locations
  Clone ID: LIB3073-001-Q1-K1-E1
aggaacgccgtcgtcgggatgctgcaacggagtgaagagcctcaatgccgncgccaagaccaccgncgaccgccagacggcgtgcaactgcctcaagtcggccgccagccaaatctccggcttcaacgccaacaacgccgnctcgctccccggcaaatgcggagtctccatcccctacaagatcagcacctncaccaattgcgctaccatcaaggtttgaagagaaagtcatggacgcaagaaaccggaaactactcactagtatatgagtaagcatattaatattaagaataagatcaagggtgatgagggct

SEQ ID NO: 5307 - DNA, 394 bp, Glycine max
  Clone ID: LIB3073-001-Q1-K1-C11
gaccacaccgagtcgcagaaggagaaaaaagcgatcatagtttcacttcggccttatccagtttagggtttcggttctctaccctatctttcacgtatcgaaaccttaaatttacgatcaggtctgagcaatctggttggtagaacctttggtcttagtgagtcaagttttatgtctgaattagacgatcaaattcctactgccttcgatccttttgctgatgcaaatgctgatgactcgggtgctgggtcaaaggagtatgtgcatattcgtgtacagcagcgaaatggtaggaaaagcctgacaaccgttcagggattgaaaaaggaattcagctataacaagatacttaaagacgtcaagaaagagttctgttgcaatggaacagttgttc

SEQ ID NO: 5308 - DNA, 192 bp, Glycine max
  Clone ID: LIB3073-001-Q1-K1-C3
cggcacagacgagcagaaagcgacagtagggtacagatgtgtcaagacctcataatgtggatgattgtattagttagagaccatgatcctacctccaatatcataacaatgtcaaccatgcgatgtgcaatatctaagtcttcacacacactaaagtgtgataagaaggattacgatatgctctacatagct

SEQ ID NO: 5309 - DNA, 299 bp, Glycine max
  unsure at all n locations
  Clone ID: LIB3073-001-Q1-K1-C4
gagcacttcttagttctcaatcatcaactatttaaaacaatggtcagaggctaacttctccactagttttctgtgtagagagctctntggacaacaccctctaaaccaatctatcaagtcctgattaatctggtgagcatggagctttgttggctcacaaccatccatggttcttgaagagcttggagagaaaggggtgtgagaggagagggtgctcactcctgacactccctcacttgaaacagtnntgntntggcttagcttntggcttctctgatcaacaagggatgtgttctaac

SEQ ID NO: 5310 - DNA, 395 bp, Glycine max
  Clone ID: LIB3073-001-Q1-K1-C6
gacaagtgagttagttgatcgagataactagaaacggtgtgatgaaaatgaaagtccttgttttcttcgatgctacaattttggtagcatggcaatgccatgcgtacgatatgttccctctacgaatgaacactggctatggtgcccgtacttcggaggtgaaatgcgcaagttggaggcttgctgtggaagcacacaacatcttgggctttgagaccattcctgaagagtgcgttgaagcaacaaaggaatacatccatggcgaacaatatagatcagactccaaaacagttaacctacaagcttacttttatgccagagacctcgaagtccatcgcaaggacacatttgtgtacagtataaatggcaccgtactctctaatattgcatactac

SEQ ID NO: 5311 - DNA, 352 bp, Glycine max
  Clone ID: LIB3073-001-Q1-K1-C7
ggcacaagtgagtttgttgatcgagataactagaagacagtgtgatgaaaatgaaggtccttgttttcttcggtgctacaattttggtagcatggcaatgccatgcgtacgatatgttccctctgcgaatgaacactggctatggtgcccgtactccggaggtgaaatgcgcaagttggaggcttgctgtggaagcacacaacatctttggctttgagaccattccttgagagtgcgttgaagccacaaaagaatacatccatggcgaacaatttagatcagactccaaaaacggtaacccacaagcttacttttatgccagagacctcgaagtccatcccaaggacacatt

SEQ ID NO: 5312 - DNA, 327 bp, Glycine max
  Clone ID: LIB3073-001-Q1-K1-C9
gcacaaccaactgccttgcccggttggccaaggttatcaatgacaggtttgccatggttaagggttgaataaccctggtcaattcatcactggtaccccaaagactggtgatgggccatcagccaaagactggagaagtggaaaagctggttcatttaacatcattcctagcaacacttgagctgccaaagctgttggaaaagtcctccctgctttgaatggaaaattgactggtatggcattccgtgttcccactgtggatgtctcttgtgttgacctcacagtgaggctggagaagggagccttctacgatgaaatttaaaatgc

SEQ ID NO: 5313 - DNA, 262 bp, Glycine max
  Clone ID: LIB3073-001-Q1-K1-D1
cggattcccggtcgaccacgctcgtacgtgcagagacacggaaggggccagtgagttgttgacagatactagaacatggtgtaaaatgaagtccttggtttcttcgttgctacaattttggtagcatggcaatgccatgcgtacgatatgttccctctccgaatgaacactggctatggtgcccgtactccggaggtgaaatgcgcaagttggaggcttgctgtggaagcacacaacatctttggctttgagacccattctg

SEQ ID NO: 5314 - DNA, 317 bp, Glycine max
  Clone ID: LIB3073-001-Q1-K1-D10
gacaagtgagtttgttgatcgagataactagaaacagtgggatgaaaatgaatgttcttggtttcttcgttgctacaattgtggcagcatggcaatgccatgcgtacgatatgttccctctccgaacgaacactggctatggtgcccgtactccggaggtgaaatgcgcaagttggaggctcgctgtggaagcacacaacatctttggctttgagaccattcctgaagagtgcgttgaagcatcaaaggaatacattcatggcgaacaatatagatcagactacaaaacagttaaccaacaagcttactgttatgtc

SEQ ID NO: 5315 - DNA, 405 bp, Glycine max
  Clone ID: LIB3073-001-Q1-K1-D11
ggcgcctgatttctcagttctcacactcattccgtgctctaaatctcaaattctagggttagggttcccaatttctccgccaatcagaagatgagttccaccggtggttctaccaagggcggaaggggcaagcccaaagcctccaaatccgtttcaagatcgcagaaagctggtctccaattccccgttggaagaatcgctcgattccttaaggctgggaaatacgctgagcgtgttggtgctggtgctcctgtgtacctctctgcagtgctcgagtatctcgctgctgaggttttggaattggctgggaatgctgctagggataacaagaagaatcgtattgttcctaggcacattcagcttgctgtgaagaacgatgaggagctgagcaagcttttgggatct

SEQ ID NO: 5316 - DNA, 236 bp, Glycine max
  Clone ID: LIB3073-001-Q1-K1-D2
ggaaacccacatcatgagcacactttgtatggcggaaaatatgaaggaggtggaagttgatgatggatatgtcttgaaagaagagatccatctcacggtgctaaaaacctctctgttcttcgcgggcgatggcttcagcgtctacgattgcaaaggtcaactcgtgttcagagttgactcttatggacccgacactcgcgacatagacgaactcgttctcatggatcctaacggac

SEQ ID NO: 5317 - DNA, 289 bp, Glycine max
  Clone ID: LIB3073-001-Q1-K1-D3
gggtggaaaatttgcagagatcaaagaacagaagatggcacaaacgctggcaatgcccgtggcaccttcgctcgctatcatctccaattctcgcctctccaagacactctccgttcccgttctcaacaacccaaagtttcaagggttaagcatcaagtgcgttcgtgttggaggtgtggagattccgaacaacaagcgaatcgagtactcgctgcagtacattcatggagttggcaggaccagagcaaaacagattctgtgtgatatccaaatggataacaaaatcacg

SEQ ID NO: 5318 - DNA, 141 bp, Glycine max
  Clone ID: LIB3073-001-Q1-K1-D4
ggagttggttggtatttgtttctgttgttggctgtgcgatggctcatctcacctatgctcatcatcgctgcgaaagacaatggagctgacacctcagcagctgagccattacatctgctcggacccatcgaagccgatcta

SEQ ID NO: 5319 - DNA, 427 bp, Glycine max
  Clone ID: LIB3073-001-Q1-K1-C10
aggaacgccgtcgtcgggatgctgcaacggagtgaagagcctcaatgccgacgccaagaccaccgacgaccgccagacggtgtgcaactgcctcaagtcggacggcagccaaatctacggcttcaacgccaacaacgccggctcgctccccggcaaatgcggagtctccatccactacaagatcagcacctgcaccaactgcgctaccatcaaggtttgaagagaaagtcatggacgcaagaaaccggaaactactcactagtatatgagtagcattattaatattaagaataagatcgaaggtgatgagggctccacttatatgcccctctcctcttgtatgagagatttgcattggatagctttaagttgtgttgcgctggtatctctctgtatgagttacacatagatatatctactgtaatat

SEQ ID NO: 5320 - DNA, 412 bp, Glycine max
  Clone ID: LIB3073-001-Q1-K1-D6
gaacgaaaaaccgtgtttcactcggatcgcgcattcacaaataaggttgaagagggccctgccggaagaagaataataccgtctttcattttccggcgatctcttttttcttccatcacccgtttcccggctatccctaaacccttaacagaaatgacgacatcaagcgccttgggacaggaagtggagaagtttgagaaaaacatcaccaaaagaggatttgtgccagacacaaccactaaaaaggggaaagactaccctgttggcccagtgttgctcggtttcttcgtctttgttgtcattggatcatctctcttccagataatcaggacagcaacgagtggaggcatggcttaaatggagctttattttggattgtgtcatcatctcttagcctcctcgtagaaaatgc

SEQ ID NO: 5321 - DNA, 301 bp, Glycine max
  unsure at all n locations
  Clone ID: LIB3073-001-Q1-K1-D7
gacggttcacgagattgctgcgagctataacctatgttatcgtgcggcgaatatgaactggtgcgatatcactgctgctggattcggtttggtaacatcgacataccatgcngcatgctaccgacggttccctctacgaatgaaaactgactacggagagctgcctttgcaagtagactgcgcaaggtttaggcttgctgtggaagcacacagcatccgatcctttaagaccattccatgggactgcgttgaaccaacaacggactgcattaatggcaaacaatatagatcatactctaat

SEQ ID NO: 5322 - DNA, 378 bp, Glycine max
  Clone ID: LIB3073-001-Q1-K1-D8
cttcgagaagcttgctcaggaatgttccagacttgcccgctacaacaagaagcccaccgtcacttcaagggagatccagaccgcggtcaggcttgtgctgcccggtgaactggccaagcacgcccgtttctgagggtaccaaggccgtcaccaagtcaccagctcttgaacaaaatatcttaactgtggttacctcgctcttgttttgcttcatgtgtatctgttaggtctagcgaccctatgtttaggtttgaactggtagctttttggtttttaatctgtaagtgaagaattaggattgggttgatcctctgtgtatggaattggtagaattgatcatataggagcaatttgataaaaggaatggttgtttatgaa

SEQ ID NO: 5323 - DNA, 334 bp, Glycine max
  unsure at all n locations
  Clone ID: LIB3073-001-Q1-K1-D9
cagggacaccaacaccgaaacaaagccactaagatggcttacttgggatccttcctagtgctgctatttgcagcccttatcctcatgcctcaagggcttgctacttactacaaaccaattaagaagccaccactgtacaagcctncagtgtacaagccaccagtgtacaaaccaccggcttataagcccaaaccaccggttcacaagccgaaaccaccgggttacaagccaccatattagaagccaccatacaagaaaccaccttatggaaagtaccctgcagtataggacaacacccatgcctaaaagcagcaatgaggtctattatctactt

SEQ ID NO: 5324 - DNA, 271 bp, Glycine max
  unsure at all n locations
  Clone ID: LIB3073-001-Q1-K1-A1
gcccttctaaaaccttatctctttgagttatcctcggccatggcgtctctactgctagcatcaccttctccactctccgttcaattgcacaattncacctgtcacctttccttctctcactcccaaactctntcctcaccgctctccacttcctttccttctctctcagcctctgcaaccaccactctcttcccaaccccttctgtgtactgtggcagaagggacaggaaaactgcaaagggaaagcgcttcgctcattcatttggaaatg

SEQ ID NO: 5325 - DNA, 416 bp, Glycine max
  Clone ID: LIB3073-001-Q1-K1-A10
gacaccaacaccaaaacaaacccactaagatggctgcctttgtatccttcctagtgctgcttcttgcagcccttatcctcatgcctcaagggcttgctacttactacaaaccaattaagaagccaccagtgtacaagcctccagtgtacaagccaccagtgtacaaaccaccggtttataagccaaaaccaccggtttacaagccgaaaccaccggtttacaagccaccatataagaagccaccatacaagaaaccaccttatggaaagtaccctccagtagaggacaacacccatgcctaaagcaagcaatgaggtctattatctacttaataaataagaggaactgctttgtgttttctagcattgtgatttacaacttcgtagcaatgcatattcttgactcttgcatgcact

SEQ ID NO: 5326 - DNA, 256 bp, Glycine max
  Clone ID: LIB3073-001-Q1-K1-A11
tgatagaattagcacaaagagaagcattatcaaatgcgggaggaactagtctaagcagagatggcctcttcagtgatggcatttgtggcctctaaacctgccactttcactgttgagaagtcctcagttagaggccttccctccctctcaaggaactcctcttcattcagagttgtggccagtggtggcaagaagatcaagactgacaagccttatggaatttacggtggcatgtctttgaaggcacgattcgatg

SEQ ID NO: 5327 - DNA, 422 bp, Glycine max
  Clone ID: LIB3073-001-Q1-K1-A12
gaccgcaaactctctctgtaaagtgcaaagcctctattgtttcttgtgaatttgaaggacgatgagttccacagaggtcgcagccacaacgaagaagggtggaagagggaaacccaagaccacaaagtccgtttcccgttcctccaaagccggccttcagttccccgtcggccgcgtcgctcgctacctcaaggccggtcgctatgcccagcgcgttggttccggttcccctgtttacctatctgcggttctcgaataccttgccgctgaggttttggagcttgccggcaacgctgcgagggacaacaagaagacgaggatcgttcctaggcacattcaacttgcggtgaggaacgatgaggagttgagcaagctgatggggtctgtgaccattgccaatggtggtgttctgcctaacattc

SEQ ID NO: 5328 - DNA, 305 bp, Glycine max
  unsure at all n locations
  Clone ID: LIB3073-001-Q1-K1-A3
ggagtttgttgatcgagataactagaaacagtgtgatgaaggtgaangtccttgttttcttcgttgctacaattttggtagcatggcaatgccatgcgtacgatatgttccctctccgaatgaacactggctatggtgcccgtactccggaggtgaaatgcgcaagttggaggcttgctgtggaagcacacaacatctttggctttgagaccattcctgaagagtgcgttgaagcaacaaaggaatacatccatggcgaacaatatagatcagactccaaaacagttaaccaacaagcttacttt

SEQ ID NO: 5329 - DNA, 165 bp, Glycine max
  unsure at all n locations
  Clone ID: LIB3073-001-Q1-K1-A4
gaccttcacagaagcaattaatcatattcctctctcattctcactataaacacaaaacccttcccatcctaattaatgtgaaaatgaatgcatcacccattgcttggttcacttttgtggttgtgtntcttgtggctgaagttcaagtttcaatggcagtgacat

SEQ ID NO: 5330 - DNA, 419 bp, Glycine max
  Clone ID: LIB3073-001-Q1-K1-A5
gcgagaagacgacagacggggagagaaagagagagaaagatgtcgaagcgtggtcgtggtggttcggcggggaacaagttccgcatgtcgctgggtcttccagtggcggcgacggtgaactgcgccgacaacacgggggcgaagaacctctacatcatttcggtgaaggggatcaaaggccgtttgaaccgtcttccctcggcctgcgttggcgacatggtgatggccaccgtgaagaagggaaaacccgatctgaggaagaaggtcttgccagctgtcatcgttcgccagcgcaagccatggcgccgaaaggactgcgtctacatgtacttcgaagataatgctggtgttattgtcaatcccaagggagaaatgaaaggttctgctatcactggtcccattggaaaagagtgtgctga

SEQ ID NO: 5331 - DNA, 321 bp, Glycine max
  unsure at all n locations
  Clone ID: LIB3073-001-Q1-K1-A8
gcatttcgataatcatccatagttactgaagaaaatggcaaccgtctccgctgctatcacgaccccatcgatcacccgcgcatgtctagtgcaaaaacgttctcttgggttctcatcttccgttcttggtttgccagcaatgggtaaggtgggaaaaaggaagtgcttcatggaggaaaagcctcttctgtgaaggaaagcagctcaagcatgttggggatgggggcatctttgatggcagcngncagcgccgcaggcatgtcagggcccagcatggccttgtggatgagagacttagcactgaaggaaccgggctaccct

SEQ ID NO: 5332 - DNA, 382 bp, Glycine max
  Clone ID: LIB3073-001-Q1-K1-A9
gaacacgagtgaaagtacaagttgcaggaatggcctcaacctcctcctccacactctctatatcctcttcatccacccttgttgatgccaaggctccaagtccaagacaatccccacaatgtgtctcccctccacctgttcactctccttggaagaccactgctttctgtcgcaggattgcaagcaatgttatggcaatggttaccaccagagaggcacccgcagcagaagttgccacgaccgagctctctgttgccgagacgccagagattgtgaagactattcaagaagcttgtgacaaagttggagacaaatatgcagtgagttcacttgccgtagccggtgtggttgcattggttggctcagctggcatgatctcagc

SEQ ID NO: 5333 - DNA, 379 bp, Glycine max
  Clone ID: LIB3073-001-Q1-K1-B11
aacgtcgcatcagaagaacacatagcagtgaactgtggaggagaagcatatggcttcctcaaccatctctgacccagctgttaccagctgtcaaccatgcacaagcagacatagttactacattcactgacctaaagtccaagactgccttaccaaccagaaacaccaacaatgacattacctccattggtagcaacactggaagagtgcacttcatgcaagcgtatccagcacataacaagaacaacactgacactgtttcctacctggcacacctttatgatgcacaatagtcaaaggatgaagaataccttattatgaacggatggatgaattgcttgcaattcaagtaggagcaccgtatctactaccataagca

SEQ ID NO: 5334 - DNA, 100 bp, Glycine max
  Clone ID: LIB3073-001-Q1-K1-B6
gtccacgcgtcgccaccgtcgccaccgttcacgctgcaaagacacagaagggggagatcatctttaacaaaaatgaatgcttagaagagagctatatatt

SEQ ID NO: 5335 - DNA, 403 bp, Glycine max
  Clone ID: LIB3073-001-Q1-K1-B9
gagggttttgagtgcggcggtccaaacactcttctgtgcagcttttgcctacaactcccttcaccatggctgaacaaaccgagaaagcttttctgaagcaaccaaaagtgtttctcagcacaaagaagactgggaagggaaagagacctggaaaaggtgggaaccgcttttggaagtccattgggcttggatttaagactcccagggaagccatcgaaggaacctatattgacaagaagtgccccttcactggcaatgtttccatccgtggccgtatcttggctggaacatgtcacagtgctaagatgaacaggactattattgttagaaggaattatctccattttatcaagaagtaccagaggtacgagaagaggcactcaaatattcctgctcatatatc

SEQ ID NO: 5336 - DNA, 201 bp, Glycine max
  Clone ID: LIB3073-001-Q1-K1-C1
tgcacaaagtaagttgttgatcgcgataactagaaacagtgtgatgagaatgaatgtccttgctttctatcgtgctacaattttggtagcatggcaatgccatgcgtacgatatgttccctctccgaatgaacactggctatggtgcccgtactccggacgtgaaatgcgcaagttggatgcttgctgtggaagcacacaa

SEQ ID NO: 5337 - DNA, 313 bp, Glycine max
  Clone ID: LIB3073-001-Q1-K1-A6
tgactccaagaacaacaccacaggatctagaaaagcccttccatcttcaccacccaaaaagaaaataagggcaatggccagtgcaacaacttcagccacaatcactgtgggggcaatttccagggttgccggcccaaaagaaagggagaggaatgtgcacttcatcaaaggtttgaattcctttggagggttgaaggctcaaaacagtgtgacatcactaggtcttcctgtgtgcactgaacagtgtttcgcagatgtggagagcccattgaaatatcaatcatcatctaaggccaaatgtggaggcgctgcc

SEQ ID NO: 5338 - DNA, 383 bp, Glycine max
  Clone ID: LIB3073-001-Q1-K1-A7
attgaagaagagggagatagtgtggaagatgaaggagcaaacccgtgtgagattgcgacaaataattaaacgtgcttcagtggacaccgttgaagtagacaagataaggaattttctgaatggagaaaaattacgtgtgtggttaaatttacttttacttatttcggaaaaaatagtcctttatttttttttcattgttttagacttcaaattgtgattatttcttaaggaaaacaaatgttgggtatagtatagtcattcaattttctatttttcggatggggttgtaacatgctactgaaaaaaattgtcatagattgatgacattaaagacgaaaaaatttaaaatttcgaactattaaaaagcggcgctctagaggatc

SEQ ID NO: 5339 - DNA, 56 bp, Glycine max
  Clone ID: LIB3073-001-Q1-K1-B5
ttcggcttgcagaagacgactcaagggtaccgctgccaaaagacctcaggaaggtt

SEQ ID NO: 5340 - DNA, 359 bp, Glycine max
  unsure at all n locations
  Clone ID: LIB3073-001-Q1-K1-C12
gatacttactgagtgcttgcagttgctgcgtcgcaaggtaccggcggcgacggagagctatcttctcaatttccgatcactgcattggttctgttgacgagggttttgttctacttgacttgcatacttgatggcgtcaaagttgcagaagttgcagtccgcagcatgtcaagcatctcaatttgtatccagtcgtggaactaactactacaggcaattgctggaacagaacaagcaacacattcaggagcctnctacagtagagaaatgcaacctgctggcaaagcaattgttttacacccgccttgctagtattccgggtcgtaatgagtccttttggaaagaacttgattatgtca

SEQ ID NO: 5341 - DNA, 91 bp, Glycine max
  unsure at all n locations
  Clone ID: LIB3073-001-Q1-K1-C2
ggaggcttcaataagtaagtatcaatggcttccgaagaatcccagaacaagcccnccagcgagcagtccactaccgaactcatcacgagcg

SEQ ID NO: 5342 - DNA, 56 bp, Glycine max
  Clone ID: LIB3073-001-Q1-K1-D5
tggtacgggttcgaaaagaccaccgaagggtaccggttccaaaagacgacagaagg

SEQ ID NO: 5343 - DNA, 239 bp, Glycine max
  Clone ID: LIB3073-001-Q1-K1-E12
ggcacaagtgagtttgatgatcgagataactagaaacagtgtgatgaaaatgaaggtccttgttttcttcggtgctacaattttggtagcatggcaatgccatgcgtacgatatgttccctgtccgaatgaacactggctatggtgcccgtactccggaagtgaaatgcgcaagttggaggcttgctgtggaagcacacgacatcgttggctgtgagaccattcctgaagagtgcgttg

SEQ ID NO: 5344 - DNA, 317 bp, Glycine max
  Clone ID: LIB3073-001-Q1-K1-E7
gttcttcacaatgatgttgtttgagtctttcaatatattgggggtccgaaggtagggtattaggtgtttcaatattggagatcctagtgttgggctgggctatcaaacaaaatattatgaagaaactagcatgacttgatggctgaaaatcaagtgtattaaataaagatttgtgtggatgtaattcatcatatattgtattgatttgaagtgtatgtcggtttacaatatacatgtaaactttcaattcgatgtaattgaagttaaattataattttgattccccaaaaaaaaaaaaagtcgattcaaagaaaaag

SEQ ID NO: 5345 - DNA, 390 bp, Glycine max
  Clone ID: LIB3073-001-Q1-K1-F12
gatggtgcaacacaacacaaaagtcacaatcacaaatctgagtatagtggagtagggtttttttgcgtttgagagaagcatgagcaggagtttgggaattccggtgaagctgctccacgaggcttcggggcacgtggtgatggtggagctcaagagcggagaactctacagaggcagcatgatcgagtgcgaggacaactggaactgccaactcgagagcatcacctacactgccaaggatggcaaaacatcgcaacttgagcatgtttttattcgaggaagcaaagtcaggtttattgtcgtcccaaacatgctgaagaatgcgcctatgtttaagcgtttggatgcaagaatcaagggcaagggtgcatcacttggtgttggtagggg

SEQ ID NO: 5346 - DNA, 62 bp, Glycine max
  Clone ID: LIB3073-001-Q1-K1-G7
attaccaatgacaaaaaaaaaaaaaaaaaaaaaaaaaaaaaagcggccgttttaaaggatcc

SEQ ID NO: 5347 - DNA, 104 bp, Glycine max
  Clone ID: LIB3073-001-Q1-K1-G8
ccacgcgtccgaacacgcgtacacgcgactagtatacgactacatcaagactccgctacgcggagacctcagaaggatactccttcgataagacgacggtacga

SEQ ID NO: 5348 - DNA, 108 bp, Glycine max
  Clone ID: LIB3073-001-Q1-K1-H5
ggtctcaagcgggcatggcgatggcaacccaagcctctctcttaaccccacccctcttcggtctcaaagccagcgaccgagccttcgtgccatggaaacaaaacttca

SEQ ID NO: 5349 - DNA, 98 bp, Glycine max
  Clone ID: LIB3073-001-Q1-K1-H7
tacagtgactcaatgcaatatttagaaccgccatacaagttaacgtctatactatctctcattaacgttagcactatacatataacagtctgctttac

SEQ ID NO: 5350 - DNA, 98 bp, Glycine max
  Clone ID: LIB3073-002-Q1-K1-A2
ggctgtggtaagagaagagagagaagggttaggtttttctttctctctctttctctttgtgtttttgtcttctgtttttgacacaaaaaaacaactat

SEQ ID NO: 5351 - DNA, 81 bp, Glycine max
  Clone ID: LIB3073-002-Q1-K1-B4
tacgggttgtagaagaccaccgaaaggggatgggtattggacacattcttcaacgactgggtttttggatcggaacctctt

SEQ ID NO: 5352 - DNA, 309 bp, Glycine max
  Clone ID: LIB3073-002-Q1-K1-C2
cacacgcgtgcgaatacgagcgaccggtctagaggatgcacgcgtacacaagagctcatggggaggtgcagatggcttcctgagtgatctcttgctaatctattaccactggcaaccgttccggtaccagcatggttgctccattcactggcactaagtccatggctgacttctgcatcaggaataccaacgatgacattaccataattgctagcaacggtgcatgagtgcaatgcatgcatatgtggacacctgttagcatgaagcagattgatactgattcatacctaccagacattgatcatgcac

SEQ ID NO: 5353 - DNA, 91 bp, Glycine max
  Clone ID: LIB3073-002-Q1-K1-C6
tgagcgccaatgtttttttagaggagtttcatcttgtaatcaaaagaggttatcttatagtaggaaatcgatgtcttactccattttaagg

SEQ ID NO: 5354 - DNA, 109 bp, Glycine max
  Clone ID: LIB3073-002-Q1-K1-C9
ggcaagagtttgttgtgagctataagctagtttatcgtgaggagaatatgaagttgcttgttatctttgttgctgcagtagttctggtagcatggccatgccatggcgc

SEQ ID NO: 5355 - DNA, 247 bp, Glycine max
  Clone ID: LIB3073-002-Q1-K1-D2
gaaaaaagctgcttacactgggaagttctacacgatcgagtgtgcattgatcgagtgagcttggtcttttgtagattggatagatgtgcaatggaaagagggtggaaaagagcggtaaggaggagggcggcgcccaaaaaaaaaaaaaaagcggccgatctaaaggatgccggtttacaggatccaagcttacatacgcttgcatgcgaattgatagatctaatatcaagtcacttaacttcaattt

SEQ ID NO: 5356 - DNA, 245 bp, Glycine max
  Clone ID: LIB3073-002-Q1-K1-D3
gaagacactacatttcatccaatatttgaacaatattgtaggccggcttgttacgttgatgagcactatttccccaccatgctcaccattcaagcagccaatgtgttggcgaacaggagcataacttgggtggactggtctaggggtggagctcaccctgctacatttggaagaaatgatatcactgaggagtttttcaatcgagttcgcagaggtcacacttgcctatacaacaatagaaactc

SEQ ID NO: 5357 - DNA, 356 bp, Glycine max
  Clone ID: LIB3073-002-Q1-K1-D5
gacacagctattcctcttaagcttgctactgagtttccacactgcataccttaggtcttccgaattcgaagttaatttgcaagatggctaaggaaaaggctcagatcaacattgtggtggttggtcatgtggaccctgaggaggcaaccaccattaacgagctgaagaagcctgttgtggagaaagaagctccagggcatgccatatgagggcatgcacgtacggcctcggaggggaaccagaaaattatgttaacaaaataatctggaaccctaatgtatcagtgtcatcatcagtgtgtagtttaagctagctttgctatggttacgttctttgagatgagagtcttgatgaac

SEQ ID NO: 5358 - DNA, 401 bp, Glycine max
  Clone ID: LIB3073-002-Q1-K1-E5
gaagcacaaacattattcccaatccttatcctgtttgcttcaatggaagtgatttccgcttcgagcttgaatcccaacgctccgatgttcgtgcctctcgcctatcggacggtggaggatttctccgaccaatggtgggacctcgtccactcctccccctggttccgcgactactggctccgcgagtgcttccaagatccccagtaccaatacgacgacgttttcgacttcgactttgacctagatctccaagataaagatgaaaatgaagggaaggaagggaaagaagtggtgtcgttgggggtgctcaaatggcgaagctgtggaggaggatgggccgaagcgccgaggtatgtggaaaaagcccctaagtttgtgaagcccaaggtgagcccacgggc

SEQ ID NO: 5359 - DNA, 85 bp, Glycine max
  unsure at all n locations
  Clone ID: LIB3073-002-Q1-K1-F10
acaaataaaacatttggtttatttagtgacactgtaatttccccttacaaaaaaaaaaaannnananaaannnanannaaanaaa

SEQ ID NO: 5360 - DNA, 186 bp, Glycine max
  Clone ID: LIB3073-002-Q1-K1-F7
aagcatactaccacacctcaatctgatttcaaaccacagaagattaactgccggtctagtataatcacacatacggactcttacttacaatgtcattgcttatctattatataccctaaattcattttactggccttcaatttacatcatcattactgcgaaaaccatgcccttacctaacttaat

SEQ ID NO: 5361 - DNA, 245 bp, Glycine max
  Clone ID: LIB3073-002-Q1-K1-F8
gggaggagagcttaaaaaaacaagatgacaaataaagtataagtgcggggggtcaaactgggtgtatataatcggatcattataagacaactctttcttttgaggtttcaaagaatgattttcgaattcgattgaatctaaaacacaaaagaattggtttacaggatagaagaaacccacgtatatgtgataggatattctatatgaactagttatatatgaactaaccatatccatatatatta

SEQ ID NO: 5362 - DNA, 125 bp, Glycine max
  Clone ID: LIB3073-002-Q1-K1-G7
aagtatacgaacacgtccgactcaacttcttaatctaaataacataaaacagggtaaggtaaatgaaagaacatgttttgttcaatcctacaatcctaatagccttgctagaacttacctaccat

SEQ ID NO: 5363 - DNA, 77 bp, Glycine max
  Clone ID: LIB3073-002-Q1-K1-G8
gagacctcaggtcaggcggggctacccgctgagtttaagcatatcaataagcggaaaaaaaaatgaatggagaatgg

SEQ ID NO: 5364 - DNA, 184 bp, Glycine max
  Clone ID: LIB3073-002-Q1-K1-H6
tgggagcaccaatgttgtattcagaggagtttcatctagtaatcaaaagagtttatcttatagtaagaaatctatgtcttactccattttaaggtacaggactagataacaatcacctgacatatggtttagccataacatcgaattcatcattgatttgagatattgataatgtgaatactca

SEQ ID NO: 5365 - DNA, 326 bp, Glycine max
  Clone ID: LIB3073-003-Q1-K1-A3
gagccatactctgattcattagtgaagaaaaatggcaaccatcatcgccggcatcccaactacatcgatcactcgcgcaggtcttgtgctcaaacgacctgttggagcctcgtcctctaccgttcttggattgtcagcaatggctaaggcagggaaagtgaggtgctccatggaggaaaagccttcaagcagctcaaatatagggatgggggcatccttgttagcagctgcagttgccgcaaccatgtcaagcccagccatggctttggtggatgagagactcagcactgaaggaaaccgggcttcctttgggcttagcaacaacc

SEQ ID NO: 5366 - DNA, 61 bp, Glycine max
  Clone ID: LIB3073-003-Q1-K1-A4
ggggccttcactctgaaccaaataccatagtcttctctttgtccgtgacaaaacagttccc

SEQ ID NO: 5367 - DNA, 403 bp, Glycine max
  Clone ID: LIB3073-003-Q1-K1-B12
gattgtgattcattagcacatttgcaaagtgttatttttctttttttctcatttgcactgcaaattgcaatggcttccaacaaggttattgccaccatcatggtgctttctctccttgcctactcaacatcattcaccaatgcatgtggcacatgccacccaaaacctaccccttctcctcctcctccatcaggaaagtgccctaaggacacattgaagctaggggtgtgtgcagatattctaggtcttgttactgttgttgttggttcccctgtctccagcaagtgttgtgcattgcttgaaggtttggctgatttggaggctgcactttgcctttgcactgctattaaggccaatgttcttggaatcaacttgaatgtgcctatcacactcagtgtgctac

SEQ ID NO: 5368 - DNA, 328 bp, Glycine max
  unsure at all n locations
  Clone ID: LIB3073-003-Q1-K1-B3
cagggagaagagcttaggaagctgattaatgcgccagcttacattgaatgcagttcaaaaacacaggagaacgtgaaggcagtctttgatgcagccataagagttgtccttcaaccacctaagcagaagaaaaagaagggtaaagcacaaaaggcctgttcgatattgtgattcactaggtgttaacatttgactgccctttgttctccctgtattaccctccccttctttatttttatcatttccttgctattgaagaagttgtagtttatgtgggtgttcctcagacaaatactctagatctncttgaacataagtggcttaatgc

SEQ ID NO: 5369 - DNA, 57 bp, Glycine max; identical to SEQ ID NO: 2079
  Clone ID: LIB3073-003-Q1-K1-B8

SEQ ID NO: 5370 - DNA, 180 bp, Glycine max
  Clone ID: LIB3073-003-Q1-K1-C3
gaaacaactcttgagaaagaaagaatggctgccaacacattgatgagttctgccatctcagccttcccatctctcctttactcctcaaaatccagatttgccgcagcaggtcctctttccagctttggtgtcaccaatgcctcttcttctagcttttacatgagtgctgattggatgcct

SEQ ID NO: 5371 - DNA, 382 bp, Glycine max
  Clone ID: LIB3073-003-Q1-K1-C9
gatctggcagcagaagaacaagtagttgagaactaagaaggagaagcaaatggcttcctcaatgatctcttccccagctgttaccactgtcaaccgtgccggtgccggcatggttgctccattcactggcctcaagtccatggctggcttccccaccaggaagaccaacaatgacattacctccattgctagcaacggtggaagagtgcaatgcatgcaggtgtggccaccagttggcaagaagaagtttgagactctttcctacctgccagaccttgatgatgcacaattggcaaaggaagtagaataccttcttaggaagggatggattccttgcttggaattcgagttggagcacggtttcgtgtaccgtgagcacaac

SEQ ID NO: 5372 - DNA, 280 bp, Glycine max
  Clone ID: LIB3073-003-Q1-K1-D1
cattgaggcgtttccaatctgaagaagatgccactaccacaactgcatgtggtttttatgttgcatgtgttgttgttattattaacagctatatgatcttcgttttaattttgtggttttccttcctgcccttgttatgtttgtgcattaaataaaagtaagaaatgccccaccactaagtaatgctatatggattatgtatgtgttccatatatgtcaagtgagtggtgtgtggttgtgaagaatctattgcttttaatgaatcagatcctttggtgtg

SEQ ID NO: 5373 - DNA, 174 bp, Glycine max
  Clone ID: LIB3073-003-Q1-K1-D4
tgccgacgggacccgccattactcactatgcatacttcgatcatgcacttagttgctcacaatcaacgaggctctgctagagaagctctgggatgatggcgtggctggccctcaacctgagcgtggtctctgcaggctcagactaactgccaggctcaaaactattgatgaagg

SEQ ID NO: 5374 - DNA, 276 bp, Glycine max
  Clone ID: LIB3073-003-Q1-K1-D7
gacccactcgtacgtccggaagaagactcttcagaatttatttccattcactaactcctcatataatcgtcggcctatttcacatacacgcacggcataaatttaaattaactatatactaatttcatttcccaccctcaaacatctttctttttctgaaaagatgttcttatttttttaccgtgcctgtctctaaatcacatattattacacacacttaaaaacaagaacaaagaacaccctcatgacaatccttataagaatgaaaattacttc

SEQ ID NO: 5375 - DNA, 373 bp, Glycine max
  Clone ID: LIB3073-003-Q1-K1-E2
ccacgcgtgccggctagcagacagacgactgattggatatcaaagggcagaaacggcatctgcggcgaatctgctcgtattagctggcgccaccgatacgcttgctgctgccctcggcatctagatcatctatgtcgctcgctttgctgtagaggaacaaaacagatgagagaattcagctgtggagtcatgtgacggtgattagtgcacagaatctagtagtttctggagtgaattactacataacattggaagcaaaagatggtgagattaaaaatgagtatacagcgaaggtttgggagagggaatcccaagagttgctagaattcatgccaacattacgtgcacgatgctagatcgaccatctcgctcg

SEQ ID NO: 5376 - DNA, 352 bp, Glycine max
  Clone ID: LIB3073-003-Q1-K1-F10
ggggtctagttagagtgaatccatgaccgtgaccatggcggctgcgtttacaagtacaagtgcaacactgagactgtcaaatgttggagagagcagaggtttgcagctgcgtaagtgtaaccctaatcctaataagctgaaggttatgggggggtttggaggttgttctggagtggcagtgggtgtgagagaaagaaaaggaattggaagggttagggttcgggttcgggcgagttcttcgtcggacgaggcagtgagtgcgcagtcaaaagtgactcagaaagtattctttgacgtcagtattggaaatccagttgggaagcttgtgggacgtattgtgattggactgtac

SEQ ID NO: 5377 - DNA, 418 bp, Glycine max
  Clone ID: LIB3073-003-Q1-K1-F12
ggggttttgcgctgttgttgctgctcatcctccgtaacctccgagctctgcaccgaagaacgaagtcatggggaagacacatggaatgggatctgctcgcaagctcaagtcccaccgcaggaggcaaaggtgggctgacaagtcatacaagaaatcacatcttggaaatgaatggaagaaaccttttgctggttcatcccatgccaagggaattgtccttgaaaagataggtattgaggctaagcagcccaactctgccattcgtaagtgtgccagggttcaacttatcaagaatgggaagaagattgccgcttttgtccctaatgacggttgcttgaactacattgaagagaatgacgaagtcttgattgctggatttggacgaaaaggtcatgctgtgggagatattcctggtgtc

SEQ ID NO: 5378 - DNA, 213 bp, Glycine max
  Clone ID: LIB3073-003-Q1-K1-G1
gagcgtactgatgagtgtttataccatgcttgtgatatagctcatgatgcaggaagtgcaggaagacaatcattaagcggtggtacacaaaaggggccaccgttttaatcacactggctggtataagagctagctgtcattatgtcactaaactgtggatcgccagtatgtgcacgaattggtgtactacaggggcacgacttcaaaagttca

SEQ ID NO: 5379 - DNA, 402 bp, Glycine max
  Clone ID: LIB3073-003-Q1-K1-G6
aaaaggcctccgaagggggttgccagagaatttcacattctatctgtcgggttgctctactaactcactcgcgccatggctgctaccatcatcaccacatgcaagctctcactgcttttgagtcttctctcagttacacttttgctggatgtgaggtctgagacccttcataatgtaagcgcaattctccccacatgcaatcgcatagagtgtcccagctatgatagcattcacgtatgcagctgattcgaaatgcgctgctataagtcacccgtttggatgccatacatgcatattcaggacataccgctcgttgaagccttcctatccggcttcaggtggttatatagctatcttcaaggttagaatcacttcaatcagaagtttgagctcactgttcct

SEQ ID NO: 5380 - DNA, 290 bp, Glycine max
  Clone ID: LIB3073-003-Q1-K1-H5
agaagacgacagaatggggggatgaggcggtgaaagactgaaagggaaaatctttttgaacagacgaaggaaaaaaacgcagtgatcacgagcagacatgtatcatccaacaagaggtggcgttcgtggtggtcgagatcaattcacttgggaggatgtgaaagctgataagcatagggagaactatcttggtcacagtatcaaggctcctgttggaagatggcagaaagggaaagatcttttctggtataccagggataaaaagtcccaaaatgcagaaatggaggctg

SEQ ID NO: 5381 - DNA, 218 bp, Glycine max
  Clone ID: LIB3073-003-Q1-K1-H7
gaaccataaccataccataccacagccatggccactctaagcttcaaccctgttagaataaaatccccaacgttcaaacattccaaactcaccactccatcaaaacgcatcacaatttcatgcaccactcccttcaacagccaacccaaactgctccacttccgaccccgttcgggtgtccgaaagcacccagaaggaagcaccctaagcggttctcg

SEQ ID NO: 5382 - DNA, 347 bp, Glycine max
  Clone ID: LIB3073-004-Q1-K1-A5
ggaaatgtcttgtttaaagctagtaaatatgcaagagcttccaaaagatatgaacaggtcgtgaagtacatagaatatgattcctcctttggtgaggaggagaaaaagcaggccaagaccttgaaggttgcctgcaatctgaacaatgctgcttgcatgttgaagtttaaagactacaacgaagcacagaaattgtgtactaacgtgtaggaccttgagagtacacatgtgaaagccctgtatagaagggcccacgcacatatgcagttgactaacttggatttggctgaacttgacattaagaaagctcttgacattgacccttacaacaaggatgtcaaattgga

SEQ ID NO: 5383 - DNA, 297 bp, Glycine max
  unsure at all n locations
  Clone ID: LIB3073-004-Q1-K1-B4
ggtctcggaattcccgggtccgactccacgccccgtccggaagaccgaccagaagggggatccctggcagcagtaagaaaccaagggtagttgagaaactttaagaagggagagagcccaaatggctttttcctcaatgggagtctcttcnncccagctgtntnnaccactgnntcaaccgttgccccggtgccccgtacatggttntngctccatnntcactgnngccttaagtcccccatggctgnngcttccccaactcaggaagactcaaccaatggaccannttacctccat

SEQ ID NO: 5384 - DNA, 331 bp, Glycine max
  unsure at all n locations
  Clone ID: LIB3073-004-Q1-K1-E1
gaaggtgcaagagtttgttgtgagctataagctagtttatcgtgaggagaatatgaagttgtttgttttctttgttgctgcagtagttttggtagcatggccatgccatggcgcaggctaccaaaggttccctctccgaatgaaaactggctatggtgagcgttcttcggaggtaaaatgcgcaagttttaggcttgctgtggaagcacacaacattcgagcctttaaaaccattcctgaagagtgcgttgaaccaacanaggactacattaatggcgaacaatttagatcagactctaaaacaggtaaccaacaagctttcttttatgct

SEQ ID NO: 5385 - DNA, 399 bp, Glycine max
  Clone ID: LIB3073-004-Q1-K1-F10
gatagcagcatcatacaaagcattgaattcaaaaacttaagttcattccttgtgttttgctttcttcctcaaaaccaaacatgtcgaacacatgcggcaactgcgactgcgctgacaagactagctgcaccaagggaaacagctatggtgttattgtagagactgagaagagttacatcgagactgttgtcatggatgttccagcagctgagcatgatgggaagtgcaagtgtggcactaactgcacttgcacggactgcacctgtggccattaaggaatatgtatgaaaatgtaattgccatgtgtttggcaatacaaatatccaaataatgtaatcttcgtatgaataaatgtgtgtgctggtatcctacttcacgtctgagtagtcatgcaatctg

SEQ ID NO: 5386 - DNA, 418 bp, Glycine max
  Clone ID: LIB3073-004-Q1-K1-F12
ggggggaagaatagaatgggatctggaagtggaaaacacactggagagttcttcaggagaagggatgcatggaggaagcatccgatgctcaccaatcagctccgccacgccacccctggccttggcatcgccgtcgtcgccttcggtatctacctcgtcggcgaacaagtctacaataggctctatgctcccgatcctcattcgatttcccacgtgaaagccggggatcaccactaaacgtttggacggacgcactccattccatcatcacttaataagcttgctagcatgttctcgcagcctttaatgtttaaatttcagaccgtgttcgcttctttggcactcactatgttgtcttgtatgcctacattgtatggccttcaattgcattcacaatgaaactcaatttactttactt

SEQ ID NO: 5387 - DNA, 183 bp, Glycine max
  Clone ID: LIB3073-004-Q1-K1-F5
gggcagcagaagaacaagtagttgagaactaagaaagagaaacaaatggctttcttaatggatcttttcccaacttgtaccaattgcaaacgtgcccgttcccggattggtggttcattcaattgccttaaattcattgcttgctttcccaacaagaagaaccaccattaccttaccttcatt

SEQ ID NO: 5388 - DNA, 358 bp, Glycine max
  unsure at all n locations
  Clone ID: LIB3073-004-Q1-K1-H10
gaatcctctgttgtttctcagccgcctcggctaggattcggaaacgaagaagggttctgttttcttttcgcgatgagggccaagtggaagaagaagcgtatgaggaggctgaagaggaagcgccgaaagatgagacagagatccaagtagtgcgttaaacctagtttgtttccgttgcttttacaattgcttatgttgtcaaataggacacccagttgttagtggcactggtctctcctttttgatgttttgatacattttgttggattttatttcgtcttatgttcttagctgaaaacaatgctgttactgcgtttgcgaatcaacaggatatcttggttgctaaaaaaaaaaanan

SEQ ID NO: 5389 - DNA, 339 bp, Glycine max
  Clone ID: LIB3073-004-Q1-K1-H3
ggttctagtgtatgtgattgttgtgactcgttcttcttcgtcgttatcttcttcttttgttgtttgtgtgtttgttttttctctcacctgaaaatgtcttgctgcggtggtaactgtggttgcggaagcgcctgcaagtgcggcaacggctgcggaggctgcaagatgtacccagacttgagctacaccgagtcaaccaccaccgagaccttggtcatgggagtggcaccagttaaggctcaattcgagagtgctgaaatgggtgttcccgctgagaacgatggctgcaaatgtggagctaactgcacctgcaacccctgcacttgcaagtgaggtgtt

SEQ ID NO: 5390 - DNA, 360 bp, Glycine max
  Clone ID: LIB3073-004-Q1-K1-H9
attcccgggtcgacgcacgcgtacgctccgataagacaacacaacggaatgttatgaacaagaaggagcacatccacaagcgcgggcataacatctctaagcgcaaataccctcattaaactgctccatcacctatcctcataccaggcccattcaaccatagaagccctcacttagactccatttctctctctctatgtacctctctctatctatatctgtgtccattttgcctatcaagagacctactgatcagccataaagacataattgagacattgctcttatataaggaggctaatcatcttgctattaatgtaagggataggtcgtttaccacctcgttgacaaatactatgc

SEQ ID NO: 5391 - DNA, 94 bp, Glycine max
  Clone ID: LIB3073-005-Q1-K1-A1
caatttgggaattattgctcccatcgccattggtttcattgttggcgctaacattttgttgggtggggccttctccggagcagccatgaaccct

SEQ ID NO: 5392 - DNA, 324 bp, Glycine max
  Clone ID: LIB3073-005-Q1-K1-A12
gaattcaccgttaacctaagaaagagaagtagctgtagtaataggaagaggatgatcggcgtcggaaagatcaagcagtacagtaacgtcctcgacaagcccctcaccaagcgcaagcaagaggttagtttgagtgcattcgcgttcttgttctcggagcttgttcagtacaaccaaacgcaggtcgacaacattggcgagctcgaacgaagactggaggatgctggatatgcggttggggctcgagttcttgagctgctttgccacagagataagggaaacagaagagagacacggctggtgaatattctttcttttgtacac

SEQ ID NO: 5393 - DNA, 87 bp, Glycine max
  unsure at all n locations
  Clone ID: LIB3073-005-Q1-K1-B1
tccggaaaattcccgggtcgaacccacgccgtnctcgacggctggcgagaagaacgactagaagggggaataattaattgggtatcc

SEQ ID NO: 5394 - DNA, 346 bp, Glycine max
  Clone ID: LIB3073-005-Q1-K1-C9
gatcctaccattcattcccatttttcacaccaccaagccaacagaagatgtttccccacattgttttcctcctttcccttctctcatccacttcccatgccactgtccaagacttctgtgtggcagaccttaagggtgcagacaccccttcaggctacccctgcaagccacctgcaaatgtaacttcagatgactttgtgtacacaggcttagctgaagctgcaaatgtcacaaacataatcaatgctgctgtgaccccagcttttgttgctcaattcccaggtctcaatggccttgacctctctgcagcaagattagaccttggtcctggtggtgttatcccact

SEQ ID NO: 5395 - DNA, 135 bp, Glycine max
  Clone ID: LIB3073-005-Q1-K1-D8
gttatatatgaaaaaaaaaaaaaaaaggaagcggacgatatgcaggcgctatacatgatccaagcttacttacacgtgcatgctacgttatagctctaccatagtgtaacctaaagtcaattcactgaccacctg

SEQ ID NO: 5396 - DNA, 319 bp, Glycine max
  Clone ID: LIB3073-005-Q1-K1-D9
aaattgagaatcggattgcttcacaacagcagaaaattactgctttgagacgggagattgatgatcttatggacttgattgatgagatatgataggtgactatgctgctcgagataataatgtgctcccattttgtccttgttttattttatttaggtcacgggtttgttgcggatatataattgcaaagagattagtgatacttctgacggttggaattttggtgcagatcattgtctttagtattatggtaacatttagcataaagatcgctaatttaatatccatgcttatctaacaaacagatgtattgctttcc

SEQ ID NO: 5397 - DNA, 251 bp, Glycine max
  Clone ID: LIB3073-005-Q1-K1-E6
tgcgaaaggacgacagaaagatgctgagtggatcatgacctagttctagatgttgcatagccttaccggaatcacttccttaccttttttcagtcttacttaccctaaaccatcttcggtcttttttaaccttacccgaacttgatccaacggttgatcttacattgtacattggttctttctgtgttctgcataccttctctgttaaccttgctccatttcaggctccgtacttggattggatttgacat

SEQ ID NO: 5398 - DNA, 400 bp, Glycine max
  Clone ID: LIB3073-005-Q1-K1-F11
gagagagcaaaacatattattttcattttcatctttgtttgagtatcaacaaatggcaaccactgtgatgaccactctcccccaattcagtggtcttagaccccaattctcagctgcccctgtgaagaacttggttgctgtgcaacccatgagtcgcaaggggaagggtgcattgggagctcgatgtgactacattggttcatccactaatctgattatggtggcttctacaaccctgatgctgtttgctggaaggtttggattggctccatcagcaaacaggaaagccactgcagggctaaagctggaggtgagggactcaggcttgcagactggtgaccctgctggcttcacccttgctgacaccttggcctgtggatctgttggccacatcattggg

SEQ ID NO: 5399 - DNA, 366 bp, Glycine max
  Clone ID: LIB3073-005-Q1-K1-G5
gacacacacttttttcaaggcataggattggtgaggcaaacttgaattgaagtgaagaaggagatggctgcaacctcttccttgtgctcatcgaccctccaatcccagatcaatggattcttccttcacaaaacctctctttcccatactccttccctcactttctccaggaggaaaatttcaaccacagtgagggctacatctcgagtcgacaagttttcaaaaagcgatatcattgtctctccgtccattctttctgcaaacttttcaaaattgggagagcaagtgaaagcagtagaattggctggttgtgattggattcacgttgatgtaatggatggtcgctttgttccaaatattacaatt

SEQ ID NO: 5400 - DNA, 396 bp, Glycine max
  Clone ID: LIB3073-005-Q1-K1-H11
gaatcctctgttgtttctcagccgcctcggctagggttcgggaacgaagaagggttctgttttcttttcgcgatgagggccaagtggaagaagaagcgtatgaggaggctgaagaggaagcgccgaaagatgagacagagatccaagtagtgcgttaaacctagtttgtttccgttgcttttacaattgcttatgttgtcaaataggacacccagttgttagtggcactggtctctcctttttgatggtttgatacattttggtggattttatttcgtcttatggtcctagctgaaaacaatgctggtactgcgtttgcgaatcaacgggatatcttgtttgcacaaaaaaaaaaaaaaaaaaactaaaaaaaaaggcggccgttctaaaggatcc

SEQ ID NO: 5401 - DNA, 74 bp, Glycine max
  Clone ID: LIB3073-006-Q1-K1-A5
gaccatagcaagtagcaaggagactagttctgtattcagattacattgcaaaaatggcatcattcaccatgaca

SEQ ID NO: 5402 - DNA, 57 bp, Glycine max
  Clone ID: LIB3073-006-Q1-K1-A9
gagacctcatgtcaggcggggctacccgctgagtttaagcatatcaataagcggagg

SEQ ID NO: 5403 - DNA, 291 bp, Glycine max
  Clone ID: LIB3073-006-Q1-K1-B12
gctcatagtgtgtgattgatcggatgttgctaaggcgcggcttctatctaaaggaaggctgtggttgtgttcgttgctacatctcacctgacaatgcattgctgtggcggcaactgtggtcctggtagcttgtacacttgctataacggctgcactctctacgtgatatgcccagacttgaggttcactgagtcaacccacaccgtgaccttgttcatgacaattgctcctgagtacgctgaatctgcagatgcttacatgcatgtgcaccattataactcaggctgcaaa

SEQ ID NO: 5404 - DNA, 53 bp, Glycine max
  Clone ID: LIB3073-006-Q1-K1-B2
gagacctcaggtcaggcggggctacccgctgagtttaagcatatcaataagcg

SEQ ID NO: 5405 - DNA, 410 bp, Glycine max
  Clone ID: LIB3073-006-Q1-K1-B5
gaagggtttcaagttattgtgagcaaagaaagatagtgagtgaagtaactgaagagaagaaaaaatgccgtgcctcaacctcagcaccaacgtgtccctcgaaggcgtcgacacctcttccatcctcgccgaagccacctcctccgtcgccagcataatcggcaaacccgaagcctatgtgatgattgtactgaaaggatcagtacccatagcttttggtgggaatgagcagccagcagcttatggagaattggtttccattggtggtcttaaccctagtgtaaacaaggaacttagtgctgcaattgcttcaattctggaaaccaaattgtcagtgccgaagtcgcggttcttcttgaaattctatgacaccaagggttccaacttcggatggaatggatctacattct

SEQ ID NO: 5406 - DNA, 57 bp, Glycine max
  Clone ID: LIB3073-006-Q1-K1-C6
atatgctggtgtcgaacaaaaaaaaaataaagctggaaaaaaaaaagccggccgttt

SEQ ID NO: 5407 - DNA, 272 bp, Glycine max
  Clone ID: LIB3073-006-Q1-K1-D12
gagagaagggctacacaaacacaatctctaatggcactcaggatgtgggcttcttccactgccaatgcactcaaactctcttctgtctccagacctcatctcttgcctcctttttctttctccagatgcttatcttccgtcttggatggacttaagtacgctgattcacatgaatgggtcaagcacgaaggctcagtcgccaccattggtatcactgaccatgcccaggaccatcttggagaggttgtgtatgtggagctgccagaaccagg

SEQ ID NO: 5408 - DNA, 314 bp, Glycine max
  Clone ID: LIB3073-006-Q1-K1-D4
gaaggtcacggcgagacgagccgtttctaattagtgataggtgtcaagtggaagtgcagtgatgtatgcagctgaggcatcctaacagaccgatatggacttgaaataaaataaattattgtccaaataaataatggttaatttacttaaaaaaaaaaaaaaaaaaaaaaaaaaaaaaaaaaaaaaaaaaaaaaaaaaaaccaaaaaaaaaaaaaaaaaaaaaaaaaaaaaagcggccgttttaaaggatccaagtttacgtacgcgtgcttgcaacgtcatagcttttttatagggccacctaaattaaatta

SEQ ID NO: 5409 - DNA, 250 bp, Glycine max
  unsure at all n locations
  Clone ID: LIB3073-006-Q1-K1-D7
gacatttgtctctcatctttcaatttcaatcaacggttatacccttttctatttgagcatcatcatgtccaccgcagcgcagcccaaggccaagaaaacggcgtcgtccaagaagcccctctcccatcctaccttcgccgtgatgatagcggaggcgatagcgagtctgaaggagagaaccggttcgagccaatacgcgataaccaaattcatcgaaggcaagcacaaggagttgcctncaacctacaag

SEQ ID NO: 5410 - DNA, 167 bp, Glycine max
  Clone ID: LIB3073-006-Q1-K1-E12
ggagagggagagagggagggagagagagagagagaggaaaagtaactccacacaacacatcacagcctaagagaattggattctaagctcgagagagagagagagagagagagagagaagaaagaatcatgtggtgctggaaaggagagggaggctagaagaagaag

SEQ ID NO: 5411 - DNA, 336 bp, Glycine max
  Clone ID: LIB3073-006-Q1-K1-H7
agaagaagaagaaggagcatgggcatgagcatggccatgacagcagcagcagcagtgacagtgattaaactgctgcatcacctatatatttaaaaggtttatgggaccatagtagcgagggctgtgccttaatttctctctctctctctctctctccctctctctctctctctctttttcctttttccctatcttgtgatctatttatgagtgagaaaaacaaaagtgagaaattgtgcgtgtatctggttgctaattcgagtgctattagtctgtggtttggttggtttgtaaccccgctacttgggttatgtttgattgtatattatcctagag

SEQ ID NO: 5412 - DNA, 319 bp, Glycine max
  Clone ID: LIB3073-007-Q1-K1-B10
ggtgcacaagtgagtttgttgatcgagataactagaaacagtgtgatgaaaatgaaggtccttgttttcttcgttgctacaattttggtagcatggcaatgccatgcgtacgatatgttccctctccgaatgaacactggctatggtgcccgtactccggaggtgaaatgcgcaagttggaggcttgctgtggaagcacacaacatctttggctttgagaccattcctgaagagtgcgttgaagcaacaaaggaatacatccatggcgaacaatatagatcagactccaaaacagttaaccaacaagcttacttttatg

SEQ ID NO: 5413 - DNA, 357 bp, Glycine max
  Clone ID: LIB3073-007-Q1-K1-C12
gcctgtagctatgccatatctggtgcagcatgctccgagctcaatgggaaggtcacttccgtggcctctgttgcatcctctggctacaagttgccattgatcaaatgtgaggccagagttcccaaagccaaagaatctgaaggaaggagaggtgcccttgttctcttggcagctacccttttcatctctgcagcctccaattcttctgccaatgctgggatcattgatgattaccttgagaggagcaaggctaacaaggaattgaatgacaagaagaggttagctactactggagcaaactttgcaagagcatacaccgtggaattcggtagttgcaagttccctgagaacttcact

SEQ ID NO: 5414 - DNA, 361 bp, Glycine max
  Clone ID: LIB3073-007-Q1-K1-C5
gagcatagatctgaatggagagcgaggtggtgtccattgcagttttctaatgaaaacaacaaaatagacacctgttaagaaggaggacaacgatggtgctgccgctatttactgctttcattctctttgcttttattccgaatggattgttagcagttccttccaccgtcccggcattcctttggtcatcacattatgaactggcctctgaaaatatattgaaggaatctgtaaattaccaagtcatttctccgaaggatctagcaaaatctattttatctgaagcaagctggtcaaattttctgtgcaaaggaaagaaatttcatgagcctctggatctggcactcttattcgttggtag

SEQ ID NO: 5415 - DNA, 254 bp, Glycine max
  Clone ID: LIB3073-007-Q1-K1-C7
gagtgagagaaagagatcacatagcagaatggcttctactcaatgtttcttgcaccaccatgctcttaccacccctgccagatccccatcacaacgcatcatggttagcaccaagcctaaccagcttgtttgcaaggcacagaagcaagaggatattgatgtcagcccaatctctcgccggttagctctaaccgtgctcattggtgctgctgctgttggctccaaagtccaacctgctgatgcagcttatgggg

SEQ ID NO: 5416 - DNA, 52 bp, Glycine max
  unsure at all n locations
  Clone ID: LIB3073-007-Q1-K1-E12
gagacctcatgtcaggcggngctacccgctgagtttaagcatatcaataagc

SEQ ID NO: 5417 - DNA, 368 bp, Glycine max
  Clone ID: LIB3073-007-Q1-K1-E7
agaagacgacagaagggggagtggcaatggaatccagaaacttgggcagactgggcatagcatccacgctttaatcgaccactgcttcttctacttttctttcctcaaggttttggcgggagtcgtcgtcgtcattgaatcagccatgcctcggtactactgtgactactgcgacacctatttgacccacgattctccatctgttagaaagcagcacaatgcaggttacaaacacaaggcaaatgtgaagacctactaccagcaatttgaagaacaacatacacaaagtttaattgatcaaaggatcaaagaacatcttgggcaagctgcaacgtttcagcaggttggtgtggcttataatcatctaa

SEQ ID NO: 5418 - DNA, 312 bp, Glycine max
  unsure at all n locations
  Clone ID: LIB3073-007-Q1-K1-F6
gacagcggaaacaattaataaagatgagtttgaagaacaacatggtggtgctaaaggtgtgtttgttgcttcttttccttgtgggggttacagctgcacgcatggaactgagcttcttcaaaagtgatcagtcatcaagttatgatgatgatgagtattcaaaaccatgctgtgatctctgcatgtgcacacgctcaatgcctnctcaatgcaactgtgaagatattaggctgaattcatgccactcagattgtaagagctgtatgtgcacacgctcacagccaggacagtgtcngtgtcttgacaccaacg

SEQ ID NO: 5419 - DNA, 118 bp, Glycine max
  Clone ID: LIB3073-007-Q1-K1-H10
aggagtctagacttttagatgatatggtactttccaaacttaaaaatgttaaacgcctgtattaatccaacagaaaatgggcctttgaaacttaagaaaaacaaactaagattgggcc

SEQ ID NO: 5420 - DNA, 357 bp, Glycine max
  Clone ID: LIB3073-007-Q1-K1-H5
ggcgtacacagcctcaacaaccctaacgcgtgcagagcagagagagacgcagccatggggcgaagacccgcgaggtgttataggcaaattaagaacaaaccataccccaagtcacggttttgccgtggtgttcctgatcccaagatcaggatttacgatgttggtatgaagaagaagggtgtcgatgaattgcctttctgtgtccatctggttagttgggagaaggaaaacgtttctagtgaggccctggaagctgctcgtatcgcttgcaacaagtacatggcccaatttgctggaaaggatgctttacacttgagagtcaaggtgcacccattccatgttcttaggatcaacaag

SEQ ID NO: 5421 - DNA, 234 bp, Glycine max
  Clone ID: LIB3073-007-Q1-K1-H7
gacgatgagtcgatttgatagctaatgtattgttattcgtgatattgatccaatttgatatcatcgaaatccaatttataccattgttgaattaattatcgatgaaagatttatcatctctatgggattaaattccgcatattttattgcataatagaacataccatggcttaaaaagcacgccgtcgatgtataagatccaagcttacgtgcgcgtgcatgcgactgcatagc

SEQ ID NO: 5422 - DNA, 243 bp, Glycine max
  Clone ID: LIB3073-008-Q1-K1-A10
gattatatttgagttcaaacaaatcaaagccatggccacctccaacttctctattgttctctccgtctccctagccttctttttggtgctacttaccaaggcacactcgaccgataccgtttctttcaccttcaacaagttcaacccagtccaaccaaacattatgctccaaaaagatgctagtatttcatcctctggggtgttacaactcaccaaagttggcagcaacggcgtgcccacctc

SEQ ID NO: 5423 - DNA, 370 bp, Glycine max
  Clone ID: LIB3073-008-Q1-K1-A4
gatagcagcatcatacaaagcattgaattcaaaaacttaagttcattccttgtgttttgctttcttcctcaaaaccaaacatgtcgaacacatgcggcaactgcgactgcgctgacaagactagctgcaccaagggaaacagctatggtgttattgtagagactgagaagagttacatcgagactgttgtcatggatgttccagcagctgagcatgatgggaagtgcaagtgtggcactaactgcacttgcacggactgcacctgcggccattaaggaatatgtatgaaaatgtaattgccatgtgtttggcaatacaaatatccaaataatgtaatcttcgtatgaataaatgtgtgtgctggtatctt

SEQ ID NO: 5424 - DNA, 374 bp, Glycine max
  unsure at all n locations
  Clone ID: LIB3073-008-Q1-K1-A8
ggagatacagaaaagaaaaaggaaaccctagctggataggtcaaacatcatcatgtcggacgaagagcaccatttcgagtccaaggcagacgccggtgcctccaaaacctaccctcagcaagccggtaccattcgcaagaatggctacatcgtcatcaaaggacgcccctgcaaggttgtggaagtttcgacttccaaaactggaaagcacggtcacgccaagtgccactttgttggaattgatattttcactgccaagaaacttgaggatatngtgccctcttctcacaactgtgatgttcctcatgtgaatcgtactgattaccagctcattgatattgctgaggatggatttttgagtctgcttactgaaa

SEQ ID NO: 5425 - DNA, 245 bp, Glycine max
  Clone ID: LIB3073-008-Q1-K1-A9
ggcacaagtgagtttgttgatcgagataactagaaacagtgtgatgaaaatgaaggtccttgttttcttcgttgctacaattttggtagcatggcaatgccatgcgtacgatatgttccctctccgaatgaacactggctatggtgcccgtactccggaggtgaaatgcgcaagttggaagcttgttgtggaagcacacaacatctttggctttgagaccattcctgaagagtgcgttgaagcaa

SEQ ID NO: 5426 - DNA, 423 bp, Glycine max
  Clone ID: LIB3073-008-Q1-K1-B5
gggaggtagagcttaaaaaaacaagataacaaataaagtataagtgcggcgggtcaaactgggtgtatataatcggatcactataagacaactatttcttttgaggtttcaaagaatgattttcgaattcgattgaatctaaaacacaaaagagttggtttacaggatagaagaaacccacgtatatgtgataggatattctatatgaactagttatatatgaactaaccatatccatatatattatataaaataactaatattttatatctaaaattgccccgctactactgtaaatttcgatagggattaaaaaacatagcctttccgtttcatctcgaattgtgaattgaatattcaatgaccaaataaaattaaaggaaaaggttaaaaaaagcggccgatctagaggatccaagctta

SEQ ID NO: 5427 - DNA, 340 bp, Glycine max
  Clone ID: LIB3073-008-Q1-K1-B8
gtgcgacttgaaagacatgattagattagctgtggattcttacatccgccattttttctagtatatagaaatgaacatgctcttgactcgacatcgtttgttctgttccactagaacttattgttttggggacgggaaagcagttgatgatgtaagttgatgatgtaaatagtacatgatggagctcgagtttattcatttatcaagggcaagtatctaagggtagtaaaaattaataagttagaaaaacttcgtaagtttatttttgatagaaaaattgaaaggatccaatttgagcaagggtcaaaaaaatggttggaattagtaaaactgttttgat

SEQ ID NO: 5428 - DNA, 373 bp, Glycine max
  unsure at all n locations
  Clone ID: LIB3073-008-Q1-K1-C8
ggcaccgtactctctaatattccatactacaaaaaacatggatatggggtggagaaatttaactcgaccttgtatgatgaatgggttaacaagggcaatgcaccggcactgcccgagactcttaagaattacaacaagctggtgtctcttggcttcaagattatattcttgtcaggaagaacactggacaaacaggccgtaacagaagcaaacttaaagaaggctggctaccacacatgggaaaaattaattctcaaggatccacangatccttccactccaaatgcagtttcatacaaaacagcagcgagagagaaactgataaggcagggatacaacattgttgggatcattggaaaccaatggagcgatc

SEQ ID NO: 5429 - DNA, 360 bp, Glycine max
  unsure at all n locations
  Clone ID: LIB3073-008-Q1-K1-D1
gacttcacagaacgacaactgtgccagcattcattatagagagacgtagtactacacttcttgagatcgatcataataaacactcaaaccaaacaagcaaaactaaacttaccaatgaagttgaagcagcagaaaatgagagtagtagtagggtcagtgtggctgtgcctctttctgttggctgtcggggagtcggagggagcggatttggcggcgaagtgcaacctgctggttcagaaagtgctgccgtgcctgaacttcgcgacggggcaggcggcggttccgaccaaggactgctgcgaggcgacgtcngagataaagaagagcgacccggagtgcctgtgctttgcgatccaacag

SEQ ID NO: 5430 - DNA, 332 bp, Glycine max
  Clone ID: LIB3073-008-Q1-K1-D4
acagaagggggcccgaactccttcgacgaccgtcttccccaatcgcctgcgtctctctctgaattgacaagcttaaagacaaagtcttaaatggctggtccaaggattgcccatgctaccttgaaaggtccgagtgtggttaaggagataataattggaataacacttggcttagctgctggtagcgtgtggaagatgcaccactggaatgaacagaggaaaaccaggaccttttacgatttactggaaaagggtgaaatcagggttgttgcaaaggaccagtgaaaatgttctggtttggtggcctatgctctcacattatatagcgcttt

SEQ ID NO: 5431 - DNA, 188 bp, Glycine max
  Clone ID: LIB3073-008-Q1-K1-D9
ggtgtgagtgaagaagcagagggagtagcggcattaaaaatgcagatcttcgtgaaaactctgacagggaagactataaccctcgaggtcgagagcagcgacaccatcgacaatgtcaaggccaagattcaagacaaggaaggcattcctccggatcagcagcgtttgattttcgccggaaagcagct

SEQ ID NO: 5432 - DNA, 107 bp, Glycine max
  Clone ID: LIB3073-008-Q1-K1-E5
ggatcctaactcttgaagctgaagaacctgaggctaattgaactctaacgtgccaaaagaaaaatggacaaaaaaatataaaaagcggccgctctagaggatccaag

SEQ ID NO: 5433 - DNA, 311 bp, Glycine max
  Clone ID: LIB3073-008-Q1-K1-E7
gagcacttcttagctctcaatcatcaactatttaaaacaatggtcagaggctaacttctccactagttttctgtgtagagagctctttggacaacaccctctaaaccaatctatcaagtcctgattaatctggtgagcatggagctttgatggctcacaaccatccatgggtcttgaagagcttggagagaaaggggtgttagaagagagggtgctcactcctcacactccctaacttaaaacagtttgctttggcttaactttggcttctctgatcaacaagggatgtgttctaacattctttcttgagt

SEQ ID NO: 5434 - DNA, 157 bp, Glycine max
  Clone ID: LIB3073-008-Q1-K1-G6
tcaaacgaagaaaggcttatggtggatacctaggcacccagagacgaggaagggcgtagtaagcgacgaaatgcttcggggagttgaaaataagcgtagatccggggattcccgatataggtcaacctttcgaactgctgctgaatccacgggcagc

SEQ ID NO: 5435 - DNA, 192 bp, Glycine max
  Clone ID: LIB3073-008-Q1-K1-G8
gagacctcaggtcaggcggggctacccgctgagtttaagcatatcaataagcgcaaaaaaaaaaaaaaaaaaagcggacgatatgcgggcgctctacaggatccaagcttactgccacgtgcatgctacgtcatagcgctactatagtgtaacctaatggcaattcactggccgcggcttgacagcgaaaac

SEQ ID NO: 5436 - DNA, 308 bp, Glycine max
  Clone ID: LIB3073-008-Q1-K1-H3
gatctggcagcagaagaacaagtagttgagaactaagaaggagaagcaaatggcttcctcaatgatctcttccccagctgttaccactgtcaaccgtgccggtgccggcatggttgctccattcactggcctcaagtccatggctggcttccccaccaggaagaccaacaatgacattacctccattgctagcaacggtggaagagtgcaatgcatgcaggtgtggccaccagttggcaagaagaagtttgagactctttcctacctgccagaccttgatgatgcacaattggcaaagggaagtagaa

SEQ ID NO: 5437 - DNA, 354 bp, Glycine max
  Clone ID: LIB3073-009-Q1-K1-A1
gaagaagaagaaggagcatggccatgagcatggccatgacagcagcagcagcagtgacagtgattaaactgctgcatcacctatatatttaaaaggtttatgggaccatagtagcgagggctgtgccttaatttctctctctctctctctctctctctctctctctctctctctttttcctttttccctatcttgtgatctatttatgagtgagaaaaacaaaagtgagaaattgtgcgtgtatctggttgctaattcgagtgctattaatctgtggtttggttggtttgtaaccccgctacttgggttatgtttgattgtatattatcctagagaaataaaaattttaaatta

SEQ ID NO: 5438 - DNA, 227 bp, Glycine max
  Clone ID: LIB3073-009-Q1-K1-A10
ggcggcgcgtagctgatcagtctgcttattgcgattaccgcacacccccatcacgcatcgtgaacgttgcgaacacaaaggatacacacctggctagtgaagactgcaggaagcacacccgtgaccacgttacccagtacaaaagagagcatgatagcgttcgcgcccatggaaaacgccgttgcgatcgcaaaccatatggctatggggggcaaactaaccccgtc

SEQ ID NO: 5439 - DNA, 262 bp, Glycine max
  Clone ID: LIB3073-009-Q1-K1-A7
gacacagagttgcaagagaaagataaaagaagatggcgactcttgattccgacgtgcctatggttcccgccggcgagccctcgagcagcgccggtccttcttccaagaagcccaagcgcttcgagatcaagaagtggaacgccgtcgctctctgggcttgggacatcgttgtcgataactgtgctatctgccggaaccacatcatggatctctgcatcgagtgccaagccaaccaggctagcgccactagcgaggaatgcac

SEQ ID NO: 5440 - DNA, 390 bp, Glycine max
  Clone ID: LIB3073-009-Q1-K1-B9
gatatctggcagcagaagaacaagtagttgagaactaagaaggagaagcaaatggcttcctcaatgatcccttccccagctgttaccactgtcaaccgtgccggtgccggcatggttgctccattcactggcctcaagtccatggctggcttccccaccaggaagaccaacaatgacattacctccattgctagcaacggtggaagagtgcaatgcatgcaggtgtggccaccagttggcaagaagaagtttgagactctttcctacctgccagaccttgatgatgcacaattggcaaaggaagtagaataccttcttaggaagggatggattccttgcttggaattcgagttggagcacggtttcgtgtaccgtgagcacaacatgtca

SEQ ID NO: 5441 - DNA, 373 bp, Glycine max
  Clone ID: LIB3073-009-Q1-K1-C11
ggtctgtctctgtcatacaaaagctgaagcggggggagttgagtttagtgccgggctgtgtggtgttgtgtgtgtctttaatcttatagagaaaaaatggtatcgttgttgtcaaactcagcaatggtaagaggcagagatgaagtgtacgtggcagcaatgcctctaagggctacaaagggaccaccccagttgcttatgtctgctgcttactccctcaatttatgggatttccagcatttcatggtcatcatcaaaccctcttctctttctcaggttctggtttttgattttcaaccaaaagatcctgaagatatatatgtggcactagcggctctatatggtagagcagtgccaggaactgttctggtga

SEQ ID NO: 5442 - DNA, 158 bp, Glycine max
  unsure at all n locations
  Clone ID: LIB3073-009-Q1-K1-D5
accggtgggaaaagaccacagaagggggacacataacacaaccccntanaaaaaaaaaaaaaaaaaaaaaaaaggcgggcggtctaaaagaaccaaacttaactacccctgcattcgaaagcataaatcttttataagggcaactaaaatcaaatcaa

SEQ ID NO: 5443 - DNA, 369 bp, Glycine max
  Clone ID: LIB3073-009-Q1-K1-D7
acaacaccttcttcttagctgagcaatggcatcgtcttcgctcacttcagttcctctctcatcttcttcactcaacattccacattcttcctccaaagcttccgctagctttgtatcttctccaattggcgcattctctcgcacccccaaaaccctgtttgccgaatcaaggttccactttcacccgaagagaaacgattatgggttttccatcagagcccagaccctagacttctcggattcattcttcgaagggggtttcggctctgaagacgtaccttcttctcccggcggacccggcttcacggccgtggaggaaaaggaggaaccccaatgcccaccgggtctcatacagtacgagactatgat

SEQ ID NO: 5444 - DNA, 347 bp, Glycine max
  Clone ID: LIB3073-009-Q1-K1-F11
ggtggaaaatttgcagagatcaaagaacagaagatggcacaaacgctggcaatgcccgtggcaccttcgctcgctatcatctccaattctcgcctctccaagacactctccgttcccgttctcaacaacccaaagtttcaagggttaagcatcaagtgcgttcgtgttggaggtgtggagattccgaacaacaagcgaatcgagtactcgctgcagtacattcatggagttggcaggaccagagcaaaacagattctgtgtgatatccaaatggataacaaaatcacgaaggaactcactgaggaggagctcatcactctcagggacgaagtctcaaatatatgatt

SEQ ID NO: 5445 - DNA, 327 bp, Glycine max
  Clone ID: LIB3073-009-Q1-K1-G12
ggttctagtgtgtgattgtttgttgttgtaactcgttcttcttcttttgttgttctgtgtttgagtttgttttttctctcacctgaaaatgtcttgctgcggtggtaactgtggttgcggaagctcctgcaagtgcggcaacggctgcggaggctgcaagatgtacccagacttgagctacactgagtcaaccaccaccgagaccttggtcatgggagtggcacctgttaaggctcaatttgagggtgctgaaatgggtgtgcccgctgagaacgatggctgcaaatgtggaccaaactgctgctgcaacccctgcacttgcaagtg

SEQ ID NO: 5446 - DNA, 347 bp, Glycine max
  Clone ID: LIB3073-010-Q1-K1-A7
gaacgcagccaagaaaagaaaatcctcacccattttcttcgtagccaaacactctgaaattctcagttatgtcgtggcaagcgtatgtggatgatcacctactgtgtgaaatcgaaggtaaccacctcactcacgccgctatcatcggccaagacggaagcgtttgggctcagagcaccaacttccctcagttcaaacctgaggaaataactgccatcaataatgactttaatgagcctggatcacttgctccaactggattgtatatcggtggcaccaaatacatggtcatccagggtgagcctggtgctgccattcgagggaagaagggtcctggtggtgttact

SEQ ID NO: 5447 - DNA, 325 bp, Glycine max
  Clone ID: LIB3073-010-Q1-K1-C7
ctgtgtctcaacacggcacatctagacatatggagggggaaaacaagattgctttaaccatatattaggatgcactctctatcagagcaacttaccgatccacagacttacgacttcactgaagccttactcttatcatacatgctcgactttcggtgcatcacatccaaggaactttgaactgttatacgttcattcggacaaaccccaactgaagcatatctccacgacatcatcaatccactggattctgatgagaatcgtacgctagacttcactgagttgctaactctcatggccattacgatgaatgacactgattctg

SEQ ID NO: 5448 - DNA, 97 bp, Glycine max
  Clone ID: LIB3073-010-Q1-K1-C9
actcgtacgaacagtatgaggggtctacacaagggtacacatgcacggggattgggtcagaatacggagtcaccgagattcatctagtatatagatg

SEQ ID NO: 5449 - DNA, 353 bp, Glycine max
  Clone ID: LIB3073-010-Q1-K1-D10
gataccaaaaacaaaacaagccaagtgaaagagagaagaaaagtcaaagacaatgtcagggatcattcacaagattgaggagacccttcatgtgggaggccacaagaaggaggaggagcacaagggtgagcagcaccatggtggagaatacaaaggggagcatcatggtgaacacagtactgaatacaaaggagagcatcatgttggtgagcacaagccggagcaccatggaggagaagagcacaaagaggggttcctagacaagatcaaggacaagatccacggcgaggagggtggcaccgctgagggcgagaagaagaagaagaagaaggagaagaagaagcatgaacatg

SEQ ID NO: 5450 - DNA, 352 bp, Glycine max
  Clone ID: LIB3073-010-Q1-K1-F12
gaaagaaaagagaaatggcaacagaaacaaaagtgcaagaattaggtggcatcaccgatgtgcatggagctgccaacagcgtcgagatcaacaatctcgctcgctttgctgtagaggaacaaaacaaaagagggaattcagttctggagtttgtgagggtgattagtgcaaagcagcaagtggttgctggagtgaattactacataacattggaagcaaaagatggtttgattaaaaatgagtatgaaacgaaggtttgggtgagggaatggttgaactccaaagagttgctagaattcaagccagtcaatgtttctagcacaccaataggtggcattaccgatgtgactgc

SEQ ID NO: 5451 - DNA, 402 bp, Glycine max
  Clone ID: LIB3073-010-Q1-K1-F4
gaataagaagaaggagcatggccatgagcatgggcatgacagcagcagcagcagtgacagtgattaaactgctgcatcacctatatatttaaaaggtttatgggaccgtagtagcgagggctgtgccttaatttctctctctctctctctctctctctctctctctctctctttttcctttttccctatcttgtgatctatttatgagtgagaaaaacaaaagtgagaaattgtgcgtgtatctggttgctaattcgagtgctattagtctgtggtttggttggtttgtaaccccgctacttgggttatgtttgattgtatattatcctagagaaataaaaattctaaattatcaaaaaaaaaaaaaaaattgaacaaaaaaaagcggccgctctagaggat

SEQ ID NO: 5452 - DNA, 132 bp, Glycine max
  Clone ID: LIB3073-010-Q1-K1-F9
agatagcacgaacacgactgatgggtctacaatagatccacatcatcatggtcactggcaacattactatgacaatgacgaacgtcgacacttcgcatctgctgttcctactccatggccactgcatccctt

SEQ ID NO: 5453 - DNA, 295 bp, Glycine max
  Clone ID: LIB3073-010-Q1-K1-G11
ggttcacattcaggaatcgttttcttcagaaaatttgccatcgttgagggaagcgcgagagccttcgttgttcaagatgagagctaagtggaagaagaagcgcatgaggaggttgaagaggaagcgccgaaagatgagacaaagatctaagtaggtgcttgaacaaggagtggagatgatgtgcttttccatctgctaccagcttcatgacattttatgctgtcatggctcttatgatgatcttgaggtctagtggcgaggggagcttccatcttgactttagtttagctttact

SEQ ID NO: 5454 - DNA, 326 bp, Glycine max
  Clone ID: LIB3073-010-Q1-K1-G5
ggcacaagtgagtttgttgatcgagataactagaaacagtgtgatgaaaatgaaggtccttgttttcttcgttgctacaattttggtagcatggcaatgccatgcgtacgatatgttccctctccgaatgaacactggctatggtgcccgtactccggaggtgaaatgcgcaagttggaggcttgctgtggaagcacacaacatctttggctttgagaccattcctgaagagtgcgttgaagcaacaaaggaatacatccatggcgaacaatatagatcagactccaaaacagttaaccaacaagcttacttttatgccagagacc

SEQ ID NO: 5455 - DNA, 349 bp, Glycine max
  Clone ID: LIB3073-010-Q1-K1-H9
cacgcaacgacaggtgctaagagaccacaaacgagcaagatgaacgagaggactgggaactgtagaatggacgatagtgcgctgcatatgtaagtagacgctatctaggcagccttgatacataatgctgcaagccaacaccctgacccattcaaccatacgtacactcatctgaacgcgtatggctactgccaaggatgcaaagctcctacacaaggcactcaaagactagcatttagacccactaacttctgagcagcgaaggaccattatgtacagacatgttagatagaaaaggaacacatataggtacagcttgtacaaccaaactttcaagcatatcactaac

SEQ ID NO: 5456 - DNA, 352 bp, Glycine max
  Clone ID: LIB3073-011-Q1-K1-A1
ggcacaagtgagtttgttgatcgagataactagaaacagtgtgatgaaaatgaaggtccttgttttcttcgttgctacaattttggtagcatggcaatgccatgcgtacgatatgttccctctccgaatgaacactggctatggtgcccgtactccggaggtgaaatgcgcaagttggaggcttgctgtggaagcacacaacatctttggctttgagaccattcctgaagagtgcgttgaagcaacaaaggaatacatccatggcgaacaatatagatcagactccagaacagttaaccaacaagcttacttttatgccagagacctcgaagtccatcccaaggacacattt

SEQ ID NO: 5457 - DNA, 374 bp, Glycine max
  unsure at all n locations
  Clone ID: LIB3073-011-Q1-K1-A3
gacggctttttatccgaactgaactcttggggaagggaattccacccactcatcaatggcatctactctcttcgcttgcccgtcgttgtgttcctcctcttcttctatattttctacttccgtcaaattctccttaaacccgaataaaatttctcttccgttcgccggaaacaaaaaacctctttcggctccaattcgaaggcggttcaatgtcattgctatggctccccctaaacccggtgggaaggccaagaaagtggttggaattataaagctggctcttgaagctgggaaggctacacctgctcctnctgttggccctgctcttggttccaaggtgtcaatattatggctttctgtaaggattacaacgc

SEQ ID NO: 5458 - DNA, 218 bp, Glycine max
  Clone ID: LIB3073-011-Q1-K1-C10
accggtccggaattggcccgaccgcacgcatgcgaccgctgccacaagactacagaagggggagtgatagagatgtcgttggcttcaagcatgttcgggtgtggagtggtgatggcggcgtcgcaagcaatgggaattggaaagagaagccatggtggattgacgatagcgagttcgtctaagccgcagaagaaagcgacggtgcatcacatgaagac

SEQ ID NO: 5459 - DNA, 118 bp, Glycine max
  Clone ID: LIB3073-011-Q1-K1-E1
gattcagattacattgcaaaaatggcatcattcaccatgacagcttccatccttggcagcccagccgtcaccaaccggtcggcagtagcaacgcagaggagatcactcgtagtgaatg

SEQ ID NO: 5460 - DNA, 350 bp, Glycine max
  Clone ID: LIB3073-011-Q1-K1-E4
ggcatctccactatattacaattactactttctctctctctttgtaacttgtaagcatggagtcctcaaagatctatgcttacctcttcccttgcatgctcttcctctcctccgccactcccattctcggctgtggctactgtggcaaaccccccaaaaagcacaagcctgggaaaacaccaaagacacccacagtacccgttgttaagccaccagtcacaatccctcccattgttaagccaccagtcacaatcctgcacagtgttgatccaccagtcacaatccctcccattgttcatccaccagtcacaattcctcccattggtaatccaccagtgacagtttcaccc

SEQ ID NO: 5461 - DNA, 221 bp, Glycine max
  Clone ID: LIB3073-011-Q1-K1-F6
ggagcagaatcttcaggccaagccaggtaagcacaaccaaagcaacaccccaaatggcttcagcttctgttcccatggcgttgtcactgagctctgttaccaacaacaacaagccttcatccgaagccttcttcaggccactacccctacgccaaccagagaggaccctcttcaccacgaaggcagtgtcaaactccaagcctcaaatcaatgcatctttg

SEQ ID NO: 5462 - DNA, 106 bp, Glycine max
  Clone ID: LIB3073-011-Q1-K1-F8
ggttttggagggagagaaagaaaaaaggggaatttcaatggcgtcaagggtttctctgaaggcgaacgggaagagttcaaagggatcgaacgctgcggaagatcga

SEQ ID NO: 5463 - DNA, 443 bp, Glycine max
  Clone ID: LIB3073-011-Q1-K1-G3
cgacagaaggggagacttttctggaatgtttatttgcaagcagcaagtcctatcccaaccctaaccctaacttcgaaccttcgtcctttctctcttcttccttcagattcatccgtaccgttagttactactggattcgcggttgattgctgctaccgggtttctcctctttcacgtataagatgcacttgcggtcatcattttaccaacatgcagattttgagttggcttctgaatataaatggacgccaaacggttcatccagctggttgaggagaagaagaagaaaattatggagagaaaggaagctcctttgaaatgggagcagaagctggaagctgctgctgaagctaaagagaggaagctgaaggttgcaaagcatacaaaaagatctggctctgatagtgacagcgattatgacagtgatgatgagagtagaaaga

SEQ ID NO: 5464 - DNA, 54 bp, Glycine max
  Clone ID: LIB3073-011-Q1-K1-H1
ctgttgctttgagacgacgacaggaggatacaggtgacgatagactacagaagg

SEQ ID NO: 5465 - DNA, 206 bp, Glycine max
  Clone ID: LIB3073-011-Q1-K1-H4
ggagataatgtttacattatcatatcctggcactctaccacaaatgccatgccacgtgccaccaaagcaatcacaaatacgtggccactattattattatcacttgtttttgtttcccatagcatagaagaagcagaaagagaagcattagcaaaagcaagaagaactagtctaagcagaaatggcctcttcagtgatgacatctg

SEQ ID NO: 5466 - DNA, 254 bp, Glycine max
  Clone ID: LIB3073-012-Q1-K1-A7
tttgttttttttttttggtaaactcaaggatattttgaggaaacccaaaaatgttaacgatgtactacatacttcctcagttgaaagaatagaagaaggaaggggaaaaaaaaaaaaaaaacaaaagaaaaaaaagcgggctttataaatggtgcactttttgtaaccctagtttataaaatcgtatccttttgatggtgacacctacatttaaactgctggacttcgtgctttaaagtaaggattggtaaaac

SEQ ID NO: 5467 - DNA, 179 bp, Glycine max
  Clone ID: LIB3073-012-Q1-K1-B12
gagacctaaagtctggcggagctacccgctgagtttaagcatatcaataagcaaaagcggacgatctagaggatccaaagcttacggccgctctataggaaccaagctgacgtactcttgcgtgacacatcttagatcactatacggccacctacaacgaattgactggccaaagcttg

SEQ ID NO: 5468 - DNA, 421 bp, Glycine max
  Clone ID: LIB3073-012-Q1-K1-B3
agaagacgacagaagggggaacagaaactgtagaagcctgtcgaacagtgaattgtaatagtggtaaaatgaaagaatgaatgggtatatatatgtgtgggagtatacagatatagatatagatatggtggtgcagctgtggtgatttggcattttctggtttttgttcggtgcttgttggtattggttggtttgttggttccatttgatgtttacatagaggagctagcttagccactttcggcaaaagaactcacagagatacatttacacaaagaaagaacgcgtttactgtttagagaccaaaccccatcttttgtaccactcaatgaatcattagtccatactcaaactctgaaagcgagtgtttttttagagctgagacaaatagtatatatttgagtttgggtgattggagaag

SEQ ID NO: 5469 - DNA, 344 bp, Glycine max
  Clone ID: LIB3073-012-Q1-K1-C3
gaataacgtgtagtgccagacgcagtgactaaaccaaacctctcactcgccgtcgtagggtttctcctttcgtttagcaacaacaacaatggttgcagccaagaaaaccaagaagacccatgagagcatcaacaacaggctcgctcttgtcatgaagagtggaaaattcaccctcggttacaagacggttctcaaatcacttaggagctccaaagggaaattgattatcattgctaacaactgcccccctttgaggaaatcagagattgaatactatgctatgttggccaaggtttgagttcatcattacaatgggaacaatgtggatttggcactgcatgtgg

SEQ ID NO: 5470 - DNA, 52 bp, Glycine max
  Clone ID: LIB3073-012-Q1-K1-C9
gaccccatctcaaaatagaaaaaagaaactcttccacaattcaaactcagac

SEQ ID NO: 5471 - DNA, 342 bp, Glycine max
  Clone ID: LIB3073-012-Q1-K1-D11
gacacaccccattgctacatagggctatatagcataaacatttgagtcttcattgcacaatgtcaacctcttccataaacgagtggtgcctctcttccatctccccagccaaaacctctctcaggaaggccacattacgcccttccgtcttcgcaacccttaacactccttcttctccttcctcttcatcttccttcccctctctcattcaagacaggcctgtttttgctgcccctgcccccatcatcaccccaactgtgagagaggatatggcaaaggaatacgagaaagctattgaagaactttcagaaatggtgaaggagaagagtgaactcaaagcga

SEQ ID NO: 5472 - DNA, 315 bp, Glycine max
  Clone ID: LIB3073-012-Q1-K1-D5
agaagaagaaggagcatggccatgagcatggccatgacagcagcagcagcagtgacagtgattaaactgctgcatcacctatatatttaaaaggtttatgggaccatagtagcgagggctgtgccttaatttctctctctctctctctctctctctctctctctctctctctttttcctttttccctatcttgtgatctatttatgagtgagaaaaacaaaagtgagaaattgtgcgtgtatctggttgctaattcgagtgctattagtctgtggtttggttggtttgtaaccccgctacttgggttatgtttga

SEQ ID NO: 5473 - DNA, 449 bp, Glycine max
  Clone ID: LIB3073-012-Q1-K1-E10
acagaaggggacaccaacacctttacaaacccactaagatggcttcctttgtatccttcctagtgctgcttcttgcagcccttatcctcatgcctcaagggcttgctacttactacaaaccaattaagaagccaccagtgtacaagcctccagtgtacaagccaccagtgtacaaaccaccggtttataagccaaaaccaccggtttacaagccgaaaccaccggtttacaagccaccatataagaagccaccatacaagaaaccaccttatggaaagtaccctccagtagaggacaacacccatgcctaaagcaagcaatgaggtctattatctacttaataaataagaggaactgctttgtgttttctagcattgtgatttacaacttcgtagcaatgcatattcttgactcttgcatgcacttcaatccttcgtagcattaatgat

SEQ ID NO: 5474 - DNA, 57 bp, Glycine max
  Clone ID: LIB3073-012-Q1-K1-F1
gagacctcaggtcaggcggggctacccgctgagtttaagcatatcaataagcggagg

SEQ ID NO: 5475 - DNA, 398 bp, Glycine max
  unsure at all n locations
  Clone ID: LIB3073-012-Q1-K1-F6
gacagcgaaacagagagtgatttcagtgagtgatcggtgttcacttgatctcatcataatcgtcagcgtcaattgaagaagatgccgatcagaaacatcgccgtcggaaggcctgaagaggcgactcaccccgacacgttgaaggcggctttggctgagttcatctcaaccttcatcttcgtgttcgccggctcaggctccggcatcgcctacaacaagctcaccgacaacggcgctgccacccctgccggcctcatctccgcctccatcgcccatgcattcgccctcttcgtcgccgtctccgtcggcgccaacatctccggcggccacgtcaaccccgncgtcaccttcggcgccttcgtcggcggcaacatcaccttccttcgcggcatcgtcta

SEQ ID NO: 5476 - DNA, 452 bp, Glycine max
  unsure at all n locations
  Clone ID: LIB3073-012-Q1-K1-F7
cggtccggaattncccgggntcgactcctacgcgtctcgacgggctggcgagaagactgactagaaggggtaccggtctggtcgagagaacgactagaaggggtaccgggctggcggagaagactgactagaaggggtaccgngtctgcgagagaactgacagaaggggtaccggctntgtcgagaagaacgactagaaggggtaccggctttgtcgagaagactgactagaaggggtaccgtgtcttgcgagaagaccgactagaaggggtaccggggctgtcgagaagaacgactagaaggggtaccgggctgggcgagaagaacgactagaaggggtaccggggcttgcgagaagactgactagaaggggtaccgggctgggcgagaagaacgatncagaaagggggggggtcgcaagtgaaccagngtcccgggcgacttgtttactc

SEQ ID NO: 5477 - DNA, 181 bp, Glycine max
  Clone ID: LIB3073-012-Q1-K1-G1
tagggttattagacacattcttcagcgactgcgtttttggatcggaacctcttctgcggcgtagcaatgggacactccaacgtttggaactctcacccaaaaaactacggtcctggttctcgcacttgccgtgtgtgtaagaatccacatggactaatcaggaagtatggccttatgtgct

SEQ ID NO: 5478 - DNA, 295 bp, Glycine max
  unsure at all n locations
  Clone ID: LIB3073-013-Q1-K1-A3
gcccccgaacaatcctttaaggttggaaaccctgtaggtattatgtcgcgcctttggcggccctggtcttggtggtgaaccctccggtttggaactaccgatccaaggtcactttcatctacaactactctgatcaccgtgaagccaacggcggccaagacttgtacggcattagtccttgtggcgtttcagctttaggagttatcaattatgggtgagtttacaattcagattagcaacgaccttgttaatcaacttgttgatgatgcggtcccgaagaaaaaaaannnnnnnn

SEQ ID NO: 5479 - DNA, 181 bp, Glycine max
  Clone ID: LIB3073-013-Q1-K1-B1
gaaaaataaaaaaagacaacaaaaaagagacagggcagggcataaaaaaataaaagaaaagaaaataaaaagctggacgatctaaaggatccaatcttacgtacacttgcttttctacttcgtacctataatataatgtcacctaaatacaattcactggccttcaatagtacaccatgtt

SEQ ID NO: 5480 - DNA, 447 bp, Glycine max
  unsure at all n locations
  Clone ID: LIB3073-013-Q1-K1-B10
acagaagggaaaggagattcccgtttcagttacattcaattcaacgattgaccaaaagagaattcaaaaaataacatttagatcacccaaattccaatatttctatgaaacaataattaaatctaacgaatttatttcgattgattgtatccatatggggtaataataaaagggggaggagagcttaaaaaaacaagataacaaataaagtataagtgcggggggtcaaactgggtgtatataatcggatcactataagacaactctttcttttgaggtttcaaagaatgattttcgaattcgattgaatctaaaacacanaagaattggtttacaggatagaagaaacccacgtatatgtgataggatattctatatgaactagttatatatgaactaaccatatccatatatattatataaaataactaatattttatatctaaa

SEQ ID NO: 5481 - DNA, 239 bp, Glycine max
  Clone ID: LIB3073-013-Q1-K1-C4
gagcgccaatgtttttttcagaggagtttcatcttgtaatcaaaagagtttatcttatagtaagaaatcgatgtcttactccattttaaggaacaaaacaagagaacaatagcctgacaaagggtttagccataaaatcaaatccatcattgatttgagatattgataaagtgaatactcatttctcgtcaatgctaggcataatgcgggtatagggacctaaaaaagattatcttttc

SEQ ID NO: 5482 - DNA, 368 bp, Glycine max
  Clone ID: LIB3073-013-Q1-K1-C6
gttggaaaaaccaccgaaagggatcttaagccactttagagaaaaatggcggacccttggtttcggaaaaaaatctggaaaaaaagggggaaaaattcaaaaaggcctaaaatggccaggaaattttccgccaaaacaaactggcgttaacaaaagggttttaattcccgtggtaaggagaaagttcaagggatgcactttgatgccaaacatcggtaatgggtctgacaagaagacccgccactatttccctaatggttttaagaaatttgttgtcacaatgtgaaagacttggaactgctcatgatgcacaacaggacttactgtgctgagattgctcacaatatattcacaagaaagagaaaaga

SEQ ID NO: 5483 - DNA, 320 bp, Glycine max
  Clone ID: LIB3073-013-Q1-K1-C9
caacataggtcatcgaaaggatctcgaagacccaccaacgcacgaaagccgggatctttcagaaaatggattcctattcgaagggtgcataaccgcatggataagctcacactaacccgccaatttgggatccaattcggttccttaggaggtatcgggaaggaattttggaatgtaataatatcgattcatacagatacagaagatagggttctctattgattcaaacgctctacctacgagataaggatagagaaagaggaaaaaaccgaggatttcacatagtacttttggtcgaaaaaatcgatcttgattttttc

SEQ ID NO: 5484 - DNA, 447 bp, Glycine max
  unsure at all n locations
  Clone ID: LIB3073-013-Q1-K1-D11
agacgacagaagggaataatgaataaaaaaatcaaataataattaataagaaagaaaaaagtgtaaatcaaatagaaatttataaaatctatgatcctagagtagttccctagacaaaatagaagtaagttcacaaacaagattcaagaataagattctctgatgaaaggagagaaatatgtctgaggatccgctgggtataaggagtgaaagaggggatcatttgtttcttgaacagttcctttaaaaaaattttctatcggatttttgagtcataggagattttatgatttatgacttggaggatttttaagaatagaaaggaataactacattgagttcatcgatttgccctagatatcaatagactcataaattattttttattcgaaaccatanagaataaattaaaagaaaaaaaaaagcggcccgctctagaggatccaa

SEQ ID NO: 5485 - DNA, 444 bp, Glycine max
  Clone ID: LIB3073-013-Q1-K1-D2
gcattacctctttggtggtcctccagggaactgattcatacctaccatgtgatgtatcatgtgtaaaatggatagtgttgcattgtgtttagaccagtggactttgtttcttgttcaattgaatctcttgacaatgttggtgtggcttgatggccaaactaagctgattcataggtttgttgttctgtgttattgtgtgggtttcgattaatgaaatttactgtgcgaatgagctaaagcggctcataaatgttctcttatctttattattgtgttcatttcatgatgctgactttattgaaatgaccctggggatcatatatagcattggtcttgttccatgtgatggaattattaagtaaagcagcattggtcttgttagttttctttggttctagaaatgtacgagagtatttgggttttactcatttctacttctcaatg

SEQ ID NO: 5486 - DNA, 337 bp, Glycine max
  Clone ID: LIB3073-013-Q1-K1-E6
gacacccaaatccttcttcaccttcacaattggaaaaaaaaaaaaaaaaaaaaaaaaaaaaaaagcggcggtttaaaagaaccaagcttaacttccccttccttccaacttataagccttttaatggggtaactaaatttaatttaatgggccgtcgtttaaaaacgtctgaccgggaaaaaccttggggtacccaaattaaacggcttggaagaaaatccccttttgtcaagttggggaaataccaaaaaggcccgaacgaatggcctttccaaaaattgggcaacccgaattggcaattggaacaccccttgaacggggcaataaaccccgccgg

SEQ ID NO: 5487 - DNA, 387 bp, Glycine max
  Clone ID: LIB3073-013-Q1-K1-E8
gcagacgacagaagggggcgtagaatttaatttgagaaaatatatctgttacaagttggatcaaggagaagcatagacatgaagaagcgaggatcatgcatgcgttttctgatgcgggttattgtgattcggctccactcacatctcagcattgcagctgtactgttcaagtccaatgacacggacactgcttctgagagttctgagtgcgatggctacgtagaagactgcctcaacaacgtacaccggttggactcagagcttcttcccaccatctacagctcccactttcgcagaatgctatctggatgagccaataaagtcgtttgtgatacactcaaatcttgagacttcttgtgtacgactatcaatggttatcgtccctgt

SEQ ID NO: 5488 - DNA, 312 bp, Glycine max
  Clone ID: LIB3073-013-Q1-K1-F4
gatagcgaaacagagagtggtttcagtgagtgatcggtgttcacttgatccttcataagtcgtcatcatcatcatcatcatcaccgttgattgaagaagatgccgatcagaaacatcgccatcggaaggcctgaagaggctactcaccccgacacgttgaaggcggggttggctgagttcatctccaccttgatcttcgtgttcgccggttcaggttccggcatcgcctacaacaagctcaccgacaacggcgccgtcactcccgccggcctcatctgcgcttccatcgcccatgctttcgccctcttcgtc

SEQ ID NO: 5489 - DNA, 220 bp, Glycine max
  Clone ID: LIB3073-013-Q1-K1-G6
ggtggcttcatttgtttctacccactgtatcctccctagcggggttggatttgtgcatgaccaagatcgttcttgtggtagaactaacactttgcatcttcaaaatgctcctaaaagccctagctctctctcctttttgctctccgtgcgagaaagtagatcagatgccgttgttgttcagagcaagggtcgatcgtctttttctcaaacagctgctgtg

SEQ ID NO: 5490 - DNA, 337 bp, Glycine max
  Clone ID: LIB3073-013-Q1-K1-H1
ggtctgcgaaagaatcaatggcatctactctcttcgcttgcccgtcgttgtgttcctcctcttcttctatattttctacttccgtcaaattctccttaaacccgaataaaatttctcttccgttcgccggaaacaaaaaacctctttcggctccaattcgaaggcggttcaatgtcattgctatggcttcccctaaacccggtgggaaggccaagaaagtggttggaattataaagctggctcttggagttgggaaggctacacctgctccttccgttggccctgctcttggatccaagggtgtcaatattatggctttctgtaaggattacaacgc

SEQ ID NO: 5491 - DNA, 80 bp, Glycine max
  Clone ID: LIB3073-013-Q1-K1-H6
tacaggtcttcgaagacgacatactggtacagttgctagaagactacagatgggtacagatgcgataagactactgaagg

SEQ ID NO: 5492 - DNA, 373 bp, Glycine max
  Clone ID: LIB3073-013-Q1-K1-H7
ggaaatcctgagcttccattgtgctcactcatctcttacaacgaaaccctcttcatcttgttctatctgtgacgagcaacatggcctcaagagcagtgttattgttggctatgtgtgtgcttccggcgatggttgtggccattcgcccagcaaagaaccctttttgcgtgaagggtcgtgtctactgtgacccttgccgtgctggttttgagacctcagctaccacctacattgctggtgctgagattatgttgcaatgcaagagcagggttagcaacgaggttgtgtacacgaagaaggggtacaccgactcaaccggagcatacacaatgtacgtggatgaggatcacgcagatcagatctgcagtgccaa

SEQ ID NO: 5493 - DNA, 227 bp, Glycine max
  Clone ID: LIB3073-014-Q1-K1-A11
gattgtgattcatttgcacatttggaaagtgttgtttttctttttttcatttgcattgcaaagcaaaaaccttgcaaattgcaatggcttccaacaaggttattgccaccatcttggttctttctctccttgcctactcaacatcattcaccaatgcatgtggcacatgccacccaaaacctactccttctccccctcctccatcagggaagtgccccaaagacaca

SEQ ID NO: 5494 - DNA, 368 bp, Glycine max
  unsure at all n locations
  Clone ID: LIB3073-014-Q1-K1-A4
aagacgacagaatgggagggtacaatacaaacacaaagtcagggacacaaatctgggtatagtggagtagtanggtttttgcgtttgagagagaagaagcatgagcaggagtttgggaattccggtgaagctgctccacgaggcttcggggcacgtggtgacggtggagctcaagagcggagaactctacagaggaagcatgatcgagtgcgaggacaactggaactgtcaactcgagagcatcacctacactgccaaggatggcaaaacatcgcaacttgagcatgtgtttattcgaggcagcaaagtcaggtttatggtcatccctgacatgctgaagaatgctcctatgtttaagcgtttggatg

SEQ ID NO: 5495 - DNA, 52 bp, Glycine max
  unsure at all n locations
  Clone ID: LIB3073-014-Q1-K1-A9
ccactcttcctaccactcgtccttccactcttacaaccacacctacncccac

SEQ ID NO: 5496 - DNA, 99 bp, Glycine max
  Clone ID: LIB3073-014-Q1-K1-B10
tccaaaagccaccaaaggggatttttccagaatttttttttaaccattggggtggttatcacgaagagaatattaagttttttgttttcctttgtgctt

SEQ ID NO: 5497 - DNA, 257 bp, Glycine max
  Clone ID: LIB3073-014-Q1-K1-B11
gatagaagaagcagaaagagaagcattagcaaaagcaagaagaactagtctaagcagaaatggcctcttcagtgatggcatctgtggccctcaaacctgcccctttcactgttgagaagtcctcagttagaggccttccctccctctcaaggaactcctcttcattcagagttgtggccagtggtggcaagaagatcaagactgacaagccttatggaattaatggtggcatggctttgagggaaggagttgatgca

SEQ ID NO: 5498 - DNA, 54 bp, Glycine max
  Clone ID: LIB3073-014-Q1-K1-C7
gacggatggggggacctcgactcataggcacgggccctaaaagactacttaagg

SEQ ID NO: 5499 - DNA, 256 bp, Glycine max
  Clone ID: LIB3073-014-Q1-K1-E11
caaagggaaactaatatagttccatcctctcaaacttgcattttagcaatggccaaatggatctcatttgctgctctttttgcaatacttttactactcatctctcctgagcttgcaagtgctgcccaacctagtcttattcttcaactcggccgaaaactttttcaatgcggcagcgccgccgtccctgttcgtggaaataccccatccaatggccgctcgtagaggatataccccaccaccaaaacacccactc

SEQ ID NO: 5500 - DNA, 171 bp, Glycine max
  Clone ID: LIB3073-014-Q1-K1-E4
accggtactgaatgcccgggtcgacgccacgcgtaccggtgggataagacaaccgaaagggatcccccatcacacaaaaaagattagggtcacgagggtttcttttgcctttggttgggaatcttgatcaaaatatcaatcatcccttcattattcatcgggtcggcggcg

SEQ ID NO: 5501 - DNA, 173 bp, Glycine max
  unsure at all n locations
  Clone ID: LIB3073-014-Q1-K1-F8
ggattaagaaatccatgttgagaggtggcaacagagaaaccctaaattgaagagaagagtgaagattgagagttagggcttaagcgagatcagagaagaaggcatcatgtttccgggaatgttcatgcgcaagcctgacaaagctgcagcactgaagcagctganatctcatg

SEQ ID NO: 5502 - DNA, 176 bp, Glycine max
  Clone ID: LIB3073-015-Q1-K1-B4
cgggatgtgtccaccggcaacaaagataatggcatttacgtacgtgacacttgtcactctgtctaaaggatcctaccttaccatcgcgtacattctatgctataccaacactctattgtctacctcgcttcaatttacatggccctgcataacaatgtcgctactggtaaatccct

SEQ ID NO: 5503 - DNA, 305 bp, Glycine max
  Clone ID: LIB3073-015-Q1-K1-E1
tactggtccggtaatacccaggccgacgcacgcgttgcgcacaagaccaccgaaaggggcagatggacgagcatacggcatgagcctggccgtgacaaggggactgacaggctacagttgttgaaacctaccacatgcatcctatgtatgctaaaggactattcgaacctttaaatgaatgttgaacattacttttactatacctccatcactttgtctttcttaatgtatgtgtttcaattagatgtatgtactgagctctttaattactaaaccatgttaggtcaacatttgccagagtatca

SEQ ID NO: 5504 - DNA, 362 bp, Glycine max
  unsure at all n locations
  Clone ID: LIB3073-015-Q1-K1-E6
ggcacaagtgagnttgttgatcgagataactaggaaacagtgtggatgaaaatgaaggtcctggttttcttcgttgttacaattttggtagcatggcaatgccatgcgtacgatatgttccctctccgaatgaacactggctatggtgcccgtactccggaggtgaaatgcgcaagttggaggcttgctgtggaagcacacaacatctttggctttgagaccattcctgaagagtgcgttgaagcaacaaaggaatacatccatggcgaacaatatagatcagactccaaaacagttaaccaacaagcttacttttatgccaaagacctcgaagtccatcccaaggacacatttgtgttcag

SEQ ID NO: 5505 - DNA, 146 bp, Glycine max
  Clone ID: LIB3073-015-Q1-K1-F5
gattaaaaatgggaatgaaccaatggcattacgaaaaaaaaaaaaggaaaaaagaaaaaaaagccggccgttttaaagaaccaagcttaactacccctgcattccaaggcataacttttctataggggcacctaaattcaattcaa

SEQ ID NO: 5506 - DNA, 52 bp, Glycine max
  Clone ID: LIB3073-015-Q1-K1-G11
accggttgtaaaaggccaccgaagggtacagatggcagaagaccacagaagg

SEQ ID NO: 5507 - DNA, 294 bp, Glycine max
  Clone ID: LIB3073-015-Q1-K1-G3
gattcagattacattgcaaaaatggcatcattcaccatgacagcttccatccttggcagcccagccgtcaccaaccggtcggcagtagcaacgcagaggagatcactcgtagtgaatgctgccaaagctgttgaagcagaaaaggtcagttatgacaatgacatggatggtagcaatggaaggaggaacttgatgttcgccgcggcggcggctgctgtttgctctgttgctgggatggcagtggcagatgagcctaaaccaggaaccccagaagccaagaaaaagtatgctccg

SEQ ID NO: 5508 - DNA, 411 bp, Glycine max
  Clone ID: LIB3073-015-Q1-K1-G4
tcgcatacgacgactgaaagatgcacgcttcaaggatactgctgagaggtaccgatacggggatacgggagatgggttcgggtattaggagacgacctatggttaccgctgcgtcaataccaccgaatgctaccgcttttacaagactattgataggtcctgtttcgagaagactgacagcatgatacagttgctatatgacgactcattggtaccgttccaataagaccttagatggctaacgctatcacaagtcgacagaagggttcgagttcgtgaagaccacagagtggttcctgtgttagacgacgactgaagcggtaagcctctaaacttacagattgacattggcaattgctatgttctcacagtgccctggtatctctgactctcacaagcccaatactacct

SEQ ID NO: 5509 - DNA, 203 bp, Glycine max
  Clone ID: LIB3073-015-Q1-K1-H4
gaatgcaccggtgaaatgatcggattgcggtgactacagcgggtcgcttctcgagacgtcgagagaatgtcactgaaccttatcatttataggatgcccaaagtgaagcctaaatacaagcggccgctctataggatccaaggttacgaacgcgtgcaagcgacgtgatacctcttctatagagttgcataacttcaatttaa

SEQ ID NO: 5510 - DNA, 374 bp, Glycine max
  Clone ID: LIB3073-015-Q1-K1-H7
gaagcaaaggtttatgaggcaaggcaccagtaattaataacaagctagctattagttcgattttgtagtaagtgaggtgccaatatggtgaagatagctcttggtactttggatgactcttttagcgctgcctctcttaaggcttatttcgcagagttccacgcaactctgattttcgtgttcgctggtgttggatcagccatcgcttacaacgagcttacaaaagatgcagccttggatccaacggggctggtggcagtagctgtggcacatgcatttgcactgtttgtaggtgtctccgtcgccgccaacatctcacgtggccatttgaacccagctgtcacttttggattggccattggaggcaacatcac

SEQ ID NO: 5511 - DNA, 299 bp, Glycine max
  Clone ID: LIB3073-015-Q1-K1-H9
ggttctagtgtgtgattgtttgttgttgtaactcgttcttcttcttttgatgttctgtgtttgtgtttgttttttctctcacctgaaaatgtcttgctgcggtggtaactgtggttgcggaagctcctgcaagtgcggcaacggctgcggaggctgcaagatgtacccagacttgagttacactgagtcaaccaccaccgagaccttggtcatgggagtggcacctgttaaggctcaatttgagggtgctgaaatgggtgtgcccgctgaggacgatggctgcaaatgtggaccaaact

SEQ ID NO: 5512 - DNA, 176 bp, Glycine max
  Clone ID: LIB3073-016-Q1-K1-A3
ttcggctaagagaggattacggagggttcctacgtgcacaaaaccgcggaagggcatgatgatcatcgtcatgcttcggggagttgaaaattagcgtagatacggtgattcctctatatgagccaagcttacgaactggtgcttgatacacggtcagtcttatatagtgtcaccta

SEQ ID NO: 5513 - DNA, 468 bp, Glycine max
  Clone ID: LIB3073-016-Q1-K1-A8
ggacagctattcctcttaagcttgctactgagttgggacactgcataccttaggtcttccgaattcgaagttaatttgcaagatggctaaggaaaaggctcagatcaacattgtggtggttggtcatgtggaccctgaggaggcaaccaccattaacgggctgaagaagcctgttgtggagaaagaagctccagggcatgccatatgagggcatgcacgtacggcctcggagggaaccagaaaattatgttaacaaaataatctggaaccctaatgtatcagtgtcatcatcagtgtgtagtttaagctagctttgctatggttacgttctttgagatgagagtcttgatgaacagtaccattctgatgtattgctttccttgaaagttaatgcatgcttcttatcttctgaaaaaaaaaaactctacattaaaaaaaaaagcggccgctctaaaggatccaagctta

SEQ ID NO: 5514 - DNA, 67 bp, Glycine max
  Clone ID: LIB3073-016-Q1-K1-C11
gagacctcatgtcaagcggggctacccgctgagtttaagcgtaggaataagcacaacaaagagagga

SEQ ID NO: 5515 - DNA, 395 bp, Glycine max
  Clone ID: LIB3073-016-Q1-K1-C9
acagaaagagcacaagtgagtttgttgatcgagataactagaaacagtgtgatgaaagtgaaggtccttgttttcttcgttgctacaattttggtagcatggcaatgccatgcgtacggtatgttccctctccgaatgaacactggctatggtgcccgtactccggaggtgaaatgcgcaagttggaggcttgctgtggaagcacacaacatctttggctttgagaccattcctgaagagtgcgttgaagcaacaaaggaatacatccatggcgaacaatatagatcagactccaaaacagttaaccaacaagcttacttttatgccagagacctcgaagtccatcccaaggacacatttgtgttcagtatagatggcaccgtactctctaatat

SEQ ID NO: 5516 - DNA, 72 bp, Glycine max
  Clone ID: LIB3073-016-Q1-K1-D2
gggcagcagaagaacaagtagttgagaactaagaaggagaagcaaatggcttcctcaatgatctcttcccca

SEQ ID NO: 5517 - DNA, 298 bp, Glycine max
  Clone ID: LIB3073-016-Q1-K1-D8
ggttctagtgtgtgattgtttgttgttgtaacccgttcttcttcttttgttgttctgtgtttgtgtttgttttttctctcacctgaaaatgtcttgctgcggtggtaactgtggttgcggaagctcctgcaagtgcggcaactgctgcggaggctgcaagatgtacccagacttgagctacactgagtcaaccaccaccgataccttggtcatgggagtggcacctgttaaggctcaatttgagggtgctgaaatgggtgtgcccgctgagaacgatggcttgaaatgtggaccaaac

SEQ ID NO: 5518 - DNA, 187 bp, Glycine max
  Clone ID: LIB3073-016-Q1-K1-E11
gaggaagagtgagcgtgaaagatgccttgggtgaggctttcagagtctccaaggctcgacgttgctattgacatgggtaatccatttctcaatctcactgttgatggtttccttaagatcggagctgtcgcagtcacgcgatcagctgctgaagatacttatcatattatccaaaagggaatatctc

SEQ ID NO: 5519 - DNA, 337 bp, Glycine max
  Clone ID: LIB3073-016-Q1-K1-H7
gctcaaacggtcttatctctctcttacacacccaagcactactactactactttctttctagatatgggttctggtgctgtgcaactgtttctgatcttggggctcttggctagctcatgcttagcccaagccccaggtgctgcaccgtcacaaccacccactacaaccccatcaccaccaccacccagatcagcacctgcaccagcacccaccgcaccagcaaccccaccaccagcaacctcaccaccagcagcaactccaccaccagcagcaactccaccaccagcagcaacaccaacaccagcaccagcaccaccaacggctgcacctacacct

SEQ ID NO: 5520 - DNA, 287 bp, Glycine max
  Clone ID: LIB3073-017-Q1-K1-A1
ggcagacgccgtgactagacactcatctcactcgcgccatcttagggtttctccttttgtttcgcaacatggttgccgctaagaaaactaagaagacccatgagagcatcaacaacaggctcgctcttgtcatgaagagtggcaaattcaccctcggttacaagaccgttctcaaatctcttaggaactccaaaggaaaattgattatcattgctaacaactgcccccctttgagaaagtcagagattgaatactatgctatgttggcaaaagttggagttcatcat

SEQ ID NO: 5521 - DNA, 216 bp, Glycine max
  Clone ID: LIB3073-017-Q1-K1-A12
atccggctgcacgatgactacatagggggatactctgtatgatttcattgcgatcatcattcatagttactgaagaaaatggcaaccatctacgctgctatcacagccgaattgatcacatcgcgcatgtctagtgcaaaaacgttctcttgtgttgtcatgtaccgttcttggcttgccagcactgggtaaggacggaagagtgagccgctacat

SEQ ID NO: 5522 - DNA, 57 bp, Glycine max
  Clone ID: LIB3073-017-Q1-K1-B2
gagacctcaggggaggcggcgctacccgctgagtttaagcatatcaataagcggagg

SEQ ID NO: 5523 - DNA, 57 bp, Glycine max
  Clone ID: LIB3073-017-Q1-K1-B3
gagacctcatgtcaggcggggctacccgctgagtttaagcatatcaataagcggagc

SEQ ID NO: 5524 - DNA, 364 bp, Glycine max
  unsure at all n locations
  Clone ID: LIB3073-017-Q1-K1-C4
gatctggcagcagaagaacaagtagttgagaactaagaaggagaagcaaatggcttcctcaatgatctcttccccagctgttaccactgtcaaccgtgccggtgccggcatggttgctccattcactggcctcaagtccatggctggcttccccaccagaaagaccaacaatgacattacctccattgctagcaacggtggaagagtgcaatgcatgcaggtgtggccaccagttggcaagaagaagtttgagactctntcctacctgccagaccttgatgatgcacaattagcaaaggaagtagaataccttcttaggaagggatggattccttgcttggaattcgagttggagcacggtttc

SEQ ID NO: 5525 - DNA, 369 bp, Glycine max
  Clone ID: LIB3073-017-Q1-K1-C7
cccgtccggaattcccggtcgacccacctacgggcgagagacccacagggggccacggatgaatctacccactgagagccgtggacgacgcatagcgatcaggcgtgagcgacctcatacagcacacgactatgaattccaatattatacatcaggtgtattcagagggaaatgcggtacagaattaaatcatgctctcctgcttgtggggtatggtacagaaaaagatggacattattggatagcaaagaattcatatagtgataaatggggagagaatggctatatcagaatacaaagaatactgagcactctgtaatttggaaacgggagttactatcccattataaaagtcaccgatcaacaagc

SEQ ID NO: 5526 - DNA, 71 bp, Glycine max
  Clone ID: LIB3073-017-Q1-K1-D9
gagagagagagagattttaattgtttatgtataaaatcatttgttataggtgttagtgagaaatgagatcc

SEQ ID NO: 5527 - DNA, 436 bp, Glycine max
  unsure at all n locations
  Clone ID: LIB3073-017-Q1-K1-E1
gaacacacactgaagaatagcagcaagtagtagctcttgacccttctttccaccttttctggtccctccctccagaaatggcttctaattccattcttcttctttgtatctttcttgtggttgccactaaggttttttcctatgatgaagatctcaagacagtggttcctgcacctgctccaccagtgaaggcaccaactcttgcccctccagtgaaatcaccatcttaccctccagggccagtgaccacaccaacagttccaacacccactgttaaggtacccccttccnctcagtctccagtagttaagccaccaacaccaacagttccaccacccactgttaaggtaccccctccccctcagtctgcagtagtaaagccaccaacttcaacaccaacttccccagtggtgtaccctcctcctggtgctccatc

SEQ ID NO: 5528 - DNA, 390 bp, Glycine max
  Clone ID: LIB3073-017-Q1-K1-E5
aggggcggggacgaagaagtgaagagaagagaagagaagggatttggatctgaaaagagaagatggggggaggaatggaagcaaacaagaacaagttcatagaggattggggcactgccagagagaatctggagttcaatttccgttggactcgccgcaaccttgctcttgttggcatcttcggcatcgctattcccgtcctcgtctacaagggcatcgtccgtgaattccatatgcaagatgaagataatggtcggccgtacaggaagttcatgtgagagagtatggagagtcttttgtaataattcgtcaagttagaccttgatattatgaggctacaaaccatgttttttttccttaattcgcaaaggcttgcttgcttttaagtac

SEQ ID NO: 5529 - DNA, 445 bp, Glycine max
  Clone ID: LIB3073-017-Q1-K1-F2
gggcagcagagagacaagtagttgagaactaagaagaaggaaatggcttcctcaatgatctcctccccagctgttaccaccgtcaaccgtgccggtgccggcatggttgctccattcaccggcctcaaatccatggctggcttccccacgaggaagaccaacaatgacattacctccattgctagcaacggtggaagagtacaatgcatgcaggtgtggccaccaattggcaagaagaagttcgagactctttcctacttgccagacctcgatgatgcccaattggcaaaggaagtcgaataccttctaaggaaaggatggattccttgcttggaattcgagttggagcacggtttcgtgtaccgtgagcacaacaggtcacctggatactatgatggacgctactggaccatgtggaagctgcctatgtttggctgcactgatg

SEQ ID NO: 5530 - DNA, 101 bp, Glycine max
  Clone ID: LIB3073-017-Q1-K1-F6
cggtccgtgaattcccgggatcgaacccactgcgtcacgagctggctgagaaacgaccagacagggtaccggcttgcttatgaagaccgacccagaagggg

SEQ ID NO: 5531 - DNA, 419 bp, Glycine max
  unsure at all n locations
  Clone ID: LIB3073-017-Q1-K1-G1
ggcacaagtgagtttgttgatcgagataactagaaacagtgtgatgaaaatgaaggtccttgttttcttcgttgctacaattttggtagcatggcaatgccatgcgtacgatatgttccctctccgaatgaacactggctatggtgcccgtactccggaggtgaaatgcgcaagttggacgcttgctgtggaagcacacaacatctttggctttgagaccatttctgaagagtgcgttgaagcatcaaatgaatacatccatggcgaacaatatagatcagactccaaaacagttaaccaacaagcttacttttatgccagagacctcgaagtccatcccaaggacacatttgtgttcagtatagatggcaccgtactctctaatattccatactacaaaacaaaacaaantgggnagg

SEQ ID NO: 5532 - DNA, 364 bp, Glycine max
  unsure at all n locations
  Clone ID: LIB3073-017-Q1-K1-G10
gatgggaggaagaataattgtgaggcgagggtaaggtcgcgttgtgttgcgtcgtgtcgtgcgctgttcctctgtttctcgtttttgtgttcagaccgaaccctagctccgcatcgcaaccatgtcgaccaagcaaggtggaaaagctaagcctttgaagaaacccaagtctgataagaaggattacgacgagattgatgtggctaacattcagaagaaaaaggaagaggagaaggcgctaaaggagttgaaagccaaggcgcaacagaagggaagctttggaggttctgggctcaagaaaagtggaaagaaataagggctctntatcatgattgtatgcattcaatattgagccctgtaatta

SEQ ID NO: 5533 - DNA, 295 bp, Glycine max
  unsure at all n locations
  Clone ID: LIB3073-017-Q1-K1-G4
gacaaaccaaacaactactactactactgcacacactatttcgctctctctctcattgtatggccgccaattcgagtagccgagggatcaccgccttggggaagcgagtcgccaaccagatctggacttccaaccccccctcagctcctctcacttccaggaggggagcaatagcagctgcctacagtagcagcggcgggtcagtgtatgacaagaaccctgatgatcagatccactctgnggcggtcccagacgatgtgatccatgcaacacaatccggcaaatactgggcccc

SEQ ID NO: 5534 - DNA, 418 bp, Glycine max
  Clone ID: LIB3073-017-Q1-K1-G5
gagcgaaacagagagtgatttcagtgagtgatcggtgttcacttgatctcatcataatcgtcagcgtcaattgaagaagatgccgatcagaaacatcgccgtcggaaggcctgaagaggcgactcaccccgacacgttgaaggcggctttggctgagttcatctcaaccttcatcttcgtgttcgccggctcaggctccggcatcgcctacaacaagctcaccgacaacggcgctgccacccctgccggcctcatctccgtctccatcgcccatgcattcgccctcttcgtcgccgtctccgtcggcgccaacatctccggcggccacgtcaaccccgccgtcaccttcggcgccttcgtcggcggcaacatcaccttcctccgcggcatcgtctacgtcatcgcccagctcctcggc

SEQ ID NO: 5535 - DNA, 326 bp, Glycine max
  Clone ID: LIB3073-017-Q1-K1-G6
aaatgcagtagtgtacgaagaagtgataaatgtgttcaatgaagcagggctttctgctgataacatgccaatggatttccctcaccactcaaaaattgattccaaacatcctgagagagctttccagcagaatgtttgtgatatcccattgtgacactgctttggtctagtctagcaattttataccacgttctatttgatgatctagattttcttccagaactatattcgagtttaatgctttgatgaaaccacggtgaagaatattttttgtaatgacgtctgattcatgtagtccatctcatataataatggaataaaactat

SEQ ID NO: 5536 - DNA, 255 bp, Glycine max
  Clone ID: LIB3073-017-Q1-K1-G7
acagaacgagaacgttaaacttacgactatatctcactacttagcctagacatactctgggtcatctcattacaataatcatccatagttactgaagaaaatgaccaccatctcctctgctatcacaaccccatctatcacccgcgcatgtatagtgcaaaaacgttctcttgcgtactcatctccccttcttggtacgccagctatgggcaagcagagaagagcgacttactgcatacaagaaaagccttcttc

SEQ ID NO: 5537 - DNA, 179 bp, Glycine max
  Clone ID: LIB3073-017-Q1-K1-H1
attgactcgatagaaacaaaggagggaacaaaaaaaagcggacgctgtagaggatccaagctgaccaacgcttacatacgacggcatacgacgtcaaaacttttacctaaagtcaagtaaatttaatgcactggccaacgtttaaaaaggaaaaacctggaaataccccaccttaaccg

SEQ ID NO: 5538 - DNA, 257 bp, Glycine max
  Clone ID: LIB3073-017-Q1-K1-H11
tacgggtgggagacgactactgaagggggtctgaaaactgcaaaggcaatgcgaccgactttaggtacggaattgggaattagggttgttcgtgtgactaagatgattcaagtggagttgaacgatctattaaggaataaggttcgcctgaatggcatcgactatgacaccatacgggacctgaataacctgttggcggctcagacgggcacaagagccatcaagatccggatgcagaaatagtacaccatgttcca

SEQ ID NO: 5539 - DNA, 400 bp, Glycine max
  unsure at all n locations
  Clone ID: LIB3073-017-Q1-K1-H12
gaaagagagagaagggtaaggtaaccctagagtggtgaatcgaatctgcaaagatgtaagctgtttctcgaagaagaggtggaggcattttcgaaagcctctacaaggtcgttatgcgtcgcaactctgtctacgttaccttcgtcatcgctggcgccttactaggagaacgggctgtagattatggagtccacaagctctgggaggctaataatgttgggaaacgatctgaagacattcctgtgctagggcaaaggcagtcagaatagtgaccagcttgctagccattatgaagtcttattattttcatgaaaatctgaagtgattcagagctggaagcagtttccatttctacaataaataccatatgctngtctctttcaggcttaactcttatgcg

SEQ ID NO: 5540 - DNA, 271 bp, Glycine max
  Clone ID: LIB3073-018-Q1-K1-A11
caagaaagaagccattgagggagaagagaagttttgtgcaaaatccttgggaacagtaattggttttgccatttcaaagctgggaaagaacattcaagtactttcaagttcctttgtcaataagcaagaccaatacactgtggaaggagtgcagaatcttggagacaaagcagtgatgtgtcataggctaaatttcagaactgcagtattttactgccatgaagtccgtgaaacaacagctttcatggttccattggtggctggtgatgga

SEQ ID NO: 5541 - DNA, 337 bp, Glycine max
  Clone ID: LIB3073-018-Q1-K1-A3
gacaccaacaccaaaacaaacccactaagatggcttcctttgtatccttcctagtgctgcttcttgcagcccttatcctcatgcctcaagggcttgctacttactacaaaccaattaagaagccaccagtgtacaagcctccagtgtacaagccaccagtgtacaaaccaccggtttataagccaaaaccaccggtttacaagccgaaaccaccggtttacaagccaccatataagaagccaccatacaagaaaccaccttatggaaagtacccttcagtagaggacaacacccatgcctaaagcaagcaatgaggtctattatctacttaataaat

SEQ ID NO: 5542 - DNA, 360 bp, Glycine max
  Clone ID: LIB3073-018-Q1-K1-D12
agaagaagaagaaggagcatggccatgagcatgggcatgacaacagcagcagcagtgacagtgattaaactgctgcatcacctatatatttaaaaggtttatgggaccatagtagcgagggctgtgccttaatttctctctctctctctctctctctctctctctctctctctctttttcctttttccctatcttgtgatctatttatgagtgagaaaaacaaaagtgagaaattgtgcgtgtatctggttgctaattcgagtgctattagtctgtggtttggttggtttgtaaccccgctacttgggttatgtttgattgtatattatcctagagaaataaaaattttaaattatcagt

SEQ ID NO: 5543 - DNA, 246 bp, Glycine max
  Clone ID: LIB3073-018-Q1-K1-D7
ctccgttcctaattcccggctcgacccactcgtccatacctacaaaactacacaacagtactttagcacgagattatttttaactataaggcagtctacttcattggcaactctaacttccttattgtcctctccgtcaccctaaccttcttttctatactacttactaacgcccacttaacctactccatttctttcaacttcaacaaactcaacccaatccacccaaacattaacctccctaaa

SEQ ID NO: 5544 - DNA, 233 bp, Glycine max
  Clone ID: LIB3073-018-Q1-K1-D8
ttgcgagaaagttttattgatatattaagatgcggtagacgaggtaaccgagtttgttcattcacctttactaatcctagcacattcaggcgcacgaccgaagaccctgcaatctacaaagggtttagccataaaatcgaaatacgtggtcgatctaaaatatccatgctgacattcctgagcattcgacgatgttactcttatatcgtgtctcctagacctaattcagatga

SEQ ID NO: 5545 - DNA, 201 bp, Glycine max
  Clone ID: LIB3073-018-Q1-K1-F1
gattatatttgagttcaaacaaatcaaagccatggccaccttcaacttctctattgttctctccgtctccctagccttctttttggtgctacttaccaaggcacactcgaccgataccgtttctttcaccttcaacaagttcaacccagtccaaccaaacattatgctccaaaaagatgctagtatttcatcctctggggt

SEQ ID NO: 5546 - DNA, 84 bp, Glycine max
  Clone ID: LIB3073-018-Q1-K1-F3
gaattggcggaaaagttttatgttatatatggcaatctttctaacacccgaattatatgagaaacttcgatccatttttggaaa

SEQ ID NO: 5547 - DNA, 60 bp, Glycine max
  Clone ID: LIB3073-018-Q1-K1-F5
aggcgtgagaacagtgagagggacgacagaagggtacagctgctagaagacgggagtagg

SEQ ID NO: 5548 - DNA, 373 bp, Glycine max
  unsure at all n locations
  Clone ID: LIB3073-018-Q1-K1-G8
ggagtattcagattacattgcaaaaatggcatcattcaccatgacagcttccatccttggcagcccagccgtcaccaaccggtcggcagtagcaacgcagaggagatcactcgtagtgaatgctgccaaagctgttgaagcagaaaaggtcagttatgacaatgacatggatggtagcaatggaaggaggaacttgatgttcgccgcggcggcggctgctgtttgctctgttgctgggatggcagtggcagatgagcctaaaccaggaaccccagaagccaagaaaaggtatgctccgatttgtgtcaccatgccaactgctaggatttgtcgcaattgagggactntggtttttattttacttctgatgatt

SEQ ID NO: 5549 - DNA, 342 bp, Glycine max
  unsure at all n locations
  Clone ID: LIB3073-018-Q1-K1-G9
gaccaacacaaacaatagtgcatagcgtttttcattgtgtattattcaatggccaccacagcagctctatccggaaccatggtgagcacctccttcatgaggaagcaacctatgacgaccaagagcctaaagacattccccaacgctctttttggtctgaaaggtggacgaggtggtcgtgtaacttgcatggcctcgtacaaggtgaagctcataaccccagaaggaggagtggagtttgaatgcccagatgatgttttcattgttgacaaggctgangaagaaggcattgaacttccctactcgtgcagggctggttcttgcgtttcatgtgttgggaaa

SEQ ID NO: 5550 - DNA, 414 bp, Glycine max
  Clone ID: LIB3073-019-Q1-K1-A5
ccgcccggaatacccgggccgacccacgcgtgcgaccacacgtccgaaggtgactgtgacttcagatgtgagagcaccgccttcactaatggctatgagatcgggggtgaggcaacgatccatgactccgttgatggactcagcaaatcgaggggctttcagtcgcttcttcagcgacaagggtcgcgttctcagcgaggaggaacaggtcaaagaaaacgtctacatccagaaatgggagagggagaggttggagaaacagaagcaacaggctgagaagaccaaggcagacaagggcaaagatgctgctgctgataagaaacctgaaggttctcaaaagggctgagtttatccttcacacaacccggcaaggtcactttgtgggaaataagcatgatggagaataaaacacat

SEQ ID NO: 5551 - DNA, 286 bp, Glycine max
  Clone ID: LIB3073-019-Q1-K1-D10
ctatttgggaattattgctcccatcgccattggtttcattgttggcgctaacattttgttgggtggggccttctccggagcagccatgaaccctgctgtgacatttgggcctgctgtcgtgagctggacctggaccaaccactggatctactgggccggccctctcatcggaggtggaattgctgggcttatctacgaggttgtcttcatcagccacacccacgagcagcttcccagcactgactactagaggggaaaaatgaaataagaaaaaaaaaaaaaatac

SEQ ID NO: 5552 - DNA, 264 bp, Glycine max
  Clone ID: LIB3073-019-Q1-K1-F7
gacactcaaaccatcccttttattgaaatcctcaagcttcaatttgctttgtgctcactcatctatctattataaccaaacactcttcttcatattcttcttcttcttgttcttgttctatctgtgacgagcatcatggcctcgagagcagtgctattgttggctatgtgtgtgcttccggccatggttgtggccattcgcccagcaaagaaccctttttgcgtgaagggtcgcgtctactgtgacccttgccgtgctggtttt

SEQ ID NO: 5553 - DNA, 108 bp, Glycine max
  Clone ID: LIB3073-019-Q1-K1-F9
taggggtgcacaagtgagtttgttgatcgagataactagaaacagtgtgatgaaaatgaaagtccttgttttcttcgttgctacaatttttgtagcatggcaatgcca

SEQ ID NO: 5554 - DNA, 217 bp, Glycine max
  Clone ID: LIB3073-019-Q1-K1-H1
caaagggagatggccgaaacacaaccccccacacgattccaggggcctatttcattgctctttccaccacccattggtcttggggtgtacctcaatgttcccggggagtacctatacattggagccggcgtatttaccatcatattttgcattattgagatagataaacccgataaaccccatcacttttaaccccacatataccatattggaaagg

SEQ ID NO: 5555 - DNA, 390 bp, Glycine max
  Clone ID: LIB3073-020-Q1-K1-A2
ccgttgggttaaaaaagacaacgtacgggtaaaaaaaaaaaaattacgggttctgagtgcttaagaaaaagcaggcttttaaaaaaaattgaaaaattaatacggcgcttgtaatttcagagacaaatattcattcaaacaaaacaacttatgatagtaaaagggtagaattcgaaaaaaaaaaaattgcagatattacaaagaagaagaaatgctcgattaactcgtaaatcacattcttttttaaaatttttcatgaaaaggatatacagagatatatttctatatatcagctgtattccgaggatcaatatacaactttttcttgaattaacaaaaaaatttttaaataaatccatttacgataatgaagcaaatgcagaaagaatt

SEQ ID NO: 5556 - DNA, 315 bp, Glycine max
  Clone ID: LIB3073-020-Q1-K1-A5
gggtggagtgtgcagaagagcgtctcagtcgcaaccctaatcagaagaagcgcagcttcaagcgtgtgacagccaccagccatgggtcgtatgcacagccgcggtaagggtatatcctcttctgctttgccctacaaaaggacacctcctagctggctcaaaatctcttcgcaagatgtcgaagaaaatatctgcaagtttgcgaagaaaggtttgaccccgtctcagattggtgtcattctcagagattctcacggtattgctcaggtcaatagcgtcactggcagcaaaatccttcgcatcctcaaagctcac

SEQ ID NO: 5557 - DNA, 322 bp, Glycine max
  Clone ID: LIB3073-020-Q1-K1-A7
gaacgcacactgaaaaatagcagcaagtagtagctcttgacccttctttccaccttttctggtccctccctccaaaaatggcttctaattccattcttcttctttgtatctttcttggggttgccactaaggttttttcctatgatgaagatctcaagacagtggttcctgcacctgctccaccagtgaaggcaccaactcttgcccctccagtgaaatcaccatcttaccctccagggccagtgaccacaccaacagttccaacacccactgttaaggtaccccctccccctcagtctccagtagttaagccaccaacacc

SEQ ID NO: 5558 - DNA, 106 bp, Glycine max
  Clone ID: LIB3073-020-Q1-K1-B6
cgtagtaagcgacgaaatgcttcggggagttgaaaataagcgtagatccggggattcccgatataggtcaacctttcgaactgctgctgaatccacgggccgaccc

SEQ ID NO: 5559 - DNA, 134 bp, Glycine max
  Clone ID: LIB3073-020-Q1-K1-F2
tttccgggtcgacccaagcgttcggccacgccttcgttccggttccaaaagaccaccgaagggggagccttaaattcttttgcccttgggtcaacccccggtgggaaaaaaaaaaaaaaaaaggtggtccaaat

SEQ ID NO: 5560 - DNA, 390 bp, Glycine max
  Clone ID: LIB3073-020-Q1-K1-F5
gaatagaaatagaactgtcttttcatatagatatcccttcgacacaacataggtcatcgaaaggatctcgaagacccaccaacgcacgaaagccgggatctttcagaaaatggattcctattcgaagggtgcataaccgcatggataagctcacactaacccgtcaatttgggatccaattcggttccttaggaggtatcgggaaggaattttggaatgtaataatatcgattcatacagatacagaagaaagggttctctattgattcaaacgctctacccacgagatagggatagagaaagaggaaaaaaccgaggatttcacatagtacttttggtcgaaaaatcgatctgatttttttcgtacttttcgctcaatgatgaaatggg

SEQ ID NO: 5561 - DNA, 345 bp, Glycine max
  unsure at all n locations
  Clone ID: LIB3073-020-Q1-K1-F6
gagggttattggacacattcttcagcgactgcgtttttggatcggaacctcttctgcggcgtagcaatgggacactccaacgtttggaactctcacccaaaaaactacggtcctggttctcgcacttgccgtgtgtgtgggaatccacatggactgatcaggaagtatggccttatgtgctgcaggcagtgcttccgtagcaatgccaaggaaattggcttcatcaagtatcgctaaaagagcagttgtcaactacggaccaatattgtgttctggcactaggatgttttgaggatgttatgtttgaagaaactngagactntctttttcatctaattaattatc

SEQ ID NO: 5562 - DNA, 85 bp, Glycine max
  Clone ID: LIB3073-021-Q1-K1-A5
aggttttagaacaccaccgaaagtggcacaaattagttttgttatcgaagtaaggagaaacatttcgattaagaggaaagtactc

SEQ ID NO: 5563 - DNA, 128 bp, Glycine max
  Clone ID: LIB3073-021-Q1-K1-C5
actcatacaataccacaagacgatacaacgactcatcaattcaaaatatagggtgcattataaacattggttcgcggaacacaaccaatacactatcttgtcgctttcacaagtttgctcattaccaa

SEQ ID NO: 5564 - DNA, 105 bp, Glycine max
  Clone ID: LIB3073-021-Q1-K1-C9
gaagaaagctgctagcagagggaagttctacacttttttgtttggattgatcgagtgtactttttcttttcgagattggcttggtgtgcagtggaaagagggtac

SEQ ID NO: 5565 - DNA, 359 bp, Glycine max
  unsure at all n locations
  Clone ID: LIB3073-021-Q1-K1-D3
gacacacatcctaaataagcatcataaattcatagtctttcggtccttccttccttcctctgctctagtgtatgccactctggttaattatcatacccccttctaggcatagttcttctccctctgttctctattctacactgtgaaacccagatgaaggtagcatttgtagctgttctacttatttgccttgtcctaagctcctacttgttcgaggtgtcaatggccggttctgctttctgctcctccaagtgcgcgaagaggtgttctagggctgggatgaaggacaggtgcacgaggttctgcgggatttgctgcaacaagtgtangtgtgtgccaatctggacttatgggaacag

SEQ ID NO: 5566 - DNA, 294 bp, Glycine max
  Clone ID: LIB3073-021-Q1-K1-H1
ggtgcacaagtgagtttgttgatcgagataactagaaacagtgtgatgaaaatgaaggtccttgttttcttcgttgctacaattttggtagcatggcaatgccatgcgtacgatatgttccctctccgaatgaacactggctatggtgcccgtactccggaggtgaaatgcgcaagttggaggcttgctgtggaagcacacaacatctttggctttgagaccattcctgaagagtgcgttgaagcaacaaaggaatacatccatggcgaacaatatagatcagactgcaaaaca

SEQ ID NO: 5567 - DNA, 118 bp, Glycine max
  Clone ID: LIB3073-021-Q1-K1-H7
tggcttatgatgatcatataattatcttagcggatttcagtgagatttctatcaatgacctgattgttacacacactgaagcctatgaaaaaaatttttatttatgataaattaaaaa

SEQ ID NO: 5568 - DNA, 355 bp, Glycine max
  unsure at all n locations
  Clone ID: LIB3073-021-Q1-K1-H9
gccgctgagctccctttctcctcggtccacagagacaaaatgtaagacaggtgccaacagttcatcacgaaagaaaggactagctgagccgagatcactaactaaaacgaatttaatactaatcgaaaatactaatagaatagaaatagaactgtcttttcatatagatatcccttcaacacaacataggtcatcgaaaggatctcgaagacccaccaacgcacgaaagccgggatctttcagaaaatggattcctattcgaagggtgcataaccgcatggataagctcacactaacccgtcaatttgggatccaattcggttccttaggaggtatcgggaaggaattntggaat

SEQ ID NO: 5569 - DNA, 396 bp, Glycine max
  Clone ID: LIB3073-022-Q1-K1-D10
gacaccaacaccaaaacaaacccactaagatggcttcctttgtatccttcctagtgctacttcttgcagcccttatcctcatgcctcaagggcttgctacttactacaaaccaattaagaagccaccagtgtacaagcctccagtgtacaagccaccagtgtacaaaccaccggtttataagccaaaaccaccggtttacaagccgaaaccaccggtttacaagccaccatataagaagccaccatacaagaaaccaccttatggaaagtaccctccagtagaagacaacacccatgcctaaagcaagcaatgaagtctattatctacttaataaataagaagaactgctttgtgttttctagcattgtgaattacaacttcgtagcaatgcatat

SEQ ID NO: 5570 - DNA, 258 bp, Glycine max
  Clone ID: LIB3073-022-Q1-K1-D9
taatttgggaattattgctcccatcgccattggtttcattgtcggcgctaacattttgttgggtggggccttctctggagcggccatgaaccccgctgtgacatttgggcctgctgtcgtgagctggacctggaccaaccactggatctactgggccgggcctctcatcggtggtggaatcgctggccttgttcacgaggttgtctttatcagccacacccacgagcagcttcccaccactgactactagaggggggg

SEQ ID NO: 5571 - DNA, 201 bp, Glycine max
  Clone ID: LIB3073-023-Q1-K1-C7
gaattgcgctataatttgttgaatcaaaaaaaaaaaaaaaagcggacgatatagcggacgctctataggatccaagtttatgtaagcttgcatgcaacgtattatgtcttctatagtgaaaccatagtccaattctttagaccgtcgttttataacaaaaccattgggaaacccatgttattccccatgtaaatcatcttg

SEQ ID NO: 5572 - DNA, 86 bp, Glycine max
  Clone ID: LIB3073-023-Q1-K1-D5
tcaaacgaagaaaggcttatggtggatacctaggcacccagagacgaggaagggtgtagtaagcgacgaaatgcttcggggagttg

SEQ ID NO: 5573 - DNA, 373 bp, Glycine max
  Clone ID: LIB3073-023-Q1-K1-E10
ggtagcgcagagaaagaactagaactagggtttcatctttgccatcagtaaacgacaatgatttacgacgttaactctcctcttttccgatccttcctcagccagaagggaggctcctctgataagaggaaatcggacgaacagaagccaaaagagcagaaacccaaagccagcgagaacaaacctataatgactgagtgataacagctgagctgcattcagttgtagaatgaaaataggtggtaggtattgtatttggtgctaaactaagatctttttggctgtgttctgaagtatatgccggcgatgttggtctttggtattgtaatggtttgattttggatatggttataacgaaaacttattatggaca

SEQ ID NO: 5574 - DNA, 155 bp, Glycine max
  unsure at all n locations
  Clone ID: LIB3073-023-Q1-K1-E7
ggcggctgcagcagagaagcactcatcattcttcgtttgtctaagatccgccttctctgaattggaaaaatgtcgctcggagaaactgcttgntcatacgcagctctcatccttcatgaagatggaatcagtgtaactggcgacaagatcagcac

SEQ ID NO: 5575 - DNA, 359 bp, Glycine max
  Clone ID: LIB3073-023-Q1-K1-G3
gaatcccaatcccatttcaacctctctttcttttcttctcgcagagcgaaatcccaatcccacacaaatggcatgctcagccacctctgcttctctcttctccgcaaaccccacacctctcttctctcccaaatcctccctctccctccctaacaactctctccacctcaaccctctccccacgcgcccttctctctccctcacgcgcccctcgcacactcgccgctccttcgtcgtcaaagccttctccggcgagcttccgctagttggaaacaccgcaccggatttcgaagcagaggctgtgtttgaccaggagtttatcaacgtgaaactatctgattacattgggaagaaatatg

SEQ ID NO: 5576 - DNA, 301 bp, Glycine max
  Clone ID: LIB3073-023-Q1-K1-H2
tcttttatgctagtgaacgcgaagttcatcacaacgacatatttatattcggcatagataacaccgtactctctaatatcccatactatgaaaaacatggatatggggtggaggaatttaatgaaaccttatatgatgaatgggttaacaagggcgacgcaccggcattgccagagactcttaagaattacaacaagctgatgactcttggcttcaagattgtattcttgtcaagaagatatcttgacaaaatggctgtaacagaagcaaacctaaagaagcttgctttcacacatgggag

SEQ ID NO: 5577 - DNA, 57 bp, Glycine max; identical to SEQ ID NO: 2079
  Clone ID: LIB3073-024-Q1-K1-C10

SEQ ID NO: 5578 - DNA, 246 bp, Glycine max
  Clone ID: LIB3073-024-Q1-K1-D7
ggcacaagtgagtttgttgatcgagataactagaaacagtgtgatgaaaatgaaggtccttggtttcttcgttgctacaattttggtagcatggcaatgccatgcgtacgatatgttccctcttcgaatgaacactggctatggtgcccgtactccggaggtgaaatgcgcaagttggaggcttgctgtggaagcacacaacatctttggctttgagaccattcctgaagagtgcgttgaagcaac

SEQ ID NO: 5579 - DNA, 299 bp, Glycine max
  unsure at all n locations
  Clone ID: LIB3073-024-Q1-K1-E10
agaagacgacagaagagaagcgtggacaattcactcttgtagttggaggtttgttggtcattgcatttgttgttcctatggcacagtactatgcctatgtatccaaaaaataagataatataaatagatctgtttttcaaattctcactgttcaaattcagatgtataatgtgcagttgtaaccatgctcatgttacaattgagtttgagaaagctgaagaagaataagatgacagtttttgcttgtaaatgctattccaaagtatatgtatttgaccatttttaagaaaaaaaaanaa

SEQ ID NO: 5580 - DNA, 363 bp, Glycine max
  Clone ID: LIB3073-024-Q1-K1-F12
gagcagaatcttcaggccaagccaggtaagcacaaccaaagcaacaccccaaatggcttcagcttctgttcccatggcgttgtcactgagctctgttaccaacaacaacaagccttcatccgaagccttcttcaggccactacccctacgccaaccaaagaggaccctcttcaccacgaaggcagtgtcaaactccaagcctcaaatcaatgcatctttgaaggagaaggcagttgccggactcacagcagcttctgcgacagcatctatggtggttccggaggtggctcatgctgctggatatgagttctccccttgcctaaagaactttctactcagcatctttgctggtgggggttgtct

SEQ ID NO: 5581 - DNA, 438 bp, Glycine max
  unsure at all n locations
  Clone ID: LIB3073-024-Q1-K1-G10
agacgacagaaggggatagcagcatcatacaaagcattgaattcaaaaactaagttcatttcttgtgctttgctttattcctcaaaaccaaacatgtcgaacacatgcggcaactgtgactgcgctgacaagactaactgcaccaagggaaacagctatggtgttatagtagagactgagaagagctacatcgagactgttgacatggatgttccagcagctgagcatgatgggaagtgcaagtgtggcactaactgcacttgcacggactgcacttgtggccattaaggaatatgtatgaaaatgtaattgccatgtgtttggcaatacaaatctccaaataatgtaatcttcgtatgaataaatgtgtgctgntatcccaaaaaaaaaaaannnnnnnaaaaaaaaaaagcggccgctctaaaggatccaagctta

SEQ ID NO: 5582 - DNA, 377 bp, Glycine max
  Clone ID: LIB3073-024-Q1-K1-H12
taccggtgcggggagaccaccaaatgggggccgcagaagaaccagtagttgagaactaagaaggagaagcaaatggcttcctcaatgatctcttccccagctgttaccactgtcaaccgtgccggtgccggcatggatgctccattcactggcctcaagtccatggctggcttccccaccaggaagaccaacaatgacattacctccattgctagcaacggtggaagagtgcaatgcatgcaggtgtggccaccagttggcaagaagaagtttgagactctgtcctacctgccagaccttgatgatgcacaattggcaaaggaagtagaataccttcttaggaaaggatggattccttgcttggaattcgagttgga

SEQ ID NO: 5583 - DNA, 351 bp, Glycine max
  Clone ID: LIB3073-025-Q1-K1-A7
ggatcatacagaaagccatggcttctctggcaagcttagctgttgttcaaccatctactgttaagggccttgctggaactaagctctctttcaagccctctcgccagagtttcagacccaagaatttcaggagtggtgctgtggtagcaaagtatggtgacaagagtgtgtactttgatttggaggatctaggcaacactactggtcagtgggacttgtacggctccgatgcaccttcaccctacaaccctcttcagagcaagttcttcgagacatttgcctctccattcacaaaaaggggattgttactcaagtttttgatccttggaagtggttccacccttgcatact

SEQ ID NO: 5584 - DNA, 67 bp, Glycine max
  Clone ID: LIB3073-025-Q1-K1-B12
gaacagataaaaagagagggggttggggaatttgattaaacaaattgaatttcttcaattaacttac

SEQ ID NO: 5585 - DNA, 87 bp, Glycine max
  Clone ID: LIB3073-025-Q1-K1-C11
cctaaggctacgctgtgagaagacaacacaaaggggcgcgtgtgagatgacaacacaatggtacagatgcgagaggacgacacaggg

SEQ ID NO: 5586 - DNA, 52 bp, Glycine max
  Clone ID: LIB3073-025-Q1-K1-D12
tatacgtgcgaataagccaagacaagataaaaagcggccgctctagaggatc

SEQ ID NO: 5587 - DNA, 77 bp, Glycine max
  Clone ID: LIB3073-025-Q1-K1-E10
tggtgaaaattctagtataaacaaaaaacgaaaaaaattttaaaaagcggccgctctagaggatccaaagctacgta

SEQ ID NO: 5588 - DNA, 361 bp, Glycine max
  Clone ID: LIB3073-025-Q1-K1-F12
ggtgatttagagcgctcaattaagttttatgaaaaggctttgggcatgaaggtggtgaggaaggttgataagcctgagtacaagtacactatagctatgctcgggtatggagaggagcacgagacagctgtgttggagttgacatataactatggtgtgactgaatactctaagggaaatgcttatgcacagattgccattggtactgatgatgtatataagagtgctgaggtagttaaccaagtcataaaagaggttggagggaagattactcggcaaccagggccaattcctgggcttaatacaaaaaccacttcgtttttagatccagatggatggaaaactgtcttggttgacaacg

SEQ ID NO: 5589 - DNA, 294 bp, Glycine max
  Clone ID: LIB3073-025-Q1-K1-G12
gcgtaaaagaaaaggaagtaggcatttcagataacactcaacaataatcgaaatcgtgttttcctatgatacaagggagcgacgaggtgcacggaattggatccctgagtgtaacaataagaaaatccccaaaaggaaccctaggtggcggaaattcacgtagcatatttatagcacgagtagtaatacttaaaaaagactcgttattgggcatcactcaaacatcgatttagaaagatagtatagaaaagacgacataaggagattgaaatagatccttcttagcacatgaaa

SEQ ID NO: 5590 - DNA, 371 bp, Glycine max
  Clone ID: LIB3073-025-Q1-K1-G7
gacaacccatctttcatatccaaattccaatgcttcttcttccttcttatttcaatttcaatcactactattattactctttcacgcttttgcttctcgatttttaaaccctaaatctatctatctgtctgatagataagatagggcaaaaacaaaacaaaacaaaataaaaccctagccaaagaaagaccttgttgagcagcagcagcagagagagaggcttatggaaggagtaccgtacccaatacccagaactgtcgaagaggttttcaccgattttaagggcagacgcgctggtttgattaaggccctcactactgacgttgaaaagttttaccagcagtgcgatcccgagaaggagaatttgtgtc

SEQ ID NO: 5591 - DNA, 332 bp, Glycine max
  Clone ID: LIB3073-025-Q1-K1-H3
aatctttggaggttctgggctcaagaaaagtggaaagaaataagggctctttatcatgattgtatgcattcaatattgagccctgtaattacagttgctaccatgataacttctcttattattgtggcctactttattgctaatgtgtactgaactgaggtatgtcgtgatgtaagctgcaataagttaattgtctgtagctttattgtatccccttcatggggttctgataattacatccttttagtagtgttgtggatttggcatagacttgttcaagtaaataatggcatggcttgcgaaaaaaaaaaaaaaaaacaaaaaaaaaataa

SEQ ID NO: 5592 - DNA, 232 bp, Glycine max
  Clone ID: LIB3073-025-Q1-K1-H7
ggcgtcgtagcgtagaggaagtcgacgagggtgtgtgtgtgcgtaagcgtaacaaactaaactagggttacaaacaaccagatcttcacgcaaacttctgatttgagttttactcctttagatctgcaaatcaatttctgattttcatttaaacgcttggccgaattgtggagctgccaaagcaaaacacttattattatgtgagagcaataatgggctctggaaatatact

SEQ ID NO: 5593 - DNA, 353 bp, Glycine max; identical to SEQ ID NO: 3637
  Clone ID: LIB3073-026-Q1-K1-A12

SEQ ID NO: 5594 - DNA, 333 bp, Glycine max
  Clone ID: LIB3073-026-Q1-K1-B8
gacaccaacaccaaaacaaacccactaagatggcttcctttgtatccttcctagtgctgcttcttgcagcccttatcctcatgcctcaagggcttgctacttactacaaaccaattaagaagccaccagtgtacaagcctccagtgtacaagccaccagtgtacaaaccaccggtttataagccaaaaccaccggtttacaagccgaaaccaccggtttacaagccaccatataagaagccaccatacaagaaaccaccttatggaaagtaccctccagtagaggacaacacccatgcctaaagcaagcaatgaggtctattatctacttaat

SEQ ID NO: 5595 - DNA, 415 bp, Glycine max
  Clone ID: LIB3073-026-Q1-K1-C2
agaataagaagaaggagcatggccatgagcatgggcatgacggcagcagcagcagtgacagtgattaaactgctgcatcacctatatatttaaaaggtttatgggaccatagtagcgagggctgtgccttaatttctctctctctctctctctctctctctctatctcactctttttcctttttccctatcttgagatctatttatgagtgagaaaaacataagtgagaaattgtgcgtgtatctggttgctaattcgagtgctattagtctgtggtttggttggtttgtaaccccgctacttgggttatgtttgattgtatattatcctagagaaataaaaattttaaattatcagtcgctaaaaaaaatgacaacacacaaaaatagcggccgctctagaggatccaagctta

SEQ ID NO: 5596 - DNA, 374 bp, Glycine max
  Clone ID: LIB3073-026-Q1-K1-C9
ggaatgattgattatttttatgccaaactttataggattccaattccctccctttgagggatagaaagaacgcagcattcaaaatttagtagtactaattttgatctttctcttagcatctaattctacttgctcttgttcttcttctttcattcaagctttgtgagtgattcttagaaatcgatctctagctacaatgaacgattgggctcctcctctcatagctgcggctttgttttggctcttgagcccgggaatgatctttcagttgccggggaagaatgcaccctttcagtttatgaacatgaagaccactgttgcatccatgtttgtgcgcactgttatttatggtctgtttctgatgttgttcttcg

SEQ ID NO: 5597 - DNA, 441 bp, Glycine max
  Clone ID: LIB3073-026-Q1-K1-D1
acagaagggcgttctagtgtgtgattgtttgttgttgtaactcgttcttcttcttgggttgttctgtgtttgtgtttggtttttctctcacctgaaaatgtcttgctgcagtggtaactgtggttgctgaagctcctgcaagtgcggcaactgctgctgaggctgcaagatgtacccagacttgagctacactgagtcaaccaccaccgagaccttggtcatgggagtggcacctgttaaggctcaatttgagggtgctgaaatgggtgtgcccgctgagaacgatggctgccaatgtggaccaaactgctcctgcaacccctgcacttgcaagtgaagtgttgcgagagcaagctctcagcacagatagcccttaattaggaataatgatcaactattaatgcgtagctaagaacttatgtattatgtctgagatgggtt

SEQ ID NO: 5598 - DNA, 345 bp, Glycine max
  Clone ID: LIB3073-026-Q1-K1-D11
agaagggggtgtacctgtggagcaatagcagcagaacagagagagcaaaaccctagagcatccatcacaagcagaggaagaagatggtgaagttcctgaagcctaacaaggcagtgatcgtcctgtagggccgctacgccgggcgcaaggcggtgatcgtgaggaccttcgacgagggaaccagggagcgcccctacggccactgcctcgtcgccggaataaagaagtacccaagcaaggtcatcaagaaggactccgcgaagaagaccgcgaagaaatctagggttaaggccttcgtgaagctcgtgaactaccagcacctcatgcccacgcgctacacgctcg

SEQ ID NO: 5599 - DNA, 471 bp, Glycine max
  unsure at all n locations
  Clone ID: LIB3073-026-Q1-K1-E6
gggatcttggcagcaggaagaacagagtgagttgagaggcgtaagaagggntngaagcaaatgggcttcctttcaatgagtnnntcttccccagcttggttaccacttggtcaaccgttgccggttgccgtgcatggttggcttccattcaactggcnnctcaagtccaaatggctgnngcttccccaaccannggaagactcanacatatggaccattnaacctccatttgctaagcaacccgggggaaagaagtgcannnatgcattgcaaggtgtgggccactcaaagtttggcaagaaagaaaagtttgaagaactcttttccttaacctggccagaaaccttgatgaaatgcacaannttggcaaaggannagtagaataccccttcttaggaaggggatnnggattccttgctttggaaaattcgagttggagcacggggttnncgtgtacccgttgagcacaac

SEQ ID NO: 5600 - DNA, 124 bp, Glycine max
  Clone ID: LIB3073-026-Q1-K1-G7
ggacacttatcagtaaaaacgggaaaaaaaaaaaaaaaaaagcggccgccgtactagatccaccattacgaactcctccatgctacgacgtaattcttctatatatggcacctactttcaataa

SEQ ID NO: 5601 - DNA, 116 bp, Glycine max
  Clone ID: LIB3073-026-Q1-K1-G8
gaggcaaaaaaaaaacaaaaaaaaaaaaaaaaaaagcggccgttctagaggatccaaacttaagtacacgtgcatgccacgtgatagctattctatagcgtcacctaaatgcaatt

SEQ ID NO: 5602 - DNA, 138 bp, Glycine max
  Clone ID: LIB3073-018-Q1-K1-G7.F3
ccttctccgccgctggcttcttctccgccggcttcttctctgcctttgccggagccattaggaaaatcagagacttcgaaaaaggttttggctatgctttcgtgttggtaatgagggtgagtgctatgaaatgcgatc

SEQ ID NO: 5603 - DNA, 384 bp, Glycine max
  Clone ID: LIB3073-018-Q1-K1-G7.R3
aagatctcatcttcaaggtcctcaagcaggttcaccccgacattggtatttccagcaaggccatgggcatcatgaacagcttcatcaacgacatcttcgagaagctcgcccaggaagcgtcgcgtttggctcgctacaacaagaagcccaccatcacctcgagggagatccagaccgccgtgcgtctcgtgctccctggtgaattggccaaacacgccgtttctgaagggaccaaggcggttaccaagtttaccagctcttgaattagggtttgttaggcggttgtgttgcagatctagggttttctgtggatttcttttcttaaaaattagtttgtagatgtaatgatctgaacagttgttaatggaaggtttcgtttgaatc

SEQ ID NO: 5604 - DNA, 215 bp, Glycine max
  Clone ID: LIB3074-041-Q1-K1-H7
atccgtatgcggtgcacatgtgattttgatgagcgatatgcctagaaacagagtgatgaaattcaacgtcctcgttttcttcgttgctactactgtggtagcatggcacttccatgcgtactatatgttccctctacgaatgaacactgactatggtgcccgtactgcacacgtgaaatgctcaagttggacgctcgctgtggtagcacacatca

SEQ ID NO: 5605 - DNA, 365 bp, Glycine max
  unsure at all n locations
  Clone ID: LIB3074-041-Q1-K1-H8
gtaacagaacccgttaatttgtgtattgaattaagaattgagaggaatcgtgggtatcgtataaaaacactaaaaaactttcaagatggaagttatcctatagatgccacatttatgcctgttcgaaatgtaaatcatagtattcattcttatgtgaatgggaatgaaaaacaagagatactctntctcgaaatatggacaaatggaagtttaactcctaaggaagcgctttatgaagcctcccggaatttgattgatttatttattccctttttacacgcagaagaagataactttaatttagaaaacaatcaacacaaagttactttggccctttttacttttcatgaaatattggcttaggg

SEQ ID NO: 5606 - DNA, 199 bp, Glycine max
  unsure at all n locations
  Clone ID: LIB3074-041-Q1-K1-H9
aaacacacaaaatgtgctctttaaaattgcttgtgagacaanggccaccggtcatagtcttacttcattatttcctcctttcctccttccttcatatttcttttcagaccaaaccctatctacacatatcaaccgttttgaacaacctgttttaaaaaattaaaccttttagtaaacccaacccttataataaagatta

SEQ ID NO: 5607 - DNA, 363 bp, Glycine max
  Clone ID: LIB3074-041-Q1-K1-H6
gattattgacagtcacataaataaaagtggggagggtttgagaaagagaaagagaaaggaacacactaagcagatatggatgggatgcaaatagctctacctattgttggagttattgcggctgcagctgcgaccttgtatgcacaaagctttgctgaacttagagagaaatcgtttagagatttggaagaatctgaatatgaaaatggtgattataggccatcccctaactcccgagagaggcgtgccagaagacaagctaacaaaaataacagaagatgaatgacttcattaaatcatctatgcttttcccaaaggtgtggagtggtggaattgctttcacgggaccgattttctatcttc

SEQ ID NO: 5608 - DNA, 345 bp, Glycine max
  Clone ID: LIB3074-041-Q1-K1-F1
tcgacccacggcgtacgcccacgcactcgtacggctagacgacgactattgaatgggagcttcaataatgtgagcattgagggggttcatagaatcccaaaacaagccctccatctagcagtccactaccgaactcattacgagcgctaagcttgccgcggaggaggctcacacagctctgcagagcgacagaaacaaagttgacatggccaatgttgctgactctaacggccatcttctagactcggtggggaagcatagaaaacttgatgacaaacaacgcatactgcaatatgctgacaacgctgctgattatctgcataattaccagggtgataatacacc

SEQ ID NO: 5609 - DNA, 107 bp, Glycine max
  Clone ID: LIB3074-041-Q1-K1-F10
ggcctagtcagcttgatgcttaacacatccatagagaggggggtgacaaagacggacccttggttcttcgaccctacaagtgttgtagcctaactatgaactaccta

SEQ ID NO: 5610 - DNA, 174 bp, Glycine max
  unsure at all n locations
  Clone ID: LIB3074-041-Q1-K1-F11
gacttttaccataaacatcatacagcanaagatagaggctagagaaaaaagatatgggtctcggctttgacttttgcagggttattgccgttaccaatgacttatgccagacggaactggggtctggctcctatgcctgattcattattcctcaagccactggctctaagtcct

SEQ ID NO: 5611 - DNA, 222 bp, Glycine max
  Clone ID: LIB3074-041-Q1-K1-F2
atcatatccatactatttctcatactatcaaaggttcccttttaaaatgaaaactctctaatttcagccttcttaacacgtaaaatgctcaatttttaagcttgctttataagcacacaccatcctatcctttaaaaccattcctaaaaactgcttttaaccaacaaaagactacattaattacgaacaatttacatcatactctaaaacatttaaccaaca

SEQ ID NO: 5612 - DNA, 173 bp, Glycine max
  Clone ID: LIB3074-041-Q1-K1-F3
tccgagaggacttctgactgaaacacaacagagtttaacgatggagataactaacaacaccgtgatgaatatgaacgttcatgcttaattatgggctacgctgaaggtggcatggaaccactatacgaacaagctgtaccatatatgtatgctcacttgctgtctgacctcaa

SEQ ID NO: 5613 - DNA, 223 bp, Glycine max
  Clone ID: LIB3074-041-Q1-K1-F4
aggacttctgattgaaacacaacagagtttaacgggggagatgaccaacaacaccgtgatgaaaattaaccttcattttttattatgtcctacaattttggtagcatggcaccaatatacgaacaagctgttccatatatgaatgatcaattgatatcggacctcaactaactatattacaaactacctgatctagctagctatttaagcacaacacattttt

SEQ ID NO: 5614 - DNA, 432 bp, Glycine max
  Clone ID: LIB3074-041-Q1-K1-F5
gaaggtgcaagagtttgttgtgagctataggctggtttatcgtgaggagaatatgaagttgcttgttttctttgttgctgcagtagttttggtagcatggccatgccatggcgcacgctaccaaaggttccctctccgaatgaaaactggctatcgtgagcgttcttcggaggtaaaatgcgcacgttttaggcttgctgtggaagcacacaacatccgagcctttaaaaccattcctgaagagtgcgtcgaaccaacaaaggactacattaatggcgaacaatttagatcagactctaaaacagttaaccaacaagctttcttttatgctagtgaacgcgaagtccatcacaacgacatatttatattcggcatagataacaccgtactctctaatatcccatactatgaaaaacatggatatggggtggg

SEQ ID NO: 5615 - DNA, 419 bp, Glycine max
  Clone ID: LIB3074-041-Q1-K1-F6
gacggtgcaagagtttcttgtgagctatgcgctggtttatcgtgaggagaatatgaagttgtttgccttctttgatgctgccacagttttggtagcatggccatgccatggcgcaggctaccaaaggttcccttttcgaatgaaaactgtctatggtgagcgttcttaggaggtaaaatgcgcaagttttaggcttgctgtggaagcacacaccatccgagcctttaaaaccattcctgaagagtgcgttgaaccaacataggactacattaatggcgaacaatttacatcagactctataacagttaaccaacaagcctttcttttatgctagtgaacgcgaagtccatcacaacgacatatttatattcggcttagataccaccttactctctaatattccatacttataaaaacat

SEQ ID NO: 5616 - DNA, 202 bp, Glycine max
  Clone ID: LIB3074-041-Q1-K1-F8
ctcgatttttcaatacaacactacataatggggcacggggtcgttataaaggatctaatcttacatattctttcattcgacgctagacctcatttatatctaaacctaaatctaattgagttgatactactttcaaatatgataattataaaatcattggctttctcactattaaacgttttgacagttattcttattttta

SEQ ID NO: 5617 - DNA, 358 bp, Glycine max
  Clone ID: LIB3074-041-Q1-K1-G10
gcactacaaatcagttttttacttgaattttcttggccttctctgttctcctagaacttgattacttgaacattccctatgacagatgaggtggttcttctggatttctggccaagtccatttgggatgagggtcaggattgcacttgctgaaaagggtatcgaatatgagtacaaagaagaggacttgaggaacaagatttctcttctcttacaaatgaaccctgttcacaagaagattccggttctcatccacaatggcaaacccatttccgaatccctcattgctgttcagtacattgaggaggtttggaatgacagaaatcccttgttgccttcagacccttaccagagagctc

SEQ ID NO: 5618 - DNA, 331 bp, Glycine max
  Clone ID: LIB3074-041-Q1-K1-G3
aagaagaagaagaaggagcatggccatgagcatggccatgacagcagcagcagcagtgacagtgattaaactgctgcatcacctatatatttaaaaggtttatgggaccatagtagcgagggctgtgccttaatttctctctctctctctccctctctctctctctctctctttttcctttttccctatcttgtgatctatttatgagtgagaaaaacaaaagtgagaaattgtgcgtgtatctggttgctaattcgagtgctattagtctgtggtttggttggtttgtaaccccgctacttgggttatgtttgattgtatattatcccaa

SEQ ID NO: 5619 - DNA, 383 bp, Glycine max
  Clone ID: LIB3074-041-Q1-K1-G5
tgacacacacatgcccctatcttccatagcgagcgcggtattattcactccctccctaacaagccacaccgtttcttgctccaatggcagcttgggatctcacactaagcatgttggcactcatagttgttgttgtttctcttggctcgtggggtggtgttcaaggtgcgccacatgttccatgctacttcatttatggtgattctatggatgataatgggaacaacaaccagctccaatctttggctagggctgattacttgccttatgggattgacttccctggaggactcttcttgaaggttttccattgtaaaaaccactgttgatgcaattgctgaacttttgggattctatgattacatacctccatatgctgattc

SEQ ID NO: 5620 - DNA, 315 bp, Glycine max
  Clone ID: LIB3074-041-Q1-K1-G6
acaacgtactgctgctgctgcacgaagacaacataacggggcaccggggacagtaaaagactctgcttgataaaaaacatctgacgggtgctgctcccaaacaactgaccgaatttacagttttggagatgcctaccaatctaactctttctctctttatgccagccggtgctcatctcaatacacatcctctgcacctgcacctactatcaccacgacctatcttgatcaagggataacatatgtgttgatgcttttggctatgctacttacatacatcattcattcgagctcaacttactacaccttttgaac

SEQ ID NO: 5621 - DNA, 422 bp, Glycine max
  Clone ID: LIB3074-041-Q1-K1-G7
ctattttggtgttcttctttgcttgtctgttcctgtgttgtatgacaagtaccaggaccaagttgatgacaggctgtgtgtgattcatgggattattcagacacagtatacaaaagttcacagtactgttttaagcaagattccaaaactctcaaacaaagaaaagaaggtgcagtaggaacatgggtgcaaatggataagtgaagtctagttaggagtgtacgatgaagttcttgaggtttgaaatttctttttgttgggattctattgctctgttgattgatggttagaagatggtatgcttattcttcagaatcagggtgaccaatagctttgacctaggtgcttattctcttacgatttttttatgtaccccttggaagatgctttacatgaacttttatcaatgggtatattaccct

SEQ ID NO: 5622 - DNA, 380 bp, Glycine max
  unsure at all n locations
  Clone ID: LIB3074-041-Q1-K1-G8
gactcataaaatgatttctgcgatttcgtgggtgcccaaaggggtttcgaagtcggaacctgtcgtggctgatcctactgctgaagaggaaatacaagaaatcatcgccagccacactaccaaaagtggagacagtgacaatgaagtcgccaacaacgatgaagttgtggcacaagcattaaacgtagctgatgcatgtggcaaagcctccaccggaagctgtgacgaaataacccttgcgttgaaggaccttgacatggaccgttatgacgacgaagatgaaggacttgaggtgttcacttctggaattggtgatctttattatcccagntacgacatgcatccatatatcagagataaaaacgatgatgattctgatg

SEQ ID NO: 5623 - DNA, 167 bp, Glycine max
  Clone ID: LIB3074-041-Q1-K1-H1
gacaagtgagtttgttgatcgagggagcgtggaaacagtgtgatgaaaatgaacgtccttgttttcttcgttgctacaattttggtagcatggcaatgccatgcgtacgatatgtcccctctgcgaatgaacactgtctatggcgcccgtactacggaggtgaaatg

SEQ ID NO: 5624 - DNA, 311 bp, Glycine max
  Clone ID: LIB3074-041-Q1-K1-H2
gactctcagttcctcacacgctgtatatctgtgtgagggagttcactctgtctatatttgcatcattcatcgctgatggctctgctccaaactgttaaggctattgttcattctcccaatggtttctcttatctttcattgagaaaaaaagtcctcacaaccttcgccgaaaagaacataccttccaacccccacctcatctgtctgagaaaccaacccggatggtgccagtgtgtcaatcctaaagcaaatgggccactgattcttatttatttcagatgatactctaataataatacccataaccctat

SEQ ID NO: 5625 - DNA, 389 bp, Glycine max
  Clone ID: LIB3074-041-Q1-K1-H3
tagggactacagatcgctgtgaaattaaaaattacttggaggcgtgaaatgaaaataatgactcaacaattatctccaaagctctatacctacaagcctttaaaagatcgattaaagtacatacgtgcgcaacaaatattaaacgccttctactctccttataaattggcacacactcccatactttaaaaccaccttttaatctttctaaggaaccccacaccaaatcttactaattttccctttcctaaacaatgggtcaataattcctatataaaatttatttgtttactattattaataaactttttaaccatttcatcaactactccttctttttttcttttaaacctctaaatttcccttccttttcaccccttttttttttt

SEQ ID NO: 5626 - DNA, 374 bp, Glycine max
  Clone ID: LIB3074-041-Q1-K1-H5
gacacaactgaacaagatagataagccttgcacagcctcacaaaaatgaagaacactacctcgttcgctctctttctactttgtgccttcttcacctcatacctaccttcagccaccggtgcttttgtgcttgacagtgatggaaaccctcttgaaaatggtggcacatactatgtgccagcaccaaataactgcggtggaatagaatacactacatcaggaaacgaaacttgccctatcactgttgtgcaacatcacgacccaacctgtaaggggtttccgataacgatttcgtccccggcccgaatccgttacaatctccgaggcctaatgtgaacatagggttcactttcagaccccctccgtgtgccccc

SEQ ID NO: 5627 - DNA, 266 bp, Glycine max
  Clone ID: LIB3074-041-Q1-K1-E8
ggtttttgctgagatgattaggtcataggggcgggtggtactacggctcatatccctcatccttatgcctcaaggacttgctacttactacaaaccaattaataaatcaccagtgtacaagcctccagtgtacaaaccaccatcgtacaaaccaccgccttataaatcaaaaccacctcggtgtacgactagactacatcatgttacacaaccaaatgataacacgccttacactagactacactttatttattacactccactcg

SEQ ID NO: 5628 - DNA, 305 bp, Glycine max
  Clone ID: LIB3074-041-Q1-K1-C6
gacgggactatttgctatataagtcgggtgggatgggtaggaggaagtaagaaaacacaacacgaatttcattgccgagtgttattttgagtatcagcatcaatggctccaattgcagtgggaaacgtgattccagacggcattttggcttacttggatgaagaaaacaaaccccaaactgtcttcattcactctctcgccaccggcaagaaagtcatcatctttggggttcctggtgactgcactgctacttgcagcttgaagcacgttcctggcttcattgagagagcacatgagctgaaagg

SEQ ID NO: 5629 - DNA, 137 bp, Glycine max
  Clone ID: LIB3074-041-Q1-K1-C8
ggctcaacttaattttttgatctacattactcgaggcagtgtgatgaagaataagaacctgcttttcttctttgctccaactttggtaccaggagaatgcccacccaacaaattattccacttcaaaataacaattg

SEQ ID NO: 5630 - DNA, 195 bp, Glycine max
  Clone ID: LIB3074-041-Q1-K1-D1
ggattgattccctcattcttcggccatagacatggccaccgtcacttctgcagccgctgctattccctcattcactggcctcaaggcaagcgcaggcaaagtgagtgccgcagttaaagtctcagctccccaagccacacggctgggcatcaaggcttcgctgaaagacgttggagtcgctgtatgggccactgc

SEQ ID NO: 5631 - DNA, 289 bp, Glycine max
  unsure at all n locations
  Clone ID: LIB3074-041-Q1-K1-D11
cccacgcgtccggaggaaccaagaggaagatcagaaagcttaagattgtcaaaattgataaagatcttaatgtcctcatgatcaaaggtgctctccctggtaagccaggcaatcttctaaggataactcctgccaagattgtcgacaagaacattccaaagaattagcacatcttttctgtattgtatttgttgtgccttcctattagccttttagttgcaagtttatgtattgcttctttcaacccattttacattgattgagttatacacagcacattatttctgng

SEQ ID NO: 5632 - DNA, 398 bp, Glycine max
  Clone ID: LIB3074-041-Q1-K1-D2
ggcacacgtgagtttgttgatcgagataactagagaacagggtgatgaaaatgaaggtccttgttttcttcgttgctacaattttggtagcatggcaatgccatgcgtacgatatgttccctctccgaatgaacactggctatggtgcccgtactccggaagtgaaatgcgcaagttggaggcttgctgtggaagcacacaacatctttggctttgagaccattcctgaagagtgcgttgaagcaacaaaggaatacatccatggcgaacaatatagatcagactccaaaacagttaaccaacatgcttacttttatgccagagacctcgaagtccatcccaaggacacatttgtgttcagtatagatggcaccgtactctctaatattccatactac

SEQ ID NO: 5633 - DNA, 408 bp, Glycine max
  Clone ID: LIB3074-041-Q1-K1-D3
ggcttcgcctcattttctggctaaccaacccaggcactgcttcttctccgcttcctcttcgatcatcgcttcagaatgccgccgaagttcgacccctcccagatcgtcgacgtcttcgtacgcgtcaccggcggtgaggtcggcgcggcgtgttccctcgccccgaagatcggtcccctcggtctctcccccaagaagatcggagaagatatcgccaaggaaaccgccaaggactggaagggcctccgcgtcaccgtcaagctcaccgtgcagaaccgtcaggccaaggtcacggtggtcccatccgccgtcgcgctcgttataaaggccttcaaggagcccgagcgtgaccgcatgaaaacgaagaacatcaagcacaacggcaacatctcgctagacgacgtcatc

SEQ ID NO: 5634 - DNA, 360 bp, Glycine max
  Clone ID: LIB3074-041-Q1-K1-D4
agggatctggcagcagaagaacaagtggctgagaactaagaaggagaagcaaatggcttcctcaacgatctcttccccagctgttaccactgtcaaccgtgccggtgccggcatggttgctccattcactggcctcaagtccatggctggcttccccaccaggaagaccaacaatgacattacctccattgctagcaacggtggaagagtgcaatgcatgcaggtgtggccaccagttggcaagaagaagtttgagactctttcctacctgccagaccttgatgatacacaattggcaaaggaagtagaataccttcttaagaagggatggattccttgcttggaattcgagttggagca

SEQ ID NO: 5635 - DNA, 422 bp, Glycine max
  unsure at all n locations
  Clone ID: LIB3074-041-Q1-K1-D5
gggatcgcgcattcacaaataaggttgaagaggtcactgccggaagaagggagcaacaccatctttcattttccggcgatctcttgtttcttccatcatcaccgttttccggcgatccctaatcctcgcaaacagaaatgacgacatcaaggcgccttgcggacaggaaggtggagaagtttgagaagaacatcacaaaaagaggatttgtgccagacactaccactaagaagggaaaagactaccctgttggcccagtgctgctcggtttcttcgtctttgttgtcattggatcatctctcttccagataatcaggacagcaacgagtggaggcatggcttaaatggagctttgttttggatnttgtgtcatcttctctttcttagcctcctcgtagaaaatgctaatacttctctacatg

SEQ ID NO: 5636 - DNA, 262 bp, Glycine max
  Clone ID: LIB3074-041-Q1-K1-D6
caaccgaacatagactatcctcgagacctacaagagctagatacttaaaatgatgaagcaagtgctcccttacatcttctatcttcagaactgttatactgatcatcaacacgcttataaactacatctctcaaaacctcgcccacaaatcaatagttgtctttcccaccaacaagaacaccactatcatttcctcccttactcacaacgctggaagaatactattcatacacgtgttgtcaccacatgtcaagaataaatt

SEQ ID NO: 5637 - DNA, 427 bp, Glycine max
  Clone ID: LIB3074-041-Q1-K1-D7
gtgtgttgatgctgctgaggatgagttcttgaggtggactaccaaggaaggaaagttgactgtggagagagatgttgtgaggactaaaaccgcggatttttcgccaattttgcagtttggacaagaccccgttcagatccttgatgcactgctgccactgtatttgaacagccaggttctgagggcattgcaggagtccttggcgagtgaactcgccgccagaatgagtgccatgagcaatgccacagataatgctattgagttgaagaagaacttgtccattgtgtacaatagggagcgccaggctaagatcactggtgaaattcttgaaattgtggctggtgccaatgccttgcaatagtgcaatttgtacgtattgtttacttattataatgatgggtggtggttgcccttttcattttctaat

SEQ ID NO: 5638 - DNA, 267 bp, Glycine max
  Clone ID: LIB3074-041-Q1-K1-E1
ggtcagaagccagaaattcgcgtaggtgagtgagcaagagagaaaagaaaaccggtgttgttgaagccaacattcaagagaatggaaggtgtgagccctgtgccctttagatcagaattggattccaaatccaaacaagacacgctgaaagaagaagatgacttctcattcaaagaaagcactcactcccatgtcactaatattcgcatcattagagcctttcttgaaagctgtgatcctttctctccggaagtttatcattttatg

SEQ ID NO: 5639 - DNA, 401 bp, Glycine max
  unsure at all n locations
  Clone ID: LIB3074-041-Q1-K1-E10
ggcacaagtgagtttgttgatcgagataactagagacagggggatgaaaatgaaggtccttgttttcttcgttgctacaattttggtagcatggcaatgccatgcgtacgatatgttccctctccgaatgaacactggctatggtgcccgtactccggaggtgaaatgcgcaagttggaggcttgctgtggaagcacacaacatctttggctttgagaccatttctgaagagtgcgttgaagcaacaaaggaatacatccatggggaacaatatagatcagactccaaaacagttaaccaacaagcttacttttatgccagagacctcgaagtccatcccaaggacacattttgtgttagtatanatggcgccgtactctctaaaatttatactacaaaaa

SEQ ID NO: 5640 - DNA, 132 bp, Glycine max
  unsure at all n locations
  Clone ID: LIB3074-041-Q1-K1-E2
ggttcttcacttgggagaggctttttatgcatgtgagttctgttatgtaaaatcaattccttggacgcagttagtgcaatgttcaattcacatttcattttaagttatgctatttattcattgtccagcnna

SEQ ID NO: 5641 - DNA, 318 bp, Glycine max
  Clone ID: LIB3074-041-Q1-K1-C5
ggcatcaaaaaaagaaaagccttcaatcatatagcggggtaagaaatgaagagccctaccattatcattctctttctactttctgccttatacacctcactcctaccttcagccaccgctcaagtcgtgggtgacatggaaggtaatgatcttcaaaatggtgggaaatattatgtgctgccagtaatagagtcatcatatggtggaataagagtagccgcaactggaaaagaaagatgccctctcactgttgacaatctgtcgatcctatgataaggggattgcaacattatttcaaccccatataagttcctgtta

SEQ ID NO: 5642 - DNA, 364 bp, Glycine max
  Clone ID: LIB3074-041-Q1-K1-E3
gatccatagctactgaagaaaatggcaaccatctgtgctgctatcacaaccccatcgatctcccgcgcaactcttgtgcaaaagcgggtctcatctcccgttcttggtttgccagcaatgggtaaggtgggaagagtgagttgctccatggaggaaaaaccttattctgtgaaggaaagcagctctagcatgttggggatgggggcatctctgatggcagctgccagcgctgcagccatgtcaggcccagccatggccttggtagatgagagactgagcactgaaggaaccggacttccctttggcctcagcaacaatcttcttgggtggatccctttccgcgttttggtcttatctggactct

SEQ ID NO: 5643 - DNA, 444 bp, Glycine max
  Clone ID: LIB3074-041-Q1-K1-E4
gacaccaacaccaaaacatacccactaagatggcttcctttgggtccttgctagtgctgcttcttgtagcccttatcctcatgcctcacgggctcgctacttactacaaaccaattaagaagtcaccagggtacaagcctgcagtgtacaaaccaccagtgtacaaaccaccggtttataagccgaaaccaccggtttacaagccgaaaccaccgctttacaagccaccatataagaagccaccatacaagaaaccaccttatggaaagtaccctgcagtggaggacaacacccatgcctaaagcatgcaatgaggtctattatctacttaataaataagaggaactgctttgcgttttctagcatatgtgatatacaacttcgtagcaatgcatattcttgactcttgcatgcacttcaatgctcgtagcattaatgatgtgg

SEQ ID NO: 5644 - DNA, 449 bp, Glycine max
  Clone ID: LIB3074-041-Q1-K1-E6
ccggggcacgacccacgcgaagacccacgcaggcgacaccaccaccaaaacaattttcagtacagatggcatgactacgggcgtgctgggctagtagctagcttctagtagcccttatcctcatgcctcacgggcttgctccatactacataccaagtaaagacatcaccagggtgcagcgcctcagtgtacaaaccaccagtgtgcaaaccacgcggcttatatagacataaccacgcgttttaccaagccgaaaccacctggattacacgccaccatataagaggccaccatacactacaccacctcatggaaagtacccttcagtagaggacagcacccatgcctaaagcaagcgatgaggtctattatctacttaataaatatcaagaactgcttcgcgttttctagcattgtgatttacaacttcttagcagtgcatattcttg

SEQ ID NO: 5645 - DNA, 347 bp, Glycine max
  Clone ID: LIB3074-041-Q1-K1-E7
cggtgtttttgggggggtgattaaggcatagcggctggtggtgcaagggttcatatactacatcactttgtaagcacaagacggtgaaacacaaaaatgtgtatgaaacgaaagtgtgggtgacatcatggttaaactccaaggaggtcctcgaattcaagcccatcagtattaatcctatttcggtgacggtctagtctttataaggttacataaataaatggcaccacgctgacagttgtactaaaatttattttttataaataaatcgaacgtagcattaaatatgctatatgtatgtattgtgcggaataaatgcagccacgtactatatataatggcacata

SEQ ID NO: 5646 - DNA, 392 bp, Glycine max
  Clone ID: LIB3074-041-Q1-K1-A5
gccaggcgcagttacctgttctgttattgagtcaaagggtgtgagtgagtgtgagcaagatgggttctttggcaaagaagggactcaacaattacgtcaaacagctccagcaacaccctttgagaaccaaggtaatcactgcaggggtactatcagcgatcagcgatgttgtgtctcagaaacttactgggatacagaaacttcaactcaaacgtcttcttttcaaagtgattttcggagctgcttatcttggaccctttggacacttttttcgtttaatactggataaaattttcaaaggaaagggagattcaaaaactgtggccaagaaggttctgattgaacagttgacatctaatccttggaacaatttgcttttcatgatttactac

SEQ ID NO: 5647 - DNA, 403 bp, Glycine max
  Clone ID: LIB3074-041-Q1-K1-A6
ggcacaagtgagtttgttgatctaaattactagaagcagcgtgatgaaaatgaaggtccttgttttcttcgttgctacaattttggtagcatggcaatgtcatgcgtacaatatgttccttctacaaatgaacactggctatggtgcccgtactccggaggtgaaatgcgcaagttggaagcttgctttggaagcacacaacatctttggctttgagaccattcctgaagagtgcgttgaatcaacatatgaatacattcatggcgaacaatatagatcagactccaaaacagttaaccaacaagcttacttttatgccatagacctagaagtgcattccaaggacacatttgtgttcagtatagatagcaccgtactctctaatatccatacaaaaaaaaca

SEQ ID NO: 5648 - DNA, 129 bp, Glycine max
  Clone ID: LIB3074-041-Q1-K1-A7
gccacccacaaatacctgttttgttattgagtgagaacgtgtgagtgaaagtaagcaccatggcttctttctcaaaacaaggactcaaccattactgtgaacagctcccgaaatgctctttgttaacca

SEQ ID NO: 5649 - DNA, 420 bp, Glycine max
  Clone ID: LIB3074-041-Q1-K1-A8
gataccataaaagaagcacaaagagaagcattaggactaggagcagcaacaactagtctcagctgaaatggcctcttcagtgatggcatctgtggccctcaaacctgcccctttcactgttgagaagtcctcagtgagaggccttccctctctctcaaggaactcttcttcattcagagttgcggccagtggcaagaacatcaagactgacaaaccttatggaattaatggtggcatggctttgagggatggaactgatgcatctggcaggaaaggaaagggaaagggtgtttaccagcttgtagacaaatacggtgctaatgtcgatggatacagtcctatctacgacaccaaggactggtctgcaaccggtgatgtctacgctggcggtacgactggcttggctatctgggctgtgac

SEQ ID NO: 5650 - DNA, 403 bp, Glycine max
  Clone ID: LIB3074-041-Q1-K1-B1
gataccaaaaacaaaacacaagccaagtgaaagtgagaaaaaataaaaatcaaagagcataatgtcagggatcattcacaagattggggagacccttcatgtgggagggcacaagaaggaggaggagcataagggtgagcaccatgctggagaatacaaaggggagcaccatggtgaacacagtagtgagtacaaaggagagcatcatggtgaacacaaagctggagagtaccatggtgagcacaagccagagcacaaagaggggttcctagacaaagtcaaggacaagatccatggtgagggcggcgccgccgacggcgagaagaagaagaaggagaagaagacgaaggagcatggccatgagcatggccatgacagcagcagcagcagtgacagtgattaa

SEQ ID NO: 5651 - DNA, 349 bp, Glycine max
  unsure at all n locations
  Clone ID: LIB3074-041-Q1-K1-B12
ggacgaattatccgaagaagatcgcttaaccgtggcatgagcacgaaaaattgagcgtttcttatcacaaccttttttcgtagcagaagtttttaccggttcgccggggaaatatgttattctagcagaaacaattagagggtttaaattgattctttctggagaattagatggtcttcctgaacaagccttttatttggtagggaatatcnatgaagacactgcgaaagctactaacttagaaatggagagcaatttgtagaaatgactttaaatctttgtgtactgacccccaatctaattgtttgggattcggaagtgaaggaaatcattttatctactaatagcg

SEQ ID NO: 5652 - DNA, 413 bp, Glycine max
  Clone ID: LIB3074-041-Q1-K1-B2
aaacaacacaaggggatctggcagcagcaaaacacgtacttgagaactaagaagaaggaaatggcttcctcaatgatcttctccccagctgttaccaccgtcaaccgtgcctgtgccggcatggttgctccattcaccggcctcaaatccatggctggcttccccacgaggaagaccaacaatgacattacctccattgctagcaaccgtggaagagtacaatgcatgcaagagtggtcaccaattggcaagaagaagttcgagactctttactacttgccagacctagatgatgcccaactggcaaaggaagtcgaataccttctaaggaaaggatggattccttgcttggaattcgagttggagcactgtttcgtgtaccgtgagcacaacaggtcacctggatactatga

SEQ ID NO: 5653 - DNA, 386 bp, Glycine max
  unsure at all n locations
  Clone ID: LIB3074-041-Q1-K1-B3
ggttctagtgtgtgattgtttgttgttgtaactcgttcttcttcttttgttgttctgtgtttgtgtttgttttttctctcacctgaaaatgtcttgctgcggtggtaaccgtggttgcggaagctcctgcaagtgcggtaactgctgcggaggctgcaagatgtacccagacttgagctacactgagtcaaccaccaccgagaccttggtcatgggagtggcacctgttaaggctcaatttgagggtgctgaaatgggtgtgcccgctgagaacgatggctgcaaatgtggaccaaactgctcctgcaacccctgcacttgcaagtgaggtgttgggagagcaagcttcaagcanagatagccctttattaggaataatgataaac

SEQ ID NO: 5654 - DNA, 413 bp, Glycine max
  unsure at all n locations
  Clone ID: LIB3074-041-Q1-K1-B4
gacaagtgagtttgttgatcgagataactagaaagagcgtgatgaaaatgaaggtccttgttttcttcgttgctacaattttggtagcatggcaatgccatgcgtacgatatgttccctctccgaatgaacacttgctattgtggccgtactccggaagtgaaatgcgcaagttggaagcttgctgtggaagcacagaacatctttggctttgagaccattcctgaagagtgcgttgaagcaacaaaggaatacatccatggcgaacaatatagatcagactccaaaacagttaaccaacaagcttacttttatgccaaagacctctaagtccatcccaaggacacatttgtgttcagtatagatggcaccgnactctctaatattccatactacgaaaaacatggatatggg

SEQ ID NO: 5655 - DNA, 430 bp, Glycine max
  Clone ID: LIB3074-041-Q1-K1-B5
ggcacaagtgagtttgttgatcgagataactagagacagtgtgatgaaaatgaaggtccttgttttcttcgttgctacaattttggtagcatggcaatgccatgcgtacgatatgttccctctccgaatgaacactggctatggtgcccgtactccggaggtgaaatgcgcaagttggaggcttgctgtggaagcacacaacatctttggctttgagaccattcctgaagagtgcgttgaagcaacaaaggaatacatccatggcgaacaatatagatcagactccaaaacagttaaccaacaagcttacttttatgccagagacctcgaagtccatcccaaggacacatttgtgttcagtatagatggcaccgtactctctaatattccatactacaaaaaacatggatatggggtggagaaatttaac

SEQ ID NO: 5656 - DNA, 358 bp, Glycine max
  Clone ID: LIB3074-041-Q1-K1-B6
tgcggctgttagtcgacatcactaggggggtagagatatacgatgagaatccatgtgtttagttttctatcgatatgcatataagggaataatccaacatgcctttttgtgaatttaaaaactaccattgatcaatgcctcagaagggctgataataaatgaaaaaaatcaatgcattcatgataaaaccctaccacgcttttttattatgaatttttatgacaattgaggaatcacggcgttggcggatcaaattcgtaaactctttagatgatacatcagatgattagaaacatgactatagctttacaattaggccattgagcattaattgcaatcacatttatcttattgatta

SEQ ID NO: 5657 - DNA, 311 bp, Glycine max
  Clone ID: LIB3074-041-Q1-K1-B8
gacatgtgagtttgtcgatcgagataactagaaggagtgggatgaaaatgaaggtccttgttttcttcgttgctacaattttggtagcatggcaatgccatgcgtacgatatgttccctctccgaatgaacactgactatggtgcccgtactcctgatgtgaaatgctcaagttggaggcttgctgttgaagcacagaacatctttgtctttgagaccattcctgattagtgcgttgaaacaacaaaggagtacatccatggtgaacactatagatcggactccaaatcagttaaccaacaagcttacttt

SEQ ID NO: 5658 - DNA, 372 bp, Glycine max
  unsure at all n locations
  Clone ID: LIB3074-041-Q1-K1-B9
ggcagcatccattcttgttctcttctttctttcgatcagggtttcccctcgtctccgggctcgtttcgttctcgaataatcgatctacgataatgactcgcggtagccagagggatcgtgatcgcgaaagggctcaggctagaactggtgctaaaggcaagcagaaagatgatggattgacccctgaacagcgcagggaaagagatgcaaaggcgctgcaggagaaggccgcaaagaaagcggcacagggtgcaggagggaataatgcagctggaagcaaaaaatangcaataattcaatgagtagtttgagtttgccgcttgttgattgtggacatggaatttgtggaaaatttatgttgcattattcatg

SEQ ID NO: 5659 - DNA, 398 bp, Glycine max
  unsure at all n locations
  Clone ID: LIB3074-041-Q1-K1-C1
ggcatcagaaaaagaaaagccttcaatcatatagcattctaagaaatgaagagccctaccattttcattctctttctactttctgccttctacacctcactcctaccttcagccaccgctcaagtcgtggttgacatggaaggtaatgatcttcaaaatggtgggaaatattatgtgttgccagtaatagagtcatcatatggtggaataagagtagccgcaactggaaaagaaagatgccctctcactgttgtacaatctgccgatccgtatgataaggggattgcaacaattatttcaaccccatatcgagttcctgttatccgcgaaggctttcctttgaacattacgttcggtaattttgcagntatactgccttgtgtnccccttcgttctga

SEQ ID NO: 5660 - DNA, 223 bp, Glycine max
  Clone ID: LIB3074-041-Q1-K1-C2
ggaaataaactgcagccgtgacaaaagttgcgtagcaatgggcatactcttactctgatacgttagtgaagaaaaatggcaacaatcattgccggcaccccaactacattaatcactcgcacaggtcatgtgctcaaacgacctgttggggcctcatcctctaccgttcttggattgccagcaatggccaaggcggggagagtgaggtgctccatggaggaaa

SEQ ID NO: 5661 - DNA, 375 bp, Glycine max
  Clone ID: LIB3074-041-Q1-K1-C4
gaaggtgcaagagtttgttgtgagctataagctagtttatcgtgaggagaatatgaagttgtttgttttctttgttgctgcagtagttttggtagcatggccatgccatggcgcaggctaccaaaggttccctctccgaatgaaaactggctatggtgagcgttcttcggaggtaaaatgcgcaagttttaggcttgctgtggaagcacgcaacatccgagcctttaaaaccattcctgaagagtgcgttgaaccaacaaaggactacattaatggcgaacaatttagatcagactctaaaacagttaaccaacaagctttcttttatgctagtgaacgcgaagtccatcacaacgacatatttatattccgcat

SEQ ID NO: 5662 - DNA, 324 bp, Glycine max
  Clone ID: LIB3074-041-Q1-K1-A4
ggtgcaattgtgtgaggaaatatctctcacgagtgtgtgtacggagagaagcggacatgaagaagcaattagcatcaaggcgtttgctgatgtgggttatggtacatttgagcatttcaggagtgttgtccaagtccaaccacaccacaactacaacttctatgctgtgcgatggctccgtagaggactgcctcaacgttcaccacttggactcacagcttcccaccatctacagcacccactttcgcagaatcctcgctggagaaaaatgctgcagaggtaacactcagactgcaggtacaggtgatcccaataatcccaact

SEQ ID NO: 5663 - DNA, 267 bp, Glycine max
  Clone ID: LIB3074-040-Q1-K1-A4
gatataaaccctatatcaaaaaccacgcaatggttacgttcaactgcaacaacaccatcctcaaaatctccaaactctccatcctcctccatttgttcgcttcagtctgcaacgtcactatgtctgactccaccgccaaacccctctaccagcacgccaccactggctctgaccctactgcgccagcggttcacatcgtgtacaccgatagaccacataacgaggagcctgaggcctaccacatcataacccttacttcagtccttt

SEQ ID NO: 5664 - DNA, 372 bp, Glycine max
  Clone ID: LIB3074-040-Q1-K1-A5
tataaaagacattatgtggtattttcctaatcatactctgtgggttacatgtcgattatcatccatacttactcaataaaatgtcaaccattttctctgctatcacaaccccatccatcaccctcgcatgtttagtacaaaaacatcctctcgcgttctcatctcccgttctttttttgtcagcaatggtcaatgtgtgaagagtgactttctccatttatcaaaagccttcttctgtgaatgaaattatttcaagcatgttgtggatgatttgcatcttttatggcatatgtcaactcctcattcattttaatcccaattcatggcccttttggataatagacttatcacttaaagaaaccttctaccctt

SEQ ID NO: 5665 - DNA, 430 bp, Glycine max
  Clone ID: LIB3074-040-Q1-K1-A7
ggccgaccgacgcgttcgtactggtgtctataagactacataatggttctttttgctataatactacacaagcgtgctgttgcgagaatacaacataatgtgaggcttattaacacatatatagagagagagaattgcataaaaaatgagactgttccatccatggcctgttttcttcaatagagaatggaagctgaattggcccttcttggttggatttgccatcaccggaactctcatcaccaaacttttccttggtctctctgatgaggaagccaaatagtttaaattctttcaggcacacaagaggtgactttataatggaagatttgcagtggcttttcacattgtattatatgtgttaagagagcttttgtttgttataaatgaagagagatgtttttacactccatgtacctattttcatttt

SEQ ID NO: 5666 - DNA, 280 bp, Glycine max
  Clone ID: LIB3074-040-Q1-K1-B2
cgagaatactacagaatgggaccgcatactttctctgtaaagtgcaaagcctctatttttggttgttatgtggaaggactattacttccacaaacgtctcatccacaactaataagggtggtagagggaaacccaagaccacaaagtccgtttcccgttccttcaaagccggccttcatttccccgtcggccgcgtcgctctctacctcaaggcccgtcgctatgcccagcgcgttggttcctgttcccctgtttacctatctgcgcttctcaaatacct

SEQ ID NO: 5667 - DNA, 325 bp, Glycine max
  Clone ID: LIB3074-040-Q1-K1-C2
gcgtgcgtacggtgttctaagactacagaaagggattattggaagtccttatcttatagtatcggttatgtctttcagtgcgcaatccgttccaaaccacataatctttaacaaagatggttgtataaaagttgaagaagatggccagttctgtttgaactggtgggaagggtactattagaaggatgaagaaagctgttcacaagactactactacagatgacaaaatgcttcaaagcaccctgaatgggataggagtgaatgctatccctgcaattgaagaagtcaacatctttatcgattaaatagttattcagtttttaaa

SEQ ID NO: 5668 - DNA, 332 bp, Glycine max
  Clone ID: LIB3074-040-Q1-K1-C3
gactttagcagaacccaatagcatagaataatcacggaatggtggctattactggtgtgaccctttcatgccccatggttttcttcaacgcatcatgctcaccgcaaaacgcgcatgctgtaaagttctcttttattgtattttgttcagcagattctatgacttgacaggactgcagaatggaattctgaagcgagggagagagattttcctcactggttgctacctccgaactcccactggaggttctggacattcacgtcttttgccaacagagtatcttgtgattctattggatgaaattatggtcaaacattttttaattttaaatt

SEQ ID NO: 5669 - DNA, 252 bp, Glycine max
  Clone ID: LIB3074-040-Q1-K1-C4
ggtacggctgttataagactacataatgtctgtgttggtgtgagccatatccatggctacttcatcaaccacattattgctatcatcactcatacctgcaagcatcccatcattcaactctggagaccattcacctcttttgcttcaaaaccgttctttgaatctacccaagaagagagtttcctttcttgttcaagcaaccaactcccctattgttttggaaattccaaaggtgccacctcaatttaagcc

SEQ ID NO: 5670 - DNA, 307 bp, Glycine max
  Clone ID: LIB3074-040-Q1-K1-D2
caaatttcttcctcaatcatctcttccccagctgttaccactgtcaaccgtgcctgtgccggcatggttgctccattcactgtcctcaagtccatggcttgcttccccaccataaagaccaacaatgacattacctccattgctagcaacggtggaagagtgcaatgcatgcacgtgtgtccaccactttgcaagaaaaattttgatactctttcctacctgtccgacctttgataatccacaattttcaaaatgaaataaaattaccttctttatgaaagttattgaattccctttcttttaaatt

SEQ ID NO: 5671 - DNA, 256 bp, Glycine max
  unsure at all n locations
  Clone ID: LIB3074-040-Q1-K1-D7
taacataactataatacatttcggtcctctctttctttttcaactctcacaacacattaacattncttttatctcacatgtccttcttttcaccactttcattcttctctccaccaccctgctttatattactttctccaatccttcatttcaaattcaccactctaacaaacccacctttcactctttcttgtattcataagaaaaaaaaatttacacaaagaaaaataaaattaataaagttaaattttcatat

SEQ ID NO: 5672 - DNA, 259 bp, Glycine max
  Clone ID: LIB3074-040-Q1-K1-F1
ctctttggcaaattttgtaaatttaaaaaaacataaaactcctcccctttaaaaaatccaaacttacttaccccttcattctactttattacttttttattattttacctaaattcaatttattttcctcctttttacaacctctttacttttaaaaccctttccttacccaacttaaatccctttcaacacattccctttttttcaactttctttatatctaaaaaatccttacctatctccctttccaacaattttt

SEQ ID NO: 5673 - DNA, 327 bp, Glycine max
  unsure at all n locations
  Clone ID: LIB3074-040-Q1-K1-F2
tgnnnaacatcattatttagaattacgtttttancctttacaccggtcatttgcaccttctttaacacccatccttctcaaaactgaactatgcctattcattggtgccaacatctacccatgaaagggcatcacatttgttcgtggtgattctcacgttttcctgtttgcaaactcaaaatgtaagacgtatttccacaatcgcctgaatccttcaaagctcaccttgactgcaatgtacataaagcaacacaaaaaggacattgctcaataatcttttatgaataggatacgtgctgccaaaaagccttactctaagtccatttt

SEQ ID NO: 5674 - DNA, 133 bp, Glycine max
  Clone ID: LIB3074-040-Q1-K1-F4
tccattcatctcccatctttaaaccatattcaatctccccttctattcttctctctttttacttttaaaacttacctaacttaaacatcttattatctaaagtaatttaaatcaacctaaacccctttattat

SEQ ID NO: 5675 - DNA, 178 bp, Glycine max
  Clone ID: LIB3074-040-Q1-K1-G2
tttctctcacctaaaaatatcttccttccttcataactctccattcttaatctccttcaaattctccaactcctttttaaacttcaacatatacccatactttacctacacttaatcaaccaccacccataccttttccattttaatttcaccttttaaatctcaattttattcttcc

SEQ ID NO: 5676 - DNA, 298 bp, Glycine max
  Clone ID: LIB3074-040-Q1-K1-G3
taaaaccaaacttataaaccatttattctctcttagaacaaatggccctcaaaccactttccccacactctttattgtgtcattttttttttgctctttccccacaaagaggtctttgacccttcttctgtgtagtgcaatggccatggctaatgttttccttgttctgcttctgtcactcctttgcatttccatcatcacaactcaagttatgtcaacaaattcttcttatcacttggatggaaggaattattgaccttggattcttaaaaactcacaatgccctttttaatgcaca

SEQ ID NO: 5677 - DNA, 226 bp, Glycine max
  Clone ID: LIB3074-040-Q1-K1-A2
gcgtgcgtacgggtgctaaaagacaacaaaacgttacattatatatattaatcatctattttatactatgggtacattggtgataatattctttccaattcataaccatttctacccatgtaaagctttttgttttacattcatctcaagtccaacgctcacaattactttctaacccttatgaatactacttaaatattccctaactcctttccacatgattaca

SEQ ID NO: 5678 - DNA, 413 bp, Glycine max
  unsure at all n locations
  Clone ID: LIB3074-041-Q1-K1-A10
ggacaacacaacacaaacacacagagttagaggagaaatcatcatggcatcagcagcatctgggtttgtgttgtcacttaatgttgcagctgccaccacaaactcaagggtggtcatgttcaacacaaagaacaacgcttctatgcttgttgtaagggcttcagatgagcctgcagcggcggcacccgccaccgtcacacccccagctgaagctgaagctaaaccaaagccaccacctattggccccaagagaggtgctaaggtgaagattcttaggaaggaatcttactggtacaaaggcactggttcagtggttgctgttgatcaggaccccaacactctctaccctgttgtggntcgattcaacaaagtcaactatgccaatgtatcaacaaacaactatgctttggatg

SEQ ID NO: 5679 - DNA, 340 bp, Glycine max
  Clone ID: LIB3074-041-Q1-K1-A11
ggagagagcgagcgagcgacccgtttcaaagagaggatttgggattgggaaggcgagggattgcgctgcgtctcttcctcttctctttcgattcatccctcattcataatcttccaatccaacaacctcagcctcacactcacacatacacacatctgaacgcgtatcgtccctcccatggcttcaaagcgcatcctcaatgagctctaggtcttgcataaagacccaccaacttcttgcagcgctggtccattagctgaggacatgttccattggcaagcaacgatgatagggcctgctgataagccttatgctggaggtgtattcctagtcactattc

SEQ ID NO: 5680 - DNA, 154 bp, Glycine max
  unsure at all n locations
  Clone ID: LIB3074-041-Q1-K1-A12
gagagcgaaagagatgtccctggtttcaagcatggtcgggtgtggagtggtgatggcggcgtctcaagcaatgtgaattggaaggagaagcgatggtggattgacgatagtgtgntcgnctaggccgcanaagaaagcgacggcgcatcacatg

SEQ ID NO: 5681 - DNA, 244 bp, Glycine max
  Clone ID: LIB3074-041-Q1-K1-A2
aggaaaggttgagttgaaagaacaggaaggagacataggaatgggaaagttgaaagttcacgagctgtataaagcaaacggagaggaaacatacctttctggacataaagagaacaccaagtcttttggtgtataagttaaagcccacattcataaataagatgctaatctcattaaagatgatggtgaaggactacagagatgacaaaacttgatggaccataggaaggtatagttgaaataa

SEQ ID NO: 5682 - DNA, 339 bp, Glycine max
  unsure at all n locations
  Clone ID: LIB3074-039-Q1-K1-F9
aaaaatattaactccctctcttttctttttttctacaatatttttcttatcatttccataccattacgcaggctaccaaatcttccctctcctaataaaaactatctattttaagccttcttcttatataaaatgctcacactttangctttcttttgaatcacacaacattctaacctttaaaaccattccttaatatttcctttaaccaacaaaatactacattaatttctaacaatttacatcatactcttaaacagttaaccaacaaactttcttttattctaattaactcgaattccatcacaactacatatttatattcttcatatataacac

SEQ ID NO: 5683 - DNA, 262 bp, Glycine max
  unsure at all n locations
  Clone ID: LIB3074-039-Q1-K1-G10
caaaangccatctccccttcttacaaatcatccttctcttcaatctctctctctctcttttctctttcttcaaaccgaacatttcatctccaaatgcatcaacacgtcgaagtagaaattttgcttacattcactaatctcttcanccatcttttctctaatgatgaaattcgaattctcatccttgttctttatgctccttgtaaaaccactattctctacaagctcaaactcggatacatcctttctacacttcctacca

SEQ ID NO: 5684 - DNA, 384 bp, Glycine max
  unsure at all n locations
  Clone ID: LIB3074-039-Q1-K1-G11
ttcttcatcaacatagcgtattgcagtgttataaaaatcaanntccttcttttcttccttnctacaatttttgtagcatggcaattccatgcttacgatatgttccctctccgaatgaacactggctattttgcccgtactcctgaggtgaaatgctcaacttggaggctttcttttgaagcacacaacatcttnttcttttagaccattcctgaatagtgcgtttaatcaacaaaggaatacattcattgctaacaatatacatcatactccaaaacatttaaccaacaaacttacttttatgccatagacctctaaatccatcccaaggacacatttgtgttcagtatatattgcaccgtactctctaatattccatactac

SEQ ID NO: 5685 - DNA, 418 bp, Glycine max
  Clone ID: LIB3074-039-Q1-K1-G6
tattggggctcaagtgagtttgttgatcgagatgactagaggcagtgttatgaaaatgaaggtccttgttttcttcgttgctacaattttggtagcatggcaatgccatgcgtacgatatgttccctctccgaatgaacactggctatggtgcccgtactccggaggtgaaatgcgcaagttggaggcttgctgtggaagcacacaacatctttggctttgagaccattcctgaagagtgcgttgaagcaacaaaggaatacatccatggcgaacaatatacatcagactccaaaacagttaaccaacaagcttacttttatgccagagacctcgaagtccattccaaggacacatttgtgttcagtatagatggcaccgtactctctaatattccatactacaaaaaacatggatat

SEQ ID NO: 5686 - DNA, 211 bp, Glycine max
  Clone ID: LIB3074-039-Q1-K1-G7
aaacactaaaaatttttagttccacaaaaccaaaccaaaattacaactgcctctattctcatccaccattatatcaacaccaaccttatctacaagcacaattattcaaaaacaccatcattttaagccatccaacatattctatcaaggtcttatacccatcacacatttcacaaccaaagttatcatcaccacacaaaagcttatttca

SEQ ID NO: 5687 - DNA, 424 bp, Glycine max
  unsure at all n locations
  Clone ID: LIB3074-039-Q1-K1-G8
ggcacaagtgagtttgttgatcgagagagctagagacagtgtgatgaaaatgaaggtccttgttttcttcgttgctacaattttggtagcatggcaatgccatgcgcacgatatgttccctctccgaatgaacactggctatggtgcccgtactccggaggtgaaatgcgcaagttggaggcttgctgtggaagcacacaacatctttggctttgagaccattcctgaagagtgcgttgaagcaacaaaggaatacatccatggcgaacaatatagatcagactccaaaacagttaaccaacaagcttacttttatgccagagacctcgaagtccatcccaaggacacatttgtgttcagtatagatggcaccgtactctctaatattccatactacnnaaaaacatgatatggggtggagaaa

SEQ ID NO: 5688 - DNA, 233 bp, Glycine max
  Clone ID: LIB3074-039-Q1-K1-H1
gcgtccgtacaggtgttagaacacctcagaaaggacctcataccaggacacaaaccatactttcctcctgtggataggggaacctgactgttacgatcgaagagtcaccttctctctactctaacttatctcatacatacaattaccctcaggttttaccaattacaattgaatacattgtctctttccacagcatcctattatatcccgacaatatcattaatgaaaatctg

SEQ ID NO: 5689 - DNA, 376 bp, Glycine max
  unsure at all n locations
  Clone ID: LIB3074-039-Q1-K1-H10
ttggggatcctttgcattctattcattcaacgttcatcgtgtactttttggaagcacanacccaaatacttcgagatggcccgtacaaagcaaactgctcgtaagtcaactggaggaaaagctcccatgaagcagcttgcaaccaaggctgcacgtaagtctgcaccaacaactggtggtgtgaagaagcctcatcgttatcgccctggaactgttgctcttcgtgagattaggaaataccataagaacactgaactcctaatcaggaaacttcctttccaaaggttggttcgtgaaattgcccaagatttcaagactgatcttccttttcaaaaccatgctgtgctttcatttcaagaggcttcttaagcatacc

SEQ ID NO: 5690 - DNA, 358 bp, Glycine max
  unsure at all n locations
  Clone ID: LIB3074-039-Q1-K1-H11
gatttacaattcacaacaacacacaacaggttattgttacatatccccaaaccaaaccacttcacacanaacacatatccatnggngaattagtttcattgttgaacaatcaaggctactaaaaatcatacatgnacaaaggaaaaggttccgcatccggtattttaaaaccactcatccttatatactactcaaactaacgaatcatactgcaaataccaacataattaataactgctttaatcctctttggaatgaatagctgaatttcactctgacaaaaccattcagaatatctaactttcaacttatttataaacatctttttaatgcttattacaacattgcaaattctttc

SEQ ID NO: 5691 - DNA, 383 bp, Glycine max
  Clone ID: LIB3074-039-Q1-K1-H2
gacctcacccagttgcagaaagaaaagaccatcaagctttcacgtcagccttatccggtttagggtttcggtttttgacccaacctttgacgtatcgaaaccttaagtttcggatcaggtctgagcaatctggttggtagaacctttggtcttagagagtcaagttttatgtctgaattagacgatcaagttcctactgccttcgatccttttgctgatgcaaatgctgatgactcgggtgctgggtcaaaggagtatgtgcatattcgcgtacagcagcgaaatggaaagaaaagcctgacaaccgttcaaggattgaaaaaagaattcagctataacaagatacttaaagatgttaagaaagagttctgttgcaatggaac

SEQ ID NO: 5692 - DNA, 398 bp, Glycine max
  unsure at all n locations
  Clone ID: LIB3074-039-Q1-K1-H3
cgtccgcccacgcgtncngacgacagaagggggagatgttagaggataagagaagctaaagaaagaaaggagatgtggagtggataagcagttgttgaggtcttgcaccggtccgaagccaattcccggtcagaacgtaaccgttcactgcactggtttcgggaagaacggtgacctttctcagaaattctggagcacaaaggatcctggccagaacccattcactttcaaaatcggtcaaggttctgttatcaaaggatggtatgaacgtgtgcttggcatgcaaattggtgaagttgctcgccttcggtgctcttcggattatgcttatggtgctggtggctttcctgcttggggaatactgcccaactttgtcgtggaatttgaaatcgaagtct

SEQ ID NO: 5693 - DNA, 399 bp, Glycine max
  Clone ID: LIB3074-039-Q1-K1-H4
ggcgcctctgcttgcaagagtgaggaccttgtcttacccttctctcaagtttcaagagatttcatcatggctccaaagaaggacaaggctccaccaccttcctccaagcccgccaaatctggcggtggcaagcagaagaagaagaagtggagcaagggaaagcaaaaggagaaggtgaacaatatggtgctgtttgatcagggcacctatgacaagctcctttctgaagctcccaaatacaagctcatcactccttccattctctctgatcgtttgaggattaatggatcacttgcaaggaaggctataagagaattgatggcaagaggttctatcacgatggtgtctgcccatgcaagtcagcacatttattccagggcaacaaacacctaggtggtg

SEQ ID NO: 5694 - DNA, 382 bp, Glycine max
  Clone ID: LIB3074-039-Q1-K1-F8
gaaccctaaacccctgtcatattgaaggcagggcggcagatatataaatacaaatcgccacgccgctacgtcttcttcagccatttagctccatagctgcagcattagggtttttcatctgcttcaatggggaagggaacagggagttttggtaagagaaggaacaagactcacactctctgtgtgaggtgtggccgccgcagcttccatctccagaagagtcgttgcgccgcttgtgctttccccgccgcacgcactaggaaatataactggagcgtcaaggcaatccgcagaaagaccaccggaactggcaggatgaggtacttgcgtaacgcgcctcgccgattcaagagtggcttcagagaacgtaccgaagctgcac

SEQ ID NO: 5695 - DNA, 338 bp, Glycine max
  Clone ID: LIB3074-039-Q1-K1-H5
ttgggggcagcagaagaacaagttgtttagagctaagaaggagaagcaaatggctttctcaatcatctcttccccagctgttaccactgtcaaccgtgccggtgccggcatggttgctccattcactggcctcaagtccatggctggcttccccaccaggaagaccaacaatgacattacctccattgctagcaacggtggaagagtgcaatgcatgcaggtgtggccaccagttggcaagaagaagtttgagactctttcctacctgccagaccttgatgatgcacaattggcaaaggaagtagaatactcttttatgaaaggatggattccttgct

SEQ ID NO: 5696 - DNA, 176 bp, Glycine max
  Clone ID: LIB3074-039-Q1-K1-H7
tcctttttcactaaaaaattaatattccaaaaatcatttcctcttacttcccacacctatcaatacgcctctttttcaccaccaccacaagcaccgcattccccgttactttacccaaaccctcattactctacctctcatcacttatattactctatcatctcttacataccatc

SEQ ID NO: 5697 - DNA, 450 bp, Glycine max
  unsure at all n locations
  Clone ID: LIB3074-039-Q1-K1-E10
gggcgacccacgcgtgctcccacgcctncgacggctgctagttgacaacttaaggggactacctcaagcataagttgcagtgactattnattaagaaacctattgtcattgatttgctaactccaacaatgggttctagcatattatcattcattttagtacttgtgcttgtaaccttttcatccatgatcattgactcaagggttgcagaggcacgtaccctgccaaaatcagccttattgccttccaaagttgatatacctactgttgttcctctttcactggtggcaccactgccaaatttgccttgtactctccctccagtgcctgaactaccttgcantcctaaagtaccaattcctgaagtaatagttaataacgccaaaataatccctttgagtcctatgatctattcagtcactactacttattttgtcacttgctaaaatt

SEQ ID NO: 5698 - DNA, 425 bp, Glycine max
  unsure at all n locations
  Clone ID: LIB3074-039-Q1-K1-E12
tattttggctcaagtgagtttcttcatcgatagggctgatgcaaaattatnaaaatcaacgtccttgttttcttcgttgctacaattttggtagcatggccatgccatggcgcaggctaccaaaggttccctctccgaatgaaaactggctattgtgagcgttcttcggaggtaaaatgcgcaagttttaggcttgctgtggaagcacacaacatccgagcctttaaaaccattcctgaagagtgcgttgaaccgacaaaggactacattaatggcgaacaatttacatcagactctattacagttaaccaacaagctttcttttatgctagtgaacgcgaagttcatcacaacgacatatttatattctgcataaataacaccgtactctctaatatcccatactatgaaaaacatggatattg

SEQ ID NO: 5699 - DNA, 52 bp, Glycine max
  Clone ID: LIB3074-039-Q1-K1-E2
gacctcaggtcaggcggggctacgggctgagtttaagcatatcaataagcgc

SEQ ID NO: 5700 - DNA, 354 bp, Glycine max
  Clone ID: LIB3074-039-Q1-K1-E5
tgcggtataatatacggtatcgggatttgtatacaagaagaatcaattctaaattgacaacttgagttctaaaattatgaaacataagtttttggaattgcatctataatccgaatttttttgagtatgacgaaaggatctatggagagatatatagaaagtttctttctaatcgtaactaaatcttccatttttttgtatagtagagattgaagcaaaatagctattaaacgattcttttagtttactagagacatctacatttttttagcttgacagaaattttatgcttttcctaaagattctattaaatagaaatagagaacgaagcattatcttttggctttataacaa

SEQ ID NO: 5701 - DNA, 411 bp, Glycine max
  Clone ID: LIB3074-039-Q1-K1-E6
gacaccaacaccaaaacaaacccactgggatggcggcctttgtatccttcctagtgctgcttcttgcagcccttatcctcatgcctcaagggcttgctacttactacaaaccaattaagaagccaccagtgtacaagcctccagtgtacaagccaccagtgtacaaaccaccggtttataagccaaaaccaccggtttacaagccgaaaccaccggtttacaagccaccatataagaagccaccatacaagaaaccaccttatggaaagtaccctccagtagaggacaacacccatgcctaaagcaagcaatgaggtctattatctacttaataaataagaggaactgctttgcgttttctagcattgtgatttacaacttcgtagcaatgcatattcttgactcttgcat

SEQ ID NO: 5702 - DNA, 410 bp, Glycine max
  Clone ID: LIB3074-039-Q1-K1-E7
cgcacgaagaagagcgtggagacctacaagagctacaggttcaaggtcctcaagcaggttcaccccgacattggtatttccagcaaggccatgggcatcatgaacagcttcatcaacgacatcttcgagaagctcgcccaggaagcgtcgcgtttggctcgctacaacaagaagcccaccatcacctcgagggagatccagaccgccgtgcgtctcgtgctccctggtgaattggccaaacacgccgtttctgaagggaccaaggcggttaccaagtttaccagctcttgaattagggtttgttaggcggttgtgttgcacatctagggttttctgtggatttcttttcttaaaaattagtttgtagatgtaatgatctgaacagttgttaatggaaaggttccgttgag

SEQ ID NO: 5703 - DNA, 343 bp, Glycine max
  Clone ID: LIB3074-039-Q1-K1-E8
gtccaaaacaactaacaaagcttagacgtctctttcttcttggcttatcatcccctgccacaacaagaaccaacatggctcccaccatctataatttttcgtattctaaaacgttttcaaactcattcaattcttcaaaatcaaaaagagattcatccagttccaacatccttgctttccactccacagctcaattgaatgctcattataacgccaccaaagaaactaacaaactgatgttacttgatttcacagccacatggtgtgtaccttgcatactcatgcacccacttattcaagagtttgctggatattacacatatgtttacttcatcaaaattta

SEQ ID NO: 5704 - DNA, 414 bp, Glycine max
  Clone ID: LIB3074-039-Q1-K1-E9
ttgggagctccaatgtttttttcagaggagtgcatctggtaatcaaaagagtttatcttatactaagaaatcgatgtcttactccattttaaggaacaaaacaagagaacaatagcctgacaaagggtttagccataaaatcgaatccatcattgatttgagatattgataaggtgaatactcatttctcgtcaatgctaggcataatgcgggtatagggacctaaaaaagattatcttttcttcctatcttatgaactttaaggtgtatgaagtgtcatttcctatcttagattttaattttagtacgtagataaagagtccatttaacttaacttcatctaggccagaagcagacctacgtcaagataatccttctttgaaacactttggtagtgctcttagattgtaatcc

SEQ ID NO: 5705 - DNA, 410 bp, Glycine max
  Clone ID: LIB3074-039-Q1-K1-F1
ggaggcgagggtaaggtcgcgttgtgttgcgtcgtggcgtgcggggttcccctgtttctcgtttttgtgttcagaccgaaccctagctccgcatcgcaaccatgtcgaccaagcaaggtggaaaagctaagcctttgaagaaacccaagtctgataagaaggattacgacgagattgatgtggctaacattcagaagaaaaaggaagaggagaaggcgctaaaggagttgaaagccaaggcgcaacagaagggaagctttggaggttctgggctcaagaaaagtggaaagaaataaaggctctttatcatgattgtatgcattcaatattgagccctgtaattacagttgctaccatgataacttctcttattattgtggcctactttattgctaatgtgtactgaactg

SEQ ID NO: 5706 - DNA, 232 bp, Glycine max
  unsure at all n locations
  Clone ID: LIB3074-039-Q1-K1-F12
tttcatgtcattaattaaataccgtnacatgttcaaattcacaagattccttaaaacattcataaacatttataatttgtgtatttaatcgcctttttacactctttatcctttaacaactgatatttccccctgctattatcgcatcacctctgcaatttgtgctttcaatattgggtcactttttactacttctctctgttatgtgacttcaaaagaacatctttttttt

SEQ ID NO: 5707 - DNA, 374 bp, Glycine max
  Clone ID: LIB3074-039-Q1-K1-F2
gacagcagtaaagtgagttaaaagaaccgagtgtaggggttccttcactctccgctctctctgccactgagccaagaagatggcctcacaggtttgcaaatctgcttccagagccgcgaggtcccttctatcctctcgttttcactctcaaggacgtgcgcttggggctgctgcggctgtttcattgagcagcaaagtgcctcttttttacggaaagaacggttctggaaatggatccgcttcttcttcatcatcatcatcatggatttcaggagctcttgctcttcctgccgcagcttacatgttccaagatcaggaggtgcaggcagctgagctggagcgcactttcattgccattaagcctgatggagtgc

SEQ ID NO: 5708 - DNA, 339 bp, Glycine max
  unsure at all n locations
  Clone ID: LIB3074-039-Q1-K1-F3
atctcttccaatttcaatttctcgtcgtccctcatgatggctggtctcgcgatcgctgtcgccgccgtgctcctcgtggccctctccgcctccaccgcgacggcgcgtccctgcaggacctttataatctcctcctactcgttccgcaaccctaactccaacaccttcgccaccatcaccgagatccgatccttcacccctctctacatcaccgacaaacccaccggcaaaccctcctcctcctacgacctcttcttnccccacgcgactcacctncctgagcccgagcgcgtgaacncacgcgctcccctagggttcgccttcgcgtacgaattcttc

SEQ ID NO: 5709 - DNA, 398 bp, Glycine max
  Clone ID: LIB3074-039-Q1-K1-F4
ggcttcagaaaaacaagtacttgagaactaagaggaaggatagtgcttcctcaatgatctcctccccagctgttaccaccgtcaaccgtgccggtgccggcatggttgctccattcaccggcctcaaatccatggctggcttccccacgaggaagaccaacaatgacattacctccattgctagcaacggtggaagagtacgatgcatgcacgtgtggccaccaattggcaagaagaagttcgagactctttcctacttgccagacctcgatgatgcccaattggcaaaggaagttcaataccttctaaggaaaagatggattccttgcttggaattcgagttggagcacggtttcgtgtaccgtgagcacaacaggtcacctggatactatgatgga

SEQ ID NO: 5710 - DNA, 385 bp, Glycine max
  Clone ID: LIB3074-039-Q1-K1-F5
tggtttggttcatatactacatcacttgggaagcggaagatggtgaaaccaaaaatgtgtatgaaacgaaggtgtgggtgagatcatggttgaactccaaggaggtcctcgaattcaagcccatcagtattaatcctctttcggtgtcggtctagtctttataaggttacagaaataaatggtcgcaagctgaaagttgtactaaaatttattttttataaaaaaatcgaaggtagtattaaatatgttatatgtatgtattgtgcggaataaatgcagccacgcactatatacaatggtacatacggtgtagggctgtacaagttgggcattctatttcaatattaacgaccactaataaatattaccattggagttattacac

SEQ ID NO: 5711 - DNA, 340 bp, Glycine max
  Clone ID: LIB3074-039-Q1-K1-E1
gatatgaaataaactgcaaccgtgacaaaagttggggggcaatggcatactcttactctgattcgttagtgaagaaaaatggcaacaatcatcgccggcaccccaactacatcaatcactcgcacaggtcatgtgctcaaacgacctgttggggcctcatcctctaccgttcttggattgccagcaatggccaaggcggggagagtggggtgctccatggaggaaaagccttcaagcagctcaaacctagggatgggggcatccttgttagcagctgcagctgccgcaaccatgtcaagcccagcagccatggctttggttgatgagagactcagcactg

SEQ ID NO: 5712 - DNA, 323 bp, Glycine max
  Clone ID: LIB3074-039-Q1-K1-F7
gccagaagacgacagacggggataccaaaaacaaaacacaagccaagtgaaagtgagaaaaggaaaaatcaaagagcataatgtcagggatcattcacaagattggggagacccttcatgtgggagggcacaagaaggaggaggagcataatggtgagcaccatgctggagaatacaaaggggagcaccatggtgaacacagtagtgagtacaaaggagagcatcatggtgaacacaaagctggagagtaccatggtgagcacaagccagagcacaaagaggggttcctagacaaagtcaatgacaagatccatggtgagggc

SEQ ID NO: 5713 - DNA, 421 bp, Glycine max
  Clone ID: LIB3074-039-Q1-K1-C2
ggttctagtgtgtgattgtttgttgttgtaactcgttcttcggcttttggtgttctgtgtttgtgtttgttttttctctcacctgaaaatgtcttgctgcggtggtaactgtggttgcggaagctcctgcaagtgcggcaacggctgcggaggctgcaagatgtacccagacttgagctacactgagtcaaccaccaccgagaccttggtcatgggagtggcacctgttaaggctcaatttgagggtgctgaaatgggtgtgcccgctaagaacgatggctgcaaatgtggaccaaactgctcctgcaacccctgcacttgcaagtgaggtgttgggagagcaagcttcaggcagagatagcccttaattaggaataatgataaactattaatgtgtagcttaaaacttacgtattatgtc

SEQ ID NO: 5714 - DNA, 56 bp, Glycine max
  unsure at all n locations
  Clone ID: LIB3074-039-Q1-K1-C3
agacctcaggtcaggcggggctacgcgctgaggttaagcatatcaataagcggnac

SEQ ID NO: 5715 - DNA, 341 bp, Glycine max
  Clone ID: LIB3074-039-Q1-K1-C4
gccacacgaccacacaattggaacacaacctaaaatggttccctacaaaaagccgctgctgcgcggttggtgaaaccatctaagtctgctccatccactcaataattctaaatattgcacggccgccgctgctttttttgctagatcacaaacacttacttacaagaacatatactttgtatggaaaagctataacaaaatgagcaaaacaaagagtacaacctcataattgagaacacccatcacgctcacatcttcattagtatgatcgtcaacatcatttcgtgagttggcggaattttcataatgatcaccatctgcttcctttccatcatatacat

SEQ ID NO: 5716 - DNA, 313 bp, Glycine max
  Clone ID: LIB3074-039-Q1-K1-C5
gacatgtgagtttgttgatcgaaataagtagaaagggtgttattaaaatgaacgtccttgttttcttcgttgctacaattttggtagcatggcaatgccatgcgtacgatatgttccctctccgaatgaacactgtctatggtgcccgtactccggaggtgaaatgctcaacttgtaggcttgctgtggaagcacacaacatcttttgctttgagaccattccttaagagtgcgttgaagccacaaatgaatacatccatggcgaacaatatagatcagactccaaaacagttaaccaacaaacttactttta

SEQ ID NO: 5717 - DNA, 393 bp, Glycine max
  Clone ID: LIB3074-039-Q1-K1-C6
gggaacatgaacgtgcgatgctgattcgggtatgaggaatcctcacgaagagagagagagagctgtgtctgaattctgaaaaattaaaccatgtctattacaacaacacaagctttgacccccttgtcgtcatcacgtaaaagtagaagtagaaccacatttggcgccaattccacctccacaagcttccccgctactccactctcctccaatctcctcctcttcaagctcagtcacacttcttccaaacgaacctcaaccaccttccatgccttcaagcgcttttcccccgtcatggagtggcaggattgcacggttaagatggagattgatgtgcccatctctgtagcctatacttgttattctgatcgcgaagccatcccaaactggatg

SEQ ID NO: 5718 - DNA, 319 bp, Glycine max
  Clone ID: LIB3074-039-Q1-K1-C7
gaatgagaagctcgacaagaaaaggaagactgtcgctaaggatgaagcttctgccatcaagtctgctgggaaagcatggtatcacactatggtgtcagattctgattatacagaattcgacaacttttctaagtggctgggtgttccacagtaaactttatgattcatattttcgtattagatttttgttttgtatgcccatcagaactaaatatctttggcttttttgttttgcgagttaaggttatcataattatgcagacaatttggaaattttgttcgtcggactttatagtgcaaattctggttgtcttatctt

SEQ ID NO: 5719 - DNA, 361 bp, Glycine max
  Clone ID: LIB3074-039-Q1-K1-C8
cacaattttaattttattaaaattacttcattctcttggctcattgtcctacctatcctttcaacatccacatcttcgtcaaaaccctcaccgaaaataccatcaccctttatgaggaaacctctgacaccatctacaacgtctaggtcaacatccaacacaaagaatgaatttccccacatcagcaacttctcatcttcactcaaaagcatctcaaggacagccgtaccctttcctactacaacatccacaacgaatcaacccttcaccttgctcttcttctacgtcgtggcatgcacatcttcgttaatactctcactttcaaaaccataaccctatatgtctaaaactctgacaccat

SEQ ID NO: 5720 - DNA, 414 bp, Glycine max
  unsure at all n locations
  Clone ID: LIB3074-039-Q1-K1-C9
ggggttattggacacattcttcagcggcgacgtttgtggatcggaacctcttctgcggcgtatcaatgggacactccaacgtttggaactctcacccaaaaaactacggtcctggttctcgcacttgccgcgtgtgtgggaatccacatggactgatcaggaagtatggccttatgtgccgcatgcagtgcttacgtagcaatgccaatgaaattggcttcatcaagtatcgctaaaagagcagttgtcaactacggaccaatattgcgttctggcactaggatgttttgaggatgttatgtttgaagaaacttgagactttcttttttcatctaattaattatcagacgtaatttgtggtactaagaatacttttatataaattgctttgaaccannccacattgcggaaaaa

SEQ ID NO: 5721 - DNA, 371 bp, Glycine max
  Clone ID: LIB3074-039-Q1-K1-D1
attagcaggagattcgggcctgggaaagggtctgctgagtatgcagctttggctaagaaccctgagaaggagtttttgaagactattactggcaagaaggagaccctcattgaccttacaattatagaaatcttgtcaaggcacacatctgatgagttctaccttggggagagagatggtggtgactattggacttctgatgctggtgcactagaggccttcaagaggtttggaaagaagcttcaagagattgaacaaaagcttatacagaagaacaaggacgatacgttgagaaaccgcagtgcgccggctaaaatgccttacactttgctctatacttctagtgaggagggattgactttcataggaat

SEQ ID NO: 5722 - DNA, 329 bp, Glycine max
  unsure at all n locations
  Clone ID: LIB3074-039-Q1-K1-D10
accaaaacaaacccactaggatagctgcctttttatacatcccaattctccttcctacaccccttattcttatacctaaataacttactacttactacaaaccaattaataacccaccattttacaatcctacattgtacaagccaccaangtacaaaccaccattttataatccaaaaccacctttttacaatcctaaaccacctctttacaacccaccatatattaatccaccatacaagaaaccaccttatttaaaatacccttcattaaatgacaacacccattccnaaagcaaacaattatgactattatctacttaataaata

SEQ ID NO: 5723 - DNA, 187 bp, Glycine max
  Clone ID: LIB3074-039-Q1-K1-D11
tggggatttagaaagtcctagtgaggtgtgggtacaattactatatccacatatatacacacagtagtagttaaagtcttaaagattagaataagatcagtgatggagagaaagttcatttcagtagttgttttgggagtatgtttggtgctgggaatgtcccaatatgttgatgcaaggaacttac

SEQ ID NO: 5724 - DNA, 422 bp, Glycine max
  Clone ID: LIB3074-039-Q1-K1-D12
ggcattggggcatgcttttaatttcctggatctccgaaacaaattgtagcataagtctcatggccaaagagactagtgttgtttatctatatcccagcaaatcacaagtttggggtgagaattttgatcataaaaaacttgtaataacaacactagctgctaatggaaagaaggaggagagtaatggagcacctaatgacacatatcctgcgtttcccgggtggtatgctgatgtttcctggccaggagaagcacacacatataaaatagaaaagattctattccacgggaaatcagaattccaagagcttcttgtatttgagtcttctagacaaggcaaggttgcaattcttgatgggcatatccagctgacagaaaacgatgaaattgcttaccaagagatgctcactcaccttgcactc

SEQ ID NO: 5725 - DNA, 424 bp, Glycine max
  unsure at all n locations
  Clone ID: LIB3074-039-Q1-K1-D2
catgatccaatgtaagcaccgtgccaggagcccaatcaagcgtatgtggaggaatctcntgctcatncttcagcccttcaaatnttccaggaagggagtcgatgttcttcttaagagaggtgagtgcagagcaaaaggtggggcacctggattcaaagttgcaattttgggggctgctggaggaattggtcaatccctttctttgctgatgaagatgaacccattggtttcagttcttcatctttatgatgttgtcaacacccctggtgtcacagctgatgttagccacatggacactggtgctgtggttcgtggctttcttgggcagcaacaacttgagagtgcactcacnttgcatgacctcgtaatcataccctgctgggtgccaaggaaaacctggatgacaagagatgatttatttaaa

SEQ ID NO: 5726 - DNA, 342 bp, Glycine max
  unsure at all n locations
  Clone ID: LIB3074-039-Q1-K1-D4
gagcatattccagtgtttttcatttcatcgtgcattcaagggccagcacagcagctctatccggaaccatggtgagcacctccttcatgaggaggcaacctatgaccaccacaagcctaaagacattccccaacgttggtgaagctctttttggtctgaaaagtggacgaggtggtcgcgtcacttgcatggcctcgtacaaggtgaagctcataaccccagaaggagaagtggagtttgaatgcccagatgatgttttcattgttgacaaggcagaggacgaaggcattgaacttccctactcgtgcanggccggttcttgcgttttctgtgttggcaaaa

SEQ ID NO: 5727 - DNA, 396 bp, Glycine max
  Clone ID: LIB3074-039-Q1-K1-D6
aagacgacagaagggggggaaacccagagagtgaagcttagagagagagagagagagagagatgtgagagagtattggcgcttcatcaagatgggtatttctagggattccatgcacaagaggcgtgccactggtggcaagaaaaaggcttggagaaagaagagaaagtacgagcttgggcgtcaggcagcaaacaccaagttatcaagcaacaagacaatcaggaggattcgtgttagaggtggcaatgttaaatggagggcattgaggctggatactggcaattactcatggggtagtgaagcagttactcgcaagactcgtattctagatgttgtttacaatgcctcaaacaacgagctcgtacgaactcagaccctggtcaagagtgctatt

SEQ ID NO: 5728 - DNA, 397 bp, Glycine max
  Clone ID: LIB3074-039-Q1-K1-D7
ggtcacattccacaaaaacgaagtactgcgacaagggaagaaaaacttagctactaaggaaggatcaaagagaatggctcaagcaatggcatcaatggctggcttgcgtggttcctctcaggctgtgttggaaggtagccttcaggtgagtggctccacacgcttgaatgtggggagtggaagcaaggtggcctcagtcacacgtgcagggttcacagttagagcacaacaacaacaagtgagtggtgaggtacaaagcagccgtagggcagtgctttcacttgttgctgctggtttggccactggctcttttgttcaagctgtgcttgctgatgccaaatctatcaaagttggaccacctcccccaccttctggtggattgcctggaacgttgaac

SEQ ID NO: 5729 - DNA, 173 bp, Glycine max
  Clone ID: LIB3074-039-Q1-K1-C12
aaatggtcctatcaactacgactacataaatctggcgttgggctaagacaacataacacatctcttgctacaagactttagattgaaccatttttgacttgactactcattgtgtcggcactgagaatatacagacaacaacggttgcaaaaacacgacctaatgattctgat

SEQ ID NO: 5730 - DNA, 347 bp, Glycine max
  Clone ID: LIB3074-039-Q1-K1-D8
gatgtaactaagcaagatatcatcacggggcaaaggaaatacacattacattactaagtctttgttcatttgagtagtagtgatggctagcctcaaggttgcatgtgtggttgctgtgatgtgcatggttgtggaggccatgagtgctgcacccatggcacaggccgcaatcacgtgcgggtaggtcgccggcgacatgtctacgtgcttcagttatcttctaagcggcggaaaaccgtcgcaggcctgctgcaacggagtgaaatccctcagcggcgcggcgaagaccacctctgaccgccagggggcgtgcagttgcctgaaaaaccttgccaataatatgggac

SEQ ID NO: 5731 - DNA, 405 bp, Glycine max
  Clone ID: LIB3074-039-Q1-K1-D9
tatgggggtcacattccacaaaaacgaagtaggactacaatggaagaaaaacttacctactaaggaaggatcaaagagaatggctcaagcaatggcatcaatggctggcttgcgtggttcctctcaggctgcgttggaaggtagccttcacgtgagtggctccacacgcttgaatgtggggagtggaagcagggtggcctcagtcacacgtgcagggttcacagttagagcacaacaacaacaagtgagtggtgaggtacaaagcagccgtagggcagtgctttcacttgttgctgctggtttggccactggctcttttgttcaagctgtgcttgctgatgccaaatctatcaaagtttgaccaccttccccaccttcttgtggattgcctggaaccgttaactc

SEQ ID NO: 5732 - DNA, 54 bp, Glycine max
  unsure at all n locations
  Clone ID: LIB3074-039-Q1-K1-A11
gagacctcacgtcangcggggctacccggtgagtgtaagcatatcaataagcgg

SEQ ID NO: 5733 - DNA, 353 bp, Glycine max
  unsure at all n locations
  Clone ID: LIB3074-039-Q1-K1-A12
gatagcaaaaggaaaacacaagccaagtgaaagtgagaaagaataaaaatcaaagagcgtaatgtcagggatcattcacaagattggggagacccttcatgtgggagggcacaagaaggaggaggagcataagggtgagcaccatgctggagaatacaaaggggagcaccatggtgaacacagtagtgagtacaaaggagagcatcatggtgaacacaaagctggagagtaccatggtgagcacaagccagagcacaaagaggggnttctagacaaaatcaaggacaagatccatggtgagggcggcgccgtcgagggcgagaagaagaagaaggagaagaagaaaaagggca

SEQ ID NO: 5734 - DNA, 396 bp, Glycine max
  Clone ID: LIB3074-039-Q1-K1-A7
ggtgggcatagtaggggagaaagtggaataagagaatcataagaaagcacgaaagaaaatgggagtggagaagcagttgttgaggcctggcaccggtcccaagccaattcccggtcagaacgtcaccgttcactgcactggtttcgggaagaacggtgacctttctcagaaattctggagcaccaaggatcctggccaggaccctttcactttcaaaatcggccaaggttctgttatcaaaggatgggatgaaggtgtgcttggcatgcaaattggtgaagttgctcgtctccggtgctctccggattatgcttatggtgctggtggctttccttcttgggggatacagcccaactctgtcttggaatttgaaatctaagtcttgagtgcacaatg

SEQ ID NO: 5735 - DNA, 332 bp, Glycine max
  Clone ID: LIB3074-039-Q1-K1-A8
caaagcgaaacatataataaaaaaaaaaactcaaacaccttcaagaacttgtatctttctttgttagtatttgttactacaattttacattcttttcatctctacatatttcattagtcatggcacctcaagcagtttccttcaagtccttcgccgttgctcttattgtggcgcttttcttatccgcctccgctctggacttagtttcggggcagtcgacggtgcctgcccctgcgcctgcaccatatgccggagcaactggatccgtatcgagctctgtcgccattattggaacttcccttgtgatttcattgctctgcatttttaaacac

SEQ ID NO: 5736 - DNA, 398 bp, Glycine max
  Clone ID: LIB3074-039-Q1-K1-A9
taatggggggagagagaaaaaggagaaccttcttttctctctgttttgttgttattcttatttcagacctaaaaaccaaaagcaccgattctgctttctagaattacatcatcgtatcaagaaaaccttggaactacacgaaaatggtgtcggcgaacaaggagatggtcgtgtactgcttcgacaccctcctcgctcactacaacagcacggaagctcctttccctgccttccatcaggctcaacatccattgtttgttacatggaagaaagtggtgaatggtggacatcctcgtcttctgggttgcatctgaactctggaagcacgcagcttgatcaatgggctcaaagattatgcactgaccagtgccctcatggaccggagattttcacccata

SEQ ID NO: 5737 - DNA, 413 bp, Glycine max
  unsure at all n locations
  Clone ID: LIB3074-039-Q1-K1-B1
ggtccaatccaattgaattctccagagagaagaagggacttaggcgatcatcacttcacttcactaatacatcatggcagacgagacccagaacaagtatgagagctctgaggttgaggtccaggatcgtggtgtttttgactttctcggtaagaaaaaggacgaagaagacaagcctcatcctcaggaggaggtcatcgccaccgagtttcaaaaagtcactgtctcagaccaaggagagaacaagcacagcctcttagaaaagcttcaccgatctgacagcagctctagctcttcaagtgaggaggaaggagaagatggagagaaaaggaagaagaagaagaaggaaaagaaagggctgaaagagaagatcgaggagaaaataganggtgatcatcatcatcacaaggatg

SEQ ID NO: 5738 - DNA, 424 bp, Glycine max
  Clone ID: LIB3074-039-Q1-K1-B2
gacccaaatgcaaagttgtatgattatatataacaagtctggggcgctgaaaaaatctctctaagccaaaccagcctttacccacatgctaaggttatgatatgctctttggaaagaagcagggcccgaaggagaatcgaacatcaaaaaacatgaccaaaatgggcatggaattctcatcatcttccccttaaatttatcttcattattatattggtcaatttgaagctgcacgtacagtggtaagtaacggaaaatggggttgcacatggtggctgtggcgaagttccacttgcatgttgccagacacagtgtaggccctgtggtggcttggaccgtttgtcctatagccttcaagctcttattgagtctgaggatgttccgagaagaagcactttactcaacgaggttctttctctttcga

SEQ ID NO: 5739 - DNA, 363 bp, Glycine max
  Clone ID: LIB3074-039-Q1-K1-B3
ggcaccccgtgagtctgtatgatcgtagataactagtaaacatgcgtgatgagaaatgaaagataccttgttttcttcaaatcctacacattttcgtagcattggcaatgccatgcttaccgatatgttccactctccgaatgaacactgactatggtgcccgtactacggacgagaaatgcgcaagttggacgcttgctgtcgaagcacacaacatcttttgctataagaccatacctgaagagtgccttgcagcaacaaaggactacatccatggcgaacaatatagatcagactccaaaacacctaaccaacaagcttactcttatgccagacacctcgaagttcatcccaaggacacat

SEQ ID NO: 5740 - DNA, 357 bp, Glycine max
  Clone ID: LIB3074-039-Q1-K1-B4
ggtgagacgagggtaaggtcgcgttgtgttgcgtcgggtcgtgcgctgttcctctgtctgtcgcttttgttttcagaccaaaccctagctccgcatcgcaaccatgtcgaccaagcaaggtggaaaagctaagcctttgaagaaacccaagtctgataagaaggattacgacgaggttgacatggcttacattcagaagaaaaaggaagaggagaaggcgcttaaggagttgaaagccaaggcgcaacagaagggaagctttggaggttctgggctcaagaaaagtggaaagaaataagggctctttatcatgattgtatacattcaatattgagccctgtagtttattaccatgat

SEQ ID NO: 5741 - DNA, 399 bp, Glycine max
  unsure at all n locations
  Clone ID: LIB3074-039-Q1-K1-B5
gagcgccaatgtttgtttcagaggagtttcatcttgtaatcaaaagagtttatcttatagtaagaaatcgatgtcttactccattttaaggaacaaaacaagagaacaatagcctgacaaagggtttagccataaaatcgaatccatcattgatttgagatattgataaggtgaatactcatttctcgtcaatgctaggcataatgcgggtatagggacctaaaaaagattatcttttcttcctatcttatgaactttaaggtgtatgaagtgtcatttcctaccttagactttaattntagtaggtagataaagagtctatttaacttaagttgatctaagccagaagcagacctacgtcaagataatccttctttgaaacactttggtagtgctctt

SEQ ID NO: 5742 - DNA, 421 bp, Glycine max
  Clone ID: LIB3074-039-Q1-K1-B6
aggcgtgcgaacacacacaaggggacaccaacaccgccacaaacccactaaggtggcttgctttgtatccttcctagtgctgcttcttgcagcccttatcctcatgcctcaagggcttgctacttactacaaaccaattaagaagccaccagtgtacaagcctccagtgtacaagccaccagtgtacaaaccaccggtttataagccaaaaccaccggtttacaagccgaaaccaccggtttacaagccaccatataagaagccaccatacaagaaaccaccttatggaaagtaccctccagtagaagacaacacccatgcctaaagcaagcaatgaggtctattatctacttaataaataagaggaactgctttgtgttttctagcattgtgatttacaacttcgtaacaatgcatattc

SEQ ID NO: 5743 - DNA, 393 bp, Glycine max
  Clone ID: LIB3074-039-Q1-K1-A10
ggcacaagtgagtttgttgatcgagatagctagagacagtgtgatgaaaatgaaggtccttgttttcttcgttgctacaattttggtagcatggcaatgccatgcgtacgatatgttccctctccgaatgaacactggctatggtgcccgtactccggaggtgaaatgcgcaagttggaggcttgctgtggaagcacacaacatctttggctttgagaccattcctgaagagtgcgttgaagcaacaaaggaatacatccatggcgaacaatatagatcagactccaaaacagttaaccgacaagcttacttttatgccagagacctcgaagtccatcccaaggacacatttgtgttcagtatagatggcaccgtactctctaatattccata

SEQ ID NO: 5744 - DNA, 295 bp, Glycine max
  Clone ID: LIB3074-039-Q1-K1-C1
gaaaacaaacgacagagatgaatggcctatcatgggctatgcaccgtctctgcccgagactcttagaaatgacatcatgctgaggtatcttggctttactactttattctggacaagacgagcactcaacaaacaggccgaggcataagccatcttatagaatgcttgcttccacacatataaaaaattagttattactgattcacaagatactttcactataaatgcaggtatatacacctcaacaagaagagatgaaacttgctatcgcatggatccaacatgtgtgtgatca

SEQ ID NO: 5745 - DNA, 417 bp, Glycine max
  Clone ID: LIB3074-039-Q1-K1-C11
gatctcagtctctacctcaaaccactcgagaaaaaatggcggtgcctcttctctcgaagaagatcgtgaagaagaggctgaagaagttcaagaggcctcaaagtgacaggaagatttctgtgaagacaaactggcgcagaccaaagggtatcgattcccgtgttaggagaaagttcaagggatgcactttgatgccgaacattggttatgcttcagacaagaagacccgccactatctcccgaatggtttcaagaaatttgttgttcacaatgtgaaggatttggaactgctcatgatgcacaacaggacttactgtgctgagattgcccacaatatatccacaagaaagagaaaagatatagtcgagagagccacgcagcttgatgttgttgtgacaaataaaacggccagattac

SEQ ID NO: 5746 - DNA, 263 bp, Glycine max
  Clone ID: LIB3074-038-Q1-K1-F10
ggttgaccgacgcgtccgcacacttcccattcacatttactatggccaagactgcttctgcaaaggctactaaggccaggacaaaggtatgaaagacctcaaaggcttccaagaaggccgaacccgtcaagcagaaggttgaggattcctcctcttcttcttcttccgagtctgactccagcagcagcgactccgagtctgaggaagagaccaagaaggttaccaagaaggtcaccaagaaggtcaccaagaaggccgccaag

SEQ ID NO: 5747 - DNA, 325 bp, Glycine max
  Clone ID: LIB3074-038-Q1-K1-F3
ggcttcacaaactcacacactttgtactctccggggttccttgttagatccacatctctctacttctcccttaaatggctccccttctacaatgttccatgcccctcctctatctttccaatcaagctctggtaccccttaccagcatctccaacccaacttcagtttccctttcaattaacgtaagaacttttccatactttacattgcatcccaaagggcttccgtttcagcttagatgtgctgcaaaaccagatacagtgaagaatgtatgtgacatattcaagaagcaattgccactgccacatgaataatctgttactgt

SEQ ID NO: 5748 - DNA, 397 bp, Glycine max
  Clone ID: LIB3074-038-Q1-K1-F4
gatccctacaacgtaataataaccaaaacagcagagggaagagggggtgtagacaaacacaatctctaatggcactcaggatgtgggcttcttccactgccaatgcactcaaagtctcttctacctccagacctcatctcttgcatcctttttctttctccagatgcttgtcttccgtcttggatggacttaagtatgcagattcacacgaatgggtcaagcacgaaggctcagtcgccaccattggtatcactgaccatgcccaggaccatcttggagaggttgtgtatgtggagctgccagaatcaggaggcacagttacccagaagtctggcttcggagccgttgaaagtgttaaagcaacacgtgacatatactctccaatctcgggggagat

SEQ ID NO: 5749 - DNA, 270 bp, Glycine max
  Clone ID: LIB3074-038-Q1-K1-F5
accacacattttaaattaatgccccttgttttttttcatcagattttttctctattaatatcatctcttcacaatctcttgtattatcatctactcttaccttattaactaacatctccaagacaaaatcacttaccaaaatcactccaatctcctttcttcttgtccagaaaagcatcctttcttgataatgcatatactaccccccctattaaacaaggatcatacatgcctttatctttttcatcaattcaaattctttcttacttc

SEQ ID NO: 5750 - DNA, 225 bp, Glycine max
  Clone ID: LIB3074-038-Q1-K1-F9
gagttcattatcgttgataaatagagggaaaagggagggtttctgaaactgcataagcggctgtccgcaagcgtgctcaagtgtggcagaggaaaggtgtggcttgaccccaatgaagtcaacgaaatctccatggccaattctcggcaaaacatcaggaagttggttaaggatgggtttatcatcaggaagccaaccaagattcactcacggtcccttttttcc

SEQ ID NO: 5751 - DNA, 389 bp, Glycine max
  unsure at all n locations
  Clone ID: LIB3074-038-Q1-K1-G1
ggtcttgaggacaaaagaagaagtatcacaaccccatcgatgtcccgcgcaactcttgtgcaaaagcggatctcatctcccgttcttggtttgccagcaatgggtaaggtgggaagagtgagttgctccatggaggaaaaaccttattctgtgaaggaaagcagctctagcatgttggggatgggggcatctctgatggcagctgccagcgctgcagccatgtcaggcccagccatggccttggtagatgagagactgagcactgaaggaaccggacttccctttggcctcagcaacaatcttcttggttggatccttttcggcgtctttggtcttatctggactctctattntgtctacactttcactctngaagaggatgaagagtc

SEQ ID NO: 5752 - DNA, 252 bp, Glycine max
  unsure at all n locations
  Clone ID: LIB3074-038-Q1-K1-G10
cgtccgncgagcctgtacaatttgtggttggacaccttcgtgaacagattgttcaagtccttggtgggcctcaagacgctctgtggaagagctactggaaagatgcttcgtccatgatcaagttcttttggaacgatgtagcgacttcaatttctcgtgcgaatgctttggattccacactcttgaatgatgcttacaaagctgaagggcaatcatacgcggacattatctcattcacactgagacaagcta

SEQ ID NO: 5753 - DNA, 352 bp, Glycine max
  Clone ID: LIB3074-038-Q1-K1-G3
gacattaattctcatctacattcttccaaagtgtcgttaattgtcgtgccaagttcctctgtgttctctttgcctcgacactctgcattcaagttccataatggcagcaaccatagcaacaacaatggctatgatcaactcaaagtgcatcaacacaacagggtcatcacacaagttgcacaaccccaagctccaccctcaaaacccaccctctcccttttctcccttcagaacctcccaaagggcctaacctcccacgtctcaacttccacagcaggcactgccatcgcaggcgcaatattctcctcactcgcaaactgcgacgcagccttagctgcatcgcaaattgctg

SEQ ID NO: 5754 - DNA, 341 bp, Glycine max
  unsure at all n locations
  Clone ID: LIB3074-038-Q1-K1-G5
ttttcatttacttgaacaaactttacaacccgacaagggggatttttacctcttcaanctaccaaccttctttttctttcttagtgccatcttgccataagtttaatttgcccaacaaactttactattcacatctgaatcaacaaacaagacacaccctacccagctctgtaaccaaatctccaatactcctctcatatacattctctcaccaggaccctcacaacaaggttacctctcaaaccttctccaataccaacatattaataactctccaacaaatcacaaccaaggacaacacactctatgacaacaatcaacgttacatatgcaggaacatt

SEQ ID NO: 5755 - DNA, 388 bp, Glycine max
  Clone ID: LIB3074-038-Q1-K1-G8
tattcatcattttccaaacgggcatttgcgtacttttttaattcaatataacaacttaatttctgcttcaatggctttaagtcatgaagatgtcatcctttttgtgtttattgtaagcccatttcttcactatatgcatattgctctcaactttaatgcatttcaatacaaatatttttaatattattttaacaacaatatttatttgctcctcaagtataacccactttataaaatgattccatctcttccttacaattaaaagtccatatcctattcccttgttatttttgattacatctattacacatgtaaaaacaaccccatcttgccttctcatccttaccatataaccttttctcctttctttcccaatttcatttattac

SEQ ID NO: 5756 - DNA, 246 bp, Glycine max
  Clone ID: LIB3074-038-Q1-K1-G9
acgttcacatagaggaatcgagattgcataaaatttgccatcgttgatggaagcacgagagccttcgttgttcaagatgagagctaagtggaagaagaagcgcatgatgaggttgaagaggaagcgccaaaagatgagacaaagatctaagctggtgcttgaacaaggagtggacattgtgtgcttttccatctgcttaaaccccccccaaaatgaccctttttccattgaaccatttttttttaa

SEQ ID NO: 5757 - DNA, 410 bp, Glycine max
  Clone ID: LIB3074-038-Q1-K1-H1
acgacagaagggggtggtagtgtgtcagcgacacgtatcaacttgagtaatcggatcgtataagcagtttccggtgcatctcatcgtctccgaaaatgaacgacgcagatgtctcgaagcaaatccagcagatggtgcggttcatccgccaggaagctgaggaaaaggccaacgagatctctgtctccgccgaagaggaattcaatatcgagaagctgcagttggtcgaagccgacaagaagaacatcaggcaagaatacgaacgcaaagagcgccaagttgaaattcgcaagaagattgagtactcaatgcagctgaatgcttctcggattaaagttcttcaagctcaagatgacgtgatcagttccatgaaagaagctgcatccaaggaacttttgactgtgagtcat

SEQ ID NO: 5758 - DNA, 133 bp, Glycine max
  unsure at all n locations
  Clone ID: LIB3074-038-Q1-K1-H10
tggctccccctgtccctttcnngaacttccgntnttctggtgctttgngagcccgttttcctctctcaccnntgcgacntgttccagattacatccaaagacccgactacgcggaaactggcattcccgtctc

SEQ ID NO: 5759 - DNA, 369 bp, Glycine max
  unsure at all n locations
  Clone ID: LIB3074-038-Q1-K1-H11
tgggttggnacatttgttcatngaaattttttcaaagtgggtgatagaattccaacggtaaatttcatggcangatttgaaacccaaacgcctttgctgttgttcgaagaaattaatccaactatgatcgaccgtatggacactcggcaaacatttgtacgagctgaaatacaagatggngatattatctgtattcagaaaagcattctaaatgaaaaagcttcaagcaattttttttttctcccaatatttttccaaaccaaattatttaaaaattttttttttttcccggataatcacccccgcgtttttatttccccccccataattatttaaaaaccccccttttttaaattttttttttttatt

SEQ ID NO: 5760 - DNA, 347 bp, Glycine max
  Clone ID: LIB3074-038-Q1-K1-F1
ggaaccacacaatacaagttaaggggatggtggagaaaggaagtgtggttgaagctgcagtaactagatcttccatgcagatgaagatgggggatcatgaattagaaggcaacactaccagtgccctacgcactgccgagacgtttctgcgtttgttccctgttggtctatgtgtttcagcacttgttctcatgcttaagagctctcagcagaatgaatatggatctgttgattacagcgatcttggagctttcaggtacttggtgcatgcaaatggcatttgtgccggctactctctattttcagcggtgattgctgctatgccatgcccttccactatacctcgt

SEQ ID NO: 5761 - DNA, 275 bp, Glycine max
  Clone ID: LIB3074-038-Q1-K1-H5
ataatatgttattttttctttaataaataaagaaaaaaggggatctgttggtttttaattacacttgcaccatctatttaacaatgtcctgttcatgttcattgcaaaatcaacaaggatcataccctacaacctcttttgtatttcctaaaaacaatcagagaaaaaggataacactttatcatttatttaacttctctatgactcaaagttctgcttaatcaagcaagtcctatgaaaaaattccttcttattccaaaccttactcctattaa

SEQ ID NO: 5762 - DNA, 360 bp, Glycine max
  unsure at all n locations
  Clone ID: LIB3074-038-Q1-K1-H7
ttggggattcagaaacaaacgaaacccaataggcgtgnctaaattctcttcaaattctctgatgcacagcctgaagcggttcataaagaagccatgggagatcacgggcccgtgcgcggaccctgagtacaaatccgcattgcccttggccgtggagtaccgcctcagctgccccgccaccgtcaaggagaagcccatcattcccaactccctcccggagaccgtctactacatcaagtacttcacccgcgaccagcgccgcaaccgccctcccatacgacgcaccgtcttgaagaagcccgacttccagaagctcatgaaggaacagaccttcttcgtcttcgactttccgtccgttta

SEQ ID NO: 5763 - DNA, 90 bp, Glycine max
  Clone ID: LIB3074-039-Q1-K1-A1
gtaagtgatgacaaatataatcccagctctatgagaccttcgcgactgcaaggtctgggattagatttgtttacagttgtctgagcagca

SEQ ID NO: 5764 - DNA, 252 bp, Glycine max
  Clone ID: LIB3074-038-Q1-K1-C10
cgcgtccgcaccaataacgcaagaacataaaggccctactcggcgtgtatatatgatttgaataccggagcagcgtgaatgaaaaagaaaaacggcttttcctattattttttttttcctttcctctgttttccttttgtatcgctccatttcttttttttatcttttcatcgatgtatcacccaccttttcccatacatctatttttcttttccattctttcaccacagttgaaattaatttttttatttc

SEQ ID NO: 5765 - DNA, 152 bp, Glycine max
  Clone ID: LIB3074-038-Q1-K1-C12
agttcatacatttaccctttctcttaaatacttcttattaaaactttacccttgcttattaacagaaaaatttaaaacaacccatataatcccactaatctatcaaaaaaaaaatctttattcctaatgctttatccatcatacaacccaac

SEQ ID NO: 5766 - DNA, 297 bp, Glycine max
  Clone ID: LIB3074-038-Q1-K1-C2
ggcttttctttcttcccatttgttgatccagtcgggctcatggcggagattgaactgaaaactgcacctgctgattttcgttttcctacaacaaatcaaaccagacattgtttcactcgctacatagagtttcacagatgcttggcagcaaagggtgaaaactctggtgaatgtgagagatttgctaaatattaccgctccctttgcccgggtgaatgggttgaaaggtggaatgaacagagggagagtgggacttttccaggacctttttgaaatcatgtggcacttggatatcct

SEQ ID NO: 5767 - DNA, 318 bp, Glycine max
  Clone ID: LIB3074-038-Q1-K1-C3
gaagtagaactagtctaagcagaaatggcctcttcggtgatggcatctgtggccctcaaacctgcccctttcactgttgagaagtcctcagttagaggccttccctccctctcaaggaactcctcttcattcagagttgtggccagtgatggcaagaagaccaagactgacaagccttatggaattaatggtggcatggctttgagggaaggagttgatgcatctggcaagaaaggaaagggaaagggcgtttaccagtttgtagacaaatacggtgctaatgtcgatggttacagtcctatctacgacaccaaggac

SEQ ID NO: 5768 - DNA, 248 bp, Glycine max
  Clone ID: LIB3074-038-Q1-K1-C4
caaccactcgcgatctgttccttctttcaacaactataacatcatccttctccatcctaacacaccacactatgaccacctcacccaccaaatcaaaccatcatttcaccttccaaaacgccaatttaaatcatattaatcttcttgactacaaaggaaacgtccttatcattttcaatgttacctcacaatctcccttaactaaaataaattacacttatctcaatcacttgttttttaaatacaaa

SEQ ID NO: 5769 - DNA, 196 bp, Glycine max
  Clone ID: LIB3074-038-Q1-K1-C5
tttttattttttttaatttcaaacaaatcaaggccattttcaactttaacatttatattcttctctccaacatcctaaccttatttttttatgcttcttaccaattcacactttaactataccttttcttttacttttaacaattaaaacccattccaactaaacattattctccataaatattctattatttcat

SEQ ID NO: 5770 - DNA, 321 bp, Glycine max
  unsure at all n locations
  Clone ID: LIB3074-038-Q1-K1-C7
ggtgttagtgaagaagcanagggagtaggggcattgaaaatgcacatcttcgtgaaaactctgacagggaagactataaccctcgaggtcgagagcagcgacaccatcgacaatgtcaaggccaagattcaagacaaggaaggcattcctccgcatcagcagcgtttgattttcgccggaaagcagcttgaagatggaaggaccctggccgattacaacatccagaaggaatcaacccttcatctcgtcctcaggcttcgtggtggcatcattgagccttcccttatggctttggctcgcaaatacaatcaggacaagatg

SEQ ID NO: 5771 - DNA, 275 bp, Glycine max
  Clone ID: LIB3074-038-Q1-K1-C8
acatttcaacatacagagcaaccactcgggtcttggttcttttttcaacaactataactacatccttctctctcctaacaaaccacactattaccacctaacactccaaatcaaaccatcatattaccttcaaatattccaattttaaatcatattaatcttcgttactaccaactaaacttccttatcatttacaatgttaacttacaatatcccattaactaaaatcaaaattacacatatacctccaatcaattttttttattataatacaa

SEQ ID NO: 5772 - DNA, 141 bp, Glycine max
  Clone ID: LIB3074-038-Q1-K1-C9
tcatgattgtatacattcaatattagagccccgaactttatcaccatgataacctctgacatattgaggccctctatatagatctaacagtctaggactgaactgacgtatttcctgatgtaagcaacaacaagttacttg

SEQ ID NO: 5773 - DNA, 355 bp, Glycine max
  unsure at all n locations
  Clone ID: LIB3074-038-Q1-K1-D10
ttttacaaagagtgctttaaataccttttctttaatatnaacataagaagtttcttgcgtgacttttacaatccnctactcttttaaattgcctgggaggttgccaataaagtccgtggtatctataccgttctcaagaccaaagttccagtcaccgttcacgaatatggcgaccgctactgtcttattggtcccctttcctacaagacggcccccatggaggttgaaagcccaaaattttgggggtaaaagtccccccccccaaaacaaaaagggggaaaaaaaaaattttttttctttttccccgtaaaaaaagggaaaaaaccccgtggcccccctttttttttttttgggt

SEQ ID NO: 5774 - DNA, 405 bp, Glycine max
  Clone ID: LIB3074-038-Q1-K1-D3
ggcacaagtgagtttgttgatcgagataactagaaacggggtgagtaaaatgaaggtccttgttttcttccttgctacaattttggtagcatggcaatgccatgcgtacgatatgttccctctccgaatgaacactggctatggtgcccgtactccggaggtgaaatgcgcaagttggaggcttgctgtggaagcacacaacatctttggctttgagaccattcctgaagagtgcgttgaagcaacaaaggaatacatccatggcgaacaatatacatcagactccaaaacagttaaccaacaagcttacttttatgccagagacctcgaagtccatcccaaagacacatttgtgttcagtatagatggcaccgtactctctaatattccatactacaaaaaaca

SEQ ID NO: 5775 - DNA, 405 bp, Glycine max
  Clone ID: LIB3074-038-Q1-K1-D4
ggatacaggaacagcagagaaacaaagttagaagtgaagaagatcatggcttctctagcaaccttggctgctgttcaaccagctacgatcaatggccttgctggaagttccctctctggaactaagctctctttcaagccctctcgccacagtgtcaaatccaagaacttcaggagtggtgccgtggtagcaaagtatggtgacaagagtgtgtactttgatttggaggatctgggcaacactacagggcagtgggacttgtatggctcagatgcaccttcaccctacaaccctcttcagagcaagttcttcgagacatttgctgctccattcacaaagaggggattgttactcaagtttctgatattgggaggtggttccacccttgcatacttcagtgcaact

SEQ ID NO: 5776 - DNA, 294 bp, Glycine max
  unsure at all n locations
  Clone ID: LIB3074-038-Q1-K1-D5
gggccaaggaaccaatataacccaagcccnacacaaccaaacccnaacacacacccacnnganncagcnnccaaggctagccccaaggnngcatcnnnggctgcagtgctctgcatggttgtggtgagtgcacccatggcacatgcaactatcacgtgcgggcaggtgacgagtagcctggccaattgcatccgttacctccaaaagggaggaacgccgtcttctggatgctgcaacggagtgaaaagcctcaatgccgccgccaaaaccaccgccgaccgccagacggcgtgc

SEQ ID NO: 5777 - DNA, 256 bp, Glycine max
  Clone ID: LIB3074-038-Q1-K1-E10
acctaccatgttctctgcacgtttgactactcgcctcgccgctcgcaccgcttccaacgctgggaaggctggcgccttctccactggtgctggtgcccccgctgctggtgctcgcaagtctctctttgctggtgctactggtgccgctgttgctgccaccgctggtttcgcttattatcaaaccacccagagccccatccttgctgattccaagggcgttgccggtgtcaagggtactgactccgaaaaggccccc

SEQ ID NO: 5778 - DNA, 159 bp, Glycine max
  Clone ID: LIB3074-038-Q1-K1-E11
ttctctaataatatgtttattcattttctaaagcctctacaaattctttattcttctcatctctgtctacattaccttcatcatccctttctccttcctcttataaccttcctatacattattttagttccaaaccccaaaaaaaaacctccccttttc

SEQ ID NO: 5779 - DNA, 335 bp, Glycine max
  Clone ID: LIB3074-038-Q1-K1-C1
ggagagaaagagatagaaagatgtcgaagcgtggtcgtggtggtgcggcggggaacaagttccgcatgtcgctgggtcttccagtggcggcgacggtgaactgcgccgacaacacgggggcgaagaacctctacatcatttcggtgaaagggatcaaaggccgtttgaaccgtcttccctcggcctgcgttggcgacatggtgatggccaccgtgaagaagggaaaaccccatctgaggaagaaggtcttgccagctgtcatccttcgccagcgcaagccatggcgccgaaaggacggcgtctacatttacttcgaagataatgctggtgttatt

SEQ ID NO: 5780 - DNA, 405 bp, Glycine max
  Clone ID: LIB3074-038-Q1-K1-E4
gacacaccaacaccaaaacaaacccactaagatggcttcctgtgtatccttcctagtgctgcttcttgtagcccttatcctcatgcctcaagggcttgctacttactacaaaccaattaagaagccaccagtgtacaagcctccagtgtacaagccaccagtgtacaaaccaccggtttataagccaaaaccaccggtttacaagccgaaaccaccggtctacaagccaccatataagaagccaccatacaagaaaccaccttatggaaagtaccctccagtagaggacaacacccatgcctaaagcaagcaatgaggtctattatctacttaataaataagaggaacctgcttgtgttttctagcatcgtgatttacaacttcgtagcaatgcatattcttgac

SEQ ID NO: 5781 - DNA, 345 bp, Glycine max
  Clone ID: LIB3074-038-Q1-K1-E6
tttttgctttatcttatcatcaccatctcacgcgagagaggtagagatataatcgctaaaattatctgaacgattgggaagaagaagggagcgagctttgtgatcgattgcgcgaagccggtggaggataaaattatggacattgcttctctggagaagtttcttcatgagaggatttatgttttcggtaaggccggtgcactcggcgattccattactgtcactagggacaagagcaagatcaccgttaccttcgacagcaactttttataaacggtatcttgaaatattttgaccaaaatagtactttgataaaaacacaaatgttgatgggaatttggcttt

SEQ ID NO: 5782 - DNA, 102 bp, Glycine max
  Clone ID: LIB3074-037-Q1-K1-H4
aggagttcaatttctaattataacaagaaaccgacgtggtgggtgcaatgttagaggctgtaaaaaacaacaaaatatgaacaaactttatgcggcctattt

SEQ ID NO: 5783 - DNA, 193 bp, Glycine max
  Clone ID: LIB3074-037-Q1-K1-H5
gacaagtgagtttgttgatcgagataactagaaacagtgggatgaaaatgaaggtccttgttttcttcgttgctacaattttggtagcattgcaatgccatgcgtacgatatgtttcttcttcgaatgaacactggctatggtgcccgtacttcggaggtgaaatgctcaaattggatgcttgttgtgggatc

SEQ ID NO: 5784 - DNA, 285 bp, Glycine max
  Clone ID: LIB3074-037-Q1-K1-H6
agtggatttttacatcatacaaagcattcaattggagtgcttaatttcattccttgtgttttcctttctttctcaaaaccaaacatgtctaacacatgctttaactgttactgtgcttacaagactatcttcactaatggaaacagctatcgtgttattgtatagactgatattagttacatttatacttttgtcattgattttccagcagctgatcattattgcaagttcaagtttgtcactaatttcactttctcggactgcacctttattcattaatgaata

SEQ ID NO: 5785 - DNA, 208 bp, Glycine max
  Clone ID: LIB3074-037-Q1-K1-H7
cccacgcatgccaacataatataaaattcctcttaatgcaatacacatttgcaacttgcgagtttcaattcaaccctcacaacattcaaacccaaaaaaaaaaaaacctcttcttcctttttttcacttctacccttctatgctttaatcttcttcatctcaacatacacacacaatttttccaatatctaccaacaattccttctaa

SEQ ID NO: 5786 - DNA, 414 bp, Glycine max
  Clone ID: LIB3074-037-Q1-K1-H8
tactttttcgagaagacaacagaaggggatctcggcgcatataaacatgtagttgagaactaacaataaggaaatggctttctcaatgatctcctccccagctgttaccaccgtcaaccgtgccggtgccggcatggttgctccattcaccggcctcaaattcatggctggcttccccacgaggaagaccaacaatgacattacctccattgctagcaacggtggaagagtacaatgcatgcacgtgtggccaccaattggcaagaataaatttgagactttttcctacttgccacacctttattatgtccacatttcaatagaatttataacctttttaagaaagatggttttttgtttgaattccattttaaaacttttcttttcctctttcacaaaattttcttttttttt

SEQ ID NO: 5787 - DNA, 328 bp, Glycine max
  Clone ID: LIB3074-038-Q1-K1-A2
gatatctggcagcagaagaacaagtacttgacagcgaagagggagaatcaaatggcttcctcaatgatcccttccccagctgttaccactgtcaaccgtgccggtgccggcatggttgctccattcactggcctcaagtccatggctggcttccccaccaggaagaccaacaatgacattacctccattgctagcaacggtggaagagtgcaatgcatgcaggtgtggccaccacttggcaagaagaagtttgagactctttcctacctgccagaccttgatgatgcacaattggcaaaggaagtagaataccttcttaggaagggat

SEQ ID NO: 5788 - DNA, 294 bp, Glycine max
  Clone ID: LIB3074-038-Q1-K1-A3
gacaccaccccccacacacacccactaatatgggtgacttggtgttcttactagtgctgcttcttgcagcccttatactcatgcctgaaggtctcgctacttactacaaaccaattaagaagcacccagagtacaacccttctatgctcaatccaccagcttacaaaccacctgcttataagccaaaaccacccgtttacaagccaaatccacctgtttacaagccaccgtctacgactacaccatacaagagaccaccttatggaaagatccctacaatggaggacaacaccc

SEQ ID NO: 5789 - DNA, 57 bp, Glycine max
  unsure at all n locations
  Clone ID: LIB3074-038-Q1-K1-A4
gagacctcaggtcaggcggggctacccgctgagtggaagcatatcaataagcggngg

SEQ ID NO: 5790 - DNA, 224 bp, Glycine max
  Clone ID: LIB3074-038-Q1-K1-A6
tttatccgtgttcacttcatccttcataagtcttcatcatcatcatcatcatcaccgtttattgaagaatattcccttcataaacatttccatcttaaggcctgaatatgctactcacccctacacgtttaattcgcgctttgcttatttcattttcaccttcatcttcttgttcactctttcatgatccggcatcttctacaacaagcttacctacaactttt

SEQ ID NO: 5791 - DNA, 363 bp, Glycine max
  Clone ID: LIB3074-038-Q1-K1-A7
tgggacacttgtattgtctcaagcaaccatgggaattgcaacccaagcctctctcttaaccccacccctctccggtctcaaagccagcgaccgcgcctccgtgccatggaagcaaaactccagcctctccttctccagcccgaagcccctcaagttctccagaacaatcagagcagcagccgccgactagaccacagaggcaccagcaaaagtagaggctgcaccggtcgggttcaccccaccagaacttgacccaaacaccccttccccgatcttcgggggcagcaccggcgggctccttcgcaaggcacacgtggaggagttttatgtcattacgtgggactcacccaaagaacacatctt

SEQ ID NO: 5792 - DNA, 319 bp, Glycine max
  unsure at all n locations
  Clone ID: LIB3074-038-Q1-K1-B1
ggagtgcagtgatagagataagaaaatgtggcttgggcagcgctcaaccccatttctgaacggacatggtcattccaccacccttctctccaagcacagttcggcggtgactcagacccactgggccccaccgagtttcctgcctcaaatcaatgcgatgaagacaatgcaggggagagtggtgtgctccaccagcgacaagacggtggcagtggacgtggtgcggctggcccctcacccaaagtacaagaggcgcgtgaggaagaagaagaagtaccaggcccacgaccccgataaccaattcaaagtcngcgacatc

SEQ ID NO: 5793 - DNA, 347 bp, Glycine max
  unsure at all n locations
  Clone ID: LIB3074-038-Q1-K1-B10
cattgactaacaacgccagtatcaaagctgtctcctctactcgctctactactcncttcaagagcnttttagcgtgtgcttttcaaaacctccgaactgaccgtgatactttcggtcatctccaacttccctcttaaagcttgttgggagcccaaacacagccatcattgcaaaacttctatatccttcgtccccgtgaacgtatgccttatcccttgattcgtgctttccgtgtctttaaaaaagaaaaccccttttttacccctttttttccttaaaacaatcaaaacccacatttcccaaaacccccccttttaaaattttttttcccccctcttttttttttt

SEQ ID NO: 5794 - DNA, 216 bp, Glycine max
  unsure at all n locations
  Clone ID: LIB3074-038-Q1-K1-B11
aagggggctttttccattcccttcacacgattctttcaagacaactttcaaactctcanaaagaatgcctgccaacacattgatgagtactgctatctcagccttcccatctctcctttcttcctcaaaatccagatttgccaccgcagttcctctttctagctttggtgtcaccaatgcctcttcttctcgcttttctatgagtgctgactggat

SEQ ID NO: 5795 - DNA, 283 bp, Glycine max
  Clone ID: LIB3074-038-Q1-K1-B2
gatccaaaggaacaaaaatattattaagatgatcagcattagtggagcacttgttctactctttgcatttctcttcctcagttgtgtgtatgcacaagacacaacaacccttgtgcctgcaatcataacttttggtgattctgctgtggatgtagggaacaatgactatcttcccgcccttttcaaggctgattaccctccttatgggagggactttgttaaccaccaacctactgggaggttttgcaatggcaaattagctactgatttcactgctgacaca

SEQ ID NO: 5796 - DNA, 375 bp, Glycine max
  Clone ID: LIB3074-037-Q1-K1-H2
ggtagccgctgcatctcaacgaaacagagcgagctagagggagagagagagagaaagagaagagagagaagcagcgattcatcacaatgggtaaggttcacggatctctcgcacgtacgggtaaagtgagaggacaaactcccaaagtggcgaagcaagacaagaagaaaaagccacgcggacgcgctcacaagagaatgcaatacaaccgccgattcgtcaccgccgtggtgggattcggaaagaagcgtggaccaaactcctcggagaagtgagggaggcgtgttgaacatcatggtttttcttactttgtgaaatgtatcacttgttttgatttgattgatgaactcaaacttttatgataggtcttattat

SEQ ID NO: 5797 - DNA, 353 bp, Glycine max
  Clone ID: LIB3074-038-Q1-K1-B5
gacggctcaatgattgtatattgacacaagaagaagcacttaaaaacttttctttgggtgaacaccttttaagggactctttaacattgaaagtttggctttgttgctcaatggctgttttagtacaattcatcaagaaaatgaattgaaaaatgatattcatacactggttgggtgcctactgcctaatgtatctcctggccaagaattagagactaatttcttgaggtattgggatccaaccaagggcctgatttctcaacatatgttttttcatacacaaactcgagaatcgaactcctaatcagatgcttaatagacatgattatttattaatcataccacacaccatg

SEQ ID NO: 5798 - DNA, 386 bp, Glycine max
  unsure at all n locations
  Clone ID: LIB3074-038-Q1-K1-B6
ggaaagagagtgaagagagaagaagatggggtctgtcggagcggtgccgttttggagggcagcggggatgacatacatcacatactcaaacatatgcgcgaatctggtcaggaattgcctcaaggaaccctacaaggctgaagccatctctcgtgagaaggtccattttgctctctccaaatgggtcgacgccaagcctgaaaaacctactattcgttcagacaccccagagcagtgatccggaatagttggaagctataaatgcataaatctttgagatctggaagttcattgtcattttgaacctttctgtgatgtttaattcctttgcttctttttttttcattccatgaaatggaacatacactggattttgattngcatga

SEQ ID NO: 5799 - DNA, 333 bp, Glycine max
  unsure at all n locations
  Clone ID: LIB3074-038-Q1-K1-B7
gatagcagcatcatacggagcatggaattcaaaaacttaagttcattccttgtgttttgctttcttcctcaaaaccaaacatgtcgaacacatgcggcaactgcgactgcgctgacaagactagctgcaccaagggaaacagctatggtgttattgtagagactgagaagagttacatcgagactgttgtcatggatgttccagcagctgagcatgatgggaagtgcaagtgtggcactaactgcacttgcacggactgcacctgtggccattaaggaatatgtatgaaaatgtaattgccatgtgtntggcaatacaaatatccaaataatg

SEQ ID NO: 5800 - DNA, 408 bp, Glycine max
  Clone ID: LIB3074-038-Q1-K1-B8
gaagccagtgatagtagctttcagatagctgatgggtgtgtgcaattatttgaattcaagaatgtctcaacccgactcgttggtggctgagattgaggtgaaaacctctgctgatcacttttacgacaccttgaagggtaagaaacagcatcgtattcatgatgttgcccctcatcatatccataaggtggaagttcatgaaggtgagtgggataaatctggcaatatcaaggtgcttacattcgctgatggggacactgttgagaccttaaaggagagagttgattttgatgatgaaaacaagaagataacctacaccatattggagggtgtcatgttgaagtactataagagctacaaggttatcgttcatgttttaccaaaaggtgatgagcacagccttgtgaa

SEQ ID NO: 5801 - DNA, 222 bp, Glycine max
  Clone ID: LIB3074-038-Q1-K1-B9
catttccaatggaagcacgtgcagaagcctttcagcggatttcaagaatctctgctcatcttcagccttcaaatttccaggaagggagtgatgttcttcttaagagaggtgagtgcagagcaaaaggtggggcacctggattcaaagttgcaattttgggggctgctggaggaattggtcaatccctttctttgctgatgaagatgaacccatttttggggg

SEQ ID NO: 5802 - DNA, 456 bp, Glycine max
  unsure at all n locations
  Clone ID: LIB3074-037-Q1-K1-F12
ggagaagacnacagaagggggaggtgcaagagtttgttgtgagctataagctagtttatcgcggcgagaatatgaagttgtttgttttctttgttgctgcagtagttttggtagcatggccatgccgtggcgcaggctaccaaaggttccctctccgaatgaaaactggctatggtgagcgttcttcggaggtaaaatgcgcaagttttaggcttgctgtggaagcacacaacatccgagcctttaaaaccattcctgaagagtgcgttgaaccaacaaaggactacattaatggcgaacaatttagatcagactctaaaacagttaaccaacaagctttcttttatgctagtgaacgcgaagtccatcacaacgacatatttatattcggcatatataacaccgtactctctaatatcccatactatgaaaaacatggatattgggtggaggaat

SEQ ID NO: 5803 - DNA, 416 bp, Glycine max
  Clone ID: LIB3074-037-Q1-K1-F2
ggatctggcagcagaagaacaagtagttgagaacggagaaggagaagcaaatggcttcctcaatgatctcttccccagctgttaccactgtcaaccgtgccggtgccggcatggttgctccattcactggcctcaagtccatggctggcttccccaccagaaagaccaacaatgacattacctccattgctagcaacggtggaagagtgcaatgcatgcacgtgtggccaccacttggcaagaagaagtttgagactctttcctacctgccagaccttgatgatgcacaattggcaaaggaagtagaataccttcttacgaagggatggattccttgcttggaattcgacttggagcacgggttcgtgtaccgtgagcacaacatgtcaccaggatactacgatggacgctactgg

SEQ ID NO: 5804 - DNA, 411 bp, Glycine max
  Clone ID: LIB3074-037-Q1-K1-F5
taatagaaatagaactgtcttttcatatagggatgggttcaacacaacataggtcatcgaaaggatctcgaagacccaccaacgcacgaaagccgggatctttcagaaaatggattcctattcgaagggtgcataaccgcatggataagctcacactaacccgtcaatttgggatccaattcggttccttaggaggtatcgggaaggaattttggaatgtaataatatcgattcatacagatacagaagaaagggttctctattgattcaaacgctctacctacgagatagggatagagaaagaggaaaaaaccgaggatttcacatagtacttttggtcgaaaaatcgatctgatttttttcgtacttttcgctcaatgatgaaatggggcagattctacaggaccaaac

SEQ ID NO: 5805 - DNA, 284 bp, Glycine max
  Clone ID: LIB3074-037-Q1-K1-F6
ttatggggattgtgattcattagcggattggcaaaatgcaatttgtctctttttctcatttgcactgcaaattgcaatggcttccaacaaggttattgccaccatcatggtgctttctctccttgcctactcaacatgattcaccaatgcatgtggtacatgtcacccaaaacctaccccttgtactcctccttcatcaggaaagtgccctaaggacacattgaagctaggggtgtgcgcagatattctaggtcttgttacttatccctgtcgttcccctgtct

SEQ ID NO: 5806 - DNA, 413 bp, Glycine max
  Clone ID: LIB3074-037-Q1-K1-F8
ggcacatgtgagtttgttgatcgagataactggaagcggtgtgatgaaaatgaaggtccttgttttcttcgttgctacaattttggtagcatggcaatgtcatgcgtacgatatgttccctctccgaatgaacactggctatggtgcccgtactccggaggtgaaatgcgcaagttggaggcttgctgtggaagcacacaacatctttggctttgagaccattcctgaagagtgcgttgaagcaacaaaggaatacatccatggcgaacgatatagatcagactccaaaacagttaaccaacaagcttacttttatgccagagacctcgaagtccatcccaaagacacatttgtgttcagtatagatggcaccggactctctaatatttcatactacaaaaaaacaatgatat

SEQ ID NO: 5807 - DNA, 415 bp, Glycine max
  Clone ID: LIB3074-037-Q1-K1-F9
gagattttataatggctagccaatcaaacactaaagcagtggacgatttcacagttaaagatgccaggggaaatgatgttaatctcgccgattacaaaggaaaggtccttctccttgtcaatgttgcctcacaatgcggcttgactaattcaaactacacagagcttaatcaattgtatgagaaatacaaagggaaaggacttgaaattctggcattcccgtgcaatcagtttggggctcaggagccaggaactaatgaagagattgtggagtttgcttgtactcgcttcaaagctgagtttcccattttcgacaaggtggatgtgaatggtgacaatgctgctccactgtacaagtttctgaaatcaagcaaaagtggactctttggggatagtatcaaaaggaactttttcaa

SEQ ID NO: 5808 - DNA, 224 bp, Glycine max
  Clone ID: LIB3074-037-Q1-K1-G10
cattttctcaaacgcctttattaattaataaacaaatggctgctgccgccgcatttactgtgcttctctcacctattattcctaccgtcaccaactttacccccttctcttctttgtcttctctttctcctctcggcaccaacactaaaaccacctttttcttatcttcccttaaccacttctcagagaccctaaaatcatttcttctttagaccataacttct

SEQ ID NO: 5809 - DNA, 401 bp, Glycine max
  Clone ID: LIB3074-037-Q1-K1-G11
tacttaatttgacactcattccatttttacctcgggctgtgtgtcgcaaactcaaataataaaaaacaaggttttagccatggcatcgaatcgcatcttgaaggaactcaaggatctccaaaaggatcctcctaccttatgtagcgctggtcctgttgctgaagacatgtatcactggcaagcaacaattatgggtcctccagacagtccttatgctggaggtgttttcctagtcactattcatttccctccagattattcctttaagccacccaacgttgcattcaggactaatcgtttttacccatatataaatatcaatgtaagcatttgccttgacatatttaaagatcacttgatccctgctctaaatatttcaaaagtgttgctcttattttttc

SEQ ID NO: 5810 - DNA, 320 bp, Glycine max
  Clone ID: LIB3074-037-Q1-K1-G12
acgcgtccgaacacgcctgcacgcacccgttcgtacaggtccacggaggcgccagaaggggacgactgaacaagataagactgtccatagctctacaaagaaaagaatagcaccctcgtccacctcactctactttgcgcccttacctctaacctaccttaatccaccggtcgtgatgtgacaaacactgatctggataaactttaaaatggccgcacatactttgcgtggacaacatataatattaaaccagctgtggaatataatatagcaacatttgaaaaataaactttgcctcacactgttgagcaataatggcg

SEQ ID NO: 5811 - DNA, 381 bp, Glycine max
  Clone ID: LIB3074-037-Q1-K1-G2
ggagggttattggacacattcttcagcgactgcgtttttgggtcggaacctcttctgcggcgtagcaatgggacactccaacgtttggaactctcacccaaaaaactacggtcctggttctcgcacttgccgtgtgtgtgggaatccacatggactgatcaggaagtatggccttatgtgctgcaggcagtgcttccgtagcaatgccaaggaaattggcttcatcaagtatcgctaaaagagcagttgtcaactacggaccaatattgtgttctggcactaggatgttttgaggatgttatgtttgaagaaacttgagactttcttttttcatctaattaattatcagacgtaatttgtgggactaagaatacttttata

SEQ ID NO: 5812 - DNA, 286 bp, Glycine max
  Clone ID: LIB3074-037-Q1-K1-G5
gagagacaacgtgaatggagcggtggatcctacttcatcacaatccattgaaatttctggcctcggataccaaactggggatgatacacaatacaaggacatcaatgaatggtgctcttgttgctatgactgtacacacggtctattctatttcttgaactgcaacttttcgttgaagcctctacacttaatttgagagatactacttattaccataaatatttaaacacctttctacatatgttttttcataagttttataccgatcccctttattaccataaaa

SEQ ID NO: 5813 - DNA, 227 bp, Glycine max
  Clone ID: LIB3074-037-Q1-K1-H1
ccgcttggaaaaaaacaccaaaagggatctgtcattttattaacacgtaacagagaactgtggaggggaagctaaaggcttcctcaatgatctctaccccagctgttaccactttcaaccgtgccactgatggcatggttgctccattcacttgcctcaactacattgctggcttccccaccagaaagaccaactatgactattcctccattgctatcaacaatgga

SEQ ID NO: 5814 - DNA, 406 bp, Glycine max
  Clone ID: LIB3074-037-Q1-K1-H10
gatctggcagcaaaagaacaacggcgggagaactaagaaggagaagcaaatggcttcctcaatgatctcttccccagctgttaccactgtcaaccgtgccggtgccggcatggttgcttcattcactggcctcaagtccatggctggcttccccaccagaaagaccaacaatgacattatcttcattgctagcaacggtggaagagtgcaatgcatgcacgtgtggccaccagttggcaagaagaagtttgagactctttcctacctgccagaccttgatgatgcacaattggcaaaggaagtaaaataccttcttacgaagggatggattccttgcttggaattccagttggagcacgatttcgtgtaccgtgagcacaacaggtcaccaggatactactatgga

SEQ ID NO: 5815 - DNA, 428 bp, Glycine max
  unsure at all n locations
  Clone ID: LIB3074-037-Q1-K1-F11
gatnatanttgagttcaaacaaatcaaagccatgggcacgttcaactggtctattgttctctccgtctccctagccttctttttggtgctacttaccaaggcacactcgaccgataccgcttctttcaccttcaacaagttcaacccagtccaaccaaacattatgctccaaaaagatgctagtatttcatcctctggggtgttacaactcaccaaagttggcagcaacggcgtgcccacctcgggatctctcggtcgtgccctttacgctgccccaatccagatttgggacagcgaaaccggcaaggtagccagctgggctacatcctttaaattcaacattttcgcacccaacaaatcaaactcagctgacgggcttgccttcttcttggcacccgtcgggtctcagccccaatccgacgatggat

SEQ ID NO: 5816 - DNA, 381 bp, Glycine max
  Clone ID: LIB3074-037-Q1-K1-H11
gagaattattggaatttggaagagaggggggagctgcacaacaacctaagaatgggaggaagttcgagcttcagggatgagtataccttggaacaaaggctcggagaatcgcgggatattgtggccaaatatcccgatcgagtccccgtgattgtggaaagatatgcgaaatgcgatctgcctgagttggagaagaaaaaataccttgttcctcgagacttgtctgttgggcatttcattcatattttgagttccagacttattctgccccctgggaaagctctctttgtatttgtgaagaataccttgcctcaaactgctaatatgatggactctgtgtatagatcattcaaggatgaggatggatttctttacatgtat

SEQ ID NO: 5817 - DNA, 368 bp, Glycine max
  Clone ID: LIB3074-037-Q1-K1-H12
ggttttggacttcaattgatcccaaagaaaaaccgcacggttagtgaatgtggtggctcgccctcccgataccatgagaactacagcaccttccgatttcattttcacccaaaagcttcaccctttcaacatcccctccaccaaaacctccctccaacgaaccctaccctattttctccaactcaatcgcatggccgaggctgcacgaaccgcgcataaacccgcgccgcacccgatccaacccaaacccgacgataaaacctccaatcctgcgaaggagattccgccgccgcctgaaaagccggaacccggcgattgcttcggcagcgggtgcgtccgatgcgtctgggatgtgtactacgacgaac

SEQ ID NO: 5818 - DNA, 381 bp, Glycine max
  Clone ID: LIB3074-037-Q1-K1-C5
gaaagaagcaaggcgaggcaagggttttcggtttgtcagaaaagtcgaacggcgagcgtactctcaagagacgcaacagaatagaacgacgaataggcgtgcagggaaaccatttcattttcgagcgcgtcgctttcgaatccaatggccttcaacaacgcactgagatctgccgcgaagctcgtcgcttcctccgaatcttacttctctaactcagtgagcagaggttttcattcaactggcatgaagaggatgggaggtggacatggtcatgatgagccctactatcttcatgcaaagcacatgtacaacttggacaagatgaagcaccaggggttgaaaatgtcccttgctgtgttcactgctttcaagattggtgtt

SEQ ID NO: 5819 - DNA, 303 bp, Glycine max
  Clone ID: LIB3074-037-Q1-K1-C6
tttttcacctactcgcagaaaaagaaaaaagcggtgcggtgttacacttcaacctgatccagtttaggcattaggctctctaccctatatttcacgtatcgaaaccttaaatttactatcatgtttgagcactctgctttgtaaaacctttggtcttacaaagtcaatgttttatttctgaattatacgatcaaactgctactgccttttatccttttgctgatgcaaatgcttatatactccttgcatggtcaaaagagtatgtgcacattctcatacagaagccaaatgttttgaaaagcc

SEQ ID NO: 5820 - DNA, 242 bp, Glycine max
  Clone ID: LIB3074-037-Q1-K1-C7
agaagacaacacaacggaacttgttttttcaataaaaaaacactcttcattcgtcgggtttatactatcggctttctctcaattcttaaaatatccactagcaaaaactgtttgtacatacacaccactaattctacatgaaaatggaattatctgttactgatgccatgatcatcaccttatcaaaaacttacatctttctcctagactcttattggccaaccttcctatctaaacttgct

SEQ ID NO: 5821 - DNA, 323 bp, Glycine max
  Clone ID: LIB3074-037-Q1-K1-D1
gggctttcatttaaacaagtagttgagaactaacgttgagggtatggcttcctcaatgatctcctccccagctgttaccaccgtcaaccgtgccggtgccggcatggttgctccattcaccggcctcaaattcatggctggcttccccacgaggaagaccaacaatgacattaccttcattgctagcaacggtggaagagtacaatgcatgcatgtgtggccaccaattggcaagaagaagttcgagactctttcctacttgccagacctcgatgatgcccaattggctaaggaagtcgaataccttctaaagaaaggatgga

SEQ ID NO: 5822 - DNA, 318 bp, Glycine max
  Clone ID: LIB3074-037-Q1-K1-D10
catttattgtgtggcagcaaaagaacaattactcgcgaagctttattgaaaagcaaatggcttcctcaatcatctctttcccagctgttaccactgtcaaccgtgcctgtgccggcatggttgctccattcactggccttatgtccatggctggcttccccaccacgaagacccacaatgacatttccttcattgctagcaactgtggaagagtgcaatgcatgcatgtgttgccaccactttgcaagaagatatttgagactcttttctaccttccagaccttgatgatgcacaattttcaaatgaattagaatacc

SEQ ID NO: 5823 - DNA, 359 bp, Glycine max
  Clone ID: LIB3074-037-Q1-K1-D2
ggaggctgagttctgtaattgtgttttggctgtgggcaatggctctgtcttctgggcttttcttgtgttcttcttcccgtgttctcccaccaccagaaacccacactttcatgaggaccaggccttcttctgctgccttgcgcaccatttccgctagctgttgcaccgtctctcactcgtctaagccagcccgcaaaatccgtggtatcatgaaaccccgcaaagtctcccccgagatggaagacctcgtcggcgctcccgagatggctcgaacccaagtcctcaaacggatttgggcttacattaaggacaacaatcttcaggaccctacagacaagacgactataaattgcgatgag

SEQ ID NO: 5824 - DNA, 285 bp, Glycine max
  Clone ID: LIB3074-037-Q1-K1-D4
gggctcggatgttataaaccaacagatgggaactgatgaggggaaacaactggctggctcagttgtctcttgaccacataatgccactgttaaccgaacacgacccaacgttgctgctgcattaactcgactgaagggcattggtgacttgtgcaccatgcagaccaactatgaactgtactgatattagtaccatcacaatgatgaaagcattgaatcttaccacaggcacctaaccagaataagatatatgggactcttttttacctgccacaattatatgat

SEQ ID NO: 5825 - DNA, 240 bp, Glycine max
  Clone ID: LIB3074-037-Q1-K1-D8
aaattctatattatctttaaaaaatcttataccactgtctaccgagccacataccacaatatctattcattcacttacctctaatccattaattgctatccatccatgaataccaacaatgacattacctatattgatatctactcaataataggcctaatcattgcaattgttacctccaaaagattatatgaaatttctaactttttaatatctaggagaccttaatgatatacacta

SEQ ID NO: 5826 - DNA, 422 bp, Glycine max
  Clone ID: LIB3074-037-Q1-K1-E12
aggagcctacagtcatcacataatggacaactccacaaggcttgatcaagttgttatatgttccaaggtgtgctctaagttgagtgcatacgcacgttgtttattgcatgcctatccatatctgagctcgctcgagttcggtcacttttggttgttcaagaattttggagcgataggtcccctgtaaaatatgctacttatatatttatgtgcaaagtatgaagcaccgacgtgcaacaaaataataataaaaaagaatagtttgctgctctaaagagctaggcctttcaaagttttgtccaattttttctaagtttagaaactggagttacttctcatcaagcagaataccaatttcacgtatgttccaaaacttctttctctgttatgattagtaagcctctttgattcctgatgtctct

SEQ ID NO: 5827 - DNA, 405 bp, Glycine max
  Clone ID: LIB3074-037-Q1-K1-E2
ggcacaagtgagtttgttgatcgagatggctagaaacagtgcgatgaaaatgaaggtccttgttttcttcgttgctacaattttggtagcatggcaatgccatgcgtacgatatgttccctctccgaatgaacactggctatggtgcccgtactccggaggtgaaatgcgcaagttggaggcttgctgtggaagcacacaacatctttggctttgagaccattcctgaagagtgcgttgaagcaacaaaggaatacatccatggcgaacaatatagatcagactccaaaacagttaaccaacaagcttacttttatgccagagacctcgaagtgcatcccaaggacacatttgtgttcagtataaatggcaccgtactctttaatattccatactacaaaaaaca

SEQ ID NO: 5828 - DNA, 179 bp, Glycine max
  Clone ID: LIB3074-037-Q1-K1-E4
aagggagagccacgcgtacgctgcagaagatacatataggaagaaaatttcttctcctataaatgaagtacctgtgggcatgtctattcacaagatttctaaaaacatgcccctacatttctaatggtgtactgaataacccttttacacttcctgtttctatataacaacttgatcta

SEQ ID NO: 5829 - DNA, 271 bp, Glycine max
  Clone ID: LIB3074-037-Q1-K1-E5
aaatgtttcttttacacaaaacttacacaaccttcgcgtagtgtatttattaaacccccacaagcctgcaaacaaaccaaaaaaaaaataaaaaaaaataaaaactacccgctctctctaaaccatccaaacttacttacgcattcatccaacttcctctctcttttatatatatcacctacattcaattcactgccctcccttaatacaacttaattactaaaaaaactctatctttacccaacctaatttctcttcaattatatctttc

SEQ ID NO: 5830 - DNA, 377 bp, Glycine max
  Clone ID: LIB3074-037-Q1-K1-C4
gacagttttaacaattaataaagatgagtttgaagaacgaacatggtggtgctaaaggtgtgtttgttgcttcttttccttgtgggggttacagctgcacgcatggaactgagcttcttcaaaagtgatcagtcatcaagttatgatgatgatgagtattcaaaaccatgctgtgatctctgcatgtgcacacgctcaatgcctcctcaatgcagctgtgaagatattaggctgaattcatgccactcagattgtaagagctgtatgtgcacacgctcacagccaggacagtgtcgttgtcttgacaccaacgacttctgctacaaaccttgcaagtgcagagatgactagaaaaactaatagctctctcaaatgga

SEQ ID NO: 5831 - DNA, 189 bp, Glycine max
  Clone ID: LIB3074-037-Q1-K1-E9
cgggggcgtgaatttaatttgagaaaatatatctgttacaagttgtatcaaggagaagcatagacatgaagaagcgaggatcaggcaggcgtttcctgatgtgggttatggtgatttggctccacgcacatctcagcattgcagccgaactgtccaagttcaatgacacggacactgcttttgagagtt

SEQ ID NO: 5832 - DNA, 407 bp, Glycine max
  Clone ID: LIB3074-037-Q1-K1-F1
ggcataagtgagtttgttgatcgagataactagaggcagggtgatgaaaatgaaggtccttgttttcttcgttgctacaattttggtagcatggcaatgccatgcgtacgatatgttccctctccgaatgaacactggctatggtgcccgtactccggaggtgaaatgcgcaagttggaggcttgctgtggaagcacacaacatctttggctttgagaccattcctgaagagtgcgttgaagcaacaaaggaatacatccatggcgaacaatatagatcagactccaaaacagttaaccaacaagcttacttttatgccagagacctcgtagtccatcccaaggacacatttgtgttcagtatagatggcaccgtactctctaatattccatacttacaaaaaacat

SEQ ID NO: 5833 - DNA, 430 bp, Glycine max
  Clone ID: LIB3074-037-Q1-K1-A9
ggcagagtgaaacgatgccgtgcctcaacctctccggcaacgttaacctagacggcgtcgacacctcttccattctctccgaagccacctcaactgtcgccagcatcatcggcaaacccgaggcctatgtgatgattgtattgaaaggatcagtgcctatatctcatggtgggagtgagcagccagcagcttacggtgaattggtgtccattggtggtcttagccctgacgtgaacgagaaactcagtgctggcattgcttcaattctcgaaaacaagttgtctgtgccgaagtcccgattctacttgaagttttatgacactaagggttccaattttggatggaatggatctacattctgaattccgagttatcttggtaacgatgccatggatgtcggatgaactcgtgattctgttttagaactttt

SEQ ID NO: 5834 - DNA, 376 bp, Glycine max
  Clone ID: LIB3074-037-Q1-K1-B1
gatccaaattcaagttcgcaccaaattttcctccgagagtgtgaggccgcggaaaaggtgggatgggtttggtaaagggaggagctaacatgcacggaaaggttcttcgagacaacattcaaggaatcacgaaacctgcgattcgtacgttagcgagaagaggtggcgtggagaggatcaatggtttgatttacgaggaaaccaaaagagttctgaagatattctttgagaatgttattaacgatggtataacctacactgagcacgctaagaagaaaactgttactgctatggatgtcgcttatgctctcaagagacagggaaagaccctctattgctatgaggctaaaaaaataatctttaagataatgactgt

SEQ ID NO: 5835 - DNA, 233 bp, Glycine max
  Clone ID: LIB3074-037-Q1-K1-B10
tggttaaacagccaccgaggaagagtgaaatggcagtttgtgacggaaccattagggtttttttatgctcattttttggttaaactttgtttgaaatcaacgttcagcagtataattaatttgtttacagagaatgcagtacttttatagcaattttcctggtttctactgaaaacccttcaattactttttatcatcaatggaatgttaatgtgttttgtgttttttcgtcc

SEQ ID NO: 5836 - DNA, 423 bp, Glycine max
  Clone ID: LIB3074-037-Q1-K1-B11
ggcacaagtgagtttgttgatcgagataactaggagcagggggatgaaaatgaagggccttgttttcttccttgctacaattttcgtagcatggcaatgccatgcgtacgatatgttccctctccgaatgaacactggctatggtgcccgtactccggaggtgaaatgcgcaacttggaggcttgctgtggaagcacacaacatctttggctttgagaccattcctgaagagtgcgttgaagcaacaaaggaatacattcatggcgaacaatatacatcagactccaaaacagttaaccaacaagcttacttttatgccagagacctcgaagtccatcccaaggacacatttgtgttcagtataaatggcaccgtactctctaatattccatactacaaaaaacatggatattgggtggagaa

SEQ ID NO: 5837 - DNA, 254 bp, Glycine max
  Clone ID: LIB3074-037-Q1-K1-B12
caccgaggaagagataaattgccgcttcgttctaaaccattacgccttttttatactcattttttcaataaactttgcttgaaatcaacgttcagcagtataattaatttctttacagagaatgcattacttttatatcacttttcctggtttttactcaaaacccttcaattactttttatcatcaatcaaatgttaatgtcttatgtgttttttagtcctctttaaaaatataaataaatacatatttatat

SEQ ID NO: 5838 - DNA, 442 bp, Glycine max
  unsure at all n locations
  Clone ID: LIB3074-037-Q1-K1-B2
acgacagaaggggaaggcaccagtaattaataacaagctagctattagttcgattttgtagggggtgaggtgccaatatggtgaagatagctcttggtactttggatgactcttttagcgctgcctctcttaaggcttatttcgcagagttccacgcaactctgattttcgtgttcgctggtgttggatcagccatcgcttacaacgagcttacaaaagatgcagccttggatccaacggggctggtggcagtagctgtggcacatgcatttgcactgtttgtaggtgtctccgtcgccgccaacatctcangtggccatttgaacccagctgtcacttttggattggccattggaggcaacatcactctcatcactggtttcttatactggattgcccaattgttgggttctatagtcgcatgcctcctcctcaatttgat

SEQ ID NO: 5839 - DNA, 375 bp, Glycine max
  Clone ID: LIB3074-037-Q1-K1-B3
gggatttacaaagtttttaatggggggggggtgtcaaaaaaatcgaagaattacatacgaatatgcaaaaaaaactgaattgcgtgaattgaaaactaaacattgctattgtaaaacttgcatatgcttataaacaccctaatattattgcagaatttatagctggacaattaaagaatagaatttcgcttcgtaaaccaatgaaaaaagctattgaattaactgaacaggctggtacaaaaggagttcaagtacaaattgcaggacgtattgacggaaaaaaaattacacgtgttgaattgatcaaagaacgtagagttgctctacaaaccatacgagcgaaaattgattattgatgctatacagtgcgaacta

SEQ ID NO: 5840 - DNA, 423 bp, Glycine max
  Clone ID: LIB3074-037-Q1-K1-B4
ggttctagtgtgtgattgtttgttgttgtaactcgttcttcttcttttgttgttctgtgtttgtgtttgttttttctctcacctgaaaatgtcttgctgcggtggtaactgtggttgcggaagctcctgcaagtgcggcaacggctgcggaggctgcaagatgtacccagacttgagctacactgagtcaaccaccaccgagaccttggtcatgggagtggcacctgttaaggctcaatttgagggtgctgaaatgggtgtgcccgctgagaacgatggctgcaaatgtggaccaaactgctcctgcaacccctgcacttgcaagtgaagtgttgggagggcaagcttcaagcagagatagcccttaattaggaataatgataaactattaatgtgtagctaacaacttatgtattatgtctg

SEQ ID NO: 5841 - DNA, 374 bp, Glycine max
  unsure at all n locations
  Clone ID: LIB3074-037-Q1-K1-B5
gaccaagtgaaccaatatagcccaagccctatacgggcaaaccctaacacacacccatttgattcagtttccatggctagcctcaaggttgcatttttggctgcagtgctctgcatggttgtggtgagtgcacccatggcacatgcagctatcacgtgcgggcaggtgacgagtagcctggccaattgcatcggttacctccagaagggaggaacgccgtcgtcgggatgctgcaacggagtgaagagcctcaatgccgccgccaagaccaccgccgaccgccagacggcgtgcaactgcctcaagtcggccgccagccaaatctccggctttaacgccaacaacgccgnctcgtccccggcaaatgcggagtc

SEQ ID NO: 5842 - DNA, 353 bp, Glycine max
  Clone ID: LIB3074-037-Q1-K1-B7
tacttctgcgagaagacaaacagaaggtgcggcgtgcgaaaaaacaacaaaagggaacccccattttttttttaaaagaattttaattttgtattaaaaaaatttatcttattgttagaaatccatgtcttactccattttaaggaacaaaacaagaaaacaattgcctgacaaaaggtttagccataaaatcgaattcatcattgatttgagatattgataaggtgaatactcatttctcgtcaatgctaggcataatgcgggtatatagacctaaaaaaaaatatcttttctttctatcttatgaactttaacgtgtattaaaggacatttcctatcttagattttaattt

SEQ ID NO: 5843 - DNA, 417 bp, Glycine max
  Clone ID: LIB3074-037-Q1-K1-C1
ggctgcaagaatatgacgagagctataaactatgtgatcgtgaggagaatatgaaaagctatgttttctttgttgctacaagaattttggtagcatggccatgccatggctcatgctaccaaaaggtccctctccgtatgaaaactggctatggtgagcgttcttcatgaagtaaaatgcgcaagttttatgcttgctgcggaagcacacaacattcgagcctttataaccattcctgaagaatgcgttgaaccaacaaaagactacattaatggcgaacaatttaaatcatactctttaacagctaaccaacaagatttcttttatgctaatgaacgcgacatccatcacaacatcctatttatattcggaataaataacaccgcactttctaatattctatactatgaaaaacat

SEQ ID NO: 5844 - DNA, 410 bp, Glycine max
  Clone ID: LIB3074-037-Q1-K1-C12
ggaagtatgggatcgagcctcagaggagggaatcccgccggggtccactatgccgaagcaaattcactagattaaggacttcctcctcactgctgggaggaaggatgcacgctctgtgaaaatcaagcggagcaaggatgtggtgaagttcaaggtccgttgctccaagtacctttacaccctctgtgtgtttgattctgagaaggctgataagttgaagcaatcacttcctccacgtttaagcgtgcaggatgtgtgattcttactgctgtatgaacatcacgtttttctctggattttggggattcatagttaagaaaatcgttcagagaattttcgtatttgctgttacattcggcatcatgttagtattttgtttaaaacgcatccaacttgcttggggattatgt

SEQ ID NO: 5845 - DNA, 330 bp, Glycine max
  Clone ID: LIB3074-037-Q1-K1-C3
aacatgtgcgggaacacaacagaaggggataacgggggagggtaaacagagagatatctatctattaattaattcacaatggaccactagctaaccgaccaacacatctataagttcaacgtagcctttcgtctcttccacaaggaccttcacggtcatattaacaccaaaggactttatactgttatgtagccacttgggcagaacccaactgatgcatgatctggacgacatgatacaagaagatgatgctgattgtaatgtgtactattgattttccatgatgcactcaatctcatggaacgcaagatcaaagacactgattcatag

SEQ ID NO: 5846 - DNA, 404 bp, Glycine max
  Clone ID: LIB3074-037-Q1-K1-A8
gacaccaacacgcaaggcaaacccactaagatggcttcctttgtatccttcctagtgctgcttcttgcagcccttatcctcatgcctcaagggcttgctacttactacaaaccaattaagaagccaccagtgtacaagcctccagtgtacaagccaccagtgtacaaaccaccggtttataagccaaaaccaccggtttacaagccgaaaccaccggtttacaagccaccatataagaagccaccatacaagaaaccaccttatggaaagtaccctccagtagaggacaacacccatgcctaaagcaagcaatgaggtctattatctacttaataaataagaggaactgctttgcgttttctagcattgtgatttacaacttcgtagcaatgcatattcttgac

SEQ ID NO: 5847 - DNA, 440 bp, Glycine max
  Clone ID: LIB3074-036-Q1-K1-H11
gaccacataaggggattccataaacaaaacacaagccaagtgaaagggtgcgaatataaaaatcaaagagcataatgtctgggatcattcacaagattggggagacccttcatgtgggagggcacaagaaggtggtggaacataaaggtgagcaccatgctggagaatacaaaggggagcaccatggtgaacacagtagtgagtacaaaggaaagcatcatggtgaacacaaagctggagagtaccatggtgagcacaagccagagcacaaagaggggttcctagacaaagtcaaggacaagatccatggtgagggcggccccgccaagggcgagaagaagaagaaggagaagaagtagaaagagcatggccatgagcatggccatgacaacaacaacatgtgacagtgattaaactgctgcatcacctatatatttaaa

SEQ ID NO: 5848 - DNA, 280 bp, Glycine max
  Clone ID: LIB3074-036-Q1-K1-H12
taccaaagcaatcttcgggcgtcattccttccctattactctttctctgctaaatcatttatatcttctctctttctctaattaattccctttcttatcaaaatggctgagactatccctgcttgcactcttggactttacttgagttctcacacccccttaacacctatctcttaaaccactatcttgaaggccctctctatctctgatgctactaaaccatgttacatttctcacaaaacaagattatcatcttcatcttcacgaataacaatgatcc

SEQ ID NO: 5849 - DNA, 422 bp, Glycine max
  Clone ID: LIB3074-036-Q1-K1-H2
ggttctagtgtgtgattgtttgttgttgtaactcggtcttcttcttttgttgttctgtgtttgtgtttgttttttctctcacctgaaaatgtcttgctgcggtggtaaccgtggttgcggaagctcctgcaagtgcggcaacggctgcggaggctgcaagatgtacccagacttgagctacactgagtcaaccaccaccgagaccttggtcatgggagtggcacctgttaaggctcaatttgagggtgctgaaatgggtgtgcccgctgagaacgatggctgcaaatgtggaccaaactgctcctgcaacccctgcacttgcaagtgaggtgttgggagagcaagcttcaagcagagatagcccttaattaggaataatgataaactattaatgtgtagctaaaaacttatgtattatgtct

SEQ ID NO: 5850 - DNA, 402 bp, Glycine max
  Clone ID: LIB3074-036-Q1-K1-H3
atggcaggaaagtacaagaacataccgatattgcggcatctacgtacaactaccaccaagaggatggaagcaattgaaagagagatacgagattcaattgagggtatcataaaaaaacgagagaaagccatggagaatggtgaaacctctaatgaagatttattaagcatacttttggaatcaaatcacaaggaaatccagggacatggaaacagtagggctgttggaatgaccaagcaagaagtaattgaggaatgcaagctattttacctggcagggcaagagaccacttcatctctgctggtttggacaatggtcttattggctaggtatccagaatggcaagcacgagcaagggacgaagtttttcaagtttttggaaaccaaaatccaaacactgat

SEQ ID NO: 5851 - DNA, 416 bp, Glycine max
  Clone ID: LIB3074-036-Q1-K1-H5
gaccaacacaaacaatagtgcatagcgtttttcatggtgcgttattcaatggccaccacagcagctctatccggaaccatggtgagcacctccttcatgaggaagcaacctatgacgaccaagagcctaaagacattccccaacgctctttttggtctgaaaggtggacgaggtggtcgtgtaacttgcatggcctcgtacaaggtgaagctcataaccccagaaggagaagtggagtttgaatgcccacatgatgttttcattgttgacaaggctgaggaagaaggcattgaacttccctactcgtgcagggctggttcttgcgtttcatgtgttgggaaaattgtgaaaggtgacgtggaccagtcagatggtagcttccttgatgatgaacaaatagaaagtggatgggttct

SEQ ID NO: 5852 - DNA, 417 bp, Glycine max
  Clone ID: LIB3074-036-Q1-K1-H7
gaccaacacaaacaatagtgcatagcgtttgtcggtgtgcattattcaatggccaccacagcagctctatccggaaccatggtgagcacctccttcatgaggaagcaacctatgacgaccaagagcctaaagacattccccaacgctctttttggtctgaaaggtggacgaggtggtcgtgtaacttgcatggcctcgtacaaggtgaagctcataaccccagaaggagaagtggagtttgaatgcccagatgatgttttcattggtgacaaggctgaggaagaaggcattgaacttccctactcgtgcagggctggttcttgcggttcatgtgttgggaaaattgtgaaaggtgacgtggaccagtcagatggtagcttccttgatgatgaacaaatagaaagtggatgggttctc

SEQ ID NO: 5853 - DNA, 424 bp, Glycine max
  Clone ID: LIB3074-036-Q1-K1-H8
gactcaagcacaacatctctatcgagtaaattaactgtgaagcctaccctactattatccctttccttcctgcctctctttgctttcctggctctttcagaagatgttgaacaagttgtggacataagtggcaaccccattttcccaggtggcacatattacattatgccatcaacttggggcgctgccggtggtggattgaaactaggccggacaggaaactcaaactgcccagttactgttttgcaagattactcagaaatcttccgcggcacaccagtcaaattcagcatacctgggataagccctggaatcatctttacaggtactccacttgaaatcgagttcgcagagaaaccctattgtgctgaatcctccaaatgggtggcgtttgtggacaatgaaatccaaaaggcatgtgtgg

SEQ ID NO: 5854 - DNA, 353 bp, Glycine max
  Clone ID: LIB3074-036-Q1-K1-H9
gaacaacacgtagtattatttcattgatttctgcggggtcgctctctctcagtgaccagacacagatgatgatggagatggcgaagcgaaacgctgtcgttgcggcactcccagcggtggtgctactcgcggcgagcgtggcggtggatgctcacgagaactcggacgtgaagacgctggtgaagtacaagcacgggaagaagtactgcgacaaaggatgggaatgtaagggctggtcaatttactgctgtaacctcaccattaccgattatttccagacctaccatgtcgagaatctgttctccaagctgaaactcgtcggtggcacactgcgtcggattttgagactacca

SEQ ID NO: 5855 - DNA, 87 bp, Glycine max
  Clone ID: LIB3074-037-Q1-K1-A1
aagcgtggacaattcactcttgtagttggaggtgggttggtcattgcatttgttgttcctatggcacagtactatgcctatgtgtcc

SEQ ID NO: 5856 - DNA, 396 bp, Glycine max
  Clone ID: LIB3074-037-Q1-K1-A10
ggtgtgagtgaagaagcagagggagtagcggcattaaaggggcggatcttcgtgaaaactctgacagggaagactataaccctcgaggtcgagagcagcgacaccatcgacaatgtcaaggccaagattcaagacaaggaaggcattcctccggatcagcagcgtttgattttcgccggaaagcagcttgaagatggaaggaccctggccgattacaacatccagaaggaatcaacccttcatctcgtcctcaggcttcgtggtggcatcattgagccttccctcatggctttggctcgcaaatacaatcaagacaagatgatttgccgcaagtgctacgcccgtctgcatcctatggctgtgaactgccgcaagaaaaagtgcggtcatagtaac

SEQ ID NO: 5857 - DNA, 281 bp, Glycine max
  unsure at all n locations
  Clone ID: LIB3074-037-Q1-K1-A11
aacagctataaaaaaacaaaataanttgatttttattaaacataaaaaatatcatcattcacgacgcgttttttcattaaaactctcacacccaacactataaccctcgaagtagataccaacaacacaatactcaatgtcaatgccaacattcaatacaaagaagacattcctcctcatcaccatcacatgatttttaccaaaaaacagattaactatataattaccctggccgattacaacattcacattcaatcaaccattcatatactcctataact

SEQ ID NO: 5858 - DNA, 349 bp, Glycine max
  Clone ID: LIB3074-037-Q1-K1-A12
cttctaaaaaactctcacacctaatactataaccctcaaggtccataacatcgacaccatctacaatgtcaacgccaatattcaagacaaagaatgcattcctcctcatcaccatcctttgattttcgccggaaagcaccttgaacattaaaggaccctgtccgattacaacatccataacgaatcaacccttcatatcttcctcactcttcttcctgtcatcattgaaccttccctcattgctttgactcgcaaatacaattaggacaagattatttgtcgcaagttctactcccgtctgcattctattactttgaactgcctcaagaaaaattgcaccatactaacc

SEQ ID NO: 5859 - DNA, 416 bp, Glycine max
  Clone ID: LIB3074-037-Q1-K1-A2
ggcacaagtgagtttgttgatcgagataactagaaacagtgtgatgaaaatgaaggtccttgttttcttcgttgctacaattttggtagcatggcaatgccatgcgtacgatatgttccctctccgaatgaacactggctatggtgcccgtactccggaggtgaaatgcgcaagttggaggcttgctgtggaagcacacaacatctttggctttgagaccattcctgaagagtgcgttgaagcaacaaaggaatacatccatggcgaacaatatagatcagactccaaaacagttaaccaacaagcttacttttatgccagagacctcgaagtccatcccaaggacacatttgtgttcagtataaatggcaccgtactctctaatattccatactacaaaaaacatggatatgggg

SEQ ID NO: 5860 - DNA, 309 bp, Glycine max
  Clone ID: LIB3074-037-Q1-K1-A4
gacaccaacatccaaacaaacccactaagatggcgggctgggtatcctcactagtgctgctactagcaacccttatcctcatgcctcaacgacttgctacttactacaaaccaattaagaagccaccaatgttcaagcctttaacactcactccagcaacgtacaaaccaccggtttataagccaaaaccaccgctttacaagccgaaaccacccgtttacaagtcaccatataagacgccaccatacaagaaaccaccttatggaaactacccttcagaacaagacaacacccattcctaaagcaagc

SEQ ID NO: 5861 - DNA, 327 bp, Glycine max
  Clone ID: LIB3074-037-Q1-K1-A5
acgcgtacgcccacgcatacgaaccaatgcgagattattattcatagctaatataccagaaatgtgcttcgcagaattataagaaagcatgaacaaacatgactatgcagaagcacttcttgaggcctggcaccagtcccaagccaattcccggtcagaacgtctcctttcactgaactggtttctttaaaaaccattacctttctcataaattctgcagtaccaatcatcctggccaggaccctttcactttctaaatctgacaacgttctgttatcaaatgatggtatgacaagatgctttgcatgcaaaataaatgaatttgct

SEQ ID NO: 5862 - DNA, 402 bp, Glycine max
  Clone ID: LIB3074-037-Q1-K1-A6
gactttcctatatttcgtgtcatgagatagcccagggaaactcgaacttttttgtttctaatcaacaaacatagcctattcctggttgcttctgtttttgtttttcatttcagaataggaaccaatggctcatttgctgacaccaactcctgccactgctgcaacagctctctccccgagagcccgaaagagcaagagccccctccattcttggaaaaatggttactttccaactccaagagtgtgctgcgttggccaccaatctcaacgatctcacacctcttccatctcttctgatcttgatcaagtccctcctccccttgacaaccactctcttcgtcgcaggacattgatggggttgagtggtgcggcaatgttggggttgagtttgagtgatgagca

SEQ ID NO: 5863 - DNA, 295 bp, Glycine max
  Clone ID: LIB3074-036-Q1-K1-H10
gacaacacagaacaaaagcggagaaaaaaaaacccttagccaacacaaccatcatggccacctctgctattcagcaatcagcattcactggtcaaactgctctgaagcagctcaatgagttcgtccgcaagaccggtggcgccggcaaggtcgcactaacatgcgccgcaccgtcaagagtgctcctcagagcatttggtatggccctgaccgtcccaagtacttgggtccattctcggagcagattccatcatacctgaccggagaattccctggtgactacggatgggtcact

SEQ ID NO: 5864 - DNA, 361 bp, Glycine max
  Clone ID: LIB3074-037-Q1-K1-A7
gacccaaacacttctctttttctctctctacactgtattcaacccttcacattttctctcttctttatcttaaattacttttccatggaggaaagcaagaaacgagtccgggacgagtccagctactcacccgagtcccaaactcagctggtcgactctcccgagtctgaaagtcagcgggtcgactcacctgagtctaagattcgtcgagttgactcgtccgagtctcaactcgactcggtccttgactcggaggtgcgtctacaagacgacatttttaacatacttgacgacgccgataatgtgcctgagcgtgactcggtgcaaggtcttgactcagtgatcaaaagcttcgaagatg

SEQ ID NO: 5865 - DNA, 429 bp, Glycine max
  unsure at all n locations
  Clone ID: LIB3074-036-Q1-K1-F10
ggagcagaatcttcaggccaagccaggtaagcacaaccgaagcaacaccccaaatggcttcagcttctgttcccatggcgttgtcactgagctctgttaccaacaacaacaagccttcatccgaagccttcttcaggccactacccctacgccaaccaaagaggaccctcttcaccacgaaggcagtgtcaaactccaagcctcaaatcaatgcatctttgaaggagaaggcagttgccggactcacagcagcttctgtgacagcatctatggtggttccggaggtggctcatgctgctggatatgagttctccccttccctaaagaactttctactcagcatctntgctggtggggttgttctagcagccatatttggagccgttattggggtttccaactttgatcccgttaagagaacttaaatca

SEQ ID NO: 5866 - DNA, 419 bp, Glycine max
  Clone ID: LIB3074-036-Q1-K1-F11
ggtagttacacctttttttgtgtgtttacgagcgtgttgagtgccacagagttctgagtttcataggagaaaaaaaatgacagaagaacaaaccaaaacggttgagtcagaatcagtaacaccaccacctgctgctgctgctccttcacaggttcctcctgctgctgaggctgaacatgttcctgaggctccaaaggatgtgactgaggagaaatctgtaattccagtgccttcttctgatgacaagcctgatgaatccaaggctcttgtcttggttgagaagactcaagaagttgctgaagtgaaaccaactgagggctctatcaaccgagatgcggtgcttgcaagagttgcaactgagaagaggttgtcattaatcaaagcatgggaagaaagtgaaaaatcaaaagctgaaaaca

SEQ ID NO: 5867 - DNA, 408 bp, Glycine max
  Clone ID: LIB3074-036-Q1-K1-F5
ggattgattccctcattcttcagccatagacatggccaccgtcacttctgcagccgttgctattccctcattcactggcctcaaggcaagcgcaggcaaagtgagtgccgcagttaaagtctcagctccccaagccacaaggttgggcatcaaggcttcgctgaaagacgttggagtcgctgttgtggccactgccgcgagtgcagtgctggctagcaacgccatggccattgaagtgttgctgggtggtgatgacgggtctctgactttcgttcccaacaatttctccgtggccgctggggagaagatcgtgttcaaggacaacgcacgtttcccccacaacgttgtgttcgacgaggacgagattcctagcggcgtggatgcagggaaaatctccatgagcgatga

SEQ ID NO: 5868 - DNA, 425 bp, Glycine max
  unsure at all n locations
  Clone ID: LIB3074-036-Q1-K1-F6
gacagcatatcaataatctattntatactatacccacattttgataattatttttctagttgataagccatggctactcgaggaaagcttgaggttgacgttgatctcaagtctaacgcagacaagtactggcaaacccttaggaactccactgaaatattccccaaggccttccccaatgattacaaaagcattgaggttcttgagggtgatggcaaatcacctggttctatccgccacataagttatggtgaaggttcaccacttgtgaagtcatcctttgagaagattgaggctgttgatgaagaaaagaaggtagtgtcgtacactatcattgatggagaactcctccagcactacaaaacattcaagggagacatttctgtgactccagttggcgatggatgcgaggtgaagtggagtgc

SEQ ID NO: 5869 - DNA, 315 bp, Glycine max
  Clone ID: LIB3074-036-Q1-K1-F8
ggctcaagtgagtttgttgatcgagataactggaggcagtgtgatgaaaatgaagggccttgttttcttcggtgctacaattttggtagcatggcaatgccatgcgtacgatattgtccccctcctaatgaacactgactatggtgcccgtactaccgaagtgaaatgcgcaagttggaggcttgctgaggaagcacacaacatctttagctttgagaccattgctggaaaatgcgctaaaagaacaaaagaattcatccatggcaaacaatatacatcatacttcaaaacaggtaaccaacaagcttactttta

SEQ ID NO: 5870 - DNA, 209 bp, Glycine max
  Clone ID: LIB3074-036-Q1-K1-F9
ataaggggattctttatccgagcgagatagagaacaaataggggtaacactatgcatcacaagagaatggcgctgctgtgttgttcaacttccgtgactccattcctttctcacaagaacgttggtttcacaacctcagcaaaatcttcctttgttggctttcaattgccgcttccaaagctcacattatcttcttccgttcgaaccct

SEQ ID NO: 5871 - DNA, 373 bp, Glycine max
  unsure at all n locations
  Clone ID: LIB3074-036-Q1-K1-G10
gattatatttgagttcaaacaaatcaaagccatggccacctccaacttctctattgttctctccgtctccctagccttctttttggtgctacttaccaaggcacactcgaccgataccgtttctttcaccttcaacaagttcaacccagtccgaccaaacattatgctccaaaaagatgctagtatttcatcctctggggtgttacaactcaccaaagttggcagcaacggcgtgcccacctcgggatctctcggtcgtgccctttacgctgccccaatccagatttgggacagcgaaaccggcaaggtagccagctgggctacatcctttaaattcaacattttcgcacccaacaaatcanactcagctgac

SEQ ID NO: 5872 - DNA, 382 bp, Glycine max
  Clone ID: LIB3074-036-Q1-K1-G11
ttatctcccatgcttttttcagaagacttccagctggtattcaaaagaacttatctcatattaaaaaatcgacctcttactccatttttaggaacataacaagataacaatacccttacaaagggcttatcacataaaatcgaatccatcattgcctttagatattcataaggcaaatacatcatttctcgccaatgctatgcataatccgaatatacgcacctaaaaaaaattatctttctttactatcttataaacttaaaggtgcttcaaacccccttccctatcttaaatttaaactttaaacggtaccaaaaaattccttttaacttaagtacatctatcccaaaacacacacctacctcaatattattcttttttt

SEQ ID NO: 5873 - DNA, 381 bp, Glycine max
  unsure at all n locations
  Clone ID: LIB3074-036-Q1-K1-G12
gacccacgcgtncggtgctacaagacgacttattggtactgtttttttataaccacccgaaggggaacgcaccgcctgtttaaaataaaacaacaatcacttacgagtgttgagtaacatcaaaatatggcagacttgatgaaaagaatcctcgaaatgattgaggccgagcaagctatgaaagggtccaatcatggtacctcaaactcacataacacctatggcagccgaagccataatggatcaaccatcaacagcggcaatcatcataacaacggcaactggtatgacgactcataccactattgtgaacgccctatttattacgaccgtactttcaatggtaaatggcaaccggccacatttttaagggtggctttt

SEQ ID NO: 5874 - DNA, 409 bp, Glycine max
  Clone ID: LIB3074-036-Q1-K1-G3
gggcttagcttgtggattgcattatttatcatccggacttgcagtagccgcttacttcctgaggcaagaaattgaaaagtgaaggttccaagattttgcttattgaaatatgaaacaattagcatccttgtgaatgctactgcttatttttgatgcattgtcattttttaaggggtttgctgatacttttatatattttggcatctttatgaacagttgttctaggacacgaccctctctctaaaatgccttgtaacatgggttgtatcgttacgttacatgtttcgtacaatgctttcaggtagaattggagctatcattcattacttgctatttgctgtgtattttgatgttatatgatatatagctttcactgtcagaagtaacccgagggcacgggttttggatt

SEQ ID NO: 5875 - DNA, 410 bp, Glycine max
  Clone ID: LIB3074-036-Q1-K1-G4
gacaacacatcctaaataagcgtgataattcatagtctttcgggccttccttccttcctctgctctagtgtatgccactctggttaattatcatacccccttctaagcatagttcttctccctctgttctctattctacactgtgaaacccagatgaaggtagcatttgtagctgttctacttatttgccttgtcctaagctcctccttgttcgaggtgtcaatggccggttctgctttctgctcctccaagtgcgcgaagaggtgttctagggctgggatgaaggacaggtgcacgacgttctgcgggatttgctgcagcaagtgtaggtgtgtgccatctgggacttatgggaacaagcacgagtgcccttgctacagagacatgaagaactccaagggcaagcccaa

SEQ ID NO: 5876 - DNA, 394 bp, Glycine max
  Clone ID: LIB3074-036-Q1-K1-G5
gcactacctcaagcataacttgcatagactattgagtaagaaagctattgtcattgatttgctagctccaacaatgggttctagcagattatcattcattttagtacttgtgcttgtaaccttttcatccatgatcattgactcaagggttgcagaggcacgtaccctgccaaaatcagccttattgccttccaaagttgatatacctactgttgttcctcttccactggtggcaccactgccaaatttgcctgttactctccctccagtgcctgaactacctgcagtacctaaagtaccaattcctgaagtaatagttaataacgccaaaataatcccttgagtacctatgatctatccagtcactactacttattttgtcacttgctaaatt

SEQ ID NO: 5877 - DNA, 403 bp, Glycine max
  Clone ID: LIB3074-036-Q1-K1-G6
tgttgttagctataagctattttatcgtgaggagaatatgaagttgccgcgggtctttgttgctgcagtagttttggtagcatggccatgccatggcgcaagctaccaaaggttccctctccgaatgaaaactggctatggtgagcgttcttcggaggtaaaatgcgcaagttttaagcttgctgtggaagcacacaacatccgagcctttaaaaccattcctgaagagtgcgttgaaccaacaaaggactacattaatggcgaacaatttagatcagactctaaaacagttaaccaacaagctttcttttatgctagtgaacgcgaagtccatcacaacgacatatttatattcggcatagataacaccgcactctctaatatcccatactttgaaaaacat

SEQ ID NO: 5878 - DNA, 243 bp, Glycine max
  Clone ID: LIB3074-036-Q1-K1-G9
ttggtactgggtgaggatgacaacagaagggtgcggctgctataatacgacagataggtactgttgccataagacgacagattgtgattttttttgaattgaaacctaggagagactgctgctacattcatcatcatcaccttatggacggacgcgatccacaagatctaaatcagatccctgcttacatgactgcctttgtgcaaaatctttttcagcagatgcaaaatatgttccaaacaa

SEQ ID NO: 5879 - DNA, 434 bp, Glycine max
  Clone ID: LIB3074-036-Q1-K1-H1
gggagcagcaaccaaatccctttccagcttctgattcgtcaaacggacaaaagaagtgaaagggtttaaggtgtgacctgagatcaacatgttgcggaggcttctctcttttcacctcaaaaccctagccgccaccgcttcttcttccactccccgatctgctttcgccgccgccagattcgccgctctctctcgctcctcccgctacttctcaacccagtccgaggatgctactgccatcaaaaagaaagttgaggatgtaatgccaaatcgcttactgggtcacgaagcgcgagggaggcttcagggctgaggctcgagaggaagggaaaatattcttgaaaatagacccatcccgaaagtgcccattcggtaccgaaggaagcacctgctgttggtcaaatcttgctatgataaaaggatagtcgggatgc

SEQ ID NO: 5880 - DNA, 290 bp, Glycine max
  Clone ID: LIB3074-036-Q1-K1-D11
ggttcccacaaagcaaggcatagctcaatggggggagtcatttgtgggtactttattacccaaccacttcacacaaaccaaacactcagctgttcctgcaagtagatcacgtgctccaagaaggaggagagtgcacttagcaacaacaagagcagagaccatgactactgtcatagaaaaactgggcattaagattgagaggaaccctcctgagtccaagctcactcaactgaatgttaggcaatggcccaaatggggttgccctccaaataagttcccatggacatatg

SEQ ID NO: 5881 - DNA, 428 bp, Glycine max
  Clone ID: LIB3074-036-Q1-K1-D12
agaagacgacagaaggggggtggagtgtgcagaagagcgtcggaggcgcaaccctaatcagaagaagcgcagcttcaagcgagtgacagccaccagccatgggtcgtatgcacagccgcggtaagggtatatcctcttctgctttgccctacaaaaggacacctcctagctggctcaagatctcttcgcaagatgtcgaagaaaatatctgcaagtttgcgaagaaaggtttgaccccgtctcagattggtgtcattctcagagattctcacggtattgctcaggtcaatagcgtcactggcagcaaaatccttcgcatactcaaagctcacggacttgcgcctgaaattccagaggacctgcaccatttgattaagaaagcagtttcaattaggaagcatcttgagaggaacaggaaggacaaggac

SEQ ID NO: 5882 - DNA, 382 bp, Glycine max
  unsure at all n locations
  Clone ID: LIB3074-036-Q1-K1-D6
gatgatatttcaggtgatgaggaggctaaacgaatggattatcatcaaagtgatagtgtagttacatcatctgagcaaaagaagcttgagattgaattgcggaacaaggctcttgaatccctcaaagcaaagaagggcatgaataactaaatgcatcacatccaagttttatgttgttttatgctttaaaaacttattgagaaatatcttagcttgtttaagaaacttggttttgcaaatgttatgtttatttattcatcggtaaatgtttgatgtcatctatctttaatgctggcagcggaaatggatagatgatgctttctgagtaaatctgttgagtacaactctatgcagacattgtcctatatntactggtaatatt

SEQ ID NO: 5883 - DNA, 394 bp, Glycine max
  Clone ID: LIB3074-036-Q1-K1-D8
tgtcttcttaaggggaacgcatcataaaaaggggggccttctatcatatagcattctaagaaatgaagagccctaccattttcattctctttctactttctgccttctacacctcactcctaccttcagccaccgctcaagtcgtggttgacatggaaggtaatgatcttcaaaatggtgggaaatattatgtgttgccagtaatagagtcatcatatggtggaataagagtagccccaactggaaaagaaagatgccctctcactgttgtacaatctgccgatcctgatgataaggggattgcaacaattatttcaaccccatattgagttccctgtatccgcgaaagcttcccttttaacattacgttccgtaatttttcaattatactgcc

SEQ ID NO: 5884 - DNA, 418 bp, Glycine max
  unsure at all n locations
  Clone ID: LIB3074-036-Q1-K1-E1
ggcacaagggagtttggtgatcgagatgacgagaaacaaggggatgaaaatgaacgtccttgttttcttcgttgctacaattttggtagcatggcaatgccatgcgtacgatatgttccctctccgaatgaacactggctatggtgcccgtactccggaggtgaaatgcgcaagttggaagcttgctgtggaagcacacaacatctttggctttgagaccattcctgaagagtgcgttgaagcaacaaaggaatacatccatggcgaacaatatagatcagactccaaaacagttaaccaacaagctttacttttatgccagagacctcgaagtccatcccaaagacacatttgtgttcagtatagatggcaccgtactctctaatattccatactacanaaaacatggatatggggg

SEQ ID NO: 5885 - DNA, 424 bp, Glycine max
  Clone ID: LIB3074-036-Q1-K1-E10
gatataaacaacgctaacgacacttgtgcctgacgcgattcaaacgcacactctctctcaccaaagccttcctagaacgaaaaaaaaaagaagagcaattttccctcaccaaagaagaagaagcaaacaatggccgatcaacttaccgatgaacagatctccgagttcaaggaagccttcagcttgttcgacaaggacggcgatggttgcatcacaaccaaggagcttggaactgttatgcgttcattggggcaaaacccaactgaggcagagctccaggacatgatcaatgaagtggatgctgatgggaatggtaccattgacttccttgagttcctaaatctcatggccaggaagatgaaggacactgattctgaggaggaagctgaagaggcattccgggttttcgacaaggaccagaatg

SEQ ID NO: 5886 - DNA, 183 bp, Glycine max
  Clone ID: LIB3074-036-Q1-K1-E11
tttctccgcgtcgcagaaaaagaaaaaagcggtcagagttttactttggccttatccactttagcctttccgttctctaccctatctttcacgtatctaatccttaatttaaccaacatttctttcccttctcgttcaacttaccctttattcttatttcgtctagttttaattcttaatttt

SEQ ID NO: 5887 - DNA, 351 bp, Glycine max
  Clone ID: LIB3074-036-Q1-K1-E12
gcaaggacgagaaactatccgcgagagtcggccgcgagaaaagcacagatgggtagcaaagccctgagcgcagtgggtgggtttactctcactctcagtcccatcaatgtgaaactcctacttatgccttccaatcgcctctttaaccgcacttcctgtaaattttacattttcttctgcctacgcttcaacgacgagcaacaacccctaagcctggacatacccgcactaaagtcatctttcgcgatgctcattgatgggaatcacatcatggtcagaggtgtgtacaagactctggtccgctaaatggcccaggattcttaactcgacctggtgatcgtattcccagat

SEQ ID NO: 5888 - DNA, 383 bp, Glycine max
  Clone ID: LIB3074-036-Q1-K1-E2
gacaaagtcccctcccacaccactgtaacatctacttacagaaacccaccacaggaactagaaaatccataccgtcttcaccaccaaaaagaaaataatggcaatggcccgtgcaacaactctagccacaatcactgttgtggcggctagccccagtgttggcagcaaaaggagtgggaagaggaatgtgaacttcatcagagggttgaattcttttggagggttgaaggctcagaacaatgtgacattactaggccttcctgtgtgcactgagcagtgctttgcaaaggtggtgagctcattgaaatatccatcatcatcatcacgtaaggggagaggtggaggtgctgccttttcaacatgcaatgctgctggtgagattt

SEQ ID NO: 5889 - DNA, 420 bp, Glycine max
  unsure at all n locations
  Clone ID: LIB3074-036-Q1-K1-E4
gaacaacacgtagtattatttcattgatttctcgctcttcgctctctctcagtgaccagagacagatgatgatggagatggcgaagcgaaacgctgtcgttgcggcactcgcggcgttggtgctactcgcggcgagtgtggcggtggatgctcatgagaactcggacgtgaagacgctggtgaagtacaagcacgggaagaagtactgcgacaaaggatgggaatgtaagggctggtcaatttactgttgtaacctcaccattaccgattatttccagacctaccagttcgagaatctgttctccaagcggaactcgccggtggcgcacgcggtcggattttgggactaccactccttcatcgccgncgncgcgctttttgagccggaagggnntcgcaccaccgggaacaagacgatgt

SEQ ID NO: 5890 - DNA, 423 bp, Glycine max
  Clone ID: LIB3074-036-Q1-K1-E5
gaggtgaaggaaaaaaaaaaaaaaaatcaaaagtggataatggcttcgttatcgctttgcatagccatgacagcacccactccctcagcttctctcattctcactgccccaaaaccatcttcgctctctttgaaccttacccgcacttgctccaccgctcgctctccgcttctccattgctccttcctctcttctccttcccttctctctcccccttcctccatttcaggcttgtcacttggattggatttgacatctaattttgggaccagaagaggaaaaggttctggccttgttgtgagggcaggcaaggctgctctttgcctgactaatagaagcagatcaagaaaatcattggcacgcactcatggtttccgcaaaagaatgagcacaccacgtggaagagctgttttaaggcgacga

SEQ ID NO: 5891 - DNA, 424 bp, Glycine max
  unsure at all n locations
  Clone ID: LIB3074-036-Q1-K1-E6
gatcacaacactaacacagattttgattcgattcgattcgattcagtcgaggttttaagcagcagcaagatgtctgggcgtggaaagggaggaaagggattgggaaaaggaggagcaaaacgacatcgtaaggtgctccgcgacaacattcagggaattacgaagccagcgattcgtcgtttggctcgcaggggtggcgtgaagcgtatcagcggtttgatctacgaggagactcgcggtgttctcaagatcttcttggagaatgtcatccgtgacgccgttacttacacggagcacgctaggaggaagaccgttacggctatggacgttgtttatgcgcttaagaggcagggaaggaccctctacggatttggtggttagggtttttgcttgattntcctcgccagggaaaagtcttgctgtc

SEQ ID NO: 5892 - DNA, 258 bp, Glycine max
  Clone ID: LIB3074-036-Q1-K1-E7
tattactattactcatcaatctaaatatctaggcgaagttattaacgaacagaagggaccaacttttatttttttattctaaaaaattcaattatacctgctctttcacaagagaaaaaaccttaacccccatcatctgtttaatttcaaatatccaaatttaccgataagaatacgaagacttacttcacatttttaatcacaccgtataaactttttatatcaaagaagtttactgacaatttttcgaaaacgact

SEQ ID NO: 5893 - DNA, 383 bp, Glycine max
  unsure at all n locations
  Clone ID: LIB3074-036-Q1-K1-E8
cagcnggattatatttgagttcaaacaaatcaaagccatggccacctccaacttctctattgttctctccgtctccctagccttctttttggtgctacttaccaaggcacactcgaccgataccgtttctttcaccttcaacaagttcaacccagtccgaccaaacattatgctccaaaaagatgctagtatttcatcctctggggtgttacaactcaccaaagttggcagcaacggcgtgcccacctcgggatctctcggtcgtgccctttacgctgccccaatccacatttgggacagctaaaccggcaaggtagccagcttggctacatccttaaattcaacatttcgcacccaaaaatcaaactcatctgacgggcttg

SEQ ID NO: 5894 - DNA, 401 bp, Glycine max
  Clone ID: LIB3074-036-Q1-K1-E9
gacaaattcacacatttcttgttgcattatcgcggacacctcgtccctcgcaatgcaactagcaatggcggccaacgctgtcgtttcaccgtcggcgttccgacctcagccctttctccggtcatccttgtgcggcgtgtgcgtcaagctcactccccaatccataacgctttcacgctccaagcccctcaccgtcttggccgacaccaagaaggccgacgccgtcctcaaggggacctccggcgacgaaggcgtcgacactctcatccaagaagacgatggcccgacgacagtatctgttcgcatcactggccttactccggggcttcatggttttcacctacatgagtatggtgatacgacaaatgggtgtattgctacgggagcacattttaatccta

SEQ ID NO: 5895 - DNA, 418 bp, Glycine max
  Clone ID: LIB3074-036-Q1-K1-D10
gattgtggttcatttgcacatttggaaagtggtggttttctttttttcatttgcattgcaaagcaaaaaccttgcaaattgcaatggcttccaacaaggttattgccaccatcttggttctttctctccttgcctactcaacatcattcaccaatgcatgtggcacatgccacccaaaacctactccttctccccctcctccatcagggaagtgccccaaggacacattgaagctaggggtgtgtgctgatgttctaggacttgttaatgttgttgttggttcccctgtctctagcaagtgttgtgcattgcttgaaggtttggctgattcggaggctgcactttgcctttgcactgctattaatgccaatgttcttggaatcaacttgaatgtgcctatcacactcagtgtgctact

SEQ ID NO: 5896 - DNA, 378 bp, Glycine max
  Clone ID: LIB3074-036-Q1-K1-B4
gaggaacccaaaaactaccatagccactactgattcagaaactcttaggcatagcgaaaatgacaaccaccttcgcgaccgtcgcaggactcggtggtgcatcactgtcatccacctcatctcgtctcacctcagggtttgtgaaatcgccagtgagtgctaggaatcccttgaggaaagctgtggcaatgggaaatgggagggttacatgcttcgagaggaattggctgcgggcagattacagtgtcattgggtttggattgattggttggctagcaccctcaagcgtaccggctatcaacggtaaaagtctgactggcctcttctttgagagcattggagctgagctagctcactttcccacccctcctgccctta

SEQ ID NO: 5897 - DNA, 432 bp, Glycine max
  Clone ID: LIB3074-036-Q1-K1-B5
cgtgtagtgccagacgcaatgactaaaccaaacctctcactcggcggcgagggtttctcctttcggttagcaacaacaacaatggttgcagccaaaaaaaccaagaagacccatgggagcatcaacaacaggctcgctctcgtcatgaagaagggaaaattcaccctcggttacaagacgggtctcaaatcacttaagagctccaaagggaaattgattatcattgctaacaactgcccccctttgaggaaatcagagattgaatactatgctatgttggccaaagttggagttcatcattacaatgggaacaatgtggatttgggcactgcatgtggaaaatattacagagtgtgctgccttagcattattgatcctggggattctgatatcatcaagacactacctggcgaacagtaaagtattatttga

SEQ ID NO: 5898 - DNA, 423 bp, Glycine max
  Clone ID: LIB3074-036-Q1-K1-B6
ggaggggcaagagtttcgtgggagctataaactagtggatcgtgaggagaatatgaagttgtttgttttctttgttgctgcagtagttttggtaacatggccatgccatggcgcaggctaccaaaggttccctctccgaatgaaaactggctatggtgagcgttcttcggaggtaaaatgcgcaagttttaagcttgctgtggaagcacacaacatccgagcctttaaaaccattcctgaagagtgcgttgaaccaacaaaggactacattaatggcgaacaatttacatcagactctaaaacagttaaccaacaggctttcttttatgctagtgaacgcgaagtccatcacaacgacatatttatattcggcatagataacaccgtaccctctaatatcccatactatgaaaaacatggata

SEQ ID NO: 5899 - DNA, 382 bp, Glycine max
  Clone ID: LIB3074-036-Q1-K1-B7
gatctggcagcagaagaacaagtagttgagaactaagaaggagaagcaaatggcttcctcaatgatctcttccccagctgttaccactgtcaaccgtgccggtgccggcatggttgctccattcactggcctcaagtccatggctggcttccccaccaggaagaccaacaatgacattacctccattgctagcaacggtggaagagtgcaatgcatgcaggtgtggccaccagttggcaagaagaagtttgagactctttcctacctgccagaccttgatgatgcacaattggcaaaggaagtggaataccttcttaggaagggatggatttccttgcttggaattcgagttggagcacggcttcgtgtaccgtgagcacaa

SEQ ID NO: 5900 - DNA, 374 bp, Glycine max
  Clone ID: LIB3074-036-Q1-K1-B8
gggcagcagaagaacaagtagttgagaactgagaaggagaagcaaatggcttcctcaatgatctcttccccagctgttaccactgtcaaccgtgccggtgccggcatggttgctccattcactggcctcaagtccatggctggcttccccaccagaaagaccaacaatgacattacctccattgctagcaacggtggaagagtgcaatgcatgcaggtgtggccaccagttggcaagaagaagtttgagactctttcctacctgccagaccttgatgatgcacaattggcaaaggaagtagaataccttcttaggaagggatggatttccttgcttggaattcgagttggagcacggtttcgtgtaccgtgagc

SEQ ID NO: 5901 - DNA, 422 bp, Glycine max
  unsure at all n locations
  Clone ID: LIB3074-036-Q1-K1-B9
ggagaagaagaagccttcagcacttgaaggggagaccttgctgatcctcatcatgggaaccatttttcctcctcactctctctctccactcctcaacatcaaaccttcaccctcaagaattctcttggctccctctccccaacccaagtcaaattctctcttttgctccaaacccattgtttcaagtctcagaaagaaccaaacttcatctcccaaaccttcatcgggcacaagctggttggctcatgctcaacagggcctagcagctttggctatctccttggcactcaactttagcccagctttgtttaatggcaatgccatggcatctgagtttgatgtgcttaatgagggtccacccanagattcttatgtcgttgatgatgcacgagtgcttagtagggtgaccaggtctgatttaa

SEQ ID NO: 5902 - DNA, 268 bp, Glycine max
  Clone ID: LIB3074-036-Q1-K1-C1
taccggtgggagaagaccaccgaagggggtcttagaatggcttccttttctactcttcatgggctggacaaccctttttctcgatcttaattcctaaggccagaacacccttttacttaccaatttcctcttaaacaacaagggccttacaaaacaagcaccaactcatgaagttctaatgccacgtgctgcaaagttcaacatattggaaatgatgggagggagaagactatgcaacggggaaaaaggtcttcagcaagagctgaaa

SEQ ID NO: 5903 - DNA, 339 bp, Glycine max
  Clone ID: LIB3074-036-Q1-K1-C10
tttcttatgtgagtttgttgatcgagataacggggacagtttgattaaaatgaacgtccttgttttcttctttgctacaatttttgtagcatggcaatgccatgcttacgatatgttctcttctctaatgaacactgtctatttgttcccgtactctagatgtgaaatgctcaatttttacgcttgctttttaagcacacaacatcttttggcttttaaactcatctttaatatttctttttagctatataaataatacttttattgccaacaatattatattttttttttattcagttaatctatttttttttttttatttcttcaatctttttattt

SEQ ID NO: 5904 - DNA, 419 bp, Glycine max
  Clone ID: LIB3074-036-Q1-K1-C11
gactcaccaagtgaaccaatatagcccaagccctatacaaccaaaccctaacacacacccatttgattcagtttccatggctagcctcaaggttgcatttttggctgcagtgctctgcatggttgtggtgagtgcacccatggcacatgcagctatcacgtgcgggcaggtgacgagtagcctggccaattgcatcggttacctccagaagggaggaacgccgtcgtcgggatgctgcaacggagtgaagagcctcaatgccgccgccaagaccaccgtcgaccgccagacggcgtgcaactgcctcaagtcggccgccagccaaatctccggcttcaacgccaacaacgccgcctcgctccccggcaaatgcggagtctccatcccctacaagatcagcaccttcaccaactgcgcta

SEQ ID NO: 5905 - DNA, 393 bp, Glycine max
  Clone ID: LIB3074-036-Q1-K1-C2
gactcttcacagaaacatcgagcagcagaagaaagagactacagaaaaaagaaaaaagacatggcttccacttctgcagtttcattggctatgccagtaacttatgccagccagaagagggtactggtgcctagctctgatgcattattcctcaagccactgcctctacgttcttattcttccaaggcaatggcagcatcaaaagtacccaatggaaggtttcaggtgagggcttccatgaaggagaaagttgtgacaggcctcacagcagctgcattcacagccttcaatgatggctcctgatgtggccgaggccgccgtttcgccttctctcaagaacttcttgctcagcatcgccgccggtggtgttgttgttgctgccattatcggtgc

SEQ ID NO: 5906 - DNA, 400 bp, Glycine max
  Clone ID: LIB3074-036-Q1-K1-C3
gctaccatagtgctaggaaagtgagtgagagaaagagatcacatagcagaatggcttctactcaatgtttcttgcaccaccatgctcttaccacccctgccagatccccatcacaacgcatcatggttagcaccaagcctaaccagcttgtttgcaaggcacagaagcaagaggatattgatgtcagcccaatctctcgccggttagctctaaccgtgctcattggtgctgctgctgttggctccaaagtccaacctgctgatgcagcttatgggaaagctgccaatgtgtttggaaagccaaagacagacacagatttcctgccatacaatggaaaatggaatcaaactatcgattccctcaaagtggaacccaagcaaagaggttgagtacacaggtc

SEQ ID NO: 5907 - DNA, 450 bp, Glycine max
  unsure at all n locations
  Clone ID: LIB3074-036-Q1-K1-C4
cccacgcgtncgggttgcgaaaaagacgacacgacagagggtgacctccttgcttctctcatgggcaatcctcttgccgctgagctccctttctgctcggtccacagagacaaaatgtaagacaggtgccaacagttcatcacgaaagaaaggactacctgaaccgagatcactaactaaaacgaatttaatactcatcgaacatactcatagaatagaaatagaactgtcttttcatatagatataccttcaacacaacatatgtcatcgaaaggatctcgaagacccaccaacgcacgaaagccggcatctttcagaaaatggattcctattcgaagggtgcataaccgcatggataagctcacactaacccgtcaatttgggatccaattcggttccttaggaggtatcgggaacgaattttggaatgtcataatatcgattcatac

SEQ ID NO: 5908 - DNA, 235 bp, Glycine max
  unsure at all n locations
  Clone ID: LIB3074-036-Q1-K1-C5
cccacgcgttcgnctacgcgaacacccacgcatgcgttcggcttccttaatactacaatggggcgcgtaacattatcgcttccttgcataatagctccatccacagactccaaactgaatacacaataccacacaggcattcacataaaaaagtactttgtaaaccgtcatcactaacttagaagcaaggcacactatccttccatactaaccacataaaaatctgacaacatat

SEQ ID NO: 5909 - DNA, 295 bp, Glycine max
  Clone ID: LIB3074-036-Q1-K1-C6
ctgctattaaatattatatggtctgataaacaaatatgcacaaattctaaaggggcccccgagaatccaaattccggcaaatagactgatgaagctgaagagaccactgttgacagtgcaggagctgatgggcaaatgtaaggacgggccgcctcaaagaatttgcccgaaacttaagaacgcgtatcaacaaaattgcccgaatgccgcgtatgaagcactctgtccgatagtgaaggtagtgtatcaatggtgttgccggaatgacgcataactctgcaagccacggtgggcg

SEQ ID NO: 5910 - DNA, 382 bp, Glycine max
  Clone ID: LIB3074-036-Q1-K1-D1
aggggcacattgcatctgcgtaccctctctctctctgtctctctctctctgcgctctccactggaccgagtctgaaaaaagagaaaatttaactaactccaatggctgcacgtgtggctgcaaagtacggatccagaaagctatttagcagtggttctgggaaaatacttagcgaggaggaaaaagctgcagagaatgcttactttaagaaagctgagcaagagaagttggagaagcttgctcgcaagggtcctcaatcagaagcagtctcggggggttcagtaactgatgccaaaccaagtagctcaagacatactggaacatcagttgacagagtttcaactgacaagtaccggaattatgcagttgtagctggtactgt

SEQ ID NO: 5911 - DNA, 437 bp, Glycine max
  unsure at all n locations
  Clone ID: LIB3074-036-Q1-K1-B2
agacgacagaaggggacagaaaagaaaaaggaaaccctagctgggtaggtcaaacatcatcatgtcggacgaagagcaccatttcgagtccaaggcagacgccggtgcctccaaaacctaccctcagcaagccggtaccattcgcaagaacggctacatcgtcatcaaaggacgcccctgcaagggtgtggaagtttcgacttccaaaactggaaagcacggtcacgccaagtgccactttgttggaattgatattttcactgccaagaaacttgaggatattgtgccctcttctcacaactgtgatgttcctcatgtgaatcgtactgattaccagctcattgatattggctgaggatggatttttgagtctgcttactgaaaatgggaacaccaaggatgacctcaagcttnccactgatgagagtctgctcact

SEQ ID NO: 5912 - DNA, 271 bp, Glycine max
  Clone ID: LIB3074-035-Q1-K1-G2
ggttctagtgtgtgattgtttgttgttgtaactcgggcttcttcttttgttgttctgtgtttgtgtttgttttttctctcacctgaaaatgtcttgctgcggtggtaactgtggttgcggaagctcctgcaagtgcggcaacggctgcggaggctgcaagatgtacccagacttgagctacactgagtcaaccaccaccgagaccttggtcatgggagtggcacctgttaaagctcaatttgagggtgcttaaaatgggtgtgccccgctg

SEQ ID NO: 5913 - DNA, 277 bp, Glycine max
  Clone ID: LIB3074-035-Q1-K1-G5
gggctctttgtacgaaaattatggtttgtagtgtaacgctaagaatcatcaatggcgccgaacataacacgtaaggttagcagaaaccctgaattgataaggggaatcgtaaagtactcgacgacgcatatttaccacaagatgggcatttgtgctatcaaggccaaaaactgtgacgttttacctcgccacgaccctaaacccaatcctgaagctcctgctgaaaaaccacccaaattttaccctgcttatgatatcaataaaccctttgtcaaca

SEQ ID NO: 5914 - DNA, 424 bp, Glycine max
  Clone ID: LIB3074-035-Q1-K1-G7
tacagaagcacaccacaggaactagaaaagggagcaatcttcaccaccaaaaagaaaataatggcaatggccagtgcaacaactctagccacaatcactgttgtggcggctagccccagtgttggcagcagaaggagtgggaagaggaatgtgaacttcatcagagggttgaattcttttggagggttgaaggctcagaacaatgtgacattactaggccttcctgtgtgcactgagcagtgctttgcaaaggtggtgagctcattgaaatattcatcatcatcatcacgtaaggggagaggtggacgtgcttccttttcaacatgcaatgctgctggtgagattttccagattgcagccatcatgaatggccttgtgcttgttggggtggcaataaggtttgttcttcttcgaatcgaaatgt

SEQ ID NO: 5915 - DNA, 322 bp, Glycine max
  Clone ID: LIB3074-035-Q1-K1-H1
gaaagctttcagacattttcccttttcagctttcaggggtgtggcctagctgttttctcaatgagaaagccttcatctctgcaaagcgcacttttgcgctttggggttcccttgttgcttgttatcaccttctgttatgctacttctactgctgcagcaacaactcaagtttcagggaatgaagagctgccaaagacaaacctaaatgggcatgatgaagaagcaaaattcggattttttcatcataaaccaatattcaagaaacatattccaattccagtatataaacctgtaccaaagccaatttcagtgtataaaccta

SEQ ID NO: 5916 - DNA, 168 bp, Glycine max
  Clone ID: LIB3074-035-Q1-K1-H12
gaaaaagaaaaaaaagattgtagagaaatataactaatattctttagaataatcaaaaagaatattaaattcaaataaattttagatagaaaaaagacttaaaaaggaggatttgaaatgcgagatctaaaaacatatctttccgtggcaccagtagtaagtactcta

SEQ ID NO: 5917 - DNA, 171 bp, Glycine max
  Clone ID: LIB3074-035-Q1-K1-H2
gtaaaaataggcagacttctcccgggaaaaaaaagtaggtaaaaaaatatgctaagtataaattgtctactgatgaaatacgaaagctgatgatattgaaaaaaaaagaattgtaaataaggttcaggtccgacttccatagagaatatagatgatattgtctataatgat

SEQ ID NO: 5918 - DNA, 194 bp, Glycine max
  Clone ID: LIB3074-035-Q1-K1-H5
tctatgggtagaggaacccacaacataaatcgttcatttaaaaaaggagagtgcttatatatagatcaaaacatattattttcattttcatcttttttttagtatcaacaaatggcaaccactgttatgaccactctcccccaattcagtggtcttagaccccaattctcatcttcccctgtgaataacttgtt

SEQ ID NO: 5919 - DNA, 196 bp, Glycine max
  Clone ID: LIB3074-035-Q1-K1-H6
tgggagtaacatcttgcagagaaacaaacttacaagtggaggaaattaagaagatcattaatggcttctcttgcaaccttagctgctgttcaaccagctgcgctcaatggccttgctggaagttccctctctggaactaagctctctttcaagccctcttcccacactgtcaaatccaataacttcatgagtggtg

SEQ ID NO: 5920 - DNA, 365 bp, Glycine max
  Clone ID: LIB3074-036-Q1-K1-A1
ggtgcacaagtgagtttgttgatcgagataactagaaacagtgtgatgaaaatgaagggccttgttttcttcgttgctaccattttggtagcatggcaatgccatgcgtacgatatgttccctctccgaatgaacactggctatggtgcccgtactccggaggtgaaatgcgcaagttggaagcttgctgtggaagcacacaacatctttggctttgagaccattcctgaagagtgcgttgaagcaacaaaggaatacatccatggcgaacaatatagatcagactccaaaacagttaaccaacaagcttacttttatgccagagacctcgaagtccatcccaaggacacatttgtgttcagtat

SEQ ID NO: 5921 - DNA, 413 bp, Glycine max
  Clone ID: LIB3074-036-Q1-K1-A11
gtgcacaagtgagtttgttgatcgagataactaggggcagtgtgatgaaaatgaacgtccttgttttcttcgttgctacaattttggtagcatggcaatgccatgcgtacgatatgttccctctccgaatgaacactggctatggtgcccgtactccggaggtgaaatgcgcaagttggaggcttgctgtggaagcacacaacatctttggctttgagaccattcctgaagagtgcgttgaagcaacaaaggaatacatccatggcgaacaatatagatcagactccaaaacagttaaccaacaagcttacttttatgccagagacctcgaagtccatcccaaggacacatttgtgttcagtatagatggcaccgtactctctaatattccatactacaaaaaacatggatat

SEQ ID NO: 5922 - DNA, 189 bp, Glycine max
  Clone ID: LIB3074-036-Q1-K1-A12
actctttaaaatactacaaaaagtctatttatttacaaatcaaacaatctaaccgcgggccttatattaattattattaacaacctattttctttcgcatcatcatctgcatctctcttctcatccactcctcattcttaactttcacctactacaactttcacttccataccacacttacttacattt

SEQ ID NO: 5923 - DNA, 296 bp, Glycine max
  Clone ID: LIB3074-036-Q1-K1-A2
ggttgggaataggattcgatggaaaacgggatcaagcttgattactttccgttgtgatcaattgttgtaccgatgggggtttatgaaagtggagcttcgggaaagatgggcactcgtcatgtgctgcaactcgatttgtcgcaacaagaggagaagaagataccttgatgaaacccaatcaggatgtgaacaaaggccactgctcaaactcttcgatatgcgctagctaggcaatccctttacttaatctgataattgatctcttgctaccagatctgcccttacagaatctgttg

SEQ ID NO: 5924 - DNA, 202 bp, Glycine max
  Clone ID: LIB3074-036-Q1-K1-A4
agtttacagcagcatctgttgacgacgcaaacgggggatactatcttcgaatactttgatcgcattgcaaccatgtctacgagaaaggtcacatagccaaaggaggaaaacgagactcttggcctatctgttagagatggctgcatgtctttggcgtccctagcatatatgcctactttaatgataccttgattaatgtcac

SEQ ID NO: 5925 - DNA, 428 bp, Glycine max
  Clone ID: LIB3074-036-Q1-K1-A5
gacttacagaagcacaccacagggactagaaaatccatacaatcttcaccaccaaaaagaaaataatggcaatggccagtgcaacaactctagccacaatcactgttgtggcggctagccccagtgttggcagcagaaggagtgggaagaggaatgtgaacttcatcagagggttgaattcttttggagggttgaaggctcagaacaatgtgacattactaggccttcctgtgtgcactgagcagtgctttgcaaaggtggtgagctcattgaaatatccatcatcatcatcacgtaaggggagaggtggaggtgctgccttttcaacatgcaatgctgctggtgagattttccagattgcagccatcatgaatggccttgtgcttgttggggtggcaatagggtttgtccttcttcgagtcgaagcg

SEQ ID NO: 5926 - DNA, 367 bp, Glycine max
  Clone ID: LIB3074-036-Q1-K1-A6
aggggagtgtgtgaaaaaacgagcgagcgaacagtttcaaagagaggatttgggattgggaaggcgagggattgcgctgcgtctcttcctcttctctttcgattcatccctcattcataatcttccaatccaacaacctcagcctcacactcacacatacacacatctgaacgcgtatcgtccctcccatggcttcaaagcgcatcctcaaggagctcaaggacttgcagaaagacccaccaacttcttgcagcgctggtccagtagctgaggacatgttccattggcaagcaacgattatgggtcctgctgatagtccttatgctggaggtgtattcctagtcactattcactttcctccggatta

SEQ ID NO: 5927 - DNA, 333 bp, Glycine max
  Clone ID: LIB3074-036-Q1-K1-A7
aggggcatagcatattccagtggtgtgcatttcatcgggcattcaatggccaccacagcagctctatccggaaccatggtgagcacctgcttcatgaggaggcaacctatgaccaccacaagcctaaagacattctccaacgttggtgaagctctttttggtctgaaaagtggacgacgtggtcgtgtcacttgcatggcctcggacaaggtgaagctcataacctccgaaggagaagtggagtttgaatgcccagatgatgtttttcatcgttgacaaggcggatgacaaaggcattgaacttccctactcgtgcagggccgcttcttgcgt

SEQ ID NO: 5928 - DNA, 340 bp, Glycine max
  Clone ID: LIB3074-035-Q1-K1-G11
tatggtgtattctatgtaaagaaacatcctgttttcccagccaactttaatctccttccaacaccatcatcatcatccatggcatctcaaggtcatggtaacaagctcatcgcttccacatcaccaaatagtgacagtttctctcgtctgctgtggctgtgcaatgtcatcattgcccaaagggcagtgcctgtgctcaccaactacacatgaagggtcctttctgtgtctctttgcatcgtggtcctacaactctaccaacaaattgtatgaaacgcttccaaatctcaatcctgctaataagctctgttggtatcttgatttccacatgcttattaat

SEQ ID NO: 5929 - DNA, 410 bp, Glycine max
  Clone ID: LIB3074-036-Q1-K1-A9
cacaccaaaaggtacccgttcgaacaaacatacaaacacgcgggggggcggttagaaaaaaacgacagacggggccacaccaccaccaaaacacacccactaagagggcttctcttttgaatcctccctaaggctgcttcttacaacccttatcctaatccctcaaaggcttgctacttcctccaaaccaattaaaaagccaccagtgtacaagcctccagtgtacaaaccaccagggtacaaaccaccggtttataagccaaaaccacccgcttacaagccgaaaccaccggtttacaagccaccatataagaagccaccatacaagaaaccgccttatggaaagtaccctccagtagaagacaacacccatgcctaaagcaagcaatgacgtctattatctacttaat

SEQ ID NO: 5930 - DNA, 255 bp, Glycine max
  Clone ID: LIB3074-036-Q1-K1-B10
cccacgcgtgcggacggctgaaggcgaacgacaggtaggggtctgaaaaggaacaagtagggtacaacttctataaaacaacagatggctacctctatgataagtccaccaactgataccactgtcaacaagactcggaccggcattatttctttaactacttgtctcttgggcatcgctggcttactcacaaggaaaaccgcccgtgacataacatccatggttagcaacccgtgaatactgcaatgtatgtat

SEQ ID NO: 5931 - DNA, 336 bp, Glycine max
  Clone ID: LIB3074-035-Q1-K1-C1
gacttacagaagcacaccacaggaactagaaaatccatacaatcttcaccaccaaaaagaaaataatggcaatggccagtgcaacaactctagccacaatcactgttgtggcggctagccccagtgttggcagcagaaggagtgggaagaggaatgtgaacttcatcagaggattgaattcttttggagggttgaaggctcagaacaatgtgacattactaggccttcctgtgtgcactgagcagtgctttgcaaaggtggtgagctcattgaaatatccatcatcatcatcacgtaaggggagaggtggaggtgctgccttttcaacatgcaatg

SEQ ID NO: 5932 - DNA, 366 bp, Glycine max
  Clone ID: LIB3074-035-Q1-K1-C2
gacagcatatcaataatctatggtgactatacccacattttgataattatttttctagttgataagccatggctactctaggaaagcttgaggttgacgttgatctcaagtctaacgcacacaagtactggcaaacccttaggaactccactgaaatattccccaaggccttccccaatgattacaaaaacattgaggttcttgagggtgatggcaaatcacctggttctatccgccacataagttatggtgaaagttcaccacttgtgaagtcatcctttgagaagattgacgctgttgatgaaaaaaagaaagtagtgtcgtacactatcatttatggagaacttcttcagcacttcaaaacat

SEQ ID NO: 5933 - DNA, 434 bp, Glycine max
  Clone ID: LIB3074-035-Q1-K1-C4
ccgcccacccgtccggcttgtaaaaaaacaacatatggtagggaaaaattgaaccaaaaattggggagtttctttttaaaaaagccaaccgtttataatttttacttaataaatctaatttttttaaaaagtccgatccttttaatcttccagaaaatcctggtaccgctgaaaaaaaaaaaataaattgcttttaatccgttattcccaacaatcgattttttgggaaaacatattcaagggatctatacttgttcaaagccttaaaccagttacttggaaatttttttaaaaaaagggtgcattcccccctttttttggataaatattaaaaccctttattctttttttttgatagtttcaaaataattaatttatttttttttttaaaaattggatttcaaaaaaggtaaaattttgaattttttattatt

SEQ ID NO: 5934 - DNA, 380 bp, Glycine max
  Clone ID: LIB3074-035-Q1-K1-C9
gcctcattacacatcttccaagcttcagagggcgctcaaataacttcttctcagacatggcatctcaaggtttgtgtccttctataaaaaatattcttcttttggactctgaagggaagcgtgtggcattcaattattactcacatgactggccaacaaacaatgcaaagttagcttttgagaagtttgtatttactaagactgttaatacaaatgctcgtactgaagcttaggtaacactacttgagaacaatatcattatttacaaatttgttcaagacctgcatttctttgtcactggtggtgaagatgaaaatgatctcattctatcattaattcttcaaggtttcttttatgcaaacacctttctctttaagatt

SEQ ID NO: 5935 - DNA, 405 bp, Glycine max
  Clone ID: LIB3074-035-Q1-K1-D1
ggtgcacaagggagtttgttgatctacataactaggaacagggtgatgaaaatgaaggtccttgttatcttcgttgctgcaattttggtagcatggcaatgccatgcgtacgatatgttccctctccgaatgaacactggctatggtgcccgtactccggaggtgaaatgcgcaagttggaggcttgctgtggaagcacacaacatctttggctttgagaccattcctgaagagtgcgttgaagcaacaaaggaatacatccatggcgaacaatatagatcagactccaaaacagttaaccaacaaggcttacttttatgccagagaccttgaagtccattccaaggacacatttgtgttcagtatagatggcaccgtactctctaatattccatactacaaaaa

SEQ ID NO: 5936 - DNA, 433 bp, Glycine max
  Clone ID: LIB3074-035-Q1-K1-D2
gggaggttcatggccaaaggtaaagatatccgagtgattgttattttggaatgtaccggttgtgataaaaagagtgttaataaggaatcaacgggtatttctagatatataactaaaaagaatcgacagaatacgcctagtcgattggaattgagaaaattttgtccccgttgttgcaaacatacaattcacgcagaaataaagaaatagatcaaattgatcgcttgtgtgttacccttcgaaccaaagaacttaacatgtaaaatgatctatttttcttatctatatagatagatctatctgtattctatcatttacagttgaatatatacaaatatcagtatataacaacatatattaataaaataacatcatatattaaaaaaagtcataataaaaaaaacatatcctttatagtatttcttggaataaa

SEQ ID NO: 5937 - DNA, 294 bp, Glycine max
  Clone ID: LIB3074-035-Q1-K1-D3
aggaacgcagccaagaaaagaaaatcctcacccattggcggcgtagccaaacactctgaaattctcagttatgtcgtggcaagcgtatgtggatgatcacctactgtgtgaaatcgaaggtaaccacctcactcacgccgctatcatcggccaagacggaagcgtttgggctcagagcaccaacttccctcagttcaaacctgaggaaataactgccatcaataatgactttaatgagcctggatcacttgcttcaactggattgtatattggtggcaccaaatacatggtcat

SEQ ID NO: 5938 - DNA, 342 bp, Glycine max
  Clone ID: LIB3074-035-Q1-K1-D7
tgagggaatctttggatgttctgggctcaagaaaagtggaaagaaataagggctctttatcatgattgtatgcattcaatattgagccctgtaattacagttgctaccatgataacttttcttattattgtggcctactttattgctaatatgtactgaactgatgtatgtcatgatgtaagctgtaataatttaattgatctgagctttatagaatccccttcatgtggttctgataatttcattcttttagttgttttgtggttttggcataaacttgttcaaattaataatttcatttctttgtaaattttattatttctaatattaattttaatcttt

SEQ ID NO: 5939 - DNA, 246 bp, Glycine max
  Clone ID: LIB3074-035-Q1-K1-E4
gtgatatcagcaccacattcacctgagctttttgtggggattccaaagcatggcttcccttgcaacatccactgctgctgcttcccttggcatgtcagaaatgcttggaaaccccatcaaccttagtggtgccactaggccagctccatctgcctctagccctgccttcttcaagactgtggctcttttctccaaaaagaatgctgcacctccaaaataagctgcatctgctgcttctgccaatga

SEQ ID NO: 5940 - DNA, 267 bp, Glycine max
  Clone ID: LIB3074-035-Q1-K1-E5
aaaaaaaaaaaaaaaaaaaaaaaaaaaaaaaaaaaaagaaaaaaaaaaaaaaaaaaaaaaaaaaaaaaaaaaaaaaaaaaaaaaaaaaaaaaaaaaaaaaaaaaaaaaaaaaagaaagaaaaaaaaaaaaaaaaaaaaaaaaaaaaaaaaaaaaaaaaaaaaaaaaaaaaaaaaaaaagaaaagaaaaaaaaaagaaaaaaaaaaaaaagaaaaaaaaaaaaaaaaaaaaggaaaaaaaaggaaaaaaaaaaaaaaaaaaaaaaaaa

SEQ ID NO: 5941 - DNA, 175 bp, Glycine max
  Clone ID: LIB3074-035-Q1-K1-E9
tgttacacacatcttttcctcttaagcttgctgctgtcttttcacactgcataccttaggtctttttatattataattaattttcaatatatttattgaaatagttcataacaacatatttgtggtttttcactttcaccctaattatattaccaccattaactatcttattaat

SEQ ID NO: 5942 - DNA, 276 bp, Glycine max
  Clone ID: LIB3074-035-Q1-K1-F1
gatccctacaacgtaataataaccaaaacagcagagagaagagaaggtgtagacaaacacaatctctaatggcactcaggatgtgggcttcttccactgccaatgcactcaaagtctcttctacctccagacctcatctcttgcatcctttttctttctccagatgcttgtcttccgtcttggatggacttaagtatgcagattcacacgaatgggtcaagcacgaaggctcagtcgccaccattggtatcactgaccatgcccaagaccatcttg

SEQ ID NO: 5943 - DNA, 213 bp, Glycine max
  Clone ID: LIB3074-035-Q1-K1-B5
ggctcaagtgagtttgttgatcgagataactagagcagtgtgatgaaaatgaaggtccttgttttcttcgttgctacaattttggtagcatggctatgccatgcgtacgatatgttccctcttcgaatgaacactggctatggtgcccttactcctgaggtgaaatgcgcaagttgtaggcttgctgtggaagcacacaacatctttggcttt

SEQ ID NO: 5944 - DNA, 206 bp, Glycine max
  Clone ID: LIB3074-035-Q1-K1-F2
ggcacaagtgagtttgttgatcgagataactagaagcgagtgtgatgaaaatgaagggccttggtttcttcgttgctacaattttggtagcatggcaatgccatgcctaccatatgttcccttttccaatgaacacttgctattgtgcccgtacttcggaggtgaaatgcgcaagttggaagcttgctgtggaagcacacaacatt

SEQ ID NO: 5945 - DNA, 208 bp, Glycine max
  Clone ID: LIB3074-035-Q1-K1-F3
tatgtgtctccagcacgaactatatttcataatgtttttcattgctcattatttaatggccaccacaatatctttatcctgtaccatgtctctcacttcttttatgatgaagcaactctttactaccaatatcctaaatactttctctatctcttttattttattataaaattttacaatttttttcttttattttttatctcttata

SEQ ID NO: 5946 - DNA, 270 bp, Glycine max
  Clone ID: LIB3074-035-Q1-K1-G1
gaccaacacaaacaatagtgcatagcgtttttcagggtgcattattcaatggccaccacagcagctctatccggaaccatggtgagcacctccttcatgaggaagcaacctatgacgaccaagagcctaaagacattccccaacgctctttttggtctgaaaggtggacgaggtggtcgtgtaacttgcatggccccgtacaaggtgaagctcataaccccagaaagagaagtggagtttgaatgcccagatgatgttttcattgttgac

SEQ ID NO: 5947 - DNA, 93 bp, Glycine max
  Clone ID: LIB3074-035-Q1-K1-G10
tgggggcagcataataacaagtgctgcggaactaataaagagaagcaaatgtcttcctcaaagatctcttccccatctgttaccactgtcaac

SEQ ID NO: 5948 - DNA, 315 bp, Glycine max
  Clone ID: LIB3074-033-Q1-K1-H5
gagcgagctcatatcaaatcttgttctcatgtgcctggttttgttgaaaacaaagacaatgatcccggtactattataaaaaggcagctgcacaataatttttctgggttgttctatgggttaccattcactaagccaaatcctgaatttgtacaatctgttaagagccagcttccccctgaaagtaaactcttgggtgtatgtcaggaaggactgaggtctgctgcagcagcaagtaagttagaagcagctggtttcgaaaatatagcatgcataacatttggcctttaaacttgtaaaccaggaacttttgat

SEQ ID NO: 5949 - DNA, 331 bp, Glycine max
  Clone ID: LIB3074-033-Q1-K1-H6
gattgtggttcatttgcacatttggaaagtgttgttcttctttttttcatttgcattgcaaagcaaaaaccttgcaaattgcaatggcttccaacaaggttattgccaccatcttggttctttctctccttgcctactcaacatcattcaccaatgcatgtggcacatgccacccaaaacctactccttctccccctcctccatcagggaagtgccccaaggacacattgaagctaggggtgtgtgctgatgttctaggacttgttaatgttgttgttggttcccctgtctctagcaagtgttgtgcattgcttgaaggtttggctgattc

SEQ ID NO: 5950 - DNA, 414 bp, Glycine max
  Clone ID: LIB3074-033-Q1-K1-H7
gagccaagaaaagaaaatcctcacccattttgttcgtagccaaacactctgaaattctcagttatgtcgtggcaagcgtatgtggatgatcacctactgtgtgaaatcgaaggtaaccacctcactcacgccgctatcatcggccaagacggaagcgtttgggctcagagcaccaacttccctcagttcaaacctgaggaaataactgccatcaataatgactttaatgagcctggatcacttgctccaactggattgtatatcggtggcaccaaatacatggtcatccagggtgagcctggtgctgtcattcgagggaagaagggtcctggtggtgtaactgtgaagaagaccggtgcggccttgaacattggcatttatgatgaaccaatgactccaggtcaatgcaacatg

SEQ ID NO: 5951 - DNA, 191 bp, Glycine max
  Clone ID: LIB3074-034-Q1-K1-B12
acgggaagtgtgtcttttcaacctattacaccctctattattatattccgccctgagatatctcccactattttttattgtcatcacctccccctaatttaccttttttatttaaacaacttctttaaaagaatcattaaattctatcaaactctaaaatttttcttctaaaaaatcaatatctattctac

SEQ ID NO: 5952 - DNA, 248 bp, Glycine max
  Clone ID: LIB3074-034-Q1-K1-B9
tacttctattaactctcctcaccaaaataaatacaatttctctatgaagcacaacaccactactccatcaattgacacattttctcaaacaccaaacaaatgtttacccaagattcctaccctttttaaacctaccattttgaaccattacccccccatcagtaaagaatcccaattgtataacctatctaccatcaacaattcttttatctacatgcctccgtcaccatctgaataaaaaagtgacc

SEQ ID NO: 5953 - DNA, 231 bp, Glycine max
  unsure at all n locations
  Clone ID: LIB3074-034-Q1-K1-C12
ggcgagcgacgcgtccgttngctgtactaccgtactctcttctgtttttgctaagcgtaccttccccacctctgcggccaaccttttcaaagtttctgtcctctgtgcttcccgaggtattggccaacctctcttcctttttcttaagaacaacaccctagttactgacctttccttgtaccataatgtcaactccccccgcgtttcccctgattttatccacattaacac

SEQ ID NO: 5954 - DNA, 333 bp, Glycine max
  Clone ID: LIB3074-034-Q1-K1-C9
cgcgtccgcctgcttgcagaagactacaaaaggggaatgtgcttgactttgttgtgagctataagctgcggtatcgtgaggagaatatgaacctccttcttttctttgttgctgcagtatttctggtagcatggccatgccatggcgcaagctaccaaaggttccctctcccaatgaaaactggctattgtgagcgttcttcggaggtaaaatgctcaagttttaagctctctgttgaatcacgcaacatccgtacctttaaaacctttcctgaatagtgctttaaaccaacaaaggtctacattaatggcgagcaatttacatcatactcta

SEQ ID NO: 5955 - DNA, 250 bp, Glycine max
  Clone ID: LIB3074-034-Q1-K1-D10
gctctttacatcttatttgctagtctgtactttctattttctccaccgccttgtctcattcgagagctttcgtcgttgatgtgataggaccacatcctggttggttggctctcatggctggtatttctactggtgccgcatctttctttatttcatagcgccctccttctgaggacgatttggaacaactcatgttttatattgctcaactccctcttcatcttggaaagcttgaagacttgtcattatt

SEQ ID NO: 5956 - DNA, 194 bp, Glycine max
  Clone ID: LIB3074-034-Q1-K1-H11
aatggctcccattggtaaaatctactcttactctaacaaccccagaatttctaaggggctggttgctttcctctacaacagcctcctaatatacgtccccactgacttcaccattgtatctttcaagaacccccaatacctcaagaaatttcccacccgtaaagtcccccctttctaaggtgctgtttgttttt

SEQ ID NO: 5957 - DNA, 212 bp, Glycine max
  Clone ID: LIB3074-035-Q1-K1-A1
gggcagcagaagaacaagtagttgagaactaagaaggagaagcaaatggcttcctcaatgatctcttccccagctgttaccactgtcaaccgtgccggtgccggcatggttgctccattcactggcctcaagtccatggctggcttccccaccaggaagaccaacaatgacattacctccattgctagcaacggtggaagagtgcaatgcat

SEQ ID NO: 5958 - DNA, 289 bp, Glycine max
  Clone ID: LIB3074-035-Q1-K1-A12
gaaggtgcaagagtttgttgtgagctataagctagtttatcgtgaggagaatatgaagttgtttgttttctttgttgctgcagtagttttggtagcatggccatgccatggcgcaggctaccaaaggttccctctccgaatgaaaactggctatggtgagcgttcttcggaggtaaaatgcgcaagttttaggcttgctgtggaagcacacaacatccgagcctttaaaaccattcctgaagagtgcgttgaaccaacaaaggactacattattggcgaacaatttaca

SEQ ID NO: 5959 - DNA, 232 bp, Glycine max
  unsure at all n locations
  Clone ID: LIB3074-035-Q1-K1-A2
gttccactttcattccaaagcgttattccttcttcttcttcctctccattctcttcgctcttcgatcctcgtccgggggctgctccgaataccaccaccaccacgcgccgatggccacgataggaggcttacgcgactcccaaggctctcagaacagcgtccaaaccgaggccctcgctcggttcgccgtcgatgaacacaacangaagcagaatcactttctggagttttc

SEQ ID NO: 5960 - DNA, 296 bp, Glycine max
  Clone ID: LIB3074-035-Q1-K1-A3
ggttctagggttacacgccgtcgtcgctgtttttgtgtggggcttcttcgtaggtgcagctgcaatggtgaagggacgccaaggagaacgtgtcagactctacgtgaggggtacaatccttggatacaaaaggtccaagtcaaaccagtatccaaatacatccctgatccaaattgagggtgtgaatgccaaagaagaagtagcatggtatgctggcaagaaaatggcctatatctacaaggctaaagtgaagaagaatggaagccattaccgctgcatatggggcaaggttacaa

SEQ ID NO: 5961 - DNA, 397 bp, Glycine max
  Clone ID: LIB3074-035-Q1-K1-A4
ggagggttgcttcatttgatctgcgagtggagaagagaatgtgtatgggaggaggacacggtcacggcaccacctacaaaggagttaccgttcatcacccaaagcgctggcacactatcaccggcaagggtttgtgcgtggtcatgtggttttgggtattctacagggcaaagcaagacggtcctgttgtattgggctggaggcattcttgggagggtcatcacgatgatcatggcaagggccattaagcattccttaggcatgagcttcaagaacaggaagaacagaatttgaagtgtcttgtgctgtgggtgtgctgttagattgaaatgtttactttcgatcaatacaataaatttggctgtaaaataaaaagaattctttttgcttggtttta

SEQ ID NO: 5962 - DNA, 103 bp, Glycine max
  Clone ID: LIB3074-035-Q1-K1-A5
taatactacagaaggatacattttctataagactacataagggttctgcttctgcaagactatcataatgtacggctcctataataccacataatgttactgt

SEQ ID NO: 5963 - DNA, 321 bp, Glycine max
  Clone ID: LIB3074-033-Q1-K1-H4
ggagacgagggtaaggtcgcgttgtgttgcgtcgtgtcgtgcgctgttcctctgtctgtcgtttttgttttcagaccaaaccctagctccgcatcgcaaccatgtcgaccaagcaaggtggaaaagctaagcctttgaagaaacccaagtctgataagaaggattacgacgaggttgacatggctaacattcagaagaaaaaggaagaggagaaggcgctaaaggagttgaaagccaaggcgcaacagaaaggaagctttggaggttctgggctcaagaaaagtggaaagaaataagggctctttatcatgattgtataca

SEQ ID NO: 5964 - DNA, 242 bp, Glycine max
  Clone ID: LIB3074-035-Q1-K1-A6
gacacaccaaaccaaagtaagagtgagcaacttgcagcaccatattgaaatttcttccaaggctaaacttaacttgtgtttcaattttctctccttcaccgtgtttatctccacatatttcccatgcaacccaccccccaaaactcctaaacacccacctgttccaaagccaccttccccaaatctagcataaatccccaaaaacacttttaactttggtgtgtcttctcattttttacttt

SEQ ID NO: 5965 - DNA, 108 bp, Glycine max
  Clone ID: LIB3074-035-Q1-K1-A8
cccaacaacatacaaatctataatactactcatttcgacactacaacccaccgtttgaactctctttaaaacatcaactcttaaaccctcctcccctaacaccaaaac

SEQ ID NO: 5966 - DNA, 185 bp, Glycine max
  Clone ID: LIB3074-035-Q1-K1-A9
tgtttttttacaccataataacaatttcttgagagcggagaatgataatcaaatggcttcctcaatgatctcttccccagctgataccaacttcaacctttcctaatccgtcttggttgctccattcactggcctcaataccaagtctgtctttcccaccttgtagaccaacaattacattacct

SEQ ID NO: 5967 - DNA, 309 bp, Glycine max
  Clone ID: LIB3074-035-Q1-K1-B1
gaagttgtacacgtttaaacggagttctaaatagggcggggagttttcctctctcgaatctgcgacaccgacgaatctcactaagcggaacttcgcattcagaaaatggctttaggtggaacagctcccccgagaggaagtgcagcggctactgccagcatgaggaggaggagaacaaccggtggtgcggcctctggaggagcagctggaactatgctccaactttacactgatgatgcccctggactcaagatctcccccaaatgtggttctttgtaatgagcattggctttatagcattggttgcca

SEQ ID NO: 5968 - DNA, 151 bp, Glycine max
  Clone ID: LIB3074-035-Q1-K1-B11
tgctaatagcaaggtcgtgccagcatctgccaggcgtgattgctgtatgggattggatattcgtccatattctgttaaatcattcagtgaagcattgtatactacccataccatcatatggaatggaccaatgttagtgtttgagtttgac

SEQ ID NO: 5969 - DNA, 347 bp, Glycine max
  Clone ID: LIB3074-035-Q1-K1-B2
gagcgccaatgtttttttcagaggagtttcatcttgtggtcgaaagagtttatcttatagtaagaaatcgatgtcttactccattttaaggaacaaaacaagagaacaatagcctgacaaagggtttagccataaaatcgaatccatcattgatttgagatattgataaggtgaatactcatttctcgtcaatgctaggcataatgcgggtattgggacctaaaaaagattatcttttcttcctatcttatgaactttaaggtgtatgaagtgtcatttcctatcttagattttaattttagtaggtagataaagagtccatttaacttaaggttgatctaggccag

SEQ ID NO: 5970 - DNA, 248 bp, Glycine max
  Clone ID: LIB3074-035-Q1-K1-B3
gacttgagacacaaactcacacactttgtactctggcggctttcttcttcgatccagatctctctccttctccctcaaatggcttcccttctgcaatgttccatgcccctcgtctctctttccaatcgagctctggtacccggtaccaggatctccaacccaagttcagttttcctatcaattaagggaagaagttttccatccgtttcattgcagcccagagggcgtttgttttatcttatatgtgc

SEQ ID NO: 5971 - DNA, 400 bp, Glycine max
  Clone ID: LIB3074-033-Q1-K1-F12
gagtgcacaagtgagtttgttgatcgagatggctggaaacagtgtgatgaaaatgaaggtccttgttttcttcgttgctacaattttggtagcatggcaatgccatgcgtacgatatgttccctctccgaatgaacactggctatggtgcccgtactccggaggtgaaatgcgcaagttggaggcttgctgtggaagcacacaacatctttggctttgagaccattcctgaagagtgcgttgaagcaacaaaggaatacatccatggcgaacaatatagatcagactccaaaacagttaaccaacaagcttacttttatgccagagacctcgaagtccatcccaaggacacatttgtgttcagtatagatggcaccgtactctctaatattccatactac

SEQ ID NO: 5972 - DNA, 338 bp, Glycine max
  Clone ID: LIB3074-033-Q1-K1-F6
gggcccattctctggcgagcccccgtcctacctcactggcgagttcccaggtgactacggctgggacactgctgggctttcggccgacccagaaaccttcgccagaaaccgtgagctcgaagtgatccactccaggtgggccatgctcggggccttgggctgcgtcttccccgaactattgtcccgcaacggggtcaagtttggagaagctgtgtggttcaaggccgggtcccacatcttcagcgagggtgggctggactacttgggcaacccaagccttgtccacgcccagagcatcctcgccatcttggccacccaagttatcctaatgggtgctg

SEQ ID NO: 5973 - DNA, 390 bp, Glycine max
  unsure at all n locations
  Clone ID: LIB3074-033-Q1-K1-F7
gacgatgagtcgatttgataactaagatattgttggtcgtgatattgatccaatttgatatcatcgaaatccaatttataccattgttgaattaattatcgatgaaagatttatcatctctatgggattaaatcccgaattttttattggaaatttaagagaaataaaacataataaagattatggaagtaaatattcttgcatttattgctactgcactgtttattctagttcctactgcttttttacttataatttacgtaaaaacggtaagtcaaagtgactaatttcactgaaatctgacttcttcatttttatcaatgtaatcaatgattaaaaaaaatgaaaaaggttttcactttttgtcttagtctaaaanaaaaaatattt

SEQ ID NO: 5974 - DNA, 341 bp, Glycine max
  Clone ID: LIB3074-033-Q1-K1-F8
gatggaagaagcagaaagagaagcattagcaaaagcaagaagaactagtctaagcagaaatggcctcttcagtgatggcatctgtggccctcaaacctgcccctttcactgttgagaagtcctcagttagaggccttccctccctctcaaggaactcctcttcattcagagttgtggccagtggtggcaagaagatcaagactgacaagccttatggaattaatggtggcatggctttgagggaaggagttgatgcatctggcaggaaaggaaagggaaagggcgtttaccagtttgtagacaaatacggtgctaatgtcgatggttacagtcctatctac

SEQ ID NO: 5975 - DNA, 302 bp, Glycine max
  Clone ID: LIB3074-033-Q1-K1-G1
aaagaaaggtaggtttcttacttatgaaaaggctagtggggtcttgtgctagaattgcttttttttggggagaaaaatgaaaattatcgtctaattgaatttctttgaaatagtgttgtatatagagaacatcttctatcatatctcatcgcatctttacagtttatagattgagaaagtgttccgttagtgttgtaagcgaccttgcttggttaacaatttggagagtttgcttttacacggaaacgaagactttctagaacaaatattaaaccgggcgtttatcgaagaggcaattattt

SEQ ID NO: 5976 - DNA, 236 bp, Glycine max
  Clone ID: LIB3074-033-Q1-K1-G11
gaccacacaccacacacatagtagctattatactgtgtagagtaattgcggaatctgctagaattttctaataatggcgaaagacgttgagcaggtcacagagcaaggtgaatactccgcgaaggactaccatgaccctcctccggcaccgttgatcgacccagatgagctcacaaagtggtccttgtacagagccgccatagctgagtttatagcaacacttctttttctttaca

SEQ ID NO: 5977 - DNA, 377 bp, Glycine max
  Clone ID: LIB3074-033-Q1-K1-G12
gaagacgacagaaggggagagagaatggagaagaagatgactttggttcagacgatggccactgctggcgtcttctctgcgatttcattctggtatgggttcatgtttggtagagagtcatcgcgcaaagaactctctcagctgatcgaagatctccgtcacggcggcgaaaacactccacctccctcccattcttgattgagctatctctttctttcaaatcgttacagtgtatgtctcttccaaatttccccctaacatttttgtaactagcgttgattctcaactctttagcttgttctaagtgcaccaaacaacacagtattgcagcttccttatattattaccgttatgaattatctttattagagagaatc

SEQ ID NO: 5978 - DNA, 346 bp, Glycine max
  Clone ID: LIB3074-033-Q1-K1-G2
ggatgcgaacgtaaccaggctctggttttgcggttagggtagctctttctactcaaaacaaaacaaaacatcaatttctgtttcagttcgcggagatcaatatttgtcgctgaggccgatcgtcgataaaaggcaatgtttttgtgggattggttttatgggattctagcgtcgcttggcctgtggcagaaggaggccaagatcttattcttgggcctcgataacgctggcaaaaccaccttgcttcacatgctcaaagatgagagattagtccagcatcagcctacccaatatcctacatcagaggagttgagtattgggaagatcaagtttaaagcttttgatc

SEQ ID NO: 5979 - DNA, 378 bp, Glycine max
  Clone ID: LIB3074-033-Q1-K1-G8
tacggctgaacaagataagctatccatagcagccaaagaaatgaagagtaccttgttcgccctctttctactttgtgccctcacctcttacctaccttcagccaccgctggtgatgtggtcgacactgatggtaatcctgttgaaaatggaggcacatactttgtgttgccaactataatattaaacggcggtggaatagaatatgccacatttggaaatgaaacttgccctgtcactgttgcgcaatctcgcgatcagttctgcaagggctttccgataaccatttcatccccagcccgaatccgtcacatcagcgaaggccttagtttgaacattgggttcactttcgcattcccgtgttcccccgcttctgagtg

SEQ ID NO: 5980 - DNA, 337 bp, Glycine max
  Clone ID: LIB3074-033-Q1-K1-G9
ggttctagtgtgtgattgtttgttgttgtagcgtcggcttcttcttttgttgttctgtgtttgtgtttgttttctctctcacctgaaaatgtcttgctgcggtggtaactgtggttgcggaagctcctgcaagtgcggcaacggctgcggaggctgcaagatgtacccagatttgagctacactgagtcaaccaccaccgagaccttggtcatgggagtggcacctgttaaagctcaatttgagggtgctgaaatgggtgtgcccgctgagaacgatggcttcaaatgtggaccaaactgctcctgcaacccctgcacttgcaagtgaggtgtttgg

SEQ ID NO: 5981 - DNA, 151 bp, Glycine max
  unsure at all n locations
  Clone ID: LIB3074-033-Q1-K1-H10
cgggcatttttatagaattgtaaaaaggaaaggggaaggaagcaaagcaaggaangagagtgcatctctaccatagcagcaccagacatttataaaagctctttcccttccctgggatagctcatactctttcaaaaaacccttttttttt

SEQ ID NO: 5982 - DNA, 325 bp, Glycine max
  Clone ID: LIB3074-033-Q1-K1-F1
ggttcagcgccaaaacgaacaccacctaaccagctcgtgagtcttcccgccgtagatctgttccttttcgccgttcctccatggccgacgacttcgaattctccgacaaagtccctccttccttcgatcgcgtgggttcaaaagggttcaacccagcattaattgttctccttcttgttggtgggttgctgttgatattcctcgttggaaattatgtactatacacatatgcacagaagaccctccctcctagaaaaaaaaagccaatctcaaagaagaagatgaaaaaggagagactgaagcagggcgtctctgcacctggaga

SEQ ID NO: 5983 - DNA, 368 bp, Glycine max
  Clone ID: LIB3074-033-Q1-K1-H12
gttgcatattaaataaactgcaaccgtgacaaaagtggcgtagcaatagcatactcttactctgattcgttagtgaagaaaaatggcaacaatcatcgtcggcaccccaactacatcaatcactcgcacaggtcatgtgctcaaacgacctgttggggcctcatcctctaccgttcttggattgccagcaatggccaaggcggggagagtgaggtgctccatggaggaaaagccttcaagcagctcaaacctagggatgggggcatccttgttagcagctgcagctgccgcaaccatgtcaagcccagcaaccatggctttggttgatgagagactcaacactgaaggaactgggctttcctttgggc

SEQ ID NO: 5984 - DNA, 406 bp, Glycine max
  unsure at all n locations
  Clone ID: LIB3074-033-Q1-K1-H2
ggcacaagtgagtttgttgatcgagataactagaaacagtgtgatgaaaatgaaggtccttgttttcttcgttgctacaattttggtagcatggcaatgccatgcgtacgatatgttccctctccgaatgaacactggctatggtgcccgtactccggaggtgaaatgcgcaagttggaggcttgctgtggaagcacacaacatctttggctttgagaccattcctgaagagtgcgttgaagcaacaaaggaatacatccatggcgaacaatatagatcagactccaaaacagttaaccaacaagcttacttttatgccagagacctcgaagtccatcccaaggacacatttgtgttcagtatagatggcaccgtactctctaatattncatactacaaaaaacat

SEQ ID NO: 5985 - DNA, 94 bp, Glycine max
  Clone ID: LIB3074-033-Q1-K1-C7
agttcatcctctgttgcttatcagccacctcggggaggttttggaaacaaaaaaggattctctcttcttttcttcattaagtccaattctatta

SEQ ID NO: 5986 - DNA, 402 bp, Glycine max
  Clone ID: LIB3074-033-Q1-K1-C8
ggcacaagtgagtttgttgatcgagataactagaaacagtgtgatgaaaatgaaggtccttgttttcttcgttgctacaattttggtagcatggcaatgccatgcgtacgatatgtcccctctccgaatgaacactggctatggtgcccgtactccggaggtgaaatgcgcaagttggaggcttgctgtggaagcacacaacatctttggctttgagaccattcctgaagagtgcgttgaagcaacaaaggaatacatccatggcgaacaatatagatcagactccaaaacagttaaccaacaagcttacttttatgccagagacctcgaagtccatcctaaggacacatttgtgttcagtatagatggcaccgtactctctaatattccatactacaaaaa

SEQ ID NO: 5987 - DNA, 426 bp, Glycine max
  unsure at all n locations
  Clone ID: LIB3074-033-Q1-K1-D10
gaagtcatgacgaattgatcataactcttcctttcctggatcgtttcatttagaaaacatggacaccgtgacactgtcactcctttctctccctccggttccggtccgtacagtgtccgcgtctgcatcaacctcgtcctctgtccctctcactcactcctactcctgctcggccaggcagaggctctcctctcacagaacaagactcagtttccggaatcattcctctgcggttccaaaacttacggtgacatgcggtgcggctgtgacggagatcaacgagacccaattcaaagacacggtgctgaaggctaaccgtccggttcttgttgagttcgtcgctacttggtgcggtccttgccgtctcatctctttcgncatggaatccctcgctagggatatgaagacagattaacggttgtaaag

SEQ ID NO: 5988 - DNA, 428 bp, Glycine max
  Clone ID: LIB3074-033-Q1-K1-D12
gaacaattcagttgcttactaatactaatctcttaagtctctttggccatttctttagtaacattaagataatgtattctgtggaaatggcaccttatggtagattcattgctaacattttgatagctgtgatgtttgtttgcttgttttttgtgaccaacattgtggcacaggattcagagattgctcctacaggtcaattggaggctggaactgggtttgatttgcctgtttctaaggtgatgatgtgttcttcagtgttggcatctcttttggcattcatgttgcagtgaattggaagacagtgggtttcaaatttgaacttgtttgggataatcttactttgtatgtgggttaaaattcatatggttatatatatactatatactatatgtttggttgttgaaaaatggactgtatttttgggc

SEQ ID NO: 5989 - DNA, 305 bp, Glycine max
  Clone ID: LIB3074-033-Q1-K1-D3
gcattacacaagtttatgaccatcagcgggcgagttggtgaagcaaagtcaactcactggaaactcggttgaactcggtgtgtgtagaaatggcgaaacttgaagccaagctagggatgatcttgtactcggtgggtcagttcttctccggcaaggaccatcttccttattgtgactatgacctcgtagctggatgtgaaagagaggtcttggaggcagaaaaacaatcatcttaagagtatatgcaagactgtctactgcgtttatcatgggctcttgttcacttcaaacacccacaagatgtg

SEQ ID NO: 5990 - DNA, 339 bp, Glycine max
  Clone ID: LIB3074-033-Q1-K1-D5
gtggacgaacgcatggcatgggccctcagcttatcttaccaacaatcttccattaccggggggtggtccgagtttggtactacagatggaggccaaggcacccacctcacatggacactcgcgtgtgccatgcagattctgcgcatactgatgaactggatgaagagtttgacacatttccaaccaccaggccttcagacatcgtgaggatgcgatacgacctacttagaagcattgctgagaggatacagactgtggttggtgatttgggcactcaaggcgagaggctgcagtctttgctcaactggagagatccaagagccactgccctctttgtga

SEQ ID NO: 5991 - DNA, 352 bp, Glycine max
  Clone ID: LIB3074-033-Q1-K1-D7
gacaccactaaaatatctctctattattctcgttttcagatatgcagatcttcgtcaaaaccctaaccggtaaaacgattacgctagaggtcgagtcctccgacacaatcgataacgtgaaagctaaaatccaagacaaggaaggcattccaccggatcagcagcgtttgatcttcgccggtaaacaactcgaagacggcagaactctcgccgattacaatatccagaaagaatcgacgctccacctcgtcctccgccttcgcggtggcatgcaaatcttcgtcaaaaccctaacccgtaaaacgattacgctagaggtcgagtcctctgacaccatcgataacgtgaaagc

SEQ ID NO: 5992 - DNA, 423 bp, Glycine max
  Clone ID: LIB3074-033-Q1-K1-D9
gacagcagtaaagtgagttaaaagaaccgataatagttggtccttcactctccgctctctctgccactgagccaagaagatggcctcacaggtttgcaaatctgcttccagagccgcgaggtcccttctatcctctcgttttcactctcaaggacgtgcgcttggggctgctgcggctgtttcattgagcagcaaagtgcctcttttttacggaaagaacggttctggaaatggatccgcttcttcatcatcatcatcatcatggatttcaggagctcttgctcttcctgccgcagcttacatgttccaagatcaggaggtgcaggcagctgagcttgagcgcactttcattgccattaaagcctgatggagtgcagagaagcctgatttctgagattatatctcgctttgagcggaaagggt

SEQ ID NO: 5993 - DNA, 401 bp, Glycine max
  unsure at all n locations
  Clone ID: LIB3074-033-Q1-K1-E11
gacaccaacaccaaaacaaacccactaagatggctgcctttgtatccttcctagtgctgcttcttgcagcccttatcctcatgtctcaagggcttgctacttactacaaaccaattaagaagccaccagtgtacaagcctccagtgtacaagccaccagtgtacaaaccaccggtttataagccaaaaccaccggtttacaagccgaaaccaccggtttacaagccaccatataagaagccaccatacaagaaaccaccttatggaaagtaccctccagtagaggacaacacccatgcctaaagcaagcaatgaggtctattatctacttaataaataagaggaacttgcttgtgttntctagcattgtggtttacaacttcgtagcaatgcatattcttg

SEQ ID NO: 5994 - DNA, 145 bp, Glycine max
  Clone ID: LIB3074-033-Q1-K1-E12
tatttttgtgagaagacgacagaaggatacgggggcggctttactacatatggtggcacaatgtattttgttgatcgagataacttgaaacatcttgattaaaatgaacgtacttgtttttttctttgctacaattatggtagca

SEQ ID NO: 5995 - DNA, 202 bp, Glycine max
  unsure at all n locations
  Clone ID: LIB3074-033-Q1-K1-E2
agactacaacctgcgggagagtactttcaaaatgcagacagacttaacacttcgctgcccccaacggtgtgccagntgcacccacaaagagtgtctaccatatgaccatctttgccaccaacatcgaagcgctgcgtgcctcacctcgttactctgcgattaaggatgcaacgcgggagaccgacactttaactgttgacta

SEQ ID NO: 5996 - DNA, 387 bp, Glycine max
  Clone ID: LIB3074-033-Q1-K1-C6
caacataggtcatcgaaaggatctcgaagacccaccaacgcacgaaagccgggatctttcagaaaatggattcctattcgaagggtgcataaccgcatggataagctcacactaacccgtcaatttgggatccaattcggttccttaggaggtatcgggaaggaattttggaatgtaataatatcgattcatacagatacagaagaaagggttctctattgattcaaacgctctacctacgagatagggatagagaaagaggaaaaaaccgaggatttcacatagtacttttggtcgaaaaaatcgatctgatttttttcgtacttttcgctcaatgatgaaatgggtcagattctacaggaccaaaccttgtgggagttaaggaat

SEQ ID NO: 5997 - DNA, 113 bp, Glycine max
  unsure at all n locations
  Clone ID: LIB3074-033-Q1-K1-E4
attactattactgatcaatcaaaatatctatcaaaagtaaaaagcgaagagaagggaaaaactttaatttttttatggtaaaaaattcaattatacctgttatttcacangag

SEQ ID NO: 5998 - DNA, 333 bp, Glycine max
  Clone ID: LIB3074-033-Q1-K1-E6
gacaccaacaccaaaacaaacccactaagatggctggctttgtatgcttcctagtgctgcttcttgcaggccttatcctcatgcctcaagggctggctacttactacaaaccaattaagaagccaccagcgtacaagcctccagtgtacaagccaccagtgtacaaaccaccggtttataagccaaaaccaccggcttacaagccgaaaccaccggtttacaagccaccatataagaagccaccatacatgaaaccaccttatggaaagtaccctccagtagaggacaacacccatgcctaaagcaagcaatgaggtctattatctacttaat

SEQ ID NO: 5999 - DNA, 340 bp, Glycine max
  Clone ID: LIB3074-033-Q1-K1-E7
ggccactacttgcttccacttctgattcagggactgttaggcattccacattctcaaccccgaaccctaagagcagagcgaaaatgacaaccaccttcgcgaccgtcgcaggactcggtggcgcattactgtcatccacctcatctcgtctcacctcagggtttgtgaaatccccagtgattgctaggaattccttgaggcaagctgtggcaatgggaaatgggaggattacatgctttgagaggaattggctgcgggcagattacagtgtgattgcgtttgggttgattggttggctagcaccctcaagcataccggttatcaacggtaaaagtctgac

SEQ ID NO: 6000 - DNA, 119 bp, Glycine max
  Clone ID: LIB3074-033-Q1-K1-E8
gcggacggtacagaggagccaagacgacggacgcgtgcaggcgacataagaccacagaaagagagggacgtaaaaacacgacacagggcgacggttgacaacagacggacgggggaaac

SEQ ID NO: 6001 - DNA, 339 bp, Glycine max
  Clone ID: LIB3074-033-Q1-K1-E9
gagcgaaccatataatttaatttaatttgtgtccacatgagaacgtcgtgacctgcattttctatctcgcaacaccgcgataatggtataaaatagtttcagatacgttgcgttgattgattggtatgaagtgattgactttttttcttcttctattctcacacatacccatctactccttccctcatggctgaacaatcttccaactccatttacgatttcactgtcaaggacatcagtggaaatgatgtgagtctgaatgattacagcgggaaggttctactgattgtgaatgtcgcctctcaatgtggtttgacacagacaaattaccaagaattg

SEQ ID NO: 6002 - DNA, 282 bp, Glycine max
  Clone ID: LIB3074-033-Q1-K1-A9
agaagggggattacgattatttttagtcccaaagagcgtgcgtgatattcaagaccggcttggctcatgaacaggaacaaaaaaaccacctcttcggcatcaaagatctcggtcacaagactctcctttagagtgatgcactctatcagaatatacttgaaaccagtgtctatccaagagagcacgagtgcttgaaagagatacgcaagatgactgcaaaacacccactgaacatcatggccacaccagcagacgaaggacaacttctgagcatgctttgta

SEQ ID NO: 6003 - DNA, 299 bp, Glycine max
  Clone ID: LIB3074-033-Q1-K1-B11
gactggaattgaaggaaaaatcaatgcggggaacagtgatccaagtctgagaaaccggactgggccagttcagctgccatacactttgctccatcgttcaagtgaggaagggttgactttcaaaggaattcccaacagtatctctatctaattaaaaagagtttgtggtttccttatctatgttgtacttctgaataacatagactttatgcatgtctatgcgtaattattgcctgaacttctgcactattgtatttggatgctctcggttttcatataataaagtgtgttctcactta

SEQ ID NO: 6004 - DNA, 223 bp, Glycine max
  Clone ID: LIB3074-033-Q1-K1-B12
gattatatttgagttcaaacaaatcaaagccgggggcaccttcaacttctctattgttctctccgtctccctagccttctttttggtgctacttaccaaggcacactcgaccgatacctgttctttcaccttcaacaagtttaacccagtccaaccaaactttatgctccaaaaagatgctagtatttcattctctggggttttacaacttaccaaagttgtc

SEQ ID NO: 6005 - DNA, 316 bp, Glycine max
  Clone ID: LIB3074-033-Q1-K1-B3
gaatgcttactgtgaccgacagtcggtggatttcaactccattgcttttctgtttgatggacgccgcctccgagctgagcagactccagatgagttggaaatggaggacggggacgagattgatgccatgcttcaccagacaggaggttctgttgtctgaaggatgtgattactttgctcctcattataagtaggaattagttaacttagagctatgtatggcataagatacatattttattatctgctattatatacagcttttgccggtggattttggaggcattgtgcttcctcttcaatatgatgattatga

SEQ ID NO: 6006 - DNA, 285 bp, Glycine max
  Clone ID: LIB3074-033-Q1-K1-B4
gaagttttgtggtgtggtttagtgtcaaatggcggcgagtagaagcacttttcctctgatgaaatacttgagagtgcgcgtcgacgctcttccccgcaacactcccttaaccctcgctcccaactttttgattcgccgcttctgtgaagaggttaggggttgttttctcgacaagtctgaggtcacagatcgcgtcatttcctgcgtcaaaaacttccagaaagttgatccttcaaaggttaaccctaatgctcacttccagaatgaccttggattggacagttt

SEQ ID NO: 6007 - DNA, 350 bp, Glycine max
  Clone ID: LIB3074-033-Q1-K1-B5
ggttctagtgtgtgattgtttgttggtgtaactcgttcttcttcttttgttgttctgtgtttgtgtttgttttttctctcacctgaaaatgtcttgctgcggtggtaactgtggttgcggaagctcctgcaagtgcggcaacggctgcggaggctgcaagatgtacccagacttgagctacactgagtcaaccaccaccgagaccttggtcatgggagtggcacctgttaaggctcaatttgagggtgctgaaatgggtgtgcccgctgagaacgatggctgcaaatgtggaccaaactgctcctgcaacccctgcacttgcaagtgaggtgttgggagagcaagcttca

SEQ ID NO: 6008 - DNA, 295 bp, Glycine max
  Clone ID: LIB3074-033-Q1-K1-B6
ggagggagaaagtcctagtgaggtgtgtatacaattactatagccacatatatacacacagtagtagttaaagtcttaaagattagaataagatcagtgatggagagaaagttcatttcagtagttgttttgggagtatgtttggtgctgggaatgtcccaatatgttgatgcaaggaacttggagaaaaaatcaaaggaagaggtgaagaagccagaatcgtgcttagatggagggtccattggtggtgttgggggcattggcggcattggcggtgctggtggaggtggtggtg

SEQ ID NO: 6009 - DNA, 320 bp, Glycine max
  Clone ID: LIB3074-033-Q1-K1-B7
aggggcacaagtgagtttgttgatcgagataactagaaacagtgtgatgaaaatgaaggtccttgttttcttcgttgctacaattttggtagcatggcaatgccatgcgtacgatatgttccctctccgaatgaacactggctatggtgcccgtactccggaggtgaaatgcgcaagttggaggcttgctgtggaagcacacaacatctttggctttgagaccattcctgaagagtgcgttgaagcaacaaaggaatacatctatggcgaacaatatagatcagactccaaaacagttaaccaacaagcttacttttatg

SEQ ID NO: 6010 - DNA, 351 bp, Glycine max
  unsure at all n locations
  Clone ID: LIB3074-033-Q1-K1-B8
ggcagcagaaaaacaagtagttgagaactaagaagaaggaaatggcttcctcaatgatctcctccccagctgttaccaccgtcaaccgtgccggtgccggcatggttgctccattcaccggcctcaaatccatggctggcttccccacgaggaagaccaacaatgacattacctccattgctagcaacggtggaagagtacaatgcatgcaggtgtggccaccagttggcaagaagaagtttgagactctttcctacctgccaaaccttgatgatgcacaattggcaaagggaagtagaataccttcttaggaagggatggattccttgctgggaantcgagttggagcac

SEQ ID NO: 6011 - DNA, 312 bp, Glycine max
  Clone ID: LIB3074-033-Q1-K1-B9
agcacgaaaaattgagcgtttcttatcacaaccttttttcgtagcagaagtttttaccggttcgccggggaaatatgttagtctagcagaaacaattagagggtttaaattgattctttctggagaattagatggtcttcctgaacaagccttttatttggtaggtaatatcgatgaagctactgcgaaagctacgaacttagaaatggagagcaatttgaagaaatgactttaaatctttgtgtactgacccccaatcgaattgtttgggattcggaagtgaaggaaatcattttatctactaatagcgga

SEQ ID NO: 6012 - DNA, 361 bp, Glycine max
  unsure at all n locations
  Clone ID: LIB3074-033-Q1-K1-C1
actcagcagtagcaaacaaaattcttcgtatttggttcttgcttttttctttttgaaccacaaaatggccgacgacagcacagctacctgcatcgacatcctccttgccatcatcctccctcctctcggtgtcttcctcaagtatggatgcaaggtagagttctggatctgtttggtgcttactctttttggttacattcctggaattatctatgctgtctatgctatcaccaagtgatcatattcatcacctcttgtagacaatgaataatttgtcaaagtacaacggttatgcatgtttctcaactccagcattgatataatcgtttgatctcagaacaatgngattcttttttgtttc

SEQ ID NO: 6013 - DNA, 223 bp, Glycine max
  Clone ID: LIB3074-033-Q1-K1-C10
gcaccaagtgaaccaatatggccggggccctatacaaccaaaccctaacacacacccatttgattcagtttccatggctagcctcaaggttgcatttttggctgcagtgctctgcatggttgtggtgagtgcacccatggcacatgcagctatcacgtgcgggcaggtgactagtagctctgccaattgcattggttaccttcagaagggaggaacgccgtct

SEQ ID NO: 6014 - DNA, 294 bp, Glycine max
  Clone ID: LIB3074-033-Q1-K1-C12
gacaagaccacagagagggcgtgaagctctaaaccactgtcaagtatggcactttcggggtggtcttttagctgaattagaccctgcttatcccataagctaaacttaccacatacaaattgtttgacacgcaacactgcaacttcatcttacaacactgtcttttgtgcattggagacacacctcaaaagagaaatcttttgccatagaataccgctactgttgggcgtatgagcattcacttggaatctacaaccaataaatttggtctttgctcaagaaaaaccagacaga

SEQ ID NO: 6015 - DNA, 381 bp, Glycine max
  unsure at all n locations
  Clone ID: LIB3074-033-Q1-K1-C2
ggctgacaagccaatcctttgtgtaggtgctcaaccctagtaagccgcaatggtgaagtactcaagggagcctgacaatccaactaagtcttgcaaggctagaggcgccgaccttagggttcattttaagaacacaagggaaactgcctttgcaatcaggaagttgcccttggtcaaggctaaaaggtacttggaagatgttcttgcccacaagcaggcaattccattcagacgtttttgtcgaggtgttggaaggacagcccangctaagaatagacactctaatggccaaggacggtggcctgtcaagtcagcaaaaatcattcttgatttgctcaaaaatgctgagagcaatgctgaagtgaaaggttggatgttgat

SEQ ID NO: 6016 - DNA, 318 bp, Glycine max
  Clone ID: LIB3074-033-Q1-K1-C3
acagtcaattaagatacaattgtttgccatgtttcctgttcaaattgatggagagccttggtttcagcaaccctgcacaattaacataacccatcatggccaggctttcatgttgaagagggtggctgaggaaccccttggccctgcatctgcaataattgctgaagtgcttgagaatgctgaaacacataatgtaattaatgcttcacaaaagcgagctcttcttcatgaaatggcactgaggctgtcctagaattctctccaccctgcgaatgtgattaaagattttgtatttcttttgaaatatattttgcacac

SEQ ID NO: 6017 - DNA, 291 bp, Glycine max
  Clone ID: LIB3074-033-Q1-K1-A7
ggtacaagtgagtttgttgatcgagataactagaaacagtgtgatgaaaatgaaggtccttgttttcttcgttgctacaattttggtagcatggcaatgccatgcgtacgatatgttccctctccgaatgaacactggctatggtgcccgtactccggaggtgaaatgcgcaagttggaggcttgctgtggaagcacacaacatctttggctttgagaccattcctgaagagtgcgttgaagcaacaaaggaatacatccatggcgaacaatatagatcagactccaaaca

SEQ ID NO: 6018 - DNA, 290 bp, Glycine max
  Clone ID: LIB3074-033-Q1-K1-C4
ggagagagagcaaaacatattattttcattttcatctttttttgagtatcaacaaatggcaaccactgtgatgaccactctcccccaattcagtggtcttagaccccaattctcagctgcccctgtgaagaacttggttgctgtgcaacccatgagtcgcaaggggaagggtgcattgggagctcgatgtgactacattggttcatccactaatctgattatggtggcttctacaaccctgatgctgtttgctggaaggtttggattggctccatcagcaaacaggaaag

SEQ ID NO: 6019 - DNA, 307 bp, Glycine max
  Clone ID: LIB3074-033-Q1-K1-C5
ttataatggggagagagagcaaaacatattatgttcggtttcatctttttttgagtatcaacaaatggcaaccactgtgatgaccactctcccccaattcagtggtcttagaccccaattctcagctgcccctgtgaagaacttggttgctgtgcaacccatgagtcgcaaggggaagggtgcattgggagctcgatgtgactacattggttcattcactaatctgattatggtggcttctacaaccctgatgctgtttgctggaaggtttggattggctccatcagcaaacaggaaagccactgca

SEQ ID NO: 6020 - DNA, 260 bp, Glycine max
  Clone ID: LIB3074-031-Q1-K2-G5
gcttggggtgccctggatcacattgaacaatggtgaagctgggccgtcttggcagcagtgagggtgtcactggaactattcacttcttcaggaggagtggtccaaccaccgaactggatcttgctggtcttaagcctggtctcaggtttcatgtccatgccttggggacactacaatggtgctttaactgatcacatttaatctataacaggacatgtcccctgagatagatcgcatgctgtgatcttggatgtaatgtc

SEQ ID NO: 6021 - DNA, 325 bp, Glycine max
  Clone ID: LIB3074-031-Q1-K2-G7
ggttctagtgtgtgattgggtgttgttgtaactcgttcttcttcttttgttgttctgtgtttgtgtttgttttttctctcacctgaaaatgtcttgctgcggtggtaactgtggttgcggaagctcctgcaagtgcggcaacggctgcggaggctgcaagatgtacccagacttgagctacactgagtcaaccaccaccgaaaccttggtcatgggagtggcacctgttaaggctcaatttgagggtgctgaaattgggtgtcccgcttaagacgattgcttgaaatgtggaccaatctgttcctgcaacccctgcacttgcaag

SEQ ID NO: 6022 - DNA, 369 bp, Glycine max
  Clone ID: LIB3074-031-Q1-K2-G8
tttcagcatatcaataatctattttatactatggccacattttgataattatttttctagttgataagccatggctactcgaggaaagcttgaggttgacgttgatctcaagtctaacgcagacaagtactggcaaacccttaggaactccactgaaatattccccaaggccttccccaatgattacaaaagcattgaggttcttgagggtgatggcaaatcacctggtttctatccgccacataagttatggtgaaggttcaccacttgtgaagtcatcctttgagaagattgatgctggtgatgaaaaaaaagaagttgtgtcgtacactatcattgatggagaactccttcagcactacaaaaaca

SEQ ID NO: 6023 - DNA, 281 bp, Glycine max
  Clone ID: LIB3074-031-Q1-K2-G9
tgttagattgagtgatacgcgtcacattgtgaggtaatataaaaatggcaggggcggctgccgtgaccgtgctactcccacctaggattccgaccaccaccaacggtacccgctgctctgctttgccttctataactactagcgcttacaacaaaaaatccattttgtcactacccttactacaacactagatgacgctcttaaccacttatgctgtgtaaaacagaactgctcaaaaggaatcgtcctcagtagatgccaatgatgcgttcacagatttg

SEQ ID NO: 6024 - DNA, 385 bp, Glycine max
  Clone ID: LIB3074-031-Q1-K2-H1
gtgatccactctctgagccccaatctcttgagcagcagaatcttcaggccaagccaggttagcaagcacaacacaaccccgaaatggcttctgcttctgttcccatggctttctcgctgagctctgttatcaacaacaacaagccttcatccgaagccttcttcatgccactacccctacgacaaccaaagaggaccctcttcaccacaaaggcagtgtcaaactccaaggctcaaatcaatgcatctttgaaggagaaggcagttgcaggactcacagcagcttctgcgacagcatctatggtggttccggaggtggctcatgctgctggatatgagttccccccttccctcaagaacttctgctaagcatctttgctggtggg

SEQ ID NO: 6025 - DNA, 380 bp, Glycine max
  Clone ID: LIB3074-031-Q1-K2-H10
gaagggtttgaactaaattgtgagaaacaacagagggaggaagcaagaaaccgaagagaagaaaaaatgccgtgcctcaacctcaacaccaacgtgtccctcgacggcgtcgacacctcttccatcctcgccgaagccacctcctccgttgccaacatcatcggcaaacccgcggcctatgtgatgattgtactgaaaggatcagtacccataacttttggtgggaatgaacagccagcagcttatggagaattggtgtccattggtggtcttaaccctagtgtaaaacaaggaacttagtgctgcaattgctttaattcttgaaaccaaattgtcggtacccaagtcagggtcttcttgaaattctatgacacccaagg

SEQ ID NO: 6026 - DNA, 107 bp, Glycine max
  Clone ID: LIB3074-031-Q1-K2-H12
ttacgtctttttaatttaacggagggcacacggaaacagtctctttgtattcaaccctacttttccttttccgtcatatcgattgaataattatgatccaatatatg

SEQ ID NO: 6027 - DNA, 379 bp, Glycine max
  Clone ID: LIB3074-031-Q1-K2-H2
gagccatactctgattcattagtgaagaaaaatggcgaccatcatcgccggcatcccaactacatcgatcactcgcgcaggtcttgtgctcaaacgacctgttggagcctcgtcctctaccgttcttggattgtcagcaatggctaaggcagggaaagtgaggtgctccatggaggaaaagccttcaagcagctcaaatatagggatgggggcatccttgttagcagctgcagttgccgcaaccatgtcaagcccaaccatggctttggtggatgagagactcagcactgaaggaaccgggctttcctttgggcttagcaacaaccttcttggttggatcctgtttggtgtcttcggtcttatatgggctcttctactt

SEQ ID NO: 6028 - DNA, 367 bp, Glycine max
  Clone ID: LIB3074-031-Q1-K2-H3
ggtgtgagtgaagaagcagagggagtggcggcattaaaaatgcagatcttcgtgaaaactctgacagggaagactataaccctcgaggtcgagagcagcgacaccatcgacaatgtcaaggccaagattcaagacaaggaaggcattcctccggatcagcagcgtttgattttcgccggaaagcagcttgaagatggaaggaccctggccgattacaacatccagaaggaatcaacccttcatctcgtcctcaggcttcgtggtggcatcattgagccttccctcatggctttggctcgcaaatacaatcaggacaagatgatttgccgcaagtgctacgcccgtctgcatcctatggctgtgaact

SEQ ID NO: 6029 - DNA, 313 bp, Glycine max
  Clone ID: LIB3074-031-Q1-K2-H4
ggcacaagtgagtttgttgatcgagataactagaggcagggtgatgaaaatgaaggtccttgttttcttcgttgctacaattttggtagcatggcaatgccatgcgtacgatatgttccctctccgaatgaacactggctatggtgcccgtactccggaggtgaaatgcgcaagttggaggcttgctgtggaagcacacaacatctttggctttgagaccattcctgaagagtgcgttgtagcaacaaaggaatacatccatggcgaacaatttagatcggactccaaaacaattaaccaacaagcttacttt

SEQ ID NO: 6030 - DNA, 371 bp, Glycine max
  Clone ID: LIB3074-031-Q1-K2-H7
ggaagtatagattgaacacacacatagaaacccaacaacaagaatgaagaagatgattctaaccctcttcttcaatatcattttatctctcctctccctctcccacgcctccgtggtggatttctgcgtagcagactacacaggccccaatggccccgcagggtactcatgcaagagcccagcaaaggtcacggtggacgacttcgtctactccggccttggcaccgccggcaacacctcaaacatcatcaaagccgcggtgacgccggcgttcgacgcgcaattccccggcgtcaacgggctttgaatcttcattgcacgcctaaacccagcagccggtggagtcatcccttttcacacgcaccctggtg

SEQ ID NO: 6031 - DNA, 366 bp, Glycine max
  Clone ID: LIB3074-031-Q1-K2-H8
agatacatatgccattcacataccatgaagagacgggatatgctggagaaactaaagagtatataccccaactacaaataccctgcgaagtatactgaggtggatgattacataagtttcagctcagagaaactgcaaaggttgggttggaaatacaggtcactggaggaaacactcgttgattctgttgagagctatcgggaagctggccatctgcaatcagaataaatgtgacttagtagaatagaataaaactaagtgctatatgatagtagatacttcagttttttaaaaatcttattaggattcgattcgattctagtgtgagtatgaaaaagactatataatgagggatgttgtaggtag

SEQ ID NO: 6032 - DNA, 205 bp, Glycine max
  Clone ID: LIB3074-033-Q1-K1-A1
ggttcaccctatttacaaacttttgtttcctcactatcgtgacaccatgaacattaattcacttgcccgcaaatccttggtcaatgcagacggtattatagagaaaacattcttgtggggtaggtactctttggaaatgtctgctgttatttacaaggactgggttttcactgatcaagcattgcctaatgatcttgtcaagaga

SEQ ID NO: 6033 - DNA, 266 bp, Glycine max
  Clone ID: LIB3074-033-Q1-K1-A11
gagagaaagagagagaaagatggggaagcgtggtcgtggtggttcggcggggaacaagttccgcatgtcgctgggtcttccagtggcggtgacggtgaactgcgccgacaacacgggggcgaagaacctctacatcatttcggtgaaagggatcaaaggccgtttgaaccgtctttcctcggcctgcgttggcgacatggtgatggccaccgtgaagaagggaaaacccgatctgaggaagaaggtcttgccagctgtcatcgttc

SEQ ID NO: 6034 - DNA, 371 bp, Glycine max
  Clone ID: LIB3074-033-Q1-K1-A12
gattcagattattatacattgcaaaaatggcgtagtcaccatgacagcttccatccttggctgcccagccgtcaccaaccggtcggcagcgacgcagaggagatcagtggtagtgaatgcagccagcaaatctgttgaaggggaaaaggtcagttatgacaacaatggtagcaatgcaaggaggaacttgatgttcgccacggcggcggctgctgtttgctcttttgctgcagggatggcattggcagatgagcctaaaccaggaaccttggaagccaagaaaaagtatgccccggtttgtgtcaccaatcctacagctatgatttgtcgcaattgaagaacttttttgtttcacttttggaattggaaat

SEQ ID NO: 6035 - DNA, 308 bp, Glycine max
  Clone ID: LIB3074-031-Q1-K2-G4
gagagttatcgatccctttggggagataagaaaatgtggcttgtgcagctctcaaccccatttctgaacggccatggccatggctccagccttctctggaaacccagttcggcggtgactcatacccactgggccccgccgagtttgctgcctcaaatcaatgcgatgaagacgatgcagggaaaagtggtgtgctccacgaacgacaagacggtggcagtggaggtggtgcggctggcccctcgcccaaagtacaagaggcgcgtgagggagaagaagaaataccaggcccacgatcccgataacca

SEQ ID NO: 6036 - DNA, 253 bp, Glycine max
  Clone ID: LIB3074-033-Q1-K1-A2
gatagaagaagcagaaagagaagcattagcaaaagcaggaagaactagtctaagcagaaatggcctcttcagtgatggcatctgtggccctcaaacctgcccctttcactgttgagaagtcctcagttagaggccttccctccctctcaaggaactcctcttcattcagagttgtggccagtggtggcaagaagatcaagactgacaagccttatggaattaatggtggcatggcttttgaggaaggagttga

SEQ ID NO: 6037 - DNA, 146 bp, Glycine max
  unsure at all n locations
  Clone ID: LIB3074-033-Q1-K1-A3
gcccctccgcccgatgtcnatcaagggaaatcccttggctctcgttggagtagnaagcagatgaaagatagggattggaatcgttttctgtctgaagttaaaggggtaaggatatagtttgagcttattgctgcccggtagggaaa

SEQ ID NO: 6038 - DNA, 127 bp, Glycine max
  Clone ID: LIB3074-033-Q1-K1-A5
cacttttgctagacgacaacacgcggcaactaatggggagaggttgcttattaacatacttctctccactctctactacataacaaacagagccttcttcttcaactctttccattttatagaatca

SEQ ID NO: 6039 - DNA, 401 bp, Glycine max
  unsure at all n locations
  Clone ID: LIB3074-033-Q1-K1-A6
gcacaagtgagtgtggtgatcgagataactagaaacagtgtgatgaaaatgaaggtccttgttttcttcgttgctacaattttggtagcatggcaatgccatgcgtacgatatgttccctctccgaatgaacactggctatggtgcccgtactccggaggtgaaatgcgcaagttggaggcttgctgtggaagcacacaacatctttggctttgagaccattcctgaagagtgcgttgaagcaacaaaggaatacatccatggcgaacaatatagatcagactccaaaacagttaaccaacaagcttacttttatgccagagacctcggagtccattccaaggacacatttgtgttcagtatagatggcaccgnactctctaatatttcatactacaaaaa

SEQ ID NO: 6040 - DNA, 337 bp, Glycine max
  Clone ID: LIB3074-031-Q1-K2-E3
agggtagcattagcaaaagcaagaagaactagtctaagcagaaatggcctcttcagtgatggcatctgtggccctcaaacctgcccctttcactgttgagaagtcctcagttagaggccttccctccctctcaaggaactcctcttcattcatagttgtggccagtggtggcaagaagatcaagactgacaagccttatggaattaatggtggcatggctttgagggaaggagttgatgcatctggcaggaaaggaaagggaaagggcgtttaccagtttgtagacaaatacggtgctaatgtcgatggttacagtcctatctacgacaccaatgac

SEQ ID NO: 6041 - DNA, 334 bp, Glycine max
  Clone ID: LIB3074-031-Q1-K2-E4
gataaacttcaagcgagcaaacaaacaactagcaagggaagaaagaaactacagaaaagaaatggcttccacttctgcagtttcaatggctatgccagtaacttatgctagccagaagagggtggtgcctagctcggatgcattcttcaagccactgcctctacggtcttccaaggcagtgacagcatcaaaactcaatggaaggtttcaagtgagggcctccatgaaggagaaagttgtgacggggctcaccgcagctgcattgacagcttcaatgatggttcctgatgtggctgaggctgccgttacaccttctctcaagaacttcttgctc

SEQ ID NO: 6042 - DNA, 318 bp, Glycine max
  Clone ID: LIB3074-031-Q1-K2-E5
gattctgcgcaggtagagagagcgagagaacaagaacataagggaaccacagcggcggtaacagaagaacaagcagagaatgggtcgagtgagaacgaagacggtgaagaaatcctctcggcaggtgatagagcgtcactactcgcgcatgaccctggactttcacacgaacaagaagcttctggaggaagtggcgataatcccgtcgaagaggctaaggaacaagatcgcggggttctcgacgcacctgatgaggcgcattcagaagggccctgtgcgcggcatctccctcaagctccaggaggatgagcgcgagcg

SEQ ID NO: 6043 - DNA, 119 bp, Glycine max
  Clone ID: LIB3074-031-Q1-K2-E6
tgcaggtgattctagacatcttgagggtgcgggtgatcaagaacataaggggtccacatctaccgtaactggagaacacgctgggattggatcgagtgagaactaagacggtgaagaaa

SEQ ID NO: 6044 - DNA, 335 bp, Glycine max
  Clone ID: LIB3074-031-Q1-K2-E8
agaaggggacaacacatcctaaataagcatcataaattcatagtctttcggtccttccttccttcctctgctctagtgtatgccactctggttaattatcatacccccttctaggcatagttcttctccctctgttctctattctacactgtgaaacccagatgaaggtagcatttgtagctgttctacttatttgccttgtcctaagctcctccttgttcgaggtgtcaatggccggttctgctttctgctcctccaagtgcgcgaagaggtgttctagggctgggatgaaggacaggtgcacgaggttctgcgggatttgctgcagcaagtgt

SEQ ID NO: 6045 - DNA, 375 bp, Glycine max
  Clone ID: LIB3074-031-Q1-K2-F1
ggagagaaagagggagagaattacagagcattttccaacacgattacacgaccgaatcaaacccctctttctctccgaagctgcttttaatatcgtactggccttcgattgttctcctctttaatacatactgttctctcttcgatttgagggaacagtacaagagtctgagcatcggttaacccaactgcacaggtagtctccaaataatggagcctcatgatgagactggatgccaggctcctgaacgccccattctttgcattaataattgtggcttctttggaagagcagctaccatgaacatgtgttccaagtgttacaaggacatgctgttgaagcatgagcaggacatatttgcagcatcatccgttg

SEQ ID NO: 6046 - DNA, 224 bp, Glycine max
  Clone ID: LIB3074-031-Q1-K2-F10
tggtgaagcataacttgcatagactattgaggaagaaagctattgtcattgatttgctagctccaacaatgggttctagcagattatcattcattttagtacttgtgcttgtaaccttttcattcatgatcattgactcaagggttgcagaggcacgtaccctgccaaaatcagccttattgcctttcaaagttgatatacctactgttgttcctcttccactg

SEQ ID NO: 6047 - DNA, 296 bp, Glycine max
  Clone ID: LIB3074-031-Q1-K2-F2
gacatatacttcaagcgagcaaacaaacaactagcaagggaagaaagaaactacagaaaagaaatggcttccacttctgcagtttcaatggctatgccagtaacttatgctagccagaagagggtggtgcctagctcggatgcattcttcaagccactgcctctacggtcttccaaggcagtgacagcatcaaaactcaatggaaggtttcaagtgagggcctccatgaaggagaaagttgtgacggggctcacccgcactgcattgacagcttcaatgatggttcctgatgtggc

SEQ ID NO: 6048 - DNA, 271 bp, Glycine max
  Clone ID: LIB3074-031-Q1-K2-F4
gacaccaacaccaaaacaaacccactaagatggctggctttgtatccttcctagtgctgcttcttgcagcccttatcctcatgcctcaagggcttgctacttactacaaaccaattaagaagccaccagtgtacaagcctccagtgtacaagccaccagtgtacaaaccaccggtttataagccaaaaccaccggtttacaagccgaaaccaccggtttacaagccaccatattaagatgccaccatacaagaaaccaccttatggaaagt

SEQ ID NO: 6049 - DNA, 205 bp, Glycine max
  Clone ID: LIB3074-031-Q1-K2-F5
gaagaagaagaaggagcatggccatgatcatggacgtgacagcagcagcagcgacagtgattaaactgctgcatcacctatatatttaaaaggtttatgggaccatagtaacgagggctgtgccataatttctctctctctctctctctctctctctctatatttttcctttatgcctatgtcgtgatctatttatgagtggaga

SEQ ID NO: 6050 - DNA, 362 bp, Glycine max
  Clone ID: LIB3074-031-Q1-K2-F6
gacacaccaaaccaaagtgagagtgagcaacttccaacaccatagtgaaatgacttccaaggctgcacttctcttgtgtttcaatgttctcttcttcaccgtggttagctccacatatgtgccatgcaacccaccccccaaaactccaaaacacccacctgtcccaaagccaccttccccaaagcaagcaagttgccccaaagacactattaagtttggtgtgtgtgctgatgtgttaggtttgatcaacgtgcaacttgggaagccaccaaagaccccatgctgcaacctcattgagggtctcgctgatcttgaagctgcagtgtgcctctgcactgctttcaaaactaatgtgttgggca

SEQ ID NO: 6051 - DNA, 233 bp, Glycine max
  Clone ID: LIB3074-031-Q1-K2-F8
ttaggggacttttttttcaagctagcaaaccaacaactagggggggttgtaagaaactacagaaatcaatttgctttcacttctgcatcttcaatggcttttccaataccttattctagccattaaaggttcgtgcctaactttaatgcatttttcaagccactgccactaccggcttgcaaggcattcacaactattaaaactcattgtaatgtttcaagttactgccttca

SEQ ID NO: 6052 - DNA, 250 bp, Glycine max
  Clone ID: LIB3074-031-Q1-K2-F9
ttggaatttcgggggcgacgccactctttcgtacttcttcttaaaaaaccacagtattgttcctcttctctcactagtctttttatgggtgggttttttttactactagaagggtctcttctcttcttatatttattttatcccacaccctttattgtatcctatagagaatctaaatattaccaccttttttactttcaatctctacttttaatgttcttttcattattaaaaacacacatcgaatttt

SEQ ID NO: 6053 - DNA, 349 bp, Glycine max
  Clone ID: LIB3074-031-Q1-K2-G1
tgccgtccgtttcctttcgaccagcgtccgttcgtggacaagacgaagagggggcacaagtgagtttgtgatcgaatactagagacgggtgatgaaaatgaagtcttgtttttcgtgctacaattttggtagcatggcaatgccatgcgtcgatatgttcctctcgaatgaacactggtatggtgcccgtctccggagtgaaatgcgcaagttggagcttgctgtggaagcacacaacatctttgctttgagaccattctgaagagtgcgttgaacaacaaaggaatcatcctggcatcaatattatcagactcaaaacagttatcaacatcttacttttatgccagag

SEQ ID NO: 6054 - DNA, 345 bp, Glycine max
  Clone ID: LIB3074-031-Q1-K2-E2
atctcttccactttcaatttctcgtcgtccctcatgatggctcgtctcgcgatcgctgtcgccgccgtgctcctcgtggccctctccgcctccaccgcgacggcgcgtgcctgcaggacctttataatctcctcctactcgttccgcaaccctaactccaacaccttcgccaccatcaccgagatccgatccttcacccctctctacatcaccgacaaacccaccggggaaccctcctccttctacgacctcttctttccccacgcgactcaccttcctgagcccgagcgcgtgaacccacgcgctcccctagggttcgcctccgcgtacgaattttcctccctc

SEQ ID NO: 6055 - DNA, 134 bp, Glycine max
  Clone ID: LIB3074-031-Q1-K2-G11
taggttaagaagaagaaggagcatggccatgagcagggccatgacagcagcagcagcagtgacagtgattaaactgctgcatcacctatatatttaaaaggttgatgggaccatagtagcgagggctgtgcctt

SEQ ID NO: 6056 - DNA, 108 bp, Glycine max
  Clone ID: LIB3074-031-Q1-K2-G12
gaaggtgcaggagtttgttgagagctataatctactttatcgtgaggagaatatgaagctgtttgttttctttgttgctgcagtagttttggttgcatggtcatgcca

SEQ ID NO: 6057 - DNA, 376 bp, Glycine max
  Clone ID: LIB3074-031-Q1-K2-G2
gagcagaagaacaagtagttgagaactaagaaggagaagcaaatggcttcctcaatgatctcttccccagctgttaccactgtcaaccgtgccggtgccggcatggttgctccattcactggcctcaagtccatggctggctttcccaccaggaagaccaacaatgacattacctccattgctagcaacggtggaagagtgcaatgcatgcaggtgtggccaccacttggcaagaagaagtttgagactctttcctacctgccagaccttgatgatgcacaattggcaaaggaagtagaataccttcttaggaagggatggattccttgcttggaattcgagttggagcacgggttcgtgtaccgtgagcacaaca

SEQ ID NO: 6058 - DNA, 390 bp, Glycine max
  Clone ID: LIB3074-031-Q1-K2-G3
acagaagggttatgatagagtgataccgcgtcacacttttcatggtgaataaataaaatggcagcgggcggcggcagtgacggtgctactcccacctaggattccgaccaccaccaacgttacccgctgctctgctttgccttctctccctcctcgcgtctccaacaccaaaaccactttgttctcaccttccctcaacaacttttcagtgtcccgaaaatcttctctgcttcagaccagagcttcttcagaggaatcgtcctcagtagatgccaatgaggtgttcacagatttgaaggaaaagtgggatgctcttgaaaacaagtccacagtacttctttatggtggaggggctatagttgctatttggctatcgtcaattcttgtgag

SEQ ID NO: 6059 - DNA, 359 bp, Glycine max
  Clone ID: LIB3074-031-Q1-K2-B6
atggcaggaaagtacaagaacataccaatattgcggcatctacgtacaactaccaccaagaggatggaagcaattgaaagagagatacgagattcaattgagggtatcataaaaaaacgagagaaagccatggagaatggtgaaacctctaatgaagatttattaagcatacttttggaatcaaatcacaaggaaatccagggacatggaaacagtagggctgttggaatgaccaagcaagaagtaattgaggaatgcaagctattttacctggcagggcaagagaccacttcatctctgctggtttggacaatggtcttattggctatgtatccagaatggcaagcacgagcaaggga

SEQ ID NO: 6060 - DNA, 280 bp, Glycine max
  Clone ID: LIB3074-031-Q1-K2-B7
gaagcaactaagcaggatatcatcacattgcaaagaaaatacacattacattactaagtctttgttcatttgagtagtagtgatggctagcctcaaggttgcatgtgtggttgctgtgatgtgcatggttgtggtggccatgagtgctgcacccatggcacaggccgcaatcacgtgcgggcaggtcgccggcgacatgtctccgtgcttcagttatcttcgaagcggcggaaaaccggcgcaggcctgctgcaacggagtgaagtccctcagcagcgcg

SEQ ID NO: 6061 - DNA, 205 bp, Glycine max
  Clone ID: LIB3074-031-Q1-K2-B8
gggggggtgtacacgggaagaagagaaaaaacccaccgtcaaattgcgtgaatgacgctctcactcgagaccacgacaaaacttttccttttcgttgaaatgaaaaccgcttcatcgatatttcctactatacgcgtcaatgcgtgtgtaaccgacacgtcactaaacgtctcactcaatgcatccggaaaatgctattaatacc

SEQ ID NO: 6062 - DNA, 230 bp, Glycine max
  Clone ID: LIB3074-031-Q1-K2-B9
ggaggatatttcaaaagggtaattggttgtgatagcaaaaagcaaaggaaggatggggaacacgttctgcttgttctgtggttgcgttgctcaatccagcgtctgcgtcgtcgaacagtggggtcgcttccaccgcctcgcccaacccggcttccactttttcaaccctctcgccggcgaatgcctcttcggtattctcttcaccaggatctccttcctcgatgtccgca

SEQ ID NO: 6063 - DNA, 288 bp, Glycine max
  Clone ID: LIB3074-031-Q1-K2-C3
gaacatcatcatcaacaacaagcagatcaatctctctctctctctcaaccataatagtcataggtttgaaggaggattttgagcagtatgctgagaaagcaaagactttgccaccgactcaatcaaacgaagacttgcttatcctttatggattgtacaaacaggccaccgttggacctgtcaacaccagccgtcctggaatgttcaacatgggggacagagctaaatgggatgcatggaaggctgttgaagggaaatccaaagacgaagcaatgggggattacatca

SEQ ID NO: 6064 - DNA, 142 bp, Glycine max
  Clone ID: LIB3074-031-Q1-K2-C6
ggtgcttagagagagagcggagcgtattattttcattttcatctttttttgagtatcaacaaatgtctaccactgtgatgaccactctcccccaattcagtggtcttagaccccaatcctcattatctcctgtgtttaactt

SEQ ID NO: 6065 - DNA, 266 bp, Glycine max
  Clone ID: LIB3074-031-Q1-K2-C7
gattatatttgaggtcaaacaaatcggaggcatggccacctccaacttctctattgttctctccgtctccctagccttctttttggtgctacttaccaaggcacactcgaccgataccgtttctttcaccttcaacaagttcaacccagtccaaccaaacattatgctccaaaaagatgctagtatttcatcctctggggtgttacaactcaccaaagttggcagctacggcgtgcccaccttgggatctcttggtcgtgcccttt

SEQ ID NO: 6066 - DNA, 338 bp, Glycine max
  Clone ID: LIB3074-031-Q1-K2-C8
ttatggggacaccaacaccaaaacaaacccacgtgggatggcttcctttgtatccttcctagtgctgcttcttgcagcccttatcctcatgcctcaagggcttgctacttactacaaaccaattaagaagccaccagtgtacaagcctccagtgtacaagccaccagtgtacaaaccaccggtttataagccaaaaccaccggtttacaagccgaaaccaccggtttacaagccaccatataagatgccaccatacaagaaaccaccttatggaaagtacccttcagttgaggacaacacccatgcctaaagcaagcaatgaggtctattatctactt

SEQ ID NO: 6067 - DNA, 330 bp, Glycine max
  Clone ID: LIB3074-031-Q1-K2-D1
caaggcactctgggtgggcggttgatcaagcaatcctggcagaagaggagcgtctggtcgtgatccgtttcgggcacgactgggacgaaacctgcatgcatatggacgacgtgttggcgtcggtggcggagacgataaagaactttgcggtgatatacctggttgacataacggaggtgccagatttcaacaccatgtacgagctctacgacccttccacggtggtgttcttcttcaagaacaagcacatcatgattgatctgggaaccggttacaacaacaagatcaactgggctctcaaggacaagcaggagttcatcgacattgttg

SEQ ID NO: 6068 - DNA, 284 bp, Glycine max
  Clone ID: LIB3074-031-Q1-K2-D10
ttccggattcccgggtcgcccactctccgttcggctgctataagtactacatatgtttcataacatctatcagcataaagaggggcgtcataaaaaagataatcgcatggcttccacttcgcttttcattggctatgccatttacttatgccagccataaaagaatactgttgcctatctctgatgctttattcctcaagccactggctttacgttcttcattcttccaaggtaattttcaccatctataataccctatgtaatgtttcatttgatgtctttca

SEQ ID NO: 6069 - DNA, 228 bp, Glycine max
  Clone ID: LIB3074-031-Q1-K2-D2
acgttcacattcacgaatcgttttcttcagaaatttgccatcgttgagagaagcgtgagagccttagtcggtcaagatgagagctaagtggaagaagaagcgcatggagagggtggataggacaccccgattgatgggacaaagatctcaggaagtgcttgagcaggagtagacatgagctttgcatctgctaccagcctcatgacatttcatgctgttatgggtcct

SEQ ID NO: 6070 - DNA, 337 bp, Glycine max
  Clone ID: LIB3074-031-Q1-K2-D3
gactgccgcgaaaacagaacagggactcactctggcagcggcactctcggtggctataatctttctgtgttgtcaagatgtacacatcaaggaagaaaatccacaaggataaggatgctgagccaactgaatttgaggaatcagtcggacaggcattgtttgatctggaaaataccaacaatgagctgaaaagtgatctgaaagatttatacataaactcagctgtccaaattgatgtttctgggaaccgcaaggctgtggttatccatgtcccctacagattaaggaaaggattccggaagattcatgtcaggcttgggagaaaacctgagaaaaa

SEQ ID NO: 6071 - DNA, 176 bp, Glycine max
  Clone ID: LIB3074-031-Q1-K2-D4
gatctggcagcagaagaacaagtagttgagaactaagaaggagaagcaaatggcttcctcaatgatctcttccccagctgttaccactgtcaaccgtgccggtgccggcatggttgctccattcactggcctcaagcccatggctggcttccccaccaggaagaccaacaatgaca

SEQ ID NO: 6072 - DNA, 365 bp, Glycine max
  Clone ID: LIB3074-031-Q1-K2-B5
ggaagtgtattggtcactgacctatcttggagagagttttgaagtttaaaccttcaaacccttttgcctttagattctgattctgagtctctgctgctatatatggcgccacgcgtatttcttgtgttggggatgttgctgatggtgtgccttgttaaggtttcgtctgatccaaagagagaagaagaactactggaagaagaactacattttcccgataacgagccacttattgtgagagacgggaacagaaggctaatgcaagacatagattgtggtgggttgtgcaagacgaggtgcagtgcacattcgagacccaacttgtgcactatggcgtgtggcacgtgctgtgtgaggtgtaagtg

SEQ ID NO: 6073 - DNA, 363 bp, Glycine max
  Clone ID: LIB3074-031-Q1-K2-E1
ggcacaagtgagtttgttgatcgagataactagaaacagtgtgatgaaaatgaaggtccttgttttcttcgttgctacaattttggtagcatggcaatgccatgcgtacgatatgttccctctccgaatgaacactggctatggtgcccgtactccggaggtgaaatgcgcaagttggaggcttgctgtggaagcacacaacatctttggctttgagaccattcctgaagagtgcgttgaagcaacatatgaatacatccatggcgaacaatatagatcagactccaaaacagttaaccaacaagcttacttttatgccagagacctcgaagtccatcccatggacacatttgtgttcagtat

SEQ ID NO: 6074 - DNA, 399 bp, Glycine max
  Clone ID: LIB3074-031-Q1-K2-E10
aagacgacagaaggggagtgttagaagctgaacccgtttcgccttccatcagagggaagaacaaacattcaattcatggcggctgcaaagcttcaagctttatggaatcacccagctgggcctaaaaccattcacttttgggcacctacctttaagtggggcatcaacattgccaacattgctgatttctcaaaaccacctgagaaactttcctatcctcagcaaatagcggtcacagctactggaattatctggtctcgttacagcactgtaatcaccccaaaaaattgaaacctgtttagtgtaaacattgcaatggcagggacaggcctataccaacttatacgcataatggctgcatgattattcctcagatgcggaggggaaggccgtcacaaa

SEQ ID NO: 6075 - DNA, 326 bp, Glycine max
  Clone ID: LIB3074-031-Q1-K1-H2
gagccatactctgattcattagtgaagaaaaatggcaaccatcatcgccggcatcccaactacatcgatcactcgcgcaggtcttgtgctcaaacgacctgttggagcctcgtcctctaccgttcttggattgtcagcaatggctaaggcagggaaagtgaggtgctccatggaggaaaagccttcaagcagctcaaatatagggatgggggcattcttgtttgcagctgcatgtgccgcaaccatgtcaagcccagccatggctttggtggatgagagactcatcactgtatgaaccgggcgttccttttggcttagcaacaacc

SEQ ID NO: 6076 - DNA, 360 bp, Glycine max
  unsure at all n locations
  Clone ID: LIB3074-031-Q1-K1-H3
tccgccacgcgtncgtagagaaaacgacagaagggggtgggagggaagaaacaaaaggaggagcggcattaaaaatgcagatcttcgggaaaactctgacagggaagactataaccctcgaggtcgagagcaacgacaccatcgacaatgtcaaggccaagattcaagacaaggaaggcattcctccggatcaagagccgttgattttcgccggaaagcagcttgaaaatggaaagaccctggccgattacaacatccagaaggaatcaacccttcatctcgtcctcaagcttcgtggtggcatcattgaaccttccctcatggctttggctcgcaaatacaatcaggacaagatgattt

SEQ ID NO: 6077 - DNA, 253 bp, Glycine max
  Clone ID: LIB3074-031-Q1-K1-H4
ggcacatgtgagtttgttgatcgagataactagaaacagtgtgatgaaaatgaaggtccttgttttcttcgttgctacaattttggtagcatggcaatgccatgcgtacgatatgttccctctccgaatgaacactggctatggtgcccgtactccggaggtgaaatgcgcaagttggaggcttgctgtggaagcacacaacatcttttgctctgagaccattcctgaagagtgcgttgaatcaacaaatgaa

SEQ ID NO: 6078 - DNA, 417 bp, Glycine max
  Clone ID: LIB3074-031-Q1-K1-H7
ggaagtatagattgaacacacacatagaaacccaacaacaagaatgaagaagatgattctaaccctcttcttcaatatcattttatctctcctctccctctcccacgcctccgtggtggatttctgcgtagcagactacacaggccccaatggccccgcagggtactcatgcaagagcccagcaaaggtcacggtggacgacttcgtctactccggccttggcaccgccggcaacacctcaaacatcatcaaagccgcggtgacgccggcgttcgacgcgcaattccccggcgtcaacgggcttggaatctccattgcacgcctagacccagcagccggtggagtcatccctcttcacacgcaccctggtgccctaaaactgctggtggttgtgcaaggaacaatctgcaccggctt

SEQ ID NO: 6079 - DNA, 339 bp, Glycine max
  Clone ID: LIB3074-031-Q1-K1-H8
ttggagatacatatgccattcacataccatcaggacacgggatatgctggagaaactaaagagtatataccccaactacaaataccctgcgaagtatactgaggtggatgattacataagtttcagctcagagaaactgcaaaggttgggttggaaatacaggtcactggaggaaacactcgttgattctgttgagagctatcgggaagctggccatctgccatcagaaaaaatgtgacttagtagaatagaataaaactaagtgctatatgatagtagatcctcacctttttaaaatctttattaagattccattcgattcttatgggagtatgaaaa

SEQ ID NO: 6080 - DNA, 232 bp, Glycine max
  Clone ID: LIB3074-031-Q1-K2-A1
gatctggcagccgaaaaacaagtcgttgagaactaagaagaaggaaatggcttcctcaatgatctcctccccagctgttaccaccgtcaaccgtgcctgtgccggcatgggtgctccattcaccggcctcaaatccatggctggcttccccacgaggaagaccaacaatgacattaccttcattgctagcaacggtggaagattacaatgcatgcaggtgtggccaccaatt

SEQ ID NO: 6081 - DNA, 375 bp, Glycine max
  Clone ID: LIB3074-031-Q1-K2-A10
gaccacaccgagtcgcagaaaaagaaaaaagcgatcatagtttcacttcggccttatccagtttagggtttcggttctctaccctatctttcacgtatcgaaaccttaaatttacgatcaggtctgagcaatctggttggtagaacctttggtcttagtgagtcaagttttatgtctgaattagacgatcaaattcctactgccttcgatccttttgctgatgcaaatgctgatgactcgggtgctgggtcaaaggagtatgtgcatattcgtgtacagcagcgaaatggtaggaaaagcctgacaaccgttcagggattgaaaaaggaattcagctataacaagatccttaaagacgtcaagaaagagttctgt

SEQ ID NO: 6082 - DNA, 367 bp, Glycine max
  Clone ID: LIB3074-031-Q1-K2-A12
gatatctggcagcagggaagacaagtagttgagaactaagaagaaggaaatggcttcctcaatgatctcctccccagctgttaccaccgtcaaccgtgccggtgccggcatggttgctccattcaccggcctcaaatccatggctggcttccccacgaggaagaccaacaatgacattacctccattgctagcaacggtggaagagttcaatgcatgcaggtgtggccaccacttgatatgaaaaagttccagactctttcctactttgccaaacctggatgatgcccatttggcaaaggaagtcgcatacccttctatggaaaggatggttttccttgcttggaaattcgagtcggagcacgcttt

SEQ ID NO: 6083 - DNA, 318 bp, Glycine max
  Clone ID: LIB3074-031-Q1-K2-A2
cgcgggtgcgatagacgacaacaagggcacaagtgagtttgtcgatcgagataactagaaacagtgcgatgaaaatgaaggtccttgttttcttcgttgctacaattttggtagcatggcaatgccatgcgtacgatatgttccctctccgaatgaacactggctatggtgcccgtactccggaggtgaaatgcgcaagttggaggcttgctgtggaagcacacaacatctttggctttgagaccattcctgaagagtgcgttgaagcaacaaaggaatacatccatggcgaacaatatagatcagactccaaaacag

SEQ ID NO: 6084 - DNA, 249 bp, Glycine max
  Clone ID: LIB3074-031-Q1-K2-A3
gatcgcatttcatagcacgcaccctcattaccaacacgaaagcatagccaaaaccttttttcgaagtctctgattttcctaatggctccggcaaaggcagagaagaagccggcggagaagaagccagcggcggagaaggcaccggcgggaaaaaagccgaaggcggagaagaacgactcgaaggaaggagggagcgagaagaataagaagcgcacgaagaagagcgtggagacctacaacatctacatc

SEQ ID NO: 6085 - DNA, 375 bp, Glycine max
  Clone ID: LIB3074-031-Q1-K2-A4
gcactacctcaagcataacttgcatgagactattgattaagaaagctattgtcattgatttgctagctccaacaatgggttctagcagattatcattcattttagtacttgtgcttgtaaccttttcatccatgatcattgactcaagggttgcagaggcacgtaccctgccaaaatcagccttattgccttccaaagttgatatacctactgttgttcctcttccactggtggcaccactgccaaatttgcctgttactctccctccagtgcctgaactacctgcagtacccaaagtaccaattcctgaagtaatagttaataacgccaaaataatcccttgagtacctatgatctatccagtcactactactt

SEQ ID NO: 6086 - DNA, 191 bp, Glycine max
  Clone ID: LIB3074-031-Q1-K2-A7
gatagaagaagcagaaagagaagcattagcaaaagcaagaagaactagtctaagcagaaatggcctcttcagtgatggcatctgtggccctcaaacctgcccctttcactgttgagaagtcctcagttagaggccttccctccctctcaaggaactcctcttcattcagagttgtggccagtggtggcaag

SEQ ID NO: 6087 - DNA, 200 bp, Glycine max
  Clone ID: LIB3074-031-Q1-K2-B1
ggaaaacggaaaacctatcacagcacgctcgttcatctctcactcatggcaacaacactcatgtttttccgaccaaccatgatccgggcctccgctggttctcccgccaagcccgacccgagaaacaggaagcccgtttcctccaactggtgggctcctctgttcggatggcccgcggatccggactacatgggcccatt

SEQ ID NO: 6088 - DNA, 175 bp, Glycine max
  Clone ID: LIB3074-031-Q1-K1-H10
gaaggggttgtactaaactgtgagaaacaacagagggggtaagcaagaaaccgaagagaagaaaaaatgccgtgcctcaacctcaacaccaacgtgtccctcgacggcgtcgacacctcttccatcctcgccgaagccacctcctccgttgccaacatcatcggcaaacccccgg

SEQ ID NO: 6089 - DNA, 421 bp, Glycine max
  Clone ID: LIB3074-031-Q1-K2-B2
tgccgttccggatctgcaatttccgagccaagcgtcccgtccgctgacacagtacgaccgaatgggataaggcaagaaagggaaaagagacttggcgcgaatgttgaaagcacgacaatggggcgggtttggaaggatgacaacagcgacgatgttcgacgcgataactcttcggaacgatgcgccaccaccaaggtcgtcagatctcagtgcagaacacatgaggtcgaaactggaaagttcgtcagaaagtgcgagaaaaccgaagagattctcaggaattgcatcggaaagcccgccgaaatgttgcaatcaaacaaagagtatactgaagaagatatcacagatgaagtacttaaaggaaggtctgttccatttaactcatctgacggggccagtggggtggttgactttcctgggc

SEQ ID NO: 6090 - DNA, 299 bp, Glycine max
  Clone ID: LIB3074-031-Q1-K2-B3
gacacaactgaacaagatagataagccttgcacagcctcacaaaaatgaagaacactacctcgttcgctctctttctactttgtgccttcttcacctcatacctaccttcagccaccggtgcttttgtgcttgacagtgatggaaaccctcttgaaaatggtggcacatactatgtgccagcaccaaataactgcggtggaatagaatacactacatcaggaaacgaaacttgccctatcactgttgtgcaacatcacgacccaacctgtaaggggtttccgataacgatttcgtcccc

SEQ ID NO: 6091 - DNA, 361 bp, Glycine max
  Clone ID: LIB3074-031-Q1-K2-B4
gacaagtgagtttgttgatcgagataactagaaacagtgtgatgaaaatgaaggtccttgttttcttcgttgctacaattttggtagcatggtaatgccatgcgtacgatatgttccctctccgaatgaacactggctatggtgcccgtactccggaggtgaaatgcgcaagttggaggcttgctgtggaagcacacaacatctttggctttgagaccattcctgaagagtgcgttgaagcaacaaaggaatacatccatggcgaacaatatagatcagactccaaaacagttaaccaacaagcttacttttatgccagagacctcgaagtccatcccaaggacacatttgtgttcagtat

SEQ ID NO: 6092 - DNA, 193 bp, Glycine max
  Clone ID: LIB3074-031-Q1-K1-E8
agaaggggacaactcatcctaaataagcatcataaattcatagtctttcggtccttccttccttcctctgctctagtgtatgccactctggttaattatcatacccccttctaggcatagttcttctccctctgttctctattctacactgtgaaacccagatgaacgtagcatttgtagctgttctacttat

SEQ ID NO: 6093 - DNA, 332 bp, Glycine max
  Clone ID: LIB3074-031-Q1-K1-F1
ggagagaaagagggagagaattacagagcattttccaacacgattacacgaccgaatcaaacccctctttctctccgaagctgcttttaatatcgtactggccttcgattgttctcctctttaatacatactgttctctcttcgatttgagggaacagtacaagagtctgagcatcggttaacccaactgcacaggtagtctccaaataatggagcctcatgatgagactggatgccaggctcctgaacgccccattctttgcattaataattgtggcttctttggagagcagctaccatgaacatgtgttccaaagggtacaaagacatgc

SEQ ID NO: 6094 - DNA, 396 bp, Glycine max
  Clone ID: LIB3074-031-Q1-K1-F2
gacataaacttcaagcgagcaaacaaacaactagcaagggaagaaagaaactacagaaaagaaatggcttccacttctgcagtttcaatggctatgccagtaacttatgctagccagaagagggtggtgcctagctcggatgcattcttcaagccactgcctctacggtctttcaaggcagtgacagcatcaaaactcaatggaaggtttcaagtgagggcctccatgaaggagaaagttgtgacggtgctcaccgcagctgcattgacagcttcaatgatggttcctgatgtggctgaggctgccgttacaccttttctcaagaacttcttgctcagcatctcggcaggtggagttgttgttgttgccattattggtgcttgtgatcggggtttc

SEQ ID NO: 6095 - DNA, 415 bp, Glycine max
  unsure at all n locations
  Clone ID: LIB3074-031-Q1-K1-F3
tcgcccacgcgtncgacgacagaagggggattacaaggggaaaagaaaagagattctgagactgaaagtaaatcgaagcagagaagaagaaagaaagaaagatggtgaaagtggcgacgtacttcgcgatgacgctaggagccttcgtgttctggcagtccatggacaagctccatgtctggatcgctctccgtcaagacgaaaagaaagagaggttggagaaggaagccgacatcagaagggttagagaagaattattgcagcagcaggccagtcagaaggattctctttcttgaatttgaattatgttgtaattttgccttgtgctttgtaattttccttggttttggttttccaatgcaatgttcttgtgctcgaataaattctggtactcccgagcacttcaaatttaatt

SEQ ID NO: 6096 - DNA, 398 bp, Glycine max
  Clone ID: LIB3074-031-Q1-K1-F4
gacaccaacaccaaaacaaacccactaagatggctggctttgtatccttcctagtgctgcttcttgcagcccttatcctcatgcctcaagggcttgctacttactacaaaccaattaagaagccaccagtgtacaagcctccagtgtacaagccaccagtgtacaaaccaccggtttataagccaaaaccaccggtttacaagccgaaaccaccggtttacaagccaccatataagaagccaccatacaagaaaccaccttatggaaagtaccctccagtagaggacaacacccatgcctaaagcaagcaatgaggtctattatctacttaataaataagaagaactgctttgtgttttctagcattgtgatttacaacttcgtagcaatgcatattc

SEQ ID NO: 6097 - DNA, 343 bp, Glycine max
  Clone ID: LIB3074-031-Q1-K1-F5
gatgtagatgaaggagcatggccatgatcatggccgtgacatgcagcagccctgacagtgatttaactgctgcatcacctatatatttaaaaggtttatgggaccatagtatcgagggctgtgcctcaatttctctctctctctctctctctctctctctctctttttcctttttccctatcttgggatctatttatgagtgagaaaaacaaaagtgacaaattgtgcgtgtatctgggtgctaattccagtgctattaatcctgggtttggttggtttgtaaccccgcttctttggctatgtttgatagtatattatccctacgaaattaaaattttaaatt

SEQ ID NO: 6098 - DNA, 368 bp, Glycine max
  Clone ID: LIB3074-031-Q1-K1-F6
gacacaccaaaccaaagtaagagtgagcaacttccaacaccatagtgaaatgacttccaaggctgcacttctcttgtgtttcaatgttctcttcttcaccgtggttagctccacatatgtgccatgcaacccaccccccaaaactccaaaacacccacctgtcccaaagccaccttccccaaagcaagcaagttgccccaaagacactattaagtttggtgtgtgtgctgatgtgttaggtttgatcaacgtgcaacttgggaagccaccaaagaccccatgcttgaacctcattgagggtcttgctgatcttgaagctgcagtgtgcctctgcactgctctcaaagctaatgggttgggcatcaacc

SEQ ID NO: 6099 - DNA, 273 bp, Glycine max
  Clone ID: LIB3074-031-Q1-K1-G1
ggcacaagtgagtttgttgatcgagataactagaaacggtgtgatgaaaatgaaggtccttgttttcttcgttgctacaattttggtagcatggcaatgccatgcgtacgatatgttccctctccgaatgaacactggctatggtgcccgtactccggaggtgaaatgcgcacgttggaggcttgctgtggaagcacacaacatctttggctttgagaccattcctgaagagtgcgttgaagcaacaaaggaatacatccatggcgaacaata

SEQ ID NO: 6100 - DNA, 412 bp, Glycine max
  Clone ID: LIB3074-031-Q1-K1-G2
gagcagaagaacaagtagttgagaactaagaaggagaagcaaatggcttcctcaatgatctcttccccagctgttaccactgtcaaccgtgccggtgccggcatggttgctccattcactggcctcaagtccatggctggcttccccaccaggaagaccaacaatgacattacctccattgctagcaacggtggaagagtgcaatgcatgcaggtgtggccaccacttggcaagaagaagtttgagactctttcctacctgccagaccttgatgatgcacaattggcaaaagaagtagaataccttcttaggaagggatggattccttgcttggaattcgagttggaacaccgtttcgtgtaccgtgagcacaacaggtcaccatgatactactattgacgctccttgacca

SEQ ID NO: 6101 - DNA, 290 bp, Glycine max
  Clone ID: LIB3074-031-Q1-K1-G3
agaggagaagagaagctaaagaaagaaaggagatgggagtggagaagcagttgttgaggtctggcaccggtccgaagccaattcccggtcagaacgtaaccgttcactgcactggtttcgggaagaacggtgacctttctcagaaattctggagcacaaaggatcctggccagaacccattcacttttaaaatcggccaaggttcttgttatcaaaggatgggatgaaggtgtgcttggcatgcaaattggtgaagttgctcgtctcccgtgctctccggattatgctta

SEQ ID NO: 6102 - DNA, 293 bp, Glycine max
  Clone ID: LIB3074-031-Q1-K1-G4
gagagttatcgatccctttggggagataagaaaatgtggcttgtgcagctctcaaccccatttctgaacggccatggccatggctccagccttctctggaaacccagttcggcggtgactcatacccactgggccccgccgagtttgctgcctcaaatcaatgcgatgaagacgatgcagggaaaagtggtgtgctccacgaacgacaagacggtggcagtggaggtggtgcggctggcccctcgcccaaagtacaagaggcgcgtgagggagaagaaaaaataccatgccca

SEQ ID NO: 6103 - DNA, 327 bp, Glycine max
  Clone ID: LIB3074-031-Q1-K1-G5
ggtctattgggtgccctgagatcacattgaacaatggtgaaggctgtggccgttcttggcatcaatgagggtgtcactggaactattcacttccttcaggagggaagtggtccaaccaccgtaactggatctcttgctggtcttaagcctggtctccatggtttccatgttcatgccttgggggacactaccaatggttggctctcaactggatcacatttcaattcctaataacatggagcattggtgcccctgaagattagaatcgatatgctgggtatcttgggaaatggatatgttcgggatgaatggactgtaatctttact

SEQ ID NO: 6104 - DNA, 391 bp, Glycine max
  Clone ID: LIB3074-031-Q1-K1-G7
ggttctagtgtgtgattgtttgttgttgtaactcgttcttcttcttttgttgttctgtgtttgtgtttgttttttctctcacctgaaaatgtcttgctgcggtggtaactgtggttgcggaagctcctgcaagtgcggcaactgctgcggaggctgcaagatgtacccagacttgagctacactgattcaaccaccaccgagaccttggtcatgggagtggcacctgttaaggctcaatttgagggtgctgaaatgggtgtgcccgctgagaacgatggctgctaatgtggaccaaactgctcctgcaacccctgcacttgcaagtgaggtgttgggagagcaagcttcaagcagagattgcccttaattaggaataatgataaactatta

SEQ ID NO: 6105 - DNA, 389 bp, Glycine max
  Clone ID: LIB3074-031-Q1-K1-G8
gacagcttatcaataatctattttatactatacccacattttgataattatttttctagttgataagccatggctactcgaggaaagcttgaggttgacgttgatctcaagtctaacgcagacaagtactggcaaacccttatgaactccactgaaatattccccaaggccttccccaatgattacaaaagcattgaggttcttgagggtgatggcaaatcacctggttctatccgccacataagttatggtgaaggttcaccacttgtgaagtcatcctttgagaagaatgaggctgttgatgaagaaaagaaagtagtgtcgtacactatcattgatggagaactcctccagcacttacaaacattcaatggagacatttctgtgac

SEQ ID NO: 6106 - DNA, 366 bp, Glycine max
  Clone ID: LIB3074-031-Q1-K1-G9
tgggatgtatgagtgatacgcgtcacattttcataataataaaaaaatggcagcggcggcggcagtgacggtgctactcccacctaggattccgaccaccaccaacgttacccgctgctctgctttgccttctctccctcctcgcgtctccaacaccaaaaccactttgttctcacctttcctcaacaacttttcagtgtcccgaaaatcttctctgcttcagaccagagcttctttagaggaatcgtcctcagtagatgccaatgaggtgttcacagatttaaatgataagtgtgatgctctttgaaaacaagtccacaatacttctttatgggggaggggctatagttgctatttgctatcgtc

SEQ ID NO: 6107 - DNA, 394 bp, Glycine max
  Clone ID: LIB3074-031-Q1-K1-H1
ggtgatccactctctgagccccaatctcttgagcagcagaatcttcaggccaagccaggttagcaagcacaacacaaccccgaaatggcttctgcttctgttcccatggctttctcgctgagctctgttatcaacaacaacaagccttcatccgaagccttcttcaggccactacccctacgacaaccaaagaggaccctcttcaccacaaaggcagtgtcaaactccaaggctcaaatcaatgcatctttgaaggaaaaggcagttgcaggactcacagcaacttcttgcgacagcatctatggtggtttccgaggtggctcatgctgctggatatgagtccccccttccctaagaactttcttgtaaacatctttgctggggggtttgttct

SEQ ID NO: 6108 - DNA, 382 bp, Glycine max
  Clone ID: LIB3074-031-Q1-K1-C6
ttctgatgggggtgcttagagagagagcaaagcatattattttcattttcatctttttttgagtatcaacaaatggcaaccactgtgatgaccactctcccccaattcagtggtcttagaccccacttctcagctgcccctgtgaagaacttggttgctgtgcaacccatgagtcgcaaggggaagggtgcattgggagctcgatgtgactacattggttcatccactaatctgattatggtggcttctacaaccctgatgctgtttgctggaaagcttggattggcttcatcagcaaacaggaaagccactgcagggctaaagctggaggggagggactcaagcttgcaaactggggacccctgctggcttcacccttgct

SEQ ID NO: 6109 - DNA, 355 bp, Glycine max
  Clone ID: LIB3074-031-Q1-K1-C7
gattatatttgagttcaaacaaatcaaagccatggccacctccaacttctctattgttctctccgtctccctagccttctttttggtgctacttaccaaggcacactcgaccgataccgtttctttcaccttcaacaagttcaacccagtccaaccaaacattatgctccaaaaagatgctagtatttcatcctctggggtgttacaactcaccaaagttggcagcaacggcgtgcccacctcgggatctgtcggtcgtgccctttacgctgccccaattcagatttgggacagcgaaaccggcaaggtatccaactgggctacatcctttaaattcaaaattttcgcacccaac

SEQ ID NO: 6110 - DNA, 353 bp, Glycine max
  Clone ID: LIB3074-031-Q1-K1-C8
gacgacagaatgggactccaacaccaaaacaaacccactaggatggcttcctttgtatccttcctagtgctgcttcttgcagcccttatcctcatgcctcaagggcttgctacttactacaaaccaattaagaagccaccagtgttcaagccttcagtgtacaagccaccagtgtacaaaccaccggtttattagccaaaaccaccggtttacaagccgaaaccaccggttttcaagccaccatataagaagccaccatacaagaaaccaccttatgggaagtaccctccagttgaagacaacacccatgcctaaagcaagcaaagaggtctattatctacttaataaataaa

SEQ ID NO: 6111 - DNA, 313 bp, Glycine max
  Clone ID: LIB3074-031-Q1-K1-D1
cactctgggtgggcggttgatcaagcaatcctggcagaagaggagcgtctggtcgtgatccgtttcgggcacgactgggacgaaacctgcatgcagatggacgaggtgttggcgtcggtggcggagacgataaagaactttgcggtgatatacctggttgacataacggaggtgccagatttcaacaccatgtacgagctctacgacccttccacggtggtgttcttcttcaggaacaagcacatcatgattgatctgggaaccggtaacaacaacaagatcaactgggctcttaaggacaagcaggagttca

SEQ ID NO: 6112 - DNA, 191 bp, Glycine max
  Clone ID: LIB3074-031-Q1-K1-D2
gacgttcacattcacgaatcggtttcttcataaatttgccatcgttgagagaagcgtgagagccttattcgttcaagatgagagctaagtggaagaagaagcgcatgaggaggtttgataggaagccccgattgatgagacaaagatctcaggcagtgcttgagcaggagttgacatgagctgttcatatg

SEQ ID NO: 6113 - DNA, 236 bp, Glycine max
  Clone ID: LIB3074-031-Q1-K1-D3
gactgccgcgaaaacagaacagggactcactctggcagcggcactctcggtggctataatctttctgtgttgtcaagatgtacacatcaaggaagaaaatccacaaggataaggatgctgagccaactgaatttgaggaatcagtcggacaggcattgtttgatctggaaaataccaacaatgagctgaaaagtgatctgaaagatttatacataaactcagctgtccaaattgat

SEQ ID NO: 6114 - DNA, 294 bp, Glycine max
  Clone ID: LIB3074-031-Q1-K1-D4
gatctggcagcagaagaacaagtagttgagaactaagaaggagaagcaaatggcttcctcaatgatctcttccccagctgttaccactgtcaaccgtgccggtgccggcatggttgctccattcactggcctcaagcccatggctggcttccccaccaggaagaccaacaatgacattacctccattgctagcaacggtggaagagtgcaatgcatgcaggtgtggccaccagttggcaagaagaagtttgagactctttcctacctgccagaccttgatgatgcacaattggc

SEQ ID NO: 6115 - DNA, 160 bp, Glycine max
  Clone ID: LIB3074-031-Q1-K1-D9
gcgcggctgagacaacacaacgggaggtgttagttttatgcaacccaagatccaaatggggtggggcgatgatacatagagtgactcgcctcacactttcatcataattaaaaaatcgtagcagcggcaagcaagtgacggtgctactcccacctatgat

SEQ ID NO: 6116 - DNA, 415 bp, Glycine max
  Clone ID: LIB3074-031-Q1-K1-E1
ggcacaagtgagtttgttgatcgagataactagaaacagtgtgatgaaaatgaaggtccttgttttcttcgttgctacaattttggtagcatggcaatgccatgcgtacgatatgttccctctccgaatgaacactggctatggtgcccgtactccggaggtgaaatgcgcaagttggaggcttgctgtggaagcacacaacatctttggctttgagaccattcctgaagagtgcgttgaagcaacaaaggaatacatccatggcgaacaatatagatcagactccaaaacagttaaccaacaagcttacttttatgccagaaaccttgtagtccatcccaaggacacatttgggttcagtatatattgcaccgtactttttaatatttcatactacaaaaaaacatggtatggg

SEQ ID NO: 6117 - DNA, 326 bp, Glycine max
  Clone ID: LIB3074-031-Q1-K1-E10
gggcgtgttacatgctgcacccgttcctccttctatcagggggaagaacaaacattcaattcatggcggctgcaaagcttcaagctttatggaatcacccagctggtcctaataccattcacttttgggcacctacctttaagtggggcatcaacattgccaacattggtgatttcttaaaaccacctgagaaacttttctatcctcagctaatagcggtcacagccactgtaattatctgttcttcttacatcaccgtaatcaccccaaaaaatttggaacctggttattgtaaacactgttatggtctgggacaggctttttcc

SEQ ID NO: 6118 - DNA, 283 bp, Glycine max
  Clone ID: LIB3074-031-Q1-K1-E12
gacagcatatcaataatctattttatactatacccacattttgataattatttttctagttgataagccatggctactcgaggaaagcttgaggttgacgttgatctcaagtctaacgcagacaagtactggcaaacccttaggaactccactgaaatattccccaaggccttccccaatgattacaaaagcattgaggttcttgagggtgatggcaaatcacctggttctatccgccacataagttatggtgaaggttcaccacttgtgaagtcatcctttg

SEQ ID NO: 6119 - DNA, 291 bp, Glycine max
  Clone ID: LIB3074-031-Q1-K1-E2
atctcttccaatttcaatttctcgtcgtccctcatcatggctcgtctcgcgatcgctgtcgccgccgtgctcctcgtggccctctccgccttcaccgcgacggcgcgtccctgcaggacctttataatctcctcctactcgttccgcaaccctaactccaacaccttcgccaccatcaccgagatccgatccttcacccctctctacatcaccgacaaacccaccgggaaaccctccttcttctacgacctcttctttccccacgcgactcaccctcctgagcccgagcgc

SEQ ID NO: 6120 - DNA, 338 bp, Glycine max
  Clone ID: LIB3074-031-Q1-K1-E3
agggtagcattagcttaagcaagaagaactagtctaagcggaaatggcctcttcagtgatggcatctgtggccctcaaacctgcccctttcactgttgagaagtcctcagtttgaggccttccctccctctcaaggaactcctcttcattcatagttagggccagtggtggcaagaagatcaagactgacaagccttatggaattaatggtggcatggctttgacggaaggagttgatgcatctggcaagaaaggaaagggaaagggcgtttaccactttgtagacaaatacagtgctaatgtcgatggttacagtcctatctacgacaccaaagact

SEQ ID NO: 6121 - DNA, 400 bp, Glycine max
  Clone ID: LIB3074-031-Q1-K1-C3
gaacatcatcatcaacaacaagcagatcaatctctctctctctctcaaccataatagtcataggtttgaaggaggattttgagcagtatgctgagaaagcaaagactttgccaccgactcaatcaaacgaagacttgcttatcctttatggattgtacaaacaggccaccgttggacctgtcaacaccagccgtcctggaatgttcaacatgggggacagagctaaatgggatgcatggaaggctgttgaagggaaatccaaagacgaagcaatgggtgattacatcattaaggtgaaacaactgctggaagcagctggcttgcctgcttgataacattgtcatgccttgctttctgattctgtgctagaagttcacaacagtttggaaataaacaattg

SEQ ID NO: 6122 - DNA, 373 bp, Glycine max
  Clone ID: LIB3074-031-Q1-K1-E4
gataaacttcaagcgagcaaacaaacaactagcaagggaagaaagaaactacagaaaagaaatggcttccacttctgcagtttcaatggctatgccagtaacttatgctagccagaagagggtggtgcctagctcggatgcattcttcaagccactgcctctacggtcttccaaggcagtgacagcatcaaaactcaatggaaggtttcaagtgagggcctccatgaaggagaaagttgtgacggggctcaccgcagctgcattgacagcttcaatgatggttcctgatgtggctgaagctgccgttacaccttctctcaagaacttcttgctcagcatcgcggcaagtggagttgttgttgttccattattg

SEQ ID NO: 6123 - DNA, 400 bp, Glycine max
  Clone ID: LIB3074-031-Q1-K1-E5
gattctgcgcaggtagagagagcgagagaacaagaacataagggaaccacagcggcggtcacagaagaacaagcagagaatgggtcgagtgagaacgaagacggtgaagaaatcctctcggcaggtgatagagcgtcactactcgcgcatgaccctggacttccacacgaacaagaagcttctggaggaagtggcgataatcccgtcgaagaggctaaggaacaagatcgcggggttctcgacgcacctgatgaggcgcattcagaaaggccctgtgcgcggcatcttcctcaagctccatgaggatgagcgcgagcgccgcatggacttcgttcccgacgtcttcgccattaacaccgaccacatcgaggtcgacaaaggaaacccctgacatgcttta

SEQ ID NO: 6124 - DNA, 112 bp, Glycine max
  Clone ID: LIB3074-031-Q1-K1-A1
gatctggcatcataaaaacaagtcgttgtgaactgggaagagggatatggctttctcaatgatcaccttcctagttgttaccaccgtcaactgtgccggtgccgtcatggtt

SEQ ID NO: 6125 - DNA, 406 bp, Glycine max
  Clone ID: LIB3074-031-Q1-K1-A10
gaccacaccgagtcgcagaaaaagaaaaaagcgatcatagtttcacttcggccttatccagtttagggtttcggttctctaccctatctttcacgtatcgaaaccttaaatttacgatcaggtctgagcaatctggttggtagaacctttggtcttagtgagtcaagttttatgtctgaattagacgatcaaattcctactgccttcgatccttttgctgatgcaaatgctgatgactcgggtgctgggtcaaaggagtatgtgcatattcgtgtacagcagcgaaatggtaggaaaagcctgacaaccgttcagggattgaaaaaggaattcagctataacaagatacttaaagacgtcaagaaagagttctgttgcaatggaacagttgttcaagacccataac

SEQ ID NO: 6126 - DNA, 179 bp, Glycine max
  Clone ID: LIB3074-031-Q1-K1-A12
gatatctgtcatcagaaaaacaagttgttgagaactaagaagaaggaaatggctttctcaatgatctccttcccagctgttaccaccgttaaccgtgccggtgccggcatggttgttttattcaccggtctcaaattcatggctgtctttcccacgagaataccaacaatgacattacc

SEQ ID NO: 6127 - DNA, 278 bp, Glycine max
  Clone ID: LIB3074-031-Q1-K1-A2
gatagaagaagcagaaagagaagcattagcaaaagcaagaagaactagtctaagcagaaatggcctcttcagtgatggcatctgtggccctcaaacctgcccctttcactgttgaaaagtcctcaattagaggcccttccttccttctaaggaactcctcttcattcaaaagtgggggccggggggggaagaaaaataaaaatggcaaaccttattgaattaatgggggcatggcttttaaggaaagaagttatgcatttggcaagaaaaggaaggga

SEQ ID NO: 6128 - DNA, 249 bp, Glycine max
  Clone ID: LIB3074-031-Q1-K1-A3
gatcgcatttcatagcacgcaccctcattaccaacacgaaagcgtagccaaaaccttttttcgaagtctctgattttcctaatggctccggcaaaggcagagaagaagccggcggagaagaagccagcggcggagaaggcaccggcggagaagaagccgaaggcggagaagaagatctcgaaagaaggagggagcgagaagaagaagaagcgcacgaagaagagcgtggagacctacaacatctacatc

SEQ ID NO: 6129 - DNA, 379 bp, Glycine max
  Clone ID: LIB3074-031-Q1-K1-A4
gcactacctcaagcataacttgcatagactattgattaagaaagctattgtcattgatttgctagctccaacaatgggttctagcagattatcattcattttagtacttgtgcttgtaaccttttcatccatgatcattgactcaagggttgcagaggcacgtaccctgccaaaatcagccttattgccttccaaagttgatatacctactgttgttcctcttccactggtggcaccactgccaaatttgcctgttactctccctccagtgcctgaactacctgcagtacccaaagtaccaattcctgaaataataagtaataacgccaaaataatcccttgagtacctatgatctatccagtcactactacttatttt

SEQ ID NO: 6130 - DNA, 138 bp, Glycine max
  Clone ID: LIB3074-031-Q1-K1-A7
cgatctggcatctaaaaagcaagtcgttgagaactaacaaaagggatatggcttgctcaatgatctcctgcccagctggtagcagcgtctaccgtgcctgtacctgcatctttgaattattaaaaatcctcaaataca

SEQ ID NO: 6131 - DNA, 272 bp, Glycine max
  Clone ID: LIB3074-031-Q1-K1-A8
ggccttgtgtatttcgcgccctcaatacctacacgcagggtgatgcaaatgcttgtgcttgttttcttcgttgctacaattttggtagcatggcaatgccatgcgtacgatatgttccctctccgaatgaacactggctatggtgcccgtactccggaggtgaaatgcgcaagttggaagcttgctgtggtagcacacaacatctttggctttgagaccattcctgaagagtgcggtggagcaactaaggaattcattcatggcgaacaata

SEQ ID NO: 6132 - DNA, 282 bp, Glycine max
  Clone ID: LIB3074-031-Q1-K1-B1
ggaaaacggaaaacctatcacagcacgctctttggtctcggactcatggcaacaacactcatgtttttccgaccaaccatgatccgggcctccgttgggtcttccgccaagcccgacccgagaaacaggaagcccgcttcctacaactggggggctcctcagtgcggatggcccggggaaccggacatacaagggcccatcggagaaggcgagagagaaatcggatccggagcgggaagtgggcctggacctgggccggcccacatccaagttcacaagggg

SEQ ID NO: 6133 - DNA, 345 bp, Glycine max
  Clone ID: LIB3074-031-Q1-K1-B2
gataaggaaggaaaggaaaaggagacttggtgcgaaagttgaaagcacgacaatggggtgggtttggaaggatgacaacagcgacgatgttcgacgcgataactcttcggaacgatgcgccaccaccaaggtcgtcagatctcagtgcagaacagaggaggtcgaaactggaaagttcgtcagaaagtgcgagaaaaccgaagagattctcaggaattgcatcggaaagcccgccgaagtgttgcaatcaaacaaagagtatactgaagaggatatcacatatgaagtcctttaaggaaggtctggtccacttaactcatctgacggtgccagtgttgtggttga

SEQ ID NO: 6134 - DNA, 408 bp, Glycine max
  Clone ID: LIB3074-031-Q1-K1-B3
gacacaactgaacaagatagataagccttccacagcctcacaaaaatgaagaacactacctcgttcgctctctttctactttgtgccttcttcacctcatacctaccttcagccaccggtgcttttgtgcttgacagtgatggaaaccctcttgaaaatggtggcacatactatgtgccagcaccaaataactgcggtggaatagaatacactacatcaggaaacgaaacttgccctatcactgttgtgcaacatcacgacccaacctgtaaggggtttccgataacgatttcgtccccggcccgaatccgttacatctccgaaggccttaatgtgaacatagggttcactttcagaccccctccgtgtgccccctcttctttgtggactgttctaaagatcaatctg

SEQ ID NO: 6135 - DNA, 398 bp, Glycine max
  Clone ID: LIB3074-031-Q1-K1-B5
ggaagtgtattggtcactgacctatcttggaagagttttgaagtttaaaccttcaaacccttttgcctttagattctgattctgagtctctgctgctatatatggcgccacgcgtatttcttgtgttggggatgttgctgatggtgtgccttgttaaggtttcgtctgatccaaagagagaagaagaactactggaagaagaactacattttcccgataacgagccacttattgtgagagacgggaacagaaggctaatgcaagacatagattgtggtgggttgtgcaagacgaggtgcagtgcacattcgagacccaacttgtgcactatggcgtgtggcacgtgctgtgtgaagtggtagtgtgtcccacctggcacatctggaaataaggaacta

SEQ ID NO: 6136 - DNA, 402 bp, Glycine max
  Clone ID: LIB3074-031-Q1-K1-B6
atggcaggaaagtacaagaacataccaatattgcggcatctacgtacaactaccaccaagaggatggaagcaattgaaagagagatacgagattcaattgagggtatcataaaaaaacgagagaaagccatggagaatggtgaaacctctaatgaagatttattaagcatacttttggaatcaaatcacaaggaaatccagggacatggtaacagtagggctgttggaatgaccaagcaagaagtaattgatgaatgcaagctattttacctggcagggcaagagaccacttcatctctgctggtttggacaatggtcttattggctaggtatccagaatggcaagcacgagcaagggacgaagtttttcaagtttttggaaaccaaaatccaaacactgat

SEQ ID NO: 6137 - DNA, 199 bp, Glycine max
  Clone ID: LIB3074-031-Q1-K1-B7
gaagcaactaagcaagatatcatcacattgcaaagaaaatacacattacattactaagtctttgttcatttgagtagtagtgatggctagcctcaaggttgcatgtgtggttgctgtgatgtgcatggttgtggtggccatgagtgctgcacccatggcacatgccgcaatcacgtgcgggcaggtcgccggcgacatg

SEQ ID NO: 6138 - DNA, 389 bp, Glycine max
  Clone ID: LIB3074-030-Q1-K2-H6
gacggctacagaagaataatcgagacacagatcatagtgatcattttttaatttctcagatttatccgacgtcgctgcagatccaccaaccgttatggctgccttcagcggtgatgaaacggcaccgtttttcggcttccttggcgccgcagctgccctcgtcttctcctgtatgggagctgcctatggcacagcgaagagtggcgtgggcgtggcttccatgggtgtaatgagacctgagctggtgatgaagtcgattgttcctgttgtcatggctggagttttgggcatttatggccttattattgctgttattatcagtaccggtattaatccaaaggccaaatcctattacctctttgatggttatgcacatctctcttctggtc

SEQ ID NO: 6139 - DNA, 106 bp, Glycine max
  Clone ID: LIB3074-031-Q1-K1-B8
ggcggcttgaacacggtaagaagagaaaaaacccaccgccaaattgcgtgaatgacgctctcactcgagaccacgacaaaactgttccttttcgttgaaacgaaaa

SEQ ID NO: 6140 - DNA, 282 bp, Glycine max
  Clone ID: LIB3074-031-Q1-K1-B9
ggaggatatttcaaaagggtaattggttgtaatagcaaaaagcaaaggaaggatggggaacacgttctgcttgttctgtggttgcgttgctcaatccagcgtcggcgtcgtcgaacagtggggtcgcttccaccgcctcgcccaacccggcttccactttttcaaccctctcgccggcgaatgcctctccggtatcctctccaccaggatctcctccctcgatgtccgcatcgaaaccaaaaccataggcaatgtgtttgtgcagttggctgggtcgattca

SEQ ID NO: 6141 - DNA, 296 bp, Glycine max
  Clone ID: LIB3074-031-Q1-K1-C10
attcttgcgcccacgcgtccgtcctgtgagaagttttcagaagggcgagtactgcaagaagcacgttgaggcgaacagtgctgatgagaagcccagtgaggatgtgctcaaggcttgggacgtggatttcgtcaacgttgatcaggccactctcttccgatctcattctggctgcaaactacttgaacatcaagagccttttggaccttacttgccagacagtttcatacatgatcaagggaaagactcctgaagaaattcggaagacattcaacaatcaagaatgacttcacccc

SEQ ID NO: 6142 - DNA, 388 bp, Glycine max
  Clone ID: LIB3074-030-Q1-K2-E5
gtgaagatcgaagcgcagaagcgaaacgcagagaggaatccaaaagggaaagggctctcagctcgaggccagagccgttggcctcaaagtcatctgccccatctgcaaggcccaacttgcaaatcaaaaccaactggttgatcattatgcttccaaacatccgaaggagaaacctcctgcagagtcaagctagttatatttgagcaaatggtacaaaaagtccccaaaaaaaattgctctctaggtgtgccttcgggcttttaatgtaattctccctgcttgcaggcaggttgcaacatgttttaagttaatcatgttaatgtgcattattgtgagatcctaaaggatcataaaaactgcgtctatcattataagaatatcatcatgt

SEQ ID NO: 6143 - DNA, 426 bp, Glycine max; identical to SEQ ID NO: 3655
  Clone ID: LIB3074-030-Q1-K2-E8

SEQ ID NO: 6144 - DNA, 242 bp, Glycine max
  Clone ID: LIB3074-030-Q1-K2-F3
aatttttcctttcagacatccccgggggtcatgagagaacttctcctagcatatgcgacaacccttttccaacataccattctattatccatgcatctcctaatcaaaaaccatatactaaccatcactgatcaatctcacaccaatcacttttaaaacttaaccaactgaaacatcttaataccaactaacaacctccacatccaccaaaatactcttccgttctatttgatccaccctta

SEQ ID NO: 6145 - DNA, 402 bp, Glycine max
  Clone ID: LIB3074-030-Q1-K2-F4
ggaggaatcagaggggcgtttgggagaattagagcaaaatcgctgtgaaaatgagcggaacggtgaagaaagttagcgatgttgcattcaaggtgggaaggaacatcgattgggatggaatggcgaatcttctggtctccgatgaggctcgcagggagttctccaatctccgtcgcgctttcgacgaggttaactcccaacttcaaaccaagtttatccaggaacctgagcccattgattgggattactatagaaagggaattggcactcgcttggtggatatgtacaatgagcattatgagagcattgagatccccatgtttggtgatacagtaactcctcaatataagcctatatttgatgcccttttgattgagctttaagaatcagaggagaaatctc

SEQ ID NO: 6146 - DNA, 308 bp, Glycine max
  Clone ID: LIB3074-030-Q1-K2-F5
gacctggcaaccaatcaaccttttgttagggtctgggagagagaagcaaatatgtttctttttgatctattgggcaaatggatacagtggactacgtggcgtttccagaataattggttgattatctgcactataacccatggttgggttatccatgaccaagacttacgcttactttaccttcattgctatgaacttactttgagtgccacgcatgcatgcatgcacacgatttgtgctaaaaaagctggagactgtatactacctgtcggaccttgttcatgcacaattggcaaaggaagtagaat

SEQ ID NO: 6147 - DNA, 140 bp, Glycine max
  Clone ID: LIB3074-030-Q1-K2-F7
ggggatatggcgaaattggtagacgccacggacttaattggattgagtcttggtatggaaacttaccaagtgagaactttcaaattcagagaaaccctggaattcacaaagggcaatcctgagccaaatcctgttttccg

SEQ ID NO: 6148 - DNA, 369 bp, Glycine max
  Clone ID: LIB3074-030-Q1-K2-F8
gaagcaactaagcaagatatcatcacattgcaaagaaaatacacattacattactaagtctttgttcatttgagtagtagtgatggctagcctcaaggatgcatgtgtggttgctgtgatgtgcatggttgtggtggccatgagtgctgcacccatggcacaggccgcaatcacgtgcgggcaggtcgccggcgacatgtgtccgtgcttcagttatcttcgaagcggaggaaaaccgtcgcaggcctgctgcaacggagtgaagcccctcagcagcgcggcgaagaccaccgaagaccgccagggggcgtgcagttgcctgaaaaaccttgccaataatatgggacagagtttgaatgccggcaacgc

SEQ ID NO: 6149 - DNA, 140 bp, Glycine max
  Clone ID: LIB3074-030-Q1-K2-G1
ggggatatggcgaaattggtagaggccacggacggaattggattgagtcttggtatggaaacttaccaagggtgaacttcctaattgagagaaaccctggaattcacaaagggcaatcctgagccaaatcctgttttccg

SEQ ID NO: 6150 - DNA, 380 bp, Glycine max
  Clone ID: LIB3074-030-Q1-K2-G2
gacgacagaagacgacacaacggggcttgagagcagcacagagcaaaggggatacacgtgacattactaagggctttgggcatcagactagtagggatggctagcctcaaagttgcatgtgcggtcagtatgaaccgcatggttgagggggccatgaatgctccacccatggcacaagccataatcacgtgcagacaagtctgcccagacatgtttcactgcttcagttatcctcgaagcggcagaaaaccatcgcaagcctgctgcaacggagtgaaacacctcagcagcgcggcgaataccaccgtggaccgacaaggggcatgcaactgcctgaaaaacccgtgcaataatatgggacaaaacttgaatgccagcaa

SEQ ID NO: 6151 - DNA, 52 bp, Glycine max
  Clone ID: LIB3074-030-Q1-K2-G3
gaatcaatgactattcatgattccataattgaatgaattacatactggatcc

SEQ ID NO: 6152 - DNA, 256 bp, Glycine max
  Clone ID: LIB3074-030-Q1-K2-G4
gaagactacttaagggattttaagatcggaccatggtcactgagtcctcagagtacatatcttaggaatctgaaaattcattccatcataatacccctgtccatcgtacaatagcaaacgaaattaatgctcggatcttaataaacctagcaacaattaaccttcctaacatatatcaacagagcctaccattatatcacttttcttaccttcaaaatatttcttacaactcatatttgttactttgaatatcaaa

SEQ ID NO: 6153 - DNA, 307 bp, Glycine max
  Clone ID: LIB3074-030-Q1-K2-G5
ggagcaacttagcacgatatcatcacattgcaaaggaaatacacgttacattactaagtctttgttcattacgagtagtgagcaccggctatgcctgaagaggtgcatcgtgtggccagcctgagatgctgcatgacatgtgcgcggcacatgagtgctgcactccatggcacagggccgcaatcaacgtgggggcaggtatgtcggagacacgtgtccgtgctgtagttattttccaagcagaggaaaaccgtcgcaggcctgctagaacagagtgaaatcgctgaccagcgcggcgaagaccacc

SEQ ID NO: 6154 - DNA, 389 bp, Glycine max
  Clone ID: LIB3074-030-Q1-K2-G6
ggagaggcatcacagggaaacgaagaatccctaagtacgcacgcgctcattcttgagaaagctgaatattcattcgtccatggcactctcttttcgtgtcttttgcaaatccaaattgatctatgggtgtgaaatacttatgcaaaaggagcatgctattccagttcgtcactttgctaaagagtctgcccctcctgcccttaacggagatcagatgctgaagaacatttttgaggaggtgaagaacaaatttgagactgccataggaatattaaagaaggagaagatcaccattgacccacaagatccagctgctgtttctcattatgctaaggtcatgaaaacacttagagagaatgcaagcttgttgtccgagtcccatgacatac

SEQ ID NO: 6155 - DNA, 399 bp, Glycine max
  unsure at all n locations
  Clone ID: LIB3074-030-Q1-K2-G7
gttctagtgtgtgattgtttgttgttgtaacgcgttcttcttcttttgttgttctgtgtttgtgtttgttttttctctcacctgaaaatgtcttgctgcggtggtaactgtggttacggaagctcctgcaagtgcggcaacggctgcggaggctgcaagatgtacccagacttgagctacactgagtcaaccaccaccgagaccttggtcatgggagtggcacctgttaaggctcaatttgagggtgctgaaatgggtgtgcccgctgagaacgatggctgcaaatgtggaccaaactgctcctgcaacccctgcacttgcaagtgaggtgttgggagagcaagcttcaagcagagataacccttaattngaataatgataaactattaatgtgtagct

SEQ ID NO: 6156 - DNA, 358 bp, Glycine max
  Clone ID: LIB3074-030-Q1-K2-E2
gaacaccaaaagggacctactacttcaacaccaactccggtcacttgtgtgcattgatccatggctggattcattaatatcgtactttcgggaatagtgtagctaataggaagaatgaagcggtgcttatgcacaactggcgatcttttgccgtggggatcctctcgtggataatggtaacaacaactttttggcaactacagttcgagcatatgctcccccttatggcgttgattacccaaccggactacccactggccgcttgtgtaaaggctacatcattcctgacttcgattagtcaatcacttgaggccgaatacacattttcttacttagatcccctcctcgacggcgaaag

SEQ ID NO: 6157 - DNA, 386 bp, Glycine max
  Clone ID: LIB3074-030-Q1-K2-H1
ggtaaaggaggcggggtgctgggaaagccctttattgaaaaagtcacccctggccgtgagtctgaatttgatttgaagaaatcacggaaatcagcaccaccgtatcgtgtaatattgcacaacgacaactttaataaacgggaataccttgtccaagtactgatgaaggtcattcctggaatgacccttgtcaatgcagttaatatcatgcaagaagcacactacaatggattgtcagttgtgatcatctgtgaccaagctgatgctgaagatcattgcacgcagctaataagcaatgggttgctcaatttaattgaaccttgaagtggaggatgttgatggaaagtttcactttaaatcttacttgcttttaatgctatttgaaa

SEQ ID NO: 6158 - DNA, 233 bp, Glycine max
  Clone ID: LIB3074-030-Q1-K2-H4
acacacacacatcaggtgcatcatgagtcacttcttcagatgtacacctccactcttcaaatcaccccaccgttatcgtttcctacactacttaagaaacacacacccttttatacctaacttcacaccacacctaccctcatattcttctctcttccaacttgctattgctcatcccaaataataattatcatgactttctatcatgaaattagaccatatctacaaaacta

SEQ ID NO: 6159 - DNA, 108 bp, Glycine max
  Clone ID: LIB3074-030-Q1-K2-B4
gaattctcttgcacaaaaaaaaaagggggctgggggtaaggttcaaacatacactgccaatatcctatatataaaacaccgtagaagataaagctcgaaggcccacac

SEQ ID NO: 6160 - DNA, 221 bp, Glycine max
  Clone ID: LIB3074-030-Q1-K2-B5
agatgacaaagacgacgggaggagcatattgaaggggctttgacattgaatggttgccagtgccatgacctaccaacctgacctttaaccaaatgaattcagggtaatgggctggctaccaagcctttaatgtcattgaagcccgaatggacatgttgattacaatgaaccatattatatattattactgcctataatagtcaatggcttaatagatccca

SEQ ID NO: 6161 - DNA, 398 bp, Glycine max
  unsure at all n locations
  Clone ID: LIB3074-030-Q1-K2-B6
attttcttgtcaggaagaacactggacaaacaggccgtaacagaagcaaacttaaagaaggctggctaccacacatgggataaattaattctcaaggatccacaagatccttgcactccaaatgcagcttcatacaaaacagcagcgagagagaaactgataatgcagggatacaacattgttgggatcattggagaccaatggagcgatctcctcggaggccacagatgcgaaagcaggacctttaagcttcctaattccctgtactacattcagtagcttcttaacctcttaacaatctagctcgctcctatctatctatatgtaataagatgcgctcaaataggggcactagcttcactntatgttgtttcagctgtgcgttaacaagtcatgta

SEQ ID NO: 6162 - DNA, 428 bp, Glycine max
  unsure at all n locations
  Clone ID: LIB3074-030-Q1-K2-B7
ggcacaagtgagtttgttgatcgagataactagaaacagtgtgatgaaaatgaaggtccttgttttcttcgttgctacaattttggtagcatggcaatgccatgcgtacgatatgttccctctccgaatgaacactggctatggtgcccgtactccggaggtggaatgcgcaagttggaggcttgctgtggaagcacacaacatctttggctttgagaccattcctgaagagtgcgttgaagcaacaaaggaatacatccatggcgaacaatatagatcagactccaaaacagttaaccaacaagcttacttttatgccagagacctcgaagtccatcccaaggacacattngtgttcagtatagatggcaccgtactctctaatattccatactacaaaaaacatggatatggggtggagaaattta

SEQ ID NO: 6163 - DNA, 400 bp, Glycine max
  Clone ID: LIB3074-030-Q1-K2-B8
aattcgagcgggcgctcttctttttggggctcatgtgtgtttgttgtaactccaacacacaccacactttatgccccttctggcgccagaagacgacagaggggagaaaaaggaatcggagatggaacagctagctatggaatggatgatggggacgacatttacatgcgctcttggactggaaccattattgggccccataatactgctcatgaaggaagaactcatcaattgaggctgtgttgcgataaagactacccacaaaagcccccaagtggtcggcttcattcacgaatcaatatgacttgtgttaatcatgaaactggagcgggcgaaccaaagaaactgggacctcttgcaaattggcaacggaggtttaccatggaagatatactgaccc

SEQ ID NO: 6164 - DNA, 289 bp, Glycine max
  Clone ID: LIB3074-030-Q1-K2-C1
gattttattgtctcaaaaaaaaaaaaggcattcagagatggttctcacatccactgccactcacccatatgaaaaagaccagatcctaaactctacttttgcttccagatattttcgtgatcctatttcaaaattcaagatcccacagaaatcaataccaaaggatgcagctttttagataataaaccacaaatcattgttggatgttgcaccatggctcaacatggcttcgtttgtgaccacttgtatggagcctgagtgtgacaagctcataatggcttcacttaac

SEQ ID NO: 6165 - DNA, 396 bp, Glycine max
  Clone ID: LIB3074-030-Q1-K2-C2
ttcttatggggatttttttggcccagaacaaaaagaggcactcggggccggttctcacgggcactgtccctcacccagatgaaaaagaccagagcctaaactctacttttgcttccagatatgtgcgtgaacctctttcacatttcatcatgccatagaactcaattccaaccgattcatcctttcacataataaacgatgacttgatgttggatggtgcaccaaagctcaactccgcttcgatcgtgaccacttggattgatcctgcgtatcacaagctcataatgtcttcacttaacaaaaactatggaaatatagataagtatcctgtcaccactgttctccagaacctttaccttaatatatttatctaacctattccatgctcctattagt

SEQ ID NO: 6166 - DNA, 331 bp, Glycine max
  Clone ID: LIB3074-030-Q1-K2-C3
ggaaatccatcgcagcataaaatgtcaaatacaaggttgcttgatttccaatacagcctctcaaggaaaaaatacttgaggaagccatcacgtctgttctcatgggaccggcagaactcggggccgaagaatgtatttcctcagcctaaggctgatgagatgaagcaggtgtttgacaagtttgattccaataaagatgggaaaatttctcaacaggagtacaaagccaccatgaaggctctatgcatgggggactccgttcatgaagtgccgaatattttcagggtggttgatttgaatggagatggattcatcaacttcaaggaattta

SEQ ID NO: 6167 - DNA, 394 bp, Glycine max
  Clone ID: LIB3074-030-Q1-K2-C5
aattggagcgggcgcactacttatgggggctcatgtgagtttgttgaaacggcaacacacaggacacttggtgccccttttggggccagaagacgacagaagggagaaaaaggaatcggagatggaacagcttgctatggaatggatgatggggacgacatttacatgcggtcttggactggaaccattattgtgccccatattgctggtcgtgaaggaagaactcatcaactgtggctgttttgcgataaagactacccacaaaagccccccagtggtcggcttccttcacgaaccaatatgacttgagttcatcatgaaactggagcgggcgaaccaaaaaaactgggacctcttggaaaatggcaacggcacgttaccatggaagatatac

SEQ ID NO: 6168 - DNA, 312 bp, Glycine max
  Clone ID: LIB3074-030-Q1-K2-C6
ggcaattgtgtgaggaaatatctctcacgagttcgtataaggagagaagcggacatgaaaaagcaattagcatcaaggcgtttgctgatgtgggttatggtacatttgagcatttcaggagtgttgtccaagtccaaccacaccacaactacaacttgtctgctgtgcgatggctccgtataggactgcctcaaccctcaccacttggactcacagcttcccaccatatccagcacccacttacggagaatcctcgcttgagaaaaatgctgcagaggtaacactcagactgcaggttcaggtgatcccaat

SEQ ID NO: 6169 - DNA, 331 bp, Glycine max
  Clone ID: LIB3074-030-Q1-K2-C7
gaatcaatatccacaatcaacgaggcatgtcccaagcctccttggtgcagcttacagattggcaacggagttaactcattgctctattcctctaccatacaccactcactcacttttttcaacatctatgaccataccactctttataccataaccaaaccactcacaagttcttctgctttcatcagttgtcatgttatgccaactacatgaaacttttcttaacccaaatggatcaaggatgagattctgcacttacccagctgaggaaatgcggtgaacatcttttatcttctgcagatggttatagcgaccctacggtcatgatgat

SEQ ID NO: 6170 - DNA, 416 bp, Glycine max
  Clone ID: LIB3074-030-Q1-K2-D2
gattgagtacaacttcacattttaggggaataccgcctcttttgctgcatcagatgagttttaaattaaaagcatggctgcacaagctcttgtatcatcatcttatcttaccttctcaacggaagctgcaagacatagtcttggaccaagatcactccaatctccatttggcttctccagaaaagcctcctttcttgttaaggcagcttctaccccccctgtcaagcaaggatcagacaggcctttgtggtttgcatcaaagcaaagtctttcttacttggatggcacccttcctggtgactatggatttgaccctctgtgactgttagaccctgaatgaacatgagggttcattgagccgaaatggctagcatatggtgagataatcaatgtgcgttatgcaatgttaggtgcag

SEQ ID NO: 6171 - DNA, 264 bp, Glycine max
  Clone ID: LIB3074-030-Q1-K2-D4
cagggaacttctacacaatacaaaacaagggactattggaaattactagtgaatgctctcactacataagaccacacactttgcctacctttaaacaccgatttagatgtcgtcttcaataataccaattatgcttacaattgcaacaacaccatctaaagtgcacactctaaatttaaacgaaatacaaatataacataaccccccttttaaaagaatccaaacttaccaacgattacatactacgcggtacatttaaaatag

SEQ ID NO: 6172 - DNA, 268 bp, Glycine max
  Clone ID: LIB3074-030-Q1-K2-D5
ggccggaaaaaaaccagttgtttggaacctaaaaggagggaatgggtttcttaatggtcttcttcccaagtttttacaccctcaaaccttcccgtgcccggattgtttgttcatttaccggccctaaattcattggttgctttcccaccagggaaaaccaccattgcctttccttcatttgttgccaccgttgaagaattccatgcattccggtgttggcacccattgggaagaagaaatttgagaattttttcttctttgccgaact

SEQ ID NO: 6173 - DNA, 352 bp, Glycine max
  Clone ID: LIB3074-030-Q1-K2-D6
gacacaactgaacaagataagctatccatagcaggggaagaaatgaagagtaccttgttcgccctctttctactttgtgccctcacctcttgcctaccttcatgcaccgttggtgatgtggtcgacactgatggtaatcctgttgaaaatggaggcacatactttgtgttgccaactataatattaaacggcggtggaatagaatatgccacatttggaaatgaaacttgccctgtcactgttgcgcaatctcgcgatcagttctgcaagggctttccgataaccatttcatgcccagcccgaatccgtaacatcatcgaatgccttagtttgaacattgggttcactttcg

SEQ ID NO: 6174 - DNA, 347 bp, Glycine max
  Clone ID: LIB3074-030-Q1-K2-D7
gccaagcgtacgtagggatgccagaagacaaccgcaggggacgccaacgccaaaacaaacccactaagatgggcgtctttgtatgcttcctagagctgattgttgcgacccttaatgtcatacgtcacaggacttgctgacttactacaaagccgatgcaccaagcctccagaatacaaaggctaccacgttcagtgaacacagtgttcaaaccaccggattataatccaggagcaccggttttcagagacgacaccagcgggttacaagccaacatataagaaggcgccctacacgaaaccaccgtatggaaagatccctgcagcggaggacaacacccctgccta

SEQ ID NO: 6175 - DNA, 405 bp, Glycine max
  Clone ID: LIB3074-030-Q1-K2-D8
gagaagatcgaagcgcagaagcgaaacgcagagaggaatcagaagggaaagggctctcagctcgaggccagagccgttggcctcaaagtcatctgccccatctgcaaggcccaacttgcaaatcaaaaccaactggttgatcattatgcttccaaacatccgaaggagaaacctcctgcagagtcaagctagttatatttgagcaaatggtacaaaaagtccccaaaaaaaattgctctctaggtgtgccttcgtgcttttaatgtaattctccctgcttgcaggcaggttgcaacatgttttaagttaatcatgttaatgtgcattattgtgagatcctaaaggatcataaaaactgcgtctatcattataagaatatcatcatgttgctacccttgggggggc

SEQ ID NO: 6176 - DNA, 394 bp, Glycine max
  Clone ID: LIB3074-030-Q1-K2-E1
ggtttcactccctaatagctgctacaggtacagcgggacttctattctatatttcggtctactcgcaagcaaatcagaagaagagaatggcagcagcagaggggctaaacagagagcagtacgtgtacttggcgaagctgtcggagcaggcggagcggtacgaggagatggtggagttcatgcagaacgtggtggtggggtcgacgccggcgtcggagctcacggtggaggagcgcaacctcctctcggtggcctacaagaacgtcatcggctcgctgcgtgccgcgtggcacatcgtctcctccatcgagcaaaaggaggagggccgcaagaacgacgaccacgtctccctcgtcaagcactacagatccaaggtcgagaacgagctcactca

SEQ ID NO: 6177 - DNA, 182 bp, Glycine max
  Clone ID: LIB3074-030-Q1-K1-E5
ggtttcactccctaatagctgctacaggtacagggtaacttctattctatatttctttctacccgcaagcaaatcagaagaagagaatggcagcagcagaggggctaaacagagagcagtacgtgtacttggcgaagctgtctgagcaagcggagccgtaccaggagatggtggagttcatg

SEQ ID NO: 6178 - DNA, 351 bp, Glycine max
  Clone ID: LIB3074-030-Q1-K1-E6
gaacaacgaaggggacctgctacttcaacaccacctacactcactggtgtgcattgacccatggctggattcattaatatcgtactttcaggaatagtgtagctaatgagaaggaagagacggtgcatatgcacaactggcgatctttgaccgtggggattctcttgtggatcatggtaacagcaacttttagccaactacaattcgagcatatgttcctccttatggagttcaatacccacacctgaagacacactggccgcgtttgtaaaggctacaacattcctgacttgattagacaatgactgggggccgaatacacattttcttacttagaaccccacctttatg

SEQ ID NO: 6179 - DNA, 272 bp, Glycine max
  Clone ID: LIB3074-030-Q1-K1-F1
gaactagttatatatgaactaaccatatccatatatattatataaaataactaatattttatatctaaaattgccccgctactactgtaaatttcgatagggattaaaaaacaaagcctttccgtttcatctcgaattgtgaattgaatattcaatgactaaaaaaatggaataaaaaaacgaagaattcaaagaatgattccaaattgaaggtaggataagaacaaaggttctacatattcacaaaaaaaactatgtatgtaggtagagac

SEQ ID NO: 6180 - DNA, 357 bp, Glycine max
  Clone ID: LIB3074-030-Q1-K1-F2
gatctggcagcagaagaacaagtagttgagaactaagaaggagaagcaaatggcttcctcaatgatctcttccccagctgttaccactgtcaaccgtgccggtgccggcatggttgctccattcactggcctcaagtccatggctggcttccccaccaggaagaccaacaatgacattacctccattgctagcaacggtggaagagtgcaatgcatgcaggtgtggccaccacttggcaagaagaagtttgagactctttcctacctgccagaccttgatgatgcacaattggcaaaagaagtagaataccttcttaagaagggatggattccttgcttggaattcgagttggagca

SEQ ID NO: 6181 - DNA, 173 bp, Glycine max
  Clone ID: LIB3074-030-Q1-K1-F3
gacatggctatcaatcaatcttctgagagtgtttggttgaaagtaacaaagatgtttcctttcgtgcaaaacggtcaaaagataaaggggactatggtggttatccaaaaaaatgtgttggttttaaacagcatccccagtgttggaggtatccttaaccaaggcttaggctt

SEQ ID NO: 6182 - DNA, 140 bp, Glycine max; identical to SEQ ID NO: 6147
  Clone ID: LIB3074-030-Q1-K1-G1

SEQ ID NO: 6183 - DNA, 327 bp, Glycine max
  Clone ID: LIB3074-030-Q1-K1-G2
gaagcaactaagcaagatatcatcacattgcagagaaaatacacattacattactaagtctttgttcattagagtagtagtgatggctagcctcaaggttgcatgtgtggttgctgtgatgtgcatggttgtggtggccatgagtgctgcacccatggcacaggccgcaatcacgtgcgggcaggtcgccggcgacatgtctccgtgcttcagttatcttcgaagcggcggaaaaccgtcgcaggcctgctgcaacggagtgaagtccctcagcagcgcggcgaagaccaccgcggaccggcagggggcgtgcagtttgcctaaaaa

SEQ ID NO: 6184 - DNA, 306 bp, Glycine max
  Clone ID: LIB3074-030-Q1-K1-G3
ggcatagcatattccagtgtttttcatttcatcgggcattcaatggccaccacagcagctctatccggaaccatggtgagcacctccttcatgaggaggcaacctatgaccaccacaagcctaaagacattccccaacgttggtgaagctctttttggtctgaaaagtggacgaggtggtcgtgtcacttgcatggcctcgtacaaggtgaagctcataaccccagaaagagaagtggagtttgaatgcccagatgatgttttcattgttgacaaggcagaggacgaatgcattgaactttcctac

SEQ ID NO: 6185 - DNA, 290 bp, Glycine max
  Clone ID: LIB3074-030-Q1-K1-G4
ggagaggtatcacagtgaaacgaagaagccctaactacgcacgcactcattcttgagaaagctcaatattcattcgtccatggcactctcttctcgtctcttttccaaatccaaattgatctatggctgtcaaatacttctgcaaaaggagcattgcttttccagttcgtcactttgttaaagagtctgcccctcctgcccttaagggagatcagatgctgaagaacatttttgtggaggtgaagaacacatttgagactgccttaggaatattaaagaaggagaagatc

SEQ ID NO: 6186 - DNA, 399 bp, Glycine max
  unsure at all n locations
  Clone ID: LIB3074-030-Q1-K1-H1
gttctagtgtgtgattgtttggtgttgtaactcgttcttcttcttttgttgttctgtgtttgtgtttgttttttctctcacctgaaaatgtcttgctgcggtggtaactgtggttacggaagctcctgcaagtgcggcaacggctgcggaggctgcaagatgtacccagacttgagctacactgagtcaaccaccaccgagaccttggtcatgggagtggcacctgttaaggctcaatttgagggtgctgaaatgggtgtgcccgctgagaacgatggctgcaaatgtggaccaaactgctcctgcaacccctgcacttgcaagtgaggtgttgggagagcaagctncaagcagagatagcccttaattaggaataatgataaactattaatgtgtagc

SEQ ID NO: 6187 - DNA, 297 bp, Glycine max
  Clone ID: LIB3074-030-Q1-K1-H3
cggacgcgtgggatacgacagatgggtcacctgtaaagaaagaggaggaagtgattgcagaggctgaagctgagaagaaggaggagggcacagacacagacacagaggctccaacagagtaaaagaatgtgaagaggggaaatgtgcatcttaagtagagtgtatgagagggtatttttttcttagttgcatcgtgtcttgatactccatgcacgtcttttctttgtgtagagcactaacaaaatgtctattctatggaagggacgactgttacgaatgccaaccacttagtacaaa

SEQ ID NO: 6188 - DNA, 164 bp, Glycine max
  Clone ID: LIB3074-030-Q1-K1-H4
gacggcaacagaagaataatcgagacacagatcatagtgatcattttttaatttctcagatttatccgacgtcgctgcagatccaccaaccgttatggctgccttcagcggtgatgaaacggcaccgtttttcggcttcctttggcgccgcaactgccctcgtc

SEQ ID NO: 6189 - DNA, 200 bp, Glycine max
  Clone ID: LIB3074-030-Q1-K2-A2
ggcagccagggccgtgatgacttcgatagagatgacgtggaacagtacttcaactatatggggatgcttgcagtagaaggtacatatgataaaatgggggctcttctaagccaaaacatccaccccgtggacatccttctgctgttagctgcctcagaaggtgacaagccaaaaattgaagaactcttgagagctggagc

SEQ ID NO: 6190 - DNA, 423 bp, Glycine max
  Clone ID: LIB3074-030-Q1-K2-A3
gacctcaagcataacttgcatagactattgattaagaaagctattgtcattgatttgctagctccaacaatgggttctagcacattatcattcattttagtacttgtgcttgtaaccttttcatccatgatcattgactcaagggttgcagaggcacgtaccctgccaaaatcagccttattgccttccaaagttgatatacctactgttgttcctcttccactggtggcaccactgccaaatttgcctgttactcttcctccagtgcctgaactacctgcagtacctaaagtaccaattcctgaagtaatagttaataacgccaaaataatcccttgagtacctatgatctatccagtcactactacttattttgtcacttgctaaattaacttgttgttgccatccccaggtggttctggt

SEQ ID NO: 6191 - DNA, 365 bp, Glycine max
  Clone ID: LIB3074-030-Q1-K2-A7
ggaagaagaagaagaagaagatggcattgggtgttcctgctcttcccctgacatacgtggctcacgttctggcacttgttgccagcatcttggtcgtgctctgggtcctcaattttaggggtggcttggcttgggattctgataacaaggccctcatcttcaatcttcatccagttcttattgtcattggcttactagtccttgggggtgaagctattataagctacaaagcattacccctgaagaaggaagtgaagaaattgatacaccttgttttccatgccatcgcattaatacttggaatagttggaatttatactgccttcaagtatcacaatgaaagtgggattgccaatctctacagc

SEQ ID NO: 6192 - DNA, 218 bp, Glycine max
  Clone ID: LIB3074-030-Q1-K2-A8
ccgtgatgggacggatgatcattaggaccaactggaacgaatggcagcgctgcgtggctttaccgacatcaccgctagcacatatcagattcgatatatataatctaccctgctctgacgctggtgaacacaacatacttgagagtgcaaactttgcgtttgggagggcgattattgccaacaaacatatggtgttctggaaccgcgtactatatcac

SEQ ID NO: 6193 - DNA, 424 bp, Glycine max
  Clone ID: LIB3074-030-Q1-K2-B1
gaacatcatcatcaacaacaagcagatcaatctctctctctctctcaaccataatagtcataggtttgaaggaggattttgagcagtatgctgagaaagcaaagactttgccaccgactcaatcaaacgaagacttgcttatcctttatggattgtacaaacaggccaccgttggacctgtcaacaccagccgtcctggaatgttcaacatgggggacagagctaaatgggatgcatggaaggctgttgaagggaaatccaaggacgaagcaatgggtgattacatcattaaggtgaaacagctgctggaagcagctggcttgcctgcttgataacattgtcatgccttgctttctgattctgtgctagaagttcacaacagtttggaaataaacaattgcagtgtttgaagcttttattatca

SEQ ID NO: 6194 - DNA, 407 bp, Glycine max
  Clone ID: LIB3074-030-Q1-K2-B2
gaacacgagtgaaagtacaagttgcagggatggcctcaacctcctcctccacactctctatatcctcttcatccacccttgttgatgccaaggctccaagtccaagacaatccccacaatgtgtctcccctccacctgttcactctccttggaagaccactgctttctgtcgcaggattgcaagcaatgttatggcaatggctaccaccagagaggcacccgcagcagaagttgccacgaccgagctctctgttgccgagacgccagagattgtgaagactattcaagaagcttgggacaaagttgaagacaaatatgcagtgagttcacttgccgtagccggcgtggttgcattggttggctcagctggcatgatctcagcaattgataggcttcctttaattcct

SEQ ID NO: 6195 - DNA, 247 bp, Glycine max
  Clone ID: LIB3074-030-Q1-K1-A5
gtagcactggatatggtgggggcaataacgcagtcaccagcggcttgaggataatatgcaccgaatgaaataaaatataaaattgtacaattaaataaacactgaaggaaaatcacccatataatggctttgaggtgttaaaaataaatcaaaagtacttacctttatgtggtcgtctctaatgagccatccttacgtacacatccattcgacgtcataattcttttataggcgcacctaaatacat

SEQ ID NO: 6196 - DNA, 203 bp, Glycine max
  unsure at all n locations
  Clone ID: LIB3074-030-Q1-K1-A6
ggcagccagggccgtgatgacttcgatagagatgacgtggaacagtacttcaactatatggggatgcttgcagtagaaggtacatatgataaaatgggggctcttctaagccaaaacatccaccccgtggacatccttctgctgttagctgcctcagaaggtgacaagccaaaaattgaagaactcttgagagctggagcana

SEQ ID NO: 6197 - DNA, 393 bp, Glycine max
  Clone ID: LIB3074-030-Q1-K1-A7
gacctcaagcataacttgcatagactatggattaagaaagctattgtcattgatttgctagctccaacaatgggttctagcagattatcattcattttagtacttgtgcttgtaaccttttcatccatgatcattgactcaagggttgcagaggcacgtaccctgccaaaatcagccttattgccttccaaagttgatatacctactgttgttcctcttccactggtggcaccactgccaaatttgcctgttactcttcctccagtgcctgaactacctgcagtacctaaagtaccaattcctgaagtaatagttaataacgccaaaataatcccttgagtacctatgatctattcagtcactactacttattttggcacttgctaaattaac

SEQ ID NO: 6198 - DNA, 239 bp, Glycine max
  Clone ID: LIB3074-030-Q1-K1-B1
ggaagaagaagaagaagaagatggcattgggtgttcctgctcttcccctgacatacgtggctcacgttctggcacttgttgccagcatcttggtcgtgctctgggtcctcaattttaggggtggcttggcttgggattctgataacaaggccctcatcttcaatcttcatccagttcttattgtcattggcttactagtccttgggggtgaagctattataagctacaaagcattaccc

SEQ ID NO: 6199 - DNA, 217 bp, Glycine max
  Clone ID: LIB3074-030-Q1-K1-B2
gatgggacagatgatcattaggaccaagagaaacaaatggcagcacgtgggtgcgcgtttaccgacatcaccgcgtgcacagaacagcatcgatatcgaaaatctacctcgctttgatgctgatgaacacaacatactagagagtgctgactttgcgtttgggagggtgattatagccaacaaacaaatggtgttctggcacctcgtgctatatcac

SEQ ID NO: 6200 - DNA, 340 bp, Glycine max
  Clone ID: LIB3074-030-Q1-K1-B3
gcatattacaaggactttgacattgaagggtgcccagtgccaggacctgccaactgtgcctctaaccaaagtaattggtgggaaggggctgcataccaagctcttaatgccattgaagcccgaaggtacaggtgggttcggctcaaccatatcatctatgattactgccaagataagtcaaggtttccagtgatcccaccagagtgccttgccggcatttaaaccctaaatttcatgtcactttaattattcaaagtcaagaatacccctatatataatttacattggccactggtcaaaacataacatactatattttatcggaaaaaaaacaatatac

SEQ ID NO: 6201 - DNA, 367 bp, Glycine max
  Clone ID: LIB3074-030-Q1-K1-B4
atattcttgtcaggaagaacactggacaaacaggccgtaacagaagcaaacttaaagaaggctggctaccacacatgggaaaaattaattctcaaggatccacaagatccttccactccaaatgcagcttcatacaaaacagcagcgagagagaaactgataaggcagggatacaacattgttgggatcattggagaccaatggagcgatctcctcggaggccacagaggcgaaagcaggacctttaagcttcctaatcccctgtactacattcagtagttccttcacctctcaacaatctagcttgctcctatctatctatatgtaataagatgcgttcaaattagggcactaacttcactttatg

SEQ ID NO: 6202 - DNA, 293 bp, Glycine max
  Clone ID: LIB3074-030-Q1-K1-B5
gaacatcatcatcaacaacaagcagatcaatctctctctctctctcaaccataatagtcataggcttgaaggaggattttgagcagtatgctgagaaagcaaagactttgccaccgactcaatcaaaccaagacttgcttatcctttatgggttggaccaaccgggcacccgtggacctggcaacaccaacccgcctggaatggtcaacattggggaccaaacttaattggatgcattggaaggttgtgaaaggaaaatccaaggccaaaccatgggtgaataccttatttaa

SEQ ID NO: 6203 - DNA, 390 bp, Glycine max
  Clone ID: LIB3074-030-Q1-K1-B6
gaacacgagtgaaagtacaagttgcagggatggcctcaacctcctcctccacactctctatatcctcttcatccacccttgttgatgccaaggctccaagtccaagacaatccccacaatgtgtctcccctccacctgttcactctccttggaagaccactgctttctgtcgcaggattgcaagcaatgttatggcaatggctaccaccagagaggcacccgcagcagaagttgccacgaccgagctctctgttgccgagacgccagacattgtgaagactattcaagaagcttgggacaaaggtgaagacaaatatgccgtgagttcacttgccggaacccgtgtggttgcattgggtggctcaacttgcatgatctcagcaattgata

SEQ ID NO: 6204 - DNA, 205 bp, Glycine max
  Clone ID: LIB3074-030-Q1-K1-B7
gggtctctcaccgctccttcagagtgggggcgcctagatggctctatccttaaggttccgtcaccgcaccaagtctcagcacccaaccaggtcttctttcattcatggcggaggaacttatttctcaattaaacaatatgctagaagaaaatggaacaccacggcatgtagaaagggctgctgatgctgatgctgatgctgagct

SEQ ID NO: 6205 - DNA, 283 bp, Glycine max
  Clone ID: LIB3074-030-Q1-K1-C1
ggcacaagtgagtttgttgatcgagataactagaaacagtgtgatgaaaatgaaggtccttgttttcttcgttgctacaattttggtagcatggcaatgccatgcgtacgatatgttccctctccgaatgaacactggctatggtgcccgtactccggaggtggaatgcgcaagttggaggcttgctgtggaagcacacaacatctttggctttgagaccattcctgaagagtgcgttgaagcaacaaaggaatacatccatggcgaacaatatagatcagac

SEQ ID NO: 6206 - DNA, 187 bp, Glycine max
  Clone ID: LIB3074-030-Q1-K1-C4
ggcaattgtgtgaggaaatatctttcacgagtttgtataaggagagaagcggacatgaagaagcaattagcatcaaggcgtttgctgatgtgggttatggtacatctgagcatttcaggagtgttgtccaagtccaaccacacaacatctacaacttgtctgctgtgcgatggttccgaaaaggact

SEQ ID NO: 6207 - DNA, 311 bp, Glycine max
  Clone ID: LIB3074-030-Q1-K1-C7
ggaaatccatcgcagcataaaatgtcaagagtacaagtttgcttgatttccaatacagcctctcaaggaaaaaatacttgaggaagccatcacgtctgttctcatgggaccggcagaactcggggccgaagaatgtatttcctcagcctaaggctgatgagatgaagcaggtgtttgacaagtttgattccaataaagatgggaaaatttctcaacaggagtacaaagccaccatgaaggctctaggcatgggggactcggttcatgaagtgccgaatattttcaggggggttgatttgaatggaaatgga

SEQ ID NO: 6208 - DNA, 260 bp, Glycine max
  Clone ID: LIB3074-030-Q1-K1-D1
gcagtaatatccacaatcaacgaggcgtgtcccaagcttccttactgcagcttccgctttggcaacggagttgactcattcctctcttcctctaccatacaccactcactcacttttttcaacatctatgaccataccactctgtaaaccaagaccagaccactcaccagttctcctgctttcatctgccgtcaggtagggccaactacatcagacagttcttcacccaaatcgatcaaggctgagattctgcacttacc

SEQ ID NO: 6209 - DNA, 216 bp, Glycine max
  Clone ID: LIB3074-030-Q1-K1-D3
gggccggaaaaaaaccaggtggtgggaacttagaagaagggaatggctttctcaatggtcttcttcccaggtggtaccaacggcaaacgtgcccgtgcccggatgggtggttcattcaccggccttaaaatcatgggtgggtttcccaccagggagaccaaccatggccttaccttcattggtagcaaccggggaagaatacaatgccttccagtg

SEQ ID NO: 6210 - DNA, 334 bp, Glycine max
  Clone ID: LIB3074-030-Q1-K1-A4
ggaaaaaggctaagacatggtagagcttcttctacgagcatcacctcctccacttcacccttcttcttatccgagacaatgcaggacagtgtcaggaaggacattggtgaagtgctcattggaagtcccaagtaaggttctgacaaagcatgtcttatccgggcttgctgcttccttgatatttatttctccagcaaatcagactattgcagcacatctatctcgtgcaccaaataatctatgccaacttgccagtgccagtgagaacacagttgcttcaccatttgagaatgaaaaaggttcaaatctaatgatgatgagaggaatggacagc

SEQ ID NO: 6211 - DNA, 387 bp, Glycine max
  Clone ID: LIB3074-030-Q1-K1-D4
gacacaactgaacaagataagctatccatagcagccaaagaaatgaagagtaccttgttcgccctctttctactttgtgccctcacctcttgcctaccttcagccaccgctggtgatgtggtcgacactgatggtaatcctgttgaaaatggaggcacatactttgtgttgccaactataatattaaacggcggtggaatagaatatgccacatttggaaatgaaacttgccctgtcactgttgcgcaatctcgcgatcagttctgcaagggctttccgataaccatttcatccccagcccgaattcgtcacatcagcgaaggccttagtttgaacattgggttcacttttccatcctcgtgttcccccgcttctgagtggaccatt

SEQ ID NO: 6212 - DNA, 184 bp, Glycine max
  Clone ID: LIB3074-030-Q1-K1-E1
gacaccaacgccaaaacaaacccactaagatggctgccttgtgatgcttcctagacgctgattgttgcgacccttattctgatgcgtcacagggctggctgctgtagctacaaagcgcgagcaccaatgctggagaatacaagcgctgagcacgatcgagtgacacacagtgtgcaaaccaccg

SEQ ID NO: 6213 - DNA, 405 bp, Glycine max
  Clone ID: LIB3074-030-Q1-K1-E2
gagaagatcgaagcgcagaagcgaaacgcagagaggaatcagaagggaaagggctctcagctcgaggccagagccgttggcctcaaagtcatctgccccatctgcaaggcccaacttgcaaatcaaaaccaactggttgatcattatgcttccaaacatccgaaggagaaacctcctgcagagtcaagctagttatatttgagcaaatggtacaaaaagtccccaaaaaaaattgctctctaggtgtgccttcgtgcttttaatgtaattctccctgcttgcaggcaggttgcaacatgttttaagttaatcatgttaatgtgcattattgtgagatcctaaaagatcataaaaactgcgtctatcattataagaatatcatcatgttgctaacttgggggtggc

SEQ ID NO: 6214 - DNA, 302 bp, Glycine max
  Clone ID: LIB3074-030-Q1-K1-E3
agaaggggccgctgagctccctttctcctcggaccacatagacaaaatgtaagacaggtgccaacagttcattactaatgaaaggactagctgagccgagatcactaactaaaacgaatttaatactaatcgaaaatacttattgaattgaaattgaactgtcttttcatatagatatcccttcaacacaacataggtcatttaaaggatcttgaagacccaccaacgcacaaaagtcgggatcattcagaaaaggtattttttttgaagggggcataaccatattgataaactttacacta

SEQ ID NO: 6215 - DNA, 408 bp, Glycine max
  Clone ID: LIB3074-029-Q1-K1-G10
gatctccaacaagcggggctgtgaccatggcatccaccactctatcccctacaaccccttctcagctatgctcaggaaagagagggactttcagtccctcacaggcacttcttgtgaagccagtgaagaggcagatgatggggaagagcaagggaatgagaaatgcatgccaagccaccaacattcctgctgataaagtccctgacatgggcaaaagacagctcatgaatcggcttcttcttggggccatttcactcccctctgctggaaagcgtataccctacacctacttttgtgtccctccaggatcaggttcttcagctggtggtactgttgccaaggatgctggtggaaatgatgtaattgcagagaatcggctcaaggcacatggacctcgggaccgaaccc

SEQ ID NO: 6216 - DNA, 237 bp, Glycine max
  Clone ID: LIB3074-029-Q1-K1-G11
gacacacacttttttcaaggcataggattggtgaggcaaacttgaattgaagtgaagaaggagatggctgcaacctcttccttgtgctcatcgaccctccaatcccagaatcaatggattctttcttcacaaaacctttctttcccaatactccttccctaactttttcaagaaggaaaattccaaccccagggaggcctccttttgaggtcaccaggttttaaaaaagcgatttca

SEQ ID NO: 6217 - DNA, 420 bp, Glycine max
  Clone ID: LIB3074-029-Q1-K1-G12
agaagtggagtttgaatgcccacatgatgttttcattgttgacaaggctgaggaagaaggcattgaacttccctactcgtgcagggctggttcttgcgtttcatgtgttgggaaaattgtgaaaggtgacgtggaccagtcagatggtagcttccttgatgatgaacaaatagaaagtggatgggttctcacctgtgttgctctacctaggtcagacgttgtcattgagacacacaaggatggagagatcgaatgatcgatatatatcataatgtaatcttgtccattgctcttctaatgccatctatctatgtcgtgttttgattttgttagagtgatttggcattggctaagttactagctgatatcattgcgagtttattaattactcttgtcatcgttgtggaaacaagtgaaatt

SEQ ID NO: 6218 - DNA, 54 bp, Glycine max
  Clone ID: LIB3074-029-Q1-K1-G2
gagacctcaggtcaggcggggctacccgctgagtgtaagcatatcaataagcgc

SEQ ID NO: 6219 - DNA, 210 bp, Glycine max
  Clone ID: LIB3074-029-Q1-K1-G3
gatagctcgtggcaaggagactacctctgtatgcagattacattgcataaatggcatcattcaccatgacagcttctatctttggctgcccatctgtaaccaaacggtctgcagtggctgcgcacaagagattactcgtagtgagtgctgccaaagctgaaagggaaaaggtcagttatgacaacaatgatagcaatggaaggaggaact

SEQ ID NO: 6220 - DNA, 415 bp, Glycine max
  unsure at all n locations
  Clone ID: LIB3074-029-Q1-K1-G4
ggcacaacaactcactcactaagctaaacaatttcatcaagcctgccatggcttcctcgtgtgcttcctctgccattgcagctgttgccatctccacaccaagttcccagaagaatggatcactcttgggaagcacaaaagcttcttttcttagtgggaggaaactgaaggtgaacagttttacagcaccagttggagcacgatccagcactacagtgtgtgcagttgctgagcctgataggcctctgtggttcccaggcagcacccctcctccgtggctagatggcagtttgccaggagattttggctttcatcccctaggtcttggatctgatcctgagagcctgagatggaatgtccaancagagcttgtgcactgcagatgggccatgttgggagctgctggcattttcat

SEQ ID NO: 6221 - DNA, 312 bp, Glycine max
  Clone ID: LIB3074-029-Q1-K1-G6
aaacagcagagagaagagaaggtgtagacaaacacaatctctaatggcactcaggatgtgggcttcttccactgccaatgcactcaaagtctcttctacctccagacctcatctcttgcatcctttttctttctccagatgctcgtcttccgtcttggatggacttaagtatgcaaattcacacaaatgggtcaagcccgaaggctcagtccccaccattggtatcactgaccatgcccaggaccatcttggagaggttgtgtatgtggagctgccagaatcaggtggcacagttacccacaagtctggctt

SEQ ID NO: 6222 - DNA, 385 bp, Glycine max
  Clone ID: LIB3074-029-Q1-K1-G8
gatccataaccatggcgtctaactctgcttccgctctttacttccttttatgcctatcgcccatcactttgcttctttctgcgtttcgtgctcaagctcaatctcatgctccagctcccactttcaagtactgtgaaaagaatgcagactatgctgtgaaggtgagtggagtggaaatattgcctgaccccgtggagagaggagtgctattcacctttaagatcccagcttatactcctgaaccaattcaaagcggggacttgttatatgaaatttcttatgctggaatagaagcacaacctgctacatttctccatgatctctgggaggaagcaccatgcccagtacctgcaggcaactttgtgctcgttcacaccgaattatt

SEQ ID NO: 6223 - DNA, 398 bp, Glycine max
  Clone ID: LIB3074-029-Q1-K1-H10
ggggggcagcagaagaacaggtagttgagaactaagaaggagaagcaaatggcttcctcaatgatctcttccccagctgttaccactgtcaaccgtgccggtgccggcatggttgctccattcactggcctcaagtccatggctggcttccccaccaggaagaccaacaatgacattacctccattgctagcaacggtggaagagtgcaatgcatgcaggtgtggccaccagttggcaagaagaagtttgagactctttcctacctgccagaccttgatgatgcacaattggcaaaggaagtagaataccttcttaggaagggatggattccttgcttggaattcgagttggagcacggtttcgtgtaccgtgagcacaacacgtcaccaggatacta

SEQ ID NO: 6224 - DNA, 455 bp, Glycine max
  Clone ID: LIB3074-029-Q1-K1-H11
ttcccgggcagacggcagaaggggggggatgtcagtgataagccttgtgtcactggctaatgctggcttctcagagatgagaggggagcatttgaactattcaaagttttggaatgctaatccctctgcagaaaagcaggtcaagttgtctagcaaagctggcatgcttttgctgtacactcctgcttttcttgctggccttgcatccttctggatctttcctcaccaaggcctcacatccaccctccttcagtctgcagttaccctgcatttcttcaagagggtctttgacgttgtgtttattcacaaatatagtggtgccatgcttcttgattctgcaatccccatcactctgagttatttcctatcaactgcaactatgatctatgctcaacacttaacacaagggcttgcagaaccaccaatcgatcctgtgaatcctggcattgttttgt

SEQ ID NO: 6225 - DNA, 306 bp, Glycine max
  Clone ID: LIB3074-029-Q1-K1-H2
ggcggcgcacagcagaactctgcttcttcggagtccgatcgcacgcgccgtcaccatggtgaacgttccgaaaacaaagaagacatactgcaagagtaaggagtgcaggaagcacacgctgcacaaggttacccaatacaagaagggtaaggatagcattgctgcccaaggaaaacgccgttatgatcgcaaacaatccggttatggtggacaaactaagcccgtcttccacaagaaggctaaaaccaccaagaagattgttctgaggttgcaatgccagggttgcaagcatgtctcccaacacgc

SEQ ID NO: 6226 - DNA, 230 bp, Glycine max
  Clone ID: LIB3074-029-Q1-K1-H3
cgtccggtcgcgcggagacgacagaagggggaccaagtgaaccaatatagcccaagccctatacaggcgaaccctaacacacacccatttgattcagattccatggctagcctcaaggatgcatttttggctgcagagctctgcatggttgcggtgagtgcacccatggcacatgcaactatcacgtgcgggcaggtgacgagtagcctggccaattgcatcggttacct

SEQ ID NO: 6227 - DNA, 361 bp, Glycine max
  Clone ID: LIB3074-029-Q1-K1-H4
gagcgccaatgtttttttcagaggagtttcatcttgtaatcaaaagagtttatcttatagtaagaaatcgatgtcttactccattttaaggaacaaaacaagagaacaatagcctgacaaagggtttagccataaaatcgaatccatcattgatttgagatattgataaggtgaatactcatttctcgtcaatgctaggcataatgcgggtatagggacctaaaaaagattatcttttcttcctatcttatgaactttaaggtgtatgaagtgtcatttcctatcttacattttacatttagtacgtagataaagagtccatttaacttaagttgatctaggccagaaacagacctacgtc

SEQ ID NO: 6228 - DNA, 316 bp, Glycine max
  Clone ID: LIB3074-029-Q1-K1-H5
agtggacgacatgggcaatgcgaaaagcgaaggtcggcactcactatggtttcatccctttggtcatcatcatcggtatgaactctgaccccaagcccccactttcccagcttctcagccccgtctgatctacctcttcatttcttccaccatcaacgcgacctcgtttttttcttttcttttgccccctttatacatttgggaggctccttatggagcaatcatcacttgcacatctcatgtggcatggtgtgatcaaagtcgattagcttgtctgcgtgtctggatagttttgaaagacaccgccagaaataat

SEQ ID NO: 6229 - DNA, 240 bp, Glycine max
  Clone ID: LIB3074-029-Q1-K1-H7
gatcatgtacaagggcaatctctctctctctgtctctctctctctagacttaaaatttgtgaatggctgaagtggaagagggacaggtcattggcgtccacaccgttgatgagtggaagctgcaacttcagaatgcaaaagactccaaaaaactgattgtggtggattttactgcttcctggtgtggtccatgccgctttatggccccagttcttgcagagatcgcaaagaaaactcctg

SEQ ID NO: 6230 - DNA, 298 bp, Glycine max
  unsure at all n locations
  Clone ID: LIB3074-029-Q1-K1-F9
ggttctagtgtgtgattgtttgttgttggactcgttcttcttcttttgttgttctgtgtttgtgtttgttttttctctcacctgaaaatgtcttgctgcggtggtaactgtggttgcggaagctcctgcaagtgcggcaacggctgcggaggctgcaagatgtacccagacttgagctacactgagtcaaccaccaccgagaccttggtcatgggagtggcacctgttaaggttcaatttgagggtgcttgaaatgggtgtgcccgctgagaacgatggctgcanatgtggaccaaac

SEQ ID NO: 6231 - DNA, 319 bp, Glycine max
  Clone ID: LIB3074-029-Q1-K1-H9
acgcgtactatcacgcgtccgacggctgttatattttacagatggggtaaagagaggggagagagaataacatggcgacgagcggaactatgcccctttgtacggcagcgggcatgacatacatcacatactcaaacatatgcgcgaatctggtcaggaattgccttaaggaaccctacaaggctgaagccatctctcatgagaaggtccattttgctctctccaaatgggtcgacgccaaacctgacaaacccactattcttcagacaccccaaagcagtgatcctgaatagtcggaagctataaatgcataaatttt

SEQ ID NO: 6232 - DNA, 411 bp, Glycine max
  Clone ID: LIB3074-030-Q1-K1-A1
gacacttactagtagtaagcatggagtcctcaaggatctatgcttacctcttcctctgcatgatctttctctctttcgccactcccattctcggttgtggctactgtggcaaaccccccaaaaagcacaagcctggtaaaacaccaaagacacccaaaacacccgttgttaagccaccagtcaccatccctcccattaacgttcctcccgttgttctttcaccaatagtgaagcccccaggtactttccctccaattccaattattaacccaccaaccacacctaggaagggagggaacacttcttgcccaccaccaaagtcttcttcgcaagctacgtgccccattgacacgcttaaacttggtgcctgtgtggatctttttggaggggtgggtcacattggtttggggg

SEQ ID NO: 6233 - DNA, 409 bp, Glycine max
  Clone ID: LIB3074-030-Q1-K1-A2
ggcacaagtgagtttgttgatcgagataactagaaacagtgtgatgaaaatgaaggtccttgttttcttcgttgctacaattttggtagcatggcaatgccatgcgtacgatatgttccctctccgaatgaacactggctatggtgtccgtactccggaggtgaaatgcgcaagttggaggcttgctgtggaagcacacaacatctttggctttgagaccattcctgaagagtgcgttgaagcaacaaaggagtacatccatggcgaacaatatagatcagactccaaaacagctaaccaacaagcttacttttatgccagagacctcgaagtccatcccaaagacacatttgtggtcagtatagatggcaccgtactctctaatattccatactacaaaaaacatgga

SEQ ID NO: 6234 - DNA, 179 bp, Glycine max
  unsure at all n locations
  Clone ID: LIB3074-029-Q1-K1-D8
ctgctgtcagatgacagcagacgacagactgggacgatgagtcgatttgataactaanaggagggcgattcgagatattcatccacttagacatcatctaaatacaattcataccataagcaaattcattataaatgaaagatatatcatttatatgggcttaataaccgcatctttta

SEQ ID NO: 6235 - DNA, 133 bp, Glycine max
  Clone ID: LIB3074-029-Q1-K1-D9
cttttcctatttccctaaccatttaatcatccggaatgcttttatcaaacaataagctcttttttctaatccatcagattccgatcataaacatctccttcctaattgccttaaaagctgtcttacttcaaca

SEQ ID NO: 6236 - DNA, 257 bp, Glycine max
  Clone ID: LIB3074-029-Q1-K1-E1
gatagaagaagcagaaagagaagcattagcaaaagcaagaagaactagtctaagcagaaatggcctcttcagtgatggcatctgtggccctcaaacctgcccctttcactgttgagaagtcctcagttagaggccttcccttcctctcaaagaactcctcttcattcacagttgtggccagtggtggcaagaagatcaagactgacaagccttatggaattaatggtggcatggctttgagggaaggagttgatgca

SEQ ID NO: 6237 - DNA, 247 bp, Glycine max
  Clone ID: LIB3074-029-Q1-K1-E10
gaacctttgcattctattcattcaagattcagcaagtgcgttttggaagcagagaccgaaatacttcgagatggcccttacaaagcaaactgctcgtaagtcaactggaggaaaagctcccaggaagcagcttgcaaccaaggctgcacgtaagtctgcaccaacaactggtggtgtgaagaagcctcatcgttatcgccctggaactgttgctcttcgtgagattaggaaataccagaagaacact

SEQ ID NO: 6238 - DNA, 163 bp, Glycine max
  Clone ID: LIB3074-029-Q1-K1-E11
gggagaaaaacacagagaactaaactgcggaaggcggcttactgttagggccaagcgttagtttgtggtattgagcaataagctaaaagctaaaactaatatcacatctaacattaggactacataattactatgcatatatctatgcgtgataaataacaaa

SEQ ID NO: 6239 - DNA, 392 bp, Glycine max
  Clone ID: LIB3074-029-Q1-K1-E12
gatcttaagcttcgactctctctctctggggaggcacattctacaaactctctctattattattcaccctatgactctcttttgcaaagaaaacagcttaattaagtcaatttgtaccaaaatggctcctaaagtttgtgaaactatggctttcatcaacggagatgaaggggtgaaaatcaacggtgctcttataatgtccctgaaggaagagccatcaccaagtgatgagagtgaagatgatcgatcggatagcttgattaaggcccttgaggctgaaataagtggaagcaagatgggggatcataacgggacatcatccataaggtcaaaaatattgaagaacaataaaattataaaaagagcgtgcatctcaatcatggaataataac

SEQ ID NO: 6240 - DNA, 445 bp, Glycine max
  Clone ID: LIB3074-029-Q1-K1-E5
aagacgacagaagggggggtgtgttgggaagatggagggtgcagaggaggagctagaaagaagaagcaagtttctcaaaagcttgatacagaagaagaaaaccatagagcaacaagagcagcatgatcacctacaacacaacaacgttcgtgtcagagcttgtgacatgcctctccctcttcagagccgtgcctttcgttgtgcacgtgatctcctggattctatgccaccaaagaagtttgatagtaaacgcctggccctcacacttaagaaggaatttgattcttcttatggtccagcttggcactgcattgtgggtactagttttggcttctatgttactcattcccttggtgggttcgtgtatttttccattgacaaggttttatgttcttctcttcaaagacagctgttggaccattagaccattcatagctctcacaat

SEQ ID NO: 6241 - DNA, 427 bp, Glycine max
  Clone ID: LIB3074-029-Q1-K1-E6
gaaaactgcaaccgtgacaaaagttgcgtagcaatagcatactcttactctgattcgttagtgaagaaaaatggcaacaatcatcgccggcaccccaactacatcaatcactcgcacaggtcatgtgctcaaacgacctgttggggcctcatcctctaccgttcttggattgccagcaatggccaaggcggggagagtgaggtgctccatggaggaaaagccttcaagcagctcaaacctagggatgggggcatccttgttagcagctgcagctgccgcaaccatgtcaagcccagcagccatggctttggttgatgagagactcagcactgaaggaactgggcttccctttgggcttagcaacaaccttcttggttggatcctgtttggtgtctttggtctcatatgggctctcttctttgtctac

SEQ ID NO: 6242 - DNA, 260 bp, Glycine max
  Clone ID: LIB3074-029-Q1-K1-E7
gaaaactgcaaccgtgacaaaatatggcgcggaggttcatacactaactcggattccttagtgaaaaaaaatagcaacaatcatcgccggtaccacaactacataaattactcccacaggtcatgtgctcaaacgacctgttggggcctcatcctctaccggtcttggattgccagcaatggccaaggcggggagagtgaggtgctccatggaggaaaagccttcaagcaactcaaacctagggatgggggcatcccttg

SEQ ID NO: 6243 - DNA, 410 bp, Glycine max
  Clone ID: LIB3074-029-Q1-K1-F10
ctggcagcagaagaacacgtacttgagaactgagaaggagaagcaaatggcttcctcaatgatctcttccccagctgttaccactgtcaaccgtgccggtgccggcatggttgctccattcactggcctcaagtccatggctggcttccccaccagaaagaccaacaatgacattacctccattgctagcaacggtggaagagtgcaatgcatgcaggtgtggccaccacttggcaagaagaagtttgagactctttcctacctgccagaccttgatgatgcacaattggcaaaggaagtagaataccttcttaggaagggatggattccttgcttggaattcgagttggagcaccgtttcgtgtaccgtgagcacaacaggtcaccaggatactacgatggacgctact

SEQ ID NO: 6244 - DNA, 414 bp, Glycine max
  Clone ID: LIB3074-029-Q1-K1-F11
ggttttggggatagatagagtgatacgcgtcacatgttcataataataaaaaaatggcagcggcggcggcagggaccgtgctactcccacctaggattccgaccaccaccaacgtgacccgctgatctgctttgccttctttgcctgctggcgtatccaacaccaaaaccactgtgttatcacctttcctcaacaacttttcagagtcccgaaaatcttctctgcttcagaccagagcttgttcagaggaatcatcctcaggagatgccaatgacgtggtcacagacttgaaggaaaagtgggatgctcttgaaaacaagtccacaggacttctttatggcggaggggctataactgctatttggctatccgtaatgcttgtgagcgccatcaactcaggtaccttgcttacaa

SEQ ID NO: 6245 - DNA, 449 bp, Glycine max
  Clone ID: LIB3074-029-Q1-K1-D5
cccacgcgtccggagaagcgacagaagggaagagttttaatattattgtattgtagtagtagccatggggactttcaatcactatgtgattgttaagttcaaagatggtgtggcagttgatgatctcattcaagggttggagaagatggtctttgggattgaccatgtcaagtcctttgaatggggaaaggacattgaaagtcatgatatgctaagacaaggtttcactcatgctttcttgatgacattcaatgggaaaagaggagttcaacgcatttcagactcacccaaatcatcttgagttctcgggagtgttttcacctgctattgagaagattgtggggctggatttcccatctaacctcgtcaaagcaccagcatgatcctcaacttattcaagcaaataaacttttccatctttaaaagcgtatgcatgtgtgtgcatctgc

SEQ ID NO: 6246 - DNA, 245 bp, Glycine max
  Clone ID: LIB3074-029-Q1-K1-F2
aggcgtgcgaacacgtccgagaggtccacctgcgggaagaccacagactgccacggccgctacaggaccacaaactgggatggctacctcatacaacgccttgcattcaaacccttacaggaattccttgtgcatcgctgtcttccacacaaccaaacatgacctacacatgcgggaactgcgactggactgacaagactacctggacgaaagcaaacagctatggagatattggggagactggc

SEQ ID NO: 6247 - DNA, 411 bp, Glycine max
  Clone ID: LIB3074-029-Q1-K1-F4
tgaagggaattaaatagcacagagtattgaacaaagaaagaaagatcgattgaaattaagaggcctcaaaagctgcacacattggcctttctgtccaggaatttgagatctagcaactaacaaggcaataatgatgttcttgttccagtgcccttgctgctcttgcttttgcttcatgaaaccaaagcaagggaaggcaaaagtcaaagaattcaaataaaccaacgtggaagaaaaaaatgttgaagaaaagaaatactgaccatgtaactccatttcaagctttctttggttattattagaattatataagcatgcacaaaaaaatagtgtctacttaatttgagcttctatgatcctttaattaccactgctatgatgccttcctactacaataattttgaaaacgta

SEQ ID NO: 6248 - DNA, 386 bp, Glycine max
  Clone ID: LIB3074-029-Q1-K1-F6
aaagagagtgaagagagaagaagatggcgtctagcggagcggtgccgttttggtgggcagcggggatgacatacatcacatactcaaacatatgcgcgaatctggtcaggaattgcctcaaggaaccctacaaggctgaagccatctctcgtgagaaggtccattttgctctctccaaatgggtcgacgccaagcctgaaaaacctactattcgttcagacaccccagagcagtgatccggaatagttggaagctataaatgcataaatctttgagatctggaagttcattgtcattttgaacctttctgggatgtttaattcctttgcttctttctttttcattccatgaaatggaacatacactggattttgatttgcatgatt

SEQ ID NO: 6249 - DNA, 398 bp, Glycine max
  Clone ID: LIB3074-029-Q1-K1-F8
gaaattcaaagtatggaggttgaataatatctgctgagcattaaaagttccccaaccatgaaggcaatccttgttttcattttactcttggcctctatttttttccttcccagttcaactcttgctcgacaactggaggtggtgacaggcggtacccagaaccctaataatcccgcttttaaatgtagccgcggcggcagttataggccttgcgccccatcgaactcgccaccaagaccaccatgtaatgcgtacattacgtcttgccacatcgcatcgccaccaagaccacccatgtatcagtattgtagggaaggttgcttaccatgaaactaccccccaccatactataatgatatatggtccttttaattcttggtacttgctgccatcttttt

SEQ ID NO: 6250 - DNA, 305 bp, Glycine max
  Clone ID: LIB3074-029-Q1-K1-B12
ggggcaccatcgctgcataataacctattgggagatgctgacatgaataaaaaaggaatggttcaaataccatttactaacataacagaaaacattgtaaaaatacttttacgcgagggttttgttgaaaacgtcagaaaacatagagaaaacgacaaatattttttagttttaactctacggtatagaagaaatagaaaaggatcatataaaagttttttaaatttaaaacggatcagtacacccggtctacgaatatattctaattatcaacgaattcctcgaattttaaggggcatggggga

SEQ ID NO: 6251 - DNA, 350 bp, Glycine max
  Clone ID: LIB3074-029-Q1-K1-B2
ggcacaagtgagtttgttgatccaaaataaactggggcagtgtgatgaaaatgaagggccttgttttcttcgttgctacaattttggtagcatggcaatgccatgcgtacgatatgttccctctccgaatgaacactgactatggtgcccgtactccggaggtgaaatgcgcaagttggaggcttgctgtggaagcacacaacatctttggctttgagaccattcctgaagagtgcgttgaagcaacaaaggaatacatccatggcgaacaatatagatcagactccaaaacacgtaaccaacaagcttacttttatgccagagacctcgaagtccattccaaagacaca

SEQ ID NO: 6252 - DNA, 222 bp, Glycine max
  unsure at all n locations
  Clone ID: LIB3074-029-Q1-K1-B3
gagagcgaaagagatgtcgttggtttcaagcatgttcgggtgtggagtggtgatggcggcgtcgcaagcaatgggaattggaaggagaagcgatggtggattgacgatagtgtgttcgtctaggccgcagaagaaagcgacggcgcatcacatgaagactcggcctcggaagacgcangcatgggatagaaaccgcaagcccaccgtctacgatccactccc

SEQ ID NO: 6253 - DNA, 419 bp, Glycine max
  Clone ID: LIB3074-029-Q1-K1-B4
ggcgcaagtgactttgttgatcgagatgactcgaagcagtgtgatgaaaatgaaggtccgtgttttcttcgttgctacagctttggtagcatggcaatgccgtgcgtacgatatgttccctgtacgaatgaacactggctatggtgcccgtactccggaggtgaaatgcgcaccttggaagcttgctgtggaagcacacaacatctttggctttgagaccattcctgaagagtgcgttgaagcaaagaatgaatacattcatggcgaacaatttagatcagactccaaaacagttgaccaacagacttacttttatgccaaaaaccttaaagtccatctcagggacacatttgagtaaactatacatggtgccgccttttctaatgttccttactccctggcagatccaatgaggaaag

SEQ ID NO: 6254 - DNA, 235 bp, Glycine max
  Clone ID: LIB3074-029-Q1-K1-B5
gaaggtgcaagaatgtctagtgagctataaactaggatagcgtgaggagaatatgaagctgactgttttccctgttgcggcactaacattagtagcatggtcatgccatggctcttgctaccaaaggagccctctccgaatgaaaacaggctatggtgagcggtcttcggaggaaaaatgctcacgttttatagctagctgcggaagcacacaacatacgagcctttaaaaccat

SEQ ID NO: 6255 - DNA, 95 bp, Glycine max
  Clone ID: LIB3074-029-Q1-K1-B6
gacgccaacgacatctcaaatcaaaacaaaaggcgaagagagagcagaggaggaagaaaaaaaccttctctgcccgccaaacgcaattttccccc

SEQ ID NO: 6256 - DNA, 394 bp, Glycine max
  unsure at all n locations
  Clone ID: LIB3074-029-Q1-K1-B8
ggcacaagtgagtttgttgatcgagatagctagaaacagtgtgatgaaaatgaaggtccttgttttcttcgctgctacaattttggtagcatggcaatgccatgcgtacgatatgttccctctgcgaatgaacactggctatggtgcccgtactccggaggtgaaatgcgcaagttggaggcttgctgtggaagcacacaatatctttggctttgagaccattcctgaagagtgcgttgaagcaacaaacgaatacatccatggcgaacaatatagatcagactccaaaacagtaacccacaagcttacttttatgccagaaaactcgaaagtcatccaaagacacaatttgtgtcagtatagatggcaccgtactctctatattncatactac

SEQ ID NO: 6257 - DNA, 414 bp, Glycine max
  unsure at all n locations
  Clone ID: LIB3074-029-Q1-K1-C10
ttttgtcgccaatgtttttttcaaaagagcgggatcttgtaatcaaaagagtgtatcttatantaagaaattgatgtcttactccattttaagaaacaaaacaagagaacaatagcctgacaaagggtttagccataaaatcgaatccatcattgatttgagatattgatagggtgaatactcatttctcgtcaatgctaggcataatgcgggtatagggacctaaaaaagattatcttttcttcctatcttatgaactntaaggtgtatgaagtgtcatttcctatcttaaattttaattttagtagatagataaagagtccatttaacttaagttgatctagggcagaagcagacctacgtcaagataatccctctttgaaacactttggtagtgctcttagaatgtaatcc

SEQ ID NO: 6258 - DNA, 406 bp, Glycine max
  Clone ID: LIB3074-029-Q1-K1-C2
gacagcacagcactctttgcaacacaacaaaaaaagacaacacagagagaagcgtcttaataaacgctcttctctgaaaaacctgatttcttctcttcttctcttctctttcgtttccatcttccatctctgaaaatgagagagtgcatttcaatccacatcggtcaggccggtattcaggtcggaaacgcctgctgggagctctactgcctcgaacacggcattcagcctgatgggcagatgccaagtgataagactgttggtggaggtgatgatgctttcaacaccttcttcagtgaaactggggctggaaagcacgtgcctcgtgcgatttttgtacatctcgagcctactgtgattgatgaagttaggactgggacataccgccaactatttcattctgagc

SEQ ID NO: 6259 - DNA, 321 bp, Glycine max
  Clone ID: LIB3074-029-Q1-K1-C3
gagagagagagaatggagaaaaaggaggaaaaggtggtggtgggcgtgccagtgccagtgtattacggtggagaaaatgaataccaaaggggaatcatccctcctaacgccgcgtttggagatccaaagggcatccccatccagcaaaccatttacagggacactcctgctcctttcaactgcccttactgcgctcataccgctctcactaccgtcagatcaaagcccagtctggcagcatttgttggatgcttgatgccaatgatgcttggagtttgctttctttgcccttcaatggattgcctttggcataaatatcac

SEQ ID NO: 6260 - DNA, 285 bp, Glycine max
  Clone ID: LIB3074-029-Q1-K1-C4
tacgatttaaccgatcctgcgcctgctacgacatgtgcacatttagatgctactactgtactatcaagaggattagcggccaaaggtatctatccagcagtagatcctttagattcaacctcaactatgctccaacctcgaatcgttggtgaagaacattgtgagactgcgcaaagagttaaacaaactttacaacgttacaaagaacttcaagacattatagctatccttggcgtggacgaattatacgaagaagatcgcttaaccgcagcaagagcacgaaaa

SEQ ID NO: 6261 - DNA, 246 bp, Glycine max
  unsure at all n locations
  Clone ID: LIB3074-029-Q1-K1-C5
gccttttgtctccctttctcctcggnccacaaagacaaaatgtaagacaggtgccaacagttcatcacgaaagaaaggactagctgagccgagatcactaactaaaacgaatttaatactaatcgaaaatactaatagaatagaaatagaactgtcttttcatatagatatcccttcaacacaacataagtcatcgaaaggatctcgaagacccacccaaccccgaaagccgggatctttcaaaaa

SEQ ID NO: 6262 - DNA, 434 bp, Glycine max
  Clone ID: LIB3074-029-Q1-K1-C6
gacgacagaaggggatgatggttggttgatgtaatgtgatgttttgtgtgtgagtgggtgtgaattttattggtggattcgcattcgcctctggaattcccaaatcatcagtttcagcgaccatggcttccaactccgtccgagttgccgccgctcagatgacatccatcagcgacctcgctgccaatttggccacttgctctcgtctcatcaaagaagcagcatcagctggagccaaattgctttgctttccggaggccttttcttacgtgggtactaaggatggcgacagtgttcgtgttgctgaaccattggatggaccaattatgagccactactgctctttggccagagaatccagcatttggttgtcacttggaggcttccaagaaaaaggatcccatcctcaacgcttgtctaatactcatgttatc

SEQ ID NO: 6263 - DNA, 221 bp, Glycine max
  Clone ID: LIB3074-029-Q1-K1-C8
cgataagacaacacaatttggaatgacgggatagtactctgcacagcgcggctgaaatttggaacgtgcaacatcccgtgctgatatccctacattctgggaaggcaccaaaaccgataacgagtcccgtccccgattcgtggtaccccacactctgcgacttcactctccccatcagcctccacttaaccgcctctttcttcatttatgaaacaacatct

SEQ ID NO: 6264 - DNA, 303 bp, Glycine max
  Clone ID: LIB3074-029-Q1-K1-D12
gaaggtgcaagagtttgttgtgagctataagctagtttatcgtgaggagaatatgaagttgtttgttttctttgttgctgcagtagttttggtagcatggccatgccatggcgcaggctaccaaaggttccttctccgaatgaaaactggctatggtaagcgttcttcggaggtaaaaggcgcaagtttaaggctgctgtggaagcacacaacatccgagcctttaaaaccattcctgaagaagtgcgttgaaccaacaaaggactacattattggcgaacaattaagatcagaactctaaac

SEQ ID NO: 6265 - DNA, 389 bp, Glycine max
  Clone ID: LIB3074-029-Q1-K1-B11
ggaacttgagatggatggaagcggtgttgccgctgggaatcatagctggaatgctctgcgtcatgggaaacgctcagtattacattcacagagctgcacatggcagacctaagcacatcggaaacgatatgtgggatgtggcgatggagcgaagggacaagaagcttatcgagcaagcctctccctccaattaacatcgttgttttgccgatgtcattgtgaagaaaataaactgctcacctggatttacggctgtgttcttgggaagcagggttaatcacaagaatcaaattccgtctgttttcttgtatgcaattcaacataagatttataaatatacctatgctccaatcacaattactttcgctaagcttggcttgttgaaaact

SEQ ID NO: 6266 - DNA, 347 bp, Glycine max
  Clone ID: LIB3074-029-Q1-K1-D2
gagcgaaacagagagtgatttcagtgagtgatcggtgttcacttgatctcatcataatcgtcagcgtcaattgaagaagataccgatcagaaacatcgccgtcggaaggcctgaagaggcgactcaccccgacacgttgaaggcggctttggctgagttcatctcaaccttcatcttcgtgttcgccgactcaggctccggcatcgcctacaacaagctcaccgacaacggcgctgccacccctgccggcctcatctccgcctccatcgcccatgcattcgccctcttcgtcgccgtctccgtcggcgccaacatctccggcggccacgtcaaccccgccgtcacct

SEQ ID NO: 6267 - DNA, 191 bp, Glycine max
  Clone ID: LIB3074-029-Q1-K1-D3
gctcgcaaccgacagaaggtgtactagaaggtctgggatcaattgacgaaatggtaagggtgggcgttccaatgcctatgtttcactgctgaaaatatcatttccgtaggggaataatagctccttactcccgcatttgagatgcaaatggtattcacatccagcggaccatttacagggtcactcctgct

SEQ ID NO: 6268 - DNA, 233 bp, Glycine max
  Clone ID: LIB3074-029-Q1-K1-D4
agaaggggacagacgcataggaggagatggagacgatgatgatgaggagctgcgtttcgatttcgagttcagtgacaaggggcgctattagcgtgggttcctcttcatctttgtgtttcggcacacccaagttgttcaattcagcaagggtggcggtgaatggtcggcgaagaaacaaacgtttgagttgcaacgccatgttcggtctgggggtgcccgaactggtcgttatt

SEQ ID NO: 6269 - DNA, 396 bp, Glycine max
  Clone ID: LIB3074-028-Q1-K1-G9
ggaagtgtatttcgtcactgacctatctttgtagggattcgagggataaaccttgatattaatcaaccccttttaatttccctttacattctacgacactgcgtgctatggcgctacaacgcacttcttgtgttcgggatgttgatgactgcgggcctcgttaacgtttcatctgatccaaagatagaacgaccaatactggaagcacaacaagaactcccgtttccccataacgatccacttatcatgagagacgctaacagaatgctaatgcacgatatggactgcggtgggtcgtgcaagacccggtgcatagcacatttaaggcccaacttgtacactacggcgtgtggcacttgcttaatgaagtacaagtctgtaccacctgccacatct

SEQ ID NO: 6270 - DNA, 203 bp, Glycine max
  Clone ID: LIB3074-028-Q1-K1-H1
gacagaaagagaaagcaatggcttctgtggcaagctgagctgatgctcaaccatctactgtcaagggcctcgctggaactaagctctatttcaagccctttcgacagaactttatacccaagactatcaagagtggtgccgatgaaacaaagtacggggacgagagagtgtacttcgatttggaggatctatgcaacactact

SEQ ID NO: 6271 - DNA, 401 bp, Glycine max
  Clone ID: LIB3074-028-Q1-K1-H11
ggatatattatccctacaacgtattaataaccaaaacagcagagagaagagagggtgtagacaaacacaatctctaatggcactcaggatgtgggcttcttccactgccaatgcactcaaagtctcttctacctccagacctcatctcttgcatcctttttctttctccagatgcttgtcttccgtcttggatggacttaagtatgcagattcacacgaatgggtcaagcacgaaggctcagtcgccaccattggtatcactgaccatgcccaggaccatcttggagaggttgtgtatgtggagctgccagaatcacgtggcacagttacccaaaagtctggcttcggagcccttgaaagtgtaaagcaacaagtgacataaactctccaatcttcgggga

SEQ ID NO: 6272 - DNA, 310 bp, Glycine max
  Clone ID: LIB3074-028-Q1-K1-H4
gactcaccacttcaaaacactcataacacaaagcacaaagcaaagctcatccttgagttaaaaaatggcagcagcttcttccatggatctctcatccccatccttggctggcaaggccgtgaagctggacccatcagccccagaagtgggaagggtgagcatgaggaagaccgtcaccaagcaggtctcctcatgaagcccatggtacggtccagacccagtcaagtacttgcgcccattctatgacgagcctccgtcctacctaacccgtgagtttccatgcgactacggctgggacactgctgggctt

SEQ ID NO: 6273 - DNA, 436 bp, Glycine max
  Clone ID: LIB3074-028-Q1-K1-H7
ggtacattgtctgaacaaccctaacgcgtgcagagcagagagagacccatccatggggcgaagacccgcgcggtgttataggcatattaagaacaaaccatactccaagacacggctttgacgtggagttactgatcttaagatcggaatttactatgttggtatgaacaaaaagggtcttgatcaatttactttctgtatccatctgcttacttgggagaaggaaaacgtttatagttaggccctgcaagctgatcatatcgcttgcaacaagtacatggccaacaatgctggaaaggatgctatttacttgagagtcagggtgcacccattccatgtccttagaatcaacaagatgctttcgtactgccggagctgataggctccaaacaggaatgagacgtgctcatggaaagccacatggtacatgtgctag

SEQ ID NO: 6274 - DNA, 417 bp, Glycine max
  Clone ID: LIB3074-028-Q1-K1-H9
gaaggtgcaagagtttgttgtgagctataagctagtttatcgggaggagaatatgaagttgtttgttttctttgttgctgcagtagctttggtagcatggccatgccatggcgcaggctaccaaaggttccctctccgaatgaaaactggctatggtgagcgttcttcggaggtaaaatgcgcaagtttaggcttgctgtggaagcacacaacatccgagcctttaaaaccattcctgaagagtgcgttgaaccaacaaaggactacattaatggcgaacaatttagatcagactctaaaacagttaaccaacaagctttcttttatgctagtgaacgcgaagtccatcacaacgacatatttatattcggcatagataacaccgtactctttaatatgccatactatgaaaaacat

SEQ ID NO: 6275 - DNA, 206 bp, Glycine max
  Clone ID: LIB3074-029-Q1-K1-A11
gacactgctattcctcggaagcgggctactgagcttccacactgcataccttaaggcttccgaattcgaaggtaacttgcaagatggctaaggaaaaggctcagaccaacattgcggcgggtggtcacgtggaccctgaggaggcaaccaccattaacgagctgaagaagcctcgcgggagaaagaagctccagggcatgccatat

SEQ ID NO: 6276 - DNA, 349 bp, Glycine max
  Clone ID: LIB3074-029-Q1-K1-A3
ggttctatctaattcagtttttttctcccatcatagagggccgaccctctcctttccctcttcaccaaccaatggctcccccaaaggccgagaagaagcccgcggagaaaaagcccgcagagaaggctccggcggagaagaagcccaaggccgagaagaagatatcgaaggaaggaggaagcgagaagaacaagaacagaacaaagaagagcgtggagacctacaagatttacatcttcaaagtgctgaagcaggttcgccccgacatcggaatctcaagcaaggccatggggatcatgaacagtttcataaacgacatcttcgagaagctcgcccacgagtcgtcgcg

SEQ ID NO: 6277 - DNA, 219 bp, Glycine max
  Clone ID: LIB3074-029-Q1-K1-A4
ggaaagagagtgaagagagaagaagatggcgtcgagcggagcggtgccgttttggagggcagcggggatgacatacatcacatactcaaacatatgcgcgaatctggtcaggaattgcctcaaggaaccctacaaggctgaagccatctctcgtgagaaggtccattttgctctctccaaatgggtcgacgccaagcctgaaaaacctactattcgttc

SEQ ID NO: 6278 - DNA, 323 bp, Glycine max
  unsure at all n locations
  Clone ID: LIB3074-029-Q1-K1-A5
atgcttctcaggtgttgaaggagcttcaagaggctaagactgcataccccaatggcttcatccgtatcattggatttgacaacgttcgccaagtgcagtgcatcagcttcatcgcctacaagcccccaggcttctaagtcattgaaaaatttgcaaagcatctgtagccaccccactttgtttgttgtacttaaactacattcccatttgtttttgctttatgagatttcatcatcctgtatttttggcttctgttttcggacttcaatggacattaatggatgagaactaacnggnaaaaaaaaaaaataaaataattaaaa

SEQ ID NO: 6279 - DNA, 438 bp, Glycine max
  Clone ID: LIB3074-029-Q1-K1-A6
acgacagaagggggggaaaatagggtacaatacaaacacaaagtcagaaacacaaatgtgggtatagtggagtagtagggtttttgcgtttgagagagaagaagcatgagcaggagtttgggaattccggtgaagctgctccacgaggcttcggggcacgtggtgacggtggagctcaagagcggagaactctacagaggaagcatgatcgagtgcgaggacaactggaactgtcaactcgagagcatcacctacactgccaaggatggcaaaacatcgcaacttgagcatgtgtttattcgaggcagcaaagtcaggtttatggtcatccctgacatgctgaagaatgctcctatgtttaagcgtttggatgcaagaatcaagggtaagggtgcatcacttggtgttggtaggggcagagcaattgcaatgcgagca

SEQ ID NO: 6280 - DNA, 218 bp, Glycine max
  Clone ID: LIB3074-029-Q1-K1-A8
tatcaagggggggccgggtctactggggggagagaactgagaagcagagcagcggtgtggttgattgggatgtcggatccgtaccagcggttgaaaggaggaagattaacatttaaaggaggaatccttgccagtcgctccaaatccattgacaaaaaggggaagaagaagaagaagaacaagggcttgggcaacgacaacaaccctaaccctaaccc

SEQ ID NO: 6281 - DNA, 433 bp, Glycine max
  Clone ID: LIB3074-028-Q1-K1-G8
gaaaacagcgcgcgacagaggcacagagagaaaatggggtcggggtcagggatctgtgccaagagggtaattgtggacgcacgacaccacatgctggggaggctggcatcgatcgtggcgaaagaacttctgaatgggcagaaggtggtggtagtacgctgcgaggagatttgcatctccggtgggctcgtcaggcagaagatgaagtacttgcgtttcctccgcaagcgcatgaacaccaagccctctcacggccccatccatttccgtgcacccggcaagatcttctggcgcaccgttcgtgggatgataccacacaagacaaagcgaggggaagctgctcttgcgcgattgaaggtgtatgagggcattcctcctccttatgacaagaccaagaggatggttgttcctgatgctctcaaggtgttgaggc

SEQ ID NO: 6282 - DNA, 132 bp, Glycine max
  Clone ID: LIB3074-029-Q1-K1-A9
aggtttgaatgtatatatagagggcaaaactcagccgttaaagtaactatacttctttgcatatacaataagaattaccaataactcagaccaccctgttcaacttcttagaacgcattggattataactga

SEQ ID NO: 6283 - DNA, 236 bp, Glycine max
  Clone ID: LIB3074-029-Q1-K1-B1
gagggtctttgtcggggctactaagagatgctgggtcttcaggcactccgcacctggcaacctctgtgccctcaacaaccatggctgaaatcgaaactaccggttcagatcccacccaaatcgacgtcaaactcttcaatacctggagcttcgacgatgttgaggttaatgatatgactatggctgactacattggagagatcccatcaaagcatgctacatatgttactcacact

SEQ ID NO: 6284 - DNA, 373 bp, Glycine max
  Clone ID: LIB3074-029-Q1-K1-B10
ggacgcatccttcttcctctctctctcctgggggagcccaattccggtagggattcaattccgatgcgattccgagcttgttagatccacgacaacgtgtcgcttcccagattctcttggaaaaaaaaataatcttccttcgcccaacaggtaacgcggaaaaaaatggaccatgacaagactgggtgccaagctcctcctgaaggtcctatattgtgcatcaacaactgtggattttttggaagtgcagctaccatgaatatgtgttctaaatgccacaaagacatgttgctgaaacaagagcaggccaagcttgcagcatcatccattgggaatattatgaatgggtcttcaagcaacactgaaaaggaac

SEQ ID NO: 6285 - DNA, 352 bp, Glycine max
  Clone ID: LIB3074-028-Q1-K1-F10
tatgggggtcaccaacacagacaatagtgcatagcgactttgattgggcattattcaatggccaccacagcagctctatcctgaaccatggcgagcacctgcttcatgaggaagcaacctatgacgaccaagagcctaaagacattccccaacgctctttttggtctgaaaggtggacgaggtgggcgggtaacttgcatggcctcatacaaggtgacgctcataaccccagaatgagaagtggtgtttgaatgcccagatgatgttttcatcgttgacaacgctgatgaagaatgcattgaacttgcctactcgtgcatggctggttcttgcgttaaatgtgttgggaaaa

SEQ ID NO: 6286 - DNA, 435 bp, Glycine max
  Clone ID: LIB3074-028-Q1-K1-F12
gaaaaacaggcgcgacgccacacgcgtctaccgacgcgaaaaaacgacttaaaggaatttattcaagaagactaccaaaggggacaccggtgggcataaacaaagaaaaaaaaaacccttatccaacacaaccatcattgccacctctgctattaatcaaacaacattcactggtcaaactgctctgaagcaaatcaatgagttcgtccacaagacccgtggcgcccgcaaaagtcgcactaacatgcgccgcaccgtcaagaatgctcctcaaagcattttgtatggccctgaccgtcccaagtacttgggtccattcttggagcacattccatcatacctgaccggagaattccctggtgactacggatgggacactgcttgaatataaaatgacccggaaacctttgtcaagaaccgggaactggaagtgat

SEQ ID NO: 6287 - DNA, 441 bp, Glycine max
  Clone ID: LIB3074-028-Q1-K1-F2
ggcattatatttgagttcaaacaaatcaaagccatggccacctccaacttctctattgttctctccgtctccctagccttctttttggtgctacttaccaaggcacactcgaccgataccgtttctttcaccttcaacaagttcaacccagtccaaccaaacattatgctccaaaaagatgctagtatttcatcctctggggtgttacaactcaccaaagttggcagcaacggcgtgcccacctcgggatctctcggtcgtgccctttacgctgccccaatccagatttgggacagcgaaaccggcaaggtagccagctgggctacatcctttaaattcaacattttcgcacccaacaaatcaaactcagctgacgggcttgccttcttcttggcacccgtccggtctcagccccaatccgacgatggatttcttggtctt

SEQ ID NO: 6288 - DNA, 389 bp, Glycine max
  Clone ID: LIB3074-028-Q1-K1-F3
gaaggaagggagggaagaatagaatgggatctggaagcggaaaacacactggagaggtcttcaggagaagggatgcatggaggaagcatccgatgctcaccaatcagctccgccacgccacccctggccttggcatcaccgtcgtcgccttcggtatctacctcgtcggcgaacaagactacaataggctctatgctcccgatcctcattcgatttctcacgtgaaagccggggatcaccactaaacgtttggacggacgcactccattgcatcatcacttaataagcttgctagcatgttctcgcagcctttaatgtttaaatttcagaccgcgttcgcttctttggcactcactatattgtcttgtatgcctacatttgatgccttc

SEQ ID NO: 6289 - DNA, 336 bp, Glycine max
  Clone ID: LIB3074-028-Q1-K1-F5
ggcttctctggatgcgatacggaagaagattgtcaaaggagagatacaaactaaagttgccgaagtaaaggagccttctgtttctgaaacaaagaccatccctgatgaacttgtacagattcaagcttttatacgatgggaaaaagctgggaagcctaactactctcgggaacaacaacttatggaatttgaggaagcaagaaaagaattgttagaagagcttgagaagggggcttctctggatgcgatacggaagaagattgtcaaaggagagatacaaactaaagttgccaagcaattgaaaaccaaaaaatactttcgtgctgaaagaattca

SEQ ID NO: 6290 - DNA, 411 bp, Glycine max
  Clone ID: LIB3074-028-Q1-K1-F6
gatctggcagcagaaaaacaagtagttgagaactaagaagaaggaaatggcttcctcaatgatctcctccccagctgttaccaccgtcaaccgtgccggtgccggcatggttgctccattcaccggcctcaaatccatggctggcttccccacgaggaagaccaacaatgacattacctccattgctagcaacggtggaagagtacaatgcatgcaggtgtggccaccaattggcaagaagaagttcgagactctttcctacttgccagacctcgatgatgcccaattggcaaaggaagtcgaataccttctaacgaagggatggattccttgcttggaattcgagttggagcacggtttcgtgtaccgtgagcacaacaggtcacctggatactatgatggacgctactg

SEQ ID NO: 6291 - DNA, 416 bp, Glycine max
  Clone ID: LIB3074-028-Q1-K1-G1
gagagttaagttgagttcataccaatctacaataaacgatgattctcattatctccctcattttttctcttctctctttctcccatgcttctgtcctagatttctgtgttgcagattatgcaggtcctattggacctgcaggatattcctgcaagaagccttcaaaggtcacagcagatgattttgcttacagtggccttggcattgctggtaacacctcaaacattatcaaagctgcagtgacccctgcatttgatgctcagtttgctggtctcaacggtcttggcatttccgcagcacgtttggacttagcagcaggtggagttataccacttcacactcatcctggagcttcagaattacttgttgtaattgaagggagcatcctagctggattcatttcttctgccaacatt

SEQ ID NO: 6292 - DNA, 345 bp, Glycine max
  Clone ID: LIB3074-028-Q1-K1-G10
ggtctttaacacaaacaatagtgcatagcgtttgggattgtgcattattcaatggccaccacagcagctctatccggaaccatggtgagcacctccttcatgaggaagcaacctatgacgaccaagagcctaaagacattccccaacgctctttttggtctgaaaggtggacgaggtggtcgtgtaacttgcatggcctcatacaaggtgaagctcataaccccagaaggagaagtggagtttgaatgcccagatgatgttttcattgttgacaaggctgaggaagaaggcattgaacttccctactcatgcatggctggttcttgcgtttcatgtgttgggaaa

SEQ ID NO: 6293 - DNA, 187 bp, Glycine max
  Clone ID: LIB3074-028-Q1-K1-G11
acgacaaaacgacacaatgagttcatttactcacacaaatattcatagccgttttgtttgtgctcattttgaatgaccaccacaccaatctatatcctgaaccatattgagcaccttcttcatgatgaaccaacctatgacgaccaatagcctaaagacattccccaacgctctttttggtctgaaa

SEQ ID NO: 6294 - DNA, 118 bp, Glycine max
  Clone ID: LIB3074-028-Q1-K1-G2
aggaagagaagagaatggagagggaaagagaaaaggagagaattcgcattggcaaggagttgctggaagcaaagaggattgaagctgacaatgagaggaaacggttgttggccttgag

SEQ ID NO: 6295 - DNA, 373 bp, Glycine max
  Clone ID: LIB3074-028-Q1-K1-F1
cggtccgaggaggcatcatatgggatctgatgcgaaaaaacgacagaggggcgtcgcagtgggaagacgacctatgggtcccgctggcatgagtcttccttctactgtaacaaagatcatctccgcgagaccgcgtcttacaccatccacacttacaacggcgtcgattcgaaccttatgttttctatagagccacctcttttatattctggggccgtacaattacataattttgactggctcgacgtgggcgcttctcaatttgatcggcgggcccttaatgctacctgagtcaatcagcgtgacagcgaaaagcccttggcaaccaggtgttctaacatgttgacatgcatcaattgcgcatgcaacaaat

SEQ ID NO: 6296 - DNA, 384 bp, Glycine max
  Clone ID: LIB3074-028-Q1-K1-G3
gaagggtagggggtgtttatggaaagggacaaggaacggggaaacacagtcgagagctcgttgggagaagggacgcttggatccagcatcctatgctcacacaattaggttcggcacactgccagtggctattggcatctgcgtgatgctcctgctctaaaacatccaaggtcacaaacgctaccataggttactagagcccgagactattcgactaaacacaaacaatttgcagattattaataaccctgtgtatggagatactctagcttgtcataacttaattggcttgctagcattacgtctgaacttagcatgcgtaaaaagtaatacagcttgaaactaattctctaacattaaaatgacttgtctgaattgaaaata

SEQ ID NO: 6297 - DNA, 389 bp, Glycine max
  unsure at all n locations
  Clone ID: LIB3074-028-Q1-K1-G5
aggcgtccgaacacgtccgagagggcctcagtagggtactctgcggcagcaccttgaaacgcgggaggttcatactatcttcgccggccttcaccggcctgcagccatgtcaacgaaaaccgttcgtgagccactggaggaaatcctggctctgataccatctgataaagatggtaaacctatcttctgtgtcgatcaactacttatctacttcaatgacacctgaattcatgtcactgaacagcttgagaaggaaactcttgtgcatatgattcgcaagatgattgttaaaggtgacatacatacttcagctgcctatcctactataactagctgacactgatgttgctgcatggatgcaaggaactgggcataactgctcttnatat

SEQ ID NO: 6298 - DNA, 373 bp, Glycine max
  Clone ID: LIB3074-028-Q1-K1-G6
ggcacttgtggattcgatgctctagatcactagaaacagagagatgcaaacgaaagtcctcgggttataggttccttcaatttttgaaacatagacgatccatgcggaacatgtcagacttctgcttatgatacactgtgtatagagctcgaactcatgatgcgatatgcaccaactactagcttgctttgaagacacacaacatctttagcttgaagaccattacagaggagctcgttgtggctacaaacgagaacaataatggccaacactatatcttactctccatagcaggtaatcgacaaccttactattctgtcggactccctgaatacgatgccatggacacatttgttgtaattatagttggcgc

SEQ ID NO: 6299 - DNA, 293 bp, Glycine max
  Clone ID: LIB3074-028-Q1-K1-G7
tctacagttgttataacacgacaccgtgtgccacttttcgatataaggcgatctaacagtggaactgctggtatatgacaactaattggactgatatggcttcctcaaaatcatcataccttgttgttgccactcttgacaatactgacatcggcataatttctctattcaccatccttaaattcatggcgtagcagcccactaattcttcctctgatcacattacccaatacgctagtacttgaagaatattacactctatacgcgtttttacaccacttggtaggataaaa

SEQ ID NO: 6300 - DNA, 428 bp, Glycine max
  Clone ID: LIB3074-028-Q1-K1-D3
ggcgtaacaatagcatactcttactctgattcgttagtgaagaaaaatggcaacaatcatcgccggcaccccaactacatcaatcactcgcacaggtcatgtgctcaaacgacctgttggggcctcatcctctaccgttcttgattgcaaacataaattgtacaggattgccagcaatggccaatgcggtgagagtgaggtgctccatggaggaaaagccttcaagcagctcaaacctagggatgggggcattcttgttagcagctgcagctgccgcaaccatgtcaagcccagcagccatggctttggttgatgagagactcagcactgaaggaactgggctttcctttgggcttagcaacaaccttcttggttggatcctgtttggtgtctttggtctcatatgggctctcttctttgtctacact

SEQ ID NO: 6301 - DNA, 435 bp, Glycine max
  Clone ID: LIB3074-028-Q1-K1-D4
gaaagtgcacaagtgagtttgttgatcgagataactagaaacagtgtgatgaaaatgaaggtccttgttttcttccttgctacaattttggtagcatggcaatgccatgcgtacgatatgttccctctccgaatgaacactggctatggtgcccgtactccggaggtgaaatgcgcaagttggaggcttgctgtggaagcacacaacatctttggctttgagaccattcctgaagagtgcgttgaagcaacaaaggaatacatccatggcgaacaatatacatcagactccaaaacagttaaccaacaagcttacttttatgccagagacctcgaagtccatcccaaggacacatttgtgttcagtatagatggcaccgtactctctaacattccatactacaaaaaacatggatatggggtggagaaatttaac

SEQ ID NO: 6302 - DNA, 429 bp, Glycine max
  Clone ID: LIB3074-028-Q1-K1-D5
gagcatagatctgaatggagagcgaggtggtgtccattgcagttttctaatgaaaacaacaaaatagacacctgttaagaaggaggacaacgatggtgctgccgctatttactgctttcattctctttgcttttattccgaatggattgttagcagttccttccaccgtcccggcattcctttggtcatcacattatgaactggcctctgaaaatatattgaaggaatctgtaaattaccaagtcatttctccgaaggatctagcaaaatctattttatctgaagcaggctggtcaaattttctgtgcaaaggaaagaaatttcatgagcctctggatctggcactcttattcgttggtagagagttacaatcttcagatttaagcatgaacaaacatgcaaactcagctcttttggacctgctcaaga

SEQ ID NO: 6303 - DNA, 431 bp, Glycine max
  Clone ID: LIB3074-028-Q1-K1-D6
gggattgccccatttcgctcatttttatggaaaatgttctttgagaaacacgaagattacaagttcaatggtttggcatggctctttttgggtgtccctacaagcagctcattgctatataaggaggaatttgagaagatgcaagagaaatatcctgacaacttcaggcttgacttcgctgtgagccgagagcaaacaaacgagaacggagagaagatgtacatccaaacccgaatggctcaatatgcagaagagctgtgggaattactgaagaaggataacactcttgtgtacatgtgtggactaaaaggaatggaaaagggtattgatgacattatggtgtcattggctgccaaagatggcattgattggactgagtacaagaggcaattgaagaaatcagagcaatggaatgtcgaagtctattaatt

SEQ ID NO: 6304 - DNA, 364 bp, Glycine max
  Clone ID: LIB3074-028-Q1-K1-D7
gggactttcacacttcgcgccttaggatggaaactcttctgtgcatatactcgacaattgcttgctcactcatatccgatcgttttttacacatgctgctacaagcagtgcactgatatatatagctgcacttcaggagactaccattgtatatttgtacaccctgagactcgtactcatcgagactcctctcatcggacaatcgagcacggacacgaagattggcagcgcaactggaacactctcttatccagaacagcctggacacatactcatataaggattacacttgcgtatgcatgtgtggtctgtacggcattgcaaatgtcatagttcactgtatggcgtactagtatacctgtgt

SEQ ID NO: 6305 - DNA, 220 bp, Glycine max
  Clone ID: LIB3074-028-Q1-K1-D9
ggaagtgcacaggttagttatgggttcaaggaaacgaaaaactgggactgttccatccatggcctgtcttcttcaagcgagaatagaagcgtaactggcccttcttgtttgtatccgacgtcacctgaactcttatcacacaaactttctcttcgtctatctcctaacttaacttctcctcctccttctttaacaacctacacaattggatttttgttct

SEQ ID NO: 6306 - DNA, 434 bp, Glycine max
  Clone ID: LIB3074-028-Q1-K1-E1
ggttctagtgtgtgattgtttgttgttgtaactcgttcttcttcttttgttgttctgtgtttgtgtttgttttttctctcacctgaaaatgtcttgctgcggtggtaactgtggttgcggaagctcctgcaagtgcggcaacggctgcggaggctgcaagatgtacccagacttgagctacactgagtcaaccaccaccgagaccttggtcatgggagtggcacctgttaaggctcaatttgagggtgctgaaatgggtgtgcccgctgagaacgatggctgcaaatgtggaccaaactgctcctgcaacccctgcacttgcaagtgaggtgttgggagagcaagcttcaagcagagatagcccttaattaggaataatgataaaccattaatgtgtagctaaaaacttatgtattatgtctgtgatgggtttc

SEQ ID NO: 6307 - DNA, 352 bp, Glycine max
  Clone ID: LIB3074-028-Q1-K1-E10
accacgcgtacgaccacgcatacgggcgactttaaggttttttttcaaaaagactacatatgggtaccgggggaagatgacttctgaagggggcacaagttagtattttgatttaaataactaaaaacagtgtcatgaaaatgaaagaccttgtattcttcaaatctacaatattcgtagcatgggaatttgatacgtacgatatgttttttttgtgaatgaatactgtatatggtgcctatactcctaaagaaaaatatgctagttggatatttgatgaacaatcacacaacatatttggctttgagaaccttacttaataatgcgttgaagcaactaaagaatacattta

SEQ ID NO: 6308 - DNA, 138 bp, Glycine max
  Clone ID: LIB3074-028-Q1-K1-E12
gaatatacacatttcgttacgcacattctcaaaacggtcaatggcggaagcattaacttttatctattccacgtcttctttactgatgaaacacaaaataaccggtaactagaaagcttctattagtgaataatcaaa

SEQ ID NO: 6309 - DNA, 419 bp, Glycine max
  Clone ID: LIB3074-028-Q1-K1-E2
gacacacagctattcctcttaagcttgctactgagtttccacactgcgtaccttaggtcttccgaattcgaagttaatttgcaagatggctaaggaaaaggctcacatcaacattgtggtggttggtcatgtggaccctgaggaggcaaccaccattaacgagctgaagaagcctgttgtggagaaagaagctccagggcatgccatatgagggcatgcacgtacggcctcggaggggaaccagaaaattatgttaacaaaataatctggaaccctaatgtatcagtgtcatcatcagtgtgtagtttaagctagctttgctatggttacgttctttgagatgagagtcttgatgaacagtaccattctgatgtattgctttccttgaaagttaatgcatgcttcttatcttctgtctg

SEQ ID NO: 6310 - DNA, 427 bp, Glycine max
  Clone ID: LIB3074-028-Q1-K1-E3
gatagttttcagcgccccactatcagtgtcagtccattaagaaaacgcaaaaatcatcgctgaaaacataaacaaacatggtctgcctctgctgttagcagctactacctcgctccacaaaaaacaccccctttctcaaatcttaggttgttccaacgatggaagagttcagatccaaatcgtacggtgacggaaggatgcatattgaggcctaccgtggagcgaacattcaagatctccgctgctacagcgcctcctacgcctcttcggtgcacccaacaacaacaacaacaacaacaacgcagacccagatgggaggaaacaacaacaacgaagccaagttcaagaagggaaagtccacaaacgggtccacatcgaaaagttggagctttagtgaccccgaattgcagaggaaaaagagggtcgc

SEQ ID NO: 6311 - DNA, 422 bp, Glycine max
  Clone ID: LIB3074-028-Q1-K1-E6
tgaccggcgtcgctctgaaaataagaaaccagtggtgtctgaggtttccttttcttctgccacatccactctttgctctctttcagaatctctcgcgagcttttctgctcccaaaaatgctgaggagcatattaacaacaatgcaagtattatcgattttgaagagttcgctgaaagaatatccaacagtgcatgcgaatcttcattatctactgctgtgtatcatgaaagctcggttaaaccactggatgatcttcacaagagatttgatgcaaactccattgtggacaagagtgatgattctgattcagagatatttacggtaaagcgtccttcttctctggaagcacacaggagaaatattaatgatgccgcgccttcaaaacatacaaagcagcaggggctaaaacgactgaagaaaa

SEQ ID NO: 6312 - DNA, 415 bp, Glycine max
  Clone ID: LIB3074-028-Q1-K1-E7
cgttgctctgaaaataaaaaaccagtggtgtctgaggtttccttttcttctgccacatccactctttgctctctttcagaatctctcgcgagcttttctgctcccaaaaatgctgaggagcatattaacaacaatgcacgtattattgattttgaagagtttgctgaaagaatatccaacagtgcatgtgaatcttcattatctcctgctgtgtatcatgaaagctcggttaaaccactgggtgatcttcagaagagatttgatacaaaatccattgtggacgagagtgatgattctgattcagagatatttagggtaaagcgtccttcttctctgaaagcagagaggagaaatatgaatgatgccgcgccttcaaaacatacagagcagcaggggctaaaacgactgaagaaaa

SEQ ID NO: 6313 - DNA, 442 bp, Glycine max
  Clone ID: LIB3074-028-Q1-K1-D2
gaaaaaaaagaaacaaattgagcaatgaatttgtaaatagggcaaaagtaatggataaggaattaatttctctggatatattagaaaaccgaattcgattgtctaatgatgaaactaaaacaaaatatttaactaaaatatatgatcctttcctgaacggacgctttcgtggacaaatcgaaaatgttttttcaacctcaatccaatatgaaaaaaatgaaaaaaaaataccattttgataaataaaattcatggtatccttatttctaataatacttataaaaaaaataatagtaattatccagaattagagaaaaaaataaatatatttgatagaaaatctttagtaactacatttttttttttcaatctaatcagtaaattttcaaaaaaattaatatcaagcttgagttttgaagcactttctttatttccagaacat

SEQ ID NO: 6314 - DNA, 382 bp, Glycine max
  Clone ID: LIB3074-028-Q1-K1-E9
gagcgccaatgttttttttcagaggagtttcatctgggaatcaggagagtttatcttatagtaagaaatcgatgtcttactccattttaaggaacaaaacaagagaacaatagcctgacaaagggtgtagccataaaatcgaatccatcattgatttgagatattgataaggtgaatactcatttctcgtcaatgctaggcataatgcgggtatagggacctaaaaaagattatcttttcttcctatcttatgaactttaaggtgtatgaagtgtcatttcctatcttagattttaattttagtaggtagataaagagtccatttaacttaagttgatctaggccagaagcagacctacgtcaagataatcccttctttgaa

SEQ ID NO: 6315 - DNA, 435 bp, Glycine max
  Clone ID: LIB3074-028-Q1-K1-B8
gattcagattacattgcaaaaatggcatcattcaccatgacagcttccatccttggcagcccagccgtcaccaaccggtcggcagtagcaacgcagaggagatcactcgtagtgaatgctgccaaagctgttgaagcagaaaaggtcagttatgacaatgacatggatggtagcaatggaaggaggaacttgatgttcgccgcggcggcggctgctgtttgctctgttgctgggatggcagtggcagatgagcctaaaccaggaaccccagaagccaagaaaaagtatgctccgatttgtgtcaccatgccaactgctaggatttgtcgcaattgagggactttggtttttattttacttctgatgattggaaatgtacaatggggttgttgtaatgctttgatgatttcatttgatcctcactgtacaagatgt

SEQ ID NO: 6316 - DNA, 409 bp, Glycine max
  Clone ID: LIB3074-028-Q1-K1-B9
gagtgagagagagagaaggcaagatgtcgaggagaggacgtggtggttcggcggggaacaagttccggatgtcgctgggtctgccggtggcggcgacggtgaactgcgccgacaatacgggggcgaagaacctctacatcatatcggtgaaagggatcaaaggggcgtttgaaccgtctcccctcggcttgcgttggcgacatggtgatggccaccgtgaagaaggggaaacccgatctgaggaagaaggttttgccagctgtcattgttcgccagcgcaagccatggcgccgaaaggacggcgtctacatgtatttcgaagataatgctggtgttattgtcaatcccaaaggagaaatgaaaggttctgctatcactggtccccatggaaaagagtgtgctgatctgt

SEQ ID NO: 6317 - DNA, 362 bp, Glycine max
  Clone ID: LIB3074-028-Q1-K1-C1
gaaccaaatgcttatattgcatttgctggtaaaagagtaattgaacaaacattgaataaggcagtacctgaaggttcacaagcagctgaatatttattccataagggcttatttgattcaatcgtaccgcgtaatcttttaaagggcgttctgagtgagttatttcaattccataatttcttttctttgactaaaaatgataaggcatagccataaattctttgaataagaaaagggtatattatattatgatatatattggcttagctataatcactagaattattatatactaagtataaatatatagaaattctagtgattatagactatctttatataataatgtaaataagaacaca

SEQ ID NO: 6318 - DNA, 282 bp, Glycine max
  unsure at all n locations
  Clone ID: LIB3074-028-Q1-K1-C11
ggatattctatatgaactagttatatatgaactaaccatatccggatatattatataaaataactaatattttatatctaaaattgccccgctactactgtaaatttcgatagggattaaaaaacaaagcctttccgtttcatctcgaattgtgaattgaatattcaatgactaaaaaaatggaataaaaagacgaagaattcaaagaatgattccaaattgaaggtaggataagaacaaaagttctacatattcacaaacnaaaaatatataaatatataa

SEQ ID NO: 6319 - DNA, 405 bp, Glycine max
  Clone ID: LIB3074-028-Q1-K1-C12
gcacaagtgagtttgttgatcgagataactggaaacagtgtgatgaaaatgaaggtccttgttttcttcgttgctacaattttgatagcatggcaatgccatgcgtacgatatgttccctctccgaatgaacactggctatggtgcccgtactccagaggtgaaatgctcaagttggaggcttgctgtggaagcacacaacatctttggctttgagaccattcctgaaaagtgcgttgaagcaacaaaggaatacatccatggcgaacaatatagatcagacttcaaaacagttaaccaacaagcttacttgtatgccagagaccttgaagtccattcgaaggacacatttgtgttcagtatagatggcaccgtactctctaatattgcatactacgaaaaacat

SEQ ID NO: 6320 - DNA, 441 bp, Glycine max
  unsure at all n locations
  Clone ID: LIB3074-028-Q1-K1-C2
gatatctggctgcagaagaacaagtagttgagaactaagaaggagaagcaaatggcttcctcaatgatctcttccccagctgttaccactgtcaaccgtgccggtgccggcatggttgctccattcactggcctcaagtccatggctggcttccccaccagaaagaccaacaatgacattacctccattgctagcaacggtggaagagtgcaatgcatgcaggtgtggccaccagttggcaagaagaagtttgagactctttcctacctgccagaccttgatgatgcacaattggcaaaagaagtagaataccttcttaggaaggaatggattccttgcttggaattcgagttggagcacggtttcgtgtaccgtgagcacaacangtcaccaggatactacgatggacgctactggaccatgtggaagctgcctatgttt

SEQ ID NO: 6321 - DNA, 445 bp, Glycine max
  Clone ID: LIB3074-028-Q1-K1-C3
gagaagacaacagaaggggaggcctgcaaatattttcctttttagcttcgattagagtggcctaggggtggtttgtctcaatgagaagggcttacactatgcattgcgcactttggcgcttctgtgttcccttgttgctacttgctaacttcagttatgcacctttcgttttggcgacaactgccatttcagggaatgaagtcagcactgatggaaaggttttaaatgaaaaagtgccaaaacctaatctacaaggacatgatgaagaaacaaagtttaaagcgatttattccatagccacttcccatagtgcaccctattccaaaaccacttaccatcattaagccgaatgcaaagataatttctatcgcttaacctattgctatcccgatttataaccctatatccaaatcaatacccattatctagcctggtccctacatga

SEQ ID NO: 6322 - DNA, 425 bp, Glycine max
  Clone ID: LIB3074-028-Q1-K1-C5
gaagcgcagttcgttccacgttgttgttcgctctgtgtcgctcactctctctatatttgcatcattcatcggaaatggctctcgaggttgctgttaaggctgctgttggggctccaaatgttctcggagattgtccattttcccaaagggtcctcttaactttggaggagaagaaaattccttacaaactccacctcatcgatctcagtaacaaacccgaatggtttttgggtgtgaatcctgaagggaaggtgccagtggttctttttgatggcaaatgggtggctgattctgatgtaattgtggggatactagaggaaaagtacccagaaccctctctaatcactcctcctgaatttgcctccgtgggatcaaagatatttgggtcttttgtgagttttctgaagagcaaggatacaaacgat

SEQ ID NO: 6323 - DNA, 427 bp, Glycine max
  Clone ID: LIB3074-028-Q1-K1-C6
gatgtatcgtcaacgttagtgctttatttaggtgacaaaactactcacagagaaagacactcggagaccttgcaagacttcatcaatggctgtcaaagtttatattgtgtactactccatgtatgggcatgttgagaaactagcagaagaaataaagaaaggggcttcctctgtggaaggtgttgaggccaaattatggcaggtacctgacacgctgcaggatgaggtgctcggtaagatgagtgcaccacccaagagcgatgtaccagtcattaccccgaatgaattatccgaggctgatggctttgtattcggcttaccaacacggtttggaatgatggctgctcagtttaaagcttttctagatgctactggaggcttatggagagcacaacagcttgcaggctagcctgctggcatactctac

SEQ ID NO: 6324 - DNA, 368 bp, Glycine max
  Clone ID: LIB3074-028-Q1-K1-C7
agttgagacgaagccgcctaagggggggctttctccaatccacgcactagaatgggggcagtggtttgctcaacacgaatgtgacaagttcaccggttaggactggctccattgctgtgaacgtacaagcagcggatacatatatgatgaggcattggacaacactccaaatgaatatcctaacatcgcaagacacgactaatctgtacgccctaaacgttcaaccgctcactgacacactatgtgcagcctttcccgaatagctgaatatgcaaactagcagtgttacttactgaaaaaccaaaacactttgatgctcatgtgttgactaagaggccagcgaaacagcatggataaccttatcgggt

SEQ ID NO: 6325 - DNA, 249 bp, Glycine max
  Clone ID: LIB3074-028-Q1-K1-C8
gcgacagggggcgcatgtcagtacattgctcgagaatactaggcgcagtgtgatgaaaacgaaagttcttgttaattccacagattcgctttcggcagcatggaagggccaagccaacaatatgtgccttctgaacatgaacaccaactgttgggcaatgcttcaaaaagtgaaaaactcactttgtagacacactccaaagaagcacctgataaggagcttgctgactaccgatctaaactagaggct

SEQ ID NO: 6326 - DNA, 403 bp, Glycine max
  Clone ID: LIB3074-028-Q1-K1-C9
gccacgcgtccgaacacgtccgaaaagacttttcatgggttcttttattagaaaacaacaaaggggtccgggttcgacaacatgacaaatgggtacacctgttacacaactactgagcggagaataccttatctatcctgaggttatcccgcgcatatattatcacgctagactacatcatgctaaagtacgtgctccacgcagagacaatacttgatattctcataacatgcatgcctggaactcttcaaaagggtcatgatgcgcggacacccttaaccttatgaatccgtttcttttatgagagactttatacctgatgcttctcattgacatatattgctagtaccaaaccactcctatctatgatggatattgctttaccccttacaagcaccctcta

SEQ ID NO: 6327 - DNA, 375 bp, Glycine max
  Clone ID: LIB3074-028-Q1-K1-D12
ggaacctacacctttggaaactcacacaccaccaccaccgtttggatcaatttcttatcttttctcattcccttcttttcttcctcaacacacacaaaatatctcttccaatttcaatttctcgtcgtccctcatcatggctcgtctcgcgatcgctgtcgccgccgtgctcctcgtggccctctccgcctccaccgcgacggcgcgtccctgcaggaccttcataatctcctcctactcgttccgcaaccctaactccaacaccttcgccaccatcaccgaaatccgatccttcacccttctttacttaaccgacaaaccaacgggcaaaccttcttcttcttacaactttttttttcccaagccacttaactt

SEQ ID NO: 6328 - DNA, 424 bp, Glycine max
  Clone ID: LIB3074-028-Q1-K1-B7
gaagcaactaagcaagatatcatcacattgcaaagaaaatacacattacattactaagtctttgttcatttgagtagtagtgatggctagcctcaaggttgcatgtgtggttgctgtgatgtgcatggttgtggtggccatgagtgctgcacccatggcacaggccgcaatcacgtgcgggcaggtcgccggcgacatgtctccgtgcttcagttatcttcgaagcggcggaaaaccgtcgcaggcctgctgcaacggagtgaagtccctcagcagcgcggcgaagaccaccgcggaccgccagggggcgtgcagttgcctgaaaaaccttgccaataatatgggacagagtttgaatgccggcaacgcagcctctcttcctggcaaatgtggcgtcaacattccttacaagatcagcaccttc

SEQ ID NO: 6329 - DNA, 434 bp, Glycine max
  unsure at all n locations
  Clone ID: LIB3074-028-Q1-K1-A12
gacagcttttgtttgacagcacagcactcggaaatttctggcgatctctgcgttttcccctattttttctgaatcccacagaatggcatccaacaggggtcaaggtggaattcagcagttgttggctgctgaacaagaggcacaacggattgtgaatgctgcaaaaaatgaaaaattggctaggttgaaacaggccaaggaagaggctgaaaaggagattgctgaataccgagctcaactagaggctgagtttcaaaagaaagtgtcagacagtactggagattctggagctaatgtcgagcggcttgagcaagagaccgaagaaaaaatccatcacctgaaaacggaggctgcaagaatatcggatgatgttgtcgccatgctcctcaagtatgtgacaagtgtgaaaaattangaccctttgatatatattg

SEQ ID NO: 6330 - DNA, 231 bp, Glycine max
  Clone ID: LIB3074-028-Q1-K1-A2
gcggttgaaaggggtcgttcgggcgtgaaactaaaaagagaaaagcgaaggtcaactcgtccgctgtgaacgatcctatcgttcgtacgcaatcatacgacgaaagaattattgaattgacttactctacataaaaaacactcagccgtgcaattacaaatgaatgcactggcaaatcactcttgattccatctaaatcaccttgcacaacatccccgtttcctcaactgg

SEQ ID NO: 6331 - DNA, 307 bp, Glycine max
  Clone ID: LIB3074-028-Q1-K1-A3
cgggggtctagtgtgtgattgtctgatgtcgtcactcaatcgtcttctctggatgatctgcgttggtctttgttttttatatcacctgacaatgtctagctgcggtggtaactgtggttgccgaagctactgcaagttcggcatcgggcgcgtacgctgcaagatgtacccagacttgagctaccactgagtcaaccaccaccgagaccttggctatgggagcggcacctgataatgctcaatttgaggatgctcaaacgggtgtgcccgcgtaaaacgatggctggacaagtggactaacctgcta

SEQ ID NO: 6332 - DNA, 334 bp, Glycine max
  Clone ID: LIB3074-028-Q1-K1-A4
gggcgtcgaccatcgctgtcgcagacgacggcgcccatgggtcatccggcgttggatccgtactaccttgaccaacaacaagatgagcggagcaacatcaacacgttatttgtctgcggtctaccagacgacgtgaaggcgcgtgagattcacaaccccttccgccgtcgacacgagttcgactcctgtcaactcaagtacaccggtcgcgccaaccatggcggaacagtagccacctttttcaaccacctataggcaatgggagcgttgcacgccttgaatggtgtcgaatttcatacacaccctgtacccgccttacttattgaatttgtct

SEQ ID NO: 6333 - DNA, 424 bp, Glycine max
  unsure at all n locations
  Clone ID: LIB3074-028-Q1-K1-A5
ggagggaagaatagaatgggatctggaagtggaaaacacactggagagttcttcaggagaagggatgcatggaggaagcatccgatgctcaccaatcagctccgccacgccacccctggccttggcatcgcccgtcgtcgccttcggtatctacctcgtcggcgaacaagtctacaataggctctatgctcccgatcctcattcgatttctcacgtgaaagccggggatcaccactaaacgtttggacggacgcactccattccatcatcacttaataagcttgctagcatgttctcgcagcctttaatgtttaaatttcagaccgtgttcgcttctttggcactcactatgttgtcttgtatgcctacattntatgnccttcaattgcattcacaatgaaactcaatntactttacttttttc

SEQ ID NO: 6334 - DNA, 420 bp, Glycine max
  Clone ID: LIB3074-028-Q1-K1-A6
gaccacattccaaaacacaaacacatacattgtagtatcacttttgtctcggaatttgttcttttgagttatggcaagcttaaaggttgcatgtgtggttttgatgtgcatggctgtgatgagtgcaccaatgatggtgcaagccgtgtcatgcaatgatgtttctgtgaacctagcaccgtgcctatcttacctgatgcagggtggagatgctccagaatcgtgctgtagcggagtgaggaacattctgggttctgccagcaccacctttgacaaacaaaccgtatgcaaatgtcttcagcaagctgctaataactatggcatcaacgacgaatacgctcaggcactccccgcccgctgcaatgtcagcgtcccttacgagatcagccgatccaccaactgcgactccatcaagttcta

SEQ ID NO: 6335 - DNA, 424 bp, Glycine max
  Clone ID: LIB3074-028-Q1-K1-A7
ggcatcatcacagacatggggtctctgcctctgcaattcagcgggctcaagtgctccccactctgatcttcttctgtcttctccaaaccttctctatggacccaacaatcccaaaagcgcgtttcaattaccattgcgaactcaatagcaatagccaatgcgcagaacatagagagagcgaggcttaagaaactcttctaagaagcctaccagagatgccgcaatgctccaatggaaggtgtttccttcaccatcgaagacttcactgctgctcttgacaagtacgacttcgattctgaagttggcggcaagattaaaggcactgtgttctacacagataacaatggagcagttgttgatatcactgcaaagtcttcggcatatttgccactgcaagaggcgtgcatccacaggcttaagcatg

SEQ ID NO: 6336 - DNA, 330 bp, Glycine max
  Clone ID: LIB3074-028-Q1-K1-A9
cccacgcgtccgcccacgcgtccgcggacgcgtgggtggcccacgcgtccgcccacgcgtgggacgcgaggagacgacagaagggggcgcatgcatatgaaataaactgcaaccgtgacaaaagttgcgtagcaatagcatactcttactctgattcgttagtgaagaaaaatggcaacaatcatcggcggcaccccaactacatcaatcactcgcacaggtgatgtgctcaaacgacctgttggggcctgatcctctaccgctcttggattgccagcaatggccaacgcggggagagtgaggtgctccatggaggaaaagccttcaagc

SEQ ID NO: 6337 - DNA, 432 bp, Glycine max
  Clone ID: LIB3074-028-Q1-K1-B1
ggcacaagtgagtttgttgatcgagataactagaaacagtgtgatgaaaatgaaggtccttgttttcttcgttgctacaattttggtagcatggcaatgccatgcgtacgatatgttccctctccgaatgaacactggctatggtgcccgtactccggaggtgaaatgcgcaagttggaggcttgctgtggaagcacgcaacatctttggctttgagaccattcctgaagagtgcgttgaagcaacaaaggaatacatccatggcgaacaatatagatcagactccaaaacaattaaccaacaagcttacttttatgccagagacctcgaagtccatcccaaggacacatttgtgttcagtatagatggcaccgtactctctaatattccatactacaaaaaacatggatatggggtggagaacattaactc

SEQ ID NO: 6338 - DNA, 425 bp, Glycine max
  unsure at all n locations
  Clone ID: LIB3074-028-Q1-K1-B12
gacttttgtagttcagttcagaccaaacttggctacatcgtttgatattttgaagtctttgtgattgagaatgtcgtacactctgtgctttgctcccatttgttccttgaaatccacaaacagacctgggacaattgccggtaattcagttacccaaaaggcttttgggatgaacgaagtgtgtcagaattctaaagttccaagctttcagtccttgaaggttaaggctacagaagataaaactacacaaagcaaaacaattaggagcattgtttgttctgattgtgatggaaatggtgcaaaatcatgtactcaatgcaaaggtactggagttaattctgtagatcacttcaatggacaatttaaagctggtggattgtgttggctatgcangggaaaaaaggatattttgtgtggatcttgta

SEQ ID NO: 6339 - DNA, 453 bp, Glycine max
  unsure at all n locations
  Clone ID: LIB3074-028-Q1-K1-B2
acgacagaaggggaaagaaaagagaaatggcaacagaaacaaaagtggcagtattaggtggcatcaccgaagtgcagggagctgccaacagcgtcgagatcaacaatctcgctcgctttgctgtagaggaacaaaacaaaagagagaattcagttctggagtttgtgagggtgattagtgcacagcagcaagtggtttctggagtgaattactacatagcattggaagcaaaagatggtgagattaaaaatgagtataaagcgaaggtttgggagagggaatcccaagagttgctagaattcatgccaacattaggtgcaggaggcgagatcgaccatctcgctcgctttgctgtagaggaacaaaacanaagagagaatgcaaatctggagtttgtgggggtgattagggcaaatcagcaggtggtggaagggttcatatactacatcactt

SEQ ID NO: 6340 - DNA, 338 bp, Glycine max
  Clone ID: LIB3074-028-Q1-K1-B3
gagcgccaatgtttttttcagaggagtgtcatcttgtgatcaaaagactttatcttatagtgagaaatccatgtcttactccattttaaggaacaaaacaagagaacaatatcctgacaaacggtttagccataaaatcgaatccatcattgatttgagatattgataaggcgaatactcatttctcgtcaatgctaggcataatgcgcgtatagggacctaaaaaagaatatcttttcttcctatcttatgaactttaaggtgtatgaagcgtcatttcctatcttacattagaattttagtagggtgataaagagtccatttaacttaagttgatc

SEQ ID NO: 6341 - DNA, 361 bp, Glycine max
  Clone ID: LIB3074-028-Q1-K1-B4
gactcaggaaacaagcataatggccttctgtaataaggttggaaatgtcttgaggcagggtgctgctcgcagcacacaagcacctgtttcatccatgcttaattacattcgctgcatgtcttcaagcaagctttttattggaggcctttcatatggagttgacgatcagtctcttaaggatgcattttctggctttggagatgtggttgatgcaaaagttataactgacagagactctggaagatcaaggggatttggatttgtcaacttctccaatgatgagtctgcacgttcggcactctctgcaatggatgggaaggatctagatgggcgaagcattaggggatcctatgcaaatgat

SEQ ID NO: 6342 - DNA, 430 bp, Glycine max
  Clone ID: LIB3074-028-Q1-K1-B5
ggaacctcaaaatcagtctctaatatttttctcactgtcttgtctctccagagaactgtatagagagagatggcagctgcaacatctggtgctgtgttaaatgggttgggatcttccttcttgagtggaggaaacaggagccaaacccttctggccactgctattggaggcaaagttggtgctgctgctgttactgttagtcctagaagactcattgtggtagctgctgctgcaccaaagaagtcatggctccctggtgtcagaggtggtggcaacctcgtcgacccagaatggcttgatggatcgctaccaggtgactatggctttgacccactaggccttgggaaggacccagcattcctcaaatggtacagagaagctgagctgattcatgggagatgggcaatggctgcagttctaggaatctttg

SEQ ID NO: 6343 - DNA, 427 bp, Glycine max
  Clone ID: LIB3074-028-Q1-K1-B6
gatcacagggacacgaactcgaactgttttaggcttttagcttctctgagttttgacctacaacactctccaatcccctcttgtgtgttgtagccgccccgtgatcatcaatggcggaaactgctgacaaatctcaatctctcgccgaggaatattatgtgaatgacaagcaaacaactgtagttgaaaaagctgctgaggtcaaagaagttgaaaacccaaaggtagctgcttctgaggaaccagttgctgagaaaactgtggaagaaacaactcctgttgcccctgcagttgctcatgaaagcagtgaagtcacccctccttctgctgaagaaagcactgataagcaaggtcgtggaaatgttgaggaaaactctggcaatgaagatgtatctgaggagacccctgaaattaaccttgaaactgc

SEQ ID NO: 6344 - DNA, 407 bp, Glycine max
  Clone ID: LIB3074-028-Q1-K1-A11
ggcactagtgagtttgttgatcgagataactagaaacagtgtgatgaaaatgaaggtccttgttttcttcgttgctacaattttggtagcatggcaatgccatgcgtacgatatgttccctctccgaatgaacactggctatggtgcccgtactccggaggtgaaatgcgcaagttggaggcttgctgtggaagcacacaacatctttggctttgagaccattcctgaagagtgcgttgaagcaacaaaggaatacatccatggcgaacaatatagatcagactccaaaacagttaaccaacaagcttacttttatgccagagacctcgaagtccatcccaaggacacatttgtgttcaatattaaatggcaccggactctctaatattccatactacaaaaaacat

SEQ ID NO: 6345 - DNA, 261 bp, Glycine max
  unsure at all n locations
  Clone ID: LIB3074-026-Q1-E1-G11
ggaagtgtatttggtcactgacctatcttggtagagatttgaagtttaaaccttcaaattaatcaaaccattttaatttgcctttagattctgagtcactgctgctatggcgctacgcgtacttcttgtgttggggatgttgctgatgttgtgccttgttaaggtttcatctgatccaaagatagaagaagaaatactggaagcagaagaagaactgcagtttcncgataacgagccacttatcgtgagagacgcgaacag

SEQ ID NO: 6346 - DNA, 421 bp, Glycine max
  unsure at all n locations
  Clone ID: LIB3074-026-Q1-E1-G12
ggttctagtgtgtgattgtttgttgttgtaactcgttcttcttcttttgttgttctgtgtttgtgtttgttttttctctcacctgaaaatgtcttgctgcggtggtaactgtggttgcggaagctcctgcaagtgcggcaacggctgcggaggctgcaagatgtacccagacttgagctacactgagtcaaccaccaccgagaccttggtcatgggagtggcacctgttaaggctcaatttgagggtgctgaaatgggtgtgcccgctgagaacgatggctgcaaatgtggaccaaactgctcctgcanaccctgcacttgcaagtgaggtgttgggagagcaagcttcaagcagagatagcccttaattangaataatgatanactattaatgtgtagctaaaaacgtatgtattatgtc

SEQ ID NO: 6347 - DNA, 345 bp, Glycine max
  Clone ID: LIB3074-026-Q1-E1-G3
gttttttacttgaaatagtaaaaaatgggaattaagatagataagatatatggctaattaaagataaatatatgttcataaaaatgtctttcacatcgaattctataagaatcaagagctatacgaattagagggcagttccaaaaaagcgcacttctagatcaaaaaaaaggattcggaacactttatggaaaaagaagggatattttgcaacattgaaagctttttgattagggcaatctatgtttacgggggaattcaaaaagctttttttgtaacaaatacaaacgttagactaatttcaatgaactaggttcaacggatatttttaaatacgagaagagg

SEQ ID NO: 6348 - DNA, 383 bp, Glycine max
  Clone ID: LIB3074-026-Q1-E1-G4
ggaggcgttcgattaacgtttggcgatcacagaagagaagggaatggagttttctcaagatgattttgatcggttactgttattcgagcacacgcgagagactgctgaagcagactacgcagagaatcctcaagacgctgataatctgaccacgtgggggggagctttgatcgagttgtcgtcattccaagctcctaaggatgccaaggcgatgattgatgatgcgctttcgaggctggaggagtctttgctgatcaatccaactaagcagggcactctttggtgcctgggaaatgcaaacacgtcttatgcttttctaatccctgagataactgaggcaaaaggttattttgacaagggacttgagtatttccagaaagctg

SEQ ID NO: 6349 - DNA, 414 bp, Glycine max
  Clone ID: LIB3074-026-Q1-E1-G9
gaaggtgcaagagtttgttgtgagctataagctagtttatcgtgaggagaatatgaagttgtttgttttctttgttgctgcagtagttctggtagcatggccatgccatggcgcaggctaccaaaggttccctctccgaatgaaaactggctatggtgagcgttcttcggaggtaaaatgcgcaagttttaggcttgctgtggaagcacacaacatccgagcctttaaaaccattcctgaagagtgcgttgaaccaacaaaggactacattaatggcgaacaatttagatcagactctaaaacagttaaccaacaagctttcttttatgctagtgaacgcgaagtccatcacaacgacatatttatattcggcatagataacaccgtactctctaatatcccatactatgaaaa

SEQ ID NO: 6350 - DNA, 236 bp, Glycine max
  unsure at all n locations
  Clone ID: LIB3074-026-Q1-E1-H1
gaggagctgaacaagataagctatccatagcagccaaagaaatgaggggtacggtgggcggcctctttctacgttgtgcccgcacctcttagggaccttcagggacggctggtgaggtggtggggactgatgggggagcgcggttgagaatggaggcacatacttggtgttgccaacgaggggagtgggcggggggngaggataatatgccacatttggaaatgaagcttgccctg

SEQ ID NO: 6351 - DNA, 348 bp, Glycine max
  Clone ID: LIB3074-026-Q1-E1-H11
ggagtttgttgatcgagataactagaaacagtgtgatgaaaatgaaggtccttgttttcttcgttgctacaattttggtagcatggcaatgccatgcgtacgatatgttccctctccgaatgaacactggctatggtgcccgtactccggaggtgaaatgcgcaagttgggggcttgctgtggaagcacacaacatctttggctttgagaccattcctgaagagtgcgttgaagcaacaaaggaatacatccatggcgaacaatatagatcagactccaaaacagtttaccaacaagcttacttttatgccagagacctcgaagtccatcccaaggacacatttgtgt

SEQ ID NO: 6352 - DNA, 265 bp, Glycine max
  Clone ID: LIB3074-026-Q1-E1-H12
gacaccaaacgagccatttgggagttaggttctgcacgctctgcttccagcgagtgttctttcttcgtttcaacaccttaatttgcacacgctgcttcttcagcttgagaaatggcacaagaaacctttctattcacatctgaatctgtaaacgagggtcaccccgacaagctgtgcgaccagatctctgatgcagtgctcgatgcgtgccttgaacaggaccctgacagcaaggttgcctgtgagacatgcaccaagaccaaca

SEQ ID NO: 6353 - DNA, 296 bp, Glycine max
  Clone ID: LIB3074-026-Q1-E1-H2
ggagtgtcattgtgaagttggaaacaatgctagcttcttcgctctccttcctccattcttgtagatcccccgcgtcctcgtccttattgtcaatttcaccgccaaaccccaagccctctcacgtcctacctttcgtggtcgaagccaaagagaggagccgcagggaagacaggaccgctcgccagacgcgcatcagaaggaaggtcgaacggacggccgagaggccgaggctgtccgtgttccggtggaacaagcatctctctgtgcaagtgattgatgagaccggagtgcacacg

SEQ ID NO: 6354 - DNA, 381 bp, Glycine max
  Clone ID: LIB3074-026-Q1-E1-H4
gatatctggcagcagaagaacaagtagttgagaactaagaaggagaagcaaatggcttcctcaatgatctcttccccagctgttaccactgtcaaccgtgccggtgccggcatggttgctccattcactgggctcaagtccatggctggcttccccaccaggaagacgaacaatgacattacctccattgctagcaacggtggaagagtgcaatgcatgcaggtgtggccaccagttgggaagaagaagtttgagactctttccgacctgccagaccttgatgatgcacaattggcaaaggaagtagaataccttcttaggaagggatggattccttgcttggaattcgagttggagcacggtttcgtgtaccgtgagcac

SEQ ID NO: 6355 - DNA, 421 bp, Glycine max
  Clone ID: LIB3074-026-Q1-E1-H6
agacgacagaaggggaaggtgcaagagtttgttgtgagctataagctagtttatcgtgaggagaatatgaagttgtttgttttcgttgttgctgcagtagttttggtagcatggccatggcatggcgcagggtaccaaaggttcgctctccgagtgaaaactggctatggtgagcgttcttcggaggtaaaatgcgcaagttttaggcttgctgtggaagcacacaagatccgagccttgaaaaccattcctgaagagtgcgttgagacaacaaaggactacattaatggcgaacaatttagatgagactctaaaacagttaaccaacaagctttcttttatgctagtgaacgcgaagtccatcacaacgagagatttatattcggcatacataacaccgtactctctaatatcccatact

SEQ ID NO: 6356 - DNA, 386 bp, Glycine max
  Clone ID: LIB3074-026-Q1-E1-G10
gccgccgagctcactttctcctcggtccacagagacaaaatgtaagacaggtgccaacagttcatcacgaaagaaaggacgagctgagccgagatcactagctgaaacgaatttaatactaatcgaaaatactaatagaatagaaatagaactgtcttttcatatagatatcccttcagcacaacataggtcatcgaaaggatctcgaggacccaccaacgcacgaaagccgggatcgttcagaagatggattcctattcgaagggtggataagcgcatggataagctcagactaacccgtcgatttgggattcaattcggttccttaggaggtatcgggaaggaattttggaatgtaataatatcgattcatacagatacagaag

SEQ ID NO: 6357 - DNA, 386 bp, Glycine max
  Clone ID: LIB3074-026-Q1-E1-H7
ggcacaagtgagtttgttgatcgagataactagaaacagtgtgatgaaaatgaaggtccttgttttcgtcgttgctacaattttggtagcatggcaatgcgatgcgtacgatatgttccctcgccgagtggacactggctatggtgcccgtactccggaggtgaaatgcgcaaagtggaggcttgctgtgggagcacacaagatcgttggctttgagaccattcctgaagagtgcgttgaagcgacaaagggatacatcgatggcgaagggtatagatcagactccaaaacagttaaccaacaagcttacttttatgccagagacctcgaagtcgatcccaaggacacatttgtgttcagtatagatgggaccgtactctctaata

SEQ ID NO: 6358 - DNA, 294 bp, Glycine max
  Clone ID: LIB3074-026-Q1-E1-H8
gatatctggcagcagaagaacaagtagttgagaactaagaaggagaagcaaatggcttcctcaatgatctcttccccagctgttaccactgtcaaccgtgccggtgccggcatgggtgctccattcactgggctcaagtccatggctggcttccccaccaggaagacgaacaatgacattacctccattgctagcaacgggggaagagtgcaatgcatgcaggtgtggccaccagttgggaagaagaagtttgagacgctttccgacctgccagaccttgatgatgcacaattg

SEQ ID NO: 6359 - DNA, 402 bp, Glycine max
  unsure at all n locations
  Clone ID: LIB3074-026-Q1-E1-H9
gacaccaacaccataacaaacccactaagatggcttcctttgtatccttcctagtgctgcttcttgcagcccttatcctcatgcctcaagggcctgctacttactacaaaccaattaagaagccaccagtgtacaagcctccagtgtacaagccaccagtgtacaaaccaccggtttataagctaaaaccaccggtttacaagccgaaaccaccggtttacaagccaccatataagaagccaccatacatgaaaccaccttatggaaagtaccctccagtacaggacaatactcatgcctaaagcaagcaatgaagtctattattcacttaataaataagatgaactgctttgtgtnttctatcaatgtgatttacaacttcgtagcaatgcatattcttga

SEQ ID NO: 6360 - DNA, 116 bp, Glycine max
  Clone ID: LIB3074-028-Q1-K1-A1
gagggccacaggtggggatgctgctcgaaagcactaggaacagtgtgaatcatataaaggccatggacatgttaaatgctacagtattggtagaacgcaatgattgcaactatatg

SEQ ID NO: 6361 - DNA, 413 bp, Glycine max
  Clone ID: LIB3074-028-Q1-K1-A10
gaaggtgcaagagtttgttgtgagctataaactagggtatcgtggggagaatatgaagttgtttgttttctttgttgctgcagtaattttggtagcatggccatgccatggcgcaggctaccaaaggttccctctccgaatgaaaactggctatggtgagcgttcttcggaggtaaaatgcgcaagttttaggcttgctgtggaagcacacaacatccgagcctttaaaaccattcctgaagagtgcgttgaaccaacaaaggactacattaatggcgaacaatttatatcagactctaaaacagttaaccaacaagctttcttttatgctagtgaacgcgaagtccatcacaacgacatatttatattcggcataaataacaccgtactctctaatatcccatactatgaaa

SEQ ID NO: 6362 - DNA, 387 bp, Glycine max
  Clone ID: LIB3074-026-Q1-E1-E11
ggcagttcaattccaatatattccattctctctgtgtatttccctacctctcccttcaagatgcagatcttcgtcaagaccctcaccggcaagaccatcacccttgaggtggaaagctctgacatcatcgacaacgtcaaggccaagatccaggacaaggaaggaatccccccggaccagcaacgtctcattttcgccggaaagcaacttgaggacggccgtacccttgctgactacaacattcagaaggagagtactcttcacctcgtcctccgtctccgtggtggcatgcagatcttcgttaagacactcaccggcaagaccataaccctagaggttgaaagctccgacaccatcgataacgtcaaggccaagatccaggacaag

SEQ ID NO: 6363 - DNA, 395 bp, Glycine max
  Clone ID: LIB3074-026-Q1-E1-E2
gcacaagtgagtttgttgatcgagataactagaaacagtgtgatgaaaatgaaggtccttggtttcgtcggtgctacaattttggtagcatggcaagtgccatgcgtaggatatgttcgctctccgaatgaacactggcgatggtgcccgtactccggaggtgaaatgcgcaagttggaggcgtgctgtggaagcacacaggatctttggctttgagaccattcctgaagagtgcgttgaggcaacaaaggagtacatccatggcgaagagtatagagtagactccaaaacagttaaccaacaagcttacgtttatgccagagacctcgaggtccatcccaaggagacatttgtgttcagtatacatggcaccgtactctctaatattccatact

SEQ ID NO: 6364 - DNA, 379 bp, Glycine max
  Clone ID: LIB3074-026-Q1-E1-E4
ggcgattgttcgagaaactctaacgaaagagcgagaaagcgaagacgagccatggcgtcgtttcttcaatcgtttctggatccgaagaagaactgggtcgccgctcaagagatgagggccctctccagacgcgtgcgcaaatatgggctccgatacgaggagttgtacgatgcgtacgacgatctggatgtgaaggaggcgctgaatcggcttccgaaagaggtggtggacgctcgcgaggcgcgtcgtaaacgcgggatcgatctttccatgaagcacgagtacctcgctgacaatctgcagtcaatggagagaccattcaggggctaccttcaggatatgctgactcttgtgaagagagagagagcaggacgtgaag

SEQ ID NO: 6365 - DNA, 401 bp, Glycine max
  Clone ID: LIB3074-026-Q1-E1-E6
gaggggtttgcgctgttgttgctgctcaacctccgtaacctccgagctctgcaccgaagaacggagccatggggaagacacatggaatgggatctgcgcgcaagctcaagtcccaccgcaggaggcaaaggtgggctgacaagtcatacaggaggtcacatcttggaaatgaatggaagaaaccttttgctggttcagcccatgcgaagggaattgtccttgaaaagatgggtattgaggctaagcagctcaactctgccagtcgtaagtgtggcagggtggaacttatcaagaatgggaagaagattgccgcttttggccctaatgacggttgcgtgaactacattggagagaatgacgaagtcgtgattgctggatttggacgaaaaggtcatgctgtg

SEQ ID NO: 6366 - DNA, 171 bp, Glycine max
  Clone ID: LIB3074-026-Q1-E1-E7
gaccaaagagaaaacacaagccaagtgaaagtgagaaaaaataaaaatcaaagagcataatgtcagggatcattcacaagattggggagagccttcatgtgggagggcacaagaaggatgaggagcataaggggtaacaacaaggggggggattccaaggggaacaacaat

SEQ ID NO: 6367 - DNA, 400 bp, Glycine max
  Clone ID: LIB3074-026-Q1-E1-E9
gatatcagaagcgcagacctaggatttcggccgtttgctccccaaggaaagaagcagagtgtttcttttgaaatcagctagaaaagatgtcaggtgaagaggtagctgttgcagctgaggcacctgctgcttcaattccaggtgagccaatggacatcatgactgctctacagcttgtgctgagaaaatctctggcctatggtggtcttgcacgaggtcttcatgaaggtgctaaggtgatcgagaagcatgctgcacagctctgcgttctagcagaagattgtgaccaacctgattatgtgaaactggtgaaggctctttgtgcagagcacaatgttagccttttgacagttccaagtgcaaagacccttggagaatgggctggtttgtgtaagattga

SEQ ID NO: 6368 - DNA, 360 bp, Glycine max
  Clone ID: LIB3074-026-Q1-E1-F1
gtaagtccattctgcacaattctctcttatcatctttgttattacctctttccaaagtcgagattttctagttcgaccaaaccaaagcaaaccaagatggcagcagcgtcagcctcagccatgatatcaacaccaggcttatctccaggcatccgaaagcaccatcatttgaagccatcgagcgtgtgcttccaaggtcggagacccctcgcaaggttcaccaaagcctcatgaaccaaagtgagcaccacgaccaacggggtgattccagagggtggtgttagagctgaactcaactcagcccttgtgataaggctcaggactggactcgccccttcttgggaaagtttgtgttcttca

SEQ ID NO: 6369 - DNA, 408 bp, Glycine max
  Clone ID: LIB3074-026-Q1-E1-F11
ggagacgagggtaaggtcgcgttgtgttgcgtcgtgtcgtgcgctgttcctctgtctgtcgtttttgttttcagaccaaaccctagctccgcatcgcaaccatgtcgaccaagcaaggtggaaaagctaagcctttgaagaaacccaagtctgataagaaggattacgacgaggttgacatggctaacattcagaagaaaaaggaagaggagaaggcgctaaaggagttgaaagccaaggcgcaacagaagggaagctttggaggttctgggctcaagaaaagtggaaagaaataagggctctttatcatgattgtatacatccaatattgagccctgtagtttattaccatgataacttctgtcttattgtggccttctttattgctctaatgttagtactgaactg

SEQ ID NO: 6370 - DNA, 358 bp, Glycine max
  Clone ID: LIB3074-026-Q1-E1-F12
ggcacaagtgagtttgttgatcgagataactagaaacagtgtgatgaaaatgaaggtccttgttttcttcgttgctacaattttggtagcatggcaatgccatgcgtacgatatgttccctctccgaatgaacactggctatggtgcccgtactccggaggtgaaatgcgcaagttggaagcttgctgtggaagcacacaacatctttggctttgagaccattcctgaagagtgcgttgaagcaacaaaggaatacatccatggcgaacaatatagatcagactccaaaacagttaagcaacaagcttacttttatgccagagacctcgaagtccatcccaaggacacaattgtgttc

SEQ ID NO: 6371 - DNA, 292 bp, Glycine max
  unsure at all n locations
  Clone ID: LIB3074-026-Q1-E1-F4
gattatatttgagttcaaacaaatcaaagccatggccacctccaacttctcgattgttctctccgtctccctagccttctttttggtgctacttaccaaggcacactcgagcgataccgtttctttcagcttcaacaagttcaacgcagtccaaccaaacattatgctcgaaaaagatgctagtatttcatcctctggggtgttagaactcaccaaagttggcaacaacggcgtgcccacctcgggatctctcggtcntgcgctttaaggtgccccaatccagatttgggac

SEQ ID NO: 6372 - DNA, 186 bp, Glycine max
  Clone ID: LIB3074-026-Q1-E1-F6
cccgaactgttaccactgtcaaccatgccggtgacggcatggttgcgccattcactggccacaaatacatggctgagatcaccagcaagaagaccaacaatgacattaactacattgctagcaacagtggaagagtgcaatgcaggcaggtgtggccaccagatggcaagaagaagtttgagactc

SEQ ID NO: 6373 - DNA, 361 bp, Glycine max
  Clone ID: LIB3074-026-Q1-E1-E10
ggtaccgatcaattaacaaccatatctatctattgagaaacatgaagaaggtttcacccttggcattttccattctctttttggccttcaccatagaaccctttattggcattgctgcagcagcaccagaagcagtgcttgacacctcaggccagaagctgagaacaggtgtcaagtactacattctgccagtgttcagaggcaaaggtggaggcctaacagtttcaagcagtggcaacaacacatgccccctctttgtggtgcaagagaagcttgaagtctcaaagggcaccccagttaccttcacaccctacaatgccaaaagtggtgtcatactaacctcaaccgatctcaacatcaa

SEQ ID NO: 6374 - DNA, 358 bp, Glycine max
  Clone ID: LIB3074-026-Q1-E1-F8
ggggaataatggcatcaactacgattacgcttattcgtccagcactcagattcctctcgtgtcggagtagcaataataattctagttctagtgttagcgctgcttctagaatctttcatttccgttcaatctccgctatgagcactccgcaaggctcatcggactcggcttccaccaaaacggagagggtggtgataaaggggagggtgcagggagtgttttacaggaactggacgattgagaacgcgacgcaattagggttgaaggggtgggtgaggaaccggagggacgggtcggtggaggctctgttctccgggagtgttgacgcggtgcaagaaatggagcagaggtgtcggcg

SEQ ID NO: 6375 - DNA, 406 bp, Glycine max; identical to SEQ ID NO: 3791
  Clone ID: LIB3074-026-Q1-E1-F9

SEQ ID NO: 6376 - DNA, 379 bp, Glycine max
  unsure at all n locations
  Clone ID: LIB3074-026-Q1-E1-G1
gagagaggtgcatacgggtagagaggttgctgtacgagataagatattgaagtagtgcggggtgcggaggaggtgcantgaacaagggcctctggatcancatcgcgtctcaagtcggtcacttgttcgtgggaggtgtgagtgggtggggggagaaacaggtcgccaaccttctgcggcagcagttgtgaggagggaggggaccagggcatggggcctcacaatcagagcgggttccgatgctgatgaggtcgttaggagggcgaggggagtggggtcgagagggaggggtattttgggcagtggatggtcgaatgcgagctgtgtgaagcgtttgggggcgattgggctagagaacagtgaagctaaccgccaggcg

SEQ ID NO: 6377 - DNA, 413 bp, Glycine max
  unsure at all n locations
  Clone ID: LIB3074-026-Q1-E1-C2
gccgctgagctccctttctcctcggtccacagagacaaaatgtaagacaggtgccaacagttcatcacgaaagaggggactagctgagccgagatcactaactgaaacgaattgaatactaatcgaggatactaatagagtagaggtagaactgtcgtttcagatagatatcccttcaacacaacacatgtcatcnaaaggatctcgaggacccaccaacggacgaaagccgggatcttgcagaaaagtggattcctatgcgaagggtgcagaaccgcatggatganctcacactaacccgtcaatttgggatccaattccggtccttaggaggtatcgggaaggaattttgggaatgtaataatatcgagtcatacagatacagaagaaagggttctctattgattcaaacg

SEQ ID NO: 6378 - DNA, 395 bp, Glycine max
  unsure at all n locations
  Clone ID: LIB3074-026-Q1-E1-C4
ggagtctgcgactgagaagtgcgacgctgctgcaaagtgcaagcggatttggtcttcttctttactcgcaatcagttctctgtaatctcctatctgattgtcgtagcgaatttcaagtgcgaggatacgtgtgttatgtatctaaagaggagaagatgtcagctgggcctggacttgaagcgctagtagatgagagaggttgagtcattgcaaatgatggacgaaatatagtgggagtcgtgaaaggttttgaccagggagcaaatagtagtcggtgggcagtcccatgaacgggtttattcgacaaaggaaggtgtgcaacaacttgttcttgggttgtagatgatcangggtgacaatatgagtgttgttggtgaactggagtaagaactaga

SEQ ID NO: 6379 - DNA, 404 bp, Glycine max
  unsure at all n locations
  Clone ID: LIB3074-026-Q1-E1-C5
agcgacgcgtccgtagcgagaagaccgcagaagggggagagcaagagagacatgcgagttcgactctcgttctatccatccatgttcagcagtccgtggccatgttggaactgttgatcgcagtaccgcgcaactacgagatggttgaaagtagttgcgttgactgtattgagtgagagtgggtgtagtgttccgtgtaccgcgcaganccttaataggttgtgtgggattctgtaaggaactactccgtgcttcagttggtcaaagtaaatgaaaggaaacgtgtgatatcaggcaggttgtgagataagagatcagtagcagaaatctgaagaagagagaggtaggttttttacgtggagaagggtagtggactcttgtgctagagttgcttttttttgggg

SEQ ID NO: 6380 - DNA, 141 bp, Glycine max
  Clone ID: LIB3074-026-Q1-E1-C6
ggagcaatatcgtcaggtcaaaccatgtaccacaatcaaatcaacaccccaaatggcttcagcttcggtacctcatacgttagtcacatagctctgttaccaagatctgtacgccttcatcccaggccttcttgacgccac

SEQ ID NO: 6381 - DNA, 409 bp, Glycine max
  Clone ID: LIB3074-026-Q1-E1-C9
gacaagtgagtgtgatgatcaagaaaacgagaatcagtgtgatgatgatgaacgtccttgcattcgtcgttgctacaattttggtagcatggtaatgccatgcctacgataggtaccctcaccaacttaacactggctatggtgcccgtaccccggaagtgaaatgcgcaagttggaggcttgctgtggaagcacacaacatctttggctttgagaccagtcctgaacagtgcgttgaagcaacacaggaagatatctatggagatcaatagacatgagactctagatgagtgaaccactatccctacctttaggccagagacctctaaatcggtcgcatggacacatttgtgtacagtacatatggcagcgtactctcgaatattccattcgactcaacatatggata

SEQ ID NO: 6382 - DNA, 393 bp, Glycine max
  unsure at all n locations
  Clone ID: LIB3074-026-Q1-E1-D1
ggcagaagtgagtttgttgatcgagataactagaaacagtgtgatgaaaatgaaggtccgtgttttcgtcggtgctacaattttgggancatggcaatgccatgcgtgcgatatgttccctctccgaatgaacactggctatggttcgcgtagtgcggaagtgaaatgcgcaagttgggntgttgctgtggaagcacacaggatctttggcttggagaccattcctgaagagtgcgttagagcaacaaancgatacatcgatggcnagcaatagaagatcaaactccaaaacagttaaccaacaagcttacttttatgccagagacctctaggtccatcgcaggggcacatttgtgttcagtagagatggcaccgtactctctaatattccat

SEQ ID NO: 6383 - DNA, 414 bp, Glycine max
  Clone ID: LIB3074-026-Q1-E1-D10
ggtcgcaccttttcctcttctctctctctttctctctttctagttcgtgttcttcgtcgcaaatccgaagtaggatctctcttgttttttctctaggtttttcgcgatggcgtcgaagcgaattttgaaggagcttaaggatttgcagaaggatcctccaacatcttgcagtgccggtcctgttcatgaagatatgtttcattggcaagctacaattatgggtcctccagacagtccctatgctggaggtgttttcctagtgactattcatttccctccagattatccctttaagccacccaaggttgcattcaggacgaaggtgttccacccaaatataaatagcaatggaagcatttgccttgatatattgaaggagcagtggagccctgctctaaccatttccaaggtgtt

SEQ ID NO: 6384 - DNA, 405 bp, Glycine max
  Clone ID: LIB3074-026-Q1-E1-D11
gaagaccaagaacacaaaaaccacttaattagtccttctcacatccaaaatcttgtgccagcaaatcaaacatggcatccatgactatgcttcagaccatgattcccaagaatgcaccgaacctccctcctcgtgttggtgcttcttccaacaacactactaagatctcatttggtggctcaggtagggtactgtggaccgggattcagaggaacaggaataataggtcttcttcgattgtagttgctgcagttggagatgtttcatctgatggcactgcgtaccttgttgctggtgccattgctgtggctctagttggaacggccttccccatcttcttctctcgcaaagacacatgccttgaatgtgatggagcagggtttgtgcggaaggctaatgtgacat

SEQ ID NO: 6385 - DNA, 360 bp, Glycine max
  Clone ID: LIB3074-026-Q1-E1-D12
gacacacagctattcctcttaagcttgctactgagtttccacactgcataccttaggtcttccgaattcgaagttaatttgcaagatggctaaggaaaaggctcagatcaacattgtggtggttggtcatgtggaccctgaggaggcaaccaccattaacgagctgaagaagcctgttgtggagaaagaagctccagggcatgccatatgagggcatgcacgtacggccccggaggggaaccagaaaattatgttaacaaaataatctggaaccctaatgtatcagtgtcatcatcagtgtgtagtttaagctagctttgctatggttacgttctttgagatgagagtcttgatgaacag

SEQ ID NO: 6386 - DNA, 248 bp, Glycine max
  unsure at all n locations
  Clone ID: LIB3074-026-Q1-E1-D2
tggaacgggacgaggcacacattgcttctgctaaccctctctgggctctccagtgaagcggagtcggaggagggaaacatttaagtaactgcaagggctgcacggtgggctgcaaggtgcggatctagaaggctaggtagcagtcggtgtgggacaatacggagcgaggagggaaaggctgcanagaatgcgggcgggaggaaagctgaacaggagaagttggagaagctgactcgcgaaggtcctca

SEQ ID NO: 6387 - DNA, 369 bp, Glycine max
  Clone ID: LIB3074-026-Q1-E1-D3
gacagcatatcaataatctattttatactatacccacattttgataattagttttctagttgataagccatggctactccaggaaagcttgaggttgacgttgatctcaagtcgaacgcagacaagtactggcaaacccttaggaactccactgaaagattccccaagggcttcgccaatgattacaaaggcattgaggttcttgaaggtgatggcaaatcacctggttctatccgccacataagttatggggaaggttcaccacttgtgaagtcatcctttgagaacattgaaggtgttgattaagaaaagaacgtagtgtcgtacactatcattgatggagaactcctccagcactacagaacattc

SEQ ID NO: 6388 - DNA, 241 bp, Glycine max
  Clone ID: LIB3074-026-Q1-E1-D5
ggtgcacaggtgagtttgttgatcgagataactagaaacagtgtgatgaagatgagggtcggtggtgggttcgttgctacgattttggtggcatggcaggggcatgcgtaggaggtgttcccgcggggaggggagactggggagggtggccgtaggccggaggtgaaatgcggaagttggaggcgtgggggtggggcacagaagatcgttggctttgagaccattcctgaagagtgcgttg

SEQ ID NO: 6389 - DNA, 412 bp, Glycine max
  Clone ID: LIB3074-026-Q1-E1-C12
gaagcacaaaccttattcaacactcatatccttatcctgtttctttcaatggaagtcatttctgcttctagcttgaatcccaacgctccgatgttcgtgccactcgcctatcggacggtggaggatttctccgaccagtggtgggacctcgttcactcctccccctggttccgcgactactggctccgcgagtgcttccaagatccccagttccaaaacgacgacgctttcgacttcgactttgacctagatctccaagatgaagatgaaagggaacgaaaggaagggaaggacgtggtgtcgttggggctgctgaaatggcgaagctgtggacgaggatgggcccaggcgccgaggtatgtggaaaaggcccccaagtttgtgaagcccaaggtgagcccacgggctattc

SEQ ID NO: 6390 - DNA, 231 bp, Glycine max
  unsure at all n locations
  Clone ID: LIB3074-026-Q1-E1-D6
gaaacanagcacggataggaaaaaggaaaaatggaaaagtatttcggagaggcttatcgtggcaacccgggagtgccccattcggaccggggtcgcttcgggaagatatgggtcggatcgggtgccttcnggggtcgcgcatatggcagtccctacatgtgggacgtctctaaccggggaggtgggtatggcagaccagatgctatatgagcaatacgactggagacaggc

SEQ ID NO: 6391 - DNA, 388 bp, Glycine max
  unsure at all n locations
  Clone ID: LIB3074-026-Q1-E1-D8
gataccatagaagaagcacaaagagaagcattagcactaggagcagcagcagctagtcgcagctgaaatggcctcttcagtgatggcatctgtggccctcagaggtgcccctttcagtgttgagaagtcctcagtgagangccttccctctctctcaaggaacgctgcttcattcagagttgtggcgagtggcgagaaggataagactgacaaaccgtatggaagtaatggtggcatggctttgagggatggaactgatgcgtctggcaggaaaggaaagggaaagggtgtttaccagtttgtagacgaatacggtgctaatgtcgatggttacagtcctatctacgacaccaaggactggtctccaaccggtgatgtctacgcgggc

SEQ ID NO: 6392 - DNA, 418 bp, Glycine max
  Clone ID: LIB3074-026-Q1-E1-D9
gacactcattccatttttacctttctctctcgctcgcaaacgcaaataataaaaaacaaggttttagccatggcatcgaagcggatcttgaaggaactcaaggatctccaaaaggatcctcctacctcatgcagcgccggtcctgttgctgaagacatgtttcactggcaagcaacaattatgggtcctccagacagtccttatgctggaggtgttttcctagtcactattcatttccctccagattatccctttaagccacccaaggttgcattcacgacgaaggtatttcacccaaatataaatagcaatggaagcatttgccttgacatattgaaggagcagtggagccctgcgctaactatttcaaaggtgttgctctcaatttgttccctgttgacggaccctaatcctgaca

SEQ ID NO: 6393 - DNA, 256 bp, Glycine max
  Clone ID: LIB3074-026-Q1-E1-A2
agtgaacatgctgcacagagttgagccgtatgtgacttatggatacccaaatctcaagagtgtgagagaacttatttacaagagagggtatggagagctaatgaaggagaggactgctctaactgatagctctagcgttgagcatgctctggggaagtatggaatcatatccactgagagagctgatccatggagataggactcttgggcctcgactttaaggaggctaacagcttcctttggccatttacgctca

SEQ ID NO: 6394 - DNA, 375 bp, Glycine max
  Clone ID: LIB3074-026-Q1-E1-A4
agggacagcatatatatcaataatctattttatactatacctacattttgagaatttgcgttgtagttgatagccatggctacccctggaaagcttgacgttgacattgatctcaagtccagcgcaggcaagtactggcaaggcgttaggaattctactgaaatattcgctgaggccttcggagaggagtggaaaagcattgaggttcttgagggtgatgggaagtctcctggttctatcggccacagaggttatggtgaacgttggtcacgtgtgaaatcatcctttgagaagattgaggctggttatgaggaggagagggtagtgtcgtagactatcattgatggagaactcctccagcactaggaaacattc

SEQ ID NO: 6395 - DNA, 393 bp, Glycine max
  Clone ID: LIB3074-026-Q1-E1-A6
gaaggtgcaggagtttgttgtgagctataagctagtttatcgtgaggagaatatgaagttggttgttttctttgttgctgcagtagtttgggtagcatggcgatgccgtggggcaggctaccagaggttgggtctccgaagtgggactggctatggtgagcgttcttcggaggtagaatgcgcagggtttaggcggtgctgtggaagcacacaacatccgagccttgaaaaccattcctgaagagtgcgttgaggcaacaagggactacaggaatggcgaacagtttagatcagactctaaaagagttaaccaacaggctttcgtttatgctagtgagcgcgaagtccatcagagggacatatttatattcggcatagataacagcgtactcg

SEQ ID NO: 6396 - DNA, 242 bp, Glycine max
  Clone ID: LIB3074-026-Q1-E1-A7
agggacttacaggagcacaccacatgaagtatatgctccataccatcgtcaccaggaggggcgagaataatggcaatggccattggatcaactcgaggcacagtcaccgtggttgcggctagccccagtgttggcatcaggaggagtgcgaagaggaatgtgaacttcaggacgtggttcaattcgtttgcggggttgagggctcagtacaatgtgacattactatgccttcctgtgtgcac

SEQ ID NO: 6397 - DNA, 137 bp, Glycine max
  Clone ID: LIB3074-026-Q1-E1-A8
ggcagcttgtaattgtaaaccgagagaacgatgttcatctccttggagatggcccctggcgggaattcgtaaataacgtatggtgcatagagatactttcggctcaggaagtggagcaaatgggcaacaatggtctt

SEQ ID NO: 6398 - DNA, 417 bp, Glycine max
  Clone ID: LIB3074-026-Q1-E1-A9
gacggcactcgttttcgttctcgttctggtttatagatctttgcgaaggaggtttacagcgctcaaccaaagatgcagaacgaggaaggacagatcactgagctttacattcctaggaagtgctccgccacaaacagattgattaccgctaaggaccatgcttcggttcagatcaacattgggcatgtggatgagaatggcgtctacaatggccatttctccacttttgccctctgcggattcatccgtgctcagggtgatgctgacagtgctctagaccgcttgtggcagaagaagaaagttgaagttaagcaacagtagacacccatgatagtttgttacttcgttatgtattaatttctactcttgctagagatatttgagtactatgattgtcgttttgagcacaaatactca

SEQ ID NO: 6399 - DNA, 264 bp, Glycine max
  Clone ID: LIB3074-026-Q1-E1-B1
aggggcagcgaaagaacagaagatcctcaattttctgagcagccaaacactctctctctgtctctcgaagattctcagtttgcagagaaaatccgaatcatgtcatggcaggcgtatgtcgacgatgaccttctcggtgagatcgaatgtaaacaggtcacgcacgcggctatcatcgggcaacagaggaacgtttggggtcagaggagcgacttcgctcagttcaaacctgaagagatgactgccaagcatattgactgtaat

SEQ ID NO: 6400 - DNA, 213 bp, Glycine max
  Clone ID: LIB3074-026-Q1-E1-B10
ggcacaagtgagtttgttgatcgagataactagaaacagtgtgatgaaaatgaaggtccttgttttcttcgttgctacaattttggtagcatggcaatgccatgcgtacgatatgttccctctccgaatgaacactggctatggtgcccgtactccggaggtgaaatgcgcaagttggaggcttgctgtggaagcacacaacatctttggctt

SEQ ID NO: 6401 - DNA, 372 bp, Glycine max
  Clone ID: LIB3074-026-Q1-E1-B11
gacacttactagtagtaagcatggagtcctcaaagatctatgcttacctcttcctctgcatgatctttctctcttccgccactcccattctcggttgtggctactgtggcaaaccccccaaaaagcacaagcctggtaaaacaccaaagacacccaaaacacccgttgttaagccaccagtcaccatccctcccattaatgttcctcccgttgttcttccaccaatagtgaagcccccaggtattctccctccaattccaattattaacccaccaaccacaccagggaagggagggaacactccatgcccaccaccaaagtctcctgcgcaggctacgtgccccattgacacgctcaaacttggtgcctgtg

SEQ ID NO: 6402 - DNA, 52 bp, Glycine max
  Clone ID: LIB3074-026-Q1-E1-B12
gagacctcaggtcaggcggggctacccgctgagtttaagcatatcaataagc

SEQ ID NO: 6403 - DNA, 385 bp, Glycine max
  unsure at all n locations
  Clone ID: LIB3074-026-Q1-E1-B2
gataactgangaggaaaaaagaccagcggttgacgatgaaacagaagtgtcttgttgttctggtcgttgttgtgctcttggcttgtgcggttggttgggatgagggtatacccggcgggtggaaccccatcaggagcattaacgatgctcaggtgacagaaatctcaaatttcgccgttgcggaatacgaggggcaatcggttgagaagctgaatttggtgaaggttatgaaaggcgaccttcaggtagtaacaggcctcaactagggcctcaggctcagcgccagagactccaacagttaccaagcaattgtctatgagaaggcatgggcccgggagcagtacagaaaccttacctcctttacccctcttcatgcttaacctct

SEQ ID NO: 6404 - DNA, 253 bp, Glycine max
  Clone ID: LIB3074-026-Q1-E1-B3
gaccggattccttacgcgcgcgcactcagaaacacacactgaactaagggacatcaggagagagatgggtgagcggagcttcatcatgagtaagcctcgtggcgtccagagaggccttagtggcgagattaggagcagaggtgagaagaggggtggcgacttgagaggtttgaaacttgtgagtgtggaccgtcggtgtgcggaggatcagggtgcggatttgtctgccaagcctgtctttacgggtttggtg

SEQ ID NO: 6405 - DNA, 402 bp, Glycine max
  Clone ID: LIB3074-026-Q1-E1-B4
gaagaccaagaacacaaaaaccacttaattagtccttctcacatccaaaatcttgtgccagcaaatcaaacatggcatccatgactatgcttcagaccatgagtcctaagaatgcaccgaacctccctcctcgtgttggtgcttcctccaacagcactactaagatctcatttggtggctcaggtggggtactgtggaccgggattcagaggaacaggaataataggtcttcttcgagtgtagttgctgcagttggagatgtttcagctgatggcactgcgtaccttgttgctggtgccattgctgtggctctagttggaacgggcctccccatcttcttctctcgcagagacacatgccctgaatgtgatggagcacggtttgtgcggaaggctaatgtga

SEQ ID NO: 6406 - DNA, 379 bp, Glycine max
  Clone ID: LIB3074-026-Q1-E1-B8
ggagaaaaacgagccaattcatcattttctctcttctctgcttcgtcttgtgcaaatcgtaggagctgaggagaatcaagcgagagaaatatgtctggtatcgctcgtggacgccttgctgaggaacgaaggtcatggcgcaaaaaccatccacacggtttcgttgccaagcccgagactctacctgatggcaccgtgaatttgatggtctggcagtgcactattcctggcaagaccgggactgattgggagggtggatagttcgcactgacaatgcacttcagtgaagattaccctagcaagcctcccaagtggaaattccctcagggtttctttcaccctaatgtgtatccatctggaactgtttgcttgtctatac

SEQ ID NO: 6407 - DNA, 390 bp, Glycine max
  Clone ID: LIB3074-026-Q1-E1-B9
gatagcagcatcatacaaagcattgaattcaaaaactaagttcatttcttgtgctttgctttattcctcaaaaccaaacatgtcgaacacatgcggcaactgtgactgcgctgacaagactaactgcaccaagggaaacagctatggtgttatagtagagactgagaagagctacatcgagactgttgacatggatgttccagcagctgagcatgatgggaagtgcaagtgtggcactaactgcacttgcacggactgcacttgtggccattaaggaatatgtatgaaaatgtaattgccatgtgtttggcaatacaaatctccaaataatgtaatcttcgtatgaataaatgtgtgctgttatcctaaaacaaaaggaaaaagaaaaag

SEQ ID NO: 6408 - DNA, 258 bp, Glycine max
  unsure at all n locations
  Clone ID: LIB3074-026-Q1-E1-C1
cgggagagaanagtttcatgtgacttcaatggctactgctggaagtcgttggggtgttgttatgtcacgaaatgcgggattcaatgatcaggttgttgaacttgattttctcgaggctagtgagggaatccacagacgatgggataatggttataggagtacggcaacggctgctacatgggatcagtcggctcttatacgtaagagtcgtangcgcaggggaggagatgaaacccagggaactctgggtacatctca

SEQ ID NO: 6409 - DNA, 286 bp, Glycine max
  Clone ID: LIB3074-026-Q1-E1-A12
gggcagcagaagaacaagtagttgagaactaaggaggagaagcaaatggcttcctcaatgatctcttccccagctgttaccactgtcaaccgtgccggtgccggcatggttgctccattcactggcctcaagtccatggctggcttccccaccaggaagaccaacaatgacattacctccattgctagcaacggtggaagagtgcaatgcatgcaggtgtggccaccagttggcaagaagaagtttgagactctttcctacctgccagaccttgatgatgcacaat

SEQ ID NO: 6410 - DNA, 396 bp, Glycine max
  Clone ID: LIB3074-026-Q1-E1-C10
ggccgctctctgagaaaaacagatagtgtgggagagagaagagcggaagagaaaatgacgaccaggttcaagaagaacaggaagaagagaggtcacgtcagcgccggacacggccgtatcggaaagcaccgcaagcatcccggaggtcgcggtaacgccggtggcatgcatcaccaccgtatcctcttcgacaagtaccatcctggtttcttcgggaaggtacgcatgcgctacttccacaaacttcgcaacaaattctacaatccgatcatcaacatcgacaagctgtggtccctcctcgcccaggaggccaaagacaaggccaccgccgacaaggcacccttgctcgatgtcacccagttcggttactctaaggttttgggtaaaggggttttg

SEQ ID NO: 6411 - DNA, 414 bp, Glycine max
  Clone ID: LIB3074-026-Q1-E1-C11
gggaaaaggatgttcaggtgatgaatgaaggacctggacacatcccaatgcacaagattcctgaaaacatgcagaaacagttagaatggtgtagtgaagcgcctttttacactcttggtcctttaacaactgatattgcccccggctatgatcacatcacctctgcaattggtgctgccaatattggggcacttggtactgctcttctctgttatgtgactccaaaggaacatcttgggttgccaaaccgggatgacgtgaaggctggagttatagcctacaagatagcggctcatgctgctgatttagccaaaggtcatccatatgctcaagcctgggatgatgcattaagcaaggcaagatttgagttccgatggatggaccagtttgctttgtcattggatccgatgacag

SEQ ID NO: 6412 - DNA, 218 bp, Glycine max
  Clone ID: LIB3074-025-Q1-E1-G3
ggcacaagtgagtttgttgatcgagataactagaaacagtgtgatgaaaatgaaggtccttgttttcttcgttgctacaattttggtagcatggcaatgccatgcgtacgatatgttccctctccgaatgaacactggctatggtgcccgtactccggaggtgaaatgcgcaagttggaggcttgctgtggaagcacacaacatctttggctttgtga

SEQ ID NO: 6413 - DNA, 329 bp, Glycine max
  Clone ID: LIB3074-025-Q1-E1-G4
caacataggtcatcgaaaggatctcgaagacccaccaacgcacgaaagccgggatctttcagaaaatggattcctattcgaagggtgcataaccgcatggataagctcacactaacccgtcaatttgggatccaattcggttccttaggaggtatcgggaaggaattttggaatgtaataatatcgattcatacagatacagaagaaagggttctctattgattcaaacgctctacctacgacatagggatagagaacgaggaaaaacccgaggatttcacatattacttttggtccaaaaatcgatctgaattttttcgtacttttcg

SEQ ID NO: 6414 - DNA, 359 bp, Glycine max
  Clone ID: LIB3074-025-Q1-E1-G5
gacaccaacaccaaaacaaacccactaagatggcttcctttgtatccttcctagtgctgcttcttgcagcccttatcctcatgcctcaagggcttgctacttactacaaaccaattaagaagccaccagtgtacaagcctccagtgtacaagccaccagtgtacaaaccaccggtttataagccaaaaccaccggtttacaagccgaaaccaccggtttacaagccaccatataagaagccaccatacaagaaaccaccttaaggaaagttacctccagtaggggacaacacccatgcctaaagcaagcaattaagtctattatccaccttaataataagaagaactgccttgtgtttt

SEQ ID NO: 6415 - DNA, 262 bp, Glycine max
  Clone ID: LIB3074-025-Q1-E1-G6
gaatggaagatggtttggtggtagacagatacatgccagtgaagatgatggttcagttaaccatgccttagtccgggatctggaagaagatgccattcggctggagcagtttggtgccgaacttgaaggtgactgagttaatgaggatagcattgcaccagattcacagttccataagtccggacctaggaatatttcacaatggctgaagcttgtggaactaggccatcacttttctcggttttgcaaagatattaatttt

SEQ ID NO: 6416 - DNA, 406 bp, Glycine max
  Clone ID: LIB3074-025-Q1-E1-G7
gaaggtgcaagagtttgttgtgagctataagctagtttatcgtgaggagaatatgaagttgtttgttttctttgttgctgcagtagttttggtagcatggccatgccatggcgcatgctaccaaaggttccctctccgaatgaaaactggctatggtgagcgttcttcggaggtaaaatgcgcaagttttaggcttgctgtggaagcacacaacatccgagcctttaaaaccattcctgaagagtgcgttgaaccaacaaaggactacattaatggcgaacaatttagatcagactctagaacagttaaccaacaagctttcttttatgctagtgaacgcgaagtccatcacaacgacatatttatattcggcatagataacaccgtactcgctaatatcgcatac

SEQ ID NO: 6417 - DNA, 354 bp, Glycine max
  Clone ID: LIB3074-025-Q1-E1-G8
gggaaaaagaatcaaaagaaagaaatggcaatctcatcctcatcagagataggttggagttggagggttttgtgtcagagagttaacccagcaataccaaacacgcccttgttcctccaaatcccaaagtcaactcgcttcactgggtcttcttctgttgttgctcgcgcttgggaccctaaaacggcctcttcgcaaggggaggatctagtgtacgtgggaaaactagtggcgggttcttttgcgggtggggctgcaatcaagttcggtaatgctccaatccctgagataacgactccgaaccttgtgctggctctgctcctcattctaactcctgtgcctgttgctgttttt

SEQ ID NO: 6418 - DNA, 270 bp, Glycine max
  Clone ID: LIB3074-025-Q1-E1-G9
gaaggtgcaagagtttgttgtgagctataagctagtttatcgtgaggagaatatgaagttgtttgttttctttgttgctgcagtagttttggtagcatggccatgccatggcgcaggctaccaaaggttccctctccgaatgaaaactggctatggtgagcgttcttcggaggtaaaatgcgcaagttttaggcttgctgtggaagcacacaacatccgagcctttaaaaccattcctgaagagtgcgttgaaccatcaaaggactacat

SEQ ID NO: 6419 - DNA, 383 bp, Glycine max
  unsure at all n locations
  Clone ID: LIB3074-025-Q1-E1-H1
gagtattcagattattatacattgcaaaaatggcatcattcaccatgacagcttccatccttggctgcccagccgtcaccaaccggtcggcagcgacgcagaggagatcagtggtagtgaatgcagccagcanatctgttgaaggggaaaaggtcagttatgacaacaatgggancaatgcaaggaggaacttgatgttcgccacggcggcggctgctgtttgctcttttgctgcanggatggcattgggagatgagcctaaaccaggaacctcagaagccaagaaaaagtatgccccggtttgtgtcaccaatcctaaagctaggatttgtcgcaattgaaggacttttttggttcacttttgggatttgggaatgttcaat

SEQ ID NO: 6420 - DNA, 66 bp, Glycine max
  Clone ID: LIB3074-025-Q1-E1-H10
ctgcgataagacgagataaggggtgaatcagcaccacattcagctgagctttttgtgaagattcca

SEQ ID NO: 6421 - DNA, 360 bp, Glycine max
  Clone ID: LIB3074-025-Q1-E1-H11
gatcctctcaaacttgcattttagcaatggccaaatggatctcatttgctgctctttttgcaatacttttactactcatctctcctgagcttgcaagtgctgcccaacctagtcttattcttcaactcggccgaaaacttttccaatgcggcagcgccgccgtccctgttcgtggaaataccccatccaatggccgctcgtacaggatataccccaccaccaaaacacccactctatggctgaatatttgagatgttagcaaccttctttaattttgtgataaaaaaaatacttttaaagatgttaaattgtgtgtcaatactataatatatgtcatgtatgcttaatttcactgaacca

SEQ ID NO: 6422 - DNA, 244 bp, Glycine max
  Clone ID: LIB3074-025-Q1-E1-H2
gacttcaattgcaatcaaattagttcattctctttgcgcagttccctacctctcctttcaagatgcagatcttcgtcaagaccctcaccggaaagaccatcacccttgaggtggaaagctctgacaccatcgacaacgtcaaggccaagatccaggacaaggaaggaattcccccggatcagcaacgtctcatcttcgccggaaagcagctcgaggacggccgtaccctcgccgactacaacat

SEQ ID NO: 6423 - DNA, 151 bp, Glycine max
  Clone ID: LIB3074-025-Q1-E1-H4
tggtaccgctgccagaacataaagaacgggatgcttataaatgtgctgcaagcgtaacaaaagttgcgtagccatactctgattcattagtgcccaaatatggaaccatcagcgccggcatcccaactacatcgatcactcgcgcaggtct

SEQ ID NO: 6424 - DNA, 387 bp, Glycine max
  Clone ID: LIB3074-025-Q1-E1-H5
gtcccattcttccatttccatttcttcccatggaatcctcgcctgccattcgttcctttcactatcccatgggcactatgtcccatgtgcgagcctgccttgagaagcaagctgtacttcccatccataatgccagatggaactctaaacgtaggcttttcatccagcatttggcatatggtcagaagcacattaattcccacatgaaggggaaaagcgcactagtttcatctgcaaaaacagctgaagctatcaacacatccaattctgatgcttcttcagataacaccccccaaggctcattggagaaaaagcctttgcaaactgcgacttttcctaatggatttgacgctttggtattataggtctgtgatgagactgaaattg

SEQ ID NO: 6425 - DNA, 404 bp, Glycine max
  Clone ID: LIB3074-025-Q1-E1-H7
gacacattgctcctcacagcacgacttgttcaccgatcagagctgattttcgcggctgttaccggtcaccggagattctatccgaaatcgttttccgatgacgataaaaactgttaaagtcagtaacgtttccttgggagcaactgagcaagacattaaggagttcttttcattttctggtgatattgaatatgttgaactacggagccatgatgaacgatctcaaattgcttatattaccttcaaggattcacagggagctgagactgcactactgctttcaggggcaacaataggcgatatgccagttacaataactcaagatccagattaccagcttccacctgctgcgttagcgtcatctgtaagagaaactcagctcctggtggtgctgactctgcttt

SEQ ID NO: 6426 - DNA, 294 bp, Glycine max
  unsure at all n locations
  Clone ID: LIB3074-025-Q1-E1-H8
gactcaccacttcaaaacactcataacacaaagcacaaagcaaagctcatccttgagttaaaaaatggcagcagcttcttccatggctctctcatccccatccttggctggcaaggccgtgaagctgggcccatcagccccagaagtgggaagggtgagcatgaggaagaccgtcaccaagcaggtctcctcanggaagccatggtacggccaanacgagtcaatacttgggccaattcccgggcaagcccccgtctaactaaaccggtaatttccaagccaacaacggttgga

SEQ ID NO: 6427 - DNA, 101 bp, Glycine max
  unsure at all n locations
  Clone ID: LIB3074-026-Q1-E1-A1
cggcagcattggtcatcnanatggtggcgaggacccaccaacgcacgagagccgggatctttcagagggtggaggcggaggcgaacggtgcatgaccgcat

SEQ ID NO: 6428 - DNA, 401 bp, Glycine max
  Clone ID: LIB3074-026-Q1-E1-A10
ggggggaataggagggggcaaattgagttgggtgttggaaaggcagagcaagaggagtaacataatcaaacatggcggttaggcaaagagccgtgtctgcacttccaactcttctacgcactctccgcaaagaacctttgaagcctcgcaaccacgcacacgtcaatgccttgccctctcttcgacgcgctttctctttgtacgatcagatcaacctcatcgatcaagtccccgaagaccagctccgatttcaagggtataatgatacggggtttactgtaaatggggttgaatacgaaggaagcttgctttgtgttggaaatttgctcatgtcttggaaacctaagaagttttcagagatcactgccgatagcttgtcaatcttccaaatagttcgccct

SEQ ID NO: 6429 - DNA, 424 bp, Glycine max
  unsure at all n locations
  Clone ID: LIB3074-026-Q1-E1-A11
gacacaactgaacaagataagctatccatagcagccaaagaaatgaagagtaccttgttcgccctctttctactttgtgccctcacctcttacctaccttcagccaccgctggtgatgtggtcgacactgatggtaatcctgttgaaaatggaggcacatactttgtgttgccaactataatattaaacggcggtggaatagaatatgccacatttggaaatgaaacttgccctgtcactgttgcgcaatctcgcgatcagttctgcaagggctttccgataaccatttcatccccagcccgaatccgtcacatcagcgaaggccttagtttgaacattgggttcactttcgcatcnccgtgttcccccgcttctgagtggaccattgtgaaggattcaacagaaggactcgctgttaaactca

SEQ ID NO: 6430 - DNA, 214 bp, Glycine max
  Clone ID: LIB3074-025-Q1-E1-E4
ggtgtttggaggtggaaacttagggttgttggagaaattgttctgttggggggatacgatgtcgatggagaaggaagcttcaagctccacgcctacgcgcaaattgtcgtgcactgcatgcttcgacgctgtctatttctgctactcgccggttcatcaaatgcagcagtattacaggcttggtaaatttgacaattgttccggcaaatggaaa

SEQ ID NO: 6431 - DNA, 309 bp, Glycine max
  Clone ID: LIB3074-025-Q1-E1-E7
gaatcagaagaagaagcaggcgagttgacagagaatgggaaggacgaacgggtatgttgagttcgaggagtcgccgccggacgatttcgatccggcgcacccgtacgaagacccggtggcgatgctggatatgagggagcacatcgtgacggacaactcgatccacatcaacaacgctaagatcactaaggagaagctccgatggtgctaccgcatcgaacgcgtcaaccacctccacaagtgccaccagctcgtcaaccagtatctcgagtccacccgcggcatcgggtggggcaatgacggtcgtca

SEQ ID NO: 6432 - DNA, 312 bp, Glycine max
  Clone ID: LIB3074-025-Q1-E1-E9
gaaggtgcaagagtttgttgtgagctataagctagtttatcgtgaggagaatatgaagttgtttgttttctttgttgctgcagtagttttggtagcatggccatgccatggcgcaggctaccaaaggttccctctccgaatgaaaactggctatggtgagcgttcttcggaggtagaatgcgcaagttttaggcttgctgtggaagcacacaacatccgagcctttaaaaccattcctgaagagtgcgttgaaccaacaaaggactacgttaatggcgaacaatttagatcagactctaagacagtttacca

SEQ ID NO: 6433 - DNA, 414 bp, Glycine max
  Clone ID: LIB3074-025-Q1-E1-F1
gacacaccccattgctacatagggctatatagcataaacatttgagtcttcattgcacaatgtcaacctcttccataaacgggtggtgcctctcttccatctccccagccaaaacctctctcaggaaggccacattacgcccttccgtcttcgcaacccttaacactccttcttctccttcctcttcatcttccttcccctctctcattcaagacaggcctgtttttgctgcccctgcccccatcatcaccccaactgtgagagaggatatgggaaaggaatacgagaaagctattgaagaacttcagaaattgttgagggaaaagagtgaactcaaagcgacaactgctgaaaaagtggagcaaataacagcttctctaaggacatcatcatctgatggcatcccaacatcag

SEQ ID NO: 6434 - DNA, 321 bp, Glycine max
  Clone ID: LIB3074-025-Q1-E1-F10
agaagggggaggaagaataattgtgagacgagggtaaggtcgcgttgtgttgcgtcgtgtcgtgcgctgttcctctgtctgtcgttggtgttttcagaccaaaccctagctccgcatcgcaaccatgtcgaccaagcaaggtggaaaagctaagcctttgaagaaacccaagtctgataataaggattacgacgacgttgacatggctaacattcagaagaaagacgaagaggagaaggcgctaaaggagttgaaagccaaggcgcaacagaatggaagctttggaagttctgggctcaagaaaagtggaaagaaataagg

SEQ ID NO: 6435 - DNA, 125 bp, Glycine max
  Clone ID: LIB3074-025-Q1-E1-F11
gaaccacagcaagcaatattttcagctgtattattttctctctttgtgcaaagatgggaaaattgcacagctatgtttcagtacttgctgtggcatttgtattggtgataggagtagctgaatgc

SEQ ID NO: 6436 - DNA, 334 bp, Glycine max
  Clone ID: LIB3074-025-Q1-E1-F12
acgacagaagaaaaaggaaaaggagaaggagaagaacgcagctgcggcggcagcagcagcagcagcagcagtagcaggaactgtaccagaaaatgaaacagcagaagataaagctgaggtaattgaaccaaagaagaatgattcaaaggctaaaaaagcagctgataagaaagtgccaaagcatgttagggagatgcaagaggcactagctcgaagacaagaggctgaagaaaggaagaaaagagaagaggaagaaaggttaaggaaagaagaagacgagcgacgtaggcaagaggaacttgagaaacaagcaaaaagaggctaaacgtaagat

SEQ ID NO: 6437 - DNA, 316 bp, Glycine max
  unsure at all n locations
  Clone ID: LIB3074-025-Q1-E1-F2
gatgggaggaagaataattgtgaggcgagggtaaggtcgcgttgtgttgcgtcgtgtcgtgcgctgttcctctgtttctcgtttttgtgttcagaccgaaccctagctccgcatcgcaaccatgtcgaccaagcaaggtggaaaagctaagcctttgaagaaacccaagtctgataagaaggattacgacgagattgatgtggctaacattcagaagaaaaaggaagaggagaaggcgctaaaggagttgaaaggcaaggcgcaacagaaaggaagctttgganggtctgggctcaagaaaagtgggaagaaataa

SEQ ID NO: 6438 - DNA, 340 bp, Glycine max
  Clone ID: LIB3074-025-Q1-E1-F3
gacctcacccagttgcagaaagaaaagaccatcaaagtttcacttcagccttatccggtttagggtttcggtttttgacccaacctttgacgtatcgaaaccttaagtttcggatcaggtctgagcaatctggttggtagaacctttggtcttagagagtcaagttttatgtctgaattagacgatcaaattcctactgccttcgatccttttgctgatgcaaatgctgatgactcgggtgctgggtcaacggagtatgtgcatattcccgtacaacagcgaaatggaaagaaaagcctgacaaccgttcaaggaattaaaaaagaattcagctattaca

SEQ ID NO: 6439 - DNA, 368 bp, Glycine max
  Clone ID: LIB3074-025-Q1-E1-F8
gacaactgaacaagataagctatccatagcagccaaagaaatgaagagtaccttgttcgccctctttctactttgtgccctcacctcttacctaccttcagccaccgctggtgatgtggtcgacactgatggtaatcctgttgaaaatggaggcacatactttgtgttgccaactataatattaaacggcggtggaatagaatatgccacatttggaaatgaaacttgccctgtcactgtttcgcaatctcgcgattagttctgcaacggctttccgagtaccatttcatccccagcccgaatccgtcacatcagcgaaaggcttagtttgaagattgggttcactttcgcatccccgtgttcccccg

SEQ ID NO: 6440 - DNA, 293 bp, Glycine max
  Clone ID: LIB3074-025-Q1-E1-E12
gattgtgattcattagcacatttgcaaagtgttatttttctttttttctcatttgcactgcaaattgcaatggcttccaataaggttattgccaccatcatggtgctttctctccttgcctactcaacatcattcatcaatgcatgtggcacatgccaaccaatacctaccccttctcctcctcctccatcacgaaagttccctaaggacacattgaagctaagggtgtgtgcatatattccaggtcctggttacgttgttgttggttcccctgtcctcaacaactgttgtgc

SEQ ID NO: 6441 - DNA, 250 bp, Glycine max
  Clone ID: LIB3074-025-Q1-E1-G10
gaccctaaagagagagagagggagtcagagaaaccctaggttagaagaaaagatgccggctggtcaagggttgagattccgcaccaaagaatccttctctcgtcctttcaaggaaaaaggaaacatcgccctcaacacatagctgagaaactaccacatcggcgactatgtttacgtccacggtaacggtgccgttcaaaacggaatgccccacaaattctaccatgggcgcgacggacgcgtctgggat

SEQ ID NO: 6442 - DNA, 357 bp, Glycine max
  Clone ID: LIB3074-025-Q1-E1-G11
caacataggtcatcgaaaggatctcgaagacccaccaacgcacgaaggccgggatctttcagaaaatggattcctattcgaagggtgcataaccgcatggataagctcacactaacccgtcaatttgggatccaattcggttccttaggaggtatcgggaaggaattttggaatgtaataatatcgattcatacagatacagaagaaagggttctctattgattcaaacgctctacttacgagatagggatagagaaagaggaaaaaaccgaggatttcacatagtacttttggtcgaaaaatcgatctgatttttttcgtacttttcgctcaatgatgaaatgggtcagattctac

SEQ ID NO: 6443 - DNA, 329 bp, Glycine max
  Clone ID: LIB3074-025-Q1-E1-G12
gggggtttggttattaaggttttcgctgaccggtgcgcagtcgagcctccagaagacgaatcgaaaatgccgttgcacaagacattcagaatcaagaagaagttggcgaagaagatgaggcagaacaggcccattccctactggatccgcatgaggaccgataacaccatcaggtacaacgcgaagcgccgtcactggcgtcgcaccaagcttggattctgaagtgtatgctctgcctaagttcaatttatccaattaattagtgttttaatttcttgagggaaaaacaatggtttgagtttttaatattttccatttgttcgaagact

SEQ ID NO: 6444 - DNA, 226 bp, Glycine max
  Clone ID: LIB3074-025-Q1-E1-C12
gatctggcaacataaaaacaagtagttgagaactaagaagaaggaaatggcctcctcaatgatctcctccccaactgttatcaacgtcaatcgtgccggtgccggcatggttgctccattcaacggtctcaaatccatggctggcttccccacgaggaagaccaacaatgacattacctccattgctagcaacagtggaagagtacaatgcatgcaagtgtggcca

SEQ ID NO: 6445 - DNA, 365 bp, Glycine max
  Clone ID: LIB3074-025-Q1-E1-C2
ggaacaagttgcagggatggcctccactctctctatatcctcttcatccacccttgttgatgccaagcctccaactccaagacaatgcgtcacccttcccactcttccccctccaccttttcactctcagactcgtccttggaagaccactgcttcctgtcctaaggtttcccccaattttaagggaatgggcaacaacagaaaaggaacccccacaaaagttgccgccaaaactgaactccccaatgccgaaacgccaaagaatgttaaaacgaatcaagaagcttgggaaaaaattgaagatgaatatgcagtgagttcactgggccttgccgggggtggtgcaatggtgggctcaactggga

SEQ ID NO: 6446 - DNA, 406 bp, Glycine max
  Clone ID: LIB3074-025-Q1-E1-C3
ggcagagagaagagggtcagagtgagaaagagagagagagagagagaaactgagagaaattcgcaaaccctaatttcggaaagatcggcgatggctgcctccaaggatcgcgagaacttcgtctacatcgccaagctcgccgaacaggccgagcgatacgaagagatggtggaatcaatgaagaacgttgcgaatctcgacgttgagctgactgtggaggagcggaatttactttctgttgggtacaagaatgtgattggtgctcggagagcatcgtggaggatcctgtcttccattgagcaaaaggaagaaacaaaagggaacgagttgaatgcgaagcgggttaaggagtacaggcagaaggttgaattggagctttcaaacatctggtatgatgttatgacag

SEQ ID NO: 6447 - DNA, 205 bp, Glycine max
  Clone ID: LIB3074-025-Q1-E1-C4
ggcacaagtgagtttgttgatcgagataactagaaacagtgtgatgaaaatgaaggtccttgtttccttcgttgctacaaatttggtagcatggcaatgccgtgcgtacgatatgttccctctccgaatgaacactggctatggtgcccgtactccggaggtgaaatgcgcaagttggaggcttgctgtggaagcacacaacatc

SEQ ID NO: 6448 - DNA, 56 bp, Glycine max
  Clone ID: LIB3074-025-Q1-E1-C6
gagacctcaggtcaggcggggctacccgctgagtttaagcatatcaataagcggag

SEQ ID NO: 6449 - DNA, 390 bp, Glycine max
  Clone ID: LIB3074-025-Q1-E1-D1
gcgcatgcatatgaaataaactgcaaccgtgacaaaagttgcgtagcaatagcatactcttactctgattcgttagtgaagaaaaatggcaacaatcatcgccggcaccccaactacatcaatcactcgcacaggtcatgtgctcaaacgacctgttggggcctcatcctctaccgttcttggattgccagcaatggccaaggcggggagagtgaggtgctccatggaggaaaagccttcaagcagctcaaacctagggatgggggcatccttgttagcagctgcagctgccgcaaccatgtcaagcccagcagccatggctttggttgatgagagactcagcactgaaagaactgggcttccctttgggcttagcaacaaccttcctgg

SEQ ID NO: 6450 - DNA, 136 bp, Glycine max
  Clone ID: LIB3074-025-Q1-E1-D10
attgcacgacaaccggaggcagaaggaaaaatacgaggtactttattgcttagtttggcttttatggaagctttaacaatttatggactggttgtagcattagcacttttatttgctaatccttttgtttaatcct

SEQ ID NO: 6451 - DNA, 247 bp, Glycine max
  Clone ID: LIB3074-025-Q1-E1-D11
agagcgaaagagatgtcgttggtttcaagcatgttcgggtgtggagtggtgatggcggcgtcgcaagcaatgggaattggaaggagaagcgatggtggattgacgatagtgtgttcgtctaggccgcagaagaaagcgacggcgcatcacatgaagactcggcctcggaagacgcaggcatgggatagaaaccgcaagcccaccgtctacgatccactccctcctcttcctcctgattggaccctcg

SEQ ID NO: 6452 - DNA, 396 bp, Glycine max
  Clone ID: LIB3074-025-Q1-E1-D2
atcagaagtcgattgacatttatgaagagatagctcgccaatccctcaacaataatttgctgaagtatggagttaaaggacaccttcttaatgctggcatctgcaaactctgtaaagaggacgttgttgctataaccaatgcattagaacgatatcaggaactggatccaacattttcaggaacacgtgaatatagattgttggcggacattgctgctgcaattgaagaagaagatgttgcaaagtttactgatgttgtcaaggaatttgatagtatgaaccctccggaatcctggaagaccaaacgtctcctaaaggtgaaggaaaagcttaaagccaaagaactttagcaacatgaggcgagtacttgaattgtacctttaataatcctggtgg

SEQ ID NO: 6453 - DNA, 351 bp, Glycine max
  Clone ID: LIB3074-025-Q1-E1-D3
gactcagctttatccataaagcacaatttttttgcttcaacgggccttaccttacctgaagatggcttcggtgtcctttgccgtgggattattaccttgctcttcttcttcttgctatacccgcgtctcttatggttcagttcgatttcccgtattgaacaacgccaactcactgaaactcagctcctcagctaacatctccagtccaattcttcaccaaaagctttgcactgttccttctccccttgctctaaggcctcgccctctcagcattgtatccgctaagggctacaaaatgaaaacccacaaggcatctgcaaagcggtttaaggtgacggggcgaggcaagat

SEQ ID NO: 6454 - DNA, 190 bp, Glycine max
  Clone ID: LIB3074-025-Q1-E1-D4
ggcacaagtgagtttgttgatcgagataactagaaacagtgtgatgaaaatgaaggtccttgttttcttcgttgctacaattttggtagcatggcaatgccatgcgtacgatatgttcctccccgaattaacaatggccaagggtgcccttatcccgaaggtaaatgttcaaatttgaaggcttcctttg

SEQ ID NO: 6455 - DNA, 383 bp, Glycine max
  Clone ID: LIB3074-025-Q1-E1-D5
gactgctattcctcttaagcttgctactgagtttccacactgcataccttaggtcttccgaattcgaagttaatttgcaagatggctaaggaaaaggctcagatcaacattgtggtggttggtcatgtggaccctgaggaggcaaccaccattaacgagctgaagaagcctgttgtggagaaagaagctccagggcatgccatatgagggcatgcacgtacggcctcggaggggaaccagaaaattatgttaacagaataatctggaaccctaatgtatcagtgtcatcatcagtgtgtactttaagctagctttgctatggttacgttctttgagatgagagtcttgatgaacagtaccagtctgatgtattgctttccttg

SEQ ID NO: 6456 - DNA, 323 bp, Glycine max
  Clone ID: LIB3074-025-Q1-E1-C11
gactcaccacttcaaaacactcataacacaaagcacaaagcaaagctcatccttgagttaaaaaatggcagcagcttcttccatggctctctcatccccatccttggctggcaaggccgtgaagctgggcccatcagccccagaagtgggaagggtgagcatgaggaagaccgtcaccaagcaggtctcctcaggaagcccatggtacggcccagaccgagtcaagtacttgggcccattctctggcgagcccccgtcctacctaaccggtgagttcccaggcgactacggctgggacactgctgggccttccgcagacccag

SEQ ID NO: 6457 - DNA, 350 bp, Glycine max
  Clone ID: LIB3074-025-Q1-E1-D6
ggagtgtgagagaaaccagtgactgacttttcgagaaagaaaaacaaaaatgagtttccgtcattccatcatgaacgctcttcccattctcctcttcttcctcttcgtttctgcattagtttctgcgaagaaaactggtgatgtgacggagctgcaaattggcgtgaagcataaaccagtatcatgtgaagttcaggcacacaaaggtgacagagtcaaagtacactatcggggaaaactcactgatggaactgtttttgattctaagtttggaagaaataatccaattgaagttgagcttggtactggtcaagtgatcaaaggttgggaccagcgattattgggaatgt

SEQ ID NO: 6458 - DNA, 360 bp, Glycine max
  Clone ID: LIB3074-025-Q1-E1-D8
gcacaagtgagtttgttgatcgagataactagaaacagtgtgatgaaaatgaaggtccttgttttcttcgttgctacaattttggtagcatggcaatgccatgcgtacgatatgttccctctccgaatgaacactggctatggtgcccgtactccggaggtgaaatgcgcaagttggaggcttgctgtggaagcacacaacatctttggctttgagaccattcctgaagagtgcgttgaagcagcaaacgaatacatccatggcgaagagtatagatcagactccaaaacagttaaccagcaagcttacttttatgccagagacctcgaagtcgatcccaaggacacatttggtgttcag

SEQ ID NO: 6459 - DNA, 395 bp, Glycine max
  Clone ID: LIB3074-025-Q1-E1-E11
acgacagaaggggatcataacacgtgacacgcgtgcttcttgcgatatcttcactattaaatatctgttcttccaaccataaccacaccacaccgagtcgcagaaaaagaaaaaagcgatcatagtttcacttcggccttatccagtttagggtttcggttctctaccctatctttcacgtatcgaaaccttaaatttacgatcaggtctgagcaatctggttggtagaacctttggtcttagtgagtcaagttttatgtctgaattagacgatcaaattcctactgccttcgatccttttgctgatgcaaatgctgatgactcgggtgctgggtcaaaggagtatgtgcatattcgtgttcagcagcgaaatggtatgaaaagcctgacaaccg

SEQ ID NO: 6460 - DNA, 267 bp, Glycine max
  Clone ID: LIB3074-025-Q1-E1-A1
ggaacttggaggaacttgtgtctgtgtgtccttttttccagagtcatggctatggctttgagtctctcccaattccctgttcgtgggtctgtttctttgcccaaaagaagactacccagaacaagcttttgcattaggggcatgtcagaaacctcttccacttcttctgtgagcacccaacaagaacaaccaacttctgataatgcttcttcagtgacaattgctcctccccctaagttcaagccccctgagcctaaacgcgttgca

SEQ ID NO: 6461 - DNA, 285 bp, Glycine max
  unsure at all n locations
  Clone ID: LIB3074-025-Q1-E1-A11
ggtctcgtggaagtgtaagcaagcaaaaccctagcggcgcctgctttctttgttcgtgttttgcatcaggatggagtctcaggtgaagcacgcacttgttgtcaaagttatgggtcgtactggatccagaggacaagtgacccaggttagagtgaagtttttggatgatcagaaccgtcacatcatgaggaatgtgaaaggacctgtgagagaaggagacattctcaacctactcgagtctgaaagggaagcangaagattgcgctagatggtctcttttttttt

SEQ ID NO: 6462 - DNA, 308 bp, Glycine max
  Clone ID: LIB3074-025-Q1-E1-A2
gactcaccacttcaaaacactcataacacaaagcacaaagcaaagctcatccttgagttaaaaaatggcagcagcttcttccatggctctctcatccccatccttggctggcaaggccgtgaaactgggcccaacaaccccaaaaattggaaaggttaacaataaggaaaacgttaacaagcaaggctcctcaaggaacccaagggaacggccaaaacgagtcaagttccttggcccattctctggcgagcccccgttctagctaaccggtgagttcccaagcgaatacgggtgggacactgctgggc

SEQ ID NO: 6463 - DNA, 358 bp, Glycine max
  Clone ID: LIB3074-025-Q1-E1-A3
ggacaagtgagtttgttgatcgagataactagaaacagtgtgatgaaaatgaaggtccttgttttcttcgttgctacaattttggtagcatggcaatgccatgcgtacgatatgttccctctccgaatgaacactggctatggtgcccgtactccggaggtgaaatgcgcaagttggaggcttgctgtggaagcacacaacatctttggctttgagaccattcctgaagagtgcgttgaagcaacagacgaatacatccatggcgaacaatatggatcagactccaaaacagttaaccaacaagcgtactttgtatccagaaagctcgaagtccatcccaaggagacagttgtgttca

SEQ ID NO: 6464 - DNA, 156 bp, Glycine max
  Clone ID: LIB3074-025-Q1-E1-A4
gattcagattacattgcaaaaatggcatcattcaccatgacagcttccatccttggcagcccagccgtcaccaaccggtcggcagtagcaacgcagaggagatcactcgtagtgaatgctgccaaagctgttgaagcagaaaaggtcagttatgac

SEQ ID NO: 6465 - DNA, 314 bp, Glycine max
  Clone ID: LIB3074-025-Q1-E1-A5
ggttttgattagggtttgtcattagcacttcttcttttcacactgccgctgcaacaatggtttcagagaagaaactttcgaccccaatgagggagataaaagtgcagaagctcgttctcaatatctctgttggcgagagtggagatcgtctcaccagagccgccaaggtgttggaacaacttagtggccaaaccccagtgttttccaaagcaaggtacactgttcgttccgttgggattagaagaaatgagaagattgcatgctatgtcactgtcagaggtgacaatgcaatgcaacttttggagagtggtttg

SEQ ID NO: 6466 - DNA, 237 bp, Glycine max
  Clone ID: LIB3074-025-Q1-E1-A6
gacgtttgtgattgtcgttgcctcactttgctgccgtacctaatcggagagctcccgctgactgcgatcggatttcatggctcctaacaaagacaaggctctcccaccttcatccaggcccgccaagtctggtggtgggaagcacaataagaacgaatggacaagggaaagcaagaggagaaggggaataaccagctgctgttcgatcaggctacctaggacaagctcctctccgag

SEQ ID NO: 6467 - DNA, 369 bp, Glycine max
  Clone ID: LIB3074-025-Q1-E1-A7
ggagtgcagtgatacagataagatcatgtggcttgtgcagctctcaaccccatttctgaacggacatggtcattccaccacccttctctccaagcacagttcggcggtgactcagacccactgggccccaccgagtttcctgcctcaaatcaatgcgatgaagacaatgcatgggagagtggtgtgctccaccagcgacaagacggtggcagtggaggtggtgcggctggcccctcacccatagtacacgatgcgcgtgatgaagaagtagaagtacaggcccactaccccgatgaacgattcaacgtcggcgacatcgtccacctccagaagaccattcccatcagcatgaccaaaggctttctcgca

SEQ ID NO: 6468 - DNA, 219 bp, Glycine max
  Clone ID: LIB3074-025-Q1-E1-A9
gattatatttgagttcaaacaaatcaaagccatggccacctccaacttctctattgttctctccgtcgccctaaccttctttttggggccacttaacaagggaaaatccaacggaaccgtttcctttaacctcaaaaagtttaaaccaattcaaaccaacctttagctccaaaaagattctagtaattcaacctctgaagtgttacaactcaacaaagt

SEQ ID NO: 6469 - DNA, 393 bp, Glycine max
  Clone ID: LIB3074-025-Q1-E1-B1
gggatttccaaagtttttaatagagggtaagtctcaaaaaatcgaagaattacagacgaatatgcaaaaaaaactgaattgtgtgaatcgaaaactaaacattgctattgtaaaaagttgcaaatgcttataaacaccctaatattattgcagaatttatagctggacaattaaagaatagagtttcgtttcgtaaagcaatgaaaaaagctattgaattaactgaacaggcgggtacaaaaggagttcaagtacaaattgcgggacgtatcgacggaaaagaaattgcacgtgttgaatggatcagagaaggtagagttcctctacaaaccattcgagcgaaaatcgattattgttgctatacagttcgaactagttatggggttttgggga

SEQ ID NO: 6470 - DNA, 241 bp, Glycine max
  Clone ID: LIB3074-025-Q1-E1-B11
gatagaagaagcagaaagagaagcattagcaaaagcaagaagaactagtctaagcagaaatggcctcttcagtgatggcatctgtggccctcaaacctgcccctttcactgttgagaagtcctcagttagaggccttccctccctctcaaggaattctccttcattcaaatttgtggccagtggtggcaagaagatcaagactgacaagccttatggaattaatggtggcatggctttgag

SEQ ID NO: 6471 - DNA, 103 bp, Glycine max
  Clone ID: LIB3074-025-Q1-E1-B2
tggagtccgtggctctcctagggttccctcatttgggatcctggggaaggggatcagcctggcccttgcgaacagcttgatgcactacctcccttcaaccctt

SEQ ID NO: 6472 - DNA, 217 bp, Glycine max
  Clone ID: LIB3074-024-Q1-E1-H9
gattattatttgatacgaaatacaaagctcttcaaaacccaaacaacaaccgtactgcacaactccaccactgtgcaatggccgacgaggaacctgttgatcagaagagatatcttgaagagtcttgcaaaccaaaatgtgtataaccattactagaataacaggcgtgcattaaaaggatacatggtgatgaacctgggcaaaaacactgcactgg

SEQ ID NO: 6473 - DNA, 335 bp, Glycine max
  Clone ID: LIB3074-025-Q1-E1-B3
ggcccgaactccttcgacgaccgtcttccccaatcgcctgcgtctctctctgaattgacaagcttaaagacaaagtcttaaatggctggtccaaggattgcccatgctaccttgaaaggtccgagtgtggttaaggagataataattggaataacacttggcttagctgctggtagcgtgtggaagatgcaccactggaatgaacagaggaaaaccaggaccttctacgatttactggaaaagggtgagatcagtgttgttgcagaggaacagtgaaaatgttcttgttttgttgcctatgctctccatttagaggctttttttcccatgttata

SEQ ID NO: 6474 - DNA, 179 bp, Glycine max
  Clone ID: LIB3074-025-Q1-E1-B4
gacagcacaacagagaaagacaagagtaagagtatgggaggctcatggtcatggcagctcacatgtgccctcttgctactcttctccgccgtagtcaccgccactgaccacattgtgggtgcgaatcctggctgggaacctgggtttaactacaatcctttgggcaacaaccaaaactt

SEQ ID NO: 6475 - DNA, 324 bp, Glycine max
  Clone ID: LIB3074-025-Q1-E1-B6
gaagtatataacttcttctacgtgtccggaaatcgttcctatcatcacttctcaaatctcgaaccctctcgttcgtgccgatcactaggtcacacttcatcaatggcgggtagaggcaaaaccctaggatccagcgccgctaagaaggccacctcaaggagcagcaaagccggcctccaaattccccgtcggtcgtatcgccaggttcctcaaggccggaaagtacgccgagcgcgtcggcgccggagcccccgtctacctcgccgccgttctcgaatatctcgctgctgagggtttgggattggctgggaacgctgcgagaga

SEQ ID NO: 6476 - DNA, 370 bp, Glycine max
  Clone ID: LIB3074-025-Q1-E1-B7
gtccacggatccatacagatgtcaaaagctacaggaagggaaggtgcacgaggttgttgtgagctaggaagctagtttatcgtgaggagaatatgaacttgtttgttttctttgttgctgcagtagttttggtagcatggccatgccatggcgcaggctaccagaggttccctctccgaatgaaaactggctatggtgagcgttcttcagaagtaaaatgcgcaagttttacgcttgctgtggaagcacacaacatccgagcctttaaaaccattcctgaagaatgcgtttaaccaacaaatgactacattagtggggaacagtttagatcagactctaaaacagttaatcaacgggctttcttttatgc

SEQ ID NO: 6477 - DNA, 268 bp, Glycine max
  Clone ID: LIB3074-025-Q1-E1-B9
gacactattttataacgcacatagtttcttctgataataatttttctgtcactacccactcctttctctgtctccatcgtttcgcattgcacaagcactctctctttcccttaccctttttcaggtttcaacgctccaactatccatggcaaaccgctggctcagacccgaggtgtatccactgttcgctgcggttggtgctgctgttgggatctgtggattccaactggttcgtaatatctgcatcaaccctgaagtcagggtgaac

SEQ ID NO: 6478 - DNA, 405 bp, Glycine max
  Clone ID: LIB3074-025-Q1-E1-C1
gaaggtgcaagagtttgttgtgagctataagctagtttatcgtgaggagaatatgaagttgtttgttttctttgttgctgcagtagttttggtagcatggccatgccatggcgcaggctaccaaaggttccctctccgaatgaaaactggctatggtgagcgttcttcggaggtaaaatgcgcaagttttaggcttgctgtggaagcacacaacatccgagcctttaaaaccattcctgaagagtgcgttgaaccaacaaaggactacattaatggcgaacaatttagatcagactctaaaacagttaaccaacaagctttcttttatgctagtgaacgccaagtccatcacaacgacatatttagagtcggcatagattacaccgtactctctaatatcccata

SEQ ID NO: 6479 - DNA, 314 bp, Glycine max
  Clone ID: LIB3074-024-Q1-E1-G11
gacacttcgctagatccagccccatcatggcttcagagaagcaagcggctcttgccgtcactccctctgatgctgatgctcctaccatatttgacaagatcatcaataaggagattccttctactgtggtttatgaggatgacaaggtgcttgccttcagggacataactcctcaagctcctacacatattcttatcattcctaaattcaaagacgggttaagtggtctatccaaggctgaggagaggcactttgagattcttggccgccttctgtacactgccaagctggttgcgaagcaagaaggactccac

SEQ ID NO: 6480 - DNA, 317 bp, Glycine max
  Clone ID: LIB3074-024-Q1-E1-G12
gaacacagaacaaaaacaaagaaaaaaaaaacccttagccaacacaaccatcatggccacctctgctattcagcaatcagcattcactggtcaaactgctctgaagcagctcaatgagttcgtccgcaagaccggtggcgccggcaaaggtcgcactaacatgcgccgcaccgtcaagagtgctcctcagagcatttggtatggccctgaccgtcccaagtacttgggtccattctcggagcagattccatcatacctgaccggagaattccctggtgactacggatgggacactgctggattatcagctgacccgg

SEQ ID NO: 6481 - DNA, 252 bp, Glycine max
  Clone ID: LIB3074-024-Q1-E1-G2
agaagcaaacttaaagaaggctggctaccacacatgggaaaaattaattctcaaggatccacaagatccttccactccaaatgcagtttcagggagaacagcagcgagagagaaactgataaggcagggatacaacattgctgggatcattccagaccaatggagcgatctccgcggaggccacataggcgaaagcaagacctttaatcttcctaatcgcctgcacgacactcagtacttccttcacctccc

SEQ ID NO: 6482 - DNA, 329 bp, Glycine max
  Clone ID: LIB3074-024-Q1-E1-G3
gggatttccaaagtttttaatagagggtaagtctcaaaaaatcgaagaattacagacgaatatgcaaaaaaaactgaattgtgtgaatcgaaaactaaacattgctattgtaaaagttgcaaatgcttataaacaccctaatattattgcagaatttatagctggacaattaaagaatagagtttcgtttcgtaaagcaatgaaaaaagctattgaattaactgaacaggcgggtacaaaaggagttcaagtacaaattgcaggacgtatcgacggaaaagaaattgcacgtgttgaatggatcagagaaagtagagttcctctacaaa

SEQ ID NO: 6483 - DNA, 372 bp, Glycine max
  Clone ID: LIB3074-024-Q1-E1-G4
gacaccaacaccaaaacaaacccactaagatggtttcctttgtatccttcctagtgctgcttcttgcagcccttatcctcatgcctcaagggcttgctacttactacaaaccaattaagaagccaccagtgtacaagcctccagtgtacaagccaccagtgtacaaaccaccggtttataagccaaaaccaccggtttacaagccgaaaccaccggtttacaagccaccatataagaagccaccatacaagaaaccaccttatggaaagtaccctccagtagaggacaacacccatgcctaaagcaagcaatgaggtctattatctacttaataaataagaagaactgctttgtgttttccagcaatgtgat

SEQ ID NO: 6484 - DNA, 373 bp, Glycine max
  Clone ID: LIB3074-024-Q1-E1-G6
ggatagagataagaaaatgtggcttgtgcagctctcaaccccatttctgaacggacatggtcattccaccacccttctctccaagcacagttcggcggtgactcagacccactgggccccaccgagtttcctgcctcaaatcaatgcgatgaagacaatgcaggggagagtggtgtgctccaccagcgacaagacggtggcagtggaggtggtgcggctggcccctcacccaaagtacaggaggcgcgtgaggaagaagaagaagtaccaggcccacgaccccgataaccaattcaaagtcggcgacatcgtccagctccagaagaccaggcccatcagcaagaccaaggcctttctcgcactccccgttccc

SEQ ID NO: 6485 - DNA, 240 bp, Glycine max
  Clone ID: LIB3074-024-Q1-E1-G7
ggtgtttttccttctctctctctctttctctttctcactctcctctgatatttctatattttggtgctctgtgtctctacgatctggatccaacggtccaaaatgttcggggcttgtgctgcttgttttcccaggttttagagctccaaaccttcagatccacctcattcgtctccagatcttccttccttgataacgttttcgggttcgagaaggcacttgtttgtttgtcgtacgaaa

SEQ ID NO: 6486 - DNA, 229 bp, Glycine max
  Clone ID: LIB3074-024-Q1-E1-G8
gaaggtgcaagagtttgttgtgagctataagctagtttatcgtgaggagaatatgaagttgtttgttttctttgttgctgcagtagttttggtagcatggccatgccatggcgcaggctaccaaaggttccctctccgaatgaaaactggctatggtgagcgttcttcggaggtaaaatgcgcaagttttaggcttgctgtggaagcacacaacatccgagcctttaaa

SEQ ID NO: 6487 - DNA, 248 bp, Glycine max
  Clone ID: LIB3074-024-Q1-E1-G9
ggcaagtgtgagtgatatttgagcttaaaccctagccgctcttctcttcattcttcactttggaaacaatcataatggcgttctgtaataaggttggaaatgtcttgaggcagggtgctgctcgcagcacacatgcccctgttgcgtccatgcttaattacatccgctgcatgtcttcaagcaagcttttcattggaggcctttcatatggagttgatgaccagtctcttaaggatgcattttctggc

SEQ ID NO: 6488 - DNA, 286 bp, Glycine max
  Clone ID: LIB3074-024-Q1-E1-H1
gggcgtgcagttcaaagcgaaaagagattcgaatccaaggaagggaaaggaaagtaagagaagagaagaatggccgaagagggacaagtgattggtgtccacagcgtggaggagtgggaggaacatctcaagaagggacaagagtccaagaaattgattgtggtggattttactgcttcttggtgcggcccatgccgtttcattgccccaattcttgcggatatggctaaaaagttgccgaatgtcaccttcctcaaggtggatgtggatgaattggcgactgttt

SEQ ID NO: 6489 - DNA, 351 bp, Glycine max
  Clone ID: LIB3074-024-Q1-E1-H10
gatgcatagcaattcccaattcctaattgtttaaacctaattctcatttcttcatcgttcgattcttctcctcctaaagatgcagatcttcgtgaaaactttgaccggtaagaccatcacccttgaggtggagtcctccgacaccatcgataacgtgaaagctaagattcaaggcaaggaagggatcccacctgaccagcagagacttatctttgcgggtaaacagcttgaggatggtcgaacccttgccgactacaacatccaaaaggaatccactctccacctcgtgcttcgcctcaggggtggcatgcaaatctttgtcaagactttgactggcaagaccatcaacct

SEQ ID NO: 6490 - DNA, 331 bp, Glycine max
  Clone ID: LIB3074-024-Q1-E1-H11
gaggccttgcaaagtaagttcatttgaccctcacaaaccttgcatccatccacacatggctggcatgaactctagcgtattggcctgtagctatgccatatctggtgcagcatgctccgagctcaatgggaaggtcacttccgtggcctctgttgcatcctctggctacaagttgccattgatcaaatgtgaggccagagttcccaaagccaaagaatctgaaggaaggagaggtgcccttgttctcttggcagctacccttttcatctctgcagcctccaattcttctgccaatgctgggatcattgatgattaccttgagaggagcaag

SEQ ID NO: 6491 - DNA, 361 bp, Glycine max
  unsure at all n locations
  Clone ID: LIB3074-024-Q1-E1-H12
gaccagttagttgctttgtttcactcacactgtgtttggagcagaatcagatcgtgtgttccgtacgttcgttcgttcatttccagtgtcaaacatggcgtctcagatgagcaagaagagaaagtttgttgcggacggagtgttcttcgccgaactgaacgaggttctgacacgtgaattggcggaggacggttactccggcgtggaagttagggttacgccgatgcgcaccgagatcatcatcagagccaccagaacccaggctgttctaggtgagaagggaaggagaattanggaacttacctcagtggtgcagaagaggttcaaattccccgaaaacagtgtcgagctttatgctgag

SEQ ID NO: 6492 - DNA, 275 bp, Glycine max
  Clone ID: LIB3074-024-Q1-E1-H2
gatcgcagcacgctctatcatctctctcagtaatggcaaccacattcacgtttttccgaccaaccatgatccgggcctccgctggttctccgggcaggcccgacccgagcaacaggaagcccgtttcctccaattggtgggctccgctgttcggatggcccgcggatccggactacatcggcccatcgcagaagacgagttatcaatcggatccggagcgggaagtgggcccgggccggcccagatccaaattcgcagcggggtgcttcacggag

SEQ ID NO: 6493 - DNA, 247 bp, Glycine max
  Clone ID: LIB3074-024-Q1-E1-H3
gacgccttgcaaaataggttcatttgactctcacattccttgcagcaaaccaaacatggattccaatgaacttaacgtaatgggctgtcactatgccatatctggtgcagcatgctccgagctcactggcaaggtgatttccgtggactttgttgtaacctctaggtataagttgctcatatgatgatatgtgaagtcagatttctgaccgtcattttatctcatcgaaagagaggtgcccttgttc

SEQ ID NO: 6494 - DNA, 410 bp, Glycine max
  Clone ID: LIB3074-024-Q1-E1-H4
gctttttggaaattccttttcctcgtgaacgatcggctcactctcgctctccctagatcgcgcactttcgctctccctcgtcgcgtgctcgttctcgctatcgtgctctcgcgctctctcggatctaactctgtgtagtctgtaatcatgtcaggcaagtatatcgtttctgctattcttggatcatttggagttgcatgggtttgtgattattatgtttcagaaaaaaagctatttggaggtactacccctggcactattacaaacaatgagtgggcagaagagaccgacaaaaaattacaggcatggcctcgtactgccggtccaccagtggtcatgaatcccataagtcgccaaaatttcattgtgaagtctcgccctgagtaatattttttgttgattgaatttga

SEQ ID NO: 6495 - DNA, 394 bp, Glycine max
  Clone ID: LIB3074-024-Q1-E1-H5
ggagaggcatgaagggttatgagccctgttcaagctcttcatgtgcagcttgcaagttattgaagagaagatgcataccaaattgtatttttgcaccttactttaggtctgatgagtgcaagaagtttgcaaaggtgcacaaggtgtttggagcaagcaatgtgagcaagattctgattgaagtgccggaagagcagagagaggacacagtgaattctcttgcttatgaggctgaggcaaggctgagagacccggtttatggatgcattggtgccatagctctgttgcaaaggaagatggtggagcttcaacatgatctggtcatcgcaaaagatcgtctcgcgcgttgtcacgctgctgctactgctgctgccacaacaccaacactactagt

SEQ ID NO: 6496 - DNA, 373 bp, Glycine max
  Clone ID: LIB3074-024-Q1-E1-H6
gattgtagaactgaacaagggtttctctttctctttctctgtctgcttcttcactttctctcgtttcaatcgaaaaaaatcatgggcagaaaattcttcgtcggtggcaactggaaatgcaatgggaccactgaggaggtgaagaagattgttactactttaaatgaagctaaagtccctggagaagatgttgtagaagttgttgtgagccctccttttgtgttccttccttttgtaaaaagtttgctgcgccctgatttccatgtctcggcccaaaattgttgggttcgcaaaggtggtgcttatactggagaggttagtgctgaaatgcttgttaatttgggaattccttgggttattattggtcactctg

SEQ ID NO: 6497 - DNA, 100 bp, Glycine max
  Clone ID: LIB3074-024-Q1-E1-H7
atacaatgggacacattgctcctcacatcactatttgttcaacgataatatctgattttcgcggctgttaacggtcaacggagattctatctgggggggt

SEQ ID NO: 6498 - DNA, 296 bp, Glycine max
  Clone ID: LIB3074-024-Q1-E1-H8
gaacacagaacaaaaacaaagaaaaaaaaacccttagccaacacaaccatcatggccacctctgctattcagcaatcagcattcactggtcaaactgctctgaagcagctcaatgagttcgcccgcaagaccggtggcgccggcaaaggtcgcactaacatgcgccgcaccgtcaagagtgctcctcagagcatttggtatggccctgaccgtcccaagtacttgggtccattctcggagcagattccatcatacctgaccggagaattccctggtgactacggatgggacactgc

SEQ ID NO: 6499 - DNA, 339 bp, Glycine max
  unsure at all n locations
  Clone ID: LIB3074-024-Q1-E1-E2
gattacctataatttcagagctagctagttcacagcttcagttcgtttttgttgatcctgtgaacttatggctgacggggtggttctgttggatacatgggccagcatgtttgggatgagggttaggattgcattanctgaaaagggtgttgagtatgaatacaaggaagaaaatctcaggaacaagagtcctttgcttttgcaaatgaacccaattcacaagaaaattccagttctgatccataatggcaaaccaatttgtgaatctgcaattatagtgcagtacattgatgaggtctggaatgataaagctccaatcttgccctcctgaccttatga

SEQ ID NO: 6500 - DNA, 169 bp, Glycine max
  Clone ID: LIB3074-024-Q1-E1-E3
cgggaagttttcgcacactacacacagacaaaaaagagagaagatgacgcggggaaagcataatatcgaaccccacaagcggggcgcagataggaatcagaacggaaatggctctgagctccacgctagagccgttggcctcaaactcatctgccccatctgcaaggcg

SEQ ID NO: 6501 - DNA, 358 bp, Glycine max
  Clone ID: LIB3074-024-Q1-E1-E4
gacaagtgagtttgttgatcgagataactagaaacagtgtgatgaaaatgaaggtccttgttttcttcgttgctacaattttggtagcatggcaatgccatgcgtacgatatgttccctctccgaatgaacactggctatggtgcccgtactccggaggtgaaatgcgcaagttggaggcttgctgtggaagcacacaacatctttggctttgagaccattcctgaagagtgcgttgaagcaacaaaggaatacatccatggcgaacaatatagatcagactccaaaacagttaaccaacaagcttaactttatgccagagacctcgaagtccaacccaaggacacatttgtgttcag

SEQ ID NO: 6502 - DNA, 401 bp, Glycine max
  Clone ID: LIB3074-024-Q1-E1-E5
gaccctagctagggtttctgagtttatgtggttgcgcctctgcctgtaagagtgaaaaaaccttcgcgtttccttctctcaagtctcaagagatttcatcatggctccaaagaaggacaaggctccaccaccttcctccaagcccgccaaatctggcggtggcaagcagaagaagaagaagtggagcaagggaaagcaaaaggagaaggtgaataacatggtgctgtttgatcagggcacctatgataagctcctttctgaagctcccaaattcaagctcatcactccttccattctttctgatcgtctgaggattaatggatcacttgcaaggaagggctataaacaattgattggcaggggttcaatcagggaggtgtccggccaatgcagccagcaaa

SEQ ID NO: 6503 - DNA, 369 bp, Glycine max
  Clone ID: LIB3074-024-Q1-E1-E6
gagagcgaaacggcagcacgcgcaaaaatggtgaagtttctgaaaccaaacaaagccgtcatcgtccttcagggacgctacgccggcaaaaaagccgtgatagtgcgaaccttcgatgaaggcacgcgcgagcgcccctacgggcactacttggtggcagggataaagaagtaccctgcgaaggtgatcaagaaggattcggccaagaagacggccaagaagtcgcgtgtgaaggcgttcgtgaagctcgtgaactaccagcacctcatgcccacgcgctacacactcgatgtcgatttgaaggacgcggttacccccgacgtgctccaagcaaggataaaaacgttactgctctcaaggagaccaaga

SEQ ID NO: 6504 - DNA, 318 bp, Glycine max
  Clone ID: LIB3074-024-Q1-E1-E8
gagcgccaatgtttttttcagaggagtttcatcttgtaatcaaaagagtttatcttatagtaagaaatcgatgtcttactccattttaaggaacaaaacaagagaacaatagcctgacaaagggtttagccataaaatcgaatccatcattgatttgagatattgataaggtgaatactcatttctcgtcaatgctaggcataatgcgggtatagggacctaaaaaagattatcttttcttcctatcttatgaactttaaggtgtatgaagtgtcatttcctatcctagattttaattttagtaggtagataaagagt

SEQ ID NO: 6505 - DNA, 304 bp, Glycine max
  unsure at all n locations
  Clone ID: LIB3074-024-Q1-E1-E9
ggagcgtagttgaggttttgcttttgccacttcgaaaccaaattttcttcgttcgtccttctgtgatctcttcttccaccatgagcaggtcagggcaaccaccggatttgaagaagtacatggataagaagcttcagattaagctgaacgcaaatcgcatggttgttggtactctccgtggctttgaccagtttatgaatttagttgttgacaacactgtggaagtgaatggcaatgagaaaaatgacatanggatggtggtaattagaggaaatagtgtggtcactgttgaggcgcttgaacc

SEQ ID NO: 6506 - DNA, 303 bp, Glycine max
  Clone ID: LIB3074-024-Q1-E1-F1
aggtacggctgcgagaaaacaaaaaaaggggcacaagtgagtttgttgatcgagataactagaaacagtgtgatgaaaatgaaggtccttgttttcttcgttgctacaattttggtagcatggcaatgccatgcgtacgatatgttccctctccgaatgaacactggctatggtgcccgtactccggaggtgaaatgcgcaagttggaggcttgctgtggaagcacaccacatctttggctttgagaccattcctgaagagtgcgttgaagcaacaaaggaatacatccatggcgaacaatat

SEQ ID NO: 6507 - DNA, 411 bp, Glycine max
  Clone ID: LIB3074-024-Q1-E1-F10
gagcgccaatgtttttttcagaggagtttcatcttgtaatcaaaagagtttatcttatagtaagaaatcgatgtcttactccattttaaggaacaaaacaagagaacaatagcctgacaaagggtttagccataaaatcgaatccatcattgatttgagatattgataaggtgaatactcatttctcgtcaatgctaggcataatgcgggtatagggacctaaaaaagattatcttttcttcctatcttatgaactttaaggtgtatgaagtgtcatttcctatcttagattttaattttagtaggtagataaagagtccatttaacttaagttgatctaggccaaaagcagacctacgtcaagataatccttctttgaaacactttggtaatgctcttagattgttatct

SEQ ID NO: 6508 - DNA, 339 bp, Glycine max
  Clone ID: LIB3074-024-Q1-E1-F11
ggcacaagtgagtttgttgatcgagataactagaaacagtgtgatgaaaatgaaggtccttgttttcttcgttgctacaattttggtagcatggcaatgccatgcgtacgatatgttccctctccgaatgaacactggctatggtgcccgtactccggaggtgaaatgcgcaagttggaggcttgctgtggaagcacacaacatctttggctttgagaccattcctgaagagtgcgttgaagcaacaaaggaatacatccatggcgaacaatatagatcagactccaaaacagttaaccaacaagcttacttttatgccagagacctcgaagtccatcc

SEQ ID NO: 6509 - DNA, 301 bp, Glycine max
  Clone ID: LIB3074-024-Q1-E1-F12
gagcgccaatgtttttttcagaggagtttcatcttgtaatcaaaagagtttatcttatagtaagaaatcgatgtcttactccattttaaggaacaaaacaagagaacaatagcctgacaaagggtttagccataaaatcgaatccatcattgatttgagatattgataaggtgaatactcatttctcgtcaatgctaggcataatgcgggtatagggacctaaaaaagattatcttttcttcctatcttatgaactttaaggtgtatgaagtgtcatttcctatcttagattttaatttta

SEQ ID NO: 6510 - DNA, 146 bp, Glycine max
  Clone ID: LIB3074-024-Q1-E1-F3
caacatacgtcatcgaaaggatctcgatttaccaccaatgcacgaaagccgggatctttcacaaaatggattcctaggcggggggtgcataaccgcatggatcatctcacacgagcccgtcactttgggatccaattcggttcctt

SEQ ID NO: 6511 - DNA, 429 bp, Glycine max
  Clone ID: LIB3074-024-Q1-E1-F4
gagatgcattggggcatgcttttaatttcctagatctcccaaacaaattgtagcataagtcccatggccaaagagactagtgttgtttatctatatcccagcaaatcacaagtttggggtgagaattttgatcataaaaaacttgtaataacaacactagctgctaatggaaagaaggaggagagtaatggagcacctaatgacacatatcctgcgtttcccgggtggtatgctgatgtttcctggccaggagaagcacacacatataaaatagaaaagattctattccacgggaaatcagaattccaagagcttcttgtatttgagtcttctagacaaggcaaggttgcaattcttgatgggcatatccagctgacagaaaacgatgaatttgcttaccaagagatgctcactcagcttgcactctgt

SEQ ID NO: 6512 - DNA, 379 bp, Glycine max
  Clone ID: LIB3074-024-Q1-E1-F5
gatctggcagcagaagaacaagtagttgagaactaagaaggagaagcaaatggcttcctcaatgatctcttccccagctgttaccactgtcaaccgtgccggtgccggcatggttgctccattcactggcctcaagtccatggccggcttccccaccaggaagaccaacaatgacattacctccattgctagcaacggtggaagagtgcaatgcatgcaggtgtggccaccagttggcaagaagaagtttgagactctttcctacctgccagaccttgatgatgcacaattggcaaaggaagtagaataccttcttaggaagggatggattccttgcttggaattcgagttggagcacggtttcgtgtaccgtgagcac

SEQ ID NO: 6513 - DNA, 450 bp, Glycine max
  Clone ID: LIB3074-024-Q1-E1-F6
gggtccagccacgcgtccgaagacgacagaagggggcacaagtgagtttgttgatcgagataactagaaacagtgtgatgaaaatgaaggtccttgttttcttcgttgctacaattttggcagcatggcaatgccatgcgtacgatatgttccctctccgaatgaacactggctatggtgcccgtactccggaggtgaaatgcgcaagttggaggcttgctgtggaagcacacaacatctttggctttgagaccattcctgaagagtgcgttgaagcaacaaaggaatacatccatggcgaacaatatagatcagactccaaaacagttaaccaacaagcttacttttatgccagagacctcgaagtccatcccaaggacacatttgtgttcagtatagatggcaccgtactctctaatattccatactacaaaaaacatggatatgggg

SEQ ID NO: 6514 - DNA, 282 bp, Glycine max
  Clone ID: LIB3074-024-Q1-E1-F7
gaggcgcaccgacgaggaggtgatgtcaatgttcgaggagtggctggtgaaacacgacaaggtgtacaacgcgctcggtgagaaggagaagaggtttcaaatcttcaagcacaatctgcgcattatcgatgaacgaaactctctgaaccgaacctacaagttgggactcaacgtgttcgctgatctcaccaatgcggagtacagagccatgtacctgcgaaccttggacgagggtccgaggttgggcttggatacgccgccaagaaaccactacgtgccacg

SEQ ID NO: 6515 - DNA, 290 bp, Glycine max
  Clone ID: LIB3074-024-Q1-E1-F8
ggcagcacgctctatcatctctctcagtaatggcaaccacattcacgtttttccgaccaaccatgatccgggcctccgctggttctccgggcaggcccgacccgagcaacaggaagcccgtttcctccaattggtgggctccgctgttcggatggcccgcggatccggactacatcggcccatcgcagaagacgagttatcaatcggatccggagcgggaagtgggcccgggccggcccagatccaaattcgcagcggggtgcttcacggagaaaaaggcaaaagagctg

SEQ ID NO: 6516 - DNA, 258 bp, Glycine max
  Clone ID: LIB3074-024-Q1-E1-E12
ggcacaagtgagtttgttgatcgaaataactaaaaaaagtgtgatgaaaatgaaggtccttgttttcttcgttgcaacaattttggtagcatggcaatgccatgcgtacaaaatgttccctccccgaatgaaaactggctatggggcccgtaccccggaggtgaaatgcccaatttggaggcttgctgtggaaaaaaaaaaaatctttggctttgagaacattcctgaaaaatgcgttgaagcaacaaaggaataaat

SEQ ID NO: 6517 - DNA, 236 bp, Glycine max
  Clone ID: LIB3074-024-Q1-E1-F9
gactcatctcttacaacgaaaccctctccatcttgttctatctgtgacgagcaccatggcctcaagagcagtgttattgttggctatgtgtgtgcttccggcgatggttgtggccattcgcccagcaaagaaccctttttgcgtgaagggtcgtgcctactgtgacccttgccgtgctggttttgagacctcagctaccacctacattgctggtgctgagattatgttgcaatgca

SEQ ID NO: 6518 - DNA, 328 bp, Glycine max
  Clone ID: LIB3074-024-Q1-E1-G1
gagagcgaaagagatgtcgttggtttcaagcatgttcgggtgtggagtggtgatggcggcgtcgcaagcaatgggaattggaaggagaggcgatggtggattgacgatagtgtgttcgtctaggccgcagaagaaagcgacggcgcatcacatgaagactcggcctcggaagacgcaggcatgggatagaaaccgcaagcccaccatctacgatccactccctcctcttcctcctgattggaccctcgttattcccgctgacgcttcctctgctcccgttacgcctccgcctccaactcgctctgcctagtcactctctcggtactct

SEQ ID NO: 6519 - DNA, 383 bp, Glycine max
  Clone ID: LIB3074-024-Q1-E1-C2
gcactacctcaagcataacttgcatagactattgattaagaaagctattgtcattgatttgctagctccaacaatgggttctagcagattatcattcattttagtacttgtgcttgtaaccttttcatccatgatcattgactcaagggttgcagaggcacgtaccctgccaaaatcagccttattgccttccaaagttgatatacctactgttgttcctcttccactggtggcaccactgccaaatttgcctgttactctccctccagtgcctgaactacctgcagtacctaaagtaccaattcctgaagtaatagttaataacgccaaaataatcccttgagtacctatgatctatccagtcactactacttattttgcca

SEQ ID NO: 6520 - DNA, 353 bp, Glycine max
  Clone ID: LIB3074-024-Q1-E1-C3
gacacacgcatagagagagagagagagagaagcagaggaagaaggagaagaaggagatcttgagagatcaggtcgcaactcgtcatggggagagaagttacaggaatgcaagttgtggacaagaagccaaatggtgttataccagcttcaaatggtagttctaatgataaagtatgtttttctcctaaaatggaagcagctaaggttcaggcaaaggatcacaaggtaaatgaatgtaccaaaactaactcttttgaggagaaaagccatgagaagatggatggtttgagtgccaaaacaacaaactgtaatactgacttgcctgaggaggagattgagatttctgaagtgca

SEQ ID NO: 6521 - DNA, 225 bp, Glycine max
  Clone ID: LIB3074-024-Q1-E1-C4
ggttctagtgtgtgattgtttgttgttgcaactcgttcttcttcttttgttgttctgtgtttgtgtttgttttttctctcacctaaaaatgtcgtgctgcggtggtaactgtggttgcggaagctcctgcaagtgcggcaactgctgcggacgctgcataatgtatccagacatgagctacactgagtcaaccaccaccgagacctttgtcatgtgagtggcacc

SEQ ID NO: 6522 - DNA, 308 bp, Glycine max
  Clone ID: LIB3074-024-Q1-E1-C9
gattgagtacaacttcacattttagaagaataccccctcttttgctgcatcagaggagttgtaaattaagagcatggctgcacaagctcttgtatcatcatcttctcttaccttctcagcggaggctgcaagacaaagtcttggaccaagatcactccaatctccatttggcttctccagaaaagcctcctttcttgttaaggcagctgctaccccccctgtcaagacaagcctttgtggtttgcatcaaagcaaagtctttcttacttggatggcagccttccgggtgactatggatttgaccctct

SEQ ID NO: 6523 - DNA, 369 bp, Glycine max
  Clone ID: LIB3074-024-Q1-E1-D10
ggttctagtgtgtgattgtttgttgttgtaactcgttcttcttcttttgttgttctgtgtttgtgtttgttttttctctcacctgaaaatgtcttgctgcggtggtaactgtggttgcggaagctcctgcaagtgcggcaacggctgcggaggctgcaagatgtacccagacttgagctacactgagtcaaccaccaccgagaccttggtcatgggagtggcacctgttaaggctcaatttgagggtgctgaaatgggtgtgcccgctgagaacgatggctgcaaatgtggactaaactgctcctgcaacccctgcacttgcaagtgaggtgttgggagagcaagcttcaagcagagatagcccttaat

SEQ ID NO: 6524 - DNA, 336 bp, Glycine max
  Clone ID: LIB3074-024-Q1-E1-D11
gatctggcagcagaagaacaagtagttgagaactaagaaggagaagcaaatggcttcctcaatgatctcttccccagctgttaccactgtcaaccgtgccggtgccggcatggttgctccattcactggcctcaagtccatggctggcttccccaccagaaagaccaacaatgacattacctccattgctagtaacggtggaagagtgcaatgcatgcaggtgtggccaccagttggcaagaagaagtttgagactctttcctacctgccagaccttgatgatgcacaattggcaaaggaagtagaataccttcttaggaagggatggattccttg

SEQ ID NO: 6525 - DNA, 326 bp, Glycine max
  Clone ID: LIB3074-024-Q1-E1-D12
cagattggcaagaaaaggctggggaggaggttttccaagtgttcgggaatgaaaagccagattatgaaaggattggtcaactgaaaattgtgtcgatgattctacaggagagtctcagattatacccaccagtggttatgttcgctcggtatcttcgtaaagatacaaaacttggagagcttacaattcccgcaggagtggagcttgttgtacctgtgtcaatgctacaccaggataaggagttttggggagatgatgccggggaattcaacccagaaagattctcggaaggagtatcaaaggcaacaaaaggcaagctttcctac

SEQ ID NO: 6526 - DNA, 84 bp, Glycine max
  unsure at all n locations
  Clone ID: LIB3074-024-Q1-E1-D2
gtcccttcggggacatccgataaaattggaacgatacagagaagattagcatggcccctgcgcaaggatgacacgcacaantcg

SEQ ID NO: 6527 - DNA, 343 bp, Glycine max
  Clone ID: LIB3074-024-Q1-E1-D3
gatccttcgtccagctagcaccacattcacctgaggcttccaaagcaatggcttcccttgcggcatccactgctgctgcttcccttggcatgtcagaaatgcttggaaaccccatcaacttcagtggtgccacaaggccagctccatctgcttctagtcctgcctccttcaagactgtggctcttttctccaaaaagaaggctacaccaacacctccaaaaaaagctgctgctgctgctcctgccaatgatgagcttgccaagtggtatggtcctgacagaaggatcttcttgcctgagggtctcttggaccgatccgaaatcccagagtacttgaccggaga

SEQ ID NO: 6528 - DNA, 333 bp, Glycine max
  Clone ID: LIB3074-024-Q1-E1-D5
gatctggcagcagaaaaacaagtagttgagaactaagaagaaggaagtggcttcctcaatgatctcctccccagctgttaccaccgtcaaccgtgccggtgccggcatggttgctccattcaccggcctcaaatccatggctggcttccccacgaggaagaccaacaatgacattacctccattgctagcaacggtggaagagtacaatgcatgcaggtgtggccaccaattggcaagaagaagttcgagactctttcctacttgccagacctcgatgatgcccaattggcaaaggaagtcgaataccttctaaggaaaggatggattccttg

SEQ ID NO: 6529 - DNA, 332 bp, Glycine max
  Clone ID: LIB3074-024-Q1-E1-D6
gggcagcagaagaacaagtagttgagaactaagaaggagaagcaaatggcttcctcaatgatctcttccccagctgttaccactgtcaaccgtgccggtgccggcatggttgctccattcactggcctcaagtccatggctggcttccccaccaggaagaccaacaatgacattacctccattgctagcaacggtggaagagtgcaatgcatgcaggtgtggccaccagttggcaagaagaagtttgagactctttcctacctgccagaccttgatgatgcacaattggcaaaggaagtagaataccttcttaggaagggatggattccttg

SEQ ID NO: 6530 - DNA, 299 bp, Glycine max
  Clone ID: LIB3074-024-Q1-E1-D8
gagatttctgagagaaaggaaagggtgtgagaagagaatggagagtaaagaggaagatgttaacgttggagcaaacaagttctcagaaaggcaaccaattggtacagcagctcagggtggtggtgacaaggactacaaggaggcacccccagctcctttgtttgaacctggtgagctcaaatcatggtccttctacagagctggaattgctgagtttgtggcaactttcttgttcctctacattaccatcttaactgtcatgggtgtcaacaggtcaccctccaagtgtgcctctgttg

SEQ ID NO: 6531 - DNA, 371 bp, Glycine max
  Clone ID: LIB3074-024-Q1-E1-D9
gaaaaacagcagagagaagagaaggtgtagacaaacacaatctctaatggcactcaggatgtgggcttcttccactgccaatgcacttaaagtctcttctacctccagacctcatctctcgcatcctttttctttctccagatgcttgtcttccgtcttggatggacttaagtatgcagattcacacgaatgggtcaagcacgaaggctcagtcgccaccattggtatcactgaccatgcccaggaccatcttggagaggttgtgtatgtggagctgccacaatcaggtggcacagttacccagaagtctggcttcggagccgttgaaagtgttaaagcaacaagtgacataaactctccaatctccgggg

SEQ ID NO: 6532 - DNA, 345 bp, Glycine max
  Clone ID: LIB3074-024-Q1-E1-E1
agaagggggtcgctactaagagttgctgcttcttcagccactccgcacctcgcagcctctgtgccctcaacaaccatggctgaaatcgaaactaccgttccagatcccacccaaatcgacgtcaaactcttcaatcgctggagcttcgaggatgttgaggttaatgatatgtctctggctgattacattggagtgtccccatcaaagcatgctacatatgttcctcacactgctggtaggtactcagtgaagaggttcaagaaagcgcagtgccccattgttgagaggctcaccaactctctgatgatgcacgggaggaacaatggaaagaagctcatggctgtc

SEQ ID NO: 6533 - DNA, 356 bp, Glycine max
  Clone ID: LIB3074-024-Q1-E1-E10
ggaaagtaaagtcgttggtaggatcatcatctctttgagttgccattgaagaagaagctcagatcggaaaaattcacctctccaatcccaatcccatcgttgcaaatgatccgattcattctgttgcagaacaggcagggcaagacccgtcttgccaaatactacgttcctctcgaggactccgagaagcacaaggtcgaatacgaggttcatcggctcgtcgtaaacagagaccctaaatacacaaatttcgtcgagtttcgtacgcacaagataatatacaggcgatatgctgggttatttttctcactctgtgttgatatcactgataatgagttggcgtatttagagtgcat

SEQ ID NO: 6534 - DNA, 340 bp, Glycine max
  Clone ID: LIB3074-024-Q1-E1-E11
ggaacatggctacattctttggttcccctccaattttctccctccccctcactagaactcaccacatttcttcatcatcacaaactcgagcaccaactcctcctccacaatctcagcctccaacttcgtctccacagcagctaagaacaacaaatttgaatgatgaatcaatgcaagtgtgcactgaagctaagcaacagaagcccatcaaaccatccactaaggttgaatccacagattggatagccacttccttgaccagaaggtttgggataggagctggtcttgcatgggctggctttcttgcatttggtgtcatctcagaacaaatcaagactcg

SEQ ID NO: 6535 - DNA, 119 bp, Glycine max
  Clone ID: LIB3074-023-Q1-E1-H10
gttatgagtcctaactatatagctattttccattatatttttgggtagcgataaatgtgtaaaagaaagagtatattgataaagatattttttccaaaatcaaaagagcgattaggtcg

SEQ ID NO: 6536 - DNA, 344 bp, Glycine max
  unsure at all n locations
  Clone ID: LIB3074-023-Q1-E1-H11
ggtgtgagtgaagaagcagagggagtagcggcattaaaaatgcagatcttcgtgaaaactctgacagggaagactataaccctcgaggtcgagagcagcgacaccatcgacaatgtcaaggccaagattcaagacaaggaaggcattcctccggatcagcagcgtttgattttcgccggaaagcagcttgaagatggaaggaccctggccgattacaacatccagaaggaatcaacccttcatctcgtcctcaggcttcgtggtggcatcattgagccttcactcatggctttggctcgcanatacaatcatgacaagatgatttgccgcaagtgctacgcccg

SEQ ID NO: 6537 - DNA, 317 bp, Glycine max
  Clone ID: LIB3074-023-Q1-E1-H12
gactgcactgaacgaaccgtagttgttccgtttcagccatggtggataacaatctcttcgaggatatatttaaggtcgaaaaattaaaccccgatgacaaaaaattattcgataaagtcactcgcattgaagcaagaagtgaaaagtttgacatgtttatgcacctggacattaattccgagatatatccgttaaaggttggtcagaagtttgctcttgtgcatgtttcaacacttaatcctgatggaactccagacactggatattatacccagattagtcgacaatcactggccaacaattttgaatatgtcatg

SEQ ID NO: 6538 - DNA, 225 bp, Glycine max
  Clone ID: LIB3074-024-Q1-E1-A10
ggtgagacgggggtaaggtcgcgttgtgttgcgtcgtgtcgtgcgctgttcctctgtctgtcgtttttgctttcagaccaaaccctagctccgcatcgcaaccatgtcgaccaagcaaggtggaaaagctaagcctttgaagaaacccaagtctgataagaaggattacgacgaggttgacatggctaacattcacaagaaaaaggaagaagagaaggcgctaaa

SEQ ID NO: 6539 - DNA, 287 bp, Glycine max
  Clone ID: LIB3074-024-Q1-E1-A11
gatctggcagcagaagaacaagtagttgagaactaagaaggagaagcaaatggcttcctcaatgatctcttccccagctgttaccactgtcaaccgtgccggtgccggcatggttgctccattcactggcctcaagtccatggctggcttccccaccaggaagaccaacaatgacattacctccattgctagcaacggtggaagagtgcaatgcatgcaggtgtggccaccagttggcaagaagaagtttgagactctttccttactgccagaccttgatgatgcac

SEQ ID NO: 6540 - DNA, 146 bp, Glycine max
  Clone ID: LIB3074-024-Q1-E1-A12
gaaggtgcaagagtttgttgtgagctataagctagtttatcgtgaggagaatatgaagttgtttgttttctttggtgctgcagtagttttggtagcatggccatgccatggcgcaagctaacaaaagttccctctccgaatgaaaa

SEQ ID NO: 6541 - DNA, 378 bp, Glycine max
  Clone ID: LIB3074-024-Q1-E1-A2
gacaactgaacaagataagctatccatagcagccaaagagatgaagagtaccttgttcgccctctttctactttgtgccctcacctcttacctaccttcagccaccgctggtgatgtggtcgacactgatggtaatcctgttgaaaatggaggcacatactttgtgttgccaactataatattaaacggcggtggaatagaatatgccacatttggaaatgaaacttgccctgtcactgttgcgcaatctcgcgatcagttctgcaagggctttccgataaccatttcatccccagcccgaatccgtcacatcagcgaaggccttagtttgaacattgggttcactttcgcatccccgtgttccccgcttctgagtgg

SEQ ID NO: 6542 - DNA, 221 bp, Glycine max
  Clone ID: LIB3074-024-Q1-E1-A3
agggggacaagtgagtttgttgatctaaaaaaccaaaaacagtgtgatgaaaataaaaggccctgttttcctccctgccacaaattttggaacaaagggaaaccacacctaacaaaaatttcccccccccaaaaaaaaaagggatagtggcccctctcccgagggggaaaactccaaatttgggggttttgtggaaaaacacaacaaaatttgggttttga

SEQ ID NO: 6543 - DNA, 290 bp, Glycine max
  Clone ID: LIB3074-024-Q1-E1-A4
ggcagagcgtttttcattgtgcagtattcaatggccaccacagcagctctatccggaaccatggtgagcacctccttcatgaggaagcaacctatgacgaccaagagcctaaagacattccccaacgctctttttggtctgaaaggtggacgaagtggtcgtgtaacttgcatggcctcgtacaaggtgaagctcataaccccagaaggagaagtggagtttgaatgcccagatgatgttttcattgttgacaaggctgaggaagaatgcattaacttccctactcgtgc

SEQ ID NO: 6544 - DNA, 310 bp, Glycine max
  Clone ID: LIB3074-024-Q1-E1-A5
gctgtggaagtaggtcaacatttctattggcaaatagggagtttccaagtacatgcccaagtacttattacttcttgggttgtaattgctctcttattggtttcagccattctaattattcgaaatctgcaaaccattcccgctttcggtcagaatttctttgaatatgttcttgaattcattcgagacgtgagcaaaactcaaattggagaagaatatggtccgtgggttccttttattggaactttgtttctatttatttttgtttctaattggtcggggactcttttaccttgggaaatcatacaat

SEQ ID NO: 6545 - DNA, 135 bp, Glycine max
  Clone ID: LIB3074-024-Q1-E1-A7
aggggcacaagtgagtttgttgatcgagataactagaaacagtgtgatgaaaatgaaggtccttgttttcttcgttgctacaattttggtagcatggcaatgccatgcgtacgatatgttccctctccgaatgaa

SEQ ID NO: 6546 - DNA, 195 bp, Glycine max
  Clone ID: LIB3074-024-Q1-E1-A9
ggggggaacgtgcaagagtttgttgtgagctataagctagtttatcgtgaggagaataagaagttgtttgttttctttgttgctgcagtcattttggtaacatggccatgccatggcgcaggccaccaaaagttccctcccccaatgaaaactggctatggtgagcgttcctccgaagttaaatgccccagtttt

SEQ ID NO: 6547 - DNA, 341 bp, Glycine max
  Clone ID: LIB3074-024-Q1-E1-B1
gattgccagttacattcccttcacaagattctcacaaacaactcttgagaaagaaagaatggctgccaacacattgatgagttctgccatctcagccttcccatctctcctttcctcctcaaaatccagatttgccgcagcagttcctctttccagctttgttgtcaccaatgcctcttcttctcgcttttccatgagtgctgattggatgcctggccagcctagacccccctaccttgatggttcagcacctggtgactttggattcgaccctcttcgtcttggtgaagtatcagagaatcttgagaggttcacagagtcagaactcattcactgcagat

SEQ ID NO: 6548 - DNA, 168 bp, Glycine max
  Clone ID: LIB3074-024-Q1-E1-B11
ggcacaagtgagtttgttgatcgagataactagaaacagtgtgatgaaaatgaaggtccttgttttcttcgttgctacaattttggtagcatggcaatgccatgcgtacgatatgttccctctccgaatgaacactggctatggtgcccgtactccggaggtgaaatg

SEQ ID NO: 6549 - DNA, 150 bp, Glycine max
  Clone ID: LIB3074-024-Q1-E1-B12
ggcacaagtgagtttgttgatcgagataactagaaacagtgtgatgaaaatgaaggtccttgttttcttcgttgctacaattttggtagcatggcaatgccatgcgtacgatatgttccctctccgaatgaacactggctatggtgcccg

SEQ ID NO: 6550 - DNA, 264 bp, Glycine max
  Clone ID: LIB3074-024-Q1-E1-B2
ggacaacacaacaaaaagcgatgctggagcaaacacacatgtttgtcacaaattttctatttgaaaagccaaggctactccaagaaaactttcaggtggcgggtgattcccaaatcctaacccaaacaagtggcggcaaaacccttatggacacccccggaaaaatttccccaaaggccttcccaaggggggccccccaaaaggatcaacccttaggtccccgggaaagcaacttcaaaccccctcccaaaggcccccaaaatt

SEQ ID NO: 6551 - DNA, 290 bp, Glycine max
  Clone ID: LIB3074-024-Q1-E1-B4
atcataaaaaatacttagttaaaaaaaacgaaaatactgtattgcaattgtattgcaattcgaaacgaaatatagttcgagatcattgtattatttttgtactatattaatcttaatcttaattggaacgaaatctttcaaaattggatttctaattcttaatttatattttcgttttttcgttcttttctttttcttagattataatccgaaaacaaaagagttaagtgaattaaaaacccaagggaggttcatggccaaaggtaaagatatccgagtaattgttattt

SEQ ID NO: 6552 - DNA, 75 bp, Glycine max
  Clone ID: LIB3074-024-Q1-E1-B6
gaaaaaaaaaaaaaaaaaaaaaaaaaaaaaaaaatttctaattaaaaaaaaaacaaaaataatttatattttctt

SEQ ID NO: 6553 - DNA, 240 bp, Glycine max
  Clone ID: LIB3074-024-Q1-E1-B7
ggcagtgatagagataagaaaatgtggcttgtgcagctctcaaccccatttctgaacggacatggtcattccaccacccttctctccaagcacagttcggcggtgactcagacccactgggccccaccgagtttcctgcctcaaatcaatgcgatgaagacaatgcaggggagagtggtgtgctccaccagcgacaaaacggtggcagtggaggtggtgcggctggcccctcacccaaag

SEQ ID NO: 6554 - DNA, 369 bp, Glycine max
  Clone ID: LIB3074-024-Q1-E1-B8
gacagcatatcaataatctattttatactatacccacattttgataattatttttctagttgataagccatggctactcgaggaaagcttgaggttgacgttgatctcaagtctaacgcagacaagtactggcaaacccttaggaactccactgaaatattccccaaggccttccccaatgattacaaaagcattgaagttcttgagggtgatggcaaatcacctggttctatccgccacataagttatggtgaaggttcaccacttgtgaagtcatcctttgagaagattgaggctgttgatgaagaaaagaaggtagtgtcgtacactatcattgatggagagctcctccagcactacaaaacattc

SEQ ID NO: 6555 - DNA, 385 bp, Glycine max
  Clone ID: LIB3074-024-Q1-E1-C1
gagataaaagaagacgaagttgcatcttatctgcaacactccgtatccacttcgctggtaataagagaagagaagagagagagagagagagagggcgtggagaatgttaagtctctcagttgcttctccttcttcttcaaccatttcctttctcccaaagccattcaatggcattcagctccgtcgctctgccacatgctccattccacccacgaaatgcagcgcttcggtgccagtggtgatgatgtctaaaaggacggaggaattgaaggaaattagacaaatgaccaccgaacaaattaacgaaaaggttgtcgaccttaagggcgagcttgtcatgcttcgccttcagaaatcggctcgcaaccagttcaagtccagcgaa

SEQ ID NO: 6556 - DNA, 88 bp, Glycine max
  Clone ID: LIB3074-024-Q1-E1-C10
gggcagcagaagaacaagtagttgagaactaagaaggagaagcaaatggcttcctcaatgatctcttccccagctgttaacactgtca

SEQ ID NO: 6557 - DNA, 329 bp, Glycine max
  Clone ID: LIB3074-022-Q1-E1-H6
gacaactccataacacaaggcagaaagcaagctcatcctagagttttaaaaatggcagcagcctcctccatggctctctcttccccatccttggctggcaaggccgtgaagctgggcccatcagcccccgaagtcgggagggtcagcatgaggaagaccgtcaccaagcaggcctcctccggaagcccatggtacggcccagaccgcgtcaagtacttgggcccattctctggcgagcccccgtcctacctcactggcgagttcccaggtgactacggctgggacactgctgggctttcgggctgaccagaaaccttcgccagaaaccg

SEQ ID NO: 6558 - DNA, 241 bp, Glycine max
  Clone ID: LIB3074-022-Q1-E1-H8
gatagcaaaatcgtttctccaatctaatcaccattgtacaacccaattcccttcgtcgttttcgattaagagagcaatggcacgtagcaagcaaaccgctcgcaagtccaccggaggaaaggctccgaggaagcaattggcatccaaagccgctcgcaagtcagccccggcgaccggcggagtgaagaaaccccaccgcttcaggccacgaactgtggctctgacggagattcgaaaggta

SEQ ID NO: 6559 - DNA, 423 bp, Glycine max
  Clone ID: LIB3074-023-Q1-E1-B11
ggataccaacagcagcagtgaaagcaataagtccctccttcctctgccttataactcttgtggcccttttggctggtagcattgaaagtggaccagcaagcgtgaagccaagccattatgctgcaccattcaataggagtgtttttccttctggttttctatttggaataggctctgcagcttaccagatagaaggagcagcagcaatagacggcagaggaccaagtatatgagacacctacactaaacaacaaccagggaagatttgggatcatagtgatggaagtctagcaattgatttttatcagcggtacaagagcgacatagagatggtgaaagaagttgggttgggttcatacagattttccatctcatgggccagaatattccccaggggcaagggaccagttaataccttggggg

SEQ ID NO: 6560 - DNA, 176 bp, Glycine max
  Clone ID: LIB3074-023-Q1-E1-B12
gaccaacacaaacaatagtgcataacgtttttcaatgggcaataatcaattggcaacacaagaactccaatcgggaacaatgttaacaactgcgttaatgaggaaccaacttatgacaacaagaagcttaaggacattcccaaaggttctttttggcctgaaaggtggacaaggtg

SEQ ID NO: 6561 - DNA, 361 bp, Glycine max
  unsure at all n locations
  Clone ID: LIB3074-023-Q1-E1-C11
ggccgaaaaccctaacaacacagacgcagagcgtgatccattgacgaagatggtgcagcgtctcacctaccgcaagaggcacagctgtgccaccaaatccaaccaacacagggtcgtcaaaacccctggtgggaagctcgtttatcagaccaccaagaagagggccagcgggcccaagtgccccgacactggcaagaggattcaggggattccacacttgaggcctgcagagtacaagagatcaaggttacccagaaaccgtaggactgtcaaccgtgcatatggcggagttttgtctggaagtgctgtcanggagaggattatccgagctttcttagttgaagagcaaaagattgtgaag

SEQ ID NO: 6562 - DNA, 304 bp, Glycine max
  Clone ID: LIB3074-023-Q1-E1-D10
agatccaatccaattgaattctccagagagaagaagaaacttaatcgatcatcacttcacttcactaatacatcatggcagacgagacccagaacaagtatgagagctctgaggttgaggtccaggatcgtggtgtttttgactttctcggtaagaaaaaggatgaagaagacaagcctcatcctcaggaggaggtcatcgccaccgagtttcaaaaagtcactgtctcagaccaaggagagaacaagcacagcctcttagaaaagcttcaccgatctgacagcagctctagctcttcaagtga

SEQ ID NO: 6563 - DNA, 206 bp, Glycine max
  Clone ID: LIB3074-023-Q1-E1-D12
gactcatctcttactacgaaaccctcttcatcttgttctatctgtgacgaccatcatggtctcaagatcactctaattgttagctaggtgtgtggttcccgcaatggttgtggtcattcgcccaacaaagaaccctttttgcgtgaagggtcgtttctactggtacccttgccgtgctggttttgagacctcacctaccacctaca

SEQ ID NO: 6564 - DNA, 416 bp, Glycine max
  Clone ID: LIB3074-023-Q1-E1-F10
gaaggtgcaagagtttgttgtgagctataagctagtttatcgtgaggagaatatgaagttgtttgttttctttgttgctgcagtagtgtttgggagcatggccatgccatggcgcaggctaccaaaggttccctctccgaatgaaaactggctatggtgagcgttcttcggaggtaaaatgcgcaagttttaggcttgctgtggaagcaacaacatccgagcctttaaaaccattcctgaagagtgcgtcgaaccaacaaaggactacattaatggcgaacaatttagatcagactctaaaacagttaaccaacaagctttcttttatgctagtgaacgcgaagttcatcacaacgacatatttatattcggcatagattacaccgtactctctaatatcccatactatgaaaaac

SEQ ID NO: 6565 - DNA, 418 bp, Glycine max
  Clone ID: LIB3074-023-Q1-E1-G10
ggaatcgacgaaaccgaggcaaaacctacattggttgctccaatatcagtatgcttccaattgcactgcactcgtccaatgaaaattaagctttccaatgaattcgtttggacctgaaaaacaacacctggtttgattgtcaccttgggtcgcacagttattactacccttcttttgtgaattggtgaaatatatgctccaactatggataatatgaagaaagatgaaacccaagatcggaagcaagatgaacttgctgaatcgcttgatggtctattcagtagcgtttccaccatgatcaaatcagagcttcaggggacaaataatcacctagagctgttggagaagatgaatgtaagagtggcagaagagtacaaagggttcggtgacttggcttcaaggttgagggtttttgtgg

SEQ ID NO: 6566 - DNA, 434 bp, Glycine max
  Clone ID: LIB3074-022-Q1-E1-H4
ggtccacgacgcgtccgacggcgacagaaggggaccaacaccaaaacaaacccactaagatggcttcctttgtatccttcctagtgctgcttcttgcagcccttatcctcatgcctcaagggcttgctacttactacaaaccaattaagaagccaccagtgtacaagcctccagtgtacaagccaccagtgtacaaaccaccggtttataagccaagaccaccggtttacaagccgaaaccaccggtttacaagccaccatataagaagccaccatacaagagaccaccttatggaaagtaccctccagtagaggacaacacccatgcctaaagcaagcaatgaggtctattatctacttaataaataagaggaactgctttgtgttgtctagcattgtgatttaaaacctcgtagcaatgcatattcttgact

SEQ ID NO: 6567 - DNA, 302 bp, Glycine max
  Clone ID: LIB3074-022-Q1-E1-E7
ggaaacgaagaatccctaactacgcacgcagtcgtgagaaaagtcaatattcgtcgctcatggcactctcttcgcgtcgcgtttccaaatcgaagattgatgtatgacagtcaaatacttctacaaaaggagcatgctattccagttcgtgactttgctaaagagtctgcccctcctgcccttaagggatacgagatgctgaagaacatttttgtggaggtgaagaacaaatttgagacgcggatatgaatattacagaaggaaatgatcaggagtgacccagaagatggagctgctgtttc

SEQ ID NO: 6568 - DNA, 376 bp, Glycine max
  Clone ID: LIB3074-022-Q1-E1-F1
gaccacattccagaacacatacacatacattgtagtatcacttttgtctcggaatttgttcctttgagttatggcaagcttaaaggttgcatgtgtggttttgatgtgcatggctgtgatgagtgcaccaatgatggtgcaagccgtgtcatgcaatgatgtttctgtggacctagcaacgtgccgatcttacctgatgcaaggtggagatgttccaaaatcgtgctgtagcggagcaaggaacattctgggttctgccagcaccacctttgacaatcaatccgtgtgcaaatgtcatcagcagactgctactaactatggcatcaacgacgagtacgctcaggcaatccccgcccgctgcaatgtcaacgtccct

SEQ ID NO: 6569 - DNA, 343 bp, Glycine max
  Clone ID: LIB3074-022-Q1-E1-F12
gatattccagttagtgcagtcaatggtaaacccgaggttggcgtcaaacctgatgcaaatgaagctaaacagaagaagatagcagatccaagaaagagggatgcaaatggtgaagatgacgattcatccgaatctgattctgatgatgattcaagtgaagataagcccacagcgaatggcgacatacaaagtagtgaacgtgatgatgatagcgatgatgatgaggaggaggagggggatgatgaatctgatgaggagacagccaagaagattgaagcaagcaataagaggggtattgagtcttctaagaaaacacctgttcctgttaagaagacaaagtttg

SEQ ID NO: 6570 - DNA, 381 bp, Glycine max
  unsure at all n locations
  Clone ID: LIB3074-022-Q1-E1-F2
gactcatccttcattaccaagcatatctcatttgaatacattccttgtagtttatactgaaagatgggtttgaagatggcgttactgatcctaggcctttccctcatgctccttttggtctcctctgaggtggcatccacgaatacaaaagaggaggcaaatggagtggatgatgccaaatatcccggtggaagctatggagggggttacccaggtcatggcggtggcggttatcctggccatggtggtggcggttatcctggccatggcggtggtggtggctatcctggtcatggtggtggccaccctggtcatggtggcggctaccctggccgtggtggtggatactgtangcatggctgttgcggtggccggacatac

SEQ ID NO: 6571 - DNA, 316 bp, Glycine max
  Clone ID: LIB3074-022-Q1-E1-F3
ttattgcattaccacagatgtggtaacataacgggttttgaagaagaagcagttcatttgatcaactcatatttcatggacctaagtctagctgctaatagactcgcccatcatgccatcaaacttggtggcattggatttggagcctcttctttcggactgtctgctgccattgctgctatttatctgttgagttaggatcgtaaaacctgcaatacatatactctcacagcactacgcagtccatacattttcttcagcatgccttcattaagtttcgatctcctcaagggacatcttggtaaatggattgctg

SEQ ID NO: 6572 - DNA, 390 bp, Glycine max
  Clone ID: LIB3074-022-Q1-E1-F5
gagatttgtgcgttaagaaagaaagaaaaaaaaaagtcatggcagcgagtgacggttgcagcagcttcttaacattgtcgtgtgcaggtgcagtgcaaaatcaacatgtatcacaccctacaacgtttttgggagttcctaaaaacaatcagagaaaaaggaaaacaccgcacaggttagttgtggtcgcggtgactcaaggctctgctgaatcaagcaagtccgatgaaaaaatcccttcgtgggccaaaccggactccgatgaacctccgccgtgggcccgggacgagcccaacaacaacagttcgcaacaagaaggatttgagattccgttctatgcttatttgtttgcctctgctatcactgctattgccgctataggctccattt

SEQ ID NO: 6573 - DNA, 275 bp, Glycine max
  Clone ID: LIB3074-022-Q1-E1-F6
gagatttgtgcgttaagaaagaccgaccaacgaagtcatggcagcgactgacggttgcagcagcttcgtaacattgtcgtgtgcaggtgcagtgcaaactcaacatgtatcacaccctacaacgtttttgggagttcctaagcacaatcagcgatcagggactgcaccgcacaggctacttgtggtcgccgtgacgcacgggtctgctgagtcacgcacgccgcacgagagaatcgcgtcgctgggcccagaccgtagtcccataaacctccgcc

SEQ ID NO: 6574 - DNA, 360 bp, Glycine max
  Clone ID: LIB3074-022-Q1-E1-G1
gattcagattacattgcaaaaatggcatcattcaccatgacagcttccatccttggcggcccagccgtcaccaaccggttggcagtagcaacgcagaggagatcactcgtagtgaatgctgccaaagctgttgaagcggaaaaggtcagttatgacaatgacatggatggtagcaatggaaggaggaacttgatgttcgccgcggcggcggcggctgctgtttgctctgttgctgggatggcagtggcagatgagccaaaaccaggaaccccagcagccaagaaaaagtatgctccgatttgtgtcatcatgccaactgctaggatttgtcgcaattgagggactcggtttttactttac

SEQ ID NO: 6575 - DNA, 278 bp, Glycine max
  Clone ID: LIB3074-022-Q1-E1-G2
gatcaggcatcaatttaacaactaattgagaactaatcatgataatcatatggcttcctcaactgatgacgtccccatctgttaccactgtcaaccgttcccgtgccggcattgttgctccattcagtagcctcaactccattgctggcttccccattaaaaagaccaacaatgacattaccatccattgctatcaacggtcgtacaatacaatgcattcaagtgttgacaccaattcgcaatacctagtttgagactctttccttactgccagaccg

SEQ ID NO: 6576 - DNA, 363 bp, Glycine max
  Clone ID: LIB3074-022-Q1-E1-G3
ggcagccaaagaaaagaaaatcctcaattttctgagcagccaaacactctctctctgtctctcgaaaattctcagtttgcagagaaaatctgaatcatgtcgtggcaagcgtatgtcgacgatcaccttctgtgtgacatcgaaggtaaccacctcactcacgctgctatcatcggccaagacggcagcgtttgggctcagagtaccgacttccctcagttcaaacctgaggagatagctgccatcatgaatgactttaatgagcctggatcacttgctccaactggattgtatctcggtggcaccaaatatatggtcatccagggtgataccggtgctgtcattcgagggaagaagggtcct

SEQ ID NO: 6577 - DNA, 203 bp, Glycine max
  Clone ID: LIB3074-022-Q1-E1-G5
ggctcaaactctcttatctctctcttacacacccaagcactactactactactttctttctagatatgggttctggtgctgtgcaactgtttctgatcttggggctcttggctagctcatgcttagcccaagccccatgtgctgcaccgtcacaaccatccactacaaccccatcaccaccatcacccagatcagcacctgca

SEQ ID NO: 6578 - DNA, 104 bp, Glycine max
  Clone ID: LIB3074-022-Q1-E1-G7
acgcgtcggtacagctgcacgaagaggagaaggcggtgcggatgctatcctcagatttctgggcagcgaggcactctctctctatcacgctacggctctcagtt

SEQ ID NO: 6579 - DNA, 380 bp, Glycine max
  Clone ID: LIB3074-022-Q1-E1-H1
ggtctcaagcaaccatggcaatggcaacccaagcctctctcttaaccccacccctctccggtctcaaagccagcgaccgcgcctccgtgccatggaagcaaaactccagcctctccttctccagcccgaagcccctcaagttctccagaacaatcagagcagcagccgccgacgagaccacagaggcaccagcaaaagtagaggctgcaccggtcgggttcaccccaccagaacttgacccaaacaccccttccccgatcttcgggggcagcaccggcgggctcctgcgcaaggcacaggtggaggagttttatgtcattacgtgggactcacccaaagaacagatctttgaaatgcccactggcggcgccgctatcatg

SEQ ID NO: 6580 - DNA, 389 bp, Glycine max
  Clone ID: LIB3074-022-Q1-E1-H2
ggttcttcttcttatttgtaacgaagcaaacgctgccgaattcgttatcgctttgcactagcagctttgaaacccggttcatccgaagcccttcaccgaaccatgtcgaggagaaaggttagagagccaaaggaggaaaatgtgactctgggtccagctgttagagatggtgaacacgtttttggcgttgctcgcatctttgcctccttcaacgacaccttcatccatgtcactgatttgtctggcagggaaacccttgtccgaatcactggtggtatgaaagttaaagctgacagagatgaatcatctccttatgctgctatgcttgcagctcaggatgttgctgccagatgcaagaactgggcataactgctcttcatatcaagctc

SEQ ID NO: 6581 - DNA, 414 bp, Glycine max
  unsure at all n locations
  Clone ID: LIB3074-022-Q1-E1-E6
ggaaacgaagaagccctaactacgcacgcattcgtgagaaaactcaatattcgtcgctcatggcactctcttctcgtctcttttccaaatccaaattgatctatgacagtcaaatacttctacaaaaggagcatgctattccagttcgtcactttgctaaagagtctgcccctcctgcccttaagggagacgagatgctgaagaacatttttgtggaggtgaagaacaaatttgagaccgccataggaatattaaagaaggagaaaatcaccattgacccagaagatccagctgctgtttctcattatgcaaaggtcatgaaaacaattagagagaaggcaagcttattgtcggagtcncaagacatactatccaccattgaaattgagacacaggatattccagatgctcgga

SEQ ID NO: 6582 - DNA, 328 bp, Glycine max
  Clone ID: LIB3074-022-Q1-E1-C3
gggaagagaagagacactgaggtcgttggcgagaatgggaagaaagaaggggtatgttgagttcgaggagtcgccgccggacgattttgatccggcgaatccgtacaaggacccggtggcgatgctggagatgagggagcacatcgtgagagagaagtggatccaaatcgagaaggccaagatcattagggagaagctccgctggtgctaccgcatcgaaggcgtcaaccacctccagaagtgccgccacctcgtcaaccagtatctcgagtccacccgcggcatcggttggggcaaggacggtcgccacccatctctccacgctccc

SEQ ID NO: 6583 - DNA, 383 bp, Glycine max
  Clone ID: LIB3074-022-Q1-E1-C5
atacagcgtcaggcgagaagacgacggggtgggacttcagagttaagttgcgagtataggatgtcaatgcgaaaagatgattctcattgaactcgctgatgtattcacttctatcattctcgcacgattctgacgtagattgctgtgtagtagaatatgcaggtctgactggtcgagcatgatatccctgtgttatgaccttcaaacgtcacatcaaatgaatttgcatacactggtcttgaaatagtcggtgatactccgcgtagtatcatcactgtaatgatacctgtatttgagtcacagtttgatggtctctactggcgtggaatttcggaagcacgtatgtacttaacagtaggttcagttatacaatgtcacactca

SEQ ID NO: 6584 - DNA, 251 bp, Glycine max
  Clone ID: LIB3074-022-Q1-E1-C7
agacgacataagtgggcacaagtgagtttgttgatcgagataactagaggcagtgtgatgaaaatgaacgtccttgttttcttcgttgctacaattttggtagcatggcaatgccatgcgtacgatatgttccctctccgaatgaacactggctatggtgcccgtactccggaggtgaaatgcgcaagttggaggcttgctgtggaagcacacaacatctttggctttgatagcattcctgaagactgcgt

SEQ ID NO: 6585 - DNA, 339 bp, Glycine max
  Clone ID: LIB3074-022-Q1-E1-C8
gaccaacacaaacaatagtgcatagcgtttttcattgtgcattattcaatggccaccacagcagctctatccggaaccatggtgagcacctccttcatgaggaagcaacctatgacgaccaagagcctaaagacattccccaacgctctttttggtctgaaaggtggacgaggtggtcgtgtaacttgcatggcctcgtacaaggtgaagctcataaccccagaaggagaagtggagtttgcatgcccagatgatgttttcagtgttgacaacgctgaggaagaacgcattgagcttccctactcgtgcatggctggttcctgcgtttcatgtgttggg

SEQ ID NO: 6586 - DNA, 342 bp, Glycine max
  Clone ID: LIB3074-022-Q1-E1-C9
ggagcacacagagaaggaaacatggcgttggagcaagcagtatcatcgtcatcaagcacattgaggaacgttctcaccttccccaaaaccctaatttcaaaaccccaattccaagtcgctgcttctccctcatggaaaacacagcggcgttgggggaacttgaagtgctccatgacgacaacgccatcataccctaagccctcggagattccgtgggagaaggagctctgcaactccgtcaacctcatcggcaatgttccggcccccgttgaaaatcaaacacctcccctccggcaaggtcgtcgcctggaccgcctctacgtcaagataagcgccacgcaa

SEQ ID NO: 6587 - DNA, 378 bp, Glycine max
  Clone ID: LIB3074-022-Q1-E1-D1
gatctggcagcagaagaacaagtagttgagaactaagaaggagaagcaaatggcttcctcaatgatctcttccccagctgttaccactgtcaaccgtgccggtgccggcatggttgctccattcactggcctcaagtccatggctggcttccccaccagaaagaccaacaatgacattacctccattgctagcaacggtggaagagtgcaatgcatgcaggtgtggccaccagttggcaagaagaagtttgagactctttcctagctgccagaccttgatgatgcacaattggcaaaggaagtagaataccgttcttacgaagggatcgactccttgcttggaattcgagttggagcacggtttcgttaccgcgagca

SEQ ID NO: 6588 - DNA, 259 bp, Glycine max
  Clone ID: LIB3074-022-Q1-E1-D10
ggttctagtgtgtgattgtttgttgttgtaactcgttcttcttcttttgttgttctgtgtttgtgtttgttttttctctcacctgaacatgtcttgctgccgtggtaactgtggttgcggaagctcctgcaagtgccgtaacggctgccgacgctgcaagatgtacccacacttgagctacaatgagtcaaccatttacctagaccctggtcatgggagtggcacctgttaatgctcaatttcatggtgacgaaatggg

SEQ ID NO: 6589 - DNA, 197 bp, Glycine max
  Clone ID: LIB3074-022-Q1-E1-D12
cacaagggggtgtgagtgaacaagcagatggaataacgggattacatctgcagatcttcagttaaaactctgaaaggtaatactaaaatcctcttcgtcgagacaattgaaacaatccaaactgtcattgcaacgattccaaacactgaatgacttacgtccgatcactaaccttcacatacctccgtcaatctgtt

SEQ ID NO: 6590 - DNA, 431 bp, Glycine max
  unsure at all n locations
  Clone ID: LIB3074-022-Q1-E1-D2
gaagaaaacaaaatacaaagaaagatttggaaagagaaaaaatggcaacaaatattctctcaacctcaaaccccttcctactaactaattcattctcatcatcatcatttgtaacaccaacatatgtttactacaatcccataatgaaatgcacagtgaagaggggattaactctttgcaaagcagcaaaccaaccagcccctccacactctccaattgttgtgacaaagagaggcttgtccatcagcttcatcaccagcttcgtgctttcattggctagtaagaagaatgcaaatgcagcaatacttgaggctgatgatgatgaagaactcttggagaaagtaaagcgtgacagaaagaagagacttgagaagcaaggtgtgatcagttcttccanacaagaaacagggtatcttcaagatctggtgtac

SEQ ID NO: 6591 - DNA, 380 bp, Glycine max
  Clone ID: LIB3074-022-Q1-E1-D3
gatgccacaatggttgtccctcttaggcactttcttgttttctctctcaccctcatatccatcatcttccacacccatggagcgttctctgagcaatcaataatcaagttacccacagaccaaccaagggtagagaaactgacccacttgcattttttctaggacgacatcttatagggcacgaacatcacggtggtgaaaatcatcgagccatcagcgatcgaggttcgtgaagcaactgggtttgtgaccactttcatgatggacaatgttttgaccgagggtccagagctgagctcgatacacgttgggagggctcaggggctgtttggcttggcctctttggaggaccgtggaatggtgatgctcattaaagtggc

SEQ ID NO: 6592 - DNA, 158 bp, Glycine max
  Clone ID: LIB3074-022-Q1-E1-D4
gatgccacaatggttgtccctcttaggcaccttcgtgttttctctctcaccctcatatcgatcagcctccacatccatggagcgttctctgagtaatcaacactccaatttacccacagtccacggagcggtagagaacctgagtcacttgccttttt

SEQ ID NO: 6593 - DNA, 396 bp, Glycine max
  Clone ID: LIB3074-022-Q1-E1-D5
gcacaagtgagtttgttgatcgagataactagaaacagtgtgatgaaaatgaaggtccttgttttcttcgttgctacaattttggtagcatggcaatgccatgcgtacgatatgttccctctccgaatgaacactggctatggtgcccgtactccggaggtgaaatgcgcaagttggaggcttgctgtggaagcacacaacatctttggctttgagaccattcctgaagagtgcgttgaagcaacaaaggaatacatccatggcgaacaatatagatcagactccaaaacagttaaccaacaagcttacttttatgccagagacctcgaagtccatcgcaaggacacatttgtgttcagtatagatggcaccgtactctctaatattccatactac

SEQ ID NO: 6594 - DNA, 320 bp, Glycine max
  Clone ID: LIB3074-022-Q1-E1-D6
gaggttgaagaagaagaagagagagagagagagagggagagagagagagagggagagagagagagagagaagggtaaggtaaccctagagtggtgaatcgacttcgaaacgatggaaagtgtttctcgaataagaggtggacgcattttcgaaagcctctacaaggtcgttatgcgtcgcaactctgtctatgttacctttgtcatcgctggcgccttccttggagaacgggctgttgattatggagtccacaagctctgggacgcaaatcctgttgggaaacgatatgaagacattcctgtgctatggcaaaggccgtc

SEQ ID NO: 6595 - DNA, 414 bp, Glycine max
  Clone ID: LIB3074-022-Q1-E1-D8
gggaaagaacattcaagtactttcaagttcctttgtcaataagcaagagcaatacactgtggaaggagtgcagaatcttggagacaaagcagtgatgtgtcatgggctaaatttcagaactgcagtattttactgccataaagtccgtgaaacaacagctttcatggttccattggtggctggtgatggaaccaaaactcaggcacttgctgtttgccactcagatacttctggaatgaattatcacatgcttcatgaactcatgggagttgatcctggaactaaccctgtttgccatttccttggaagcaaggccattttatgggtacccaatatatctatggacactgcctatcagactaacgttgttgtttaattagtccatgcatctgcatcttgggcaccataagattg

SEQ ID NO: 6596 - DNA, 414 bp, Glycine max
  Clone ID: LIB3074-022-Q1-E1-E1
aagaaagaagatcaaaagaaaaaagagaaacaaatggcagcactgggtggctttaccgacatcaccggagcacagaacagcatcgatatcgaaaatctcgctcgctttgctgtcgatgaacacaacaaaaaagagaatgcagttctggagtttgtgagggtgattagtgcaaagaaacaagtggtttctggcaccttgtactatatcactttggaggcaaatgatggtgtgacgaaaaaggtttatgaaactaaggtgttggagaaaccacggttgaacatcaaggaggttcaggaattcaagcccatcactgttgctgttaatcctctttcggtgacggtctagcacatagctaggttatggaagtgactagcttggccgcaagagtaataatatgtatgaactgaataaatg

SEQ ID NO: 6597 - DNA, 313 bp, Glycine max
  Clone ID: LIB3074-022-Q1-E1-C2
tgcggaatggaagttctgaatctatctcatcaatttgtgttgaatctgattgcagaagtgaagtggaaggtgttcaaattttgcaatattgtgaaatgtcggattaaaggttatacaaatatttattactcctactgcttctatcagttaaatgccatgctaaatatttttctgttgtgttgtactgtatctcactctggttacacttgagtgtggaccatgtattgttatattagatacactggtttttataccaaagtttggtaaattaagagtgtgtttccagtgaataaattagatgaagttgcaaaaa

SEQ ID NO: 6598 - DNA, 343 bp, Glycine max
  Clone ID: LIB3074-022-Q1-E1-E5
gaacacttgtattgtctcaagcaaccatggcaatggcaacccaagcctctctcttaaccccacccctctccggtctcaaagccagcgaccgcgcctccgtgccatggaagcaaaactccagcctctccttctccagcccgaagcccctcaagttctccagaacaatcagagcagcagccgccgacgagaccacagaggcaccagcaaaagtataggctgcaccggtcgggttcaccccaccagaacttgacccaaacaccccttccccgatcttcgggggcagcaacggcgggctcctgcgcaaggcacacgttgaggagtcttatgtcattaagtgggactc

SEQ ID NO: 6599 - DNA, 404 bp, Glycine max
  unsure at all n locations
  Clone ID: LIB3074-021-Q1-E1-H4
gatattgaaaaggcgcccaagcaagttcgttctttcgccgccgtcgctcacaactcgcaaaccacaatgcctaagcagatccacgagattaaggatttccttctgacggcacggaggaaggatgcgaggtcggtgaaaatcaagaggagcagggatgtcgttaagtttaaggttcgatgctccaagtatttgtacacgctttgtgtctttgatcctgagaaagccgataaattgaagcaatctcttcctcccggtttgagtgttcaagacctgtanaggtgctgagtgcggcagcgtgcgtttgtttatctttttgttgcctcatgctctagattttgtggcttgcctttatattttggtaattgttatgaggatatgcttgttttttatttgctatgaaaatg

SEQ ID NO: 6600 - DNA, 414 bp, Glycine max
  Clone ID: LIB3074-022-Q1-E1-A1
gacttcaaaacactcataacacaaagcacaaagcaaaactcatccttgagttaaaaaatggcagcagcttcttccatggctctctcatccccatccttggctggcaaggccgtgaagctgggcccatcagccccagaagtgggaagggtgagcatgaggaagaccgtcaccaagcaggtctcctcaggaagcccatggtacggcccagaccgagtcaagtacttgggcccattctctggcgagcccccgtcctacctaaccggtgagttcccaggcgactacggctgggacactgctgggctttccgcagacccagaaaccttcgccaagaaccgtgaactcgaagtgatccactccaagtgggccatgctcggagccttgggctgcgtcttcccggagtgctgtcccgcaacg

SEQ ID NO: 6601 - DNA, 312 bp, Glycine max
  Clone ID: LIB3074-022-Q1-E1-A11
caacggggaatgcacgctagatccatatatcaatggcgacgagtcacgaaccggttttacggtaccttgtgcctctacgtcagggacctagcccagtcagtggctttctatgccaaagccttcggctattctgttcgtcgcttaaacgagtctcatagatggggagacttggtcccggggaacacaaccactgctttcactccgattcaccaggacgagaccgatgatctgaccggtgcggttcagaaccctggatcttgtcgagaacagaccacccatggacgtttgttttgttcactctgaactttatgc

SEQ ID NO: 6602 - DNA, 298 bp, Glycine max
  Clone ID: LIB3074-022-Q1-E1-A2
gacttcaggtcacgcagagcaaaccgcagaatttaagcatcatccttgagctaaagaatggcagcagcttcttccatggctctctcagcccgatccttgggtggcaaggctgtgaagctgggccgatcagctccagaatctgggaacggtgagcatgaggaagatcgtcagcaggcaggtctcctcaggaagcccatggtacaagccagaccgagtcaagtatgtgcgcccattctctggcgagccctcgtcctaccgaagcggtaagttcccaggcgactacggttgggatactgct

SEQ ID NO: 6603 - DNA, 294 bp, Glycine max
  Clone ID: LIB3074-022-Q1-E1-A3
gaattcaaatcactcagcgcagacagcacagcacaaccctcatccttgagttaatggatggcaccagcgtcctccatggctcgctcatgaccatcgttggctggcaaggccgtcaatcagggcacatcatccccaggactgggaacggtgagcatcacgaaaacagtcaccacgcaagtctcgtcatgaagcccacggtaccgcccagaccgactcaagtacttgggaccattctctggcgagcccccgtcctacctaagccgtgagttctcatgggactacgggtgggacacg

SEQ ID NO: 6604 - DNA, 326 bp, Glycine max
  Clone ID: LIB3074-022-Q1-E1-A4
gggggaagggaattccacccactcatcaatggcatctactctcttcgcttgcccgtcgttgtgttcctcctcttcttctatattttctacttccgtcaaattctccttaaacccgaataaaatttctcttccgttcgccggaaacataaaagctctttcggctccaattcgaatgcggttcagtgtcattgctacggctccgcgtaaacccggtgggaaggccacgaaagtggttggaattacaaagctggctcttgaagctgggaacggtacacctgctcctcacgttggcctgctcttggttcaagggtgtccatcatatggct

SEQ ID NO: 6605 - DNA, 376 bp, Glycine max
  Clone ID: LIB3074-022-Q1-E1-A5
tggggtgtgagagagcgagcgagcgagcagtttcaaacataggatttgggattggtaacgcgagggattgcgctgcgtctcttccgcttctctttcgattcatccgtcattcatctgcgtccattcgagcaagcccatgcgtcagactcacacttagacacatctcaacgcgtatggtccctcacatggcttcacgtcgcatccacaacgagctcaatgacttggataattatctagcaacttcttgtaccgctggtccagtgactgacgagatgttcgattgtcgcgcaccgattatgggtcccgctgatcatccttattctggaaggtgtattcctagtcacttgttacagtcctccggagtattcctttcaaa

SEQ ID NO: 6606 - DNA, 427 bp, Glycine max
  unsure at all n locations
  Clone ID: LIB3074-022-Q1-E1-A6
ggtctgagagaaaccctagctagccacaatgcagatattcgtgaaaaccctaacggggaagacgataaccctagaggtagagtcatcggacacaatcgacaatgtgaaggcgaagatccaggacaaggagggcatcccgccggaccagcagcgcctgatcttcgccggtaagcagctggaggacggccgcaccctcgccgactacaacatccagaaggagtccacgcttcacctcgtcctccgcctccgcggcggcgccaagaagcgcaagaagaagacctacaccaagcccaagaagatcaagcacaagcacaagaaagtcaagctcgccctcctccagttctacaaggtcgacgactccggcaaggtcnagaggctccgcanagaatgccccaacgccgagtgcggcgccgggactttcatggcc

SEQ ID NO: 6607 - DNA, 153 bp, Glycine max
  unsure at all n locations
  Clone ID: LIB3074-022-Q1-E1-A7
ggatgcagatagagatgcatagcaattcccangtcctaaatgtttaaaactaatttcgaattcgtccatcgtccaattcttctcgtcttgaaaatcaatttctccgggaaaactttgatcggtataacaattggccttgaggtggattctccg

SEQ ID NO: 6608 - DNA, 356 bp, Glycine max
  Clone ID: LIB3074-022-Q1-E1-A8
ggcacaagtgagtttgttgatcgagataactagaaacagtgtgatgaaaatgaaggtccttgttttcttcgttgctacaattttggtagcatggcaatgccatgcgtacgatatgttccctctccgaatgaacactggctatggtgcccgtactccggaggtgaaatgcgcaagttggaggcttgctgtggaagcacacaacatctttggctttgacaccattcctgaagagtgcgttgaagcaacaaaggaatacatccatggcgaacaatatagatcagactccaaaacagttaagcaacaagcttacttttaatgccagagagctcgaagtccatcccaaggacacatttgtg

SEQ ID NO: 6609 - DNA, 303 bp, Glycine max
  Clone ID: LIB3074-022-Q1-E1-B1
gtggaaggaagcaaatgctaaaggaagtctatttcaaagatttccttcagatttgttgacacagctgaagacagattgtctcgtcctgcacaatcatcgttatgccatatccccacgcaagcttcaatataataccaagttatctgacttttttgaggttctggcaacatctgaggatagagatggaaagactttcgtttccacagcacgtggtaggaaatatcccgtgactgtcaacctatggcaaccagagaaaaatgcttttgaatgggctacatctttgaaagcccctcacacagaaga

SEQ ID NO: 6610 - DNA, 318 bp, Glycine max
  Clone ID: LIB3074-022-Q1-E1-B10
ggaaacaaagcagggataggaagaaggaaaaatggaaaagtatttcggaaacgcttatcgtggcgacccgggagtgccccattcggacccggatcgcttcgtcaacatatgggtcggatccgctgcctacgccgttctcacatatttcactccctacatgtggcagctctctaatcagttcaactggcatgacaaagcaaatgctatatgagcagtatcactggaaacacgcaccgaataacaatcagccataccagttcatgtggaacaagatctcggacaagaaccaccgggaacactaccactacaactcgccca

SEQ ID NO: 6611 - DNA, 134 bp, Glycine max
  Clone ID: LIB3074-022-Q1-E1-B11
gctacgacaccctgcacacacacttcgccctcctcgcattgtgtggccgccaattcgagtaccgacggatagcggctggggaagccatcccaaccagctccggacgtccaccctccctcagcccctctcacttc

SEQ ID NO: 6612 - DNA, 342 bp, Glycine max
  Clone ID: LIB3074-022-Q1-E1-B4
ggaggaggaaggaagggagggaagaatagaatgggatctggaagtggaaaacacactggagagttcttcaggagaagggatgcatggaggaagcatccgatgctcaccaatcagctccgccacgccaccccgggccttggcatcgccgtcgtcgccttcggtatctacctcgtcggcgaacaagtctacaataggctctatgctcccgatcctcattcgatttctcacgtgaaagccggggatcaccactaaacgtttggacggacgcactccattccatcatcacttaataagcttgctagcatgttctcgcagcctttaatgtttaaatttcagaccgtg

SEQ ID NO: 6613 - DNA, 309 bp, Glycine max
  Clone ID: LIB3074-022-Q1-E1-B6
gcacaagtgagtttgttgatcgagataactagaaacagtgtgatgaaaatgaaggtccttgttttcttcgttgctacaattttggtagcatggcaatgccatgcgtacgatatgttccctctccgaatgaacactggctatggtgcccgtactccggaggtgaaatgcgcaagttggacgcttgctgtggaagcacacaacatctttggctttgagaccactcctgacgagtgcgttgaagcaacagaggaatacatccatggcgaacaatatacatcagactccacaacagttaaccaacaagcttac

SEQ ID NO: 6614 - DNA, 277 bp, Glycine max
  Clone ID: LIB3074-022-Q1-E1-C11
cgggatgccacaatggttgtccctcttaggcactttcttgttttctctctcaccctcatatccatcatcttccacacccatggagcgttctctgagcaatcaataatcaagttacccacagaccagtcaagggtagagaaactgacccacttgcattttttccaccactacatcttacagggcaacaccatcacggtggtgaaaatcatcgatccatcatccaacgacgttcgtgaagcaactgtgtttggaaccactttcatgatggacgatgttt

SEQ ID NO: 6615 - DNA, 188 bp, Glycine max
  Clone ID: LIB3074-022-Q1-E1-C12
cagggagacaacaatcctgcgtcgtcaaagcctaagtttgggacatactggattacctatgggaaagttgttggggtcgttccggaacgtgtaagccctcgaacacaaccatgctattgctaaagttgccaacgtccagcctccgtttgcatatgtacatcaacttgcttcacgaacgcctttccttt

SEQ ID NO: 6616 - DNA, 271 bp, Glycine max
  Clone ID: LIB3074-021-Q1-E1-H3
gaccacattccaaaacacaaacacatacattgtagtatcacttttgtctcggaatttgttcttttgagttatggcaagcttaaaggttgcatgtgtggttttgatgtgcatggctgtgatgagtgcaccaatgatggtgcaagccgtgtcatgcaatgatgtttctgtgaacctagcaccgtgcctatcttacctgatgcagggtggagatgttccacaatcgtgctgtatcgcactgaggaacattctgggttctgccatcagcaccttt

SEQ ID NO: 6617 - DNA, 77 bp, Glycine max
  Clone ID: LIB3074-020-Q1-E1-G6
ggcacaagtgagtctgttgatcgagatgactagaaacactgtgatgatcatgacggtccttgtcttcttcatcccta

SEQ ID NO: 6618 - DNA, 408 bp, Glycine max
  Clone ID: LIB3074-020-Q1-E1-H1
gatagcgaaacagagagtggtttcagtgagtgatcggtgttcacttgatccttcataagtcgtcatcatcatcatcatcatcaccgttgattgaagaagatgccgatcagaaacatcgccatcggaaggcctgaagaggctactcaccccgacacgttgaaggcggggttggctgagttcatctccaccttgatcttcgtgttcgccggttcaggttccggcatcgcctaaaacaagctcaacgacaacggcgccgccactcccgccggcctcatctccgcttccatcgcccatgctttcggcctcttcgtcgccgtctccgtcggggccaacatccccggggggcacgtcaaccccgccgtcaccttccgggcctttgtgggcgggaacaacaccttactccgcggg

SEQ ID NO: 6619 - DNA, 257 bp, Glycine max
  Clone ID: LIB3074-020-Q1-E1-H10
ggaagggggggccttcactctgaaccaaataccatagtcttctctttgtccgtgacaaaacagttcccacaaaaaaaagaaaaaagaaaaaagagaagcacgaaaaaaaatgaagaagggtttctcccttgtgctgctgactcttctgatccagtacaacaacgttgtcaacgcctacaacaacataaactgtgtcacagaggattgcctcatccggatcaaggatttggaatcagagttctactttggatcccgtg

SEQ ID NO: 6620 - DNA, 369 bp, Glycine max
  Clone ID: LIB3074-020-Q1-E1-H11
gagcgccaatgtttttttcagaggagtttcatcttgtaatcaaaagagtttatcttatagtaagaaatcgatgtcttactccattttaaggaacaaaacaagagaacaatagcctgacaaagggtttagccataaaatcgaatccatcattgatttgagatattgataaggtgaatactcatttctcgtcaatgctaggcataatgcgggtatagggacctaaaaaagattatcttttcttcccatcttatgaactttaaggtgtatgaagtgtcatttcctatcttagattttaattttagtaggtagataaagagtccacttaacttaagttgatctaggccagaagcagacctacgtcaagataat

SEQ ID NO: 6621 - DNA, 124 bp, Glycine max
  Clone ID: LIB3074-020-Q1-E1-H3
ggaacctttgcattctattcattcaagattcagcaagtgcgttttggaagcagagaccgaaatacttcgagatggcctgtacaaagcaaactgctcgtaagtcaactggacgaaaagctcccag

SEQ ID NO: 6622 - DNA, 405 bp, Glycine max
  Clone ID: LIB3074-020-Q1-E1-H6
gataccaaaaacaaaacacaagccaagtgaaagtgagaaaaaataaaaatcaaagagcataatgtcagggatcattcacaagattggggagacccttcatgtgggagggcacaagaaggaggaggagcataagggtgagcaccatgctggagaatacaaaggggagcaccatggtgaacacagtagtgagtacaaaagagagcatcatggtgaacacaaagctggagagtaccatggtgagcacaagccagagcacaaagaggggttcctagacaaagtcaaggacaagatccatggtgagggcggcgccgccgacggcgagaagaagaagaaggagaagaagaagaacgagcatggccatgagcatgtgcatgacagcagcagcagcagtgacagtgattaaac

SEQ ID NO: 6623 - DNA, 399 bp, Glycine max
  Clone ID: LIB3074-020-Q1-E1-H8
ggcagcatccattcttgttctcttctttctttcgatcagggtttcccctcgtctccgggctcgtttcgttctcgaataatcgatctacgataatgactcgcggtagccagagggatcgtgatcgcgaaagggctcaggctagaactggtgctaaaggcaagcagaaagatgatggattgacccctgaacagcgcagggaaagagatgcaaaggcgctgcaggagaaggccgcaaagaaagcggcacagggtgcaggagggaataatgcagctggaagcaaaaaatacgcaataattcaatgagtagtttgagtttgccgtttgttgattgtggacatggaatttgtggaaattttatgttgcattagtcatggagtatgatgtgtttattaatgtaact

SEQ ID NO: 6624 - DNA, 192 bp, Glycine max
  Clone ID: LIB3074-020-Q1-E1-H9
gggtgtggttgacaatgccacgctttccacgtacgcttgggacacgtttgcacatccacccaccctttttcttccacaatcattctcttatcttcggcctcgggggtcaacacatatagtgtctagcgaaccatacatctaaacaacatggcattgcaagcagcacctagccttcacaccgtcactggcaat

SEQ ID NO: 6625 - DNA, 392 bp, Glycine max
  Clone ID: LIB3074-021-Q1-E1-A2
gaccgtattccttacgctctctcactcacaaacacacactgaactaaaaaacatcaaaagagacatggctgagcaaaccttcatcatgatcaagcctgatggcgtccaaagaggccttattggcgagatcattagcagatttgagaagaaaggtttctacttgaaaggtttgaaacttgttactgtggaccgtccttttgctgagaagcactatgctgatttgtctgccaagcctttctttagtggtttggtggattacattatctctggccctgttgttgccatgatctgggagggcaagaatgttgttacaactggccgaaagattatcggagccacaaacccagctcaatctgagcctggaactatccgtggtgactttgccattgaca

SEQ ID NO: 6626 - DNA, 202 bp, Glycine max
  Clone ID: LIB3074-021-Q1-E1-A3
gaccgtattccttacgctctctcagtcacaaacacacactgacttaacacacatcaggaggagacatgggtgagcagaccttcatggcgatgaggcctgatcgcgtccagagaggcctgagtggcgagatcattgccacccttgccgaagaaaggtttctacgtgagaggtttggaacttgttactgtcgaccgtccttttg

SEQ ID NO: 6627 - DNA, 165 bp, Glycine max
  Clone ID: LIB3074-021-Q1-E1-C3
accggggatacacgcacagcagagacacacagttactagtacagaagatcatggtctctctagcaatcttggctgctgttcaaccagctccgatgacgggccttgctggaagttccctctctgggcagaagctctccttcacgccctctcgccacagtgtcatct

SEQ ID NO: 6628 - DNA, 384 bp, Glycine max
  Clone ID: LIB3074-021-Q1-E1-C4
ggaagttgaaaaccccaaatctcagtttttcttctgcactcattctttcattctcattgccgtcacagagagagacaagaaacaatgaagtttaaccctagggtttcctcaagccgtcgcaagagccgcaaggctcacttcaccgctccgtcgagcgtgcgccgcgtcctgatgagcgcgcctctctccaccgatctccggtcaaagtacaatgtgcggtccattccggttcgcaaggacgacgaggttcaggtcgtgaggggaacctacaagggccgcgagggcaaagtggtccaggtctatcgccgcaagtgggtcatccacatcgagcgcatcactcgcgagaagggtaatgggcccaccgttaacgttggcattcaaccc

SEQ ID NO: 6629 - DNA, 119 bp, Glycine max
  Clone ID: LIB3074-021-Q1-E1-D1
gaagggggaaacgaaattaatagtgatttatgaagaatactaagaaagcgtgagtcatgtaggatggatgcctccaccgtcattcgttgaccggcgcgtagccagttcaaaatcgtttg

SEQ ID NO: 6630 - DNA, 309 bp, Glycine max
  Clone ID: LIB3074-021-Q1-E1-G1
ggaagaatatcatcaccatcatagtatttcgttagaaggggaatttggcagattcattagaagaaaatggcgggtggtggaaaggtttcgttcaaagtcacactcacctccgatccaaagttacccttcaaagtgtttagcgttccagaggcggcaccttttactgccgttctcaaattcgccgccgaagaattcaaagtcccgccccagaccagcgctatcatcaccaacgatggtgttggcataaatccccagcatagcgcaggcaacgtcgtccttaagcatggttcaaaactgcgcctgattccg

SEQ ID NO: 6631 - DNA, 386 bp, Glycine max
  Clone ID: LIB3074-021-Q1-E1-G2
gacattcaatcactcacacatgcccctatcttccttagctacctagattattcacttcaattcctcacaagcaacaccgtttcttgctccaatggcagctttgtatctcccaataagcatgttggcactcattgttgttgtttctcttggattgtggagtggtgttcaaggtgcaccacaagtgccatgctacttcatttttggtgattctttggttgataatgggaacaacaaccagctccagtctttggctacggctgattacttgccttatgggattgacttccctggtggaccttctggaaagttttccaatgggaaaaccactgttgatgcaattgctgaacttttgggaatcgatgattacatacctccatcagctgatg

SEQ ID NO: 6632 - DNA, 263 bp, Glycine max
  Clone ID: LIB3074-020-Q1-E1-A6
gatctggcagcagaagaacaagtagttgagaactaagaaggagaagcaaatggcttcctcaatgatctcttccccagctgttaccactgtcaaccgtgccggtgccggcatggttgctccattcactggcctcaagtccatggctggcttccccaccaggaagaccaacaatgacattacctccattgctagcaacggtggaagagtgcaatgcatgcacgtgtggccaccagttggcaataagaagtttgagactctttccc

SEQ ID NO: 6633 - DNA, 295 bp, Glycine max
  Clone ID: LIB3074-020-Q1-E1-B1
tctcgatttttgtgtacagaccgaacccgagctctgcatcgcaaccatgtcgaccaagcaaggtggaaaagctaagcctttgaagaatcccaagtctgataagaagaattacgacgagattgatgtggctaacattcagaagaaaaaggaacgggagaaggcgctaaaggagttgaaagccaaggcgcaacagaagggaagctttggaggttctgggctcaagaaaagtggaaagaaacaagggctctttaacatgattgtatgcattcaatattgagccccgtaattacagttg

SEQ ID NO: 6634 - DNA, 203 bp, Glycine max
  Clone ID: LIB3074-020-Q1-E1-B10
ggaaagagagtgaagagagaagaagatggtgtcgagcggagcggtgccgttttggagggcaacggggatgacatacatcacatactcaaacatgggcgcgggtctggtcatgaattgcctcaacgaactctacaaggctgaagccatctctcgtgataatgtccactttgctctctccaaatgggtcgacgccaagcctgaaa

SEQ ID NO: 6635 - DNA, 220 bp, Glycine max
  Clone ID: LIB3074-020-Q1-E1-B3
aacaggcgtcagtacaagacgacagggggggactatctcaagcataacgtgcatagactattgattaagacagcgaatgtcattgatttgctagctccaacaatgggttctagcaaaggggcattcattttagtacctgtgcttgataccttttcatccatgatcattgactcatcggttgcagacgcacgtacgggccgtaatcagtcctaatgccttc

SEQ ID NO: 6636 - DNA, 378 bp, Glycine max
  Clone ID: LIB3074-020-Q1-E1-B8
gactctcctctcagttctcacgcagagtactgcactgaacgaaccgtagttgttccgtttcagccatggtggagaacaatctcttcgaggatatatttagggtcgaaaaattaaaccccgatgacaaaagattattcgataaagtcactcgcattgaagcaagaagtgaaaagtttggcatgtttatgcacctggacattaattccgacatatatccgttaaaggttggtcagaagtttgctcctggtgctgttttaacacttaatcctgatggaactcgagacactggatattatacccagattagtccacaatcactgggcaacaattttgaataagtcctgtatgggaagctccacaggataacaaacggtttaa

SEQ ID NO: 6637 - DNA, 381 bp, Glycine max
  Clone ID: LIB3074-020-Q1-E1-C1
ggcctattgcacattcttcatcacctcattcaacatttctctctcccttagctagtttttaccaatggctgctgcggttagtgctgcagtctcttttccatccaccaagtctacctctctcccaagcaggacctccatcattaccccagagagagttgtattcaagaaggcttcattgcaatacagagatgtttgtagcagtggaagggtagtttccatcagagctcaagtcaccactgaggctccagccaaggttgagaaagagtccaagaaacatgatgaacgtgtggttgtgaacaagttcaaacccaagaccccttacgttggtagatgcctgctcaacacaaagatcactggggatgattctccaggagaaacttg

SEQ ID NO: 6638 - DNA, 381 bp, Glycine max
  Clone ID: LIB3074-020-Q1-E1-C6
gagtgcctccattcgggactgtaactagccgcagcacgaggagcagcctcacgaggagaaggatgtctcagaggaagttcgagcacccaatgcacggttcactgggatttcttcccacgaagcgtgctgctcgtcacaggggaaaagtgaaggcattccccaacgatgacccatccatggcacccaagctcactgcattcctgggttacaacgccggtatgactcacattgttacacaagtcgagaaaccatgatcaaagcttcacacgaaggaaacttgtgaacctgttacaattattgagacccctccaatggctactgttggtggtgtgggtcatgtcaaaactccacgtggtctcccaccatttgaaaccgtccggg

SEQ ID NO: 6639 - DNA, 196 bp, Glycine max
  Clone ID: LIB3074-020-Q1-E1-D1
gattaatcatcttcttcacatcccataatatgatgggttctgcaccagcacagcagcagatgtcatactatgatcacgttcagacgcgccatcaggagaagggaagcctctattcttgtttgtctagactctgttgctgcttttgctgctatcatggttgcacctgccgcctgggatgcacctgtcgttgctgtcc

SEQ ID NO: 6640 - DNA, 252 bp, Glycine max
  Clone ID: LIB3074-020-Q1-E1-D5
gaatcttggcagtctaatcagtgacaatgcaacacatgggtttgggtagcattcatcggcatagctctcacatggaatctttcagaaattggcatcagtaggggcatcgaattctccgaggtggcagattgcatacgacggtgaacataggtctgtagcaacaattggagtggttaagtaacctgatcaataatgaccctgcacacgttgctcatcgtgagattagtaggtatcagaagagcactgaggtcc

SEQ ID NO: 6641 - DNA, 221 bp, Glycine max
  Clone ID: LIB3074-020-Q1-E1-E7
ggcacaccaacaccaaaacaaacccactaagatggcttcctttgtatccttcctagtgctgcttcttgcagcccttatcctcatgcctcaagggcttgctacttactacaaaccaattaagaagccaccagtgtacaagcctccagtgtacaagccaccagtgtacaaaccaccggtttataagccaaaaccaccggtttacaagccgaaaccaccggttt

SEQ ID NO: 6642 - DNA, 354 bp, Glycine max
  Clone ID: LIB3074-020-Q1-E1-F1
ggagaaacaaagcagggataggaagaaggaaaaatggaaaagtatttcggaaacgcttatcgtggcgacccgggagtgccccattcggacccggatcgcttcgtcaacatatgggtcggatccgctgccttcgctgttctcacatatttcaatcccgacatgtggcagctctctaatcagttcaattggcatgacaacataatgctatacgaggcaatatcactggaaacaggcaaggaagatgaatcagccagatcagttcatgtgcaacccgacctcggaacagaaccacccgggaacactgcgactacacctggcccatttaccttccttaggccacttccatttttcttg

SEQ ID NO: 6643 - DNA, 167 bp, Glycine max
  Clone ID: LIB3074-020-Q1-E1-F4
cacggggtcaaccgacatagcacagataacaggcattctcttatagcaactacacatttctcagtgttcccaatgtctcactgcccacgcgaactcgacatccctggttggcctcccaagcttcatccctcaacaggcaccgttttgctcccaagtctaactttccc

SEQ ID NO: 6644 - DNA, 401 bp, Glycine max
  Clone ID: LIB3074-020-Q1-E1-F5
gttcttccaaaaggcatgaatctaagagtgctggaattgaaatggtgactgaaagggagcagggagagttgacggcaagagataatcctttgtgttcttcttgtcagatgcttgttctttggatccagaatcaactaaaacaaaaggcaacgaacgacagagtattcaactatgttaaaccacctgtttaaaagcctaccagttcaacctgaaaattcgttaatagcccttaaaatccttccaagaatcccaaactttccattcccaattggaaataaaccttttgtcctcaaaccagagcattaattctcaaaaacgtggaaaagggattacaaaattttgccttaatgggtttattgcctttgatgttcctcctccaaagggtccattgtggattcctg

SEQ ID NO: 6645 - DNA, 410 bp, Glycine max
  unsure at all n locations
  Clone ID: LIB3074-020-Q1-E1-A3
ggaggcgagggtaaggtcgcgttgtgttgcgtcgtgtcgtgcgctgttcctctgtttctcgtttttgtgttcagaccgaaccctagctccgcatcgcaaccatgtcgaccaagcaaggtggaaaagctaagcctttgaagaaacccaagtctgataagaagaattacgacgagattgatgtggctaacattcagaagaaaaaggaaggggagaaggcgctaaaggagttgaaagccaaggcgcaacagaagggaagctttggaggttctgggctcaagaaaagtggaaagaaataagggctctttatcatgattgtatgcattcaatattgagccccgtaattacagttgctaccatgataacttctcttagtantgtggcctactttattgccaatgtgtactgaactg

SEQ ID NO: 6646 - DNA, 272 bp, Glycine max
  unsure at all n locations
  Clone ID: LIB3074-020-Q1-E1-G10
caaatggcttcctcaatgatctcttccccagctgttaccactgtcaaccgtgccggtgccggcatggttgctccattcactggcctcaagtccatggctggcttccccaccaggaagaccaacaatgacattacctccattgctagcaacggtggaagagtgcaatgcatgcangtgtggccaccagttggcaagaagaagtttgagactctttcctacctgccagaccttgatgatgcacaattggcaaaggaagtagaataccttcttag

SEQ ID NO: 6647 - DNA, 377 bp, Glycine max
  Clone ID: LIB3074-020-Q1-E1-G11
gacgaagggggggccttcactctgaaccaaataccatagtcttctctttgtccgtgacaaaacagttcccacaaaaaaaagaaaaaagaaaaaagaaaagcactaaaaaaaaatgaagaagggtttctcccttgtgctgctgattcttctgatccagtacaacaacgttgtcaacgcctacaacaacaaaaactgtgtcacagaggattgcctcatcggcaacaaggatttggaatcagagttctactttggatcccatgtggccagaatgctctacgatgtgagccaatctgtgagtggcaaaacaagcaataaaaataacaaagctgttaattgtccaaataagcaaagctaccgaaactgctttccttccaaaa

SEQ ID NO: 6648 - DNA, 271 bp, Glycine max
  Clone ID: LIB3074-020-Q1-E1-G12
gatcacagcacgctctatcatctctctcagtgatggcaatcacattcacgtttttccgaccaaccatgatccgggcctccgctggttctccgggcaggtgcgacccgagcaacaggaagcccgtttcctccaattggtgggctccgctgtacggatggcccgcggatccggactacatcggcccatcgcagaatacaagttatcaatccgatctgaatcgggacgtgggcccgggccggaccaaatccaaattctcagcggggtgcttcac

SEQ ID NO: 6649 - DNA, 286 bp, Glycine max
  Clone ID: LIB3074-020-Q1-E1-G2
gatccaactctctaaacaacacattaacctttctcattccccatctcctcaccttattcagccactgctaatttctagggttccgaaatggacgctggcggaaagatcaagaagggcgccggaggaagaaagggcggcggccctaagaagaagccggtttcaaggtccgtcaaggccggtctccaattccccgtcggaagaattggccgttatttgaagaaaggaaggtacgcccagcgtgtccgtaccgggtgcccccgtttacttggccggagttctcgaggta

SEQ ID NO: 6650 - DNA, 244 bp, Glycine max
  Clone ID: LIB3074-020-Q1-E1-G3
gacaccaacacgataacagaccgactaagatggcttcctttgcgtccttcctacaggagcttcttgcagcccttagcctcatgcctgaggggcttgctacttacgacacaccagttccgttgccagcagtgtgcaatcctccactcgtcaagccaacaatagtgcatccatcggttttatcgccaaaaccatcggtttacctgccgcaagcatcggtttacactccaccacatgagaggtcacc

SEQ ID NO: 6651 - DNA, 316 bp, Glycine max
  Clone ID: LIB3074-020-Q1-E1-G4
gacccccaaaccctgctgcataggaagaaaccctagcctctcaccctccctgcgacacgatgcagatcttcgtgaaaaccctaacgggtaagacgatcacccttgaggtggagtcttctgacaccatcgacaacgtgaaggccaagatccaggacaaggaaggcatccctccggaccagcagcgcctcatcttcgccggaaagcagctggaggacggccgcaccctcgccgactacaacatccagaacgagtgcaccctccacctcgtcctccgtccccgcggtggcgccaagagcgcaagatgaagacctacacc

SEQ ID NO: 6652 - DNA, 313 bp, Glycine max
  Clone ID: LIB3074-019-Q1-E1-F3
gaaacaaattccactcaatgtgcaacttcatgaaaaaaatggttcatcttggcttcttccttctggggtgtctctccatgatctcatatgctaatggttatgtcagcaatgggggttggaccaatgcccatgctacattctatggtggaagtgatgcttctgggacaatgggtggggcttgtggttatggaaacttgtatagtcaaggatatgggactaacacagcagcacttaacactgccttgttcaacaatggcttgagttgtggctcatgctaccaaatcaaatgtgcaaatgacccacaatggtgcct

SEQ ID NO: 6653 - DNA, 193 bp, Glycine max
  Clone ID: LIB3074-019-Q1-E1-F4
cggggggtactgggtgggggtttctcatttctctgccgttccatggatcgggaaggacgatccaacggcggatcttgctactactccgttctcgggattcgtacggacgcctccttctctgatactcgcactgcctaccgcacactccctatgacgtggcacccggacaactgggctcagaaccctgccaccg

SEQ ID NO: 6654 - DNA, 364 bp, Glycine max
  Clone ID: LIB3074-019-Q1-E1-F8
cgggggattatatttgagttcaaacaaatcaaagccatggccacctacaacttctctattgttctctccgtctccctatccttctttttggtgctagttaccaaggcacactccaccgataccgtttctttcaccttcaacaagttcaacccagtccaaccaaacattatgctccaaaaagatgctactatttcatcctctggggtgttacaactcaccaaagttgggagcaaccgagtgcccacctcgggatctctcggtcctgccctttaagcttgccccaatccacattttgggacagcggaaaccgggaacggtaccaagctgggctacatccctttaaattccacaattttcccaccca

SEQ ID NO: 6655 - DNA, 405 bp, Glycine max
  Clone ID: LIB3074-019-Q1-E1-G1
gagagcgaaagagatgtcgttggtttcaagcatgttcgggcgtggagtggtgatggcggcgtcgcaagcaatgggaattggaaggagaagcgatggtggattgacgatagtgtgttcgtctaggccgcagaagaaagcgacggcgcatcacatgaagactcggcctcagaagacgcaggcatgggatagaaaccgcaagcccaccgtctacgatccactccctcctcttcctcctgattggaccctcgttattcccgctgacgcttcctctgctcccgttacgcctccggctccaactccctctggctaatcaatctctccgtactctctctcgttttcatgtagtcctaactttaattccagcagcttttctttcatgttttcatctcaaatcaaaccttcatc

SEQ ID NO: 6656 - DNA, 284 bp, Glycine max
  Clone ID: LIB3074-019-Q1-E1-G11
gatagtatcatcatacagagcattgaattcaaaaacttaagttcagtccttgtgttttgcttgcgtcctcaaaaccaaacatgtcgaacacatgcggcaactgcgactgcgctgacacgactagctgtaccaatggaaacagctatggtgttattgtatagactgacaagagttacatcgagactgttgtcatggatgttccagcagcttagcatgatgggaagtgcaagtgtggcactaactgcacttgcaacgactgcacctgtggctattatcgaatatgt

SEQ ID NO: 6657 - DNA, 369 bp, Glycine max
  Clone ID: LIB3074-019-Q1-E1-G2
gattatatttgagttcaaacaaatcaaagccatggccacctccaacttctctattgttctctccgtctccctagccttctttttggtgctacttaccaaggcacactcgaccgataccgtttctttcaccttcaacaagttcaacccagtccaaccaaacattatgctccaaaaagatgctagtatttcatcctctggggtgttacaactcaccaaagttggcagcaacggcgtgcccacctcgggatctctcggtcgtgccctttacgctgccccaatccagatttgggacagccaaaccggcaaagtaaccaactgggctacatcctttaaattcaacaatttcgcacccaacaaatcaaactcaac

SEQ ID NO: 6658 - DNA, 354 bp, Glycine max
  Clone ID: LIB3074-019-Q1-E1-G3
ggctttagattcttttcccctagattcagccacagttggaaaaaaaaaaaaagttgttcgagatggcacgtacgaagcaaactgctcgtaagtccacaggaggaaaggcacctaggaagcagctcgcaaccaaggctgcacgtaagtctgcaccaaccactggtggtgtgaagaagccacatcgttatcgtcctggtaccgttgctcttcgtgagattaggaaataccagaagagtaccgagcttttgatcaggaagctccccttccagaggctggttcgtgaaattgctcaagacttcaagactgatctgcgtttccagagccatgctgtgcctgcattgcaagaagctgctg

SEQ ID NO: 6659 - DNA, 216 bp, Glycine max
  Clone ID: LIB3074-019-Q1-E1-G4
gaagaagaagaaggagcatggccatgagcatggccatgacagcagcagcagcagtgacagtgattaaactgctgcatcacctatatatttaaaaggtttatgggaccatagtagcgagggctgtgccttaatttctctctctctctctctctctctctctctctctttttcctttttccctatcttgtgatccatttatgagtgagaaaaacacaa

SEQ ID NO: 6660 - DNA, 165 bp, Glycine max
  Clone ID: LIB3074-019-Q1-E1-G6
tcccgggacgcgtcagaactgcgaacagctgccaacagcggggggataggggtgatgtcaaagaactacgacactcggggtcgctcaccagactctcgaagtgatcgccgtgatctcccgtgccttcgttttgaggccagatggcgtagcagacacggatgggaa

SEQ ID NO: 6661 - DNA, 252 bp, Glycine max
  Clone ID: LIB3074-019-Q1-E1-G8
gggatttccaaagttttttaatagacggtaagtctcaaaacatcgaagaattacagacgaatatgcaaaacaaactgaattgtgtgaatcgaaaactaaacattgctattgtaaaagttgcaaatgcttataaacaccctaatattattgcagaatttatagctggacaattaaagaatagagtttcgtttcgtaaagcaatgaaaaaagctattggattaactgaacaggcgggcacaaaacgagttcaag

SEQ ID NO: 6662 - DNA, 269 bp, Glycine max
  Clone ID: LIB3074-019-Q1-E1-H11
ggcacaagtgagtttgttgatcgagataactagaaacagtgtgatgaaaatgaaggtccttgttttcttcgttgctacaattttggtagcatggcaatgccatgcgtacgatatgttccctctccgaatgaacactggctatggtgcccgtactccggaggtgaaatgcgcaagttggacgcttgctgtggcaatacaaaacatctttggctttgagatcattcctgaagaatgcgttgactcaacacaggaatacatccatggtgaac

SEQ ID NO: 6663 - DNA, 194 bp, Glycine max
  Clone ID: LIB3074-019-Q1-E1-H2
gggatttccaaagttttttaatagagggtaagtctcaaaaaatcgaagaattacagacgaatatgcaaaaaaaactgaattgtgtgaatcgaaaactaaacattgctattgtaaaagttgcaaatgcttataaacaccctaatattattgcagaatttatagctggacaattaaagaatagagtttcgtttcgt

SEQ ID NO: 6664 - DNA, 400 bp, Glycine max
  Clone ID: LIB3074-019-Q1-E1-H4
ggcacaagtgagtttgttgatcgagataactagaaacagtgtgatgaaaatgaaggtccttgttttcttcgttgctacaattttggtagcatggcaatgccatgcgtacgatatgttccctctccgaatgaacactggctatggtgcccgtactccggaggtgaaatgcgcaagttggaggcttgctgtggaagcacacaacatctttggctttgagaccattcctgaagagtgcgttgaagcaacaaaggaatacatccatggcgaacaatatagatcagactccaaaacagtttaccaacaagctttactttatgccaaagaactccaagtccaacccaagggcacatttgtgttcaatatagattgcaacgttctctccaataatccatactacaaa

SEQ ID NO: 6665 - DNA, 184 bp, Glycine max
  Clone ID: LIB3074-019-Q1-E1-H5
gggtgagtggcgagatacagaagcatttgcctacgttgttcgtgttggatgcatcacacctctcattgattgggttaagcgccaaagtttccgaatttgcataatggtattgctagttgggcttacattgcttttgggtctcttcctcgctgttcttctactcagaccacgagaccgcacatct

SEQ ID NO: 6666 - DNA, 216 bp, Glycine max
  Clone ID: LIB3074-019-Q1-E1-H6
gatccttcgtccagctagcaccacattcacctgaggcttccaaagcaatggcttcccttgcagcatccactgctgctgcttcccttggcatgtcagaaatgcttggaaaccccatcaacttcagtggtgccacaaggccagctccatctgcttctagtcctgcctccttcaagactgtggctcttttctccaaaagaaaggctacaacaacactcc

SEQ ID NO: 6667 - DNA, 366 bp, Glycine max
  Clone ID: LIB3074-019-Q1-E1-F2
gacgatgagtcgatttgataactaagatattgttattcgtgatattgatccaatttgatatcatcgaaatccaatttataccattgttgaattaattatcgatgaaagatttatcatctctatgggattaaatcccgaattttttattggaaatttaagagaaataaaacataataaagattatggaagtaaatattcttgcatttattgctactgcactgtttattctagttcctactgcctttttacctaaaaattacgttaaaaccggaagttcaagtgactaaattcaatgaaatccgacttcctcatttttaacaaatgttatcaatgatttaaaaaaattaaaaaaggtttcaaattttg

SEQ ID NO: 6668 - DNA, 210 bp, Glycine max
  Clone ID: LIB3074-019-Q1-E1-H7
gaaaacgcagacaatgggatccttcgtccagcttgcaccacattcaccggaagcttccaacgcactggcttcccttgcatcatagacggcagcatgcttcccctgggatgttaccaatgcttgtgaaccctatcaaggtcactagtgcaagactgccatctccatctgcgtctacaccagcctcattcaccacagtggcatctttccgcc

SEQ ID NO: 6669 - DNA, 407 bp, Glycine max
  Clone ID: LIB3074-019-Q1-E1-H8
ggcacaagtgagtttgttgatcgagataactagaaacagtgtgatgaaaatgaaggtccttgttttcttcgttgctacaattttggtagcatggcaatgccatgcgtacgatatgttccctctccgaatgaacactggctatggtgcccgtactccggaggtgaaatgcgcaagttggaggcttgctgtggaagcacacaacatctttggctttgagaccattcctgaagagtgcgttgaagcaacaaaggaatacatccatgggggaacaatataggatcagactccaaaaaagttaaccaacaagcttacttttatgccaaaggactcgaagtccatcccaacgacacatttgtgttcagtatagaatggaccgtactctctaatattccatacgacaaaaaaca

SEQ ID NO: 6670 - DNA, 150 bp, Glycine max
  Clone ID: LIB3074-019-Q1-E1-A11
caatggtactgctgcaacaagacaacaggagggtacagcagcataaagaccatagaatggtacggctgagattaacactactgaacggtaccgtcgtcatcagaccacagcatggtccagctgttagacgactacatatgggtcaggctg

SEQ ID NO: 6671 - DNA, 345 bp, Glycine max
  Clone ID: LIB3074-019-Q1-E1-A12
gcacaagtgagtttgttgatcgagataactagaaacagtgtgatgaaaatgaaggtccttgttttcttcgttgctacaattttggtagcatggcaatgccatgcgtacgatatgttccctctccgaatgaacactggctatggtgcccgtactccggaggtgaaatgcgcaagttggaggcttgctgtggaagcatacaacatctttggctttgagaccattcctgaagagtgcgttgaagcaacaaaggaatacatccatggcgaacaatatagattagaatccaaaacagttaaccaacaagcttacttttatgccaaagacctcgaaatccatcccaaagac

SEQ ID NO: 6672 - DNA, 270 bp, Glycine max
  Clone ID: LIB3074-019-Q1-E1-A2
gggcagcagaagaacaagtagttgagaactaagaaggagaagcaaatggcttcctcaatgatctcttccccagctgttaccactgtcgaccgtgccggtgccggcatggttgctccattcactggcctcaagtccatggctggcttccccaccagaaagaccaacaatgacattacctccattgctagcaacggtggaagagtgcaatgcatgcaagtgtggccaccagttggcaagcagaagtttgagactctttcccaactgccagac

SEQ ID NO: 6673 - DNA, 182 bp, Glycine max
  Clone ID: LIB3074-019-Q1-E1-A3
gaagccactctaaggaaaatggcggtgcctctactctcgaagaagatcgtgaagaagagggtgaagaagttcaagaggcctcacagtgacaggaagatttctgtcaagataaactggcgcagaccaaagggtagcgattcccgtgttacgagaaagttcaagggatgcactttgatgccaaa

SEQ ID NO: 6674 - DNA, 228 bp, Glycine max
  Clone ID: LIB3074-019-Q1-E1-A5
gacactacgggacactggggcagacttaagttggtcggtcaagagaattacaaccattgcgctgaaaaggaaggcccttgtttcctacgttgcaaaaatttgggtaccacggaaaggcaatgcgtcccaaaggttccttctccaaatcaaaacgggtcaaggtccccgtaccccggcggtgaaatgcccaagttggaggcttgcggtggcagcacacacaaccgttgg

SEQ ID NO: 6675 - DNA, 285 bp, Glycine max
  Clone ID: LIB3074-019-Q1-E1-B1
gataatacaacctcataaagagttctttcaaaatgcaaatatttttaaccttcgctgcccccaacgttgtgccattggcacccacaaagagtgtctcccatattaccatctttcccaccaaattgaaagccccgcgctcctcacctcgttactctccgattagggttgcaaccgtggagcccgacacttcaactgtcgactacaactctgcgttctcagtgtttcctgcagaagcatgcgaaactgtaggaagggaagcctgcatggcggagatgtaccctgaaa

SEQ ID NO: 6676 - DNA, 318 bp, Glycine max
  Clone ID: LIB3074-019-Q1-E1-B2
gagcgccaatgtttttttcagaggagtttcatcttgtaatcaaaagagtttatcttatagtaagaaatcgatgtcttactccattttaaggaacaaaacaagagaacaatagcctgacaaagggtttagccataaaatcgaatccatcattgatttgagatattgataaggtgaatactcatttctcgtcaatgctaggcataatgcgggtatagggacctaaaaaagattatcttttcctcccaacctaaggactttaagggggatgaaatggcaattcccaacctaaaatttaaatttaataagttaattaagagt

SEQ ID NO: 6677 - DNA, 198 bp, Glycine max
  Clone ID: LIB3074-019-Q1-E1-B5
gacaactcagtttgttgatcgacataaccagaaacagtgtgatgacaatgaacgtccttgttctcctcgttgctacaattttggtggcatggcaatgccacgcgtatccatatgttccctctccgaatgaacactggctatggcacccgtagcccggaggtcaaatcctcaagttcgaggcttcctgtgccagcacac

SEQ ID NO: 6678 - DNA, 235 bp, Glycine max
  Clone ID: LIB3074-019-Q1-E1-B9
caaccagccatggggatacaagaagcagaaagaggtgcactcgcaaaagcgtgaacaagcagtccatgcagaaacgggctcttcactgatggcatttgtagcacgctggggtgtcacgttcactgtccacatgtcgtcagttatatgcgtcctctcgctctcaaggaactcctcatcacacatagttgtggctagtggtggcatgaaggtcctcacagacaggcgttattgaatt

SEQ ID NO: 6679 - DNA, 309 bp, Glycine max
  Clone ID: LIB3074-019-Q1-E1-C1
gaacggaaaagcactggcgcagctaccctgaggcttctcttctcttctcttctctgtcgtgagtcaccatggtgagggttagtgtgctgaacgatgctctgaagagcatgtacaatgctgagaaaaggggaaagcgccaagtcatgattaggccatcctccaaagtcattatcaaattccttttggtgatgcaaacacacggatacatcggagagtttgagttatgttgatgaccatatgggctggtaaaatcctgggctgaattgaccggtagactgaacaactgtggggttattagtccccgttttg

SEQ ID NO: 6680 - DNA, 340 bp, Glycine max
  unsure at all n locations
  Clone ID: LIB3074-019-Q1-E1-C2
ggcgggaaccgtgacgaacccgttcaacgaggggttctatcagggtcctcccacggcgccgttggaggctgtttcggcctgcacggggattttcgggagcggggcatatccaggttatccgggtcgggttctggtggacaagacgacgggggcgagctacaattcgtacggcaccgggaacgggaggaagtacctcttgccggccatgtgggacccacagacctccgcatgcaagacacaggtgtaaacaaaagacttgggtcaacgtgtaaattcctgttttctaaatagtcaatgttttancatattgatatcaataaattgtgggaatagaatatta

SEQ ID NO: 6681 - DNA, 252 bp, Glycine max
  Clone ID: LIB3074-019-Q1-E1-C4
gatatctggcagcagaagaacaagtagttgagaactaagaaggagaagcaaatggcttcctcaatgatctcttccccagctgttaccactgtcaaccgtgccggtgccggcatggttgctccattcactggcctcaagtccatggctggccttcccagcaggaagaccaacaatgacattacctccagtgctagcaacggtggaatagttcaatgcatgcaagtgtgggcaccagttggcaagaagaagttt

SEQ ID NO: 6682 - DNA, 191 bp, Glycine max
  Clone ID: LIB3074-019-Q1-E1-C8
ccgggtctactcacaaatccgaaccgctgcgaccagtggacagaacgggaatcccaatctcatcttccatttccaccatcaatactatttgcttgacgttttcaaccttctctaaccattgcagagttggatagagcgtctcagatccattccatagccatgtctggtgtcagcccgctttctcaagcttg

SEQ ID NO: 6683 - DNA, 238 bp, Glycine max
  Clone ID: LIB3074-019-Q1-E1-C9
gatacaagaagcagaaagagaagcattagcaagagcaagaagaactagtctaagcacaaatggcctcttcagtgatggcatcggtggccctcaaacctgcccctttcactgttgagaagtcctcagttagaggccttccctccctctcaaggaaatcctcttcattcagagttgtggccagtggtgggaagaagatcaagacctgacaaaccttatggaaataactggtggaatggcg

SEQ ID NO: 6684 - DNA, 293 bp, Glycine max
  Clone ID: LIB3074-019-Q1-E1-D1
ggttctagtgtatgtgattgttgtgactcgttcttcttcgtcgttatcttcttcttttgttgtttgtgtgtttgttttttctctcacctgaaaatgtcttgctgcggtggtaactgtggttgcggaagcgcctgcaagtgcggcaacggctgcggaggctgcaagatgtacccacacttgagctacaccgagtcaaccaccaccgagaccttggtcatgggagtggcaccagttaaggctcaattcgagagtgctgacatgggtgttcccgctgagaaacactgctgcaaatg

SEQ ID NO: 6685 - DNA, 205 bp, Glycine max
  Clone ID: LIB3074-019-Q1-E1-D2
ggtgtgagtaagatcataagcaaaagcaacggtgaactgaagatgccggttctcaccctttctactaacgttagccttaatgatttagacgcctcttcgatactctcccaagtaatctccaccgtcgccagcatcatgcgcacacctgagccttttgtgatggtttcactggaaggatcaacaaccacatgttttggtgggactg

SEQ ID NO: 6686 - DNA, 159 bp, Glycine max
  Clone ID: LIB3074-019-Q1-E1-D3
aggaacgccgtcgtcgggatgctgcaacggagtgaagagcctcaatgccgccgccaacaccaccgccgaccgccagacggcgtgcaactgcctcaagtcggccgccagccaagtctcccgcttcaccgccaacaacgccgcctcgctccccggcacctg

SEQ ID NO: 6687 - DNA, 214 bp, Glycine max
  Clone ID: LIB3074-019-Q1-E1-D5
ggcacaagtgagtttgttgatcgagataactagaaacagtgtgatgaaaatgaaggtccttgttttcttcgttgctacaagtttggtagcatggcaatgccatgcgtacgatatgttccctctccgaatgatcactggctatggtgcccgtagctccggatgtgaaatcgccacgttggaggcttgctgtggaagcacacaacatctttggctt

SEQ ID NO: 6688 - DNA, 289 bp, Glycine max
  Clone ID: LIB3074-019-Q1-E1-D8
gactccgcagctgcagcactcagaaccctagagaggacgagagagcgtgcaactttcggcaaccacagaccatgacattcaagcgcaggaatggaggtcgcaacaaacacggccgcggccatgtcaaattcatccgatgctccaactgcggaaaatgctgccccaaggacaaggccatcaagacgtttttggttaggaacattgttgaacacgctgcagtcagagatgtgcaggaagcttgtgtctatgaacaatatacacttccagaactctatgtgaagatgcagta

SEQ ID NO: 6689 - DNA, 262 bp, Glycine max
  unsure at all n locations
  Clone ID: LIB3074-019-Q1-E1-A10
gatacgttatccgagcgagatagagaacagatagagataacactaggcagcacaagagaatggcgctgctgtgtggttcaacttccgtgactccattcctttctcacaagaacgttggtttcgcaacctcagcaaaatcttcctttgttggctttcaattgccgcttccaaagctcacattatcttcttccgttcgaacccttctgccggcaacatcncgtgtccgttgccagcaagagtctactactgttacccctgtcgc

SEQ ID NO: 6690 - DNA, 194 bp, Glycine max
  unsure at all n locations
  Clone ID: LIB3074-019-Q1-E1-E2
gacatcaaacatatacacaaaagagcactgaccaaaccattttattttatttttgaatcaagggtgagggccttccatggcttccgcttgtgcttcctctgcaattacagctgttgccatctctacgccgagttccgggcagaagaatggatcaggaggttgttttcttagtggaaggaaattganggtgaaaa

SEQ ID NO: 6691 - DNA, 227 bp, Glycine max
  Clone ID: LIB3074-019-Q1-E1-E6
cagaagtgcttacagatgacaacagcgggggacatgagacatatacacaggagagcactgaccaaaccattttattttatttttgaatcaagggtgacggccttccatggcttccgcttgtgcttcctctgcaattacagctgttgccatctctacgccgagttcctggcacaagaatggatcatgaagttgttttcttaatggaacgaaatttacggtgaaaaagg

SEQ ID NO: 6692 - DNA, 258 bp, Glycine max
  Clone ID: LIB3074-019-Q1-E1-E8
cgggggacgatgaatcgatttgataactaagatattgttactcgtgatattgatccaatttgacatcatcgaaatccactttataccattggtgaagtaattatccatgaccgatttatcatctctatgggattcaatcccgcattttttaatggaaatttaacacaaatagaacataatatagattatggaagtcaatagtcctgcatttactgccactgcactgtttattctacttcccactggcttttttactta

SEQ ID NO: 6693 - DNA, 279 bp, Glycine max
  Clone ID: LIB3074-019-Q1-E1-F1
gaagagaggatttgggattgggaaggcgagggattgcgctgcgtctcttcctcttctctttcgattcatccctcattcataatcttccaatccaacaacctcagcctcacactcacacatacacacatctgaacgcgtatcgtccctcccatggcttcaaagcgcatcctcaaggagctcaaggacttgcagaaagacccaccaacttcttgcagcgctggtcgagtagctgaggacatgttccattggcaagcaacgattaggggtcctgcggatagt

SEQ ID NO: 6694 - DNA, 59 bp, Glycine max
  Clone ID: LIB3074-019-Q1-E1-F11
acacaaggggagagacaacaggcattcttttcagctgtattaatttctctccttgtgca

SEQ ID NO: 6695 - DNA, 296 bp, Glycine max
  Clone ID: LIB3074-018-Q1-E1-G11
aagggtggcaaaaaaacaaaaaaggggagactatttagagacttgccatggacgtttcattgggagtgtattgtcctctgcttggtcttcacgacaatatggcacttactgttgctcatgcccaattcttcccgttcagatgggcacccaagtcgaaacttgcctccgtcgttggaagtcaatgcgcctcctccccttttggtgtgaaaaaccctaattgtaatcgacctgaaacttttgatcttcatccgaatacgctcgcttatcacattcatgcgttccaatttaggaaacat

SEQ ID NO: 6696 - DNA, 279 bp, Glycine max
  Clone ID: LIB3074-018-Q1-E1-G3
gggtgctgtgagtgagacaccgatagatagagagcgcgggataacctaaacctatctttcttctctctctgtgtgtgcgcttcaacggcaaccagaagcagccatggccactgcaaggactgtgaaggatgtttcacctcatgagttcgttaaggcgtactcctctcacctcaagcgatccggcaagatggagctgccagagtggactgatattgtgaaaactgcaagatttaaggagttggctccctatgatcctgactggtactatgtcagagctgc

SEQ ID NO: 6697 - DNA, 340 bp, Glycine max
  Clone ID: LIB3074-018-Q1-E1-G5
ggcacaagtgagtttgttgatcgagataactagaaacagtgtgatgaaaatgaaggtccttgttttcttcgttgctacaattttggtagcatggcaatgccatgcgtacgatatgttccctctccgaatgaacactggctatggtgcccgtactccggaggtgaaatgcgcaagttggaggcttgctgtggaagcacacaacatctttggctttgagaccattcctgaagagtgcgttgaagcaacaaaggaatacatccatggcgaacaatatagattagactccaaaacagttaaccaacaagcttacttttatgccagagacctcgaagtccatccc

SEQ ID NO: 6698 - DNA, 132 bp, Glycine max
  Clone ID: LIB3074-018-Q1-E1-G6
ggcaggtgcaacaccaaaaaattgcgtaaggtcaacccaaaccggaaacaacaatggggattgatttcaaagccgggggttaaagcaaaaaaaccaaaagaacagcaccccagtccaatgatatctatctta

SEQ ID NO: 6699 - DNA, 172 bp, Glycine max
  unsure at all n locations
  Clone ID: LIB3074-018-Q1-E1-G7
gaagcttcaataagtaagtatcaatggcttccgaagaatcccagaacaagccccccagcgagcagtccactaccgaactcatcacgagcgcgaacctggtggcggaggcggcgcantcngctctgaagagcgacagcgacaaagtggacaaggccaaggtggctgacgctgc

SEQ ID NO: 6700 - DNA, 409 bp, Glycine max
  Clone ID: LIB3074-018-Q1-E1-G9
atataagtggaatccaatggacactgctggctaaagaaatagcagtacagagcaaatcaagggaattaaatagcacaaattattgaacaaagaaagctagaaattaagaggtcccaaaagctgcacacattgcccttcttgtccaggaatttgagatctaacattaacaacaactatctaagcactagcaagctagttagcaaggcaataatgaagttcttgttccagtgcccctgctgctcttgcttttgcttcatgaagccaaagcaagggaaggcaaaggtcaaggaagtcaaagaaaccaaagttgaaaaaaaaaaaggtgaagacaagaatgaagaaaaaaaaattaacatgtaactccatttcaggccccctttgggtatactaatatttttttttgcttttt

SEQ ID NO: 6701 - DNA, 288 bp, Glycine max
  Clone ID: LIB3074-018-Q1-E1-H1
gatagcaacagcatatcatgcattgtggtcaacaacttaaattcactccctgtgtggtgcttacgtccacaaaaccaaacatgtcaaacacatgggacaactgcgactgcgctgacaagactagctgcaccaagggaaacagctctcgtgttaatgtaaacaatgagaacagttacatcgacgactgttgtcatcgatgttcgaccagctgatcatgataggaagtgtcagtgtagcactaactgcacgtgcacagactgcacctgtggacattaatgaatatgtatg

SEQ ID NO: 6702 - DNA, 82 bp, Glycine max
  Clone ID: LIB3074-018-Q1-E1-H11
gcacaagtgagtttgttgattgagataactagaaacagtgtgatgaaaattaaaggccttgttttcttccttgccacaattt

SEQ ID NO: 6703 - DNA, 381 bp, Glycine max
  Clone ID: LIB3074-018-Q1-E1-H12
gcccctattccacacacaagaagactcctcaatcatccatagacatggccaccgtcacttctgcagcagtttctattccctcattcactggcctcaaggcaagcgcaggcaaagtgagtgccgccgcagttaaagtctcagctccccaagccacaaggttctgcggcatcaaggcttccctcaaagacgttggagtcgctgttgtggccactgctgcgagcgcagttctagctagcaacgccatggccattgaagtgttactgggcactgatgacgggtctctggttttctctcccaactctttctccgtggcccctggggaaaagatcgtgttcaagaacaacgcaggtttcccccacaacgttgtgttcgacgaggacg

SEQ ID NO: 6704 - DNA, 289 bp, Glycine max
  Clone ID: LIB3074-018-Q1-E1-H3
gatagaagaagcagaaagagaagcattagcaaaagcaagaagaactagtctaagcagaaatggcctcttcagtgatggcatctgtggccctcaaacctgcacctttcactgttgagaagtcctcagttagaggccttccctccctctcaaggaactcctcttcattcagagttgtggccagtggtggcaagaagatcaagactgacaagccttatggaattaatggtggcatggctttgagggaaggagttgatgcatctggcaggaaaggaaagggaaagggcgttta

SEQ ID NO: 6705 - DNA, 380 bp, Glycine max
  unsure at all n locations
  Clone ID: LIB3074-018-Q1-E1-H4
gagaatagagagctcctccaattagggtttttgtgatctgcagctacgatgggtaagggaacggggagtttcggtaagaggaggaacaagacccacaccctctgtgtgaggtgtggccaccgcagcttccacctccagaagagtcgttgctctgcgtgcgcttaccccgctgcgcgcaccaggaaatataactggagcgtgaaggccattangagaaagaccaccggaactggaaggatgaggtacttgcgtaacgtgcctcgcagattcaagagcggcttcagagagggtaccgaagctgcacccaggaagagaagagctgctgcctctgcctaagctttgaatgaatgacagcaatttttgctgggtcagtgaattat

SEQ ID NO: 6706 - DNA, 419 bp, Glycine max
  Clone ID: LIB3074-018-Q1-E1-H5
agggtggagaatgagtctgatgagtcttctacctcctcttgctgctgcttcttacacaaacacagttcctaaactgaaaactcacagtccaaaccttgtacttggacaaagggtcctacctaatctcctctcattggcccttgctgtaaccttagcctctcctttaccttcatatgcaatcccatcccttaattctcaatcccctccaatctctttcaccgctcctttttctcaatccaagaacttggagcttggactagaaaatggaaaaattagaccttgcccatcaatcaatccaggttgtatatcaacaaatcccaagtcatcatcttttgcgtttccttggcttattccctcaaattccttggacgatgcaattcagaaactacgtgaagcaatcctaaagacccagaaaaatg

SEQ ID NO: 6707 - DNA, 328 bp, Glycine max
  Clone ID: LIB3074-018-Q1-E1-G10
gagtaagagcaggttgtaatttctaatggaccgtaagggttgtgaaacaagcaggaaaaagccatggtgcacgtttctttcaaggagattgatgagaacaccatcaaggatcttcggcggcactagcatcatgtatctatgcgtaccttcttcacttcggctcctcactagcatcgtcctctccatagggaattattaagtgtccaataaaccccttcgcatcatctgtagaactcctataggacaattgcaccgtgtttcacaaaacctgcaccgattcttctgcggtgacgctcttcacctatgaatgattcgtctcggtatcttc

SEQ ID NO: 6708 - DNA, 402 bp, Glycine max
  Clone ID: LIB3074-018-Q1-E1-H6
ggtgaatcggtgttgtcttgttggtaaagaaagaaagagaagagaagaatcgaagacgaagatggaggacgcatcagcatcaaagttcattccacaccaaatcggaggggtccaaaacgacgcgcttcgattcggtctccatggagtcaagagcgacatcgttggttctcaccctcttcaatcttcactccaatctacaaggagaatggatgaagcgatgaagaggcaatgcgaagttaacctgtacggaactgcttttcccatgaaggaggagcttgacaggcaaatcctgtccaagttccagcggcctcctggaccaattccttcttcaatgctgggtttggagactgttacacgaagtgttgatcactttggttttgacgaatgtctaaatgacccccg

SEQ ID NO: 6709 - DNA, 313 bp, Glycine max
  Clone ID: LIB3074-018-Q1-E1-H7
gacccaaaaactaccatagccactactgattcagaaactcttaggcatagcgaaaatgacaaccaccttcgcgaccgtcgcaggactcggtggtgcatcactgtcatccacctcatctcgtctcacctcagggtttgtgaaatcgccagtgagtgctaggaatcccttgagacaagctgtggcaatgggaaatgggagggttacatgcttcgagaggaattggctgcgggcagattacagtgtgattgggtttgggttgattggttggctaccaccctcaagcgtaccggctatcaacggtaaaagtctgact

SEQ ID NO: 6710 - DNA, 347 bp, Glycine max
  Clone ID: LIB3074-018-Q1-E1-H8
agaagaaaaagagagagagagagatacaaaatagaaagtaaaaattagaaaaactcttgtacttggtttcatgccagattagggaactcttttagttgtcaattagatcacagagacatggaggttgctatggaactggaagatgatctttttttgctgatttgagcaaggaaattgctctactaattatggatgaagatgaagatcctcttgcttcttgtcctcctgactctcttcaggctttttctggggcaattcatcctcctccacagtttgctttcatctatgagcatgctttgagaagagaaagcaaagggacaggtgtgtttatccctcaagcaacacag

SEQ ID NO: 6711 - DNA, 274 bp, Glycine max
  Clone ID: LIB3074-018-Q1-E1-H9
gaaagagaagcattagcactaggagcagcaacaactagtctcagctgaaatggcctcttcagtgatggcatctgtggccctcaaacctgcccctttcactgttgagaagtcctcagtgagaggccttccccctctctcaaggaactcttcttcattcagagttgtggccagtggcaagaagatcaagactgacaaaccttatggaattaatggtggcatggctttgagggatggaactgatgcatctggcaggaaaggaaagggaaagggtgtt

SEQ ID NO: 6712 - DNA, 269 bp, Glycine max
  unsure at all n locations
  Clone ID: LIB3074-019-Q1-E1-A1
gacacttgtattgtctcaagcaaccctggcaatggcaacccaagcctctctcttaaccccacccctctccggtctcaaagccagcgaccgcgcctccgcgccatggaagcaaaactccagcctctccttctccagcccgaagcccctcaagttctccagaataatcagagcagcagttgccgacgataccacagaggcaccagcaaaagtagaggctgcaccggtcgggttcaccccaccagaacttgacccanacaccccttccccga

SEQ ID NO: 6713 - DNA, 334 bp, Glycine max
  Clone ID: LIB3074-018-Q1-E1-E1
gaaccaagtttgcttgcgtgtatattcattttagcatcaaggttgaatctcagagaaaaacaaacatcgacaagcatgtctggaagaggaaagggaggcaagggtctcggaaagggaggagccaaacgacaccgtaaggttctgagggataacattcagggaatcaccaagcccgcgattcgccgtctggccagacgtggtggcgtcaagcgtatcagtggtcttatctatgaagaaactcgcggtgttctcaagatctttctagagaacgtcattcgcgacgctgtcacctacactgaacacgctcgccgcaagaacgtcactggcatggacg

SEQ ID NO: 6714 - DNA, 332 bp, Glycine max
  Clone ID: LIB3074-018-Q1-E1-E10
gaccaacacaaacaatagtgcatagcgtttttcattgtgcattatccaatggccaccacagcagctctatccggaaccatggtgagcacctccttcatgaggaagcaacctatgacgaccaagagcctaaagacattccccaacgctctttttggtctgaaaggtggacgaggtggtcgtgtaacttgcatggcctcgtacaaggtgaagctcataaccccagaaggagaagtggagtttgaatgcccagatgatgttttcattgttgacaaggctgaggaagaaggcattgaacttccctactcgtgcacggctggttcttgcgtttcacg

SEQ ID NO: 6715 - DNA, 131 bp, Glycine max
  Clone ID: LIB3074-018-Q1-E1-E12
ggcacaagtgagtttgttgatcgagataactaaaaacagtgtgatgaaaatgaaaggccttgttttcctcgttgccacaattttgggagcatgggaaagccaagcgtacgaaatgtttcctccccgaatga

SEQ ID NO: 6716 - DNA, 283 bp, Glycine max
  Clone ID: LIB3074-018-Q1-E1-E2
ggcagcagaagaacaagtagttgagaactaagaaggagaagcaaatggcttcctcaatgatctcttccccagctgttaccactgtcaaccgtgccggtgccggcatggttgctccattcactggcctcaagtccatggctggcttccccaccaggaagaccaacaatgacattacctccattgctagcaacggtggaagagtgcaatgcatgcaggtgtggccaccagttggcaagaagaagtttgagactctttcctacctgccagaccttgatgatgcaca

SEQ ID NO: 6717 - DNA, 104 bp, Glycine max
  Clone ID: LIB3074-018-Q1-E1-E4
cgtagtaagcgatgaaatgcttcggggagttgaaaataagcgtagatccggggattcccgatataggtcaacctttcgaactgctgctgaatccacgggcagac

SEQ ID NO: 6718 - DNA, 272 bp, Glycine max
  Clone ID: LIB3074-018-Q1-E1-E5
gacagacgcagaggaggagatggagacgatgatgatgatgagctgcgtttcgatttcgagttcagtgacaagaggcgctattagcgtgggttcctcttcatctttgtgtttcggcacacccaagttgttcaattcagcaagggtggcggtgaatggtcggcgaagaaacaaaggtttgagttgcaacgccatgttcggtctgggggtgcccgaactggtcgttattgccggcgtggccgccctggtttttgggcccaagaaattgcctgaag

SEQ ID NO: 6719 - DNA, 99 bp, Glycine max
  Clone ID: LIB3074-018-Q1-E1-E7
gtgtattgagtaggaaaagtggtgtctgtgagttatgtgaacgtttgttctgttcttgttttatcatcaagcgaaaaaatatgtgattgttttattgac

SEQ ID NO: 6720 - DNA, 239 bp, Glycine max
  unsure at all n locations
  Clone ID: LIB3074-018-Q1-E1-E8
gcaccaagtgaaccaatatagcccaagccctatacaaccaaaccctaacacacacccatttgattcagtttccatggctagcctcaaggttgcatttttggctgtagtgctctgcatggttgtggtgagtgcacccatggcacatgcagctatcacgtgcgggcaggtgacgagtancctggccaattgcatcggttacctccagaagggaggaacgccgttgtcgggatgctgcaacg

SEQ ID NO: 6721 - DNA, 280 bp, Glycine max
  Clone ID: LIB3074-018-Q1-E1-E9
gagaaaagaaagagaaagagcgatgccaggatcattgaggcctcggtttgttatctttggttcttccatcgttcaatttggtttttatgatgaaggttgggtggctattctttctcatttgtatgcccgcaaggttgatattgatttgcgaggatatgctggttggaattcaaggcgtgctgtgcaggttctggataaagtttttcccaaggatgcccctatacaaccttcattgggtattgtctactttggtggttatgaattctctgccccctcctca

SEQ ID NO: 6722 - DNA, 294 bp, Glycine max
  Clone ID: LIB3074-018-Q1-E1-F1
ggctcttcgttggcgcctctcctcagacgagttgcttcagttggaggatgcagcaaatgaatcacctcgcaggatgatccaaaacattttccaaaccaggtatacatgtaacactaaaaaggcaaaccaaataaagagatacggaggatgcaatcatccaagtgttttacatgacttggcattcataacagataaaaccagtggcgggaccttcgcactcggttcgaaggaatgcatagtttactcaatggaggtcactggtttatatcatctggtatcattaaaggcagagag

SEQ ID NO: 6723 - DNA, 354 bp, Glycine max
  Clone ID: LIB3074-018-Q1-E1-F11
aagaaggaagctgaagtcatagaagagaagaaggaagtggaagtgacggaagagaagaaggaaattgaagtaacagaagagaagaaggaagctgaagtcatagaagagaagaaggaagtggaagtgacggaagagaagaaggaaattgaagtaacagaagagaagaaggaagcagaagtgaaagaagagaagaaggaaggggaagtgacggaagagaagaaggaagttgaagtgacggaagagaagaaggaagcggaagtgatagtagaagagaagaaggaagttgaagtgacggaagagaagaaggaagtggaagtgaccgaaggaaagaaagaagtggaagtgatcgaagag

SEQ ID NO: 6724 - DNA, 265 bp, Glycine max
  Clone ID: LIB3074-018-Q1-E1-F2
gacaaaacaaaaaccacctcactcttattgttttcttaaaatttcttccttgccactgccagtgtgtcaccaccatggccaccgtcacaacccaagcctccgccgcgattttccggccatgtgcctcgaaatcgaggtttttgaccggctcttccggtaaactcaaccgggaagtgactatgaggccaatggggtgccctccttctgcctctttcaaggttgaagccaagaagggagagtggttacctgggcttggcctccccaa

SEQ ID NO: 6725 - DNA, 391 bp, Glycine max
  Clone ID: LIB3074-018-Q1-E1-F4
tcacacccaagttcgagacccttattgacatttcagtgatagagatattgtcaaggcatgcttctgatgaggtctaccttggccaaagggataatccaaattggactacggattcaaaggcattggaagctttcaaaaagtttggaaacaaactggcagaaattgagggaaaaatcacacagaggaacaatgatccaagtctgaaaagccgacatgggccagttcagcttccatacacattgctccatcgttcaagtgaggaagggatgagtttcaaaggaattcccaacagtatctccatctaaaatgtgtgtgtggtttgcttatctattgtgcttttgaataaaatagacaatacttgtctatggttattattggctgtatgtctgta

SEQ ID NO: 6726 - DNA, 432 bp, Glycine max
  Clone ID: LIB3074-018-Q1-E1-F5
gaagacgacagaagggggggggttgcagcagcagcttcttaacattgtcttgtgcaggtgcggcgcaaaatcaacacgcgtcacaccctagaacgttttttggagttcctcacaagaatcagagaaagaggaaaacaccgcataggttagttgtggttgcggtgactcaaggctctgctggatcaagcaagtccgacgaaaaaatcccttcgtgggccaaaccggactccgatgaaccaccgccatgggtccgggatgagcccaacaacaaaaacagcaacaattcgcaacaagaagaagaatttgagatccccttctatgcttatttgcttgcctctgccatcactgcaattgccgctataggttccattttcgaatatgtgaaccaaaggccggtcttcggagtattaagctccgacagcgtgttttatg

SEQ ID NO: 6727 - DNA, 392 bp, Glycine max
  Clone ID: LIB3074-018-Q1-E1-F6
gacaaattcacacattttttgttgcattatcgcaaacacctcgtccctcgcaatgcagctagcaatggcggccaacgctgtcgtttcaccgtcgccgttccgacctcagccctttctccggtcatccttctccggcgtctccgtcaagctcactccccaatccataacgctttcacgctccaagcccctcaccgtcttcgccgccaccaagaaggccgtcgccgtcctcaaggggacctccgccgtcgaaggcgtcgccactctcatccaagaagacgatggcccgacgacagtttctgttcgcatcactggccttactccggggcttcatggtttttcactacatgagtatggtgatacgacacatgggtgtatttctacgggagcacatt

SEQ ID NO: 6728 - DNA, 303 bp, Glycine max
  Clone ID: LIB3074-018-Q1-E1-F7
gaaggaaaagaaggataaaagagaaagagagagagagtatccgccgttttggaaacgggcttttgagtttgttgacttggcaaaggcaaaggcagcggttgtaataaatatgaataaatagcgtttggtgatgttcataagacgtgtctctgtctttcttctcggtgaagtcaaggttgttctgttcttctacgcagacacacacacaaacacataacataacgcccctccttctcttcttctttcccttcaaattctatttcttcatccaatttgtgctccaaacagcacaaacattacaat

SEQ ID NO: 6729 - DNA, 290 bp, Glycine max
  Clone ID: LIB3074-018-Q1-E1-F8
ggcacaagtgagtttgttgatcgagataactagaaacagtgtgatgaaaatgaaggtccttgttttcttcgttgctacaattttggtagcatggcaatgccatgcgtacgatatgttccctctccgaatgaacactggctatggtgcccgtactccggaggtgaaatgcgcaagttggaggcttgctgtggaagcacacaacatctttggctttgagaccattcctgaagagtgcgttgaagcaacaaaggaatacatccatggggaacaatatagatcagactccaaaa

SEQ ID NO: 6730 - DNA, 304 bp, Glycine max
  Clone ID: LIB3074-018-Q1-E1-F9
accattcattcccacattcccatttttcacaccaccaacacaagatgtttctccacattgtgttcctccttttccttctctcatccacttcccatgccactgtccaagacttctgtgtggcagacctcaaaggtgcagacacccctgcaggctacccctgcaagccacctgctaatgtcacttcagatgactttgtgtacactggcttagctgaagctgcaaatgtcacaaacataatcaatgctgctgtgaccccagcttttgttgctcaattcccaagtctcaatggccttgaactatctgc

SEQ ID NO: 6731 - DNA, 187 bp, Glycine max
  Clone ID: LIB3074-018-Q1-E1-G1
ggtgtcggcaaaaccaactcctgcacttgtggttaatggcatcctaatcgcgttgcagaaccatgagcacactcactcgcttaccttctctcactctcactgccgcacaaacatctttgctcactttgaatcataaccgcacatgcaccaccgcacacactcggcgtcccaattgctccatcctctc

SEQ ID NO: 6732 - DNA, 410 bp, Glycine max
  Clone ID: LIB3074-017-Q1-E1-H3
ggcgccatggctgctaccatcatcaccacatgcaagctctcactgcttttgagtcttctctcagtttcacttttgctgggtgtgaggtctgatacccttcagaatgtaggcgcaattccccccacatgcgagcgcatagagtgtcccagctatgatgtcattcacgtaggcaacggctacgaaatccgtcgctataattcacccgtttggatttcaaacagccccattcaggacatttctctcgttgaagccacaagaaccggcttcaggaggttatttgactatattcaaggtaagaataactacaagcagaagattgagatgacagcacctgtgatcagtgaagtaatacccagtgattgaaccttctgtgagtcctcatttgttgtgagcttctatgtgccataaga

SEQ ID NO: 6733 - DNA, 136 bp, Glycine max
  Clone ID: LIB3074-017-Q1-E1-H6
tatggctgtgacagacgacagaaaggggttctagtgtgtgattgtccgttgttacgactctttcatcttgcgtcggtgttctgtgtgcatgtttgttcaatcactcagctgaaaacgacttgctgctgtcgcaact

SEQ ID NO: 6734 - DNA, 189 bp, Glycine max
  Clone ID: LIB3074-018-Q1-E1-C1
gtgtgtttgtggatgttcaaggccttcaactaaggaggactaagtcagatacagtatgttgtgagtacttttttcgtttgtgatgttttctataacattgttaacatagctagtaaaattgaacgtttgtcataagaaataagagatgaatcagtttaggcttatctgaatcatagcaacttctttcac

SEQ ID NO: 6735 - DNA, 242 bp, Glycine max
  Clone ID: LIB3074-018-Q1-E1-C12
gaagcgcagttcgttccacgttgttgttcgctctgtgtctctcactctctctatatttgcatcattcatcggaaatggctctcgaggttgctgttaaggctgctgttggggctccaaatgttctcggagattgtccattttcccaaagggtcctcttaactttggaggagaagaaaattccttacaaactccacctcatcgatctcagtaacaaacccgaatggtttttgggtgtgaatccc

SEQ ID NO: 6736 - DNA, 312 bp, Glycine max
  Clone ID: LIB3074-018-Q1-E1-C2
gactgcaactttgctctctgtgaggcttcaatttccagttacggtttcgcttacagtaaccatttaccaggggagtcttcacctttgtcgttcgcaaatccggcgccgaatggagcgccaagcaacattccggcgacatcgaggcctccgccgactccacctatgatctccaaaagaagctcgtgcaagccgctctcgccgttgattcctccggtggagtccactcctctttctctcgcgtgtctcctacctctgctgtgttccacgtgatagtgtgtggtgctgtattcattggaaggtggcgtgggtctg

SEQ ID NO: 6737 - DNA, 378 bp, Glycine max
  Clone ID: LIB3074-018-Q1-E1-C3
ggactgaaaaaaggttttagatcgtaaaaactaatcactacgaaaacaagagatatcgaagatggctctgcccaaagctaaggagatcgtgtcgtccaattccgtcgtcgttttcagcaaaacctattgccctttctgcgtcgatgtgaagaagctcttcggtgacctcggtgccaattacaaggccatcgaactcgacactgaatccgatggaaaagagctccaagcagcattagttgagtggacggaccagcgaaccgtgcctaatgtgtttattggtggaaaccacattggtggctgtgactcaacaactgccctgcacactcaggggaagctggttcctctgctgatatctgctggagctgttgccaaatcaac

SEQ ID NO: 6738 - DNA, 294 bp, Glycine max
  Clone ID: LIB3074-018-Q1-E1-C5
gtccgacgagaaaacgacagaaggggggtgttcccacaaagcaaggtatagctcaatggcatcatcatttgtgggtactttattacccaaccacttcacacaaaccaaacactcagctgttcctgcaagtagatcaggtgctccaacaaggaggagagtgcacttagcaacaacaagagcagagaccatggctactgtcatagaaaaactgggcattaagattgagaggaaccctcctgagtccaagctcactcaactggggtgttaggcacaggcccaaatgggggttgcccc

SEQ ID NO: 6739 - DNA, 339 bp, Glycine max
  Clone ID: LIB3074-018-Q1-E1-C7
gcagcgggtatagtttagtggtaaaagtgcgattcgttccatggacccctaaatagttaagggatcccccgtttgattcatattccgatcaaaaactttatttcttacttaaagggaatcctttataccctcaatgaatgatttgcggtataatatacattatcgtaatttgtatacaagaagaatcaattctaaattgacaacttgagttctaaaattatgaaacataagtttttggaattggatctataatccgaatttttttgagtatgacgaaacgatctatggagagatatatagaaagtttcttttctatcgtaaacaaatcttccatttttt

SEQ ID NO: 6740 - DNA, 295 bp, Glycine max
  Clone ID: LIB3074-018-Q1-E1-C8
gaatagaaatagaactgtcttttcatatagatatcccttcaatacaacataggtcatcgaaaggatctcgaagacccaccaacgcacgaaagccgggatctttcagaaaatggattcctattcgaagggtgcataaccgcatggataagctcacacgaacccgtcaatttgggatccaattcggttccttatgaggtaacgggaaggaattttggaatgtaataatatcgattcatacagatacagaagaaacggttctctattgattcaaacgctctacctacgagataaggat

SEQ ID NO: 6741 - DNA, 318 bp, Glycine max
  Clone ID: LIB3074-018-Q1-E1-D1
aacaggcgtcagcccacacgtccggccacgcgtccgacagatgacaaaaagataacagtgcgggaagacgacaaaagggcatggccatgagcatggccatgacagcatcagcagcagtgacagtgattaaactgctgcatcacctatatatttaaaaggtttatgggaccatagtagcgagggctgtgccttaatttctcacactctctctctctctctctctctctctctctttttcctttttccctatcgtgtgaatcatttatgagtgcgaaaaacaaaactgacaaattattcctgtttctggattccaattcc

SEQ ID NO: 6742 - DNA, 353 bp, Glycine max
  Clone ID: LIB3074-018-Q1-E1-D10
ataaccaagaagataattcaaaaaagaagagaccaagagagagagagagagatggggcgcaagaacacaattttcttggcattggttgttactttgattactaaggagacaatggcagaacgacatatagttggtggaagccaaggttgggatgaatcaacagacttcaattcttgggtttcaggccaaacatttaacgttggcgactaacttgttttcaagtactcttctttgcatagtgtggttgaactaggtactgagagtgagtacaagaattgtgatcttggcaatgcagtgaactcaatgagcagtggcaatgatgttgtgaagctgaacaagcctggcacacgtta

SEQ ID NO: 6743 - DNA, 250 bp, Glycine max
  Clone ID: LIB3074-018-Q1-E1-D12
gatagcgtttttcattgtgcattattcaatggccaccacagcagctctatccggaaccatggtgagcacctccttcatgaggaagcaacctatgacgaccaagagcctaaagacattccccaacgctctttttggtctgaaaggtggacgaggtggtcgtgtaacttgcatggcctcgtacaaggtgaagctcataaccccagaaggagaagtggagtttgaatgcccagatgatgttttcattgttgac

SEQ ID NO: 6744 - DNA, 361 bp, Glycine max
  Clone ID: LIB3074-018-Q1-E1-D2
gaaggtgcaagagtttgttgcgagctataagctagtttatcgtgaggagaatatgaagttgtttgttttctttgttgctgcagtagttttggtggcatggccatgccatggcgcaggctaccaaaggttccctctccgaatgaaaactggctatggtgagcgttcttcggaggtaaaatgcgcaagttttaggcttgctgtggaagcacacaacatccgagcctttaaaaccattcctgaagagtgcgttgaaccaacaaaggactacattaatggcgaacaatttagatcagactctaaaacagttaaccaacaagctttcttttatgctagtgaacgcgaagttcatcacaacgacata

SEQ ID NO: 6745 - DNA, 366 bp, Glycine max
  Clone ID: LIB3074-018-Q1-E1-D4
ttcacaaagcttttcagtcggcttttcgcgaagaaggaaatgcgaattctgatggttggtcttgatgctgctggtaagaccactatcctgtacaagctcaagctcggagagatcgttaccacaattcctaccatcgggttcaatgttgagactgtggaatacaagaacattagcttcactgtttgggatgttggtggccaggacaagattcgtcccttgtggaggcactacttccagaacacccagggtcttatttttgttgtagacagcaatgatagggacagagttgttgaggccagagatgagttgcatacgatgttgaatgaggatgaactgagagatgcagtattgcttgttgttgccaac

SEQ ID NO: 6746 - DNA, 252 bp, Glycine max
  unsure at all n locations
  Clone ID: LIB3074-018-Q1-E1-D6
ggtgcaattgtgtgaggaaatatctctcacgagtttgtataaggagagaagcggacatgaagaagcaattancatcaaggcgtttgctgatgtgggttatggtacatttgagcatttcaggagtgttgtccaagtctaaacacattacacatagcacttttttgccgtgcaagggctccatataggactgtctcatgcttcaccacttggactgagagcctcacaacaccacccggagacatttccgttgaa

SEQ ID NO: 6747 - DNA, 431 bp, Glycine max
  Clone ID: LIB3074-017-Q1-E1-H2
gatctggcagcagaaaaacaagtagttgagaactaagaagaaggaaatggcttcctcaatgatctcctccccagctgttaccaccgtcaaccgtgccggtgccggcatggttgctccattcaccggcctcaaatccatggctggcttccccacgaggaagaccaacaatgacattacctccattgctagcaacggtggaagagtacaatgcatgcaggtgtggccaccaattggcaagaagaagttcgagactctttcctacttgccagacctcgatgatgcccaattggcaaaggaagtcgaataccttctaaggaaaggatggattccttgcttggaattcgagttggagcacggtttcgtgtaccgtgagcacaacaggtcacctggatactatgatggacgctactggaccatgtggaagctgccta

SEQ ID NO: 6748 - DNA, 372 bp, Glycine max
  Clone ID: LIB3074-017-Q1-E1-E7
gggacagagactgtgacacaacacgacacatgacacacagagttagaggagaaatcatcatggcatcagcagcatctgggtttgtgttgtggcttaatgttgcagctgccaccacgaactcacgggtggtcgtgttcaccacatagaacaacgcttctaggcttgttgtaagggcttcagatgagcctgcagcggcggcagccgctatcaccacacctccagcataagcttaagcttagctaggtttccacctactggcccctatacaggtgctaacgtgaagattcatacgatcgattcctactggtacaaaggcactggttcagtggttgctgttgatcttgagcccattactcgctaccctgttgtggt

SEQ ID NO: 6749 - DNA, 360 bp, Glycine max
  Clone ID: LIB3074-017-Q1-E1-F1
gactgctactttgctctctgtgaggcttcaatttctaattacggtatcgctcacagtatccaacaaccatgcgagtcggcagctttgtcgttcgcaaatccggcagcgaatggagcgcctagcaatattccggtgacatcgaggcctccgccgaatccagcttcgatctccagcggatgctccatgcatcccgcgcgcgccgtcgcatcctcctgtggagttcagtcgtctttctctcccgatgtccctatcgtggccgtgttccaggtcatactcagtggtgcagtactcattcgacgtggtagtcatgctgtcgcaactgcatctgcacgtggttctcccacacctgatgctgcacca

SEQ ID NO: 6750 - DNA, 421 bp, Glycine max
  Clone ID: LIB3074-017-Q1-E1-F3
ggaggagagaggagaagagaagctaaagaaagaaaggagatgggagtggagaagcagttgttgaggtctggcaccggtccgaagccaattcccggtcagaacgtaaccgttcactgcactggtttcgggaagaacggtgacctttctcagaaattctggagcacaaaggatcctggccagaacccattcactttcaaaatcggccaaggttctgttatcaaaggatgggatgaaggtgtgcttggcatgcaaattggtgaagttgctcgtctccggtgctctccggattatgcttatggtgctggtggctttcctgcttggggaatacggcccaactctgtcttggaatttgaaatcgaagtcttaagtgcgcaatgaaaaccttggtagtctgtctctgtcctaaagaataaaattcttc

SEQ ID NO: 6751 - DNA, 414 bp, Glycine max
  Clone ID: LIB3074-017-Q1-E1-F4
gaaattgaagtatagattgaacacacacatagaaacccaacaacaagaatgaagaagatgattctaaccctcttcttcaatatcattttatctctcctctccctctcccacgcctccgtggtggatttctgcgtagcagactacacaggccccaatggccccgcagggtactcatgcaagagcccagcaaaggtcacggtggacgacttcgtctactccggccttggcaccgccggcaacacctcaaacatcatcaaagccgcggtgacgccggcgttcgacgcgcaattccccggcgtcaacgggcttggaatctccattgcacgcctagacctagcagccggtggagtcatccctcttcacacgcaccctggtgcctcagagctgctggtggttgtgcagggaacaatctgc

SEQ ID NO: 6752 - DNA, 210 bp, Glycine max
  Clone ID: LIB3074-017-Q1-E1-F7
agggtggggaaatttggccctggagatcgcgatcgtgtttgcctcgaagattgcagggactttactaatcttcgtcttgggcatccaaataaccactgatgacatgactccggaaatacccacgagcgttatcggagcattcgaacccaacgtcatcaatattaagaaggatatccttgtaaaatctcccacccttcttttcaccattga

SEQ ID NO: 6753 - DNA, 255 bp, Glycine max
  Clone ID: LIB3074-017-Q1-E1-F8
ttcttcaaaataattttaggcctcgtctccctctcacacgcctccgtggtggatttctgcgtatcagactatacaagccccaatggccccgcacggtactcatataagagcccagcaaaggtcacagtggacgacatcgtctataccggcctttgcacccccggcaacacctcaaacatcatcaaaaccgcggtgatccccgcgttctaaacgcaattcaccggcgtcaactggctttgaatctccattgcacgc

SEQ ID NO: 6754 - DNA, 409 bp, Glycine max
  Clone ID: LIB3074-017-Q1-E1-G10
gatcaccacttggacgcaaaaatggcacctgcaacactgtctctgtctctcctcctcctgttctcactcagcatcgccgtaaccgttagatcgagcgactacgactacgattgtgtgtacactgcatacgttagaaccggttcggtgttgaagggcggaacggactctaagatcgggctgaagctgtacgacaagtacggctactacatctacattaaaaacctcgaagcatggggcggcttgatgggcaagggctacgactacttcgagcgcggcaacctcgacatcttcagcggaaggggaccctgtcttgacggacccgtctgtgccgttaacgttacttctgacggattgggttctcaccacggctggtaccttaactacgttcaggtcaccttcactggggccc

SEQ ID NO: 6755 - DNA, 426 bp, Glycine max
  Clone ID: LIB3074-017-Q1-E1-G11
agaggatgacagaaagggatcaccacatggacgcaatcatggcacctgcaacactgtctctgtctctccacctcctgttctcacacagcatcgccgtaaccgttagatcgagcgactacgacgacgattgtgtgtacactgcatacgtcagaaccggttcggtgttgaaaggcggaacggactctaagatcgggctgaagctgtacgacaagtactgctactacatctacattaaaaacctcgaagcatggggcggcttgatgggcaagggctacgactacttcgagcgcggcaacctcgacatcttcatcggaaggggatcctgtcttgacggacccgtctgtgccgttaacgttacttctgacggattcggttctcatcacggctggtaccttaactacgttcaggtcacctccactgggcccc

SEQ ID NO: 6756 - DNA, 367 bp, Glycine max
  Clone ID: LIB3074-017-Q1-E1-G2
gatccgtctgcagatacacaagtaggtgacaactacgaaaaaagaaatggcttcctcaatgatctcctccccagctgttatcaccgtggatcgtgcctgtgccggcatggttgctccattcaccggtctcaaatccatggctggattccccactaggaagaccagcaatgacattacctccattgctatcaaccgtggaaaagtccattgcatgcatgtgttgccaccaattggcaataagatgttcgagactctttcctacttgccatacctcgatgatgcccaattggcaaaggaagtcgaataccttctaatgaaatgatggattccttgcttggaattcgaattggagcaccgtttcgcgtac

SEQ ID NO: 6757 - DNA, 407 bp, Glycine max
  Clone ID: LIB3074-017-Q1-E1-G3
ggaacctttgcattctatccattcaagattcagcaagtgcgttttggaagcagagaccgaaatacttcgagatggcccgtacaaagcaaactgctcgtaagtcaactggaggaaaagctcccaggaagcagcttgcaaccaaggctgcacgtaagtctgcaccaacaactggtggcgtgaagaagcctcatcgttatcgccctggaactgttgctcttcgtgagattaggaaataccagaagagcactgagctcctaatcaggaagcttcctttccagaggttggttcgtgaaattgcccaggatttcaagactggtctgcgtttccagagccatgctgtgcttgcattgcaagaggctgctgaggcataccttgttgggctctttgaggacactaacttgtgtgcc

SEQ ID NO: 6758 - DNA, 373 bp, Glycine max
  Clone ID: LIB3074-017-Q1-E1-G4
gaagaagaagaaggagcatggccatgagcatggccatgacagcagcagcagcagtgacagtgattaaactgctgcatcacctatatatttaaaaggtttatgggaccatagtagcgagggctgtgccttaatttccctctctctctctctctctctctctctctctctctctttttcctttttccctatcttgtgatctatttatgagtgagaaaaacataagtgagaaattgtgcgtgtatctggttgctaattcgagtgctattagtctgtggtttggttggtttgtaaccccgctacttgggttatgtttgattgtatattatcctagagaaataaaaattttaaattatcagtacgtattggtattaag

SEQ ID NO: 6759 - DNA, 369 bp, Glycine max
  Clone ID: LIB3074-017-Q1-E1-G6
gagagttaagttgagaacatatgaatctacaatatacgatgattctcattatctcactcattttttctcttctctctttctcgcatgcttctgtcctatatttctgtgttgcaaattatgcatgtcctaatggacgtgcacgatattcctggtggaagtcttcaaaggtcagagcagatgattttgcttacagtggccctggcattgctggtaatacctcacgcattatcagggctgcagtgatgcctgcatttgatgctcaatttgctggtctcaacggtcttggcatttccgcagcacgtttggacataacatcatgtggagttataccagttcatactcatcatggagcttcataattacttgttg

SEQ ID NO: 6760 - DNA, 282 bp, Glycine max
  Clone ID: LIB3074-017-Q1-E1-G8
agagttcccgggtccatccatacgtccgtccagatgtcagtacaggtgatattgggacacttaaattgagaacatgtgaatctagaatataggactgttctcatcaactcatctcatcttatctcttctcacagtgggcactggttctatcctgaatatttatgttatcgatgatgccttttccattggacgtgttcgatatctgtggatcaatccttcaaatgtctccactgctcattatgctttcagtgtgcaattcattccaggttataccccaaattt

SEQ ID NO: 6761 - DNA, 357 bp, Glycine max
  Clone ID: LIB3074-017-Q1-E1-H1
ttcggttctgctgcgatatacgacataacggggttctagtgtagtgttgtctgttgttgtaactcgttcatcatcgtttgctgtactgtgtttgtgtatgtcttttctctcatttaataatgtcgtgctgactgtcgtcactgtcggtaccgtagctcctgcaagtgccgcaaccggtactgtggctgcaacatgtactcacacatgaactacactgagtcaaccaccaacgtcaccttggtcataggagtgggacctgttaatgctcaatttgacggtgcagaactgggtgtgtgcgctgaaaacgattgctgcaaatgtggaccaaactgctcctgctacccctgcacttgcaag

SEQ ID NO: 6762 - DNA, 293 bp, Glycine max
  Clone ID: LIB3074-017-Q1-E1-H12
cggggatattagttttaacgttaagcttaggaagaaatctgtgtaagtagcctagtcatactctgtatcatttcatttcgatagtcatccagagttactgaagaaaatggcaatcatctccgctgctatcagaaccccatcgatcactcgcgcatgtctagtgcaaaaacgttctcttgggttctcatctcccgttcttggtttgccaacaatgggtaacgtgggaagagtgagttgctccatggaagaaaagccttcttctgtgaaggaaagcagctcaagcatgttgggga

SEQ ID NO: 6763 - DNA, 415 bp, Glycine max
  Clone ID: LIB3074-017-Q1-E1-E6
gaaggtggttgtggaagaagagatggaggaagcaaagggagtagtgaagcacgtgctcctagctaagttcaaggacgacgtcactccagagcggattgaagagctcatcaaggactatgccaatctggtcaatctcatcccacccatgaagtcattccattggggcaaggatgtaagtgctgaaaacctgcatcaaggcttcactcatgtctttgaatcaacctttgagagtccagaaggcgttgcagagtatgtagctcatcctgcccatgttgaatatgcaaatttgttccttttctgcttggagaaagtcattgtgattgactataagcctaccgttgttaagctttgattggagaagtaaagcctcgttcactgctagtgttcgtataaaaataaactttgttttctgtct

SEQ ID NO: 6764 - DNA, 412 bp, Glycine max
  Clone ID: LIB3074-017-Q1-E1-C6
ggcacaagtgagtttgttgatcgagataactagaaacagtgtgatgaaaatgaaggtccttgttttcttcgttgctacaattttggtagcatggcaatgccatgcgtacgatatgttccctctccgaatgaacactggctatggtgcccgtactccggaggtgaaatgcgcaagttggaggcttgctgtggaagcacacaacatctttggctttgagaccattcctgaagagtgcgttgaagcaacaaaggaatacatccatggcgaacaatatagatcagactccaaaacagttaaccaacaagcttacttttatgccagagacctcgaagtccatcccaaggacacatttgtgttcagtatagatggcaccgtactctctaatattccatactacaaaaaacatggatat

SEQ ID NO: 6765 - DNA, 347 bp, Glycine max
  Clone ID: LIB3074-017-Q1-E1-C7
gaagaagaagaaggagcatggccatgagcatggccatgacagcagcagcagtgacagtgattaaactgctgcatcacctatatatttaaaaggtttatgggaccatagtagcgagggctgtgccttaatttctctctctctctctctctctctctctctctctttttcctttttccctatcttgtgatctatttatgagtgagaaaaacaaaagtgagaaattgtgcgtgtatctggttgctaattcgagtgctattagtctgtggtttggttggtttgtaaccccgctacttgggttatgtttgattgtatattatcctagagaaataaaaattttaaattatcag

SEQ ID NO: 6766 - DNA, 416 bp, Glycine max
  Clone ID: LIB3074-017-Q1-E1-C8
gatcacaaacccagtacacaatcataatctcaatcacctcaatttcacttctctgctccaaagtttcaatcttttctctgagatcccaaatgggcatcgccacaatcaaaatgggaggcaactccgactccaactgttccatcactccacgccattacaacacccacaaggtgttccttttctgcaactacattctcttgggtgcagcctccagctgcatcttcctcaccctctccctgcgcctcattccctctctatgcggcttcttcttcatccttcttcaggtcttcacgattgcgggtgcagtctcgggttgtgctgctgtgggggctaataggtggtactctgcacacatggtggccactgttctaacggctatctttcagggttctgtttcagtgttggtgtttacgcgg

SEQ ID NO: 6767 - DNA, 382 bp, Glycine max
  Clone ID: LIB3074-017-Q1-E1-D1
gaacctcaggagtgagttctttcacagatgcaaatcagccttagagcttctgacgcacgacgacgttatgccattggcagacacatacgactgtctcccagggtaccagctttcccaccaaattgaaacacgcgcgctcctcacctcgttactctccgattagggttgcaaccgtggggcccgacacttcaactgtcgactacaactctgcgttctcaggtgtttcctgcagaaacatgcgaaactgtacgaggggaagcctgcatggcggagatgtaccctgaaacgacgctacatccagaggctaagactccacgagtcgttgcagagaatgttgagagagagtagcttgactacgatggtcctaaaacgggtatttcga

SEQ ID NO: 6768 - DNA, 369 bp, Glycine max
  Clone ID: LIB3074-017-Q1-E1-D12
gaaggtgcaagagtttgttgtgagctataagctagtttatcgtgaggagaatatgaggttgtttgttttctttgttgctgcagtagttttggtagcatggccatgccatggcgcaggctaccaaaggttccctctccgaatgaaaactggctatggtgagcgttcttcggaggtaaaatgcgcaagttttaggcttgctgtggaagcacacaacatccgagcctttaaaaccattcctgaagagtgcgttgaaccaacaaaggactacattaatggcgaacaatttagattagactccaaaacagtttgccaacaagctttcttttaagccagtgaacgcgaagttcaacacaacgacatatttatatt

SEQ ID NO: 6769 - DNA, 443 bp, Glycine max
  Clone ID: LIB3074-017-Q1-E1-D2
aagacgacagaagggtgtctctaaaattggagaaagccctattgatggtaggactgataccaatcctgaaggactcactgctgcatatggcaagtgggcttctgttgtagctgctagattaaatgctggaggcctctcttgcaaggttcttgacaaggaggcgtttcaaaagcagatgttggagaagcttatatggattcgttccgttgtgcttgttggagcacggcatggaggggtttctgtaggtgtcgtggaaaaggaattccgcactgaattgtccagccttataacagaactggcatcagcagcagcaagtgaaaaggggttaacatttgaagaagccatggaagagcgcttatgtgcatattctcgagctgtagcccactttcccacggcagttaaagagttcaaatggagaaatggttggttttgttctctctctg

SEQ ID NO: 6770 - DNA, 365 bp, Glycine max
  Clone ID: LIB3074-017-Q1-E1-D3
ggtgaccaatgaacacaatacagggcagcatcgccatgggattgagtattctgagaagcacttccatttccactcctatctcttcctccaaatccaaacccattttctcagctcttgttcgttcatctttcgcctccatttctcccacaaagtgtgttactcccaccactcttttcgtttctgccacgcgcttcttcaccgcctcacccaagcgcggctttcgtggtgggattgtggccatggccgccgctggctcgctccgcatatcagaggaagagtggcgcgcagttctctcccctgaggagtttcgtattctcaggcaaaagggcacccagttcgctggaacaagagagctataccagttc

SEQ ID NO: 6771 - DNA, 389 bp, Glycine max
  Clone ID: LIB3074-017-Q1-E1-D4
tgggattcagattattgagacattgcagaaaatggcatcagttcaccaatgacagcttccatcctatggctgcccagccgtcaccaaccggtcggcagcggcgacgcagaggagatcagtggtagtgaatgcagccagcaaatctgttgaaggggaaaaggtcagttatgacaacaatggtagcaatgcaaggaggaacttgatgttcgccacggcggcagctgctgtttgctcttttgctgcagggatggcattggcagatgagcctaaaccaggaacctcagaagccaagaaaaagtatgccccggtttgtgtcaccaatcctacagctaggatttgtcgcaattgaggaacttttttgttccacttttggaatttggaaatgtaca

SEQ ID NO: 6772 - DNA, 438 bp, Glycine max
  Clone ID: LIB3074-017-Q1-E1-D6
agacgacagaaggggagaagataaagaaaagagaaatggcaacagaaacaaaagtggcagtattaggtggcatcaccgaagtgcagggagctgccaacagcgtcgagatcaacaatctcgctcgctttgctgtagaggaacaaagcaaaagagagaattcagttctggagtttgtgagggtgattagtgcacagcagcaagtggtttctggagtgaattactacataacattggaagcaaaagatggtgagattaaaaatgagtataaagcgaaggtttgggagagggaatcccaagagttgctagaattcatgccaacattaggtgcatgaggcgagatcgaccatctcgctcgctttgctgtagaggaacaaaacacaagagagaatgcaaatctggagtttgtgggggtgattacggcaaagcagcacgtggtgg

SEQ ID NO: 6773 - DNA, 378 bp, Glycine max
  Clone ID: LIB3074-017-Q1-E1-D8
gacagatatcagcttcctgttgttggagataacctctggcttccggaacatcggcagactttcaggtccatatgtccaagcgttcacaccatcgcccgcagacttcagttatggtgcaagatattcaggtacacgcgactgaatccgtatcttccaccatcaatagctacaaactaattcatgaaaacattcagcgccacctcaatgctattgtttcatcctctggtgagtatcaagtcagcatcgttgactacatcgctgatcccacctaggtatcacacggtcgtgcctctcctatctggcccagtccatatttgggacatcgacatcagcactgtagccatcaggcctagatcctttaaattcagcatcttcgca

SEQ ID NO: 6774 - DNA, 399 bp, Glycine max
  Clone ID: LIB3074-017-Q1-E1-E2
ggcgcacccagagaggaagcttagagagagagagagagagagagaggagagagtattggcgcttcatcaagatgggtatttctagggattccatgcacaagaggcgtgccactggtggcaagaaaaaggcttggagaaagaagagaaagtatgagcttgggcgtcaggcagcaaacaccaagttatcaagcaacaagacaatcaggaggattcgtgttagaggtggcaatgttaaatggagggcattgaggctggatactggcaattactcatggggtagtgaagcagttactcgcaagactcgtattctagatgttgtttacaatgcctcaaacaacgagcctgtgcgaactcagaccctggtcaagagtgctattgtccaggttgatgctgctcctt

SEQ ID NO: 6775 - DNA, 411 bp, Glycine max
  Clone ID: LIB3074-017-Q1-E1-E3
aatgtccctaaaagcagaatttttttcattgcatggtcccctgacacatcaagggtgaggagcaagatgatctatgcaagctccaaagacagattcaagagggagctggatggaattcaagtagagctgcgagcaactgatcctactgagatgggtcttgatgtgttcaaaagccgggccaactaaaatgattatagaaaatagtagactttctggtgggagcagcactccttaagccttagttactcatggaaaatatcctagtttgtgggatggtcaacttgggtagttatggtcccaaactctcaattttccaagttgtggcataaattctattgcaccttttaacaagctttgcttgttccagtgtgttttaatatgatctgtgatttatacgaccttgcgtttgag

SEQ ID NO: 6776 - DNA, 400 bp, Glycine max
  Clone ID: LIB3074-017-Q1-E1-E4
ggcacaagtgagtttgttgatcgagataactagaaacagtgtgatgaaaatgaaggtccttggtttcttcgttgctacaattttggtagcatggcaatgccatgcgtacgatatgttccctctccgaatgaacactggctatggtgcccgtactccggaggtgaaatgcgcaagttggaggcttgctgtggaagcacacaacatctttggctttgagaccattcctgaagagtgcgttgaagcaacaaaggaatacatccatggcgaacaatatagatcagactccaaaacagttaaccaacaagcttacttttatgccagagacctcgaagtccatcccaaggacacatttgtgttcagtatagatggcaccgtactctctaatattccatactacaaa

SEQ ID NO: 6777 - DNA, 412 bp, Glycine max
  unsure at all n locations
  Clone ID: LIB3074-017-Q1-E1-C3
gatctggcagcagaagaacaagtagttgagaactaagaaggagaagcaaatggcttcctcaatgatctcttccccagctgttaccactgtcaaccgtgccggtgccggcatggttgctccattcactggcctcaagtccatggctggcttccccaccagaaagaccaacaatgacattacctccattgctagcaacggtggaagagtgcaatgcatgcaggtgtggccaccagttggcaagaagaagtttgagactctttcctacctgccagaccttgatgatgcacaattggcaaaggaagtagaataccttcttangaagggatggattccttgcttggaattcgagttggagcacggtttcgtgntacgtgagcacaacaggtcaccaggataccacgatggacgctac

SEQ ID NO: 6778 - DNA, 402 bp, Glycine max
  Clone ID: LIB3074-017-Q1-E1-A9
attcagaggcttttggtttacgagtttatgccgaataagagcttggaggatcatctccttgcaagagtgccatcgacgataatcccttggggaaccaggttgaggatcgcgcaggatgcggtgaggggtttggcgtatcttcatgaggaaatggattttcagctaatatttcgggattttaagacatccaacatcttgctggacgagaatttcaatgcaaagctttctgattttggactggctaggcaaggaccctcagaagggtctggctatgtttcaacagcagtaaggatttgtctatactcttgagaaaactcattatattgacaatattgcatcatagtagtaacatcagaatagtgtgcctgctgggagcttatattgagtaaattaactatattt

SEQ ID NO: 6779 - DNA, 426 bp, Glycine max
  Clone ID: LIB3074-017-Q1-E1-B1
gactgatacaggaacagctagcagagaaacaaagttacaagtaaagtaaattaagaagatcattaatggcttctcttgcaaccttagctgctgttcaaccagctgcgctcaatggccttgctggaagttccctctctggaactaagctctctttcaagccctctcgccacactgtcaaatccaagaacttcaggagtggtgccgtggtagcaaagtatggtgacaagagtgtgtactttgatttggaggatctgggcaacactacggggcagtgggacttgtatggctcagatgcaccttcaccctacaaccctcttcagagcaagttcttcgagacatttgctgctccattcacaaagaggggattgttactcaagtttctgatattgggaggtggttccacccttgcatacttcagtgcaacag

SEQ ID NO: 6780 - DNA, 371 bp, Glycine max
  Clone ID: LIB3074-017-Q1-E1-B10
gagcgccaatgtttttttcagaggagtttcatcttgtaatcaaaagagtttatcttatagtaagaaatcgatgtcttactccattttaaggaacagaacaagagaacaatagcctgacaaagggtttagccataaaatcgaatccatcattgatttgagatattgataaggtgaatactcatttctcgtcaatgctaggcataatgcgggtatagggacctaaaaaagattatcttttcttcctatcttatgaactttaaggtgtatgaagtgtcatttcctatcttagattttaattttagtaggtagataaagagtccatttaacttaagttgatctaggccagaagcagacctacgtcaagataatcc

SEQ ID NO: 6781 - DNA, 245 bp, Glycine max
  Clone ID: LIB3074-017-Q1-E1-B11
gggaacccactaaggttgtacctcaggctgatatagtacctgttcgtttggaggagctatcacataaaacagttggtggagatttgctgcgcaagtcagctgttaagtttgagcgatatcatgtgggagaaatcctaactgttggtgctgaagctggagaactaaacgctggaacaaaggtactatgcactgacatgaacgcctacgacgtggatttggggactgatacaacacactgcttctgt

SEQ ID NO: 6782 - DNA, 405 bp, Glycine max
  Clone ID: LIB3074-017-Q1-E1-B12
ggggtaaagatatccgatgtgaatctatttgtttagttttctatcggtatgtatataggtgaataatccaacatgcctttttgtgaagtaaaaaaactaccctcgatccatgcctcaaaagggttgataataagtaaaaaaaatcaatgaattcatgataaaacccttctgcgtttttttattataaatttttttgtcaataaagggatcaaggggttgggggatcaaatggtaaagttcttttgttggtaaattggaggattagaaacatgactattgctttccaattagctgtttttgcattaaatgctatttcatttattttactgattagtgtacctgttgtaattgcatctcctgaaggttggtcgaatagcaaaaatgttgtattttccggtacatcat

SEQ ID NO: 6783 - DNA, 406 bp, Glycine max
  Clone ID: LIB3074-017-Q1-E1-B2
ggaaacgtatttcactatcacgcatacatggtggagcacctaagcacactggagtcctccctagctcagtccattcaccgccgtacgctctgagatcatccgtcgtctacgcgaactccgcagcgatcctttcgatctgtcatagcaaatgggcaagagagttcactgtcctaccacctattcaggcctcattgctatgactgcaggtgaagatactgttgatggctctctgtaggttggcattggagatgttgacaaacgtaagaggacttattatctcaatgcggattcagcaggatctggcaaatcaagtgatgaggcattcatcgaatgtacaatagcggaggcagttgcaattgtgctgtattaacaatatgttgcaaatatgataaggcttttgggtgat

SEQ ID NO: 6784 - DNA, 418 bp, Glycine max
  Clone ID: LIB3074-017-Q1-E1-B3
gaaggtgcaagagtttgttgtgagctataagctagtttatcgtgaggagaatatgaagttgtttgttttctttgttgctgcagtagttttggtagcatggccatgccatggcgcaggctaccaaaggttccctctccgaatgaaaactggctatggtgagcgttcttcggaggtaaaatgcgcaagttttaggcttgctgtggaagcacacaacatccgagcctttaaaaccattcctgaagagtgcgttgaaccaacaaaggactacattaatggcgaacaatttagatcagactctaaaacagttaaccaacaagctttcttttatgctagtgaacgcgaagtccatcacaacgacatatttatattcggcatagataacaccgtactctctaatatcccatactatgaaaaacat

SEQ ID NO: 6785 - DNA, 247 bp, Glycine max
  Clone ID: LIB3074-017-Q1-E1-B5
cacgcgtcccaaagctgtagaatacgacacaatgggaaagtgcaacagtttgttttgaactataaactagattatcgtgaggagaatatgaagttgtttggtttccctgttgctccactaggtgttgtaccaccagcatgccatagcgcacgctactaaaggttccccctcccaaagcaaactggctatagggaacgttcttctcaggggaaatgcgcacattttaagcgtgctgtgggagcacaca

SEQ ID NO: 6786 - DNA, 416 bp, Glycine max
  Clone ID: LIB3074-017-Q1-E1-B6
ggtggtgcacattccttcattggaatattctgtggctctgtctctcactcatcctttgcaggagtagagtaatacattacaatacaaggggtgcattgcaaatggcttccgttgttgcaagcttgccgccaccattgctgctccctgctagaaaatcacatatgggcaacttcccaagttcccctgtttctcttctttcagggagatggaatcgtgtttcttttgttgtgaaggcttctggagaaagttctgaatcttcaactacccttactgtttttaagtctgttcagaatatttgggatcaacctgaggaccgactgggacttattggtttgggatttgcagccgtagcagcgttttgggcatcaacaaatttgattgcgaccattgacaaattgccacttttcccaactgta

SEQ ID NO: 6787 - DNA, 420 bp, Glycine max
  Clone ID: LIB3074-017-Q1-E1-B7
ggccgaaaaccctaacaacacaggcgcagagcgtgatccattgacgaagatggtgcagcgtctcacctaccgcaagaggcacagctatgccaccaaatccaaccaacacagggtcgtcaaaacccctggtgggaagctcgtttatcagaccaccaagaagagggccagcgggcccaagtgccccgtcactggcaagaggattcaagggattccacacttgaggcctgcagagtacaagagatcaaggttacccagaaaccgtacgactgtcaaccgtgcatatggcggagttttgtctggaagtgctgtcagggagaggattatccgagctttcttagttgaagagcaacagattgtgaagaaggtcttgaagatccagaatgcacacgaaaagcaagcctcaaaggcttgaatttgaac

SEQ ID NO: 6788 - DNA, 414 bp, Glycine max
  Clone ID: LIB3074-017-Q1-E1-B8
ggccgtcacacagagagagaagagacaatgaagtttaacccaagggtttcctcaagccgtcgaaagagccgcaaggctcacttcaccgctccgtcgagcgtgcgtcgcgtcctgatgagcgcgcctctctcgaccgatctccggtcgaagtacaacgtgcggtccattccggttcgcaaggacgacgaggtgcaagtggtgaggggaacctacaagggccgcgagggcaaagtggtccaggtctatcgccgcaagtgggtcatccacatcgagcgcatcacccgcgagaaggttaacggctccaccgtcaacgttggcattcacccttccaaggttgtcgtcaccaagcttcgaatggacaaggaccgcaaatccttgctcgatcggaaggccaagggtcgcgccgccgccgac

SEQ ID NO: 6789 - DNA, 418 bp, Glycine max
  Clone ID: LIB3074-017-Q1-E1-C1
gaaacagagcataggaaatagctttcctcggttataatcttcaaggtggaaagaaaaacccacccactatcccaattccaataaataccttcctctctatattttcgcacaataccctctcacccttcaacgatgagttactacaatcagcagcaaccacccgtcggtgttcctcctccccaaggttacccaccgtcggattcttacggaaaggacgcgtaccctccgccagggtacccgccgcaaggaggataccctccgcaggcgtatccagcacaggggtaccctccaccctacgcgcctcctcagtacgctcagcctccgccgcaacaacaccagaattcatctggcccaggttgcttagaaggatgtttggctgctctctgctgctgctgtctgttggatgcgtgcttctgag

SEQ ID NO: 6790 - DNA, 423 bp, Glycine max
  Clone ID: LIB3074-017-Q1-E1-C11
ggcacaccaacaccaaaacaaacccactaagatggcttcctttgtatccttcctagtgctgcttcttgcagcccttatcctcatgcctcaagggcttgctacttactacaaaccaattaagaagccgccagtgtacaagcctccagtgtacaagccaccagtgtacaaaccaccggtttataagccaaaaccaccggtttacaagccgaaaccaccggtttacaagccaccatataagaagccaccatacaagaaaccaccttatggaaagtaccctccagtagaggacaacacccatgcctaaagcaagcaatgaggtctattatctacttaataaataagaggaactgctttgtgttttctagcattgtgatttacaacttcgtagcaatgcatattcttgactcttgcatgcacttcaat

SEQ ID NO: 6791 - DNA, 376 bp, Glycine max
  Clone ID: LIB3074-017-Q1-E1-C12
ggcacaacaaaaggtaggtgaggaaaactttggacaaaaaatggagtgctacacaaggccaaacaggagtgacatccacctctcagcagaggaagaagccaccatagaggcaaagaccagagagtactttgatggggtcgcaccacaacgccacacaaagcctcaacgaagtgactattcagctcaatatgtcgatgctttctccaatgcccatcactcttctttaactataccagaattaacacaattccaactcctccagaacgatccccaagagaagaaattggtgtacaatggaagtcaagtaccggaagaatttgtggaaacagagtattaccaagatctcaacagcgtggacaaacaccaccatacgact

SEQ ID NO: 6792 - DNA, 410 bp, Glycine max
  Clone ID: LIB3074-017-Q1-E1-A8
gcaagcaactaagcaagatatcatcacattgcaaagaaaatacacattacattactaagtctttgttcatttgagtagtagtgatggctagcctcaaggttgcatgtgtggttgctgtgatgtgcatggttgtggtggccatgagtgctgcacccatggcacaggccgcaatcacgtgcgggcaggtcgtcggcgacatgtctccgtgcttcagttatcttcgaagcggcggaaaaccgtcgcaggcctgctgcaacggagtgaagtccctcagcagcgcggcgaagaccaccgcggaccgccagggggcgtgcagttgcctgaaaaaccttgccaataatatgggacagagtttgaatgccggcaacgcagcctctctccctggcaaatgtggcgtcaacatcccttac

SEQ ID NO: 6793 - DNA, 377 bp, Glycine max
  Clone ID: LIB3074-012-Q1-E1-H2
gaccacactcttattgttttcttcatatcttccttgtcactgcccgtgtgtcgccgccatggccaccgtcaccacccaagcctccgccgcaattttccggccatgtacctcgaaatcgaggtttttgaccggctcttccggtaaacttaaccgggaagtgactatgcggccaatggggtgccctccttctgcctctttcaaggttgaagccaagaagggagagtggttacctggcttggcctccccaacttacctcaatggcactcttcctggtgacaatggatttgaccctctggggctagctgaggacccagagaacttgaggtggtacgttcaagccgagcttgtgaatggacgttgggccatgttgggtgttg

SEQ ID NO: 6794 - DNA, 415 bp, Glycine max
  Clone ID: LIB3074-012-Q1-E1-H3
gatatttgagttcaaacaaatcaaagccatggccacctccaacttctctattgttctctccgtctccctagccttctttttggtgctacttaccaaggcacactcgaccgataccgtttctttcaccttcaacaagttcaacccagtccaaccaaacattatgctccaaaaagatgctagtatttcatcctctggggtgttacaactcaccaaagttggcagcaacggcgtgcccacctcgggatctctcggtcgtgccctttacgctgccccaatccagatttgggacagcgaaaccggcaaggtagccagctgggctacatcctttaaattcaacattttcgcacccaacaaatcaaactcagctgacgggcttgccttcttcttggcacccgtcgggtctcagccccaatcc

SEQ ID NO: 6795 - DNA, 415 bp, Glycine max
  Clone ID: LIB3074-012-Q1-E1-H4
gattcaccacaaccctctatattccattacaaagaaccagtttggaatatatttttattccttctttgtttcttcactttcttccatacacataaccatgtcttctcagaccgttgtcctcaaagttggtatgtcatgtcaagggtgtgctggagctgtaaacagggttttggaaaaaatggaaggtgttgagtcatttgacattgatctgaaggagcagaaggtgacagtgaaaggaaatgtgcagccggacgaagttctgcaagccgtttccaaatccggaaagaagacggcattctgggtggatgaagcacaaccacctgaaaacaagccttctgaaactgcacctgttacctcagctgagaatgataacaaggcttcagaaagtggacctgttgcctcagaaaacaagcct

SEQ ID NO: 6796 - DNA, 397 bp, Glycine max
  Clone ID: LIB3074-012-Q1-E1-H5
ggagtgcagtgatagagataagaaaatgtggcttgtgcagctctcaaccccatttctgaacggacatggtcattccaccacccttctctccaagcacagttcggcggtgactcagacccactgggccccaccgagtttcctgcctcaaatcaatgcgatgaagacaatgcaggggagagtggtgtgctccaccagcgacaagacggtggcagtggaggtggtgcggctggcccctcacccaaagtacaagaggcgcgtgaggaagaagaagaagtaccaggcccacgaccccgataaccaattcaaagtcggcgacatcgtccagctccagaagaccaggcccatcagcaagaccaaggcctttctcgcactccccgttcccaaaaaggcctccagc

SEQ ID NO: 6797 - DNA, 352 bp, Glycine max
  Clone ID: LIB3074-012-Q1-E1-H7
gagtgcacaagtgagtttgttgatcgagataactagaaacagtgtgatgaaaatgaaggtccttgttttcttcgttgctacaattttggtagcatggcaatgccatgcgtacgatatgttccctctccgaatgaacactggctatggtgcccgtactccggaggtgaaatgcgcaagttggaggcttgctgtggaagcacacaacatctttggctttgagaccattcctgaagagtgcgttgaagcaacaaaggaatacatccatggcgaacaatatagatcagactccaaaacagttaaccaacaagcttacttttatgccagaaacctcgaagtccatcccaaggacaca

SEQ ID NO: 6798 - DNA, 360 bp, Glycine max
  Clone ID: LIB3074-012-Q1-E1-H8
aaactcaggcctccaagaaggttcagttatctctttgatgaatgagggcgacgagatgtacatccgatcgtgaacgggttccattattgattgctaacatagtgtacattcagtgtaccattgatgatatgtagcttgttttgttgaaacagacttttgttttggcgacaactgaaatttcagggaaatacagtcaccactagatggtccagttttacatgcacatttatgagaagtcaaaccacatcgacattgtcacctaacttcatttcaatgatcgacgctttagacagttctcatagtgaaacctattccattaccaattttcatcactatgcataatatacccctttctccaac

SEQ ID NO: 6799 - DNA, 306 bp, Glycine max
  Clone ID: LIB3074-017-Q1-E1-A1
gggaaacggaaatatgattccgaatccttatcctgtttgcttcagtgcaaatggtttccgcctcgagcatcaatcccaacgatctcatgtatcgtacatcccgtctacctgatggtggtcgatatctcccattaaaggagggacctcttagaaacatcccactggtacccagattactggctccgcgagagattccatgatccacagtagcagtacgaccacgtttgccacatccaatttgacctagatgttcatgcttaacatgaatttcaaaggaaagaaggcaaataggtggtgtccttgagc

SEQ ID NO: 6800 - DNA, 228 bp, Glycine max
  Clone ID: LIB3074-017-Q1-E1-A10
ggcacaaggcatttggttgatcaatatacgtagaaccagagcgaggaagatcaacgccctgcaatactgccatccacaaaattcgcgggcagaaccatgctatggatcgcacatgatcccgcgacgggtttggactagctacagtacgcgtaggcctttcatcaaatacgccggtatgttgagtgatctagcatcatacaggatcataggttttctgcaccagtcttc

SEQ ID NO: 6801 - DNA, 240 bp, Glycine max
  Clone ID: LIB3074-017-Q1-E1-A11
attcagaggcttttggtttacgagtttatgccgaatcatagcgtggacgatcagctccctgcaagagtgccatcgacgatcatccggtgcggaacgatgttatcgatgtcgcaggatgcggtgaggggtttggcgtaccttcatcatgaaatgcattttcacctaatatttcgggattttaggacctccgtcatcttgcgtggaccacaatgtgaatgcgcagctttgtgattttggacg

SEQ ID NO: 6802 - DNA, 384 bp, Glycine max
  Clone ID: LIB3074-017-Q1-E1-A12
cactaacaatattgcttcctcgcagaagagttccatctgcaggctccaagctgaatttccaatagcacgcaggcattcacttcaaaggtttcttgagaagcgtcgtgacaggcttgggagcaaggcaccttatccttcctcatcaaccacaaaagtggctgacaacatagagaacaacttctgtgctgacaatgcaccagaactggtttccttgaaccgatctgaggaggaatttcagccaacggtctctgcctcttgagcataaccagtgtttgctccgttctatgttgtgtgatagtgtggaagactatgagtatgaatgtagaatcacagacactgatgtaattgtattacgttatgaagtctgtaactgtgttttatatg

SEQ ID NO: 6803 - DNA, 357 bp, Glycine max
  Clone ID: LIB3074-017-Q1-E1-A2
gcacaagtgagtttgttgatcgagatacctagaaagagtgtgatgaaaatgaaggtccttgttttcttcgttgctacaattttggtagcatgggaatgccatgcgtacgatatgttccctctccgaatgaacactggctatggtgcccgtactccggaggtgagatgcgcatgttggaagcttgctgtggaagcacacaacatctttggctttgagaccattcctgaatagtgcgttgtagcagcatacgaatacatccatggggatgcaaatagatcagactccagcacagttgacgtacaatcatacgtttatgccagagacctcgaagtctatcccagaggcacatttgtgttc

SEQ ID NO: 6804 - DNA, 440 bp, Glycine max
  Clone ID: LIB3074-017-Q1-E1-A3
acgggaagacgacagaaggggatagaagaagcagaaagagaagcattagcaaaagcaagaagaactagtctaagcagaaatggcctcttcagtgatggcatctgtggccctcaaacctgcccctttcactgttgagaagtcctcagttagaggccttccctccctctcaaggaactcctcttcattcagagttgtggccagtggtggcaagaagatcaagactgacaagccttatggaattaatggtggcatggctttgagggaaggagttgatgcatctggcaggaaaggaaagggaaagggcgtttaccagtttgtagacaaatacggtgctaatgtcgatggttacagtcctatctacgacaccaaggactggtctccaaccggtgatgtctacgctggcggtacgactggcttggctatctgggctgtgactctac

SEQ ID NO: 6805 - DNA, 410 bp, Glycine max
  Clone ID: LIB3074-017-Q1-E1-A4
gggagttagatacacacacatcacacaaagaaaaaaaaaaaaagaagctacattgcttcttgttggagacatcaaacatggcaactggtgccaccccagatggattattctggtcagtgtatgaatggtgcatatcctgctacgataactgcgtctagcgacgaccctaccaccgtaactgtggctgtgcactccataacaagtcacttattaattgcacgcacaagcttccaaggtgtaacaatgtgtcatgacctatgaagacggcatggagtgaatgaagcttggtcttggcagcttcttcttcttctccttctcaagttgcaactgggggaaggccacaaccaagtttggcaaacgttgaggaggaaaataagaattgctttagttaatgtttgacaataattaat

SEQ ID NO: 6806 - DNA, 396 bp, Glycine max
  Clone ID: LIB3074-017-Q1-E1-A6
ggacaccaacaccaaaacaaacccactaagatggcttcctttgtatccttcctagtgctgcttcttgcagcccttatcctcatgcctcaagggcttgctacttactacaaaccaattaagaagccaccagtgtacaagcctccagtgtacaagccaccagtgtacaaaccaccggtttataagccaaaaccaccggtttacaagccgaaaccaccggtttacaagccaccatataagaagccaccatacaagaaaccaccttatggaaagtaccctccagtagaggacaacacccacgcctaaagcaagcaatgaggtctattatctacttaataaataagaggaactgctttgtgttttctagcattgtgatttacaacttcgtagcaatgcata

SEQ ID NO: 6807 - DNA, 398 bp, Glycine max
  Clone ID: LIB3074-017-Q1-E1-A7
gacagctattcctcttaagcttgctactgagtttccacactgcataccttaggtcttccgaattcgaagttaatttgcaagatggctaaggaaaaggctcagatcaacattgtggtggttggtcatgtggaccctgaggaggcaaccaccattaacgagctgaagaagcctgttgtggagaaagaagctccagggcatgccatatgagggcatgcacgtacggcctcggaggggaaccagaaaattatgttaacaaaataatctggaaccctaatgtatcagtgtcatcatcagtgtgtagtttaagctagctttgctatggttacgttctttgagatgagagtcttgatgaacagtaccattctgatgtattgctttccttgaaagttaatgcatgc

SEQ ID NO: 6808 - DNA, 411 bp, Glycine max
  Clone ID: LIB3074-012-Q1-E1-H12
ggagagagagagagaggagaatggatgaaagatgagtaggtcatcaaggccggtgccgaagagatagagtccatggggagtcaccggagagaatcatcctgaacccaaagctcatcgctgcaatgaccgtgtcaatgacgttattcaggcttgctttgagggaaacccattcaagactgctccaggacctttcaagctcttctggcagtgcatgcgttccaaacccggtgaggaaccaacggccccatttacatatctggatttggagcctctaatgagagaaacggaatctgtgaaacctgagtagtgtcacttttacttacaaatgccttaacagccttggcactgcatggtcctttagtcggttctaaatttccctccgtgtggaattttttttttgagaaaaatatg

SEQ ID NO: 6809 - DNA, 415 bp, Glycine max
  Clone ID: LIB3074-012-Q1-E1-F4
aggaacgccgtcgtcgggatgctgcaacggagtgaagagcctcaatgccgccgccaagaccaccgccgaccgccagacggcgtgcaactgcctcaagtcggccgccagccaaatctccgacttcaacgccaacaacgccgcctcgctccccggcaaatgcggagtctccatcccctacaagatcagcacctccaccaactgcgctaccatcaaggtttgaagagaaagtcatggacgcaggaaaccggaaactactcactagtatatgagtagcattattaatattaagaataagatcgagggtgatgagggctccacttatatgcccctctcctcttgtatgagagatttgcattggatagctttaagttgtgttgcgttgttatttctctgtatgagttacacatagttatat

SEQ ID NO: 6810 - DNA, 350 bp, Glycine max
  Clone ID: LIB3074-012-Q1-E1-F6
tcagtacagcacaaaaaggggagtgtggtacagatccaacaagacaacagtttgaggttgaggatttgggattggtaaagcgatgcaatgcgctgcgtctcgtcatcatctctttcgagtcatccctcagtcatattctgccaatccagcattctcatccttccattcatacatacacacatctgatcgcgtatcatttctcccatggagtcttagcgcatcctcaaggatcctcatcgacctgctccatgacctaccgatttcttgcatggctagtctagtcgctgatgacatgttgcattagcaaccaatgattttgggtcctgctcacattccctaggctagatgtg

SEQ ID NO: 6811 - DNA, 377 bp, Glycine max
  Clone ID: LIB3074-012-Q1-E1-F8
gaaggtgcgagagtttgttgtgagctataaactagtttatcgtgaggagaatatgaacttgtctgttttcgttgttgctgcagtacttttggtaacatggccatgccatggcacatgctagtacaggttccctctccgagtgaaaattggctatggtgagcgttcttcggaggtaatgatgcacatgttttaagcttgctgtggcagcatacaacatctgagcctttaacaccattcctgaacagtgcgttgaatcatcattggactatattaatggcgaccactttaaatcagacgcgaacacagtttaccaacgagctttcgtttatgctagtgaacgcgaagtctatcacatcgacatatttatattcggcata

SEQ ID NO: 6812 - DNA, 406 bp, Glycine max
  unsure at all n locations
  Clone ID: LIB3074-012-Q1-E1-G1
ggcacaagtgagtttgttgatcgagataactagaaacagtgtgatgaaaatgaaggtccttgttttcttcgttgctacaattttggtagcatggcaatgccatgcgtacgatatgttccctctccgaatgaacactggctatggtgcccgtactccggaggtgaaatgcgcaagttggaggcttgctgtggaagcacacaacatctttggctttgagaccattcctgaagagtgcgttgaagcaacaaaggaatacatccatggcgaacaatatagatcagactccanaacagtttaacaacaagcttacttttatgccagagaactcgaagtccatcccaaagacacatttgtgttcagtatagatggcaccgtactctctaatattccatactacaaaaaacat

SEQ ID NO: 6813 - DNA, 298 bp, Glycine max
  Clone ID: LIB3074-012-Q1-E1-G11
gacacatactcatacactgcacactctctctacttaaacttcagcctttgcatatctctctctcttcatcattgtgctctagtaatcacactagtagtcagtagcagtagtacttgtacccataacataacaaccatggctaatgtgtcccttctccttttccttttgttcttgtctctctcatcaggagggaatttgatcatggctaatgggcagaaaacttggtgtgtggcaaagccttcatcagattaagcaagccttttgggcaaactcaattatgcctgttctcaagttgatt

SEQ ID NO: 6814 - DNA, 130 bp, Glycine max
  Clone ID: LIB3074-012-Q1-E1-G12
ggcacaagtgagtttgttgatcgagataactagaaacagtgtgatgaaaatgaaggtccttgttttcttcgttgctacaattttggtagcatggcaatgccatgcttccaaaagttccctcccccaattg

SEQ ID NO: 6815 - DNA, 410 bp, Glycine max
  unsure at all n locations
  Clone ID: LIB3074-012-Q1-E1-G2
gacatcacgacatcacatcgcagagaagaacagagagagatccatccatcaattccaatggccgatcagctcaccgacgaacagatctccgagttcaaggaagccttcagcctcttcgacaaggacggggatggttgtattaccaccaaggaacttgggaccgtgatgcggtcacttggccagaacccaactgaggcagagctgcaggacatgataaatgaggttgatgctgatgggaatggtaccattgatttcccagaattcctgaatctcatggctcgcaagatgaaagacactgattcagaggaggagctganggaggctttccgcgtgtttgacaaggatcagaatggcttcatctctgcagcggagctccgcatgtgatgnacaatctcggtgagaagctgacc

SEQ ID NO: 6816 - DNA, 406 bp, Glycine max
  Clone ID: LIB3074-012-Q1-E1-G3
ggactgagcagccacccacccacccttcagcgaagagatggaggcacaatcttgtgatgctaggccacatttgaaggccacatttcgtcttggctcagaatcatattctgttcaggcaaacaaaggttccttatcagaacaattggtttcactgaaagaggagagcatgaccatattgaaggatttcataacaaagcataatgttcctcatgatgtcccagacgagccattagaagcttcttcagatgatgatgatattcccgagaagcctcaagggaagtctaagaaaaccaagttgacttagctttgacatgtggtttgatcggtctgaatcatttgatgtatgtattgtatgattgaacttttagttagtttattgaaaaatttacgaaagtagcagtttggc

SEQ ID NO: 6817 - DNA, 394 bp, Glycine max
  Clone ID: LIB3074-012-Q1-E1-G5
gaagaagaactagtctaagcagaaatggcctcttcagtgatggcatctgtggccctcaaacctgcccctttcactgttgagaagtcctcagttagaggccttccctccctctcaaggaactcctcttcattcagagttgtggccagtggtggcaagaagatcaagactgacaagccttatggaattaatggtggcatggctttgagggaaggagttgatgcatctggcaggaagggaaagggaaagggcgtttaccagtttgtagacaaatacggtgctaatgtcgatggttacagtcctatctacgacaccaaggactggtctccaaccggcgatgtctacgctggcggtacgactggcttggctatctgggctgtgactctacttggtcttc

SEQ ID NO: 6818 - DNA, 352 bp, Glycine max
  Clone ID: LIB3074-012-Q1-E1-G6
gaagaagaactagtctaagcataaatggcctcttcagtgatggcatctgtggccctcaaacctgcccctttcagggttgagaagtcctcagttagaggccttccctccctctcaaggaactcctcttcattcagagttgtggccagtggtggcaagaagatcaagactgacaagccttatggaattaatggtggcatggctttgagggaacgagttgatgcatctggcatgaatggaaagggaaacggcgtttaccagtttgtagacaaatacggtgctaatgtcgatggttacagtcctatctacgaccccaacgactggtctccaaccggggatgtctaccctgggggta

SEQ ID NO: 6819 - DNA, 387 bp, Glycine max
  Clone ID: LIB3074-012-Q1-E1-G7
gggaacggacagaaacagataagggcgttctctttaccagctaacatttccagtgttcccatgtctcctgcccactgaagtcgaacccctaatggcttctcaagttcttcttcaacaggcactgtttgcccccaagctaagtttcccttcttcttctcgtaacgtcgcgttaatttctagggttccttccaccccaatttcatggcgttgcactcctctcattgctaagcctagtttcgctgtgagagctgactccaacgtcgaaagcgctggtgaagccaccgaggatgttccttcgtataatgttgatgaagtttcggaaggcgaaagagaacaagtttcggattctgaagctccaaaatctcccagaaaaccccgagtcaagct

SEQ ID NO: 6820 - DNA, 405 bp, Glycine max
  Clone ID: LIB3074-012-Q1-E1-G8
gacaacatcatcatcaacaacaagcagatcaatctctctctcaaccataatagtcatgggtttgaatgaggattttgagcagtatgctgagaaagcaaagactttgccaccgactcaatcaaacgaagacttgcctatcctttatggattgtacaaacaggccaccgttggacctgtcaacaccagccgtcctggaatgttcaacatgagggacagagctaaatgggatgcatggaaggctgttgaagggaaatccaaggacgaagcaatgggtgattacatcattaaggtgaaacagctgctggaagcagctggcttgcctgcttgataacattgtcatgccttgcttcctgattctgtgctagaagttcacaacagtttggaaataaacaattgcagtgtttg

SEQ ID NO: 6821 - DNA, 411 bp, Glycine max
  Clone ID: LIB3074-012-Q1-E1-G9
gatagaagaagcagaatgagaagcatcagcaaaagcaagaagaactagtctaagcagaaatggcctcttcagtgatggcatctgtgggcctcaaacctgcccctttcactgttgagaagtcctcagttagaggccttccctccctctcaaggaactcctcttcattcagagttgtggtcagtggtggcaagaagatcaagactgacaagccttatggaattaatggtgacatggctttgagggaaggagttgatgcatctggcaggaaaggaaacggaaagggcgtttaccagtttgtagacaaatacagtgctaatgtcgatggttacagtcctatctacgacaccaacgactggtctccatccggtgatgtctacgctggcggtacgactggcttggctatctgggctg

SEQ ID NO: 6822 - DNA, 369 bp, Glycine max
  Clone ID: LIB3074-012-Q1-E1-H10
gacacaactgaacaagataagctatccatagcagccaaagaaatgaagagtaccttgttcgccctctttctactttgtgccctcacctcttacctaccttcagccaccgctggtgatgtggtcgacactgatggtaatcctgttgaaaatggaggcacatactttgtgttgccaactataatattaaacggcggtggaatagaatatgccacatttggaaatgaaacttgccctgtcactgttgcgcaatctcgcgatcagttctgcaagggctttccgataaccatttcatccccagcccgaatccgtcacatcagcgaaggccttagtttgaacattgggttcactttcgcatcccgtgttcccccg

SEQ ID NO: 6823 - DNA, 109 bp, Glycine max
  Clone ID: LIB3074-012-Q1-E1-H11
gacacaactgaacgggatcagctatctatagcagccaggagggtgagcagtaccttgttcgccctctttgcgaggtgtgtgccctcagctcgtagcgtaccttcagcca

SEQ ID NO: 6824 - DNA, 412 bp, Glycine max
  unsure at all n locations
  Clone ID: LIB3074-012-Q1-E1-F3
ggtctaaggggtgccctgagatcacattgaacaatggtgaaggctgtggccgttcttggcagcagtgagggtgtcactggaactattcacttcgttcaggagggaagtggtccaaccaccgtaactggatctcttgccggtcttaagcctggtctccatggtttccatgtccatgccttgggggacactaccaatggttgcctctcaactggatcacatttcaatcctaataacaaggagcatggtgcccctgaggatgagaatcgtcatgctggtgatcttgggaatgttaatgtcggtgatgatggtactgtcagcttcactattactgacagccagattcctctcactggaccaaacaacatcatangaanggcggttgttgtccatgctgatcctgatgatcttggga

(The sequence listing continues in the following parts.)
